United States Patent Application Publication US 2007/0048756 A1 - sequence listing, part 29

SEQ ID NO: 1017763 - DNA, 33 bp, Homo sapien
acaacgacaggccacaatggagaggtggagggg

SEQ ID NO: 1017764 - DNA, 33 bp, Homo sapien
acaacgacaggccacagtggagaggtggagggg

SEQ ID NO: 1017765 - DNA, 33 bp, Homo sapien
gggttcttggccctgaagcggtgacaaatgctc

SEQ ID NO: 1017766 - DNA, 33 bp, Homo sapien
gggttcttggccctgacgcggtgacaaatgctc

SEQ ID NO: 1017767 - DNA, 33 bp, Homo sapien
tgcagacagacacatacagacccatctgacctt

SEQ ID NO: 1017768 - DNA, 33 bp, Homo sapien
tgcagacagacacatatagacccatctgacctt

SEQ ID NO: 1017769 - DNA, 33 bp, Homo sapien
acactgggacacttcaactccttctagggtcta

SEQ ID NO: 1017770 - DNA, 33 bp, Homo sapien
acactgggacacttcagctccttctagggtcta

SEQ ID NO: 1017771 - DNA, 33 bp, Homo sapien
tagaataaatatatgcacagctttagtggatac

SEQ ID NO: 1017772 - DNA, 33 bp, Homo sapien
tagaataaatatatgcccagctttagtggatac

SEQ ID NO: 1017773 - DNA, 33 bp, Homo sapien
agtttccatactcatcactgtgcttcactcccc

SEQ ID NO: 1017774 - DNA, 33 bp, Homo sapien
agtttccatactcatcgctgtgcttcactcccc

SEQ ID NO: 1017775 - DNA, 33 bp, Homo sapien
tcaaactcaatctgtacgcccttaactgtactc

SEQ ID NO: 1017776 - DNA, 33 bp, Homo sapien
tcaaactcaatctgtatgcccttaactgtactc

SEQ ID NO: 1017777 - DNA, 33 bp, Homo sapien
agcgtcatagatcccaaaggaagagaatgtttg

SEQ ID NO: 1017778 - DNA, 33 bp, Homo sapien
agcgtcatagatcccagaggaagagaatgtttg

SEQ ID NO: 1017779 - DNA, 33 bp, Homo sapien
ggaagagactgggtaccgggtattcagatgtgg

SEQ ID NO: 1017780 - DNA, 33 bp, Homo sapien
ggaagagactgggtactgggtattcagatgtgg

SEQ ID NO: 1017781 - DNA, 33 bp, Homo sapien
cctgcccgctcctgtccatccgcaggtcttcct

SEQ ID NO: 1017782 - DNA, 33 bp, Homo sapien
cctgcccgctcctgtctatccgcaggtcttcct

SEQ ID NO: 1017783 - DNA, 33 bp, Homo sapien
tggagtagggaaaggacgtctcaaagaggttgt

SEQ ID NO: 1017784 - DNA, 33 bp, Homo sapien
tggagtagggaaaggatgtctcaaagaggttgt

SEQ ID NO: 1017785 - DNA, 33 bp, Homo sapien
cccaggtatcttagtactacagagaagagctgg

SEQ ID NO: 1017786 - DNA, 33 bp, Homo sapien
cccaggtatcttagtattacagagaagagctgg

SEQ ID NO: 1017787 - DNA, 33 bp, Homo sapien
gacacataatcaatcacacagccaatcactcac

SEQ ID NO: 1017788 - DNA, 33 bp, Homo sapien
gacacataatcaatcatacagccaatcactcac

SEQ ID NO: 1017789 - DNA, 33 bp, Homo sapien
cttcctatccttttgcaaatcctctattcatgt

SEQ ID NO: 1017790 - DNA, 33 bp, Homo sapien
cttcctatccttttgcgaatcctctattcatgt

SEQ ID NO: 1017791 - DNA, 33 bp, Homo sapien
actgcccagacaggaacgccagctctgcctttt

SEQ ID NO: 1017792 - DNA, 33 bp, Homo sapien
actgcccagacaggaatgccagctctgcctttt

SEQ ID NO: 1017793 - DNA, 33 bp, Homo sapien
tatctgactggagaaacgcctgctgattcctac

SEQ ID NO: 1017794 - DNA, 33 bp, Homo sapien
tatctgactggagaaatgcctgctgattcctac

SEQ ID NO: 1017795 - DNA, 33 bp, Homo sapien
tccaagaagttcattacgcctggcctgctatgt

SEQ ID NO: 1017796 - DNA, 33 bp, Homo sapien
tccaagaagttcattatgcctggcctgctatgt

SEQ ID NO: 1017797 - DNA, 33 bp, Homo sapien
ccactatctcttccacaaaatgataacatacac

SEQ ID NO: 1017798 - DNA, 33 bp, Homo sapien
ccactatctcttccacgaaatgataacatacac

SEQ ID NO: 1017799 - DNA, 33 bp, Homo sapien
atactcaggctcctacagaaggaaaagttgatg

SEQ ID NO: 1017800 - DNA, 33 bp, Homo sapien
atactcaggctcctacggaaggaaaagttgatg

SEQ ID NO: 1017801 - DNA, 33 bp, Homo sapien
ctggctgggatccagaatactttagcccattta

SEQ ID NO: 1017802 - DNA, 33 bp, Homo sapien
ctggctgggatccagactactttagcccattta

SEQ ID NO: 1017803 - DNA, 33 bp, Homo sapien
gaaaaatgctatgttcccatctaccccaagagt

SEQ ID NO: 1017804 - DNA, 33 bp, Homo sapien
gaaaaatgctatgttctcatctaccccaagagt

SEQ ID NO: 1017805 - DNA, 33 bp, Homo sapien
acttatctcaaactaaatggacagtcctcagct

SEQ ID NO: 1017806 - DNA, 33 bp, Homo sapien
acttatctcaaactaagtggacagtcctcagct

SEQ ID NO: 1017807 - DNA, 33 bp, Homo sapien
aatgtgtcacttccaaagtcaggcctgctacaa

SEQ ID NO: 1017808 - DNA, 33 bp, Homo sapien
aatgtgtcacttccaaggtcaggcctgctacaa

SEQ ID NO: 1017809 - DNA, 33 bp, Homo sapien
tcagctgcccagtcaacgtatgcagatggcata

SEQ ID NO: 1017810 - DNA, 33 bp, Homo sapien
tcagctgcccagtcaatgtatgcagatggcata

SEQ ID NO: 1017811 - DNA, 33 bp, Homo sapien
gttcctccggcctatccaccccttcttatgagg

SEQ ID NO: 1017812 - DNA, 33 bp, Homo sapien
gttcctccggcctatctaccccttcttatgagg

SEQ ID NO: 1017813 - DNA, 33 bp, Homo sapien
ggccaaggtggttgtacgtatctggtctgtgtg

SEQ ID NO: 1017814 - DNA, 33 bp, Homo sapien
ggccaaggtggttgtatgtatctggtctgtgtg

SEQ ID NO: 1017815 - DNA, 33 bp, Homo sapien
gggctcctgggtagtcaaagttaagtttaacag

SEQ ID NO: 1017816 - DNA, 33 bp, Homo sapien
gggctcctgggtagtcgaagttaagtttaacag

SEQ ID NO: 1017817 - DNA, 33 bp, Homo sapien
gagacaggaaaggatgaaaagcaaatagaaggt

SEQ ID NO: 1017818 - DNA, 33 bp, Homo sapien
gagacaggaaaggatggaaagcaaatagaaggt

SEQ ID NO: 1017819 - DNA, 33 bp, Homo sapien
acagagaggacatataagccttttgcttgggtt

SEQ ID NO: 1017820 - DNA, 33 bp, Homo sapien
acagagaggacatatatgccttttgcttgggtt

SEQ ID NO: 1017821 - DNA, 33 bp, Homo sapien
gaagcctccgcaacctaacccttggagaaatgc

SEQ ID NO: 1017822 - DNA, 33 bp, Homo sapien
gaagcctccgcaaccttacccttggagaaatgc

SEQ ID NO: 1017823 - DNA, 33 bp, Homo sapien
gcggaggcttcagtcaaacagatcaataaaatg

SEQ ID NO: 1017824 - DNA, 33 bp, Homo sapien
gcggaggcttcagtcagacagatcaataaaatg

SEQ ID NO: 1017825 - DNA, 33 bp, Homo sapien
agaacccataaccccactctaattatgagaaaa

SEQ ID NO: 1017826 - DNA, 33 bp, Homo sapien
agaacccataaccccagtctaattatgagaaaa

SEQ ID NO: 1017827 - DNA, 33 bp, Homo sapien
aaagtagaatagataaactaatggtttggaggc

SEQ ID NO: 1017828 - DNA, 33 bp, Homo sapien
aaagtagaatagataacctaatggtttggaggc

SEQ ID NO: 1017829 - DNA, 33 bp, Homo sapien
cagggacttaaggcagaagtggaaaaactagac

SEQ ID NO: 1017830 - DNA, 33 bp, Homo sapien
cagggacttaaggcagtagtggaaaaactagac

SEQ ID NO: 1017831 - DNA, 33 bp, Homo sapien
gtaagagctgattaaacgtagccatcatgacat

SEQ ID NO: 1017832 - DNA, 33 bp, Homo sapien
gtaagagctgattaaatgtagccatcatgacat

SEQ ID NO: 1017833 - DNA, 33 bp, Homo sapien
acactggaaacaagtaagaatagaacatctcag

SEQ ID NO: 1017834 - DNA, 33 bp, Homo sapien
acactggaaacaagtaggaatagaacatctcag

SEQ ID NO: 1017835 - DNA, 33 bp, Homo sapien
aaattctaatttcacaaacattactcggtgttc

SEQ ID NO: 1017836 - DNA, 33 bp, Homo sapien
aaattctaatttcacagacattactcggtgttc

SEQ ID NO: 1017837 - DNA, 33 bp, Homo sapien
acccacataaagtagacaattcagtggtttctg

SEQ ID NO: 1017838 - DNA, 33 bp, Homo sapien
acccacataaagtagataattcagtggtttctg

SEQ ID NO: 1017839 - DNA, 33 bp, Homo sapien
tgctccactatttgatgaactagagctgtctgc

SEQ ID NO: 1017840 - DNA, 33 bp, Homo sapien
tgctccactatttgattaactagagctgtctgc

SEQ ID NO: 1017841 - DNA, 33 bp, Homo sapien
aaatggagtcactgatgagtcactgtgttctca

SEQ ID NO: 1017842 - DNA, 33 bp, Homo sapien
aaatggagtcactgattagtcactgtgttctca

SEQ ID NO: 1017843 - DNA, 33 bp, Homo sapien
ggattgtggttaacataaagtttaggctagagc

SEQ ID NO: 1017844 - DNA, 33 bp, Homo sapien
ggattgtggttaacatgaagtttaggctagagc

SEQ ID NO: 1017845 - DNA, 33 bp, Homo sapien
agggaagaacaaaccacgtagacacacttagtc

SEQ ID NO: 1017846 - DNA, 33 bp, Homo sapien
agggaagaacaaaccaggtagacacacttagtc

SEQ ID NO: 1017847 - DNA, 33 bp, Homo sapien
gtgtgctcttaaagaacgtcagggtcaggaaga

SEQ ID NO: 1017848 - DNA, 33 bp, Homo sapien
gtgtgctcttaaagaatgtcagggtcaggaaga

SEQ ID NO: 1017849 - DNA, 33 bp, Homo sapien
ctgctcaaaggatacactagacagagacaagat

SEQ ID NO: 1017850 - DNA, 33 bp, Homo sapien
ctgctcaaaggatacagtagacagagacaagat

SEQ ID NO: 1017851 - DNA, 33 bp, Homo sapien
attctctctcttgaaaagttgagacctgaacct

SEQ ID NO: 1017852 - DNA, 33 bp, Homo sapien
attctctctcttgaaaggttgagacctgaacct

SEQ ID NO: 1017853 - DNA, 33 bp, Homo sapien
atcaaatggaaattctcacactaaaaaatagga

SEQ ID NO: 1017854 - DNA, 33 bp, Homo sapien
atcaaatggaaattctgacactaaaaaatagga

SEQ ID NO: 1017855 - DNA, 33 bp, Homo sapien
tccctgaggttctcagacaatctttcaggaaca

SEQ ID NO: 1017856 - DNA, 33 bp, Homo sapien
tccctgaggttctcaggcaatctttcaggaaca

SEQ ID NO: 1017857 - DNA, 33 bp, Homo sapien
caggacagaggaaaacaaatcgagatagttctc

SEQ ID NO: 1017858 - DNA, 33 bp, Homo sapien
caggacagaggaaaacgaatcgagatagttctc

SEQ ID NO: 1017859 - DNA, 33 bp, Homo sapien
ttaggaggctgctcatcagactttcacagctac

SEQ ID NO: 1017860 - DNA, 33 bp, Homo sapien
ttaggaggctgctcatgagactttcacagctac

SEQ ID NO: 1017861 - DNA, 33 bp, Homo sapien
gacacacctggtggaaaaatgtaaaactgaaca

SEQ ID NO: 1017862 - DNA, 33 bp, Homo sapien
gacacacctggtggaagaatgtaaaactgaaca

SEQ ID NO: 1017863 - DNA, 33 bp, Homo sapien
tttaagggtaacccaactgagagcccactctag

SEQ ID NO: 1017864 - DNA, 33 bp, Homo sapien
tttaagggtaacccaattgagagcccactctag

SEQ ID NO: 1017865 - DNA, 33 bp, Homo sapien
tgggactacaaatcaccggttctgcagtattcc

SEQ ID NO: 1017866 - DNA, 33 bp, Homo sapien
tgggactacaaatcactggttctgcagtattcc

SEQ ID NO: 1017867 - DNA, 33 bp, Homo sapien
aagtggtgtggtataaactgccctgtacagaac

SEQ ID NO: 1017868 - DNA, 33 bp, Homo sapien
aagtggtgtggtataagctgccctgtacagaac

SEQ ID NO: 1017869 - DNA, 33 bp, Homo sapien
caaaaattaagcttgggacctaacaggagctgt

SEQ ID NO: 1017870 - DNA, 33 bp, Homo sapien
caaaaattaagcttggtacctaacaggagctgt

SEQ ID NO: 1017871 - DNA, 33 bp, Homo sapien
tggaggtattaggttccaagacagtgaaagact

SEQ ID NO: 1017872 - DNA, 33 bp, Homo sapien
tggaggtattaggttctaagacagtgaaagact

SEQ ID NO: 1017873 - DNA, 33 bp, Homo sapien
ttactccccacaatcccgcattgggtagtaatc

SEQ ID NO: 1017874 - DNA, 33 bp, Homo sapien
ttactccccacaatcctgcattgggtagtaatc

SEQ ID NO: 1017875 - DNA, 33 bp, Homo sapien
agttgcagcctatctcccccactgattgtaaca

SEQ ID NO: 1017876 - DNA, 33 bp, Homo sapien
agttgcagcctatctctcccactgattgtaaca

SEQ ID NO: 1017877 - DNA, 33 bp, Homo sapien
ccacccctaagaggacaaatccaatcatcaaat

SEQ ID NO: 1017878 - DNA, 33 bp, Homo sapien
ccacccctaagaggacgaatccaatcatcaaat

SEQ ID NO: 1017879 - DNA, 33 bp, Homo sapien
aagaaattaagcaagcaacaccagtaccacatc

SEQ ID NO: 1017880 - DNA, 33 bp, Homo sapien
aagaaattaagcaagcgacaccagtaccacatc

SEQ ID NO: 1017881 - DNA, 33 bp, Homo sapien
tgaggtgatggattttaaaaaaaaagttgatct

SEQ ID NO: 1017882 - DNA, 33 bp, Homo sapien
tgaggtgatggatttttaaaaaaaagttgatct

SEQ ID NO: 1017883 - DNA, 33 bp, Homo sapien
tgacttattctgggtaagggtttgtctttgcta

SEQ ID NO: 1017884 - DNA, 33 bp, Homo sapien
tgacttattctgggtatgggtttgtctttgcta

SEQ ID NO: 1017885 - DNA, 33 bp, Homo sapien
aacagactgagacaaacggccagtggttcatcc

SEQ ID NO: 1017886 - DNA, 33 bp, Homo sapien
aacagactgagacaaagggccagtggttcatcc

SEQ ID NO: 1017887 - DNA, 33 bp, Homo sapien
tgtgatggttctgcaaaatacacaggtagtcca

SEQ ID NO: 1017888 - DNA, 33 bp, Homo sapien
tgtgatggttctgcaacatacacaggtagtcca

SEQ ID NO: 1017889 - DNA, 33 bp, Homo sapien
caaggatataaggaaactgctgcccttaactga

SEQ ID NO: 1017890 - DNA, 33 bp, Homo sapien
caaggatataaggaaagtgctgcccttaactga

SEQ ID NO: 1017891 - DNA, 33 bp, Homo sapien
tttccaattgcctcccacagggtgtagtactat

SEQ ID NO: 1017892 - DNA, 33 bp, Homo sapien
tttccaattgcctcccgcagggtgtagtactat

SEQ ID NO: 1017893 - DNA, 33 bp, Homo sapien
tctaggggcccttgctcaagtgttctgttgggg

SEQ ID NO: 1017894 - DNA, 33 bp, Homo sapien
tctaggggcccttgctgaagtgttctgttgggg

SEQ ID NO: 1017895 - DNA, 33 bp, Homo sapien
taaacaggttacagaaattcggctagcactaag

SEQ ID NO: 1017896 - DNA, 33 bp, Homo sapien
taaacaggttacagaatttcggctagcactaag

SEQ ID NO: 1017897 - DNA, 33 bp, Homo sapien
aaaaccagagagggtcccaagtacaagtcgtct

SEQ ID NO: 1017898 - DNA, 33 bp, Homo sapien
aaaaccagagagggtctcaagtacaagtcgtct

SEQ ID NO: 1017899 - DNA, 33 bp, Homo sapien
gaaaaagctaatcataactgggcaccacaaact

SEQ ID NO: 1017900 - DNA, 33 bp, Homo sapien
gaaaaagctaatcatatctgggcaccacaaact

SEQ ID NO: 1017901 - DNA, 33 bp, Homo sapien
gtacaggcatggataacgaatctctacatatct

SEQ ID NO: 1017902 - DNA, 33 bp, Homo sapien
gtacaggcatggataaggaatctctacatatct

SEQ ID NO: 1017903 - DNA, 33 bp, Homo sapien
ggtattaaggctaagaagtgggggacagggccc

SEQ ID NO: 1017904 - DNA, 33 bp, Homo sapien
ggtattaaggctaagaggtgggggacagggccc

SEQ ID NO: 1017905 - DNA, 33 bp, Homo sapien
ggagccctatagttgaagaaatgcccatctgcg

SEQ ID NO: 1017906 - DNA, 33 bp, Homo sapien
ggagccctatagttgaggaaatgcccatctgcg

SEQ ID NO: 1017907 - DNA, 33 bp, Homo sapien
ctgtgtagacacacaaaacctgggaaattatca

SEQ ID NO: 1017908 - DNA, 33 bp, Homo sapien
ctgtgtagacacacaagacctgggaaattatca

SEQ ID NO: 1017909 - DNA, 33 bp, Homo sapien
ttgataagcccttgaaagtttttatagtagggg

SEQ ID NO: 1017910 - DNA, 33 bp, Homo sapien
ttgataagcccttgaatgtttttatagtagggg

SEQ ID NO: 1017911 - DNA, 33 bp, Homo sapien
gatcaaaatgttcatacaaatatagacagtaaa

SEQ ID NO: 1017912 - DNA, 33 bp, Homo sapien
gatcaaaatgttcatagaaatatagacagtaaa

SEQ ID NO: 1017913 - DNA, 33 bp, Homo sapien
ctcacagaaacctacacctactgggttcaagca

SEQ ID NO: 1017914 - DNA, 33 bp, Homo sapien
ctcacagaaacctacatctactgggttcaagca

SEQ ID NO: 1017915 - DNA, 33 bp, Homo sapien
cctacaatagactgagaatcagacaagactccc

SEQ ID NO: 1017916 - DNA, 33 bp, Homo sapien
cctacaatagactgagtatcagacaagactccc

SEQ ID NO: 1017917 - DNA, 33 bp, Homo sapien
tcacatcttaaccttacgtctctagccagttcc

SEQ ID NO: 1017918 - DNA, 33 bp, Homo sapien
tcacatcttaaccttatgtctctagccagttcc

SEQ ID NO: 1017919 - DNA, 33 bp, Homo sapien
gctacactctagaccaatagttctcaaatgttt

SEQ ID NO: 1017920 - DNA, 33 bp, Homo sapien
gctacactctagaccagtagttctcaaatgttt

SEQ ID NO: 1017921 - DNA, 33 bp, Homo sapien
aatgtcacccagtagaagtaaggaagttaagga

SEQ ID NO: 1017922 - DNA, 33 bp, Homo sapien
aatgtcacccagtagacgtaaggaagttaagga

SEQ ID NO: 1017923 - DNA, 33 bp, Homo sapien
tactgcacttacttgaaggattttcccaggttt

SEQ ID NO: 1017924 - DNA, 33 bp, Homo sapien
tactgcacttacttgagggattttcccaggttt

SEQ ID NO: 1017925 - DNA, 33 bp, Homo sapien
ttctcatacacactcaaatgcctatcagcccaa

SEQ ID NO: 1017926 - DNA, 33 bp, Homo sapien
ttctcatacacactcacatgcctatcagcccaa

SEQ ID NO: 1017927 - DNA, 33 bp, Homo sapien
tcaagctcaggaacataaggagcaacacctcct

SEQ ID NO: 1017928 - DNA, 33 bp, Homo sapien
tcaagctcaggaacatgaggagcaacacctcct

SEQ ID NO: 1017929 - DNA, 33 bp, Homo sapien
cacaagctccataccacaaattcttggctcgac

SEQ ID NO: 1017930 - DNA, 33 bp, Homo sapien
cacaagctccataccataaattcttggctcgac

SEQ ID NO: 1017931 - DNA, 33 bp, Homo sapien
agtgaagagggcaactcaaaaggctggataaag

SEQ ID NO: 1017932 - DNA, 33 bp, Homo sapien
agtgaagagggcaactgaaaaggctggataaag

SEQ ID NO: 1017933 - DNA, 33 bp, Homo sapien
tgcccggtcttaaatacagtccagcaaacagcc

SEQ ID NO: 1017934 - DNA, 33 bp, Homo sapien
tgcccggtcttaaatagagtccagcaaacagcc

SEQ ID NO: 1017935 - DNA, 33 bp, Homo sapien
gtcttggctcagtataataaggatgtgacaagt

SEQ ID NO: 1017936 - DNA, 33 bp, Homo sapien
gtcttggctcagtatagtaaggatgtgacaagt

SEQ ID NO: 1017937 - DNA, 33 bp, Homo sapien
caaaaccccaaaccacgggtgcataagatggtc

SEQ ID NO: 1017938 - DNA, 33 bp, Homo sapien
caaaaccccaaaccactggtgcataagatggtc

SEQ ID NO: 1017939 - DNA, 33 bp, Homo sapien
cttggttacctacaaaagtcagaggacaatagt

SEQ ID NO: 1017940 - DNA, 33 bp, Homo sapien
cttggttacctacaaaggtcagaggacaatagt

SEQ ID NO: 1017941 - DNA, 33 bp, Homo sapien
caatatagatgagtgaaagaatgtaatttctta

SEQ ID NO: 1017942 - DNA, 33 bp, Homo sapien
caatatagatgagtgagagaatgtaatttctta

SEQ ID NO: 1017943 - DNA, 33 bp, Homo sapien
atgaaataatcctgccacaaaaagattcctccc

SEQ ID NO: 1017944 - DNA, 33 bp, Homo sapien
atgaaataatcctgccgcaaaaagattcctccc

SEQ ID NO: 1017945 - DNA, 33 bp, Homo sapien
ttccccaagagcaatgaaatagtctgttaaaag

SEQ ID NO: 1017946 - DNA, 33 bp, Homo sapien
ttccccaagagcaatgcaatagtctgttaaaag

SEQ ID NO: 1017947 - DNA, 33 bp, Homo sapien
aagaagttgagaaaacactagttcagtacaacc

SEQ ID NO: 1017948 - DNA, 33 bp, Homo sapien
aagaagttgagaaaacgctagttcagtacaacc

SEQ ID NO: 1017949 - DNA, 33 bp, Homo sapien
atcgaacccggatcgccacatgtgaaagtgcaa

SEQ ID NO: 1017950 - DNA, 33 bp, Homo sapien
atcgaacccggatcgctacatgtgaaagtgcaa

SEQ ID NO: 1017951 - DNA, 33 bp, Homo sapien
ggagaagagacctgaacggcccactcaagtcca

SEQ ID NO: 1017952 - DNA, 33 bp, Homo sapien
ggagaagagacctgaatggcccactcaagtcca

SEQ ID NO: 1017953 - DNA, 33 bp, Homo sapien
aaagaatacttggaccaaagagcaccaaaggag

SEQ ID NO: 1017954 - DNA, 33 bp, Homo sapien
aaagaatacttggaccgaagagcaccaaaggag

SEQ ID NO: 1017955 - DNA, 33 bp, Homo sapien
tgacttatggcaacccaaacttctattaagtgt

SEQ ID NO: 1017956 - DNA, 33 bp, Homo sapien
tgacttatggcaacccgaacttctattaagtgt

SEQ ID NO: 1017957 - DNA, 33 bp, Homo sapien
attatctgtatatgaaacccctgcaatatggca

SEQ ID NO: 1017958 - DNA, 33 bp, Homo sapien
attatctgtatatgaagcccctgcaatatggca

SEQ ID NO: 1017959 - DNA, 33 bp, Homo sapien
ctataatgctgtccacaaatatatcctaagcaa

SEQ ID NO: 1017960 - DNA, 33 bp, Homo sapien
ctataatgctgtccacgaatatatcctaagcaa

SEQ ID NO: 1017961 - DNA, 33 bp, Homo sapien
tgaactgtaaaacttcactcacatagcatacac

SEQ ID NO: 1017962 - DNA, 33 bp, Homo sapien
tgaactgtaaaacttcgctcacatagcatacac

SEQ ID NO: 1017963 - DNA, 33 bp, Homo sapien
agaggtatcgttccagaaaggggagtttacaag

SEQ ID NO: 1017964 - DNA, 33 bp, Homo sapien
agaggtatcgttccaggaaggggagtttacaag

SEQ ID NO: 1017965 - DNA, 33 bp, Homo sapien
agccaccgcgtctggtgaagtggttaatttaga

SEQ ID NO: 1017966 - DNA, 33 bp, Homo sapien
agccaccgcgtctggttaagtggttaatttaga

SEQ ID NO: 1017967 - DNA, 33 bp, Homo sapien
ctatgctaggttttaaataaggaacatttgtaa

SEQ ID NO: 1017968 - DNA, 33 bp, Homo sapien
ctatgctaggttttaattaaggaacatttgtaa

SEQ ID NO: 1017969 - DNA, 33 bp, Homo sapien
ctatattgcttaattccaagggctttgtgagat

SEQ ID NO: 1017970 - DNA, 33 bp, Homo sapien
ctatattgcttaattctaagggctttgtgagat

SEQ ID NO: 1017971 - DNA, 33 bp, Homo sapien
tttataaaatgtactgacactgttaaatactgt

SEQ ID NO: 1017972 - DNA, 33 bp, Homo sapien
tttataaaatgtactggcactgttaaatactgt

SEQ ID NO: 1017973 - DNA, 33 bp, Homo sapien
tattagtaacaattgaagtcataggaatggaaa

SEQ ID NO: 1017974 - DNA, 33 bp, Homo sapien
tattagtaacaattgatgtcataggaatggaaa

SEQ ID NO: 1017975 - DNA, 33 bp, Homo sapien
atggaacaaagaaaaaaagagattcaaggcaga

SEQ ID NO: 1017976 - DNA, 33 bp, Homo sapien
atggaacaaagaaaaacagagattcaaggcaga

SEQ ID NO: 1017977 - DNA, 33 bp, Homo sapien
ccactcccaagtcatacgcaagagaagtgaaaa

SEQ ID NO: 1017978 - DNA, 33 bp, Homo sapien
ccactcccaagtcatatgcaagagaagtgaaaa

SEQ ID NO: 1017979 - DNA, 33 bp, Homo sapien
gcaatagaatatggtacaaatgtcagaggtaga

SEQ ID NO: 1017980 - DNA, 33 bp, Homo sapien
gcaatagaatatggtataaatgtcagaggtaga

SEQ ID NO: 1017981 - DNA, 33 bp, Homo sapien
ttttgtacgcattaaccgtccctaatctcctct

SEQ ID NO: 1017982 - DNA, 33 bp, Homo sapien
ttttgtacgcattaactgtccctaatctcctct

SEQ ID NO: 1017983 - DNA, 33 bp, Homo sapien
ttgaatataggatagacactgatgacattataa

SEQ ID NO: 1017984 - DNA, 33 bp, Homo sapien
ttgaatataggatagatactgatgacattataa

SEQ ID NO: 1017985 - DNA, 33 bp, Homo sapien
tattcctaaaagctaaagaaagatgaagcactc

SEQ ID NO: 1017986 - DNA, 33 bp, Homo sapien
tattcctaaaagctaaggaaagatgaagcactc

SEQ ID NO: 1017987 - DNA, 33 bp, Homo sapien
cttttaggaatagtcaaccttcctacaaaatta

SEQ ID NO: 1017988 - DNA, 33 bp, Homo sapien
cttttaggaatagtcacccttcctacaaaatta

SEQ ID NO: 1017989 - DNA, 33 bp, Homo sapien
agataccacctcagagacaacaaacagaattct

SEQ ID NO: 1017990 - DNA, 33 bp, Homo sapien
agataccacctcagagccaacaaacagaattct

SEQ ID NO: 1017991 - DNA, 33 bp, Homo sapien
agtgtttggtagaaacagtgtcagaatatttag

SEQ ID NO: 1017992 - DNA, 33 bp, Homo sapien
agtgtttggtagaaacggtgtcagaatatttag

SEQ ID NO: 1017993 - DNA, 33 bp, Homo sapien
tctgggtttagatcccaaattaattgcctctat

SEQ ID NO: 1017994 - DNA, 33 bp, Homo sapien
tctgggtttagatcccgaattaattgcctctat

SEQ ID NO: 1017995 - DNA, 33 bp, Homo sapien
tttgccagtttaagtcccaaagtatcagcacac

SEQ ID NO: 1017996 - DNA, 33 bp, Homo sapien
tttgccagtttaagtctcaaagtatcagcacac

SEQ ID NO: 1017997 - DNA, 33 bp, Homo sapien
acccaatgtttagatgccactcattttttaaaa

SEQ ID NO: 1017998 - DNA, 33 bp, Homo sapien
acccaatgtttagatgtcactcattttttaaaa

SEQ ID NO: 1017999 - DNA, 33 bp, Homo sapien
cttcttcttccaaggacattagtcataatggag

SEQ ID NO: 1018000 - DNA, 33 bp, Homo sapien
cttcttcttccaaggatattagtcataatggag

SEQ ID NO: 1018001 - DNA, 33 bp, Homo sapien
aggtctaggctagaaacgtcatgacagatccct

SEQ ID NO: 1018002 - DNA, 33 bp, Homo sapien
aggtctaggctagaaaggtcatgacagatccct

SEQ ID NO: 1018003 - DNA, 33 bp, Homo sapien
tctttgaaaatgttcccacattgcacaggtcag

SEQ ID NO: 1018004 - DNA, 33 bp, Homo sapien
tctttgaaaatgttcctacattgcacaggtcag

SEQ ID NO: 1018005 - DNA, 33 bp, Homo sapien
acctagcaggactggaatattagttgtcccatg

SEQ ID NO: 1018006 - DNA, 33 bp, Homo sapien
acctagcaggactggagtattagttgtcccatg

SEQ ID NO: 1018007 - DNA, 33 bp, Homo sapien
taaaaatcctgggccaacaaatacaggcaggaa

SEQ ID NO: 1018008 - DNA, 33 bp, Homo sapien
taaaaatcctgggccagcaaatacaggcaggaa

SEQ ID NO: 1018009 - DNA, 33 bp, Homo sapien
ttctattaatgtactacgtcttctcccaaaatt

SEQ ID NO: 1018010 - DNA, 33 bp, Homo sapien
ttctattaatgtactatgtcttctcccaaaatt

SEQ ID NO: 1018011 - DNA, 33 bp, Homo sapien
agtgagttcttcgaaaattacaatctaactgta

SEQ ID NO: 1018012 - DNA, 33 bp, Homo sapien
agtgagttcttcgaaagttacaatctaactgta

SEQ ID NO: 1018013 - DNA, 33 bp, Homo sapien
tcccactgccttttaacgtctatctcaaatgtt

SEQ ID NO: 1018014 - DNA, 33 bp, Homo sapien
tcccactgccttttaaggtctatctcaaatgtt

SEQ ID NO: 1018015 - DNA, 33 bp, Homo sapien
tctgtcagaaaggccaatccataacctcctgcc

SEQ ID NO: 1018016 - DNA, 33 bp, Homo sapien
tctgtcagaaaggccagtccataacctcctgcc

SEQ ID NO: 1018017 - DNA, 33 bp, Homo sapien
ccaccaatctaattaacagagtcatgggaccta

SEQ ID NO: 1018018 - DNA, 33 bp, Homo sapien
ccaccaatctaattaagagagtcatgggaccta

SEQ ID NO: 1018019 - DNA, 33 bp, Homo sapien
tctaaaattgttcaaaagagcctaaagaaaatc

SEQ ID NO: 1018020 - DNA, 33 bp, Homo sapien
tctaaaattgttcaaaggagcctaaagaaaatc

SEQ ID NO: 1018021 - DNA, 33 bp, Homo sapien
tagaatatgagtgccaccataagaacaggaagc

SEQ ID NO: 1018022 - DNA, 33 bp, Homo sapien
tagaatatgagtgccagcataagaacaggaagc

SEQ ID NO: 1018023 - DNA, 33 bp, Homo sapien
tgtgattttagaaaagacatcaaagtgacgatc

SEQ ID NO: 1018024 - DNA, 33 bp, Homo sapien
tgtgattttagaaaaggcatcaaagtgacgatc

SEQ ID NO: 1018025 - DNA, 33 bp, Homo sapien
cctagatatgtacaaaagaaatgaaagcttatg

SEQ ID NO: 1018026 - DNA, 33 bp, Homo sapien
cctagatatgtacaaaggaaatgaaagcttatg

SEQ ID NO: 1018027 - DNA, 33 bp, Homo sapien
acaggtgatacttatgacaaggatggacagagg

SEQ ID NO: 1018028 - DNA, 33 bp, Homo sapien
acaggtgatacttatggcaaggatggacagagg

SEQ ID NO: 1018029 - DNA, 33 bp, Homo sapien
gtccactactgattgaccgtaacacatttttca

SEQ ID NO: 1018030 - DNA, 33 bp, Homo sapien
gtccactactgattgatcgtaacacatttttca

SEQ ID NO: 1018031 - DNA, 33 bp, Homo sapien
tgatacggagaataaaatatgaagccaattaca

SEQ ID NO: 1018032 - DNA, 33 bp, Homo sapien
tgatacggagaataaattatgaagccaattaca

SEQ ID NO: 1018033 - DNA, 33 bp, Homo sapien
cttcagttcaccagtacctatgggagtgggaga

SEQ ID NO: 1018034 - DNA, 33 bp, Homo sapien
cttcagttcaccagtagctatgggagtgggaga

SEQ ID NO: 1018035 - DNA, 33 bp, Homo sapien
cgtcagggaatactagacacaagccatcgctgt

SEQ ID NO: 1018036 - DNA, 33 bp, Homo sapien
cgtcagggaatactaggcacaagccatcgctgt

SEQ ID NO: 1018037 - DNA, 33 bp, Homo sapien
acatgaaaaaatgctcaatatcttttcattaga

SEQ ID NO: 1018038 - DNA, 33 bp, Homo sapien
acatgaaaaaatgctcgatatcttttcattaga

SEQ ID NO: 1018039 - DNA, 33 bp, Homo sapien
gtagatgtagaggctactaaacatgagatcatt

SEQ ID NO: 1018040 - DNA, 33 bp, Homo sapien
gtagatgtagaggctattaaacatgagatcatt

SEQ ID NO: 1018041 - DNA, 33 bp, Homo sapien
tataaactagaaagcacggctagaaaaaatatc

SEQ ID NO: 1018042 - DNA, 33 bp, Homo sapien
tataaactagaaagcatggctagaaaaaatatc

SEQ ID NO: 1018043 - DNA, 33 bp, Homo sapien
gcttctgctttagaaaagtttctctggacaagg

SEQ ID NO: 1018044 - DNA, 33 bp, Homo sapien
gcttctgctttagaaatgtttctctggacaagg

SEQ ID NO: 1018045 - DNA, 33 bp, Homo sapien
gttcctaccttgacagaccgagttcttcagatg

SEQ ID NO: 1018046 - DNA, 33 bp, Homo sapien
gttcctaccttgacaggccgagttcttcagatg

SEQ ID NO: 1018047 - DNA, 33 bp, Homo sapien
ggtctattcaaaacagcacatgaaagtgctctg

SEQ ID NO: 1018048 - DNA, 33 bp, Homo sapien
ggtctattcaaaacagtacatgaaagtgctctg

SEQ ID NO: 1018049 - DNA, 33 bp, Homo sapien
tctattgcttatgaaaactgcccagaccactac

SEQ ID NO: 1018050 - DNA, 33 bp, Homo sapien
tctattgcttatgaaagctgcccagaccactac

SEQ ID NO: 1018051 - DNA, 33 bp, Homo sapien
gctgcaccattttacaatactcccggcaatgtt

SEQ ID NO: 1018052 - DNA, 33 bp, Homo sapien
gctgcaccattttacagtactcccggcaatgtt

SEQ ID NO: 1018053 - DNA, 33 bp, Homo sapien
gtcaccaacactcttaaccaagctgctgggccc

SEQ ID NO: 1018054 - DNA, 33 bp, Homo sapien
gtcaccaacactcttacccaagctgctgggccc

SEQ ID NO: 1018055 - DNA, 33 bp, Homo sapien
ggctcatcttcagcccacaattatgctcagttc

SEQ ID NO: 1018056 - DNA, 33 bp, Homo sapien
ggctcatcttcagcccgcaattatgctcagttc

SEQ ID NO: 1018057 - DNA, 33 bp, Homo sapien
tcccagcctggagctaactcagtgatgccactg

SEQ ID NO: 1018058 - DNA, 33 bp, Homo sapien
tcccagcctggagctacctcagtgatgccactg

SEQ ID NO: 1018059 - DNA, 33 bp, Homo sapien
agacaggaagagcttaagaactgggcagaacca

SEQ ID NO: 1018060 - DNA, 33 bp, Homo sapien
agacaggaagagcttaggaactgggcagaacca

SEQ ID NO: 1018061 - DNA, 33 bp, Homo sapien
gtgcagatgtggagaccgagtaagtgtgggagc

SEQ ID NO: 1018062 - DNA, 33 bp, Homo sapien
gtgcagatgtggagacggagtaagtgtgggagc

SEQ ID NO: 1018063 - DNA, 33 bp, Homo sapien
ccggatgctgtagggaaacaggtgaagagagtt

SEQ ID NO: 1018064 - DNA, 33 bp, Homo sapien
ccggatgctgtagggagacaggtgaagagagtt

SEQ ID NO: 1018065 - DNA, 33 bp, Homo sapien
ccacaatggcagcctacagccttctgttctgcc

SEQ ID NO: 1018066 - DNA, 33 bp, Homo sapien
ccacaatggcagcctatagccttctgttctgcc

SEQ ID NO: 1018067 - DNA, 33 bp, Homo sapien
tgctaggagctgaacacgcctcaggacacccct

SEQ ID NO: 1018068 - DNA, 33 bp, Homo sapien
tgctaggagctgaacatgcctcaggacacccct

SEQ ID NO: 1018069 - DNA, 33 bp, Homo sapien
tctttctaaagacaggaacctcatttttaatta

SEQ ID NO: 1018070 - DNA, 33 bp, Homo sapien
tctttctaaagacagggacctcatttttaatta

SEQ ID NO: 1018071 - DNA, 33 bp, Homo sapien
ggagggatggattggaccaaggagatagtagtg

SEQ ID NO: 1018072 - DNA, 33 bp, Homo sapien
ggagggatggattggagcaaggagatagtagtg

SEQ ID NO: 1018073 - DNA, 33 bp, Homo sapien
atctcctaatggcttccagatgtttgataggtg

SEQ ID NO: 1018074 - DNA, 33 bp, Homo sapien
atctcctaatggcttctagatgtttgataggtg

SEQ ID NO: 1018075 - DNA, 33 bp, Homo sapien
atccctcttcctacataaatagccttgcacgtg

SEQ ID NO: 1018076 - DNA, 33 bp, Homo sapien
atccctcttcctacatcaatagccttgcacgtg

SEQ ID NO: 1018077 - DNA, 33 bp, Homo sapien
gtagctaggactacacgcttgtgtcatcaggcc

SEQ ID NO: 1018078 - DNA, 33 bp, Homo sapien
gtagctaggactacactcttgtgtcatcaggcc

SEQ ID NO: 1018079 - DNA, 33 bp, Homo sapien
atttgttgattccttcaaaaaaagatctggcaa

SEQ ID NO: 1018080 - DNA, 33 bp, Homo sapien
atttgttgattccttcgaaaaaagatctggcaa

SEQ ID NO: 1018081 - DNA, 33 bp, Homo sapien
gagcctggcatacaaacaggcaatcagtacatc

SEQ ID NO: 1018082 - DNA, 33 bp, Homo sapien
gagcctggcatacaaataggcaatcagtacatc

SEQ ID NO: 1018083 - DNA, 33 bp, Homo sapien
gtttcatatatctaaactggttccatcggttct

SEQ ID NO: 1018084 - DNA, 33 bp, Homo sapien
gtttcatatatctaaattggttccatcggttct

SEQ ID NO: 1018085 - DNA, 33 bp, Homo sapien
atgtcagtggaagatacggtcataccagacatt

SEQ ID NO: 1018086 - DNA, 33 bp, Homo sapien
atgtcagtggaagatagggtcataccagacatt

SEQ ID NO: 1018087 - DNA, 33 bp, Homo sapien
tctgaatttggctccaaaaatggcaccctagaa

SEQ ID NO: 1018088 - DNA, 33 bp, Homo sapien
tctgaatttggctccagaaatggcaccctagaa

SEQ ID NO: 1018089 - DNA, 33 bp, Homo sapien
tggcttaaacaaactaaaagagaataaggccat

SEQ ID NO: 1018090 - DNA, 33 bp, Homo sapien
tggcttaaacaaactacaagagaataaggccat

SEQ ID NO: 1018091 - DNA, 33 bp, Homo sapien
ctgagaccacttcttcactaagtgcaggccctt

SEQ ID NO: 1018092 - DNA, 33 bp, Homo sapien
ctgagaccacttcttcgctaagtgcaggccctt

SEQ ID NO: 1018093 - DNA, 33 bp, Homo sapien
agtaataggaaattcaaataccatccttctgat

SEQ ID NO: 1018094 - DNA, 33 bp, Homo sapien
agtaataggaaattcagataccatccttctgat

SEQ ID NO: 1018095 - DNA, 33 bp, Homo sapien
ccacagatgctatcagcaagaggacagaaatga

SEQ ID NO: 1018096 - DNA, 33 bp, Homo sapien
ccacagatgctatcaggaagaggacagaaatga

SEQ ID NO: 1018097 - DNA, 33 bp, Homo sapien
caagaaggttgcaaaaagtctggaatggagctt

SEQ ID NO: 1018098 - DNA, 33 bp, Homo sapien
caagaaggttgcaaaaggtctggaatggagctt

SEQ ID NO: 1018099 - DNA, 33 bp, Homo sapien
gacggaattgtctataagggtgccactcagagt

SEQ ID NO: 1018100 - DNA, 33 bp, Homo sapien
gacggaattgtctatatgggtgccactcagagt

SEQ ID NO: 1018101 - DNA, 33 bp, Homo sapien
aaaatattttgatgtacgggttcaatctgcaaa

SEQ ID NO: 1018102 - DNA, 33 bp, Homo sapien
aaaatattttgatgtatgggttcaatctgcaaa

SEQ ID NO: 1018103 - DNA, 33 bp, Homo sapien
cctcttatggtttctccattagtatgtctttcc

SEQ ID NO: 1018104 - DNA, 33 bp, Homo sapien
cctcttatggtttctctattagtatgtctttcc

SEQ ID NO: 1018105 - DNA, 33 bp, Homo sapien
tctagggagagaatacaaatagggacctgggaa

SEQ ID NO: 1018106 - DNA, 33 bp, Homo sapien
tctagggagagaatacgaatagggacctgggaa

SEQ ID NO: 1018107 - DNA, 33 bp, Homo sapien
ttagagttagcatccaaccttaattccttagct

SEQ ID NO: 1018108 - DNA, 33 bp, Homo sapien
ttagagttagcatccagccttaattccttagct

SEQ ID NO: 1018109 - DNA, 33 bp, Homo sapien
gctgagcctggacataacctggtaagactagaa

SEQ ID NO: 1018110 - DNA, 33 bp, Homo sapien
gctgagcctggacatagcctggtaagactagaa

SEQ ID NO: 1018111 - DNA, 33 bp, Homo sapien
tgcacctgaaatgatacgtaaaatgttgtggaa

SEQ ID NO: 1018112 - DNA, 33 bp, Homo sapien
tgcacctgaaatgatatgtaaaatgttgtggaa

SEQ ID NO: 1018113 - DNA, 33 bp, Homo sapien
atgatggctcaagcccagcgatcttcctcagtg

SEQ ID NO: 1018114 - DNA, 33 bp, Homo sapien
atgatggctcaagcccggcgatcttcctcagtg

SEQ ID NO: 1018115 - DNA, 33 bp, Homo sapien
tttaaagactcagtccaatatggcttaaaactc

SEQ ID NO: 1018116 - DNA, 33 bp, Homo sapien
tttaaagactcagtccgatatggcttaaaactc

SEQ ID NO: 1018117 - DNA, 33 bp, Homo sapien
aatcttacccactcaacttgaaattccacttct

SEQ ID NO: 1018118 - DNA, 33 bp, Homo sapien
aatcttacccactcaatttgaaattccacttct

SEQ ID NO: 1018119 - DNA, 33 bp, Homo sapien
atttaagaattgtcagaagaagcaaccacatac

SEQ ID NO: 1018120 - DNA, 33 bp, Homo sapien
atttaagaattgtcaggagaagcaaccacatac

SEQ ID NO: 1018121 - DNA, 33 bp, Homo sapien
aaactgcagagcatcaaattggccagctgctag

SEQ ID NO: 1018122 - DNA, 33 bp, Homo sapien
aaactgcagagcatcagattggccagctgctag

SEQ ID NO: 1018123 - DNA, 33 bp, Homo sapien
tctgaacattaaggacaattcttcattatgtta

SEQ ID NO: 1018124 - DNA, 33 bp, Homo sapien
tctgaacattaaggactattcttcattatgtta

SEQ ID NO: 1018125 - DNA, 33 bp, Homo sapien
ttcctgttggagcagaagttggtctcagtgact

SEQ ID NO: 1018126 - DNA, 33 bp, Homo sapien
ttcctgttggagcagaggttggtctcagtgact

SEQ ID NO: 1018127 - DNA, 33 bp, Homo sapien
aactcccacgaggacaatattcagtgacaatgc

SEQ ID NO: 1018128 - DNA, 33 bp, Homo sapien
aactcccacgaggacagtattcagtgacaatgc

SEQ ID NO: 1018129 - DNA, 33 bp, Homo sapien; identical to SEQ ID NO: 1018127

SEQ ID NO: 1018130 - DNA, 33 bp, Homo sapien; identical to SEQ ID NO: 1018128

SEQ ID NO: 1018131 - DNA, 33 bp, Homo sapien
tttttgttagcatattaaaccttgtatcctctt

SEQ ID NO: 1018132 - DNA, 33 bp, Homo sapien
tttttgttagcatattgaaccttgtatcctctt

SEQ ID NO: 1018133 - DNA, 33 bp, Homo sapien
ggagaggagatgtctacggaatctttaagtctt

SEQ ID NO: 1018134 - DNA, 33 bp, Homo sapien
ggagaggagatgtctagggaatctttaagtctt

SEQ ID NO: 1018135 - DNA, 33 bp, Homo sapien
gggggaagtgagaaggccctaaaactaagagaa

SEQ ID NO: 1018136 - DNA, 33 bp, Homo sapien
gggggaagtgagaaggtcctaaaactaagagaa

SEQ ID NO: 1018137 - DNA, 33 bp, Homo sapien
aggttttccttcctgacagttgagactgatcat

SEQ ID NO: 1018138 - DNA, 33 bp, Homo sapien
aggttttccttcctgatagttgagactgatcat

SEQ ID NO: 1018139 - DNA, 33 bp, Homo sapien
ggaggcaaccagtagcagacaggggaagagggt

SEQ ID NO: 1018140 - DNA, 33 bp, Homo sapien
ggaggcaaccagtagcggacaggggaagagggt

SEQ ID NO: 1018141 - DNA, 33 bp, Homo sapien
gtgcaagagaactccccatcaaggcctgtgagc

SEQ ID NO: 1018142 - DNA, 33 bp, Homo sapien
gtgcaagagaactccctatcaaggcctgtgagc

SEQ ID NO: 1018143 - DNA, 33 bp, Homo sapien
gagatttgcaagaaaacgttaacaactaccgta

SEQ ID NO: 1018144 - DNA, 33 bp, Homo sapien
gagatttgcaagaaaaggttaacaactaccgta

SEQ ID NO: 1018145 - DNA, 33 bp, Homo sapien
caggaatgcctttggcaatcagcgctatccaaa

SEQ ID NO: 1018146 - DNA, 33 bp, Homo sapien
caggaatgcctttggctatcagcgctatccaaa

SEQ ID NO: 1018147 - DNA, 33 bp, Homo sapien
tgcagcatggttgcagactcttcttcctcatct

SEQ ID NO: 1018148 - DNA, 33 bp, Homo sapien
tgcagcatggttgcagcctcttcttcctcatct

SEQ ID NO: 1018149 - DNA, 33 bp, Homo sapien
ttaacagatgcagcaaatcatgccttgtctgtc

SEQ ID NO: 1018150 - DNA, 33 bp, Homo sapien
ttaacagatgcagcaactcatgccttgtctgtc

SEQ ID NO: 1018151 - DNA, 33 bp, Homo sapien
tatcattggctgcttacctccaccaccccactc

SEQ ID NO: 1018152 - DNA, 33 bp, Homo sapien
tatcattggctgcttatctccaccaccccactc

SEQ ID NO: 1018153 - DNA, 33 bp, Homo sapien
tttaagaaggcttcaccatttctctttcaaatg

SEQ ID NO: 1018154 - DNA, 33 bp, Homo sapien
tttaagaaggcttcactatttctctttcaaatg

SEQ ID NO: 1018155 - DNA, 33 bp, Homo sapien
aatttggtcacatgaaaccgtaatgtagaaaag

SEQ ID NO: 1018156 - DNA, 33 bp, Homo sapien
aatttggtcacatgaagccgtaatgtagaaaag

SEQ ID NO: 1018157 - DNA, 33 bp, Homo sapien
tgacgctggcctttcccgaggagaagtgagagc

SEQ ID NO: 1018158 - DNA, 33 bp, Homo sapien
tgacgctggcctttcctgaggagaagtgagagc

SEQ ID NO: 1018159 - DNA, 33 bp, Homo sapien
aaaatgtagtatagccagacaatgaaacattat

SEQ ID NO: 1018160 - DNA, 33 bp, Homo sapien
aaaatgtagtatagccggacaatgaaacattat

SEQ ID NO: 1018161 - DNA, 33 bp, Homo sapien
acacctcacacctagacgaatcaaacgtagtca

SEQ ID NO: 1018162 - DNA, 33 bp, Homo sapien
acacctcacacctagatgaatcaaacgtagtca

SEQ ID NO: 1018163 - DNA, 33 bp, Homo sapien
gtgctttccttgtgaacatttaggtcccagaat

SEQ ID NO: 1018164 - DNA, 33 bp, Homo sapien
gtgctttccttgtgaatatttaggtcccagaat

SEQ ID NO: 1018165 - DNA, 33 bp, Homo sapien
gtctgcaaaatctaggaattcatgaaaatgtga

SEQ ID NO: 1018166 - DNA, 33 bp, Homo sapien
gtctgcaaaatctaggtattcatgaaaatgtga

SEQ ID NO: 1018167 - DNA, 33 bp, Homo sapien
accctggaaagtatggacacgaagctaaataat

SEQ ID NO: 1018168 - DNA, 33 bp, Homo sapien
accctggaaagtatgggcacgaagctaaataat

SEQ ID NO: 1018169 - DNA, 33 bp, Homo sapien
ttgagatgcgtaaagcagcaacaccagctcccg

SEQ ID NO: 1018170 - DNA, 33 bp, Homo sapien
ttgagatgcgtaaagcggcaacaccagctcccg

SEQ ID NO: 1018171 - DNA, 33 bp, Homo sapien
gggcaccaggagactacgcctcaagctttaaca

SEQ ID NO: 1018172 - DNA, 33 bp, Homo sapien
gggcaccaggagactatgcctcaagctttaaca

SEQ ID NO: 1018173 - DNA, 33 bp, Homo sapien
taaatgccagataaaaatcacttaaaaatggaa

SEQ ID NO: 1018174 - DNA, 33 bp, Homo sapien
taaatgccagataaaagtcacttaaaaatggaa

SEQ ID NO: 1018175 - DNA, 33 bp, Homo sapien
ccttctccgacaagaaacagaataaggggatca

SEQ ID NO: 1018176 - DNA, 33 bp, Homo sapien
ccttctccgacaagaagcagaataaggggatca

SEQ ID NO: 1018177 - DNA, 33 bp, Homo sapien
tgtgcaggtgtgggagaagaaagggaaagcatg

SEQ ID NO: 1018178 - DNA, 33 bp, Homo sapien
tgtgcaggtgtgggaggagaaagggaaagcatg

SEQ ID NO: 1018179 - DNA, 33 bp, Homo sapien
catgattcagaaatcaatccgtgaaagacatac

SEQ ID NO: 1018180 - DNA, 33 bp, Homo sapien
catgattcagaaatcagtccgtgaaagacatac

SEQ ID NO: 1018181 - DNA, 33 bp, Homo sapien
aagtatgtaattgggacgatgggggtcagaaag

SEQ ID NO: 1018182 - DNA, 33 bp, Homo sapien
aagtatgtaattgggatgatgggggtcagaaag

SEQ ID NO: 1018183 - DNA, 33 bp, Homo sapien
tgacatggctgaaactcaaaacccatttctact

SEQ ID NO: 1018184 - DNA, 33 bp, Homo sapien
tgacatggctgaaactgaaaacccatttctact

SEQ ID NO: 1018185 - DNA, 33 bp, Homo sapien
ggcagctctcaaggagaccaaatcccacgcatc

SEQ ID NO: 1018186 - DNA, 33 bp, Homo sapien
ggcagctctcaaggaggccaaatcccacgcatc

SEQ ID NO: 1018187 - DNA, 33 bp, Homo sapien
tcatacgaccactagcacaatcaagacatggta

SEQ ID NO: 1018188 - DNA, 33 bp, Homo sapien
tcatacgaccactagcgcaatcaagacatggta

SEQ ID NO: 1018189 - DNA, 33 bp, Homo sapien
ctctcatcagacattaaatctgccaatgctttg

SEQ ID NO: 1018190 - DNA, 33 bp, Homo sapien
ctctcatcagacattacatctgccaatgctttg

SEQ ID NO: 1018191 - DNA, 33 bp, Homo sapien
gggaggtatgattttcacacttcacttgaacag

SEQ ID NO: 1018192 - DNA, 33 bp, Homo sapien
gggaggtatgattttcgcacttcacttgaacag

SEQ ID NO: 1018193 - DNA, 33 bp, Homo sapien
atatacaaaagagtataaaaagcatatgcaggc

SEQ ID NO: 1018194 - DNA, 33 bp, Homo sapien
atatacaaaagagtatgaaaagcatatgcaggc

SEQ ID NO: 1018195 - DNA, 33 bp, Homo sapien
tctggtatacatctacacaattgccccaattgc

SEQ ID NO: 1018196 - DNA, 33 bp, Homo sapien
tctggtatacatctacgcaattgccccaattgc

SEQ ID NO: 1018197 - DNA, 33 bp, Homo sapien
attgtgaatatgtccaagattttatgagaggca

SEQ ID NO: 1018198 - DNA, 33 bp, Homo sapien
attgtgaatatgtccaggattttatgagaggca

SEQ ID NO: 1018199 - DNA, 33 bp, Homo sapien
ggtctatagtttccaaataacctcaataatttt

SEQ ID NO: 1018200 - DNA, 33 bp, Homo sapien
ggtctatagtttccaagtaacctcaataatttt

SEQ ID NO: 1018201 - DNA, 33 bp, Homo sapien
aagtcagacagtgctgcagtgtggccaggtacc

SEQ ID NO: 1018202 - DNA, 33 bp, Homo sapien
aagtcagacagtgctgtagtgtggccaggtacc

SEQ ID NO: 1018203 - DNA, 33 bp, Homo sapien
ataaaacaatccactcactctgatgatatttct

SEQ ID NO: 1018204 - DNA, 33 bp, Homo sapien
ataaaacaatccactctctctgatgatatttct

SEQ ID NO: 1018205 - DNA, 33 bp, Homo sapien
aacattgtgaaagttaagaagcagatgaactag

SEQ ID NO: 1018206 - DNA, 33 bp, Homo sapien
aacattgtgaaagttaggaagcagatgaactag

SEQ ID NO: 1018207 - DNA, 33 bp, Homo sapien
tatgtgtgtataacttcaagccatctccaaaca

SEQ ID NO: 1018208 - DNA, 33 bp, Homo sapien
tatgtgtgtataacttgaagccatctccaaaca

SEQ ID NO: 1018209 - DNA, 33 bp, Homo sapien
gggggaacagatgtccccatagctctttgcctc

SEQ ID NO: 1018210 - DNA, 33 bp, Homo sapien
gggggaacagatgtcctcatagctctttgcctc

SEQ ID NO: 1018211 - DNA, 33 bp, Homo sapien
atgagtttgtctgcaaagtcttgcttgtctgcc

SEQ ID NO: 1018212 - DNA, 33 bp, Homo sapien
atgagtttgtctgcaaggtcttgcttgtctgcc

SEQ ID NO: 1018213 - DNA, 33 bp, Homo sapien
gagacaacatcatcaaccacttcacctgtgaga

SEQ ID NO: 1018214 - DNA, 33 bp, Homo sapien
gagacaacatcatcaatcacttcacctgtgaga

SEQ ID NO: 1018215 - DNA, 33 bp, Homo sapien
gatgagggggactgaggatgttgtatagcagat

SEQ ID NO: 1018216 - DNA, 33 bp, Homo sapien
gatgagggggactgagtatgttgtatagcagat

SEQ ID NO: 1018217 - DNA, 33 bp, Homo sapien
tcatcactagaagagaacaagctgaaaacccat

SEQ ID NO: 1018218 - DNA, 33 bp, Homo sapien
tcatcactagaagagatcaagctgaaaacccat

SEQ ID NO: 1018219 - DNA, 33 bp, Homo sapien
ttgaaatcagtgctgcaattgggaccattatgc

SEQ ID NO: 1018220 - DNA, 33 bp, Homo sapien
ttgaaatcagtgctgcgattgggaccattatgc

SEQ ID NO: 1018221 - DNA, 33 bp, Homo sapien
cacaaaatcaaatagaactcctcaacctgcaag

SEQ ID NO: 1018222 - DNA, 33 bp, Homo sapien
cacaaaatcaaatagacctcctcaacctgcaag

SEQ ID NO: 1018223 - DNA, 33 bp, Homo sapien
caaaatcagagtagagcaagtagcagttttaca

SEQ ID NO: 1018224 - DNA, 33 bp, Homo sapien
caaaatcagagtagagtaagtagcagttttaca

SEQ ID NO: 1018225 - DNA, 33 bp, Homo sapien
tccaagatgataccttaaacactatgtcctcac

SEQ ID NO: 1018226 - DNA, 33 bp, Homo sapien
tccaagatgataccttgaacactatgtcctcac

SEQ ID NO: 1018227 - DNA, 33 bp, Homo sapien
tatgatgggtttatcacgacgttgcgccattgt

SEQ ID NO: 1018228 - DNA, 33 bp, Homo sapien
tatgatgggtttatcatgacgttgcgccattgt

SEQ ID NO: 1018229 - DNA, 33 bp, Homo sapien
tatccccttcctgccgaatgactaaaactaaat

SEQ ID NO: 1018230 - DNA, 33 bp, Homo sapien
tatccccttcctgccgcatgactaaaactaaat

SEQ ID NO: 1018231 - DNA, 33 bp, Homo sapien
cggctctaaaaaataaagtctactttgcctcaa

SEQ ID NO: 1018232 - DNA, 33 bp, Homo sapien
cggctctaaaaaataaggtctactttgcctcaa

SEQ ID NO: 1018233 - DNA, 33 bp, Homo sapien
atttagctgtaaactaccccaaagaataaaaga

SEQ ID NO: 1018234 - DNA, 33 bp, Homo sapien
atttagctgtaaactatcccaaagaataaaaga

SEQ ID NO: 1018235 - DNA, 33 bp, Homo sapien
tttgtttgttttaccacaggaatccttggaccc

SEQ ID NO: 1018236 - DNA, 33 bp, Homo sapien
tttgtttgttttaccataggaatccttggaccc

SEQ ID NO: 1018237 - DNA, 33 bp, Homo sapien
cacaatcttctgcacagatttgtatggtgtaaa

SEQ ID NO: 1018238 - DNA, 33 bp, Homo sapien
cacaatcttctgcacatatttgtatggtgtaaa

SEQ ID NO: 1018239 - DNA, 33 bp, Homo sapien
aattgatcactacttccaagccctttgcatgct

SEQ ID NO: 1018240 - DNA, 33 bp, Homo sapien
aattgatcactacttctaagccctttgcatgct

SEQ ID NO: 1018241 - DNA, 33 bp, Homo sapien
atggcaaagttgaataaacagagagtgaatgat

SEQ ID NO: 1018242 - DNA, 33 bp, Homo sapien
atggcaaagttgaatagacagagagtgaatgat

SEQ ID NO: 1018243 - DNA, 33 bp, Homo sapien
gttagcacttataaccagagttaggtggtagca

SEQ ID NO: 1018244 - DNA, 33 bp, Homo sapien
gttagcacttataaccggagttaggtggtagca

SEQ ID NO: 1018245 - DNA, 33 bp, Homo sapien
aaaattttttgctaaacgtccatccaatttaga

SEQ ID NO: 1018246 - DNA, 33 bp, Homo sapien
aaaattttttgctaaaggtccatccaatttaga

SEQ ID NO: 1018247 - DNA, 33 bp, Homo sapien
gcacaaatgcagaagccgacatgagccaaccaa

SEQ ID NO: 1018248 - DNA, 33 bp, Homo sapien
gcacaaatgcagaagctgacatgagccaaccaa

SEQ ID NO: 1018249 - DNA, 33 bp, Homo sapien
atccagtggaagtgtccatgttgacctgtttag

SEQ ID NO: 1018250 - DNA, 33 bp, Homo sapien
atccagtggaagtgtctatgttgacctgtttag

SEQ ID NO: 1018251 - DNA, 33 bp, Homo sapien
ctgtaaaacagtcctacccttctcgctaatgtt

SEQ ID NO: 1018252 - DNA, 33 bp, Homo sapien
ctgtaaaacagtcctatccttctcgctaatgtt

SEQ ID NO: 1018253 - DNA, 33 bp, Homo sapien
cttgaacacaaaagtacggaagacagggatctc

SEQ ID NO: 1018254 - DNA, 33 bp, Homo sapien
cttgaacacaaaagtatggaagacagggatctc

SEQ ID NO: 1018255 - DNA, 33 bp, Homo sapien
tctggctttatcactgcatgacctgcaccagtt

SEQ ID NO: 1018256 - DNA, 33 bp, Homo sapien
tctggctttatcactgtatgacctgcaccagtt

SEQ ID NO: 1018257 - DNA, 33 bp, Homo sapien
aatgtccattgaaacacgaaaaggaaaacaacg

SEQ ID NO: 1018258 - DNA, 33 bp, Homo sapien
aatgtccattgaaacatgaaaaggaaaacaacg

SEQ ID NO: 1018259 - DNA, 33 bp, Homo sapien
tgtccttaaggctgaaagctggggtctttgtat

SEQ ID NO: 1018260 - DNA, 33 bp, Homo sapien
tgtccttaaggctgaacgctggggtctttgtat

SEQ ID NO: 1018261 - DNA, 33 bp, Homo sapien
tagggagtgcttttcaccatgttgtctcccggc

SEQ ID NO: 1018262 - DNA, 33 bp, Homo sapien
tagggagtgcttttcatcatgttgtctcccggc

SEQ ID NO: 1018263 - DNA, 33 bp, Homo sapien
ccttgccctgattacacagagagatagatatgt

SEQ ID NO: 1018264 - DNA, 33 bp, Homo sapien
ccttgccctgattacagagagagatagatatgt

SEQ ID NO: 1018265 - DNA, 33 bp, Homo sapien
gggaaattgagggaaacggtttcatatttggga

SEQ ID NO: 1018266 - DNA, 33 bp, Homo sapien
gggaaattgagggaaatggtttcatatttggga

SEQ ID NO: 1018267 - DNA, 33 bp, Homo sapien
aacctttaggcaaggaagtaccgcccagtagac

SEQ ID NO: 1018268 - DNA, 33 bp, Homo sapien
aacctttaggcaaggatgtaccgcccagtagac

SEQ ID NO: 1018269 - DNA, 33 bp, Homo sapien
gtgtgtcctttcactccgaggacaatggtgagg

SEQ ID NO: 1018270 - DNA, 33 bp, Homo sapien
gtgtgtcctttcactctgaggacaatggtgagg

SEQ ID NO: 1018271 - DNA, 33 bp, Homo sapien
ggaagggacctgtgcaacagcttctggacagct

SEQ ID NO: 1018272 - DNA, 33 bp, Homo sapien
ggaagggacctgtgcaccagcttctggacagct

SEQ ID NO: 1018273 - DNA, 33 bp, Homo sapien
agccttactcatctgaagtggacaatccggatg

SEQ ID NO: 1018274 - DNA, 33 bp, Homo sapien
agccttactcatctgaggtggacaatccggatg

SEQ ID NO: 1018275 - DNA, 33 bp, Homo sapien
ggcgtgcatccacttgaattgtgaaaggaatac

SEQ ID NO: 1018276 - DNA, 33 bp, Homo sapien
ggcgtgcatccacttggattgtgaaaggaatac

SEQ ID NO: 1018277 - DNA, 33 bp, Homo sapien
tgaaattccagaagacacttggcctagtgatcg

SEQ ID NO: 1018278 - DNA, 33 bp, Homo sapien
tgaaattccagaagacgcttggcctagtgatcg

SEQ ID NO: 1018279 - DNA, 33 bp, Homo sapien
gtcactggctctttcacgaggagcctggagagg

SEQ ID NO: 1018280 - DNA, 33 bp, Homo sapien
gtcactggctctttcatgaggagcctggagagg

SEQ ID NO: 1018281 - DNA, 33 bp, Homo sapien
cgttgaccagtttaagaagggtcagctgggtag

SEQ ID NO: 1018282 - DNA, 33 bp, Homo sapien
cgttgaccagtttaagtagggtcagctgggtag

SEQ ID NO: 1018283 - DNA, 33 bp, Homo sapien
aattaagaaatacctcaagaattggtaaagcat

SEQ ID NO: 1018284 - DNA, 33 bp, Homo sapien
aattaagaaatacctcgagaattggtaaagcat

SEQ ID NO: 1018285 - DNA, 33 bp, Homo sapien
ttgatggttgctaaggaagttgtgtcatttaat

SEQ ID NO: 1018286 - DNA, 33 bp, Homo sapien
ttgatggttgctaaggcagttgtgtcatttaat

SEQ ID NO: 1018287 - DNA, 33 bp, Homo sapien
aagggcaaataggcaaacagtctttatcctcta

SEQ ID NO: 1018288 - DNA, 33 bp, Homo sapien
aagggcaaataggcaagcagtctttatcctcta

SEQ ID NO: 1018289 - DNA, 33 bp, Homo sapien
gacacgtgctctaataagggtaaaccttgaaaa

SEQ ID NO: 1018290 - DNA, 33 bp, Homo sapien
gacacgtgctctaatatgggtaaaccttgaaaa

SEQ ID NO: 1018291 - DNA, 33 bp, Homo sapien
caagtttgttttaatcaccaaaatgcacccagt

SEQ ID NO: 1018292 - DNA, 33 bp, Homo sapien
caagtttgttttaatctccaaaatgcacccagt

SEQ ID NO: 1018293 - DNA, 33 bp, Homo sapien
ttctccagctcaaatcactgctctgtgttccag

SEQ ID NO: 1018294 - DNA, 33 bp, Homo sapien
ttctccagctcaaatctctgctctgtgttccag

SEQ ID NO: 1018295 - DNA, 33 bp, Homo sapien
tttaagcacataaatacaaagcagcttccatca

SEQ ID NO: 1018296 - DNA, 33 bp, Homo sapien
tttaagcacataaatataaagcagcttccatca

SEQ ID NO: 1018297 - DNA, 33 bp, Homo sapien
gtcaggagcttccagaagggtaggaagaatgcg

SEQ ID NO: 1018298 - DNA, 33 bp, Homo sapien
gtcaggagcttccagaggggtaggaagaatgcg

SEQ ID NO: 1018299 - DNA, 33 bp, Homo sapien
ggcaacttccacctgggactttcaaaccgtagt

SEQ ID NO: 1018300 - DNA, 33 bp, Homo sapien
ggcaacttccacctggtactttcaaaccgtagt

SEQ ID NO: 1018301 - DNA, 33 bp, Homo sapien
gggtgatgtttaggtaagagagacttgaatgct

SEQ ID NO: 1018302 - DNA, 33 bp, Homo sapien
gggtgatgtttaggtaggagagacttgaatgct

SEQ ID NO: 1018303 - DNA, 33 bp, Homo sapien
aatccaacactctgtacaccttaagtgcttaaa

SEQ ID NO: 1018304 - DNA, 33 bp, Homo sapien
aatccaacactctgtataccttaagtgcttaaa

SEQ ID NO: 1018305 - DNA, 33 bp, Homo sapien
atctaggtctggagaaagaactgccaagcgcgg

SEQ ID NO: 1018306 - DNA, 33 bp, Homo sapien
atctaggtctggagaaggaactgccaagcgcgg

SEQ ID NO: 1018307 - DNA, 33 bp, Homo sapien
aggccaacttcatctcacaatcacagcctagtt

SEQ ID NO: 1018308 - DNA, 33 bp, Homo sapien
aggccaacttcatctcgcaatcacagcctagtt

SEQ ID NO: 1018309 - DNA, 33 bp, Homo sapien
acccaatgaaaatatcccctaatcacttaaggc

SEQ ID NO: 1018310 - DNA, 33 bp, Homo sapien
acccaatgaaaatatctcctaatcacttaaggc

SEQ ID NO: 1018311 - DNA, 33 bp, Homo sapien
tgtaatcctaaagatgacacatagcattataaa

SEQ ID NO: 1018312 - DNA, 33 bp, Homo sapien
tgtaatcctaaagatgccacatagcattataaa

SEQ ID NO: 1018313 - DNA, 33 bp, Homo sapien
ttgtaactcctttctcacactaatagtagctgg

SEQ ID NO: 1018314 - DNA, 33 bp, Homo sapien
ttgtaactcctttctcccactaatagtagctgg

SEQ ID NO: 1018315 - DNA, 33 bp, Homo sapien
gaagttgagcagtgtcactaaggtagcaaggta

SEQ ID NO: 1018316 - DNA, 33 bp, Homo sapien
gaagttgagcagtgtccctaaggtagcaaggta

SEQ ID NO: 1018317 - DNA, 33 bp, Homo sapien
taaatctttccagacaccaaagtagactctctc

SEQ ID NO: 1018318 - DNA, 33 bp, Homo sapien
taaatctttccagacatcaaagtagactctctc

SEQ ID NO: 1018319 - DNA, 33 bp, Homo sapien
agcctagaaataatcacaaaacgtgaccaccag

SEQ ID NO: 1018320 - DNA, 33 bp, Homo sapien
agcctagaaataatcataaaacgtgaccaccag

SEQ ID NO: 1018321 - DNA, 33 bp, Homo sapien
ctagttactttggatacgattatagacttggtc

SEQ ID NO: 1018322 - DNA, 33 bp, Homo sapien
ctagttactttggatatgattatagacttggtc

SEQ ID NO: 1018323 - DNA, 33 bp, Homo sapien
ggattgactattcagtaaaagttgggctctgaa

SEQ ID NO: 1018324 - DNA, 33 bp, Homo sapien
ggattgactattcagtgaaagttgggctctgaa

SEQ ID NO: 1018325 - DNA, 33 bp, Homo sapien
ggtcccgtaggaacaaaagtctgggaacaatga

SEQ ID NO: 1018326 - DNA, 33 bp, Homo sapien
ggtcccgtaggaacaatagtctgggaacaatga

SEQ ID NO: 1018327 - DNA, 33 bp, Homo sapien
tagccccatagcttaacagtcaaacacaccaag

SEQ ID NO: 1018328 - DNA, 33 bp, Homo sapien
tagccccatagcttaatagtcaaacacaccaag

SEQ ID NO: 1018329 - DNA, 33 bp, Homo sapien
gatcatgtggtacacccggctttttccacttga

SEQ ID NO: 1018330 - DNA, 33 bp, Homo sapien
gatcatgtggtacacctggctttttccacttga

SEQ ID NO: 1018331 - DNA, 33 bp, Homo sapien
ggtaaaaagggaattgcattcaaggtatttggc

SEQ ID NO: 1018332 - DNA, 33 bp, Homo sapien
ggtaaaaagggaattggattcaaggtatttggc

SEQ ID NO: 1018333 - DNA, 33 bp, Homo sapien
gggcttcagctgtctaaagaagtatctatagac

SEQ ID NO: 1018334 - DNA, 33 bp, Homo sapien
gggcttcagctgtctagagaagtatctatagac

SEQ ID NO: 1018335 - DNA, 33 bp, Homo sapien
gagtggacgagtaacagctggagagaggtgtgg

SEQ ID NO: 1018336 - DNA, 33 bp, Homo sapien
gagtggacgagtaacatctggagagaggtgtgg

SEQ ID NO: 1018337 - DNA, 33 bp, Homo sapien
tagcaggcactagaaagtcactgttttaaaacc

SEQ ID NO: 1018338 - DNA, 33 bp, Homo sapien
tagcaggcactagaaattcactgttttaaaacc

SEQ ID NO: 1018339 - DNA, 33 bp, Homo sapien
ttaaatatattagttacaagaacgatcctaata

SEQ ID NO: 1018340 - DNA, 33 bp, Homo sapien
ttaaatatattagttataagaacgatcctaata

SEQ ID NO: 1018341 - DNA, 33 bp, Homo sapien
gatccccacttccaacagattgatggtggctgc

SEQ ID NO: 1018342 - DNA, 33 bp, Homo sapien
gatccccacttccaaccgattgatggtggctgc

SEQ ID NO: 1018343 - DNA, 33 bp, Homo sapien
caaaaattagccagaccgcatgcctgtaatccc

SEQ ID NO: 1018344 - DNA, 33 bp, Homo sapien
caaaaattagccagactgcatgcctgtaatccc

SEQ ID NO: 1018345 - DNA, 33 bp, Homo sapien
taaagtagttcacttacgggtggaccatgcaac

SEQ ID NO: 1018346 - DNA, 33 bp, Homo sapien
taaagtagttcacttaggggtggaccatgcaac

SEQ ID NO: 1018347 - DNA, 33 bp, Homo sapien
tcgtgtgtgctcaacaaataggaaagaccaaga

SEQ ID NO: 1018348 - DNA, 33 bp, Homo sapien
tcgtgtgtgctcaacagataggaaagaccaaga

SEQ ID NO: 1018349 - DNA, 33 bp, Homo sapien
ggctaagatcactgacaaaggcggctgcgctaa

SEQ ID NO: 1018350 - DNA, 33 bp, Homo sapien
ggctaagatcactgacgaaggcggctgcgctaa

SEQ ID NO: 1018351 - DNA, 33 bp, Homo sapien
tatgtctcattcttgaaaaatctcttcgttctt

SEQ ID NO: 1018352 - DNA, 33 bp, Homo sapien
tatgtctcattcttgataaatctcttcgttctt

SEQ ID NO: 1018353 - DNA, 33 bp, Homo sapien
aggaaatcgaacccgagattgtagaagtgactt

SEQ ID NO: 1018354 - DNA, 33 bp, Homo sapien
aggaaatcgaacccgatattgtagaagtgactt

SEQ ID NO: 1018355 - DNA, 33 bp, Homo sapien
tgtaggaactaccaacaaactcagctccctgca

SEQ ID NO: 1018356 - DNA, 33 bp, Homo sapien
tgtaggaactaccaacgaactcagctccctgca

SEQ ID NO: 1018357 - DNA, 33 bp, Homo sapien
tgcacatttccacagaggtatgtttcccaagtt

SEQ ID NO: 1018358 - DNA, 33 bp, Homo sapien
tgcacatttccacagatgtatgtttcccaagtt

SEQ ID NO: 1018359 - DNA, 33 bp, Homo sapien
gtccttgacgcatggccagactcaacaatgggc

SEQ ID NO: 1018360 - DNA, 33 bp, Homo sapien
gtccttgacgcatggctagactcaacaatgggc

SEQ ID NO: 1018361 - DNA, 33 bp, Homo sapien
ccagcaccactttgaacagggagtcctttcccc

SEQ ID NO: 1018362 - DNA, 33 bp, Homo sapien
ccagcaccactttgaatagggagtcctttcccc

SEQ ID NO: 1018363 - DNA, 33 bp, Homo sapien
ttgcagatcagcagcaaggagcgagcccctgtg

SEQ ID NO: 1018364 - DNA, 33 bp, Homo sapien
ttgcagatcagcagcagggagcgagcccctgtg

SEQ ID NO: 1018365 - DNA, 33 bp, Homo sapien
atttactctaattccacaagatctacaggaaac

SEQ ID NO: 1018366 - DNA, 33 bp, Homo sapien
atttactctaattccagaagatctacaggaaac

SEQ ID NO: 1018367 - DNA, 33 bp, Homo sapien
aagtcttaatgtctcaacagaatagagctcaga

SEQ ID NO: 1018368 - DNA, 33 bp, Homo sapien
aagtcttaatgtctcagcagaatagagctcaga

SEQ ID NO: 1018369 - DNA, 33 bp, Homo sapien
ggaaagaggctaaaatcagtcgatgccattata

SEQ ID NO: 1018370 - DNA, 33 bp, Homo sapien
ggaaagaggctaaaatgagtcgatgccattata

SEQ ID NO: 1018371 - DNA, 33 bp, Homo sapien
caccttagatttacaaataagcacagcatgagt

SEQ ID NO: 1018372 - DNA, 33 bp, Homo sapien
caccttagatttacaagtaagcacagcatgagt

SEQ ID NO: 1018373 - DNA, 33 bp, Homo sapien
catttgtgtatgagaactgttgaagcttagaga

SEQ ID NO: 1018374 - DNA, 33 bp, Homo sapien
catttgtgtatgagaattgttgaagcttagaga

SEQ ID NO: 1018375 - DNA, 33 bp, Homo sapien
acaattttacaccaagcacaaaaggggaggtga

SEQ ID NO: 1018376 - DNA, 33 bp, Homo sapien
acaattttacaccaaggacaaaaggggaggtga

SEQ ID NO: 1018377 - DNA, 33 bp, Homo sapien
atacactgtatagctaagaatggaaggaaatgg

SEQ ID NO: 1018378 - DNA, 33 bp, Homo sapien
atacactgtatagctaggaatggaaggaaatgg

SEQ ID NO: 1018379 - DNA, 33 bp, Homo sapien
agaacagttaactgcaatgatgttggacaggtg

SEQ ID NO: 1018380 - DNA, 33 bp, Homo sapien
agaacagttaactgcagtgatgttggacaggtg

SEQ ID NO: 1018381 - DNA, 33 bp, Homo sapien
gctgctgagacctatcagaggaaagaaggtgcc

SEQ ID NO: 1018382 - DNA, 33 bp, Homo sapien
gctgctgagacctatcggaggaaagaaggtgcc

SEQ ID NO: 1018383 - DNA, 33 bp, Homo sapien
tatagagcaatatgccagacttgagatggaaag

SEQ ID NO: 1018384 - DNA, 33 bp, Homo sapien
tatagagcaatatgccggacttgagatggaaag

SEQ ID NO: 1018385 - DNA, 33 bp, Homo sapien
gacagactttacatcacgagttgacatcagggg

SEQ ID NO: 1018386 - DNA, 33 bp, Homo sapien
gacagactttacatcaggagttgacatcagggg

SEQ ID NO: 1018387 - DNA, 33 bp, Homo sapien
cttaaaccactctcacacagaataccaattcta

SEQ ID NO: 1018388 - DNA, 33 bp, Homo sapien
cttaaaccactctcacgcagaataccaattcta

SEQ ID NO: 1018389 - DNA, 33 bp, Homo sapien
tagcctaactcctaaggaggtgcagatccttcg

SEQ ID NO: 1018390 - DNA, 33 bp, Homo sapien
tagcctaactcctaagtaggtgcagatccttcg

SEQ ID NO: 1018391 - DNA, 33 bp, Homo sapien
cacactaatgactgcaagtataatgggtgaagt

SEQ ID NO: 1018392 - DNA, 33 bp, Homo sapien
cacactaatgactgcaggtataatgggtgaagt

SEQ ID NO: 1018393 - DNA, 33 bp, Homo sapien
attaagccatttcctaagaagagatcacactgg

SEQ ID NO: 1018394 - DNA, 33 bp, Homo sapien
attaagccatttcctaggaagagatcacactgg

SEQ ID NO: 1018395 - DNA, 33 bp, Homo sapien
tagaaggaaaaatatcaacactcaagaaaaaaa

SEQ ID NO: 1018396 - DNA, 33 bp, Homo sapien
tagaaggaaaaatatcgacactcaagaaaaaaa

SEQ ID NO: 1018397 - DNA, 33 bp, Homo sapien
tttttacttgctgataataattttctttttctc

SEQ ID NO: 1018398 - DNA, 33 bp, Homo sapien
tttttacttgctgatagtaattttctttttctc

SEQ ID NO: 1018399 - DNA, 33 bp, Homo sapien
agcacacagggcaaacactggcttgtactcgag

SEQ ID NO: 1018400 - DNA, 33 bp, Homo sapien
agcacacagggcaaacgctggcttgtactcgag

SEQ ID NO: 1018401 - DNA, 33 bp, Homo sapien
gtctgaatggctattaaaatttttcttcctttt

SEQ ID NO: 1018402 - DNA, 33 bp, Homo sapien
gtctgaatggctattagaatttttcttcctttt

SEQ ID NO: 1018403 - DNA, 33 bp, Homo sapien
gagattaatgatacaacatgtaaagttactcta

SEQ ID NO: 1018404 - DNA, 33 bp, Homo sapien
gagattaatgatacaatatgtaaagttactcta

SEQ ID NO: 1018405 - DNA, 33 bp, Homo sapien
aactctacgcatgatcacctcctaccattttca

SEQ ID NO: 1018406 - DNA, 33 bp, Homo sapien
aactctacgcatgatcgcctcctaccattttca

SEQ ID NO: 1018407 - DNA, 33 bp, Homo sapien
atgtgtgtaaagactgaaggcctcaggaggagg

SEQ ID NO: 1018408 - DNA, 33 bp, Homo sapien
atgtgtgtaaagactgtaggcctcaggaggagg

SEQ ID NO: 1018409 - DNA, 33 bp, Homo sapien
cctcatcctcagagaaaggtagttggttggccc

SEQ ID NO: 1018410 - DNA, 33 bp, Homo sapien
cctcatcctcagagaagggtagttggttggccc

SEQ ID NO: 1018411 - DNA, 33 bp, Homo sapien
catatcacccctgactaaacaatcgtatacacc

SEQ ID NO: 1018412 - DNA, 33 bp, Homo sapien
catatcacccctgactgaacaatcgtatacacc

SEQ ID NO: 1018413 - DNA, 33 bp, Homo sapien
tttatacaaataggaaatgaaatctaatgcaga

SEQ ID NO: 1018414 - DNA, 33 bp, Homo sapien
tttatacaaataggaagtgaaatctaatgcaga

SEQ ID NO: 1018415 - DNA, 33 bp, Homo sapien
actggtcaacctgataaaagaactattataaaa

SEQ ID NO: 1018416 - DNA, 33 bp, Homo sapien
actggtcaacctgatacaagaactattataaaa

SEQ ID NO: 1018417 - DNA, 33 bp, Homo sapien
aagttttcaatcttaggactgtgctaattagga

SEQ ID NO: 1018418 - DNA, 33 bp, Homo sapien
aagttttcaatcttagtactgtgctaattagga

SEQ ID NO: 1018419 - DNA, 33 bp, Homo sapien
ttggaagggcctcagaataaggacctggaagaa

SEQ ID NO: 1018420 - DNA, 33 bp, Homo sapien
ttggaagggcctcagagtaaggacctggaagaa

SEQ ID NO: 1018421 - DNA, 33 bp, Homo sapien
tttctacacaattttcactgtaagccacctgtt

SEQ ID NO: 1018422 - DNA, 33 bp, Homo sapien
tttctacacaattttctctgtaagccacctgtt

SEQ ID NO: 1018423 - DNA, 33 bp, Homo sapien
ctgcctttgatattcacaggtcttactggtcta

SEQ ID NO: 1018424 - DNA, 33 bp, Homo sapien
ctgcctttgatattcataggtcttactggtcta

SEQ ID NO: 1018425 - DNA, 33 bp, Homo sapien
acaggtagcaggaaacaaactcgaatgagcttg

SEQ ID NO: 1018426 - DNA, 33 bp, Homo sapien
acaggtagcaggaaaccaactcgaatgagcttg

SEQ ID NO: 1018427 - DNA, 33 bp, Homo sapien
tatgtcttctctcagccagtgtgataaacctgc

SEQ ID NO: 1018428 - DNA, 33 bp, Homo sapien
tatgtcttctctcagcgagtgtgataaacctgc

SEQ ID NO: 1018429 - DNA, 33 bp, Homo sapien
gttggtttggaagcccagaagacttggattgga

SEQ ID NO: 1018430 - DNA, 33 bp, Homo sapien
gttggtttggaagcccggaagacttggattgga

SEQ ID NO: 1018431 - DNA, 33 bp, Homo sapien
agaatgtgaaggaagaactgttaaacacttata

SEQ ID NO: 1018432 - DNA, 33 bp, Homo sapien
agaatgtgaaggaagatctgttaaacacttata

SEQ ID NO: 1018433 - DNA, 33 bp, Homo sapien
cacagctaagtgggtacgggtccttatgctgca

SEQ ID NO: 1018434 - DNA, 33 bp, Homo sapien
cacagctaagtgggtatgggtccttatgctgca

SEQ ID NO: 1018435 - DNA, 33 bp, Homo sapien
atccagacaaggcccacgtttgttcagaaggcc

SEQ ID NO: 1018436 - DNA, 33 bp, Homo sapien
atccagacaaggcccaggtttgttcagaaggcc

SEQ ID NO: 1018437 - DNA, 33 bp, Homo sapien
catcagagatggacgacgcttcagagtacaggg

SEQ ID NO: 1018438 - DNA, 33 bp, Homo sapien
catcagagatggacgatgcttcagagtacaggg

SEQ ID NO: 1018439 - DNA, 33 bp, Homo sapien
aaaagggactgaatcccaatgccacaacaccac

SEQ ID NO: 1018440 - DNA, 33 bp, Homo sapien
aaaagggactgaatcctaatgccacaacaccac

SEQ ID NO: 1018441 - DNA, 33 bp, Homo sapien
caggctctaagggagagtcctttcctcgtggct

SEQ ID NO: 1018442 - DNA, 33 bp, Homo sapien
caggctctaagggagattcctttcctcgtggct

SEQ ID NO: 1018443 - DNA, 33 bp, Homo sapien
aggaaagcctttgtacacccactgcccacagag

SEQ ID NO: 1018444 - DNA, 33 bp, Homo sapien
aggaaagcctttgtacgcccactgcccacagag

SEQ ID NO: 1018445 - DNA, 33 bp, Homo sapien
tccacacccgtcagcactaatcttccacgcagc

SEQ ID NO: 1018446 - DNA, 33 bp, Homo sapien
tccacacccgtcagcagtaatcttccacgcagc

SEQ ID NO: 1018447 - DNA, 33 bp, Homo sapien
tggagacagttagtgcaattattaacaggacac

SEQ ID NO: 1018448 - DNA, 33 bp, Homo sapien
tggagacagttagtgcgattattaacaggacac

SEQ ID NO: 1018449 - DNA, 33 bp, Homo sapien
ttgtttcagcagaatcagagagagatttaaaag

SEQ ID NO: 1018450 - DNA, 33 bp, Homo sapien
ttgtttcagcagaatcggagagagatttaaaag

SEQ ID NO: 1018451 - DNA, 33 bp, Homo sapien
atggctgagccttcgccaaaccaccaatatctc

SEQ ID NO: 1018452 - DNA, 33 bp, Homo sapien
atggctgagccttcgctaaaccaccaatatctc

SEQ ID NO: 1018453 - DNA, 33 bp, Homo sapien
gtctggcctgaaacatcatcaatacactatgag

SEQ ID NO: 1018454 - DNA, 33 bp, Homo sapien
gtctggcctgaaacatgatcaatacactatgag

SEQ ID NO: 1018455 - DNA, 33 bp, Homo sapien
ttcagctttacattccaaatatttccgaataga

SEQ ID NO: 1018456 - DNA, 33 bp, Homo sapien
ttcagctttacattccgaatatttccgaataga

SEQ ID NO: 1018457 - DNA, 33 bp, Homo sapien
ggctcttaagcctccccgattggagccctctga

SEQ ID NO: 1018458 - DNA, 33 bp, Homo sapien
ggctcttaagcctccctgattggagccctctga

SEQ ID NO: 1018459 - DNA, 33 bp, Homo sapien
gctccaccttgccatacgatcttggacaatgta

SEQ ID NO: 1018460 - DNA, 33 bp, Homo sapien
gctccaccttgccatatgatcttggacaatgta

SEQ ID NO: 1018461 - DNA, 33 bp, Homo sapien
tttgccttttccagaaagtcatgccgtatgtac

SEQ ID NO: 1018462 - DNA, 33 bp, Homo sapien
tttgccttttccagaatgtcatgccgtatgtac

SEQ ID NO: 1018463 - DNA, 33 bp, Homo sapien
tattgagcattaacaacgtgccaggcaaggtcc

SEQ ID NO: 1018464 - DNA, 33 bp, Homo sapien
tattgagcattaacaatgtgccaggcaaggtcc

SEQ ID NO: 1018465 - DNA, 33 bp, Homo sapien
cggatggcaagggcccaaccccagagaccttaa

SEQ ID NO: 1018466 - DNA, 33 bp, Homo sapien
cggatggcaagggcccgaccccagagaccttaa

SEQ ID NO: 1018467 - DNA, 33 bp, Homo sapien
gcttgacagaaatagaacaaacctaagtccgga

SEQ ID NO: 1018468 - DNA, 33 bp, Homo sapien
gcttgacagaaatagatcaaacctaagtccgga

SEQ ID NO: 1018469 - DNA, 33 bp, Homo sapien
ctttgtcacgcattcaacctgtctctcatcaac

SEQ ID NO: 1018470 - DNA, 33 bp, Homo sapien
ctttgtcacgcattcaccctgtctctcatcaac

SEQ ID NO: 1018471 - DNA, 33 bp, Homo sapien
tgtaaaggcaattcacacagtggaaaaggagtg

SEQ ID NO: 1018472 - DNA, 33 bp, Homo sapien
tgtaaaggcaattcacgcagtggaaaaggagtg

SEQ ID NO: 1018473 - DNA, 33 bp, Homo sapien
ctggtatgtccacagaagatgctcagtacctgc

SEQ ID NO: 1018474 - DNA, 33 bp, Homo sapien
ctggtatgtccacagaggatgctcagtacctgc

SEQ ID NO: 1018475 - DNA, 33 bp, Homo sapien
attcatcaccaaatataaaaaaccatcataata

SEQ ID NO: 1018476 - DNA, 33 bp, Homo sapien
attcatcaccaaatatgaaaaaccatcataata

SEQ ID NO: 1018477 - DNA, 33 bp, Homo sapien
tggagtatgactgggcacaacttcctgtttttg

SEQ ID NO: 1018478 - DNA, 33 bp, Homo sapien
tggagtatgactgggcgcaacttcctgtttttg

SEQ ID NO: 1018479 - DNA, 33 bp, Homo sapien
aacacctatgaggctacattcgtcaaaaccata

SEQ ID NO: 1018480 - DNA, 33 bp, Homo sapien
aacacctatgaggctatattcgtcaaaaccata

SEQ ID NO: 1018481 - DNA, 33 bp, Homo sapien
ttcctcctggagaagcagatcattttcgctccg

SEQ ID NO: 1018482 - DNA, 33 bp, Homo sapien
ttcctcctggagaagccgatcattttcgctccg

SEQ ID NO: 1018483 - DNA, 33 bp, Homo sapien
ggcaagtcacacgaccgcatcaaacttgaaggt

SEQ ID NO: 1018484 - DNA, 33 bp, Homo sapien
ggcaagtcacacgacctcatcaaacttgaaggt

SEQ ID NO: 1018485 - DNA, 33 bp, Homo sapien
ggctttttcctgttcaccaaacatttccagttg

SEQ ID NO: 1018486 - DNA, 33 bp, Homo sapien
ggctttttcctgttcatcaaacatttccagttg

SEQ ID NO: 1018487 - DNA, 33 bp, Homo sapien
tgaacggcttcgtggacgctttccttacggaca

SEQ ID NO: 1018488 - DNA, 33 bp, Homo sapien
tgaacggcttcgtggatgctttccttacggaca

SEQ ID NO: 1018489 - DNA, 33 bp, Homo sapien
agaggggagctgttaccgcccttagacccaaag

SEQ ID NO: 1018490 - DNA, 33 bp, Homo sapien
agaggggagctgttactgcccttagacccaaag

SEQ ID NO: 1018491 - DNA, 33 bp, Homo sapien
gattgattgagctgaaatcatttttcctcctga

SEQ ID NO: 1018492 - DNA, 33 bp, Homo sapien
gattgattgagctgaattcatttttcctcctga

SEQ ID NO: 1018493 - DNA, 33 bp, Homo sapien
actgaggcgctcagggaagggactacatctgat

SEQ ID NO: 1018494 - DNA, 33 bp, Homo sapien
actgaggcgctcagggcagggactacatctgat

SEQ ID NO: 1018495 - DNA, 33 bp, Homo sapien
aagcagtcagaggccaggaaacagggcaaaagc

SEQ ID NO: 1018496 - DNA, 33 bp, Homo sapien
aagcagtcagaggccatgaaacagggcaaaagc

SEQ ID NO: 1018497 - DNA, 33 bp, Homo sapien
cagggagtttaaaccaactttgagcctctctct

SEQ ID NO: 1018498 - DNA, 33 bp, Homo sapien
cagggagtttaaaccatctttgagcctctctct

SEQ ID NO: 1018499 - DNA, 33 bp, Homo sapien
atcacatgattcgtcgcacactcagtgacagag

SEQ ID NO: 1018500 - DNA, 33 bp, Homo sapien
atcacatgattcgtcgtacactcagtgacagag

SEQ ID NO: 1018501 - DNA, 33 bp, Homo sapien
agaaataatgaggtcaatatacaaatggaagca

SEQ ID NO: 1018502 - DNA, 33 bp, Homo sapien
agaaataatgaggtcagtatacaaatggaagca

SEQ ID NO: 1018503 - DNA, 33 bp, Homo sapien
ttttctcccgagaggcactgactcagaggagcc

SEQ ID NO: 1018504 - DNA, 33 bp, Homo sapien
ttttctcccgagaggccctgactcagaggagcc

SEQ ID NO: 1018505 - DNA, 33 bp, Homo sapien
ggcacttctgcatgtaggtcatggaccagaagc

SEQ ID NO: 1018506 - DNA, 33 bp, Homo sapien
ggcacttctgcatgtatgtcatggaccagaagc

SEQ ID NO: 1018507 - DNA, 33 bp, Homo sapien
ctgggggctgtcatgacgtctgtaggatgtgtt

SEQ ID NO: 1018508 - DNA, 33 bp, Homo sapien
ctgggggctgtcatgatgtctgtaggatgtgtt

SEQ ID NO: 1018509 - DNA, 33 bp, Homo sapien
tttggaggtaccttcaaaaaggggagcctgaga

SEQ ID NO: 1018510 - DNA, 33 bp, Homo sapien
tttggaggtaccttcagaaaggggagcctgaga

SEQ ID NO: 1018511 - DNA, 33 bp, Homo sapien
caaagccaggggtcaacggctttaagagactcc

SEQ ID NO: 1018512 - DNA, 33 bp, Homo sapien
caaagccaggggtcaatggctttaagagactcc

SEQ ID NO: 1018513 - DNA, 33 bp, Homo sapien
actgcttcctgggtgaacggggtggtgtagcct

SEQ ID NO: 1018514 - DNA, 33 bp, Homo sapien
actgcttcctgggtgatcggggtggtgtagcct

SEQ ID NO: 1018515 - DNA, 33 bp, Homo sapien
gagagaaagcagaacccggaatgactgtgtcaa

SEQ ID NO: 1018516 - DNA, 33 bp, Homo sapien
gagagaaagcagaaccgggaatgactgtgtcaa

SEQ ID NO: 1018517 - DNA, 33 bp, Homo sapien
cccagcagtcagctaagaattttctacttcgag

SEQ ID NO: 1018518 - DNA, 33 bp, Homo sapien
cccagcagtcagctaataattttctacttcgag

SEQ ID NO: 1018519 - DNA, 33 bp, Homo sapien
agtctgccattcactcccactgataaggagggg

SEQ ID NO: 1018520 - DNA, 33 bp, Homo sapien
agtctgccattcactctcactgataaggagggg

SEQ ID NO: 1018521 - DNA, 33 bp, Homo sapien
gatgcttacaaagggccgaagggtgagagattc

SEQ ID NO: 1018522 - DNA, 33 bp, Homo sapien
gatgcttacaaagggctgaagggtgagagattc

SEQ ID NO: 1018523 - DNA, 33 bp, Homo sapien
cttaggcacatcctataaaggaattgggagctg

SEQ ID NO: 1018524 - DNA, 33 bp, Homo sapien
cttaggcacatcctatgaaggaattgggagctg

SEQ ID NO: 1018525 - DNA, 33 bp, Homo sapien
tagccaaggacctctacattcaccactgtaagg

SEQ ID NO: 1018526 - DNA, 33 bp, Homo sapien
tagccaaggacctctatattcaccactgtaagg

SEQ ID NO: 1018527 - DNA, 33 bp, Homo sapien
ggggttcattgtgggaactttgtcttgggcctg

SEQ ID NO: 1018528 - DNA, 33 bp, Homo sapien
ggggttcattgtgggatctttgtcttgggcctg

SEQ ID NO: 1018529 - DNA, 33 bp, Homo sapien
tggaagtgacagaaccagaagggattggtgaga

SEQ ID NO: 1018530 - DNA, 33 bp, Homo sapien
tggaagtgacagaaccggaagggattggtgaga

SEQ ID NO: 1018531 - DNA, 33 bp, Homo sapien
cacctatgtagccaccacctaattctaccatca

SEQ ID NO: 1018532 - DNA, 33 bp, Homo sapien
cacctatgtagccacctcctaattctaccatca

SEQ ID NO: 1018533 - DNA, 33 bp, Homo sapien
gcgaaactctttaacaaggatcagtgcttctca

SEQ ID NO: 1018534 - DNA, 33 bp, Homo sapien
gcgaaactctttaacatggatcagtgcttctca

SEQ ID NO: 1018535 - DNA, 33 bp, Homo sapien
tccagtggtacaaacaaaacagtaaaccagaca

SEQ ID NO: 1018536 - DNA, 33 bp, Homo sapien
tccagtggtacaaacagaacagtaaaccagaca

SEQ ID NO: 1018537 - DNA, 33 bp, Homo sapien
acagagtaacttgcccaagtgatagtaccaaga

SEQ ID NO: 1018538 - DNA, 33 bp, Homo sapien
acagagtaacttgcccgagtgatagtaccaaga

SEQ ID NO: 1018539 - DNA, 33 bp, Homo sapien
ggctccactgcaattaaacatgaaaggggcaca

SEQ ID NO: 1018540 - DNA, 33 bp, Homo sapien
ggctccactgcaattatacatgaaaggggcaca

SEQ ID NO: 1018541 - DNA, 33 bp, Homo sapien
gttcgtcttcttagcagcattgtgaacaagacc

SEQ ID NO: 1018542 - DNA, 33 bp, Homo sapien
gttcgtcttcttagcatcattgtgaacaagacc

SEQ ID NO: 1018543 - DNA, 33 bp, Homo sapien
tcctgtacttactgcaatctttccgaaacccag

SEQ ID NO: 1018544 - DNA, 33 bp, Homo sapien
tcctgtacttactgcagtctttccgaaacccag

SEQ ID NO: 1018545 - DNA, 33 bp, Homo sapien
ctgggccttcccgatcaagacatgggagcagtg

SEQ ID NO: 1018546 - DNA, 33 bp, Homo sapien
ctgggccttcccgatcgagacatgggagcagtg

SEQ ID NO: 1018547 - DNA, 33 bp, Homo sapien
ctccgtaactacacaaacatcgtttcaaacagt

SEQ ID NO: 1018548 - DNA, 33 bp, Homo sapien
ctccgtaactacacaaccatcgtttcaaacagt

SEQ ID NO: 1018549 - DNA, 33 bp, Homo sapien
gccttcccggcccacaaggctgcgcccacctct

SEQ ID NO: 1018550 - DNA, 33 bp, Homo sapien
gccttcccggcccacacggctgcgcccacctct

SEQ ID NO: 1018551 - DNA, 33 bp, Homo sapien
atttgcagagcagttacgttgaagaaagcgaat

SEQ ID NO: 1018552 - DNA, 33 bp, Homo sapien
atttgcagagcagttatgttgaagaaagcgaat

SEQ ID NO: 1018553 - DNA, 33 bp, Homo sapien
tcttgtttccaacaaaatttccaaatctgtttc

SEQ ID NO: 1018554 - DNA, 33 bp, Homo sapien
tcttgtttccaacaaagtttccaaatctgtttc

SEQ ID NO: 1018555 - DNA, 33 bp, Homo sapien
caggacaagagtacacacggaggccgtttccca

SEQ ID NO: 1018556 - DNA, 33 bp, Homo sapien
caggacaagagtacactcggaggccgtttccca

SEQ ID NO: 1018557 - DNA, 33 bp, Homo sapien
ggggatcaggttccaacggccacagggtgttca

SEQ ID NO: 1018558 - DNA, 33 bp, Homo sapien
ggggatcaggttccaatggccacagggtgttca

SEQ ID NO: 1018559 - DNA, 33 bp, Homo sapien
acctggctatttcaccaaaattttccattggtt

SEQ ID NO: 1018560 - DNA, 33 bp, Homo sapien
acctggctatttcaccgaaattttccattggtt

SEQ ID NO: 1018561 - DNA, 33 bp, Homo sapien
agtcacacagctagaagattaaaaagcaaggtt

SEQ ID NO: 1018562 - DNA, 33 bp, Homo sapien
agtcacacagctagaatattaaaaagcaaggtt

SEQ ID NO: 1018563 - DNA, 33 bp, Homo sapien
aggccactgtgctctaacaggaagagctgcaaa

SEQ ID NO: 1018564 - DNA, 33 bp, Homo sapien
aggccactgtgctctagcaggaagagctgcaaa

SEQ ID NO: 1018565 - DNA, 33 bp, Homo sapien
ctgcaggctagccaggacatattctcaggataa

SEQ ID NO: 1018566 - DNA, 33 bp, Homo sapien
ctgcaggctagccagggcatattctcaggataa

SEQ ID NO: 1018567 - DNA, 33 bp, Homo sapien
ggctgggcagaggcacgctatggctgacgctgg

SEQ ID NO: 1018568 - DNA, 33 bp, Homo sapien
ggctgggcagaggcactctatggctgacgctgg

SEQ ID NO: 1018569 - DNA, 33 bp, Homo sapien
ctggcaggtaatacaacgatctgagcatggggc

SEQ ID NO: 1018570 - DNA, 33 bp, Homo sapien
ctggcaggtaatacaatgatctgagcatggggc

SEQ ID NO: 1018571 - DNA, 33 bp, Homo sapien
aaagtgcttagaacaacgcttggcgctaagagc

SEQ ID NO: 1018572 - DNA, 33 bp, Homo sapien
aaagtgcttagaacaatgcttggcgctaagagc

SEQ ID NO: 1018573 - DNA, 33 bp, Homo sapien
aagacaaatccaaagacgcctcatgtttcagaa

SEQ ID NO: 1018574 - DNA, 33 bp, Homo sapien
aagacaaatccaaagatgcctcatgtttcagaa

SEQ ID NO: 1018575 - DNA, 33 bp, Homo sapien
gccagctccggggtccaaataaaacatgtggtc

SEQ ID NO: 1018576 - DNA, 33 bp, Homo sapien
gccagctccggggtccgaataaaacatgtggtc

SEQ ID NO: 1018577 - DNA, 33 bp, Homo sapien
cagaacaatcgtatgaagtagaaatgatcacta

SEQ ID NO: 1018578 - DNA, 33 bp, Homo sapien
cagaacaatcgtatgaggtagaaatgatcacta

SEQ ID NO: 1018579 - DNA, 33 bp, Homo sapien
attggtggcagtaacaagcatcagaggtaataa

SEQ ID NO: 1018580 - DNA, 33 bp, Homo sapien
attggtggcagtaacaggcatcagaggtaataa

SEQ ID NO: 1018581 - DNA, 33 bp, Homo sapien
ccctttgtccaggaccagctgacagctcatatt

SEQ ID NO: 1018582 - DNA, 33 bp, Homo sapien
ccctttgtccaggaccggctgacagctcatatt

SEQ ID NO: 1018583 - DNA, 33 bp, Homo sapien
tgcacgtgggtttctaagctaggctcttggctc

SEQ ID NO: 1018584 - DNA, 33 bp, Homo sapien
tgcacgtgggtttctacgctaggctcttggctc

SEQ ID NO: 1018585 - DNA, 33 bp, Homo sapien
agggagtggatgggagaatcagctatcactcct

SEQ ID NO: 1018586 - DNA, 33 bp, Homo sapien
agggagtggatgggagcatcagctatcactcct

SEQ ID NO: 1018587 - DNA, 33 bp, Homo sapien
gatctcacaacactgcggagggatttaagaacc

SEQ ID NO: 1018588 - DNA, 33 bp, Homo sapien
gatctcacaacactgctgagggatttaagaacc

SEQ ID NO: 1018589 - DNA, 33 bp, Homo sapien
ccagattttcaaagccacatgtaagaagcccag

SEQ ID NO: 1018590 - DNA, 33 bp, Homo sapien
ccagattttcaaagccgcatgtaagaagcccag

SEQ ID NO: 1018591 - DNA, 33 bp, Homo sapien
atagatcccattccaggacgtgtagctctaaaa

SEQ ID NO: 1018592 - DNA, 33 bp, Homo sapien
atagatcccattccagtacgtgtagctctaaaa

SEQ ID NO: 1018593 - DNA, 33 bp, Homo sapien
gtttttaagtgtctcacgattgttttaatttac

SEQ ID NO: 1018594 - DNA, 33 bp, Homo sapien
gtttttaagtgtctcatgattgttttaatttac

SEQ ID NO: 1018595 - DNA, 33 bp, Homo sapien
aggcttgtaagataaagaaggaagcaactgagt

SEQ ID NO: 1018596 - DNA, 33 bp, Homo sapien
aggcttgtaagataaataaggaagcaactgagt

SEQ ID NO: 1018597 - DNA, 33 bp, Homo sapien
ccatccagcttacgccacctacccttcttgact

SEQ ID NO: 1018598 - DNA, 33 bp, Homo sapien
ccatccagcttacgccgcctacccttcttgact

SEQ ID NO: 1018599 - DNA, 33 bp, Homo sapien
attctgcctgccaacaacaatctgcaaggaatc

SEQ ID NO: 1018600 - DNA, 33 bp, Homo sapien
attctgcctgccaacatcaatctgcaaggaatc

SEQ ID NO: 1018601 - DNA, 33 bp, Homo sapien
attcctgaactccacaatcctacaaagaaacaa

SEQ ID NO: 1018602 - DNA, 33 bp, Homo sapien
attcctgaactccacactcctacaaagaaacaa

SEQ ID NO: 1018603 - DNA, 33 bp, Homo sapien
tgttccacactgtcaaagcaacctggagggaga

SEQ ID NO: 1018604 - DNA, 33 bp, Homo sapien
tgttccacactgtcaaggcaacctggagggaga

SEQ ID NO: 1018605 - DNA, 33 bp, Homo sapien
gactcaccaggggaaaaactttactggtgttga

SEQ ID NO: 1018606 - DNA, 33 bp, Homo sapien
gactcaccaggggaaacactttactggtgttga

SEQ ID NO: 1018607 - DNA, 33 bp, Homo sapien
atcaatgatgcagataaaaatgaactaagggcc

SEQ ID NO: 1018608 - DNA, 33 bp, Homo sapien
atcaatgatgcagatacaaatgaactaagggcc

SEQ ID NO: 1018609 - DNA, 33 bp, Homo sapien
ctgcactttatttttcaacaaacttcagacatt

SEQ ID NO: 1018610 - DNA, 33 bp, Homo sapien
ctgcactttatttttcgacaaacttcagacatt

SEQ ID NO: 1018611 - DNA, 33 bp, Homo sapien
acaaaactagcacagcaacggtggtgtttctgc

SEQ ID NO: 1018612 - DNA, 33 bp, Homo sapien
acaaaactagcacagcgacggtggtgtttctgc

SEQ ID NO: 1018613 - DNA, 33 bp, Homo sapien
gatgatcttcaataaaatcatcccatttggttt

SEQ ID NO: 1018614 - DNA, 33 bp, Homo sapien
gatgatcttcaataaagtcatcccatttggttt

SEQ ID NO: 1018615 - DNA, 33 bp, Homo sapien
ttgttgattctttcccaatgtcttggctatgaa

SEQ ID NO: 1018616 - DNA, 33 bp, Homo sapien
ttgttgattctttcccgatgtcttggctatgaa

SEQ ID NO: 1018617 - DNA, 33 bp, Homo sapien
agctaaagcctgtaggccagttgcctccagcca

SEQ ID NO: 1018618 - DNA, 33 bp, Homo sapien
agctaaagcctgtaggtcagttgcctccagcca

SEQ ID NO: 1018619 - DNA, 33 bp, Homo sapien
tccagtggtcaccatcaactgcatcagctcaac

SEQ ID NO: 1018620 - DNA, 33 bp, Homo sapien
tccagtggtcaccatcgactgcatcagctcaac

SEQ ID NO: 1018621 - DNA, 33 bp, Homo sapien
tcttcccagagcatcaagttggaaaatctaaga

SEQ ID NO: 1018622 - DNA, 33 bp, Homo sapien
tcttcccagagcatcaggttggaaaatctaaga

SEQ ID NO: 1018623 - DNA, 33 bp, Homo sapien
tgaagggcagttcccccgaggaatcctcactag

SEQ ID NO: 1018624 - DNA, 33 bp, Homo sapien
tgaagggcagttcccctgaggaatcctcactag

SEQ ID NO: 1018625 - DNA, 33 bp, Homo sapien
ctgtgcgctctgagacagcgactgcaggcgaac

SEQ ID NO: 1018626 - DNA, 33 bp, Homo sapien
ctgtgcgctctgagacggcgactgcaggcgaac

SEQ ID NO: 1018627 - DNA, 33 bp, Homo sapien
gtcagcacccaccaaacgatccttttctcaaag

SEQ ID NO: 1018628 - DNA, 33 bp, Homo sapien
gtcagcacccaccaaatgatccttttctcaaag

SEQ ID NO: 1018629 - DNA, 33 bp, Homo sapien
gaagagtagaatccagaccatagtggtggccca

SEQ ID NO: 1018630 - DNA, 33 bp, Homo sapien
gaagagtagaatccaggccatagtggtggccca

SEQ ID NO: 1018631 - DNA, 33 bp, Homo sapien
ttggtcaccttcaagcacagccggctggtcaca

SEQ ID NO: 1018632 - DNA, 33 bp, Homo sapien
ttggtcaccttcaagcgcagccggctggtcaca

SEQ ID NO: 1018633 - DNA, 33 bp, Homo sapien
gtacctaggtgcttaccggccatcccagtctgc

SEQ ID NO: 1018634 - DNA, 33 bp, Homo sapien
gtacctaggtgcttactggccatcccagtctgc

SEQ ID NO: 1018635 - DNA, 33 bp, Homo sapien
cttggggaacgtttgacgtgcaaggctctgtgt

SEQ ID NO: 1018636 - DNA, 33 bp, Homo sapien
cttggggaacgtttgatgtgcaaggctctgtgt

SEQ ID NO: 1018637 - DNA, 33 bp, Homo sapien
ttcacaacagcaaataggtaccgaatgggggcc

SEQ ID NO: 1018638 - DNA, 33 bp, Homo sapien
ttcacaacagcaaatatgtaccgaatgggggcc

SEQ ID NO: 1018639 - DNA, 33 bp, Homo sapien
cactctcattctctcacgagtctacagtggagg

SEQ ID NO: 1018640 - DNA, 33 bp, Homo sapien
cactctcattctctcatgagtctacagtggagg

SEQ ID NO: 1018641 - DNA, 33 bp, Homo sapien
aacttgagcggggagcacatgagaactcgggcc

SEQ ID NO: 1018642 - DNA, 33 bp, Homo sapien
aacttgagcggggagcgcatgagaactcgggcc

SEQ ID NO: 1018643 - DNA, 33 bp, Homo sapien
gacaagtgggtagatgcacttgcagacacagta

SEQ ID NO: 1018644 - DNA, 33 bp, Homo sapien
gacaagtgggtagatggacttgcagacacagta

SEQ ID NO: 1018645 - DNA, 33 bp, Homo sapien
tactatcctcagtcaacggtgcttttgtttggt

SEQ ID NO: 1018646 - DNA, 33 bp, Homo sapien
tactatcctcagtcaagggtgcttttgtttggt

SEQ ID NO: 1018647 - DNA, 33 bp, Homo sapien
taaaaagataacatgaaagtgactagccctgca

SEQ ID NO: 1018648 - DNA, 33 bp, Homo sapien
taaaaagataacatgacagtgactagccctgca

SEQ ID NO: 1018649 - DNA, 33 bp, Homo sapien
gaagcatttagggagacagttttgagctatgtg

SEQ ID NO: 1018650 - DNA, 33 bp, Homo sapien
gaagcatttagggagatagttttgagctatgtg

SEQ ID NO: 1018651 - DNA, 33 bp, Homo sapien
ggcggtgctgaggaaactaataatcatctcatc

SEQ ID NO: 1018652 - DNA, 33 bp, Homo sapien
ggcggtgctgaggaaattaataatcatctcatc

SEQ ID NO: 1018653 - DNA, 33 bp, Homo sapien
gggtgaggtaatgacaaagttggaactggaggc

SEQ ID NO: 1018654 - DNA, 33 bp, Homo sapien
gggtgaggtaatgacagagttggaactggaggc

SEQ ID NO: 1018655 - DNA, 33 bp, Homo sapien
tgctcacactctaatacaaattccactgtgacc

SEQ ID NO: 1018656 - DNA, 33 bp, Homo sapien
tgctcacactctaatagaaattccactgtgacc

SEQ ID NO: 1018657 - DNA, 33 bp, Homo sapien
gaagacatctaaaaaccgtattttggtgtattt

SEQ ID NO: 1018658 - DNA, 33 bp, Homo sapien
gaagacatctaaaaacggtattttggtgtattt

SEQ ID NO: 1018659 - DNA, 33 bp, Homo sapien
tccatatattgacataaccagcaatatctctgt

SEQ ID NO: 1018660 - DNA, 33 bp, Homo sapien
tccatatattgacatatccagcaatatctctgt

SEQ ID NO: 1018661 - DNA, 33 bp, Homo sapien
cagttctgtcactcgcagagtcctacagggcag

SEQ ID NO: 1018662 - DNA, 33 bp, Homo sapien
cagttctgtcactcgcggagtcctacagggcag

SEQ ID NO: 1018663 - DNA, 33 bp, Homo sapien
aatttacaaaatagcaagactcaaaatgtgaac

SEQ ID NO: 1018664 - DNA, 33 bp, Homo sapien
aatttacaaaatagcaggactcaaaatgtgaac

SEQ ID NO: 1018665 - DNA, 33 bp, Homo sapien
ctcgctgtttgaaatcccagggcaagatactga

SEQ ID NO: 1018666 - DNA, 33 bp, Homo sapien
ctcgctgtttgaaatctcagggcaagatactga

SEQ ID NO: 1018667 - DNA, 33 bp, Homo sapien
ccacctaacaagaaaaccatgttaatgtcctgc

SEQ ID NO: 1018668 - DNA, 33 bp, Homo sapien
ccacctaacaagaaaatcatgttaatgtcctgc

SEQ ID NO: 1018669 - DNA, 33 bp, Homo sapien
gaactcaagagtaagacgttcttgggaatttcc

SEQ ID NO: 1018670 - DNA, 33 bp, Homo sapien
gaactcaagagtaagatgttcttgggaatttcc

SEQ ID NO: 1018671 - DNA, 33 bp, Homo sapien
gagttctttagaacaactcaccaggctttcaga

SEQ ID NO: 1018672 - DNA, 33 bp, Homo sapien
gagttctttagaacaattcaccaggctttcaga

SEQ ID NO: 1018673 - DNA, 33 bp, Homo sapien
aatcgtgcaaactacacgaagtccccagattgc

SEQ ID NO: 1018674 - DNA, 33 bp, Homo sapien
aatcgtgcaaactacatgaagtccccagattgc

SEQ ID NO: 1018675 - DNA, 33 bp, Homo sapien
tcaatatcatattctgcaaaatgggtgaagctg

SEQ ID NO: 1018676 - DNA, 33 bp, Homo sapien
tcaatatcatattctgtaaaatgggtgaagctg

SEQ ID NO: 1018677 - DNA, 33 bp, Homo sapien
aggaggaaggtgacgaagtgggacttgatctga

SEQ ID NO: 1018678 - DNA, 33 bp, Homo sapien
aggaggaaggtgacgaggtgggacttgatctga

SEQ ID NO: 1018679 - DNA, 33 bp, Homo sapien
aacagcagagagggaccgggatggaatagactt

SEQ ID NO: 1018680 - DNA, 33 bp, Homo sapien
aacagcagagagggactgggatggaatagactt

SEQ ID NO: 1018681 - DNA, 33 bp, Homo sapien
tctgaaggaagaaaaaagaagtctattggccca

SEQ ID NO: 1018682 - DNA, 33 bp, Homo sapien
tctgaaggaagaaaaaggaagtctattggccca

SEQ ID NO: 1018683 - DNA, 33 bp, Homo sapien
gttcaggcccggcaaacgaagcagggcggggct

SEQ ID NO: 1018684 - DNA, 33 bp, Homo sapien
gttcaggcccggcaaaggaagcagggcggggct

SEQ ID NO: 1018685 - DNA, 33 bp, Homo sapien
tttgccgggcctgaacggtgtcagcattgaggg

SEQ ID NO: 1018686 - DNA, 33 bp, Homo sapien
tttgccgggcctgaactgtgtcagcattgaggg

SEQ ID NO: 1018687 - DNA, 33 bp, Homo sapien
atctaccatagccctaagctttcatctcaggcc

SEQ ID NO: 1018688 - DNA, 33 bp, Homo sapien
atctaccatagccctaggctttcatctcaggcc

SEQ ID NO: 1018689 - DNA, 33 bp, Homo sapien
gggacaaaggaagagaaatgctgtcaaaatcat

SEQ ID NO: 1018690 - DNA, 33 bp, Homo sapien
gggacaaaggaagagagatgctgtcaaaatcat

SEQ ID NO: 1018691 - DNA, 33 bp, Homo sapien
agagaatcacttgtacaaacttttctcattctc

SEQ ID NO: 1018692 - DNA, 33 bp, Homo sapien
agagaatcacttgtacgaacttttctcattctc

SEQ ID NO: 1018693 - DNA, 33 bp, Homo sapien
aggttcatccaggttgcagtatgtgtcagaatt

SEQ ID NO: 1018694 - DNA, 33 bp, Homo sapien
aggttcatccaggttgtagtatgtgtcagaatt

SEQ ID NO: 1018695 - DNA, 33 bp, Homo sapien
acagtgggaagacgggacatggtaattaggagt

SEQ ID NO: 1018696 - DNA, 33 bp, Homo sapien
acagtgggaagacggggcatggtaattaggagt

SEQ ID NO: 1018697 - DNA, 33 bp, Homo sapien
ccattaactgaagtcacgaggtatgcctccttg

SEQ ID NO: 1018698 - DNA, 33 bp, Homo sapien
ccattaactgaagtcatgaggtatgcctccttg

SEQ ID NO: 1018699 - DNA, 33 bp, Homo sapien
acaaagggaaggatccacaatttacattcttgg

SEQ ID NO: 1018700 - DNA, 33 bp, Homo sapien
acaaagggaaggatccgcaatttacattcttgg

SEQ ID NO: 1018701 - DNA, 33 bp, Homo sapien
tatatattttatttgacctgggtcttcacatat

SEQ ID NO: 1018702 - DNA, 33 bp, Homo sapien
tatatattttatttgatctgggtcttcacatat

SEQ ID NO: 1018703 - DNA, 33 bp, Homo sapien
aattaagttacccaaaatcaaagctaactactg

SEQ ID NO: 1018704 - DNA, 33 bp, Homo sapien
aattaagttacccaaagtcaaagctaactactg

SEQ ID NO: 1018705 - DNA, 33 bp, Homo sapien
agtgttagtggtcaaacgatttgtgtggaaaat

SEQ ID NO: 1018706 - DNA, 33 bp, Homo sapien
agtgttagtggtcaaatgatttgtgtggaaaat

SEQ ID NO: 1018707 - DNA, 33 bp, Homo sapien
ttataacctcctggaaggtcttctgggttttga

SEQ ID NO: 1018708 - DNA, 33 bp, Homo sapien
ttataacctcctggaatgtcttctgggttttga

SEQ ID NO: 1018709 - DNA, 33 bp, Homo sapien
ttcttctattgtccaggatagaattgagccagc

SEQ ID NO: 1018710 - DNA, 33 bp, Homo sapien
ttcttctattgtccagtatagaattgagccagc

SEQ ID NO: 1018711 - DNA, 33 bp, Homo sapien
gtcagggtttaatgaagtgggataaaccacaca

SEQ ID NO: 1018712 - DNA, 33 bp, Homo sapien
gtcagggtttaatgaattgggataaaccacaca

SEQ ID NO: 1018713 - DNA, 33 bp, Homo sapien
accttctgtaaaatgacggaataggattatgat

SEQ ID NO: 1018714 - DNA, 33 bp, Homo sapien
accttctgtaaaatgatggaataggattatgat

SEQ ID NO: 1018715 - DNA, 33 bp, Homo sapien
tctgcctactgttgacactgaatcctgggcagt

SEQ ID NO: 1018716 - DNA, 33 bp, Homo sapien
tctgcctactgttgacgctgaatcctgggcagt

SEQ ID NO: 1018717 - DNA, 33 bp, Homo sapien
tacttacagtatttggcaccgttacatgctgta

SEQ ID NO: 1018718 - DNA, 33 bp, Homo sapien
tacttacagtatttggtaccgttacatgctgta

SEQ ID NO: 1018719 - DNA, 33 bp, Homo sapien
caatttcatgcataacactaacatatcttttca

SEQ ID NO: 1018720 - DNA, 33 bp, Homo sapien
caatttcatgcataacgctaacatatcttttca

SEQ ID NO: 1018721 - DNA, 33 bp, Homo sapien
aaatcccaaagatacaccactgcttgacgcaaa

SEQ ID NO: 1018722 - DNA, 33 bp, Homo sapien
aaatcccaaagatacatcactgcttgacgcaaa

SEQ ID NO: 1018723 - DNA, 33 bp, Homo sapien
tgacgatctgagcttaaaatattccgtatacta

SEQ ID NO: 1018724 - DNA, 33 bp, Homo sapien
tgacgatctgagcttataatattccgtatacta

SEQ ID NO: 1018725 - DNA, 33 bp, Homo sapien
gcacaaatatcagaacaacaaaattatcaagac

SEQ ID NO: 1018726 - DNA, 33 bp, Homo sapien
gcacaaatatcagaacgacaaaattatcaagac

SEQ ID NO: 1018727 - DNA, 33 bp, Homo sapien
tgagattttgcagtctcactggtggaaatagac

SEQ ID NO: 1018728 - DNA, 33 bp, Homo sapien
tgagattttgcagtctgactggtggaaatagac

SEQ ID NO: 1018729 - DNA, 33 bp, Homo sapien
catgttaagtcattataagctaaggtcttggaa

SEQ ID NO: 1018730 - DNA, 33 bp, Homo sapien
catgttaagtcattatgagctaaggtcttggaa

SEQ ID NO: 1018731 - DNA, 33 bp, Homo sapien
aatggcattacacagcacactattacggcaggt

SEQ ID NO: 1018732 - DNA, 33 bp, Homo sapien
aatggcattacacagcgcactattacggcaggt

SEQ ID NO: 1018733 - DNA, 33 bp, Homo sapien
ccatctggtagttttgaaaattcaagcatagct

SEQ ID NO: 1018734 - DNA, 33 bp, Homo sapien
ccatctggtagttttgtaaattcaagcatagct

SEQ ID NO: 1018735 - DNA, 33 bp, Homo sapien
tggctgccacttgacacggagaatgacatctaa

SEQ ID NO: 1018736 - DNA, 33 bp, Homo sapien
tggctgccacttgacatggagaatgacatctaa

SEQ ID NO: 1018737 - DNA, 33 bp, Homo sapien
aaatcttatttcttagccccctcacagattttc

SEQ ID NO: 1018738 - DNA, 33 bp, Homo sapien
aaatcttatttcttagtcccctcacagattttc

SEQ ID NO: 1018739 - DNA, 33 bp, Homo sapien
agttctgaacagtatcaatgcggaaaccaagaa

SEQ ID NO: 1018740 - DNA, 33 bp, Homo sapien
agttctgaacagtatcgatgcggaaaccaagaa

SEQ ID NO: 1018741 - DNA, 33 bp, Homo sapien
attccagctacagatagatgagcaatggcaaaa

SEQ ID NO: 1018742 - DNA, 33 bp, Homo sapien
attccagctacagatatatgagcaatggcaaaa

SEQ ID NO: 1018743 - DNA, 33 bp, Homo sapien
gaaaatactggttcaccgagttttattttgtgt

SEQ ID NO: 1018744 - DNA, 33 bp, Homo sapien
gaaaatactggttcactgagttttattttgtgt

SEQ ID NO: 1018745 - DNA, 33 bp, Homo sapien
acaataggcaagcatcaaaaagaaacttggatt

SEQ ID NO: 1018746 - DNA, 33 bp, Homo sapien
acaataggcaagcatcgaaaagaaacttggatt

SEQ ID NO: 1018747 - DNA, 33 bp, Homo sapien
gggtgcaacatcctgaaagcatgggtttcacta

SEQ ID NO: 1018748 - DNA, 33 bp, Homo sapien
gggtgcaacatcctgagagcatgggtttcacta

SEQ ID NO: 1018749 - DNA, 33 bp, Homo sapien
cttcagaggaacataacggaatccatagcctct

SEQ ID NO: 1018750 - DNA, 33 bp, Homo sapien
cttcagaggaacataatggaatccatagcctct

SEQ ID NO: 1018751 - DNA, 33 bp, Homo sapien
atttttaactagtagacgctatgatttgacatg

SEQ ID NO: 1018752 - DNA, 33 bp, Homo sapien
atttttaactagtagaggctatgatttgacatg

SEQ ID NO: 1018753 - DNA, 33 bp, Homo sapien
tatcctatcttacatcacaatctcaggataaag

SEQ ID NO: 1018754 - DNA, 33 bp, Homo sapien
tatcctatcttacatcccaatctcaggataaag

SEQ ID NO: 1018755 - DNA, 33 bp, Homo sapien
gttcccctttcctcaacggcaattactgttacg

SEQ ID NO: 1018756 - DNA, 33 bp, Homo sapien
gttcccctttcctcaatggcaattactgttacg

SEQ ID NO: 1018757 - DNA, 33 bp, Homo sapien
acagtataatgggccaacagaacatgagaggca

SEQ ID NO: 1018758 - DNA, 33 bp, Homo sapien
acagtataatgggccagcagaacatgagaggca

SEQ ID NO: 1018759 - DNA, 33 bp, Homo sapien
atcaactgaaccaataacattaaagaaaatgaa

SEQ ID NO: 1018760 - DNA, 33 bp, Homo sapien
atcaactgaaccaataccattaaagaaaatgaa

SEQ ID NO: 1018761 - DNA, 33 bp, Homo sapien
ggaaaagaacttgataaaaggctgttggaagtg

SEQ ID NO: 1018762 - DNA, 33 bp, Homo sapien
ggaaaagaacttgatagaaggctgttggaagtg

SEQ ID NO: 1018763 - DNA, 33 bp, Homo sapien
tgtgtacactgttttacgtaagactgagctatg

SEQ ID NO: 1018764 - DNA, 33 bp, Homo sapien
tgtgtacactgttttatgtaagactgagctatg

SEQ ID NO: 1018765 - DNA, 33 bp, Homo sapien
ttcaaaacacaaatagacctcctggactaaacc

SEQ ID NO: 1018766 - DNA, 33 bp, Homo sapien
ttcaaaacacaaataggcctcctggactaaacc

SEQ ID NO: 1018767 - DNA, 33 bp, Homo sapien
agccttgttacttctaagcaccttcagctattt

SEQ ID NO: 1018768 - DNA, 33 bp, Homo sapien
agccttgttacttctaggcaccttcagctattt

SEQ ID NO: 1018769 - DNA, 33 bp, Homo sapien
aagatcagattggaaaagattcttggtgattct

SEQ ID NO: 1018770 - DNA, 33 bp, Homo sapien
aagatcagattggaaaggattcttggtgattct

SEQ ID NO: 1018771 - DNA, 33 bp, Homo sapien
ttagaggggccaccacaataactgtactgttgg

SEQ ID NO: 1018772 - DNA, 33 bp, Homo sapien
ttagaggggccaccacgataactgtactgttgg

SEQ ID NO: 1018773 - DNA, 33 bp, Homo sapien
atgagtcttgataccaagtctgagagctgatgg

SEQ ID NO: 1018774 - DNA, 33 bp, Homo sapien
atgagtcttgataccaggtctgagagctgatgg

SEQ ID NO: 1018775 - DNA, 33 bp, Homo sapien
ctgctggtgtattcaaaagcagaccctgtctca

SEQ ID NO: 1018776 - DNA, 33 bp, Homo sapien
ctgctggtgtattcaagagcagaccctgtctca

SEQ ID NO: 1018777 - DNA, 33 bp, Homo sapien
caaaaagtcagaattccactgtgtgacttcagc

SEQ ID NO: 1018778 - DNA, 33 bp, Homo sapien
caaaaagtcagaattctactgtgtgacttcagc

SEQ ID NO: 1018779 - DNA, 33 bp, Homo sapien
tgaaaattagggattacggtagattaagagcag

SEQ ID NO: 1018780 - DNA, 33 bp, Homo sapien
tgaaaattagggattatggtagattaagagcag

SEQ ID NO: 1018781 - DNA, 33 bp, Homo sapien
tacatctatgaaaaacagtattgctaccaaaaa

SEQ ID NO: 1018782 - DNA, 33 bp, Homo sapien
tacatctatgaaaaactgtattgctaccaaaaa

SEQ ID NO: 1018783 - DNA, 33 bp, Homo sapien
gtttttcatagatgtacatttcatagattacca

SEQ ID NO: 1018784 - DNA, 33 bp, Homo sapien
gtttttcatagatgtagatttcatagattacca

SEQ ID NO: 1018785 - DNA, 33 bp, Homo sapien
ctttggtggaaccttcacctttgagatcaggaa

SEQ ID NO: 1018786 - DNA, 33 bp, Homo sapien
ctttggtggaaccttcgcctttgagatcaggaa

SEQ ID NO: 1018787 - DNA, 33 bp, Homo sapien
tttctccatctataaaactgcagggttggacta

SEQ ID NO: 1018788 - DNA, 33 bp, Homo sapien
tttctccatctataaacctgcagggttggacta

SEQ ID NO: 1018789 - DNA, 33 bp, Homo sapien
aactagaatgcacaaactttcttttgaaacctc

SEQ ID NO: 1018790 - DNA, 33 bp, Homo sapien
aactagaatgcacaaattttcttttgaaacctc

SEQ ID NO: 1018791 - DNA, 33 bp, Homo sapien
aaagagctccatggaaaaaatgggtggactcca

SEQ ID NO: 1018792 - DNA, 33 bp, Homo sapien
aaagagctccatggaacaaatgggtggactcca

SEQ ID NO: 1018793 - DNA, 33 bp, Homo sapien
gaaggtgcatgaatacagagcagcccctggagg

SEQ ID NO: 1018794 - DNA, 33 bp, Homo sapien
gaaggtgcatgaatacggagcagcccctggagg

SEQ ID NO: 1018795 - DNA, 33 bp, Homo sapien
agcaccagcttggcagaatctggggtgagggga

SEQ ID NO: 1018796 - DNA, 33 bp, Homo sapien
agcaccagcttggcagtatctggggtgagggga

SEQ ID NO: 1018797 - DNA, 33 bp, Homo sapien
agcgtcagtgggaaccagaacatgatggaggaa

SEQ ID NO: 1018798 - DNA, 33 bp, Homo sapien
agcgtcagtgggaaccggaacatgatggaggaa

SEQ ID NO: 1018799 - DNA, 33 bp, Homo sapien
gcacaggtcagttacaataaaccccagcagtca

SEQ ID NO: 1018800 - DNA, 33 bp, Homo sapien
gcacaggtcagttacagtaaaccccagcagtca

SEQ ID NO: 1018801 - DNA, 33 bp, Homo sapien
agggacacaccagggaccgtaaatgtttatgtt

SEQ ID NO: 1018802 - DNA, 33 bp, Homo sapien
agggacacaccagggatcgtaaatgtttatgtt

SEQ ID NO: 1018803 - DNA, 33 bp, Homo sapien
atgtgtccaacaccaacgtgacaagtacatata

SEQ ID NO: 1018804 - DNA, 33 bp, Homo sapien
atgtgtccaacaccaatgtgacaagtacatata

SEQ ID NO: 1018805 - DNA, 33 bp, Homo sapien
atttatctgatttatgaatgatggtttggtatg

SEQ ID NO: 1018806 - DNA, 33 bp, Homo sapien
atttatctgatttatgcatgatggtttggtatg

SEQ ID NO: 1018807 - DNA, 33 bp, Homo sapien
gtagtgttcatgggtaaatattttctaggctat

SEQ ID NO: 1018808 - DNA, 33 bp, Homo sapien
gtagtgttcatgggtacatattttctaggctat

SEQ ID NO: 1018809 - DNA, 33 bp, Homo sapien
aaaactatgcatttccaaagtcacatggattaa

SEQ ID NO: 1018810 - DNA, 33 bp, Homo sapien
aaaactatgcatttccgaagtcacatggattaa

SEQ ID NO: 1018811 - DNA, 33 bp, Homo sapien
acacccactgaagcaaaaactcctagaattacc

SEQ ID NO: 1018812 - DNA, 33 bp, Homo sapien
acacccactgaagcaagaactcctagaattacc

SEQ ID NO: 1018813 - DNA, 33 bp, Homo sapien
aatcatctttcttcacccgtttcatgaagcttt

SEQ ID NO: 1018814 - DNA, 33 bp, Homo sapien
aatcatctttcttcacgcgtttcatgaagcttt

SEQ ID NO: 1018815 - DNA, 33 bp, Homo sapien; identical to SEQ ID NO: 1018813

SEQ ID NO: 1018816 - DNA, 33 bp, Homo sapien; identical to SEQ ID NO: 1018814

SEQ ID NO: 1018817 - DNA, 33 bp, Homo sapien
tgtatagtaactttcacgttgaggacaagtctc

SEQ ID NO: 1018818 - DNA, 33 bp, Homo sapien
tgtatagtaactttcatgttgaggacaagtctc

SEQ ID NO: 1018819 - DNA, 33 bp, Homo sapien
gatagacaagaaagaaacattgggagcattgtg

SEQ ID NO: 1018820 - DNA, 33 bp, Homo sapien
gatagacaagaaagaaccattgggagcattgtg

SEQ ID NO: 1018821 - DNA, 33 bp, Homo sapien
tgagagaataaaactggaactaatgcctctgag

SEQ ID NO: 1018822 - DNA, 33 bp, Homo sapien
tgagagaataaaactgtaactaatgcctctgag

SEQ ID NO: 1018823 - DNA, 33 bp, Homo sapien
ctacctggtgaactgacctggggcaagtaattt

SEQ ID NO: 1018824 - DNA, 33 bp, Homo sapien
ctacctggtgaactgatctggggcaagtaattt

SEQ ID NO: 1018825 - DNA, 33 bp, Homo sapien
ggttgggctggatgaccgcttgatttggctaat

SEQ ID NO: 1018826 - DNA, 33 bp, Homo sapien
ggttgggctggatgactgcttgatttggctaat

SEQ ID NO: 1018827 - DNA, 33 bp, Homo sapien
cacatcttaattctatcacactcaccttttctc

SEQ ID NO: 1018828 - DNA, 33 bp, Homo sapien
cacatcttaattctattacactcaccttttctc

SEQ ID NO: 1018829 - DNA, 33 bp, Homo sapien
ttaacttctagaaaaacttgccacacattgtag

SEQ ID NO: 1018830 - DNA, 33 bp, Homo sapien
ttaacttctagaaaaatttgccacacattgtag

SEQ ID NO: 1018831 - DNA, 33 bp, Homo sapien
caggctgactgcttcacgactgccatgttcact

SEQ ID NO: 1018832 - DNA, 33 bp, Homo sapien
caggctgactgcttcaggactgccatgttcact

SEQ ID NO: 1018833 - DNA, 33 bp, Homo sapien
cgatgctatccacaatcacttgcaagatgactc

SEQ ID NO: 1018834 - DNA, 33 bp, Homo sapien
cgatgctatccacaatgacttgcaagatgactc

SEQ ID NO: 1018835 - DNA, 33 bp, Homo sapien
ggttcagtgcagggatcaataaagggctagaca

SEQ ID NO: 1018836 - DNA, 33 bp, Homo sapien
ggttcagtgcagggatgaataaagggctagaca

SEQ ID NO: 1018837 - DNA, 33 bp, Homo sapien
cattttcttctctcatcagaactcatctaagaa

SEQ ID NO: 1018838 - DNA, 33 bp, Homo sapien
cattttcttctctcattagaactcatctaagaa

SEQ ID NO: 1018839 - DNA, 33 bp, Homo sapien
aatctcacagttgacaataaagacttggacaga

SEQ ID NO: 1018840 - DNA, 33 bp, Homo sapien
aatctcacagttgacagtaaagacttggacaga

SEQ ID NO: 1018841 - DNA, 33 bp, Homo sapien
gaatagaagtagcaaacgttagctctggaagga

SEQ ID NO: 1018842 - DNA, 33 bp, Homo sapien
gaatagaagtagcaaatgttagctctggaagga

SEQ ID NO: 1018843 - DNA, 33 bp, Homo sapien
aaccttgagaatgttacgtacttttctgagcct

SEQ ID NO: 1018844 - DNA, 33 bp, Homo sapien
aaccttgagaatgttatgtacttttctgagcct

SEQ ID NO: 1018845 - DNA, 33 bp, Homo sapien
tagaatgcctcctgtaactagaggctggtgagc

SEQ ID NO: 1018846 - DNA, 33 bp, Homo sapien
tagaatgcctcctgtagctagaggctggtgagc

SEQ ID NO: 1018847 - DNA, 33 bp, Homo sapien
attcagctgggtttgacacttggaggcttaatt

SEQ ID NO: 1018848 - DNA, 33 bp, Homo sapien
attcagctgggtttgatacttggaggcttaatt

SEQ ID NO: 1018849 - DNA, 33 bp, Homo sapien
taaggttgtgttttccccattgtgaagatactg

SEQ ID NO: 1018850 - DNA, 33 bp, Homo sapien
taaggttgtgttttccgcattgtgaagatactg

SEQ ID NO: 1018851 - DNA, 33 bp, Homo sapien
cctggaggtgcaaaacaaaagtcagtgaacttc

SEQ ID NO: 1018852 - DNA, 33 bp, Homo sapien
cctggaggtgcaaaacgaaagtcagtgaacttc

SEQ ID NO: 1018853 - DNA, 33 bp, Homo sapien
aacacctggatccaccaatctggaacccaagtt

SEQ ID NO: 1018854 - DNA, 33 bp, Homo sapien
aacacctggatccaccgatctggaacccaagtt

SEQ ID NO: 1018855 - DNA, 33 bp, Homo sapien
aggcctcaattttcccactttgagacactctgt

SEQ ID NO: 1018856 - DNA, 33 bp, Homo sapien
aggcctcaattttcccgctttgagacactctgt

SEQ ID NO: 1018857 - DNA, 33 bp, Homo sapien
taaagtcactaacccacgaagctgcagaactgt

SEQ ID NO: 1018858 - DNA, 33 bp, Homo sapien
taaagtcactaacccatgaagctgcagaactgt

SEQ ID NO: 1018859 - DNA, 33 bp, Homo sapien
tagtgctgagtgattacggttctgttctcagca

SEQ ID NO: 1018860 - DNA, 33 bp, Homo sapien
tagtgctgagtgattatggttctgttctcagca

SEQ ID NO: 1018861 - DNA, 33 bp, Homo sapien
gaaaatgagttctgtcccctcccaggtcagagg

SEQ ID NO: 1018862 - DNA, 33 bp, Homo sapien
gaaaatgagttctgtctcctcccaggtcagagg

SEQ ID NO: 1018863 - DNA, 33 bp, Homo sapien
gtgaggaatatcataagtagatcagtgttgggt

SEQ ID NO: 1018864 - DNA, 33 bp, Homo sapien
gtgaggaatatcataattagatcagtgttgggt

SEQ ID NO: 1018865 - DNA, 33 bp, Homo sapien
tctgccgcaaggacgtaaagggtcacactgcag

SEQ ID NO: 1018866 - DNA, 33 bp, Homo sapien
tctgccgcaaggacgtcaagggtcacactgcag

SEQ ID NO: 1018867 - DNA, 33 bp, Homo sapien
aatacaaagggataaaccattgatgtagacaag

SEQ ID NO: 1018868 - DNA, 33 bp, Homo sapien
aatacaaagggataaatcattgatgtagacaag

SEQ ID NO: 1018869 - DNA, 33 bp, Homo sapien
gaattaagcactactgaagcttatagagatcaa

SEQ ID NO: 1018870 - DNA, 33 bp, Homo sapien
gaattaagcactactgcagcttatagagatcaa

SEQ ID NO: 1018871 - DNA, 33 bp, Homo sapien
tcccgaccaccgcgcagaaaagctgtatctgca

SEQ ID NO: 1018872 - DNA, 33 bp, Homo sapien
tcccgaccaccgcgcataaaagctgtatctgca

SEQ ID NO: 1018873 - DNA, 33 bp, Homo sapien
tcctttcaatctaataaacaaagccagcaattt

SEQ ID NO: 1018874 - DNA, 33 bp, Homo sapien
tcctttcaatctaatatacaaagccagcaattt

SEQ ID NO: 1018875 - DNA, 33 bp, Homo sapien
ctttaaaccagaaaaacagatacaggatagaaa

SEQ ID NO: 1018876 - DNA, 33 bp, Homo sapien
ctttaaaccagaaaaagagatacaggatagaaa

SEQ ID NO: 1018877 - DNA, 33 bp, Homo sapien
atgtatcccgtaactacgtacaactgttatgta

SEQ ID NO: 1018878 - DNA, 33 bp, Homo sapien
atgtatcccgtaactatgtacaactgttatgta

SEQ ID NO: 1018879 - DNA, 33 bp, Homo sapien
attccatcatcctaagaactcttgagggaaagg

SEQ ID NO: 1018880 - DNA, 33 bp, Homo sapien
attccatcatcctaagtactcttgagggaaagg

SEQ ID NO: 1018881 - DNA, 33 bp, Homo sapien
agcattttgaagaaaccaattcccaagagtcag

SEQ ID NO: 1018882 - DNA, 33 bp, Homo sapien
agcattttgaagaaactaattcccaagagtcag

SEQ ID NO: 1018883 - DNA, 33 bp, Homo sapien
agtgttggccaatcccaaagcagcagctactcc

SEQ ID NO: 1018884 - DNA, 33 bp, Homo sapien
agtgttggccaatcccgaagcagcagctactcc

SEQ ID NO: 1018885 - DNA, 33 bp, Homo sapien
tccattatcacagaagcagaagaaagacaccta

SEQ ID NO: 1018886 - DNA, 33 bp, Homo sapien
tccattatcacagaagtagaagaaagacaccta

SEQ ID NO: 1018887 - DNA, 33 bp, Homo sapien
aatgtagactgactcagccagtgggtctcaaac

SEQ ID NO: 1018888 - DNA, 33 bp, Homo sapien
aatgtagactgactcatccagtgggtctcaaac

SEQ ID NO: 1018889 - DNA, 33 bp, Homo sapien
atcctgctggtttccacatctgtatttatgtac

SEQ ID NO: 1018890 - DNA, 33 bp, Homo sapien
atcctgctggtttccagatctgtatttatgtac

SEQ ID NO: 1018891 - DNA, 33 bp, Homo sapien
ttagaataataaattcacaaattccatatttct

SEQ ID NO: 1018892 - DNA, 33 bp, Homo sapien
ttagaataataaattcgcaaattccatatttct

SEQ ID NO: 1018893 - DNA, 33 bp, Homo sapien
ctgaatttttcaggtaataccacagtaaattcc

SEQ ID NO: 1018894 - DNA, 33 bp, Homo sapien
ctgaatttttcaggtattaccacagtaaattcc

SEQ ID NO: 1018895 - DNA, 33 bp, Homo sapien
tcttccctgggagcacccaagatcttactaagt

SEQ ID NO: 1018896 - DNA, 33 bp, Homo sapien
tcttccctgggagcactcaagatcttactaagt

SEQ ID NO: 1018897 - DNA, 33 bp, Homo sapien
taagcagagtaaatctaaatgaaagtaactggg

SEQ ID NO: 1018898 - DNA, 33 bp, Homo sapien
taagcagagtaaatctgaatgaaagtaactggg

SEQ ID NO: 1018899 - DNA, 33 bp, Homo sapien
ccttgtagagtacaggaataagcagagtaaatc

SEQ ID NO: 1018900 - DNA, 33 bp, Homo sapien
ccttgtagagtacaggcataagcagagtaaatc

SEQ ID NO: 1018901 - DNA, 33 bp, Homo sapien
tgctctgggtctgagacatcttcacctacaaaa

SEQ ID NO: 1018902 - DNA, 33 bp, Homo sapien
tgctctgggtctgagagatcttcacctacaaaa

SEQ ID NO: 1018903 - DNA, 33 bp, Homo sapien
tgtcttttttgcagacaaagagactctacatgg

SEQ ID NO: 1018904 - DNA, 33 bp, Homo sapien
tgtcttttttgcagacgaagagactctacatgg

SEQ ID NO: 1018905 - DNA, 33 bp, Homo sapien
tagagatggcgccacacgggtaataggatcact

SEQ ID NO: 1018906 - DNA, 33 bp, Homo sapien
tagagatggcgccacaggggtaataggatcact

SEQ ID NO: 1018907 - DNA, 33 bp, Homo sapien
tacaacaggagtgataagaacagccccggcacc

SEQ ID NO: 1018908 - DNA, 33 bp, Homo sapien
tacaacaggagtgataggaacagccccggcacc

SEQ ID NO: 1018909 - DNA, 33 bp, Homo sapien
ggatcggaaccagaacagggagagactagccac

SEQ ID NO: 1018910 - DNA, 33 bp, Homo sapien
ggatcggaaccagaacggggagagactagccac

SEQ ID NO: 1018911 - DNA, 33 bp, Homo sapien
cctcttgtatacttcaaattatctccaggttac

SEQ ID NO: 1018912 - DNA, 33 bp, Homo sapien
cctcttgtatacttcagattatctccaggttac

SEQ ID NO: 1018913 - DNA, 33 bp, Homo sapien; identical to SEQ ID NO: 1018911

SEQ ID NO: 1018914 - DNA, 33 bp, Homo sapien; identical to SEQ ID NO: 1018912

SEQ ID NO: 1018915 - DNA, 33 bp, Homo sapien
ctgccttatggttctgcaccccagcagccacat

SEQ ID NO: 1018916 - DNA, 33 bp, Homo sapien
ctgccttatggttctggaccccagcagccacat

SEQ ID NO: 1018917 - DNA, 33 bp, Homo sapien
aagatgccagtaacaacagtacctacctcataa

SEQ ID NO: 1018918 - DNA, 33 bp, Homo sapien
aagatgccagtaacaatagtacctacctcataa

SEQ ID NO: 1018919 - DNA, 33 bp, Homo sapien
ttcatcgtgttatagacaagacaagccacatag

SEQ ID NO: 1018920 - DNA, 33 bp, Homo sapien
ttcatcgtgttatagagaagacaagccacatag

SEQ ID NO: 1018921 - DNA, 33 bp, Homo sapien
agaacactagttattcaattagcatgtcttata

SEQ ID NO: 1018922 - DNA, 33 bp, Homo sapien
agaacactagttattcgattagcatgtcttata

SEQ ID NO: 1018923 - DNA, 33 bp, Homo sapien
aatggaagagctggagaccagtttattccagac

SEQ ID NO: 1018924 - DNA, 33 bp, Homo sapien
aatggaagagctggagcccagtttattccagac

SEQ ID NO: 1018925 - DNA, 33 bp, Homo sapien
gccttctgtgaggtccaggaaagtattggcttc

SEQ ID NO: 1018926 - DNA, 33 bp, Homo sapien
gccttctgtgaggtccgggaaagtattggcttc

SEQ ID NO: 1018927 - DNA, 33 bp, Homo sapien
tcatctctatggcccaaaagtgattgtcttgca

SEQ ID NO: 1018928 - DNA, 33 bp, Homo sapien
tcatctctatggcccagaagtgattgtcttgca

SEQ ID NO: 1018929 - DNA, 33 bp, Homo sapien
tgagaagtctcgcagaaaaagagacctgtttaa

SEQ ID NO: 1018930 - DNA, 33 bp, Homo sapien
tgagaagtctcgcagagaaagagacctgtttaa

SEQ ID NO: 1018931 - DNA, 33 bp, Homo sapien
aggataggcaaatctacagagatagacagtagc

SEQ ID NO: 1018932 - DNA, 33 bp, Homo sapien
aggataggcaaatctatagagatagacagtagc

SEQ ID NO: 1018933 - DNA, 33 bp, Homo sapien
gatttcatattccaacagaaaaataacatttac

SEQ ID NO: 1018934 - DNA, 33 bp, Homo sapien
gatttcatattccaacggaaaaataacatttac

SEQ ID NO: 1018935 - DNA, 33 bp, Homo sapien
ttttagaaatagctaaactcggccaggcccagt

SEQ ID NO: 1018936 - DNA, 33 bp, Homo sapien
ttttagaaatagctaacctcggccaggcccagt

SEQ ID NO: 1018937 - DNA, 33 bp, Homo sapien
ctaaacttcatatgacagaataggtgggtaaga

SEQ ID NO: 1018938 - DNA, 33 bp, Homo sapien
ctaaacttcatatgacggaataggtgggtaaga

SEQ ID NO: 1018939 - DNA, 33 bp, Homo sapien
caaagaattcacctccaagttccagcaggatgt

SEQ ID NO: 1018940 - DNA, 33 bp, Homo sapien
caaagaattcacctccgagttccagcaggatgt

SEQ ID NO: 1018941 - DNA, 33 bp, Homo sapien
aaatgtgaaggagtaacagctgtcttgggactc

SEQ ID NO: 1018942 - DNA, 33 bp, Homo sapien
aaatgtgaaggagtaatagctgtcttgggactc

SEQ ID NO: 1018943 - DNA, 33 bp, Homo sapien
aaaatcatttgccacaagtgaatgacaaataac

SEQ ID NO: 1018944 - DNA, 33 bp, Homo sapien
aaaatcatttgccacaggtgaatgacaaataac

SEQ ID NO: 1018945 - DNA, 33 bp, Homo sapien
cactggactttccccacctgctcctctccaccc

SEQ ID NO: 1018946 - DNA, 33 bp, Homo sapien
cactggactttccccatctgctcctctccaccc

SEQ ID NO: 1018947 - DNA, 33 bp, Homo sapien
ctaaattaattcatcacaaagcagcagacctca

SEQ ID NO: 1018948 - DNA, 33 bp, Homo sapien
ctaaattaattcatcagaaagcagcagacctca

SEQ ID NO: 1018949 - DNA, 33 bp, Homo sapien
gatgccaagatattcagggtagcagagctgatg

SEQ ID NO: 1018950 - DNA, 33 bp, Homo sapien
gatgccaagatattcatggtagcagagctgatg

SEQ ID NO: 1018951 - DNA, 33 bp, Homo sapien
gataaagtgagtggtcaaagcaacaggtacaac

SEQ ID NO: 1018952 - DNA, 33 bp, Homo sapien
gataaagtgagtggtcgaagcaacaggtacaac

SEQ ID NO: 1018953 - DNA, 33 bp, Homo sapien
aatgagaagatagatacacctggcttttatgaa

SEQ ID NO: 1018954 - DNA, 33 bp, Homo sapien
aatgagaagatagatatacctggcttttatgaa

SEQ ID NO: 1018955 - DNA, 33 bp, Homo sapien
gattttgaacgtgagcgcgaggccattaaacaa

SEQ ID NO: 1018956 - DNA, 33 bp, Homo sapien
gattttgaacgtgagctcgaggccattaaacaa

SEQ ID NO: 1018957 - DNA, 33 bp, Homo sapien
cctccaactcagttgaataccactgcagtagaa

SEQ ID NO: 1018958 - DNA, 33 bp, Homo sapien
cctccaactcagttgagtaccactgcagtagaa

SEQ ID NO: 1018959 - DNA, 33 bp, Homo sapien
catgaactccctgtcacaagagctgtccattga

SEQ ID NO: 1018960 - DNA, 33 bp, Homo sapien
catgaactccctgtcataagagctgtccattga

SEQ ID NO: 1018961 - DNA, 33 bp, Homo sapien
atcagtttctgtactccgacactaaatggcctc

SEQ ID NO: 1018962 - DNA, 33 bp, Homo sapien
atcagtttctgtactctgacactaaatggcctc

SEQ ID NO: 1018963 - DNA, 33 bp, Homo sapien
ttagaactttacccacccaaagctgtgccatat

SEQ ID NO: 1018964 - DNA, 33 bp, Homo sapien
ttagaactttacccactcaaagctgtgccatat

SEQ ID NO: 1018965 - DNA, 33 bp, Homo sapien
tgaggagaaattcaaacgttacaaagaatctga

SEQ ID NO: 1018966 - DNA, 33 bp, Homo sapien
tgaggagaaattcaaatgttacaaagaatctga

SEQ ID NO: 1018967 - DNA, 33 bp, Homo sapien
tattagcaaccacaaactggccatagatgagat

SEQ ID NO: 1018968 - DNA, 33 bp, Homo sapien
tattagcaaccacaaattggccatagatgagat

SEQ ID NO: 1018969 - DNA, 33 bp, Homo sapien; identical to SEQ ID NO: 1018967

SEQ ID NO: 1018970 - DNA, 33 bp, Homo sapien; identical to SEQ ID NO: 1018968

SEQ ID NO: 1018971 - DNA, 33 bp, Homo sapien
ttctctagggtagtgccacctaatataactttc

SEQ ID NO: 1018972 - DNA, 33 bp, Homo sapien
ttctctagggtagtgcgacctaatataactttc

SEQ ID NO: 1018973 - DNA, 33 bp, Homo sapien
ctaaacttcaaagggacgaaactgaggaaatgg

SEQ ID NO: 1018974 - DNA, 33 bp, Homo sapien
ctaaacttcaaagggatgaaactgaggaaatgg

SEQ ID NO: 1018975 - DNA, 33 bp, Homo sapien
cagtcaaggctcaatccagtaagtgctagagca

SEQ ID NO: 1018976 - DNA, 33 bp, Homo sapien
cagtcaaggctcaatctagtaagtgctagagca

SEQ ID NO: 1018977 - DNA, 33 bp, Homo sapien
agatacgagaaaagtgacaactagagatggctt

SEQ ID NO: 1018978 - DNA, 33 bp, Homo sapien
agatacgagaaaagtggcaactagagatggctt

SEQ ID NO: 1018979 - DNA, 33 bp, Homo sapien
ggtcatgtttagcctacgtctcaaagaatgaga

SEQ ID NO: 1018980 - DNA, 33 bp, Homo sapien
ggtcatgtttagcctaggtctcaaagaatgaga

SEQ ID NO: 1018981 - DNA, 33 bp, Homo sapien
acctggcccagaacacacttttttcttaccaac

SEQ ID NO: 1018982 - DNA, 33 bp, Homo sapien
acctggcccagaacacgcttttttcttaccaac

SEQ ID NO: 1018983 - DNA, 33 bp, Homo sapien
acagacttgggatagacggtgagaaagaaagtt

SEQ ID NO: 1018984 - DNA, 33 bp, Homo sapien
acagacttgggatagagggtgagaaagaaagtt

SEQ ID NO: 1018985 - DNA, 33 bp, Homo sapien
acaactatttgagtaaacaggctatagattagc

SEQ ID NO: 1018986 - DNA, 33 bp, Homo sapien
acaactatttgagtaaccaggctatagattagc

SEQ ID NO: 1018987 - DNA, 33 bp, Homo sapien
ctctgggatcataagcaatgtttaggtattttt

SEQ ID NO: 1018988 - DNA, 33 bp, Homo sapien
ctctgggatcataagcgatgtttaggtattttt

SEQ ID NO: 1018989 - DNA, 33 bp, Homo sapien
tggtttgaatctagacagtcattttgtacatac

SEQ ID NO: 1018990 - DNA, 33 bp, Homo sapien
tggtttgaatctagacggtcattttgtacatac

SEQ ID NO: 1018991 - DNA, 33 bp, Homo sapien
caacctcaatatccacaaacaccataacgacct

SEQ ID NO: 1018992 - DNA, 33 bp, Homo sapien
caacctcaatatccacgaacaccataacgacct

SEQ ID NO: 1018993 - DNA, 33 bp, Homo sapien
aaatgttctaaaactgaattgtgttgatgattg

SEQ ID NO: 1018994 - DNA, 33 bp, Homo sapien
aaatgttctaaaactggattgtgttgatgattg

SEQ ID NO: 1018995 - DNA, 33 bp, Homo sapien
attcagaaagggactacatcttagaacacttca

SEQ ID NO: 1018996 - DNA, 33 bp, Homo sapien
attcagaaagggactagatcttagaacacttca

SEQ ID NO: 1018997 - DNA, 33 bp, Homo sapien
ctccctaatttttcttcaaccagagctactttg

SEQ ID NO: 1018998 - DNA, 33 bp, Homo sapien
ctccctaatttttcttgaaccagagctactttg

SEQ ID NO: 1018999 - DNA, 33 bp, Homo sapien
agtctctccaaagaataagaatgacactccctg

SEQ ID NO: 1019000 - DNA, 33 bp, Homo sapien
agtctctccaaagaatgagaatgacactccctg

SEQ ID NO: 1019001 - DNA, 33 bp, Homo sapien
ctttaaaatcagaagccgcgcactgccccaccc

SEQ ID NO: 1019002 - DNA, 33 bp, Homo sapien
ctttaaaatcagaagctgcgcactgccccaccc

SEQ ID NO: 1019003 - DNA, 33 bp, Homo sapien
ctttggcttagttccaatcattttcagcagtat

SEQ ID NO: 1019004 - DNA, 33 bp, Homo sapien
ctttggcttagttccattcattttcagcagtat

SEQ ID NO: 1019005 - DNA, 33 bp, Homo sapien
gacacaatgtgtaagtcaagatgtatccacagg

SEQ ID NO: 1019006 - DNA, 33 bp, Homo sapien
gacacaatgtgtaagtgaagatgtatccacagg

SEQ ID NO: 1019007 - DNA, 33 bp, Homo sapien
caattcacatggtataagtacaaggttgcccat

SEQ ID NO: 1019008 - DNA, 33 bp, Homo sapien
caattcacatggtataggtacaaggttgcccat

SEQ ID NO: 1019009 - DNA, 33 bp, Homo sapien
ctctcagtttgacttaccagttgactagaaaaa

SEQ ID NO: 1019010 - DNA, 33 bp, Homo sapien
ctctcagtttgacttatcagttgactagaaaaa

SEQ ID NO: 1019011 - DNA, 33 bp, Homo sapien
aaactcttattagtacacttacaagctaagatt

SEQ ID NO: 1019012 - DNA, 33 bp, Homo sapien
aaactcttattagtacgcttacaagctaagatt

SEQ ID NO: 1019013 - DNA, 33 bp, Homo sapien
tgcaacagcccgaggaagcatacaaggcatggg

SEQ ID NO: 1019014 - DNA, 33 bp, Homo sapien
tgcaacagcccgaggacgcatacaaggcatggg

SEQ ID NO: 1019015 - DNA, 33 bp, Homo sapien
tgtgcatagagaaaaacactgaggtgatacttc

SEQ ID NO: 1019016 - DNA, 33 bp, Homo sapien
tgtgcatagagaaaaagactgaggtgatacttc

SEQ ID NO: 1019017 - DNA, 33 bp, Homo sapien
gctgccaagagctctaggtacctcttcacagca

SEQ ID NO: 1019018 - DNA, 33 bp, Homo sapien
gctgccaagagctctatgtacctcttcacagca

SEQ ID NO: 1019019 - DNA, 33 bp, Homo sapien
tccgctctgtgtcttaaacctttacataagggg

SEQ ID NO: 1019020 - DNA, 33 bp, Homo sapien
tccgctctgtgtcttacacctttacataagggg

SEQ ID NO: 1019021 - DNA, 33 bp, Homo sapien
aggatccacatgaaaacagaaaaggaagctggg

SEQ ID NO: 1019022 - DNA, 33 bp, Homo sapien
aggatccacatgaaaagagaaaaggaagctggg

SEQ ID NO: 1019023 - DNA, 33 bp, Homo sapien
cccaaaaaggagttcaaccgaagctcaggagtg

SEQ ID NO: 1019024 - DNA, 33 bp, Homo sapien
cccaaaaaggagttcagccgaagctcaggagtg

SEQ ID NO: 1019025 - DNA, 33 bp, Homo sapien
cgtcagaagacctttcaactgagtgtaaggaat

SEQ ID NO: 1019026 - DNA, 33 bp, Homo sapien
cgtcagaagacctttcgactgagtgtaaggaat

SEQ ID NO: 1019027 - DNA, 33 bp, Homo sapien
ggtcagaaagacctgaaagtttccaaagctgcg

SEQ ID NO: 1019028 - DNA, 33 bp, Homo sapien
ggtcagaaagacctgagagtttccaaagctgcg

SEQ ID NO: 1019029 - DNA, 33 bp, Homo sapien
atgcctcatcctgctcgcaaagcccacgacgat

SEQ ID NO: 1019030 - DNA, 33 bp, Homo sapien
atgcctcatcctgctctcaaagcccacgacgat

SEQ ID NO: 1019031 - DNA, 33 bp, Homo sapien
caactagaccagctgaacgttacccttctgtgc

SEQ ID NO: 1019032 - DNA, 33 bp, Homo sapien
caactagaccagctgaccgttacccttctgtgc

SEQ ID NO: 1019033 - DNA, 33 bp, Homo sapien
ttagaggagaggtttacgcctttgtgtggcaca

SEQ ID NO: 1019034 - DNA, 33 bp, Homo sapien
ttagaggagaggtttatgcctttgtgtggcaca

SEQ ID NO: 1019035 - DNA, 33 bp, Homo sapien
aaaatctgtcatacaagcagaaaggggaccaat

SEQ ID NO: 1019036 - DNA, 33 bp, Homo sapien
aaaatctgtcatacaatcagaaaggggaccaat

SEQ ID NO: 1019037 - DNA, 33 bp, Homo sapien
gccaaagtgttgactcagactcggagagcacag

SEQ ID NO: 1019038 - DNA, 33 bp, Homo sapien
gccaaagtgttgactcggactcggagagcacag

SEQ ID NO: 1019039 - DNA, 33 bp, Homo sapien
tctcaggcttaagaggcagagcccagatgtgaa

SEQ ID NO: 1019040 - DNA, 33 bp, Homo sapien
tctcaggcttaagaggtagagcccagatgtgaa

SEQ ID NO: 1019041 - DNA, 33 bp, Homo sapien
tgactgcctgtctagacgaggtcccagacagga

SEQ ID NO: 1019042 - DNA, 33 bp, Homo sapien
tgactgcctgtctagatgaggtcccagacagga

SEQ ID NO: 1019043 - DNA, 33 bp, Homo sapien
gttttataacattttacccacggcagaacttct

SEQ ID NO: 1019044 - DNA, 33 bp, Homo sapien
gttttataacattttatccacggcagaacttct

SEQ ID NO: 1019045 - DNA, 33 bp, Homo sapien
ccagcgagcaaacccaagccttttttttctatt

SEQ ID NO: 1019046 - DNA, 33 bp, Homo sapien
ccagcgagcaaacccaggccttttttttctatt

SEQ ID NO: 1019047 - DNA, 33 bp, Homo sapien
accggggatccgtgcccgagacgccagggttgc

SEQ ID NO: 1019048 - DNA, 33 bp, Homo sapien
accggggatccgtgcctgagacgccagggttgc

SEQ ID NO: 1019049 - DNA, 33 bp, Homo sapien
attgacaggaaagagccgcctgagaggaatttt

SEQ ID NO: 1019050 - DNA, 33 bp, Homo sapien
attgacaggaaagagctgcctgagaggaatttt

SEQ ID NO: 1019051 - DNA, 33 bp, Homo sapien
ccctgcctgtcctcgaaatcctattttgaatgc

SEQ ID NO: 1019052 - DNA, 33 bp, Homo sapien
ccctgcctgtcctcgagatcctattttgaatgc

SEQ ID NO: 1019053 - DNA, 33 bp, Homo sapien
ttgttgtctgtctcaccgctgagatgtggcctt

SEQ ID NO: 1019054 - DNA, 33 bp, Homo sapien
ttgttgtctgtctcactgctgagatgtggcctt

SEQ ID NO: 1019055 - DNA, 33 bp, Homo sapien
cactagaagaggccacaccagaggatgagaaaa

SEQ ID NO: 1019056 - DNA, 33 bp, Homo sapien
cactagaagaggccacgccagaggatgagaaaa

SEQ ID NO: 1019057 - DNA, 33 bp, Homo sapien
tttagttacttaggccacctttttagatgttac

SEQ ID NO: 1019058 - DNA, 33 bp, Homo sapien
tttagttacttaggccgcctttttagatgttac

SEQ ID NO: 1019059 - DNA, 33 bp, Homo sapien
caactaaaacactctcacatctgtcctgtgttc

SEQ ID NO: 1019060 - DNA, 33 bp, Homo sapien
caactaaaacactctctcatctgtcctgtgttc

SEQ ID NO: 1019061 - DNA, 33 bp, Homo sapien
cgttctaggaagatcaaccggctacaggaaggg

SEQ ID NO: 1019062 - DNA, 33 bp, Homo sapien
cgttctaggaagatcacccggctacaggaaggg

SEQ ID NO: 1019063 - DNA, 33 bp, Homo sapien
gacacctgcaggctccaacttgttaggaaaaac

SEQ ID NO: 1019064 - DNA, 33 bp, Homo sapien
gacacctgcaggctccgacttgttaggaaaaac

SEQ ID NO: 1019065 - DNA, 33 bp, Homo sapien
ctcctcccagatcaacaacttgcattttagtgc

SEQ ID NO: 1019066 - DNA, 33 bp, Homo sapien
ctcctcccagatcaaccacttgcattttagtgc

SEQ ID NO: 1019067 - DNA, 33 bp, Homo sapien
tctggctctcctgggccacctacagcctgttgt

SEQ ID NO: 1019068 - DNA, 33 bp, Homo sapien
tctggctctcctgggctacctacagcctgttgt

SEQ ID NO: 1019069 - DNA, 33 bp, Homo sapien
gtcagtgtctaccttcaatgagtggataatcta

SEQ ID NO: 1019070 - DNA, 33 bp, Homo sapien
gtcagtgtctaccttccatgagtggataatcta

SEQ ID NO: 1019071 - DNA, 33 bp, Homo sapien
aatgcttgtgagttccaacatcctctgccccac

SEQ ID NO: 1019072 - DNA, 33 bp, Homo sapien
aatgcttgtgagttccgacatcctctgccccac

SEQ ID NO: 1019073 - DNA, 33 bp, Homo sapien
catgttctgcttcctcaatttaagagatctggg

SEQ ID NO: 1019074 - DNA, 33 bp, Homo sapien
catgttctgcttcctccatttaagagatctggg

SEQ ID NO: 1019075 - DNA, 33 bp, Homo sapien
attgaaatggttaccacgctgccatctgaggct

SEQ ID NO: 1019076 - DNA, 33 bp, Homo sapien
attgaaatggttaccatgctgccatctgaggct

SEQ ID NO: 1019077 - DNA, 33 bp, Homo sapien
agtaaagaacctagcacgtcacctgatgcataa

SEQ ID NO: 1019078 - DNA, 33 bp, Homo sapien
agtaaagaacctagcaggtcacctgatgcataa

SEQ ID NO: 1019079 - DNA, 33 bp, Homo sapien
agtacagaaaagggtgcatttgacaggtgtgtt

SEQ ID NO: 1019080 - DNA, 33 bp, Homo sapien
agtacagaaaagggtgtatttgacaggtgtgtt

SEQ ID NO: 1019081 - DNA, 33 bp, Homo sapien
acgccaacataaaaacagaagacacagtgacct

SEQ ID NO: 1019082 - DNA, 33 bp, Homo sapien
acgccaacataaaaacggaagacacagtgacct

SEQ ID NO: 1019083 - DNA, 33 bp, Homo sapien
tccagcttacaggccacgtttttgagaagacgt

SEQ ID NO: 1019084 - DNA, 33 bp, Homo sapien
tccagcttacaggccatgtttttgagaagacgt

SEQ ID NO: 1019085 - DNA, 33 bp, Homo sapien
atttttccaaagaagacgtacagatgatcaata

SEQ ID NO: 1019086 - DNA, 33 bp, Homo sapien
atttttccaaagaagatgtacagatgatcaata

SEQ ID NO: 1019087 - DNA, 33 bp, Homo sapien
tgtcttcaacagaaatcatctccctgtcaaaag

SEQ ID NO: 1019088 - DNA, 33 bp, Homo sapien
tgtcttcaacagaaatgatctccctgtcaaaag

SEQ ID NO: 1019089 - DNA, 33 bp, Homo sapien
gccccagtctcagtgtaaaccaagctctcattc

SEQ ID NO: 1019090 - DNA, 33 bp, Homo sapien
gccccagtctcagtgtgaaccaagctctcattc

SEQ ID NO: 1019091 - DNA, 33 bp, Homo sapien
tcttctttctccttgaactctgtgatatatgga

SEQ ID NO: 1019092 - DNA, 33 bp, Homo sapien
tcttctttctccttgacctctgtgatatatgga

SEQ ID NO: 1019093 - DNA, 33 bp, Homo sapien
ggtgtgtttcctgatacgtcctcacaggattga

SEQ ID NO: 1019094 - DNA, 33 bp, Homo sapien
ggtgtgtttcctgatatgtcctcacaggattga

SEQ ID NO: 1019095 - DNA, 33 bp, Homo sapien
gtacaatttaaccacaagtctatgagagcagaa

SEQ ID NO: 1019096 - DNA, 33 bp, Homo sapien
gtacaatttaaccacacgtctatgagagcagaa

SEQ ID NO: 1019097 - DNA, 33 bp, Homo sapien
gctcaggactctgtaacgtggagagacattgag

SEQ ID NO: 1019098 - DNA, 33 bp, Homo sapien
gctcaggactctgtaatgtggagagacattgag

SEQ ID NO: 1019099 - DNA, 33 bp, Homo sapien
atcaaacaagatgacacgtatggagaactaaga

SEQ ID NO: 1019100 - DNA, 33 bp, Homo sapien
atcaaacaagatgacatgtatggagaactaaga

SEQ ID NO: 1019101 - DNA, 33 bp, Homo sapien
ctcatgcgtaagatgactagaagaatggtgctc

SEQ ID NO: 1019102 - DNA, 33 bp, Homo sapien
ctcatgcgtaagatgagtagaagaatggtgctc

SEQ ID NO: 1019103 - DNA, 33 bp, Homo sapien
atgccacacctggccagagctgaactgtgagca

SEQ ID NO: 1019104 - DNA, 33 bp, Homo sapien
atgccacacctggccatagctgaactgtgagca

SEQ ID NO: 1019105 - DNA, 33 bp, Homo sapien
ccagaaggcaccaaaaattaagcgtacattcac

SEQ ID NO: 1019106 - DNA, 33 bp, Homo sapien
ccagaaggcaccaaaacttaagcgtacattcac

SEQ ID NO: 1019107 - DNA, 33 bp, Homo sapien
tcttcttccgatactcaaagaacttatttgtaa

SEQ ID NO: 1019108 - DNA, 33 bp, Homo sapien
tcttcttccgatactcgaagaacttatttgtaa

SEQ ID NO: 1019109 - DNA, 33 bp, Homo sapien
aatcactgcacacctccaagcccatcaccctac

SEQ ID NO: 1019110 - DNA, 33 bp, Homo sapien
aatcactgcacacctcgaagcccatcaccctac

SEQ ID NO: 1019111 - DNA, 33 bp, Homo sapien
agtcccaacactgctacgagaagcaactcgcca

SEQ ID NO: 1019112 - DNA, 33 bp, Homo sapien
agtcccaacactgctatgagaagcaactcgcca

SEQ ID NO: 1019113 - DNA, 33 bp, Homo sapien
tttcccctggagacacgaagccttatctggtgg

SEQ ID NO: 1019114 - DNA, 33 bp, Homo sapien
tttcccctggagacactaagccttatctggtgg

SEQ ID NO: 1019115 - DNA, 33 bp, Homo sapien
ggtcacaagcattggagaatttgtcctccctgc

SEQ ID NO: 1019116 - DNA, 33 bp, Homo sapien
ggtcacaagcattggataatttgtcctccctgc

SEQ ID NO: 1019117 - DNA, 33 bp, Homo sapien
taggatgccaaatctaccttagcaccgcccctg

SEQ ID NO: 1019118 - DNA, 33 bp, Homo sapien
taggatgccaaatctatcttagcaccgcccctg

SEQ ID NO: 1019119 - DNA, 33 bp, Homo sapien
gaaatcaactgacctaacatttgaggggcacca

SEQ ID NO: 1019120 - DNA, 33 bp, Homo sapien
gaaatcaactgacctaccatttgaggggcacca

SEQ ID NO: 1019121 - DNA, 33 bp, Homo sapien
gattttggacttccaaacctctacaatccatga

SEQ ID NO: 1019122 - DNA, 33 bp, Homo sapien
gattttggacttccaagcctctacaatccatga

SEQ ID NO: 1019123 - DNA, 33 bp, Homo sapien
tgatccagatttctgtcaagtaccttctccctc

SEQ ID NO: 1019124 - DNA, 33 bp, Homo sapien
tgatccagatttctgttaagtaccttctccctc

SEQ ID NO: 1019125 - DNA, 33 bp, Homo sapien
tgtctgtactcagtaaccaaccccactttatcc

SEQ ID NO: 1019126 - DNA, 33 bp, Homo sapien
tgtctgtactcagtaatcaaccccactttatcc

SEQ ID NO: 1019127 - DNA, 33 bp, Homo sapien
aaatccgacagttacacccatgtcccagggaag

SEQ ID NO: 1019128 - DNA, 33 bp, Homo sapien
aaatccgacagttacatccatgtcccagggaag

SEQ ID NO: 1019129 - DNA, 33 bp, Homo sapien
tgccctgttcaggataagattcacacgcctatg

SEQ ID NO: 1019130 - DNA, 33 bp, Homo sapien
tgccctgttcaggataggattcacacgcctatg

SEQ ID NO: 1019131 - DNA, 33 bp, Homo sapien
attgtctttcaggaaacctgttgttgatgccaa

SEQ ID NO: 1019132 - DNA, 33 bp, Homo sapien
attgtctttcaggaaatctgttgttgatgccaa

SEQ ID NO: 1019133 - DNA, 33 bp, Homo sapien
tctatcatgcttctgaacctacaaaagacaact

SEQ ID NO: 1019134 - DNA, 33 bp, Homo sapien
tctatcatgcttctgagcctacaaaagacaact

SEQ ID NO: 1019135 - DNA, 33 bp, Homo sapien
catttcctgggtacacaactctgccagtgaaaa

SEQ ID NO: 1019136 - DNA, 33 bp, Homo sapien
catttcctgggtacacgactctgccagtgaaaa

SEQ ID NO: 1019137 - DNA, 33 bp, Homo sapien
ctaattctgcgtccgaataagagctatcacata

SEQ ID NO: 1019138 - DNA, 33 bp, Homo sapien
ctaattctgcgtccgagtaagagctatcacata

SEQ ID NO: 1019139 - DNA, 33 bp, Homo sapien
acaggcgaggcgcttactaaatagtccacaggc

SEQ ID NO: 1019140 - DNA, 33 bp, Homo sapien
acaggcgaggcgcttattaaatagtccacaggc

SEQ ID NO: 1019141 - DNA, 33 bp, Homo sapien
caatttaccgtgtggcaagaccatttcctatcc

SEQ ID NO: 1019142 - DNA, 33 bp, Homo sapien
caatttaccgtgtggcgagaccatttcctatcc

SEQ ID NO: 1019143 - DNA, 33 bp, Homo sapien
ctccccatcaagcacagtcagctcataagtgaa

SEQ ID NO: 1019144 - DNA, 33 bp, Homo sapien
ctccccatcaagcacattcagctcataagtgaa

SEQ ID NO: 1019145 - DNA, 33 bp, Homo sapien
ttgatgctataggatgaattcctttggctcatg

SEQ ID NO: 1019146 - DNA, 33 bp, Homo sapien
ttgatgctataggatggattcctttggctcatg

SEQ ID NO: 1019147 - DNA, 33 bp, Homo sapien
cttcagtttcctcatgaactcatttacaaaatg

SEQ ID NO: 1019148 - DNA, 33 bp, Homo sapien
cttcagtttcctcatgtactcatttacaaaatg

SEQ ID NO: 1019149 - DNA, 33 bp, Homo sapien
acagaatgaggtggaaatgacaacgtgccagtt

SEQ ID NO: 1019150 - DNA, 33 bp, Homo sapien
acagaatgaggtggaagtgacaacgtgccagtt

SEQ ID NO: 1019151 - DNA, 33 bp, Homo sapien
ataccaggtgcaaaggcatagaaaggtgaacca

SEQ ID NO: 1019152 - DNA, 33 bp, Homo sapien
ataccaggtgcaaaggtatagaaaggtgaacca

SEQ ID NO: 1019153 - DNA, 33 bp, Homo sapien
acggcgcctgtttcacccccaggagcttagcct

SEQ ID NO: 1019154 - DNA, 33 bp, Homo sapien
acggcgcctgtttcactcccaggagcttagcct

SEQ ID NO: 1019155 - DNA, 33 bp, Homo sapien
ggtcttacagaatggaataatcaagtttggggc

SEQ ID NO: 1019156 - DNA, 33 bp, Homo sapien
ggtcttacagaatggactaatcaagtttggggc

SEQ ID NO: 1019157 - DNA, 33 bp, Homo sapien
gaaagaacagtgaggacctcacagaatacatgg

SEQ ID NO: 1019158 - DNA, 33 bp, Homo sapien
gaaagaacagtgaggatctcacagaatacatgg

SEQ ID NO: 1019159 - DNA, 33 bp, Homo sapien
accagagcttaaaaaaagtaggcaggaacatag

SEQ ID NO: 1019160 - DNA, 33 bp, Homo sapien
accagagcttaaaaaatgtaggcaggaacatag

SEQ ID NO: 1019161 - DNA, 33 bp, Homo sapien
ttatcaagtactatacgaataatcgctactgct

SEQ ID NO: 1019162 - DNA, 33 bp, Homo sapien
ttatcaagtactatactaataatcgctactgct

SEQ ID NO: 1019163 - DNA, 33 bp, Homo sapien
ggaaccagaagcccagcctactctcttattgtt

SEQ ID NO: 1019164 - DNA, 33 bp, Homo sapien
ggaaccagaagcccagtctactctcttattgtt

SEQ ID NO: 1019165 - DNA, 33 bp, Homo sapien
cggggttggagaagataaaacattggatcagtg

SEQ ID NO: 1019166 - DNA, 33 bp, Homo sapien
cggggttggagaagatgaaacattggatcagtg

SEQ ID NO: 1019167 - DNA, 33 bp, Homo sapien
caccggaaatggtctcggaagcatgagtaggat

SEQ ID NO: 1019168 - DNA, 33 bp, Homo sapien
caccggaaatggtctctgaagcatgagtaggat

SEQ ID NO: 1019169 - DNA, 33 bp, Homo sapien
acattgcacatataaaataacccaattctccag

SEQ ID NO: 1019170 - DNA, 33 bp, Homo sapien
acattgcacatataaagtaacccaattctccag

SEQ ID NO: 1019171 - DNA, 33 bp, Homo sapien
acttttctgaaacccacgaggagcattgcagca

SEQ ID NO: 1019172 - DNA, 33 bp, Homo sapien
acttttctgaaacccatgaggagcattgcagca

SEQ ID NO: 1019173 - DNA, 33 bp, Homo sapien
tgctgccccttcttaactcccactctgccaggg

SEQ ID NO: 1019174 - DNA, 33 bp, Homo sapien
tgctgccccttcttaattcccactctgccaggg

SEQ ID NO: 1019175 - DNA, 33 bp, Homo sapien
gtcagataacacagaacacttcaaagtggaatt

SEQ ID NO: 1019176 - DNA, 33 bp, Homo sapien
gtcagataacacagaatacttcaaagtggaatt

SEQ ID NO: 1019177 - DNA, 33 bp, Homo sapien
cacaaatagaaaactcactgagtcctgcttgca

SEQ ID NO: 1019178 - DNA, 33 bp, Homo sapien
cacaaatagaaaactcgctgagtcctgcttgca

SEQ ID NO: 1019179 - DNA, 33 bp, Homo sapien
tgtatttatgccaaagaatccttcccttttcca

SEQ ID NO: 1019180 - DNA, 33 bp, Homo sapien
tgtatttatgccaaagcatccttcccttttcca

SEQ ID NO: 1019181 - DNA, 33 bp, Homo sapien
tccagctgagctacaacacgaattcaagactcc

SEQ ID NO: 1019182 - DNA, 33 bp, Homo sapien
tccagctgagctacaatacgaattcaagactcc

SEQ ID NO: 1019183 - DNA, 33 bp, Homo sapien
ttatattatttccataccgttctccataatcac

SEQ ID NO: 1019184 - DNA, 33 bp, Homo sapien
ttatattatttccatatcgttctccataatcac

SEQ ID NO: 1019185 - DNA, 33 bp, Homo sapien
gtcatctcagaaacacaggacacttgagtcaca

SEQ ID NO: 1019186 - DNA, 33 bp, Homo sapien
gtcatctcagaaacacgggacacttgagtcaca

SEQ ID NO: 1019187 - DNA, 33 bp, Homo sapien
cagatgtatcaccttcgagttctataggtcaga

SEQ ID NO: 1019188 - DNA, 33 bp, Homo sapien
cagatgtatcaccttctagttctataggtcaga

SEQ ID NO: 1019189 - DNA, 33 bp, Homo sapien
ggctagaactcagcagccatcctgtactgtgaa

SEQ ID NO: 1019190 - DNA, 33 bp, Homo sapien
ggctagaactcagcagtcatcctgtactgtgaa

SEQ ID NO: 1019191 - DNA, 33 bp, Homo sapien
agtagttcttattttacaccctggctatacttt

SEQ ID NO: 1019192 - DNA, 33 bp, Homo sapien
agtagttcttattttataccctggctatacttt

SEQ ID NO: 1019193 - DNA, 33 bp, Homo sapien
ctctctctccttctgcaatctatgaagtcagtc

SEQ ID NO: 1019194 - DNA, 33 bp, Homo sapien
ctctctctccttctgccatctatgaagtcagtc

SEQ ID NO: 1019195 - DNA, 33 bp, Homo sapien
ttggacatctggtccaagcctgagtcaccttct

SEQ ID NO: 1019196 - DNA, 33 bp, Homo sapien
ttggacatctggtccaggcctgagtcaccttct

SEQ ID NO: 1019197 - DNA, 33 bp, Homo sapien
agggcctttgcatacacggtttcctcttcctgt

SEQ ID NO: 1019198 - DNA, 33 bp, Homo sapien
agggcctttgcatacatggtttcctcttcctgt

SEQ ID NO: 1019199 - DNA, 33 bp, Homo sapien
cctgactttcccatcaaagacttccagggcatc

SEQ ID NO: 1019200 - DNA, 33 bp, Homo sapien
cctgactttcccatcatagacttccagggcatc

SEQ ID NO: 1019201 - DNA, 33 bp, Homo sapien
tggccatgaacttcccacgagttatttcagatc

SEQ ID NO: 1019202 - DNA, 33 bp, Homo sapien
tggccatgaacttcccgcgagttatttcagatc

SEQ ID NO: 1019203 - DNA, 33 bp, Homo sapien
agacaacacagcaaaaaggcactctcaggtatg

SEQ ID NO: 1019204 - DNA, 33 bp, Homo sapien
agacaacacagcaaaagggcactctcaggtatg

SEQ ID NO: 1019205 - DNA, 33 bp, Homo sapien
actgcctctggtgaccagaatcattgcaagtgg

SEQ ID NO: 1019206 - DNA, 33 bp, Homo sapien
actgcctctggtgaccggaatcattgcaagtgg

SEQ ID NO: 1019207 - DNA, 33 bp, Homo sapien
gggccactgtcgcataagtggtctgtcattgat

SEQ ID NO: 1019208 - DNA, 33 bp, Homo sapien
gggccactgtcgcatatgtggtctgtcattgat

SEQ ID NO: 1019209 - DNA, 33 bp, Homo sapien
agtgacaattcgatcaagggcttagtacagggt

SEQ ID NO: 1019210 - DNA, 33 bp, Homo sapien
agtgacaattcgatcatgggcttagtacagggt

SEQ ID NO: 1019211 - DNA, 33 bp, Homo sapien
gtgtgatgagcctcaaataaggtaatccctgta

SEQ ID NO: 1019212 - DNA, 33 bp, Homo sapien
gtgtgatgagcctcaagtaaggtaatccctgta

SEQ ID NO: 1019213 - DNA, 33 bp, Homo sapien
ttcattactgtgactcacgactgactccctgtg

SEQ ID NO: 1019214 - DNA, 33 bp, Homo sapien
ttcattactgtgactcgcgactgactccctgtg

SEQ ID NO: 1019215 - DNA, 33 bp, Homo sapien
tggaacagagagacaacgtgtgtgaggacgagg

SEQ ID NO: 1019216 - DNA, 33 bp, Homo sapien
tggaacagagagacaatgtgtgtgaggacgagg

SEQ ID NO: 1019217 - DNA, 33 bp, Homo sapien
ccacaaccaccttgaccaatgcttgccaagctg

SEQ ID NO: 1019218 - DNA, 33 bp, Homo sapien
ccacaaccaccttgacgaatgcttgccaagctg

SEQ ID NO: 1019219 - DNA, 33 bp, Homo sapien
cagccgcccatttccacgtcccagtgcgtttat

SEQ ID NO: 1019220 - DNA, 33 bp, Homo sapien
cagccgcccatttccatgtcccagtgcgtttat

SEQ ID NO: 1019221 - DNA, 33 bp, Homo sapien
tgttggcatatctccacggacgtgccatgggcg

SEQ ID NO: 1019222 - DNA, 33 bp, Homo sapien
tgttggcatatctccatggacgtgccatgggcg

SEQ ID NO: 1019223 - DNA, 33 bp, Homo sapien
gcagcaaatgacccacaagagcattaaactcaa

SEQ ID NO: 1019224 - DNA, 33 bp, Homo sapien
gcagcaaatgacccacgagagcattaaactcaa

SEQ ID NO: 1019225 - DNA, 33 bp, Homo sapien
cctcttcagaggctaacagagcatgtgctgcca

SEQ ID NO: 1019226 - DNA, 33 bp, Homo sapien
cctcttcagaggctaagagagcatgtgctgcca

SEQ ID NO: 1019227 - DNA, 33 bp, Homo sapien
acccgtttcaaccaacaagagctgcctcagtac

SEQ ID NO: 1019228 - DNA, 33 bp, Homo sapien
acccgtttcaaccaacgagagctgcctcagtac

SEQ ID NO: 1019229 - DNA, 33 bp, Homo sapien
ccttcccagcctttaccagggcttcttgaacat

SEQ ID NO: 1019230 - DNA, 33 bp, Homo sapien
ccttcccagcctttacgagggcttcttgaacat

SEQ ID NO: 1019231 - DNA, 33 bp, Homo sapien
gtacaagatgccgaaaatcatatgtttggaatc

SEQ ID NO: 1019232 - DNA, 33 bp, Homo sapien
gtacaagatgccgaaagtcatatgtttggaatc

SEQ ID NO: 1019233 - DNA, 33 bp, Homo sapien
ccattgctttaccccaacgtgtggacagctggc

SEQ ID NO: 1019234 - DNA, 33 bp, Homo sapien
ccattgctttaccccagcgtgtggacagctggc

SEQ ID NO: 1019235 - DNA, 33 bp, Homo sapien
agagtcacagctgacacgagccctttcgaaatt

SEQ ID NO: 1019236 - DNA, 33 bp, Homo sapien
agagtcacagctgacatgagccctttcgaaatt

SEQ ID NO: 1019237 - DNA, 33 bp, Homo sapien
cagggagatcacagaacggcatgtttgcaattt

SEQ ID NO: 1019238 - DNA, 33 bp, Homo sapien
cagggagatcacagaatggcatgtttgcaattt

SEQ ID NO: 1019239 - DNA, 33 bp, Homo sapien
caaacagtgagaaacggatttgcatgtggcttt

SEQ ID NO: 1019240 - DNA, 33 bp, Homo sapien
caaacagtgagaaacgtatttgcatgtggcttt

SEQ ID NO: 1019241 - DNA, 33 bp, Homo sapien
agtctgctgctttgaaacgtccaccttttggtc

SEQ ID NO: 1019242 - DNA, 33 bp, Homo sapien
agtctgctgctttgaagcgtccaccttttggtc

SEQ ID NO: 1019243 - DNA, 33 bp, Homo sapien
caccccaggcacagacccagggaataaagatat

SEQ ID NO: 1019244 - DNA, 33 bp, Homo sapien
caccccaggcacagactcagggaataaagatat

SEQ ID NO: 1019245 - DNA, 33 bp, Homo sapien
ttcactgaaaattaccaaatgacaagtaaatgt

SEQ ID NO: 1019246 - DNA, 33 bp, Homo sapien
ttcactgaaaattaccgaatgacaagtaaatgt

SEQ ID NO: 1019247 - DNA, 33 bp, Homo sapien
cttctgctctgtaatcacccaccagaggtctgg

SEQ ID NO: 1019248 - DNA, 33 bp, Homo sapien
cttctgctctgtaatcgcccaccagaggtctgg

SEQ ID NO: 1019249 - DNA, 33 bp, Homo sapien
gatctaggacagaaaacgaggaaccacagagag

SEQ ID NO: 1019250 - DNA, 33 bp, Homo sapien
gatctaggacagaaaatgaggaaccacagagag

SEQ ID NO: 1019251 - DNA, 33 bp, Homo sapien
tgggtgatcttaacacagggtccttaagcaagg

SEQ ID NO: 1019252 - DNA, 33 bp, Homo sapien
tgggtgatcttaacacggggtccttaagcaagg

SEQ ID NO: 1019253 - DNA, 33 bp, Homo sapien
caaaggacagacagaactcaaagttatcccttt

SEQ ID NO: 1019254 - DNA, 33 bp, Homo sapien
caaaggacagacagaattcaaagttatcccttt

SEQ ID NO: 1019255 - DNA, 33 bp, Homo sapien
gacagttttgtctgcagggtgattcatggaccc

SEQ ID NO: 1019256 - DNA, 33 bp, Homo sapien
gacagttttgtctgcatggtgattcatggaccc

SEQ ID NO: 1019257 - DNA, 33 bp, Homo sapien
gaaaggaaatctattcactgaccaagtaaccta

SEQ ID NO: 1019258 - DNA, 33 bp, Homo sapien
gaaaggaaatctattcgctgaccaagtaaccta

SEQ ID NO: 1019259 - DNA, 33 bp, Homo sapien
agaaaacaccaacaggaataataagagtcactt

SEQ ID NO: 1019260 - DNA, 33 bp, Homo sapien
agaaaacaccaacagggataataagagtcactt

SEQ ID NO: 1019261 - DNA, 33 bp, Homo sapien
gaatagtatcatgaaccgccagcttcaacaact

SEQ ID NO: 1019262 - DNA, 33 bp, Homo sapien
gaatagtatcatgaactgccagcttcaacaact

SEQ ID NO: 1019263 - DNA, 33 bp, Homo sapien
aaactatgtttactcagcaattgcaatcatagc

SEQ ID NO: 1019264 - DNA, 33 bp, Homo sapien
aaactatgtttactcatcaattgcaatcatagc

SEQ ID NO: 1019265 - DNA, 33 bp, Homo sapien
acccactctgcactgaaaagtgggaaccgtttc

SEQ ID NO: 1019266 - DNA, 33 bp, Homo sapien
acccactctgcactgagaagtgggaaccgtttc

SEQ ID NO: 1019267 - DNA, 33 bp, Homo sapien
aactgaagccaggcgaagtgtgatgatttaccc

SEQ ID NO: 1019268 - DNA, 33 bp, Homo sapien
aactgaagccaggcgaggtgtgatgatttaccc

SEQ ID NO: 1019269 - DNA, 33 bp, Homo sapien
acaccaatcagtgaaaactactatcataggttt

SEQ ID NO: 1019270 - DNA, 33 bp, Homo sapien
acaccaatcagtgaaagctactatcataggttt

SEQ ID NO: 1019271 - DNA, 33 bp, Homo sapien
taattctacatatttacggaacacaatttgatg

SEQ ID NO: 1019272 - DNA, 33 bp, Homo sapien
taattctacatatttatggaacacaatttgatg

SEQ ID NO: 1019273 - DNA, 33 bp, Homo sapien
agaacagtagttaccaaaaaccagggagggaat

SEQ ID NO: 1019274 - DNA, 33 bp, Homo sapien
agaacagtagttaccagaaaccagggagggaat

SEQ ID NO: 1019275 - DNA, 33 bp, Homo sapien
caaatgatcttactcagatgcagaatcttttaa

SEQ ID NO: 1019276 - DNA, 33 bp, Homo sapien
caaatgatcttactcatatgcagaatcttttaa

SEQ ID NO: 1019277 - DNA, 33 bp, Homo sapien
gttaagtgttcaataaaggttatgctgaatttt

SEQ ID NO: 1019278 - DNA, 33 bp, Homo sapien
gttaagtgttcaataacggttatgctgaatttt

SEQ ID NO: 1019279 - DNA, 33 bp, Homo sapien
tgcagtttgacatgtgaatggtccatgtaatat

SEQ ID NO: 1019280 - DNA, 33 bp, Homo sapien
tgcagtttgacatgtgcatggtccatgtaatat

SEQ ID NO: 1019281 - DNA, 33 bp, Homo sapien
aaggctttgtgggcccaagaatcaggcatatgg

SEQ ID NO: 1019282 - DNA, 33 bp, Homo sapien
aaggctttgtgggcccgagaatcaggcatatgg

SEQ ID NO: 1019283 - DNA, 33 bp, Homo sapien
cctagatgatgatgtcaactccagaagttcagg

SEQ ID NO: 1019284 - DNA, 33 bp, Homo sapien
cctagatgatgatgtcgactccagaagttcagg

SEQ ID NO: 1019285 - DNA, 33 bp, Homo sapien
ccagggagcatgtcaactgtgtcattatccatg

SEQ ID NO: 1019286 - DNA, 33 bp, Homo sapien
ccagggagcatgtcaattgtgtcattatccatg

SEQ ID NO: 1019287 - DNA, 33 bp, Homo sapien
gggtttcctgagagaccgaaattgagatgattt

SEQ ID NO: 1019288 - DNA, 33 bp, Homo sapien
gggtttcctgagagactgaaattgagatgattt

SEQ ID NO: 1019289 - DNA, 33 bp, Homo sapien
aaatttccttgtcaaggagggcactgtaatgtt

SEQ ID NO: 1019290 - DNA, 33 bp, Homo sapien
aaatttccttgtcaagtagggcactgtaatgtt

SEQ ID NO: 1019291 - DNA, 33 bp, Homo sapien
acaaatgtgaacagagactcagaagcactaatt

SEQ ID NO: 1019292 - DNA, 33 bp, Homo sapien
acaaatgtgaacagagcctcagaagcactaatt

SEQ ID NO: 1019293 - DNA, 33 bp, Homo sapien
agtcaggtgtttttggaaactgtttctcagctg

SEQ ID NO: 1019294 - DNA, 33 bp, Homo sapien
agtcaggtgtttttgggaactgtttctcagctg

SEQ ID NO: 1019295 - DNA, 33 bp, Homo sapien
ctctctcatattgacactgggatttggaggaac

SEQ ID NO: 1019296 - DNA, 33 bp, Homo sapien
ctctctcatattgacattgggatttggaggaac

SEQ ID NO: 1019297 - DNA, 33 bp, Homo sapien; identical to SEQ ID NO: 1019295

SEQ ID NO: 1019298 - DNA, 33 bp, Homo sapien; identical to SEQ ID NO: 1019296

SEQ ID NO: 1019299 - DNA, 33 bp, Homo sapien
ttggtaagatttctcagtatgttagtcagtctg

SEQ ID NO: 1019300 - DNA, 33 bp, Homo sapien
ttggtaagatttctcattatgttagtcagtctg

SEQ ID NO: 1019301 - DNA, 33 bp, Homo sapien
ctcatctcagtgttgggacctaaagattgtatt

SEQ ID NO: 1019302 - DNA, 33 bp, Homo sapien
ctcatctcagtgttggtacctaaagattgtatt

SEQ ID NO: 1019303 - DNA, 33 bp, Homo sapien
aactttttatgtgggaaataacttgatttgctt

SEQ ID NO: 1019304 - DNA, 33 bp, Homo sapien
aactttttatgtgggagataacttgatttgctt

SEQ ID NO: 1019305 - DNA, 33 bp, Homo sapien
caccaaaaagcacagacggatgtcaaataagca

SEQ ID NO: 1019306 - DNA, 33 bp, Homo sapien
caccaaaaagcacagatggatgtcaaataagca

SEQ ID NO: 1019307 - DNA, 33 bp, Homo sapien
caattctatgttcagccgagtttcaattgagaa

SEQ ID NO: 1019308 - DNA, 33 bp, Homo sapien
caattctatgttcagctgagtttcaattgagaa

SEQ ID NO: 1019309 - DNA, 33 bp, Homo sapien; identical to SEQ ID NO: 1019307

SEQ ID NO: 1019310 - DNA, 33 bp, Homo sapien; identical to SEQ ID NO: 1019308

SEQ ID NO: 1019311 - DNA, 33 bp, Homo sapien
attgacggcttcgagcacttcaccaagaagatg

SEQ ID NO: 1019312 - DNA, 33 bp, Homo sapien
attgacggcttcgagcgcttcaccaagaagatg

SEQ ID NO: 1019313 - DNA, 33 bp, Homo sapien; identical to SEQ ID NO: 1019311

SEQ ID NO: 1019314 - DNA, 33 bp, Homo sapien; identical to SEQ ID NO: 1019312

SEQ ID NO: 1019315 - DNA, 33 bp, Homo sapien
catgtggttcatccaccagattgggccctttct

SEQ ID NO: 1019316 - DNA, 33 bp, Homo sapien
catgtggttcatccacgagattgggccctttct

SEQ ID NO: 1019317 - DNA, 33 bp, Homo sapien; identical to SEQ ID NO: 1019315

SEQ ID NO: 1019318 - DNA, 33 bp, Homo sapien; identical to SEQ ID NO: 1019316

SEQ ID NO: 1019319 - DNA, 33 bp, Homo sapien
ttggggactagtgagcacatgatgggaagggct

SEQ ID NO: 1019320 - DNA, 33 bp, Homo sapien
ttggggactagtgagcgcatgatgggaagggct

SEQ ID NO: 1019321 - DNA, 33 bp, Homo sapien
ggtgaggaagcagacgaacctggagtgtctaac

SEQ ID NO: 1019322 - DNA, 33 bp, Homo sapien
ggtgaggaagcagacgcacctggagtgtctaac

SEQ ID NO: 1019323 - DNA, 33 bp, Homo sapien
tcttgaaggtatgtcaatagagacttcccaaac

SEQ ID NO: 1019324 - DNA, 33 bp, Homo sapien
tcttgaaggtatgtcagtagagacttcccaaac

SEQ ID NO: 1019325 - DNA, 33 bp, Homo sapien
caaaggcgtgtaacaacggagaagcgagtggaa

SEQ ID NO: 1019326 - DNA, 33 bp, Homo sapien
caaaggcgtgtaacaagggagaagcgagtggaa

SEQ ID NO: 1019327 - DNA, 33 bp, Homo sapien
cagagccatgtggtacaagcacacagagaaaaa

SEQ ID NO: 1019328 - DNA, 33 bp, Homo sapien
cagagccatgtggtacgagcacacagagaaaaa

SEQ ID NO: 1019329 - DNA, 33 bp, Homo sapien
gcacctacaactctgaaggaagaaactcttctc

SEQ ID NO: 1019330 - DNA, 33 bp, Homo sapien
gcacctacaactctgatggaagaaactcttctc

SEQ ID NO: 1019331 - DNA, 33 bp, Homo sapien
catgcaaaactggccaatcagaggaggcttaaa

SEQ ID NO: 1019332 - DNA, 33 bp, Homo sapien
catgcaaaactggccagtcagaggaggcttaaa

SEQ ID NO: 1019333 - DNA, 33 bp, Homo sapien
agaaattcagctgaccaagagacgaagagaagt

SEQ ID NO: 1019334 - DNA, 33 bp, Homo sapien
agaaattcagctgaccgagagacgaagagaagt

SEQ ID NO: 1019335 - DNA, 33 bp, Homo sapien
ttaatctcgaggtgacaagagtggcattcggac

SEQ ID NO: 1019336 - DNA, 33 bp, Homo sapien
ttaatctcgaggtgacgagagtggcattcggac

SEQ ID NO: 1019337 - DNA, 33 bp, Homo sapien
tgatgagctactatcaggtgttgcccgcagcac

SEQ ID NO: 1019338 - DNA, 33 bp, Homo sapien
tgatgagctactatcatgtgttgcccgcagcac

SEQ ID NO: 1019339 - DNA, 33 bp, Homo sapien
tgggatacctttccacacagattttaaaacttg

SEQ ID NO: 1019340 - DNA, 33 bp, Homo sapien
tgggatacctttccactcagattttaaaacttg

SEQ ID NO: 1019341 - DNA, 33 bp, Homo sapien
cgtggctccattgtgaagtgttttcagaactcc

SEQ ID NO: 1019342 - DNA, 33 bp, Homo sapien
cgtggctccattgtgacgtgttttcagaactcc

SEQ ID NO: 1019343 - DNA, 33 bp, Homo sapien
cgaataaccctcttcacgaaactgtgcgcacct

SEQ ID NO: 1019344 - DNA, 33 bp, Homo sapien
cgaataaccctcttcatgaaactgtgcgcacct

SEQ ID NO: 1019345 - DNA, 33 bp, Homo sapien
tgtgaaaactaaggttcaaagtcatgtagttag

SEQ ID NO: 1019346 - DNA, 33 bp, Homo sapien
tgtgaaaactaaggttgaaagtcatgtagttag

SEQ ID NO: 1019347 - DNA, 33 bp, Homo sapien
agaagtgtgggtggtaaagctgtcatcagtggg

SEQ ID NO: 1019348 - DNA, 33 bp, Homo sapien
agaagtgtgggtggtagagctgtcatcagtggg

SEQ ID NO: 1019349 - DNA, 33 bp, Homo sapien
agtgcaagggatctgaagcccacacgggcacac

SEQ ID NO: 1019350 - DNA, 33 bp, Homo sapien
agtgcaagggatctgaggcccacacgggcacac

SEQ ID NO: 1019351 - DNA, 33 bp, Homo sapien
tgaagtgtctgatataggttaaaattagaggta

SEQ ID NO: 1019352 - DNA, 33 bp, Homo sapien
tgaagtgtctgatatatgttaaaattagaggta

SEQ ID NO: 1019353 - DNA, 33 bp, Homo sapien
aaataacatgttttgcaaatatctttttgttaa

SEQ ID NO: 1019354 - DNA, 33 bp, Homo sapien
aaataacatgttttgcgaatatctttttgttaa

SEQ ID NO: 1019355 - DNA, 33 bp, Homo sapien
actatgtacagagataagtaaaacaaaatgcac

SEQ ID NO: 1019356 - DNA, 33 bp, Homo sapien
actatgtacagagatacgtaaaacaaaatgcac

SEQ ID NO: 1019357 - DNA, 33 bp, Homo sapien
tagagactgtttactgcagaaaatagctcagga

SEQ ID NO: 1019358 - DNA, 33 bp, Homo sapien
tagagactgtttactggagaaaatagctcagga

SEQ ID NO: 1019359 - DNA, 33 bp, Homo sapien
gtcagtgccattcaaaagttcttgttttaaaat

SEQ ID NO: 1019360 - DNA, 33 bp, Homo sapien
gtcagtgccattcaaacgttcttgttttaaaat

SEQ ID NO: 1019361 - DNA, 33 bp, Homo sapien
tagagtactgtctttagctgtgaaggttcttta

SEQ ID NO: 1019362 - DNA, 33 bp, Homo sapien
tagagtactgtctttatctgtgaaggttcttta

SEQ ID NO: 1019363 - DNA, 33 bp, Homo sapien
tcactagctgtgagtcgctaagttcagcccata

SEQ ID NO: 1019364 - DNA, 33 bp, Homo sapien
tcactagctgtgagtctctaagttcagcccata

SEQ ID NO: 1019365 - DNA, 33 bp, Homo sapien
tgacatggaggggaacaagctgcggccaagggc

SEQ ID NO: 1019366 - DNA, 33 bp, Homo sapien
tgacatggaggggaacgagctgcggccaagggc

SEQ ID NO: 1019367 - DNA, 33 bp, Homo sapien
gctaatctctttgagccagtgaggaatgaaacg

SEQ ID NO: 1019368 - DNA, 33 bp, Homo sapien
gctaatctctttgagcgagtgaggaatgaaacg

SEQ ID NO: 1019369 - DNA, 33 bp, Homo sapien
ggccttttaatgtgaccgaacactcagacttga

SEQ ID NO: 1019370 - DNA, 33 bp, Homo sapien
ggccttttaatgtgactgaacactcagacttga

SEQ ID NO: 1019371 - DNA, 33 bp, Homo sapien
atgctattgtggatgcagatgaggttcatctct

SEQ ID NO: 1019372 - DNA, 33 bp, Homo sapien
atgctattgtggatgccgatgaggttcatctct

SEQ ID NO: 1019373 - DNA, 33 bp, Homo sapien
catctgttggcataataaaaaagccatccttca

SEQ ID NO: 1019374 - DNA, 33 bp, Homo sapien
catctgttggcataattaaaaagccatccttca

SEQ ID NO: 1019375 - DNA, 33 bp, Homo sapien
gataagaatatgagttaaaccatttttagcaat

SEQ ID NO: 1019376 - DNA, 33 bp, Homo sapien
gataagaatatgagttgaaccatttttagcaat

SEQ ID NO: 1019377 - DNA, 33 bp, Homo sapien
acctcctgatcttacaacatttggtcggaagtg

SEQ ID NO: 1019378 - DNA, 33 bp, Homo sapien
acctcctgatcttacagcatttggtcggaagtg

SEQ ID NO: 1019379 - DNA, 33 bp, Homo sapien
tgcttatgtgggaagacgtgtcatatgtgtcaa

SEQ ID NO: 1019380 - DNA, 33 bp, Homo sapien
tgcttatgtgggaagatgtgtcatatgtgtcaa

SEQ ID NO: 1019381 - DNA, 33 bp, Homo sapien
ttgtctaactctcatacactgagccactatttc

SEQ ID NO: 1019382 - DNA, 33 bp, Homo sapien
ttgtctaactctcatagactgagccactatttc

SEQ ID NO: 1019383 - DNA, 33 bp, Homo sapien
tggggtgtttgtgactcagagcggtagagcttc

SEQ ID NO: 1019384 - DNA, 33 bp, Homo sapien
tggggtgtttgtgacttagagcggtagagcttc

SEQ ID NO: 1019385 - DNA, 33 bp, Homo sapien
gatagcttggtcaaacaggtactcattgaaatg

SEQ ID NO: 1019386 - DNA, 33 bp, Homo sapien
gatagcttggtcaaactggtactcattgaaatg

SEQ ID NO: 1019387 - DNA, 33 bp, Homo sapien
ttcaaattcagttagcacttttgatgcttgcca

SEQ ID NO: 1019388 - DNA, 33 bp, Homo sapien
ttcaaattcagttagcgcttttgatgcttgcca

SEQ ID NO: 1019389 - DNA, 33 bp, Homo sapien
cactttgttttatttcaactctatgtgcaccca

SEQ ID NO: 1019390 - DNA, 33 bp, Homo sapien
cactttgttttatttcgactctatgtgcaccca

SEQ ID NO: 1019391 - DNA, 33 bp, Homo sapien
tctggtggggtgagaaaggggtgacaatgatgt

SEQ ID NO: 1019392 - DNA, 33 bp, Homo sapien
tctggtggggtgagaagggggtgacaatgatgt

SEQ ID NO: 1019393 - DNA, 33 bp, Homo sapien
acttcttccctcatgacagtcatttctgcatct

SEQ ID NO: 1019394 - DNA, 33 bp, Homo sapien
acttcttccctcatgagagtcatttctgcatct

SEQ ID NO: 1019395 - DNA, 33 bp, Homo sapien
tgggtgcagagggtataaatcagcacaatcttt

SEQ ID NO: 1019396 - DNA, 33 bp, Homo sapien
tgggtgcagagggtatgaatcagcacaatcttt

SEQ ID NO: 1019397 - DNA, 33 bp, Homo sapien
ttcaaccaacatatacagagcacctgctaagta

SEQ ID NO: 1019398 - DNA, 33 bp, Homo sapien
ttcaaccaacatatacggagcacctgctaagta

SEQ ID NO: 1019399 - DNA, 33 bp, Homo sapien
tgcaacactgaccagccaaagcctctttaacgt

SEQ ID NO: 1019400 - DNA, 33 bp, Homo sapien
tgcaacactgaccagcgaaagcctctttaacgt

SEQ ID NO: 1019401 - DNA, 33 bp, Homo sapien
caggaatccttaggcacgatttgaagattttaa

SEQ ID NO: 1019402 - DNA, 33 bp, Homo sapien
caggaatccttaggcatgatttgaagattttaa

SEQ ID NO: 1019403 - DNA, 33 bp, Homo sapien
ctgtctgtctttcccactaaaacataaactcca

SEQ ID NO: 1019404 - DNA, 33 bp, Homo sapien
ctgtctgtctttcccagtaaaacataaactcca

SEQ ID NO: 1019405 - DNA, 33 bp, Homo sapien
gtcacaggtctatggtcacaaagaatagattca

SEQ ID NO: 1019406 - DNA, 33 bp, Homo sapien
gtcacaggtctatggttacaaagaatagattca

SEQ ID NO: 1019407 - DNA, 33 bp, Homo sapien
aatcaaatctcaaaaagtactaaagcagccaaa

SEQ ID NO: 1019408 - DNA, 33 bp, Homo sapien
aatcaaatctcaaaaattactaaagcagccaaa

SEQ ID NO: 1019409 - DNA, 33 bp, Homo sapien
taatttgcctaagaacaataattcaagattcca

SEQ ID NO: 1019410 - DNA, 33 bp, Homo sapien
taatttgcctaagaaccataattcaagattcca

SEQ ID NO: 1019411 - DNA, 33 bp, Homo sapien
cctcatttttagtcaacgttcagtcacttctct

SEQ ID NO: 1019412 - DNA, 33 bp, Homo sapien
cctcatttttagtcaatgttcagtcacttctct

SEQ ID NO: 1019413 - DNA, 33 bp, Homo sapien
agtgccctggtgataactagaccagattttccc

SEQ ID NO: 1019414 - DNA, 33 bp, Homo sapien
agtgccctggtgataagtagaccagattttccc

SEQ ID NO: 1019415 - DNA, 33 bp, Homo sapien
accagggcactgtgaccgcacatttgttcccta

SEQ ID NO: 1019416 - DNA, 33 bp, Homo sapien
accagggcactgtgactgcacatttgttcccta

SEQ ID NO: 1019417 - DNA, 33 bp, Homo sapien
tacgccgtgtttcctaccctggacgcacagtcc

SEQ ID NO: 1019418 - DNA, 33 bp, Homo sapien
tacgccgtgtttcctatcctggacgcacagtcc

SEQ ID NO: 1019419 - DNA, 33 bp, Homo sapien
ctactttttccctcccactgacagaggcaggaa

SEQ ID NO: 1019420 - DNA, 33 bp, Homo sapien
ctactttttccctcccgctgacagaggcaggaa

SEQ ID NO: 1019421 - DNA, 33 bp, Homo sapien
gggtgcagatcctggacgaggaagtaataagat

SEQ ID NO: 1019422 - DNA, 33 bp, Homo sapien
gggtgcagatcctggaggaggaagtaataagat

SEQ ID NO: 1019423 - DNA, 33 bp, Homo sapien
acattcaaagaaggaaaacacttgttattgaaa

SEQ ID NO: 1019424 - DNA, 33 bp, Homo sapien
acattcaaagaaggaatacacttgttattgaaa

SEQ ID NO: 1019425 - DNA, 33 bp, Homo sapien
ttccctactggaattaactaataactcataatt

SEQ ID NO: 1019426 - DNA, 33 bp, Homo sapien
ttccctactggaattatctaataactcataatt

SEQ ID NO: 1019427 - DNA, 33 bp, Homo sapien
ctttgcatggatttacagaggcactttcctgac

SEQ ID NO: 1019428 - DNA, 33 bp, Homo sapien
ctttgcatggatttacggaggcactttcctgac

SEQ ID NO: 1019429 - DNA, 33 bp, Homo sapien
attgcaaaggttagaaggatctaagtgcaggac

SEQ ID NO: 1019430 - DNA, 33 bp, Homo sapien
attgcaaaggttagaatgatctaagtgcaggac

SEQ ID NO: 1019431 - DNA, 33 bp, Homo sapien
agtaaacccccaaaagaatcttatgcctatgag

SEQ ID NO: 1019432 - DNA, 33 bp, Homo sapien
agtaaacccccaaaaggatcttatgcctatgag

SEQ ID NO: 1019433 - DNA, 33 bp, Homo sapien
ggtgaattttgtttgccgaaagacctcttccca

SEQ ID NO: 1019434 - DNA, 33 bp, Homo sapien
ggtgaattttgtttgctgaaagacctcttccca

SEQ ID NO: 1019435 - DNA, 33 bp, Homo sapien
ggaaaaatcaagaaaccactgaaaccaggggtg

SEQ ID NO: 1019436 - DNA, 33 bp, Homo sapien
ggaaaaatcaagaaactactgaaaccaggggtg

SEQ ID NO: 1019437 - DNA, 33 bp, Homo sapien
tcccattcagaagttgcaaaggaatacattatt

SEQ ID NO: 1019438 - DNA, 33 bp, Homo sapien
tcccattcagaagttgtaaaggaatacattatt

SEQ ID NO: 1019439 - DNA, 33 bp, Homo sapien
gggagaggtgctgcccactttcacacaaccaga

SEQ ID NO: 1019440 - DNA, 33 bp, Homo sapien
gggagaggtgctgcccgctttcacacaaccaga

SEQ ID NO: 1019441 - DNA, 33 bp, Homo sapien
tttaaaatcactaatcacagctttaattttgcc

SEQ ID NO: 1019442 - DNA, 33 bp, Homo sapien
tttaaaatcactaatcgcagctttaattttgcc

SEQ ID NO: 1019443 - DNA, 33 bp, Homo sapien
gatttacatatgttggaagtaagatgccagcac

SEQ ID NO: 1019444 - DNA, 33 bp, Homo sapien
gatttacatatgttgggagtaagatgccagcac

SEQ ID NO: 1019445 - DNA, 33 bp, Homo sapien
ggttatatagaaagaaacttcacagtctaaagc

SEQ ID NO: 1019446 - DNA, 33 bp, Homo sapien
ggttatatagaaagaatcttcacagtctaaagc

SEQ ID NO: 1019447 - DNA, 33 bp, Homo sapien
tcttcaaattcagatcaaattccttaaaactct

SEQ ID NO: 1019448 - DNA, 33 bp, Homo sapien
tcttcaaattcagatctaattccttaaaactct

SEQ ID NO: 1019449 - DNA, 33 bp, Homo sapien; identical to SEQ ID NO: 1019447

SEQ ID NO: 1019450 - DNA, 33 bp, Homo sapien; identical to SEQ ID NO: 1019448

SEQ ID NO: 1019451 - DNA, 33 bp, Homo sapien
cctagaatatgttccacgaacacttgagaagaa

SEQ ID NO: 1019452 - DNA, 33 bp, Homo sapien
cctagaatatgttccatgaacacttgagaagaa

SEQ ID NO: 1019453 - DNA, 33 bp, Homo sapien
tggtgtaacatgcaaaactgtttcttatttaaa

SEQ ID NO: 1019454 - DNA, 33 bp, Homo sapien
tggtgtaacatgcaaatctgtttcttatttaaa

SEQ ID NO: 1019455 - DNA, 33 bp, Homo sapien
gataagctatgagcaactcttattatctcatac

SEQ ID NO: 1019456 - DNA, 33 bp, Homo sapien
gataagctatgagcaagtcttattatctcatac

SEQ ID NO: 1019457 - DNA, 33 bp, Homo sapien
tggatgagatacacaaaaaacagtgagctgtaa

SEQ ID NO: 1019458 - DNA, 33 bp, Homo sapien
tggatgagatacacaacaaacagtgagctgtaa

SEQ ID NO: 1019459 - DNA, 33 bp, Homo sapien
agcgtctgaatgagaacgtaaggtatgagaagg

SEQ ID NO: 1019460 - DNA, 33 bp, Homo sapien
agcgtctgaatgagaatgtaaggtatgagaagg

SEQ ID NO: 1019461 - DNA, 33 bp, Homo sapien
gtttttcttttctatcacatcatttggctgcaa

SEQ ID NO: 1019462 - DNA, 33 bp, Homo sapien
gtttttcttttctatcccatcatttggctgcaa

SEQ ID NO: 1019463 - DNA, 33 bp, Homo sapien; identical to SEQ ID NO: 1019461

SEQ ID NO: 1019464 - DNA, 33 bp, Homo sapien; identical to SEQ ID NO: 1019462

SEQ ID NO: 1019465 - DNA, 33 bp, Homo sapien
tcctgaacctgaactcagaggtagctacagctt

SEQ ID NO: 1019466 - DNA, 33 bp, Homo sapien
tcctgaacctgaactcggaggtagctacagctt

SEQ ID NO: 1019467 - DNA, 33 bp, Homo sapien
cagccttttcagaagaacgaagttggcttaagg

SEQ ID NO: 1019468 - DNA, 33 bp, Homo sapien
cagccttttcagaagagcgaagttggcttaagg

SEQ ID NO: 1019469 - DNA, 33 bp, Homo sapien
tgtaccatgaccactgaaagagaactgtactaa

SEQ ID NO: 1019470 - DNA, 33 bp, Homo sapien
tgtaccatgaccactgcaagagaactgtactaa

SEQ ID NO: 1019471 - DNA, 33 bp, Homo sapien
gagacatataatctcaaattatcacttgagcag

SEQ ID NO: 1019472 - DNA, 33 bp, Homo sapien
gagacatataatctcacattatcacttgagcag

SEQ ID NO: 1019473 - DNA, 33 bp, Homo sapien
tacaagtttaaaaaacaaacctgatgctgatgc

SEQ ID NO: 1019474 - DNA, 33 bp, Homo sapien
tacaagtttaaaaaacgaacctgatgctgatgc

SEQ ID NO: 1019475 - DNA, 33 bp, Homo sapien
attttgccaaaataaacgcattagtaaaggaca

SEQ ID NO: 1019476 - DNA, 33 bp, Homo sapien
attttgccaaaataaatgcattagtaaaggaca

SEQ ID NO: 1019477 - DNA, 33 bp, Homo sapien
gttttcatgatgctgacaaagacataccagaga

SEQ ID NO: 1019478 - DNA, 33 bp, Homo sapien
gttttcatgatgctgataaagacataccagaga

SEQ ID NO: 1019479 - DNA, 33 bp, Homo sapien
ggacaatcatgtgaggacacagtaagaaggtgg

SEQ ID NO: 1019480 - DNA, 33 bp, Homo sapien
ggacaatcatgtgaggccacagtaagaaggtgg

SEQ ID NO: 1019481 - DNA, 33 bp, Homo sapien
cactgaagagcttgagcccagttccagccattg

SEQ ID NO: 1019482 - DNA, 33 bp, Homo sapien
cactgaagagcttgagtccagttccagccattg

SEQ ID NO: 1019483 - DNA, 33 bp, Homo sapien
gaattcatcttctaaagaccatggctcttctcc

SEQ ID NO: 1019484 - DNA, 33 bp, Homo sapien
gaattcatcttctaaataccatggctcttctcc

SEQ ID NO: 1019485 - DNA, 33 bp, Homo sapien; identical to SEQ ID NO: 1019483

SEQ ID NO: 1019486 - DNA, 33 bp, Homo sapien; identical to SEQ ID NO: 1019484

SEQ ID NO: 1019487 - DNA, 33 bp, Homo sapien
ctacttgtggcaataaacagtttcaggagatga

SEQ ID NO: 1019488 - DNA, 33 bp, Homo sapien
ctacttgtggcaataagcagtttcaggagatga

SEQ ID NO: 1019489 - DNA, 33 bp, Homo sapien
tattctaaaatgaaaccatgaatgtgagttgtt

SEQ ID NO: 1019490 - DNA, 33 bp, Homo sapien
tattctaaaatgaaacgatgaatgtgagttgtt

SEQ ID NO: 1019491 - DNA, 33 bp, Homo sapien
gtcagcaagtgataaaatgagactttctggatc

SEQ ID NO: 1019492 - DNA, 33 bp, Homo sapien
gtcagcaagtgataaagtgagactttctggatc

SEQ ID NO: 1019493 - DNA, 33 bp, Homo sapien
tagcctgtgcatctcactaagcttcacagtgac

SEQ ID NO: 1019494 - DNA, 33 bp, Homo sapien
tagcctgtgcatctcattaagcttcacagtgac

SEQ ID NO: 1019495 - DNA, 33 bp, Homo sapien
ttaaaattgtataaccaaccggaagaattcata

SEQ ID NO: 1019496 - DNA, 33 bp, Homo sapien
ttaaaattgtataacccaccggaagaattcata

SEQ ID NO: 1019497 - DNA, 33 bp, Homo sapien
gtggtcatgggatgaaactactccaaatatctt

SEQ ID NO: 1019498 - DNA, 33 bp, Homo sapien
gtggtcatgggatgaagctactccaaatatctt

SEQ ID NO: 1019499 - DNA, 33 bp, Homo sapien
gtccttgaatttatgcaaatgacatagcaatca

SEQ ID NO: 1019500 - DNA, 33 bp, Homo sapien
gtccttgaatttatgccaatgacatagcaatca

SEQ ID NO: 1019501 - DNA, 33 bp, Homo sapien
gttgtctgttatcagaaggagaatcagtgcaga

SEQ ID NO: 1019502 - DNA, 33 bp, Homo sapien
gttgtctgttatcagagggagaatcagtgcaga

SEQ ID NO: 1019503 - DNA, 33 bp, Homo sapien
tcagaaaaacaataaacgcacagcagagtctcc

SEQ ID NO: 1019504 - DNA, 33 bp, Homo sapien
tcagaaaaacaataaatgcacagcagagtctcc

SEQ ID NO: 1019505 - DNA, 33 bp, Homo sapien
aggggaaattgggagacgttgagtaaagggtcc

SEQ ID NO: 1019506 - DNA, 33 bp, Homo sapien
aggggaaattgggagatgttgagtaaagggtcc

SEQ ID NO: 1019507 - DNA, 33 bp, Homo sapien; identical to SEQ ID NO: 1019505

SEQ ID NO: 1019508 - DNA, 33 bp, Homo sapien; identical to SEQ ID NO: 1019506

SEQ ID NO: 1019509 - DNA, 33 bp, Homo sapien
agcagagatttgaggcggccctggatggtaagc

SEQ ID NO: 1019510 - DNA, 33 bp, Homo sapien
agcagagatttgaggctgccctggatggtaagc

SEQ ID NO: 1019511 - DNA, 33 bp, Homo sapien
cagctcaccagagaacaactacttgcacgtata

SEQ ID NO: 1019512 - DNA, 33 bp, Homo sapien
cagctcaccagagaacgactacttgcacgtata

SEQ ID NO: 1019513 - DNA, 33 bp, Homo sapien
tttgtttcatttttagcatggacctaagaagct

SEQ ID NO: 1019514 - DNA, 33 bp, Homo sapien
tttgtttcatttttagtatggacctaagaagct

SEQ ID NO: 1019515 - DNA, 33 bp, Homo sapien; identical to SEQ ID NO: 1019513

SEQ ID NO: 1019516 - DNA, 33 bp, Homo sapien; identical to SEQ ID NO: 1019514

SEQ ID NO: 1019517 - DNA, 33 bp, Homo sapien
tcagtataacattgagaaaataaaaatcataat

SEQ ID NO: 1019518 - DNA, 33 bp, Homo sapien
tcagtataacattgaggaaataaaaatcataat

SEQ ID NO: 1019519 - DNA, 33 bp, Homo sapien
aaactaacagcattaaaagccagacatcctggg

SEQ ID NO: 1019520 - DNA, 33 bp, Homo sapien
aaactaacagcattaagagccagacatcctggg

SEQ ID NO: 1019521 - DNA, 33 bp, Homo sapien
ttggaacagaacacacactctgtgaagtcatta

SEQ ID NO: 1019522 - DNA, 33 bp, Homo sapien
ttggaacagaacacacgctctgtgaagtcatta

SEQ ID NO: 1019523 - DNA, 33 bp, Homo sapien
aacactgccaaagagaactctaacagttaacag

SEQ ID NO: 1019524 - DNA, 33 bp, Homo sapien
aacactgccaaagagacctctaacagttaacag

SEQ ID NO: 1019525 - DNA, 33 bp, Homo sapien
ctgctgatgagtttgccgataatcttatgagag

SEQ ID NO: 1019526 - DNA, 33 bp, Homo sapien
ctgctgatgagtttgctgataatcttatgagag

SEQ ID NO: 1019527 - DNA, 33 bp, Homo sapien
gagaaggacccagacccgcatggtgcatattga

SEQ ID NO: 1019528 - DNA, 33 bp, Homo sapien
gagaaggacccagacctgcatggtgcatattga

SEQ ID NO: 1019529 - DNA, 33 bp, Homo sapien
gtcttacattatcacaatctgctttcaactagt

SEQ ID NO: 1019530 - DNA, 33 bp, Homo sapien
gtcttacattatcacagtctgctttcaactagt

SEQ ID NO: 1019531 - DNA, 33 bp, Homo sapien
tgaaatactctggaagactactaaattcttact

SEQ ID NO: 1019532 - DNA, 33 bp, Homo sapien
tgaaatactctggaagtctactaaattcttact

SEQ ID NO: 1019533 - DNA, 33 bp, Homo sapien
gacagaagtggctggcaaaagaggctgataggt

SEQ ID NO: 1019534 - DNA, 33 bp, Homo sapien
gacagaagtggctggcgaaagaggctgataggt

SEQ ID NO: 1019535 - DNA, 33 bp, Homo sapien
cctcctctcagggttaccatatgctctaagctt

SEQ ID NO: 1019536 - DNA, 33 bp, Homo sapien
cctcctctcagggttatcatatgctctaagctt

SEQ ID NO: 1019537 - DNA, 33 bp, Homo sapien
atatagccctcttcccaaatatatgaaccatga

SEQ ID NO: 1019538 - DNA, 33 bp, Homo sapien
atatagccctcttcccgaatatatgaaccatga

SEQ ID NO: 1019539 - DNA, 33 bp, Homo sapien
cttcagtcatccactcgctttatcttccttcct

SEQ ID NO: 1019540 - DNA, 33 bp, Homo sapien
cttcagtcatccactctctttatcttccttcct

SEQ ID NO: 1019541 - DNA, 33 bp, Homo sapien
aaaggttaacactgctaagattaagaaactctg

SEQ ID NO: 1019542 - DNA, 33 bp, Homo sapien
aaaggttaacactgctcagattaagaaactctg

SEQ ID NO: 1019543 - DNA, 33 bp, Homo sapien
tttatttttcttctcactattggtagctactta

SEQ ID NO: 1019544 - DNA, 33 bp, Homo sapien
tttatttttcttctcagtattggtagctactta

SEQ ID NO: 1019545 - DNA, 33 bp, Homo sapien
caaaattttttcagcactgcactccttttcctt

SEQ ID NO: 1019546 - DNA, 33 bp, Homo sapien
caaaattttttcagcattgcactccttttcctt

SEQ ID NO: 1019547 - DNA, 33 bp, Homo sapien; identical to SEQ ID NO: 1019545

SEQ ID NO: 1019548 - DNA, 33 bp, Homo sapien; identical to SEQ ID NO: 1019546

SEQ ID NO: 1019549 - DNA, 33 bp, Homo sapien
tagatttgggggttagaatgaacactgtaacca

SEQ ID NO: 1019550 - DNA, 33 bp, Homo sapien
tagatttgggggttagtatgaacactgtaacca

SEQ ID NO: 1019551 - DNA, 33 bp, Homo sapien; identical to SEQ ID NO: 1019549

SEQ ID NO: 1019552 - DNA, 33 bp, Homo sapien; identical to SEQ ID NO: 1019550

SEQ ID NO: 1019553 - DNA, 33 bp, Homo sapien
actaattaaggaaggaactagagtgaagaggac

SEQ ID NO: 1019554 - DNA, 33 bp, Homo sapien
actaattaaggaaggagctagagtgaagaggac

SEQ ID NO: 1019555 - DNA, 33 bp, Homo sapien
caccaagctatttacaaccttaatgccagtctg

SEQ ID NO: 1019556 - DNA, 33 bp, Homo sapien
caccaagctatttacagccttaatgccagtctg

SEQ ID NO: 1019557 - DNA, 33 bp, Homo sapien
gctgaaaactaaagaaaatccagccttgagaag

SEQ ID NO: 1019558 - DNA, 33 bp, Homo sapien
gctgaaaactaaagaagatccagccttgagaag

SEQ ID NO: 1019559 - DNA, 33 bp, Homo sapien
caaacaacttatcatcaatcttgagaacgtgta

SEQ ID NO: 1019560 - DNA, 33 bp, Homo sapien
caaacaacttatcatcgatcttgagaacgtgta

SEQ ID NO: 1019561 - DNA, 33 bp, Homo sapien; identical to SEQ ID NO: 1019559

SEQ ID NO: 1019562 - DNA, 33 bp, Homo sapien; identical to SEQ ID NO: 1019560

SEQ ID NO: 1019563 - DNA, 33 bp, Homo sapien
aaagttttacatatcaaaagagctttcaaaaat

SEQ ID NO: 1019564 - DNA, 33 bp, Homo sapien
aaagttttacatatcagaagagctttcaaaaat

SEQ ID NO: 1019565 - DNA, 33 bp, Homo sapien
tctccagctgatgtcaaaaaaggaagtcagaga

SEQ ID NO: 1019566 - DNA, 33 bp, Homo sapien
tctccagctgatgtcagaaaaggaagtcagaga

SEQ ID NO: 1019567 - DNA, 33 bp, Homo sapien
attaattccttaatcacgacttgtaggttgaaa

SEQ ID NO: 1019568 - DNA, 33 bp, Homo sapien
attaattccttaatcatgacttgtaggttgaaa

SEQ ID NO: 1019569 - DNA, 33 bp, Homo sapien; identical to SEQ ID NO: 1019567

SEQ ID NO: 1019570 - DNA, 33 bp, Homo sapien; identical to SEQ ID NO: 1019568

SEQ ID NO: 1019571 - DNA, 33 bp, Homo sapien
ttgatagataaagcacagatcttatagcaacaa

SEQ ID NO: 1019572 - DNA, 33 bp, Homo sapien
ttgatagataaagcactgatcttatagcaacaa

SEQ ID NO: 1019573 - DNA, 33 bp, Homo sapien
tatccaaagtttttcacggcataaaatgctctt

SEQ ID NO: 1019574 - DNA, 33 bp, Homo sapien
tatccaaagtttttcatggcataaaatgctctt

SEQ ID NO: 1019575 - DNA, 33 bp, Homo sapien; identical to SEQ ID NO: 1019573

SEQ ID NO: 1019576 - DNA, 33 bp, Homo sapien; identical to SEQ ID NO: 1019574

SEQ ID NO: 1019577 - DNA, 33 bp, Homo sapien
accctaccgcactcctaacttctggatatagca

SEQ ID NO: 1019578 - DNA, 33 bp, Homo sapien
accctaccgcactcctgacttctggatatagca

SEQ ID NO: 1019579 - DNA, 33 bp, Homo sapien
cattagtaaactgaggcattgaagtatcttctt

SEQ ID NO: 1019580 - DNA, 33 bp, Homo sapien
cattagtaaactgaggtattgaagtatcttctt

SEQ ID NO: 1019581 - DNA, 33 bp, Homo sapien
caggcctcgaagttcaccactacaagcatggag

SEQ ID NO: 1019582 - DNA, 33 bp, Homo sapien
caggcctcgaagttcagcactacaagcatggag

SEQ ID NO: 1019583 - DNA, 33 bp, Homo sapien
aatgtcttatcatagaagcataaatctaaatag

SEQ ID NO: 1019584 - DNA, 33 bp, Homo sapien
aatgtcttatcatagacgcataaatctaaatag

SEQ ID NO: 1019585 - DNA, 33 bp, Homo sapien; identical to SEQ ID NO: 1019583

SEQ ID NO: 1019586 - DNA, 33 bp, Homo sapien; identical to SEQ ID NO: 1019584

SEQ ID NO: 1019587 - DNA, 33 bp, Homo sapien
atctggtaatggttagcacagtaacagagatgg

SEQ ID NO: 1019588 - DNA, 33 bp, Homo sapien
atctggtaatggttagtacagtaacagagatgg

SEQ ID NO: 1019589 - DNA, 33 bp, Homo sapien
tggaggatatgaaggcacttagtacacagcctt

SEQ ID NO: 1019590 - DNA, 33 bp, Homo sapien
tggaggatatgaaggcgcttagtacacagcctt

SEQ ID NO: 1019591 - DNA, 33 bp, Homo sapien
aaatttagacctaagcactcacatatatgaaat

SEQ ID NO: 1019592 - DNA, 33 bp, Homo sapien
aaatttagacctaagcgctcacatatatgaaat

SEQ ID NO: 1019593 - DNA, 33 bp, Homo sapien
tcactgatcccttttgcagactaaagagtcata

SEQ ID NO: 1019594 - DNA, 33 bp, Homo sapien
tcactgatcccttttgtagactaaagagtcata

SEQ ID NO: 1019595 - DNA, 33 bp, Homo sapien
tgcattttctgggtgaaattcagaactgtttta

SEQ ID NO: 1019596 - DNA, 33 bp, Homo sapien
tgcattttctgggtgacattcagaactgtttta

SEQ ID NO: 1019597 - DNA, 33 bp, Homo sapien
aactcactaagctgaaaggaacagtcaagctga

SEQ ID NO: 1019598 - DNA, 33 bp, Homo sapien
aactcactaagctgaagggaacagtcaagctga

SEQ ID NO: 1019599 - DNA, 33 bp, Homo sapien
aagaaatcagtattggccaaataaaaccaacat

SEQ ID NO: 1019600 - DNA, 33 bp, Homo sapien
aagaaatcagtattggtcaaataaaaccaacat

SEQ ID NO: 1019601 - DNA, 33 bp, Homo sapien
acagattgattaaacaaacatcccatcactgac

SEQ ID NO: 1019602 - DNA, 33 bp, Homo sapien
acagattgattaaacacacatcccatcactgac

SEQ ID NO: 1019603 - DNA, 33 bp, Homo sapien; identical to SEQ ID NO: 1019601

SEQ ID NO: 1019604 - DNA, 33 bp, Homo sapien; identical to SEQ ID NO: 1019602

SEQ ID NO: 1019605 - DNA, 33 bp, Homo sapien
ctggcccaagtttacacgtgtcccatttctccc

SEQ ID NO: 1019606 - DNA, 33 bp, Homo sapien
ctggcccaagtttacatgtgtcccatttctccc

SEQ ID NO: 1019607 - DNA, 33 bp, Homo sapien
tgccaggaggagagaacgagtcggccgagccaa

SEQ ID NO: 1019608 - DNA, 33 bp, Homo sapien
tgccaggaggagagaatgagtcggccgagccaa

SEQ ID NO: 1019609 - DNA, 33 bp, Homo sapien
atataggaaaatctaacatcctgcgataaatac

SEQ ID NO: 1019610 - DNA, 33 bp, Homo sapien
atataggaaaatctaatatcctgcgataaatac

SEQ ID NO: 1019611 - DNA, 33 bp, Homo sapien
ttacattttaaacgtaagtcaatgtatgtgaag

SEQ ID NO: 1019612 - DNA, 33 bp, Homo sapien
ttacattttaaacgtaggtcaatgtatgtgaag

SEQ ID NO: 1019613 - DNA, 33 bp, Homo sapien
ccctcttgccatacaaagggacctgtgattaca

SEQ ID NO: 1019614 - DNA, 33 bp, Homo sapien
ccctcttgccatacaaggggacctgtgattaca

SEQ ID NO: 1019615 - DNA, 33 bp, Homo sapien
ctttgttctgttttgtgaagtttgaggttattt

SEQ ID NO: 1019616 - DNA, 33 bp, Homo sapien
ctttgttctgttttgttaagtttgaggttattt

SEQ ID NO: 1019617 - DNA, 33 bp, Homo sapien
attttgctttatggttgaaaaattgatcacaag

SEQ ID NO: 1019618 - DNA, 33 bp, Homo sapien
attttgctttatggtttaaaaattgatcacaag

SEQ ID NO: 1019619 - DNA, 33 bp, Homo sapien
ttaaaatcagactccaatgaatgtgcaaaatgt

SEQ ID NO: 1019620 - DNA, 33 bp, Homo sapien
ttaaaatcagactccattgaatgtgcaaaatgt

SEQ ID NO: 1019621 - DNA, 33 bp, Homo sapien
aatacgaattatagagaaacggggaagaaggga

SEQ ID NO: 1019622 - DNA, 33 bp, Homo sapien
aatacgaattatagaggaacggggaagaaggga

SEQ ID NO: 1019623 - DNA, 33 bp, Homo sapien
cagtagaacctcttgaagtaggccagcttcagc

SEQ ID NO: 1019624 - DNA, 33 bp, Homo sapien
cagtagaacctcttgaggtaggccagcttcagc

SEQ ID NO: 1019625 - DNA, 33 bp, Homo sapien; identical to SEQ ID NO: 1019623

SEQ ID NO: 1019626 - DNA, 33 bp, Homo sapien; identical to SEQ ID NO: 1019624

SEQ ID NO: 1019627 - DNA, 33 bp, Homo sapien
aatttgttggcaaaagactgttagacgcttggt

SEQ ID NO: 1019628 - DNA, 33 bp, Homo sapien
aatttgttggcaaaagcctgttagacgcttggt

SEQ ID NO: 1019629 - DNA, 33 bp, Homo sapien
gtagagacgggttttcactgtcttagccatgat

SEQ ID NO: 1019630 - DNA, 33 bp, Homo sapien
gtagagacgggttttcgctgtcttagccatgat

SEQ ID NO: 1019631 - DNA, 33 bp, Homo sapien
tcacagatgactgggcaaatcactggtcctatg

SEQ ID NO: 1019632 - DNA, 33 bp, Homo sapien
tcacagatgactgggcgaatcactggtcctatg

SEQ ID NO: 1019633 - DNA, 33 bp, Homo sapien
cagcaagtttccaacacagcaatcatgataaaa

SEQ ID NO: 1019634 - DNA, 33 bp, Homo sapien
cagcaagtttccaacatagcaatcatgataaaa

SEQ ID NO: 1019635 - DNA, 33 bp, Homo sapien; identical to SEQ ID NO: 1019633

SEQ ID NO: 1019636 - DNA, 33 bp, Homo sapien; identical to SEQ ID NO: 1019634

SEQ ID NO: 1019637 - DNA, 33 bp, Homo sapien
ttgagaagtaatgaccacatgttgttactttgg

SEQ ID NO: 1019638 - DNA, 33 bp, Homo sapien
ttgagaagtaatgaccgcatgttgttactttgg

SEQ ID NO: 1019639 - DNA, 33 bp, Homo sapien
tattacattgagaaaacgagatttatccatgga

SEQ ID NO: 1019640 - DNA, 33 bp, Homo sapien
tattacattgagaaaatgagatttatccatgga

SEQ ID NO: 1019641 - DNA, 33 bp, Homo sapien
gaacaatagagagaaaaaacgatgaaaaagtct

SEQ ID NO: 1019642 - DNA, 33 bp, Homo sapien
gaacaatagagagaaagaacgatgaaaaagtct

SEQ ID NO: 1019643 - DNA, 33 bp, Homo sapien; identical to SEQ ID NO: 1019641

SEQ ID NO: 1019644 - DNA, 33 bp, Homo sapien; identical to SEQ ID NO: 1019642

SEQ ID NO: 1019645 - DNA, 33 bp, Homo sapien
acctccagctttcccacgaaacttggttggacc

SEQ ID NO: 1019646 - DNA, 33 bp, Homo sapien
acctccagctttcccaggaaacttggttggacc

SEQ ID NO: 1019647 - DNA, 33 bp, Homo sapien
tatcctccagtaaataaatggatatacaaagtg

SEQ ID NO: 1019648 - DNA, 33 bp, Homo sapien
tatcctccagtaaatacatggatatacaaagtg

SEQ ID NO: 1019649 - DNA, 33 bp, Homo sapien
cttcacttttgaagaccattttgtctaaggcat

SEQ ID NO: 1019650 - DNA, 33 bp, Homo sapien
cttcacttttgaagactattttgtctaaggcat

SEQ ID NO: 1019651 - DNA, 33 bp, Homo sapien
atctaataactattgcgatcattattttgaaca

SEQ ID NO: 1019652 - DNA, 33 bp, Homo sapien
atctaataactattgctatcattattttgaaca

SEQ ID NO: 1019653 - DNA, 33 bp, Homo sapien
aatcactgcgcccgacaacttttagaatattta

SEQ ID NO: 1019654 - DNA, 33 bp, Homo sapien
aatcactgcgcccgaccacttttagaatattta

SEQ ID NO: 1019655 - DNA, 33 bp, Homo sapien
agacctgcaatttagacctctaatttaaattgc

SEQ ID NO: 1019656 - DNA, 33 bp, Homo sapien
agacctgcaatttagatctctaatttaaattgc

SEQ ID NO: 1019657 - DNA, 33 bp, Homo sapien
acctgcaacagttggaaactggatagcttcagt

SEQ ID NO: 1019658 - DNA, 33 bp, Homo sapien
acctgcaacagttggagactggatagcttcagt

SEQ ID NO: 1019659 - DNA, 33 bp, Homo sapien
cttaaataagcttctcaagtctattgagtaggc

SEQ ID NO: 1019660 - DNA, 33 bp, Homo sapien
cttaaataagcttctccagtctattgagtaggc

SEQ ID NO: 1019661 - DNA, 33 bp, Homo sapien
tgggcaacatagaaaacgtaaacaaaaagagtt

SEQ ID NO: 1019662 - DNA, 33 bp, Homo sapien
tgggcaacatagaaaatgtaaacaaaaagagtt

SEQ ID NO: 1019663 - DNA, 33 bp, Homo sapien
aatgccagccaaaaaagagtgcaccttatatga

SEQ ID NO: 1019664 - DNA, 33 bp, Homo sapien
aatgccagccaaaaaatagtgcaccttatatga

SEQ ID NO: 1019665 - DNA, 33 bp, Homo sapien
cttgcctaaacatgcccatagtggaaaatttcg

SEQ ID NO: 1019666 - DNA, 33 bp, Homo sapien
cttgcctaaacatgcctatagtggaaaatttcg

SEQ ID NO: 1019667 - DNA, 33 bp, Homo sapien
gagttcacattggccacgttcatccataccaag

SEQ ID NO: 1019668 - DNA, 33 bp, Homo sapien
gagttcacattggccatgttcatccataccaag

SEQ ID NO: 1019669 - DNA, 33 bp, Homo sapien
atgaaagaaagaaaccactatgtgttatattcc

SEQ ID NO: 1019670 - DNA, 33 bp, Homo sapien
atgaaagaaagaaaccgctatgtgttatattcc

SEQ ID NO: 1019671 - DNA, 33 bp, Homo sapien; identical to SEQ ID NO: 1019669

SEQ ID NO: 1019672 - DNA, 33 bp, Homo sapien; identical to SEQ ID NO: 1019670

SEQ ID NO: 1019673 - DNA, 33 bp, Homo sapien
gaactctgaccaggatgagttttcagagcactt

SEQ ID NO: 1019674 - DNA, 33 bp, Homo sapien
gaactctgaccaggattagttttcagagcactt

SEQ ID NO: 1019675 - DNA, 33 bp, Homo sapien
ataaataaaaactcaaagccattcttcttatgt

SEQ ID NO: 1019676 - DNA, 33 bp, Homo sapien
ataaataaaaactcaatgccattcttcttatgt

SEQ ID NO: 1019677 - DNA, 33 bp, Homo sapien; identical to SEQ ID NO: 1019675

SEQ ID NO: 1019678 - DNA, 33 bp, Homo sapien; identical to SEQ ID NO: 1019676

SEQ ID NO: 1019679 - DNA, 33 bp, Homo sapien
cagattaggcattaaaagaacatacctcaaaat

SEQ ID NO: 1019680 - DNA, 33 bp, Homo sapien
cagattaggcattaaaggaacatacctcaaaat

SEQ ID NO: 1019681 - DNA, 33 bp, Homo sapien
cagtaaagtttcaagaaataaaaacattgtagg

SEQ ID NO: 1019682 - DNA, 33 bp, Homo sapien
cagtaaagtttcaagatataaaaacattgtagg

SEQ ID NO: 1019683 - DNA, 33 bp, Homo sapien
ccatattttctttacccaattctctattgatgg

SEQ ID NO: 1019684 - DNA, 33 bp, Homo sapien
ccatattttctttaccgaattctctattgatgg

SEQ ID NO: 1019685 - DNA, 33 bp, Homo sapien
cttctggaaggtctgccgacaccctcctgcggg

SEQ ID NO: 1019686 - DNA, 33 bp, Homo sapien
cttctggaaggtctgcggacaccctcctgcggg

SEQ ID NO: 1019687 - DNA, 33 bp, Homo sapien
ggagagcggctgagatcactccatgggctgctc

SEQ ID NO: 1019688 - DNA, 33 bp, Homo sapien
ggagagcggctgagatgactccatgggctgctc

SEQ ID NO: 1019689 - DNA, 33 bp, Homo sapien
tgtaaggttatagctcactaagatttttacacg

SEQ ID NO: 1019690 - DNA, 33 bp, Homo sapien
tgtaaggttatagctctctaagatttttacacg

SEQ ID NO: 1019691 - DNA, 33 bp, Homo sapien
agaaggccaatctaaaacaactgggtttgtggc

SEQ ID NO: 1019692 - DNA, 33 bp, Homo sapien
agaaggccaatctaaagcaactgggtttgtggc

SEQ ID NO: 1019693 - DNA, 33 bp, Homo sapien; identical to SEQ ID NO: 1019691

SEQ ID NO: 1019694 - DNA, 33 bp, Homo sapien; identical to SEQ ID NO: 1019692

SEQ ID NO: 1019695 - DNA, 33 bp, Homo sapien
cttcacaccagatagaccctgaatgctctcatt

SEQ ID NO: 1019696 - DNA, 33 bp, Homo sapien
cttcacaccagatagatcctgaatgctctcatt

SEQ ID NO: 1019697 - DNA, 33 bp, Homo sapien
aatgcaataattttcacgagtttacttccctag

SEQ ID NO: 1019698 - DNA, 33 bp, Homo sapien
aatgcaataattttcatgagtttacttccctag

SEQ ID NO: 1019699 - DNA, 33 bp, Homo sapien
accaaaaacaatatacagatttaacacaacccc

SEQ ID NO: 1019700 - DNA, 33 bp, Homo sapien
accaaaaacaatatactgatttaacacaacccc

SEQ ID NO: 1019701 - DNA, 33 bp, Homo sapien
cagcacagaataggcagccggtgagtgttcagg

SEQ ID NO: 1019702 - DNA, 33 bp, Homo sapien
cagcacagaataggcatccggtgagtgttcagg

SEQ ID NO: 1019703 - DNA, 33 bp, Homo sapien
gtgggagagcgagatcaacagcttcaaatgctt

SEQ ID NO: 1019704 - DNA, 33 bp, Homo sapien
gtgggagagcgagatcgacagcttcaaatgctt

SEQ ID NO: 1019705 - DNA, 33 bp, Homo sapien
gctcatggaagtcatccctgaacttttgatgaa

SEQ ID NO: 1019706 - DNA, 33 bp, Homo sapien
gctcatggaagtcatctctgaacttttgatgaa

SEQ ID NO: 1019707 - DNA, 33 bp, Homo sapien
catcattaccataggaaataacaactccatgag

SEQ ID NO: 1019708 - DNA, 33 bp, Homo sapien
catcattaccataggacataacaactccatgag

SEQ ID NO: 1019709 - DNA, 33 bp, Homo sapien
cagtccatgatcggaacggatgattggacatgc

SEQ ID NO: 1019710 - DNA, 33 bp, Homo sapien
cagtccatgatcggaatggatgattggacatgc

SEQ ID NO: 1019711 - DNA, 33 bp, Homo sapien
aggtactatgtgctccagagtatgttacagagc

SEQ ID NO: 1019712 - DNA, 33 bp, Homo sapien
aggtactatgtgctccggagtatgttacagagc

SEQ ID NO: 1019713 - DNA, 33 bp, Homo sapien
acttaacaaaaaataaacttgaactggtaggat

SEQ ID NO: 1019714 - DNA, 33 bp, Homo sapien
acttaacaaaaaataaccttgaactggtaggat

SEQ ID NO: 1019715 - DNA, 33 bp, Homo sapien
tttgcaaattgcccagaaatgtgaaaacagact

SEQ ID NO: 1019716 - DNA, 33 bp, Homo sapien
tttgcaaattgcccagcaatgtgaaaacagact

SEQ ID NO: 1019717 - DNA, 33 bp, Homo sapien
agagacaagtacacaaatgtttacaagttacac

SEQ ID NO: 1019718 - DNA, 33 bp, Homo sapien
agagacaagtacacaagtgtttacaagttacac

SEQ ID NO: 1019719 - DNA, 33 bp, Homo sapien
ttatgagacacaaacacgatatgcatttgacag

SEQ ID NO: 1019720 - DNA, 33 bp, Homo sapien
ttatgagacacaaacaggatatgcatttgacag

SEQ ID NO: 1019721 - DNA, 33 bp, Homo sapien
cttaatcaatgtgagacgaaaggaagcaactgc

SEQ ID NO: 1019722 - DNA, 33 bp, Homo sapien
cttaatcaatgtgagatgaaaggaagcaactgc

SEQ ID NO: 1019723 - DNA, 33 bp, Homo sapien
aatgaatggtttgctacagaatgctttctcttt

SEQ ID NO: 1019724 - DNA, 33 bp, Homo sapien
aatgaatggtttgctatagaatgctttctcttt

SEQ ID NO: 1019725 - DNA, 33 bp, Homo sapien
acatggtaaactgtcacgtactatacaaatgat

SEQ ID NO: 1019726 - DNA, 33 bp, Homo sapien
acatggtaaactgtcatgtactatacaaatgat

SEQ ID NO: 1019727 - DNA, 33 bp, Homo sapien
tccaaataatgcatcaaagagtcaggtatgaca

SEQ ID NO: 1019728 - DNA, 33 bp, Homo sapien
tccaaataatgcatcagagagtcaggtatgaca

SEQ ID NO: 1019729 - DNA, 33 bp, Homo sapien
cttatctgaaaggaaaagctgatgaaagctagg

SEQ ID NO: 1019730 - DNA, 33 bp, Homo sapien
cttatctgaaaggaaaggctgatgaaagctagg

SEQ ID NO: 1019731 - DNA, 33 bp, Homo sapien
tttaaaacaatgaataacaaatgaagagctaga

SEQ ID NO: 1019732 - DNA, 33 bp, Homo sapien
tttaaaacaatgaatagcaaatgaagagctaga

SEQ ID NO: 1019733 - DNA, 33 bp, Homo sapien
ccattgattaatcactcaccgagttcttgtgac

SEQ ID NO: 1019734 - DNA, 33 bp, Homo sapien
ccattgattaatcacttaccgagttcttgtgac

SEQ ID NO: 1019735 - DNA, 33 bp, Homo sapien
tgtgttgctggaagaaagaacagtatctgggta

SEQ ID NO: 1019736 - DNA, 33 bp, Homo sapien
tgtgttgctggaagaaggaacagtatctgggta

SEQ ID NO: 1019737 - DNA, 33 bp, Homo sapien
atccatcaacttttccagaatcaggtttctctg

SEQ ID NO: 1019738 - DNA, 33 bp, Homo sapien
atccatcaacttttccggaatcaggtttctctg

SEQ ID NO: 1019739 - DNA, 33 bp, Homo sapien
gtcttttgtaattagactattcatcataacatg

SEQ ID NO: 1019740 - DNA, 33 bp, Homo sapien
gtcttttgtaattagagtattcatcataacatg

SEQ ID NO: 1019741 - DNA, 33 bp, Homo sapien
aaggataaggagtaacacagaatcaatgaaaaa

SEQ ID NO: 1019742 - DNA, 33 bp, Homo sapien
aaggataaggagtaacccagaatcaatgaaaaa

SEQ ID NO: 1019743 - DNA, 33 bp, Homo sapien
agggcaagtcagttaccctgcctggagctttgc

SEQ ID NO: 1019744 - DNA, 33 bp, Homo sapien
agggcaagtcagttactctgcctggagctttgc

SEQ ID NO: 1019745 - DNA, 33 bp, Homo sapien
atccgcaatgccaacacgattaactgcgtaatt

SEQ ID NO: 1019746 - DNA, 33 bp, Homo sapien
atccgcaatgccaacatgattaactgcgtaatt

SEQ ID NO: 1019747 - DNA, 33 bp, Homo sapien
tagttacgaggaaaggaaatattggaaaggtca

SEQ ID NO: 1019748 - DNA, 33 bp, Homo sapien
tagttacgaggaaagggaatattggaaaggtca

SEQ ID NO: 1019749 - DNA, 33 bp, Homo sapien
agaagtggaagtcacaaggatgaaatgatattc

SEQ ID NO: 1019750 - DNA, 33 bp, Homo sapien
agaagtggaagtcacagggatgaaatgatattc

SEQ ID NO: 1019751 - DNA, 33 bp, Homo sapien
ttttggtccccatgaccgcacatttctcatcct

SEQ ID NO: 1019752 - DNA, 33 bp, Homo sapien
ttttggtccccatgactgcacatttctcatcct

SEQ ID NO: 1019753 - DNA, 33 bp, Homo sapien
ggatacacagggcttcacatactcagtaccttg

SEQ ID NO: 1019754 - DNA, 33 bp, Homo sapien
ggatacacagggcttcgcatactcagtaccttg

SEQ ID NO: 1019755 - DNA, 33 bp, Homo sapien
cttcagacaaagcttaaatttttcaaccaattg

SEQ ID NO: 1019756 - DNA, 33 bp, Homo sapien
cttcagacaaagcttagatttttcaaccaattg

SEQ ID NO: 1019757 - DNA, 33 bp, Homo sapien
gctggagatttccagaaagatttgatatttttt

SEQ ID NO: 1019758 - DNA, 33 bp, Homo sapien
gctggagatttccagagagatttgatatttttt

SEQ ID NO: 1019759 - DNA, 33 bp, Homo sapien
aaataacagtggatgaagtaaagaaagttctaa

SEQ ID NO: 1019760 - DNA, 33 bp, Homo sapien
aaataacagtggatgaggtaaagaaagttctaa

SEQ ID NO: 1019761 - DNA, 33 bp, Homo sapien
acagggtaaaggtgacaggcatcaggtccaggt

SEQ ID NO: 1019762 - DNA, 33 bp, Homo sapien
acagggtaaaggtgaccggcatcaggtccaggt

SEQ ID NO: 1019763 - DNA, 33 bp, Homo sapien
gagtcatctgccttccaggaaatatgagtgttt

SEQ ID NO: 1019764 - DNA, 33 bp, Homo sapien
gagtcatctgccttccgggaaatatgagtgttt

SEQ ID NO: 1019765 - DNA, 33 bp, Homo sapien
tagcccaaatgtccatcaacaggtgagtagata

SEQ ID NO: 1019766 - DNA, 33 bp, Homo sapien
tagcccaaatgtccatgaacaggtgagtagata

SEQ ID NO: 1019767 - DNA, 33 bp, Homo sapien
tgttatggatgttcacaacttgattatactcct

SEQ ID NO: 1019768 - DNA, 33 bp, Homo sapien
tgttatggatgttcacgacttgattatactcct

SEQ ID NO: 1019769 - DNA, 33 bp, Homo sapien
atccaaataaaaaggcaaaacattatcctcaca

SEQ ID NO: 1019770 - DNA, 33 bp, Homo sapien
atccaaataaaaaggcgaaacattatcctcaca

SEQ ID NO: 1019771 - DNA, 33 bp, Homo sapien
ctatctttaattatcacaacaatattgcagtgt

SEQ ID NO: 1019772 - DNA, 33 bp, Homo sapien
ctatctttaattatcagaacaatattgcagtgt

SEQ ID NO: 1019773 - DNA, 33 bp, Homo sapien
gcaaagatgagtagacggatgggacaggaccag

SEQ ID NO: 1019774 - DNA, 33 bp, Homo sapien
gcaaagatgagtagactgatgggacaggaccag

SEQ ID NO: 1019775 - DNA, 33 bp, Homo sapien
ggaagtacaagtgggacaaggaatggacaaaca

SEQ ID NO: 1019776 - DNA, 33 bp, Homo sapien
ggaagtacaagtgggagaaggaatggacaaaca

SEQ ID NO: 1019777 - DNA, 33 bp, Homo sapien
ctcagaaagctcagagaaattcagaatcaaagc

SEQ ID NO: 1019778 - DNA, 33 bp, Homo sapien
ctcagaaagctcagagcaattcagaatcaaagc

SEQ ID NO: 1019779 - DNA, 33 bp, Homo sapien
ttcatctctttctgacacctacccagcctagct

SEQ ID NO: 1019780 - DNA, 33 bp, Homo sapien
ttcatctctttctgacgcctacccagcctagct

SEQ ID NO: 1019781 - DNA, 33 bp, Homo sapien
tctgatgaccaacaccacataccaagtttctcc

SEQ ID NO: 1019782 - DNA, 33 bp, Homo sapien
tctgatgaccaacaccgcataccaagtttctcc

SEQ ID NO: 1019783 - DNA, 33 bp, Homo sapien
tgcatcagattccacaacttgggttgctatgtc

SEQ ID NO: 1019784 - DNA, 33 bp, Homo sapien
tgcatcagattccacatcttgggttgctatgtc

SEQ ID NO: 1019785 - DNA, 33 bp, Homo sapien
ttaaccatctgctttcccttcaggcttttcagc

SEQ ID NO: 1019786 - DNA, 33 bp, Homo sapien
ttaaccatctgctttctcttcaggcttttcagc

SEQ ID NO: 1019787 - DNA, 33 bp, Homo sapien
ttagcaaatcactgaaactcttcgtctacaaaa

SEQ ID NO: 1019788 - DNA, 33 bp, Homo sapien
ttagcaaatcactgaatctcttcgtctacaaaa

SEQ ID NO: 1019789 - DNA, 33 bp, Homo sapien
aatagaaaaccagttcaaataaagtcttcttgg

SEQ ID NO: 1019790 - DNA, 33 bp, Homo sapien
aatagaaaaccagttcgaataaagtcttcttgg

SEQ ID NO: 1019791 - DNA, 33 bp, Homo sapien
ccctagccattatttacaagtcttctaacttct

SEQ ID NO: 1019792 - DNA, 33 bp, Homo sapien
ccctagccattatttataagtcttctaacttct

SEQ ID NO: 1019793 - DNA, 33 bp, Homo sapien
tgctctacatcaaatcacatttctgataaatga

SEQ ID NO: 1019794 - DNA, 33 bp, Homo sapien
tgctctacatcaaatcgcatttctgataaatga

SEQ ID NO: 1019795 - DNA, 33 bp, Homo sapien
cctatctttacaaaaaattagccacagatggtg

SEQ ID NO: 1019796 - DNA, 33 bp, Homo sapien
cctatctttacaaaaagttagccacagatggtg

SEQ ID NO: 1019797 - DNA, 33 bp, Homo sapien
ttctggctctgtcttacagcccaaccagtgaca

SEQ ID NO: 1019798 - DNA, 33 bp, Homo sapien
ttctggctctgtcttatagcccaaccagtgaca

SEQ ID NO: 1019799 - DNA, 33 bp, Homo sapien
ggccacagagggaaaacgccattctcaccacat

SEQ ID NO: 1019800 - DNA, 33 bp, Homo sapien
ggccacagagggaaaatgccattctcaccacat

SEQ ID NO: 1019801 - DNA, 33 bp, Homo sapien
tctgccttatcaaataactcatgatctagtgtg

SEQ ID NO: 1019802 - DNA, 33 bp, Homo sapien
tctgccttatcaaatatctcatgatctagtgtg

SEQ ID NO: 1019803 - DNA, 33 bp, Homo sapien
ccatatggatgtgccacgatttgtttctctatt

SEQ ID NO: 1019804 - DNA, 33 bp, Homo sapien
ccatatggatgtgccatgatttgtttctctatt

SEQ ID NO: 1019805 - DNA, 33 bp, Homo sapien
atgattagaatcttacaatgttggattccaggg

SEQ ID NO: 1019806 - DNA, 33 bp, Homo sapien
atgattagaatcttacgatgttggattccaggg

SEQ ID NO: 1019807 - DNA, 33 bp, Homo sapien
catttatgtatagaacaatcctgccagggtttc

SEQ ID NO: 1019808 - DNA, 33 bp, Homo sapien
catttatgtatagaaccatcctgccagggtttc

SEQ ID NO: 1019809 - DNA, 33 bp, Homo sapien
ccagttctcagtgtcaaggccaagaagatatca

SEQ ID NO: 1019810 - DNA, 33 bp, Homo sapien
ccagttctcagtgtcagggccaagaagatatca

SEQ ID NO: 1019811 - DNA, 33 bp, Homo sapien
taaactatcaattaggaagaaaagtctatacct

SEQ ID NO: 1019812 - DNA, 33 bp, Homo sapien
taaactatcaattaggtagaaaagtctatacct

SEQ ID NO: 1019813 - DNA, 33 bp, Homo sapien
tagcttaaattgtttgaatatcctttctcttaa

SEQ ID NO: 1019814 - DNA, 33 bp, Homo sapien
tagcttaaattgtttggatatcctttctcttaa

SEQ ID NO: 1019815 - DNA, 33 bp, Homo sapien
tagataggggacatggaaggatagatatcaagg

SEQ ID NO: 1019816 - DNA, 33 bp, Homo sapien
tagataggggacatgggaggatagatatcaagg

SEQ ID NO: 1019817 - DNA, 33 bp, Homo sapien
gcaaagcggtcaagagaatcagctcttccacat

SEQ ID NO: 1019818 - DNA, 33 bp, Homo sapien
gcaaagcggtcaagaggatcagctcttccacat

SEQ ID NO: 1019819 - DNA, 33 bp, Homo sapien
caggtttggtgtccaaaaagtgtttttaccaat

SEQ ID NO: 1019820 - DNA, 33 bp, Homo sapien
caggtttggtgtccaagaagtgtttttaccaat

SEQ ID NO: 1019821 - DNA, 33 bp, Homo sapien
ccccactaccataccacattgctctttatttcc

SEQ ID NO: 1019822 - DNA, 33 bp, Homo sapien
ccccactaccataccatattgctctttatttcc

SEQ ID NO: 1019823 - DNA, 33 bp, Homo sapien
agttcaagtctttctacgtaaatatcctgctca

SEQ ID NO: 1019824 - DNA, 33 bp, Homo sapien
agttcaagtctttctatgtaaatatcctgctca

SEQ ID NO: 1019825 - DNA, 33 bp, Homo sapien
agatatgcactttgtacaaattattgttgagaa

SEQ ID NO: 1019826 - DNA, 33 bp, Homo sapien
agatatgcactttgtataaattattgttgagaa

SEQ ID NO: 1019827 - DNA, 33 bp, Homo sapien
ttacattagagactaacagtggcagtttgatag

SEQ ID NO: 1019828 - DNA, 33 bp, Homo sapien
ttacattagagactaagagtggcagtttgatag

SEQ ID NO: 1019829 - DNA, 33 bp, Homo sapien
cagaccttcatgtcccaaaaatatctctggctt

SEQ ID NO: 1019830 - DNA, 33 bp, Homo sapien
cagaccttcatgtcccgaaaatatctctggctt

SEQ ID NO: 1019831 - DNA, 33 bp, Homo sapien
aagccagagaatctcacgaagaactaatgaagt

SEQ ID NO: 1019832 - DNA, 33 bp, Homo sapien
aagccagagaatctcatgaagaactaatgaagt

SEQ ID NO: 1019833 - DNA, 33 bp, Homo sapien
aatggacttcattcaaatggttgaaaggcatta

SEQ ID NO: 1019834 - DNA, 33 bp, Homo sapien
aatggacttcattcaattggttgaaaggcatta

SEQ ID NO: 1019835 - DNA, 33 bp, Homo sapien
ttgttgttcagcattacatttatgagatttatc

SEQ ID NO: 1019836 - DNA, 33 bp, Homo sapien
ttgttgttcagcattatatttatgagatttatc

SEQ ID NO: 1019837 - DNA, 33 bp, Homo sapien
ggaccatgaaagaaaaaccagagcatccaccaa

SEQ ID NO: 1019838 - DNA, 33 bp, Homo sapien
ggaccatgaaagaaaacccagagcatccaccaa

SEQ ID NO: 1019839 - DNA, 33 bp, Homo sapien
attccatcagcggccacgtaccatgtgaccagc

SEQ ID NO: 1019840 - DNA, 33 bp, Homo sapien
attccatcagcggccatgtaccatgtgaccagc

SEQ ID NO: 1019841 - DNA, 33 bp, Homo sapien
aaaaaatgatacctaacaataccgaagacttat

SEQ ID NO: 1019842 - DNA, 33 bp, Homo sapien
aaaaaatgatacctaataataccgaagacttat

SEQ ID NO: 1019843 - DNA, 33 bp, Homo sapien
cacacacacacacacacagacatcagttttatt

SEQ ID NO: 1019844 - DNA, 33 bp, Homo sapien
cacacacacacacacagagacatcagttttatt

SEQ ID NO: 1019845 - DNA, 33 bp, Homo sapien
acactggattttgaatcattactttgctcttgg

SEQ ID NO: 1019846 - DNA, 33 bp, Homo sapien
acactggattttgaattattactttgctcttgg

SEQ ID NO: 1019847 - DNA, 33 bp, Homo sapien
tgagatacagtgctaacaggagacagcagaaca

SEQ ID NO: 1019848 - DNA, 33 bp, Homo sapien
tgagatacagtgctaataggagacagcagaaca

SEQ ID NO: 1019849 - DNA, 33 bp, Homo sapien
accatgtagtatgagaactggtatttcttcctg

SEQ ID NO: 1019850 - DNA, 33 bp, Homo sapien
accatgtagtatgagacctggtatttcttcctg

SEQ ID NO: 1019851 - DNA, 33 bp, Homo sapien
cagtagagctacataaagtacagttctaactgg

SEQ ID NO: 1019852 - DNA, 33 bp, Homo sapien
cagtagagctacataatgtacagttctaactgg

SEQ ID NO: 1019853 - DNA, 33 bp, Homo sapien
gtacttacaattccaacccttgcctgaacttcc

SEQ ID NO: 1019854 - DNA, 33 bp, Homo sapien
gtacttacaattccaatccttgcctgaacttcc

SEQ ID NO: 1019855 - DNA, 33 bp, Homo sapien
gagaactacgcttactcaatactttcaaataaa

SEQ ID NO: 1019856 - DNA, 33 bp, Homo sapien
gagaactacgcttactgaatactttcaaataaa

SEQ ID NO: 1019857 - DNA, 33 bp, Homo sapien
tatttagaggaaagaagatggacatgcagttga

SEQ ID NO: 1019858 - DNA, 33 bp, Homo sapien
tatttagaggaaagaatatggacatgcagttga

SEQ ID NO: 1019859 - DNA, 33 bp, Homo sapien
tgtcttcaaggatacaaccagttacatctgact

SEQ ID NO: 1019860 - DNA, 33 bp, Homo sapien
tgtcttcaaggatacagccagttacatctgact

SEQ ID NO: 1019861 - DNA, 33 bp, Homo sapien
gggttatgccaacttacattaaccagtttttat

SEQ ID NO: 1019862 - DNA, 33 bp, Homo sapien
gggttatgccaacttatattaaccagtttttat

SEQ ID NO: 1019863 - DNA, 33 bp, Homo sapien
accaactgcctgggaactcaaagtgagacaggt

SEQ ID NO: 1019864 - DNA, 33 bp, Homo sapien
accaactgcctgggaattcaaagtgagacaggt

SEQ ID NO: 1019865 - DNA, 33 bp, Homo sapien
gattgaagcgttgaaaatgtggatagtttaata

SEQ ID NO: 1019866 - DNA, 33 bp, Homo sapien
gattgaagcgttgaaagtgtggatagtttaata

SEQ ID NO: 1019867 - DNA, 33 bp, Homo sapien
atggaagatcttgggacggatcttttggtaaga

SEQ ID NO: 1019868 - DNA, 33 bp, Homo sapien
atggaagatcttgggatggatcttttggtaaga

SEQ ID NO: 1019869 - DNA, 33 bp, Homo sapien
gcctttaggacatggacactctcagaaagtgtt

SEQ ID NO: 1019870 - DNA, 33 bp, Homo sapien
gcctttaggacatggatactctcagaaagtgtt

SEQ ID NO: 1019871 - DNA, 33 bp, Homo sapien
ctactctttcattctcgaacacagataaaatca

SEQ ID NO: 1019872 - DNA, 33 bp, Homo sapien
ctactctttcattctctaacacagataaaatca

SEQ ID NO: 1019873 - DNA, 33 bp, Homo sapien
tcgaagggaataataccgctttaaaataggtat

SEQ ID NO: 1019874 - DNA, 33 bp, Homo sapien
tcgaagggaataatactgctttaaaataggtat

SEQ ID NO: 1019875 - DNA, 33 bp, Homo sapien
agatgagcaacaaggccgagaagttaggtcact

SEQ ID NO: 1019876 - DNA, 33 bp, Homo sapien
agatgagcaacaaggctgagaagttaggtcact

SEQ ID NO: 1019877 - DNA, 33 bp, Homo sapien
acaatgctgcatgaaaaataaaggctttacatt

SEQ ID NO: 1019878 - DNA, 33 bp, Homo sapien
acaatgctgcatgaaacataaaggctttacatt

SEQ ID NO: 1019879 - DNA, 33 bp, Homo sapien
tcaccctgtcagttacaggcttatcaaatacta

SEQ ID NO: 1019880 - DNA, 33 bp, Homo sapien
tcaccctgtcagttacgggcttatcaaatacta

SEQ ID NO: 1019881 - DNA, 33 bp, Homo sapien
gatgcctttttcaccccgaagaaatcattggct

SEQ ID NO: 1019882 - DNA, 33 bp, Homo sapien
gatgcctttttcaccctgaagaaatcattggct

SEQ ID NO: 1019883 - DNA, 33 bp, Homo sapien
agtttattgtatgccaagaaggatggtgacatg

SEQ ID NO: 1019884 - DNA, 33 bp, Homo sapien
agtttattgtatgccatgaaggatggtgacatg

SEQ ID NO: 1019885 - DNA, 33 bp, Homo sapien
taagagtagtggaaaaagggtaggatcattttg

SEQ ID NO: 1019886 - DNA, 33 bp, Homo sapien
taagagtagtggaaaacgggtaggatcattttg

SEQ ID NO: 1019887 - DNA, 33 bp, Homo sapien
gaggatgaacaggagacacaaatgactgaagtt

SEQ ID NO: 1019888 - DNA, 33 bp, Homo sapien
gaggatgaacaggagatacaaatgactgaagtt

SEQ ID NO: 1019889 - DNA, 33 bp, Homo sapien
aggtaataggaaaaagcctggtgaattctgtaa

SEQ ID NO: 1019890 - DNA, 33 bp, Homo sapien
aggtaataggaaaaaggctggtgaattctgtaa

SEQ ID NO: 1019891 - DNA, 33 bp, Homo sapien
agcaggcggaaatttccatcaagagggatgaaa

SEQ ID NO: 1019892 - DNA, 33 bp, Homo sapien
agcaggcggaaatttctatcaagagggatgaaa

SEQ ID NO: 1019893 - DNA, 33 bp, Homo sapien
aagcctgcaacttggagcgacacttttcctatc

SEQ ID NO: 1019894 - DNA, 33 bp, Homo sapien
aagcctgcaacttggatcgacacttttcctatc

SEQ ID NO: 1019895 - DNA, 33 bp, Homo sapien
ctgttctttggcttcaaaccatactcaggtgtg

SEQ ID NO: 1019896 - DNA, 33 bp, Homo sapien
ctgttctttggcttcagaccatactcaggtgtg

SEQ ID NO: 1019897 - DNA, 33 bp, Homo sapien
tttgcatatagtgtataataaattgttgtaata

SEQ ID NO: 1019898 - DNA, 33 bp, Homo sapien
tttgcatatagtgtatcataaattgttgtaata

SEQ ID NO: 1019899 - DNA, 33 bp, Homo sapien
gagaaatattgccatgcagtaaagatataatat

SEQ ID NO: 1019900 - DNA, 33 bp, Homo sapien
gagaaatattgccatgtagtaaagatataatat

SEQ ID NO: 1019901 - DNA, 33 bp, Homo sapien
gtctttcgggaaatgcactaggaaatgttaaca

SEQ ID NO: 1019902 - DNA, 33 bp, Homo sapien
gtctttcgggaaatgcgctaggaaatgttaaca

SEQ ID NO: 1019903 - DNA, 33 bp, Homo sapien
aagaaacttggcagagacaccaaaacaaaagca

SEQ ID NO: 1019904 - DNA, 33 bp, Homo sapien
aagaaacttggcagaggcaccaaaacaaaagca

SEQ ID NO: 1019905 - DNA, 33 bp, Homo sapien
ctatatataatcccagccagaatcccaacttgg

SEQ ID NO: 1019906 - DNA, 33 bp, Homo sapien
ctatatataatcccagtcagaatcccaacttgg

SEQ ID NO: 1019907 - DNA, 33 bp, Homo sapien
caaagcagttgctcaaatgaaccacaggtatct

SEQ ID NO: 1019908 - DNA, 33 bp, Homo sapien
caaagcagttgctcaagtgaaccacaggtatct

SEQ ID NO: 1019909 - DNA, 33 bp, Homo sapien
cttccttaggaacaacagcaatagcaataacaa

SEQ ID NO: 1019910 - DNA, 33 bp, Homo sapien
cttccttaggaacaacggcaatagcaataacaa

SEQ ID NO: 1019911 - DNA, 33 bp, Homo sapien
cgaggtcacttgggccagaaagcgttcagcacc

SEQ ID NO: 1019912 - DNA, 33 bp, Homo sapien
cgaggtcacttgggccggaaagcgttcagcacc

SEQ ID NO: 1019913 - DNA, 33 bp, Homo sapien
ggaaacagtacaagagccatttgttttttaaaa

SEQ ID NO: 1019914 - DNA, 33 bp, Homo sapien
ggaaacagtacaagaggcatttgttttttaaaa

SEQ ID NO: 1019915 - DNA, 33 bp, Homo sapien
actttctgggaccacacagatgcaagccagtct

SEQ ID NO: 1019916 - DNA, 33 bp, Homo sapien
actttctgggaccacagagatgcaagccagtct

SEQ ID NO: 1019917 - DNA, 33 bp, Homo sapien
ttgactctataccccacgtagagattttccata

SEQ ID NO: 1019918 - DNA, 33 bp, Homo sapien
ttgactctataccccatgtagagattttccata

SEQ ID NO: 1019919 - DNA, 33 bp, Homo sapien
tgtggctttctgcactcagcatactcttggaca

SEQ ID NO: 1019920 - DNA, 33 bp, Homo sapien
tgtggctttctgcacttagcatactcttggaca

SEQ ID NO: 1019921 - DNA, 33 bp, Homo sapien
agtcttggcaaagaccactatggcagcagtgtc

SEQ ID NO: 1019922 - DNA, 33 bp, Homo sapien
agtcttggcaaagaccgctatggcagcagtgtc

SEQ ID NO: 1019923 - DNA, 33 bp, Homo sapien
gacacaagtatttccaatcatgcttattgtgta

SEQ ID NO: 1019924 - DNA, 33 bp, Homo sapien
gacacaagtatttccagtcatgcttattgtgta

SEQ ID NO: 1019925 - DNA, 33 bp, Homo sapien
agaaatagcagctttgcagttttgtgtttcagt

SEQ ID NO: 1019926 - DNA, 33 bp, Homo sapien
agaaatagcagctttgtagttttgtgtttcagt

SEQ ID NO: 1019927 - DNA, 33 bp, Homo sapien
attaacaggaactcaactgtagaaagttttgaa

SEQ ID NO: 1019928 - DNA, 33 bp, Homo sapien
attaacaggaactcaattgtagaaagttttgaa

SEQ ID NO: 1019929 - DNA, 33 bp, Homo sapien
agcactgtcttttaaccatcacatttgattgtc

SEQ ID NO: 1019930 - DNA, 33 bp, Homo sapien
agcactgtcttttaacgatcacatttgattgtc

SEQ ID NO: 1019931 - DNA, 33 bp, Homo sapien
tcttcagttatccaaacttgacctccaaacaga

SEQ ID NO: 1019932 - DNA, 33 bp, Homo sapien
tcttcagttatccaaagttgacctccaaacaga

SEQ ID NO: 1019933 - DNA, 33 bp, Homo sapien
tcttcatcttttggtacgatttttttaggctca

SEQ ID NO: 1019934 - DNA, 33 bp, Homo sapien
tcttcatcttttggtatgatttttttaggctca

SEQ ID NO: 1019935 - DNA, 33 bp, Homo sapien
cagtgaaggccaaagacgcaaagtgctaataga

SEQ ID NO: 1019936 - DNA, 33 bp, Homo sapien
cagtgaaggccaaagatgcaaagtgctaataga

SEQ ID NO: 1019937 - DNA, 33 bp, Homo sapien
acaccagatggatttacagtaaacagaagaaac

SEQ ID NO: 1019938 - DNA, 33 bp, Homo sapien
acaccagatggatttatagtaaacagaagaaac

SEQ ID NO: 1019939 - DNA, 33 bp, Homo sapien
taatgacataaacttagccaagagtccatctta

SEQ ID NO: 1019940 - DNA, 33 bp, Homo sapien
taatgacataaacttatccaagagtccatctta

SEQ ID NO: 1019941 - DNA, 33 bp, Homo sapien
ccaaagcttcaacttacgccaagacaagaaagt

SEQ ID NO: 1019942 - DNA, 33 bp, Homo sapien
ccaaagcttcaacttatgccaagacaagaaagt

SEQ ID NO: 1019943 - DNA, 33 bp, Homo sapien
catacaaagtaactcaatctactggagcagatt

SEQ ID NO: 1019944 - DNA, 33 bp, Homo sapien
catacaaagtaactcattctactggagcagatt

SEQ ID NO: 1019945 - DNA, 33 bp, Homo sapien
tttttcaccttctatcccatacaaagtaactca

SEQ ID NO: 1019946 - DNA, 33 bp, Homo sapien
tttttcaccttctatctcatacaaagtaactca

SEQ ID NO: 1019947 - DNA, 33 bp, Homo sapien
gtctaggctctgccccaaccaatgtgtgtaacc

SEQ ID NO: 1019948 - DNA, 33 bp, Homo sapien
gtctaggctctgcccccaccaatgtgtgtaacc

SEQ ID NO: 1019949 - DNA, 33 bp, Homo sapien
aaagaggtgtctagaaaaaactggattcagacc

SEQ ID NO: 1019950 - DNA, 33 bp, Homo sapien
aaagaggtgtctagaagaaactggattcagacc

SEQ ID NO: 1019951 - DNA, 33 bp, Homo sapien
cactctgttgggttagaaaaccaccgtagaagg

SEQ ID NO: 1019952 - DNA, 33 bp, Homo sapien
cactctgttgggttaggaaaccaccgtagaagg

SEQ ID NO: 1019953 - DNA, 33 bp, Homo sapien
agtctctgtggctagagctaaagttgaaggagg

SEQ ID NO: 1019954 - DNA, 33 bp, Homo sapien
agtctctgtggctagatctaaagttgaaggagg

SEQ ID NO: 1019955 - DNA, 33 bp, Homo sapien
atatgtaaatgatgagacccctttcttgaaggc

SEQ ID NO: 1019956 - DNA, 33 bp, Homo sapien
atatgtaaatgatgagtcccctttcttgaaggc

SEQ ID NO: 1019957 - DNA, 33 bp, Homo sapien
tgctacattctccagaggcgttcttcagcttct

SEQ ID NO: 1019958 - DNA, 33 bp, Homo sapien
tgctacattctccagatgcgttcttcagcttct

SEQ ID NO: 1019959 - DNA, 33 bp, Homo sapien
aaataatcccaagtgactcaaaatggagataat

SEQ ID NO: 1019960 - DNA, 33 bp, Homo sapien
aaataatcccaagtgattcaaaatggagataat

SEQ ID NO: 1019961 - DNA, 33 bp, Homo sapien
aaatctatgtacgtctaaaattgcacagaacct

SEQ ID NO: 1019962 - DNA, 33 bp, Homo sapien
aaatctatgtacgtctgaaattgcacagaacct

SEQ ID NO: 1019963 - DNA, 33 bp, Homo sapien
atgattccatttatacagcattctcgaaaagat

SEQ ID NO: 1019964 - DNA, 33 bp, Homo sapien
atgattccatttatacggcattctcgaaaagat

SEQ ID NO: 1019965 - DNA, 33 bp, Homo sapien
ggccttaccaccattacacacaagctccttaag

SEQ ID NO: 1019966 - DNA, 33 bp, Homo sapien
ggccttaccaccattatacacaagctccttaag

SEQ ID NO: 1019967 - DNA, 33 bp, Homo sapien
tacttaatatctggtacgcttttctagtatgtg

SEQ ID NO: 1019968 - DNA, 33 bp, Homo sapien
tacttaatatctggtatgcttttctagtatgtg

SEQ ID NO: 1019969 - DNA, 33 bp, Homo sapien
tttcttggaaaggagcacataatttctcagttc

SEQ ID NO: 1019970 - DNA, 33 bp, Homo sapien
tttcttggaaaggagcccataatttctcagttc

SEQ ID NO: 1019971 - DNA, 33 bp, Homo sapien
gctactatgggtacgcagagagaaataagagaa

SEQ ID NO: 1019972 - DNA, 33 bp, Homo sapien
gctactatgggtacgcggagagaaataagagaa

SEQ ID NO: 1019973 - DNA, 33 bp, Homo sapien
gcatttcatggagtgaaggccaaaagactggaa

SEQ ID NO: 1019974 - DNA, 33 bp, Homo sapien
gcatttcatggagtgagggccaaaagactggaa

SEQ ID NO: 1019975 - DNA, 33 bp, Homo sapien
ctccaaggaaattctcaagcaatattaagccaa

SEQ ID NO: 1019976 - DNA, 33 bp, Homo sapien
ctccaaggaaattctctagcaatattaagccaa

SEQ ID NO: 1019977 - DNA, 33 bp, Homo sapien
cctgaactaatgaaaacgtacttcaccatcaat

SEQ ID NO: 1019978 - DNA, 33 bp, Homo sapien
cctgaactaatgaaaatgtacttcaccatcaat

SEQ ID NO: 1019979 - DNA, 33 bp, Homo sapien
gtttcaaaacctaatccagagagcctggaaaga

SEQ ID NO: 1019980 - DNA, 33 bp, Homo sapien
gtttcaaaacctaatctagagagcctggaaaga

SEQ ID NO: 1019981 - DNA, 33 bp, Homo sapien
gacaaagtgcttagtccgaaccattcttccagt

SEQ ID NO: 1019982 - DNA, 33 bp, Homo sapien
gacaaagtgcttagtctgaaccattcttccagt

SEQ ID NO: 1019983 - DNA, 33 bp, Homo sapien
ctgtgatttaatttgaaagtctaaggtgaagat

SEQ ID NO: 1019984 - DNA, 33 bp, Homo sapien
ctgtgatttaatttgacagtctaaggtgaagat

SEQ ID NO: 1019985 - DNA, 33 bp, Homo sapien
tattcaaccttatatggattgggattctatggc

SEQ ID NO: 1019986 - DNA, 33 bp, Homo sapien
tattcaaccttatatgtattgggattctatggc

SEQ ID NO: 1019987 - DNA, 33 bp, Homo sapien
ttctaattttagagccaatctgtggacaaagag

SEQ ID NO: 1019988 - DNA, 33 bp, Homo sapien
ttctaattttagagccgatctgtggacaaagag

SEQ ID NO: 1019989 - DNA, 33 bp, Homo sapien
cttcccaaagtcagaaatgaggagcaatgaata

SEQ ID NO: 1019990 - DNA, 33 bp, Homo sapien
cttcccaaagtcagaactgaggagcaatgaata

SEQ ID NO: 1019991 - DNA, 33 bp, Homo sapien
caggagtatgtatgtgaatgtccattgtggctt

SEQ ID NO: 1019992 - DNA, 33 bp, Homo sapien
caggagtatgtatgtgcatgtccattgtggctt

SEQ ID NO: 1019993 - DNA, 33 bp, Homo sapien
gctactactgctcccaactgcaaatagttattg

SEQ ID NO: 1019994 - DNA, 33 bp, Homo sapien
gctactactgctcccagctgcaaatagttattg

SEQ ID NO: 1019995 - DNA, 33 bp, Homo sapien
gcagagcacttgtgagaaattacagtgctaggt

SEQ ID NO: 1019996 - DNA, 33 bp, Homo sapien
gcagagcacttgtgaggaattacagtgctaggt

SEQ ID NO: 1019997 - DNA, 33 bp, Homo sapien
aatttggaaacatctacctaacgtcacagtgac

SEQ ID NO: 1019998 - DNA, 33 bp, Homo sapien
aatttggaaacatctatctaacgtcacagtgac

SEQ ID NO: 1019999 - DNA, 33 bp, Homo sapien
accctcaagtttatgaactgggcttgccaatga

SEQ ID NO: 1020000 - DNA, 33 bp, Homo sapien
accctcaagtttatgatctgggcttgccaatga

SEQ ID NO: 1020001 - DNA, 33 bp, Homo sapien
agcctacgatggccgaaagaaaagctgatgctt

SEQ ID NO: 1020002 - DNA, 33 bp, Homo sapien
agcctacgatggccgagagaaaagctgatgctt

SEQ ID NO: 1020003 - DNA, 33 bp, Homo sapien
ttcaaccacaagatcccattaaaaattgtctgt

SEQ ID NO: 1020004 - DNA, 33 bp, Homo sapien
ttcaaccacaagatcctattaaaaattgtctgt

SEQ ID NO: 1020005 - DNA, 33 bp, Homo sapien
agtgtgatctatagaacgaggaaagcaaaacta

SEQ ID NO: 1020006 - DNA, 33 bp, Homo sapien
agtgtgatctatagaatgaggaaagcaaaacta

SEQ ID NO: 1020007 - DNA, 33 bp, Homo sapien
taatattttatctgagactattgtgcactgtaa

SEQ ID NO: 1020008 - DNA, 33 bp, Homo sapien
taatattttatctgagcctattgtgcactgtaa

SEQ ID NO: 1020009 - DNA, 33 bp, Homo sapien
ttctctcaacctcttacgtctctgttgctaggg

SEQ ID NO: 1020010 - DNA, 33 bp, Homo sapien
ttctctcaacctcttatgtctctgttgctaggg

SEQ ID NO: 1020011 - DNA, 33 bp, Homo sapien
atgaaaggcaatcaagaccattcttctcccaaa

SEQ ID NO: 1020012 - DNA, 33 bp, Homo sapien
atgaaaggcaatcaagcccattcttctcccaaa

SEQ ID NO: 1020013 - DNA, 33 bp, Homo sapien
aaaaaattgtggcaaaattagtggtaccaaggg

SEQ ID NO: 1020014 - DNA, 33 bp, Homo sapien
aaaaaattgtggcaaacttagtggtaccaaggg

SEQ ID NO: 1020015 - DNA, 33 bp, Homo sapien
attgtcacatggttgcaatgtgactgcacatgt

SEQ ID NO: 1020016 - DNA, 33 bp, Homo sapien
attgtcacatggttgctatgtgactgcacatgt

SEQ ID NO: 1020017 - DNA, 33 bp, Homo sapien
tgttaagtgctgcagacgagatttcagaggaaa

SEQ ID NO: 1020018 - DNA, 33 bp, Homo sapien
tgttaagtgctgcagatgagatttcagaggaaa

SEQ ID NO: 1020019 - DNA, 33 bp, Homo sapien
tctcttctctgcctctaacctgatgcaagtatc

SEQ ID NO: 1020020 - DNA, 33 bp, Homo sapien
tctcttctctgcctctgacctgatgcaagtatc

SEQ ID NO: 1020021 - DNA, 33 bp, Homo sapien
agaccaaggacacacaagtagttgaggggcaga

SEQ ID NO: 1020022 - DNA, 33 bp, Homo sapien
agaccaaggacacacaggtagttgaggggcaga

SEQ ID NO: 1020023 - DNA, 33 bp, Homo sapien
cagcacatgactataaccagtagaaacatcagt

SEQ ID NO: 1020024 - DNA, 33 bp, Homo sapien
cagcacatgactataatcagtagaaacatcagt

SEQ ID NO: 1020025 - DNA, 33 bp, Homo sapien
tttaaaatctatcaacaataggcaaggcacggt

SEQ ID NO: 1020026 - DNA, 33 bp, Homo sapien
tttaaaatctatcaacgataggcaaggcacggt

SEQ ID NO: 1020027 - DNA, 33 bp, Homo sapien
tttgtactttaggcttaaacttcccacacgtgt

SEQ ID NO: 1020028 - DNA, 33 bp, Homo sapien
tttgtactttaggcttgaacttcccacacgtgt

SEQ ID NO: 1020029 - DNA, 33 bp, Homo sapien
aaagttgccacaaacactcaacgagcaaattat

SEQ ID NO: 1020030 - DNA, 33 bp, Homo sapien
aaagttgccacaaacagtcaacgagcaaattat

SEQ ID NO: 1020031 - DNA, 33 bp, Homo sapien
ccccaagagagccaaccgatgcccatgtggtca

SEQ ID NO: 1020032 - DNA, 33 bp, Homo sapien
ccccaagagagccaactgatgcccatgtggtca

SEQ ID NO: 1020033 - DNA, 33 bp, Homo sapien
agaagaagccattcctaaagctgggagagagga

SEQ ID NO: 1020034 - DNA, 33 bp, Homo sapien
agaagaagccattcctgaagctgggagagagga

SEQ ID NO: 1020035 - DNA, 33 bp, Homo sapien
tagtattccattgcatcactataccacaattta

SEQ ID NO: 1020036 - DNA, 33 bp, Homo sapien
tagtattccattgcatgactataccacaattta

SEQ ID NO: 1020037 - DNA, 33 bp, Homo sapien
gagaggcgtagctaagcatacatattcaacaga

SEQ ID NO: 1020038 - DNA, 33 bp, Homo sapien
gagaggcgtagctaagtatacatattcaacaga

SEQ ID NO: 1020039 - DNA, 33 bp, Homo sapien
atatgccctttgaaaaagagtggcctgatacct

SEQ ID NO: 1020040 - DNA, 33 bp, Homo sapien
atatgccctttgaaaaggagtggcctgatacct

SEQ ID NO: 1020041 - DNA, 33 bp, Homo sapien
tgtacatctggtataaaaagacatggcagaagc

SEQ ID NO: 1020042 - DNA, 33 bp, Homo sapien
tgtacatctggtataagaagacatggcagaagc

SEQ ID NO: 1020043 - DNA, 33 bp, Homo sapien
ctgtccacacgaatacagcattcccaaagcaac

SEQ ID NO: 1020044 - DNA, 33 bp, Homo sapien
ctgtccacacgaatacggcattcccaaagcaac

SEQ ID NO: 1020045 - DNA, 33 bp, Homo sapien
gatgttttgaagctagacagaggtagtggttgc

SEQ ID NO: 1020046 - DNA, 33 bp, Homo sapien
gatgttttgaagctaggcagaggtagtggttgc

SEQ ID NO: 1020047 - DNA, 33 bp, Homo sapien
agagctttactccagtcaatttcttgggggcag

SEQ ID NO: 1020048 - DNA, 33 bp, Homo sapien
agagctttactccagttaatttcttgggggcag

SEQ ID NO: 1020049 - DNA, 33 bp, Homo sapien
aattcaactgaaatcacgatagggcaacaccaa

SEQ ID NO: 1020050 - DNA, 33 bp, Homo sapien
aattcaactgaaatcatgatagggcaacaccaa

SEQ ID NO: 1020051 - DNA, 33 bp, Homo sapien
caagcaaatgtagacccgaagaagtcaccatag

SEQ ID NO: 1020052 - DNA, 33 bp, Homo sapien
caagcaaatgtagacctgaagaagtcaccatag

SEQ ID NO: 1020053 - DNA, 33 bp, Homo sapien
gtgaaaatgtgtaactcaaacttaatgcataaa

SEQ ID NO: 1020054 - DNA, 33 bp, Homo sapien
gtgaaaatgtgtaactgaaacttaatgcataaa

SEQ ID NO: 1020055 - DNA, 33 bp, Homo sapien
taatggcgtttagcaacggagagggtataacaa

SEQ ID NO: 1020056 - DNA, 33 bp, Homo sapien
taatggcgtttagcaatggagagggtataacaa

SEQ ID NO: 1020057 - DNA, 33 bp, Homo sapien
tctagataatccgttgcatgtcttttcctcagc

SEQ ID NO: 1020058 - DNA, 33 bp, Homo sapien
tctagataatccgttgtatgtcttttcctcagc

SEQ ID NO: 1020059 - DNA, 33 bp, Homo sapien
cagcttctggtttcacaggtaatctttggcgat

SEQ ID NO: 1020060 - DNA, 33 bp, Homo sapien
cagcttctggtttcacgggtaatctttggcgat

SEQ ID NO: 1020061 - DNA, 33 bp, Homo sapien
gtgctcaatgatttataagtaactgcattcgtc

SEQ ID NO: 1020062 - DNA, 33 bp, Homo sapien
gtgctcaatgatttatgagtaactgcattcgtc

SEQ ID NO: 1020063 - DNA, 33 bp, Homo sapien
catcctataaacaaacacatgaatatatcccag

SEQ ID NO: 1020064 - DNA, 33 bp, Homo sapien
catcctataaacaaacgcatgaatatatcccag

SEQ ID NO: 1020065 - DNA, 33 bp, Homo sapien
gacctcactcactagaaatggtccccaatgtat

SEQ ID NO: 1020066 - DNA, 33 bp, Homo sapien
gacctcactcactagacatggtccccaatgtat

SEQ ID NO: 1020067 - DNA, 33 bp, Homo sapien
tcacccagtatgattaccacgatgcaaaaatga

SEQ ID NO: 1020068 - DNA, 33 bp, Homo sapien
tcacccagtatgattatcacgatgcaaaaatga

SEQ ID NO: 1020069 - DNA, 33 bp, Homo sapien
gtagcatcctacatacacttttattactttgtt

SEQ ID NO: 1020070 - DNA, 33 bp, Homo sapien
gtagcatcctacatacgcttttattactttgtt

SEQ ID NO: 1020071 - DNA, 33 bp, Homo sapien
ataccctagtttctgacaaattattgttcatct

SEQ ID NO: 1020072 - DNA, 33 bp, Homo sapien
ataccctagtttctgagaaattattgttcatct

SEQ ID NO: 1020073 - DNA, 33 bp, Homo sapien
gactgagtggtcacccagatggtaggtgttgta

SEQ ID NO: 1020074 - DNA, 33 bp, Homo sapien
gactgagtggtcacccggatggtaggtgttgta

SEQ ID NO: 1020075 - DNA, 33 bp, Homo sapien
actcatcctggttttacgttaattatcagtgac

SEQ ID NO: 1020076 - DNA, 33 bp, Homo sapien
actcatcctggttttaggttaattatcagtgac

SEQ ID NO: 1020077 - DNA, 33 bp, Homo sapien
ggaagtgtttttgacaatccacgttgtgaaggt

SEQ ID NO: 1020078 - DNA, 33 bp, Homo sapien
ggaagtgtttttgacagtccacgttgtgaaggt

SEQ ID NO: 1020079 - DNA, 33 bp, Homo sapien
tgctttgcatctttgaaccataataaatcatag

SEQ ID NO: 1020080 - DNA, 33 bp, Homo sapien
tgctttgcatctttgagccataataaatcatag

SEQ ID NO: 1020081 - DNA, 33 bp, Homo sapien
ctcacactgtccttaaactgtacaaccatgtgg

SEQ ID NO: 1020082 - DNA, 33 bp, Homo sapien
ctcacactgtccttaagctgtacaaccatgtgg

SEQ ID NO: 1020083 - DNA, 33 bp, Homo sapien
gttatcctttgaaagacccacttacaaggtggc

SEQ ID NO: 1020084 - DNA, 33 bp, Homo sapien
gttatcctttgaaagatccacttacaaggtggc

SEQ ID NO: 1020085 - DNA, 33 bp, Homo sapien
acataggagagcatgaacaatcctgtccgaggg

SEQ ID NO: 1020086 - DNA, 33 bp, Homo sapien
acataggagagcatgagcaatcctgtccgaggg

SEQ ID NO: 1020087 - DNA, 33 bp, Homo sapien
tatactttatagcaaaccagctgggaaaagaaa

SEQ ID NO: 1020088 - DNA, 33 bp, Homo sapien
tatactttatagcaaatcagctgggaaaagaaa

SEQ ID NO: 1020089 - DNA, 33 bp, Homo sapien
cattggatcagaggacaaacaagatcttccttg

SEQ ID NO: 1020090 - DNA, 33 bp, Homo sapien
cattggatcagaggacgaacaagatcttccttg

SEQ ID NO: 1020091 - DNA, 33 bp, Homo sapien
actgtatgggggtgcaataacagcggtggtggt

SEQ ID NO: 1020092 - DNA, 33 bp, Homo sapien
actgtatgggggtgcagtaacagcggtggtggt

SEQ ID NO: 1020093 - DNA, 33 bp, Homo sapien
ataatatagagcataccgtaaagtttccaaaga

SEQ ID NO: 1020094 - DNA, 33 bp, Homo sapien
ataatatagagcatactgtaaagtttccaaaga

SEQ ID NO: 1020095 - DNA, 33 bp, Homo sapien
ataccctatataactacggtactaaacacacga

SEQ ID NO: 1020096 - DNA, 33 bp, Homo sapien
ataccctatataactatggtactaaacacacga

SEQ ID NO: 1020097 - DNA, 33 bp, Homo sapien
agctctacaatgggaacaggagtaagtaatgta

SEQ ID NO: 1020098 - DNA, 33 bp, Homo sapien
agctctacaatgggaataggagtaagtaatgta

SEQ ID NO: 1020099 - DNA, 33 bp, Homo sapien
tttacctctgaagtcaaataaacctgggtgtga

SEQ ID NO: 1020100 - DNA, 33 bp, Homo sapien
tttacctctgaagtcagataaacctgggtgtga

SEQ ID NO: 1020101 - DNA, 33 bp, Homo sapien
tattagttgccttcagaacaaagaaaaggcgag

SEQ ID NO: 1020102 - DNA, 33 bp, Homo sapien
tattagttgccttcaggacaaagaaaaggcgag

SEQ ID NO: 1020103 - DNA, 33 bp, Homo sapien
agctgtatacataatcacttaatacctccctgt

SEQ ID NO: 1020104 - DNA, 33 bp, Homo sapien
agctgtatacataatcgcttaatacctccctgt

SEQ ID NO: 1020105 - DNA, 33 bp, Homo sapien
accacctaacacggagaaaatctgcatttgcaa

SEQ ID NO: 1020106 - DNA, 33 bp, Homo sapien
accacctaacacggaggaaatctgcatttgcaa

SEQ ID NO: 1020107 - DNA, 33 bp, Homo sapien
aaacttcagagtaacaataaagtgctggtgtgg

SEQ ID NO: 1020108 - DNA, 33 bp, Homo sapien
aaacttcagagtaacagtaaagtgctggtgtgg

SEQ ID NO: 1020109 - DNA, 33 bp, Homo sapien
cttggacctactgataaaaatatgcattctaac

SEQ ID NO: 1020110 - DNA, 33 bp, Homo sapien
cttggacctactgatacaaatatgcattctaac

SEQ ID NO: 1020111 - DNA, 33 bp, Homo sapien
acatacggagtcctgaacttcaaacacatgcct

SEQ ID NO: 1020112 - DNA, 33 bp, Homo sapien
acatacggagtcctgagcttcaaacacatgcct

SEQ ID NO: 1020113 - DNA, 33 bp, Homo sapien
ttgaggtcatacaagtaaaaagtggcagaggac

SEQ ID NO: 1020114 - DNA, 33 bp, Homo sapien
ttgaggtcatacaagttaaaagtggcagaggac

SEQ ID NO: 1020115 - DNA, 33 bp, Homo sapien
acttgtatgacctcaaccaacttactttacttc

SEQ ID NO: 1020116 - DNA, 33 bp, Homo sapien
acttgtatgacctcaatcaacttactttacttc

SEQ ID NO: 1020117 - DNA, 33 bp, Homo sapien
aaagccactggttgcacacttttattgtatggt

SEQ ID NO: 1020118 - DNA, 33 bp, Homo sapien
aaagccactggttgcatacttttattgtatggt

SEQ ID NO: 1020119 - DNA, 33 bp, Homo sapien
acacttcacaatggacacagcttgcttatgacc

SEQ ID NO: 1020120 - DNA, 33 bp, Homo sapien
acacttcacaatggacgcagcttgcttatgacc

SEQ ID NO: 1020121 - DNA, 33 bp, Homo sapien
gggcattcagggaaaaattgtatatttagtact

SEQ ID NO: 1020122 - DNA, 33 bp, Homo sapien
gggcattcagggaaaatttgtatatttagtact

SEQ ID NO: 1020123 - DNA, 33 bp, Homo sapien
atagtttctagcagcactaattcttttttttaa

SEQ ID NO: 1020124 - DNA, 33 bp, Homo sapien
atagtttctagcagcagtaattcttttttttaa

SEQ ID NO: 1020125 - DNA, 33 bp, Homo sapien
gttcatgcatactacccagaagtcagaggtgtc

SEQ ID NO: 1020126 - DNA, 33 bp, Homo sapien
gttcatgcatactaccgagaagtcagaggtgtc

SEQ ID NO: 1020127 - DNA, 33 bp, Homo sapien
tgagtgctggaaatacagacgtgagccactgca

SEQ ID NO: 1020128 - DNA, 33 bp, Homo sapien
tgagtgctggaaatacggacgtgagccactgca

SEQ ID NO: 1020129 - DNA, 33 bp, Homo sapien
cagcatcagacaatacacatatataacaaacct

SEQ ID NO: 1020130 - DNA, 33 bp, Homo sapien
cagcatcagacaatacccatatataacaaacct

SEQ ID NO: 1020131 - DNA, 33 bp, Homo sapien
tgtagaggctggaaaagattgatagtgcagact

SEQ ID NO: 1020132 - DNA, 33 bp, Homo sapien
tgtagaggctggaaaatattgatagtgcagact

SEQ ID NO: 1020133 - DNA, 33 bp, Homo sapien
agtaagtagaaatgaactgtcatgtctgtaact

SEQ ID NO: 1020134 - DNA, 33 bp, Homo sapien
agtaagtagaaatgaattgtcatgtctgtaact

SEQ ID NO: 1020135 - DNA, 33 bp, Homo sapien
acaaaggttattcataccacaacagtgcttttc

SEQ ID NO: 1020136 - DNA, 33 bp, Homo sapien
acaaaggttattcatatcacaacagtgcttttc

SEQ ID NO: 1020137 - DNA, 33 bp, Homo sapien
ccagataccaagaggaacccccaggtgagccat

SEQ ID NO: 1020138 - DNA, 33 bp, Homo sapien
ccagataccaagaggaccccccaggtgagccat

SEQ ID NO: 1020139 - DNA, 33 bp, Homo sapien
ttagtgagtttacatacgacatgtgcaaaggcc

SEQ ID NO: 1020140 - DNA, 33 bp, Homo sapien
ttagtgagtttacatatgacatgtgcaaaggcc

SEQ ID NO: 1020141 - DNA, 33 bp, Homo sapien
ggtgtagttccagtacaaagtcagggaaaagag

SEQ ID NO: 1020142 - DNA, 33 bp, Homo sapien
ggtgtagttccagtaccaagtcagggaaaagag

SEQ ID NO: 1020143 - DNA, 33 bp, Homo sapien
taagcagtcttttaaaactttatgttgcagctg

SEQ ID NO: 1020144 - DNA, 33 bp, Homo sapien
taagcagtcttttaaagctttatgttgcagctg

SEQ ID NO: 1020145 - DNA, 33 bp, Homo sapien
taccataataggaatacagaagtccgtggaatc

SEQ ID NO: 1020146 - DNA, 33 bp, Homo sapien
taccataataggaatagagaagtccgtggaatc

SEQ ID NO: 1020147 - DNA, 33 bp, Homo sapien
taaccgccatgggcgcagactatctgagttgcg

SEQ ID NO: 1020148 - DNA, 33 bp, Homo sapien
taaccgccatgggcgcggactatctgagttgcg

SEQ ID NO: 1020149 - DNA, 33 bp, Homo sapien
aacccagtcccacaaacagagccctcagttctg

SEQ ID NO: 1020150 - DNA, 33 bp, Homo sapien
aacccagtcccacaaatagagccctcagttctg

SEQ ID NO: 1020151 - DNA, 33 bp, Homo sapien
atatagacagtccaaaattatggaaaatattac

SEQ ID NO: 1020152 - DNA, 33 bp, Homo sapien
atatagacagtccaaatttatggaaaatattac

SEQ ID NO: 1020153 - DNA, 33 bp, Homo sapien
agtcagaatataaaaaccacgaatgaagtccct

SEQ ID NO: 1020154 - DNA, 33 bp, Homo sapien
agtcagaatataaaaatcacgaatgaagtccct

SEQ ID NO: 1020155 - DNA, 33 bp, Homo sapien
taataataacagctaacgctcattgagtactat

SEQ ID NO: 1020156 - DNA, 33 bp, Homo sapien
taataataacagctaatgctcattgagtactat

SEQ ID NO: 1020157 - DNA, 33 bp, Homo sapien
ttaatgaagccctggcgaagagcaaagttcctc

SEQ ID NO: 1020158 - DNA, 33 bp, Homo sapien
ttaatgaagccctggctaagagcaaagttcctc

SEQ ID NO: 1020159 - DNA, 33 bp, Homo sapien
gtctggcaaacttagacccagggtcccaagctg

SEQ ID NO: 1020160 - DNA, 33 bp, Homo sapien
gtctggcaaacttagatccagggtcccaagctg

SEQ ID NO: 1020161 - DNA, 33 bp, Homo sapien
tctatttcacctttgcaagtctttcctcagatg

SEQ ID NO: 1020162 - DNA, 33 bp, Homo sapien
tctatttcacctttgcgagtctttcctcagatg

SEQ ID NO: 1020163 - DNA, 33 bp, Homo sapien
tctcctctgtaggagactattggctgacattct

SEQ ID NO: 1020164 - DNA, 33 bp, Homo sapien
tctcctctgtaggagattattggctgacattct

SEQ ID NO: 1020165 - DNA, 33 bp, Homo sapien
tgatgctaactcctgcaaagtgtagctacaaac

SEQ ID NO: 1020166 - DNA, 33 bp, Homo sapien
tgatgctaactcctgcgaagtgtagctacaaac

SEQ ID NO: 1020167 - DNA, 33 bp, Homo sapien
ggtgataaagcacagacgtatggactgattcaa

SEQ ID NO: 1020168 - DNA, 33 bp, Homo sapien
ggtgataaagcacagaggtatggactgattcaa

SEQ ID NO: 1020169 - DNA, 33 bp, Homo sapien
atgtgtattttccttacgaaagttctccagcat

SEQ ID NO: 1020170 - DNA, 33 bp, Homo sapien
atgtgtattttccttatgaaagttctccagcat

SEQ ID NO: 1020171 - DNA, 33 bp, Homo sapien
gaatttaggagatccaatatcttatgaatagga

SEQ ID NO: 1020172 - DNA, 33 bp, Homo sapien
gaatttaggagatccagtatcttatgaatagga

SEQ ID NO: 1020173 - DNA, 33 bp, Homo sapien
ttgggggcgaccatgaccttgtctttgtgttta

SEQ ID NO: 1020174 - DNA, 33 bp, Homo sapien
ttgggggcgaccatgatcttgtctttgtgttta

SEQ ID NO: 1020175 - DNA, 33 bp, Homo sapien
acgattgctggtgaacagaaaattatacaatgt

SEQ ID NO: 1020176 - DNA, 33 bp, Homo sapien
acgattgctggtgaacggaaaattatacaatgt

SEQ ID NO: 1020177 - DNA, 33 bp, Homo sapien
gtgaaaatcagcaggacggactggaagaaccag

SEQ ID NO: 1020178 - DNA, 33 bp, Homo sapien
gtgaaaatcagcaggatggactggaagaaccag

SEQ ID NO: 1020179 - DNA, 33 bp, Homo sapien
agtttgccatcttgtacaggtgtggttcatggt

SEQ ID NO: 1020180 - DNA, 33 bp, Homo sapien
agtttgccatcttgtataggtgtggttcatggt

SEQ ID NO: 1020181 - DNA, 33 bp, Homo sapien
acatttatgcagtatacgatgaacccacatata

SEQ ID NO: 1020182 - DNA, 33 bp, Homo sapien
acatttatgcagtatatgatgaacccacatata

SEQ ID NO: 1020183 - DNA, 33 bp, Homo sapien
cactagctgagagtaaacattctgcagcatcag

SEQ ID NO: 1020184 - DNA, 33 bp, Homo sapien
cactagctgagagtaatcattctgcagcatcag

SEQ ID NO: 1020185 - DNA, 33 bp, Homo sapien
gcatttgagcaatttgaacaagtataatgtgct

SEQ ID NO: 1020186 - DNA, 33 bp, Homo sapien
gcatttgagcaatttggacaagtataatgtgct

SEQ ID NO: 1020187 - DNA, 33 bp, Homo sapien
aacaatagggtaaaaactgatgatgatacagaa

SEQ ID NO: 1020188 - DNA, 33 bp, Homo sapien
aacaatagggtaaaaattgatgatgatacagaa

SEQ ID NO: 1020189 - DNA, 33 bp, Homo sapien
tccttctcctttcatgaagttgtcatccccatc

SEQ ID NO: 1020190 - DNA, 33 bp, Homo sapien
tccttctcctttcatgcagttgtcatccccatc

SEQ ID NO: 1020191 - DNA, 33 bp, Homo sapien
tcaaggatacattgcaaaatccaagatccaaag

SEQ ID NO: 1020192 - DNA, 33 bp, Homo sapien
tcaaggatacattgcacaatccaagatccaaag

SEQ ID NO: 1020193 - DNA, 33 bp, Homo sapien
tttaggaatagacaaaataatctatactgatag

SEQ ID NO: 1020194 - DNA, 33 bp, Homo sapien
tttaggaatagacaaagtaatctatactgatag

SEQ ID NO: 1020195 - DNA, 33 bp, Homo sapien
acttttccatagtaacagtgattgtgttattgg

SEQ ID NO: 1020196 - DNA, 33 bp, Homo sapien
acttttccatagtaacggtgattgtgttattgg

SEQ ID NO: 1020197 - DNA, 33 bp, Homo sapien
agagttggctggtaaacaagttcacatatgaac

SEQ ID NO: 1020198 - DNA, 33 bp, Homo sapien
agagttggctggtaaataagttcacatatgaac

SEQ ID NO: 1020199 - DNA, 33 bp, Homo sapien
tcagatgtccacaatcaatcagtctctgactgt

SEQ ID NO: 1020200 - DNA, 33 bp, Homo sapien
tcagatgtccacaatccatcagtctctgactgt

SEQ ID NO: 1020201 - DNA, 33 bp, Homo sapien
aagcaacaactataataagccaaaggtattaaa

SEQ ID NO: 1020202 - DNA, 33 bp, Homo sapien
aagcaacaactataatgagccaaaggtattaaa

SEQ ID NO: 1020203 - DNA, 33 bp, Homo sapien
ctgcatcgtaagtctacgcaagggcatcatggc

SEQ ID NO: 1020204 - DNA, 33 bp, Homo sapien
ctgcatcgtaagtctatgcaagggcatcatggc

SEQ ID NO: 1020205 - DNA, 33 bp, Homo sapien
gctcaagggaagagaacccagtttttctgggat

SEQ ID NO: 1020206 - DNA, 33 bp, Homo sapien
gctcaagggaagagaatccagtttttctgggat

SEQ ID NO: 1020207 - DNA, 33 bp, Homo sapien
gctcgtatgagacaaaccaaatttgtttaccac

SEQ ID NO: 1020208 - DNA, 33 bp, Homo sapien
gctcgtatgagacaaagcaaatttgtttaccac

SEQ ID NO: 1020209 - DNA, 33 bp, Homo sapien
caacacagtacaaaagcctttgccagaagctgt

SEQ ID NO: 1020210 - DNA, 33 bp, Homo sapien
caacacagtacaaaagtctttgccagaagctgt

SEQ ID NO: 1020211 - DNA, 33 bp, Homo sapien
taggtgtagacaagtacgtttggacaaagaagt

SEQ ID NO: 1020212 - DNA, 33 bp, Homo sapien
taggtgtagacaagtatgtttggacaaagaagt

SEQ ID NO: 1020213 - DNA, 33 bp, Homo sapien
tccctgaacacacaccaagaacactcctgcctc

SEQ ID NO: 1020214 - DNA, 33 bp, Homo sapien
tccctgaacacacaccgagaacactcctgcctc

SEQ ID NO: 1020215 - DNA, 33 bp, Homo sapien
ctaggatgggtgggaaagtttatgctgtgaagt

SEQ ID NO: 1020216 - DNA, 33 bp, Homo sapien
ctaggatgggtgggaaggtttatgctgtgaagt

SEQ ID NO: 1020217 - DNA, 33 bp, Homo sapien
atgcactgtgggtccccgcaacaccaggggctg

SEQ ID NO: 1020218 - DNA, 33 bp, Homo sapien
atgcactgtgggtcccggcaacaccaggggctg

SEQ ID NO: 1020219 - DNA, 33 bp, Homo sapien
agtgcattttggctgacgcttcctatctgccct

SEQ ID NO: 1020220 - DNA, 33 bp, Homo sapien
agtgcattttggctgatgcttcctatctgccct

SEQ ID NO: 1020221 - DNA, 33 bp, Homo sapien
gccgctgaattgggaaactctgaaggagtctct

SEQ ID NO: 1020222 - DNA, 33 bp, Homo sapien
gccgctgaattgggaagctctgaaggagtctct

SEQ ID NO: 1020223 - DNA, 33 bp, Homo sapien
ttttccaaagtcatgaagtttcctcctggtgaa

SEQ ID NO: 1020224 - DNA, 33 bp, Homo sapien
ttttccaaagtcatgacgtttcctcctggtgaa

SEQ ID NO: 1020225 - DNA, 33 bp, Homo sapien
atgtcaaaagttacggaatgggctttactgtcc

SEQ ID NO: 1020226 - DNA, 33 bp, Homo sapien
atgtcaaaagttacggcatgggctttactgtcc

SEQ ID NO: 1020227 - DNA, 33 bp, Homo sapien
ctctctgtacttggagaaaatgcttctccccca

SEQ ID NO: 1020228 - DNA, 33 bp, Homo sapien
ctctctgtacttggaggaaatgcttctccccca

SEQ ID NO: 1020229 - DNA, 33 bp, Homo sapien
cataccatcaccaacaccgtaaatatgatgcgc

SEQ ID NO: 1020230 - DNA, 33 bp, Homo sapien
cataccatcaccaacagcgtaaatatgatgcgc

SEQ ID NO: 1020231 - DNA, 33 bp, Homo sapien
ctggacacgtgactaacgtaagaatcagcttgg

SEQ ID NO: 1020232 - DNA, 33 bp, Homo sapien
ctggacacgtgactaatgtaagaatcagcttgg

SEQ ID NO: 1020233 - DNA, 33 bp, Homo sapien
tgatgcaaataatttacgatgattcaagagaga

SEQ ID NO: 1020234 - DNA, 33 bp, Homo sapien
tgatgcaaataatttatgatgattcaagagaga

SEQ ID NO: 1020235 - DNA, 33 bp, Homo sapien
gatcttagactcaaagaatgatagctgggagcc

SEQ ID NO: 1020236 - DNA, 33 bp, Homo sapien
gatcttagactcaaaggatgatagctgggagcc

SEQ ID NO: 1020237 - DNA, 33 bp, Homo sapien
ctggatgacatggcttgaacaggtgaactgcac

SEQ ID NO: 1020238 - DNA, 33 bp, Homo sapien
ctggatgacatggctttaacaggtgaactgcac

SEQ ID NO: 1020239 - DNA, 33 bp, Homo sapien
aagggctgaacccggacgtctatctaggacaca

SEQ ID NO: 1020240 - DNA, 33 bp, Homo sapien
aagggctgaacccggatgtctatctaggacaca

SEQ ID NO: 1020241 - DNA, 33 bp, Homo sapien
ttgaaaagtatagtgcaattccagggaacacag

SEQ ID NO: 1020242 - DNA, 33 bp, Homo sapien
ttgaaaagtatagtgcgattccagggaacacag

SEQ ID NO: 1020243 - DNA, 33 bp, Homo sapien
ttctttaaaaattacacagttttgccaaatcca

SEQ ID NO: 1020244 - DNA, 33 bp, Homo sapien
ttctttaaaaattacagagttttgccaaatcca

SEQ ID NO: 1020245 - DNA, 33 bp, Homo sapien
ggtttatccagctttacctcttttctcacacca

SEQ ID NO: 1020246 - DNA, 33 bp, Homo sapien
ggtttatccagctttatctcttttctcacacca

SEQ ID NO: 1020247 - DNA, 33 bp, Homo sapien
aagtagaaagttatcacggcattgtaggggcat

SEQ ID NO: 1020248 - DNA, 33 bp, Homo sapien
aagtagaaagttatcatggcattgtaggggcat

SEQ ID NO: 1020249 - DNA, 33 bp, Homo sapien
aaactcccccagcagcacaaaggcggttgagat

SEQ ID NO: 1020250 - DNA, 33 bp, Homo sapien
aaactcccccagcagcgcaaaggcggttgagat

SEQ ID NO: 1020251 - DNA, 33 bp, Homo sapien
gtcactctccatccccaaagtccgagagtatca

SEQ ID NO: 1020252 - DNA, 33 bp, Homo sapien
gtcactctccatccccgaagtccgagagtatca

SEQ ID NO: 1020253 - DNA, 33 bp, Homo sapien
accttgtcaaccattccgaactcctgggctgca

SEQ ID NO: 1020254 - DNA, 33 bp, Homo sapien
accttgtcaaccattctgaactcctgggctgca

SEQ ID NO: 1020255 - DNA, 33 bp, Homo sapien
ggatgccattttttgtcaaggattcttgttaag

SEQ ID NO: 1020256 - DNA, 33 bp, Homo sapien
ggatgccattttttgtgaaggattcttgttaag

SEQ ID NO: 1020257 - DNA, 33 bp, Homo sapien
agcctcttatcctgtcgaccttgctgttgtgtt

SEQ ID NO: 1020258 - DNA, 33 bp, Homo sapien
agcctcttatcctgtctaccttgctgttgtgtt

SEQ ID NO: 1020259 - DNA, 33 bp, Homo sapien
tgggcagtttattgagcatacacttattcagca

SEQ ID NO: 1020260 - DNA, 33 bp, Homo sapien
tgggcagtttattgagtatacacttattcagca

SEQ ID NO: 1020261 - DNA, 33 bp, Homo sapien
tatcattatattctcagtagaccattaaagagg

SEQ ID NO: 1020262 - DNA, 33 bp, Homo sapien
tatcattatattctcattagaccattaaagagg

SEQ ID NO: 1020263 - DNA, 33 bp, Homo sapien
cacatggacaagaacagcatacccaagttgcct

SEQ ID NO: 1020264 - DNA, 33 bp, Homo sapien
cacatggacaagaacatcatacccaagttgcct

SEQ ID NO: 1020265 - DNA, 33 bp, Homo sapien
aaagacaacagataaaccttcattaaatctaca

SEQ ID NO: 1020266 - DNA, 33 bp, Homo sapien
aaagacaacagataaatcttcattaaatctaca

SEQ ID NO: 1020267 - DNA, 33 bp, Homo sapien
ttagatttgtaccttaagaacccaatgtagatt

SEQ ID NO: 1020268 - DNA, 33 bp, Homo sapien
ttagatttgtaccttacgaacccaatgtagatt

SEQ ID NO: 1020269 - DNA, 33 bp, Homo sapien
ttactgtttttcttacactgaccacacacaact

SEQ ID NO: 1020270 - DNA, 33 bp, Homo sapien
ttactgtttttcttacgctgaccacacacaact

SEQ ID NO: 1020271 - DNA, 33 bp, Homo sapien
atgatacctggtgataagtgcaaaatagaaata

SEQ ID NO: 1020272 - DNA, 33 bp, Homo sapien
atgatacctggtgataggtgcaaaatagaaata

SEQ ID NO: 1020273 - DNA, 33 bp, Homo sapien
actttggccactcctacattggaagtgatttcg

SEQ ID NO: 1020274 - DNA, 33 bp, Homo sapien
actttggccactcctatattggaagtgatttcg

SEQ ID NO: 1020275 - DNA, 33 bp, Homo sapien
cacagatgagtaacacaaaccactgatccagac

SEQ ID NO: 1020276 - DNA, 33 bp, Homo sapien
cacagatgagtaacacgaaccactgatccagac

SEQ ID NO: 1020277 - DNA, 33 bp, Homo sapien
tgctgacttggaagacaggagaaaggaacataa

SEQ ID NO: 1020278 - DNA, 33 bp, Homo sapien
tgctgacttggaagacgggagaaaggaacataa

SEQ ID NO: 1020279 - DNA, 33 bp, Homo sapien
ttaacagggcatagaagtctgggtcgacggtta

SEQ ID NO: 1020280 - DNA, 33 bp, Homo sapien
ttaacagggcatagaattctgggtcgacggtta

SEQ ID NO: 1020281 - DNA, 33 bp, Homo sapien
aacatacatctttccaatgagacaatctccccc

SEQ ID NO: 1020282 - DNA, 33 bp, Homo sapien
aacatacatctttccattgagacaatctccccc

SEQ ID NO: 1020283 - DNA, 33 bp, Homo sapien
gagagttttaggagagcagatcagacaggaagc

SEQ ID NO: 1020284 - DNA, 33 bp, Homo sapien
gagagttttaggagaggagatcagacaggaagc

SEQ ID NO: 1020285 - DNA, 33 bp, Homo sapien
aagcttcttagatcccggattaatattctctga

SEQ ID NO: 1020286 - DNA, 33 bp, Homo sapien
aagcttcttagatccctgattaatattctctga

SEQ ID NO: 1020287 - DNA, 33 bp, Homo sapien
aacatggtaagtgccacatacaaacatgaacag

SEQ ID NO: 1020288 - DNA, 33 bp, Homo sapien
aacatggtaagtgccatatacaaacatgaacag

SEQ ID NO: 1020289 - DNA, 33 bp, Homo sapien
ccccacggcgattgatcaccaaagcctatgatt

SEQ ID NO: 1020290 - DNA, 33 bp, Homo sapien
ccccacggcgattgattaccaaagcctatgatt

SEQ ID NO: 1020291 - DNA, 33 bp, Homo sapien
atattcatctatgtgagagtaaaatgatgctgt

SEQ ID NO: 1020292 - DNA, 33 bp, Homo sapien
atattcatctatgtgatagtaaaatgatgctgt

SEQ ID NO: 1020293 - DNA, 33 bp, Homo sapien
gggcattgtcagtgggaaatattcttcctgaag

SEQ ID NO: 1020294 - DNA, 33 bp, Homo sapien
gggcattgtcagtggggaatattcttcctgaag

SEQ ID NO: 1020295 - DNA, 33 bp, Homo sapien
atctagtactgaaccacaaaattacctgtcagc

SEQ ID NO: 1020296 - DNA, 33 bp, Homo sapien
atctagtactgaaccataaaattacctgtcagc

SEQ ID NO: 1020297 - DNA, 33 bp, Homo sapien
tggaaagtagttcagaactctttgggcagtcaa

SEQ ID NO: 1020298 - DNA, 33 bp, Homo sapien
tggaaagtagttcagatctctttgggcagtcaa

SEQ ID NO: 1020299 - DNA, 33 bp, Homo sapien
tatttgtgggttcatacatgatttttcagatgt

SEQ ID NO: 1020300 - DNA, 33 bp, Homo sapien
tatttgtgggttcatagatgatttttcagatgt

SEQ ID NO: 1020301 - DNA, 33 bp, Homo sapien
tagattgagcaacttcaaacatctgaaaaatca

SEQ ID NO: 1020302 - DNA, 33 bp, Homo sapien
tagattgagcaacttcgaacatctgaaaaatca

SEQ ID NO: 1020303 - DNA, 33 bp, Homo sapien
ccacagtgaggctaaacaccctggatctcttgg

SEQ ID NO: 1020304 - DNA, 33 bp, Homo sapien
ccacagtgaggctaaataccctggatctcttgg

SEQ ID NO: 1020305 - DNA, 33 bp, Homo sapien
cacaaatgttagcttacgttgtcatttggtctt

SEQ ID NO: 1020306 - DNA, 33 bp, Homo sapien
cacaaatgttagcttatgttgtcatttggtctt

SEQ ID NO: 1020307 - DNA, 33 bp, Homo sapien
caaattaatggctttacaaatcacaacagcttc

SEQ ID NO: 1020308 - DNA, 33 bp, Homo sapien
caaattaatggctttagaaatcacaacagcttc

SEQ ID NO: 1020309 - DNA, 33 bp, Homo sapien
ttctccacctatagatcagactagatcctgaat

SEQ ID NO: 1020310 - DNA, 33 bp, Homo sapien
ttctccacctatagattagactagatcctgaat

SEQ ID NO: 1020311 - DNA, 33 bp, Homo sapien
agtgactgtagcaacaaccctaaggcaactgtt

SEQ ID NO: 1020312 - DNA, 33 bp, Homo sapien
agtgactgtagcaacatccctaaggcaactgtt

SEQ ID NO: 1020313 - DNA, 33 bp, Homo sapien
ctggtcccacatcagaaggaagtgattggtgac

SEQ ID NO: 1020314 - DNA, 33 bp, Homo sapien
ctggtcccacatcagagggaagtgattggtgac

SEQ ID NO: 1020315 - DNA, 33 bp, Homo sapien
ccaagatctttctccaaaagcattgctgatcag

SEQ ID NO: 1020316 - DNA, 33 bp, Homo sapien
ccaagatctttctccagaagcattgctgatcag

SEQ ID NO: 1020317 - DNA, 33 bp, Homo sapien
aactttcacattccccccttttgaccaagatct

SEQ ID NO: 1020318 - DNA, 33 bp, Homo sapien
aactttcacattccccgcttttgaccaagatct

SEQ ID NO: 1020319 - DNA, 33 bp, Homo sapien
aatcaaaatggagtcacattttaagatgtttaa

SEQ ID NO: 1020320 - DNA, 33 bp, Homo sapien
aatcaaaatggagtcatattttaagatgtttaa

SEQ ID NO: 1020321 - DNA, 33 bp, Homo sapien
gtgtgtgtaaggttacaatggcccttgtgcaag

SEQ ID NO: 1020322 - DNA, 33 bp, Homo sapien
gtgtgtgtaaggttacgatggcccttgtgcaag

SEQ ID NO: 1020323 - DNA, 33 bp, Homo sapien
aattaaatactgaactaaaaacagtcttccctt

SEQ ID NO: 1020324 - DNA, 33 bp, Homo sapien
aattaaatactgaactgaaaacagtcttccctt

SEQ ID NO: 1020325 - DNA, 33 bp, Homo sapien
catgctacagttaatacaaggcagagcccaggt

SEQ ID NO: 1020326 - DNA, 33 bp, Homo sapien
catgctacagttaatataaggcagagcccaggt

SEQ ID NO: 1020327 - DNA, 33 bp, Homo sapien
taacttgctcatagacccacagttaataagtga

SEQ ID NO: 1020328 - DNA, 33 bp, Homo sapien
taacttgctcatagactcacagttaataagtga

SEQ ID NO: 1020329 - DNA, 33 bp, Homo sapien
atctattggagaagtaaaggaggcatttgggaa

SEQ ID NO: 1020330 - DNA, 33 bp, Homo sapien
atctattggagaagtagaggaggcatttgggaa

SEQ ID NO: 1020331 - DNA, 33 bp, Homo sapien
ttgggaaattataccaatcatccctaccaaaat

SEQ ID NO: 1020332 - DNA, 33 bp, Homo sapien
ttgggaaattataccagtcatccctaccaaaat

SEQ ID NO: 1020333 - DNA, 33 bp, Homo sapien
atttcccaacttctcacgacaaacccttctgat

SEQ ID NO: 1020334 - DNA, 33 bp, Homo sapien
atttcccaacttctcatgacaaacccttctgat

SEQ ID NO: 1020335 - DNA, 33 bp, Homo sapien
atgctttgttttaaaacccttgctcaagaacca

SEQ ID NO: 1020336 - DNA, 33 bp, Homo sapien
atgctttgttttaaaatccttgctcaagaacca

SEQ ID NO: 1020337 - DNA, 33 bp, Homo sapien
gactctctcccacacccaaagtaaccaagagag

SEQ ID NO: 1020338 - DNA, 33 bp, Homo sapien
gactctctcccacacctaaagtaaccaagagag

SEQ ID NO: 1020339 - DNA, 33 bp, Homo sapien
gaggacactaacagcaaagtagcatctaccaag

SEQ ID NO: 1020340 - DNA, 33 bp, Homo sapien
gaggacactaacagcagagtagcatctaccaag

SEQ ID NO: 1020341 - DNA, 33 bp, Homo sapien
ggctttccatccagcacgagttcacagttttcc

SEQ ID NO: 1020342 - DNA, 33 bp, Homo sapien
ggctttccatccagcatgagttcacagttttcc

SEQ ID NO: 1020343 - DNA, 33 bp, Homo sapien
gatgttaaaattaaaacgtgtactgtcttgttt

SEQ ID NO: 1020344 - DNA, 33 bp, Homo sapien
gatgttaaaattaaaatgtgtactgtcttgttt

SEQ ID NO: 1020345 - DNA, 33 bp, Homo sapien
ttcaaaaccaggtacactagcaagcccagaatg

SEQ ID NO: 1020346 - DNA, 33 bp, Homo sapien
ttcaaaaccaggtacattagcaagcccagaatg

SEQ ID NO: 1020347 - DNA, 33 bp, Homo sapien
tctggatgtttatatcgcttgcaagacttggga

SEQ ID NO: 1020348 - DNA, 33 bp, Homo sapien
tctggatgtttatatctcttgcaagacttggga

SEQ ID NO: 1020349 - DNA, 33 bp, Homo sapien
aagtgttgagtttttcaatgtgatcaaattaaa

SEQ ID NO: 1020350 - DNA, 33 bp, Homo sapien
aagtgttgagtttttcgatgtgatcaaattaaa

SEQ ID NO: 1020351 - DNA, 33 bp, Homo sapien
catgagagctgcagaaagtgttagttacacctg

SEQ ID NO: 1020352 - DNA, 33 bp, Homo sapien
catgagagctgcagaaggtgttagttacacctg

SEQ ID NO: 1020353 - DNA, 33 bp, Homo sapien
aagagaaatcagaggcaataatggagaaagaag

SEQ ID NO: 1020354 - DNA, 33 bp, Homo sapien
aagagaaatcagaggcgataatggagaaagaag

SEQ ID NO: 1020355 - DNA, 33 bp, Homo sapien
agttgagaaagtagaccaacaattacaaagcat

SEQ ID NO: 1020356 - DNA, 33 bp, Homo sapien
agttgagaaagtagacgaacaattacaaagcat

SEQ ID NO: 1020357 - DNA, 33 bp, Homo sapien
tcattaaaaactaccacgtattgaacacttcct

SEQ ID NO: 1020358 - DNA, 33 bp, Homo sapien
tcattaaaaactaccatgtattgaacacttcct

SEQ ID NO: 1020359 - DNA, 33 bp, Homo sapien
gatggcttgcataataatatcacttgtcacact

SEQ ID NO: 1020360 - DNA, 33 bp, Homo sapien
gatggcttgcataatagtatcacttgtcacact

SEQ ID NO: 1020361 - DNA, 33 bp, Homo sapien
tcataaggaaccttgcagaatattaaatggtta

SEQ ID NO: 1020362 - DNA, 33 bp, Homo sapien
tcataaggaaccttgcggaatattaaatggtta

SEQ ID NO: 1020363 - DNA, 33 bp, Homo sapien
gctcccattctcaaaaagaaatcgaaagactga

SEQ ID NO: 1020364 - DNA, 33 bp, Homo sapien
gctcccattctcaaaaggaaatcgaaagactga

SEQ ID NO: 1020365 - DNA, 33 bp, Homo sapien
cataaaataaacaggacaaatacagttccagcc

SEQ ID NO: 1020366 - DNA, 33 bp, Homo sapien
cataaaataaacaggagaaatacagttccagcc

SEQ ID NO: 1020367 - DNA, 33 bp, Homo sapien
aaaccagttttccctaactaggcaattcatggg

SEQ ID NO: 1020368 - DNA, 33 bp, Homo sapien
aaaccagttttccctatctaggcaattcatggg

SEQ ID NO: 1020369 - DNA, 33 bp, Homo sapien
aacctggattttaccgcagagcagagttgcatg

SEQ ID NO: 1020370 - DNA, 33 bp, Homo sapien
aacctggattttaccgtagagcagagttgcatg

SEQ ID NO: 1020371 - DNA, 33 bp, Homo sapien
ggaacacttttcagaactgcttgattccatggc

SEQ ID NO: 1020372 - DNA, 33 bp, Homo sapien
ggaacacttttcagaattgcttgattccatggc

SEQ ID NO: 1020373 - DNA, 33 bp, Homo sapien
agccactcaatcatgaaaaggttagagaagtaa

SEQ ID NO: 1020374 - DNA, 33 bp, Homo sapien
agccactcaatcatgacaaggttagagaagtaa

SEQ ID NO: 1020375 - DNA, 33 bp, Homo sapien
gacatggtcaacttaacaaactattctacaaac

SEQ ID NO: 1020376 - DNA, 33 bp, Homo sapien
gacatggtcaacttaataaactattctacaaac

SEQ ID NO: 1020377 - DNA, 33 bp, Homo sapien
ctcatctcacttccagacacaaagaagccacac

SEQ ID NO: 1020378 - DNA, 33 bp, Homo sapien
ctcatctcacttccaggcacaaagaagccacac

SEQ ID NO: 1020379 - DNA, 33 bp, Homo sapien
ccggacttaagggacaactgtaggattcgtgtg

SEQ ID NO: 1020380 - DNA, 33 bp, Homo sapien
ccggacttaagggacagctgtaggattcgtgtg

SEQ ID NO: 1020381 - DNA, 33 bp, Homo sapien
acagcctgtaacaaccggccctggaactcaacc

SEQ ID NO: 1020382 - DNA, 33 bp, Homo sapien
acagcctgtaacaacctgccctggaactcaacc

SEQ ID NO: 1020383 - DNA, 33 bp, Homo sapien
gtttcctggtagcctcagagactcatggtaaga

SEQ ID NO: 1020384 - DNA, 33 bp, Homo sapien
gtttcctggtagcctctgagactcatggtaaga

SEQ ID NO: 1020385 - DNA, 33 bp, Homo sapien
gggcttgatgacaataaattctgacagtcaaat

SEQ ID NO: 1020386 - DNA, 33 bp, Homo sapien
gggcttgatgacaatatattctgacagtcaaat

SEQ ID NO: 1020387 - DNA, 33 bp, Homo sapien
cttaggagataagagacgccgaatcttggtact

SEQ ID NO: 1020388 - DNA, 33 bp, Homo sapien
cttaggagataagagaggccgaatcttggtact

SEQ ID NO: 1020389 - DNA, 33 bp, Homo sapien
tctccagtgacaggagcaactctaaatgcttcc

SEQ ID NO: 1020390 - DNA, 33 bp, Homo sapien
tctccagtgacaggaggaactctaaatgcttcc

SEQ ID NO: 1020391 - DNA, 33 bp, Homo sapien
ttttatcgtagttctcaaatgtgtgttggagat

SEQ ID NO: 1020392 - DNA, 33 bp, Homo sapien
ttttatcgtagttctcgaatgtgtgttggagat

SEQ ID NO: 1020393 - DNA, 33 bp, Homo sapien
aaggacaaggacctacaatagatctggaggcct

SEQ ID NO: 1020394 - DNA, 33 bp, Homo sapien
aaggacaaggacctacgatagatctggaggcct

SEQ ID NO: 1020395 - DNA, 33 bp, Homo sapien
acagcttttccctggacgcaagcattctctaaa

SEQ ID NO: 1020396 - DNA, 33 bp, Homo sapien
acagcttttccctggatgcaagcattctctaaa

SEQ ID NO: 1020397 - DNA, 33 bp, Homo sapien
ctcattcctcaacatacgcacattacctacaaa

SEQ ID NO: 1020398 - DNA, 33 bp, Homo sapien
ctcattcctcaacatatgcacattacctacaaa

SEQ ID NO: 1020399 - DNA, 33 bp, Homo sapien
atctagtagcttaccaaataaacatattataat

SEQ ID NO: 1020400 - DNA, 33 bp, Homo sapien
atctagtagcttaccagataaacatattataat

SEQ ID NO: 1020401 - DNA, 33 bp, Homo sapien
tggatccttactgagcaattcagtttttccaaa

SEQ ID NO: 1020402 - DNA, 33 bp, Homo sapien
tggatccttactgagcgattcagtttttccaaa

SEQ ID NO: 1020403 - DNA, 33 bp, Homo sapien
aatgtaacttggtttgcactccaagaggccacc

SEQ ID NO: 1020404 - DNA, 33 bp, Homo sapien
aatgtaacttggtttgtactccaagaggccacc

SEQ ID NO: 1020405 - DNA, 33 bp, Homo sapien
ggaataggagcttacacaggtaattgagtgatt

SEQ ID NO: 1020406 - DNA, 33 bp, Homo sapien
ggaataggagcttacataggtaattgagtgatt

SEQ ID NO: 1020407 - DNA, 33 bp, Homo sapien
taagaaggcctctaacaccaacaatcagtaaaa

SEQ ID NO: 1020408 - DNA, 33 bp, Homo sapien
taagaaggcctctaacgccaacaatcagtaaaa

SEQ ID NO: 1020409 - DNA, 33 bp, Homo sapien
gcaagtttgctcattccatatccaggcagctgt

SEQ ID NO: 1020410 - DNA, 33 bp, Homo sapien
gcaagtttgctcattctatatccaggcagctgt

SEQ ID NO: 1020411 - DNA, 33 bp, Homo sapien
agactatagtttagaacgctattacccactaag

SEQ ID NO: 1020412 - DNA, 33 bp, Homo sapien
agactatagtttagaatgctattacccactaag

SEQ ID NO: 1020413 - DNA, 33 bp, Homo sapien
acctttcgataatcccagagctcactgtttcct

SEQ ID NO: 1020414 - DNA, 33 bp, Homo sapien
acctttcgataatcccggagctcactgtttcct

SEQ ID NO: 1020415 - DNA, 33 bp, Homo sapien
cttgttttagggtcaccggattgcctgccacag

SEQ ID NO: 1020416 - DNA, 33 bp, Homo sapien
cttgttttagggtcactggattgcctgccacag

SEQ ID NO: 1020417 - DNA, 33 bp, Homo sapien
gtgctgccgtgttcctcagagcaagaaggttgt

SEQ ID NO: 1020418 - DNA, 33 bp, Homo sapien
gtgctgccgtgttccttagagcaagaaggttgt

SEQ ID NO: 1020419 - DNA, 33 bp, Homo sapien
gataaaaagcgtagtacagtaagtgcataaacc

SEQ ID NO: 1020420 - DNA, 33 bp, Homo sapien
gataaaaagcgtagtatagtaagtgcataaacc

SEQ ID NO: 1020421 - DNA, 33 bp, Homo sapien
aaataaacaacaaccaaaactgtatcaagcaga

SEQ ID NO: 1020422 - DNA, 33 bp, Homo sapien
aaataaacaacaaccagaactgtatcaagcaga

SEQ ID NO: 1020423 - DNA, 33 bp, Homo sapien
gtgaagtcaagtgaaacggtgggaatagagaag

SEQ ID NO: 1020424 - DNA, 33 bp, Homo sapien
gtgaagtcaagtgaaatggtgggaatagagaag

SEQ ID NO: 1020425 - DNA, 33 bp, Homo sapien
ctattaggcagcacacagtcacgtagcaggttt

SEQ ID NO: 1020426 - DNA, 33 bp, Homo sapien
ctattaggcagcacacggtcacgtagcaggttt

SEQ ID NO: 1020427 - DNA, 33 bp, Homo sapien
tgtggagtggtcttcacagtagcagtagcaagc

SEQ ID NO: 1020428 - DNA, 33 bp, Homo sapien
tgtggagtggtcttcatagtagcagtagcaagc

SEQ ID NO: 1020429 - DNA, 33 bp, Homo sapien
ctgagacattagcatcgataaaacctttggtac

SEQ ID NO: 1020430 - DNA, 33 bp, Homo sapien
ctgagacattagcatctataaaacctttggtac

SEQ ID NO: 1020431 - DNA, 33 bp, Homo sapien
taatcgatcagagatgcaagcagttcaaattgt

SEQ ID NO: 1020432 - DNA, 33 bp, Homo sapien
taatcgatcagagatggaagcagttcaaattgt

SEQ ID NO: 1020433 - DNA, 33 bp, Homo sapien
gaatggggattggaggcatagcaaccatcttga

SEQ ID NO: 1020434 - DNA, 33 bp, Homo sapien
gaatggggattggaggtatagcaaccatcttga

SEQ ID NO: 1020435 - DNA, 33 bp, Homo sapien
aagcagaatggaataacggataatgtgtgtgaa

SEQ ID NO: 1020436 - DNA, 33 bp, Homo sapien
aagcagaatggaataatggataatgtgtgtgaa

SEQ ID NO: 1020437 - DNA, 33 bp, Homo sapien
tttgggcagtttgctcaatatcctagttcaaga

SEQ ID NO: 1020438 - DNA, 33 bp, Homo sapien
tttgggcagtttgctcgatatcctagttcaaga

SEQ ID NO: 1020439 - DNA, 33 bp, Homo sapien
ggtcctctcaacgaaccgtccctctgaaatcaa

SEQ ID NO: 1020440 - DNA, 33 bp, Homo sapien
ggtcctctcaacgaactgtccctctgaaatcaa

SEQ ID NO: 1020441 - DNA, 33 bp, Homo sapien
tcacttgtctgaattacattagctttcaaatcc

SEQ ID NO: 1020442 - DNA, 33 bp, Homo sapien
tcacttgtctgaattatattagctttcaaatcc

SEQ ID NO: 1020443 - DNA, 33 bp, Homo sapien
ttatgtttcctggccaaattagtcagtgcaaac

SEQ ID NO: 1020444 - DNA, 33 bp, Homo sapien
ttatgtttcctggccagattagtcagtgcaaac

SEQ ID NO: 1020445 - DNA, 33 bp, Homo sapien
aacaaaagaatcaccacaggggaaaactggctt

SEQ ID NO: 1020446 - DNA, 33 bp, Homo sapien
aacaaaagaatcaccataggggaaaactggctt

SEQ ID NO: 1020447 - DNA, 33 bp, Homo sapien
cctctgattccaagtacctcagtgttccaatat

SEQ ID NO: 1020448 - DNA, 33 bp, Homo sapien
cctctgattccaagtatctcagtgttccaatat

SEQ ID NO: 1020449 - DNA, 33 bp, Homo sapien
acttggatgtatagtaagtggaaggaaaggtaa

SEQ ID NO: 1020450 - DNA, 33 bp, Homo sapien
acttggatgtatagtatgtggaaggaaaggtaa

SEQ ID NO: 1020451 - DNA, 33 bp, Homo sapien
catgcatctctcttggacattgtgatggttaat

SEQ ID NO: 1020452 - DNA, 33 bp, Homo sapien
catgcatctctcttggtcattgtgatggttaat

SEQ ID NO: 1020453 - DNA, 33 bp, Homo sapien
aatgaaaaataacaaacattggcaaggatatgg

SEQ ID NO: 1020454 - DNA, 33 bp, Homo sapien
aatgaaaaataacaaatattggcaaggatatgg

SEQ ID NO: 1020455 - DNA, 33 bp, Homo sapien
tctttctaaacaaagaagaatggctaactccct

SEQ ID NO: 1020456 - DNA, 33 bp, Homo sapien
tctttctaaacaaagaggaatggctaactccct

SEQ ID NO: 1020457 - DNA, 33 bp, Homo sapien
aaatgaggagagataaagaatgaattaaagtga

SEQ ID NO: 1020458 - DNA, 33 bp, Homo sapien
aaatgaggagagataacgaatgaattaaagtga

SEQ ID NO: 1020459 - DNA, 33 bp, Homo sapien
caattgtgattgatgcaagtagcacccttctgc

SEQ ID NO: 1020460 - DNA, 33 bp, Homo sapien
caattgtgattgatgcgagtagcacccttctgc

SEQ ID NO: 1020461 - DNA, 33 bp, Homo sapien
gatgattcatgaggaactgactaacaagaagtt

SEQ ID NO: 1020462 - DNA, 33 bp, Homo sapien
gatgattcatgaggaattgactaacaagaagtt

SEQ ID NO: 1020463 - DNA, 33 bp, Homo sapien
attaaaagtgattaagcactatgaaggtggaaa

SEQ ID NO: 1020464 - DNA, 33 bp, Homo sapien
attaaaagtgattaaggactatgaaggtggaaa

SEQ ID NO: 1020465 - DNA, 33 bp, Homo sapien
tttttattaatctcaaagtattttcagatctcc

SEQ ID NO: 1020466 - DNA, 33 bp, Homo sapien
tttttattaatctcaatgtattttcagatctcc

SEQ ID NO: 1020467 - DNA, 33 bp, Homo sapien
cttgagaatgtagcaacggtcctgaaaagaatc

SEQ ID NO: 1020468 - DNA, 33 bp, Homo sapien
cttgagaatgtagcaatggtcctgaaaagaatc

SEQ ID NO: 1020469 - DNA, 33 bp, Homo sapien
acttaaacacacaaagaaatgaatagctcccca

SEQ ID NO: 1020470 - DNA, 33 bp, Homo sapien
acttaaacacacaaagtaatgaatagctcccca

SEQ ID NO: 1020471 - DNA, 33 bp, Homo sapien
accagtaagccttaaccagtgttgtgacttaac

SEQ ID NO: 1020472 - DNA, 33 bp, Homo sapien
accagtaagccttaactagtgttgtgacttaac

SEQ ID NO: 1020473 - DNA, 33 bp, Homo sapien
ggtttgatatttgtataactcttgacttttgag

SEQ ID NO: 1020474 - DNA, 33 bp, Homo sapien
ggtttgatatttgtatgactcttgacttttgag

SEQ ID NO: 1020475 - DNA, 33 bp, Homo sapien
agtagtctagtgattaagattctgtgctttcac

SEQ ID NO: 1020476 - DNA, 33 bp, Homo sapien
agtagtctagtgattaggattctgtgctttcac

SEQ ID NO: 1020477 - DNA, 33 bp, Homo sapien
tgatgcaactgataaaaagcaattcatttggct

SEQ ID NO: 1020478 - DNA, 33 bp, Homo sapien
tgatgcaactgataaagagcaattcatttggct

SEQ ID NO: 1020479 - DNA, 33 bp, Homo sapien
ctcatttttattctccaggacatattattgtaa

SEQ ID NO: 1020480 - DNA, 33 bp, Homo sapien
ctcatttttattctccgggacatattattgtaa

SEQ ID NO: 1020481 - DNA, 33 bp, Homo sapien
cagggatggaggaatccgatgagttctcactga

SEQ ID NO: 1020482 - DNA, 33 bp, Homo sapien
cagggatggaggaatctgatgagttctcactga

SEQ ID NO: 1020483 - DNA, 33 bp, Homo sapien
cctggcactttgttaacatctagtgttcaagtt

SEQ ID NO: 1020484 - DNA, 33 bp, Homo sapien
cctggcactttgttaatatctagtgttcaagtt

SEQ ID NO: 1020485 - DNA, 33 bp, Homo sapien
agagttgggcttgaaagttggcacagaggtgta

SEQ ID NO: 1020486 - DNA, 33 bp, Homo sapien
agagttgggcttgaaatttggcacagaggtgta

SEQ ID NO: 1020487 - DNA, 33 bp, Homo sapien
agttcttcatctgtaactcctcttcccccaaaa

SEQ ID NO: 1020488 - DNA, 33 bp, Homo sapien
agttcttcatctgtaagtcctcttcccccaaaa

SEQ ID NO: 1020489 - DNA, 33 bp, Homo sapien
gtttaaaagaagtgacaaggtgctatctctaag

SEQ ID NO: 1020490 - DNA, 33 bp, Homo sapien
gtttaaaagaagtgacgaggtgctatctctaag

SEQ ID NO: 1020491 - DNA, 33 bp, Homo sapien
ccctgctgggccaagaggagctgtatctgtttc

SEQ ID NO: 1020492 - DNA, 33 bp, Homo sapien
ccctgctgggccaagatgagctgtatctgtttc

SEQ ID NO: 1020493 - DNA, 33 bp, Homo sapien
cattcccacagctgaaggagcaagagaaagaag

SEQ ID NO: 1020494 - DNA, 33 bp, Homo sapien
cattcccacagctgaatgagcaagagaaagaag

SEQ ID NO: 1020495 - DNA, 33 bp, Homo sapien
ccctcttaaaatttgaagaagctataaaccctc

SEQ ID NO: 1020496 - DNA, 33 bp, Homo sapien
ccctcttaaaatttgaggaagctataaaccctc

SEQ ID NO: 1020497 - DNA, 33 bp, Homo sapien
acacttccattagtaaacaacacatgctcaatt

SEQ ID NO: 1020498 - DNA, 33 bp, Homo sapien
acacttccattagtaaccaacacatgctcaatt

SEQ ID NO: 1020499 - DNA, 33 bp, Homo sapien
ttatagatgagttatccgagccttagaaagcca

SEQ ID NO: 1020500 - DNA, 33 bp, Homo sapien
ttatagatgagttatctgagccttagaaagcca

SEQ ID NO: 1020501 - DNA, 33 bp, Homo sapien
aagcgctggtctaagaatccagacatttgagtt

SEQ ID NO: 1020502 - DNA, 33 bp, Homo sapien
aagcgctggtctaagattccagacatttgagtt

SEQ ID NO: 1020503 - DNA, 33 bp, Homo sapien
gatgccacgcccaaaactaaaacagtgtgtatt

SEQ ID NO: 1020504 - DNA, 33 bp, Homo sapien
gatgccacgcccaaaagtaaaacagtgtgtatt

SEQ ID NO: 1020505 - DNA, 33 bp, Homo sapien
aaaaagtggtgcttgagaattgaatttaatctc

SEQ ID NO: 1020506 - DNA, 33 bp, Homo sapien
aaaaagtggtgcttgataattgaatttaatctc

SEQ ID NO: 1020507 - DNA, 33 bp, Homo sapien
actacaaacaggatcagtgaggcaaacatttgt

SEQ ID NO: 1020508 - DNA, 33 bp, Homo sapien
actacaaacaggatcattgaggcaaacatttgt

SEQ ID NO: 1020509 - DNA, 33 bp, Homo sapien
acacctctctgactcacatggccaagtggaaat

SEQ ID NO: 1020510 - DNA, 33 bp, Homo sapien
acacctctctgactcatatggccaagtggaaat

SEQ ID NO: 1020511 - DNA, 33 bp, Homo sapien
tgagacatatcaatgcagaggccataggagatc

SEQ ID NO: 1020512 - DNA, 33 bp, Homo sapien
tgagacatatcaatgcggaggccataggagatc

SEQ ID NO: 1020513 - DNA, 33 bp, Homo sapien
ccttctaccatgaacacgaagcagaagaatgaa

SEQ ID NO: 1020514 - DNA, 33 bp, Homo sapien
ccttctaccatgaacatgaagcagaagaatgaa

SEQ ID NO: 1020515 - DNA, 33 bp, Homo sapien
aacattttgacaaataacccctgtgctgaaaga

SEQ ID NO: 1020516 - DNA, 33 bp, Homo sapien
aacattttgacaaatagcccctgtgctgaaaga

SEQ ID NO: 1020517 - DNA, 33 bp, Homo sapien
ccagatttagcagtaaccctgtgactcagcttc

SEQ ID NO: 1020518 - DNA, 33 bp, Homo sapien
ccagatttagcagtaagcctgtgactcagcttc

SEQ ID NO: 1020519 - DNA, 33 bp, Homo sapien
taataaggattgtgacagtattaaaatgaaagc

SEQ ID NO: 1020520 - DNA, 33 bp, Homo sapien
taataaggattgtgacggtattaaaatgaaagc

SEQ ID NO: 1020521 - DNA, 33 bp, Homo sapien
cctcatctgcctctcaggaaagtggatttttga

SEQ ID NO: 1020522 - DNA, 33 bp, Homo sapien
cctcatctgcctctcatgaaagtggatttttga

SEQ ID NO: 1020523 - DNA, 33 bp, Homo sapien
ttgaactgggtcttgagaaatgaatagaaatat

SEQ ID NO: 1020524 - DNA, 33 bp, Homo sapien
ttgaactgggtcttgataaatgaatagaaatat

SEQ ID NO: 1020525 - DNA, 33 bp, Homo sapien
gacacaaatctgcgaactggggtttcatcacag

SEQ ID NO: 1020526 - DNA, 33 bp, Homo sapien
gacacaaatctgcgaattggggtttcatcacag

SEQ ID NO: 1020527 - DNA, 33 bp, Homo sapien
gactgtattagatcacaaacatatccttaagtg

SEQ ID NO: 1020528 - DNA, 33 bp, Homo sapien
gactgtattagatcacgaacatatccttaagtg

SEQ ID NO: 1020529 - DNA, 33 bp, Homo sapien
gcctacactgccacacccaaatacccaattcat

SEQ ID NO: 1020530 - DNA, 33 bp, Homo sapien
gcctacactgccacactcaaatacccaattcat

SEQ ID NO: 1020531 - DNA, 33 bp, Homo sapien
ataaacacaaagcttacagttcagcagggttga

SEQ ID NO: 1020532 - DNA, 33 bp, Homo sapien
ataaacacaaagcttagagttcagcagggttga

SEQ ID NO: 1020533 - DNA, 33 bp, Homo sapien
tacaacctatacattcaacaagttttcagtgct

SEQ ID NO: 1020534 - DNA, 33 bp, Homo sapien
tacaacctatacattcgacaagttttcagtgct

SEQ ID NO: 1020535 - DNA, 33 bp, Homo sapien
ccatgagttctgaatgacagcatttcactggat

SEQ ID NO: 1020536 - DNA, 33 bp, Homo sapien
ccatgagttctgaatggcagcatttcactggat

SEQ ID NO: 1020537 - DNA, 33 bp, Homo sapien
taagctgaggaaacccaagattcagccttggct

SEQ ID NO: 1020538 - DNA, 33 bp, Homo sapien
taagctgaggaaacccgagattcagccttggct

SEQ ID NO: 1020539 - DNA, 33 bp, Homo sapien
gtcttgccaagcttaaatatctgaaaatacgtg

SEQ ID NO: 1020540 - DNA, 33 bp, Homo sapien
gtcttgccaagcttaagtatctgaaaatacgtg

SEQ ID NO: 1020541 - DNA, 33 bp, Homo sapien
atatctgaaaatgagacaatagcagccactgct

SEQ ID NO: 1020542 - DNA, 33 bp, Homo sapien
atatctgaaaatgagagaatagcagccactgct

SEQ ID NO: 1020543 - DNA, 33 bp, Homo sapien
ataaggcaagtacaacaaaaggatgttgagata

SEQ ID NO: 1020544 - DNA, 33 bp, Homo sapien
ataaggcaagtacaaccaaaggatgttgagata

SEQ ID NO: 1020545 - DNA, 33 bp, Homo sapien
ttacagaagtctctaaacaggatatgatgttga

SEQ ID NO: 1020546 - DNA, 33 bp, Homo sapien
ttacagaagtctctaagcaggatatgatgttga

SEQ ID NO: 1020547 - DNA, 33 bp, Homo sapien
agtattttagattcgaaagtcatggtggaccct

SEQ ID NO: 1020548 - DNA, 33 bp, Homo sapien
agtattttagattcgacagtcatggtggaccct

SEQ ID NO: 1020549 - DNA, 33 bp, Homo sapien
aactgggaaaaacagacggaaggagcaggagtc

SEQ ID NO: 1020550 - DNA, 33 bp, Homo sapien
aactgggaaaaacagatggaaggagcaggagtc

SEQ ID NO: 1020551 - DNA, 33 bp, Homo sapien
tgatcaccaggtaggcagaatagtcttatatag

SEQ ID NO: 1020552 - DNA, 33 bp, Homo sapien
tgatcaccaggtaggccgaatagtcttatatag

SEQ ID NO: 1020553 - DNA, 33 bp, Homo sapien
tctaatctccacactacagccagagtgttattt

SEQ ID NO: 1020554 - DNA, 33 bp, Homo sapien
tctaatctccacactagagccagagtgttattt

SEQ ID NO: 1020555 - DNA, 33 bp, Homo sapien
cagagacctctagttaccagcttgtacaaggca

SEQ ID NO: 1020556 - DNA, 33 bp, Homo sapien
cagagacctctagttatcagcttgtacaaggca

SEQ ID NO: 1020557 - DNA, 33 bp, Homo sapien
atctggtaagaaacaaagattcaaaaatgacta

SEQ ID NO: 1020558 - DNA, 33 bp, Homo sapien
atctggtaagaaacaacgattcaaaaatgacta

SEQ ID NO: 1020559 - DNA, 33 bp, Homo sapien
acttgagctgaagtctgaaaagttatgttcatc

SEQ ID NO: 1020560 - DNA, 33 bp, Homo sapien
acttgagctgaagtcttaaaagttatgttcatc

SEQ ID NO: 1020561 - DNA, 33 bp, Homo sapien
gggcacgtggagtctgcactttttggcaagatg

SEQ ID NO: 1020562 - DNA, 33 bp, Homo sapien
gggcacgtggagtctgtactttttggcaagatg

SEQ ID NO: 1020563 - DNA, 33 bp, Homo sapien
gagcaggcctggaaaacgtagtgattaatttag

SEQ ID NO: 1020564 - DNA, 33 bp, Homo sapien
gagcaggcctggaaaatgtagtgattaatttag

SEQ ID NO: 1020565 - DNA, 33 bp, Homo sapien
tccctcagcctgcagaaacatatgcctatgggg

SEQ ID NO: 1020566 - DNA, 33 bp, Homo sapien
tccctcagcctgcagacacatatgcctatgggg

SEQ ID NO: 1020567 - DNA, 33 bp, Homo sapien
gtggtctccactttgccataattgccatcagtc

SEQ ID NO: 1020568 - DNA, 33 bp, Homo sapien
gtggtctccactttgctataattgccatcagtc

SEQ ID NO: 1020569 - DNA, 33 bp, Homo sapien
gctttgtaattttttcaaaagaggccagtgatc

SEQ ID NO: 1020570 - DNA, 33 bp, Homo sapien
gctttgtaattttttcgaaagaggccagtgatc

SEQ ID NO: 1020571 - DNA, 33 bp, Homo sapien
gtattggagagtaaagcatttcaagcctttcaa

SEQ ID NO: 1020572 - DNA, 33 bp, Homo sapien
gtattggagagtaaagtatttcaagcctttcaa

SEQ ID NO: 1020573 - DNA, 33 bp, Homo sapien
caagagggcataaagaaaggataaaccctgtcc

SEQ ID NO: 1020574 - DNA, 33 bp, Homo sapien
caagagggcataaagagaggataaaccctgtcc

SEQ ID NO: 1020575 - DNA, 33 bp, Homo sapien
tttttacattagcaagaactgaacatttctaag

SEQ ID NO: 1020576 - DNA, 33 bp, Homo sapien
tttttacattagcaagcactgaacatttctaag

SEQ ID NO: 1020577 - DNA, 33 bp, Homo sapien
atggagacactaagaaattaagggtttagtcaa

SEQ ID NO: 1020578 - DNA, 33 bp, Homo sapien
atggagacactaagaagttaagggtttagtcaa

SEQ ID NO: 1020579 - DNA, 33 bp, Homo sapien
atattggaactcaaacacatcttagagatcatt

SEQ ID NO: 1020580 - DNA, 33 bp, Homo sapien
atattggaactcaaacgcatcttagagatcatt

SEQ ID NO: 1020581 - DNA, 33 bp, Homo sapien
atttgaccacatatcacctttgtgtcccataca

SEQ ID NO: 1020582 - DNA, 33 bp, Homo sapien
atttgaccacatatcatctttgtgtcccataca

SEQ ID NO: 1020583 - DNA, 33 bp, Homo sapien
catcttggtgaaacacagaaaccatgtggcaga

SEQ ID NO: 1020584 - DNA, 33 bp, Homo sapien
catcttggtgaaacacggaaaccatgtggcaga

SEQ ID NO: 1020585 - DNA, 33 bp, Homo sapien
atgtggctggcctttacgaggaaatctggaaag

SEQ ID NO: 1020586 - DNA, 33 bp, Homo sapien
atgtggctggcctttatgaggaaatctggaaag

SEQ ID NO: 1020587 - DNA, 33 bp, Homo sapien
aaagcttctcatttctaaaaagttcaaatgtca

SEQ ID NO: 1020588 - DNA, 33 bp, Homo sapien
aaagcttctcatttcttaaaagttcaaatgtca

SEQ ID NO: 1020589 - DNA, 33 bp, Homo sapien
gactctttgacctgcaaaatttaaactgagtga

SEQ ID NO: 1020590 - DNA, 33 bp, Homo sapien
gactctttgacctgcacaatttaaactgagtga

SEQ ID NO: 1020591 - DNA, 33 bp, Homo sapien
attcattgaccacatacgtaccaaacaaaattt

SEQ ID NO: 1020592 - DNA, 33 bp, Homo sapien
attcattgaccacatatgtaccaaacaaaattt

SEQ ID NO: 1020593 - DNA, 33 bp, Homo sapien
ttaaggacattgttcaacattacacagctatta

SEQ ID NO: 1020594 - DNA, 33 bp, Homo sapien
ttaaggacattgttcagcattacacagctatta

SEQ ID NO: 1020595 - DNA, 33 bp, Homo sapien
ttatgtcttgtgtctagaatgaaatgcacttgt

SEQ ID NO: 1020596 - DNA, 33 bp, Homo sapien
ttatgtcttgtgtctataatgaaatgcacttgt

SEQ ID NO: 1020597 - DNA, 33 bp, Homo sapien
ccttgtaattaattagaagggctttggattttt

SEQ ID NO: 1020598 - DNA, 33 bp, Homo sapien
ccttgtaattaattaggagggctttggattttt

SEQ ID NO: 1020599 - DNA, 33 bp, Homo sapien
tagggttcagtagtatcagcagtttcaggcatc

SEQ ID NO: 1020600 - DNA, 33 bp, Homo sapien
tagggttcagtagtattagcagtttcaggcatc

SEQ ID NO: 1020601 - DNA, 33 bp, Homo sapien
agcagaaaacatctaaactttttctgatctatt

SEQ ID NO: 1020602 - DNA, 33 bp, Homo sapien
agcagaaaacatctaacctttttctgatctatt

SEQ ID NO: 1020603 - DNA, 33 bp, Homo sapien
tcttggaaatgaagaagacttctacctttactt

SEQ ID NO: 1020604 - DNA, 33 bp, Homo sapien
tcttggaaatgaagaatacttctacctttactt

SEQ ID NO: 1020605 - DNA, 33 bp, Homo sapien
tacttgtcatcaaaacaaatgactggtttgtgc

SEQ ID NO: 1020606 - DNA, 33 bp, Homo sapien
tacttgtcatcaaaacgaatgactggtttgtgc

SEQ ID NO: 1020607 - DNA, 33 bp, Homo sapien
gaagcattacgctaccagactgcaaactatact

SEQ ID NO: 1020608 - DNA, 33 bp, Homo sapien
gaagcattacgctaccggactgcaaactatact

SEQ ID NO: 1020609 - DNA, 33 bp, Homo sapien
tcaatgatgaaaggaaactttttcttttgtaca

SEQ ID NO: 1020610 - DNA, 33 bp, Homo sapien
tcaatgatgaaaggaacctttttcttttgtaca

SEQ ID NO: 1020611 - DNA, 33 bp, Homo sapien
ggctgtcaggaagttgagttttgaatatgttca

SEQ ID NO: 1020612 - DNA, 33 bp, Homo sapien
ggctgtcaggaagttgcgttttgaatatgttca

SEQ ID NO: 1020613 - DNA, 33 bp, Homo sapien
cacatataaggaatgacgctgccccaaagaagc

SEQ ID NO: 1020614 - DNA, 33 bp, Homo sapien
cacatataaggaatgatgctgccccaaagaagc

SEQ ID NO: 1020615 - DNA, 33 bp, Homo sapien
cacactactctgtactcaaaaaacatttcaaat

SEQ ID NO: 1020616 - DNA, 33 bp, Homo sapien
cacactactctgtactgaaaaaacatttcaaat

SEQ ID NO: 1020617 - DNA, 33 bp, Homo sapien
gagaacgctcatggaaagtttgaagccccaata

SEQ ID NO: 1020618 - DNA, 33 bp, Homo sapien
gagaacgctcatggaatgtttgaagccccaata

SEQ ID NO: 1020619 - DNA, 33 bp, Homo sapien
tctaactgccacataaaatcaaataaaaaacaa

SEQ ID NO: 1020620 - DNA, 33 bp, Homo sapien
tctaactgccacataacatcaaataaaaaacaa

SEQ ID NO: 1020621 - DNA, 33 bp, Homo sapien
aaatattaaccatgaacgtgtgttgaaaatgat

SEQ ID NO: 1020622 - DNA, 33 bp, Homo sapien
aaatattaaccatgaatgtgtgttgaaaatgat

SEQ ID NO: 1020623 - DNA, 33 bp, Homo sapien
gccaaaaaagagaacacagaagatagttgttat

SEQ ID NO: 1020624 - DNA, 33 bp, Homo sapien
gccaaaaaagagaacatagaagatagttgttat

SEQ ID NO: 1020625 - DNA, 33 bp, Homo sapien
ccgatgctacttatcaccttagtcagacatcag

SEQ ID NO: 1020626 - DNA, 33 bp, Homo sapien
ccgatgctacttatcagcttagtcagacatcag

SEQ ID NO: 1020627 - DNA, 33 bp, Homo sapien
tgttatgggacattcaaatagcgttattgaggt

SEQ ID NO: 1020628 - DNA, 33 bp, Homo sapien
tgttatgggacattcacatagcgttattgaggt

SEQ ID NO: 1020629 - DNA, 33 bp, Homo sapien
ggaggagataagaaacagatacaaaaaatgaga

SEQ ID NO: 1020630 - DNA, 33 bp, Homo sapien
ggaggagataagaaacggatacaaaaaatgaga

SEQ ID NO: 1020631 - DNA, 33 bp, Homo sapien
gagttcccagattacgaaacacatccatatgct

SEQ ID NO: 1020632 - DNA, 33 bp, Homo sapien
gagttcccagattacggaacacatccatatgct

SEQ ID NO: 1020633 - DNA, 33 bp, Homo sapien
ttgtagacaggactttaaaaatgttgtcataat

SEQ ID NO: 1020634 - DNA, 33 bp, Homo sapien
ttgtagacaggacttttaaaatgttgtcataat

SEQ ID NO: 1020635 - DNA, 33 bp, Homo sapien
aggcctagttgcctaacgcccataaaaaccttg

SEQ ID NO: 1020636 - DNA, 33 bp, Homo sapien
aggcctagttgcctaatgcccataaaaaccttg

SEQ ID NO: 1020637 - DNA, 33 bp, Homo sapien
gaaatgaagacacttaaattgtaaaactttagc

SEQ ID NO: 1020638 - DNA, 33 bp, Homo sapien
gaaatgaagacacttacattgtaaaactttagc

SEQ ID NO: 1020639 - DNA, 33 bp, Homo sapien
aaaccagtttatatacgctgggggccttggaat

SEQ ID NO: 1020640 - DNA, 33 bp, Homo sapien
aaaccagtttatatactctgggggccttggaat

SEQ ID NO: 1020641 - DNA, 33 bp, Homo sapien
tgtataaaattatacaatggactccaaaaagtt

SEQ ID NO: 1020642 - DNA, 33 bp, Homo sapien
tgtataaaattatacagtggactccaaaaagtt

SEQ ID NO: 1020643 - DNA, 33 bp, Homo sapien
taatttgataaaacaactcagaattcgagaaag

SEQ ID NO: 1020644 - DNA, 33 bp, Homo sapien
taatttgataaaacaattcagaattcgagaaag

SEQ ID NO: 1020645 - DNA, 33 bp, Homo sapien
ataatccgcattggtcacagaaaggtgaataag

SEQ ID NO: 1020646 - DNA, 33 bp, Homo sapien
ataatccgcattggtctcagaaaggtgaataag

SEQ ID NO: 1020647 - DNA, 33 bp, Homo sapien
ttctaaagcttcatcaataaatcactctacttt

SEQ ID NO: 1020648 - DNA, 33 bp, Homo sapien
ttctaaagcttcatcagtaaatcactctacttt

SEQ ID NO: 1020649 - DNA, 33 bp, Homo sapien
tggacctgtgcaggaaaatatggtgcacttatt

SEQ ID NO: 1020650 - DNA, 33 bp, Homo sapien
tggacctgtgcaggaagatatggtgcacttatt

SEQ ID NO: 1020651 - DNA, 33 bp, Homo sapien
tgtagtttcattgaccaatagtcgtttttgacc

SEQ ID NO: 1020652 - DNA, 33 bp, Homo sapien
tgtagtttcattgaccgatagtcgtttttgacc

SEQ ID NO: 1020653 - DNA, 33 bp, Homo sapien
tcacattttttaggccacggtatctaatttatc

SEQ ID NO: 1020654 - DNA, 33 bp, Homo sapien
tcacattttttaggccgcggtatctaatttatc

SEQ ID NO: 1020655 - DNA, 33 bp, Homo sapien
gcaacatggaatactacgaatgaaatcacatca

SEQ ID NO: 1020656 - DNA, 33 bp, Homo sapien
gcaacatggaatactaggaatgaaatcacatca

SEQ ID NO: 1020657 - DNA, 33 bp, Homo sapien
ttttctgttttattccacacaattgctggtttc

SEQ ID NO: 1020658 - DNA, 33 bp, Homo sapien
ttttctgttttattccgcacaattgctggtttc

SEQ ID NO: 1020659 - DNA, 33 bp, Homo sapien
aaaagtggggcggagaaagagagccaggattgc

SEQ ID NO: 1020660 - DNA, 33 bp, Homo sapien
aaaagtggggcggagagagagagccaggattgc

SEQ ID NO: 1020661 - DNA, 33 bp, Homo sapien
aatttacagataaggaaatagctcccagagatt

SEQ ID NO: 1020662 - DNA, 33 bp, Homo sapien
aatttacagataaggatatagctcccagagatt

SEQ ID NO: 1020663 - DNA, 33 bp, Homo sapien
aagcctttaccagacaccaaatctaccaacacc

SEQ ID NO: 1020664 - DNA, 33 bp, Homo sapien
aagcctttaccagacatcaaatctaccaacacc

SEQ ID NO: 1020665 - DNA, 33 bp, Homo sapien
tcatgctcataacaaagctaaatatcatatcct

SEQ ID NO: 1020666 - DNA, 33 bp, Homo sapien
tcatgctcataacaaatctaaatatcatatcct

SEQ ID NO: 1020667 - DNA, 33 bp, Homo sapien
attccactgagtgatacgagatttcaatggcta

SEQ ID NO: 1020668 - DNA, 33 bp, Homo sapien
attccactgagtgatatgagatttcaatggcta

SEQ ID NO: 1020669 - DNA, 33 bp, Homo sapien
ccttccaattatggtgaatactggtcatttctg

SEQ ID NO: 1020670 - DNA, 33 bp, Homo sapien
ccttccaattatggtggatactggtcatttctg

SEQ ID NO: 1020671 - DNA, 33 bp, Homo sapien
taagctcacagctgtaaaagctacaaaaagcta

SEQ ID NO: 1020672 - DNA, 33 bp, Homo sapien
taagctcacagctgtataagctacaaaaagcta

SEQ ID NO: 1020673 - DNA, 33 bp, Homo sapien
gtaaggatggtagaaaaagacattggctttgtc

SEQ ID NO: 1020674 - DNA, 33 bp, Homo sapien
gtaaggatggtagaaagagacattggctttgtc

SEQ ID NO: 1020675 - DNA, 33 bp, Homo sapien
agccgcctacagatagcaaaactaaaagagcac

SEQ ID NO: 1020676 - DNA, 33 bp, Homo sapien
agccgcctacagataggaaaactaaaagagcac

SEQ ID NO: 1020677 - DNA, 33 bp, Homo sapien
tgtgtcaggctgcatcaatacatattcaataaa

SEQ ID NO: 1020678 - DNA, 33 bp, Homo sapien
tgtgtcaggctgcatcgatacatattcaataaa

SEQ ID NO: 1020679 - DNA, 33 bp, Homo sapien
tcaatgttgcttggacacctctcttcccttcct

SEQ ID NO: 1020680 - DNA, 33 bp, Homo sapien
tcaatgttgcttggacgcctctcttcccttcct

SEQ ID NO: 1020681 - DNA, 33 bp, Homo sapien
gtccaaatttgattgcacatatctatttaataa

SEQ ID NO: 1020682 - DNA, 33 bp, Homo sapien
gtccaaatttgattgcgcatatctatttaataa

SEQ ID NO: 1020683 - DNA, 33 bp, Homo sapien
atagtctgtctgaataagataggttgtgctgca

SEQ ID NO: 1020684 - DNA, 33 bp, Homo sapien
atagtctgtctgaataggataggttgtgctgca

SEQ ID NO: 1020685 - DNA, 33 bp, Homo sapien
aacctggtgtcaattaagaatttgcaccaatgt

SEQ ID NO: 1020686 - DNA, 33 bp, Homo sapien
aacctggtgtcaattaggaatttgcaccaatgt

SEQ ID NO: 1020687 - DNA, 33 bp, Homo sapien
atttaactaacgacaccccacattgttaggaat

SEQ ID NO: 1020688 - DNA, 33 bp, Homo sapien
atttaactaacgacactccacattgttaggaat

SEQ ID NO: 1020689 - DNA, 33 bp, Homo sapien
actgattttatggcagactcaaaggcagtgttc

SEQ ID NO: 1020690 - DNA, 33 bp, Homo sapien
actgattttatggcagtctcaaaggcagtgttc

SEQ ID NO: 1020691 - DNA, 33 bp, Homo sapien
aaacgcatagctctgacggaaactttttaacat

SEQ ID NO: 1020692 - DNA, 33 bp, Homo sapien
aaacgcatagctctgatggaaactttttaacat

SEQ ID NO: 1020693 - DNA, 33 bp, Homo sapien
caacaaggccttgaacaatttcggttggggttc

SEQ ID NO: 1020694 - DNA, 33 bp, Homo sapien
caacaaggccttgaacgatttcggttggggttc

SEQ ID NO: 1020695 - DNA, 33 bp, Homo sapien
gaggagtgctcatgaacgggaatgagtgcagag

SEQ ID NO: 1020696 - DNA, 33 bp, Homo sapien
gaggagtgctcatgaatgggaatgagtgcagag

SEQ ID NO: 1020697 - DNA, 33 bp, Homo sapien
tagagaataaaagcagaatgtctttagtctgga

SEQ ID NO: 1020698 - DNA, 33 bp, Homo sapien
tagagaataaaagcaggatgtctttagtctgga

SEQ ID NO: 1020699 - DNA, 33 bp, Homo sapien
tctagccatctttgaaacttctccagagacagc

SEQ ID NO: 1020700 - DNA, 33 bp, Homo sapien
tctagccatctttgaaccttctccagagacagc

SEQ ID NO: 1020701 - DNA, 33 bp, Homo sapien
atggctagaactgagacaagcaggaaaattggg

SEQ ID NO: 1020702 - DNA, 33 bp, Homo sapien
atggctagaactgagagaagcaggaaaattggg

SEQ ID NO: 1020703 - DNA, 33 bp, Homo sapien
tggattacacaatagaatcatgcaaatagaaag

SEQ ID NO: 1020704 - DNA, 33 bp, Homo sapien
tggattacacaatagagtcatgcaaatagaaag

SEQ ID NO: 1020705 - DNA, 33 bp, Homo sapien
ctttcataggtgattacgtcatgggggcataac

SEQ ID NO: 1020706 - DNA, 33 bp, Homo sapien
ctttcataggtgattaggtcatgggggcataac

SEQ ID NO: 1020707 - DNA, 33 bp, Homo sapien
gcaagagtcaaaaataccaaaactcctgggaaa

SEQ ID NO: 1020708 - DNA, 33 bp, Homo sapien
gcaagagtcaaaaatatcaaaactcctgggaaa

SEQ ID NO: 1020709 - DNA, 33 bp, Homo sapien
cagtcccagaataacaatatcaatactatagcc

SEQ ID NO: 1020710 - DNA, 33 bp, Homo sapien
cagtcccagaataacagtatcaatactatagcc

SEQ ID NO: 1020711 - DNA, 33 bp, Homo sapien
ataactcactatccttgaacaataacaatgtga

SEQ ID NO: 1020712 - DNA, 33 bp, Homo sapien
ataactcactatcctttaacaataacaatgtga

SEQ ID NO: 1020713 - DNA, 33 bp, Homo sapien
atattttacagtggtccaaaggaacatgaaaag

SEQ ID NO: 1020714 - DNA, 33 bp, Homo sapien
atattttacagtggtctaaaggaacatgaaaag

SEQ ID NO: 1020715 - DNA, 33 bp, Homo sapien
tggaaagcttgggtacaattttcatgactagtt

SEQ ID NO: 1020716 - DNA, 33 bp, Homo sapien
tggaaagcttgggtacgattttcatgactagtt

SEQ ID NO: 1020717 - DNA, 33 bp, Homo sapien
agttatgaaacaaacacaggtaaccttgactct

SEQ ID NO: 1020718 - DNA, 33 bp, Homo sapien
agttatgaaacaaacataggtaaccttgactct

SEQ ID NO: 1020719 - DNA, 33 bp, Homo sapien
tagatccaaaaagtgacagaaacatagctatta

SEQ ID NO: 1020720 - DNA, 33 bp, Homo sapien
tagatccaaaaagtgatagaaacatagctatta

SEQ ID NO: 1020721 - DNA, 33 bp, Homo sapien
aggattttatatgctccacagtgaataattcag

SEQ ID NO: 1020722 - DNA, 33 bp, Homo sapien
aggattttatatgctctacagtgaataattcag

SEQ ID NO: 1020723 - DNA, 33 bp, Homo sapien
gactcttggctgaagacaaccaattcttgaagc

SEQ ID NO: 1020724 - DNA, 33 bp, Homo sapien
gactcttggctgaagataaccaattcttgaagc

SEQ ID NO: 1020725 - DNA, 33 bp, Homo sapien
aatggatcattattcaatcacacttttgcatca

SEQ ID NO: 1020726 - DNA, 33 bp, Homo sapien
aatggatcattattcagtcacacttttgcatca

SEQ ID NO: 1020727 - DNA, 33 bp, Homo sapien
caaatcagatgccatcacttttacttctctccc

SEQ ID NO: 1020728 - DNA, 33 bp, Homo sapien
caaatcagatgccatcgcttttacttctctccc

SEQ ID NO: 1020729 - DNA, 33 bp, Homo sapien
tttcatttgagacttaacaaggaatctaggccc

SEQ ID NO: 1020730 - DNA, 33 bp, Homo sapien
tttcatttgagacttagcaaggaatctaggccc

SEQ ID NO: 1020731 - DNA, 33 bp, Homo sapien
aagctagcagcaaccacgaggatccagtttggg

SEQ ID NO: 1020732 - DNA, 33 bp, Homo sapien
aagctagcagcaaccatgaggatccagtttggg

SEQ ID NO: 1020733 - DNA, 33 bp, Homo sapien
ggtatattgggaattagagagatgcttcctgtt

SEQ ID NO: 1020734 - DNA, 33 bp, Homo sapien
ggtatattgggaattatagagatgcttcctgtt

SEQ ID NO: 1020735 - DNA, 33 bp, Homo sapien
gatcatctaattcacggatattgccgttactgc

SEQ ID NO: 1020736 - DNA, 33 bp, Homo sapien
gatcatctaattcacgtatattgccgttactgc

SEQ ID NO: 1020737 - DNA, 33 bp, Homo sapien
gctgatattaccaaataaaggctatttcttaac

SEQ ID NO: 1020738 - DNA, 33 bp, Homo sapien
gctgatattaccaaatgaaggctatttcttaac

SEQ ID NO: 1020739 - DNA, 33 bp, Homo sapien
aatatcagcaaagaaacagcattatatgcagca

SEQ ID NO: 1020740 - DNA, 33 bp, Homo sapien
aatatcagcaaagaaagagcattatatgcagca

SEQ ID NO: 1020741 - DNA, 33 bp, Homo sapien
gttaccaacctaaaaactgctatgactcaagct

SEQ ID NO: 1020742 - DNA, 33 bp, Homo sapien
gttaccaacctaaaaagtgctatgactcaagct

SEQ ID NO: 1020743 - DNA, 33 bp, Homo sapien
cagttggaaccagtcaatatccactagaaggac

SEQ ID NO: 1020744 - DNA, 33 bp, Homo sapien
cagttggaaccagtcagtatccactagaaggac

SEQ ID NO: 1020745 - DNA, 33 bp, Homo sapien
ccattctgtacctgcacgtgactttgaggccct

SEQ ID NO: 1020746 - DNA, 33 bp, Homo sapien
ccattctgtacctgcatgtgactttgaggccct

SEQ ID NO: 1020747 - DNA, 33 bp, Homo sapien
aaagagcctcagataaggaaacttctagaaaga

SEQ ID NO: 1020748 - DNA, 33 bp, Homo sapien
aaagagcctcagataatgaaacttctagaaaga

SEQ ID NO: 1020749 - DNA, 33 bp, Homo sapien
atgcctgaattggataagtgaactggctacaat

SEQ ID NO: 1020750 - DNA, 33 bp, Homo sapien
atgcctgaattggatatgtgaactggctacaat

SEQ ID NO: 1020751 - DNA, 33 bp, Homo sapien
aaattctatgccaagcactttcatatacaatat

SEQ ID NO: 1020752 - DNA, 33 bp, Homo sapien
aaattctatgccaagcgctttcatatacaatat

SEQ ID NO: 1020753 - DNA, 33 bp, Homo sapien
taaagctatcagtcaaggtaggtgcacatagct

SEQ ID NO: 1020754 - DNA, 33 bp, Homo sapien
taaagctatcagtcaatgtaggtgcacatagct

SEQ ID NO: 1020755 - DNA, 33 bp, Homo sapien
tgctgggcaatccatcactagcctaacttaaga

SEQ ID NO: 1020756 - DNA, 33 bp, Homo sapien
tgctgggcaatccatcgctagcctaacttaaga

SEQ ID NO: 1020757 - DNA, 33 bp, Homo sapien
cagcagaaatggtcagcatttacagagtggcag

SEQ ID NO: 1020758 - DNA, 33 bp, Homo sapien
cagcagaaatggtcaggatttacagagtggcag

SEQ ID NO: 1020759 - DNA, 33 bp, Homo sapien
aagacagacacaaatgcagacagatgtgaggct

SEQ ID NO: 1020760 - DNA, 33 bp, Homo sapien
aagacagacacaaatgtagacagatgtgaggct

SEQ ID NO: 1020761 - DNA, 33 bp, Homo sapien
cattaatttggcacatgacacatcaccagtgct

SEQ ID NO: 1020762 - DNA, 33 bp, Homo sapien
cattaatttggcacattacacatcaccagtgct

SEQ ID NO: 1020763 - DNA, 33 bp, Homo sapien
catgtagatcactagtaaatcagcactaatgag

SEQ ID NO: 1020764 - DNA, 33 bp, Homo sapien
catgtagatcactagtcaatcagcactaatgag

SEQ ID NO: 1020765 - DNA, 33 bp, Homo sapien
cagggcgggggacaccactatcaaacaggtcat

SEQ ID NO: 1020766 - DNA, 33 bp, Homo sapien
cagggcgggggacaccgctatcaaacaggtcat

SEQ ID NO: 1020767 - DNA, 33 bp, Homo sapien
actccttttggcaaacaccagtagatcttgtcc

SEQ ID NO: 1020768 - DNA, 33 bp, Homo sapien
actccttttggcaaacgccagtagatcttgtcc

SEQ ID NO: 1020769 - DNA, 33 bp, Homo sapien
ggcacttagggtgtctaaacagtcaacgtgaag

SEQ ID NO: 1020770 - DNA, 33 bp, Homo sapien
ggcacttagggtgtctgaacagtcaacgtgaag

SEQ ID NO: 1020771 - DNA, 33 bp, Homo sapien
ccttacagggtttcacaacatctccctctgctc

SEQ ID NO: 1020772 - DNA, 33 bp, Homo sapien
ccttacagggtttcacgacatctccctctgctc

SEQ ID NO: 1020773 - DNA, 33 bp, Homo sapien
gtctaggatgcgtggaacctatgtgtttatttt

SEQ ID NO: 1020774 - DNA, 33 bp, Homo sapien
gtctaggatgcgtggagcctatgtgtttatttt

SEQ ID NO: 1020775 - DNA, 33 bp, Homo sapien
ttatgctgccctacgacgtcttgcctcttttct

SEQ ID NO: 1020776 - DNA, 33 bp, Homo sapien
ttatgctgccctacgatgtcttgcctcttttct

SEQ ID NO: 1020777 - DNA, 33 bp, Homo sapien
cccacagctagaaaggacaactgagtatgcaac

SEQ ID NO: 1020778 - DNA, 33 bp, Homo sapien
cccacagctagaaagggcaactgagtatgcaac

SEQ ID NO: 1020779 - DNA, 33 bp, Homo sapien
tggaatttgacccaaccaagagaaggaagcaac

SEQ ID NO: 1020780 - DNA, 33 bp, Homo sapien
tggaatttgacccaactaagagaaggaagcaac

SEQ ID NO: 1020781 - DNA, 33 bp, Homo sapien
aaaaccagggcagttaacaatattcatttcacc

SEQ ID NO: 1020782 - DNA, 33 bp, Homo sapien
aaaaccagggcagttatcaatattcatttcacc

SEQ ID NO: 1020783 - DNA, 33 bp, Homo sapien
actgtagaggcccaataaatgctggctgatatt

SEQ ID NO: 1020784 - DNA, 33 bp, Homo sapien
actgtagaggcccaatgaatgctggctgatatt

SEQ ID NO: 1020785 - DNA, 33 bp, Homo sapien
aatgcactcttagggaaggtacaacctctaaat

SEQ ID NO: 1020786 - DNA, 33 bp, Homo sapien
aatgcactcttagggacggtacaacctctaaat

SEQ ID NO: 1020787 - DNA, 33 bp, Homo sapien
tttgaagttgagaatacagacaatcctagataa

SEQ ID NO: 1020788 - DNA, 33 bp, Homo sapien
tttgaagttgagaatagagacaatcctagataa

SEQ ID NO: 1020789 - DNA, 33 bp, Homo sapien
tggggcttgtgtgtaaagggactctctcagcac

SEQ ID NO: 1020790 - DNA, 33 bp, Homo sapien
tggggcttgtgtgtaaggggactctctcagcac

SEQ ID NO: 1020791 - DNA, 33 bp, Homo sapien
tgagatagaggtgatactaatgaaattgtataa

SEQ ID NO: 1020792 - DNA, 33 bp, Homo sapien
tgagatagaggtgatattaatgaaattgtataa

SEQ ID NO: 1020793 - DNA, 33 bp, Homo sapien
ttcaaattctgttacactgaaattcactagtct

SEQ ID NO: 1020794 - DNA, 33 bp, Homo sapien
ttcaaattctgttacattgaaattcactagtct

SEQ ID NO: 1020795 - DNA, 33 bp, Homo sapien
ccagaatatcctacaacagactgaatccacaag

SEQ ID NO: 1020796 - DNA, 33 bp, Homo sapien
ccagaatatcctacaatagactgaatccacaag

SEQ ID NO: 1020797 - DNA, 33 bp, Homo sapien
gacctttggaattcacgatgcactcagactttc

SEQ ID NO: 1020798 - DNA, 33 bp, Homo sapien
gacctttggaattcactatgcactcagactttc

SEQ ID NO: 1020799 - DNA, 33 bp, Homo sapien
gagagcatctgactcactccttagcgcctaatc

SEQ ID NO: 1020800 - DNA, 33 bp, Homo sapien
gagagcatctgactcattccttagcgcctaatc

SEQ ID NO: 1020801 - DNA, 33 bp, Homo sapien
ttgaggattatggaacagtaaatagcctcagta

SEQ ID NO: 1020802 - DNA, 33 bp, Homo sapien
ttgaggattatggaacggtaaatagcctcagta

SEQ ID NO: 1020803 - DNA, 33 bp, Homo sapien
accacatacttggagtaaatttattagtgttta

SEQ ID NO: 1020804 - DNA, 33 bp, Homo sapien
accacatacttggagttaatttattagtgttta

SEQ ID NO: 1020805 - DNA, 33 bp, Homo sapien
gctcggaattggcaagcattttcttggacaaag

SEQ ID NO: 1020806 - DNA, 33 bp, Homo sapien
gctcggaattggcaagtattttcttggacaaag

SEQ ID NO: 1020807 - DNA, 33 bp, Homo sapien
gcagagtaactcacagaatcaggctttaaactg

SEQ ID NO: 1020808 - DNA, 33 bp, Homo sapien
gcagagtaactcacagtatcaggctttaaactg

SEQ ID NO: 1020809 - DNA, 33 bp, Homo sapien
acaggtgctacaattccatcagcagcctgtgtc

SEQ ID NO: 1020810 - DNA, 33 bp, Homo sapien
acaggtgctacaattctatcagcagcctgtgtc

SEQ ID NO: 1020811 - DNA, 33 bp, Homo sapien
cttcaaagaccaactaccagaaagaaccagtct

SEQ ID NO: 1020812 - DNA, 33 bp, Homo sapien
cttcaaagaccaactagcagaaagaaccagtct

SEQ ID NO: 1020813 - DNA, 33 bp, Homo sapien
actctgcttaggaagaagactaactttgcaaaa

SEQ ID NO: 1020814 - DNA, 33 bp, Homo sapien
actctgcttaggaagaggactaactttgcaaaa

SEQ ID NO: 1020815 - DNA, 33 bp, Homo sapien
tatcccccatattcaaaatccatcaaaactgta

SEQ ID NO: 1020816 - DNA, 33 bp, Homo sapien
tatcccccatattcaagatccatcaaaactgta

SEQ ID NO: 1020817 - DNA, 33 bp, Homo sapien
gctgtagccagtaaacaaagttatctaacctct

SEQ ID NO: 1020818 - DNA, 33 bp, Homo sapien
gctgtagccagtaaaccaagttatctaacctct

SEQ ID NO: 1020819 - DNA, 33 bp, Homo sapien
tcactctccatattagaacgtttaaagtggcct

SEQ ID NO: 1020820 - DNA, 33 bp, Homo sapien
tcactctccatattaggacgtttaaagtggcct

SEQ ID NO: 1020821 - DNA, 33 bp, Homo sapien
ggctgcctcaggttagacattatttaaaacatt

SEQ ID NO: 1020822 - DNA, 33 bp, Homo sapien
ggctgcctcaggttaggcattatttaaaacatt

SEQ ID NO: 1020823 - DNA, 33 bp, Homo sapien
tttatatgtatgccacagtgagcaatgaatcca

SEQ ID NO: 1020824 - DNA, 33 bp, Homo sapien
tttatatgtatgccacggtgagcaatgaatcca

SEQ ID NO: 1020825 - DNA, 33 bp, Homo sapien
ggcactgcaaaacacaagcatgtgcatatgttg

SEQ ID NO: 1020826 - DNA, 33 bp, Homo sapien
ggcactgcaaaacacaggcatgtgcatatgttg

SEQ ID NO: 1020827 - DNA, 33 bp, Homo sapien
aagctctcgcttcttgcaaaaggggtcctgaaa

SEQ ID NO: 1020828 - DNA, 33 bp, Homo sapien
aagctctcgcttcttggaaaaggggtcctgaaa

SEQ ID NO: 1020829 - DNA, 33 bp, Homo sapien
ccagagacagttcttccaggccaacaccatatg

SEQ ID NO: 1020830 - DNA, 33 bp, Homo sapien
ccagagacagttcttctaggccaacaccatatg

SEQ ID NO: 1020831 - DNA, 33 bp, Homo sapien
tccatcttgtaatgataaaaaaatatgacaaaa

SEQ ID NO: 1020832 - DNA, 33 bp, Homo sapien
tccatcttgtaatgatgaaaaaatatgacaaaa

SEQ ID NO: 1020833 - DNA, 33 bp, Homo sapien
gaaactatcaccaggcaagagagtgtcatgaag

SEQ ID NO: 1020834 - DNA, 33 bp, Homo sapien
gaaactatcaccaggcgagagagtgtcatgaag

SEQ ID NO: 1020835 - DNA, 33 bp, Homo sapien
ggtctaccaactggaacgtgtcaagattgtcac

SEQ ID NO: 1020836 - DNA, 33 bp, Homo sapien
ggtctaccaactggaatgtgtcaagattgtcac

SEQ ID NO: 1020837 - DNA, 33 bp, Homo sapien
atactttctcttgctgcagacctagtgtcaaat

SEQ ID NO: 1020838 - DNA, 33 bp, Homo sapien
atactttctcttgctgtagacctagtgtcaaat

SEQ ID NO: 1020839 - DNA, 33 bp, Homo sapien
tcaacagctttttagacgataactgccatagaa

SEQ ID NO: 1020840 - DNA, 33 bp, Homo sapien
tcaacagctttttagatgataactgccatagaa

SEQ ID NO: 1020841 - DNA, 33 bp, Homo sapien
acttgcctatcatagcaataaggaactatgtag

SEQ ID NO: 1020842 - DNA, 33 bp, Homo sapien
acttgcctatcatagccataaggaactatgtag

SEQ ID NO: 1020843 - DNA, 33 bp, Homo sapien
gccaacatcagcttcaaacatactctcataaac

SEQ ID NO: 1020844 - DNA, 33 bp, Homo sapien
gccaacatcagcttcacacatactctcataaac

SEQ ID NO: 1020845 - DNA, 33 bp, Homo sapien
caggctacagagctgacgactttcccttagaca

SEQ ID NO: 1020846 - DNA, 33 bp, Homo sapien
caggctacagagctgatgactttcccttagaca

SEQ ID NO: 1020847 - DNA, 33 bp, Homo sapien
tcatagctggatgctcacagtttcatgtgatca

SEQ ID NO: 1020848 - DNA, 33 bp, Homo sapien
tcatagctggatgctcgcagtttcatgtgatca

SEQ ID NO: 1020849 - DNA, 33 bp, Homo sapien
gaacttgaagtaatgacgagacaaccaggtgag

SEQ ID NO: 1020850 - DNA, 33 bp, Homo sapien
gaacttgaagtaatgatgagacaaccaggtgag

SEQ ID NO: 1020851 - DNA, 33 bp, Homo sapien
gagccaccagacccggccatcgacattcttaaa

SEQ ID NO: 1020852 - DNA, 33 bp, Homo sapien
gagccaccagacccggtcatcgacattcttaaa

SEQ ID NO: 1020853 - DNA, 33 bp, Homo sapien
ttttcagcagagaccacgattaaacaacatgaa

SEQ ID NO: 1020854 - DNA, 33 bp, Homo sapien
ttttcagcagagaccatgattaaacaacatgaa

SEQ ID NO: 1020855 - DNA, 33 bp, Homo sapien
tgatgtgtctgtagcacgtcatggtttaacata

SEQ ID NO: 1020856 - DNA, 33 bp, Homo sapien
tgatgtgtctgtagcatgtcatggtttaacata

SEQ ID NO: 1020857 - DNA, 33 bp, Homo sapien
ttatcatccctgatacagattaggaaactatga

SEQ ID NO: 1020858 - DNA, 33 bp, Homo sapien
ttatcatccctgatacggattaggaaactatga

SEQ ID NO: 1020859 - DNA, 33 bp, Homo sapien
catcattggccaaaagacttactagtaacatat

SEQ ID NO: 1020860 - DNA, 33 bp, Homo sapien
catcattggccaaaagccttactagtaacatat

SEQ ID NO: 1020861 - DNA, 33 bp, Homo sapien
acagctgctagggatacagtggattaatgcctt

SEQ ID NO: 1020862 - DNA, 33 bp, Homo sapien
acagctgctagggatatagtggattaatgcctt

SEQ ID NO: 1020863 - DNA, 33 bp, Homo sapien
aaaagaacgtaattgaactcagtggtttgtatt

SEQ ID NO: 1020864 - DNA, 33 bp, Homo sapien
aaaagaacgtaattgatctcagtggtttgtatt

SEQ ID NO: 1020865 - DNA, 33 bp, Homo sapien
gtatacacctgagaaacctgaaatgctgaggtg

SEQ ID NO: 1020866 - DNA, 33 bp, Homo sapien
gtatacacctgagaaagctgaaatgctgaggtg

SEQ ID NO: 1020867 - DNA, 33 bp, Homo sapien
gttctcctttctctaaatctagcaatttgttct

SEQ ID NO: 1020868 - DNA, 33 bp, Homo sapien
gttctcctttctctaagtctagcaatttgttct

SEQ ID NO: 1020869 - DNA, 33 bp, Homo sapien
atatgtattgttgttagagataatgtgtgtact

SEQ ID NO: 1020870 - DNA, 33 bp, Homo sapien
atatgtattgttgttatagataatgtgtgtact

SEQ ID NO: 1020871 - DNA, 33 bp, Homo sapien
atcttttatcttggcacgtgaaattttagcaaa

SEQ ID NO: 1020872 - DNA, 33 bp, Homo sapien
atcttttatcttggcatgtgaaattttagcaaa

SEQ ID NO: 1020873 - DNA, 33 bp, Homo sapien
attcaaactttggagaaggctatttcaaattat

SEQ ID NO: 1020874 - DNA, 33 bp, Homo sapien
attcaaactttggagagggctatttcaaattat

SEQ ID NO: 1020875 - DNA, 33 bp, Homo sapien
tattgacattaatagcagaatatttcaatcaga

SEQ ID NO: 1020876 - DNA, 33 bp, Homo sapien
tattgacattaatagcggaatatttcaatcaga

SEQ ID NO: 1020877 - DNA, 33 bp, Homo sapien
agctaagggaattatgaatcggaaaatcacaga

SEQ ID NO: 1020878 - DNA, 33 bp, Homo sapien
agctaagggaattatggatcggaaaatcacaga

SEQ ID NO: 1020879 - DNA, 33 bp, Homo sapien
gacctgagatgcaaaggagacagatgcaattta

SEQ ID NO: 1020880 - DNA, 33 bp, Homo sapien
gacctgagatgcaaagtagacagatgcaattta

SEQ ID NO: 1020881 - DNA, 33 bp, Homo sapien
acagctgtgatttagacggagcgagaaacttga

SEQ ID NO: 1020882 - DNA, 33 bp, Homo sapien
acagctgtgatttagatggagcgagaaacttga

SEQ ID NO: 1020883 - DNA, 33 bp, Homo sapien
atagttttcagtgaacaaattagtttttgcaca

SEQ ID NO: 1020884 - DNA, 33 bp, Homo sapien
atagttttcagtgaacgaattagtttttgcaca

SEQ ID NO: 1020885 - DNA, 33 bp, Homo sapien
cagtcttagtgtcagacgtcaggtaggtaagga

SEQ ID NO: 1020886 - DNA, 33 bp, Homo sapien
cagtcttagtgtcagatgtcaggtaggtaagga

SEQ ID NO: 1020887 - DNA, 33 bp, Homo sapien
tatgacctttaacatacagtgtttttcatctct

SEQ ID NO: 1020888 - DNA, 33 bp, Homo sapien
tatgacctttaacatatagtgtttttcatctct

SEQ ID NO: 1020889 - DNA, 33 bp, Homo sapien
ttggaagatatgtagacatagtcatagatgtag

SEQ ID NO: 1020890 - DNA, 33 bp, Homo sapien
ttggaagatatgtagatatagtcatagatgtag

SEQ ID NO: 1020891 - DNA, 33 bp, Homo sapien
taggcaggtttcctaccaatttggttattgttt

SEQ ID NO: 1020892 - DNA, 33 bp, Homo sapien
taggcaggtttcctactaatttggttattgttt

SEQ ID NO: 1020893 - DNA, 33 bp, Homo sapien
aagtgaggctgctctcaaagtctagcttgatcc

SEQ ID NO: 1020894 - DNA, 33 bp, Homo sapien
aagtgaggctgctctcgaagtctagcttgatcc

SEQ ID NO: 1020895 - DNA, 33 bp, Homo sapien
tccccaggccattctaccactgtgtatggcaat

SEQ ID NO: 1020896 - DNA, 33 bp, Homo sapien
tccccaggccattctagcactgtgtatggcaat

SEQ ID NO: 1020897 - DNA, 33 bp, Homo sapien
ctggaaatttagcacaagcacttgttaatggaa

SEQ ID NO: 1020898 - DNA, 33 bp, Homo sapien
ctggaaatttagcacaggcacttgttaatggaa

SEQ ID NO: 1020899 - DNA, 33 bp, Homo sapien
atgagcatcacttagcgcattgctttcatcttg

SEQ ID NO: 1020900 - DNA, 33 bp, Homo sapien
atgagcatcacttagctcattgctttcatcttg

SEQ ID NO: 1020901 - DNA, 33 bp, Homo sapien
tcattgaataatgcaaactagaattatatgaaa

SEQ ID NO: 1020902 - DNA, 33 bp, Homo sapien
tcattgaataatgcaagctagaattatatgaaa

SEQ ID NO: 1020903 - DNA, 33 bp, Homo sapien
gtagtcataaatggcactaggatttttgagtac

SEQ ID NO: 1020904 - DNA, 33 bp, Homo sapien
gtagtcataaatggcattaggatttttgagtac

SEQ ID NO: 1020905 - DNA, 33 bp, Homo sapien
tagcatctatgtatccagataagaatttaaaaa

SEQ ID NO: 1020906 - DNA, 33 bp, Homo sapien
tagcatctatgtatcctgataagaatttaaaaa

SEQ ID NO: 1020907 - DNA, 33 bp, Homo sapien
tatgcctgacatttaaaagaacataaaatcatt

SEQ ID NO: 1020908 - DNA, 33 bp, Homo sapien
tatgcctgacatttaagagaacataaaatcatt

SEQ ID NO: 1020909 - DNA, 33 bp, Homo sapien
tcatagacactgatggaactttagggatacaga

SEQ ID NO: 1020910 - DNA, 33 bp, Homo sapien
tcatagacactgatggtactttagggatacaga

SEQ ID NO: 1020911 - DNA, 33 bp, Homo sapien
aggagcttattggctaagagtgtgtaagaggag

SEQ ID NO: 1020912 - DNA, 33 bp, Homo sapien
aggagcttattggctaggagtgtgtaagaggag

SEQ ID NO: 1020913 - DNA, 33 bp, Homo sapien
attatctcttaagcgcataggaatctctatttg

SEQ ID NO: 1020914 - DNA, 33 bp, Homo sapien
attatctcttaagcgcgtaggaatctctatttg

SEQ ID NO: 1020915 - DNA, 33 bp, Homo sapien
cagtgatagctgtactaagaccatgtagcaatt

SEQ ID NO: 1020916 - DNA, 33 bp, Homo sapien
cagtgatagctgtactgagaccatgtagcaatt

SEQ ID NO: 1020917 - DNA, 33 bp, Homo sapien
gattttgaatcagaatcaaggtctaaaaaaatg

SEQ ID NO: 1020918 - DNA, 33 bp, Homo sapien
gattttgaatcagaattaaggtctaaaaaaatg

SEQ ID NO: 1020919 - DNA, 33 bp, Homo sapien
gctcttttcaagttaacgcagaatagtgacctt

SEQ ID NO: 1020920 - DNA, 33 bp, Homo sapien
gctcttttcaagttaatgcagaatagtgacctt

SEQ ID NO: 1020921 - DNA, 33 bp, Homo sapien
ggctcagacactgtgcactaaactaactaaaca

SEQ ID NO: 1020922 - DNA, 33 bp, Homo sapien
ggctcagacactgtgcgctaaactaactaaaca

SEQ ID NO: 1020923 - DNA, 33 bp, Homo sapien
aattctcccataaaataattcaattcccccctg

SEQ ID NO: 1020924 - DNA, 33 bp, Homo sapien
aattctcccataaaatcattcaattcccccctg

SEQ ID NO: 1020925 - DNA, 33 bp, Homo sapien
ataaattcaattcagcagaacacccaaatttta

SEQ ID NO: 1020926 - DNA, 33 bp, Homo sapien
ataaattcaattcagcggaacacccaaatttta

SEQ ID NO: 1020927 - DNA, 33 bp, Homo sapien
atgtggacttatgttcccctaaggtgagatata

SEQ ID NO: 1020928 - DNA, 33 bp, Homo sapien
atgtggacttatgttctcctaaggtgagatata

SEQ ID NO: 1020929 - DNA, 33 bp, Homo sapien
ggttccaaaagccacaatcataacaactcagaa

SEQ ID NO: 1020930 - DNA, 33 bp, Homo sapien
ggttccaaaagccacagtcataacaactcagaa

SEQ ID NO: 1020931 - DNA, 33 bp, Homo sapien
ctcatggctggaattacctatctcttctctttc

SEQ ID NO: 1020932 - DNA, 33 bp, Homo sapien
ctcatggctggaattatctatctcttctctttc

SEQ ID NO: 1020933 - DNA, 33 bp, Homo sapien
gctctgccaaaactcaaattgagaatgccaaag

SEQ ID NO: 1020934 - DNA, 33 bp, Homo sapien
gctctgccaaaactcagattgagaatgccaaag

SEQ ID NO: 1020935 - DNA, 33 bp, Homo sapien
ttgtatacacctagcaaaggctatattagatgt

SEQ ID NO: 1020936 - DNA, 33 bp, Homo sapien
ttgtatacacctagcacaggctatattagatgt

SEQ ID NO: 1020937 - DNA, 33 bp, Homo sapien
gctccacccctttgcccagacagaagaatcaga

SEQ ID NO: 1020938 - DNA, 33 bp, Homo sapien
gctccacccctttgcctagacagaagaatcaga

SEQ ID NO: 1020939 - DNA, 33 bp, Homo sapien
ggttatggctgccctaaatggcctcagagctgt

SEQ ID NO: 1020940 - DNA, 33 bp, Homo sapien
ggttatggctgccctagatggcctcagagctgt

SEQ ID NO: 1020941 - DNA, 33 bp, Homo sapien
agactccactgtcccactggacttcatttacta

SEQ ID NO: 1020942 - DNA, 33 bp, Homo sapien
agactccactgtcccattggacttcatttacta

SEQ ID NO: 1020943 - DNA, 33 bp, Homo sapien
tatatttgctctgcgacatggagaaattagtta

SEQ ID NO: 1020944 - DNA, 33 bp, Homo sapien
tatatttgctctgcgatatggagaaattagtta

SEQ ID NO: 1020945 - DNA, 33 bp, Homo sapien
tctgcatttacttgacagaaaacgaagttataa

SEQ ID NO: 1020946 - DNA, 33 bp, Homo sapien
tctgcatttacttgacggaaaacgaagttataa

SEQ ID NO: 1020947 - DNA, 33 bp, Homo sapien
acattgtggcctcaagccaagtcagtatttaat

SEQ ID NO: 1020948 - DNA, 33 bp, Homo sapien
acattgtggcctcaagtcaagtcagtatttaat

SEQ ID NO: 1020949 - DNA, 33 bp, Homo sapien
tgagaacttgttagaaatgctgattcataggcc

SEQ ID NO: 1020950 - DNA, 33 bp, Homo sapien
tgagaacttgttagaagtgctgattcataggcc

SEQ ID NO: 1020951 - DNA, 33 bp, Homo sapien
tataggataactgcacactattagtcaggatag

SEQ ID NO: 1020952 - DNA, 33 bp, Homo sapien
tataggataactgcacgctattagtcaggatag

SEQ ID NO: 1020953 - DNA, 33 bp, Homo sapien
ggaaggcaatgtgttccagaatactcaaaattt

SEQ ID NO: 1020954 - DNA, 33 bp, Homo sapien
ggaaggcaatgtgttctagaatactcaaaattt

SEQ ID NO: 1020955 - DNA, 33 bp, Homo sapien
tccaagaacttgagaacaggatgataatgttat

SEQ ID NO: 1020956 - DNA, 33 bp, Homo sapien
tccaagaacttgagaagaggatgataatgttat

SEQ ID NO: 1020957 - DNA, 33 bp, Homo sapien
gtcaaaagtagtgaccactggtggattttttgc

SEQ ID NO: 1020958 - DNA, 33 bp, Homo sapien
gtcaaaagtagtgacccctggtggattttttgc

SEQ ID NO: 1020959 - DNA, 33 bp, Homo sapien
cctcactttttacccaactaggtcattcctcct

SEQ ID NO: 1020960 - DNA, 33 bp, Homo sapien
cctcactttttacccagctaggtcattcctcct

SEQ ID NO: 1020961 - DNA, 33 bp, Homo sapien
gtatcttgtgggtttcaacatctgtttgtcaat

SEQ ID NO: 1020962 - DNA, 33 bp, Homo sapien
gtatcttgtgggtttcgacatctgtttgtcaat

SEQ ID NO: 1020963 - DNA, 33 bp, Homo sapien
actcaacagtttgctacgtaaagtttagtagta

SEQ ID NO: 1020964 - DNA, 33 bp, Homo sapien
actcaacagtttgctatgtaaagtttagtagta

SEQ ID NO: 1020965 - DNA, 33 bp, Homo sapien
ctcactgggcctgagcactgaaagagagggccg

SEQ ID NO: 1020966 - DNA, 33 bp, Homo sapien
ctcactgggcctgagcgctgaaagagagggccg

SEQ ID NO: 1020967 - DNA, 33 bp, Homo sapien
tttagaagctgaagagcatagaaagtgataatg

SEQ ID NO: 1020968 - DNA, 33 bp, Homo sapien
tttagaagctgaagagtatagaaagtgataatg

SEQ ID NO: 1020969 - DNA, 33 bp, Homo sapien
cgcagaggtatcccaacggtcttatttagttca

SEQ ID NO: 1020970 - DNA, 33 bp, Homo sapien
cgcagaggtatcccaatggtcttatttagttca

SEQ ID NO: 1020971 - DNA, 33 bp, Homo sapien
attaaaaagtgtaaaacgccatgaagatgaaca

SEQ ID NO: 1020972 - DNA, 33 bp, Homo sapien
attaaaaagtgtaaaatgccatgaagatgaaca

SEQ ID NO: 1020973 - DNA, 33 bp, Homo sapien
ttagaagacagcgaaactggggaatcttatgta

SEQ ID NO: 1020974 - DNA, 33 bp, Homo sapien
ttagaagacagcgaaattggggaatcttatgta

SEQ ID NO: 1020975 - DNA, 33 bp, Homo sapien
tgttaaggatagagtactacactggatctgtgg

SEQ ID NO: 1020976 - DNA, 33 bp, Homo sapien
tgttaaggatagagtagtacactggatctgtgg

SEQ ID NO: 1020977 - DNA, 33 bp, Homo sapien
acatttgatgactctaagattagacctggagga

SEQ ID NO: 1020978 - DNA, 33 bp, Homo sapien
acatttgatgactctaggattagacctggagga

SEQ ID NO: 1020979 - DNA, 33 bp, Homo sapien
ataatgtaatgataaaacaagggtagagaggca

SEQ ID NO: 1020980 - DNA, 33 bp, Homo sapien
ataatgtaatgataaagcaagggtagagaggca

SEQ ID NO: 1020981 - DNA, 33 bp, Homo sapien
cctattatggggcttcactttgttactgtgtga

SEQ ID NO: 1020982 - DNA, 33 bp, Homo sapien
cctattatggggcttcgctttgttactgtgtga

SEQ ID NO: 1020983 - DNA, 33 bp, Homo sapien
cagcagattttgttgacacataagtggaggtag

SEQ ID NO: 1020984 - DNA, 33 bp, Homo sapien
cagcagattttgttgatacataagtggaggtag

SEQ ID NO: 1020985 - DNA, 33 bp, Homo sapien
agatgttcatttggtacaatccaacccctctgg

SEQ ID NO: 1020986 - DNA, 33 bp, Homo sapien
agatgttcatttggtataatccaacccctctgg

SEQ ID NO: 1020987 - DNA, 33 bp, Homo sapien
tttccctggaaaatacccagaggctttctgtat

SEQ ID NO: 1020988 - DNA, 33 bp, Homo sapien
tttccctggaaaatactcagaggctttctgtat

SEQ ID NO: 1020989 - DNA, 33 bp, Homo sapien
aattgtgagactgatacgtcctttagggccctg

SEQ ID NO: 1020990 - DNA, 33 bp, Homo sapien
aattgtgagactgatatgtcctttagggccctg

SEQ ID NO: 1020991 - DNA, 33 bp, Homo sapien
tctttcaaatgaaaaaatgtataggtgataagc

SEQ ID NO: 1020992 - DNA, 33 bp, Homo sapien
tctttcaaatgaaaaagtgtataggtgataagc

SEQ ID NO: 1020993 - DNA, 33 bp, Homo sapien
gattgcactgaaaatacgtgctagatgtaatta

SEQ ID NO: 1020994 - DNA, 33 bp, Homo sapien
gattgcactgaaaataggtgctagatgtaatta

SEQ ID NO: 1020995 - DNA, 33 bp, Homo sapien
ggaaacaggaggagtaaagaagaatgagtaaat

SEQ ID NO: 1020996 - DNA, 33 bp, Homo sapien
ggaaacaggaggagtacagaagaatgagtaaat

SEQ ID NO: 1020997 - DNA, 33 bp, Homo sapien
gacacaggctataaatgaatcaaagctcatggt

SEQ ID NO: 1020998 - DNA, 33 bp, Homo sapien
gacacaggctataaattaatcaaagctcatggt

SEQ ID NO: 1020999 - DNA, 33 bp, Homo sapien
acctcatattctgcaacgtaaataaaatacgga

SEQ ID NO: 1021000 - DNA, 33 bp, Homo sapien
acctcatattctgcaaggtaaataaaatacgga

SEQ ID NO: 1021001 - DNA, 33 bp, Homo sapien
tgagaaaggtactgtaaattctaaacttatgcc

SEQ ID NO: 1021002 - DNA, 33 bp, Homo sapien
tgagaaaggtactgtacattctaaacttatgcc

SEQ ID NO: 1021003 - DNA, 33 bp, Homo sapien
gagccctggatgctgaataagctggtgaggttc

SEQ ID NO: 1021004 - DNA, 33 bp, Homo sapien
gagccctggatgctgagtaagctggtgaggttc

SEQ ID NO: 1021005 - DNA, 33 bp, Homo sapien
gcctagtgtaaggcaagaaaatgctgatgagat

SEQ ID NO: 1021006 - DNA, 33 bp, Homo sapien
gcctagtgtaaggcaataaaatgctgatgagat

SEQ ID NO: 1021007 - DNA, 33 bp, Homo sapien
agacagatggattactcactgcttttaactctt

SEQ ID NO: 1021008 - DNA, 33 bp, Homo sapien
agacagatggattacttactgcttttaactctt

SEQ ID NO: 1021009 - DNA, 33 bp, Homo sapien
ggccatctaaaatatccacacagggagcattcc

SEQ ID NO: 1021010 - DNA, 33 bp, Homo sapien
ggccatctaaaatatctacacagggagcattcc

SEQ ID NO: 1021011 - DNA, 33 bp, Homo sapien
tgttcccaatgggatacattatgctgaaagatc

SEQ ID NO: 1021012 - DNA, 33 bp, Homo sapien
tgttcccaatgggatatattatgctgaaagatc

SEQ ID NO: 1021013 - DNA, 33 bp, Homo sapien
gaaaataaatacatgaacttcaacctaaacctc

SEQ ID NO: 1021014 - DNA, 33 bp, Homo sapien
gaaaataaatacatgaccttcaacctaaacctc

SEQ ID NO: 1021015 - DNA, 33 bp, Homo sapien
tagagtataattcttacgagtgtgagctctaaa

SEQ ID NO: 1021016 - DNA, 33 bp, Homo sapien
tagagtataattcttatgagtgtgagctctaaa

SEQ ID NO: 1021017 - DNA, 33 bp, Homo sapien
tacaatatacacaatacgtagcgcgcagaaaca

SEQ ID NO: 1021018 - DNA, 33 bp, Homo sapien
tacaatatacacaatatgtagcgcgcagaaaca

SEQ ID NO: 1021019 - DNA, 33 bp, Homo sapien
agtaagaaaagaaacactatcatcagccctaac

SEQ ID NO: 1021020 - DNA, 33 bp, Homo sapien
agtaagaaaagaaacattatcatcagccctaac

SEQ ID NO: 1021021 - DNA, 33 bp, Homo sapien
ttctcctcatgcaaaacaaatacaatgggttcc

SEQ ID NO: 1021022 - DNA, 33 bp, Homo sapien
ttctcctcatgcaaaataaatacaatgggttcc

SEQ ID NO: 1021023 - DNA, 33 bp, Homo sapien
tgagaaaggacatgaaaaattgcaggaaatcac

SEQ ID NO: 1021024 - DNA, 33 bp, Homo sapien
tgagaaaggacatgaagaattgcaggaaatcac

SEQ ID NO: 1021025 - DNA, 33 bp, Homo sapien
acactagcttcaaataaaaaagcagaatgagaa

SEQ ID NO: 1021026 - DNA, 33 bp, Homo sapien
acactagcttcaaatacaaaagcagaatgagaa

SEQ ID NO: 1021027 - DNA, 33 bp, Homo sapien
aatttatgctaaccaccgtcctaagtactttat

SEQ ID NO: 1021028 - DNA, 33 bp, Homo sapien
aatttatgctaaccactgtcctaagtactttat

SEQ ID NO: 1021029 - DNA, 33 bp, Homo sapien
ttaatatttcctaatacgaagattgcagttcct

SEQ ID NO: 1021030 - DNA, 33 bp, Homo sapien
ttaatatttcctaatatgaagattgcagttcct

SEQ ID NO: 1021031 - DNA, 33 bp, Homo sapien
ttgtttcatcactggtaaaatcagggtgctagg

SEQ ID NO: 1021032 - DNA, 33 bp, Homo sapien
ttgtttcatcactggtgaaatcagggtgctagg

SEQ ID NO: 1021033 - DNA, 33 bp, Homo sapien
atagaatttcatggtcaatactcattaaaataa

SEQ ID NO: 1021034 - DNA, 33 bp, Homo sapien
atagaatttcatggtcgatactcattaaaataa

SEQ ID NO: 1021035 - DNA, 33 bp, Homo sapien
tgagatttgaaaagcaaagggtaatgatttcag

SEQ ID NO: 1021036 - DNA, 33 bp, Homo sapien
tgagatttgaaaagcagagggtaatgatttcag

SEQ ID NO: 1021037 - DNA, 33 bp, Homo sapien
tttcattgcagtgcaaactttctatgcaattca

SEQ ID NO: 1021038 - DNA, 33 bp, Homo sapien
tttcattgcagtgcaagctttctatgcaattca

SEQ ID NO: 1021039 - DNA, 33 bp, Homo sapien
taaggaaagaatctaacctgccacttcactact

SEQ ID NO: 1021040 - DNA, 33 bp, Homo sapien
taaggaaagaatctaatctgccacttcactact

SEQ ID NO: 1021041 - DNA, 33 bp, Homo sapien
ttcttgaaaatttttgaacaccattgcttgtct

SEQ ID NO: 1021042 - DNA, 33 bp, Homo sapien
ttcttgaaaatttttggacaccattgcttgtct

SEQ ID NO: 1021043 - DNA, 33 bp, Homo sapien
tccagttaatatcacaacaatcactaccaccca

SEQ ID NO: 1021044 - DNA, 33 bp, Homo sapien
tccagttaatatcacagcaatcactaccaccca

SEQ ID NO: 1021045 - DNA, 33 bp, Homo sapien
cagactgttaaacaagaatgagctgtacatcaa

SEQ ID NO: 1021046 - DNA, 33 bp, Homo sapien
cagactgttaaacaagtatgagctgtacatcaa

SEQ ID NO: 1021047 - DNA, 33 bp, Homo sapien
cttcagcccactccacccacgacgtgcccctct

SEQ ID NO: 1021048 - DNA, 33 bp, Homo sapien
cttcagcccactccactcacgacgtgcccctct

SEQ ID NO: 1021049 - DNA, 33 bp, Homo sapien
gcctgtactgcaccaccgtacttaatcctgaat

SEQ ID NO: 1021050 - DNA, 33 bp, Homo sapien
gcctgtactgcaccactgtacttaatcctgaat

SEQ ID NO: 1021051 - DNA, 33 bp, Homo sapien
ccattgctgaatcaagcaagctccctctcatct

SEQ ID NO: 1021052 - DNA, 33 bp, Homo sapien
ccattgctgaatcaagtaagctccctctcatct

SEQ ID NO: 1021053 - DNA, 33 bp, Homo sapien
tggcaagaatacatagaaactagcaaagcaaac

SEQ ID NO: 1021054 - DNA, 33 bp, Homo sapien
tggcaagaatacataggaactagcaaagcaaac

SEQ ID NO: 1021055 - DNA, 33 bp, Homo sapien
tttaagtgtgcagtaaatgtaatcggaattgca

SEQ ID NO: 1021056 - DNA, 33 bp, Homo sapien
tttaagtgtgcagtaagtgtaatcggaattgca

SEQ ID NO: 1021057 - DNA, 33 bp, Homo sapien
atcaaagagccagttacagaaaaagttctcccc

SEQ ID NO: 1021058 - DNA, 33 bp, Homo sapien
atcaaagagccagttagagaaaaagttctcccc

SEQ ID NO: 1021059 - DNA, 33 bp, Homo sapien
taacatatagcttgtacaaagaatgcctcatga

SEQ ID NO: 1021060 - DNA, 33 bp, Homo sapien
taacatatagcttgtataaagaatgcctcatga

SEQ ID NO: 1021061 - DNA, 33 bp, Homo sapien
cataacaagctgaataccaagtgtcttatctga

SEQ ID NO: 1021062 - DNA, 33 bp, Homo sapien
cataacaagctgaatatcaagtgtcttatctga

SEQ ID NO: 1021063 - DNA, 33 bp, Homo sapien
tgagctaatgtgattacctgtacaacgtcaggt

SEQ ID NO: 1021064 - DNA, 33 bp, Homo sapien
tgagctaatgtgattatctgtacaacgtcaggt

SEQ ID NO: 1021065 - DNA, 33 bp, Homo sapien
ttcgggcattatataccggtgttttggacaaag

SEQ ID NO: 1021066 - DNA, 33 bp, Homo sapien
ttcgggcattatatactggtgttttggacaaag

SEQ ID NO: 1021067 - DNA, 33 bp, Homo sapien
gtagatactccttagacgttccttcgtttttaa

SEQ ID NO: 1021068 - DNA, 33 bp, Homo sapien
gtagatactccttagatgttccttcgtttttaa

SEQ ID NO: 1021069 - DNA, 33 bp, Homo sapien
gttttgaggttatttcccccttctcattgtgta

SEQ ID NO: 1021070 - DNA, 33 bp, Homo sapien
gttttgaggttatttctcccttctcattgtgta

SEQ ID NO: 1021071 - DNA, 33 bp, Homo sapien
tacctccaatactatcaaaacagatcaaaagca

SEQ ID NO: 1021072 - DNA, 33 bp, Homo sapien
tacctccaatactatcgaaacagatcaaaagca

SEQ ID NO: 1021073 - DNA, 33 bp, Homo sapien
tctaggtgattgggaaaagaatacagatgttgt

SEQ ID NO: 1021074 - DNA, 33 bp, Homo sapien
tctaggtgattgggaagagaatacagatgttgt

SEQ ID NO: 1021075 - DNA, 33 bp, Homo sapien
tcactgattttcatcaagagtgtattgaacttt

SEQ ID NO: 1021076 - DNA, 33 bp, Homo sapien
tcactgattttcatcacgagtgtattgaacttt

SEQ ID NO: 1021077 - DNA, 33 bp, Homo sapien
attatctccctgatgccaatgcctgatacaacc

SEQ ID NO: 1021078 - DNA, 33 bp, Homo sapien
attatctccctgatgcgaatgcctgatacaacc

SEQ ID NO: 1021079 - DNA, 33 bp, Homo sapien
gaaacaggactctcaacattgattctacataag

SEQ ID NO: 1021080 - DNA, 33 bp, Homo sapien
gaaacaggactctcaatattgattctacataag

SEQ ID NO: 1021081 - DNA, 33 bp, Homo sapien
caaagtcaaacacagaacagaatgagagaataa

SEQ ID NO: 1021082 - DNA, 33 bp, Homo sapien
caaagtcaaacacagaccagaatgagagaataa

SEQ ID NO: 1021083 - DNA, 33 bp, Homo sapien
tggctggtgaatttggacagtttagataattct

SEQ ID NO: 1021084 - DNA, 33 bp, Homo sapien
tggctggtgaatttgggcagtttagataattct

SEQ ID NO: 1021085 - DNA, 33 bp, Homo sapien
gcaggacgctaacttagccagagacttctgtga

SEQ ID NO: 1021086 - DNA, 33 bp, Homo sapien
gcaggacgctaacttatccagagacttctgtga

SEQ ID NO: 1021087 - DNA, 33 bp, Homo sapien
tcatgtgaaccactaaaatttactgcttatttt

SEQ ID NO: 1021088 - DNA, 33 bp, Homo sapien
tcatgtgaaccactaacatttactgcttatttt

SEQ ID NO: 1021089 - DNA, 33 bp, Homo sapien
aactctttagggtaaaaaaagtgctgtggggga

SEQ ID NO: 1021090 - DNA, 33 bp, Homo sapien
aactctttagggtaaacaaagtgctgtggggga

SEQ ID NO: 1021091 - DNA, 33 bp, Homo sapien
agctcatcttcatgtacaaagcatcagtccaac

SEQ ID NO: 1021092 - DNA, 33 bp, Homo sapien
agctcatcttcatgtataaagcatcagtccaac

SEQ ID NO: 1021093 - DNA, 33 bp, Homo sapien
ctaaagcatagtgaacaaagtaagtgggtgatc

SEQ ID NO: 1021094 - DNA, 33 bp, Homo sapien
ctaaagcatagtgaaccaagtaagtgggtgatc

SEQ ID NO: 1021095 - DNA, 33 bp, Homo sapien
taagctcagacgtaaacgttactgtatatgata

SEQ ID NO: 1021096 - DNA, 33 bp, Homo sapien
taagctcagacgtaaaggttactgtatatgata

SEQ ID NO: 1021097 - DNA, 33 bp, Homo sapien
attctcatgattttaccctcttgtattcattca

SEQ ID NO: 1021098 - DNA, 33 bp, Homo sapien
attctcatgattttactctcttgtattcattca

SEQ ID NO: 1021099 - DNA, 33 bp, Homo sapien
caaatttagaaaaatgaatttggtgatcgcatg

SEQ ID NO: 1021100 - DNA, 33 bp, Homo sapien
caaatttagaaaaatggatttggtgatcgcatg

SEQ ID NO: 1021101 - DNA, 33 bp, Homo sapien
tctcagtaagttgtaagcaaatccactgtgctt

SEQ ID NO: 1021102 - DNA, 33 bp, Homo sapien
tctcagtaagttgtaatcaaatccactgtgctt

SEQ ID NO: 1021103 - DNA, 33 bp, Homo sapien
gtccattccttcttacacactctctacccaact

SEQ ID NO: 1021104 - DNA, 33 bp, Homo sapien
gtccattccttcttacgcactctctacccaact

SEQ ID NO: 1021105 - DNA, 33 bp, Homo sapien
gaacccttttgtgaaccatacatgtgagggatc

SEQ ID NO: 1021106 - DNA, 33 bp, Homo sapien
gaacccttttgtgaactatacatgtgagggatc

SEQ ID NO: 1021107 - DNA, 33 bp, Homo sapien
caaagtccacgtgccaactgtgtagagaacaac

SEQ ID NO: 1021108 - DNA, 33 bp, Homo sapien
caaagtccacgtgccacctgtgtagagaacaac

SEQ ID NO: 1021109 - DNA, 33 bp, Homo sapien
ttataacacttcacagaaaagactgatgacaca

SEQ ID NO: 1021110 - DNA, 33 bp, Homo sapien
ttataacacttcacaggaaagactgatgacaca

SEQ ID NO: 1021111 - DNA, 33 bp, Homo sapien
ggctagattttgcctacgggccttagttagcca

SEQ ID NO: 1021112 - DNA, 33 bp, Homo sapien
ggctagattttgcctatgggccttagttagcca

SEQ ID NO: 1021113 - DNA, 33 bp, Homo sapien
gtttggcttccataataaagtcaacggctaagc

SEQ ID NO: 1021114 - DNA, 33 bp, Homo sapien
gtttggcttccataatcaagtcaacggctaagc

SEQ ID NO: 1021115 - DNA, 33 bp, Homo sapien
aaccaaccaaacaaacaaacctggtatcttggg

SEQ ID NO: 1021116 - DNA, 33 bp, Homo sapien
aaccaaccaaacaaaccaacctggtatcttggg

SEQ ID NO: 1021117 - DNA, 33 bp, Homo sapien
acagtctactgggaaaagtaggtccacattcca

SEQ ID NO: 1021118 - DNA, 33 bp, Homo sapien
acagtctactgggaaaggtaggtccacattcca

SEQ ID NO: 1021119 - DNA, 33 bp, Homo sapien
tttcatggctgtgtaacgattgtgctcaaaatt

SEQ ID NO: 1021120 - DNA, 33 bp, Homo sapien
tttcatggctgtgtaatgattgtgctcaaaatt

SEQ ID NO: 1021121 - DNA, 33 bp, Homo sapien
tgtctttaaaggccaaatatgctttttgtaggc

SEQ ID NO: 1021122 - DNA, 33 bp, Homo sapien
tgtctttaaaggccaagtatgctttttgtaggc

SEQ ID NO: 1021123 - DNA, 33 bp, Homo sapien
actgcctgagtgatgcaatcattcatatgccaa

SEQ ID NO: 1021124 - DNA, 33 bp, Homo sapien
actgcctgagtgatgcgatcattcatatgccaa

SEQ ID NO: 1021125 - DNA, 33 bp, Homo sapien
ttaaatgaatgtcccaaataaagtcacatgagc

SEQ ID NO: 1021126 - DNA, 33 bp, Homo sapien
ttaaatgaatgtcccacataaagtcacatgagc

SEQ ID NO: 1021127 - DNA, 33 bp, Homo sapien
actttacccttgtcaaatatacctccatagaaa

SEQ ID NO: 1021128 - DNA, 33 bp, Homo sapien
actttacccttgtcaagtatacctccatagaaa

SEQ ID NO: 1021129 - DNA, 33 bp, Homo sapien
ccttctcagggtcttcaatccaagaacattgaa

SEQ ID NO: 1021130 - DNA, 33 bp, Homo sapien
ccttctcagggtcttcgatccaagaacattgaa

SEQ ID NO: 1021131 - DNA, 33 bp, Homo sapien
gagccctggtgtgttacaatgtacgtccaacta

SEQ ID NO: 1021132 - DNA, 33 bp, Homo sapien
gagccctggtgtgttataatgtacgtccaacta

SEQ ID NO: 1021133 - DNA, 33 bp, Homo sapien
cattttcttctcttaaccagtccaacttagcca

SEQ ID NO: 1021134 - DNA, 33 bp, Homo sapien
cattttcttctcttaatcagtccaacttagcca

SEQ ID NO: 1021135 - DNA, 33 bp, Homo sapien
taatcagttccttcatcaatcctgtccacacac

SEQ ID NO: 1021136 - DNA, 33 bp, Homo sapien
taatcagttccttcattaatcctgtccacacac

SEQ ID NO: 1021137 - DNA, 33 bp, Homo sapien
ggacagctgttgccacaattatcttgttttcaa

SEQ ID NO: 1021138 - DNA, 33 bp, Homo sapien
ggacagctgttgccacgattatcttgttttcaa

SEQ ID NO: 1021139 - DNA, 33 bp, Homo sapien
gcgatctgcttttgtcaatatgaatgaattctc

SEQ ID NO: 1021140 - DNA, 33 bp, Homo sapien
gcgatctgcttttgtcgatatgaatgaattctc

SEQ ID NO: 1021141 - DNA, 33 bp, Homo sapien
atttgattccacatgactcaaatttagaaaaaa

SEQ ID NO: 1021142 - DNA, 33 bp, Homo sapien
atttgattccacatgattcaaatttagaaaaaa

SEQ ID NO: 1021143 - DNA, 33 bp, Homo sapien
gataatggcaacctcacaagaaacctacccaaa

SEQ ID NO: 1021144 - DNA, 33 bp, Homo sapien
gataatggcaacctcagaagaaacctacccaaa

SEQ ID NO: 1021145 - DNA, 33 bp, Homo sapien
aataagacctacccaacagaactatccaaataa

SEQ ID NO: 1021146 - DNA, 33 bp, Homo sapien
aataagacctacccaatagaactatccaaataa

SEQ ID NO: 1021147 - DNA, 33 bp, Homo sapien
tagatctcctagccaacatagtaaggcaaggaa

SEQ ID NO: 1021148 - DNA, 33 bp, Homo sapien
tagatctcctagccaatatagtaaggcaaggaa

SEQ ID NO: 1021149 - DNA, 33 bp, Homo sapien
attctccagcaacaaaactttaaaatgtttttt

SEQ ID NO: 1021150 - DNA, 33 bp, Homo sapien
attctccagcaacaaagctttaaaatgtttttt

SEQ ID NO: 1021151 - DNA, 33 bp, Homo sapien
aatatttgtagtaaagacccatctgttaaagaa

SEQ ID NO: 1021152 - DNA, 33 bp, Homo sapien
aatatttgtagtaaaggcccatctgttaaagaa

SEQ ID NO: 1021153 - DNA, 33 bp, Homo sapien
tgtgttggcttactgacgttctccagggcaata

SEQ ID NO: 1021154 - DNA, 33 bp, Homo sapien
tgtgttggcttactgatgttctccagggcaata

SEQ ID NO: 1021155 - DNA, 33 bp, Homo sapien
atgtcttatataccagccactttccaggtgctg

SEQ ID NO: 1021156 - DNA, 33 bp, Homo sapien
atgtcttatataccaggcactttccaggtgctg

SEQ ID NO: 1021157 - DNA, 33 bp, Homo sapien
tgtataaagacaagcacagtaataggttttttt

SEQ ID NO: 1021158 - DNA, 33 bp, Homo sapien
tgtataaagacaagcagagtaataggttttttt

SEQ ID NO: 1021159 - DNA, 33 bp, Homo sapien
tttcttttcattgcaaacttactttggttttct

SEQ ID NO: 1021160 - DNA, 33 bp, Homo sapien
tttcttttcattgcaagcttactttggttttct

SEQ ID NO: 1021161 - DNA, 33 bp, Homo sapien
tttttaatagctgtaacgtttaggacacctaga

SEQ ID NO: 1021162 - DNA, 33 bp, Homo sapien
tttttaatagctgtaatgtttaggacacctaga

SEQ ID NO: 1021163 - DNA, 33 bp, Homo sapien
gttctgatgttatacacagcataagtacaggag

SEQ ID NO: 1021164 - DNA, 33 bp, Homo sapien
gttctgatgttatacatagcataagtacaggag

SEQ ID NO: 1021165 - DNA, 33 bp, Homo sapien
tgaaatcggacaaataccaaccaaagtcaattt

SEQ ID NO: 1021166 - DNA, 33 bp, Homo sapien
tgaaatcggacaaatatcaaccaaagtcaattt

SEQ ID NO: 1021167 - DNA, 33 bp, Homo sapien
agtaaaagtgccaaaaagcaacaacaaccatca

SEQ ID NO: 1021168 - DNA, 33 bp, Homo sapien
agtaaaagtgccaaaacgcaacaacaaccatca

SEQ ID NO: 1021169 - DNA, 33 bp, Homo sapien
caaccaaatcagaatcacaactgatgttcaagc

SEQ ID NO: 1021170 - DNA, 33 bp, Homo sapien
caaccaaatcagaatcgcaactgatgttcaagc

SEQ ID NO: 1021171 - DNA, 33 bp, Homo sapien
gatttccttcaggaatgagaacgcattgaagcc

SEQ ID NO: 1021172 - DNA, 33 bp, Homo sapien
gatttccttcaggaattagaacgcattgaagcc

SEQ ID NO: 1021173 - DNA, 33 bp, Homo sapien
tctctgccactcttgaaatcaagccaagcaggt

SEQ ID NO: 1021174 - DNA, 33 bp, Homo sapien
tctctgccactcttgacatcaagccaagcaggt

SEQ ID NO: 1021175 - DNA, 33 bp, Homo sapien
ttaaaaaaattccgttaaaagcatatgatatac

SEQ ID NO: 1021176 - DNA, 33 bp, Homo sapien
ttaaaaaaattccgttgaaagcatatgatatac

SEQ ID NO: 1021177 - DNA, 33 bp, Homo sapien
aaggacttaagcgcagcaaagccaatttctctt

SEQ ID NO: 1021178 - DNA, 33 bp, Homo sapien
aaggacttaagcgcaggaaagccaatttctctt

SEQ ID NO: 1021179 - DNA, 33 bp, Homo sapien
tacctggaataaatgaacaaatgaagtctacct

SEQ ID NO: 1021180 - DNA, 33 bp, Homo sapien
tacctggaataaatgaccaaatgaagtctacct

SEQ ID NO: 1021181 - DNA, 33 bp, Homo sapien
aaaatagtaaactgaaggatcatgaaaataaga

SEQ ID NO: 1021182 - DNA, 33 bp, Homo sapien
aaaatagtaaactgaatgatcatgaaaataaga

SEQ ID NO: 1021183 - DNA, 33 bp, Homo sapien
ctctgaactgtctgtgcaatatcaaggtacaga

SEQ ID NO: 1021184 - DNA, 33 bp, Homo sapien
ctctgaactgtctgtgtaatatcaaggtacaga

SEQ ID NO: 1021185 - DNA, 33 bp, Homo sapien
aagataggaaaagaacacttcatcttcttagaa

SEQ ID NO: 1021186 - DNA, 33 bp, Homo sapien
aagataggaaaagaacccttcatcttcttagaa

SEQ ID NO: 1021187 - DNA, 33 bp, Homo sapien
actctaaaacatttgacgattactccatttcct

SEQ ID NO: 1021188 - DNA, 33 bp, Homo sapien
actctaaaacatttgatgattactccatttcct

SEQ ID NO: 1021189 - DNA, 33 bp, Homo sapien
tgtgagagcaacatagcaaccaaaaaaatataa

SEQ ID NO: 1021190 - DNA, 33 bp, Homo sapien
tgtgagagcaacataggaaccaaaaaaatataa

SEQ ID NO: 1021191 - DNA, 33 bp, Homo sapien
gactacggactactcaataatttatccagctga

SEQ ID NO: 1021192 - DNA, 33 bp, Homo sapien
gactacggactactcagtaatttatccagctga

SEQ ID NO: 1021193 - DNA, 33 bp, Homo sapien
gtgtgtaatccgtaaactgatggctggtttttg

SEQ ID NO: 1021194 - DNA, 33 bp, Homo sapien
gtgtgtaatccgtaaattgatggctggtttttg

SEQ ID NO: 1021195 - DNA, 33 bp, Homo sapien
ctaaagcattctgaaaggtttgtacctgtttat

SEQ ID NO: 1021196 - DNA, 33 bp, Homo sapien
ctaaagcattctgaaatgtttgtacctgtttat

SEQ ID NO: 1021197 - DNA, 33 bp, Homo sapien
ttttgagaagtgacaacacaaaaaaagggacgt

SEQ ID NO: 1021198 - DNA, 33 bp, Homo sapien
ttttgagaagtgacaatacaaaaaaagggacgt

SEQ ID NO: 1021199 - DNA, 33 bp, Homo sapien
acagcataggacctccaagttgcctgtctcatt

SEQ ID NO: 1021200 - DNA, 33 bp, Homo sapien
acagcataggacctcccagttgcctgtctcatt

SEQ ID NO: 1021201 - DNA, 33 bp, Homo sapien
ctgatatatgctaacaccgagaaccaccatcat

SEQ ID NO: 1021202 - DNA, 33 bp, Homo sapien
ctgatatatgctaacatcgagaaccaccatcat

SEQ ID NO: 1021203 - DNA, 33 bp, Homo sapien
ttcctcacagcacttaaaatcactagatatttt

SEQ ID NO: 1021204 - DNA, 33 bp, Homo sapien
ttcctcacagcacttacaatcactagatatttt

SEQ ID NO: 1021205 - DNA, 33 bp, Homo sapien
gcctattttagggaagaatggctttgtgaagaa

SEQ ID NO: 1021206 - DNA, 33 bp, Homo sapien
gcctattttagggaagtatggctttgtgaagaa

SEQ ID NO: 1021207 - DNA, 33 bp, Homo sapien
ccaggatctgctatagaaaataatcatcttgga

SEQ ID NO: 1021208 - DNA, 33 bp, Homo sapien
ccaggatctgctataggaaataatcatcttgga

SEQ ID NO: 1021209 - DNA, 33 bp, Homo sapien
agtgatttcaagaatccaactaaagcagagaag

SEQ ID NO: 1021210 - DNA, 33 bp, Homo sapien
agtgatttcaagaatctaactaaagcagagaag

SEQ ID NO: 1021211 - DNA, 33 bp, Homo sapien
ataagcatgtctgctacaagcattatgatttcc

SEQ ID NO: 1021212 - DNA, 33 bp, Homo sapien
ataagcatgtctgctataagcattatgatttcc

SEQ ID NO: 1021213 - DNA, 33 bp, Homo sapien
gcagtaattgataaaacggcaaggctcactgag

SEQ ID NO: 1021214 - DNA, 33 bp, Homo sapien
gcagtaattgataaaatggcaaggctcactgag

SEQ ID NO: 1021215 - DNA, 33 bp, Homo sapien
gcagaatgaaaatatacagtagaaaggagtggg

SEQ ID NO: 1021216 - DNA, 33 bp, Homo sapien
gcagaatgaaaatatagagtagaaaggagtggg

SEQ ID NO: 1021217 - DNA, 33 bp, Homo sapien
agacaaagatacccacacttgcaaagcttacat

SEQ ID NO: 1021218 - DNA, 33 bp, Homo sapien
agacaaagatacccacgcttgcaaagcttacat

SEQ ID NO: 1021219 - DNA, 33 bp, Homo sapien
cattatctcttccttcactagaatgtaagcttt

SEQ ID NO: 1021220 - DNA, 33 bp, Homo sapien
cattatctcttccttcgctagaatgtaagcttt

SEQ ID NO: 1021221 - DNA, 33 bp, Homo sapien
tttggcaaaatctgatcagcttgaattcaaaac

SEQ ID NO: 1021222 - DNA, 33 bp, Homo sapien
tttggcaaaatctgattagcttgaattcaaaac

SEQ ID NO: 1021223 - DNA, 33 bp, Homo sapien
caatagatgataataaagtcccatcacctttac

SEQ ID NO: 1021224 - DNA, 33 bp, Homo sapien
caatagatgataataatgtcccatcacctttac

SEQ ID NO: 1021225 - DNA, 33 bp, Homo sapien
atactgagagtatgtagagaaaggagggaaaaa

SEQ ID NO: 1021226 - DNA, 33 bp, Homo sapien
atactgagagtatgtatagaaaggagggaaaaa

SEQ ID NO: 1021227 - DNA, 33 bp, Homo sapien
caagaatggacctccacataaacaatagtctcc

SEQ ID NO: 1021228 - DNA, 33 bp, Homo sapien
caagaatggacctccatataaacaatagtctcc

SEQ ID NO: 1021229 - DNA, 33 bp, Homo sapien
tgcaaggagagtgtgaagtcttttccttagacc

SEQ ID NO: 1021230 - DNA, 33 bp, Homo sapien
tgcaaggagagtgtgaggtcttttccttagacc

SEQ ID NO: 1021231 - DNA, 33 bp, Homo sapien
tttagtctgaattacaaggtttttacctaaaag

SEQ ID NO: 1021232 - DNA, 33 bp, Homo sapien
tttagtctgaattacacggtttttacctaaaag

SEQ ID NO: 1021233 - DNA, 33 bp, Homo sapien
agttttgaattcatacaatgctttataccaaaa

SEQ ID NO: 1021234 - DNA, 33 bp, Homo sapien
agttttgaattcatacgatgctttataccaaaa

SEQ ID NO: 1021235 - DNA, 33 bp, Homo sapien
acaaaaacagcgactgaaaatcctaaagagttg

SEQ ID NO: 1021236 - DNA, 33 bp, Homo sapien
acaaaaacagcgactggaaatcctaaagagttg

SEQ ID NO: 1021237 - DNA, 33 bp, Homo sapien
gtaaagctttacataaaccactaggaactgtga

SEQ ID NO: 1021238 - DNA, 33 bp, Homo sapien
gtaaagctttacataacccactaggaactgtga

SEQ ID NO: 1021239 - DNA, 33 bp, Homo sapien
tgttttttagcttccaaatatgtgaggacatgt

SEQ ID NO: 1021240 - DNA, 33 bp, Homo sapien
tgttttttagcttccagatatgtgaggacatgt

SEQ ID NO: 1021241 - DNA, 33 bp, Homo sapien
ttttctactatttctaagcagagtccactgcta

SEQ ID NO: 1021242 - DNA, 33 bp, Homo sapien
ttttctactatttctaggcagagtccactgcta

SEQ ID NO: 1021243 - DNA, 33 bp, Homo sapien
atatactgctctagggaatggcaatttaaaata

SEQ ID NO: 1021244 - DNA, 33 bp, Homo sapien
atatactgctctagggtatggcaatttaaaata

SEQ ID NO: 1021245 - DNA, 33 bp, Homo sapien
ggttaacgtaagacgacagcacagaaaggagaa

SEQ ID NO: 1021246 - DNA, 33 bp, Homo sapien
ggttaacgtaagacgagagcacagaaaggagaa

SEQ ID NO: 1021247 - DNA, 33 bp, Homo sapien
gaactttatggcttggaagagtaggtcacacat

SEQ ID NO: 1021248 - DNA, 33 bp, Homo sapien
gaactttatggcttgggagagtaggtcacacat

SEQ ID NO: 1021249 - DNA, 33 bp, Homo sapien
gcccatgaaactcagacggacaggaaggctgct

SEQ ID NO: 1021250 - DNA, 33 bp, Homo sapien
gcccatgaaactcagatggacaggaaggctgct

SEQ ID NO: 1021251 - DNA, 33 bp, Homo sapien
attaattgagtagaacacagtcaaagcattgca

SEQ ID NO: 1021252 - DNA, 33 bp, Homo sapien
attaattgagtagaacgcagtcaaagcattgca

SEQ ID NO: 1021253 - DNA, 33 bp, Homo sapien
atcctgaggaaaccaaaaggtgatttcctttgc

SEQ ID NO: 1021254 - DNA, 33 bp, Homo sapien
atcctgaggaaaccaagaggtgatttcctttgc

SEQ ID NO: 1021255 - DNA, 33 bp, Homo sapien
tgcagtatatttggtacggctaacaatcctata

SEQ ID NO: 1021256 - DNA, 33 bp, Homo sapien
tgcagtatatttggtatggctaacaatcctata

SEQ ID NO: 1021257 - DNA, 33 bp, Homo sapien
gtaggactattgcacacatatgtctgtggtttt

SEQ ID NO: 1021258 - DNA, 33 bp, Homo sapien
gtaggactattgcacatatatgtctgtggtttt

SEQ ID NO: 1021259 - DNA, 33 bp, Homo sapien
tcagttggctaccacaagaaatactagcttgag

SEQ ID NO: 1021260 - DNA, 33 bp, Homo sapien
tcagttggctaccacatgaaatactagcttgag

SEQ ID NO: 1021261 - DNA, 33 bp, Homo sapien
cagtgatacttaatatcagttggatacagccgg

SEQ ID NO: 1021262 - DNA, 33 bp, Homo sapien
cagtgatacttaatatgagttggatacagccgg

SEQ ID NO: 1021263 - DNA, 33 bp, Homo sapien
tcttgactacatctgaaaagaccctattttcaa

SEQ ID NO: 1021264 - DNA, 33 bp, Homo sapien
tcttgactacatctgagaagaccctattttcaa

SEQ ID NO: 1021265 - DNA, 33 bp, Homo sapien
ggttactgataataaactgagactgggtttatg

SEQ ID NO: 1021266 - DNA, 33 bp, Homo sapien
ggttactgataataaattgagactgggtttatg

SEQ ID NO: 1021267 - DNA, 33 bp, Homo sapien
aggcagctgtttgcaacccaagaagaggtccca

SEQ ID NO: 1021268 - DNA, 33 bp, Homo sapien
aggcagctgtttgcaagccaagaagaggtccca

SEQ ID NO: 1021269 - DNA, 33 bp, Homo sapien
gtaaataaatgtggcacaggaagaattaataag

SEQ ID NO: 1021270 - DNA, 33 bp, Homo sapien
gtaaataaatgtggcataggaagaattaataag

SEQ ID NO: 1021271 - DNA, 33 bp, Homo sapien
tcaataattccatctccacttagaaatgaaatg

SEQ ID NO: 1021272 - DNA, 33 bp, Homo sapien
tcaataattccatctcgacttagaaatgaaatg

SEQ ID NO: 1021273 - DNA, 33 bp, Homo sapien
tattgagtgatcattaacatctcacatcctgcc

SEQ ID NO: 1021274 - DNA, 33 bp, Homo sapien
tattgagtgatcattagcatctcacatcctgcc

SEQ ID NO: 1021275 - DNA, 33 bp, Homo sapien
tgaggggtgaaggcaaagatcaagaatcccggg

SEQ ID NO: 1021276 - DNA, 33 bp, Homo sapien
tgaggggtgaaggcaaggatcaagaatcccggg

SEQ ID NO: 1021277 - DNA, 33 bp, Homo sapien
caccagtttgcccccactgaatgtcggtttagc

SEQ ID NO: 1021278 - DNA, 33 bp, Homo sapien
caccagtttgcccccattgaatgtcggtttagc

SEQ ID NO: 1021279 - DNA, 33 bp, Homo sapien
tgacatttgcattatccgaggggcacactggtc

SEQ ID NO: 1021280 - DNA, 33 bp, Homo sapien
tgacatttgcattatctgaggggcacactggtc

SEQ ID NO: 1021281 - DNA, 33 bp, Homo sapien
acattaatattgtcgaacattgcattcccaata

SEQ ID NO: 1021282 - DNA, 33 bp, Homo sapien
acattaatattgtcgaccattgcattcccaata

SEQ ID NO: 1021283 - DNA, 33 bp, Homo sapien
tcatattgacttccaaagctttaggtaacctat

SEQ ID NO: 1021284 - DNA, 33 bp, Homo sapien
tcatattgacttccaaggctttaggtaacctat

SEQ ID NO: 1021285 - DNA, 33 bp, Homo sapien
aaatatagctaaaagacaccaactcttgaaagc

SEQ ID NO: 1021286 - DNA, 33 bp, Homo sapien
aaatatagctaaaagataccaactcttgaaagc

SEQ ID NO: 1021287 - DNA, 33 bp, Homo sapien
ggaaaacttctccaaaaatctcacagtaaccct

SEQ ID NO: 1021288 - DNA, 33 bp, Homo sapien
ggaaaacttctccaaagatctcacagtaaccct

SEQ ID NO: 1021289 - DNA, 33 bp, Homo sapien
ggaattgtatgtgcaaagatatagaggcacaaa

SEQ ID NO: 1021290 - DNA, 33 bp, Homo sapien
ggaattgtatgtgcaaggatatagaggcacaaa

SEQ ID NO: 1021291 - DNA, 33 bp, Homo sapien
aaaaaaaatccccaacaagatggcttatcatct

SEQ ID NO: 1021292 - DNA, 33 bp, Homo sapien
aaaaaaaatccccaactagatggcttatcatct

SEQ ID NO: 1021293 - DNA, 33 bp, Homo sapien
aaagcaagcagcagaaaaagattacggttgaat

SEQ ID NO: 1021294 - DNA, 33 bp, Homo sapien
aaagcaagcagcagaagaagattacggttgaat

SEQ ID NO: 1021295 - DNA, 33 bp, Homo sapien
ttaaaaaatgaggttagagttttcatctgtttt

SEQ ID NO: 1021296 - DNA, 33 bp, Homo sapien
ttaaaaaatgaggttatagttttcatctgtttt

SEQ ID NO: 1021297 - DNA, 33 bp, Homo sapien
acctgtttttctagtcgcatctccaatgtttag

SEQ ID NO: 1021298 - DNA, 33 bp, Homo sapien
acctgtttttctagtctcatctccaatgtttag

SEQ ID NO: 1021299 - DNA, 33 bp, Homo sapien
ctcctgtctacgtctcaaactgcacgttcccgt

SEQ ID NO: 1021300 - DNA, 33 bp, Homo sapien
ctcctgtctacgtctccaactgcacgttcccgt

SEQ ID NO: 1021301 - DNA, 33 bp, Homo sapien
tcaactctcaactagacgtagatacccctgtct

SEQ ID NO: 1021302 - DNA, 33 bp, Homo sapien
tcaactctcaactagatgtagatacccctgtct

SEQ ID NO: 1021303 - DNA, 33 bp, Homo sapien
gacagaacatagcgtcaacaccttcaacatggg

SEQ ID NO: 1021304 - DNA, 33 bp, Homo sapien
gacagaacatagcgtcgacaccttcaacatggg

SEQ ID NO: 1021305 - DNA, 33 bp, Homo sapien
ctgagctttcaacatcagacattcaggtggctt

SEQ ID NO: 1021306 - DNA, 33 bp, Homo sapien
ctgagctttcaacatcggacattcaggtggctt

SEQ ID NO: 1021307 - DNA, 33 bp, Homo sapien
cctaactatttatgcccaggttgctgatgaaga

SEQ ID NO: 1021308 - DNA, 33 bp, Homo sapien
cctaactatttatgcctaggttgctgatgaaga

SEQ ID NO: 1021309 - DNA, 33 bp, Homo sapien
cagcagtggggccttacaagccaggtcaacctg

SEQ ID NO: 1021310 - DNA, 33 bp, Homo sapien
cagcagtggggccttataagccaggtcaacctg

SEQ ID NO: 1021311 - DNA, 33 bp, Homo sapien
gagacagcagtgggaacgcagagaagtggaggg

SEQ ID NO: 1021312 - DNA, 33 bp, Homo sapien
gagacagcagtgggaatgcagagaagtggaggg

SEQ ID NO: 1021313 - DNA, 33 bp, Homo sapien
ttatcctttcaaaatccaaatatccaagtatcc

SEQ ID NO: 1021314 - DNA, 33 bp, Homo sapien
ttatcctttcaaaatcgaaatatccaagtatcc

SEQ ID NO: 1021315 - DNA, 33 bp, Homo sapien
aatatcgcctgttgaacatggggatggatactt

SEQ ID NO: 1021316 - DNA, 33 bp, Homo sapien
aatatcgcctgttgaatatggggatggatactt

SEQ ID NO: 1021317 - DNA, 33 bp, Homo sapien
ccatattctcatcagaacatttgttttcagaag

SEQ ID NO: 1021318 - DNA, 33 bp, Homo sapien
ccatattctcatcagatcatttgttttcagaag

SEQ ID NO: 1021319 - DNA, 33 bp, Homo sapien
tgttccacattaagtcaactgctggatcaccgg

SEQ ID NO: 1021320 - DNA, 33 bp, Homo sapien
tgttccacattaagtcgactgctggatcaccgg

SEQ ID NO: 1021321 - DNA, 33 bp, Homo sapien
aattgtatgcagaatacatcaagaattcctaca

SEQ ID NO: 1021322 - DNA, 33 bp, Homo sapien
aattgtatgcagaatatatcaagaattcctaca

SEQ ID NO: 1021323 - DNA, 33 bp, Homo sapien
tttccatgtatcagaaacacaacaaacccacaa

SEQ ID NO: 1021324 - DNA, 33 bp, Homo sapien
tttccatgtatcagaatcacaacaaacccacaa

SEQ ID NO: 1021325 - DNA, 33 bp, Homo sapien
cttgagttgttcaaagaaactgattacatcttt

SEQ ID NO: 1021326 - DNA, 33 bp, Homo sapien
cttgagttgttcaaagcaactgattacatcttt

SEQ ID NO: 1021327 - DNA, 33 bp, Homo sapien
aggttttaagtttagcagaggactagagaactg

SEQ ID NO: 1021328 - DNA, 33 bp, Homo sapien
aggttttaagtttagccgaggactagagaactg

SEQ ID NO: 1021329 - DNA, 33 bp, Homo sapien
tctctcagctcttccacggggtgtggcaatttg

SEQ ID NO: 1021330 - DNA, 33 bp, Homo sapien
tctctcagctcttccagggggtgtggcaatttg

SEQ ID NO: 1021331 - DNA, 33 bp, Homo sapien
acctgattgatgatcccgagcctgttttctaga

SEQ ID NO: 1021332 - DNA, 33 bp, Homo sapien
acctgattgatgatcctgagcctgttttctaga

SEQ ID NO: 1021333 - DNA, 33 bp, Homo sapien
gaatccttgtgctcacactttcataaggacttg

SEQ ID NO: 1021334 - DNA, 33 bp, Homo sapien
gaatccttgtgctcacgctttcataaggacttg

SEQ ID NO: 1021335 - DNA, 33 bp, Homo sapien
atcctcagtggttcccaaaactggcataatctt

SEQ ID NO: 1021336 - DNA, 33 bp, Homo sapien
atcctcagtggttcccgaaactggcataatctt

SEQ ID NO: 1021337 - DNA, 33 bp, Homo sapien
attggtcagcaaaacaaccatacctacagcaag

SEQ ID NO: 1021338 - DNA, 33 bp, Homo sapien
attggtcagcaaaacatccatacctacagcaag

SEQ ID NO: 1021339 - DNA, 33 bp, Homo sapien
catgaccttttgttgaaaactagcttaaatagt

SEQ ID NO: 1021340 - DNA, 33 bp, Homo sapien
catgaccttttgttgacaactagcttaaatagt

SEQ ID NO: 1021341 - DNA, 33 bp, Homo sapien
tttcactttcctcttccaggggcaaaggctgat

SEQ ID NO: 1021342 - DNA, 33 bp, Homo sapien
tttcactttcctcttctaggggcaaaggctgat

SEQ ID NO: 1021343 - DNA, 33 bp, Homo sapien
ggaaaattttttgcccaatggtcacagattaaa

SEQ ID NO: 1021344 - DNA, 33 bp, Homo sapien
ggaaaattttttgccccatggtcacagattaaa

SEQ ID NO: 1021345 - DNA, 33 bp, Homo sapien
ctgtaagaacttcatgaaataatacaaatacaa

SEQ ID NO: 1021346 - DNA, 33 bp, Homo sapien
ctgtaagaacttcatggaataatacaaatacaa

SEQ ID NO: 1021347 - DNA, 33 bp, Homo sapien
gagtattacctgaaagcctggatacctgtcacc

SEQ ID NO: 1021348 - DNA, 33 bp, Homo sapien
gagtattacctgaaaggctggatacctgtcacc

SEQ ID NO: 1021349 - DNA, 33 bp, Homo sapien
tggcaatctattttaaacagccctgcagctgat

SEQ ID NO: 1021350 - DNA, 33 bp, Homo sapien
tggcaatctattttaaccagccctgcagctgat

SEQ ID NO: 1021351 - DNA, 33 bp, Homo sapien
cctgaggagtattagacgacttatttctttctt

SEQ ID NO: 1021352 - DNA, 33 bp, Homo sapien
cctgaggagtattagatgacttatttctttctt

SEQ ID NO: 1021353 - DNA, 33 bp, Homo sapien
ctgactttgaattacgacaattaaagcaggtga

SEQ ID NO: 1021354 - DNA, 33 bp, Homo sapien
ctgactttgaattacggcaattaaagcaggtga

SEQ ID NO: 1021355 - DNA, 33 bp, Homo sapien
gtgacaagcgggagcccgaaaacacacctttga

SEQ ID NO: 1021356 - DNA, 33 bp, Homo sapien
gtgacaagcgggagcctgaaaacacacctttga

SEQ ID NO: 1021357 - DNA, 33 bp, Homo sapien
ttcaaaatcctgggcaactggtacctccattct

SEQ ID NO: 1021358 - DNA, 33 bp, Homo sapien
ttcaaaatcctgggcagctggtacctccattct

SEQ ID NO: 1021359 - DNA, 33 bp, Homo sapien
agcaaattttgcaaaccgctccttttataagct

SEQ ID NO: 1021360 - DNA, 33 bp, Homo sapien
agcaaattttgcaaactgctccttttataagct

SEQ ID NO: 1021361 - DNA, 33 bp, Homo sapien
cctcagacaagtaaaacagcaggaaggatccaa

SEQ ID NO: 1021362 - DNA, 33 bp, Homo sapien
cctcagacaagtaaaatagcaggaaggatccaa

SEQ ID NO: 1021363 - DNA, 33 bp, Homo sapien
tatccctccttttttcaccatagtcactacgta

SEQ ID NO: 1021364 - DNA, 33 bp, Homo sapien
tatccctccttttttcgccatagtcactacgta

SEQ ID NO: 1021365 - DNA, 33 bp, Homo sapien
ctcgatattccacaacaacaagcacaaggggtg

SEQ ID NO: 1021366 - DNA, 33 bp, Homo sapien
ctcgatattccacaacgacaagcacaaggggtg

SEQ ID NO: 1021367 - DNA, 33 bp, Homo sapien
cacagagtcattaaaactgtacttagcacgtct

SEQ ID NO: 1021368 - DNA, 33 bp, Homo sapien
cacagagtcattaaaattgtacttagcacgtct

SEQ ID NO: 1021369 - DNA, 33 bp, Homo sapien
tcagagcgctaaataaaactacctggatctttt

SEQ ID NO: 1021370 - DNA, 33 bp, Homo sapien
tcagagcgctaaataagactacctggatctttt

SEQ ID NO: 1021371 - DNA, 33 bp, Homo sapien
ttggtttttcaaggatgagactaaacatcttag

SEQ ID NO: 1021372 - DNA, 33 bp, Homo sapien
ttggtttttcaaggattagactaaacatcttag

SEQ ID NO: 1021373 - DNA, 33 bp, Homo sapien
taaatttgctagatgaagttagtagttggaaac

SEQ ID NO: 1021374 - DNA, 33 bp, Homo sapien
taaatttgctagatgatgttagtagttggaaac

SEQ ID NO: 1021375 - DNA, 33 bp, Homo sapien
cactgattcacaaatcaaaagttaagataacca

SEQ ID NO: 1021376 - DNA, 33 bp, Homo sapien
cactgattcacaaatccaaagttaagataacca

SEQ ID NO: 1021377 - DNA, 33 bp, Homo sapien
acttctggccatccacagtataaaattctcttt

SEQ ID NO: 1021378 - DNA, 33 bp, Homo sapien
acttctggccatccacggtataaaattctcttt

SEQ ID NO: 1021379 - DNA, 33 bp, Homo sapien
ttttgtgaataccatgacaagtaatcaaatgca

SEQ ID NO: 1021380 - DNA, 33 bp, Homo sapien
ttttgtgaataccatgccaagtaatcaaatgca

SEQ ID NO: 1021381 - DNA, 33 bp, Homo sapien
cattgcggcaacttatgaagctctacattgtta

SEQ ID NO: 1021382 - DNA, 33 bp, Homo sapien
cattgcggcaacttattaagctctacattgtta

SEQ ID NO: 1021383 - DNA, 33 bp, Homo sapien
atgatcagataatttgcatttgggctttgaaag

SEQ ID NO: 1021384 - DNA, 33 bp, Homo sapien
atgatcagataatttgtatttgggctttgaaag

SEQ ID NO: 1021385 - DNA, 33 bp, Homo sapien
acagaatatccagataaacaccatgtaagaatt

SEQ ID NO: 1021386 - DNA, 33 bp, Homo sapien
acagaatatccagatagacaccatgtaagaatt

SEQ ID NO: 1021387 - DNA, 33 bp, Homo sapien
tgtgctagtgagctacagcacgtgatctgacta

SEQ ID NO: 1021388 - DNA, 33 bp, Homo sapien
tgtgctagtgagctacggcacgtgatctgacta

SEQ ID NO: 1021389 - DNA, 33 bp, Homo sapien
ggaggggaccaaacaccgtgatatggaaagagt

SEQ ID NO: 1021390 - DNA, 33 bp, Homo sapien
ggaggggaccaaacactgtgatatggaaagagt

SEQ ID NO: 1021391 - DNA, 33 bp, Homo sapien
ggtccaataattttccagacagactctccactt

SEQ ID NO: 1021392 - DNA, 33 bp, Homo sapien
ggtccaataattttccggacagactctccactt

SEQ ID NO: 1021393 - DNA, 33 bp, Homo sapien
aaggaccatctagtccaaaatgtcaagaaccaa

SEQ ID NO: 1021394 - DNA, 33 bp, Homo sapien
aaggaccatctagtccgaaatgtcaagaaccaa

SEQ ID NO: 1021395 - DNA, 33 bp, Homo sapien
cccacagagtggttacacagtaaattagtcaat

SEQ ID NO: 1021396 - DNA, 33 bp, Homo sapien
cccacagagtggttacgcagtaaattagtcaat

SEQ ID NO: 1021397 - DNA, 33 bp, Homo sapien
ttcactgaacagataacgtggtatatgagagtc

SEQ ID NO: 1021398 - DNA, 33 bp, Homo sapien
ttcactgaacagataatgtggtatatgagagtc

SEQ ID NO: 1021399 - DNA, 33 bp, Homo sapien
gaatataaagcgaagaccgatgtcgtgcaacat

SEQ ID NO: 1021400 - DNA, 33 bp, Homo sapien
gaatataaagcgaagatcgatgtcgtgcaacat

SEQ ID NO: 1021401 - DNA, 33 bp, Homo sapien
ttgtccattttgccagcaatcaacctctaccaa

SEQ ID NO: 1021402 - DNA, 33 bp, Homo sapien
ttgtccattttgccaggaatcaacctctaccaa

SEQ ID NO: 1021403 - DNA, 33 bp, Homo sapien
ccagtatacagcacacacattgttcatcgaaaa

SEQ ID NO: 1021404 - DNA, 33 bp, Homo sapien
ccagtatacagcacacgcattgttcatcgaaaa

SEQ ID NO: 1021405 - DNA, 33 bp, Homo sapien
tgtactttctaacaaccaatgcgagcacttcaa

SEQ ID NO: 1021406 - DNA, 33 bp, Homo sapien
tgtactttctaacaacgaatgcgagcacttcaa

SEQ ID NO: 1021407 - DNA, 33 bp, Homo sapien
tttgcttatcgtattgcaaagtattaactattt

SEQ ID NO: 1021408 - DNA, 33 bp, Homo sapien
tttgcttatcgtattggaaagtattaactattt

SEQ ID NO: 1021409 - DNA, 33 bp, Homo sapien
ctcaatgtgatagccacagaagaaataagtttg

SEQ ID NO: 1021410 - DNA, 33 bp, Homo sapien
ctcaatgtgatagccatagaagaaataagtttg

SEQ ID NO: 1021411 - DNA, 33 bp, Homo sapien
cccctgtttgtaaaaactcagttggtcatttcc

SEQ ID NO: 1021412 - DNA, 33 bp, Homo sapien
cccctgtttgtaaaaagtcagttggtcatttcc

SEQ ID NO: 1021413 - DNA, 33 bp, Homo sapien
ccaaatcaactgggcaactagtaactactactt

SEQ ID NO: 1021414 - DNA, 33 bp, Homo sapien
ccaaatcaactgggcagctagtaactactactt

SEQ ID NO: 1021415 - DNA, 33 bp, Homo sapien
aacacgaaagaaaacacaggtctaaaattctaa

SEQ ID NO: 1021416 - DNA, 33 bp, Homo sapien
aacacgaaagaaaacagaggtctaaaattctaa

SEQ ID NO: 1021417 - DNA, 33 bp, Homo sapien
atttaccctaattcccaccttctatgctcattc

SEQ ID NO: 1021418 - DNA, 33 bp, Homo sapien
atttaccctaattcccgccttctatgctcattc

SEQ ID NO: 1021419 - DNA, 33 bp, Homo sapien
tttctgagcactgtccaattcatttatttaatt

SEQ ID NO: 1021420 - DNA, 33 bp, Homo sapien
tttctgagcactgtccgattcatttatttaatt

SEQ ID NO: 1021421 - DNA, 33 bp, Homo sapien
cctatcgagcacttgaaatacaaccagcacaac

SEQ ID NO: 1021422 - DNA, 33 bp, Homo sapien
cctatcgagcacttgacatacaaccagcacaac

SEQ ID NO: 1021423 - DNA, 33 bp, Homo sapien
cctcaagcaaatctctgaattctttgagcctta

SEQ ID NO: 1021424 - DNA, 33 bp, Homo sapien
cctcaagcaaatctcttaattctttgagcctta

SEQ ID NO: 1021425 - DNA, 33 bp, Homo sapien
caaccaagcaaactaccgagattttcactgaca

SEQ ID NO: 1021426 - DNA, 33 bp, Homo sapien
caaccaagcaaactactgagattttcactgaca

SEQ ID NO: 1021427 - DNA, 33 bp, Homo sapien
ttggcattggatcgcacgaacaaatggaaattt

SEQ ID NO: 1021428 - DNA, 33 bp, Homo sapien
ttggcattggatcgcatgaacaaatggaaattt

SEQ ID NO: 1021429 - DNA, 33 bp, Homo sapien
tcttttacctccatccaagagtttcaagattac

SEQ ID NO: 1021430 - DNA, 33 bp, Homo sapien
tcttttacctccatccgagagtttcaagattac

SEQ ID NO: 1021431 - DNA, 33 bp, Homo sapien
ttctctagcagctaaacaaatgctagtcttgag

SEQ ID NO: 1021432 - DNA, 33 bp, Homo sapien
ttctctagcagctaaagaaatgctagtcttgag

SEQ ID NO: 1021433 - DNA, 33 bp, Homo sapien
atatacagtggggctacatatacttagtaacag

SEQ ID NO: 1021434 - DNA, 33 bp, Homo sapien
atatacagtggggctagatatacttagtaacag

SEQ ID NO: 1021435 - DNA, 33 bp, Homo sapien
tagcaagtatcctagaagtcttagtaagtcaca

SEQ ID NO: 1021436 - DNA, 33 bp, Homo sapien
tagcaagtatcctagatgtcttagtaagtcaca

SEQ ID NO: 1021437 - DNA, 33 bp, Homo sapien
aggtgatgggttcaagcagtatgcacaaatgtg

SEQ ID NO: 1021438 - DNA, 33 bp, Homo sapien
aggtgatgggttcaagtagtatgcacaaatgtg

SEQ ID NO: 1021439 - DNA, 33 bp, Homo sapien
attcatggggaattgcaaaaaatagtagagaca

SEQ ID NO: 1021440 - DNA, 33 bp, Homo sapien
attcatggggaattgcgaaaaatagtagagaca

SEQ ID NO: 1021441 - DNA, 33 bp, Homo sapien
cctcttgaaaagtgtacaaaatgcctcctagaa

SEQ ID NO: 1021442 - DNA, 33 bp, Homo sapien
cctcttgaaaagtgtataaaatgcctcctagaa

SEQ ID NO: 1021443 - DNA, 33 bp, Homo sapien
gattcagtggttatgacgatgccccatccgtgg

SEQ ID NO: 1021444 - DNA, 33 bp, Homo sapien
gattcagtggttatgatgatgccccatccgtgg

SEQ ID NO: 1021445 - DNA, 33 bp, Homo sapien
aatctacgcttgaaaacgcctttaaactcaatg

SEQ ID NO: 1021446 - DNA, 33 bp, Homo sapien
aatctacgcttgaaaatgcctttaaactcaatg

SEQ ID NO: 1021447 - DNA, 33 bp, Homo sapien
catgtctggtgaccacagggagagaccaagacc

SEQ ID NO: 1021448 - DNA, 33 bp, Homo sapien
catgtctggtgaccaccgggagagaccaagacc

SEQ ID NO: 1021449 - DNA, 33 bp, Homo sapien
agttgcagttctttgacacccttttgcagaggt

SEQ ID NO: 1021450 - DNA, 33 bp, Homo sapien
agttgcagttctttgatacccttttgcagaggt

SEQ ID NO: 1021451 - DNA, 33 bp, Homo sapien
tttgttgatcgactaaccagataatgtcacttt

SEQ ID NO: 1021452 - DNA, 33 bp, Homo sapien
tttgttgatcgactaatcagataatgtcacttt

SEQ ID NO: 1021453 - DNA, 33 bp, Homo sapien
tactgcatcgaataccccaccaagcaatgttat

SEQ ID NO: 1021454 - DNA, 33 bp, Homo sapien
tactgcatcgaatacctcaccaagcaatgttat

SEQ ID NO: 1021455 - DNA, 33 bp, Homo sapien
gctgggaataagcaaaagggctgccacagctct

SEQ ID NO: 1021456 - DNA, 33 bp, Homo sapien
gctgggaataagcaaaggggctgccacagctct

SEQ ID NO: 1021457 - DNA, 33 bp, Homo sapien
agcagaacatgattgaatatttaattgatctgg

SEQ ID NO: 1021458 - DNA, 33 bp, Homo sapien
agcagaacatgattgagtatttaattgatctgg

SEQ ID NO: 1021459 - DNA, 33 bp, Homo sapien
gcactgcacaatggaaaaagcagcagaacatga

SEQ ID NO: 1021460 - DNA, 33 bp, Homo sapien
gcactgcacaatggaagaagcagcagaacatga

SEQ ID NO: 1021461 - DNA, 33 bp, Homo sapien
ctgaaatttctgctccgaatttactgaatttga

SEQ ID NO: 1021462 - DNA, 33 bp, Homo sapien
ctgaaatttctgctcctaatttactgaatttga

SEQ ID NO: 1021463 - DNA, 33 bp, Homo sapien
gtgatacactataaagccctattaatggcattt

SEQ ID NO: 1021464 - DNA, 33 bp, Homo sapien
gtgatacactataaagtcctattaatggcattt

SEQ ID NO: 1021465 - DNA, 33 bp, Homo sapien
acatgctagaacgcaaaatggcagcccttcctc

SEQ ID NO: 1021466 - DNA, 33 bp, Homo sapien
acatgctagaacgcaagatggcagcccttcctc

SEQ ID NO: 1021467 - DNA, 33 bp, Homo sapien
tgaagtcaattgtgacaatctcatattcttcat

SEQ ID NO: 1021468 - DNA, 33 bp, Homo sapien
tgaagtcaattgtgacgatctcatattcttcat

SEQ ID NO: 1021469 - DNA, 33 bp, Homo sapien
gattttttcttaattacagctgatctccttcac

SEQ ID NO: 1021470 - DNA, 33 bp, Homo sapien
gattttttcttaattatagctgatctccttcac

SEQ ID NO: 1021471 - DNA, 33 bp, Homo sapien
atagagttgaaataatcaatatcgtgataaaaa

SEQ ID NO: 1021472 - DNA, 33 bp, Homo sapien
atagagttgaaataatgaatatcgtgataaaaa

SEQ ID NO: 1021473 - DNA, 33 bp, Homo sapien
ctgatctttaaatagcactggcaaggagagaga

SEQ ID NO: 1021474 - DNA, 33 bp, Homo sapien
ctgatctttaaatagcgctggcaaggagagaga

SEQ ID NO: 1021475 - DNA, 33 bp, Homo sapien
tcttggttggtgcttaaccttttggagtttcat

SEQ ID NO: 1021476 - DNA, 33 bp, Homo sapien
tcttggttggtgcttatccttttggagtttcat

SEQ ID NO: 1021477 - DNA, 33 bp, Homo sapien
ctgcaactttatggaacggagagttaacgtatg

SEQ ID NO: 1021478 - DNA, 33 bp, Homo sapien
ctgcaactttatggaatggagagttaacgtatg

SEQ ID NO: 1021479 - DNA, 33 bp, Homo sapien
aggtgccttcttaaaacatgaatacacagtcaa

SEQ ID NO: 1021480 - DNA, 33 bp, Homo sapien
aggtgccttcttaaaatatgaatacacagtcaa

SEQ ID NO: 1021481 - DNA, 33 bp, Homo sapien
gctgttgtgaaatagaacttgtgcagtttctaa

SEQ ID NO: 1021482 - DNA, 33 bp, Homo sapien
gctgttgtgaaatagaccttgtgcagtttctaa

SEQ ID NO: 1021483 - DNA, 33 bp, Homo sapien
agctcttaactacataaataagccactaaatga

SEQ ID NO: 1021484 - DNA, 33 bp, Homo sapien
agctcttaactacatacataagccactaaatga

SEQ ID NO: 1021485 - DNA, 33 bp, Homo sapien
gaacccatctcatagtaaagtgcaaatatccaa

SEQ ID NO: 1021486 - DNA, 33 bp, Homo sapien
gaacccatctcatagtcaagtgcaaatatccaa

SEQ ID NO: 1021487 - DNA, 33 bp, Homo sapien
tttctacaaatgacacaggtaacttgatgtcta

SEQ ID NO: 1021488 - DNA, 33 bp, Homo sapien
tttctacaaatgacacgggtaacttgatgtcta

SEQ ID NO: 1021489 - DNA, 33 bp, Homo sapien
cagtctcagggtttaccggaatctccctgggag

SEQ ID NO: 1021490 - DNA, 33 bp, Homo sapien
cagtctcagggtttactggaatctccctgggag

SEQ ID NO: 1021491 - DNA, 33 bp, Homo sapien
cttaattgcagtaaaaaatgcataacttaaaat

SEQ ID NO: 1021492 - DNA, 33 bp, Homo sapien
cttaattgcagtaaaagatgcataacttaaaat

SEQ ID NO: 1021493 - DNA, 33 bp, Homo sapien
atgtccttatcttccaatcattccaaaacctaa

SEQ ID NO: 1021494 - DNA, 33 bp, Homo sapien
atgtccttatcttccactcattccaaaacctaa

SEQ ID NO: 1021495 - DNA, 33 bp, Homo sapien
ctcagcatatatttgaagaatggctaaataagg

SEQ ID NO: 1021496 - DNA, 33 bp, Homo sapien
ctcagcatatatttgaggaatggctaaataagg

SEQ ID NO: 1021497 - DNA, 33 bp, Homo sapien
gtgttgaggaggtacacagcttgatggtaggcc

SEQ ID NO: 1021498 - DNA, 33 bp, Homo sapien
gtgttgaggaggtacatagcttgatggtaggcc

SEQ ID NO: 1021499 - DNA, 33 bp, Homo sapien
ataagaatggataatgaagagagtgaattggtc

SEQ ID NO: 1021500 - DNA, 33 bp, Homo sapien
ataagaatggataatggagagagtgaattggtc

SEQ ID NO: 1021501 - DNA, 33 bp, Homo sapien
tttacaggaactgaaacttgcattttatgtaat

SEQ ID NO: 1021502 - DNA, 33 bp, Homo sapien
tttacaggaactgaaatttgcattttatgtaat

SEQ ID NO: 1021503 - DNA, 33 bp, Homo sapien
cttttgttgtatactacgcaattttcagctatc

SEQ ID NO: 1021504 - DNA, 33 bp, Homo sapien
cttttgttgtatactatgcaattttcagctatc

SEQ ID NO: 1021505 - DNA, 33 bp, Homo sapien
acaggtgccaagtgatcagaacaagtttgaata

SEQ ID NO: 1021506 - DNA, 33 bp, Homo sapien
acaggtgccaagtgattagaacaagtttgaata

SEQ ID NO: 1021507 - DNA, 33 bp, Homo sapien
acctatgtgcagtgaaactgctctgcatttgtc

SEQ ID NO: 1021508 - DNA, 33 bp, Homo sapien
acctatgtgcagtgaacctgctctgcatttgtc

SEQ ID NO: 1021509 - DNA, 33 bp, Homo sapien
ccaagaaagcaaaaaacgcctgacctctgtttc

SEQ ID NO: 1021510 - DNA, 33 bp, Homo sapien
ccaagaaagcaaaaaatgcctgacctctgtttc

SEQ ID NO: 1021511 - DNA, 33 bp, Homo sapien
ataatatattcagtgccgagagaatttggaaaa

SEQ ID NO: 1021512 - DNA, 33 bp, Homo sapien
ataatatattcagtgctgagagaatttggaaaa

SEQ ID NO: 1021513 - DNA, 33 bp, Homo sapien
ttatatggctctacaagaaaaaaataatatttt

SEQ ID NO: 1021514 - DNA, 33 bp, Homo sapien
ttatatggctctacaataaaaaaataatatttt

SEQ ID NO: 1021515 - DNA, 33 bp, Homo sapien
gtgtttgaggatgatcaatgtgaagcccagaaa

SEQ ID NO: 1021516 - DNA, 33 bp, Homo sapien
gtgtttgaggatgatcgatgtgaagcccagaaa

SEQ ID NO: 1021517 - DNA, 33 bp, Homo sapien
cttccattattccaaaaacaacagctctttgat

SEQ ID NO: 1021518 - DNA, 33 bp, Homo sapien
cttccattattccaaacacaacagctctttgat

SEQ ID NO: 1021519 - DNA, 33 bp, Homo sapien
aaaggcatcaaaactccatttcctgaaatgcat

SEQ ID NO: 1021520 - DNA, 33 bp, Homo sapien
aaaggcatcaaaactctatttcctgaaatgcat

SEQ ID NO: 1021521 - DNA, 33 bp, Homo sapien
gatagaatgcaacaaacacatgtgaaaattgaa

SEQ ID NO: 1021522 - DNA, 33 bp, Homo sapien
gatagaatgcaacaaatacatgtgaaaattgaa

SEQ ID NO: 1021523 - DNA, 33 bp, Homo sapien
agcgctgtctttctacaatgtggctcccaaccc

SEQ ID NO: 1021524 - DNA, 33 bp, Homo sapien
agcgctgtctttctacgatgtggctcccaaccc

SEQ ID NO: 1021525 - DNA, 33 bp, Homo sapien
ggcactgggcacatataacatttgaattcctca

SEQ ID NO: 1021526 - DNA, 33 bp, Homo sapien
ggcactgggcacatatgacatttgaattcctca

SEQ ID NO: 1021527 - DNA, 33 bp, Homo sapien
tactctcatatggggaaggcaagactcaaaact

SEQ ID NO: 1021528 - DNA, 33 bp, Homo sapien
tactctcatatggggacggcaagactcaaaact

SEQ ID NO: 1021529 - DNA, 33 bp, Homo sapien
attctgcacactgcagccacagatcctgttaac

SEQ ID NO: 1021530 - DNA, 33 bp, Homo sapien
attctgcacactgcagtcacagatcctgttaac

SEQ ID NO: 1021531 - DNA, 33 bp, Homo sapien
tcccctataggataaaggacctacctcataggg

SEQ ID NO: 1021532 - DNA, 33 bp, Homo sapien
tcccctataggataaatgacctacctcataggg

SEQ ID NO: 1021533 - DNA, 33 bp, Homo sapien
tacccccaaatgtgccaagattagagagtgtgt

SEQ ID NO: 1021534 - DNA, 33 bp, Homo sapien
tacccccaaatgtgccgagattagagagtgtgt

SEQ ID NO: 1021535 - DNA, 33 bp, Homo sapien
agggattagtttgagcggaaagcacttgaaaag

SEQ ID NO: 1021536 - DNA, 33 bp, Homo sapien
agggattagtttgagctgaaagcacttgaaaag

SEQ ID NO: 1021537 - DNA, 33 bp, Homo sapien
tgaatagagtgttcacagaagaggaaatacaac

SEQ ID NO: 1021538 - DNA, 33 bp, Homo sapien
tgaatagagtgttcacggaagaggaaatacaac

SEQ ID NO: 1021539 - DNA, 33 bp, Homo sapien
ggaaagatttgaataacgtttgttgattagatc

SEQ ID NO: 1021540 - DNA, 33 bp, Homo sapien
ggaaagatttgaataatgtttgttgattagatc

SEQ ID NO: 1021541 - DNA, 33 bp, Homo sapien
gctttctttgtaaaggaccagagagtaactatt

SEQ ID NO: 1021542 - DNA, 33 bp, Homo sapien
gctttctttgtaaagggccagagagtaactatt

SEQ ID NO: 1021543 - DNA, 33 bp, Homo sapien
gtcttgttatcaaaagaccaatttcattcactt

SEQ ID NO: 1021544 - DNA, 33 bp, Homo sapien
gtcttgttatcaaaaggccaatttcattcactt

SEQ ID NO: 1021545 - DNA, 33 bp, Homo sapien
tgaacagagatagactcaaacttgaaatgatac

SEQ ID NO: 1021546 - DNA, 33 bp, Homo sapien
tgaacagagatagacttaaacttgaaatgatac

SEQ ID NO: 1021547 - DNA, 33 bp, Homo sapien
aatctgttaaaaaggcacacttctcatgatgtt

SEQ ID NO: 1021548 - DNA, 33 bp, Homo sapien
aatctgttaaaaaggcgcacttctcatgatgtt

SEQ ID NO: 1021549 - DNA, 33 bp, Homo sapien
gagagaggctggaggccataaaaattcacctgt

SEQ ID NO: 1021550 - DNA, 33 bp, Homo sapien
gagagaggctggaggctataaaaattcacctgt

SEQ ID NO: 1021551 - DNA, 33 bp, Homo sapien
ctctagcagttgaacaccaagtgtggggttatg

SEQ ID NO: 1021552 - DNA, 33 bp, Homo sapien
ctctagcagttgaacagcaagtgtggggttatg

SEQ ID NO: 1021553 - DNA, 33 bp, Homo sapien
atttttggaccatttacgttcaagtgaagattg

SEQ ID NO: 1021554 - DNA, 33 bp, Homo sapien
atttttggaccatttatgttcaagtgaagattg

SEQ ID NO: 1021555 - DNA, 33 bp, Homo sapien
ttgctccattaggagacacgtggcttggggaga

SEQ ID NO: 1021556 - DNA, 33 bp, Homo sapien
ttgctccattaggagagacgtggcttggggaga

SEQ ID NO: 1021557 - DNA, 33 bp, Homo sapien
gtttgacttttgctggcagagtgtttaaggtca

SEQ ID NO: 1021558 - DNA, 33 bp, Homo sapien
gtttgacttttgctggtagagtgtttaaggtca

SEQ ID NO: 1021559 - DNA, 33 bp, Homo sapien
ctgcctaatgtattcaatcatcaaacatgaagc

SEQ ID NO: 1021560 - DNA, 33 bp, Homo sapien
ctgcctaatgtattcagtcatcaaacatgaagc

SEQ ID NO: 1021561 - DNA, 33 bp, Homo sapien
atatgtcaagagagtacaagggtttatatgcaa

SEQ ID NO: 1021562 - DNA, 33 bp, Homo sapien
atatgtcaagagagtagaagggtttatatgcaa

SEQ ID NO: 1021563 - DNA, 33 bp, Homo sapien
tgctgagagataaggggaaggaacagagcatgt

SEQ ID NO: 1021564 - DNA, 33 bp, Homo sapien
tgctgagagataagggtaaggaacagagcatgt

SEQ ID NO: 1021565 - DNA, 33 bp, Homo sapien
agacaccaatggctcaaaagatggaatacagca

SEQ ID NO: 1021566 - DNA, 33 bp, Homo sapien
agacaccaatggctcagaagatggaatacagca

SEQ ID NO: 1021567 - DNA, 33 bp, Homo sapien
agttgacctcagttaacggggaactattgtatt

SEQ ID NO: 1021568 - DNA, 33 bp, Homo sapien
agttgacctcagttaatggggaactattgtatt

SEQ ID NO: 1021569 - DNA, 33 bp, Homo sapien
atctataaaatgatgacatgggaggttcctgtc

SEQ ID NO: 1021570 - DNA, 33 bp, Homo sapien
atctataaaatgatgatatgggaggttcctgtc

SEQ ID NO: 1021571 - DNA, 33 bp, Homo sapien
tagataagaaatgcaaataatgtgcctaaaata

SEQ ID NO: 1021572 - DNA, 33 bp, Homo sapien
tagataagaaatgcaagtaatgtgcctaaaata

SEQ ID NO: 1021573 - DNA, 33 bp, Homo sapien
acttcgcaatgctgaaatatcacccagaattct

SEQ ID NO: 1021574 - DNA, 33 bp, Homo sapien
acttcgcaatgctgaactatcacccagaattct

SEQ ID NO: 1021575 - DNA, 33 bp, Homo sapien
gaatgccaaatacttccaatctgtaatcagcct

SEQ ID NO: 1021576 - DNA, 33 bp, Homo sapien
gaatgccaaatacttctaatctgtaatcagcct

SEQ ID NO: 1021577 - DNA, 33 bp, Homo sapien
ataatatttgggatggaaaaatttaggtgggta

SEQ ID NO: 1021578 - DNA, 33 bp, Homo sapien
ataatatttgggatgggaaaatttaggtgggta

SEQ ID NO: 1021579 - DNA, 33 bp, Homo sapien
tgggccctgttgaaaaagagctcaaaggggctt

SEQ ID NO: 1021580 - DNA, 33 bp, Homo sapien
tgggccctgttgaaaacgagctcaaaggggctt

SEQ ID NO: 1021581 - DNA, 33 bp, Homo sapien
aatatgatgcagaaagaacaattatgttgacta

SEQ ID NO: 1021582 - DNA, 33 bp, Homo sapien
aatatgatgcagaaaggacaattatgttgacta

SEQ ID NO: 1021583 - DNA, 33 bp, Homo sapien
ggcagagattgagatacgtagctgcaaaccaaa

SEQ ID NO: 1021584 - DNA, 33 bp, Homo sapien
ggcagagattgagatatgtagctgcaaaccaaa

SEQ ID NO: 1021585 - DNA, 33 bp, Homo sapien
ctagtacaatggacaaaaataatcttctgaatt

SEQ ID NO: 1021586 - DNA, 33 bp, Homo sapien
ctagtacaatggacaacaataatcttctgaatt

SEQ ID NO: 1021587 - DNA, 33 bp, Homo sapien
cccagccagtggtacacatttttaaaactaaag

SEQ ID NO: 1021588 - DNA, 33 bp, Homo sapien
cccagccagtggtacatatttttaaaactaaag

SEQ ID NO: 1021589 - DNA, 33 bp, Homo sapien
ttttataaaacaaccaaaaaatacagtctccct

SEQ ID NO: 1021590 - DNA, 33 bp, Homo sapien
ttttataaaacaaccacaaaatacagtctccct

SEQ ID NO: 1021591 - DNA, 33 bp, Homo sapien
aaatgcaaacttttcaatcagggcagttcaaat

SEQ ID NO: 1021592 - DNA, 33 bp, Homo sapien
aaatgcaaacttttcagtcagggcagttcaaat

SEQ ID NO: 1021593 - DNA, 33 bp, Homo sapien
aacttcaaatggagaacgtaaaaggagtttcgt

SEQ ID NO: 1021594 - DNA, 33 bp, Homo sapien
aacttcaaatggagaatgtaaaaggagtttcgt

SEQ ID NO: 1021595 - DNA, 33 bp, Homo sapien
aatctagaagatgaaaacatagtcaaagctaaa

SEQ ID NO: 1021596 - DNA, 33 bp, Homo sapien
aatctagaagatgaaagcatagtcaaagctaaa

SEQ ID NO: 1021597 - DNA, 33 bp, Homo sapien
agataagctggagctaccaaaagagacagaagt

SEQ ID NO: 1021598 - DNA, 33 bp, Homo sapien
agataagctggagctagcaaaagagacagaagt

SEQ ID NO: 1021599 - DNA, 33 bp, Homo sapien
cccattattatcattcaaagtccttggtttaaa

SEQ ID NO: 1021600 - DNA, 33 bp, Homo sapien
cccattattatcattcgaagtccttggtttaaa

SEQ ID NO: 1021601 - DNA, 33 bp, Homo sapien
tcaaattgtcctattcgcaactctaaatatgtc

SEQ ID NO: 1021602 - DNA, 33 bp, Homo sapien
tcaaattgtcctattctcaactctaaatatgtc

SEQ ID NO: 1021603 - DNA, 33 bp, Homo sapien
aagttaaaattgcaaacggatcagaaaaccagg

SEQ ID NO: 1021604 - DNA, 33 bp, Homo sapien
aagttaaaattgcaaagggatcagaaaaccagg

SEQ ID NO: 1021605 - DNA, 33 bp, Homo sapien
gaccaaatggcaggaacaaagtgagcacgggtg

SEQ ID NO: 1021606 - DNA, 33 bp, Homo sapien
gaccaaatggcaggaataaagtgagcacgggtg

SEQ ID NO: 1021607 - DNA, 33 bp, Homo sapien
agcggttatggggacaaaacctctcagaagcat

SEQ ID NO: 1021608 - DNA, 33 bp, Homo sapien
agcggttatggggacacaacctctcagaagcat

SEQ ID NO: 1021609 - DNA, 33 bp, Homo sapien
tactcttagcattgccaaactgatcaagtattg

SEQ ID NO: 1021610 - DNA, 33 bp, Homo sapien
tactcttagcattgccgaactgatcaagtattg

SEQ ID NO: 1021611 - DNA, 33 bp, Homo sapien
tgtcctttgaagaggagacctcagagagtgtgc

SEQ ID NO: 1021612 - DNA, 33 bp, Homo sapien
tgtcctttgaagaggatacctcagagagtgtgc

SEQ ID NO: 1021613 - DNA, 33 bp, Homo sapien
atatttagtgctgcagaaataagagtagagaac

SEQ ID NO: 1021614 - DNA, 33 bp, Homo sapien
atatttagtgctgcaggaataagagtagagaac

SEQ ID NO: 1021615 - DNA, 33 bp, Homo sapien
acaagtcataagaacaaacaatctgccaagaac

SEQ ID NO: 1021616 - DNA, 33 bp, Homo sapien
acaagtcataagaacagacaatctgccaagaac

SEQ ID NO: 1021617 - DNA, 33 bp, Homo sapien
attgcttgctgaggaacacatttaactcagaac

SEQ ID NO: 1021618 - DNA, 33 bp, Homo sapien
attgcttgctgaggaagacatttaactcagaac

SEQ ID NO: 1021619 - DNA, 33 bp, Homo sapien
tagatgatcattgttccatgccattcatttgta

SEQ ID NO: 1021620 - DNA, 33 bp, Homo sapien
tagatgatcattgttctatgccattcatttgta

SEQ ID NO: 1021621 - DNA, 33 bp, Homo sapien
ggagtgtggctaatgacgaatttcttatttgag

SEQ ID NO: 1021622 - DNA, 33 bp, Homo sapien
ggagtgtggctaatgatgaatttcttatttgag

SEQ ID NO: 1021623 - DNA, 33 bp, Homo sapien
gccagccaatagaacacatacttgctgaaaaga

SEQ ID NO: 1021624 - DNA, 33 bp, Homo sapien
gccagccaatagaacatatacttgctgaaaaga

SEQ ID NO: 1021625 - DNA, 33 bp, Homo sapien
agacaggctttttatgcagagacattcaagtgg

SEQ ID NO: 1021626 - DNA, 33 bp, Homo sapien
agacaggctttttatggagagacattcaagtgg

SEQ ID NO: 1021627 - DNA, 33 bp, Homo sapien
agccactgatttagacaatgatgtatggatgca

SEQ ID NO: 1021628 - DNA, 33 bp, Homo sapien
agccactgatttagacgatgatgtatggatgca

SEQ ID NO: 1021629 - DNA, 33 bp, Homo sapien
tccttctaaaataaggcatgacatttccactaa

SEQ ID NO: 1021630 - DNA, 33 bp, Homo sapien
tccttctaaaataaggtatgacatttccactaa

SEQ ID NO: 1021631 - DNA, 33 bp, Homo sapien
tcacctcaaaaatataactttgtcagtttatgg

SEQ ID NO: 1021632 - DNA, 33 bp, Homo sapien
tcacctcaaaaatatatctttgtcagtttatgg

SEQ ID NO: 1021633 - DNA, 33 bp, Homo sapien
atgaaaacctctggagaaaaaaatagagtggaa

SEQ ID NO: 1021634 - DNA, 33 bp, Homo sapien
atgaaaacctctggaggaaaaaatagagtggaa

SEQ ID NO: 1021635 - DNA, 33 bp, Homo sapien
attattctcacagatacgttttgacctcctagc

SEQ ID NO: 1021636 - DNA, 33 bp, Homo sapien
attattctcacagatatgttttgacctcctagc

SEQ ID NO: 1021637 - DNA, 33 bp, Homo sapien
acttttcccagttgcaaaattacctggttaatt

SEQ ID NO: 1021638 - DNA, 33 bp, Homo sapien
acttttcccagttgcagaattacctggttaatt

SEQ ID NO: 1021639 - DNA, 33 bp, Homo sapien
tgcctctattgctatgcagcttttaagtggatt

SEQ ID NO: 1021640 - DNA, 33 bp, Homo sapien
tgcctctattgctatgtagcttttaagtggatt

SEQ ID NO: 1021641 - DNA, 33 bp, Homo sapien
tttggttttctgggcccaaaagatgccttgcaa

SEQ ID NO: 1021642 - DNA, 33 bp, Homo sapien
tttggttttctgggccgaaaagatgccttgcaa

SEQ ID NO: 1021643 - DNA, 33 bp, Homo sapien
gaatggcagacaccaaactatgatcttcaacag

SEQ ID NO: 1021644 - DNA, 33 bp, Homo sapien
gaatggcagacaccaagctatgatcttcaacag

SEQ ID NO: 1021645 - DNA, 33 bp, Homo sapien
tgttgattgttacaaactaaagggagaatggac

SEQ ID NO: 1021646 - DNA, 33 bp, Homo sapien
tgttgattgttacaaagtaaagggagaatggac

SEQ ID NO: 1021647 - DNA, 33 bp, Homo sapien
tccatgttttgcatacagaaaaaaaacaaaggg

SEQ ID NO: 1021648 - DNA, 33 bp, Homo sapien
tccatgttttgcataccgaaaaaaaacaaaggg

SEQ ID NO: 1021649 - DNA, 33 bp, Homo sapien
gatcctagctatgtgaagaggtatggccaccca

SEQ ID NO: 1021650 - DNA, 33 bp, Homo sapien
gatcctagctatgtgaggaggtatggccaccca

SEQ ID NO: 1021651 - DNA, 33 bp, Homo sapien
caattactgttgtgaaaggattcacctctgatt

SEQ ID NO: 1021652 - DNA, 33 bp, Homo sapien
caattactgttgtgaagggattcacctctgatt

SEQ ID NO: 1021653 - DNA, 33 bp, Homo sapien
tgagatgcaaagataactaagtcacagactctg

SEQ ID NO: 1021654 - DNA, 33 bp, Homo sapien
tgagatgcaaagataattaagtcacagactctg

SEQ ID NO: 1021655 - DNA, 33 bp, Homo sapien
ggcactatggtaaatactaaaaagacactgatc

SEQ ID NO: 1021656 - DNA, 33 bp, Homo sapien
ggcactatggtaaatattaaaaagacactgatc

SEQ ID NO: 1021657 - DNA, 33 bp, Homo sapien
gaagccatgatcatgacgctgtggaagaaccgg

SEQ ID NO: 1021658 - DNA, 33 bp, Homo sapien
gaagccatgatcatgatgctgtggaagaaccgg

SEQ ID NO: 1021659 - DNA, 33 bp, Homo sapien
atatttgaagtaagagcagtgatcatgaaaata

SEQ ID NO: 1021660 - DNA, 33 bp, Homo sapien
atatttgaagtaagagtagtgatcatgaaaata

SEQ ID NO: 1021661 - DNA, 33 bp, Homo sapien
gtaggatgctgcttaacgctatatttatcatgg

SEQ ID NO: 1021662 - DNA, 33 bp, Homo sapien
gtaggatgctgcttaatgctatatttatcatgg

SEQ ID NO: 1021663 - DNA, 33 bp, Homo sapien
atccagaactctgagaaaacagatttgtgttgt

SEQ ID NO: 1021664 - DNA, 33 bp, Homo sapien
atccagaactctgagagaacagatttgtgttgt

SEQ ID NO: 1021665 - DNA, 33 bp, Homo sapien
cttccccctgctgtcactccctgactaggaaag

SEQ ID NO: 1021666 - DNA, 33 bp, Homo sapien
cttccccctgctgtcattccctgactaggaaag

SEQ ID NO: 1021667 - DNA, 33 bp, Homo sapien
ctccctcttagttttccacaggtctttaatgct

SEQ ID NO: 1021668 - DNA, 33 bp, Homo sapien
ctccctcttagttttctacaggtctttaatgct

SEQ ID NO: 1021669 - DNA, 33 bp, Homo sapien
gaggagtctggagacccactaaccttctgagct

SEQ ID NO: 1021670 - DNA, 33 bp, Homo sapien
gaggagtctggagaccgactaaccttctgagct

SEQ ID NO: 1021671 - DNA, 33 bp, Homo sapien
ttataagaattgtttgaaagattgaaggacaaa

SEQ ID NO: 1021672 - DNA, 33 bp, Homo sapien
ttataagaattgtttgtaagattgaaggacaaa

SEQ ID NO: 1021673 - DNA, 33 bp, Homo sapien
tctcttccaaagtttacgcacaggacttaacaa

SEQ ID NO: 1021674 - DNA, 33 bp, Homo sapien
tctcttccaaagtttatgcacaggacttaacaa

SEQ ID NO: 1021675 - DNA, 33 bp, Homo sapien
atggtgctatcaggaaagcaaggccaatatctg

SEQ ID NO: 1021676 - DNA, 33 bp, Homo sapien
atggtgctatcaggaacgcaaggccaatatctg

SEQ ID NO: 1021677 - DNA, 33 bp, Homo sapien
tggaggagtaatcagcagatttgacttgaaaca

SEQ ID NO: 1021678 - DNA, 33 bp, Homo sapien
tggaggagtaatcagcggatttgacttgaaaca

SEQ ID NO: 1021679 - DNA, 33 bp, Homo sapien
gaccacgctcttttaaatagcaaagctgtagat

SEQ ID NO: 1021680 - DNA, 33 bp, Homo sapien
gaccacgctcttttaagtagcaaagctgtagat

SEQ ID NO: 1021681 - DNA, 33 bp, Homo sapien
ctgctccaagcttgaactcccagacgaaaaaca

SEQ ID NO: 1021682 - DNA, 33 bp, Homo sapien
ctgctccaagcttgaattcccagacgaaaaaca

SEQ ID NO: 1021683 - DNA, 33 bp, Homo sapien
aagaagtctattgatgaaagatgcatttttatg

SEQ ID NO: 1021684 - DNA, 33 bp, Homo sapien
aagaagtctattgatggaagatgcatttttatg

SEQ ID NO: 1021685 - DNA, 33 bp, Homo sapien
caggattgagattcaccgtagaaggaagtgtga

SEQ ID NO: 1021686 - DNA, 33 bp, Homo sapien
caggattgagattcactgtagaaggaagtgtga

SEQ ID NO: 1021687 - DNA, 33 bp, Homo sapien
acgacctactaaatcaatgatacccagatatct

SEQ ID NO: 1021688 - DNA, 33 bp, Homo sapien
acgacctactaaatcagtgatacccagatatct

SEQ ID NO: 1021689 - DNA, 33 bp, Homo sapien
agagctttgacaccaacgataagagtaaaagaa

SEQ ID NO: 1021690 - DNA, 33 bp, Homo sapien
agagctttgacaccaatgataagagtaaaagaa

SEQ ID NO: 1021691 - DNA, 33 bp, Homo sapien
caatgtcttacacttacggaaccgtcaaagaca

SEQ ID NO: 1021692 - DNA, 33 bp, Homo sapien
caatgtcttacacttatggaaccgtcaaagaca

SEQ ID NO: 1021693 - DNA, 33 bp, Homo sapien
ctagaccttagagcaaacaatatgtaggctggt

SEQ ID NO: 1021694 - DNA, 33 bp, Homo sapien
ctagaccttagagcaagcaatatgtaggctggt

SEQ ID NO: 1021695 - DNA, 33 bp, Homo sapien
tactcttggttttcacaaagaacggtatgtaca

SEQ ID NO: 1021696 - DNA, 33 bp, Homo sapien
tactcttggttttcacgaagaacggtatgtaca

SEQ ID NO: 1021697 - DNA, 33 bp, Homo sapien
tgttgctaaaatgctccgaagtgaccacacaat

SEQ ID NO: 1021698 - DNA, 33 bp, Homo sapien
tgttgctaaaatgctctgaagtgaccacacaat

SEQ ID NO: 1021699 - DNA, 33 bp, Homo sapien
agatgaatatctggtaacacctcacagaggaga

SEQ ID NO: 1021700 - DNA, 33 bp, Homo sapien
agatgaatatctggtagcacctcacagaggaga

SEQ ID NO: 1021701 - DNA, 33 bp, Homo sapien
ataacatatggatgcacagctattaggataatg

SEQ ID NO: 1021702 - DNA, 33 bp, Homo sapien
ataacatatggatgcatagctattaggataatg

SEQ ID NO: 1021703 - DNA, 33 bp, Homo sapien
aatactgtccatattcaaagaaccattcattga

SEQ ID NO: 1021704 - DNA, 33 bp, Homo sapien
aatactgtccatattcgaagaaccattcattga

SEQ ID NO: 1021705 - DNA, 33 bp, Homo sapien
gactgtctataatggcccaagtgggttcttctt

SEQ ID NO: 1021706 - DNA, 33 bp, Homo sapien
gactgtctataatggctcaagtgggttcttctt

SEQ ID NO: 1021707 - DNA, 33 bp, Homo sapien
cagtttttctgagaacagtcaagagtttattta

SEQ ID NO: 1021708 - DNA, 33 bp, Homo sapien
cagtttttctgagaacggtcaagagtttattta

SEQ ID NO: 1021709 - DNA, 33 bp, Homo sapien
tgggtgttatttcatccacttcgtgaagtcctt

SEQ ID NO: 1021710 - DNA, 33 bp, Homo sapien
tgggtgttatttcatctacttcgtgaagtcctt

SEQ ID NO: 1021711 - DNA, 33 bp, Homo sapien
ttacgtctggcatcacaataccttagtttacag

SEQ ID NO: 1021712 - DNA, 33 bp, Homo sapien
ttacgtctggcatcacgataccttagtttacag

SEQ ID NO: 1021713 - DNA, 33 bp, Homo sapien
agctgcaattcatgagaaagagttccagagaaa

SEQ ID NO: 1021714 - DNA, 33 bp, Homo sapien
agctgcaattcatgaggaagagttccagagaaa

SEQ ID NO: 1021715 - DNA, 33 bp, Homo sapien
cttttttggaaaaatgccattccaccttaaata

SEQ ID NO: 1021716 - DNA, 33 bp, Homo sapien
cttttttggaaaaatgtcattccaccttaaata

SEQ ID NO: 1021717 - DNA, 33 bp, Homo sapien
tggaggaaaaagaagacgagactgaggaaagct

SEQ ID NO: 1021718 - DNA, 33 bp, Homo sapien
tggaggaaaaagaagatgagactgaggaaagct

SEQ ID NO: 1021719 - DNA, 33 bp, Homo sapien
ttcctgtactaaatgaccccagattggtatatc

SEQ ID NO: 1021720 - DNA, 33 bp, Homo sapien
ttcctgtactaaatgatcccagattggtatatc

SEQ ID NO: 1021721 - DNA, 33 bp, Homo sapien
aaggtgaactataaaactgtggatatgtccttt

SEQ ID NO: 1021722 - DNA, 33 bp, Homo sapien
aaggtgaactataaaattgtggatatgtccttt

SEQ ID NO: 1021723 - DNA, 33 bp, Homo sapien
agagaaacaagagtgcacaatccacacaaactt

SEQ ID NO: 1021724 - DNA, 33 bp, Homo sapien
agagaaacaagagtgcgcaatccacacaaactt

SEQ ID NO: 1021725 - DNA, 33 bp, Homo sapien
taaataggattccaatgaaaggttatgctaata

SEQ ID NO: 1021726 - DNA, 33 bp, Homo sapien
taaataggattccaattaaaggttatgctaata

SEQ ID NO: 1021727 - DNA, 33 bp, Homo sapien
cgaacgcagtcagagcacacagatttataaact

SEQ ID NO: 1021728 - DNA, 33 bp, Homo sapien
cgaacgcagtcagagcgcacagatttataaact

SEQ ID NO: 1021729 - DNA, 33 bp, Homo sapien
cacctccatgcagttggaaaggaaaggtagtcc

SEQ ID NO: 1021730 - DNA, 33 bp, Homo sapien
cacctccatgcagttgtaaaggaaaggtagtcc

SEQ ID NO: 1021731 - DNA, 33 bp, Homo sapien
acaataaggagaccgcacctgactctaatctag

SEQ ID NO: 1021732 - DNA, 33 bp, Homo sapien
acaataaggagaccgcccctgactctaatctag

SEQ ID NO: 1021733 - DNA, 33 bp, Homo sapien
taacctgataactataggtttaggcaatgatct

SEQ ID NO: 1021734 - DNA, 33 bp, Homo sapien
taacctgataactatatgtttaggcaatgatct

SEQ ID NO: 1021735 - DNA, 33 bp, Homo sapien
tatatattttgattacaaagactacaatttttg

SEQ ID NO: 1021736 - DNA, 33 bp, Homo sapien
tatatattttgattacgaagactacaatttttg

SEQ ID NO: 1021737 - DNA, 33 bp, Homo sapien
tacaaaagttgaaacaatgtaagcaaagcagta

SEQ ID NO: 1021738 - DNA, 33 bp, Homo sapien
tacaaaagttgaaacagtgtaagcaaagcagta

SEQ ID NO: 1021739 - DNA, 33 bp, Homo sapien
catgctacatacactacaatttttgtaacctta

SEQ ID NO: 1021740 - DNA, 33 bp, Homo sapien
catgctacatacactataatttttgtaacctta

SEQ ID NO: 1021741 - DNA, 33 bp, Homo sapien
ggaaattaaagcaagaaagaaatggcactggga

SEQ ID NO: 1021742 - DNA, 33 bp, Homo sapien
ggaaattaaagcaagagagaaatggcactggga

SEQ ID NO: 1021743 - DNA, 33 bp, Homo sapien
ttcacaaatttgatgcccataatgaccaattct

SEQ ID NO: 1021744 - DNA, 33 bp, Homo sapien
ttcacaaatttgatgctcataatgaccaattct

SEQ ID NO: 1021745 - DNA, 33 bp, Homo sapien
aagttttgtcaaggaaagaacatcagagatgtc

SEQ ID NO: 1021746 - DNA, 33 bp, Homo sapien
aagttttgtcaaggaaggaacatcagagatgtc

SEQ ID NO: 1021747 - DNA, 33 bp, Homo sapien
atacaaagtaagataacgcccacaacacacaca

SEQ ID NO: 1021748 - DNA, 33 bp, Homo sapien
atacaaagtaagataatgcccacaacacacaca

SEQ ID NO: 1021749 - DNA, 33 bp, Homo sapien
tctcacagaagaagcaacatctgcttggtaagc

SEQ ID NO: 1021750 - DNA, 33 bp, Homo sapien
tctcacagaagaagcatcatctgcttggtaagc

SEQ ID NO: 1021751 - DNA, 33 bp, Homo sapien
atgagggttaaataaacagttcaggatataatc

SEQ ID NO: 1021752 - DNA, 33 bp, Homo sapien
atgagggttaaataaagagttcaggatataatc

SEQ ID NO: 1021753 - DNA, 33 bp, Homo sapien
gttagcgtctgcatacccatccacaaaatggga

SEQ ID NO: 1021754 - DNA, 33 bp, Homo sapien
gttagcgtctgcatactcatccacaaaatggga

SEQ ID NO: 1021755 - DNA, 33 bp, Homo sapien
cagtccccaacaaacacggatggttggtcacct

SEQ ID NO: 1021756 - DNA, 33 bp, Homo sapien
cagtccccaacaaacatggatggttggtcacct

SEQ ID NO: 1021757 - DNA, 33 bp, Homo sapien
gttttaggcaagtctccattttgaattacgtgc

SEQ ID NO: 1021758 - DNA, 33 bp, Homo sapien
gttttaggcaagtctcgattttgaattacgtgc

SEQ ID NO: 1021759 - DNA, 33 bp, Homo sapien
cagagattcttgggagaacttgtagtagattca

SEQ ID NO: 1021760 - DNA, 33 bp, Homo sapien
cagagattcttgggaggacttgtagtagattca

SEQ ID NO: 1021761 - DNA, 33 bp, Homo sapien
aattgtgttgctagcaccagatggttcataaag

SEQ ID NO: 1021762 - DNA, 33 bp, Homo sapien
aattgtgttgctagcagcagatggttcataaag

SEQ ID NO: 1021763 - DNA, 33 bp, Homo sapien
gagggtctttctctaaccccgctggtagccaaa

SEQ ID NO: 1021764 - DNA, 33 bp, Homo sapien
gagggtctttctctaatcccgctggtagccaaa

SEQ ID NO: 1021765 - DNA, 33 bp, Homo sapien
taaaatggactataataatctccactgcagttt

SEQ ID NO: 1021766 - DNA, 33 bp, Homo sapien
taaaatggactataatcatctccactgcagttt

SEQ ID NO: 1021767 - DNA, 33 bp, Homo sapien
cattaccatctagaaacaactaagaatgtacca

SEQ ID NO: 1021768 - DNA, 33 bp, Homo sapien
cattaccatctagaaataactaagaatgtacca

SEQ ID NO: 1021769 - DNA, 33 bp, Homo sapien
cagtggggcctgtaatcatagtatacaactctc

SEQ ID NO: 1021770 - DNA, 33 bp, Homo sapien
cagtggggcctgtaatgatagtatacaactctc

SEQ ID NO: 1021771 - DNA, 33 bp, Homo sapien
ctttgacttaacaagacagaagcctccatgttt

SEQ ID NO: 1021772 - DNA, 33 bp, Homo sapien
ctttgacttaacaagatagaagcctccatgttt

SEQ ID NO: 1021773 - DNA, 33 bp, Homo sapien
ttttacctgctgggtacaatcatggcataactg

SEQ ID NO: 1021774 - DNA, 33 bp, Homo sapien
ttttacctgctgggtataatcatggcataactg

SEQ ID NO: 1021775 - DNA, 33 bp, Homo sapien
ctttggtatttctttacgtgataaacttgactt

SEQ ID NO: 1021776 - DNA, 33 bp, Homo sapien
ctttggtatttctttaggtgataaacttgactt

SEQ ID NO: 1021777 - DNA, 33 bp, Homo sapien
ctcaagcacccacagagaattttgtggtttggt

SEQ ID NO: 1021778 - DNA, 33 bp, Homo sapien
ctcaagcacccacagataattttgtggtttggt

SEQ ID NO: 1021779 - DNA, 33 bp, Homo sapien
gaaaaaaatgtcctccacatgaaactacaccaa

SEQ ID NO: 1021780 - DNA, 33 bp, Homo sapien
gaaaaaaatgtcctccgcatgaaactacaccaa

SEQ ID NO: 1021781 - DNA, 33 bp, Homo sapien
gaatggcctcaggtagaaaatttgactgaatat

SEQ ID NO: 1021782 - DNA, 33 bp, Homo sapien
gaatggcctcaggtaggaaatttgactgaatat

SEQ ID NO: 1021783 - DNA, 33 bp, Homo sapien
tcacctcttttctacaacacttaacacataccc

SEQ ID NO: 1021784 - DNA, 33 bp, Homo sapien
tcacctcttttctacagcacttaacacataccc

SEQ ID NO: 1021785 - DNA, 33 bp, Homo sapien
tttacttttaaatgtaactttatgctcagttta

SEQ ID NO: 1021786 - DNA, 33 bp, Homo sapien
tttacttttaaatgtacctttatgctcagttta

SEQ ID NO: 1021787 - DNA, 33 bp, Homo sapien
aagtacaagttttggtcacagtgatttcttctt

SEQ ID NO: 1021788 - DNA, 33 bp, Homo sapien
aagtacaagttttggttacagtgatttcttctt

SEQ ID NO: 1021789 - DNA, 33 bp, Homo sapien
gaagtcctgcatttaacaaatttgacttagatt

SEQ ID NO: 1021790 - DNA, 33 bp, Homo sapien
gaagtcctgcatttaagaaatttgacttagatt

SEQ ID NO: 1021791 - DNA, 33 bp, Homo sapien
tttttaagtaggtaaaatgctcccccaatgtta

SEQ ID NO: 1021792 - DNA, 33 bp, Homo sapien
tttttaagtaggtaaagtgctcccccaatgtta

SEQ ID NO: 1021793 - DNA, 33 bp, Homo sapien
catgacgaagttgaaactcttaagttaatgcgg

SEQ ID NO: 1021794 - DNA, 33 bp, Homo sapien
catgacgaagttgaaagtcttaagttaatgcgg

SEQ ID NO: 1021795 - DNA, 33 bp, Homo sapien
ggttcagatttcagtacgatgaaaacaagtaag

SEQ ID NO: 1021796 - DNA, 33 bp, Homo sapien
ggttcagatttcagtatgatgaaaacaagtaag

SEQ ID NO: 1021797 - DNA, 33 bp, Homo sapien
ttccaagatagtgacacacctgagggggccctt

SEQ ID NO: 1021798 - DNA, 33 bp, Homo sapien
ttccaagatagtgacagacctgagggggccctt

SEQ ID NO: 1021799 - DNA, 33 bp, Homo sapien
tttacagaaatttaaaacttggcaacccctggg

SEQ ID NO: 1021800 - DNA, 33 bp, Homo sapien
tttacagaaatttaaagcttggcaacccctggg

SEQ ID NO: 1021801 - DNA, 33 bp, Homo sapien
cttttgggaaaaaacactaggctcttagatcaa

SEQ ID NO: 1021802 - DNA, 33 bp, Homo sapien
cttttgggaaaaaacattaggctcttagatcaa

SEQ ID NO: 1021803 - DNA, 33 bp, Homo sapien
tatagattatccatgcaatttcagagtcattac

SEQ ID NO: 1021804 - DNA, 33 bp, Homo sapien
tatagattatccatgccatttcagagtcattac

SEQ ID NO: 1021805 - DNA, 33 bp, Homo sapien
tgtgtttggattcactaaggaaaagagtaaaag

SEQ ID NO: 1021806 - DNA, 33 bp, Homo sapien
tgtgtttggattcactgaggaaaagagtaaaag

SEQ ID NO: 1021807 - DNA, 33 bp, Homo sapien
catgaatgcaggcaaactttatacatagcgttg

SEQ ID NO: 1021808 - DNA, 33 bp, Homo sapien
catgaatgcaggcaaattttatacatagcgttg

SEQ ID NO: 1021809 - DNA, 33 bp, Homo sapien
attaccagacggttcaacatatttatagtgcca

SEQ ID NO: 1021810 - DNA, 33 bp, Homo sapien
attaccagacggttcagcatatttatagtgcca

SEQ ID NO: 1021811 - DNA, 33 bp, Homo sapien
cttcacaacaatcctgaaagatagatgggtaaa

SEQ ID NO: 1021812 - DNA, 33 bp, Homo sapien
cttcacaacaatcctgcaagatagatgggtaaa

SEQ ID NO: 1021813 - DNA, 33 bp, Homo sapien
cattctatgtcagtagaaaattgagaattaaaa

SEQ ID NO: 1021814 - DNA, 33 bp, Homo sapien
cattctatgtcagtaggaaattgagaattaaaa

SEQ ID NO: 1021815 - DNA, 33 bp, Homo sapien
ctcaatttgtccttcacgtcctttgagacctac

SEQ ID NO: 1021816 - DNA, 33 bp, Homo sapien
ctcaatttgtccttcatgtcctttgagacctac

SEQ ID NO: 1021817 - DNA, 33 bp, Homo sapien
aatatttttatgtccactaatataccatcatct

SEQ ID NO: 1021818 - DNA, 33 bp, Homo sapien
aatatttttatgtccattaatataccatcatct

SEQ ID NO: 1021819 - DNA, 33 bp, Homo sapien
gctgatttatttagaaaaaacgtgtgtgaatct

SEQ ID NO: 1021820 - DNA, 33 bp, Homo sapien
gctgatttatttagaagaaacgtgtgtgaatct

SEQ ID NO: 1021821 - DNA, 33 bp, Homo sapien
gaagaagaggaaagtcaatggagaaagcagcct

SEQ ID NO: 1021822 - DNA, 33 bp, Homo sapien
gaagaagaggaaagtcgatggagaaagcagcct

SEQ ID NO: 1021823 - DNA, 33 bp, Homo sapien
caaatccaaatgtgtaaattttatgtaatggaa

SEQ ID NO: 1021824 - DNA, 33 bp, Homo sapien
caaatccaaatgtgtagattttatgtaatggaa

SEQ ID NO: 1021825 - DNA, 33 bp, Homo sapien
tgtgaagctgccattaagtacacaggataatca

SEQ ID NO: 1021826 - DNA, 33 bp, Homo sapien
tgtgaagctgccattaggtacacaggataatca

SEQ ID NO: 1021827 - DNA, 33 bp, Homo sapien
gaaaacagagaactgaataaaagtcttgttgag

SEQ ID NO: 1021828 - DNA, 33 bp, Homo sapien
gaaaacagagaactgagtaaaagtcttgttgag

SEQ ID NO: 1021829 - DNA, 33 bp, Homo sapien
gctgtgaagtaatgtgaagtagagtagggggga

SEQ ID NO: 1021830 - DNA, 33 bp, Homo sapien
gctgtgaagtaatgtgtagtagagtagggggga

SEQ ID NO: 1021831 - DNA, 33 bp, Homo sapien
ggcacgctccatcaaaacatactgtccaatttg

SEQ ID NO: 1021832 - DNA, 33 bp, Homo sapien
ggcacgctccatcaaagcatactgtccaatttg

SEQ ID NO: 1021833 - DNA, 33 bp, Homo sapien
ttcttattctcttgcaatctttccaagcccttt

SEQ ID NO: 1021834 - DNA, 33 bp, Homo sapien
ttcttattctcttgcagtctttccaagcccttt

SEQ ID NO: 1021835 - DNA, 33 bp, Homo sapien
tgagcttctgaaatgcaaaactatggattaatt

SEQ ID NO: 1021836 - DNA, 33 bp, Homo sapien
tgagcttctgaaatgcgaaactatggattaatt

SEQ ID NO: 1021837 - DNA, 33 bp, Homo sapien
tgtgtaactaccagcacaatcaagatacaacac

SEQ ID NO: 1021838 - DNA, 33 bp, Homo sapien
tgtgtaactaccagcataatcaagatacaacac

SEQ ID NO: 1021839 - DNA, 33 bp, Homo sapien
tactctaaataagcgacaagcaaaatgaggtaa

SEQ ID NO: 1021840 - DNA, 33 bp, Homo sapien
tactctaaataagcgataagcaaaatgaggtaa

SEQ ID NO: 1021841 - DNA, 33 bp, Homo sapien
cagtttcctacaaccacactttttactcagcag

SEQ ID NO: 1021842 - DNA, 33 bp, Homo sapien
cagtttcctacaaccatactttttactcagcag

SEQ ID NO: 1021843 - DNA, 33 bp, Homo sapien
tcccacttagctcccggaatgttctttccctga

SEQ ID NO: 1021844 - DNA, 33 bp, Homo sapien
tcccacttagctcccgtaatgttctttccctga

SEQ ID NO: 1021845 - DNA, 33 bp, Homo sapien
tgctctaaacttataacactattacaaacctag

SEQ ID NO: 1021846 - DNA, 33 bp, Homo sapien
tgctctaaacttataagactattacaaacctag

SEQ ID NO: 1021847 - DNA, 33 bp, Homo sapien
ggagctattactaaccacaggccggaaagacca

SEQ ID NO: 1021848 - DNA, 33 bp, Homo sapien
ggagctattactaacctcaggccggaaagacca

SEQ ID NO: 1021849 - DNA, 33 bp, Homo sapien
ctcaaaatgaatccaacgaaccatgtaagagat

SEQ ID NO: 1021850 - DNA, 33 bp, Homo sapien
ctcaaaatgaatccaatgaaccatgtaagagat

SEQ ID NO: 1021851 - DNA, 33 bp, Homo sapien
ctgatttgtgtgctcaccaaatgtttgcctttt

SEQ ID NO: 1021852 - DNA, 33 bp, Homo sapien
ctgatttgtgtgctcatcaaatgtttgcctttt

SEQ ID NO: 1021853 - DNA, 33 bp, Homo sapien
aaccaaccaatttccaaatcttataattaataa

SEQ ID NO: 1021854 - DNA, 33 bp, Homo sapien
aaccaaccaatttccagatcttataattaataa

SEQ ID NO: 1021855 - DNA, 33 bp, Homo sapien
atgaaataaatatacacggaagagttttataag

SEQ ID NO: 1021856 - DNA, 33 bp, Homo sapien
atgaaataaatatacatggaagagttttataag

SEQ ID NO: 1021857 - DNA, 33 bp, Homo sapien
ttatgaaaaaaaggaacttcatttgattatata

SEQ ID NO: 1021858 - DNA, 33 bp, Homo sapien
ttatgaaaaaaaggaagttcatttgattatata

SEQ ID NO: 1021859 - DNA, 33 bp, Homo sapien
taagtggagccgatgaatcatcatcttctagaa

SEQ ID NO: 1021860 - DNA, 33 bp, Homo sapien
taagtggagccgatgactcatcatcttctagaa

SEQ ID NO: 1021861 - DNA, 33 bp, Homo sapien
aatagcagcaacaaagaaaaatgagactataca

SEQ ID NO: 1021862 - DNA, 33 bp, Homo sapien
aatagcagcaacaaagcaaaatgagactataca

SEQ ID NO: 1021863 - DNA, 33 bp, Homo sapien
ctatgtataaatggccaatttcaccgtcaatga

SEQ ID NO: 1021864 - DNA, 33 bp, Homo sapien
ctatgtataaatggcctatttcaccgtcaatga

SEQ ID NO: 1021865 - DNA, 33 bp, Homo sapien
gcaaccgcaattgcatcaaactagactgtaatg

SEQ ID NO: 1021866 - DNA, 33 bp, Homo sapien
gcaaccgcaattgcatgaaactagactgtaatg

SEQ ID NO: 1021867 - DNA, 33 bp, Homo sapien
tgccaagtcatgatagcaattcaagaaatttcc

SEQ ID NO: 1021868 - DNA, 33 bp, Homo sapien
tgccaagtcatgatagtaattcaagaaatttcc

SEQ ID NO: 1021869 - DNA, 33 bp, Homo sapien
agtgcatctgtttcaactgaagcaacgtaaaag

SEQ ID NO: 1021870 - DNA, 33 bp, Homo sapien
agtgcatctgtttcaattgaagcaacgtaaaag

SEQ ID NO: 1021871 - DNA, 33 bp, Homo sapien
gtcctgcttagaggaaaaattatttgtagaaag

SEQ ID NO: 1021872 - DNA, 33 bp, Homo sapien
gtcctgcttagaggaagaattatttgtagaaag

SEQ ID NO: 1021873 - DNA, 33 bp, Homo sapien
ctcatctgtaaaaaaaagcaccgaatctaacag

SEQ ID NO: 1021874 - DNA, 33 bp, Homo sapien
ctcatctgtaaaaaaaggcaccgaatctaacag

SEQ ID NO: 1021875 - DNA, 33 bp, Homo sapien
agagctctttgtgtgtcacaatgaatacataaa

SEQ ID NO: 1021876 - DNA, 33 bp, Homo sapien
agagctctttgtgtgttacaatgaatacataaa

SEQ ID NO: 1021877 - DNA, 33 bp, Homo sapien
aattattttctcaaataatcagatgtcctataa

SEQ ID NO: 1021878 - DNA, 33 bp, Homo sapien
aattattttctcaaattatcagatgtcctataa

SEQ ID NO: 1021879 - DNA, 33 bp, Homo sapien
gttacaagcaagttacaggctcagtttcaaagc

SEQ ID NO: 1021880 - DNA, 33 bp, Homo sapien
gttacaagcaagttacgggctcagtttcaaagc

SEQ ID NO: 1021881 - DNA, 33 bp, Homo sapien
tatttgaaataaagcaccagaaagataatttgg

SEQ ID NO: 1021882 - DNA, 33 bp, Homo sapien
tatttgaaataaagcatcagaaagataatttgg

SEQ ID NO: 1021883 - DNA, 33 bp, Homo sapien
gtgcctggcactcgtcccctccacaaagaacaa

SEQ ID NO: 1021884 - DNA, 33 bp, Homo sapien
gtgcctggcactcgtctcctccacaaagaacaa

SEQ ID NO: 1021885 - DNA, 33 bp, Homo sapien
ggatgcataaattctcaacaaaatattagccaa

SEQ ID NO: 1021886 - DNA, 33 bp, Homo sapien
ggatgcataaattctcgacaaaatattagccaa

SEQ ID NO: 1021887 - DNA, 33 bp, Homo sapien
tagtatctttcttacaaaatctttctggcccta

SEQ ID NO: 1021888 - DNA, 33 bp, Homo sapien
tagtatctttcttacacaatctttctggcccta

SEQ ID NO: 1021889 - DNA, 33 bp, Homo sapien
gaagtgcatggttgcaaggttgaccaataggct

SEQ ID NO: 1021890 - DNA, 33 bp, Homo sapien
gaagtgcatggttgcagggttgaccaataggct

SEQ ID NO: 1021891 - DNA, 33 bp, Homo sapien
tagacatctataagtccaccttctccttccatc

SEQ ID NO: 1021892 - DNA, 33 bp, Homo sapien
tagacatctataagtctaccttctccttccatc

SEQ ID NO: 1021893 - DNA, 33 bp, Homo sapien
tttacttcttagatcgaatataagtccatataa

SEQ ID NO: 1021894 - DNA, 33 bp, Homo sapien
tttacttcttagatcgcatataagtccatataa

SEQ ID NO: 1021895 - DNA, 33 bp, Homo sapien
gtctttgcttatgtcacatttgctaatgtccca

SEQ ID NO: 1021896 - DNA, 33 bp, Homo sapien
gtctttgcttatgtcatatttgctaatgtccca

SEQ ID NO: 1021897 - DNA, 33 bp, Homo sapien
agtggatacacgcataaaagccacatttgctct

SEQ ID NO: 1021898 - DNA, 33 bp, Homo sapien
agtggatacacgcatataagccacatttgctct

SEQ ID NO: 1021899 - DNA, 33 bp, Homo sapien
atctactgtatgacagaagcaatcaccagacat

SEQ ID NO: 1021900 - DNA, 33 bp, Homo sapien
atctactgtatgacaggagcaatcaccagacat

SEQ ID NO: 1021901 - DNA, 33 bp, Homo sapien
tgacaacatacccgtgaacatctaaatgaatca

SEQ ID NO: 1021902 - DNA, 33 bp, Homo sapien
tgacaacatacccgtgcacatctaaatgaatca

SEQ ID NO: 1021903 - DNA, 33 bp, Homo sapien
ataaacaaaatctaatcaaccttcttatctcta

SEQ ID NO: 1021904 - DNA, 33 bp, Homo sapien
ataaacaaaatctaatgaaccttcttatctcta

SEQ ID NO: 1021905 - DNA, 33 bp, Homo sapien
tcttacattgcatcataaccttttccaggattc

SEQ ID NO: 1021906 - DNA, 33 bp, Homo sapien
tcttacattgcatcattaccttttccaggattc

SEQ ID NO: 1021907 - DNA, 33 bp, Homo sapien
taaaaattccatagaccgggctcacactcttaa

SEQ ID NO: 1021908 - DNA, 33 bp, Homo sapien
taaaaattccatagactgggctcacactcttaa

SEQ ID NO: 1021909 - DNA, 33 bp, Homo sapien
taggtagagctcttgaataaggtgggaaaatgt

SEQ ID NO: 1021910 - DNA, 33 bp, Homo sapien
taggtagagctcttgagtaaggtgggaaaatgt

SEQ ID NO: 1021911 - DNA, 33 bp, Homo sapien
caaagcatggagcttgcaacttctgaagcaatg

SEQ ID NO: 1021912 - DNA, 33 bp, Homo sapien
caaagcatggagcttgtaacttctgaagcaatg

SEQ ID NO: 1021913 - DNA, 33 bp, Homo sapien
acaaatgtgaagcaaaaagctgagataattatc

SEQ ID NO: 1021914 - DNA, 33 bp, Homo sapien
acaaatgtgaagcaaagagctgagataattatc

SEQ ID NO: 1021915 - DNA, 33 bp, Homo sapien
acagaaaattaagtaacgagtcctgtatgatag

SEQ ID NO: 1021916 - DNA, 33 bp, Homo sapien
acagaaaattaagtaatgagtcctgtatgatag

SEQ ID NO: 1021917 - DNA, 33 bp, Homo sapien
ctcacagggggatacaaaataagatgagtagag

SEQ ID NO: 1021918 - DNA, 33 bp, Homo sapien
ctcacagggggatacagaataagatgagtagag

SEQ ID NO: 1021919 - DNA, 33 bp, Homo sapien
agaagggaagtacaaacgtgaacagggtaatgg

SEQ ID NO: 1021920 - DNA, 33 bp, Homo sapien
agaagggaagtacaaatgtgaacagggtaatgg

SEQ ID NO: 1021921 - DNA, 33 bp, Homo sapien
gaaatcgttgaaggctaaaggagagaaatagtt

SEQ ID NO: 1021922 - DNA, 33 bp, Homo sapien
gaaatcgttgaaggctgaaggagagaaatagtt

SEQ ID NO: 1021923 - DNA, 33 bp, Homo sapien
agggagaagaggcgtacgcaaatgactgacagc

SEQ ID NO: 1021924 - DNA, 33 bp, Homo sapien
agggagaagaggcgtatgcaaatgactgacagc

SEQ ID NO: 1021925 - DNA, 33 bp, Homo sapien
tgtcagctgtttcaaaatattcaggctgtattt

SEQ ID NO: 1021926 - DNA, 33 bp, Homo sapien
tgtcagctgtttcaaactattcaggctgtattt

SEQ ID NO: 1021927 - DNA, 33 bp, Homo sapien
gggtctctgggtcacaaatggttggtgccaacc

SEQ ID NO: 1021928 - DNA, 33 bp, Homo sapien
gggtctctgggtcacagatggttggtgccaacc

SEQ ID NO: 1021929 - DNA, 33 bp, Homo sapien
aatggacttcatggaacattctgagagtccaga

SEQ ID NO: 1021930 - DNA, 33 bp, Homo sapien
aatggacttcatggaatattctgagagtccaga

SEQ ID NO: 1021931 - DNA, 33 bp, Homo sapien
tttgcataaccatcacaaaactagttagactta

SEQ ID NO: 1021932 - DNA, 33 bp, Homo sapien
tttgcataaccatcacgaaactagttagactta

SEQ ID NO: 1021933 - DNA, 33 bp, Homo sapien
aaataatttcaagatagaaagcctactggtaca

SEQ ID NO: 1021934 - DNA, 33 bp, Homo sapien
aaataatttcaagatataaagcctactggtaca

SEQ ID NO: 1021935 - DNA, 33 bp, Homo sapien
tgaatttacatgtcaagaattattcaagcatga

SEQ ID NO: 1021936 - DNA, 33 bp, Homo sapien
tgaatttacatgtcaataattattcaagcatga

SEQ ID NO: 1021937 - DNA, 33 bp, Homo sapien
aaccttatctactaaacgcatactatgtttaga

SEQ ID NO: 1021938 - DNA, 33 bp, Homo sapien
aaccttatctactaaatgcatactatgtttaga

SEQ ID NO: 1021939 - DNA, 33 bp, Homo sapien
attaaataaacaattaaagttgcattcgtagaa

SEQ ID NO: 1021940 - DNA, 33 bp, Homo sapien
attaaataaacaattagagttgcattcgtagaa

SEQ ID NO: 1021941 - DNA, 33 bp, Homo sapien
accatatatccaataacgggttaatatccgaaa

SEQ ID NO: 1021942 - DNA, 33 bp, Homo sapien
accatatatccaataaggggttaatatccgaaa

SEQ ID NO: 1021943 - DNA, 33 bp, Homo sapien
aatatcaggatatcacaaagggttctttagagt

SEQ ID NO: 1021944 - DNA, 33 bp, Homo sapien
aatatcaggatatcacgaagggttctttagagt

SEQ ID NO: 1021945 - DNA, 33 bp, Homo sapien
ttaacatattcctaacacaataatcttagagta

SEQ ID NO: 1021946 - DNA, 33 bp, Homo sapien
ttaacatattcctaacgcaataatcttagagta

SEQ ID NO: 1021947 - DNA, 33 bp, Homo sapien
aagcttttgcctgataccctatagacttcagga

SEQ ID NO: 1021948 - DNA, 33 bp, Homo sapien
aagcttttgcctgatatcctatagacttcagga

SEQ ID NO: 1021949 - DNA, 33 bp, Homo sapien
taaaacacaagaaccaactaataggtagaaggt

SEQ ID NO: 1021950 - DNA, 33 bp, Homo sapien
taaaacacaagaaccagctaataggtagaaggt

SEQ ID NO: 1021951 - DNA, 33 bp, Homo sapien
attattgctgtattgacgctcagtgcccttgaa

SEQ ID NO: 1021952 - DNA, 33 bp, Homo sapien
attattgctgtattgatgctcagtgcccttgaa

SEQ ID NO: 1021953 - DNA, 33 bp, Homo sapien
tagattgttcagtgaaaatatgcaacagtatag

SEQ ID NO: 1021954 - DNA, 33 bp, Homo sapien
tagattgttcagtgaagatatgcaacagtatag

SEQ ID NO: 1021955 - DNA, 33 bp, Homo sapien
agttttgctttatttgcacatctcaagaaatct

SEQ ID NO: 1021956 - DNA, 33 bp, Homo sapien
agttttgctttatttggacatctcaagaaatct

SEQ ID NO: 1021957 - DNA, 33 bp, Homo sapien
agggaattcccaacacaatttcggttttctcaa

SEQ ID NO: 1021958 - DNA, 33 bp, Homo sapien
agggaattcccaacacgatttcggttttctcaa

SEQ ID NO: 1021959 - DNA, 33 bp, Homo sapien
atatcaggcaatgcatcactacactaaagaaaa

SEQ ID NO: 1021960 - DNA, 33 bp, Homo sapien
atatcaggcaatgcatgactacactaaagaaaa

SEQ ID NO: 1021961 - DNA, 33 bp, Homo sapien
taatgctgatgtaacccactgaattatgagata

SEQ ID NO: 1021962 - DNA, 33 bp, Homo sapien
taatgctgatgtaacctactgaattatgagata

SEQ ID NO: 1021963 - DNA, 33 bp, Homo sapien
gcttctgaagtatatgcagactctattcatcag

SEQ ID NO: 1021964 - DNA, 33 bp, Homo sapien
gcttctgaagtatatgtagactctattcatcag

SEQ ID NO: 1021965 - DNA, 33 bp, Homo sapien
ccaataaaacagacacaagatttaccttaagga

SEQ ID NO: 1021966 - DNA, 33 bp, Homo sapien
ccaataaaacagacacgagatttaccttaagga

SEQ ID NO: 1021967 - DNA, 33 bp, Homo sapien
ctttaaccaaattccacggactccatccccacc

SEQ ID NO: 1021968 - DNA, 33 bp, Homo sapien
ctttaaccaaattccatggactccatccccacc

SEQ ID NO: 1021969 - DNA, 33 bp, Homo sapien
ctagttcctgtcaatagtaggaataggcctgga

SEQ ID NO: 1021970 - DNA, 33 bp, Homo sapien
ctagttcctgtcaatattaggaataggcctgga

SEQ ID NO: 1021971 - DNA, 33 bp, Homo sapien
acggattcctctcgtaaaattcatagattttaa

SEQ ID NO: 1021972 - DNA, 33 bp, Homo sapien
acggattcctctcgtagaattcatagattttaa

SEQ ID NO: 1021973 - DNA, 33 bp, Homo sapien
aaccattccttgcaccaatattctcctcttctc

SEQ ID NO: 1021974 - DNA, 33 bp, Homo sapien
aaccattccttgcaccgatattctcctcttctc

SEQ ID NO: 1021975 - DNA, 33 bp, Homo sapien
ttgaaagatatgtaagcaggtagtgcagtaggg

SEQ ID NO: 1021976 - DNA, 33 bp, Homo sapien
ttgaaagatatgtaagtaggtagtgcagtaggg

SEQ ID NO: 1021977 - DNA, 33 bp, Homo sapien
aacccattgcaagctgaaaatatcataagtcaa

SEQ ID NO: 1021978 - DNA, 33 bp, Homo sapien
aacccattgcaagctgtaaatatcataagtcaa

SEQ ID NO: 1021979 - DNA, 33 bp, Homo sapien
gtatatctctatttcaaatgtcttctccataca

SEQ ID NO: 1021980 - DNA, 33 bp, Homo sapien
gtatatctctatttcagatgtcttctccataca

SEQ ID NO: 1021981 - DNA, 33 bp, Homo sapien
actaatgtgcagtacaaagatggaaataattag

SEQ ID NO: 1021982 - DNA, 33 bp, Homo sapien
actaatgtgcagtacagagatggaaataattag

SEQ ID NO: 1021983 - DNA, 33 bp, Homo sapien
aaataattagctcagacaaggcatttgatagag

SEQ ID NO: 1021984 - DNA, 33 bp, Homo sapien
aaataattagctcagagaaggcatttgatagag

SEQ ID NO: 1021985 - DNA, 33 bp, Homo sapien
tggccataccactaggacaagaaggaccctcat

SEQ ID NO: 1021986 - DNA, 33 bp, Homo sapien
tggccataccactagggcaagaaggaccctcat

SEQ ID NO: 1021987 - DNA, 33 bp, Homo sapien
gccaggtgccccaaataattcaaccagcaagtc

SEQ ID NO: 1021988 - DNA, 33 bp, Homo sapien
gccaggtgccccaaatcattcaaccagcaagtc

SEQ ID NO: 1021989 - DNA, 33 bp, Homo sapien
taaaaacttcatcttacgacttgctggttgaat

SEQ ID NO: 1021990 - DNA, 33 bp, Homo sapien
taaaaacttcatcttatgacttgctggttgaat

SEQ ID NO: 1021991 - DNA, 33 bp, Homo sapien
cttcgtgatcttctcccactattagaaactctc

SEQ ID NO: 1021992 - DNA, 33 bp, Homo sapien
cttcgtgatcttctcctactattagaaactctc

SEQ ID NO: 1021993 - DNA, 33 bp, Homo sapien
cagtattctgctaaaaaagaatggtgatataac

SEQ ID NO: 1021994 - DNA, 33 bp, Homo sapien
cagtattctgctaaaatagaatggtgatataac

SEQ ID NO: 1021995 - DNA, 33 bp, Homo sapien
actgcaaatgaagtcaaagttaggttagaatat

SEQ ID NO: 1021996 - DNA, 33 bp, Homo sapien
actgcaaatgaagtcagagttaggttagaatat

SEQ ID NO: 1021997 - DNA, 33 bp, Homo sapien
atatcaaaagaggaccaattgtttagtggctga

SEQ ID NO: 1021998 - DNA, 33 bp, Homo sapien
atatcaaaagaggaccgattgtttagtggctga

SEQ ID NO: 1021999 - DNA, 33 bp, Homo sapien
tgcttgagaaagattcagaagatagaatcatca

SEQ ID NO: 1022000 - DNA, 33 bp, Homo sapien
tgcttgagaaagattcggaagatagaatcatca

SEQ ID NO: 1022001 - DNA, 33 bp, Homo sapien
aattaccacagaattagcagcttaaacatgatg

SEQ ID NO: 1022002 - DNA, 33 bp, Homo sapien
aattaccacagaattatcagcttaaacatgatg

SEQ ID NO: 1022003 - DNA, 33 bp, Homo sapien
actgaattctttttgaaggactcacttgattag

SEQ ID NO: 1022004 - DNA, 33 bp, Homo sapien
actgaattctttttgagggactcacttgattag

SEQ ID NO: 1022005 - DNA, 33 bp, Homo sapien
ttgctattacttttgcagattatatatatatat

SEQ ID NO: 1022006 - DNA, 33 bp, Homo sapien
ttgctattacttttgcggattatatatatatat

SEQ ID NO: 1022007 - DNA, 33 bp, Homo sapien
aaaatataagctgtagccaaaaaaaagaaaata

SEQ ID NO: 1022008 - DNA, 33 bp, Homo sapien
aaaatataagctgtagtcaaaaaaaagaaaata

SEQ ID NO: 1022009 - DNA, 33 bp, Homo sapien
tggagctgattcgatcggacaagtgttgaagct

SEQ ID NO: 1022010 - DNA, 33 bp, Homo sapien
tggagctgattcgatctgacaagtgttgaagct

SEQ ID NO: 1022011 - DNA, 33 bp, Homo sapien
gtggtttcattgacacagacttggatttctaaa

SEQ ID NO: 1022012 - DNA, 33 bp, Homo sapien
gtggtttcattgacacggacttggatttctaaa

SEQ ID NO: 1022013 - DNA, 33 bp, Homo sapien
tattaaatgggaccaaaatagaagacagtggtt

SEQ ID NO: 1022014 - DNA, 33 bp, Homo sapien
tattaaatgggaccaacatagaagacagtggtt

SEQ ID NO: 1022015 - DNA, 33 bp, Homo sapien
ccaaacatatccaacaatgaggttctatcttcc

SEQ ID NO: 1022016 - DNA, 33 bp, Homo sapien
ccaaacatatccaacagtgaggttctatcttcc

SEQ ID NO: 1022017 - DNA, 33 bp, Homo sapien
aaatatgtaacatgaaaaaaataacacttgaaa

SEQ ID NO: 1022018 - DNA, 33 bp, Homo sapien
aaatatgtaacatgaagaaaataacacttgaaa

SEQ ID NO: 1022019 - DNA, 33 bp, Homo sapien
tacctacttttaagctaacacatatatttaaat

SEQ ID NO: 1022020 - DNA, 33 bp, Homo sapien
tacctacttttaagctgacacatatatttaaat

SEQ ID NO: 1022021 - DNA, 33 bp, Homo sapien
ttgtattttacttggacaatgacattcaaagtg

SEQ ID NO: 1022022 - DNA, 33 bp, Homo sapien
ttgtattttacttggagaatgacattcaaagtg

SEQ ID NO: 1022023 - DNA, 33 bp, Homo sapien
taatactcagtctccacgctcttcatttgactg

SEQ ID NO: 1022024 - DNA, 33 bp, Homo sapien
taatactcagtctccaggctcttcatttgactg

SEQ ID NO: 1022025 - DNA, 33 bp, Homo sapien
ccatgtcaagccctaaacatcctaagcaaagat

SEQ ID NO: 1022026 - DNA, 33 bp, Homo sapien
ccatgtcaagccctaagcatcctaagcaaagat

SEQ ID NO: 1022027 - DNA, 33 bp, Homo sapien
tctggcatttcaaagacacaaacatgagtaagg

SEQ ID NO: 1022028 - DNA, 33 bp, Homo sapien
tctggcatttcaaagatacaaacatgagtaagg

SEQ ID NO: 1022029 - DNA, 33 bp, Homo sapien
acctaggtaaagacagacatatttgttttccta

SEQ ID NO: 1022030 - DNA, 33 bp, Homo sapien
acctaggtaaagacaggcatatttgttttccta

SEQ ID NO: 1022031 - DNA, 33 bp, Homo sapien
tatatttgatttcaaaattacatatggttcatt

SEQ ID NO: 1022032 - DNA, 33 bp, Homo sapien
tatatttgatttcaaagttacatatggttcatt

SEQ ID NO: 1022033 - DNA, 33 bp, Homo sapien
gacaacggcgtgctgacctaccatccaaattta

SEQ ID NO: 1022034 - DNA, 33 bp, Homo sapien
gacaacggcgtgctgatctaccatccaaattta

SEQ ID NO: 1022035 - DNA, 33 bp, Homo sapien
aagagattgaccttggaagaaccactgtgaaag

SEQ ID NO: 1022036 - DNA, 33 bp, Homo sapien
aagagattgaccttgggagaaccactgtgaaag

SEQ ID NO: 1022037 - DNA, 33 bp, Homo sapien
tgctcttgctgctctcacatgactgcaggctgg

SEQ ID NO: 1022038 - DNA, 33 bp, Homo sapien
tgctcttgctgctctcgcatgactgcaggctgg

SEQ ID NO: 1022039 - DNA, 33 bp, Homo sapien
ttatcttgctgctttaaaaactccttttattca

SEQ ID NO: 1022040 - DNA, 33 bp, Homo sapien
ttatcttgctgctttataaactccttttattca

SEQ ID NO: 1022041 - DNA, 33 bp, Homo sapien
ctactgcataaagctaacacaactatataaaga

SEQ ID NO: 1022042 - DNA, 33 bp, Homo sapien
ctactgcataaagctagcacaactatataaaga

SEQ ID NO: 1022043 - DNA, 33 bp, Homo sapien
ttatctgactcttaaaagtttggtaaaatgcca

SEQ ID NO: 1022044 - DNA, 33 bp, Homo sapien
ttatctgactcttaaaggtttggtaaaatgcca

SEQ ID NO: 1022045 - DNA, 33 bp, Homo sapien
atatgattaacatatgaaagttatgatggtgca

SEQ ID NO: 1022046 - DNA, 33 bp, Homo sapien
atatgattaacatatgcaagttatgatggtgca

SEQ ID NO: 1022047 - DNA, 33 bp, Homo sapien
atttattataatgtgaaactattgtgacaaatt

SEQ ID NO: 1022048 - DNA, 33 bp, Homo sapien
atttattataatgtgagactattgtgacaaatt

SEQ ID NO: 1022049 - DNA, 33 bp, Homo sapien
gagggagtcacgttgaaagttgattctccagtc

SEQ ID NO: 1022050 - DNA, 33 bp, Homo sapien
gagggagtcacgttgatagttgattctccagtc

SEQ ID NO: 1022051 - DNA, 33 bp, Homo sapien
agcttgcatctacatcaccaatttggatcgctg

SEQ ID NO: 1022052 - DNA, 33 bp, Homo sapien
agcttgcatctacatccccaatttggatcgctg

SEQ ID NO: 1022053 - DNA, 33 bp, Homo sapien
attccacttgtatgtaaatatccaaatgaaatg

SEQ ID NO: 1022054 - DNA, 33 bp, Homo sapien
attccacttgtatgtagatatccaaatgaaatg

SEQ ID NO: 1022055 - DNA, 33 bp, Homo sapien
gaaattatcttaattgaacctcttctccttagg

SEQ ID NO: 1022056 - DNA, 33 bp, Homo sapien
gaaattatcttaattggacctcttctccttagg

SEQ ID NO: 1022057 - DNA, 33 bp, Homo sapien
caagaagcaagaagaaaacagactatgaaagat

SEQ ID NO: 1022058 - DNA, 33 bp, Homo sapien
caagaagcaagaagaatacagactatgaaagat

SEQ ID NO: 1022059 - DNA, 33 bp, Homo sapien
tgttttagcaagaggaaagactgaaccattttg

SEQ ID NO: 1022060 - DNA, 33 bp, Homo sapien
tgttttagcaagaggagagactgaaccattttg

SEQ ID NO: 1022061 - DNA, 33 bp, Homo sapien
aacgtattgttttcaaccgtgatatgggagatt

SEQ ID NO: 1022062 - DNA, 33 bp, Homo sapien
aacgtattgttttcaatcgtgatatgggagatt

SEQ ID NO: 1022063 - DNA, 33 bp, Homo sapien
aagaaacattaggaaactcacttgttttaatat

SEQ ID NO: 1022064 - DNA, 33 bp, Homo sapien
aagaaacattaggaaagtcacttgttttaatat

SEQ ID NO: 1022065 - DNA, 33 bp, Homo sapien
tgcatatcttcaaaacaaagtattaagttcatc

SEQ ID NO: 1022066 - DNA, 33 bp, Homo sapien
tgcatatcttcaaaacgaagtattaagttcatc

SEQ ID NO: 1022067 - DNA, 33 bp, Homo sapien
ctgaattgcaacgaaagtcgcacacttggtctt

SEQ ID NO: 1022068 - DNA, 33 bp, Homo sapien
ctgaattgcaacgaaattcgcacacttggtctt

SEQ ID NO: 1022069 - DNA, 33 bp, Homo sapien
caagctcagtactcccagcttcatcaggatcct

SEQ ID NO: 1022070 - DNA, 33 bp, Homo sapien
caagctcagtactcccggcttcatcaggatcct

SEQ ID NO: 1022071 - DNA, 33 bp, Homo sapien
ttttcttttctctagacgactttattgtaaaaa

SEQ ID NO: 1022072 - DNA, 33 bp, Homo sapien
ttttcttttctctagatgactttattgtaaaaa

SEQ ID NO: 1022073 - DNA, 33 bp, Homo sapien
tctggatctatatccacgtaaatgagaagagga

SEQ ID NO: 1022074 - DNA, 33 bp, Homo sapien
tctggatctatatccatgtaaatgagaagagga

SEQ ID NO: 1022075 - DNA, 33 bp, Homo sapien
agcatcaattgcacgacgtctcatagatttaac

SEQ ID NO: 1022076 - DNA, 33 bp, Homo sapien
agcatcaattgcacgatgtctcatagatttaac

SEQ ID NO: 1022077 - DNA, 33 bp, Homo sapien
tctcctctttacatcaacttttgcttattgcct

SEQ ID NO: 1022078 - DNA, 33 bp, Homo sapien
tctcctctttacatcatcttttgcttattgcct

SEQ ID NO: 1022079 - DNA, 33 bp, Homo sapien
gtgcttttagtttccacgaagcccttggaaata

SEQ ID NO: 1022080 - DNA, 33 bp, Homo sapien
gtgcttttagtttccatgaagcccttggaaata

SEQ ID NO: 1022081 - DNA, 33 bp, Homo sapien
acaggatggctcataacctggtcaacttctata

SEQ ID NO: 1022082 - DNA, 33 bp, Homo sapien
acaggatggctcataatctggtcaacttctata

SEQ ID NO: 1022083 - DNA, 33 bp, Homo sapien
gctcaaccgtgaaaaaacatgaaatactgacac

SEQ ID NO: 1022084 - DNA, 33 bp, Homo sapien
gctcaaccgtgaaaaagcatgaaatactgacac

SEQ ID NO: 1022085 - DNA, 33 bp, Homo sapien
atacataggaaagtgacgactgagcttagatcc

SEQ ID NO: 1022086 - DNA, 33 bp, Homo sapien
atacataggaaagtgatgactgagcttagatcc

SEQ ID NO: 1022087 - DNA, 33 bp, Homo sapien
ttaggtcctggaaaggaaatctagttggaatag

SEQ ID NO: 1022088 - DNA, 33 bp, Homo sapien
ttaggtcctggaaaggcaatctagttggaatag

SEQ ID NO: 1022089 - DNA, 33 bp, Homo sapien
ctatccctgcttaaaacctttcagcggtccttc

SEQ ID NO: 1022090 - DNA, 33 bp, Homo sapien
ctatccctgcttaaaatctttcagcggtccttc

SEQ ID NO: 1022091 - DNA, 33 bp, Homo sapien
tatgtaaccttaacataaaaacacacataacaa

SEQ ID NO: 1022092 - DNA, 33 bp, Homo sapien
tatgtaaccttaacatgaaaacacacataacaa

SEQ ID NO: 1022093 - DNA, 33 bp, Homo sapien
gtaagggtcatttgaaacacagcatctgaagta

SEQ ID NO: 1022094 - DNA, 33 bp, Homo sapien
gtaagggtcatttgaagcacagcatctgaagta

SEQ ID NO: 1022095 - DNA, 33 bp, Homo sapien
agtttaaaggccttgaagagatagcaaaaatgc

SEQ ID NO: 1022096 - DNA, 33 bp, Homo sapien
agtttaaaggccttgaggagatagcaaaaatgc

SEQ ID NO: 1022097 - DNA, 33 bp, Homo sapien
tatttttgccaatagaaagtgcaatttatcata

SEQ ID NO: 1022098 - DNA, 33 bp, Homo sapien
tatttttgccaatagagagtgcaatttatcata

SEQ ID NO: 1022099 - DNA, 33 bp, Homo sapien
tgaaacaagggttcccagagtcacaaattcaat

SEQ ID NO: 1022100 - DNA, 33 bp, Homo sapien
tgaaacaagggttcccggagtcacaaattcaat

SEQ ID NO: 1022101 - DNA, 33 bp, Homo sapien
aggaaaaaattgaagaagttgaagaaggaacgg

SEQ ID NO: 1022102 - DNA, 33 bp, Homo sapien
aggaaaaaattgaagaggttgaagaaggaacgg

SEQ ID NO: 1022103 - DNA, 33 bp, Homo sapien
cccctcaccctaccaaactggagcatcccaggt

SEQ ID NO: 1022104 - DNA, 33 bp, Homo sapien
cccctcaccctaccaagctggagcatcccaggt

SEQ ID NO: 1022105 - DNA, 33 bp, Homo sapien
tttattaccactctaaacttttctgcacataac

SEQ ID NO: 1022106 - DNA, 33 bp, Homo sapien
tttattaccactctaagcttttctgcacataac

SEQ ID NO: 1022107 - DNA, 33 bp, Homo sapien
tagatctcattcagcactatggtttcaaataaa

SEQ ID NO: 1022108 - DNA, 33 bp, Homo sapien
tagatctcattcagcattatggtttcaaataaa

SEQ ID NO: 1022109 - DNA, 33 bp, Homo sapien
tgaaaaaaatattggcaactaggttccaggtca

SEQ ID NO: 1022110 - DNA, 33 bp, Homo sapien
tgaaaaaaatattggcgactaggttccaggtca

SEQ ID NO: 1022111 - DNA, 33 bp, Homo sapien
aaaattctaagcatacaatcatctgataaggaa

SEQ ID NO: 1022112 - DNA, 33 bp, Homo sapien
aaaattctaagcatacgatcatctgataaggaa

SEQ ID NO: 1022113 - DNA, 33 bp, Homo sapien
aacaattggaactatgacaacaggataatcata

SEQ ID NO: 1022114 - DNA, 33 bp, Homo sapien
aacaattggaactatggcaacaggataatcata

SEQ ID NO: 1022115 - DNA, 33 bp, Homo sapien
tatgcttctgtggcaagatgtcttttctattcc

SEQ ID NO: 1022116 - DNA, 33 bp, Homo sapien
tatgcttctgtggcaatatgtcttttctattcc

SEQ ID NO: 1022117 - DNA, 33 bp, Homo sapien
agaaataagaacatgaactgttactctggactc

SEQ ID NO: 1022118 - DNA, 33 bp, Homo sapien
agaaataagaacatgagctgttactctggactc

SEQ ID NO: 1022119 - DNA, 33 bp, Homo sapien
aatatgggaagccttaagaagagttctaatggt

SEQ ID NO: 1022120 - DNA, 33 bp, Homo sapien
aatatgggaagccttaggaagagttctaatggt

SEQ ID NO: 1022121 - DNA, 33 bp, Homo sapien
gaagcaatcctgtatgcaataaggtgacagcga

SEQ ID NO: 1022122 - DNA, 33 bp, Homo sapien
gaagcaatcctgtatggaataaggtgacagcga

SEQ ID NO: 1022123 - DNA, 33 bp, Homo sapien
tgttaagaggactctaccaaaacaaaattaaat

SEQ ID NO: 1022124 - DNA, 33 bp, Homo sapien
tgttaagaggactctatcaaaacaaaattaaat

SEQ ID NO: 1022125 - DNA, 33 bp, Homo sapien
tccttctctaacgcaacgaagcagaaaagagaa

SEQ ID NO: 1022126 - DNA, 33 bp, Homo sapien
tccttctctaacgcaatgaagcagaaaagagaa

SEQ ID NO: 1022127 - DNA, 33 bp, Homo sapien
taagtatagagttaaaagactggagagccaggg

SEQ ID NO: 1022128 - DNA, 33 bp, Homo sapien
taagtatagagttaaaggactggagagccaggg

SEQ ID NO: 1022129 - DNA, 33 bp, Homo sapien
ctggctattggttaaaaccataaaatcattcta

SEQ ID NO: 1022130 - DNA, 33 bp, Homo sapien
ctggctattggttaaatccataaaatcattcta

SEQ ID NO: 1022131 - DNA, 33 bp, Homo sapien
aactacaagtcaaaaacatcattacggagaatt

SEQ ID NO: 1022132 - DNA, 33 bp, Homo sapien
aactacaagtcaaaaatatcattacggagaatt

SEQ ID NO: 1022133 - DNA, 33 bp, Homo sapien
tcacaaatctaattcacctgagtttcaggatcc

SEQ ID NO: 1022134 - DNA, 33 bp, Homo sapien
tcacaaatctaattcatctgagtttcaggatcc

SEQ ID NO: 1022135 - DNA, 33 bp, Homo sapien
tttacacttgttgtcacctgtatttgtcactgt

SEQ ID NO: 1022136 - DNA, 33 bp, Homo sapien
tttacacttgttgtcagctgtatttgtcactgt

SEQ ID NO: 1022137 - DNA, 33 bp, Homo sapien
agagatgtttcctgagaatatgttctaacctct

SEQ ID NO: 1022138 - DNA, 33 bp, Homo sapien
agagatgtttcctgagcatatgttctaacctct

SEQ ID NO: 1022139 - DNA, 33 bp, Homo sapien
gccaagatccgataacccagttgaaaataaatg

SEQ ID NO: 1022140 - DNA, 33 bp, Homo sapien
gccaagatccgataactcagttgaaaataaatg

SEQ ID NO: 1022141 - DNA, 33 bp, Homo sapien
tattctagttgcttagacctacaaacctggaga

SEQ ID NO: 1022142 - DNA, 33 bp, Homo sapien
tattctagttgcttaggcctacaaacctggaga

SEQ ID NO: 1022143 - DNA, 33 bp, Homo sapien
ccatttgtttaagtcacctgaagggactcatga

SEQ ID NO: 1022144 - DNA, 33 bp, Homo sapien
ccatttgtttaagtcatctgaagggactcatga

SEQ ID NO: 1022145 - DNA, 33 bp, Homo sapien
ttagtacaagcaaaacaagatcatgatcctttt

SEQ ID NO: 1022146 - DNA, 33 bp, Homo sapien
ttagtacaagcaaaacgagatcatgatcctttt

SEQ ID NO: 1022147 - DNA, 33 bp, Homo sapien
ttaatttgggaattcaatccatctatatttaaa

SEQ ID NO: 1022148 - DNA, 33 bp, Homo sapien
ttaatttgggaattcagtccatctatatttaaa

SEQ ID NO: 1022149 - DNA, 33 bp, Homo sapien
tgcactttgtattggccaattaagagatttccc

SEQ ID NO: 1022150 - DNA, 33 bp, Homo sapien
tgcactttgtattggctaattaagagatttccc

SEQ ID NO: 1022151 - DNA, 33 bp, Homo sapien
actttttcagaagccacaagtagatttccatag

SEQ ID NO: 1022152 - DNA, 33 bp, Homo sapien
actttttcagaagccataagtagatttccatag

SEQ ID NO: 1022153 - DNA, 33 bp, Homo sapien
gtcacctctgagaaaacgggaagagatcagatg

SEQ ID NO: 1022154 - DNA, 33 bp, Homo sapien
gtcacctctgagaaaatgggaagagatcagatg

SEQ ID NO: 1022155 - DNA, 33 bp, Homo sapien
tgttgttgttatgatacagttggtaataagacc

SEQ ID NO: 1022156 - DNA, 33 bp, Homo sapien
tgttgttgttatgatagagttggtaataagacc

SEQ ID NO: 1022157 - DNA, 33 bp, Homo sapien
ataacaatggattcaactaagcaaaatgaatgc

SEQ ID NO: 1022158 - DNA, 33 bp, Homo sapien
ataacaatggattcaattaagcaaaatgaatgc

SEQ ID NO: 1022159 - DNA, 33 bp, Homo sapien
ctcaagttattgtgtaaaaaattaaagaatatg

SEQ ID NO: 1022160 - DNA, 33 bp, Homo sapien
ctcaagttattgtgtagaaaattaaagaatatg

SEQ ID NO: 1022161 - DNA, 33 bp, Homo sapien
taaaaatgaagattcaagtttttccaaggtgga

SEQ ID NO: 1022162 - DNA, 33 bp, Homo sapien
taaaaatgaagattcaggtttttccaaggtgga

SEQ ID NO: 1022163 - DNA, 33 bp, Homo sapien
catcttggtgcaaagactatgtttcatctattg

SEQ ID NO: 1022164 - DNA, 33 bp, Homo sapien
catcttggtgcaaagattatgtttcatctattg

SEQ ID NO: 1022165 - DNA, 33 bp, Homo sapien
gagaaccagccttcaaattccacaattctttcc

SEQ ID NO: 1022166 - DNA, 33 bp, Homo sapien
gagaaccagccttcaagttccacaattctttcc

SEQ ID NO: 1022167 - DNA, 33 bp, Homo sapien
ggcttcaggacacttacgattatggtggaaggt

SEQ ID NO: 1022168 - DNA, 33 bp, Homo sapien
ggcttcaggacacttatgattatggtggaaggt

SEQ ID NO: 1022169 - DNA, 33 bp, Homo sapien
gaatcaatgtgaaaaaatcactaccatttctat

SEQ ID NO: 1022170 - DNA, 33 bp, Homo sapien
gaatcaatgtgaaaaagtcactaccatttctat

SEQ ID NO: 1022171 - DNA, 33 bp, Homo sapien
caaattcagaggactaacactaactcattttaa

SEQ ID NO: 1022172 - DNA, 33 bp, Homo sapien
caaattcagaggactatcactaactcattttaa

SEQ ID NO: 1022173 - DNA, 33 bp, Homo sapien
tgaaaatgcctggggaatccatactttgagagt

SEQ ID NO: 1022174 - DNA, 33 bp, Homo sapien
tgaaaatgcctggggattccatactttgagagt

SEQ ID NO: 1022175 - DNA, 33 bp, Homo sapien
ccttatcttgtttcaacgtcataagaatcctgg

SEQ ID NO: 1022176 - DNA, 33 bp, Homo sapien
ccttatcttgtttcaatgtcataagaatcctgg

SEQ ID NO: 1022177 - DNA, 33 bp, Homo sapien
tttagagctaaatgcaccataattaatacaaac

SEQ ID NO: 1022178 - DNA, 33 bp, Homo sapien
tttagagctaaatgcatcataattaatacaaac

SEQ ID NO: 1022179 - DNA, 33 bp, Homo sapien
gatttacagtcagtaggcaaacaaaatatagat

SEQ ID NO: 1022180 - DNA, 33 bp, Homo sapien
gatttacagtcagtagtcaaacaaaatatagat

SEQ ID NO: 1022181 - DNA, 33 bp, Homo sapien
agatttgtcttttggaaaacttcactgaatatc

SEQ ID NO: 1022182 - DNA, 33 bp, Homo sapien
agatttgtcttttggagaacttcactgaatatc

SEQ ID NO: 1022183 - DNA, 33 bp, Homo sapien
caaaagcatcaagttacacctagaaagaatttg

SEQ ID NO: 1022184 - DNA, 33 bp, Homo sapien
caaaagcatcaagttatacctagaaagaatttg

SEQ ID NO: 1022185 - DNA, 33 bp, Homo sapien
cgtgttcttgacttacaaaatgacctcacagtt

SEQ ID NO: 1022186 - DNA, 33 bp, Homo sapien
cgtgttcttgacttacgaaatgacctcacagtt

SEQ ID NO: 1022187 - DNA, 33 bp, Homo sapien
caatctaagagaaacacgtcatatatgccagga

SEQ ID NO: 1022188 - DNA, 33 bp, Homo sapien
caatctaagagaaacaggtcatatatgccagga

SEQ ID NO: 1022189 - DNA, 33 bp, Homo sapien
acttaccaattcttgaaccagaaaaataattgg

SEQ ID NO: 1022190 - DNA, 33 bp, Homo sapien
acttaccaattcttgacccagaaaaataattgg

SEQ ID NO: 1022191 - DNA, 33 bp, Homo sapien
aagtatttaacgaaaaaggatagacatacctca

SEQ ID NO: 1022192 - DNA, 33 bp, Homo sapien
aagtatttaacgaaaagggatagacatacctca

SEQ ID NO: 1022193 - DNA, 33 bp, Homo sapien
tgtttatacagcaacacaaaattaataaaacaa

SEQ ID NO: 1022194 - DNA, 33 bp, Homo sapien
tgtttatacagcaacagaaaattaataaaacaa

SEQ ID NO: 1022195 - DNA, 33 bp, Homo sapien
gcttctcttgtacccaggttagacctgcatcat

SEQ ID NO: 1022196 - DNA, 33 bp, Homo sapien
gcttctcttgtacccatgttagacctgcatcat

SEQ ID NO: 1022197 - DNA, 33 bp, Homo sapien
ttcctggttccatcacactgagagtgaaccact

SEQ ID NO: 1022198 - DNA, 33 bp, Homo sapien
ttcctggttccatcaccctgagagtgaaccact

SEQ ID NO: 1022199 - DNA, 33 bp, Homo sapien
tggtgagattaccacaaatgttagccactggca

SEQ ID NO: 1022200 - DNA, 33 bp, Homo sapien
tggtgagattaccacatatgttagccactggca

SEQ ID NO: 1022201 - DNA, 33 bp, Homo sapien
tggtatgtgggacaaacgaagcattctacccta

SEQ ID NO: 1022202 - DNA, 33 bp, Homo sapien
tggtatgtgggacaaatgaagcattctacccta

SEQ ID NO: 1022203 - DNA, 33 bp, Homo sapien
ttagtggcaggaactaccttagtcattttgata

SEQ ID NO: 1022204 - DNA, 33 bp, Homo sapien
ttagtggcaggaactatcttagtcattttgata

SEQ ID NO: 1022205 - DNA, 33 bp, Homo sapien
ggagttttctgattccaagctgattccaggctg

SEQ ID NO: 1022206 - DNA, 33 bp, Homo sapien
ggagttttctgattcccagctgattccaggctg

SEQ ID NO: 1022207 - DNA, 33 bp, Homo sapien
aagagttggcaagaaacagggaacagtggaaga

SEQ ID NO: 1022208 - DNA, 33 bp, Homo sapien
aagagttggcaagaaagagggaacagtggaaga

SEQ ID NO: 1022209 - DNA, 33 bp, Homo sapien
taaaaagtggcagaaactgaatagaaaaccaag

SEQ ID NO: 1022210 - DNA, 33 bp, Homo sapien
taaaaagtggcagaaattgaatagaaaaccaag

SEQ ID NO: 1022211 - DNA, 33 bp, Homo sapien
atgattgaaccacaacactgctagcatttctac

SEQ ID NO: 1022212 - DNA, 33 bp, Homo sapien
atgattgaaccacaacgctgctagcatttctac

SEQ ID NO: 1022213 - DNA, 33 bp, Homo sapien
aagtactcatattttcccccagttattcattca

SEQ ID NO: 1022214 - DNA, 33 bp, Homo sapien
aagtactcatattttctcccagttattcattca

SEQ ID NO: 1022215 - DNA, 33 bp, Homo sapien
actagggtagttcttaggttaaatgggctaaat

SEQ ID NO: 1022216 - DNA, 33 bp, Homo sapien
actagggtagttcttatgttaaatgggctaaat

SEQ ID NO: 1022217 - DNA, 33 bp, Homo sapien
gtaatgtagtatgtatcagttttccatagctga

SEQ ID NO: 1022218 - DNA, 33 bp, Homo sapien
gtaatgtagtatgtattagttttccatagctga

SEQ ID NO: 1022219 - DNA, 33 bp, Homo sapien
tcgtccaggttcagccgataaaattctagaaac

SEQ ID NO: 1022220 - DNA, 33 bp, Homo sapien
tcgtccaggttcagcctataaaattctagaaac

SEQ ID NO: 1022221 - DNA, 33 bp, Homo sapien
ggtatctcagtaggtgacacactccaacagtca

SEQ ID NO: 1022222 - DNA, 33 bp, Homo sapien
ggtatctcagtaggtggcacactccaacagtca

SEQ ID NO: 1022223 - DNA, 33 bp, Homo sapien
caaaaaggaaaatgaccaaacacagctgaagcc

SEQ ID NO: 1022224 - DNA, 33 bp, Homo sapien
caaaaaggaaaatgacgaaacacagctgaagcc

SEQ ID NO: 1022225 - DNA, 33 bp, Homo sapien
gtttggagtcatttccaagctctatattctgtt

SEQ ID NO: 1022226 - DNA, 33 bp, Homo sapien
gtttggagtcatttccgagctctatattctgtt

SEQ ID NO: 1022227 - DNA, 33 bp, Homo sapien
cacacataaatggagaagtattttgtgctcatg

SEQ ID NO: 1022228 - DNA, 33 bp, Homo sapien
cacacataaatggagaggtattttgtgctcatg

SEQ ID NO: 1022229 - DNA, 33 bp, Homo sapien
tgggaacatgcctgatcacaaaaagaaaattct

SEQ ID NO: 1022230 - DNA, 33 bp, Homo sapien
tgggaacatgcctgattacaaaaagaaaattct

SEQ ID NO: 1022231 - DNA, 33 bp, Homo sapien
atgttcccagttgccacgcaatgtgagttggca

SEQ ID NO: 1022232 - DNA, 33 bp, Homo sapien
atgttcccagttgccatgcaatgtgagttggca

SEQ ID NO: 1022233 - DNA, 33 bp, Homo sapien
tcatatcacctacttacaatgtataagtgaatt

SEQ ID NO: 1022234 - DNA, 33 bp, Homo sapien
tcatatcacctacttagaatgtataagtgaatt

SEQ ID NO: 1022235 - DNA, 33 bp, Homo sapien
aaagtacaacaaaacaacactgagaatctgtgg

SEQ ID NO: 1022236 - DNA, 33 bp, Homo sapien
aaagtacaacaaaacatcactgagaatctgtgg

SEQ ID NO: 1022237 - DNA, 33 bp, Homo sapien
atgctgtcatcagttacagacaatatttcctat

SEQ ID NO: 1022238 - DNA, 33 bp, Homo sapien
atgctgtcatcagttatagacaatatttcctat

SEQ ID NO: 1022239 - DNA, 33 bp, Homo sapien
tcaggtggctaccttgcacttcattgtctcaaa

SEQ ID NO: 1022240 - DNA, 33 bp, Homo sapien
tcaggtggctaccttggacttcattgtctcaaa

SEQ ID NO: 1022241 - DNA, 33 bp, Homo sapien
acactctttctctagcaccgtgctctaatacct

SEQ ID NO: 1022242 - DNA, 33 bp, Homo sapien
acactctttctctagcgccgtgctctaatacct

SEQ ID NO: 1022243 - DNA, 33 bp, Homo sapien
tgctgtcacctctcaccgtgacaggtatgattt

SEQ ID NO: 1022244 - DNA, 33 bp, Homo sapien
tgctgtcacctctcactgtgacaggtatgattt

SEQ ID NO: 1022245 - DNA, 33 bp, Homo sapien
ttctttcaaaacctgcactgttaaaatcaccta

SEQ ID NO: 1022246 - DNA, 33 bp, Homo sapien
ttctttcaaaacctgccctgttaaaatcaccta

SEQ ID NO: 1022247 - DNA, 33 bp, Homo sapien
aaggcactgggttacacgagaaagagaatttgt

SEQ ID NO: 1022248 - DNA, 33 bp, Homo sapien
aaggcactgggttacatgagaaagagaatttgt

SEQ ID NO: 1022249 - DNA, 33 bp, Homo sapien
aacagcttaattaccaagtctgcatgtggctga

SEQ ID NO: 1022250 - DNA, 33 bp, Homo sapien
aacagcttaattaccaggtctgcatgtggctga

SEQ ID NO: 1022251 - DNA, 33 bp, Homo sapien
ctcatgtaaaatgcaagaaggctttgatagtat

SEQ ID NO: 1022252 - DNA, 33 bp, Homo sapien
ctcatgtaaaatgcaataaggctttgatagtat

SEQ ID NO: 1022253 - DNA, 33 bp, Homo sapien
gcttaagcaaattatgccagcctacgtgaagtg

SEQ ID NO: 1022254 - DNA, 33 bp, Homo sapien
gcttaagcaaattatgtcagcctacgtgaagtg

SEQ ID NO: 1022255 - DNA, 33 bp, Homo sapien
catatgcaaattaccactctagagcagtgtttt

SEQ ID NO: 1022256 - DNA, 33 bp, Homo sapien
catatgcaaattaccagtctagagcagtgtttt

SEQ ID NO: 1022257 - DNA, 33 bp, Homo sapien
gcttcttttccagaaaaatatgctatgtgattc

SEQ ID NO: 1022258 - DNA, 33 bp, Homo sapien
gcttcttttccagaaatatatgctatgtgattc

SEQ ID NO: 1022259 - DNA, 33 bp, Homo sapien
ccttatgtatgttctcaatgagtttataaacat

SEQ ID NO: 1022260 - DNA, 33 bp, Homo sapien
ccttatgtatgttctccatgagtttataaacat

SEQ ID NO: 1022261 - DNA, 33 bp, Homo sapien
agcactgctttacctgcatctcataatttttga

SEQ ID NO: 1022262 - DNA, 33 bp, Homo sapien
agcactgctttacctggatctcataatttttga

SEQ ID NO: 1022263 - DNA, 33 bp, Homo sapien
atctgaacaaatgagacggaccggtttctcaca

SEQ ID NO: 1022264 - DNA, 33 bp, Homo sapien
atctgaacaaatgagatggaccggtttctcaca

SEQ ID NO: 1022265 - DNA, 33 bp, Homo sapien
aggaaaccaagagaataagtgggaaacattact

SEQ ID NO: 1022266 - DNA, 33 bp, Homo sapien
aggaaaccaagagaatgagtgggaaacattact

SEQ ID NO: 1022267 - DNA, 33 bp, Homo sapien
gatgtcaaataacatacagaaaaattagaaaca

SEQ ID NO: 1022268 - DNA, 33 bp, Homo sapien
gatgtcaaataacatagagaaaaattagaaaca

SEQ ID NO: 1022269 - DNA, 33 bp, Homo sapien
gattttctaataagcaccaattcacttagtaca

SEQ ID NO: 1022270 - DNA, 33 bp, Homo sapien
gattttctaataagcagcaattcacttagtaca

SEQ ID NO: 1022271 - DNA, 33 bp, Homo sapien
ggttacatataaatcaacttcaatagcaagaac

SEQ ID NO: 1022272 - DNA, 33 bp, Homo sapien
ggttacatataaatcatcttcaatagcaagaac

SEQ ID NO: 1022273 - DNA, 33 bp, Homo sapien
attgaaactaaaagacggatttatacaattgct

SEQ ID NO: 1022274 - DNA, 33 bp, Homo sapien
attgaaactaaaagactgatttatacaattgct

SEQ ID NO: 1022275 - DNA, 33 bp, Homo sapien
ttcagagcaaagtccaactaaattcatgattcg

SEQ ID NO: 1022276 - DNA, 33 bp, Homo sapien
ttcagagcaaagtccagctaaattcatgattcg

SEQ ID NO: 1022277 - DNA, 33 bp, Homo sapien
aggctagttgggaggacagagtactccaagcag

SEQ ID NO: 1022278 - DNA, 33 bp, Homo sapien
aggctagttgggaggatagagtactccaagcag

SEQ ID NO: 1022279 - DNA, 33 bp, Homo sapien
ttccattgtatcataaacgaagcagttgcatca

SEQ ID NO: 1022280 - DNA, 33 bp, Homo sapien
ttccattgtatcataagcgaagcagttgcatca

SEQ ID NO: 1022281 - DNA, 33 bp, Homo sapien
ccttttaatgtttccacctcccatatacccagt

SEQ ID NO: 1022282 - DNA, 33 bp, Homo sapien
ccttttaatgtttccatctcccatatacccagt

SEQ ID NO: 1022283 - DNA, 33 bp, Homo sapien
acctgcagacctcagaacatgacaataaattcc

SEQ ID NO: 1022284 - DNA, 33 bp, Homo sapien
acctgcagacctcagagcatgacaataaattcc

SEQ ID NO: 1022285 - DNA, 33 bp, Homo sapien
aggctattgtctgtcacgatcggccacaaagta

SEQ ID NO: 1022286 - DNA, 33 bp, Homo sapien
aggctattgtctgtcatgatcggccacaaagta

SEQ ID NO: 1022287 - DNA, 33 bp, Homo sapien
tgtgaaaggagaaatcaacacaataccttcaac

SEQ ID NO: 1022288 - DNA, 33 bp, Homo sapien
tgtgaaaggagaaatctacacaataccttcaac

SEQ ID NO: 1022289 - DNA, 33 bp, Homo sapien
actagctatgattgagaatgattctttcatttg

SEQ ID NO: 1022290 - DNA, 33 bp, Homo sapien
actagctatgattgagcatgattctttcatttg

SEQ ID NO: 1022291 - DNA, 33 bp, Homo sapien
aacatttcaaccaaaaacacatttgaactgtta

SEQ ID NO: 1022292 - DNA, 33 bp, Homo sapien
aacatttcaaccaaaaccacatttgaactgtta

SEQ ID NO: 1022293 - DNA, 33 bp, Homo sapien
gctggacttcaaactaaaccattctggattcca

SEQ ID NO: 1022294 - DNA, 33 bp, Homo sapien
gctggacttcaaactagaccattctggattcca

SEQ ID NO: 1022295 - DNA, 33 bp, Homo sapien
ttaaatcactggaatacacatttgttagaattt

SEQ ID NO: 1022296 - DNA, 33 bp, Homo sapien
ttaaatcactggaatagacatttgttagaattt

SEQ ID NO: 1022297 - DNA, 33 bp, Homo sapien
catgtcctaggaagtagcttttttctcatattt

SEQ ID NO: 1022298 - DNA, 33 bp, Homo sapien
catgtcctaggaagtatcttttttctcatattt

SEQ ID NO: 1022299 - DNA, 33 bp, Homo sapien
tgaggtctagtaacaaaaaggtagaatcacttg

SEQ ID NO: 1022300 - DNA, 33 bp, Homo sapien
tgaggtctagtaacaagaaggtagaatcacttg

SEQ ID NO: 1022301 - DNA, 33 bp, Homo sapien
gaggcttctggaaactcaatgccaaagaaagag

SEQ ID NO: 1022302 - DNA, 33 bp, Homo sapien
gaggcttctggaaactgaatgccaaagaaagag

SEQ ID NO: 1022303 - DNA, 33 bp, Homo sapien
ggagccctgtttcatcacagagctttaagtatt

SEQ ID NO: 1022304 - DNA, 33 bp, Homo sapien
ggagccctgtttcatcgcagagctttaagtatt

SEQ ID NO: 1022305 - DNA, 33 bp, Homo sapien
aatggcttgccttgccgaacataccagtagaac

SEQ ID NO: 1022306 - DNA, 33 bp, Homo sapien
aatggcttgccttgcctaacataccagtagaac

SEQ ID NO: 1022307 - DNA, 33 bp, Homo sapien
ataatgctgctggcaactgaattttttcagtgt

SEQ ID NO: 1022308 - DNA, 33 bp, Homo sapien
ataatgctgctggcaattgaattttttcagtgt

SEQ ID NO: 1022309 - DNA, 33 bp, Homo sapien
gagaagtcacaagaaacgttaaggttctaatta

SEQ ID NO: 1022310 - DNA, 33 bp, Homo sapien
gagaagtcacaagaaatgttaaggttctaatta

SEQ ID NO: 1022311 - DNA, 33 bp, Homo sapien
tttctccagcgcattcccctaaggccgcctgag

SEQ ID NO: 1022312 - DNA, 33 bp, Homo sapien
tttctccagcgcattctcctaaggccgcctgag

SEQ ID NO: 1022313 - DNA, 33 bp, Homo sapien
tttttgaaaggttgtccaacatggttgatttgt

SEQ ID NO: 1022314 - DNA, 33 bp, Homo sapien
tttttgaaaggttgtctaacatggttgatttgt

SEQ ID NO: 1022315 - DNA, 33 bp, Homo sapien
ggctaaatcaagggaacgcctggctaatgagaa

SEQ ID NO: 1022316 - DNA, 33 bp, Homo sapien
ggctaaatcaagggaatgcctggctaatgagaa

SEQ ID NO: 1022317 - DNA, 33 bp, Homo sapien
gggaggcaaggtataacgattcactctacctct

SEQ ID NO: 1022318 - DNA, 33 bp, Homo sapien
gggaggcaaggtataatgattcactctacctct

SEQ ID NO: 1022319 - DNA, 33 bp, Homo sapien
ctgtccttgcttgaaagatcctgagagtcctaa

SEQ ID NO: 1022320 - DNA, 33 bp, Homo sapien
ctgtccttgcttgaaatatcctgagagtcctaa

SEQ ID NO: 1022321 - DNA, 33 bp, Homo sapien
tacatctgacatataactgagtgtacaataaga

SEQ ID NO: 1022322 - DNA, 33 bp, Homo sapien
tacatctgacatataattgagtgtacaataaga

SEQ ID NO: 1022323 - DNA, 33 bp, Homo sapien
tagcaagaatgagagcacacaactaggattttt

SEQ ID NO: 1022324 - DNA, 33 bp, Homo sapien
tagcaagaatgagagcgcacaactaggattttt

SEQ ID NO: 1022325 - DNA, 33 bp, Homo sapien
atcttaactggagcccgatccaggatcatgcac

SEQ ID NO: 1022326 - DNA, 33 bp, Homo sapien
atcttaactggagccctatccaggatcatgcac

SEQ ID NO: 1022327 - DNA, 33 bp, Homo sapien
gagtcatgtactgtgacgcctgacagtgctccc

SEQ ID NO: 1022328 - DNA, 33 bp, Homo sapien
gagtcatgtactgtgatgcctgacagtgctccc

SEQ ID NO: 1022329 - DNA, 33 bp, Homo sapien
agcttatttgcctaagaatgtaaattgcaaacc

SEQ ID NO: 1022330 - DNA, 33 bp, Homo sapien
agcttatttgcctaaggatgtaaattgcaaacc

SEQ ID NO: 1022331 - DNA, 33 bp, Homo sapien
caatagaagggagtaacatataaagccccagca

SEQ ID NO: 1022332 - DNA, 33 bp, Homo sapien
caatagaagggagtaatatataaagccccagca

SEQ ID NO: 1022333 - DNA, 33 bp, Homo sapien
ataagaccaagatttaagattgaaattatgagc

SEQ ID NO: 1022334 - DNA, 33 bp, Homo sapien
ataagaccaagatttaggattgaaattatgagc

SEQ ID NO: 1022335 - DNA, 33 bp, Homo sapien
tgttttaaggatactgcaagggccaaacaaaac

SEQ ID NO: 1022336 - DNA, 33 bp, Homo sapien
tgttttaaggatactgtaagggccaaacaaaac

SEQ ID NO: 1022337 - DNA, 33 bp, Homo sapien
tcaactgtgtctattacctacccaagcctcaga

SEQ ID NO: 1022338 - DNA, 33 bp, Homo sapien
tcaactgtgtctattatctacccaagcctcaga

SEQ ID NO: 1022339 - DNA, 33 bp, Homo sapien
atcagcatgtaagtcaactatttcgaggcaatg

SEQ ID NO: 1022340 - DNA, 33 bp, Homo sapien
atcagcatgtaagtcatctatttcgaggcaatg

SEQ ID NO: 1022341 - DNA, 33 bp, Homo sapien
ggctagtaatggtcagcaacatgtctcaaaacc

SEQ ID NO: 1022342 - DNA, 33 bp, Homo sapien
ggctagtaatggtcaggaacatgtctcaaaacc

SEQ ID NO: 1022343 - DNA, 33 bp, Homo sapien
ataaaaacatactgaaatctcagccatccagaa

SEQ ID NO: 1022344 - DNA, 33 bp, Homo sapien
ataaaaacatactgaagtctcagccatccagaa

SEQ ID NO: 1022345 - DNA, 33 bp, Homo sapien
gagcttgaaggaaatgaaaatccttgggaccta

SEQ ID NO: 1022346 - DNA, 33 bp, Homo sapien
gagcttgaaggaaatgcaaatccttgggaccta

SEQ ID NO: 1022347 - DNA, 33 bp, Homo sapien
gcagtgattctcaaaacgtagtctcctatggaa

SEQ ID NO: 1022348 - DNA, 33 bp, Homo sapien
gcagtgattctcaaaaggtagtctcctatggaa

SEQ ID NO: 1022349 - DNA, 33 bp, Homo sapien
gctgttaggatcttcacaggggaataaatggta

SEQ ID NO: 1022350 - DNA, 33 bp, Homo sapien
gctgttaggatcttcagaggggaataaatggta

SEQ ID NO: 1022351 - DNA, 33 bp, Homo sapien
tgcagtgtttgattccaaagccctaatgataac

SEQ ID NO: 1022352 - DNA, 33 bp, Homo sapien
tgcagtgtttgattccgaagccctaatgataac

SEQ ID NO: 1022353 - DNA, 33 bp, Homo sapien
cttatactcgtttacactagctagttacatgag

SEQ ID NO: 1022354 - DNA, 33 bp, Homo sapien
cttatactcgtttacattagctagttacatgag

SEQ ID NO: 1022355 - DNA, 33 bp, Homo sapien
ccaccatcttctgaccactttctatttgccaag

SEQ ID NO: 1022356 - DNA, 33 bp, Homo sapien
ccaccatcttctgaccgctttctatttgccaag

SEQ ID NO: 1022357 - DNA, 33 bp, Homo sapien
aggttgattctgttgaataaggatgcatctctt

SEQ ID NO: 1022358 - DNA, 33 bp, Homo sapien
aggttgattctgttgactaaggatgcatctctt

SEQ ID NO: 1022359 - DNA, 33 bp, Homo sapien
tccatatacaagaacacagtaccagcttgcact

SEQ ID NO: 1022360 - DNA, 33 bp, Homo sapien
tccatatacaagaacatagtaccagcttgcact

SEQ ID NO: 1022361 - DNA, 33 bp, Homo sapien
tatgtcctgccttattggagattctagatcatt

SEQ ID NO: 1022362 - DNA, 33 bp, Homo sapien
tatgtcctgccttatttgagattctagatcatt

SEQ ID NO: 1022363 - DNA, 33 bp, Homo sapien
aagtctatatattgtgcacgtgatttagagaat

SEQ ID NO: 1022364 - DNA, 33 bp, Homo sapien
aagtctatatattgtgtacgtgatttagagaat

SEQ ID NO: 1022365 - DNA, 33 bp, Homo sapien
gattgaagttcaccaccgagttgaggattgtaa

SEQ ID NO: 1022366 - DNA, 33 bp, Homo sapien
gattgaagttcaccactgagttgaggattgtaa

SEQ ID NO: 1022367 - DNA, 33 bp, Homo sapien
aaaattaacttatccacactacacagttagtga

SEQ ID NO: 1022368 - DNA, 33 bp, Homo sapien
aaaattaacttatccagactacacagttagtga

SEQ ID NO: 1022369 - DNA, 33 bp, Homo sapien
tgaaaaatattatgtaactggaatcaaactgtc

SEQ ID NO: 1022370 - DNA, 33 bp, Homo sapien
tgaaaaatattatgtagctggaatcaaactgtc

SEQ ID NO: 1022371 - DNA, 33 bp, Homo sapien
ttaaatctttcatgacactctttgacactgtca

SEQ ID NO: 1022372 - DNA, 33 bp, Homo sapien
ttaaatctttcatgacgctctttgacactgtca

SEQ ID NO: 1022373 - DNA, 33 bp, Homo sapien
attttgagcatacagaagttttctttctccttt

SEQ ID NO: 1022374 - DNA, 33 bp, Homo sapien
attttgagcatacagatgttttctttctccttt

SEQ ID NO: 1022375 - DNA, 33 bp, Homo sapien
atgaattatgtcaagaaagtcagtaggtttatt

SEQ ID NO: 1022376 - DNA, 33 bp, Homo sapien
atgaattatgtcaagagagtcagtaggtttatt

SEQ ID NO: 1022377 - DNA, 33 bp, Homo sapien
acttgctccagcttaaatagtaagccaaagagc

SEQ ID NO: 1022378 - DNA, 33 bp, Homo sapien
acttgctccagcttaagtagtaagccaaagagc

SEQ ID NO: 1022379 - DNA, 33 bp, Homo sapien
aaccactgtcaaatcaaaaccgtgcactagcct

SEQ ID NO: 1022380 - DNA, 33 bp, Homo sapien
aaccactgtcaaatcagaaccgtgcactagcct

SEQ ID NO: 1022381 - DNA, 33 bp, Homo sapien
tccaagttcatgtacaatccaattaaagagtga

SEQ ID NO: 1022382 - DNA, 33 bp, Homo sapien
tccaagttcatgtacagtccaattaaagagtga

SEQ ID NO: 1022383 - DNA, 33 bp, Homo sapien
tccaggtatcctctacaataattcatagtcata

SEQ ID NO: 1022384 - DNA, 33 bp, Homo sapien
tccaggtatcctctacgataattcatagtcata

SEQ ID NO: 1022385 - DNA, 33 bp, Homo sapien
aaaatcctacaagatgaaattccttgacctgtt

SEQ ID NO: 1022386 - DNA, 33 bp, Homo sapien
aaaatcctacaagatgtaattccttgacctgtt

SEQ ID NO: 1022387 - DNA, 33 bp, Homo sapien
ctgattgaaaaaccacggccctatttgagtgac

SEQ ID NO: 1022388 - DNA, 33 bp, Homo sapien
ctgattgaaaaaccactgccctatttgagtgac

SEQ ID NO: 1022389 - DNA, 33 bp, Homo sapien
catgcagggcaagaaaaaactttagaaagcctt

SEQ ID NO: 1022390 - DNA, 33 bp, Homo sapien
catgcagggcaagaaataactttagaaagcctt

SEQ ID NO: 1022391 - DNA, 33 bp, Homo sapien
attgacataagaaacgcaagaggtcaccaccat

SEQ ID NO: 1022392 - DNA, 33 bp, Homo sapien
attgacataagaaacgtaagaggtcaccaccat

SEQ ID NO: 1022393 - DNA, 33 bp, Homo sapien
cttagacaaatggagcaacttaatctgaagcca

SEQ ID NO: 1022394 - DNA, 33 bp, Homo sapien
cttagacaaatggagcgacttaatctgaagcca

SEQ ID NO: 1022395 - DNA, 33 bp, Homo sapien
cccctggaattcaacaaaacatttcgggtacat

SEQ ID NO: 1022396 - DNA, 33 bp, Homo sapien
cccctggaattcaacacaacatttcgggtacat

SEQ ID NO: 1022397 - DNA, 33 bp, Homo sapien
tgaagaatttattctacagtcgtgatcatgtag

SEQ ID NO: 1022398 - DNA, 33 bp, Homo sapien
tgaagaatttattctatagtcgtgatcatgtag

SEQ ID NO: 1022399 - DNA, 33 bp, Homo sapien
tccttcatgatccaaaacttgcagattgaaaat

SEQ ID NO: 1022400 - DNA, 33 bp, Homo sapien
tccttcatgatccaaaccttgcagattgaaaat

SEQ ID NO: 1022401 - DNA, 33 bp, Homo sapien
ttatgtttaatggaaactgtctttctgagcagg

SEQ ID NO: 1022402 - DNA, 33 bp, Homo sapien
ttatgtttaatggaaattgtctttctgagcagg

SEQ ID NO: 1022403 - DNA, 33 bp, Homo sapien
ccaagaaaagactcaacgagatcatgcaacttg

SEQ ID NO: 1022404 - DNA, 33 bp, Homo sapien
ccaagaaaagactcaatgagatcatgcaacttg

SEQ ID NO: 1022405 - DNA, 33 bp, Homo sapien
tattcttaaatttctacgtgctttgatttttgt

SEQ ID NO: 1022406 - DNA, 33 bp, Homo sapien
tattcttaaatttctaggtgctttgatttttgt

SEQ ID NO: 1022407 - DNA, 33 bp, Homo sapien
atttatgggatgtaaccaagtggaacttagtgg

SEQ ID NO: 1022408 - DNA, 33 bp, Homo sapien
atttatgggatgtaacgaagtggaacttagtgg

SEQ ID NO: 1022409 - DNA, 33 bp, Homo sapien
agcaaagaaaatcctacgtactggatgccttca

SEQ ID NO: 1022410 - DNA, 33 bp, Homo sapien
agcaaagaaaatcctatgtactggatgccttca

SEQ ID NO: 1022411 - DNA, 33 bp, Homo sapien
cccagcaacaggaattaaaaacaattgtatttc

SEQ ID NO: 1022412 - DNA, 33 bp, Homo sapien
cccagcaacaggaattgaaaacaattgtatttc

SEQ ID NO: 1022413 - DNA, 33 bp, Homo sapien
cctcatgcttgttgtaccaaatcctacatcatc

SEQ ID NO: 1022414 - DNA, 33 bp, Homo sapien
cctcatgcttgttgtatcaaatcctacatcatc

SEQ ID NO: 1022415 - DNA, 33 bp, Homo sapien
ctacaaaaagaataacagtaatgaacctcatca

SEQ ID NO: 1022416 - DNA, 33 bp, Homo sapien
ctacaaaaagaataacggtaatgaacctcatca

SEQ ID NO: 1022417 - DNA, 33 bp, Homo sapien
atcataaatgttggaaaatatagactctgttac

SEQ ID NO: 1022418 - DNA, 33 bp, Homo sapien
atcataaatgttggaagatatagactctgttac

SEQ ID NO: 1022419 - DNA, 33 bp, Homo sapien
atacatctgaaaaacaatcatctaaatcttaaa

SEQ ID NO: 1022420 - DNA, 33 bp, Homo sapien
atacatctgaaaaacagtcatctaaatcttaaa

SEQ ID NO: 1022421 - DNA, 33 bp, Homo sapien
gaatatctgtccatgcacattgaaaactgtgac

SEQ ID NO: 1022422 - DNA, 33 bp, Homo sapien
gaatatctgtccatgcgcattgaaaactgtgac

SEQ ID NO: 1022423 - DNA, 33 bp, Homo sapien
gccctgtacacaattaagcaaaatattctattt

SEQ ID NO: 1022424 - DNA, 33 bp, Homo sapien
gccctgtacacaattaggcaaaatattctattt

SEQ ID NO: 1022425 - DNA, 33 bp, Homo sapien
gttagtattcttacaccgagaaaaaaattcagt

SEQ ID NO: 1022426 - DNA, 33 bp, Homo sapien
gttagtattcttacactgagaaaaaaattcagt

SEQ ID NO: 1022427 - DNA, 33 bp, Homo sapien
gacaaagtcaaattcaataccaaaacatgaggc

SEQ ID NO: 1022428 - DNA, 33 bp, Homo sapien
gacaaagtcaaattcagtaccaaaacatgaggc

SEQ ID NO: 1022429 - DNA, 33 bp, Homo sapien
ctataaatgggcagttcaaaagtgaacagttat

SEQ ID NO: 1022430 - DNA, 33 bp, Homo sapien
ctataaatgggcagtttaaaagtgaacagttat

SEQ ID NO: 1022431 - DNA, 33 bp, Homo sapien
atttccctccagattcaagaagagcaaggatca

SEQ ID NO: 1022432 - DNA, 33 bp, Homo sapien
atttccctccagattcgagaagagcaaggatca

SEQ ID NO: 1022433 - DNA, 33 bp, Homo sapien
gtcatgtgtccatttaaactctacctggcttct

SEQ ID NO: 1022434 - DNA, 33 bp, Homo sapien
gtcatgtgtccatttagactctacctggcttct

SEQ ID NO: 1022435 - DNA, 33 bp, Homo sapien
tcaagccttctatgaaacttttcttttctggta

SEQ ID NO: 1022436 - DNA, 33 bp, Homo sapien
tcaagccttctatgaagcttttcttttctggta

SEQ ID NO: 1022437 - DNA, 33 bp, Homo sapien
ctggctctgcaatctaactgaagctgaaaaggg

SEQ ID NO: 1022438 - DNA, 33 bp, Homo sapien
ctggctctgcaatctacctgaagctgaaaaggg

SEQ ID NO: 1022439 - DNA, 33 bp, Homo sapien
atacttcagaagctccggactaaaagcctctaa

SEQ ID NO: 1022440 - DNA, 33 bp, Homo sapien
atacttcagaagctcctgactaaaagcctctaa

SEQ ID NO: 1022441 - DNA, 33 bp, Homo sapien
aaaacagatgctaaaaaggtatctaatgtagaa

SEQ ID NO: 1022442 - DNA, 33 bp, Homo sapien
aaaacagatgctaaaagggtatctaatgtagaa

SEQ ID NO: 1022443 - DNA, 33 bp, Homo sapien
gctttattgtctgagaagttggtaagtttccta

SEQ ID NO: 1022444 - DNA, 33 bp, Homo sapien
gctttattgtctgagaggttggtaagtttccta

SEQ ID NO: 1022445 - DNA, 33 bp, Homo sapien
catgtctggctaaagacggctaaattctcatgt

SEQ ID NO: 1022446 - DNA, 33 bp, Homo sapien
catgtctggctaaagatggctaaattctcatgt

SEQ ID NO: 1022447 - DNA, 33 bp, Homo sapien
gaaaatatttactggcccaagattacagtttaa

SEQ ID NO: 1022448 - DNA, 33 bp, Homo sapien
gaaaatatttactggctcaagattacagtttaa

SEQ ID NO: 1022449 - DNA, 33 bp, Homo sapien
gtgacctgttgacctcacttgtcctttattgct

SEQ ID NO: 1022450 - DNA, 33 bp, Homo sapien
gtgacctgttgacctcgcttgtcctttattgct

SEQ ID NO: 1022451 - DNA, 33 bp, Homo sapien
ggagtgaacagattccacaatgggggcaagatg

SEQ ID NO: 1022452 - DNA, 33 bp, Homo sapien
ggagtgaacagattccgcaatgggggcaagatg

SEQ ID NO: 1022453 - DNA, 33 bp, Homo sapien
gaggataataaaatgtaaatgcctgaaacctct

SEQ ID NO: 1022454 - DNA, 33 bp, Homo sapien
gaggataataaaatgtgaatgcctgaaacctct

SEQ ID NO: 1022455 - DNA, 33 bp, Homo sapien
ctaagattccttatccacacagaataggaaatt

SEQ ID NO: 1022456 - DNA, 33 bp, Homo sapien
ctaagattccttatccgcacagaataggaaatt

SEQ ID NO: 1022457 - DNA, 33 bp, Homo sapien
aagaactcggaactacaaatcagccgagcaatc

SEQ ID NO: 1022458 - DNA, 33 bp, Homo sapien
aagaactcggaactaccaatcagccgagcaatc

SEQ ID NO: 1022459 - DNA, 33 bp, Homo sapien
tacagatagagagttaggtactaggttaacaac

SEQ ID NO: 1022460 - DNA, 33 bp, Homo sapien
tacagatagagagttatgtactaggttaacaac

SEQ ID NO: 1022461 - DNA, 33 bp, Homo sapien
caaagttttgagagcaatctttgacatcttgtt

SEQ ID NO: 1022462 - DNA, 33 bp, Homo sapien
caaagttttgagagcagtctttgacatcttgtt

SEQ ID NO: 1022463 - DNA, 33 bp, Homo sapien
gacaaattccttgaacaagtggatctggtacta

SEQ ID NO: 1022464 - DNA, 33 bp, Homo sapien
gacaaattccttgaacgagtggatctggtacta

SEQ ID NO: 1022465 - DNA, 33 bp, Homo sapien
ttaagtttcaacaaaaccttagcagattaatag

SEQ ID NO: 1022466 - DNA, 33 bp, Homo sapien
ttaagtttcaacaaaagcttagcagattaatag

SEQ ID NO: 1022467 - DNA, 33 bp, Homo sapien
tacttaattattgggaaagttaagcaatttctc

SEQ ID NO: 1022468 - DNA, 33 bp, Homo sapien
tacttaattattgggacagttaagcaatttctc

SEQ ID NO: 1022469 - DNA, 33 bp, Homo sapien
agcagagtctcttagaacataagaaatacagaa

SEQ ID NO: 1022470 - DNA, 33 bp, Homo sapien
agcagagtctcttagagcataagaaatacagaa

SEQ ID NO: 1022471 - DNA, 33 bp, Homo sapien
taatttccttaaggacccccctgccttcaagtt

SEQ ID NO: 1022472 - DNA, 33 bp, Homo sapien
taatttccttaaggacgcccctgccttcaagtt

SEQ ID NO: 1022473 - DNA, 33 bp, Homo sapien
caattataatttgtcaatattcagcttaaaaaa

SEQ ID NO: 1022474 - DNA, 33 bp, Homo sapien
caattataatttgtcagtattcagcttaaaaaa

SEQ ID NO: 1022475 - DNA, 33 bp, Homo sapien
acctgtaagatcacaactgagtttaaagctgag

SEQ ID NO: 1022476 - DNA, 33 bp, Homo sapien
acctgtaagatcacaattgagtttaaagctgag

SEQ ID NO: 1022477 - DNA, 33 bp, Homo sapien
tcagaagaagagaaatgattcaacccacatagg

SEQ ID NO: 1022478 - DNA, 33 bp, Homo sapien
tcagaagaagagaaattattcaacccacatagg

SEQ ID NO: 1022479 - DNA, 33 bp, Homo sapien
aggtgggaggccataaactttcagtcattagat

SEQ ID NO: 1022480 - DNA, 33 bp, Homo sapien
aggtgggaggccataatctttcagtcattagat

SEQ ID NO: 1022481 - DNA, 33 bp, Homo sapien
cctgaacaacataacaagatctcatctccacaa

SEQ ID NO: 1022482 - DNA, 33 bp, Homo sapien
cctgaacaacataacaggatctcatctccacaa

SEQ ID NO: 1022483 - DNA, 33 bp, Homo sapien
tgcccggcctcatcaccacttttattgtaataa

SEQ ID NO: 1022484 - DNA, 33 bp, Homo sapien
tgcccggcctcatcactacttttattgtaataa

SEQ ID NO: 1022485 - DNA, 33 bp, Homo sapien
gatcctagaaaagttaagttgtcttcttcaaga

SEQ ID NO: 1022486 - DNA, 33 bp, Homo sapien
gatcctagaaaagttaggttgtcttcttcaaga

SEQ ID NO: 1022487 - DNA, 33 bp, Homo sapien
gatgaaaattgcaatgaagcttttgggtcctaa

SEQ ID NO: 1022488 - DNA, 33 bp, Homo sapien
gatgaaaattgcaatgcagcttttgggtcctaa

SEQ ID NO: 1022489 - DNA, 33 bp, Homo sapien
gtgtgtgtgatacataaatacatcaagtatcac

SEQ ID NO: 1022490 - DNA, 33 bp, Homo sapien
gtgtgtgtgatacatacatacatcaagtatcac

SEQ ID NO: 1022491 - DNA, 33 bp, Homo sapien
gatagatatccaatataacttgtagttcgtata

SEQ ID NO: 1022492 - DNA, 33 bp, Homo sapien
gatagatatccaatatcacttgtagttcgtata

SEQ ID NO: 1022493 - DNA, 33 bp, Homo sapien
atttgaaggaatttcacgaccattttaaatttt

SEQ ID NO: 1022494 - DNA, 33 bp, Homo sapien
atttgaaggaatttcaggaccattttaaatttt

SEQ ID NO: 1022495 - DNA, 33 bp, Homo sapien
attgaaccgacataccaaaaaaataagaatagg

SEQ ID NO: 1022496 - DNA, 33 bp, Homo sapien
attgaaccgacataccgaaaaaataagaatagg

SEQ ID NO: 1022497 - DNA, 33 bp, Homo sapien
tatatgtgtaaaactaagaggttgtactcattc

SEQ ID NO: 1022498 - DNA, 33 bp, Homo sapien
tatatgtgtaaaactaggaggttgtactcattc

SEQ ID NO: 1022499 - DNA, 33 bp, Homo sapien
cacagcagtcacaccaataacttgtttaattga

SEQ ID NO: 1022500 - DNA, 33 bp, Homo sapien
cacagcagtcacaccagtaacttgtttaattga

SEQ ID NO: 1022501 - DNA, 33 bp, Homo sapien
aattattagtacattacgcccccttcctaaccc

SEQ ID NO: 1022502 - DNA, 33 bp, Homo sapien
aattattagtacattatgcccccttcctaaccc

SEQ ID NO: 1022503 - DNA, 33 bp, Homo sapien
cacacccagccagtgaaggcatttttataattt

SEQ ID NO: 1022504 - DNA, 33 bp, Homo sapien
cacacccagccagtgagggcatttttataattt

SEQ ID NO: 1022505 - DNA, 33 bp, Homo sapien
aggtagtaaagtcagtaaaattagtcatgacta

SEQ ID NO: 1022506 - DNA, 33 bp, Homo sapien
aggtagtaaagtcagtcaaattagtcatgacta

SEQ ID NO: 1022507 - DNA, 33 bp, Homo sapien
ctcctcactggcaagacagtattatcgaaatcc

SEQ ID NO: 1022508 - DNA, 33 bp, Homo sapien
ctcctcactggcaagagagtattatcgaaatcc

SEQ ID NO: 1022509 - DNA, 33 bp, Homo sapien
aattgtaccctggtaactggcctaaccacacag

SEQ ID NO: 1022510 - DNA, 33 bp, Homo sapien
aattgtaccctggtaattggcctaaccacacag

SEQ ID NO: 1022511 - DNA, 33 bp, Homo sapien
agaattagaatgtcaccatcttgcagcctctag

SEQ ID NO: 1022512 - DNA, 33 bp, Homo sapien
agaattagaatgtcacgatcttgcagcctctag

SEQ ID NO: 1022513 - DNA, 33 bp, Homo sapien
ctactaacattacaaaaagaagccgactagata

SEQ ID NO: 1022514 - DNA, 33 bp, Homo sapien
ctactaacattacaaagagaagccgactagata

SEQ ID NO: 1022515 - DNA, 33 bp, Homo sapien
gtcagattgcttttcaaactagtctctaatgat

SEQ ID NO: 1022516 - DNA, 33 bp, Homo sapien
gtcagattgcttttcatactagtctctaatgat

SEQ ID NO: 1022517 - DNA, 33 bp, Homo sapien
caaggagtaggaggtcaaactcaagcagaagta

SEQ ID NO: 1022518 - DNA, 33 bp, Homo sapien
caaggagtaggaggtcgaactcaagcagaagta

SEQ ID NO: 1022519 - DNA, 33 bp, Homo sapien
atgttttggaaaatgactattgagaaaaagaaa

SEQ ID NO: 1022520 - DNA, 33 bp, Homo sapien
atgttttggaaaatgattattgagaaaaagaaa

SEQ ID NO: 1022521 - DNA, 33 bp, Homo sapien
tggtctcacgcagtaacacaatctagaaggaaa

SEQ ID NO: 1022522 - DNA, 33 bp, Homo sapien
tggtctcacgcagtaatacaatctagaaggaaa

SEQ ID NO: 1022523 - DNA, 33 bp, Homo sapien
gcagaagtgatgcaacaaaaagggcctagaggt

SEQ ID NO: 1022524 - DNA, 33 bp, Homo sapien
gcagaagtgatgcaacgaaaagggcctagaggt

SEQ ID NO: 1022525 - DNA, 33 bp, Homo sapien
aagattatcttgtcaacagtgtgcagaaaggtg

SEQ ID NO: 1022526 - DNA, 33 bp, Homo sapien
aagattatcttgtcaatagtgtgcagaaaggtg

SEQ ID NO: 1022527 - DNA, 33 bp, Homo sapien
ttcactcctttaggaacgaaatcttacctctat

SEQ ID NO: 1022528 - DNA, 33 bp, Homo sapien
ttcactcctttaggaatgaaatcttacctctat

SEQ ID NO: 1022529 - DNA, 33 bp, Homo sapien
caaatgtggattgttgcatcttgaaaaatattc

SEQ ID NO: 1022530 - DNA, 33 bp, Homo sapien
caaatgtggattgttgtatcttgaaaaatattc

SEQ ID NO: 1022531 - DNA, 33 bp, Homo sapien
ccagactggattagtaagataaaaggctctgga

SEQ ID NO: 1022532 - DNA, 33 bp, Homo sapien
ccagactggattagtaggataaaaggctctgga

SEQ ID NO: 1022533 - DNA, 33 bp, Homo sapien
gcatttccctgctcagaaatgttctttctttct

SEQ ID NO: 1022534 - DNA, 33 bp, Homo sapien
gcatttccctgctcaggaatgttctttctttct

SEQ ID NO: 1022535 - DNA, 33 bp, Homo sapien
tttgttgactgaataaattaagacagtatataa

SEQ ID NO: 1022536 - DNA, 33 bp, Homo sapien
tttgttgactgaataatttaagacagtatataa

SEQ ID NO: 1022537 - DNA, 33 bp, Homo sapien
cttcactttcagcagcacatccacaaaacacac

SEQ ID NO: 1022538 - DNA, 33 bp, Homo sapien
cttcactttcagcagcgcatccacaaaacacac

SEQ ID NO: 1022539 - DNA, 33 bp, Homo sapien
tgggtatttatgaaccaaatccaatggatccag

SEQ ID NO: 1022540 - DNA, 33 bp, Homo sapien
tgggtatttatgaaccgaatccaatggatccag

SEQ ID NO: 1022541 - DNA, 33 bp, Homo sapien
catgagataaatcaagcacggctgagtgtctga

SEQ ID NO: 1022542 - DNA, 33 bp, Homo sapien
catgagataaatcaagtacggctgagtgtctga

SEQ ID NO: 1022543 - DNA, 33 bp, Homo sapien
tagagaatcactgtgaaagagccaagactagac

SEQ ID NO: 1022544 - DNA, 33 bp, Homo sapien
tagagaatcactgtgacagagccaagactagac

SEQ ID NO: 1022545 - DNA, 33 bp, Homo sapien
ggggacctctaggcctcaaatgccccaccacat

SEQ ID NO: 1022546 - DNA, 33 bp, Homo sapien
ggggacctctaggcctgaaatgccccaccacat

SEQ ID NO: 1022547 - DNA, 33 bp, Homo sapien
cttctatgaatgttacaacagctttacaaagcc

SEQ ID NO: 1022548 - DNA, 33 bp, Homo sapien
cttctatgaatgttaccacagctttacaaagcc

SEQ ID NO: 1022549 - DNA, 33 bp, Homo sapien
aaggtgtggtatcatcactcagggcaaaagctc

SEQ ID NO: 1022550 - DNA, 33 bp, Homo sapien
aaggtgtggtatcatcgctcagggcaaaagctc

SEQ ID NO: 1022551 - DNA, 33 bp, Homo sapien
ggtcacacactcctgaacctgaagggtagcata

SEQ ID NO: 1022552 - DNA, 33 bp, Homo sapien
ggtcacacactcctgagcctgaagggtagcata

SEQ ID NO: 1022553 - DNA, 33 bp, Homo sapien
gataatgccgcgcaacccagtcctgcccaggca

SEQ ID NO: 1022554 - DNA, 33 bp, Homo sapien
gataatgccgcgcaactcagtcctgcccaggca

SEQ ID NO: 1022555 - DNA, 33 bp, Homo sapien
cgcctgagatggaaaaacttgcctctgttatga

SEQ ID NO: 1022556 - DNA, 33 bp, Homo sapien
cgcctgagatggaaaagcttgcctctgttatga

SEQ ID NO: 1022557 - DNA, 33 bp, Homo sapien
gtgctttagtcaggaacaggccgaggcagcctt

SEQ ID NO: 1022558 - DNA, 33 bp, Homo sapien
gtgctttagtcaggaagaggccgaggcagcctt

SEQ ID NO: 1022559 - DNA, 33 bp, Homo sapien
gacactgtaatactaacaacacttctttctgcc

SEQ ID NO: 1022560 - DNA, 33 bp, Homo sapien
gacactgtaatactaataacacttctttctgcc

SEQ ID NO: 1022561 - DNA, 33 bp, Homo sapien
gatcttctcacctgaaacttaacttggagaact

SEQ ID NO: 1022562 - DNA, 33 bp, Homo sapien
gatcttctcacctgaaccttaacttggagaact

SEQ ID NO: 1022563 - DNA, 33 bp, Homo sapien
ttacccattgacacagaaacatacccaaatgcc

SEQ ID NO: 1022564 - DNA, 33 bp, Homo sapien
ttacccattgacacagcaacatacccaaatgcc

SEQ ID NO: 1022565 - DNA, 33 bp, Homo sapien
tatctatatagggaaacagaaagtagggaaata

SEQ ID NO: 1022566 - DNA, 33 bp, Homo sapien
tatctatatagggaaagagaaagtagggaaata

SEQ ID NO: 1022567 - DNA, 33 bp, Homo sapien
tagtaatactgacgcacagaaaagggatactag

SEQ ID NO: 1022568 - DNA, 33 bp, Homo sapien
tagtaatactgacgcagagaaaagggatactag

SEQ ID NO: 1022569 - DNA, 33 bp, Homo sapien
tttgattattagatcccgcaacatttgtctttc

SEQ ID NO: 1022570 - DNA, 33 bp, Homo sapien
tttgattattagatcctgcaacatttgtctttc

SEQ ID NO: 1022571 - DNA, 33 bp, Homo sapien
tgatgaatggataacaatgatcagcagaggagg

SEQ ID NO: 1022572 - DNA, 33 bp, Homo sapien
tgatgaatggataacagtgatcagcagaggagg

SEQ ID NO: 1022573 - DNA, 33 bp, Homo sapien
tgagttgcaaaatgaaaacttatcttactggta

SEQ ID NO: 1022574 - DNA, 33 bp, Homo sapien
tgagttgcaaaatgaagacttatcttactggta

SEQ ID NO: 1022575 - DNA, 33 bp, Homo sapien
agacttccgggattcaaatctcacttctgccat

SEQ ID NO: 1022576 - DNA, 33 bp, Homo sapien
agacttccgggattcacatctcacttctgccat

SEQ ID NO: 1022577 - DNA, 33 bp, Homo sapien
tagccataggtagggcaatgctaaaaggacttt

SEQ ID NO: 1022578 - DNA, 33 bp, Homo sapien
tagccataggtagggcgatgctaaaaggacttt

SEQ ID NO: 1022579 - DNA, 33 bp, Homo sapien
catgaagaagaacttacggcccatgatgagagt

SEQ ID NO: 1022580 - DNA, 33 bp, Homo sapien
catgaagaagaacttatggcccatgatgagagt

SEQ ID NO: 1022581 - DNA, 33 bp, Homo sapien
agacagctcttatgaacggttaacttcttagct

SEQ ID NO: 1022582 - DNA, 33 bp, Homo sapien
agacagctcttatgaatggttaacttcttagct

SEQ ID NO: 1022583 - DNA, 33 bp, Homo sapien
agcattgtggaaaaacacatgagcagggtggtc

SEQ ID NO: 1022584 - DNA, 33 bp, Homo sapien
agcattgtggaaaaacgcatgagcagggtggtc

SEQ ID NO: 1022585 - DNA, 33 bp, Homo sapien
accacagctgtctctacagaaacacaaattact

SEQ ID NO: 1022586 - DNA, 33 bp, Homo sapien
accacagctgtctctatagaaacacaaattact

SEQ ID NO: 1022587 - DNA, 33 bp, Homo sapien
cataagatcttgaatcccttaactttattctgt

SEQ ID NO: 1022588 - DNA, 33 bp, Homo sapien
cataagatcttgaatctcttaactttattctgt

SEQ ID NO: 1022589 - DNA, 33 bp, Homo sapien
ataacttggcatttcaataagcttggctgaaga

SEQ ID NO: 1022590 - DNA, 33 bp, Homo sapien
ataacttggcatttcagtaagcttggctgaaga

SEQ ID NO: 1022591 - DNA, 33 bp, Homo sapien
taacttagaccaagtcacttaacttcttccagc

SEQ ID NO: 1022592 - DNA, 33 bp, Homo sapien
taacttagaccaagtcgcttaacttcttccagc

SEQ ID NO: 1022593 - DNA, 33 bp, Homo sapien
gtctagttcttagaggaaagtgtgctatgataa

SEQ ID NO: 1022594 - DNA, 33 bp, Homo sapien
gtctagttcttagagggaagtgtgctatgataa

SEQ ID NO: 1022595 - DNA, 33 bp, Homo sapien
cttgttaatattctacaggctacataatgcaat

SEQ ID NO: 1022596 - DNA, 33 bp, Homo sapien
cttgttaatattctacgggctacataatgcaat

SEQ ID NO: 1022597 - DNA, 33 bp, Homo sapien
gcaaaagtagaaagacaacagaaggatcttgta

SEQ ID NO: 1022598 - DNA, 33 bp, Homo sapien
gcaaaagtagaaagacgacagaaggatcttgta

SEQ ID NO: 1022599 - DNA, 33 bp, Homo sapien
ctaacttctttgtagaaaattgattggagtggg

SEQ ID NO: 1022600 - DNA, 33 bp, Homo sapien
ctaacttctttgtagagaattgattggagtggg

SEQ ID NO: 1022601 - DNA, 33 bp, Homo sapien
attgtacttggagcaaaacccaaacttatcaac

SEQ ID NO: 1022602 - DNA, 33 bp, Homo sapien
attgtacttggagcaagacccaaacttatcaac

SEQ ID NO: 1022603 - DNA, 33 bp, Homo sapien
ctctgaactccctgccaacctggacttttacat

SEQ ID NO: 1022604 - DNA, 33 bp, Homo sapien
ctctgaactccctgccgacctggacttttacat

SEQ ID NO: 1022605 - DNA, 33 bp, Homo sapien
ctggcttgtaccatcacagctgaactctggata

SEQ ID NO: 1022606 - DNA, 33 bp, Homo sapien
ctggcttgtaccatcatagctgaactctggata

SEQ ID NO: 1022607 - DNA, 33 bp, Homo sapien
cagaccttgctcgtagacatcattttttgtgtc

SEQ ID NO: 1022608 - DNA, 33 bp, Homo sapien
cagaccttgctcgtaggcatcattttttgtgtc

SEQ ID NO: 1022609 - DNA, 33 bp, Homo sapien
aaaaataggaggtccacactgagttagaagaaa

SEQ ID NO: 1022610 - DNA, 33 bp, Homo sapien
aaaaataggaggtccatactgagttagaagaaa

SEQ ID NO: 1022611 - DNA, 33 bp, Homo sapien
caaagattcatcttgcgcattcaaaggagatta

SEQ ID NO: 1022612 - DNA, 33 bp, Homo sapien
caaagattcatcttgctcattcaaaggagatta

SEQ ID NO: 1022613 - DNA, 33 bp, Homo sapien
gcaaatgctaatgcagacccatgtaaatgggtc

SEQ ID NO: 1022614 - DNA, 33 bp, Homo sapien
gcaaatgctaatgcagtcccatgtaaatgggtc

SEQ ID NO: 1022615 - DNA, 33 bp, Homo sapien
atatttagtgatagcaacacaagtatgcccaat

SEQ ID NO: 1022616 - DNA, 33 bp, Homo sapien
atatttagtgatagcaccacaagtatgcccaat

SEQ ID NO: 1022617 - DNA, 33 bp, Homo sapien
accaatgttacagagaaagaagtggtgctagtg

SEQ ID NO: 1022618 - DNA, 33 bp, Homo sapien
accaatgttacagagagagaagtggtgctagtg

SEQ ID NO: 1022619 - DNA, 33 bp, Homo sapien
catgctgaacctaagaagagcaagaaagataca

SEQ ID NO: 1022620 - DNA, 33 bp, Homo sapien
catgctgaacctaagaggagcaagaaagataca

SEQ ID NO: 1022621 - DNA, 33 bp, Homo sapien
cttcaaagtacaggaaagatcgtatctctgggt

SEQ ID NO: 1022622 - DNA, 33 bp, Homo sapien
cttcaaagtacaggaaggatcgtatctctgggt

SEQ ID NO: 1022623 - DNA, 33 bp, Homo sapien
attgtactgaattatcaccttgaggaatcaaag

SEQ ID NO: 1022624 - DNA, 33 bp, Homo sapien
attgtactgaattatcgccttgaggaatcaaag

SEQ ID NO: 1022625 - DNA, 33 bp, Homo sapien
tcattgtaaagcagagaaatgtgaaacagctaa

SEQ ID NO: 1022626 - DNA, 33 bp, Homo sapien
tcattgtaaagcagaggaatgtgaaacagctaa

SEQ ID NO: 1022627 - DNA, 33 bp, Homo sapien
agtgtttccattagaaatatcttcaggacatag

SEQ ID NO: 1022628 - DNA, 33 bp, Homo sapien
agtgtttccattagaagtatcttcaggacatag

SEQ ID NO: 1022629 - DNA, 33 bp, Homo sapien
agtgtccaaaagtgacaaaaaggctcttctgtc

SEQ ID NO: 1022630 - DNA, 33 bp, Homo sapien
agtgtccaaaagtgaccaaaaggctcttctgtc

SEQ ID NO: 1022631 - DNA, 33 bp, Homo sapien
agccgggacaaggaaacaggtcaggatccaaat

SEQ ID NO: 1022632 - DNA, 33 bp, Homo sapien
agccgggacaaggaaataggtcaggatccaaat

SEQ ID NO: 1022633 - DNA, 33 bp, Homo sapien
cttttctcattcactacactgaggtcattttgc

SEQ ID NO: 1022634 - DNA, 33 bp, Homo sapien
cttttctcattcactatactgaggtcattttgc

SEQ ID NO: 1022635 - DNA, 33 bp, Homo sapien
cagagtgaatgaaaataagcaatttcagtccct

SEQ ID NO: 1022636 - DNA, 33 bp, Homo sapien
cagagtgaatgaaaattagcaatttcagtccct

SEQ ID NO: 1022637 - DNA, 33 bp, Homo sapien
gtttggttcttcccataagtgtatcttgggttc

SEQ ID NO: 1022638 - DNA, 33 bp, Homo sapien
gtttggttcttcccatgagtgtatcttgggttc

SEQ ID NO: 1022639 - DNA, 33 bp, Homo sapien
ttttacaggataagtacaactcatacagcatga

SEQ ID NO: 1022640 - DNA, 33 bp, Homo sapien
ttttacaggataagtagaactcatacagcatga

SEQ ID NO: 1022641 - DNA, 33 bp, Homo sapien
agctagctgccccagacagaaagcaagctgatg

SEQ ID NO: 1022642 - DNA, 33 bp, Homo sapien
agctagctgccccagagagaaagcaagctgatg

SEQ ID NO: 1022643 - DNA, 33 bp, Homo sapien
taaatttatcttgccaatacttaaaaactatga

SEQ ID NO: 1022644 - DNA, 33 bp, Homo sapien
taaatttatcttgccagtacttaaaaactatga

SEQ ID NO: 1022645 - DNA, 33 bp, Homo sapien
ctttgtccctttgtacggatactaattcttcgt

SEQ ID NO: 1022646 - DNA, 33 bp, Homo sapien
ctttgtccctttgtactgatactaattcttcgt

SEQ ID NO: 1022647 - DNA, 33 bp, Homo sapien
gcctatagttcaagacagaccattccaatataa

SEQ ID NO: 1022648 - DNA, 33 bp, Homo sapien
gcctatagttcaagactgaccattccaatataa

SEQ ID NO: 1022649 - DNA, 33 bp, Homo sapien
gagcttgctttttaccccttgcttagcctacag

SEQ ID NO: 1022650 - DNA, 33 bp, Homo sapien
gagcttgctttttacctcttgcttagcctacag

SEQ ID NO: 1022651 - DNA, 33 bp, Homo sapien
tcaaaggtaagacaataaaagactcattagagc

SEQ ID NO: 1022652 - DNA, 33 bp, Homo sapien
tcaaaggtaagacaatcaaagactcattagagc

SEQ ID NO: 1022653 - DNA, 33 bp, Homo sapien
ttacctttgaatgtcacgtgcctgttttatttg

SEQ ID NO: 1022654 - DNA, 33 bp, Homo sapien
ttacctttgaatgtcatgtgcctgttttatttg

SEQ ID NO: 1022655 - DNA, 33 bp, Homo sapien
cagctcaacattctaacactatggaagatgagg

SEQ ID NO: 1022656 - DNA, 33 bp, Homo sapien
cagctcaacattctaatactatggaagatgagg

SEQ ID NO: 1022657 - DNA, 33 bp, Homo sapien
ggaaggatcttggtgacaaccagctgtaaataa

SEQ ID NO: 1022658 - DNA, 33 bp, Homo sapien
ggaaggatcttggtgataaccagctgtaaataa

SEQ ID NO: 1022659 - DNA, 33 bp, Homo sapien
tcattgccagtcagtacatcctgttcataatct

SEQ ID NO: 1022660 - DNA, 33 bp, Homo sapien
tcattgccagtcagtatatcctgttcataatct

SEQ ID NO: 1022661 - DNA, 33 bp, Homo sapien
gagaaaggagaaagggaattgagaatgtatgag

SEQ ID NO: 1022662 - DNA, 33 bp, Homo sapien
gagaaaggagaaagggtattgagaatgtatgag

SEQ ID NO: 1022663 - DNA, 33 bp, Homo sapien
aaatagtcatcaaggaaaacggaagacttaata

SEQ ID NO: 1022664 - DNA, 33 bp, Homo sapien
aaatagtcatcaaggagaacggaagacttaata

SEQ ID NO: 1022665 - DNA, 33 bp, Homo sapien
gagagacaagggcaaaaggtttgggtgattcga

SEQ ID NO: 1022666 - DNA, 33 bp, Homo sapien
gagagacaagggcaaagggtttgggtgattcga

SEQ ID NO: 1022667 - DNA, 33 bp, Homo sapien
aaataaggatatcacacgtaaaatcagaaaaaa

SEQ ID NO: 1022668 - DNA, 33 bp, Homo sapien
aaataaggatatcacatgtaaaatcagaaaaaa

SEQ ID NO: 1022669 - DNA, 33 bp, Homo sapien
tatttgaatatctataagcttctcaaacatttt

SEQ ID NO: 1022670 - DNA, 33 bp, Homo sapien
tatttgaatatctatacgcttctcaaacatttt

SEQ ID NO: 1022671 - DNA, 33 bp, Homo sapien
tgcttatgaagtttgcaattcagtggaaatggg

SEQ ID NO: 1022672 - DNA, 33 bp, Homo sapien
tgcttatgaagtttgcgattcagtggaaatggg

SEQ ID NO: 1022673 - DNA, 33 bp, Homo sapien
atggtacagaaatcaacgatgatggggcatttg

SEQ ID NO: 1022674 - DNA, 33 bp, Homo sapien
atggtacagaaatcaatgatgatggggcatttg

SEQ ID NO: 1022675 - DNA, 33 bp, Homo sapien
aggaaacaattaacaaagtgaaaaggcaactta

SEQ ID NO: 1022676 - DNA, 33 bp, Homo sapien
aggaaacaattaacaacgtgaaaaggcaactta

SEQ ID NO: 1022677 - DNA, 33 bp, Homo sapien
atattcttgcttcatgacatatatgcatgtatg

SEQ ID NO: 1022678 - DNA, 33 bp, Homo sapien
atattcttgcttcatggcatatatgcatgtatg

SEQ ID NO: 1022679 - DNA, 33 bp, Homo sapien
tttgtttctttttataactgatcttggctatct

SEQ ID NO: 1022680 - DNA, 33 bp, Homo sapien
tttgtttctttttatacctgatcttggctatct

SEQ ID NO: 1022681 - DNA, 33 bp, Homo sapien
gaagagctggttccacacctgtggtgcagggtg

SEQ ID NO: 1022682 - DNA, 33 bp, Homo sapien
gaagagctggttccactcctgtggtgcagggtg

SEQ ID NO: 1022683 - DNA, 33 bp, Homo sapien
cccacctactttgactcaccacatgaatctcac

SEQ ID NO: 1022684 - DNA, 33 bp, Homo sapien
cccacctactttgacttaccacatgaatctcac

SEQ ID NO: 1022685 - DNA, 33 bp, Homo sapien
tttctctgttaggacaacaatctcccacctact

SEQ ID NO: 1022686 - DNA, 33 bp, Homo sapien
tttctctgttaggacatcaatctcccacctact

SEQ ID NO: 1022687 - DNA, 33 bp, Homo sapien
tagttgttaaatgttacggcacttactttctcc

SEQ ID NO: 1022688 - DNA, 33 bp, Homo sapien
tagttgttaaatgttatggcacttactttctcc

SEQ ID NO: 1022689 - DNA, 33 bp, Homo sapien
gatctcagggtcatacagtagtgttcctaattg

SEQ ID NO: 1022690 - DNA, 33 bp, Homo sapien
gatctcagggtcatacggtagtgttcctaattg

SEQ ID NO: 1022691 - DNA, 33 bp, Homo sapien
cctggcaaagactccaagatgaagactccaaaa

SEQ ID NO: 1022692 - DNA, 33 bp, Homo sapien
cctggcaaagactccatgatgaagactccaaaa

SEQ ID NO: 1022693 - DNA, 33 bp, Homo sapien
atacttgaattgtatcacagttgcctgcttatc

SEQ ID NO: 1022694 - DNA, 33 bp, Homo sapien
atacttgaattgtatcgcagttgcctgcttatc

SEQ ID NO: 1022695 - DNA, 33 bp, Homo sapien
aggaactgataatagacttggcaaaaacacaaa

SEQ ID NO: 1022696 - DNA, 33 bp, Homo sapien
aggaactgataatagatttggcaaaaacacaaa

SEQ ID NO: 1022697 - DNA, 33 bp, Homo sapien
ttctgtaatgcttgccaagaggatgccttgctt

SEQ ID NO: 1022698 - DNA, 33 bp, Homo sapien
ttctgtaatgcttgcccagaggatgccttgctt

SEQ ID NO: 1022699 - DNA, 33 bp, Homo sapien
gctaaccagtaagcaccggaggtaagttacatg

SEQ ID NO: 1022700 - DNA, 33 bp, Homo sapien
gctaaccagtaagcactggaggtaagttacatg

SEQ ID NO: 1022701 - DNA, 33 bp, Homo sapien
gcttccaaacaaagaaacctaaagtacagtgat

SEQ ID NO: 1022702 - DNA, 33 bp, Homo sapien
gcttccaaacaaagaaccctaaagtacagtgat

SEQ ID NO: 1022703 - DNA, 33 bp, Homo sapien
tttgtttggaagcaacagaaatctactctgggt

SEQ ID NO: 1022704 - DNA, 33 bp, Homo sapien
tttgtttggaagcaacggaaatctactctgggt

SEQ ID NO: 1022705 - DNA, 33 bp, Homo sapien
agctaagcaaagctgacgccttcctgggagttt

SEQ ID NO: 1022706 - DNA, 33 bp, Homo sapien
agctaagcaaagctgatgccttcctgggagttt

SEQ ID NO: 1022707 - DNA, 33 bp, Homo sapien
tagcatgcttagagccacctagaaaccaataag

SEQ ID NO: 1022708 - DNA, 33 bp, Homo sapien
tagcatgcttagagccgcctagaaaccaataag

SEQ ID NO: 1022709 - DNA, 33 bp, Homo sapien
tgagtgttttccccaccctttctggatcacagg

SEQ ID NO: 1022710 - DNA, 33 bp, Homo sapien
tgagtgttttccccactctttctggatcacagg

SEQ ID NO: 1022711 - DNA, 33 bp, Homo sapien
gcaaaagtctcatgaaagtattatgttccttct

SEQ ID NO: 1022712 - DNA, 33 bp, Homo sapien
gcaaaagtctcatgaatgtattatgttccttct

SEQ ID NO: 1022713 - DNA, 33 bp, Homo sapien
ttgatacacaggagaaagagatagtagaggtga

SEQ ID NO: 1022714 - DNA, 33 bp, Homo sapien
ttgatacacaggagaaggagatagtagaggtga

SEQ ID NO: 1022715 - DNA, 33 bp, Homo sapien
gagacaaaggaagacagaagataagtgagattg

SEQ ID NO: 1022716 - DNA, 33 bp, Homo sapien
gagacaaaggaagacataagataagtgagattg

SEQ ID NO: 1022717 - DNA, 33 bp, Homo sapien
gataccgcaggaaaaacgaaatgtgacacccat

SEQ ID NO: 1022718 - DNA, 33 bp, Homo sapien
gataccgcaggaaaaatgaaatgtgacacccat

SEQ ID NO: 1022719 - DNA, 33 bp, Homo sapien
ggatgatgtctacccacatatgtttcagttgtc

SEQ ID NO: 1022720 - DNA, 33 bp, Homo sapien
ggatgatgtctacccatatatgtttcagttgtc

SEQ ID NO: 1022721 - DNA, 33 bp, Homo sapien
atgactcatccagggaagatcaaacacatgtgg

SEQ ID NO: 1022722 - DNA, 33 bp, Homo sapien
atgactcatccagggaggatcaaacacatgtgg

SEQ ID NO: 1022723 - DNA, 33 bp, Homo sapien
tcttcctatttttctccatgttttgtagatcct

SEQ ID NO: 1022724 - DNA, 33 bp, Homo sapien
tcttcctatttttctctatgttttgtagatcct

SEQ ID NO: 1022725 - DNA, 33 bp, Homo sapien
gcttgcagaagtatcaccccatctctgccttca

SEQ ID NO: 1022726 - DNA, 33 bp, Homo sapien
gcttgcagaagtatcatcccatctctgccttca

SEQ ID NO: 1022727 - DNA, 33 bp, Homo sapien
tgaggcaggtagagacagcagtcaggtggcccg

SEQ ID NO: 1022728 - DNA, 33 bp, Homo sapien
tgaggcaggtagagacggcagtcaggtggcccg

SEQ ID NO: 1022729 - DNA, 33 bp, Homo sapien
ttggattagtaattcacgtatgtggtacaaaat

SEQ ID NO: 1022730 - DNA, 33 bp, Homo sapien
ttggattagtaattcatgtatgtggtacaaaat

SEQ ID NO: 1022731 - DNA, 33 bp, Homo sapien
aacatttggagaccaccgatataacacatttat

SEQ ID NO: 1022732 - DNA, 33 bp, Homo sapien
aacatttggagaccactgatataacacatttat

SEQ ID NO: 1022733 - DNA, 33 bp, Homo sapien
acacatttattgaaggcccaatattcctgaggt

SEQ ID NO: 1022734 - DNA, 33 bp, Homo sapien
acacatttattgaaggtccaatattcctgaggt

SEQ ID NO: 1022735 - DNA, 33 bp, Homo sapien
agtgattaatacattacggtgtcatcagtgaaa

SEQ ID NO: 1022736 - DNA, 33 bp, Homo sapien
agtgattaatacattatggtgtcatcagtgaaa

SEQ ID NO: 1022737 - DNA, 33 bp, Homo sapien
ggtgggctgaacagagcagacctagacctgctg

SEQ ID NO: 1022738 - DNA, 33 bp, Homo sapien
ggtgggctgaacagaggagacctagacctgctg

SEQ ID NO: 1022739 - DNA, 33 bp, Homo sapien
accaccactgtccatccctgactggtgctattg

SEQ ID NO: 1022740 - DNA, 33 bp, Homo sapien
accaccactgtccatctctgactggtgctattg

SEQ ID NO: 1022741 - DNA, 33 bp, Homo sapien
aatttccgttccctctaaaaactatgagtatca

SEQ ID NO: 1022742 - DNA, 33 bp, Homo sapien
aatttccgttccctcttaaaactatgagtatca

SEQ ID NO: 1022743 - DNA, 33 bp, Homo sapien
ttgataatgaaagtaacagagttgacagagtgt

SEQ ID NO: 1022744 - DNA, 33 bp, Homo sapien
ttgataatgaaagtaatagagttgacagagtgt

SEQ ID NO: 1022745 - DNA, 33 bp, Homo sapien
agagctcaggtgccacaattacagatacaaaag

SEQ ID NO: 1022746 - DNA, 33 bp, Homo sapien
agagctcaggtgccacgattacagatacaaaag

SEQ ID NO: 1022747 - DNA, 33 bp, Homo sapien
gatgggggcaggaggcagaaaatttctaggcag

SEQ ID NO: 1022748 - DNA, 33 bp, Homo sapien
gatgggggcaggaggcggaaaatttctaggcag

SEQ ID NO: 1022749 - DNA, 33 bp, Homo sapien
atcacaaggatgtctaaatatagggataaatga

SEQ ID NO: 1022750 - DNA, 33 bp, Homo sapien
atcacaaggatgtctagatatagggataaatga

SEQ ID NO: 1022751 - DNA, 33 bp, Homo sapien
catttggaagcaagaagctatgtattatgtcca

SEQ ID NO: 1022752 - DNA, 33 bp, Homo sapien
catttggaagcaagaatctatgtattatgtcca

SEQ ID NO: 1022753 - DNA, 33 bp, Homo sapien
tttacatgggagggacaacatatgtaacataag

SEQ ID NO: 1022754 - DNA, 33 bp, Homo sapien
tttacatgggagggaccacatatgtaacataag

SEQ ID NO: 1022755 - DNA, 33 bp, Homo sapien
tctctgctttcatccaaccaaaatctttattct

SEQ ID NO: 1022756 - DNA, 33 bp, Homo sapien
tctctgctttcatccatccaaaatctttattct

SEQ ID NO: 1022757 - DNA, 33 bp, Homo sapien
ttcactgagggttgtacgctgtgaaatgcatgg

SEQ ID NO: 1022758 - DNA, 33 bp, Homo sapien
ttcactgagggttgtatgctgtgaaatgcatgg

SEQ ID NO: 1022759 - DNA, 33 bp, Homo sapien
ggagctaccaacagtaaagccccaacaatcagc

SEQ ID NO: 1022760 - DNA, 33 bp, Homo sapien
ggagctaccaacagtagagccccaacaatcagc

SEQ ID NO: 1022761 - DNA, 33 bp, Homo sapien
gggaattcagagctacagaagttaaaactatca

SEQ ID NO: 1022762 - DNA, 33 bp, Homo sapien
gggaattcagagctacggaagttaaaactatca

SEQ ID NO: 1022763 - DNA, 33 bp, Homo sapien
gagagatggagaaatacggtagatacctggaat

SEQ ID NO: 1022764 - DNA, 33 bp, Homo sapien
gagagatggagaaatatggtagatacctggaat

SEQ ID NO: 1022765 - DNA, 33 bp, Homo sapien
ataattgataagctgaacatgattaaaatgaaa

SEQ ID NO: 1022766 - DNA, 33 bp, Homo sapien
ataattgataagctgagcatgattaaaatgaaa

SEQ ID NO: 1022767 - DNA, 33 bp, Homo sapien
taagagattaagcagagtagcaaataggggcaa

SEQ ID NO: 1022768 - DNA, 33 bp, Homo sapien
taagagattaagcagattagcaaataggggcaa

SEQ ID NO: 1022769 - DNA, 33 bp, Homo sapien
ttctgagggaatgggacatagttttgtcagtga

SEQ ID NO: 1022770 - DNA, 33 bp, Homo sapien
ttctgagggaatgggatatagttttgtcagtga

SEQ ID NO: 1022771 - DNA, 33 bp, Homo sapien
gagccaattagacagagtacattttccaaatag

SEQ ID NO: 1022772 - DNA, 33 bp, Homo sapien
gagccaattagacagattacattttccaaatag

SEQ ID NO: 1022773 - DNA, 33 bp, Homo sapien
gaagaagaattggagcactaaatggaacacttg

SEQ ID NO: 1022774 - DNA, 33 bp, Homo sapien
gaagaagaattggagcgctaaatggaacacttg

SEQ ID NO: 1022775 - DNA, 33 bp, Homo sapien
acacaatggcagatccacatgactgaaattaaa

SEQ ID NO: 1022776 - DNA, 33 bp, Homo sapien
acacaatggcagatccgcatgactgaaattaaa

SEQ ID NO: 1022777 - DNA, 33 bp, Homo sapien
tattgtgggagctacacgcaaacctcaatacag

SEQ ID NO: 1022778 - DNA, 33 bp, Homo sapien
tattgtgggagctacatgcaaacctcaatacag

SEQ ID NO: 1022779 - DNA, 33 bp, Homo sapien
aaaccttgtaactcacagagcactaggtagagt

SEQ ID NO: 1022780 - DNA, 33 bp, Homo sapien
aaaccttgtaactcacggagcactaggtagagt

SEQ ID NO: 1022781 - DNA, 33 bp, Homo sapien
ttcagtctgtaaaacacagaaatggtcagaaga

SEQ ID NO: 1022782 - DNA, 33 bp, Homo sapien
ttcagtctgtaaaacagagaaatggtcagaaga

SEQ ID NO: 1022783 - DNA, 33 bp, Homo sapien
agcgtcaagggatgcaagttctgacctactcat

SEQ ID NO: 1022784 - DNA, 33 bp, Homo sapien
agcgtcaagggatgcacgttctgacctactcat

SEQ ID NO: 1022785 - DNA, 33 bp, Homo sapien
tccatagatcccaagacacagcactcaggtctt

SEQ ID NO: 1022786 - DNA, 33 bp, Homo sapien
tccatagatcccaagatacagcactcaggtctt

SEQ ID NO: 1022787 - DNA, 33 bp, Homo sapien
atgctgctggccttcaaatggggagtggaggaa

SEQ ID NO: 1022788 - DNA, 33 bp, Homo sapien
atgctgctggccttcagatggggagtggaggaa

SEQ ID NO: 1022789 - DNA, 33 bp, Homo sapien
attcagaaatggtcacagattatataacttcta

SEQ ID NO: 1022790 - DNA, 33 bp, Homo sapien
attcagaaatggtcacggattatataacttcta

SEQ ID NO: 1022791 - DNA, 33 bp, Homo sapien
atactagctgctacccacgtggtccttgccctt

SEQ ID NO: 1022792 - DNA, 33 bp, Homo sapien
atactagctgctacccgcgtggtccttgccctt

SEQ ID NO: 1022793 - DNA, 33 bp, Homo sapien
atgctgtaaatttttcccaaagtactgctatat

SEQ ID NO: 1022794 - DNA, 33 bp, Homo sapien
atgctgtaaatttttctcaaagtactgctatat

SEQ ID NO: 1022795 - DNA, 33 bp, Homo sapien
aaaaaaaaaactacacacatgaagctctgtatc

SEQ ID NO: 1022796 - DNA, 33 bp, Homo sapien
aaaaaaaaaactacacgcatgaagctctgtatc

SEQ ID NO: 1022797 - DNA, 33 bp, Homo sapien
tttggagtggtagaaccaagagcaaagcaaaca

SEQ ID NO: 1022798 - DNA, 33 bp, Homo sapien
tttggagtggtagaactaagagcaaagcaaaca

SEQ ID NO: 1022799 - DNA, 33 bp, Homo sapien
atgcagaacttaaattaaaattggccagttgta

SEQ ID NO: 1022800 - DNA, 33 bp, Homo sapien
atgcagaacttaaattgaaattggccagttgta

SEQ ID NO: 1022801 - DNA, 33 bp, Homo sapien
agagtaaatgattataactgtaacctctctact

SEQ ID NO: 1022802 - DNA, 33 bp, Homo sapien
agagtaaatgattatagctgtaacctctctact

SEQ ID NO: 1022803 - DNA, 33 bp, Homo sapien
cctctctactaaaagaccaatagcatgagtatt

SEQ ID NO: 1022804 - DNA, 33 bp, Homo sapien
cctctctactaaaagatcaatagcatgagtatt

SEQ ID NO: 1022805 - DNA, 33 bp, Homo sapien
gtagtccgaaaataggcaggttcagtacaataa

SEQ ID NO: 1022806 - DNA, 33 bp, Homo sapien
gtagtccgaaaataggtaggttcagtacaataa

SEQ ID NO: 1022807 - DNA, 33 bp, Homo sapien
acaaaaggattgagaacccaacctgaaaaagct

SEQ ID NO: 1022808 - DNA, 33 bp, Homo sapien
acaaaaggattgagaatccaacctgaaaaagct

SEQ ID NO: 1022809 - DNA, 33 bp, Homo sapien
agactactgtggtcacaacaaaaggattgagaa

SEQ ID NO: 1022810 - DNA, 33 bp, Homo sapien
agactactgtggtcacgacaaaaggattgagaa

SEQ ID NO: 1022811 - DNA, 33 bp, Homo sapien
ttattatcctctgtcacattaagaacccaaatt

SEQ ID NO: 1022812 - DNA, 33 bp, Homo sapien
ttattatcctctgtcatattaagaacccaaatt

SEQ ID NO: 1022813 - DNA, 33 bp, Homo sapien
tgaatatcatttttaacgctaccatgtctccat

SEQ ID NO: 1022814 - DNA, 33 bp, Homo sapien
tgaatatcatttttaatgctaccatgtctccat

SEQ ID NO: 1022815 - DNA, 33 bp, Homo sapien
ggagagaattacatcacacaggaactcaagtcc

SEQ ID NO: 1022816 - DNA, 33 bp, Homo sapien
ggagagaattacatcatacaggaactcaagtcc

SEQ ID NO: 1022817 - DNA, 33 bp, Homo sapien
acattataacacagagaaagcttgaatacatta

SEQ ID NO: 1022818 - DNA, 33 bp, Homo sapien
acattataacacagagtaagcttgaatacatta

SEQ ID NO: 1022819 - DNA, 33 bp, Homo sapien
acagttttttgagaaaaggtagtgtgacaaagt

SEQ ID NO: 1022820 - DNA, 33 bp, Homo sapien
acagttttttgagaaacggtagtgtgacaaagt

SEQ ID NO: 1022821 - DNA, 33 bp, Homo sapien
cactgatttagaccacagtaaatctgataaaca

SEQ ID NO: 1022822 - DNA, 33 bp, Homo sapien
cactgatttagaccacggtaaatctgataaaca

SEQ ID NO: 1022823 - DNA, 33 bp, Homo sapien
tcagggtggtagccagacagctaaactcagaag

SEQ ID NO: 1022824 - DNA, 33 bp, Homo sapien
tcagggtggtagccaggcagctaaactcagaag

SEQ ID NO: 1022825 - DNA, 33 bp, Homo sapien
ctagtacccagatcaacaaatcttgccagcact

SEQ ID NO: 1022826 - DNA, 33 bp, Homo sapien
ctagtacccagatcaagaaatcttgccagcact

SEQ ID NO: 1022827 - DNA, 33 bp, Homo sapien
attctgcctaagacaagcaccttatatgatgat

SEQ ID NO: 1022828 - DNA, 33 bp, Homo sapien
attctgcctaagacaatcaccttatatgatgat

SEQ ID NO: 1022829 - DNA, 33 bp, Homo sapien
aatagcggaatcaaccaagtggaagaaaggata

SEQ ID NO: 1022830 - DNA, 33 bp, Homo sapien
aatagcggaatcaaccgagtggaagaaaggata

SEQ ID NO: 1022831 - DNA, 33 bp, Homo sapien
caacctgactttaaaaagtaaaatcaaaagcta

SEQ ID NO: 1022832 - DNA, 33 bp, Homo sapien
caacctgactttaaaaggtaaaatcaaaagcta

SEQ ID NO: 1022833 - DNA, 33 bp, Homo sapien
gatcaaaattggaaacagtattacatcttgaac

SEQ ID NO: 1022834 - DNA, 33 bp, Homo sapien
gatcaaaattggaaactgtattacatcttgaac

SEQ ID NO: 1022835 - DNA, 33 bp, Homo sapien
agagatgagcagcagaagtcaaaagcagctcag

SEQ ID NO: 1022836 - DNA, 33 bp, Homo sapien
agagatgagcagcagaggtcaaaagcagctcag

SEQ ID NO: 1022837 - DNA, 33 bp, Homo sapien
ccttcatttgcataagacaccaatccatgacag

SEQ ID NO: 1022838 - DNA, 33 bp, Homo sapien
ccttcatttgcataaggcaccaatccatgacag

SEQ ID NO: 1022839 - DNA, 33 bp, Homo sapien
ttttgcttgtaaagacactaatctatttcagga

SEQ ID NO: 1022840 - DNA, 33 bp, Homo sapien
ttttgcttgtaaagacgctaatctatttcagga

SEQ ID NO: 1022841 - DNA, 33 bp, Homo sapien
ttatgctcattaaagacatagtgagagagggac

SEQ ID NO: 1022842 - DNA, 33 bp, Homo sapien
ttatgctcattaaagagatagtgagagagggac

SEQ ID NO: 1022843 - DNA, 33 bp, Homo sapien
tgcaacacacataaaagtctatcatggtttaag

SEQ ID NO: 1022844 - DNA, 33 bp, Homo sapien
tgcaacacacataaaattctatcatggtttaag

SEQ ID NO: 1022845 - DNA, 33 bp, Homo sapien
tgatacctgcaattgacgtaaccagctgaattt

SEQ ID NO: 1022846 - DNA, 33 bp, Homo sapien
tgatacctgcaattgatgtaaccagctgaattt

SEQ ID NO: 1022847 - DNA, 33 bp, Homo sapien
accagctttgcataccaaggacctaaaggagtg

SEQ ID NO: 1022848 - DNA, 33 bp, Homo sapien
accagctttgcataccgaggacctaaaggagtg

SEQ ID NO: 1022849 - DNA, 33 bp, Homo sapien
acattgcgctaattagcagggagataaagagaa

SEQ ID NO: 1022850 - DNA, 33 bp, Homo sapien
acattgcgctaattagtagggagataaagagaa

SEQ ID NO: 1022851 - DNA, 33 bp, Homo sapien
aacctcacaccaccaaactacatgaggaaagtg

SEQ ID NO: 1022852 - DNA, 33 bp, Homo sapien
aacctcacaccaccaagctacatgaggaaagtg

SEQ ID NO: 1022853 - DNA, 33 bp, Homo sapien
cattacaagcttattaaccaaaggagttccaag

SEQ ID NO: 1022854 - DNA, 33 bp, Homo sapien
cattacaagcttattatccaaaggagttccaag

SEQ ID NO: 1022855 - DNA, 33 bp, Homo sapien
tgtcaataactctacccgctggtaccatctgca

SEQ ID NO: 1022856 - DNA, 33 bp, Homo sapien
tgtcaataactctacctgctggtaccatctgca

SEQ ID NO: 1022857 - DNA, 33 bp, Homo sapien
ccttccggctcttaaacggcacagttctctgag

SEQ ID NO: 1022858 - DNA, 33 bp, Homo sapien
ccttccggctcttaaatggcacagttctctgag

SEQ ID NO: 1022859 - DNA, 33 bp, Homo sapien
tgtctcaatcaccaacaagatataaacaccaat

SEQ ID NO: 1022860 - DNA, 33 bp, Homo sapien
tgtctcaatcaccaaccagatataaacaccaat

SEQ ID NO: 1022861 - DNA, 33 bp, Homo sapien
tgatttccagtcaaaggctctcctttctgcttc

SEQ ID NO: 1022862 - DNA, 33 bp, Homo sapien
tgatttccagtcaaagtctctcctttctgcttc

SEQ ID NO: 1022863 - DNA, 33 bp, Homo sapien
gtaagcaaattgggaaagaatgagaagcagagg

SEQ ID NO: 1022864 - DNA, 33 bp, Homo sapien
gtaagcaaattgggaaggaatgagaagcagagg

SEQ ID NO: 1022865 - DNA, 33 bp, Homo sapien
agcaatttcaaccaataagcatataggcattta

SEQ ID NO: 1022866 - DNA, 33 bp, Homo sapien
agcaatttcaaccaatgagcatataggcattta

SEQ ID NO: 1022867 - DNA, 33 bp, Homo sapien
catggaatccaattaaaagcctttagaatattt

SEQ ID NO: 1022868 - DNA, 33 bp, Homo sapien
catggaatccaattaatagcctttagaatattt

SEQ ID NO: 1022869 - DNA, 33 bp, Homo sapien
gaaatttcaggaaacccattaagtcattctgga

SEQ ID NO: 1022870 - DNA, 33 bp, Homo sapien
gaaatttcaggaaacctattaagtcattctgga

SEQ ID NO: 1022871 - DNA, 33 bp, Homo sapien
ctatacacacatacaaattcattatatatacac

SEQ ID NO: 1022872 - DNA, 33 bp, Homo sapien
ctatacacacatacaagttcattatatatacac

SEQ ID NO: 1022873 - DNA, 33 bp, Homo sapien
tgtcagcacttgacgtcaacagttaaacaaatt

SEQ ID NO: 1022874 - DNA, 33 bp, Homo sapien
tgtcagcacttgacgttaacagttaaacaaatt

SEQ ID NO: 1022875 - DNA, 33 bp, Homo sapien
ctctggaatggtggaacagtacaaatataggct

SEQ ID NO: 1022876 - DNA, 33 bp, Homo sapien
ctctggaatggtggaatagtacaaatataggct

SEQ ID NO: 1022877 - DNA, 33 bp, Homo sapien
cttctgtaactcttaaactttcaattcatgata

SEQ ID NO: 1022878 - DNA, 33 bp, Homo sapien
cttctgtaactcttaacctttcaattcatgata

SEQ ID NO: 1022879 - DNA, 33 bp, Homo sapien
gttattttaaattgtgccaatctccaaaaaaag

SEQ ID NO: 1022880 - DNA, 33 bp, Homo sapien
gttattttaaattgtggcaatctccaaaaaaag

SEQ ID NO: 1022881 - DNA, 33 bp, Homo sapien
cattgaacatgagagaaaattggaaaatgaggt

SEQ ID NO: 1022882 - DNA, 33 bp, Homo sapien
cattgaacatgagagagaattggaaaatgaggt

SEQ ID NO: 1022883 - DNA, 33 bp, Homo sapien
ctgcagtcacagtgcacgatagagtaatgaagg

SEQ ID NO: 1022884 - DNA, 33 bp, Homo sapien
ctgcagtcacagtgcatgatagagtaatgaagg

SEQ ID NO: 1022885 - DNA, 33 bp, Homo sapien
gaaggataaaactaaacgcaagccatactggaa

SEQ ID NO: 1022886 - DNA, 33 bp, Homo sapien
gaaggataaaactaaatgcaagccatactggaa

SEQ ID NO: 1022887 - DNA, 33 bp, Homo sapien
tgattttcacagcaaccctatgaggtggatgga

SEQ ID NO: 1022888 - DNA, 33 bp, Homo sapien
tgattttcacagcaactctatgaggtggatgga

SEQ ID NO: 1022889 - DNA, 33 bp, Homo sapien
tcttgcaacctccatacagtatatgtcttataa

SEQ ID NO: 1022890 - DNA, 33 bp, Homo sapien
tcttgcaacctccatagagtatatgtcttataa

SEQ ID NO: 1022891 - DNA, 33 bp, Homo sapien
ttgtccttgatccagacagaggtgtatgtaata

SEQ ID NO: 1022892 - DNA, 33 bp, Homo sapien
ttgtccttgatccagatagaggtgtatgtaata

SEQ ID NO: 1022893 - DNA, 33 bp, Homo sapien
ttgaagtttatattgaagatctctgagaaggag

SEQ ID NO: 1022894 - DNA, 33 bp, Homo sapien
ttgaagtttatattgaggatctctgagaaggag

SEQ ID NO: 1022895 - DNA, 33 bp, Homo sapien
aattgggatgactacaacatttatcttccaaac

SEQ ID NO: 1022896 - DNA, 33 bp, Homo sapien
aattgggatgactacatcatttatcttccaaac

SEQ ID NO: 1022897 - DNA, 33 bp, Homo sapien
caggagctgctttcataatagaacttgaagata

SEQ ID NO: 1022898 - DNA, 33 bp, Homo sapien
caggagctgctttcatgatagaacttgaagata

SEQ ID NO: 1022899 - DNA, 33 bp, Homo sapien
gcatctgctgaagaaccgtgtgtcacctgggag

SEQ ID NO: 1022900 - DNA, 33 bp, Homo sapien
gcatctgctgaagaactgtgtgtcacctgggag

SEQ ID NO: 1022901 - DNA, 33 bp, Homo sapien
caggagggaaaaccaaacagagaagaagcccaa

SEQ ID NO: 1022902 - DNA, 33 bp, Homo sapien
caggagggaaaaccaagcagagaagaagcccaa

SEQ ID NO: 1022903 - DNA, 33 bp, Homo sapien
ctgcaattaaggtagaactaaaccatttttgct

SEQ ID NO: 1022904 - DNA, 33 bp, Homo sapien
ctgcaattaaggtagagctaaaccatttttgct

SEQ ID NO: 1022905 - DNA, 33 bp, Homo sapien
caaacacagagtcaaccgatatggcaaatttca

SEQ ID NO: 1022906 - DNA, 33 bp, Homo sapien
caaacacagagtcaactgatatggcaaatttca

SEQ ID NO: 1022907 - DNA, 33 bp, Homo sapien
aactttacacatgtgggagaaaatgtgccctca

SEQ ID NO: 1022908 - DNA, 33 bp, Homo sapien
aactttacacatgtggtagaaaatgtgccctca

SEQ ID NO: 1022909 - DNA, 33 bp, Homo sapien
atattgttggccccaccactaacatttatcttg

SEQ ID NO: 1022910 - DNA, 33 bp, Homo sapien
atattgttggccccacgactaacatttatcttg

SEQ ID NO: 1022911 - DNA, 33 bp, Homo sapien
tcttcttttttctctgcacaaaagtgagttgaa

SEQ ID NO: 1022912 - DNA, 33 bp, Homo sapien
tcttcttttttctctgtacaaaagtgagttgaa

SEQ ID NO: 1022913 - DNA, 33 bp, Homo sapien
aggtatcatttaaagccaagtaggtttgcccca

SEQ ID NO: 1022914 - DNA, 33 bp, Homo sapien
aggtatcatttaaagctaagtaggtttgcccca

SEQ ID NO: 1022915 - DNA, 33 bp, Homo sapien
gaaatggtaataataaaaactcagagtagtgtg

SEQ ID NO: 1022916 - DNA, 33 bp, Homo sapien
gaaatggtaataataagaactcagagtagtgtg

SEQ ID NO: 1022917 - DNA, 33 bp, Homo sapien
gagtaccctttctagccctgcctcagtataggt

SEQ ID NO: 1022918 - DNA, 33 bp, Homo sapien
gagtaccctttctagcgctgcctcagtataggt

SEQ ID NO: 1022919 - DNA, 33 bp, Homo sapien
agccttagaatgaagacgagaaccatcctcagc

SEQ ID NO: 1022920 - DNA, 33 bp, Homo sapien
agccttagaatgaagatgagaaccatcctcagc

SEQ ID NO: 1022921 - DNA, 33 bp, Homo sapien
taaaaagagaaagcgcaaaatggatgaaatgaa

SEQ ID NO: 1022922 - DNA, 33 bp, Homo sapien
taaaaagagaaagcgcgaaatggatgaaatgaa

SEQ ID NO: 1022923 - DNA, 33 bp, Homo sapien
acagacaggtgaggtcaatgttctagctgatca

SEQ ID NO: 1022924 - DNA, 33 bp, Homo sapien
acagacaggtgaggtcgatgttctagctgatca

SEQ ID NO: 1022925 - DNA, 33 bp, Homo sapien
aagatgacaacttagaaatgacacttggctgaa

SEQ ID NO: 1022926 - DNA, 33 bp, Homo sapien
aagatgacaacttagatatgacacttggctgaa

SEQ ID NO: 1022927 - DNA, 33 bp, Homo sapien
atcactaggtaacacacccaaagaccaagtttt

SEQ ID NO: 1022928 - DNA, 33 bp, Homo sapien
atcactaggtaacacatccaaagaccaagtttt

SEQ ID NO: 1022929 - DNA, 33 bp, Homo sapien
tgagtggaatcacccactacagaaagagccatc

SEQ ID NO: 1022930 - DNA, 33 bp, Homo sapien
tgagtggaatcacccattacagaaagagccatc

SEQ ID NO: 1022931 - DNA, 33 bp, Homo sapien
aggtgtttatgttagtcacccatgaagagctta

SEQ ID NO: 1022932 - DNA, 33 bp, Homo sapien
aggtgtttatgttagttacccatgaagagctta

SEQ ID NO: 1022933 - DNA, 33 bp, Homo sapien
tacctttaccaagatggaacatatcctctccat

SEQ ID NO: 1022934 - DNA, 33 bp, Homo sapien
tacctttaccaagatgtaacatatcctctccat

SEQ ID NO: 1022935 - DNA, 33 bp, Homo sapien
cacttactacattccaatcaccatactggccat

SEQ ID NO: 1022936 - DNA, 33 bp, Homo sapien
cacttactacattccagtcaccatactggccat

SEQ ID NO: 1022937 - DNA, 33 bp, Homo sapien
ctcttctttagttccacctctggcagagacctt

SEQ ID NO: 1022938 - DNA, 33 bp, Homo sapien
ctcttctttagttccagctctggcagagacctt

SEQ ID NO: 1022939 - DNA, 33 bp, Homo sapien
gtctgaccatacttaacgcaggccaggctgggg

SEQ ID NO: 1022940 - DNA, 33 bp, Homo sapien
gtctgaccatacttaatgcaggccaggctgggg

SEQ ID NO: 1022941 - DNA, 33 bp, Homo sapien
ttgatttgaattcacactggtcagcagtcttaa

SEQ ID NO: 1022942 - DNA, 33 bp, Homo sapien
ttgatttgaattcacattggtcagcagtcttaa

SEQ ID NO: 1022943 - DNA, 33 bp, Homo sapien
cataggttgatttttacatcaaattgttcaacc

SEQ ID NO: 1022944 - DNA, 33 bp, Homo sapien
cataggttgatttttatatcaaattgttcaacc

SEQ ID NO: 1022945 - DNA, 33 bp, Homo sapien
agcttataaaaacacaatgagaatatgggacga

SEQ ID NO: 1022946 - DNA, 33 bp, Homo sapien
agcttataaaaacacagtgagaatatgggacga

SEQ ID NO: 1022947 - DNA, 33 bp, Homo sapien
catttgatctctctaacagtcgtgtactacatg

SEQ ID NO: 1022948 - DNA, 33 bp, Homo sapien
catttgatctctctaatagtcgtgtactacatg

SEQ ID NO: 1022949 - DNA, 33 bp, Homo sapien
gtctagtgttcaatagcataatagaatgataat

SEQ ID NO: 1022950 - DNA, 33 bp, Homo sapien
gtctagtgttcaatagtataatagaatgataat

SEQ ID NO: 1022951 - DNA, 33 bp, Homo sapien
caggcatgtatacgtaaaaactcaattatacat

SEQ ID NO: 1022952 - DNA, 33 bp, Homo sapien
caggcatgtatacgtagaaactcaattatacat

SEQ ID NO: 1022953 - DNA, 33 bp, Homo sapien
attcatcttatgacgcccttaggagacccctag

SEQ ID NO: 1022954 - DNA, 33 bp, Homo sapien
attcatcttatgacgctcttaggagacccctag

SEQ ID NO: 1022955 - DNA, 33 bp, Homo sapien
taagaaacatgcagacaaattttgaatatttaa

SEQ ID NO: 1022956 - DNA, 33 bp, Homo sapien
taagaaacatgcagacgaattttgaatatttaa

SEQ ID NO: 1022957 - DNA, 33 bp, Homo sapien
gcagtattagggaggacataagaaactgaatcc

SEQ ID NO: 1022958 - DNA, 33 bp, Homo sapien
gcagtattagggaggagataagaaactgaatcc

SEQ ID NO: 1022959 - DNA, 33 bp, Homo sapien
gtaggcacagaagcaaagctatgtaaagaccca

SEQ ID NO: 1022960 - DNA, 33 bp, Homo sapien
gtaggcacagaagcaaggctatgtaaagaccca

SEQ ID NO: 1022961 - DNA, 33 bp, Homo sapien
actcatggaagataccactaagaaggagcaatg

SEQ ID NO: 1022962 - DNA, 33 bp, Homo sapien
actcatggaagatacccctaagaaggagcaatg

SEQ ID NO: 1022963 - DNA, 33 bp, Homo sapien
tttcttttttatgtcaatcttctatgaccatgt

SEQ ID NO: 1022964 - DNA, 33 bp, Homo sapien
tttcttttttatgtcagtcttctatgaccatgt

SEQ ID NO: 1022965 - DNA, 33 bp, Homo sapien
gatttggatcagcaatgaccttatatcttatta

SEQ ID NO: 1022966 - DNA, 33 bp, Homo sapien
gatttggatcagcaattaccttatatcttatta

SEQ ID NO: 1022967 - DNA, 33 bp, Homo sapien
taaatttgcaaaagaacgttcagttttcctggc

SEQ ID NO: 1022968 - DNA, 33 bp, Homo sapien
taaatttgcaaaagaatgttcagttttcctggc

SEQ ID NO: 1022969 - DNA, 33 bp, Homo sapien
cagcacttcacaatcaaatacatgaatatttca

SEQ ID NO: 1022970 - DNA, 33 bp, Homo sapien
cagcacttcacaatcagatacatgaatatttca

SEQ ID NO: 1022971 - DNA, 33 bp, Homo sapien
tttcctaaaagatgtacctccaaaagtacagag

SEQ ID NO: 1022972 - DNA, 33 bp, Homo sapien
tttcctaaaagatgtatctccaaaagtacagag

SEQ ID NO: 1022973 - DNA, 33 bp, Homo sapien
aaagagcttggcatatcataggctaccaaagac

SEQ ID NO: 1022974 - DNA, 33 bp, Homo sapien
aaagagcttggcatatgataggctaccaaagac

SEQ ID NO: 1022975 - DNA, 33 bp, Homo sapien
aaagtctctgtttcctcagccgcaatgtggaga

SEQ ID NO: 1022976 - DNA, 33 bp, Homo sapien
aaagtctctgtttccttagccgcaatgtggaga

SEQ ID NO: 1022977 - DNA, 33 bp, Homo sapien
ccccaagcttgaaaaccgttcagagtaggcaaa

SEQ ID NO: 1022978 - DNA, 33 bp, Homo sapien
ccccaagcttgaaaactgttcagagtaggcaaa

SEQ ID NO: 1022979 - DNA, 33 bp, Homo sapien
tggacttggctgtataacttatgctatcaatca

SEQ ID NO: 1022980 - DNA, 33 bp, Homo sapien
tggacttggctgtataccttatgctatcaatca

SEQ ID NO: 1022981 - DNA, 33 bp, Homo sapien
aatcatgcacataaaacatacactgcctggccc

SEQ ID NO: 1022982 - DNA, 33 bp, Homo sapien
aatcatgcacataaaagatacactgcctggccc

SEQ ID NO: 1022983 - DNA, 33 bp, Homo sapien
tttcacaaattgctcaataggtacctgccagta

SEQ ID NO: 1022984 - DNA, 33 bp, Homo sapien
tttcacaaattgctcagtaggtacctgccagta

SEQ ID NO: 1022985 - DNA, 33 bp, Homo sapien
aaaaccccaaacagctgaatgccaaagtcacct

SEQ ID NO: 1022986 - DNA, 33 bp, Homo sapien
aaaaccccaaacagcttaatgccaaagtcacct

SEQ ID NO: 1022987 - DNA, 33 bp, Homo sapien
cattctcaaaatagaagtaaaatgatggttgca

SEQ ID NO: 1022988 - DNA, 33 bp, Homo sapien
cattctcaaaatagaattaaaatgatggttgca

SEQ ID NO: 1022989 - DNA, 33 bp, Homo sapien
tctatacaagatgtaactagttaatgaagagaa

SEQ ID NO: 1022990 - DNA, 33 bp, Homo sapien
tctatacaagatgtaattagttaatgaagagaa

SEQ ID NO: 1022991 - DNA, 33 bp, Homo sapien
aataaaatgttccatgaaaaagtgaatgagtat

SEQ ID NO: 1022992 - DNA, 33 bp, Homo sapien
aataaaatgttccatggaaaagtgaatgagtat

SEQ ID NO: 1022993 - DNA, 33 bp, Homo sapien
tcctggcatgagggaaagggtatttgagaatca

SEQ ID NO: 1022994 - DNA, 33 bp, Homo sapien
tcctggcatgagggaaggggtatttgagaatca

SEQ ID NO: 1022995 - DNA, 33 bp, Homo sapien
acgcttcttccttcaaagtcaaagcttaaattt

SEQ ID NO: 1022996 - DNA, 33 bp, Homo sapien
acgcttcttccttcaaggtcaaagcttaaattt

SEQ ID NO: 1022997 - DNA, 33 bp, Homo sapien
cggccaacagtgagaccgaacttgccagttgct

SEQ ID NO: 1022998 - DNA, 33 bp, Homo sapien
cggccaacagtgagactgaacttgccagttgct

SEQ ID NO: 1022999 - DNA, 33 bp, Homo sapien
gttgctataagccagaaaagttattgttctctc

SEQ ID NO: 1023000 - DNA, 33 bp, Homo sapien
gttgctataagccagagaagttattgttctctc

SEQ ID NO: 1023001 - DNA, 33 bp, Homo sapien
gttgacttcataatcacgtgctcgatgaaatga

SEQ ID NO: 1023002 - DNA, 33 bp, Homo sapien
gttgacttcataatcatgtgctcgatgaaatga

SEQ ID NO: 1023003 - DNA, 33 bp, Homo sapien
atcagaattcaagtaaatgtttcaaagcccaaa

SEQ ID NO: 1023004 - DNA, 33 bp, Homo sapien
atcagaattcaagtaagtgtttcaaagcccaaa

SEQ ID NO: 1023005 - DNA, 33 bp, Homo sapien
ctgtctcttcttgtgaaatcatgcaattgaact

SEQ ID NO: 1023006 - DNA, 33 bp, Homo sapien
ctgtctcttcttgtgagatcatgcaattgaact

SEQ ID NO: 1023007 - DNA, 33 bp, Homo sapien
agtggtcccataatcaaggaggtcaaagccaga

SEQ ID NO: 1023008 - DNA, 33 bp, Homo sapien
agtggtcccataatcagggaggtcaaagccaga

SEQ ID NO: 1023009 - DNA, 33 bp, Homo sapien
agggatttatattcgtcacccctgacccttaga

SEQ ID NO: 1023010 - DNA, 33 bp, Homo sapien
agggatttatattcgtgacccctgacccttaga

SEQ ID NO: 1023011 - DNA, 33 bp, Homo sapien
catttgttaatgaccaagcttttcacaatcagg

SEQ ID NO: 1023012 - DNA, 33 bp, Homo sapien
catttgttaatgaccaggcttttcacaatcagg

SEQ ID NO: 1023013 - DNA, 33 bp, Homo sapien
tcatgaaatgaaaacaaaacagtgtgggtggta

SEQ ID NO: 1023014 - DNA, 33 bp, Homo sapien
tcatgaaatgaaaacagaacagtgtgggtggta

SEQ ID NO: 1023015 - DNA, 33 bp, Homo sapien
atctggtagtcaaataacctcattttactgatg

SEQ ID NO: 1023016 - DNA, 33 bp, Homo sapien
atctggtagtcaaataccctcattttactgatg

SEQ ID NO: 1023017 - DNA, 33 bp, Homo sapien
tttagttgttccaaaacgtgtgtacgtatgtat

SEQ ID NO: 1023018 - DNA, 33 bp, Homo sapien
tttagttgttccaaaatgtgtgtacgtatgtat

SEQ ID NO: 1023019 - DNA, 33 bp, Homo sapien
cagtaagctcacttcaaatacttgggttttaga

SEQ ID NO: 1023020 - DNA, 33 bp, Homo sapien
cagtaagctcacttcagatacttgggttttaga

SEQ ID NO: 1023021 - DNA, 33 bp, Homo sapien
atttgtttgaattgcaaaaagaaataaatcagc

SEQ ID NO: 1023022 - DNA, 33 bp, Homo sapien
atttgtttgaattgcacaaagaaataaatcagc

SEQ ID NO: 1023023 - DNA, 33 bp, Homo sapien
ttggaacaatctgactcacatgatcgctgccct

SEQ ID NO: 1023024 - DNA, 33 bp, Homo sapien
ttggaacaatctgactgacatgatcgctgccct

SEQ ID NO: 1023025 - DNA, 33 bp, Homo sapien
acaagcctaccttttacaactgggtgtttagtg

SEQ ID NO: 1023026 - DNA, 33 bp, Homo sapien
acaagcctaccttttataactgggtgtttagtg

SEQ ID NO: 1023027 - DNA, 33 bp, Homo sapien
tatccttcttctacaaagtgtacaaatgtagat

SEQ ID NO: 1023028 - DNA, 33 bp, Homo sapien
tatccttcttctacaaggtgtacaaatgtagat

SEQ ID NO: 1023029 - DNA, 33 bp, Homo sapien
aaaagaatgtcatgccactaaaatataaaatag

SEQ ID NO: 1023030 - DNA, 33 bp, Homo sapien
aaaagaatgtcatgccgctaaaatataaaatag

SEQ ID NO: 1023031 - DNA, 33 bp, Homo sapien
cggggctggctgacaacaagtaacgaaccataa

SEQ ID NO: 1023032 - DNA, 33 bp, Homo sapien
cggggctggctgacaataagtaacgaaccataa

SEQ ID NO: 1023033 - DNA, 33 bp, Homo sapien
accataagcctgctcaataccatctttttctcc

SEQ ID NO: 1023034 - DNA, 33 bp, Homo sapien
accataagcctgctcagtaccatctttttctcc

SEQ ID NO: 1023035 - DNA, 33 bp, Homo sapien
atatgctgagctaaaggcttcatatgggttatt

SEQ ID NO: 1023036 - DNA, 33 bp, Homo sapien
atatgctgagctaaagtcttcatatgggttatt

SEQ ID NO: 1023037 - DNA, 33 bp, Homo sapien
ggaaaatggaataggaaatgaagatgaagacac

SEQ ID NO: 1023038 - DNA, 33 bp, Homo sapien
ggaaaatggaataggagatgaagatgaagacac

SEQ ID NO: 1023039 - DNA, 33 bp, Homo sapien
catatgagaatgttcaaaaggtaaattcaccaa

SEQ ID NO: 1023040 - DNA, 33 bp, Homo sapien
catatgagaatgttcagaaggtaaattcaccaa

SEQ ID NO: 1023041 - DNA, 33 bp, Homo sapien
gttggaaaaaaaataccgcatgagcaatcagaa

SEQ ID NO: 1023042 - DNA, 33 bp, Homo sapien
gttggaaaaaaaatactgcatgagcaatcagaa

SEQ ID NO: 1023043 - DNA, 33 bp, Homo sapien
atcataccatgtaaaacctggttaagataaata

SEQ ID NO: 1023044 - DNA, 33 bp, Homo sapien
atcataccatgtaaaatctggttaagataaata

SEQ ID NO: 1023045 - DNA, 33 bp, Homo sapien
agaatggagaggttcacagaagctgaaaacctc

SEQ ID NO: 1023046 - DNA, 33 bp, Homo sapien
agaatggagaggttcatagaagctgaaaacctc

SEQ ID NO: 1023047 - DNA, 33 bp, Homo sapien
aaggaaggagaaaggaccgaagaagacacaaag

SEQ ID NO: 1023048 - DNA, 33 bp, Homo sapien
aaggaaggagaaaggatcgaagaagacacaaag

SEQ ID NO: 1023049 - DNA, 33 bp, Homo sapien
acagaaaactagccaaatgtgatggcatgcacc

SEQ ID NO: 1023050 - DNA, 33 bp, Homo sapien
acagaaaactagccaagtgtgatggcatgcacc

SEQ ID NO: 1023051 - DNA, 33 bp, Homo sapien
ctgtcagctaaaaggaacttgacccttctttag

SEQ ID NO: 1023052 - DNA, 33 bp, Homo sapien
ctgtcagctaaaaggaccttgacccttctttag

SEQ ID NO: 1023053 - DNA, 33 bp, Homo sapien
agtgattaagaattgcaccgatcactcatcaca

SEQ ID NO: 1023054 - DNA, 33 bp, Homo sapien
agtgattaagaattgcgccgatcactcatcaca

SEQ ID NO: 1023055 - DNA, 33 bp, Homo sapien
ctctagctaccccaaaatctttgcaatctacct

SEQ ID NO: 1023056 - DNA, 33 bp, Homo sapien
ctctagctaccccaaactctttgcaatctacct

SEQ ID NO: 1023057 - DNA, 33 bp, Homo sapien
cttagcaaattgttcaaaatcctcttagcaata

SEQ ID NO: 1023058 - DNA, 33 bp, Homo sapien
cttagcaaattgttcagaatcctcttagcaata

SEQ ID NO: 1023059 - DNA, 33 bp, Homo sapien
aacatttttgttttaaccaattctgtaacacac

SEQ ID NO: 1023060 - DNA, 33 bp, Homo sapien
aacatttttgttttaatcaattctgtaacacac

SEQ ID NO: 1023061 - DNA, 33 bp, Homo sapien
caatgtacaataaagcaaaatgcagtaaaatga

SEQ ID NO: 1023062 - DNA, 33 bp, Homo sapien
caatgtacaataaagcgaaatgcagtaaaatga

SEQ ID NO: 1023063 - DNA, 33 bp, Homo sapien
ttctcgtcttcatgtcaatgggattcaccattc

SEQ ID NO: 1023064 - DNA, 33 bp, Homo sapien
ttctcgtcttcatgtccatgggattcaccattc

SEQ ID NO: 1023065 - DNA, 33 bp, Homo sapien
ttattttgatctagaaagtttgctccggggaat

SEQ ID NO: 1023066 - DNA, 33 bp, Homo sapien
ttattttgatctagaacgtttgctccggggaat

SEQ ID NO: 1023067 - DNA, 33 bp, Homo sapien
cataagatatagatgagtagaccagagaaggtg

SEQ ID NO: 1023068 - DNA, 33 bp, Homo sapien
cataagatatagatgattagaccagagaaggtg

SEQ ID NO: 1023069 - DNA, 33 bp, Homo sapien
cagagaaggtgactggaccaaaaggttgagatt

SEQ ID NO: 1023070 - DNA, 33 bp, Homo sapien
cagagaaggtgactgggccaaaaggttgagatt

SEQ ID NO: 1023071 - DNA, 33 bp, Homo sapien
tgaattgcaatatacaacagaattaccaaccca

SEQ ID NO: 1023072 - DNA, 33 bp, Homo sapien
tgaattgcaatatacagcagaattaccaaccca

SEQ ID NO: 1023073 - DNA, 33 bp, Homo sapien
aagcttatctgctacacggtcgttgactatata

SEQ ID NO: 1023074 - DNA, 33 bp, Homo sapien
aagcttatctgctacagggtcgttgactatata

SEQ ID NO: 1023075 - DNA, 33 bp, Homo sapien
gattcaaggtgaaactcacttctcaggaatccc

SEQ ID NO: 1023076 - DNA, 33 bp, Homo sapien
gattcaaggtgaaacttacttctcaggaatccc

SEQ ID NO: 1023077 - DNA, 33 bp, Homo sapien
aattcaggatacatacaagtggagggtgagcat

SEQ ID NO: 1023078 - DNA, 33 bp, Homo sapien
aattcaggatacatacgagtggagggtgagcat

SEQ ID NO: 1023079 - DNA, 33 bp, Homo sapien
ctctgaaaccagctgtaaagacaattacagaca

SEQ ID NO: 1023080 - DNA, 33 bp, Homo sapien
ctctgaaaccagctgttaagacaattacagaca

SEQ ID NO: 1023081 - DNA, 33 bp, Homo sapien
attcttacacaatacacacaaatagatggcaag

SEQ ID NO: 1023082 - DNA, 33 bp, Homo sapien
attcttacacaatacatacaaatagatggcaag

SEQ ID NO: 1023083 - DNA, 33 bp, Homo sapien
aggtgacccgccaaagcccaaatgtcgcaaatg

SEQ ID NO: 1023084 - DNA, 33 bp, Homo sapien
aggtgacccgccaaaggccaaatgtcgcaaatg

SEQ ID NO: 1023085 - DNA, 33 bp, Homo sapien
catgatatctaccatacgagatttgtggagatt

SEQ ID NO: 1023086 - DNA, 33 bp, Homo sapien
catgatatctaccatatgagatttgtggagatt

SEQ ID NO: 1023087 - DNA, 33 bp, Homo sapien
atacttatttatagagaactgattatgtgtcaa

SEQ ID NO: 1023088 - DNA, 33 bp, Homo sapien
atacttatttatagagtactgattatgtgtcaa

SEQ ID NO: 1023089 - DNA, 33 bp, Homo sapien
cagatgatggaaagcacattgcagtcatcctgg

SEQ ID NO: 1023090 - DNA, 33 bp, Homo sapien
cagatgatggaaagcagattgcagtcatcctgg

SEQ ID NO: 1023091 - DNA, 33 bp, Homo sapien
tcagaatgagaatgacaacagtgagagagccac

SEQ ID NO: 1023092 - DNA, 33 bp, Homo sapien
tcagaatgagaatgactacagtgagagagccac

SEQ ID NO: 1023093 - DNA, 33 bp, Homo sapien
agtgactattaggcaacgtatcttcccactact

SEQ ID NO: 1023094 - DNA, 33 bp, Homo sapien
agtgactattaggcaatgtatcttcccactact

SEQ ID NO: 1023095 - DNA, 33 bp, Homo sapien
ccaaaaacctgatttgcagtgtttccaatttct

SEQ ID NO: 1023096 - DNA, 33 bp, Homo sapien
ccaaaaacctgatttgtagtgtttccaatttct

SEQ ID NO: 1023097 - DNA, 33 bp, Homo sapien
atataacacaataaagcctcgtctactccctaa

SEQ ID NO: 1023098 - DNA, 33 bp, Homo sapien
atataacacaataaagtctcgtctactccctaa

SEQ ID NO: 1023099 - DNA, 33 bp, Homo sapien
caggagtctgagtcccacctgtccaacatggtg

SEQ ID NO: 1023100 - DNA, 33 bp, Homo sapien
caggagtctgagtcccgcctgtccaacatggtg

SEQ ID NO: 1023101 - DNA, 33 bp, Homo sapien
catgcacagcttgatggaatctattaatactct

SEQ ID NO: 1023102 - DNA, 33 bp, Homo sapien
catgcacagcttgatgtaatctattaatactct

SEQ ID NO: 1023103 - DNA, 33 bp, Homo sapien
tgctcccaaagtaccagaggagagtgattacaa

SEQ ID NO: 1023104 - DNA, 33 bp, Homo sapien
tgctcccaaagtaccataggagagtgattacaa

SEQ ID NO: 1023105 - DNA, 33 bp, Homo sapien
gtaaggctgtgatgtgaacctcttctaaaggtt

SEQ ID NO: 1023106 - DNA, 33 bp, Homo sapien
gtaaggctgtgatgtgcacctcttctaaaggtt

SEQ ID NO: 1023107 - DNA, 33 bp, Homo sapien
cctgtctctgaaaacaaaaacaaaacacataaa

SEQ ID NO: 1023108 - DNA, 33 bp, Homo sapien
cctgtctctgaaaacagaaacaaaacacataaa

SEQ ID NO: 1023109 - DNA, 33 bp, Homo sapien
aaaaggcttgatggtcactagctcttgaaggat

SEQ ID NO: 1023110 - DNA, 33 bp, Homo sapien
aaaaggcttgatggtccctagctcttgaaggat

SEQ ID NO: 1023111 - DNA, 33 bp, Homo sapien
gcattttgctttactcaagttagttgaccgctt

SEQ ID NO: 1023112 - DNA, 33 bp, Homo sapien
gcattttgctttactccagttagttgaccgctt

SEQ ID NO: 1023113 - DNA, 33 bp, Homo sapien
cagactctgaggtaaaatacattaagcggtcaa

SEQ ID NO: 1023114 - DNA, 33 bp, Homo sapien
cagactctgaggtaaagtacattaagcggtcaa

SEQ ID NO: 1023115 - DNA, 33 bp, Homo sapien
ggtactactgtgtgagaaagctcaatcttagct

SEQ ID NO: 1023116 - DNA, 33 bp, Homo sapien
ggtactactgtgtgaggaagctcaatcttagct

SEQ ID NO: 1023117 - DNA, 33 bp, Homo sapien
gctttctatcatgatcaattagtgagttagcgc

SEQ ID NO: 1023118 - DNA, 33 bp, Homo sapien
gctttctatcatgatccattagtgagttagcgc

SEQ ID NO: 1023119 - DNA, 33 bp, Homo sapien
ttctttggtgggaaaacctgaatggaagagctg

SEQ ID NO: 1023120 - DNA, 33 bp, Homo sapien
ttctttggtgggaaaagctgaatggaagagctg

SEQ ID NO: 1023121 - DNA, 33 bp, Homo sapien
tacacaaattaacaacaattgttctcaaaccaa

SEQ ID NO: 1023122 - DNA, 33 bp, Homo sapien
tacacaaattaacaacgattgttctcaaaccaa

SEQ ID NO: 1023123 - DNA, 33 bp, Homo sapien
tcttatgcagaagacgacatatgtgaacgctgt

SEQ ID NO: 1023124 - DNA, 33 bp, Homo sapien
tcttatgcagaagacggcatatgtgaacgctgt

SEQ ID NO: 1023125 - DNA, 33 bp, Homo sapien
gaggcacgtggctgtgaagggggtatgcaagca

SEQ ID NO: 1023126 - DNA, 33 bp, Homo sapien
gaggcacgtggctgtggagggggtatgcaagca

SEQ ID NO: 1023127 - DNA, 33 bp, Homo sapien
ttctatgcagactcgcaccactgtgtcccctgc

SEQ ID NO: 1023128 - DNA, 33 bp, Homo sapien
ttctatgcagactcgcgccactgtgtcccctgc

SEQ ID NO: 1023129 - DNA, 33 bp, Homo sapien
aacctattatgaaaagcagactaaggagtgcag

SEQ ID NO: 1023130 - DNA, 33 bp, Homo sapien
aacctattatgaaaaggagactaaggagtgcag

SEQ ID NO: 1023131 - DNA, 33 bp, Homo sapien
tgcccatatgtgaaaaagcgtggatgtcaaggc

SEQ ID NO: 1023132 - DNA, 33 bp, Homo sapien
tgcccatatgtgaaaaggcgtggatgtcaaggc

SEQ ID NO: 1023133 - DNA, 33 bp, Homo sapien
aagtcacttacgctaagtagtatcaggagttga

SEQ ID NO: 1023134 - DNA, 33 bp, Homo sapien
aagtcacttacgctaattagtatcaggagttga

SEQ ID NO: 1023135 - DNA, 33 bp, Homo sapien
tggtgcaggtcccagacgatgagcaggtcaagc

SEQ ID NO: 1023136 - DNA, 33 bp, Homo sapien
tggtgcaggtcccagatgatgagcaggtcaagc

SEQ ID NO: 1023137 - DNA, 33 bp, Homo sapien
agctaatccactgagaaatttgggtgggacaca

SEQ ID NO: 1023138 - DNA, 33 bp, Homo sapien
agctaatccactgagagatttgggtgggacaca

SEQ ID NO: 1023139 - DNA, 33 bp, Homo sapien
ggatatgtttgggaaacaagattagtgtccaag

SEQ ID NO: 1023140 - DNA, 33 bp, Homo sapien
ggatatgtttgggaaataagattagtgtccaag

SEQ ID NO: 1023141 - DNA, 33 bp, Homo sapien
gatgcagaagggctaaaccaggtagcttcattc

SEQ ID NO: 1023142 - DNA, 33 bp, Homo sapien
gatgcagaagggctaagccaggtagcttcattc

SEQ ID NO: 1023143 - DNA, 33 bp, Homo sapien
cctggggaactttacacgctgtggaacaattgt

SEQ ID NO: 1023144 - DNA, 33 bp, Homo sapien
cctggggaactttacatgctgtggaacaattgt

SEQ ID NO: 1023145 - DNA, 33 bp, Homo sapien
atattcatgaggtataagagaactcttccttta

SEQ ID NO: 1023146 - DNA, 33 bp, Homo sapien
atattcatgaggtatatgagaactcttccttta

SEQ ID NO: 1023147 - DNA, 33 bp, Homo sapien
ggcatattagtagaaacttaatgaatagtggtt

SEQ ID NO: 1023148 - DNA, 33 bp, Homo sapien
ggcatattagtagaaatttaatgaatagtggtt

SEQ ID NO: 1023149 - DNA, 33 bp, Homo sapien
tagctgggactgcacaccacatctggctacttt

SEQ ID NO: 1023150 - DNA, 33 bp, Homo sapien
tagctgggactgcacatcacatctggctacttt

SEQ ID NO: 1023151 - DNA, 33 bp, Homo sapien
tatgccttggtgtctccaaatctgcttcttttc

SEQ ID NO: 1023152 - DNA, 33 bp, Homo sapien
tatgccttggtgtctctaaatctgcttcttttc

SEQ ID NO: 1023153 - DNA, 33 bp, Homo sapien
cagaaccttagaagcaatgatagatgtagggtg

SEQ ID NO: 1023154 - DNA, 33 bp, Homo sapien
cagaaccttagaagcagtgatagatgtagggtg

SEQ ID NO: 1023155 - DNA, 33 bp, Homo sapien
gctgaactgtgagctcaatcacttataatgttt

SEQ ID NO: 1023156 - DNA, 33 bp, Homo sapien
gctgaactgtgagctccatcacttataatgttt

SEQ ID NO: 1023157 - DNA, 33 bp, Homo sapien
attcatgatttatgcactgagtattgcagtcct

SEQ ID NO: 1023158 - DNA, 33 bp, Homo sapien
attcatgatttatgcattgagtattgcagtcct

SEQ ID NO: 1023159 - DNA, 33 bp, Homo sapien
caattgtttaacaatcaaggatgactggtagaa

SEQ ID NO: 1023160 - DNA, 33 bp, Homo sapien
caattgtttaacaatccaggatgactggtagaa

SEQ ID NO: 1023161 - DNA, 33 bp, Homo sapien
cttctggccctttaacaaaaacttgatgacttg

SEQ ID NO: 1023162 - DNA, 33 bp, Homo sapien
cttctggccctttaaccaaaacttgatgacttg

SEQ ID NO: 1023163 - DNA, 33 bp, Homo sapien
cactgtggacaggaacaaagtctctgagcctgg

SEQ ID NO: 1023164 - DNA, 33 bp, Homo sapien
cactgtggacaggaacgaagtctctgagcctgg

SEQ ID NO: 1023165 - DNA, 33 bp, Homo sapien
gatggagccaagaaacaaacctattctgccaaa

SEQ ID NO: 1023166 - DNA, 33 bp, Homo sapien
gatggagccaagaaactaacctattctgccaaa

SEQ ID NO: 1023167 - DNA, 33 bp, Homo sapien
caggtgaaagaagataaattcacgtaaagcact

SEQ ID NO: 1023168 - DNA, 33 bp, Homo sapien
caggtgaaagaagatagattcacgtaaagcact

SEQ ID NO: 1023169 - DNA, 33 bp, Homo sapien
aaagtctgggttcccacacttggttaactgtat

SEQ ID NO: 1023170 - DNA, 33 bp, Homo sapien
aaagtctgggttcccatacttggttaactgtat

SEQ ID NO: 1023171 - DNA, 33 bp, Homo sapien
tttagtgtgatttgatcagattggcatttgaaa

SEQ ID NO: 1023172 - DNA, 33 bp, Homo sapien
tttagtgtgatttgatgagattggcatttgaaa

SEQ ID NO: 1023173 - DNA, 33 bp, Homo sapien
gactgctttctggtaacgataggaccatagaat

SEQ ID NO: 1023174 - DNA, 33 bp, Homo sapien
gactgctttctggtaatgataggaccatagaat

SEQ ID NO: 1023175 - DNA, 33 bp, Homo sapien
ggataagactggaggtcaacaggactggtatca

SEQ ID NO: 1023176 - DNA, 33 bp, Homo sapien
ggataagactggaggtgaacaggactggtatca

SEQ ID NO: 1023177 - DNA, 33 bp, Homo sapien
ccacacctgaccttgacggtgaacttcacatac

SEQ ID NO: 1023178 - DNA, 33 bp, Homo sapien
ccacacctgaccttgatggtgaacttcacatac

SEQ ID NO: 1023179 - DNA, 33 bp, Homo sapien
gaggtaaatgtttttacgtcaactgaacaaaac

SEQ ID NO: 1023180 - DNA, 33 bp, Homo sapien
gaggtaaatgtttttatgtcaactgaacaaaac

SEQ ID NO: 1023181 - DNA, 33 bp, Homo sapien
gaatgaactaacataacggtaaaaccctggctc

SEQ ID NO: 1023182 - DNA, 33 bp, Homo sapien
gaatgaactaacataatggtaaaaccctggctc

SEQ ID NO: 1023183 - DNA, 33 bp, Homo sapien
aaatgtaatatatttaggtcacccaataaaaaa

SEQ ID NO: 1023184 - DNA, 33 bp, Homo sapien
aaatgtaatatatttatgtcacccaataaaaaa

SEQ ID NO: 1023185 - DNA, 33 bp, Homo sapien
gaaagacaatattaaactaaggatgggcacagt

SEQ ID NO: 1023186 - DNA, 33 bp, Homo sapien
gaaagacaatattaaagtaaggatgggcacagt

SEQ ID NO: 1023187 - DNA, 33 bp, Homo sapien
ttaaatccatcacacagcctactatctggtact

SEQ ID NO: 1023188 - DNA, 33 bp, Homo sapien
ttaaatccatcacacatcctactatctggtact

SEQ ID NO: 1023189 - DNA, 33 bp, Homo sapien
gatgataatcatactacattagtccccccttat

SEQ ID NO: 1023190 - DNA, 33 bp, Homo sapien
gatgataatcatactatattagtccccccttat

SEQ ID NO: 1023191 - DNA, 33 bp, Homo sapien
tgagctgggaggtcggcacttagatacaggtca

SEQ ID NO: 1023192 - DNA, 33 bp, Homo sapien
tgagctgggaggtcggtacttagatacaggtca

SEQ ID NO: 1023193 - DNA, 33 bp, Homo sapien
aagcatctctttgcctaaaacaatcaaagtaac

SEQ ID NO: 1023194 - DNA, 33 bp, Homo sapien
aagcatctctttgcctgaaacaatcaaagtaac

SEQ ID NO: 1023195 - DNA, 33 bp, Homo sapien
tcctaagtaccacttaagattgtgatagcctga

SEQ ID NO: 1023196 - DNA, 33 bp, Homo sapien
tcctaagtaccacttaggattgtgatagcctga

SEQ ID NO: 1023197 - DNA, 33 bp, Homo sapien
tggactaaccagaagacgtctgcaaattgcaca

SEQ ID NO: 1023198 - DNA, 33 bp, Homo sapien
tggactaaccagaagatgtctgcaaattgcaca

SEQ ID NO: 1023199 - DNA, 33 bp, Homo sapien
ttcagctctccaaccggactgccccagcaggag

SEQ ID NO: 1023200 - DNA, 33 bp, Homo sapien
ttcagctctccaaccgtactgccccagcaggag

SEQ ID NO: 1023201 - DNA, 33 bp, Homo sapien
acaaactccagatgcaccatctttaagagctgt

SEQ ID NO: 1023202 - DNA, 33 bp, Homo sapien
acaaactccagatgcatcatctttaagagctgt

SEQ ID NO: 1023203 - DNA, 33 bp, Homo sapien
ttgtatggatataccacatcttgtttatcacgt

SEQ ID NO: 1023204 - DNA, 33 bp, Homo sapien
ttgtatggatataccagatcttgtttatcacgt

SEQ ID NO: 1023205 - DNA, 33 bp, Homo sapien
aatatgccaacaagtacgtacaataaaagaaat

SEQ ID NO: 1023206 - DNA, 33 bp, Homo sapien
aatatgccaacaagtatgtacaataaaagaaat

SEQ ID NO: 1023207 - DNA, 33 bp, Homo sapien
taatgggcagtagagcacaaacttgggggccag

SEQ ID NO: 1023208 - DNA, 33 bp, Homo sapien
taatgggcagtagagcgcaaacttgggggccag

SEQ ID NO: 1023209 - DNA, 33 bp, Homo sapien
aacaaattattgtccacacttatgctgcccaag

SEQ ID NO: 1023210 - DNA, 33 bp, Homo sapien
aacaaattattgtccagacttatgctgcccaag

SEQ ID NO: 1023211 - DNA, 33 bp, Homo sapien; identical to SEQ ID NO: 1023209

SEQ ID NO: 1023212 - DNA, 33 bp, Homo sapien; identical to SEQ ID NO: 1023210

SEQ ID NO: 1023213 - DNA, 33 bp, Homo sapien
ttggtcttaaaagtcaagtaccaagaaccatta

SEQ ID NO: 1023214 - DNA, 33 bp, Homo sapien
ttggtcttaaaagtcacgtaccaagaaccatta

SEQ ID NO: 1023215 - DNA, 33 bp, Homo sapien
acagatttctttaaagactcgtgcagcacatca

SEQ ID NO: 1023216 - DNA, 33 bp, Homo sapien
acagatttctttaaagcctcgtgcagcacatca

SEQ ID NO: 1023217 - DNA, 33 bp, Homo sapien
tctagagatttgacacgagtttttaatgccaga

SEQ ID NO: 1023218 - DNA, 33 bp, Homo sapien
tctagagatttgacactagtttttaatgccaga

SEQ ID NO: 1023219 - DNA, 33 bp, Homo sapien
acggtcaaattggtagaacttgactttcttttt

SEQ ID NO: 1023220 - DNA, 33 bp, Homo sapien
acggtcaaattggtagtacttgactttcttttt

SEQ ID NO: 1023221 - DNA, 33 bp, Homo sapien
agactgtaataactaaatcttgcagaaaacaat

SEQ ID NO: 1023222 - DNA, 33 bp, Homo sapien
agactgtaataactaagtcttgcagaaaacaat

SEQ ID NO: 1023223 - DNA, 33 bp, Homo sapien
atccaaaagagagatacagcttgcgttttctgc

SEQ ID NO: 1023224 - DNA, 33 bp, Homo sapien
atccaaaagagagatatagcttgcgttttctgc

SEQ ID NO: 1023225 - DNA, 33 bp, Homo sapien
acaaagtctatgtcacagagtatcactagtttt

SEQ ID NO: 1023226 - DNA, 33 bp, Homo sapien
acaaagtctatgtcactgagtatcactagtttt

SEQ ID NO: 1023227 - DNA, 33 bp, Homo sapien
tgacaaagcttgttgccacaacaaatggtgata

SEQ ID NO: 1023228 - DNA, 33 bp, Homo sapien
tgacaaagcttgttgcgacaacaaatggtgata

SEQ ID NO: 1023229 - DNA, 33 bp, Homo sapien
tatcttacaaggttaagcagagtataggacctt

SEQ ID NO: 1023230 - DNA, 33 bp, Homo sapien
tatcttacaaggttaatcagagtataggacctt

SEQ ID NO: 1023231 - DNA, 33 bp, Homo sapien
gagtatgagtgcaaaaacttgaaaaaaaatagt

SEQ ID NO: 1023232 - DNA, 33 bp, Homo sapien
gagtatgagtgcaaaagcttgaaaaaaaatagt

SEQ ID NO: 1023233 - DNA, 33 bp, Homo sapien
aggaaacagtgttgaaataaaaccttaaaggag

SEQ ID NO: 1023234 - DNA, 33 bp, Homo sapien
aggaaacagtgttgaactaaaaccttaaaggag

SEQ ID NO: 1023235 - DNA, 33 bp, Homo sapien
atgagctattgcacccagcgcaaaaagaataat

SEQ ID NO: 1023236 - DNA, 33 bp, Homo sapien
atgagctattgcacccggcgcaaaaagaataat

SEQ ID NO: 1023237 - DNA, 33 bp, Homo sapien
cagtctgaagcaaagaaaatttaaggcagccac

SEQ ID NO: 1023238 - DNA, 33 bp, Homo sapien
cagtctgaagcaaagacaatttaaggcagccac

SEQ ID NO: 1023239 - DNA, 33 bp, Homo sapien
ttacctggtcaatgtccatctatcctacttgac

SEQ ID NO: 1023240 - DNA, 33 bp, Homo sapien
ttacctggtcaatgtctatctatcctacttgac

SEQ ID NO: 1023241 - DNA, 33 bp, Homo sapien
ttctccattgattagagcctccagtgattttta

SEQ ID NO: 1023242 - DNA, 33 bp, Homo sapien
ttctccattgattagatcctccagtgattttta

SEQ ID NO: 1023243 - DNA, 33 bp, Homo sapien
aaaacattttaggctacgacttagagtaagaaa

SEQ ID NO: 1023244 - DNA, 33 bp, Homo sapien
aaaacattttaggctatgacttagagtaagaaa

SEQ ID NO: 1023245 - DNA, 33 bp, Homo sapien
ttatagggaaaatactaaattgcgcattgtagc

SEQ ID NO: 1023246 - DNA, 33 bp, Homo sapien
ttatagggaaaatactgaattgcgcattgtagc

SEQ ID NO: 1023247 - DNA, 33 bp, Homo sapien
catgatatcagaaaaaacccaggtgtcgaatat

SEQ ID NO: 1023248 - DNA, 33 bp, Homo sapien
catgatatcagaaaaatcccaggtgtcgaatat

SEQ ID NO: 1023249 - DNA, 33 bp, Homo sapien
tatagagtgaaagaccaaaagaccatgatttct

SEQ ID NO: 1023250 - DNA, 33 bp, Homo sapien
tatagagtgaaagaccgaaagaccatgatttct

SEQ ID NO: 1023251 - DNA, 33 bp, Homo sapien
cacatttgtgggtcccagaaattcagacttcag

SEQ ID NO: 1023252 - DNA, 33 bp, Homo sapien
cacatttgtgggtcccggaaattcagacttcag

SEQ ID NO: 1023253 - DNA, 33 bp, Homo sapien
aataaagtctacaggcctttaagcctctggttc

SEQ ID NO: 1023254 - DNA, 33 bp, Homo sapien
aataaagtctacaggcgtttaagcctctggttc

SEQ ID NO: 1023255 - DNA, 33 bp, Homo sapien
ttagtttaggtaatctcaaatttagactaatca

SEQ ID NO: 1023256 - DNA, 33 bp, Homo sapien
ttagtttaggtaatctgaaatttagactaatca

SEQ ID NO: 1023257 - DNA, 33 bp, Homo sapien
agaaatcgcttatccacagagtaaacaacagtt

SEQ ID NO: 1023258 - DNA, 33 bp, Homo sapien
agaaatcgcttatccagagagtaaacaacagtt

SEQ ID NO: 1023259 - DNA, 33 bp, Homo sapien
ttttagacgatgtgccccaaattttggtttagt

SEQ ID NO: 1023260 - DNA, 33 bp, Homo sapien
ttttagacgatgtgcctcaaattttggtttagt

SEQ ID NO: 1023261 - DNA, 33 bp, Homo sapien
ggagtgtgtgctgttaccgtagtggcctctcat

SEQ ID NO: 1023262 - DNA, 33 bp, Homo sapien
ggagtgtgtgctgttatcgtagtggcctctcat

SEQ ID NO: 1023263 - DNA, 33 bp, Homo sapien
atcaagaagcagagggaaaagatcagttttaaa

SEQ ID NO: 1023264 - DNA, 33 bp, Homo sapien
atcaagaagcagaggggaaagatcagttttaaa

SEQ ID NO: 1023265 - DNA, 33 bp, Homo sapien
aagtggtacacccatcgagcattaagaccacct

SEQ ID NO: 1023266 - DNA, 33 bp, Homo sapien
aagtggtacacccatctagcattaagaccacct

SEQ ID NO: 1023267 - DNA, 33 bp, Homo sapien
ttttgcctttttgagaatcatactttagcaata

SEQ ID NO: 1023268 - DNA, 33 bp, Homo sapien
ttttgcctttttgagattcatactttagcaata

SEQ ID NO: 1023269 - DNA, 33 bp, Homo sapien
aagtaaatgatttaaacgacagtcaaatcatga

SEQ ID NO: 1023270 - DNA, 33 bp, Homo sapien
aagtaaatgatttaaatgacagtcaaatcatga

SEQ ID NO: 1023271 - DNA, 33 bp, Homo sapien
atgaaaataagatttcccccaaatgtcaatttt

SEQ ID NO: 1023272 - DNA, 33 bp, Homo sapien
atgaaaataagatttctcccaaatgtcaatttt

SEQ ID NO: 1023273 - DNA, 33 bp, Homo sapien
gacagcaatcgagctacgtgatttcccaatcca

SEQ ID NO: 1023274 - DNA, 33 bp, Homo sapien
gacagcaatcgagctatgtgatttcccaatcca

SEQ ID NO: 1023275 - DNA, 33 bp, Homo sapien
tcagtaactatgctaaagtttacctttctaccc

SEQ ID NO: 1023276 - DNA, 33 bp, Homo sapien
tcagtaactatgctaatgtttacctttctaccc

SEQ ID NO: 1023277 - DNA, 33 bp, Homo sapien
ttgagtgttcctcttacggttttcacataaaaa

SEQ ID NO: 1023278 - DNA, 33 bp, Homo sapien
ttgagtgttcctcttatggttttcacataaaaa

SEQ ID NO: 1023279 - DNA, 33 bp, Homo sapien
ctggctgtagagtcaacccttttgtttttatgt

SEQ ID NO: 1023280 - DNA, 33 bp, Homo sapien
ctggctgtagagtcaagccttttgtttttatgt

SEQ ID NO: 1023281 - DNA, 33 bp, Homo sapien
agcatggccttagcaacggatgtggttgttcag

SEQ ID NO: 1023282 - DNA, 33 bp, Homo sapien
agcatggccttagcaatggatgtggttgttcag

SEQ ID NO: 1023283 - DNA, 33 bp, Homo sapien
ctaacccatgtaggaacgaagaagcaggaaggg

SEQ ID NO: 1023284 - DNA, 33 bp, Homo sapien
ctaacccatgtaggaaggaagaagcaggaaggg

SEQ ID NO: 1023285 - DNA, 33 bp, Homo sapien
gctttgcattctcaccagcatttggtgtcaggg

SEQ ID NO: 1023286 - DNA, 33 bp, Homo sapien
gctttgcattctcaccggcatttggtgtcaggg

SEQ ID NO: 1023287 - DNA, 33 bp, Homo sapien
tcacacagtaacagataagtggcattggtcatt

SEQ ID NO: 1023288 - DNA, 33 bp, Homo sapien
tcacacagtaacagatgagtggcattggtcatt

SEQ ID NO: 1023289 - DNA, 33 bp, Homo sapien
tctggggaaaagaacactgcagatagtgggaac

SEQ ID NO: 1023290 - DNA, 33 bp, Homo sapien
tctggggaaaagaacattgcagatagtgggaac

SEQ ID NO: 1023291 - DNA, 33 bp, Homo sapien
ggatacttaacctataagtggctgccaagagtg

SEQ ID NO: 1023292 - DNA, 33 bp, Homo sapien
ggatacttaacctatacgtggctgccaagagtg

SEQ ID NO: 1023293 - DNA, 33 bp, Homo sapien
tcagtgctgagcccacaaccatctgtattagca

SEQ ID NO: 1023294 - DNA, 33 bp, Homo sapien
tcagtgctgagcccacgaccatctgtattagca

SEQ ID NO: 1023295 - DNA, 33 bp, Homo sapien
agcaaatgcagtaatcactaagggtgcagatta

SEQ ID NO: 1023296 - DNA, 33 bp, Homo sapien
agcaaatgcagtaatcgctaagggtgcagatta

SEQ ID NO: 1023297 - DNA, 33 bp, Homo sapien
ggatcatgggatacccagacatctgtccctcta

SEQ ID NO: 1023298 - DNA, 33 bp, Homo sapien
ggatcatgggatacccggacatctgtccctcta

SEQ ID NO: 1023299 - DNA, 33 bp, Homo sapien
ataattcaatccaacacagtaagtggtagaact

SEQ ID NO: 1023300 - DNA, 33 bp, Homo sapien
ataattcaatccaacatagtaagtggtagaact

SEQ ID NO: 1023301 - DNA, 33 bp, Homo sapien
atatgatggttttaaaatagataggatcagctt

SEQ ID NO: 1023302 - DNA, 33 bp, Homo sapien
atatgatggttttaaagtagataggatcagctt

SEQ ID NO: 1023303 - DNA, 33 bp, Homo sapien
taaacatttgcagaaacgaagtggccaaacagc

SEQ ID NO: 1023304 - DNA, 33 bp, Homo sapien
taaacatttgcagaaatgaagtggccaaacagc

SEQ ID NO: 1023305 - DNA, 33 bp, Homo sapien
tttgttgtggagaagactaaattagatggcata

SEQ ID NO: 1023306 - DNA, 33 bp, Homo sapien
tttgttgtggagaagattaaattagatggcata

SEQ ID NO: 1023307 - DNA, 33 bp, Homo sapien
gaacacacatagataaaatattccttcaactgc

SEQ ID NO: 1023308 - DNA, 33 bp, Homo sapien
gaacacacatagataagatattccttcaactgc

SEQ ID NO: 1023309 - DNA, 33 bp, Homo sapien
attacatctgaatacactaaaaaatttaatggt

SEQ ID NO: 1023310 - DNA, 33 bp, Homo sapien
attacatctgaatacagtaaaaaatttaatggt

SEQ ID NO: 1023311 - DNA, 33 bp, Homo sapien
ttttacctcccagataagaagtttctcttagca

SEQ ID NO: 1023312 - DNA, 33 bp, Homo sapien
ttttacctcccagataggaagtttctcttagca

SEQ ID NO: 1023313 - DNA, 33 bp, Homo sapien
tgtaatgaacaagaaaagcatgggaacactgaa

SEQ ID NO: 1023314 - DNA, 33 bp, Homo sapien
tgtaatgaacaagaaaggcatgggaacactgaa

SEQ ID NO: 1023315 - DNA, 33 bp, Homo sapien
agacaccccataaataggcctgattgaatgaat

SEQ ID NO: 1023316 - DNA, 33 bp, Homo sapien
agacaccccataaatatgcctgattgaatgaat

SEQ ID NO: 1023317 - DNA, 33 bp, Homo sapien
aatagtgcgtagcccaagaacaggagcagtacg

SEQ ID NO: 1023318 - DNA, 33 bp, Homo sapien
aatagtgcgtagcccaggaacaggagcagtacg

SEQ ID NO: 1023319 - DNA, 33 bp, Homo sapien
tatttacgaagatggaagcaaagtgtgaggaac

SEQ ID NO: 1023320 - DNA, 33 bp, Homo sapien
tatttacgaagatggaggcaaagtgtgaggaac

SEQ ID NO: 1023321 - DNA, 33 bp, Homo sapien
tgatagttaatgtttacgtttcgacttggctag

SEQ ID NO: 1023322 - DNA, 33 bp, Homo sapien
tgatagttaatgtttatgtttcgacttggctag

SEQ ID NO: 1023323 - DNA, 33 bp, Homo sapien
gaaaatgtcttctaaaagcgatacgagatcatc

SEQ ID NO: 1023324 - DNA, 33 bp, Homo sapien
gaaaatgtcttctaaaggcgatacgagatcatc

SEQ ID NO: 1023325 - DNA, 33 bp, Homo sapien
agtgagaagaggagaaaaaggtttaattaacac

SEQ ID NO: 1023326 - DNA, 33 bp, Homo sapien
agtgagaagaggagaacaaggtttaattaacac

SEQ ID NO: 1023327 - DNA, 33 bp, Homo sapien
agtgaggcatgccttgaaaatgtagttagtttt

SEQ ID NO: 1023328 - DNA, 33 bp, Homo sapien
agtgaggcatgccttgcaaatgtagttagtttt

SEQ ID NO: 1023329 - DNA, 33 bp, Homo sapien
cttcctgatcgaagaagtgagggaaaccaggct

SEQ ID NO: 1023330 - DNA, 33 bp, Homo sapien
cttcctgatcgaagaattgagggaaaccaggct

SEQ ID NO: 1023331 - DNA, 33 bp, Homo sapien
cgattctgaagcaaagcaagagactgagaagca

SEQ ID NO: 1023332 - DNA, 33 bp, Homo sapien
cgattctgaagcaaaggaagagactgagaagca

SEQ ID NO: 1023333 - DNA, 33 bp, Homo sapien
ctgtgatcatccggacacagcctttactcacgc

SEQ ID NO: 1023334 - DNA, 33 bp, Homo sapien
ctgtgatcatccggacgcagcctttactcacgc

SEQ ID NO: 1023335 - DNA, 33 bp, Homo sapien
ctttctcaccattaacagagactgaaatgcaga

SEQ ID NO: 1023336 - DNA, 33 bp, Homo sapien
ctttctcaccattaacggagactgaaatgcaga

SEQ ID NO: 1023337 - DNA, 33 bp, Homo sapien
ctgcttgtcaagatgaaatataagtgcctctga

SEQ ID NO: 1023338 - DNA, 33 bp, Homo sapien
ctgcttgtcaagatgagatataagtgcctctga

SEQ ID NO: 1023339 - DNA, 33 bp, Homo sapien
tatatgaaaaggtagactcctggaacctttttg

SEQ ID NO: 1023340 - DNA, 33 bp, Homo sapien
tatatgaaaaggtagattcctggaacctttttg

SEQ ID NO: 1023341 - DNA, 33 bp, Homo sapien
tttaaaaaatacctggaatttgcacccaacaag

SEQ ID NO: 1023342 - DNA, 33 bp, Homo sapien
tttaaaaaatacctgggatttgcacccaacaag

SEQ ID NO: 1023343 - DNA, 33 bp, Homo sapien
cagcctcactctatacagaagatatgacccaaa

SEQ ID NO: 1023344 - DNA, 33 bp, Homo sapien
cagcctcactctataccgaagatatgacccaaa

SEQ ID NO: 1023345 - DNA, 33 bp, Homo sapien
ttgatggcatgggaaccaacatgtctaattatt

SEQ ID NO: 1023346 - DNA, 33 bp, Homo sapien
ttgatggcatgggaacgaacatgtctaattatt

SEQ ID NO: 1023347 - DNA, 33 bp, Homo sapien
aggtgctcgattttgaaggctcctgaacgtttg

SEQ ID NO: 1023348 - DNA, 33 bp, Homo sapien
aggtgctcgattttgatggctcctgaacgtttg

SEQ ID NO: 1023349 - DNA, 33 bp, Homo sapien
gggctctctcaagtccaaatgtgaaagagcatc

SEQ ID NO: 1023350 - DNA, 33 bp, Homo sapien
gggctctctcaagtccgaatgtgaaagagcatc

SEQ ID NO: 1023351 - DNA, 33 bp, Homo sapien
cacatatatgatcataacacataattcatcaac

SEQ ID NO: 1023352 - DNA, 33 bp, Homo sapien
cacatatatgatcataccacataattcatcaac

SEQ ID NO: 1023353 - DNA, 33 bp, Homo sapien
ttgggtatttgtggctaagactatttaccagcc

SEQ ID NO: 1023354 - DNA, 33 bp, Homo sapien
ttgggtatttgtggcttagactatttaccagcc

SEQ ID NO: 1023355 - DNA, 33 bp, Homo sapien
ttataaacccttgaaaaaagacacacatttcta

SEQ ID NO: 1023356 - DNA, 33 bp, Homo sapien
ttataaacccttgaaagaagacacacatttcta

SEQ ID NO: 1023357 - DNA, 33 bp, Homo sapien
acagtgttgattctacggattcttaatcttatg

SEQ ID NO: 1023358 - DNA, 33 bp, Homo sapien
acagtgttgattctactgattcttaatcttatg

SEQ ID NO: 1023359 - DNA, 33 bp, Homo sapien
gatatattttcctacaaaccagtcctttggact

SEQ ID NO: 1023360 - DNA, 33 bp, Homo sapien
gatatattttcctacagaccagtcctttggact

SEQ ID NO: 1023361 - DNA, 33 bp, Homo sapien
caggaccaaatgaagcactgataaatcaaaaaa

SEQ ID NO: 1023362 - DNA, 33 bp, Homo sapien
caggaccaaatgaagcgctgataaatcaaaaaa

SEQ ID NO: 1023363 - DNA, 33 bp, Homo sapien
caaaatctcatactaacgccagcagttagggag

SEQ ID NO: 1023364 - DNA, 33 bp, Homo sapien
caaaatctcatactaatgccagcagttagggag

SEQ ID NO: 1023365 - DNA, 33 bp, Homo sapien
agattactccattcacagctgaaagtgcagatg

SEQ ID NO: 1023366 - DNA, 33 bp, Homo sapien
agattactccattcacggctgaaagtgcagatg

SEQ ID NO: 1023367 - DNA, 33 bp, Homo sapien
agaacataaggcaaaaattgtcataaccagtcc

SEQ ID NO: 1023368 - DNA, 33 bp, Homo sapien
agaacataaggcaaaagttgtcataaccagtcc

SEQ ID NO: 1023369 - DNA, 33 bp, Homo sapien
gatttatggaaaccacaaggcaagtctccagag

SEQ ID NO: 1023370 - DNA, 33 bp, Homo sapien
gatttatggaaaccacgaggcaagtctccagag

SEQ ID NO: 1023371 - DNA, 33 bp, Homo sapien
taacctgaccaaatgaagatcaaactgtctctt

SEQ ID NO: 1023372 - DNA, 33 bp, Homo sapien
taacctgaccaaatgaggatcaaactgtctctt

SEQ ID NO: 1023373 - DNA, 33 bp, Homo sapien
gtgggcactttagacaacaagcacgaaggtgta

SEQ ID NO: 1023374 - DNA, 33 bp, Homo sapien
gtgggcactttagacatcaagcacgaaggtgta

SEQ ID NO: 1023375 - DNA, 33 bp, Homo sapien
tagatgcacatagcaaagtctcatcatcagaga

SEQ ID NO: 1023376 - DNA, 33 bp, Homo sapien
tagatgcacatagcaacgtctcatcatcagaga

SEQ ID NO: 1023377 - DNA, 33 bp, Homo sapien
gggcagcaggatgtgacattgtgaagtatgtgt

SEQ ID NO: 1023378 - DNA, 33 bp, Homo sapien
gggcagcaggatgtgatattgtgaagtatgtgt

SEQ ID NO: 1023379 - DNA, 33 bp, Homo sapien
tgttgcagtagaaaacacaggcctacataagca

SEQ ID NO: 1023380 - DNA, 33 bp, Homo sapien
tgttgcagtagaaaacgcaggcctacataagca

SEQ ID NO: 1023381 - DNA, 33 bp, Homo sapien
ctgagactggaactcaagttttatgacttaata

SEQ ID NO: 1023382 - DNA, 33 bp, Homo sapien
ctgagactggaactcaggttttatgacttaata

SEQ ID NO: 1023383 - DNA, 33 bp, Homo sapien
ctaggtgtaaagaagagatgctgacaataacac

SEQ ID NO: 1023384 - DNA, 33 bp, Homo sapien
ctaggtgtaaagaagatatgctgacaataacac

SEQ ID NO: 1023385 - DNA, 33 bp, Homo sapien
aggtttgaactactcaaaacctgctaatttgtg

SEQ ID NO: 1023386 - DNA, 33 bp, Homo sapien
aggtttgaactactcagaacctgctaatttgtg

SEQ ID NO: 1023387 - DNA, 33 bp, Homo sapien
gccctagatgctaccacggggccggagcccaga

SEQ ID NO: 1023388 - DNA, 33 bp, Homo sapien
gccctagatgctaccatggggccggagcccaga

SEQ ID NO: 1023389 - DNA, 33 bp, Homo sapien
atcattctgttatttccctctgtagtgggcact

SEQ ID NO: 1023390 - DNA, 33 bp, Homo sapien
atcattctgttatttctctctgtagtgggcact

SEQ ID NO: 1023391 - DNA, 33 bp, Homo sapien
tctaggacatccaccaagtttttatgctacgta

SEQ ID NO: 1023392 - DNA, 33 bp, Homo sapien
tctaggacatccaccaggtttttatgctacgta

SEQ ID NO: 1023393 - DNA, 33 bp, Homo sapien
tatacttactagcacacagcatgatcattacgg

SEQ ID NO: 1023394 - DNA, 33 bp, Homo sapien
tatacttactagcacatagcatgatcattacgg

SEQ ID NO: 1023395 - DNA, 33 bp, Homo sapien
tgctcataggagagaacataagaactctgagtg

SEQ ID NO: 1023396 - DNA, 33 bp, Homo sapien
tgctcataggagagaatataagaactctgagtg

SEQ ID NO: 1023397 - DNA, 33 bp, Homo sapien
caaggtttccccacacacttatggctgggagac

SEQ ID NO: 1023398 - DNA, 33 bp, Homo sapien
caaggtttccccacacgcttatggctgggagac

SEQ ID NO: 1023399 - DNA, 33 bp, Homo sapien
gttttctgcttcaccactgattaacattctcct

SEQ ID NO: 1023400 - DNA, 33 bp, Homo sapien
gttttctgcttcaccattgattaacattctcct

SEQ ID NO: 1023401 - DNA, 33 bp, Homo sapien
cattagggaccaccaaaatgttaatgaagattc

SEQ ID NO: 1023402 - DNA, 33 bp, Homo sapien
cattagggaccaccaagatgttaatgaagattc

SEQ ID NO: 1023403 - DNA, 33 bp, Homo sapien
acatcacaccgtcaaaacaccataactatggtc

SEQ ID NO: 1023404 - DNA, 33 bp, Homo sapien
acatcacaccgtcaaagcaccataactatggtc

SEQ ID NO: 1023405 - DNA, 33 bp, Homo sapien
ccatgagtatattaagactgggttgtcagggca

SEQ ID NO: 1023406 - DNA, 33 bp, Homo sapien
ccatgagtatattaagcctgggttgtcagggca

SEQ ID NO: 1023407 - DNA, 33 bp, Homo sapien
ccacaggcaaatctaacatactgacatttttaa

SEQ ID NO: 1023408 - DNA, 33 bp, Homo sapien
ccacaggcaaatctaatatactgacatttttaa

SEQ ID NO: 1023409 - DNA, 33 bp, Homo sapien
atcatccgtaagcttaaggaagacagaaaccat

SEQ ID NO: 1023410 - DNA, 33 bp, Homo sapien
atcatccgtaagcttagggaagacagaaaccat

SEQ ID NO: 1023411 - DNA, 33 bp, Homo sapien
cactgacctgtaataacccactcttctccaaca

SEQ ID NO: 1023412 - DNA, 33 bp, Homo sapien
cactgacctgtaataatccactcttctccaaca

SEQ ID NO: 1023413 - DNA, 33 bp, Homo sapien
aatactgaattggttccctaagtaacaaagact

SEQ ID NO: 1023414 - DNA, 33 bp, Homo sapien
aatactgaattggttctctaagtaacaaagact

SEQ ID NO: 1023415 - DNA, 33 bp, Homo sapien
atgctttctgacaatacgcccatgccctcaaag

SEQ ID NO: 1023416 - DNA, 33 bp, Homo sapien
atgctttctgacaatatgcccatgccctcaaag

SEQ ID NO: 1023417 - DNA, 33 bp, Homo sapien
tttcactcactacgagccaaccgtatttgggct

SEQ ID NO: 1023418 - DNA, 33 bp, Homo sapien
tttcactcactacgagtcaaccgtatttgggct

SEQ ID NO: 1023419 - DNA, 33 bp, Homo sapien
tcccttgccagcagaactggtaatgattatact

SEQ ID NO: 1023420 - DNA, 33 bp, Homo sapien
tcccttgccagcagaagtggtaatgattatact

SEQ ID NO: 1023421 - DNA, 33 bp, Homo sapien
aaggccatgacttacaaaacggtagaattacag

SEQ ID NO: 1023422 - DNA, 33 bp, Homo sapien
aaggccatgacttacacaacggtagaattacag

SEQ ID NO: 1023423 - DNA, 33 bp, Homo sapien
acaacagtttcttcaacatagccatcttctcac

SEQ ID NO: 1023424 - DNA, 33 bp, Homo sapien
acaacagtttcttcaatatagccatcttctcac

SEQ ID NO: 1023425 - DNA, 33 bp, Homo sapien
agcagtctatcagagcaagaggcagatgaagat

SEQ ID NO: 1023426 - DNA, 33 bp, Homo sapien
agcagtctatcagagcgagaggcagatgaagat

SEQ ID NO: 1023427 - DNA, 33 bp, Homo sapien
ttacacaaataaaagtaaaaggccatttgggta

SEQ ID NO: 1023428 - DNA, 33 bp, Homo sapien
ttacacaaataaaagtgaaaggccatttgggta

SEQ ID NO: 1023429 - DNA, 33 bp, Homo sapien
tacaaatgtgcacgcacacaatccccaatgtga

SEQ ID NO: 1023430 - DNA, 33 bp, Homo sapien
tacaaatgtgcacgcatacaatccccaatgtga

SEQ ID NO: 1023431 - DNA, 33 bp, Homo sapien
ctggttccttctagctgaaacaggtgccctatt

SEQ ID NO: 1023432 - DNA, 33 bp, Homo sapien
ctggttccttctagcttaaacaggtgccctatt

SEQ ID NO: 1023433 - DNA, 33 bp, Homo sapien
cttcagactgagctaacagcagcctaggttccc

SEQ ID NO: 1023434 - DNA, 33 bp, Homo sapien
cttcagactgagctaagagcagcctaggttccc

SEQ ID NO: 1023435 - DNA, 33 bp, Homo sapien
gactctgtcttaaaaaaattgtcatagtaattt

SEQ ID NO: 1023436 - DNA, 33 bp, Homo sapien
gactctgtcttaaaaatattgtcatagtaattt

SEQ ID NO: 1023437 - DNA, 33 bp, Homo sapien
ttttacttctagataacgcttcgtcttcaaaat

SEQ ID NO: 1023438 - DNA, 33 bp, Homo sapien
ttttacttctagataatgcttcgtcttcaaaat

SEQ ID NO: 1023439 - DNA, 33 bp, Homo sapien
aggggaaggaaaacaaacattaatgtctacaga

SEQ ID NO: 1023440 - DNA, 33 bp, Homo sapien
aggggaaggaaaacaaccattaatgtctacaga

SEQ ID NO: 1023441 - DNA, 33 bp, Homo sapien
tgccttctgcattctgaaatgtaggcaaaagga

SEQ ID NO: 1023442 - DNA, 33 bp, Homo sapien
tgccttctgcattctggaatgtaggcaaaagga

SEQ ID NO: 1023443 - DNA, 33 bp, Homo sapien
atgaagcatgaaccaaaaacacatcagagaagc

SEQ ID NO: 1023444 - DNA, 33 bp, Homo sapien
atgaagcatgaaccaagaacacatcagagaagc

SEQ ID NO: 1023445 - DNA, 33 bp, Homo sapien
cataaatacgttaaaacgaccgggcacggtggg

SEQ ID NO: 1023446 - DNA, 33 bp, Homo sapien
cataaatacgttaaaatgaccgggcacggtggg

SEQ ID NO: 1023447 - DNA, 33 bp, Homo sapien
ggcattaaagtttaaagagcgctgccggaatga

SEQ ID NO: 1023448 - DNA, 33 bp, Homo sapien
ggcattaaagtttaaatagcgctgccggaatga

SEQ ID NO: 1023449 - DNA, 33 bp, Homo sapien
atcacagacctttacactggaaactactataga

SEQ ID NO: 1023450 - DNA, 33 bp, Homo sapien
atcacagacctttacattggaaactactataga

SEQ ID NO: 1023451 - DNA, 33 bp, Homo sapien
ctatatacatttcttaagaccatgcttgcaatt

SEQ ID NO: 1023452 - DNA, 33 bp, Homo sapien
ctatatacatttcttaggaccatgcttgcaatt

SEQ ID NO: 1023453 - DNA, 33 bp, Homo sapien
ggattcttgcaaggaaaggtgggcagtctttta

SEQ ID NO: 1023454 - DNA, 33 bp, Homo sapien
ggattcttgcaaggaagggtgggcagtctttta

SEQ ID NO: 1023455 - DNA, 33 bp, Homo sapien
accttgttcttgagtgaagccagatatgtgaaa

SEQ ID NO: 1023456 - DNA, 33 bp, Homo sapien
accttgttcttgagtgtagccagatatgtgaaa

SEQ ID NO: 1023457 - DNA, 33 bp, Homo sapien
tcttagagctaagacacatattccacaaattct

SEQ ID NO: 1023458 - DNA, 33 bp, Homo sapien
tcttagagctaagacagatattccacaaattct

SEQ ID NO: 1023459 - DNA, 33 bp, Homo sapien
aaatctggatatgagaccttgctgtgtactttt

SEQ ID NO: 1023460 - DNA, 33 bp, Homo sapien
aaatctggatatgagatcttgctgtgtactttt

SEQ ID NO: 1023461 - DNA, 33 bp, Homo sapien
acaccagggtttcctgccaatcattgtattata

SEQ ID NO: 1023462 - DNA, 33 bp, Homo sapien
acaccagggtttcctgtcaatcattgtattata

SEQ ID NO: 1023463 - DNA, 33 bp, Homo sapien
ataatttccagggaaactaccttgattcttcag

SEQ ID NO: 1023464 - DNA, 33 bp, Homo sapien
ataatttccagggaaagtaccttgattcttcag

SEQ ID NO: 1023465 - DNA, 33 bp, Homo sapien
ttaaatagttttggaactcattcatggaggtga

SEQ ID NO: 1023466 - DNA, 33 bp, Homo sapien
ttaaatagttttggaagtcattcatggaggtga

SEQ ID NO: 1023467 - DNA, 33 bp, Homo sapien
cactgatgagtgtatgaaattcccaagcaactt

SEQ ID NO: 1023468 - DNA, 33 bp, Homo sapien
cactgatgagtgtatggaattcccaagcaactt

SEQ ID NO: 1023469 - DNA, 33 bp, Homo sapien
ctgtggtgttttgttacgggagctatattagtc

SEQ ID NO: 1023470 - DNA, 33 bp, Homo sapien
ctgtggtgttttgttatgggagctatattagtc

SEQ ID NO: 1023471 - DNA, 33 bp, Homo sapien
aacttattccttctgcccaactgagggtttgta

SEQ ID NO: 1023472 - DNA, 33 bp, Homo sapien
aacttattccttctgctcaactgagggtttgta

SEQ ID NO: 1023473 - DNA, 33 bp, Homo sapien
ctgcttagggcagaaaaaaccatacccgagcca

SEQ ID NO: 1023474 - DNA, 33 bp, Homo sapien
ctgcttagggcagaaacaaccatacccgagcca

SEQ ID NO: 1023475 - DNA, 33 bp, Homo sapien
ggttgaggaaatagccacagatgcaaggaagta

SEQ ID NO: 1023476 - DNA, 33 bp, Homo sapien
ggttgaggaaatagccgcagatgcaaggaagta

SEQ ID NO: 1023477 - DNA, 33 bp, Homo sapien
gaatgtgtcccccagacgtttccaacctatgca

SEQ ID NO: 1023478 - DNA, 33 bp, Homo sapien
gaatgtgtcccccagatgtttccaacctatgca

SEQ ID NO: 1023479 - DNA, 33 bp, Homo sapien
cagagcagactctggacggtgcatgagcctact

SEQ ID NO: 1023480 - DNA, 33 bp, Homo sapien
cagagcagactctggatggtgcatgagcctact

SEQ ID NO: 1023481 - DNA, 33 bp, Homo sapien
tggcctgaggacctatcagaagagcctcagccc

SEQ ID NO: 1023482 - DNA, 33 bp, Homo sapien
tggcctgaggacctattagaagagcctcagccc

SEQ ID NO: 1023483 - DNA, 33 bp, Homo sapien
cttcctcagaaagaacactgtttaaggtgcatg

SEQ ID NO: 1023484 - DNA, 33 bp, Homo sapien
cttcctcagaaagaaccctgtttaaggtgcatg

SEQ ID NO: 1023485 - DNA, 33 bp, Homo sapien
tattgctttccgagccccctgttcataatgaca

SEQ ID NO: 1023486 - DNA, 33 bp, Homo sapien
tattgctttccgagcctcctgttcataatgaca

SEQ ID NO: 1023487 - DNA, 33 bp, Homo sapien
aaggggtttggcatataagaagatgagatccca

SEQ ID NO: 1023488 - DNA, 33 bp, Homo sapien
aaggggtttggcatatgagaagatgagatccca

SEQ ID NO: 1023489 - DNA, 33 bp, Homo sapien
ttaatattcctactgagaaattagatggcaatt

SEQ ID NO: 1023490 - DNA, 33 bp, Homo sapien
ttaatattcctactgataaattagatggcaatt

SEQ ID NO: 1023491 - DNA, 33 bp, Homo sapien
agaaatgcaaattcaaacaatttaaacagaaaa

SEQ ID NO: 1023492 - DNA, 33 bp, Homo sapien
agaaatgcaaattcaagcaatttaaacagaaaa

SEQ ID NO: 1023493 - DNA, 33 bp, Homo sapien
ccctcaactgttccccaaaagagacaggagatt

SEQ ID NO: 1023494 - DNA, 33 bp, Homo sapien
ccctcaactgttcccccaaagagacaggagatt

SEQ ID NO: 1023495 - DNA, 33 bp, Homo sapien
tttcacccacctgcacagagattccagtcagca

SEQ ID NO: 1023496 - DNA, 33 bp, Homo sapien
tttcacccacctgcaccgagattccagtcagca

SEQ ID NO: 1023497 - DNA, 33 bp, Homo sapien
agttacggaggctaaaataactccatcttggat

SEQ ID NO: 1023498 - DNA, 33 bp, Homo sapien
agttacggaggctaaagtaactccatcttggat

SEQ ID NO: 1023499 - DNA, 33 bp, Homo sapien
tctagactctttcaacagtcagaactaggaaat

SEQ ID NO: 1023500 - DNA, 33 bp, Homo sapien
tctagactctttcaacggtcagaactaggaaat

SEQ ID NO: 1023501 - DNA, 33 bp, Homo sapien
tatgctaattgctaccagagttttggtacttct

SEQ ID NO: 1023502 - DNA, 33 bp, Homo sapien
tatgctaattgctaccggagttttggtacttct

SEQ ID NO: 1023503 - DNA, 33 bp, Homo sapien
taaccagtttctgttcaaggaaagtctagcgct

SEQ ID NO: 1023504 - DNA, 33 bp, Homo sapien
taaccagtttctgttcgaggaaagtctagcgct

SEQ ID NO: 1023505 - DNA, 33 bp, Homo sapien
agtccaaccgaagccaaacaactagtaagtggg

SEQ ID NO: 1023506 - DNA, 33 bp, Homo sapien
agtccaaccgaagccacacaactagtaagtggg

SEQ ID NO: 1023507 - DNA, 33 bp, Homo sapien
acctctctttaatttcaacttgccttttcttct

SEQ ID NO: 1023508 - DNA, 33 bp, Homo sapien
acctctctttaatttctacttgccttttcttct

SEQ ID NO: 1023509 - DNA, 33 bp, Homo sapien
tggccctgccactgaccgagtttgagcaaggcc

SEQ ID NO: 1023510 - DNA, 33 bp, Homo sapien
tggccctgccactgactgagtttgagcaaggcc

SEQ ID NO: 1023511 - DNA, 33 bp, Homo sapien
atttgaaggtgctgagaaccagtcctttatgct

SEQ ID NO: 1023512 - DNA, 33 bp, Homo sapien
atttgaaggtgctgaggaccagtcctttatgct

SEQ ID NO: 1023513 - DNA, 33 bp, Homo sapien
cctcaagccacgtgccaatgcataactttcacc

SEQ ID NO: 1023514 - DNA, 33 bp, Homo sapien
cctcaagccacgtgccgatgcataactttcacc

SEQ ID NO: 1023515 - DNA, 33 bp, Homo sapien
ctcttatccatcctaacggaatgacgaacttaa

SEQ ID NO: 1023516 - DNA, 33 bp, Homo sapien
ctcttatccatcctaatggaatgacgaacttaa

SEQ ID NO: 1023517 - DNA, 33 bp, Homo sapien
agtggtggtgttcttacagttgtgcttctgaca

SEQ ID NO: 1023518 - DNA, 33 bp, Homo sapien
agtggtggtgttcttatagttgtgcttctgaca

SEQ ID NO: 1023519 - DNA, 33 bp, Homo sapien
tagttggtactgttccactttaagtcctgttaa

SEQ ID NO: 1023520 - DNA, 33 bp, Homo sapien
tagttggtactgttccgctttaagtcctgttaa

SEQ ID NO: 1023521 - DNA, 33 bp, Homo sapien
ccgcttaggagagcccaaaacgagcaggctgga

SEQ ID NO: 1023522 - DNA, 33 bp, Homo sapien
ccgcttaggagagcccgaaacgagcaggctgga

SEQ ID NO: 1023523 - DNA, 33 bp, Homo sapien
tttaagaaggaaaagaagaagcgtttgataccg

SEQ ID NO: 1023524 - DNA, 33 bp, Homo sapien
tttaagaaggaaaagaggaagcgtttgataccg

SEQ ID NO: 1023525 - DNA, 33 bp, Homo sapien
catagatagggaagacacaatacaggtttaatc

SEQ ID NO: 1023526 - DNA, 33 bp, Homo sapien
catagatagggaagacgcaatacaggtttaatc

SEQ ID NO: 1023527 - DNA, 33 bp, Homo sapien
tatctgggggaaaggaactaagacagagatgcc

SEQ ID NO: 1023528 - DNA, 33 bp, Homo sapien
tatctgggggaaaggagctaagacagagatgcc

SEQ ID NO: 1023529 - DNA, 33 bp, Homo sapien
agttgtgaaagtccctaaaagtcataatagaaa

SEQ ID NO: 1023530 - DNA, 33 bp, Homo sapien
agttgtgaaagtccctgaaagtcataatagaaa

SEQ ID NO: 1023531 - DNA, 33 bp, Homo sapien
tcatctatctcttcagcctacttgacataaaga

SEQ ID NO: 1023532 - DNA, 33 bp, Homo sapien
tcatctatctcttcaggctacttgacataaaga

SEQ ID NO: 1023533 - DNA, 33 bp, Homo sapien
gcaagggtgcaggatacaagcataatatacaaa

SEQ ID NO: 1023534 - DNA, 33 bp, Homo sapien
gcaagggtgcaggatagaagcataatatacaaa

SEQ ID NO: 1023535 - DNA, 33 bp, Homo sapien
ctttgaaggataattacagatgaagcaaaataa

SEQ ID NO: 1023536 - DNA, 33 bp, Homo sapien
ctttgaaggataattatagatgaagcaaaataa

SEQ ID NO: 1023537 - DNA, 33 bp, Homo sapien
ctattgatttaaaagcagcaaggaggaaacttt

SEQ ID NO: 1023538 - DNA, 33 bp, Homo sapien
ctattgatttaaaagcggcaaggaggaaacttt

SEQ ID NO: 1023539 - DNA, 33 bp, Homo sapien
caggtctgtgctgaaaaaatcctcaggaagttc

SEQ ID NO: 1023540 - DNA, 33 bp, Homo sapien
caggtctgtgctgaaagaatcctcaggaagttc

SEQ ID NO: 1023541 - DNA, 33 bp, Homo sapien
gttagatcttccatgacggtgcattcttcctgt

SEQ ID NO: 1023542 - DNA, 33 bp, Homo sapien
gttagatcttccatgatggtgcattcttcctgt

SEQ ID NO: 1023543 - DNA, 33 bp, Homo sapien
attatgttctataagcaagcataaatcttttcc

SEQ ID NO: 1023544 - DNA, 33 bp, Homo sapien
attatgttctataagcgagcataaatcttttcc

SEQ ID NO: 1023545 - DNA, 33 bp, Homo sapien
ttctcagatttctaccagacagttggaggacca

SEQ ID NO: 1023546 - DNA, 33 bp, Homo sapien
ttctcagatttctaccggacagttggaggacca

SEQ ID NO: 1023547 - DNA, 33 bp, Homo sapien
tttcttcctcgattccaactcagagattcttgt

SEQ ID NO: 1023548 - DNA, 33 bp, Homo sapien
tttcttcctcgattccgactcagagattcttgt

SEQ ID NO: 1023549 - DNA, 33 bp, Homo sapien
acaacaatcctatctcaagcaagaaagattcag

SEQ ID NO: 1023550 - DNA, 33 bp, Homo sapien
acaacaatcctatctcgagcaagaaagattcag

SEQ ID NO: 1023551 - DNA, 33 bp, Homo sapien
ttctttgccctcagagccaatatttgatttcac

SEQ ID NO: 1023552 - DNA, 33 bp, Homo sapien
ttctttgccctcagagtcaatatttgatttcac

SEQ ID NO: 1023553 - DNA, 33 bp, Homo sapien
tattgtcagtcttccacagattctgcaaagatt

SEQ ID NO: 1023554 - DNA, 33 bp, Homo sapien
tattgtcagtcttccagagattctgcaaagatt

SEQ ID NO: 1023555 - DNA, 33 bp, Homo sapien
aatctataagtctataactcttgtcaaatttgt

SEQ ID NO: 1023556 - DNA, 33 bp, Homo sapien
aatctataagtctatatctcttgtcaaatttgt

SEQ ID NO: 1023557 - DNA, 33 bp, Homo sapien
accttctgcgacgaatgaaagcagcctgtggct

SEQ ID NO: 1023558 - DNA, 33 bp, Homo sapien
accttctgcgacgaattaaagcagcctgtggct

SEQ ID NO: 1023559 - DNA, 33 bp, Homo sapien
acagtagttgaagctgaaacagaatatactctt

SEQ ID NO: 1023560 - DNA, 33 bp, Homo sapien
acagtagttgaagctgcaacagaatatactctt

SEQ ID NO: 1023561 - DNA, 33 bp, Homo sapien
tcttctgatacagcaacttatttgaactctttt

SEQ ID NO: 1023562 - DNA, 33 bp, Homo sapien
tcttctgatacagcaatttatttgaactctttt

SEQ ID NO: 1023563 - DNA, 33 bp, Homo sapien
tcttactacttgttaactatttgtcaccacaga

SEQ ID NO: 1023564 - DNA, 33 bp, Homo sapien
tcttactacttgttaagtatttgtcaccacaga

SEQ ID NO: 1023565 - DNA, 33 bp, Homo sapien
gcagcagtcaaagtaccaaacaaccatgatagc

SEQ ID NO: 1023566 - DNA, 33 bp, Homo sapien
gcagcagtcaaagtacgaaacaaccatgatagc

SEQ ID NO: 1023567 - DNA, 33 bp, Homo sapien
gatgaaattttgcttcaataaatcgtgcttgca

SEQ ID NO: 1023568 - DNA, 33 bp, Homo sapien
gatgaaattttgcttcgataaatcgtgcttgca

SEQ ID NO: 1023569 - DNA, 33 bp, Homo sapien
aattcatatttccaaaactgaaggtatctgaaa

SEQ ID NO: 1023570 - DNA, 33 bp, Homo sapien
aattcatatttccaaagctgaaggtatctgaaa

SEQ ID NO: 1023571 - DNA, 33 bp, Homo sapien
agggttcatgctgatacatggaagaggagcatt

SEQ ID NO: 1023572 - DNA, 33 bp, Homo sapien
agggttcatgctgatatatggaagaggagcatt

SEQ ID NO: 1023573 - DNA, 33 bp, Homo sapien
agactttaacctgcaaagaagaacattaggcta

SEQ ID NO: 1023574 - DNA, 33 bp, Homo sapien
agactttaacctgcaaggaagaacattaggcta

SEQ ID NO: 1023575 - DNA, 33 bp, Homo sapien
ttacctatatatttcacatgctatttccacagg

SEQ ID NO: 1023576 - DNA, 33 bp, Homo sapien
ttacctatatatttcagatgctatttccacagg

SEQ ID NO: 1023577 - DNA, 33 bp, Homo sapien
cctgctaatcagaaaacggacatacctaatttt

SEQ ID NO: 1023578 - DNA, 33 bp, Homo sapien
cctgctaatcagaaaatggacatacctaatttt

SEQ ID NO: 1023579 - DNA, 33 bp, Homo sapien
ccaagagcactccctgcaaatttcctgtatgca

SEQ ID NO: 1023580 - DNA, 33 bp, Homo sapien
ccaagagcactccctgtaaatttcctgtatgca

SEQ ID NO: 1023581 - DNA, 33 bp, Homo sapien
aggcagacagatgccaataatattcagtaacta

SEQ ID NO: 1023582 - DNA, 33 bp, Homo sapien
aggcagacagatgccagtaatattcagtaacta

SEQ ID NO: 1023583 - DNA, 33 bp, Homo sapien
atttctattttcccaaatgagctactttaaagg

SEQ ID NO: 1023584 - DNA, 33 bp, Homo sapien
atttctattttcccaagtgagctactttaaagg

SEQ ID NO: 1023585 - DNA, 33 bp, Homo sapien
tcaatattatttaagaaactgagtaatcacaag

SEQ ID NO: 1023586 - DNA, 33 bp, Homo sapien
tcaatattatttaagacactgagtaatcacaag

SEQ ID NO: 1023587 - DNA, 33 bp, Homo sapien
ttcttgattatccaaacctttgacccttgggct

SEQ ID NO: 1023588 - DNA, 33 bp, Homo sapien
ttcttgattatccaaatctttgacccttgggct

SEQ ID NO: 1023589 - DNA, 33 bp, Homo sapien
gatatctgagcacagaactgaatcacaaggaat

SEQ ID NO: 1023590 - DNA, 33 bp, Homo sapien
gatatctgagcacagagctgaatcacaaggaat

SEQ ID NO: 1023591 - DNA, 33 bp, Homo sapien
gctgtggcatggaaggcatacataaaactgcaa

SEQ ID NO: 1023592 - DNA, 33 bp, Homo sapien
gctgtggcatggaaggtatacataaaactgcaa

SEQ ID NO: 1023593 - DNA, 33 bp, Homo sapien
tttccatttgatcaaacaatgaagtatagcatt

SEQ ID NO: 1023594 - DNA, 33 bp, Homo sapien
tttccatttgatcaaagaatgaagtatagcatt

SEQ ID NO: 1023595 - DNA, 33 bp, Homo sapien
tgaggaagagttagaaataagtggatgcatatt

SEQ ID NO: 1023596 - DNA, 33 bp, Homo sapien
tgaggaagagttagaagtaagtggatgcatatt

SEQ ID NO: 1023597 - DNA, 33 bp, Homo sapien
atgtggtaacacagataaatgtcaacaacactg

SEQ ID NO: 1023598 - DNA, 33 bp, Homo sapien
atgtggtaacacagattaatgtcaacaacactg

SEQ ID NO: 1023599 - DNA, 33 bp, Homo sapien
atatcttcttagctgcacccatattaatgtaga

SEQ ID NO: 1023600 - DNA, 33 bp, Homo sapien
atatcttcttagctgcgcccatattaatgtaga

SEQ ID NO: 1023601 - DNA, 33 bp, Homo sapien
atttactcacaacaacccttagaatctacatag

SEQ ID NO: 1023602 - DNA, 33 bp, Homo sapien
atttactcacaacaactcttagaatctacatag

SEQ ID NO: 1023603 - DNA, 33 bp, Homo sapien
agttttcctacacttacgaaagcaaaatgacca

SEQ ID NO: 1023604 - DNA, 33 bp, Homo sapien
agttttcctacacttatgaaagcaaaatgacca

SEQ ID NO: 1023605 - DNA, 33 bp, Homo sapien
tgtaagggagaaaaaaagtgctgttacaaggaa

SEQ ID NO: 1023606 - DNA, 33 bp, Homo sapien
tgtaagggagaaaaaaggtgctgttacaaggaa

SEQ ID NO: 1023607 - DNA, 33 bp, Homo sapien
gaaaataaatgcaagcaatcttattaattatgt

SEQ ID NO: 1023608 - DNA, 33 bp, Homo sapien
gaaaataaatgcaagccatcttattaattatgt

SEQ ID NO: 1023609 - DNA, 33 bp, Homo sapien
tttctcaacggaaactaactagcctaagaacaa

SEQ ID NO: 1023610 - DNA, 33 bp, Homo sapien
tttctcaacggaaactgactagcctaagaacaa

SEQ ID NO: 1023611 - DNA, 33 bp, Homo sapien
attaagtataagcctgacagcctacattccaga

SEQ ID NO: 1023612 - DNA, 33 bp, Homo sapien
attaagtataagcctggcagcctacattccaga

SEQ ID NO: 1023613 - DNA, 33 bp, Homo sapien
agtcaaaaaagatgacaaattatgtacagagga

SEQ ID NO: 1023614 - DNA, 33 bp, Homo sapien
agtcaaaaaagatgaccaattatgtacagagga

SEQ ID NO: 1023615 - DNA, 33 bp, Homo sapien
tggagagatcttgaaaaaaatccagaaggcagt

SEQ ID NO: 1023616 - DNA, 33 bp, Homo sapien
tggagagatcttgaaagaaatccagaaggcagt

SEQ ID NO: 1023617 - DNA, 33 bp, Homo sapien
catggaactgcccacaagttcatatttttttcc

SEQ ID NO: 1023618 - DNA, 33 bp, Homo sapien
catggaactgcccacaggttcatatttttttcc

SEQ ID NO: 1023619 - DNA, 33 bp, Homo sapien
ggcatatttgtgtgggacagcaaagacactgct

SEQ ID NO: 1023620 - DNA, 33 bp, Homo sapien
ggcatatttgtgtggggcagcaaagacactgct

SEQ ID NO: 1023621 - DNA, 33 bp, Homo sapien
attatatgtatatgccacatagccattttgagt

SEQ ID NO: 1023622 - DNA, 33 bp, Homo sapien
attatatgtatatgccgcatagccattttgagt

SEQ ID NO: 1023623 - DNA, 33 bp, Homo sapien
acaaaaacatgaagtaaggaaaggacaccttat

SEQ ID NO: 1023624 - DNA, 33 bp, Homo sapien
acaaaaacatgaagtagggaaaggacaccttat

SEQ ID NO: 1023625 - DNA, 33 bp, Homo sapien
gagcggtagcaaggccaactggaggcatcatag

SEQ ID NO: 1023626 - DNA, 33 bp, Homo sapien
gagcggtagcaaggccgactggaggcatcatag

SEQ ID NO: 1023627 - DNA, 33 bp, Homo sapien
agaagcctcagagaaacagttagaagtatattt

SEQ ID NO: 1023628 - DNA, 33 bp, Homo sapien
agaagcctcagagaaagagttagaagtatattt

SEQ ID NO: 1023629 - DNA, 33 bp, Homo sapien
atttgcagaagtcacccatggctgatacagtca

SEQ ID NO: 1023630 - DNA, 33 bp, Homo sapien
atttgcagaagtcacctatggctgatacagtca

SEQ ID NO: 1023631 - DNA, 33 bp, Homo sapien
tctgattttgcatgataactttcattcggcaag

SEQ ID NO: 1023632 - DNA, 33 bp, Homo sapien
tctgattttgcatgatgactttcattcggcaag

SEQ ID NO: 1023633 - DNA, 33 bp, Homo sapien
attggctgtttggtacaagaggtactacctttc

SEQ ID NO: 1023634 - DNA, 33 bp, Homo sapien
attggctgtttggtacgagaggtactacctttc

SEQ ID NO: 1023635 - DNA, 33 bp, Homo sapien
cacattctttggttggaacttaaagccttttat

SEQ ID NO: 1023636 - DNA, 33 bp, Homo sapien
cacattctttggttgggacttaaagccttttat

SEQ ID NO: 1023637 - DNA, 33 bp, Homo sapien
aggtaggcttaattacaatgcccaaacttagca

SEQ ID NO: 1023638 - DNA, 33 bp, Homo sapien
aggtaggcttaattacgatgcccaaacttagca

SEQ ID NO: 1023639 - DNA, 33 bp, Homo sapien
ttgtaatacaaatgaaaaagggacatacataca

SEQ ID NO: 1023640 - DNA, 33 bp, Homo sapien
ttgtaatacaaatgaagaagggacatacataca

SEQ ID NO: 1023641 - DNA, 33 bp, Homo sapien
tccacaagcctaactccctaaacattacataaa

SEQ ID NO: 1023642 - DNA, 33 bp, Homo sapien
tccacaagcctaactcgctaaacattacataaa

SEQ ID NO: 1023643 - DNA, 33 bp, Homo sapien
ctggccagactcagaacagatccctggcctcct

SEQ ID NO: 1023644 - DNA, 33 bp, Homo sapien
ctggccagactcagaagagatccctggcctcct

SEQ ID NO: 1023645 - DNA, 33 bp, Homo sapien
ttgtatttcttgctgaacaaatctactaaatgc

SEQ ID NO: 1023646 - DNA, 33 bp, Homo sapien
ttgtatttcttgctgaccaaatctactaaatgc

SEQ ID NO: 1023647 - DNA, 33 bp, Homo sapien
aagctgacatagagtaaatgggctctagatagc

SEQ ID NO: 1023648 - DNA, 33 bp, Homo sapien
aagctgacatagagtagatgggctctagatagc

SEQ ID NO: 1023649 - DNA, 33 bp, Homo sapien
gattacttctcttcaacagtggtccaaatcaga

SEQ ID NO: 1023650 - DNA, 33 bp, Homo sapien
gattacttctcttcaatagtggtccaaatcaga

SEQ ID NO: 1023651 - DNA, 33 bp, Homo sapien
atggcatttttaaaaacctcgccaagagattcc

SEQ ID NO: 1023652 - DNA, 33 bp, Homo sapien
atggcatttttaaaaagctcgccaagagattcc

SEQ ID NO: 1023653 - DNA, 33 bp, Homo sapien
gctgagctcaaaggaaaggaaacatttcaactg

SEQ ID NO: 1023654 - DNA, 33 bp, Homo sapien
gctgagctcaaaggaagggaaacatttcaactg

SEQ ID NO: 1023655 - DNA, 33 bp, Homo sapien
ccatgttcgtggcagcaaaaagggaagatgtag

SEQ ID NO: 1023656 - DNA, 33 bp, Homo sapien
ccatgttcgtggcagcgaaaagggaagatgtag

SEQ ID NO: 1023657 - DNA, 33 bp, Homo sapien
cagcctttgctacatcacatttcacataacaag

SEQ ID NO: 1023658 - DNA, 33 bp, Homo sapien
cagcctttgctacatcgcatttcacataacaag

SEQ ID NO: 1023659 - DNA, 33 bp, Homo sapien
aaaccctcagtagaacacagtcaagtgaaattt

SEQ ID NO: 1023660 - DNA, 33 bp, Homo sapien
aaaccctcagtagaacgcagtcaagtgaaattt

SEQ ID NO: 1023661 - DNA, 33 bp, Homo sapien
tgttgcaggtttgaaaccaggcagatcatatca

SEQ ID NO: 1023662 - DNA, 33 bp, Homo sapien
tgttgcaggtttgaaagcaggcagatcatatca

SEQ ID NO: 1023663 - DNA, 33 bp, Homo sapien
agactagcttccttcaagaggactcaagatata

SEQ ID NO: 1023664 - DNA, 33 bp, Homo sapien
agactagcttccttcaggaggactcaagatata

SEQ ID NO: 1023665 - DNA, 33 bp, Homo sapien
aataaacacagctgacgagtttacgtacttacc

SEQ ID NO: 1023666 - DNA, 33 bp, Homo sapien
aataaacacagctgactagtttacgtacttacc

SEQ ID NO: 1023667 - DNA, 33 bp, Homo sapien
ccccgtctgtataaaacattttaacaattggcc

SEQ ID NO: 1023668 - DNA, 33 bp, Homo sapien
ccccgtctgtataaaagattttaacaattggcc

SEQ ID NO: 1023669 - DNA, 33 bp, Homo sapien
acacattatagtcgaactgttgaaagtcaaagt

SEQ ID NO: 1023670 - DNA, 33 bp, Homo sapien
acacattatagtcgaattgttgaaagtcaaagt

SEQ ID NO: 1023671 - DNA, 33 bp, Homo sapien
tatcaatcacctttgacatgagttaagagagca

SEQ ID NO: 1023672 - DNA, 33 bp, Homo sapien
tatcaatcacctttgagatgagttaagagagca

SEQ ID NO: 1023673 - DNA, 33 bp, Homo sapien
tgcccatacaacctcaatagctccacattactt

SEQ ID NO: 1023674 - DNA, 33 bp, Homo sapien
tgcccatacaacctcagtagctccacattactt

SEQ ID NO: 1023675 - DNA, 33 bp, Homo sapien
gttgttattaggaacaacaatgtgccaaacata

SEQ ID NO: 1023676 - DNA, 33 bp, Homo sapien
gttgttattaggaacatcaatgtgccaaacata

SEQ ID NO: 1023677 - DNA, 33 bp, Homo sapien
gcggggccagataagaataaaaacaggctgcca

SEQ ID NO: 1023678 - DNA, 33 bp, Homo sapien
gcggggccagataagagtaaaaacaggctgcca

SEQ ID NO: 1023679 - DNA, 33 bp, Homo sapien
gagataacatgttgaagatgggcagacgcacaa

SEQ ID NO: 1023680 - DNA, 33 bp, Homo sapien
gagataacatgttgaatatgggcagacgcacaa

SEQ ID NO: 1023681 - DNA, 33 bp, Homo sapien
tggaacttgtcacggacatcactcctgcttctc

SEQ ID NO: 1023682 - DNA, 33 bp, Homo sapien
tggaacttgtcacggatatcactcctgcttctc

SEQ ID NO: 1023683 - DNA, 33 bp, Homo sapien
gtgtccatttccggcccagatcagcttctacac

SEQ ID NO: 1023684 - DNA, 33 bp, Homo sapien
gtgtccatttccggcctagatcagcttctacac

SEQ ID NO: 1023685 - DNA, 33 bp, Homo sapien
actgggaacaccttgaatatcttatgcctttgt

SEQ ID NO: 1023686 - DNA, 33 bp, Homo sapien
actgggaacaccttgagtatcttatgcctttgt

SEQ ID NO: 1023687 - DNA, 33 bp, Homo sapien
tagcagattttgagtcacatgctgtttgctagt

SEQ ID NO: 1023688 - DNA, 33 bp, Homo sapien
tagcagattttgagtcgcatgctgtttgctagt

SEQ ID NO: 1023689 - DNA, 33 bp, Homo sapien
accagcctggccaatacgataacactttctcta

SEQ ID NO: 1023690 - DNA, 33 bp, Homo sapien
accagcctggccaatatgataacactttctcta

SEQ ID NO: 1023691 - DNA, 33 bp, Homo sapien
gccccactgttgttgacgctaagttttgatcac

SEQ ID NO: 1023692 - DNA, 33 bp, Homo sapien
gccccactgttgttgatgctaagttttgatcac

SEQ ID NO: 1023693 - DNA, 33 bp, Homo sapien
tgtgttttaaacggaacacattaactaatccga

SEQ ID NO: 1023694 - DNA, 33 bp, Homo sapien
tgtgttttaaacggaatacattaactaatccga

SEQ ID NO: 1023695 - DNA, 33 bp, Homo sapien
gagattaattaggtcactccatggaaaagatta

SEQ ID NO: 1023696 - DNA, 33 bp, Homo sapien
gagattaattaggtcattccatggaaaagatta

SEQ ID NO: 1023697 - DNA, 33 bp, Homo sapien
actgaatacgactgaaccactaatcagtttatc

SEQ ID NO: 1023698 - DNA, 33 bp, Homo sapien
actgaatacgactgaatcactaatcagtttatc

SEQ ID NO: 1023699 - DNA, 33 bp, Homo sapien
tgggtctgtttacaaaaccatccttgaattcca

SEQ ID NO: 1023700 - DNA, 33 bp, Homo sapien
tgggtctgtttacaaacccatccttgaattcca

SEQ ID NO: 1023701 - DNA, 33 bp, Homo sapien
actggtaaacaaaatgcattttacaacagggga

SEQ ID NO: 1023702 - DNA, 33 bp, Homo sapien
actggtaaacaaaatgtattttacaacagggga

SEQ ID NO: 1023703 - DNA, 33 bp, Homo sapien
cttaaaaaaaattgcaaaaaatctcattctgtt

SEQ ID NO: 1023704 - DNA, 33 bp, Homo sapien
cttaaaaaaaattgcagaaaatctcattctgtt

SEQ ID NO: 1023705 - DNA, 33 bp, Homo sapien
gaaccagacaccaaaactcacctttcagttaaa

SEQ ID NO: 1023706 - DNA, 33 bp, Homo sapien
gaaccagacaccaaaattcacctttcagttaaa

SEQ ID NO: 1023707 - DNA, 33 bp, Homo sapien
taagtcttctagtgaaggtattactggccaggg

SEQ ID NO: 1023708 - DNA, 33 bp, Homo sapien
taagtcttctagtgaatgtattactggccaggg

SEQ ID NO: 1023709 - DNA, 33 bp, Homo sapien
tcccataatctcccaaatctcctgctatacagc

SEQ ID NO: 1023710 - DNA, 33 bp, Homo sapien
tcccataatctcccaagtctcctgctatacagc

SEQ ID NO: 1023711 - DNA, 33 bp, Homo sapien
tctcatgcaaaactgacctacaaacagtggctt

SEQ ID NO: 1023712 - DNA, 33 bp, Homo sapien
tctcatgcaaaactgagctacaaacagtggctt

SEQ ID NO: 1023713 - DNA, 33 bp, Homo sapien
tctttgctgctgagaaacgctccttcctaaaga

SEQ ID NO: 1023714 - DNA, 33 bp, Homo sapien
tctttgctgctgagaaccgctccttcctaaaga

SEQ ID NO: 1023715 - DNA, 33 bp, Homo sapien
aacaacagcagaacaacggagcagaattcaaaa

SEQ ID NO: 1023716 - DNA, 33 bp, Homo sapien
aacaacagcagaacaatggagcagaattcaaaa

SEQ ID NO: 1023717 - DNA, 33 bp, Homo sapien
ttggtatttattattccattctcggctccacaa

SEQ ID NO: 1023718 - DNA, 33 bp, Homo sapien
ttggtatttattattctattctcggctccacaa

SEQ ID NO: 1023719 - DNA, 33 bp, Homo sapien
gttttcatggtggtaaatgttgtcctttcactt

SEQ ID NO: 1023720 - DNA, 33 bp, Homo sapien
gttttcatggtggtaagtgttgtcctttcactt

SEQ ID NO: 1023721 - DNA, 33 bp, Homo sapien
gtatccttgggtgcaaccttttttcattcagta

SEQ ID NO: 1023722 - DNA, 33 bp, Homo sapien
gtatccttgggtgcaatcttttttcattcagta

SEQ ID NO: 1023723 - DNA, 33 bp, Homo sapien
taaaagttcaaatgcaatgaggctacaaggcta

SEQ ID NO: 1023724 - DNA, 33 bp, Homo sapien
taaaagttcaaatgcagtgaggctacaaggcta

SEQ ID NO: 1023725 - DNA, 33 bp, Homo sapien
tcattcttgtgttaaccgctgtagtgttagatt

SEQ ID NO: 1023726 - DNA, 33 bp, Homo sapien
tcattcttgtgttaactgctgtagtgttagatt

SEQ ID NO: 1023727 - DNA, 33 bp, Homo sapien
tggctggcttaaaaccaaggaaacacatcctct

SEQ ID NO: 1023728 - DNA, 33 bp, Homo sapien
tggctggcttaaaacccaggaaacacatcctct

SEQ ID NO: 1023729 - DNA, 33 bp, Homo sapien
gtaaagagttgaaccacgtacttaccatattaa

SEQ ID NO: 1023730 - DNA, 33 bp, Homo sapien
gtaaagagttgaaccatgtacttaccatattaa

SEQ ID NO: 1023731 - DNA, 33 bp, Homo sapien
ggacaatgtcctacaacggctctcctattctgg

SEQ ID NO: 1023732 - DNA, 33 bp, Homo sapien
ggacaatgtcctacaatggctctcctattctgg

SEQ ID NO: 1023733 - DNA, 33 bp, Homo sapien
ttctctgtatttagtccaccattcttttagcaa

SEQ ID NO: 1023734 - DNA, 33 bp, Homo sapien
ttctctgtatttagtctaccattcttttagcaa

SEQ ID NO: 1023735 - DNA, 33 bp, Homo sapien
tttccagcaaaattcaataactaataggtgctt

SEQ ID NO: 1023736 - DNA, 33 bp, Homo sapien
tttccagcaaaattcagtaactaataggtgctt

SEQ ID NO: 1023737 - DNA, 33 bp, Homo sapien
aagtaaggtatgcctaacacttagttgggtctc

SEQ ID NO: 1023738 - DNA, 33 bp, Homo sapien
aagtaaggtatgcctagcacttagttgggtctc

SEQ ID NO: 1023739 - DNA, 33 bp, Homo sapien
taggtcactttaataccctgcttgaaagttact

SEQ ID NO: 1023740 - DNA, 33 bp, Homo sapien
taggtcactttaatactctgcttgaaagttact

SEQ ID NO: 1023741 - DNA, 33 bp, Homo sapien
ggccaaacttgagataaaacttcagtgacctgc

SEQ ID NO: 1023742 - DNA, 33 bp, Homo sapien
ggccaaacttgagatacaacttcagtgacctgc

SEQ ID NO: 1023743 - DNA, 33 bp, Homo sapien
cttcctgttgatgtcaaggttctgaggttccag

SEQ ID NO: 1023744 - DNA, 33 bp, Homo sapien
cttcctgttgatgtcacggttctgaggttccag

SEQ ID NO: 1023745 - DNA, 33 bp, Homo sapien
tgaattcccagttctacactcaagactttttga

SEQ ID NO: 1023746 - DNA, 33 bp, Homo sapien
tgaattcccagttctatactcaagactttttga

SEQ ID NO: 1023747 - DNA, 33 bp, Homo sapien
tcattatgcttgataaatccttcaagtcctttc

SEQ ID NO: 1023748 - DNA, 33 bp, Homo sapien
tcattatgcttgataagtccttcaagtcctttc

SEQ ID NO: 1023749 - DNA, 33 bp, Homo sapien
aaagagtcgtctttagaagcccccaattaaggg

SEQ ID NO: 1023750 - DNA, 33 bp, Homo sapien
aaagagtcgtctttaggagcccccaattaaggg

SEQ ID NO: 1023751 - DNA, 33 bp, Homo sapien
actttaatgaagacaaaaaagagttggcagcaa

SEQ ID NO: 1023752 - DNA, 33 bp, Homo sapien
actttaatgaagacaataaagagttggcagcaa

SEQ ID NO: 1023753 - DNA, 33 bp, Homo sapien
aatacctgaccacctacggggttgttgcaagga

SEQ ID NO: 1023754 - DNA, 33 bp, Homo sapien
aatacctgaccacctatggggttgttgcaagga

SEQ ID NO: 1023755 - DNA, 33 bp, Homo sapien
tcacagccaaatggccccatcatcctatcctga

SEQ ID NO: 1023756 - DNA, 33 bp, Homo sapien
tcacagccaaatggcctcatcatcctatcctga

SEQ ID NO: 1023757 - DNA, 33 bp, Homo sapien
gaagcaggaattatgacgtagagtaaataaaaa

SEQ ID NO: 1023758 - DNA, 33 bp, Homo sapien
gaagcaggaattatgatgtagagtaaataaaaa

SEQ ID NO: 1023759 - DNA, 33 bp, Homo sapien
cctcaaacatggtgagaaataaatgaaatcact

SEQ ID NO: 1023760 - DNA, 33 bp, Homo sapien
cctcaaacatggtgaggaataaatgaaatcact

SEQ ID NO: 1023761 - DNA, 33 bp, Homo sapien
tattagcattaggtataacagaaaaagaataaa

SEQ ID NO: 1023762 - DNA, 33 bp, Homo sapien
tattagcattaggtatgacagaaaaagaataaa

SEQ ID NO: 1023763 - DNA, 33 bp, Homo sapien
catcagttgtatttcaaaaatgtatcagtcttc

SEQ ID NO: 1023764 - DNA, 33 bp, Homo sapien
catcagttgtatttcataaatgtatcagtcttc

SEQ ID NO: 1023765 - DNA, 33 bp, Homo sapien
aatccatctaataataactgacaactgatcatc

SEQ ID NO: 1023766 - DNA, 33 bp, Homo sapien
aatccatctaataatagctgacaactgatcatc

SEQ ID NO: 1023767 - DNA, 33 bp, Homo sapien
taagagagaagaaacaagctattaaatggccaa

SEQ ID NO: 1023768 - DNA, 33 bp, Homo sapien
taagagagaagaaacaggctattaaatggccaa

SEQ ID NO: 1023769 - DNA, 33 bp, Homo sapien
cactgaacatgaccaggaatattaattttgaac

SEQ ID NO: 1023770 - DNA, 33 bp, Homo sapien
cactgaacatgaccagtaatattaattttgaac

SEQ ID NO: 1023771 - DNA, 33 bp, Homo sapien
cggggaccatctaatacgttgacatagctcccg

SEQ ID NO: 1023772 - DNA, 33 bp, Homo sapien
cggggaccatctaatatgttgacatagctcccg

SEQ ID NO: 1023773 - DNA, 33 bp, Homo sapien
acaacattataagcaaacttaaggccatgcctc

SEQ ID NO: 1023774 - DNA, 33 bp, Homo sapien
acaacattataagcaaccttaaggccatgcctc

SEQ ID NO: 1023775 - DNA, 33 bp, Homo sapien
aggaagggagcaaaaaaggagcagccttcgggc

SEQ ID NO: 1023776 - DNA, 33 bp, Homo sapien
aggaagggagcaaaaatggagcagccttcgggc

SEQ ID NO: 1023777 - DNA, 33 bp, Homo sapien
tgagtgtggcaccagcaaagatacaagcaaaga

SEQ ID NO: 1023778 - DNA, 33 bp, Homo sapien
tgagtgtggcaccagccaagatacaagcaaaga

SEQ ID NO: 1023779 - DNA, 33 bp, Homo sapien
cacttgacaaaattgaagattcactcatgataa

SEQ ID NO: 1023780 - DNA, 33 bp, Homo sapien
cacttgacaaaattgaggattcactcatgataa

SEQ ID NO: 1023781 - DNA, 33 bp, Homo sapien
cctaaattttgcattcacaagaggagaggatca

SEQ ID NO: 1023782 - DNA, 33 bp, Homo sapien
cctaaattttgcattcgcaagaggagaggatca

SEQ ID NO: 1023783 - DNA, 33 bp, Homo sapien
attcactgccagtgttcaaatgggcaaaactct

SEQ ID NO: 1023784 - DNA, 33 bp, Homo sapien
attcactgccagtgttgaaatgggcaaaactct

SEQ ID NO: 1023785 - DNA, 33 bp, Homo sapien
attgtttgcaaagcctaaattactctgtggccc

SEQ ID NO: 1023786 - DNA, 33 bp, Homo sapien
attgtttgcaaagcctcaattactctgtggccc

SEQ ID NO: 1023787 - DNA, 33 bp, Homo sapien
agggcttgtaagaagcagattcctggagtgtcc

SEQ ID NO: 1023788 - DNA, 33 bp, Homo sapien
agggcttgtaagaagccgattcctggagtgtcc

SEQ ID NO: 1023789 - DNA, 33 bp, Homo sapien
tcagaagagagaaagagattcccaaccaaactc

SEQ ID NO: 1023790 - DNA, 33 bp, Homo sapien
tcagaagagagaaagatattcccaaccaaactc

SEQ ID NO: 1023791 - DNA, 33 bp, Homo sapien
ttaaagatagttcaaaatcaaatgagcaataca

SEQ ID NO: 1023792 - DNA, 33 bp, Homo sapien
ttaaagatagttcaaagtcaaatgagcaataca

SEQ ID NO: 1023793 - DNA, 33 bp, Homo sapien
tttgtagtagtgctcacatattcatgaaacaga

SEQ ID NO: 1023794 - DNA, 33 bp, Homo sapien
tttgtagtagtgctcagatattcatgaaacaga

SEQ ID NO: 1023795 - DNA, 33 bp, Homo sapien
ctaagatcttctaagtcactactcgtaagccta

SEQ ID NO: 1023796 - DNA, 33 bp, Homo sapien
ctaagatcttctaagtgactactcgtaagccta

SEQ ID NO: 1023797 - DNA, 33 bp, Homo sapien
gatcctgcttttctatgaagagaggataattac

SEQ ID NO: 1023798 - DNA, 33 bp, Homo sapien
gatcctgcttttctattaagagaggataattac

SEQ ID NO: 1023799 - DNA, 33 bp, Homo sapien
taaaccttctagtcaaaagaataaggaacataa

SEQ ID NO: 1023800 - DNA, 33 bp, Homo sapien
taaaccttctagtcaagagaataaggaacataa

SEQ ID NO: 1023801 - DNA, 33 bp, Homo sapien
agtctccagatggttacagcagcatcaaaaaca

SEQ ID NO: 1023802 - DNA, 33 bp, Homo sapien
agtctccagatggttatagcagcatcaaaaaca

SEQ ID NO: 1023803 - DNA, 33 bp, Homo sapien
ttcataataatttatcaaagccatctggcatta

SEQ ID NO: 1023804 - DNA, 33 bp, Homo sapien
ttcataataatttatcgaagccatctggcatta

SEQ ID NO: 1023805 - DNA, 33 bp, Homo sapien
aaaaacgggtgagtgagatttggttggtacagc

SEQ ID NO: 1023806 - DNA, 33 bp, Homo sapien
aaaaacgggtgagtgatatttggttggtacagc

SEQ ID NO: 1023807 - DNA, 33 bp, Homo sapien
gtaggttccagtcttaccttctccctcattagc

SEQ ID NO: 1023808 - DNA, 33 bp, Homo sapien
gtaggttccagtcttatcttctccctcattagc

SEQ ID NO: 1023809 - DNA, 33 bp, Homo sapien
acaagaaagtgttagacaggtgttaactattgt

SEQ ID NO: 1023810 - DNA, 33 bp, Homo sapien
acaagaaagtgttagataggtgttaactattgt

SEQ ID NO: 1023811 - DNA, 33 bp, Homo sapien
gagtattttgtatgaaccattataggagcaagg

SEQ ID NO: 1023812 - DNA, 33 bp, Homo sapien
gagtattttgtatgaatcattataggagcaagg

SEQ ID NO: 1023813 - DNA, 33 bp, Homo sapien
atggaggtaacttctacgagtattctcaaggcc

SEQ ID NO: 1023814 - DNA, 33 bp, Homo sapien
atggaggtaacttctatgagtattctcaaggcc

SEQ ID NO: 1023815 - DNA, 33 bp, Homo sapien
gagaaattcagtcacccaaaggagtcagctgtc

SEQ ID NO: 1023816 - DNA, 33 bp, Homo sapien
gagaaattcagtcacctaaaggagtcagctgtc

SEQ ID NO: 1023817 - DNA, 33 bp, Homo sapien
tgacagtttagccaaacgaggacactaaccctt

SEQ ID NO: 1023818 - DNA, 33 bp, Homo sapien
tgacagtttagccaaatgaggacactaaccctt

SEQ ID NO: 1023819 - DNA, 33 bp, Homo sapien
ttcacctggaagactcacccgtctcagcatata

SEQ ID NO: 1023820 - DNA, 33 bp, Homo sapien
ttcacctggaagactcgcccgtctcagcatata

SEQ ID NO: 1023821 - DNA, 33 bp, Homo sapien
cccccacctgtgtagaggtacatgggtctttca

SEQ ID NO: 1023822 - DNA, 33 bp, Homo sapien
cccccacctgtgtagatgtacatgggtctttca

SEQ ID NO: 1023823 - DNA, 33 bp, Homo sapien
cattaataatagcaacagacctatcaaccagaa

SEQ ID NO: 1023824 - DNA, 33 bp, Homo sapien
cattaataatagcaacggacctatcaaccagaa

SEQ ID NO: 1023825 - DNA, 33 bp, Homo sapien
gaagaaaaaaatggaccataattgctttgcact

SEQ ID NO: 1023826 - DNA, 33 bp, Homo sapien
gaagaaaaaaatggactataattgctttgcact

SEQ ID NO: 1023827 - DNA, 33 bp, Homo sapien
tgttattgtactgaacactgcgggcttttgtag

SEQ ID NO: 1023828 - DNA, 33 bp, Homo sapien
tgttattgtactgaacgctgcgggcttttgtag

SEQ ID NO: 1023829 - DNA, 33 bp, Homo sapien
gaagctgtgtcccgagaaaaacccttgacagag

SEQ ID NO: 1023830 - DNA, 33 bp, Homo sapien
gaagctgtgtcccgaggaaaacccttgacagag

SEQ ID NO: 1023831 - DNA, 33 bp, Homo sapien
gcagaaagaacgcatactataatgaaggagctc

SEQ ID NO: 1023832 - DNA, 33 bp, Homo sapien
gcagaaagaacgcatattataatgaaggagctc

SEQ ID NO: 1023833 - DNA, 33 bp, Homo sapien
acatcagctacaatacaagaactatgcaaagtg

SEQ ID NO: 1023834 - DNA, 33 bp, Homo sapien
acatcagctacaatacgagaactatgcaaagtg

SEQ ID NO: 1023835 - DNA, 33 bp, Homo sapien
ttcaaagctaacaacaagcatctgagcaatctg

SEQ ID NO: 1023836 - DNA, 33 bp, Homo sapien
ttcaaagctaacaacaggcatctgagcaatctg

SEQ ID NO: 1023837 - DNA, 33 bp, Homo sapien
tcaaatctttatcctacagggagtgctgacatt

SEQ ID NO: 1023838 - DNA, 33 bp, Homo sapien
tcaaatctttatcctatagggagtgctgacatt

SEQ ID NO: 1023839 - DNA, 33 bp, Homo sapien
aatatatacctttttacagagctagtgagaacc

SEQ ID NO: 1023840 - DNA, 33 bp, Homo sapien
aatatatacctttttagagagctagtgagaacc

SEQ ID NO: 1023841 - DNA, 33 bp, Homo sapien
gctaggacttaggaaaagaggtgatttgctttt

SEQ ID NO: 1023842 - DNA, 33 bp, Homo sapien
gctaggacttaggaaaggaggtgatttgctttt

SEQ ID NO: 1023843 - DNA, 33 bp, Homo sapien
ctggcttttagggatgacatcaatggacttctt

SEQ ID NO: 1023844 - DNA, 33 bp, Homo sapien
ctggcttttagggatggcatcaatggacttctt

SEQ ID NO: 1023845 - DNA, 33 bp, Homo sapien
aacatctggtgtgctgcaaagaatgctgaagag

SEQ ID NO: 1023846 - DNA, 33 bp, Homo sapien
aacatctggtgtgctggaaagaatgctgaagag

SEQ ID NO: 1023847 - DNA, 33 bp, Homo sapien
atgaatttggaaaagaaagatacctccatcaga

SEQ ID NO: 1023848 - DNA, 33 bp, Homo sapien
atgaatttggaaaagagagatacctccatcaga

SEQ ID NO: 1023849 - DNA, 33 bp, Homo sapien
gtgccccctgaagttacgcagtgtgatggacct

SEQ ID NO: 1023850 - DNA, 33 bp, Homo sapien
gtgccccctgaagttatgcagtgtgatggacct

SEQ ID NO: 1023851 - DNA, 33 bp, Homo sapien
gatagagctgtgatgacgaaaacgtgggaaagc

SEQ ID NO: 1023852 - DNA, 33 bp, Homo sapien
gatagagctgtgatgatgaaaacgtgggaaagc

SEQ ID NO: 1023853 - DNA, 33 bp, Homo sapien
ctcagtctaattttacacagcaggattgctcta

SEQ ID NO: 1023854 - DNA, 33 bp, Homo sapien
ctcagtctaattttacgcagcaggattgctcta

SEQ ID NO: 1023855 - DNA, 33 bp, Homo sapien
agagcccatgaccacaagtttttcattccgttc

SEQ ID NO: 1023856 - DNA, 33 bp, Homo sapien
agagcccatgaccacaggtttttcattccgttc

SEQ ID NO: 1023857 - DNA, 33 bp, Homo sapien
aaataggggtggttgacactgcagatgtaaaaa

SEQ ID NO: 1023858 - DNA, 33 bp, Homo sapien
aaataggggtggttgatactgcagatgtaaaaa

SEQ ID NO: 1023859 - DNA, 33 bp, Homo sapien
tttactgattattttcaagatgccatctagcaa

SEQ ID NO: 1023860 - DNA, 33 bp, Homo sapien
tttactgattattttcgagatgccatctagcaa

SEQ ID NO: 1023861 - DNA, 33 bp, Homo sapien
ataggtcaaggacaaaatataggtggatatagg

SEQ ID NO: 1023862 - DNA, 33 bp, Homo sapien
ataggtcaaggacaaattataggtggatatagg

SEQ ID NO: 1023863 - DNA, 33 bp, Homo sapien
ctcttttttgcctatcactgtctggaatttact

SEQ ID NO: 1023864 - DNA, 33 bp, Homo sapien
ctcttttttgcctatcgctgtctggaatttact

SEQ ID NO: 1023865 - DNA, 33 bp, Homo sapien
ctagatacaatttgaacatagaatcaatgggtc

SEQ ID NO: 1023866 - DNA, 33 bp, Homo sapien
ctagatacaatttgaatatagaatcaatgggtc

SEQ ID NO: 1023867 - DNA, 33 bp, Homo sapien
tgacatttggctactaaagaactcaaatttctc

SEQ ID NO: 1023868 - DNA, 33 bp, Homo sapien
tgacatttggctactagagaactcaaatttctc

SEQ ID NO: 1023869 - DNA, 33 bp, Homo sapien
tatactaaaggcacctaaaattatcatgaaaag

SEQ ID NO: 1023870 - DNA, 33 bp, Homo sapien
tatactaaaggcacctgaaattatcatgaaaag

SEQ ID NO: 1023871 - DNA, 33 bp, Homo sapien
tcttctaaatgtttcacctaaacaagaatgaaa

SEQ ID NO: 1023872 - DNA, 33 bp, Homo sapien
tcttctaaatgtttcagctaaacaagaatgaaa

SEQ ID NO: 1023873 - DNA, 33 bp, Homo sapien
ctctgttctctggagacattctgaagttccatc

SEQ ID NO: 1023874 - DNA, 33 bp, Homo sapien
ctctgttctctggagatattctgaagttccatc

SEQ ID NO: 1023875 - DNA, 33 bp, Homo sapien
aggtcataagtcaacaaaaaagactccacgtgg

SEQ ID NO: 1023876 - DNA, 33 bp, Homo sapien
aggtcataagtcaacagaaaagactccacgtgg

SEQ ID NO: 1023877 - DNA, 33 bp, Homo sapien
cagccatttcatagtaaactgccagaggattta

SEQ ID NO: 1023878 - DNA, 33 bp, Homo sapien
cagccatttcatagtacactgccagaggattta

SEQ ID NO: 1023879 - DNA, 33 bp, Homo sapien
acctgatggaagaatacacaaaagcaacacggg

SEQ ID NO: 1023880 - DNA, 33 bp, Homo sapien
acctgatggaagaatatacaaaagcaacacggg

SEQ ID NO: 1023881 - DNA, 33 bp, Homo sapien; identical to SEQ ID NO: 1023879

SEQ ID NO: 1023882 - DNA, 33 bp, Homo sapien; identical to SEQ ID NO: 1023880

SEQ ID NO: 1023883 - DNA, 33 bp, Homo sapien
agcctgggaccaaataatacatggactcactgt

SEQ ID NO: 1023884 - DNA, 33 bp, Homo sapien
agcctgggaccaaatagtacatggactcactgt

SEQ ID NO: 1023885 - DNA, 33 bp, Homo sapien
aactaatcttcatggaagtagagtcaatacgga

SEQ ID NO: 1023886 - DNA, 33 bp, Homo sapien
aactaatcttcatggacgtagagtcaatacgga

SEQ ID NO: 1023887 - DNA, 33 bp, Homo sapien
cttcttttccttgataacatgtcttgccaagtt

SEQ ID NO: 1023888 - DNA, 33 bp, Homo sapien
cttcttttccttgatagcatgtcttgccaagtt

SEQ ID NO: 1023889 - DNA, 33 bp, Homo sapien
agaaagaatgtgctccaggaagaataaagagag

SEQ ID NO: 1023890 - DNA, 33 bp, Homo sapien
agaaagaatgtgctccgggaagaataaagagag

SEQ ID NO: 1023891 - DNA, 33 bp, Homo sapien
ctctctaatcttcccaatacaaccctacccaag

SEQ ID NO: 1023892 - DNA, 33 bp, Homo sapien
ctctctaatcttcccagtacaaccctacccaag

SEQ ID NO: 1023893 - DNA, 33 bp, Homo sapien
tgggctggaataggccagagtcccaggctttag

SEQ ID NO: 1023894 - DNA, 33 bp, Homo sapien
tgggctggaataggccggagtcccaggctttag

SEQ ID NO: 1023895 - DNA, 33 bp, Homo sapien
ttaaagggacttcagaagggtatcatgggtgcc

SEQ ID NO: 1023896 - DNA, 33 bp, Homo sapien
ttaaagggacttcagaggggtatcatgggtgcc

SEQ ID NO: 1023897 - DNA, 33 bp, Homo sapien
aagaccctccataatccgacttttattgaactt

SEQ ID NO: 1023898 - DNA, 33 bp, Homo sapien
aagaccctccataatctgacttttattgaactt

SEQ ID NO: 1023899 - DNA, 33 bp, Homo sapien
tctgacactgagggcaatgagaaatcttggctt

SEQ ID NO: 1023900 - DNA, 33 bp, Homo sapien
tctgacactgagggcagtgagaaatcttggctt

SEQ ID NO: 1023901 - DNA, 33 bp, Homo sapien
ccaggaggcttaacagaacacagctgagatttc

SEQ ID NO: 1023902 - DNA, 33 bp, Homo sapien
ccaggaggcttaacagcacacagctgagatttc

SEQ ID NO: 1023903 - DNA, 33 bp, Homo sapien
cctgacacctgccgggcactggaaaactgcagg

SEQ ID NO: 1023904 - DNA, 33 bp, Homo sapien
cctgacacctgccgggtactggaaaactgcagg

SEQ ID NO: 1023905 - DNA, 33 bp, Homo sapien
ctaaataggaaatcaaaagcctaaacactgtcc

SEQ ID NO: 1023906 - DNA, 33 bp, Homo sapien
ctaaataggaaatcaatagcctaaacactgtcc

SEQ ID NO: 1023907 - DNA, 33 bp, Homo sapien
gttatgcctgagttcaacagaccagggaagtgc

SEQ ID NO: 1023908 - DNA, 33 bp, Homo sapien
gttatgcctgagttcagcagaccagggaagtgc

SEQ ID NO: 1023909 - DNA, 33 bp, Homo sapien
cagtaaatgcagccaacgttctgttcttaccca

SEQ ID NO: 1023910 - DNA, 33 bp, Homo sapien
cagtaaatgcagccaatgttctgttcttaccca

SEQ ID NO: 1023911 - DNA, 33 bp, Homo sapien
ttttgttttggagatacggtctcggtctgttgc

SEQ ID NO: 1023912 - DNA, 33 bp, Homo sapien
ttttgttttggagatatggtctcggtctgttgc

SEQ ID NO: 1023913 - DNA, 33 bp, Homo sapien
accagaaagtaactcacccaagattaaccacac

SEQ ID NO: 1023914 - DNA, 33 bp, Homo sapien
accagaaagtaactcatccaagattaaccacac

SEQ ID NO: 1023915 - DNA, 33 bp, Homo sapien
aattagctgagcatgaaaagaggaaacgtacag

SEQ ID NO: 1023916 - DNA, 33 bp, Homo sapien
aattagctgagcatgagaagaggaaacgtacag

SEQ ID NO: 1023917 - DNA, 33 bp, Homo sapien
taatcaggtatactaaccatgtggaattaagga

SEQ ID NO: 1023918 - DNA, 33 bp, Homo sapien
taatcaggtatactaatcatgtggaattaagga

SEQ ID NO: 1023919 - DNA, 33 bp, Homo sapien
tcatctttggctgtccaaggaggtttatgcatg

SEQ ID NO: 1023920 - DNA, 33 bp, Homo sapien
tcatctttggctgtccgaggaggtttatgcatg

SEQ ID NO: 1023921 - DNA, 33 bp, Homo sapien
agaagtcgatagagcacagaaaaattgtgaagc

SEQ ID NO: 1023922 - DNA, 33 bp, Homo sapien
agaagtcgatagagcagagaaaaattgtgaagc

SEQ ID NO: 1023923 - DNA, 33 bp, Homo sapien
ctgcacccctttcagcagagtttcaaaggaggt

SEQ ID NO: 1023924 - DNA, 33 bp, Homo sapien
ctgcacccctttcagcggagtttcaaaggaggt

SEQ ID NO: 1023925 - DNA, 33 bp, Homo sapien
gctcccgtcatccctgaattttctctctctgtg

SEQ ID NO: 1023926 - DNA, 33 bp, Homo sapien
gctcccgtcatccctggattttctctctctgtg

SEQ ID NO: 1023927 - DNA, 33 bp, Homo sapien
aatcctgtgttatgcaacatgctatgaaccagg

SEQ ID NO: 1023928 - DNA, 33 bp, Homo sapien
aatcctgtgttatgcaccatgctatgaaccagg

SEQ ID NO: 1023929 - DNA, 33 bp, Homo sapien
aaaatgtccctgcagaaaccgagtcagtgggtt

SEQ ID NO: 1023930 - DNA, 33 bp, Homo sapien
aaaatgtccctgcagacaccgagtcagtgggtt

SEQ ID NO: 1023931 - DNA, 33 bp, Homo sapien
aggcaaacatcaccacaaggctgggaacagcag

SEQ ID NO: 1023932 - DNA, 33 bp, Homo sapien
aggcaaacatcaccacgaggctgggaacagcag

SEQ ID NO: 1023933 - DNA, 33 bp, Homo sapien
cagatgcagattatcccgagcccaggggaccta

SEQ ID NO: 1023934 - DNA, 33 bp, Homo sapien
cagatgcagattatcctgagcccaggggaccta

SEQ ID NO: 1023935 - DNA, 33 bp, Homo sapien
atcttttctacccacagccttagcacagtgcct

SEQ ID NO: 1023936 - DNA, 33 bp, Homo sapien
atcttttctacccacatccttagcacagtgcct

SEQ ID NO: 1023937 - DNA, 33 bp, Homo sapien
caactgcatatttccaccattacatcttacatt

SEQ ID NO: 1023938 - DNA, 33 bp, Homo sapien
caactgcatatttccatcattacatcttacatt

SEQ ID NO: 1023939 - DNA, 33 bp, Homo sapien
aaagagtctgttgtaaactcttggccaaagcca

SEQ ID NO: 1023940 - DNA, 33 bp, Homo sapien
aaagagtctgttgtaatctcttggccaaagcca

SEQ ID NO: 1023941 - DNA, 33 bp, Homo sapien
tcctgttgtttatggaaccctttgcataattcc

SEQ ID NO: 1023942 - DNA, 33 bp, Homo sapien
tcctgttgtttatggacccctttgcataattcc

SEQ ID NO: 1023943 - DNA, 33 bp, Homo sapien
tttctgatgactgagacgtgtgaagctctgtgc

SEQ ID NO: 1023944 - DNA, 33 bp, Homo sapien
tttctgatgactgagatgtgtgaagctctgtgc

SEQ ID NO: 1023945 - DNA, 33 bp, Homo sapien
caagcagagttgaaccccttaaatgatgcctct

SEQ ID NO: 1023946 - DNA, 33 bp, Homo sapien
caagcagagttgaacctcttaaatgatgcctct

SEQ ID NO: 1023947 - DNA, 33 bp, Homo sapien
aacaaacaaatcatcacgggcttcaaggagagc

SEQ ID NO: 1023948 - DNA, 33 bp, Homo sapien
aacaaacaaatcatcatgggcttcaaggagagc

SEQ ID NO: 1023949 - DNA, 33 bp, Homo sapien
aagtcagggagaaaaaaaggttgtcaccaacaa

SEQ ID NO: 1023950 - DNA, 33 bp, Homo sapien
aagtcagggagaaaaacaggttgtcaccaacaa

SEQ ID NO: 1023951 - DNA, 33 bp, Homo sapien
gacttggatgaaaaaacagtccaaagaataaga

SEQ ID NO: 1023952 - DNA, 33 bp, Homo sapien
gacttggatgaaaaaagagtccaaagaataaga

SEQ ID NO: 1023953 - DNA, 33 bp, Homo sapien
tccctgatccattgaacctaaaagtctgagact

SEQ ID NO: 1023954 - DNA, 33 bp, Homo sapien
tccctgatccattgaatctaaaagtctgagact

SEQ ID NO: 1023955 - DNA, 33 bp, Homo sapien
gttacctgccagacaccgcatctgacccattct

SEQ ID NO: 1023956 - DNA, 33 bp, Homo sapien
gttacctgccagacactgcatctgacccattct

SEQ ID NO: 1023957 - DNA, 33 bp, Homo sapien
ttataacactgggaaagaatctaacataggctg

SEQ ID NO: 1023958 - DNA, 33 bp, Homo sapien
ttataacactgggaaataatctaacataggctg

SEQ ID NO: 1023959 - DNA, 33 bp, Homo sapien
agactctaaattctctaaagtcagtgatgttta

SEQ ID NO: 1023960 - DNA, 33 bp, Homo sapien
agactctaaattctctgaagtcagtgatgttta

SEQ ID NO: 1023961 - DNA, 33 bp, Homo sapien
caaagaatagcaaacccgagtgatttttctggt

SEQ ID NO: 1023962 - DNA, 33 bp, Homo sapien
caaagaatagcaaacctgagtgatttttctggt

SEQ ID NO: 1023963 - DNA, 33 bp, Homo sapien
actgtcttttcaagcaagttcaaacaagcctga

SEQ ID NO: 1023964 - DNA, 33 bp, Homo sapien
actgtcttttcaagcaggttcaaacaagcctga

SEQ ID NO: 1023965 - DNA, 33 bp, Homo sapien
gtcatgttagaaggtcacctacactgccaaaaa

SEQ ID NO: 1023966 - DNA, 33 bp, Homo sapien
gtcatgttagaaggtcgcctacactgccaaaaa

SEQ ID NO: 1023967 - DNA, 33 bp, Homo sapien
tggactttggctccagcagcaacaatgactact

SEQ ID NO: 1023968 - DNA, 33 bp, Homo sapien
tggactttggctccagtagcaacaatgactact

SEQ ID NO: 1023969 - DNA, 33 bp, Homo sapien
atcatccaccaagcagacatctttcctgagaag

SEQ ID NO: 1023970 - DNA, 33 bp, Homo sapien
atcatccaccaagcaggcatctttcctgagaag

SEQ ID NO: 1023971 - DNA, 33 bp, Homo sapien
atgatatatttcaaatcatgtggcaatatgaac

SEQ ID NO: 1023972 - DNA, 33 bp, Homo sapien
atgatatatttcaaatgatgtggcaatatgaac

SEQ ID NO: 1023973 - DNA, 33 bp, Homo sapien
acaaaatcaacatctaagctttagttctgactt

SEQ ID NO: 1023974 - DNA, 33 bp, Homo sapien
acaaaatcaacatctaggctttagttctgactt

SEQ ID NO: 1023975 - DNA, 33 bp, Homo sapien
atgagtctttcccacaatgcctaaaaagattct

SEQ ID NO: 1023976 - DNA, 33 bp, Homo sapien
atgagtctttcccacagtgcctaaaaagattct

SEQ ID NO: 1023977 - DNA, 33 bp, Homo sapien
cctgatcctctgtaaacccttaatgaatgtaat

SEQ ID NO: 1023978 - DNA, 33 bp, Homo sapien
cctgatcctctgtaaagccttaatgaatgtaat

SEQ ID NO: 1023979 - DNA, 33 bp, Homo sapien
aaaacagcgtggtacacgtataaaaataggcac

SEQ ID NO: 1023980 - DNA, 33 bp, Homo sapien
aaaacagcgtggtacatgtataaaaataggcac

SEQ ID NO: 1023981 - DNA, 33 bp, Homo sapien
aaggggaaaaacacaacggcagctgtggaaaca

SEQ ID NO: 1023982 - DNA, 33 bp, Homo sapien
aaggggaaaaacacaatggcagctgtggaaaca

SEQ ID NO: 1023983 - DNA, 33 bp, Homo sapien
agtaaagctaaaagaaatgcaattctcatactc

SEQ ID NO: 1023984 - DNA, 33 bp, Homo sapien
agtaaagctaaaagaactgcaattctcatactc

SEQ ID NO: 1023985 - DNA, 33 bp, Homo sapien
gccaatttggctataacaaaatagatttccttg

SEQ ID NO: 1023986 - DNA, 33 bp, Homo sapien
gccaatttggctataataaaatagatttccttg

SEQ ID NO: 1023987 - DNA, 33 bp, Homo sapien
tcactgtgaaaatcgacgagaactctccttgtg

SEQ ID NO: 1023988 - DNA, 33 bp, Homo sapien
tcactgtgaaaatcgatgagaactctccttgtg

SEQ ID NO: 1023989 - DNA, 33 bp, Homo sapien
agaacctggtaggtaaaactcatttaagcatgg

SEQ ID NO: 1023990 - DNA, 33 bp, Homo sapien
agaacctggtaggtaatactcatttaagcatgg

SEQ ID NO: 1023991 - DNA, 33 bp, Homo sapien
aaacacctaaacttcaaattcttcctactgtgc

SEQ ID NO: 1023992 - DNA, 33 bp, Homo sapien
aaacacctaaacttcagattcttcctactgtgc

SEQ ID NO: 1023993 - DNA, 33 bp, Homo sapien
caatgttacagggagacacaatcaatgccagca

SEQ ID NO: 1023994 - DNA, 33 bp, Homo sapien
caatgttacagggagatacaatcaatgccagca

SEQ ID NO: 1023995 - DNA, 33 bp, Homo sapien
agttctgacgactacacagtttgaggcaaggag

SEQ ID NO: 1023996 - DNA, 33 bp, Homo sapien
agttctgacgactacatagtttgaggcaaggag

SEQ ID NO: 1023997 - DNA, 33 bp, Homo sapien
cctattgaaactgtcactctcagattacagcca

SEQ ID NO: 1023998 - DNA, 33 bp, Homo sapien
cctattgaaactgtcattctcagattacagcca

SEQ ID NO: 1023999 - DNA, 33 bp, Homo sapien
catgccccaagtgccacatataccattcgaaga

SEQ ID NO: 1024000 - DNA, 33 bp, Homo sapien
catgccccaagtgccatatataccattcgaaga

SEQ ID NO: 1024001 - DNA, 33 bp, Homo sapien; identical to SEQ ID NO: 1023999

SEQ ID NO: 1024002 - DNA, 33 bp, Homo sapien; identical to SEQ ID NO: 1024000

SEQ ID NO: 1024003 - DNA, 33 bp, Homo sapien
ccttgtgctaacgttacgccatctgtcccaatc

SEQ ID NO: 1024004 - DNA, 33 bp, Homo sapien
ccttgtgctaacgttatgccatctgtcccaatc

SEQ ID NO: 1024005 - DNA, 33 bp, Homo sapien
ttaatacagagatacacagtccttaccatagcc

SEQ ID NO: 1024006 - DNA, 33 bp, Homo sapien
ttaatacagagatacagagtccttaccatagcc

SEQ ID NO: 1024007 - DNA, 33 bp, Homo sapien
cgatatccatgcagacaatatggtttaatacca

SEQ ID NO: 1024008 - DNA, 33 bp, Homo sapien
cgatatccatgcagaccatatggtttaatacca

SEQ ID NO: 1024009 - DNA, 33 bp, Homo sapien
tccttccctctgggcacattttaggattgggcg

SEQ ID NO: 1024010 - DNA, 33 bp, Homo sapien
tccttccctctgggcatattttaggattgggcg

SEQ ID NO: 1024011 - DNA, 33 bp, Homo sapien
gagggaaggagaaataagatgtttgtgggcaat

SEQ ID NO: 1024012 - DNA, 33 bp, Homo sapien
gagggaaggagaaataggatgtttgtgggcaat

SEQ ID NO: 1024013 - DNA, 33 bp, Homo sapien
ggaaagatggctccacaagtgacaaggagatgg

SEQ ID NO: 1024014 - DNA, 33 bp, Homo sapien
ggaaagatggctccacgagtgacaaggagatgg

SEQ ID NO: 1024015 - DNA, 33 bp, Homo sapien
ctagaattagtttgcaagtctggagtgatactc

SEQ ID NO: 1024016 - DNA, 33 bp, Homo sapien
ctagaattagtttgcaggtctggagtgatactc

SEQ ID NO: 1024017 - DNA, 33 bp, Homo sapien
taatgaactgtttccacctaagttattaaacgg

SEQ ID NO: 1024018 - DNA, 33 bp, Homo sapien
taatgaactgtttccatctaagttattaaacgg

SEQ ID NO: 1024019 - DNA, 33 bp, Homo sapien
ttgtcagttacagtaccagagctcattctatta

SEQ ID NO: 1024020 - DNA, 33 bp, Homo sapien
ttgtcagttacagtactagagctcattctatta

SEQ ID NO: 1024021 - DNA, 33 bp, Homo sapien
cagcagtgagaatttacggacttctcaggtctt

SEQ ID NO: 1024022 - DNA, 33 bp, Homo sapien
cagcagtgagaatttagggacttctcaggtctt

SEQ ID NO: 1024023 - DNA, 33 bp, Homo sapien
gcatcagtagggtgaacgggcccaatctcagac

SEQ ID NO: 1024024 - DNA, 33 bp, Homo sapien
gcatcagtagggtgaatgggcccaatctcagac

SEQ ID NO: 1024025 - DNA, 33 bp, Homo sapien
ttggttcagggtcttaccttacccaatactact

SEQ ID NO: 1024026 - DNA, 33 bp, Homo sapien
ttggttcagggtcttatcttacccaatactact

SEQ ID NO: 1024027 - DNA, 33 bp, Homo sapien
gctatttcttccgtgacctttccctatacccat

SEQ ID NO: 1024028 - DNA, 33 bp, Homo sapien
gctatttcttccgtgatctttccctatacccat

SEQ ID NO: 1024029 - DNA, 33 bp, Homo sapien
acagaatcagaagatgaaacttaagtccaagtt

SEQ ID NO: 1024030 - DNA, 33 bp, Homo sapien
acagaatcagaagatgcaacttaagtccaagtt

SEQ ID NO: 1024031 - DNA, 33 bp, Homo sapien
acttacacgtagtaagaattcattgattgttat

SEQ ID NO: 1024032 - DNA, 33 bp, Homo sapien
acttacacgtagtaagtattcattgattgttat

SEQ ID NO: 1024033 - DNA, 33 bp, Homo sapien
tgccctttcacatagaagccaagatgtctccct

SEQ ID NO: 1024034 - DNA, 33 bp, Homo sapien
tgccctttcacatagaggccaagatgtctccct

SEQ ID NO: 1024035 - DNA, 33 bp, Homo sapien
aaatgcttacttttgacagtggcgattatgtgt

SEQ ID NO: 1024036 - DNA, 33 bp, Homo sapien
aaatgcttacttttgatagtggcgattatgtgt

SEQ ID NO: 1024037 - DNA, 33 bp, Homo sapien
gtttgaaaaatgtctcaatctctatgttagtag

SEQ ID NO: 1024038 - DNA, 33 bp, Homo sapien
gtttgaaaaatgtctccatctctatgttagtag

SEQ ID NO: 1024039 - DNA, 33 bp, Homo sapien
gaattccaccttagcactcaggtttcaggttga

SEQ ID NO: 1024040 - DNA, 33 bp, Homo sapien
gaattccaccttagcagtcaggtttcaggttga

SEQ ID NO: 1024041 - DNA, 33 bp, Homo sapien
atcctcaatgtacaggaaaggaagagattggca

SEQ ID NO: 1024042 - DNA, 33 bp, Homo sapien
atcctcaatgtacagggaaggaagagattggca

SEQ ID NO: 1024043 - DNA, 33 bp, Homo sapien
ttctatcgctaacacaacatattattttaaatt

SEQ ID NO: 1024044 - DNA, 33 bp, Homo sapien
ttctatcgctaacacatcatattattttaaatt

SEQ ID NO: 1024045 - DNA, 33 bp, Homo sapien
aaagacgcacttgtcacctctagtatatcaaca

SEQ ID NO: 1024046 - DNA, 33 bp, Homo sapien
aaagacgcacttgtcagctctagtatatcaaca

SEQ ID NO: 1024047 - DNA, 33 bp, Homo sapien
tggtatctctcattcacgtgtctgcgtatctac

SEQ ID NO: 1024048 - DNA, 33 bp, Homo sapien
tggtatctctcattcatgtgtctgcgtatctac

SEQ ID NO: 1024049 - DNA, 33 bp, Homo sapien
ctcacgagtgactgagactagtaaacggaaagt

SEQ ID NO: 1024050 - DNA, 33 bp, Homo sapien
ctcacgagtgactgaggctagtaaacggaaagt

SEQ ID NO: 1024051 - DNA, 33 bp, Homo sapien
tttgtggcccaacttcccacttcactactgtac

SEQ ID NO: 1024052 - DNA, 33 bp, Homo sapien
tttgtggcccaacttcgcacttcactactgtac

SEQ ID NO: 1024053 - DNA, 33 bp, Homo sapien
ggtgtgtatgtagagacggtgggagatgaagct

SEQ ID NO: 1024054 - DNA, 33 bp, Homo sapien
ggtgtgtatgtagagatggtgggagatgaagct

SEQ ID NO: 1024055 - DNA, 33 bp, Homo sapien
gatgtttttcatcttacagtggacaactgactc

SEQ ID NO: 1024056 - DNA, 33 bp, Homo sapien
gatgtttttcatcttatagtggacaactgactc

SEQ ID NO: 1024057 - DNA, 33 bp, Homo sapien
cttaagataagaactacggcaagtcctttaact

SEQ ID NO: 1024058 - DNA, 33 bp, Homo sapien
cttaagataagaactagggcaagtcctttaact

SEQ ID NO: 1024059 - DNA, 33 bp, Homo sapien
tttgtaattgttcacaatgctggcagagttgtc

SEQ ID NO: 1024060 - DNA, 33 bp, Homo sapien
tttgtaattgttcacattgctggcagagttgtc

SEQ ID NO: 1024061 - DNA, 33 bp, Homo sapien
tggcagagttgtcctgaattatatgataagaga

SEQ ID NO: 1024062 - DNA, 33 bp, Homo sapien
tggcagagttgtcctgtattatatgataagaga

SEQ ID NO: 1024063 - DNA, 33 bp, Homo sapien
tcatcctcaatgtcccaacacaagaaccttgca

SEQ ID NO: 1024064 - DNA, 33 bp, Homo sapien
tcatcctcaatgtcccgacacaagaaccttgca

SEQ ID NO: 1024065 - DNA, 33 bp, Homo sapien
aatcaaaatgtttcacagccacttagtgttagt

SEQ ID NO: 1024066 - DNA, 33 bp, Homo sapien
aatcaaaatgtttcacggccacttagtgttagt

SEQ ID NO: 1024067 - DNA, 33 bp, Homo sapien
ccataggttatatcccaaaatttagctggacac

SEQ ID NO: 1024068 - DNA, 33 bp, Homo sapien
ccataggttatatccccaaatttagctggacac

SEQ ID NO: 1024069 - DNA, 33 bp, Homo sapien
tagtagcttaaattgtaaaaactggacaacaaa

SEQ ID NO: 1024070 - DNA, 33 bp, Homo sapien
tagtagcttaaattgttaaaactggacaacaaa

SEQ ID NO: 1024071 - DNA, 33 bp, Homo sapien
ctactttgttaacttccgaagctcatgcatact

SEQ ID NO: 1024072 - DNA, 33 bp, Homo sapien
ctactttgttaacttctgaagctcatgcatact

SEQ ID NO: 1024073 - DNA, 33 bp, Homo sapien
gatttttagcaaaaacgctgtcagcttttaatg

SEQ ID NO: 1024074 - DNA, 33 bp, Homo sapien
gatttttagcaaaaactctgtcagcttttaatg

SEQ ID NO: 1024075 - DNA, 33 bp, Homo sapien
attgcactttgccacaacgtaaaagaaggcaag

SEQ ID NO: 1024076 - DNA, 33 bp, Homo sapien
attgcactttgccacagcgtaaaagaaggcaag

SEQ ID NO: 1024077 - DNA, 33 bp, Homo sapien
tgataataaccataacatctacgaacaggtgaa

SEQ ID NO: 1024078 - DNA, 33 bp, Homo sapien
tgataataaccataacgtctacgaacaggtgaa

SEQ ID NO: 1024079 - DNA, 33 bp, Homo sapien
gaatgtcttcatgatccaaaggtaaggaaagat

SEQ ID NO: 1024080 - DNA, 33 bp, Homo sapien
gaatgtcttcatgatctaaaggtaaggaaagat

SEQ ID NO: 1024081 - DNA, 33 bp, Homo sapien
aaattagtttacagggccaatatctctaatgta

SEQ ID NO: 1024082 - DNA, 33 bp, Homo sapien
aaattagtttacagggtcaatatctctaatgta

SEQ ID NO: 1024083 - DNA, 33 bp, Homo sapien
ccacattttccttttcaattggtcattatgtct

SEQ ID NO: 1024084 - DNA, 33 bp, Homo sapien
ccacattttccttttccattggtcattatgtct

SEQ ID NO: 1024085 - DNA, 33 bp, Homo sapien
taaaggcaagtagaaacggagtgatcaggaact

SEQ ID NO: 1024086 - DNA, 33 bp, Homo sapien
taaaggcaagtagaaatggagtgatcaggaact

SEQ ID NO: 1024087 - DNA, 33 bp, Homo sapien
ttttactcaaagaaaagtccgaatactctaaga

SEQ ID NO: 1024088 - DNA, 33 bp, Homo sapien
ttttactcaaagaaaattccgaatactctaaga

SEQ ID NO: 1024089 - DNA, 33 bp, Homo sapien
tgaaggaactgaaaggacattgtcatttaaccg

SEQ ID NO: 1024090 - DNA, 33 bp, Homo sapien
tgaaggaactgaaagggcattgtcatttaaccg

SEQ ID NO: 1024091 - DNA, 33 bp, Homo sapien
aacaaaattgctcaaacaattgctcttctgaat

SEQ ID NO: 1024092 - DNA, 33 bp, Homo sapien
aacaaaattgctcaaataattgctcttctgaat

SEQ ID NO: 1024093 - DNA, 33 bp, Homo sapien
tttttaagcaaacactcacttgacacttttttt

SEQ ID NO: 1024094 - DNA, 33 bp, Homo sapien
tttttaagcaaacactgacttgacacttttttt

SEQ ID NO: 1024095 - DNA, 33 bp, Homo sapien
tgatgtttccattgaagaaaaaaatactgttca

SEQ ID NO: 1024096 - DNA, 33 bp, Homo sapien
tgatgtttccattgaataaaaaaatactgttca

SEQ ID NO: 1024097 - DNA, 33 bp, Homo sapien
caggacagatgaactcaaaatctacagagcatt

SEQ ID NO: 1024098 - DNA, 33 bp, Homo sapien
caggacagatgaactccaaatctacagagcatt

SEQ ID NO: 1024099 - DNA, 33 bp, Homo sapien
agtgagatttgaactaaatgtaatgattgatga

SEQ ID NO: 1024100 - DNA, 33 bp, Homo sapien
agtgagatttgaactacatgtaatgattgatga

SEQ ID NO: 1024101 - DNA, 33 bp, Homo sapien
gaagggaggaagcaacagaagttcctaagacaa

SEQ ID NO: 1024102 - DNA, 33 bp, Homo sapien
gaagggaggaagcaacggaagttcctaagacaa

SEQ ID NO: 1024103 - DNA, 33 bp, Homo sapien
ttcctaagacaatgcacaggccaggaaatacct

SEQ ID NO: 1024104 - DNA, 33 bp, Homo sapien
ttcctaagacaatgcataggccaggaaatacct

SEQ ID NO: 1024105 - DNA, 33 bp, Homo sapien
tttgccacatctttgggaatcctccattgttcc

SEQ ID NO: 1024106 - DNA, 33 bp, Homo sapien
tttgccacatctttggtaatcctccattgttcc

SEQ ID NO: 1024107 - DNA, 33 bp, Homo sapien
attgcttagaaggaaaagccaaaaataagcaag

SEQ ID NO: 1024108 - DNA, 33 bp, Homo sapien
attgcttagaaggaaatgccaaaaataagcaag

SEQ ID NO: 1024109 - DNA, 33 bp, Homo sapien
gaatatgagttacctactaaagggtcaacttca

SEQ ID NO: 1024110 - DNA, 33 bp, Homo sapien
gaatatgagttacctattaaagggtcaacttca

SEQ ID NO: 1024111 - DNA, 33 bp, Homo sapien
gcttcatttagctagagctgctcatgtgttttt

SEQ ID NO: 1024112 - DNA, 33 bp, Homo sapien
gcttcatttagctagatctgctcatgtgttttt

SEQ ID NO: 1024113 - DNA, 33 bp, Homo sapien
atatcaactaaagagacgattctggagattatt

SEQ ID NO: 1024114 - DNA, 33 bp, Homo sapien
atatcaactaaagagatgattctggagattatt

SEQ ID NO: 1024115 - DNA, 33 bp, Homo sapien
agattggcctactctgaatatgtcctataaatg

SEQ ID NO: 1024116 - DNA, 33 bp, Homo sapien
agattggcctactctggatatgtcctataaatg

SEQ ID NO: 1024117 - DNA, 33 bp, Homo sapien
tctaagtggtcagattaaataacagaagtaaag

SEQ ID NO: 1024118 - DNA, 33 bp, Homo sapien
tctaagtggtcagattgaataacagaagtaaag

SEQ ID NO: 1024119 - DNA, 33 bp, Homo sapien
tgtgccactcttttcacatccaagagattcaca

SEQ ID NO: 1024120 - DNA, 33 bp, Homo sapien
tgtgccactcttttcatatccaagagattcaca

SEQ ID NO: 1024121 - DNA, 33 bp, Homo sapien
aaaaagcctgttattcacaacattatctctgag

SEQ ID NO: 1024122 - DNA, 33 bp, Homo sapien
aaaaagcctgttattcgcaacattatctctgag

SEQ ID NO: 1024123 - DNA, 33 bp, Homo sapien
ttctcacagcagttgacagttataaatatttga

SEQ ID NO: 1024124 - DNA, 33 bp, Homo sapien
ttctcacagcagttgagagttataaatatttga

SEQ ID NO: 1024125 - DNA, 33 bp, Homo sapien
tttctaaaagatgcaaagctagttagtggcaaa

SEQ ID NO: 1024126 - DNA, 33 bp, Homo sapien
tttctaaaagatgcaaggctagttagtggcaaa

SEQ ID NO: 1024127 - DNA, 33 bp, Homo sapien
cttctgataactcacaactgaatcaccttctaa

SEQ ID NO: 1024128 - DNA, 33 bp, Homo sapien
cttctgataactcacagctgaatcaccttctaa

SEQ ID NO: 1024129 - DNA, 33 bp, Homo sapien
ttgaattaatacataacccagttcaatctgagt

SEQ ID NO: 1024130 - DNA, 33 bp, Homo sapien
ttgaattaatacataatccagttcaatctgagt

SEQ ID NO: 1024131 - DNA, 33 bp, Homo sapien
attggaattattttcagacctaaataggcctcc

SEQ ID NO: 1024132 - DNA, 33 bp, Homo sapien
attggaattattttcatacctaaataggcctcc

SEQ ID NO: 1024133 - DNA, 33 bp, Homo sapien
atcacgcatcatcttaacttactgaattggaaa

SEQ ID NO: 1024134 - DNA, 33 bp, Homo sapien
atcacgcatcatcttagcttactgaattggaaa

SEQ ID NO: 1024135 - DNA, 33 bp, Homo sapien
aactgactttgagtcaaggaggtaggagcgtgt

SEQ ID NO: 1024136 - DNA, 33 bp, Homo sapien
aactgactttgagtcagggaggtaggagcgtgt

SEQ ID NO: 1024137 - DNA, 33 bp, Homo sapien
tcactttgagttagtacgcctctccgaggtttc

SEQ ID NO: 1024138 - DNA, 33 bp, Homo sapien
tcactttgagttagtatgcctctccgaggtttc

SEQ ID NO: 1024139 - DNA, 33 bp, Homo sapien
cggctggggataacccaaacagatggcatcttt

SEQ ID NO: 1024140 - DNA, 33 bp, Homo sapien
cggctggggataacccgaacagatggcatcttt

SEQ ID NO: 1024141 - DNA, 33 bp, Homo sapien
gtgtatcctctacatcgaacacactctatagtg

SEQ ID NO: 1024142 - DNA, 33 bp, Homo sapien
gtgtatcctctacatctaacacactctatagtg

SEQ ID NO: 1024143 - DNA, 33 bp, Homo sapien
agtacaatgttgaaaacagcagatgcccatctc

SEQ ID NO: 1024144 - DNA, 33 bp, Homo sapien
agtacaatgttgaaaatagcagatgcccatctc

SEQ ID NO: 1024145 - DNA, 33 bp, Homo sapien
ctgctatatgatctcacagaagtaacctaatct

SEQ ID NO: 1024146 - DNA, 33 bp, Homo sapien
ctgctatatgatctcagagaagtaacctaatct

SEQ ID NO: 1024147 - DNA, 33 bp, Homo sapien
ttatcataagtgtgaactaactcaagccttgca

SEQ ID NO: 1024148 - DNA, 33 bp, Homo sapien
ttatcataagtgtgaattaactcaagccttgca

SEQ ID NO: 1024149 - DNA, 33 bp, Homo sapien
tgaataccagaagaacggtgaagggatgccatg

SEQ ID NO: 1024150 - DNA, 33 bp, Homo sapien
tgaataccagaagaactgtgaagggatgccatg

SEQ ID NO: 1024151 - DNA, 33 bp, Homo sapien
accaacactgcaaggaaattgtttgtaaatgtc

SEQ ID NO: 1024152 - DNA, 33 bp, Homo sapien
accaacactgcaaggagattgtttgtaaatgtc

SEQ ID NO: 1024153 - DNA, 33 bp, Homo sapien
ccatcctatgatttaacaaacttctactgtaaa

SEQ ID NO: 1024154 - DNA, 33 bp, Homo sapien
ccatcctatgatttaataaacttctactgtaaa

SEQ ID NO: 1024155 - DNA, 33 bp, Homo sapien
gtaagctacctcccaccggaacatacctgtgag

SEQ ID NO: 1024156 - DNA, 33 bp, Homo sapien
gtaagctacctcccactggaacatacctgtgag

SEQ ID NO: 1024157 - DNA, 33 bp, Homo sapien
ttctgttttgtctgtaacccttttatctcctat

SEQ ID NO: 1024158 - DNA, 33 bp, Homo sapien
ttctgttttgtctgtatcccttttatctcctat

SEQ ID NO: 1024159 - DNA, 33 bp, Homo sapien
ggtaaatagatccaatcatctcaaagatgtgca

SEQ ID NO: 1024160 - DNA, 33 bp, Homo sapien
ggtaaatagatccaattatctcaaagatgtgca

SEQ ID NO: 1024161 - DNA, 33 bp, Homo sapien
ttatatcatctagcaagtctattcctagatgtt

SEQ ID NO: 1024162 - DNA, 33 bp, Homo sapien
ttatatcatctagcaattctattcctagatgtt

SEQ ID NO: 1024163 - DNA, 33 bp, Homo sapien
tcgcttcaaatgagaagttataggctgggtgtg

SEQ ID NO: 1024164 - DNA, 33 bp, Homo sapien
tcgcttcaaatgagaatttataggctgggtgtg

SEQ ID NO: 1024165 - DNA, 33 bp, Homo sapien
tcaaatactgccattaccaagcatgtatcttca

SEQ ID NO: 1024166 - DNA, 33 bp, Homo sapien
tcaaatactgccattatcaagcatgtatcttca

SEQ ID NO: 1024167 - DNA, 33 bp, Homo sapien
tcaatcagcccaggaaataagtattggtccgat

SEQ ID NO: 1024168 - DNA, 33 bp, Homo sapien
tcaatcagcccaggaagtaagtattggtccgat

SEQ ID NO: 1024169 - DNA, 33 bp, Homo sapien
gccctttttgcagatacataaagatgtagtgta

SEQ ID NO: 1024170 - DNA, 33 bp, Homo sapien
gccctttttgcagatatataaagatgtagtgta

SEQ ID NO: 1024171 - DNA, 33 bp, Homo sapien
gagatgacataaagcacaggccctttttgcaga

SEQ ID NO: 1024172 - DNA, 33 bp, Homo sapien
gagatgacataaagcataggccctttttgcaga

SEQ ID NO: 1024173 - DNA, 33 bp, Homo sapien
tctgtgaacaaggagaacgaaaaatatactccc

SEQ ID NO: 1024174 - DNA, 33 bp, Homo sapien
tctgtgaacaaggagatcgaaaaatatactccc

SEQ ID NO: 1024175 - DNA, 33 bp, Homo sapien
tttaagatttaatgtacgccctgccaggttttg

SEQ ID NO: 1024176 - DNA, 33 bp, Homo sapien
tttaagatttaatgtatgccctgccaggttttg

SEQ ID NO: 1024177 - DNA, 33 bp, Homo sapien
cagaggatttggactcaagttctattgtcatat

SEQ ID NO: 1024178 - DNA, 33 bp, Homo sapien
cagaggatttggactcgagttctattgtcatat

SEQ ID NO: 1024179 - DNA, 33 bp, Homo sapien
tctgtagcaactagccaatgaatccaaaccaca

SEQ ID NO: 1024180 - DNA, 33 bp, Homo sapien
tctgtagcaactagccgatgaatccaaaccaca

SEQ ID NO: 1024181 - DNA, 33 bp, Homo sapien
gcatcatcaaatataacagagaaagcaaaggta

SEQ ID NO: 1024182 - DNA, 33 bp, Homo sapien
gcatcatcaaatataatagagaaagcaaaggta

SEQ ID NO: 1024183 - DNA, 33 bp, Homo sapien
tgccttaatttatggaagacaatgatatttgtg

SEQ ID NO: 1024184 - DNA, 33 bp, Homo sapien
tgccttaatttatggaggacaatgatatttgtg

SEQ ID NO: 1024185 - DNA, 33 bp, Homo sapien
actaaacagcatccaaacttatcgtagactctt

SEQ ID NO: 1024186 - DNA, 33 bp, Homo sapien
actaaacagcatccaatcttatcgtagactctt

SEQ ID NO: 1024187 - DNA, 33 bp, Homo sapien
tgagactttgcaaccaagtcaagggtgaaacta

SEQ ID NO: 1024188 - DNA, 33 bp, Homo sapien
tgagactttgcaaccaggtcaagggtgaaacta

SEQ ID NO: 1024189 - DNA, 33 bp, Homo sapien
tattgcacttactaaaccttactatgccaaagc

SEQ ID NO: 1024190 - DNA, 33 bp, Homo sapien
tattgcacttactaaagcttactatgccaaagc

SEQ ID NO: 1024191 - DNA, 33 bp, Homo sapien
tgaagatccttaattggattccattattagagt

SEQ ID NO: 1024192 - DNA, 33 bp, Homo sapien
tgaagatccttaattgtattccattattagagt

SEQ ID NO: 1024193 - DNA, 33 bp, Homo sapien
tcattgccttgttccacagttcttaagtcagct

SEQ ID NO: 1024194 - DNA, 33 bp, Homo sapien
tcattgccttgttccatagttcttaagtcagct

SEQ ID NO: 1024195 - DNA, 33 bp, Homo sapien
ccaagacatcagaccaaagttcctgtctaattc

SEQ ID NO: 1024196 - DNA, 33 bp, Homo sapien
ccaagacatcagaccacagttcctgtctaattc

SEQ ID NO: 1024197 - DNA, 33 bp, Homo sapien
tctagcttgctactgacagaactatattaaata

SEQ ID NO: 1024198 - DNA, 33 bp, Homo sapien
tctagcttgctactgatagaactatattaaata

SEQ ID NO: 1024199 - DNA, 33 bp, Homo sapien
ataaaaaaggataaaaatatgtctgttgtagca

SEQ ID NO: 1024200 - DNA, 33 bp, Homo sapien
ataaaaaaggataaaattatgtctgttgtagca

SEQ ID NO: 1024201 - DNA, 33 bp, Homo sapien
gaaattgtttagtgtaccttaagctgaatttca

SEQ ID NO: 1024202 - DNA, 33 bp, Homo sapien
gaaattgtttagtgtatcttaagctgaatttca

SEQ ID NO: 1024203 - DNA, 33 bp, Homo sapien
agtatggagagtattaagctatgtgtaacagga

SEQ ID NO: 1024204 - DNA, 33 bp, Homo sapien
agtatggagagtattaggctatgtgtaacagga

SEQ ID NO: 1024205 - DNA, 33 bp, Homo sapien
tttaacatttgccaacgaagcaaaaggcaatac

SEQ ID NO: 1024206 - DNA, 33 bp, Homo sapien
tttaacatttgccaactaagcaaaaggcaatac

SEQ ID NO: 1024207 - DNA, 33 bp, Homo sapien
caacaaagactaagacaccctcatcagctttta

SEQ ID NO: 1024208 - DNA, 33 bp, Homo sapien
caacaaagactaagacgccctcatcagctttta

SEQ ID NO: 1024209 - DNA, 33 bp, Homo sapien
tcttgaaaggtttagcaaaagcaatctctatgg

SEQ ID NO: 1024210 - DNA, 33 bp, Homo sapien
tcttgaaaggtttagcgaaagcaatctctatgg

SEQ ID NO: 1024211 - DNA, 33 bp, Homo sapien
gcacttaaaggcctaacgttgtatagattttta

SEQ ID NO: 1024212 - DNA, 33 bp, Homo sapien
gcacttaaaggcctaatgttgtatagattttta

SEQ ID NO: 1024213 - DNA, 33 bp, Homo sapien
cccacctgttgtatcactatgacatgggtgaaa

SEQ ID NO: 1024214 - DNA, 33 bp, Homo sapien
cccacctgttgtatcagtatgacatgggtgaaa

SEQ ID NO: 1024215 - DNA, 33 bp, Homo sapien
tgtaggctctgtaataacaaggtttgcatctgt

SEQ ID NO: 1024216 - DNA, 33 bp, Homo sapien
tgtaggctctgtaatagcaaggtttgcatctgt

SEQ ID NO: 1024217 - DNA, 33 bp, Homo sapien
cccctaagccggcaacactcacatttattcagt

SEQ ID NO: 1024218 - DNA, 33 bp, Homo sapien
cccctaagccggcaacgctcacatttattcagt

SEQ ID NO: 1024219 - DNA, 33 bp, Homo sapien
ttggtgaccattattgcaagtgaagtaattcag

SEQ ID NO: 1024220 - DNA, 33 bp, Homo sapien
ttggtgaccattattgtaagtgaagtaattcag

SEQ ID NO: 1024221 - DNA, 33 bp, Homo sapien
ttattttctagtccccaaattagtcattgtttc

SEQ ID NO: 1024222 - DNA, 33 bp, Homo sapien
ttattttctagtccccgaattagtcattgtttc

SEQ ID NO: 1024223 - DNA, 33 bp, Homo sapien
ggggtaacctaaaccaagacaatatatgtgttc

SEQ ID NO: 1024224 - DNA, 33 bp, Homo sapien
ggggtaacctaaaccaggacaatatatgtgttc

SEQ ID NO: 1024225 - DNA, 33 bp, Homo sapien
aaatagctaaaaactgcatattgaatacaccca

SEQ ID NO: 1024226 - DNA, 33 bp, Homo sapien
aaatagctaaaaactggatattgaatacaccca

SEQ ID NO: 1024227 - DNA, 33 bp, Homo sapien
gtaaataaaagaaaggacattacagaggcaaaa

SEQ ID NO: 1024228 - DNA, 33 bp, Homo sapien
gtaaataaaagaaagggcattacagaggcaaaa

SEQ ID NO: 1024229 - DNA, 33 bp, Homo sapien
tttctcctaatccaaacattcaaagagcagctg

SEQ ID NO: 1024230 - DNA, 33 bp, Homo sapien
tttctcctaatccaaagattcaaagagcagctg

SEQ ID NO: 1024231 - DNA, 33 bp, Homo sapien
ttggcctcaggaaaagaaagtagacaagctgta

SEQ ID NO: 1024232 - DNA, 33 bp, Homo sapien
ttggcctcaggaaaaggaagtagacaagctgta

SEQ ID NO: 1024233 - DNA, 33 bp, Homo sapien
ttcttattctgagagacagttaatacgttatct

SEQ ID NO: 1024234 - DNA, 33 bp, Homo sapien
ttcttattctgagagatagttaatacgttatct

SEQ ID NO: 1024235 - DNA, 33 bp, Homo sapien
atgaaagcatatataaggatgggtgctgataga

SEQ ID NO: 1024236 - DNA, 33 bp, Homo sapien
atgaaagcatatataatgatgggtgctgataga

SEQ ID NO: 1024237 - DNA, 33 bp, Homo sapien
agctaatctacagataggcctcaaataatgggg

SEQ ID NO: 1024238 - DNA, 33 bp, Homo sapien
agctaatctacagatatgcctcaaataatgggg

SEQ ID NO: 1024239 - DNA, 33 bp, Homo sapien
ccacttcagtgttttcaatgagttttacagtaa

SEQ ID NO: 1024240 - DNA, 33 bp, Homo sapien
ccacttcagtgttttctatgagttttacagtaa

SEQ ID NO: 1024241 - DNA, 33 bp, Homo sapien
cttgtggaatttgttacaaggcttggtctcttg

SEQ ID NO: 1024242 - DNA, 33 bp, Homo sapien
cttgtggaatttgttataaggcttggtctcttg

SEQ ID NO: 1024243 - DNA, 33 bp, Homo sapien
atgaaggcttcaggtaacaaactttggagagca

SEQ ID NO: 1024244 - DNA, 33 bp, Homo sapien
atgaaggcttcaggtagcaaactttggagagca

SEQ ID NO: 1024245 - DNA, 33 bp, Homo sapien
agattagttcttgccacgaaaaattgggaaatt

SEQ ID NO: 1024246 - DNA, 33 bp, Homo sapien
agattagttcttgccatgaaaaattgggaaatt

SEQ ID NO: 1024247 - DNA, 33 bp, Homo sapien
gaggaagcatgacttcaatggggacagtgctgg

SEQ ID NO: 1024248 - DNA, 33 bp, Homo sapien
gaggaagcatgacttcgatggggacagtgctgg

SEQ ID NO: 1024249 - DNA, 33 bp, Homo sapien
ccttgagggttagaaacgtgtcttttatccagt

SEQ ID NO: 1024250 - DNA, 33 bp, Homo sapien
ccttgagggttagaaatgtgtcttttatccagt

SEQ ID NO: 1024251 - DNA, 33 bp, Homo sapien
tagagcgttccactcaaataaattgaaccagga

SEQ ID NO: 1024252 - DNA, 33 bp, Homo sapien
tagagcgttccactcagataaattgaaccagga

SEQ ID NO: 1024253 - DNA, 33 bp, Homo sapien
ctctattttcaggacactctcaggaagttcttc

SEQ ID NO: 1024254 - DNA, 33 bp, Homo sapien
ctctattttcaggacattctcaggaagttcttc

SEQ ID NO: 1024255 - DNA, 33 bp, Homo sapien
ttttactgagatgatactaaaattcagggaagt

SEQ ID NO: 1024256 - DNA, 33 bp, Homo sapien
ttttactgagatgatattaaaattcagggaagt

SEQ ID NO: 1024257 - DNA, 33 bp, Homo sapien
agtgacacctaaaggcaaacctgcttgacccat

SEQ ID NO: 1024258 - DNA, 33 bp, Homo sapien
agtgacacctaaaggcgaacctgcttgacccat

SEQ ID NO: 1024259 - DNA, 33 bp, Homo sapien
cggttagtcctgagtggaataaaagtgaatgtg

SEQ ID NO: 1024260 - DNA, 33 bp, Homo sapien
cggttagtcctgagtgtaataaaagtgaatgtg

SEQ ID NO: 1024261 - DNA, 33 bp, Homo sapien
agaatttaagtgaggaaagcaaagatcacctga

SEQ ID NO: 1024262 - DNA, 33 bp, Homo sapien
agaatttaagtgaggacagcaaagatcacctga

SEQ ID NO: 1024263 - DNA, 33 bp, Homo sapien
atagatttgagaattaagagagagtttagagaa

SEQ ID NO: 1024264 - DNA, 33 bp, Homo sapien
atagatttgagaattaggagagagtttagagaa

SEQ ID NO: 1024265 - DNA, 33 bp, Homo sapien
cattttgtacatctagcactggcaacaaaactt

SEQ ID NO: 1024266 - DNA, 33 bp, Homo sapien
cattttgtacatctaggactggcaacaaaactt

SEQ ID NO: 1024267 - DNA, 33 bp, Homo sapien
ttgctgtagttagaagcagtgagtttgtgtgct

SEQ ID NO: 1024268 - DNA, 33 bp, Homo sapien
ttgctgtagttagaagtagtgagtttgtgtgct

SEQ ID NO: 1024269 - DNA, 33 bp, Homo sapien
cccgctgatgataaaactgaaagtaatacatca

SEQ ID NO: 1024270 - DNA, 33 bp, Homo sapien
cccgctgatgataaaattgaaagtaatacatca

SEQ ID NO: 1024271 - DNA, 33 bp, Homo sapien
ttaatcagcacctcaacctagaaaaagtcccag

SEQ ID NO: 1024272 - DNA, 33 bp, Homo sapien
ttaatcagcacctcaatctagaaaaagtcccag

SEQ ID NO: 1024273 - DNA, 33 bp, Homo sapien
aattgtatttttctgaacatttgaatttagcat

SEQ ID NO: 1024274 - DNA, 33 bp, Homo sapien
aattgtatttttctgatcatttgaatttagcat

SEQ ID NO: 1024275 - DNA, 33 bp, Homo sapien
cacctccactgttttcaatctcagtggagcaga

SEQ ID NO: 1024276 - DNA, 33 bp, Homo sapien
cacctccactgttttctatctcagtggagcaga

SEQ ID NO: 1024277 - DNA, 33 bp, Homo sapien
ttatttatatagacaacgtcagagagccattaa

SEQ ID NO: 1024278 - DNA, 33 bp, Homo sapien
ttatttatatagacaatgtcagagagccattaa

SEQ ID NO: 1024279 - DNA, 33 bp, Homo sapien
tgttctctttctgatagtaagttaccacttgtc

SEQ ID NO: 1024280 - DNA, 33 bp, Homo sapien
tgttctctttctgatattaagttaccacttgtc

SEQ ID NO: 1024281 - DNA, 33 bp, Homo sapien
agggtggcaaatgatcaacctgcttttcatcca

SEQ ID NO: 1024282 - DNA, 33 bp, Homo sapien
agggtggcaaatgatcgacctgcttttcatcca

SEQ ID NO: 1024283 - DNA, 33 bp, Homo sapien
tacttatgtaaaagtacgtagttttgtatcatt

SEQ ID NO: 1024284 - DNA, 33 bp, Homo sapien
tacttatgtaaaagtatgtagttttgtatcatt

SEQ ID NO: 1024285 - DNA, 33 bp, Homo sapien
acaatgttgtaagtaacatggcgagtcatgaat

SEQ ID NO: 1024286 - DNA, 33 bp, Homo sapien
acaatgttgtaagtaatatggcgagtcatgaat

SEQ ID NO: 1024287 - DNA, 33 bp, Homo sapien
ttttcttcctgggcacacagattaacaatgttt

SEQ ID NO: 1024288 - DNA, 33 bp, Homo sapien
ttttcttcctgggcacgcagattaacaatgttt

SEQ ID NO: 1024289 - DNA, 33 bp, Homo sapien
gctaatgggctcatcacatattaagcccctttt

SEQ ID NO: 1024290 - DNA, 33 bp, Homo sapien
gctaatgggctcatcagatattaagcccctttt

SEQ ID NO: 1024291 - DNA, 33 bp, Homo sapien
ctgtttttgaaaattcacttgcattgtgctcac

SEQ ID NO: 1024292 - DNA, 33 bp, Homo sapien
ctgtttttgaaaattcgcttgcattgtgctcac

SEQ ID NO: 1024293 - DNA, 33 bp, Homo sapien
aaacacagtggtgagaaaaacatatacaaaggc

SEQ ID NO: 1024294 - DNA, 33 bp, Homo sapien
aaacacagtggtgagacaaacatatacaaaggc

SEQ ID NO: 1024295 - DNA, 33 bp, Homo sapien
ctcaactgggctttggaaagtagacgtattatc

SEQ ID NO: 1024296 - DNA, 33 bp, Homo sapien
ctcaactgggctttggcaagtagacgtattatc

SEQ ID NO: 1024297 - DNA, 33 bp, Homo sapien
ggcagcctccaatggaaagaagaaattcccctg

SEQ ID NO: 1024298 - DNA, 33 bp, Homo sapien
ggcagcctccaatggagagaagaaattcccctg

SEQ ID NO: 1024299 - DNA, 33 bp, Homo sapien
ggaagatattatgcaaccttgttttagtcattc

SEQ ID NO: 1024300 - DNA, 33 bp, Homo sapien
ggaagatattatgcaatcttgttttagtcattc

SEQ ID NO: 1024301 - DNA, 33 bp, Homo sapien
atattttgtgacatgcaaaaactatatgaaatt

SEQ ID NO: 1024302 - DNA, 33 bp, Homo sapien
atattttgtgacatgcgaaaactatatgaaatt

SEQ ID NO: 1024303 - DNA, 33 bp, Homo sapien
ggagaagaaccacttcacagaagctgtagttga

SEQ ID NO: 1024304 - DNA, 33 bp, Homo sapien
ggagaagaaccacttcgcagaagctgtagttga

SEQ ID NO: 1024305 - DNA, 33 bp, Homo sapien
tctcctgccaggcagaacttcccattaactgat

SEQ ID NO: 1024306 - DNA, 33 bp, Homo sapien
tctcctgccaggcagagcttcccattaactgat

SEQ ID NO: 1024307 - DNA, 33 bp, Homo sapien
tcaagtggcacaactacggtggacattctggaa

SEQ ID NO: 1024308 - DNA, 33 bp, Homo sapien
tcaagtggcacaactatggtggacattctggaa

SEQ ID NO: 1024309 - DNA, 33 bp, Homo sapien
tgaggagaatgactaaaagcaacctctatctta

SEQ ID NO: 1024310 - DNA, 33 bp, Homo sapien
tgaggagaatgactaagagcaacctctatctta

SEQ ID NO: 1024311 - DNA, 33 bp, Homo sapien
ctgtcttacctggttaacgttatgcatctcaaa

SEQ ID NO: 1024312 - DNA, 33 bp, Homo sapien
ctgtcttacctggttaccgttatgcatctcaaa

SEQ ID NO: 1024313 - DNA, 33 bp, Homo sapien
gatgcactgagtgctacaaatgaggactggcag

SEQ ID NO: 1024314 - DNA, 33 bp, Homo sapien
gatgcactgagtgctagaaatgaggactggcag

SEQ ID NO: 1024315 - DNA, 33 bp, Homo sapien
tttgttcatttcaccccgatgcaccaccatgga

SEQ ID NO: 1024316 - DNA, 33 bp, Homo sapien
tttgttcatttcaccctgatgcaccaccatgga

SEQ ID NO: 1024317 - DNA, 33 bp, Homo sapien
cagaccaacacaggcacggaaacaacaatgttg

SEQ ID NO: 1024318 - DNA, 33 bp, Homo sapien
cagaccaacacaggcatggaaacaacaatgttg

SEQ ID NO: 1024319 - DNA, 33 bp, Homo sapien
agattttggttgttggcatctgaatgagtctta

SEQ ID NO: 1024320 - DNA, 33 bp, Homo sapien
agattttggttgttggtatctgaatgagtctta

SEQ ID NO: 1024321 - DNA, 33 bp, Homo sapien
ctagagccatgtattaaaattctttgaatatgt

SEQ ID NO: 1024322 - DNA, 33 bp, Homo sapien
ctagagccatgtattagaattctttgaatatgt

SEQ ID NO: 1024323 - DNA, 33 bp, Homo sapien
tgtcttgaaaggcccacgtccaagagcagtagc

SEQ ID NO: 1024324 - DNA, 33 bp, Homo sapien
tgtcttgaaaggcccatgtccaagagcagtagc

SEQ ID NO: 1024325 - DNA, 33 bp, Homo sapien
tcaggcttggagccggaatttaaccagaattct

SEQ ID NO: 1024326 - DNA, 33 bp, Homo sapien
tcaggcttggagccggcatttaaccagaattct

SEQ ID NO: 1024327 - DNA, 33 bp, Homo sapien
tccttcaggtctccaagccaatgttactccatt

SEQ ID NO: 1024328 - DNA, 33 bp, Homo sapien
tccttcaggtctccaatccaatgttactccatt

SEQ ID NO: 1024329 - DNA, 33 bp, Homo sapien
gcagtgaggttaaaacaaacgtagcatttctca

SEQ ID NO: 1024330 - DNA, 33 bp, Homo sapien
gcagtgaggttaaaaccaacgtagcatttctca

SEQ ID NO: 1024331 - DNA, 33 bp, Homo sapien
cagacgaaagaaccacagggtagagatgggaga

SEQ ID NO: 1024332 - DNA, 33 bp, Homo sapien
cagacgaaagaaccacggggtagagatgggaga

SEQ ID NO: 1024333 - DNA, 33 bp, Homo sapien
tgggcttctgatgtacagagttgtgaggaaata

SEQ ID NO: 1024334 - DNA, 33 bp, Homo sapien
tgggcttctgatgtaccgagttgtgaggaaata

SEQ ID NO: 1024335 - DNA, 33 bp, Homo sapien
caccctcttccttcaacggaaagcaaagaacaa

SEQ ID NO: 1024336 - DNA, 33 bp, Homo sapien
caccctcttccttcaatggaaagcaaagaacaa

SEQ ID NO: 1024337 - DNA, 33 bp, Homo sapien
gcttctgttttagcaacgggcagtctagctttc

SEQ ID NO: 1024338 - DNA, 33 bp, Homo sapien
gcttctgttttagcaatgggcagtctagctttc

SEQ ID NO: 1024339 - DNA, 33 bp, Homo sapien
cagccatcaacctttacggtggaattagctcca

SEQ ID NO: 1024340 - DNA, 33 bp, Homo sapien
cagccatcaacctttatggtggaattagctcca

SEQ ID NO: 1024341 - DNA, 33 bp, Homo sapien
caacttgggagtaaaacacttgctaaagtgcac

SEQ ID NO: 1024342 - DNA, 33 bp, Homo sapien
caacttgggagtaaaatacttgctaaagtgcac

SEQ ID NO: 1024343 - DNA, 33 bp, Homo sapien
tacaggtccagagttgcaagaagaactaggact

SEQ ID NO: 1024344 - DNA, 33 bp, Homo sapien
tacaggtccagagttggaagaagaactaggact

SEQ ID NO: 1024345 - DNA, 33 bp, Homo sapien
caactctggacctgtaacacggacaggaactat

SEQ ID NO: 1024346 - DNA, 33 bp, Homo sapien
caactctggacctgtagcacggacaggaactat

SEQ ID NO: 1024347 - DNA, 33 bp, Homo sapien
ttctcagctgtcaaaaatgggggataattatac

SEQ ID NO: 1024348 - DNA, 33 bp, Homo sapien
ttctcagctgtcaaaagtgggggataattatac

SEQ ID NO: 1024349 - DNA, 33 bp, Homo sapien
aggatatggcatgtatcaagtgtgagatttagg

SEQ ID NO: 1024350 - DNA, 33 bp, Homo sapien
aggatatggcatgtattaagtgtgagatttagg

SEQ ID NO: 1024351 - DNA, 33 bp, Homo sapien
aacaacacacttgtataagcagcgaggaaagag

SEQ ID NO: 1024352 - DNA, 33 bp, Homo sapien
aacaacacacttgtatgagcagcgaggaaagag

SEQ ID NO: 1024353 - DNA, 33 bp, Homo sapien
aaactgtcacagtcatgaataaaaaagaaaatt

SEQ ID NO: 1024354 - DNA, 33 bp, Homo sapien
aaactgtcacagtcattaataaaaaagaaaatt

SEQ ID NO: 1024355 - DNA, 33 bp, Homo sapien
aggtggtttaggctgccagtccaggtgaactgg

SEQ ID NO: 1024356 - DNA, 33 bp, Homo sapien
aggtggtttaggctgctagtccaggtgaactgg

SEQ ID NO: 1024357 - DNA, 33 bp, Homo sapien
gggtgaggacttcaacacataaacagacaaaat

SEQ ID NO: 1024358 - DNA, 33 bp, Homo sapien
gggtgaggacttcaacgcataaacagacaaaat

SEQ ID NO: 1024359 - DNA, 33 bp, Homo sapien
atcattttattttgcactatgagagactaataa

SEQ ID NO: 1024360 - DNA, 33 bp, Homo sapien
atcattttattttgcattatgagagactaataa

SEQ ID NO: 1024361 - DNA, 33 bp, Homo sapien
gatgataaggctgtaccaaaatttgcctttctt

SEQ ID NO: 1024362 - DNA, 33 bp, Homo sapien
gatgataaggctgtactaaaatttgcctttctt

SEQ ID NO: 1024363 - DNA, 33 bp, Homo sapien
cttacttattaggaccaaaacagtgaaacatta

SEQ ID NO: 1024364 - DNA, 33 bp, Homo sapien
cttacttattaggaccgaaacagtgaaacatta

SEQ ID NO: 1024365 - DNA, 33 bp, Homo sapien
gcaaagcagtaaaaaaattgaggagctgaatgt

SEQ ID NO: 1024366 - DNA, 33 bp, Homo sapien
gcaaagcagtaaaaaatttgaggagctgaatgt

SEQ ID NO: 1024367 - DNA, 33 bp, Homo sapien
tctgattctttatcaaattctgagaaactcact

SEQ ID NO: 1024368 - DNA, 33 bp, Homo sapien
tctgattctttatcaagttctgagaaactcact

SEQ ID NO: 1024369 - DNA, 33 bp, Homo sapien
gattagagagttctaacgtattcctttcacatc

SEQ ID NO: 1024370 - DNA, 33 bp, Homo sapien
gattagagagttctaatgtattcctttcacatc

SEQ ID NO: 1024371 - DNA, 33 bp, Homo sapien
agtgaatgctgcagccaaatgacaaaatgcaaa

SEQ ID NO: 1024372 - DNA, 33 bp, Homo sapien
agtgaatgctgcagccgaatgacaaaatgcaaa

SEQ ID NO: 1024373 - DNA, 33 bp, Homo sapien
tatctccaacatctgccaatattcagtgtgtct

SEQ ID NO: 1024374 - DNA, 33 bp, Homo sapien
tatctccaacatctgcgaatattcagtgtgtct

SEQ ID NO: 1024375 - DNA, 33 bp, Homo sapien
ttctggtggacatataagcaggagtgtaattgc

SEQ ID NO: 1024376 - DNA, 33 bp, Homo sapien
ttctggtggacatataggcaggagtgtaattgc

SEQ ID NO: 1024377 - DNA, 33 bp, Homo sapien
gtcagaagtagaatcactgatccagtactttga

SEQ ID NO: 1024378 - DNA, 33 bp, Homo sapien
gtcagaagtagaatcattgatccagtactttga

SEQ ID NO: 1024379 - DNA, 33 bp, Homo sapien
tgatgcctattttctcaaatgccatcaggggtt

SEQ ID NO: 1024380 - DNA, 33 bp, Homo sapien
tgatgcctattttctcgaatgccatcaggggtt

SEQ ID NO: 1024381 - DNA, 33 bp, Homo sapien
ccttgtcaccttttggaaaatcactgagtagtt

SEQ ID NO: 1024382 - DNA, 33 bp, Homo sapien
ccttgtcaccttttggcaaatcactgagtagtt

SEQ ID NO: 1024383 - DNA, 33 bp, Homo sapien
ctatgcactcatgagaatccacattggttgtca

SEQ ID NO: 1024384 - DNA, 33 bp, Homo sapien
ctatgcactcatgagagtccacattggttgtca

SEQ ID NO: 1024385 - DNA, 33 bp, Homo sapien
taatcacaccgtgcaaaaagtttaccaatcaaa

SEQ ID NO: 1024386 - DNA, 33 bp, Homo sapien
taatcacaccgtgcaataagtttaccaatcaaa

SEQ ID NO: 1024387 - DNA, 33 bp, Homo sapien
tgtaaagcagtgactccagtgcaaatctggccc

SEQ ID NO: 1024388 - DNA, 33 bp, Homo sapien
tgtaaagcagtgactctagtgcaaatctggccc

SEQ ID NO: 1024389 - DNA, 33 bp, Homo sapien
agaaccaccaagagaaagtcattgtgaactcag

SEQ ID NO: 1024390 - DNA, 33 bp, Homo sapien
agaaccaccaagagaaggtcattgtgaactcag

SEQ ID NO: 1024391 - DNA, 33 bp, Homo sapien
agtgggtgagacaggcacgaacttgcccttttg

SEQ ID NO: 1024392 - DNA, 33 bp, Homo sapien
agtgggtgagacaggcgcgaacttgcccttttg

SEQ ID NO: 1024393 - DNA, 33 bp, Homo sapien
attccttcatttcttacgtggaactactactat

SEQ ID NO: 1024394 - DNA, 33 bp, Homo sapien
attccttcatttcttaggtggaactactactat

SEQ ID NO: 1024395 - DNA, 33 bp, Homo sapien
caacagctgtctgtgaacaaaccttcctcctga

SEQ ID NO: 1024396 - DNA, 33 bp, Homo sapien
caacagctgtctgtgatcaaaccttcctcctga

SEQ ID NO: 1024397 - DNA, 33 bp, Homo sapien
cctaaataatggaacacaggacaactcaacttt

SEQ ID NO: 1024398 - DNA, 33 bp, Homo sapien
cctaaataatggaacataggacaactcaacttt

SEQ ID NO: 1024399 - DNA, 33 bp, Homo sapien
tacctctatcagtggggccacaagtaatgaatg

SEQ ID NO: 1024400 - DNA, 33 bp, Homo sapien
tacctctatcagtgggtccacaagtaatgaatg

SEQ ID NO: 1024401 - DNA, 33 bp, Homo sapien
acacgaactatcaagacgatctgtacctctatc

SEQ ID NO: 1024402 - DNA, 33 bp, Homo sapien
acacgaactatcaagatgatctgtacctctatc

SEQ ID NO: 1024403 - DNA, 33 bp, Homo sapien
atctgatattctgaagacatggactcctccttt

SEQ ID NO: 1024404 - DNA, 33 bp, Homo sapien
atctgatattctgaagtcatggactcctccttt

SEQ ID NO: 1024405 - DNA, 33 bp, Homo sapien
ttgctcattttctccacgtcatgatggctggca

SEQ ID NO: 1024406 - DNA, 33 bp, Homo sapien
ttgctcattttctccatgtcatgatggctggca

SEQ ID NO: 1024407 - DNA, 33 bp, Homo sapien
tatccacttatctgaaagtcatcagtttcttct

SEQ ID NO: 1024408 - DNA, 33 bp, Homo sapien
tatccacttatctgaacgtcatcagtttcttct

SEQ ID NO: 1024409 - DNA, 33 bp, Homo sapien
caatatcccattcttaccattaggcagagcgtc

SEQ ID NO: 1024410 - DNA, 33 bp, Homo sapien
caatatcccattcttatcattaggcagagcgtc

SEQ ID NO: 1024411 - DNA, 33 bp, Homo sapien
caattcttactacaggaaaatcgcacagtcctc

SEQ ID NO: 1024412 - DNA, 33 bp, Homo sapien
caattcttactacagggaaatcgcacagtcctc

SEQ ID NO: 1024413 - DNA, 33 bp, Homo sapien
catctgtaagggatcaactgtgagggatcagct

SEQ ID NO: 1024414 - DNA, 33 bp, Homo sapien
catctgtaagggatcagctgtgagggatcagct

SEQ ID NO: 1024415 - DNA, 33 bp, Homo sapien
gcatattgtatttcaccggctactttgtgaatt

SEQ ID NO: 1024416 - DNA, 33 bp, Homo sapien
gcatattgtatttcactggctactttgtgaatt

SEQ ID NO: 1024417 - DNA, 33 bp, Homo sapien
tgcttctttaacataaaattatgccacaagaac

SEQ ID NO: 1024418 - DNA, 33 bp, Homo sapien
tgcttctttaacataacattatgccacaagaac

SEQ ID NO: 1024419 - DNA, 33 bp, Homo sapien
gtaaaggaggaacaggaaaagtgaaacaagtca

SEQ ID NO: 1024420 - DNA, 33 bp, Homo sapien
gtaaaggaggaacagggaaagtgaaacaagtca

SEQ ID NO: 1024421 - DNA, 33 bp, Homo sapien
catccatgcatgactccaatctatattttctaa

SEQ ID NO: 1024422 - DNA, 33 bp, Homo sapien
catccatgcatgactctaatctatattttctaa

SEQ ID NO: 1024423 - DNA, 33 bp, Homo sapien
attggagacaatagtacagcatttttcctgagt

SEQ ID NO: 1024424 - DNA, 33 bp, Homo sapien
attggagacaatagtagagcatttttcctgagt

SEQ ID NO: 1024425 - DNA, 33 bp, Homo sapien
tttttttcaccgttacactagaattacttattt

SEQ ID NO: 1024426 - DNA, 33 bp, Homo sapien
tttttttcaccgttacgctagaattacttattt

SEQ ID NO: 1024427 - DNA, 33 bp, Homo sapien
ctagacaattagaaaacgcagtattgacaatct

SEQ ID NO: 1024428 - DNA, 33 bp, Homo sapien
ctagacaattagaaaatgcagtattgacaatct

SEQ ID NO: 1024429 - DNA, 33 bp, Homo sapien
actgacctaaataaaacaagtgccatgtaaata

SEQ ID NO: 1024430 - DNA, 33 bp, Homo sapien
actgacctaaataaaataagtgccatgtaaata

SEQ ID NO: 1024431 - DNA, 33 bp, Homo sapien
ctttattgtaaagatacacaagtgtttttttgg

SEQ ID NO: 1024432 - DNA, 33 bp, Homo sapien
ctttattgtaaagatatacaagtgtttttttgg

SEQ ID NO: 1024433 - DNA, 33 bp, Homo sapien
gatcattttttaagcaataggctcagacctttt

SEQ ID NO: 1024434 - DNA, 33 bp, Homo sapien
gatcattttttaagcagtaggctcagacctttt

SEQ ID NO: 1024435 - DNA, 33 bp, Homo sapien
aaaaaggaagcagaaacgtggttgccagggaat

SEQ ID NO: 1024436 - DNA, 33 bp, Homo sapien
aaaaaggaagcagaaaggtggttgccagggaat

SEQ ID NO: 1024437 - DNA, 33 bp, Homo sapien
tctgttcacatttgctaaagaactttggaacaa

SEQ ID NO: 1024438 - DNA, 33 bp, Homo sapien
tctgttcacatttgctgaagaactttggaacaa

SEQ ID NO: 1024439 - DNA, 33 bp, Homo sapien
atgcatatcctattagaaaatagctgtggttat

SEQ ID NO: 1024440 - DNA, 33 bp, Homo sapien
atgcatatcctattagtaaatagctgtggttat

SEQ ID NO: 1024441 - DNA, 33 bp, Homo sapien
aagtagattttcattccctgctgttgtccaact

SEQ ID NO: 1024442 - DNA, 33 bp, Homo sapien
aagtagattttcattctctgctgttgtccaact

SEQ ID NO: 1024443 - DNA, 33 bp, Homo sapien
cttgaacttcatagcactgaaagcttgagtaaa

SEQ ID NO: 1024444 - DNA, 33 bp, Homo sapien
cttgaacttcatagcagtgaaagcttgagtaaa

SEQ ID NO: 1024445 - DNA, 33 bp, Homo sapien
ggtggtacaatagtgacgccaaatatgaaagca

SEQ ID NO: 1024446 - DNA, 33 bp, Homo sapien
ggtggtacaatagtgatgccaaatatgaaagca

SEQ ID NO: 1024447 - DNA, 33 bp, Homo sapien
caagtctgctttttgccaaggaatctggtgtcc

SEQ ID NO: 1024448 - DNA, 33 bp, Homo sapien
caagtctgctttttgctaaggaatctggtgtcc

SEQ ID NO: 1024449 - DNA, 33 bp, Homo sapien
gattccatagccttcacgttgcttaaatgttga

SEQ ID NO: 1024450 - DNA, 33 bp, Homo sapien
gattccatagccttcatgttgcttaaatgttga

SEQ ID NO: 1024451 - DNA, 33 bp, Homo sapien
gaaaaggaggcagttacacagacatgcaaaaat

SEQ ID NO: 1024452 - DNA, 33 bp, Homo sapien
gaaaaggaggcagttatacagacatgcaaaaat

SEQ ID NO: 1024453 - DNA, 33 bp, Homo sapien
atgaacactaaaatgcacggttagacctcaaat

SEQ ID NO: 1024454 - DNA, 33 bp, Homo sapien
atgaacactaaaatgcgcggttagacctcaaat

SEQ ID NO: 1024455 - DNA, 33 bp, Homo sapien
aaaaaggtgaaaggccaacatcaacagttgtat

SEQ ID NO: 1024456 - DNA, 33 bp, Homo sapien
aaaaaggtgaaaggccgacatcaacagttgtat

SEQ ID NO: 1024457 - DNA, 33 bp, Homo sapien
agggtcatgggtgaaacagcatacaaagatgtg

SEQ ID NO: 1024458 - DNA, 33 bp, Homo sapien
agggtcatgggtgaaagagcatacaaagatgtg

SEQ ID NO: 1024459 - DNA, 33 bp, Homo sapien
agaaacattttatttcacagaggccctataatg

SEQ ID NO: 1024460 - DNA, 33 bp, Homo sapien
agaaacattttatttcgcagaggccctataatg

SEQ ID NO: 1024461 - DNA, 33 bp, Homo sapien
gtgtgactaagaaacaaaatgcttagagctgag

SEQ ID NO: 1024462 - DNA, 33 bp, Homo sapien
gtgtgactaagaaacagaatgcttagagctgag

SEQ ID NO: 1024463 - DNA, 33 bp, Homo sapien
tgctaactgaagctgagtaatgagtgtctggaa

SEQ ID NO: 1024464 - DNA, 33 bp, Homo sapien
tgctaactgaagctgattaatgagtgtctggaa

SEQ ID NO: 1024465 - DNA, 33 bp, Homo sapien
tatattgtgagttcgacgttgtcatgaaataaa

SEQ ID NO: 1024466 - DNA, 33 bp, Homo sapien
tatattgtgagttcgatgttgtcatgaaataaa

SEQ ID NO: 1024467 - DNA, 33 bp, Homo sapien
caggcctaagacgttacgcctgaaaacagttct

SEQ ID NO: 1024468 - DNA, 33 bp, Homo sapien
caggcctaagacgttatgcctgaaaacagttct

SEQ ID NO: 1024469 - DNA, 33 bp, Homo sapien
acagctgttaaacaaactaggtctaagaaaaaa

SEQ ID NO: 1024470 - DNA, 33 bp, Homo sapien
acagctgttaaacaaagtaggtctaagaaaaaa

SEQ ID NO: 1024471 - DNA, 33 bp, Homo sapien
gtagtaggctgtaccaatgatgaaattgcctaa

SEQ ID NO: 1024472 - DNA, 33 bp, Homo sapien
gtagtaggctgtaccagtgatgaaattgcctaa

SEQ ID NO: 1024473 - DNA, 33 bp, Homo sapien
tgtcagtgtagaatcacggtttttaaatataca

SEQ ID NO: 1024474 - DNA, 33 bp, Homo sapien
tgtcagtgtagaatcatggtttttaaatataca

SEQ ID NO: 1024475 - DNA, 33 bp, Homo sapien
acaatgttccaaaatacgtagtgcacaatgaaa

SEQ ID NO: 1024476 - DNA, 33 bp, Homo sapien
acaatgttccaaaatatgtagtgcacaatgaaa

SEQ ID NO: 1024477 - DNA, 33 bp, Homo sapien
aggctaatgctaatgaagaaaaatgtgactaaa

SEQ ID NO: 1024478 - DNA, 33 bp, Homo sapien
aggctaatgctaatgatgaaaaatgtgactaaa

SEQ ID NO: 1024479 - DNA, 33 bp, Homo sapien
tcaagaatgaagcccacgaatgcaagacagaga

SEQ ID NO: 1024480 - DNA, 33 bp, Homo sapien
tcaagaatgaagcccatgaatgcaagacagaga

SEQ ID NO: 1024481 - DNA, 33 bp, Homo sapien
gtatgttcttaaataacgtttatcagtgaattc

SEQ ID NO: 1024482 - DNA, 33 bp, Homo sapien
gtatgttcttaaataatgtttatcagtgaattc

SEQ ID NO: 1024483 - DNA, 33 bp, Homo sapien
gttgacctccaaaaccagctcatagaaaggatg

SEQ ID NO: 1024484 - DNA, 33 bp, Homo sapien
gttgacctccaaaaccggctcatagaaaggatg

SEQ ID NO: 1024485 - DNA, 33 bp, Homo sapien
taccaatcaaaacttcccacttagacatgggga

SEQ ID NO: 1024486 - DNA, 33 bp, Homo sapien
taccaatcaaaacttcgcacttagacatgggga

SEQ ID NO: 1024487 - DNA, 33 bp, Homo sapien
caagggctgctgcatactaacctggccccggcc

SEQ ID NO: 1024488 - DNA, 33 bp, Homo sapien
caagggctgctgcatagtaacctggccccggcc

SEQ ID NO: 1024489 - DNA, 33 bp, Homo sapien
cgtcagtgcgcctttccatccttagtccgtgtc

SEQ ID NO: 1024490 - DNA, 33 bp, Homo sapien
cgtcagtgcgcctttctatccttagtccgtgtc

SEQ ID NO: 1024491 - DNA, 33 bp, Homo sapien
cacattttgagtagcaaggagccaaaacatctc

SEQ ID NO: 1024492 - DNA, 33 bp, Homo sapien
cacattttgagtagcagggagccaaaacatctc

SEQ ID NO: 1024493 - DNA, 33 bp, Homo sapien
atggcctatgttttgaaactgagtctaatataa

SEQ ID NO: 1024494 - DNA, 33 bp, Homo sapien
atggcctatgttttgacactgagtctaatataa

SEQ ID NO: 1024495 - DNA, 33 bp, Homo sapien
attccagaagatccaacgacactgggttaaaac

SEQ ID NO: 1024496 - DNA, 33 bp, Homo sapien
attccagaagatccaaggacactgggttaaaac

SEQ ID NO: 1024497 - DNA, 33 bp, Homo sapien
ttacatgccatataataatgtttcagtcaagga

SEQ ID NO: 1024498 - DNA, 33 bp, Homo sapien
ttacatgccatataatgatgtttcagtcaagga

SEQ ID NO: 1024499 - DNA, 33 bp, Homo sapien
ttgaaagtaaaaggcaatcatgctgtttcaccc

SEQ ID NO: 1024500 - DNA, 33 bp, Homo sapien
ttgaaagtaaaaggcagtcatgctgtttcaccc

SEQ ID NO: 1024501 - DNA, 33 bp, Homo sapien
agctgtcacactggtacaggaatgtgttaatgg

SEQ ID NO: 1024502 - DNA, 33 bp, Homo sapien
agctgtcacactggtataggaatgtgttaatgg

SEQ ID NO: 1024503 - DNA, 33 bp, Homo sapien
aactctcttggaatgccaatctgagatgaccta

SEQ ID NO: 1024504 - DNA, 33 bp, Homo sapien
aactctcttggaatgcgaatctgagatgaccta

SEQ ID NO: 1024505 - DNA, 33 bp, Homo sapien
gttggtaagaatgaaccgcctcaaatatggcct

SEQ ID NO: 1024506 - DNA, 33 bp, Homo sapien
gttggtaagaatgaactgcctcaaatatggcct

SEQ ID NO: 1024507 - DNA, 33 bp, Homo sapien
tgtgatgcctgttatcgaatcagttcaaagtgg

SEQ ID NO: 1024508 - DNA, 33 bp, Homo sapien
tgtgatgcctgttatctaatcagttcaaagtgg

SEQ ID NO: 1024509 - DNA, 33 bp, Homo sapien
atttcttaagatatcacaaaccataattccata

SEQ ID NO: 1024510 - DNA, 33 bp, Homo sapien
atttcttaagatatcagaaaccataattccata

SEQ ID NO: 1024511 - DNA, 33 bp, Homo sapien
gtcagttgagctgaagacgttctagaccagcag

SEQ ID NO: 1024512 - DNA, 33 bp, Homo sapien
gtcagttgagctgaagtcgttctagaccagcag

SEQ ID NO: 1024513 - DNA, 33 bp, Homo sapien
aataaaattctgatccacggtacctgtgactgt

SEQ ID NO: 1024514 - DNA, 33 bp, Homo sapien
aataaaattctgatccccggtacctgtgactgt

SEQ ID NO: 1024515 - DNA, 33 bp, Homo sapien
agtgtctgcacctgaccagatgataccaaatga

SEQ ID NO: 1024516 - DNA, 33 bp, Homo sapien
agtgtctgcacctgactagatgataccaaatga

SEQ ID NO: 1024517 - DNA, 33 bp, Homo sapien
ggccccatgggtgccaaattttcttccttgtct

SEQ ID NO: 1024518 - DNA, 33 bp, Homo sapien
ggccccatgggtgccagattttcttccttgtct

SEQ ID NO: 1024519 - DNA, 33 bp, Homo sapien
aggtgggccttctcaacgtggaacaagggaagg

SEQ ID NO: 1024520 - DNA, 33 bp, Homo sapien
aggtgggccttctcaatgtggaacaagggaagg

SEQ ID NO: 1024521 - DNA, 33 bp, Homo sapien
tcatgattgtttctggaatctgtcctaaaaggc

SEQ ID NO: 1024522 - DNA, 33 bp, Homo sapien
tcatgattgtttctgggatctgtcctaaaaggc

SEQ ID NO: 1024523 - DNA, 33 bp, Homo sapien
ggatacttgcttgtacacattaggttgtgggat

SEQ ID NO: 1024524 - DNA, 33 bp, Homo sapien
ggatacttgcttgtacgcattaggttgtgggat

SEQ ID NO: 1024525 - DNA, 33 bp, Homo sapien
gcatcatgtccttcgaaccatatttagtattaa

SEQ ID NO: 1024526 - DNA, 33 bp, Homo sapien
gcatcatgtccttcgagccatatttagtattaa

SEQ ID NO: 1024527 - DNA, 33 bp, Homo sapien
cagaaatcaacacccaataagacaaacatctca

SEQ ID NO: 1024528 - DNA, 33 bp, Homo sapien
cagaaatcaacacccattaagacaaacatctca

SEQ ID NO: 1024529 - DNA, 33 bp, Homo sapien
gcagagaatgactctacctgccatgaaggtcag

SEQ ID NO: 1024530 - DNA, 33 bp, Homo sapien
gcagagaatgactctatctgccatgaaggtcag

SEQ ID NO: 1024531 - DNA, 33 bp, Homo sapien
aacttcttcaccttacaaaagaaaatggacctc

SEQ ID NO: 1024532 - DNA, 33 bp, Homo sapien
aacttcttcaccttacgaaagaaaatggacctc

SEQ ID NO: 1024533 - DNA, 33 bp, Homo sapien
gtatgctacttagaacagaattttctatcgtat

SEQ ID NO: 1024534 - DNA, 33 bp, Homo sapien
gtatgctacttagaaccgaattttctatcgtat

SEQ ID NO: 1024535 - DNA, 33 bp, Homo sapien
cttatactaaagcatcaccaatttgttttaata

SEQ ID NO: 1024536 - DNA, 33 bp, Homo sapien
cttatactaaagcatcgccaatttgttttaata

SEQ ID NO: 1024537 - DNA, 33 bp, Homo sapien
aggaaacccagagtaaagaaagcatcatgacct

SEQ ID NO: 1024538 - DNA, 33 bp, Homo sapien
aggaaacccagagtaaggaaagcatcatgacct

SEQ ID NO: 1024539 - DNA, 33 bp, Homo sapien
atgtttaatttttgtcaatatgttaagtgtgtc

SEQ ID NO: 1024540 - DNA, 33 bp, Homo sapien
atgtttaatttttgtcgatatgttaagtgtgtc

SEQ ID NO: 1024541 - DNA, 33 bp, Homo sapien
tgaagagaataattcacggcggatatatatttt

SEQ ID NO: 1024542 - DNA, 33 bp, Homo sapien
tgaagagaataattcatggcggatatatatttt

SEQ ID NO: 1024543 - DNA, 33 bp, Homo sapien
aattataattgacgaaaaaacacaggagactat

SEQ ID NO: 1024544 - DNA, 33 bp, Homo sapien
aattataattgacgaataaacacaggagactat

SEQ ID NO: 1024545 - DNA, 33 bp, Homo sapien
gccataatgactaccgaataaccacagccaaat

SEQ ID NO: 1024546 - DNA, 33 bp, Homo sapien
gccataatgactaccgtataaccacagccaaat

SEQ ID NO: 1024547 - DNA, 33 bp, Homo sapien
cctagaataaggtatgaagtcaaaatttaagtt

SEQ ID NO: 1024548 - DNA, 33 bp, Homo sapien
cctagaataaggtatggagtcaaaatttaagtt

SEQ ID NO: 1024549 - DNA, 33 bp, Homo sapien
tcaaaggcccctgggacctccactggagccagg

SEQ ID NO: 1024550 - DNA, 33 bp, Homo sapien
tcaaaggcccctgggatctccactggagccagg

SEQ ID NO: 1024551 - DNA, 33 bp, Homo sapien
tgggacatgattaccaacctcatggtccaggat

SEQ ID NO: 1024552 - DNA, 33 bp, Homo sapien
tgggacatgattaccaccctcatggtccaggat

SEQ ID NO: 1024553 - DNA, 33 bp, Homo sapien
cagataaaggaggagccacccgacaatcttgaa

SEQ ID NO: 1024554 - DNA, 33 bp, Homo sapien
cagataaaggaggagctacccgacaatcttgaa

SEQ ID NO: 1024555 - DNA, 33 bp, Homo sapien
ctcagccctccctcaccgtaagaactctcagca

SEQ ID NO: 1024556 - DNA, 33 bp, Homo sapien
ctcagccctccctcactgtaagaactctcagca

SEQ ID NO: 1024557 - DNA, 33 bp, Homo sapien
ggtctttagcaaactactaggttttcagtaatt

SEQ ID NO: 1024558 - DNA, 33 bp, Homo sapien
ggtctttagcaaactattaggttttcagtaatt

SEQ ID NO: 1024559 - DNA, 33 bp, Homo sapien
gtttgtacaataatgacaatcatgtatggtctg

SEQ ID NO: 1024560 - DNA, 33 bp, Homo sapien
gtttgtacaataatgataatcatgtatggtctg

SEQ ID NO: 1024561 - DNA, 33 bp, Homo sapien
gtaaaaaccacaatgcacccttatctctccttc

SEQ ID NO: 1024562 - DNA, 33 bp, Homo sapien
gtaaaaaccacaatgcgcccttatctctccttc

SEQ ID NO: 1024563 - DNA, 33 bp, Homo sapien
atcatcttcttatccaaaacctacctcaggaca

SEQ ID NO: 1024564 - DNA, 33 bp, Homo sapien
atcatcttcttatccacaacctacctcaggaca

SEQ ID NO: 1024565 - DNA, 33 bp, Homo sapien
agaaagccaaagtgaaccattgtctaagacctg

SEQ ID NO: 1024566 - DNA, 33 bp, Homo sapien
agaaagccaaagtgaagcattgtctaagacctg

SEQ ID NO: 1024567 - DNA, 33 bp, Homo sapien
tttggttcatatcagccatagagacagcaatcc

SEQ ID NO: 1024568 - DNA, 33 bp, Homo sapien
tttggttcatatcagctatagagacagcaatcc

SEQ ID NO: 1024569 - DNA, 33 bp, Homo sapien
gataaatatacaaatgaacaatggctggaccat

SEQ ID NO: 1024570 - DNA, 33 bp, Homo sapien
gataaatatacaaatggacaatggctggaccat

SEQ ID NO: 1024571 - DNA, 33 bp, Homo sapien
aaatactttcaaataacgctgaattcctttggg

SEQ ID NO: 1024572 - DNA, 33 bp, Homo sapien
aaatactttcaaataatgctgaattcctttggg

SEQ ID NO: 1024573 - DNA, 33 bp, Homo sapien
gatgtgctattttataacttccagtgcctagaa

SEQ ID NO: 1024574 - DNA, 33 bp, Homo sapien
gatgtgctattttataccttccagtgcctagaa

SEQ ID NO: 1024575 - DNA, 33 bp, Homo sapien
ttagttcatctttaaaagtttggggcaaacatt

SEQ ID NO: 1024576 - DNA, 33 bp, Homo sapien
ttagttcatctttaaaggtttggggcaaacatt

SEQ ID NO: 1024577 - DNA, 33 bp, Homo sapien
tttaaatgttcaaaacgccagtgtactcatctg

SEQ ID NO: 1024578 - DNA, 33 bp, Homo sapien
tttaaatgttcaaaactccagtgtactcatctg

SEQ ID NO: 1024579 - DNA, 33 bp, Homo sapien
tgcatgggatcatctccactcaaggtctgagtt

SEQ ID NO: 1024580 - DNA, 33 bp, Homo sapien
tgcatgggatcatctctactcaaggtctgagtt

SEQ ID NO: 1024581 - DNA, 33 bp, Homo sapien
ctacattggaaatttacagtcaaagattgtggc

SEQ ID NO: 1024582 - DNA, 33 bp, Homo sapien
ctacattggaaatttagagtcaaagattgtggc

SEQ ID NO: 1024583 - DNA, 33 bp, Homo sapien
gatgagaagtctttatcactgctccagaccaga

SEQ ID NO: 1024584 - DNA, 33 bp, Homo sapien
gatgagaagtctttattactgctccagaccaga

SEQ ID NO: 1024585 - DNA, 33 bp, Homo sapien
tgcatctcactcaccacaaccaatggaactaga

SEQ ID NO: 1024586 - DNA, 33 bp, Homo sapien
tgcatctcactcaccataaccaatggaactaga

SEQ ID NO: 1024587 - DNA, 33 bp, Homo sapien
cccaaattcccatctcccttctgtgtttcatgg

SEQ ID NO: 1024588 - DNA, 33 bp, Homo sapien
cccaaattcccatctctcttctgtgtttcatgg

SEQ ID NO: 1024589 - DNA, 33 bp, Homo sapien
ataagcaacagataaactgacagatagagacat

SEQ ID NO: 1024590 - DNA, 33 bp, Homo sapien
ataagcaacagataaattgacagatagagacat

SEQ ID NO: 1024591 - DNA, 33 bp, Homo sapien
tctcaaatggttttccaacaggtaggggtgggc

SEQ ID NO: 1024592 - DNA, 33 bp, Homo sapien
tctcaaatggttttccgacaggtaggggtgggc

SEQ ID NO: 1024593 - DNA, 33 bp, Homo sapien
tacacagactctgttacaggcgatgccatgaac

SEQ ID NO: 1024594 - DNA, 33 bp, Homo sapien
tacacagactctgttataggcgatgccatgaac

SEQ ID NO: 1024595 - DNA, 33 bp, Homo sapien
ttgagcattcgttcaagcatgtttccaagttat

SEQ ID NO: 1024596 - DNA, 33 bp, Homo sapien
ttgagcattcgttcaatcatgtttccaagttat

SEQ ID NO: 1024597 - DNA, 33 bp, Homo sapien
ctcatactgtttttgaaggaaggttaagatact

SEQ ID NO: 1024598 - DNA, 33 bp, Homo sapien
ctcatactgtttttgagggaaggttaagatact

SEQ ID NO: 1024599 - DNA, 33 bp, Homo sapien
aaataaatgccaagaacggtcaaaattttcctt

SEQ ID NO: 1024600 - DNA, 33 bp, Homo sapien
aaataaatgccaagaatggtcaaaattttcctt

SEQ ID NO: 1024601 - DNA, 33 bp, Homo sapien
tgcagcttttctgccccgaatgagttctgagtt

SEQ ID NO: 1024602 - DNA, 33 bp, Homo sapien
tgcagcttttctgccctgaatgagttctgagtt

SEQ ID NO: 1024603 - DNA, 33 bp, Homo sapien
ctgacttcctccatgaagcaaaggctttattcc

SEQ ID NO: 1024604 - DNA, 33 bp, Homo sapien
ctgacttcctccatgaggcaaaggctttattcc

SEQ ID NO: 1024605 - DNA, 33 bp, Homo sapien
cataatgttggaaaaggcatcagtgcaatttct

SEQ ID NO: 1024606 - DNA, 33 bp, Homo sapien
cataatgttggaaaagtcatcagtgcaatttct

SEQ ID NO: 1024607 - DNA, 33 bp, Homo sapien
agacttactctgccgaagaagccaaagtagctc

SEQ ID NO: 1024608 - DNA, 33 bp, Homo sapien
agacttactctgccgatgaagccaaagtagctc

SEQ ID NO: 1024609 - DNA, 33 bp, Homo sapien
tatttctttatttccaatccaggtgagtatatg

SEQ ID NO: 1024610 - DNA, 33 bp, Homo sapien
tatttctttatttccagtccaggtgagtatatg

SEQ ID NO: 1024611 - DNA, 33 bp, Homo sapien
gccaatgcagagaaaactgaaccacaagatgga

SEQ ID NO: 1024612 - DNA, 33 bp, Homo sapien
gccaatgcagagaaaagtgaaccacaagatgga

SEQ ID NO: 1024613 - DNA, 33 bp, Homo sapien
caactgagaccctctaacttcactttcatgata

SEQ ID NO: 1024614 - DNA, 33 bp, Homo sapien
caactgagaccctctatcttcactttcatgata

SEQ ID NO: 1024615 - DNA, 33 bp, Homo sapien
acaggtagaaaattaggaacagaagaggacaga

SEQ ID NO: 1024616 - DNA, 33 bp, Homo sapien
acaggtagaaaattagtaacagaagaggacaga

SEQ ID NO: 1024617 - DNA, 33 bp, Homo sapien
ttggtctcctcacctcacttcatactcctatat

SEQ ID NO: 1024618 - DNA, 33 bp, Homo sapien
ttggtctcctcacctcgcttcatactcctatat

SEQ ID NO: 1024619 - DNA, 33 bp, Homo sapien
cttacccaagctggtcccataatcagtgtcagc

SEQ ID NO: 1024620 - DNA, 33 bp, Homo sapien
cttacccaagctggtcgcataatcagtgtcagc

SEQ ID NO: 1024621 - DNA, 33 bp, Homo sapien
tcatggcacaaagttaccagcagaatgttcaga

SEQ ID NO: 1024622 - DNA, 33 bp, Homo sapien
tcatggcacaaagttagcagcagaatgttcaga

SEQ ID NO: 1024623 - DNA, 33 bp, Homo sapien
aaaactcataatagcaaccttcctgcttcacaa

SEQ ID NO: 1024624 - DNA, 33 bp, Homo sapien
aaaactcataatagcacccttcctgcttcacaa

SEQ ID NO: 1024625 - DNA, 33 bp, Homo sapien
gtgtttgatgcctggcaaggtgtgattctcacc

SEQ ID NO: 1024626 - DNA, 33 bp, Homo sapien
gtgtttgatgcctggcgaggtgtgattctcacc

SEQ ID NO: 1024627 - DNA, 33 bp, Homo sapien
actgacagttacatgcaccaagatatgtcctca

SEQ ID NO: 1024628 - DNA, 33 bp, Homo sapien
actgacagttacatgcgccaagatatgtcctca

SEQ ID NO: 1024629 - DNA, 33 bp, Homo sapien
ttcattctatctaatcgcatttttgtacccctt

SEQ ID NO: 1024630 - DNA, 33 bp, Homo sapien
ttcattctatctaatctcatttttgtacccctt

SEQ ID NO: 1024631 - DNA, 33 bp, Homo sapien
agagcatacaactcacccgtgtgtaatagttat

SEQ ID NO: 1024632 - DNA, 33 bp, Homo sapien
agagcatacaactcactcgtgtgtaatagttat

SEQ ID NO: 1024633 - DNA, 33 bp, Homo sapien
tacttcaaattatctaccaatctgctgtatttt

SEQ ID NO: 1024634 - DNA, 33 bp, Homo sapien
tacttcaaattatctatcaatctgctgtatttt

SEQ ID NO: 1024635 - DNA, 33 bp, Homo sapien
aatcaccttagggccacgtactagacaaatagg

SEQ ID NO: 1024636 - DNA, 33 bp, Homo sapien
aatcaccttagggccatgtactagacaaatagg

SEQ ID NO: 1024637 - DNA, 33 bp, Homo sapien
atcccctgtatttcacgcccctcatctgaaaac

SEQ ID NO: 1024638 - DNA, 33 bp, Homo sapien
atcccctgtatttcactcccctcatctgaaaac

SEQ ID NO: 1024639 - DNA, 33 bp, Homo sapien
tttttccaccaaaaccgcatacgcagtagttag

SEQ ID NO: 1024640 - DNA, 33 bp, Homo sapien
tttttccaccaaaacctcatacgcagtagttag

SEQ ID NO: 1024641 - DNA, 33 bp, Homo sapien
gataaagtgacacaaagaaatcaatatttcaga

SEQ ID NO: 1024642 - DNA, 33 bp, Homo sapien
gataaagtgacacaaataaatcaatatttcaga

SEQ ID NO: 1024643 - DNA, 33 bp, Homo sapien
ccacaaatccttaaagacaaattagtggcaata

SEQ ID NO: 1024644 - DNA, 33 bp, Homo sapien
ccacaaatccttaaaggcaaattagtggcaata

SEQ ID NO: 1024645 - DNA, 33 bp, Homo sapien
tcttaataatctgtcaagtgtgagaagaggaat

SEQ ID NO: 1024646 - DNA, 33 bp, Homo sapien
tcttaataatctgtcatgtgtgagaagaggaat

SEQ ID NO: 1024647 - DNA, 33 bp, Homo sapien
gacatacccattcttaagcaaaccaatagttga

SEQ ID NO: 1024648 - DNA, 33 bp, Homo sapien
gacatacccattcttaggcaaaccaatagttga

SEQ ID NO: 1024649 - DNA, 33 bp, Homo sapien
ctgtgaaatgtcttaacctgtgtaggcagccgt

SEQ ID NO: 1024650 - DNA, 33 bp, Homo sapien
ctgtgaaatgtcttaatctgtgtaggcagccgt

SEQ ID NO: 1024651 - DNA, 33 bp, Homo sapien
caaaaatcatccttaacgtgcttggtgggttgc

SEQ ID NO: 1024652 - DNA, 33 bp, Homo sapien
caaaaatcatccttaatgtgcttggtgggttgc

SEQ ID NO: 1024653 - DNA, 33 bp, Homo sapien
aggacacacttctgtaagtcaagaaaagcatga

SEQ ID NO: 1024654 - DNA, 33 bp, Homo sapien
aggacacacttctgtacgtcaagaaaagcatga

SEQ ID NO: 1024655 - DNA, 33 bp, Homo sapien
aatgttatgtaagaaaatgttgcatgtaaaccc

SEQ ID NO: 1024656 - DNA, 33 bp, Homo sapien
aatgttatgtaagaaagtgttgcatgtaaaccc

SEQ ID NO: 1024657 - DNA, 33 bp, Homo sapien
atcttccatttctgaaagtcacagtccaaaata

SEQ ID NO: 1024658 - DNA, 33 bp, Homo sapien
atcttccatttctgaaggtcacagtccaaaata

SEQ ID NO: 1024659 - DNA, 33 bp, Homo sapien
ccttgatttgagcccaatgcctattttggactg

SEQ ID NO: 1024660 - DNA, 33 bp, Homo sapien
ccttgatttgagcccagtgcctattttggactg

SEQ ID NO: 1024661 - DNA, 33 bp, Homo sapien
aagggcttttgctatcaaactacacgattgaga

SEQ ID NO: 1024662 - DNA, 33 bp, Homo sapien
aagggcttttgctatcgaactacacgattgaga

SEQ ID NO: 1024663 - DNA, 33 bp, Homo sapien
ctgaagacctagagatgaatgctacgttattga

SEQ ID NO: 1024664 - DNA, 33 bp, Homo sapien
ctgaagacctagagattaatgctacgttattga

SEQ ID NO: 1024665 - DNA, 33 bp, Homo sapien
aattaaaaagtcttaaagatttctggcaaatta

SEQ ID NO: 1024666 - DNA, 33 bp, Homo sapien
aattaaaaagtcttaaggatttctggcaaatta

SEQ ID NO: 1024667 - DNA, 33 bp, Homo sapien
cacataaacaatggtcgacttacttcaaactat

SEQ ID NO: 1024668 - DNA, 33 bp, Homo sapien
cacataaacaatggtctacttacttcaaactat

SEQ ID NO: 1024669 - DNA, 33 bp, Homo sapien
tttcaagtgactggaaaaatgttgataccattg

SEQ ID NO: 1024670 - DNA, 33 bp, Homo sapien
tttcaagtgactggaagaatgttgataccattg

SEQ ID NO: 1024671 - DNA, 33 bp, Homo sapien
gcaaaatcagctcaagcctgtttgccataaggc

SEQ ID NO: 1024672 - DNA, 33 bp, Homo sapien
gcaaaatcagctcaagtctgtttgccataaggc

SEQ ID NO: 1024673 - DNA, 33 bp, Homo sapien
ataaaatagaatgcaccgatgcactgtgcacca

SEQ ID NO: 1024674 - DNA, 33 bp, Homo sapien
ataaaatagaatgcactgatgcactgtgcacca

SEQ ID NO: 1024675 - DNA, 33 bp, Homo sapien
tttgcaggattctacaccttattttatcaaaat

SEQ ID NO: 1024676 - DNA, 33 bp, Homo sapien
tttgcaggattctacagcttattttatcaaaat

SEQ ID NO: 1024677 - DNA, 33 bp, Homo sapien
accacccggtgaagcccagtccaaacttctgac

SEQ ID NO: 1024678 - DNA, 33 bp, Homo sapien
accacccggtgaagcctagtccaaacttctgac

SEQ ID NO: 1024679 - DNA, 33 bp, Homo sapien
gcagactttatttagacgattagcataggtgta

SEQ ID NO: 1024680 - DNA, 33 bp, Homo sapien
gcagactttatttagatgattagcataggtgta

SEQ ID NO: 1024681 - DNA, 33 bp, Homo sapien
aagagcagttcaccgaagctcaacattggcatc

SEQ ID NO: 1024682 - DNA, 33 bp, Homo sapien
aagagcagttcaccgatgctcaacattggcatc

SEQ ID NO: 1024683 - DNA, 33 bp, Homo sapien
atttcactctttcttacggctgcaagtattcca

SEQ ID NO: 1024684 - DNA, 33 bp, Homo sapien
atttcactctttcttatggctgcaagtattcca

SEQ ID NO: 1024685 - DNA, 33 bp, Homo sapien
ataattaccgtgtcaagtaatttcatattagct

SEQ ID NO: 1024686 - DNA, 33 bp, Homo sapien
ataattaccgtgtcaattaatttcatattagct

SEQ ID NO: 1024687 - DNA, 33 bp, Homo sapien
ttttgttatcacttaaacaatgttcacaacatc

SEQ ID NO: 1024688 - DNA, 33 bp, Homo sapien
ttttgttatcacttaagcaatgttcacaacatc

SEQ ID NO: 1024689 - DNA, 33 bp, Homo sapien
aactctaatggagataaacagggagattaatgt

SEQ ID NO: 1024690 - DNA, 33 bp, Homo sapien
aactctaatggagatatacagggagattaatgt

SEQ ID NO: 1024691 - DNA, 33 bp, Homo sapien
ctgctccactgaccaaacattcctctgtctttc

SEQ ID NO: 1024692 - DNA, 33 bp, Homo sapien
ctgctccactgaccaaccattcctctgtctttc

SEQ ID NO: 1024693 - DNA, 33 bp, Homo sapien
tttgcctttcataaataaatctggtgtataata

SEQ ID NO: 1024694 - DNA, 33 bp, Homo sapien
tttgcctttcataaatgaatctggtgtataata

SEQ ID NO: 1024695 - DNA, 33 bp, Homo sapien
tacatttcaaaagtccacaatgctattattttc

SEQ ID NO: 1024696 - DNA, 33 bp, Homo sapien
tacatttcaaaagtcctcaatgctattattttc

SEQ ID NO: 1024697 - DNA, 33 bp, Homo sapien
tctctcatctaagaagccctacagtttccagtt

SEQ ID NO: 1024698 - DNA, 33 bp, Homo sapien
tctctcatctaagaagtcctacagtttccagtt

SEQ ID NO: 1024699 - DNA, 33 bp, Homo sapien
tgttatcattacaccaagtcattataagcccgt

SEQ ID NO: 1024700 - DNA, 33 bp, Homo sapien
tgttatcattacaccaggtcattataagcccgt

SEQ ID NO: 1024701 - DNA, 33 bp, Homo sapien
cagagccaaaccgtataagcgtgaatgcagatt

SEQ ID NO: 1024702 - DNA, 33 bp, Homo sapien
cagagccaaaccgtatcagcgtgaatgcagatt

SEQ ID NO: 1024703 - DNA, 33 bp, Homo sapien
tatccagtgtgcaagacgaagctgagtatttgc

SEQ ID NO: 1024704 - DNA, 33 bp, Homo sapien
tatccagtgtgcaagatgaagctgagtatttgc

SEQ ID NO: 1024705 - DNA, 33 bp, Homo sapien
gggctaatgcggaagacgctggcaataatgtag

SEQ ID NO: 1024706 - DNA, 33 bp, Homo sapien
gggctaatgcggaagatgctggcaataatgtag

SEQ ID NO: 1024707 - DNA, 33 bp, Homo sapien
ccaggtcaaatgacccaaattcaaagataggga

SEQ ID NO: 1024708 - DNA, 33 bp, Homo sapien
ccaggtcaaatgacccgaattcaaagataggga

SEQ ID NO: 1024709 - DNA, 33 bp, Homo sapien
agcaagttctgcttcaaatgaaaagcttagcct

SEQ ID NO: 1024710 - DNA, 33 bp, Homo sapien
agcaagttctgcttcagatgaaaagcttagcct

SEQ ID NO: 1024711 - DNA, 33 bp, Homo sapien
ccattagtgaataccacgaaaggtcactggatt

SEQ ID NO: 1024712 - DNA, 33 bp, Homo sapien
ccattagtgaataccatgaaaggtcactggatt

SEQ ID NO: 1024713 - DNA, 33 bp, Homo sapien
gtatatagctacagtactaatgatgcacgtaga

SEQ ID NO: 1024714 - DNA, 33 bp, Homo sapien
gtatatagctacagtattaatgatgcacgtaga

SEQ ID NO: 1024715 - DNA, 33 bp, Homo sapien
tgatataagtgttctggaactagataatggcaa

SEQ ID NO: 1024716 - DNA, 33 bp, Homo sapien
tgatataagtgttctgtaactagataatggcaa

SEQ ID NO: 1024717 - DNA, 33 bp, Homo sapien
aggccatgagaagtgaatatcaataatataagc

SEQ ID NO: 1024718 - DNA, 33 bp, Homo sapien
aggccatgagaagtgactatcaataatataagc

SEQ ID NO: 1024719 - DNA, 33 bp, Homo sapien
tagagacatgtgcagcaagatggagaggatctt

SEQ ID NO: 1024720 - DNA, 33 bp, Homo sapien
tagagacatgtgcagcgagatggagaggatctt

SEQ ID NO: 1024721 - DNA, 33 bp, Homo sapien
acaaatggtttctaaacggataattcggtgaat

SEQ ID NO: 1024722 - DNA, 33 bp, Homo sapien
acaaatggtttctaaatggataattcggtgaat

SEQ ID NO: 1024723 - DNA, 33 bp, Homo sapien
aaattaagagtggaaaaaacttctgatggcatt

SEQ ID NO: 1024724 - DNA, 33 bp, Homo sapien
aaattaagagtggaaacaacttctgatggcatt

SEQ ID NO: 1024725 - DNA, 33 bp, Homo sapien
atttgttggactcatacgtcgcctttgaaaagt

SEQ ID NO: 1024726 - DNA, 33 bp, Homo sapien
atttgttggactcatatgtcgcctttgaaaagt

SEQ ID NO: 1024727 - DNA, 33 bp, Homo sapien
caagaagaacaacaaaacactactgaaagaagt

SEQ ID NO: 1024728 - DNA, 33 bp, Homo sapien
caagaagaacaacaaatcactactgaaagaagt

SEQ ID NO: 1024729 - DNA, 33 bp, Homo sapien
aaagacaggtgataaacataaagctgaaaggca

SEQ ID NO: 1024730 - DNA, 33 bp, Homo sapien
aaagacaggtgataaagataaagctgaaaggca

SEQ ID NO: 1024731 - DNA, 33 bp, Homo sapien
tcagacccctcctcaacgtaaaagcttggcaat

SEQ ID NO: 1024732 - DNA, 33 bp, Homo sapien
tcagacccctcctcaatgtaaaagcttggcaat

SEQ ID NO: 1024733 - DNA, 33 bp, Homo sapien
tttacccattattgaactgggctgtttaatgtt

SEQ ID NO: 1024734 - DNA, 33 bp, Homo sapien
tttacccattattgaattgggctgtttaatgtt

SEQ ID NO: 1024735 - DNA, 33 bp, Homo sapien
gggataaggtagtgcacattaggaaaacatttt

SEQ ID NO: 1024736 - DNA, 33 bp, Homo sapien
gggataaggtagtgcatattaggaaaacatttt

SEQ ID NO: 1024737 - DNA, 33 bp, Homo sapien
cagttggtccattagactagattagagatgaat

SEQ ID NO: 1024738 - DNA, 33 bp, Homo sapien
cagttggtccattagattagattagagatgaat

SEQ ID NO: 1024739 - DNA, 33 bp, Homo sapien
atagttattccgatgaaagactaagttgtcagg

SEQ ID NO: 1024740 - DNA, 33 bp, Homo sapien
atagttattccgatgagagactaagttgtcagg

SEQ ID NO: 1024741 - DNA, 33 bp, Homo sapien
agaatgaagtaaaacaaggaaatatactccaaa

SEQ ID NO: 1024742 - DNA, 33 bp, Homo sapien
agaatgaagtaaaacagggaaatatactccaaa

SEQ ID NO: 1024743 - DNA, 33 bp, Homo sapien
ttataatttctctcctaacctcagtgagtatct

SEQ ID NO: 1024744 - DNA, 33 bp, Homo sapien
ttataatttctctcctgacctcagtgagtatct

SEQ ID NO: 1024745 - DNA, 33 bp, Homo sapien
gaaaaatctaatacacaggttcatcagcagact

SEQ ID NO: 1024746 - DNA, 33 bp, Homo sapien
gaaaaatctaatacacgggttcatcagcagact

SEQ ID NO: 1024747 - DNA, 33 bp, Homo sapien
cactctcttctggcccacaaattttcttttgaa

SEQ ID NO: 1024748 - DNA, 33 bp, Homo sapien
cactctcttctggcccgcaaattttcttttgaa

SEQ ID NO: 1024749 - DNA, 33 bp, Homo sapien
cgttttgcaagtttaacgaccatgattaaatat

SEQ ID NO: 1024750 - DNA, 33 bp, Homo sapien
cgttttgcaagtttaatgaccatgattaaatat

SEQ ID NO: 1024751 - DNA, 33 bp, Homo sapien
gtttggcaaatgcataatatcagccaattgtgg

SEQ ID NO: 1024752 - DNA, 33 bp, Homo sapien
gtttggcaaatgcatagtatcagccaattgtgg

SEQ ID NO: 1024753 - DNA, 33 bp, Homo sapien
tgacatatttttctcaacctacttcagatgtcc

SEQ ID NO: 1024754 - DNA, 33 bp, Homo sapien
tgacatatttttctcagcctacttcagatgtcc

SEQ ID NO: 1024755 - DNA, 33 bp, Homo sapien
gaaaggagggtactggaatgttgaagatgacta

SEQ ID NO: 1024756 - DNA, 33 bp, Homo sapien
gaaaggagggtactggtatgttgaagatgacta

SEQ ID NO: 1024757 - DNA, 33 bp, Homo sapien
cacttaccaatattaacgtagttcaatccaatt

SEQ ID NO: 1024758 - DNA, 33 bp, Homo sapien
cacttaccaatattaatgtagttcaatccaatt

SEQ ID NO: 1024759 - DNA, 33 bp, Homo sapien
gctatgactcctccaaaatagtatctgaattgt

SEQ ID NO: 1024760 - DNA, 33 bp, Homo sapien
gctatgactcctccaagatagtatctgaattgt

SEQ ID NO: 1024761 - DNA, 33 bp, Homo sapien
ccaggccttgattctactaaaaggagccagaat

SEQ ID NO: 1024762 - DNA, 33 bp, Homo sapien
ccaggccttgattctattaaaaggagccagaat

SEQ ID NO: 1024763 - DNA, 33 bp, Homo sapien
acattagtaaattaagaataatgggggtcagtt

SEQ ID NO: 1024764 - DNA, 33 bp, Homo sapien
acattagtaaattaaggataatgggggtcagtt

SEQ ID NO: 1024765 - DNA, 33 bp, Homo sapien
tatgcagagaaagagacgatagcagcagtggga

SEQ ID NO: 1024766 - DNA, 33 bp, Homo sapien
tatgcagagaaagagatgatagcagcagtggga

SEQ ID NO: 1024767 - DNA, 33 bp, Homo sapien
cacttcatgacaggcaccttacctacacagcca

SEQ ID NO: 1024768 - DNA, 33 bp, Homo sapien
cacttcatgacaggcagcttacctacacagcca

SEQ ID NO: 1024769 - DNA, 33 bp, Homo sapien
acaagatgtgggattaagaaatggagcaactat

SEQ ID NO: 1024770 - DNA, 33 bp, Homo sapien
acaagatgtgggattaggaaatggagcaactat

SEQ ID NO: 1024771 - DNA, 33 bp, Homo sapien
catactttattcactacgctccagagaaaaaaa

SEQ ID NO: 1024772 - DNA, 33 bp, Homo sapien
catactttattcactatgctccagagaaaaaaa

SEQ ID NO: 1024773 - DNA, 33 bp, Homo sapien
gattcactgaatgacaaagtgttcatattttga

SEQ ID NO: 1024774 - DNA, 33 bp, Homo sapien
gattcactgaatgacagagtgttcatattttga

SEQ ID NO: 1024775 - DNA, 33 bp, Homo sapien
agtctatagtacagcaatatgtcagttgaatct

SEQ ID NO: 1024776 - DNA, 33 bp, Homo sapien
agtctatagtacagcagtatgtcagttgaatct

SEQ ID NO: 1024777 - DNA, 33 bp, Homo sapien
ggcccacaggaacctcaccatcctgaaggaaag

SEQ ID NO: 1024778 - DNA, 33 bp, Homo sapien
ggcccacaggaacctcgccatcctgaaggaaag

SEQ ID NO: 1024779 - DNA, 33 bp, Homo sapien
gcacattcttagttaacagtttcactgaagtac

SEQ ID NO: 1024780 - DNA, 33 bp, Homo sapien
gcacattcttagttaatagtttcactgaagtac

SEQ ID NO: 1024781 - DNA, 33 bp, Homo sapien
gaaagataaggactcactgaggaatataggcaa

SEQ ID NO: 1024782 - DNA, 33 bp, Homo sapien
gaaagataaggactcattgaggaatataggcaa

SEQ ID NO: 1024783 - DNA, 33 bp, Homo sapien
tctttacagagagaaggcccagtcagtgagtag

SEQ ID NO: 1024784 - DNA, 33 bp, Homo sapien
tctttacagagagaagtcccagtcagtgagtag

SEQ ID NO: 1024785 - DNA, 33 bp, Homo sapien
tgccctttctcgctgaccttgtttaggagcctt

SEQ ID NO: 1024786 - DNA, 33 bp, Homo sapien
tgccctttctcgctgatcttgtttaggagcctt

SEQ ID NO: 1024787 - DNA, 33 bp, Homo sapien
cacctgaatcacctgaagaacggtcacagactt

SEQ ID NO: 1024788 - DNA, 33 bp, Homo sapien
cacctgaatcacctgaggaacggtcacagactt

SEQ ID NO: 1024789 - DNA, 33 bp, Homo sapien
ttagatccttcacacaagaccaaaaagaacatc

SEQ ID NO: 1024790 - DNA, 33 bp, Homo sapien
ttagatccttcacacaggaccaaaaagaacatc

SEQ ID NO: 1024791 - DNA, 33 bp, Homo sapien
agactcatttgaaaaccataaatgacagtcatg

SEQ ID NO: 1024792 - DNA, 33 bp, Homo sapien
agactcatttgaaaactataaatgacagtcatg

SEQ ID NO: 1024793 - DNA, 33 bp, Homo sapien
caacctgcacaggaaacgaatacagcaagtatt

SEQ ID NO: 1024794 - DNA, 33 bp, Homo sapien
caacctgcacaggaaatgaatacagcaagtatt

SEQ ID NO: 1024795 - DNA, 33 bp, Homo sapien
tcaaagtgtcagcgggaccatattctctacaga

SEQ ID NO: 1024796 - DNA, 33 bp, Homo sapien
tcaaagtgtcagcggggccatattctctacaga

SEQ ID NO: 1024797 - DNA, 33 bp, Homo sapien
aaatgtgtgttggttacatagatactatgccac

SEQ ID NO: 1024798 - DNA, 33 bp, Homo sapien
aaatgtgtgttggttatatagatactatgccac

SEQ ID NO: 1024799 - DNA, 33 bp, Homo sapien
aagcccatggaagttaaaagaccacagaagaaa

SEQ ID NO: 1024800 - DNA, 33 bp, Homo sapien
aagcccatggaagttagaagaccacagaagaaa

SEQ ID NO: 1024801 - DNA, 33 bp, Homo sapien
cttagagtatattgcagtgagaggaaaggtatg

SEQ ID NO: 1024802 - DNA, 33 bp, Homo sapien
cttagagtatattgcattgagaggaaaggtatg

SEQ ID NO: 1024803 - DNA, 33 bp, Homo sapien
gtcagttgttcctatacgtgtgggtgttgtggg

SEQ ID NO: 1024804 - DNA, 33 bp, Homo sapien
gtcagttgttcctatatgtgtgggtgttgtggg

SEQ ID NO: 1024805 - DNA, 33 bp, Homo sapien
acagccccatctctcaaaagaatctgggtatat

SEQ ID NO: 1024806 - DNA, 33 bp, Homo sapien
acagccccatctctcagaagaatctgggtatat

SEQ ID NO: 1024807 - DNA, 33 bp, Homo sapien
ttacaaatttgtattaagccacattcaaaatca

SEQ ID NO: 1024808 - DNA, 33 bp, Homo sapien
ttacaaatttgtattatgccacattcaaaatca

SEQ ID NO: 1024809 - DNA, 33 bp, Homo sapien
ttcaaatttaagtaaaagcctcatattccttga

SEQ ID NO: 1024810 - DNA, 33 bp, Homo sapien
ttcaaatttaagtaaaggcctcatattccttga

SEQ ID NO: 1024811 - DNA, 33 bp, Homo sapien
gaggattattacagaccaaacagtaattttaag

SEQ ID NO: 1024812 - DNA, 33 bp, Homo sapien
gaggattattacagacgaaacagtaattttaag

SEQ ID NO: 1024813 - DNA, 33 bp, Homo sapien
cttcatcttcctctaacgaacagtcaatccctt

SEQ ID NO: 1024814 - DNA, 33 bp, Homo sapien
cttcatcttcctctaatgaacagtcaatccctt

SEQ ID NO: 1024815 - DNA, 33 bp, Homo sapien
aatggtatattagaaaaatgatttgtgtacatt

SEQ ID NO: 1024816 - DNA, 33 bp, Homo sapien
aatggtatattagaaacatgatttgtgtacatt

SEQ ID NO: 1024817 - DNA, 33 bp, Homo sapien
gtatgttatctcatgacctgactttttagctac

SEQ ID NO: 1024818 - DNA, 33 bp, Homo sapien
gtatgttatctcatgagctgactttttagctac

SEQ ID NO: 1024819 - DNA, 33 bp, Homo sapien
tctgttactgttcctgaaacattggtaagtggt

SEQ ID NO: 1024820 - DNA, 33 bp, Homo sapien
tctgttactgttcctgcaacattggtaagtggt

SEQ ID NO: 1024821 - DNA, 33 bp, Homo sapien
gtgtttataagtgtgcaaacaaattgaagagca

SEQ ID NO: 1024822 - DNA, 33 bp, Homo sapien
gtgtttataagtgtgcgaacaaattgaagagca

SEQ ID NO: 1024823 - DNA, 33 bp, Homo sapien
caccatggtgacagatcaaatccacagatatca

SEQ ID NO: 1024824 - DNA, 33 bp, Homo sapien
caccatggtgacagatgaaatccacagatatca

SEQ ID NO: 1024825 - DNA, 33 bp, Homo sapien
acaatgtgtgtgtgtaggcctatatgcatctat

SEQ ID NO: 1024826 - DNA, 33 bp, Homo sapien
acaatgtgtgtgtgtatgcctatatgcatctat

SEQ ID NO: 1024827 - DNA, 33 bp, Homo sapien
ttccatggaactgaaccatctaattaaacctct

SEQ ID NO: 1024828 - DNA, 33 bp, Homo sapien
ttccatggaactgaactatctaattaaacctct

SEQ ID NO: 1024829 - DNA, 33 bp, Homo sapien
ctgtctgggccacaaggaccaagctacattgct

SEQ ID NO: 1024830 - DNA, 33 bp, Homo sapien
ctgtctgggccacaagtaccaagctacattgct

SEQ ID NO: 1024831 - DNA, 33 bp, Homo sapien
cacaaacatatgtcctaactcacaaacagtctc

SEQ ID NO: 1024832 - DNA, 33 bp, Homo sapien
cacaaacatatgtcctgactcacaaacagtctc

SEQ ID NO: 1024833 - DNA, 33 bp, Homo sapien
atttactttcattacaacaattttcacatttca

SEQ ID NO: 1024834 - DNA, 33 bp, Homo sapien
atttactttcattacagcaattttcacatttca

SEQ ID NO: 1024835 - DNA, 33 bp, Homo sapien
gtatttacaactcatgcagcatacagtccaggt

SEQ ID NO: 1024836 - DNA, 33 bp, Homo sapien
gtatttacaactcatggagcatacagtccaggt

SEQ ID NO: 1024837 - DNA, 33 bp, Homo sapien
agaactttagatactccattggcagctgctgaa

SEQ ID NO: 1024838 - DNA, 33 bp, Homo sapien
agaactttagatactctattggcagctgctgaa

SEQ ID NO: 1024839 - DNA, 33 bp, Homo sapien
catcacacatacagaactatactaggggaattt

SEQ ID NO: 1024840 - DNA, 33 bp, Homo sapien
catcacacatacagaattatactaggggaattt

SEQ ID NO: 1024841 - DNA, 33 bp, Homo sapien
gagagctttaagaatacaagtgcccatcaagag

SEQ ID NO: 1024842 - DNA, 33 bp, Homo sapien
gagagctttaagaatagaagtgcccatcaagag

SEQ ID NO: 1024843 - DNA, 33 bp, Homo sapien
ctttttaatctagaaacgtagagtgcagctaga

SEQ ID NO: 1024844 - DNA, 33 bp, Homo sapien
ctttttaatctagaaatgtagagtgcagctaga

SEQ ID NO: 1024845 - DNA, 33 bp, Homo sapien
acatcatggaatagaacagcaccaataggttgt

SEQ ID NO: 1024846 - DNA, 33 bp, Homo sapien
acatcatggaatagaatagcaccaataggttgt

SEQ ID NO: 1024847 - DNA, 33 bp, Homo sapien
gctttttgaaaaagataatactgaactgtgtca

SEQ ID NO: 1024848 - DNA, 33 bp, Homo sapien
gctttttgaaaaagatgatactgaactgtgtca

SEQ ID NO: 1024849 - DNA, 33 bp, Homo sapien
cctccttctgttattaagtgtcaggtactctcc

SEQ ID NO: 1024850 - DNA, 33 bp, Homo sapien
cctccttctgttattaggtgtcaggtactctcc

SEQ ID NO: 1024851 - DNA, 33 bp, Homo sapien
caatggactataggacagcaacactagaggcag

SEQ ID NO: 1024852 - DNA, 33 bp, Homo sapien
caatggactataggacggcaacactagaggcag

SEQ ID NO: 1024853 - DNA, 33 bp, Homo sapien
tatattttggagatagaacttatggtggattga

SEQ ID NO: 1024854 - DNA, 33 bp, Homo sapien
tatattttggagataggacttatggtggattga

SEQ ID NO: 1024855 - DNA, 33 bp, Homo sapien
tttttggcagataaaaatcttctcaagttgagc

SEQ ID NO: 1024856 - DNA, 33 bp, Homo sapien
tttttggcagataaaagtcttctcaagttgagc

SEQ ID NO: 1024857 - DNA, 33 bp, Homo sapien
cagagtccacagatagcaggcttgttaccaggt

SEQ ID NO: 1024858 - DNA, 33 bp, Homo sapien
cagagtccacagatagtaggcttgttaccaggt

SEQ ID NO: 1024859 - DNA, 33 bp, Homo sapien
ttattttgagcttgacaactatcctgtgagtca

SEQ ID NO: 1024860 - DNA, 33 bp, Homo sapien
ttattttgagcttgacgactatcctgtgagtca

SEQ ID NO: 1024861 - DNA, 33 bp, Homo sapien
ctgagctccatacaaactgaaaagactgccaaa

SEQ ID NO: 1024862 - DNA, 33 bp, Homo sapien
ctgagctccatacaaagtgaaaagactgccaaa

SEQ ID NO: 1024863 - DNA, 33 bp, Homo sapien
taaaaggtacaagccacaaatcttggcagcatc

SEQ ID NO: 1024864 - DNA, 33 bp, Homo sapien
taaaaggtacaagccataaatcttggcagcatc

SEQ ID NO: 1024865 - DNA, 33 bp, Homo sapien
gagtgctactgtactcacgatgccactgacaag

SEQ ID NO: 1024866 - DNA, 33 bp, Homo sapien
gagtgctactgtactcgcgatgccactgacaag

SEQ ID NO: 1024867 - DNA, 33 bp, Homo sapien
aaaaatatgttactgaataaatgaactgtatct

SEQ ID NO: 1024868 - DNA, 33 bp, Homo sapien
aaaaatatgttactgagtaaatgaactgtatct

SEQ ID NO: 1024869 - DNA, 33 bp, Homo sapien
ctctactggagatgagaccaaggaaactcagca

SEQ ID NO: 1024870 - DNA, 33 bp, Homo sapien
ctctactggagatgaggccaaggaaactcagca

SEQ ID NO: 1024871 - DNA, 33 bp, Homo sapien
ctgcagtgttataggacaaataatgaagtgtgg

SEQ ID NO: 1024872 - DNA, 33 bp, Homo sapien
ctgcagtgttataggagaaataatgaagtgtgg

SEQ ID NO: 1024873 - DNA, 33 bp, Homo sapien
cagtgagaagttttgcccgttcaagtcattttc

SEQ ID NO: 1024874 - DNA, 33 bp, Homo sapien
cagtgagaagttttgctcgttcaagtcattttc

SEQ ID NO: 1024875 - DNA, 33 bp, Homo sapien
tgcccagaggttgttgcaaatgaaagttatgtt

SEQ ID NO: 1024876 - DNA, 33 bp, Homo sapien
tgcccagaggttgttggaaatgaaagttatgtt

SEQ ID NO: 1024877 - DNA, 33 bp, Homo sapien
gttgcagcatatgccggaatttcttttcttttt

SEQ ID NO: 1024878 - DNA, 33 bp, Homo sapien
gttgcagcatatgccgtaatttcttttcttttt

SEQ ID NO: 1024879 - DNA, 33 bp, Homo sapien
tatttttgaggacccactatcctgtttctcata

SEQ ID NO: 1024880 - DNA, 33 bp, Homo sapien
tatttttgaggacccattatcctgtttctcata

SEQ ID NO: 1024881 - DNA, 33 bp, Homo sapien
aaatgctggtggggtcacagagaaaaaggaatg

SEQ ID NO: 1024882 - DNA, 33 bp, Homo sapien
aaatgctggtggggtcgcagagaaaaaggaatg

SEQ ID NO: 1024883 - DNA, 33 bp, Homo sapien
aaaggaaccagtgagcaattgtgagaccctaca

SEQ ID NO: 1024884 - DNA, 33 bp, Homo sapien
aaaggaaccagtgagcgattgtgagaccctaca

SEQ ID NO: 1024885 - DNA, 33 bp, Homo sapien
gatggggaaatgaaaacggatgcaatatgaaag

SEQ ID NO: 1024886 - DNA, 33 bp, Homo sapien
gatggggaaatgaaaatggatgcaatatgaaag

SEQ ID NO: 1024887 - DNA, 33 bp, Homo sapien
tagcattttaatttgcacaggaagagagggatg

SEQ ID NO: 1024888 - DNA, 33 bp, Homo sapien
tagcattttaatttgcgcaggaagagagggatg

SEQ ID NO: 1024889 - DNA, 33 bp, Homo sapien
tggtgatgagaaaggacattcaaatattcaaga

SEQ ID NO: 1024890 - DNA, 33 bp, Homo sapien
tggtgatgagaaaggagattcaaatattcaaga

SEQ ID NO: 1024891 - DNA, 33 bp, Homo sapien
gactttttaagccgcaaatcagattatgtctaa

SEQ ID NO: 1024892 - DNA, 33 bp, Homo sapien
gactttttaagccgcatatcagattatgtctaa

SEQ ID NO: 1024893 - DNA, 33 bp, Homo sapien
tgagatcacctcgctacgaaaaatgcaaaaatt

SEQ ID NO: 1024894 - DNA, 33 bp, Homo sapien
tgagatcacctcgctatgaaaaatgcaaaaatt

SEQ ID NO: 1024895 - DNA, 33 bp, Homo sapien
cacgttttgtacttagaactgaaacattttaaa

SEQ ID NO: 1024896 - DNA, 33 bp, Homo sapien
cacgttttgtacttaggactgaaacattttaaa

SEQ ID NO: 1024897 - DNA, 33 bp, Homo sapien
ttcaaggggcaggtaacagaactttgtagaaat

SEQ ID NO: 1024898 - DNA, 33 bp, Homo sapien
ttcaaggggcaggtaatagaactttgtagaaat

SEQ ID NO: 1024899 - DNA, 33 bp, Homo sapien
tatggaatttaaaataactggttggtgaatcac

SEQ ID NO: 1024900 - DNA, 33 bp, Homo sapien
tatggaatttaaaatatctggttggtgaatcac

SEQ ID NO: 1024901 - DNA, 33 bp, Homo sapien
aaagttatgatccaacacagacatctggcatta

SEQ ID NO: 1024902 - DNA, 33 bp, Homo sapien
aaagttatgatccaacgcagacatctggcatta

SEQ ID NO: 1024903 - DNA, 33 bp, Homo sapien
cgtcttcagcagaatgcatgttttctgtctctc

SEQ ID NO: 1024904 - DNA, 33 bp, Homo sapien
cgtcttcagcagaatgtatgttttctgtctctc

SEQ ID NO: 1024905 - DNA, 33 bp, Homo sapien
cttaccctggctcccacaagttgtatgcaagtt

SEQ ID NO: 1024906 - DNA, 33 bp, Homo sapien
cttaccctggctcccagaagttgtatgcaagtt

SEQ ID NO: 1024907 - DNA, 33 bp, Homo sapien
gagagattcaaagacagatctgagcagacagaa

SEQ ID NO: 1024908 - DNA, 33 bp, Homo sapien
gagagattcaaagacatatctgagcagacagaa

SEQ ID NO: 1024909 - DNA, 33 bp, Homo sapien
tgctgttcactgacgacatgatcgtatacctag

SEQ ID NO: 1024910 - DNA, 33 bp, Homo sapien
tgctgttcactgacgatatgatcgtatacctag

SEQ ID NO: 1024911 - DNA, 33 bp, Homo sapien
attgccttgctgcatccgaaactgttataaagt

SEQ ID NO: 1024912 - DNA, 33 bp, Homo sapien
attgccttgctgcatctgaaactgttataaagt

SEQ ID NO: 1024913 - DNA, 33 bp, Homo sapien
atttaccatttaccaaaccagatacctgtctct

SEQ ID NO: 1024914 - DNA, 33 bp, Homo sapien
atttaccatttaccaagccagatacctgtctct

SEQ ID NO: 1024915 - DNA, 33 bp, Homo sapien
gtggggctgctaatgaagcacaagcaggactgg

SEQ ID NO: 1024916 - DNA, 33 bp, Homo sapien
gtggggctgctaatgacgcacaagcaggactgg

SEQ ID NO: 1024917 - DNA, 33 bp, Homo sapien
catagcttatatatgaagaaagcacttttgtaa

SEQ ID NO: 1024918 - DNA, 33 bp, Homo sapien
catagcttatatatgaggaaagcacttttgtaa

SEQ ID NO: 1024919 - DNA, 33 bp, Homo sapien
atgctatcatctagacccagttaccaaagtgtc

SEQ ID NO: 1024920 - DNA, 33 bp, Homo sapien
atgctatcatctagactcagttaccaaagtgtc

SEQ ID NO: 1024921 - DNA, 33 bp, Homo sapien
tggaacacgaacactaaaaattcacaagtaaac

SEQ ID NO: 1024922 - DNA, 33 bp, Homo sapien
tggaacacgaacactataaattcacaagtaaac

SEQ ID NO: 1024923 - DNA, 33 bp, Homo sapien
ttaattcatattgaacaagagaggcagtcagtt

SEQ ID NO: 1024924 - DNA, 33 bp, Homo sapien
ttaattcatattgaactagagaggcagtcagtt

SEQ ID NO: 1024925 - DNA, 33 bp, Homo sapien
tattcagcaccgtctacgtactaaatcttatgt

SEQ ID NO: 1024926 - DNA, 33 bp, Homo sapien
tattcagcaccgtctatgtactaaatcttatgt

SEQ ID NO: 1024927 - DNA, 33 bp, Homo sapien
attattaagtgaaccacctgatttgaaatcttt

SEQ ID NO: 1024928 - DNA, 33 bp, Homo sapien
attattaagtgaaccatctgatttgaaatcttt

SEQ ID NO: 1024929 - DNA, 33 bp, Homo sapien
tcactcctctttagcaatgataccctgaaaact

SEQ ID NO: 1024930 - DNA, 33 bp, Homo sapien
tcactcctctttagcactgataccctgaaaact

SEQ ID NO: 1024931 - DNA, 33 bp, Homo sapien
ctggatgagaaaaagaaacagagccagggaaat

SEQ ID NO: 1024932 - DNA, 33 bp, Homo sapien
ctggatgagaaaaagagacagagccagggaaat

SEQ ID NO: 1024933 - DNA, 33 bp, Homo sapien
gaaagtacattggatccagatggtaaatagcat

SEQ ID NO: 1024934 - DNA, 33 bp, Homo sapien
gaaagtacattggatctagatggtaaatagcat

SEQ ID NO: 1024935 - DNA, 33 bp, Homo sapien
ttctgtctctagggaactgcctatccatttata

SEQ ID NO: 1024936 - DNA, 33 bp, Homo sapien
ttctgtctctagggaattgcctatccatttata

SEQ ID NO: 1024937 - DNA, 33 bp, Homo sapien
aaagccatctaataaccgtaaaactgtggaaat

SEQ ID NO: 1024938 - DNA, 33 bp, Homo sapien
aaagccatctaataactgtaaaactgtggaaat

SEQ ID NO: 1024939 - DNA, 33 bp, Homo sapien
aacaacaaaaaaatgactcatccccaaaacttg

SEQ ID NO: 1024940 - DNA, 33 bp, Homo sapien
aacaacaaaaaaatgattcatccccaaaacttg

SEQ ID NO: 1024941 - DNA, 33 bp, Homo sapien
ggtaaaattttcaggcacctccatcctgttcac

SEQ ID NO: 1024942 - DNA, 33 bp, Homo sapien
ggtaaaattttcaggcgcctccatcctgttcac

SEQ ID NO: 1024943 - DNA, 33 bp, Homo sapien
aaatagttatttcaccaagactggataaatggt

SEQ ID NO: 1024944 - DNA, 33 bp, Homo sapien
aaatagttatttcaccgagactggataaatggt

SEQ ID NO: 1024945 - DNA, 33 bp, Homo sapien
gtggctctttccatccagagatccaataagaat

SEQ ID NO: 1024946 - DNA, 33 bp, Homo sapien
gtggctctttccatccggagatccaataagaat

SEQ ID NO: 1024947 - DNA, 33 bp, Homo sapien
tcccaagcaactaaaactgggggcatctatata

SEQ ID NO: 1024948 - DNA, 33 bp, Homo sapien
tcccaagcaactaaaattgggggcatctatata

SEQ ID NO: 1024949 - DNA, 33 bp, Homo sapien
aacgaggaacatcttaggcggcggcaagcaaga

SEQ ID NO: 1024950 - DNA, 33 bp, Homo sapien
aacgaggaacatcttatgcggcggcaagcaaga

SEQ ID NO: 1024951 - DNA, 33 bp, Homo sapien
atttacaaactatctacacagcaacacctgaga

SEQ ID NO: 1024952 - DNA, 33 bp, Homo sapien
atttacaaactatctatacagcaacacctgaga

SEQ ID NO: 1024953 - DNA, 33 bp, Homo sapien
tatctttgcactactacgtgtgtactatttatc

SEQ ID NO: 1024954 - DNA, 33 bp, Homo sapien
tatctttgcactactatgtgtgtactatttatc

SEQ ID NO: 1024955 - DNA, 33 bp, Homo sapien
tgaacaccataatgtcagaatgctgtcatgggt

SEQ ID NO: 1024956 - DNA, 33 bp, Homo sapien
tgaacaccataatgtctgaatgctgtcatgggt

SEQ ID NO: 1024957 - DNA, 33 bp, Homo sapien
attttttatcaatgacaacaacaaattccccac

SEQ ID NO: 1024958 - DNA, 33 bp, Homo sapien
attttttatcaatgaccacaacaaattccccac

SEQ ID NO: 1024959 - DNA, 33 bp, Homo sapien
acaacttcaaaattcaaataagatggtgcgtaa

SEQ ID NO: 1024960 - DNA, 33 bp, Homo sapien
acaacttcaaaattcagataagatggtgcgtaa

SEQ ID NO: 1024961 - DNA, 33 bp, Homo sapien
taactcccatcaccaaattaacgtatttaacaa

SEQ ID NO: 1024962 - DNA, 33 bp, Homo sapien
taactcccatcaccaagttaacgtatttaacaa

SEQ ID NO: 1024963 - DNA, 33 bp, Homo sapien
tatattttagggttaactgaacaatcaagttat

SEQ ID NO: 1024964 - DNA, 33 bp, Homo sapien
tatattttagggttaattgaacaatcaagttat

SEQ ID NO: 1024965 - DNA, 33 bp, Homo sapien
aatttggaggctgacacatttcgtttgccagtc

SEQ ID NO: 1024966 - DNA, 33 bp, Homo sapien
aatttggaggctgacatatttcgtttgccagtc

SEQ ID NO: 1024967 - DNA, 33 bp, Homo sapien
aataaccacatacttaccattctattactcttt

SEQ ID NO: 1024968 - DNA, 33 bp, Homo sapien
aataaccacatacttatcattctattactcttt

SEQ ID NO: 1024969 - DNA, 33 bp, Homo sapien
acttccttctcaaggcacaagatttaagacaga

SEQ ID NO: 1024970 - DNA, 33 bp, Homo sapien
acttccttctcaaggctcaagatttaagacaga

SEQ ID NO: 1024971 - DNA, 33 bp, Homo sapien
gtatgggaaacggatgaattagctaactttatc

SEQ ID NO: 1024972 - DNA, 33 bp, Homo sapien
gtatgggaaacggatgcattagctaactttatc

SEQ ID NO: 1024973 - DNA, 33 bp, Homo sapien
actaggtagagcagtgaaaataatttaactttc

SEQ ID NO: 1024974 - DNA, 33 bp, Homo sapien
actaggtagagcagtggaaataatttaactttc

SEQ ID NO: 1024975 - DNA, 33 bp, Homo sapien
tgagatgatccaagaccaaaacctaggacattt

SEQ ID NO: 1024976 - DNA, 33 bp, Homo sapien
tgagatgatccaagactaaaacctaggacattt

SEQ ID NO: 1024977 - DNA, 33 bp, Homo sapien
agagacagaaaaggtacagctactctgaacttg

SEQ ID NO: 1024978 - DNA, 33 bp, Homo sapien
agagacagaaaaggtatagctactctgaacttg

SEQ ID NO: 1024979 - DNA, 33 bp, Homo sapien
tggccatttttgtatacatttggccgcaacatt

SEQ ID NO: 1024980 - DNA, 33 bp, Homo sapien
tggccatttttgtatatatttggccgcaacatt

SEQ ID NO: 1024981 - DNA, 33 bp, Homo sapien
ggcttgaggagaaaaaagcaggtatgaacccca

SEQ ID NO: 1024982 - DNA, 33 bp, Homo sapien
ggcttgaggagaaaaaggcaggtatgaacccca

SEQ ID NO: 1024983 - DNA, 33 bp, Homo sapien
agtttgacataactcggaatagttgtatcagaa

SEQ ID NO: 1024984 - DNA, 33 bp, Homo sapien
agtttgacataactcgtaatagttgtatcagaa

SEQ ID NO: 1024985 - DNA, 33 bp, Homo sapien
gtatgatcaggggcaacgagtttgttattaaag

SEQ ID NO: 1024986 - DNA, 33 bp, Homo sapien
gtatgatcaggggcaatgagtttgttattaaag

SEQ ID NO: 1024987 - DNA, 33 bp, Homo sapien
aatacttgatgtttacagacaatacaatttaaa

SEQ ID NO: 1024988 - DNA, 33 bp, Homo sapien
aatacttgatgtttacggacaatacaatttaaa

SEQ ID NO: 1024989 - DNA, 33 bp, Homo sapien
tcaacactgaattgaacgatcagagtcatggaa

SEQ ID NO: 1024990 - DNA, 33 bp, Homo sapien
tcaacactgaattgaaggatcagagtcatggaa

SEQ ID NO: 1024991 - DNA, 33 bp, Homo sapien
accaatgaaagagagaatacagaactgcatatt

SEQ ID NO: 1024992 - DNA, 33 bp, Homo sapien
accaatgaaagagagattacagaactgcatatt

SEQ ID NO: 1024993 - DNA, 33 bp, Homo sapien
tctgtctctagattcaaccttactggtatcttt

SEQ ID NO: 1024994 - DNA, 33 bp, Homo sapien
tctgtctctagattcatccttactggtatcttt

SEQ ID NO: 1024995 - DNA, 33 bp, Homo sapien
tgatattccaatgtcaatcattctgaaagactt

SEQ ID NO: 1024996 - DNA, 33 bp, Homo sapien
tgatattccaatgtcagtcattctgaaagactt

SEQ ID NO: 1024997 - DNA, 33 bp, Homo sapien
gaagaaattcatcctaataatgcatgaaaaagt

SEQ ID NO: 1024998 - DNA, 33 bp, Homo sapien
gaagaaattcatcctagtaatgcatgaaaaagt

SEQ ID NO: 1024999 - DNA, 33 bp, Homo sapien
gtcaggtatgactccaacttgtctgatgtccaa

SEQ ID NO: 1025000 - DNA, 33 bp, Homo sapien
gtcaggtatgactccatcttgtctgatgtccaa

SEQ ID NO: 1025001 - DNA, 33 bp, Homo sapien
tattgtatgttgaagaagacttgcatttttgta

SEQ ID NO: 1025002 - DNA, 33 bp, Homo sapien
tattgtatgttgaagacgacttgcatttttgta

SEQ ID NO: 1025003 - DNA, 33 bp, Homo sapien
atatatcttcattctaaccatgtaacgtattta

SEQ ID NO: 1025004 - DNA, 33 bp, Homo sapien
atatatcttcattctagccatgtaacgtattta

SEQ ID NO: 1025005 - DNA, 33 bp, Homo sapien
aagtgttagataagacaggcaaaattcaccttt

SEQ ID NO: 1025006 - DNA, 33 bp, Homo sapien
aagtgttagataagacgggcaaaattcaccttt

SEQ ID NO: 1025007 - DNA, 33 bp, Homo sapien
gaaaatgccttgttaacggaaatagaaactaac

SEQ ID NO: 1025008 - DNA, 33 bp, Homo sapien
gaaaatgccttgttaatggaaatagaaactaac

SEQ ID NO: 1025009 - DNA, 33 bp, Homo sapien
gtgtttgcatcatgctaaaacttggggcactcc

SEQ ID NO: 1025010 - DNA, 33 bp, Homo sapien
gtgtttgcatcatgcttaaacttggggcactcc

SEQ ID NO: 1025011 - DNA, 33 bp, Homo sapien
gataatcattccacaacctcaaaattaatcatt

SEQ ID NO: 1025012 - DNA, 33 bp, Homo sapien
gataatcattccacaatctcaaaattaatcatt

SEQ ID NO: 1025013 - DNA, 33 bp, Homo sapien
catgtggcttaatcacaatttacaatgattaat

SEQ ID NO: 1025014 - DNA, 33 bp, Homo sapien
catgtggcttaatcactatttacaatgattaat

SEQ ID NO: 1025015 - DNA, 33 bp, Homo sapien
agatatttccagttctaaaagcttataatgtga

SEQ ID NO: 1025016 - DNA, 33 bp, Homo sapien
agatatttccagttctgaaagcttataatgtga

SEQ ID NO: 1025017 - DNA, 33 bp, Homo sapien
tactgtttctatcataatactgtgcttgatatg

SEQ ID NO: 1025018 - DNA, 33 bp, Homo sapien
tactgtttctatcatagtactgtgcttgatatg

SEQ ID NO: 1025019 - DNA, 33 bp, Homo sapien
tttctaatataagtaaagttacagattttcctc

SEQ ID NO: 1025020 - DNA, 33 bp, Homo sapien
tttctaatataagtaacgttacagattttcctc

SEQ ID NO: 1025021 - DNA, 33 bp, Homo sapien
cacatcttatgcagcactgagaggaaaatctgt

SEQ ID NO: 1025022 - DNA, 33 bp, Homo sapien
cacatcttatgcagcattgagaggaaaatctgt

SEQ ID NO: 1025023 - DNA, 33 bp, Homo sapien
gctatgtgtagaatcaactgtcattatagggag

SEQ ID NO: 1025024 - DNA, 33 bp, Homo sapien
gctatgtgtagaatcagctgtcattatagggag

SEQ ID NO: 1025025 - DNA, 33 bp, Homo sapien
tcacatcttttacagtaactccaggtatggtgt

SEQ ID NO: 1025026 - DNA, 33 bp, Homo sapien
tcacatcttttacagtgactccaggtatggtgt

SEQ ID NO: 1025027 - DNA, 33 bp, Homo sapien
gcccaggaacacagaacagttttctacagacct

SEQ ID NO: 1025028 - DNA, 33 bp, Homo sapien
gcccaggaacacagaatagttttctacagacct

SEQ ID NO: 1025029 - DNA, 33 bp, Homo sapien
gtatacactccaagcaagaatcttggcatcaca

SEQ ID NO: 1025030 - DNA, 33 bp, Homo sapien
gtatacactccaagcaggaatcttggcatcaca

SEQ ID NO: 1025031 - DNA, 33 bp, Homo sapien
ttatgaacaaagccacagtcatttttatggcaa

SEQ ID NO: 1025032 - DNA, 33 bp, Homo sapien
ttatgaacaaagccacggtcatttttatggcaa

SEQ ID NO: 1025033 - DNA, 33 bp, Homo sapien
gataacttgcaagcagaccaacccagaacgcct

SEQ ID NO: 1025034 - DNA, 33 bp, Homo sapien
gataacttgcaagcagtccaacccagaacgcct

SEQ ID NO: 1025035 - DNA, 33 bp, Homo sapien
gggaatagtgaaagataagctgcatgagatggg

SEQ ID NO: 1025036 - DNA, 33 bp, Homo sapien
gggaatagtgaaagatcagctgcatgagatggg

SEQ ID NO: 1025037 - DNA, 33 bp, Homo sapien
aataaagccccaataggaaatagctaaggctac

SEQ ID NO: 1025038 - DNA, 33 bp, Homo sapien
aataaagccccaatagtaaatagctaaggctac

SEQ ID NO: 1025039 - DNA, 33 bp, Homo sapien
tctcccaatttctccacaaaaataacacaggag

SEQ ID NO: 1025040 - DNA, 33 bp, Homo sapien
tctcccaatttctccataaaaataacacaggag

SEQ ID NO: 1025041 - DNA, 33 bp, Homo sapien
gataagaaaaagaaacaaacagcatcaatattg

SEQ ID NO: 1025042 - DNA, 33 bp, Homo sapien
gataagaaaaagaaactaacagcatcaatattg

SEQ ID NO: 1025043 - DNA, 33 bp, Homo sapien
tgtgaggttattttccactgtcttccaactttg

SEQ ID NO: 1025044 - DNA, 33 bp, Homo sapien
tgtgaggttattttccgctgtcttccaactttg

SEQ ID NO: 1025045 - DNA, 33 bp, Homo sapien
tctgaggtcatggttaccttttgatcagaggtt

SEQ ID NO: 1025046 - DNA, 33 bp, Homo sapien
tctgaggtcatggttatcttttgatcagaggtt

SEQ ID NO: 1025047 - DNA, 33 bp, Homo sapien
gttttcatgatccagaaaaaaagctcttcattc

SEQ ID NO: 1025048 - DNA, 33 bp, Homo sapien
gttttcatgatccagataaaaagctcttcattc

SEQ ID NO: 1025049 - DNA, 33 bp, Homo sapien
agtactcatctttaaaattcatgaactgcccgg

SEQ ID NO: 1025050 - DNA, 33 bp, Homo sapien
agtactcatctttaaatttcatgaactgcccgg

SEQ ID NO: 1025051 - DNA, 33 bp, Homo sapien
ggtcattggcataggaaagataatgttgttaaa

SEQ ID NO: 1025052 - DNA, 33 bp, Homo sapien
ggtcattggcataggacagataatgttgttaaa

SEQ ID NO: 1025053 - DNA, 33 bp, Homo sapien
catagtactctagttacaggcacattgtgagaa

SEQ ID NO: 1025054 - DNA, 33 bp, Homo sapien
catagtactctagttataggcacattgtgagaa

SEQ ID NO: 1025055 - DNA, 33 bp, Homo sapien
tttaagtctcagccaaaaaagcttgttcttcac

SEQ ID NO: 1025056 - DNA, 33 bp, Homo sapien
tttaagtctcagccaacaaagcttgttcttcac

SEQ ID NO: 1025057 - DNA, 33 bp, Homo sapien
gtggtaaaatcagttgaaagcaatttatagaac

SEQ ID NO: 1025058 - DNA, 33 bp, Homo sapien
gtggtaaaatcagttggaagcaatttatagaac

SEQ ID NO: 1025059 - DNA, 33 bp, Homo sapien
cctaggtgggtaattgaaagaatatttgtgaga

SEQ ID NO: 1025060 - DNA, 33 bp, Homo sapien
cctaggtgggtaattgcaagaatatttgtgaga

SEQ ID NO: 1025061 - DNA, 33 bp, Homo sapien
agtgttaaaagcaagaacaaagtgcaaaagaat

SEQ ID NO: 1025062 - DNA, 33 bp, Homo sapien
agtgttaaaagcaagagcaaagtgcaaaagaat

SEQ ID NO: 1025063 - DNA, 33 bp, Homo sapien
attatacacctaatagccaaatgtgactatagt

SEQ ID NO: 1025064 - DNA, 33 bp, Homo sapien
attatacacctaataggcaaatgtgactatagt

SEQ ID NO: 1025065 - DNA, 33 bp, Homo sapien
cagcatatatgtgaaacggtgattttggactta

SEQ ID NO: 1025066 - DNA, 33 bp, Homo sapien
cagcatatatgtgaaatggtgattttggactta

SEQ ID NO: 1025067 - DNA, 33 bp, Homo sapien
tttctcattccttacaaacatagagcggaacag

SEQ ID NO: 1025068 - DNA, 33 bp, Homo sapien
tttctcattccttacatacatagagcggaacag

SEQ ID NO: 1025069 - DNA, 33 bp, Homo sapien
actgtacattagaaacagatgcactcctggaag

SEQ ID NO: 1025070 - DNA, 33 bp, Homo sapien
actgtacattagaaacggatgcactcctggaag

SEQ ID NO: 1025071 - DNA, 33 bp, Homo sapien
tgaaacattgtaaccactctgaaaacactggct

SEQ ID NO: 1025072 - DNA, 33 bp, Homo sapien
tgaaacattgtaaccattctgaaaacactggct

SEQ ID NO: 1025073 - DNA, 33 bp, Homo sapien
tatctagcataaggacaatgactacatggctca

SEQ ID NO: 1025074 - DNA, 33 bp, Homo sapien
tatctagcataaggacgatgactacatggctca

SEQ ID NO: 1025075 - DNA, 33 bp, Homo sapien
gacttgtaaattagtaagtgctgagattatatc

SEQ ID NO: 1025076 - DNA, 33 bp, Homo sapien
gacttgtaaattagtaggtgctgagattatatc

SEQ ID NO: 1025077 - DNA, 33 bp, Homo sapien
tccatcacagaaatcactacgtacagcagttat

SEQ ID NO: 1025078 - DNA, 33 bp, Homo sapien
tccatcacagaaatcagtacgtacagcagttat

SEQ ID NO: 1025079 - DNA, 33 bp, Homo sapien
gagggaactgttgtaacgcagataatctgttta

SEQ ID NO: 1025080 - DNA, 33 bp, Homo sapien
gagggaactgttgtaaggcagataatctgttta

SEQ ID NO: 1025081 - DNA, 33 bp, Homo sapien
ttttgtggaattttgacgttcctgggaaagcaa

SEQ ID NO: 1025082 - DNA, 33 bp, Homo sapien
ttttgtggaattttgaggttcctgggaaagcaa

SEQ ID NO: 1025083 - DNA, 33 bp, Homo sapien
gccactggagaaagtaagactccaccaatgcag

SEQ ID NO: 1025084 - DNA, 33 bp, Homo sapien
gccactggagaaagtaggactccaccaatgcag

SEQ ID NO: 1025085 - DNA, 33 bp, Homo sapien
gttctgtcagttaggcactgtgttcaccctgag

SEQ ID NO: 1025086 - DNA, 33 bp, Homo sapien
gttctgtcagttaggcgctgtgttcaccctgag

SEQ ID NO: 1025087 - DNA, 33 bp, Homo sapien
ttgtttctcagtgctcccaattatttagaaata

SEQ ID NO: 1025088 - DNA, 33 bp, Homo sapien
ttgtttctcagtgctctcaattatttagaaata

SEQ ID NO: 1025089 - DNA, 33 bp, Homo sapien
atacatattttagcaggagatgagtatccctta

SEQ ID NO: 1025090 - DNA, 33 bp, Homo sapien
atacatattttagcagtagatgagtatccctta

SEQ ID NO: 1025091 - DNA, 33 bp, Homo sapien
cagaagtctattttcagatgttgagtttggaac

SEQ ID NO: 1025092 - DNA, 33 bp, Homo sapien
cagaagtctattttcatatgttgagtttggaac

SEQ ID NO: 1025093 - DNA, 33 bp, Homo sapien
gattattgctttgtgacgatgataggaagtgac

SEQ ID NO: 1025094 - DNA, 33 bp, Homo sapien
gattattgctttgtgatgatgataggaagtgac

SEQ ID NO: 1025095 - DNA, 33 bp, Homo sapien
gttatctgtttagtaaatgtcaatgtttctcaa

SEQ ID NO: 1025096 - DNA, 33 bp, Homo sapien
gttatctgtttagtaagtgtcaatgtttctcaa

SEQ ID NO: 1025097 - DNA, 33 bp, Homo sapien
gaggctaatctttgaacaggactcaagaatgag

SEQ ID NO: 1025098 - DNA, 33 bp, Homo sapien
gaggctaatctttgaataggactcaagaatgag

SEQ ID NO: 1025099 - DNA, 33 bp, Homo sapien
gggggagacaaaataacgttcaatgtttgaggt

SEQ ID NO: 1025100 - DNA, 33 bp, Homo sapien
gggggagacaaaataatgttcaatgtttgaggt

SEQ ID NO: 1025101 - DNA, 33 bp, Homo sapien
ccttaagcttttgcaactatggaccaagaaagt

SEQ ID NO: 1025102 - DNA, 33 bp, Homo sapien
ccttaagcttttgcaagtatggaccaagaaagt

SEQ ID NO: 1025103 - DNA, 33 bp, Homo sapien
agtattgtagctgaaactggaagttcaaccatt

SEQ ID NO: 1025104 - DNA, 33 bp, Homo sapien
agtattgtagctgaaattggaagttcaaccatt

SEQ ID NO: 1025105 - DNA, 33 bp, Homo sapien
ttatgagagaagagacaaaaggaaagtttttaa

SEQ ID NO: 1025106 - DNA, 33 bp, Homo sapien
ttatgagagaagagacgaaaggaaagtttttaa

SEQ ID NO: 1025107 - DNA, 33 bp, Homo sapien
ccaatgtacctgtttacatacctaaaaagtgtg

SEQ ID NO: 1025108 - DNA, 33 bp, Homo sapien
ccaatgtacctgtttatatacctaaaaagtgtg

SEQ ID NO: 1025109 - DNA, 33 bp, Homo sapien
tttcagcaacaacagaacacattttagcacaaa

SEQ ID NO: 1025110 - DNA, 33 bp, Homo sapien
tttcagcaacaacagatcacattttagcacaaa

SEQ ID NO: 1025111 - DNA, 33 bp, Homo sapien
acaggagaagtttccaaagccaaagcttgctgt

SEQ ID NO: 1025112 - DNA, 33 bp, Homo sapien
acaggagaagtttccacagccaaagcttgctgt

SEQ ID NO: 1025113 - DNA, 33 bp, Homo sapien
agatagggtactagtacggatcgacaattgtgt

SEQ ID NO: 1025114 - DNA, 33 bp, Homo sapien
agatagggtactagtatggatcgacaattgtgt

SEQ ID NO: 1025115 - DNA, 33 bp, Homo sapien
ttagaatctcaaaggacagcacaactgcatata

SEQ ID NO: 1025116 - DNA, 33 bp, Homo sapien
ttagaatctcaaaggagagcacaactgcatata

SEQ ID NO: 1025117 - DNA, 33 bp, Homo sapien
cctatccaacctggaaatggaggtcacccttat

SEQ ID NO: 1025118 - DNA, 33 bp, Homo sapien
cctatccaacctggaactggaggtcacccttat

SEQ ID NO: 1025119 - DNA, 33 bp, Homo sapien
gagtcttttccaacacagtcaattctagccttt

SEQ ID NO: 1025120 - DNA, 33 bp, Homo sapien
gagtcttttccaacacggtcaattctagccttt

SEQ ID NO: 1025121 - DNA, 33 bp, Homo sapien
ttaggcagttcttgaaccactataaataaataa

SEQ ID NO: 1025122 - DNA, 33 bp, Homo sapien
ttaggcagttcttgaatcactataaataaataa

SEQ ID NO: 1025123 - DNA, 33 bp, Homo sapien
tgcaaagattagtatacgaatgctcatagcctc

SEQ ID NO: 1025124 - DNA, 33 bp, Homo sapien
tgcaaagattagtatatgaatgctcatagcctc

SEQ ID NO: 1025125 - DNA, 33 bp, Homo sapien
cagacatagattcctaaactttttgtgttaaac

SEQ ID NO: 1025126 - DNA, 33 bp, Homo sapien
cagacatagattcctacactttttgtgttaaac

SEQ ID NO: 1025127 - DNA, 33 bp, Homo sapien
ggctattgacaatcctaaggattaccacgttta

SEQ ID NO: 1025128 - DNA, 33 bp, Homo sapien
ggctattgacaatcctgaggattaccacgttta

SEQ ID NO: 1025129 - DNA, 33 bp, Homo sapien
gatagcttggctaaataatctaaaagagaaaaa

SEQ ID NO: 1025130 - DNA, 33 bp, Homo sapien
gatagcttggctaaatgatctaaaagagaaaaa

SEQ ID NO: 1025131 - DNA, 33 bp, Homo sapien
ggaaagattactgatacgggcaaagtttcaggc

SEQ ID NO: 1025132 - DNA, 33 bp, Homo sapien
ggaaagattactgatatgggcaaagtttcaggc

SEQ ID NO: 1025133 - DNA, 33 bp, Homo sapien
ggtttctcttaactccacatggcatcttttctt

SEQ ID NO: 1025134 - DNA, 33 bp, Homo sapien
ggtttctcttaactccgcatggcatcttttctt

SEQ ID NO: 1025135 - DNA, 33 bp, Homo sapien
tctgagacattctatgacatactcttgaaagta

SEQ ID NO: 1025136 - DNA, 33 bp, Homo sapien
tctgagacattctatggcatactcttgaaagta

SEQ ID NO: 1025137 - DNA, 33 bp, Homo sapien
gcctcaacctattggcaacttcttgatcctctg

SEQ ID NO: 1025138 - DNA, 33 bp, Homo sapien
gcctcaacctattggctacttcttgatcctctg

SEQ ID NO: 1025139 - DNA, 33 bp, Homo sapien
agaccacattccctcaaaaaccacttcaaagcc

SEQ ID NO: 1025140 - DNA, 33 bp, Homo sapien
agaccacattccctcagaaaccacttcaaagcc

SEQ ID NO: 1025141 - DNA, 33 bp, Homo sapien
acaccgtggaatactacgtagccttgaaaaagg

SEQ ID NO: 1025142 - DNA, 33 bp, Homo sapien
acaccgtggaatactatgtagccttgaaaaagg

SEQ ID NO: 1025143 - DNA, 33 bp, Homo sapien
ataagcattttacctactagatggtcaaggaaa

SEQ ID NO: 1025144 - DNA, 33 bp, Homo sapien
ataagcattttacctattagatggtcaaggaaa

SEQ ID NO: 1025145 - DNA, 33 bp, Homo sapien
ttcttgtcgaaaaacacgaaagcaagaaaagag

SEQ ID NO: 1025146 - DNA, 33 bp, Homo sapien
ttcttgtcgaaaaacatgaaagcaagaaaagag

SEQ ID NO: 1025147 - DNA, 33 bp, Homo sapien
tcacagtagtccaaaaatattggctgaatttca

SEQ ID NO: 1025148 - DNA, 33 bp, Homo sapien
tcacagtagtccaaaactattggctgaatttca

SEQ ID NO: 1025149 - DNA, 33 bp, Homo sapien
gttcactcaaatacttcaaatcactcatgtctg

SEQ ID NO: 1025150 - DNA, 33 bp, Homo sapien
gttcactcaaatacttgaaatcactcatgtctg

SEQ ID NO: 1025151 - DNA, 33 bp, Homo sapien
aaaactgttagaaaaagttggagtgtgccattt

SEQ ID NO: 1025152 - DNA, 33 bp, Homo sapien
aaaactgttagaaaaatttggagtgtgccattt

SEQ ID NO: 1025153 - DNA, 33 bp, Homo sapien
atgtgtctctttctaaccctatctcaactcttc

SEQ ID NO: 1025154 - DNA, 33 bp, Homo sapien
atgtgtctctttctaatcctatctcaactcttc

SEQ ID NO: 1025155 - DNA, 33 bp, Homo sapien
cataattttccacttacgttgcttttggcagca

SEQ ID NO: 1025156 - DNA, 33 bp, Homo sapien
cataattttccacttaggttgcttttggcagca

SEQ ID NO: 1025157 - DNA, 33 bp, Homo sapien
gaattggggtcggaaaataagtagaggtcagat

SEQ ID NO: 1025158 - DNA, 33 bp, Homo sapien
gaattggggtcggaaactaagtagaggtcagat

SEQ ID NO: 1025159 - DNA, 33 bp, Homo sapien
atgccatctccattacaactattcagctctgcc

SEQ ID NO: 1025160 - DNA, 33 bp, Homo sapien
atgccatctccattacgactattcagctctgcc

SEQ ID NO: 1025161 - DNA, 33 bp, Homo sapien
ccagatgtcacagaaccgtcaatgtaaagtcta

SEQ ID NO: 1025162 - DNA, 33 bp, Homo sapien
ccagatgtcacagaactgtcaatgtaaagtcta

SEQ ID NO: 1025163 - DNA, 33 bp, Homo sapien
ggtgttatatgtaagaactatttgcttaatgtc

SEQ ID NO: 1025164 - DNA, 33 bp, Homo sapien
ggtgttatatgtaagagctatttgcttaatgtc

SEQ ID NO: 1025165 - DNA, 33 bp, Homo sapien
cgtgaaagaaatagaaaccttcaagcaggcatg

SEQ ID NO: 1025166 - DNA, 33 bp, Homo sapien
cgtgaaagaaatagaagccttcaagcaggcatg

SEQ ID NO: 1025167 - DNA, 33 bp, Homo sapien
aatactatctagtctccgaatttagagttaaaa

SEQ ID NO: 1025168 - DNA, 33 bp, Homo sapien
aatactatctagtctctgaatttagagttaaaa

SEQ ID NO: 1025169 - DNA, 33 bp, Homo sapien
ttcaatttccttattaacaatactgcctaaatt

SEQ ID NO: 1025170 - DNA, 33 bp, Homo sapien
ttcaatttccttattaccaatactgcctaaatt

SEQ ID NO: 1025171 - DNA, 33 bp, Homo sapien
tctttcttacacaacacgattcctttcagtaaa

SEQ ID NO: 1025172 - DNA, 33 bp, Homo sapien
tctttcttacacaacaggattcctttcagtaaa

SEQ ID NO: 1025173 - DNA, 33 bp, Homo sapien
gtaccaagcctgtaaccgtgaaatagcaaaaga

SEQ ID NO: 1025174 - DNA, 33 bp, Homo sapien
gtaccaagcctgtaactgtgaaatagcaaaaga

SEQ ID NO: 1025175 - DNA, 33 bp, Homo sapien
acttctttcaaatcagccagtcaaaattttttt

SEQ ID NO: 1025176 - DNA, 33 bp, Homo sapien
acttctttcaaatcaggcagtcaaaattttttt

SEQ ID NO: 1025177 - DNA, 33 bp, Homo sapien
cagttcctagcctggacgaatcagaaagtgtct

SEQ ID NO: 1025178 - DNA, 33 bp, Homo sapien
cagttcctagcctggatgaatcagaaagtgtct

SEQ ID NO: 1025179 - DNA, 33 bp, Homo sapien
cttgttttaaacatgacatagcttgtgaattag

SEQ ID NO: 1025180 - DNA, 33 bp, Homo sapien
cttgttttaaacatgatatagcttgtgaattag

SEQ ID NO: 1025181 - DNA, 33 bp, Homo sapien
tcttcaacattaaaggccaagattgttgcaaat

SEQ ID NO: 1025182 - DNA, 33 bp, Homo sapien
tcttcaacattaaaggtcaagattgttgcaaat

SEQ ID NO: 1025183 - DNA, 33 bp, Homo sapien
cactcatgctatagataactttggcaccattaa

SEQ ID NO: 1025184 - DNA, 33 bp, Homo sapien
cactcatgctatagatcactttggcaccattaa

SEQ ID NO: 1025185 - DNA, 33 bp, Homo sapien
atgctctaagaacagaaaagaactacatctagc

SEQ ID NO: 1025186 - DNA, 33 bp, Homo sapien
atgctctaagaacagagaagaactacatctagc

SEQ ID NO: 1025187 - DNA, 33 bp, Homo sapien
tacatcttctacttgccccctttagtccataat

SEQ ID NO: 1025188 - DNA, 33 bp, Homo sapien
tacatcttctacttgctccctttagtccataat

SEQ ID NO: 1025189 - DNA, 33 bp, Homo sapien
agctctactcaatgtaccggaccttgacgaggt

SEQ ID NO: 1025190 - DNA, 33 bp, Homo sapien
agctctactcaatgtatcggaccttgacgaggt

SEQ ID NO: 1025191 - DNA, 33 bp, Homo sapien
acccagaagtcacttacaatggcaaaaatagca

SEQ ID NO: 1025192 - DNA, 33 bp, Homo sapien
acccagaagtcacttagaatggcaaaaatagca

SEQ ID NO: 1025193 - DNA, 33 bp, Homo sapien
tctgctcagggtctcaataggatgaaattaaca

SEQ ID NO: 1025194 - DNA, 33 bp, Homo sapien
tctgctcagggtctcattaggatgaaattaaca

SEQ ID NO: 1025195 - DNA, 33 bp, Homo sapien
catcatctctttccaagtgtattatttttctct

SEQ ID NO: 1025196 - DNA, 33 bp, Homo sapien
catcatctctttccaattgtattatttttctct

SEQ ID NO: 1025197 - DNA, 33 bp, Homo sapien
accatattactttttcactggcaaagctttcga

SEQ ID NO: 1025198 - DNA, 33 bp, Homo sapien
accatattactttttcgctggcaaagctttcga

SEQ ID NO: 1025199 - DNA, 33 bp, Homo sapien
gtttatgtgccaagcactgctcaggtgttaggg

SEQ ID NO: 1025200 - DNA, 33 bp, Homo sapien
gtttatgtgccaagcattgctcaggtgttaggg

SEQ ID NO: 1025201 - DNA, 33 bp, Homo sapien
taagatctgccctccacagaatttcagtttagt

SEQ ID NO: 1025202 - DNA, 33 bp, Homo sapien
taagatctgccctccagagaatttcagtttagt

SEQ ID NO: 1025203 - DNA, 33 bp, Homo sapien
tgtcattactaccagaaacggaatgatgtcatt

SEQ ID NO: 1025204 - DNA, 33 bp, Homo sapien
tgtcattactaccagagacggaatgatgtcatt

SEQ ID NO: 1025205 - DNA, 33 bp, Homo sapien
gcatagtagagggaacaatcaatagaatgaaca

SEQ ID NO: 1025206 - DNA, 33 bp, Homo sapien
gcatagtagagggaacgatcaatagaatgaaca

SEQ ID NO: 1025207 - DNA, 33 bp, Homo sapien
cattacttaagtggagacatacagttaggataa

SEQ ID NO: 1025208 - DNA, 33 bp, Homo sapien
cattacttaagtggagtcatacagttaggataa

SEQ ID NO: 1025209 - DNA, 33 bp, Homo sapien
caaaaaagagaaagtcaagtcaggattcttgtt

SEQ ID NO: 1025210 - DNA, 33 bp, Homo sapien
caaaaaagagaaagtcgagtcaggattcttgtt

SEQ ID NO: 1025211 - DNA, 33 bp, Homo sapien
aggtagcagaaaagataaaccatttgcacatat

SEQ ID NO: 1025212 - DNA, 33 bp, Homo sapien
aggtagcagaaaagatgaaccatttgcacatat

SEQ ID NO: 1025213 - DNA, 33 bp, Homo sapien
cagcagaaaatgttagcccaaagaccataaaac

SEQ ID NO: 1025214 - DNA, 33 bp, Homo sapien
cagcagaaaatgttagtccaaagaccataaaac

SEQ ID NO: 1025215 - DNA, 33 bp, Homo sapien
gaaaatagtgaaagtacggaggtatggagatat

SEQ ID NO: 1025216 - DNA, 33 bp, Homo sapien
gaaaatagtgaaagtatggaggtatggagatat

SEQ ID NO: 1025217 - DNA, 33 bp, Homo sapien
aaggggattgcaggtgaactcaagggacagagt

SEQ ID NO: 1025218 - DNA, 33 bp, Homo sapien
aaggggattgcaggtgtactcaagggacagagt

SEQ ID NO: 1025219 - DNA, 33 bp, Homo sapien
ccaagctggctaagaccaattagacccaacacg

SEQ ID NO: 1025220 - DNA, 33 bp, Homo sapien
ccaagctggctaagacgaattagacccaacacg

SEQ ID NO: 1025221 - DNA, 33 bp, Homo sapien
gatcatattccttaaaccaaaaggatgcacagg

SEQ ID NO: 1025222 - DNA, 33 bp, Homo sapien
gatcatattccttaaatcaaaaggatgcacagg

SEQ ID NO: 1025223 - DNA, 33 bp, Homo sapien
ctttgaaggtaaagtaagggactataaactggg

SEQ ID NO: 1025224 - DNA, 33 bp, Homo sapien
ctttgaaggtaaagtaggggactataaactggg

SEQ ID NO: 1025225 - DNA, 33 bp, Homo sapien
atcactatttgaccgcccccatgtaggcaggga

SEQ ID NO: 1025226 - DNA, 33 bp, Homo sapien
atcactatttgaccgctcccatgtaggcaggga

SEQ ID NO: 1025227 - DNA, 33 bp, Homo sapien
ctgctgtaggttattaaggtagacagtgacaga

SEQ ID NO: 1025228 - DNA, 33 bp, Homo sapien
ctgctgtaggttattacggtagacagtgacaga

SEQ ID NO: 1025229 - DNA, 33 bp, Homo sapien
agcaggtaataaacacacataaccttcatcctc

SEQ ID NO: 1025230 - DNA, 33 bp, Homo sapien
agcaggtaataaacactcataaccttcatcctc

SEQ ID NO: 1025231 - DNA, 33 bp, Homo sapien
tctttgtgtacattccactaaggctgttaagca

SEQ ID NO: 1025232 - DNA, 33 bp, Homo sapien
tctttgtgtacattccgctaaggctgttaagca

SEQ ID NO: 1025233 - DNA, 33 bp, Homo sapien
catggagtttctttaacgttgactcatctaacc

SEQ ID NO: 1025234 - DNA, 33 bp, Homo sapien
catggagtttctttaatgttgactcatctaacc

SEQ ID NO: 1025235 - DNA, 33 bp, Homo sapien
gtatacttttgtcccccgctccaatgcagcaat

SEQ ID NO: 1025236 - DNA, 33 bp, Homo sapien
gtatacttttgtcccctgctccaatgcagcaat

SEQ ID NO: 1025237 - DNA, 33 bp, Homo sapien
tggtttgtcaagcctacagtcctggtgatggtg

SEQ ID NO: 1025238 - DNA, 33 bp, Homo sapien
tggtttgtcaagcctatagtcctggtgatggtg

SEQ ID NO: 1025239 - DNA, 33 bp, Homo sapien
tcagcattggctggccgagcatgaaaatctgcc

SEQ ID NO: 1025240 - DNA, 33 bp, Homo sapien
tcagcattggctggcctagcatgaaaatctgcc

SEQ ID NO: 1025241 - DNA, 33 bp, Homo sapien
cttggccaagtggtagaacagtatctgtatctt

SEQ ID NO: 1025242 - DNA, 33 bp, Homo sapien
cttggccaagtggtaggacagtatctgtatctt

SEQ ID NO: 1025243 - DNA, 33 bp, Homo sapien
tcaaataatcccccaaattagtcacaaggataa

SEQ ID NO: 1025244 - DNA, 33 bp, Homo sapien
tcaaataatcccccaagttagtcacaaggataa

SEQ ID NO: 1025245 - DNA, 33 bp, Homo sapien
caatgaatgttggacaccagaaaaggggtggac

SEQ ID NO: 1025246 - DNA, 33 bp, Homo sapien
caatgaatgttggacatcagaaaaggggtggac

SEQ ID NO: 1025247 - DNA, 33 bp, Homo sapien
tgggactcagtctatcactctctaaaacaggtt

SEQ ID NO: 1025248 - DNA, 33 bp, Homo sapien
tgggactcagtctatctctctctaaaacaggtt

SEQ ID NO: 1025249 - DNA, 33 bp, Homo sapien
ctccttatcctttataaatcacattatcttttc

SEQ ID NO: 1025250 - DNA, 33 bp, Homo sapien
ctccttatcctttatatatcacattatcttttc

SEQ ID NO: 1025251 - DNA, 33 bp, Homo sapien
gaatattccagaatggcatattgctacctgaac

SEQ ID NO: 1025252 - DNA, 33 bp, Homo sapien
gaatattccagaatggtatattgctacctgaac

SEQ ID NO: 1025253 - DNA, 33 bp, Homo sapien
aggttcatcaatgacaatggtaaaacatcgtgg

SEQ ID NO: 1025254 - DNA, 33 bp, Homo sapien
aggttcatcaatgacagtggtaaaacatcgtgg

SEQ ID NO: 1025255 - DNA, 33 bp, Homo sapien
gtcctggagtccactgaatatattgcttctatt

SEQ ID NO: 1025256 - DNA, 33 bp, Homo sapien
gtcctggagtccactgcatatattgcttctatt

SEQ ID NO: 1025257 - DNA, 33 bp, Homo sapien
cattaatataattcacagcatcaatacatatta

SEQ ID NO: 1025258 - DNA, 33 bp, Homo sapien
cattaatataattcaccgcatcaatacatatta

SEQ ID NO: 1025259 - DNA, 33 bp, Homo sapien
accataacatctgtcaacattttgcttggttaa

SEQ ID NO: 1025260 - DNA, 33 bp, Homo sapien
accataacatctgtcagcattttgcttggttaa

SEQ ID NO: 1025261 - DNA, 33 bp, Homo sapien
atgtatgtgtttctcacaggtagaaatctagga

SEQ ID NO: 1025262 - DNA, 33 bp, Homo sapien
atgtatgtgtttctcataggtagaaatctagga

SEQ ID NO: 1025263 - DNA, 33 bp, Homo sapien
ccataaaatagatgcacagcaaaatagccttgg

SEQ ID NO: 1025264 - DNA, 33 bp, Homo sapien
ccataaaatagatgcatagcaaaatagccttgg

SEQ ID NO: 1025265 - DNA, 33 bp, Homo sapien
caaaatagactgtgcacggtaacttgaaatact

SEQ ID NO: 1025266 - DNA, 33 bp, Homo sapien
caaaatagactgtgcagggtaacttgaaatact

SEQ ID NO: 1025267 - DNA, 33 bp, Homo sapien
atgatcagcataccataaagtgtcagcataccc

SEQ ID NO: 1025268 - DNA, 33 bp, Homo sapien
atgatcagcataccatcaagtgtcagcataccc

SEQ ID NO: 1025269 - DNA, 33 bp, Homo sapien
tggatgacaactacaacattttgtaactacttg

SEQ ID NO: 1025270 - DNA, 33 bp, Homo sapien
tggatgacaactacaagattttgtaactacttg

SEQ ID NO: 1025271 - DNA, 33 bp, Homo sapien
tgttcataaactttcacagcaatttgacattgc

SEQ ID NO: 1025272 - DNA, 33 bp, Homo sapien
tgttcataaactttcagagcaatttgacattgc

SEQ ID NO: 1025273 - DNA, 33 bp, Homo sapien
cagcctgatttctctcaatttttcttcctagat

SEQ ID NO: 1025274 - DNA, 33 bp, Homo sapien
cagcctgatttctctccatttttcttcctagat

SEQ ID NO: 1025275 - DNA, 33 bp, Homo sapien
tacttttcattcttctaaattgttcgcatcttt

SEQ ID NO: 1025276 - DNA, 33 bp, Homo sapien
tacttttcattcttctgaattgttcgcatcttt

SEQ ID NO: 1025277 - DNA, 33 bp, Homo sapien
acctttgggtcacctcaaagtttgaacctacaa

SEQ ID NO: 1025278 - DNA, 33 bp, Homo sapien
acctttgggtcacctctaagtttgaacctacaa

SEQ ID NO: 1025279 - DNA, 33 bp, Homo sapien
cttggtactcaacaaacattagtcattgtcctt

SEQ ID NO: 1025280 - DNA, 33 bp, Homo sapien
cttggtactcaacaaatattagtcattgtcctt

SEQ ID NO: 1025281 - DNA, 33 bp, Homo sapien
tgtaactttcgtagagaagaattgactgtaaag

SEQ ID NO: 1025282 - DNA, 33 bp, Homo sapien
tgtaactttcgtagaggagaattgactgtaaag

SEQ ID NO: 1025283 - DNA, 33 bp, Homo sapien
cacacaattctaagataaagcttctcgcccatc

SEQ ID NO: 1025284 - DNA, 33 bp, Homo sapien
cacacaattctaagattaagcttctcgcccatc

SEQ ID NO: 1025285 - DNA, 33 bp, Homo sapien
aaagagccatttttccagaatctcagaaatgga

SEQ ID NO: 1025286 - DNA, 33 bp, Homo sapien
aaagagccatttttccggaatctcagaaatgga

SEQ ID NO: 1025287 - DNA, 33 bp, Homo sapien
aaaaggaaaagactcacatagcaacttgttcaa

SEQ ID NO: 1025288 - DNA, 33 bp, Homo sapien
aaaaggaaaagactcagatagcaacttgttcaa

SEQ ID NO: 1025289 - DNA, 33 bp, Homo sapien
aagttagatgctaaaaagtctatgtagaaaaag

SEQ ID NO: 1025290 - DNA, 33 bp, Homo sapien
aagttagatgctaaaatgtctatgtagaaaaag

SEQ ID NO: 1025291 - DNA, 33 bp, Homo sapien
cacacttttagaaatcaaaaacgctctggaaag

SEQ ID NO: 1025292 - DNA, 33 bp, Homo sapien
cacacttttagaaatcgaaaacgctctggaaag

SEQ ID NO: 1025293 - DNA, 33 bp, Homo sapien
tcattcattcaaaaaaaggttagtaagcacctc

SEQ ID NO: 1025294 - DNA, 33 bp, Homo sapien
tcattcattcaaaaaacggttagtaagcacctc

SEQ ID NO: 1025295 - DNA, 33 bp, Homo sapien
tctttccaacctccccaaagaatttcatcactg

SEQ ID NO: 1025296 - DNA, 33 bp, Homo sapien
tctttccaacctccccgaagaatttcatcactg

SEQ ID NO: 1025297 - DNA, 33 bp, Homo sapien
ggggtttggtcattcgcattctggatggctgga

SEQ ID NO: 1025298 - DNA, 33 bp, Homo sapien
ggggtttggtcattcgtattctggatggctgga

SEQ ID NO: 1025299 - DNA, 33 bp, Homo sapien
ggaaggcagttgaatacggcaaatttcttttct

SEQ ID NO: 1025300 - DNA, 33 bp, Homo sapien
ggaaggcagttgaatatggcaaatttcttttct

SEQ ID NO: 1025301 - DNA, 33 bp, Homo sapien
aatggttaaaccaagcaagttaacatatgcact

SEQ ID NO: 1025302 - DNA, 33 bp, Homo sapien
aatggttaaaccaagccagttaacatatgcact

SEQ ID NO: 1025303 - DNA, 33 bp, Homo sapien
tctgactgccctgtccccttggttaccctgact

SEQ ID NO: 1025304 - DNA, 33 bp, Homo sapien
tctgactgccctgtcctcttggttaccctgact

SEQ ID NO: 1025305 - DNA, 33 bp, Homo sapien
ggaggtaggtctgtaaagttgaggtcagggacg

SEQ ID NO: 1025306 - DNA, 33 bp, Homo sapien
ggaggtaggtctgtaatgttgaggtcagggacg

SEQ ID NO: 1025307 - DNA, 33 bp, Homo sapien
atattgaataagatgccgaccctgtctctaggg

SEQ ID NO: 1025308 - DNA, 33 bp, Homo sapien
atattgaataagatgctgaccctgtctctaggg

SEQ ID NO: 1025309 - DNA, 33 bp, Homo sapien
aaatcaacggctgaccaagaaggactgtgaaca

SEQ ID NO: 1025310 - DNA, 33 bp, Homo sapien
aaatcaacggctgacccagaaggactgtgaaca

SEQ ID NO: 1025311 - DNA, 33 bp, Homo sapien
attaattgggttatgactcagagctgtaatgaa

SEQ ID NO: 1025312 - DNA, 33 bp, Homo sapien
attaattgggttatgagtcagagctgtaatgaa

SEQ ID NO: 1025313 - DNA, 33 bp, Homo sapien
catcttagttctaagacggcatagactatacct

SEQ ID NO: 1025314 - DNA, 33 bp, Homo sapien
catcttagttctaagatggcatagactatacct

SEQ ID NO: 1025315 - DNA, 33 bp, Homo sapien
gctaaggttcaaggctaaaatgatactgatgag

SEQ ID NO: 1025316 - DNA, 33 bp, Homo sapien
gctaaggttcaaggctgaaatgatactgatgag

SEQ ID NO: 1025317 - DNA, 33 bp, Homo sapien
aaaagcttgacttgcacaataataggtggtaat

SEQ ID NO: 1025318 - DNA, 33 bp, Homo sapien
aaaagcttgacttgcataataataggtggtaat

SEQ ID NO: 1025319 - DNA, 33 bp, Homo sapien
tttgtgagctctagcccagaattaccacctatt

SEQ ID NO: 1025320 - DNA, 33 bp, Homo sapien
tttgtgagctctagccgagaattaccacctatt

SEQ ID NO: 1025321 - DNA, 33 bp, Homo sapien
atacaagtgggtcagacagctaaaggtatatga

SEQ ID NO: 1025322 - DNA, 33 bp, Homo sapien
atacaagtgggtcagagagctaaaggtatatga

SEQ ID NO: 1025323 - DNA, 33 bp, Homo sapien
tttcactttagctccaccaacttctggctcaga

SEQ ID NO: 1025324 - DNA, 33 bp, Homo sapien
tttcactttagctccatcaacttctggctcaga

SEQ ID NO: 1025325 - DNA, 33 bp, Homo sapien
atgcttggacaaccaacgtgaggtgtaggaaga

SEQ ID NO: 1025326 - DNA, 33 bp, Homo sapien
atgcttggacaaccaatgtgaggtgtaggaaga

SEQ ID NO: 1025327 - DNA, 33 bp, Homo sapien
tatgctgggtgtaaagcatttttcattatttgt

SEQ ID NO: 1025328 - DNA, 33 bp, Homo sapien
tatgctgggtgtaaagtatttttcattatttgt

SEQ ID NO: 1025329 - DNA, 33 bp, Homo sapien
caaacaactcaatcctaaaatgggcaaaaggct

SEQ ID NO: 1025330 - DNA, 33 bp, Homo sapien
caaacaactcaatcctgaaatgggcaaaaggct

SEQ ID NO: 1025331 - DNA, 33 bp, Homo sapien
caaaaattgcctgtacaaatccggatggagtat

SEQ ID NO: 1025332 - DNA, 33 bp, Homo sapien
caaaaattgcctgtaccaatccggatggagtat

SEQ ID NO: 1025333 - DNA, 33 bp, Homo sapien
agcattgaaagtgctaactacatggataaattc

SEQ ID NO: 1025334 - DNA, 33 bp, Homo sapien
agcattgaaagtgctagctacatggataaattc

SEQ ID NO: 1025335 - DNA, 33 bp, Homo sapien
aactccaaattgcctcaagcaaaacacattgga

SEQ ID NO: 1025336 - DNA, 33 bp, Homo sapien
aactccaaattgcctccagcaaaacacattgga

SEQ ID NO: 1025337 - DNA, 33 bp, Homo sapien
cgatttgatggttaaaagtgagtcactcaggaa

SEQ ID NO: 1025338 - DNA, 33 bp, Homo sapien
cgatttgatggttaaaggtgagtcactcaggaa

SEQ ID NO: 1025339 - DNA, 33 bp, Homo sapien
aagattatatgatctccagtaattgtccaggta

SEQ ID NO: 1025340 - DNA, 33 bp, Homo sapien
aagattatatgatctctagtaattgtccaggta

SEQ ID NO: 1025341 - DNA, 33 bp, Homo sapien
atgacaatgaaaatgaacagataaaggaagcta

SEQ ID NO: 1025342 - DNA, 33 bp, Homo sapien
atgacaatgaaaatgagcagataaaggaagcta

SEQ ID NO: 1025343 - DNA, 33 bp, Homo sapien
ctgttaaccacctttgcaactgctaggaaaaat

SEQ ID NO: 1025344 - DNA, 33 bp, Homo sapien
ctgttaaccacctttgtaactgctaggaaaaat

SEQ ID NO: 1025345 - DNA, 33 bp, Homo sapien
agggagtgtgaggcaaatgaataaatgacagat

SEQ ID NO: 1025346 - DNA, 33 bp, Homo sapien
agggagtgtgaggcaagtgaataaatgacagat

SEQ ID NO: 1025347 - DNA, 33 bp, Homo sapien
ctgcagctgtaggagacgggtaactacctgctc

SEQ ID NO: 1025348 - DNA, 33 bp, Homo sapien
ctgcagctgtaggagatgggtaactacctgctc

SEQ ID NO: 1025349 - DNA, 33 bp, Homo sapien
ttataggtacatctcagtcctgggaactgtcat

SEQ ID NO: 1025350 - DNA, 33 bp, Homo sapien
ttataggtacatctcattcctgggaactgtcat

SEQ ID NO: 1025351 - DNA, 33 bp, Homo sapien
atgggaggatagaacaagagaaaaacctagagg

SEQ ID NO: 1025352 - DNA, 33 bp, Homo sapien
atgggaggatagaacaggagaaaaacctagagg

SEQ ID NO: 1025353 - DNA, 33 bp, Homo sapien
ttagcctggttatgacgccagaaggtctgttca

SEQ ID NO: 1025354 - DNA, 33 bp, Homo sapien
ttagcctggttatgactccagaaggtctgttca

SEQ ID NO: 1025355 - DNA, 33 bp, Homo sapien
cagtacaccatggtccagccaaattggatcact

SEQ ID NO: 1025356 - DNA, 33 bp, Homo sapien
cagtacaccatggtccggccaaattggatcact

SEQ ID NO: 1025357 - DNA, 33 bp, Homo sapien
ctctattgtggattctcaacttcctacatcttt

SEQ ID NO: 1025358 - DNA, 33 bp, Homo sapien
ctctattgtggattcttaacttcctacatcttt

SEQ ID NO: 1025359 - DNA, 33 bp, Homo sapien
acataatgtttgtcaaattcgtctgtgttgtaa

SEQ ID NO: 1025360 - DNA, 33 bp, Homo sapien
acataatgtttgtcaagttcgtctgtgttgtaa

SEQ ID NO: 1025361 - DNA, 33 bp, Homo sapien
tctagaaatacatccaaacgatacactagcttc

SEQ ID NO: 1025362 - DNA, 33 bp, Homo sapien
tctagaaatacatccacacgatacactagcttc

SEQ ID NO: 1025363 - DNA, 33 bp, Homo sapien
cataactccctgagaaagcatcctgccaccttg

SEQ ID NO: 1025364 - DNA, 33 bp, Homo sapien
cataactccctgagaaggcatcctgccaccttg

SEQ ID NO: 1025365 - DNA, 33 bp, Homo sapien
tagcataagataaccaatgcagtcctttaaagg

SEQ ID NO: 1025366 - DNA, 33 bp, Homo sapien
tagcataagataaccagtgcagtcctttaaagg

SEQ ID NO: 1025367 - DNA, 33 bp, Homo sapien
ggtcaccagcatagggcattttgagttcttcag

SEQ ID NO: 1025368 - DNA, 33 bp, Homo sapien
ggtcaccagcataggggattttgagttcttcag

SEQ ID NO: 1025369 - DNA, 33 bp, Homo sapien
catacagctgtacaacacgggtctctcactcgg

SEQ ID NO: 1025370 - DNA, 33 bp, Homo sapien
catacagctgtacaacgcgggtctctcactcgg

SEQ ID NO: 1025371 - DNA, 33 bp, Homo sapien
aaagttgacagtttcaataaaatgtaggaaaaa

SEQ ID NO: 1025372 - DNA, 33 bp, Homo sapien
aaagttgacagtttcattaaaatgtaggaaaaa

SEQ ID NO: 1025373 - DNA, 33 bp, Homo sapien
gttttaaacctcaatgaatgatttgcacttagt

SEQ ID NO: 1025374 - DNA, 33 bp, Homo sapien
gttttaaacctcaatggatgatttgcacttagt

SEQ ID NO: 1025375 - DNA, 33 bp, Homo sapien
gattatttcttagtaacgtggacaaattcgtag

SEQ ID NO: 1025376 - DNA, 33 bp, Homo sapien
gattatttcttagtaatgtggacaaattcgtag

SEQ ID NO: 1025377 - DNA, 33 bp, Homo sapien
ttactaaagctgattacgctgtcatcccttcct

SEQ ID NO: 1025378 - DNA, 33 bp, Homo sapien
ttactaaagctgattatgctgtcatcccttcct

SEQ ID NO: 1025379 - DNA, 33 bp, Homo sapien
tcaatgtttagatgtaactggatgtacaaatac

SEQ ID NO: 1025380 - DNA, 33 bp, Homo sapien
tcaatgtttagatgtatctggatgtacaaatac

SEQ ID NO: 1025381 - DNA, 33 bp, Homo sapien
tatggccaaataacttaaagctgagcgatgggc

SEQ ID NO: 1025382 - DNA, 33 bp, Homo sapien
tatggccaaataacttcaagctgagcgatgggc

SEQ ID NO: 1025383 - DNA, 33 bp, Homo sapien
cctctctccgtccatacactatactccagcatt

SEQ ID NO: 1025384 - DNA, 33 bp, Homo sapien
cctctctccgtccatatactatactccagcatt

SEQ ID NO: 1025385 - DNA, 33 bp, Homo sapien
gtaatagggccatgtaaagcctattgaatgtct

SEQ ID NO: 1025386 - DNA, 33 bp, Homo sapien
gtaatagggccatgtacagcctattgaatgtct

SEQ ID NO: 1025387 - DNA, 33 bp, Homo sapien
agaaagatttgtaagacgctaccccattctatc

SEQ ID NO: 1025388 - DNA, 33 bp, Homo sapien
agaaagatttgtaagatgctaccccattctatc

SEQ ID NO: 1025389 - DNA, 33 bp, Homo sapien
aggacagacgttatgaaaactaagtggaggaat

SEQ ID NO: 1025390 - DNA, 33 bp, Homo sapien
aggacagacgttatgagaactaagtggaggaat

SEQ ID NO: 1025391 - DNA, 33 bp, Homo sapien
cactacccagcaaacagaagaggaaagtaactg

SEQ ID NO: 1025392 - DNA, 33 bp, Homo sapien
cactacccagcaaacataagaggaaagtaactg

SEQ ID NO: 1025393 - DNA, 33 bp, Homo sapien
ctcggagtctgcttaacgccagtggtatgtgct

SEQ ID NO: 1025394 - DNA, 33 bp, Homo sapien
ctcggagtctgcttaaggccagtggtatgtgct

SEQ ID NO: 1025395 - DNA, 33 bp, Homo sapien
tttcctcataatgggaataaaacccaggcccac

SEQ ID NO: 1025396 - DNA, 33 bp, Homo sapien
tttcctcataatgggagtaaaacccaggcccac

SEQ ID NO: 1025397 - DNA, 33 bp, Homo sapien
ataaatgggagttggaaaatgagaacaatgaga

SEQ ID NO: 1025398 - DNA, 33 bp, Homo sapien
ataaatgggagttggacaatgagaacaatgaga

SEQ ID NO: 1025399 - DNA, 33 bp, Homo sapien
gagctagaagttcaaaccataaacaataagtga

SEQ ID NO: 1025400 - DNA, 33 bp, Homo sapien
gagctagaagttcaaatcataaacaataagtga

SEQ ID NO: 1025401 - DNA, 33 bp, Homo sapien
tgtgcatgttgaaataccatgtggactcgatat

SEQ ID NO: 1025402 - DNA, 33 bp, Homo sapien
tgtgcatgttgaaatatcatgtggactcgatat

SEQ ID NO: 1025403 - DNA, 33 bp, Homo sapien
ttgattatgactccaaatatcccataataagtg

SEQ ID NO: 1025404 - DNA, 33 bp, Homo sapien
ttgattatgactccaagtatcccataataagtg

SEQ ID NO: 1025405 - DNA, 33 bp, Homo sapien
tcaaagatctcggtgccatgagagaaattacac

SEQ ID NO: 1025406 - DNA, 33 bp, Homo sapien
tcaaagatctcggtgctatgagagaaattacac

SEQ ID NO: 1025407 - DNA, 33 bp, Homo sapien
gggcacattgtaaaaacggggaaatgaggctca

SEQ ID NO: 1025408 - DNA, 33 bp, Homo sapien
gggcacattgtaaaaatggggaaatgaggctca

SEQ ID NO: 1025409 - DNA, 33 bp, Homo sapien
aataagcgagctgtggaatctagacaaaaacag

SEQ ID NO: 1025410 - DNA, 33 bp, Homo sapien
aataagcgagctgtggcatctagacaaaaacag

SEQ ID NO: 1025411 - DNA, 33 bp, Homo sapien
acggtcagaggcacacagtcactgcacgaggct

SEQ ID NO: 1025412 - DNA, 33 bp, Homo sapien
acggtcagaggcacactgtcactgcacgaggct

SEQ ID NO: 1025413 - DNA, 33 bp, Homo sapien
tgctttttaggaaagccgattcccattgctcta

SEQ ID NO: 1025414 - DNA, 33 bp, Homo sapien
tgctttttaggaaagctgattcccattgctcta

SEQ ID NO: 1025415 - DNA, 33 bp, Homo sapien
gcattaacttgtgagcaagaaatgttgaccttt

SEQ ID NO: 1025416 - DNA, 33 bp, Homo sapien
gcattaacttgtgagcgagaaatgttgaccttt

SEQ ID NO: 1025417 - DNA, 33 bp, Homo sapien
gagccggctggatccccgaactaattacctaga

SEQ ID NO: 1025418 - DNA, 33 bp, Homo sapien
gagccggctggatccctgaactaattacctaga

SEQ ID NO: 1025419 - DNA, 33 bp, Homo sapien
atttgtcaaatgactcaaagtatttaaaagcat

SEQ ID NO: 1025420 - DNA, 33 bp, Homo sapien
atttgtcaaatgactcgaagtatttaaaagcat

SEQ ID NO: 1025421 - DNA, 33 bp, Homo sapien
ttggaacacatctgaggcagggagggtaggtat

SEQ ID NO: 1025422 - DNA, 33 bp, Homo sapien
ttggaacacatctgagtcagggagggtaggtat

SEQ ID NO: 1025423 - DNA, 33 bp, Homo sapien
ctacccatttcacagacgatactggctcaaagc

SEQ ID NO: 1025424 - DNA, 33 bp, Homo sapien
ctacccatttcacagatgatactggctcaaagc

SEQ ID NO: 1025425 - DNA, 33 bp, Homo sapien
ccacatccctgtaaccactaaagacaaaggagg

SEQ ID NO: 1025426 - DNA, 33 bp, Homo sapien
ccacatccctgtaacctctaaagacaaaggagg

SEQ ID NO: 1025427 - DNA, 33 bp, Homo sapien
atagatggcagctaagcatcctccccaagtcca

SEQ ID NO: 1025428 - DNA, 33 bp, Homo sapien
atagatggcagctaagtatcctccccaagtcca

SEQ ID NO: 1025429 - DNA, 33 bp, Homo sapien
tcagttaaaaaaacaaccatctttatgggcagg

SEQ ID NO: 1025430 - DNA, 33 bp, Homo sapien
tcagttaaaaaaacaagcatctttatgggcagg

SEQ ID NO: 1025431 - DNA, 33 bp, Homo sapien
agccttcggacataaagtcatatactaatccaa

SEQ ID NO: 1025432 - DNA, 33 bp, Homo sapien
agccttcggacataaattcatatactaatccaa

SEQ ID NO: 1025433 - DNA, 33 bp, Homo sapien
tgttcgtccccttccacactaagccaaagaagg

SEQ ID NO: 1025434 - DNA, 33 bp, Homo sapien
tgttcgtccccttccagactaagccaaagaagg

SEQ ID NO: 1025435 - DNA, 33 bp, Homo sapien
tgaatttttaagtcacacaccaatgaaaagagc

SEQ ID NO: 1025436 - DNA, 33 bp, Homo sapien
tgaatttttaagtcacgcaccaatgaaaagagc

SEQ ID NO: 1025437 - DNA, 33 bp, Homo sapien
caagagccaacagttccataggttcgaataccc

SEQ ID NO: 1025438 - DNA, 33 bp, Homo sapien
caagagccaacagttctataggttcgaataccc

SEQ ID NO: 1025439 - DNA, 33 bp, Homo sapien
gtttgcaaaaacaaaacggaagtatcagtgaag

SEQ ID NO: 1025440 - DNA, 33 bp, Homo sapien
gtttgcaaaaacaaaatggaagtatcagtgaag

SEQ ID NO: 1025441 - DNA, 33 bp, Homo sapien
aaacaaaagttcggccacagctgaggtggtgtt

SEQ ID NO: 1025442 - DNA, 33 bp, Homo sapien
aaacaaaagttcggccgcagctgaggtggtgtt

SEQ ID NO: 1025443 - DNA, 33 bp, Homo sapien
aatcctctcttctctcaagcaaaggcaaaaatc

SEQ ID NO: 1025444 - DNA, 33 bp, Homo sapien
aatcctctcttctctccagcaaaggcaaaaatc

SEQ ID NO: 1025445 - DNA, 33 bp, Homo sapien
tatatggagtcttagcaaagcttcctctgtcct

SEQ ID NO: 1025446 - DNA, 33 bp, Homo sapien
tatatggagtcttagcgaagcttcctctgtcct

SEQ ID NO: 1025447 - DNA, 33 bp, Homo sapien
acaagagcaacacttaagtttcttacagatctg

SEQ ID NO: 1025448 - DNA, 33 bp, Homo sapien
acaagagcaacacttacgtttcttacagatctg

SEQ ID NO: 1025449 - DNA, 33 bp, Homo sapien
attcctgggttgcaaagacccaagcagttgggg

SEQ ID NO: 1025450 - DNA, 33 bp, Homo sapien
attcctgggttgcaaatacccaagcagttgggg

SEQ ID NO: 1025451 - DNA, 33 bp, Homo sapien
tccatgggaaagttcacctatcctgaagctacc

SEQ ID NO: 1025452 - DNA, 33 bp, Homo sapien
tccatgggaaagttcatctatcctgaagctacc

SEQ ID NO: 1025453 - DNA, 33 bp, Homo sapien
gccctgacacgtgaccacgttgagctctctcta

SEQ ID NO: 1025454 - DNA, 33 bp, Homo sapien
gccctgacacgtgaccgcgttgagctctctcta

SEQ ID NO: 1025455 - DNA, 33 bp, Homo sapien
gaggaggcaacactaacgctggcgtcacttaaa

SEQ ID NO: 1025456 - DNA, 33 bp, Homo sapien
gaggaggcaacactaatgctggcgtcacttaaa

SEQ ID NO: 1025457 - DNA, 33 bp, Homo sapien
ttagtgtggaaatccaacaatgtggaaatcgag

SEQ ID NO: 1025458 - DNA, 33 bp, Homo sapien
ttagtgtggaaatccagcaatgtggaaatcgag

SEQ ID NO: 1025459 - DNA, 33 bp, Homo sapien
taccaagatggcaaaaatccctaagaaacattt

SEQ ID NO: 1025460 - DNA, 33 bp, Homo sapien
taccaagatggcaaaagtccctaagaaacattt

SEQ ID NO: 1025461 - DNA, 33 bp, Homo sapien
gactcatccaggtaaggaggccacagtgagcac

SEQ ID NO: 1025462 - DNA, 33 bp, Homo sapien
gactcatccaggtaagtaggccacagtgagcac

SEQ ID NO: 1025463 - DNA, 33 bp, Homo sapien
aggattaaattccaacaaggcacattccaaagg

SEQ ID NO: 1025464 - DNA, 33 bp, Homo sapien
aggattaaattccaacgaggcacattccaaagg

SEQ ID NO: 1025465 - DNA, 33 bp, Homo sapien
cctggtctttccatacacacttaatcctcaacg

SEQ ID NO: 1025466 - DNA, 33 bp, Homo sapien
cctggtctttccatacgcacttaatcctcaacg

SEQ ID NO: 1025467 - DNA, 33 bp, Homo sapien
ataagactagaggcaaattaaatgtgagacatg

SEQ ID NO: 1025468 - DNA, 33 bp, Homo sapien
ataagactagaggcaacttaaatgtgagacatg

SEQ ID NO: 1025469 - DNA, 33 bp, Homo sapien
ggacagatgaattcaacactgtgtgagaagtgc

SEQ ID NO: 1025470 - DNA, 33 bp, Homo sapien
ggacagatgaattcaatactgtgtgagaagtgc

SEQ ID NO: 1025471 - DNA, 33 bp, Homo sapien
tccacctggctcatcacacaaattgttccatga

SEQ ID NO: 1025472 - DNA, 33 bp, Homo sapien
tccacctggctcatcatacaaattgttccatga

SEQ ID NO: 1025473 - DNA, 33 bp, Homo sapien
cttagtgcaggtgagacattatggtagcctgga

SEQ ID NO: 1025474 - DNA, 33 bp, Homo sapien
cttagtgcaggtgagatattatggtagcctgga

SEQ ID NO: 1025475 - DNA, 33 bp, Homo sapien
atgaccatcccagcacagaaaaaaacaaattgg

SEQ ID NO: 1025476 - DNA, 33 bp, Homo sapien
atgaccatcccagcacggaaaaaaacaaattgg

SEQ ID NO: 1025477 - DNA, 33 bp, Homo sapien
gatagccttgatcatgaacatattcttggaatg

SEQ ID NO: 1025478 - DNA, 33 bp, Homo sapien
gatagccttgatcatgcacatattcttggaatg

SEQ ID NO: 1025479 - DNA, 33 bp, Homo sapien
atgttttatgcctttcaaaaactctttcttctt

SEQ ID NO: 1025480 - DNA, 33 bp, Homo sapien
atgttttatgcctttcgaaaactctttcttctt

SEQ ID NO: 1025481 - DNA, 33 bp, Homo sapien
tgcgatctgtgccacgaaataagaactgcttaa

SEQ ID NO: 1025482 - DNA, 33 bp, Homo sapien
tgcgatctgtgccacgtaataagaactgcttaa

SEQ ID NO: 1025483 - DNA, 33 bp, Homo sapien
caacctttaaatctcagctgtgcctcagtttta

SEQ ID NO: 1025484 - DNA, 33 bp, Homo sapien
caacctttaaatctcatctgtgcctcagtttta

SEQ ID NO: 1025485 - DNA, 33 bp, Homo sapien
ctcatagcacctcagaaagcatatggagtctac

SEQ ID NO: 1025486 - DNA, 33 bp, Homo sapien
ctcatagcacctcagagagcatatggagtctac

SEQ ID NO: 1025487 - DNA, 33 bp, Homo sapien
tgtgtccttctgtcaacatgtctaaaaccgccc

SEQ ID NO: 1025488 - DNA, 33 bp, Homo sapien
tgtgtccttctgtcaatatgtctaaaaccgccc

SEQ ID NO: 1025489 - DNA, 33 bp, Homo sapien
gtgcctggccatgatacagaaatttaaaatagt

SEQ ID NO: 1025490 - DNA, 33 bp, Homo sapien
gtgcctggccatgatatagaaatttaaaatagt

SEQ ID NO: 1025491 - DNA, 33 bp, Homo sapien
gccctaagttttggtcacattctcacttaagtg

SEQ ID NO: 1025492 - DNA, 33 bp, Homo sapien
gccctaagttttggtcgcattctcacttaagtg

SEQ ID NO: 1025493 - DNA, 33 bp, Homo sapien
actcgttttagttttgaagatgttaaataatga

SEQ ID NO: 1025494 - DNA, 33 bp, Homo sapien
actcgttttagttttgtagatgttaaataatga

SEQ ID NO: 1025495 - DNA, 33 bp, Homo sapien
tgctaaaacaccaaaaatgtctctgcttgtaag

SEQ ID NO: 1025496 - DNA, 33 bp, Homo sapien
tgctaaaacaccaaaattgtctctgcttgtaag

SEQ ID NO: 1025497 - DNA, 33 bp, Homo sapien
aatggaacttttgaaggaactagtgggagaggc

SEQ ID NO: 1025498 - DNA, 33 bp, Homo sapien
aatggaacttttgaagtaactagtgggagaggc

SEQ ID NO: 1025499 - DNA, 33 bp, Homo sapien
aaaatccaacttgctaactttactagacctgtc

SEQ ID NO: 1025500 - DNA, 33 bp, Homo sapien
aaaatccaacttgctacctttactagacctgtc

SEQ ID NO: 1025501 - DNA, 33 bp, Homo sapien
taccaactgcctgtcacactttattcgggtgac

SEQ ID NO: 1025502 - DNA, 33 bp, Homo sapien
taccaactgcctgtcatactttattcgggtgac

SEQ ID NO: 1025503 - DNA, 33 bp, Homo sapien
gacagtattacggaaacgtaagattcactaaag

SEQ ID NO: 1025504 - DNA, 33 bp, Homo sapien
gacagtattacggaaatgtaagattcactaaag

SEQ ID NO: 1025505 - DNA, 33 bp, Homo sapien
agaacaattaagatcaagttcctaagtgttatt

SEQ ID NO: 1025506 - DNA, 33 bp, Homo sapien
agaacaattaagatcacgttcctaagtgttatt

SEQ ID NO: 1025507 - DNA, 33 bp, Homo sapien
cttatattacaggtagccacctaagcatttacg

SEQ ID NO: 1025508 - DNA, 33 bp, Homo sapien
cttatattacaggtagtcacctaagcatttacg

SEQ ID NO: 1025509 - DNA, 33 bp, Homo sapien
atggtgcatcccatcagctaaaaagaattacat

SEQ ID NO: 1025510 - DNA, 33 bp, Homo sapien
atggtgcatcccatcatctaaaaagaattacat

SEQ ID NO: 1025511 - DNA, 33 bp, Homo sapien
aaatggaatgctgtcccgagccaaatatgtcag

SEQ ID NO: 1025512 - DNA, 33 bp, Homo sapien
aaatggaatgctgtcctgagccaaatatgtcag

SEQ ID NO: 1025513 - DNA, 33 bp, Homo sapien
tagcccacatggattaaattaggtcactctttg

SEQ ID NO: 1025514 - DNA, 33 bp, Homo sapien
tagcccacatggattacattaggtcactctttg

SEQ ID NO: 1025515 - DNA, 33 bp, Homo sapien
gcttgtggaaaatagacaaagaaggactctcca

SEQ ID NO: 1025516 - DNA, 33 bp, Homo sapien
gcttgtggaaaatagataaagaaggactctcca

SEQ ID NO: 1025517 - DNA, 33 bp, Homo sapien
aatcaaattgccattaagacagtctagaaattt

SEQ ID NO: 1025518 - DNA, 33 bp, Homo sapien
aatcaaattgccattaggacagtctagaaattt

SEQ ID NO: 1025519 - DNA, 33 bp, Homo sapien
tcttttataaatcacccactcgccagtagttct

SEQ ID NO: 1025520 - DNA, 33 bp, Homo sapien
tcttttataaatcacctactcgccagtagttct

SEQ ID NO: 1025521 - DNA, 33 bp, Homo sapien
cagaaaactcagagaaatgagaatgtatctgtg

SEQ ID NO: 1025522 - DNA, 33 bp, Homo sapien
cagaaaactcagagaagtgagaatgtatctgtg

SEQ ID NO: 1025523 - DNA, 33 bp, Homo sapien
ccaaagtcaatccacaatactctatatggctgt

SEQ ID NO: 1025524 - DNA, 33 bp, Homo sapien
ccaaagtcaatccacagtactctatatggctgt

SEQ ID NO: 1025525 - DNA, 33 bp, Homo sapien
aattccaggtgactgaaaaagaaaggatatggt

SEQ ID NO: 1025526 - DNA, 33 bp, Homo sapien
aattccaggtgactgagaaagaaaggatatggt

SEQ ID NO: 1025527 - DNA, 33 bp, Homo sapien
tcgtagagacactaaaaaattacttgcagctgt

SEQ ID NO: 1025528 - DNA, 33 bp, Homo sapien
tcgtagagacactaaacaattacttgcagctgt

SEQ ID NO: 1025529 - DNA, 33 bp, Homo sapien
gttgacaatctgagacactgaaaatgtgcacag

SEQ ID NO: 1025530 - DNA, 33 bp, Homo sapien
gttgacaatctgagaccctgaaaatgtgcacag

SEQ ID NO: 1025531 - DNA, 33 bp, Homo sapien
gagctcatgtttccaactctcaaagtccattaa

SEQ ID NO: 1025532 - DNA, 33 bp, Homo sapien
gagctcatgtttccaagtctcaaagtccattaa

SEQ ID NO: 1025533 - DNA, 33 bp, Homo sapien
tgaacataaaaagtgccactgaattgtctactt

SEQ ID NO: 1025534 - DNA, 33 bp, Homo sapien
tgaacataaaaagtgctactgaattgtctactt

SEQ ID NO: 1025535 - DNA, 33 bp, Homo sapien
ccagttcatgtattagaaagcaggaaataagag

SEQ ID NO: 1025536 - DNA, 33 bp, Homo sapien
ccagttcatgtattaggaagcaggaaataagag

SEQ ID NO: 1025537 - DNA, 33 bp, Homo sapien
cagttaatcttcataacgatcccatgtagcaga

SEQ ID NO: 1025538 - DNA, 33 bp, Homo sapien
cagttaatcttcataatgatcccatgtagcaga

SEQ ID NO: 1025539 - DNA, 33 bp, Homo sapien
ttatgctacaatgctacggtaaacaaaacagca

SEQ ID NO: 1025540 - DNA, 33 bp, Homo sapien
ttatgctacaatgctatggtaaacaaaacagca

SEQ ID NO: 1025541 - DNA, 33 bp, Homo sapien
tatgaaatcttagctacctttgactgttactct

SEQ ID NO: 1025542 - DNA, 33 bp, Homo sapien
tatgaaatcttagctatctttgactgttactct

SEQ ID NO: 1025543 - DNA, 33 bp, Homo sapien
atagttttttcccatcaaaaggatatatagttt

SEQ ID NO: 1025544 - DNA, 33 bp, Homo sapien
atagttttttcccatcgaaaggatatatagttt

SEQ ID NO: 1025545 - DNA, 33 bp, Homo sapien
tttgtaaatacaaagaaatgcttattttccatt

SEQ ID NO: 1025546 - DNA, 33 bp, Homo sapien
tttgtaaatacaaagagatgcttattttccatt

SEQ ID NO: 1025547 - DNA, 33 bp, Homo sapien
tctttcaatatcaaaaggtatggctatcatttc

SEQ ID NO: 1025548 - DNA, 33 bp, Homo sapien
tctttcaatatcaaaatgtatggctatcatttc

SEQ ID NO: 1025549 - DNA, 33 bp, Homo sapien
gaccaagatcattttacaaatgtgggcttcatt

SEQ ID NO: 1025550 - DNA, 33 bp, Homo sapien
gaccaagatcattttataaatgtgggcttcatt

SEQ ID NO: 1025551 - DNA, 33 bp, Homo sapien
attaaatatccagtcacctgttcaagtttccat

SEQ ID NO: 1025552 - DNA, 33 bp, Homo sapien
attaaatatccagtcatctgttcaagtttccat

SEQ ID NO: 1025553 - DNA, 33 bp, Homo sapien
aagtctgaaggaattacatttgaaactgactgt

SEQ ID NO: 1025554 - DNA, 33 bp, Homo sapien
aagtctgaaggaattatatttgaaactgactgt

SEQ ID NO: 1025555 - DNA, 33 bp, Homo sapien
acagtaaagaagagacactttcctcaactgaac

SEQ ID NO: 1025556 - DNA, 33 bp, Homo sapien
acagtaaagaagagacgctttcctcaactgaac

SEQ ID NO: 1025557 - DNA, 33 bp, Homo sapien
caccaatcatttttggaatgactatttttatgt

SEQ ID NO: 1025558 - DNA, 33 bp, Homo sapien
caccaatcatttttgggatgactatttttatgt

SEQ ID NO: 1025559 - DNA, 33 bp, Homo sapien
tgattccgaatatcaaagaagtgatagaaacag

SEQ ID NO: 1025560 - DNA, 33 bp, Homo sapien
tgattccgaatatcaaggaagtgatagaaacag

SEQ ID NO: 1025561 - DNA, 33 bp, Homo sapien
taagtaacttggctctaaaagaaagctcctgaa

SEQ ID NO: 1025562 - DNA, 33 bp, Homo sapien
taagtaacttggctctcaaagaaagctcctgaa

SEQ ID NO: 1025563 - DNA, 33 bp, Homo sapien
agctctgagatctaaaattgagtcttggaaaat

SEQ ID NO: 1025564 - DNA, 33 bp, Homo sapien
agctctgagatctaaatttgagtcttggaaaat

SEQ ID NO: 1025565 - DNA, 33 bp, Homo sapien
aagttttataaaaggcaatttactacacactag

SEQ ID NO: 1025566 - DNA, 33 bp, Homo sapien
aagttttataaaaggcgatttactacacactag

SEQ ID NO: 1025567 - DNA, 33 bp, Homo sapien
atccagaagaaagactaagcagcaattgataaa

SEQ ID NO: 1025568 - DNA, 33 bp, Homo sapien
atccagaagaaagactgagcagcaattgataaa

SEQ ID NO: 1025569 - DNA, 33 bp, Homo sapien
agaaatgtccagcagaagggaattagatatgaa

SEQ ID NO: 1025570 - DNA, 33 bp, Homo sapien
agaaatgtccagcagaggggaattagatatgaa

SEQ ID NO: 1025571 - DNA, 33 bp, Homo sapien
gctgaattccttatcccgagtattaagtacagt

SEQ ID NO: 1025572 - DNA, 33 bp, Homo sapien
gctgaattccttatcctgagtattaagtacagt

SEQ ID NO: 1025573 - DNA, 33 bp, Homo sapien
tctcctgcttctagacgaaaggttcgcatcatc

SEQ ID NO: 1025574 - DNA, 33 bp, Homo sapien
tctcctgcttctagactaaaggttcgcatcatc

SEQ ID NO: 1025575 - DNA, 33 bp, Homo sapien
aagagaggcaataaaacacgtcttaggacaatg

SEQ ID NO: 1025576 - DNA, 33 bp, Homo sapien
aagagaggcaataaaatacgtcttaggacaatg

SEQ ID NO: 1025577 - DNA, 33 bp, Homo sapien
aaagaaccagtaatttaaaatctccatatcatc

SEQ ID NO: 1025578 - DNA, 33 bp, Homo sapien
aaagaaccagtaattttaaatctccatatcatc

SEQ ID NO: 1025579 - DNA, 33 bp, Homo sapien
ttctcctgcgaaggcaactgaagacactctaaa

SEQ ID NO: 1025580 - DNA, 33 bp, Homo sapien
ttctcctgcgaaggcagctgaagacactctaaa

SEQ ID NO: 1025581 - DNA, 33 bp, Homo sapien
caaaagctgctgtatgaaaaacctcctgcaagc

SEQ ID NO: 1025582 - DNA, 33 bp, Homo sapien
caaaagctgctgtatggaaaacctcctgcaagc

SEQ ID NO: 1025583 - DNA, 33 bp, Homo sapien
ggtgaactctttggaaacgccttgagcaaatgc

SEQ ID NO: 1025584 - DNA, 33 bp, Homo sapien
ggtgaactctttggaagcgccttgagcaaatgc

SEQ ID NO: 1025585 - DNA, 33 bp, Homo sapien
gaaagcatggacagaacgtgcaaactccacgga

SEQ ID NO: 1025586 - DNA, 33 bp, Homo sapien
gaaagcatggacagaatgtgcaaactccacgga

SEQ ID NO: 1025587 - DNA, 33 bp, Homo sapien
ttcgtggtttcacatcacactctctgctctcag

SEQ ID NO: 1025588 - DNA, 33 bp, Homo sapien
ttcgtggtttcacatcgcactctctgctctcag

SEQ ID NO: 1025589 - DNA, 33 bp, Homo sapien
ggtaagctcaagaaaggcagccatctaactctg

SEQ ID NO: 1025590 - DNA, 33 bp, Homo sapien
ggtaagctcaagaaagtcagccatctaactctg

SEQ ID NO: 1025591 - DNA, 33 bp, Homo sapien
aggtatgtcactgaacccccagaaaaagtctga

SEQ ID NO: 1025592 - DNA, 33 bp, Homo sapien
aggtatgtcactgaactcccagaaaaagtctga

SEQ ID NO: 1025593 - DNA, 33 bp, Homo sapien
tcatctctaactcctgcaacatgggcaggggct

SEQ ID NO: 1025594 - DNA, 33 bp, Homo sapien
tcatctctaactcctgtaacatgggcaggggct

SEQ ID NO: 1025595 - DNA, 33 bp, Homo sapien
aaggtttcaatttacaaattttcatggatgtga

SEQ ID NO: 1025596 - DNA, 33 bp, Homo sapien
aaggtttcaatttacagattttcatggatgtga

SEQ ID NO: 1025597 - DNA, 33 bp, Homo sapien
tctgagtttggtgaacactgaagaagatatctg

SEQ ID NO: 1025598 - DNA, 33 bp, Homo sapien
tctgagtttggtgaacgctgaagaagatatctg

SEQ ID NO: 1025599 - DNA, 33 bp, Homo sapien
aagcttagagcaaacaatctgataggccttact

SEQ ID NO: 1025600 - DNA, 33 bp, Homo sapien
aagcttagagcaaacagtctgataggccttact

SEQ ID NO: 1025601 - DNA, 33 bp, Homo sapien
tgaatgcttacgtgtacgaggtttccttttggt

SEQ ID NO: 1025602 - DNA, 33 bp, Homo sapien
tgaatgcttacgtgtatgaggtttccttttggt

SEQ ID NO: 1025603 - DNA, 33 bp, Homo sapien
agctccagacaccacgaaagacctgaagacttg

SEQ ID NO: 1025604 - DNA, 33 bp, Homo sapien
agctccagacaccacgcaagacctgaagacttg

SEQ ID NO: 1025605 - DNA, 33 bp, Homo sapien
ttaagtttgaaagagacgataaaaagcagtctt

SEQ ID NO: 1025606 - DNA, 33 bp, Homo sapien
ttaagtttgaaagagatgataaaaagcagtctt

SEQ ID NO: 1025607 - DNA, 33 bp, Homo sapien
tttattaaagcagagacgcattgatggattcag

SEQ ID NO: 1025608 - DNA, 33 bp, Homo sapien
tttattaaagcagagatgcattgatggattcag

SEQ ID NO: 1025609 - DNA, 33 bp, Homo sapien
tcatggtaatgagtgacctcttctgtgagttca

SEQ ID NO: 1025610 - DNA, 33 bp, Homo sapien
tcatggtaatgagtgagctcttctgtgagttca

SEQ ID NO: 1025611 - DNA, 33 bp, Homo sapien
atgagcgttctgagcacattggctacaactcag

SEQ ID NO: 1025612 - DNA, 33 bp, Homo sapien
atgagcgttctgagcatattggctacaactcag

SEQ ID NO: 1025613 - DNA, 33 bp, Homo sapien
caaagaatggactttaccaacaagttcgtagga

SEQ ID NO: 1025614 - DNA, 33 bp, Homo sapien
caaagaatggactttatcaacaagttcgtagga

SEQ ID NO: 1025615 - DNA, 33 bp, Homo sapien
ctccaacaaaatagcaacaagtctaatacaact

SEQ ID NO: 1025616 - DNA, 33 bp, Homo sapien
ctccaacaaaatagcagcaagtctaatacaact

SEQ ID NO: 1025617 - DNA, 33 bp, Homo sapien
tgtaaattacatcagcggcagtcatagattttg

SEQ ID NO: 1025618 - DNA, 33 bp, Homo sapien
tgtaaattacatcagctgcagtcatagattttg

SEQ ID NO: 1025619 - DNA, 33 bp, Homo sapien
tcctaggactcccctgacacctactgaatcata

SEQ ID NO: 1025620 - DNA, 33 bp, Homo sapien
tcctaggactcccctgtcacctactgaatcata

SEQ ID NO: 1025621 - DNA, 33 bp, Homo sapien
ttgtattgcaccctaaactatgaggaatatagc

SEQ ID NO: 1025622 - DNA, 33 bp, Homo sapien
ttgtattgcaccctaacctatgaggaatatagc

SEQ ID NO: 1025623 - DNA, 33 bp, Homo sapien
cagtgcttcattaggcgctttgttagccataga

SEQ ID NO: 1025624 - DNA, 33 bp, Homo sapien
cagtgcttcattaggctctttgttagccataga

SEQ ID NO: 1025625 - DNA, 33 bp, Homo sapien
actagcttatccctgccgaaaatgatttctttc

SEQ ID NO: 1025626 - DNA, 33 bp, Homo sapien
actagcttatccctgctgaaaatgatttctttc

SEQ ID NO: 1025627 - DNA, 33 bp, Homo sapien
agcaaagcacagtcccagaatgaaaatgatgct

SEQ ID NO: 1025628 - DNA, 33 bp, Homo sapien
agcaaagcacagtcccggaatgaaaatgatgct

SEQ ID NO: 1025629 - DNA, 33 bp, Homo sapien
ttaagcctacacctccaaaggtcttgcatgttg

SEQ ID NO: 1025630 - DNA, 33 bp, Homo sapien
ttaagcctacacctccgaaggtcttgcatgttg

SEQ ID NO: 1025631 - DNA, 33 bp, Homo sapien
tccgtgtcttgtaccccctataactaacaccat

SEQ ID NO: 1025632 - DNA, 33 bp, Homo sapien
tccgtgtcttgtaccctctataactaacaccat

SEQ ID NO: 1025633 - DNA, 33 bp, Homo sapien
tctctaatctactatacgcattcacttcctcat

SEQ ID NO: 1025634 - DNA, 33 bp, Homo sapien
tctctaatctactatatgcattcacttcctcat

SEQ ID NO: 1025635 - DNA, 33 bp, Homo sapien
tgatgataataataacaagttttaggcacttat

SEQ ID NO: 1025636 - DNA, 33 bp, Homo sapien
tgatgataataataactagttttaggcacttat

SEQ ID NO: 1025637 - DNA, 33 bp, Homo sapien
ggcacaatctactgaacaaaccaagagtggtat

SEQ ID NO: 1025638 - DNA, 33 bp, Homo sapien
ggcacaatctactgaagaaaccaagagtggtat

SEQ ID NO: 1025639 - DNA, 33 bp, Homo sapien
atacgacacaaagtaacatttcaagctgcttgt

SEQ ID NO: 1025640 - DNA, 33 bp, Homo sapien
atacgacacaaagtaatatttcaagctgcttgt

SEQ ID NO: 1025641 - DNA, 33 bp, Homo sapien
aaatacttacctaacaatccactaatacttcta

SEQ ID NO: 1025642 - DNA, 33 bp, Homo sapien
aaatacttacctaacagtccactaatacttcta

SEQ ID NO: 1025643 - DNA, 33 bp, Homo sapien
tactcacctcctccacaacgatgaaccaaaata

SEQ ID NO: 1025644 - DNA, 33 bp, Homo sapien
tactcacctcctccacgacgatgaaccaaaata

SEQ ID NO: 1025645 - DNA, 33 bp, Homo sapien
aatcattcctgaatcaatcctcatgaccagggt

SEQ ID NO: 1025646 - DNA, 33 bp, Homo sapien
aatcattcctgaatcagtcctcatgaccagggt

SEQ ID NO: 1025647 - DNA, 33 bp, Homo sapien
tatgctctagcctagcactctgtccaatagaac

SEQ ID NO: 1025648 - DNA, 33 bp, Homo sapien
tatgctctagcctagcgctctgtccaatagaac

SEQ ID NO: 1025649 - DNA, 33 bp, Homo sapien
tgcctgtcttctcctgaaagcttgcagtataaa

SEQ ID NO: 1025650 - DNA, 33 bp, Homo sapien
tgcctgtcttctcctggaagcttgcagtataaa

SEQ ID NO: 1025651 - DNA, 33 bp, Homo sapien
ctctaggttcacaaggccattaagtgatcctat

SEQ ID NO: 1025652 - DNA, 33 bp, Homo sapien
ctctaggttcacaagggcattaagtgatcctat

SEQ ID NO: 1025653 - DNA, 33 bp, Homo sapien
tcctctattttactaacggataagatgaagttg

SEQ ID NO: 1025654 - DNA, 33 bp, Homo sapien
tcctctattttactaatggataagatgaagttg

SEQ ID NO: 1025655 - DNA, 33 bp, Homo sapien
gaacaaaactggaataactgcattggtctctca

SEQ ID NO: 1025656 - DNA, 33 bp, Homo sapien
gaacaaaactggaatagctgcattggtctctca

SEQ ID NO: 1025657 - DNA, 33 bp, Homo sapien
aaaaaatgatgttgctcactaatctgagtttgt

SEQ ID NO: 1025658 - DNA, 33 bp, Homo sapien
aaaaaatgatgttgcttactaatctgagtttgt

SEQ ID NO: 1025659 - DNA, 33 bp, Homo sapien
gaaaagatcacttttaaagtctccattaccgcc

SEQ ID NO: 1025660 - DNA, 33 bp, Homo sapien
gaaaagatcacttttagagtctccattaccgcc

SEQ ID NO: 1025661 - DNA, 33 bp, Homo sapien
ggagataaggaataaaagaacagacactagtct

SEQ ID NO: 1025662 - DNA, 33 bp, Homo sapien
ggagataaggaataaaggaacagacactagtct

SEQ ID NO: 1025663 - DNA, 33 bp, Homo sapien
ctcaatatttactctagctggcagggcagtata

SEQ ID NO: 1025664 - DNA, 33 bp, Homo sapien
ctcaatatttactctatctggcagggcagtata

SEQ ID NO: 1025665 - DNA, 33 bp, Homo sapien
taggtaaatgtagtcacagattttttgtctcat

SEQ ID NO: 1025666 - DNA, 33 bp, Homo sapien
taggtaaatgtagtcatagattttttgtctcat

SEQ ID NO: 1025667 - DNA, 33 bp, Homo sapien
ataaccaaagtgagaacacacagattggcgtcc

SEQ ID NO: 1025668 - DNA, 33 bp, Homo sapien
ataaccaaagtgagaatacacagattggcgtcc

SEQ ID NO: 1025669 - DNA, 33 bp, Homo sapien
ggcaggaaaaaggagtaacgcataagcatgttt

SEQ ID NO: 1025670 - DNA, 33 bp, Homo sapien
ggcaggaaaaaggagtgacgcataagcatgttt

SEQ ID NO: 1025671 - DNA, 33 bp, Homo sapien
attacttgctttcaaaaaataatagctgccaac

SEQ ID NO: 1025672 - DNA, 33 bp, Homo sapien
attacttgctttcaaagaataatagctgccaac

SEQ ID NO: 1025673 - DNA, 33 bp, Homo sapien
tttgggtgttttcaaaacagattatagtaagac

SEQ ID NO: 1025674 - DNA, 33 bp, Homo sapien
tttgggtgttttcaaaccagattatagtaagac

SEQ ID NO: 1025675 - DNA, 33 bp, Homo sapien
ataaatacataattcaccctaagaaatgttttc

SEQ ID NO: 1025676 - DNA, 33 bp, Homo sapien
ataaatacataattcagcctaagaaatgttttc

SEQ ID NO: 1025677 - DNA, 33 bp, Homo sapien
gcaaataccaaaaagcacaaaagtgactctgga

SEQ ID NO: 1025678 - DNA, 33 bp, Homo sapien
gcaaataccaaaaagcgcaaaagtgactctgga

SEQ ID NO: 1025679 - DNA, 33 bp, Homo sapien
agtctaatgtgtctaagccaggccttaatagaa

SEQ ID NO: 1025680 - DNA, 33 bp, Homo sapien
agtctaatgtgtctaatccaggccttaatagaa

SEQ ID NO: 1025681 - DNA, 33 bp, Homo sapien
ctggtagacagagctacgatgactccacaggga

SEQ ID NO: 1025682 - DNA, 33 bp, Homo sapien
ctggtagacagagctatgatgactccacaggga

SEQ ID NO: 1025683 - DNA, 33 bp, Homo sapien
aagcacagatcaaggcccatgacacattggccc

SEQ ID NO: 1025684 - DNA, 33 bp, Homo sapien
aagcacagatcaaggctcatgacacattggccc

SEQ ID NO: 1025685 - DNA, 33 bp, Homo sapien
cccagggagagaacaaagaagaggagcattgtg

SEQ ID NO: 1025686 - DNA, 33 bp, Homo sapien
cccagggagagaacaaggaagaggagcattgtg

SEQ ID NO: 1025687 - DNA, 33 bp, Homo sapien
gacacattgtaggtcccaatctacatcctttgg

SEQ ID NO: 1025688 - DNA, 33 bp, Homo sapien
gacacattgtaggtcctaatctacatcctttgg

SEQ ID NO: 1025689 - DNA, 33 bp, Homo sapien
ttatctattaagtgcccatcattgccaggtcct

SEQ ID NO: 1025690 - DNA, 33 bp, Homo sapien
ttatctattaagtgcctatcattgccaggtcct

SEQ ID NO: 1025691 - DNA, 33 bp, Homo sapien
atattcatggagtcacaaattattgggtgtttg

SEQ ID NO: 1025692 - DNA, 33 bp, Homo sapien
atattcatggagtcacgaattattgggtgtttg

SEQ ID NO: 1025693 - DNA, 33 bp, Homo sapien
acacacaaatagatcaactggacattatcaaaa

SEQ ID NO: 1025694 - DNA, 33 bp, Homo sapien
acacacaaatagatcagctggacattatcaaaa

SEQ ID NO: 1025695 - DNA, 33 bp, Homo sapien
tcacagcttatgacaacgggttgcgtgtgttct

SEQ ID NO: 1025696 - DNA, 33 bp, Homo sapien
tcacagcttatgacaatgggttgcgtgtgttct

SEQ ID NO: 1025697 - DNA, 33 bp, Homo sapien
aatcctcttttatacacggtgaaattgactctc

SEQ ID NO: 1025698 - DNA, 33 bp, Homo sapien
aatcctcttttatacatggtgaaattgactctc

SEQ ID NO: 1025699 - DNA, 33 bp, Homo sapien
aatagaagttactagaaaacagaaagactaagg

SEQ ID NO: 1025700 - DNA, 33 bp, Homo sapien
aatagaagttactagagaacagaaagactaagg

SEQ ID NO: 1025701 - DNA, 33 bp, Homo sapien
ccattttgggttgtaaaaagtcaatcttctcaa

SEQ ID NO: 1025702 - DNA, 33 bp, Homo sapien
ccattttgggttgtaataagtcaatcttctcaa

SEQ ID NO: 1025703 - DNA, 33 bp, Homo sapien
atcaaataggagaaaccccagaagcatcacaga

SEQ ID NO: 1025704 - DNA, 33 bp, Homo sapien
atcaaataggagaaactccagaagcatcacaga

SEQ ID NO: 1025705 - DNA, 33 bp, Homo sapien
taagaagtaaatgactcaactgtgtgaacattc

SEQ ID NO: 1025706 - DNA, 33 bp, Homo sapien
taagaagtaaatgacttaactgtgtgaacattc

SEQ ID NO: 1025707 - DNA, 33 bp, Homo sapien
ctctaaagtgtacctacgggtgttaccaaatta

SEQ ID NO: 1025708 - DNA, 33 bp, Homo sapien
ctctaaagtgtacctatgggtgttaccaaatta

SEQ ID NO: 1025709 - DNA, 33 bp, Homo sapien
cctccagaactaggaaatatgactttggttctc

SEQ ID NO: 1025710 - DNA, 33 bp, Homo sapien
cctccagaactaggaagtatgactttggttctc

SEQ ID NO: 1025711 - DNA, 33 bp, Homo sapien
tcaggctttacagtgacagaactgaaggtcaga

SEQ ID NO: 1025712 - DNA, 33 bp, Homo sapien
tcaggctttacagtgagagaactgaaggtcaga

SEQ ID NO: 1025713 - DNA, 33 bp, Homo sapien
ttgttagatttctaggaatttgaagtttttgat

SEQ ID NO: 1025714 - DNA, 33 bp, Homo sapien
ttgttagatttctagggatttgaagtttttgat

SEQ ID NO: 1025715 - DNA, 33 bp, Homo sapien
tcccatgagtttgtgaacaagacaaagatatcc

SEQ ID NO: 1025716 - DNA, 33 bp, Homo sapien
tcccatgagtttgtgagcaagacaaagatatcc

SEQ ID NO: 1025717 - DNA, 33 bp, Homo sapien
acttctgggtaggccactattttcactgcaaca

SEQ ID NO: 1025718 - DNA, 33 bp, Homo sapien
acttctgggtaggccattattttcactgcaaca

SEQ ID NO: 1025719 - DNA, 33 bp, Homo sapien
aagatgccacatgatcagacttctttaatttat

SEQ ID NO: 1025720 - DNA, 33 bp, Homo sapien
aagatgccacatgatcggacttctttaatttat

SEQ ID NO: 1025721 - DNA, 33 bp, Homo sapien
tgctgttttgcagaaacggttgttccttctctc

SEQ ID NO: 1025722 - DNA, 33 bp, Homo sapien
tgctgttttgcagaaatggttgttccttctctc

SEQ ID NO: 1025723 - DNA, 33 bp, Homo sapien
gtataatgttttagaaatgaatttggcaaaatt

SEQ ID NO: 1025724 - DNA, 33 bp, Homo sapien
gtataatgttttagaagtgaatttggcaaaatt

SEQ ID NO: 1025725 - DNA, 33 bp, Homo sapien
ggaaattcaggcttccaagtaaggttttcaaat

SEQ ID NO: 1025726 - DNA, 33 bp, Homo sapien
ggaaattcaggcttccgagtaaggttttcaaat

SEQ ID NO: 1025727 - DNA, 33 bp, Homo sapien
atccagtgtacacataaaaaaatcactaagtag

SEQ ID NO: 1025728 - DNA, 33 bp, Homo sapien
atccagtgtacacatagaaaaatcactaagtag

SEQ ID NO: 1025729 - DNA, 33 bp, Homo sapien
aatttcacattggaacaaaaattgaaataacat

SEQ ID NO: 1025730 - DNA, 33 bp, Homo sapien
aatttcacattggaaccaaaattgaaataacat

SEQ ID NO: 1025731 - DNA, 33 bp, Homo sapien
agtttctcattagaaacaggaagctgacatgga

SEQ ID NO: 1025732 - DNA, 33 bp, Homo sapien
agtttctcattagaaataggaagctgacatgga

SEQ ID NO: 1025733 - DNA, 33 bp, Homo sapien
tatatccactattgtaacagagctgtggagtat

SEQ ID NO: 1025734 - DNA, 33 bp, Homo sapien
tatatccactattgtatcagagctgtggagtat

SEQ ID NO: 1025735 - DNA, 33 bp, Homo sapien
tgtgtgaggagaccaccaaccatgctttgtgtg

SEQ ID NO: 1025736 - DNA, 33 bp, Homo sapien
tgtgtgaggagaccacgaaccatgctttgtgtg

SEQ ID NO: 1025737 - DNA, 33 bp, Homo sapien
tgcaagatgaatatgcgattgtttggaggttaa

SEQ ID NO: 1025738 - DNA, 33 bp, Homo sapien
tgcaagatgaatatgctattgtttggaggttaa

SEQ ID NO: 1025739 - DNA, 33 bp, Homo sapien
acaattttaggtcagccctgagtatatggacca

SEQ ID NO: 1025740 - DNA, 33 bp, Homo sapien
acaattttaggtcagctctgagtatatggacca

SEQ ID NO: 1025741 - DNA, 33 bp, Homo sapien
gccaagatgtctgtaacgggaaattgggccact

SEQ ID NO: 1025742 - DNA, 33 bp, Homo sapien
gccaagatgtctgtaatgggaaattgggccact

SEQ ID NO: 1025743 - DNA, 33 bp, Homo sapien
taaaccatgtgatagacgtcaactttcaacttt

SEQ ID NO: 1025744 - DNA, 33 bp, Homo sapien
taaaccatgtgatagatgtcaactttcaacttt

SEQ ID NO: 1025745 - DNA, 33 bp, Homo sapien
ttgactactgtgattgcactcgtctggacttca

SEQ ID NO: 1025746 - DNA, 33 bp, Homo sapien
ttgactactgtgattggactcgtctggacttca

SEQ ID NO: 1025747 - DNA, 33 bp, Homo sapien
tacaggataatctccaatcttaagatccttaac

SEQ ID NO: 1025748 - DNA, 33 bp, Homo sapien
tacaggataatctccagtcttaagatccttaac

SEQ ID NO: 1025749 - DNA, 33 bp, Homo sapien
ttgtataaatgctgtgaaaaattcagatgtggc

SEQ ID NO: 1025750 - DNA, 33 bp, Homo sapien
ttgtataaatgctgtggaaaattcagatgtggc

SEQ ID NO: 1025751 - DNA, 33 bp, Homo sapien
atgtataatgcttatcaaccataattccagctc

SEQ ID NO: 1025752 - DNA, 33 bp, Homo sapien
atgtataatgcttatcgaccataattccagctc

SEQ ID NO: 1025753 - DNA, 33 bp, Homo sapien
aggtgaacgacatcaaagagggaatcctgggtt

SEQ ID NO: 1025754 - DNA, 33 bp, Homo sapien
aggtgaacgacatcaaggagggaatcctgggtt

SEQ ID NO: 1025755 - DNA, 33 bp, Homo sapien
tggatgtgtagagacaaccagacagaagttcaa

SEQ ID NO: 1025756 - DNA, 33 bp, Homo sapien
tggatgtgtagagacagccagacagaagttcaa

SEQ ID NO: 1025757 - DNA, 33 bp, Homo sapien
agtcatctttttttagcaaggggcagaaattca

SEQ ID NO: 1025758 - DNA, 33 bp, Homo sapien
agtcatctttttttagtaaggggcagaaattca

SEQ ID NO: 1025759 - DNA, 33 bp, Homo sapien
acttggatagtaacaccagcagataaggagctc

SEQ ID NO: 1025760 - DNA, 33 bp, Homo sapien
acttggatagtaacacgagcagataaggagctc

SEQ ID NO: 1025761 - DNA, 33 bp, Homo sapien
ccttgcttagccaaaaacatctattgtaattgc

SEQ ID NO: 1025762 - DNA, 33 bp, Homo sapien
ccttgcttagccaaaatcatctattgtaattgc

SEQ ID NO: 1025763 - DNA, 33 bp, Homo sapien
agccaaacagaaaatacaacagaagattggatg

SEQ ID NO: 1025764 - DNA, 33 bp, Homo sapien
agccaaacagaaaatagaacagaagattggatg

SEQ ID NO: 1025765 - DNA, 33 bp, Homo sapien
caccacaggcaagaaacgcctccatgattcaat

SEQ ID NO: 1025766 - DNA, 33 bp, Homo sapien
caccacaggcaagaaaggcctccatgattcaat

SEQ ID NO: 1025767 - DNA, 33 bp, Homo sapien
gttttatgggccacataaacttggggaatgggg

SEQ ID NO: 1025768 - DNA, 33 bp, Homo sapien
gttttatgggccacattaacttggggaatgggg

SEQ ID NO: 1025769 - DNA, 33 bp, Homo sapien
actgcaattcgattgcaaaaatggaatttattg

SEQ ID NO: 1025770 - DNA, 33 bp, Homo sapien
actgcaattcgattgcgaaaatggaatttattg

SEQ ID NO: 1025771 - DNA, 33 bp, Homo sapien
tttgaatttgccctcaagatagtgacagttacc

SEQ ID NO: 1025772 - DNA, 33 bp, Homo sapien
tttgaatttgccctcaggatagtgacagttacc

SEQ ID NO: 1025773 - DNA, 33 bp, Homo sapien
taatttggttaagaatcagaaatattgaatgct

SEQ ID NO: 1025774 - DNA, 33 bp, Homo sapien
taatttggttaagaatgagaaatattgaatgct

SEQ ID NO: 1025775 - DNA, 33 bp, Homo sapien
ggacacagctgctggaagtgatctctgatttga

SEQ ID NO: 1025776 - DNA, 33 bp, Homo sapien
ggacacagctgctggacgtgatctctgatttga

SEQ ID NO: 1025777 - DNA, 33 bp, Homo sapien
tggcatcttttgatgacattggatcagatatat

SEQ ID NO: 1025778 - DNA, 33 bp, Homo sapien
tggcatcttttgatgagattggatcagatatat

SEQ ID NO: 1025779 - DNA, 33 bp, Homo sapien
attcctctttcaaggacattatttcaaaaccat

SEQ ID NO: 1025780 - DNA, 33 bp, Homo sapien
attcctctttcaaggatattatttcaaaaccat

SEQ ID NO: 1025781 - DNA, 33 bp, Homo sapien
tggaggtcagaaacctaaaatgagtcttcccgg

SEQ ID NO: 1025782 - DNA, 33 bp, Homo sapien
tggaggtcagaaacctgaaatgagtcttcccgg

SEQ ID NO: 1025783 - DNA, 33 bp, Homo sapien
ggacaatggttatgaaagatgacctatcagcac

SEQ ID NO: 1025784 - DNA, 33 bp, Homo sapien
ggacaatggttatgaacgatgacctatcagcac

SEQ ID NO: 1025785 - DNA, 33 bp, Homo sapien
cttttcaaagtactcaacccttaaatggaaatg

SEQ ID NO: 1025786 - DNA, 33 bp, Homo sapien
cttttcaaagtactcatcccttaaatggaaatg

SEQ ID NO: 1025787 - DNA, 33 bp, Homo sapien
caaagctaatagttgacgtgtatgaatcatttc

SEQ ID NO: 1025788 - DNA, 33 bp, Homo sapien
caaagctaatagttgaggtgtatgaatcatttc

SEQ ID NO: 1025789 - DNA, 33 bp, Homo sapien
aggtgttctcttcccaaggtgaatctcctgacc

SEQ ID NO: 1025790 - DNA, 33 bp, Homo sapien
aggtgttctcttcccacggtgaatctcctgacc

SEQ ID NO: 1025791 - DNA, 33 bp, Homo sapien
taagcttcttttgagccgatgttcagttgagac

SEQ ID NO: 1025792 - DNA, 33 bp, Homo sapien
taagcttcttttgagctgatgttcagttgagac

SEQ ID NO: 1025793 - DNA, 33 bp, Homo sapien
agaggtgcggttttacacagggtggccaggaaa

SEQ ID NO: 1025794 - DNA, 33 bp, Homo sapien
agaggtgcggttttacgcagggtggccaggaaa

SEQ ID NO: 1025795 - DNA, 33 bp, Homo sapien
ggagcaaagaaaacatcaagttctgaattaaga

SEQ ID NO: 1025796 - DNA, 33 bp, Homo sapien
ggagcaaagaaaacatgaagttctgaattaaga

SEQ ID NO: 1025797 - DNA, 33 bp, Homo sapien
gcagggcatcaagaagaaagtgagggttcctct

SEQ ID NO: 1025798 - DNA, 33 bp, Homo sapien
gcagggcatcaagaagtaagtgagggttcctct

SEQ ID NO: 1025799 - DNA, 33 bp, Homo sapien
tgctattaataaatgacagggcttaaatataag

SEQ ID NO: 1025800 - DNA, 33 bp, Homo sapien
tgctattaataaatgagagggcttaaatataag

SEQ ID NO: 1025801 - DNA, 33 bp, Homo sapien
atttgaagtctagaaactgtgtatctccatagc

SEQ ID NO: 1025802 - DNA, 33 bp, Homo sapien
atttgaagtctagaaattgtgtatctccatagc

SEQ ID NO: 1025803 - DNA, 33 bp, Homo sapien
actaagtcttaacacccggaggacgtgaagata

SEQ ID NO: 1025804 - DNA, 33 bp, Homo sapien
actaagtcttaacacctggaggacgtgaagata

SEQ ID NO: 1025805 - DNA, 33 bp, Homo sapien
gtggggaaaaatccaaacatatctcctgactgc

SEQ ID NO: 1025806 - DNA, 33 bp, Homo sapien
gtggggaaaaatccaaccatatctcctgactgc

SEQ ID NO: 1025807 - DNA, 33 bp, Homo sapien
ttaattccatgtttcacccacccctgataagac

SEQ ID NO: 1025808 - DNA, 33 bp, Homo sapien
ttaattccatgtttcatccacccctgataagac

SEQ ID NO: 1025809 - DNA, 33 bp, Homo sapien
aaagatactattatgacgaaatggccatctgag

SEQ ID NO: 1025810 - DNA, 33 bp, Homo sapien
aaagatactattatgatgaaatggccatctgag

SEQ ID NO: 1025811 - DNA, 33 bp, Homo sapien
tgtaaatgatcacagaaggcatcaaggctgaac

SEQ ID NO: 1025812 - DNA, 33 bp, Homo sapien
tgtaaatgatcacagagggcatcaaggctgaac

SEQ ID NO: 1025813 - DNA, 33 bp, Homo sapien
actcattagctttcacactgcaagaaaatggct

SEQ ID NO: 1025814 - DNA, 33 bp, Homo sapien
actcattagctttcacgctgcaagaaaatggct

SEQ ID NO: 1025815 - DNA, 33 bp, Homo sapien
ggtccttgacttcccacaacaccctaagtgttg

SEQ ID NO: 1025816 - DNA, 33 bp, Homo sapien
ggtccttgacttcccataacaccctaagtgttg

SEQ ID NO: 1025817 - DNA, 33 bp, Homo sapien
attcaattagattttcccagactgatagccttg

SEQ ID NO: 1025818 - DNA, 33 bp, Homo sapien
attcaattagattttcgcagactgatagccttg

SEQ ID NO: 1025819 - DNA, 33 bp, Homo sapien
cattagcatatgaaagcctctgaaaaaatcctg

SEQ ID NO: 1025820 - DNA, 33 bp, Homo sapien
cattagcatatgaaaggctctgaaaaaatcctg

SEQ ID NO: 1025821 - DNA, 33 bp, Homo sapien
actccactccagtgtaacatcagttccttactt

SEQ ID NO: 1025822 - DNA, 33 bp, Homo sapien
actccactccagtgtagcatcagttccttactt

SEQ ID NO: 1025823 - DNA, 33 bp, Homo sapien
ctgacaaaggatagaacgtttgctcaatatgtg

SEQ ID NO: 1025824 - DNA, 33 bp, Homo sapien
ctgacaaaggatagaatgtttgctcaatatgtg

SEQ ID NO: 1025825 - DNA, 33 bp, Homo sapien
actagggaatccagacccaaatttgtgaaatta

SEQ ID NO: 1025826 - DNA, 33 bp, Homo sapien
actagggaatccagactcaaatttgtgaaatta

SEQ ID NO: 1025827 - DNA, 33 bp, Homo sapien
aaatatgaatttgggggatcacagttcagccca

SEQ ID NO: 1025828 - DNA, 33 bp, Homo sapien
aaatatgaatttggggtatcacagttcagccca

SEQ ID NO: 1025829 - DNA, 33 bp, Homo sapien
agatgggagaatgttacagtagggtgagccctc

SEQ ID NO: 1025830 - DNA, 33 bp, Homo sapien
agatgggagaatgttagagtagggtgagccctc

SEQ ID NO: 1025831 - DNA, 33 bp, Homo sapien
gaagtcccagtggaaacgtcaccatacagatat

SEQ ID NO: 1025832 - DNA, 33 bp, Homo sapien
gaagtcccagtggaaatgtcaccatacagatat

SEQ ID NO: 1025833 - DNA, 33 bp, Homo sapien
tgctgaaagtcttctacagctagattctaagta

SEQ ID NO: 1025834 - DNA, 33 bp, Homo sapien
tgctgaaagtcttctatagctagattctaagta

SEQ ID NO: 1025835 - DNA, 33 bp, Homo sapien
ttaatcaagggccactaaacatgggaccatttg

SEQ ID NO: 1025836 - DNA, 33 bp, Homo sapien
ttaatcaagggccactgaacatgggaccatttg

SEQ ID NO: 1025837 - DNA, 33 bp, Homo sapien
gttttttcttgatacccggacatgagttactgg

SEQ ID NO: 1025838 - DNA, 33 bp, Homo sapien
gttttttcttgatacctggacatgagttactgg

SEQ ID NO: 1025839 - DNA, 33 bp, Homo sapien
acttgtccacaaaagaagacagtaggaaaggaa

SEQ ID NO: 1025840 - DNA, 33 bp, Homo sapien
acttgtccacaaaagacgacagtaggaaaggaa

SEQ ID NO: 1025841 - DNA, 33 bp, Homo sapien
taaaactgtaatgccacaatagtgatgtatcaa

SEQ ID NO: 1025842 - DNA, 33 bp, Homo sapien
taaaactgtaatgccataatagtgatgtatcaa

SEQ ID NO: 1025843 - DNA, 33 bp, Homo sapien
aactctaatgggataaatacgaaaagacccaca

SEQ ID NO: 1025844 - DNA, 33 bp, Homo sapien
aactctaatgggataagtacgaaaagacccaca

SEQ ID NO: 1025845 - DNA, 33 bp, Homo sapien
gtaaagcttggccacaagtcaatgggggaagga

SEQ ID NO: 1025846 - DNA, 33 bp, Homo sapien
gtaaagcttggccacaggtcaatgggggaagga

SEQ ID NO: 1025847 - DNA, 33 bp, Homo sapien
ggaataacggaggatccgatcaaagggaaagca

SEQ ID NO: 1025848 - DNA, 33 bp, Homo sapien
ggaataacggaggatctgatcaaagggaaagca

SEQ ID NO: 1025849 - DNA, 33 bp, Homo sapien
ccctgatagcataaaaatacatgacaatgactc

SEQ ID NO: 1025850 - DNA, 33 bp, Homo sapien
ccctgatagcataaaagtacatgacaatgactc

SEQ ID NO: 1025851 - DNA, 33 bp, Homo sapien
atccctgttacacgaaacatctaaactatatgt

SEQ ID NO: 1025852 - DNA, 33 bp, Homo sapien
atccctgttacacgaagcatctaaactatatgt

SEQ ID NO: 1025853 - DNA, 33 bp, Homo sapien
attggagagagagaaccctggaggatttgggca

SEQ ID NO: 1025854 - DNA, 33 bp, Homo sapien
attggagagagagaactctggaggatttgggca

SEQ ID NO: 1025855 - DNA, 33 bp, Homo sapien
taaatctttacccaacacttggaaccacaaaat

SEQ ID NO: 1025856 - DNA, 33 bp, Homo sapien
taaatctttacccaacgcttggaaccacaaaat

SEQ ID NO: 1025857 - DNA, 33 bp, Homo sapien
atcaacatgcccataagaacctctgcaaaatct

SEQ ID NO: 1025858 - DNA, 33 bp, Homo sapien
atcaacatgcccataataacctctgcaaaatct

SEQ ID NO: 1025859 - DNA, 33 bp, Homo sapien
gtctaaagcaatgtcaactcatagcagggcctc

SEQ ID NO: 1025860 - DNA, 33 bp, Homo sapien
gtctaaagcaatgtcagctcatagcagggcctc

SEQ ID NO: 1025861 - DNA, 33 bp, Homo sapien
cttgatggagcttacagtccagtggagtgagac

SEQ ID NO: 1025862 - DNA, 33 bp, Homo sapien
cttgatggagcttacattccagtggagtgagac

SEQ ID NO: 1025863 - DNA, 33 bp, Homo sapien
tgccatgacaaactcaaaaaatctcatcactct

SEQ ID NO: 1025864 - DNA, 33 bp, Homo sapien
tgccatgacaaactcacaaaatctcatcactct

SEQ ID NO: 1025865 - DNA, 33 bp, Homo sapien
cactctggtctgagaaatatgcctagaacaaaa

SEQ ID NO: 1025866 - DNA, 33 bp, Homo sapien
cactctggtctgagaactatgcctagaacaaaa

SEQ ID NO: 1025867 - DNA, 33 bp, Homo sapien
tgactaaggcagcaccacagggagatacagaag

SEQ ID NO: 1025868 - DNA, 33 bp, Homo sapien
tgactaaggcagcaccgcagggagatacagaag

SEQ ID NO: 1025869 - DNA, 33 bp, Homo sapien
accagttcctgactgaagcacaaggctgcaact

SEQ ID NO: 1025870 - DNA, 33 bp, Homo sapien
accagttcctgactgatgcacaaggctgcaact

SEQ ID NO: 1025871 - DNA, 33 bp, Homo sapien
aatacatctccagttacggccctctggacaagt

SEQ ID NO: 1025872 - DNA, 33 bp, Homo sapien
aatacatctccagttatggccctctggacaagt

SEQ ID NO: 1025873 - DNA, 33 bp, Homo sapien; identical to SEQ ID NO: 1025871

SEQ ID NO: 1025874 - DNA, 33 bp, Homo sapien; identical to SEQ ID NO: 1025872

SEQ ID NO: 1025875 - DNA, 33 bp, Homo sapien
gtttcacaggactccaaactttgcaaattgaaa

SEQ ID NO: 1025876 - DNA, 33 bp, Homo sapien
gtttcacaggactccagactttgcaaattgaaa

SEQ ID NO: 1025877 - DNA, 33 bp, Homo sapien
ttaggtgttgctaagtgacaagaagttataatc

SEQ ID NO: 1025878 - DNA, 33 bp, Homo sapien
ttaggtgttgctaagttacaagaagttataatc

SEQ ID NO: 1025879 - DNA, 33 bp, Homo sapien
ggggggtaaaagcatccgataaatacccccttt

SEQ ID NO: 1025880 - DNA, 33 bp, Homo sapien
ggggggtaaaagcatcggataaatacccccttt

SEQ ID NO: 1025881 - DNA, 33 bp, Homo sapien
agctgaaacagttttccctgcttctgagtggca

SEQ ID NO: 1025882 - DNA, 33 bp, Homo sapien
agctgaaacagttttctctgcttctgagtggca

SEQ ID NO: 1025883 - DNA, 33 bp, Homo sapien
gggatagttcccagaccgtcgactttctgtccc

SEQ ID NO: 1025884 - DNA, 33 bp, Homo sapien
gggatagttcccagactgtcgactttctgtccc

SEQ ID NO: 1025885 - DNA, 33 bp, Homo sapien
ttgcgagtcaagggaacccaggagttgctctct

SEQ ID NO: 1025886 - DNA, 33 bp, Homo sapien
ttgcgagtcaagggaatccaggagttgctctct

SEQ ID NO: 1025887 - DNA, 33 bp, Homo sapien
agtgaagcagaaagtcacctcccagcgcagaat

SEQ ID NO: 1025888 - DNA, 33 bp, Homo sapien
agtgaagcagaaagtcgcctcccagcgcagaat

SEQ ID NO: 1025889 - DNA, 33 bp, Homo sapien
tctgtccacagagtaaaggtcaattaggtagtg

SEQ ID NO: 1025890 - DNA, 33 bp, Homo sapien
tctgtccacagagtaagggtcaattaggtagtg

SEQ ID NO: 1025891 - DNA, 33 bp, Homo sapien
gagctcttagccatcacattacaccgactttct

SEQ ID NO: 1025892 - DNA, 33 bp, Homo sapien
gagctcttagccatcatattacaccgactttct

SEQ ID NO: 1025893 - DNA, 33 bp, Homo sapien
tttctatttgtcagcaagttttgtcagtactta

SEQ ID NO: 1025894 - DNA, 33 bp, Homo sapien
tttctatttgtcagcacgttttgtcagtactta

SEQ ID NO: 1025895 - DNA, 33 bp, Homo sapien
ctgactagctactgaccgtaacaagacttgtac

SEQ ID NO: 1025896 - DNA, 33 bp, Homo sapien
ctgactagctactgactgtaacaagacttgtac

SEQ ID NO: 1025897 - DNA, 33 bp, Homo sapien
tgaacagggcaggaaaaaccaggaatgtcaggc

SEQ ID NO: 1025898 - DNA, 33 bp, Homo sapien
tgaacagggcaggaaacaccaggaatgtcaggc

SEQ ID NO: 1025899 - DNA, 33 bp, Homo sapien
tagctaatgacattccaaccctatcattagcat

SEQ ID NO: 1025900 - DNA, 33 bp, Homo sapien
tagctaatgacattccgaccctatcattagcat

SEQ ID NO: 1025901 - DNA, 33 bp, Homo sapien
gctttatatgtaaagaagtctcatagcattttc

SEQ ID NO: 1025902 - DNA, 33 bp, Homo sapien
gctttatatgtaaagatgtctcatagcattttc

SEQ ID NO: 1025903 - DNA, 33 bp, Homo sapien
ttacttcatccacatccgagaagcctcctgaat

SEQ ID NO: 1025904 - DNA, 33 bp, Homo sapien
ttacttcatccacatctgagaagcctcctgaat

SEQ ID NO: 1025905 - DNA, 33 bp, Homo sapien
tttactgtgcactgaaaaggtctctatattttg

SEQ ID NO: 1025906 - DNA, 33 bp, Homo sapien
tttactgtgcactgaacaggtctctatattttg

SEQ ID NO: 1025907 - DNA, 33 bp, Homo sapien
ctcacaaggctgtggaaaggatcgaactgagag

SEQ ID NO: 1025908 - DNA, 33 bp, Homo sapien
ctcacaaggctgtggataggatcgaactgagag

SEQ ID NO: 1025909 - DNA, 33 bp, Homo sapien
tagaggcttttatagacgccacaatgattggag

SEQ ID NO: 1025910 - DNA, 33 bp, Homo sapien
tagaggcttttatagatgccacaatgattggag

SEQ ID NO: 1025911 - DNA, 33 bp, Homo sapien
ctcctacagatcactcaacctctgaggttccat

SEQ ID NO: 1025912 - DNA, 33 bp, Homo sapien
ctcctacagatcactcgacctctgaggttccat

SEQ ID NO: 1025913 - DNA, 33 bp, Homo sapien
agctgtcccttgaaaaaagtgttccatggtcag

SEQ ID NO: 1025914 - DNA, 33 bp, Homo sapien
agctgtcccttgaaaagagtgttccatggtcag

SEQ ID NO: 1025915 - DNA, 33 bp, Homo sapien
agagcaggacccggacagtaggaatccacaggc

SEQ ID NO: 1025916 - DNA, 33 bp, Homo sapien
agagcaggacccggacggtaggaatccacaggc

SEQ ID NO: 1025917 - DNA, 33 bp, Homo sapien
tcaccacaatgcttgccgcaaacacctgcagac

SEQ ID NO: 1025918 - DNA, 33 bp, Homo sapien
tcaccacaatgcttgctgcaaacacctgcagac

SEQ ID NO: 1025919 - DNA, 33 bp, Homo sapien
acagtggcagacatcaacatccaatagaagttt

SEQ ID NO: 1025920 - DNA, 33 bp, Homo sapien
acagtggcagacatcaccatccaatagaagttt

SEQ ID NO: 1025921 - DNA, 33 bp, Homo sapien
ggtgttagacctacaccagtccagtacactaac

SEQ ID NO: 1025922 - DNA, 33 bp, Homo sapien
ggtgttagacctacactagtccagtacactaac

SEQ ID NO: 1025923 - DNA, 33 bp, Homo sapien
cagacacaagccagacagagttggtttccatca

SEQ ID NO: 1025924 - DNA, 33 bp, Homo sapien
cagacacaagccagacggagttggtttccatca

SEQ ID NO: 1025925 - DNA, 33 bp, Homo sapien
tttatcttgaatgttacgtcatctttactactg

SEQ ID NO: 1025926 - DNA, 33 bp, Homo sapien
tttatcttgaatgttatgtcatctttactactg

SEQ ID NO: 1025927 - DNA, 33 bp, Homo sapien
ttctactgcaactcaacgaaagaaaatacagtt

SEQ ID NO: 1025928 - DNA, 33 bp, Homo sapien
ttctactgcaactcaatgaaagaaaatacagtt

SEQ ID NO: 1025929 - DNA, 33 bp, Homo sapien
caaccaataggcttaacgagatacctgcacagt

SEQ ID NO: 1025930 - DNA, 33 bp, Homo sapien
caaccaataggcttaatgagatacctgcacagt

SEQ ID NO: 1025931 - DNA, 33 bp, Homo sapien
aagtagtgatcaagaccgggacttaaaatgaac

SEQ ID NO: 1025932 - DNA, 33 bp, Homo sapien
aagtagtgatcaagactgggacttaaaatgaac

SEQ ID NO: 1025933 - DNA, 33 bp, Homo sapien
catgactatgattctaactctgcaaggacaaca

SEQ ID NO: 1025934 - DNA, 33 bp, Homo sapien
catgactatgattctagctctgcaaggacaaca

SEQ ID NO: 1025935 - DNA, 33 bp, Homo sapien
ttggtatctccagctaaagaatgttggaaggag

SEQ ID NO: 1025936 - DNA, 33 bp, Homo sapien
ttggtatctccagctacagaatgttggaaggag

SEQ ID NO: 1025937 - DNA, 33 bp, Homo sapien
atgttatagatgagtaagctgatgatctgagaa

SEQ ID NO: 1025938 - DNA, 33 bp, Homo sapien
atgttatagatgagtacgctgatgatctgagaa

SEQ ID NO: 1025939 - DNA, 33 bp, Homo sapien
tttcttcacattctgagattctactcttcaaat

SEQ ID NO: 1025940 - DNA, 33 bp, Homo sapien
tttcttcacattctgatattctactcttcaaat

SEQ ID NO: 1025941 - DNA, 33 bp, Homo sapien
ggtagttccacctccactaccagcttctaagaa

SEQ ID NO: 1025942 - DNA, 33 bp, Homo sapien
ggtagttccacctccattaccagcttctaagaa

SEQ ID NO: 1025943 - DNA, 33 bp, Homo sapien
tcaaagattctgaaacagatgaatgatatgttt

SEQ ID NO: 1025944 - DNA, 33 bp, Homo sapien
tcaaagattctgaaacggatgaatgatatgttt

SEQ ID NO: 1025945 - DNA, 33 bp, Homo sapien
tgagatccagaggctgaaaggtgttaaccaggg

SEQ ID NO: 1025946 - DNA, 33 bp, Homo sapien
tgagatccagaggctggaaggtgttaaccaggg

SEQ ID NO: 1025947 - DNA, 33 bp, Homo sapien
agtattgtagtcgccaaagaccatgactttgaa

SEQ ID NO: 1025948 - DNA, 33 bp, Homo sapien
agtattgtagtcgccagagaccatgactttgaa

SEQ ID NO: 1025949 - DNA, 33 bp, Homo sapien
aatatgaattagtcccaaatcactatgtctact

SEQ ID NO: 1025950 - DNA, 33 bp, Homo sapien
aatatgaattagtcccgaatcactatgtctact

SEQ ID NO: 1025951 - DNA, 33 bp, Homo sapien
attgccagcaagaatgcagtctttaaaaaatgg

SEQ ID NO: 1025952 - DNA, 33 bp, Homo sapien
attgccagcaagaatggagtctttaaaaaatgg

SEQ ID NO: 1025953 - DNA, 33 bp, Homo sapien
ccactagtcctagcaccgtcctgcgaggtggta

SEQ ID NO: 1025954 - DNA, 33 bp, Homo sapien
ccactagtcctagcactgtcctgcgaggtggta

SEQ ID NO: 1025955 - DNA, 33 bp, Homo sapien
tggcacgatcatagtgcacaatatctggctaat

SEQ ID NO: 1025956 - DNA, 33 bp, Homo sapien
tggcacgatcatagtgtacaatatctggctaat

SEQ ID NO: 1025957 - DNA, 33 bp, Homo sapien
tgacatgtagcttttaaaaaggtggtgacagtt

SEQ ID NO: 1025958 - DNA, 33 bp, Homo sapien
tgacatgtagcttttagaaaggtggtgacagtt

SEQ ID NO: 1025959 - DNA, 33 bp, Homo sapien
gactccaacctctgcaaaataagcaaaagactt

SEQ ID NO: 1025960 - DNA, 33 bp, Homo sapien
gactccaacctctgcacaataagcaaaagactt

SEQ ID NO: 1025961 - DNA, 33 bp, Homo sapien
tattatgaacagctatatactcacaaaccagaa

SEQ ID NO: 1025962 - DNA, 33 bp, Homo sapien
tattatgaacagctatttactcacaaaccagaa

SEQ ID NO: 1025963 - DNA, 33 bp, Homo sapien
aggagaagatccaaataacacaatcagaagtga

SEQ ID NO: 1025964 - DNA, 33 bp, Homo sapien
aggagaagatccaaatgacacaatcagaagtga

SEQ ID NO: 1025965 - DNA, 33 bp, Homo sapien
agacttctgggattcaccagagaggagatggga

SEQ ID NO: 1025966 - DNA, 33 bp, Homo sapien
agacttctgggattcatcagagaggagatggga

SEQ ID NO: 1025967 - DNA, 33 bp, Homo sapien
agataagtgggtgtgacgatgttccaataaaac

SEQ ID NO: 1025968 - DNA, 33 bp, Homo sapien
agataagtgggtgtgatgatgttccaataaaac

SEQ ID NO: 1025969 - DNA, 33 bp, Homo sapien
ttttctgtccgtcaaacattgcatcaggaaatg

SEQ ID NO: 1025970 - DNA, 33 bp, Homo sapien
ttttctgtccgtcaaatattgcatcaggaaatg

SEQ ID NO: 1025971 - DNA, 33 bp, Homo sapien
tttccgtgcattgtgcactaatatctttctaag

SEQ ID NO: 1025972 - DNA, 33 bp, Homo sapien
tttccgtgcattgtgctctaatatctttctaag

SEQ ID NO: 1025973 - DNA, 33 bp, Homo sapien
attcactgttatagtcacattgaaagttcaaag

SEQ ID NO: 1025974 - DNA, 33 bp, Homo sapien
attcactgttatagtctcattgaaagttcaaag

SEQ ID NO: 1025975 - DNA, 33 bp, Homo sapien
ggaagtcagaaacttgaatttgccagatgttga

SEQ ID NO: 1025976 - DNA, 33 bp, Homo sapien
ggaagtcagaaacttggatttgccagatgttga

SEQ ID NO: 1025977 - DNA, 33 bp, Homo sapien
aatgcattttctttcacaatacaaattgcaaaa

SEQ ID NO: 1025978 - DNA, 33 bp, Homo sapien
aatgcattttctttcataatacaaattgcaaaa

SEQ ID NO: 1025979 - DNA, 33 bp, Homo sapien
acttgggcgctagagacgtttattagttgaggt

SEQ ID NO: 1025980 - DNA, 33 bp, Homo sapien
acttgggcgctagagatgtttattagttgaggt

SEQ ID NO: 1025981 - DNA, 33 bp, Homo sapien
tgtgtgtgtgtggaaacgagggtaatagataat

SEQ ID NO: 1025982 - DNA, 33 bp, Homo sapien
tgtgtgtgtgtggaaatgagggtaatagataat

SEQ ID NO: 1025983 - DNA, 33 bp, Homo sapien
aattcagtgtaagagaagcattccaagcaaaaa

SEQ ID NO: 1025984 - DNA, 33 bp, Homo sapien
aattcagtgtaagagaggcattccaagcaaaaa

SEQ ID NO: 1025985 - DNA, 33 bp, Homo sapien
tggctggttaaaggtgcacgttaaacatacaaa

SEQ ID NO: 1025986 - DNA, 33 bp, Homo sapien
tggctggttaaaggtgtacgttaaacatacaaa

SEQ ID NO: 1025987 - DNA, 33 bp, Homo sapien
gaccccaaaccattgccaccacacttggggtta

SEQ ID NO: 1025988 - DNA, 33 bp, Homo sapien
gaccccaaaccattgctaccacacttggggtta

SEQ ID NO: 1025989 - DNA, 33 bp, Homo sapien
tgaatccccttgtgcaacgatgactaacccctt

SEQ ID NO: 1025990 - DNA, 33 bp, Homo sapien
tgaatccccttgtgcagcgatgactaacccctt

SEQ ID NO: 1025991 - DNA, 33 bp, Homo sapien
atccttctctgtgccaaacatttggtgcagaat

SEQ ID NO: 1025992 - DNA, 33 bp, Homo sapien
atccttctctgtgccagacatttggtgcagaat

SEQ ID NO: 1025993 - DNA, 33 bp, Homo sapien
atgagtcttaagaacactgttaaatgccgtaaa

SEQ ID NO: 1025994 - DNA, 33 bp, Homo sapien
atgagtcttaagaacattgttaaatgccgtaaa

SEQ ID NO: 1025995 - DNA, 33 bp, Homo sapien
ggaaaccagggaactcactctaagtccacagct

SEQ ID NO: 1025996 - DNA, 33 bp, Homo sapien
ggaaaccagggaactcgctctaagtccacagct

SEQ ID NO: 1025997 - DNA, 33 bp, Homo sapien
tctagtcaccactgcaaacaggttattttgtgc

SEQ ID NO: 1025998 - DNA, 33 bp, Homo sapien
tctagtcaccactgcagacaggttattttgtgc

SEQ ID NO: 1025999 - DNA, 33 bp, Homo sapien
catgtaacacatacaacggcctaactgcttttt

SEQ ID NO: 1026000 - DNA, 33 bp, Homo sapien
catgtaacacatacaatggcctaactgcttttt

SEQ ID NO: 1026001 - DNA, 33 bp, Homo sapien
gggaatttagttaccactcacagcattgccact

SEQ ID NO: 1026002 - DNA, 33 bp, Homo sapien
gggaatttagttaccattcacagcattgccact

SEQ ID NO: 1026003 - DNA, 33 bp, Homo sapien
attgtcaggagacatcaatagccctttgcagtt

SEQ ID NO: 1026004 - DNA, 33 bp, Homo sapien
attgtcaggagacatcgatagccctttgcagtt

SEQ ID NO: 1026005 - DNA, 33 bp, Homo sapien
caaggaagtcagcttacagtcccacattcttcg

SEQ ID NO: 1026006 - DNA, 33 bp, Homo sapien
caaggaagtcagcttatagtcccacattcttcg

SEQ ID NO: 1026007 - DNA, 33 bp, Homo sapien
aatgacaacagtgggaacttaaatggcttacag

SEQ ID NO: 1026008 - DNA, 33 bp, Homo sapien
aatgacaacagtgggagcttaaatggcttacag

SEQ ID NO: 1026009 - DNA, 33 bp, Homo sapien
tgatagcccttggcaacgtattaacctctctgg

SEQ ID NO: 1026010 - DNA, 33 bp, Homo sapien
tgatagcccttggcaatgtattaacctctctgg

SEQ ID NO: 1026011 - DNA, 33 bp, Homo sapien
ttcctccatcctaagaaccctagctggaatctt

SEQ ID NO: 1026012 - DNA, 33 bp, Homo sapien
ttcctccatcctaagagccctagctggaatctt

SEQ ID NO: 1026013 - DNA, 33 bp, Homo sapien
tgaagctccaggaagaaatttagaatggaaaca

SEQ ID NO: 1026014 - DNA, 33 bp, Homo sapien
tgaagctccaggaagacatttagaatggaaaca

SEQ ID NO: 1026015 - DNA, 33 bp, Homo sapien
aatgaccctgttcaacactggccttgagctgaa

SEQ ID NO: 1026016 - DNA, 33 bp, Homo sapien
aatgaccctgttcaacgctggccttgagctgaa

SEQ ID NO: 1026017 - DNA, 33 bp, Homo sapien
agtagcgcaggacaataaaaccagtatgagttg

SEQ ID NO: 1026018 - DNA, 33 bp, Homo sapien
agtagcgcaggacaatgaaaccagtatgagttg

SEQ ID NO: 1026019 - DNA, 33 bp, Homo sapien
attcactctcacaagcgaggatgatgaatgctc

SEQ ID NO: 1026020 - DNA, 33 bp, Homo sapien
attcactctcacaagctaggatgatgaatgctc

SEQ ID NO: 1026021 - DNA, 33 bp, Homo sapien
aatagggaaacagttaccaacagcaaaatgcag

SEQ ID NO: 1026022 - DNA, 33 bp, Homo sapien
aatagggaaacagttatcaacagcaaaatgcag

SEQ ID NO: 1026023 - DNA, 33 bp, Homo sapien
tgccatgcctctcacactgtatcagaataactg

SEQ ID NO: 1026024 - DNA, 33 bp, Homo sapien
tgccatgcctctcacattgtatcagaataactg

SEQ ID NO: 1026025 - DNA, 33 bp, Homo sapien
aagcgcgaccagtttaaaaaacaacttgtcatt

SEQ ID NO: 1026026 - DNA, 33 bp, Homo sapien
aagcgcgaccagtttagaaaacaacttgtcatt

SEQ ID NO: 1026027 - DNA, 33 bp, Homo sapien
ttcctcatctacaaaactgagataatcatgctt

SEQ ID NO: 1026028 - DNA, 33 bp, Homo sapien
ttcctcatctacaaaattgagataatcatgctt

SEQ ID NO: 1026029 - DNA, 33 bp, Homo sapien
aagcatcaaattcctacaggggtcagataggtg

SEQ ID NO: 1026030 - DNA, 33 bp, Homo sapien
aagcatcaaattcctagaggggtcagataggtg

SEQ ID NO: 1026031 - DNA, 33 bp, Homo sapien
catccacgctattggacattcccaagaagctgg

SEQ ID NO: 1026032 - DNA, 33 bp, Homo sapien
catccacgctattggatattcccaagaagctgg

SEQ ID NO: 1026033 - DNA, 33 bp, Homo sapien
aaggcgtacatctgaactggctgatgttctcaa

SEQ ID NO: 1026034 - DNA, 33 bp, Homo sapien
aaggcgtacatctgaagtggctgatgttctcaa

SEQ ID NO: 1026035 - DNA, 33 bp, Homo sapien
gcacgacaggctttacaaagggctcaaagggct

SEQ ID NO: 1026036 - DNA, 33 bp, Homo sapien
gcacgacaggctttaccaagggctcaaagggct

SEQ ID NO: 1026037 - DNA, 33 bp, Homo sapien
agtttctttgactatacagacttaccataaacc

SEQ ID NO: 1026038 - DNA, 33 bp, Homo sapien
agtttctttgactatatagacttaccataaacc

SEQ ID NO: 1026039 - DNA, 33 bp, Homo sapien
agataggtggactaaacgataaagaaaatctca

SEQ ID NO: 1026040 - DNA, 33 bp, Homo sapien
agataggtggactaaatgataaagaaaatctca

SEQ ID NO: 1026041 - DNA, 33 bp, Homo sapien
tccatcagttcccgtgaaagacaaggatttctc

SEQ ID NO: 1026042 - DNA, 33 bp, Homo sapien
tccatcagttcccgtggaagacaaggatttctc

SEQ ID NO: 1026043 - DNA, 33 bp, Homo sapien
acctctccataaacgaaataggctaaatcaagc

SEQ ID NO: 1026044 - DNA, 33 bp, Homo sapien
acctctccataaacgagataggctaaatcaagc

SEQ ID NO: 1026045 - DNA, 33 bp, Homo sapien
aaacctagaaatggaaatgttgagtcagagaga

SEQ ID NO: 1026046 - DNA, 33 bp, Homo sapien
aaacctagaaatggaactgttgagtcagagaga

SEQ ID NO: 1026047 - DNA, 33 bp, Homo sapien
agagtacatctacaaaatcaaaagccagcaaaa

SEQ ID NO: 1026048 - DNA, 33 bp, Homo sapien
agagtacatctacaaactcaaaagccagcaaaa

SEQ ID NO: 1026049 - DNA, 33 bp, Homo sapien
ctccactgacactccccagaactctggccattt

SEQ ID NO: 1026050 - DNA, 33 bp, Homo sapien
ctccactgacactccctagaactctggccattt

SEQ ID NO: 1026051 - DNA, 33 bp, Homo sapien
caaatgcccataggtcccaagcagttaatgtgt

SEQ ID NO: 1026052 - DNA, 33 bp, Homo sapien
caaatgcccataggtctcaagcagttaatgtgt

SEQ ID NO: 1026053 - DNA, 33 bp, Homo sapien
tcttcttggcaagagcaaaatggttattattat

SEQ ID NO: 1026054 - DNA, 33 bp, Homo sapien
tcttcttggcaagagcgaaatggttattattat

SEQ ID NO: 1026055 - DNA, 33 bp, Homo sapien
tgaatgatcattattcactggcaacaaaggcca

SEQ ID NO: 1026056 - DNA, 33 bp, Homo sapien
tgaatgatcattattccctggcaacaaaggcca

SEQ ID NO: 1026057 - DNA, 33 bp, Homo sapien
aggttctggctcatgcactgtcccattagatgg

SEQ ID NO: 1026058 - DNA, 33 bp, Homo sapien
aggttctggctcatgcgctgtcccattagatgg

SEQ ID NO: 1026059 - DNA, 33 bp, Homo sapien
ggccaggaacctcaataatctttgaccagttta

SEQ ID NO: 1026060 - DNA, 33 bp, Homo sapien
ggccaggaacctcaattatctttgaccagttta

SEQ ID NO: 1026061 - DNA, 33 bp, Homo sapien
aaagagtttattcagaccaagtgttcattatgt

SEQ ID NO: 1026062 - DNA, 33 bp, Homo sapien
aaagagtttattcagatcaagtgttcattatgt

SEQ ID NO: 1026063 - DNA, 33 bp, Homo sapien
ctgttatttcatcccacctatggcttcagaaga

SEQ ID NO: 1026064 - DNA, 33 bp, Homo sapien
ctgttatttcatcccatctatggcttcagaaga

SEQ ID NO: 1026065 - DNA, 33 bp, Homo sapien
tgaacttcaaatgctacaatagtaacagattta

SEQ ID NO: 1026066 - DNA, 33 bp, Homo sapien
tgaacttcaaatgctataatagtaacagattta

SEQ ID NO: 1026067 - DNA, 33 bp, Homo sapien
agcacagaggagagaacaatgaagaggcttagg

SEQ ID NO: 1026068 - DNA, 33 bp, Homo sapien
agcacagaggagagaataatgaagaggcttagg

SEQ ID NO: 1026069 - DNA, 33 bp, Homo sapien
accaattttgggttacagctacaatagaaatag

SEQ ID NO: 1026070 - DNA, 33 bp, Homo sapien
accaattttgggttacggctacaatagaaatag

SEQ ID NO: 1026071 - DNA, 33 bp, Homo sapien
ttttgagtgtgaaataaagtgaggagaataatt

SEQ ID NO: 1026072 - DNA, 33 bp, Homo sapien
ttttgagtgtgaaatatagtgaggagaataatt

SEQ ID NO: 1026073 - DNA, 33 bp, Homo sapien
catcagccttggtaaacatcaaagatttatggc

SEQ ID NO: 1026074 - DNA, 33 bp, Homo sapien
catcagccttggtaaagatcaaagatttatggc

SEQ ID NO: 1026075 - DNA, 33 bp, Homo sapien
cataaacgtgggagaaaggatgagatgaatgca

SEQ ID NO: 1026076 - DNA, 33 bp, Homo sapien
cataaacgtgggagaacggatgagatgaatgca

SEQ ID NO: 1026077 - DNA, 33 bp, Homo sapien
cttgacagacgatttcacttctcctacatttta

SEQ ID NO: 1026078 - DNA, 33 bp, Homo sapien
cttgacagacgatttctcttctcctacatttta

SEQ ID NO: 1026079 - DNA, 33 bp, Homo sapien
cattctgccaaaggaaataatgcacagtcaaca

SEQ ID NO: 1026080 - DNA, 33 bp, Homo sapien
cattctgccaaaggaactaatgcacagtcaaca

SEQ ID NO: 1026081 - DNA, 33 bp, Homo sapien
tattctttgaaatggactactgatattttgtca

SEQ ID NO: 1026082 - DNA, 33 bp, Homo sapien
tattctttgaaatggattactgatattttgtca

SEQ ID NO: 1026083 - DNA, 33 bp, Homo sapien
ctacaatgttatgataagtggagtatttattgg

SEQ ID NO: 1026084 - DNA, 33 bp, Homo sapien
ctacaatgttatgatatgtggagtatttattgg

SEQ ID NO: 1026085 - DNA, 33 bp, Homo sapien
ttgttaggtttgatacactgtgtccttatattt

SEQ ID NO: 1026086 - DNA, 33 bp, Homo sapien
ttgttaggtttgatacgctgtgtccttatattt

SEQ ID NO: 1026087 - DNA, 33 bp, Homo sapien
tgaatggacaaagcgaccctatttgccagtttg

SEQ ID NO: 1026088 - DNA, 33 bp, Homo sapien
tgaatggacaaagcgatcctatttgccagtttg

SEQ ID NO: 1026089 - DNA, 33 bp, Homo sapien
gaagaaatgagaagaacctgagattggttgtct

SEQ ID NO: 1026090 - DNA, 33 bp, Homo sapien
gaagaaatgagaagaatctgagattggttgtct

SEQ ID NO: 1026091 - DNA, 33 bp, Homo sapien
ctttattcctaatcagaccagacaaccaatctc

SEQ ID NO: 1026092 - DNA, 33 bp, Homo sapien
ctttattcctaatcaggccagacaaccaatctc

SEQ ID NO: 1026093 - DNA, 33 bp, Homo sapien
ggctctgggaaaccaactggccattgtcaacaa

SEQ ID NO: 1026094 - DNA, 33 bp, Homo sapien
ggctctgggaaaccaagtggccattgtcaacaa

SEQ ID NO: 1026095 - DNA, 33 bp, Homo sapien
attcaggtttattcacacatatactcttcaatg

SEQ ID NO: 1026096 - DNA, 33 bp, Homo sapien
attcaggtttattcacgcatatactcttcaatg

SEQ ID NO: 1026097 - DNA, 33 bp, Homo sapien
gtttcaatgtactatcgaaattgactaactgac

SEQ ID NO: 1026098 - DNA, 33 bp, Homo sapien
gtttcaatgtactatctaaattgactaactgac

SEQ ID NO: 1026099 - DNA, 33 bp, Homo sapien
ttttatcttgagttgacgtttagatatgatgta

SEQ ID NO: 1026100 - DNA, 33 bp, Homo sapien
ttttatcttgagttgatgtttagatatgatgta

SEQ ID NO: 1026101 - DNA, 33 bp, Homo sapien
ccaagatggctgactacaggtagatagtgtgtg

SEQ ID NO: 1026102 - DNA, 33 bp, Homo sapien
ccaagatggctgactagaggtagatagtgtgtg

SEQ ID NO: 1026103 - DNA, 33 bp, Homo sapien
tttcttttcgtttttccccccagatcttcattt

SEQ ID NO: 1026104 - DNA, 33 bp, Homo sapien
tttcttttcgtttttcgccccagatcttcattt

SEQ ID NO: 1026105 - DNA, 33 bp, Homo sapien
gatatttagggagtaaaaatggaagaatgacaa

SEQ ID NO: 1026106 - DNA, 33 bp, Homo sapien
gatatttagggagtaataatggaagaatgacaa

SEQ ID NO: 1026107 - DNA, 33 bp, Homo sapien
aaaatggaactcctagacagactaccacaggtc

SEQ ID NO: 1026108 - DNA, 33 bp, Homo sapien
aaaatggaactcctaggcagactaccacaggtc

SEQ ID NO: 1026109 - DNA, 33 bp, Homo sapien
cagagctccgaaatgaaaggatctaagcctttg

SEQ ID NO: 1026110 - DNA, 33 bp, Homo sapien
cagagctccgaaatgagaggatctaagcctttg

SEQ ID NO: 1026111 - DNA, 33 bp, Homo sapien
tgtggtccatgttgaactgccagatattggttt

SEQ ID NO: 1026112 - DNA, 33 bp, Homo sapien
tgtggtccatgttgaattgccagatattggttt

SEQ ID NO: 1026113 - DNA, 33 bp, Homo sapien
aaatcacatctggtaaataataacagctggact

SEQ ID NO: 1026114 - DNA, 33 bp, Homo sapien
aaatcacatctggtaagtaataacagctggact

SEQ ID NO: 1026115 - DNA, 33 bp, Homo sapien
cctcccacacgcaactaaaaaagcaaaaatgtc

SEQ ID NO: 1026116 - DNA, 33 bp, Homo sapien
cctcccacacgcaactgaaaaagcaaaaatgtc

SEQ ID NO: 1026117 - DNA, 33 bp, Homo sapien
tcccacaaatggtccacatacacaggtggtctc

SEQ ID NO: 1026118 - DNA, 33 bp, Homo sapien
tcccacaaatggtccatatacacaggtggtctc

SEQ ID NO: 1026119 - DNA, 33 bp, Homo sapien
ctgagcctggctgaaactgctcaccttcagact

SEQ ID NO: 1026120 - DNA, 33 bp, Homo sapien
ctgagcctggctgaaattgctcaccttcagact

SEQ ID NO: 1026121 - DNA, 33 bp, Homo sapien
tgtaaaaatttagcccagaatttggcacagggc

SEQ ID NO: 1026122 - DNA, 33 bp, Homo sapien
tgtaaaaatttagcccggaatttggcacagggc

SEQ ID NO: 1026123 - DNA, 33 bp, Homo sapien
cagttcttcaacctcacggcacctgttttctcg

SEQ ID NO: 1026124 - DNA, 33 bp, Homo sapien
cagttcttcaacctcatggcacctgttttctcg

SEQ ID NO: 1026125 - DNA, 33 bp, Homo sapien
tgtttatagcacctagcacactgctgcattcaa

SEQ ID NO: 1026126 - DNA, 33 bp, Homo sapien
tgtttatagcacctagtacactgctgcattcaa

SEQ ID NO: 1026127 - DNA, 33 bp, Homo sapien
ttccatgtattcaggacagttacaaaaataact

SEQ ID NO: 1026128 - DNA, 33 bp, Homo sapien
ttccatgtattcaggatagttacaaaaataact

SEQ ID NO: 1026129 - DNA, 33 bp, Homo sapien
ggcaacactttaaacactgaaagcgagaaagca

SEQ ID NO: 1026130 - DNA, 33 bp, Homo sapien
ggcaacactttaaacattgaaagcgagaaagca

SEQ ID NO: 1026131 - DNA, 33 bp, Homo sapien
gccccactgaaagtgaaaacaacagtgttggtc

SEQ ID NO: 1026132 - DNA, 33 bp, Homo sapien
gccccactgaaagtgagaacaacagtgttggtc

SEQ ID NO: 1026133 - DNA, 33 bp, Homo sapien
cctgtagcattcaataaatatcacgttttaaaa

SEQ ID NO: 1026134 - DNA, 33 bp, Homo sapien
cctgtagcattcaatatatatcacgttttaaaa

SEQ ID NO: 1026135 - DNA, 33 bp, Homo sapien
ttagacatccaccttaccggaatttatggcaga

SEQ ID NO: 1026136 - DNA, 33 bp, Homo sapien
ttagacatccaccttatcggaatttatggcaga

SEQ ID NO: 1026137 - DNA, 33 bp, Homo sapien
gaatccagttgtagaacgcagatccctgaacat

SEQ ID NO: 1026138 - DNA, 33 bp, Homo sapien
gaatccagttgtagaatgcagatccctgaacat

SEQ ID NO: 1026139 - DNA, 33 bp, Homo sapien
attatggaaaccctaaaaatgaaatgacaatga

SEQ ID NO: 1026140 - DNA, 33 bp, Homo sapien
attatggaaaccctaacaatgaaatgacaatga

SEQ ID NO: 1026141 - DNA, 33 bp, Homo sapien
tcttggaaaatgctcacgtttttcggtgttgac

SEQ ID NO: 1026142 - DNA, 33 bp, Homo sapien
tcttggaaaatgctcatgtttttcggtgttgac

SEQ ID NO: 1026143 - DNA, 33 bp, Homo sapien
acaggacacctacatcagaacaagactgctttt

SEQ ID NO: 1026144 - DNA, 33 bp, Homo sapien
acaggacacctacatcggaacaagactgctttt

SEQ ID NO: 1026145 - DNA, 33 bp, Homo sapien
ctgacagtaagaaaaaagtagttcctgtcatcc

SEQ ID NO: 1026146 - DNA, 33 bp, Homo sapien
ctgacagtaagaaaaatgtagttcctgtcatcc

SEQ ID NO: 1026147 - DNA, 33 bp, Homo sapien
aacatttaagtgaagacgttgagacaagtggag

SEQ ID NO: 1026148 - DNA, 33 bp, Homo sapien
aacatttaagtgaagatgttgagacaagtggag

SEQ ID NO: 1026149 - DNA, 33 bp, Homo sapien
attgactgataatagaagtgtgaagtttagagc

SEQ ID NO: 1026150 - DNA, 33 bp, Homo sapien
attgactgataatagaggtgtgaagtttagagc

SEQ ID NO: 1026151 - DNA, 33 bp, Homo sapien
gggcgaattttctctaccagcatttacattgct

SEQ ID NO: 1026152 - DNA, 33 bp, Homo sapien
gggcgaattttctctatcagcatttacattgct

SEQ ID NO: 1026153 - DNA, 33 bp, Homo sapien
catttgtacttggtgaaattaaacacagtgcat

SEQ ID NO: 1026154 - DNA, 33 bp, Homo sapien
catttgtacttggtgacattaaacacagtgcat

SEQ ID NO: 1026155 - DNA, 33 bp, Homo sapien
caaagtgccgtgattaaaggtatgagccaacac

SEQ ID NO: 1026156 - DNA, 33 bp, Homo sapien
caaagtgccgtgattacaggtatgagccaacac

SEQ ID NO: 1026157 - DNA, 33 bp, Homo sapien
caagggaaaacaagaaatagcaagaatgaactt

SEQ ID NO: 1026158 - DNA, 33 bp, Homo sapien
caagggaaaacaagaactagcaagaatgaactt

SEQ ID NO: 1026159 - DNA, 33 bp, Homo sapien
ctgcatcctctgtaacactctttaacagtctta

SEQ ID NO: 1026160 - DNA, 33 bp, Homo sapien
ctgcatcctctgtaacgctctttaacagtctta

SEQ ID NO: 1026161 - DNA, 33 bp, Homo sapien
caaaatgttattccaaaatgtactgatttatac

SEQ ID NO: 1026162 - DNA, 33 bp, Homo sapien
caaaatgttattccaagatgtactgatttatac

SEQ ID NO: 1026163 - DNA, 33 bp, Homo sapien
catgataccaactcccaagaagtcacttgcaaa

SEQ ID NO: 1026164 - DNA, 33 bp, Homo sapien
catgataccaactcccgagaagtcacttgcaaa

SEQ ID NO: 1026165 - DNA, 33 bp, Homo sapien
tcaccactattgaaaaattgacttcagtccttc

SEQ ID NO: 1026166 - DNA, 33 bp, Homo sapien
tcaccactattgaaaacttgacttcagtccttc

SEQ ID NO: 1026167 - DNA, 33 bp, Homo sapien
ctatacagtataacgtgaaatcatgtgtgtgat

SEQ ID NO: 1026168 - DNA, 33 bp, Homo sapien
ctatacagtataacgttaaatcatgtgtgtgat

SEQ ID NO: 1026169 - DNA, 33 bp, Homo sapien
taccatcagaaaaggccacttcagaaagacttt

SEQ ID NO: 1026170 - DNA, 33 bp, Homo sapien
taccatcagaaaaggctacttcagaaagacttt

SEQ ID NO: 1026171 - DNA, 33 bp, Homo sapien
accaccaacagaattaccacttttgtttttgtc

SEQ ID NO: 1026172 - DNA, 33 bp, Homo sapien
accaccaacagaattatcacttttgtttttgtc

SEQ ID NO: 1026173 - DNA, 33 bp, Homo sapien
tgttgtttcctgtcacaaactgttcacgttgtt

SEQ ID NO: 1026174 - DNA, 33 bp, Homo sapien
tgttgtttcctgtcaccaactgttcacgttgtt

SEQ ID NO: 1026175 - DNA, 33 bp, Homo sapien
tagtttacaccctcatgagctctggcctagatt

SEQ ID NO: 1026176 - DNA, 33 bp, Homo sapien
tagtttacaccctcattagctctggcctagatt

SEQ ID NO: 1026177 - DNA, 33 bp, Homo sapien
actcctttgtctttcccgaagtttatagtatag

SEQ ID NO: 1026178 - DNA, 33 bp, Homo sapien
actcctttgtctttcctgaagtttatagtatag

SEQ ID NO: 1026179 - DNA, 33 bp, Homo sapien
ggacccaatttgagacgggtgttctaggagagt

SEQ ID NO: 1026180 - DNA, 33 bp, Homo sapien
ggacccaatttgagactggtgttctaggagagt

SEQ ID NO: 1026181 - DNA, 33 bp, Homo sapien
tcctctggaattcttgaatgattggcatcatac

SEQ ID NO: 1026182 - DNA, 33 bp, Homo sapien
tcctctggaattcttggatgattggcatcatac

SEQ ID NO: 1026183 - DNA, 33 bp, Homo sapien
ggtattcatacaatctcaaagtatcacctcaca

SEQ ID NO: 1026184 - DNA, 33 bp, Homo sapien
ggtattcatacaatcttaaagtatcacctcaca

SEQ ID NO: 1026185 - DNA, 33 bp, Homo sapien
tgacagtgacgtatgacaggttttatacaaaca

SEQ ID NO: 1026186 - DNA, 33 bp, Homo sapien
tgacagtgacgtatgataggttttatacaaaca

SEQ ID NO: 1026187 - DNA, 33 bp, Homo sapien
ctgagaaaggagcacactggatagaggaaagaa

SEQ ID NO: 1026188 - DNA, 33 bp, Homo sapien
ctgagaaaggagcacattggatagaggaaagaa

SEQ ID NO: 1026189 - DNA, 33 bp, Homo sapien
cacttaatgaaagctaagaaaaacttctaattt

SEQ ID NO: 1026190 - DNA, 33 bp, Homo sapien
cacttaatgaaagctatgaaaaacttctaattt

SEQ ID NO: 1026191 - DNA, 33 bp, Homo sapien
atagcatttgaattagaaacttagagtagaatt

SEQ ID NO: 1026192 - DNA, 33 bp, Homo sapien
atagcatttgaattaggaacttagagtagaatt

SEQ ID NO: 1026193 - DNA, 33 bp, Homo sapien
caggatgttgaagaggaaatgctccttttcttg

SEQ ID NO: 1026194 - DNA, 33 bp, Homo sapien
caggatgttgaagaggtaatgctccttttcttg

SEQ ID NO: 1026195 - DNA, 33 bp, Homo sapien
gcactaccataccacacaaacacccaagctatc

SEQ ID NO: 1026196 - DNA, 33 bp, Homo sapien
gcactaccataccacataaacacccaagctatc

SEQ ID NO: 1026197 - DNA, 33 bp, Homo sapien
caacagctgttgcctaggaataaatctctgtgt

SEQ ID NO: 1026198 - DNA, 33 bp, Homo sapien
caacagctgttgcctatgaataaatctctgtgt

SEQ ID NO: 1026199 - DNA, 33 bp, Homo sapien
gaaaactggttgcctacacaggatgaagaatca

SEQ ID NO: 1026200 - DNA, 33 bp, Homo sapien
gaaaactggttgcctatacaggatgaagaatca

SEQ ID NO: 1026201 - DNA, 33 bp, Homo sapien
attgattatatttttaaccatttgccagtgaca

SEQ ID NO: 1026202 - DNA, 33 bp, Homo sapien
attgattatatttttacccatttgccagtgaca

SEQ ID NO: 1026203 - DNA, 33 bp, Homo sapien
gaggatagacagtgaaatgcaactacagcccgc

SEQ ID NO: 1026204 - DNA, 33 bp, Homo sapien
gaggatagacagtgaagtgcaactacagcccgc

SEQ ID NO: 1026205 - DNA, 33 bp, Homo sapien
aatggaaaattctttacgttgggaaccacaggt

SEQ ID NO: 1026206 - DNA, 33 bp, Homo sapien
aatggaaaattctttatgttgggaaccacaggt

SEQ ID NO: 1026207 - DNA, 33 bp, Homo sapien
agctcatgtgagtaaggagaactctaccagttg

SEQ ID NO: 1026208 - DNA, 33 bp, Homo sapien
agctcatgtgagtaagtagaactctaccagttg

SEQ ID NO: 1026209 - DNA, 33 bp, Homo sapien
atcctagctccagttacgcagatgtttaaatga

SEQ ID NO: 1026210 - DNA, 33 bp, Homo sapien
atcctagctccagttatgcagatgtttaaatga

SEQ ID NO: 1026211 - DNA, 33 bp, Homo sapien
tcaagaactactgaccaagagagggagaaaaac

SEQ ID NO: 1026212 - DNA, 33 bp, Homo sapien
tcaagaactactgaccgagagagggagaaaaac

SEQ ID NO: 1026213 - DNA, 33 bp, Homo sapien
aaactaaagcaaaaaaaagcacacctcgagaaa

SEQ ID NO: 1026214 - DNA, 33 bp, Homo sapien
aaactaaagcaaaaaacagcacacctcgagaaa

SEQ ID NO: 1026215 - DNA, 33 bp, Homo sapien
tattacctatctttcaacctaccttcatataac

SEQ ID NO: 1026216 - DNA, 33 bp, Homo sapien
tattacctatctttcagcctaccttcatataac

SEQ ID NO: 1026217 - DNA, 33 bp, Homo sapien
gtgtttcaatttcgaccatgtaagatgctgaag

SEQ ID NO: 1026218 - DNA, 33 bp, Homo sapien
gtgtttcaatttcgacgatgtaagatgctgaag

SEQ ID NO: 1026219 - DNA, 33 bp, Homo sapien
tctctgatcataattaaagtaagctagaaaaaa

SEQ ID NO: 1026220 - DNA, 33 bp, Homo sapien
tctctgatcataattagagtaagctagaaaaaa

SEQ ID NO: 1026221 - DNA, 33 bp, Homo sapien
tccaaagagtttaagaagaagaagttctcggcc

SEQ ID NO: 1026222 - DNA, 33 bp, Homo sapien
tccaaagagtttaagaggaagaagttctcggcc

SEQ ID NO: 1026223 - DNA, 33 bp, Homo sapien
gctaaagatgtacgaacatatgtccaagggata

SEQ ID NO: 1026224 - DNA, 33 bp, Homo sapien
gctaaagatgtacgaatatatgtccaagggata

SEQ ID NO: 1026225 - DNA, 33 bp, Homo sapien
ttaatggctggaaatccgagtagaaatattcat

SEQ ID NO: 1026226 - DNA, 33 bp, Homo sapien
ttaatggctggaaatctgagtagaaatattcat

SEQ ID NO: 1026227 - DNA, 33 bp, Homo sapien
tagtcctaaaatatccaacacaatttttttgaa

SEQ ID NO: 1026228 - DNA, 33 bp, Homo sapien
tagtcctaaaatatccgacacaatttttttgaa

SEQ ID NO: 1026229 - DNA, 33 bp, Homo sapien
ttataacaatggaaaacggactgggtaatttat

SEQ ID NO: 1026230 - DNA, 33 bp, Homo sapien
ttataacaatggaaaatggactgggtaatttat

SEQ ID NO: 1026231 - DNA, 33 bp, Homo sapien
acatttctgtcaaaccacttatactgctacttc

SEQ ID NO: 1026232 - DNA, 33 bp, Homo sapien
acatttctgtcaaacctcttatactgctacttc

SEQ ID NO: 1026233 - DNA, 33 bp, Homo sapien
tgaggctgtttttccccgaggctctttaaacaa

SEQ ID NO: 1026234 - DNA, 33 bp, Homo sapien
tgaggctgtttttccctgaggctctttaaacaa

SEQ ID NO: 1026235 - DNA, 33 bp, Homo sapien
ccactataaaacccaacgaattagcggggcagt

SEQ ID NO: 1026236 - DNA, 33 bp, Homo sapien
ccactataaaacccaatgaattagcggggcagt

SEQ ID NO: 1026237 - DNA, 33 bp, Homo sapien
tactgggtgtatcccccggaatataaagcattc

SEQ ID NO: 1026238 - DNA, 33 bp, Homo sapien
tactgggtgtatcccctggaatataaagcattc

SEQ ID NO: 1026239 - DNA, 33 bp, Homo sapien
cctctatgtcactttccacattttttacattgt

SEQ ID NO: 1026240 - DNA, 33 bp, Homo sapien
cctctatgtcactttctacattttttacattgt

SEQ ID NO: 1026241 - DNA, 33 bp, Homo sapien
ccgagttccacaatggcagcattttcaggattt

SEQ ID NO: 1026242 - DNA, 33 bp, Homo sapien
ccgagttccacaatggtagcattttcaggattt

SEQ ID NO: 1026243 - DNA, 33 bp, Homo sapien
ctaatatctccgtctacagaagaacaagtttac

SEQ ID NO: 1026244 - DNA, 33 bp, Homo sapien
ctaatatctccgtctatagaagaacaagtttac

SEQ ID NO: 1026245 - DNA, 33 bp, Homo sapien
gtacttatagccatacaagctctaagccccaag

SEQ ID NO: 1026246 - DNA, 33 bp, Homo sapien
gtacttatagccatacgagctctaagccccaag

SEQ ID NO: 1026247 - DNA, 33 bp, Homo sapien
atggctataagtacacaaatgcccaacaagcat

SEQ ID NO: 1026248 - DNA, 33 bp, Homo sapien
atggctataagtacacgaatgcccaacaagcat

SEQ ID NO: 1026249 - DNA, 33 bp, Homo sapien
gtctggcttcagtccaacactcagcacacagga

SEQ ID NO: 1026250 - DNA, 33 bp, Homo sapien
gtctggcttcagtccagcactcagcacacagga

SEQ ID NO: 1026251 - DNA, 33 bp, Homo sapien
caatgccaccaggagacggttcttggaagcttg

SEQ ID NO: 1026252 - DNA, 33 bp, Homo sapien
caatgccaccaggagatggttcttggaagcttg

SEQ ID NO: 1026253 - DNA, 33 bp, Homo sapien
tccacatcccccaaaacagatgactcagtaaaa

SEQ ID NO: 1026254 - DNA, 33 bp, Homo sapien
tccacatcccccaaaagagatgactcagtaaaa

SEQ ID NO: 1026255 - DNA, 33 bp, Homo sapien
agagtctaggttctaacgcttcgtgtcaaaccg

SEQ ID NO: 1026256 - DNA, 33 bp, Homo sapien
agagtctaggttctaatgcttcgtgtcaaaccg

SEQ ID NO: 1026257 - DNA, 33 bp, Homo sapien
cctgtttacctcttacactaactacagcccagg

SEQ ID NO: 1026258 - DNA, 33 bp, Homo sapien
cctgtttacctcttacgctaactacagcccagg

SEQ ID NO: 1026259 - DNA, 33 bp, Homo sapien
agataacatttcccgcaaaaagactttagcacc

SEQ ID NO: 1026260 - DNA, 33 bp, Homo sapien
agataacatttcccgcgaaaagactttagcacc

SEQ ID NO: 1026261 - DNA, 33 bp, Homo sapien
gggcctgcagtggtagaagttaatggtcacatc

SEQ ID NO: 1026262 - DNA, 33 bp, Homo sapien
gggcctgcagtggtaggagttaatggtcacatc

SEQ ID NO: 1026263 - DNA, 33 bp, Homo sapien
cttcgtcattctttgaaagctactctcgtggat

SEQ ID NO: 1026264 - DNA, 33 bp, Homo sapien
cttcgtcattctttgagagctactctcgtggat

SEQ ID NO: 1026265 - DNA, 33 bp, Homo sapien
ctcgactcttgatgtagtaaagctgggacataa

SEQ ID NO: 1026266 - DNA, 33 bp, Homo sapien
ctcgactcttgatgtattaaagctgggacataa

SEQ ID NO: 1026267 - DNA, 33 bp, Homo sapien
ggcggtgtgtcccaaacgccgtggaaacttaga

SEQ ID NO: 1026268 - DNA, 33 bp, Homo sapien
ggcggtgtgtcccaaatgccgtggaaacttaga

SEQ ID NO: 1026269 - DNA, 33 bp, Homo sapien
ggatctgcttctagggaacacaaattcagatga

SEQ ID NO: 1026270 - DNA, 33 bp, Homo sapien
ggatctgcttctaggggacacaaattcagatga

SEQ ID NO: 1026271 - DNA, 33 bp, Homo sapien
atttttgttactctcacgatatttcaagctttt

SEQ ID NO: 1026272 - DNA, 33 bp, Homo sapien
atttttgttactctcatgatatttcaagctttt

SEQ ID NO: 1026273 - DNA, 33 bp, Homo sapien
cagatataacaagaagaaaaagcttgaaatatc

SEQ ID NO: 1026274 - DNA, 33 bp, Homo sapien
cagatataacaagaagcaaaagcttgaaatatc

SEQ ID NO: 1026275 - DNA, 33 bp, Homo sapien
aagcagatgccaccacaatgtctcctgcagggt

SEQ ID NO: 1026276 - DNA, 33 bp, Homo sapien
aagcagatgccaccacgatgtctcctgcagggt

SEQ ID NO: 1026277 - DNA, 33 bp, Homo sapien
agaaagccaagttgcacaatttctaatgcttca

SEQ ID NO: 1026278 - DNA, 33 bp, Homo sapien
agaaagccaagttgcataatttctaatgcttca

SEQ ID NO: 1026279 - DNA, 33 bp, Homo sapien
tcacttggacactcaacctgaagcagagaatcc

SEQ ID NO: 1026280 - DNA, 33 bp, Homo sapien
tcacttggacactcaatctgaagcagagaatcc

SEQ ID NO: 1026281 - DNA, 33 bp, Homo sapien
ttataaacaacagaaactgagttctgaaaactg

SEQ ID NO: 1026282 - DNA, 33 bp, Homo sapien
ttataaacaacagaaattgagttctgaaaactg

SEQ ID NO: 1026283 - DNA, 33 bp, Homo sapien
cctccagaacccagaacgatagattcaccaaca

SEQ ID NO: 1026284 - DNA, 33 bp, Homo sapien
cctccagaacccagaatgatagattcaccaaca

SEQ ID NO: 1026285 - DNA, 33 bp, Homo sapien
aaatccataatctgagaagcacatggaattact

SEQ ID NO: 1026286 - DNA, 33 bp, Homo sapien
aaatccataatctgagcagcacatggaattact

SEQ ID NO: 1026287 - DNA, 33 bp, Homo sapien
tgtccatgagagaacactggggttaagtcaggt

SEQ ID NO: 1026288 - DNA, 33 bp, Homo sapien
tgtccatgagagaacattggggttaagtcaggt

SEQ ID NO: 1026289 - DNA, 33 bp, Homo sapien
gtaactatagtttacaataagccattttacctt

SEQ ID NO: 1026290 - DNA, 33 bp, Homo sapien
gtaactatagtttacagtaagccattttacctt

SEQ ID NO: 1026291 - DNA, 33 bp, Homo sapien
gtaatgccatcttgaaacctccagtcccaattg

SEQ ID NO: 1026292 - DNA, 33 bp, Homo sapien
gtaatgccatcttgaagcctccagtcccaattg

SEQ ID NO: 1026293 - DNA, 33 bp, Homo sapien
atggtgcagaccagggaaatgaccttatgtatg

SEQ ID NO: 1026294 - DNA, 33 bp, Homo sapien
atggtgcagaccaggggaatgaccttatgtatg

SEQ ID NO: 1026295 - DNA, 33 bp, Homo sapien
attctactgggaaaaccctaggagccagtgtag

SEQ ID NO: 1026296 - DNA, 33 bp, Homo sapien
attctactgggaaaactctaggagccagtgtag

SEQ ID NO: 1026297 - DNA, 33 bp, Homo sapien
tctaatggcggcattcccttggtgtgcagagga

SEQ ID NO: 1026298 - DNA, 33 bp, Homo sapien
tctaatggcggcattctcttggtgtgcagagga

SEQ ID NO: 1026299 - DNA, 33 bp, Homo sapien
ttctagcaagagctaacgaagtctgtgacagct

SEQ ID NO: 1026300 - DNA, 33 bp, Homo sapien
ttctagcaagagctaatgaagtctgtgacagct

SEQ ID NO: 1026301 - DNA, 33 bp, Homo sapien
gaaaaagcccatggaaatgaacaattgaggtta

SEQ ID NO: 1026302 - DNA, 33 bp, Homo sapien
gaaaaagcccatggaattgaacaattgaggtta

SEQ ID NO: 1026303 - DNA, 33 bp, Homo sapien
aatccataagtaaatcacttgcttcatgaagta

SEQ ID NO: 1026304 - DNA, 33 bp, Homo sapien
aatccataagtaaatcgcttgcttcatgaagta

SEQ ID NO: 1026305 - DNA, 33 bp, Homo sapien
gagggaaacctccatacaaatagcacctaaagt

SEQ ID NO: 1026306 - DNA, 33 bp, Homo sapien
gagggaaacctccatataaatagcacctaaagt

SEQ ID NO: 1026307 - DNA, 33 bp, Homo sapien
aacctcactttccttccctctgatcatcagggg

SEQ ID NO: 1026308 - DNA, 33 bp, Homo sapien
aacctcactttccttctctctgatcatcagggg

SEQ ID NO: 1026309 - DNA, 33 bp, Homo sapien
cagctgaatttattgacgcaatttgctcatgta

SEQ ID NO: 1026310 - DNA, 33 bp, Homo sapien
cagctgaatttattgatgcaatttgctcatgta

SEQ ID NO: 1026311 - DNA, 33 bp, Homo sapien
taaagaacctgggctacgttgggccaactgtaa

SEQ ID NO: 1026312 - DNA, 33 bp, Homo sapien
taaagaacctgggctatgttgggccaactgtaa

SEQ ID NO: 1026313 - DNA, 33 bp, Homo sapien
gttataccgtcattttaaaaatacttgtccatt

SEQ ID NO: 1026314 - DNA, 33 bp, Homo sapien
gttataccgtcatttttaaaatacttgtccatt

SEQ ID NO: 1026315 - DNA, 33 bp, Homo sapien
cctgctgcttcgatgccaggaaggttcttctag

SEQ ID NO: 1026316 - DNA, 33 bp, Homo sapien
cctgctgcttcgatgctaggaaggttcttctag

SEQ ID NO: 1026317 - DNA, 33 bp, Homo sapien
ctcttcaatcagtgataagcagtaagagacgag

SEQ ID NO: 1026318 - DNA, 33 bp, Homo sapien
ctcttcaatcagtgatgagcagtaagagacgag

SEQ ID NO: 1026319 - DNA, 33 bp, Homo sapien
agagaccataattccagagcgttgtagccccac

SEQ ID NO: 1026320 - DNA, 33 bp, Homo sapien
agagaccataattccatagcgttgtagccccac

SEQ ID NO: 1026321 - DNA, 33 bp, Homo sapien
tttgcagcttgggcacagcggaaagcagcctgg

SEQ ID NO: 1026322 - DNA, 33 bp, Homo sapien
tttgcagcttgggcaccgcggaaagcagcctgg

SEQ ID NO: 1026323 - DNA, 33 bp, Homo sapien
caaaatgtgtgtattgaagaaatcggccgggca

SEQ ID NO: 1026324 - DNA, 33 bp, Homo sapien
caaaatgtgtgtattggagaaatcggccgggca

SEQ ID NO: 1026325 - DNA, 33 bp, Homo sapien
caccttaaacctattacggagatcattgataaa

SEQ ID NO: 1026326 - DNA, 33 bp, Homo sapien
caccttaaacctattatggagatcattgataaa

SEQ ID NO: 1026327 - DNA, 33 bp, Homo sapien
aaatagcacctattaacgtctgaggaaaagaca

SEQ ID NO: 1026328 - DNA, 33 bp, Homo sapien
aaatagcacctattaatgtctgaggaaaagaca

SEQ ID NO: 1026329 - DNA, 33 bp, Homo sapien
ccctgtgaacgtcgtaagtggcccttctcccag

SEQ ID NO: 1026330 - DNA, 33 bp, Homo sapien
ccctgtgaacgtcgtacgtggcccttctcccag

SEQ ID NO: 1026331 - DNA, 33 bp, Homo sapien
attaataaggaatcaacgtaggacctatgtgaa

SEQ ID NO: 1026332 - DNA, 33 bp, Homo sapien
attaataaggaatcaatgtaggacctatgtgaa

SEQ ID NO: 1026333 - DNA, 33 bp, Homo sapien
gaaatcatcctatgaaactgctctgaccaatat

SEQ ID NO: 1026334 - DNA, 33 bp, Homo sapien
gaaatcatcctatgaatctgctctgaccaatat

SEQ ID NO: 1026335 - DNA, 33 bp, Homo sapien
ccctttacttccatgacattccattagccaaaa

SEQ ID NO: 1026336 - DNA, 33 bp, Homo sapien
ccctttacttccatgatattccattagccaaaa

SEQ ID NO: 1026337 - DNA, 33 bp, Homo sapien
gctggcttaacaaatccgacatccaactgggct

SEQ ID NO: 1026338 - DNA, 33 bp, Homo sapien
gctggcttaacaaatctgacatccaactgggct

SEQ ID NO: 1026339 - DNA, 33 bp, Homo sapien
gaattcataaaagacaacagggccaggaaggca

SEQ ID NO: 1026340 - DNA, 33 bp, Homo sapien
gaattcataaaagacagcagggccaggaaggca

SEQ ID NO: 1026341 - DNA, 33 bp, Homo sapien
ggagccctcttaccccacaggtaggagcaatca

SEQ ID NO: 1026342 - DNA, 33 bp, Homo sapien
ggagccctcttaccccgcaggtaggagcaatca

SEQ ID NO: 1026343 - DNA, 33 bp, Homo sapien
aatctctcaggactaagtagggcaccatcttga

SEQ ID NO: 1026344 - DNA, 33 bp, Homo sapien
aatctctcaggactaattagggcaccatcttga

SEQ ID NO: 1026345 - DNA, 33 bp, Homo sapien
attacaaatccccccaaacttcattccttcttt

SEQ ID NO: 1026346 - DNA, 33 bp, Homo sapien
attacaaatccccccagacttcattccttcttt

SEQ ID NO: 1026347 - DNA, 33 bp, Homo sapien
gagtaacctaagttgaaataaattgtgagcaac

SEQ ID NO: 1026348 - DNA, 33 bp, Homo sapien
gagtaacctaagttgagataaattgtgagcaac

SEQ ID NO: 1026349 - DNA, 33 bp, Homo sapien
tctccctcaagactaacgtgggatctaccagga

SEQ ID NO: 1026350 - DNA, 33 bp, Homo sapien
tctccctcaagactaatgtgggatctaccagga

SEQ ID NO: 1026351 - DNA, 33 bp, Homo sapien
tcatttgaaatgtatcaaaatgtcctcacaaac

SEQ ID NO: 1026352 - DNA, 33 bp, Homo sapien
tcatttgaaatgtatccaaatgtcctcacaaac

SEQ ID NO: 1026353 - DNA, 33 bp, Homo sapien
tcctccgaagacatgacccaacctacacattac

SEQ ID NO: 1026354 - DNA, 33 bp, Homo sapien
tcctccgaagacatgatccaacctacacattac

SEQ ID NO: 1026355 - DNA, 33 bp, Homo sapien
atgtctatgagccatacagcactatgagtagaa

SEQ ID NO: 1026356 - DNA, 33 bp, Homo sapien
atgtctatgagccatatagcactatgagtagaa

SEQ ID NO: 1026357 - DNA, 33 bp, Homo sapien
tcttacaattatcctcacaccttccttgttcct

SEQ ID NO: 1026358 - DNA, 33 bp, Homo sapien
tcttacaattatcctcgcaccttccttgttcct

SEQ ID NO: 1026359 - DNA, 33 bp, Homo sapien
ctattggctaagctggaaattagatagaaataa

SEQ ID NO: 1026360 - DNA, 33 bp, Homo sapien
ctattggctaagctgggaattagatagaaataa

SEQ ID NO: 1026361 - DNA, 33 bp, Homo sapien
caagttacctgctatcaatggtatatctaacat

SEQ ID NO: 1026362 - DNA, 33 bp, Homo sapien
caagttacctgctatctatggtatatctaacat

SEQ ID NO: 1026363 - DNA, 33 bp, Homo sapien
actatcaaatgaacccagagaagtacatttgtt

SEQ ID NO: 1026364 - DNA, 33 bp, Homo sapien
actatcaaatgaacccggagaagtacatttgtt

SEQ ID NO: 1026365 - DNA, 33 bp, Homo sapien
agttgggatcgcacaacaggtagccattttaga

SEQ ID NO: 1026366 - DNA, 33 bp, Homo sapien
agttgggatcgcacaataggtagccattttaga

SEQ ID NO: 1026367 - DNA, 33 bp, Homo sapien
tattgactggtacctgcaaaatgaccattaaga

SEQ ID NO: 1026368 - DNA, 33 bp, Homo sapien
tattgactggtacctggaaaatgaccattaaga

SEQ ID NO: 1026369 - DNA, 33 bp, Homo sapien
cctagacatactcacaatgcaattccctcacct

SEQ ID NO: 1026370 - DNA, 33 bp, Homo sapien
cctagacatactcacattgcaattccctcacct

SEQ ID NO: 1026371 - DNA, 33 bp, Homo sapien
gagcctttcttcactacagaatttgctctggcc

SEQ ID NO: 1026372 - DNA, 33 bp, Homo sapien
gagcctttcttcactatagaatttgctctggcc

SEQ ID NO: 1026373 - DNA, 33 bp, Homo sapien
tgttctggggcatttacagtcgtgttgtcctct

SEQ ID NO: 1026374 - DNA, 33 bp, Homo sapien
tgttctggggcatttatagtcgtgttgtcctct

SEQ ID NO: 1026375 - DNA, 33 bp, Homo sapien
atgtaactttctggctcaagtctcgggtgtgca

SEQ ID NO: 1026376 - DNA, 33 bp, Homo sapien
atgtaactttctggcttaagtctcgggtgtgca

SEQ ID NO: 1026377 - DNA, 33 bp, Homo sapien
caagattttgcaatcaatgaggatccctgaggt

SEQ ID NO: 1026378 - DNA, 33 bp, Homo sapien
caagattttgcaatcagtgaggatccctgaggt

SEQ ID NO: 1026379 - DNA, 33 bp, Homo sapien
atttcatttgtctccacgataatcttcattatt

SEQ ID NO: 1026380 - DNA, 33 bp, Homo sapien
atttcatttgtctccatgataatcttcattatt

SEQ ID NO: 1026381 - DNA, 33 bp, Homo sapien
tctgctgataggcatgcaaattggtaaaatcac

SEQ ID NO: 1026382 - DNA, 33 bp, Homo sapien
tctgctgataggcatgtaaattggtaaaatcac

SEQ ID NO: 1026383 - DNA, 33 bp, Homo sapien
atcgctcagaatttacacagtcaaattgtgatt

SEQ ID NO: 1026384 - DNA, 33 bp, Homo sapien
atcgctcagaatttacgcagtcaaattgtgatt

SEQ ID NO: 1026385 - DNA, 33 bp, Homo sapien
gtgctcccaagttgcaatctcaaacttagacca

SEQ ID NO: 1026386 - DNA, 33 bp, Homo sapien
gtgctcccaagttgcagtctcaaacttagacca

SEQ ID NO: 1026387 - DNA, 33 bp, Homo sapien
catcaataagaagcacgaaagagctaaatcata

SEQ ID NO: 1026388 - DNA, 33 bp, Homo sapien
catcaataagaagcactaaagagctaaatcata

SEQ ID NO: 1026389 - DNA, 33 bp, Homo sapien
atgactactacttatgacacattgcaatgatgg

SEQ ID NO: 1026390 - DNA, 33 bp, Homo sapien
atgactactacttatggcacattgcaatgatgg

SEQ ID NO: 1026391 - DNA, 33 bp, Homo sapien
tgatccttactttctgaagcaaaagacagacat

SEQ ID NO: 1026392 - DNA, 33 bp, Homo sapien
tgatccttactttctggagcaaaagacagacat

SEQ ID NO: 1026393 - DNA, 33 bp, Homo sapien
gttgaatgaggttcacaaagggagcaaagaaca

SEQ ID NO: 1026394 - DNA, 33 bp, Homo sapien
gttgaatgaggttcacgaagggagcaaagaaca

SEQ ID NO: 1026395 - DNA, 33 bp, Homo sapien
ttcttgtttatccataagttgcatgttgccatt

SEQ ID NO: 1026396 - DNA, 33 bp, Homo sapien
ttcttgtttatccatatgttgcatgttgccatt

SEQ ID NO: 1026397 - DNA, 33 bp, Homo sapien
tcacagacattatatcactttattcctaaatac

SEQ ID NO: 1026398 - DNA, 33 bp, Homo sapien
tcacagacattatatccctttattcctaaatac

SEQ ID NO: 1026399 - DNA, 33 bp, Homo sapien
ggtcagttaagggctccgaaactgggcttcctc

SEQ ID NO: 1026400 - DNA, 33 bp, Homo sapien
ggtcagttaagggctctgaaactgggcttcctc

SEQ ID NO: 1026401 - DNA, 33 bp, Homo sapien
taagctattgctatcacgtgcatttactataga

SEQ ID NO: 1026402 - DNA, 33 bp, Homo sapien
taagctattgctatcatgtgcatttactataga

SEQ ID NO: 1026403 - DNA, 33 bp, Homo sapien
gattaataagagctccaacatttcattacaagg

SEQ ID NO: 1026404 - DNA, 33 bp, Homo sapien
gattaataagagctccgacatttcattacaagg

SEQ ID NO: 1026405 - DNA, 33 bp, Homo sapien
tgggaatagtccagtaaagaggaatcttagtca

SEQ ID NO: 1026406 - DNA, 33 bp, Homo sapien
tgggaatagtccagtacagaggaatcttagtca

SEQ ID NO: 1026407 - DNA, 33 bp, Homo sapien
ttcaaccaaaacggtacagcaagcaaggtgctc

SEQ ID NO: 1026408 - DNA, 33 bp, Homo sapien
ttcaaccaaaacggtatagcaagcaaggtgctc

SEQ ID NO: 1026409 - DNA, 33 bp, Homo sapien
tgtcaggtttccacataaacaagtcctcagaat

SEQ ID NO: 1026410 - DNA, 33 bp, Homo sapien
tgtcaggtttccacatgaacaagtcctcagaat

SEQ ID NO: 1026411 - DNA, 33 bp, Homo sapien
atgtggaaacctgacaagaactatggatcagga

SEQ ID NO: 1026412 - DNA, 33 bp, Homo sapien
atgtggaaacctgacaggaactatggatcagga

SEQ ID NO: 1026413 - DNA, 33 bp, Homo sapien
atttatcaatgccaggcactgcgttaggtgcta

SEQ ID NO: 1026414 - DNA, 33 bp, Homo sapien
atttatcaatgccaggtactgcgttaggtgcta

SEQ ID NO: 1026415 - DNA, 33 bp, Homo sapien
agtccagttatctgaaaggtttaaatgatctga

SEQ ID NO: 1026416 - DNA, 33 bp, Homo sapien
agtccagttatctgaatggtttaaatgatctga

SEQ ID NO: 1026417 - DNA, 33 bp, Homo sapien
aggtttattggcaatgccagtttgaaaactagg

SEQ ID NO: 1026418 - DNA, 33 bp, Homo sapien
aggtttattggcaatgtcagtttgaaaactagg

SEQ ID NO: 1026419 - DNA, 33 bp, Homo sapien
ttctttaagagaaatacggatttatgatgacca

SEQ ID NO: 1026420 - DNA, 33 bp, Homo sapien
ttctttaagagaaatatggatttatgatgacca

SEQ ID NO: 1026421 - DNA, 33 bp, Homo sapien
gccatgtataacagtgaatctctaatgccacaa

SEQ ID NO: 1026422 - DNA, 33 bp, Homo sapien
gccatgtataacagtggatctctaatgccacaa

SEQ ID NO: 1026423 - DNA, 33 bp, Homo sapien
tcaacccagatttgtactaaactccaagaggca

SEQ ID NO: 1026424 - DNA, 33 bp, Homo sapien
tcaacccagatttgtagtaaactccaagaggca

SEQ ID NO: 1026425 - DNA, 33 bp, Homo sapien
gtgagatggcaggcataacagggttaaagacct

SEQ ID NO: 1026426 - DNA, 33 bp, Homo sapien
gtgagatggcaggcatgacagggttaaagacct

SEQ ID NO: 1026427 - DNA, 33 bp, Homo sapien
ggaaacgcgccagcacaggaaagaagacagcca

SEQ ID NO: 1026428 - DNA, 33 bp, Homo sapien
ggaaacgcgccagcacgggaaagaagacagcca

SEQ ID NO: 1026429 - DNA, 33 bp, Homo sapien
tccctgcggcttcctccctcacttttcacagcc

SEQ ID NO: 1026430 - DNA, 33 bp, Homo sapien
tccctgcggcttcctctctcacttttcacagcc

SEQ ID NO: 1026431 - DNA, 33 bp, Homo sapien
attacatgttaataataacttctcaggccgggc

SEQ ID NO: 1026432 - DNA, 33 bp, Homo sapien
attacatgttaataatgacttctcaggccgggc

SEQ ID NO: 1026433 - DNA, 33 bp, Homo sapien
ttaaggatcatctgtgaaccttttgaatctttt

SEQ ID NO: 1026434 - DNA, 33 bp, Homo sapien
ttaaggatcatctgtggaccttttgaatctttt

SEQ ID NO: 1026435 - DNA, 33 bp, Homo sapien
agagaagagttggatcaattaacactatgtcaa

SEQ ID NO: 1026436 - DNA, 33 bp, Homo sapien
agagaagagttggatcgattaacactatgtcaa

SEQ ID NO: 1026437 - DNA, 33 bp, Homo sapien
gagttctgattcaactaaagtagagcggaacat

SEQ ID NO: 1026438 - DNA, 33 bp, Homo sapien
gagttctgattcaactcaagtagagcggaacat

SEQ ID NO: 1026439 - DNA, 33 bp, Homo sapien
gcctagatacttctacccaattacaccagggtg

SEQ ID NO: 1026440 - DNA, 33 bp, Homo sapien
gcctagatacttctactcaattacaccagggtg

SEQ ID NO: 1026441 - DNA, 33 bp, Homo sapien
gactatggagcagctacagcctagatacttcta

SEQ ID NO: 1026442 - DNA, 33 bp, Homo sapien
gactatggagcagctagagcctagatacttcta

SEQ ID NO: 1026443 - DNA, 33 bp, Homo sapien
agcctcttgtaagaacaaaatatcacacagaaa

SEQ ID NO: 1026444 - DNA, 33 bp, Homo sapien
agcctcttgtaagaacgaaatatcacacagaaa

SEQ ID NO: 1026445 - DNA, 33 bp, Homo sapien
atagctattgtgaaaagttactgagagaattac

SEQ ID NO: 1026446 - DNA, 33 bp, Homo sapien
atagctattgtgaaaatttactgagagaattac

SEQ ID NO: 1026447 - DNA, 33 bp, Homo sapien
caggtgacaacatcaaagctgtggcaataacac

SEQ ID NO: 1026448 - DNA, 33 bp, Homo sapien
caggtgacaacatcaaggctgtggcaataacac

SEQ ID NO: 1026449 - DNA, 33 bp, Homo sapien
gcctctaggaggaaaacgctgttctgaaagaag

SEQ ID NO: 1026450 - DNA, 33 bp, Homo sapien
gcctctaggaggaaaatgctgttctgaaagaag

SEQ ID NO: 1026451 - DNA, 33 bp, Homo sapien
tgtattcatcaactcacaagtttcctgcatccc

SEQ ID NO: 1026452 - DNA, 33 bp, Homo sapien
tgtattcatcaactcagaagtttcctgcatccc

SEQ ID NO: 1026453 - DNA, 33 bp, Homo sapien
acatcccacattttaaaggccactacatggtat

SEQ ID NO: 1026454 - DNA, 33 bp, Homo sapien
acatcccacattttaagggccactacatggtat

SEQ ID NO: 1026455 - DNA, 33 bp, Homo sapien
ggttttgatacagcagcccctggaaactaagac

SEQ ID NO: 1026456 - DNA, 33 bp, Homo sapien
ggttttgatacagcaggccctggaaactaagac

SEQ ID NO: 1026457 - DNA, 33 bp, Homo sapien
gactaatttatttctacctaattcagcaacctt

SEQ ID NO: 1026458 - DNA, 33 bp, Homo sapien
gactaatttatttctatctaattcagcaacctt

SEQ ID NO: 1026459 - DNA, 33 bp, Homo sapien
gaggcacaaactctgccattacgtgaacatcac

SEQ ID NO: 1026460 - DNA, 33 bp, Homo sapien
gaggcacaaactctgcgattacgtgaacatcac

SEQ ID NO: 1026461 - DNA, 33 bp, Homo sapien
gtatcccaggtagccagataagtaattaggaag

SEQ ID NO: 1026462 - DNA, 33 bp, Homo sapien
gtatcccaggtagccatataagtaattaggaag

SEQ ID NO: 1026463 - DNA, 33 bp, Homo sapien
gctttagtgagagactcaaagtttatctcttgg

SEQ ID NO: 1026464 - DNA, 33 bp, Homo sapien
gctttagtgagagactgaaagtttatctcttgg

SEQ ID NO: 1026465 - DNA, 33 bp, Homo sapien
gagaaaatagcgcccccgggcccacaggtcctc

SEQ ID NO: 1026466 - DNA, 33 bp, Homo sapien
gagaaaatagcgcccctgggcccacaggtcctc

SEQ ID NO: 1026467 - DNA, 33 bp, Homo sapien
caactaagccctctcccatcttcattccaaaag

SEQ ID NO: 1026468 - DNA, 33 bp, Homo sapien
caactaagccctctcctatcttcattccaaaag

SEQ ID NO: 1026469 - DNA, 33 bp, Homo sapien
actaaagaacttatccacataaccaaaaaccac

SEQ ID NO: 1026470 - DNA, 33 bp, Homo sapien
actaaagaacttatccgcataaccaaaaaccac

SEQ ID NO: 1026471 - DNA, 33 bp, Homo sapien
ggaaaaaatggcacaaagattacttgagtcctg

SEQ ID NO: 1026472 - DNA, 33 bp, Homo sapien
ggaaaaaatggcacaaggattacttgagtcctg

SEQ ID NO: 1026473 - DNA, 33 bp, Homo sapien
ctgactgcagatccacagagcataaatgattgc

SEQ ID NO: 1026474 - DNA, 33 bp, Homo sapien
ctgactgcagatccacggagcataaatgattgc

SEQ ID NO: 1026475 - DNA, 33 bp, Homo sapien
tctccctcaacttcccagacactgccatgttct

SEQ ID NO: 1026476 - DNA, 33 bp, Homo sapien
tctccctcaacttcccggacactgccatgttct

SEQ ID NO: 1026477 - DNA, 33 bp, Homo sapien
tatttgttatatcatacagtggccacagctttt

SEQ ID NO: 1026478 - DNA, 33 bp, Homo sapien
tatttgttatatcatatagtggccacagctttt

SEQ ID NO: 1026479 - DNA, 33 bp, Homo sapien
tcactatttgcataacaggtacactagaagccc

SEQ ID NO: 1026480 - DNA, 33 bp, Homo sapien
tcactatttgcataacgggtacactagaagccc

SEQ ID NO: 1026481 - DNA, 33 bp, Homo sapien
attctggctctttggtcacagacattggttgac

SEQ ID NO: 1026482 - DNA, 33 bp, Homo sapien
attctggctctttggttacagacattggttgac

SEQ ID NO: 1026483 - DNA, 33 bp, Homo sapien
atcctccctctcgaccacagggactatttggtt

SEQ ID NO: 1026484 - DNA, 33 bp, Homo sapien
atcctccctctcgaccgcagggactatttggtt

SEQ ID NO: 1026485 - DNA, 33 bp, Homo sapien
gtagatttttttctgcagcaaacatttgcactg

SEQ ID NO: 1026486 - DNA, 33 bp, Homo sapien
gtagatttttttctgcggcaaacatttgcactg

SEQ ID NO: 1026487 - DNA, 33 bp, Homo sapien
cagccacataagacaccgaaaataaggaagatt

SEQ ID NO: 1026488 - DNA, 33 bp, Homo sapien
cagccacataagacacggaaaataaggaagatt

SEQ ID NO: 1026489 - DNA, 33 bp, Homo sapien
tatctcaaggtctttcaagctctttaatctatg

SEQ ID NO: 1026490 - DNA, 33 bp, Homo sapien
tatctcaaggtctttccagctctttaatctatg

SEQ ID NO: 1026491 - DNA, 33 bp, Homo sapien
tttactagcctctcaaagtcctggctcccaaac

SEQ ID NO: 1026492 - DNA, 33 bp, Homo sapien
tttactagcctctcaacgtcctggctcccaaac

SEQ ID NO: 1026493 - DNA, 33 bp, Homo sapien
aaggggagatacaggcacaacaagtccagtcag

SEQ ID NO: 1026494 - DNA, 33 bp, Homo sapien
aaggggagatacaggcgcaacaagtccagtcag

SEQ ID NO: 1026495 - DNA, 33 bp, Homo sapien
ggaaaataattggcttaaaatagaggtccaata

SEQ ID NO: 1026496 - DNA, 33 bp, Homo sapien
ggaaaataattggcttgaaatagaggtccaata

SEQ ID NO: 1026497 - DNA, 33 bp, Homo sapien
agaaaagaaaacgattaaagacattgacttttt

SEQ ID NO: 1026498 - DNA, 33 bp, Homo sapien
agaaaagaaaacgatttaagacattgacttttt

SEQ ID NO: 1026499 - DNA, 33 bp, Homo sapien
tcacgcactcacagcaatcttaggaacgccggc

SEQ ID NO: 1026500 - DNA, 33 bp, Homo sapien
tcacgcactcacagcagtcttaggaacgccggc

SEQ ID NO: 1026501 - DNA, 33 bp, Homo sapien
tgtttgcacagtcatcacaactaagcaataata

SEQ ID NO: 1026502 - DNA, 33 bp, Homo sapien
tgtttgcacagtcatcgcaactaagcaataata

SEQ ID NO: 1026503 - DNA, 33 bp, Homo sapien
gtttactggaaattccaagtaactgtaagctag

SEQ ID NO: 1026504 - DNA, 33 bp, Homo sapien
gtttactggaaattccgagtaactgtaagctag

SEQ ID NO: 1026505 - DNA, 33 bp, Homo sapien
caggtgtactgttttcactgaggcaagagagca

SEQ ID NO: 1026506 - DNA, 33 bp, Homo sapien
caggtgtactgttttcgctgaggcaagagagca

SEQ ID NO: 1026507 - DNA, 33 bp, Homo sapien
ctgccgttattagccaatcctctcatgaatctg

SEQ ID NO: 1026508 - DNA, 33 bp, Homo sapien
ctgccgttattagccagtcctctcatgaatctg

SEQ ID NO: 1026509 - DNA, 33 bp, Homo sapien
ctaagagatctcagaacgggaagaacaaacatt

SEQ ID NO: 1026510 - DNA, 33 bp, Homo sapien
ctaagagatctcagaatgggaagaacaaacatt

SEQ ID NO: 1026511 - DNA, 33 bp, Homo sapien
ttgctgtaacaattaccacaaactttatggttc

SEQ ID NO: 1026512 - DNA, 33 bp, Homo sapien
ttgctgtaacaattactacaaactttatggttc

SEQ ID NO: 1026513 - DNA, 33 bp, Homo sapien
gggagccagtattgtacgatcagcacattggct

SEQ ID NO: 1026514 - DNA, 33 bp, Homo sapien
gggagccagtattgtatgatcagcacattggct

SEQ ID NO: 1026515 - DNA, 33 bp, Homo sapien
gcagatgatctgggagacatgcattggatgcag

SEQ ID NO: 1026516 - DNA, 33 bp, Homo sapien
gcagatgatctgggaggcatgcattggatgcag

SEQ ID NO: 1026517 - DNA, 33 bp, Homo sapien
ctgagagacctacatacagcagagatggatatt

SEQ ID NO: 1026518 - DNA, 33 bp, Homo sapien
ctgagagacctacatatagcagagatggatatt

SEQ ID NO: 1026519 - DNA, 33 bp, Homo sapien
ctccaccctgatgttgacaaacttaatttggtt

SEQ ID NO: 1026520 - DNA, 33 bp, Homo sapien
ctccaccctgatgttgtcaaacttaatttggtt

SEQ ID NO: 1026521 - DNA, 33 bp, Homo sapien
gccctggggttaatgcaaaacgttgaaccattc

SEQ ID NO: 1026522 - DNA, 33 bp, Homo sapien
gccctggggttaatgcgaaacgttgaaccattc

SEQ ID NO: 1026523 - DNA, 33 bp, Homo sapien
tccatctcacaggtcacgtacaaggtgaaatga

SEQ ID NO: 1026524 - DNA, 33 bp, Homo sapien
tccatctcacaggtcatgtacaaggtgaaatga

SEQ ID NO: 1026525 - DNA, 33 bp, Homo sapien
tgcctgtgagagacgacgccagctggtagaggg

SEQ ID NO: 1026526 - DNA, 33 bp, Homo sapien
tgcctgtgagagacgatgccagctggtagaggg

SEQ ID NO: 1026527 - DNA, 33 bp, Homo sapien
atgggtttgtgcctcaactttgacttgaatctc

SEQ ID NO: 1026528 - DNA, 33 bp, Homo sapien
atgggtttgtgcctcagctttgacttgaatctc

SEQ ID NO: 1026529 - DNA, 33 bp, Homo sapien
aaatatagcacctttccactgaggaagttaaac

SEQ ID NO: 1026530 - DNA, 33 bp, Homo sapien
aaatatagcacctttctactgaggaagttaaac

SEQ ID NO: 1026531 - DNA, 33 bp, Homo sapien
ttaccttgtgatcctacgtgcaagtcaactgca

SEQ ID NO: 1026532 - DNA, 33 bp, Homo sapien
ttaccttgtgatcctatgtgcaagtcaactgca

SEQ ID NO: 1026533 - DNA, 33 bp, Homo sapien
ccccaaccaacacaaactgtgaaaggctacaca

SEQ ID NO: 1026534 - DNA, 33 bp, Homo sapien
ccccaaccaacacaaattgtgaaaggctacaca

SEQ ID NO: 1026535 - DNA, 33 bp, Homo sapien
tctaatatagaggttgaacaatgtgtggtgcta

SEQ ID NO: 1026536 - DNA, 33 bp, Homo sapien
tctaatatagaggttggacaatgtgtggtgcta

SEQ ID NO: 1026537 - DNA, 33 bp, Homo sapien
tacatctgagttatcacaagagtctgagatgat

SEQ ID NO: 1026538 - DNA, 33 bp, Homo sapien
tacatctgagttatcataagagtctgagatgat

SEQ ID NO: 1026539 - DNA, 33 bp, Homo sapien
gggctgagaactttgacagtaatctgcaaatcc

SEQ ID NO: 1026540 - DNA, 33 bp, Homo sapien
gggctgagaactttgagagtaatctgcaaatcc

SEQ ID NO: 1026541 - DNA, 33 bp, Homo sapien
atgcctgcatagccacacccttcacagccatgc

SEQ ID NO: 1026542 - DNA, 33 bp, Homo sapien
atgcctgcatagccacgcccttcacagccatgc

SEQ ID NO: 1026543 - DNA, 33 bp, Homo sapien
aagagtaaacattactcaaggatttttacctcc

SEQ ID NO: 1026544 - DNA, 33 bp, Homo sapien
aagagtaaacattactgaaggatttttacctcc

SEQ ID NO: 1026545 - DNA, 33 bp, Homo sapien
gagttcttagatttgacgcaaaaaagtataatc

SEQ ID NO: 1026546 - DNA, 33 bp, Homo sapien
gagttcttagatttgatgcaaaaaagtataatc

SEQ ID NO: 1026547 - DNA, 33 bp, Homo sapien
tgggtattctctgcaccctaccaccacttctgt

SEQ ID NO: 1026548 - DNA, 33 bp, Homo sapien
tgggtattctctgcactctaccaccacttctgt

SEQ ID NO: 1026549 - DNA, 33 bp, Homo sapien
gcttgtgggtctttaactacatggcaccatgta

SEQ ID NO: 1026550 - DNA, 33 bp, Homo sapien
gcttgtgggtctttaagtacatggcaccatgta

SEQ ID NO: 1026551 - DNA, 33 bp, Homo sapien
caaataatgttcatcaccagacacttcattttc

SEQ ID NO: 1026552 - DNA, 33 bp, Homo sapien
caaataatgttcatcatcagacacttcattttc

SEQ ID NO: 1026553 - DNA, 33 bp, Homo sapien
aattataatacagtcacgtgtcccattatgatg

SEQ ID NO: 1026554 - DNA, 33 bp, Homo sapien
aattataatacagtcatgtgtcccattatgatg

SEQ ID NO: 1026555 - DNA, 33 bp, Homo sapien
tttgtacaccagaagaatctaattatgttggaa

SEQ ID NO: 1026556 - DNA, 33 bp, Homo sapien
tttgtacaccagaagagtctaattatgttggaa

SEQ ID NO: 1026557 - DNA, 33 bp, Homo sapien
gcatgtcaatgcggtacggagaataggcagtct

SEQ ID NO: 1026558 - DNA, 33 bp, Homo sapien
gcatgtcaatgcggtatggagaataggcagtct

SEQ ID NO: 1026559 - DNA, 33 bp, Homo sapien
ctaggccaagcgttaaatattacgaagggaacg

SEQ ID NO: 1026560 - DNA, 33 bp, Homo sapien
ctaggccaagcgttaattattacgaagggaacg

SEQ ID NO: 1026561 - DNA, 33 bp, Homo sapien
aaagctgagatagagcagagaaacatactttgt

SEQ ID NO: 1026562 - DNA, 33 bp, Homo sapien
aaagctgagatagagcggagaaacatactttgt

SEQ ID NO: 1026563 - DNA, 33 bp, Homo sapien
acctaaatagaatttgaagcttctcctatgaca

SEQ ID NO: 1026564 - DNA, 33 bp, Homo sapien
acctaaatagaatttggagcttctcctatgaca

SEQ ID NO: 1026565 - DNA, 33 bp, Homo sapien
aacaataaattgcacacagagtctgtcatagga

SEQ ID NO: 1026566 - DNA, 33 bp, Homo sapien
aacaataaattgcacatagagtctgtcatagga

SEQ ID NO: 1026567 - DNA, 33 bp, Homo sapien
gtgctaattaaacctcaagtggtatttcaagta

SEQ ID NO: 1026568 - DNA, 33 bp, Homo sapien
gtgctaattaaacctcgagtggtatttcaagta

SEQ ID NO: 1026569 - DNA, 33 bp, Homo sapien
gtgaagaggaatggacaaattggatgtaatgac

SEQ ID NO: 1026570 - DNA, 33 bp, Homo sapien
gtgaagaggaatggaccaattggatgtaatgac

SEQ ID NO: 1026571 - DNA, 33 bp, Homo sapien
aactcctcccaggctaaggagtgaaagccccag

SEQ ID NO: 1026572 - DNA, 33 bp, Homo sapien
aactcctcccaggctatggagtgaaagccccag

SEQ ID NO: 1026573 - DNA, 33 bp, Homo sapien
ctctttccttgaggacaccttcaggagcgcttc

SEQ ID NO: 1026574 - DNA, 33 bp, Homo sapien
ctctttccttgaggacgccttcaggagcgcttc

SEQ ID NO: 1026575 - DNA, 33 bp, Homo sapien
atgaggaactctccccccatgagatatctttcc

SEQ ID NO: 1026576 - DNA, 33 bp, Homo sapien
atgaggaactctccccgcatgagatatctttcc

SEQ ID NO: 1026577 - DNA, 33 bp, Homo sapien
gtgttttctgtatattaaatacatgtgggtctt

SEQ ID NO: 1026578 - DNA, 33 bp, Homo sapien
gtgttttctgtatattgaatacatgtgggtctt

SEQ ID NO: 1026579 - DNA, 33 bp, Homo sapien
ctgttacattggtttagccaggatcccccctta

SEQ ID NO: 1026580 - DNA, 33 bp, Homo sapien
ctgttacattggtttatccaggatcccccctta

SEQ ID NO: 1026581 - DNA, 33 bp, Homo sapien
catatgaaagagccaaagacttattgctgccag

SEQ ID NO: 1026582 - DNA, 33 bp, Homo sapien
catatgaaagagccaaggacttattgctgccag

SEQ ID NO: 1026583 - DNA, 33 bp, Homo sapien
actctgctgtgaagaactccctgatttctgtag

SEQ ID NO: 1026584 - DNA, 33 bp, Homo sapien
actctgctgtgaagaattccctgatttctgtag

SEQ ID NO: 1026585 - DNA, 33 bp, Homo sapien
tttagtgattggtaacaaaatagttaaattgag

SEQ ID NO: 1026586 - DNA, 33 bp, Homo sapien
tttagtgattggtaacgaaatagttaaattgag

SEQ ID NO: 1026587 - DNA, 33 bp, Homo sapien
caaggaaagcagattcaattctctctgggcaat

SEQ ID NO: 1026588 - DNA, 33 bp, Homo sapien
caaggaaagcagattcgattctctctgggcaat

SEQ ID NO: 1026589 - DNA, 33 bp, Homo sapien
acctttctttgtgagacatacagaagtgctaga

SEQ ID NO: 1026590 - DNA, 33 bp, Homo sapien
acctttctttgtgagatatacagaagtgctaga

SEQ ID NO: 1026591 - DNA, 33 bp, Homo sapien
agcctatttcagcaaacagttggtttttaccta

SEQ ID NO: 1026592 - DNA, 33 bp, Homo sapien
agcctatttcagcaaatagttggtttttaccta

SEQ ID NO: 1026593 - DNA, 33 bp, Homo sapien
gtagggggtgagtggcaataccaggatccaagc

SEQ ID NO: 1026594 - DNA, 33 bp, Homo sapien
gtagggggtgagtggcgataccaggatccaagc

SEQ ID NO: 1026595 - DNA, 33 bp, Homo sapien
tttgccttttacaagaaaccttctcgctggatt

SEQ ID NO: 1026596 - DNA, 33 bp, Homo sapien
tttgccttttacaagataccttctcgctggatt

SEQ ID NO: 1026597 - DNA, 33 bp, Homo sapien
cactactatgtctgcactgataattgagaggct

SEQ ID NO: 1026598 - DNA, 33 bp, Homo sapien
cactactatgtctgcagtgataattgagaggct

SEQ ID NO: 1026599 - DNA, 33 bp, Homo sapien
ggctgcatttttcatacggtcaagttggagata

SEQ ID NO: 1026600 - DNA, 33 bp, Homo sapien
ggctgcatttttcatatggtcaagttggagata

SEQ ID NO: 1026601 - DNA, 33 bp, Homo sapien
ctaagttgactttgtacaagctcaagctgcctt

SEQ ID NO: 1026602 - DNA, 33 bp, Homo sapien
ctaagttgactttgtataagctcaagctgcctt

SEQ ID NO: 1026603 - DNA, 33 bp, Homo sapien
gcctttgttttgtgtccagtgttgcaagtttgg

SEQ ID NO: 1026604 - DNA, 33 bp, Homo sapien
gcctttgttttgtgtctagtgttgcaagtttgg

SEQ ID NO: 1026605 - DNA, 33 bp, Homo sapien
agagtattgcattacactggggttttttggcta

SEQ ID NO: 1026606 - DNA, 33 bp, Homo sapien
agagtattgcattacattggggttttttggcta

SEQ ID NO: 1026607 - DNA, 33 bp, Homo sapien
agcaaccaacagatataaagtgctccacaaata

SEQ ID NO: 1026608 - DNA, 33 bp, Homo sapien
agcaaccaacagatatgaagtgctccacaaata

SEQ ID NO: 1026609 - DNA, 33 bp, Homo sapien
tggcaatggtccagtacaaccgtcatctggcaa

SEQ ID NO: 1026610 - DNA, 33 bp, Homo sapien
tggcaatggtccagtagaaccgtcatctggcaa

SEQ ID NO: 1026611 - DNA, 33 bp, Homo sapien
tatccattatttacagaaaatgtggaaaagatg

SEQ ID NO: 1026612 - DNA, 33 bp, Homo sapien
tatccattatttacaggaaatgtggaaaagatg

SEQ ID NO: 1026613 - DNA, 33 bp, Homo sapien
gactctgtacttcctaccccgactcaaggggct

SEQ ID NO: 1026614 - DNA, 33 bp, Homo sapien
gactctgtacttcctatcccgactcaaggggct

SEQ ID NO: 1026615 - DNA, 33 bp, Homo sapien
atcaatattatacacactaccattaggccatag

SEQ ID NO: 1026616 - DNA, 33 bp, Homo sapien
atcaatattatacacattaccattaggccatag

SEQ ID NO: 1026617 - DNA, 33 bp, Homo sapien
ctttagcatataccagacagtactttaagtgtt

SEQ ID NO: 1026618 - DNA, 33 bp, Homo sapien
ctttagcatataccaggcagtactttaagtgtt

SEQ ID NO: 1026619 - DNA, 33 bp, Homo sapien
atttaattcaatacacaagcaattggcacccac

SEQ ID NO: 1026620 - DNA, 33 bp, Homo sapien
atttaattcaatacactagcaattggcacccac

SEQ ID NO: 1026621 - DNA, 33 bp, Homo sapien
ttttattgagtgtctacaccatgtcaggcatag

SEQ ID NO: 1026622 - DNA, 33 bp, Homo sapien
ttttattgagtgtctataccatgtcaggcatag

SEQ ID NO: 1026623 - DNA, 33 bp, Homo sapien
atatttagtggctttcccatatgttagcaataa

SEQ ID NO: 1026624 - DNA, 33 bp, Homo sapien
atatttagtggctttcgcatatgttagcaataa

SEQ ID NO: 1026625 - DNA, 33 bp, Homo sapien
agtacatccagaagaaaatagcgacagagatgg

SEQ ID NO: 1026626 - DNA, 33 bp, Homo sapien
agtacatccagaagaagatagcgacagagatgg

SEQ ID NO: 1026627 - DNA, 33 bp, Homo sapien
gcaaggaaggagaggcaagaagagcaacatcta

SEQ ID NO: 1026628 - DNA, 33 bp, Homo sapien
gcaaggaaggagaggcgagaagagcaacatcta

SEQ ID NO: 1026629 - DNA, 33 bp, Homo sapien
acaaatgttggtctagaaggactaaaaaaagaa

SEQ ID NO: 1026630 - DNA, 33 bp, Homo sapien
acaaatgttggtctagtaggactaaaaaaagaa

SEQ ID NO: 1026631 - DNA, 33 bp, Homo sapien
tattaccaccttccccaaaaacacacgggatac

SEQ ID NO: 1026632 - DNA, 33 bp, Homo sapien
tattaccaccttcccccaaaacacacgggatac

SEQ ID NO: 1026633 - DNA, 33 bp, Homo sapien
aaactcccccagatgaacttcgtgattcttatc

SEQ ID NO: 1026634 - DNA, 33 bp, Homo sapien
aaactcccccagatgaccttcgtgattcttatc

SEQ ID NO: 1026635 - DNA, 33 bp, Homo sapien
gaaattaagtctacatgaggcttagaaatgtct

SEQ ID NO: 1026636 - DNA, 33 bp, Homo sapien
gaaattaagtctacattaggcttagaaatgtct

SEQ ID NO: 1026637 - DNA, 33 bp, Homo sapien
taaaaatgggctaaaaatgtttccagacttaac

SEQ ID NO: 1026638 - DNA, 33 bp, Homo sapien
taaaaatgggctaaaattgtttccagacttaac

SEQ ID NO: 1026639 - DNA, 33 bp, Homo sapien
ttcacgtagacctttacctttgtgcatctaatt

SEQ ID NO: 1026640 - DNA, 33 bp, Homo sapien
ttcacgtagacctttatctttgtgcatctaatt

SEQ ID NO: 1026641 - DNA, 33 bp, Homo sapien
ctgtgctatgaaggaacggttcaacagataaag

SEQ ID NO: 1026642 - DNA, 33 bp, Homo sapien
ctgtgctatgaaggaatggttcaacagataaag

SEQ ID NO: 1026643 - DNA, 33 bp, Homo sapien
agtcctaaacagactgcaatgagttggtcaatc

SEQ ID NO: 1026644 - DNA, 33 bp, Homo sapien
agtcctaaacagactggaatgagttggtcaatc

SEQ ID NO: 1026645 - DNA, 33 bp, Homo sapien
tctatggtttaaaaaagtcggaacagtgattgc

SEQ ID NO: 1026646 - DNA, 33 bp, Homo sapien
tctatggtttaaaaaattcggaacagtgattgc

SEQ ID NO: 1026647 - DNA, 33 bp, Homo sapien
ccctgggggaagtaggccatggtgattaagaac

SEQ ID NO: 1026648 - DNA, 33 bp, Homo sapien
ccctgggggaagtagggcatggtgattaagaac

SEQ ID NO: 1026649 - DNA, 33 bp, Homo sapien
ggcataaaaatgtcacagcaacaccacaggggg

SEQ ID NO: 1026650 - DNA, 33 bp, Homo sapien
ggcataaaaatgtcacggcaacaccacaggggg

SEQ ID NO: 1026651 - DNA, 33 bp, Homo sapien
gcactggtttgtaagacagcttggaagaaactt

SEQ ID NO: 1026652 - DNA, 33 bp, Homo sapien
gcactggtttgtaagatagcttggaagaaactt

SEQ ID NO: 1026653 - DNA, 33 bp, Homo sapien
aggcactaccaatcaacaggtggagacacgtaa

SEQ ID NO: 1026654 - DNA, 33 bp, Homo sapien
aggcactaccaatcaataggtggagacacgtaa

SEQ ID NO: 1026655 - DNA, 33 bp, Homo sapien
ttccctcattaaggaaactgcaatagctcccat

SEQ ID NO: 1026656 - DNA, 33 bp, Homo sapien
ttccctcattaaggaacctgcaatagctcccat

SEQ ID NO: 1026657 - DNA, 33 bp, Homo sapien
tgcttatacaatcaaaactagaccccttcatct

SEQ ID NO: 1026658 - DNA, 33 bp, Homo sapien
tgcttatacaatcaaatctagaccccttcatct

SEQ ID NO: 1026659 - DNA, 33 bp, Homo sapien
ggtctcagtctcgcccacgtggacaaggctcta

SEQ ID NO: 1026660 - DNA, 33 bp, Homo sapien
ggtctcagtctcgcccgcgtggacaaggctcta

SEQ ID NO: 1026661 - DNA, 33 bp, Homo sapien
tttaacctgcatgttacagcagataaaagcaat

SEQ ID NO: 1026662 - DNA, 33 bp, Homo sapien
tttaacctgcatgttatagcagataaaagcaat

SEQ ID NO: 1026663 - DNA, 33 bp, Homo sapien
agccatctcagattccgaagggagacagagtca

SEQ ID NO: 1026664 - DNA, 33 bp, Homo sapien
agccatctcagattcctaagggagacagagtca

SEQ ID NO: 1026665 - DNA, 33 bp, Homo sapien
actttacctttaagtaagtcaattgccaaggaa

SEQ ID NO: 1026666 - DNA, 33 bp, Homo sapien
actttacctttaagtaggtcaattgccaaggaa

SEQ ID NO: 1026667 - DNA, 33 bp, Homo sapien
aaagttttctgataaaccctctagcacataatg

SEQ ID NO: 1026668 - DNA, 33 bp, Homo sapien
aaagttttctgataaatcctctagcacataatg

SEQ ID NO: 1026669 - DNA, 33 bp, Homo sapien
ccttcttggattcttacgtgagcaaactgaata

SEQ ID NO: 1026670 - DNA, 33 bp, Homo sapien
ccttcttggattcttatgtgagcaaactgaata

SEQ ID NO: 1026671 - DNA, 33 bp, Homo sapien
aaaacatcccaacttacactaccttgcatcatt

SEQ ID NO: 1026672 - DNA, 33 bp, Homo sapien
aaaacatcccaacttatactaccttgcatcatt

SEQ ID NO: 1026673 - DNA, 33 bp, Homo sapien
atacacgaagtttgtgaaagtagagataaaaga

SEQ ID NO: 1026674 - DNA, 33 bp, Homo sapien
atacacgaagtttgtgcaagtagagataaaaga

SEQ ID NO: 1026675 - DNA, 33 bp, Homo sapien
ggtctggctgcttctaagagaaatattttccca

SEQ ID NO: 1026676 - DNA, 33 bp, Homo sapien
ggtctggctgcttctaggagaaatattttccca

SEQ ID NO: 1026677 - DNA, 33 bp, Homo sapien
caggtgagcacatttggatttcttatgctacag

SEQ ID NO: 1026678 - DNA, 33 bp, Homo sapien
caggtgagcacatttgtatttcttatgctacag

SEQ ID NO: 1026679 - DNA, 33 bp, Homo sapien
taatgtgttctccttacgattcaggtttctcat

SEQ ID NO: 1026680 - DNA, 33 bp, Homo sapien
taatgtgttctccttatgattcaggtttctcat

SEQ ID NO: 1026681 - DNA, 33 bp, Homo sapien
aggatcaaactgttcccatgcaatataaatgca

SEQ ID NO: 1026682 - DNA, 33 bp, Homo sapien
aggatcaaactgttcctatgcaatataaatgca

SEQ ID NO: 1026683 - DNA, 33 bp, Homo sapien
ttttctgcagctaccacgggggcttaagttctt

SEQ ID NO: 1026684 - DNA, 33 bp, Homo sapien
ttttctgcagctaccatgggggcttaagttctt

SEQ ID NO: 1026685 - DNA, 33 bp, Homo sapien
ttttagcccccaaaaacccatatgagcagatct

SEQ ID NO: 1026686 - DNA, 33 bp, Homo sapien
ttttagcccccaaaaatccatatgagcagatct

SEQ ID NO: 1026687 - DNA, 33 bp, Homo sapien
ataggttttgctctagacagactaaagggggtc

SEQ ID NO: 1026688 - DNA, 33 bp, Homo sapien
ataggttttgctctaggcagactaaagggggtc

SEQ ID NO: 1026689 - DNA, 33 bp, Homo sapien
gtaagctcgtgatgccaaatgtgagcctcaaaa

SEQ ID NO: 1026690 - DNA, 33 bp, Homo sapien
gtaagctcgtgatgccgaatgtgagcctcaaaa

SEQ ID NO: 1026691 - DNA, 33 bp, Homo sapien
ctgactttcgtttcccaagtttatgcatttact

SEQ ID NO: 1026692 - DNA, 33 bp, Homo sapien
ctgactttcgtttccccagtttatgcatttact

SEQ ID NO: 1026693 - DNA, 33 bp, Homo sapien
acctgtcctgccatgaagtcattgcctacattt

SEQ ID NO: 1026694 - DNA, 33 bp, Homo sapien
acctgtcctgccatgaggtcattgcctacattt

SEQ ID NO: 1026695 - DNA, 33 bp, Homo sapien
caggtgaatcgtaaaaacagaaaggatgggaaa

SEQ ID NO: 1026696 - DNA, 33 bp, Homo sapien
caggtgaatcgtaaaaccagaaaggatgggaaa

SEQ ID NO: 1026697 - DNA, 33 bp, Homo sapien
ggctggaagcctgataaaaggtttcttgtgggg

SEQ ID NO: 1026698 - DNA, 33 bp, Homo sapien
ggctggaagcctgatataaggtttcttgtgggg

SEQ ID NO: 1026699 - DNA, 33 bp, Homo sapien
caggtctaaatcccaactcctgcccaaccctac

SEQ ID NO: 1026700 - DNA, 33 bp, Homo sapien
caggtctaaatcccaagtcctgcccaaccctac

SEQ ID NO: 1026701 - DNA, 33 bp, Homo sapien
agaagatgcaccaagaacctcaaagtcagaagt

SEQ ID NO: 1026702 - DNA, 33 bp, Homo sapien
agaagatgcaccaagagcctcaaagtcagaagt

SEQ ID NO: 1026703 - DNA, 33 bp, Homo sapien
ctatactgatacactgaacagccttgtaatcct

SEQ ID NO: 1026704 - DNA, 33 bp, Homo sapien
ctatactgatacactggacagccttgtaatcct

SEQ ID NO: 1026705 - DNA, 33 bp, Homo sapien
tcctctgctcaggttcacagtttctacagaaca

SEQ ID NO: 1026706 - DNA, 33 bp, Homo sapien
tcctctgctcaggttcgcagtttctacagaaca

SEQ ID NO: 1026707 - DNA, 33 bp, Homo sapien
ttgcagcaaacaggaaatctccctgctaatact

SEQ ID NO: 1026708 - DNA, 33 bp, Homo sapien
ttgcagcaaacaggaagtctccctgctaatact

SEQ ID NO: 1026709 - DNA, 33 bp, Homo sapien
aaggtgtggctaaaaaccaccttccaagtaatg

SEQ ID NO: 1026710 - DNA, 33 bp, Homo sapien
aaggtgtggctaaaaatcaccttccaagtaatg

SEQ ID NO: 1026711 - DNA, 33 bp, Homo sapien
ttttgttcaagataaaacccgagaagtcatcat

SEQ ID NO: 1026712 - DNA, 33 bp, Homo sapien
ttttgttcaagataaatcccgagaagtcatcat

SEQ ID NO: 1026713 - DNA, 33 bp, Homo sapien
tgcaaattaactggaaactatagagaaaagcag

SEQ ID NO: 1026714 - DNA, 33 bp, Homo sapien
tgcaaattaactggaagctatagagaaaagcag

SEQ ID NO: 1026715 - DNA, 33 bp, Homo sapien
tcctctttgatgcagagaatttgacaatgacat

SEQ ID NO: 1026716 - DNA, 33 bp, Homo sapien
tcctctttgatgcagataatttgacaatgacat

SEQ ID NO: 1026717 - DNA, 33 bp, Homo sapien
cagatgcaaacagaaaaagacaaggttagagga

SEQ ID NO: 1026718 - DNA, 33 bp, Homo sapien
cagatgcaaacagaaagagacaaggttagagga

SEQ ID NO: 1026719 - DNA, 33 bp, Homo sapien
gtaatgtgccttaaaacattgcctggaagtagc

SEQ ID NO: 1026720 - DNA, 33 bp, Homo sapien
gtaatgtgccttaaaatattgcctggaagtagc

SEQ ID NO: 1026721 - DNA, 33 bp, Homo sapien
agcacagatgaatgagccaaagtgacccctcag

SEQ ID NO: 1026722 - DNA, 33 bp, Homo sapien
agcacagatgaatgaggcaaagtgacccctcag

SEQ ID NO: 1026723 - DNA, 33 bp, Homo sapien
agttaatacaatagcaaactcttcagtgacttc

SEQ ID NO: 1026724 - DNA, 33 bp, Homo sapien
agttaatacaatagcagactcttcagtgacttc

SEQ ID NO: 1026725 - DNA, 33 bp, Homo sapien
agaagtagacagactcaagatgtctttggaagc

SEQ ID NO: 1026726 - DNA, 33 bp, Homo sapien
agaagtagacagactcgagatgtctttggaagc

SEQ ID NO: 1026727 - DNA, 33 bp, Homo sapien
acacgaatgtgttgaaatggactgaaataaaga

SEQ ID NO: 1026728 - DNA, 33 bp, Homo sapien
acacgaatgtgttgaagtggactgaaataaaga

SEQ ID NO: 1026729 - DNA, 33 bp, Homo sapien
ttatgtccttcaaaaccaagatcacaattgcta

SEQ ID NO: 1026730 - DNA, 33 bp, Homo sapien
ttatgtccttcaaaacgaagatcacaattgcta

SEQ ID NO: 1026731 - DNA, 33 bp, Homo sapien
aggtagcttttagaaaaggacaaatgcagcaat

SEQ ID NO: 1026732 - DNA, 33 bp, Homo sapien
aggtagcttttagaaagggacaaatgcagcaat

SEQ ID NO: 1026733 - DNA, 33 bp, Homo sapien
tagctggtttccaatcactcacttacctgtttc

SEQ ID NO: 1026734 - DNA, 33 bp, Homo sapien
tagctggtttccaatcgctcacttacctgtttc

SEQ ID NO: 1026735 - DNA, 33 bp, Homo sapien
ttgcacattttaaatacgttgagttgaaagtct

SEQ ID NO: 1026736 - DNA, 33 bp, Homo sapien
ttgcacattttaaatatgttgagttgaaagtct

SEQ ID NO: 1026737 - DNA, 33 bp, Homo sapien
acaatttgaaagatacagaagccaatgctttac

SEQ ID NO: 1026738 - DNA, 33 bp, Homo sapien
acaatttgaaagatacggaagccaatgctttac

SEQ ID NO: 1026739 - DNA, 33 bp, Homo sapien
ccatgaactttccctcgaattatgctagtcaat

SEQ ID NO: 1026740 - DNA, 33 bp, Homo sapien
ccatgaactttccctctaattatgctagtcaat

SEQ ID NO: 1026741 - DNA, 33 bp, Homo sapien
acttcaaatgcttccacatgtaaacagagccac

SEQ ID NO: 1026742 - DNA, 33 bp, Homo sapien
acttcaaatgcttccatatgtaaacagagccac

SEQ ID NO: 1026743 - DNA, 33 bp, Homo sapien
ttcatctgttttacccaatgagtatgctgtgtt

SEQ ID NO: 1026744 - DNA, 33 bp, Homo sapien
ttcatctgttttacccgatgagtatgctgtgtt

SEQ ID NO: 1026745 - DNA, 33 bp, Homo sapien
tggtttgggagtttgccgatctttggaattggg

SEQ ID NO: 1026746 - DNA, 33 bp, Homo sapien
tggtttgggagtttgctgatctttggaattggg

SEQ ID NO: 1026747 - DNA, 33 bp, Homo sapien
aagcaagacacatcaacgtattgtagcaaagaa

SEQ ID NO: 1026748 - DNA, 33 bp, Homo sapien
aagcaagacacatcaatgtattgtagcaaagaa

SEQ ID NO: 1026749 - DNA, 33 bp, Homo sapien
gttaaagatcttgaaacgaggagactaacctgg

SEQ ID NO: 1026750 - DNA, 33 bp, Homo sapien
gttaaagatcttgaaatgaggagactaacctgg

SEQ ID NO: 1026751 - DNA, 33 bp, Homo sapien
agtagagttgtatccaagttaaaagctaacttc

SEQ ID NO: 1026752 - DNA, 33 bp, Homo sapien
agtagagttgtatccaggttaaaagctaacttc

SEQ ID NO: 1026753 - DNA, 33 bp, Homo sapien
tcagagtgaatttatacgctgacaagccaccaa

SEQ ID NO: 1026754 - DNA, 33 bp, Homo sapien
tcagagtgaatttatatgctgacaagccaccaa

SEQ ID NO: 1026755 - DNA, 33 bp, Homo sapien
tgccatcctagcaaggaaacaaagaggttaaga

SEQ ID NO: 1026756 - DNA, 33 bp, Homo sapien
tgccatcctagcaaggtaacaaagaggttaaga

SEQ ID NO: 1026757 - DNA, 33 bp, Homo sapien
tcacatcatccttacactaccagtgaggtagac

SEQ ID NO: 1026758 - DNA, 33 bp, Homo sapien
tcacatcatccttacattaccagtgaggtagac

SEQ ID NO: 1026759 - DNA, 33 bp, Homo sapien
aattatgcaatgagaaatcttgaaaccctgtaa

SEQ ID NO: 1026760 - DNA, 33 bp, Homo sapien
aattatgcaatgagaagtcttgaaaccctgtaa

SEQ ID NO: 1026761 - DNA, 33 bp, Homo sapien
aaactagattcagaaactagaattgcttactgg

SEQ ID NO: 1026762 - DNA, 33 bp, Homo sapien
aaactagattcagaaattagaattgcttactgg

SEQ ID NO: 1026763 - DNA, 33 bp, Homo sapien
ttgcacttacacttgacgagtagtacgtatatt

SEQ ID NO: 1026764 - DNA, 33 bp, Homo sapien
ttgcacttacacttgatgagtagtacgtatatt

SEQ ID NO: 1026765 - DNA, 33 bp, Homo sapien
gacacactctagaaacaaaagacatcctggaag

SEQ ID NO: 1026766 - DNA, 33 bp, Homo sapien
gacacactctagaaacgaaagacatcctggaag

SEQ ID NO: 1026767 - DNA, 33 bp, Homo sapien
ccaggtcaccgggggacgagtgatagcctaagg

SEQ ID NO: 1026768 - DNA, 33 bp, Homo sapien
ccaggtcaccgggggatgagtgatagcctaagg

SEQ ID NO: 1026769 - DNA, 33 bp, Homo sapien
tgaaagcctttgacaaactcggtgaaaatttca

SEQ ID NO: 1026770 - DNA, 33 bp, Homo sapien
tgaaagcctttgacaacctcggtgaaaatttca

SEQ ID NO: 1026771 - DNA, 33 bp, Homo sapien
ctgataagtgtccaagccatcacttttaactcc

SEQ ID NO: 1026772 - DNA, 33 bp, Homo sapien
ctgataagtgtccaagtcatcacttttaactcc

SEQ ID NO: 1026773 - DNA, 33 bp, Homo sapien
gcgtgtgagctttacacagagaggcagttgggg

SEQ ID NO: 1026774 - DNA, 33 bp, Homo sapien
gcgtgtgagctttacatagagaggcagttgggg

SEQ ID NO: 1026775 - DNA, 33 bp, Homo sapien
cccttctgaaggaaggccaattcttagagatag

SEQ ID NO: 1026776 - DNA, 33 bp, Homo sapien
cccttctgaaggaaggtcaattcttagagatag

SEQ ID NO: 1026777 - DNA, 33 bp, Homo sapien
tagaaggatgtcttcacgatatcttaagtgtaa

SEQ ID NO: 1026778 - DNA, 33 bp, Homo sapien
tagaaggatgtcttcatgatatcttaagtgtaa

SEQ ID NO: 1026779 - DNA, 33 bp, Homo sapien
aagacatccttctaaaccatgaagacatttttc

SEQ ID NO: 1026780 - DNA, 33 bp, Homo sapien
aagacatccttctaaatcatgaagacatttttc

SEQ ID NO: 1026781 - DNA, 33 bp, Homo sapien
agttgtaggatatacacagatgttcttacttta

SEQ ID NO: 1026782 - DNA, 33 bp, Homo sapien
agttgtaggatatacatagatgttcttacttta

SEQ ID NO: 1026783 - DNA, 33 bp, Homo sapien
aactttcttaacaaaacgaagagcatctattaa

SEQ ID NO: 1026784 - DNA, 33 bp, Homo sapien
aactttcttaacaaaatgaagagcatctattaa

SEQ ID NO: 1026785 - DNA, 33 bp, Homo sapien
ctaaaatctgtagggcagaatgagcttagggaa

SEQ ID NO: 1026786 - DNA, 33 bp, Homo sapien
ctaaaatctgtagggctgaatgagcttagggaa

SEQ ID NO: 1026787 - DNA, 33 bp, Homo sapien
gcaagtgagccatatgaatgtctgcagaaagaa

SEQ ID NO: 1026788 - DNA, 33 bp, Homo sapien
gcaagtgagccatatggatgtctgcagaaagaa

SEQ ID NO: 1026789 - DNA, 33 bp, Homo sapien
tgagtcttccagcttcacgtggctctggccctc

SEQ ID NO: 1026790 - DNA, 33 bp, Homo sapien
tgagtcttccagcttcgcgtggctctggccctc

SEQ ID NO: 1026791 - DNA, 33 bp, Homo sapien
agaagaaaagaagttcaccagaaatccatagaa

SEQ ID NO: 1026792 - DNA, 33 bp, Homo sapien
agaagaaaagaagttcgccagaaatccatagaa

SEQ ID NO: 1026793 - DNA, 33 bp, Homo sapien
tggttgctttctatctcaatatcccatttcatt

SEQ ID NO: 1026794 - DNA, 33 bp, Homo sapien
tggttgctttctatcttaatatcccatttcatt

SEQ ID NO: 1026795 - DNA, 33 bp, Homo sapien
gtggttcacaattatacagaaagacctggctgt

SEQ ID NO: 1026796 - DNA, 33 bp, Homo sapien
gtggttcacaattatatagaaagacctggctgt

SEQ ID NO: 1026797 - DNA, 33 bp, Homo sapien
gtcccagctgcctttgaacttgaagtataacac

SEQ ID NO: 1026798 - DNA, 33 bp, Homo sapien
gtcccagctgcctttggacttgaagtataacac

SEQ ID NO: 1026799 - DNA, 33 bp, Homo sapien
ccagctttcccctgaaagaataggcggctgaaa

SEQ ID NO: 1026800 - DNA, 33 bp, Homo sapien
ccagctttcccctgaaggaataggcggctgaaa

SEQ ID NO: 1026801 - DNA, 33 bp, Homo sapien
gtccagctctctccaacgaaaagcaccaagaaa

SEQ ID NO: 1026802 - DNA, 33 bp, Homo sapien
gtccagctctctccaatgaaaagcaccaagaaa

SEQ ID NO: 1026803 - DNA, 33 bp, Homo sapien
agttgagagaaacacactggaggtcataaagct

SEQ ID NO: 1026804 - DNA, 33 bp, Homo sapien
agttgagagaaacacattggaggtcataaagct

SEQ ID NO: 1026805 - DNA, 33 bp, Homo sapien
ttccacttgccttctcccacactccacgttggt

SEQ ID NO: 1026806 - DNA, 33 bp, Homo sapien
ttccacttgccttctctcacactccacgttggt

SEQ ID NO: 1026807 - DNA, 33 bp, Homo sapien
ttttgtaagaaaccaccaactgtcttccaaagt

SEQ ID NO: 1026808 - DNA, 33 bp, Homo sapien
ttttgtaagaaaccactaactgtcttccaaagt

SEQ ID NO: 1026809 - DNA, 33 bp, Homo sapien
tttcttcctgagatgaagataacaagggtagct

SEQ ID NO: 1026810 - DNA, 33 bp, Homo sapien
tttcttcctgagatgaggataacaagggtagct

SEQ ID NO: 1026811 - DNA, 33 bp, Homo sapien
agaaagcatggtcatcaattttaaatcctttct

SEQ ID NO: 1026812 - DNA, 33 bp, Homo sapien
agaaagcatggtcatccattttaaatcctttct

SEQ ID NO: 1026813 - DNA, 33 bp, Homo sapien
tttcatctcaaaagaacctaaagcttgtagtcc

SEQ ID NO: 1026814 - DNA, 33 bp, Homo sapien
tttcatctcaaaagaatctaaagcttgtagtcc

SEQ ID NO: 1026815 - DNA, 33 bp, Homo sapien
gctctgagtctctcataacattgtagccaaaat

SEQ ID NO: 1026816 - DNA, 33 bp, Homo sapien
gctctgagtctctcatgacattgtagccaaaat

SEQ ID NO: 1026817 - DNA, 33 bp, Homo sapien
agtccatcttcataagcaaatgttaaacctttg

SEQ ID NO: 1026818 - DNA, 33 bp, Homo sapien
agtccatcttcataaggaaatgttaaacctttg

SEQ ID NO: 1026819 - DNA, 33 bp, Homo sapien
tacctgactcttgtgacgaagaatttgaactgg

SEQ ID NO: 1026820 - DNA, 33 bp, Homo sapien
tacctgactcttgtgaggaagaatttgaactgg

SEQ ID NO: 1026821 - DNA, 33 bp, Homo sapien
tttttttagcccttatcacagctgggaaactta

SEQ ID NO: 1026822 - DNA, 33 bp, Homo sapien
tttttttagcccttatgacagctgggaaactta

SEQ ID NO: 1026823 - DNA, 33 bp, Homo sapien
ttgcctagttgttcggccatttcaacaaataaa

SEQ ID NO: 1026824 - DNA, 33 bp, Homo sapien
ttgcctagttgttcggtcatttcaacaaataaa

SEQ ID NO: 1026825 - DNA, 33 bp, Homo sapien
caggcaacacagaaataagaggtgttcgcttgt

SEQ ID NO: 1026826 - DNA, 33 bp, Homo sapien
caggcaacacagaaatgagaggtgttcgcttgt

SEQ ID NO: 1026827 - DNA, 33 bp, Homo sapien
ggagtccagtgaatgagtatccccaaaccaaca

SEQ ID NO: 1026828 - DNA, 33 bp, Homo sapien
ggagtccagtgaatgattatccccaaaccaaca

SEQ ID NO: 1026829 - DNA, 33 bp, Homo sapien
attccagatggcaggcactatcaagatgtcttg

SEQ ID NO: 1026830 - DNA, 33 bp, Homo sapien
attccagatggcaggcgctatcaagatgtcttg

SEQ ID NO: 1026831 - DNA, 33 bp, Homo sapien
caaaactattagagaaaagcagagcattaaatc

SEQ ID NO: 1026832 - DNA, 33 bp, Homo sapien
caaaactattagagaagagcagagcattaaatc

SEQ ID NO: 1026833 - DNA, 33 bp, Homo sapien
tcactcagtaacccagaataatcttcctattgt

SEQ ID NO: 1026834 - DNA, 33 bp, Homo sapien
tcactcagtaacccaggataatcttcctattgt

SEQ ID NO: 1026835 - DNA, 33 bp, Homo sapien
atgcttctctccaccccatctaacactctaaca

SEQ ID NO: 1026836 - DNA, 33 bp, Homo sapien
atgcttctctccaccctatctaacactctaaca

SEQ ID NO: 1026837 - DNA, 33 bp, Homo sapien
ttcaacaggtcagcccacacttgtgcatatggc

SEQ ID NO: 1026838 - DNA, 33 bp, Homo sapien
ttcaacaggtcagcccgcacttgtgcatatggc

SEQ ID NO: 1026839 - DNA, 33 bp, Homo sapien
gggcaagattgtagtcaccctagtattggaaac

SEQ ID NO: 1026840 - DNA, 33 bp, Homo sapien
gggcaagattgtagtcgccctagtattggaaac

SEQ ID NO: 1026841 - DNA, 33 bp, Homo sapien
ttccacttctgcaccacacccaaaaggctcaag

SEQ ID NO: 1026842 - DNA, 33 bp, Homo sapien
ttccacttctgcaccatacccaaaaggctcaag

SEQ ID NO: 1026843 - DNA, 33 bp, Homo sapien
gcaaaaaagtcacctacggacagcaaggctaag

SEQ ID NO: 1026844 - DNA, 33 bp, Homo sapien
gcaaaaaagtcacctatggacagcaaggctaag

SEQ ID NO: 1026845 - DNA, 33 bp, Homo sapien
ctatgtatagaacctgaaaatgttggtctgggg

SEQ ID NO: 1026846 - DNA, 33 bp, Homo sapien
ctatgtatagaacctggaaatgttggtctgggg

SEQ ID NO: 1026847 - DNA, 33 bp, Homo sapien
gagtttcaggtaaataacagtacattattgctg

SEQ ID NO: 1026848 - DNA, 33 bp, Homo sapien
gagtttcaggtaaataccagtacattattgctg

SEQ ID NO: 1026849 - DNA, 33 bp, Homo sapien
acttcgagaaaatttaactaagcaatttagatg

SEQ ID NO: 1026850 - DNA, 33 bp, Homo sapien
acttcgagaaaatttacctaagcaatttagatg

SEQ ID NO: 1026851 - DNA, 33 bp, Homo sapien
gcagttacagtgtgctaaatattcttctaatct

SEQ ID NO: 1026852 - DNA, 33 bp, Homo sapien
gcagttacagtgtgctgaatattcttctaatct

SEQ ID NO: 1026853 - DNA, 33 bp, Homo sapien
acctgtaggtagaatcccccagcagaggatccc

SEQ ID NO: 1026854 - DNA, 33 bp, Homo sapien
acctgtaggtagaatctcccagcagaggatccc

SEQ ID NO: 1026855 - DNA, 33 bp, Homo sapien
cccctggaggataccaatattttcagattcagg

SEQ ID NO: 1026856 - DNA, 33 bp, Homo sapien
cccctggaggataccagtattttcagattcagg

SEQ ID NO: 1026857 - DNA, 33 bp, Homo sapien
gaaacagagaaagatgaaataaagtcgatgaaa

SEQ ID NO: 1026858 - DNA, 33 bp, Homo sapien
gaaacagagaaagatgcaataaagtcgatgaaa

SEQ ID NO: 1026859 - DNA, 33 bp, Homo sapien
ccaggctgcagctccacgctcctttcctctttc

SEQ ID NO: 1026860 - DNA, 33 bp, Homo sapien
ccaggctgcagctccatgctcctttcctctttc

SEQ ID NO: 1026861 - DNA, 33 bp, Homo sapien
aaagtgatccaccatacgtaggcagatggtcag

SEQ ID NO: 1026862 - DNA, 33 bp, Homo sapien
aaagtgatccaccatatgtaggcagatggtcag

SEQ ID NO: 1026863 - DNA, 33 bp, Homo sapien
ggggctgactggaggcacgtaaatcgtcttctc

SEQ ID NO: 1026864 - DNA, 33 bp, Homo sapien
ggggctgactggaggcgcgtaaatcgtcttctc

SEQ ID NO: 1026865 - DNA, 33 bp, Homo sapien
atgtgctaaactgagacgtggcttcccacacaa

SEQ ID NO: 1026866 - DNA, 33 bp, Homo sapien
atgtgctaaactgagatgtggcttcccacacaa

SEQ ID NO: 1026867 - DNA, 33 bp, Homo sapien
agcttcatatgagtgaaataatcctgtataatt

SEQ ID NO: 1026868 - DNA, 33 bp, Homo sapien
agcttcatatgagtgacataatcctgtataatt

SEQ ID NO: 1026869 - DNA, 33 bp, Homo sapien
attaagttcagtacccaagtgataaaataatct

SEQ ID NO: 1026870 - DNA, 33 bp, Homo sapien
attaagttcagtacccgagtgataaaataatct

SEQ ID NO: 1026871 - DNA, 33 bp, Homo sapien
gcagcttgttcctgaccggagaccgaatggcca

SEQ ID NO: 1026872 - DNA, 33 bp, Homo sapien
gcagcttgttcctgactggagaccgaatggcca

SEQ ID NO: 1026873 - DNA, 33 bp, Homo sapien
gagaacaaaacttcaactagaaatgatttcaaa

SEQ ID NO: 1026874 - DNA, 33 bp, Homo sapien
gagaacaaaacttcaagtagaaatgatttcaaa

SEQ ID NO: 1026875 - DNA, 33 bp, Homo sapien
gaatttgctctgaagaaaataatgcgcaagtct

SEQ ID NO: 1026876 - DNA, 33 bp, Homo sapien
gaatttgctctgaagagaataatgcgcaagtct

SEQ ID NO: 1026877 - DNA, 33 bp, Homo sapien
caatcagttgagaaagcagcatgaattatgacc

SEQ ID NO: 1026878 - DNA, 33 bp, Homo sapien
caatcagttgagaaaggagcatgaattatgacc

SEQ ID NO: 1026879 - DNA, 33 bp, Homo sapien
agaccttcgggcctgaagcatatgagccatgag

SEQ ID NO: 1026880 - DNA, 33 bp, Homo sapien
agaccttcgggcctgacgcatatgagccatgag

SEQ ID NO: 1026881 - DNA, 33 bp, Homo sapien
ccctcgtgtagcacaaacctacctcttcacaga

SEQ ID NO: 1026882 - DNA, 33 bp, Homo sapien
ccctcgtgtagcacaagcctacctcttcacaga

SEQ ID NO: 1026883 - DNA, 33 bp, Homo sapien
taagaatggactagtacaataatctactgccta

SEQ ID NO: 1026884 - DNA, 33 bp, Homo sapien
taagaatggactagtataataatctactgccta

SEQ ID NO: 1026885 - DNA, 33 bp, Homo sapien
agtaatcttaaaagccaaaaatcgataaaagcc

SEQ ID NO: 1026886 - DNA, 33 bp, Homo sapien
agtaatcttaaaagccgaaaatcgataaaagcc

SEQ ID NO: 1026887 - DNA, 33 bp, Homo sapien
aatgtcataattgctgaaccattatcttacatt

SEQ ID NO: 1026888 - DNA, 33 bp, Homo sapien
aatgtcataattgctggaccattatcttacatt

SEQ ID NO: 1026889 - DNA, 33 bp, Homo sapien
ttctcccttcgtatctcactgatattgcaccct

SEQ ID NO: 1026890 - DNA, 33 bp, Homo sapien
ttctcccttcgtatcttactgatattgcaccct

SEQ ID NO: 1026891 - DNA, 33 bp, Homo sapien
aatgtttcaatgactaaacactcccatctttta

SEQ ID NO: 1026892 - DNA, 33 bp, Homo sapien
aatgtttcaatgactagacactcccatctttta

SEQ ID NO: 1026893 - DNA, 33 bp, Homo sapien
tttatcatggtaaattcaaggcttttcaactct

SEQ ID NO: 1026894 - DNA, 33 bp, Homo sapien
tttatcatggtaaattgaaggcttttcaactct

SEQ ID NO: 1026895 - DNA, 33 bp, Homo sapien
gcctgttagctcattcacaaccatctgtgggaa

SEQ ID NO: 1026896 - DNA, 33 bp, Homo sapien
gcctgttagctcattcgcaaccatctgtgggaa

SEQ ID NO: 1026897 - DNA, 33 bp, Homo sapien
ggttagggccatgcaaattctgcccggttctct

SEQ ID NO: 1026898 - DNA, 33 bp, Homo sapien
ggttagggccatgcaacttctgcccggttctct

SEQ ID NO: 1026899 - DNA, 33 bp, Homo sapien
agaggttaaacaacacaagacagtgcatctttc

SEQ ID NO: 1026900 - DNA, 33 bp, Homo sapien
agaggttaaacaacaccagacagtgcatctttc

SEQ ID NO: 1026901 - DNA, 33 bp, Homo sapien
tcaaggtttaggaaaacgaaattcacaccagaa

SEQ ID NO: 1026902 - DNA, 33 bp, Homo sapien
tcaaggtttaggaaaatgaaattcacaccagaa

SEQ ID NO: 1026903 - DNA, 33 bp, Homo sapien
agacagccatcacagaacaagatacctcataac

SEQ ID NO: 1026904 - DNA, 33 bp, Homo sapien
agacagccatcacagagcaagatacctcataac

SEQ ID NO: 1026905 - DNA, 33 bp, Homo sapien
atgagaaaaattctcactcctatattggagaaa

SEQ ID NO: 1026906 - DNA, 33 bp, Homo sapien
atgagaaaaattctcagtcctatattggagaaa

SEQ ID NO: 1026907 - DNA, 33 bp, Homo sapien
ccataactagatgttacagctgctgctaccttc

SEQ ID NO: 1026908 - DNA, 33 bp, Homo sapien
ccataactagatgttatagctgctgctaccttc

SEQ ID NO: 1026909 - DNA, 33 bp, Homo sapien
gagtggaaggaaacaaactatctttacacacac

SEQ ID NO: 1026910 - DNA, 33 bp, Homo sapien
gagtggaaggaaacaagctatctttacacacac

SEQ ID NO: 1026911 - DNA, 33 bp, Homo sapien
tgtgggaaatcctatcaagttactctggagaaa

SEQ ID NO: 1026912 - DNA, 33 bp, Homo sapien
tgtgggaaatcctatcgagttactctggagaaa

SEQ ID NO: 1026913 - DNA, 33 bp, Homo sapien
cacatccttgcacctcagaagatccatttgcag

SEQ ID NO: 1026914 - DNA, 33 bp, Homo sapien
cacatccttgcacctcggaagatccatttgcag

SEQ ID NO: 1026915 - DNA, 33 bp, Homo sapien
cacacaacacctgtctaaccctcaagaatccta

SEQ ID NO: 1026916 - DNA, 33 bp, Homo sapien
cacacaacacctgtctcaccctcaagaatccta

SEQ ID NO: 1026917 - DNA, 33 bp, Homo sapien
tgttagtggatcagacaaagatttatggtatct

SEQ ID NO: 1026918 - DNA, 33 bp, Homo sapien
tgttagtggatcagacgaagatttatggtatct

SEQ ID NO: 1026919 - DNA, 33 bp, Homo sapien
gaaactttccattcaaactccactattattatt

SEQ ID NO: 1026920 - DNA, 33 bp, Homo sapien
gaaactttccattcaacctccactattattatt

SEQ ID NO: 1026921 - DNA, 33 bp, Homo sapien
gaaccaataagatccacggaatagaagtgaatc

SEQ ID NO: 1026922 - DNA, 33 bp, Homo sapien
gaaccaataagatccatggaatagaagtgaatc

SEQ ID NO: 1026923 - DNA, 33 bp, Homo sapien
gctatagggtggaaacagatggacaatccctta

SEQ ID NO: 1026924 - DNA, 33 bp, Homo sapien
gctatagggtggaaacggatggacaatccctta

SEQ ID NO: 1026925 - DNA, 33 bp, Homo sapien
tactaagggaatcctaacgtcttaacttcactt

SEQ ID NO: 1026926 - DNA, 33 bp, Homo sapien
tactaagggaatcctagcgtcttaacttcactt

SEQ ID NO: 1026927 - DNA, 33 bp, Homo sapien
gacacagcaaagatgaacaatgtgaccttagta

SEQ ID NO: 1026928 - DNA, 33 bp, Homo sapien
gacacagcaaagatgagcaatgtgaccttagta

SEQ ID NO: 1026929 - DNA, 33 bp, Homo sapien
tacttttagtttcttgcacgataaaaagaagaa

SEQ ID NO: 1026930 - DNA, 33 bp, Homo sapien
tacttttagtttcttgtacgataaaaagaagaa

SEQ ID NO: 1026931 - DNA, 33 bp, Homo sapien
ttgatttagattagtgacaaaagactgatttta

SEQ ID NO: 1026932 - DNA, 33 bp, Homo sapien
ttgatttagattagtggcaaaagactgatttta

SEQ ID NO: 1026933 - DNA, 33 bp, Homo sapien
tgaggcctctcctccaatctctgacatatgcat

SEQ ID NO: 1026934 - DNA, 33 bp, Homo sapien
tgaggcctctcctccagtctctgacatatgcat

SEQ ID NO: 1026935 - DNA, 33 bp, Homo sapien
aggcagtccaaggtcaaggttccagcagattcc

SEQ ID NO: 1026936 - DNA, 33 bp, Homo sapien
aggcagtccaaggtcacggttccagcagattcc

SEQ ID NO: 1026937 - DNA, 33 bp, Homo sapien
ttgaagctttttgatcacttgttttgtagtcag

SEQ ID NO: 1026938 - DNA, 33 bp, Homo sapien
ttgaagctttttgatcccttgttttgtagtcag

SEQ ID NO: 1026939 - DNA, 33 bp, Homo sapien
tcatcagtttccaagccgacatttcttctcctt

SEQ ID NO: 1026940 - DNA, 33 bp, Homo sapien
tcatcagtttccaagctgacatttcttctcctt

SEQ ID NO: 1026941 - DNA, 33 bp, Homo sapien
cagtaacaaaagcacacgaatatcttcattgca

SEQ ID NO: 1026942 - DNA, 33 bp, Homo sapien
cagtaacaaaagcacaggaatatcttcattgca

SEQ ID NO: 1026943 - DNA, 33 bp, Homo sapien
aaaatgcacaaaatcaatagagtagagatgctg

SEQ ID NO: 1026944 - DNA, 33 bp, Homo sapien
aaaatgcacaaaatcagtagagtagagatgctg

SEQ ID NO: 1026945 - DNA, 33 bp, Homo sapien
tcagaattttcagtaacgcaatagccaggggag

SEQ ID NO: 1026946 - DNA, 33 bp, Homo sapien
tcagaattttcagtaatgcaatagccaggggag

SEQ ID NO: 1026947 - DNA, 33 bp, Homo sapien
gtctttctgttctttgaagctgaccaccaatat

SEQ ID NO: 1026948 - DNA, 33 bp, Homo sapien
gtctttctgttctttgcagctgaccaccaatat

SEQ ID NO: 1026949 - DNA, 33 bp, Homo sapien
ccccagaaatgccttcactcttttggaatttct

SEQ ID NO: 1026950 - DNA, 33 bp, Homo sapien
ccccagaaatgccttcgctcttttggaatttct

SEQ ID NO: 1026951 - DNA, 33 bp, Homo sapien
ttgctctctcaccaacaatatctgtttcaggcc

SEQ ID NO: 1026952 - DNA, 33 bp, Homo sapien
ttgctctctcaccaaccatatctgtttcaggcc

SEQ ID NO: 1026953 - DNA, 33 bp, Homo sapien
gtgttggaaacgtgatcaacttagagaaagaag

SEQ ID NO: 1026954 - DNA, 33 bp, Homo sapien
gtgttggaaacgtgattaacttagagaaagaag

SEQ ID NO: 1026955 - DNA, 33 bp, Homo sapien
caagaccctcttgactcaagacagtttttcatc

SEQ ID NO: 1026956 - DNA, 33 bp, Homo sapien
caagaccctcttgacttaagacagtttttcatc

SEQ ID NO: 1026957 - DNA, 33 bp, Homo sapien
agcagggagtgagagaataaacagatgctcatg

SEQ ID NO: 1026958 - DNA, 33 bp, Homo sapien
agcagggagtgagagagtaaacagatgctcatg

SEQ ID NO: 1026959 - DNA, 33 bp, Homo sapien
aaatgacatctaaaccaatggtagcttacatcc

SEQ ID NO: 1026960 - DNA, 33 bp, Homo sapien
aaatgacatctaaaccgatggtagcttacatcc

SEQ ID NO: 1026961 - DNA, 33 bp, Homo sapien
attccatctctcaaacaaaccacttaaacccaa

SEQ ID NO: 1026962 - DNA, 33 bp, Homo sapien
attccatctctcaaactaaccacttaaacccaa

SEQ ID NO: 1026963 - DNA, 33 bp, Homo sapien
tacaaatggtgtatgacaattctggttctttct

SEQ ID NO: 1026964 - DNA, 33 bp, Homo sapien
tacaaatggtgtatgagaattctggttctttct

SEQ ID NO: 1026965 - DNA, 33 bp, Homo sapien
agtttactggagtgaaaggatgcagattaaagt

SEQ ID NO: 1026966 - DNA, 33 bp, Homo sapien
agtttactggagtgaagggatgcagattaaagt

SEQ ID NO: 1026967 - DNA, 33 bp, Homo sapien
gacgtgagccactgaaactgacccaatgttgct

SEQ ID NO: 1026968 - DNA, 33 bp, Homo sapien
gacgtgagccactgaatctgacccaatgttgct

SEQ ID NO: 1026969 - DNA, 33 bp, Homo sapien
tattttttgttgttgcacttgtagagacagcat

SEQ ID NO: 1026970 - DNA, 33 bp, Homo sapien
tattttttgttgttgctcttgtagagacagcat

SEQ ID NO: 1026971 - DNA, 33 bp, Homo sapien
ccagcaccttgatatcaaatttctcagcctcca

SEQ ID NO: 1026972 - DNA, 33 bp, Homo sapien
ccagcaccttgatatcgaatttctcagcctcca

SEQ ID NO: 1026973 - DNA, 33 bp, Homo sapien
tggctgtctccgatgtcaaagagctcactacat

SEQ ID NO: 1026974 - DNA, 33 bp, Homo sapien
tggctgtctccgatgttaaagagctcactacat

SEQ ID NO: 1026975 - DNA, 33 bp, Homo sapien
tgggcgcaataagaaacgctttttgttttaagc

SEQ ID NO: 1026976 - DNA, 33 bp, Homo sapien
tgggcgcaataagaaatgctttttgttttaagc

SEQ ID NO: 1026977 - DNA, 33 bp, Homo sapien
tctgctgtgtaacaaactatctcagagctcaat

SEQ ID NO: 1026978 - DNA, 33 bp, Homo sapien
tctgctgtgtaacaaagtatctcagagctcaat

SEQ ID NO: 1026979 - DNA, 33 bp, Homo sapien
cctagcactgctgtaacaaatgccggcaaactg

SEQ ID NO: 1026980 - DNA, 33 bp, Homo sapien
cctagcactgctgtaataaatgccggcaaactg

SEQ ID NO: 1026981 - DNA, 33 bp, Homo sapien
tgagttggctgaggcccatgttagcagatgggg

SEQ ID NO: 1026982 - DNA, 33 bp, Homo sapien
tgagttggctgaggcctatgttagcagatgggg

SEQ ID NO: 1026983 - DNA, 33 bp, Homo sapien
atccagaaaaatcatcagaacaacatcttctcc

SEQ ID NO: 1026984 - DNA, 33 bp, Homo sapien
atccagaaaaatcatcggaacaacatcttctcc

SEQ ID NO: 1026985 - DNA, 33 bp, Homo sapien
aggggaagagtgtaaaagtaatattcttctgcg

SEQ ID NO: 1026986 - DNA, 33 bp, Homo sapien
aggggaagagtgtaaaggtaatattcttctgcg

SEQ ID NO: 1026987 - DNA, 33 bp, Homo sapien
acataggaacatgaccaacttagcaataaggga

SEQ ID NO: 1026988 - DNA, 33 bp, Homo sapien
acataggaacatgacctacttagcaataaggga

SEQ ID NO: 1026989 - DNA, 33 bp, Homo sapien
tcaccttctatggaaaaagcctgccacagcaag

SEQ ID NO: 1026990 - DNA, 33 bp, Homo sapien
tcaccttctatggaaacagcctgccacagcaag

SEQ ID NO: 1026991 - DNA, 33 bp, Homo sapien
ctcttcagtgctgaaacggtcagagagaaagcc

SEQ ID NO: 1026992 - DNA, 33 bp, Homo sapien
ctcttcagtgctgaaatggtcagagagaaagcc

SEQ ID NO: 1026993 - DNA, 33 bp, Homo sapien
attctaatcggtcccacgagctaactgtttgta

SEQ ID NO: 1026994 - DNA, 33 bp, Homo sapien
attctaatcggtcccatgagctaactgtttgta

SEQ ID NO: 1026995 - DNA, 33 bp, Homo sapien
caggccagttagggtggaatctcactctggtcc

SEQ ID NO: 1026996 - DNA, 33 bp, Homo sapien
caggccagttagggtgtaatctcactctggtcc

SEQ ID NO: 1026997 - DNA, 33 bp, Homo sapien
aatggtccctggttgaagataacatgcaacctt

SEQ ID NO: 1026998 - DNA, 33 bp, Homo sapien
aatggtccctggttgaggataacatgcaacctt

SEQ ID NO: 1026999 - DNA, 33 bp, Homo sapien
tatgtgatttcttttacggtcagaagaaaaaga

SEQ ID NO: 1027000 - DNA, 33 bp, Homo sapien
tatgtgatttcttttatggtcagaagaaaaaga

SEQ ID NO: 1027001 - DNA, 33 bp, Homo sapien
atgcttctgggcctgcagatcctctgttacacc

SEQ ID NO: 1027002 - DNA, 33 bp, Homo sapien
atgcttctgggcctgcggatcctctgttacacc

SEQ ID NO: 1027003 - DNA, 33 bp, Homo sapien
ggtctatgctaagtgcgatggatgtgaaaatga

SEQ ID NO: 1027004 - DNA, 33 bp, Homo sapien
ggtctatgctaagtgctatggatgtgaaaatga

SEQ ID NO: 1027005 - DNA, 33 bp, Homo sapien
cacacatcaaccactactacttctcacaaacca

SEQ ID NO: 1027006 - DNA, 33 bp, Homo sapien
cacacatcaaccactattacttctcacaaacca

SEQ ID NO: 1027007 - DNA, 33 bp, Homo sapien
ttcagtttttaaaaagccttccagatgaacagt

SEQ ID NO: 1027008 - DNA, 33 bp, Homo sapien
ttcagtttttaaaaaggcttccagatgaacagt

SEQ ID NO: 1027009 - DNA, 33 bp, Homo sapien
gatgaacagtgaggaaatggttctaatctgcat

SEQ ID NO: 1027010 - DNA, 33 bp, Homo sapien
gatgaacagtgaggaagtggttctaatctgcat

SEQ ID NO: 1027011 - DNA, 33 bp, Homo sapien
tctgattggctgaggaacagttctaacttgtcg

SEQ ID NO: 1027012 - DNA, 33 bp, Homo sapien
tctgattggctgaggatcagttctaacttgtcg

SEQ ID NO: 1027013 - DNA, 33 bp, Homo sapien
gtttacaccatagtataaagtcaagaccctaaa

SEQ ID NO: 1027014 - DNA, 33 bp, Homo sapien
gtttacaccatagtatgaagtcaagaccctaaa

SEQ ID NO: 1027015 - DNA, 33 bp, Homo sapien
gccaggtttcaaagaacgtcatgtgatacgggt

SEQ ID NO: 1027016 - DNA, 33 bp, Homo sapien
gccaggtttcaaagaatgtcatgtgatacgggt

SEQ ID NO: 1027017 - DNA, 33 bp, Homo sapien
atagccctgcaaactccccttagctagactggg

SEQ ID NO: 1027018 - DNA, 33 bp, Homo sapien
atagccctgcaaactctccttagctagactggg

SEQ ID NO: 1027019 - DNA, 33 bp, Homo sapien
tttcattgcctccttacgcaaaccaggtgcaca

SEQ ID NO: 1027020 - DNA, 33 bp, Homo sapien
tttcattgcctccttatgcaaaccaggtgcaca

SEQ ID NO: 1027021 - DNA, 33 bp, Homo sapien
gaaacctgatgcccacagatgaattagttcaga

SEQ ID NO: 1027022 - DNA, 33 bp, Homo sapien
gaaacctgatgcccacggatgaattagttcaga

SEQ ID NO: 1027023 - DNA, 33 bp, Homo sapien
caaaatgccctgagccaatgggtcctaaaggaa

SEQ ID NO: 1027024 - DNA, 33 bp, Homo sapien
caaaatgccctgagccgatgggtcctaaaggaa

SEQ ID NO: 1027025 - DNA, 33 bp, Homo sapien
cattcaaaagtgaagacggacaaaatcacgcca

SEQ ID NO: 1027026 - DNA, 33 bp, Homo sapien
cattcaaaagtgaagatggacaaaatcacgcca

SEQ ID NO: 1027027 - DNA, 33 bp, Homo sapien
agcacaacttgcccccactaggacgaatttctt

SEQ ID NO: 1027028 - DNA, 33 bp, Homo sapien
agcacaacttgcccccgctaggacgaatttctt

SEQ ID NO: 1027029 - DNA, 33 bp, Homo sapien
gtgagggttcattgaaatatgaagtatgtaaag

SEQ ID NO: 1027030 - DNA, 33 bp, Homo sapien
gtgagggttcattgaagtatgaagtatgtaaag

SEQ ID NO: 1027031 - DNA, 33 bp, Homo sapien
atcccacactagaaagcaggcctgtgaaaaagc

SEQ ID NO: 1027032 - DNA, 33 bp, Homo sapien
atcccacactagaaagtaggcctgtgaaaaagc

SEQ ID NO: 1027033 - DNA, 33 bp, Homo sapien
aaacatgtccgaccgactaatttttatgttgtg

SEQ ID NO: 1027034 - DNA, 33 bp, Homo sapien
aaacatgtccgaccgattaatttttatgttgtg

SEQ ID NO: 1027035 - DNA, 33 bp, Homo sapien
cctgggcaggcaaaaacagcagatgtccactca

SEQ ID NO: 1027036 - DNA, 33 bp, Homo sapien
cctgggcaggcaaaaatagcagatgtccactca

SEQ ID NO: 1027037 - DNA, 33 bp, Homo sapien
ctcattgcagattttcaccaggattcaggtgct

SEQ ID NO: 1027038 - DNA, 33 bp, Homo sapien
ctcattgcagattttcgccaggattcaggtgct

SEQ ID NO: 1027039 - DNA, 33 bp, Homo sapien
agtgtgcaaagaggaggaagttagcggtgcaaa

SEQ ID NO: 1027040 - DNA, 33 bp, Homo sapien
agtgtgcaaagaggagtaagttagcggtgcaaa

SEQ ID NO: 1027041 - DNA, 33 bp, Homo sapien
tccagtatgctcggtaacattcactccgtgagt

SEQ ID NO: 1027042 - DNA, 33 bp, Homo sapien
tccagtatgctcggtatcattcactccgtgagt

SEQ ID NO: 1027043 - DNA, 33 bp, Homo sapien
gtagacaggtctttccaaaagcatagtatacat

SEQ ID NO: 1027044 - DNA, 33 bp, Homo sapien
gtagacaggtctttcccaaagcatagtatacat

SEQ ID NO: 1027045 - DNA, 33 bp, Homo sapien
ccagtgaaaagaaataacaagatgaaatcagat

SEQ ID NO: 1027046 - DNA, 33 bp, Homo sapien
ccagtgaaaagaaataccaagatgaaatcagat

SEQ ID NO: 1027047 - DNA, 33 bp, Homo sapien
atcctagtgaatcaaaaaatcaatcttgttgat

SEQ ID NO: 1027048 - DNA, 33 bp, Homo sapien
atcctagtgaatcaaacaatcaatcttgttgat

SEQ ID NO: 1027049 - DNA, 33 bp, Homo sapien
ctgccctgcttatgtaagtgccatgtggccagg

SEQ ID NO: 1027050 - DNA, 33 bp, Homo sapien
ctgccctgcttatgtaggtgccatgtggccagg

SEQ ID NO: 1027051 - DNA, 33 bp, Homo sapien
agttggtgatgacggacatacatttcattgtat

SEQ ID NO: 1027052 - DNA, 33 bp, Homo sapien
agttggtgatgacggatatacatttcattgtat

SEQ ID NO: 1027053 - DNA, 33 bp, Homo sapien
gcatgagcaatgagagaatcagtggtgggacaa

SEQ ID NO: 1027054 - DNA, 33 bp, Homo sapien
gcatgagcaatgagaggatcagtggtgggacaa

SEQ ID NO: 1027055 - DNA, 33 bp, Homo sapien
ctgctttagtctattgccaaagctctctaatat

SEQ ID NO: 1027056 - DNA, 33 bp, Homo sapien
ctgctttagtctattgtcaaagctctctaatat

SEQ ID NO: 1027057 - DNA, 33 bp, Homo sapien
actggtattaaaaaccagccatcaaatcacatg

SEQ ID NO: 1027058 - DNA, 33 bp, Homo sapien
actggtattaaaaaccggccatcaaatcacatg

SEQ ID NO: 1027059 - DNA, 33 bp, Homo sapien
cagaaatgtcagtctccctttgagaaggctatc

SEQ ID NO: 1027060 - DNA, 33 bp, Homo sapien
cagaaatgtcagtctctctttgagaaggctatc

SEQ ID NO: 1027061 - DNA, 33 bp, Homo sapien
aataaacaccagtaaactcaagaaatgaaatag

SEQ ID NO: 1027062 - DNA, 33 bp, Homo sapien
aataaacaccagtaaagtcaagaaatgaaatag

SEQ ID NO: 1027063 - DNA, 33 bp, Homo sapien
cttattcaacacaacgaaagtgtaattcctgct

SEQ ID NO: 1027064 - DNA, 33 bp, Homo sapien
cttattcaacacaacggaagtgtaattcctgct

SEQ ID NO: 1027065 - DNA, 33 bp, Homo sapien
cacagttctttaaacactgttgaatgagcaggt

SEQ ID NO: 1027066 - DNA, 33 bp, Homo sapien
cacagttctttaaacattgttgaatgagcaggt

SEQ ID NO: 1027067 - DNA, 33 bp, Homo sapien
gagaacaagcaatcaggaagagaagaaaaaaca

SEQ ID NO: 1027068 - DNA, 33 bp, Homo sapien
gagaacaagcaatcagtaagagaagaaaaaaca

SEQ ID NO: 1027069 - DNA, 33 bp, Homo sapien
aggctaagagactgagcattcttattcaaaaga

SEQ ID NO: 1027070 - DNA, 33 bp, Homo sapien
aggctaagagactgaggattcttattcaaaaga

SEQ ID NO: 1027071 - DNA, 33 bp, Homo sapien
acccaccagacaccccaaaaacagttactagaa

SEQ ID NO: 1027072 - DNA, 33 bp, Homo sapien
acccaccagacaccccgaaaacagttactagaa

SEQ ID NO: 1027073 - DNA, 33 bp, Homo sapien
cttgattgggggctaaatggcggttgaaaggaa

SEQ ID NO: 1027074 - DNA, 33 bp, Homo sapien
cttgattgggggctaagtggcggttgaaaggaa

SEQ ID NO: 1027075 - DNA, 33 bp, Homo sapien; identical to SEQ ID NO: 1027073

SEQ ID NO: 1027076 - DNA, 33 bp, Homo sapien; identical to SEQ ID NO: 1027074

SEQ ID NO: 1027077 - DNA, 33 bp, Homo sapien
tttttctgcaattggaaaatgccaaaaatattc

SEQ ID NO: 1027078 - DNA, 33 bp, Homo sapien
tttttctgcaattggagaatgccaaaaatattc

SEQ ID NO: 1027079 - DNA, 33 bp, Homo sapien
cttgactttttaaacacgctcactgttctgttt

SEQ ID NO: 1027080 - DNA, 33 bp, Homo sapien
cttgactttttaaacatgctcactgttctgttt

SEQ ID NO: 1027081 - DNA, 33 bp, Homo sapien
agaaaaaatggattccacaaggaagtgggtgac

SEQ ID NO: 1027082 - DNA, 33 bp, Homo sapien
agaaaaaatggattccgcaaggaagtgggtgac

SEQ ID NO: 1027083 - DNA, 33 bp, Homo sapien
tgggttcatgaagatacgaagaattgaggcaac

SEQ ID NO: 1027084 - DNA, 33 bp, Homo sapien
tgggttcatgaagatatgaagaattgaggcaac

SEQ ID NO: 1027085 - DNA, 33 bp, Homo sapien
cagaatgtctctatagaacaccaattctgggtc

SEQ ID NO: 1027086 - DNA, 33 bp, Homo sapien
cagaatgtctctataggacaccaattctgggtc

SEQ ID NO: 1027087 - DNA, 33 bp, Homo sapien
ttttgacattttttaaaaagcatcctctgctta

SEQ ID NO: 1027088 - DNA, 33 bp, Homo sapien
ttttgacattttttaagaagcatcctctgctta

SEQ ID NO: 1027089 - DNA, 33 bp, Homo sapien
ttatggacaaccaatacataacagaaaacaaag

SEQ ID NO: 1027090 - DNA, 33 bp, Homo sapien
ttatggacaaccaatatataacagaaaacaaag

SEQ ID NO: 1027091 - DNA, 33 bp, Homo sapien
attatgccatcctacaatccgtccccaaactag

SEQ ID NO: 1027092 - DNA, 33 bp, Homo sapien
attatgccatcctacagtccgtccccaaactag

SEQ ID NO: 1027093 - DNA, 33 bp, Homo sapien
attactcattccagaactccctgctaggttggc

SEQ ID NO: 1027094 - DNA, 33 bp, Homo sapien
attactcattccagaattccctgctaggttggc

SEQ ID NO: 1027095 - DNA, 33 bp, Homo sapien
atggaaacgttgctgaatatgaatccttaatca

SEQ ID NO: 1027096 - DNA, 33 bp, Homo sapien
atggaaacgttgctgagtatgaatccttaatca

SEQ ID NO: 1027097 - DNA, 33 bp, Homo sapien
aggagagcgggccgagaagaagcagtgcggcgc

SEQ ID NO: 1027098 - DNA, 33 bp, Homo sapien
aggagagcgggccgaggagaagcagtgcggcgc

SEQ ID NO: 1027099 - DNA, 33 bp, Homo sapien
ttgactgccgttctcaaccacgtaatgtgccag

SEQ ID NO: 1027100 - DNA, 33 bp, Homo sapien
ttgactgccgttctcagccacgtaatgtgccag

SEQ ID NO: 1027101 - DNA, 33 bp, Homo sapien; identical to SEQ ID NO: 1027099

SEQ ID NO: 1027102 - DNA, 33 bp, Homo sapien; identical to SEQ ID NO: 1027100

SEQ ID NO: 1027103 - DNA, 33 bp, Homo sapien
gggcactggtctcagagaatttagataaagatg

SEQ ID NO: 1027104 - DNA, 33 bp, Homo sapien
gggcactggtctcagataatttagataaagatg

SEQ ID NO: 1027105 - DNA, 33 bp, Homo sapien
gtgaggtaggagtgcaatatgagctggtcaaag

SEQ ID NO: 1027106 - DNA, 33 bp, Homo sapien
gtgaggtaggagtgcagtatgagctggtcaaag

SEQ ID NO: 1027107 - DNA, 33 bp, Homo sapien
agcaggcaaagacactcacatttgcacaaagca

SEQ ID NO: 1027108 - DNA, 33 bp, Homo sapien
agcaggcaaagacactgacatttgcacaaagca

SEQ ID NO: 1027109 - DNA, 33 bp, Homo sapien
tgtgtctgagacctggaaaagatcagctactgc

SEQ ID NO: 1027110 - DNA, 33 bp, Homo sapien
tgtgtctgagacctgggaaagatcagctactgc

SEQ ID NO: 1027111 - DNA, 33 bp, Homo sapien
agtgtcttccattccacgttcttttggagtata

SEQ ID NO: 1027112 - DNA, 33 bp, Homo sapien
agtgtcttccattccatgttcttttggagtata

SEQ ID NO: 1027113 - DNA, 33 bp, Homo sapien
tttcagctataagacaatgggaaaagagagaca

SEQ ID NO: 1027114 - DNA, 33 bp, Homo sapien
tttcagctataagacactgggaaaagagagaca

SEQ ID NO: 1027115 - DNA, 33 bp, Homo sapien
agtagtgttaaaactccgagtaaggtacttcag

SEQ ID NO: 1027116 - DNA, 33 bp, Homo sapien
agtagtgttaaaactctgagtaaggtacttcag

SEQ ID NO: 1027117 - DNA, 33 bp, Homo sapien
tctcaaacttccgtagccccagatccaaatatt

SEQ ID NO: 1027118 - DNA, 33 bp, Homo sapien
tctcaaacttccgtagtcccagatccaaatatt

SEQ ID NO: 1027119 - DNA, 33 bp, Homo sapien
gcttcacaagataagactcctggatatgaatgg

SEQ ID NO: 1027120 - DNA, 33 bp, Homo sapien
gcttcacaagataagagtcctggatatgaatgg

SEQ ID NO: 1027121 - DNA, 33 bp, Homo sapien
gttgcttgataaccagaaattgggtgactaagt

SEQ ID NO: 1027122 - DNA, 33 bp, Homo sapien
gttgcttgataaccaggaattgggtgactaagt

SEQ ID NO: 1027123 - DNA, 33 bp, Homo sapien
atctagtaaagtcctcaagagacctagtgatga

SEQ ID NO: 1027124 - DNA, 33 bp, Homo sapien
atctagtaaagtcctcgagagacctagtgatga

SEQ ID NO: 1027125 - DNA, 33 bp, Homo sapien
aggtagcaaaccagggaagaaaagcatcttaaa

SEQ ID NO: 1027126 - DNA, 33 bp, Homo sapien
aggtagcaaaccaggggagaaaagcatcttaaa

SEQ ID NO: 1027127 - DNA, 33 bp, Homo sapien
ttgtcacttcgattacacatgttagaaatgatt

SEQ ID NO: 1027128 - DNA, 33 bp, Homo sapien
ttgtcacttcgattacccatgttagaaatgatt

SEQ ID NO: 1027129 - DNA, 33 bp, Homo sapien
caagcttgaggtagataataccaaaaaagaaat

SEQ ID NO: 1027130 - DNA, 33 bp, Homo sapien
caagcttgaggtagatgataccaaaaaagaaat

SEQ ID NO: 1027131 - DNA, 33 bp, Homo sapien
gcctagtactctctaacggcttgtgattttaaa

SEQ ID NO: 1027132 - DNA, 33 bp, Homo sapien
gcctagtactctctaatggcttgtgattttaaa

SEQ ID NO: 1027133 - DNA, 33 bp, Homo sapien
gaataatagaaagggaataaaagtgaccaggca

SEQ ID NO: 1027134 - DNA, 33 bp, Homo sapien
gaataatagaaagggagtaaaagtgaccaggca

SEQ ID NO: 1027135 - DNA, 33 bp, Homo sapien
aagtttaaggacttacactggagacaaaaaact

SEQ ID NO: 1027136 - DNA, 33 bp, Homo sapien
aagtttaaggacttacgctggagacaaaaaact

SEQ ID NO: 1027137 - DNA, 33 bp, Homo sapien
gttgagccacactgaacatgtttctagaaacga

SEQ ID NO: 1027138 - DNA, 33 bp, Homo sapien
gttgagccacactgaatatgtttctagaaacga

SEQ ID NO: 1027139 - DNA, 33 bp, Homo sapien
tcactgcactccatccaaaaatagccttgcgtt

SEQ ID NO: 1027140 - DNA, 33 bp, Homo sapien
tcactgcactccatccgaaaatagccttgcgtt

SEQ ID NO: 1027141 - DNA, 33 bp, Homo sapien
gcaaatgtaaaagaacagcaattataacaaact

SEQ ID NO: 1027142 - DNA, 33 bp, Homo sapien
gcaaatgtaaaagaacggcaattataacaaact

SEQ ID NO: 1027143 - DNA, 33 bp, Homo sapien
tatttagttcttcttcactgctaacaaagcact

SEQ ID NO: 1027144 - DNA, 33 bp, Homo sapien
tatttagttcttcttcgctgctaacaaagcact

SEQ ID NO: 1027145 - DNA, 33 bp, Homo sapien
cctagcaaaggatcccactaagccatccttcta

SEQ ID NO: 1027146 - DNA, 33 bp, Homo sapien
cctagcaaaggatcccgctaagccatccttcta

SEQ ID NO: 1027147 - DNA, 33 bp, Homo sapien
agcagttgcacagatacggtccctaaagtgaga

SEQ ID NO: 1027148 - DNA, 33 bp, Homo sapien
agcagttgcacagatatggtccctaaagtgaga

SEQ ID NO: 1027149 - DNA, 33 bp, Homo sapien
tccatctctgtgtttacgaactcttacctatgt

SEQ ID NO: 1027150 - DNA, 33 bp, Homo sapien
tccatctctgtgtttatgaactcttacctatgt

SEQ ID NO: 1027151 - DNA, 33 bp, Homo sapien
cccaaagctgatacgaacccctgtattgagcag

SEQ ID NO: 1027152 - DNA, 33 bp, Homo sapien
cccaaagctgatacgagcccctgtattgagcag

SEQ ID NO: 1027153 - DNA, 33 bp, Homo sapien
gttcaagcttggtatccctgataatgaggcaca

SEQ ID NO: 1027154 - DNA, 33 bp, Homo sapien
gttcaagcttggtatctctgataatgaggcaca

SEQ ID NO: 1027155 - DNA, 33 bp, Homo sapien
tttatagaatgtctgacgcgttgacttcctctg

SEQ ID NO: 1027156 - DNA, 33 bp, Homo sapien
tttatagaatgtctgatgcgttgacttcctctg

SEQ ID NO: 1027157 - DNA, 33 bp, Homo sapien
ttaccatgtcggaaaaaaggcattctcctgctg

SEQ ID NO: 1027158 - DNA, 33 bp, Homo sapien
ttaccatgtcggaaaacaggcattctcctgctg

SEQ ID NO: 1027159 - DNA, 33 bp, Homo sapien
tatttatggcagtgtacagtaaaactttaaaaa

SEQ ID NO: 1027160 - DNA, 33 bp, Homo sapien
tatttatggcagtgtatagtaaaactttaaaaa

SEQ ID NO: 1027161 - DNA, 33 bp, Homo sapien
tttttggtgtttctaccacctaccactatacat

SEQ ID NO: 1027162 - DNA, 33 bp, Homo sapien
tttttggtgtttctactacctaccactatacat

SEQ ID NO: 1027163 - DNA, 33 bp, Homo sapien
ccatctatttttgtacactgcccacaaattaag

SEQ ID NO: 1027164 - DNA, 33 bp, Homo sapien
ccatctatttttgtacgctgcccacaaattaag

SEQ ID NO: 1027165 - DNA, 33 bp, Homo sapien
ttgtagtctcatgtctaaagctcttccaagctg

SEQ ID NO: 1027166 - DNA, 33 bp, Homo sapien
ttgtagtctcatgtctgaagctcttccaagctg

SEQ ID NO: 1027167 - DNA, 33 bp, Homo sapien
cttctcattttacttaagccagtaatgaaatgg

SEQ ID NO: 1027168 - DNA, 33 bp, Homo sapien
cttctcattttacttaggccagtaatgaaatgg

SEQ ID NO: 1027169 - DNA, 33 bp, Homo sapien
gtgtgctactcatatgaagagacagaagcattt

SEQ ID NO: 1027170 - DNA, 33 bp, Homo sapien
gtgtgctactcatatggagagacagaagcattt

SEQ ID NO: 1027171 - DNA, 33 bp, Homo sapien
gcctagaatgaaaatgcaagacgggagtgcata

SEQ ID NO: 1027172 - DNA, 33 bp, Homo sapien
gcctagaatgaaaatggaagacgggagtgcata

SEQ ID NO: 1027173 - DNA, 33 bp, Homo sapien
tctgtaagcctgaagacgcaaacccctgacttc

SEQ ID NO: 1027174 - DNA, 33 bp, Homo sapien
tctgtaagcctgaagatgcaaacccctgacttc

SEQ ID NO: 1027175 - DNA, 33 bp, Homo sapien
tttccttccattttaacgtaggcagctgacctt

SEQ ID NO: 1027176 - DNA, 33 bp, Homo sapien
tttccttccattttaatgtaggcagctgacctt

SEQ ID NO: 1027177 - DNA, 33 bp, Homo sapien
tgtagttatgggttcacattctagctgtaccat

SEQ ID NO: 1027178 - DNA, 33 bp, Homo sapien
tgtagttatgggttcatattctagctgtaccat

SEQ ID NO: 1027179 - DNA, 33 bp, Homo sapien
agccaaacactgataccgaggtttgcagtgaaa

SEQ ID NO: 1027180 - DNA, 33 bp, Homo sapien
agccaaacactgatactgaggtttgcagtgaaa

SEQ ID NO: 1027181 - DNA, 33 bp, Homo sapien
catgcagacaaggacaacctattaatggaaagc

SEQ ID NO: 1027182 - DNA, 33 bp, Homo sapien
catgcagacaaggacatcctattaatggaaagc

SEQ ID NO: 1027183 - DNA, 33 bp, Homo sapien
aaaaggtgagaccaaagacacaaaggtgccttg

SEQ ID NO: 1027184 - DNA, 33 bp, Homo sapien
aaaaggtgagaccaaatacacaaaggtgccttg

SEQ ID NO: 1027185 - DNA, 33 bp, Homo sapien
acagtgaagtcatttccccttcaacacaataaa

SEQ ID NO: 1027186 - DNA, 33 bp, Homo sapien
acagtgaagtcatttctccttcaacacaataaa

SEQ ID NO: 1027187 - DNA, 33 bp, Homo sapien
aggtcccaggacaggcagcatcagtatcctctg

SEQ ID NO: 1027188 - DNA, 33 bp, Homo sapien
aggtcccaggacaggccgcatcagtatcctctg

SEQ ID NO: 1027189 - DNA, 33 bp, Homo sapien
accaggtgagaaagacaaggggcagcagttacg

SEQ ID NO: 1027190 - DNA, 33 bp, Homo sapien
accaggtgagaaagaccaggggcagcagttacg

SEQ ID NO: 1027191 - DNA, 33 bp, Homo sapien
cagcaagcaggagtacaggagcagggaaagcaa

SEQ ID NO: 1027192 - DNA, 33 bp, Homo sapien
cagcaagcaggagtacgggagcagggaaagcaa

SEQ ID NO: 1027193 - DNA, 33 bp, Homo sapien
ttgtggaatgaatcatcatagatatttactgag

SEQ ID NO: 1027194 - DNA, 33 bp, Homo sapien
ttgtggaatgaatcatgatagatatttactgag

SEQ ID NO: 1027195 - DNA, 33 bp, Homo sapien
tcagaaggtagaaggacgaccaaaaccgcacag

SEQ ID NO: 1027196 - DNA, 33 bp, Homo sapien
tcagaaggtagaaggatgaccaaaaccgcacag

SEQ ID NO: 1027197 - DNA, 33 bp, Homo sapien
tgttttaactgtaaaaagcaaatagatacttga

SEQ ID NO: 1027198 - DNA, 33 bp, Homo sapien
tgttttaactgtaaaaggcaaatagatacttga

SEQ ID NO: 1027199 - DNA, 33 bp, Homo sapien
aactcgatgatactgaccattactaagagctat

SEQ ID NO: 1027200 - DNA, 33 bp, Homo sapien
aactcgatgatactgagcattactaagagctat

SEQ ID NO: 1027201 - DNA, 33 bp, Homo sapien
tctgatttgatccaccaaacaactttctgacac

SEQ ID NO: 1027202 - DNA, 33 bp, Homo sapien
tctgatttgatccacccaacaactttctgacac

SEQ ID NO: 1027203 - DNA, 33 bp, Homo sapien
cgttcctgtaaaaataatataaggcggcactca

SEQ ID NO: 1027204 - DNA, 33 bp, Homo sapien
cgttcctgtaaaaatagtataaggcggcactca

SEQ ID NO: 1027205 - DNA, 33 bp, Homo sapien
agagtgatttgcgggcaagtaaaaaagaaaacc

SEQ ID NO: 1027206 - DNA, 33 bp, Homo sapien
agagtgatttgcgggccagtaaaaaagaaaacc

SEQ ID NO: 1027207 - DNA, 33 bp, Homo sapien
tcttggagacaggaacacaattgcttcttcagt

SEQ ID NO: 1027208 - DNA, 33 bp, Homo sapien
tcttggagacaggaacgcaattgcttcttcagt

SEQ ID NO: 1027209 - DNA, 33 bp, Homo sapien
aaaacaaaaacaaaaccataatcctgctcttcc

SEQ ID NO: 1027210 - DNA, 33 bp, Homo sapien
aaaacaaaaacaaaacgataatcctgctcttcc

SEQ ID NO: 1027211 - DNA, 33 bp, Homo sapien
acaggatctactctcacgtacttaaccgttctt

SEQ ID NO: 1027212 - DNA, 33 bp, Homo sapien
acaggatctactctcatgtacttaaccgttctt

SEQ ID NO: 1027213 - DNA, 33 bp, Homo sapien
cctctgcttaaccggaacggccgaacagcgcag

SEQ ID NO: 1027214 - DNA, 33 bp, Homo sapien
cctctgcttaaccggagcggccgaacagcgcag

SEQ ID NO: 1027215 - DNA, 33 bp, Homo sapien
gattctatcagattacccttgtattggctgaaa

SEQ ID NO: 1027216 - DNA, 33 bp, Homo sapien
gattctatcagattacgcttgtattggctgaaa

SEQ ID NO: 1027217 - DNA, 33 bp, Homo sapien
agagctgagctgtatacaaatgatggtgggtat

SEQ ID NO: 1027218 - DNA, 33 bp, Homo sapien
agagctgagctgtatataaatgatggtgggtat

SEQ ID NO: 1027219 - DNA, 33 bp, Homo sapien
ctgcttcatggcattaataaactctaaatacaa

SEQ ID NO: 1027220 - DNA, 33 bp, Homo sapien
ctgcttcatggcattagtaaactctaaatacaa

SEQ ID NO: 1027221 - DNA, 33 bp, Homo sapien
gaagtgctcttgaaacagaaagtaatttaaaca

SEQ ID NO: 1027222 - DNA, 33 bp, Homo sapien
gaagtgctcttgaaacggaaagtaatttaaaca

SEQ ID NO: 1027223 - DNA, 33 bp, Homo sapien
tcccaaacagaacagaaatgacatggaacgctt

SEQ ID NO: 1027224 - DNA, 33 bp, Homo sapien
tcccaaacagaacagacatgacatggaacgctt

SEQ ID NO: 1027225 - DNA, 33 bp, Homo sapien
tcccttcctctgctaaatcccatgagtcttaag

SEQ ID NO: 1027226 - DNA, 33 bp, Homo sapien
tcccttcctctgctaattcccatgagtcttaag

SEQ ID NO: 1027227 - DNA, 33 bp, Homo sapien
aaggtccacctcaaaaagctggaaaccaaaatg

SEQ ID NO: 1027228 - DNA, 33 bp, Homo sapien
aaggtccacctcaaaaggctggaaaccaaaatg

SEQ ID NO: 1027229 - DNA, 33 bp, Homo sapien
gtagactagacatagccaggaaaaatctgagta

SEQ ID NO: 1027230 - DNA, 33 bp, Homo sapien
gtagactagacatagcgaggaaaaatctgagta

SEQ ID NO: 1027231 - DNA, 33 bp, Homo sapien
attcaagagatgactactaggttctgcatcttg

SEQ ID NO: 1027232 - DNA, 33 bp, Homo sapien
attcaagagatgactattaggttctgcatcttg

SEQ ID NO: 1027233 - DNA, 33 bp, Homo sapien
tctgtttcactttaacagtattgctcaaaagat

SEQ ID NO: 1027234 - DNA, 33 bp, Homo sapien
tctgtttcactttaacggtattgctcaaaagat

SEQ ID NO: 1027235 - DNA, 33 bp, Homo sapien
agttgtctatcatcaacgaaaagtcaagagaga

SEQ ID NO: 1027236 - DNA, 33 bp, Homo sapien
agttgtctatcatcaatgaaaagtcaagagaga

SEQ ID NO: 1027237 - DNA, 33 bp, Homo sapien
gatttgggccacataacccttccattcttcacc

SEQ ID NO: 1027238 - DNA, 33 bp, Homo sapien
gatttgggccacataatccttccattcttcacc

SEQ ID NO: 1027239 - DNA, 33 bp, Homo sapien
cccagtggcactggagaaattagacacacacac

SEQ ID NO: 1027240 - DNA, 33 bp, Homo sapien
cccagtggcactggaggaattagacacacacac

SEQ ID NO: 1027241 - DNA, 33 bp, Homo sapien
tgggttagggtctctgaaacaaagctggtctct

SEQ ID NO: 1027242 - DNA, 33 bp, Homo sapien
tgggttagggtctctgcaacaaagctggtctct

SEQ ID NO: 1027243 - DNA, 33 bp, Homo sapien
gtttctcagtggcctacgatgagagagtttgtg

SEQ ID NO: 1027244 - DNA, 33 bp, Homo sapien
gtttctcagtggcctatgatgagagagtttgtg

SEQ ID NO: 1027245 - DNA, 33 bp, Homo sapien
gctttgccaggttctacacacatgtacataggc

SEQ ID NO: 1027246 - DNA, 33 bp, Homo sapien
gctttgccaggttctatacacatgtacataggc

SEQ ID NO: 1027247 - DNA, 33 bp, Homo sapien
ccagtaccatccagggaaaatctacccttgagg

SEQ ID NO: 1027248 - DNA, 33 bp, Homo sapien
ccagtaccatccagggcaaatctacccttgagg

SEQ ID NO: 1027249 - DNA, 33 bp, Homo sapien
ctaactggtaagttcaagatttgtttccatagt

SEQ ID NO: 1027250 - DNA, 33 bp, Homo sapien
ctaactggtaagttcacgatttgtttccatagt

SEQ ID NO: 1027251 - DNA, 33 bp, Homo sapien
ataaaaatgcacaccccaatgagaaaaattgaa

SEQ ID NO: 1027252 - DNA, 33 bp, Homo sapien
ataaaaatgcacaccctaatgagaaaaattgaa

SEQ ID NO: 1027253 - DNA, 33 bp, Homo sapien
tcttgtaccaaaaaaactgttcattgcttgcct

SEQ ID NO: 1027254 - DNA, 33 bp, Homo sapien
tcttgtaccaaaaaaattgttcattgcttgcct

SEQ ID NO: 1027255 - DNA, 33 bp, Homo sapien
caacaacagaagaaaacacgtgcacaaagttat

SEQ ID NO: 1027256 - DNA, 33 bp, Homo sapien
caacaacagaagaaaatacgtgcacaaagttat

SEQ ID NO: 1027257 - DNA, 33 bp, Homo sapien
cagttcactacataaaaatcaagaagagttttt

SEQ ID NO: 1027258 - DNA, 33 bp, Homo sapien
cagttcactacataaagatcaagaagagttttt

SEQ ID NO: 1027259 - DNA, 33 bp, Homo sapien
tgggcaatggggattaacgttcaatgggtatag

SEQ ID NO: 1027260 - DNA, 33 bp, Homo sapien
tgggcaatggggattagcgttcaatgggtatag

SEQ ID NO: 1027261 - DNA, 33 bp, Homo sapien
gatgaacaagactgaaatcttcgctcaagcagc

SEQ ID NO: 1027262 - DNA, 33 bp, Homo sapien
gatgaacaagactgaattcttcgctcaagcagc

SEQ ID NO: 1027263 - DNA, 33 bp, Homo sapien
ttcttcaatactccaggctattaattaggagga

SEQ ID NO: 1027264 - DNA, 33 bp, Homo sapien
ttcttcaatactccagtctattaattaggagga

SEQ ID NO: 1027265 - DNA, 33 bp, Homo sapien
aaaaaatttaaatggagtatgaggtcaagagat

SEQ ID NO: 1027266 - DNA, 33 bp, Homo sapien
aaaaaatttaaatggattatgaggtcaagagat

SEQ ID NO: 1027267 - DNA, 33 bp, Homo sapien
gttactttgctaccagaaatatatgatggttcc

SEQ ID NO: 1027268 - DNA, 33 bp, Homo sapien
gttactttgctaccaggaatatatgatggttcc

SEQ ID NO: 1027269 - DNA, 33 bp, Homo sapien
tttcaaggtttatgcccactttctcaaaaaaaa

SEQ ID NO: 1027270 - DNA, 33 bp, Homo sapien
tttcaaggtttatgcctactttctcaaaaaaaa

SEQ ID NO: 1027271 - DNA, 33 bp, Homo sapien
taaggtgtcagacaacccaggtcatgcctcagg

SEQ ID NO: 1027272 - DNA, 33 bp, Homo sapien
taaggtgtcagacaactcaggtcatgcctcagg

SEQ ID NO: 1027273 - DNA, 33 bp, Homo sapien
tgattaagagtacctacgtcgccttaggaagaa

SEQ ID NO: 1027274 - DNA, 33 bp, Homo sapien
tgattaagagtacctatgtcgccttaggaagaa

SEQ ID NO: 1027275 - DNA, 33 bp, Homo sapien
tgaaggagaaggatggaaactaggaagatgcct

SEQ ID NO: 1027276 - DNA, 33 bp, Homo sapien
tgaaggagaaggatggcaactaggaagatgcct

SEQ ID NO: 1027277 - DNA, 33 bp, Homo sapien
aatgatatcccccaacactgtatgcagtaaatg

SEQ ID NO: 1027278 - DNA, 33 bp, Homo sapien
aatgatatcccccaactctgtatgcagtaaatg

SEQ ID NO: 1027279 - DNA, 33 bp, Homo sapien
gactcccagtgatagaagtgagtagcttcatac

SEQ ID NO: 1027280 - DNA, 33 bp, Homo sapien
gactcccagtgatagaggtgagtagcttcatac

SEQ ID NO: 1027281 - DNA, 33 bp, Homo sapien
aagccaagatcaggaacgctccaagtcagagtg

SEQ ID NO: 1027282 - DNA, 33 bp, Homo sapien
aagccaagatcaggaatgctccaagtcagagtg

SEQ ID NO: 1027283 - DNA, 33 bp, Homo sapien
gctgaggtaaggaggacgggaagttagtcagca

SEQ ID NO: 1027284 - DNA, 33 bp, Homo sapien
gctgaggtaaggaggatgggaagttagtcagca

SEQ ID NO: 1027285 - DNA, 33 bp, Homo sapien
tccttagggtcttttacggctgcctaccccttg

SEQ ID NO: 1027286 - DNA, 33 bp, Homo sapien
tccttagggtcttttatggctgcctaccccttg

SEQ ID NO: 1027287 - DNA, 33 bp, Homo sapien
ctagttctagcattaaaggagtaaaaaacaaaa

SEQ ID NO: 1027288 - DNA, 33 bp, Homo sapien
ctagttctagcattaatggagtaaaaaacaaaa

SEQ ID NO: 1027289 - DNA, 33 bp, Homo sapien
tgtctagacgtgcacaaccaaccatatgctaag

SEQ ID NO: 1027290 - DNA, 33 bp, Homo sapien
tgtctagacgtgcacacccaaccatatgctaag

SEQ ID NO: 1027291 - DNA, 33 bp, Homo sapien
gttcctgctaagattacacgataacagtttttg

SEQ ID NO: 1027292 - DNA, 33 bp, Homo sapien
gttcctgctaagattatacgataacagtttttg

SEQ ID NO: 1027293 - DNA, 33 bp, Homo sapien
ttgcttttgtggactgaatttcccttttgagca

SEQ ID NO: 1027294 - DNA, 33 bp, Homo sapien
ttgcttttgtggactgcatttcccttttgagca

SEQ ID NO: 1027295 - DNA, 33 bp, Homo sapien
agctccttttgaatgacgcatagcaagccctaa

SEQ ID NO: 1027296 - DNA, 33 bp, Homo sapien
agctccttttgaatgatgcatagcaagccctaa

SEQ ID NO: 1027297 - DNA, 33 bp, Homo sapien
ctgaaaggaaccccaagatatgtgcattctatg

SEQ ID NO: 1027298 - DNA, 33 bp, Homo sapien
ctgaaaggaaccccaatatatgtgcattctatg

SEQ ID NO: 1027299 - DNA, 33 bp, Homo sapien
ccagagcataggcataagagcctgttttcaaac

SEQ ID NO: 1027300 - DNA, 33 bp, Homo sapien
ccagagcataggcataggagcctgttttcaaac

SEQ ID NO: 1027301 - DNA, 33 bp, Homo sapien
accaggaagaataagacgagatgactgccttag

SEQ ID NO: 1027302 - DNA, 33 bp, Homo sapien
accaggaagaataagatgagatgactgccttag

SEQ ID NO: 1027303 - DNA, 33 bp, Homo sapien
ttttccaaatacatgacagaggagacagccaac

SEQ ID NO: 1027304 - DNA, 33 bp, Homo sapien
ttttccaaatacatgagagaggagacagccaac

SEQ ID NO: 1027305 - DNA, 33 bp, Homo sapien
attgaaaacagagactcaaataaatagatgcac

SEQ ID NO: 1027306 - DNA, 33 bp, Homo sapien
attgaaaacagagactgaaataaatagatgcac

SEQ ID NO: 1027307 - DNA, 33 bp, Homo sapien
tttactctaccagtgagggaaaaatatgtttgc

SEQ ID NO: 1027308 - DNA, 33 bp, Homo sapien
tttactctaccagtgatggaaaaatatgtttgc

SEQ ID NO: 1027309 - DNA, 33 bp, Homo sapien
ttcttctgttctttaacgaaagtccactgagat

SEQ ID NO: 1027310 - DNA, 33 bp, Homo sapien
ttcttctgttctttaatgaaagtccactgagat

SEQ ID NO: 1027311 - DNA, 33 bp, Homo sapien
acctgcccctttcccacgtgctgtaggctttcc

SEQ ID NO: 1027312 - DNA, 33 bp, Homo sapien
acctgcccctttcccatgtgctgtaggctttcc

SEQ ID NO: 1027313 - DNA, 33 bp, Homo sapien
aaaatgcacagtgtaacatctggaaagacgtat

SEQ ID NO: 1027314 - DNA, 33 bp, Homo sapien
aaaatgcacagtgtaatatctggaaagacgtat

SEQ ID NO: 1027315 - DNA, 33 bp, Homo sapien
tccacttccctgcttaagtgattgttggaggca

SEQ ID NO: 1027316 - DNA, 33 bp, Homo sapien
tccacttccctgcttatgtgattgttggaggca

SEQ ID NO: 1027317 - DNA, 33 bp, Homo sapien
cagaagtgagcacagaaagatccttgaggagat

SEQ ID NO: 1027318 - DNA, 33 bp, Homo sapien
cagaagtgagcacagagagatccttgaggagat

SEQ ID NO: 1027319 - DNA, 33 bp, Homo sapien
ataaacgaaaattaaaagagagttcacggccta

SEQ ID NO: 1027320 - DNA, 33 bp, Homo sapien
ataaacgaaaattaaacgagagttcacggccta

SEQ ID NO: 1027321 - DNA, 33 bp, Homo sapien
cattttcatgaaacacaaagagctactgaatat

SEQ ID NO: 1027322 - DNA, 33 bp, Homo sapien
cattttcatgaaacacgaagagctactgaatat

SEQ ID NO: 1027323 - DNA, 33 bp, Homo sapien
gtttcccacttgataacgtgaccttcgtcgcct

SEQ ID NO: 1027324 - DNA, 33 bp, Homo sapien
gtttcccacttgataatgtgaccttcgtcgcct

SEQ ID NO: 1027325 - DNA, 33 bp, Homo sapien
tacaaaacaatatttccaccaaaggcaaagaac

SEQ ID NO: 1027326 - DNA, 33 bp, Homo sapien
tacaaaacaatatttctaccaaaggcaaagaac

SEQ ID NO: 1027327 - DNA, 33 bp, Homo sapien
ctccgccccttctttcaatcatctcgctgcagg

SEQ ID NO: 1027328 - DNA, 33 bp, Homo sapien
ctccgccccttctttcgatcatctcgctgcagg

SEQ ID NO: 1027329 - DNA, 33 bp, Homo sapien
catacgaaggccttccaatcttctgatgacatc

SEQ ID NO: 1027330 - DNA, 33 bp, Homo sapien
catacgaaggccttccgatcttctgatgacatc

SEQ ID NO: 1027331 - DNA, 33 bp, Homo sapien
caagggctcatttgccaggagagtgggaccttt

SEQ ID NO: 1027332 - DNA, 33 bp, Homo sapien
caagggctcatttgccgggagagtgggaccttt

SEQ ID NO: 1027333 - DNA, 33 bp, Homo sapien
cttactgggcttggaacgtctccgctggtcttt

SEQ ID NO: 1027334 - DNA, 33 bp, Homo sapien
cttactgggcttggaatgtctccgctggtcttt

SEQ ID NO: 1027335 - DNA, 33 bp, Homo sapien
ggaatcataaactaacccagacagatgcttgct

SEQ ID NO: 1027336 - DNA, 33 bp, Homo sapien
ggaatcataaactaactcagacagatgcttgct

SEQ ID NO: 1027337 - DNA, 33 bp, Homo sapien
aatagtcctttatatcagacccaacactgtgtg

SEQ ID NO: 1027338 - DNA, 33 bp, Homo sapien
aatagtcctttatatcggacccaacactgtgtg

SEQ ID NO: 1027339 - DNA, 33 bp, Homo sapien
ttttccagttacatcaacaaggaacctggggct

SEQ ID NO: 1027340 - DNA, 33 bp, Homo sapien
ttttccagttacatcagcaaggaacctggggct

SEQ ID NO: 1027341 - DNA, 33 bp, Homo sapien
ctgctcaaagttgaacagtggttgagaggtaga

SEQ ID NO: 1027342 - DNA, 33 bp, Homo sapien
ctgctcaaagttgaaccgtggttgagaggtaga

SEQ ID NO: 1027343 - DNA, 33 bp, Homo sapien
tccctgttgcaccatggagaaactgaagctcct

SEQ ID NO: 1027344 - DNA, 33 bp, Homo sapien
tccctgttgcaccatgtagaaactgaagctcct

SEQ ID NO: 1027345 - DNA, 33 bp, Homo sapien
aagtttctttttcttacacaagcagacatgata

SEQ ID NO: 1027346 - DNA, 33 bp, Homo sapien
aagtttctttttcttagacaagcagacatgata

SEQ ID NO: 1027347 - DNA, 33 bp, Homo sapien
ctgctgaaccccttacacctggcaaagacctca

SEQ ID NO: 1027348 - DNA, 33 bp, Homo sapien
ctgctgaaccccttacgcctggcaaagacctca

SEQ ID NO: 1027349 - DNA, 33 bp, Homo sapien
atttgatgagcctacaacagtacattatcatca

SEQ ID NO: 1027350 - DNA, 33 bp, Homo sapien
atttgatgagcctacatcagtacattatcatca

SEQ ID NO: 1027351 - DNA, 33 bp, Homo sapien
cactgtagtatcatacagagtgctgtcactgcc

SEQ ID NO: 1027352 - DNA, 33 bp, Homo sapien
cactgtagtatcatacggagtgctgtcactgcc

SEQ ID NO: 1027353 - DNA, 33 bp, Homo sapien
catgtgtatgcctaaaacagttactggaagggg

SEQ ID NO: 1027354 - DNA, 33 bp, Homo sapien
catgtgtatgcctaaagcagttactggaagggg

SEQ ID NO: 1027355 - DNA, 33 bp, Homo sapien
accatgtcaaggaaaaactgaattatatttcta

SEQ ID NO: 1027356 - DNA, 33 bp, Homo sapien
accatgtcaaggaaaacctgaattatatttcta

SEQ ID NO: 1027357 - DNA, 33 bp, Homo sapien
gtttccgttgtgtccacatgattcaaattatta

SEQ ID NO: 1027358 - DNA, 33 bp, Homo sapien
gtttccgttgtgtccatatgattcaaattatta

SEQ ID NO: 1027359 - DNA, 33 bp, Homo sapien
ttctaagagggtagaaatagatctgcccgttct

SEQ ID NO: 1027360 - DNA, 33 bp, Homo sapien
ttctaagagggtagaagtagatctgcccgttct

SEQ ID NO: 1027361 - DNA, 33 bp, Homo sapien
agcatcctagttagaacccacaaaataaatgtc

SEQ ID NO: 1027362 - DNA, 33 bp, Homo sapien
agcatcctagttagaagccacaaaataaatgtc

SEQ ID NO: 1027363 - DNA, 33 bp, Homo sapien
ccccctagagtgtgaaccagtaagtttaagtca

SEQ ID NO: 1027364 - DNA, 33 bp, Homo sapien
ccccctagagtgtgaatcagtaagtttaagtca

SEQ ID NO: 1027365 - DNA, 33 bp, Homo sapien
tgcccttgggccaagaaggagtgataagtgaat

SEQ ID NO: 1027366 - DNA, 33 bp, Homo sapien
tgcccttgggccaagagggagtgataagtgaat

SEQ ID NO: 1027367 - DNA, 33 bp, Homo sapien
agaagtcacaacaaggaatttttgtcatgagat

SEQ ID NO: 1027368 - DNA, 33 bp, Homo sapien
agaagtcacaacaagggatttttgtcatgagat

SEQ ID NO: 1027369 - DNA, 33 bp, Homo sapien
aggaaacagagctggagggatcactggtttgat

SEQ ID NO: 1027370 - DNA, 33 bp, Homo sapien
aggaaacagagctggatggatcactggtttgat

SEQ ID NO: 1027371 - DNA, 33 bp, Homo sapien
cagacccatgtgtgcccgaaagcaggagattta

SEQ ID NO: 1027372 - DNA, 33 bp, Homo sapien
cagacccatgtgtgcctgaaagcaggagattta

SEQ ID NO: 1027373 - DNA, 33 bp, Homo sapien
tgatgtcttacaaagcactcagctctggctctg

SEQ ID NO: 1027374 - DNA, 33 bp, Homo sapien
tgatgtcttacaaagcgctcagctctggctctg

SEQ ID NO: 1027375 - DNA, 33 bp, Homo sapien
gatactttccattttccatcaattagagatact

SEQ ID NO: 1027376 - DNA, 33 bp, Homo sapien
gatactttccattttctatcaattagagatact

SEQ ID NO: 1027377 - DNA, 33 bp, Homo sapien
gcatgactgggatccaatgaaacttaatttatg

SEQ ID NO: 1027378 - DNA, 33 bp, Homo sapien
gcatgactgggatccagtgaaacttaatttatg

SEQ ID NO: 1027379 - DNA, 33 bp, Homo sapien
gttacagaatacacgcagaaaccttggagtttc

SEQ ID NO: 1027380 - DNA, 33 bp, Homo sapien
gttacagaatacacgcggaaaccttggagtttc

SEQ ID NO: 1027381 - DNA, 33 bp, Homo sapien
ttataatcccccaacaatgtatgtgaggcctgt

SEQ ID NO: 1027382 - DNA, 33 bp, Homo sapien
ttataatcccccaacagtgtatgtgaggcctgt

SEQ ID NO: 1027383 - DNA, 33 bp, Homo sapien
aaaagtgtgatttgaacctttttgatctttgcc

SEQ ID NO: 1027384 - DNA, 33 bp, Homo sapien
aaaagtgtgatttgaagctttttgatctttgcc

SEQ ID NO: 1027385 - DNA, 33 bp, Homo sapien
aagtttgtctcaatcaaatgaagagaaactgca

SEQ ID NO: 1027386 - DNA, 33 bp, Homo sapien
aagtttgtctcaatcagatgaagagaaactgca

SEQ ID NO: 1027387 - DNA, 33 bp, Homo sapien
tctaagattaaaaaaccgtggctatattctctt

SEQ ID NO: 1027388 - DNA, 33 bp, Homo sapien
tctaagattaaaaaactgtggctatattctctt

SEQ ID NO: 1027389 - DNA, 33 bp, Homo sapien
catacactgacagatgcacccaagccaaaaaaa

SEQ ID NO: 1027390 - DNA, 33 bp, Homo sapien
catacactgacagatgtacccaagccaaaaaaa

SEQ ID NO: 1027391 - DNA, 33 bp, Homo sapien
gactgacaacatatgcggaaataaaatctgggg

SEQ ID NO: 1027392 - DNA, 33 bp, Homo sapien
gactgacaacatatgctgaaataaaatctgggg

SEQ ID NO: 1027393 - DNA, 33 bp, Homo sapien
tgggaaagaaagacggaattgaagtgggggaga

SEQ ID NO: 1027394 - DNA, 33 bp, Homo sapien
tgggaaagaaagacggtattgaagtgggggaga

SEQ ID NO: 1027395 - DNA, 33 bp, Homo sapien
gtcctaaatggaaatgaaagaactgaatccatt

SEQ ID NO: 1027396 - DNA, 33 bp, Homo sapien
gtcctaaatggaaatggaagaactgaatccatt

SEQ ID NO: 1027397 - DNA, 33 bp, Homo sapien
gtcttggccttggtaccagtgacatttgaggcc

SEQ ID NO: 1027398 - DNA, 33 bp, Homo sapien
gtcttggccttggtactagtgacatttgaggcc

SEQ ID NO: 1027399 - DNA, 33 bp, Homo sapien
aacacacatgtagtcgacaaaattagggtggcc

SEQ ID NO: 1027400 - DNA, 33 bp, Homo sapien
aacacacatgtagtcgtcaaaattagggtggcc

SEQ ID NO: 1027401 - DNA, 33 bp, Homo sapien
ctgcttttcacattcccgacgtcttctgctgtt

SEQ ID NO: 1027402 - DNA, 33 bp, Homo sapien
ctgcttttcacattcctgacgtcttctgctgtt

SEQ ID NO: 1027403 - DNA, 33 bp, Homo sapien
acagacaggcctaggcgccacaattgggtctga

SEQ ID NO: 1027404 - DNA, 33 bp, Homo sapien
acagacaggcctaggctccacaattgggtctga

SEQ ID NO: 1027405 - DNA, 33 bp, Homo sapien
ctagaactaaggaagaagcaaatataaaaaatg

SEQ ID NO: 1027406 - DNA, 33 bp, Homo sapien
ctagaactaaggaagacgcaaatataaaaaatg

SEQ ID NO: 1027407 - DNA, 33 bp, Homo sapien
cctatccagattataaattaaggcctctgatct

SEQ ID NO: 1027408 - DNA, 33 bp, Homo sapien
cctatccagattataagttaaggcctctgatct

SEQ ID NO: 1027409 - DNA, 33 bp, Homo sapien
ttttgtcaaagaaatacgcaaagctgtctcttg

SEQ ID NO: 1027410 - DNA, 33 bp, Homo sapien
ttttgtcaaagaaatatgcaaagctgtctcttg

SEQ ID NO: 1027411 - DNA, 33 bp, Homo sapien
ttccagagcgaaccaacgtatattcacatgtat

SEQ ID NO: 1027412 - DNA, 33 bp, Homo sapien
ttccagagcgaaccaatgtatattcacatgtat

SEQ ID NO: 1027413 - DNA, 33 bp, Homo sapien
atggtgtagtgagatacgagtcgcaataggagc

SEQ ID NO: 1027414 - DNA, 33 bp, Homo sapien
atggtgtagtgagatatgagtcgcaataggagc

SEQ ID NO: 1027415 - DNA, 33 bp, Homo sapien
tagtgttagagaagccaaaagaaagccaatggg

SEQ ID NO: 1027416 - DNA, 33 bp, Homo sapien
tagtgttagagaagccgaaagaaagccaatggg

SEQ ID NO: 1027417 - DNA, 33 bp, Homo sapien
tcaacaccgatagctaaggactgccacaaaatg

SEQ ID NO: 1027418 - DNA, 33 bp, Homo sapien
tcaacaccgatagctagggactgccacaaaatg

SEQ ID NO: 1027419 - DNA, 33 bp, Homo sapien
ctgctaaaccctggccaccttgatggagcagag

SEQ ID NO: 1027420 - DNA, 33 bp, Homo sapien
ctgctaaaccctggccgccttgatggagcagag

SEQ ID NO: 1027421 - DNA, 33 bp, Homo sapien
acactgagccataaaacgtcctcccactttgat

SEQ ID NO: 1027422 - DNA, 33 bp, Homo sapien
acactgagccataaaatgtcctcccactttgat

SEQ ID NO: 1027423 - DNA, 33 bp, Homo sapien
ctgcaagtgatcctggcatgtgcgcagatccat

SEQ ID NO: 1027424 - DNA, 33 bp, Homo sapien
ctgcaagtgatcctgggatgtgcgcagatccat

SEQ ID NO: 1027425 - DNA, 33 bp, Homo sapien
cactaaacagtccccccacaacttccacttctc

SEQ ID NO: 1027426 - DNA, 33 bp, Homo sapien
cactaaacagtccccctacaacttccacttctc

SEQ ID NO: 1027427 - DNA, 33 bp, Homo sapien
tgtgtctactccagaaatatatgttgaagtcct

SEQ ID NO: 1027428 - DNA, 33 bp, Homo sapien
tgtgtctactccagaagtatatgttgaagtcct

SEQ ID NO: 1027429 - DNA, 33 bp, Homo sapien
tagcacccccttcacactcagaagtaccctggt

SEQ ID NO: 1027430 - DNA, 33 bp, Homo sapien
tagcacccccttcacattcagaagtaccctggt

SEQ ID NO: 1027431 - DNA, 33 bp, Homo sapien
gccttttgggagttaacgatccctctgtactgt

SEQ ID NO: 1027432 - DNA, 33 bp, Homo sapien
gccttttgggagttaatgatccctctgtactgt

SEQ ID NO: 1027433 - DNA, 33 bp, Homo sapien
tccctgtgcaggcaccagatttaatttggatcc

SEQ ID NO: 1027434 - DNA, 33 bp, Homo sapien
tccctgtgcaggcaccggatttaatttggatcc

SEQ ID NO: 1027435 - DNA, 33 bp, Homo sapien
actttgaagatccaacagtaggtgtaaccttca

SEQ ID NO: 1027436 - DNA, 33 bp, Homo sapien
actttgaagatccaacggtaggtgtaaccttca

SEQ ID NO: 1027437 - DNA, 33 bp, Homo sapien
aacattcatggtcatacaacatcctcagttctc

SEQ ID NO: 1027438 - DNA, 33 bp, Homo sapien
aacattcatggtcatataacatcctcagttctc

SEQ ID NO: 1027439 - DNA, 33 bp, Homo sapien
ctggcaatccctcatcaaagttttagcagtgca

SEQ ID NO: 1027440 - DNA, 33 bp, Homo sapien
ctggcaatccctcatcgaagttttagcagtgca

SEQ ID NO: 1027441 - DNA, 33 bp, Homo sapien
ctcagatcttttcataacctatacaattgctac

SEQ ID NO: 1027442 - DNA, 33 bp, Homo sapien
ctcagatcttttcatatcctatacaattgctac

SEQ ID NO: 1027443 - DNA, 33 bp, Homo sapien
ggagcagctgcaagggaacttggttgtcataaa

SEQ ID NO: 1027444 - DNA, 33 bp, Homo sapien
ggagcagctgcaaggggacttggttgtcataaa

SEQ ID NO: 1027445 - DNA, 33 bp, Homo sapien
cttccatgtatccttacggagagataaaaaaaa

SEQ ID NO: 1027446 - DNA, 33 bp, Homo sapien
cttccatgtatccttatggagagataaaaaaaa

SEQ ID NO: 1027447 - DNA, 33 bp, Homo sapien
cagtgaaaaagcctgacgaacattacctcagtg

SEQ ID NO: 1027448 - DNA, 33 bp, Homo sapien
cagtgaaaaagcctgatgaacattacctcagtg

SEQ ID NO: 1027449 - DNA, 33 bp, Homo sapien
ttatgaaaccgatgccagaactaaagacatttt

SEQ ID NO: 1027450 - DNA, 33 bp, Homo sapien
ttatgaaaccgatgccggaactaaagacatttt

SEQ ID NO: 1027451 - DNA, 33 bp, Homo sapien
ctgccttttggttctacctgagccctcaatgga

SEQ ID NO: 1027452 - DNA, 33 bp, Homo sapien
ctgccttttggttctatctgagccctcaatgga

SEQ ID NO: 1027453 - DNA, 33 bp, Homo sapien
attttcatgaatgtaacagaccagtagttctta

SEQ ID NO: 1027454 - DNA, 33 bp, Homo sapien
attttcatgaatgtaatagaccagtagttctta

SEQ ID NO: 1027455 - DNA, 33 bp, Homo sapien
aacctctgcttgagtcacttaaatcattttctt

SEQ ID NO: 1027456 - DNA, 33 bp, Homo sapien
aacctctgcttgagtctcttaaatcattttctt

SEQ ID NO: 1027457 - DNA, 33 bp, Homo sapien
ttgagcaatggaataaacccttgatctgggaca

SEQ ID NO: 1027458 - DNA, 33 bp, Homo sapien
ttgagcaatggaataagcccttgatctgggaca

SEQ ID NO: 1027459 - DNA, 33 bp, Homo sapien
ctagcagacccatggaaaaaggcaaagccacat

SEQ ID NO: 1027460 - DNA, 33 bp, Homo sapien
ctagcagacccatggacaaaggcaaagccacat

SEQ ID NO: 1027461 - DNA, 33 bp, Homo sapien
ggatggtggagacagtgacataagatcatctat

SEQ ID NO: 1027462 - DNA, 33 bp, Homo sapien
ggatggtggagacagttacataagatcatctat

SEQ ID NO: 1027463 - DNA, 33 bp, Homo sapien
aggaatgactggaatccaggagtcttcaggtgg

SEQ ID NO: 1027464 - DNA, 33 bp, Homo sapien
aggaatgactggaatctaggagtcttcaggtgg

SEQ ID NO: 1027465 - DNA, 33 bp, Homo sapien
agctgtaaaatgggaacctctaacccatagcca

SEQ ID NO: 1027466 - DNA, 33 bp, Homo sapien
agctgtaaaatgggaatctctaacccatagcca

SEQ ID NO: 1027467 - DNA, 33 bp, Homo sapien
cgtccccaggcagccccaagtctccaaaaaaga

SEQ ID NO: 1027468 - DNA, 33 bp, Homo sapien
cgtccccaggcagccctaagtctccaaaaaaga

SEQ ID NO: 1027469 - DNA, 33 bp, Homo sapien
acaacactagccaatcacacagaaaactaaaca

SEQ ID NO: 1027470 - DNA, 33 bp, Homo sapien
acaacactagccaatcgcacagaaaactaaaca

SEQ ID NO: 1027471 - DNA, 33 bp, Homo sapien
aacaaaaccttccaaactcataagatcacaagc

SEQ ID NO: 1027472 - DNA, 33 bp, Homo sapien
aacaaaaccttccaaattcataagatcacaagc

SEQ ID NO: 1027473 - DNA, 33 bp, Homo sapien
caccaagacctcaaaagaccttccttcactgcc

SEQ ID NO: 1027474 - DNA, 33 bp, Homo sapien
caccaagacctcaaaataccttccttcactgcc

SEQ ID NO: 1027475 - DNA, 33 bp, Homo sapien
cgcatatataattcagaagtagcgaggtatgag

SEQ ID NO: 1027476 - DNA, 33 bp, Homo sapien
cgcatatataattcaggagtagcgaggtatgag

SEQ ID NO: 1027477 - DNA, 33 bp, Homo sapien
tatccctgagccaatacatggaaatactgtagt

SEQ ID NO: 1027478 - DNA, 33 bp, Homo sapien
tatccctgagccaatatatggaaatactgtagt

SEQ ID NO: 1027479 - DNA, 33 bp, Homo sapien
cagccccacacgactcacttatttgaatatccc

SEQ ID NO: 1027480 - DNA, 33 bp, Homo sapien
cagccccacacgactcgcttatttgaatatccc

SEQ ID NO: 1027481 - DNA, 33 bp, Homo sapien
ttaagaacccacatacaattcggcctgatagcc

SEQ ID NO: 1027482 - DNA, 33 bp, Homo sapien
ttaagaacccacatacgattcggcctgatagcc

SEQ ID NO: 1027483 - DNA, 33 bp, Homo sapien
atttgagataataagacagacttgagttgtaaa

SEQ ID NO: 1027484 - DNA, 33 bp, Homo sapien
atttgagataataagatagacttgagttgtaaa

SEQ ID NO: 1027485 - DNA, 33 bp, Homo sapien
cctgcattgtcgttcaactcctccctctgcccc

SEQ ID NO: 1027486 - DNA, 33 bp, Homo sapien
cctgcattgtcgttcagctcctccctctgcccc

SEQ ID NO: 1027487 - DNA, 33 bp, Homo sapien
ttcgtagatgaagtaaaagaaacattactattg

SEQ ID NO: 1027488 - DNA, 33 bp, Homo sapien
ttcgtagatgaagtaagagaaacattactattg

SEQ ID NO: 1027489 - DNA, 33 bp, Homo sapien
aactgcaatatgaagacgatttctttaaaacta

SEQ ID NO: 1027490 - DNA, 33 bp, Homo sapien
aactgcaatatgaagatgatttctttaaaacta

SEQ ID NO: 1027491 - DNA, 33 bp, Homo sapien
gaacctaagatgtcaaggcttaatgttgtgttt

SEQ ID NO: 1027492 - DNA, 33 bp, Homo sapien
gaacctaagatgtcaatgcttaatgttgtgttt

SEQ ID NO: 1027493 - DNA, 33 bp, Homo sapien
agaatgtcagtatatacggttgaaggaacttgt

SEQ ID NO: 1027494 - DNA, 33 bp, Homo sapien
agaatgtcagtatatatggttgaaggaacttgt

SEQ ID NO: 1027495 - DNA, 33 bp, Homo sapien
ggaacctgcagatgtgaagggcaaattgtacta

SEQ ID NO: 1027496 - DNA, 33 bp, Homo sapien
ggaacctgcagatgtggagggcaaattgtacta

SEQ ID NO: 1027497 - DNA, 33 bp, Homo sapien
tgtcatgagaatttgaaataaaaggaaaggaat

SEQ ID NO: 1027498 - DNA, 33 bp, Homo sapien
tgtcatgagaatttgagataaaaggaaaggaat

SEQ ID NO: 1027499 - DNA, 33 bp, Homo sapien
atatgaaactttccaaaacttagacattgagag

SEQ ID NO: 1027500 - DNA, 33 bp, Homo sapien
atatgaaactttccaacacttagacattgagag

SEQ ID NO: 1027501 - DNA, 33 bp, Homo sapien
aacaaaattcatactaaccaactatgtgctcat

SEQ ID NO: 1027502 - DNA, 33 bp, Homo sapien
aacaaaattcatactacccaactatgtgctcat

SEQ ID NO: 1027503 - DNA, 33 bp, Homo sapien
gagagaacagttcagaagctactgcagggtcca

SEQ ID NO: 1027504 - DNA, 33 bp, Homo sapien
gagagaacagttcagaggctactgcagggtcca

SEQ ID NO: 1027505 - DNA, 33 bp, Homo sapien
cagttagcagtacaaccatatttctaccaagag

SEQ ID NO: 1027506 - DNA, 33 bp, Homo sapien
cagttagcagtacaacgatatttctaccaagag

SEQ ID NO: 1027507 - DNA, 33 bp, Homo sapien
tttatgagatgacaaaagtgcaagaatattcat

SEQ ID NO: 1027508 - DNA, 33 bp, Homo sapien
tttatgagatgacaaatgtgcaagaatattcat

SEQ ID NO: 1027509 - DNA, 33 bp, Homo sapien
aagactgatttgaaaaagacaggtggaaatgaa

SEQ ID NO: 1027510 - DNA, 33 bp, Homo sapien
aagactgatttgaaaaggacaggtggaaatgaa

SEQ ID NO: 1027511 - DNA, 33 bp, Homo sapien
agcaagttacaactcacgacaaggctctgaagt

SEQ ID NO: 1027512 - DNA, 33 bp, Homo sapien
agcaagttacaactcaggacaaggctctgaagt

SEQ ID NO: 1027513 - DNA, 33 bp, Homo sapien
ttggattcaggatgccaatttcaacactacaca

SEQ ID NO: 1027514 - DNA, 33 bp, Homo sapien
ttggattcaggatgccgatttcaacactacaca

SEQ ID NO: 1027515 - DNA, 33 bp, Homo sapien
tatctagctgggagaacggtgaaccggcaaaca

SEQ ID NO: 1027516 - DNA, 33 bp, Homo sapien
tatctagctgggagaatggtgaaccggcaaaca

SEQ ID NO: 1027517 - DNA, 33 bp, Homo sapien
tagatatgagacacaaccatttgaagttccttt

SEQ ID NO: 1027518 - DNA, 33 bp, Homo sapien
tagatatgagacacaatcatttgaagttccttt

SEQ ID NO: 1027519 - DNA, 33 bp, Homo sapien
gagatcccttatgaaggcacttttcctttcaac

SEQ ID NO: 1027520 - DNA, 33 bp, Homo sapien
gagatcccttatgaagtcacttttcctttcaac

SEQ ID NO: 1027521 - DNA, 33 bp, Homo sapien
atggagtaacttcaagacaactacatcctaaga

SEQ ID NO: 1027522 - DNA, 33 bp, Homo sapien
atggagtaacttcaaggcaactacatcctaaga

SEQ ID NO: 1027523 - DNA, 33 bp, Homo sapien
caggaaaatctgatcaaccctttagtcttcagt

SEQ ID NO: 1027524 - DNA, 33 bp, Homo sapien
caggaaaatctgatcatccctttagtcttcagt

SEQ ID NO: 1027525 - DNA, 33 bp, Homo sapien
tgactttccatattctaaagatgattcacccat

SEQ ID NO: 1027526 - DNA, 33 bp, Homo sapien
tgactttccatattctgaagatgattcacccat

SEQ ID NO: 1027527 - DNA, 33 bp, Homo sapien
gtgctttgtaacactacatatttcaagaggaaa

SEQ ID NO: 1027528 - DNA, 33 bp, Homo sapien
gtgctttgtaacactatatatttcaagaggaaa

SEQ ID NO: 1027529 - DNA, 33 bp, Homo sapien
aggcattggccaaaaactgcaaaaaatgaggtg

SEQ ID NO: 1027530 - DNA, 33 bp, Homo sapien
aggcattggccaaaaattgcaaaaaatgaggtg

SEQ ID NO: 1027531 - DNA, 33 bp, Homo sapien
gaggctcatactatcccctccaattagctgctc

SEQ ID NO: 1027532 - DNA, 33 bp, Homo sapien
gaggctcatactatcctctccaattagctgctc

SEQ ID NO: 1027533 - DNA, 33 bp, Homo sapien
tcccatgaatgacagcacatttctggtgactta

SEQ ID NO: 1027534 - DNA, 33 bp, Homo sapien
tcccatgaatgacagcgcatttctggtgactta

SEQ ID NO: 1027535 - DNA, 33 bp, Homo sapien
ggaatgcaggagtgtcaagaagctggaaaaggc

SEQ ID NO: 1027536 - DNA, 33 bp, Homo sapien
ggaatgcaggagtgtcgagaagctggaaaaggc

SEQ ID NO: 1027537 - DNA, 33 bp, Homo sapien
gacgcacaggctgtcacggaaaaggtgccttcc

SEQ ID NO: 1027538 - DNA, 33 bp, Homo sapien
gacgcacaggctgtcatggaaaaggtgccttcc

SEQ ID NO: 1027539 - DNA, 33 bp, Homo sapien
gcaaagaaaagaaaaacgaagccaatgtgaaca

SEQ ID NO: 1027540 - DNA, 33 bp, Homo sapien
gcaaagaaaagaaaaatgaagccaatgtgaaca

SEQ ID NO: 1027541 - DNA, 33 bp, Homo sapien
cttttggtaaaatacaccactactcctacctct

SEQ ID NO: 1027542 - DNA, 33 bp, Homo sapien
cttttggtaaaatacagcactactcctacctct

SEQ ID NO: 1027543 - DNA, 33 bp, Homo sapien
acagggattcctggacagccatctactctctac

SEQ ID NO: 1027544 - DNA, 33 bp, Homo sapien
acagggattcctggacggccatctactctctac

SEQ ID NO: 1027545 - DNA, 33 bp, Homo sapien
gctgtgttagtttagacactgcctaagtaggtt

SEQ ID NO: 1027546 - DNA, 33 bp, Homo sapien
gctgtgttagtttagatactgcctaagtaggtt

SEQ ID NO: 1027547 - DNA, 33 bp, Homo sapien
gaaacaggaaaaagcaatagctacgatttagta

SEQ ID NO: 1027548 - DNA, 33 bp, Homo sapien
gaaacaggaaaaagcagtagctacgatttagta

SEQ ID NO: 1027549 - DNA, 33 bp, Homo sapien
atgaataaaaatgttcacgaattaagtgagaga

SEQ ID NO: 1027550 - DNA, 33 bp, Homo sapien
atgaataaaaatgttcgcgaattaagtgagaga

SEQ ID NO: 1027551 - DNA, 33 bp, Homo sapien
gactgctttaggtaaacgattttagtgattaca

SEQ ID NO: 1027552 - DNA, 33 bp, Homo sapien
gactgctttaggtaaatgattttagtgattaca

SEQ ID NO: 1027553 - DNA, 33 bp, Homo sapien
tttctccctctcaatacggctagattaaatcat

SEQ ID NO: 1027554 - DNA, 33 bp, Homo sapien
tttctccctctcaatatggctagattaaatcat

SEQ ID NO: 1027555 - DNA, 33 bp, Homo sapien
aattgggatttgagcaagatgaaatttctaccc

SEQ ID NO: 1027556 - DNA, 33 bp, Homo sapien
aattgggatttgagcaggatgaaatttctaccc

SEQ ID NO: 1027557 - DNA, 33 bp, Homo sapien
aagatataacgtagaacaattgatttgagcttt

SEQ ID NO: 1027558 - DNA, 33 bp, Homo sapien
aagatataacgtagaataattgatttgagcttt

SEQ ID NO: 1027559 - DNA, 33 bp, Homo sapien
atagtatctgaagctgaattatttgggctcaat

SEQ ID NO: 1027560 - DNA, 33 bp, Homo sapien
atagtatctgaagctggattatttgggctcaat

SEQ ID NO: 1027561 - DNA, 33 bp, Homo sapien
cattctaaaaatgttaactatcatcatatacag

SEQ ID NO: 1027562 - DNA, 33 bp, Homo sapien
cattctaaaaatgttatctatcatcatatacag

SEQ ID NO: 1027563 - DNA, 33 bp, Homo sapien
actttccaggtgtgaactgaaaaataccacaca

SEQ ID NO: 1027564 - DNA, 33 bp, Homo sapien
actttccaggtgtgaattgaaaaataccacaca

SEQ ID NO: 1027565 - DNA, 33 bp, Homo sapien
gcaagtaggttcagtacacgacttttcctgggg

SEQ ID NO: 1027566 - DNA, 33 bp, Homo sapien
gcaagtaggttcagtatacgacttttcctgggg

SEQ ID NO: 1027567 - DNA, 33 bp, Homo sapien
tatacactggatttctcaatttaaactgacccc

SEQ ID NO: 1027568 - DNA, 33 bp, Homo sapien
tatacactggatttctgaatttaaactgacccc

SEQ ID NO: 1027569 - DNA, 33 bp, Homo sapien
cagagatgcaggcccccatctgaggctttccct

SEQ ID NO: 1027570 - DNA, 33 bp, Homo sapien
cagagatgcaggccccgatctgaggctttccct

SEQ ID NO: 1027571 - DNA, 33 bp, Homo sapien
aagacacgtattcatacaaaaacttgtaaatga

SEQ ID NO: 1027572 - DNA, 33 bp, Homo sapien
aagacacgtattcatataaaaacttgtaaatga

SEQ ID NO: 1027573 - DNA, 33 bp, Homo sapien
ttaatatatccacaaaattgtacagccatcacc

SEQ ID NO: 1027574 - DNA, 33 bp, Homo sapien
ttaatatatccacaaagttgtacagccatcacc

SEQ ID NO: 1027575 - DNA, 33 bp, Homo sapien
tttttacatccccctaatacagtatctgacacg

SEQ ID NO: 1027576 - DNA, 33 bp, Homo sapien
tttttacatccccctagtacagtatctgacacg

SEQ ID NO: 1027577 - DNA, 33 bp, Homo sapien
agagggaaaattgacacagaaaatcatatttct

SEQ ID NO: 1027578 - DNA, 33 bp, Homo sapien
agagggaaaattgacatagaaaatcatatttct

SEQ ID NO: 1027579 - DNA, 33 bp, Homo sapien
taagataatctaggctaaaacattcagactcta

SEQ ID NO: 1027580 - DNA, 33 bp, Homo sapien
taagataatctaggcttaaacattcagactcta

SEQ ID NO: 1027581 - DNA, 33 bp, Homo sapien
atatttctgcttcataggcttcttaacttactg

SEQ ID NO: 1027582 - DNA, 33 bp, Homo sapien
atatttctgcttcatatgcttcttaacttactg

SEQ ID NO: 1027583 - DNA, 33 bp, Homo sapien
acaattgactaaggcaccaagtactaggcagag

SEQ ID NO: 1027584 - DNA, 33 bp, Homo sapien
acaattgactaaggcatcaagtactaggcagag

SEQ ID NO: 1027585 - DNA, 33 bp, Homo sapien
attctgtcaaaaaaaaatctgggccaaataata

SEQ ID NO: 1027586 - DNA, 33 bp, Homo sapien
attctgtcaaaaaaaattctgggccaaataata

SEQ ID NO: 1027587 - DNA, 33 bp, Homo sapien
gatgaaaaaatgcatgaacactgaacactttgc

SEQ ID NO: 1027588 - DNA, 33 bp, Homo sapien
gatgaaaaaatgcatggacactgaacactttgc

SEQ ID NO: 1027589 - DNA, 33 bp, Homo sapien
atttgcagtacattaacgcattgtgtgtgtgtg

SEQ ID NO: 1027590 - DNA, 33 bp, Homo sapien
atttgcagtacattaaggcattgtgtgtgtgtg

SEQ ID NO: 1027591 - DNA, 33 bp, Homo sapien
agtatgaggcaaagggaatcatcatttgtatta

SEQ ID NO: 1027592 - DNA, 33 bp, Homo sapien
agtatgaggcaaaggggatcatcatttgtatta

SEQ ID NO: 1027593 - DNA, 33 bp, Homo sapien
tgaggctcagatgaaacgactgctctcttaaaa

SEQ ID NO: 1027594 - DNA, 33 bp, Homo sapien
tgaggctcagatgaaatgactgctctcttaaaa

SEQ ID NO: 1027595 - DNA, 33 bp, Homo sapien
tgtggaagcctcccaaagtcctttactggctag

SEQ ID NO: 1027596 - DNA, 33 bp, Homo sapien
tgtggaagcctcccaaggtcctttactggctag

SEQ ID NO: 1027597 - DNA, 33 bp, Homo sapien
ttgtttaagtccaaaacccagcactatgttgat

SEQ ID NO: 1027598 - DNA, 33 bp, Homo sapien
ttgtttaagtccaaaagccagcactatgttgat

SEQ ID NO: 1027599 - DNA, 33 bp, Homo sapien
gctcagggctctgttcgcataatgaaccttatg

SEQ ID NO: 1027600 - DNA, 33 bp, Homo sapien
gctcagggctctgttctcataatgaaccttatg

SEQ ID NO: 1027601 - DNA, 33 bp, Homo sapien
aaatcatgtgcgtcaacttcatctcctaagtca

SEQ ID NO: 1027602 - DNA, 33 bp, Homo sapien
aaatcatgtgcgtcaatttcatctcctaagtca

SEQ ID NO: 1027603 - DNA, 33 bp, Homo sapien
ggtttctttctgtccactcccttccactgtgaa

SEQ ID NO: 1027604 - DNA, 33 bp, Homo sapien
ggtttctttctgtccagtcccttccactgtgaa

SEQ ID NO: 1027605 - DNA, 33 bp, Homo sapien
tctacaagtttcaaataatcaaagtattgcaaa

SEQ ID NO: 1027606 - DNA, 33 bp, Homo sapien
tctacaagtttcaaatgatcaaagtattgcaaa

SEQ ID NO: 1027607 - DNA, 33 bp, Homo sapien
aattggttgagaagacactaaattggaaagaat

SEQ ID NO: 1027608 - DNA, 33 bp, Homo sapien
aattggttgagaagactctaaattggaaagaat

SEQ ID NO: 1027609 - DNA, 33 bp, Homo sapien
atatcccatttctgaaaagccatgttgcctgtt

SEQ ID NO: 1027610 - DNA, 33 bp, Homo sapien
atatcccatttctgaagagccatgttgcctgtt

SEQ ID NO: 1027611 - DNA, 33 bp, Homo sapien
ttacatggactaaaaacagattcacggatgtgg

SEQ ID NO: 1027612 - DNA, 33 bp, Homo sapien
ttacatggactaaaaatagattcacggatgtgg

SEQ ID NO: 1027613 - DNA, 33 bp, Homo sapien
gcgcagtctcgtggcccgaacttcagagaagct

SEQ ID NO: 1027614 - DNA, 33 bp, Homo sapien
gcgcagtctcgtggcctgaacttcagagaagct

SEQ ID NO: 1027615 - DNA, 33 bp, Homo sapien
gctggattaggcaagaatccgggctgtgctgca

SEQ ID NO: 1027616 - DNA, 33 bp, Homo sapien
gctggattaggcaagattccgggctgtgctgca

SEQ ID NO: 1027617 - DNA, 33 bp, Homo sapien
ggagattggtaactaccaggcactcacaggctg

SEQ ID NO: 1027618 - DNA, 33 bp, Homo sapien
ggagattggtaactactaggcactcacaggctg

SEQ ID NO: 1027619 - DNA, 33 bp, Homo sapien
tgaatacatttcattggaagattgaaaatattc

SEQ ID NO: 1027620 - DNA, 33 bp, Homo sapien
tgaatacatttcattgtaagattgaaaatattc

SEQ ID NO: 1027621 - DNA, 33 bp, Homo sapien
ctgaattgcacaaggaacttccatttcagtgca

SEQ ID NO: 1027622 - DNA, 33 bp, Homo sapien
ctgaattgcacaaggagcttccatttcagtgca

SEQ ID NO: 1027623 - DNA, 33 bp, Homo sapien
accatgtgtgctcaacagagggaaaaataagca

SEQ ID NO: 1027624 - DNA, 33 bp, Homo sapien
accatgtgtgctcaacggagggaaaaataagca

SEQ ID NO: 1027625 - DNA, 33 bp, Homo sapien
ttcacaaccttcaaaacgaggtgaacctagaaa

SEQ ID NO: 1027626 - DNA, 33 bp, Homo sapien
ttcacaaccttcaaaatgaggtgaacctagaaa

SEQ ID NO: 1027627 - DNA, 33 bp, Homo sapien
acaggaaaaagtagtcaagataccatcatgtag

SEQ ID NO: 1027628 - DNA, 33 bp, Homo sapien
acaggaaaaagtagtcgagataccatcatgtag

SEQ ID NO: 1027629 - DNA, 33 bp, Homo sapien
cacacagtgttcacccacagagagttttaaatc

SEQ ID NO: 1027630 - DNA, 33 bp, Homo sapien
cacacagtgttcacccgcagagagttttaaatc

SEQ ID NO: 1027631 - DNA, 33 bp, Homo sapien
gataatacacttggagcattaagagataataca

SEQ ID NO: 1027632 - DNA, 33 bp, Homo sapien
gataatacacttggaggattaagagataataca

SEQ ID NO: 1027633 - DNA, 33 bp, Homo sapien
aatagtatgaaaacaacgtcagcaacaagaaca

SEQ ID NO: 1027634 - DNA, 33 bp, Homo sapien
aatagtatgaaaacaatgtcagcaacaagaaca

SEQ ID NO: 1027635 - DNA, 33 bp, Homo sapien
actacctagataagcacggtgtataggggtaac

SEQ ID NO: 1027636 - DNA, 33 bp, Homo sapien
actacctagataagcatggtgtataggggtaac

SEQ ID NO: 1027637 - DNA, 33 bp, Homo sapien
aaaatgctttcatcctcaccagtgtccctggtg

SEQ ID NO: 1027638 - DNA, 33 bp, Homo sapien
aaaatgctttcatccttaccagtgtccctggtg

SEQ ID NO: 1027639 - DNA, 33 bp, Homo sapien
gtgcccttgcatgatcactatccgcccactcct

SEQ ID NO: 1027640 - DNA, 33 bp, Homo sapien
gtgcccttgcatgatctctatccgcccactcct

SEQ ID NO: 1027641 - DNA, 33 bp, Homo sapien
tgaaacaaccacaaacaccatcactttccataa

SEQ ID NO: 1027642 - DNA, 33 bp, Homo sapien
tgaaacaaccacaaacgccatcactttccataa

SEQ ID NO: 1027643 - DNA, 33 bp, Homo sapien
gctaaggaaaaagttcaactcttctaatccata

SEQ ID NO: 1027644 - DNA, 33 bp, Homo sapien
gctaaggaaaaagttcgactcttctaatccata

SEQ ID NO: 1027645 - DNA, 33 bp, Homo sapien
accatttataaaagaaaatggttgcgaacaatt

SEQ ID NO: 1027646 - DNA, 33 bp, Homo sapien
accatttataaaagaagatggttgcgaacaatt

SEQ ID NO: 1027647 - DNA, 33 bp, Homo sapien
catctggaaagcctgaaaagtaaaatttgcagc

SEQ ID NO: 1027648 - DNA, 33 bp, Homo sapien
catctggaaagcctgacaagtaaaatttgcagc

SEQ ID NO: 1027649 - DNA, 33 bp, Homo sapien
gtttcatgtaagattgaaagcgtccacaaggtt

SEQ ID NO: 1027650 - DNA, 33 bp, Homo sapien
gtttcatgtaagattggaagcgtccacaaggtt

SEQ ID NO: 1027651 - DNA, 33 bp, Homo sapien
gcctataattccaacacatgaaaataaaggcag

SEQ ID NO: 1027652 - DNA, 33 bp, Homo sapien
gcctataattccaacagatgaaaataaaggcag

SEQ ID NO: 1027653 - DNA, 33 bp, Homo sapien
gtacacaacaaagcccccttcctctgcgtgccc

SEQ ID NO: 1027654 - DNA, 33 bp, Homo sapien
gtacacaacaaagcccgcttcctctgcgtgccc

SEQ ID NO: 1027655 - DNA, 33 bp, Homo sapien
attgtgcagctagaagaattttttaaagtatct

SEQ ID NO: 1027656 - DNA, 33 bp, Homo sapien
attgtgcagctagaaggattttttaaagtatct

SEQ ID NO: 1027657 - DNA, 33 bp, Homo sapien
gcttacaggatagcccaaatggatggagacagt

SEQ ID NO: 1027658 - DNA, 33 bp, Homo sapien
gcttacaggatagccctaatggatggagacagt

SEQ ID NO: 1027659 - DNA, 33 bp, Homo sapien
gaatgccatgtgaagacgaatgcacagcttgga

SEQ ID NO: 1027660 - DNA, 33 bp, Homo sapien
gaatgccatgtgaagatgaatgcacagcttgga

SEQ ID NO: 1027661 - DNA, 33 bp, Homo sapien
atgtgatttcagtgccaagttattcaggaatgg

SEQ ID NO: 1027662 - DNA, 33 bp, Homo sapien
atgtgatttcagtgcctagttattcaggaatgg

SEQ ID NO: 1027663 - DNA, 33 bp, Homo sapien
acaggtagggcaattcaaacttcacataacagc

SEQ ID NO: 1027664 - DNA, 33 bp, Homo sapien
acaggtagggcaattcgaacttcacataacagc

SEQ ID NO: 1027665 - DNA, 33 bp, Homo sapien
ctcagaactggatgaaacctcactagaatgttg

SEQ ID NO: 1027666 - DNA, 33 bp, Homo sapien
ctcagaactggatgaagcctcactagaatgttg

SEQ ID NO: 1027667 - DNA, 33 bp, Homo sapien
gtgcacttgagtatgacgggatagagacagatg

SEQ ID NO: 1027668 - DNA, 33 bp, Homo sapien
gtgcacttgagtatgatgggatagagacagatg

SEQ ID NO: 1027669 - DNA, 33 bp, Homo sapien
acttgcccacatgagaaaatcgttctgtgtcct

SEQ ID NO: 1027670 - DNA, 33 bp, Homo sapien
acttgcccacatgagagaatcgttctgtgtcct

SEQ ID NO: 1027671 - DNA, 33 bp, Homo sapien
atatcttgtggacatcaccccgttgcctcatgg

SEQ ID NO: 1027672 - DNA, 33 bp, Homo sapien
atatcttgtggacatcgccccgttgcctcatgg

SEQ ID NO: 1027673 - DNA, 33 bp, Homo sapien
cggactcaggatagaaacgctgtgtttgtgcta

SEQ ID NO: 1027674 - DNA, 33 bp, Homo sapien
cggactcaggatagaaccgctgtgtttgtgcta

SEQ ID NO: 1027675 - DNA, 33 bp, Homo sapien
ctctggggtgatggaaacattttaaaactggat

SEQ ID NO: 1027676 - DNA, 33 bp, Homo sapien
ctctggggtgatggaatcattttaaaactggat

SEQ ID NO: 1027677 - DNA, 33 bp, Homo sapien
cactccacgttaaataatagtgtgaacattacg

SEQ ID NO: 1027678 - DNA, 33 bp, Homo sapien
cactccacgttaaatattagtgtgaacattacg

SEQ ID NO: 1027679 - DNA, 33 bp, Homo sapien
ggtcagatggatggggaaccttaagcagtagca

SEQ ID NO: 1027680 - DNA, 33 bp, Homo sapien
ggtcagatggatgggggaccttaagcagtagca

SEQ ID NO: 1027681 - DNA, 33 bp, Homo sapien
gctccccacagaactacaaggggatcacttaaa

SEQ ID NO: 1027682 - DNA, 33 bp, Homo sapien
gctccccacagaactagaaggggatcacttaaa

SEQ ID NO: 1027683 - DNA, 33 bp, Homo sapien
attcagtgacctttacgagattgtgtatgcatc

SEQ ID NO: 1027684 - DNA, 33 bp, Homo sapien
attcagtgacctttactagattgtgtatgcatc

SEQ ID NO: 1027685 - DNA, 33 bp, Homo sapien
actctacctaattgccagctttggataaagaca

SEQ ID NO: 1027686 - DNA, 33 bp, Homo sapien
actctacctaattgccggctttggataaagaca

SEQ ID NO: 1027687 - DNA, 33 bp, Homo sapien
catgtaagttgacgcaagagccggcgaatggaa

SEQ ID NO: 1027688 - DNA, 33 bp, Homo sapien
catgtaagttgacgcatgagccggcgaatggaa

SEQ ID NO: 1027689 - DNA, 33 bp, Homo sapien
cacagcagacgcgaaacggggaagagcaatggc

SEQ ID NO: 1027690 - DNA, 33 bp, Homo sapien
cacagcagacgcgaaatggggaagagcaatggc

SEQ ID NO: 1027691 - DNA, 33 bp, Homo sapien
gattttgcagaggagacgggagaagatgattca

SEQ ID NO: 1027692 - DNA, 33 bp, Homo sapien
gattttgcagaggagatgggagaagatgattca

SEQ ID NO: 1027693 - DNA, 33 bp, Homo sapien
cccatgacccttatcactacagagcagcagttt

SEQ ID NO: 1027694 - DNA, 33 bp, Homo sapien
cccatgacccttatcattacagagcagcagttt

SEQ ID NO: 1027695 - DNA, 33 bp, Homo sapien
cttcttgcattgaaataacttgcttttctcttt

SEQ ID NO: 1027696 - DNA, 33 bp, Homo sapien
cttcttgcattgaaatgacttgcttttctcttt

SEQ ID NO: 1027697 - DNA, 33 bp, Homo sapien
aaggtgaagccttgtaagtttgttgctcctacg

SEQ ID NO: 1027698 - DNA, 33 bp, Homo sapien
aaggtgaagccttgtaggtttgttgctcctacg

SEQ ID NO: 1027699 - DNA, 33 bp, Homo sapien
ctctttgcagaagaagaaagccagaaccaagtt

SEQ ID NO: 1027700 - DNA, 33 bp, Homo sapien
ctctttgcagaagaaggaagccagaaccaagtt

SEQ ID NO: 1027701 - DNA, 33 bp, Homo sapien
ccccagagtgaccacaatggcatgattactgct

SEQ ID NO: 1027702 - DNA, 33 bp, Homo sapien
ccccagagtgaccacagtggcatgattactgct

SEQ ID NO: 1027703 - DNA, 33 bp, Homo sapien
gaggacaaaggaaaagactaaaggccagagacc

SEQ ID NO: 1027704 - DNA, 33 bp, Homo sapien
gaggacaaaggaaaaggctaaaggccagagacc

SEQ ID NO: 1027705 - DNA, 33 bp, Homo sapien
ggaagctgtaaatgtcaccttctaaggaaaatg

SEQ ID NO: 1027706 - DNA, 33 bp, Homo sapien
ggaagctgtaaatgtcgccttctaaggaaaatg

SEQ ID NO: 1027707 - DNA, 33 bp, Homo sapien
catagtgaccttaatacactttaaagaagcaca

SEQ ID NO: 1027708 - DNA, 33 bp, Homo sapien
catagtgaccttaatatactttaaagaagcaca

SEQ ID NO: 1027709 - DNA, 33 bp, Homo sapien
tgactccaagtaaccactgacctgctttcaatc

SEQ ID NO: 1027710 - DNA, 33 bp, Homo sapien
tgactccaagtaaccattgacctgctttcaatc

SEQ ID NO: 1027711 - DNA, 33 bp, Homo sapien
cttaagagtcattaaactcccattttagctggt

SEQ ID NO: 1027712 - DNA, 33 bp, Homo sapien
cttaagagtcattaaattcccattttagctggt

SEQ ID NO: 1027713 - DNA, 33 bp, Homo sapien
tctagaatggtgaagacgaatcagtgtcctgaa

SEQ ID NO: 1027714 - DNA, 33 bp, Homo sapien
tctagaatggtgaagatgaatcagtgtcctgaa

SEQ ID NO: 1027715 - DNA, 33 bp, Homo sapien
tctgcctcgattaccacagttttgtagttaagt

SEQ ID NO: 1027716 - DNA, 33 bp, Homo sapien
tctgcctcgattaccatagttttgtagttaagt

SEQ ID NO: 1027717 - DNA, 33 bp, Homo sapien
agcctgtggccaaactcagtggagaggaagaac

SEQ ID NO: 1027718 - DNA, 33 bp, Homo sapien
agcctgtggccaaactgagtggagaggaagaac

SEQ ID NO: 1027719 - DNA, 33 bp, Homo sapien
gcttgcagtcatgttcaagtcctcccagacagg

SEQ ID NO: 1027720 - DNA, 33 bp, Homo sapien
gcttgcagtcatgttcgagtcctcccagacagg

SEQ ID NO: 1027721 - DNA, 33 bp, Homo sapien
ctgatttattgattgacggatggactgattgag

SEQ ID NO: 1027722 - DNA, 33 bp, Homo sapien
ctgatttattgattgatggatggactgattgag

SEQ ID NO: 1027723 - DNA, 33 bp, Homo sapien
tgttatgctattttcaagtatattctgctagtg

SEQ ID NO: 1027724 - DNA, 33 bp, Homo sapien
tgttatgctattttcatgtatattctgctagtg

SEQ ID NO: 1027725 - DNA, 33 bp, Homo sapien
ggaagaaataccccaggctgctccactccctca

SEQ ID NO: 1027726 - DNA, 33 bp, Homo sapien
ggaagaaataccccagtctgctccactccctca

SEQ ID NO: 1027727 - DNA, 33 bp, Homo sapien
attattaaaagcaatcaatgcattatgaaaatg

SEQ ID NO: 1027728 - DNA, 33 bp, Homo sapien
attattaaaagcaatcgatgcattatgaaaatg

SEQ ID NO: 1027729 - DNA, 33 bp, Homo sapien
caattacccaaggacaataactggcacacctgt

SEQ ID NO: 1027730 - DNA, 33 bp, Homo sapien
caattacccaaggacattaactggcacacctgt

SEQ ID NO: 1027731 - DNA, 33 bp, Homo sapien
tatatgcaaggagtctcaccatccttattggtc

SEQ ID NO: 1027732 - DNA, 33 bp, Homo sapien
tatatgcaaggagtcttaccatccttattggtc

SEQ ID NO: 1027733 - DNA, 33 bp, Homo sapien
aaagctttcccaaaaaccctgtgccattttgca

SEQ ID NO: 1027734 - DNA, 33 bp, Homo sapien
aaagctttcccaaaaagcctgtgccattttgca

SEQ ID NO: 1027735 - DNA, 33 bp, Homo sapien
atcattggttgccagagactaggtagaggaaaa

SEQ ID NO: 1027736 - DNA, 33 bp, Homo sapien
atcattggttgccagatactaggtagaggaaaa

SEQ ID NO: 1027737 - DNA, 33 bp, Homo sapien
ttaagctactgtatttaaaattggcttattcca

SEQ ID NO: 1027738 - DNA, 33 bp, Homo sapien
ttaagctactgtattttaaattggcttattcca

SEQ ID NO: 1027739 - DNA, 33 bp, Homo sapien
cttcaagcatggatagaaatccttgagtgcagc

SEQ ID NO: 1027740 - DNA, 33 bp, Homo sapien
cttcaagcatggataggaatccttgagtgcagc

SEQ ID NO: 1027741 - DNA, 33 bp, Homo sapien
ctggagtcgaaggccaagacagtggtggcaggc

SEQ ID NO: 1027742 - DNA, 33 bp, Homo sapien
ctggagtcgaaggccaggacagtggtggcaggc

SEQ ID NO: 1027743 - DNA, 33 bp, Homo sapien
ttagaaattagacttaaaggatggattcattgg

SEQ ID NO: 1027744 - DNA, 33 bp, Homo sapien
ttagaaattagacttacaggatggattcattgg

SEQ ID NO: 1027745 - DNA, 33 bp, Homo sapien
agttacatgatctgaaccaagctgcaagggagg

SEQ ID NO: 1027746 - DNA, 33 bp, Homo sapien
agttacatgatctgaatcaagctgcaagggagg

SEQ ID NO: 1027747 - DNA, 33 bp, Homo sapien
gaccgcattttgataacggtcacaacttcacag

SEQ ID NO: 1027748 - DNA, 33 bp, Homo sapien
gaccgcattttgataatggtcacaacttcacag

SEQ ID NO: 1027749 - DNA, 33 bp, Homo sapien
tctactgtgttgcccaagatgcacaagactgtt

SEQ ID NO: 1027750 - DNA, 33 bp, Homo sapien
tctactgtgttgcccacgatgcacaagactgtt

SEQ ID NO: 1027751 - DNA, 33 bp, Homo sapien
gcacagtgcaatgaaaatgggatgcaaagagga

SEQ ID NO: 1027752 - DNA, 33 bp, Homo sapien
gcacagtgcaatgaaagtgggatgcaaagagga

SEQ ID NO: 1027753 - DNA, 33 bp, Homo sapien
gtgaaggcacaaaatcacttctcaagttgggcc

SEQ ID NO: 1027754 - DNA, 33 bp, Homo sapien
gtgaaggcacaaaatcgcttctcaagttgggcc

SEQ ID NO: 1027755 - DNA, 33 bp, Homo sapien
caaaacggtgagaaaccaattgctgtagtttat

SEQ ID NO: 1027756 - DNA, 33 bp, Homo sapien
caaaacggtgagaaacgaattgctgtagtttat

SEQ ID NO: 1027757 - DNA, 33 bp, Homo sapien
ctagacttgataaggagattattggattaaaca

SEQ ID NO: 1027758 - DNA, 33 bp, Homo sapien
ctagacttgataaggatattattggattaaaca

SEQ ID NO: 1027759 - DNA, 33 bp, Homo sapien
aaataaaataggtcaaccaaatgctgtttcaaa

SEQ ID NO: 1027760 - DNA, 33 bp, Homo sapien
aaataaaataggtcaatcaaatgctgtttcaaa

SEQ ID NO: 1027761 - DNA, 33 bp, Homo sapien
cttgctccttcctcaacaaattcctctgctccc

SEQ ID NO: 1027762 - DNA, 33 bp, Homo sapien
cttgctccttcctcaataaattcctctgctccc

SEQ ID NO: 1027763 - DNA, 33 bp, Homo sapien
catcattgtctcctacactttgataacttgctt

SEQ ID NO: 1027764 - DNA, 33 bp, Homo sapien
catcattgtctcctacgctttgataacttgctt

SEQ ID NO: 1027765 - DNA, 33 bp, Homo sapien
acatgaaataagctagacgaatatagagtacct

SEQ ID NO: 1027766 - DNA, 33 bp, Homo sapien
acatgaaataagctagccgaatatagagtacct

SEQ ID NO: 1027767 - DNA, 33 bp, Homo sapien
gtaagctattgatataaacaactgttacatgaa

SEQ ID NO: 1027768 - DNA, 33 bp, Homo sapien
gtaagctattgatatacacaactgttacatgaa

SEQ ID NO: 1027769 - DNA, 33 bp, Homo sapien
gatggaattttgtgtacaaatgcattgaaactg

SEQ ID NO: 1027770 - DNA, 33 bp, Homo sapien
gatggaattttgtgtagaaatgcattgaaactg

SEQ ID NO: 1027771 - DNA, 33 bp, Homo sapien
ttcctggtatagctaccatctgagggcctttaa

SEQ ID NO: 1027772 - DNA, 33 bp, Homo sapien
ttcctggtatagctacgatctgagggcctttaa

SEQ ID NO: 1027773 - DNA, 33 bp, Homo sapien
tgctattaacacaaaaacttttctctcaactta

SEQ ID NO: 1027774 - DNA, 33 bp, Homo sapien
tgctattaacacaaaagcttttctctcaactta

SEQ ID NO: 1027775 - DNA, 33 bp, Homo sapien
agaaaaattcaaagtcaaacactaaattcaatg

SEQ ID NO: 1027776 - DNA, 33 bp, Homo sapien
agaaaaattcaaagtcgaacactaaattcaatg

SEQ ID NO: 1027777 - DNA, 33 bp, Homo sapien
acaatctaagcctcaacgaatagacaaatggtt

SEQ ID NO: 1027778 - DNA, 33 bp, Homo sapien
acaatctaagcctcaatgaatagacaaatggtt

SEQ ID NO: 1027779 - DNA, 33 bp, Homo sapien
tggcaaaacttctatcaaatttccctcacacgt

SEQ ID NO: 1027780 - DNA, 33 bp, Homo sapien
tggcaaaacttctatccaatttccctcacacgt

SEQ ID NO: 1027781 - DNA, 33 bp, Homo sapien
tcccctgcctctcacacagttagggtaccagct

SEQ ID NO: 1027782 - DNA, 33 bp, Homo sapien
tcccctgcctctcacatagttagggtaccagct

SEQ ID NO: 1027783 - DNA, 33 bp, Homo sapien
attttgcatctagtaaacaatttcatttgatcg

SEQ ID NO: 1027784 - DNA, 33 bp, Homo sapien
attttgcatctagtaagcaatttcatttgatcg

SEQ ID NO: 1027785 - DNA, 33 bp, Homo sapien
ctctccacaagacaaaatgtatttgcatgccta

SEQ ID NO: 1027786 - DNA, 33 bp, Homo sapien
ctctccacaagacaaagtgtatttgcatgccta

SEQ ID NO: 1027787 - DNA, 33 bp, Homo sapien
cataggcattttatggacatcaccattcatctg

SEQ ID NO: 1027788 - DNA, 33 bp, Homo sapien
cataggcattttatgggcatcaccattcatctg

SEQ ID NO: 1027789 - DNA, 33 bp, Homo sapien
gaagggtccattcagacggttacagggctcaga

SEQ ID NO: 1027790 - DNA, 33 bp, Homo sapien
gaagggtccattcagagggttacagggctcaga

SEQ ID NO: 1027791 - DNA, 33 bp, Homo sapien
atatgaatctttttctcactttctgattatttc

SEQ ID NO: 1027792 - DNA, 33 bp, Homo sapien
atatgaatctttttctgactttctgattatttc

SEQ ID NO: 1027793 - DNA, 33 bp, Homo sapien
acctgtatcaatttcacaataattcatttcttt

SEQ ID NO: 1027794 - DNA, 33 bp, Homo sapien
acctgtatcaatttcagaataattcatttcttt

SEQ ID NO: 1027795 - DNA, 33 bp, Homo sapien
tcttttgttatgttaacgtagagccttagatat

SEQ ID NO: 1027796 - DNA, 33 bp, Homo sapien
tcttttgttatgttaatgtagagccttagatat

SEQ ID NO: 1027797 - DNA, 33 bp, Homo sapien
atataatgcttaaagacggtttgttttggccgg

SEQ ID NO: 1027798 - DNA, 33 bp, Homo sapien
atataatgcttaaagatggtttgttttggccgg

SEQ ID NO: 1027799 - DNA, 33 bp, Homo sapien
tttgtgttgacaagtggagtcctctctgtgtaa

SEQ ID NO: 1027800 - DNA, 33 bp, Homo sapien
tttgtgttgacaagtgtagtcctctctgtgtaa

SEQ ID NO: 1027801 - DNA, 33 bp, Homo sapien
ctcagaggctgactaccccacctactagcactc

SEQ ID NO: 1027802 - DNA, 33 bp, Homo sapien
ctcagaggctgactactccacctactagcactc

SEQ ID NO: 1027803 - DNA, 33 bp, Homo sapien
acccatttatgctacaaaccattcttaacacac

SEQ ID NO: 1027804 - DNA, 33 bp, Homo sapien
acccatttatgctacataccattcttaacacac

SEQ ID NO: 1027805 - DNA, 33 bp, Homo sapien
aaggtgtaatccatcaatccatggtgtgtgctc

SEQ ID NO: 1027806 - DNA, 33 bp, Homo sapien
aaggtgtaatccatcagtccatggtgtgtgctc

SEQ ID NO: 1027807 - DNA, 33 bp, Homo sapien
gccaagcttcatatacactccaggtactccagg

SEQ ID NO: 1027808 - DNA, 33 bp, Homo sapien
gccaagcttcatatacgctccaggtactccagg

SEQ ID NO: 1027809 - DNA, 33 bp, Homo sapien
ttgggattcacttggtaaattggtccaaatagg

SEQ ID NO: 1027810 - DNA, 33 bp, Homo sapien
ttgggattcacttggttaattggtccaaatagg

SEQ ID NO: 1027811 - DNA, 33 bp, Homo sapien
taaatgtgttccgataataaaattctatacaga

SEQ ID NO: 1027812 - DNA, 33 bp, Homo sapien
taaatgtgttccgatagtaaaattctatacaga

SEQ ID NO: 1027813 - DNA, 33 bp, Homo sapien
gagacatggacttccaatcctcaaagctgacct

SEQ ID NO: 1027814 - DNA, 33 bp, Homo sapien
gagacatggacttccactcctcaaagctgacct

SEQ ID NO: 1027815 - DNA, 33 bp, Homo sapien
gctttcttctaggacacccttaaagacaataat

SEQ ID NO: 1027816 - DNA, 33 bp, Homo sapien
gctttcttctaggacatccttaaagacaataat

SEQ ID NO: 1027817 - DNA, 33 bp, Homo sapien
attatgaggcaactacactttgcacatggaagg

SEQ ID NO: 1027818 - DNA, 33 bp, Homo sapien
attatgaggcaactacgctttgcacatggaagg

SEQ ID NO: 1027819 - DNA, 33 bp, Homo sapien
catggtaataggactacggagcgtttcagagac

SEQ ID NO: 1027820 - DNA, 33 bp, Homo sapien
catggtaataggactatggagcgtttcagagac

SEQ ID NO: 1027821 - DNA, 33 bp, Homo sapien
tgtggagaaggtcaaaacgattcattcaaggtc

SEQ ID NO: 1027822 - DNA, 33 bp, Homo sapien
tgtggagaaggtcaaagcgattcattcaaggtc

SEQ ID NO: 1027823 - DNA, 33 bp, Homo sapien
gatttgaacctagaacagatttgaacacctaca

SEQ ID NO: 1027824 - DNA, 33 bp, Homo sapien
gatttgaacctagaactgatttgaacacctaca

SEQ ID NO: 1027825 - DNA, 33 bp, Homo sapien
acttagcaagaaaccaaacctcaagagctgtga

SEQ ID NO: 1027826 - DNA, 33 bp, Homo sapien
acttagcaagaaaccacacctcaagagctgtga

SEQ ID NO: 1027827 - DNA, 33 bp, Homo sapien
tgaatttcatgttcaccgcttaattaaataata

SEQ ID NO: 1027828 - DNA, 33 bp, Homo sapien
tgaatttcatgttcactgcttaattaaataata

SEQ ID NO: 1027829 - DNA, 33 bp, Homo sapien
ggggaaatgttcaatacggtgtgcttatgtggg

SEQ ID NO: 1027830 - DNA, 33 bp, Homo sapien
ggggaaatgttcaatatggtgtgcttatgtggg

SEQ ID NO: 1027831 - DNA, 33 bp, Homo sapien
caataattaatttcctaaactccaattcaataa

SEQ ID NO: 1027832 - DNA, 33 bp, Homo sapien
caataattaatttcctcaactccaattcaataa

SEQ ID NO: 1027833 - DNA, 33 bp, Homo sapien
taggccagaaagtaggacagaaacacaaagcat

SEQ ID NO: 1027834 - DNA, 33 bp, Homo sapien
taggccagaaagtagggcagaaacacaaagcat

SEQ ID NO: 1027835 - DNA, 33 bp, Homo sapien
tatacaaaatagacagccactcgaaattgctgg

SEQ ID NO: 1027836 - DNA, 33 bp, Homo sapien
tatacaaaatagacagtcactcgaaattgctgg

SEQ ID NO: 1027837 - DNA, 33 bp, Homo sapien
gcaccggcagcaaggacaaggtccccaagtatc

SEQ ID NO: 1027838 - DNA, 33 bp, Homo sapien
gcaccggcagcaaggataaggtccccaagtatc

SEQ ID NO: 1027839 - DNA, 33 bp, Homo sapien
ccatggctagttcaaacagagcacagctgcaaa

SEQ ID NO: 1027840 - DNA, 33 bp, Homo sapien
ccatggctagttcaaagagagcacagctgcaaa

SEQ ID NO: 1027841 - DNA, 33 bp, Homo sapien
ttcatcaaccagagaagattaagtcttatcaca

SEQ ID NO: 1027842 - DNA, 33 bp, Homo sapien
ttcatcaaccagagaatattaagtcttatcaca

SEQ ID NO: 1027843 - DNA, 33 bp, Homo sapien
tcttaggactttcaacagactagatgaggctca

SEQ ID NO: 1027844 - DNA, 33 bp, Homo sapien
tcttaggactttcaactgactagatgaggctca

SEQ ID NO: 1027845 - DNA, 33 bp, Homo sapien
ttgccttagaaatagcacataaacaagaatgta

SEQ ID NO: 1027846 - DNA, 33 bp, Homo sapien
ttgccttagaaatagcgcataaacaagaatgta

SEQ ID NO: 1027847 - DNA, 33 bp, Homo sapien
tggtcaaaatccagaacgctgacgataccaaat

SEQ ID NO: 1027848 - DNA, 33 bp, Homo sapien
tggtcaaaatccagaatgctgacgataccaaat

SEQ ID NO: 1027849 - DNA, 33 bp, Homo sapien
agacagaactttgtaccagacagataatataag

SEQ ID NO: 1027850 - DNA, 33 bp, Homo sapien
agacagaactttgtacgagacagataatataag

SEQ ID NO: 1027851 - DNA, 33 bp, Homo sapien
attgttcaaacgcatacagatggtcccagtaag

SEQ ID NO: 1027852 - DNA, 33 bp, Homo sapien
attgttcaaacgcatagagatggtcccagtaag

SEQ ID NO: 1027853 - DNA, 33 bp, Homo sapien
gtcagtcttaggattacgaagattgagttaccc

SEQ ID NO: 1027854 - DNA, 33 bp, Homo sapien
gtcagtcttaggattatgaagattgagttaccc

SEQ ID NO: 1027855 - DNA, 33 bp, Homo sapien
tagagacatgtgacaaaaccacagaaagaacga

SEQ ID NO: 1027856 - DNA, 33 bp, Homo sapien
tagagacatgtgacaagaccacagaaagaacga

SEQ ID NO: 1027857 - DNA, 33 bp, Homo sapien
gtttggatggtcattgaaagctaataattcaag

SEQ ID NO: 1027858 - DNA, 33 bp, Homo sapien
gtttggatggtcattggaagctaataattcaag

SEQ ID NO: 1027859 - DNA, 33 bp, Homo sapien
ctaaccattttctccacgcagatgctgaaataa

SEQ ID NO: 1027860 - DNA, 33 bp, Homo sapien
ctaaccattttctccatgcagatgctgaaataa

SEQ ID NO: 1027861 - DNA, 33 bp, Homo sapien
cccttctgctgccagacagtacgtacctgacca

SEQ ID NO: 1027862 - DNA, 33 bp, Homo sapien
cccttctgctgccagatagtacgtacctgacca

SEQ ID NO: 1027863 - DNA, 33 bp, Homo sapien
cggaggaaagcagtaacgtagcaagcctgctat

SEQ ID NO: 1027864 - DNA, 33 bp, Homo sapien
cggaggaaagcagtaatgtagcaagcctgctat

SEQ ID NO: 1027865 - DNA, 33 bp, Homo sapien
tataaacccagtccaccgagaagaagagaggcc

SEQ ID NO: 1027866 - DNA, 33 bp, Homo sapien
tataaacccagtccactgagaagaagagaggcc

SEQ ID NO: 1027867 - DNA, 33 bp, Homo sapien
ggggcccaaccttctcaaaagtggcattgtttc

SEQ ID NO: 1027868 - DNA, 33 bp, Homo sapien
ggggcccaaccttctcgaaagtggcattgtttc

SEQ ID NO: 1027869 - DNA, 33 bp, Homo sapien
acctttctacaagcataagaagcaattaaaact

SEQ ID NO: 1027870 - DNA, 33 bp, Homo sapien
acctttctacaagcatgagaagcaattaaaact

SEQ ID NO: 1027871 - DNA, 33 bp, Homo sapien
agaaaagaatcctagaagttcacagacagaaag

SEQ ID NO: 1027872 - DNA, 33 bp, Homo sapien
agaaaagaatcctagacgttcacagacagaaag

SEQ ID NO: 1027873 - DNA, 33 bp, Homo sapien
atctgtcattcttgtaggtgttaccaagttact

SEQ ID NO: 1027874 - DNA, 33 bp, Homo sapien
atctgtcattcttgtatgtgttaccaagttact

SEQ ID NO: 1027875 - DNA, 33 bp, Homo sapien
ggtttcttgccagaaccacctcctcgcagaatc

SEQ ID NO: 1027876 - DNA, 33 bp, Homo sapien
ggtttcttgccagaactacctcctcgcagaatc

SEQ ID NO: 1027877 - DNA, 33 bp, Homo sapien
ctcacattctggaaaacagtggaataataacaa

SEQ ID NO: 1027878 - DNA, 33 bp, Homo sapien
ctcacattctggaaaatagtggaataataacaa

SEQ ID NO: 1027879 - DNA, 33 bp, Homo sapien
agtgtctccaagggtcaaatcttatgtctactt

SEQ ID NO: 1027880 - DNA, 33 bp, Homo sapien
agtgtctccaagggtcgaatcttatgtctactt

SEQ ID NO: 1027881 - DNA, 33 bp, Homo sapien
ctggtctatccatacccgatgttcactgccagt

SEQ ID NO: 1027882 - DNA, 33 bp, Homo sapien
ctggtctatccatacctgatgttcactgccagt

SEQ ID NO: 1027883 - DNA, 33 bp, Homo sapien
ttgtttcttctttgaacgaccaggcctgaggct

SEQ ID NO: 1027884 - DNA, 33 bp, Homo sapien
ttgtttcttctttgaatgaccaggcctgaggct

SEQ ID NO: 1027885 - DNA, 33 bp, Homo sapien
ggagccaggcattcataatagagccagctgatg

SEQ ID NO: 1027886 - DNA, 33 bp, Homo sapien
ggagccaggcattcattatagagccagctgatg

SEQ ID NO: 1027887 - DNA, 33 bp, Homo sapien
gttagtacatttcaacaataggttacttttatt

SEQ ID NO: 1027888 - DNA, 33 bp, Homo sapien
gttagtacatttcaacgataggttacttttatt

SEQ ID NO: 1027889 - DNA, 33 bp, Homo sapien
aatatcaaaagacagactagtttcccataaaat

SEQ ID NO: 1027890 - DNA, 33 bp, Homo sapien
aatatcaaaagacagattagtttcccataaaat

SEQ ID NO: 1027891 - DNA, 33 bp, Homo sapien
taaataaagtaggcaacggtatagtaatatcct

SEQ ID NO: 1027892 - DNA, 33 bp, Homo sapien
taaataaagtaggcaatggtatagtaatatcct

SEQ ID NO: 1027893 - DNA, 33 bp, Homo sapien
acaggtaagtgagcaactacgctgtggtatgat

SEQ ID NO: 1027894 - DNA, 33 bp, Homo sapien
acaggtaagtgagcaattacgctgtggtatgat

SEQ ID NO: 1027895 - DNA, 33 bp, Homo sapien
aatattactgtttgagaaatctgaagtattttc

SEQ ID NO: 1027896 - DNA, 33 bp, Homo sapien
aatattactgtttgaggaatctgaagtattttc

SEQ ID NO: 1027897 - DNA, 33 bp, Homo sapien
tcaataccattttcaaaatgaacaaaggcactc

SEQ ID NO: 1027898 - DNA, 33 bp, Homo sapien
tcaataccattttcaagatgaacaaaggcactc

SEQ ID NO: 1027899 - DNA, 33 bp, Homo sapien
cctattattgttcatacggaatttcccacctta

SEQ ID NO: 1027900 - DNA, 33 bp, Homo sapien
cctattattgttcatatggaatttcccacctta

SEQ ID NO: 1027901 - DNA, 33 bp, Homo sapien
atagggattctggctcacttttcctatgtatgg

SEQ ID NO: 1027902 - DNA, 33 bp, Homo sapien
atagggattctggctcgcttttcctatgtatgg

SEQ ID NO: 1027903 - DNA, 33 bp, Homo sapien
tttccctgttcatccacgcaatatctaaaaatg

SEQ ID NO: 1027904 - DNA, 33 bp, Homo sapien
tttccctgttcatccatgcaatatctaaaaatg

SEQ ID NO: 1027905 - DNA, 33 bp, Homo sapien
atattctcatgtactacatattcttcaccatat

SEQ ID NO: 1027906 - DNA, 33 bp, Homo sapien
atattctcatgtactatatattcttcaccatat

SEQ ID NO: 1027907 - DNA, 33 bp, Homo sapien
aaagtgcagggatagccgatgataatcttccag

SEQ ID NO: 1027908 - DNA, 33 bp, Homo sapien
aaagtgcagggatagctgatgataatcttccag

SEQ ID NO: 1027909 - DNA, 33 bp, Homo sapien
tgaggggaaaacgagaacaagagcctctactgt

SEQ ID NO: 1027910 - DNA, 33 bp, Homo sapien
tgaggggaaaacgagagcaagagcctctactgt

SEQ ID NO: 1027911 - DNA, 33 bp, Homo sapien
cagaggactccgatgacgttagaagaggctgca

SEQ ID NO: 1027912 - DNA, 33 bp, Homo sapien
cagaggactccgatgaggttagaagaggctgca

SEQ ID NO: 1027913 - DNA, 33 bp, Homo sapien
gaggttcagtgttccacgtcacatagctattta

SEQ ID NO: 1027914 - DNA, 33 bp, Homo sapien
gaggttcagtgttccatgtcacatagctattta

SEQ ID NO: 1027915 - DNA, 33 bp, Homo sapien
ccaggaggagagacccaaagataagcatcaccc

SEQ ID NO: 1027916 - DNA, 33 bp, Homo sapien
ccaggaggagagacccgaagataagcatcaccc

SEQ ID NO: 1027917 - DNA, 33 bp, Homo sapien
gcgctgctgatagacacgtgaaagtctagcctg

SEQ ID NO: 1027918 - DNA, 33 bp, Homo sapien
gcgctgctgatagacatgtgaaagtctagcctg

SEQ ID NO: 1027919 - DNA, 33 bp, Homo sapien
gaggcatctgagactcacatctgctgcaggcta

SEQ ID NO: 1027920 - DNA, 33 bp, Homo sapien
gaggcatctgagactcgcatctgctgcaggcta

SEQ ID NO: 1027921 - DNA, 33 bp, Homo sapien
actgccgagggatctacatgagcgccctaagtc

SEQ ID NO: 1027922 - DNA, 33 bp, Homo sapien
actgccgagggatctatatgagcgccctaagtc

SEQ ID NO: 1027923 - DNA, 33 bp, Homo sapien
cagatatgttgcttaaaaggtcaagacaaggct

SEQ ID NO: 1027924 - DNA, 33 bp, Homo sapien
cagatatgttgcttaagaggtcaagacaaggct

SEQ ID NO: 1027925 - DNA, 33 bp, Homo sapien
ttgtgtctgtgacagaaaaggaaaagagagaag

SEQ ID NO: 1027926 - DNA, 33 bp, Homo sapien
ttgtgtctgtgacagagaaggaaaagagagaag

SEQ ID NO: 1027927 - DNA, 33 bp, Homo sapien
gcatatttgttcttaacgataagctttaaagtg

SEQ ID NO: 1027928 - DNA, 33 bp, Homo sapien
gcatatttgttcttaatgataagctttaaagtg

SEQ ID NO: 1027929 - DNA, 33 bp, Homo sapien
aaaacagaagctactgacaacacgtactagtga

SEQ ID NO: 1027930 - DNA, 33 bp, Homo sapien
aaaacagaagctactggcaacacgtactagtga

SEQ ID NO: 1027931 - DNA, 33 bp, Homo sapien
attactgcccggggcagatgaagaactgttttt

SEQ ID NO: 1027932 - DNA, 33 bp, Homo sapien
attactgcccggggcatatgaagaactgttttt

SEQ ID NO: 1027933 - DNA, 33 bp, Homo sapien
atcagtgaatgctacaacctggccccatcatgc

SEQ ID NO: 1027934 - DNA, 33 bp, Homo sapien
atcagtgaatgctacagcctggccccatcatgc

SEQ ID NO: 1027935 - DNA, 33 bp, Homo sapien
ggtctcctgctgaaaccctgtggagtagcctca

SEQ ID NO: 1027936 - DNA, 33 bp, Homo sapien
ggtctcctgctgaaactctgtggagtagcctca

SEQ ID NO: 1027937 - DNA, 33 bp, Homo sapien
cttgtaccatgatcacaagtgaaagacctcacc

SEQ ID NO: 1027938 - DNA, 33 bp, Homo sapien
cttgtaccatgatcacgagtgaaagacctcacc

SEQ ID NO: 1027939 - DNA, 33 bp, Homo sapien
gagcgagaagtaccacagccttgtaccatgatc

SEQ ID NO: 1027940 - DNA, 33 bp, Homo sapien
gagcgagaagtaccacggccttgtaccatgatc

SEQ ID NO: 1027941 - DNA, 33 bp, Homo sapien
agcaactcttcctcaaaatcctcgaagctcagt

SEQ ID NO: 1027942 - DNA, 33 bp, Homo sapien
agcaactcttcctcaacatcctcgaagctcagt

SEQ ID NO: 1027943 - DNA, 33 bp, Homo sapien
ttctttctacgtttcacccactgccttcctcgt

SEQ ID NO: 1027944 - DNA, 33 bp, Homo sapien
ttctttctacgtttcatccactgccttcctcgt

SEQ ID NO: 1027945 - DNA, 33 bp, Homo sapien
aatcttccatgaatacaggatctcagaatcact

SEQ ID NO: 1027946 - DNA, 33 bp, Homo sapien
aatcttccatgaatacgggatctcagaatcact

SEQ ID NO: 1027947 - DNA, 33 bp, Homo sapien
gaacaattcctcgatactagctggtctcttggt

SEQ ID NO: 1027948 - DNA, 33 bp, Homo sapien
gaacaattcctcgatattagctggtctcttggt

SEQ ID NO: 1027949 - DNA, 33 bp, Homo sapien
gggcaggttccaggcaatctggtttctcctttc

SEQ ID NO: 1027950 - DNA, 33 bp, Homo sapien
gggcaggttccaggcagtctggtttctcctttc

SEQ ID NO: 1027951 - DNA, 33 bp, Homo sapien
agcctgtactctgagacggggattttgtgcttg

SEQ ID NO: 1027952 - DNA, 33 bp, Homo sapien
agcctgtactctgagatggggattttgtgcttg

SEQ ID NO: 1027953 - DNA, 33 bp, Homo sapien
tagagtttctaatgccccaggtatgcttctttt

SEQ ID NO: 1027954 - DNA, 33 bp, Homo sapien
tagagtttctaatgcctcaggtatgcttctttt

SEQ ID NO: 1027955 - DNA, 33 bp, Homo sapien
tgaaatttcgtgcctactaaacacaaactcccc

SEQ ID NO: 1027956 - DNA, 33 bp, Homo sapien
tgaaatttcgtgcctattaaacacaaactcccc

SEQ ID NO: 1027957 - DNA, 33 bp, Homo sapien
cttttttatagaacctaaaacaagtgctgacct

SEQ ID NO: 1027958 - DNA, 33 bp, Homo sapien
cttttttatagaacctcaaacaagtgctgacct

SEQ ID NO: 1027959 - DNA, 33 bp, Homo sapien
cactttgcttttatgtaaagatgctctgtcaag

SEQ ID NO: 1027960 - DNA, 33 bp, Homo sapien
cactttgcttttatgtgaagatgctctgtcaag

SEQ ID NO: 1027961 - DNA, 33 bp, Homo sapien
agtggtgtgttcgtgcccaatggttgatcagtg

SEQ ID NO: 1027962 - DNA, 33 bp, Homo sapien
agtggtgtgttcgtgcgcaatggttgatcagtg

SEQ ID NO: 1027963 - DNA, 33 bp, Homo sapien
gcttctaattaatgcagtctgtgggggagatgt

SEQ ID NO: 1027964 - DNA, 33 bp, Homo sapien
gcttctaattaatgcattctgtgggggagatgt

SEQ ID NO: 1027965 - DNA, 33 bp, Homo sapien
atgttttttcatggaggcatcttcttgtgcctg

SEQ ID NO: 1027966 - DNA, 33 bp, Homo sapien
atgttttttcatggagtcatcttcttgtgcctg

SEQ ID NO: 1027967 - DNA, 33 bp, Homo sapien
agtcatcctagcttgacacagtggcaaagccat

SEQ ID NO: 1027968 - DNA, 33 bp, Homo sapien
agtcatcctagcttgatacagtggcaaagccat

SEQ ID NO: 1027969 - DNA, 33 bp, Homo sapien
tttttttcaattcaggaaaatcagctgcaggaa

SEQ ID NO: 1027970 - DNA, 33 bp, Homo sapien
tttttttcaattcagggaaatcagctgcaggaa

SEQ ID NO: 1027971 - DNA, 33 bp, Homo sapien
atcccaatagtgattaaattgcccctgtaaaga

SEQ ID NO: 1027972 - DNA, 33 bp, Homo sapien
atcccaatagtgattagattgcccctgtaaaga

SEQ ID NO: 1027973 - DNA, 33 bp, Homo sapien
ttagatagctatcgcggaacttatctgagttct

SEQ ID NO: 1027974 - DNA, 33 bp, Homo sapien
ttagatagctatcgcgtaacttatctgagttct

SEQ ID NO: 1027975 - DNA, 33 bp, Homo sapien
ggcttgctaattcttaaaactttgacaagcaag

SEQ ID NO: 1027976 - DNA, 33 bp, Homo sapien
ggcttgctaattcttacaactttgacaagcaag

SEQ ID NO: 1027977 - DNA, 33 bp, Homo sapien
ttgcatgaattcaaagaagcctcaaatttctca

SEQ ID NO: 1027978 - DNA, 33 bp, Homo sapien
ttgcatgaattcaaaggagcctcaaatttctca

SEQ ID NO: 1027979 - DNA, 33 bp, Homo sapien
aatactgaagtattgacggtgaaggaaagcaca

SEQ ID NO: 1027980 - DNA, 33 bp, Homo sapien
aatactgaagtattgatggtgaaggaaagcaca

SEQ ID NO: 1027981 - DNA, 33 bp, Homo sapien
atatgctgactacctacctgtttaaattgtttc

SEQ ID NO: 1027982 - DNA, 33 bp, Homo sapien
atatgctgactacctatctgtttaaattgtttc

SEQ ID NO: 1027983 - DNA, 33 bp, Homo sapien
tgtttagattgtatcaagttatgctttcccaac

SEQ ID NO: 1027984 - DNA, 33 bp, Homo sapien
tgtttagattgtatcaggttatgctttcccaac

SEQ ID NO: 1027985 - DNA, 33 bp, Homo sapien
ctcatcccatcagcacgcatggactcacttttc

SEQ ID NO: 1027986 - DNA, 33 bp, Homo sapien
ctcatcccatcagcactcatggactcacttttc

SEQ ID NO: 1027987 - DNA, 33 bp, Homo sapien
tctacttcttgcagaggaaagcaccttaaacat

SEQ ID NO: 1027988 - DNA, 33 bp, Homo sapien
tctacttcttgcagagtaaagcaccttaaacat

SEQ ID NO: 1027989 - DNA, 33 bp, Homo sapien
aaactatgtgatagcaagttgttgttttaaacc

SEQ ID NO: 1027990 - DNA, 33 bp, Homo sapien
aaactatgtgatagcaggttgttgttttaaacc

SEQ ID NO: 1027991 - DNA, 33 bp, Homo sapien
cccagtccaggaaatccagtttctgttaactgg

SEQ ID NO: 1027992 - DNA, 33 bp, Homo sapien
cccagtccaggaaatctagtttctgttaactgg

SEQ ID NO: 1027993 - DNA, 33 bp, Homo sapien
agccagtttggttctccaatcctaaatgtctcc

SEQ ID NO: 1027994 - DNA, 33 bp, Homo sapien
agccagtttggttctctaatcctaaatgtctcc

SEQ ID NO: 1027995 - DNA, 33 bp, Homo sapien
agcattactttcaaccgcccacctctgactgtc

SEQ ID NO: 1027996 - DNA, 33 bp, Homo sapien
agcattactttcaacctcccacctctgactgtc

SEQ ID NO: 1027997 - DNA, 33 bp, Homo sapien
agttctgtgcctgctcaaccaatagaatctgaa

SEQ ID NO: 1027998 - DNA, 33 bp, Homo sapien
agttctgtgcctgctcgaccaatagaatctgaa

SEQ ID NO: 1027999 - DNA, 33 bp, Homo sapien
tttcatttccttcttaaggactacacatatgca

SEQ ID NO: 1028000 - DNA, 33 bp, Homo sapien
tttcatttccttcttagggactacacatatgca

SEQ ID NO: 1028001 - DNA, 33 bp, Homo sapien
aacatggctaggatataagcatctggcacatgg

SEQ ID NO: 1028002 - DNA, 33 bp, Homo sapien
aacatggctaggatatgagcatctggcacatgg

SEQ ID NO: 1028003 - DNA, 33 bp, Homo sapien
ctatcctggtgtatacagcgtgaaggagtgagg

SEQ ID NO: 1028004 - DNA, 33 bp, Homo sapien
ctatcctggtgtatacggcgtgaaggagtgagg

SEQ ID NO: 1028005 - DNA, 33 bp, Homo sapien
agagagctggaaaataacatggttctttctcct

SEQ ID NO: 1028006 - DNA, 33 bp, Homo sapien
agagagctggaaaataccatggttctttctcct

SEQ ID NO: 1028007 - DNA, 33 bp, Homo sapien
tggtgaaaacagcaaacgttcattagtattcat

SEQ ID NO: 1028008 - DNA, 33 bp, Homo sapien
tggtgaaaacagcaaatgttcattagtattcat

SEQ ID NO: 1028009 - DNA, 33 bp, Homo sapien
accccaacgccaaagaacctgctgcacacccct

SEQ ID NO: 1028010 - DNA, 33 bp, Homo sapien
accccaacgccaaagagcctgctgcacacccct

SEQ ID NO: 1028011 - DNA, 33 bp, Homo sapien
actcaaattcacaataaatggtctgataagggt

SEQ ID NO: 1028012 - DNA, 33 bp, Homo sapien
actcaaattcacaatatatggtctgataagggt

SEQ ID NO: 1028013 - DNA, 33 bp, Homo sapien
ttgggaagggaagacacgacaggagcaatagga

SEQ ID NO: 1028014 - DNA, 33 bp, Homo sapien
ttgggaagggaagacatgacaggagcaatagga

SEQ ID NO: 1028015 - DNA, 33 bp, Homo sapien
cctcttcctgccttgaactggaacttcccacca

SEQ ID NO: 1028016 - DNA, 33 bp, Homo sapien
cctcttcctgccttgagctggaacttcccacca

SEQ ID NO: 1028017 - DNA, 33 bp, Homo sapien
taaaatcatgaaataaagaagtgaacatcacag

SEQ ID NO: 1028018 - DNA, 33 bp, Homo sapien
taaaatcatgaaataaggaagtgaacatcacag

SEQ ID NO: 1028019 - DNA, 33 bp, Homo sapien
gatctcagaggtcagcaaagttagtttggccta

SEQ ID NO: 1028020 - DNA, 33 bp, Homo sapien
gatctcagaggtcagcgaagttagtttggccta

SEQ ID NO: 1028021 - DNA, 33 bp, Homo sapien
ggtcaaactaaatcacaactttccacactgata

SEQ ID NO: 1028022 - DNA, 33 bp, Homo sapien
ggtcaaactaaatcacgactttccacactgata

SEQ ID NO: 1028023 - DNA, 33 bp, Homo sapien
tcccctgacaatcaaacaacggggctttgttaa

SEQ ID NO: 1028024 - DNA, 33 bp, Homo sapien
tcccctgacaatcaaataacggggctttgttaa

SEQ ID NO: 1028025 - DNA, 33 bp, Homo sapien
cagagacacaatgtccaagatccagatttcaaa

SEQ ID NO: 1028026 - DNA, 33 bp, Homo sapien
cagagacacaatgtccgagatccagatttcaaa

SEQ ID NO: 1028027 - DNA, 33 bp, Homo sapien
actccccaaatccatacagtcatggagggacct

SEQ ID NO: 1028028 - DNA, 33 bp, Homo sapien
actccccaaatccatatagtcatggagggacct

SEQ ID NO: 1028029 - DNA, 33 bp, Homo sapien
aaaggaaaggaatcagaaccagaattcacctgc

SEQ ID NO: 1028030 - DNA, 33 bp, Homo sapien
aaaggaaaggaatcaggaccagaattcacctgc

SEQ ID NO: 1028031 - DNA, 33 bp, Homo sapien
cttttaagcggatctcccctattctcttcttct

SEQ ID NO: 1028032 - DNA, 33 bp, Homo sapien
cttttaagcggatctctcctattctcttcttct

SEQ ID NO: 1028033 - DNA, 33 bp, Homo sapien
actctgcccaggatcacggaaacccttcttact

SEQ ID NO: 1028034 - DNA, 33 bp, Homo sapien
actctgcccaggatcatggaaacccttcttact

SEQ ID NO: 1028035 - DNA, 33 bp, Homo sapien
ctcctccttaccaacaaggctcatggactcaat

SEQ ID NO: 1028036 - DNA, 33 bp, Homo sapien
ctcctccttaccaacagggctcatggactcaat

SEQ ID NO: 1028037 - DNA, 33 bp, Homo sapien
ttgaaatgcacagtaactaccaggagctggtat

SEQ ID NO: 1028038 - DNA, 33 bp, Homo sapien
ttgaaatgcacagtaattaccaggagctggtat

SEQ ID NO: 1028039 - DNA, 33 bp, Homo sapien
cagtaaagattctcatcaggtgccaaattctag

SEQ ID NO: 1028040 - DNA, 33 bp, Homo sapien
cagtaaagattctcattaggtgccaaattctag

SEQ ID NO: 1028041 - DNA, 33 bp, Homo sapien
atgctaagcgcagtgcggacaacaggaaaatct

SEQ ID NO: 1028042 - DNA, 33 bp, Homo sapien
atgctaagcgcagtgctgacaacaggaaaatct

SEQ ID NO: 1028043 - DNA, 33 bp, Homo sapien
ctcctctccgcgggaacaggaatggcttcttca

SEQ ID NO: 1028044 - DNA, 33 bp, Homo sapien
ctcctctccgcgggaataggaatggcttcttca

SEQ ID NO: 1028045 - DNA, 33 bp, Homo sapien
acacggagtcaacctacgcgcccatcaatggca

SEQ ID NO: 1028046 - DNA, 33 bp, Homo sapien
acacggagtcaacctaggcgcccatcaatggca

SEQ ID NO: 1028047 - DNA, 33 bp, Homo sapien
accccactttcagcatcaggcagattatacaga

SEQ ID NO: 1028048 - DNA, 33 bp, Homo sapien
accccactttcagcattaggcagattatacaga

SEQ ID NO: 1028049 - DNA, 33 bp, Homo sapien
cccagcatggccaacgacaggataagcctatct

SEQ ID NO: 1028050 - DNA, 33 bp, Homo sapien
cccagcatggccaacgtcaggataagcctatct

SEQ ID NO: 1028051 - DNA, 33 bp, Homo sapien
ttcttcctttcttttcccagggcactaggataa

SEQ ID NO: 1028052 - DNA, 33 bp, Homo sapien
ttcttcctttcttttctcagggcactaggataa

SEQ ID NO: 1028053 - DNA, 33 bp, Homo sapien
caaagtcgggccacacaatgtagttcctgctgc

SEQ ID NO: 1028054 - DNA, 33 bp, Homo sapien
caaagtcgggccacaccatgtagttcctgctgc

SEQ ID NO: 1028055 - DNA, 33 bp, Homo sapien
tctgcaaattagatacagaaggcaggtctggag

SEQ ID NO: 1028056 - DNA, 33 bp, Homo sapien
tctgcaaattagatacggaaggcaggtctggag

SEQ ID NO: 1028057 - DNA, 33 bp, Homo sapien
ggcctgatgccggcaacagaggctgagcagatg

SEQ ID NO: 1028058 - DNA, 33 bp, Homo sapien
ggcctgatgccggcaatagaggctgagcagatg

SEQ ID NO: 1028059 - DNA, 33 bp, Homo sapien
cttaaggatcactcaactcactgccccatcttg

SEQ ID NO: 1028060 - DNA, 33 bp, Homo sapien
cttaaggatcactcaattcactgccccatcttg

SEQ ID NO: 1028061 - DNA, 33 bp, Homo sapien
gggcacctctgacaggaagagttaaggagcagt

SEQ ID NO: 1028062 - DNA, 33 bp, Homo sapien
gggcacctctgacagggagagttaaggagcagt

SEQ ID NO: 1028063 - DNA, 33 bp, Homo sapien
cctccttgcactcatacctgggatggctgagct

SEQ ID NO: 1028064 - DNA, 33 bp, Homo sapien
cctccttgcactcatagctgggatggctgagct

SEQ ID NO: 1028065 - DNA, 33 bp, Homo sapien
agggccataagcatgacctggagctatgccaac

SEQ ID NO: 1028066 - DNA, 33 bp, Homo sapien
agggccataagcatgatctggagctatgccaac

SEQ ID NO: 1028067 - DNA, 33 bp, Homo sapien
ttggagggggcaaacaaggaaaccatagcagta

SEQ ID NO: 1028068 - DNA, 33 bp, Homo sapien
ttggagggggcaaacacggaaaccatagcagta

SEQ ID NO: 1028069 - DNA, 33 bp, Homo sapien
aacttctcaacagccaagactattctttctggg

SEQ ID NO: 1028070 - DNA, 33 bp, Homo sapien
aacttctcaacagccaggactattctttctggg

SEQ ID NO: 1028071 - DNA, 33 bp, Homo sapien
ggatgtggaggaaagaaagtctcatttatcgct

SEQ ID NO: 1028072 - DNA, 33 bp, Homo sapien
ggatgtggaggaaagacagtctcatttatcgct

SEQ ID NO: 1028073 - DNA, 33 bp, Homo sapien
aatatatgtagccaaaaagtcagaaaaaataaa

SEQ ID NO: 1028074 - DNA, 33 bp, Homo sapien
aatatatgtagccaaagagtcagaaaaaataaa

SEQ ID NO: 1028075 - DNA, 33 bp, Homo sapien
tttccttcctttctaacgtcacagaatgttcta

SEQ ID NO: 1028076 - DNA, 33 bp, Homo sapien
tttccttcctttctaaggtcacagaatgttcta

SEQ ID NO: 1028077 - DNA, 33 bp, Homo sapien
attatatcaacactcacggtatcttatttaatt

SEQ ID NO: 1028078 - DNA, 33 bp, Homo sapien
attatatcaacactcagggtatcttatttaatt

SEQ ID NO: 1028079 - DNA, 33 bp, Homo sapien
atactaaacgttgataaccataattacggaata

SEQ ID NO: 1028080 - DNA, 33 bp, Homo sapien
atactaaacgttgatagccataattacggaata

SEQ ID NO: 1028081 - DNA, 33 bp, Homo sapien
cctgtgccttcagccagtgctgattcctccttc

SEQ ID NO: 1028082 - DNA, 33 bp, Homo sapien
cctgtgccttcagccattgctgattcctccttc

SEQ ID NO: 1028083 - DNA, 33 bp, Homo sapien
agttgtttaaattcctgacagagtcaatattag

SEQ ID NO: 1028084 - DNA, 33 bp, Homo sapien
agttgtttaaattccttacagagtcaatattag

SEQ ID NO: 1028085 - DNA, 33 bp, Homo sapien
aatgaatcagtcgtcaataattaatgaagctcc

SEQ ID NO: 1028086 - DNA, 33 bp, Homo sapien
aatgaatcagtcgtcagtaattaatgaagctcc

SEQ ID NO: 1028087 - DNA, 33 bp, Homo sapien
accttgtttttggctaatacacagcaggaggtg

SEQ ID NO: 1028088 - DNA, 33 bp, Homo sapien
accttgtttttggctagtacacagcaggaggtg

SEQ ID NO: 1028089 - DNA, 33 bp, Homo sapien
aatatttgggttcgtaaatttcacatagtttat

SEQ ID NO: 1028090 - DNA, 33 bp, Homo sapien
aatatttgggttcgtagatttcacatagtttat

SEQ ID NO: 1028091 - DNA, 33 bp, Homo sapien
ctacttcctcttctccagatttcataagaaaaa

SEQ ID NO: 1028092 - DNA, 33 bp, Homo sapien
ctacttcctcttctccggatttcataagaaaaa

SEQ ID NO: 1028093 - DNA, 33 bp, Homo sapien
catggaaattacagcaacaaattccatcacatt

SEQ ID NO: 1028094 - DNA, 33 bp, Homo sapien
catggaaattacagcagcaaattccatcacatt

SEQ ID NO: 1028095 - DNA, 33 bp, Homo sapien
caacagatgactggatcaattgtactcttcatc

SEQ ID NO: 1028096 - DNA, 33 bp, Homo sapien
caacagatgactggatgaattgtactcttcatc

SEQ ID NO: 1028097 - DNA, 33 bp, Homo sapien
gcactgacagtcaaaacgttctgtgttgctctg

SEQ ID NO: 1028098 - DNA, 33 bp, Homo sapien
gcactgacagtcaaaatgttctgtgttgctctg

SEQ ID NO: 1028099 - DNA, 33 bp, Homo sapien
agaatacgaaggcatacatgtgtttgttctcag

SEQ ID NO: 1028100 - DNA, 33 bp, Homo sapien
agaatacgaaggcatatatgtgtttgttctcag

SEQ ID NO: 1028101 - DNA, 33 bp, Homo sapien
cccatgagccaggttaacaaattggtgaaatta

SEQ ID NO: 1028102 - DNA, 33 bp, Homo sapien
cccatgagccaggttaccaaattggtgaaatta

SEQ ID NO: 1028103 - DNA, 33 bp, Homo sapien
cacaatagccaggatacagagtcaactttagtg

SEQ ID NO: 1028104 - DNA, 33 bp, Homo sapien
cacaatagccaggatagagagtcaactttagtg

SEQ ID NO: 1028105 - DNA, 33 bp, Homo sapien
tttagtgttcatgaacagatgaacggatgaaga

SEQ ID NO: 1028106 - DNA, 33 bp, Homo sapien
tttagtgttcatgaactgatgaacggatgaaga

SEQ ID NO: 1028107 - DNA, 33 bp, Homo sapien
tgacaattctgcctaaaatcttcagtggtatgt

SEQ ID NO: 1028108 - DNA, 33 bp, Homo sapien
tgacaattctgcctaacatcttcagtggtatgt

SEQ ID NO: 1028109 - DNA, 33 bp, Homo sapien
ggtcttagaacagagacggacagatagggacac

SEQ ID NO: 1028110 - DNA, 33 bp, Homo sapien
ggtcttagaacagagatggacagatagggacac

SEQ ID NO: 1028111 - DNA, 33 bp, Homo sapien
acagatagggacacgacgctgtaaacatgacct

SEQ ID NO: 1028112 - DNA, 33 bp, Homo sapien
acagatagggacacgaggctgtaaacatgacct

SEQ ID NO: 1028113 - DNA, 33 bp, Homo sapien
agtgctgaatgggttaagagtttcagttttggt

SEQ ID NO: 1028114 - DNA, 33 bp, Homo sapien
agtgctgaatgggttaggagtttcagttttggt

SEQ ID NO: 1028115 - DNA, 33 bp, Homo sapien
tcatataattgacgcaactcctgattagaaacc

SEQ ID NO: 1028116 - DNA, 33 bp, Homo sapien
tcatataattgacgcacctcctgattagaaacc

SEQ ID NO: 1028117 - DNA, 33 bp, Homo sapien
aaattcatgctgagcccaaacttcctagagaca

SEQ ID NO: 1028118 - DNA, 33 bp, Homo sapien
aaattcatgctgagcctaaacttcctagagaca

SEQ ID NO: 1028119 - DNA, 33 bp, Homo sapien
ccactggctgtgcatccagtcagggagcaggag

SEQ ID NO: 1028120 - DNA, 33 bp, Homo sapien
ccactggctgtgcatctagtcagggagcaggag

SEQ ID NO: 1028121 - DNA, 33 bp, Homo sapien
ggagctaccaaacaacagttgttcatatagact

SEQ ID NO: 1028122 - DNA, 33 bp, Homo sapien
ggagctaccaaacaacggttgttcatatagact

SEQ ID NO: 1028123 - DNA, 33 bp, Homo sapien
actactaaaccagaccaaatttcaaaaacaact

SEQ ID NO: 1028124 - DNA, 33 bp, Homo sapien
actactaaaccagaccgaatttcaaaaacaact

SEQ ID NO: 1028125 - DNA, 33 bp, Homo sapien
gatttctccccatagaataggaaaacactgtgt

SEQ ID NO: 1028126 - DNA, 33 bp, Homo sapien
gatttctccccatagagtaggaaaacactgtgt

SEQ ID NO: 1028127 - DNA, 33 bp, Homo sapien
acagccaagtccaggcagaaaatgtgaaagatg

SEQ ID NO: 1028128 - DNA, 33 bp, Homo sapien
acagccaagtccaggcggaaaatgtgaaagatg

SEQ ID NO: 1028129 - DNA, 33 bp, Homo sapien
aggagcaatttgtagagattgtagctgaggttt

SEQ ID NO: 1028130 - DNA, 33 bp, Homo sapien
aggagcaatttgtagatattgtagctgaggttt

SEQ ID NO: 1028131 - DNA, 33 bp, Homo sapien
ccctccagctgacactaaggtgggctaacgttt

SEQ ID NO: 1028132 - DNA, 33 bp, Homo sapien
ccctccagctgacactgaggtgggctaacgttt

SEQ ID NO: 1028133 - DNA, 33 bp, Homo sapien
gggcactgcaggggagaacagcgctcaggctgg

SEQ ID NO: 1028134 - DNA, 33 bp, Homo sapien
gggcactgcaggggagcacagcgctcaggctgg

SEQ ID NO: 1028135 - DNA, 33 bp, Homo sapien
aacttttacttgatagaacttagcagttgttat

SEQ ID NO: 1028136 - DNA, 33 bp, Homo sapien
aacttttacttgatagcacttagcagttgttat

SEQ ID NO: 1028137 - DNA, 33 bp, Homo sapien
tcacctccatcttcggaagcctggctgggatca

SEQ ID NO: 1028138 - DNA, 33 bp, Homo sapien
tcacctccatcttcgggagcctggctgggatca

SEQ ID NO: 1028139 - DNA, 33 bp, Homo sapien
gcttgactacactaccaaacgtcaaaacatcaa

SEQ ID NO: 1028140 - DNA, 33 bp, Homo sapien
gcttgactacactaccgaacgtcaaaacatcaa

SEQ ID NO: 1028141 - DNA, 33 bp, Homo sapien
gtaaaaaccacgcagccgagtccaggcagatgt

SEQ ID NO: 1028142 - DNA, 33 bp, Homo sapien
gtaaaaaccacgcagctgagtccaggcagatgt

SEQ ID NO: 1028143 - DNA, 33 bp, Homo sapien
atgcatcgacactgagaaatacatgtatatatg

SEQ ID NO: 1028144 - DNA, 33 bp, Homo sapien
atgcatcgacactgaggaatacatgtatatatg

SEQ ID NO: 1028145 - DNA, 33 bp, Homo sapien
ttccagaacctaggacccagtgcttccaaagtc

SEQ ID NO: 1028146 - DNA, 33 bp, Homo sapien
ttccagaacctaggactcagtgcttccaaagtc

SEQ ID NO: 1028147 - DNA, 33 bp, Homo sapien
cacaaaggtgacttccacgcccaggagaatgtg

SEQ ID NO: 1028148 - DNA, 33 bp, Homo sapien
cacaaaggtgacttccgcgcccaggagaatgtg

SEQ ID NO: 1028149 - DNA, 33 bp, Homo sapien
ttttttagaataagtacaggtacacattgatct

SEQ ID NO: 1028150 - DNA, 33 bp, Homo sapien
ttttttagaataagtagaggtacacattgatct

SEQ ID NO: 1028151 - DNA, 33 bp, Homo sapien
actattttgtagtttcaacgtatatctcctgca

SEQ ID NO: 1028152 - DNA, 33 bp, Homo sapien
actattttgtagtttcgacgtatatctcctgca

SEQ ID NO: 1028153 - DNA, 33 bp, Homo sapien
tgaaaaggtgttcaaagtcatcaatcattaggg

SEQ ID NO: 1028154 - DNA, 33 bp, Homo sapien
tgaaaaggtgttcaaattcatcaatcattaggg

SEQ ID NO: 1028155 - DNA, 33 bp, Homo sapien
cccatgaacctgtgccgcactcttttcagtgtt

SEQ ID NO: 1028156 - DNA, 33 bp, Homo sapien
cccatgaacctgtgcctcactcttttcagtgtt

SEQ ID NO: 1028157 - DNA, 33 bp, Homo sapien
caggcacatggtgccaactgttagtggatctac

SEQ ID NO: 1028158 - DNA, 33 bp, Homo sapien
caggcacatggtgccagctgttagtggatctac

SEQ ID NO: 1028159 - DNA, 33 bp, Homo sapien
gagacaattcacaatccccaaaatgtgtctcct

SEQ ID NO: 1028160 - DNA, 33 bp, Homo sapien
gagacaattcacaatctccaaaatgtgtctcct

SEQ ID NO: 1028161 - DNA, 33 bp, Homo sapien
agtgaaatggcttatgaagaaacagctcttccc

SEQ ID NO: 1028162 - DNA, 33 bp, Homo sapien
agtgaaatggcttatggagaaacagctcttccc

SEQ ID NO: 1028163 - DNA, 33 bp, Homo sapien
atctgttctttaagccccccactgtggcacttt

SEQ ID NO: 1028164 - DNA, 33 bp, Homo sapien
atctgttctttaagcctcccactgtggcacttt

SEQ ID NO: 1028165 - DNA, 33 bp, Homo sapien
tccttagctttgcagacgggcgtccttgccctg

SEQ ID NO: 1028166 - DNA, 33 bp, Homo sapien
tccttagctttgcagatgggcgtccttgccctg

SEQ ID NO: 1028167 - DNA, 33 bp, Homo sapien
ctccggtgggcaatccacagtgcaaggccacca

SEQ ID NO: 1028168 - DNA, 33 bp, Homo sapien
ctccggtgggcaatccgcagtgcaaggccacca

SEQ ID NO: 1028169 - DNA, 33 bp, Homo sapien
aatgagtgaacagagcaaatcagacaagaagga

SEQ ID NO: 1028170 - DNA, 33 bp, Homo sapien
aatgagtgaacagagcgaatcagacaagaagga

SEQ ID NO: 1028171 - DNA, 33 bp, Homo sapien
acaggtaataacgaaccaccaaggttaattgga

SEQ ID NO: 1028172 - DNA, 33 bp, Homo sapien
acaggtaataacgaactaccaaggttaattgga

SEQ ID NO: 1028173 - DNA, 33 bp, Homo sapien
taaatacagtgaaagcaaacttttctgctgtta

SEQ ID NO: 1028174 - DNA, 33 bp, Homo sapien
taaatacagtgaaagcgaacttttctgctgtta

SEQ ID NO: 1028175 - DNA, 33 bp, Homo sapien
aaggtgcctgttaacaccaagagtaaaccctgt

SEQ ID NO: 1028176 - DNA, 33 bp, Homo sapien
aaggtgcctgttaacatcaagagtaaaccctgt

SEQ ID NO: 1028177 - DNA, 33 bp, Homo sapien
ataaggagaaaggccaatatctttccgaggggc

SEQ ID NO: 1028178 - DNA, 33 bp, Homo sapien
ataaggagaaaggccagtatctttccgaggggc

SEQ ID NO: 1028179 - DNA, 33 bp, Homo sapien
gtgaatacttttccaaataaggaagggaagggg

SEQ ID NO: 1028180 - DNA, 33 bp, Homo sapien
gtgaatacttttccaagtaaggaagggaagggg

SEQ ID NO: 1028181 - DNA, 33 bp, Homo sapien
gctgaggttgcatggacattgcagtgagtccat

SEQ ID NO: 1028182 - DNA, 33 bp, Homo sapien
gctgaggttgcatggatattgcagtgagtccat

SEQ ID NO: 1028183 - DNA, 33 bp, Homo sapien
ggaggttaggctcctaccctctcacagtcactg

SEQ ID NO: 1028184 - DNA, 33 bp, Homo sapien
ggaggttaggctcctatcctctcacagtcactg

SEQ ID NO: 1028185 - DNA, 33 bp, Homo sapien
gtctcctctgagagaacccaaagtagctcctga

SEQ ID NO: 1028186 - DNA, 33 bp, Homo sapien
gtctcctctgagagaatccaaagtagctcctga

SEQ ID NO: 1028187 - DNA, 33 bp, Homo sapien
gcaggagagaaggtagcccagatggttctgcac

SEQ ID NO: 1028188 - DNA, 33 bp, Homo sapien
gcaggagagaaggtagtccagatggttctgcac

SEQ ID NO: 1028189 - DNA, 33 bp, Homo sapien
gcagaggttgcagcgcaaatgactcaggtgttg

SEQ ID NO: 1028190 - DNA, 33 bp, Homo sapien
gcagaggttgcagcgcgaatgactcaggtgttg

SEQ ID NO: 1028191 - DNA, 33 bp, Homo sapien
ttttaaaatttgggtacaggcagaaagaggagg

SEQ ID NO: 1028192 - DNA, 33 bp, Homo sapien
ttttaaaatttgggtagaggcagaaagaggagg

SEQ ID NO: 1028193 - DNA, 33 bp, Homo sapien
ggctagataaaataaggctgagatccactgggc

SEQ ID NO: 1028194 - DNA, 33 bp, Homo sapien
ggctagataaaataagtctgagatccactgggc

SEQ ID NO: 1028195 - DNA, 33 bp, Homo sapien
actaggccatggtaaaactcttcaaagagaaaa

SEQ ID NO: 1028196 - DNA, 33 bp, Homo sapien
actaggccatggtaaagctcttcaaagagaaaa

SEQ ID NO: 1028197 - DNA, 33 bp, Homo sapien
tatagctcagaaacagcagaatgaggtactgtt

SEQ ID NO: 1028198 - DNA, 33 bp, Homo sapien
tatagctcagaaacaggagaatgaggtactgtt

SEQ ID NO: 1028199 - DNA, 33 bp, Homo sapien
aatgctctgctggggtcaattctcatcataggc

SEQ ID NO: 1028200 - DNA, 33 bp, Homo sapien
aatgctctgctggggttaattctcatcataggc

SEQ ID NO: 1028201 - DNA, 33 bp, Homo sapien
aaataaatcctagaaaagaatgtgtgtattcag

SEQ ID NO: 1028202 - DNA, 33 bp, Homo sapien
aaataaatcctagaaaggaatgtgtgtattcag

SEQ ID NO: 1028203 - DNA, 33 bp, Homo sapien
catcctactttagcccggcctgaatacacacat

SEQ ID NO: 1028204 - DNA, 33 bp, Homo sapien
catcctactttagccctgcctgaatacacacat

SEQ ID NO: 1028205 - DNA, 33 bp, Homo sapien
acccgcttcatataaagaaacttgttaatgggc

SEQ ID NO: 1028206 - DNA, 33 bp, Homo sapien
acccgcttcatataaataaacttgttaatgggc

SEQ ID NO: 1028207 - DNA, 33 bp, Homo sapien
cataacagaggttcaacgagtgaaggaataaaa

SEQ ID NO: 1028208 - DNA, 33 bp, Homo sapien
cataacagaggttcaatgagtgaaggaataaaa

SEQ ID NO: 1028209 - DNA, 33 bp, Homo sapien
aaaaagtcatcgggtaaattgatggagattgca

SEQ ID NO: 1028210 - DNA, 33 bp, Homo sapien
aaaaagtcatcgggtagattgatggagattgca

SEQ ID NO: 1028211 - DNA, 33 bp, Homo sapien
cactgcatattgagccacatttagttttgtcat

SEQ ID NO: 1028212 - DNA, 33 bp, Homo sapien
cactgcatattgagcctcatttagttttgtcat

SEQ ID NO: 1028213 - DNA, 33 bp, Homo sapien
gtgaggcttctgggcaacagtcgctcatctttc

SEQ ID NO: 1028214 - DNA, 33 bp, Homo sapien
gtgaggcttctgggcagcagtcgctcatctttc

SEQ ID NO: 1028215 - DNA, 33 bp, Homo sapien
ttttatgaaccacttcagaaagctttcatcaag

SEQ ID NO: 1028216 - DNA, 33 bp, Homo sapien
ttttatgaaccacttcggaaagctttcatcaag

SEQ ID NO: 1028217 - DNA, 33 bp, Homo sapien
tggcactaggtgcctgaaacgagtcacttgaga

SEQ ID NO: 1028218 - DNA, 33 bp, Homo sapien
tggcactaggtgcctgcaacgagtcacttgaga

SEQ ID NO: 1028219 - DNA, 33 bp, Homo sapien
gtgatattggtgaaggcatagacacatagatta

SEQ ID NO: 1028220 - DNA, 33 bp, Homo sapien
gtgatattggtgaaggtatagacacatagatta

SEQ ID NO: 1028221 - DNA, 33 bp, Homo sapien
agaacttccggtattacgttgaatatgagtagt

SEQ ID NO: 1028222 - DNA, 33 bp, Homo sapien
agaacttccggtattatgttgaatatgagtagt

SEQ ID NO: 1028223 - DNA, 33 bp, Homo sapien
aatgaaaaaaaaattaagtctcgctaaagaagt

SEQ ID NO: 1028224 - DNA, 33 bp, Homo sapien
aatgaaaaaaaaattaggtctcgctaaagaagt

SEQ ID NO: 1028225 - DNA, 33 bp, Homo sapien
aagaaccaggaaattgaaaatggaatgagaaga

SEQ ID NO: 1028226 - DNA, 33 bp, Homo sapien
aagaaccaggaaattgcaaatggaatgagaaga

SEQ ID NO: 1028227 - DNA, 33 bp, Homo sapien
ggtgactgactgctagaaaaggagatttaagta

SEQ ID NO: 1028228 - DNA, 33 bp, Homo sapien
ggtgactgactgctaggaaaggagatttaagta

SEQ ID NO: 1028229 - DNA, 33 bp, Homo sapien
tgtggttctaatgacaatagagttttcgaaacc

SEQ ID NO: 1028230 - DNA, 33 bp, Homo sapien
tgtggttctaatgacagtagagttttcgaaacc

SEQ ID NO: 1028231 - DNA, 33 bp, Homo sapien
aataaattctgtcaaaagcctgaatgagcttag

SEQ ID NO: 1028232 - DNA, 33 bp, Homo sapien
aataaattctgtcaaaggcctgaatgagcttag

SEQ ID NO: 1028233 - DNA, 33 bp, Homo sapien
gtgaggcctgtatatgccacatcctcaatgtct

SEQ ID NO: 1028234 - DNA, 33 bp, Homo sapien
gtgaggcctgtatatggcacatcctcaatgtct

SEQ ID NO: 1028235 - DNA, 33 bp, Homo sapien
ctcaggtggaaacgaaggcgccccgtggcaggc

SEQ ID NO: 1028236 - DNA, 33 bp, Homo sapien
ctcaggtggaaacgaatgcgccccgtggcaggc

SEQ ID NO: 1028237 - DNA, 33 bp, Homo sapien
tattattggatagacacatagatgattaaaaag

SEQ ID NO: 1028238 - DNA, 33 bp, Homo sapien
tattattggatagacagatagatgattaaaaag

SEQ ID NO: 1028239 - DNA, 33 bp, Homo sapien
agtataaagcaaagaaaacatagcatgaaacag

SEQ ID NO: 1028240 - DNA, 33 bp, Homo sapien
agtataaagcaaagaagacatagcatgaaacag

SEQ ID NO: 1028241 - DNA, 33 bp, Homo sapien
aaaaaaagttctcttgcagagcagcatattcac

SEQ ID NO: 1028242 - DNA, 33 bp, Homo sapien
aaaaaaagttctcttgtagagcagcatattcac

SEQ ID NO: 1028243 - DNA, 33 bp, Homo sapien
ttcagataattgaagagaaaggctgatacaatt

SEQ ID NO: 1028244 - DNA, 33 bp, Homo sapien
ttcagataattgaagataaaggctgatacaatt

SEQ ID NO: 1028245 - DNA, 33 bp, Homo sapien
tacgctcctctcaagaacacactttcgctttgc

SEQ ID NO: 1028246 - DNA, 33 bp, Homo sapien
tacgctcctctcaagagcacactttcgctttgc

SEQ ID NO: 1028247 - DNA, 33 bp, Homo sapien
ccaagcttgtctaacacgtatattttctctgta

SEQ ID NO: 1028248 - DNA, 33 bp, Homo sapien
ccaagcttgtctaacaggtatattttctctgta

SEQ ID NO: 1028249 - DNA, 33 bp, Homo sapien
ctggtcgcttttcaagaccctgtgagtgccttg

SEQ ID NO: 1028250 - DNA, 33 bp, Homo sapien
ctggtcgcttttcaaggccctgtgagtgccttg

SEQ ID NO: 1028251 - DNA, 33 bp, Homo sapien
agattcaacccaggaaagattgaagtgggtggg

SEQ ID NO: 1028252 - DNA, 33 bp, Homo sapien
agattcaacccaggaaggattgaagtgggtggg

SEQ ID NO: 1028253 - DNA, 33 bp, Homo sapien
cccctccctgtgctgtcaagacggtcgcatcct

SEQ ID NO: 1028254 - DNA, 33 bp, Homo sapien
cccctccctgtgctgtgaagacggtcgcatcct

SEQ ID NO: 1028255 - DNA, 33 bp, Homo sapien
ctgattcatcctacagaacttggaaatgctcag

SEQ ID NO: 1028256 - DNA, 33 bp, Homo sapien
ctgattcatcctacagtacttggaaatgctcag

SEQ ID NO: 1028257 - DNA, 33 bp, Homo sapien
gtttcatcctactccacgtgtattgaaagtatg

SEQ ID NO: 1028258 - DNA, 33 bp, Homo sapien
gtttcatcctactccatgtgtattgaaagtatg

SEQ ID NO: 1028259 - DNA, 33 bp, Homo sapien
aaccttttctctgtgcaaaaactggaataatta

SEQ ID NO: 1028260 - DNA, 33 bp, Homo sapien
aaccttttctctgtgccaaaactggaataatta

SEQ ID NO: 1028261 - DNA, 33 bp, Homo sapien
gactaaccggactcaacgtggcactggatttga

SEQ ID NO: 1028262 - DNA, 33 bp, Homo sapien
gactaaccggactcaatgtggcactggatttga

SEQ ID NO: 1028263 - DNA, 33 bp, Homo sapien
tttcacagaattacaactccatcttgctgttgc

SEQ ID NO: 1028264 - DNA, 33 bp, Homo sapien
tttcacagaattacaagtccatcttgctgttgc

SEQ ID NO: 1028265 - DNA, 33 bp, Homo sapien
caacaggcattgtgcacagcataacaaccaaaa

SEQ ID NO: 1028266 - DNA, 33 bp, Homo sapien
caacaggcattgtgcatagcataacaaccaaaa

SEQ ID NO: 1028267 - DNA, 33 bp, Homo sapien
aaatgtctgcctaggagagtctctgtcctcctt

SEQ ID NO: 1028268 - DNA, 33 bp, Homo sapien
aaatgtctgcctaggatagtctctgtcctcctt

SEQ ID NO: 1028269 - DNA, 33 bp, Homo sapien
aagagggccctcaccaaatgtagtctttcaatc

SEQ ID NO: 1028270 - DNA, 33 bp, Homo sapien
aagagggccctcaccagatgtagtctttcaatc

SEQ ID NO: 1028271 - DNA, 33 bp, Homo sapien
agtacttccttggataaaaaattgcaaatattt

SEQ ID NO: 1028272 - DNA, 33 bp, Homo sapien
agtacttccttggatataaaattgcaaatattt

SEQ ID NO: 1028273 - DNA, 33 bp, Homo sapien
ctaaaattacagatggaataaagcacaggtaaa

SEQ ID NO: 1028274 - DNA, 33 bp, Homo sapien
ctaaaattacagatgggataaagcacaggtaaa

SEQ ID NO: 1028275 - DNA, 33 bp, Homo sapien
tagcttcaggcaactaaatattagactcaaata

SEQ ID NO: 1028276 - DNA, 33 bp, Homo sapien
tagcttcaggcaactacatattagactcaaata

SEQ ID NO: 1028277 - DNA, 33 bp, Homo sapien
cagatttatttttccacgcattccccactgccc

SEQ ID NO: 1028278 - DNA, 33 bp, Homo sapien
cagatttatttttccatgcattccccactgccc

SEQ ID NO: 1028279 - DNA, 33 bp, Homo sapien
tgtgcaaaggctgcacaaccaagacagagacag

SEQ ID NO: 1028280 - DNA, 33 bp, Homo sapien
tgtgcaaaggctgcacgaccaagacagagacag

SEQ ID NO: 1028281 - DNA, 33 bp, Homo sapien
gcccaaggacagcaaacgatgagggcagggagc

SEQ ID NO: 1028282 - DNA, 33 bp, Homo sapien
gcccaaggacagcaaatgatgagggcagggagc

SEQ ID NO: 1028283 - DNA, 33 bp, Homo sapien
gccctcaagacacctgcagtcaagacagggtag

SEQ ID NO: 1028284 - DNA, 33 bp, Homo sapien
gccctcaagacacctgtagtcaagacagggtag

SEQ ID NO: 1028285 - DNA, 33 bp, Homo sapien
tagtgggaacagcttcaccttcactgtgctgat

SEQ ID NO: 1028286 - DNA, 33 bp, Homo sapien
tagtgggaacagcttcgccttcactgtgctgat

SEQ ID NO: 1028287 - DNA, 33 bp, Homo sapien
caaacatcacccttcactcaaccagcctgtacc

SEQ ID NO: 1028288 - DNA, 33 bp, Homo sapien
caaacatcacccttcagtcaaccagcctgtacc

SEQ ID NO: 1028289 - DNA, 33 bp, Homo sapien
aagagagattcagaccaagagagacagacagag

SEQ ID NO: 1028290 - DNA, 33 bp, Homo sapien
aagagagattcagaccgagagagacagacagag

SEQ ID NO: 1028291 - DNA, 33 bp, Homo sapien
tgattttcacaagccccaactatgcaactggac

SEQ ID NO: 1028292 - DNA, 33 bp, Homo sapien
tgattttcacaagcccgaactatgcaactggac

SEQ ID NO: 1028293 - DNA, 33 bp, Homo sapien
tttgtgtgtatcaatcacttgctcctttttatt

SEQ ID NO: 1028294 - DNA, 33 bp, Homo sapien
tttgtgtgtatcaatctcttgctcctttttatt

SEQ ID NO: 1028295 - DNA, 33 bp, Homo sapien
tcaccacaagattcccacattttacattttata

SEQ ID NO: 1028296 - DNA, 33 bp, Homo sapien
tcaccacaagattcccgcattttacattttata

SEQ ID NO: 1028297 - DNA, 33 bp, Homo sapien
agctactcatagacacactcatgtccttagcaa

SEQ ID NO: 1028298 - DNA, 33 bp, Homo sapien
agctactcatagacacgctcatgtccttagcaa

SEQ ID NO: 1028299 - DNA, 33 bp, Homo sapien
gaccatattttttacaatacgtctcattctatc

SEQ ID NO: 1028300 - DNA, 33 bp, Homo sapien
gaccatattttttacactacgtctcattctatc

SEQ ID NO: 1028301 - DNA, 33 bp, Homo sapien
gtttcctttacaactaagagttctactcatgcg

SEQ ID NO: 1028302 - DNA, 33 bp, Homo sapien
gtttcctttacaactacgagttctactcatgcg

SEQ ID NO: 1028303 - DNA, 33 bp, Homo sapien
acctggaaatacataaacctgcctcgtcatcaa

SEQ ID NO: 1028304 - DNA, 33 bp, Homo sapien
acctggaaatacataagcctgcctcgtcatcaa

SEQ ID NO: 1028305 - DNA, 33 bp, Homo sapien
tctgtgagcaggaaaccggctaaccaatcggct

SEQ ID NO: 1028306 - DNA, 33 bp, Homo sapien
tctgtgagcaggaaactggctaaccaatcggct

SEQ ID NO: 1028307 - DNA, 33 bp, Homo sapien
gacagagggacagccacgtgcggacacagggag

SEQ ID NO: 1028308 - DNA, 33 bp, Homo sapien
gacagagggacagccatgtgcggacacagggag

SEQ ID NO: 1028309 - DNA, 33 bp, Homo sapien
agctgtcagaaaacatcagccaaaatgaatata

SEQ ID NO: 1028310 - DNA, 33 bp, Homo sapien
agctgtcagaaaacatgagccaaaatgaatata

SEQ ID NO: 1028311 - DNA, 33 bp, Homo sapien
aaaaatcaatagcaaaccacttaaaatgagagt

SEQ ID NO: 1028312 - DNA, 33 bp, Homo sapien
aaaaatcaatagcaaatcacttaaaatgagagt

SEQ ID NO: 1028313 - DNA, 33 bp, Homo sapien
aaaccctgtatagacacagtgcatatacctgat

SEQ ID NO: 1028314 - DNA, 33 bp, Homo sapien
aaaccctgtatagacatagtgcatatacctgat

SEQ ID NO: 1028315 - DNA, 33 bp, Homo sapien
ctgggccatgcgacacccatcacgtccaagcag

SEQ ID NO: 1028316 - DNA, 33 bp, Homo sapien
ctgggccatgcgacacgcatcacgtccaagcag

SEQ ID NO: 1028317 - DNA, 33 bp, Homo sapien
tccctgcaaacttggccgagggcattttttcac

SEQ ID NO: 1028318 - DNA, 33 bp, Homo sapien
tccctgcaaacttggctgagggcattttttcac

SEQ ID NO: 1028319 - DNA, 33 bp, Homo sapien
tctctcggccacactcgaaggaaggtaggatct

SEQ ID NO: 1028320 - DNA, 33 bp, Homo sapien
tctctcggccacactctaaggaaggtaggatct

SEQ ID NO: 1028321 - DNA, 33 bp, Homo sapien
actggaaaaaagtcacggtaagatctatttatc

SEQ ID NO: 1028322 - DNA, 33 bp, Homo sapien
actggaaaaaagtcactgtaagatctatttatc

SEQ ID NO: 1028323 - DNA, 33 bp, Homo sapien
taatagattgccaaaacgcttcacacctgaagc

SEQ ID NO: 1028324 - DNA, 33 bp, Homo sapien
taatagattgccaaaatgcttcacacctgaagc

SEQ ID NO: 1028325 - DNA, 33 bp, Homo sapien
atgcctcaccaagtccggaaacaacggaaatgc

SEQ ID NO: 1028326 - DNA, 33 bp, Homo sapien
atgcctcaccaagtcctgaaacaacggaaatgc

SEQ ID NO: 1028327 - DNA, 33 bp, Homo sapien
accaccttgggcacacgctctcagggtctccta

SEQ ID NO: 1028328 - DNA, 33 bp, Homo sapien
accaccttgggcacactctctcagggtctccta

SEQ ID NO: 1028329 - DNA, 33 bp, Homo sapien
gagaagctctgaaaacagtcaacagttatcctt

SEQ ID NO: 1028330 - DNA, 33 bp, Homo sapien
gagaagctctgaaaacggtcaacagttatcctt

SEQ ID NO: 1028331 - DNA, 33 bp, Homo sapien
agaaatagcactcgaagattaaattttctttta

SEQ ID NO: 1028332 - DNA, 33 bp, Homo sapien
agaaatagcactcgaatattaaattttctttta

SEQ ID NO: 1028333 - DNA, 33 bp, Homo sapien
accatcaataagccctaagccggtatggaactt

SEQ ID NO: 1028334 - DNA, 33 bp, Homo sapien
accatcaataagccctgagccggtatggaactt

SEQ ID NO: 1028335 - DNA, 33 bp, Homo sapien
cctgtgtcaggttaagcaacagtaattcaaata

SEQ ID NO: 1028336 - DNA, 33 bp, Homo sapien
cctgtgtcaggttaagtaacagtaattcaaata

SEQ ID NO: 1028337 - DNA, 33 bp, Homo sapien
cttgctttattgaggagtagaatttagatacag

SEQ ID NO: 1028338 - DNA, 33 bp, Homo sapien
cttgctttattgaggattagaatttagatacag

SEQ ID NO: 1028339 - DNA, 33 bp, Homo sapien
acagcctgacagaaaccgcttaacggctgggca

SEQ ID NO: 1028340 - DNA, 33 bp, Homo sapien
acagcctgacagaaactgcttaacggctgggca

SEQ ID NO: 1028341 - DNA, 33 bp, Homo sapien
tgtgatggaaacctccacatttgtacttggtca

SEQ ID NO: 1028342 - DNA, 33 bp, Homo sapien
tgtgatggaaacctccgcatttgtacttggtca

SEQ ID NO: 1028343 - DNA, 33 bp, Homo sapien
gagacagggtattaaccgggaaagctcatgtga

SEQ ID NO: 1028344 - DNA, 33 bp, Homo sapien
gagacagggtattaactgggaaagctcatgtga

SEQ ID NO: 1028345 - DNA, 33 bp, Homo sapien
ccttcttttacacaaaaacctcaagactaccac

SEQ ID NO: 1028346 - DNA, 33 bp, Homo sapien
ccttcttttacacaaagacctcaagactaccac

SEQ ID NO: 1028347 - DNA, 33 bp, Homo sapien
gtctctgtttcatttggaggctttccttgagtc

SEQ ID NO: 1028348 - DNA, 33 bp, Homo sapien
gtctctgtttcatttgtaggctttccttgagtc

SEQ ID NO: 1028349 - DNA, 33 bp, Homo sapien
ttacttaattcactaacaattgagctaaaaatt

SEQ ID NO: 1028350 - DNA, 33 bp, Homo sapien
ttacttaattcactaataattgagctaaaaatt

SEQ ID NO: 1028351 - DNA, 33 bp, Homo sapien
ccagacccatgtaaatgagaggattccaagaat

SEQ ID NO: 1028352 - DNA, 33 bp, Homo sapien
ccagacccatgtaaattagaggattccaagaat

SEQ ID NO: 1028353 - DNA, 33 bp, Homo sapien
ggtgtgagccattacgaccatgttagtccatat

SEQ ID NO: 1028354 - DNA, 33 bp, Homo sapien
ggtgtgagccattacggccatgttagtccatat

SEQ ID NO: 1028355 - DNA, 33 bp, Homo sapien
tgactagtcacacttacaatagacacaaatgat

SEQ ID NO: 1028356 - DNA, 33 bp, Homo sapien
tgactagtcacacttagaatagacacaaatgat

SEQ ID NO: 1028357 - DNA, 33 bp, Homo sapien
agacataggaactaggaaagtttctggatattt

SEQ ID NO: 1028358 - DNA, 33 bp, Homo sapien
agacataggaactagggaagtttctggatattt

SEQ ID NO: 1028359 - DNA, 33 bp, Homo sapien
tataagtatactctaaaatgttcctacaacgaa

SEQ ID NO: 1028360 - DNA, 33 bp, Homo sapien
tataagtatactctaagatgttcctacaacgaa

SEQ ID NO: 1028361 - DNA, 33 bp, Homo sapien
ctccaagatccacccaagaatgatagcaggggt

SEQ ID NO: 1028362 - DNA, 33 bp, Homo sapien
ctccaagatccacccacgaatgatagcaggggt

SEQ ID NO: 1028363 - DNA, 33 bp, Homo sapien
ccgagttccaatccaccaggaattcatcttgta

SEQ ID NO: 1028364 - DNA, 33 bp, Homo sapien
ccgagttccaatccacgaggaattcatcttgta

SEQ ID NO: 1028365 - DNA, 33 bp, Homo sapien
aaacaatttttcttgacgtaaggcaaagtattc

SEQ ID NO: 1028366 - DNA, 33 bp, Homo sapien
aaacaatttttcttgatgtaaggcaaagtattc

SEQ ID NO: 1028367 - DNA, 33 bp, Homo sapien
acacaacatgatactacacagggacaacctaca

SEQ ID NO: 1028368 - DNA, 33 bp, Homo sapien
acacaacatgatactagacagggacaacctaca

SEQ ID NO: 1028369 - DNA, 33 bp, Homo sapien
tgtatatatgccaaccaggacttttgttggact

SEQ ID NO: 1028370 - DNA, 33 bp, Homo sapien
tgtatatatgccaaccgggacttttgttggact

SEQ ID NO: 1028371 - DNA, 33 bp, Homo sapien
caccaggaggattaaaaaacaatatccagggtg

SEQ ID NO: 1028372 - DNA, 33 bp, Homo sapien
caccaggaggattaaagaacaatatccagggtg

SEQ ID NO: 1028373 - DNA, 33 bp, Homo sapien
tcgcaaaaatccattcaagtctggaaaacattc

SEQ ID NO: 1028374 - DNA, 33 bp, Homo sapien
tcgcaaaaatccattcgagtctggaaaacattc

SEQ ID NO: 1028375 - DNA, 33 bp, Homo sapien
ggactctttgattttgaaactgcatttttaagc

SEQ ID NO: 1028376 - DNA, 33 bp, Homo sapien
ggactctttgattttgcaactgcatttttaagc

SEQ ID NO: 1028377 - DNA, 33 bp, Homo sapien
ggctgcttctttctcacgttggggactcacact

SEQ ID NO: 1028378 - DNA, 33 bp, Homo sapien
ggctgcttctttctcatgttggggactcacact

SEQ ID NO: 1028379 - DNA, 33 bp, Homo sapien
aattgtccagtagagaccatcaagctggcccaa

SEQ ID NO: 1028380 - DNA, 33 bp, Homo sapien
aattgtccagtagagatcatcaagctggcccaa

SEQ ID NO: 1028381 - DNA, 33 bp, Homo sapien
ccatctggtggaagcaatccaattgcctgcaga

SEQ ID NO: 1028382 - DNA, 33 bp, Homo sapien
ccatctggtggaagcagtccaattgcctgcaga

SEQ ID NO: 1028383 - DNA, 33 bp, Homo sapien
ctaagtcagttcagaaatgggtcctgaagaaga

SEQ ID NO: 1028384 - DNA, 33 bp, Homo sapien
ctaagtcagttcagaagtgggtcctgaagaaga

SEQ ID NO: 1028385 - DNA, 33 bp, Homo sapien
gccatgccctattccaagtgtcaatgtacagtg

SEQ ID NO: 1028386 - DNA, 33 bp, Homo sapien
gccatgccctattccaggtgtcaatgtacagtg

SEQ ID NO: 1028387 - DNA, 33 bp, Homo sapien
tatacacacgatagaccctttccccctccatta

SEQ ID NO: 1028388 - DNA, 33 bp, Homo sapien
tatacacacgatagacgctttccccctccatta

SEQ ID NO: 1028389 - DNA, 33 bp, Homo sapien
atggtgggagtacacaaggtagatgtggagtct

SEQ ID NO: 1028390 - DNA, 33 bp, Homo sapien
atggtgggagtacacacggtagatgtggagtct

SEQ ID NO: 1028391 - DNA, 33 bp, Homo sapien
taggagcctaaagtaacattccaggaaacagat

SEQ ID NO: 1028392 - DNA, 33 bp, Homo sapien
taggagcctaaagtaatattccaggaaacagat

SEQ ID NO: 1028393 - DNA, 33 bp, Homo sapien
agctcaaaaagcgtacaccaagacacattataa

SEQ ID NO: 1028394 - DNA, 33 bp, Homo sapien
agctcaaaaagcgtacgccaagacacattataa

SEQ ID NO: 1028395 - DNA, 33 bp, Homo sapien
cctttagcaatgaagacgaagttctcaggaaac

SEQ ID NO: 1028396 - DNA, 33 bp, Homo sapien
cctttagcaatgaagaggaagttctcaggaaac

SEQ ID NO: 1028397 - DNA, 33 bp, Homo sapien
aaagggtgtaaaggacaagttaattatgcagcc

SEQ ID NO: 1028398 - DNA, 33 bp, Homo sapien
aaagggtgtaaaggacgagttaattatgcagcc

SEQ ID NO: 1028399 - DNA, 33 bp, Homo sapien
agctgaaaagagtttccaaaggtgaattgccag

SEQ ID NO: 1028400 - DNA, 33 bp, Homo sapien
agctgaaaagagtttctaaaggtgaattgccag

SEQ ID NO: 1028401 - DNA, 33 bp, Homo sapien
ctcgcagtggaatgccaactcatatatgcaaaa

SEQ ID NO: 1028402 - DNA, 33 bp, Homo sapien
ctcgcagtggaatgccgactcatatatgcaaaa

SEQ ID NO: 1028403 - DNA, 33 bp, Homo sapien
tctaaaggcttctcaaatgacagagctcaatga

SEQ ID NO: 1028404 - DNA, 33 bp, Homo sapien
tctaaaggcttctcaagtgacagagctcaatga

SEQ ID NO: 1028405 - DNA, 33 bp, Homo sapien
agaacacagagtgctcaaaactaagaatgtgct

SEQ ID NO: 1028406 - DNA, 33 bp, Homo sapien
agaacacagagtgctcgaaactaagaatgtgct

SEQ ID NO: 1028407 - DNA, 33 bp, Homo sapien
gttttctcacaaataaaatgagttgaagtaaat

SEQ ID NO: 1028408 - DNA, 33 bp, Homo sapien
gttttctcacaaataacatgagttgaagtaaat

SEQ ID NO: 1028409 - DNA, 33 bp, Homo sapien
taatcttgaggaaataaaggcagttttaaagat

SEQ ID NO: 1028410 - DNA, 33 bp, Homo sapien
taatcttgaggaaatagaggcagttttaaagat

SEQ ID NO: 1028411 - DNA, 33 bp, Homo sapien
ccataaagcagtcttacgttctgagtcatagct

SEQ ID NO: 1028412 - DNA, 33 bp, Homo sapien
ccataaagcagtcttatgttctgagtcatagct

SEQ ID NO: 1028413 - DNA, 33 bp, Homo sapien
tctgcttcctcactacactgtcttcgttggctg

SEQ ID NO: 1028414 - DNA, 33 bp, Homo sapien
tctgcttcctcactacgctgtcttcgttggctg

SEQ ID NO: 1028415 - DNA, 33 bp, Homo sapien
ttaccacccttacaaaccagcaagaacaaacct

SEQ ID NO: 1028416 - DNA, 33 bp, Homo sapien
ttaccacccttacaaagcagcaagaacaaacct

SEQ ID NO: 1028417 - DNA, 33 bp, Homo sapien
ccatgacagcttggtcacccaacaggcccctct

SEQ ID NO: 1028418 - DNA, 33 bp, Homo sapien
ccatgacagcttggtcgcccaacaggcccctct

SEQ ID NO: 1028419 - DNA, 33 bp, Homo sapien
aatcacacgggagaaaacgttctgtggtagttt

SEQ ID NO: 1028420 - DNA, 33 bp, Homo sapien
aatcacacgggagaaagcgttctgtggtagttt

SEQ ID NO: 1028421 - DNA, 33 bp, Homo sapien
ccacatggaaatgcagacgtgttaaaactacca

SEQ ID NO: 1028422 - DNA, 33 bp, Homo sapien
ccacatggaaatgcagtcgtgttaaaactacca

SEQ ID NO: 1028423 - DNA, 33 bp, Homo sapien
gcttcttgaagatgtccctccgttgctaccgtc

SEQ ID NO: 1028424 - DNA, 33 bp, Homo sapien
gcttcttgaagatgtctctccgttgctaccgtc

SEQ ID NO: 1028425 - DNA, 33 bp, Homo sapien
tggcatttgaagcacaccagaaccatcgcagct

SEQ ID NO: 1028426 - DNA, 33 bp, Homo sapien
tggcatttgaagcacatcagaaccatcgcagct

SEQ ID NO: 1028427 - DNA, 33 bp, Homo sapien
gtaggtggaaatatgaagtcagctagatggcct

SEQ ID NO: 1028428 - DNA, 33 bp, Homo sapien
gtaggtggaaatatgaggtcagctagatggcct

SEQ ID NO: 1028429 - DNA, 33 bp, Homo sapien
catatttccacctacaacaaagtcctacatcac

SEQ ID NO: 1028430 - DNA, 33 bp, Homo sapien
catatttccacctacagcaaagtcctacatcac

SEQ ID NO: 1028431 - DNA, 33 bp, Homo sapien
tatttttcctcaccccagctttattgaggtata

SEQ ID NO: 1028432 - DNA, 33 bp, Homo sapien
tatttttcctcaccccggctttattgaggtata

SEQ ID NO: 1028433 - DNA, 33 bp, Homo sapien
cctgttatcactcttccactcaaaaaagaaaag

SEQ ID NO: 1028434 - DNA, 33 bp, Homo sapien
cctgttatcactcttctactcaaaaaagaaaag

SEQ ID NO: 1028435 - DNA, 33 bp, Homo sapien
caatttagaaagaatcaagcctgaatacttaaa

SEQ ID NO: 1028436 - DNA, 33 bp, Homo sapien
caatttagaaagaatcgagcctgaatacttaaa

SEQ ID NO: 1028437 - DNA, 33 bp, Homo sapien
tgatgggtattggaaactcacgcctatgtatcc

SEQ ID NO: 1028438 - DNA, 33 bp, Homo sapien
tgatgggtattggaaagtcacgcctatgtatcc

SEQ ID NO: 1028439 - DNA, 33 bp, Homo sapien
gttggtgtgtgtgaaccgatttgcagcacaaag

SEQ ID NO: 1028440 - DNA, 33 bp, Homo sapien
gttggtgtgtgtgaactgatttgcagcacaaag

SEQ ID NO: 1028441 - DNA, 33 bp, Homo sapien
aagtgtctgtaaataaataaacactgcagagtt

SEQ ID NO: 1028442 - DNA, 33 bp, Homo sapien
aagtgtctgtaaataattaaacactgcagagtt

SEQ ID NO: 1028443 - DNA, 33 bp, Homo sapien
cttcccattggaagcaagtgttggaaaatggca

SEQ ID NO: 1028444 - DNA, 33 bp, Homo sapien
cttcccattggaagcacgtgttggaaaatggca

SEQ ID NO: 1028445 - DNA, 33 bp, Homo sapien
aactcctggcttcaaactgctaggactataggc

SEQ ID NO: 1028446 - DNA, 33 bp, Homo sapien
aactcctggcttcaaattgctaggactataggc

SEQ ID NO: 1028447 - DNA, 33 bp, Homo sapien
agagcctgctaggacacgaaaaggaaagcctct

SEQ ID NO: 1028448 - DNA, 33 bp, Homo sapien
agagcctgctaggacaggaaaaggaaagcctct

SEQ ID NO: 1028449 - DNA, 33 bp, Homo sapien
ttttcatacaacattacatgatattttactttt

SEQ ID NO: 1028450 - DNA, 33 bp, Homo sapien
ttttcatacaacattagatgatattttactttt

SEQ ID NO: 1028451 - DNA, 33 bp, Homo sapien
ttccatttatatcacaatccagaaaaggcaaac

SEQ ID NO: 1028452 - DNA, 33 bp, Homo sapien
ttccatttatatcacattccagaaaaggcaaac

SEQ ID NO: 1028453 - DNA, 33 bp, Homo sapien
ggaaaaaagtggtgtacggaaagcgtggctgca

SEQ ID NO: 1028454 - DNA, 33 bp, Homo sapien
ggaaaaaagtggtgtatggaaagcgtggctgca

SEQ ID NO: 1028455 - DNA, 33 bp, Homo sapien
acttgttttcaaaatcaaaaatgagttgatatg

SEQ ID NO: 1028456 - DNA, 33 bp, Homo sapien
acttgttttcaaaatcgaaaatgagttgatatg

SEQ ID NO: 1028457 - DNA, 33 bp, Homo sapien
tctttccgctcagaaagcagttagtgtatggag

SEQ ID NO: 1028458 - DNA, 33 bp, Homo sapien
tctttccgctcagaaatcagttagtgtatggag

SEQ ID NO: 1028459 - DNA, 33 bp, Homo sapien
tggaaacacggaaatccatgttatgaactggta

SEQ ID NO: 1028460 - DNA, 33 bp, Homo sapien
tggaaacacggaaatctatgttatgaactggta

SEQ ID NO: 1028461 - DNA, 33 bp, Homo sapien
aaataatttgttcaacaacagctataaatcttt

SEQ ID NO: 1028462 - DNA, 33 bp, Homo sapien
aaataatttgttcaactacagctataaatcttt

SEQ ID NO: 1028463 - DNA, 33 bp, Homo sapien
cctttcatagatcataaaaacggtggaccatgg

SEQ ID NO: 1028464 - DNA, 33 bp, Homo sapien
cctttcatagatcatagaaacggtggaccatgg

SEQ ID NO: 1028465 - DNA, 33 bp, Homo sapien
aaatctaaaaccgtaaagcctcagaatcatctt

SEQ ID NO: 1028466 - DNA, 33 bp, Homo sapien
aaatctaaaaccgtaacgcctcagaatcatctt

SEQ ID NO: 1028467 - DNA, 33 bp, Homo sapien
tatcttctatgtctaacgactaaccacagtggg

SEQ ID NO: 1028468 - DNA, 33 bp, Homo sapien
tatcttctatgtctaatgactaaccacagtggg

SEQ ID NO: 1028469 - DNA, 33 bp, Homo sapien
caaaaaaatttctctaaatggaagtacatgcat

SEQ ID NO: 1028470 - DNA, 33 bp, Homo sapien
caaaaaaatttctctacatggaagtacatgcat

SEQ ID NO: 1028471 - DNA, 33 bp, Homo sapien
aaataagtatgattacagagtgaagacatttca

SEQ ID NO: 1028472 - DNA, 33 bp, Homo sapien
aaataagtatgattacggagtgaagacatttca

SEQ ID NO: 1028473 - DNA, 33 bp, Homo sapien
gaaataaactccaaaccagatcaacaccaggac

SEQ ID NO: 1028474 - DNA, 33 bp, Homo sapien
gaaataaactccaaacgagatcaacaccaggac

SEQ ID NO: 1028475 - DNA, 33 bp, Homo sapien
tagtttcactgaatacaaaattcctggctgata

SEQ ID NO: 1028476 - DNA, 33 bp, Homo sapien
tagtttcactgaatacgaaattcctggctgata

SEQ ID NO: 1028477 - DNA, 33 bp, Homo sapien
acaactgacatcctcactatattgagtcttcca

SEQ ID NO: 1028478 - DNA, 33 bp, Homo sapien
acaactgacatcctcattatattgagtcttcca

SEQ ID NO: 1028479 - DNA, 33 bp, Homo sapien
tagaacaacaggtgcacgttaaaatccctgcct

SEQ ID NO: 1028480 - DNA, 33 bp, Homo sapien
tagaacaacaggtgcaggttaaaatccctgcct

SEQ ID NO: 1028481 - DNA, 33 bp, Homo sapien
tagatgagtgaaccaccactgcatgacccaaag

SEQ ID NO: 1028482 - DNA, 33 bp, Homo sapien
tagatgagtgaaccacgactgcatgacccaaag

SEQ ID NO: 1028483 - DNA, 33 bp, Homo sapien
aacaacacctcaccaacgagtcaggacatgaag

SEQ ID NO: 1028484 - DNA, 33 bp, Homo sapien
aacaacacctcaccaaggagtcaggacatgaag

SEQ ID NO: 1028485 - DNA, 33 bp, Homo sapien
tacctatattgctgaacggaatttactgacttc

SEQ ID NO: 1028486 - DNA, 33 bp, Homo sapien
tacctatattgctgaatggaatttactgacttc

SEQ ID NO: 1028487 - DNA, 33 bp, Homo sapien
cccctgaagacgtcaccggccgagttcatcagc

SEQ ID NO: 1028488 - DNA, 33 bp, Homo sapien
cccctgaagacgtcactggccgagttcatcagc

SEQ ID NO: 1028489 - DNA, 33 bp, Homo sapien
aaaacagcatttgtaaagaaaacgtcattctac

SEQ ID NO: 1028490 - DNA, 33 bp, Homo sapien
aaaacagcatttgtaaggaaaacgtcattctac

SEQ ID NO: 1028491 - DNA, 33 bp, Homo sapien
aaaatttcctgttgtacatttcccatacagctt

SEQ ID NO: 1028492 - DNA, 33 bp, Homo sapien
aaaatttcctgttgtatatttcccatacagctt

SEQ ID NO: 1028493 - DNA, 33 bp, Homo sapien
tctgtgatacatctgaaggtttctttttctgta

SEQ ID NO: 1028494 - DNA, 33 bp, Homo sapien
tctgtgatacatctgagggtttctttttctgta

SEQ ID NO: 1028495 - DNA, 33 bp, Homo sapien
tctgtgtactgaaaaccgtaaaatggtgttgat

SEQ ID NO: 1028496 - DNA, 33 bp, Homo sapien
tctgtgtactgaaaactgtaaaatggtgttgat

SEQ ID NO: 1028497 - DNA, 33 bp, Homo sapien
atgtctttagatctgcagaagaaagccacccta

SEQ ID NO: 1028498 - DNA, 33 bp, Homo sapien
atgtctttagatctgcggaagaaagccacccta

SEQ ID NO: 1028499 - DNA, 33 bp, Homo sapien
gagttatttttgttccaatggggtctcagagat

SEQ ID NO: 1028500 - DNA, 33 bp, Homo sapien
gagttatttttgttccgatggggtctcagagat

SEQ ID NO: 1028501 - DNA, 33 bp, Homo sapien
taaaggaggcctgggacctattgcctcactttc

SEQ ID NO: 1028502 - DNA, 33 bp, Homo sapien
taaaggaggcctgggatctattgcctcactttc

SEQ ID NO: 1028503 - DNA, 33 bp, Homo sapien
ctgggtctttggaaacaggaataccaggatatg

SEQ ID NO: 1028504 - DNA, 33 bp, Homo sapien
ctgggtctttggaaacgggaataccaggatatg

SEQ ID NO: 1028505 - DNA, 33 bp, Homo sapien
tccaagacactggaaagttcttcaatgcaggga

SEQ ID NO: 1028506 - DNA, 33 bp, Homo sapien
tccaagacactggaaatttcttcaatgcaggga

SEQ ID NO: 1028507 - DNA, 33 bp, Homo sapien
catcagcagcaaaagaagaatgttattgggaag

SEQ ID NO: 1028508 - DNA, 33 bp, Homo sapien
catcagcagcaaaagaggaatgttattgggaag

SEQ ID NO: 1028509 - DNA, 33 bp, Homo sapien
ttctgattcatacaaagaaactttgcagtggag

SEQ ID NO: 1028510 - DNA, 33 bp, Homo sapien
ttctgattcatacaaataaactttgcagtggag

SEQ ID NO: 1028511 - DNA, 33 bp, Homo sapien
atgcagaggagggtgacaatgtaaggatcaaaa

SEQ ID NO: 1028512 - DNA, 33 bp, Homo sapien
atgcagaggagggtgataatgtaaggatcaaaa

SEQ ID NO: 1028513 - DNA, 33 bp, Homo sapien
tggggagggcctaggaacctaaacatttacaaa

SEQ ID NO: 1028514 - DNA, 33 bp, Homo sapien
tggggagggcctaggagcctaaacatttacaaa

SEQ ID NO: 1028515 - DNA, 33 bp, Homo sapien
tttctagaattttttagagcttgcatcattcaa

SEQ ID NO: 1028516 - DNA, 33 bp, Homo sapien
tttctagaattttttatagcttgcatcattcaa

SEQ ID NO: 1028517 - DNA, 33 bp, Homo sapien
tttagctgcaatgttacaggccagaaagttcac

SEQ ID NO: 1028518 - DNA, 33 bp, Homo sapien
tttagctgcaatgttataggccagaaagttcac

SEQ ID NO: 1028519 - DNA, 33 bp, Homo sapien
aggcaagggttcagaactcaggctgctgtggtc

SEQ ID NO: 1028520 - DNA, 33 bp, Homo sapien
aggcaagggttcagaattcaggctgctgtggtc

SEQ ID NO: 1028521 - DNA, 33 bp, Homo sapien
gctggggtggcaccaacgagcctgaaagctaca

SEQ ID NO: 1028522 - DNA, 33 bp, Homo sapien
gctggggtggcaccaatgagcctgaaagctaca

SEQ ID NO: 1028523 - DNA, 33 bp, Homo sapien
gctgttttctaggcccaaggagttgaccgtgtg

SEQ ID NO: 1028524 - DNA, 33 bp, Homo sapien
gctgttttctaggcccgaggagttgaccgtgtg

SEQ ID NO: 1028525 - DNA, 33 bp, Homo sapien
gtatgagagcccacaaatattttagtttatgaa

SEQ ID NO: 1028526 - DNA, 33 bp, Homo sapien
gtatgagagcccacaagtattttagtttatgaa

SEQ ID NO: 1028527 - DNA, 33 bp, Homo sapien
tagtgatttggttaccagactctgctgcactgt

SEQ ID NO: 1028528 - DNA, 33 bp, Homo sapien
tagtgatttggttaccggactctgctgcactgt

SEQ ID NO: 1028529 - DNA, 33 bp, Homo sapien
ccaggcaatgaatcccagagaatttgcctttca

SEQ ID NO: 1028530 - DNA, 33 bp, Homo sapien
ccaggcaatgaatcccggagaatttgcctttca

SEQ ID NO: 1028531 - DNA, 33 bp, Homo sapien
gaaaaattaatacttgcagcacactttgcctct

SEQ ID NO: 1028532 - DNA, 33 bp, Homo sapien
gaaaaattaatacttgtagcacactttgcctct

SEQ ID NO: 1028533 - DNA, 33 bp, Homo sapien
gacctgacaatggggacgcaagtgacctctgtg

SEQ ID NO: 1028534 - DNA, 33 bp, Homo sapien
gacctgacaatggggatgcaagtgacctctgtg

SEQ ID NO: 1028535 - DNA, 33 bp, Homo sapien
gtagtatagttccaaaatagtaaaaacacaagg

SEQ ID NO: 1028536 - DNA, 33 bp, Homo sapien
gtagtatagttccaaagtagtaaaaacacaagg

SEQ ID NO: 1028537 - DNA, 33 bp, Homo sapien
tagtttctcctggtcccgaaatcattataagta

SEQ ID NO: 1028538 - DNA, 33 bp, Homo sapien
tagtttctcctggtcctgaaatcattataagta

SEQ ID NO: 1028539 - DNA, 33 bp, Homo sapien
tcttcctatcaaaactcaccttccatttggcta

SEQ ID NO: 1028540 - DNA, 33 bp, Homo sapien
tcttcctatcaaaacttaccttccatttggcta

SEQ ID NO: 1028541 - DNA, 33 bp, Homo sapien
tcactatgttgcctacaccttaccttgcctcaa

SEQ ID NO: 1028542 - DNA, 33 bp, Homo sapien
tcactatgttgcctacgccttaccttgcctcaa

SEQ ID NO: 1028543 - DNA, 33 bp, Homo sapien
catcagaaataatgatcagaagattcgaatgct

SEQ ID NO: 1028544 - DNA, 33 bp, Homo sapien
catcagaaataatgatgagaagattcgaatgct

SEQ ID NO: 1028545 - DNA, 33 bp, Homo sapien
cgaatgctctcaaagccattcctacagagccag

SEQ ID NO: 1028546 - DNA, 33 bp, Homo sapien
cgaatgctctcaaagctattcctacagagccag

SEQ ID NO: 1028547 - DNA, 33 bp, Homo sapien
catgcagaacgctgaaagtcccgatggcctgac

SEQ ID NO: 1028548 - DNA, 33 bp, Homo sapien
catgcagaacgctgaaggtcccgatggcctgac

SEQ ID NO: 1028549 - DNA, 33 bp, Homo sapien
cgatggcctgacagccaggagacatcccttctg

SEQ ID NO: 1028550 - DNA, 33 bp, Homo sapien
cgatggcctgacagccgggagacatcccttctg

SEQ ID NO: 1028551 - DNA, 33 bp, Homo sapien
aggaagtgatgctccaacttggttgaggagttg

SEQ ID NO: 1028552 - DNA, 33 bp, Homo sapien
aggaagtgatgctccatcttggttgaggagttg

SEQ ID NO: 1028553 - DNA, 33 bp, Homo sapien
tctgaccctggagacacaggcgccgtttatttt

SEQ ID NO: 1028554 - DNA, 33 bp, Homo sapien
tctgaccctggagacagaggcgccgtttatttt

SEQ ID NO: 1028555 - DNA, 33 bp, Homo sapien
ctagtccttccagaaacgttgccaagtacagag

SEQ ID NO: 1028556 - DNA, 33 bp, Homo sapien
ctagtccttccagaaatgttgccaagtacagag

SEQ ID NO: 1028557 - DNA, 33 bp, Homo sapien
ggcaatgaccacacaacagtgcccatgaggtga

SEQ ID NO: 1028558 - DNA, 33 bp, Homo sapien
ggcaatgaccacacaagagtgcccatgaggtga

SEQ ID NO: 1028559 - DNA, 33 bp, Homo sapien
cttcactatcacatgagccagttccttaaaata

SEQ ID NO: 1028560 - DNA, 33 bp, Homo sapien
cttcactatcacatgatccagttccttaaaata

SEQ ID NO: 1028561 - DNA, 33 bp, Homo sapien
caaccacatgcaggaagacaaggctctgagaag

SEQ ID NO: 1028562 - DNA, 33 bp, Homo sapien
caaccacatgcaggaatacaaggctctgagaag

SEQ ID NO: 1028563 - DNA, 33 bp, Homo sapien
ctggagctgctgtaacgaatgaccaggggccta

SEQ ID NO: 1028564 - DNA, 33 bp, Homo sapien
ctggagctgctgtaactaatgaccaggggccta

SEQ ID NO: 1028565 - DNA, 33 bp, Homo sapien
atcaatgctgagcacaaagggcatttgcaaata

SEQ ID NO: 1028566 - DNA, 33 bp, Homo sapien
atcaatgctgagcacagagggcatttgcaaata

SEQ ID NO: 1028567 - DNA, 33 bp, Homo sapien
ttacattctcagaggacgctcacagcctagatc

SEQ ID NO: 1028568 - DNA, 33 bp, Homo sapien
ttacattctcagaggatgctcacagcctagatc

SEQ ID NO: 1028569 - DNA, 33 bp, Homo sapien
tgctgtggactcctggcaaagcctgctgtccca

SEQ ID NO: 1028570 - DNA, 33 bp, Homo sapien
tgctgtggactcctggtaaagcctgctgtccca

SEQ ID NO: 1028571 - DNA, 33 bp, Homo sapien
ttggacacttttcaatcatgactcttgaagcag

SEQ ID NO: 1028572 - DNA, 33 bp, Homo sapien
ttggacacttttcaatgatgactcttgaagcag

SEQ ID NO: 1028573 - DNA, 33 bp, Homo sapien
gaaggtactttgaaatgatagatgaggacaatg

SEQ ID NO: 1028574 - DNA, 33 bp, Homo sapien
gaaggtactttgaaattatagatgaggacaatg

SEQ ID NO: 1028575 - DNA, 33 bp, Homo sapien
tcatgtcaaagcaggcagaagtgagtaaaaact

SEQ ID NO: 1028576 - DNA, 33 bp, Homo sapien
tcatgtcaaagcaggcggaagtgagtaaaaact

SEQ ID NO: 1028577 - DNA, 33 bp, Homo sapien
aaggaaaaatctcacaaatgtgttgctcaagtg

SEQ ID NO: 1028578 - DNA, 33 bp, Homo sapien
aaggaaaaatctcacagatgtgttgctcaagtg

SEQ ID NO: 1028579 - DNA, 33 bp, Homo sapien
gtattgaagagtagacacctccatgagaaggaa

SEQ ID NO: 1028580 - DNA, 33 bp, Homo sapien
gtattgaagagtagacccctccatgagaaggaa

SEQ ID NO: 1028581 - DNA, 33 bp, Homo sapien
gcatcaacaaacttcaactggacaaggcacccc

SEQ ID NO: 1028582 - DNA, 33 bp, Homo sapien
gcatcaacaaacttcacctggacaaggcacccc

SEQ ID NO: 1028583 - DNA, 33 bp, Homo sapien
tctgttgcagcctttacgctaaacagagctaag

SEQ ID NO: 1028584 - DNA, 33 bp, Homo sapien
tctgttgcagcctttatgctaaacagagctaag

SEQ ID NO: 1028585 - DNA, 33 bp, Homo sapien
tggctgtaccttacagaaagatcaaactcagtg

SEQ ID NO: 1028586 - DNA, 33 bp, Homo sapien
tggctgtaccttacaggaagatcaaactcagtg

SEQ ID NO: 1028587 - DNA, 33 bp, Homo sapien
gatggaagtgatttcaaaggcccaaagtgagtg

SEQ ID NO: 1028588 - DNA, 33 bp, Homo sapien
gatggaagtgatttcagaggcccaaagtgagtg

SEQ ID NO: 1028589 - DNA, 33 bp, Homo sapien
gagtgggtatcccagcaatctgtaggataaacc

SEQ ID NO: 1028590 - DNA, 33 bp, Homo sapien
gagtgggtatcccagcgatctgtaggataaacc

SEQ ID NO: 1028591 - DNA, 33 bp, Homo sapien
tttatctgtgaacaggaactggagaatcactat

SEQ ID NO: 1028592 - DNA, 33 bp, Homo sapien
tttatctgtgaacagggactggagaatcactat

SEQ ID NO: 1028593 - DNA, 33 bp, Homo sapien
ctgagtgttagtggcacggagaagagtgtggaa

SEQ ID NO: 1028594 - DNA, 33 bp, Homo sapien
ctgagtgttagtggcatggagaagagtgtggaa

SEQ ID NO: 1028595 - DNA, 33 bp, Homo sapien
tgcctgccttccactccaagtctgcttgtcacg

SEQ ID NO: 1028596 - DNA, 33 bp, Homo sapien
tgcctgccttccactcgaagtctgcttgtcacg

SEQ ID NO: 1028597 - DNA, 33 bp, Homo sapien
ccgggatcttcactcaaataaactacataacct

SEQ ID NO: 1028598 - DNA, 33 bp, Homo sapien
ccgggatcttcactcagataaactacataacct

SEQ ID NO: 1028599 - DNA, 33 bp, Homo sapien
cagcgagagagaaccaatgggcacgctgggaat

SEQ ID NO: 1028600 - DNA, 33 bp, Homo sapien
cagcgagagagaaccagtgggcacgctgggaat

SEQ ID NO: 1028601 - DNA, 33 bp, Homo sapien
cctctgagtagctaaccggagaatcgggtgggg

SEQ ID NO: 1028602 - DNA, 33 bp, Homo sapien
cctctgagtagctaactggagaatcgggtgggg

SEQ ID NO: 1028603 - DNA, 33 bp, Homo sapien
ggcagcaaaaagagaaaatggtttgctcagaat

SEQ ID NO: 1028604 - DNA, 33 bp, Homo sapien
ggcagcaaaaagagaacatggtttgctcagaat

SEQ ID NO: 1028605 - DNA, 33 bp, Homo sapien
tcagatgctgaacaaactcccctaaatatccct

SEQ ID NO: 1028606 - DNA, 33 bp, Homo sapien
tcagatgctgaacaaagtcccctaaatatccct

SEQ ID NO: 1028607 - DNA, 33 bp, Homo sapien
acatttgaaattaagacgtgatccaggtccatc

SEQ ID NO: 1028608 - DNA, 33 bp, Homo sapien
acatttgaaattaagatgtgatccaggtccatc

SEQ ID NO: 1028609 - DNA, 33 bp, Homo sapien
gagctaaatctagacactgtaggaaataatcta

SEQ ID NO: 1028610 - DNA, 33 bp, Homo sapien
gagctaaatctagacagtgtaggaaataatcta

SEQ ID NO: 1028611 - DNA, 33 bp, Homo sapien
aagaccagactggccaatatggagaaaacctgt

SEQ ID NO: 1028612 - DNA, 33 bp, Homo sapien
aagaccagactggccactatggagaaaacctgt

SEQ ID NO: 1028613 - DNA, 33 bp, Homo sapien
tctctgtacccggggacggtatctctgggacag

SEQ ID NO: 1028614 - DNA, 33 bp, Homo sapien
tctctgtacccggggatggtatctctgggacag

SEQ ID NO: 1028615 - DNA, 33 bp, Homo sapien
aaaaaatacagtgagacagatggaaatgcaaag

SEQ ID NO: 1028616 - DNA, 33 bp, Homo sapien
aaaaaatacagtgagagagatggaaatgcaaag

SEQ ID NO: 1028617 - DNA, 33 bp, Homo sapien
tggcggtaggccaaaacgaggcctggtggtaag

SEQ ID NO: 1028618 - DNA, 33 bp, Homo sapien
tggcggtaggccaaaatgaggcctggtggtaag

SEQ ID NO: 1028619 - DNA, 33 bp, Homo sapien
cctctcagcataatacagcactgggactttacc

SEQ ID NO: 1028620 - DNA, 33 bp, Homo sapien
cctctcagcataatacggcactgggactttacc

SEQ ID NO: 1028621 - DNA, 33 bp, Homo sapien
aatgggcatgttactccaagtgactaactcggg

SEQ ID NO: 1028622 - DNA, 33 bp, Homo sapien
aatgggcatgttactctaagtgactaactcggg

SEQ ID NO: 1028623 - DNA, 33 bp, Homo sapien
aaaggaatatcaaaaacgaatgaattctaccag

SEQ ID NO: 1028624 - DNA, 33 bp, Homo sapien
aaaggaatatcaaaaatgaatgaattctaccag

SEQ ID NO: 1028625 - DNA, 33 bp, Homo sapien
ctgcagcgaggcttcacggacactattctggca

SEQ ID NO: 1028626 - DNA, 33 bp, Homo sapien
ctgcagcgaggcttcatggacactattctggca

SEQ ID NO: 1028627 - DNA, 33 bp, Homo sapien
agtgaaaacgaaaagaagaccatttggagaaga

SEQ ID NO: 1028628 - DNA, 33 bp, Homo sapien
agtgaaaacgaaaagaggaccatttggagaaga

SEQ ID NO: 1028629 - DNA, 33 bp, Homo sapien
agcagggtaagtattccatcctagtgtcatcct

SEQ ID NO: 1028630 - DNA, 33 bp, Homo sapien
agcagggtaagtattctatcctagtgtcatcct

SEQ ID NO: 1028631 - DNA, 33 bp, Homo sapien
ctttactaattctaataatgatgatgaggatga

SEQ ID NO: 1028632 - DNA, 33 bp, Homo sapien
ctttactaattctaatgatgatgatgaggatga

SEQ ID NO: 1028633 - DNA, 33 bp, Homo sapien
aaagcatcatggagacaagcaaatttagctttc

SEQ ID NO: 1028634 - DNA, 33 bp, Homo sapien
aaagcatcatggagacgagcaaatttagctttc

SEQ ID NO: 1028635 - DNA, 33 bp, Homo sapien
actggttggtcagagacggcttttagggctgaa

SEQ ID NO: 1028636 - DNA, 33 bp, Homo sapien
actggttggtcagagatggcttttagggctgaa

SEQ ID NO: 1028637 - DNA, 33 bp, Homo sapien
ttccctttttcagggacgccttaatatagttgg

SEQ ID NO: 1028638 - DNA, 33 bp, Homo sapien
ttccctttttcagggatgccttaatatagttgg

SEQ ID NO: 1028639 - DNA, 33 bp, Homo sapien
ccaaaaaggtaggcaccgagaatataaggaaat

SEQ ID NO: 1028640 - DNA, 33 bp, Homo sapien
ccaaaaaggtaggcactgagaatataaggaaat

SEQ ID NO: 1028641 - DNA, 33 bp, Homo sapien
ttcgcttttcctaaaacttgcaccaatttacac

SEQ ID NO: 1028642 - DNA, 33 bp, Homo sapien
ttcgcttttcctaaaatttgcaccaatttacac

SEQ ID NO: 1028643 - DNA, 33 bp, Homo sapien
tcataatcctccatgacgatgtcttaaaatgtc

SEQ ID NO: 1028644 - DNA, 33 bp, Homo sapien
tcataatcctccatgatgatgtcttaaaatgtc

SEQ ID NO: 1028645 - DNA, 33 bp, Homo sapien
cactagccattgatggaactactagacagaaaa

SEQ ID NO: 1028646 - DNA, 33 bp, Homo sapien
cactagccattgatgggactactagacagaaaa

SEQ ID NO: 1028647 - DNA, 33 bp, Homo sapien
gtgtgtggaaccagacagggtgtgaggtcagac

SEQ ID NO: 1028648 - DNA, 33 bp, Homo sapien
gtgtgtggaaccagacggggtgtgaggtcagac

SEQ ID NO: 1028649 - DNA, 33 bp, Homo sapien
agttgcagagcagtcacggttataaataagcag

SEQ ID NO: 1028650 - DNA, 33 bp, Homo sapien
agttgcagagcagtcatggttataaataagcag

SEQ ID NO: 1028651 - DNA, 33 bp, Homo sapien
gtctctgcctttgaaccacttcagaggggaggg

SEQ ID NO: 1028652 - DNA, 33 bp, Homo sapien
gtctctgcctttgaactacttcagaggggaggg

SEQ ID NO: 1028653 - DNA, 33 bp, Homo sapien
tgaaggaggatcaaacacaggcacagtgctctc

SEQ ID NO: 1028654 - DNA, 33 bp, Homo sapien
tgaaggaggatcaaacgcaggcacagtgctctc

SEQ ID NO: 1028655 - DNA, 33 bp, Homo sapien
gaagagcaaatgagggcacaagttgtttagaag

SEQ ID NO: 1028656 - DNA, 33 bp, Homo sapien
gaagagcaaatgagggtacaagttgtttagaag

SEQ ID NO: 1028657 - DNA, 33 bp, Homo sapien
atatttcaatccagcaactatttttgagcacac

SEQ ID NO: 1028658 - DNA, 33 bp, Homo sapien
atatttcaatccagcagctatttttgagcacac

SEQ ID NO: 1028659 - DNA, 33 bp, Homo sapien
tcaataaagaatgagactaattgaacaatgcta

SEQ ID NO: 1028660 - DNA, 33 bp, Homo sapien
tcaataaagaatgagagtaattgaacaatgcta

SEQ ID NO: 1028661 - DNA, 33 bp, Homo sapien
ataaggaaaataagaaaatatcttgagccaaat

SEQ ID NO: 1028662 - DNA, 33 bp, Homo sapien
ataaggaaaataagaagatatcttgagccaaat

SEQ ID NO: 1028663 - DNA, 33 bp, Homo sapien
ctgtttcaattacatcaaccttccttttagaac

SEQ ID NO: 1028664 - DNA, 33 bp, Homo sapien
ctgtttcaattacatcgaccttccttttagaac

SEQ ID NO: 1028665 - DNA, 33 bp, Homo sapien
atttataaacattcaacaaaagcagtctcgtgg

SEQ ID NO: 1028666 - DNA, 33 bp, Homo sapien
atttataaacattcaagaaaagcagtctcgtgg

SEQ ID NO: 1028667 - DNA, 33 bp, Homo sapien
gccatgctgataccaaatctccaaccctccagc

SEQ ID NO: 1028668 - DNA, 33 bp, Homo sapien
gccatgctgataccaactctccaaccctccagc

SEQ ID NO: 1028669 - DNA, 33 bp, Homo sapien
aggggcaaccatgtaacgacacaagagaagatg

SEQ ID NO: 1028670 - DNA, 33 bp, Homo sapien
aggggcaaccatgtaaggacacaagagaagatg

SEQ ID NO: 1028671 - DNA, 33 bp, Homo sapien
aacttgacattaaaaactgtgaacaatcagaac

SEQ ID NO: 1028672 - DNA, 33 bp, Homo sapien
aacttgacattaaaaagtgtgaacaatcagaac

SEQ ID NO: 1028673 - DNA, 33 bp, Homo sapien
tatctccattgacccacagtcttactgttctcc

SEQ ID NO: 1028674 - DNA, 33 bp, Homo sapien
tatctccattgacccatagtcttactgttctcc

SEQ ID NO: 1028675 - DNA, 33 bp, Homo sapien
ttggcaggtctggcaaccccacgttccgagact

SEQ ID NO: 1028676 - DNA, 33 bp, Homo sapien
ttggcaggtctggcaatcccacgttccgagact

SEQ ID NO: 1028677 - DNA, 33 bp, Homo sapien
aaggcagatagaatcacagcaaccttaggtgac

SEQ ID NO: 1028678 - DNA, 33 bp, Homo sapien
aaggcagatagaatcatagcaaccttaggtgac

SEQ ID NO: 1028679 - DNA, 33 bp, Homo sapien
ggtgtccctattaaacaaaaatgcttacttttc

SEQ ID NO: 1028680 - DNA, 33 bp, Homo sapien
ggtgtccctattaaaccaaaatgcttacttttc

SEQ ID NO: 1028681 - DNA, 33 bp, Homo sapien
ctgtctgcagggaagaaaaatgcaccattagca

SEQ ID NO: 1028682 - DNA, 33 bp, Homo sapien
ctgtctgcagggaagagaaatgcaccattagca

SEQ ID NO: 1028683 - DNA, 33 bp, Homo sapien
ttgctcttctttgacccatcacagtgaaacacc

SEQ ID NO: 1028684 - DNA, 33 bp, Homo sapien
ttgctcttctttgaccgatcacagtgaaacacc

SEQ ID NO: 1028685 - DNA, 33 bp, Homo sapien
gcacttacttccttaacgtgtccaggccatgaa

SEQ ID NO: 1028686 - DNA, 33 bp, Homo sapien
gcacttacttccttaatgtgtccaggccatgaa

SEQ ID NO: 1028687 - DNA, 33 bp, Homo sapien
gcatcctgttgctggcagaagcactgacacctt

SEQ ID NO: 1028688 - DNA, 33 bp, Homo sapien
gcatcctgttgctggcggaagcactgacacctt

SEQ ID NO: 1028689 - DNA, 33 bp, Homo sapien
atgagttaaaacagcacgatgagtaattacatg

SEQ ID NO: 1028690 - DNA, 33 bp, Homo sapien
atgagttaaaacagcatgatgagtaattacatg

SEQ ID NO: 1028691 - DNA, 33 bp, Homo sapien
ccatatctgctgtgccacatcccaatgcatgct

SEQ ID NO: 1028692 - DNA, 33 bp, Homo sapien
ccatatctgctgtgccgcatcccaatgcatgct

SEQ ID NO: 1028693 - DNA, 33 bp, Homo sapien
gctctgcgcccttctcactggaagatttctaat

SEQ ID NO: 1028694 - DNA, 33 bp, Homo sapien
gctctgcgcccttctcgctggaagatttctaat

SEQ ID NO: 1028695 - DNA, 33 bp, Homo sapien
aaacttgccttcatggccacaaaaggctcccag

SEQ ID NO: 1028696 - DNA, 33 bp, Homo sapien
aaacttgccttcatggtcacaaaaggctcccag

SEQ ID NO: 1028697 - DNA, 33 bp, Homo sapien
cagttgagcactggcaaccgttcttctccagag

SEQ ID NO: 1028698 - DNA, 33 bp, Homo sapien
cagttgagcactggcatccgttcttctccagag

SEQ ID NO: 1028699 - DNA, 33 bp, Homo sapien
agatgagatggacagacccacaaggataggaca

SEQ ID NO: 1028700 - DNA, 33 bp, Homo sapien
agatgagatggacagatccacaaggataggaca

SEQ ID NO: 1028701 - DNA, 33 bp, Homo sapien
tggagtgcgccaaacacgaaatgctgcaaccat

SEQ ID NO: 1028702 - DNA, 33 bp, Homo sapien
tggagtgcgccaaacatgaaatgctgcaaccat

SEQ ID NO: 1028703 - DNA, 33 bp, Homo sapien
gcattactctgactaacgatgaacaatgtgagc

SEQ ID NO: 1028704 - DNA, 33 bp, Homo sapien
gcattactctgactaatgatgaacaatgtgagc

SEQ ID NO: 1028705 - DNA, 33 bp, Homo sapien
atggcaactgaagggaaaagctgttcgatgtca

SEQ ID NO: 1028706 - DNA, 33 bp, Homo sapien
atggcaactgaagggacaagctgttcgatgtca

SEQ ID NO: 1028707 - DNA, 33 bp, Homo sapien
agcatgtcaatgtgagaaacagcctacaagggt

SEQ ID NO: 1028708 - DNA, 33 bp, Homo sapien
agcatgtcaatgtgagcaacagcctacaagggt

SEQ ID NO: 1028709 - DNA, 33 bp, Homo sapien
catacaatttggagccagagtgctgctttatct

SEQ ID NO: 1028710 - DNA, 33 bp, Homo sapien
catacaatttggagcccgagtgctgctttatct

SEQ ID NO: 1028711 - DNA, 33 bp, Homo sapien
tgtctgccaccatgaaatatgatgttagctgtg

SEQ ID NO: 1028712 - DNA, 33 bp, Homo sapien
tgtctgccaccatgaagtatgatgttagctgtg

SEQ ID NO: 1028713 - DNA, 33 bp, Homo sapien
ccagtggtgaccggaaagaagcaaccttcctaa

SEQ ID NO: 1028714 - DNA, 33 bp, Homo sapien
ccagtggtgaccggaatgaagcaaccttcctaa

SEQ ID NO: 1028715 - DNA, 33 bp, Homo sapien
cgggccacactcgttacggtttacacaggcatc

SEQ ID NO: 1028716 - DNA, 33 bp, Homo sapien
cgggccacactcgttagggtttacacaggcatc

SEQ ID NO: 1028717 - DNA, 33 bp, Homo sapien
ccaggagttgtgattcaatgctctatactgagg

SEQ ID NO: 1028718 - DNA, 33 bp, Homo sapien
ccaggagttgtgattcgatgctctatactgagg

SEQ ID NO: 1028719 - DNA, 33 bp, Homo sapien
ctttacaaacatggtaccaacataattcactgg

SEQ ID NO: 1028720 - DNA, 33 bp, Homo sapien
ctttacaaacatggtatcaacataattcactgg

SEQ ID NO: 1028721 - DNA, 33 bp, Homo sapien
gagtgaaaggagctagacaaaagagtatgcaga

SEQ ID NO: 1028722 - DNA, 33 bp, Homo sapien
gagtgaaaggagctagtcaaaagagtatgcaga

SEQ ID NO: 1028723 - DNA, 33 bp, Homo sapien
ccaatttatttcgaatcatctgtggctgctttt

SEQ ID NO: 1028724 - DNA, 33 bp, Homo sapien
ccaatttatttcgaattatctgtggctgctttt

SEQ ID NO: 1028725 - DNA, 33 bp, Homo sapien
tccccggacttttctaaaagctgctggcaggtc

SEQ ID NO: 1028726 - DNA, 33 bp, Homo sapien
tccccggacttttctagaagctgctggcaggtc

SEQ ID NO: 1028727 - DNA, 33 bp, Homo sapien
tcagccgatattttaaagtctgtaacgagcatg

SEQ ID NO: 1028728 - DNA, 33 bp, Homo sapien
tcagccgatattttaaggtctgtaacgagcatg

SEQ ID NO: 1028729 - DNA, 33 bp, Homo sapien
acctggagtcactagagaaagacagcctcattt

SEQ ID NO: 1028730 - DNA, 33 bp, Homo sapien
acctggagtcactagataaagacagcctcattt

SEQ ID NO: 1028731 - DNA, 33 bp, Homo sapien
gatgtatgttgccatacgcacttttcattctct

SEQ ID NO: 1028732 - DNA, 33 bp, Homo sapien
gatgtatgttgccatatgcacttttcattctct

SEQ ID NO: 1028733 - DNA, 33 bp, Homo sapien
ccagctccatgtgcaacgagaactccagtggaa

SEQ ID NO: 1028734 - DNA, 33 bp, Homo sapien
ccagctccatgtgcaaggagaactccagtggaa

SEQ ID NO: 1028735 - DNA, 33 bp, Homo sapien
ataaagcagctctcatcaaacaggaactattga

SEQ ID NO: 1028736 - DNA, 33 bp, Homo sapien
ataaagcagctctcattaaacaggaactattga

SEQ ID NO: 1028737 - DNA, 33 bp, Homo sapien
cctggagccatagtccacccaacaccagggtga

SEQ ID NO: 1028738 - DNA, 33 bp, Homo sapien
cctggagccatagtccgcccaacaccagggtga

SEQ ID NO: 1028739 - DNA, 33 bp, Homo sapien
gtctctgttttttagcgctcttctcgaatggtt

SEQ ID NO: 1028740 - DNA, 33 bp, Homo sapien
gtctctgttttttagctctcttctcgaatggtt

SEQ ID NO: 1028741 - DNA, 33 bp, Homo sapien
aaatacaggcatttaacgtaacactggagagta

SEQ ID NO: 1028742 - DNA, 33 bp, Homo sapien
aaatacaggcatttaatgtaacactggagagta

SEQ ID NO: 1028743 - DNA, 33 bp, Homo sapien
accatgcataagtcaacatacagtagacatttc

SEQ ID NO: 1028744 - DNA, 33 bp, Homo sapien
accatgcataagtcaatatacagtagacatttc

SEQ ID NO: 1028745 - DNA, 33 bp, Homo sapien
catgggcctgtgttcaggtgcatacgtggggcc

SEQ ID NO: 1028746 - DNA, 33 bp, Homo sapien
catgggcctgtgttcatgtgcatacgtggggcc

SEQ ID NO: 1028747 - DNA, 33 bp, Homo sapien
tccctctaagacatcaccctttctggttcaccg

SEQ ID NO: 1028748 - DNA, 33 bp, Homo sapien
tccctctaagacatcatcctttctggttcaccg

SEQ ID NO: 1028749 - DNA, 33 bp, Homo sapien
acctgccaaccttgacaccacagaagggagagg

SEQ ID NO: 1028750 - DNA, 33 bp, Homo sapien
acctgccaaccttgacgccacagaagggagagg

SEQ ID NO: 1028751 - DNA, 33 bp, Homo sapien
taggtttttattcctcaactgaacaatctcctc

SEQ ID NO: 1028752 - DNA, 33 bp, Homo sapien
taggtttttattcctcgactgaacaatctcctc

SEQ ID NO: 1028753 - DNA, 33 bp, Homo sapien
acctgcttgtagacacgctcagaggccgaagat

SEQ ID NO: 1028754 - DNA, 33 bp, Homo sapien
acctgcttgtagacactctcagaggccgaagat

SEQ ID NO: 1028755 - DNA, 33 bp, Homo sapien
cttggagaacacatccaaagtaccttttaaagg

SEQ ID NO: 1028756 - DNA, 33 bp, Homo sapien
cttggagaacacatccgaagtaccttttaaagg

SEQ ID NO: 1028757 - DNA, 33 bp, Homo sapien
gctctgcaggagctcacggaggagaatgtgctg

SEQ ID NO: 1028758 - DNA, 33 bp, Homo sapien
gctctgcaggagctcatggaggagaatgtgctg

SEQ ID NO: 1028759 - DNA, 33 bp, Homo sapien
aagttgtatgtatcgaaagagactatgaagaca

SEQ ID NO: 1028760 - DNA, 33 bp, Homo sapien
aagttgtatgtatcgagagagactatgaagaca

SEQ ID NO: 1028761 - DNA, 33 bp, Homo sapien
gaccggcagatgcggacggccttggagtccatt

SEQ ID NO: 1028762 - DNA, 33 bp, Homo sapien
gaccggcagatgcggatggccttggagtccatt

SEQ ID NO: 1028763 - DNA, 33 bp, Homo sapien
ggccctgctagcctgaaggacctcaccgagcac

SEQ ID NO: 1028764 - DNA, 33 bp, Homo sapien
ggccctgctagcctgagggacctcaccgagcac

SEQ ID NO: 1028765 - DNA, 33 bp, Homo sapien
aaacaacagaaatttaactactcgaagttctgg

SEQ ID NO: 1028766 - DNA, 33 bp, Homo sapien
aaacaacagaaatttatctactcgaagttctgg

SEQ ID NO: 1028767 - DNA, 33 bp, Homo sapien
gggtctggtagttttacaagaagaagacagacc

SEQ ID NO: 1028768 - DNA, 33 bp, Homo sapien
gggtctggtagttttataagaagaagacagacc

SEQ ID NO: 1028769 - DNA, 33 bp, Homo sapien
cactcccatcataacccattaatccattaacct

SEQ ID NO: 1028770 - DNA, 33 bp, Homo sapien
cactcccatcataacctattaatccattaacct

SEQ ID NO: 1028771 - DNA, 33 bp, Homo sapien
ttaatccattaatccaagaatagatgaatcctg

SEQ ID NO: 1028772 - DNA, 33 bp, Homo sapien
ttaatccattaatccatgaatagatgaatcctg

SEQ ID NO: 1028773 - DNA, 33 bp, Homo sapien
ctgtaacaaagtatctcaaactgggaatgaagg

SEQ ID NO: 1028774 - DNA, 33 bp, Homo sapien
ctgtaacaaagtatcttaaactgggaatgaagg

SEQ ID NO: 1028775 - DNA, 33 bp, Homo sapien
gtgcctccatcagtgaaaggaaaggactttctg

SEQ ID NO: 1028776 - DNA, 33 bp, Homo sapien
gtgcctccatcagtgagaggaaaggactttctg

SEQ ID NO: 1028777 - DNA, 33 bp, Homo sapien
gactcctgagtccacacgcttaatcacgttgga

SEQ ID NO: 1028778 - DNA, 33 bp, Homo sapien
gactcctgagtccacatgcttaatcacgttgga

SEQ ID NO: 1028779 - DNA, 33 bp, Homo sapien
atgacagaaggcagacaatcaccaaatcataaa

SEQ ID NO: 1028780 - DNA, 33 bp, Homo sapien
atgacagaaggcagacgatcaccaaatcataaa

SEQ ID NO: 1028781 - DNA, 33 bp, Homo sapien
tgtgcaaagtcaaaacaccattactgtggatca

SEQ ID NO: 1028782 - DNA, 33 bp, Homo sapien
tgtgcaaagtcaaaacgccattactgtggatca

SEQ ID NO: 1028783 - DNA, 33 bp, Homo sapien
gactgatcctcccaagcacagctgagttgcaca

SEQ ID NO: 1028784 - DNA, 33 bp, Homo sapien
gactgatcctcccaagtacagctgagttgcaca

SEQ ID NO: 1028785 - DNA, 33 bp, Homo sapien
tctgcctgtggtgtggcccaatgaacctgaggc

SEQ ID NO: 1028786 - DNA, 33 bp, Homo sapien
tctgcctgtggtgtggtccaatgaacctgaggc

SEQ ID NO: 1028787 - DNA, 33 bp, Homo sapien
catctgctaactcttcactcaaggtcaaagtta

SEQ ID NO: 1028788 - DNA, 33 bp, Homo sapien
catctgctaactcttcgctcaaggtcaaagtta

SEQ ID NO: 1028789 - DNA, 33 bp, Homo sapien
ccagacagggcttacacgtgccagtggacctaa

SEQ ID NO: 1028790 - DNA, 33 bp, Homo sapien
ccagacagggcttacatgtgccagtggacctaa

SEQ ID NO: 1028791 - DNA, 33 bp, Homo sapien
cccagggtgaagcatgaatctgcacatggggag

SEQ ID NO: 1028792 - DNA, 33 bp, Homo sapien
cccagggtgaagcatggatctgcacatggggag

SEQ ID NO: 1028793 - DNA, 33 bp, Homo sapien
gcaaagtcaaattcacggccacttttcaaagtt

SEQ ID NO: 1028794 - DNA, 33 bp, Homo sapien
gcaaagtcaaattcactgccacttttcaaagtt

SEQ ID NO: 1028795 - DNA, 33 bp, Homo sapien
tgactttgcctaagacacctcataggccaaaga

SEQ ID NO: 1028796 - DNA, 33 bp, Homo sapien
tgactttgcctaagacgcctcataggccaaaga

SEQ ID NO: 1028797 - DNA, 33 bp, Homo sapien
aggtaaatcagccaccccaagcactgaagacag

SEQ ID NO: 1028798 - DNA, 33 bp, Homo sapien
aggtaaatcagccacctcaagcactgaagacag

SEQ ID NO: 1028799 - DNA, 33 bp, Homo sapien
tttaggagctgataaacggaaaacaaggacgct

SEQ ID NO: 1028800 - DNA, 33 bp, Homo sapien
tttaggagctgataaatggaaaacaaggacgct

SEQ ID NO: 1028801 - DNA, 33 bp, Homo sapien
tagtgataattaccacacactgagggcttatat

SEQ ID NO: 1028802 - DNA, 33 bp, Homo sapien
tagtgataattaccacgcactgagggcttatat

SEQ ID NO: 1028803 - DNA, 33 bp, Homo sapien
ccgccagaggagtggccaagttcgtgtgcaggg

SEQ ID NO: 1028804 - DNA, 33 bp, Homo sapien
ccgccagaggagtggctaagttcgtgtgcaggg

SEQ ID NO: 1028805 - DNA, 33 bp, Homo sapien
gattccgatttttgacacttgcgttatccctac

SEQ ID NO: 1028806 - DNA, 33 bp, Homo sapien
gattccgatttttgacgcttgcgttatccctac

SEQ ID NO: 1028807 - DNA, 33 bp, Homo sapien
gcctgagttctgcttcacttttaaagctctgcc

SEQ ID NO: 1028808 - DNA, 33 bp, Homo sapien
gcctgagttctgcttcgcttttaaagctctgcc

SEQ ID NO: 1028809 - DNA, 33 bp, Homo sapien
catcttgtggtgtataccatttgttctgtggga

SEQ ID NO: 1028810 - DNA, 33 bp, Homo sapien
catcttgtggtgtatatcatttgttctgtggga

SEQ ID NO: 1028811 - DNA, 33 bp, Homo sapien
actatgtgaggtcagacgtcttaaaaatgtgga

SEQ ID NO: 1028812 - DNA, 33 bp, Homo sapien
actatgtgaggtcagatgtcttaaaaatgtgga

SEQ ID NO: 1028813 - DNA, 33 bp, Homo sapien
tgcaaggaagtggagacctgggaaactgttctt

SEQ ID NO: 1028814 - DNA, 33 bp, Homo sapien
tgcaaggaagtggagatctgggaaactgttctt

SEQ ID NO: 1028815 - DNA, 33 bp, Homo sapien
cctgcacagagataaaaataacagcggtacagg

SEQ ID NO: 1028816 - DNA, 33 bp, Homo sapien
cctgcacagagataaatataacagcggtacagg

SEQ ID NO: 1028817 - DNA, 33 bp, Homo sapien
ttcctcttgaaagctacctaatattccactgaa

SEQ ID NO: 1028818 - DNA, 33 bp, Homo sapien
ttcctcttgaaagctatctaatattccactgaa

SEQ ID NO: 1028819 - DNA, 33 bp, Homo sapien
tgggcattcctccagaataatactcacagatct

SEQ ID NO: 1028820 - DNA, 33 bp, Homo sapien
tgggcattcctccagattaatactcacagatct

SEQ ID NO: 1028821 - DNA, 33 bp, Homo sapien
ctccagtactttctcacagcagcataatcagac

SEQ ID NO: 1028822 - DNA, 33 bp, Homo sapien
ctccagtactttctcatagcagcataatcagac

SEQ ID NO: 1028823 - DNA, 33 bp, Homo sapien
tctgtcaggatgtgaccgctggttttaagcgat

SEQ ID NO: 1028824 - DNA, 33 bp, Homo sapien
tctgtcaggatgtgactgctggttttaagcgat

SEQ ID NO: 1028825 - DNA, 33 bp, Homo sapien
caacagcaatgacttaacatttctatggtttct

SEQ ID NO: 1028826 - DNA, 33 bp, Homo sapien
caacagcaatgacttatcatttctatggtttct

SEQ ID NO: 1028827 - DNA, 33 bp, Homo sapien
agaagggacagctaaactctccatatcagggac

SEQ ID NO: 1028828 - DNA, 33 bp, Homo sapien
agaagggacagctaaagtctccatatcagggac

SEQ ID NO: 1028829 - DNA, 33 bp, Homo sapien
ctggtgcagaagctaccgcctgccagccacacc

SEQ ID NO: 1028830 - DNA, 33 bp, Homo sapien
ctggtgcagaagctactgcctgccagccacacc

SEQ ID NO: 1028831 - DNA, 33 bp, Homo sapien
agacgtgctacccaccccacttaagatgcctgc

SEQ ID NO: 1028832 - DNA, 33 bp, Homo sapien
agacgtgctacccacctcacttaagatgcctgc

SEQ ID NO: 1028833 - DNA, 33 bp, Homo sapien
atctgttctccacagccatgaagccctggacaa

SEQ ID NO: 1028834 - DNA, 33 bp, Homo sapien
atctgttctccacagcgatgaagccctggacaa

SEQ ID NO: 1028835 - DNA, 33 bp, Homo sapien
ggctcgtgtgtagagaaaaagagaatggccgga

SEQ ID NO: 1028836 - DNA, 33 bp, Homo sapien
ggctcgtgtgtagagacaaagagaatggccgga

SEQ ID NO: 1028837 - DNA, 33 bp, Homo sapien
ctcctcagctaattgaaaacaaaaagggacgca

SEQ ID NO: 1028838 - DNA, 33 bp, Homo sapien
ctcctcagctaattgagaacaaaaagggacgca

SEQ ID NO: 1028839 - DNA, 33 bp, Homo sapien
tgaggcatttctaaaaatatcagtcaactggtt

SEQ ID NO: 1028840 - DNA, 33 bp, Homo sapien
tgaggcatttctaaaactatcagtcaactggtt

SEQ ID NO: 1028841 - DNA, 33 bp, Homo sapien
caaccagatgaactctgacgtacttggtgccca

SEQ ID NO: 1028842 - DNA, 33 bp, Homo sapien
caaccagatgaactcttacgtacttggtgccca

SEQ ID NO: 1028843 - DNA, 33 bp, Homo sapien
cccatcagcagcatgaacaacaccgccctgtcc

SEQ ID NO: 1028844 - DNA, 33 bp, Homo sapien
cccatcagcagcatgagcaacaccgccctgtcc

SEQ ID NO: 1028845 - DNA, 33 bp, Homo sapien
ggggcaaaagaaaaaaatatcagctaataccta

SEQ ID NO: 1028846 - DNA, 33 bp, Homo sapien
ggggcaaaagaaaaaactatcagctaataccta

SEQ ID NO: 1028847 - DNA, 33 bp, Homo sapien
cataatgccaggaagcacaaaatatcccatggg

SEQ ID NO: 1028848 - DNA, 33 bp, Homo sapien
cataatgccaggaagctcaaaatatcccatggg

SEQ ID NO: 1028849 - DNA, 33 bp, Homo sapien
atatgtagggaaatgaagaatgtgcaattttct

SEQ ID NO: 1028850 - DNA, 33 bp, Homo sapien
atatgtagggaaatgacgaatgtgcaattttct

SEQ ID NO: 1028851 - DNA, 33 bp, Homo sapien
gatggtaagagaaagcacgcatttttattgtcc

SEQ ID NO: 1028852 - DNA, 33 bp, Homo sapien
gatggtaagagaaagcgcgcatttttattgtcc

SEQ ID NO: 1028853 - DNA, 33 bp, Homo sapien
ggagagtttacttccagctccctctttcaatag

SEQ ID NO: 1028854 - DNA, 33 bp, Homo sapien
ggagagtttacttccatctccctctttcaatag

SEQ ID NO: 1028855 - DNA, 33 bp, Homo sapien
ctccgtctctggaacaaaaaatgtgaatcatgt

SEQ ID NO: 1028856 - DNA, 33 bp, Homo sapien
ctccgtctctggaacagaaaatgtgaatcatgt

SEQ ID NO: 1028857 - DNA, 33 bp, Homo sapien
gtacccccagttgggagactaaagctgtgctag

SEQ ID NO: 1028858 - DNA, 33 bp, Homo sapien
gtacccccagttgggatactaaagctgtgctag

SEQ ID NO: 1028859 - DNA, 33 bp, Homo sapien
tttcttatttgttccgcagggatgtctaactac

SEQ ID NO: 1028860 - DNA, 33 bp, Homo sapien
tttcttatttgttccgtagggatgtctaactac

SEQ ID NO: 1028861 - DNA, 33 bp, Homo sapien
caaatacacagatcaactgacgtattcatcaat

SEQ ID NO: 1028862 - DNA, 33 bp, Homo sapien
caaatacacagatcaattgacgtattcatcaat

SEQ ID NO: 1028863 - DNA, 33 bp, Homo sapien
aaaagctcagtgcaacggtatgagtcagggctc

SEQ ID NO: 1028864 - DNA, 33 bp, Homo sapien
aaaagctcagtgcaactgtatgagtcagggctc

SEQ ID NO: 1028865 - DNA, 33 bp, Homo sapien
acttttcggatctcccacttttctgtgctctgc

SEQ ID NO: 1028866 - DNA, 33 bp, Homo sapien
acttttcggatctcccgcttttctgtgctctgc

SEQ ID NO: 1028867 - DNA, 33 bp, Homo sapien
ttttaatcccggtctacacccctcctgagtccc

SEQ ID NO: 1028868 - DNA, 33 bp, Homo sapien
ttttaatcccggtctatacccctcctgagtccc

SEQ ID NO: 1028869 - DNA, 33 bp, Homo sapien
gagactttccctactcaaatttacatccaggat

SEQ ID NO: 1028870 - DNA, 33 bp, Homo sapien
gagactttccctactcgaatttacatccaggat

SEQ ID NO: 1028871 - DNA, 33 bp, Homo sapien
ttttcatctcttaatgacaaactctgtactgtt

SEQ ID NO: 1028872 - DNA, 33 bp, Homo sapien
ttttcatctcttaatggcaaactctgtactgtt

SEQ ID NO: 1028873 - DNA, 33 bp, Homo sapien
gaggtcaacctttgcacgtgggtctcgtgagag

SEQ ID NO: 1028874 - DNA, 33 bp, Homo sapien
gaggtcaacctttgcatgtgggtctcgtgagag

SEQ ID NO: 1028875 - DNA, 33 bp, Homo sapien
cgtgagagatttccaactcgttccagcgacagg

SEQ ID NO: 1028876 - DNA, 33 bp, Homo sapien
cgtgagagatttccaattcgttccagcgacagg

SEQ ID NO: 1028877 - DNA, 33 bp, Homo sapien
ccctggattcttagaacgtctgcctggtgactt

SEQ ID NO: 1028878 - DNA, 33 bp, Homo sapien
ccctggattcttagaatgtctgcctggtgactt

SEQ ID NO: 1028879 - DNA, 33 bp, Homo sapien
ggctctcctagtctgacgcagaacatgtcacca

SEQ ID NO: 1028880 - DNA, 33 bp, Homo sapien
ggctctcctagtctgatgcagaacatgtcacca

SEQ ID NO: 1028881 - DNA, 33 bp, Homo sapien
catagtcccaagtccacactttctctcctctct

SEQ ID NO: 1028882 - DNA, 33 bp, Homo sapien
catagtcccaagtccatactttctctcctctct

SEQ ID NO: 1028883 - DNA, 33 bp, Homo sapien
caattccctccagggccgaccatttccaaacct

SEQ ID NO: 1028884 - DNA, 33 bp, Homo sapien
caattccctccagggctgaccatttccaaacct

SEQ ID NO: 1028885 - DNA, 33 bp, Homo sapien
tgtgatgtttgcacacaaatggacagatcagtg

SEQ ID NO: 1028886 - DNA, 33 bp, Homo sapien
tgtgatgtttgcacacgaatggacagatcagtg

SEQ ID NO: 1028887 - DNA, 33 bp, Homo sapien
atttaaaatgggagttaaaaatgatgcaccaac

SEQ ID NO: 1028888 - DNA, 33 bp, Homo sapien
atttaaaatgggagtttaaaatgatgcaccaac

SEQ ID NO: 1028889 - DNA, 33 bp, Homo sapien
cacagaggttggcccaaagtcaagtgggagaga

SEQ ID NO: 1028890 - DNA, 33 bp, Homo sapien
cacagaggttggcccagagtcaagtgggagaga

SEQ ID NO: 1028891 - DNA, 33 bp, Homo sapien
tctgattaatatcaaaacaatacgtctcttggc

SEQ ID NO: 1028892 - DNA, 33 bp, Homo sapien
tctgattaatatcaaagcaatacgtctcttggc

SEQ ID NO: 1028893 - DNA, 33 bp, Homo sapien
agaaagaagcaaaagcacagactgaagctcaaa

SEQ ID NO: 1028894 - DNA, 33 bp, Homo sapien
agaaagaagcaaaagcgcagactgaagctcaaa

SEQ ID NO: 1028895 - DNA, 33 bp, Homo sapien; identical to SEQ ID NO: 1028893

SEQ ID NO: 1028896 - DNA, 33 bp, Homo sapien; identical to SEQ ID NO: 1028894

SEQ ID NO: 1028897 - DNA, 33 bp, Homo sapien
cctctctaaaggccacaatccatgtctataaag

SEQ ID NO: 1028898 - DNA, 33 bp, Homo sapien
cctctctaaaggccacgatccatgtctataaag

SEQ ID NO: 1028899 - DNA, 33 bp, Homo sapien
aaatagatgactaaaacgtcccactttccaggg

SEQ ID NO: 1028900 - DNA, 33 bp, Homo sapien
aaatagatgactaaaatgtcccactttccaggg

SEQ ID NO: 1028901 - DNA, 33 bp, Homo sapien
gtagcacttattaccacccagtttctgcaagtc

SEQ ID NO: 1028902 - DNA, 33 bp, Homo sapien
gtagcacttattaccatccagtttctgcaagtc

SEQ ID NO: 1028903 - DNA, 33 bp, Homo sapien
aagttaggcagctcccaaaatggttcccagggg

SEQ ID NO: 1028904 - DNA, 33 bp, Homo sapien
aagttaggcagctcccgaaatggttcccagggg

SEQ ID NO: 1028905 - DNA, 33 bp, Homo sapien
agtgaatggattttcaagtgtgtgatacagaaa

SEQ ID NO: 1028906 - DNA, 33 bp, Homo sapien
agtgaatggattttcaggtgtgtgatacagaaa

SEQ ID NO: 1028907 - DNA, 33 bp, Homo sapien
gtcctgctgccaacctgagggaacctctgtgcc

SEQ ID NO: 1028908 - DNA, 33 bp, Homo sapien
gtcctgctgccaaccttagggaacctctgtgcc

SEQ ID NO: 1028909 - DNA, 33 bp, Homo sapien
acagtgtattccccaccggatcttggcagccta

SEQ ID NO: 1028910 - DNA, 33 bp, Homo sapien
acagtgtattccccactggatcttggcagccta

SEQ ID NO: 1028911 - DNA, 33 bp, Homo sapien
aaagagtgagccggtaactcattactttcgctc

SEQ ID NO: 1028912 - DNA, 33 bp, Homo sapien
aaagagtgagccggtatctcattactttcgctc

SEQ ID NO: 1028913 - DNA, 33 bp, Homo sapien
taggctaggcgcggtaaggattagccctgtaat

SEQ ID NO: 1028914 - DNA, 33 bp, Homo sapien
taggctaggcgcggtagggattagccctgtaat

SEQ ID NO: 1028915 - DNA, 33 bp, Homo sapien
tttttttttctgccaaaatttatagctgccctg

SEQ ID NO: 1028916 - DNA, 33 bp, Homo sapien
tttttttttctgccaatatttatagctgccctg

SEQ ID NO: 1028917 - DNA, 33 bp, Homo sapien
actgtggagggaggaaaaattgagggagcatag

SEQ ID NO: 1028918 - DNA, 33 bp, Homo sapien
actgtggagggaggaagaattgagggagcatag

SEQ ID NO: 1028919 - DNA, 33 bp, Homo sapien
acaaaataaatgacaggaaaggcatcatttctc

SEQ ID NO: 1028920 - DNA, 33 bp, Homo sapien
acaaaataaatgacagtaaaggcatcatttctc

SEQ ID NO: 1028921 - DNA, 33 bp, Homo sapien
ttgtagcacgcgttaccgcttcaccccttttta

SEQ ID NO: 1028922 - DNA, 33 bp, Homo sapien
ttgtagcacgcgttactgcttcaccccttttta

SEQ ID NO: 1028923 - DNA, 33 bp, Homo sapien
aggcctgctgtacctcactggatccatggactg

SEQ ID NO: 1028924 - DNA, 33 bp, Homo sapien
aggcctgctgtacctcgctggatccatggactg

SEQ ID NO: 1028925 - DNA, 33 bp, Homo sapien
gcacaaatttcaataaagctatacctacgattg

SEQ ID NO: 1028926 - DNA, 33 bp, Homo sapien
gcacaaatttcaataatgctatacctacgattg

SEQ ID NO: 1028927 - DNA, 33 bp, Homo sapien
cctgttctgttttccacgttgcaatcaagctct

SEQ ID NO: 1028928 - DNA, 33 bp, Homo sapien
cctgttctgttttccatgttgcaatcaagctct

SEQ ID NO: 1028929 - DNA, 33 bp, Homo sapien
tacaccaactaggaacaaggcactgtccaagct

SEQ ID NO: 1028930 - DNA, 33 bp, Homo sapien
tacaccaactaggaaccaggcactgtccaagct

SEQ ID NO: 1028931 - DNA, 33 bp, Homo sapien
taacatattaacacatcaaagttaggccatagg

SEQ ID NO: 1028932 - DNA, 33 bp, Homo sapien
taacatattaacacatgaaagttaggccatagg

SEQ ID NO: 1028933 - DNA, 33 bp, Homo sapien
gatgccacatggataaacgtgcctcatggcaaa

SEQ ID NO: 1028934 - DNA, 33 bp, Homo sapien
gatgccacatggataagcgtgcctcatggcaaa

SEQ ID NO: 1028935 - DNA, 33 bp, Homo sapien
gaagggagcaaatgcacgggaaacataagtctt

SEQ ID NO: 1028936 - DNA, 33 bp, Homo sapien
gaagggagcaaatgcatgggaaacataagtctt

SEQ ID NO: 1028937 - DNA, 33 bp, Homo sapien
gtggctcagaactggcgcagagtaagacaagac

SEQ ID NO: 1028938 - DNA, 33 bp, Homo sapien
gtggctcagaactggctcagagtaagacaagac

SEQ ID NO: 1028939 - DNA, 33 bp, Homo sapien
ttcaaaggtccaaaacagctttggcaaagggta

SEQ ID NO: 1028940 - DNA, 33 bp, Homo sapien
ttcaaaggtccaaaacggctttggcaaagggta

SEQ ID NO: 1028941 - DNA, 33 bp, Homo sapien
gactgctgatagtaaactggaattcctctgagc

SEQ ID NO: 1028942 - DNA, 33 bp, Homo sapien
gactgctgatagtaaattggaattcctctgagc

SEQ ID NO: 1028943 - DNA, 33 bp, Homo sapien
tgctaagtccaataaaacatggctagtgtcagt

SEQ ID NO: 1028944 - DNA, 33 bp, Homo sapien
tgctaagtccaataaatcatggctagtgtcagt

SEQ ID NO: 1028945 - DNA, 33 bp, Homo sapien
actgcacaggtggagacagagtgcatcagagcc

SEQ ID NO: 1028946 - DNA, 33 bp, Homo sapien
actgcacaggtggagagagagtgcatcagagcc

SEQ ID NO: 1028947 - DNA, 33 bp, Homo sapien
ttaacacaaaatggaaatcaattttacaaagat

SEQ ID NO: 1028948 - DNA, 33 bp, Homo sapien
ttaacacaaaatggaagtcaattttacaaagat

SEQ ID NO: 1028949 - DNA, 33 bp, Homo sapien
catgactccaggttgaggcccatttttttcatc

SEQ ID NO: 1028950 - DNA, 33 bp, Homo sapien
catgactccaggttgatgcccatttttttcatc

SEQ ID NO: 1028951 - DNA, 33 bp, Homo sapien
aaaaagtaaagaaaaacggagagcttgagctta

SEQ ID NO: 1028952 - DNA, 33 bp, Homo sapien
aaaaagtaaagaaaaatggagagcttgagctta

SEQ ID NO: 1028953 - DNA, 33 bp, Homo sapien
acattttcacccgtaacaccttgtcacccgtac

SEQ ID NO: 1028954 - DNA, 33 bp, Homo sapien
acattttcacccgtaataccttgtcacccgtac

SEQ ID NO: 1028955 - DNA, 33 bp, Homo sapien
tttttctaacacagaaccttaccgtgtcaccag

SEQ ID NO: 1028956 - DNA, 33 bp, Homo sapien
tttttctaacacagaatcttaccgtgtcaccag

SEQ ID NO: 1028957 - DNA, 33 bp, Homo sapien
attcaaattttgcctacgtgggagggagaatcc

SEQ ID NO: 1028958 - DNA, 33 bp, Homo sapien
attcaaattttgcctatgtgggagggagaatcc

SEQ ID NO: 1028959 - DNA, 33 bp, Homo sapien
ggcctgtcatggacgaagagctattattgcatg

SEQ ID NO: 1028960 - DNA, 33 bp, Homo sapien
ggcctgtcatggacgaggagctattattgcatg

SEQ ID NO: 1028961 - DNA, 33 bp, Homo sapien
aaccagatacattcaccgtcgtattatcatcac

SEQ ID NO: 1028962 - DNA, 33 bp, Homo sapien
aaccagatacattcactgtcgtattatcatcac

SEQ ID NO: 1028963 - DNA, 33 bp, Homo sapien
tgctaacagccataagaacctgagcacctgcca

SEQ ID NO: 1028964 - DNA, 33 bp, Homo sapien
tgctaacagccataagtacctgagcacctgcca

SEQ ID NO: 1028965 - DNA, 33 bp, Homo sapien
gtgagaagcaatgacccatctaaaacttctgca

SEQ ID NO: 1028966 - DNA, 33 bp, Homo sapien
gtgagaagcaatgacctatctaaaacttctgca

SEQ ID NO: 1028967 - DNA, 33 bp, Homo sapien
gaatttatctgcatcacctctttttctcttctg

SEQ ID NO: 1028968 - DNA, 33 bp, Homo sapien
gaatttatctgcatcatctctttttctcttctg

SEQ ID NO: 1028969 - DNA, 33 bp, Homo sapien
gagaatgtggcttccacccagaaagtcccagca

SEQ ID NO: 1028970 - DNA, 33 bp, Homo sapien
gagaatgtggcttccatccagaaagtcccagca

SEQ ID NO: 1028971 - DNA, 33 bp, Homo sapien
cgcagtgaaatcagcacggccggactgtctata

SEQ ID NO: 1028972 - DNA, 33 bp, Homo sapien
cgcagtgaaatcagcatggccggactgtctata

SEQ ID NO: 1028973 - DNA, 33 bp, Homo sapien
tctaccatacctgtcacagtacttgctgctaca

SEQ ID NO: 1028974 - DNA, 33 bp, Homo sapien
tctaccatacctgtcatagtacttgctgctaca

SEQ ID NO: 1028975 - DNA, 33 bp, Homo sapien
agtgtttttggggggacagaattagcaataatt

SEQ ID NO: 1028976 - DNA, 33 bp, Homo sapien
agtgtttttggggggagagaattagcaataatt

SEQ ID NO: 1028977 - DNA, 33 bp, Homo sapien
gggagtgctgtagtggccaaaggactttcacac

SEQ ID NO: 1028978 - DNA, 33 bp, Homo sapien
gggagtgctgtagtggtcaaaggactttcacac

SEQ ID NO: 1028979 - DNA, 33 bp, Homo sapien
gctctatccttaccacagggaaaaagctagaca

SEQ ID NO: 1028980 - DNA, 33 bp, Homo sapien
gctctatccttaccacggggaaaaagctagaca

SEQ ID NO: 1028981 - DNA, 33 bp, Homo sapien
tctcaacttcctcctacaaattcacattttaag

SEQ ID NO: 1028982 - DNA, 33 bp, Homo sapien
tctcaacttcctcctataaattcacattttaag

SEQ ID NO: 1028983 - DNA, 33 bp, Homo sapien
gtctgaggtcttcagccacatgtcacaaggctg

SEQ ID NO: 1028984 - DNA, 33 bp, Homo sapien
gtctgaggtcttcagctacatgtcacaaggctg

SEQ ID NO: 1028985 - DNA, 33 bp, Homo sapien
tggggggcttcagggcaaagagtaggattacca

SEQ ID NO: 1028986 - DNA, 33 bp, Homo sapien
tggggggcttcagggcgaagagtaggattacca

SEQ ID NO: 1028987 - DNA, 33 bp, Homo sapien
tgatacgtatgttatgaatgtagatgaaactca

SEQ ID NO: 1028988 - DNA, 33 bp, Homo sapien
tgatacgtatgttatggatgtagatgaaactca

SEQ ID NO: 1028989 - DNA, 33 bp, Homo sapien
acaggacgcagggtaactaacagcagagtttta

SEQ ID NO: 1028990 - DNA, 33 bp, Homo sapien
acaggacgcagggtaattaacagcagagtttta

SEQ ID NO: 1028991 - DNA, 33 bp, Homo sapien
agttgtgccattacaaacaataccgaaaacagc

SEQ ID NO: 1028992 - DNA, 33 bp, Homo sapien
agttgtgccattacaagcaataccgaaaacagc

SEQ ID NO: 1028993 - DNA, 33 bp, Homo sapien
aactatgccaaggtacacgtggaaggatgctgt

SEQ ID NO: 1028994 - DNA, 33 bp, Homo sapien
aactatgccaaggtacgcgtggaaggatgctgt

SEQ ID NO: 1028995 - DNA, 33 bp, Homo sapien
tgagacaaagatgaacaaccacaaagaaaactg

SEQ ID NO: 1028996 - DNA, 33 bp, Homo sapien
tgagacaaagatgaaccaccacaaagaaaactg

SEQ ID NO: 1028997 - DNA, 33 bp, Homo sapien
gagcaaagtatcaagacgttagcttccaaatgg

SEQ ID NO: 1028998 - DNA, 33 bp, Homo sapien
gagcaaagtatcaagatgttagcttccaaatgg

SEQ ID NO: 1028999 - DNA, 33 bp, Homo sapien
ggtctatatctttctcaccagatcaaagggata

SEQ ID NO: 1029000 - DNA, 33 bp, Homo sapien
ggtctatatctttctctccagatcaaagggata

SEQ ID NO: 1029001 - DNA, 33 bp, Homo sapien
caggtggtaatacgaccgacagtcccaatgtgc

SEQ ID NO: 1029002 - DNA, 33 bp, Homo sapien
caggtggtaatacgactgacagtcccaatgtgc

SEQ ID NO: 1029003 - DNA, 33 bp, Homo sapien
gggatattgtttggcacgaaaaaggggtgaaga

SEQ ID NO: 1029004 - DNA, 33 bp, Homo sapien
gggatattgtttggcatgaaaaaggggtgaaga

SEQ ID NO: 1029005 - DNA, 33 bp, Homo sapien
ttgatgtggaaatatacccagactgtgaatgcc

SEQ ID NO: 1029006 - DNA, 33 bp, Homo sapien
ttgatgtggaaatatagccagactgtgaatgcc

SEQ ID NO: 1029007 - DNA, 33 bp, Homo sapien
tcttctctgcccagtagtaacagcctctgccat

SEQ ID NO: 1029008 - DNA, 33 bp, Homo sapien
tcttctctgcccagtattaacagcctctgccat

SEQ ID NO: 1029009 - DNA, 33 bp, Homo sapien
gagttaatagatggcacgaagaaggccaggatt

SEQ ID NO: 1029010 - DNA, 33 bp, Homo sapien
gagttaatagatggcatgaagaaggccaggatt

SEQ ID NO: 1029011 - DNA, 33 bp, Homo sapien
tagacaactttcacaaacagcttagaaaaatcc

SEQ ID NO: 1029012 - DNA, 33 bp, Homo sapien
tagacaactttcacaaccagcttagaaaaatcc

SEQ ID NO: 1029013 - DNA, 33 bp, Homo sapien
tagaaaaatcctgaaaatgtcccaagcgggctg

SEQ ID NO: 1029014 - DNA, 33 bp, Homo sapien
tagaaaaatcctgaaattgtcccaagcgggctg

SEQ ID NO: 1029015 - DNA, 33 bp, Homo sapien
ctggcaaggccagcaaaccactgggcaaaccgg

SEQ ID NO: 1029016 - DNA, 33 bp, Homo sapien
ctggcaaggccagcaagccactgggcaaaccgg

SEQ ID NO: 1029017 - DNA, 33 bp, Homo sapien
acgacaagcaggagtactacaagatgaagggag

SEQ ID NO: 1029018 - DNA, 33 bp, Homo sapien
acgacaagcaggagtattacaagatgaagggag

SEQ ID NO: 1029019 - DNA, 33 bp, Homo sapien
tgaatgcctactagagccctatgagtgtgcagc

SEQ ID NO: 1029020 - DNA, 33 bp, Homo sapien
tgaatgcctactagagtcctatgagtgtgcagc

SEQ ID NO: 1029021 - DNA, 33 bp, Homo sapien
tccagcttgcagacccagggacttctcagaatc

SEQ ID NO: 1029022 - DNA, 33 bp, Homo sapien
tccagcttgcagacccggggacttctcagaatc

SEQ ID NO: 1029023 - DNA, 33 bp, Homo sapien
tgcaggccaggtgtgacaagcacaaggaagaga

SEQ ID NO: 1029024 - DNA, 33 bp, Homo sapien
tgcaggccaggtgtgagaagcacaaggaagaga

SEQ ID NO: 1029025 - DNA, 33 bp, Homo sapien
ggtccatgcagccacactctgcaccctgatgtc

SEQ ID NO: 1029026 - DNA, 33 bp, Homo sapien
ggtccatgcagccacattctgcaccctgatgtc

SEQ ID NO: 1029027 - DNA, 33 bp, Homo sapien
ctttctgccactctgaactttaaggtgaccatt

SEQ ID NO: 1029028 - DNA, 33 bp, Homo sapien
ctttctgccactctgacctttaaggtgaccatt

SEQ ID NO: 1029029 - DNA, 33 bp, Homo sapien
gtgaactccacactgaagaccgggagactgggt

SEQ ID NO: 1029030 - DNA, 33 bp, Homo sapien
gtgaactccacactgaggaccgggagactgggt

SEQ ID NO: 1029031 - DNA, 33 bp, Homo sapien
accacagcctacttaccggcgagagaggaatat

SEQ ID NO: 1029032 - DNA, 33 bp, Homo sapien
accacagcctacttactggcgagagaggaatat

SEQ ID NO: 1029033 - DNA, 33 bp, Homo sapien
ccactggtatctgctacgaaggaaaggagaaat

SEQ ID NO: 1029034 - DNA, 33 bp, Homo sapien
ccactggtatctgctatgaaggaaaggagaaat

SEQ ID NO: 1029035 - DNA, 33 bp, Homo sapien
agtctattaaggaagacgtgtgggagaggcctg

SEQ ID NO: 1029036 - DNA, 33 bp, Homo sapien
agtctattaaggaagatgtgtgggagaggcctg

SEQ ID NO: 1029037 - DNA, 33 bp, Homo sapien
ctcaaaagagcaaaggaagcacttctgaatatt

SEQ ID NO: 1029038 - DNA, 33 bp, Homo sapien
ctcaaaagagcaaaggtagcacttctgaatatt

SEQ ID NO: 1029039 - DNA, 33 bp, Homo sapien
caacatctcaagttcagctgtagagacaactat

SEQ ID NO: 1029040 - DNA, 33 bp, Homo sapien
caacatctcaagttcatctgtagagacaactat

SEQ ID NO: 1029041 - DNA, 33 bp, Homo sapien
tccatgtcctcaccagaatttagtgttgtcaga

SEQ ID NO: 1029042 - DNA, 33 bp, Homo sapien
tccatgtcctcaccaggatttagtgttgtcaga

SEQ ID NO: 1029043 - DNA, 33 bp, Homo sapien
gccaagcttcaaaccacggcccccattccatcc

SEQ ID NO: 1029044 - DNA, 33 bp, Homo sapien
gccaagcttcaaaccatggcccccattccatcc

SEQ ID NO: 1029045 - DNA, 33 bp, Homo sapien
atctgggtctcattgaacaaactgcaacctcca

SEQ ID NO: 1029046 - DNA, 33 bp, Homo sapien
atctgggtctcattgagcaaactgcaacctcca

SEQ ID NO: 1029047 - DNA, 33 bp, Homo sapien
cacctaagctctggtgaattttaattagtcatg

SEQ ID NO: 1029048 - DNA, 33 bp, Homo sapien
cacctaagctctggtgcattttaattagtcatg

SEQ ID NO: 1029049 - DNA, 33 bp, Homo sapien
aatattctgggatccacaacatcctcttgagca

SEQ ID NO: 1029050 - DNA, 33 bp, Homo sapien
aatattctgggatccagaacatcctcttgagca

SEQ ID NO: 1029051 - DNA, 33 bp, Homo sapien
gtttagttagtagtaacgtaacaatgtcaatgt

SEQ ID NO: 1029052 - DNA, 33 bp, Homo sapien
gtttagttagtagtaatgtaacaatgtcaatgt

SEQ ID NO: 1029053 - DNA, 33 bp, Homo sapien
caggactgtgctaaagactacacttggcttatt

SEQ ID NO: 1029054 - DNA, 33 bp, Homo sapien
caggactgtgctaaaggctacacttggcttatt

SEQ ID NO: 1029055 - DNA, 33 bp, Homo sapien
accttcactctggggacgaagtgcagattccag

SEQ ID NO: 1029056 - DNA, 33 bp, Homo sapien
accttcactctggggatgaagtgcagattccag

SEQ ID NO: 1029057 - DNA, 33 bp, Homo sapien
atttatcatcaaatctcaaaaatagtctcttct

SEQ ID NO: 1029058 - DNA, 33 bp, Homo sapien
atttatcatcaaatcttaaaaatagtctcttct

SEQ ID NO: 1029059 - DNA, 33 bp, Homo sapien
gtctgggagtaaataccggctgtaggaacaaaa

SEQ ID NO: 1029060 - DNA, 33 bp, Homo sapien
gtctgggagtaaatactggctgtaggaacaaaa

SEQ ID NO: 1029061 - DNA, 33 bp, Homo sapien
ttgtgcctggaaagtacgctaccatcttgatag

SEQ ID NO: 1029062 - DNA, 33 bp, Homo sapien
ttgtgcctggaaagtatgctaccatcttgatag

SEQ ID NO: 1029063 - DNA, 33 bp, Homo sapien
aagcaatttggaaactgaccatcaagaataaag

SEQ ID NO: 1029064 - DNA, 33 bp, Homo sapien
aagcaatttggaaacttaccatcaagaataaag

SEQ ID NO: 1029065 - DNA, 33 bp, Homo sapien
gtgggtgactggccgaacctgactatcttagtt

SEQ ID NO: 1029066 - DNA, 33 bp, Homo sapien
gtgggtgactggccgatcctgactatcttagtt

SEQ ID NO: 1029067 - DNA, 33 bp, Homo sapien
tcttaatgtgcaatgaagacctaattttgagga

SEQ ID NO: 1029068 - DNA, 33 bp, Homo sapien
tcttaatgtgcaatgaggacctaattttgagga

SEQ ID NO: 1029069 - DNA, 33 bp, Homo sapien
caaataccatctgtgtcaatcctaccaagctga

SEQ ID NO: 1029070 - DNA, 33 bp, Homo sapien
caaataccatctgtgtgaatcctaccaagctga

SEQ ID NO: 1029071 - DNA, 33 bp, Homo sapien
taccagaccacagaaaattcggagtactctacc

SEQ ID NO: 1029072 - DNA, 33 bp, Homo sapien
taccagaccacagaaacttcggagtactctacc

SEQ ID NO: 1029073 - DNA, 33 bp, Homo sapien
ccagaggtcatgggaaccctttgggcagactcc

SEQ ID NO: 1029074 - DNA, 33 bp, Homo sapien
ccagaggtcatgggaatcctttgggcagactcc

SEQ ID NO: 1029075 - DNA, 33 bp, Homo sapien
ggtgtccatagatcaacgaatggataaacaaaa

SEQ ID NO: 1029076 - DNA, 33 bp, Homo sapien
ggtgtccatagatcaatgaatggataaacaaaa

SEQ ID NO: 1029077 - DNA, 33 bp, Homo sapien
ctccaatgatgcatacacaggtagtttttctag

SEQ ID NO: 1029078 - DNA, 33 bp, Homo sapien
ctccaatgatgcatacccaggtagtttttctag

SEQ ID NO: 1029079 - DNA, 33 bp, Homo sapien
gtcgagagaaccagataagtaagtgtaatttca

SEQ ID NO: 1029080 - DNA, 33 bp, Homo sapien
gtcgagagaaccagatgagtaagtgtaatttca

SEQ ID NO: 1029081 - DNA, 33 bp, Homo sapien
gtcagtgatcaagatcaagggaggcaagctcta

SEQ ID NO: 1029082 - DNA, 33 bp, Homo sapien
gtcagtgatcaagatcgagggaggcaagctcta

SEQ ID NO: 1029083 - DNA, 33 bp, Homo sapien
cttgcttctttctccacagtctctagtttggtt

SEQ ID NO: 1029084 - DNA, 33 bp, Homo sapien
cttgcttctttctccatagtctctagtttggtt

SEQ ID NO: 1029085 - DNA, 33 bp, Homo sapien
gtgcaactagtgggcacgtggaaatgagaacga

SEQ ID NO: 1029086 - DNA, 33 bp, Homo sapien
gtgcaactagtgggcatgtggaaatgagaacga

SEQ ID NO: 1029087 - DNA, 33 bp, Homo sapien
cctggatgacccttgacgaaattctccgtatag

SEQ ID NO: 1029088 - DNA, 33 bp, Homo sapien
cctggatgacccttgatgaaattctccgtatag

SEQ ID NO: 1029089 - DNA, 33 bp, Homo sapien
gagtttctcagagcaaatccccatggccacagc

SEQ ID NO: 1029090 - DNA, 33 bp, Homo sapien
gagtttctcagagcaactccccatggccacagc

SEQ ID NO: 1029091 - DNA, 33 bp, Homo sapien
ttttcagcctagacccgaacagatacagacagc

SEQ ID NO: 1029092 - DNA, 33 bp, Homo sapien
ttttcagcctagaccctaacagatacagacagc

SEQ ID NO: 1029093 - DNA, 33 bp, Homo sapien
ccaaaagaggcttgcacagtttctggtataacc

SEQ ID NO: 1029094 - DNA, 33 bp, Homo sapien
ccaaaagaggcttgcatagtttctggtataacc

SEQ ID NO: 1029095 - DNA, 33 bp, Homo sapien
gtgcaggtctcggaaaagacagcttctaagtga

SEQ ID NO: 1029096 - DNA, 33 bp, Homo sapien
gtgcaggtctcggaaaggacagcttctaagtga

SEQ ID NO: 1029097 - DNA, 33 bp, Homo sapien
tagaaagtagtagagacgttccctgttagctga

SEQ ID NO: 1029098 - DNA, 33 bp, Homo sapien
tagaaagtagtagagatgttccctgttagctga

SEQ ID NO: 1029099 - DNA, 33 bp, Homo sapien
gattcttctctcttccacaccttaaaatctact

SEQ ID NO: 1029100 - DNA, 33 bp, Homo sapien
gattcttctctcttcctcaccttaaaatctact

SEQ ID NO: 1029101 - DNA, 33 bp, Homo sapien
tattcccagacaatcaatcctgaggaatgaaca

SEQ ID NO: 1029102 - DNA, 33 bp, Homo sapien
tattcccagacaatcagtcctgaggaatgaaca

SEQ ID NO: 1029103 - DNA, 33 bp, Homo sapien
tattccatctggagcagaattttgaaagacctt

SEQ ID NO: 1029104 - DNA, 33 bp, Homo sapien
tattccatctggagcataattttgaaagacctt

SEQ ID NO: 1029105 - DNA, 33 bp, Homo sapien
ctggaagaagaatttcaatcaaactgcagagct

SEQ ID NO: 1029106 - DNA, 33 bp, Homo sapien
ctggaagaagaatttcgatcaaactgcagagct

SEQ ID NO: 1029107 - DNA, 33 bp, Homo sapien
tatgttatttgtaacaagcagctatggtgctca

SEQ ID NO: 1029108 - DNA, 33 bp, Homo sapien
tatgttatttgtaacaggcagctatggtgctca

SEQ ID NO: 1029109 - DNA, 33 bp, Homo sapien
ctggcagagagattaacgcaggagcagattcag

SEQ ID NO: 1029110 - DNA, 33 bp, Homo sapien
ctggcagagagattaaggcaggagcagattcag

SEQ ID NO: 1029111 - DNA, 33 bp, Homo sapien
aaatatcctgctgcccaaatgagttttcttttg

SEQ ID NO: 1029112 - DNA, 33 bp, Homo sapien
aaatatcctgctgcccgaatgagttttcttttg

SEQ ID NO: 1029113 - DNA, 33 bp, Homo sapien
ctttgagccattgtatcaggtgcatactaccct

SEQ ID NO: 1029114 - DNA, 33 bp, Homo sapien
ctttgagccattgtattaggtgcatactaccct

SEQ ID NO: 1029115 - DNA, 33 bp, Homo sapien
aaaaaagaactcaaaactgttaatagaccaaaa

SEQ ID NO: 1029116 - DNA, 33 bp, Homo sapien
aaaaaagaactcaaaattgttaatagaccaaaa

SEQ ID NO: 1029117 - DNA, 33 bp, Homo sapien
cttgaggtatacttgaagtttcagccagtgtag

SEQ ID NO: 1029118 - DNA, 33 bp, Homo sapien
cttgaggtatacttgaggtttcagccagtgtag

SEQ ID NO: 1029119 - DNA, 33 bp, Homo sapien
agaaagaataggattacgaagaaacgttaggaa

SEQ ID NO: 1029120 - DNA, 33 bp, Homo sapien
agaaagaataggattatgaagaaacgttaggaa

SEQ ID NO: 1029121 - DNA, 33 bp, Homo sapien
aaaagatacctttctaaggcttatgcgagcacc

SEQ ID NO: 1029122 - DNA, 33 bp, Homo sapien
aaaagatacctttctagggcttatgcgagcacc

SEQ ID NO: 1029123 - DNA, 33 bp, Homo sapien
aaggcagatgaatcgccgaactatgctgagtaa

SEQ ID NO: 1029124 - DNA, 33 bp, Homo sapien
aaggcagatgaatcgctgaactatgctgagtaa

SEQ ID NO: 1029125 - DNA, 33 bp, Homo sapien
ataccgatctgaaaggaaagcataaaactgccc

SEQ ID NO: 1029126 - DNA, 33 bp, Homo sapien
ataccgatctgaaaggcaagcataaaactgccc

SEQ ID NO: 1029127 - DNA, 33 bp, Homo sapien
gcctgccgagtaggtcacatgacaggcgcccgc

SEQ ID NO: 1029128 - DNA, 33 bp, Homo sapien
gcctgccgagtaggtcccatgacaggcgcccgc

SEQ ID NO: 1029129 - DNA, 33 bp, Homo sapien
attggctacctggaaaagtagagagaaacaaga

SEQ ID NO: 1029130 - DNA, 33 bp, Homo sapien
attggctacctggaaacgtagagagaaacaaga

SEQ ID NO: 1029131 - DNA, 33 bp, Homo sapien
taggtattcctctgtaacaacacaaaaaggact

SEQ ID NO: 1029132 - DNA, 33 bp, Homo sapien
taggtattcctctgtagcaacacaaaaaggact

SEQ ID NO: 1029133 - DNA, 33 bp, Homo sapien
ggaattctattctgcaatgaaaaccaacaagcc

SEQ ID NO: 1029134 - DNA, 33 bp, Homo sapien
ggaattctattctgcagtgaaaaccaacaagcc

SEQ ID NO: 1029135 - DNA, 33 bp, Homo sapien
ttcaggctcttactgccgaacagaccaatgtct

SEQ ID NO: 1029136 - DNA, 33 bp, Homo sapien
ttcaggctcttactgctgaacagaccaatgtct

SEQ ID NO: 1029137 - DNA, 33 bp, Homo sapien
tgtggttcttagaccactggcaaataaataaca

SEQ ID NO: 1029138 - DNA, 33 bp, Homo sapien
tgtggttcttagaccattggcaaataaataaca

SEQ ID NO: 1029139 - DNA, 33 bp, Homo sapien
gaggccacacagtcccagatcacaggtgaacat

SEQ ID NO: 1029140 - DNA, 33 bp, Homo sapien
gaggccacacagtcccggatcacaggtgaacat

SEQ ID NO: 1029141 - DNA, 33 bp, Homo sapien
gggaccttgtaggaaccgagtaacgggcatttt

SEQ ID NO: 1029142 - DNA, 33 bp, Homo sapien
gggaccttgtaggaactgagtaacgggcatttt

SEQ ID NO: 1029143 - DNA, 33 bp, Homo sapien
ctgcaacactggagctaagaacatactgtacca

SEQ ID NO: 1029144 - DNA, 33 bp, Homo sapien
ctgcaacactggagctgagaacatactgtacca

SEQ ID NO: 1029145 - DNA, 33 bp, Homo sapien
gtgggattcttctctaaacaacctttgcattgg

SEQ ID NO: 1029146 - DNA, 33 bp, Homo sapien
gtgggattcttctctagacaacctttgcattgg

SEQ ID NO: 1029147 - DNA, 33 bp, Homo sapien
gtactcagcatccaacaaaccttacaatctaat

SEQ ID NO: 1029148 - DNA, 33 bp, Homo sapien
gtactcagcatccaaccaaccttacaatctaat

SEQ ID NO: 1029149 - DNA, 33 bp, Homo sapien
aactcaaagtagaaaaccactgcaacatttacc

SEQ ID NO: 1029150 - DNA, 33 bp, Homo sapien
aactcaaagtagaaaagcactgcaacatttacc

SEQ ID NO: 1029151 - DNA, 33 bp, Homo sapien
gaaatattgtccataactaaacaggattaaacc

SEQ ID NO: 1029152 - DNA, 33 bp, Homo sapien
gaaatattgtccataagtaaacaggattaaacc

SEQ ID NO: 1029153 - DNA, 33 bp, Homo sapien
ttaccatgacaactaacagctttataaatgttt

SEQ ID NO: 1029154 - DNA, 33 bp, Homo sapien
ttaccatgacaactaagagctttataaatgttt

SEQ ID NO: 1029155 - DNA, 33 bp, Homo sapien
tgtgagcaatgcatgaaagatgaatcacacagc

SEQ ID NO: 1029156 - DNA, 33 bp, Homo sapien
tgtgagcaatgcatgagagatgaatcacacagc

SEQ ID NO: 1029157 - DNA, 33 bp, Homo sapien
ggaggcagttatgcaacgttggtaactagcaca

SEQ ID NO: 1029158 - DNA, 33 bp, Homo sapien
ggaggcagttatgcaatgttggtaactagcaca

SEQ ID NO: 1029159 - DNA, 33 bp, Homo sapien
ttctgcctatccaggaactgtagtaatgttgga

SEQ ID NO: 1029160 - DNA, 33 bp, Homo sapien
ttctgcctatccaggagctgtagtaatgttgga

SEQ ID NO: 1029161 - DNA, 33 bp, Homo sapien
tggctgatttgctggacggagaagccattagga

SEQ ID NO: 1029162 - DNA, 33 bp, Homo sapien
tggctgatttgctggagggagaagccattagga

SEQ ID NO: 1029163 - DNA, 33 bp, Homo sapien
agcagtcagggttcaaccagataagaggaacct

SEQ ID NO: 1029164 - DNA, 33 bp, Homo sapien
agcagtcagggttcaatcagataagaggaacct

SEQ ID NO: 1029165 - DNA, 33 bp, Homo sapien
catttctatggcgtaaaaaggggaattgtatgg

SEQ ID NO: 1029166 - DNA, 33 bp, Homo sapien
catttctatggcgtaagaaggggaattgtatgg

SEQ ID NO: 1029167 - DNA, 33 bp, Homo sapien
gagcatgatctattaaaaactcaacacattgga

SEQ ID NO: 1029168 - DNA, 33 bp, Homo sapien
gagcatgatctattaacaactcaacacattgga

SEQ ID NO: 1029169 - DNA, 33 bp, Homo sapien
ctttctgatgttaggaacataagacttctgttt

SEQ ID NO: 1029170 - DNA, 33 bp, Homo sapien
ctttctgatgttaggatcataagacttctgttt

SEQ ID NO: 1029171 - DNA, 33 bp, Homo sapien
tgttacatttgaactacatttgaagcagcatag

SEQ ID NO: 1029172 - DNA, 33 bp, Homo sapien
tgttacatttgaactatatttgaagcagcatag

SEQ ID NO: 1029173 - DNA, 33 bp, Homo sapien
gtggataaggaaagataactactgttcacagca

SEQ ID NO: 1029174 - DNA, 33 bp, Homo sapien
gtggataaggaaagatgactactgttcacagca

SEQ ID NO: 1029175 - DNA, 33 bp, Homo sapien
atatttgtaataaagaagcctggggaagaaatg

SEQ ID NO: 1029176 - DNA, 33 bp, Homo sapien
atatttgtaataaagaggcctggggaagaaatg

SEQ ID NO: 1029177 - DNA, 33 bp, Homo sapien
ctctccagaggatgcaccaccttgacactggac

SEQ ID NO: 1029178 - DNA, 33 bp, Homo sapien
ctctccagaggatgcagcaccttgacactggac

SEQ ID NO: 1029179 - DNA, 33 bp, Homo sapien
ctcaggtattctactacagcagcataaatgaac

SEQ ID NO: 1029180 - DNA, 33 bp, Homo sapien
ctcaggtattctactatagcagcataaatgaac

SEQ ID NO: 1029181 - DNA, 33 bp, Homo sapien
actgatcgagccaacaatgttcaggagattgca

SEQ ID NO: 1029182 - DNA, 33 bp, Homo sapien
actgatcgagccaacagtgttcaggagattgca

SEQ ID NO: 1029183 - DNA, 33 bp, Homo sapien
ctcccaaaaagatccaaggttatgttggacaag

SEQ ID NO: 1029184 - DNA, 33 bp, Homo sapien
ctcccaaaaagatccagggttatgttggacaag

SEQ ID NO: 1029185 - DNA, 33 bp, Homo sapien
ctttgcttctctgacactggccgtttgtctcta

SEQ ID NO: 1029186 - DNA, 33 bp, Homo sapien
ctttgcttctctgacattggccgtttgtctcta

SEQ ID NO: 1029187 - DNA, 33 bp, Homo sapien
gctgctgatggccaagcaggcaacacctgctag

SEQ ID NO: 1029188 - DNA, 33 bp, Homo sapien
gctgctgatggccaagtaggcaacacctgctag

SEQ ID NO: 1029189 - DNA, 33 bp, Homo sapien
gataaagagatctaaggatctgtaagtttccct

SEQ ID NO: 1029190 - DNA, 33 bp, Homo sapien
gataaagagatctaagtatctgtaagtttccct

SEQ ID NO: 1029191 - DNA, 33 bp, Homo sapien
attaaatggaggcctacattatctcatccaaga

SEQ ID NO: 1029192 - DNA, 33 bp, Homo sapien
attaaatggaggcctagattatctcatccaaga

SEQ ID NO: 1029193 - DNA, 33 bp, Homo sapien
aagctttctatgcctcactcaaagtctaaaatg

SEQ ID NO: 1029194 - DNA, 33 bp, Homo sapien
aagctttctatgcctcgctcaaagtctaaaatg

SEQ ID NO: 1029195 - DNA, 33 bp, Homo sapien
gagagttcagtattaacgcacttgggccactct

SEQ ID NO: 1029196 - DNA, 33 bp, Homo sapien
gagagttcagtattaatgcacttgggccactct

SEQ ID NO: 1029197 - DNA, 33 bp, Homo sapien
aggttcccacaaagtacgcagattctggctaaa

SEQ ID NO: 1029198 - DNA, 33 bp, Homo sapien
aggttcccacaaagtatgcagattctggctaaa

SEQ ID NO: 1029199 - DNA, 33 bp, Homo sapien
cttgataagactttacacaacaaattaagaatt

SEQ ID NO: 1029200 - DNA, 33 bp, Homo sapien
cttgataagactttacccaacaaattaagaatt

SEQ ID NO: 1029201 - DNA, 33 bp, Homo sapien
gggcagattctgatgacggcacaggggccacca

SEQ ID NO: 1029202 - DNA, 33 bp, Homo sapien
gggcagattctgatgatggcacaggggccacca

SEQ ID NO: 1029203 - DNA, 33 bp, Homo sapien
actttagggacacccaaaattcaataacatgac

SEQ ID NO: 1029204 - DNA, 33 bp, Homo sapien
actttagggacacccagaattcaataacatgac

SEQ ID NO: 1029205 - DNA, 33 bp, Homo sapien
tcaattttgaataagaacagtggtgatgtgtgg

SEQ ID NO: 1029206 - DNA, 33 bp, Homo sapien
tcaattttgaataagatcagtggtgatgtgtgg

SEQ ID NO: 1029207 - DNA, 33 bp, Homo sapien
cctagcagaatctccacagtgactgatccgggg

SEQ ID NO: 1029208 - DNA, 33 bp, Homo sapien
cctagcagaatctccatagtgactgatccgggg

SEQ ID NO: 1029209 - DNA, 33 bp, Homo sapien
cgaccacagtgacaaacataaaggcaaacaaat

SEQ ID NO: 1029210 - DNA, 33 bp, Homo sapien
cgaccacagtgacaaatataaaggcaaacaaat

SEQ ID NO: 1029211 - DNA, 33 bp, Homo sapien
tttttaagacaactcactgagagaggtattatt

SEQ ID NO: 1029212 - DNA, 33 bp, Homo sapien
tttttaagacaactcattgagagaggtattatt

SEQ ID NO: 1029213 - DNA, 33 bp, Homo sapien
aactcagtgaatcccaagttctatatcctctat

SEQ ID NO: 1029214 - DNA, 33 bp, Homo sapien
aactcagtgaatcccaggttctatatcctctat

SEQ ID NO: 1029215 - DNA, 33 bp, Homo sapien
tttgcactgcattggaagtagataagtcttctt

SEQ ID NO: 1029216 - DNA, 33 bp, Homo sapien
tttgcactgcattggaggtagataagtcttctt

SEQ ID NO: 1029217 - DNA, 33 bp, Homo sapien
tctttcaacccattgtaaactaaagaatctcta

SEQ ID NO: 1029218 - DNA, 33 bp, Homo sapien
tctttcaacccattgtcaactaaagaatctcta

SEQ ID NO: 1029219 - DNA, 33 bp, Homo sapien
acattatagacaaaaagatgggtgaacctagag

SEQ ID NO: 1029220 - DNA, 33 bp, Homo sapien
acattatagacaaaaatatgggtgaacctagag

SEQ ID NO: 1029221 - DNA, 33 bp, Homo sapien
attttcataatagcctaacccaaattttcttgg

SEQ ID NO: 1029222 - DNA, 33 bp, Homo sapien
attttcataatagccttacccaaattttcttgg

SEQ ID NO: 1029223 - DNA, 33 bp, Homo sapien
attaattagagccaacaggggaccaaagaccca

SEQ ID NO: 1029224 - DNA, 33 bp, Homo sapien
attaattagagccaacgggggaccaaagaccca

SEQ ID NO: 1029225 - DNA, 33 bp, Homo sapien
accacagagacatccacggtagtaaagataaag

SEQ ID NO: 1029226 - DNA, 33 bp, Homo sapien
accacagagacatccatggtagtaaagataaag

SEQ ID NO: 1029227 - DNA, 33 bp, Homo sapien
gggttagcaaagaaaccagtgttgctggagcaa

SEQ ID NO: 1029228 - DNA, 33 bp, Homo sapien
gggttagcaaagaaactagtgttgctggagcaa

SEQ ID NO: 1029229 - DNA, 33 bp, Homo sapien
gcttggaccaggatgaggagaacagcggcattt

SEQ ID NO: 1029230 - DNA, 33 bp, Homo sapien
gcttggaccaggatgatgagaacagcggcattt

SEQ ID NO: 1029231 - DNA, 33 bp, Homo sapien
agtgtgtgggtcaaaaaagagcatcacacaggg

SEQ ID NO: 1029232 - DNA, 33 bp, Homo sapien
agtgtgtgggtcaaaagagagcatcacacaggg

SEQ ID NO: 1029233 - DNA, 33 bp, Homo sapien
gtattttcgtggaaccaagattctgtaaaggaa

SEQ ID NO: 1029234 - DNA, 33 bp, Homo sapien
gtattttcgtggaacctagattctgtaaaggaa

SEQ ID NO: 1029235 - DNA, 33 bp, Homo sapien
ctgtgctcaattctacaaatcctgatttcatac

SEQ ID NO: 1029236 - DNA, 33 bp, Homo sapien
ctgtgctcaattctacgaatcctgatttcatac

SEQ ID NO: 1029237 - DNA, 33 bp, Homo sapien
aattgagcacagtacagaaataaggtgctgagg

SEQ ID NO: 1029238 - DNA, 33 bp, Homo sapien
aattgagcacagtacataaataaggtgctgagg

SEQ ID NO: 1029239 - DNA, 33 bp, Homo sapien
ggctttcccactttctcaagattcctcttgtta

SEQ ID NO: 1029240 - DNA, 33 bp, Homo sapien
ggctttcccactttctgaagattcctcttgtta

SEQ ID NO: 1029241 - DNA, 33 bp, Homo sapien
gcagctgtcaaaacaagttcccatgatgtcagc

SEQ ID NO: 1029242 - DNA, 33 bp, Homo sapien
gcagctgtcaaaacaatttcccatgatgtcagc

SEQ ID NO: 1029243 - DNA, 33 bp, Homo sapien
acacccatccacctaacggacgcacctttgtga

SEQ ID NO: 1029244 - DNA, 33 bp, Homo sapien
acacccatccacctaatggacgcacctttgtga

SEQ ID NO: 1029245 - DNA, 33 bp, Homo sapien
gtggatatgattgttacgaaagggtctgacttt

SEQ ID NO: 1029246 - DNA, 33 bp, Homo sapien
gtggatatgattgttatgaaagggtctgacttt

SEQ ID NO: 1029247 - DNA, 33 bp, Homo sapien
ttctttgcatacctacacattttatatttttat

SEQ ID NO: 1029248 - DNA, 33 bp, Homo sapien
ttctttgcatacctacccattttatatttttat

SEQ ID NO: 1029249 - DNA, 33 bp, Homo sapien
gggtacgtgttctcatgatctcctagagctgtg

SEQ ID NO: 1029250 - DNA, 33 bp, Homo sapien
gggtacgtgttctcattatctcctagagctgtg

SEQ ID NO: 1029251 - DNA, 33 bp, Homo sapien
aagcatgaatagagtacaatgaaccacacaaag

SEQ ID NO: 1029252 - DNA, 33 bp, Homo sapien
aagcatgaatagagtagaatgaaccacacaaag

SEQ ID NO: 1029253 - DNA, 33 bp, Homo sapien
gggcattttttccccactctgaatctcagtttt

SEQ ID NO: 1029254 - DNA, 33 bp, Homo sapien
gggcattttttccccattctgaatctcagtttt

SEQ ID NO: 1029255 - DNA, 33 bp, Homo sapien
ctactggacaccttctcaccaaatgcctggaca

SEQ ID NO: 1029256 - DNA, 33 bp, Homo sapien
ctactggacaccttcttaccaaatgcctggaca

SEQ ID NO: 1029257 - DNA, 33 bp, Homo sapien
tgtgtgctttgaggtacggatcattttatttat

SEQ ID NO: 1029258 - DNA, 33 bp, Homo sapien
tgtgtgctttgaggtatggatcattttatttat

SEQ ID NO: 1029259 - DNA, 33 bp, Homo sapien
atgagtactacacacaaaaaaaatgatgcttat

SEQ ID NO: 1029260 - DNA, 33 bp, Homo sapien
atgagtactacacacacaaaaaatgatgcttat

SEQ ID NO: 1029261 - DNA, 33 bp, Homo sapien
ttcctgacttatggaaacagacagataatgaat

SEQ ID NO: 1029262 - DNA, 33 bp, Homo sapien
ttcctgacttatggaagcagacagataatgaat

SEQ ID NO: 1029263 - DNA, 33 bp, Homo sapien
tgatatataattctgcccaaaaaaacatagctc

SEQ ID NO: 1029264 - DNA, 33 bp, Homo sapien
tgatatataattctgctcaaaaaaacatagctc

SEQ ID NO: 1029265 - DNA, 33 bp, Homo sapien
attggcctcaagccaaaaccaccttttcctcaa

SEQ ID NO: 1029266 - DNA, 33 bp, Homo sapien
attggcctcaagccaacaccaccttttcctcaa

SEQ ID NO: 1029267 - DNA, 33 bp, Homo sapien
tacaaacacagccaagaacaatagaccagagcg

SEQ ID NO: 1029268 - DNA, 33 bp, Homo sapien
tacaaacacagccaagtacaatagaccagagcg

SEQ ID NO: 1029269 - DNA, 33 bp, Homo sapien
gagaaagatcaacaaagttatggtttcaataaa

SEQ ID NO: 1029270 - DNA, 33 bp, Homo sapien
gagaaagatcaacaaatttatggtttcaataaa

SEQ ID NO: 1029271 - DNA, 33 bp, Homo sapien
cttcaggagacattgaaactttttttatgtatg

SEQ ID NO: 1029272 - DNA, 33 bp, Homo sapien
cttcaggagacattgatactttttttatgtatg

SEQ ID NO: 1029273 - DNA, 33 bp, Homo sapien
ggcccatgggtgtgcactatactattcttgcag

SEQ ID NO: 1029274 - DNA, 33 bp, Homo sapien
ggcccatgggtgtgcattatactattcttgcag

SEQ ID NO: 1029275 - DNA, 33 bp, Homo sapien
tagtcataggaaatgaatacaccaacttttatt

SEQ ID NO: 1029276 - DNA, 33 bp, Homo sapien
tagtcataggaaatgagtacaccaacttttatt

SEQ ID NO: 1029277 - DNA, 33 bp, Homo sapien
atccagaataacctccacatcttaagcacaact

SEQ ID NO: 1029278 - DNA, 33 bp, Homo sapien
atccagaataacctccgcatcttaagcacaact

SEQ ID NO: 1029279 - DNA, 33 bp, Homo sapien
aaagctccagaaagcacaggagtttgacttggc

SEQ ID NO: 1029280 - DNA, 33 bp, Homo sapien
aaagctccagaaagcagaggagtttgacttggc

SEQ ID NO: 1029281 - DNA, 33 bp, Homo sapien
acttccttatgactcaagaggaaaactgtgctc

SEQ ID NO: 1029282 - DNA, 33 bp, Homo sapien
acttccttatgactcaggaggaaaactgtgctc

SEQ ID NO: 1029283 - DNA, 33 bp, Homo sapien
tgattagtaaactgccaatctctgtcttagata

SEQ ID NO: 1029284 - DNA, 33 bp, Homo sapien
tgattagtaaactgccgatctctgtcttagata

SEQ ID NO: 1029285 - DNA, 33 bp, Homo sapien
ctaaacttggctaacaacagtgattcttaaatt

SEQ ID NO: 1029286 - DNA, 33 bp, Homo sapien
ctaaacttggctaacagcagtgattcttaaatt

SEQ ID NO: 1029287 - DNA, 33 bp, Homo sapien
caaaactcctttaccaagtgattctcatgtgca

SEQ ID NO: 1029288 - DNA, 33 bp, Homo sapien
caaaactcctttaccaggtgattctcatgtgca

SEQ ID NO: 1029289 - DNA, 33 bp, Homo sapien
aaggctattgaagcctcaattatgggtcttcat

SEQ ID NO: 1029290 - DNA, 33 bp, Homo sapien
aaggctattgaagccttaattatgggtcttcat

SEQ ID NO: 1029291 - DNA, 33 bp, Homo sapien
ttattaagacttttaaagggctcccatgtacca

SEQ ID NO: 1029292 - DNA, 33 bp, Homo sapien
ttattaagacttttaaggggctcccatgtacca

SEQ ID NO: 1029293 - DNA, 33 bp, Homo sapien
agaggtaagtgcataaataagcactgaaagaag

SEQ ID NO: 1029294 - DNA, 33 bp, Homo sapien
agaggtaagtgcataagtaagcactgaaagaag

SEQ ID NO: 1029295 - DNA, 33 bp, Homo sapien
acattttctatcacacaatggtttgctagttac

SEQ ID NO: 1029296 - DNA, 33 bp, Homo sapien
acattttctatcacacgatggtttgctagttac

SEQ ID NO: 1029297 - DNA, 33 bp, Homo sapien
cagcgttttggaaaggaacatataaaaatgatt

SEQ ID NO: 1029298 - DNA, 33 bp, Homo sapien
cagcgttttggaaagggacatataaaaatgatt

SEQ ID NO: 1029299 - DNA, 33 bp, Homo sapien
gtggtgccattgaagcacctcttgccaggctca

SEQ ID NO: 1029300 - DNA, 33 bp, Homo sapien
gtggtgccattgaagcgcctcttgccaggctca

SEQ ID NO: 1029301 - DNA, 33 bp, Homo sapien
tcactggaaatggagcacattgtgactgatttg

SEQ ID NO: 1029302 - DNA, 33 bp, Homo sapien
tcactggaaatggagcgcattgtgactgatttg

SEQ ID NO: 1029303 - DNA, 33 bp, Homo sapien
ctctggggaaagtgcacccgtgagactgtggag

SEQ ID NO: 1029304 - DNA, 33 bp, Homo sapien
ctctggggaaagtgcatccgtgagactgtggag

SEQ ID NO: 1029305 - DNA, 33 bp, Homo sapien
tggccaggtttttacaaggtagctgtgctgggc

SEQ ID NO: 1029306 - DNA, 33 bp, Homo sapien
tggccaggtttttacagggtagctgtgctgggc

SEQ ID NO: 1029307 - DNA, 33 bp, Homo sapien
ataaaatgacactaaccgaagttttacacaaag

SEQ ID NO: 1029308 - DNA, 33 bp, Homo sapien
ataaaatgacactaactgaagttttacacaaag

SEQ ID NO: 1029309 - DNA, 33 bp, Homo sapien
aaaaccaagaggccaacaggaaatctgtaagaa

SEQ ID NO: 1029310 - DNA, 33 bp, Homo sapien
aaaaccaagaggccaataggaaatctgtaagaa

SEQ ID NO: 1029311 - DNA, 33 bp, Homo sapien
tgattcctgcaaaaggcatattgtgcttccagg

SEQ ID NO: 1029312 - DNA, 33 bp, Homo sapien
tgattcctgcaaaaggtatattgtgcttccagg

SEQ ID NO: 1029313 - DNA, 33 bp, Homo sapien; identical to SEQ ID NO: 1029311

SEQ ID NO: 1029314 - DNA, 33 bp, Homo sapien; identical to SEQ ID NO: 1029312

SEQ ID NO: 1029315 - DNA, 33 bp, Homo sapien
ttaccaaatataaaaaaccaattcaagtgattc

SEQ ID NO: 1029316 - DNA, 33 bp, Homo sapien
ttaccaaatataaaaagccaattcaagtgattc

SEQ ID NO: 1029317 - DNA, 33 bp, Homo sapien
atggactccaagtagaggaactccttctgctat

SEQ ID NO: 1029318 - DNA, 33 bp, Homo sapien
atggactccaagtagatgaactccttctgctat

SEQ ID NO: 1029319 - DNA, 33 bp, Homo sapien
tttacctatttattcacatgatactggggttgg

SEQ ID NO: 1029320 - DNA, 33 bp, Homo sapien
tttacctatttattcagatgatactggggttgg

SEQ ID NO: 1029321 - DNA, 33 bp, Homo sapien
tcctgagtccaggaaaaaagaatgaagtgtcct

SEQ ID NO: 1029322 - DNA, 33 bp, Homo sapien
tcctgagtccaggaaagaagaatgaagtgtcct

SEQ ID NO: 1029323 - DNA, 33 bp, Homo sapien
caggagttatgtgtcaagcaagtgctctgggaa

SEQ ID NO: 1029324 - DNA, 33 bp, Homo sapien
caggagttatgtgtcaggcaagtgctctgggaa

SEQ ID NO: 1029325 - DNA, 33 bp, Homo sapien
aacagaaccctcaggaataatgccacatatcta

SEQ ID NO: 1029326 - DNA, 33 bp, Homo sapien
aacagaaccctcaggagtaatgccacatatcta

SEQ ID NO: 1029327 - DNA, 33 bp, Homo sapien
gagccttcaccttctccaagtcttggctcaaat

SEQ ID NO: 1029328 - DNA, 33 bp, Homo sapien
gagccttcaccttctctaagtcttggctcaaat

SEQ ID NO: 1029329 - DNA, 33 bp, Homo sapien
ccaaagactttgaatacctacataaatgttata

SEQ ID NO: 1029330 - DNA, 33 bp, Homo sapien
ccaaagactttgaatatctacataaatgttata

SEQ ID NO: 1029331 - DNA, 33 bp, Homo sapien
cataccttggttaaagaacatttcaacacccat

SEQ ID NO: 1029332 - DNA, 33 bp, Homo sapien
cataccttggttaaaggacatttcaacacccat

SEQ ID NO: 1029333 - DNA, 33 bp, Homo sapien
ctgcaatttcagcagaaggaatacagaagcaca

SEQ ID NO: 1029334 - DNA, 33 bp, Homo sapien
ctgcaatttcagcagagggaatacagaagcaca

SEQ ID NO: 1029335 - DNA, 33 bp, Homo sapien
gggcaaattttaacctaaggaagagtgaacacc

SEQ ID NO: 1029336 - DNA, 33 bp, Homo sapien
gggcaaattttaacctgaggaagagtgaacacc

SEQ ID NO: 1029337 - DNA, 33 bp, Homo sapien
tgaaacttctctttaacagagactcactgaaag

SEQ ID NO: 1029338 - DNA, 33 bp, Homo sapien
tgaaacttctctttaatagagactcactgaaag

SEQ ID NO: 1029339 - DNA, 33 bp, Homo sapien
agcctttcgcggaatacataatttacgtgtgag

SEQ ID NO: 1029340 - DNA, 33 bp, Homo sapien
agcctttcgcggaatatataatttacgtgtgag

SEQ ID NO: 1029341 - DNA, 33 bp, Homo sapien
gcacgcttatttgtaacctgtgtatgcccctca

SEQ ID NO: 1029342 - DNA, 33 bp, Homo sapien
gcacgcttatttgtaatctgtgtatgcccctca

SEQ ID NO: 1029343 - DNA, 33 bp, Homo sapien
ataggcatcgtatacaaagaacagctagaactg

SEQ ID NO: 1029344 - DNA, 33 bp, Homo sapien
ataggcatcgtatacatagaacagctagaactg

SEQ ID NO: 1029345 - DNA, 33 bp, Homo sapien
cttgggaaccgtggccaaagtgaaaccgatgtc

SEQ ID NO: 1029346 - DNA, 33 bp, Homo sapien
cttgggaaccgtggccgaagtgaaaccgatgtc

SEQ ID NO: 1029347 - DNA, 33 bp, Homo sapien
atcagctcagataacaagcctgcgtttttggct

SEQ ID NO: 1029348 - DNA, 33 bp, Homo sapien
atcagctcagataacaggcctgcgtttttggct

SEQ ID NO: 1029349 - DNA, 33 bp, Homo sapien
agctcagatctgcggacggcaggtaccttactt

SEQ ID NO: 1029350 - DNA, 33 bp, Homo sapien
agctcagatctgcggatggcaggtaccttactt

SEQ ID NO: 1029351 - DNA, 33 bp, Homo sapien
ctcacctggtttttatcaatcctaggacctctg

SEQ ID NO: 1029352 - DNA, 33 bp, Homo sapien
ctcacctggtttttatgaatcctaggacctctg

SEQ ID NO: 1029353 - DNA, 33 bp, Homo sapien
cttgttagtttgaaaagaatatagtgcctttta

SEQ ID NO: 1029354 - DNA, 33 bp, Homo sapien
cttgttagtttgaaaataatatagtgcctttta

SEQ ID NO: 1029355 - DNA, 33 bp, Homo sapien
agatagtatcggattaaaactgagtggaaggac

SEQ ID NO: 1029356 - DNA, 33 bp, Homo sapien
agatagtatcggattagaactgagtggaaggac

SEQ ID NO: 1029357 - DNA, 33 bp, Homo sapien
gcacgctttcaaataacactcccagggcttgac

SEQ ID NO: 1029358 - DNA, 33 bp, Homo sapien
gcacgctttcaaataagactcccagggcttgac

SEQ ID NO: 1029359 - DNA, 33 bp, Homo sapien
ccagataaaaggtcacaattcctggtgcctggt

SEQ ID NO: 1029360 - DNA, 33 bp, Homo sapien
ccagataaaaggtcacgattcctggtgcctggt

SEQ ID NO: 1029361 - DNA, 33 bp, Homo sapien
tatagttcattctttacgagaacagtggtgatg

SEQ ID NO: 1029362 - DNA, 33 bp, Homo sapien
tatagttcattctttatgagaacagtggtgatg

SEQ ID NO: 1029363 - DNA, 33 bp, Homo sapien
acattcatccagttgccgaaatgacacaggatg

SEQ ID NO: 1029364 - DNA, 33 bp, Homo sapien
acattcatccagttgctgaaatgacacaggatg

SEQ ID NO: 1029365 - DNA, 33 bp, Homo sapien
ttctgtaaatgtttcaatatgttctttcagaat

SEQ ID NO: 1029366 - DNA, 33 bp, Homo sapien
ttctgtaaatgtttcactatgttctttcagaat

SEQ ID NO: 1029367 - DNA, 33 bp, Homo sapien
atattctggaaagagcaaaactatctggatagt

SEQ ID NO: 1029368 - DNA, 33 bp, Homo sapien
atattctggaaagagccaaactatctggatagt

SEQ ID NO: 1029369 - DNA, 33 bp, Homo sapien
ttacactgatgtacaagagtttatatatccatt

SEQ ID NO: 1029370 - DNA, 33 bp, Homo sapien
ttacactgatgtacaatagtttatatatccatt

SEQ ID NO: 1029371 - DNA, 33 bp, Homo sapien
gcacacaaatgtttacactggctttatttacta

SEQ ID NO: 1029372 - DNA, 33 bp, Homo sapien
gcacacaaatgtttacgctggctttatttacta

SEQ ID NO: 1029373 - DNA, 33 bp, Homo sapien
gatacactgcctcaaagtgacatttatcgaata

SEQ ID NO: 1029374 - DNA, 33 bp, Homo sapien
gatacactgcctcaaattgacatttatcgaata

SEQ ID NO: 1029375 - DNA, 33 bp, Homo sapien
actcgtgtatcagttacgcaatggacaactttc

SEQ ID NO: 1029376 - DNA, 33 bp, Homo sapien
actcgtgtatcagttatgcaatggacaactttc

SEQ ID NO: 1029377 - DNA, 33 bp, Homo sapien
atcctgttcttcagtccatccacttagttttcc

SEQ ID NO: 1029378 - DNA, 33 bp, Homo sapien
atcctgttcttcagtctatccacttagttttcc

SEQ ID NO: 1029379 - DNA, 33 bp, Homo sapien
ccctcacgacagcaacacaagcagagagcagca

SEQ ID NO: 1029380 - DNA, 33 bp, Homo sapien
ccctcacgacagcaacgcaagcagagagcagca

SEQ ID NO: 1029381 - DNA, 33 bp, Homo sapien
gtcttctgagaagaaacaagctccggggaatac

SEQ ID NO: 1029382 - DNA, 33 bp, Homo sapien
gtcttctgagaagaaataagctccggggaatac

SEQ ID NO: 1029383 - DNA, 33 bp, Homo sapien
cctgcagtatttacaacgatcaggagtgtgtac

SEQ ID NO: 1029384 - DNA, 33 bp, Homo sapien
cctgcagtatttacaatgatcaggagtgtgtac

SEQ ID NO: 1029385 - DNA, 33 bp, Homo sapien
aacctctcaaagcctcactcttcattggaggac

SEQ ID NO: 1029386 - DNA, 33 bp, Homo sapien
aacctctcaaagcctcgctcttcattggaggac

SEQ ID NO: 1029387 - DNA, 33 bp, Homo sapien
ttatccttgacatcccacactcaaccatgaaca

SEQ ID NO: 1029388 - DNA, 33 bp, Homo sapien
ttatccttgacatcccgcactcaaccatgaaca

SEQ ID NO: 1029389 - DNA, 33 bp, Homo sapien
tcctataattcacaaaaccttcaaaacgacttc

SEQ ID NO: 1029390 - DNA, 33 bp, Homo sapien
tcctataattcacaaacccttcaaaacgacttc

SEQ ID NO: 1029391 - DNA, 33 bp, Homo sapien
tagatgtgtcctaaaactgccaatgcccagccc

SEQ ID NO: 1029392 - DNA, 33 bp, Homo sapien
tagatgtgtcctaaaattgccaatgcccagccc

SEQ ID NO: 1029393 - DNA, 33 bp, Homo sapien
aaaatgattgaactcacagaaacagagaacaaa

SEQ ID NO: 1029394 - DNA, 33 bp, Homo sapien
aaaatgattgaactcatagaaacagagaacaaa

SEQ ID NO: 1029395 - DNA, 33 bp, Homo sapien
cagaaaacagatattacgctttggtgttaacat

SEQ ID NO: 1029396 - DNA, 33 bp, Homo sapien
cagaaaacagatattatgctttggtgttaacat

SEQ ID NO: 1029397 - DNA, 33 bp, Homo sapien
tccactggcttcgtcactaggtatcacttgccc

SEQ ID NO: 1029398 - DNA, 33 bp, Homo sapien
tccactggcttcgtcagtaggtatcacttgccc

SEQ ID NO: 1029399 - DNA, 33 bp, Homo sapien
cctatgccaggactaaagctgactatacaacct

SEQ ID NO: 1029400 - DNA, 33 bp, Homo sapien
cctatgccaggactaaggctgactatacaacct

SEQ ID NO: 1029401 - DNA, 33 bp, Homo sapien
ccctgtggctgcttcacatggagcttggttcct

SEQ ID NO: 1029402 - DNA, 33 bp, Homo sapien
ccctgtggctgcttcagatggagcttggttcct

SEQ ID NO: 1029403 - DNA, 33 bp, Homo sapien
ccacatcacatcgcaaatcttcattgctcctcc

SEQ ID NO: 1029404 - DNA, 33 bp, Homo sapien
ccacatcacatcgcaagtcttcattgctcctcc

SEQ ID NO: 1029405 - DNA, 33 bp, Homo sapien
gcattggccactcacactgatgcagggaagcca

SEQ ID NO: 1029406 - DNA, 33 bp, Homo sapien
gcattggccactcacagtgatgcagggaagcca

SEQ ID NO: 1029407 - DNA, 33 bp, Homo sapien
aagcaaaaagaaaggcagccaatgcatatttaa

SEQ ID NO: 1029408 - DNA, 33 bp, Homo sapien
aagcaaaaagaaaggcggccaatgcatatttaa

SEQ ID NO: 1029409 - DNA, 33 bp, Homo sapien
agaacccaggagaagaagacaactaaggagagg

SEQ ID NO: 1029410 - DNA, 33 bp, Homo sapien
agaacccaggagaagaggacaactaaggagagg

SEQ ID NO: 1029411 - DNA, 33 bp, Homo sapien
atgatggagaaagagcactgaagagagaagaaa

SEQ ID NO: 1029412 - DNA, 33 bp, Homo sapien
atgatggagaaagagcgctgaagagagaagaaa

SEQ ID NO: 1029413 - DNA, 33 bp, Homo sapien
ctccatagccatcacaaaatgcctttgctcaaa

SEQ ID NO: 1029414 - DNA, 33 bp, Homo sapien
ctccatagccatcacataatgcctttgctcaaa

SEQ ID NO: 1029415 - DNA, 33 bp, Homo sapien
gcatgtccatgtgaaaactcagaacacacagag

SEQ ID NO: 1029416 - DNA, 33 bp, Homo sapien
gcatgtccatgtgaaatctcagaacacacagag

SEQ ID NO: 1029417 - DNA, 33 bp, Homo sapien
caagctgatgtgctgcaaagtctgcaatgcatg

SEQ ID NO: 1029418 - DNA, 33 bp, Homo sapien
caagctgatgtgctgcgaagtctgcaatgcatg

SEQ ID NO: 1029419 - DNA, 33 bp, Homo sapien
aggcttctgtgaacagcctgaggccagatgacc

SEQ ID NO: 1029420 - DNA, 33 bp, Homo sapien
aggcttctgtgaacagtctgaggccagatgacc

SEQ ID NO: 1029421 - DNA, 33 bp, Homo sapien
agatcctggaccaggccatttttaattaaacat

SEQ ID NO: 1029422 - DNA, 33 bp, Homo sapien
agatcctggaccaggctatttttaattaaacat

SEQ ID NO: 1029423 - DNA, 33 bp, Homo sapien
gggaagtaccattccacgctcttcagactggtg

SEQ ID NO: 1029424 - DNA, 33 bp, Homo sapien
gggaagtaccattccatgctcttcagactggtg

SEQ ID NO: 1029425 - DNA, 33 bp, Homo sapien
gcatcatctctcagggaaacctgtgcttgtctg

SEQ ID NO: 1029426 - DNA, 33 bp, Homo sapien
gcatcatctctcagggcaacctgtgcttgtctg

SEQ ID NO: 1029427 - DNA, 33 bp, Homo sapien
agacgccatctctccaaaaaaaaagatagtagt

SEQ ID NO: 1029428 - DNA, 33 bp, Homo sapien
agacgccatctctccagaaaaaaagatagtagt

SEQ ID NO: 1029429 - DNA, 33 bp, Homo sapien
aacagactcagttctccctttatatgaaaagat

SEQ ID NO: 1029430 - DNA, 33 bp, Homo sapien
aacagactcagttctctctttatatgaaaagat

SEQ ID NO: 1029431 - DNA, 33 bp, Homo sapien
gtccaaaattgttaagccacgtgcccaaatgca

SEQ ID NO: 1029432 - DNA, 33 bp, Homo sapien
gtccaaaattgttaagtcacgtgcccaaatgca

SEQ ID NO: 1029433 - DNA, 33 bp, Homo sapien
ttagggatgaatgctacgatctaccaggggaat

SEQ ID NO: 1029434 - DNA, 33 bp, Homo sapien
ttagggatgaatgctatgatctaccaggggaat

SEQ ID NO: 1029435 - DNA, 33 bp, Homo sapien
ctttgaaaagattttccgacatgataattagct

SEQ ID NO: 1029436 - DNA, 33 bp, Homo sapien
ctttgaaaagattttcggacatgataattagct

SEQ ID NO: 1029437 - DNA, 33 bp, Homo sapien
tcaatcgtgttgaccacagaacagaaagattta

SEQ ID NO: 1029438 - DNA, 33 bp, Homo sapien
tcaatcgtgttgaccatagaacagaaagattta

SEQ ID NO: 1029439 - DNA, 33 bp, Homo sapien
caagcttgtgctgctacaactcaagggactctg

SEQ ID NO: 1029440 - DNA, 33 bp, Homo sapien
caagcttgtgctgctagaactcaagggactctg

SEQ ID NO: 1029441 - DNA, 33 bp, Homo sapien
ataattatgcagatcaacttaacagttttgtgg

SEQ ID NO: 1029442 - DNA, 33 bp, Homo sapien
ataattatgcagatcagcttaacagttttgtgg

SEQ ID NO: 1029443 - DNA, 33 bp, Homo sapien
gtattgcaatcacggacgtggtgtggattcgtg

SEQ ID NO: 1029444 - DNA, 33 bp, Homo sapien
gtattgcaatcacggatgtggtgtggattcgtg

SEQ ID NO: 1029445 - DNA, 33 bp, Homo sapien
gcccctacgcggaccccgaggagatcaggccca

SEQ ID NO: 1029446 - DNA, 33 bp, Homo sapien
gcccctacgcggaccctgaggagatcaggccca

SEQ ID NO: 1029447 - DNA, 33 bp, Homo sapien
aatctgaaaaagcttaggattaatacagaaaca

SEQ ID NO: 1029448 - DNA, 33 bp, Homo sapien
aatctgaaaaagcttatgattaatacagaaaca

SEQ ID NO: 1029449 - DNA, 33 bp, Homo sapien
tttcataattgttgaaagtgaatttctaggtgc

SEQ ID NO: 1029450 - DNA, 33 bp, Homo sapien
tttcataattgttgaaggtgaatttctaggtgc

SEQ ID NO: 1029451 - DNA, 33 bp, Homo sapien
ggattgagtttcctggcatgcttggaattgcaa

SEQ ID NO: 1029452 - DNA, 33 bp, Homo sapien
ggattgagtttcctggtatgcttggaattgcaa

SEQ ID NO: 1029453 - DNA, 33 bp, Homo sapien
atctggctgcaagaaacgtgttgctagttaccc

SEQ ID NO: 1029454 - DNA, 33 bp, Homo sapien
atctggctgcaagaaatgtgttgctagttaccc

SEQ ID NO: 1029455 - DNA, 33 bp, Homo sapien
cacgcagtgctttggaaagtccgaaatcactga

SEQ ID NO: 1029456 - DNA, 33 bp, Homo sapien
cacgcagtgctttggagagtccgaaatcactga

SEQ ID NO: 1029457 - DNA, 33 bp, Homo sapien
cccttttcatgctactcaacattacgaatctca

SEQ ID NO: 1029458 - DNA, 33 bp, Homo sapien
cccttttcatgctacttaacattacgaatctca

SEQ ID NO: 1029459 - DNA, 33 bp, Homo sapien
ctcaccccattcttcacacagtagcttcccaga

SEQ ID NO: 1029460 - DNA, 33 bp, Homo sapien
ctcaccccattcttcatacagtagcttcccaga

SEQ ID NO: 1029461 - DNA, 33 bp, Homo sapien
cagggaaacagagcaaggaagacagcagcctag

SEQ ID NO: 1029462 - DNA, 33 bp, Homo sapien
cagggaaacagagcaatgaagacagcagcctag

SEQ ID NO: 1029463 - DNA, 33 bp, Homo sapien
aaggacacagaggagacagagaaaatgaaacat

SEQ ID NO: 1029464 - DNA, 33 bp, Homo sapien
aaggacacagaggagatagagaaaatgaaacat

SEQ ID NO: 1029465 - DNA, 33 bp, Homo sapien
actgatcaagatggacaactaaatgcaactagt

SEQ ID NO: 1029466 - DNA, 33 bp, Homo sapien
actgatcaagatggacgactaaatgcaactagt

SEQ ID NO: 1029467 - DNA, 33 bp, Homo sapien
taatggaatttctcccactgctttgcttttagg

SEQ ID NO: 1029468 - DNA, 33 bp, Homo sapien
taatggaatttctccctctgctttgcttttagg

SEQ ID NO: 1029469 - DNA, 33 bp, Homo sapien
gggtggtttctagatacagaatgagattatttc

SEQ ID NO: 1029470 - DNA, 33 bp, Homo sapien
gggtggtttctagatagagaatgagattatttc

SEQ ID NO: 1029471 - DNA, 33 bp, Homo sapien
gagggtagagtttaaaacattgtgatacaaatg

SEQ ID NO: 1029472 - DNA, 33 bp, Homo sapien
gagggtagagtttaaatcattgtgatacaaatg

SEQ ID NO: 1029473 - DNA, 33 bp, Homo sapien
taagccctctcgtgtcaaagtagtttctcacag

SEQ ID NO: 1029474 - DNA, 33 bp, Homo sapien
taagccctctcgtgtcgaagtagtttctcacag

SEQ ID NO: 1029475 - DNA, 33 bp, Homo sapien
ttgcaatatatccagaaatcttgcaaaataaga

SEQ ID NO: 1029476 - DNA, 33 bp, Homo sapien
ttgcaatatatccagagatcttgcaaaataaga

SEQ ID NO: 1029477 - DNA, 33 bp, Homo sapien
atgtgcttgtgaaaaaatgctgatcacaagcag

SEQ ID NO: 1029478 - DNA, 33 bp, Homo sapien
atgtgcttgtgaaaaattgctgatcacaagcag

SEQ ID NO: 1029479 - DNA, 33 bp, Homo sapien
atctaaagagtttccaaagaaagtattaattca

SEQ ID NO: 1029480 - DNA, 33 bp, Homo sapien
atctaaagagtttccagagaaagtattaattca

SEQ ID NO: 1029481 - DNA, 33 bp, Homo sapien
atacaagatcggagaacgattttctggtcttaa

SEQ ID NO: 1029482 - DNA, 33 bp, Homo sapien
atacaagatcggagaatgattttctggtcttaa

SEQ ID NO: 1029483 - DNA, 33 bp, Homo sapien
agatcaaacatgaagacgaggattagttaagac

SEQ ID NO: 1029484 - DNA, 33 bp, Homo sapien
agatcaaacatgaagatgaggattagttaagac

SEQ ID NO: 1029485 - DNA, 33 bp, Homo sapien
tctttaactttcaagaggtacagcaaaactgaa

SEQ ID NO: 1029486 - DNA, 33 bp, Homo sapien
tctttaactttcaagatgtacagcaaaactgaa

SEQ ID NO: 1029487 - DNA, 33 bp, Homo sapien
cctgtcctgccctgcccctatcttttattcatg

SEQ ID NO: 1029488 - DNA, 33 bp, Homo sapien
cctgtcctgccctgcctctatcttttattcatg

SEQ ID NO: 1029489 - DNA, 33 bp, Homo sapien
ctccaaataaccacttaaaaatccatgtgaggc

SEQ ID NO: 1029490 - DNA, 33 bp, Homo sapien
ctccaaataaccactttaaaatccatgtgaggc

SEQ ID NO: 1029491 - DNA, 33 bp, Homo sapien
aagggactctcctcacaatcttccatcctagcc

SEQ ID NO: 1029492 - DNA, 33 bp, Homo sapien
aagggactctcctcacgatcttccatcctagcc

SEQ ID NO: 1029493 - DNA, 33 bp, Homo sapien
ttctaagttagttaatcagggaaactgcgtgct

SEQ ID NO: 1029494 - DNA, 33 bp, Homo sapien
ttctaagttagttaattagggaaactgcgtgct

SEQ ID NO: 1029495 - DNA, 33 bp, Homo sapien
gctgtctgaaggagaacaggcggtcctggcaag

SEQ ID NO: 1029496 - DNA, 33 bp, Homo sapien
gctgtctgaaggagaataggcggtcctggcaag

SEQ ID NO: 1029497 - DNA, 33 bp, Homo sapien
caccaactgcatgcacaattggaatcgcgtttc

SEQ ID NO: 1029498 - DNA, 33 bp, Homo sapien
caccaactgcatgcactattggaatcgcgtttc

SEQ ID NO: 1029499 - DNA, 33 bp, Homo sapien
tggagtctttggtctccgaaggtgggatgtagc

SEQ ID NO: 1029500 - DNA, 33 bp, Homo sapien
tggagtctttggtctctgaaggtgggatgtagc

SEQ ID NO: 1029501 - DNA, 33 bp, Homo sapien
cgtgtgtggctttgtacggcttccatatgcccc

SEQ ID NO: 1029502 - DNA, 33 bp, Homo sapien
cgtgtgtggctttgtagggcttccatatgcccc

SEQ ID NO: 1029503 - DNA, 33 bp, Homo sapien
gctcccaaggcccatgcatacagaattccagtg

SEQ ID NO: 1029504 - DNA, 33 bp, Homo sapien
gctcccaaggcccatggatacagaattccagtg

SEQ ID NO: 1029505 - DNA, 33 bp, Homo sapien
gaaacgtctagctcccgctcgtgtcaattgtct

SEQ ID NO: 1029506 - DNA, 33 bp, Homo sapien
gaaacgtctagctccctctcgtgtcaattgtct

SEQ ID NO: 1029507 - DNA, 33 bp, Homo sapien
aaatgaatgctacgaaacagtggcattcaactt

SEQ ID NO: 1029508 - DNA, 33 bp, Homo sapien
aaatgaatgctacgaagcagtggcattcaactt

SEQ ID NO: 1029509 - DNA, 33 bp, Homo sapien
tgtggacttttgacgaagaggatccagggattc

SEQ ID NO: 1029510 - DNA, 33 bp, Homo sapien
tgtggacttttgacgaggaggatccagggattc

SEQ ID NO: 1029511 - DNA, 33 bp, Homo sapien
cagtaagtctctatgcacaacaggtcacaataa

SEQ ID NO: 1029512 - DNA, 33 bp, Homo sapien
cagtaagtctctatgcgcaacaggtcacaataa

SEQ ID NO: 1029513 - DNA, 33 bp, Homo sapien
ctccactgtgcttcacaatggaaatggcagaca

SEQ ID NO: 1029514 - DNA, 33 bp, Homo sapien
ctccactgtgcttcacgatggaaatggcagaca

SEQ ID NO: 1029515 - DNA, 33 bp, Homo sapien
ggatcctcagccctacagagctacacattcctg

SEQ ID NO: 1029516 - DNA, 33 bp, Homo sapien
ggatcctcagccctacggagctacacattcctg

SEQ ID NO: 1029517 - DNA, 33 bp, Homo sapien
cccttcttggtttctaaagggatgagagagaaa

SEQ ID NO: 1029518 - DNA, 33 bp, Homo sapien
cccttcttggtttctacagggatgagagagaaa

SEQ ID NO: 1029519 - DNA, 33 bp, Homo sapien
tgctaagtgatggccccgctcacagaagtgtcc

SEQ ID NO: 1029520 - DNA, 33 bp, Homo sapien
tgctaagtgatggccctgctcacagaagtgtcc

SEQ ID NO: 1029521 - DNA, 33 bp, Homo sapien
gagtctggttacaacacgcaggtgtcttcatct

SEQ ID NO: 1029522 - DNA, 33 bp, Homo sapien
gagtctggttacaacaggcaggtgtcttcatct

SEQ ID NO: 1029523 - DNA, 33 bp, Homo sapien
gcacccctgtaacagcaattattgcaaagaaga

SEQ ID NO: 1029524 - DNA, 33 bp, Homo sapien
gcacccctgtaacagctattattgcaaagaaga

SEQ ID NO: 1029525 - DNA, 33 bp, Homo sapien
aaactcagtttgcccccaaggctacacccaaag

SEQ ID NO: 1029526 - DNA, 33 bp, Homo sapien
aaactcagtttgccccgaaggctacacccaaag

SEQ ID NO: 1029527 - DNA, 33 bp, Homo sapien
cattttcccacaaataacaaattctggagtcgg

SEQ ID NO: 1029528 - DNA, 33 bp, Homo sapien
cattttcccacaaatagcaaattctggagtcgg

SEQ ID NO: 1029529 - DNA, 33 bp, Homo sapien
tctgatgcatggggcacggtgattttcatttaa

SEQ ID NO: 1029530 - DNA, 33 bp, Homo sapien
tctgatgcatggggcatggtgattttcatttaa

SEQ ID NO: 1029531 - DNA, 33 bp, Homo sapien
aaccagtactcaggtcaaaaggataactttgcc

SEQ ID NO: 1029532 - DNA, 33 bp, Homo sapien
aaccagtactcaggtcgaaaggataactttgcc

SEQ ID NO: 1029533 - DNA, 33 bp, Homo sapien
gccaaggtcactgggaaggacagcacaaggcgg

SEQ ID NO: 1029534 - DNA, 33 bp, Homo sapien
gccaaggtcactgggagggacagcacaaggcgg

SEQ ID NO: 1029535 - DNA, 33 bp, Homo sapien
aaatgcatatattcagaaatgcatagagcaata

SEQ ID NO: 1029536 - DNA, 33 bp, Homo sapien
aaatgcatatattcaggaatgcatagagcaata

SEQ ID NO: 1029537 - DNA, 33 bp, Homo sapien
cttactagtgatcaaacctctaccagttttagc

SEQ ID NO: 1029538 - DNA, 33 bp, Homo sapien
cttactagtgatcaaatctctaccagttttagc

SEQ ID NO: 1029539 - DNA, 33 bp, Homo sapien
tgtctttacacctccaaaacttcctctctgtct

SEQ ID NO: 1029540 - DNA, 33 bp, Homo sapien
tgtctttacacctccagaacttcctctctgtct

SEQ ID NO: 1029541 - DNA, 33 bp, Homo sapien
aggcgagcaacctttcaaaggatgatgccattc

SEQ ID NO: 1029542 - DNA, 33 bp, Homo sapien
aggcgagcaacctttcgaaggatgatgccattc

SEQ ID NO: 1029543 - DNA, 33 bp, Homo sapien
tttgtatggtacaggaataaacaaacttatttc

SEQ ID NO: 1029544 - DNA, 33 bp, Homo sapien
tttgtatggtacaggactaaacaaacttatttc

SEQ ID NO: 1029545 - DNA, 33 bp, Homo sapien
agggtgtccatgtggacgataagaactgggccc

SEQ ID NO: 1029546 - DNA, 33 bp, Homo sapien
agggtgtccatgtggatgataagaactgggccc

SEQ ID NO: 1029547 - DNA, 33 bp, Homo sapien
tttagaaagtattccaatgaaagttattctcgt

SEQ ID NO: 1029548 - DNA, 33 bp, Homo sapien
tttagaaagtattccagtgaaagttattctcgt

SEQ ID NO: 1029549 - DNA, 33 bp, Homo sapien
gcgtaggtttgctataccagttctattgtttat

SEQ ID NO: 1029550 - DNA, 33 bp, Homo sapien
gcgtaggtttgctatagcagttctattgtttat

SEQ ID NO: 1029551 - DNA, 33 bp, Homo sapien
atggaatgtggacaaactggagatcttttgtgc

SEQ ID NO: 1029552 - DNA, 33 bp, Homo sapien
atggaatgtggacaaattggagatcttttgtgc

SEQ ID NO: 1029553 - DNA, 33 bp, Homo sapien
cattatgtgaggtcttcaaatgcacagaatttt

SEQ ID NO: 1029554 - DNA, 33 bp, Homo sapien
cattatgtgaggtctttaaatgcacagaatttt

SEQ ID NO: 1029555 - DNA, 33 bp, Homo sapien
ctaggccacagctatcaagggagcagagatctg

SEQ ID NO: 1029556 - DNA, 33 bp, Homo sapien
ctaggccacagctatcgagggagcagagatctg

SEQ ID NO: 1029557 - DNA, 33 bp, Homo sapien
tgctgtcggcagaaacactccagggccaagtgt

SEQ ID NO: 1029558 - DNA, 33 bp, Homo sapien
tgctgtcggcagaaacgctccagggccaagtgt

SEQ ID NO: 1029559 - DNA, 33 bp, Homo sapien
ggtgcttaattactacagaatcaccaggggagg

SEQ ID NO: 1029560 - DNA, 33 bp, Homo sapien
ggtgcttaattactaccgaatcaccaggggagg

SEQ ID NO: 1029561 - DNA, 33 bp, Homo sapien
gcagagatcaagtttaagaaggcaaaatcaaca

SEQ ID NO: 1029562 - DNA, 33 bp, Homo sapien
gcagagatcaagtttaggaaggcaaaatcaaca

SEQ ID NO: 1029563 - DNA, 33 bp, Homo sapien
acacagagttcatggaagtggaaacctggcaga

SEQ ID NO: 1029564 - DNA, 33 bp, Homo sapien
acacagagttcatggaggtggaaacctggcaga

SEQ ID NO: 1029565 - DNA, 33 bp, Homo sapien
atcaacagatttgtgtcaattgtggcaaaggag

SEQ ID NO: 1029566 - DNA, 33 bp, Homo sapien
atcaacagatttgtgttaattgtggcaaaggag

SEQ ID NO: 1029567 - DNA, 33 bp, Homo sapien
ctccaatgtcatctgcaattcctgctctcaaca

SEQ ID NO: 1029568 - DNA, 33 bp, Homo sapien
ctccaatgtcatctgcgattcctgctctcaaca

SEQ ID NO: 1029569 - DNA, 33 bp, Homo sapien
ctcctgaagactgagacgatggtgggaacattg

SEQ ID NO: 1029570 - DNA, 33 bp, Homo sapien
ctcctgaagactgagatgatggtgggaacattg

SEQ ID NO: 1029571 - DNA, 33 bp, Homo sapien
tgcagaatggtgatggacatcagacatgacata

SEQ ID NO: 1029572 - DNA, 33 bp, Homo sapien
tgcagaatggtgatgggcatcagacatgacata

SEQ ID NO: 1029573 - DNA, 33 bp, Homo sapien
tcaggaaggaattggcacttccagttgtattca

SEQ ID NO: 1029574 - DNA, 33 bp, Homo sapien
tcaggaaggaattggcgcttccagttgtattca

SEQ ID NO: 1029575 - DNA, 33 bp, Homo sapien
acatgaagggtacgtaaattgtctaaggtttat

SEQ ID NO: 1029576 - DNA, 33 bp, Homo sapien
acatgaagggtacgtagattgtctaaggtttat

SEQ ID NO: 1029577 - DNA, 33 bp, Homo sapien
gaagtatttgatgaacaattactggctttgaag

SEQ ID NO: 1029578 - DNA, 33 bp, Homo sapien
gaagtatttgatgaacgattactggctttgaag

SEQ ID NO: 1029579 - DNA, 33 bp, Homo sapien
cagttatagaactcaactccaaaattggggaaa

SEQ ID NO: 1029580 - DNA, 33 bp, Homo sapien
cagttatagaactcaagtccaaaattggggaaa

SEQ ID NO: 1029581 - DNA, 33 bp, Homo sapien
agtatggacataggaaaagatgcaagcaaactg

SEQ ID NO: 1029582 - DNA, 33 bp, Homo sapien
agtatggacataggaagagatgcaagcaaactg

SEQ ID NO: 1029583 - DNA, 33 bp, Homo sapien
acaaattgtgagttaaggaattcaatttgcttt

SEQ ID NO: 1029584 - DNA, 33 bp, Homo sapien
acaaattgtgagttaatgaattcaatttgcttt

SEQ ID NO: 1029585 - DNA, 33 bp, Homo sapien
tgattctgtcatggctgaattacaaagcaaatt

SEQ ID NO: 1029586 - DNA, 33 bp, Homo sapien
tgattctgtcatggcttaattacaaagcaaatt

SEQ ID NO: 1029587 - DNA, 33 bp, Homo sapien
tcacattcctgatgacaaaactacttgtgatgc

SEQ ID NO: 1029588 - DNA, 33 bp, Homo sapien
tcacattcctgatgaccaaactacttgtgatgc

SEQ ID NO: 1029589 - DNA, 33 bp, Homo sapien
cctacttttccttgggaactgaaacttggtgcc

SEQ ID NO: 1029590 - DNA, 33 bp, Homo sapien
cctacttttccttgggtactgaaacttggtgcc

SEQ ID NO: 1029591 - DNA, 33 bp, Homo sapien
ctgaagatgtaattacccggctcatttcccaga

SEQ ID NO: 1029592 - DNA, 33 bp, Homo sapien
ctgaagatgtaattactcggctcatttcccaga

SEQ ID NO: 1029593 - DNA, 33 bp, Homo sapien
acaagagaaatgataacgaattgtttgtgaaca

SEQ ID NO: 1029594 - DNA, 33 bp, Homo sapien
acaagagaaatgataatgaattgtttgtgaaca

SEQ ID NO: 1029595 - DNA, 33 bp, Homo sapien
ccagaattgctggctcccactttagtggttttt

SEQ ID NO: 1029596 - DNA, 33 bp, Homo sapien
ccagaattgctggctctcactttagtggttttt

SEQ ID NO: 1029597 - DNA, 33 bp, Homo sapien
tgaagtaaggaggacacgagtcagtaagttgtg

SEQ ID NO: 1029598 - DNA, 33 bp, Homo sapien
tgaagtaaggaggacatgagtcagtaagttgtg

SEQ ID NO: 1029599 - DNA, 33 bp, Homo sapien
tctgaaaactccaaaacatttgattcctgcatt

SEQ ID NO: 1029600 - DNA, 33 bp, Homo sapien
tctgaaaactccaaaatatttgattcctgcatt

SEQ ID NO: 1029601 - DNA, 33 bp, Homo sapien
tggaaagatctctagtaaaatagcctaaataaa

SEQ ID NO: 1029602 - DNA, 33 bp, Homo sapien
tggaaagatctctagtgaaatagcctaaataaa

SEQ ID NO: 1029603 - DNA, 33 bp, Homo sapien
cccagcagcagaaaaaaaataatcaacgtcaga

SEQ ID NO: 1029604 - DNA, 33 bp, Homo sapien
cccagcagcagaaaaacaataatcaacgtcaga

SEQ ID NO: 1029605 - DNA, 33 bp, Homo sapien; identical to SEQ ID NO: 1029603

SEQ ID NO: 1029606 - DNA, 33 bp, Homo sapien; identical to SEQ ID NO: 1029604

SEQ ID NO: 1029607 - DNA, 33 bp, Homo sapien
atcaaatgatagatcaacttttagctcttcaag

SEQ ID NO: 1029608 - DNA, 33 bp, Homo sapien
atcaaatgatagatcaccttttagctcttcaag

SEQ ID NO: 1029609 - DNA, 33 bp, Homo sapien; identical to SEQ ID NO: 1029607

SEQ ID NO: 1029610 - DNA, 33 bp, Homo sapien; identical to SEQ ID NO: 1029608

SEQ ID NO: 1029611 - DNA, 33 bp, Homo sapien
ttatgaggggaatgtcaaaagcacataaggaaa

SEQ ID NO: 1029612 - DNA, 33 bp, Homo sapien
ttatgaggggaatgtcgaaagcacataaggaaa

SEQ ID NO: 1029613 - DNA, 33 bp, Homo sapien
tcctttttgcaggagaagaaacaggctcagtga

SEQ ID NO: 1029614 - DNA, 33 bp, Homo sapien
tcctttttgcaggagaggaaacaggctcagtga

SEQ ID NO: 1029615 - DNA, 33 bp, Homo sapien
acaatggaaatgccaaacaaggctgtcaaagtg

SEQ ID NO: 1029616 - DNA, 33 bp, Homo sapien
acaatggaaatgccaagcaaggctgtcaaagtg

SEQ ID NO: 1029617 - DNA, 33 bp, Homo sapien
cagctgttcaaggatcacccatgcctggagcct

SEQ ID NO: 1029618 - DNA, 33 bp, Homo sapien
cagctgttcaaggatcgcccatgcctggagcct

SEQ ID NO: 1029619 - DNA, 33 bp, Homo sapien
aatttgaaatagcaaggagattggaaaaagtaa

SEQ ID NO: 1029620 - DNA, 33 bp, Homo sapien
aatttgaaatagcaagtagattggaaaaagtaa

SEQ ID NO: 1029621 - DNA, 33 bp, Homo sapien
gctaattcaggaaaacacattggagatattttt

SEQ ID NO: 1029622 - DNA, 33 bp, Homo sapien
gctaattcaggaaaacgcattggagatattttt

SEQ ID NO: 1029623 - DNA, 33 bp, Homo sapien
atgctatttccttaaaaccaacaagaacacttg

SEQ ID NO: 1029624 - DNA, 33 bp, Homo sapien
atgctatttccttaaagccaacaagaacacttg

SEQ ID NO: 1029625 - DNA, 33 bp, Homo sapien
tgctatagagagaagcacagacaaaggcaccac

SEQ ID NO: 1029626 - DNA, 33 bp, Homo sapien
tgctatagagagaagctcagacaaaggcaccac

SEQ ID NO: 1029627 - DNA, 33 bp, Homo sapien
gttctaaaagtgagaaacagaaatgtgccagtt

SEQ ID NO: 1029628 - DNA, 33 bp, Homo sapien
gttctaaaagtgagaaccagaaatgtgccagtt

SEQ ID NO: 1029629 - DNA, 33 bp, Homo sapien
ccacctagttccatcacggccgaactaatgttg

SEQ ID NO: 1029630 - DNA, 33 bp, Homo sapien
ccacctagttccatcatggccgaactaatgttg

SEQ ID NO: 1029631 - DNA, 33 bp, Homo sapien
tcaaaaatcttagaagcctatctagtgttctgt

SEQ ID NO: 1029632 - DNA, 33 bp, Homo sapien
tcaaaaatcttagaagtctatctagtgttctgt

SEQ ID NO: 1029633 - DNA, 33 bp, Homo sapien
ctgtctgggagtcaggaagtagagtcaaaaatc

SEQ ID NO: 1029634 - DNA, 33 bp, Homo sapien
ctgtctgggagtcagggagtagagtcaaaaatc

SEQ ID NO: 1029635 - DNA, 33 bp, Homo sapien
attcgtaccagggccacgattcagcctggattt

SEQ ID NO: 1029636 - DNA, 33 bp, Homo sapien
attcgtaccagggccaggattcagcctggattt

SEQ ID NO: 1029637 - DNA, 33 bp, Homo sapien
gataggaacaaaaaaacctcattagagtcacaa

SEQ ID NO: 1029638 - DNA, 33 bp, Homo sapien
gataggaacaaaaaaatctcattagagtcacaa

SEQ ID NO: 1029639 - DNA, 33 bp, Homo sapien
gtaacttactggcctcaaggataggcctctggt

SEQ ID NO: 1029640 - DNA, 33 bp, Homo sapien
gtaacttactggcctcgaggataggcctctggt

SEQ ID NO: 1029641 - DNA, 33 bp, Homo sapien
aaaactgagatgaagaaaaactcaatgatcttc

SEQ ID NO: 1029642 - DNA, 33 bp, Homo sapien
aaaactgagatgaagagaaactcaatgatcttc

SEQ ID NO: 1029643 - DNA, 33 bp, Homo sapien
tctatagaaagggtacaagactccaatttgaaa

SEQ ID NO: 1029644 - DNA, 33 bp, Homo sapien
tctatagaaagggtaccagactccaatttgaaa

SEQ ID NO: 1029645 - DNA, 33 bp, Homo sapien
aataaagtaacatgccaaacaggtttatagtct

SEQ ID NO: 1029646 - DNA, 33 bp, Homo sapien
aataaagtaacatgccgaacaggtttatagtct

SEQ ID NO: 1029647 - DNA, 33 bp, Homo sapien
acagcctaagtgtgtacgcagctaggtttgtgt

SEQ ID NO: 1029648 - DNA, 33 bp, Homo sapien
acagcctaagtgtgtatgcagctaggtttgtgt

SEQ ID NO: 1029649 - DNA, 33 bp, Homo sapien
ctctttctttcataaactgcccagtcttgggca

SEQ ID NO: 1029650 - DNA, 33 bp, Homo sapien
ctctttctttcataaattgcccagtcttgggca

SEQ ID NO: 1029651 - DNA, 33 bp, Homo sapien
aagagatagtgacatcagagaaagtgaaagaaa

SEQ ID NO: 1029652 - DNA, 33 bp, Homo sapien
aagagatagtgacatcggagaaagtgaaagaaa

SEQ ID NO: 1029653 - DNA, 33 bp, Homo sapien
gccatgaggccccccaaattcacctggagagcc

SEQ ID NO: 1029654 - DNA, 33 bp, Homo sapien
gccatgaggccccccagattcacctggagagcc

SEQ ID NO: 1029655 - DNA, 33 bp, Homo sapien
ccccctctgccaggaaaaggagacaatgcttat

SEQ ID NO: 1029656 - DNA, 33 bp, Homo sapien
ccccctctgccaggaagaggagacaatgcttat

SEQ ID NO: 1029657 - DNA, 33 bp, Homo sapien
ccagagacagagccaacagggtatgtacacagg

SEQ ID NO: 1029658 - DNA, 33 bp, Homo sapien
ccagagacagagccaatagggtatgtacacagg

SEQ ID NO: 1029659 - DNA, 33 bp, Homo sapien
catggaggaaagggggaaagagagcaaattcct

SEQ ID NO: 1029660 - DNA, 33 bp, Homo sapien
catggaggaaaggggggaagagagcaaattcct

SEQ ID NO: 1029661 - DNA, 33 bp, Homo sapien
tacattgagaagggcaaccgcttcactaagtct

SEQ ID NO: 1029662 - DNA, 33 bp, Homo sapien
tacattgagaagggcatccgcttcactaagtct

SEQ ID NO: 1029663 - DNA, 33 bp, Homo sapien
ccagggaaggctttcacccatgtgatgacttat

SEQ ID NO: 1029664 - DNA, 33 bp, Homo sapien
ccagggaaggctttcatccatgtgatgacttat

SEQ ID NO: 1029665 - DNA, 33 bp, Homo sapien
tctgtgccatcaaatacaggtaaaagtatcaat

SEQ ID NO: 1029666 - DNA, 33 bp, Homo sapien
tctgtgccatcaaatataggtaaaagtatcaat

SEQ ID NO: 1029667 - DNA, 33 bp, Homo sapien
actgagactctagtccaagaaggacaccgtgtt

SEQ ID NO: 1029668 - DNA, 33 bp, Homo sapien
actgagactctagtccgagaaggacaccgtgtt

SEQ ID NO: 1029669 - DNA, 33 bp, Homo sapien
tattgaatactttctccctaggatcagaaggat

SEQ ID NO: 1029670 - DNA, 33 bp, Homo sapien
tattgaatactttctctctaggatcagaaggat

SEQ ID NO: 1029671 - DNA, 33 bp, Homo sapien
ttaagtcattagataacactcatggtgcagggg

SEQ ID NO: 1029672 - DNA, 33 bp, Homo sapien
ttaagtcattagataatactcatggtgcagggg

SEQ ID NO: 1029673 - DNA, 33 bp, Homo sapien
agtaaatatcctgtacaccatagctgtttgcat

SEQ ID NO: 1029674 - DNA, 33 bp, Homo sapien
agtaaatatcctgtacgccatagctgtttgcat

SEQ ID NO: 1029675 - DNA, 33 bp, Homo sapien
gatgctttgagctctacgttctcccgattagag

SEQ ID NO: 1029676 - DNA, 33 bp, Homo sapien
gatgctttgagctctatgttctcccgattagag

SEQ ID NO: 1029677 - DNA, 33 bp, Homo sapien
acagccccttcttcagaccaaaagcacatcagt

SEQ ID NO: 1029678 - DNA, 33 bp, Homo sapien
acagccccttcttcaggccaaaagcacatcagt

SEQ ID NO: 1029679 - DNA, 33 bp, Homo sapien
gtctagactcagagcacacatttaaaagacaat

SEQ ID NO: 1029680 - DNA, 33 bp, Homo sapien
gtctagactcagagcagacatttaaaagacaat

SEQ ID NO: 1029681 - DNA, 33 bp, Homo sapien
atgttgaggaaaaatacaacttggcgattttat

SEQ ID NO: 1029682 - DNA, 33 bp, Homo sapien
atgttgaggaaaaatagaacttggcgattttat

SEQ ID NO: 1029683 - DNA, 33 bp, Homo sapien
tcaagtttttcaggacagtcaacatatatcttc

SEQ ID NO: 1029684 - DNA, 33 bp, Homo sapien
tcaagtttttcaggacggtcaacatatatcttc

SEQ ID NO: 1029685 - DNA, 33 bp, Homo sapien
ttggcttgcaaataacactgaaaagctcctttc

SEQ ID NO: 1029686 - DNA, 33 bp, Homo sapien
ttggcttgcaaataacgctgaaaagctcctttc

SEQ ID NO: 1029687 - DNA, 33 bp, Homo sapien
catttcctagctcttacggcgtgtgacacattt

SEQ ID NO: 1029688 - DNA, 33 bp, Homo sapien
catttcctagctcttatggcgtgtgacacattt

SEQ ID NO: 1029689 - DNA, 33 bp, Homo sapien
ctattaacactttcctaaaacatgctttttatg

SEQ ID NO: 1029690 - DNA, 33 bp, Homo sapien
ctattaacactttcctgaaacatgctttttatg

SEQ ID NO: 1029691 - DNA, 33 bp, Homo sapien
atttccaactctgtgcaccaacaggcggtgtgc

SEQ ID NO: 1029692 - DNA, 33 bp, Homo sapien
atttccaactctgtgcgccaacaggcggtgtgc

SEQ ID NO: 1029693 - DNA, 33 bp, Homo sapien
ctttacattcattttaccaaaccaccctgcctt

SEQ ID NO: 1029694 - DNA, 33 bp, Homo sapien
ctttacattcattttatcaaaccaccctgcctt

SEQ ID NO: 1029695 - DNA, 33 bp, Homo sapien
ataactaaaaccatcacaaaacactctgcaaaa

SEQ ID NO: 1029696 - DNA, 33 bp, Homo sapien
ataactaaaaccatcagaaaacactctgcaaaa

SEQ ID NO: 1029697 - DNA, 33 bp, Homo sapien
ccagctgatgcctagcaataagtgcgttctgtg

SEQ ID NO: 1029698 - DNA, 33 bp, Homo sapien
ccagctgatgcctagcgataagtgcgttctgtg

SEQ ID NO: 1029699 - DNA, 33 bp, Homo sapien
agtataagaatttatccgaagagttgctagaat

SEQ ID NO: 1029700 - DNA, 33 bp, Homo sapien
agtataagaatttatctgaagagttgctagaat

SEQ ID NO: 1029701 - DNA, 33 bp, Homo sapien
cttcagaatcctttccaacagtgtattccaagc

SEQ ID NO: 1029702 - DNA, 33 bp, Homo sapien
cttcagaatcctttccgacagtgtattccaagc

SEQ ID NO: 1029703 - DNA, 33 bp, Homo sapien
tgaatggtgaaaatgaaaaacatgggcctcatc

SEQ ID NO: 1029704 - DNA, 33 bp, Homo sapien
tgaatggtgaaaatgagaaacatgggcctcatc

SEQ ID NO: 1029705 - DNA, 33 bp, Homo sapien
ccaactgaaatttttcaatgcatactattcata

SEQ ID NO: 1029706 - DNA, 33 bp, Homo sapien
ccaactgaaatttttctatgcatactattcata

SEQ ID NO: 1029707 - DNA, 33 bp, Homo sapien
gtccacatcagcacataactcaacaaatgtctg

SEQ ID NO: 1029708 - DNA, 33 bp, Homo sapien
gtccacatcagcacatgactcaacaaatgtctg

SEQ ID NO: 1029709 - DNA, 33 bp, Homo sapien
tacagattagttagtaataacataccagtatta

SEQ ID NO: 1029710 - DNA, 33 bp, Homo sapien
tacagattagttagtagtaacataccagtatta

SEQ ID NO: 1029711 - DNA, 33 bp, Homo sapien
gccattgtctctttacacaaaatgttgcctttc

SEQ ID NO: 1029712 - DNA, 33 bp, Homo sapien
gccattgtctctttacgcaaaatgttgcctttc

SEQ ID NO: 1029713 - DNA, 33 bp, Homo sapien
ggtttgagagagtccacaaacagagagagaact

SEQ ID NO: 1029714 - DNA, 33 bp, Homo sapien
ggtttgagagagtccataaacagagagagaact

SEQ ID NO: 1029715 - DNA, 33 bp, Homo sapien
ttcccagagaaagccccgagaaggcaaactact

SEQ ID NO: 1029716 - DNA, 33 bp, Homo sapien
ttcccagagaaagccctgagaaggcaaactact

SEQ ID NO: 1029717 - DNA, 33 bp, Homo sapien
aatgagctttgtcaagcagagagagtaagaaag

SEQ ID NO: 1029718 - DNA, 33 bp, Homo sapien
aatgagctttgtcaaggagagagagtaagaaag

SEQ ID NO: 1029719 - DNA, 33 bp, Homo sapien
aacttttcaccctgataaactgcatctgtgaaa

SEQ ID NO: 1029720 - DNA, 33 bp, Homo sapien
aacttttcaccctgatgaactgcatctgtgaaa

SEQ ID NO: 1029721 - DNA, 33 bp, Homo sapien
agagtatctacaaaaaagagtcctagaagtaaa

SEQ ID NO: 1029722 - DNA, 33 bp, Homo sapien
agagtatctacaaaaaggagtcctagaagtaaa

SEQ ID NO: 1029723 - DNA, 33 bp, Homo sapien
agagtttgataagtaacgtgaagggatagatac

SEQ ID NO: 1029724 - DNA, 33 bp, Homo sapien
agagtttgataagtaatgtgaagggatagatac

SEQ ID NO: 1029725 - DNA, 33 bp, Homo sapien
tctaatggaaaacagactactattgaggaaaaa

SEQ ID NO: 1029726 - DNA, 33 bp, Homo sapien
tctaatggaaaacagattactattgaggaaaaa

SEQ ID NO: 1029727 - DNA, 33 bp, Homo sapien
ccaagaagtacttccaactcaacctatacaaaa

SEQ ID NO: 1029728 - DNA, 33 bp, Homo sapien
ccaagaagtacttccagctcaacctatacaaaa

SEQ ID NO: 1029729 - DNA, 33 bp, Homo sapien
aaggataagtaggagtcaaggtgagagtgaagg

SEQ ID NO: 1029730 - DNA, 33 bp, Homo sapien
aaggataagtaggagttaaggtgagagtgaagg

SEQ ID NO: 1029731 - DNA, 33 bp, Homo sapien
gtcactctcttctccccctcgtaggttacagga

SEQ ID NO: 1029732 - DNA, 33 bp, Homo sapien
gtcactctcttctccctctcgtaggttacagga

SEQ ID NO: 1029733 - DNA, 33 bp, Homo sapien
gttaggatctgaatggacagaagagagaatatc

SEQ ID NO: 1029734 - DNA, 33 bp, Homo sapien
gttaggatctgaatggtcagaagagagaatatc

SEQ ID NO: 1029735 - DNA, 33 bp, Homo sapien
actgtactagagatggcagcggctgctccagac

SEQ ID NO: 1029736 - DNA, 33 bp, Homo sapien
actgtactagagatggtagcggctgctccagac

SEQ ID NO: 1029737 - DNA, 33 bp, Homo sapien
gaaacaattatgaccccgatagagcagtacaaa

SEQ ID NO: 1029738 - DNA, 33 bp, Homo sapien
gaaacaattatgaccctgatagagcagtacaaa

SEQ ID NO: 1029739 - DNA, 33 bp, Homo sapien
gccttttggctaagatcaggtgaaaatgctata

SEQ ID NO: 1029740 - DNA, 33 bp, Homo sapien
gccttttggctaagattaggtgaaaatgctata

SEQ ID NO: 1029741 - DNA, 33 bp, Homo sapien
catggctttccatctgcaggccaaatgagcctg

SEQ ID NO: 1029742 - DNA, 33 bp, Homo sapien
catggctttccatctgtaggccaaatgagcctg

SEQ ID NO: 1029743 - DNA, 33 bp, Homo sapien
atgagcctgccaataccaggttctagaataaga

SEQ ID NO: 1029744 - DNA, 33 bp, Homo sapien
atgagcctgccaatactaggttctagaataaga

SEQ ID NO: 1029745 - DNA, 33 bp, Homo sapien
gcttttgaaatgccccaccattctgtctgcctt

SEQ ID NO: 1029746 - DNA, 33 bp, Homo sapien
gcttttgaaatgccccgccattctgtctgcctt

SEQ ID NO: 1029747 - DNA, 33 bp, Homo sapien
ttttccatacatactccgaaggtgccatcacta

SEQ ID NO: 1029748 - DNA, 33 bp, Homo sapien
ttttccatacatactctgaaggtgccatcacta

SEQ ID NO: 1029749 - DNA, 33 bp, Homo sapien
ctaatctgaaatcttaaaaggacaccaacaatc

SEQ ID NO: 1029750 - DNA, 33 bp, Homo sapien
ctaatctgaaatcttacaaggacaccaacaatc

SEQ ID NO: 1029751 - DNA, 33 bp, Homo sapien
gtcgcggtgtggtaaccgtcactggaaagacca

SEQ ID NO: 1029752 - DNA, 33 bp, Homo sapien
gtcgcggtgtggtaactgtcactggaaagacca

SEQ ID NO: 1029753 - DNA, 33 bp, Homo sapien
ctgtggcctggggattaaagaacactgtcctaa

SEQ ID NO: 1029754 - DNA, 33 bp, Homo sapien
ctgtggcctggggattgaagaacactgtcctaa

SEQ ID NO: 1029755 - DNA, 33 bp, Homo sapien
ctcctagaagacactagaggggaaaagtgcctg

SEQ ID NO: 1029756 - DNA, 33 bp, Homo sapien
ctcctagaagacactataggggaaaagtgcctg

SEQ ID NO: 1029757 - DNA, 33 bp, Homo sapien
caggtcatgcacatgaatatctagctctcagta

SEQ ID NO: 1029758 - DNA, 33 bp, Homo sapien
caggtcatgcacatgagtatctagctctcagta

SEQ ID NO: 1029759 - DNA, 33 bp, Homo sapien
tgtatttacaaaacaccgaatttttgactctga

SEQ ID NO: 1029760 - DNA, 33 bp, Homo sapien
tgtatttacaaaacactgaatttttgactctga

SEQ ID NO: 1029761 - DNA, 33 bp, Homo sapien
aaaaactggtcaggacgaagtgtttcgtttgca

SEQ ID NO: 1029762 - DNA, 33 bp, Homo sapien
aaaaactggtcaggactaagtgtttcgtttgca

SEQ ID NO: 1029763 - DNA, 33 bp, Homo sapien
atgcaagctcccttaactgagtatgcccaaaaa

SEQ ID NO: 1029764 - DNA, 33 bp, Homo sapien
atgcaagctcccttaattgagtatgcccaaaaa

SEQ ID NO: 1029765 - DNA, 33 bp, Homo sapien
accacaccctttactaccatgcctacagggctg

SEQ ID NO: 1029766 - DNA, 33 bp, Homo sapien
accacaccctttactatcatgcctacagggctg

SEQ ID NO: 1029767 - DNA, 33 bp, Homo sapien
tcatacttctgcctaaagtgatagaactatcct

SEQ ID NO: 1029768 - DNA, 33 bp, Homo sapien
tcatacttctgcctaatgtgatagaactatcct

SEQ ID NO: 1029769 - DNA, 33 bp, Homo sapien
gctgcatctcagagaggcacccagctatatgag

SEQ ID NO: 1029770 - DNA, 33 bp, Homo sapien
gctgcatctcagagagtcacccagctatatgag

SEQ ID NO: 1029771 - DNA, 33 bp, Homo sapien
ttttcatctaggctaacgagagatattggtgta

SEQ ID NO: 1029772 - DNA, 33 bp, Homo sapien
ttttcatctaggctaatgagagatattggtgta

SEQ ID NO: 1029773 - DNA, 33 bp, Homo sapien
tatgctagtgaaattacgtgtgttttcccattt

SEQ ID NO: 1029774 - DNA, 33 bp, Homo sapien
tatgctagtgaaattatgtgtgttttcccattt

SEQ ID NO: 1029775 - DNA, 33 bp, Homo sapien
gtgtcctgaatcccaacgtctgtagcgggacat

SEQ ID NO: 1029776 - DNA, 33 bp, Homo sapien
gtgtcctgaatcccaatgtctgtagcgggacat

SEQ ID NO: 1029777 - DNA, 33 bp, Homo sapien
tagtggtacttttggccagctgggttgttatga

SEQ ID NO: 1029778 - DNA, 33 bp, Homo sapien
tagtggtacttttggctagctgggttgttatga

SEQ ID NO: 1029779 - DNA, 33 bp, Homo sapien
ttccccaccatgctgaaggtgtatgggcatcct

SEQ ID NO: 1029780 - DNA, 33 bp, Homo sapien
ttccccaccatgctgagggtgtatgggcatcct

SEQ ID NO: 1029781 - DNA, 33 bp, Homo sapien
catgtcagaatcagacccttgggcatctcaagt

SEQ ID NO: 1029782 - DNA, 33 bp, Homo sapien
catgtcagaatcagactcttgggcatctcaagt

SEQ ID NO: 1029783 - DNA, 33 bp, Homo sapien
aggatgaaaacttatgaacattttatgaagtgg

SEQ ID NO: 1029784 - DNA, 33 bp, Homo sapien
aggatgaaaacttatggacattttatgaagtgg

SEQ ID NO: 1029785 - DNA, 33 bp, Homo sapien
gcacatcatatcaggaagtacgtgaagtccacc

SEQ ID NO: 1029786 - DNA, 33 bp, Homo sapien
gcacatcatatcaggaggtacgtgaagtccacc

SEQ ID NO: 1029787 - DNA, 33 bp, Homo sapien
ttgcttcccaccaaaaatgcgtatcctgaatct

SEQ ID NO: 1029788 - DNA, 33 bp, Homo sapien
ttgcttcccaccaaaattgcgtatcctgaatct

SEQ ID NO: 1029789 - DNA, 33 bp, Homo sapien
ggcatagtaacatgaacgacaaaagtcagccca

SEQ ID NO: 1029790 - DNA, 33 bp, Homo sapien
ggcatagtaacatgaaggacaaaagtcagccca

SEQ ID NO: 1029791 - DNA, 33 bp, Homo sapien
atttgtgaggccagtacgttaaaaagtggtgca

SEQ ID NO: 1029792 - DNA, 33 bp, Homo sapien
atttgtgaggccagtatgttaaaaagtggtgca

SEQ ID NO: 1029793 - DNA, 33 bp, Homo sapien
caaaaagaccagtctgcaagggaatgaaagggg

SEQ ID NO: 1029794 - DNA, 33 bp, Homo sapien
caaaaagaccagtctgtaagggaatgaaagggg

SEQ ID NO: 1029795 - DNA, 33 bp, Homo sapien
tgaaggaacgtattatcagtcctggagaaaaca

SEQ ID NO: 1029796 - DNA, 33 bp, Homo sapien
tgaaggaacgtattatgagtcctggagaaaaca

SEQ ID NO: 1029797 - DNA, 33 bp, Homo sapien
tgctacaagaaataccagaagtccttttttttt

SEQ ID NO: 1029798 - DNA, 33 bp, Homo sapien
tgctacaagaaatacctgaagtccttttttttt

SEQ ID NO: 1029799 - DNA, 33 bp, Homo sapien
aagagggaatacttcaagaggaagagggaatga

SEQ ID NO: 1029800 - DNA, 33 bp, Homo sapien
aagagggaatacttcaggaggaagagggaatga

SEQ ID NO: 1029801 - DNA, 33 bp, Homo sapien
tgttttattttgccatcacgtaatacatctatg

SEQ ID NO: 1029802 - DNA, 33 bp, Homo sapien
tgttttattttgccatgacgtaatacatctatg

SEQ ID NO: 1029803 - DNA, 33 bp, Homo sapien
tagaggcagatcctgaagaaggcacaggtatcg

SEQ ID NO: 1029804 - DNA, 33 bp, Homo sapien
tagaggcagatcctgaggaaggcacaggtatcg

SEQ ID NO: 1029805 - DNA, 33 bp, Homo sapien
gctggctccccaggaaatagacccaggatggag

SEQ ID NO: 1029806 - DNA, 33 bp, Homo sapien
gctggctccccaggaagtagacccaggatggag

SEQ ID NO: 1029807 - DNA, 33 bp, Homo sapien
aggaagcataatcacagtgaagtaagaactcag

SEQ ID NO: 1029808 - DNA, 33 bp, Homo sapien
aggaagcataatcacattgaagtaagaactcag

SEQ ID NO: 1029809 - DNA, 33 bp, Homo sapien
gtaatggaattgactaccctttcataaaatgaa

SEQ ID NO: 1029810 - DNA, 33 bp, Homo sapien
gtaatggaattgactatcctttcataaaatgaa

SEQ ID NO: 1029811 - DNA, 33 bp, Homo sapien
accccagcaatccacacatctctggcttaacct

SEQ ID NO: 1029812 - DNA, 33 bp, Homo sapien
accccagcaatccacatatctctggcttaacct

SEQ ID NO: 1029813 - DNA, 33 bp, Homo sapien
acccagccctgttgtacctctttctgggtatgt

SEQ ID NO: 1029814 - DNA, 33 bp, Homo sapien
acccagccctgttgtatctctttctgggtatgt

SEQ ID NO: 1029815 - DNA, 33 bp, Homo sapien
taagagccgggacaaactgataaatgagctgaa

SEQ ID NO: 1029816 - DNA, 33 bp, Homo sapien
taagagccgggacaaattgataaatgagctgaa

SEQ ID NO: 1029817 - DNA, 33 bp, Homo sapien
atgtgccctgctaatgaatgaaggtcttctctg

SEQ ID NO: 1029818 - DNA, 33 bp, Homo sapien
atgtgccctgctaatggatgaaggtcttctctg

SEQ ID NO: 1029819 - DNA, 33 bp, Homo sapien
ttttgacagtatcacactgattactatagcttt

SEQ ID NO: 1029820 - DNA, 33 bp, Homo sapien
ttttgacagtatcacattgattactatagcttt

SEQ ID NO: 1029821 - DNA, 33 bp, Homo sapien
aacctgcatgacattgcatttggaaataatttc

SEQ ID NO: 1029822 - DNA, 33 bp, Homo sapien
aacctgcatgacattggatttggaaataatttc

SEQ ID NO: 1029823 - DNA, 33 bp, Homo sapien
cccaggcattgatgcacgaacacactagcagga

SEQ ID NO: 1029824 - DNA, 33 bp, Homo sapien
cccaggcattgatgcatgaacacactagcagga

SEQ ID NO: 1029825 - DNA, 33 bp, Homo sapien
ccccaagggcgtagaaaatcccagacagtgaga

SEQ ID NO: 1029826 - DNA, 33 bp, Homo sapien
ccccaagggcgtagaacatcccagacagtgaga

SEQ ID NO: 1029827 - DNA, 33 bp, Homo sapien
aacatacctgagtgtaacaatattcaacatccg

SEQ ID NO: 1029828 - DNA, 33 bp, Homo sapien
aacatacctgagtgtagcaatattcaacatccg

SEQ ID NO: 1029829 - DNA, 33 bp, Homo sapien
atccctctgggacggtcaagacatcaggcccaa

SEQ ID NO: 1029830 - DNA, 33 bp, Homo sapien
atccctctgggacggttaagacatcaggcccaa

SEQ ID NO: 1029831 - DNA, 33 bp, Homo sapien
ctccactctcccaaacagtaattattcagaaaa

SEQ ID NO: 1029832 - DNA, 33 bp, Homo sapien
ctccactctcccaaacggtaattattcagaaaa

SEQ ID NO: 1029833 - DNA, 33 bp, Homo sapien
ggcttcctttcctcaaacagcctgaaagattct

SEQ ID NO: 1029834 - DNA, 33 bp, Homo sapien
ggcttcctttcctcaaccagcctgaaagattct

SEQ ID NO: 1029835 - DNA, 33 bp, Homo sapien
ctttcaagcaaaatgaataagtttcaagtagca

SEQ ID NO: 1029836 - DNA, 33 bp, Homo sapien
ctttcaagcaaaatgagtaagtttcaagtagca

SEQ ID NO: 1029837 - DNA, 33 bp, Homo sapien
tttctgtctgcgtacactggaaaaatcatgtag

SEQ ID NO: 1029838 - DNA, 33 bp, Homo sapien
tttctgtctgcgtacattggaaaaatcatgtag

SEQ ID NO: 1029839 - DNA, 33 bp, Homo sapien
gaagcaagggagaggggaagtgtcaggctcttt

SEQ ID NO: 1029840 - DNA, 33 bp, Homo sapien
gaagcaagggagagggtaagtgtcaggctcttt

SEQ ID NO: 1029841 - DNA, 33 bp, Homo sapien
gcatttttgatccacaactggttgaaccccctt

SEQ ID NO: 1029842 - DNA, 33 bp, Homo sapien
gcatttttgatccacagctggttgaaccccctt

SEQ ID NO: 1029843 - DNA, 33 bp, Homo sapien
gagtgtcaaccttgcacgatcttgctatagcat

SEQ ID NO: 1029844 - DNA, 33 bp, Homo sapien
gagtgtcaaccttgcatgatcttgctatagcat

SEQ ID NO: 1029845 - DNA, 33 bp, Homo sapien
ccaccagccagggtaacgacaaagaggcttctt

SEQ ID NO: 1029846 - DNA, 33 bp, Homo sapien
ccaccagccagggtaatgacaaagaggcttctt

SEQ ID NO: 1029847 - DNA, 33 bp, Homo sapien
ccaaccactgcccctacagatgagatgagtatt

SEQ ID NO: 1029848 - DNA, 33 bp, Homo sapien
ccaaccactgcccctatagatgagatgagtatt

SEQ ID NO: 1029849 - DNA, 33 bp, Homo sapien
tctgcaaggcagaacactctcttcccattagcc

SEQ ID NO: 1029850 - DNA, 33 bp, Homo sapien
tctgcaaggcagaacattctcttcccattagcc

SEQ ID NO: 1029851 - DNA, 33 bp, Homo sapien
cagaagatgatggggaaaaaaaggaatttcaac

SEQ ID NO: 1029852 - DNA, 33 bp, Homo sapien
cagaagatgatggggataaaaaggaatttcaac

SEQ ID NO: 1029853 - DNA, 33 bp, Homo sapien
gcatagtatgcagaaacagcagtctagtctcct

SEQ ID NO: 1029854 - DNA, 33 bp, Homo sapien
gcatagtatgcagaaatagcagtctagtctcct

SEQ ID NO: 1029855 - DNA, 33 bp, Homo sapien
tcagaagcccttgataactctcataagtatcta

SEQ ID NO: 1029856 - DNA, 33 bp, Homo sapien
tcagaagcccttgatacctctcataagtatcta

SEQ ID NO: 1029857 - DNA, 33 bp, Homo sapien
aaattgtatgattatccagtttctcctcaaact

SEQ ID NO: 1029858 - DNA, 33 bp, Homo sapien
aaattgtatgattatctagtttctcctcaaact

SEQ ID NO: 1029859 - DNA, 33 bp, Homo sapien
cttttgtccccttgcaatcttctcctgttaccc

SEQ ID NO: 1029860 - DNA, 33 bp, Homo sapien
cttttgtccccttgcagtcttctcctgttaccc

SEQ ID NO: 1029861 - DNA, 33 bp, Homo sapien
tttaaaaattattctcaacttcttaaagcttct

SEQ ID NO: 1029862 - DNA, 33 bp, Homo sapien
tttaaaaattattctcgacttcttaaagcttct

SEQ ID NO: 1029863 - DNA, 33 bp, Homo sapien
tgcccaaactctctcaacaagtaaaaagtttct

SEQ ID NO: 1029864 - DNA, 33 bp, Homo sapien
tgcccaaactctctcagcaagtaaaaagtttct

SEQ ID NO: 1029865 - DNA, 33 bp, Homo sapien
gataatcgaatacaaacaactggcaaataagta

SEQ ID NO: 1029866 - DNA, 33 bp, Homo sapien
gataatcgaatacaaagaactggcaaataagta

SEQ ID NO: 1029867 - DNA, 33 bp, Homo sapien
ttgcaaaatgcagctaacattcctagggctagg

SEQ ID NO: 1029868 - DNA, 33 bp, Homo sapien
ttgcaaaatgcagctaccattcctagggctagg

SEQ ID NO: 1029869 - DNA, 33 bp, Homo sapien
actctggtctaagatgcacaattgcaaaggcct

SEQ ID NO: 1029870 - DNA, 33 bp, Homo sapien
actctggtctaagatgtacaattgcaaaggcct

SEQ ID NO: 1029871 - DNA, 33 bp, Homo sapien
gatcatgtgctatataggcaatcatcggcctgt

SEQ ID NO: 1029872 - DNA, 33 bp, Homo sapien
gatcatgtgctatatatgcaatcatcggcctgt

SEQ ID NO: 1029873 - DNA, 33 bp, Homo sapien
acccaaatggtggtaaagttctacatttcaaca

SEQ ID NO: 1029874 - DNA, 33 bp, Homo sapien
acccaaatggtggtaaggttctacatttcaaca

SEQ ID NO: 1029875 - DNA, 33 bp, Homo sapien
ctaaacccttagaataaccttcctgataagaat

SEQ ID NO: 1029876 - DNA, 33 bp, Homo sapien
ctaaacccttagaatacccttcctgataagaat

SEQ ID NO: 1029877 - DNA, 33 bp, Homo sapien
gagccaggaggtggacataatttaccctcagcc

SEQ ID NO: 1029878 - DNA, 33 bp, Homo sapien
gagccaggaggtggacgtaatttaccctcagcc

SEQ ID NO: 1029879 - DNA, 33 bp, Homo sapien
ggatacagcaatcaaacgcagggacggtatctt

SEQ ID NO: 1029880 - DNA, 33 bp, Homo sapien
ggatacagcaatcaaatgcagggacggtatctt

SEQ ID NO: 1029881 - DNA, 33 bp, Homo sapien
cacaagttgtgctttacagaagttctttttttt

SEQ ID NO: 1029882 - DNA, 33 bp, Homo sapien
cacaagttgtgctttatagaagttctttttttt

SEQ ID NO: 1029883 - DNA, 33 bp, Homo sapien
aacaagttgtagagaaagttaccacttgtgtaa

SEQ ID NO: 1029884 - DNA, 33 bp, Homo sapien
aacaagttgtagagaaggttaccacttgtgtaa

SEQ ID NO: 1029885 - DNA, 33 bp, Homo sapien
ccacatcctggttggaatacccgcagtagggct

SEQ ID NO: 1029886 - DNA, 33 bp, Homo sapien
ccacatcctggttggagtacccgcagtagggct

SEQ ID NO: 1029887 - DNA, 33 bp, Homo sapien
gccataatgtccctgacgtattaaatagttcaa

SEQ ID NO: 1029888 - DNA, 33 bp, Homo sapien
gccataatgtccctgatgtattaaatagttcaa

SEQ ID NO: 1029889 - DNA, 33 bp, Homo sapien
aaggcagaggctgaacacttgcaatagtgaaga

SEQ ID NO: 1029890 - DNA, 33 bp, Homo sapien
aaggcagaggctgaacgcttgcaatagtgaaga

SEQ ID NO: 1029891 - DNA, 33 bp, Homo sapien
acagatgtggcaaaaaaatccacttgatccaac

SEQ ID NO: 1029892 - DNA, 33 bp, Homo sapien
acagatgtggcaaaaacatccacttgatccaac

SEQ ID NO: 1029893 - DNA, 33 bp, Homo sapien
gtttgatatcataaaaatccaagtcagcagaac

SEQ ID NO: 1029894 - DNA, 33 bp, Homo sapien
gtttgatatcataaaactccaagtcagcagaac

SEQ ID NO: 1029895 - DNA, 33 bp, Homo sapien
cactacaaagtcaaagaatgtcctcgtgtggaa

SEQ ID NO: 1029896 - DNA, 33 bp, Homo sapien
cactacaaagtcaaaggatgtcctcgtgtggaa

SEQ ID NO: 1029897 - DNA, 33 bp, Homo sapien
gatagggaccctcttacagtgactgtgcatccc

SEQ ID NO: 1029898 - DNA, 33 bp, Homo sapien
gatagggaccctcttatagtgactgtgcatccc

SEQ ID NO: 1029899 - DNA, 33 bp, Homo sapien
catgatttccttgaaaaattctgatggtagttt

SEQ ID NO: 1029900 - DNA, 33 bp, Homo sapien
catgatttccttgaaagattctgatggtagttt

SEQ ID NO: 1029901 - DNA, 33 bp, Homo sapien
gttactttcccgacaacgtcaaaggacccattt

SEQ ID NO: 1029902 - DNA, 33 bp, Homo sapien
gttactttcccgacaatgtcaaaggacccattt

SEQ ID NO: 1029903 - DNA, 33 bp, Homo sapien
agagagggcaccaagacgtggacacagcaaatc

SEQ ID NO: 1029904 - DNA, 33 bp, Homo sapien
agagagggcaccaagatgtggacacagcaaatc

SEQ ID NO: 1029905 - DNA, 33 bp, Homo sapien
aggagcagctcttctccgaagtcgagagacaca

SEQ ID NO: 1029906 - DNA, 33 bp, Homo sapien
aggagcagctcttctctgaagtcgagagacaca

SEQ ID NO: 1029907 - DNA, 33 bp, Homo sapien
tgtgatactatactacactatcctgctactgca

SEQ ID NO: 1029908 - DNA, 33 bp, Homo sapien
tgtgatactatactactctatcctgctactgca

SEQ ID NO: 1029909 - DNA, 33 bp, Homo sapien
taaaggtggcccgtcaagtgggcacatctgtac

SEQ ID NO: 1029910 - DNA, 33 bp, Homo sapien
taaaggtggcccgtcacgtgggcacatctgtac

SEQ ID NO: 1029911 - DNA, 33 bp, Homo sapien
caactcctttcggtcacgggaacgcactgaaca

SEQ ID NO: 1029912 - DNA, 33 bp, Homo sapien
caactcctttcggtcatgggaacgcactgaaca

SEQ ID NO: 1029913 - DNA, 33 bp, Homo sapien
tcctctgcttctcctcaaaccgtgcttcacagc

SEQ ID NO: 1029914 - DNA, 33 bp, Homo sapien
tcctctgcttctcctcgaaccgtgcttcacagc

SEQ ID NO: 1029915 - DNA, 33 bp, Homo sapien
tctcccctgcggtaccaccatgacaccaagtcc

SEQ ID NO: 1029916 - DNA, 33 bp, Homo sapien
tctcccctgcggtacctccatgacaccaagtcc

SEQ ID NO: 1029917 - DNA, 33 bp, Homo sapien
gctatggggacaatcaataagtatctgtggtct

SEQ ID NO: 1029918 - DNA, 33 bp, Homo sapien
gctatggggacaatcagtaagtatctgtggtct

SEQ ID NO: 1029919 - DNA, 33 bp, Homo sapien
gctattcttgtgataaacttcaaaatcactttt

SEQ ID NO: 1029920 - DNA, 33 bp, Homo sapien
gctattcttgtgataagcttcaaaatcactttt

SEQ ID NO: 1029921 - DNA, 33 bp, Homo sapien
cccaggtccagcggagaaaagtcagggcactgt

SEQ ID NO: 1029922 - DNA, 33 bp, Homo sapien
cccaggtccagcggaggaaagtcagggcactgt

SEQ ID NO: 1029923 - DNA, 33 bp, Homo sapien
gtctccatgccaatgacaattcctgtaggactc

SEQ ID NO: 1029924 - DNA, 33 bp, Homo sapien
gtctccatgccaatgataattcctgtaggactc

SEQ ID NO: 1029925 - DNA, 33 bp, Homo sapien
ggccagaccgctcccccgaaagccaactcagaa

SEQ ID NO: 1029926 - DNA, 33 bp, Homo sapien
ggccagaccgctcccctgaaagccaactcagaa

SEQ ID NO: 1029927 - DNA, 33 bp, Homo sapien
ctgtttgctctatctgcagaatgtatcaggacc

SEQ ID NO: 1029928 - DNA, 33 bp, Homo sapien
ctgtttgctctatctgtagaatgtatcaggacc

SEQ ID NO: 1029929 - DNA, 33 bp, Homo sapien
acatctggagcagatacgagtcctggccccagc

SEQ ID NO: 1029930 - DNA, 33 bp, Homo sapien
acatctggagcagatatgagtcctggccccagc

SEQ ID NO: 1029931 - DNA, 33 bp, Homo sapien
tagtaaaggtaactaactaggtactgtgaaaga

SEQ ID NO: 1029932 - DNA, 33 bp, Homo sapien
tagtaaaggtaactaagtaggtactgtgaaaga

SEQ ID NO: 1029933 - DNA, 33 bp, Homo sapien
ctccaggctaaagggaaactctcagcttggtat

SEQ ID NO: 1029934 - DNA, 33 bp, Homo sapien
ctccaggctaaagggagactctcagcttggtat

SEQ ID NO: 1029935 - DNA, 33 bp, Homo sapien
acaggaacctctgttacggcaaaaataagcatg

SEQ ID NO: 1029936 - DNA, 33 bp, Homo sapien
acaggaacctctgttatggcaaaaataagcatg

SEQ ID NO: 1029937 - DNA, 33 bp, Homo sapien
ctcacttgagactgaaaacgttccccagggaag

SEQ ID NO: 1029938 - DNA, 33 bp, Homo sapien
ctcacttgagactgaacacgttccccagggaag

SEQ ID NO: 1029939 - DNA, 33 bp, Homo sapien
aaactatggaaacatgacaagacagaggggttt

SEQ ID NO: 1029940 - DNA, 33 bp, Homo sapien
aaactatggaaacatggcaagacagaggggttt

SEQ ID NO: 1029941 - DNA, 33 bp, Homo sapien
actgctctttgttcaacctgggatagaagcgtt

SEQ ID NO: 1029942 - DNA, 33 bp, Homo sapien
actgctctttgttcaatctgggatagaagcgtt

SEQ ID NO: 1029943 - DNA, 33 bp, Homo sapien
agatcagctttaccaaattgccacaaatgacgt

SEQ ID NO: 1029944 - DNA, 33 bp, Homo sapien
agatcagctttaccaagttgccacaaatgacgt

SEQ ID NO: 1029945 - DNA, 33 bp, Homo sapien
tcatgtgtggcgtggccgatttagtcgctgagc

SEQ ID NO: 1029946 - DNA, 33 bp, Homo sapien
tcatgtgtggcgtggctgatttagtcgctgagc

SEQ ID NO: 1029947 - DNA, 33 bp, Homo sapien
gtaaagcccgggagaacatctgttcaagcagaa

SEQ ID NO: 1029948 - DNA, 33 bp, Homo sapien
gtaaagcccgggagaatatctgttcaagcagaa

SEQ ID NO: 1029949 - DNA, 33 bp, Homo sapien
acattaaatgttcacacgtagaatgaatacaac

SEQ ID NO: 1029950 - DNA, 33 bp, Homo sapien
acattaaatgttcacaggtagaatgaatacaac

SEQ ID NO: 1029951 - DNA, 33 bp, Homo sapien
aacacggcagttgacccaaatcgggatgagaga

SEQ ID NO: 1029952 - DNA, 33 bp, Homo sapien
aacacggcagttgacctaaatcgggatgagaga

SEQ ID NO: 1029953 - DNA, 33 bp, Homo sapien
actggaaccagctataaaaagtcaagattttta

SEQ ID NO: 1029954 - DNA, 33 bp, Homo sapien
actggaaccagctatacaaagtcaagattttta

SEQ ID NO: 1029955 - DNA, 33 bp, Homo sapien
cttctttggattaacactggtacaattcactac

SEQ ID NO: 1029956 - DNA, 33 bp, Homo sapien
cttctttggattaacattggtacaattcactac

SEQ ID NO: 1029957 - DNA, 33 bp, Homo sapien
tgaccccagaagttgacaaagactcctccaaac

SEQ ID NO: 1029958 - DNA, 33 bp, Homo sapien
tgaccccagaagttgagaaagactcctccaaac

SEQ ID NO: 1029959 - DNA, 33 bp, Homo sapien
ccagccatcagtcaaacgcaactctaggtgctg

SEQ ID NO: 1029960 - DNA, 33 bp, Homo sapien
ccagccatcagtcaaatgcaactctaggtgctg

SEQ ID NO: 1029961 - DNA, 33 bp, Homo sapien
gcataaggtgtagagaatatgtcttctgccatg

SEQ ID NO: 1029962 - DNA, 33 bp, Homo sapien
gcataaggtgtagagagtatgtcttctgccatg

SEQ ID NO: 1029963 - DNA, 33 bp, Homo sapien
ttgtatagacaagacaagaaaacaccctgagat

SEQ ID NO: 1029964 - DNA, 33 bp, Homo sapien
ttgtatagacaagacacgaaaacaccctgagat

SEQ ID NO: 1029965 - DNA, 33 bp, Homo sapien
agttatcgtgaaacccagcattcataaaagcag

SEQ ID NO: 1029966 - DNA, 33 bp, Homo sapien
agttatcgtgaaacccggcattcataaaagcag

SEQ ID NO: 1029967 - DNA, 33 bp, Homo sapien
aaggttcagggaccaccgcaaatgaggttcagg

SEQ ID NO: 1029968 - DNA, 33 bp, Homo sapien
aaggttcagggaccactgcaaatgaggttcagg

SEQ ID NO: 1029969 - DNA, 33 bp, Homo sapien
tctcaagcaagccctagagtcacttccgaagtg

SEQ ID NO: 1029970 - DNA, 33 bp, Homo sapien
tctcaagcaagccctatagtcacttccgaagtg

SEQ ID NO: 1029971 - DNA, 33 bp, Homo sapien
ctgaagagggagcaagaaaggtggcgaacgcag

SEQ ID NO: 1029972 - DNA, 33 bp, Homo sapien
ctgaagagggagcaaggaaggtggcgaacgcag

SEQ ID NO: 1029973 - DNA, 33 bp, Homo sapien
tacctattcacagcacggtcacctttcccagta

SEQ ID NO: 1029974 - DNA, 33 bp, Homo sapien
tacctattcacagcactgtcacctttcccagta

SEQ ID NO: 1029975 - DNA, 33 bp, Homo sapien
tcccactcgacatcccactctgagaatctacag

SEQ ID NO: 1029976 - DNA, 33 bp, Homo sapien
tcccactcgacatcccgctctgagaatctacag

SEQ ID NO: 1029977 - DNA, 33 bp, Homo sapien
atgctgtgacagtagcacatgaagagccgagtt

SEQ ID NO: 1029978 - DNA, 33 bp, Homo sapien
atgctgtgacagtagcgcatgaagagccgagtt

SEQ ID NO: 1029979 - DNA, 33 bp, Homo sapien
cagcacagcaagcatcccagtgcatgttgggaa

SEQ ID NO: 1029980 - DNA, 33 bp, Homo sapien
cagcacagcaagcatctcagtgcatgttgggaa

SEQ ID NO: 1029981 - DNA, 33 bp, Homo sapien
agggagttctaagtcccgacaagaaccaagtca

SEQ ID NO: 1029982 - DNA, 33 bp, Homo sapien
agggagttctaagtcctgacaagaaccaagtca

SEQ ID NO: 1029983 - DNA, 33 bp, Homo sapien
tccataagtttggtgaaccacaaagagattcag

SEQ ID NO: 1029984 - DNA, 33 bp, Homo sapien
tccataagtttggtgacccacaaagagattcag

SEQ ID NO: 1029985 - DNA, 33 bp, Homo sapien
gaatggataagcgaaccgtgaacccctatacaa

SEQ ID NO: 1029986 - DNA, 33 bp, Homo sapien
gaatggataagcgaactgtgaacccctatacaa

SEQ ID NO: 1029987 - DNA, 33 bp, Homo sapien
aaaagccagggctcccaacatctatcacttaac

SEQ ID NO: 1029988 - DNA, 33 bp, Homo sapien
aaaagccagggctcccgacatctatcacttaac

SEQ ID NO: 1029989 - DNA, 33 bp, Homo sapien
cgtgtgccactttcacaaggcagaaatgaggag

SEQ ID NO: 1029990 - DNA, 33 bp, Homo sapien
cgtgtgccactttcacgaggcagaaatgaggag

SEQ ID NO: 1029991 - DNA, 33 bp, Homo sapien
ttaattcttggttcaaacaatagctcacaattg

SEQ ID NO: 1029992 - DNA, 33 bp, Homo sapien
ttaattcttggttcaagcaatagctcacaattg

SEQ ID NO: 1029993 - DNA, 33 bp, Homo sapien
atcacaaatgtgttaaaatgctagtacaatgag

SEQ ID NO: 1029994 - DNA, 33 bp, Homo sapien
atcacaaatgtgttaagatgctagtacaatgag

SEQ ID NO: 1029995 - DNA, 33 bp, Homo sapien
tgtggaatcctcttaccggtctcactggaaagt

SEQ ID NO: 1029996 - DNA, 33 bp, Homo sapien
tgtggaatcctcttactggtctcactggaaagt

SEQ ID NO: 1029997 - DNA, 33 bp, Homo sapien
atctttacagcctggaagggacatcctgtgtgt

SEQ ID NO: 1029998 - DNA, 33 bp, Homo sapien
atctttacagcctggaggggacatcctgtgtgt

SEQ ID NO: 1029999 - DNA, 33 bp, Homo sapien
gagcatatcgacaaagcaaatgaagatgtctgc

SEQ ID NO: 1030000 - DNA, 33 bp, Homo sapien
gagcatatcgacaaaggaaatgaagatgtctgc

SEQ ID NO: 1030001 - DNA, 33 bp, Homo sapien
tgcctgtagctctgtcacctctgaacatatcgt

SEQ ID NO: 1030002 - DNA, 33 bp, Homo sapien
tgcctgtagctctgtcgcctctgaacatatcgt

SEQ ID NO: 1030003 - DNA, 33 bp, Homo sapien
acagccattaggactaagacgactattaccaaa

SEQ ID NO: 1030004 - DNA, 33 bp, Homo sapien
acagccattaggactaggacgactattaccaaa

SEQ ID NO: 1030005 - DNA, 33 bp, Homo sapien
cacagctctcaagaacacacttcccccaagata

SEQ ID NO: 1030006 - DNA, 33 bp, Homo sapien
cacagctctcaagaacgcacttcccccaagata

SEQ ID NO: 1030007 - DNA, 33 bp, Homo sapien
ggttttctgccatccaagaaacttaggtgtgtg

SEQ ID NO: 1030008 - DNA, 33 bp, Homo sapien
ggttttctgccatccaggaaacttaggtgtgtg

SEQ ID NO: 1030009 - DNA, 33 bp, Homo sapien
gaaaaaaacacgttcacagaatctggtacatgg

SEQ ID NO: 1030010 - DNA, 33 bp, Homo sapien
gaaaaaaacacgttcatagaatctggtacatgg

SEQ ID NO: 1030011 - DNA, 33 bp, Homo sapien
taatggtcaagtaacaataaaagtggattaaaa

SEQ ID NO: 1030012 - DNA, 33 bp, Homo sapien
taatggtcaagtaacactaaaagtggattaaaa

SEQ ID NO: 1030013 - DNA, 33 bp, Homo sapien
agtcatgttgagtgccagaggtggggtatccat

SEQ ID NO: 1030014 - DNA, 33 bp, Homo sapien
agtcatgttgagtgccggaggtggggtatccat

SEQ ID NO: 1030015 - DNA, 33 bp, Homo sapien
gcaaaaatcagcaaaccaaatggagggacattc

SEQ ID NO: 1030016 - DNA, 33 bp, Homo sapien
gcaaaaatcagcaaacgaaatggagggacattc

SEQ ID NO: 1030017 - DNA, 33 bp, Homo sapien
atcctttgagaccacaaacatttcctgctcctc

SEQ ID NO: 1030018 - DNA, 33 bp, Homo sapien
atcctttgagaccacagacatttcctgctcctc

SEQ ID NO: 1030019 - DNA, 33 bp, Homo sapien
aggggttgaattggaactggaggtatcagtgta

SEQ ID NO: 1030020 - DNA, 33 bp, Homo sapien
aggggttgaattggaattggaggtatcagtgta

SEQ ID NO: 1030021 - DNA, 33 bp, Homo sapien
cagagcttggtactccagcaaaaacaccaaaca

SEQ ID NO: 1030022 - DNA, 33 bp, Homo sapien
cagagcttggtactccggcaaaaacaccaaaca

SEQ ID NO: 1030023 - DNA, 33 bp, Homo sapien
caagaccagcataatcaccaagtggaagaggtt

SEQ ID NO: 1030024 - DNA, 33 bp, Homo sapien
caagaccagcataatcgccaagtggaagaggtt

SEQ ID NO: 1030025 - DNA, 33 bp, Homo sapien
gttataattcccatcacagttcagcaggatgat

SEQ ID NO: 1030026 - DNA, 33 bp, Homo sapien
gttataattcccatcatagttcagcaggatgat

SEQ ID NO: 1030027 - DNA, 33 bp, Homo sapien
ccacttcctaacactaccacattaggtttcaac

SEQ ID NO: 1030028 - DNA, 33 bp, Homo sapien
ccacttcctaacactatcacattaggtttcaac

SEQ ID NO: 1030029 - DNA, 33 bp, Homo sapien
ctatcctactgcacaaaaatgtatgatttatgc

SEQ ID NO: 1030030 - DNA, 33 bp, Homo sapien
ctatcctactgcacaagaatgtatgatttatgc

SEQ ID NO: 1030031 - DNA, 33 bp, Homo sapien
atatgtatactttccaagtgaaaaaaatagatt

SEQ ID NO: 1030032 - DNA, 33 bp, Homo sapien
atatgtatactttccatgtgaaaaaaatagatt

SEQ ID NO: 1030033 - DNA, 33 bp, Homo sapien
tgtctccacaatttatcactctgttaaaataac

SEQ ID NO: 1030034 - DNA, 33 bp, Homo sapien
tgtctccacaatttattactctgttaaaataac

SEQ ID NO: 1030035 - DNA, 33 bp, Homo sapien
tacttcttaacaaaaaaatgtagccagaagatt

SEQ ID NO: 1030036 - DNA, 33 bp, Homo sapien
tacttcttaacaaaaagatgtagccagaagatt

SEQ ID NO: 1030037 - DNA, 33 bp, Homo sapien
aacacagataaaataactcatctcgacagcaac

SEQ ID NO: 1030038 - DNA, 33 bp, Homo sapien
aacacagataaaataagtcatctcgacagcaac

SEQ ID NO: 1030039 - DNA, 33 bp, Homo sapien
cccatactgttaggtgcacgttatgaatgtttt

SEQ ID NO: 1030040 - DNA, 33 bp, Homo sapien
cccatactgttaggtgtacgttatgaatgtttt

SEQ ID NO: 1030041 - DNA, 33 bp, Homo sapien
taagaggaacacttcaacatatgtggtacaaat

SEQ ID NO: 1030042 - DNA, 33 bp, Homo sapien
taagaggaacacttcagcatatgtggtacaaat

SEQ ID NO: 1030043 - DNA, 33 bp, Homo sapien
cgctgaaatcctgcaacggtagctttaattcac

SEQ ID NO: 1030044 - DNA, 33 bp, Homo sapien
cgctgaaatcctgcaatggtagctttaattcac

SEQ ID NO: 1030045 - DNA, 33 bp, Homo sapien
tttggagggagccacacattgacccaatgggag

SEQ ID NO: 1030046 - DNA, 33 bp, Homo sapien
tttggagggagccacatattgacccaatgggag

SEQ ID NO: 1030047 - DNA, 33 bp, Homo sapien
tccagtttccatatccagaacacagataggact

SEQ ID NO: 1030048 - DNA, 33 bp, Homo sapien
tccagtttccatatccggaacacagataggact

SEQ ID NO: 1030049 - DNA, 33 bp, Homo sapien
tggttagcgggatgtcaataatgtaaggcaatt

SEQ ID NO: 1030050 - DNA, 33 bp, Homo sapien
tggttagcgggatgtcgataatgtaaggcaatt

SEQ ID NO: 1030051 - DNA, 33 bp, Homo sapien
ttgtgtaaatgtgaaacgttagcctagagcaga

SEQ ID NO: 1030052 - DNA, 33 bp, Homo sapien
ttgtgtaaatgtgaaatgttagcctagagcaga

SEQ ID NO: 1030053 - DNA, 33 bp, Homo sapien
agacatggactacagcagcacaatatgaaagtg

SEQ ID NO: 1030054 - DNA, 33 bp, Homo sapien
agacatggactacagcggcacaatatgaaagtg

SEQ ID NO: 1030055 - DNA, 33 bp, Homo sapien
gtgcttctaattgaaaatatctgccacaaacct

SEQ ID NO: 1030056 - DNA, 33 bp, Homo sapien
gtgcttctaattgaaagtatctgccacaaacct

SEQ ID NO: 1030057 - DNA, 33 bp, Homo sapien
ttctgcccacagtccactgatgagagcggaacc

SEQ ID NO: 1030058 - DNA, 33 bp, Homo sapien
ttctgcccacagtccattgatgagagcggaacc

SEQ ID NO: 1030059 - DNA, 33 bp, Homo sapien
tgatgggctcaagtcactgaaactcctgatgca

SEQ ID NO: 1030060 - DNA, 33 bp, Homo sapien
tgatgggctcaagtcattgaaactcctgatgca

SEQ ID NO: 1030061 - DNA, 33 bp, Homo sapien
gcaatctgaataggccaagaagctcccaatcat

SEQ ID NO: 1030062 - DNA, 33 bp, Homo sapien
gcaatctgaataggccgagaagctcccaatcat

SEQ ID NO: 1030063 - DNA, 33 bp, Homo sapien
tgccactgtgtcacaacgatcactttgccttca

SEQ ID NO: 1030064 - DNA, 33 bp, Homo sapien
tgccactgtgtcacaaggatcactttgccttca

SEQ ID NO: 1030065 - DNA, 33 bp, Homo sapien
gtataatagggctctccagggaaacaggataaa

SEQ ID NO: 1030066 - DNA, 33 bp, Homo sapien
gtataatagggctctctagggaaacaggataaa

SEQ ID NO: 1030067 - DNA, 33 bp, Homo sapien
aatcgtgtttgacccacgctatctcctgctcaa

SEQ ID NO: 1030068 - DNA, 33 bp, Homo sapien
aatcgtgtttgacccaggctatctcctgctcaa

SEQ ID NO: 1030069 - DNA, 33 bp, Homo sapien
ggagcgtcctgcaatgcacctgattagggctct

SEQ ID NO: 1030070 - DNA, 33 bp, Homo sapien
ggagcgtcctgcaatgtacctgattagggctct

SEQ ID NO: 1030071 - DNA, 33 bp, Homo sapien
catagacacagcactcactattcctccagtccc

SEQ ID NO: 1030072 - DNA, 33 bp, Homo sapien
catagacacagcactccctattcctccagtccc

SEQ ID NO: 1030073 - DNA, 33 bp, Homo sapien
aaaggtcacaagaaacaagaaaacatggcccac

SEQ ID NO: 1030074 - DNA, 33 bp, Homo sapien
aaaggtcacaagaaacgagaaaacatggcccac

SEQ ID NO: 1030075 - DNA, 33 bp, Homo sapien
atctccaatttgtccaagttgatgagtaccagc

SEQ ID NO: 1030076 - DNA, 33 bp, Homo sapien
atctccaatttgtccaggttgatgagtaccagc

SEQ ID NO: 1030077 - DNA, 33 bp, Homo sapien
atcacagggttgtaaaatagcctgacattacag

SEQ ID NO: 1030078 - DNA, 33 bp, Homo sapien
atcacagggttgtaaagtagcctgacattacag

SEQ ID NO: 1030079 - DNA, 33 bp, Homo sapien
ggaagaggcaaaaaagaattcgcctacaggttt

SEQ ID NO: 1030080 - DNA, 33 bp, Homo sapien
ggaagaggcaaaaaaggattcgcctacaggttt

SEQ ID NO: 1030081 - DNA, 33 bp, Homo sapien
acaattacaaaggagcaaggtttctacatttgt

SEQ ID NO: 1030082 - DNA, 33 bp, Homo sapien
acaattacaaaggagcgaggtttctacatttgt

SEQ ID NO: 1030083 - DNA, 33 bp, Homo sapien
catgtcaagaaactcacaagcatcacatgacac

SEQ ID NO: 1030084 - DNA, 33 bp, Homo sapien
catgtcaagaaactcagaagcatcacatgacac

SEQ ID NO: 1030085 - DNA, 33 bp, Homo sapien
aagctaaaagtaagacaagtcaatcaggcagca

SEQ ID NO: 1030086 - DNA, 33 bp, Homo sapien
aagctaaaagtaagaccagtcaatcaggcagca

SEQ ID NO: 1030087 - DNA, 33 bp, Homo sapien
tcagcccactgacatccgagttctggtctttgt

SEQ ID NO: 1030088 - DNA, 33 bp, Homo sapien
tcagcccactgacatctgagttctggtctttgt

SEQ ID NO: 1030089 - DNA, 33 bp, Homo sapien
gctccagccagaatgcacatctccagacccagc

SEQ ID NO: 1030090 - DNA, 33 bp, Homo sapien
gctccagccagaatgcgcatctccagacccagc

SEQ ID NO: 1030091 - DNA, 33 bp, Homo sapien
actattaaatatcaaaagggcagttacaaagag

SEQ ID NO: 1030092 - DNA, 33 bp, Homo sapien
actattaaatatcaaaggggcagttacaaagag

SEQ ID NO: 1030093 - DNA, 33 bp, Homo sapien
ccaaccagctttttcaactgctcaagcaggaat

SEQ ID NO: 1030094 - DNA, 33 bp, Homo sapien
ccaaccagctttttcatctgctcaagcaggaat

SEQ ID NO: 1030095 - DNA, 33 bp, Homo sapien
accaagaactggctgacgaagctgggtgccgtg

SEQ ID NO: 1030096 - DNA, 33 bp, Homo sapien
accaagaactggctgatgaagctgggtgccgtg

SEQ ID NO: 1030097 - DNA, 33 bp, Homo sapien
gcctgcaaaagagttacgtcatatagttgttta

SEQ ID NO: 1030098 - DNA, 33 bp, Homo sapien
gcctgcaaaagagttatgtcatatagttgttta

SEQ ID NO: 1030099 - DNA, 33 bp, Homo sapien
tgaagacaagtgcaacagaaggcctctcagaaa

SEQ ID NO: 1030100 - DNA, 33 bp, Homo sapien
tgaagacaagtgcaacggaaggcctctcagaaa

SEQ ID NO: 1030101 - DNA, 33 bp, Homo sapien
ttatttccaacacaacagtactattaatataaa

SEQ ID NO: 1030102 - DNA, 33 bp, Homo sapien
ttatttccaacacaacggtactattaatataaa

SEQ ID NO: 1030103 - DNA, 33 bp, Homo sapien
cctgttggatattttccacaggctttcctgagt

SEQ ID NO: 1030104 - DNA, 33 bp, Homo sapien
cctgttggatattttctacaggctttcctgagt

SEQ ID NO: 1030105 - DNA, 33 bp, Homo sapien
ggctttctaaaaggaacagtgttcatcgtcctc

SEQ ID NO: 1030106 - DNA, 33 bp, Homo sapien
ggctttctaaaaggaagagtgttcatcgtcctc

SEQ ID NO: 1030107 - DNA, 33 bp, Homo sapien
atagcagtgatgatgacgaatctgattctgaag

SEQ ID NO: 1030108 - DNA, 33 bp, Homo sapien
atagcagtgatgatgaggaatctgattctgaag

SEQ ID NO: 1030109 - DNA, 33 bp, Homo sapien; identical to SEQ ID NO: 1030107

SEQ ID NO: 1030110 - DNA, 33 bp, Homo sapien; identical to SEQ ID NO: 1030108

SEQ ID NO: 1030111 - DNA, 33 bp, Homo sapien
tgagtaagaactgagagaacagaaatagccaaa

SEQ ID NO: 1030112 - DNA, 33 bp, Homo sapien
tgagtaagaactgagataacagaaatagccaaa

SEQ ID NO: 1030113 - DNA, 33 bp, Homo sapien
ctcagcctgccagagccagtaatagcaaatgga

SEQ ID NO: 1030114 - DNA, 33 bp, Homo sapien
ctcagcctgccagagcgagtaatagcaaatgga

SEQ ID NO: 1030115 - DNA, 33 bp, Homo sapien
tacaactcttcacaaacgtagtactaagaacac

SEQ ID NO: 1030116 - DNA, 33 bp, Homo sapien
tacaactcttcacaaatgtagtactaagaacac

SEQ ID NO: 1030117 - DNA, 33 bp, Homo sapien
tgaattattgatgttacgaacttgtatatttat

SEQ ID NO: 1030118 - DNA, 33 bp, Homo sapien
tgaattattgatgttatgaacttgtatatttat

SEQ ID NO: 1030119 - DNA, 33 bp, Homo sapien
ggagttatctgcaaaacgaaagaactggaaata

SEQ ID NO: 1030120 - DNA, 33 bp, Homo sapien
ggagttatctgcaaaatgaaagaactggaaata

SEQ ID NO: 1030121 - DNA, 33 bp, Homo sapien
ttctaaaggtaacttcagaaactatcaaatatt

SEQ ID NO: 1030122 - DNA, 33 bp, Homo sapien
ttctaaaggtaacttcggaaactatcaaatatt

SEQ ID NO: 1030123 - DNA, 33 bp, Homo sapien
ttaaattacaataaaacaagtaaccaggtgtgg

SEQ ID NO: 1030124 - DNA, 33 bp, Homo sapien
ttaaattacaataaaagaagtaaccaggtgtgg

SEQ ID NO: 1030125 - DNA, 33 bp, Homo sapien
ctgatagagaccatataacctccaagtggatta

SEQ ID NO: 1030126 - DNA, 33 bp, Homo sapien
ctgatagagaccatatgacctccaagtggatta

SEQ ID NO: 1030127 - DNA, 33 bp, Homo sapien
ctcttctggtttgtagaattcattgaaagctaa

SEQ ID NO: 1030128 - DNA, 33 bp, Homo sapien
ctcttctggtttgtagcattcattgaaagctaa

SEQ ID NO: 1030129 - DNA, 33 bp, Homo sapien
agctagaaccattctacatgaacaggagataag

SEQ ID NO: 1030130 - DNA, 33 bp, Homo sapien
agctagaaccattctagatgaacaggagataag

SEQ ID NO: 1030131 - DNA, 33 bp, Homo sapien
aggaaggtgagcacaaagtataagataagtgta

SEQ ID NO: 1030132 - DNA, 33 bp, Homo sapien
aggaaggtgagcacaaggtataagataagtgta

SEQ ID NO: 1030133 - DNA, 33 bp, Homo sapien
aaaataagggtgataaagacaaacatctgaatc

SEQ ID NO: 1030134 - DNA, 33 bp, Homo sapien
aaaataagggtgataaggacaaacatctgaatc

SEQ ID NO: 1030135 - DNA, 33 bp, Homo sapien
tctgaaaataaagacaagaaagccaggtctact

SEQ ID NO: 1030136 - DNA, 33 bp, Homo sapien
tctgaaaataaagacatgaaagccaggtctact

SEQ ID NO: 1030137 - DNA, 33 bp, Homo sapien
ggggaagagaggatgcaaagatgactaacacac

SEQ ID NO: 1030138 - DNA, 33 bp, Homo sapien
ggggaagagaggatgcgaagatgactaacacac

SEQ ID NO: 1030139 - DNA, 33 bp, Homo sapien
cttctgctcttcagtaaacaaaaatgctgtcag

SEQ ID NO: 1030140 - DNA, 33 bp, Homo sapien
cttctgctcttcagtacacaaaaatgctgtcag

SEQ ID NO: 1030141 - DNA, 33 bp, Homo sapien
aggtgtactgtgaagactaatgggccaatacac

SEQ ID NO: 1030142 - DNA, 33 bp, Homo sapien
aggtgtactgtgaagattaatgggccaatacac

SEQ ID NO: 1030143 - DNA, 33 bp, Homo sapien
attaaggagtatagtgcagtagtggaaagaaca

SEQ ID NO: 1030144 - DNA, 33 bp, Homo sapien
attaaggagtatagtgtagtagtggaaagaaca

SEQ ID NO: 1030145 - DNA, 33 bp, Homo sapien
tccccaagagactgcccaattctacatcaacta

SEQ ID NO: 1030146 - DNA, 33 bp, Homo sapien
tccccaagagactgcctaattctacatcaacta

SEQ ID NO: 1030147 - DNA, 33 bp, Homo sapien
ctatgaacgttcctcaatctgtcatttgggggt

SEQ ID NO: 1030148 - DNA, 33 bp, Homo sapien
ctatgaacgttcctcagtctgtcatttgggggt

SEQ ID NO: 1030149 - DNA, 33 bp, Homo sapien
cacattatctgcagaacagagtgaataagccaa

SEQ ID NO: 1030150 - DNA, 33 bp, Homo sapien
cacattatctgcagaatagagtgaataagccaa

SEQ ID NO: 1030151 - DNA, 33 bp, Homo sapien
ttctgtgaagggataaatgattaagatttcatg

SEQ ID NO: 1030152 - DNA, 33 bp, Homo sapien
ttctgtgaagggataagtgattaagatttcatg

SEQ ID NO: 1030153 - DNA, 33 bp, Homo sapien
ctgaccataggaaagaaaattaagtttgatctg

SEQ ID NO: 1030154 - DNA, 33 bp, Homo sapien
ctgaccataggaaagacaattaagtttgatctg

SEQ ID NO: 1030155 - DNA, 33 bp, Homo sapien
ttaatttcttataaggccctgtgctataattac

SEQ ID NO: 1030156 - DNA, 33 bp, Homo sapien
ttaatttcttataaggtcctgtgctataattac

SEQ ID NO: 1030157 - DNA, 33 bp, Homo sapien
atctgtctacttttcacagtttttaagcccaaa

SEQ ID NO: 1030158 - DNA, 33 bp, Homo sapien
atctgtctacttttcagagtttttaagcccaaa

SEQ ID NO: 1030159 - DNA, 33 bp, Homo sapien
agttgggttatcaaaacgagatgttataaaaca

SEQ ID NO: 1030160 - DNA, 33 bp, Homo sapien
agttgggttatcaaaatgagatgttataaaaca

SEQ ID NO: 1030161 - DNA, 33 bp, Homo sapien
tcatattcaaatttcaacagtttcggaatggga

SEQ ID NO: 1030162 - DNA, 33 bp, Homo sapien
tcatattcaaatttcagcagtttcggaatggga

SEQ ID NO: 1030163 - DNA, 33 bp, Homo sapien
gatttgtctatttggacgaatggcttcactatg

SEQ ID NO: 1030164 - DNA, 33 bp, Homo sapien
gatttgtctatttggatgaatggcttcactatg

SEQ ID NO: 1030165 - DNA, 33 bp, Homo sapien
gtcaatttttaaacccagaaagtgagcatacca

SEQ ID NO: 1030166 - DNA, 33 bp, Homo sapien
gtcaatttttaaacccggaaagtgagcatacca

SEQ ID NO: 1030167 - DNA, 33 bp, Homo sapien
cttctatctatttaaaaaaacattaactgcgca

SEQ ID NO: 1030168 - DNA, 33 bp, Homo sapien
cttctatctatttaaacaaacattaactgcgca

SEQ ID NO: 1030169 - DNA, 33 bp, Homo sapien
tacctcctgaaggaaccacctcaggctgttgcg

SEQ ID NO: 1030170 - DNA, 33 bp, Homo sapien
tacctcctgaaggaactacctcaggctgttgcg

SEQ ID NO: 1030171 - DNA, 33 bp, Homo sapien
acagctggaaatctgacgacaccaaagagacta

SEQ ID NO: 1030172 - DNA, 33 bp, Homo sapien
acagctggaaatctgaggacaccaaagagacta

SEQ ID NO: 1030173 - DNA, 33 bp, Homo sapien
ttatatttagtgttgccgatgagaaatttgact

SEQ ID NO: 1030174 - DNA, 33 bp, Homo sapien
ttatatttagtgttgctgatgagaaatttgact

SEQ ID NO: 1030175 - DNA, 33 bp, Homo sapien
agacaagaaaaaggaaagctgcatagataggtt

SEQ ID NO: 1030176 - DNA, 33 bp, Homo sapien
agacaagaaaaaggaaggctgcatagataggtt

SEQ ID NO: 1030177 - DNA, 33 bp, Homo sapien
agggccaggaggaaaccaggtgagtatcaactt

SEQ ID NO: 1030178 - DNA, 33 bp, Homo sapien
agggccaggaggaaactaggtgagtatcaactt

SEQ ID NO: 1030179 - DNA, 33 bp, Homo sapien
gtaaaagttttgtgtactaacagacattatgaa

SEQ ID NO: 1030180 - DNA, 33 bp, Homo sapien
gtaaaagttttgtgtattaacagacattatgaa

SEQ ID NO: 1030181 - DNA, 33 bp, Homo sapien
aattacatggggaaataacttgtcttcattttc

SEQ ID NO: 1030182 - DNA, 33 bp, Homo sapien
aattacatggggaaatgacttgtcttcattttc

SEQ ID NO: 1030183 - DNA, 33 bp, Homo sapien
agcattcgaaaatatacggtacatacctcttcc

SEQ ID NO: 1030184 - DNA, 33 bp, Homo sapien
agcattcgaaaatatatggtacatacctcttcc

SEQ ID NO: 1030185 - DNA, 33 bp, Homo sapien
gattcctccaaccgacaacctttagttcttggt

SEQ ID NO: 1030186 - DNA, 33 bp, Homo sapien
gattcctccaaccgacgacctttagttcttggt

SEQ ID NO: 1030187 - DNA, 33 bp, Homo sapien
gttcttggtcttccacaagaaagtgaagctgtc

SEQ ID NO: 1030188 - DNA, 33 bp, Homo sapien
gttcttggtcttccacgagaaagtgaagctgtc

SEQ ID NO: 1030189 - DNA, 33 bp, Homo sapien
ctttggtgaccccaacaagaaccctctcggcag

SEQ ID NO: 1030190 - DNA, 33 bp, Homo sapien
ctttggtgaccccaacgagaaccctctcggcag

SEQ ID NO: 1030191 - DNA, 33 bp, Homo sapien
gccgctgaaggacagacatgttactcacctcgt

SEQ ID NO: 1030192 - DNA, 33 bp, Homo sapien
gccgctgaaggacagatatgttactcacctcgt

SEQ ID NO: 1030193 - DNA, 33 bp, Homo sapien
tcatcctcagtggaaaagtcaagcagcttctgg

SEQ ID NO: 1030194 - DNA, 33 bp, Homo sapien
tcatcctcagtggaaaggtcaagcagcttctgg

SEQ ID NO: 1030195 - DNA, 33 bp, Homo sapien
aggatccaacaggatacataacatggttgaaaa

SEQ ID NO: 1030196 - DNA, 33 bp, Homo sapien
aggatccaacaggatatataacatggttgaaaa

SEQ ID NO: 1030197 - DNA, 33 bp, Homo sapien
acaaccaaaagtgagcaagcacgtcaaactgtg

SEQ ID NO: 1030198 - DNA, 33 bp, Homo sapien
acaaccaaaagtgagcgagcacgtcaaactgtg

SEQ ID NO: 1030199 - DNA, 33 bp, Homo sapien
atactctcagtggttacgctatgtgccttccta

SEQ ID NO: 1030200 - DNA, 33 bp, Homo sapien
atactctcagtggttatgctatgtgccttccta

SEQ ID NO: 1030201 - DNA, 33 bp, Homo sapien
tcagtaaggtgatgaaactggttgagacagaaa

SEQ ID NO: 1030202 - DNA, 33 bp, Homo sapien
tcagtaaggtgatgaacctggttgagacagaaa

SEQ ID NO: 1030203 - DNA, 33 bp, Homo sapien
cccctggtcaacagaaaagttaccactcaagtc

SEQ ID NO: 1030204 - DNA, 33 bp, Homo sapien
cccctggtcaacagaagagttaccactcaagtc

SEQ ID NO: 1030205 - DNA, 33 bp, Homo sapien
aattatctccttagaacggactactagaacaga

SEQ ID NO: 1030206 - DNA, 33 bp, Homo sapien
aattatctccttagaatggactactagaacaga

SEQ ID NO: 1030207 - DNA, 33 bp, Homo sapien
caatgtcccagtttgaaggcctcagggaggagg

SEQ ID NO: 1030208 - DNA, 33 bp, Homo sapien
caatgtcccagtttgacggcctcagggaggagg

SEQ ID NO: 1030209 - DNA, 33 bp, Homo sapien
tggacacaaggccatggatctaggtctttgtcc

SEQ ID NO: 1030210 - DNA, 33 bp, Homo sapien
tggacacaaggccatgtatctaggtctttgtcc

SEQ ID NO: 1030211 - DNA, 33 bp, Homo sapien
cccactgttcctatgcacactggctttgtaggc

SEQ ID NO: 1030212 - DNA, 33 bp, Homo sapien
cccactgttcctatgcgcactggctttgtaggc

SEQ ID NO: 1030213 - DNA, 33 bp, Homo sapien
gagaccgtctctacgcaaggaattaaggaagca

SEQ ID NO: 1030214 - DNA, 33 bp, Homo sapien
gagaccgtctctacgcgaggaattaaggaagca

SEQ ID NO: 1030215 - DNA, 33 bp, Homo sapien
aactatgccaagtgcaaagccatcctctgaggt

SEQ ID NO: 1030216 - DNA, 33 bp, Homo sapien
aactatgccaagtgcagagccatcctctgaggt

SEQ ID NO: 1030217 - DNA, 33 bp, Homo sapien
ggcagagcccagcgcacggtggccttaggagaa

SEQ ID NO: 1030218 - DNA, 33 bp, Homo sapien
ggcagagcccagcgcatggtggccttaggagaa

SEQ ID NO: 1030219 - DNA, 33 bp, Homo sapien
ccaggtgatgaaggaccctgaggactcacatga

SEQ ID NO: 1030220 - DNA, 33 bp, Homo sapien
ccaggtgatgaaggactctgaggactcacatga

SEQ ID NO: 1030221 - DNA, 33 bp, Homo sapien
tgtgttggtgtaccacagaacaaagtaaaagac

SEQ ID NO: 1030222 - DNA, 33 bp, Homo sapien
tgtgttggtgtaccacggaacaaagtaaaagac

SEQ ID NO: 1030223 - DNA, 33 bp, Homo sapien
tgcctacacttgtggcaatgaaagagatgcagg

SEQ ID NO: 1030224 - DNA, 33 bp, Homo sapien
tgcctacacttgtggcgatgaaagagatgcagg

SEQ ID NO: 1030225 - DNA, 33 bp, Homo sapien
agataggagaagtacaaaagccaaggaattaaa

SEQ ID NO: 1030226 - DNA, 33 bp, Homo sapien
agataggagaagtacataagccaaggaattaaa

SEQ ID NO: 1030227 - DNA, 33 bp, Homo sapien
aagcggggacaagttaagtcagcgacaattcct

SEQ ID NO: 1030228 - DNA, 33 bp, Homo sapien
aagcggggacaagttaggtcagcgacaattcct

SEQ ID NO: 1030229 - DNA, 33 bp, Homo sapien
cagacaggtgcctaaaccatttgcagccttcct

SEQ ID NO: 1030230 - DNA, 33 bp, Homo sapien
cagacaggtgcctaaatcatttgcagccttcct

SEQ ID NO: 1030231 - DNA, 33 bp, Homo sapien
ctgtctgctaaatccaatatctgaggacaatca

SEQ ID NO: 1030232 - DNA, 33 bp, Homo sapien
ctgtctgctaaatccagtatctgaggacaatca

SEQ ID NO: 1030233 - DNA, 33 bp, Homo sapien
gtaccatgtgggctaacacaaaattcaattcag

SEQ ID NO: 1030234 - DNA, 33 bp, Homo sapien
gtaccatgtgggctaatacaaaattcaattcag

SEQ ID NO: 1030235 - DNA, 33 bp, Homo sapien
agaaatgccttgacaacaagaagatggagacca

SEQ ID NO: 1030236 - DNA, 33 bp, Homo sapien
agaaatgccttgacaagaagaagatggagacca

SEQ ID NO: 1030237 - DNA, 33 bp, Homo sapien
gactatgcagttcttcacaacagcacctcaact

SEQ ID NO: 1030238 - DNA, 33 bp, Homo sapien
gactatgcagttcttcgcaacagcacctcaact

SEQ ID NO: 1030239 - DNA, 33 bp, Homo sapien
cccctccatgcacaaggaagacaatggaaacct

SEQ ID NO: 1030240 - DNA, 33 bp, Homo sapien
cccctccatgcacaagtaagacaatggaaacct

SEQ ID NO: 1030241 - DNA, 33 bp, Homo sapien
cctggcctgtcatggccagttgtaatgatgcct

SEQ ID NO: 1030242 - DNA, 33 bp, Homo sapien
cctggcctgtcatggctagttgtaatgatgcct

SEQ ID NO: 1030243 - DNA, 33 bp, Homo sapien
gaactccatataggacacttgactaagatccca

SEQ ID NO: 1030244 - DNA, 33 bp, Homo sapien
gaactccatataggacgcttgactaagatccca

SEQ ID NO: 1030245 - DNA, 33 bp, Homo sapien
ttgtttcactcttagacgcactgctagttatat

SEQ ID NO: 1030246 - DNA, 33 bp, Homo sapien
ttgtttcactcttagatgcactgctagttatat

SEQ ID NO: 1030247 - DNA, 33 bp, Homo sapien; identical to SEQ ID NO: 1030245

SEQ ID NO: 1030248 - DNA, 33 bp, Homo sapien; identical to SEQ ID NO: 1030246

SEQ ID NO: 1030249 - DNA, 33 bp, Homo sapien
aaccttgctacagttcgcttacctgatgatctt

SEQ ID NO: 1030250 - DNA, 33 bp, Homo sapien
aaccttgctacagttctcttacctgatgatctt

SEQ ID NO: 1030251 - DNA, 33 bp, Homo sapien
caggacagcaaatagaacatgaggtgcattaga

SEQ ID NO: 1030252 - DNA, 33 bp, Homo sapien
caggacagcaaatagatcatgaggtgcattaga

SEQ ID NO: 1030253 - DNA, 33 bp, Homo sapien
aactgctttggtctccccgtctctaatgcacct

SEQ ID NO: 1030254 - DNA, 33 bp, Homo sapien
aactgctttggtctcctcgtctctaatgcacct

SEQ ID NO: 1030255 - DNA, 33 bp, Homo sapien
tctttcaaaatactgaaccacactttctggtag

SEQ ID NO: 1030256 - DNA, 33 bp, Homo sapien
tctttcaaaatactgatccacactttctggtag

SEQ ID NO: 1030257 - DNA, 33 bp, Homo sapien
catggggccatatacacgatagggaggtgccta

SEQ ID NO: 1030258 - DNA, 33 bp, Homo sapien
catggggccatatacatgatagggaggtgccta

SEQ ID NO: 1030259 - DNA, 33 bp, Homo sapien; identical to SEQ ID NO: 1030257

SEQ ID NO: 1030260 - DNA, 33 bp, Homo sapien; identical to SEQ ID NO: 1030258

SEQ ID NO: 1030261 - DNA, 33 bp, Homo sapien
atttctagagcaaatacagctggctccctaccc

SEQ ID NO: 1030262 - DNA, 33 bp, Homo sapien
atttctagagcaaatagagctggctccctaccc

SEQ ID NO: 1030263 - DNA, 33 bp, Homo sapien
aaacagaaattatccaatctgaacaatagaaaa

SEQ ID NO: 1030264 - DNA, 33 bp, Homo sapien
aaacagaaattatccagtctgaacaatagaaaa

SEQ ID NO: 1030265 - DNA, 33 bp, Homo sapien
tccttcactgcatacagacttctcattatgcag

SEQ ID NO: 1030266 - DNA, 33 bp, Homo sapien
tccttcactgcatacatacttctcattatgcag

SEQ ID NO: 1030267 - DNA, 33 bp, Homo sapien
gcgctttgccaaacacactcccgtttcagcggc

SEQ ID NO: 1030268 - DNA, 33 bp, Homo sapien
gcgctttgccaaacacgctcccgtttcagcggc

SEQ ID NO: 1030269 - DNA, 33 bp, Homo sapien
cactctgacctccgaacccacctgctcctggct

SEQ ID NO: 1030270 - DNA, 33 bp, Homo sapien
cactctgacctccgaatccacctgctcctggct

SEQ ID NO: 1030271 - DNA, 33 bp, Homo sapien; identical to SEQ ID NO: 1030269

SEQ ID NO: 1030272 - DNA, 33 bp, Homo sapien; identical to SEQ ID NO: 1030270

SEQ ID NO: 1030273 - DNA, 33 bp, Homo sapien
gccagagccaaaggccaatgtttccccctactc

SEQ ID NO: 1030274 - DNA, 33 bp, Homo sapien
gccagagccaaaggccgatgtttccccctactc

SEQ ID NO: 1030275 - DNA, 33 bp, Homo sapien
cagcaaagaatggacacattggattgaagccct

SEQ ID NO: 1030276 - DNA, 33 bp, Homo sapien
cagcaaagaatggacatattggattgaagccct

SEQ ID NO: 1030277 - DNA, 33 bp, Homo sapien
ttgctgccttagtaaaactttccatgaggctct

SEQ ID NO: 1030278 - DNA, 33 bp, Homo sapien
ttgctgccttagtaaagctttccatgaggctct

SEQ ID NO: 1030279 - DNA, 33 bp, Homo sapien
atgtggaagccatcaaagcttggagccacttct

SEQ ID NO: 1030280 - DNA, 33 bp, Homo sapien
atgtggaagccatcaaggcttggagccacttct

SEQ ID NO: 1030281 - DNA, 33 bp, Homo sapien
cagatgcaggcaccaagtagggcagttgtctct

SEQ ID NO: 1030282 - DNA, 33 bp, Homo sapien
cagatgcaggcaccaattagggcagttgtctct

SEQ ID NO: 1030283 - DNA, 33 bp, Homo sapien
taagctgacttttaaccatagtggtctttaaaa

SEQ ID NO: 1030284 - DNA, 33 bp, Homo sapien
taagctgacttttaactatagtggtctttaaaa

SEQ ID NO: 1030285 - DNA, 33 bp, Homo sapien
ttaaacgttaataaaagtaccctcacaggtgaa

SEQ ID NO: 1030286 - DNA, 33 bp, Homo sapien
ttaaacgttaataaaattaccctcacaggtgaa

SEQ ID NO: 1030287 - DNA, 33 bp, Homo sapien
ccagtttttcagctaactctttcctggttattc

SEQ ID NO: 1030288 - DNA, 33 bp, Homo sapien
ccagtttttcagctaagtctttcctggttattc

SEQ ID NO: 1030289 - DNA, 33 bp, Homo sapien
ctgtcctctttattcacgctatttctgcaggca

SEQ ID NO: 1030290 - DNA, 33 bp, Homo sapien
ctgtcctctttattcatgctatttctgcaggca

SEQ ID NO: 1030291 - DNA, 33 bp, Homo sapien
caaatgactaaatctccagttctcagttgcctg

SEQ ID NO: 1030292 - DNA, 33 bp, Homo sapien
caaatgactaaatctctagttctcagttgcctg

SEQ ID NO: 1030293 - DNA, 33 bp, Homo sapien
tcatgcttagcagacagtgactatagattcctg

SEQ ID NO: 1030294 - DNA, 33 bp, Homo sapien
tcatgcttagcagacattgactatagattcctg

SEQ ID NO: 1030295 - DNA, 33 bp, Homo sapien
tgtgataagagacaagaaggtcaaagctggaga

SEQ ID NO: 1030296 - DNA, 33 bp, Homo sapien
tgtgataagagacaagcaggtcaaagctggaga

SEQ ID NO: 1030297 - DNA, 33 bp, Homo sapien
tggattgccaaatgtcccaagttctcttatttt

SEQ ID NO: 1030298 - DNA, 33 bp, Homo sapien
tggattgccaaatgtctcaagttctcttatttt

SEQ ID NO: 1030299 - DNA, 33 bp, Homo sapien
gtttagatgccataaagctcttgacatcttgca

SEQ ID NO: 1030300 - DNA, 33 bp, Homo sapien
gtttagatgccataaatctcttgacatcttgca

SEQ ID NO: 1030301 - DNA, 33 bp, Homo sapien
aaggcccaagggatgaactgtcataaccctcat

SEQ ID NO: 1030302 - DNA, 33 bp, Homo sapien
aaggcccaagggatgagctgtcataaccctcat

SEQ ID NO: 1030303 - DNA, 33 bp, Homo sapien
ctgtgtgtgacctatacggaagcctgtcatcca

SEQ ID NO: 1030304 - DNA, 33 bp, Homo sapien
ctgtgtgtgacctatatggaagcctgtcatcca

SEQ ID NO: 1030305 - DNA, 33 bp, Homo sapien
cgtcctaagagggtcaagataaattctggcagc

SEQ ID NO: 1030306 - DNA, 33 bp, Homo sapien
cgtcctaagagggtcatgataaattctggcagc

SEQ ID NO: 1030307 - DNA, 33 bp, Homo sapien
atgctttataaactgcaatcatgactcttaact

SEQ ID NO: 1030308 - DNA, 33 bp, Homo sapien
atgctttataaactgcgatcatgactcttaact

SEQ ID NO: 1030309 - DNA, 33 bp, Homo sapien
ctgacctctgaattcacctttatctctaagagc

SEQ ID NO: 1030310 - DNA, 33 bp, Homo sapien
ctgacctctgaattcatctttatctctaagagc

SEQ ID NO: 1030311 - DNA, 33 bp, Homo sapien
aagtgttctctagaccagggttcatgtgcctga

SEQ ID NO: 1030312 - DNA, 33 bp, Homo sapien
aagtgttctctagacctgggttcatgtgcctga

SEQ ID NO: 1030313 - DNA, 33 bp, Homo sapien
ctgctgtgccttggaaaccccgtccttggacct

SEQ ID NO: 1030314 - DNA, 33 bp, Homo sapien
ctgctgtgccttggaagccccgtccttggacct

SEQ ID NO: 1030315 - DNA, 33 bp, Homo sapien
ccttcaggcctctcaaaaaaaccatcaagggac

SEQ ID NO: 1030316 - DNA, 33 bp, Homo sapien
ccttcaggcctctcaagaaaaccatcaagggac

SEQ ID NO: 1030317 - DNA, 33 bp, Homo sapien
ggtcctcatcctggctaaaggcgccaccaaaag

SEQ ID NO: 1030318 - DNA, 33 bp, Homo sapien
ggtcctcatcctggctgaaggcgccaccaaaag

SEQ ID NO: 1030319 - DNA, 33 bp, Homo sapien
tccataaatcctctccaaccacacagcagcaca

SEQ ID NO: 1030320 - DNA, 33 bp, Homo sapien
tccataaatcctctccgaccacacagcagcaca

SEQ ID NO: 1030321 - DNA, 33 bp, Homo sapien
ccccgggttggtgcccggacaggagaatgttct

SEQ ID NO: 1030322 - DNA, 33 bp, Homo sapien
ccccgggttggtgccctgacaggagaatgttct

SEQ ID NO: 1030323 - DNA, 33 bp, Homo sapien
cgcaggttgacccaaaaaagggagctcaggttt

SEQ ID NO: 1030324 - DNA, 33 bp, Homo sapien
cgcaggttgacccaaagaagggagctcaggttt

SEQ ID NO: 1030325 - DNA, 33 bp, Homo sapien
ccctagagcattcaaaacggtcttggccctacc

SEQ ID NO: 1030326 - DNA, 33 bp, Homo sapien
ccctagagcattcaaagcggtcttggccctacc

SEQ ID NO: 1030327 - DNA, 33 bp, Homo sapien
gtatgtacatattcatcagtgcctctgtgcagt

SEQ ID NO: 1030328 - DNA, 33 bp, Homo sapien
gtatgtacatattcattagtgcctctgtgcagt

SEQ ID NO: 1030329 - DNA, 33 bp, Homo sapien
ggggtcctgttctcaaagcacctctgtgtgcaa

SEQ ID NO: 1030330 - DNA, 33 bp, Homo sapien
ggggtcctgttctcaacgcacctctgtgtgcaa

SEQ ID NO: 1030331 - DNA, 33 bp, Homo sapien
ggcctcccatgcactcaaggcagccaggaccag

SEQ ID NO: 1030332 - DNA, 33 bp, Homo sapien
ggcctcccatgcactcgaggcagccaggaccag

SEQ ID NO: 1030333 - DNA, 33 bp, Homo sapien
ggggatgtgcccagggaatcagttacatgtcag

SEQ ID NO: 1030334 - DNA, 33 bp, Homo sapien
ggggatgtgcccaggggatcagttacatgtcag

SEQ ID NO: 1030335 - DNA, 33 bp, Homo sapien
ttcttttctaacttacacattttgctgtgattt

SEQ ID NO: 1030336 - DNA, 33 bp, Homo sapien
ttcttttctaacttacccattttgctgtgattt

SEQ ID NO: 1030337 - DNA, 33 bp, Homo sapien
agcatttgcacagccactaacaataacaatgca

SEQ ID NO: 1030338 - DNA, 33 bp, Homo sapien
agcatttgcacagccattaacaataacaatgca

SEQ ID NO: 1030339 - DNA, 33 bp, Homo sapien
gttctggctaaaaaaggcctcggaatcctaatt

SEQ ID NO: 1030340 - DNA, 33 bp, Homo sapien
gttctggctaaaaaagtcctcggaatcctaatt

SEQ ID NO: 1030341 - DNA, 33 bp, Homo sapien
ccacccaaaggaaatgccatcccagtatcaagg

SEQ ID NO: 1030342 - DNA, 33 bp, Homo sapien
ccacccaaaggaaatggcatcccagtatcaagg

SEQ ID NO: 1030343 - DNA, 33 bp, Homo sapien
gacgtgactgatccaacgtcatacagaaagtca

SEQ ID NO: 1030344 - DNA, 33 bp, Homo sapien
gacgtgactgatccaaggtcatacagaaagtca

SEQ ID NO: 1030345 - DNA, 33 bp, Homo sapien
cccaacacagggtccaatgcacagtaagtgctc

SEQ ID NO: 1030346 - DNA, 33 bp, Homo sapien
cccaacacagggtccagtgcacagtaagtgctc

SEQ ID NO: 1030347 - DNA, 33 bp, Homo sapien
acgggtgtgagccatcacaactggtctgagcca

SEQ ID NO: 1030348 - DNA, 33 bp, Homo sapien
acgggtgtgagccatcgcaactggtctgagcca

SEQ ID NO: 1030349 - DNA, 33 bp, Homo sapien
aaagtgggtttccaccacaacccctcacttcca

SEQ ID NO: 1030350 - DNA, 33 bp, Homo sapien
aaagtgggtttccaccgcaacccctcacttcca

SEQ ID NO: 1030351 - DNA, 33 bp, Homo sapien
ggctcaggaggtcacaaagccgcacacgcaagg

SEQ ID NO: 1030352 - DNA, 33 bp, Homo sapien
ggctcaggaggtcacagagccgcacacgcaagg

SEQ ID NO: 1030353 - DNA, 33 bp, Homo sapien
gaccttaacaacccggacaagcacgccaagctg

SEQ ID NO: 1030354 - DNA, 33 bp, Homo sapien
gaccttaacaacccggccaagcacgccaagctg

SEQ ID NO: 1030355 - DNA, 33 bp, Homo sapien
tagctttcagaggaaaaatatctggcctggccc

SEQ ID NO: 1030356 - DNA, 33 bp, Homo sapien
tagctttcagaggaaatatatctggcctggccc

SEQ ID NO: 1030357 - DNA, 33 bp, Homo sapien
acggggctggcagtcgacccagggcaatggcaa

SEQ ID NO: 1030358 - DNA, 33 bp, Homo sapien
acggggctggcagtcggcccagggcaatggcaa

SEQ ID NO: 1030359 - DNA, 33 bp, Homo sapien
ggaagttgaaatatgccagtccaaggaaggtgg

SEQ ID NO: 1030360 - DNA, 33 bp, Homo sapien
ggaagttgaaatatgctagtccaaggaaggtgg

SEQ ID NO: 1030361 - DNA, 33 bp, Homo sapien
catactggaattatcactagattaccatacatc

SEQ ID NO: 1030362 - DNA, 33 bp, Homo sapien
catactggaattatcattagattaccatacatc

SEQ ID NO: 1030363 - DNA, 33 bp, Homo sapien
tcatgatatgaccacaaaatagaattgcaagca

SEQ ID NO: 1030364 - DNA, 33 bp, Homo sapien
tcatgatatgaccacagaatagaattgcaagca

SEQ ID NO: 1030365 - DNA, 33 bp, Homo sapien
tcctctggaagctttaggtctgtgatcaatgtg

SEQ ID NO: 1030366 - DNA, 33 bp, Homo sapien
tcctctggaagctttatgtctgtgatcaatgtg

SEQ ID NO: 1030367 - DNA, 33 bp, Homo sapien
actaacatcaaccagaagaaaatctaattcaat

SEQ ID NO: 1030368 - DNA, 33 bp, Homo sapien
actaacatcaaccagaggaaaatctaattcaat

SEQ ID NO: 1030369 - DNA, 33 bp, Homo sapien
gaaagaaggaaccgggaagccacaagtttcggc

SEQ ID NO: 1030370 - DNA, 33 bp, Homo sapien
gaaagaaggaaccgggcagccacaagtttcggc

SEQ ID NO: 1030371 - DNA, 33 bp, Homo sapien
attgctggcgaagcgacgataaggaagctgggg

SEQ ID NO: 1030372 - DNA, 33 bp, Homo sapien
attgctggcgaagcgatgataaggaagctgggg

SEQ ID NO: 1030373 - DNA, 33 bp, Homo sapien
gaggaggaaatggggaacgtcgtctgctagtgg

SEQ ID NO: 1030374 - DNA, 33 bp, Homo sapien
gaggaggaaatggggagcgtcgtctgctagtgg

SEQ ID NO: 1030375 - DNA, 33 bp, Homo sapien
gtgacctgccaaagggcatatagccagtgctgt

SEQ ID NO: 1030376 - DNA, 33 bp, Homo sapien
gtgacctgccaaagggtatatagccagtgctgt

SEQ ID NO: 1030377 - DNA, 33 bp, Homo sapien
gcccggcactggctcgccccctcgtctcctctt

SEQ ID NO: 1030378 - DNA, 33 bp, Homo sapien
gcccggcactggctcgtcccctcgtctcctctt

SEQ ID NO: 1030379 - DNA, 33 bp, Homo sapien
caagtctaggttctcacagtccaatccaatcca

SEQ ID NO: 1030380 - DNA, 33 bp, Homo sapien
caagtctaggttctcatagtccaatccaatcca

SEQ ID NO: 1030381 - DNA, 33 bp, Homo sapien
ctccaggtcagcgggaagatctcgtgggccctg

SEQ ID NO: 1030382 - DNA, 33 bp, Homo sapien
ctccaggtcagcgggaggatctcgtgggccctg

SEQ ID NO: 1030383 - DNA, 33 bp, Homo sapien
agttgctggctggacaatgatggcctgttgtcc

SEQ ID NO: 1030384 - DNA, 33 bp, Homo sapien
agttgctggctggacagtgatggcctgttgtcc

SEQ ID NO: 1030385 - DNA, 33 bp, Homo sapien
aagctcagccgcaaacaagggtgccaagttcac

SEQ ID NO: 1030386 - DNA, 33 bp, Homo sapien
aagctcagccgcaaacgagggtgccaagttcac

SEQ ID NO: 1030387 - DNA, 33 bp, Homo sapien
gaataaacttggctagacgcatttatgagaagg

SEQ ID NO: 1030388 - DNA, 33 bp, Homo sapien
gaataaacttggctaggcgcatttatgagaagg

SEQ ID NO: 1030389 - DNA, 33 bp, Homo sapien
ctaactgtccctaaaaatccatcccagtaaaag

SEQ ID NO: 1030390 - DNA, 33 bp, Homo sapien
ctaactgtccctaaaagtccatcccagtaaaag

SEQ ID NO: 1030391 - DNA, 33 bp, Homo sapien
ctttttctttctttcaatgaaaatctgaaacct

SEQ ID NO: 1030392 - DNA, 33 bp, Homo sapien
ctttttctttctttcagtgaaaatctgaaacct

SEQ ID NO: 1030393 - DNA, 33 bp, Homo sapien
tgaaaccctggaaaagacagactaatatctggg

SEQ ID NO: 1030394 - DNA, 33 bp, Homo sapien
tgaaaccctggaaaaggcagactaatatctggg

SEQ ID NO: 1030395 - DNA, 33 bp, Homo sapien
atcccagcagcgccacacagtaggaccagccct

SEQ ID NO: 1030396 - DNA, 33 bp, Homo sapien
atcccagcagcgccacgcagtaggaccagccct

SEQ ID NO: 1030397 - DNA, 33 bp, Homo sapien
aagacatttttgaaaccattggtaaatgtgcta

SEQ ID NO: 1030398 - DNA, 33 bp, Homo sapien
aagacatttttgaaactattggtaaatgtgcta

SEQ ID NO: 1030399 - DNA, 33 bp, Homo sapien
agtctggattcagcaccaacggagctggggggc

SEQ ID NO: 1030400 - DNA, 33 bp, Homo sapien
agtctggattcagcactaacggagctggggggc

SEQ ID NO: 1030401 - DNA, 33 bp, Homo sapien
taagcaggcgtttgatgaaagtccccactcagc

SEQ ID NO: 1030402 - DNA, 33 bp, Homo sapien
taagcaggcgtttgattaaagtccccactcagc

SEQ ID NO: 1030403 - DNA, 33 bp, Homo sapien
atcaatccaggatttacagtgcatttcagtgga

SEQ ID NO: 1030404 - DNA, 33 bp, Homo sapien
atcaatccaggatttatagtgcatttcagtgga

SEQ ID NO: 1030405 - DNA, 33 bp, Homo sapien
gaaatatcagaggaaaacattcaactcaccacc

SEQ ID NO: 1030406 - DNA, 33 bp, Homo sapien
gaaatatcagaggaaatcattcaactcaccacc

SEQ ID NO: 1030407 - DNA, 33 bp, Homo sapien
aacactttgtggtctacccatacactataatgc

SEQ ID NO: 1030408 - DNA, 33 bp, Homo sapien
aacactttgtggtctatccatacactataatgc

SEQ ID NO: 1030409 - DNA, 33 bp, Homo sapien
taaaggtttggaagcccctgtctcagtacagat

SEQ ID NO: 1030410 - DNA, 33 bp, Homo sapien
taaaggtttggaagcctctgtctcagtacagat

SEQ ID NO: 1030411 - DNA, 33 bp, Homo sapien
ccagttttccttacttaaaaatgcaacccgacc

SEQ ID NO: 1030412 - DNA, 33 bp, Homo sapien
ccagttttccttacttgaaaatgcaacccgacc

SEQ ID NO: 1030413 - DNA, 33 bp, Homo sapien
atctgcaaatccactcccctcatctcaagctgc

SEQ ID NO: 1030414 - DNA, 33 bp, Homo sapien
atctgcaaatccactctcctcatctcaagctgc

SEQ ID NO: 1030415 - DNA, 33 bp, Homo sapien
agagtatggacttggagtacaagttatatcatt

SEQ ID NO: 1030416 - DNA, 33 bp, Homo sapien
agagtatggacttggattacaagttatatcatt

SEQ ID NO: 1030417 - DNA, 33 bp, Homo sapien
aactcacaagggaacaacacccaaatcagattc

SEQ ID NO: 1030418 - DNA, 33 bp, Homo sapien
aactcacaagggaacaccacccaaatcagattc

SEQ ID NO: 1030419 - DNA, 33 bp, Homo sapien
cttttggttcactggccgatcgtcctgagggtt

SEQ ID NO: 1030420 - DNA, 33 bp, Homo sapien
cttttggttcactggctgatcgtcctgagggtt

SEQ ID NO: 1030421 - DNA, 33 bp, Homo sapien
ttctccgggcaggcaagtcgaggacacaagggc

SEQ ID NO: 1030422 - DNA, 33 bp, Homo sapien
ttctccgggcaggcaattcgaggacacaagggc

SEQ ID NO: 1030423 - DNA, 33 bp, Homo sapien
caggatatggggtacgaaagtcaaccatagttt

SEQ ID NO: 1030424 - DNA, 33 bp, Homo sapien
caggatatggggtacgcaagtcaaccatagttt

SEQ ID NO: 1030425 - DNA, 33 bp, Homo sapien
atcaccctggacactgaaagtctggttggatgc

SEQ ID NO: 1030426 - DNA, 33 bp, Homo sapien
atcaccctggacactggaagtctggttggatgc

SEQ ID NO: 1030427 - DNA, 33 bp, Homo sapien
actgaaaatccagaaagaccatattcccagata

SEQ ID NO: 1030428 - DNA, 33 bp, Homo sapien
actgaaaatccagaaataccatattcccagata

SEQ ID NO: 1030429 - DNA, 33 bp, Homo sapien
tcatggcacttcataccacaaggatggcaaaac

SEQ ID NO: 1030430 - DNA, 33 bp, Homo sapien
tcatggcacttcatactacaaggatggcaaaac

SEQ ID NO: 1030431 - DNA, 33 bp, Homo sapien
gatgccataacggagacaaagacaataagcact

SEQ ID NO: 1030432 - DNA, 33 bp, Homo sapien
gatgccataacggagataaagacaataagcact

SEQ ID NO: 1030433 - DNA, 33 bp, Homo sapien
agctccaaaaagctgacgataaccttcacagac

SEQ ID NO: 1030434 - DNA, 33 bp, Homo sapien
agctccaaaaagctgatgataaccttcacagac

SEQ ID NO: 1030435 - DNA, 33 bp, Homo sapien
tattacaaagtcgattcaagctctaacagtata

SEQ ID NO: 1030436 - DNA, 33 bp, Homo sapien
tattacaaagtcgatttaagctctaacagtata

SEQ ID NO: 1030437 - DNA, 33 bp, Homo sapien
acctggctgcaatctccactttttatagctcag

SEQ ID NO: 1030438 - DNA, 33 bp, Homo sapien
acctggctgcaatctcgactttttatagctcag

SEQ ID NO: 1030439 - DNA, 33 bp, Homo sapien
ataatcttacttctcacgggccttgtacttagc

SEQ ID NO: 1030440 - DNA, 33 bp, Homo sapien
ataatcttacttctcatgggccttgtacttagc

SEQ ID NO: 1030441 - DNA, 33 bp, Homo sapien
gtaaactgaactgacactcctcatttgtaacca

SEQ ID NO: 1030442 - DNA, 33 bp, Homo sapien
gtaaactgaactgacattcctcatttgtaacca

SEQ ID NO: 1030443 - DNA, 33 bp, Homo sapien
ttctagatctcagacacgctttctttactattc

SEQ ID NO: 1030444 - DNA, 33 bp, Homo sapien
ttctagatctcagacatgctttctttactattc

SEQ ID NO: 1030445 - DNA, 33 bp, Homo sapien
caaactctactcttccaagactccccagagaca

SEQ ID NO: 1030446 - DNA, 33 bp, Homo sapien
caaactctactcttccgagactccccagagaca

SEQ ID NO: 1030447 - DNA, 33 bp, Homo sapien
tataatacacagtcacaaaatatagattatatg

SEQ ID NO: 1030448 - DNA, 33 bp, Homo sapien
tataatacacagtcacgaaatatagattatatg

SEQ ID NO: 1030449 - DNA, 33 bp, Homo sapien
aataaataggtgaaacaagactagacatttagg

SEQ ID NO: 1030450 - DNA, 33 bp, Homo sapien
aataaataggtgaaacgagactagacatttagg

SEQ ID NO: 1030451 - DNA, 33 bp, Homo sapien
ccatattgaccatacaccctctaagcacacata

SEQ ID NO: 1030452 - DNA, 33 bp, Homo sapien
ccatattgaccatacatcctctaagcacacata

SEQ ID NO: 1030453 - DNA, 33 bp, Homo sapien
ataataaccaattagacgctgcagaggtaatgc

SEQ ID NO: 1030454 - DNA, 33 bp, Homo sapien
ataataaccaattagatgctgcagaggtaatgc

SEQ ID NO: 1030455 - DNA, 33 bp, Homo sapien
agagtgaaccttaataccaaggatggacttggg

SEQ ID NO: 1030456 - DNA, 33 bp, Homo sapien
agagtgaaccttaatatcaaggatggacttggg

SEQ ID NO: 1030457 - DNA, 33 bp, Homo sapien
gatggagtgtaaaaagaatggctgtgcttcagt

SEQ ID NO: 1030458 - DNA, 33 bp, Homo sapien
gatggagtgtaaaaagcatggctgtgcttcagt

SEQ ID NO: 1030459 - DNA, 33 bp, Homo sapien
tgctgctgccaacttcactctcaaatgccccag

SEQ ID NO: 1030460 - DNA, 33 bp, Homo sapien
tgctgctgccaacttcgctctcaaatgccccag

SEQ ID NO: 1030461 - DNA, 33 bp, Homo sapien
caagtgattcccgggcaccgtgaagttttcaga

SEQ ID NO: 1030462 - DNA, 33 bp, Homo sapien
caagtgattcccgggcgccgtgaagttttcaga

SEQ ID NO: 1030463 - DNA, 33 bp, Homo sapien
ttgttttaggctgcaaaaaaccatgcccattat

SEQ ID NO: 1030464 - DNA, 33 bp, Homo sapien
ttgttttaggctgcaacaaaccatgcccattat

SEQ ID NO: 1030465 - DNA, 33 bp, Homo sapien
ggacttcggttgataacgttgtctcaatatggt

SEQ ID NO: 1030466 - DNA, 33 bp, Homo sapien
ggacttcggttgataatgttgtctcaatatggt

SEQ ID NO: 1030467 - DNA, 33 bp, Homo sapien
cactcataggttaatacgtatctcaaaatgtta

SEQ ID NO: 1030468 - DNA, 33 bp, Homo sapien
cactcataggttaatatgtatctcaaaatgtta

SEQ ID NO: 1030469 - DNA, 33 bp, Homo sapien
tgacagatgttatctaactcaagtgcactttgc

SEQ ID NO: 1030470 - DNA, 33 bp, Homo sapien
tgacagatgttatctagctcaagtgcactttgc

SEQ ID NO: 1030471 - DNA, 33 bp, Homo sapien
ttgagacctcactaaaattagaggaacagaatt

SEQ ID NO: 1030472 - DNA, 33 bp, Homo sapien
ttgagacctcactaaagttagaggaacagaatt

SEQ ID NO: 1030473 - DNA, 33 bp, Homo sapien
agtgagagagcttaaaagattcttcagtgagga

SEQ ID NO: 1030474 - DNA, 33 bp, Homo sapien
agtgagagagcttaaaggattcttcagtgagga

SEQ ID NO: 1030475 - DNA, 33 bp, Homo sapien
acacgtggagaccataaaaggatgcacacgttc

SEQ ID NO: 1030476 - DNA, 33 bp, Homo sapien
acacgtggagaccatacaaggatgcacacgttc

SEQ ID NO: 1030477 - DNA, 33 bp, Homo sapien
gtgtatccgtatatccaccatcttggttcaaca

SEQ ID NO: 1030478 - DNA, 33 bp, Homo sapien
gtgtatccgtatatcccccatcttggttcaaca

SEQ ID NO: 1030479 - DNA, 33 bp, Homo sapien
ttttttttttttgatcaagatccagtcaagctt

SEQ ID NO: 1030480 - DNA, 33 bp, Homo sapien
ttttttttttttgatcgagatccagtcaagctt

SEQ ID NO: 1030481 - DNA, 33 bp, Homo sapien
taaacctaagaaattcaatgcccaccttactag

SEQ ID NO: 1030482 - DNA, 33 bp, Homo sapien
taaacctaagaaattcgatgcccaccttactag

SEQ ID NO: 1030483 - DNA, 33 bp, Homo sapien
tgtgtggcatttaccacgtaaccttgctggagc

SEQ ID NO: 1030484 - DNA, 33 bp, Homo sapien
tgtgtggcatttaccatgtaaccttgctggagc

SEQ ID NO: 1030485 - DNA, 33 bp, Homo sapien
gttggcaacacaacaggagtcttccaacttttt

SEQ ID NO: 1030486 - DNA, 33 bp, Homo sapien
gttggcaacacaacagtagtcttccaacttttt

SEQ ID NO: 1030487 - DNA, 33 bp, Homo sapien
gagtggctgagtggacgctacacacttagccac

SEQ ID NO: 1030488 - DNA, 33 bp, Homo sapien
gagtggctgagtggactctacacacttagccac

SEQ ID NO: 1030489 - DNA, 33 bp, Homo sapien
cacaaatccaaagtccaattggcgagaggcctc

SEQ ID NO: 1030490 - DNA, 33 bp, Homo sapien
cacaaatccaaagtccgattggcgagaggcctc

SEQ ID NO: 1030491 - DNA, 33 bp, Homo sapien
cttcaggacatttgaaagatgcacctaagtcac

SEQ ID NO: 1030492 - DNA, 33 bp, Homo sapien
cttcaggacatttgaaggatgcacctaagtcac

SEQ ID NO: 1030493 - DNA, 33 bp, Homo sapien
gatcaccttcctgcaacgcccagtgactgacct

SEQ ID NO: 1030494 - DNA, 33 bp, Homo sapien
gatcaccttcctgcaatgcccagtgactgacct

SEQ ID NO: 1030495 - DNA, 33 bp, Homo sapien
agggctgtttattctacggaaaagtcaggggag

SEQ ID NO: 1030496 - DNA, 33 bp, Homo sapien
agggctgtttattctatggaaaagtcaggggag

SEQ ID NO: 1030497 - DNA, 33 bp, Homo sapien
gactcaggcaggttacactacagatttctcacc

SEQ ID NO: 1030498 - DNA, 33 bp, Homo sapien
gactcaggcaggttacgctacagatttctcacc

SEQ ID NO: 1030499 - DNA, 33 bp, Homo sapien
agacatggctaaattacatagcacctccacatt

SEQ ID NO: 1030500 - DNA, 33 bp, Homo sapien
agacatggctaaattatatagcacctccacatt

SEQ ID NO: 1030501 - DNA, 33 bp, Homo sapien
gtgctgttggaatggacgtcatgggctatgtta

SEQ ID NO: 1030502 - DNA, 33 bp, Homo sapien
gtgctgttggaatggatgtcatgggctatgtta

SEQ ID NO: 1030503 - DNA, 33 bp, Homo sapien
gtatcagcctgaggagaagaacccaacctgcta

SEQ ID NO: 1030504 - DNA, 33 bp, Homo sapien
gtatcagcctgaggaggagaacccaacctgcta

SEQ ID NO: 1030505 - DNA, 33 bp, Homo sapien
agaaaaatggatacaacgaagactgtttttttt

SEQ ID NO: 1030506 - DNA, 33 bp, Homo sapien
agaaaaatggatacaatgaagactgtttttttt

SEQ ID NO: 1030507 - DNA, 33 bp, Homo sapien
aaaacaactctagggcagacatgttactggagg

SEQ ID NO: 1030508 - DNA, 33 bp, Homo sapien
aaaacaactctagggctgacatgttactggagg

SEQ ID NO: 1030509 - DNA, 33 bp, Homo sapien
tcttgtgtatcaccaccaacaaatattaatctc

SEQ ID NO: 1030510 - DNA, 33 bp, Homo sapien
tcttgtgtatcaccacgaacaaatattaatctc

SEQ ID NO: 1030511 - DNA, 33 bp, Homo sapien
actgttttaataagacgcagtaggaacatgttg

SEQ ID NO: 1030512 - DNA, 33 bp, Homo sapien
actgttttaataagactcagtaggaacatgttg

SEQ ID NO: 1030513 - DNA, 33 bp, Homo sapien
agttaataagtatttacggaacatctactgtgt

SEQ ID NO: 1030514 - DNA, 33 bp, Homo sapien
agttaataagtatttatggaacatctactgtgt

SEQ ID NO: 1030515 - DNA, 33 bp, Homo sapien
tcactattagtcaatcaattcttacaaatacat

SEQ ID NO: 1030516 - DNA, 33 bp, Homo sapien
tcactattagtcaatccattcttacaaatacat

SEQ ID NO: 1030517 - DNA, 33 bp, Homo sapien
taacagtgtaattcacagaagtatgtggttatc

SEQ ID NO: 1030518 - DNA, 33 bp, Homo sapien
taacagtgtaattcacggaagtatgtggttatc

SEQ ID NO: 1030519 - DNA, 33 bp, Homo sapien
ggccccgcggccatggcagaggatgagctgctg

SEQ ID NO: 1030520 - DNA, 33 bp, Homo sapien
ggccccgcggccatggtagaggatgagctgctg

SEQ ID NO: 1030521 - DNA, 33 bp, Homo sapien
gcacggccatgctccaataaccttctctttaca

SEQ ID NO: 1030522 - DNA, 33 bp, Homo sapien
gcacggccatgctccagtaaccttctctttaca

SEQ ID NO: 1030523 - DNA, 33 bp, Homo sapien
atcctgagtctcaaaacggcccaggaatccagc

SEQ ID NO: 1030524 - DNA, 33 bp, Homo sapien
atcctgagtctcaaaatggcccaggaatccagc

SEQ ID NO: 1030525 - DNA, 33 bp, Homo sapien
ttgccttcagggccacaaacagagacttcatag

SEQ ID NO: 1030526 - DNA, 33 bp, Homo sapien
ttgccttcagggccacgaacagagacttcatag

SEQ ID NO: 1030527 - DNA, 33 bp, Homo sapien
gcatctgtggccataaatggttatgacagacac

SEQ ID NO: 1030528 - DNA, 33 bp, Homo sapien
gcatctgtggccataagtggttatgacagacac

SEQ ID NO: 1030529 - DNA, 33 bp, Homo sapien
ttccatcaagaggaagacatctctggttacgca

SEQ ID NO: 1030530 - DNA, 33 bp, Homo sapien
ttccatcaagaggaaggcatctctggttacgca

SEQ ID NO: 1030531 - DNA, 33 bp, Homo sapien
gttgctggcttacccacggtctgtcctcatggg

SEQ ID NO: 1030532 - DNA, 33 bp, Homo sapien
gttgctggcttacccatggtctgtcctcatggg

SEQ ID NO: 1030533 - DNA, 33 bp, Homo sapien
acgagtttcagatcaacggaactgggagcgtgg

SEQ ID NO: 1030534 - DNA, 33 bp, Homo sapien
acgagtttcagatcaatggaactgggagcgtgg

SEQ ID NO: 1030535 - DNA, 33 bp, Homo sapien
ttatgtgggaactctcaatcttttcactctgtc

SEQ ID NO: 1030536 - DNA, 33 bp, Homo sapien
ttatgtgggaactctcgatcttttcactctgtc

SEQ ID NO: 1030537 - DNA, 33 bp, Homo sapien
caaacctctgataaccactgatgtttttactgt

SEQ ID NO: 1030538 - DNA, 33 bp, Homo sapien
caaacctctgataaccgctgatgtttttactgt

SEQ ID NO: 1030539 - DNA, 33 bp, Homo sapien
catatcacattcaaaccgcaaaaaaaaatcaaa

SEQ ID NO: 1030540 - DNA, 33 bp, Homo sapien
catatcacattcaaactgcaaaaaaaaatcaaa

SEQ ID NO: 1030541 - DNA, 33 bp, Homo sapien
aagtgtgctatgtccactcctccaggactgcga

SEQ ID NO: 1030542 - DNA, 33 bp, Homo sapien
aagtgtgctatgtccattcctccaggactgcga

SEQ ID NO: 1030543 - DNA, 33 bp, Homo sapien
aaagtggaaattgcccaaatgtccactgacaga

SEQ ID NO: 1030544 - DNA, 33 bp, Homo sapien
aaagtggaaattgcccgaatgtccactgacaga

SEQ ID NO: 1030545 - DNA, 33 bp, Homo sapien
agcaataaccagatgacaggttaatgagcttgc

SEQ ID NO: 1030546 - DNA, 33 bp, Homo sapien
agcaataaccagatgataggttaatgagcttgc

SEQ ID NO: 1030547 - DNA, 33 bp, Homo sapien; identical to SEQ ID NO: 1030545

SEQ ID NO: 1030548 - DNA, 33 bp, Homo sapien; identical to SEQ ID NO: 1030546

SEQ ID NO: 1030549 - DNA, 33 bp, Homo sapien
tgccccgctgggctgaaccttcctaccctttat

SEQ ID NO: 1030550 - DNA, 33 bp, Homo sapien
tgccccgctgggctgatccttcctaccctttat

SEQ ID NO: 1030551 - DNA, 33 bp, Homo sapien; identical to SEQ ID NO: 1030549

SEQ ID NO: 1030552 - DNA, 33 bp, Homo sapien; identical to SEQ ID NO: 1030550

SEQ ID NO: 1030553 - DNA, 33 bp, Homo sapien
ggatgtctggggacatgagagaaatcaaaacag

SEQ ID NO: 1030554 - DNA, 33 bp, Homo sapien
ggatgtctggggacattagagaaatcaaaacag

SEQ ID NO: 1030555 - DNA, 33 bp, Homo sapien
gacaagacttcaaggaactagagggctgcaatg

SEQ ID NO: 1030556 - DNA, 33 bp, Homo sapien
gacaagacttcaaggatctagagggctgcaatg

SEQ ID NO: 1030557 - DNA, 33 bp, Homo sapien
tcagaggaagatgtagcccatgggtggtcacac

SEQ ID NO: 1030558 - DNA, 33 bp, Homo sapien
tcagaggaagatgtagtccatgggtggtcacac

SEQ ID NO: 1030559 - DNA, 33 bp, Homo sapien
acactttaatagccacaataaactttgttagaa

SEQ ID NO: 1030560 - DNA, 33 bp, Homo sapien
acactttaatagccacgataaactttgttagaa

SEQ ID NO: 1030561 - DNA, 33 bp, Homo sapien
tcgaactgaacactgaaaatgggtggattccat

SEQ ID NO: 1030562 - DNA, 33 bp, Homo sapien
tcgaactgaacactgagaatgggtggattccat

SEQ ID NO: 1030563 - DNA, 33 bp, Homo sapien
aaagttgatcatagaacacagatgacaaatata

SEQ ID NO: 1030564 - DNA, 33 bp, Homo sapien
aaagttgatcatagaatacagatgacaaatata

SEQ ID NO: 1030565 - DNA, 33 bp, Homo sapien
cttgatggagcagtgtaaaatagctcgcagcca

SEQ ID NO: 1030566 - DNA, 33 bp, Homo sapien
cttgatggagcagtgttaaatagctcgcagcca

SEQ ID NO: 1030567 - DNA, 33 bp, Homo sapien
cccccagaacgttagagtccatccctatcatag

SEQ ID NO: 1030568 - DNA, 33 bp, Homo sapien
cccccagaacgttagattccatccctatcatag

SEQ ID NO: 1030569 - DNA, 33 bp, Homo sapien
atggtctctgtcactgcagctgtggagtaagcc

SEQ ID NO: 1030570 - DNA, 33 bp, Homo sapien
atggtctctgtcactgtagctgtggagtaagcc

SEQ ID NO: 1030571 - DNA, 33 bp, Homo sapien
aggaagctctgtacacccttacgaggactaatc

SEQ ID NO: 1030572 - DNA, 33 bp, Homo sapien
aggaagctctgtacacgcttacgaggactaatc

SEQ ID NO: 1030573 - DNA, 33 bp, Homo sapien
tgagagctacacgagacaactgacataagacct

SEQ ID NO: 1030574 - DNA, 33 bp, Homo sapien
tgagagctacacgagataactgacataagacct

SEQ ID NO: 1030575 - DNA, 33 bp, Homo sapien
tactgatgactcaaaaggtcagatcctctgtgc

SEQ ID NO: 1030576 - DNA, 33 bp, Homo sapien
tactgatgactcaaaatgtcagatcctctgtgc

SEQ ID NO: 1030577 - DNA, 33 bp, Homo sapien
taaatctgggagttgacatccatttcatgtaca

SEQ ID NO: 1030578 - DNA, 33 bp, Homo sapien
taaatctgggagttgatatccatttcatgtaca

SEQ ID NO: 1030579 - DNA, 33 bp, Homo sapien
cttcaatttggcaaccaccagttagagagctgc

SEQ ID NO: 1030580 - DNA, 33 bp, Homo sapien
cttcaatttggcaacccccagttagagagctgc

SEQ ID NO: 1030581 - DNA, 33 bp, Homo sapien
tgctcttggttttcaaattattttagtcgtgtt

SEQ ID NO: 1030582 - DNA, 33 bp, Homo sapien
tgctcttggttttcaagttattttagtcgtgtt

SEQ ID NO: 1030583 - DNA, 33 bp, Homo sapien
cagactaaacagaaacccagagaataagagaaa

SEQ ID NO: 1030584 - DNA, 33 bp, Homo sapien
cagactaaacagaaactcagagaataagagaaa

SEQ ID NO: 1030585 - DNA, 33 bp, Homo sapien
tcgttagcctccttaaacagaataactgtcagc

SEQ ID NO: 1030586 - DNA, 33 bp, Homo sapien
tcgttagcctccttaagcagaataactgtcagc

SEQ ID NO: 1030587 - DNA, 33 bp, Homo sapien
aacactgagatcagaaagcatatgtaactgtgt

SEQ ID NO: 1030588 - DNA, 33 bp, Homo sapien
aacactgagatcagaaggcatatgtaactgtgt

SEQ ID NO: 1030589 - DNA, 33 bp, Homo sapien
tctaaatcaccctctcacttagcttgctgaatt

SEQ ID NO: 1030590 - DNA, 33 bp, Homo sapien
tctaaatcaccctctcgcttagcttgctgaatt

SEQ ID NO: 1030591 - DNA, 33 bp, Homo sapien
gagcagcgcctcaagcaaccactcttggttcta

SEQ ID NO: 1030592 - DNA, 33 bp, Homo sapien
gagcagcgcctcaagcgaccactcttggttcta

SEQ ID NO: 1030593 - DNA, 33 bp, Homo sapien
tgtgctccacctattcactgcttgctccccctt

SEQ ID NO: 1030594 - DNA, 33 bp, Homo sapien
tgtgctccacctattcgctgcttgctccccctt

SEQ ID NO: 1030595 - DNA, 33 bp, Homo sapien
aattgatgggccaaaactgatctgtttttgtta

SEQ ID NO: 1030596 - DNA, 33 bp, Homo sapien
aattgatgggccaaaagtgatctgtttttgtta

SEQ ID NO: 1030597 - DNA, 33 bp, Homo sapien
ccatctccttgtcctgaaagcattcaactcctt

SEQ ID NO: 1030598 - DNA, 33 bp, Homo sapien
ccatctccttgtcctgcaagcattcaactcctt

SEQ ID NO: 1030599 - DNA, 33 bp, Homo sapien
ccgtaagtgctccatacctaataacttgaacat

SEQ ID NO: 1030600 - DNA, 33 bp, Homo sapien
ccgtaagtgctccatagctaataacttgaacat

SEQ ID NO: 1030601 - DNA, 33 bp, Homo sapien
ttcagaattctgggaccgaacaggatgggatga

SEQ ID NO: 1030602 - DNA, 33 bp, Homo sapien
ttcagaattctgggactgaacaggatgggatga

SEQ ID NO: 1030603 - DNA, 33 bp, Homo sapien
tggaatgacgtcagaacgtgttgagaatttggg

SEQ ID NO: 1030604 - DNA, 33 bp, Homo sapien
tggaatgacgtcagaatgtgttgagaatttggg

SEQ ID NO: 1030605 - DNA, 33 bp, Homo sapien
ctttaaggtctagaaaaatgagatgtaagttag

SEQ ID NO: 1030606 - DNA, 33 bp, Homo sapien
ctttaaggtctagaaagatgagatgtaagttag

SEQ ID NO: 1030607 - DNA, 33 bp, Homo sapien
tacgtatgggatactacactggtgaatataaga

SEQ ID NO: 1030608 - DNA, 33 bp, Homo sapien
tacgtatgggatactatactggtgaatataaga

SEQ ID NO: 1030609 - DNA, 33 bp, Homo sapien
tctttagcatatattgaaattcagaccttttta

SEQ ID NO: 1030610 - DNA, 33 bp, Homo sapien
tctttagcatatattgcaattcagaccttttta

SEQ ID NO: 1030611 - DNA, 33 bp, Homo sapien
acccaatagaatacttcaacaggttcataggta

SEQ ID NO: 1030612 - DNA, 33 bp, Homo sapien
acccaatagaatactttaacaggttcataggta

SEQ ID NO: 1030613 - DNA, 33 bp, Homo sapien
cttaattttcaatatcaacttgactgaattaag

SEQ ID NO: 1030614 - DNA, 33 bp, Homo sapien
cttaattttcaatatcgacttgactgaattaag

SEQ ID NO: 1030615 - DNA, 33 bp, Homo sapien
agcaggtgctacataaatgcttcctgtcattag

SEQ ID NO: 1030616 - DNA, 33 bp, Homo sapien
agcaggtgctacataagtgcttcctgtcattag

SEQ ID NO: 1030617 - DNA, 33 bp, Homo sapien
gtctctctgttaaaaaattccaagtagtcatta

SEQ ID NO: 1030618 - DNA, 33 bp, Homo sapien
gtctctctgttaaaaatttccaagtagtcatta

SEQ ID NO: 1030619 - DNA, 33 bp, Homo sapien
atataagaagaactcaacagtaaaggcaaattt

SEQ ID NO: 1030620 - DNA, 33 bp, Homo sapien
atataagaagaactcatcagtaaaggcaaattt

SEQ ID NO: 1030621 - DNA, 33 bp, Homo sapien
ggggcattgttcatgacgggaagctcggagggc

SEQ ID NO: 1030622 - DNA, 33 bp, Homo sapien
ggggcattgttcatgatgggaagctcggagggc

SEQ ID NO: 1030623 - DNA, 33 bp, Homo sapien
tagatgtcagattagtcacccggatcattccag

SEQ ID NO: 1030624 - DNA, 33 bp, Homo sapien
tagatgtcagattagttacccggatcattccag

SEQ ID NO: 1030625 - DNA, 33 bp, Homo sapien
tgggttcattcattcgaaagttcttaaagatct

SEQ ID NO: 1030626 - DNA, 33 bp, Homo sapien
tgggttcattcattcggaagttcttaaagatct

SEQ ID NO: 1030627 - DNA, 33 bp, Homo sapien
aatgcaaacaagtaaagtatgaaagttgataag

SEQ ID NO: 1030628 - DNA, 33 bp, Homo sapien
aatgcaaacaagtaaattatgaaagttgataag

SEQ ID NO: 1030629 - DNA, 33 bp, Homo sapien
tccatcgtatggataaaccacattcctctaagg

SEQ ID NO: 1030630 - DNA, 33 bp, Homo sapien
tccatcgtatggataagccacattcctctaagg

SEQ ID NO: 1030631 - DNA, 33 bp, Homo sapien
aaagaattgacaacaggaacttgaacagatact

SEQ ID NO: 1030632 - DNA, 33 bp, Homo sapien
aaagaattgacaacagtaacttgaacagatact

SEQ ID NO: 1030633 - DNA, 33 bp, Homo sapien
aaaatagatcaatagaaaccatgcaatctgaag

SEQ ID NO: 1030634 - DNA, 33 bp, Homo sapien
aaaatagatcaatagagaccatgcaatctgaag

SEQ ID NO: 1030635 - DNA, 33 bp, Homo sapien
aacagtagattttaaccagcaaaagaaatacac

SEQ ID NO: 1030636 - DNA, 33 bp, Homo sapien
aacagtagattttaactagcaaaagaaatacac

SEQ ID NO: 1030637 - DNA, 33 bp, Homo sapien
tggagtttctcacaggaagtttctgttgcctac

SEQ ID NO: 1030638 - DNA, 33 bp, Homo sapien
tggagtttctcacaggcagtttctgttgcctac

SEQ ID NO: 1030639 - DNA, 33 bp, Homo sapien
tgcataggtcttaccccagctacagggctgagg

SEQ ID NO: 1030640 - DNA, 33 bp, Homo sapien
tgcataggtcttacccgagctacagggctgagg

SEQ ID NO: 1030641 - DNA, 33 bp, Homo sapien
caccccacaccaaagcgatggcctcaaacagcc

SEQ ID NO: 1030642 - DNA, 33 bp, Homo sapien
caccccacaccaaagctatggcctcaaacagcc

SEQ ID NO: 1030643 - DNA, 33 bp, Homo sapien
ggttgccgattgctcaaaacaaatcacatcaga

SEQ ID NO: 1030644 - DNA, 33 bp, Homo sapien
ggttgccgattgctcacaacaaatcacatcaga

SEQ ID NO: 1030645 - DNA, 33 bp, Homo sapien
agtgcattctttaacacaacaaggccattggtg

SEQ ID NO: 1030646 - DNA, 33 bp, Homo sapien
agtgcattctttaacataacaaggccattggtg

SEQ ID NO: 1030647 - DNA, 33 bp, Homo sapien
gcccttctcattacaaactacccccatctctta

SEQ ID NO: 1030648 - DNA, 33 bp, Homo sapien
gcccttctcattacaatctacccccatctctta

SEQ ID NO: 1030649 - DNA, 33 bp, Homo sapien
acagtgctgtgggccaaacaaccagaagttctg

SEQ ID NO: 1030650 - DNA, 33 bp, Homo sapien
acagtgctgtgggccagacaaccagaagttctg

SEQ ID NO: 1030651 - DNA, 33 bp, Homo sapien
tcagggatatctcagacgaggaaatcggagaga

SEQ ID NO: 1030652 - DNA, 33 bp, Homo sapien
tcagggatatctcagatgaggaaatcggagaga

SEQ ID NO: 1030653 - DNA, 33 bp, Homo sapien
aaagtgttcttcatcacatcaaaaacaagacaa

SEQ ID NO: 1030654 - DNA, 33 bp, Homo sapien
aaagtgttcttcatcatatcaaaaacaagacaa

SEQ ID NO: 1030655 - DNA, 33 bp, Homo sapien
aatgaattgtatgttacgtgaattctatatcaa

SEQ ID NO: 1030656 - DNA, 33 bp, Homo sapien
aatgaattgtatgttatgtgaattctatatcaa

SEQ ID NO: 1030657 - DNA, 33 bp, Homo sapien
ctgcattgttcaatgaccaactagatatataat

SEQ ID NO: 1030658 - DNA, 33 bp, Homo sapien
ctgcattgttcaatgatcaactagatatataat

SEQ ID NO: 1030659 - DNA, 33 bp, Homo sapien
ttgcttcagtctcagaccatagctttttaatgc

SEQ ID NO: 1030660 - DNA, 33 bp, Homo sapien
ttgcttcagtctcagatcatagctttttaatgc

SEQ ID NO: 1030661 - DNA, 33 bp, Homo sapien
aggctgcggaaacagcccattactcccagtgcc

SEQ ID NO: 1030662 - DNA, 33 bp, Homo sapien
aggctgcggaaacagctcattactcccagtgcc

SEQ ID NO: 1030663 - DNA, 33 bp, Homo sapien
caactccaaatatagacgatgaactgaaaaggc

SEQ ID NO: 1030664 - DNA, 33 bp, Homo sapien
caactccaaatatagatgatgaactgaaaaggc

SEQ ID NO: 1030665 - DNA, 33 bp, Homo sapien
aaattcccactctaccactcaccagctgtgcaa

SEQ ID NO: 1030666 - DNA, 33 bp, Homo sapien
aaattcccactctaccgctcaccagctgtgcaa

SEQ ID NO: 1030667 - DNA, 33 bp, Homo sapien
atcggtcagaacaaggcccactgcaagaataat

SEQ ID NO: 1030668 - DNA, 33 bp, Homo sapien
atcggtcagaacaagggccactgcaagaataat

SEQ ID NO: 1030669 - DNA, 33 bp, Homo sapien
gaaatgaagacttcacagctaaacagagatacg

SEQ ID NO: 1030670 - DNA, 33 bp, Homo sapien
gaaatgaagacttcacggctaaacagagatacg

SEQ ID NO: 1030671 - DNA, 33 bp, Homo sapien
ggctgatctccaagtgcaggcaggcaccccatc

SEQ ID NO: 1030672 - DNA, 33 bp, Homo sapien
ggctgatctccaagtgtaggcaggcaccccatc

SEQ ID NO: 1030673 - DNA, 33 bp, Homo sapien
acctctttcccaccgacgccagccgaggctctg

SEQ ID NO: 1030674 - DNA, 33 bp, Homo sapien
acctctttcccaccgatgccagccgaggctctg

SEQ ID NO: 1030675 - DNA, 33 bp, Homo sapien
acacaagccctggagacagtaacgtttcggtgg

SEQ ID NO: 1030676 - DNA, 33 bp, Homo sapien
acacaagccctggagatagtaacgtttcggtgg

SEQ ID NO: 1030677 - DNA, 33 bp, Homo sapien
cattatccagttttaacagaaccaacgtgaccc

SEQ ID NO: 1030678 - DNA, 33 bp, Homo sapien
cattatccagttttaatagaaccaacgtgaccc

SEQ ID NO: 1030679 - DNA, 33 bp, Homo sapien
ccctatgaggacctgcaagaaggtgccagagac

SEQ ID NO: 1030680 - DNA, 33 bp, Homo sapien
ccctatgaggacctgcgagaaggtgccagagac

SEQ ID NO: 1030681 - DNA, 33 bp, Homo sapien
ggatcagaaagagggcaagacctggatatgcgg

SEQ ID NO: 1030682 - DNA, 33 bp, Homo sapien
ggatcagaaagagggcgagacctggatatgcgg

SEQ ID NO: 1030683 - DNA, 33 bp, Homo sapien
ctgggggcgttctcaacgacaattggtggctgc

SEQ ID NO: 1030684 - DNA, 33 bp, Homo sapien
ctgggggcgttctcaatgacaattggtggctgc

SEQ ID NO: 1030685 - DNA, 33 bp, Homo sapien
caatttcaatggtctacgttaaaaactcatctt

SEQ ID NO: 1030686 - DNA, 33 bp, Homo sapien
caatttcaatggtctatgttaaaaactcatctt

SEQ ID NO: 1030687 - DNA, 33 bp, Homo sapien
agtaagaacatagtcacgtgacactaagtccac

SEQ ID NO: 1030688 - DNA, 33 bp, Homo sapien
agtaagaacatagtcatgtgacactaagtccac

SEQ ID NO: 1030689 - DNA, 33 bp, Homo sapien
acttgtgcatagagcgaaagaggaatgggatcc

SEQ ID NO: 1030690 - DNA, 33 bp, Homo sapien
acttgtgcatagagcggaagaggaatgggatcc

SEQ ID NO: 1030691 - DNA, 33 bp, Homo sapien
gcagattacgattcagcccatatcaagcaccac

SEQ ID NO: 1030692 - DNA, 33 bp, Homo sapien
gcagattacgattcagtccatatcaagcaccac

SEQ ID NO: 1030693 - DNA, 33 bp, Homo sapien
aagaaaagtgccacataaggagagacacacggg

SEQ ID NO: 1030694 - DNA, 33 bp, Homo sapien
aagaaaagtgccacatgaggagagacacacggg

SEQ ID NO: 1030695 - DNA, 33 bp, Homo sapien
gaataaaaatagaacaactacatgccaccatat

SEQ ID NO: 1030696 - DNA, 33 bp, Homo sapien
gaataaaaatagaacacctacatgccaccatat

SEQ ID NO: 1030697 - DNA, 33 bp, Homo sapien
ctatgcgtcagacaacagtctcatatcaagaat

SEQ ID NO: 1030698 - DNA, 33 bp, Homo sapien
ctatgcgtcagacaacggtctcatatcaagaat

SEQ ID NO: 1030699 - DNA, 33 bp, Homo sapien
tctgatatctgctgtgcaataatggcctagatt

SEQ ID NO: 1030700 - DNA, 33 bp, Homo sapien
tctgatatctgctgtgtaataatggcctagatt

SEQ ID NO: 1030701 - DNA, 33 bp, Homo sapien
actgcttctggtttaccatcctggtagggaagt

SEQ ID NO: 1030702 - DNA, 33 bp, Homo sapien
actgcttctggtttactatcctggtagggaagt

SEQ ID NO: 1030703 - DNA, 33 bp, Homo sapien
acttagcctttcctaccatagtgatcttcactg

SEQ ID NO: 1030704 - DNA, 33 bp, Homo sapien
acttagcctttcctactatagtgatcttcactg

SEQ ID NO: 1030705 - DNA, 33 bp, Homo sapien
tttatcacccagtgcacatattggtgtgtatta

SEQ ID NO: 1030706 - DNA, 33 bp, Homo sapien
tttatcacccagtgcagatattggtgtgtatta

SEQ ID NO: 1030707 - DNA, 33 bp, Homo sapien
cacagagagacaaaaactgtattaaagagacat

SEQ ID NO: 1030708 - DNA, 33 bp, Homo sapien
cacagagagacaaaaagtgtattaaagagacat

SEQ ID NO: 1030709 - DNA, 33 bp, Homo sapien
cataaaggtcaagaaaagagtgactagggcctt

SEQ ID NO: 1030710 - DNA, 33 bp, Homo sapien
cataaaggtcaagaaaggagtgactagggcctt

SEQ ID NO: 1030711 - DNA, 33 bp, Homo sapien
acaaccaacagtgaaaaagtgcttaattatggc

SEQ ID NO: 1030712 - DNA, 33 bp, Homo sapien
acaaccaacagtgaaacagtgcttaattatggc

SEQ ID NO: 1030713 - DNA, 33 bp, Homo sapien
aacactggcaagctaacaggttaaggtctcaga

SEQ ID NO: 1030714 - DNA, 33 bp, Homo sapien
aacactggcaagctaagaggttaaggtctcaga

SEQ ID NO: 1030715 - DNA, 33 bp, Homo sapien
atatttgcatttttcacccaagtttaccatact

SEQ ID NO: 1030716 - DNA, 33 bp, Homo sapien
atatttgcatttttcatccaagtttaccatact

SEQ ID NO: 1030717 - DNA, 33 bp, Homo sapien
tggtctttactgtccaagtttttatcagcattc

SEQ ID NO: 1030718 - DNA, 33 bp, Homo sapien
tggtctttactgtccatgtttttatcagcattc

SEQ ID NO: 1030719 - DNA, 33 bp, Homo sapien
tgtggttggacccttacctaatgtcatgtaaaa

SEQ ID NO: 1030720 - DNA, 33 bp, Homo sapien
tgtggttggacccttatctaatgtcatgtaaaa

SEQ ID NO: 1030721 - DNA, 33 bp, Homo sapien
gcaactggcttccaaaaaatagagtattgaagt

SEQ ID NO: 1030722 - DNA, 33 bp, Homo sapien
gcaactggcttccaaacaatagagtattgaagt

SEQ ID NO: 1030723 - DNA, 33 bp, Homo sapien
tatgtgttgaaaccccaaactccatgtgactat

SEQ ID NO: 1030724 - DNA, 33 bp, Homo sapien
tatgtgttgaaaccccgaactccatgtgactat

SEQ ID NO: 1030725 - DNA, 33 bp, Homo sapien
tttcatcacttaggcaaaactgattgagagaag

SEQ ID NO: 1030726 - DNA, 33 bp, Homo sapien
tttcatcacttaggcacaactgattgagagaag

SEQ ID NO: 1030727 - DNA, 33 bp, Homo sapien
gagggaaataaatgaaatctcagatgcaaccat

SEQ ID NO: 1030728 - DNA, 33 bp, Homo sapien
gagggaaataaatgaagtctcagatgcaaccat

SEQ ID NO: 1030729 - DNA, 33 bp, Homo sapien
gcaccagaatgcgatacagtttctgcgagaaag

SEQ ID NO: 1030730 - DNA, 33 bp, Homo sapien
gcaccagaatgcgatatagtttctgcgagaaag

SEQ ID NO: 1030731 - DNA, 33 bp, Homo sapien
cacttagtgtttgctcacatgggataaatgagt

SEQ ID NO: 1030732 - DNA, 33 bp, Homo sapien
cacttagtgtttgctcgcatgggataaatgagt

SEQ ID NO: 1030733 - DNA, 33 bp, Homo sapien
acatggttttaggagcagattcagataaccaag

SEQ ID NO: 1030734 - DNA, 33 bp, Homo sapien
acatggttttaggagcggattcagataaccaag

SEQ ID NO: 1030735 - DNA, 33 bp, Homo sapien
agaaacaggttttcaccatttaggcaggctggt

SEQ ID NO: 1030736 - DNA, 33 bp, Homo sapien
agaaacaggttttcactatttaggcaggctggt

SEQ ID NO: 1030737 - DNA, 33 bp, Homo sapien
caggaggagtgctgcccatctgaggccacttgg

SEQ ID NO: 1030738 - DNA, 33 bp, Homo sapien
caggaggagtgctgcctatctgaggccacttgg

SEQ ID NO: 1030739 - DNA, 33 bp, Homo sapien
acacactgccttcctcactactgaagtcctgac

SEQ ID NO: 1030740 - DNA, 33 bp, Homo sapien
acacactgccttcctcgctactgaagtcctgac

SEQ ID NO: 1030741 - DNA, 33 bp, Homo sapien
ggttaggtcaataataccaaccaagagttctga

SEQ ID NO: 1030742 - DNA, 33 bp, Homo sapien
ggttaggtcaataatatcaaccaagagttctga

SEQ ID NO: 1030743 - DNA, 33 bp, Homo sapien
tgctaaaataagagaagagacttcagtgaccac

SEQ ID NO: 1030744 - DNA, 33 bp, Homo sapien
tgctaaaataagagaatagacttcagtgaccac

SEQ ID NO: 1030745 - DNA, 33 bp, Homo sapien
tgcacagagtccaaaaatcagccaaaggtgcaa

SEQ ID NO: 1030746 - DNA, 33 bp, Homo sapien
tgcacagagtccaaaagtcagccaaaggtgcaa

SEQ ID NO: 1030747 - DNA, 33 bp, Homo sapien
aaatacatagagccaaatgatccttgacaaaac

SEQ ID NO: 1030748 - DNA, 33 bp, Homo sapien
aaatacatagagccaactgatccttgacaaaac

SEQ ID NO: 1030749 - DNA, 33 bp, Homo sapien
ttcacctctgaaagcaccaagagtcgaaatagg

SEQ ID NO: 1030750 - DNA, 33 bp, Homo sapien
ttcacctctgaaagcatcaagagtcgaaatagg

SEQ ID NO: 1030751 - DNA, 33 bp, Homo sapien
gcgggctgaagtcccaatcttgacataggtgat

SEQ ID NO: 1030752 - DNA, 33 bp, Homo sapien
gcgggctgaagtcccagtcttgacataggtgat

SEQ ID NO: 1030753 - DNA, 33 bp, Homo sapien
aattgtaagctgacaacctttgtctttcatcat

SEQ ID NO: 1030754 - DNA, 33 bp, Homo sapien
aattgtaagctgacaatctttgtctttcatcat

SEQ ID NO: 1030755 - DNA, 33 bp, Homo sapien
tgggctaaacatagcaatgaggcatatttgaca

SEQ ID NO: 1030756 - DNA, 33 bp, Homo sapien
tgggctaaacatagcagtgaggcatatttgaca

SEQ ID NO: 1030757 - DNA, 33 bp, Homo sapien
cgtggtggtggttacacaactatacacatttgt

SEQ ID NO: 1030758 - DNA, 33 bp, Homo sapien
cgtggtggtggttacagaactatacacatttgt

SEQ ID NO: 1030759 - DNA, 33 bp, Homo sapien
ggagggataaggatcacaaggataaaagtctca

SEQ ID NO: 1030760 - DNA, 33 bp, Homo sapien
ggagggataaggatcataaggataaaagtctca

SEQ ID NO: 1030761 - DNA, 33 bp, Homo sapien
acctaacagagcttaaatccaagcctagaaagg

SEQ ID NO: 1030762 - DNA, 33 bp, Homo sapien
acctaacagagcttaactccaagcctagaaagg

SEQ ID NO: 1030763 - DNA, 33 bp, Homo sapien
gtgaattagcatttccactctgtctcgtgggaa

SEQ ID NO: 1030764 - DNA, 33 bp, Homo sapien
gtgaattagcatttcctctctgtctcgtgggaa

SEQ ID NO: 1030765 - DNA, 33 bp, Homo sapien
tgctgtgaatgtagaacgaagtaaaacttgtgt

SEQ ID NO: 1030766 - DNA, 33 bp, Homo sapien
tgctgtgaatgtagaatgaagtaaaacttgtgt

SEQ ID NO: 1030767 - DNA, 33 bp, Homo sapien
aaagttgcctcactacagatatttgtccactac

SEQ ID NO: 1030768 - DNA, 33 bp, Homo sapien
aaagttgcctcactaccgatatttgtccactac

SEQ ID NO: 1030769 - DNA, 33 bp, Homo sapien
agcactgtgtcagtgacccatgaggagccagac

SEQ ID NO: 1030770 - DNA, 33 bp, Homo sapien
agcactgtgtcagtgatccatgaggagccagac

SEQ ID NO: 1030771 - DNA, 33 bp, Homo sapien
ccacctggactgtgcaactgactgactttgagg

SEQ ID NO: 1030772 - DNA, 33 bp, Homo sapien
ccacctggactgtgcagctgactgactttgagg

SEQ ID NO: 1030773 - DNA, 33 bp, Homo sapien
cttttccaggcaaaaaagacaactgataccctc

SEQ ID NO: 1030774 - DNA, 33 bp, Homo sapien
cttttccaggcaaaaaggacaactgataccctc

SEQ ID NO: 1030775 - DNA, 33 bp, Homo sapien
atgcagataaactggggaggaagagagttttta

SEQ ID NO: 1030776 - DNA, 33 bp, Homo sapien
atgcagataaactgggtaggaagagagttttta

SEQ ID NO: 1030777 - DNA, 33 bp, Homo sapien
aaggtactaggggttaagatgtcaacatacgaa

SEQ ID NO: 1030778 - DNA, 33 bp, Homo sapien
aaggtactaggggttaggatgtcaacatacgaa

SEQ ID NO: 1030779 - DNA, 33 bp, Homo sapien
ctgatggaaggatctcaacatccacccttgtaa

SEQ ID NO: 1030780 - DNA, 33 bp, Homo sapien
ctgatggaaggatctcgacatccacccttgtaa

SEQ ID NO: 1030781 - DNA, 33 bp, Homo sapien
aggaaaagtatggggcgattacctggttttata

SEQ ID NO: 1030782 - DNA, 33 bp, Homo sapien
aggaaaagtatggggctattacctggttttata

SEQ ID NO: 1030783 - DNA, 33 bp, Homo sapien
tagtgaataagcaaagcatttggtaagagaaaa

SEQ ID NO: 1030784 - DNA, 33 bp, Homo sapien
tagtgaataagcaaagtatttggtaagagaaaa

SEQ ID NO: 1030785 - DNA, 33 bp, Homo sapien
ttttgatgttatggtaaactttgtccatgcaaa

SEQ ID NO: 1030786 - DNA, 33 bp, Homo sapien
ttttgatgttatggtacactttgtccatgcaaa

SEQ ID NO: 1030787 - DNA, 33 bp, Homo sapien
atatctcagagtaaagactattaaataggacaa

SEQ ID NO: 1030788 - DNA, 33 bp, Homo sapien
atatctcagagtaaaggctattaaataggacaa

SEQ ID NO: 1030789 - DNA, 33 bp, Homo sapien
tttctggctttttttgaagaaaccgaatcaagt

SEQ ID NO: 1030790 - DNA, 33 bp, Homo sapien
tttctggctttttttggagaaaccgaatcaagt

SEQ ID NO: 1030791 - DNA, 33 bp, Homo sapien; identical to SEQ ID NO: 1030789

SEQ ID NO: 1030792 - DNA, 33 bp, Homo sapien; identical to SEQ ID NO: 1030790

SEQ ID NO: 1030793 - DNA, 33 bp, Homo sapien
aataaatagaacccaacgcagagttcacaaata

SEQ ID NO: 1030794 - DNA, 33 bp, Homo sapien
aataaatagaacccaatgcagagttcacaaata

SEQ ID NO: 1030795 - DNA, 33 bp, Homo sapien
gtgtgtgtaggaaaaaacagtatatacagatgg

SEQ ID NO: 1030796 - DNA, 33 bp, Homo sapien
gtgtgtgtaggaaaaagcagtatatacagatgg

SEQ ID NO: 1030797 - DNA, 33 bp, Homo sapien
agtatacctaaaaagaagatggtagcaattgcc

SEQ ID NO: 1030798 - DNA, 33 bp, Homo sapien
agtatacctaaaaagatgatggtagcaattgcc

SEQ ID NO: 1030799 - DNA, 33 bp, Homo sapien
cagttttcatactgctcactgcttttgctaatt

SEQ ID NO: 1030800 - DNA, 33 bp, Homo sapien
cagttttcatactgcttactgcttttgctaatt

SEQ ID NO: 1030801 - DNA, 33 bp, Homo sapien
tggcatataattagtaaacagggcacctttaat

SEQ ID NO: 1030802 - DNA, 33 bp, Homo sapien
tggcatataattagtacacagggcacctttaat

SEQ ID NO: 1030803 - DNA, 33 bp, Homo sapien
aaccagaattagcagaaacataatttatctttt

SEQ ID NO: 1030804 - DNA, 33 bp, Homo sapien
aaccagaattagcagatacataatttatctttt

SEQ ID NO: 1030805 - DNA, 33 bp, Homo sapien
atgtccttgacggctaataatgttattcttctt

SEQ ID NO: 1030806 - DNA, 33 bp, Homo sapien
atgtccttgacggctagtaatgttattcttctt

SEQ ID NO: 1030807 - DNA, 33 bp, Homo sapien
tacagatacgtgctacaacataggtgaaccttg

SEQ ID NO: 1030808 - DNA, 33 bp, Homo sapien
tacagatacgtgctaccacataggtgaaccttg

SEQ ID NO: 1030809 - DNA, 33 bp, Homo sapien
acagctccctgttgaacgtggaaaacaagtgga

SEQ ID NO: 1030810 - DNA, 33 bp, Homo sapien
acagctccctgttgaatgtggaaaacaagtgga

SEQ ID NO: 1030811 - DNA, 33 bp, Homo sapien
cttctgctgaaaagggcatggaaagattgctgc

SEQ ID NO: 1030812 - DNA, 33 bp, Homo sapien
cttctgctgaaaagggtatggaaagattgctgc

SEQ ID NO: 1030813 - DNA, 33 bp, Homo sapien
gactcaaagcaactagaaggaagaatgtgatag

SEQ ID NO: 1030814 - DNA, 33 bp, Homo sapien
gactcaaagcaactaggaggaagaatgtgatag

SEQ ID NO: 1030815 - DNA, 33 bp, Homo sapien
ctcctcttttacttggcagaaatgcacagattc

SEQ ID NO: 1030816 - DNA, 33 bp, Homo sapien
ctcctcttttacttgggagaaatgcacagattc

SEQ ID NO: 1030817 - DNA, 33 bp, Homo sapien
agtttgtaacagcaccaagaagaaatggacatg

SEQ ID NO: 1030818 - DNA, 33 bp, Homo sapien
agtttgtaacagcaccgagaagaaatggacatg

SEQ ID NO: 1030819 - DNA, 33 bp, Homo sapien
tcggcctcccagaatactagcattacaggcgtg

SEQ ID NO: 1030820 - DNA, 33 bp, Homo sapien
tcggcctcccagaatagtagcattacaggcgtg

SEQ ID NO: 1030821 - DNA, 33 bp, Homo sapien
ggcaattatacttcgacgagctttgtggtgttg

SEQ ID NO: 1030822 - DNA, 33 bp, Homo sapien
ggcaattatacttcgatgagctttgtggtgttg

SEQ ID NO: 1030823 - DNA, 33 bp, Homo sapien
ttattttaagtatgtgcagattcaagcaattca

SEQ ID NO: 1030824 - DNA, 33 bp, Homo sapien
ttattttaagtatgtgtagattcaagcaattca

SEQ ID NO: 1030825 - DNA, 33 bp, Homo sapien
gaaaactgctccttcaatcttccctcttcttgt

SEQ ID NO: 1030826 - DNA, 33 bp, Homo sapien
gaaaactgctccttcagtcttccctcttcttgt

SEQ ID NO: 1030827 - DNA, 33 bp, Homo sapien; identical to SEQ ID NO: 1030825

SEQ ID NO: 1030828 - DNA, 33 bp, Homo sapien; identical to SEQ ID NO: 1030826

SEQ ID NO: 1030829 - DNA, 33 bp, Homo sapien
attgaataattgcacacaaatcatgtggtaata

SEQ ID NO: 1030830 - DNA, 33 bp, Homo sapien
attgaataattgcacagaaatcatgtggtaata

SEQ ID NO: 1030831 - DNA, 33 bp, Homo sapien
cttttaaattgttgtcaatctgctaattatgaa

SEQ ID NO: 1030832 - DNA, 33 bp, Homo sapien
cttttaaattgttgtcgatctgctaattatgaa

SEQ ID NO: 1030833 - DNA, 33 bp, Homo sapien
ttcattattgtgttaacccacttaggcctagtg

SEQ ID NO: 1030834 - DNA, 33 bp, Homo sapien
ttcattattgtgttaatccacttaggcctagtg

SEQ ID NO: 1030835 - DNA, 33 bp, Homo sapien
catctctaaaacatagaaagggaccagttattt

SEQ ID NO: 1030836 - DNA, 33 bp, Homo sapien
catctctaaaacatagtaagggaccagttattt

SEQ ID NO: 1030837 - DNA, 33 bp, Homo sapien
gttcatttagggtcctcagacaaggtgcaagac

SEQ ID NO: 1030838 - DNA, 33 bp, Homo sapien
gttcatttagggtccttagacaaggtgcaagac

SEQ ID NO: 1030839 - DNA, 33 bp, Homo sapien
ggcatctgaggtcagaacaaaagtaacttggct

SEQ ID NO: 1030840 - DNA, 33 bp, Homo sapien
ggcatctgaggtcagagcaaaagtaacttggct

SEQ ID NO: 1030841 - DNA, 33 bp, Homo sapien
tgtaggaaatttaataccaaaatgcccagggct

SEQ ID NO: 1030842 - DNA, 33 bp, Homo sapien
tgtaggaaatttaatatcaaaatgcccagggct

SEQ ID NO: 1030843 - DNA, 33 bp, Homo sapien
cctgcagcaatcttaaaagagccgctaaacaaa

SEQ ID NO: 1030844 - DNA, 33 bp, Homo sapien
cctgcagcaatcttaagagagccgctaaacaaa

SEQ ID NO: 1030845 - DNA, 33 bp, Homo sapien
aaatcctctttagaatcaccaagcaaaacccca

SEQ ID NO: 1030846 - DNA, 33 bp, Homo sapien
aaatcctctttagaattaccaagcaaaacccca

SEQ ID NO: 1030847 - DNA, 33 bp, Homo sapien
tctggcctggacaccaaccccagtgctgcgcct

SEQ ID NO: 1030848 - DNA, 33 bp, Homo sapien
tctggcctggacaccacccccagtgctgcgcct

SEQ ID NO: 1030849 - DNA, 33 bp, Homo sapien
acaccagatcctggtcacaagaaacaacagctc

SEQ ID NO: 1030850 - DNA, 33 bp, Homo sapien
acaccagatcctggtcccaagaaacaacagctc

SEQ ID NO: 1030851 - DNA, 33 bp, Homo sapien
cttccttcagtgattcaaggagatctgaagccc

SEQ ID NO: 1030852 - DNA, 33 bp, Homo sapien
cttccttcagtgattcgaggagatctgaagccc

SEQ ID NO: 1030853 - DNA, 33 bp, Homo sapien
taactcaatacaaatgaagcagctaagagtccc

SEQ ID NO: 1030854 - DNA, 33 bp, Homo sapien
taactcaatacaaatgtagcagctaagagtccc

SEQ ID NO: 1030855 - DNA, 33 bp, Homo sapien
ggccagtttgaatcacaaatctatgaatctatc

SEQ ID NO: 1030856 - DNA, 33 bp, Homo sapien
ggccagtttgaatcactaatctatgaatctatc

SEQ ID NO: 1030857 - DNA, 33 bp, Homo sapien
ctccagaaacctagaactggagtacagcattgt

SEQ ID NO: 1030858 - DNA, 33 bp, Homo sapien
ctccagaaacctagaattggagtacagcattgt

SEQ ID NO: 1030859 - DNA, 33 bp, Homo sapien
taactcaccaagttccaaagtttcaaagttcca

SEQ ID NO: 1030860 - DNA, 33 bp, Homo sapien
taactcaccaagttccgaagtttcaaagttcca

SEQ ID NO: 1030861 - DNA, 33 bp, Homo sapien
tgtttttctgacaaaactggaagctgtccacgt

SEQ ID NO: 1030862 - DNA, 33 bp, Homo sapien
tgtttttctgacaaaattggaagctgtccacgt

SEQ ID NO: 1030863 - DNA, 33 bp, Homo sapien
atctgagaactctaataatgagatagcatcaca

SEQ ID NO: 1030864 - DNA, 33 bp, Homo sapien
atctgagaactctaatcatgagatagcatcaca

SEQ ID NO: 1030865 - DNA, 33 bp, Homo sapien
agcatccacccacaggaaaaaagcaaggataat

SEQ ID NO: 1030866 - DNA, 33 bp, Homo sapien
agcatccacccacagggaaaaagcaaggataat

SEQ ID NO: 1030867 - DNA, 33 bp, Homo sapien
acactcatgtctgcaaaaggcataaagagatat

SEQ ID NO: 1030868 - DNA, 33 bp, Homo sapien
acactcatgtctgcaagaggcataaagagatat

SEQ ID NO: 1030869 - DNA, 33 bp, Homo sapien
gggtttctgttacctacgatgaaaatggccttg

SEQ ID NO: 1030870 - DNA, 33 bp, Homo sapien
gggtttctgttacctatgatgaaaatggccttg

SEQ ID NO: 1030871 - DNA, 33 bp, Homo sapien
ctcctctgaagccatgcatttttgtacaggttc

SEQ ID NO: 1030872 - DNA, 33 bp, Homo sapien
ctcctctgaagccatgtatttttgtacaggttc

SEQ ID NO: 1030873 - DNA, 33 bp, Homo sapien
ccagcaatagattacccgatgcaaatgtgagac

SEQ ID NO: 1030874 - DNA, 33 bp, Homo sapien
ccagcaatagattacctgatgcaaatgtgagac

SEQ ID NO: 1030875 - DNA, 33 bp, Homo sapien
tgttggatggagcttcacctattctaaaagcaa

SEQ ID NO: 1030876 - DNA, 33 bp, Homo sapien
tgttggatggagcttcgcctattctaaaagcaa

SEQ ID NO: 1030877 - DNA, 33 bp, Homo sapien
aaagttaatatttaaaagtgaatgccaagacgt

SEQ ID NO: 1030878 - DNA, 33 bp, Homo sapien
aaagttaatatttaaaggtgaatgccaagacgt

SEQ ID NO: 1030879 - DNA, 33 bp, Homo sapien
ggctgttttcctgagacgaatgggtgtgccaac

SEQ ID NO: 1030880 - DNA, 33 bp, Homo sapien
ggctgttttcctgagatgaatgggtgtgccaac

SEQ ID NO: 1030881 - DNA, 33 bp, Homo sapien
tccagtgtttcttgaaccattaatagaagcctt

SEQ ID NO: 1030882 - DNA, 33 bp, Homo sapien
tccagtgtttcttgaagcattaatagaagcctt

SEQ ID NO: 1030883 - DNA, 33 bp, Homo sapien
cggctgtcttctcaataaaccagaagtgacttt

SEQ ID NO: 1030884 - DNA, 33 bp, Homo sapien
cggctgtcttctcaatgaaccagaagtgacttt

SEQ ID NO: 1030885 - DNA, 33 bp, Homo sapien
tttcttctgtcaaacacctgagaggaccccata

SEQ ID NO: 1030886 - DNA, 33 bp, Homo sapien
tttcttctgtcaaacagctgagaggaccccata

SEQ ID NO: 1030887 - DNA, 33 bp, Homo sapien
taaaacgcataccttacgtagccaaaattaaca

SEQ ID NO: 1030888 - DNA, 33 bp, Homo sapien
taaaacgcataccttatgtagccaaaattaaca

SEQ ID NO: 1030889 - DNA, 33 bp, Homo sapien
ggtgtgaaaggtactgacacattttttaaacaa

SEQ ID NO: 1030890 - DNA, 33 bp, Homo sapien
ggtgtgaaaggtactggcacattttttaaacaa

SEQ ID NO: 1030891 - DNA, 33 bp, Homo sapien
tacccatgtaacgaagcaaacacttacatactg

SEQ ID NO: 1030892 - DNA, 33 bp, Homo sapien
tacccatgtaacgaaggaaacacttacatactg

SEQ ID NO: 1030893 - DNA, 33 bp, Homo sapien
tcctgtggcactaaccacccccacagaggggaa

SEQ ID NO: 1030894 - DNA, 33 bp, Homo sapien
tcctgtggcactaaccgcccccacagaggggaa

SEQ ID NO: 1030895 - DNA, 33 bp, Homo sapien
gcaataataatagctcacgtttgttaaggctta

SEQ ID NO: 1030896 - DNA, 33 bp, Homo sapien
gcaataataatagctcgcgtttgttaaggctta

SEQ ID NO: 1030897 - DNA, 33 bp, Homo sapien
tgctgtgtttcacctccactggttccaaccggc

SEQ ID NO: 1030898 - DNA, 33 bp, Homo sapien
tgctgtgtttcacctctactggttccaaccggc

SEQ ID NO: 1030899 - DNA, 33 bp, Homo sapien
tacccaggtataacgacctgcatctcaaggtca

SEQ ID NO: 1030900 - DNA, 33 bp, Homo sapien
tacccaggtataacgagctgcatctcaaggtca

SEQ ID NO: 1030901 - DNA, 33 bp, Homo sapien
ggtcagaacgactgaaaaataaagaggttggtt

SEQ ID NO: 1030902 - DNA, 33 bp, Homo sapien
ggtcagaacgactgaacaataaagaggttggtt

SEQ ID NO: 1030903 - DNA, 33 bp, Homo sapien
ggcctaacttgacttacacatgtgccaaaagtt

SEQ ID NO: 1030904 - DNA, 33 bp, Homo sapien
ggcctaacttgacttatacatgtgccaaaagtt

SEQ ID NO: 1030905 - DNA, 33 bp, Homo sapien
cttttaatttgcgtcccccagggagatggattt

SEQ ID NO: 1030906 - DNA, 33 bp, Homo sapien
cttttaatttgcgtccgccagggagatggattt

SEQ ID NO: 1030907 - DNA, 33 bp, Homo sapien
tgtatccatttttagcaaagttttccaagccta

SEQ ID NO: 1030908 - DNA, 33 bp, Homo sapien
tgtatccatttttagcgaagttttccaagccta

SEQ ID NO: 1030909 - DNA, 33 bp, Homo sapien
acaaggacaggagctcaagtcgcccagcctggc

SEQ ID NO: 1030910 - DNA, 33 bp, Homo sapien
acaaggacaggagctcgagtcgcccagcctggc

SEQ ID NO: 1030911 - DNA, 33 bp, Homo sapien
aatgttatcgagtacaatacaaacagtgcaatt

SEQ ID NO: 1030912 - DNA, 33 bp, Homo sapien
aatgttatcgagtacagtacaaacagtgcaatt

SEQ ID NO: 1030913 - DNA, 33 bp, Homo sapien
gcccagctgtcagttggacatctcagtcaacac

SEQ ID NO: 1030914 - DNA, 33 bp, Homo sapien
gcccagctgtcagttgtacatctcagtcaacac

SEQ ID NO: 1030915 - DNA, 33 bp, Homo sapien
gaaactacagcttgacaaagtgaaataatttcc

SEQ ID NO: 1030916 - DNA, 33 bp, Homo sapien
gaaactacagcttgaccaagtgaaataatttcc

SEQ ID NO: 1030917 - DNA, 33 bp, Homo sapien
gtggcctgaattaatacgagtgttgcatttgag

SEQ ID NO: 1030918 - DNA, 33 bp, Homo sapien
gtggcctgaattaatatgagtgttgcatttgag

SEQ ID NO: 1030919 - DNA, 33 bp, Homo sapien
gcctgggtggagctaacgcagacgtgacattta

SEQ ID NO: 1030920 - DNA, 33 bp, Homo sapien
gcctgggtggagctaatgcagacgtgacattta

SEQ ID NO: 1030921 - DNA, 33 bp, Homo sapien
agcatagctttgagagaacccaagcaaaactgt

SEQ ID NO: 1030922 - DNA, 33 bp, Homo sapien
agcatagctttgagaggacccaagcaaaactgt

SEQ ID NO: 1030923 - DNA, 33 bp, Homo sapien
taatagagttgggttacagggttcggtagagta

SEQ ID NO: 1030924 - DNA, 33 bp, Homo sapien
taatagagttgggttatagggttcggtagagta

SEQ ID NO: 1030925 - DNA, 33 bp, Homo sapien
tttgctatcccagctgaagtgcaggctcaaact

SEQ ID NO: 1030926 - DNA, 33 bp, Homo sapien
tttgctatcccagctggagtgcaggctcaaact

SEQ ID NO: 1030927 - DNA, 33 bp, Homo sapien
gatcattgattgggtcaagttacaaagaagaga

SEQ ID NO: 1030928 - DNA, 33 bp, Homo sapien
gatcattgattgggtcgagttacaaagaagaga

SEQ ID NO: 1030929 - DNA, 33 bp, Homo sapien
ctgtggcatctcataccactaactttccaccac

SEQ ID NO: 1030930 - DNA, 33 bp, Homo sapien
ctgtggcatctcatactactaactttccaccac

SEQ ID NO: 1030931 - DNA, 33 bp, Homo sapien
tctcattctaacactcaaaagagttcaatgaaa

SEQ ID NO: 1030932 - DNA, 33 bp, Homo sapien
tctcattctaacactcgaaagagttcaatgaaa

SEQ ID NO: 1030933 - DNA, 33 bp, Homo sapien
tataaatcaagccacaactgacagtgatttgct

SEQ ID NO: 1030934 - DNA, 33 bp, Homo sapien
tataaatcaagccacagctgacagtgatttgct

SEQ ID NO: 1030935 - DNA, 33 bp, Homo sapien
acttgtcttagattcacggatgacctaaatcat

SEQ ID NO: 1030936 - DNA, 33 bp, Homo sapien
acttgtcttagattcatggatgacctaaatcat

SEQ ID NO: 1030937 - DNA, 33 bp, Homo sapien
tgtttctgattacataaaaatagccaatggatt

SEQ ID NO: 1030938 - DNA, 33 bp, Homo sapien
tgtttctgattacatagaaatagccaatggatt

SEQ ID NO: 1030939 - DNA, 33 bp, Homo sapien
aagtgattgttattctcacaagttcttcctcaa

SEQ ID NO: 1030940 - DNA, 33 bp, Homo sapien
aagtgattgttattctgacaagttcttcctcaa

SEQ ID NO: 1030941 - DNA, 33 bp, Homo sapien
aactatatggagggccaattccctgcttaccca

SEQ ID NO: 1030942 - DNA, 33 bp, Homo sapien
aactatatggagggccgattccctgcttaccca

SEQ ID NO: 1030943 - DNA, 33 bp, Homo sapien
tgcaaacctgaaatcaatctacagttgggtagc

SEQ ID NO: 1030944 - DNA, 33 bp, Homo sapien
tgcaaacctgaaatcagtctacagttgggtagc

SEQ ID NO: 1030945 - DNA, 33 bp, Homo sapien
gctaaagaggacataacactgaactgggaagga

SEQ ID NO: 1030946 - DNA, 33 bp, Homo sapien
gctaaagaggacataatactgaactgggaagga

SEQ ID NO: 1030947 - DNA, 33 bp, Homo sapien
gatttcagacatttgaacccattcatggacacc

SEQ ID NO: 1030948 - DNA, 33 bp, Homo sapien
gatttcagacatttgagcccattcatggacacc

SEQ ID NO: 1030949 - DNA, 33 bp, Homo sapien
cactcacttagaaaaccggaaggtgtagacgcg

SEQ ID NO: 1030950 - DNA, 33 bp, Homo sapien
cactcacttagaaaactggaaggtgtagacgcg

SEQ ID NO: 1030951 - DNA, 33 bp, Homo sapien
gtcttgctaatgaatcccgacctggctgtgaaa

SEQ ID NO: 1030952 - DNA, 33 bp, Homo sapien
gtcttgctaatgaatcgcgacctggctgtgaaa

SEQ ID NO: 1030953 - DNA, 33 bp, Homo sapien
aaaagcttgaagtctgaaacagttgattccaaa

SEQ ID NO: 1030954 - DNA, 33 bp, Homo sapien
aaaagcttgaagtctgcaacagttgattccaaa

SEQ ID NO: 1030955 - DNA, 33 bp, Homo sapien
tctctgtggtttaacacgatctgaaagctttgc

SEQ ID NO: 1030956 - DNA, 33 bp, Homo sapien
tctctgtggtttaacatgatctgaaagctttgc

SEQ ID NO: 1030957 - DNA, 33 bp, Homo sapien
aaaacctcaagcaaagcctcgaccataaataaa

SEQ ID NO: 1030958 - DNA, 33 bp, Homo sapien
aaaacctcaagcaaagtctcgaccataaataaa

SEQ ID NO: 1030959 - DNA, 33 bp, Homo sapien
catattataactaagaagacaatggcaggtttc

SEQ ID NO: 1030960 - DNA, 33 bp, Homo sapien
catattataactaagaggacaatggcaggtttc

SEQ ID NO: 1030961 - DNA, 33 bp, Homo sapien
ggtcagtgaggtcttaaaatggctttccttagc

SEQ ID NO: 1030962 - DNA, 33 bp, Homo sapien
ggtcagtgaggtcttagaatggctttccttagc

SEQ ID NO: 1030963 - DNA, 33 bp, Homo sapien
caacatgcttcactataaggaaaaactataaag

SEQ ID NO: 1030964 - DNA, 33 bp, Homo sapien
caacatgcttcactatgaggaaaaactataaag

SEQ ID NO: 1030965 - DNA, 33 bp, Homo sapien
ctttgggaatgagccacctgcagtttttgcctt

SEQ ID NO: 1030966 - DNA, 33 bp, Homo sapien
ctttgggaatgagccagctgcagtttttgcctt

SEQ ID NO: 1030967 - DNA, 33 bp, Homo sapien
gattgcacatctatgaaaaaaggcaaaaactgc

SEQ ID NO: 1030968 - DNA, 33 bp, Homo sapien
gattgcacatctatgagaaaaggcaaaaactgc

SEQ ID NO: 1030969 - DNA, 33 bp, Homo sapien
cattattaacattccacaaaactagtcttcctt

SEQ ID NO: 1030970 - DNA, 33 bp, Homo sapien
cattattaacattccataaaactagtcttcctt

SEQ ID NO: 1030971 - DNA, 33 bp, Homo sapien
acccttgttaattgcaaaataaacagatctcaa

SEQ ID NO: 1030972 - DNA, 33 bp, Homo sapien
acccttgttaattgcagaataaacagatctcaa

SEQ ID NO: 1030973 - DNA, 33 bp, Homo sapien
acaggtaaaattcagacagatgaacctggacca

SEQ ID NO: 1030974 - DNA, 33 bp, Homo sapien
acaggtaaaattcagagagatgaacctggacca

SEQ ID NO: 1030975 - DNA, 33 bp, Homo sapien
tctctccactaaccaaattgccatacaatttct

SEQ ID NO: 1030976 - DNA, 33 bp, Homo sapien
tctctccactaaccaagttgccatacaatttct

SEQ ID NO: 1030977 - DNA, 33 bp, Homo sapien
cagcagttcctgcaacagtcaaggttctaacag

SEQ ID NO: 1030978 - DNA, 33 bp, Homo sapien
cagcagttcctgcaacggtcaaggttctaacag

SEQ ID NO: 1030979 - DNA, 33 bp, Homo sapien
agagctttgaataataagtttctttagtgcaat

SEQ ID NO: 1030980 - DNA, 33 bp, Homo sapien
agagctttgaataatacgtttctttagtgcaat

SEQ ID NO: 1030981 - DNA, 33 bp, Homo sapien
gagtgaaattgtggcaacagggataatggttca

SEQ ID NO: 1030982 - DNA, 33 bp, Homo sapien
gagtgaaattgtggcaccagggataatggttca

SEQ ID NO: 1030983 - DNA, 33 bp, Homo sapien
ggaagaggcatggtaaaaggataaggagtgtag

SEQ ID NO: 1030984 - DNA, 33 bp, Homo sapien
ggaagaggcatggtaataggataaggagtgtag

SEQ ID NO: 1030985 - DNA, 33 bp, Homo sapien
ttctagattcttctaccgctctttgtttttgtc

SEQ ID NO: 1030986 - DNA, 33 bp, Homo sapien
ttctagattcttctactgctctttgtttttgtc

SEQ ID NO: 1030987 - DNA, 33 bp, Homo sapien
agatgatgggaaggtacatttgagggaaaccaa

SEQ ID NO: 1030988 - DNA, 33 bp, Homo sapien
agatgatgggaaggtatatttgagggaaaccaa

SEQ ID NO: 1030989 - DNA, 33 bp, Homo sapien
cattgccaactgagtacatgggcttcagttttt

SEQ ID NO: 1030990 - DNA, 33 bp, Homo sapien
cattgccaactgagtatatgggcttcagttttt

SEQ ID NO: 1030991 - DNA, 33 bp, Homo sapien
aaactggcctaagcgacgatgggtcttttcctc

SEQ ID NO: 1030992 - DNA, 33 bp, Homo sapien
aaactggcctaagcgatgatgggtcttttcctc

SEQ ID NO: 1030993 - DNA, 33 bp, Homo sapien
cataaattgatgggcacattaaattcaagagct

SEQ ID NO: 1030994 - DNA, 33 bp, Homo sapien
cataaattgatgggcatattaaattcaagagct

SEQ ID NO: 1030995 - DNA, 33 bp, Homo sapien
aatatagaatccataacgttattttgctaaaac

SEQ ID NO: 1030996 - DNA, 33 bp, Homo sapien
aatatagaatccataatgttattttgctaaaac

SEQ ID NO: 1030997 - DNA, 33 bp, Homo sapien
taggctgctttagcacgaatggtcataacaact

SEQ ID NO: 1030998 - DNA, 33 bp, Homo sapien
taggctgctttagcactaatggtcataacaact

SEQ ID NO: 1030999 - DNA, 33 bp, Homo sapien
tgactctagaaccataagtttcctataggtgtc

SEQ ID NO: 1031000 - DNA, 33 bp, Homo sapien
tgactctagaaccatatgtttcctataggtgtc

SEQ ID NO: 1031001 - DNA, 33 bp, Homo sapien
attctgaaggctgttcaatttgcaaatcatttt

SEQ ID NO: 1031002 - DNA, 33 bp, Homo sapien
attctgaaggctgttcgatttgcaaatcatttt

SEQ ID NO: 1031003 - DNA, 33 bp, Homo sapien
ttagttggatttaacaatatagatcatgatgta

SEQ ID NO: 1031004 - DNA, 33 bp, Homo sapien
ttagttggatttaacagtatagatcatgatgta

SEQ ID NO: 1031005 - DNA, 33 bp, Homo sapien
atgttctgaccaaatacacattaaggctaactt

SEQ ID NO: 1031006 - DNA, 33 bp, Homo sapien
atgttctgaccaaatagacattaaggctaactt

SEQ ID NO: 1031007 - DNA, 33 bp, Homo sapien
aaaaaaaaaaaatcagacactggtgcaaagtgc

SEQ ID NO: 1031008 - DNA, 33 bp, Homo sapien
aaaaaaaaaaaatcaggcactggtgcaaagtgc

SEQ ID NO: 1031009 - DNA, 33 bp, Homo sapien
gtgtgtgaacattcctaagacgtccataagctg

SEQ ID NO: 1031010 - DNA, 33 bp, Homo sapien
gtgtgtgaacattcctgagacgtccataagctg

SEQ ID NO: 1031011 - DNA, 33 bp, Homo sapien
ctacaacagttatacacgcattattttctctct

SEQ ID NO: 1031012 - DNA, 33 bp, Homo sapien
ctacaacagttatacatgcattattttctctct

SEQ ID NO: 1031013 - DNA, 33 bp, Homo sapien
ctgagagaaagtgggccgatccaagcacagcat

SEQ ID NO: 1031014 - DNA, 33 bp, Homo sapien
ctgagagaaagtgggctgatccaagcacagcat

SEQ ID NO: 1031015 - DNA, 33 bp, Homo sapien
tattccttcctgttaaaaggtggttgccatttg

SEQ ID NO: 1031016 - DNA, 33 bp, Homo sapien
tattccttcctgttaagaggtggttgccatttg

SEQ ID NO: 1031017 - DNA, 33 bp, Homo sapien
aacgctgctcacgttacgaagcctcaaaccagg

SEQ ID NO: 1031018 - DNA, 33 bp, Homo sapien
aacgctgctcacgttatgaagcctcaaaccagg

SEQ ID NO: 1031019 - DNA, 33 bp, Homo sapien
acttctgacctgacgaactgtaaaataataaat

SEQ ID NO: 1031020 - DNA, 33 bp, Homo sapien
acttctgacctgacgagctgtaaaataataaat

SEQ ID NO: 1031021 - DNA, 33 bp, Homo sapien
taagtataagggatcacctggctattggggatt

SEQ ID NO: 1031022 - DNA, 33 bp, Homo sapien
taagtataagggatcatctggctattggggatt

SEQ ID NO: 1031023 - DNA, 33 bp, Homo sapien
tctagccagggccgccaagtgctgggtcgctcc

SEQ ID NO: 1031024 - DNA, 33 bp, Homo sapien
tctagccagggccgccgagtgctgggtcgctcc

SEQ ID NO: 1031025 - DNA, 33 bp, Homo sapien
gccctttctaactaaacctgtcaacagtaaact

SEQ ID NO: 1031026 - DNA, 33 bp, Homo sapien
gccctttctaactaaatctgtcaacagtaaact

SEQ ID NO: 1031027 - DNA, 33 bp, Homo sapien
tcttcaatttggcatccgaggagctccatgact

SEQ ID NO: 1031028 - DNA, 33 bp, Homo sapien
tcttcaatttggcatctgaggagctccatgact

SEQ ID NO: 1031029 - DNA, 33 bp, Homo sapien
gttgatgctactggagcctcagtcagaacatag

SEQ ID NO: 1031030 - DNA, 33 bp, Homo sapien
gttgatgctactggaggctcagtcagaacatag

SEQ ID NO: 1031031 - DNA, 33 bp, Homo sapien
tagtcaggtttttcaacacttaatagtggtctg

SEQ ID NO: 1031032 - DNA, 33 bp, Homo sapien
tagtcaggtttttcaatacttaatagtggtctg

SEQ ID NO: 1031033 - DNA, 33 bp, Homo sapien
tctttctgccttccaacgctcgtccctttcact

SEQ ID NO: 1031034 - DNA, 33 bp, Homo sapien
tctttctgccttccaatgctcgtccctttcact

SEQ ID NO: 1031035 - DNA, 33 bp, Homo sapien
atgcctgtatttgctcactcagttgatttccaa

SEQ ID NO: 1031036 - DNA, 33 bp, Homo sapien
atgcctgtatttgctcgctcagttgatttccaa

SEQ ID NO: 1031037 - DNA, 33 bp, Homo sapien
cttcgtaaagagatgaacaattggttactttct

SEQ ID NO: 1031038 - DNA, 33 bp, Homo sapien
cttcgtaaagagatgatcaattggttactttct

SEQ ID NO: 1031039 - DNA, 33 bp, Homo sapien
cagattttataaagtgcattgaaagcaaggctg

SEQ ID NO: 1031040 - DNA, 33 bp, Homo sapien
cagattttataaagtgtattgaaagcaaggctg

SEQ ID NO: 1031041 - DNA, 33 bp, Homo sapien
tctaaagtcagctgaaattattttgctttcatg

SEQ ID NO: 1031042 - DNA, 33 bp, Homo sapien
tctaaagtcagctgaatttattttgctttcatg

SEQ ID NO: 1031043 - DNA, 33 bp, Homo sapien
tgaaatctgaacatcacggcattgagtgcgtca

SEQ ID NO: 1031044 - DNA, 33 bp, Homo sapien
tgaaatctgaacatcatggcattgagtgcgtca

SEQ ID NO: 1031045 - DNA, 33 bp, Homo sapien
catgcctgatgtgtgcaatgaatatgccttatc

SEQ ID NO: 1031046 - DNA, 33 bp, Homo sapien
catgcctgatgtgtgcgatgaatatgccttatc

SEQ ID NO: 1031047 - DNA, 33 bp, Homo sapien
ttaccctgacctgtgagacacttgttggctggc

SEQ ID NO: 1031048 - DNA, 33 bp, Homo sapien
ttaccctgacctgtgatacacttgttggctggc

SEQ ID NO: 1031049 - DNA, 33 bp, Homo sapien
agtggtttctactctcaagtgcttattagagtc

SEQ ID NO: 1031050 - DNA, 33 bp, Homo sapien
agtggtttctactctcgagtgcttattagagtc

SEQ ID NO: 1031051 - DNA, 33 bp, Homo sapien
atgttggcaatagaacacttctgaaaccagtgg

SEQ ID NO: 1031052 - DNA, 33 bp, Homo sapien
atgttggcaatagaacgcttctgaaaccagtgg

SEQ ID NO: 1031053 - DNA, 33 bp, Homo sapien
tccatattcataactgaactacttaaaattaca

SEQ ID NO: 1031054 - DNA, 33 bp, Homo sapien
tccatattcataactggactacttaaaattaca

SEQ ID NO: 1031055 - DNA, 33 bp, Homo sapien
atttacatatacatcaatcaaacccctatctgt

SEQ ID NO: 1031056 - DNA, 33 bp, Homo sapien
atttacatatacatcagtcaaacccctatctgt

SEQ ID NO: 1031057 - DNA, 33 bp, Homo sapien
tttcatgacaaaagtgcactctagttttctgtg

SEQ ID NO: 1031058 - DNA, 33 bp, Homo sapien
tttcatgacaaaagtgtactctagttttctgtg

SEQ ID NO: 1031059 - DNA, 33 bp, Homo sapien
tgtcctgagcaactgaagaattccagaaacctt

SEQ ID NO: 1031060 - DNA, 33 bp, Homo sapien
tgtcctgagcaactgacgaattccagaaacctt

SEQ ID NO: 1031061 - DNA, 33 bp, Homo sapien
actcacacaggggtcaaataccatatctagaaa

SEQ ID NO: 1031062 - DNA, 33 bp, Homo sapien
actcacacaggggtcagataccatatctagaaa

SEQ ID NO: 1031063 - DNA, 33 bp, Homo sapien
tattaggcttaaccacgcggagcttacttatta

SEQ ID NO: 1031064 - DNA, 33 bp, Homo sapien
tattaggcttaaccactcggagcttacttatta

SEQ ID NO: 1031065 - DNA, 33 bp, Homo sapien
gagagaggtaaaagcacatgttcatttaacaac

SEQ ID NO: 1031066 - DNA, 33 bp, Homo sapien
gagagaggtaaaagcatatgttcatttaacaac

SEQ ID NO: 1031067 - DNA, 33 bp, Homo sapien
tgtggagaaactgggaaccttgttcatcactgg

SEQ ID NO: 1031068 - DNA, 33 bp, Homo sapien
tgtggagaaactgggacccttgttcatcactgg

SEQ ID NO: 1031069 - DNA, 33 bp, Homo sapien
agtatccatttcagtgaaacccataaagtagag

SEQ ID NO: 1031070 - DNA, 33 bp, Homo sapien
agtatccatttcagtgtaacccataaagtagag

SEQ ID NO: 1031071 - DNA, 33 bp, Homo sapien
aatcctgttcaagcccaattctccgggtagggg

SEQ ID NO: 1031072 - DNA, 33 bp, Homo sapien
aatcctgttcaagcccgattctccgggtagggg

SEQ ID NO: 1031073 - DNA, 33 bp, Homo sapien
acttaggaataaataactggcacccaaatcagt

SEQ ID NO: 1031074 - DNA, 33 bp, Homo sapien
acttaggaataaataattggcacccaaatcagt

SEQ ID NO: 1031075 - DNA, 33 bp, Homo sapien
actagtggtaaggaaccgtctccgagattaaca

SEQ ID NO: 1031076 - DNA, 33 bp, Homo sapien
actagtggtaaggaactgtctccgagattaaca

SEQ ID NO: 1031077 - DNA, 33 bp, Homo sapien
aaaaatactaaaaaatgatgcaagtgtgatggt

SEQ ID NO: 1031078 - DNA, 33 bp, Homo sapien
aaaaatactaaaaaattatgcaagtgtgatggt

SEQ ID NO: 1031079 - DNA, 33 bp, Homo sapien
gaagcacgaggaccacaatcatccatagaaaaa

SEQ ID NO: 1031080 - DNA, 33 bp, Homo sapien
gaagcacgaggaccacgatcatccatagaaaaa

SEQ ID NO: 1031081 - DNA, 33 bp, Homo sapien
cactgattcaacttccaaaaagcaaaatggaga

SEQ ID NO: 1031082 - DNA, 33 bp, Homo sapien
cactgattcaacttccgaaaagcaaaatggaga

SEQ ID NO: 1031083 - DNA, 33 bp, Homo sapien
ttcttatactttgacaatactgatttgatcttt

SEQ ID NO: 1031084 - DNA, 33 bp, Homo sapien
ttcttatactttgacagtactgatttgatcttt

SEQ ID NO: 1031085 - DNA, 33 bp, Homo sapien
caaattttttccttcaagagccagatattgagc

SEQ ID NO: 1031086 - DNA, 33 bp, Homo sapien
caaattttttccttcaggagccagatattgagc

SEQ ID NO: 1031087 - DNA, 33 bp, Homo sapien
tcatagactaccctgcaaccattaatacaagga

SEQ ID NO: 1031088 - DNA, 33 bp, Homo sapien
tcatagactaccctgcgaccattaatacaagga

SEQ ID NO: 1031089 - DNA, 33 bp, Homo sapien
gccacacaggctctccacgtggtaattctggga

SEQ ID NO: 1031090 - DNA, 33 bp, Homo sapien
gccacacaggctctccgcgtggtaattctggga

SEQ ID NO: 1031091 - DNA, 33 bp, Homo sapien
cgttagtgtctgtgtccaggatgtcgttccaga

SEQ ID NO: 1031092 - DNA, 33 bp, Homo sapien
cgttagtgtctgtgtctaggatgtcgttccaga

SEQ ID NO: 1031093 - DNA, 33 bp, Homo sapien
cacggagtccaggggaataacagcctggttgga

SEQ ID NO: 1031094 - DNA, 33 bp, Homo sapien
cacggagtccaggggagtaacagcctggttgga

SEQ ID NO: 1031095 - DNA, 33 bp, Homo sapien
attatttaaaaattcaaagtcttagaaccaaga

SEQ ID NO: 1031096 - DNA, 33 bp, Homo sapien
attatttaaaaattcagagtcttagaaccaaga

SEQ ID NO: 1031097 - DNA, 33 bp, Homo sapien
accagatcacaccccccgccaacgtcaaataga

SEQ ID NO: 1031098 - DNA, 33 bp, Homo sapien
accagatcacaccccctgccaacgtcaaataga

SEQ ID NO: 1031099 - DNA, 33 bp, Homo sapien
ttttcagtggcaaaataatagtaactgggctat

SEQ ID NO: 1031100 - DNA, 33 bp, Homo sapien
ttttcagtggcaaaatgatagtaactgggctat

SEQ ID NO: 1031101 - DNA, 33 bp, Homo sapien
gaggtaggggttctataagctcaggaaaagtgg

SEQ ID NO: 1031102 - DNA, 33 bp, Homo sapien
gaggtaggggttctatgagctcaggaaaagtgg

SEQ ID NO: 1031103 - DNA, 33 bp, Homo sapien
aagagccacagtgaacagtccggtctttagtta

SEQ ID NO: 1031104 - DNA, 33 bp, Homo sapien
aagagccacagtgaacggtccggtctttagtta

SEQ ID NO: 1031105 - DNA, 33 bp, Homo sapien
ctaactgtatgatctcagagaagttaacctcag

SEQ ID NO: 1031106 - DNA, 33 bp, Homo sapien
ctaactgtatgatctcggagaagttaacctcag

SEQ ID NO: 1031107 - DNA, 33 bp, Homo sapien
atgtaaaatgttatacgcagaaatgatctcatc

SEQ ID NO: 1031108 - DNA, 33 bp, Homo sapien
atgtaaaatgttatactcagaaatgatctcatc

SEQ ID NO: 1031109 - DNA, 33 bp, Homo sapien
aattggccaattttctaacaacacaattttaaa

SEQ ID NO: 1031110 - DNA, 33 bp, Homo sapien
aattggccaattttcttacaacacaattttaaa

SEQ ID NO: 1031111 - DNA, 33 bp, Homo sapien
gaggtaggatcaaggagaacttttttcttttta

SEQ ID NO: 1031112 - DNA, 33 bp, Homo sapien
gaggtaggatcaaggataacttttttcttttta

SEQ ID NO: 1031113 - DNA, 33 bp, Homo sapien
tcccagatttgagagacaagcaagtctgttaca

SEQ ID NO: 1031114 - DNA, 33 bp, Homo sapien
tcccagatttgagagagaagcaagtctgttaca

SEQ ID NO: 1031115 - DNA, 33 bp, Homo sapien
ccgtataggaaaaagccgatgtctaggttggac

SEQ ID NO: 1031116 - DNA, 33 bp, Homo sapien
ccgtataggaaaaagctgatgtctaggttggac

SEQ ID NO: 1031117 - DNA, 33 bp, Homo sapien
ggagcagatagctactaacttgtataaatcatc

SEQ ID NO: 1031118 - DNA, 33 bp, Homo sapien
ggagcagatagctactgacttgtataaatcatc

SEQ ID NO: 1031119 - DNA, 33 bp, Homo sapien
tatgtctggatgcagacatttcaggttacaatc

SEQ ID NO: 1031120 - DNA, 33 bp, Homo sapien
tatgtctggatgcagatatttcaggttacaatc

SEQ ID NO: 1031121 - DNA, 33 bp, Homo sapien
tctgcatccagacatacacccagagaaactctt

SEQ ID NO: 1031122 - DNA, 33 bp, Homo sapien
tctgcatccagacatatacccagagaaactctt

SEQ ID NO: 1031123 - DNA, 33 bp, Homo sapien
aactatacgctacctacgaaaaacccactttaa

SEQ ID NO: 1031124 - DNA, 33 bp, Homo sapien
aactatacgctacctatgaaaaacccactttaa

SEQ ID NO: 1031125 - DNA, 33 bp, Homo sapien
ctagagctaaaaagcccgagagtgagcctgcct

SEQ ID NO: 1031126 - DNA, 33 bp, Homo sapien
ctagagctaaaaagcctgagagtgagcctgcct

SEQ ID NO: 1031127 - DNA, 33 bp, Homo sapien
catgtttagtttgagacactcatggtcacccaa

SEQ ID NO: 1031128 - DNA, 33 bp, Homo sapien
catgtttagtttgagatactcatggtcacccaa

SEQ ID NO: 1031129 - DNA, 33 bp, Homo sapien
ttgtcagcttttcagacattatattccgcagag

SEQ ID NO: 1031130 - DNA, 33 bp, Homo sapien
ttgtcagcttttcagatattatattccgcagag

SEQ ID NO: 1031131 - DNA, 33 bp, Homo sapien
gtttgactagttgggcactttcttcctggaagg

SEQ ID NO: 1031132 - DNA, 33 bp, Homo sapien
gtttgactagttgggcgctttcttcctggaagg

SEQ ID NO: 1031133 - DNA, 33 bp, Homo sapien
tgctaaggaaagatcacagacagatacaagttc

SEQ ID NO: 1031134 - DNA, 33 bp, Homo sapien
tgctaaggaaagatcatagacagatacaagttc

SEQ ID NO: 1031135 - DNA, 33 bp, Homo sapien
agtaaggctatttcaaaggagaatgagtgtgaa

SEQ ID NO: 1031136 - DNA, 33 bp, Homo sapien
agtaaggctatttcaacggagaatgagtgtgaa

SEQ ID NO: 1031137 - DNA, 33 bp, Homo sapien
agatagggggtccagaaagcaggttttggattt

SEQ ID NO: 1031138 - DNA, 33 bp, Homo sapien
agatagggggtccagacagcaggttttggattt

SEQ ID NO: 1031139 - DNA, 33 bp, Homo sapien
gatttcaccttctccaagtatgcagactaaaaa

SEQ ID NO: 1031140 - DNA, 33 bp, Homo sapien
gatttcaccttctccacgtatgcagactaaaaa

SEQ ID NO: 1031141 - DNA, 33 bp, Homo sapien
gcctgtattttcattaaaaaagtggtctttgag

SEQ ID NO: 1031142 - DNA, 33 bp, Homo sapien
gcctgtattttcattataaaagtggtctttgag

SEQ ID NO: 1031143 - DNA, 33 bp, Homo sapien
aatttcctggaatctaacccaccaggctgtgtc

SEQ ID NO: 1031144 - DNA, 33 bp, Homo sapien
aatttcctggaatctaccccaccaggctgtgtc

SEQ ID NO: 1031145 - DNA, 33 bp, Homo sapien
gattgtattagtgtgacattttagaatgctgca

SEQ ID NO: 1031146 - DNA, 33 bp, Homo sapien
gattgtattagtgtgagattttagaatgctgca

SEQ ID NO: 1031147 - DNA, 33 bp, Homo sapien
actctattcatcaagaaaggctaagttatgatg

SEQ ID NO: 1031148 - DNA, 33 bp, Homo sapien
actctattcatcaagataggctaagttatgatg

SEQ ID NO: 1031149 - DNA, 33 bp, Homo sapien
ttgacttaatgtgaaaaaatacatacaggagaa

SEQ ID NO: 1031150 - DNA, 33 bp, Homo sapien
ttgacttaatgtgaaagaatacatacaggagaa

SEQ ID NO: 1031151 - DNA, 33 bp, Homo sapien
tgcttcaggaagagcacacttcaataaattaaa

SEQ ID NO: 1031152 - DNA, 33 bp, Homo sapien
tgcttcaggaagagcagacttcaataaattaaa

SEQ ID NO: 1031153 - DNA, 33 bp, Homo sapien
taaactatattctaacggccatgaattcttttc

SEQ ID NO: 1031154 - DNA, 33 bp, Homo sapien
taaactatattctaactgccatgaattcttttc

SEQ ID NO: 1031155 - DNA, 33 bp, Homo sapien
aagggaaaatataacaaaaaagctcatggatat

SEQ ID NO: 1031156 - DNA, 33 bp, Homo sapien
aagggaaaatataacagaaaagctcatggatat

SEQ ID NO: 1031157 - DNA, 33 bp, Homo sapien
tacatgcaatagataacgaatacgtggtctaat

SEQ ID NO: 1031158 - DNA, 33 bp, Homo sapien
tacatgcaatagataatgaatacgtggtctaat

SEQ ID NO: 1031159 - DNA, 33 bp, Homo sapien
aaacattatgggaatgccaatatagagtgtggt

SEQ ID NO: 1031160 - DNA, 33 bp, Homo sapien
aaacattatgggaatggcaatatagagtgtggt

SEQ ID NO: 1031161 - DNA, 33 bp, Homo sapien
atatcctgggacctagaaccacagggaactcac

SEQ ID NO: 1031162 - DNA, 33 bp, Homo sapien
atatcctgggacctaggaccacagggaactcac

SEQ ID NO: 1031163 - DNA, 33 bp, Homo sapien
aacctacttatcttaactgtgtttcaaccgtct

SEQ ID NO: 1031164 - DNA, 33 bp, Homo sapien
aacctacttatcttaattgtgtttcaaccgtct

SEQ ID NO: 1031165 - DNA, 33 bp, Homo sapien
gatgtcatttctccccaacttgataatagttgt

SEQ ID NO: 1031166 - DNA, 33 bp, Homo sapien
gatgtcatttctccccgacttgataatagttgt

SEQ ID NO: 1031167 - DNA, 33 bp, Homo sapien
gctgacaaaagaaatcaacctatatacctataa

SEQ ID NO: 1031168 - DNA, 33 bp, Homo sapien
gctgacaaaagaaatcgacctatatacctataa

SEQ ID NO: 1031169 - DNA, 33 bp, Homo sapien
gccctggagtcacacaacacaggtactacaatt

SEQ ID NO: 1031170 - DNA, 33 bp, Homo sapien
gccctggagtcacacaccacaggtactacaatt

SEQ ID NO: 1031171 - DNA, 33 bp, Homo sapien
gacaatctctgtaagaaaatcacaggttgataa

SEQ ID NO: 1031172 - DNA, 33 bp, Homo sapien
gacaatctctgtaagacaatcacaggttgataa

SEQ ID NO: 1031173 - DNA, 33 bp, Homo sapien
acatgaagtaatatgacagagtcgagattaaac

SEQ ID NO: 1031174 - DNA, 33 bp, Homo sapien
acatgaagtaatatgatagagtcgagattaaac

SEQ ID NO: 1031175 - DNA, 33 bp, Homo sapien
ccaattctcactcagacgactccggccagcccc

SEQ ID NO: 1031176 - DNA, 33 bp, Homo sapien
ccaattctcactcagatgactccggccagcccc

SEQ ID NO: 1031177 - DNA, 33 bp, Homo sapien
aggagcttgactgttacgtctgggagtccagag

SEQ ID NO: 1031178 - DNA, 33 bp, Homo sapien
aggagcttgactgttatgtctgggagtccagag

SEQ ID NO: 1031179 - DNA, 33 bp, Homo sapien
agtcaagtgtggtccacgaatcagcctgccttg

SEQ ID NO: 1031180 - DNA, 33 bp, Homo sapien
agtcaagtgtggtccatgaatcagcctgccttg

SEQ ID NO: 1031181 - DNA, 33 bp, Homo sapien
ggtacgtgcttcctaactaaatccaaacattgt

SEQ ID NO: 1031182 - DNA, 33 bp, Homo sapien
ggtacgtgcttcctaagtaaatccaaacattgt

SEQ ID NO: 1031183 - DNA, 33 bp, Homo sapien
tctcctctcggcataacccagagcagcctgaac

SEQ ID NO: 1031184 - DNA, 33 bp, Homo sapien
tctcctctcggcataatccagagcagcctgaac

SEQ ID NO: 1031185 - DNA, 33 bp, Homo sapien
gaattgggattaacgcagccatgaagaaggctg

SEQ ID NO: 1031186 - DNA, 33 bp, Homo sapien
gaattgggattaacgcggccatgaagaaggctg

SEQ ID NO: 1031187 - DNA, 33 bp, Homo sapien
tggcaaaacctacagcaaaaacagaggatggtg

SEQ ID NO: 1031188 - DNA, 33 bp, Homo sapien
tggcaaaacctacagcgaaaacagaggatggtg

SEQ ID NO: 1031189 - DNA, 33 bp, Homo sapien
tgcgagatgcaattcacatgattctaaagctag

SEQ ID NO: 1031190 - DNA, 33 bp, Homo sapien
tgcgagatgcaattcagatgattctaaagctag

SEQ ID NO: 1031191 - DNA, 33 bp, Homo sapien
ccacgatatgttctgaagtaaatggctttccag

SEQ ID NO: 1031192 - DNA, 33 bp, Homo sapien
ccacgatatgttctgacgtaaatggctttccag

SEQ ID NO: 1031193 - DNA, 33 bp, Homo sapien
atcaagtaggttcccaaaatttatcatgaggtt

SEQ ID NO: 1031194 - DNA, 33 bp, Homo sapien
atcaagtaggttcccagaatttatcatgaggtt

SEQ ID NO: 1031195 - DNA, 33 bp, Homo sapien
tattctgctgtgcaacgggatttgaggacctaa

SEQ ID NO: 1031196 - DNA, 33 bp, Homo sapien
tattctgctgtgcaactggatttgaggacctaa

SEQ ID NO: 1031197 - DNA, 33 bp, Homo sapien
gagttcctactcagtgaagataatgaatgagaa

SEQ ID NO: 1031198 - DNA, 33 bp, Homo sapien
gagttcctactcagtggagataatgaatgagaa

SEQ ID NO: 1031199 - DNA, 33 bp, Homo sapien
attgattcctcggcacggcaaggtagtgtgact

SEQ ID NO: 1031200 - DNA, 33 bp, Homo sapien
attgattcctcggcactgcaaggtagtgtgact

SEQ ID NO: 1031201 - DNA, 33 bp, Homo sapien
accaatgaccacagatcaccgaagaccacagac

SEQ ID NO: 1031202 - DNA, 33 bp, Homo sapien
accaatgaccacagatgaccgaagaccacagac

SEQ ID NO: 1031203 - DNA, 33 bp, Homo sapien
tgtgtgtgaaaaggtacggaggtgctcattcgc

SEQ ID NO: 1031204 - DNA, 33 bp, Homo sapien
tgtgtgtgaaaaggtatggaggtgctcattcgc

SEQ ID NO: 1031205 - DNA, 33 bp, Homo sapien
atggaagcaaagtccccctcatcgctttcctca

SEQ ID NO: 1031206 - DNA, 33 bp, Homo sapien
atggaagcaaagtccctctcatcgctttcctca

SEQ ID NO: 1031207 - DNA, 33 bp, Homo sapien
tggtttgttatgttgcactgtatgacgctgtgt

SEQ ID NO: 1031208 - DNA, 33 bp, Homo sapien
tggtttgttatgttgcgctgtatgacgctgtgt

SEQ ID NO: 1031209 - DNA, 33 bp, Homo sapien
gtaggtactgggattaaagataaggaagttgac

SEQ ID NO: 1031210 - DNA, 33 bp, Homo sapien
gtaggtactgggattacagataaggaagttgac

SEQ ID NO: 1031211 - DNA, 33 bp, Homo sapien
aatatgcagcttgaacaagaccaatctatgcag

SEQ ID NO: 1031212 - DNA, 33 bp, Homo sapien
aatatgcagcttgaaccagaccaatctatgcag

SEQ ID NO: 1031213 - DNA, 33 bp, Homo sapien
ttagctcttacattgaagcctataatgcatttt

SEQ ID NO: 1031214 - DNA, 33 bp, Homo sapien
ttagctcttacattgaggcctataatgcatttt

SEQ ID NO: 1031215 - DNA, 33 bp, Homo sapien
gtattatttggcaataacaaagagtgaaggatc

SEQ ID NO: 1031216 - DNA, 33 bp, Homo sapien
gtattatttggcaatagcaaagagtgaaggatc

SEQ ID NO: 1031217 - DNA, 33 bp, Homo sapien
tcttggagtgatgaaaatgatgattgcacaact

SEQ ID NO: 1031218 - DNA, 33 bp, Homo sapien
tcttggagtgatgaaagtgatgattgcacaact

SEQ ID NO: 1031219 - DNA, 33 bp, Homo sapien
aaagcttccttagcaccgcctagtaataataac

SEQ ID NO: 1031220 - DNA, 33 bp, Homo sapien
aaagcttccttagcactgcctagtaataataac

SEQ ID NO: 1031221 - DNA, 33 bp, Homo sapien
aggactgtgaagttcacggctgaggtaaaatca

SEQ ID NO: 1031222 - DNA, 33 bp, Homo sapien
aggactgtgaagttcatggctgaggtaaaatca

SEQ ID NO: 1031223 - DNA, 33 bp, Homo sapien
cacactcaagccattcacttacctcccagaaag

SEQ ID NO: 1031224 - DNA, 33 bp, Homo sapien
cacactcaagccattcgcttacctcccagaaag

SEQ ID NO: 1031225 - DNA, 33 bp, Homo sapien
tatctccggccaaggagtcccttgaattccaat

SEQ ID NO: 1031226 - DNA, 33 bp, Homo sapien
tatctccggccaaggattcccttgaattccaat

SEQ ID NO: 1031227 - DNA, 33 bp, Homo sapien
tgtagtgcctccctccactgcatggcagtctag

SEQ ID NO: 1031228 - DNA, 33 bp, Homo sapien
tgtagtgcctccctccgctgcatggcagtctag

SEQ ID NO: 1031229 - DNA, 33 bp, Homo sapien
ccagacatagtgcccagtaattcctgcacaggg

SEQ ID NO: 1031230 - DNA, 33 bp, Homo sapien
ccagacatagtgcccattaattcctgcacaggg

SEQ ID NO: 1031231 - DNA, 33 bp, Homo sapien
ctggtttctgtgatgcaaatatttctccctggc

SEQ ID NO: 1031232 - DNA, 33 bp, Homo sapien
ctggtttctgtgatgcgaatatttctccctggc

SEQ ID NO: 1031233 - DNA, 33 bp, Homo sapien
ccctgtgtcattattacgggagccacaacgtga

SEQ ID NO: 1031234 - DNA, 33 bp, Homo sapien
ccctgtgtcattattatgggagccacaacgtga

SEQ ID NO: 1031235 - DNA, 33 bp, Homo sapien
gaacaagctcgctcacagaacaggagatacttt

SEQ ID NO: 1031236 - DNA, 33 bp, Homo sapien
gaacaagctcgctcactgaacaggagatacttt

SEQ ID NO: 1031237 - DNA, 33 bp, Homo sapien
aagactcaaagatcaaaggagagactcaaagat

SEQ ID NO: 1031238 - DNA, 33 bp, Homo sapien
aagactcaaagatcaagggagagactcaaagat

SEQ ID NO: 1031239 - DNA, 33 bp, Homo sapien
acacacagaaaaatccagataaaattggcacct

SEQ ID NO: 1031240 - DNA, 33 bp, Homo sapien
acacacagaaaaatcccgataaaattggcacct

SEQ ID NO: 1031241 - DNA, 33 bp, Homo sapien
acttggagaaataacaatgcctgaacagacaag

SEQ ID NO: 1031242 - DNA, 33 bp, Homo sapien
acttggagaaataacagtgcctgaacagacaag

SEQ ID NO: 1031243 - DNA, 33 bp, Homo sapien
gaactcagatgttttgcagagtgaggcagcagg

SEQ ID NO: 1031244 - DNA, 33 bp, Homo sapien
gaactcagatgttttgtagagtgaggcagcagg

SEQ ID NO: 1031245 - DNA, 33 bp, Homo sapien
aaaggcaatcgcaaagactttctttcatggagg

SEQ ID NO: 1031246 - DNA, 33 bp, Homo sapien
aaaggcaatcgcaaaggctttctttcatggagg

SEQ ID NO: 1031247 - DNA, 33 bp, Homo sapien
aaagtgcaaataaagcaatatctgcaaagtgca

SEQ ID NO: 1031248 - DNA, 33 bp, Homo sapien
aaagtgcaaataaagcgatatctgcaaagtgca

SEQ ID NO: 1031249 - DNA, 33 bp, Homo sapien
tgacattaaatgattaagctagacatgattaag

SEQ ID NO: 1031250 - DNA, 33 bp, Homo sapien
tgacattaaatgattacgctagacatgattaag

SEQ ID NO: 1031251 - DNA, 33 bp, Homo sapien
ttcagtgtaggtaaaacagccttaaatgcaaag

SEQ ID NO: 1031252 - DNA, 33 bp, Homo sapien
ttcagtgtaggtaaaagagccttaaatgcaaag

SEQ ID NO: 1031253 - DNA, 33 bp, Homo sapien
tctgcagtgattgaaagctcccagaggcctccc

SEQ ID NO: 1031254 - DNA, 33 bp, Homo sapien
tctgcagtgattgaaatctcccagaggcctccc

SEQ ID NO: 1031255 - DNA, 33 bp, Homo sapien
gctcttcatggagaatcaagactgacaggaatt

SEQ ID NO: 1031256 - DNA, 33 bp, Homo sapien
gctcttcatggagaattaagactgacaggaatt

SEQ ID NO: 1031257 - DNA, 33 bp, Homo sapien
gggagattctaaaatacatatgcgtttgagagc

SEQ ID NO: 1031258 - DNA, 33 bp, Homo sapien
gggagattctaaaatatatatgcgtttgagagc

SEQ ID NO: 1031259 - DNA, 33 bp, Homo sapien
caaaattagaggaccactgggacacataggagc

SEQ ID NO: 1031260 - DNA, 33 bp, Homo sapien
caaaattagaggaccattgggacacataggagc

SEQ ID NO: 1031261 - DNA, 33 bp, Homo sapien
gaaaagcacatgaggcaatagtaactaatctaa

SEQ ID NO: 1031262 - DNA, 33 bp, Homo sapien
gaaaagcacatgaggcgatagtaactaatctaa

SEQ ID NO: 1031263 - DNA, 33 bp, Homo sapien
gcgcatctccagtcaccgatggtgttggtcttt

SEQ ID NO: 1031264 - DNA, 33 bp, Homo sapien
gcgcatctccagtcactgatggtgttggtcttt

SEQ ID NO: 1031265 - DNA, 33 bp, Homo sapien
tattgaggaaatagccaacagaaaattcaaaga

SEQ ID NO: 1031266 - DNA, 33 bp, Homo sapien
tattgaggaaatagcctacagaaaattcaaaga

SEQ ID NO: 1031267 - DNA, 33 bp, Homo sapien
gtattgtgtttattgcccattatgataactggt

SEQ ID NO: 1031268 - DNA, 33 bp, Homo sapien
gtattgtgtttattgctcattatgataactggt

SEQ ID NO: 1031269 - DNA, 33 bp, Homo sapien
tagagtatccagtggaactattctgcacatctc

SEQ ID NO: 1031270 - DNA, 33 bp, Homo sapien
tagagtatccagtggagctattctgcacatctc

SEQ ID NO: 1031271 - DNA, 33 bp, Homo sapien
actctgaaagttaaacaggaggtgattcttgta

SEQ ID NO: 1031272 - DNA, 33 bp, Homo sapien
actctgaaagttaaacgggaggtgattcttgta

SEQ ID NO: 1031273 - DNA, 33 bp, Homo sapien
gaaagaattaaccaataaaggctgtcaagctgc

SEQ ID NO: 1031274 - DNA, 33 bp, Homo sapien
gaaagaattaaccaattaaggctgtcaagctgc

SEQ ID NO: 1031275 - DNA, 33 bp, Homo sapien
tatttgaatttaaaaaatgagcatagcaggcta

SEQ ID NO: 1031276 - DNA, 33 bp, Homo sapien
tatttgaatttaaaaagtgagcatagcaggcta

SEQ ID NO: 1031277 - DNA, 33 bp, Homo sapien
tcatcagtgctaggaaagaaaaacacaacctgc

SEQ ID NO: 1031278 - DNA, 33 bp, Homo sapien
tcatcagtgctaggaaggaaaaacacaacctgc

SEQ ID NO: 1031279 - DNA, 33 bp, Homo sapien
agatttttgtaacaataatagaagctactaacg

SEQ ID NO: 1031280 - DNA, 33 bp, Homo sapien
agatttttgtaacaattatagaagctactaacg

SEQ ID NO: 1031281 - DNA, 33 bp, Homo sapien
ctcagagaagagtggaacagcttttttggtcag

SEQ ID NO: 1031282 - DNA, 33 bp, Homo sapien
ctcagagaagagtggagcagcttttttggtcag

SEQ ID NO: 1031283 - DNA, 33 bp, Homo sapien
acatatgtatatggtacgttataaggattcctt

SEQ ID NO: 1031284 - DNA, 33 bp, Homo sapien
acatatgtatatggtatgttataaggattcctt

SEQ ID NO: 1031285 - DNA, 33 bp, Homo sapien
ttggcctcgcaaagctaagctcttaattatact

SEQ ID NO: 1031286 - DNA, 33 bp, Homo sapien
ttggcctcgcaaagctgagctcttaattatact

SEQ ID NO: 1031287 - DNA, 33 bp, Homo sapien
ctttaacattttgtgtcaagtgaggaagactat

SEQ ID NO: 1031288 - DNA, 33 bp, Homo sapien
ctttaacattttgtgtgaagtgaggaagactat

SEQ ID NO: 1031289 - DNA, 33 bp, Homo sapien
cacaagaaccaatatgaaaacagcataggtgtc

SEQ ID NO: 1031290 - DNA, 33 bp, Homo sapien
cacaagaaccaatatggaaacagcataggtgtc

SEQ ID NO: 1031291 - DNA, 33 bp, Homo sapien
aaaacctgccatgtgtaaagcactgcacaagat

SEQ ID NO: 1031292 - DNA, 33 bp, Homo sapien
aaaacctgccatgtgtcaagcactgcacaagat

SEQ ID NO: 1031293 - DNA, 33 bp, Homo sapien
taaagcccaaactaataaaccaggtccttcaca

SEQ ID NO: 1031294 - DNA, 33 bp, Homo sapien
taaagcccaaactaatgaaccaggtccttcaca

SEQ ID NO: 1031295 - DNA, 33 bp, Homo sapien
catgatatttgtgaaaaatcctaacagtcacct

SEQ ID NO: 1031296 - DNA, 33 bp, Homo sapien
catgatatttgtgaaagatcctaacagtcacct

SEQ ID NO: 1031297 - DNA, 33 bp, Homo sapien
aaaaagtacattttcaagtcagcaatataaatt

SEQ ID NO: 1031298 - DNA, 33 bp, Homo sapien
aaaaagtacattttcaggtcagcaatataaatt

SEQ ID NO: 1031299 - DNA, 33 bp, Homo sapien
gtatctcacatctgctcagagcccacgccgcta

SEQ ID NO: 1031300 - DNA, 33 bp, Homo sapien
gtatctcacatctgcttagagcccacgccgcta

SEQ ID NO: 1031301 - DNA, 33 bp, Homo sapien
aagaataactgtatcaatcagggtaagtctagg

SEQ ID NO: 1031302 - DNA, 33 bp, Homo sapien
aagaataactgtatcagtcagggtaagtctagg

SEQ ID NO: 1031303 - DNA, 33 bp, Homo sapien
aatccttgttaatgataaagcagttgaaattca

SEQ ID NO: 1031304 - DNA, 33 bp, Homo sapien
aatccttgttaatgatgaagcagttgaaattca

SEQ ID NO: 1031305 - DNA, 33 bp, Homo sapien
ctgccatccaaataagccctctttccaagaaaa

SEQ ID NO: 1031306 - DNA, 33 bp, Homo sapien
ctgccatccaaataaggcctctttccaagaaaa

SEQ ID NO: 1031307 - DNA, 33 bp, Homo sapien
aaaagtaagagtggacaggggttgattttccat

SEQ ID NO: 1031308 - DNA, 33 bp, Homo sapien
aaaagtaagagtggacgggggttgattttccat

SEQ ID NO: 1031309 - DNA, 33 bp, Homo sapien
acaggaagcaatgagaagaaaacataagcagag

SEQ ID NO: 1031310 - DNA, 33 bp, Homo sapien
acaggaagcaatgagacgaaaacataagcagag

SEQ ID NO: 1031311 - DNA, 33 bp, Homo sapien
gctacacatgggctaacccagagcaaaagctgc

SEQ ID NO: 1031312 - DNA, 33 bp, Homo sapien
gctacacatgggctaatccagagcaaaagctgc

SEQ ID NO: 1031313 - DNA, 33 bp, Homo sapien
ctgaaatcagacgccacccctggtctaatcagc

SEQ ID NO: 1031314 - DNA, 33 bp, Homo sapien
ctgaaatcagacgccatccctggtctaatcagc

SEQ ID NO: 1031315 - DNA, 33 bp, Homo sapien
ttcctgaatattcttacgtgaattgcttcaagg

SEQ ID NO: 1031316 - DNA, 33 bp, Homo sapien
ttcctgaatattcttatgtgaattgcttcaagg

SEQ ID NO: 1031317 - DNA, 33 bp, Homo sapien
aatggacaggaagttgaatgctccctagaagga

SEQ ID NO: 1031318 - DNA, 33 bp, Homo sapien
aatggacaggaagttgtatgctccctagaagga

SEQ ID NO: 1031319 - DNA, 33 bp, Homo sapien
cttgtcatgccaataaagttattgcgactaaat

SEQ ID NO: 1031320 - DNA, 33 bp, Homo sapien
cttgtcatgccaataaggttattgcgactaaat

SEQ ID NO: 1031321 - DNA, 33 bp, Homo sapien
caaatgatcacatacaagagctcagaaggaaaa

SEQ ID NO: 1031322 - DNA, 33 bp, Homo sapien
caaatgatcacatacaggagctcagaaggaaaa

SEQ ID NO: 1031323 - DNA, 33 bp, Homo sapien
acctaagaattttaacacatgaactctgaaaaa

SEQ ID NO: 1031324 - DNA, 33 bp, Homo sapien
acctaagaattttaacgcatgaactctgaaaaa

SEQ ID NO: 1031325 - DNA, 33 bp, Homo sapien
ctcacactggagaagacgtaggatgtgctcagc

SEQ ID NO: 1031326 - DNA, 33 bp, Homo sapien
ctcacactggagaagatgtaggatgtgctcagc

SEQ ID NO: 1031327 - DNA, 33 bp, Homo sapien
cctttcttttcattgcaaccttctaagcctatg

SEQ ID NO: 1031328 - DNA, 33 bp, Homo sapien
cctttcttttcattgctaccttctaagcctatg

SEQ ID NO: 1031329 - DNA, 33 bp, Homo sapien
aaatgacttgtgagaacagtggagatttgtaca

SEQ ID NO: 1031330 - DNA, 33 bp, Homo sapien
aaatgacttgtgagaatagtggagatttgtaca

SEQ ID NO: 1031331 - DNA, 33 bp, Homo sapien
aggcagggcaaagaaacttggacctcatctgca

SEQ ID NO: 1031332 - DNA, 33 bp, Homo sapien
aggcagggcaaagaaatttggacctcatctgca

SEQ ID NO: 1031333 - DNA, 33 bp, Homo sapien
caataaaaatgacagcacatttgatattcatca

SEQ ID NO: 1031334 - DNA, 33 bp, Homo sapien
caataaaaatgacagcgcatttgatattcatca

SEQ ID NO: 1031335 - DNA, 33 bp, Homo sapien
atctagtcacataaaagtcaagaaaaaaaatca

SEQ ID NO: 1031336 - DNA, 33 bp, Homo sapien
atctagtcacataaaattcaagaaaaaaaatca

SEQ ID NO: 1031337 - DNA, 33 bp, Homo sapien
atccatgttgtttctaataaaatcgatattgaa

SEQ ID NO: 1031338 - DNA, 33 bp, Homo sapien
atccatgttgtttctagtaaaatcgatattgaa

SEQ ID NO: 1031339 - DNA, 33 bp, Homo sapien
tgtccattgcaacccacgtgatgtcccttaggt

SEQ ID NO: 1031340 - DNA, 33 bp, Homo sapien
tgtccattgcaacccatgtgatgtcccttaggt

SEQ ID NO: 1031341 - DNA, 33 bp, Homo sapien
ctataataaatggctaagtatactcgctgacat

SEQ ID NO: 1031342 - DNA, 33 bp, Homo sapien
ctataataaatggctaggtatactcgctgacat

SEQ ID NO: 1031343 - DNA, 33 bp, Homo sapien
ctgaaggatatgggacacattgaactacagtta

SEQ ID NO: 1031344 - DNA, 33 bp, Homo sapien
ctgaaggatatgggacgcattgaactacagtta

SEQ ID NO: 1031345 - DNA, 33 bp, Homo sapien
cttcaggtttctaataagtttcaactacaatgg

SEQ ID NO: 1031346 - DNA, 33 bp, Homo sapien
cttcaggtttctaataggtttcaactacaatgg

SEQ ID NO: 1031347 - DNA, 33 bp, Homo sapien
taaacagctcagagccaaacactctgtccatac

SEQ ID NO: 1031348 - DNA, 33 bp, Homo sapien
taaacagctcagagccgaacactctgtccatac

SEQ ID NO: 1031349 - DNA, 33 bp, Homo sapien
atgattgggctcatggaagaaaaagatcattca

SEQ ID NO: 1031350 - DNA, 33 bp, Homo sapien
atgattgggctcatgggagaaaaagatcattca

SEQ ID NO: 1031351 - DNA, 33 bp, Homo sapien
aatttccccctttgtcactggccacagagacct

SEQ ID NO: 1031352 - DNA, 33 bp, Homo sapien
aatttccccctttgtcgctggccacagagacct

SEQ ID NO: 1031353 - DNA, 33 bp, Homo sapien
ccacattctcctgtaacacaataagctctatca

SEQ ID NO: 1031354 - DNA, 33 bp, Homo sapien
ccacattctcctgtaatacaataagctctatca

SEQ ID NO: 1031355 - DNA, 33 bp, Homo sapien
gaaactaagttgcttcccaaatgattggtgtct

SEQ ID NO: 1031356 - DNA, 33 bp, Homo sapien
gaaactaagttgcttctcaaatgattggtgtct

SEQ ID NO: 1031357 - DNA, 33 bp, Homo sapien
gaagcaacttagtttcccaatgaaagctgtaac

SEQ ID NO: 1031358 - DNA, 33 bp, Homo sapien
gaagcaacttagtttctcaatgaaagctgtaac

SEQ ID NO: 1031359 - DNA, 33 bp, Homo sapien
taacatattttcaggggcataaagaggccagta

SEQ ID NO: 1031360 - DNA, 33 bp, Homo sapien
taacatattttcagggtcataaagaggccagta

SEQ ID NO: 1031361 - DNA, 33 bp, Homo sapien
ttgaaatcatcagacaagattgctcctaatgta

SEQ ID NO: 1031362 - DNA, 33 bp, Homo sapien
ttgaaatcatcagacaggattgctcctaatgta

SEQ ID NO: 1031363 - DNA, 33 bp, Homo sapien
attaaaggaaaacttacgtttgcagtgaatttg

SEQ ID NO: 1031364 - DNA, 33 bp, Homo sapien
attaaaggaaaacttatgtttgcagtgaatttg

SEQ ID NO: 1031365 - DNA, 33 bp, Homo sapien
ttttgagtgtacaccacgttcaggctcctggaa

SEQ ID NO: 1031366 - DNA, 33 bp, Homo sapien
ttttgagtgtacaccatgttcaggctcctggaa

SEQ ID NO: 1031367 - DNA, 33 bp, Homo sapien
gaaaatatttgaggataaatgtctaaatgcaag

SEQ ID NO: 1031368 - DNA, 33 bp, Homo sapien
gaaaatatttgaggatgaatgtctaaatgcaag

SEQ ID NO: 1031369 - DNA, 33 bp, Homo sapien
gtcactccctgtccaaatcaaacctggattctg

SEQ ID NO: 1031370 - DNA, 33 bp, Homo sapien
gtcactccctgtccaagtcaaacctggattctg

SEQ ID NO: 1031371 - DNA, 33 bp, Homo sapien
agccttgagtaaacacaatttccataaatgtct

SEQ ID NO: 1031372 - DNA, 33 bp, Homo sapien
agccttgagtaaacaccatttccataaatgtct

SEQ ID NO: 1031373 - DNA, 33 bp, Homo sapien
attaatatgctcaagaacctgaccatgtgggtt

SEQ ID NO: 1031374 - DNA, 33 bp, Homo sapien
attaatatgctcaagatcctgaccatgtgggtt

SEQ ID NO: 1031375 - DNA, 33 bp, Homo sapien
tcctatcctcacctcacccagttcaagatgagt

SEQ ID NO: 1031376 - DNA, 33 bp, Homo sapien
tcctatcctcacctcagccagttcaagatgagt

SEQ ID NO: 1031377 - DNA, 33 bp, Homo sapien
gagttaaaaagtgccaacaggagaggtattttc

SEQ ID NO: 1031378 - DNA, 33 bp, Homo sapien
gagttaaaaagtgccatcaggagaggtattttc

SEQ ID NO: 1031379 - DNA, 33 bp, Homo sapien
ctgtacaattaagcggcattaactacattcatg

SEQ ID NO: 1031380 - DNA, 33 bp, Homo sapien
ctgtacaattaagcggtattaactacattcatg

SEQ ID NO: 1031381 - DNA, 33 bp, Homo sapien
agattaagggaagaagcccagaatgcagcaaat

SEQ ID NO: 1031382 - DNA, 33 bp, Homo sapien
agattaagggaagaagtccagaatgcagcaaat

SEQ ID NO: 1031383 - DNA, 33 bp, Homo sapien
ttttaggagaaatccaatagtggtgctctcatt

SEQ ID NO: 1031384 - DNA, 33 bp, Homo sapien
ttttaggagaaatccagtagtggtgctctcatt

SEQ ID NO: 1031385 - DNA, 33 bp, Homo sapien
ctcccagcaacttttccaggatggttatactgc

SEQ ID NO: 1031386 - DNA, 33 bp, Homo sapien
ctcccagcaacttttctaggatggttatactgc

SEQ ID NO: 1031387 - DNA, 33 bp, Homo sapien
aattatttctcaagaactattttcccccaagaa

SEQ ID NO: 1031388 - DNA, 33 bp, Homo sapien
aattatttctcaagaattattttcccccaagaa

SEQ ID NO: 1031389 - DNA, 33 bp, Homo sapien
ttgcatctgtgcttctcacaggagggtgggcct

SEQ ID NO: 1031390 - DNA, 33 bp, Homo sapien
ttgcatctgtgcttcttacaggagggtgggcct

SEQ ID NO: 1031391 - DNA, 33 bp, Homo sapien
tggagaataggaaagcccaggtcctttgctgcc

SEQ ID NO: 1031392 - DNA, 33 bp, Homo sapien
tggagaataggaaagctcaggtcctttgctgcc

SEQ ID NO: 1031393 - DNA, 33 bp, Homo sapien
cactggttttgagagcaagtgtgtaacagtttg

SEQ ID NO: 1031394 - DNA, 33 bp, Homo sapien
cactggttttgagagcgagtgtgtaacagtttg

SEQ ID NO: 1031395 - DNA, 33 bp, Homo sapien
attcacccattcaaacaattggtgttactgacc

SEQ ID NO: 1031396 - DNA, 33 bp, Homo sapien
attcacccattcaaacgattggtgttactgacc

SEQ ID NO: 1031397 - DNA, 33 bp, Homo sapien
caaggtgttgggtaagaaatgcctgagtgcggc

SEQ ID NO: 1031398 - DNA, 33 bp, Homo sapien
caaggtgttgggtaaggaatgcctgagtgcggc

SEQ ID NO: 1031399 - DNA, 33 bp, Homo sapien
ttcagagacctgcagccatgtccaaacgacctg

SEQ ID NO: 1031400 - DNA, 33 bp, Homo sapien
ttcagagacctgcagcgatgtccaaacgacctg

SEQ ID NO: 1031401 - DNA, 33 bp, Homo sapien
cagatctctgaatgccactgactgaaaagcggg

SEQ ID NO: 1031402 - DNA, 33 bp, Homo sapien
cagatctctgaatgccgctgactgaaaagcggg

SEQ ID NO: 1031403 - DNA, 33 bp, Homo sapien
tgagaacactgttgcactaaaagagattaaaag

SEQ ID NO: 1031404 - DNA, 33 bp, Homo sapien
tgagaacactgttgcattaaaagagattaaaag

SEQ ID NO: 1031405 - DNA, 33 bp, Homo sapien
aatatgaatagcaaaactataaagctacagaag

SEQ ID NO: 1031406 - DNA, 33 bp, Homo sapien
aatatgaatagcaaaattataaagctacagaag

SEQ ID NO: 1031407 - DNA, 33 bp, Homo sapien
tgccattgcattccaagttagggcaacgtgata

SEQ ID NO: 1031408 - DNA, 33 bp, Homo sapien
tgccattgcattccaatttagggcaacgtgata

SEQ ID NO: 1031409 - DNA, 33 bp, Homo sapien
gccaaaaggaatgctccgaacataaccatatat

SEQ ID NO: 1031410 - DNA, 33 bp, Homo sapien
gccaaaaggaatgctctgaacataaccatatat

SEQ ID NO: 1031411 - DNA, 33 bp, Homo sapien
actgttaaagtgtaaaatgttttcctccgtacc

SEQ ID NO: 1031412 - DNA, 33 bp, Homo sapien
actgttaaagtgtaaagtgttttcctccgtacc

SEQ ID NO: 1031413 - DNA, 33 bp, Homo sapien
ggaaaagacaaaaaacaagtggacatgataatt

SEQ ID NO: 1031414 - DNA, 33 bp, Homo sapien
ggaaaagacaaaaaaccagtggacatgataatt

SEQ ID NO: 1031415 - DNA, 33 bp, Homo sapien
cctccatgccactatcactctaaagcaaaggct

SEQ ID NO: 1031416 - DNA, 33 bp, Homo sapien
cctccatgccactatctctctaaagcaaaggct

SEQ ID NO: 1031417 - DNA, 33 bp, Homo sapien
tgttccagttttttggaaaaggcatttatgtga

SEQ ID NO: 1031418 - DNA, 33 bp, Homo sapien
tgttccagttttttgggaaaggcatttatgtga

SEQ ID NO: 1031419 - DNA, 33 bp, Homo sapien
tggaagatatttcataggtggcagctaaattta

SEQ ID NO: 1031420 - DNA, 33 bp, Homo sapien
tggaagatatttcatatgtggcagctaaattta

SEQ ID NO: 1031421 - DNA, 33 bp, Homo sapien
aaaaatcgggttgacactgaactctcatctgca

SEQ ID NO: 1031422 - DNA, 33 bp, Homo sapien
aaaaatcgggttgacattgaactctcatctgca

SEQ ID NO: 1031423 - DNA, 33 bp, Homo sapien
aataaccagagagttacgttggtaatcctcaga

SEQ ID NO: 1031424 - DNA, 33 bp, Homo sapien
aataaccagagagttatgttggtaatcctcaga

SEQ ID NO: 1031425 - DNA, 33 bp, Homo sapien
ctatgcttatttagaaacagcaaaaatactatt

SEQ ID NO: 1031426 - DNA, 33 bp, Homo sapien
ctatgcttatttagaagcagcaaaaatactatt

SEQ ID NO: 1031427 - DNA, 33 bp, Homo sapien
tgtatgaaagcaacttaaaatgttttggtcact

SEQ ID NO: 1031428 - DNA, 33 bp, Homo sapien
tgtatgaaagcaactttaaatgttttggtcact

SEQ ID NO: 1031429 - DNA, 33 bp, Homo sapien
caaagccatcataaaaatgtttcaacaagcaat

SEQ ID NO: 1031430 - DNA, 33 bp, Homo sapien
caaagccatcataaaagtgtttcaacaagcaat

SEQ ID NO: 1031431 - DNA, 33 bp, Homo sapien
aagacagtactcaaaagaacagctcctaagatg

SEQ ID NO: 1031432 - DNA, 33 bp, Homo sapien
aagacagtactcaaaataacagctcctaagatg

SEQ ID NO: 1031433 - DNA, 33 bp, Homo sapien
ttttcatgagtttttcactgcaaaaatctcctt

SEQ ID NO: 1031434 - DNA, 33 bp, Homo sapien
ttttcatgagtttttcgctgcaaaaatctcctt

SEQ ID NO: 1031435 - DNA, 33 bp, Homo sapien
taactacaccaaactgaaaatccagtaccacct

SEQ ID NO: 1031436 - DNA, 33 bp, Homo sapien
taactacaccaaactgtaaatccagtaccacct

SEQ ID NO: 1031437 - DNA, 33 bp, Homo sapien
ttaacaaggtaaagaagtcaagactggaaaatt

SEQ ID NO: 1031438 - DNA, 33 bp, Homo sapien
ttaacaaggtaaagaattcaagactggaaaatt

SEQ ID NO: 1031439 - DNA, 33 bp, Homo sapien
acaagctgcagagccactggcaaaggaagcatg

SEQ ID NO: 1031440 - DNA, 33 bp, Homo sapien
acaagctgcagagccagtggcaaaggaagcatg

SEQ ID NO: 1031441 - DNA, 33 bp, Homo sapien
ctgacagacctaagaacaggagaccccagaact

SEQ ID NO: 1031442 - DNA, 33 bp, Homo sapien
ctgacagacctaagaagaggagaccccagaact

SEQ ID NO: 1031443 - DNA, 33 bp, Homo sapien
aatcatgcaaacacaaaacattgttaaataata

SEQ ID NO: 1031444 - DNA, 33 bp, Homo sapien
aatcatgcaaacacaagacattgttaaataata

SEQ ID NO: 1031445 - DNA, 33 bp, Homo sapien
tgtaatgattattctaaacagaaagactattat

SEQ ID NO: 1031446 - DNA, 33 bp, Homo sapien
tgtaatgattattctagacagaaagactattat

SEQ ID NO: 1031447 - DNA, 33 bp, Homo sapien
gctgtttccacgtaggaccacagatctaggctg

SEQ ID NO: 1031448 - DNA, 33 bp, Homo sapien
gctgtttccacgtagggccacagatctaggctg

SEQ ID NO: 1031449 - DNA, 33 bp, Homo sapien
tatgaaaatcctaggtaacatcttccaacagaa

SEQ ID NO: 1031450 - DNA, 33 bp, Homo sapien
tatgaaaatcctaggtgacatcttccaacagaa

SEQ ID NO: 1031451 - DNA, 33 bp, Homo sapien
ccaactgtagttagcacctcaaaatcactaaat

SEQ ID NO: 1031452 - DNA, 33 bp, Homo sapien
ccaactgtagttagcatctcaaaatcactaaat

SEQ ID NO: 1031453 - DNA, 33 bp, Homo sapien
agggcacaaagaattaacacctgcaaagttccc

SEQ ID NO: 1031454 - DNA, 33 bp, Homo sapien
agggcacaaagaattagcacctgcaaagttccc

SEQ ID NO: 1031455 - DNA, 33 bp, Homo sapien
cccacagagagatcaacaacattctagaaagaa

SEQ ID NO: 1031456 - DNA, 33 bp, Homo sapien
cccacagagagatcaataacattctagaaagaa

SEQ ID NO: 1031457 - DNA, 33 bp, Homo sapien
cctgctacctggggaaagaatgcgaggagacac

SEQ ID NO: 1031458 - DNA, 33 bp, Homo sapien
cctgctacctggggaatgaatgcgaggagacac

SEQ ID NO: 1031459 - DNA, 33 bp, Homo sapien
aggatacaaatggagaaacgcataggatgaggt

SEQ ID NO: 1031460 - DNA, 33 bp, Homo sapien
aggatacaaatggagagacgcataggatgaggt

SEQ ID NO: 1031461 - DNA, 33 bp, Homo sapien
tttggctattatggacaatgttactctgaacat

SEQ ID NO: 1031462 - DNA, 33 bp, Homo sapien
tttggctattatggactatgttactctgaacat

SEQ ID NO: 1031463 - DNA, 33 bp, Homo sapien
ctagtaattaaacctgaatctgtttcacccgaa

SEQ ID NO: 1031464 - DNA, 33 bp, Homo sapien
ctagtaattaaacctggatctgtttcacccgaa

SEQ ID NO: 1031465 - DNA, 33 bp, Homo sapien
gagtgattctttgggcaaatgccatagacctaa

SEQ ID NO: 1031466 - DNA, 33 bp, Homo sapien
gagtgattctttgggcgaatgccatagacctaa

SEQ ID NO: 1031467 - DNA, 33 bp, Homo sapien
gacaaagtatgtacgaatcgcacctgagtgcag

SEQ ID NO: 1031468 - DNA, 33 bp, Homo sapien
gacaaagtatgtacgagtcgcacctgagtgcag

SEQ ID NO: 1031469 - DNA, 33 bp, Homo sapien
actaagttagggccaacaaagtctgcaccaaag

SEQ ID NO: 1031470 - DNA, 33 bp, Homo sapien
actaagttagggccaataaagtctgcaccaaag

SEQ ID NO: 1031471 - DNA, 33 bp, Homo sapien
ctcttcctttctcacacgtatcagacctctttc

SEQ ID NO: 1031472 - DNA, 33 bp, Homo sapien
ctcttcctttctcacatgtatcagacctctttc

SEQ ID NO: 1031473 - DNA, 33 bp, Homo sapien
ctgtctgataatctgcaccaaaatttaggaagt

SEQ ID NO: 1031474 - DNA, 33 bp, Homo sapien
ctgtctgataatctgcgccaaaatttaggaagt

SEQ ID NO: 1031475 - DNA, 33 bp, Homo sapien
aagagagttaacagagaatggaaatccgatggg

SEQ ID NO: 1031476 - DNA, 33 bp, Homo sapien
aagagagttaacagaggatggaaatccgatggg

SEQ ID NO: 1031477 - DNA, 33 bp, Homo sapien
agccatttcttgaaacgacttggtgagtcagct

SEQ ID NO: 1031478 - DNA, 33 bp, Homo sapien
agccatttcttgaaactacttggtgagtcagct

SEQ ID NO: 1031479 - DNA, 33 bp, Homo sapien
ctgagtttgtttccaactggcctcatctaaacc

SEQ ID NO: 1031480 - DNA, 33 bp, Homo sapien
ctgagtttgtttccaattggcctcatctaaacc

SEQ ID NO: 1031481 - DNA, 33 bp, Homo sapien
aaacatggaaatatgaaggagtgagaattgtaa

SEQ ID NO: 1031482 - DNA, 33 bp, Homo sapien
aaacatggaaatatgagggagtgagaattgtaa

SEQ ID NO: 1031483 - DNA, 33 bp, Homo sapien
actacggcccccaggcaaaatctagctgatctg

SEQ ID NO: 1031484 - DNA, 33 bp, Homo sapien
actacggcccccaggcgaaatctagctgatctg

SEQ ID NO: 1031485 - DNA, 33 bp, Homo sapien
cagagtggggccctcacgacttaatcactttcc

SEQ ID NO: 1031486 - DNA, 33 bp, Homo sapien
cagagtggggccctcatgacttaatcactttcc

SEQ ID NO: 1031487 - DNA, 33 bp, Homo sapien
agcatttgtactatgacgtggctgtttagtatc

SEQ ID NO: 1031488 - DNA, 33 bp, Homo sapien
agcatttgtactatgatgtggctgtttagtatc

SEQ ID NO: 1031489 - DNA, 33 bp, Homo sapien
aaactgtggctcctttaaaagaatagtttctga

SEQ ID NO: 1031490 - DNA, 33 bp, Homo sapien
aaactgtggctcctttgaaagaatagtttctga

SEQ ID NO: 1031491 - DNA, 33 bp, Homo sapien
tgtgcccaaatgcaaactcctggtcaattattt

SEQ ID NO: 1031492 - DNA, 33 bp, Homo sapien
tgtgcccaaatgcaaattcctggtcaattattt

SEQ ID NO: 1031493 - DNA, 33 bp, Homo sapien
tacattgagaatcgaaaaatgacacccttgcct

SEQ ID NO: 1031494 - DNA, 33 bp, Homo sapien
tacattgagaatcgaagaatgacacccttgcct

SEQ ID NO: 1031495 - DNA, 33 bp, Homo sapien
gcagatctgaaataacacaggcagcaaaagtgt

SEQ ID NO: 1031496 - DNA, 33 bp, Homo sapien
gcagatctgaaataacgcaggcagcaaaagtgt

SEQ ID NO: 1031497 - DNA, 33 bp, Homo sapien
ctgcctgccgagaaacacaacccctgacagccg

SEQ ID NO: 1031498 - DNA, 33 bp, Homo sapien
ctgcctgccgagaaacgcaacccctgacagccg

SEQ ID NO: 1031499 - DNA, 33 bp, Homo sapien
gcgaaggcattttaggaagttggaaggcatgga

SEQ ID NO: 1031500 - DNA, 33 bp, Homo sapien
gcgaaggcattttagggagttggaaggcatgga

SEQ ID NO: 1031501 - DNA, 33 bp, Homo sapien
taagtgctcatgcagaaatgtgacaagccactg

SEQ ID NO: 1031502 - DNA, 33 bp, Homo sapien
taagtgctcatgcagagatgtgacaagccactg

SEQ ID NO: 1031503 - DNA, 33 bp, Homo sapien
ggggctcaggctgtaacaagtgttttagtattc

SEQ ID NO: 1031504 - DNA, 33 bp, Homo sapien
ggggctcaggctgtaataagtgttttagtattc

SEQ ID NO: 1031505 - DNA, 33 bp, Homo sapien
cttgggctagaacaaacagagagagaagtttct

SEQ ID NO: 1031506 - DNA, 33 bp, Homo sapien
cttgggctagaacaaagagagagagaagtttct

SEQ ID NO: 1031507 - DNA, 33 bp, Homo sapien
agggccggattctaaacgctgtaggtcaccctg

SEQ ID NO: 1031508 - DNA, 33 bp, Homo sapien
agggccggattctaaatgctgtaggtcaccctg

SEQ ID NO: 1031509 - DNA, 33 bp, Homo sapien
ctggcctccatgatgacggcttcacccttacaa

SEQ ID NO: 1031510 - DNA, 33 bp, Homo sapien
ctggcctccatgatgatggcttcacccttacaa

SEQ ID NO: 1031511 - DNA, 33 bp, Homo sapien
cagaccaccgtgacagaactgtgagaaggacaa

SEQ ID NO: 1031512 - DNA, 33 bp, Homo sapien
cagaccaccgtgacaggactgtgagaaggacaa

SEQ ID NO: 1031513 - DNA, 33 bp, Homo sapien
gagtgggcagatggtgaaactgacccacaaatg

SEQ ID NO: 1031514 - DNA, 33 bp, Homo sapien
gagtgggcagatggtggaactgacccacaaatg

SEQ ID NO: 1031515 - DNA, 33 bp, Homo sapien
actgcaagaatgcaaaagcagaggacacaagcc

SEQ ID NO: 1031516 - DNA, 33 bp, Homo sapien
actgcaagaatgcaaaggcagaggacacaagcc

SEQ ID NO: 1031517 - DNA, 33 bp, Homo sapien
gtccagagctgctgcaagactctaactggctct

SEQ ID NO: 1031518 - DNA, 33 bp, Homo sapien
gtccagagctgctgcacgactctaactggctct

SEQ ID NO: 1031519 - DNA, 33 bp, Homo sapien
tggcaataaagtcccacccataaaatcatgaga

SEQ ID NO: 1031520 - DNA, 33 bp, Homo sapien
tggcaataaagtcccatccataaaatcatgaga

SEQ ID NO: 1031521 - DNA, 33 bp, Homo sapien
tctggtagaggaaggacaagccaacaaaatggg

SEQ ID NO: 1031522 - DNA, 33 bp, Homo sapien
tctggtagaggaaggagaagccaacaaaatggg

SEQ ID NO: 1031523 - DNA, 33 bp, Homo sapien
ttgaggcaagaagcaacgtgtgaaatagtccga

SEQ ID NO: 1031524 - DNA, 33 bp, Homo sapien
ttgaggcaagaagcaatgtgtgaaatagtccga

SEQ ID NO: 1031525 - DNA, 33 bp, Homo sapien
ttaaggtaaatgatgaaaactgcaaaagagtga

SEQ ID NO: 1031526 - DNA, 33 bp, Homo sapien
ttaaggtaaatgatgacaactgcaaaagagtga

SEQ ID NO: 1031527 - DNA, 33 bp, Homo sapien
actttaacagtagtgcccgttttggttcatgaa

SEQ ID NO: 1031528 - DNA, 33 bp, Homo sapien
actttaacagtagtgctcgttttggttcatgaa

SEQ ID NO: 1031529 - DNA, 33 bp, Homo sapien
aaatgtcctggtaaccaaaagggaaccatctca

SEQ ID NO: 1031530 - DNA, 33 bp, Homo sapien
aaatgtcctggtaaccgaaagggaaccatctca

SEQ ID NO: 1031531 - DNA, 33 bp, Homo sapien
agtgagagaacatgtagaaggcaggcctggcac

SEQ ID NO: 1031532 - DNA, 33 bp, Homo sapien
agtgagagaacatgtataaggcaggcctggcac

SEQ ID NO: 1031533 - DNA, 33 bp, Homo sapien
gcagtgaactgggggacgagcctgtcaacattg

SEQ ID NO: 1031534 - DNA, 33 bp, Homo sapien
gcagtgaactgggggatgagcctgtcaacattg

SEQ ID NO: 1031535 - DNA, 33 bp, Homo sapien
ttctgagagcaaagaaaggtaagaaagctggag

SEQ ID NO: 1031536 - DNA, 33 bp, Homo sapien
ttctgagagcaaagaatggtaagaaagctggag

SEQ ID NO: 1031537 - DNA, 33 bp, Homo sapien
tgggaagctgtaaaaaccagagctcaaatgtgc

SEQ ID NO: 1031538 - DNA, 33 bp, Homo sapien
tgggaagctgtaaaaagcagagctcaaatgtgc

SEQ ID NO: 1031539 - DNA, 33 bp, Homo sapien
gtttctgccgcttcccactcatgatgccttttt

SEQ ID NO: 1031540 - DNA, 33 bp, Homo sapien
gtttctgccgcttcccgctcatgatgccttttt

SEQ ID NO: 1031541 - DNA, 33 bp, Homo sapien
acaggtttgcagcttcaagagttttaaaactag

SEQ ID NO: 1031542 - DNA, 33 bp, Homo sapien
acaggtttgcagcttcgagagttttaaaactag

SEQ ID NO: 1031543 - DNA, 33 bp, Homo sapien
tgatttttgacaaagacgcaatgacaactcaat

SEQ ID NO: 1031544 - DNA, 33 bp, Homo sapien
tgatttttgacaaagatgcaatgacaactcaat

SEQ ID NO: 1031545 - DNA, 33 bp, Homo sapien
agctgaggccccagccaatagttcacatcaatt

SEQ ID NO: 1031546 - DNA, 33 bp, Homo sapien
agctgaggccccagccgatagttcacatcaatt

SEQ ID NO: 1031547 - DNA, 33 bp, Homo sapien
tgaggaaactgaggcacagaaaacttaactcat

SEQ ID NO: 1031548 - DNA, 33 bp, Homo sapien
tgaggaaactgaggcagagaaaacttaactcat

SEQ ID NO: 1031549 - DNA, 33 bp, Homo sapien
ttgaactgacttcttacgaaatgagggcagaaa

SEQ ID NO: 1031550 - DNA, 33 bp, Homo sapien
ttgaactgacttcttatgaaatgagggcagaaa

SEQ ID NO: 1031551 - DNA, 33 bp, Homo sapien
tgaaaagcaagtgctgaatgttgataatctata

SEQ ID NO: 1031552 - DNA, 33 bp, Homo sapien
tgaaaagcaagtgctgcatgttgataatctata

SEQ ID NO: 1031553 - DNA, 33 bp, Homo sapien
taatctggcaactctacctcagaagtttgtttc

SEQ ID NO: 1031554 - DNA, 33 bp, Homo sapien
taatctggcaactctatctcagaagtttgtttc

SEQ ID NO: 1031555 - DNA, 33 bp, Homo sapien
gcccacctcacctggacgatgacaaggactcca

SEQ ID NO: 1031556 - DNA, 33 bp, Homo sapien
gcccacctcacctggatgatgacaaggactcca

SEQ ID NO: 1031557 - DNA, 33 bp, Homo sapien
tgacaaaagctaacaaccatagacaacatacct

SEQ ID NO: 1031558 - DNA, 33 bp, Homo sapien
tgacaaaagctaacaatcatagacaacatacct

SEQ ID NO: 1031559 - DNA, 33 bp, Homo sapien
cacacagagatgtctgaatttccgccgcacagt

SEQ ID NO: 1031560 - DNA, 33 bp, Homo sapien
cacacagagatgtctggatttccgccgcacagt

SEQ ID NO: 1031561 - DNA, 33 bp, Homo sapien
cagaattactgggtcacagcttacctagtcagc

SEQ ID NO: 1031562 - DNA, 33 bp, Homo sapien
cagaattactgggtcatagcttacctagtcagc

SEQ ID NO: 1031563 - DNA, 33 bp, Homo sapien
gaaaaaactactgataaaatgacgttggtgaat

SEQ ID NO: 1031564 - DNA, 33 bp, Homo sapien
gaaaaaactactgatataatgacgttggtgaat

SEQ ID NO: 1031565 - DNA, 33 bp, Homo sapien
cagccgaccttaatgacaactttactggccggg

SEQ ID NO: 1031566 - DNA, 33 bp, Homo sapien
cagccgaccttaatgataactttactggccggg

SEQ ID NO: 1031567 - DNA, 33 bp, Homo sapien
gattacagaaatgagccatctcacttggcctaa

SEQ ID NO: 1031568 - DNA, 33 bp, Homo sapien
gattacagaaatgagctatctcacttggcctaa

SEQ ID NO: 1031569 - DNA, 33 bp, Homo sapien
tctgtggtcactattaacttcctaatgccttca

SEQ ID NO: 1031570 - DNA, 33 bp, Homo sapien
tctgtggtcactattatcttcctaatgccttca

SEQ ID NO: 1031571 - DNA, 33 bp, Homo sapien
tgaagagataatcaataaccatgaaggacagag

SEQ ID NO: 1031572 - DNA, 33 bp, Homo sapien
tgaagagataatcaatgaccatgaaggacagag

SEQ ID NO: 1031573 - DNA, 33 bp, Homo sapien
cttccgttaccagaaccgtaagccgcaattcat

SEQ ID NO: 1031574 - DNA, 33 bp, Homo sapien
cttccgttaccagaactgtaagccgcaattcat

SEQ ID NO: 1031575 - DNA, 33 bp, Homo sapien
atataatcaaagggcaagcttcaggatgttgtt

SEQ ID NO: 1031576 - DNA, 33 bp, Homo sapien
atataatcaaagggcacgcttcaggatgttgtt

SEQ ID NO: 1031577 - DNA, 33 bp, Homo sapien
ctctggtaactgtatgcatttggaagcaaaatg

SEQ ID NO: 1031578 - DNA, 33 bp, Homo sapien
ctctggtaactgtatgtatttggaagcaaaatg

SEQ ID NO: 1031579 - DNA, 33 bp, Homo sapien
aaaccctgttattaacccagtgatatcaataaa

SEQ ID NO: 1031580 - DNA, 33 bp, Homo sapien
aaaccctgttattaactcagtgatatcaataaa

SEQ ID NO: 1031581 - DNA, 33 bp, Homo sapien
gtgcccttaaacattgcagttgtccaaattaac

SEQ ID NO: 1031582 - DNA, 33 bp, Homo sapien
gtgcccttaaacattgtagttgtccaaattaac

SEQ ID NO: 1031583 - DNA, 33 bp, Homo sapien
cggagtattgccaacccgggaaactcaatcaag

SEQ ID NO: 1031584 - DNA, 33 bp, Homo sapien
cggagtattgccaacctgggaaactcaatcaag

SEQ ID NO: 1031585 - DNA, 33 bp, Homo sapien
tgtccagcacccagacaagtggctcagagaggc

SEQ ID NO: 1031586 - DNA, 33 bp, Homo sapien
tgtccagcacccagacgagtggctcagagaggc

SEQ ID NO: 1031587 - DNA, 33 bp, Homo sapien
cccagccagagatgctaaattcctggtgagtgc

SEQ ID NO: 1031588 - DNA, 33 bp, Homo sapien
cccagccagagatgctcaattcctggtgagtgc

SEQ ID NO: 1031589 - DNA, 33 bp, Homo sapien
gtattaaaacagcaagaaatagtccaagttaac

SEQ ID NO: 1031590 - DNA, 33 bp, Homo sapien
gtattaaaacagcaagcaatagtccaagttaac

SEQ ID NO: 1031591 - DNA, 33 bp, Homo sapien
ctggagaagtctttcacgttaagccaggaggcg

SEQ ID NO: 1031592 - DNA, 33 bp, Homo sapien
ctggagaagtctttcatgttaagccaggaggcg

SEQ ID NO: 1031593 - DNA, 33 bp, Homo sapien
tgaatatccctatgtacaagtctctatgcaaag

SEQ ID NO: 1031594 - DNA, 33 bp, Homo sapien
tgaatatccctatgtagaagtctctatgcaaag

SEQ ID NO: 1031595 - DNA, 33 bp, Homo sapien
cctggcaagctgatgacagccccactcttcctc

SEQ ID NO: 1031596 - DNA, 33 bp, Homo sapien
cctggcaagctgatgatagccccactcttcctc

SEQ ID NO: 1031597 - DNA, 33 bp, Homo sapien
gagaaagaaacatggacggtacaaggagagtac

SEQ ID NO: 1031598 - DNA, 33 bp, Homo sapien
gagaaagaaacatggatggtacaaggagagtac

SEQ ID NO: 1031599 - DNA, 33 bp, Homo sapien
cacaaaccttcaacaccataacctctgttggcc

SEQ ID NO: 1031600 - DNA, 33 bp, Homo sapien
cacaaaccttcaacacgataacctctgttggcc

SEQ ID NO: 1031601 - DNA, 33 bp, Homo sapien
tacttaagtttccgaacgaagacagtaacaaag

SEQ ID NO: 1031602 - DNA, 33 bp, Homo sapien
tacttaagtttccgaatgaagacagtaacaaag

SEQ ID NO: 1031603 - DNA, 33 bp, Homo sapien
caaagtcttgcaagaacgtaggactcactcacc

SEQ ID NO: 1031604 - DNA, 33 bp, Homo sapien
caaagtcttgcaagaatgtaggactcactcacc

SEQ ID NO: 1031605 - DNA, 33 bp, Homo sapien
tcatgggactgatcaaagttaagcaaaatgggc

SEQ ID NO: 1031606 - DNA, 33 bp, Homo sapien
tcatgggactgatcaaggttaagcaaaatgggc

SEQ ID NO: 1031607 - DNA, 33 bp, Homo sapien
cctgtattggaatgaacgcccgctcagggagga

SEQ ID NO: 1031608 - DNA, 33 bp, Homo sapien
cctgtattggaatgaatgcccgctcagggagga

SEQ ID NO: 1031609 - DNA, 33 bp, Homo sapien
gcaggaaatgaggctacagtagagttgtaaaca

SEQ ID NO: 1031610 - DNA, 33 bp, Homo sapien
gcaggaaatgaggctagagtagagttgtaaaca

SEQ ID NO: 1031611 - DNA, 33 bp, Homo sapien
caaagattaatgcctacgctttctacccaaaag

SEQ ID NO: 1031612 - DNA, 33 bp, Homo sapien
caaagattaatgcctatgctttctacccaaaag

SEQ ID NO: 1031613 - DNA, 33 bp, Homo sapien
aattcccggtcactgagattctgaaaccaggcc

SEQ ID NO: 1031614 - DNA, 33 bp, Homo sapien
aattcccggtcactgatattctgaaaccaggcc

SEQ ID NO: 1031615 - DNA, 33 bp, Homo sapien
gctctgtgcatctgtcaatacctcaagtttcaa

SEQ ID NO: 1031616 - DNA, 33 bp, Homo sapien
gctctgtgcatctgtcgatacctcaagtttcaa

SEQ ID NO: 1031617 - DNA, 33 bp, Homo sapien
tggcaaaagcaaataccgcatccttttcttccg

SEQ ID NO: 1031618 - DNA, 33 bp, Homo sapien
tggcaaaagcaaatactgcatccttttcttccg

SEQ ID NO: 1031619 - DNA, 33 bp, Homo sapien
acctaaaatatatgacaaagtagcgaattgaaa

SEQ ID NO: 1031620 - DNA, 33 bp, Homo sapien
acctaaaatatatgactaagtagcgaattgaaa

SEQ ID NO: 1031621 - DNA, 33 bp, Homo sapien
aagacacttgatagtgcagaaggagaggactcg

SEQ ID NO: 1031622 - DNA, 33 bp, Homo sapien
aagacacttgatagtggagaaggagaggactcg

SEQ ID NO: 1031623 - DNA, 33 bp, Homo sapien
actaaacatgctacgacgcacaagatagcctcc

SEQ ID NO: 1031624 - DNA, 33 bp, Homo sapien
actaaacatgctacgatgcacaagatagcctcc

SEQ ID NO: 1031625 - DNA, 33 bp, Homo sapien
taagacatgggtcccaacttcagaatgcttcac

SEQ ID NO: 1031626 - DNA, 33 bp, Homo sapien
taagacatgggtcccagcttcagaatgcttcac

SEQ ID NO: 1031627 - DNA, 33 bp, Homo sapien
ctacactttgtaattacgcgaaagtatcttccc

SEQ ID NO: 1031628 - DNA, 33 bp, Homo sapien
ctacactttgtaattaggcgaaagtatcttccc

SEQ ID NO: 1031629 - DNA, 33 bp, Homo sapien
gaaatgtcctgttttaagtgactgaaaaatctt

SEQ ID NO: 1031630 - DNA, 33 bp, Homo sapien
gaaatgtcctgttttatgtgactgaaaaatctt

SEQ ID NO: 1031631 - DNA, 33 bp, Homo sapien
ggaaaccagagtcctaaaaaaatgtttgagata

SEQ ID NO: 1031632 - DNA, 33 bp, Homo sapien
ggaaaccagagtcctacaaaaatgtttgagata

SEQ ID NO: 1031633 - DNA, 33 bp, Homo sapien
ctgtctgctgtcatgccccttgaaaggctgagg

SEQ ID NO: 1031634 - DNA, 33 bp, Homo sapien
ctgtctgctgtcatgctccttgaaaggctgagg

SEQ ID NO: 1031635 - DNA, 33 bp, Homo sapien
tcataacagatcctgacaccagctgaaagactt

SEQ ID NO: 1031636 - DNA, 33 bp, Homo sapien
tcataacagatcctgataccagctgaaagactt

SEQ ID NO: 1031637 - DNA, 33 bp, Homo sapien
tctccactctggtaaactgtgtttctctgtatc

SEQ ID NO: 1031638 - DNA, 33 bp, Homo sapien
tctccactctggtaaattgtgtttctctgtatc

SEQ ID NO: 1031639 - DNA, 33 bp, Homo sapien
ctgttcatcttaacaacgtttatgctcaagaga

SEQ ID NO: 1031640 - DNA, 33 bp, Homo sapien
ctgttcatcttaacaaggtttatgctcaagaga

SEQ ID NO: 1031641 - DNA, 33 bp, Homo sapien
cagccctctggaagaacgccctgaaaaccataa

SEQ ID NO: 1031642 - DNA, 33 bp, Homo sapien
cagccctctggaagaatgccctgaaaaccataa

SEQ ID NO: 1031643 - DNA, 33 bp, Homo sapien
agttgggaaagggaaaataagaagggagagtgt

SEQ ID NO: 1031644 - DNA, 33 bp, Homo sapien
agttgggaaagggaaagtaagaagggagagtgt

SEQ ID NO: 1031645 - DNA, 33 bp, Homo sapien
gtctttgtgcgtagacacttgtccaccaagggt

SEQ ID NO: 1031646 - DNA, 33 bp, Homo sapien
gtctttgtgcgtagacgcttgtccaccaagggt

SEQ ID NO: 1031647 - DNA, 33 bp, Homo sapien
tggtccgactaacgacaagagacttgaggaagc

SEQ ID NO: 1031648 - DNA, 33 bp, Homo sapien
tggtccgactaacgacgagagacttgaggaagc

SEQ ID NO: 1031649 - DNA, 33 bp, Homo sapien
tgtttaatcttttgtcactgtgcatctaatatg

SEQ ID NO: 1031650 - DNA, 33 bp, Homo sapien
tgtttaatcttttgtcgctgtgcatctaatatg

SEQ ID NO: 1031651 - DNA, 33 bp, Homo sapien
atcaaggccacactctaaaggatctaaggaaga

SEQ ID NO: 1031652 - DNA, 33 bp, Homo sapien
atcaaggccacactctgaaggatctaaggaaga

SEQ ID NO: 1031653 - DNA, 33 bp, Homo sapien
gtaaacctttactggcccagcgtggaggctcaa

SEQ ID NO: 1031654 - DNA, 33 bp, Homo sapien
gtaaacctttactggctcagcgtggaggctcaa

SEQ ID NO: 1031655 - DNA, 33 bp, Homo sapien
agaattaaaaatggcacggctacaaaaatactt

SEQ ID NO: 1031656 - DNA, 33 bp, Homo sapien
agaattaaaaatggcatggctacaaaaatactt

SEQ ID NO: 1031657 - DNA, 33 bp, Homo sapien
caagtattgacaaagacacagaactagatctct

SEQ ID NO: 1031658 - DNA, 33 bp, Homo sapien
caagtattgacaaagatacagaactagatctct

SEQ ID NO: 1031659 - DNA, 33 bp, Homo sapien
caatgccattgaaagaaaagtttaatgtaactg

SEQ ID NO: 1031660 - DNA, 33 bp, Homo sapien
caatgccattgaaagagaagtttaatgtaactg

SEQ ID NO: 1031661 - DNA, 33 bp, Homo sapien
ggaaaaagactgatcactagttggctccagtga

SEQ ID NO: 1031662 - DNA, 33 bp, Homo sapien
ggaaaaagactgatcattagttggctccagtga

SEQ ID NO: 1031663 - DNA, 33 bp, Homo sapien
gtaagagagaagtaaaacataattaggtatgct

SEQ ID NO: 1031664 - DNA, 33 bp, Homo sapien
gtaagagagaagtaaaccataattaggtatgct

SEQ ID NO: 1031665 - DNA, 33 bp, Homo sapien
tgttaggaccagttaggccctgagaatcaaaac

SEQ ID NO: 1031666 - DNA, 33 bp, Homo sapien
tgttaggaccagttagtccctgagaatcaaaac

SEQ ID NO: 1031667 - DNA, 33 bp, Homo sapien
acctctggtttgaaacagcagtaccctgttaat

SEQ ID NO: 1031668 - DNA, 33 bp, Homo sapien
acctctggtttgaaacggcagtaccctgttaat

SEQ ID NO: 1031669 - DNA, 33 bp, Homo sapien
cgtccttgaatgacaccgatgcctgtaacagta

SEQ ID NO: 1031670 - DNA, 33 bp, Homo sapien
cgtccttgaatgacactgatgcctgtaacagta

SEQ ID NO: 1031671 - DNA, 33 bp, Homo sapien
aaataggcatcctttacattcgtttaagctttt

SEQ ID NO: 1031672 - DNA, 33 bp, Homo sapien
aaataggcatcctttatattcgtttaagctttt

SEQ ID NO: 1031673 - DNA, 33 bp, Homo sapien
tagtaattaactcacccgagatatgttcatttt

SEQ ID NO: 1031674 - DNA, 33 bp, Homo sapien
tagtaattaactcacctgagatatgttcatttt

SEQ ID NO: 1031675 - DNA, 33 bp, Homo sapien
ccccttgcccagagagcaccagacttggtgatg

SEQ ID NO: 1031676 - DNA, 33 bp, Homo sapien
ccccttgcccagagagtaccagacttggtgatg

SEQ ID NO: 1031677 - DNA, 33 bp, Homo sapien
tcctcctggtgaagaactgacctaaggccttaa

SEQ ID NO: 1031678 - DNA, 33 bp, Homo sapien
tcctcctggtgaagaagtgacctaaggccttaa

SEQ ID NO: 1031679 - DNA, 33 bp, Homo sapien
tgctgcttagtaactaccgcttagctaaatgct

SEQ ID NO: 1031680 - DNA, 33 bp, Homo sapien
tgctgcttagtaactagcgcttagctaaatgct

SEQ ID NO: 1031681 - DNA, 33 bp, Homo sapien
ggagggcttgggaatccctgagactagctaaag

SEQ ID NO: 1031682 - DNA, 33 bp, Homo sapien
ggagggcttgggaatctctgagactagctaaag

SEQ ID NO: 1031683 - DNA, 33 bp, Homo sapien
ttcctcaaaaatgaaaacagggcgtttattagg

SEQ ID NO: 1031684 - DNA, 33 bp, Homo sapien
ttcctcaaaaatgaaagcagggcgtttattagg

SEQ ID NO: 1031685 - DNA, 33 bp, Homo sapien
aagactgttcaggagaagactattgagataggt

SEQ ID NO: 1031686 - DNA, 33 bp, Homo sapien
aagactgttcaggagaggactattgagataggt

SEQ ID NO: 1031687 - DNA, 33 bp, Homo sapien
tgcaggtttgctgataagtaaattgatgtcttg

SEQ ID NO: 1031688 - DNA, 33 bp, Homo sapien
tgcaggtttgctgataggtaaattgatgtcttg

SEQ ID NO: 1031689 - DNA, 33 bp, Homo sapien
agttggaggtagctgaataatgggggcagttat

SEQ ID NO: 1031690 - DNA, 33 bp, Homo sapien
agttggaggtagctgagtaatgggggcagttat

SEQ ID NO: 1031691 - DNA, 33 bp, Homo sapien
ccaataaattcatagcaaaaaagactcaaataa

SEQ ID NO: 1031692 - DNA, 33 bp, Homo sapien
ccaataaattcatagccaaaaagactcaaataa

SEQ ID NO: 1031693 - DNA, 33 bp, Homo sapien
tcatgtgtggctaatgacaagatcttttttaag

SEQ ID NO: 1031694 - DNA, 33 bp, Homo sapien
tcatgtgtggctaatggcaagatcttttttaag

SEQ ID NO: 1031695 - DNA, 33 bp, Homo sapien
tgccctactgctacccacattccatgcaaaaat

SEQ ID NO: 1031696 - DNA, 33 bp, Homo sapien
tgccctactgctacccgcattccatgcaaaaat

SEQ ID NO: 1031697 - DNA, 33 bp, Homo sapien
atggactcaatatatagaagagtaaagcagaga

SEQ ID NO: 1031698 - DNA, 33 bp, Homo sapien
atggactcaatatatataagagtaaagcagaga

SEQ ID NO: 1031699 - DNA, 33 bp, Homo sapien
ttttattgcaagaaccacttttggctttaaaat

SEQ ID NO: 1031700 - DNA, 33 bp, Homo sapien
ttttattgcaagaaccgcttttggctttaaaat

SEQ ID NO: 1031701 - DNA, 33 bp, Homo sapien
cagcagagttcatggtaaaactgtatatatttt

SEQ ID NO: 1031702 - DNA, 33 bp, Homo sapien
cagcagagttcatggtgaaactgtatatatttt

SEQ ID NO: 1031703 - DNA, 33 bp, Homo sapien
gtttccaccttaaaaccaacagaattgtctaag

SEQ ID NO: 1031704 - DNA, 33 bp, Homo sapien
gtttccaccttaaaactaacagaattgtctaag

SEQ ID NO: 1031705 - DNA, 33 bp, Homo sapien
tctaagttgcagatgacgtaagacagaacaatt

SEQ ID NO: 1031706 - DNA, 33 bp, Homo sapien
tctaagttgcagatgatgtaagacagaacaatt

SEQ ID NO: 1031707 - DNA, 33 bp, Homo sapien
aataaactagagcatacgacggctttaccacat

SEQ ID NO: 1031708 - DNA, 33 bp, Homo sapien
aataaactagagcatatgacggctttaccacat

SEQ ID NO: 1031709 - DNA, 33 bp, Homo sapien; identical to SEQ ID NO: 1031707

SEQ ID NO: 1031710 - DNA, 33 bp, Homo sapien; identical to SEQ ID NO: 1031708

SEQ ID NO: 1031711 - DNA, 33 bp, Homo sapien
accatgtcattttataaccaaagtttgacttga

SEQ ID NO: 1031712 - DNA, 33 bp, Homo sapien
accatgtcattttatagccaaagtttgacttga

SEQ ID NO: 1031713 - DNA, 33 bp, Homo sapien
ggggatgggcagaaaagaattagaacacacaac

SEQ ID NO: 1031714 - DNA, 33 bp, Homo sapien
ggggatgggcagaaaataattagaacacacaac

SEQ ID NO: 1031715 - DNA, 33 bp, Homo sapien
tgaagaggagatggggccataatattcggaaac

SEQ ID NO: 1031716 - DNA, 33 bp, Homo sapien
tgaagaggagatggggtcataatattcggaaac

SEQ ID NO: 1031717 - DNA, 33 bp, Homo sapien
ccaaatttgatggttgaacttcagatttttcaa

SEQ ID NO: 1031718 - DNA, 33 bp, Homo sapien
ccaaatttgatggttggacttcagatttttcaa

SEQ ID NO: 1031719 - DNA, 33 bp, Homo sapien
accctagaaactcaacagcaataagcgtatcta

SEQ ID NO: 1031720 - DNA, 33 bp, Homo sapien
accctagaaactcaacggcaataagcgtatcta

SEQ ID NO: 1031721 - DNA, 33 bp, Homo sapien
tgtgggacttgcttaaagatagacatacaccaa

SEQ ID NO: 1031722 - DNA, 33 bp, Homo sapien
tgtgggacttgcttaaggatagacatacaccaa

SEQ ID NO: 1031723 - DNA, 33 bp, Homo sapien
cacccttgctcaaaatcagttggccatacatgg

SEQ ID NO: 1031724 - DNA, 33 bp, Homo sapien
cacccttgctcaaaattagttggccatacatgg

SEQ ID NO: 1031725 - DNA, 33 bp, Homo sapien
gtggacataggctatcaaagggtttttgggata

SEQ ID NO: 1031726 - DNA, 33 bp, Homo sapien
gtggacataggctatcgaagggtttttgggata

SEQ ID NO: 1031727 - DNA, 33 bp, Homo sapien
tccaagaatcaatcacagtgatgcttcccaatt

SEQ ID NO: 1031728 - DNA, 33 bp, Homo sapien
tccaagaatcaatcacggtgatgcttcccaatt

SEQ ID NO: 1031729 - DNA, 33 bp, Homo sapien
taacttcatgcatcctaaactgttttcttctca

SEQ ID NO: 1031730 - DNA, 33 bp, Homo sapien
taacttcatgcatcctgaactgttttcttctca

SEQ ID NO: 1031731 - DNA, 33 bp, Homo sapien
ttggccactagcctcaaagctacgcacaaagga

SEQ ID NO: 1031732 - DNA, 33 bp, Homo sapien
ttggccactagcctcagagctacgcacaaagga

SEQ ID NO: 1031733 - DNA, 33 bp, Homo sapien
atgatactggtctccaaaatgaacaattccttc

SEQ ID NO: 1031734 - DNA, 33 bp, Homo sapien
atgatactggtctccagaatgaacaattccttc

SEQ ID NO: 1031735 - DNA, 33 bp, Homo sapien
actttgcatctgtaaccaactgtgatcctcatt

SEQ ID NO: 1031736 - DNA, 33 bp, Homo sapien
actttgcatctgtaactaactgtgatcctcatt

SEQ ID NO: 1031737 - DNA, 33 bp, Homo sapien
caagatcaagtcatgaactgttcacaatagcta

SEQ ID NO: 1031738 - DNA, 33 bp, Homo sapien
caagatcaagtcatgagctgttcacaatagcta

SEQ ID NO: 1031739 - DNA, 33 bp, Homo sapien
tgatcttgatatggaaatctggactgaccagtg

SEQ ID NO: 1031740 - DNA, 33 bp, Homo sapien
tgatcttgatatggaagtctggactgaccagtg

SEQ ID NO: 1031741 - DNA, 33 bp, Homo sapien
atcaacacttgatcccaattagcattataggaa

SEQ ID NO: 1031742 - DNA, 33 bp, Homo sapien
atcaacacttgatccccattagcattataggaa

SEQ ID NO: 1031743 - DNA, 33 bp, Homo sapien
tcttaggcatacactgaaaggaagtgggtactt

SEQ ID NO: 1031744 - DNA, 33 bp, Homo sapien
tcttaggcatacactggaaggaagtgggtactt

SEQ ID NO: 1031745 - DNA, 33 bp, Homo sapien
aattgctaaaatgaaaaaggctaatcactacta

SEQ ID NO: 1031746 - DNA, 33 bp, Homo sapien
aattgctaaaatgaaacaggctaatcactacta

SEQ ID NO: 1031747 - DNA, 33 bp, Homo sapien
gctttgcttcctagaacttcactccaccagata

SEQ ID NO: 1031748 - DNA, 33 bp, Homo sapien
gctttgcttcctagaagttcactccaccagata

SEQ ID NO: 1031749 - DNA, 33 bp, Homo sapien
aagactagaaacgtagaagtcttcatctagact

SEQ ID NO: 1031750 - DNA, 33 bp, Homo sapien
aagactagaaacgtaggagtcttcatctagact

SEQ ID NO: 1031751 - DNA, 33 bp, Homo sapien
ctcttttttatgcaaacactctaagcgttcttg

SEQ ID NO: 1031752 - DNA, 33 bp, Homo sapien
ctcttttttatgcaaatactctaagcgttcttg

SEQ ID NO: 1031753 - DNA, 33 bp, Homo sapien
gtctcatgagaagtcactcatgattgtgaggac

SEQ ID NO: 1031754 - DNA, 33 bp, Homo sapien
gtctcatgagaagtcattcatgattgtgaggac

SEQ ID NO: 1031755 - DNA, 33 bp, Homo sapien
gagtttcaattgagaacaaaaccatccttgtac

SEQ ID NO: 1031756 - DNA, 33 bp, Homo sapien
gagtttcaattgagaataaaaccatccttgtac

SEQ ID NO: 1031757 - DNA, 33 bp, Homo sapien
ccacaggccatcttgaaaaggactctatgttca

SEQ ID NO: 1031758 - DNA, 33 bp, Homo sapien
ccacaggccatcttgagaaggactctatgttca

SEQ ID NO: 1031759 - DNA, 33 bp, Homo sapien; identical to SEQ ID NO: 1031757

SEQ ID NO: 1031760 - DNA, 33 bp, Homo sapien; identical to SEQ ID NO: 1031758

SEQ ID NO: 1031761 - DNA, 33 bp, Homo sapien
taaggtctagattacacgtgcgagaggtgcagg

SEQ ID NO: 1031762 - DNA, 33 bp, Homo sapien
taaggtctagattacatgtgcgagaggtgcagg

SEQ ID NO: 1031763 - DNA, 33 bp, Homo sapien
caactatttttcaaaacggcaggacaagagcca

SEQ ID NO: 1031764 - DNA, 33 bp, Homo sapien
caactatttttcaaaatggcaggacaagagcca

SEQ ID NO: 1031765 - DNA, 33 bp, Homo sapien; identical to SEQ ID NO: 1031763

SEQ ID NO: 1031766 - DNA, 33 bp, Homo sapien; identical to SEQ ID NO: 1031764

SEQ ID NO: 1031767 - DNA, 33 bp, Homo sapien
acctgaggtcctcacacattcagtcacctgttg

SEQ ID NO: 1031768 - DNA, 33 bp, Homo sapien
acctgaggtcctcacatattcagtcacctgttg

SEQ ID NO: 1031769 - DNA, 33 bp, Homo sapien; identical to SEQ ID NO: 1031767

SEQ ID NO: 1031770 - DNA, 33 bp, Homo sapien; identical to SEQ ID NO: 1031768

SEQ ID NO: 1031771 - DNA, 33 bp, Homo sapien
tttttcttgcaattacacttttctaatttgttt

SEQ ID NO: 1031772 - DNA, 33 bp, Homo sapien
tttttcttgcaattacgcttttctaatttgttt

SEQ ID NO: 1031773 - DNA, 33 bp, Homo sapien
gagcctagaagtttgaacctgtagttagctatg

SEQ ID NO: 1031774 - DNA, 33 bp, Homo sapien
gagcctagaagtttgagcctgtagttagctatg

SEQ ID NO: 1031775 - DNA, 33 bp, Homo sapien; identical to SEQ ID NO: 1031773

SEQ ID NO: 1031776 - DNA, 33 bp, Homo sapien; identical to SEQ ID NO: 1031774

SEQ ID NO: 1031777 - DNA, 33 bp, Homo sapien
taagaaatctctaaaacagttggcatttgatag

SEQ ID NO: 1031778 - DNA, 33 bp, Homo sapien
taagaaatctctaaaagagttggcatttgatag

SEQ ID NO: 1031779 - DNA, 33 bp, Homo sapien
atctcaaaacctacaacggttcatgtaattgta

SEQ ID NO: 1031780 - DNA, 33 bp, Homo sapien
atctcaaaacctacaatggttcatgtaattgta

SEQ ID NO: 1031781 - DNA, 33 bp, Homo sapien
aattctgtgtcaagcacaccgtaaaaaaaaaaa

SEQ ID NO: 1031782 - DNA, 33 bp, Homo sapien
aattctgtgtcaagcataccgtaaaaaaaaaaa

SEQ ID NO: 1031783 - DNA, 33 bp, Homo sapien
tgatcttcttatctcaaaccacagtaggattcc

SEQ ID NO: 1031784 - DNA, 33 bp, Homo sapien
tgatcttcttatctcagaccacagtaggattcc

SEQ ID NO: 1031785 - DNA, 33 bp, Homo sapien
tcttacagtgccatcccaatcggaatcaatggg

SEQ ID NO: 1031786 - DNA, 33 bp, Homo sapien
tcttacagtgccatccgaatcggaatcaatggg

SEQ ID NO: 1031787 - DNA, 33 bp, Homo sapien
atttaagtgaaaggcaccaattcctactacatt

SEQ ID NO: 1031788 - DNA, 33 bp, Homo sapien
atttaagtgaaaggcatcaattcctactacatt

SEQ ID NO: 1031789 - DNA, 33 bp, Homo sapien
ccccatgctgaatgcaatcttctaagtgctatc

SEQ ID NO: 1031790 - DNA, 33 bp, Homo sapien
ccccatgctgaatgcagtcttctaagtgctatc

SEQ ID NO: 1031791 - DNA, 33 bp, Homo sapien
taatcttctcagagccactagtaaccccttatc

SEQ ID NO: 1031792 - DNA, 33 bp, Homo sapien
taatcttctcagagcctctagtaaccccttatc

SEQ ID NO: 1031793 - DNA, 33 bp, Homo sapien; identical to SEQ ID NO: 1031791

SEQ ID NO: 1031794 - DNA, 33 bp, Homo sapien; identical to SEQ ID NO: 1031792

SEQ ID NO: 1031795 - DNA, 33 bp, Homo sapien
ttaaacatcctgttcaaagccgagatataatct

SEQ ID NO: 1031796 - DNA, 33 bp, Homo sapien
ttaaacatcctgttcacagccgagatataatct

SEQ ID NO: 1031797 - DNA, 33 bp, Homo sapien; identical to SEQ ID NO: 1031795

SEQ ID NO: 1031798 - DNA, 33 bp, Homo sapien; identical to SEQ ID NO: 1031796

SEQ ID NO: 1031799 - DNA, 33 bp, Homo sapien
agctttattcactgaccgaagagctttaagaag

SEQ ID NO: 1031800 - DNA, 33 bp, Homo sapien
agctttattcactgactgaagagctttaagaag

SEQ ID NO: 1031801 - DNA, 33 bp, Homo sapien
tcattttgtgcctagactaaattctcagggcta

SEQ ID NO: 1031802 - DNA, 33 bp, Homo sapien
tcattttgtgcctagagtaaattctcagggcta

SEQ ID NO: 1031803 - DNA, 33 bp, Homo sapien
actgagccatctcatacactggtggaagaatag

SEQ ID NO: 1031804 - DNA, 33 bp, Homo sapien
actgagccatctcatatactggtggaagaatag

SEQ ID NO: 1031805 - DNA, 33 bp, Homo sapien
gtgtacatagttacagcaacatgaagtgtgaat

SEQ ID NO: 1031806 - DNA, 33 bp, Homo sapien
gtgtacatagttacaggaacatgaagtgtgaat

SEQ ID NO: 1031807 - DNA, 33 bp, Homo sapien; identical to SEQ ID NO: 1031805

SEQ ID NO: 1031808 - DNA, 33 bp, Homo sapien; identical to SEQ ID NO: 1031806

SEQ ID NO: 1031809 - DNA, 33 bp, Homo sapien
ttcagatgagttgaaaattaaaggtgcaagatg

SEQ ID NO: 1031810 - DNA, 33 bp, Homo sapien
ttcagatgagttgaaagttaaaggtgcaagatg

SEQ ID NO: 1031811 - DNA, 33 bp, Homo sapien; identical to SEQ ID NO: 1031809

SEQ ID NO: 1031812 - DNA, 33 bp, Homo sapien; identical to SEQ ID NO: 1031810

SEQ ID NO: 1031813 - DNA, 33 bp, Homo sapien
cccaaattaaaactgaagtgttaggccgggcat

SEQ ID NO: 1031814 - DNA, 33 bp, Homo sapien
cccaaattaaaactgaggtgttaggccgggcat

SEQ ID NO: 1031815 - DNA, 33 bp, Homo sapien
tgacctctcaactcaactggtcctcccacctca

SEQ ID NO: 1031816 - DNA, 33 bp, Homo sapien
tgacctctcaactcaagtggtcctcccacctca

SEQ ID NO: 1031817 - DNA, 33 bp, Homo sapien
ggaccatgagacagcaatgaggatggaaagcac

SEQ ID NO: 1031818 - DNA, 33 bp, Homo sapien
ggaccatgagacagcactgaggatggaaagcac

SEQ ID NO: 1031819 - DNA, 33 bp, Homo sapien
gtacttctttgacttaccaagattcaattttga

SEQ ID NO: 1031820 - DNA, 33 bp, Homo sapien
gtacttctttgacttatcaagattcaattttga

SEQ ID NO: 1031821 - DNA, 33 bp, Homo sapien
tatgtattggtggtacaacactcaactccatgc

SEQ ID NO: 1031822 - DNA, 33 bp, Homo sapien
tatgtattggtggtaccacactcaactccatgc

SEQ ID NO: 1031823 - DNA, 33 bp, Homo sapien
tggatgggtcacataacggcacttaccccacag

SEQ ID NO: 1031824 - DNA, 33 bp, Homo sapien
tggatgggtcacataatggcacttaccccacag

SEQ ID NO: 1031825 - DNA, 33 bp, Homo sapien
ggcaggtagagtaggaagtgaacaggaaggaat

SEQ ID NO: 1031826 - DNA, 33 bp, Homo sapien
ggcaggtagagtaggacgtgaacaggaaggaat

SEQ ID NO: 1031827 - DNA, 33 bp, Homo sapien
aactcacaggtggttcaaggcaagtatggaatc

SEQ ID NO: 1031828 - DNA, 33 bp, Homo sapien
aactcacaggtggttcgaggcaagtatggaatc

SEQ ID NO: 1031829 - DNA, 33 bp, Homo sapien
gagttccatgctttacacttacaaggcattccc

SEQ ID NO: 1031830 - DNA, 33 bp, Homo sapien
gagttccatgctttacgcttacaaggcattccc

SEQ ID NO: 1031831 - DNA, 33 bp, Homo sapien
aacaggtgacagtgaaagagggaatgagggaat

SEQ ID NO: 1031832 - DNA, 33 bp, Homo sapien
aacaggtgacagtgaaggagggaatgagggaat

SEQ ID NO: 1031833 - DNA, 33 bp, Homo sapien
aaagccctcttgacaacagtgtaggttgttgaa

SEQ ID NO: 1031834 - DNA, 33 bp, Homo sapien
aaagccctcttgacaatagtgtaggttgttgaa

SEQ ID NO: 1031835 - DNA, 33 bp, Homo sapien
ttggaaaaacagaactcactaataatagggatt

SEQ ID NO: 1031836 - DNA, 33 bp, Homo sapien
ttggaaaaacagaactgactaataatagggatt

SEQ ID NO: 1031837 - DNA, 33 bp, Homo sapien
ccctggcggccaccagaaagcgggctgcagagc

SEQ ID NO: 1031838 - DNA, 33 bp, Homo sapien
ccctggcggccaccaggaagcgggctgcagagc

SEQ ID NO: 1031839 - DNA, 33 bp, Homo sapien
gcctgtaggaatgaaggctcaagtaccacccct

SEQ ID NO: 1031840 - DNA, 33 bp, Homo sapien
gcctgtaggaatgaagtctcaagtaccacccct

SEQ ID NO: 1031841 - DNA, 33 bp, Homo sapien
gctccagcagggcctacgcagagaagtttgggt

SEQ ID NO: 1031842 - DNA, 33 bp, Homo sapien
gctccagcagggcctatgcagagaagtttgggt

SEQ ID NO: 1031843 - DNA, 33 bp, Homo sapien
tcatcagcgctccagacgatagccctatattag

SEQ ID NO: 1031844 - DNA, 33 bp, Homo sapien
tcatcagcgctccagatgatagccctatattag

SEQ ID NO: 1031845 - DNA, 33 bp, Homo sapien
aggaccctaaataataacaatggctgccattca

SEQ ID NO: 1031846 - DNA, 33 bp, Homo sapien
aggaccctaaataatagcaatggctgccattca

SEQ ID NO: 1031847 - DNA, 33 bp, Homo sapien
aagagtttgacacttcaagagcttaggctgagg

SEQ ID NO: 1031848 - DNA, 33 bp, Homo sapien
aagagtttgacacttcgagagcttaggctgagg

SEQ ID NO: 1031849 - DNA, 33 bp, Homo sapien
actacacctgctcctcactcttcttctcaccag

SEQ ID NO: 1031850 - DNA, 33 bp, Homo sapien
actacacctgctcctcgctcttcttctcaccag

SEQ ID NO: 1031851 - DNA, 33 bp, Homo sapien
ggccaaccagactccaaaaggcaggaagggatg

SEQ ID NO: 1031852 - DNA, 33 bp, Homo sapien
ggccaaccagactccagaaggcaggaagggatg

SEQ ID NO: 1031853 - DNA, 33 bp, Homo sapien
ggaggtttcaaagcaacgcagcttaagttcaag

SEQ ID NO: 1031854 - DNA, 33 bp, Homo sapien
ggaggtttcaaagcaatgcagcttaagttcaag

SEQ ID NO: 1031855 - DNA, 33 bp, Homo sapien
agctataggatggcgaacttattgcctgccctt

SEQ ID NO: 1031856 - DNA, 33 bp, Homo sapien
agctataggatggcgagcttattgcctgccctt

SEQ ID NO: 1031857 - DNA, 33 bp, Homo sapien
tagggataaacacaaaatgagcatagcaaactt

SEQ ID NO: 1031858 - DNA, 33 bp, Homo sapien
tagggataaacacaaactgagcatagcaaactt

SEQ ID NO: 1031859 - DNA, 33 bp, Homo sapien
gagccgttattagcaacagccagtattttaagg

SEQ ID NO: 1031860 - DNA, 33 bp, Homo sapien
gagccgttattagcaatagccagtattttaagg

SEQ ID NO: 1031861 - DNA, 33 bp, Homo sapien
actttcatctttaacaatgccaccaagaaagtt

SEQ ID NO: 1031862 - DNA, 33 bp, Homo sapien
actttcatctttaacagtgccaccaagaaagtt

SEQ ID NO: 1031863 - DNA, 33 bp, Homo sapien
gtgtaaaaatgtgtgaaggactggtaatttcaa

SEQ ID NO: 1031864 - DNA, 33 bp, Homo sapien
gtgtaaaaatgtgtgagggactggtaatttcaa

SEQ ID NO: 1031865 - DNA, 33 bp, Homo sapien
agctgagtaatgcctgaaccagtcttcatcatt

SEQ ID NO: 1031866 - DNA, 33 bp, Homo sapien
agctgagtaatgcctgcaccagtcttcatcatt

SEQ ID NO: 1031867 - DNA, 33 bp, Homo sapien
tggaagaagagcattgcaggaagtcccattcca

SEQ ID NO: 1031868 - DNA, 33 bp, Homo sapien
tggaagaagagcattgtaggaagtcccattcca

SEQ ID NO: 1031869 - DNA, 33 bp, Homo sapien
tatgaacttggcactgcaagtgtcgttgatgaa

SEQ ID NO: 1031870 - DNA, 33 bp, Homo sapien
tatgaacttggcactggaagtgtcgttgatgaa

SEQ ID NO: 1031871 - DNA, 33 bp, Homo sapien
catatggagacccaaaatgcttccccctttcac

SEQ ID NO: 1031872 - DNA, 33 bp, Homo sapien
catatggagacccaaagtgcttccccctttcac

SEQ ID NO: 1031873 - DNA, 33 bp, Homo sapien
cagagaggtcaggtaacctgtatagggtcacac

SEQ ID NO: 1031874 - DNA, 33 bp, Homo sapien
cagagaggtcaggtaagctgtatagggtcacac

SEQ ID NO: 1031875 - DNA, 33 bp, Homo sapien
ctgcagaaggggttgacagaagtgttaaggagg

SEQ ID NO: 1031876 - DNA, 33 bp, Homo sapien
ctgcagaaggggttgatagaagtgttaaggagg

SEQ ID NO: 1031877 - DNA, 33 bp, Homo sapien
catggtgatgtagggaataaaggaacctccttt

SEQ ID NO: 1031878 - DNA, 33 bp, Homo sapien
catggtgatgtagggagtaaaggaacctccttt

SEQ ID NO: 1031879 - DNA, 33 bp, Homo sapien
acaatagcctgggaccaattctgtctgggctct

SEQ ID NO: 1031880 - DNA, 33 bp, Homo sapien
acaatagcctgggacccattctgtctgggctct

SEQ ID NO: 1031881 - DNA, 33 bp, Homo sapien
tgcagatactgacatgaaaggtgcccactcttg

SEQ ID NO: 1031882 - DNA, 33 bp, Homo sapien
tgcagatactgacatggaaggtgcccactcttg

SEQ ID NO: 1031883 - DNA, 33 bp, Homo sapien
ctctccagaacagaaacgtccagtctctcacat

SEQ ID NO: 1031884 - DNA, 33 bp, Homo sapien
ctctccagaacagaaatgtccagtctctcacat

SEQ ID NO: 1031885 - DNA, 33 bp, Homo sapien
tttgctcagagttgaaactgtagatccaggaag

SEQ ID NO: 1031886 - DNA, 33 bp, Homo sapien
tttgctcagagttgaacctgtagatccaggaag

SEQ ID NO: 1031887 - DNA, 33 bp, Homo sapien
agtgagaaacacacaaaagccaaaaattaagtg

SEQ ID NO: 1031888 - DNA, 33 bp, Homo sapien
agtgagaaacacacaagagccaaaaattaagtg

SEQ ID NO: 1031889 - DNA, 33 bp, Homo sapien
ttagatatcatttctcaccaatagcctggcaaa

SEQ ID NO: 1031890 - DNA, 33 bp, Homo sapien
ttagatatcatttctcgccaatagcctggcaaa

SEQ ID NO: 1031891 - DNA, 33 bp, Homo sapien
gactgacaaattgttccctatgacagcggtatc

SEQ ID NO: 1031892 - DNA, 33 bp, Homo sapien
gactgacaaattgttctctatgacagcggtatc

SEQ ID NO: 1031893 - DNA, 33 bp, Homo sapien
caacgtcagagcatcaagcttgggtttggagct

SEQ ID NO: 1031894 - DNA, 33 bp, Homo sapien
caacgtcagagcatcaggcttgggtttggagct

SEQ ID NO: 1031895 - DNA, 33 bp, Homo sapien
agatgaccttcacacaaccggtatcagacgtat

SEQ ID NO: 1031896 - DNA, 33 bp, Homo sapien
agatgaccttcacacatccggtatcagacgtat

SEQ ID NO: 1031897 - DNA, 33 bp, Homo sapien
ttcactgttactgttcaaagtcaccaacaaatc

SEQ ID NO: 1031898 - DNA, 33 bp, Homo sapien
ttcactgttactgttcgaagtcaccaacaaatc

SEQ ID NO: 1031899 - DNA, 33 bp, Homo sapien
ggtggcaggagagtgaagttagagagcacggga

SEQ ID NO: 1031900 - DNA, 33 bp, Homo sapien
ggtggcaggagagtgacgttagagagcacggga

SEQ ID NO: 1031901 - DNA, 33 bp, Homo sapien
ttccagggtgcgagaaaggctgtcacggcaaca

SEQ ID NO: 1031902 - DNA, 33 bp, Homo sapien
ttccagggtgcgagaagggctgtcacggcaaca

SEQ ID NO: 1031903 - DNA, 33 bp, Homo sapien
ggcttagaccacagaaaatgcacagagtctaaa

SEQ ID NO: 1031904 - DNA, 33 bp, Homo sapien
ggcttagaccacagaagatgcacagagtctaaa

SEQ ID NO: 1031905 - DNA, 33 bp, Homo sapien
cccaattcatctgaaaacaaccccatcccttcc

SEQ ID NO: 1031906 - DNA, 33 bp, Homo sapien
cccaattcatctgaaagcaaccccatcccttcc

SEQ ID NO: 1031907 - DNA, 33 bp, Homo sapien
tgagctatatgaatgaactacaagtcaggagag

SEQ ID NO: 1031908 - DNA, 33 bp, Homo sapien
tgagctatatgaatgatctacaagtcaggagag

SEQ ID NO: 1031909 - DNA, 33 bp, Homo sapien
tttaaggaacaaagcagtctagaagctcagcta

SEQ ID NO: 1031910 - DNA, 33 bp, Homo sapien
tttaaggaacaaagcattctagaagctcagcta

SEQ ID NO: 1031911 - DNA, 33 bp, Homo sapien
tttggtcttagcaatacagcccaagaacaatac

SEQ ID NO: 1031912 - DNA, 33 bp, Homo sapien
tttggtcttagcaatatagcccaagaacaatac

SEQ ID NO: 1031913 - DNA, 33 bp, Homo sapien
tctgaagtccacactccgaatgaatgccaggga

SEQ ID NO: 1031914 - DNA, 33 bp, Homo sapien
tctgaagtccacactctgaatgaatgccaggga

SEQ ID NO: 1031915 - DNA, 33 bp, Homo sapien
cttagtgttataaaacggcttagacctctgtca

SEQ ID NO: 1031916 - DNA, 33 bp, Homo sapien
cttagtgttataaaactgcttagacctctgtca

SEQ ID NO: 1031917 - DNA, 33 bp, Homo sapien
aaagatgaactccctacaccatggagtcaagcc

SEQ ID NO: 1031918 - DNA, 33 bp, Homo sapien
aaagatgaactccctagaccatggagtcaagcc

SEQ ID NO: 1031919 - DNA, 33 bp, Homo sapien
ctgataacaagatagcaccttctttctttgtac

SEQ ID NO: 1031920 - DNA, 33 bp, Homo sapien
ctgataacaagatagcgccttctttctttgtac

SEQ ID NO: 1031921 - DNA, 33 bp, Homo sapien
cggagtccgccttaaccactatgccctctgtct

SEQ ID NO: 1031922 - DNA, 33 bp, Homo sapien
cggagtccgccttaactactatgccctctgtct

SEQ ID NO: 1031923 - DNA, 33 bp, Homo sapien
ataatataacagctcacgcttacataatatccc

SEQ ID NO: 1031924 - DNA, 33 bp, Homo sapien
ataatataacagctcatgcttacataatatccc

SEQ ID NO: 1031925 - DNA, 33 bp, Homo sapien
caggtctccttgatgacgcattattcttggccc

SEQ ID NO: 1031926 - DNA, 33 bp, Homo sapien
caggtctccttgatgatgcattattcttggccc

SEQ ID NO: 1031927 - DNA, 33 bp, Homo sapien
aatgctaagaaatgaacgagctaagaactcctc

SEQ ID NO: 1031928 - DNA, 33 bp, Homo sapien
aatgctaagaaatgaatgagctaagaactcctc

SEQ ID NO: 1031929 - DNA, 33 bp, Homo sapien
ccttatcatgtaacacaagattgtttgataccg

SEQ ID NO: 1031930 - DNA, 33 bp, Homo sapien
ccttatcatgtaacacgagattgtttgataccg

SEQ ID NO: 1031931 - DNA, 33 bp, Homo sapien
ttaccatttcactgatgagacatccaagcatca

SEQ ID NO: 1031932 - DNA, 33 bp, Homo sapien
ttaccatttcactgattagacatccaagcatca

SEQ ID NO: 1031933 - DNA, 33 bp, Homo sapien
ggggattcagagaaaactaagatatatcccagc

SEQ ID NO: 1031934 - DNA, 33 bp, Homo sapien
ggggattcagagaaaattaagatatatcccagc

SEQ ID NO: 1031935 - DNA, 33 bp, Homo sapien
atctatctggtagaggccacggatttagttaaa

SEQ ID NO: 1031936 - DNA, 33 bp, Homo sapien
atctatctggtagaggtcacggatttagttaaa

SEQ ID NO: 1031937 - DNA, 33 bp, Homo sapien
tgctgcttaaggaaaactgggatgtgtggagca

SEQ ID NO: 1031938 - DNA, 33 bp, Homo sapien
tgctgcttaaggaaaagtgggatgtgtggagca

SEQ ID NO: 1031939 - DNA, 33 bp, Homo sapien
acagtaggtagaaaataaaggcctgactgactt

SEQ ID NO: 1031940 - DNA, 33 bp, Homo sapien
acagtaggtagaaaatcaaggcctgactgactt

SEQ ID NO: 1031941 - DNA, 33 bp, Homo sapien
gccacccatgtattcccctagctctgcaaatgc

SEQ ID NO: 1031942 - DNA, 33 bp, Homo sapien
gccacccatgtattcctctagctctgcaaatgc

SEQ ID NO: 1031943 - DNA, 33 bp, Homo sapien
caggacagatctagaacaaaaaccagcgttctt

SEQ ID NO: 1031944 - DNA, 33 bp, Homo sapien
caggacagatctagaataaaaaccagcgttctt

SEQ ID NO: 1031945 - DNA, 33 bp, Homo sapien
cctggtgtttgtttaacgtagactctgtgaggg

SEQ ID NO: 1031946 - DNA, 33 bp, Homo sapien
cctggtgtttgtttaatgtagactctgtgaggg

SEQ ID NO: 1031947 - DNA, 33 bp, Homo sapien
ggtgggaaagcctcgaagttcagagagtggcag

SEQ ID NO: 1031948 - DNA, 33 bp, Homo sapien
ggtgggaaagcctcgaggttcagagagtggcag

SEQ ID NO: 1031949 - DNA, 33 bp, Homo sapien
caatacagccaaagaacgatcaggcctccatta

SEQ ID NO: 1031950 - DNA, 33 bp, Homo sapien
caatacagccaaagaatgatcaggcctccatta

SEQ ID NO: 1031951 - DNA, 33 bp, Homo sapien
gaaacacttgcatgaaaacttcaaaattttatt

SEQ ID NO: 1031952 - DNA, 33 bp, Homo sapien
gaaacacttgcatgaatacttcaaaattttatt

SEQ ID NO: 1031953 - DNA, 33 bp, Homo sapien
gaatgaagaaaactggaaattttaacctggaga

SEQ ID NO: 1031954 - DNA, 33 bp, Homo sapien
gaatgaagaaaactgggaattttaacctggaga

SEQ ID NO: 1031955 - DNA, 33 bp, Homo sapien
taccttagctgaatacactggttcaaaaacatt

SEQ ID NO: 1031956 - DNA, 33 bp, Homo sapien
taccttagctgaataccctggttcaaaaacatt

SEQ ID NO: 1031957 - DNA, 33 bp, Homo sapien
accaggtgctccagcagccagacagtgggctgt

SEQ ID NO: 1031958 - DNA, 33 bp, Homo sapien
accaggtgctccagcatccagacagtgggctgt

SEQ ID NO: 1031959 - DNA, 33 bp, Homo sapien
cccattcaaagctctccgactcctaaccccctt

SEQ ID NO: 1031960 - DNA, 33 bp, Homo sapien
cccattcaaagctctctgactcctaaccccctt

SEQ ID NO: 1031961 - DNA, 33 bp, Homo sapien
cagggaaaattctgtagatgcctctccgagtct

SEQ ID NO: 1031962 - DNA, 33 bp, Homo sapien
cagggaaaattctgtatatgcctctccgagtct

SEQ ID NO: 1031963 - DNA, 33 bp, Homo sapien
ctggagaggacgctataagttcagaaaagggta

SEQ ID NO: 1031964 - DNA, 33 bp, Homo sapien
ctggagaggacgctatgagttcagaaaagggta

SEQ ID NO: 1031965 - DNA, 33 bp, Homo sapien
ttcactgcggcattaacgtaggatgcaaataat

SEQ ID NO: 1031966 - DNA, 33 bp, Homo sapien
ttcactgcggcattaatgtaggatgcaaataat

SEQ ID NO: 1031967 - DNA, 33 bp, Homo sapien
ccatgctggagccatacgaggggtgaaggcatg

SEQ ID NO: 1031968 - DNA, 33 bp, Homo sapien
ccatgctggagccatatgaggggtgaaggcatg

SEQ ID NO: 1031969 - DNA, 33 bp, Homo sapien
tgcaagatccttgatacatgtcaaaggcaggct

SEQ ID NO: 1031970 - DNA, 33 bp, Homo sapien
tgcaagatccttgatagatgtcaaaggcaggct

SEQ ID NO: 1031971 - DNA, 33 bp, Homo sapien
atatggtgactcagtgaaagaatggggacgagc

SEQ ID NO: 1031972 - DNA, 33 bp, Homo sapien
atatggtgactcagtggaagaatggggacgagc

SEQ ID NO: 1031973 - DNA, 33 bp, Homo sapien
agtcacaattcataaaatacacccaggcagtct

SEQ ID NO: 1031974 - DNA, 33 bp, Homo sapien
agtcacaattcataaagtacacccaggcagtct

SEQ ID NO: 1031975 - DNA, 33 bp, Homo sapien
ctaacctcagtacagtctaggagagaactatgc

SEQ ID NO: 1031976 - DNA, 33 bp, Homo sapien
ctaacctcagtacagtgtaggagagaactatgc

SEQ ID NO: 1031977 - DNA, 33 bp, Homo sapien
ggatgtggaacaactgcaacacccagtcactgt

SEQ ID NO: 1031978 - DNA, 33 bp, Homo sapien
ggatgtggaacaactggaacacccagtcactgt

SEQ ID NO: 1031979 - DNA, 33 bp, Homo sapien
ttgctttaaaatagaagctgtctggtgataaat

SEQ ID NO: 1031980 - DNA, 33 bp, Homo sapien
ttgctttaaaatagaatctgtctggtgataaat

SEQ ID NO: 1031981 - DNA, 33 bp, Homo sapien
gggaggagtgtagatcaaataagcattagtgtc

SEQ ID NO: 1031982 - DNA, 33 bp, Homo sapien
gggaggagtgtagatcgaataagcattagtgtc

SEQ ID NO: 1031983 - DNA, 33 bp, Homo sapien
accctctacacccttaccagtttaagacaatcc

SEQ ID NO: 1031984 - DNA, 33 bp, Homo sapien
accctctacacccttatcagtttaagacaatcc

SEQ ID NO: 1031985 - DNA, 33 bp, Homo sapien
atgcttggagaaaggcgaagtcaaaacaagtca

SEQ ID NO: 1031986 - DNA, 33 bp, Homo sapien
atgcttggagaaaggctaagtcaaaacaagtca

SEQ ID NO: 1031987 - DNA, 33 bp, Homo sapien
gtgcagaagtggtaggccagctacaaatttgag

SEQ ID NO: 1031988 - DNA, 33 bp, Homo sapien
gtgcagaagtggtaggtcagctacaaatttgag

SEQ ID NO: 1031989 - DNA, 33 bp, Homo sapien
gattgccttcttacaaaagagatgggagctgag

SEQ ID NO: 1031990 - DNA, 33 bp, Homo sapien
gattgccttcttacaacagagatgggagctgag

SEQ ID NO: 1031991 - DNA, 33 bp, Homo sapien
aacctaaggttttacactgactttgactttttc

SEQ ID NO: 1031992 - DNA, 33 bp, Homo sapien
aacctaaggttttacattgactttgactttttc

SEQ ID NO: 1031993 - DNA, 33 bp, Homo sapien
ggagtgctcaagaaataatgacataaggctggg

SEQ ID NO: 1031994 - DNA, 33 bp, Homo sapien
ggagtgctcaagaaatgatgacataaggctggg

SEQ ID NO: 1031995 - DNA, 33 bp, Homo sapien
gtggagtgacttgttacgtagatagttattggc

SEQ ID NO: 1031996 - DNA, 33 bp, Homo sapien
gtggagtgacttgttatgtagatagttattggc

SEQ ID NO: 1031997 - DNA, 33 bp, Homo sapien
catggctgggattcagaaatatttgtggaattg

SEQ ID NO: 1031998 - DNA, 33 bp, Homo sapien
catggctgggattcagcaatatttgtggaattg

SEQ ID NO: 1031999 - DNA, 33 bp, Homo sapien
gttgtacacaatgctaaaatacagttcagttct

SEQ ID NO: 1032000 - DNA, 33 bp, Homo sapien
gttgtacacaatgctacaatacagttcagttct

SEQ ID NO: 1032001 - DNA, 33 bp, Homo sapien
aaggttaaccattgaacattagtgggaaacatc

SEQ ID NO: 1032002 - DNA, 33 bp, Homo sapien
aaggttaaccattgaatattagtgggaaacatc

SEQ ID NO: 1032003 - DNA, 33 bp, Homo sapien
tatctccaattcaaccgaagatttcagcaggta

SEQ ID NO: 1032004 - DNA, 33 bp, Homo sapien
tatctccaattcaacctaagatttcagcaggta

SEQ ID NO: 1032005 - DNA, 33 bp, Homo sapien
attcttggggactgtgaatatagcttgccacag

SEQ ID NO: 1032006 - DNA, 33 bp, Homo sapien
attcttggggactgtggatatagcttgccacag

SEQ ID NO: 1032007 - DNA, 33 bp, Homo sapien
cctggtggtgtctagaactgaacacaagctcca

SEQ ID NO: 1032008 - DNA, 33 bp, Homo sapien
cctggtggtgtctagatctgaacacaagctcca

SEQ ID NO: 1032009 - DNA, 33 bp, Homo sapien
tttctgaaatgaaaaaactctatgctggtggtg

SEQ ID NO: 1032010 - DNA, 33 bp, Homo sapien
tttctgaaatgaaaaatctctatgctggtggtg

SEQ ID NO: 1032011 - DNA, 33 bp, Homo sapien
aaaggaaaggtaaagcaaattttgattacataa

SEQ ID NO: 1032012 - DNA, 33 bp, Homo sapien
aaaggaaaggtaaagcgaattttgattacataa

SEQ ID NO: 1032013 - DNA, 33 bp, Homo sapien
aagccacgtgttgaaccagctgtctccacccca

SEQ ID NO: 1032014 - DNA, 33 bp, Homo sapien
aagccacgtgttgaactagctgtctccacccca

SEQ ID NO: 1032015 - DNA, 33 bp, Homo sapien
tttactcagcacatcccatgcaccccacacttc

SEQ ID NO: 1032016 - DNA, 33 bp, Homo sapien
tttactcagcacatcctatgcaccccacacttc

SEQ ID NO: 1032017 - DNA, 33 bp, Homo sapien
cctgacaggtagacggccacctatgtggacagc

SEQ ID NO: 1032018 - DNA, 33 bp, Homo sapien
cctgacaggtagacgggcacctatgtggacagc

SEQ ID NO: 1032019 - DNA, 33 bp, Homo sapien
accagatgcatgcaagcctggcagtttacagat

SEQ ID NO: 1032020 - DNA, 33 bp, Homo sapien
accagatgcatgcaagtctggcagtttacagat

SEQ ID NO: 1032021 - DNA, 33 bp, Homo sapien
ctccttccacagcagaatacatgtgaacttgtg

SEQ ID NO: 1032022 - DNA, 33 bp, Homo sapien
ctccttccacagcagagtacatgtgaacttgtg

SEQ ID NO: 1032023 - DNA, 33 bp, Homo sapien
tattttggtttcaaaacgacatccacatggaag

SEQ ID NO: 1032024 - DNA, 33 bp, Homo sapien
tattttggtttcaaaatgacatccacatggaag

SEQ ID NO: 1032025 - DNA, 33 bp, Homo sapien
tctgatgcttggcgggcagcgttccggcccact

SEQ ID NO: 1032026 - DNA, 33 bp, Homo sapien
tctgatgcttggcgggtagcgttccggcccact

SEQ ID NO: 1032027 - DNA, 33 bp, Homo sapien
caagcatcagaactgaaaacttctctcacaact

SEQ ID NO: 1032028 - DNA, 33 bp, Homo sapien
caagcatcagaactgacaacttctctcacaact

SEQ ID NO: 1032029 - DNA, 33 bp, Homo sapien
cactgaagtcttgcaacgtcagagtaaaaaaac

SEQ ID NO: 1032030 - DNA, 33 bp, Homo sapien
cactgaagtcttgcaatgtcagagtaaaaaaac

SEQ ID NO: 1032031 - DNA, 33 bp, Homo sapien
aaggcacatggcagaacgagaaaagctcgatgc

SEQ ID NO: 1032032 - DNA, 33 bp, Homo sapien
aaggcacatggcagaatgagaaaagctcgatgc

SEQ ID NO: 1032033 - DNA, 33 bp, Homo sapien
tctgtcagttcttctccccttcaacctcctgct

SEQ ID NO: 1032034 - DNA, 33 bp, Homo sapien
tctgtcagttcttctctccttcaacctcctgct

SEQ ID NO: 1032035 - DNA, 33 bp, Homo sapien
ccttgagaatcaggtccatagattaaaaaacaa

SEQ ID NO: 1032036 - DNA, 33 bp, Homo sapien
ccttgagaatcaggtctatagattaaaaaacaa

SEQ ID NO: 1032037 - DNA, 33 bp, Homo sapien
aaacaaaaagctccacaaaacaattactgcaaa

SEQ ID NO: 1032038 - DNA, 33 bp, Homo sapien
aaacaaaaagctccaccaaacaattactgcaaa

SEQ ID NO: 1032039 - DNA, 33 bp, Homo sapien
tatctaaatgcttttcacagctgaactagtaga

SEQ ID NO: 1032040 - DNA, 33 bp, Homo sapien
tatctaaatgcttttcccagctgaactagtaga

SEQ ID NO: 1032041 - DNA, 33 bp, Homo sapien
agggaagggtagtacacatacacgtgaacactg

SEQ ID NO: 1032042 - DNA, 33 bp, Homo sapien
agggaagggtagtacatatacacgtgaacactg

SEQ ID NO: 1032043 - DNA, 33 bp, Homo sapien
attctcttgttgtataagcagaaaacctgcact

SEQ ID NO: 1032044 - DNA, 33 bp, Homo sapien
attctcttgttgtataggcagaaaacctgcact

SEQ ID NO: 1032045 - DNA, 33 bp, Homo sapien
tgggccttccaagacacctggccacaaagacac

SEQ ID NO: 1032046 - DNA, 33 bp, Homo sapien
tgggccttccaagacatctggccacaaagacac

SEQ ID NO: 1032047 - DNA, 33 bp, Homo sapien
ttccaggaatgagctaaaaagcccagagtccaa

SEQ ID NO: 1032048 - DNA, 33 bp, Homo sapien
ttccaggaatgagctagaaagcccagagtccaa

SEQ ID NO: 1032049 - DNA, 33 bp, Homo sapien
gaccctggatagactcaagtaaaacttatgtga

SEQ ID NO: 1032050 - DNA, 33 bp, Homo sapien
gaccctggatagactccagtaaaacttatgtga

SEQ ID NO: 1032051 - DNA, 33 bp, Homo sapien
acatggctatgtattcaaactggatataggtga

SEQ ID NO: 1032052 - DNA, 33 bp, Homo sapien
acatggctatgtattcgaactggatataggtga

SEQ ID NO: 1032053 - DNA, 33 bp, Homo sapien
gaatcaaatgaaactaccaagtgagtaaaaaga

SEQ ID NO: 1032054 - DNA, 33 bp, Homo sapien
gaatcaaatgaaactatcaagtgagtaaaaaga

SEQ ID NO: 1032055 - DNA, 33 bp, Homo sapien
atgtatccctttgtacacattacccagccctaa

SEQ ID NO: 1032056 - DNA, 33 bp, Homo sapien
atgtatccctttgtactcattacccagccctaa

SEQ ID NO: 1032057 - DNA, 33 bp, Homo sapien
ctgaaagcagaattgcaccccatttgtctaccc

SEQ ID NO: 1032058 - DNA, 33 bp, Homo sapien
ctgaaagcagaattgcgccccatttgtctaccc

SEQ ID NO: 1032059 - DNA, 33 bp, Homo sapien
tattttctgaattagaaagcctggagcaggggt

SEQ ID NO: 1032060 - DNA, 33 bp, Homo sapien
tattttctgaattagagagcctggagcaggggt

SEQ ID NO: 1032061 - DNA, 33 bp, Homo sapien
gagtcaaacagtgacacatgatttccaccaaga

SEQ ID NO: 1032062 - DNA, 33 bp, Homo sapien
gagtcaaacagtgacagatgatttccaccaaga

SEQ ID NO: 1032063 - DNA, 33 bp, Homo sapien
ttcaaatgcattattcaaagagaacatttatga

SEQ ID NO: 1032064 - DNA, 33 bp, Homo sapien
ttcaaatgcattattcgaagagaacatttatga

SEQ ID NO: 1032065 - DNA, 33 bp, Homo sapien
tgtcaaccttcttgccagccacgtctcccatag

SEQ ID NO: 1032066 - DNA, 33 bp, Homo sapien
tgtcaaccttcttgccggccacgtctcccatag

SEQ ID NO: 1032067 - DNA, 33 bp, Homo sapien
agcagaaggtttcaaacgcacccttttcaggca

SEQ ID NO: 1032068 - DNA, 33 bp, Homo sapien
agcagaaggtttcaaatgcacccttttcaggca

SEQ ID NO: 1032069 - DNA, 33 bp, Homo sapien
ttcttctggcctttaagtccaatattataatta

SEQ ID NO: 1032070 - DNA, 33 bp, Homo sapien
ttcttctggcctttaattccaatattataatta

SEQ ID NO: 1032071 - DNA, 33 bp, Homo sapien
tagctcaagcactgtaccaggcacagcactggc

SEQ ID NO: 1032072 - DNA, 33 bp, Homo sapien
tagctcaagcactgtatcaggcacagcactggc

SEQ ID NO: 1032073 - DNA, 33 bp, Homo sapien
aatacctgcaaagcacaatagagtgaagttcaa

SEQ ID NO: 1032074 - DNA, 33 bp, Homo sapien
aatacctgcaaagcaccatagagtgaagttcaa

SEQ ID NO: 1032075 - DNA, 33 bp, Homo sapien
ccaaagtatgctggtaccttgtctcctctaact

SEQ ID NO: 1032076 - DNA, 33 bp, Homo sapien
ccaaagtatgctggtatcttgtctcctctaact

SEQ ID NO: 1032077 - DNA, 33 bp, Homo sapien
tgaaagtgctttcttacacgttatcccgtatga

SEQ ID NO: 1032078 - DNA, 33 bp, Homo sapien
tgaaagtgctttcttatacgttatcccgtatga

SEQ ID NO: 1032079 - DNA, 33 bp, Homo sapien
acaacagtggtccctcaagatcatgatatcata

SEQ ID NO: 1032080 - DNA, 33 bp, Homo sapien
acaacagtggtccctcgagatcatgatatcata

SEQ ID NO: 1032081 - DNA, 33 bp, Homo sapien
cacagaaggtgagtcaaaatttgtggtctaaac

SEQ ID NO: 1032082 - DNA, 33 bp, Homo sapien
cacagaaggtgagtcataatttgtggtctaaac

SEQ ID NO: 1032083 - DNA, 33 bp, Homo sapien
cccacttaataaaggaacaaatgtgattttgat

SEQ ID NO: 1032084 - DNA, 33 bp, Homo sapien
cccacttaataaaggaccaaatgtgattttgat

SEQ ID NO: 1032085 - DNA, 33 bp, Homo sapien
tctgactgtcaggtagccgatagctcagcctct

SEQ ID NO: 1032086 - DNA, 33 bp, Homo sapien
tctgactgtcaggtagtcgatagctcagcctct

SEQ ID NO: 1032087 - DNA, 33 bp, Homo sapien
taaaaaccagtcatacagacaaacactccacat

SEQ ID NO: 1032088 - DNA, 33 bp, Homo sapien
taaaaaccagtcatactgacaaacactccacat

SEQ ID NO: 1032089 - DNA, 33 bp, Homo sapien
taatgtttcaattgggaaggtcaagtcagatag

SEQ ID NO: 1032090 - DNA, 33 bp, Homo sapien
taatgtttcaattggggaggtcaagtcagatag

SEQ ID NO: 1032091 - DNA, 33 bp, Homo sapien
catggtatcaatgccacgaagtcctggagaaac

SEQ ID NO: 1032092 - DNA, 33 bp, Homo sapien
catggtatcaatgccaggaagtcctggagaaac

SEQ ID NO: 1032093 - DNA, 33 bp, Homo sapien
tttagtctgtactctcacatggttgtgggcaag

SEQ ID NO: 1032094 - DNA, 33 bp, Homo sapien
tttagtctgtactctctcatggttgtgggcaag

SEQ ID NO: 1032095 - DNA, 33 bp, Homo sapien
agcaagcccagaaacccgattctgttagcacac

SEQ ID NO: 1032096 - DNA, 33 bp, Homo sapien
agcaagcccagaaacctgattctgttagcacac

SEQ ID NO: 1032097 - DNA, 33 bp, Homo sapien
gagatactgcatataaagtgtcagctacccatt

SEQ ID NO: 1032098 - DNA, 33 bp, Homo sapien
gagatactgcatataacgtgtcagctacccatt

SEQ ID NO: 1032099 - DNA, 33 bp, Homo sapien
ccgtcactttcaggtacgctgatcaaacgtaga

SEQ ID NO: 1032100 - DNA, 33 bp, Homo sapien
ccgtcactttcaggtatgctgatcaaacgtaga

SEQ ID NO: 1032101 - DNA, 33 bp, Homo sapien
cttggttggatggagaagttgtttaagctctgc

SEQ ID NO: 1032102 - DNA, 33 bp, Homo sapien
cttggttggatggagaggttgtttaagctctgc

SEQ ID NO: 1032103 - DNA, 33 bp, Homo sapien
tctgccatctgttccgaagcttgccttacctgc

SEQ ID NO: 1032104 - DNA, 33 bp, Homo sapien
tctgccatctgttccgcagcttgccttacctgc

SEQ ID NO: 1032105 - DNA, 33 bp, Homo sapien
atggtttctcaggcttaaaatgtttacttaata

SEQ ID NO: 1032106 - DNA, 33 bp, Homo sapien
atggtttctcaggcttcaaatgtttacttaata

SEQ ID NO: 1032107 - DNA, 33 bp, Homo sapien
caaattgaaaagtgcaaatagtacaaattctgc

SEQ ID NO: 1032108 - DNA, 33 bp, Homo sapien
caaattgaaaagtgcatatagtacaaattctgc

SEQ ID NO: 1032109 - DNA, 33 bp, Homo sapien
cagacattttataactaaacttactgcagaagc

SEQ ID NO: 1032110 - DNA, 33 bp, Homo sapien
cagacattttataactcaacttactgcagaagc

SEQ ID NO: 1032111 - DNA, 33 bp, Homo sapien
cacagtgtgaaattataataagagttgtagttg

SEQ ID NO: 1032112 - DNA, 33 bp, Homo sapien
cacagtgtgaaattatcataagagttgtagttg

SEQ ID NO: 1032113 - DNA, 33 bp, Homo sapien
ttcttgccattcttgaggtccacatgagagaac

SEQ ID NO: 1032114 - DNA, 33 bp, Homo sapien
ttcttgccattcttgatgtccacatgagagaac

SEQ ID NO: 1032115 - DNA, 33 bp, Homo sapien
aagaagtttttaatagcatgaatacctctgtgt

SEQ ID NO: 1032116 - DNA, 33 bp, Homo sapien
aagaagtttttaataggatgaatacctctgtgt

SEQ ID NO: 1032117 - DNA, 33 bp, Homo sapien
aatgcatattttctccacactgtatgctgttct

SEQ ID NO: 1032118 - DNA, 33 bp, Homo sapien
aatgcatattttctccgcactgtatgctgttct

SEQ ID NO: 1032119 - DNA, 33 bp, Homo sapien
cctgaaggatccaaaaactgaggggagaggaag

SEQ ID NO: 1032120 - DNA, 33 bp, Homo sapien
cctgaaggatccaaaacctgaggggagaggaag

SEQ ID NO: 1032121 - DNA, 33 bp, Homo sapien
ttaacagtttagtagacgtgaccccagctattt

SEQ ID NO: 1032122 - DNA, 33 bp, Homo sapien
ttaacagtttagtagatgtgaccccagctattt

SEQ ID NO: 1032123 - DNA, 33 bp, Homo sapien
cagcaccttgagtgggaacggagatacactgaa

SEQ ID NO: 1032124 - DNA, 33 bp, Homo sapien
cagcaccttgagtggggacggagatacactgaa

SEQ ID NO: 1032125 - DNA, 33 bp, Homo sapien
tagagtccggcaggacacaccttctcattgcag

SEQ ID NO: 1032126 - DNA, 33 bp, Homo sapien
tagagtccggcaggacgcaccttctcattgcag

SEQ ID NO: 1032127 - DNA, 33 bp, Homo sapien
ccccagtactcctagaatccagaatatgtaaca

SEQ ID NO: 1032128 - DNA, 33 bp, Homo sapien
ccccagtactcctagactccagaatatgtaaca

SEQ ID NO: 1032129 - DNA, 33 bp, Homo sapien
ggaaacaggagagaatcagaccagaaaccagag

SEQ ID NO: 1032130 - DNA, 33 bp, Homo sapien
ggaaacaggagagaattagaccagaaaccagag

SEQ ID NO: 1032131 - DNA, 33 bp, Homo sapien
gatgtttggacgcataacttagtcctccgttta

SEQ ID NO: 1032132 - DNA, 33 bp, Homo sapien
gatgtttggacgcatagcttagtcctccgttta

SEQ ID NO: 1032133 - DNA, 33 bp, Homo sapien
ttttaagttcggcctaaatatttttctgtacgt

SEQ ID NO: 1032134 - DNA, 33 bp, Homo sapien
ttttaagttcggcctacatatttttctgtacgt

SEQ ID NO: 1032135 - DNA, 33 bp, Homo sapien
cttgcagctactgagcacatttcaaaggctgag

SEQ ID NO: 1032136 - DNA, 33 bp, Homo sapien
cttgcagctactgagcccatttcaaaggctgag

SEQ ID NO: 1032137 - DNA, 33 bp, Homo sapien
caagttatgctccaagcagtttttatagatcca

SEQ ID NO: 1032138 - DNA, 33 bp, Homo sapien
caagttatgctccaagtagtttttatagatcca

SEQ ID NO: 1032139 - DNA, 33 bp, Homo sapien
tatcatggtcatgaaacaaggaagtacgccatc

SEQ ID NO: 1032140 - DNA, 33 bp, Homo sapien
tatcatggtcatgaaataaggaagtacgccatc

SEQ ID NO: 1032141 - DNA, 33 bp, Homo sapien
acaatataactcaagcaacattaaaagcatatg

SEQ ID NO: 1032142 - DNA, 33 bp, Homo sapien
acaatataactcaagctacattaaaagcatatg

SEQ ID NO: 1032143 - DNA, 33 bp, Homo sapien
atccacagagaatccactcaaacatcattatga

SEQ ID NO: 1032144 - DNA, 33 bp, Homo sapien
atccacagagaatccattcaaacatcattatga

SEQ ID NO: 1032145 - DNA, 33 bp, Homo sapien
tttctgggcgttactgaaacagcgtcattaagc

SEQ ID NO: 1032146 - DNA, 33 bp, Homo sapien
tttctgggcgttactggaacagcgtcattaagc

SEQ ID NO: 1032147 - DNA, 33 bp, Homo sapien
tctagacttccacttaaaaagccctcagctctt

SEQ ID NO: 1032148 - DNA, 33 bp, Homo sapien
tctagacttccacttataaagccctcagctctt

SEQ ID NO: 1032149 - DNA, 33 bp, Homo sapien
ttctgaaatgactatacgaggtaaagaagtagt

SEQ ID NO: 1032150 - DNA, 33 bp, Homo sapien
ttctgaaatgactatatgaggtaaagaagtagt

SEQ ID NO: 1032151 - DNA, 33 bp, Homo sapien
ttcagccctagttaacagaagagtcccccagga

SEQ ID NO: 1032152 - DNA, 33 bp, Homo sapien
ttcagccctagttaacggaagagtcccccagga

SEQ ID NO: 1032153 - DNA, 33 bp, Homo sapien
ttcattcaacaaacagacagtgagctccatctt

SEQ ID NO: 1032154 - DNA, 33 bp, Homo sapien
ttcattcaacaaacaggcagtgagctccatctt

SEQ ID NO: 1032155 - DNA, 33 bp, Homo sapien
gtggcctggcctagtcacttgactcattttgtt

SEQ ID NO: 1032156 - DNA, 33 bp, Homo sapien
gtggcctggcctagtcgcttgactcattttgtt

SEQ ID NO: 1032157 - DNA, 33 bp, Homo sapien
gggccctcgctcttccaatccacagcgctttct

SEQ ID NO: 1032158 - DNA, 33 bp, Homo sapien
gggccctcgctcttccgatccacagcgctttct

SEQ ID NO: 1032159 - DNA, 33 bp, Homo sapien
ggatgctcatttgaggccatgactatgatgctg

SEQ ID NO: 1032160 - DNA, 33 bp, Homo sapien
ggatgctcatttgaggtcatgactatgatgctg

SEQ ID NO: 1032161 - DNA, 33 bp, Homo sapien
attgcagataaacaacaaatattttagcataag

SEQ ID NO: 1032162 - DNA, 33 bp, Homo sapien
attgcagataaacaacgaatattttagcataag

SEQ ID NO: 1032163 - DNA, 33 bp, Homo sapien
aagagatcacctgaaacgcaggaggagttaagc

SEQ ID NO: 1032164 - DNA, 33 bp, Homo sapien
aagagatcacctgaaatgcaggaggagttaagc

SEQ ID NO: 1032165 - DNA, 33 bp, Homo sapien
tggtgtggccacagagaaggaggcaggacccag

SEQ ID NO: 1032166 - DNA, 33 bp, Homo sapien
tggtgtggccacagaggaggaggcaggacccag

SEQ ID NO: 1032167 - DNA, 33 bp, Homo sapien
atggatgggttggcaacacctgaacccactgcc

SEQ ID NO: 1032168 - DNA, 33 bp, Homo sapien
atggatgggttggcaatacctgaacccactgcc

SEQ ID NO: 1032169 - DNA, 33 bp, Homo sapien
tcagattgtttcaaatcaaattgtttgcttgct

SEQ ID NO: 1032170 - DNA, 33 bp, Homo sapien
tcagattgtttcaaatgaaattgtttgcttgct

SEQ ID NO: 1032171 - DNA, 33 bp, Homo sapien
actacaaatacacataatagctaacgcctatat

SEQ ID NO: 1032172 - DNA, 33 bp, Homo sapien
actacaaatacacatactagctaacgcctatat

SEQ ID NO: 1032173 - DNA, 33 bp, Homo sapien
caatcttactagccaacgtcttttgaacactaa

SEQ ID NO: 1032174 - DNA, 33 bp, Homo sapien
caatcttactagccaatgtcttttgaacactaa

SEQ ID NO: 1032175 - DNA, 33 bp, Homo sapien
gtcaaagactcaggggaaacgtagggacctcaa

SEQ ID NO: 1032176 - DNA, 33 bp, Homo sapien
gtcaaagactcagggggaacgtagggacctcaa

SEQ ID NO: 1032177 - DNA, 33 bp, Homo sapien
cctgtccaaaatccaccggctccatgagcactc

SEQ ID NO: 1032178 - DNA, 33 bp, Homo sapien
cctgtccaaaatccacgggctccatgagcactc

SEQ ID NO: 1032179 - DNA, 33 bp, Homo sapien
accacacccagaccaaaggctacacgctcttaa

SEQ ID NO: 1032180 - DNA, 33 bp, Homo sapien
accacacccagaccaagggctacacgctcttaa

SEQ ID NO: 1032181 - DNA, 33 bp, Homo sapien
ccaaaaccctctgaaccgaatgaaagcagagaa

SEQ ID NO: 1032182 - DNA, 33 bp, Homo sapien
ccaaaaccctctgaactgaatgaaagcagagaa

SEQ ID NO: 1032183 - DNA, 33 bp, Homo sapien
gcattcaccctggatcaccagagcttcacggaa

SEQ ID NO: 1032184 - DNA, 33 bp, Homo sapien
gcattcaccctggatctccagagcttcacggaa

SEQ ID NO: 1032185 - DNA, 33 bp, Homo sapien
aaagattcttttctcacatccaaacccaaacag

SEQ ID NO: 1032186 - DNA, 33 bp, Homo sapien
aaagattcttttctcatatccaaacccaaacag

SEQ ID NO: 1032187 - DNA, 33 bp, Homo sapien
tggagtctaagattgcagacaacaagggatgca

SEQ ID NO: 1032188 - DNA, 33 bp, Homo sapien
tggagtctaagattgcggacaacaagggatgca

SEQ ID NO: 1032189 - DNA, 33 bp, Homo sapien
accacatgaggacacactaagaaggcgccattc

SEQ ID NO: 1032190 - DNA, 33 bp, Homo sapien
accacatgaggacacagtaagaaggcgccattc

SEQ ID NO: 1032191 - DNA, 33 bp, Homo sapien
ggagacgttcaacagccctgacaagtaagcatt

SEQ ID NO: 1032192 - DNA, 33 bp, Homo sapien
ggagacgttcaacagctctgacaagtaagcatt

SEQ ID NO: 1032193 - DNA, 33 bp, Homo sapien
gattccttgatgtccggcgaggcaggacattat

SEQ ID NO: 1032194 - DNA, 33 bp, Homo sapien
gattccttgatgtccgtcgaggcaggacattat

SEQ ID NO: 1032195 - DNA, 33 bp, Homo sapien
aaagcaaggggaaactaaaatggagtcatcaca

SEQ ID NO: 1032196 - DNA, 33 bp, Homo sapien
aaagcaaggggaaactgaaatggagtcatcaca

SEQ ID NO: 1032197 - DNA, 33 bp, Homo sapien
cctctcctctcacttacgtcctcttccaggcat

SEQ ID NO: 1032198 - DNA, 33 bp, Homo sapien
cctctcctctcacttatgtcctcttccaggcat

SEQ ID NO: 1032199 - DNA, 33 bp, Homo sapien
ttcatgccacactaaacgtctgccacaggtcag

SEQ ID NO: 1032200 - DNA, 33 bp, Homo sapien
ttcatgccacactaaatgtctgccacaggtcag

SEQ ID NO: 1032201 - DNA, 33 bp, Homo sapien
ttggctcagaactgtaaggaggaaaaagagaaa

SEQ ID NO: 1032202 - DNA, 33 bp, Homo sapien
ttggctcagaactgtagggaggaaaaagagaaa

SEQ ID NO: 1032203 - DNA, 33 bp, Homo sapien
tctcgtgtggcttaatgatgaggatacactctg

SEQ ID NO: 1032204 - DNA, 33 bp, Homo sapien
tctcgtgtggcttaattatgaggatacactctg

SEQ ID NO: 1032205 - DNA, 33 bp, Homo sapien
aaaaccactagatacacgctcctctggtccagt

SEQ ID NO: 1032206 - DNA, 33 bp, Homo sapien
aaaaccactagatacaggctcctctggtccagt

SEQ ID NO: 1032207 - DNA, 33 bp, Homo sapien
ggtgacttgcccatgcgcaggcagctggaaaag

SEQ ID NO: 1032208 - DNA, 33 bp, Homo sapien
ggtgacttgcccatgctcaggcagctggaaaag

SEQ ID NO: 1032209 - DNA, 33 bp, Homo sapien
tctttaaaggccaaacggcagaatgttgaaata

SEQ ID NO: 1032210 - DNA, 33 bp, Homo sapien
tctttaaaggccaaactgcagaatgttgaaata

SEQ ID NO: 1032211 - DNA, 33 bp, Homo sapien
tttttgtaaagagcaaaatagtaacgattcgag

SEQ ID NO: 1032212 - DNA, 33 bp, Homo sapien
tttttgtaaagagcaagatagtaacgattcgag

SEQ ID NO: 1032213 - DNA, 33 bp, Homo sapien
gatgtgcgccgcatgacgaccactgggagacag

SEQ ID NO: 1032214 - DNA, 33 bp, Homo sapien
gatgtgcgccgcatgatgaccactgggagacag

SEQ ID NO: 1032215 - DNA, 33 bp, Homo sapien
acccacagtgagcttcaacacgaggaaagtaac

SEQ ID NO: 1032216 - DNA, 33 bp, Homo sapien
acccacagtgagcttcgacacgaggaaagtaac

SEQ ID NO: 1032217 - DNA, 33 bp, Homo sapien
agccaagaaagatcaaagggaacccacgagact

SEQ ID NO: 1032218 - DNA, 33 bp, Homo sapien
agccaagaaagatcaacgggaacccacgagact

SEQ ID NO: 1032219 - DNA, 33 bp, Homo sapien
taggcccaaagacccacgttgcagaggttgcaa

SEQ ID NO: 1032220 - DNA, 33 bp, Homo sapien
taggcccaaagacccatgttgcagaggttgcaa

SEQ ID NO: 1032221 - DNA, 33 bp, Homo sapien
tctacttttccacataactttgcaagagtgata

SEQ ID NO: 1032222 - DNA, 33 bp, Homo sapien
tctacttttccacatagctttgcaagagtgata

SEQ ID NO: 1032223 - DNA, 33 bp, Homo sapien
ggcacaaatgcgaaataatggactttttcccag

SEQ ID NO: 1032224 - DNA, 33 bp, Homo sapien
ggcacaaatgcgaaatgatggactttttcccag

SEQ ID NO: 1032225 - DNA, 33 bp, Homo sapien
catcaggaaggatgccaattcactcagggctag

SEQ ID NO: 1032226 - DNA, 33 bp, Homo sapien
catcaggaaggatgccgattcactcagggctag

SEQ ID NO: 1032227 - DNA, 33 bp, Homo sapien
cacatggattccatgacaggtgattaacacaca

SEQ ID NO: 1032228 - DNA, 33 bp, Homo sapien
cacatggattccatgataggtgattaacacaca

SEQ ID NO: 1032229 - DNA, 33 bp, Homo sapien
gcaggggacacatgaaagactcataacttactc

SEQ ID NO: 1032230 - DNA, 33 bp, Homo sapien
gcaggggacacatgaaggactcataacttactc

SEQ ID NO: 1032231 - DNA, 33 bp, Homo sapien
acgtcactcctgcacaagagtttgcaatttgca

SEQ ID NO: 1032232 - DNA, 33 bp, Homo sapien
acgtcactcctgcacacgagtttgcaatttgca

SEQ ID NO: 1032233 - DNA, 33 bp, Homo sapien
agtctttatccagctacaagacaaaggttccag

SEQ ID NO: 1032234 - DNA, 33 bp, Homo sapien
agtctttatccagctagaagacaaaggttccag

SEQ ID NO: 1032235 - DNA, 33 bp, Homo sapien
ctatcagccatgctaccgatgggccaccaagcc

SEQ ID NO: 1032236 - DNA, 33 bp, Homo sapien
ctatcagccatgctactgatgggccaccaagcc

SEQ ID NO: 1032237 - DNA, 33 bp, Homo sapien
gcctgattgtcacacactggagaaacccagatt

SEQ ID NO: 1032238 - DNA, 33 bp, Homo sapien
gcctgattgtcacacattggagaaacccagatt

SEQ ID NO: 1032239 - DNA, 33 bp, Homo sapien
cccaagtatagcctgaatacttccccaacagct

SEQ ID NO: 1032240 - DNA, 33 bp, Homo sapien
cccaagtatagcctgagtacttccccaacagct

SEQ ID NO: 1032241 - DNA, 33 bp, Homo sapien
ctcaataatgtgccttcaacaaaaatcgggtga

SEQ ID NO: 1032242 - DNA, 33 bp, Homo sapien
ctcaataatgtgcctttaacaaaaatcgggtga

SEQ ID NO: 1032243 - DNA, 33 bp, Homo sapien
ccacagcagccattacacatcctgttttggaaa

SEQ ID NO: 1032244 - DNA, 33 bp, Homo sapien
ccacagcagccattacgcatcctgttttggaaa

SEQ ID NO: 1032245 - DNA, 33 bp, Homo sapien
tagtttatagggttacacaactttcgggcttga

SEQ ID NO: 1032246 - DNA, 33 bp, Homo sapien
tagtttatagggttacgcaactttcgggcttga

SEQ ID NO: 1032247 - DNA, 33 bp, Homo sapien
ggaaaaagtccctgaagtatagatttcagctca

SEQ ID NO: 1032248 - DNA, 33 bp, Homo sapien
ggaaaaagtccctgaattatagatttcagctca

SEQ ID NO: 1032249 - DNA, 33 bp, Homo sapien
gatgagctcttgataacgcctactctggttgtc

SEQ ID NO: 1032250 - DNA, 33 bp, Homo sapien
gatgagctcttgataatgcctactctggttgtc

SEQ ID NO: 1032251 - DNA, 33 bp, Homo sapien
gtaaatctatcctgcacgtttgctcttggcagc

SEQ ID NO: 1032252 - DNA, 33 bp, Homo sapien
gtaaatctatcctgcatgtttgctcttggcagc

SEQ ID NO: 1032253 - DNA, 33 bp, Homo sapien
agatatcttttttaaacgcacgacgtatcttac

SEQ ID NO: 1032254 - DNA, 33 bp, Homo sapien
agatatcttttttaaatgcacgacgtatcttac

SEQ ID NO: 1032255 - DNA, 33 bp, Homo sapien
aggatgtgatttggcaatagcgtctgcagaaca

SEQ ID NO: 1032256 - DNA, 33 bp, Homo sapien
aggatgtgatttggcagtagcgtctgcagaaca

SEQ ID NO: 1032257 - DNA, 33 bp, Homo sapien
aatattagttgaataactgaggaaacacacctt

SEQ ID NO: 1032258 - DNA, 33 bp, Homo sapien
aatattagttgaataattgaggaaacacacctt

SEQ ID NO: 1032259 - DNA, 33 bp, Homo sapien
gctgtgtccccttccaaaatcttctctgccaag

SEQ ID NO: 1032260 - DNA, 33 bp, Homo sapien
gctgtgtccccttccagaatcttctctgccaag

SEQ ID NO: 1032261 - DNA, 33 bp, Homo sapien
ccttgtaatatggtacacgtcctagcctttgct

SEQ ID NO: 1032262 - DNA, 33 bp, Homo sapien
ccttgtaatatggtacgcgtcctagcctttgct

SEQ ID NO: 1032263 - DNA, 33 bp, Homo sapien
ctccaggccttccacaaactctgcctgactcac

SEQ ID NO: 1032264 - DNA, 33 bp, Homo sapien
ctccaggccttccacagactctgcctgactcac

SEQ ID NO: 1032265 - DNA, 33 bp, Homo sapien
ctacagatgaggagaaaaaagtagaataatggg

SEQ ID NO: 1032266 - DNA, 33 bp, Homo sapien
ctacagatgaggagaagaaagtagaataatggg

SEQ ID NO: 1032267 - DNA, 33 bp, Homo sapien
tggtaggatttcggtacagtgtaacaaactcta

SEQ ID NO: 1032268 - DNA, 33 bp, Homo sapien
tggtaggatttcggtagagtgtaacaaactcta

SEQ ID NO: 1032269 - DNA, 33 bp, Homo sapien
aaggagcagaggggagccgatgtgagagacagc

SEQ ID NO: 1032270 - DNA, 33 bp, Homo sapien
aaggagcagaggggagtcgatgtgagagacagc

SEQ ID NO: 1032271 - DNA, 33 bp, Homo sapien
tccaagtaggtataaaagaaaggacacaggttt

SEQ ID NO: 1032272 - DNA, 33 bp, Homo sapien
tccaagtaggtataaaggaaaggacacaggttt

SEQ ID NO: 1032273 - DNA, 33 bp, Homo sapien
gcttgctcaagatcacacttgacaagaattggg

SEQ ID NO: 1032274 - DNA, 33 bp, Homo sapien
gcttgctcaagatcacgcttgacaagaattggg

SEQ ID NO: 1032275 - DNA, 33 bp, Homo sapien
ggccttccactagggccaactcatttcttcagg

SEQ ID NO: 1032276 - DNA, 33 bp, Homo sapien
ggccttccactagggctaactcatttcttcagg

SEQ ID NO: 1032277 - DNA, 33 bp, Homo sapien
caatcaatgctgtttgaagttttgaatataaca

SEQ ID NO: 1032278 - DNA, 33 bp, Homo sapien
caatcaatgctgtttgcagttttgaatataaca

SEQ ID NO: 1032279 - DNA, 33 bp, Homo sapien
cttcacaccgtggaccacattcgccacccgtgc

SEQ ID NO: 1032280 - DNA, 33 bp, Homo sapien
cttcacaccgtggaccgcattcgccacccgtgc

SEQ ID NO: 1032281 - DNA, 33 bp, Homo sapien
caccgtctgcctactacgtaacaaaattccaga

SEQ ID NO: 1032282 - DNA, 33 bp, Homo sapien
caccgtctgcctactatgtaacaaaattccaga

SEQ ID NO: 1032283 - DNA, 33 bp, Homo sapien
cacaggacacgcttaagtcccccagcaatgagt

SEQ ID NO: 1032284 - DNA, 33 bp, Homo sapien
cacaggacacgcttaattcccccagcaatgagt

SEQ ID NO: 1032285 - DNA, 33 bp, Homo sapien
atgcatgagaagttgtaaagaacaaggaatggc

SEQ ID NO: 1032286 - DNA, 33 bp, Homo sapien
atgcatgagaagttgtgaagaacaaggaatggc

SEQ ID NO: 1032287 - DNA, 33 bp, Homo sapien
gcaaattaaaggaagaccacagagagaactgga

SEQ ID NO: 1032288 - DNA, 33 bp, Homo sapien
gcaaattaaaggaagatcacagagagaactgga

SEQ ID NO: 1032289 - DNA, 33 bp, Homo sapien
ggtaacatattggaaaacagaatcattagaacc

SEQ ID NO: 1032290 - DNA, 33 bp, Homo sapien
ggtaacatattggaaaccagaatcattagaacc

SEQ ID NO: 1032291 - DNA, 33 bp, Homo sapien
gttctgacagatgacgcatgggactgctgtgct

SEQ ID NO: 1032292 - DNA, 33 bp, Homo sapien
gttctgacagatgacggatgggactgctgtgct

SEQ ID NO: 1032293 - DNA, 33 bp, Homo sapien
cagcaagtcagatggaagagcaagccctggtgg

SEQ ID NO: 1032294 - DNA, 33 bp, Homo sapien
cagcaagtcagatggaggagcaagccctggtgg

SEQ ID NO: 1032295 - DNA, 33 bp, Homo sapien
ctgggtaagacctgtacagaaaatcttctctgg

SEQ ID NO: 1032296 - DNA, 33 bp, Homo sapien
ctgggtaagacctgtatagaaaatcttctctgg

SEQ ID NO: 1032297 - DNA, 33 bp, Homo sapien
ctgagtgggtacttaacctatttgaggctcctc

SEQ ID NO: 1032298 - DNA, 33 bp, Homo sapien
ctgagtgggtacttaatctatttgaggctcctc

SEQ ID NO: 1032299 - DNA, 33 bp, Homo sapien
ctttaggacacaattcacacacctcatttcatg

SEQ ID NO: 1032300 - DNA, 33 bp, Homo sapien
ctttaggacacaattcgcacacctcatttcatg

SEQ ID NO: 1032301 - DNA, 33 bp, Homo sapien
gaggagaacaaaatcaataatggaactaacaca

SEQ ID NO: 1032302 - DNA, 33 bp, Homo sapien
gaggagaacaaaatcagtaatggaactaacaca

SEQ ID NO: 1032303 - DNA, 33 bp, Homo sapien
aactaacacatgtgaactgaagccaagataagc

SEQ ID NO: 1032304 - DNA, 33 bp, Homo sapien
aactaacacatgtgaattgaagccaagataagc

SEQ ID NO: 1032305 - DNA, 33 bp, Homo sapien
ggaggccacaaatcagaatgggactagctggag

SEQ ID NO: 1032306 - DNA, 33 bp, Homo sapien
ggaggccacaaatcagcatgggactagctggag

SEQ ID NO: 1032307 - DNA, 33 bp, Homo sapien
atgtcctctttggcaacggcaatgctcccggct

SEQ ID NO: 1032308 - DNA, 33 bp, Homo sapien
atgtcctctttggcaatggcaatgctcccggct

SEQ ID NO: 1032309 - DNA, 33 bp, Homo sapien
ccagaagagactgatcacaaaaatgtgatgaaa

SEQ ID NO: 1032310 - DNA, 33 bp, Homo sapien
ccagaagagactgatcccaaaaatgtgatgaaa

SEQ ID NO: 1032311 - DNA, 33 bp, Homo sapien
gtgggatttttagaaccaaagtttgcactgtca

SEQ ID NO: 1032312 - DNA, 33 bp, Homo sapien
gtgggatttttagaacgaaagtttgcactgtca

SEQ ID NO: 1032313 - DNA, 33 bp, Homo sapien
tgacataaattttagccgacaggatggcatggc

SEQ ID NO: 1032314 - DNA, 33 bp, Homo sapien
tgacataaattttagctgacaggatggcatggc

SEQ ID NO: 1032315 - DNA, 33 bp, Homo sapien
atgttgttggattaaagtcacaaatgattgaga

SEQ ID NO: 1032316 - DNA, 33 bp, Homo sapien
atgttgttggattaaattcacaaatgattgaga

SEQ ID NO: 1032317 - DNA, 33 bp, Homo sapien
actagaggttatcaggaattattgagcttctac

SEQ ID NO: 1032318 - DNA, 33 bp, Homo sapien
actagaggttatcagggattattgagcttctac

SEQ ID NO: 1032319 - DNA, 33 bp, Homo sapien
cagatttgcagggaccacagcccttcctttctc

SEQ ID NO: 1032320 - DNA, 33 bp, Homo sapien
cagatttgcagggaccgcagcccttcctttctc

SEQ ID NO: 1032321 - DNA, 33 bp, Homo sapien
ctgagagattcttaaacagcaacctgagaattg

SEQ ID NO: 1032322 - DNA, 33 bp, Homo sapien
ctgagagattcttaaatagcaacctgagaattg

SEQ ID NO: 1032323 - DNA, 33 bp, Homo sapien
ttgtggaactaagcaaattgacccccctgaaaa

SEQ ID NO: 1032324 - DNA, 33 bp, Homo sapien
ttgtggaactaagcaagttgacccccctgaaaa

SEQ ID NO: 1032325 - DNA, 33 bp, Homo sapien
tgtggccacaaagtaacgaaactgcctttttac

SEQ ID NO: 1032326 - DNA, 33 bp, Homo sapien
tgtggccacaaagtaatgaaactgcctttttac

SEQ ID NO: 1032327 - DNA, 33 bp, Homo sapien
tcacaaaggaaacaaaacgaacaggacttgaaa

SEQ ID NO: 1032328 - DNA, 33 bp, Homo sapien
tcacaaaggaaacaaaccgaacaggacttgaaa

SEQ ID NO: 1032329 - DNA, 33 bp, Homo sapien
actcagaaaagacttacgtgcattgctgtgctg

SEQ ID NO: 1032330 - DNA, 33 bp, Homo sapien
actcagaaaagacttatgtgcattgctgtgctg

SEQ ID NO: 1032331 - DNA, 33 bp, Homo sapien
tggaggagaggaaagacgccttaagtagacttt

SEQ ID NO: 1032332 - DNA, 33 bp, Homo sapien
tggaggagaggaaagatgccttaagtagacttt

SEQ ID NO: 1032333 - DNA, 33 bp, Homo sapien
gtctaaagggccctgaagttgatgccaggactc

SEQ ID NO: 1032334 - DNA, 33 bp, Homo sapien
gtctaaagggccctgatgttgatgccaggactc

SEQ ID NO: 1032335 - DNA, 33 bp, Homo sapien
aggtcaagtgatttgcccaaagtgacacaggac

SEQ ID NO: 1032336 - DNA, 33 bp, Homo sapien
aggtcaagtgatttgctcaaagtgacacaggac

SEQ ID NO: 1032337 - DNA, 33 bp, Homo sapien
tttagtatcaacacaacttctacaacaaagaga

SEQ ID NO: 1032338 - DNA, 33 bp, Homo sapien
tttagtatcaacacaatttctacaacaaagaga

SEQ ID NO: 1032339 - DNA, 33 bp, Homo sapien
tctgtgttttggataaagattcagagcgacttc

SEQ ID NO: 1032340 - DNA, 33 bp, Homo sapien
tctgtgttttggataacgattcagagcgacttc

SEQ ID NO: 1032341 - DNA, 33 bp, Homo sapien
tttaccagaggagtcaagagccttgcttgcctg

SEQ ID NO: 1032342 - DNA, 33 bp, Homo sapien
tttaccagaggagtcaggagccttgcttgcctg

SEQ ID NO: 1032343 - DNA, 33 bp, Homo sapien
cctggcctgtggtcaaagcactggaaaggtggc

SEQ ID NO: 1032344 - DNA, 33 bp, Homo sapien
cctggcctgtggtcaatgcactggaaaggtggc

SEQ ID NO: 1032345 - DNA, 33 bp, Homo sapien
gatggacaaggttcacgctgactgtgacagcat

SEQ ID NO: 1032346 - DNA, 33 bp, Homo sapien
gatggacaaggttcactctgactgtgacagcat

SEQ ID NO: 1032347 - DNA, 33 bp, Homo sapien
aatatcttgccattaactacatttctgcaaaat

SEQ ID NO: 1032348 - DNA, 33 bp, Homo sapien
aatatcttgccattaagtacatttctgcaaaat

SEQ ID NO: 1032349 - DNA, 33 bp, Homo sapien
cctctaaagaccaaaaatgttcactgtcctgga

SEQ ID NO: 1032350 - DNA, 33 bp, Homo sapien
cctctaaagaccaaaactgttcactgtcctgga

SEQ ID NO: 1032351 - DNA, 33 bp, Homo sapien
acagtcagctgatgaaagcctcttgccctcact

SEQ ID NO: 1032352 - DNA, 33 bp, Homo sapien
acagtcagctgatgaatgcctcttgccctcact

SEQ ID NO: 1032353 - DNA, 33 bp, Homo sapien
agcaccccgagcagaaactgactatggcagagg

SEQ ID NO: 1032354 - DNA, 33 bp, Homo sapien
agcaccccgagcagaacctgactatggcagagg

SEQ ID NO: 1032355 - DNA, 33 bp, Homo sapien
tactggccatagaagccgagtgccttgagatct

SEQ ID NO: 1032356 - DNA, 33 bp, Homo sapien
tactggccatagaagctgagtgccttgagatct

SEQ ID NO: 1032357 - DNA, 33 bp, Homo sapien
gtcggctttggtctacacctctccaggctaatt

SEQ ID NO: 1032358 - DNA, 33 bp, Homo sapien
gtcggctttggtctacgcctctccaggctaatt

SEQ ID NO: 1032359 - DNA, 33 bp, Homo sapien
gtggctccatttctcaaaaggaatgctctctta

SEQ ID NO: 1032360 - DNA, 33 bp, Homo sapien
gtggctccatttctcagaaggaatgctctctta

SEQ ID NO: 1032361 - DNA, 33 bp, Homo sapien
tgtaaccagatttgaaagtaagtgaaaaaaatg

SEQ ID NO: 1032362 - DNA, 33 bp, Homo sapien
tgtaaccagatttgaacgtaagtgaaaaaaatg

SEQ ID NO: 1032363 - DNA, 33 bp, Homo sapien
tcctggataaatccaacgttaaggattcttata

SEQ ID NO: 1032364 - DNA, 33 bp, Homo sapien
tcctggataaatccaatgttaaggattcttata

SEQ ID NO: 1032365 - DNA, 33 bp, Homo sapien
atggtcatctctttgcaagtcaactcaaagtca

SEQ ID NO: 1032366 - DNA, 33 bp, Homo sapien
atggtcatctctttgcgagtcaactcaaagtca

SEQ ID NO: 1032367 - DNA, 33 bp, Homo sapien
cccagggtctcagaaaagagtcctttaaactcc

SEQ ID NO: 1032368 - DNA, 33 bp, Homo sapien
cccagggtctcagaaaggagtcctttaaactcc

SEQ ID NO: 1032369 - DNA, 33 bp, Homo sapien
cagtggaagccaagaaagggggtttgcaaatgc

SEQ ID NO: 1032370 - DNA, 33 bp, Homo sapien
cagtggaagccaagaaggggggtttgcaaatgc

SEQ ID NO: 1032371 - DNA, 33 bp, Homo sapien
cggcagcaacagaacactaagcccccaagagag

SEQ ID NO: 1032372 - DNA, 33 bp, Homo sapien
cggcagcaacagaacagtaagcccccaagagag

SEQ ID NO: 1032373 - DNA, 33 bp, Homo sapien
gcacaaaatgctgtgaaatcttggttgcacgac

SEQ ID NO: 1032374 - DNA, 33 bp, Homo sapien
gcacaaaatgctgtgagatcttggttgcacgac

SEQ ID NO: 1032375 - DNA, 33 bp, Homo sapien
tctgatggagatactacggtgcactgccagaac

SEQ ID NO: 1032376 - DNA, 33 bp, Homo sapien
tctgatggagatactatggtgcactgccagaac

SEQ ID NO: 1032377 - DNA, 33 bp, Homo sapien
gcacatccgtgatagacgggaaaggccggagca

SEQ ID NO: 1032378 - DNA, 33 bp, Homo sapien
gcacatccgtgatagatgggaaaggccggagca

SEQ ID NO: 1032379 - DNA, 33 bp, Homo sapien
tagggagcctgggattcaacttcaaagtctatc

SEQ ID NO: 1032380 - DNA, 33 bp, Homo sapien
tagggagcctgggatttaacttcaaagtctatc

SEQ ID NO: 1032381 - DNA, 33 bp, Homo sapien
aggatccaacaagaaacgttccatatgcatgag

SEQ ID NO: 1032382 - DNA, 33 bp, Homo sapien
aggatccaacaagaaatgttccatatgcatgag

SEQ ID NO: 1032383 - DNA, 33 bp, Homo sapien
taaaggagccctgaggcacccattccagcatag

SEQ ID NO: 1032384 - DNA, 33 bp, Homo sapien
taaaggagccctgaggtacccattccagcatag

SEQ ID NO: 1032385 - DNA, 33 bp, Homo sapien
aggcacactcagtcaacgctatgttccaggatc

SEQ ID NO: 1032386 - DNA, 33 bp, Homo sapien
aggcacactcagtcaatgctatgttccaggatc

SEQ ID NO: 1032387 - DNA, 33 bp, Homo sapien
cacctacatcatctataagcaagcacgtggcag

SEQ ID NO: 1032388 - DNA, 33 bp, Homo sapien
cacctacatcatctatgagcaagcacgtggcag

SEQ ID NO: 1032389 - DNA, 33 bp, Homo sapien
cttcaagttaagaaatgatggcatgacctgagt

SEQ ID NO: 1032390 - DNA, 33 bp, Homo sapien
cttcaagttaagaaattatggcatgacctgagt

SEQ ID NO: 1032391 - DNA, 33 bp, Homo sapien
gccagaactgcctggccctttgcaacgatcccc

SEQ ID NO: 1032392 - DNA, 33 bp, Homo sapien
gccagaactgcctggctctttgcaacgatcccc

SEQ ID NO: 1032393 - DNA, 33 bp, Homo sapien
ggatactgctctggaaaagtaagcagtaacttt

SEQ ID NO: 1032394 - DNA, 33 bp, Homo sapien
ggatactgctctggaagagtaagcagtaacttt

SEQ ID NO: 1032395 - DNA, 33 bp, Homo sapien
cagcttcagaagcctcaagatcactgaggacca

SEQ ID NO: 1032396 - DNA, 33 bp, Homo sapien
cagcttcagaagcctcgagatcactgaggacca

SEQ ID NO: 1032397 - DNA, 33 bp, Homo sapien
aacacaaaagagacaacgctttttactgatgag

SEQ ID NO: 1032398 - DNA, 33 bp, Homo sapien
aacacaaaagagacaatgctttttactgatgag

SEQ ID NO: 1032399 - DNA, 33 bp, Homo sapien
atatgtctcctccaaaacttgctgtgtttgaga

SEQ ID NO: 1032400 - DNA, 33 bp, Homo sapien
atatgtctcctccaaatcttgctgtgtttgaga

SEQ ID NO: 1032401 - DNA, 33 bp, Homo sapien
ctacgaggcctctttacggagccgggacattta

SEQ ID NO: 1032402 - DNA, 33 bp, Homo sapien
ctacgaggcctctttagggagccgggacattta

SEQ ID NO: 1032403 - DNA, 33 bp, Homo sapien
tggacatcctgctttaaaatgatgtccctgcct

SEQ ID NO: 1032404 - DNA, 33 bp, Homo sapien
tggacatcctgctttagaatgatgtccctgcct

SEQ ID NO: 1032405 - DNA, 33 bp, Homo sapien
gaagtatgatcccagaagtaagaaatgctgcat

SEQ ID NO: 1032406 - DNA, 33 bp, Homo sapien
gaagtatgatcccagacgtaagaaatgctgcat

SEQ ID NO: 1032407 - DNA, 33 bp, Homo sapien
agatgctttcccagaacgagaagttttattcca

SEQ ID NO: 1032408 - DNA, 33 bp, Homo sapien
agatgctttcccagaatgagaagttttattcca

SEQ ID NO: 1032409 - DNA, 33 bp, Homo sapien
agggctaaacccattcgcttctccacattgcct

SEQ ID NO: 1032410 - DNA, 33 bp, Homo sapien
agggctaaacccattctcttctccacattgcct

SEQ ID NO: 1032411 - DNA, 33 bp, Homo sapien
tgactcttcgtagaaactgaaaacaagcatcat

SEQ ID NO: 1032412 - DNA, 33 bp, Homo sapien
tgactcttcgtagaaattgaaaacaagcatcat

SEQ ID NO: 1032413 - DNA, 33 bp, Homo sapien
tgctttattacaaagaagctctttcacttactg

SEQ ID NO: 1032414 - DNA, 33 bp, Homo sapien
tgctttattacaaagaggctctttcacttactg

SEQ ID NO: 1032415 - DNA, 33 bp, Homo sapien
caactccttcaggcccagacagtccttgcccat

SEQ ID NO: 1032416 - DNA, 33 bp, Homo sapien
caactccttcaggcccggacagtccttgcccat

SEQ ID NO: 1032417 - DNA, 33 bp, Homo sapien
ggctggcggtgaaagacgcataaacaatgaggc

SEQ ID NO: 1032418 - DNA, 33 bp, Homo sapien
ggctggcggtgaaagatgcataaacaatgaggc

SEQ ID NO: 1032419 - DNA, 33 bp, Homo sapien
caactgtgatgccaaccgggccctgaaaatgta

SEQ ID NO: 1032420 - DNA, 33 bp, Homo sapien
caactgtgatgccaactgggccctgaaaatgta

SEQ ID NO: 1032421 - DNA, 33 bp, Homo sapien
ctctcaatagccccagaagggtggacgggatta

SEQ ID NO: 1032422 - DNA, 33 bp, Homo sapien
ctctcaatagccccagtagggtggacgggatta

SEQ ID NO: 1032423 - DNA, 33 bp, Homo sapien
atggatgaatgagtaaaaacagaacctctcttc

SEQ ID NO: 1032424 - DNA, 33 bp, Homo sapien
atggatgaatgagtaagaacagaacctctcttc

SEQ ID NO: 1032425 - DNA, 33 bp, Homo sapien
ggccagtaatccagcacgggttggagccatttc

SEQ ID NO: 1032426 - DNA, 33 bp, Homo sapien
ggccagtaatccagcatgggttggagccatttc

SEQ ID NO: 1032427 - DNA, 33 bp, Homo sapien
ggggttcttggtaacaatgcaaattctagggct

SEQ ID NO: 1032428 - DNA, 33 bp, Homo sapien
ggggttcttggtaacagtgcaaattctagggct

SEQ ID NO: 1032429 - DNA, 33 bp, Homo sapien
atgaatcaagaggcccagcaaaaggcaaaagtt

SEQ ID NO: 1032430 - DNA, 33 bp, Homo sapien
atgaatcaagaggcccggcaaaaggcaaaagtt

SEQ ID NO: 1032431 - DNA, 33 bp, Homo sapien
ataataaatgggtctaggtttcctgagagtgag

SEQ ID NO: 1032432 - DNA, 33 bp, Homo sapien
ataataaatgggtctatgtttcctgagagtgag

SEQ ID NO: 1032433 - DNA, 33 bp, Homo sapien
caaggactcacagctaataagtagtagggccag

SEQ ID NO: 1032434 - DNA, 33 bp, Homo sapien
caaggactcacagctagtaagtagtagggccag

SEQ ID NO: 1032435 - DNA, 33 bp, Homo sapien
tttaatttttaaatccactctatgctttaggta

SEQ ID NO: 1032436 - DNA, 33 bp, Homo sapien
tttaatttttaaatccgctctatgctttaggta

SEQ ID NO: 1032437 - DNA, 33 bp, Homo sapien
ctccagaataatgtgaaccatacctatcctgtt

SEQ ID NO: 1032438 - DNA, 33 bp, Homo sapien
ctccagaataatgtgacccatacctatcctgtt

SEQ ID NO: 1032439 - DNA, 33 bp, Homo sapien
ggcaaagagtgaataactggcaaggagaccagg

SEQ ID NO: 1032440 - DNA, 33 bp, Homo sapien
ggcaaagagtgaataattggcaaggagaccagg

SEQ ID NO: 1032441 - DNA, 33 bp, Homo sapien
gaaaatagcatcgaaaatgggacagatatatcc

SEQ ID NO: 1032442 - DNA, 33 bp, Homo sapien
gaaaatagcatcgaaattgggacagatatatcc

SEQ ID NO: 1032443 - DNA, 33 bp, Homo sapien
ctgtgacaagtccttacagggaaggagaagccc

SEQ ID NO: 1032444 - DNA, 33 bp, Homo sapien
ctgtgacaagtccttatagggaaggagaagccc

SEQ ID NO: 1032445 - DNA, 33 bp, Homo sapien
ggccagctctgcttctcagaaaattcttcctat

SEQ ID NO: 1032446 - DNA, 33 bp, Homo sapien
ggccagctctgcttcttagaaaattcttcctat

SEQ ID NO: 1032447 - DNA, 33 bp, Homo sapien
tactgtctgttcgcatgactatttttcatactt

SEQ ID NO: 1032448 - DNA, 33 bp, Homo sapien
tactgtctgttcgcattactatttttcatactt

SEQ ID NO: 1032449 - DNA, 33 bp, Homo sapien
agaggtcttcaacataactgtgatgctggatat

SEQ ID NO: 1032450 - DNA, 33 bp, Homo sapien
agaggtcttcaacatagctgtgatgctggatat

SEQ ID NO: 1032451 - DNA, 33 bp, Homo sapien
aggacagggacgacgaccctggcagccacttga

SEQ ID NO: 1032452 - DNA, 33 bp, Homo sapien
aggacagggacgacgatcctggcagccacttga

SEQ ID NO: 1032453 - DNA, 33 bp, Homo sapien
cgtcaccgtggccacactcattcctcaggtgcc

SEQ ID NO: 1032454 - DNA, 33 bp, Homo sapien
cgtcaccgtggccacagtcattcctcaggtgcc

SEQ ID NO: 1032455 - DNA, 33 bp, Homo sapien
tgcccctggattcacgaaagaatgtgaggcctc

SEQ ID NO: 1032456 - DNA, 33 bp, Homo sapien
tgcccctggattcacggaagaatgtgaggcctc

SEQ ID NO: 1032457 - DNA, 33 bp, Homo sapien
agggaggccaggcgaccacctcgaagctttgca

SEQ ID NO: 1032458 - DNA, 33 bp, Homo sapien
agggaggccaggcgactacctcgaagctttgca

SEQ ID NO: 1032459 - DNA, 33 bp, Homo sapien
tgtctgggccaagcaccgcattgtgaacccaag

SEQ ID NO: 1032460 - DNA, 33 bp, Homo sapien
tgtctgggccaagcactgcattgtgaacccaag

SEQ ID NO: 1032461 - DNA, 33 bp, Homo sapien
cagcacagtgtctgaaatagaaggtgaggtagg

SEQ ID NO: 1032462 - DNA, 33 bp, Homo sapien
cagcacagtgtctgaattagaaggtgaggtagg

SEQ ID NO: 1032463 - DNA, 33 bp, Homo sapien
cagagagtgggaatgcaaagagtcaattaagaa

SEQ ID NO: 1032464 - DNA, 33 bp, Homo sapien
cagagagtgggaatgcgaagagtcaattaagaa

SEQ ID NO: 1032465 - DNA, 33 bp, Homo sapien
tgcagaaggcttatgcagagaaagcaggtttct

SEQ ID NO: 1032466 - DNA, 33 bp, Homo sapien
tgcagaaggcttatgcggagaaagcaggtttct

SEQ ID NO: 1032467 - DNA, 33 bp, Homo sapien
aacctgcagaggtgaacgttgatactaacatga

SEQ ID NO: 1032468 - DNA, 33 bp, Homo sapien
aacctgcagaggtgaatgttgatactaacatga

SEQ ID NO: 1032469 - DNA, 33 bp, Homo sapien
agtttttaacagagctaactttgttgttttaaa

SEQ ID NO: 1032470 - DNA, 33 bp, Homo sapien
agtttttaacagagctgactttgttgttttaaa

SEQ ID NO: 1032471 - DNA, 33 bp, Homo sapien
attacaggtgaagaaacgggatgctacgaggtt

SEQ ID NO: 1032472 - DNA, 33 bp, Homo sapien
attacaggtgaagaaatgggatgctacgaggtt

SEQ ID NO: 1032473 - DNA, 33 bp, Homo sapien
cacagcagcaccatggaaggtctgattgatcca

SEQ ID NO: 1032474 - DNA, 33 bp, Homo sapien
cacagcagcaccatgggaggtctgattgatcca

SEQ ID NO: 1032475 - DNA, 33 bp, Homo sapien
caagcactagagggccccttctaacccagagag

SEQ ID NO: 1032476 - DNA, 33 bp, Homo sapien
caagcactagagggccgcttctaacccagagag

SEQ ID NO: 1032477 - DNA, 33 bp, Homo sapien
aaattttctatttttgaatttcagctatcattg

SEQ ID NO: 1032478 - DNA, 33 bp, Homo sapien
aaattttctatttttgtatttcagctatcattg

SEQ ID NO: 1032479 - DNA, 33 bp, Homo sapien
ggcatgcagttacttccctgcagaatttgtctt

SEQ ID NO: 1032480 - DNA, 33 bp, Homo sapien
ggcatgcagttacttctctgcagaatttgtctt

SEQ ID NO: 1032481 - DNA, 33 bp, Homo sapien
ttcatagatgacagaactgggattgagaggcag

SEQ ID NO: 1032482 - DNA, 33 bp, Homo sapien
ttcatagatgacagaattgggattgagaggcag

SEQ ID NO: 1032483 - DNA, 33 bp, Homo sapien
tatttcactttaaatacctacattccaggcttc

SEQ ID NO: 1032484 - DNA, 33 bp, Homo sapien
tatttcactttaaatatctacattccaggcttc

SEQ ID NO: 1032485 - DNA, 33 bp, Homo sapien
attatgattccaacaaacacaaaaatgtgacta

SEQ ID NO: 1032486 - DNA, 33 bp, Homo sapien
attatgattccaacaagcacaaaaatgtgacta

SEQ ID NO: 1032487 - DNA, 33 bp, Homo sapien
ggctcttcactacctcgctacgatttcaccttt

SEQ ID NO: 1032488 - DNA, 33 bp, Homo sapien
ggctcttcactacctctctacgatttcaccttt

SEQ ID NO: 1032489 - DNA, 33 bp, Homo sapien
agtctcattaggaaaacctgaccaacagtgtaa

SEQ ID NO: 1032490 - DNA, 33 bp, Homo sapien
agtctcattaggaaaatctgaccaacagtgtaa

SEQ ID NO: 1032491 - DNA, 33 bp, Homo sapien
gctacaattggaacataaagtcttgaaactgtt

SEQ ID NO: 1032492 - DNA, 33 bp, Homo sapien
gctacaattggaacatgaagtcttgaaactgtt

SEQ ID NO: 1032493 - DNA, 33 bp, Homo sapien
cgggactctgcatttaggggcaattcggagtga

SEQ ID NO: 1032494 - DNA, 33 bp, Homo sapien
cgggactctgcatttatgggcaattcggagtga

SEQ ID NO: 1032495 - DNA, 33 bp, Homo sapien
ttcccaaagtagccaaatgtgtctcccttttcg

SEQ ID NO: 1032496 - DNA, 33 bp, Homo sapien
ttcccaaagtagccaactgtgtctcccttttcg

SEQ ID NO: 1032497 - DNA, 33 bp, Homo sapien
cttgtacttaatgcgccctggaagcagaactgt

SEQ ID NO: 1032498 - DNA, 33 bp, Homo sapien
cttgtacttaatgcgctctggaagcagaactgt

SEQ ID NO: 1032499 - DNA, 33 bp, Homo sapien
tgttctggccagtccaaccttatatcagaatgt

SEQ ID NO: 1032500 - DNA, 33 bp, Homo sapien
tgttctggccagtccatccttatatcagaatgt

SEQ ID NO: 1032501 - DNA, 33 bp, Homo sapien
taaatatacccactcacggtgtggttggagagc

SEQ ID NO: 1032502 - DNA, 33 bp, Homo sapien
taaatatacccactcatggtgtggttggagagc

SEQ ID NO: 1032503 - DNA, 33 bp, Homo sapien
aaatctttaacatcacgcttaaggtcccacatg

SEQ ID NO: 1032504 - DNA, 33 bp, Homo sapien
aaatctttaacatcactcttaaggtcccacatg

SEQ ID NO: 1032505 - DNA, 33 bp, Homo sapien
ctggacatgccctatagcagtctccacatgaag

SEQ ID NO: 1032506 - DNA, 33 bp, Homo sapien
ctggacatgccctatatcagtctccacatgaag

SEQ ID NO: 1032507 - DNA, 33 bp, Homo sapien
ggtagggcactatcacaggcatttgagaggttt

SEQ ID NO: 1032508 - DNA, 33 bp, Homo sapien
ggtagggcactatcacgggcatttgagaggttt

SEQ ID NO: 1032509 - DNA, 33 bp, Homo sapien
aagtatttagggatccagaagtctgagatattc

SEQ ID NO: 1032510 - DNA, 33 bp, Homo sapien
aagtatttagggatccggaagtctgagatattc

SEQ ID NO: 1032511 - DNA, 33 bp, Homo sapien
atgccagaggggtgaacttactaaacagagaaa

SEQ ID NO: 1032512 - DNA, 33 bp, Homo sapien
atgccagaggggtgaatttactaaacagagaaa

SEQ ID NO: 1032513 - DNA, 33 bp, Homo sapien
ggcagcccacatccagcaactatttgacatagg

SEQ ID NO: 1032514 - DNA, 33 bp, Homo sapien
ggcagcccacatccagtaactatttgacatagg

SEQ ID NO: 1032515 - DNA, 33 bp, Homo sapien
gtgttgggtcttcctacccctatgtcaaatagt

SEQ ID NO: 1032516 - DNA, 33 bp, Homo sapien
gtgttgggtcttcctagccctatgtcaaatagt

SEQ ID NO: 1032517 - DNA, 33 bp, Homo sapien
atgcttaggcaagcccggcagcgtccaatggtt

SEQ ID NO: 1032518 - DNA, 33 bp, Homo sapien
atgcttaggcaagccctgcagcgtccaatggtt

SEQ ID NO: 1032519 - DNA, 33 bp, Homo sapien
tcatttctagctttaacatttcagtgtgaaaaa

SEQ ID NO: 1032520 - DNA, 33 bp, Homo sapien
tcatttctagctttaatatttcagtgtgaaaaa

SEQ ID NO: 1032521 - DNA, 33 bp, Homo sapien
tccaaagaagataaacaaatggccattaagccc

SEQ ID NO: 1032522 - DNA, 33 bp, Homo sapien
tccaaagaagataaacgaatggccattaagccc

SEQ ID NO: 1032523 - DNA, 33 bp, Homo sapien
ctaaaatgatttgaagaaacataaagcaaaaca

SEQ ID NO: 1032524 - DNA, 33 bp, Homo sapien
ctaaaatgatttgaagcaacataaagcaaaaca

SEQ ID NO: 1032525 - DNA, 33 bp, Homo sapien
tttaccatctctttgaccatagtccaagctacc

SEQ ID NO: 1032526 - DNA, 33 bp, Homo sapien
tttaccatctctttgatcatagtccaagctacc

SEQ ID NO: 1032527 - DNA, 33 bp, Homo sapien
gcctctctatatgcaccgggtcttcttgattct

SEQ ID NO: 1032528 - DNA, 33 bp, Homo sapien
gcctctctatatgcactgggtcttcttgattct

SEQ ID NO: 1032529 - DNA, 33 bp, Homo sapien
agccaaatagataatcacctcgtgcagcacttt

SEQ ID NO: 1032530 - DNA, 33 bp, Homo sapien
agccaaatagataatcgcctcgtgcagcacttt

SEQ ID NO: 1032531 - DNA, 33 bp, Homo sapien
ccaatatctctttatacaaagcaaaaggtggcg

SEQ ID NO: 1032532 - DNA, 33 bp, Homo sapien
ccaatatctctttatagaaagcaaaaggtggcg

SEQ ID NO: 1032533 - DNA, 33 bp, Homo sapien
gagttccgtccagagaacttgcgtgctgataaa

SEQ ID NO: 1032534 - DNA, 33 bp, Homo sapien
gagttccgtccagagagcttgcgtgctgataaa

SEQ ID NO: 1032535 - DNA, 33 bp, Homo sapien
cttgcccccagttgcaataacatcctgaataaa

SEQ ID NO: 1032536 - DNA, 33 bp, Homo sapien
cttgcccccagttgcagtaacatcctgaataaa

SEQ ID NO: 1032537 - DNA, 33 bp, Homo sapien
caatgactggatttcccacaacccggtctggca

SEQ ID NO: 1032538 - DNA, 33 bp, Homo sapien
caatgactggatttcctacaacccggtctggca

SEQ ID NO: 1032539 - DNA, 33 bp, Homo sapien
tctgcctcttttcacacctactccctctaaggc

SEQ ID NO: 1032540 - DNA, 33 bp, Homo sapien
tctgcctcttttcacatctactccctctaaggc

SEQ ID NO: 1032541 - DNA, 33 bp, Homo sapien
aagattatccattacaggagtttcctatcagac

SEQ ID NO: 1032542 - DNA, 33 bp, Homo sapien
aagattatccattacatgagtttcctatcagac

SEQ ID NO: 1032543 - DNA, 33 bp, Homo sapien
ctccagattaaagtcccaccttccggacacagc

SEQ ID NO: 1032544 - DNA, 33 bp, Homo sapien
ctccagattaaagtccgaccttccggacacagc

SEQ ID NO: 1032545 - DNA, 33 bp, Homo sapien
caatagaagccaggggaattaagagaaagggaa

SEQ ID NO: 1032546 - DNA, 33 bp, Homo sapien
caatagaagccaggggcattaagagaaagggaa

SEQ ID NO: 1032547 - DNA, 33 bp, Homo sapien
tcttgagtggctttgccaaatatcttttccctt

SEQ ID NO: 1032548 - DNA, 33 bp, Homo sapien
tcttgagtggctttgcgaaatatcttttccctt

SEQ ID NO: 1032549 - DNA, 33 bp, Homo sapien
aacattaccagcacccaaaagtcatgttgctgg

SEQ ID NO: 1032550 - DNA, 33 bp, Homo sapien
aacattaccagcacccgaaagtcatgttgctgg

SEQ ID NO: 1032551 - DNA, 33 bp, Homo sapien
gtacgtaacacaggggcacttgaatgcagggaa

SEQ ID NO: 1032552 - DNA, 33 bp, Homo sapien
gtacgtaacacagggggacttgaatgcagggaa

SEQ ID NO: 1032553 - DNA, 33 bp, Homo sapien
catggccatctggaaagcagcctggcatattta

SEQ ID NO: 1032554 - DNA, 33 bp, Homo sapien
catggccatctggaaatcagcctggcatattta

SEQ ID NO: 1032555 - DNA, 33 bp, Homo sapien
cgctgcctgcttttgccgatatgtttatgcctt

SEQ ID NO: 1032556 - DNA, 33 bp, Homo sapien
cgctgcctgcttttgctgatatgtttatgcctt

SEQ ID NO: 1032557 - DNA, 33 bp, Homo sapien
gtctggtggggacaataagtgattctcatgatt

SEQ ID NO: 1032558 - DNA, 33 bp, Homo sapien
gtctggtggggacaatgagtgattctcatgatt

SEQ ID NO: 1032559 - DNA, 33 bp, Homo sapien
aaaggctgataggcaacacagcaaggaagaaga

SEQ ID NO: 1032560 - DNA, 33 bp, Homo sapien
aaaggctgataggcaagacagcaaggaagaaga

SEQ ID NO: 1032561 - DNA, 33 bp, Homo sapien
ataattcagttaattcgaagttcatgtaatttg

SEQ ID NO: 1032562 - DNA, 33 bp, Homo sapien
ataattcagttaattctaagttcatgtaatttg

SEQ ID NO: 1032563 - DNA, 33 bp, Homo sapien
acatacacccatggaaatgcttctccaacacga

SEQ ID NO: 1032564 - DNA, 33 bp, Homo sapien
acatacacccatggaagtgcttctccaacacga

SEQ ID NO: 1032565 - DNA, 33 bp, Homo sapien
tctcaggatacaatacaggtcaatatccagaag

SEQ ID NO: 1032566 - DNA, 33 bp, Homo sapien
tctcaggatacaatacgggtcaatatccagaag

SEQ ID NO: 1032567 - DNA, 33 bp, Homo sapien
taattcatgccaattaaggatgacataagctgg

SEQ ID NO: 1032568 - DNA, 33 bp, Homo sapien
taattcatgccaattagggatgacataagctgg

SEQ ID NO: 1032569 - DNA, 33 bp, Homo sapien
atcctccactgtagtacatttctaaaagattac

SEQ ID NO: 1032570 - DNA, 33 bp, Homo sapien
atcctccactgtagtagatttctaaaagattac

SEQ ID NO: 1032571 - DNA, 33 bp, Homo sapien
agactgcagcaaactccacctaaccagcctttt

SEQ ID NO: 1032572 - DNA, 33 bp, Homo sapien
agactgcagcaaactctacctaaccagcctttt

SEQ ID NO: 1032573 - DNA, 33 bp, Homo sapien
acatggaaaggtgcccaagacatttgttaatgg

SEQ ID NO: 1032574 - DNA, 33 bp, Homo sapien
acatggaaaggtgcccgagacatttgttaatgg

SEQ ID NO: 1032575 - DNA, 33 bp, Homo sapien
gccacatcgccgggccacaatcatttttttaaa

SEQ ID NO: 1032576 - DNA, 33 bp, Homo sapien
gccacatcgccgggccgcaatcatttttttaaa

SEQ ID NO: 1032577 - DNA, 33 bp, Homo sapien
cactcaccagcctaacacatgtttagctcctcg

SEQ ID NO: 1032578 - DNA, 33 bp, Homo sapien
cactcaccagcctaacgcatgtttagctcctcg

SEQ ID NO: 1032579 - DNA, 33 bp, Homo sapien
ctctttgcacctgcaaatacagcggaacttcag

SEQ ID NO: 1032580 - DNA, 33 bp, Homo sapien
ctctttgcacctgcaattacagcggaacttcag

SEQ ID NO: 1032581 - DNA, 33 bp, Homo sapien
gacagtgcaggtacggcaatatttctgcactca

SEQ ID NO: 1032582 - DNA, 33 bp, Homo sapien
gacagtgcaggtacggtaatatttctgcactca

SEQ ID NO: 1032583 - DNA, 33 bp, Homo sapien
agggcctggcatgcgacgaatgctccatcaaag

SEQ ID NO: 1032584 - DNA, 33 bp, Homo sapien
agggcctggcatgcgaggaatgctccatcaaag

SEQ ID NO: 1032585 - DNA, 33 bp, Homo sapien
aacaattaattctaagaaaatcatctgaaatgc

SEQ ID NO: 1032586 - DNA, 33 bp, Homo sapien
aacaattaattctaaggaaatcatctgaaatgc

SEQ ID NO: 1032587 - DNA, 33 bp, Homo sapien
tcagacaccaggaaacaaagggatagagattca

SEQ ID NO: 1032588 - DNA, 33 bp, Homo sapien
tcagacaccaggaaacgaagggatagagattca

SEQ ID NO: 1032589 - DNA, 33 bp, Homo sapien
agaatatttctggctacgcatctaatcctcagt

SEQ ID NO: 1032590 - DNA, 33 bp, Homo sapien
agaatatttctggctatgcatctaatcctcagt

SEQ ID NO: 1032591 - DNA, 33 bp, Homo sapien
accatttctgatgatccgagttggtgcagtctc

SEQ ID NO: 1032592 - DNA, 33 bp, Homo sapien
accatttctgatgatcggagttggtgcagtctc

SEQ ID NO: 1032593 - DNA, 33 bp, Homo sapien
cagttaatgcaaagtacgttgcttgaacctgat

SEQ ID NO: 1032594 - DNA, 33 bp, Homo sapien
cagttaatgcaaagtatgttgcttgaacctgat

SEQ ID NO: 1032595 - DNA, 33 bp, Homo sapien
aagatctcaatgacctcaataaatcaatacaat

SEQ ID NO: 1032596 - DNA, 33 bp, Homo sapien
aagatctcaatgacctgaataaatcaatacaat

SEQ ID NO: 1032597 - DNA, 33 bp, Homo sapien
gagaaaattgtccaagcagaaatgctgccagct

SEQ ID NO: 1032598 - DNA, 33 bp, Homo sapien
gagaaaattgtccaagtagaaatgctgccagct

SEQ ID NO: 1032599 - DNA, 33 bp, Homo sapien
cttgaatggtaagtaaatatctgatgacagcga

SEQ ID NO: 1032600 - DNA, 33 bp, Homo sapien
cttgaatggtaagtaagtatctgatgacagcga

SEQ ID NO: 1032601 - DNA, 33 bp, Homo sapien
aaaccacttaagttctcactacccaaagacagc

SEQ ID NO: 1032602 - DNA, 33 bp, Homo sapien
aaaccacttaagttctgactacccaaagacagc

SEQ ID NO: 1032603 - DNA, 33 bp, Homo sapien
ggccacaagaggagagaatctcaacaagagaca

SEQ ID NO: 1032604 - DNA, 33 bp, Homo sapien
ggccacaagaggagagtatctcaacaagagaca

SEQ ID NO: 1032605 - DNA, 33 bp, Homo sapien
gttgtggcgttaatacaaatagttagctgtgtc

SEQ ID NO: 1032606 - DNA, 33 bp, Homo sapien
gttgtggcgttaataccaatagttagctgtgtc

SEQ ID NO: 1032607 - DNA, 33 bp, Homo sapien
gcaagtttgatctagtaaaagtctcttgctttc

SEQ ID NO: 1032608 - DNA, 33 bp, Homo sapien
gcaagtttgatctagtgaaagtctcttgctttc

SEQ ID NO: 1032609 - DNA, 33 bp, Homo sapien
ccagcatgggtctctccctacccgactgcctgc

SEQ ID NO: 1032610 - DNA, 33 bp, Homo sapien
ccagcatgggtctctctctacccgactgcctgc

SEQ ID NO: 1032611 - DNA, 33 bp, Homo sapien
ggggaggacaagatgacgagtccagattagaag

SEQ ID NO: 1032612 - DNA, 33 bp, Homo sapien
ggggaggacaagatgatgagtccagattagaag

SEQ ID NO: 1032613 - DNA, 33 bp, Homo sapien
ccttccttcattcattaaatcaatcattcacgc

SEQ ID NO: 1032614 - DNA, 33 bp, Homo sapien
ccttccttcattcattcaatcaatcattcacgc

SEQ ID NO: 1032615 - DNA, 33 bp, Homo sapien
tttcccattcactacaacttccttccaagccaa

SEQ ID NO: 1032616 - DNA, 33 bp, Homo sapien
tttcccattcactacagcttccttccaagccaa

SEQ ID NO: 1032617 - DNA, 33 bp, Homo sapien
atggctgctgacaaaaactcaactccagctgta

SEQ ID NO: 1032618 - DNA, 33 bp, Homo sapien
atggctgctgacaaaatctcaactccagctgta

SEQ ID NO: 1032619 - DNA, 33 bp, Homo sapien
aggagagcccactctcaacaacgatgctgagga

SEQ ID NO: 1032620 - DNA, 33 bp, Homo sapien
aggagagcccactctcgacaacgatgctgagga

SEQ ID NO: 1032621 - DNA, 33 bp, Homo sapien
taaggttcatttgtgccgactatatttttctga

SEQ ID NO: 1032622 - DNA, 33 bp, Homo sapien
taaggttcatttgtgctgactatatttttctga

SEQ ID NO: 1032623 - DNA, 33 bp, Homo sapien
atgaaagtatgttttaagtacacacgcaggaaa

SEQ ID NO: 1032624 - DNA, 33 bp, Homo sapien
atgaaagtatgttttaggtacacacgcaggaaa

SEQ ID NO: 1032625 - DNA, 33 bp, Homo sapien
cacacggcaatgactacggatttttaatatgag

SEQ ID NO: 1032626 - DNA, 33 bp, Homo sapien
cacacggcaatgactagggatttttaatatgag

SEQ ID NO: 1032627 - DNA, 33 bp, Homo sapien
taatatctgtaagcatgaatcctgaacgatggg

SEQ ID NO: 1032628 - DNA, 33 bp, Homo sapien
taatatctgtaagcattaatcctgaacgatggg

SEQ ID NO: 1032629 - DNA, 33 bp, Homo sapien
gctttgccattaaaaggagcaaccttggaaaag

SEQ ID NO: 1032630 - DNA, 33 bp, Homo sapien
gctttgccattaaaagtagcaaccttggaaaag

SEQ ID NO: 1032631 - DNA, 33 bp, Homo sapien
cacacaagccctgatacgaagaagtctacagaa

SEQ ID NO: 1032632 - DNA, 33 bp, Homo sapien
cacacaagccctgatatgaagaagtctacagaa

SEQ ID NO: 1032633 - DNA, 33 bp, Homo sapien
tcagtgaaagcatttacgagtaggcattagaag

SEQ ID NO: 1032634 - DNA, 33 bp, Homo sapien
tcagtgaaagcatttaggagtaggcattagaag

SEQ ID NO: 1032635 - DNA, 33 bp, Homo sapien
tattttatctagtgaccctacaaacagagaaca

SEQ ID NO: 1032636 - DNA, 33 bp, Homo sapien
tattttatctagtgactctacaaacagagaaca

SEQ ID NO: 1032637 - DNA, 33 bp, Homo sapien
acacaagtgccctaataaggtaggcattattgc

SEQ ID NO: 1032638 - DNA, 33 bp, Homo sapien
acacaagtgccctaatgaggtaggcattattgc

SEQ ID NO: 1032639 - DNA, 33 bp, Homo sapien
cacaccaagccctagaaacatccaaggcagagc

SEQ ID NO: 1032640 - DNA, 33 bp, Homo sapien
cacaccaagccctagagacatccaaggcagagc

SEQ ID NO: 1032641 - DNA, 33 bp, Homo sapien
gcatccacataagcaaagatgtgttgggatttc

SEQ ID NO: 1032642 - DNA, 33 bp, Homo sapien
gcatccacataagcaacgatgtgttgggatttc

SEQ ID NO: 1032643 - DNA, 33 bp, Homo sapien
tagagccctcatgtaaagtgccgcacattccct

SEQ ID NO: 1032644 - DNA, 33 bp, Homo sapien
tagagccctcatgtaaggtgccgcacattccct

SEQ ID NO: 1032645 - DNA, 33 bp, Homo sapien
cagaatgtggttgggaaagtcactgaattaatg

SEQ ID NO: 1032646 - DNA, 33 bp, Homo sapien
cagaatgtggttgggatagtcactgaattaatg

SEQ ID NO: 1032647 - DNA, 33 bp, Homo sapien
aggtaggaggaagagcacaataagaggcaatag

SEQ ID NO: 1032648 - DNA, 33 bp, Homo sapien
aggtaggaggaagagcccaataagaggcaatag

SEQ ID NO: 1032649 - DNA, 33 bp, Homo sapien
tcactctttattggccacctcatttccccactc

SEQ ID NO: 1032650 - DNA, 33 bp, Homo sapien
tcactctttattggccgcctcatttccccactc

SEQ ID NO: 1032651 - DNA, 33 bp, Homo sapien
aggagaaagaaacaccaaagttcctatccccag

SEQ ID NO: 1032652 - DNA, 33 bp, Homo sapien
aggagaaagaaacaccgaagttcctatccccag

SEQ ID NO: 1032653 - DNA, 33 bp, Homo sapien
ctgtcctgggcccacaatggcattcagggatag

SEQ ID NO: 1032654 - DNA, 33 bp, Homo sapien
ctgtcctgggcccacagtggcattcagggatag

SEQ ID NO: 1032655 - DNA, 33 bp, Homo sapien
ataggaaagttacaaccatttcatctcacagaa

SEQ ID NO: 1032656 - DNA, 33 bp, Homo sapien
ataggaaagttacaactatttcatctcacagaa

SEQ ID NO: 1032657 - DNA, 33 bp, Homo sapien
ctgctgtagcaacccagcagaaagaggtaacac

SEQ ID NO: 1032658 - DNA, 33 bp, Homo sapien
ctgctgtagcaacccatcagaaagaggtaacac

SEQ ID NO: 1032659 - DNA, 33 bp, Homo sapien
gtaaacgtggatggagaaatgaaagcttctcat

SEQ ID NO: 1032660 - DNA, 33 bp, Homo sapien
gtaaacgtggatggaggaatgaaagcttctcat

SEQ ID NO: 1032661 - DNA, 33 bp, Homo sapien
agttcaccatttatgcaccttaggtagctagga

SEQ ID NO: 1032662 - DNA, 33 bp, Homo sapien
agttcaccatttatgcgccttaggtagctagga

SEQ ID NO: 1032663 - DNA, 33 bp, Homo sapien
aatagcttagctctcacctgatccccactgttg

SEQ ID NO: 1032664 - DNA, 33 bp, Homo sapien
aatagcttagctctcatctgatccccactgttg

SEQ ID NO: 1032665 - DNA, 33 bp, Homo sapien
aaagaattctaatgaaagccagtagttgtcaca

SEQ ID NO: 1032666 - DNA, 33 bp, Homo sapien
aaagaattctaatgaatgccagtagttgtcaca

SEQ ID NO: 1032667 - DNA, 33 bp, Homo sapien
ttaatggactctagacaagcgtgattgtatgcc

SEQ ID NO: 1032668 - DNA, 33 bp, Homo sapien
ttaatggactctagactagcgtgattgtatgcc

SEQ ID NO: 1032669 - DNA, 33 bp, Homo sapien
catctttgcctcaacaacacagcagttctcaaa

SEQ ID NO: 1032670 - DNA, 33 bp, Homo sapien
catctttgcctcaacagcacagcagttctcaaa

SEQ ID NO: 1032671 - DNA, 33 bp, Homo sapien
ttagagatgcagattcccgagacctactccaga

SEQ ID NO: 1032672 - DNA, 33 bp, Homo sapien
ttagagatgcagattctcgagacctactccaga

SEQ ID NO: 1032673 - DNA, 33 bp, Homo sapien
tcatggcctttccacaaatcacctcgcccctct

SEQ ID NO: 1032674 - DNA, 33 bp, Homo sapien
tcatggcctttccacagatcacctcgcccctct

SEQ ID NO: 1032675 - DNA, 33 bp, Homo sapien
gcacaggtaagcaggaagagatgtgtataaggg

SEQ ID NO: 1032676 - DNA, 33 bp, Homo sapien
gcacaggtaagcaggaggagatgtgtataaggg

SEQ ID NO: 1032677 - DNA, 33 bp, Homo sapien
acccacaggtggaaccacttcgccatgattgtc

SEQ ID NO: 1032678 - DNA, 33 bp, Homo sapien
acccacaggtggaaccgcttcgccatgattgtc

SEQ ID NO: 1032679 - DNA, 33 bp, Homo sapien
gctttcacagctggagcactgagcaaatataac

SEQ ID NO: 1032680 - DNA, 33 bp, Homo sapien
gctttcacagctggagtactgagcaaatataac

SEQ ID NO: 1032681 - DNA, 33 bp, Homo sapien
gggagctcacttctgacgcatgggaaaggcaat

SEQ ID NO: 1032682 - DNA, 33 bp, Homo sapien
gggagctcacttctgatgcatgggaaaggcaat

SEQ ID NO: 1032683 - DNA, 33 bp, Homo sapien
ctgtacagaggtgtacagaaaactgccctttgt

SEQ ID NO: 1032684 - DNA, 33 bp, Homo sapien
ctgtacagaggtgtacggaaaactgccctttgt

SEQ ID NO: 1032685 - DNA, 33 bp, Homo sapien
gagggctgaatctggccgcagttgtggaagtgg

SEQ ID NO: 1032686 - DNA, 33 bp, Homo sapien
gagggctgaatctggcggcagttgtggaagtgg

SEQ ID NO: 1032687 - DNA, 33 bp, Homo sapien
ggtcagttgaaagcaacggagctagccaaagtg

SEQ ID NO: 1032688 - DNA, 33 bp, Homo sapien
ggtcagttgaaagcaatggagctagccaaagtg

SEQ ID NO: 1032689 - DNA, 33 bp, Homo sapien
ccccttccacgggtcaagatggtgtcagggaag

SEQ ID NO: 1032690 - DNA, 33 bp, Homo sapien
ccccttccacgggtcacgatggtgtcagggaag

SEQ ID NO: 1032691 - DNA, 33 bp, Homo sapien
aagggcaactggaagaggaagaagaaggagaag

SEQ ID NO: 1032692 - DNA, 33 bp, Homo sapien
aagggcaactggaagatgaagaagaaggagaag

SEQ ID NO: 1032693 - DNA, 33 bp, Homo sapien
gagttagagatagaataagagagagaaacggag

SEQ ID NO: 1032694 - DNA, 33 bp, Homo sapien
gagttagagatagaatgagagagagaaacggag

SEQ ID NO: 1032695 - DNA, 33 bp, Homo sapien
gcattgtaagtgagtacgagcctacatttatct

SEQ ID NO: 1032696 - DNA, 33 bp, Homo sapien
gcattgtaagtgagtatgagcctacatttatct

SEQ ID NO: 1032697 - DNA, 33 bp, Homo sapien
gaaatggaatcttctccaactcctccttccctc

SEQ ID NO: 1032698 - DNA, 33 bp, Homo sapien
gaaatggaatcttctctaactcctccttccctc

SEQ ID NO: 1032699 - DNA, 33 bp, Homo sapien
gatgtttcctgtgacacgaagggtgtaatcctt

SEQ ID NO: 1032700 - DNA, 33 bp, Homo sapien
gatgtttcctgtgacatgaagggtgtaatcctt

SEQ ID NO: 1032701 - DNA, 33 bp, Homo sapien
aggacagaacttccaaagctctagtgtcaggga

SEQ ID NO: 1032702 - DNA, 33 bp, Homo sapien
aggacagaacttccaaggctctagtgtcaggga

SEQ ID NO: 1032703 - DNA, 33 bp, Homo sapien
acagtcttggtccaaaatctctggaataaatac

SEQ ID NO: 1032704 - DNA, 33 bp, Homo sapien
acagtcttggtccaaagtctctggaataaatac

SEQ ID NO: 1032705 - DNA, 33 bp, Homo sapien
ggctcagagggtttgagtagtaaatgtcagcat

SEQ ID NO: 1032706 - DNA, 33 bp, Homo sapien
ggctcagagggtttgattagtaaatgtcagcat

SEQ ID NO: 1032707 - DNA, 33 bp, Homo sapien
agatatcacttcatacaaagtaggatggctata

SEQ ID NO: 1032708 - DNA, 33 bp, Homo sapien
agatatcacttcataccaagtaggatggctata

SEQ ID NO: 1032709 - DNA, 33 bp, Homo sapien
cttaaaactctgcctacgatctcctgtgtctga

SEQ ID NO: 1032710 - DNA, 33 bp, Homo sapien
cttaaaactctgcctatgatctcctgtgtctga

SEQ ID NO: 1032711 - DNA, 33 bp, Homo sapien
actcctgacatccttgcgaagtatttgtccatt

SEQ ID NO: 1032712 - DNA, 33 bp, Homo sapien
actcctgacatccttgtgaagtatttgtccatt

SEQ ID NO: 1032713 - DNA, 33 bp, Homo sapien
ctgccacaaatttgaaacttagtatgtatgcat

SEQ ID NO: 1032714 - DNA, 33 bp, Homo sapien
ctgccacaaatttgaagcttagtatgtatgcat

SEQ ID NO: 1032715 - DNA, 33 bp, Homo sapien
cataggttaagagcaaattgaaaacaaaggcca

SEQ ID NO: 1032716 - DNA, 33 bp, Homo sapien
cataggttaagagcaagttgaaaacaaaggcca

SEQ ID NO: 1032717 - DNA, 33 bp, Homo sapien
gatcagagaactgaaacgttttcccatcatgct

SEQ ID NO: 1032718 - DNA, 33 bp, Homo sapien
gatcagagaactgaaaggttttcccatcatgct

SEQ ID NO: 1032719 - DNA, 33 bp, Homo sapien
taggaagattctcaccactcatgtatttatgca

SEQ ID NO: 1032720 - DNA, 33 bp, Homo sapien
taggaagattctcaccgctcatgtatttatgca

SEQ ID NO: 1032721 - DNA, 33 bp, Homo sapien
atgttgaaaaccgtcaacctggtatcctcaagg

SEQ ID NO: 1032722 - DNA, 33 bp, Homo sapien
atgttgaaaaccgtcaccctggtatcctcaagg

SEQ ID NO: 1032723 - DNA, 33 bp, Homo sapien
gttgcagttgggttcagtcaactgaccagacgt

SEQ ID NO: 1032724 - DNA, 33 bp, Homo sapien
gttgcagttgggttcattcaactgaccagacgt

SEQ ID NO: 1032725 - DNA, 33 bp, Homo sapien
acacaaattcacatgcacaaaaaaacagaatct

SEQ ID NO: 1032726 - DNA, 33 bp, Homo sapien
acacaaattcacatgcgcaaaaaaacagaatct

SEQ ID NO: 1032727 - DNA, 33 bp, Homo sapien
ataactgcaccagctccataatgcttatttctt

SEQ ID NO: 1032728 - DNA, 33 bp, Homo sapien
ataactgcaccagctctataatgcttatttctt

SEQ ID NO: 1032729 - DNA, 33 bp, Homo sapien
ttttggagtcttctcaaaatttatggtcagttt

SEQ ID NO: 1032730 - DNA, 33 bp, Homo sapien
ttttggagtcttctcagaatttatggtcagttt

SEQ ID NO: 1032731 - DNA, 33 bp, Homo sapien
cacattaaaaccactcacctgattttcaaggcc

SEQ ID NO: 1032732 - DNA, 33 bp, Homo sapien
cacattaaaaccactctcctgattttcaaggcc

SEQ ID NO: 1032733 - DNA, 33 bp, Homo sapien
taagggaaaactctgcaaggaccaacaggctca

SEQ ID NO: 1032734 - DNA, 33 bp, Homo sapien
taagggaaaactctgcgaggaccaacaggctca

SEQ ID NO: 1032735 - DNA, 33 bp, Homo sapien
gtaaggcagattactcagaagaactggggtaga

SEQ ID NO: 1032736 - DNA, 33 bp, Homo sapien
gtaaggcagattactcggaagaactggggtaga

SEQ ID NO: 1032737 - DNA, 33 bp, Homo sapien
ttcgtttctgcctttaacaccatttatttcctc

SEQ ID NO: 1032738 - DNA, 33 bp, Homo sapien
ttcgtttctgcctttatcaccatttatttcctc

SEQ ID NO: 1032739 - DNA, 33 bp, Homo sapien
acattaggagacagcacaatccagtaaaagatg

SEQ ID NO: 1032740 - DNA, 33 bp, Homo sapien
acattaggagacagcataatccagtaaaagatg

SEQ ID NO: 1032741 - DNA, 33 bp, Homo sapien
tggcagggactcctaacatttttgaggactaga

SEQ ID NO: 1032742 - DNA, 33 bp, Homo sapien
tggcagggactcctaagatttttgaggactaga

SEQ ID NO: 1032743 - DNA, 33 bp, Homo sapien
aaataatagatacaaaagaatgccagtcctcat

SEQ ID NO: 1032744 - DNA, 33 bp, Homo sapien
aaataatagatacaaacgaatgccagtcctcat

SEQ ID NO: 1032745 - DNA, 33 bp, Homo sapien
gctctcctctcccccaatagtttgtcatgagca

SEQ ID NO: 1032746 - DNA, 33 bp, Homo sapien
gctctcctctcccccagtagtttgtcatgagca

SEQ ID NO: 1032747 - DNA, 33 bp, Homo sapien
tattctgtgtatgtaactgtaactatcaagttg

SEQ ID NO: 1032748 - DNA, 33 bp, Homo sapien
tattctgtgtatgtaattgtaactatcaagttg

SEQ ID NO: 1032749 - DNA, 33 bp, Homo sapien
cagtgaggtagaacaactgacctcccaaattaa

SEQ ID NO: 1032750 - DNA, 33 bp, Homo sapien
cagtgaggtagaacaattgacctcccaaattaa

SEQ ID NO: 1032751 - DNA, 33 bp, Homo sapien
gctgtgggggaggcaacggtctctgcgtcaggg

SEQ ID NO: 1032752 - DNA, 33 bp, Homo sapien
gctgtgggggaggcaatggtctctgcgtcaggg

SEQ ID NO: 1032753 - DNA, 33 bp, Homo sapien
tggttaagtttgatacagacattcggtgcttgc

SEQ ID NO: 1032754 - DNA, 33 bp, Homo sapien
tggttaagtttgatacggacattcggtgcttgc

SEQ ID NO: 1032755 - DNA, 33 bp, Homo sapien
acgaggctaggaagtacaatcagttgcctcagc

SEQ ID NO: 1032756 - DNA, 33 bp, Homo sapien
acgaggctaggaagtataatcagttgcctcagc

SEQ ID NO: 1032757 - DNA, 33 bp, Homo sapien
ataacacaaatccgcacgaagcatctattttct

SEQ ID NO: 1032758 - DNA, 33 bp, Homo sapien
ataacacaaatccgcatgaagcatctattttct

SEQ ID NO: 1032759 - DNA, 33 bp, Homo sapien
atatagtgggaccataactccttttagggctct

SEQ ID NO: 1032760 - DNA, 33 bp, Homo sapien
atatagtgggaccatatctccttttagggctct

SEQ ID NO: 1032761 - DNA, 33 bp, Homo sapien
accaatgtacttctaacgcatattgattgacgt

SEQ ID NO: 1032762 - DNA, 33 bp, Homo sapien
accaatgtacttctaatgcatattgattgacgt

SEQ ID NO: 1032763 - DNA, 33 bp, Homo sapien
tgaagattctgaggtcaatgaggttggctttga

SEQ ID NO: 1032764 - DNA, 33 bp, Homo sapien
tgaagattctgaggtcgatgaggttggctttga

SEQ ID NO: 1032765 - DNA, 33 bp, Homo sapien
tttgctagaatccacccaaattcctgcttttac

SEQ ID NO: 1032766 - DNA, 33 bp, Homo sapien
tttgctagaatccacctaaattcctgcttttac

SEQ ID NO: 1032767 - DNA, 33 bp, Homo sapien
tcatccactgtctcaccggaacatgtctagggt

SEQ ID NO: 1032768 - DNA, 33 bp, Homo sapien
tcatccactgtctcactggaacatgtctagggt

SEQ ID NO: 1032769 - DNA, 33 bp, Homo sapien
gaaagtcagctcttccaatgtcaaggtttgtct

SEQ ID NO: 1032770 - DNA, 33 bp, Homo sapien
gaaagtcagctcttccgatgtcaaggtttgtct

SEQ ID NO: 1032771 - DNA, 33 bp, Homo sapien
tgtcttctgcccataagcactggcatttctcaa

SEQ ID NO: 1032772 - DNA, 33 bp, Homo sapien
tgtcttctgcccataatcactggcatttctcaa

SEQ ID NO: 1032773 - DNA, 33 bp, Homo sapien
gaggcagcaatgagaaacactggaatagaccac

SEQ ID NO: 1032774 - DNA, 33 bp, Homo sapien
gaggcagcaatgagaagcactggaatagaccac

SEQ ID NO: 1032775 - DNA, 33 bp, Homo sapien
ttcctttacattggaccgaaatcttccatcctg

SEQ ID NO: 1032776 - DNA, 33 bp, Homo sapien
ttcctttacattggactgaaatcttccatcctg

SEQ ID NO: 1032777 - DNA, 33 bp, Homo sapien
gaggagtcaaggaagagaagcagaggaatgtct

SEQ ID NO: 1032778 - DNA, 33 bp, Homo sapien
gaggagtcaaggaagataagcagaggaatgtct

SEQ ID NO: 1032779 - DNA, 33 bp, Homo sapien
tcagtggctcctcaaagttatctgtccaagact

SEQ ID NO: 1032780 - DNA, 33 bp, Homo sapien
tcagtggctcctcaaatttatctgtccaagact

SEQ ID NO: 1032781 - DNA, 33 bp, Homo sapien
ttagtcagggttgcccagagatacagaaccaag

SEQ ID NO: 1032782 - DNA, 33 bp, Homo sapien
ttagtcagggttgcccggagatacagaaccaag

SEQ ID NO: 1032783 - DNA, 33 bp, Homo sapien
catctgaaagtccctgaaaggaaggggttaggc

SEQ ID NO: 1032784 - DNA, 33 bp, Homo sapien
catctgaaagtccctggaaggaaggggttaggc

SEQ ID NO: 1032785 - DNA, 33 bp, Homo sapien
ttccagaaggcagcaaaactgtctcttagaaaa

SEQ ID NO: 1032786 - DNA, 33 bp, Homo sapien
ttccagaaggcagcaagactgtctcttagaaaa

SEQ ID NO: 1032787 - DNA, 33 bp, Homo sapien
agcaggatgtcctcacaaaacagggccattgac

SEQ ID NO: 1032788 - DNA, 33 bp, Homo sapien
agcaggatgtcctcacgaaacagggccattgac

SEQ ID NO: 1032789 - DNA, 33 bp, Homo sapien
agaccacgctctttgcggatgtggctcctagca

SEQ ID NO: 1032790 - DNA, 33 bp, Homo sapien
agaccacgctctttgctgatgtggctcctagca

SEQ ID NO: 1032791 - DNA, 33 bp, Homo sapien
gagtgagaacctgctacatctgttgtgtccctt

SEQ ID NO: 1032792 - DNA, 33 bp, Homo sapien
gagtgagaacctgctatatctgttgtgtccctt

SEQ ID NO: 1032793 - DNA, 33 bp, Homo sapien
tgtgccataggtctgcaacatctaaatgcaagg

SEQ ID NO: 1032794 - DNA, 33 bp, Homo sapien
tgtgccataggtctgcgacatctaaatgcaagg

SEQ ID NO: 1032795 - DNA, 33 bp, Homo sapien
tgccctctacccccaccgtcagaggcatttgaa

SEQ ID NO: 1032796 - DNA, 33 bp, Homo sapien
tgccctctacccccactgtcagaggcatttgaa

SEQ ID NO: 1032797 - DNA, 33 bp, Homo sapien
agtgaggagaagcctacaatcagaagaggttgt

SEQ ID NO: 1032798 - DNA, 33 bp, Homo sapien
agtgaggagaagcctataatcagaagaggttgt

SEQ ID NO: 1032799 - DNA, 33 bp, Homo sapien
gacctttgaatcattccctttggcgggggttgg

SEQ ID NO: 1032800 - DNA, 33 bp, Homo sapien
gacctttgaatcattctctttggcgggggttgg

SEQ ID NO: 1032801 - DNA, 33 bp, Homo sapien
acttccattactggtaagcaagctgggaagttt

SEQ ID NO: 1032802 - DNA, 33 bp, Homo sapien
acttccattactggtacgcaagctgggaagttt

SEQ ID NO: 1032803 - DNA, 33 bp, Homo sapien
agtgagcagggcaaaacctggagctggacagcc

SEQ ID NO: 1032804 - DNA, 33 bp, Homo sapien
agtgagcagggcaaaatctggagctggacagcc

SEQ ID NO: 1032805 - DNA, 33 bp, Homo sapien
cctgggctcaaatcctaacttgactattgacca

SEQ ID NO: 1032806 - DNA, 33 bp, Homo sapien
cctgggctcaaatcctgacttgactattgacca

SEQ ID NO: 1032807 - DNA, 33 bp, Homo sapien
gtgattattttgatgacggaaaattggaaagag

SEQ ID NO: 1032808 - DNA, 33 bp, Homo sapien
gtgattattttgatgatggaaaattggaaagag

SEQ ID NO: 1032809 - DNA, 33 bp, Homo sapien
ttggcatatgcagtaaatcctcagttaatgtca

SEQ ID NO: 1032810 - DNA, 33 bp, Homo sapien
ttggcatatgcagtaagtcctcagttaatgtca

SEQ ID NO: 1032811 - DNA, 33 bp, Homo sapien
aaataacaggaacatacgaaggatgcctcagaa

SEQ ID NO: 1032812 - DNA, 33 bp, Homo sapien
aaataacaggaacataggaaggatgcctcagaa

SEQ ID NO: 1032813 - DNA, 33 bp, Homo sapien
agcttaccccacggaaagtttacagtgcccagt

SEQ ID NO: 1032814 - DNA, 33 bp, Homo sapien
agcttaccccacggaacgtttacagtgcccagt

SEQ ID NO: 1032815 - DNA, 33 bp, Homo sapien
acacgcttcccaaagcaccactattctgccttc

SEQ ID NO: 1032816 - DNA, 33 bp, Homo sapien
acacgcttcccaaagcgccactattctgccttc

SEQ ID NO: 1032817 - DNA, 33 bp, Homo sapien
ttttaatattagagaaagttatgaaaacatgaa

SEQ ID NO: 1032818 - DNA, 33 bp, Homo sapien
ttttaatattagagaaggttatgaaaacatgaa

SEQ ID NO: 1032819 - DNA, 33 bp, Homo sapien
gcccttagcatgggcaagtcagctacacaagtt

SEQ ID NO: 1032820 - DNA, 33 bp, Homo sapien
gcccttagcatgggcaggtcagctacacaagtt

SEQ ID NO: 1032821 - DNA, 33 bp, Homo sapien
tagccattgctcttaaccaggagttgatctcgg

SEQ ID NO: 1032822 - DNA, 33 bp, Homo sapien
tagccattgctcttaatcaggagttgatctcgg

SEQ ID NO: 1032823 - DNA, 33 bp, Homo sapien
aattctgcttcccaagacttgatcacccatctc

SEQ ID NO: 1032824 - DNA, 33 bp, Homo sapien
aattctgcttcccaagccttgatcacccatctc

SEQ ID NO: 1032825 - DNA, 33 bp, Homo sapien
gatgcatctggtagtcaaggaaggaggctgaga

SEQ ID NO: 1032826 - DNA, 33 bp, Homo sapien
gatgcatctggtagtcgaggaaggaggctgaga

SEQ ID NO: 1032827 - DNA, 33 bp, Homo sapien
ggggcacaaatttggacgctacagtttggatat

SEQ ID NO: 1032828 - DNA, 33 bp, Homo sapien
ggggcacaaatttggatgctacagtttggatat

SEQ ID NO: 1032829 - DNA, 33 bp, Homo sapien
aaactaatctctgcagcaattaaatggtgtttt

SEQ ID NO: 1032830 - DNA, 33 bp, Homo sapien
aaactaatctctgcaggaattaaatggtgtttt

SEQ ID NO: 1032831 - DNA, 33 bp, Homo sapien
attagtttctgaggtacgccaggggtcttgctt

SEQ ID NO: 1032832 - DNA, 33 bp, Homo sapien
attagtttctgaggtatgccaggggtcttgctt

SEQ ID NO: 1032833 - DNA, 33 bp, Homo sapien
actaacatctatagcgcagaggccaggaatgct

SEQ ID NO: 1032834 - DNA, 33 bp, Homo sapien
actaacatctatagcgtagaggccaggaatgct

SEQ ID NO: 1032835 - DNA, 33 bp, Homo sapien
tcattaggcactttgcagagaccagatgctttg

SEQ ID NO: 1032836 - DNA, 33 bp, Homo sapien
tcattaggcactttgcggagaccagatgctttg

SEQ ID NO: 1032837 - DNA, 33 bp, Homo sapien
tttcggctctctaaaaaatcagcaatcttcatt

SEQ ID NO: 1032838 - DNA, 33 bp, Homo sapien
tttcggctctctaaaatatcagcaatcttcatt

SEQ ID NO: 1032839 - DNA, 33 bp, Homo sapien
aaaatagcctgccaaagacctcaatctgattaa

SEQ ID NO: 1032840 - DNA, 33 bp, Homo sapien
aaaatagcctgccaaatacctcaatctgattaa

SEQ ID NO: 1032841 - DNA, 33 bp, Homo sapien
gcagtgggtttccaaccgtggcaagtagcggct

SEQ ID NO: 1032842 - DNA, 33 bp, Homo sapien
gcagtgggtttccaactgtggcaagtagcggct

SEQ ID NO: 1032843 - DNA, 33 bp, Homo sapien
ctctaagcatcttcaaacaatcagtgccatttt

SEQ ID NO: 1032844 - DNA, 33 bp, Homo sapien
ctctaagcatcttcaagcaatcagtgccatttt

SEQ ID NO: 1032845 - DNA, 33 bp, Homo sapien
ccccagcatctaacacacagtgaatgacctctc

SEQ ID NO: 1032846 - DNA, 33 bp, Homo sapien
ccccagcatctaacacccagtgaatgacctctc

SEQ ID NO: 1032847 - DNA, 33 bp, Homo sapien
tcaggagcctgagtacaaagccagcctgaggat

SEQ ID NO: 1032848 - DNA, 33 bp, Homo sapien
tcaggagcctgagtacgaagccagcctgaggat

SEQ ID NO: 1032849 - DNA, 33 bp, Homo sapien
atcttctctaaaacttcaactgtcatttgtcat

SEQ ID NO: 1032850 - DNA, 33 bp, Homo sapien
atcttctctaaaacttgaactgtcatttgtcat

SEQ ID NO: 1032851 - DNA, 33 bp, Homo sapien
tgtaatcactggaaccactgagcctggagaagg

SEQ ID NO: 1032852 - DNA, 33 bp, Homo sapien
tgtaatcactggaaccgctgagcctggagaagg

SEQ ID NO: 1032853 - DNA, 33 bp, Homo sapien
aatcaatggcagttctcactggctgggacttga

SEQ ID NO: 1032854 - DNA, 33 bp, Homo sapien
aatcaatggcagttcttactggctgggacttga

SEQ ID NO: 1032855 - DNA, 33 bp, Homo sapien
ggtcagtagcatgtacacattttgtttccctta

SEQ ID NO: 1032856 - DNA, 33 bp, Homo sapien
ggtcagtagcatgtactcattttgtttccctta

SEQ ID NO: 1032857 - DNA, 33 bp, Homo sapien
cagcctcaacctggataaccggaggaccttggc

SEQ ID NO: 1032858 - DNA, 33 bp, Homo sapien
cagcctcaacctggatcaccggaggaccttggc

SEQ ID NO: 1032859 - DNA, 33 bp, Homo sapien
aatcagactgatgttcaaagattggagtttgtg

SEQ ID NO: 1032860 - DNA, 33 bp, Homo sapien
aatcagactgatgttcgaagattggagtttgtg

SEQ ID NO: 1032861 - DNA, 33 bp, Homo sapien
tccgtttcccagaaaaaaacatagccattattt

SEQ ID NO: 1032862 - DNA, 33 bp, Homo sapien
tccgtttcccagaaaacaacatagccattattt

SEQ ID NO: 1032863 - DNA, 33 bp, Homo sapien
cttggacggagcccctcagacagcaagatcacc

SEQ ID NO: 1032864 - DNA, 33 bp, Homo sapien
cttggacggagccccttagacagcaagatcacc

SEQ ID NO: 1032865 - DNA, 33 bp, Homo sapien
agccacccacccattaaatcagtggctcacagc

SEQ ID NO: 1032866 - DNA, 33 bp, Homo sapien
agccacccacccattacatcagtggctcacagc

SEQ ID NO: 1032867 - DNA, 33 bp, Homo sapien
cttggtgctgtcctcacaataatgagtgagttc

SEQ ID NO: 1032868 - DNA, 33 bp, Homo sapien
cttggtgctgtcctcataataatgagtgagttc

SEQ ID NO: 1032869 - DNA, 33 bp, Homo sapien
agtgagttccctgtcactgaaggtacatgaaca

SEQ ID NO: 1032870 - DNA, 33 bp, Homo sapien
agtgagttccctgtcattgaaggtacatgaaca

SEQ ID NO: 1032871 - DNA, 33 bp, Homo sapien
aagaaattctagacatcaagtgtttagcacatt

SEQ ID NO: 1032872 - DNA, 33 bp, Homo sapien
aagaaattctagacatgaagtgtttagcacatt

SEQ ID NO: 1032873 - DNA, 33 bp, Homo sapien
atttgaggcccgtaatcaaagtgagttcctctc

SEQ ID NO: 1032874 - DNA, 33 bp, Homo sapien
atttgaggcccgtaatgaaagtgagttcctctc

SEQ ID NO: 1032875 - DNA, 33 bp, Homo sapien
tgggcaccactccagaccaattgtatcagaatc

SEQ ID NO: 1032876 - DNA, 33 bp, Homo sapien
tgggcaccactccagatcaattgtatcagaatc

SEQ ID NO: 1032877 - DNA, 33 bp, Homo sapien
cttccctgggcttcaacgcttcatttgtagaac

SEQ ID NO: 1032878 - DNA, 33 bp, Homo sapien
cttccctgggcttcaatgcttcatttgtagaac

SEQ ID NO: 1032879 - DNA, 33 bp, Homo sapien
ataagcgagcttggctaaacataacgaaggatt

SEQ ID NO: 1032880 - DNA, 33 bp, Homo sapien
ataagcgagcttggctcaacataacgaaggatt

SEQ ID NO: 1032881 - DNA, 33 bp, Homo sapien
aatggaatgcttatagcaggccttaaaaataaa

SEQ ID NO: 1032882 - DNA, 33 bp, Homo sapien
aatggaatgcttatagtaggccttaaaaataaa

SEQ ID NO: 1032883 - DNA, 33 bp, Homo sapien
ccatttgaccttagaacaaaggaagtgatccag

SEQ ID NO: 1032884 - DNA, 33 bp, Homo sapien
ccatttgaccttagaagaaaggaagtgatccag

SEQ ID NO: 1032885 - DNA, 33 bp, Homo sapien
aggcactcagcctggggacttctgccaagcagc

SEQ ID NO: 1032886 - DNA, 33 bp, Homo sapien
aggcactcagcctgggtacttctgccaagcagc

SEQ ID NO: 1032887 - DNA, 33 bp, Homo sapien
acacaatttacacttaggctttgcctgtctccc

SEQ ID NO: 1032888 - DNA, 33 bp, Homo sapien
acacaatttacacttatgctttgcctgtctccc

SEQ ID NO: 1032889 - DNA, 33 bp, Homo sapien
tggaggtgataaaagacgacaagttctggatgt

SEQ ID NO: 1032890 - DNA, 33 bp, Homo sapien
tggaggtgataaaagaggacaagttctggatgt

SEQ ID NO: 1032891 - DNA, 33 bp, Homo sapien
agtgacttctcatgtcaattaatattttctaca

SEQ ID NO: 1032892 - DNA, 33 bp, Homo sapien
agtgacttctcatgtccattaatattttctaca

SEQ ID NO: 1032893 - DNA, 33 bp, Homo sapien
tctctgtgcttcagtagccccatctggaataag

SEQ ID NO: 1032894 - DNA, 33 bp, Homo sapien
tctctgtgcttcagtatccccatctggaataag

SEQ ID NO: 1032895 - DNA, 33 bp, Homo sapien
ccggattacctcaatagaaagagatggtttctg

SEQ ID NO: 1032896 - DNA, 33 bp, Homo sapien
ccggattacctcaatataaagagatggtttctg

SEQ ID NO: 1032897 - DNA, 33 bp, Homo sapien
ctcaatgtgtggcttccatctaaggtggtctaa

SEQ ID NO: 1032898 - DNA, 33 bp, Homo sapien
ctcaatgtgtggcttctatctaaggtggtctaa

SEQ ID NO: 1032899 - DNA, 33 bp, Homo sapien
ctcctacaagccacaaattcccagtttcttcac

SEQ ID NO: 1032900 - DNA, 33 bp, Homo sapien
ctcctacaagccacaagttcccagtttcttcac

SEQ ID NO: 1032901 - DNA, 33 bp, Homo sapien
ttagctgattgaaatcactgaggccatttcagg

SEQ ID NO: 1032902 - DNA, 33 bp, Homo sapien
ttagctgattgaaatcgctgaggccatttcagg

SEQ ID NO: 1032903 - DNA, 33 bp, Homo sapien
agcttatgtttacagaacacatattatgtgcca

SEQ ID NO: 1032904 - DNA, 33 bp, Homo sapien
agcttatgtttacagatcacatattatgtgcca

SEQ ID NO: 1032905 - DNA, 33 bp, Homo sapien
tcttcactgtgactccccagccatttctgtcac

SEQ ID NO: 1032906 - DNA, 33 bp, Homo sapien
tcttcactgtgactccgcagccatttctgtcac

SEQ ID NO: 1032907 - DNA, 33 bp, Homo sapien
caggctaaaacacggcaacatctgcttggaaac

SEQ ID NO: 1032908 - DNA, 33 bp, Homo sapien
caggctaaaacacggcgacatctgcttggaaac

SEQ ID NO: 1032909 - DNA, 33 bp, Homo sapien
caatggtttatttgcactgaaagaggttttcat

SEQ ID NO: 1032910 - DNA, 33 bp, Homo sapien
caatggtttatttgcattgaaagaggttttcat

SEQ ID NO: 1032911 - DNA, 33 bp, Homo sapien
gaactttaagcatttcaaaagagacagctaatc

SEQ ID NO: 1032912 - DNA, 33 bp, Homo sapien
gaactttaagcatttcgaaagagacagctaatc

SEQ ID NO: 1032913 - DNA, 33 bp, Homo sapien
tcaaaactgagctgaacggaggaagtttaatgt

SEQ ID NO: 1032914 - DNA, 33 bp, Homo sapien
tcaaaactgagctgaatggaggaagtttaatgt

SEQ ID NO: 1032915 - DNA, 33 bp, Homo sapien
tgtattggttagtgccagctaagaatattttta

SEQ ID NO: 1032916 - DNA, 33 bp, Homo sapien
tgtattggttagtgccggctaagaatattttta

SEQ ID NO: 1032917 - DNA, 33 bp, Homo sapien
agctgtgactggcatacggaagaaacctggaaa

SEQ ID NO: 1032918 - DNA, 33 bp, Homo sapien
agctgtgactggcatatggaagaaacctggaaa

SEQ ID NO: 1032919 - DNA, 33 bp, Homo sapien
gaatggtatctatagaaacatgtctaggctctt

SEQ ID NO: 1032920 - DNA, 33 bp, Homo sapien
gaatggtatctatagacacatgtctaggctctt

SEQ ID NO: 1032921 - DNA, 33 bp, Homo sapien
ctggttagtaaaataaaagaggcatttacatga

SEQ ID NO: 1032922 - DNA, 33 bp, Homo sapien
ctggttagtaaaataacagaggcatttacatga

SEQ ID NO: 1032923 - DNA, 33 bp, Homo sapien
ttgttaattcttcagcaattcccaaacatgtgt

SEQ ID NO: 1032924 - DNA, 33 bp, Homo sapien
ttgttaattcttcagcgattcccaaacatgtgt

SEQ ID NO: 1032925 - DNA, 33 bp, Homo sapien
gactgagcttcactctaactttccatgacttca

SEQ ID NO: 1032926 - DNA, 33 bp, Homo sapien
gactgagcttcactctcactttccatgacttca

SEQ ID NO: 1032927 - DNA, 33 bp, Homo sapien
tcaaaggggcatagtcaaaatatgctaatggaa

SEQ ID NO: 1032928 - DNA, 33 bp, Homo sapien
tcaaaggggcatagtcgaaatatgctaatggaa

SEQ ID NO: 1032929 - DNA, 33 bp, Homo sapien
gcactaaagctggtcactagagtttgcaagagc

SEQ ID NO: 1032930 - DNA, 33 bp, Homo sapien
gcactaaagctggtcattagagtttgcaagagc

SEQ ID NO: 1032931 - DNA, 33 bp, Homo sapien
gaatagaggctcctaaagccagttctctccctg

SEQ ID NO: 1032932 - DNA, 33 bp, Homo sapien
gaatagaggctcctaaggccagttctctccctg

SEQ ID NO: 1032933 - DNA, 33 bp, Homo sapien
ggtcacagcaacagaaatcacagcccagtgttc

SEQ ID NO: 1032934 - DNA, 33 bp, Homo sapien
ggtcacagcaacagaactcacagcccagtgttc

SEQ ID NO: 1032935 - DNA, 33 bp, Homo sapien
tttcataatttaaagacagaattgccgctatca

SEQ ID NO: 1032936 - DNA, 33 bp, Homo sapien
tttcataatttaaagatagaattgccgctatca

SEQ ID NO: 1032937 - DNA, 33 bp, Homo sapien
tgcccaatttctggcacagactctaacacacag

SEQ ID NO: 1032938 - DNA, 33 bp, Homo sapien
tgcccaatttctggcagagactctaacacacag

SEQ ID NO: 1032939 - DNA, 33 bp, Homo sapien
cttgcatatcattgaaagtcttaaatttttatc

SEQ ID NO: 1032940 - DNA, 33 bp, Homo sapien
cttgcatatcattgaatgtcttaaatttttatc

SEQ ID NO: 1032941 - DNA, 33 bp, Homo sapien
atcatgcgttagaagactcaatattaagatatc

SEQ ID NO: 1032942 - DNA, 33 bp, Homo sapien
atcatgcgttagaagattcaatattaagatatc

SEQ ID NO: 1032943 - DNA, 33 bp, Homo sapien
atagcatttgtagagccagtagttgtgattatg

SEQ ID NO: 1032944 - DNA, 33 bp, Homo sapien
atagcatttgtagagctagtagttgtgattatg

SEQ ID NO: 1032945 - DNA, 33 bp, Homo sapien
actctagaggcagtccaatttgggttgcttccc

SEQ ID NO: 1032946 - DNA, 33 bp, Homo sapien
actctagaggcagtccgatttgggttgcttccc

SEQ ID NO: 1032947 - DNA, 33 bp, Homo sapien
taattcaatttagtatcagcaaggtgatgtttg

SEQ ID NO: 1032948 - DNA, 33 bp, Homo sapien
taattcaatttagtattagcaaggtgatgtttg

SEQ ID NO: 1032949 - DNA, 33 bp, Homo sapien
acctaatttctctaaggctcaatgtcttcacag

SEQ ID NO: 1032950 - DNA, 33 bp, Homo sapien
acctaatttctctaagtctcaatgtcttcacag

SEQ ID NO: 1032951 - DNA, 33 bp, Homo sapien
tgtcctattggactcccaaatacagcaatacct

SEQ ID NO: 1032952 - DNA, 33 bp, Homo sapien
tgtcctattggactcctaaatacagcaatacct

SEQ ID NO: 1032953 - DNA, 33 bp, Homo sapien
ccaggctctagccaaacacaatctgaagtgact

SEQ ID NO: 1032954 - DNA, 33 bp, Homo sapien
ccaggctctagccaaatacaatctgaagtgact

SEQ ID NO: 1032955 - DNA, 33 bp, Homo sapien
tcatagctttatcttgaatacagccccatgtac

SEQ ID NO: 1032956 - DNA, 33 bp, Homo sapien
tcatagctttatcttggatacagccccatgtac

SEQ ID NO: 1032957 - DNA, 33 bp, Homo sapien
actggaaatcgtcaaaattcacaaagagcacca

SEQ ID NO: 1032958 - DNA, 33 bp, Homo sapien
actggaaatcgtcaaagttcacaaagagcacca

SEQ ID NO: 1032959 - DNA, 33 bp, Homo sapien
aaccaatacaaatgcacggagtaatagacaagg

SEQ ID NO: 1032960 - DNA, 33 bp, Homo sapien
aaccaatacaaatgcatggagtaatagacaagg

SEQ ID NO: 1032961 - DNA, 33 bp, Homo sapien
taacaacttgatgacccagagtacacaaaagag

SEQ ID NO: 1032962 - DNA, 33 bp, Homo sapien
taacaacttgatgacctagagtacacaaaagag

SEQ ID NO: 1032963 - DNA, 33 bp, Homo sapien
tggagagaaaagtcaaagtaaagtctcctctct

SEQ ID NO: 1032964 - DNA, 33 bp, Homo sapien
tggagagaaaagtcaacgtaaagtctcctctct

SEQ ID NO: 1032965 - DNA, 33 bp, Homo sapien
gaagtcaaagaactgcaatcgtattcactgcat

SEQ ID NO: 1032966 - DNA, 33 bp, Homo sapien
gaagtcaaagaactgccatcgtattcactgcat

SEQ ID NO: 1032967 - DNA, 33 bp, Homo sapien
atgcttttgaagaaggaagaagtgggactatca

SEQ ID NO: 1032968 - DNA, 33 bp, Homo sapien
atgcttttgaagaagggagaagtgggactatca

SEQ ID NO: 1032969 - DNA, 33 bp, Homo sapien
tgagtgtcttatgacccacaatcagtttagagt

SEQ ID NO: 1032970 - DNA, 33 bp, Homo sapien
tgagtgtcttatgacctacaatcagtttagagt

SEQ ID NO: 1032971 - DNA, 33 bp, Homo sapien
attttattccatcttgaaaatcacttgtgtgtt

SEQ ID NO: 1032972 - DNA, 33 bp, Homo sapien
attttattccatcttgcaaatcacttgtgtgtt

SEQ ID NO: 1032973 - DNA, 33 bp, Homo sapien
gtgtgttacactattacctgatttctgtggtgc

SEQ ID NO: 1032974 - DNA, 33 bp, Homo sapien
gtgtgttacactattatctgatttctgtggtgc

SEQ ID NO: 1032975 - DNA, 33 bp, Homo sapien
gatgttcaaagccttacataaaatggtgtagta

SEQ ID NO: 1032976 - DNA, 33 bp, Homo sapien
gatgttcaaagccttatataaaatggtgtagta

SEQ ID NO: 1032977 - DNA, 33 bp, Homo sapien
ccctagttgccctatccaatgtagtagctccta

SEQ ID NO: 1032978 - DNA, 33 bp, Homo sapien
ccctagttgccctatctaatgtagtagctccta

SEQ ID NO: 1032979 - DNA, 33 bp, Homo sapien
gtaataataactgtgaagataacctggattttc

SEQ ID NO: 1032980 - DNA, 33 bp, Homo sapien
gtaataataactgtgaggataacctggattttc

SEQ ID NO: 1032981 - DNA, 33 bp, Homo sapien
tgtatccattgctgaacagtatttcccattgag

SEQ ID NO: 1032982 - DNA, 33 bp, Homo sapien
tgtatccattgctgaatagtatttcccattgag

SEQ ID NO: 1032983 - DNA, 33 bp, Homo sapien
ttacaacatgatacagccactctagaaaacagt

SEQ ID NO: 1032984 - DNA, 33 bp, Homo sapien
ttacaacatgatacagtcactctagaaaacagt

SEQ ID NO: 1032985 - DNA, 33 bp, Homo sapien
tcaacttaatgaagacaatgtacaatagaccca

SEQ ID NO: 1032986 - DNA, 33 bp, Homo sapien
tcaacttaatgaagaccatgtacaatagaccca

SEQ ID NO: 1032987 - DNA, 33 bp, Homo sapien
ttattttgactttcaaatagcatagttaactga

SEQ ID NO: 1032988 - DNA, 33 bp, Homo sapien
ttattttgactttcaagtagcatagttaactga

SEQ ID NO: 1032989 - DNA, 33 bp, Homo sapien
tttgcaagatgaagaactggagactggttgcac

SEQ ID NO: 1032990 - DNA, 33 bp, Homo sapien
tttgcaagatgaagaattggagactggttgcac

SEQ ID NO: 1032991 - DNA, 33 bp, Homo sapien
aatgagtggcaaactggacaatctagagaaaag

SEQ ID NO: 1032992 - DNA, 33 bp, Homo sapien
aatgagtggcaaactgtacaatctagagaaaag

SEQ ID NO: 1032993 - DNA, 33 bp, Homo sapien
ttgctccagtcaatggaaaaatagctgtcagaa

SEQ ID NO: 1032994 - DNA, 33 bp, Homo sapien
ttgctccagtcaatgggaaaatagctgtcagaa

SEQ ID NO: 1032995 - DNA, 33 bp, Homo sapien
ggctcctagctactccaatctatagagatgcaa

SEQ ID NO: 1032996 - DNA, 33 bp, Homo sapien
ggctcctagctactccgatctatagagatgcaa

SEQ ID NO: 1032997 - DNA, 33 bp, Homo sapien
ttttgataaggctatgccataacttaccaaagg

SEQ ID NO: 1032998 - DNA, 33 bp, Homo sapien
ttttgataaggctatgtcataacttaccaaagg

SEQ ID NO: 1032999 - DNA, 33 bp, Homo sapien
ctctctgaaatgagtaaatgggtgaggctttta

SEQ ID NO: 1033000 - DNA, 33 bp, Homo sapien
ctctctgaaatgagtagatgggtgaggctttta

SEQ ID NO: 1033001 - DNA, 33 bp, Homo sapien
agggcagtgcctctcaataacatagtaaatctt

SEQ ID NO: 1033002 - DNA, 33 bp, Homo sapien
agggcagtgcctctcagtaacatagtaaatctt

SEQ ID NO: 1033003 - DNA, 33 bp, Homo sapien
ctaatggaggaagtgaatagacaaaatgaaagt

SEQ ID NO: 1033004 - DNA, 33 bp, Homo sapien
ctaatggaggaagtgagtagacaaaatgaaagt

SEQ ID NO: 1033005 - DNA, 33 bp, Homo sapien
aattgtccttaaactgcaaaatgagaaaataat

SEQ ID NO: 1033006 - DNA, 33 bp, Homo sapien
aattgtccttaaactggaaaatgagaaaataat

SEQ ID NO: 1033007 - DNA, 33 bp, Homo sapien
taggtgcagatgttcactatattgagattaatt

SEQ ID NO: 1033008 - DNA, 33 bp, Homo sapien
taggtgcagatgttcagtatattgagattaatt

SEQ ID NO: 1033009 - DNA, 33 bp, Homo sapien
attagccggagacgataatcagggagagcacgt

SEQ ID NO: 1033010 - DNA, 33 bp, Homo sapien
attagccggagacgatcatcagggagagcacgt

SEQ ID NO: 1033011 - DNA, 33 bp, Homo sapien
atattattcatccataagttagctatatattgt

SEQ ID NO: 1033012 - DNA, 33 bp, Homo sapien
atattattcatccatatgttagctatatattgt

SEQ ID NO: 1033013 - DNA, 33 bp, Homo sapien
cctaacatcaccatctaaatccagaggtttctt

SEQ ID NO: 1033014 - DNA, 33 bp, Homo sapien
cctaacatcaccatctcaatccagaggtttctt

SEQ ID NO: 1033015 - DNA, 33 bp, Homo sapien
gtcaacacttgggcacaacatttttcctatgac

SEQ ID NO: 1033016 - DNA, 33 bp, Homo sapien
gtcaacacttgggcacgacatttttcctatgac

SEQ ID NO: 1033017 - DNA, 33 bp, Homo sapien
gagggtttgaggaaagacgtgacatggtctgac

SEQ ID NO: 1033018 - DNA, 33 bp, Homo sapien
gagggtttgaggaaaggcgtgacatggtctgac

SEQ ID NO: 1033019 - DNA, 33 bp, Homo sapien
ccatattaatataggacgtagtttaggcagttg

SEQ ID NO: 1033020 - DNA, 33 bp, Homo sapien
ccatattaatataggatgtagtttaggcagttg

SEQ ID NO: 1033021 - DNA, 33 bp, Homo sapien
acatacttaggtaaaactgaccattgtatcctt

SEQ ID NO: 1033022 - DNA, 33 bp, Homo sapien
acatacttaggtaaaattgaccattgtatcctt

SEQ ID NO: 1033023 - DNA, 33 bp, Homo sapien
acatcctgattacagcagagaataaagatttaa

SEQ ID NO: 1033024 - DNA, 33 bp, Homo sapien
acatcctgattacagcggagaataaagatttaa

SEQ ID NO: 1033025 - DNA, 33 bp, Homo sapien
atgtatatcaagtataacattggcaaaagcatt

SEQ ID NO: 1033026 - DNA, 33 bp, Homo sapien
atgtatatcaagtatatcattggcaaaagcatt

SEQ ID NO: 1033027 - DNA, 33 bp, Homo sapien
gttgctttggaagctaaaaatggtacctccctt

SEQ ID NO: 1033028 - DNA, 33 bp, Homo sapien
gttgctttggaagctagaaatggtacctccctt

SEQ ID NO: 1033029 - DNA, 33 bp, Homo sapien
tctcctaaggtacaaaacataaagtccaacata

SEQ ID NO: 1033030 - DNA, 33 bp, Homo sapien
tctcctaaggtacaaagcataaagtccaacata

SEQ ID NO: 1033031 - DNA, 33 bp, Homo sapien
aacagcatttaaggaaacagtgatctgtaaaac

SEQ ID NO: 1033032 - DNA, 33 bp, Homo sapien
aacagcatttaaggaagcagtgatctgtaaaac

SEQ ID NO: 1033033 - DNA, 33 bp, Homo sapien
tatactttacaaaccactcacatatagtattca

SEQ ID NO: 1033034 - DNA, 33 bp, Homo sapien
tatactttacaaaccattcacatatagtattca

SEQ ID NO: 1033035 - DNA, 33 bp, Homo sapien
taatttgtctcatacagcacttacttaacaaga

SEQ ID NO: 1033036 - DNA, 33 bp, Homo sapien
taatttgtctcatacatcacttacttaacaaga

SEQ ID NO: 1033037 - DNA, 33 bp, Homo sapien
tagttgataccaatataacaggatgtttttatc

SEQ ID NO: 1033038 - DNA, 33 bp, Homo sapien
tagttgataccaatattacaggatgtttttatc

SEQ ID NO: 1033039 - DNA, 33 bp, Homo sapien
cccttgcatgggtcaaaatagataacagaccag

SEQ ID NO: 1033040 - DNA, 33 bp, Homo sapien
cccttgcatgggtcaagatagataacagaccag

SEQ ID NO: 1033041 - DNA, 33 bp, Homo sapien
gttttgctgttgcataacaaactgcaaaaatta

SEQ ID NO: 1033042 - DNA, 33 bp, Homo sapien
gttttgctgttgcataccaaactgcaaaaatta

SEQ ID NO: 1033043 - DNA, 33 bp, Homo sapien
caaataaatgtggtaacggaaatcaggggaatg

SEQ ID NO: 1033044 - DNA, 33 bp, Homo sapien
caaataaatgtggtaatggaaatcaggggaatg

SEQ ID NO: 1033045 - DNA, 33 bp, Homo sapien
taggattccatcttacaaataagccacacagta

SEQ ID NO: 1033046 - DNA, 33 bp, Homo sapien
taggattccatcttacgaataagccacacagta

SEQ ID NO: 1033047 - DNA, 33 bp, Homo sapien
atactaaagggagtcaagaggacaactcagcaa

SEQ ID NO: 1033048 - DNA, 33 bp, Homo sapien
atactaaagggagtcaggaggacaactcagcaa

SEQ ID NO: 1033049 - DNA, 33 bp, Homo sapien
tatttgttgagttactgaggtaaaagtttgtga

SEQ ID NO: 1033050 - DNA, 33 bp, Homo sapien
tatttgttgagttacttaggtaaaagtttgtga

SEQ ID NO: 1033051 - DNA, 33 bp, Homo sapien
aatctgatgtagacaacgtatgtggaagcattt

SEQ ID NO: 1033052 - DNA, 33 bp, Homo sapien
aatctgatgtagacaatgtatgtggaagcattt

SEQ ID NO: 1033053 - DNA, 33 bp, Homo sapien
agcaaaactttcatgcaatgttgatttagaatc

SEQ ID NO: 1033054 - DNA, 33 bp, Homo sapien
agcaaaactttcatgccatgttgatttagaatc

SEQ ID NO: 1033055 - DNA, 33 bp, Homo sapien
caggagtacatttaggccagcggaatgtgttat

SEQ ID NO: 1033056 - DNA, 33 bp, Homo sapien
caggagtacatttagggcagcggaatgtgttat

SEQ ID NO: 1033057 - DNA, 33 bp, Homo sapien
ctctgggggaggaaaactagctgtctcagaggc

SEQ ID NO: 1033058 - DNA, 33 bp, Homo sapien
ctctgggggaggaaaagtagctgtctcagaggc

SEQ ID NO: 1033059 - DNA, 33 bp, Homo sapien
acgtaaaagtggacaaagtgaatggaagtgagg

SEQ ID NO: 1033060 - DNA, 33 bp, Homo sapien
acgtaaaagtggacaaggtgaatggaagtgagg

SEQ ID NO: 1033061 - DNA, 33 bp, Homo sapien
agtagagacaaatgccgctaggggatgattatg

SEQ ID NO: 1033062 - DNA, 33 bp, Homo sapien
agtagagacaaatgcctctaggggatgattatg

SEQ ID NO: 1033063 - DNA, 33 bp, Homo sapien
ccctttcgtcaccaaagacacagtgcttccaca

SEQ ID NO: 1033064 - DNA, 33 bp, Homo sapien
ccctttcgtcaccaaatacacagtgcttccaca

SEQ ID NO: 1033065 - DNA, 33 bp, Homo sapien
aagacattagaacagagatggccagggttttcc

SEQ ID NO: 1033066 - DNA, 33 bp, Homo sapien
aagacattagaacagatatggccagggttttcc

SEQ ID NO: 1033067 - DNA, 33 bp, Homo sapien
aggtctgcctggatggaattacaaagatttagc

SEQ ID NO: 1033068 - DNA, 33 bp, Homo sapien
aggtctgcctggatgggattacaaagatttagc

SEQ ID NO: 1033069 - DNA, 33 bp, Homo sapien
caacagagctgtcccgaccaaacagacacagct

SEQ ID NO: 1033070 - DNA, 33 bp, Homo sapien
caacagagctgtcccggccaaacagacacagct

SEQ ID NO: 1033071 - DNA, 33 bp, Homo sapien
tatagccagattggggaaacagaaagcataaat

SEQ ID NO: 1033072 - DNA, 33 bp, Homo sapien
tatagccagattgggggaacagaaagcataaat

SEQ ID NO: 1033073 - DNA, 33 bp, Homo sapien
atatgtctgaatgaaccaaccgtcagtcttttt

SEQ ID NO: 1033074 - DNA, 33 bp, Homo sapien
atatgtctgaatgaactaaccgtcagtcttttt

SEQ ID NO: 1033075 - DNA, 33 bp, Homo sapien
ttcataactgacaataaacttgccttttaccaa

SEQ ID NO: 1033076 - DNA, 33 bp, Homo sapien
ttcataactgacaatatacttgccttttaccaa

SEQ ID NO: 1033077 - DNA, 33 bp, Homo sapien
acgacaccatcacctaccaataaatcccttact

SEQ ID NO: 1033078 - DNA, 33 bp, Homo sapien
acgacaccatcacctagcaataaatcccttact

SEQ ID NO: 1033079 - DNA, 33 bp, Homo sapien
gtttttaatatgtctacccacctcactagatcc

SEQ ID NO: 1033080 - DNA, 33 bp, Homo sapien
gtttttaatatgtctatccacctcactagatcc

SEQ ID NO: 1033081 - DNA, 33 bp, Homo sapien
ggcaagacttaggccacagttctataaataaac

SEQ ID NO: 1033082 - DNA, 33 bp, Homo sapien
ggcaagacttaggccatagttctataaataaac

SEQ ID NO: 1033083 - DNA, 33 bp, Homo sapien
aaagaaaataactgccaaatctataatattaac

SEQ ID NO: 1033084 - DNA, 33 bp, Homo sapien
aaagaaaataactgccgaatctataatattaac

SEQ ID NO: 1033085 - DNA, 33 bp, Homo sapien
ttataattcaatacagcaaaactgtgtggacat

SEQ ID NO: 1033086 - DNA, 33 bp, Homo sapien
ttataattcaatacaggaaaactgtgtggacat

SEQ ID NO: 1033087 - DNA, 33 bp, Homo sapien
ctgctctcctacactcaaacaaaggaaaacaaa

SEQ ID NO: 1033088 - DNA, 33 bp, Homo sapien
ctgctctcctacactcgaacaaaggaaaacaaa

SEQ ID NO: 1033089 - DNA, 33 bp, Homo sapien
cctactccaaatatataaaaatgatttgctaga

SEQ ID NO: 1033090 - DNA, 33 bp, Homo sapien
cctactccaaatatatgaaaatgatttgctaga

SEQ ID NO: 1033091 - DNA, 33 bp, Homo sapien
gtaaaaaactggtgaaatccaaataagatctgt

SEQ ID NO: 1033092 - DNA, 33 bp, Homo sapien
gtaaaaaactggtgaagtccaaataagatctgt

SEQ ID NO: 1033093 - DNA, 33 bp, Homo sapien
cgataggagctttttaaagggcagttgctctca

SEQ ID NO: 1033094 - DNA, 33 bp, Homo sapien
cgataggagctttttacagggcagttgctctca

SEQ ID NO: 1033095 - DNA, 33 bp, Homo sapien
ttgtgaggttattcaaacagtgtatggggaagc

SEQ ID NO: 1033096 - DNA, 33 bp, Homo sapien
ttgtgaggttattcaaccagtgtatggggaagc

SEQ ID NO: 1033097 - DNA, 33 bp, Homo sapien
caagctctggactttccatgtcaccatctttgt

SEQ ID NO: 1033098 - DNA, 33 bp, Homo sapien
caagctctggactttctatgtcaccatctttgt

SEQ ID NO: 1033099 - DNA, 33 bp, Homo sapien
actttctgaaaatgtccatctgcattcgaacac

SEQ ID NO: 1033100 - DNA, 33 bp, Homo sapien
actttctgaaaatgtcgatctgcattcgaacac

SEQ ID NO: 1033101 - DNA, 33 bp, Homo sapien
tgaatcattctaacgcacttgcatatcctttta

SEQ ID NO: 1033102 - DNA, 33 bp, Homo sapien
tgaatcattctaacgcgcttgcatatcctttta

SEQ ID NO: 1033103 - DNA, 33 bp, Homo sapien
tgtaactactttgaggaagaaatgttcgtttag

SEQ ID NO: 1033104 - DNA, 33 bp, Homo sapien
tgtaactactttgagggagaaatgttcgtttag

SEQ ID NO: 1033105 - DNA, 33 bp, Homo sapien
ggctttacagtcagaaggaacctggtgactcca

SEQ ID NO: 1033106 - DNA, 33 bp, Homo sapien
ggctttacagtcagaatgaacctggtgactcca

SEQ ID NO: 1033107 - DNA, 33 bp, Homo sapien
gaaatctacatcctgtaaaaattcactgggtgg

SEQ ID NO: 1033108 - DNA, 33 bp, Homo sapien
gaaatctacatcctgttaaaattcactgggtgg

SEQ ID NO: 1033109 - DNA, 33 bp, Homo sapien
actaaaaacgaagtgacaagctctgctttgatg

SEQ ID NO: 1033110 - DNA, 33 bp, Homo sapien
actaaaaacgaagtgataagctctgctttgatg

SEQ ID NO: 1033111 - DNA, 33 bp, Homo sapien
atcattgacgactaaaatcagagggtttgatgt

SEQ ID NO: 1033112 - DNA, 33 bp, Homo sapien
atcattgacgactaaagtcagagggtttgatgt

SEQ ID NO: 1033113 - DNA, 33 bp, Homo sapien
tggcatcacactatacccgtagttctgtacctt

SEQ ID NO: 1033114 - DNA, 33 bp, Homo sapien
tggcatcacactatactcgtagttctgtacctt

SEQ ID NO: 1033115 - DNA, 33 bp, Homo sapien
tgttatgcttagtgaacgctttgttttatccct

SEQ ID NO: 1033116 - DNA, 33 bp, Homo sapien
tgttatgcttagtgaatgctttgttttatccct

SEQ ID NO: 1033117 - DNA, 33 bp, Homo sapien
gctagagtgcattggcgcagtatcagttcactg

SEQ ID NO: 1033118 - DNA, 33 bp, Homo sapien
gctagagtgcattggctcagtatcagttcactg

SEQ ID NO: 1033119 - DNA, 33 bp, Homo sapien
atagtacctgctatgcactaaggtagaacataa

SEQ ID NO: 1033120 - DNA, 33 bp, Homo sapien
atagtacctgctatgcgctaaggtagaacataa

SEQ ID NO: 1033121 - DNA, 33 bp, Homo sapien
aacataacatggtttcagaaacaacagcagaga

SEQ ID NO: 1033122 - DNA, 33 bp, Homo sapien
aacataacatggtttcggaaacaacagcagaga

SEQ ID NO: 1033123 - DNA, 33 bp, Homo sapien
ttgacatatacccttccccagtctgaatgtatc

SEQ ID NO: 1033124 - DNA, 33 bp, Homo sapien
ttgacatatacccttcgccagtctgaatgtatc

SEQ ID NO: 1033125 - DNA, 33 bp, Homo sapien
ataaacagtagcaacccaggtagagtgatacat

SEQ ID NO: 1033126 - DNA, 33 bp, Homo sapien
ataaacagtagcaacctaggtagagtgatacat

SEQ ID NO: 1033127 - DNA, 33 bp, Homo sapien
cagtttacaattaaacagcaaaagatggtttta

SEQ ID NO: 1033128 - DNA, 33 bp, Homo sapien
cagtttacaattaaacggcaaaagatggtttta

SEQ ID NO: 1033129 - DNA, 33 bp, Homo sapien
acaacgtccgaattcacagagtctaatattccg

SEQ ID NO: 1033130 - DNA, 33 bp, Homo sapien
acaacgtccgaattcagagagtctaatattccg

SEQ ID NO: 1033131 - DNA, 33 bp, Homo sapien
tttggaatgaaaattaacaagcacattgatttt

SEQ ID NO: 1033132 - DNA, 33 bp, Homo sapien
tttggaatgaaaattatcaagcacattgatttt

SEQ ID NO: 1033133 - DNA, 33 bp, Homo sapien
gcaaaaaggtgtatccacagacaggcaagagca

SEQ ID NO: 1033134 - DNA, 33 bp, Homo sapien
gcaaaaaggtgtatccgcagacaggcaagagca

SEQ ID NO: 1033135 - DNA, 33 bp, Homo sapien
aatggaaataaatccaagtacataaatgttcta

SEQ ID NO: 1033136 - DNA, 33 bp, Homo sapien
aatggaaataaatccaggtacataaatgttcta

SEQ ID NO: 1033137 - DNA, 33 bp, Homo sapien
attcaaactgtgctaaatgttataaacagaggt

SEQ ID NO: 1033138 - DNA, 33 bp, Homo sapien
attcaaactgtgctaagtgttataaacagaggt

SEQ ID NO: 1033139 - DNA, 33 bp, Homo sapien
tgatgagaccaagtcacgtgcatatggtggatt

SEQ ID NO: 1033140 - DNA, 33 bp, Homo sapien
tgatgagaccaagtcatgtgcatatggtggatt

SEQ ID NO: 1033141 - DNA, 33 bp, Homo sapien
attgatcaccttgtcacgattgtccatcttccc

SEQ ID NO: 1033142 - DNA, 33 bp, Homo sapien
attgatcaccttgtcatgattgtccatcttccc

SEQ ID NO: 1033143 - DNA, 33 bp, Homo sapien
ttcaaccaaatgcagaacaaaaatatagtattc

SEQ ID NO: 1033144 - DNA, 33 bp, Homo sapien
ttcaaccaaatgcagaccaaaaatatagtattc

SEQ ID NO: 1033145 - DNA, 33 bp, Homo sapien
agtttagccagggaaacgtgagaaattgaaaga

SEQ ID NO: 1033146 - DNA, 33 bp, Homo sapien
agtttagccagggaaatgtgagaaattgaaaga

SEQ ID NO: 1033147 - DNA, 33 bp, Homo sapien
gtattctgacttcaaactcctgcttttgacctg

SEQ ID NO: 1033148 - DNA, 33 bp, Homo sapien
gtattctgacttcaaattcctgcttttgacctg

SEQ ID NO: 1033149 - DNA, 33 bp, Homo sapien
tatgttttgctatctcaacttcttcaatgcatc

SEQ ID NO: 1033150 - DNA, 33 bp, Homo sapien
tatgttttgctatctccacttcttcaatgcatc

SEQ ID NO: 1033151 - DNA, 33 bp, Homo sapien
cctgtccatggcctggcattggaattgtctcat

SEQ ID NO: 1033152 - DNA, 33 bp, Homo sapien
cctgtccatggcctgggattggaattgtctcat

SEQ ID NO: 1033153 - DNA, 33 bp, Homo sapien
cagaaagcattcaaaaatatttccagaagctaa

SEQ ID NO: 1033154 - DNA, 33 bp, Homo sapien
cagaaagcattcaaaagtatttccagaagctaa

SEQ ID NO: 1033155 - DNA, 33 bp, Homo sapien
cttaaagttagttgcaatattccatgtgagaaa

SEQ ID NO: 1033156 - DNA, 33 bp, Homo sapien
cttaaagttagttgcagtattccatgtgagaaa

SEQ ID NO: 1033157 - DNA, 33 bp, Homo sapien
gggaaggtaaggaggaagaaatccagattccaa

SEQ ID NO: 1033158 - DNA, 33 bp, Homo sapien
gggaaggtaaggaggaggaaatccagattccaa

SEQ ID NO: 1033159 - DNA, 33 bp, Homo sapien
aataagacttgctcacagtagattctaattaga

SEQ ID NO: 1033160 - DNA, 33 bp, Homo sapien
aataagacttgctcacggtagattctaattaga

SEQ ID NO: 1033161 - DNA, 33 bp, Homo sapien
ccctaatcttttattacgcagaaggtttctacg

SEQ ID NO: 1033162 - DNA, 33 bp, Homo sapien
ccctaatcttttattatgcagaaggtttctacg

SEQ ID NO: 1033163 - DNA, 33 bp, Homo sapien
attctgtatgtttaaagtataatggcctaatta

SEQ ID NO: 1033164 - DNA, 33 bp, Homo sapien
attctgtatgtttaaattataatggcctaatta

SEQ ID NO: 1033165 - DNA, 33 bp, Homo sapien
cagtagttgccgatgacggctgcagattgacta

SEQ ID NO: 1033166 - DNA, 33 bp, Homo sapien
cagtagttgccgatgatggctgcagattgacta

SEQ ID NO: 1033167 - DNA, 33 bp, Homo sapien
tgtacacatttgtccaagctcattgaattttac

SEQ ID NO: 1033168 - DNA, 33 bp, Homo sapien
tgtacacatttgtccaggctcattgaattttac

SEQ ID NO: 1033169 - DNA, 33 bp, Homo sapien
gtaaatgaagtttaacaggaacatgatcacacc

SEQ ID NO: 1033170 - DNA, 33 bp, Homo sapien
gtaaatgaagtttaacgggaacatgatcacacc

SEQ ID NO: 1033171 - DNA, 33 bp, Homo sapien
acatcttatgtttaagaatttaatccaacttga

SEQ ID NO: 1033172 - DNA, 33 bp, Homo sapien
acatcttatgtttaagtatttaatccaacttga

SEQ ID NO: 1033173 - DNA, 33 bp, Homo sapien
attttgagaagtgaaaaaaaatttgctcattgg

SEQ ID NO: 1033174 - DNA, 33 bp, Homo sapien
attttgagaagtgaaacaaaatttgctcattgg

SEQ ID NO: 1033175 - DNA, 33 bp, Homo sapien
ccacattgtttcctcacggctatggagctgcat

SEQ ID NO: 1033176 - DNA, 33 bp, Homo sapien
ccacattgtttcctcatggctatggagctgcat

SEQ ID NO: 1033177 - DNA, 33 bp, Homo sapien
tgtgttgatcacctagaaagtacaaactaaatg

SEQ ID NO: 1033178 - DNA, 33 bp, Homo sapien
tgtgttgatcacctaggaagtacaaactaaatg

SEQ ID NO: 1033179 - DNA, 33 bp, Homo sapien
atttcctggaagatcaagttgcaactgtcagtt

SEQ ID NO: 1033180 - DNA, 33 bp, Homo sapien
atttcctggaagatcacgttgcaactgtcagtt

SEQ ID NO: 1033181 - DNA, 33 bp, Homo sapien
tagctgcttcttaaaacaggtgtttcaaacaac

SEQ ID NO: 1033182 - DNA, 33 bp, Homo sapien
tagctgcttcttaaaagaggtgtttcaaacaac

SEQ ID NO: 1033183 - DNA, 33 bp, Homo sapien
aatgtcagggcaattaccacttggtcagtttct

SEQ ID NO: 1033184 - DNA, 33 bp, Homo sapien
aatgtcagggcaattagcacttggtcagtttct

SEQ ID NO: 1033185 - DNA, 33 bp, Homo sapien
aacatttggattgccacgattctgattataaat

SEQ ID NO: 1033186 - DNA, 33 bp, Homo sapien
aacatttggattgccatgattctgattataaat

SEQ ID NO: 1033187 - DNA, 33 bp, Homo sapien
atcgagcacacatcgtaaccacctgggatgaca

SEQ ID NO: 1033188 - DNA, 33 bp, Homo sapien
atcgagcacacatcgtcaccacctgggatgaca

SEQ ID NO: 1033189 - DNA, 33 bp, Homo sapien
cacgtctggacaaggccattccaaagctggaga

SEQ ID NO: 1033190 - DNA, 33 bp, Homo sapien
cacgtctggacaaggctattccaaagctggaga

SEQ ID NO: 1033191 - DNA, 33 bp, Homo sapien
tcccaaatctaatgcaaccaaatccaaagtttg

SEQ ID NO: 1033192 - DNA, 33 bp, Homo sapien
tcccaaatctaatgcacccaaatccaaagtttg

SEQ ID NO: 1033193 - DNA, 33 bp, Homo sapien
caggggtctgatacaaaatttaatatctaacaa

SEQ ID NO: 1033194 - DNA, 33 bp, Homo sapien
caggggtctgatacaacatttaatatctaacaa

SEQ ID NO: 1033195 - DNA, 33 bp, Homo sapien
tttttctttgcaattgaatgcactgctttttaa

SEQ ID NO: 1033196 - DNA, 33 bp, Homo sapien
tttttctttgcaattggatgcactgctttttaa

SEQ ID NO: 1033197 - DNA, 33 bp, Homo sapien
tatttcaaatacacacaatagtagcatagtaaa

SEQ ID NO: 1033198 - DNA, 33 bp, Homo sapien
tatttcaaatacacacgatagtagcatagtaaa

SEQ ID NO: 1033199 - DNA, 33 bp, Homo sapien
cagtgtactagggaaaaggaatttggataagaa

SEQ ID NO: 1033200 - DNA, 33 bp, Homo sapien
cagtgtactagggaaacggaatttggataagaa

SEQ ID NO: 1033201 - DNA, 33 bp, Homo sapien
cattgagaagcagccactgatttctgtcatgat

SEQ ID NO: 1033202 - DNA, 33 bp, Homo sapien
cattgagaagcagccagtgatttctgtcatgat

SEQ ID NO: 1033203 - DNA, 33 bp, Homo sapien
acgctcatccttcatcaatgaaatcaatccata

SEQ ID NO: 1033204 - DNA, 33 bp, Homo sapien
acgctcatccttcatccatgaaatcaatccata

SEQ ID NO: 1033205 - DNA, 33 bp, Homo sapien
cgatgccatctgttacaaaactttagaatgttc

SEQ ID NO: 1033206 - DNA, 33 bp, Homo sapien
cgatgccatctgttacgaaactttagaatgttc

SEQ ID NO: 1033207 - DNA, 33 bp, Homo sapien
tttctcctttgacccactaatgtgatgaattat

SEQ ID NO: 1033208 - DNA, 33 bp, Homo sapien
tttctcctttgacccattaatgtgatgaattat

SEQ ID NO: 1033209 - DNA, 33 bp, Homo sapien
aatattgaaatttcctcacatgacaacttacat

SEQ ID NO: 1033210 - DNA, 33 bp, Homo sapien
aatattgaaatttcctgacatgacaacttacat

SEQ ID NO: 1033211 - DNA, 33 bp, Homo sapien
gcattgctgctaagagaaactatttttatgttt

SEQ ID NO: 1033212 - DNA, 33 bp, Homo sapien
gcattgctgctaagaggaactatttttatgttt

SEQ ID NO: 1033213 - DNA, 33 bp, Homo sapien
atcactctgtttgtaacatggagagccaattga

SEQ ID NO: 1033214 - DNA, 33 bp, Homo sapien
atcactctgtttgtaatatggagagccaattga

SEQ ID NO: 1033215 - DNA, 33 bp, Homo sapien
accattgaactgtccaatcaaaaatacttaaga

SEQ ID NO: 1033216 - DNA, 33 bp, Homo sapien
accattgaactgtccactcaaaaatacttaaga

SEQ ID NO: 1033217 - DNA, 33 bp, Homo sapien
cttattgacaggaatcaaaacaggctatgccca

SEQ ID NO: 1033218 - DNA, 33 bp, Homo sapien
cttattgacaggaatcgaaacaggctatgccca

SEQ ID NO: 1033219 - DNA, 33 bp, Homo sapien
ttgtcaacacttagaactgtcagattagcgtga

SEQ ID NO: 1033220 - DNA, 33 bp, Homo sapien
ttgtcaacacttagaattgtcagattagcgtga

SEQ ID NO: 1033221 - DNA, 33 bp, Homo sapien
tgctcgattgtagcagaaactcataattgtttt

SEQ ID NO: 1033222 - DNA, 33 bp, Homo sapien
tgctcgattgtagcaggaactcataattgtttt

SEQ ID NO: 1033223 - DNA, 33 bp, Homo sapien
atggagttcattcaaactgtgtacctaaacaat

SEQ ID NO: 1033224 - DNA, 33 bp, Homo sapien
atggagttcattcaaattgtgtacctaaacaat

SEQ ID NO: 1033225 - DNA, 33 bp, Homo sapien; identical to SEQ ID NO: 1033223

SEQ ID NO: 1033226 - DNA, 33 bp, Homo sapien; identical to SEQ ID NO: 1033224

SEQ ID NO: 1033227 - DNA, 33 bp, Homo sapien
tcctgcaagttgagcgcactatgttcctagaaa

SEQ ID NO: 1033228 - DNA, 33 bp, Homo sapien
tcctgcaagttgagcgtactatgttcctagaaa

SEQ ID NO: 1033229 - DNA, 33 bp, Homo sapien
aagtgatcatgtcagacgttctgatattacagt

SEQ ID NO: 1033230 - DNA, 33 bp, Homo sapien
aagtgatcatgtcagaggttctgatattacagt

SEQ ID NO: 1033231 - DNA, 33 bp, Homo sapien
tcttgtgaatacatgacagtagacataacaaat

SEQ ID NO: 1033232 - DNA, 33 bp, Homo sapien
tcttgtgaatacatgagagtagacataacaaat

SEQ ID NO: 1033233 - DNA, 33 bp, Homo sapien
ttgtgcctctttagaaatcttttgtgacgtaaa

SEQ ID NO: 1033234 - DNA, 33 bp, Homo sapien
ttgtgcctctttagaagtcttttgtgacgtaaa

SEQ ID NO: 1033235 - DNA, 33 bp, Homo sapien
ctaaccgtaaagttaacggcagaagagattctg

SEQ ID NO: 1033236 - DNA, 33 bp, Homo sapien
ctaaccgtaaagttaatggcagaagagattctg

SEQ ID NO: 1033237 - DNA, 33 bp, Homo sapien
gccattgatttgcagaaccttggtactatcctg

SEQ ID NO: 1033238 - DNA, 33 bp, Homo sapien
gccattgatttgcagagccttggtactatcctg

SEQ ID NO: 1033239 - DNA, 33 bp, Homo sapien
gctttgaaagtttgtacactggagctgtgaaga

SEQ ID NO: 1033240 - DNA, 33 bp, Homo sapien
gctttgaaagtttgtagactggagctgtgaaga

SEQ ID NO: 1033241 - DNA, 33 bp, Homo sapien
ttggctaactgattaactggttgatggattcat

SEQ ID NO: 1033242 - DNA, 33 bp, Homo sapien
ttggctaactgattaattggttgatggattcat

SEQ ID NO: 1033243 - DNA, 33 bp, Homo sapien
ctgaagcaacaggttgaaactgatggaggtaag

SEQ ID NO: 1033244 - DNA, 33 bp, Homo sapien
ctgaagcaacaggttggaactgatggaggtaag

SEQ ID NO: 1033245 - DNA, 33 bp, Homo sapien
tgatgaagaatgattacagtaggagtttcaatt

SEQ ID NO: 1033246 - DNA, 33 bp, Homo sapien
tgatgaagaatgattatagtaggagtttcaatt

SEQ ID NO: 1033247 - DNA, 33 bp, Homo sapien
caggattcctacaaagccatcattaaaacaaaa

SEQ ID NO: 1033248 - DNA, 33 bp, Homo sapien
caggattcctacaaaggcatcattaaaacaaaa

SEQ ID NO: 1033249 - DNA, 33 bp, Homo sapien
gaaagtggtatataaacggcatggtgtttacaa

SEQ ID NO: 1033250 - DNA, 33 bp, Homo sapien
gaaagtggtatataaatggcatggtgtttacaa

SEQ ID NO: 1033251 - DNA, 33 bp, Homo sapien
agcacagggtgaaaaaatgcagaccttggctta

SEQ ID NO: 1033252 - DNA, 33 bp, Homo sapien
agcacagggtgaaaaagtgcagaccttggctta

SEQ ID NO: 1033253 - DNA, 33 bp, Homo sapien
ttcactattgaagccacagaggtactgccttag

SEQ ID NO: 1033254 - DNA, 33 bp, Homo sapien
ttcactattgaagccatagaggtactgccttag

SEQ ID NO: 1033255 - DNA, 33 bp, Homo sapien
taagctacacgtaaataatgctctttctactct

SEQ ID NO: 1033256 - DNA, 33 bp, Homo sapien
taagctacacgtaaattatgctctttctactct

SEQ ID NO: 1033257 - DNA, 33 bp, Homo sapien
aatgtagtgacagaaactcaggggaagatatcc

SEQ ID NO: 1033258 - DNA, 33 bp, Homo sapien
aatgtagtgacagaaagtcaggggaagatatcc

SEQ ID NO: 1033259 - DNA, 33 bp, Homo sapien
aggggtggggaatctacattatgtaatggcaac

SEQ ID NO: 1033260 - DNA, 33 bp, Homo sapien
aggggtggggaatctatattatgtaatggcaac

SEQ ID NO: 1033261 - DNA, 33 bp, Homo sapien
ttgtttgattatggaactgttgggccttgtctg

SEQ ID NO: 1033262 - DNA, 33 bp, Homo sapien
ttgtttgattatggaagtgttgggccttgtctg

SEQ ID NO: 1033263 - DNA, 33 bp, Homo sapien
cccccgcttttagataagcagcaatatggtctg

SEQ ID NO: 1033264 - DNA, 33 bp, Homo sapien
cccccgcttttagataggcagcaatatggtctg

SEQ ID NO: 1033265 - DNA, 33 bp, Homo sapien
ttggagaacaggcgagcctaaaagctatctgtg

SEQ ID NO: 1033266 - DNA, 33 bp, Homo sapien
ttggagaacaggcgagtctaaaagctatctgtg

SEQ ID NO: 1033267 - DNA, 33 bp, Homo sapien
atataagattatgtcaacggtaaacagggacat

SEQ ID NO: 1033268 - DNA, 33 bp, Homo sapien
atataagattatgtcagcggtaaacagggacat

SEQ ID NO: 1033269 - DNA, 33 bp, Homo sapien
taaggagcgcactaaaccaactgtatctcacaa

SEQ ID NO: 1033270 - DNA, 33 bp, Homo sapien
taaggagcgcactaaatcaactgtatctcacaa

SEQ ID NO: 1033271 - DNA, 33 bp, Homo sapien
aatgcaagactacaaacagtgagcaggaaacaa

SEQ ID NO: 1033272 - DNA, 33 bp, Homo sapien
aatgcaagactacaaagagtgagcaggaaacaa

SEQ ID NO: 1033273 - DNA, 33 bp, Homo sapien
atttgattgtcccagactaaaatataatatgac

SEQ ID NO: 1033274 - DNA, 33 bp, Homo sapien
atttgattgtcccagattaaaatataatatgac

SEQ ID NO: 1033275 - DNA, 33 bp, Homo sapien
agtctgattctggtaacggcacctctcactctg

SEQ ID NO: 1033276 - DNA, 33 bp, Homo sapien
agtctgattctggtaatggcacctctcactctg

SEQ ID NO: 1033277 - DNA, 33 bp, Homo sapien
cttgaacccgggacacagagtatgcggtgagcc

SEQ ID NO: 1033278 - DNA, 33 bp, Homo sapien
cttgaacccgggacacggagtatgcggtgagcc

SEQ ID NO: 1033279 - DNA, 33 bp, Homo sapien
aattagagctcacccacgattcaaaacagtagt

SEQ ID NO: 1033280 - DNA, 33 bp, Homo sapien
aattagagctcacccaggattcaaaacagtagt

SEQ ID NO: 1033281 - DNA, 33 bp, Homo sapien
gaggatgaaacatctgcaacaccaacatttcaa

SEQ ID NO: 1033282 - DNA, 33 bp, Homo sapien
gaggatgaaacatctggaacaccaacatttcaa

SEQ ID NO: 1033283 - DNA, 33 bp, Homo sapien
aaggtatgacatggaaactgtggcaagggagag

SEQ ID NO: 1033284 - DNA, 33 bp, Homo sapien
aaggtatgacatggaagctgtggcaagggagag

SEQ ID NO: 1033285 - DNA, 33 bp, Homo sapien
attaattcatcaaatccctattgaatgtcacca

SEQ ID NO: 1033286 - DNA, 33 bp, Homo sapien
attaattcatcaaatcgctattgaatgtcacca

SEQ ID NO: 1033287 - DNA, 33 bp, Homo sapien
gggtaagtgaggatcagattaataacgcatcag

SEQ ID NO: 1033288 - DNA, 33 bp, Homo sapien
gggtaagtgaggatcatattaataacgcatcag

SEQ ID NO: 1033289 - DNA, 33 bp, Homo sapien
gctctcctaaagtcaaggggagtcacaatagtg

SEQ ID NO: 1033290 - DNA, 33 bp, Homo sapien
gctctcctaaagtcaatgggagtcacaatagtg

SEQ ID NO: 1033291 - DNA, 33 bp, Homo sapien
ataattatataaggtacgtttcaagccaacatt

SEQ ID NO: 1033292 - DNA, 33 bp, Homo sapien
ataattatataaggtatgtttcaagccaacatt

SEQ ID NO: 1033293 - DNA, 33 bp, Homo sapien
agatgaatcttactataagccaagaagctggca

SEQ ID NO: 1033294 - DNA, 33 bp, Homo sapien
agatgaatcttactatgagccaagaagctggca

SEQ ID NO: 1033295 - DNA, 33 bp, Homo sapien
acatttattgtgattgaagatacattggtattc

SEQ ID NO: 1033296 - DNA, 33 bp, Homo sapien
acatttattgtgattggagatacattggtattc

SEQ ID NO: 1033297 - DNA, 33 bp, Homo sapien
cttatgtcctgaatgactcaatgtgaaaattta

SEQ ID NO: 1033298 - DNA, 33 bp, Homo sapien
cttatgtcctgaatgattcaatgtgaaaattta

SEQ ID NO: 1033299 - DNA, 33 bp, Homo sapien
ctttggaatcttttggaatgatgatatgatttt

SEQ ID NO: 1033300 - DNA, 33 bp, Homo sapien
ctttggaatcttttgggatgatgatatgatttt

SEQ ID NO: 1033301 - DNA, 33 bp, Homo sapien
tgcttccaaatgtttaagggtcaatgtgatttt

SEQ ID NO: 1033302 - DNA, 33 bp, Homo sapien
tgcttccaaatgtttatgggtcaatgtgatttt

SEQ ID NO: 1033303 - DNA, 33 bp, Homo sapien
gtcccttcctacttaccattcctgacattggtt

SEQ ID NO: 1033304 - DNA, 33 bp, Homo sapien
gtcccttcctacttactattcctgacattggtt

SEQ ID NO: 1033305 - DNA, 33 bp, Homo sapien
ccaaatcacagctttgcatggttggtaaggtat

SEQ ID NO: 1033306 - DNA, 33 bp, Homo sapien
ccaaatcacagctttgtatggttggtaaggtat

SEQ ID NO: 1033307 - DNA, 33 bp, Homo sapien
cttttcaaggctgacacccaccattagacagat

SEQ ID NO: 1033308 - DNA, 33 bp, Homo sapien
cttttcaaggctgacatccaccattagacagat

SEQ ID NO: 1033309 - DNA, 33 bp, Homo sapien
ctttaaaatgagagaactgaactaaattactca

SEQ ID NO: 1033310 - DNA, 33 bp, Homo sapien
ctttaaaatgagagaagtgaactaaattactca

SEQ ID NO: 1033311 - DNA, 33 bp, Homo sapien
atacattgccaaaagtaaatttatgttggtaac

SEQ ID NO: 1033312 - DNA, 33 bp, Homo sapien
atacattgccaaaagtgaatttatgttggtaac

SEQ ID NO: 1033313 - DNA, 33 bp, Homo sapien
atacctgttaccttgacgattgggaccattttt

SEQ ID NO: 1033314 - DNA, 33 bp, Homo sapien
atacctgttaccttgatgattgggaccattttt

SEQ ID NO: 1033315 - DNA, 33 bp, Homo sapien
agcctgtgctcttaaccgctgtgctacataaac

SEQ ID NO: 1033316 - DNA, 33 bp, Homo sapien
agcctgtgctcttaactgctgtgctacataaac

SEQ ID NO: 1033317 - DNA, 33 bp, Homo sapien
tcattcagggtctcacagtgaaggtgatatggc

SEQ ID NO: 1033318 - DNA, 33 bp, Homo sapien
tcattcagggtctcacggtgaaggtgatatggc

SEQ ID NO: 1033319 - DNA, 33 bp, Homo sapien
actccctgagcgacctcaaaactctgcagagtc

SEQ ID NO: 1033320 - DNA, 33 bp, Homo sapien
actccctgagcgacctgaaaactctgcagagtc

SEQ ID NO: 1033321 - DNA, 33 bp, Homo sapien
ttcatggggtcagggggactatcaatttaagtt

SEQ ID NO: 1033322 - DNA, 33 bp, Homo sapien
ttcatggggtcaggggtactatcaatttaagtt

SEQ ID NO: 1033323 - DNA, 33 bp, Homo sapien
aattgtctttgttttacctgcataataatagta

SEQ ID NO: 1033324 - DNA, 33 bp, Homo sapien
aattgtctttgttttatctgcataataatagta

SEQ ID NO: 1033325 - DNA, 33 bp, Homo sapien
gtgacaaggattttaaccagagaatatagtaga

SEQ ID NO: 1033326 - DNA, 33 bp, Homo sapien
gtgacaaggattttaatcagagaatatagtaga

SEQ ID NO: 1033327 - DNA, 33 bp, Homo sapien
atccgtgttctaaccaaccttccaggtcactct

SEQ ID NO: 1033328 - DNA, 33 bp, Homo sapien
atccgtgttctaaccagccttccaggtcactct

SEQ ID NO: 1033329 - DNA, 33 bp, Homo sapien
aaaagagaatatatggaaaggaatgaaaactca

SEQ ID NO: 1033330 - DNA, 33 bp, Homo sapien
aaaagagaatatatgggaaggaatgaaaactca

SEQ ID NO: 1033331 - DNA, 33 bp, Homo sapien
aagaaaacaaagaaaacaaaggcagcaaagttt

SEQ ID NO: 1033332 - DNA, 33 bp, Homo sapien
aagaaaacaaagaaaataaaggcagcaaagttt

SEQ ID NO: 1033333 - DNA, 33 bp, Homo sapien
acatttctggaggtcaatagttcacaatgaccc

SEQ ID NO: 1033334 - DNA, 33 bp, Homo sapien
acatttctggaggtcagtagttcacaatgaccc

SEQ ID NO: 1033335 - DNA, 33 bp, Homo sapien
agaatagaaaaaatgcaagctatagaggaaggt

SEQ ID NO: 1033336 - DNA, 33 bp, Homo sapien
agaatagaaaaaatgcgagctatagaggaaggt

SEQ ID NO: 1033337 - DNA, 33 bp, Homo sapien
taccatcctattgactaaggcacatgaggatag

SEQ ID NO: 1033338 - DNA, 33 bp, Homo sapien
taccatcctattgactgaggcacatgaggatag

SEQ ID NO: 1033339 - DNA, 33 bp, Homo sapien
tttcagaagaagaataacataatcacagtggga

SEQ ID NO: 1033340 - DNA, 33 bp, Homo sapien
tttcagaagaagaataccataatcacagtggga

SEQ ID NO: 1033341 - DNA, 33 bp, Homo sapien
acatgaataaggacatcatctgaacaggcaggg

SEQ ID NO: 1033342 - DNA, 33 bp, Homo sapien
acatgaataaggacatgatctgaacaggcaggg

SEQ ID NO: 1033343 - DNA, 33 bp, Homo sapien
tagagtgttcatgagacatcaggtcacagaagt

SEQ ID NO: 1033344 - DNA, 33 bp, Homo sapien
tagagtgttcatgagagatcaggtcacagaagt

SEQ ID NO: 1033345 - DNA, 33 bp, Homo sapien
agaagtccttgtggcccataacactgaacctga

SEQ ID NO: 1033346 - DNA, 33 bp, Homo sapien
agaagtccttgtggcctataacactgaacctga

SEQ ID NO: 1033347 - DNA, 33 bp, Homo sapien
tgatagagcatcaatgcatagatttaagcaagg

SEQ ID NO: 1033348 - DNA, 33 bp, Homo sapien
tgatagagcatcaatggatagatttaagcaagg

SEQ ID NO: 1033349 - DNA, 33 bp, Homo sapien
aagtaaaattcaatagcactcgtggacttgtgt

SEQ ID NO: 1033350 - DNA, 33 bp, Homo sapien
aagtaaaattcaataggactcgtggacttgtgt

SEQ ID NO: 1033351 - DNA, 33 bp, Homo sapien
aattttgctagatgtccccatattgccatctaa

SEQ ID NO: 1033352 - DNA, 33 bp, Homo sapien
aattttgctagatgtctccatattgccatctaa

SEQ ID NO: 1033353 - DNA, 33 bp, Homo sapien
ttctcaaaaagcaaacacctatattttttcttc

SEQ ID NO: 1033354 - DNA, 33 bp, Homo sapien
ttctcaaaaagcaaacgcctatattttttcttc

SEQ ID NO: 1033355 - DNA, 33 bp, Homo sapien
cacccattaccccaccactagtcatgttttggt

SEQ ID NO: 1033356 - DNA, 33 bp, Homo sapien
cacccattaccccaccgctagtcatgttttggt

SEQ ID NO: 1033357 - DNA, 33 bp, Homo sapien
tgttatttaaacatctaacctgcgtattagctt

SEQ ID NO: 1033358 - DNA, 33 bp, Homo sapien
tgttatttaaacatcttacctgcgtattagctt

SEQ ID NO: 1033359 - DNA, 33 bp, Homo sapien
agtactcaactttcccactgagcttcttttaga

SEQ ID NO: 1033360 - DNA, 33 bp, Homo sapien
agtactcaactttcccgctgagcttcttttaga

SEQ ID NO: 1033361 - DNA, 33 bp, Homo sapien
tgctaagctgagttggaaacatatgttcaagtg

SEQ ID NO: 1033362 - DNA, 33 bp, Homo sapien
tgctaagctgagttggcaacatatgttcaagtg

SEQ ID NO: 1033363 - DNA, 33 bp, Homo sapien
tagtaatgtctagtgacgttgtagtggttttta

SEQ ID NO: 1033364 - DNA, 33 bp, Homo sapien
tagtaatgtctagtgatgttgtagtggttttta

SEQ ID NO: 1033365 - DNA, 33 bp, Homo sapien
ttgttcaatgttttcaccttaaagaacatcctc

SEQ ID NO: 1033366 - DNA, 33 bp, Homo sapien
ttgttcaatgttttcagcttaaagaacatcctc

SEQ ID NO: 1033367 - DNA, 33 bp, Homo sapien
atgaagggatgaaaaaatccacttaagtactgg

SEQ ID NO: 1033368 - DNA, 33 bp, Homo sapien
atgaagggatgaaaaagtccacttaagtactgg

SEQ ID NO: 1033369 - DNA, 33 bp, Homo sapien
caggtattgattcccaagcaacgtgttttctat

SEQ ID NO: 1033370 - DNA, 33 bp, Homo sapien
caggtattgattcccaggcaacgtgttttctat

SEQ ID NO: 1033371 - DNA, 33 bp, Homo sapien
ctgccaggctaaatggcccagttttgttttgtt

SEQ ID NO: 1033372 - DNA, 33 bp, Homo sapien
ctgccaggctaaatggtccagttttgttttgtt

SEQ ID NO: 1033373 - DNA, 33 bp, Homo sapien
gagtgtgggaatagaaagtgtcagtgacggagg

SEQ ID NO: 1033374 - DNA, 33 bp, Homo sapien
gagtgtgggaatagaaggtgtcagtgacggagg

SEQ ID NO: 1033375 - DNA, 33 bp, Homo sapien
gtcctcaagttaaatacggaatgtagaagaact

SEQ ID NO: 1033376 - DNA, 33 bp, Homo sapien
gtcctcaagttaaatagggaatgtagaagaact

SEQ ID NO: 1033377 - DNA, 33 bp, Homo sapien
tgagttttaggagagaactggaaggattctggg

SEQ ID NO: 1033378 - DNA, 33 bp, Homo sapien
tgagttttaggagagacctggaaggattctggg

SEQ ID NO: 1033379 - DNA, 33 bp, Homo sapien
ctcatttacccacctcacagttatactaaggca

SEQ ID NO: 1033380 - DNA, 33 bp, Homo sapien
ctcatttacccacctcgcagttatactaaggca

SEQ ID NO: 1033381 - DNA, 33 bp, Homo sapien
tgttgcctcatggaatgaatctccaacattctc

SEQ ID NO: 1033382 - DNA, 33 bp, Homo sapien
tgttgcctcatggaattaatctccaacattctc

SEQ ID NO: 1033383 - DNA, 33 bp, Homo sapien
agtttcaatagaagtaaaagctcttatttgatt

SEQ ID NO: 1033384 - DNA, 33 bp, Homo sapien
agtttcaatagaagtagaagctcttatttgatt

SEQ ID NO: 1033385 - DNA, 33 bp, Homo sapien
cttctttcctatgtcactgaagctccacacctc

SEQ ID NO: 1033386 - DNA, 33 bp, Homo sapien
cttctttcctatgtcattgaagctccacacctc

SEQ ID NO: 1033387 - DNA, 33 bp, Homo sapien
attccagagtaacaaactgcaggagaagaaagg

SEQ ID NO: 1033388 - DNA, 33 bp, Homo sapien
attccagagtaacaaattgcaggagaagaaagg

SEQ ID NO: 1033389 - DNA, 33 bp, Homo sapien
ccaagcccagagtctacgggtgatactaaaaca

SEQ ID NO: 1033390 - DNA, 33 bp, Homo sapien
ccaagcccagagtctatgggtgatactaaaaca

SEQ ID NO: 1033391 - DNA, 33 bp, Homo sapien
ctaagcagttttgtggacacctttcttcatgaa

SEQ ID NO: 1033392 - DNA, 33 bp, Homo sapien
ctaagcagttttgtgggcacctttcttcatgaa

SEQ ID NO: 1033393 - DNA, 33 bp, Homo sapien
ctctatgaacctgttacgttatctgaaacgagg

SEQ ID NO: 1033394 - DNA, 33 bp, Homo sapien
ctctatgaacctgttatgttatctgaaacgagg

SEQ ID NO: 1033395 - DNA, 33 bp, Homo sapien
ggtcaggaaagccaaccagaggaatttacatgt

SEQ ID NO: 1033396 - DNA, 33 bp, Homo sapien
ggtcaggaaagccaactagaggaatttacatgt

SEQ ID NO: 1033397 - DNA, 33 bp, Homo sapien
tcacttcacaaataaactgcttacacccacatc

SEQ ID NO: 1033398 - DNA, 33 bp, Homo sapien
tcacttcacaaataaagtgcttacacccacatc

SEQ ID NO: 1033399 - DNA, 33 bp, Homo sapien
ttatattttaacagtacagagttgcaattatta

SEQ ID NO: 1033400 - DNA, 33 bp, Homo sapien
ttatattttaacagtatagagttgcaattatta

SEQ ID NO: 1033401 - DNA, 33 bp, Homo sapien
acatcccttatcctccaaaaatattttgtcttc

SEQ ID NO: 1033402 - DNA, 33 bp, Homo sapien
acatcccttatcctcccaaaatattttgtcttc

SEQ ID NO: 1033403 - DNA, 33 bp, Homo sapien
gtactcattcctccagaactcagagctgcttca

SEQ ID NO: 1033404 - DNA, 33 bp, Homo sapien
gtactcattcctccaggactcagagctgcttca

SEQ ID NO: 1033405 - DNA, 33 bp, Homo sapien
cagagacatcagcacaaattgacgaaaatgcaa

SEQ ID NO: 1033406 - DNA, 33 bp, Homo sapien
cagagacatcagcacagattgacgaaaatgcaa

SEQ ID NO: 1033407 - DNA, 33 bp, Homo sapien
ccttgtatgtaaagtgcaggtggtaataatatc

SEQ ID NO: 1033408 - DNA, 33 bp, Homo sapien
ccttgtatgtaaagtggaggtggtaataatatc

SEQ ID NO: 1033409 - DNA, 33 bp, Homo sapien
tacagctaatggtaaagttagggctcaaattca

SEQ ID NO: 1033410 - DNA, 33 bp, Homo sapien
tacagctaatggtaaatttagggctcaaattca

SEQ ID NO: 1033411 - DNA, 33 bp, Homo sapien
gaagcaagttcttcaccaggagagcaatgcatg

SEQ ID NO: 1033412 - DNA, 33 bp, Homo sapien
gaagcaagttcttcactaggagagcaatgcatg

SEQ ID NO: 1033413 - DNA, 33 bp, Homo sapien
catagtctcagaaggaagtacatatctgcctct

SEQ ID NO: 1033414 - DNA, 33 bp, Homo sapien
catagtctcagaaggaggtacatatctgcctct

SEQ ID NO: 1033415 - DNA, 33 bp, Homo sapien
tgaggtagcggaacctcaaaggtgatgaccaca

SEQ ID NO: 1033416 - DNA, 33 bp, Homo sapien
tgaggtagcggaacctgaaaggtgatgaccaca

SEQ ID NO: 1033417 - DNA, 33 bp, Homo sapien
ggagccccaataatcacgactgggaatacattt

SEQ ID NO: 1033418 - DNA, 33 bp, Homo sapien
ggagccccaataatcatgactgggaatacattt

SEQ ID NO: 1033419 - DNA, 33 bp, Homo sapien
ccctacaccatgcccagtcctttcactgtcatg

SEQ ID NO: 1033420 - DNA, 33 bp, Homo sapien
ccctacaccatgcccattcctttcactgtcatg

SEQ ID NO: 1033421 - DNA, 33 bp, Homo sapien
gaatctttttctgaacggaaatgtaactgctac

SEQ ID NO: 1033422 - DNA, 33 bp, Homo sapien
gaatctttttctgaactgaaatgtaactgctac

SEQ ID NO: 1033423 - DNA, 33 bp, Homo sapien
acaagcatttaacaaaaatccagttggccttgt

SEQ ID NO: 1033424 - DNA, 33 bp, Homo sapien
acaagcatttaacaaagatccagttggccttgt

SEQ ID NO: 1033425 - DNA, 33 bp, Homo sapien
taccgtgttcaagtaaagtatggcaatgccttc

SEQ ID NO: 1033426 - DNA, 33 bp, Homo sapien
taccgtgttcaagtaatgtatggcaatgccttc

SEQ ID NO: 1033427 - DNA, 33 bp, Homo sapien
gaagatctgagtggtaaaagtcagtttttggca

SEQ ID NO: 1033428 - DNA, 33 bp, Homo sapien
gaagatctgagtggtacaagtcagtttttggca

SEQ ID NO: 1033429 - DNA, 33 bp, Homo sapien
aggtctctctggtaaaacaatagaagtcagcaa

SEQ ID NO: 1033430 - DNA, 33 bp, Homo sapien
aggtctctctggtaaagcaatagaagtcagcaa

SEQ ID NO: 1033431 - DNA, 33 bp, Homo sapien
cagttttcaaaacagcaagctatatggttgttt

SEQ ID NO: 1033432 - DNA, 33 bp, Homo sapien
cagttttcaaaacagcgagctatatggttgttt

SEQ ID NO: 1033433 - DNA, 33 bp, Homo sapien
tactagaaaaatagtccctaattcactgctgcc

SEQ ID NO: 1033434 - DNA, 33 bp, Homo sapien
tactagaaaaatagtctctaattcactgctgcc

SEQ ID NO: 1033435 - DNA, 33 bp, Homo sapien
cccagtttttcaaatgaaggcacgaaaatttag

SEQ ID NO: 1033436 - DNA, 33 bp, Homo sapien
cccagtttttcaaatggaggcacgaaaatttag

SEQ ID NO: 1033437 - DNA, 33 bp, Homo sapien
tccccagtgggagttacgcgtggctgcaggtgc

SEQ ID NO: 1033438 - DNA, 33 bp, Homo sapien
tccccagtgggagttatgcgtggctgcaggtgc

SEQ ID NO: 1033439 - DNA, 33 bp, Homo sapien
attcactagcccttacacatgacttgtttctga

SEQ ID NO: 1033440 - DNA, 33 bp, Homo sapien
attcactagcccttacgcatgacttgtttctga

SEQ ID NO: 1033441 - DNA, 33 bp, Homo sapien
caagacatagatgtgaaaactgttcatgagcaa

SEQ ID NO: 1033442 - DNA, 33 bp, Homo sapien
caagacatagatgtgagaactgttcatgagcaa

SEQ ID NO: 1033443 - DNA, 33 bp, Homo sapien
agcttgggttacaaacagaatagtaaggctcca

SEQ ID NO: 1033444 - DNA, 33 bp, Homo sapien
agcttgggttacaaaccgaatagtaaggctcca

SEQ ID NO: 1033445 - DNA, 33 bp, Homo sapien
cacagatcacatcggacgttggaaaaatctcct

SEQ ID NO: 1033446 - DNA, 33 bp, Homo sapien
cacagatcacatcggatgttggaaaaatctcct

SEQ ID NO: 1033447 - DNA, 33 bp, Homo sapien
tttcaagctgtagctccgaaaagttggccaaga

SEQ ID NO: 1033448 - DNA, 33 bp, Homo sapien
tttcaagctgtagctctgaaaagttggccaaga

SEQ ID NO: 1033449 - DNA, 33 bp, Homo sapien
gatgatgaaggtgttaaagtctctcactttttt

SEQ ID NO: 1033450 - DNA, 33 bp, Homo sapien
gatgatgaaggtgttacagtctctcactttttt

SEQ ID NO: 1033451 - DNA, 33 bp, Homo sapien
gggctaaacaaaggataaagaaagaggatgatg

SEQ ID NO: 1033452 - DNA, 33 bp, Homo sapien
gggctaaacaaaggatgaagaaagaggatgatg

SEQ ID NO: 1033453 - DNA, 33 bp, Homo sapien
acgatgccctttgtccacatttacaaaaaaccc

SEQ ID NO: 1033454 - DNA, 33 bp, Homo sapien
acgatgccctttgtccgcatttacaaaaaaccc

SEQ ID NO: 1033455 - DNA, 33 bp, Homo sapien
actttccattgagaatcaccagactagtcatat

SEQ ID NO: 1033456 - DNA, 33 bp, Homo sapien
actttccattgagaattaccagactagtcatat

SEQ ID NO: 1033457 - DNA, 33 bp, Homo sapien
tgggaatcttacttccactaaactggcttctca

SEQ ID NO: 1033458 - DNA, 33 bp, Homo sapien
tgggaatcttacttccgctaaactggcttctca

SEQ ID NO: 1033459 - DNA, 33 bp, Homo sapien
aattgatcaaattgtaaacttgatgtgtcattt

SEQ ID NO: 1033460 - DNA, 33 bp, Homo sapien
aattgatcaaattgtatacttgatgtgtcattt

SEQ ID NO: 1033461 - DNA, 33 bp, Homo sapien
ggcttcagcaaaccccaatatcatcccacaaag

SEQ ID NO: 1033462 - DNA, 33 bp, Homo sapien
ggcttcagcaaaccccgatatcatcccacaaag

SEQ ID NO: 1033463 - DNA, 33 bp, Homo sapien
cttaaaaagtgccaaacgcatagcaagtattca

SEQ ID NO: 1033464 - DNA, 33 bp, Homo sapien
cttaaaaagtgccaaatgcatagcaagtattca

SEQ ID NO: 1033465 - DNA, 33 bp, Homo sapien
aggagcctggacagatcatatgaagcacttaat

SEQ ID NO: 1033466 - DNA, 33 bp, Homo sapien
aggagcctggacagatgatatgaagcacttaat

SEQ ID NO: 1033467 - DNA, 33 bp, Homo sapien
aacatgactcactctaccaacttatgttcttag

SEQ ID NO: 1033468 - DNA, 33 bp, Homo sapien
aacatgactcactctagcaacttatgttcttag

SEQ ID NO: 1033469 - DNA, 33 bp, Homo sapien
caaataccagattgccaaagtctgttttaagga

SEQ ID NO: 1033470 - DNA, 33 bp, Homo sapien
caaataccagattgccgaagtctgttttaagga

SEQ ID NO: 1033471 - DNA, 33 bp, Homo sapien
aatctggatcaagaataaggatgtgagcaaggg

SEQ ID NO: 1033472 - DNA, 33 bp, Homo sapien
aatctggatcaagaatgaggatgtgagcaaggg

SEQ ID NO: 1033473 - DNA, 33 bp, Homo sapien
agagaaaaaatcccacaaagtaaggagaatcag

SEQ ID NO: 1033474 - DNA, 33 bp, Homo sapien
agagaaaaaatcccacgaagtaaggagaatcag

SEQ ID NO: 1033475 - DNA, 33 bp, Homo sapien
atttttatgtttgcccacaatttttcataataa

SEQ ID NO: 1033476 - DNA, 33 bp, Homo sapien
atttttatgtttgcccgcaatttttcataataa

SEQ ID NO: 1033477 - DNA, 33 bp, Homo sapien
aaaacacttttcctgcaatttagtgcacgggag

SEQ ID NO: 1033478 - DNA, 33 bp, Homo sapien
aaaacacttttcctgcgatttagtgcacgggag

SEQ ID NO: 1033479 - DNA, 33 bp, Homo sapien
tatattcagttggttagcaaactaaagtatttt

SEQ ID NO: 1033480 - DNA, 33 bp, Homo sapien
tatattcagttggttatcaaactaaagtatttt

SEQ ID NO: 1033481 - DNA, 33 bp, Homo sapien
aactattgggtcttacagaaatatagtacctgt

SEQ ID NO: 1033482 - DNA, 33 bp, Homo sapien
aactattgggtcttacggaaatatagtacctgt

SEQ ID NO: 1033483 - DNA, 33 bp, Homo sapien
agcaaatctctttaccaggaccttctctcaatt

SEQ ID NO: 1033484 - DNA, 33 bp, Homo sapien
agcaaatctctttaccgggaccttctctcaatt

SEQ ID NO: 1033485 - DNA, 33 bp, Homo sapien
aatgtaatttttcaccacaatccagactctcag

SEQ ID NO: 1033486 - DNA, 33 bp, Homo sapien
aatgtaatttttcaccgcaatccagactctcag

SEQ ID NO: 1033487 - DNA, 33 bp, Homo sapien
gccaggctatatcttaagtgttgtaagaataca

SEQ ID NO: 1033488 - DNA, 33 bp, Homo sapien
gccaggctatatcttaggtgttgtaagaataca

SEQ ID NO: 1033489 - DNA, 33 bp, Homo sapien
tgtaaggtgctgagtaaaagtggaaagcagggt

SEQ ID NO: 1033490 - DNA, 33 bp, Homo sapien
tgtaaggtgctgagtagaagtggaaagcagggt

SEQ ID NO: 1033491 - DNA, 33 bp, Homo sapien
atgattggtatgttcacaactcttcaacaggag

SEQ ID NO: 1033492 - DNA, 33 bp, Homo sapien
atgattggtatgttcataactcttcaacaggag

SEQ ID NO: 1033493 - DNA, 33 bp, Homo sapien
agtatgataaattcaacagcaggagtatataca

SEQ ID NO: 1033494 - DNA, 33 bp, Homo sapien
agtatgataaattcaatagcaggagtatataca

SEQ ID NO: 1033495 - DNA, 33 bp, Homo sapien
agcagctgatatggctaaagactaaagtggtgt

SEQ ID NO: 1033496 - DNA, 33 bp, Homo sapien
agcagctgatatggctgaagactaaagtggtgt

SEQ ID NO: 1033497 - DNA, 33 bp, Homo sapien
caaagtccagtgattaagcatatataagttgtc

SEQ ID NO: 1033498 - DNA, 33 bp, Homo sapien
caaagtccagtgattaggcatatataagttgtc

SEQ ID NO: 1033499 - DNA, 33 bp, Homo sapien
gtgtgttacatgagacagggggaaaatcaccta

SEQ ID NO: 1033500 - DNA, 33 bp, Homo sapien
gtgtgttacatgagacggggggaaaatcaccta

SEQ ID NO: 1033501 - DNA, 33 bp, Homo sapien
cagaatacatttctctcacacttgagaccctgg

SEQ ID NO: 1033502 - DNA, 33 bp, Homo sapien
cagaatacatttctctgacacttgagaccctgg

SEQ ID NO: 1033503 - DNA, 33 bp, Homo sapien
aaccaggagccagctaagtgtctataacagcaa

SEQ ID NO: 1033504 - DNA, 33 bp, Homo sapien
aaccaggagccagctacgtgtctataacagcaa

SEQ ID NO: 1033505 - DNA, 33 bp, Homo sapien
ggagcaacttttcctccaatcctggaaattcga

SEQ ID NO: 1033506 - DNA, 33 bp, Homo sapien
ggagcaacttttcctctaatcctggaaattcga

SEQ ID NO: 1033507 - DNA, 33 bp, Homo sapien
tgagtttatcatcaagaatggtgcttcccaagc

SEQ ID NO: 1033508 - DNA, 33 bp, Homo sapien
tgagtttatcatcaaggatggtgcttcccaagc

SEQ ID NO: 1033509 - DNA, 33 bp, Homo sapien
caagaaggtatctaccaatagtgtctattaggc

SEQ ID NO: 1033510 - DNA, 33 bp, Homo sapien
caagaaggtatctaccgatagtgtctattaggc

SEQ ID NO: 1033511 - DNA, 33 bp, Homo sapien
gataccttcttggcccaaagaaaacaatgcttc

SEQ ID NO: 1033512 - DNA, 33 bp, Homo sapien
gataccttcttggcccgaagaaaacaatgcttc

SEQ ID NO: 1033513 - DNA, 33 bp, Homo sapien
tctactctctacatagcaaaggcaaaagtcatg

SEQ ID NO: 1033514 - DNA, 33 bp, Homo sapien
tctactctctacatagtaaaggcaaaagtcatg

SEQ ID NO: 1033515 - DNA, 33 bp, Homo sapien
cttgttgtgtgggcaaattatgttactcttcgt

SEQ ID NO: 1033516 - DNA, 33 bp, Homo sapien
cttgttgtgtgggcaagttatgttactcttcgt

SEQ ID NO: 1033517 - DNA, 33 bp, Homo sapien
gacccctggcttaaaacgaagggcttgagcctc

SEQ ID NO: 1033518 - DNA, 33 bp, Homo sapien
gacccctggcttaaaatgaagggcttgagcctc

SEQ ID NO: 1033519 - DNA, 33 bp, Homo sapien
cagagaccctctgatccgaaggaggaatggaaa

SEQ ID NO: 1033520 - DNA, 33 bp, Homo sapien
cagagaccctctgatctgaaggaggaatggaaa

SEQ ID NO: 1033521 - DNA, 33 bp, Homo sapien
atctgatctttgttaacgtcccttgagaaacac

SEQ ID NO: 1033522 - DNA, 33 bp, Homo sapien
atctgatctttgttaatgtcccttgagaaacac

SEQ ID NO: 1033523 - DNA, 33 bp, Homo sapien
agcttatgtaacttacagaaggtaatactgagc

SEQ ID NO: 1033524 - DNA, 33 bp, Homo sapien
agcttatgtaacttactgaaggtaatactgagc

SEQ ID NO: 1033525 - DNA, 33 bp, Homo sapien
tcttgaaactgaatacagacaggaaaatacttt

SEQ ID NO: 1033526 - DNA, 33 bp, Homo sapien
tcttgaaactgaatactgacaggaaaatacttt

SEQ ID NO: 1033527 - DNA, 33 bp, Homo sapien
atcctaatgctgtaaccgtctcttgcactgaaa

SEQ ID NO: 1033528 - DNA, 33 bp, Homo sapien
atcctaatgctgtaactgtctcttgcactgaaa

SEQ ID NO: 1033529 - DNA, 33 bp, Homo sapien
tatgtattgttctgtagaatcggagctgtaatg

SEQ ID NO: 1033530 - DNA, 33 bp, Homo sapien
tatgtattgttctgtataatcggagctgtaatg

SEQ ID NO: 1033531 - DNA, 33 bp, Homo sapien
ggagattaggatttataacacgaattttggctg

SEQ ID NO: 1033532 - DNA, 33 bp, Homo sapien
ggagattaggatttatgacacgaattttggctg

SEQ ID NO: 1033533 - DNA, 33 bp, Homo sapien
agctataaaaattatcacaactttaacgtctta

SEQ ID NO: 1033534 - DNA, 33 bp, Homo sapien
agctataaaaattatcgcaactttaacgtctta

SEQ ID NO: 1033535 - DNA, 33 bp, Homo sapien
ggaagtgcgatctgaaatgttatcccagtttca

SEQ ID NO: 1033536 - DNA, 33 bp, Homo sapien
ggaagtgcgatctgaagtgttatcccagtttca

SEQ ID NO: 1033537 - DNA, 33 bp, Homo sapien
ttgggggagaacaacaactgggttcaagttggc

SEQ ID NO: 1033538 - DNA, 33 bp, Homo sapien
ttgggggagaacaacagctgggttcaagttggc

SEQ ID NO: 1033539 - DNA, 33 bp, Homo sapien
aggacatatatcatgaactttaggacagactgc

SEQ ID NO: 1033540 - DNA, 33 bp, Homo sapien
aggacatatatcatgatctttaggacagactgc

SEQ ID NO: 1033541 - DNA, 33 bp, Homo sapien; identical to SEQ ID NO: 1033539

SEQ ID NO: 1033542 - DNA, 33 bp, Homo sapien; identical to SEQ ID NO: 1033540

SEQ ID NO: 1033543 - DNA, 33 bp, Homo sapien
atcatcttaccaataccattatggataaagaaa

SEQ ID NO: 1033544 - DNA, 33 bp, Homo sapien
atcatcttaccaatactattatggataaagaaa

SEQ ID NO: 1033545 - DNA, 33 bp, Homo sapien
gtgcttacgagatagaagacagtgttgattgga

SEQ ID NO: 1033546 - DNA, 33 bp, Homo sapien
gtgcttacgagatagatgacagtgttgattgga

SEQ ID NO: 1033547 - DNA, 33 bp, Homo sapien
attacagaacttttacccagcccaggatacaag

SEQ ID NO: 1033548 - DNA, 33 bp, Homo sapien
attacagaacttttacgcagcccaggatacaag

SEQ ID NO: 1033549 - DNA, 33 bp, Homo sapien
ttttccctgctatgaaacattgtagggcattag

SEQ ID NO: 1033550 - DNA, 33 bp, Homo sapien
ttttccctgctatgaaccattgtagggcattag

SEQ ID NO: 1033551 - DNA, 33 bp, Homo sapien
cagcttgtcactaacacacttgcaatatgatgc

SEQ ID NO: 1033552 - DNA, 33 bp, Homo sapien
cagcttgtcactaacagacttgcaatatgatgc

SEQ ID NO: 1033553 - DNA, 33 bp, Homo sapien
tcataagtcttggagacaggatttggatccaga

SEQ ID NO: 1033554 - DNA, 33 bp, Homo sapien
tcataagtcttggagataggatttggatccaga

SEQ ID NO: 1033555 - DNA, 33 bp, Homo sapien
tctgtgaccttcattacacatcatgaaagaaat

SEQ ID NO: 1033556 - DNA, 33 bp, Homo sapien
tctgtgaccttcattatacatcatgaaagaaat

SEQ ID NO: 1033557 - DNA, 33 bp, Homo sapien
tggattaacatacgaaaagcgcctgtcaactga

SEQ ID NO: 1033558 - DNA, 33 bp, Homo sapien
tggattaacatacgaatagcgcctgtcaactga

SEQ ID NO: 1033559 - DNA, 33 bp, Homo sapien
tgaacaccagagaaaaagtttcaattgtgtctg

SEQ ID NO: 1033560 - DNA, 33 bp, Homo sapien
tgaacaccagagaaaatgtttcaattgtgtctg

SEQ ID NO: 1033561 - DNA, 33 bp, Homo sapien
tttgttcttttctcaccatggctgatctaaagc

SEQ ID NO: 1033562 - DNA, 33 bp, Homo sapien
tttgttcttttctcactatggctgatctaaagc

SEQ ID NO: 1033563 - DNA, 33 bp, Homo sapien
tattcatgagtttgccaaatttaaccaggggaa

SEQ ID NO: 1033564 - DNA, 33 bp, Homo sapien
tattcatgagtttgccgaatttaaccaggggaa

SEQ ID NO: 1033565 - DNA, 33 bp, Homo sapien
tgttaagattccctaaagaaaaagctatgttga

SEQ ID NO: 1033566 - DNA, 33 bp, Homo sapien
tgttaagattccctaatgaaaaagctatgttga

SEQ ID NO: 1033567 - DNA, 33 bp, Homo sapien
tcactccactcgatcacgtctaggttaatttgc

SEQ ID NO: 1033568 - DNA, 33 bp, Homo sapien
tcactccactcgatcatgtctaggttaatttgc

SEQ ID NO: 1033569 - DNA, 33 bp, Homo sapien
tcattattactagaaacgtggctttgcaataaa

SEQ ID NO: 1033570 - DNA, 33 bp, Homo sapien
tcattattactagaaatgtggctttgcaataaa

SEQ ID NO: 1033571 - DNA, 33 bp, Homo sapien
acatctcttttccaaccacatttcggaagattc

SEQ ID NO: 1033572 - DNA, 33 bp, Homo sapien
acatctcttttccaacgacatttcggaagattc

SEQ ID NO: 1033573 - DNA, 33 bp, Homo sapien
agaacaaactcataaacaggcaaaggtctttgg

SEQ ID NO: 1033574 - DNA, 33 bp, Homo sapien
agaacaaactcataaataggcaaaggtctttgg

SEQ ID NO: 1033575 - DNA, 33 bp, Homo sapien
aaggtctttggcagaaagatcacacatcattat

SEQ ID NO: 1033576 - DNA, 33 bp, Homo sapien
aaggtctttggcagaaggatcacacatcattat

SEQ ID NO: 1033577 - DNA, 33 bp, Homo sapien
aataaggcaaataaggaacagtggctccacact

SEQ ID NO: 1033578 - DNA, 33 bp, Homo sapien
aataaggcaaataagggacagtggctccacact

SEQ ID NO: 1033579 - DNA, 33 bp, Homo sapien
gtcttaaatataggaacgatccagagaaactag

SEQ ID NO: 1033580 - DNA, 33 bp, Homo sapien
gtcttaaatataggaatgatccagagaaactag

SEQ ID NO: 1033581 - DNA, 33 bp, Homo sapien
cttggcttctcactgacgtctagactacagacc

SEQ ID NO: 1033582 - DNA, 33 bp, Homo sapien
cttggcttctcactgatgtctagactacagacc

SEQ ID NO: 1033583 - DNA, 33 bp, Homo sapien
tcacctttccaaaaagaattggaagtggctgaa

SEQ ID NO: 1033584 - DNA, 33 bp, Homo sapien
tcacctttccaaaaagtattggaagtggctgaa

SEQ ID NO: 1033585 - DNA, 33 bp, Homo sapien
agaaaggattttctatcaggaacagtttcagaa

SEQ ID NO: 1033586 - DNA, 33 bp, Homo sapien
agaaaggattttctatgaggaacagtttcagaa

SEQ ID NO: 1033587 - DNA, 33 bp, Homo sapien
taaagctcctgagataagtgaatgccctgagtg

SEQ ID NO: 1033588 - DNA, 33 bp, Homo sapien
taaagctcctgagatacgtgaatgccctgagtg

SEQ ID NO: 1033589 - DNA, 33 bp, Homo sapien
caaattatagaatttcaacaaaggaatcattgc

SEQ ID NO: 1033590 - DNA, 33 bp, Homo sapien
caaattatagaatttccacaaaggaatcattgc

SEQ ID NO: 1033591 - DNA, 33 bp, Homo sapien
aatcacatcttaaggtaaataatggatctaagg

SEQ ID NO: 1033592 - DNA, 33 bp, Homo sapien
aatcacatcttaaggtgaataatggatctaagg

SEQ ID NO: 1033593 - DNA, 33 bp, Homo sapien
tgtgccaaaaggcttacatcactagactggagg

SEQ ID NO: 1033594 - DNA, 33 bp, Homo sapien
tgtgccaaaaggcttatatcactagactggagg

SEQ ID NO: 1033595 - DNA, 33 bp, Homo sapien
catcttaacaggtataaagtgataactcattgt

SEQ ID NO: 1033596 - DNA, 33 bp, Homo sapien
catcttaacaggtatacagtgataactcattgt

SEQ ID NO: 1033597 - DNA, 33 bp, Homo sapien
tgagaatggagtcacgaattacttgtcggatta

SEQ ID NO: 1033598 - DNA, 33 bp, Homo sapien
tgagaatggagtcacgtattacttgtcggatta

SEQ ID NO: 1033599 - DNA, 33 bp, Homo sapien
aatatattttgctttaggtcatgtaccaaatga

SEQ ID NO: 1033600 - DNA, 33 bp, Homo sapien
aatatattttgctttatgtcatgtaccaaatga

SEQ ID NO: 1033601 - DNA, 33 bp, Homo sapien
atcatcatttaaaacacaaaccataggagataa

SEQ ID NO: 1033602 - DNA, 33 bp, Homo sapien
atcatcatttaaaacagaaaccataggagataa

SEQ ID NO: 1033603 - DNA, 33 bp, Homo sapien
aaactccatgagagtacagactaaatctttctt

SEQ ID NO: 1033604 - DNA, 33 bp, Homo sapien
aaactccatgagagtagagactaaatctttctt

SEQ ID NO: 1033605 - DNA, 33 bp, Homo sapien
tggcctgctgtgcaaacgaggttcaagaggatg

SEQ ID NO: 1033606 - DNA, 33 bp, Homo sapien
tggcctgctgtgcaaatgaggttcaagaggatg

SEQ ID NO: 1033607 - DNA, 33 bp, Homo sapien
atgttcggatgaaaaacctattgacttacaagg

SEQ ID NO: 1033608 - DNA, 33 bp, Homo sapien
atgttcggatgaaaaagctattgacttacaagg

SEQ ID NO: 1033609 - DNA, 33 bp, Homo sapien
ttcaaagttttagggcacacaattataacagaa

SEQ ID NO: 1033610 - DNA, 33 bp, Homo sapien
ttcaaagttttagggcgcacaattataacagaa

SEQ ID NO: 1033611 - DNA, 33 bp, Homo sapien
agaaataaagcagataataagtcagtggtggaa

SEQ ID NO: 1033612 - DNA, 33 bp, Homo sapien
agaaataaagcagatagtaagtcagtggtggaa

SEQ ID NO: 1033613 - DNA, 33 bp, Homo sapien
gagtggcatttgtggaactgcatgaatttatga

SEQ ID NO: 1033614 - DNA, 33 bp, Homo sapien
gagtggcatttgtggagctgcatgaatttatga

SEQ ID NO: 1033615 - DNA, 33 bp, Homo sapien
tagtcttaatacctggacaaggaaataatctat

SEQ ID NO: 1033616 - DNA, 33 bp, Homo sapien
tagtcttaatacctgggcaaggaaataatctat

SEQ ID NO: 1033617 - DNA, 33 bp, Homo sapien
aattttattataagcaccaaagtcaactgctag

SEQ ID NO: 1033618 - DNA, 33 bp, Homo sapien
aattttattataagcatcaaagtcaactgctag

SEQ ID NO: 1033619 - DNA, 33 bp, Homo sapien
tggaatatttgttccaagttagatgtagcatgt

SEQ ID NO: 1033620 - DNA, 33 bp, Homo sapien
tggaatatttgttccatgttagatgtagcatgt

SEQ ID NO: 1033621 - DNA, 33 bp, Homo sapien
gagtaaaagaggaagcaaaagaaagaaggaaga

SEQ ID NO: 1033622 - DNA, 33 bp, Homo sapien
gagtaaaagaggaagcgaaagaaagaaggaaga

SEQ ID NO: 1033623 - DNA, 33 bp, Homo sapien
ttgggaggtttgttgacaaaaaagatgaatacc

SEQ ID NO: 1033624 - DNA, 33 bp, Homo sapien
ttgggaggtttgttgataaaaaagatgaatacc

SEQ ID NO: 1033625 - DNA, 33 bp, Homo sapien
gattttctaattcttcacaatgcctggcacata

SEQ ID NO: 1033626 - DNA, 33 bp, Homo sapien
gattttctaattcttctcaatgcctggcacata

SEQ ID NO: 1033627 - DNA, 33 bp, Homo sapien
ggccagtgagtattgacattgcttgactgtgta

SEQ ID NO: 1033628 - DNA, 33 bp, Homo sapien
ggccagtgagtattgatattgcttgactgtgta

SEQ ID NO: 1033629 - DNA, 33 bp, Homo sapien
atcaacctgttatgcccgacactcctttctgta

SEQ ID NO: 1033630 - DNA, 33 bp, Homo sapien
atcaacctgttatgcctgacactcctttctgta

SEQ ID NO: 1033631 - DNA, 33 bp, Homo sapien
gactccaaataaagccacctctttctagacgct

SEQ ID NO: 1033632 - DNA, 33 bp, Homo sapien
gactccaaataaagccgcctctttctagacgct

SEQ ID NO: 1033633 - DNA, 33 bp, Homo sapien
gggaaaggatcaattaagtcagcacaaagaagt

SEQ ID NO: 1033634 - DNA, 33 bp, Homo sapien
gggaaaggatcaattacgtcagcacaaagaagt

SEQ ID NO: 1033635 - DNA, 33 bp, Homo sapien
gaaagcaaaaccttgaagaggggagactactgt

SEQ ID NO: 1033636 - DNA, 33 bp, Homo sapien
gaaagcaaaaccttgacgaggggagactactgt

SEQ ID NO: 1033637 - DNA, 33 bp, Homo sapien
cacagaaagcaaatcaaagacagaaaagacaga

SEQ ID NO: 1033638 - DNA, 33 bp, Homo sapien
cacagaaagcaaatcagagacagaaaagacaga

SEQ ID NO: 1033639 - DNA, 33 bp, Homo sapien
ggagtgcagtgccacaatcagaattcactgaaa

SEQ ID NO: 1033640 - DNA, 33 bp, Homo sapien
ggagtgcagtgccacagtcagaattcactgaaa

SEQ ID NO: 1033641 - DNA, 33 bp, Homo sapien
aggatatagaacaaaacgatcaacaactataaa

SEQ ID NO: 1033642 - DNA, 33 bp, Homo sapien
aggatatagaacaaaaggatcaacaactataaa

SEQ ID NO: 1033643 - DNA, 33 bp, Homo sapien
agggtcttgaatgctacgctaagctgcttagaa

SEQ ID NO: 1033644 - DNA, 33 bp, Homo sapien
agggtcttgaatgctatgctaagctgcttagaa

SEQ ID NO: 1033645 - DNA, 33 bp, Homo sapien
tcatattgagcatgcaacctaagaatctgggcc

SEQ ID NO: 1033646 - DNA, 33 bp, Homo sapien
tcatattgagcatgcagcctaagaatctgggcc

SEQ ID NO: 1033647 - DNA, 33 bp, Homo sapien
attattaggctttggacagatgagccctcaggg

SEQ ID NO: 1033648 - DNA, 33 bp, Homo sapien
attattaggctttggatagatgagccctcaggg

SEQ ID NO: 1033649 - DNA, 33 bp, Homo sapien
gattctcttagcctaactgagtatttatgtagt

SEQ ID NO: 1033650 - DNA, 33 bp, Homo sapien
gattctcttagcctaattgagtatttatgtagt

SEQ ID NO: 1033651 - DNA, 33 bp, Homo sapien
caacttttttatgccacgattggaatgagaacc

SEQ ID NO: 1033652 - DNA, 33 bp, Homo sapien
caacttttttatgccatgattggaatgagaacc

SEQ ID NO: 1033653 - DNA, 33 bp, Homo sapien
ctataaaaaaatacacaaaatcacgtcctttgc

SEQ ID NO: 1033654 - DNA, 33 bp, Homo sapien
ctataaaaaaatacacgaaatcacgtcctttgc

SEQ ID NO: 1033655 - DNA, 33 bp, Homo sapien
gttgtttggggggaaagatgaataaaactaaga

SEQ ID NO: 1033656 - DNA, 33 bp, Homo sapien
gttgtttggggggaaatatgaataaaactaaga

SEQ ID NO: 1033657 - DNA, 33 bp, Homo sapien
tggttttggtctaatgaagtttataccacaaaa

SEQ ID NO: 1033658 - DNA, 33 bp, Homo sapien
tggttttggtctaatggagtttataccacaaaa

SEQ ID NO: 1033659 - DNA, 33 bp, Homo sapien
ttcattctctacctgacagaacttcaccttaag

SEQ ID NO: 1033660 - DNA, 33 bp, Homo sapien
ttcattctctacctgatagaacttcaccttaag

SEQ ID NO: 1033661 - DNA, 33 bp, Homo sapien
ggaggcagattaatacaatgatcaaaatacaaa

SEQ ID NO: 1033662 - DNA, 33 bp, Homo sapien
ggaggcagattaatacgatgatcaaaatacaaa

SEQ ID NO: 1033663 - DNA, 33 bp, Homo sapien
acatctctcttgtataccactccactaaacttc

SEQ ID NO: 1033664 - DNA, 33 bp, Homo sapien
acatctctcttgtatatcactccactaaacttc

SEQ ID NO: 1033665 - DNA, 33 bp, Homo sapien
gtgaagtaacagaaaaatgtttaaggaagtgaa

SEQ ID NO: 1033666 - DNA, 33 bp, Homo sapien
gtgaagtaacagaaaattgtttaaggaagtgaa

SEQ ID NO: 1033667 - DNA, 33 bp, Homo sapien
tcctggagagtaaggaacatgtgtgttgtactc

SEQ ID NO: 1033668 - DNA, 33 bp, Homo sapien
tcctggagagtaaggaccatgtgtgttgtactc

SEQ ID NO: 1033669 - DNA, 33 bp, Homo sapien
ccctactgctgcaagacctgtggcaaaagcagc

SEQ ID NO: 1033670 - DNA, 33 bp, Homo sapien
ccctactgctgcaagagctgtggcaaaagcagc

SEQ ID NO: 1033671 - DNA, 33 bp, Homo sapien
tttttttggatgtcaaataggccctgatgtcta

SEQ ID NO: 1033672 - DNA, 33 bp, Homo sapien
tttttttggatgtcaagtaggccctgatgtcta

SEQ ID NO: 1033673 - DNA, 33 bp, Homo sapien
ctgacacatgaaaaagcatacctgctcattcct

SEQ ID NO: 1033674 - DNA, 33 bp, Homo sapien
ctgacacatgaaaaagtatacctgctcattcct

SEQ ID NO: 1033675 - DNA, 33 bp, Homo sapien
gcttgaaattgttgccactagcacagaagtctg

SEQ ID NO: 1033676 - DNA, 33 bp, Homo sapien
gcttgaaattgttgccgctagcacagaagtctg

SEQ ID NO: 1033677 - DNA, 33 bp, Homo sapien
aggctggagcccactgcaacgccacaaagccac

SEQ ID NO: 1033678 - DNA, 33 bp, Homo sapien
aggctggagcccactggaacgccacaaagccac

SEQ ID NO: 1033679 - DNA, 33 bp, Homo sapien
tttctttatccagtataacattgatgggcattt

SEQ ID NO: 1033680 - DNA, 33 bp, Homo sapien
tttctttatccagtatgacattgatgggcattt

SEQ ID NO: 1033681 - DNA, 33 bp, Homo sapien
tatttcctgcctttcaataatgtatgttctaaa

SEQ ID NO: 1033682 - DNA, 33 bp, Homo sapien
tatttcctgcctttcagtaatgtatgttctaaa

SEQ ID NO: 1033683 - DNA, 33 bp, Homo sapien
agaatgaagtaaagacagaagtgtgacaattac

SEQ ID NO: 1033684 - DNA, 33 bp, Homo sapien
agaatgaagtaaagacggaagtgtgacaattac

SEQ ID NO: 1033685 - DNA, 33 bp, Homo sapien
agttcttcgttcatcacgctatttcatcatcag

SEQ ID NO: 1033686 - DNA, 33 bp, Homo sapien
agttcttcgttcatcatgctatttcatcatcag

SEQ ID NO: 1033687 - DNA, 33 bp, Homo sapien
gttgtcttgtactttacctataattctctaatt

SEQ ID NO: 1033688 - DNA, 33 bp, Homo sapien
gttgtcttgtactttatctataattctctaatt

SEQ ID NO: 1033689 - DNA, 33 bp, Homo sapien
gacaagaaaccaacaccgtatttacatgatcct

SEQ ID NO: 1033690 - DNA, 33 bp, Homo sapien
gacaagaaaccaacacggtatttacatgatcct

SEQ ID NO: 1033691 - DNA, 33 bp, Homo sapien
cctttgctacttgccacgtttgtgaagtctcct

SEQ ID NO: 1033692 - DNA, 33 bp, Homo sapien
cctttgctacttgccatgtttgtgaagtctcct

SEQ ID NO: 1033693 - DNA, 33 bp, Homo sapien
acaaatgggtgtcaaaagcatgccaaaataata

SEQ ID NO: 1033694 - DNA, 33 bp, Homo sapien
acaaatgggtgtcaaacgcatgccaaaataata

SEQ ID NO: 1033695 - DNA, 33 bp, Homo sapien
atcttgcaacttcacaccgcactatccagggta

SEQ ID NO: 1033696 - DNA, 33 bp, Homo sapien
atcttgcaacttcacatcgcactatccagggta

SEQ ID NO: 1033697 - DNA, 33 bp, Homo sapien
aaagaactgagacctgcagtatcagacctttgt

SEQ ID NO: 1033698 - DNA, 33 bp, Homo sapien
aaagaactgagacctgtagtatcagacctttgt

SEQ ID NO: 1033699 - DNA, 33 bp, Homo sapien
aagagagaggttacaaaaacaagaaagatgtta

SEQ ID NO: 1033700 - DNA, 33 bp, Homo sapien
aagagagaggttacaagaacaagaaagatgtta

SEQ ID NO: 1033701 - DNA, 33 bp, Homo sapien
acttcaaatatctgaaccaaagcctaaagtgca

SEQ ID NO: 1033702 - DNA, 33 bp, Homo sapien
acttcaaatatctgaagcaaagcctaaagtgca

SEQ ID NO: 1033703 - DNA, 33 bp, Homo sapien
gaaaaagtgatggctaacatattaagagttgat

SEQ ID NO: 1033704 - DNA, 33 bp, Homo sapien
gaaaaagtgatggctagcatattaagagttgat

SEQ ID NO: 1033705 - DNA, 33 bp, Homo sapien
tgaaaatgttatggaacgagacatgataattag

SEQ ID NO: 1033706 - DNA, 33 bp, Homo sapien
tgaaaatgttatggaatgagacatgataattag

SEQ ID NO: 1033707 - DNA, 33 bp, Homo sapien
ttttcatttgtctctagtaacattccatttttt

SEQ ID NO: 1033708 - DNA, 33 bp, Homo sapien
ttttcatttgtctctattaacattccatttttt

SEQ ID NO: 1033709 - DNA, 33 bp, Homo sapien
ggtttctgtcaaacaaatagaatatctagcaca

SEQ ID NO: 1033710 - DNA, 33 bp, Homo sapien
ggtttctgtcaaacaattagaatatctagcaca

SEQ ID NO: 1033711 - DNA, 33 bp, Homo sapien
taatttggtgaaccaccgtgatagagcttttcc

SEQ ID NO: 1033712 - DNA, 33 bp, Homo sapien
taatttggtgaaccactgtgatagagcttttcc

SEQ ID NO: 1033713 - DNA, 33 bp, Homo sapien
catctctccaggttgccaggtattataattcac

SEQ ID NO: 1033714 - DNA, 33 bp, Homo sapien
catctctccaggttgctaggtattataattcac

SEQ ID NO: 1033715 - DNA, 33 bp, Homo sapien
catggctcctttgttagaattttcatattgaat

SEQ ID NO: 1033716 - DNA, 33 bp, Homo sapien
catggctcctttgttataattttcatattgaat

SEQ ID NO: 1033717 - DNA, 33 bp, Homo sapien
tattttattttcaacaacctggtcacagaaaga

SEQ ID NO: 1033718 - DNA, 33 bp, Homo sapien
tattttattttcaacatcctggtcacagaaaga

SEQ ID NO: 1033719 - DNA, 33 bp, Homo sapien
gccagatctctctttaaacaggaccaaattatt

SEQ ID NO: 1033720 - DNA, 33 bp, Homo sapien
gccagatctctctttagacaggaccaaattatt

SEQ ID NO: 1033721 - DNA, 33 bp, Homo sapien
aggataggagagagaacaggaaacatgtctgta

SEQ ID NO: 1033722 - DNA, 33 bp, Homo sapien
aggataggagagagaataggaaacatgtctgta

SEQ ID NO: 1033723 - DNA, 33 bp, Homo sapien
agatagaagaaatgtacggggatatgagactta

SEQ ID NO: 1033724 - DNA, 33 bp, Homo sapien
agatagaagaaatgtatggggatatgagactta

SEQ ID NO: 1033725 - DNA, 33 bp, Homo sapien
caaggtagctgcttccaaattttatataaatag

SEQ ID NO: 1033726 - DNA, 33 bp, Homo sapien
caaggtagctgcttccgaattttatataaatag

SEQ ID NO: 1033727 - DNA, 33 bp, Homo sapien
tttgttttggataaaaactgaaaacaattcatg

SEQ ID NO: 1033728 - DNA, 33 bp, Homo sapien
tttgttttggataaaatctgaaaacaattcatg

SEQ ID NO: 1033729 - DNA, 33 bp, Homo sapien
tgaatcaccaaggagaaaattcagaaaagatta

SEQ ID NO: 1033730 - DNA, 33 bp, Homo sapien
tgaatcaccaaggagacaattcagaaaagatta

SEQ ID NO: 1033731 - DNA, 33 bp, Homo sapien
gtagtggcaggaccaagttcagatcccagatgg

SEQ ID NO: 1033732 - DNA, 33 bp, Homo sapien
gtagtggcaggaccaatttcagatcccagatgg

SEQ ID NO: 1033733 - DNA, 33 bp, Homo sapien
ggtgaatggtaaaatccaagttccaggattcct

SEQ ID NO: 1033734 - DNA, 33 bp, Homo sapien
ggtgaatggtaaaatctaagttccaggattcct

SEQ ID NO: 1033735 - DNA, 33 bp, Homo sapien
atgtttgtgattataaagtagtttgtgctcttt

SEQ ID NO: 1033736 - DNA, 33 bp, Homo sapien
atgtttgtgattataaggtagtttgtgctcttt

SEQ ID NO: 1033737 - DNA, 33 bp, Homo sapien
ccaacagtaccaatgcggaaaaatccagagtat

SEQ ID NO: 1033738 - DNA, 33 bp, Homo sapien
ccaacagtaccaatgctgaaaaatccagagtat

SEQ ID NO: 1033739 - DNA, 33 bp, Homo sapien
tcaatcataaccaaaaaggaagggtctgtatca

SEQ ID NO: 1033740 - DNA, 33 bp, Homo sapien
tcaatcataaccaaaatggaagggtctgtatca

SEQ ID NO: 1033741 - DNA, 33 bp, Homo sapien
caaagggaggtcaccaacacttatatctgtgaa

SEQ ID NO: 1033742 - DNA, 33 bp, Homo sapien
caaagggaggtcaccaccacttatatctgtgaa

SEQ ID NO: 1033743 - DNA, 33 bp, Homo sapien
atccaattctagttgccaagttctcaaggctat

SEQ ID NO: 1033744 - DNA, 33 bp, Homo sapien
atccaattctagttgcgaagttctcaaggctat

SEQ ID NO: 1033745 - DNA, 33 bp, Homo sapien
tctcaaggctatagcaaggtaaatgggatttca

SEQ ID NO: 1033746 - DNA, 33 bp, Homo sapien
tctcaaggctatagcacggtaaatgggatttca

SEQ ID NO: 1033747 - DNA, 33 bp, Homo sapien
attgcctcctcagagactacatactccttaatc

SEQ ID NO: 1033748 - DNA, 33 bp, Homo sapien
attgcctcctcagagattacatactccttaatc

SEQ ID NO: 1033749 - DNA, 33 bp, Homo sapien
ataagccaaattcagcactctttaaagcaccaa

SEQ ID NO: 1033750 - DNA, 33 bp, Homo sapien
ataagccaaattcagccctctttaaagcaccaa

SEQ ID NO: 1033751 - DNA, 33 bp, Homo sapien
gaacttcatcctaaaacataagccaaattcagc

SEQ ID NO: 1033752 - DNA, 33 bp, Homo sapien
gaacttcatcctaaaatataagccaaattcagc

SEQ ID NO: 1033753 - DNA, 33 bp, Homo sapien
atccaagttcagcaaaactccttattttctcca

SEQ ID NO: 1033754 - DNA, 33 bp, Homo sapien
atccaagttcagcaaagctccttattttctcca

SEQ ID NO: 1033755 - DNA, 33 bp, Homo sapien
agcctgcagagaaaacgctattgctatctgttt

SEQ ID NO: 1033756 - DNA, 33 bp, Homo sapien
agcctgcagagaaaactctattgctatctgttt

SEQ ID NO: 1033757 - DNA, 33 bp, Homo sapien
gatgactgaaacatccagcctcagttacttgga

SEQ ID NO: 1033758 - DNA, 33 bp, Homo sapien
gatgactgaaacatccggcctcagttacttgga

SEQ ID NO: 1033759 - DNA, 33 bp, Homo sapien
atgtgcaaaagtcactaacacttctatacaaca

SEQ ID NO: 1033760 - DNA, 33 bp, Homo sapien
atgtgcaaaagtcacttacacttctatacaaca

SEQ ID NO: 1033761 - DNA, 33 bp, Homo sapien
tggaagtagaaaaatgaagtcaaccaaatgcta

SEQ ID NO: 1033762 - DNA, 33 bp, Homo sapien
tggaagtagaaaaatgcagtcaaccaaatgcta

SEQ ID NO: 1033763 - DNA, 33 bp, Homo sapien
atttcattcactgataaaaccttgactttccag

SEQ ID NO: 1033764 - DNA, 33 bp, Homo sapien
atttcattcactgatataaccttgactttccag

SEQ ID NO: 1033765 - DNA, 33 bp, Homo sapien
aatgagaaaaagtcaaaatgtcttggaggtatt

SEQ ID NO: 1033766 - DNA, 33 bp, Homo sapien
aatgagaaaaagtcaacatgtcttggaggtatt

SEQ ID NO: 1033767 - DNA, 33 bp, Homo sapien
cagataggcctgatccacagaaatgaacatggt

SEQ ID NO: 1033768 - DNA, 33 bp, Homo sapien
cagataggcctgatccgcagaaatgaacatggt

SEQ ID NO: 1033769 - DNA, 33 bp, Homo sapien
aattgacgtaaatagcagatagtacattttatt

SEQ ID NO: 1033770 - DNA, 33 bp, Homo sapien
aattgacgtaaatagctgatagtacattttatt

SEQ ID NO: 1033771 - DNA, 33 bp, Homo sapien
attcagagtgtaacaaaaacttcaacaatgata

SEQ ID NO: 1033772 - DNA, 33 bp, Homo sapien
attcagagtgtaacaagaacttcaacaatgata

SEQ ID NO: 1033773 - DNA, 33 bp, Homo sapien
ttctggtcatcttacactaggaccatcaatatt

SEQ ID NO: 1033774 - DNA, 33 bp, Homo sapien
ttctggtcatcttacattaggaccatcaatatt

SEQ ID NO: 1033775 - DNA, 33 bp, Homo sapien
taactgtttgagttcacacagaattaggaccac

SEQ ID NO: 1033776 - DNA, 33 bp, Homo sapien
taactgtttgagttcatacagaattaggaccac

SEQ ID NO: 1033777 - DNA, 33 bp, Homo sapien
catttggtcaaatgtcaagtttgggtcctgaat

SEQ ID NO: 1033778 - DNA, 33 bp, Homo sapien
catttggtcaaatgtcgagtttgggtcctgaat

SEQ ID NO: 1033779 - DNA, 33 bp, Homo sapien
ttccttgtgctgccccccttcaaaactggcagc

SEQ ID NO: 1033780 - DNA, 33 bp, Homo sapien
ttccttgtgctgccccgcttcaaaactggcagc

SEQ ID NO: 1033781 - DNA, 33 bp, Homo sapien
cggcagtttgaagtcacctaaacatattgaaaa

SEQ ID NO: 1033782 - DNA, 33 bp, Homo sapien
cggcagtttgaagtcatctaaacatattgaaaa

SEQ ID NO: 1033783 - DNA, 33 bp, Homo sapien
tcattctgctgtaccaatagttaaagaaggagt

SEQ ID NO: 1033784 - DNA, 33 bp, Homo sapien
tcattctgctgtaccagtagttaaagaaggagt

SEQ ID NO: 1033785 - DNA, 33 bp, Homo sapien
ctttaccagaatatggaccagactgcttcttta

SEQ ID NO: 1033786 - DNA, 33 bp, Homo sapien
ctttaccagaatatggcccagactgcttcttta

SEQ ID NO: 1033787 - DNA, 33 bp, Homo sapien
cccttcctcacctggacggttaaggactcccca

SEQ ID NO: 1033788 - DNA, 33 bp, Homo sapien
cccttcctcacctggatggttaaggactcccca

SEQ ID NO: 1033789 - DNA, 33 bp, Homo sapien
ttagaccacaatccacaatgctggccgggcacc

SEQ ID NO: 1033790 - DNA, 33 bp, Homo sapien
ttagaccacaatccacgatgctggccgggcacc

SEQ ID NO: 1033791 - DNA, 33 bp, Homo sapien
ttgttccttgcagaaacatcgacgcagctagag

SEQ ID NO: 1033792 - DNA, 33 bp, Homo sapien
ttgttccttgcagaaagatcgacgcagctagag

SEQ ID NO: 1033793 - DNA, 33 bp, Homo sapien
gtcattttcatagaaacacaaaaaactattcca

SEQ ID NO: 1033794 - DNA, 33 bp, Homo sapien
gtcattttcatagaaagacaaaaaactattcca

SEQ ID NO: 1033795 - DNA, 33 bp, Homo sapien
tgagggaatggggaaaatgagacaagaaatgga

SEQ ID NO: 1033796 - DNA, 33 bp, Homo sapien
tgagggaatggggaaagtgagacaagaaatgga

SEQ ID NO: 1033797 - DNA, 33 bp, Homo sapien
tatatttatcaaaataccatgttccccatagat

SEQ ID NO: 1033798 - DNA, 33 bp, Homo sapien
tatatttatcaaaatatcatgttccccatagat

SEQ ID NO: 1033799 - DNA, 33 bp, Homo sapien
gacaagacttacatgacggtttagtggtgactt

SEQ ID NO: 1033800 - DNA, 33 bp, Homo sapien
gacaagacttacatgatggtttagtggtgactt

SEQ ID NO: 1033801 - DNA, 33 bp, Homo sapien
gtggtaactgagaaaactgtctgcaagcacatt

SEQ ID NO: 1033802 - DNA, 33 bp, Homo sapien
gtggtaactgagaaaattgtctgcaagcacatt

SEQ ID NO: 1033803 - DNA, 33 bp, Homo sapien
gttgttttggagatggaatgtctctctgtcacc

SEQ ID NO: 1033804 - DNA, 33 bp, Homo sapien
gttgttttggagatgggatgtctctctgtcacc

SEQ ID NO: 1033805 - DNA, 33 bp, Homo sapien
ttccatcaagtggctccgaactgctttggcaaa

SEQ ID NO: 1033806 - DNA, 33 bp, Homo sapien
ttccatcaagtggctctgaactgctttggcaaa

SEQ ID NO: 1033807 - DNA, 33 bp, Homo sapien
cattccttggcttgtaacatatttgaaaatgca

SEQ ID NO: 1033808 - DNA, 33 bp, Homo sapien
cattccttggcttgtagcatatttgaaaatgca

SEQ ID NO: 1033809 - DNA, 33 bp, Homo sapien
tttagccttgatttcaactcttacattctcaag

SEQ ID NO: 1033810 - DNA, 33 bp, Homo sapien
tttagccttgatttcatctcttacattctcaag

SEQ ID NO: 1033811 - DNA, 33 bp, Homo sapien
gacaatagctgactgaaacaataatcaacagga

SEQ ID NO: 1033812 - DNA, 33 bp, Homo sapien
gacaatagctgactgagacaataatcaacagga

SEQ ID NO: 1033813 - DNA, 33 bp, Homo sapien
ttcttttcaaatcttccgaaatctgatataaca

SEQ ID NO: 1033814 - DNA, 33 bp, Homo sapien
ttcttttcaaatcttctgaaatctgatataaca

SEQ ID NO: 1033815 - DNA, 33 bp, Homo sapien
aacagtctttaggtgaacttttattgtgaatat

SEQ ID NO: 1033816 - DNA, 33 bp, Homo sapien
aacagtctttaggtgaccttttattgtgaatat

SEQ ID NO: 1033817 - DNA, 33 bp, Homo sapien
tcagatgcgaacaatcaataagtaacattatgg

SEQ ID NO: 1033818 - DNA, 33 bp, Homo sapien
tcagatgcgaacaatcgataagtaacattatgg

SEQ ID NO: 1033819 - DNA, 33 bp, Homo sapien
aataagtgtgttaaagaaacatctgcatttcca

SEQ ID NO: 1033820 - DNA, 33 bp, Homo sapien
aataagtgtgttaaaggaacatctgcatttcca

SEQ ID NO: 1033821 - DNA, 33 bp, Homo sapien
ttgcagcactattcataacaggcatgatatgga

SEQ ID NO: 1033822 - DNA, 33 bp, Homo sapien
ttgcagcactattcatgacaggcatgatatgga

SEQ ID NO: 1033823 - DNA, 33 bp, Homo sapien
tatgtgtatttgtcagaagaaatttgactgggg

SEQ ID NO: 1033824 - DNA, 33 bp, Homo sapien
tatgtgtatttgtcagcagaaatttgactgggg

SEQ ID NO: 1033825 - DNA, 33 bp, Homo sapien
ccaataatccaaaccaatgactagaatattact

SEQ ID NO: 1033826 - DNA, 33 bp, Homo sapien
ccaataatccaaaccagtgactagaatattact

SEQ ID NO: 1033827 - DNA, 33 bp, Homo sapien
cttctcattgatgttccatttaaactctgaaat

SEQ ID NO: 1033828 - DNA, 33 bp, Homo sapien
cttctcattgatgttctatttaaactctgaaat

SEQ ID NO: 1033829 - DNA, 33 bp, Homo sapien
attacctttctttcaccagctcctaccaccatt

SEQ ID NO: 1033830 - DNA, 33 bp, Homo sapien
attacctttctttcacgagctcctaccaccatt

SEQ ID NO: 1033831 - DNA, 33 bp, Homo sapien
tggcttcaggaaataaagtgcaacttaaagaaa

SEQ ID NO: 1033832 - DNA, 33 bp, Homo sapien
tggcttcaggaaataatgtgcaacttaaagaaa

SEQ ID NO: 1033833 - DNA, 33 bp, Homo sapien
ccctgattttgctcagaatactggcatatgcac

SEQ ID NO: 1033834 - DNA, 33 bp, Homo sapien
ccctgattttgctcaggatactggcatatgcac

SEQ ID NO: 1033835 - DNA, 33 bp, Homo sapien
accatattgatttgcccggaaccaaggggcttt

SEQ ID NO: 1033836 - DNA, 33 bp, Homo sapien
accatattgatttgcctggaaccaaggggcttt

SEQ ID NO: 1033837 - DNA, 33 bp, Homo sapien
gtttgaaatttgcataaggcttgtaggcccttt

SEQ ID NO: 1033838 - DNA, 33 bp, Homo sapien
gtttgaaatttgcatacggcttgtaggcccttt

SEQ ID NO: 1033839 - DNA, 33 bp, Homo sapien
tgtgtgtgctagtaaacggctgaggttcgaatt

SEQ ID NO: 1033840 - DNA, 33 bp, Homo sapien
tgtgtgtgctagtaaagggctgaggttcgaatt

SEQ ID NO: 1033841 - DNA, 33 bp, Homo sapien
tccaaatagctgaaacaatcctaagaagaacaa

SEQ ID NO: 1033842 - DNA, 33 bp, Homo sapien
tccaaatagctgaaactatcctaagaagaacaa

SEQ ID NO: 1033843 - DNA, 33 bp, Homo sapien
tgacacttaaccctctcaaaggaaatacaaaga

SEQ ID NO: 1033844 - DNA, 33 bp, Homo sapien
tgacacttaaccctctgaaaggaaatacaaaga

SEQ ID NO: 1033845 - DNA, 33 bp, Homo sapien
tgcctgagagttgttacggatctcccttacatt

SEQ ID NO: 1033846 - DNA, 33 bp, Homo sapien
tgcctgagagttgttatggatctcccttacatt

SEQ ID NO: 1033847 - DNA, 33 bp, Homo sapien
atcctgagcaaggaaaatattcattcagtcagt

SEQ ID NO: 1033848 - DNA, 33 bp, Homo sapien
atcctgagcaaggaaactattcattcagtcagt

SEQ ID NO: 1033849 - DNA, 33 bp, Homo sapien
agtttctcttatctgcaactaaattctgtatga

SEQ ID NO: 1033850 - DNA, 33 bp, Homo sapien
agtttctcttatctgctactaaattctgtatga

SEQ ID NO: 1033851 - DNA, 33 bp, Homo sapien
gaaattcagatttcagcaaccaactctgaacag

SEQ ID NO: 1033852 - DNA, 33 bp, Homo sapien
gaaattcagatttcagtaaccaactctgaacag

SEQ ID NO: 1033853 - DNA, 33 bp, Homo sapien
ctgaactcttgaaaataacaagaaaggaaattc

SEQ ID NO: 1033854 - DNA, 33 bp, Homo sapien
ctgaactcttgaaaatgacaagaaaggaaattc

SEQ ID NO: 1033855 - DNA, 33 bp, Homo sapien
agattgtagaaagatacagtcaaggtaattaat

SEQ ID NO: 1033856 - DNA, 33 bp, Homo sapien
agattgtagaaagatagagtcaaggtaattaat

SEQ ID NO: 1033857 - DNA, 33 bp, Homo sapien
ttgaatgctggtttcacagataggtttagtttg

SEQ ID NO: 1033858 - DNA, 33 bp, Homo sapien
ttgaatgctggtttcagagataggtttagtttg

SEQ ID NO: 1033859 - DNA, 33 bp, Homo sapien
ttcagagtagtaaacggatggacaggtgtgttc

SEQ ID NO: 1033860 - DNA, 33 bp, Homo sapien
ttcagagtagtaaacgtatggacaggtgtgttc

SEQ ID NO: 1033861 - DNA, 33 bp, Homo sapien
ttaaataagtgaataacgtggtttctgggtaaa

SEQ ID NO: 1033862 - DNA, 33 bp, Homo sapien
ttaaataagtgaataatgtggtttctgggtaaa

SEQ ID NO: 1033863 - DNA, 33 bp, Homo sapien
aaatgtgttaataaaagtcacgtggtaaagcac

SEQ ID NO: 1033864 - DNA, 33 bp, Homo sapien
aaatgtgttaataaaattcacgtggtaaagcac

SEQ ID NO: 1033865 - DNA, 33 bp, Homo sapien
ttgcctactttgaagaaggcagtgttttgggca

SEQ ID NO: 1033866 - DNA, 33 bp, Homo sapien
ttgcctactttgaagacggcagtgttttgggca

SEQ ID NO: 1033867 - DNA, 33 bp, Homo sapien
aaatatctggcctatcagaataccaaatctctc

SEQ ID NO: 1033868 - DNA, 33 bp, Homo sapien
aaatatctggcctatcggaataccaaatctctc

SEQ ID NO: 1033869 - DNA, 33 bp, Homo sapien
attattcaagctaaaacagtgtgtgtcttcatt

SEQ ID NO: 1033870 - DNA, 33 bp, Homo sapien
attattcaagctaaaatagtgtgtgtcttcatt

SEQ ID NO: 1033871 - DNA, 33 bp, Homo sapien
cagtttaaagcagggagaattcagtacacatcc

SEQ ID NO: 1033872 - DNA, 33 bp, Homo sapien
cagtttaaagcagggataattcagtacacatcc

SEQ ID NO: 1033873 - DNA, 33 bp, Homo sapien
gagctggggctctgtagccagatgaagaattat

SEQ ID NO: 1033874 - DNA, 33 bp, Homo sapien
gagctggggctctgtatccagatgaagaattat

SEQ ID NO: 1033875 - DNA, 33 bp, Homo sapien
ttgaggctagaagcaacgtaatgggtaggcctg

SEQ ID NO: 1033876 - DNA, 33 bp, Homo sapien
ttgaggctagaagcaatgtaatgggtaggcctg

SEQ ID NO: 1033877 - DNA, 33 bp, Homo sapien
aggaaagccagaaagaataggctgtgccagtag

SEQ ID NO: 1033878 - DNA, 33 bp, Homo sapien
aggaaagccagaaagagtaggctgtgccagtag

SEQ ID NO: 1033879 - DNA, 33 bp, Homo sapien
atctgtggacagaaagaactgtagaatagccaa

SEQ ID NO: 1033880 - DNA, 33 bp, Homo sapien
atctgtggacagaaaggactgtagaatagccaa

SEQ ID NO: 1033881 - DNA, 33 bp, Homo sapien
ccaagataggagaacaatctaagtgcttatctg

SEQ ID NO: 1033882 - DNA, 33 bp, Homo sapien
ccaagataggagaacagtctaagtgcttatctg

SEQ ID NO: 1033883 - DNA, 33 bp, Homo sapien
gtctctcaaaattgagaagataaccaaaacggg

SEQ ID NO: 1033884 - DNA, 33 bp, Homo sapien
gtctctcaaaattgagtagataaccaaaacggg

SEQ ID NO: 1033885 - DNA, 33 bp, Homo sapien
atttatgttatttcgaaagatcttgctatctgg

SEQ ID NO: 1033886 - DNA, 33 bp, Homo sapien
atttatgttatttcgacagatcttgctatctgg

SEQ ID NO: 1033887 - DNA, 33 bp, Homo sapien
aaagcaatactcagagaaattattatagctaaa

SEQ ID NO: 1033888 - DNA, 33 bp, Homo sapien
aaagcaatactcagaggaattattatagctaaa

SEQ ID NO: 1033889 - DNA, 33 bp, Homo sapien
tgatgcaccaattccactattggttacatatcc

SEQ ID NO: 1033890 - DNA, 33 bp, Homo sapien
tgatgcaccaattccattattggttacatatcc

SEQ ID NO: 1033891 - DNA, 33 bp, Homo sapien
tctccacattcctttccacaatggctggactaa

SEQ ID NO: 1033892 - DNA, 33 bp, Homo sapien
tctccacattcctttctacaatggctggactaa

SEQ ID NO: 1033893 - DNA, 33 bp, Homo sapien
tttaactgatacaagaaaatgtccatgtgctat

SEQ ID NO: 1033894 - DNA, 33 bp, Homo sapien
tttaactgatacaagacaatgtccatgtgctat

SEQ ID NO: 1033895 - DNA, 33 bp, Homo sapien
caaagaatcttaatggcactaaggtgactcaaa

SEQ ID NO: 1033896 - DNA, 33 bp, Homo sapien
caaagaatcttaatggtactaaggtgactcaaa

SEQ ID NO: 1033897 - DNA, 33 bp, Homo sapien
atagaacattcttatcaccagagatgcagactg

SEQ ID NO: 1033898 - DNA, 33 bp, Homo sapien
atagaacattcttatcgccagagatgcagactg

SEQ ID NO: 1033899 - DNA, 33 bp, Homo sapien
ccttctaatgtgtttacgcatttctaggacaca

SEQ ID NO: 1033900 - DNA, 33 bp, Homo sapien
ccttctaatgtgtttatgcatttctaggacaca

SEQ ID NO: 1033901 - DNA, 33 bp, Homo sapien
atgtccatactaccgaaaaaagtagaatatttt

SEQ ID NO: 1033902 - DNA, 33 bp, Homo sapien
atgtccatactaccgataaaagtagaatatttt

SEQ ID NO: 1033903 - DNA, 33 bp, Homo sapien
taaatacatttcaaaaattgcttactctctctc

SEQ ID NO: 1033904 - DNA, 33 bp, Homo sapien
taaatacatttcaaaagttgcttactctctctc

SEQ ID NO: 1033905 - DNA, 33 bp, Homo sapien
ttggggccaggaaccagccttagtattcaggca

SEQ ID NO: 1033906 - DNA, 33 bp, Homo sapien
ttggggccaggaaccatccttagtattcaggca

SEQ ID NO: 1033907 - DNA, 33 bp, Homo sapien
gagacagtattccaaacgtggatggagaaaaga

SEQ ID NO: 1033908 - DNA, 33 bp, Homo sapien
gagacagtattccaaatgtggatggagaaaaga

SEQ ID NO: 1033909 - DNA, 33 bp, Homo sapien
taacaaagctttgagcaaaagttctaaagtaca

SEQ ID NO: 1033910 - DNA, 33 bp, Homo sapien
taacaaagctttgagcgaaagttctaaagtaca

SEQ ID NO: 1033911 - DNA, 33 bp, Homo sapien
atggttataaattccaagggaacactctaaacc

SEQ ID NO: 1033912 - DNA, 33 bp, Homo sapien
atggttataaattccaggggaacactctaaacc

SEQ ID NO: 1033913 - DNA, 33 bp, Homo sapien
gctagagggggaagagcaatagaagggtgtgag

SEQ ID NO: 1033914 - DNA, 33 bp, Homo sapien
gctagagggggaagaggaatagaagggtgtgag

SEQ ID NO: 1033915 - DNA, 33 bp, Homo sapien
acatatcttgaagaacactaattttaccactaa

SEQ ID NO: 1033916 - DNA, 33 bp, Homo sapien
acatatcttgaagaacgctaattttaccactaa

SEQ ID NO: 1033917 - DNA, 33 bp, Homo sapien
ctgctcatatttatctaaagcagggaatgatgt

SEQ ID NO: 1033918 - DNA, 33 bp, Homo sapien
ctgctcatatttatctgaagcagggaatgatgt

SEQ ID NO: 1033919 - DNA, 33 bp, Homo sapien
cccagaccagtgtgaactgagttataaaaatat

SEQ ID NO: 1033920 - DNA, 33 bp, Homo sapien
cccagaccagtgtgaattgagttataaaaatat

SEQ ID NO: 1033921 - DNA, 33 bp, Homo sapien
tattccagaataaatcaaggtgaagatttggaa

SEQ ID NO: 1033922 - DNA, 33 bp, Homo sapien
tattccagaataaatcgaggtgaagatttggaa

SEQ ID NO: 1033923 - DNA, 33 bp, Homo sapien
tacaggtttcttaatacaccatcggttcctttt

SEQ ID NO: 1033924 - DNA, 33 bp, Homo sapien
tacaggtttcttaatataccatcggttcctttt

SEQ ID NO: 1033925 - DNA, 33 bp, Homo sapien
gattgctaggacaagaatctctttctgattttc

SEQ ID NO: 1033926 - DNA, 33 bp, Homo sapien
gattgctaggacaagagtctctttctgattttc

SEQ ID NO: 1033927 - DNA, 33 bp, Homo sapien
ccctttagcaattcttaaaaaatttagctgaat

SEQ ID NO: 1033928 - DNA, 33 bp, Homo sapien
ccctttagcaattcttcaaaaatttagctgaat

SEQ ID NO: 1033929 - DNA, 33 bp, Homo sapien
ggaggcaggagatggacaatgcaagactggtgg

SEQ ID NO: 1033930 - DNA, 33 bp, Homo sapien
ggaggcaggagatggagaatgcaagactggtgg

SEQ ID NO: 1033931 - DNA, 33 bp, Homo sapien
ctcctaatgaccaggaagaagtcagttgtcaaa

SEQ ID NO: 1033932 - DNA, 33 bp, Homo sapien
ctcctaatgaccaggaggaagtcagttgtcaaa

SEQ ID NO: 1033933 - DNA, 33 bp, Homo sapien
gatattactatacgcacgacactattatctgca

SEQ ID NO: 1033934 - DNA, 33 bp, Homo sapien
gatattactatacgcatgacactattatctgca

SEQ ID NO: 1033935 - DNA, 33 bp, Homo sapien
gaaagcctccgagtacacggtcagatgtaatca

SEQ ID NO: 1033936 - DNA, 33 bp, Homo sapien
gaaagcctccgagtacgcggtcagatgtaatca

SEQ ID NO: 1033937 - DNA, 33 bp, Homo sapien
aaatattcttctctcaagttttacaccaacctt

SEQ ID NO: 1033938 - DNA, 33 bp, Homo sapien
aaatattcttctctcaggttttacaccaacctt

SEQ ID NO: 1033939 - DNA, 33 bp, Homo sapien
aagtttttcttaagcacaccattttcctctttg

SEQ ID NO: 1033940 - DNA, 33 bp, Homo sapien
aagtttttcttaagcagaccattttcctctttg

SEQ ID NO: 1033941 - DNA, 33 bp, Homo sapien
gtttcatgcttccaagcagggactttatccttt

SEQ ID NO: 1033942 - DNA, 33 bp, Homo sapien
gtttcatgcttccaagtagggactttatccttt

SEQ ID NO: 1033943 - DNA, 33 bp, Homo sapien
cttgataggtatttaccgccttgctgtggggca

SEQ ID NO: 1033944 - DNA, 33 bp, Homo sapien
cttgataggtatttactgccttgctgtggggca

SEQ ID NO: 1033945 - DNA, 33 bp, Homo sapien
ttcattagtgggtccaatcaacattgctaaaag

SEQ ID NO: 1033946 - DNA, 33 bp, Homo sapien
ttcattagtgggtccagtcaacattgctaaaag

SEQ ID NO: 1033947 - DNA, 33 bp, Homo sapien
tattcaccaaagagcactcaagtcctgtgaaat

SEQ ID NO: 1033948 - DNA, 33 bp, Homo sapien
tattcaccaaagagcattcaagtcctgtgaaat

SEQ ID NO: 1033949 - DNA, 33 bp, Homo sapien
aagtgtgctacactacccaaccatgaacaagga

SEQ ID NO: 1033950 - DNA, 33 bp, Homo sapien
aagtgtgctacactacgcaaccatgaacaagga

SEQ ID NO: 1033951 - DNA, 33 bp, Homo sapien
atgttgagtatttttccaaatctttgttggaca

SEQ ID NO: 1033952 - DNA, 33 bp, Homo sapien
atgttgagtatttttctaaatctttgttggaca

SEQ ID NO: 1033953 - DNA, 33 bp, Homo sapien
tttacttcatccataacagagtgggacgcattg

SEQ ID NO: 1033954 - DNA, 33 bp, Homo sapien
tttacttcatccataatagagtgggacgcattg

SEQ ID NO: 1033955 - DNA, 33 bp, Homo sapien
gctaaatacttgaaccaacaaaaatattcgtca

SEQ ID NO: 1033956 - DNA, 33 bp, Homo sapien
gctaaatacttgaaccgacaaaaatattcgtca

SEQ ID NO: 1033957 - DNA, 33 bp, Homo sapien
aaacagtgacaggttacagtgataggcactgat

SEQ ID NO: 1033958 - DNA, 33 bp, Homo sapien
aaacagtgacaggttatagtgataggcactgat

SEQ ID NO: 1033959 - DNA, 33 bp, Homo sapien
actccaatcagaatcaaattacaatggaaaaga

SEQ ID NO: 1033960 - DNA, 33 bp, Homo sapien
actccaatcagaatcacattacaatggaaaaga

SEQ ID NO: 1033961 - DNA, 33 bp, Homo sapien
gtaggttttatcattaacccaattctgtacaca

SEQ ID NO: 1033962 - DNA, 33 bp, Homo sapien
gtaggttttatcattatcccaattctgtacaca

SEQ ID NO: 1033963 - DNA, 33 bp, Homo sapien
atagatagctgagtgacgatgtggataatattt

SEQ ID NO: 1033964 - DNA, 33 bp, Homo sapien
atagatagctgagtgatgatgtggataatattt

SEQ ID NO: 1033965 - DNA, 33 bp, Homo sapien
ccaccaaaaatctaaagaggaaaaatgcacaca

SEQ ID NO: 1033966 - DNA, 33 bp, Homo sapien
ccaccaaaaatctaaataggaaaaatgcacaca

SEQ ID NO: 1033967 - DNA, 33 bp, Homo sapien
tttgatcagagatagaacttgtgtagtggtctt

SEQ ID NO: 1033968 - DNA, 33 bp, Homo sapien
tttgatcagagatagatcttgtgtagtggtctt

SEQ ID NO: 1033969 - DNA, 33 bp, Homo sapien
tgtcatatgtatgtgactaattcaatgccttcc

SEQ ID NO: 1033970 - DNA, 33 bp, Homo sapien
tgtcatatgtatgtgattaattcaatgccttcc

SEQ ID NO: 1033971 - DNA, 33 bp, Homo sapien
cagcaattggaatcgcaatttggttaagcttat

SEQ ID NO: 1033972 - DNA, 33 bp, Homo sapien
cagcaattggaatcgctatttggttaagcttat

SEQ ID NO: 1033973 - DNA, 33 bp, Homo sapien
cattagccatgacctaccgttaatttcctgttt

SEQ ID NO: 1033974 - DNA, 33 bp, Homo sapien
cattagccatgacctatcgttaatttcctgttt

SEQ ID NO: 1033975 - DNA, 33 bp, Homo sapien
attggacctccccataagatgctgtaataagcc

SEQ ID NO: 1033976 - DNA, 33 bp, Homo sapien
attggacctccccataggatgctgtaataagcc

SEQ ID NO: 1033977 - DNA, 33 bp, Homo sapien
gtgaaaatgtgcttggcaatgagcaaggaatag

SEQ ID NO: 1033978 - DNA, 33 bp, Homo sapien
gtgaaaatgtgcttggtaatgagcaaggaatag

SEQ ID NO: 1033979 - DNA, 33 bp, Homo sapien
gactcccaaatgctaactgtggacccactggag

SEQ ID NO: 1033980 - DNA, 33 bp, Homo sapien
gactcccaaatgctaattgtggacccactggag

SEQ ID NO: 1033981 - DNA, 33 bp, Homo sapien
atatccattataccagactgcctccattgtgga

SEQ ID NO: 1033982 - DNA, 33 bp, Homo sapien
atatccattataccaggctgcctccattgtgga

SEQ ID NO: 1033983 - DNA, 33 bp, Homo sapien
tcttgatttggttctcccatgaatgttactagt

SEQ ID NO: 1033984 - DNA, 33 bp, Homo sapien
tcttgatttggttctctcatgaatgttactagt

SEQ ID NO: 1033985 - DNA, 33 bp, Homo sapien
ttttcaactctaaaaaattggcttgcttcttta

SEQ ID NO: 1033986 - DNA, 33 bp, Homo sapien
ttttcaactctaaaaatttggcttgcttcttta

SEQ ID NO: 1033987 - DNA, 33 bp, Homo sapien
gagctcagataactaaatgtatgtatatataca

SEQ ID NO: 1033988 - DNA, 33 bp, Homo sapien
gagctcagataactaagtgtatgtatatataca

SEQ ID NO: 1033989 - DNA, 33 bp, Homo sapien
acatcaatgattgacaagggtaaaagagagaaa

SEQ ID NO: 1033990 - DNA, 33 bp, Homo sapien
acatcaatgattgacatgggtaaaagagagaaa

SEQ ID NO: 1033991 - DNA, 33 bp, Homo sapien
cttcccaattgcgataacttttcttcgtccctg

SEQ ID NO: 1033992 - DNA, 33 bp, Homo sapien
cttcccaattgcgataccttttcttcgtccctg

SEQ ID NO: 1033993 - DNA, 33 bp, Homo sapien
aacacaggcgatagccaagtagtgcttatagct

SEQ ID NO: 1033994 - DNA, 33 bp, Homo sapien
aacacaggcgatagcccagtagtgcttatagct

SEQ ID NO: 1033995 - DNA, 33 bp, Homo sapien
cagctcccagattaaacttctaaacacagcctg

SEQ ID NO: 1033996 - DNA, 33 bp, Homo sapien
cagctcccagattaaatttctaaacacagcctg

SEQ ID NO: 1033997 - DNA, 33 bp, Homo sapien
tagtgaggagataagaaagaagggtagaaaggt

SEQ ID NO: 1033998 - DNA, 33 bp, Homo sapien
tagtgaggagataagagagaagggtagaaaggt

SEQ ID NO: 1033999 - DNA, 33 bp, Homo sapien
tatgtacattgctgaaattataactgctgcgta

SEQ ID NO: 1034000 - DNA, 33 bp, Homo sapien
tatgtacattgctgaatttataactgctgcgta

SEQ ID NO: 1034001 - DNA, 33 bp, Homo sapien
aactgagaatgctgaggataggatgatttagga

SEQ ID NO: 1034002 - DNA, 33 bp, Homo sapien
aactgagaatgctgagtataggatgatttagga

SEQ ID NO: 1034003 - DNA, 33 bp, Homo sapien
ttcctagagtcaaaagaaagatgtataaatgca

SEQ ID NO: 1034004 - DNA, 33 bp, Homo sapien
ttcctagagtcaaaagcaagatgtataaatgca

SEQ ID NO: 1034005 - DNA, 33 bp, Homo sapien
gaggtaataagtggacaggaacatgaagtcctc

SEQ ID NO: 1034006 - DNA, 33 bp, Homo sapien
gaggtaataagtggacgggaacatgaagtcctc

SEQ ID NO: 1034007 - DNA, 33 bp, Homo sapien
acaaatggagtgatgacgcagaatagagaatct

SEQ ID NO: 1034008 - DNA, 33 bp, Homo sapien
acaaatggagtgatgatgcagaatagagaatct

SEQ ID NO: 1034009 - DNA, 33 bp, Homo sapien
tatctttacagtattaggttttccactcagtaa

SEQ ID NO: 1034010 - DNA, 33 bp, Homo sapien
tatctttacagtattatgttttccactcagtaa

SEQ ID NO: 1034011 - DNA, 33 bp, Homo sapien
tagtttacttgcaatgccataataaataccaca

SEQ ID NO: 1034012 - DNA, 33 bp, Homo sapien
tagtttacttgcaatgtcataataaataccaca

SEQ ID NO: 1034013 - DNA, 33 bp, Homo sapien
atcatggaattggcagactctaagatctccaaa

SEQ ID NO: 1034014 - DNA, 33 bp, Homo sapien
atcatggaattggcagcctctaagatctccaaa

SEQ ID NO: 1034015 - DNA, 33 bp, Homo sapien
aattcatgtgtggtccagagagatggcctgagc

SEQ ID NO: 1034016 - DNA, 33 bp, Homo sapien
aattcatgtgtggtccggagagatggcctgagc

SEQ ID NO: 1034017 - DNA, 33 bp, Homo sapien
ctgcaagttgagttacagataatgtcagtcact

SEQ ID NO: 1034018 - DNA, 33 bp, Homo sapien
ctgcaagttgagttacggataatgtcagtcact

SEQ ID NO: 1034019 - DNA, 33 bp, Homo sapien
aaaactgagaaatagaagatttgacacatggtc

SEQ ID NO: 1034020 - DNA, 33 bp, Homo sapien
aaaactgagaaatagacgatttgacacatggtc

SEQ ID NO: 1034021 - DNA, 33 bp, Homo sapien
aaagtgatctgaataaactctttcatgatttaa

SEQ ID NO: 1034022 - DNA, 33 bp, Homo sapien
aaagtgatctgaataacctctttcatgatttaa

SEQ ID NO: 1034023 - DNA, 33 bp, Homo sapien
tgattaaataaaatgcccaaatgaggcacacac

SEQ ID NO: 1034024 - DNA, 33 bp, Homo sapien
tgattaaataaaatgctcaaatgaggcacacac

SEQ ID NO: 1034025 - DNA, 33 bp, Homo sapien
ttctcctgaaattgaaagtaacaacaagactgt

SEQ ID NO: 1034026 - DNA, 33 bp, Homo sapien
ttctcctgaaattgaaggtaacaacaagactgt

SEQ ID NO: 1034027 - DNA, 33 bp, Homo sapien
cctccttcagcttttgaatacgtgccgtttcct

SEQ ID NO: 1034028 - DNA, 33 bp, Homo sapien
cctccttcagcttttggatacgtgccgtttcct

SEQ ID NO: 1034029 - DNA, 33 bp, Homo sapien
gaattttatttgatccgcaagtctattctacct

SEQ ID NO: 1034030 - DNA, 33 bp, Homo sapien
gaattttatttgatcctcaagtctattctacct

SEQ ID NO: 1034031 - DNA, 33 bp, Homo sapien
atccattgttgtagtacgatattcccaaatgta

SEQ ID NO: 1034032 - DNA, 33 bp, Homo sapien
atccattgttgtagtatgatattcccaaatgta

SEQ ID NO: 1034033 - DNA, 33 bp, Homo sapien
gttaagtggctacaataattaatgcagatccaa

SEQ ID NO: 1034034 - DNA, 33 bp, Homo sapien
gttaagtggctacaattattaatgcagatccaa

SEQ ID NO: 1034035 - DNA, 33 bp, Homo sapien
aaccacataacatcaaatgcatctggttttaca

SEQ ID NO: 1034036 - DNA, 33 bp, Homo sapien
aaccacataacatcaattgcatctggttttaca

SEQ ID NO: 1034037 - DNA, 33 bp, Homo sapien
gatcatgttctgttaaaaatgatgacggctgtg

SEQ ID NO: 1034038 - DNA, 33 bp, Homo sapien
gatcatgttctgttaacaatgatgacggctgtg

SEQ ID NO: 1034039 - DNA, 33 bp, Homo sapien
gtctccattaatgcaacgttcactcactgctga

SEQ ID NO: 1034040 - DNA, 33 bp, Homo sapien
gtctccattaatgcaatgttcactcactgctga

SEQ ID NO: 1034041 - DNA, 33 bp, Homo sapien
ttcttaacctatttcaatcatctggccaaaccc

SEQ ID NO: 1034042 - DNA, 33 bp, Homo sapien
ttcttaacctatttcagtcatctggccaaaccc

SEQ ID NO: 1034043 - DNA, 33 bp, Homo sapien
taaatgttctccaaaacactgctgtcactgaaa

SEQ ID NO: 1034044 - DNA, 33 bp, Homo sapien
taaatgttctccaaaatactgctgtcactgaaa

SEQ ID NO: 1034045 - DNA, 33 bp, Homo sapien
tatccatgtacctatcactgcactggtttatta

SEQ ID NO: 1034046 - DNA, 33 bp, Homo sapien
tatccatgtacctatcgctgcactggtttatta

SEQ ID NO: 1034047 - DNA, 33 bp, Homo sapien
gttagaattgcagatgcacactatagtttaggg

SEQ ID NO: 1034048 - DNA, 33 bp, Homo sapien
gttagaattgcagatgtacactatagtttaggg

SEQ ID NO: 1034049 - DNA, 33 bp, Homo sapien
ttatcagtatatttgactaaagagctagataac

SEQ ID NO: 1034050 - DNA, 33 bp, Homo sapien
ttatcagtatatttgagtaaagagctagataac

SEQ ID NO: 1034051 - DNA, 33 bp, Homo sapien
ggaatgtaagtggagcaaatagggtgtcaatac

SEQ ID NO: 1034052 - DNA, 33 bp, Homo sapien
ggaatgtaagtggagcgaatagggtgtcaatac

SEQ ID NO: 1034053 - DNA, 33 bp, Homo sapien
atggtgtaagccataaatgcagagacaatgagt

SEQ ID NO: 1034054 - DNA, 33 bp, Homo sapien
atggtgtaagccataattgcagagacaatgagt

SEQ ID NO: 1034055 - DNA, 33 bp, Homo sapien
gtctaattgggcaagcagacttgacataatgtg

SEQ ID NO: 1034056 - DNA, 33 bp, Homo sapien
gtctaattgggcaagcggacttgacataatgtg

SEQ ID NO: 1034057 - DNA, 33 bp, Homo sapien
gcatttaaacttacaagtaaagcccagattgca

SEQ ID NO: 1034058 - DNA, 33 bp, Homo sapien
gcatttaaacttacaattaaagcccagattgca

SEQ ID NO: 1034059 - DNA, 33 bp, Homo sapien
tcgaaagaacaatctccaggtaaagtggtagga

SEQ ID NO: 1034060 - DNA, 33 bp, Homo sapien
tcgaaagaacaatctctaggtaaagtggtagga

SEQ ID NO: 1034061 - DNA, 33 bp, Homo sapien
aagaatagtgacaataaaaagatacctctcaat

SEQ ID NO: 1034062 - DNA, 33 bp, Homo sapien
aagaatagtgacaatataaagatacctctcaat

SEQ ID NO: 1034063 - DNA, 33 bp, Homo sapien
ttcaaacacctgaaacaaagctaaaaggaaata

SEQ ID NO: 1034064 - DNA, 33 bp, Homo sapien
ttcaaacacctgaaaccaagctaaaaggaaata

SEQ ID NO: 1034065 - DNA, 33 bp, Homo sapien
cactcagagtgtacatgataagattagaagtat

SEQ ID NO: 1034066 - DNA, 33 bp, Homo sapien
cactcagagtgtacattataagattagaagtat

SEQ ID NO: 1034067 - DNA, 33 bp, Homo sapien
ccatggatgaggatagcatatgtaactgctcac

SEQ ID NO: 1034068 - DNA, 33 bp, Homo sapien
ccatggatgaggatagtatatgtaactgctcac

SEQ ID NO: 1034069 - DNA, 33 bp, Homo sapien
cttaaaaaaaatagtaacagctaccttgactgg

SEQ ID NO: 1034070 - DNA, 33 bp, Homo sapien
cttaaaaaaaatagtagcagctaccttgactgg

SEQ ID NO: 1034071 - DNA, 33 bp, Homo sapien
gcctcaccttttctgaacaccctatcatctgct

SEQ ID NO: 1034072 - DNA, 33 bp, Homo sapien
gcctcaccttttctgaccaccctatcatctgct

SEQ ID NO: 1034073 - DNA, 33 bp, Homo sapien
cttaataaaccccctgcattcatgcttcaagtc

SEQ ID NO: 1034074 - DNA, 33 bp, Homo sapien
cttaataaaccccctgtattcatgcttcaagtc

SEQ ID NO: 1034075 - DNA, 33 bp, Homo sapien
gtgtcatctttacagtcaaattgattcaggtga

SEQ ID NO: 1034076 - DNA, 33 bp, Homo sapien
gtgtcatctttacagttaaattgattcaggtga

SEQ ID NO: 1034077 - DNA, 33 bp, Homo sapien
gcattgattggaaaaaaaatgtgagactgcaac

SEQ ID NO: 1034078 - DNA, 33 bp, Homo sapien
gcattgattggaaaaagaatgtgagactgcaac

SEQ ID NO: 1034079 - DNA, 33 bp, Homo sapien
acccagaaaatgggaaataaaggtgagccaaat

SEQ ID NO: 1034080 - DNA, 33 bp, Homo sapien
acccagaaaatgggaagtaaaggtgagccaaat

SEQ ID NO: 1034081 - DNA, 33 bp, Homo sapien
gagttgactccacagaatactatgaaatacaat

SEQ ID NO: 1034082 - DNA, 33 bp, Homo sapien
gagttgactccacagagtactatgaaatacaat

SEQ ID NO: 1034083 - DNA, 33 bp, Homo sapien
tgtagatgttgctatgaattcagaaactgctcc

SEQ ID NO: 1034084 - DNA, 33 bp, Homo sapien
tgtagatgttgctatgcattcagaaactgctcc

SEQ ID NO: 1034085 - DNA, 33 bp, Homo sapien
gttgaaacatggtgacacagaatccaggagtga

SEQ ID NO: 1034086 - DNA, 33 bp, Homo sapien
gttgaaacatggtgacgcagaatccaggagtga

SEQ ID NO: 1034087 - DNA, 33 bp, Homo sapien
ccagtgagtccaaaaaatgaattttgattactt

SEQ ID NO: 1034088 - DNA, 33 bp, Homo sapien
ccagtgagtccaaaaattgaattttgattactt

SEQ ID NO: 1034089 - DNA, 33 bp, Homo sapien
aactcttctctctttaagtcagggctctacata

SEQ ID NO: 1034090 - DNA, 33 bp, Homo sapien
aactcttctctctttaggtcagggctctacata

SEQ ID NO: 1034091 - DNA, 33 bp, Homo sapien
tatctgcaaaacgaaaaaaactgaagcacaaca

SEQ ID NO: 1034092 - DNA, 33 bp, Homo sapien
tatctgcaaaacgaaataaactgaagcacaaca

SEQ ID NO: 1034093 - DNA, 33 bp, Homo sapien
agcatgaaaggtcaccaatcacatattagcata

SEQ ID NO: 1034094 - DNA, 33 bp, Homo sapien
agcatgaaaggtcaccgatcacatattagcata

SEQ ID NO: 1034095 - DNA, 33 bp, Homo sapien
tttaaaccaagcttaactcaaagcaaggtcctt

SEQ ID NO: 1034096 - DNA, 33 bp, Homo sapien
tttaaaccaagcttaattcaaagcaaggtcctt

SEQ ID NO: 1034097 - DNA, 33 bp, Homo sapien
acattcactttcaaagaatttccaacttaaagc

SEQ ID NO: 1034098 - DNA, 33 bp, Homo sapien
acattcactttcaaaggatttccaacttaaagc

SEQ ID NO: 1034099 - DNA, 33 bp, Homo sapien
ctagtttggttgatgaagtagagcataatgcca

SEQ ID NO: 1034100 - DNA, 33 bp, Homo sapien
ctagtttggttgatgaggtagagcataatgcca

SEQ ID NO: 1034101 - DNA, 33 bp, Homo sapien
tgtctgtgacagataccgatttgcagtctgtgc

SEQ ID NO: 1034102 - DNA, 33 bp, Homo sapien
tgtctgtgacagatactgatttgcagtctgtgc

SEQ ID NO: 1034103 - DNA, 33 bp, Homo sapien
tcagggaagtaatctacaagacgcttttcagtt

SEQ ID NO: 1034104 - DNA, 33 bp, Homo sapien
tcagggaagtaatctataagacgcttttcagtt

SEQ ID NO: 1034105 - DNA, 33 bp, Homo sapien
aatccaaatgaagaacactctatatctatatat

SEQ ID NO: 1034106 - DNA, 33 bp, Homo sapien
aatccaaatgaagaactctctatatctatatat

SEQ ID NO: 1034107 - DNA, 33 bp, Homo sapien
agaaagaaggatattaaaacacagtgtgcaaag

SEQ ID NO: 1034108 - DNA, 33 bp, Homo sapien
agaaagaaggatattagaacacagtgtgcaaag

SEQ ID NO: 1034109 - DNA, 33 bp, Homo sapien
tctcaggtccagaaaccggccaaatcatggcat

SEQ ID NO: 1034110 - DNA, 33 bp, Homo sapien
tctcaggtccagaaactggccaaatcatggcat

SEQ ID NO: 1034111 - DNA, 33 bp, Homo sapien
attcaaaaaaatctgcaaaacttattctccaac

SEQ ID NO: 1034112 - DNA, 33 bp, Homo sapien
attcaaaaaaatctgcgaaacttattctccaac

SEQ ID NO: 1034113 - DNA, 33 bp, Homo sapien
agaggataggaaggacagactgtattgcttaca

SEQ ID NO: 1034114 - DNA, 33 bp, Homo sapien
agaggataggaaggacggactgtattgcttaca

SEQ ID NO: 1034115 - DNA, 33 bp, Homo sapien
tcacagttcttctgaaagctgacaaggacctgt

SEQ ID NO: 1034116 - DNA, 33 bp, Homo sapien
tcacagttcttctgaacgctgacaaggacctgt

SEQ ID NO: 1034117 - DNA, 33 bp, Homo sapien
ctgtttttatacatcaataattgacaagcaaat

SEQ ID NO: 1034118 - DNA, 33 bp, Homo sapien
ctgtttttatacatcagtaattgacaagcaaat

SEQ ID NO: 1034119 - DNA, 33 bp, Homo sapien
ccccaacatctgtaaaacatgcactgggtggct

SEQ ID NO: 1034120 - DNA, 33 bp, Homo sapien
ccccaacatctgtaaaccatgcactgggtggct

SEQ ID NO: 1034121 - DNA, 33 bp, Homo sapien
taaggtcatatacacaaaactcatagaaacatg

SEQ ID NO: 1034122 - DNA, 33 bp, Homo sapien
taaggtcatatacacagaactcatagaaacatg

SEQ ID NO: 1034123 - DNA, 33 bp, Homo sapien
ggcatattgtgccttacgcatcagtcatgtcgt

SEQ ID NO: 1034124 - DNA, 33 bp, Homo sapien
ggcatattgtgccttatgcatcagtcatgtcgt

SEQ ID NO: 1034125 - DNA, 33 bp, Homo sapien
atttaatccaaaatgacgaaacaggtaattcca

SEQ ID NO: 1034126 - DNA, 33 bp, Homo sapien
atttaatccaaaatgatgaaacaggtaattcca

SEQ ID NO: 1034127 - DNA, 33 bp, Homo sapien
ccaaaattgattagacagcaatttcctcttcct

SEQ ID NO: 1034128 - DNA, 33 bp, Homo sapien
ccaaaattgattagacggcaatttcctcttcct

SEQ ID NO: 1034129 - DNA, 33 bp, Homo sapien
tgtccaaagagacacactcaaaaataagatcaa

SEQ ID NO: 1034130 - DNA, 33 bp, Homo sapien
tgtccaaagagacacagtcaaaaataagatcaa

SEQ ID NO: 1034131 - DNA, 33 bp, Homo sapien
aaaccaagtgtctaaaactaacaggcaaatgtg

SEQ ID NO: 1034132 - DNA, 33 bp, Homo sapien
aaaccaagtgtctaaacctaacaggcaaatgtg

SEQ ID NO: 1034133 - DNA, 33 bp, Homo sapien
aaataggcagatgtaactgatttgagaaaaatg

SEQ ID NO: 1034134 - DNA, 33 bp, Homo sapien
aaataggcagatgtaattgatttgagaaaaatg

SEQ ID NO: 1034135 - DNA, 33 bp, Homo sapien
ttcagatctaaacttacagttcaatgaatttgc

SEQ ID NO: 1034136 - DNA, 33 bp, Homo sapien
ttcagatctaaacttagagttcaatgaatttgc

SEQ ID NO: 1034137 - DNA, 33 bp, Homo sapien
ccaggtcatcaatacaatgataacatcaacgtt

SEQ ID NO: 1034138 - DNA, 33 bp, Homo sapien
ccaggtcatcaatacagtgataacatcaacgtt

SEQ ID NO: 1034139 - DNA, 33 bp, Homo sapien
ttccccacttgtccaaagaagacaaactagaga

SEQ ID NO: 1034140 - DNA, 33 bp, Homo sapien
ttccccacttgtccaacgaagacaaactagaga

SEQ ID NO: 1034141 - DNA, 33 bp, Homo sapien
tcataatatcaggtaaccttaaccattatcttg

SEQ ID NO: 1034142 - DNA, 33 bp, Homo sapien
tcataatatcaggtaatcttaaccattatcttg

SEQ ID NO: 1034143 - DNA, 33 bp, Homo sapien
accccaaacagcctaactgtgttgttacccact

SEQ ID NO: 1034144 - DNA, 33 bp, Homo sapien
accccaaacagcctaattgtgttgttacccact

SEQ ID NO: 1034145 - DNA, 33 bp, Homo sapien
caggctgacacggcacaatacagagatgattct

SEQ ID NO: 1034146 - DNA, 33 bp, Homo sapien
caggctgacacggcaccatacagagatgattct

SEQ ID NO: 1034147 - DNA, 33 bp, Homo sapien
gtatgaactccgttgaccagaatctgaaagggg

SEQ ID NO: 1034148 - DNA, 33 bp, Homo sapien
gtatgaactccgttgatcagaatctgaaagggg

SEQ ID NO: 1034149 - DNA, 33 bp, Homo sapien
ggaaatatctgcaaggaatctggtggtgtaacc

SEQ ID NO: 1034150 - DNA, 33 bp, Homo sapien
ggaaatatctgcaagggatctggtggtgtaacc

SEQ ID NO: 1034151 - DNA, 33 bp, Homo sapien
aatacaaaggaccgtacgagactattgtaataa

SEQ ID NO: 1034152 - DNA, 33 bp, Homo sapien
aatacaaaggaccgtatgagactattgtaataa

SEQ ID NO: 1034153 - DNA, 33 bp, Homo sapien
ttgctatagtcaccccactgtgtaatagaacac

SEQ ID NO: 1034154 - DNA, 33 bp, Homo sapien
ttgctatagtcaccccgctgtgtaatagaacac

SEQ ID NO: 1034155 - DNA, 33 bp, Homo sapien
tgcaagagggataccactagtattcagttggtc

SEQ ID NO: 1034156 - DNA, 33 bp, Homo sapien
tgcaagagggataccattagtattcagttggtc

SEQ ID NO: 1034157 - DNA, 33 bp, Homo sapien
atcctttgactttgaaaccactatatattttta

SEQ ID NO: 1034158 - DNA, 33 bp, Homo sapien
atcctttgactttgaatccactatatattttta

SEQ ID NO: 1034159 - DNA, 33 bp, Homo sapien
accttaagttttacacactgtcaaataaacacc

SEQ ID NO: 1034160 - DNA, 33 bp, Homo sapien
accttaagttttacacgctgtcaaataaacacc

SEQ ID NO: 1034161 - DNA, 33 bp, Homo sapien
catctagtctctgataataccattcctgtaatc

SEQ ID NO: 1034162 - DNA, 33 bp, Homo sapien
catctagtctctgatagtaccattcctgtaatc

SEQ ID NO: 1034163 - DNA, 33 bp, Homo sapien
aagtttggcctctttaaaaagtgagagtccagg

SEQ ID NO: 1034164 - DNA, 33 bp, Homo sapien
aagtttggcctctttagaaagtgagagtccagg

SEQ ID NO: 1034165 - DNA, 33 bp, Homo sapien
gaaaagttacagagggaccaattgatattcttt

SEQ ID NO: 1034166 - DNA, 33 bp, Homo sapien
gaaaagttacagagggtccaattgatattcttt

SEQ ID NO: 1034167 - DNA, 33 bp, Homo sapien
agaatgtgactgggtacacaaggcctttaaaga

SEQ ID NO: 1034168 - DNA, 33 bp, Homo sapien
agaatgtgactgggtagacaaggcctttaaaga

SEQ ID NO: 1034169 - DNA, 33 bp, Homo sapien
aaccagaagtttaaaaccactgcaatgcaattt

SEQ ID NO: 1034170 - DNA, 33 bp, Homo sapien
aaccagaagtttaaaatcactgcaatgcaattt

SEQ ID NO: 1034171 - DNA, 33 bp, Homo sapien
tttaaaaatggtaaagaatctaagtgtctatag

SEQ ID NO: 1034172 - DNA, 33 bp, Homo sapien
tttaaaaatggtaaaggatctaagtgtctatag

SEQ ID NO: 1034173 - DNA, 33 bp, Homo sapien
cttgtcttccatcccaataacattcagtgcagt

SEQ ID NO: 1034174 - DNA, 33 bp, Homo sapien
cttgtcttccatcccagtaacattcagtgcagt

SEQ ID NO: 1034175 - DNA, 33 bp, Homo sapien
aatatattttaaaaccacaatgttcagattttc

SEQ ID NO: 1034176 - DNA, 33 bp, Homo sapien
aatatattttaaaaccgcaatgttcagattttc

SEQ ID NO: 1034177 - DNA, 33 bp, Homo sapien
aactaggcaaagcagaaaccttgaaaagtccac

SEQ ID NO: 1034178 - DNA, 33 bp, Homo sapien
aactaggcaaagcagacaccttgaaaagtccac

SEQ ID NO: 1034179 - DNA, 33 bp, Homo sapien
atacttagaacaaactcaaagctgatgcagtta

SEQ ID NO: 1034180 - DNA, 33 bp, Homo sapien
atacttagaacaaactgaaagctgatgcagtta

SEQ ID NO: 1034181 - DNA, 33 bp, Homo sapien
ttaacccaggtatcataagcagcagattattta

SEQ ID NO: 1034182 - DNA, 33 bp, Homo sapien
ttaacccaggtatcattagcagcagattattta

SEQ ID NO: 1034183 - DNA, 33 bp, Homo sapien
taaaggtaggcacatacactggtggaacagaat

SEQ ID NO: 1034184 - DNA, 33 bp, Homo sapien
taaaggtaggcacatagactggtggaacagaat

SEQ ID NO: 1034185 - DNA, 33 bp, Homo sapien
atgtgctacaacataaatgattcttgaaaacat

SEQ ID NO: 1034186 - DNA, 33 bp, Homo sapien
atgtgctacaacataagtgattcttgaaaacat

SEQ ID NO: 1034187 - DNA, 33 bp, Homo sapien
ccaactacagatatgcaaatgagatcaacaaaa

SEQ ID NO: 1034188 - DNA, 33 bp, Homo sapien
ccaactacagatatgcgaatgagatcaacaaaa

SEQ ID NO: 1034189 - DNA, 33 bp, Homo sapien
atatcttgcagaaatcccttatgtttacacaaa

SEQ ID NO: 1034190 - DNA, 33 bp, Homo sapien
atatcttgcagaaatctcttatgtttacacaaa

SEQ ID NO: 1034191 - DNA, 33 bp, Homo sapien
cctctttgggttcttcaaaattctaacttgtta

SEQ ID NO: 1034192 - DNA, 33 bp, Homo sapien
cctctttgggttcttcgaaattctaacttgtta

SEQ ID NO: 1034193 - DNA, 33 bp, Homo sapien
aatggggcagctattaaggaaacagtatggagg

SEQ ID NO: 1034194 - DNA, 33 bp, Homo sapien
aatggggcagctattacggaaacagtatggagg

SEQ ID NO: 1034195 - DNA, 33 bp, Homo sapien
aagcaaaagtaacttacaatggtttagaggcgc

SEQ ID NO: 1034196 - DNA, 33 bp, Homo sapien
aagcaaaagtaacttagaatggtttagaggcgc

SEQ ID NO: 1034197 - DNA, 33 bp, Homo sapien
tgtgttgtcataggagcaagtaaaattggacag

SEQ ID NO: 1034198 - DNA, 33 bp, Homo sapien
tgtgttgtcataggaggaagtaaaattggacag

SEQ ID NO: 1034199 - DNA, 33 bp, Homo sapien
aaccagactaagcccagctttatcagttagcag

SEQ ID NO: 1034200 - DNA, 33 bp, Homo sapien
aaccagactaagcccatctttatcagttagcag

SEQ ID NO: 1034201 - DNA, 33 bp, Homo sapien
gggctggccctaaaaaagcatggtaagttctca

SEQ ID NO: 1034202 - DNA, 33 bp, Homo sapien
gggctggccctaaaaatgcatggtaagttctca

SEQ ID NO: 1034203 - DNA, 33 bp, Homo sapien
acatatccacagttataagaaacatcaaatgag

SEQ ID NO: 1034204 - DNA, 33 bp, Homo sapien
acatatccacagttattagaaacatcaaatgag

SEQ ID NO: 1034205 - DNA, 33 bp, Homo sapien
tgagaaatacggcagacagaaaagaaacattat

SEQ ID NO: 1034206 - DNA, 33 bp, Homo sapien
tgagaaatacggcagagagaaaagaaacattat

SEQ ID NO: 1034207 - DNA, 33 bp, Homo sapien
gttagtgatgctggtaaaaacaacctactgtgc

SEQ ID NO: 1034208 - DNA, 33 bp, Homo sapien
gttagtgatgctggtataaacaacctactgtgc

SEQ ID NO: 1034209 - DNA, 33 bp, Homo sapien
tgatactgatgatcccaaacccctgtaggccta

SEQ ID NO: 1034210 - DNA, 33 bp, Homo sapien
tgatactgatgatcccgaacccctgtaggccta

SEQ ID NO: 1034211 - DNA, 33 bp, Homo sapien
tttacactgactgatacatgagtaatacttgtt

SEQ ID NO: 1034212 - DNA, 33 bp, Homo sapien
tttacactgactgatatatgagtaatacttgtt

SEQ ID NO: 1034213 - DNA, 33 bp, Homo sapien
ttatgtttcctttccaaattaataaagtacagg

SEQ ID NO: 1034214 - DNA, 33 bp, Homo sapien
ttatgtttcctttccatattaataaagtacagg

SEQ ID NO: 1034215 - DNA, 33 bp, Homo sapien
caaggaaacattcaacggtgctgactttgttcc

SEQ ID NO: 1034216 - DNA, 33 bp, Homo sapien
caaggaaacattcaactgtgctgactttgttcc

SEQ ID NO: 1034217 - DNA, 33 bp, Homo sapien
gtgaaaccattaccacaaacaacatattcatca

SEQ ID NO: 1034218 - DNA, 33 bp, Homo sapien
gtgaaaccattaccacgaacaacatattcatca

SEQ ID NO: 1034219 - DNA, 33 bp, Homo sapien
gaataatccctagtgacaaagcagatcagtaga

SEQ ID NO: 1034220 - DNA, 33 bp, Homo sapien
gaataatccctagtgagaaagcagatcagtaga

SEQ ID NO: 1034221 - DNA, 33 bp, Homo sapien
cttatagtatggaaacacaattacctgtcagtg

SEQ ID NO: 1034222 - DNA, 33 bp, Homo sapien
cttatagtatggaaacccaattacctgtcagtg

SEQ ID NO: 1034223 - DNA, 33 bp, Homo sapien
cttttaactttcattacagttggcctctggatc

SEQ ID NO: 1034224 - DNA, 33 bp, Homo sapien
cttttaactttcattatagttggcctctggatc

SEQ ID NO: 1034225 - DNA, 33 bp, Homo sapien
ccaaaaaggagatgaacaaatgaaaattcttat

SEQ ID NO: 1034226 - DNA, 33 bp, Homo sapien
ccaaaaaggagatgaataaatgaaaattcttat

SEQ ID NO: 1034227 - DNA, 33 bp, Homo sapien
ttaagatcagcctcacaaatcctttctcacaat

SEQ ID NO: 1034228 - DNA, 33 bp, Homo sapien
ttaagatcagcctcacgaatcctttctcacaat

SEQ ID NO: 1034229 - DNA, 33 bp, Homo sapien
gtaggtcctactggtactaatttataggactct

SEQ ID NO: 1034230 - DNA, 33 bp, Homo sapien
gtaggtcctactggtattaatttataggactct

SEQ ID NO: 1034231 - DNA, 33 bp, Homo sapien
aaatacacagaaatagaaagaaaagcactgaaa

SEQ ID NO: 1034232 - DNA, 33 bp, Homo sapien
aaatacacagaaataggaagaaaagcactgaaa

SEQ ID NO: 1034233 - DNA, 33 bp, Homo sapien
ggactcctagtaataaccaattaagcaattagc

SEQ ID NO: 1034234 - DNA, 33 bp, Homo sapien
ggactcctagtaataatcaattaagcaattagc

SEQ ID NO: 1034235 - DNA, 33 bp, Homo sapien
ataggagaaatgtgtacgagtttgggaggttat

SEQ ID NO: 1034236 - DNA, 33 bp, Homo sapien
ataggagaaatgtgtatgagtttgggaggttat

SEQ ID NO: 1034237 - DNA, 33 bp, Homo sapien
gccactttttctaagacggatgtgctatttctc

SEQ ID NO: 1034238 - DNA, 33 bp, Homo sapien
gccactttttctaagatggatgtgctatttctc

SEQ ID NO: 1034239 - DNA, 33 bp, Homo sapien
cagttcccacctatgaaaatatgcagtgtttgg

SEQ ID NO: 1034240 - DNA, 33 bp, Homo sapien
cagttcccacctatgagaatatgcagtgtttgg

SEQ ID NO: 1034241 - DNA, 33 bp, Homo sapien
tacaaaacaattaaaaattagctaagcatggtg

SEQ ID NO: 1034242 - DNA, 33 bp, Homo sapien
tacaaaacaattaaaagttagctaagcatggtg

SEQ ID NO: 1034243 - DNA, 33 bp, Homo sapien
aggcttggctgtctggacaacaaaagattttag

SEQ ID NO: 1034244 - DNA, 33 bp, Homo sapien
aggcttggctgtctggccaacaaaagattttag

SEQ ID NO: 1034245 - DNA, 33 bp, Homo sapien
aagcaattggttccacacctgagtttctgattg

SEQ ID NO: 1034246 - DNA, 33 bp, Homo sapien
aagcaattggttccacccctgagtttctgattg

SEQ ID NO: 1034247 - DNA, 33 bp, Homo sapien
catagacataaggctaaataaaatgatggtatg

SEQ ID NO: 1034248 - DNA, 33 bp, Homo sapien
catagacataaggctacataaaatgatggtatg

SEQ ID NO: 1034249 - DNA, 33 bp, Homo sapien
aagaactttacatagacgggaaatgaatactat

SEQ ID NO: 1034250 - DNA, 33 bp, Homo sapien
aagaactttacatagaggggaaatgaatactat

SEQ ID NO: 1034251 - DNA, 33 bp, Homo sapien
tacaatagagaaaaataagtctcaaaatgatta

SEQ ID NO: 1034252 - DNA, 33 bp, Homo sapien
tacaatagagaaaaatgagtctcaaaatgatta

SEQ ID NO: 1034253 - DNA, 33 bp, Homo sapien
gtgcaagtatcaagaaatgtttaaatccaccta

SEQ ID NO: 1034254 - DNA, 33 bp, Homo sapien
gtgcaagtatcaagaagtgtttaaatccaccta

SEQ ID NO: 1034255 - DNA, 33 bp, Homo sapien
atgatagagtgaaatgaacttttcaagttttta

SEQ ID NO: 1034256 - DNA, 33 bp, Homo sapien
atgatagagtgaaatgcacttttcaagttttta

SEQ ID NO: 1034257 - DNA, 33 bp, Homo sapien
tctctatagcagtgcaaggacagactaacacaa

SEQ ID NO: 1034258 - DNA, 33 bp, Homo sapien
tctctatagcagtgcagggacagactaacacaa

SEQ ID NO: 1034259 - DNA, 33 bp, Homo sapien
ctacattgttctgagaatcacacatcagaaaac

SEQ ID NO: 1034260 - DNA, 33 bp, Homo sapien
ctacattgttctgagactcacacatcagaaaac

SEQ ID NO: 1034261 - DNA, 33 bp, Homo sapien
aacaaccccatcaaaaagtcagtgaaggatatg

SEQ ID NO: 1034262 - DNA, 33 bp, Homo sapien
aacaaccccatcaaaacgtcagtgaaggatatg

SEQ ID NO: 1034263 - DNA, 33 bp, Homo sapien
agtggatctttgttcacggaaattgttcatgtt

SEQ ID NO: 1034264 - DNA, 33 bp, Homo sapien
agtggatctttgttcatggaaattgttcatgtt

SEQ ID NO: 1034265 - DNA, 33 bp, Homo sapien
actatgttctagacaacaaagtttacctgtgaa

SEQ ID NO: 1034266 - DNA, 33 bp, Homo sapien
actatgttctagacaataaagtttacctgtgaa

SEQ ID NO: 1034267 - DNA, 33 bp, Homo sapien
tgaaagcaacattcacaagtattaaggctagac

SEQ ID NO: 1034268 - DNA, 33 bp, Homo sapien
tgaaagcaacattcacgagtattaaggctagac

SEQ ID NO: 1034269 - DNA, 33 bp, Homo sapien
cacttgaatacatgaacagtcatagcagcacaa

SEQ ID NO: 1034270 - DNA, 33 bp, Homo sapien
cacttgaatacatgaatagtcatagcagcacaa

SEQ ID NO: 1034271 - DNA, 33 bp, Homo sapien
ttttgcagagacatctcaagctggaattcaatg

SEQ ID NO: 1034272 - DNA, 33 bp, Homo sapien
ttttgcagagacatcttaagctggaattcaatg

SEQ ID NO: 1034273 - DNA, 33 bp, Homo sapien
taaataactggtcctaagttttcaaatggaaac

SEQ ID NO: 1034274 - DNA, 33 bp, Homo sapien
taaataactggtcctaggttttcaaatggaaac

SEQ ID NO: 1034275 - DNA, 33 bp, Homo sapien
attatttggcgacctcaacatatggtccaacag

SEQ ID NO: 1034276 - DNA, 33 bp, Homo sapien
attatttggcgacctcgacatatggtccaacag

SEQ ID NO: 1034277 - DNA, 33 bp, Homo sapien
attcactccatagttacattttactcctaatgc

SEQ ID NO: 1034278 - DNA, 33 bp, Homo sapien
attcactccatagttatattttactcctaatgc

SEQ ID NO: 1034279 - DNA, 33 bp, Homo sapien
ggaagccaaaaagatgcagttggtatttgaagc

SEQ ID NO: 1034280 - DNA, 33 bp, Homo sapien
ggaagccaaaaagatgtagttggtatttgaagc

SEQ ID NO: 1034281 - DNA, 33 bp, Homo sapien
tctcgtccagttttacagcttcaaataccaact

SEQ ID NO: 1034282 - DNA, 33 bp, Homo sapien
tctcgtccagttttacggcttcaaataccaact

SEQ ID NO: 1034283 - DNA, 33 bp, Homo sapien
gtagagtgttgcattaccggtcttgctaccagt

SEQ ID NO: 1034284 - DNA, 33 bp, Homo sapien
gtagagtgttgcattatcggtcttgctaccagt

SEQ ID NO: 1034285 - DNA, 33 bp, Homo sapien
aatatataagtggttacacccttgaatttcata

SEQ ID NO: 1034286 - DNA, 33 bp, Homo sapien
aatatataagtggttatacccttgaatttcata

SEQ ID NO: 1034287 - DNA, 33 bp, Homo sapien
aaaccatttctaaatacagccacgtttagcagg

SEQ ID NO: 1034288 - DNA, 33 bp, Homo sapien
aaaccatttctaaatatagccacgtttagcagg

SEQ ID NO: 1034289 - DNA, 33 bp, Homo sapien
ctgtccctagaaacagcataccacaggtctact

SEQ ID NO: 1034290 - DNA, 33 bp, Homo sapien
ctgtccctagaaacaggataccacaggtctact

SEQ ID NO: 1034291 - DNA, 33 bp, Homo sapien
cttcagtatctcttacacatgcaaataatacgc

SEQ ID NO: 1034292 - DNA, 33 bp, Homo sapien
cttcagtatctcttacgcatgcaaataatacgc

SEQ ID NO: 1034293 - DNA, 33 bp, Homo sapien
tacactttaattagcagcagaatataattgtct

SEQ ID NO: 1034294 - DNA, 33 bp, Homo sapien
tacactttaattagcatcagaatataattgtct

SEQ ID NO: 1034295 - DNA, 33 bp, Homo sapien
ttggtatcaattcagacattatgccatggaatg

SEQ ID NO: 1034296 - DNA, 33 bp, Homo sapien
ttggtatcaattcagatattatgccatggaatg

SEQ ID NO: 1034297 - DNA, 33 bp, Homo sapien
tgtaaagatttatgaaatcgaagtttgtcatta

SEQ ID NO: 1034298 - DNA, 33 bp, Homo sapien
tgtaaagatttatgaattcgaagtttgtcatta

SEQ ID NO: 1034299 - DNA, 33 bp, Homo sapien
aatgatccagttctaaacatagtacccaatagt

SEQ ID NO: 1034300 - DNA, 33 bp, Homo sapien
aatgatccagttctaagcatagtacccaatagt

SEQ ID NO: 1034301 - DNA, 33 bp, Homo sapien
gagggcaaagaagaaacgcctaagatataggca

SEQ ID NO: 1034302 - DNA, 33 bp, Homo sapien
gagggcaaagaagaaatgcctaagatataggca

SEQ ID NO: 1034303 - DNA, 33 bp, Homo sapien
atcgatatcacacttcccacctccaaacttctc

SEQ ID NO: 1034304 - DNA, 33 bp, Homo sapien
atcgatatcacacttctcacctccaaacttctc

SEQ ID NO: 1034305 - DNA, 33 bp, Homo sapien
atagacatttctctaacgaacgcatacaaatga

SEQ ID NO: 1034306 - DNA, 33 bp, Homo sapien
atagacatttctctaatgaacgcatacaaatga

SEQ ID NO: 1034307 - DNA, 33 bp, Homo sapien
tacaatctcaagaaacaacataaacatgacgag

SEQ ID NO: 1034308 - DNA, 33 bp, Homo sapien
tacaatctcaagaaacgacataaacatgacgag

SEQ ID NO: 1034309 - DNA, 33 bp, Homo sapien
agatttaagaagtagcagagaatttcaaatata

SEQ ID NO: 1034310 - DNA, 33 bp, Homo sapien
agatttaagaagtagctgagaatttcaaatata

SEQ ID NO: 1034311 - DNA, 33 bp, Homo sapien
gcagcatccggataaacgacacctagtggttag

SEQ ID NO: 1034312 - DNA, 33 bp, Homo sapien
gcagcatccggataaatgacacctagtggttag

SEQ ID NO: 1034313 - DNA, 33 bp, Homo sapien
cagttaacaccgactactaaagctcctgtttct

SEQ ID NO: 1034314 - DNA, 33 bp, Homo sapien
cagttaacaccgactattaaagctcctgtttct

SEQ ID NO: 1034315 - DNA, 33 bp, Homo sapien
taaagattttgtttgaacagaggattctctggt

SEQ ID NO: 1034316 - DNA, 33 bp, Homo sapien
taaagattttgtttgatcagaggattctctggt

SEQ ID NO: 1034317 - DNA, 33 bp, Homo sapien
gaatagctgtgaggcaaaggagtcacagacact

SEQ ID NO: 1034318 - DNA, 33 bp, Homo sapien
gaatagctgtgaggcagaggagtcacagacact

SEQ ID NO: 1034319 - DNA, 33 bp, Homo sapien
gctgggagagattgcaaccatatacctagaaga

SEQ ID NO: 1034320 - DNA, 33 bp, Homo sapien
gctgggagagattgcagccatatacctagaaga

SEQ ID NO: 1034321 - DNA, 33 bp, Homo sapien
tagattatcttgagggaaagtattgacatatgt

SEQ ID NO: 1034322 - DNA, 33 bp, Homo sapien
tagattatcttgaggggaagtattgacatatgt

SEQ ID NO: 1034323 - DNA, 33 bp, Homo sapien
gtcgtattctttactcccgatggattgtctatg

SEQ ID NO: 1034324 - DNA, 33 bp, Homo sapien
gtcgtattctttactcgcgatggattgtctatg

SEQ ID NO: 1034325 - DNA, 33 bp, Homo sapien
gaagggttaggaattaaaaagattggtggataa

SEQ ID NO: 1034326 - DNA, 33 bp, Homo sapien
gaagggttaggaattacaaagattggtggataa

SEQ ID NO: 1034327 - DNA, 33 bp, Homo sapien
ctaaaaaatatccaaaatgttggccttacttct

SEQ ID NO: 1034328 - DNA, 33 bp, Homo sapien
ctaaaaaatatccaaagtgttggccttacttct

SEQ ID NO: 1034329 - DNA, 33 bp, Homo sapien
tctagaagatactcacaaattgataacctctaa

SEQ ID NO: 1034330 - DNA, 33 bp, Homo sapien
tctagaagatactcaccaattgataacctctaa

SEQ ID NO: 1034331 - DNA, 33 bp, Homo sapien
agacttacctgacatacgagacttacctccttg

SEQ ID NO: 1034332 - DNA, 33 bp, Homo sapien
agacttacctgacatatgagacttacctccttg

SEQ ID NO: 1034333 - DNA, 33 bp, Homo sapien
tcacaaatactacaaaatttcagaattactatt

SEQ ID NO: 1034334 - DNA, 33 bp, Homo sapien
tcacaaatactacaaagtttcagaattactatt

SEQ ID NO: 1034335 - DNA, 33 bp, Homo sapien
tattgccatttctaaaaggagtttcagttaagg

SEQ ID NO: 1034336 - DNA, 33 bp, Homo sapien
tattgccatttctaaagggagtttcagttaagg

SEQ ID NO: 1034337 - DNA, 33 bp, Homo sapien
aaacaagatgtttcatcaaaatatttcttctgc

SEQ ID NO: 1034338 - DNA, 33 bp, Homo sapien
aaacaagatgtttcatgaaaatatttcttctgc

SEQ ID NO: 1034339 - DNA, 33 bp, Homo sapien
taatattgagaatgtacgcttttaagatatttg

SEQ ID NO: 1034340 - DNA, 33 bp, Homo sapien
taatattgagaatgtatgcttttaagatatttg

SEQ ID NO: 1034341 - DNA, 33 bp, Homo sapien
agaaaggaaatctcaaaaacatttcttatctaa

SEQ ID NO: 1034342 - DNA, 33 bp, Homo sapien
agaaaggaaatctcaagaacatttcttatctaa

SEQ ID NO: 1034343 - DNA, 33 bp, Homo sapien
ttctattaggtcaataaaatctgtatctcaagt

SEQ ID NO: 1034344 - DNA, 33 bp, Homo sapien
ttctattaggtcaatacaatctgtatctcaagt

SEQ ID NO: 1034345 - DNA, 33 bp, Homo sapien
taatctgacttggggaaagaaatattttatcac

SEQ ID NO: 1034346 - DNA, 33 bp, Homo sapien
taatctgacttggggagagaaatattttatcac

SEQ ID NO: 1034347 - DNA, 33 bp, Homo sapien
aataactctcacataaaccctagtccccagtaa

SEQ ID NO: 1034348 - DNA, 33 bp, Homo sapien
aataactctcacataacccctagtccccagtaa

SEQ ID NO: 1034349 - DNA, 33 bp, Homo sapien
ccaaaatacagaaaagcagtagctgagaaatag

SEQ ID NO: 1034350 - DNA, 33 bp, Homo sapien
ccaaaatacagaaaagtagtagctgagaaatag

SEQ ID NO: 1034351 - DNA, 33 bp, Homo sapien
cctggaggatatcagacagcttagttcctagag

SEQ ID NO: 1034352 - DNA, 33 bp, Homo sapien
cctggaggatatcagagagcttagttcctagag

SEQ ID NO: 1034353 - DNA, 33 bp, Homo sapien
tggtagacaagagtccaggaatattaaaaaatt

SEQ ID NO: 1034354 - DNA, 33 bp, Homo sapien
tggtagacaagagtccgggaatattaaaaaatt

SEQ ID NO: 1034355 - DNA, 33 bp, Homo sapien
aggcaaaatgtaatgaaagagatgaataggcaa

SEQ ID NO: 1034356 - DNA, 33 bp, Homo sapien
aggcaaaatgtaatgagagagatgaataggcaa

SEQ ID NO: 1034357 - DNA, 33 bp, Homo sapien
actgcaaattaaagaaactgtgactccacctac

SEQ ID NO: 1034358 - DNA, 33 bp, Homo sapien
actgcaaattaaagaacctgtgactccacctac

SEQ ID NO: 1034359 - DNA, 33 bp, Homo sapien
tgcactttgactacctcaggatcacttattgaa

SEQ ID NO: 1034360 - DNA, 33 bp, Homo sapien
tgcactttgactaccttaggatcacttattgaa

SEQ ID NO: 1034361 - DNA, 33 bp, Homo sapien
ccttgttttacaccaagttgatgcagtaatagg

SEQ ID NO: 1034362 - DNA, 33 bp, Homo sapien
ccttgttttacaccaatttgatgcagtaatagg

SEQ ID NO: 1034363 - DNA, 33 bp, Homo sapien
ctattgaattactgcccatttcgggatgactta

SEQ ID NO: 1034364 - DNA, 33 bp, Homo sapien
ctattgaattactgcctatttcgggatgactta

SEQ ID NO: 1034365 - DNA, 33 bp, Homo sapien
tcagaaacagctaagaagagaatactcaataca

SEQ ID NO: 1034366 - DNA, 33 bp, Homo sapien
tcagaaacagctaagaggagaatactcaataca

SEQ ID NO: 1034367 - DNA, 33 bp, Homo sapien
atatcttaaaactccaaaataatgtcctttgac

SEQ ID NO: 1034368 - DNA, 33 bp, Homo sapien
atatcttaaaactccagaataatgtcctttgac

SEQ ID NO: 1034369 - DNA, 33 bp, Homo sapien
ggggactaaaaggtgaactgtggtagctaatct

SEQ ID NO: 1034370 - DNA, 33 bp, Homo sapien
ggggactaaaaggtgatctgtggtagctaatct

SEQ ID NO: 1034371 - DNA, 33 bp, Homo sapien
ctcaaaaacaaaatacgcatcatgaaagctggg

SEQ ID NO: 1034372 - DNA, 33 bp, Homo sapien
ctcaaaaacaaaatactcatcatgaaagctggg

SEQ ID NO: 1034373 - DNA, 33 bp, Homo sapien
aattccaaaaaaggctaaatacatgcaattcaa

SEQ ID NO: 1034374 - DNA, 33 bp, Homo sapien
aattccaaaaaaggctgaatacatgcaattcaa

SEQ ID NO: 1034375 - DNA, 33 bp, Homo sapien
gacagacatagaattcagaatatggacaagaat

SEQ ID NO: 1034376 - DNA, 33 bp, Homo sapien
gacagacatagaattcggaatatggacaagaat

SEQ ID NO: 1034377 - DNA, 33 bp, Homo sapien
cctagagaatctggtaggttgtatcttttttct

SEQ ID NO: 1034378 - DNA, 33 bp, Homo sapien
cctagagaatctggtatgttgtatcttttttct

SEQ ID NO: 1034379 - DNA, 33 bp, Homo sapien
atcacagggtaccatgaaatctcaagatgaaca

SEQ ID NO: 1034380 - DNA, 33 bp, Homo sapien
atcacagggtaccatgcaatctcaagatgaaca

SEQ ID NO: 1034381 - DNA, 33 bp, Homo sapien
cctagtagacactggaaagagcagtcactcaaa

SEQ ID NO: 1034382 - DNA, 33 bp, Homo sapien
cctagtagacactggagagagcagtcactcaaa

SEQ ID NO: 1034383 - DNA, 33 bp, Homo sapien
gtccatattagagaaccccttcaatacttaggc

SEQ ID NO: 1034384 - DNA, 33 bp, Homo sapien
gtccatattagagaactccttcaatacttaggc

SEQ ID NO: 1034385 - DNA, 33 bp, Homo sapien
aaatagctaatgaatacggtaagatgaaactat

SEQ ID NO: 1034386 - DNA, 33 bp, Homo sapien
aaatagctaatgaatatggtaagatgaaactat

SEQ ID NO: 1034387 - DNA, 33 bp, Homo sapien
ctaggacctcagaaaactgaagctaagaacttg

SEQ ID NO: 1034388 - DNA, 33 bp, Homo sapien
ctaggacctcagaaaattgaagctaagaacttg

SEQ ID NO: 1034389 - DNA, 33 bp, Homo sapien
ccaatcagattttaaacgcaataccagaggcct

SEQ ID NO: 1034390 - DNA, 33 bp, Homo sapien
ccaatcagattttaaatgcaataccagaggcct

SEQ ID NO: 1034391 - DNA, 33 bp, Homo sapien
agatatagattgaagacggaataaagttcagga

SEQ ID NO: 1034392 - DNA, 33 bp, Homo sapien
agatatagattgaagatggaataaagttcagga

SEQ ID NO: 1034393 - DNA, 33 bp, Homo sapien
aaagtcttgatattgacgaacaggtttttaatg

SEQ ID NO: 1034394 - DNA, 33 bp, Homo sapien
aaagtcttgatattgaggaacaggtttttaatg

SEQ ID NO: 1034395 - DNA, 33 bp, Homo sapien
cttagtttagcagtaagaattacactttgattt

SEQ ID NO: 1034396 - DNA, 33 bp, Homo sapien
cttagtttagcagtaataattacactttgattt

SEQ ID NO: 1034397 - DNA, 33 bp, Homo sapien
gggcctggtatgatgaactcagtagagggacca

SEQ ID NO: 1034398 - DNA, 33 bp, Homo sapien
gggcctggtatgatgatctcagtagagggacca

SEQ ID NO: 1034399 - DNA, 33 bp, Homo sapien
cagaatctggagtcaacgtggatttgagagcag

SEQ ID NO: 1034400 - DNA, 33 bp, Homo sapien
cagaatctggagtcaatgtggatttgagagcag

SEQ ID NO: 1034401 - DNA, 33 bp, Homo sapien
cctatttctgagttcaatatcaagttaaatctt

SEQ ID NO: 1034402 - DNA, 33 bp, Homo sapien
cctatttctgagttcagtatcaagttaaatctt

SEQ ID NO: 1034403 - DNA, 33 bp, Homo sapien
aaaaaggatggttaaggaattctaggcagaacc

SEQ ID NO: 1034404 - DNA, 33 bp, Homo sapien
aaaaaggatggttaagtaattctaggcagaacc

SEQ ID NO: 1034405 - DNA, 33 bp, Homo sapien
gtatcaaagagacaacaattacagtctcaaaaa

SEQ ID NO: 1034406 - DNA, 33 bp, Homo sapien
gtatcaaagagacaacgattacagtctcaaaaa

SEQ ID NO: 1034407 - DNA, 33 bp, Homo sapien
gggtttttatgggtacaggaatagccagggcaa

SEQ ID NO: 1034408 - DNA, 33 bp, Homo sapien
gggtttttatgggtaccggaatagccagggcaa

SEQ ID NO: 1034409 - DNA, 33 bp, Homo sapien
aagggccacttccatcacttgataaaattctcc

SEQ ID NO: 1034410 - DNA, 33 bp, Homo sapien
aagggccacttccatctcttgataaaattctcc

SEQ ID NO: 1034411 - DNA, 33 bp, Homo sapien
gtacctgtccagtcccagaagactcatgctcaa

SEQ ID NO: 1034412 - DNA, 33 bp, Homo sapien
gtacctgtccagtcccggaagactcatgctcaa

SEQ ID NO: 1034413 - DNA, 33 bp, Homo sapien
aaagttaagcacatagaaatcctgatattacta

SEQ ID NO: 1034414 - DNA, 33 bp, Homo sapien
aaagttaagcacataggaatcctgatattacta

SEQ ID NO: 1034415 - DNA, 33 bp, Homo sapien
acattatattaagtgaagtaagcctggcacaga

SEQ ID NO: 1034416 - DNA, 33 bp, Homo sapien
acattatattaagtgaggtaagcctggcacaga

SEQ ID NO: 1034417 - DNA, 33 bp, Homo sapien
cttagatttcttttagacctggctattatttcc

SEQ ID NO: 1034418 - DNA, 33 bp, Homo sapien
cttagatttcttttaggcctggctattatttcc

SEQ ID NO: 1034419 - DNA, 33 bp, Homo sapien
gatatgatacaaattcgatggtttaaggtaaga

SEQ ID NO: 1034420 - DNA, 33 bp, Homo sapien
gatatgatacaaattctatggtttaaggtaaga

SEQ ID NO: 1034421 - DNA, 33 bp, Homo sapien
tctgccgccaaaaaaaatttaagttgctttcag

SEQ ID NO: 1034422 - DNA, 33 bp, Homo sapien
tctgccgccaaaaaaagtttaagttgctttcag

SEQ ID NO: 1034423 - DNA, 33 bp, Homo sapien
acaatagacggcatacggtagtgaaatgaatga

SEQ ID NO: 1034424 - DNA, 33 bp, Homo sapien
acaatagacggcatactgtagtgaaatgaatga

SEQ ID NO: 1034425 - DNA, 33 bp, Homo sapien
agtatgtattttcaacaatgtgagctgaattaa

SEQ ID NO: 1034426 - DNA, 33 bp, Homo sapien
agtatgtattttcaactatgtgagctgaattaa

SEQ ID NO: 1034427 - DNA, 33 bp, Homo sapien
atggaataggtggtcacggagagcaaaaacatg

SEQ ID NO: 1034428 - DNA, 33 bp, Homo sapien
atggaataggtggtcatggagagcaaaaacatg

SEQ ID NO: 1034429 - DNA, 33 bp, Homo sapien
gtgaatgggtaatactaaggagcatcactatgt

SEQ ID NO: 1034430 - DNA, 33 bp, Homo sapien
gtgaatgggtaatactgaggagcatcactatgt

SEQ ID NO: 1034431 - DNA, 33 bp, Homo sapien
tgacattggagacatgaaaactcttgctgtgtc

SEQ ID NO: 1034432 - DNA, 33 bp, Homo sapien
tgacattggagacatggaaactcttgctgtgtc

SEQ ID NO: 1034433 - DNA, 33 bp, Homo sapien
gtggatagtatataccgcatggatatgctggac

SEQ ID NO: 1034434 - DNA, 33 bp, Homo sapien
gtggatagtatatacctcatggatatgctggac

SEQ ID NO: 1034435 - DNA, 33 bp, Homo sapien
ggttacatgaacacaaacaactgttgataccat

SEQ ID NO: 1034436 - DNA, 33 bp, Homo sapien
ggttacatgaacacaagcaactgttgataccat

SEQ ID NO: 1034437 - DNA, 33 bp, Homo sapien
gaaaaaatttatacgaacttttatgtcatctga

SEQ ID NO: 1034438 - DNA, 33 bp, Homo sapien
gaaaaaatttatacgagcttttatgtcatctga

SEQ ID NO: 1034439 - DNA, 33 bp, Homo sapien
acttataatgtgtgtacagacaaagcagattat

SEQ ID NO: 1034440 - DNA, 33 bp, Homo sapien
acttataatgtgtgtatagacaaagcagattat

SEQ ID NO: 1034441 - DNA, 33 bp, Homo sapien
gtatagctacagtggaagtctatcctcctccaa

SEQ ID NO: 1034442 - DNA, 33 bp, Homo sapien
gtatagctacagtggacgtctatcctcctccaa

SEQ ID NO: 1034443 - DNA, 33 bp, Homo sapien
tttgctgttctcgatcagaagttccttaaagcc

SEQ ID NO: 1034444 - DNA, 33 bp, Homo sapien
tttgctgttctcgatcggaagttccttaaagcc

SEQ ID NO: 1034445 - DNA, 33 bp, Homo sapien
gtctcatagttgattcactggtttagctgcaat

SEQ ID NO: 1034446 - DNA, 33 bp, Homo sapien
gtctcatagttgattcgctggtttagctgcaat

SEQ ID NO: 1034447 - DNA, 33 bp, Homo sapien
atggtcacaaacaagacagctgtaacaaatcaa

SEQ ID NO: 1034448 - DNA, 33 bp, Homo sapien
atggtcacaaacaagatagctgtaacaaatcaa

SEQ ID NO: 1034449 - DNA, 33 bp, Homo sapien
ccatgagtcagtcaaacgccaagtaaaggtaat

SEQ ID NO: 1034450 - DNA, 33 bp, Homo sapien
ccatgagtcagtcaaaggccaagtaaaggtaat

SEQ ID NO: 1034451 - DNA, 33 bp, Homo sapien
acctcattataaaatacggaatgtcagacctca

SEQ ID NO: 1034452 - DNA, 33 bp, Homo sapien
acctcattataaaatatggaatgtcagacctca

SEQ ID NO: 1034453 - DNA, 33 bp, Homo sapien
ggttataggcactatgccaccttatgtaagaaa

SEQ ID NO: 1034454 - DNA, 33 bp, Homo sapien
ggttataggcactatgtcaccttatgtaagaaa

SEQ ID NO: 1034455 - DNA, 33 bp, Homo sapien
gtataaaaacacaacaacatttgcaaaacaata

SEQ ID NO: 1034456 - DNA, 33 bp, Homo sapien
gtataaaaacacaacagcatttgcaaaacaata

SEQ ID NO: 1034457 - DNA, 33 bp, Homo sapien
ggatccaaatgatgaaagagagacttaaatact

SEQ ID NO: 1034458 - DNA, 33 bp, Homo sapien
ggatccaaatgatgaaggagagacttaaatact

SEQ ID NO: 1034459 - DNA, 33 bp, Homo sapien
taaaaaatttgcatgacatccagactggtgttt

SEQ ID NO: 1034460 - DNA, 33 bp, Homo sapien
taaaaaatttgcatgatatccagactggtgttt

SEQ ID NO: 1034461 - DNA, 33 bp, Homo sapien
gaaatgactactagaaacaactgactgcacttc

SEQ ID NO: 1034462 - DNA, 33 bp, Homo sapien
gaaatgactactagaagcaactgactgcacttc

SEQ ID NO: 1034463 - DNA, 33 bp, Homo sapien
gctgtgttgggatcaaccttcactctctgtgga

SEQ ID NO: 1034464 - DNA, 33 bp, Homo sapien
gctgtgttgggatcaatcttcactctctgtgga

SEQ ID NO: 1034465 - DNA, 33 bp, Homo sapien
ttacaaagcaggtataaatgagggtttaagatc

SEQ ID NO: 1034466 - DNA, 33 bp, Homo sapien
ttacaaagcaggtatagatgagggtttaagatc

SEQ ID NO: 1034467 - DNA, 33 bp, Homo sapien
gtccataaattgatgaagcagaaagatagccta

SEQ ID NO: 1034468 - DNA, 33 bp, Homo sapien
gtccataaattgatgaggcagaaagatagccta

SEQ ID NO: 1034469 - DNA, 33 bp, Homo sapien
tattatcagagaaaagaatgtgttttgtttact

SEQ ID NO: 1034470 - DNA, 33 bp, Homo sapien
tattatcagagaaaaggatgtgttttgtttact

SEQ ID NO: 1034471 - DNA, 33 bp, Homo sapien
gagggtctagaggtcacagattttcctattggt

SEQ ID NO: 1034472 - DNA, 33 bp, Homo sapien
gagggtctagaggtcagagattttcctattggt

SEQ ID NO: 1034473 - DNA, 33 bp, Homo sapien
gactgttgccagcaaagctctaagatggctcct

SEQ ID NO: 1034474 - DNA, 33 bp, Homo sapien
gactgttgccagcaaatctctaagatggctcct

SEQ ID NO: 1034475 - DNA, 33 bp, Homo sapien
tagtttcacaggtgtacatatggacagaaattg

SEQ ID NO: 1034476 - DNA, 33 bp, Homo sapien
tagtttcacaggtgtatatatggacagaaattg

SEQ ID NO: 1034477 - DNA, 33 bp, Homo sapien
gcagaagaccagttaaaccaggcacaaattctt

SEQ ID NO: 1034478 - DNA, 33 bp, Homo sapien
gcagaagaccagttaagccaggcacaaattctt

SEQ ID NO: 1034479 - DNA, 33 bp, Homo sapien
tttatttcagtgagcaaaaagatggctttgagt

SEQ ID NO: 1034480 - DNA, 33 bp, Homo sapien
tttatttcagtgagcagaaagatggctttgagt

SEQ ID NO: 1034481 - DNA, 33 bp, Homo sapien
tggctttgagttctcaactagaattttcctttt

SEQ ID NO: 1034482 - DNA, 33 bp, Homo sapien
tggctttgagttctcagctagaattttcctttt

SEQ ID NO: 1034483 - DNA, 33 bp, Homo sapien
aaactagaaggagagaaagaggataggaagtat

SEQ ID NO: 1034484 - DNA, 33 bp, Homo sapien
aaactagaaggagagagagaggataggaagtat

SEQ ID NO: 1034485 - DNA, 33 bp, Homo sapien
aatctttgttagtccccccatcttattcaaaga

SEQ ID NO: 1034486 - DNA, 33 bp, Homo sapien
aatctttgttagtccctccatcttattcaaaga

SEQ ID NO: 1034487 - DNA, 33 bp, Homo sapien
ttacatacataaaaacagcaaggaacttaataa

SEQ ID NO: 1034488 - DNA, 33 bp, Homo sapien
ttacatacataaaaacggcaaggaacttaataa

SEQ ID NO: 1034489 - DNA, 33 bp, Homo sapien
attagcagaattttaaagagaatatacaatgat

SEQ ID NO: 1034490 - DNA, 33 bp, Homo sapien
attagcagaattttaaggagaatatacaatgat

SEQ ID NO: 1034491 - DNA, 33 bp, Homo sapien
atcaacacttattacacagctttcaagaggtag

SEQ ID NO: 1034492 - DNA, 33 bp, Homo sapien
atcaacacttattacatagctttcaagaggtag

SEQ ID NO: 1034493 - DNA, 33 bp, Homo sapien
tattttctttattgcacagatgacagggagtag

SEQ ID NO: 1034494 - DNA, 33 bp, Homo sapien
tattttctttattgcagagatgacagggagtag

SEQ ID NO: 1034495 - DNA, 33 bp, Homo sapien
ccagaactgtaagaaactgttgataccatccag

SEQ ID NO: 1034496 - DNA, 33 bp, Homo sapien
ccagaactgtaagaaattgttgataccatccag

SEQ ID NO: 1034497 - DNA, 33 bp, Homo sapien
tcctgggctgtgcagaataaaagatgccttgat

SEQ ID NO: 1034498 - DNA, 33 bp, Homo sapien
tcctgggctgtgcagagtaaaagatgccttgat

SEQ ID NO: 1034499 - DNA, 33 bp, Homo sapien
agtgggttcaaatggactattatgtgagaaaag

SEQ ID NO: 1034500 - DNA, 33 bp, Homo sapien
agtgggttcaaatggattattatgtgagaaaag

SEQ ID NO: 1034501 - DNA, 33 bp, Homo sapien
ctataaggtttgccacagtccatttcaaagatt

SEQ ID NO: 1034502 - DNA, 33 bp, Homo sapien
ctataaggtttgccaccgtccatttcaaagatt

SEQ ID NO: 1034503 - DNA, 33 bp, Homo sapien
gcataaagtaaagaaactcttaagctgctgctg

SEQ ID NO: 1034504 - DNA, 33 bp, Homo sapien
gcataaagtaaagaaattcttaagctgctgctg

SEQ ID NO: 1034505 - DNA, 33 bp, Homo sapien
gtgctatagtcacagaatatgaagactcatcat

SEQ ID NO: 1034506 - DNA, 33 bp, Homo sapien
gtgctatagtcacagagtatgaagactcatcat

SEQ ID NO: 1034507 - DNA, 33 bp, Homo sapien
tgaccttcacaggttaaaacttacaggtactgg

SEQ ID NO: 1034508 - DNA, 33 bp, Homo sapien
tgaccttcacaggttacaacttacaggtactgg

SEQ ID NO: 1034509 - DNA, 33 bp, Homo sapien
acacaacaagaaaaaaagtaaggagcagagtga

SEQ ID NO: 1034510 - DNA, 33 bp, Homo sapien
acacaacaagaaaaaaggtaaggagcagagtga

SEQ ID NO: 1034511 - DNA, 33 bp, Homo sapien
ggtcgttgctggaggacggagatgtgaaagttt

SEQ ID NO: 1034512 - DNA, 33 bp, Homo sapien
ggtcgttgctggaggatggagatgtgaaagttt

SEQ ID NO: 1034513 - DNA, 33 bp, Homo sapien
tcctggatggatgctacaaagacagctgaaatt

SEQ ID NO: 1034514 - DNA, 33 bp, Homo sapien
tcctggatggatgctataaagacagctgaaatt

SEQ ID NO: 1034515 - DNA, 33 bp, Homo sapien
acctgtgtcagagaaccgtgctgtgctgaggca

SEQ ID NO: 1034516 - DNA, 33 bp, Homo sapien
acctgtgtcagagaactgtgctgtgctgaggca

SEQ ID NO: 1034517 - DNA, 33 bp, Homo sapien
aaagacaagcaaaatagtagaaggaacaaacta

SEQ ID NO: 1034518 - DNA, 33 bp, Homo sapien
aaagacaagcaaaatattagaaggaacaaacta

SEQ ID NO: 1034519 - DNA, 33 bp, Homo sapien
aaaaatataaacatggccacataatagcttaaa

SEQ ID NO: 1034520 - DNA, 33 bp, Homo sapien
aaaaatataaacatgggcacataatagcttaaa

SEQ ID NO: 1034521 - DNA, 33 bp, Homo sapien
aaagtgcacagtgtccaaattgtttcacatata

SEQ ID NO: 1034522 - DNA, 33 bp, Homo sapien
aaagtgcacagtgtccgaattgtttcacatata

SEQ ID NO: 1034523 - DNA, 33 bp, Homo sapien
gtaaacaactttctacaccgaactttctatgcc

SEQ ID NO: 1034524 - DNA, 33 bp, Homo sapien
gtaaacaactttctacgccgaactttctatgcc

SEQ ID NO: 1034525 - DNA, 33 bp, Homo sapien
agttactactacacataaaaacatgagtaaatt

SEQ ID NO: 1034526 - DNA, 33 bp, Homo sapien
agttactactacacatgaaaacatgagtaaatt

SEQ ID NO: 1034527 - DNA, 33 bp, Homo sapien
tccctttgataataacaagaaaactgggaaaaa

SEQ ID NO: 1034528 - DNA, 33 bp, Homo sapien
tccctttgataataaccagaaaactgggaaaaa

SEQ ID NO: 1034529 - DNA, 33 bp, Homo sapien
cacacttaaaacgcaaaaatttgtcactcaaag

SEQ ID NO: 1034530 - DNA, 33 bp, Homo sapien
cacacttaaaacgcaagaatttgtcactcaaag

SEQ ID NO: 1034531 - DNA, 33 bp, Homo sapien
aattgctaaaaagaagactggatagtataatga

SEQ ID NO: 1034532 - DNA, 33 bp, Homo sapien
aattgctaaaaagaaggctggatagtataatga

SEQ ID NO: 1034533 - DNA, 33 bp, Homo sapien
caatgaagtcagagaacagatattgaacaggct

SEQ ID NO: 1034534 - DNA, 33 bp, Homo sapien
caatgaagtcagagaagagatattgaacaggct

SEQ ID NO: 1034535 - DNA, 33 bp, Homo sapien
tatttgcatttgcttacggctttctgcctttct

SEQ ID NO: 1034536 - DNA, 33 bp, Homo sapien
tatttgcatttgcttatggctttctgcctttct

SEQ ID NO: 1034537 - DNA, 33 bp, Homo sapien
atgctactgttgccataaagtatttttagtctg

SEQ ID NO: 1034538 - DNA, 33 bp, Homo sapien
atgctactgttgccatgaagtatttttagtctg

SEQ ID NO: 1034539 - DNA, 33 bp, Homo sapien
cgtggaagtaacaaacagaagatcatatcaggc

SEQ ID NO: 1034540 - DNA, 33 bp, Homo sapien
cgtggaagtaacaaaccgaagatcatatcaggc

SEQ ID NO: 1034541 - DNA, 33 bp, Homo sapien
gaataaatcaaacaccaagattgaaacaatgtg

SEQ ID NO: 1034542 - DNA, 33 bp, Homo sapien
gaataaatcaaacaccgagattgaaacaatgtg

SEQ ID NO: 1034543 - DNA, 33 bp, Homo sapien
tggtaagcctggagtgcagccttgtgttaacat

SEQ ID NO: 1034544 - DNA, 33 bp, Homo sapien
tggtaagcctggagtggagccttgtgttaacat

SEQ ID NO: 1034545 - DNA, 33 bp, Homo sapien
atagctttctagggaaaatagtttgatctcata

SEQ ID NO: 1034546 - DNA, 33 bp, Homo sapien
atagctttctagggaacatagtttgatctcata

SEQ ID NO: 1034547 - DNA, 33 bp, Homo sapien
tacataacatggatgaagaatgcgttatatgag

SEQ ID NO: 1034548 - DNA, 33 bp, Homo sapien
tacataacatggatgaggaatgcgttatatgag

SEQ ID NO: 1034549 - DNA, 33 bp, Homo sapien
tgccagctaagatctgaaccaatcagtagacac

SEQ ID NO: 1034550 - DNA, 33 bp, Homo sapien
tgccagctaagatctgcaccaatcagtagacac

SEQ ID NO: 1034551 - DNA, 33 bp, Homo sapien
agataaatggatgtcaaataggagtttggggtt

SEQ ID NO: 1034552 - DNA, 33 bp, Homo sapien
agataaatggatgtcacataggagtttggggtt

SEQ ID NO: 1034553 - DNA, 33 bp, Homo sapien
gagatctccatttacagtgctgttttggagtaa

SEQ ID NO: 1034554 - DNA, 33 bp, Homo sapien
gagatctccatttacattgctgttttggagtaa

SEQ ID NO: 1034555 - DNA, 33 bp, Homo sapien
cctatacacttaagcaaaaaggcattatatttg

SEQ ID NO: 1034556 - DNA, 33 bp, Homo sapien
cctatacacttaagcacaaaggcattatatttg

SEQ ID NO: 1034557 - DNA, 33 bp, Homo sapien
taatttacttgctcaggatcataaacctagtaa

SEQ ID NO: 1034558 - DNA, 33 bp, Homo sapien
taatttacttgctcagtatcataaacctagtaa

SEQ ID NO: 1034559 - DNA, 33 bp, Homo sapien
aaagcaatgtggtaagccagcaaccttggctag

SEQ ID NO: 1034560 - DNA, 33 bp, Homo sapien
aaagcaatgtggtaagtcagcaaccttggctag

SEQ ID NO: 1034561 - DNA, 33 bp, Homo sapien
tgataattttatgacaggttagacacccataat

SEQ ID NO: 1034562 - DNA, 33 bp, Homo sapien
tgataattttatgacatgttagacacccataat

SEQ ID NO: 1034563 - DNA, 33 bp, Homo sapien
tgcatggatgctcaataaaagtattcctttcct

SEQ ID NO: 1034564 - DNA, 33 bp, Homo sapien
tgcatggatgctcaatgaaagtattcctttcct

SEQ ID NO: 1034565 - DNA, 33 bp, Homo sapien
gtgaattaagttcctacagagcaaatgatgctg

SEQ ID NO: 1034566 - DNA, 33 bp, Homo sapien
gtgaattaagttcctatagagcaaatgatgctg

SEQ ID NO: 1034567 - DNA, 33 bp, Homo sapien
aatcattactgacaggaaacatcatcatagtga

SEQ ID NO: 1034568 - DNA, 33 bp, Homo sapien
aatcattactgacagggaacatcatcatagtga

SEQ ID NO: 1034569 - DNA, 33 bp, Homo sapien
tctttgcagaagatagacagtattcccaaaaga

SEQ ID NO: 1034570 - DNA, 33 bp, Homo sapien
tctttgcagaagataggcagtattcccaaaaga

SEQ ID NO: 1034571 - DNA, 33 bp, Homo sapien
tgcccttccctacaatcacttaacctttcactg

SEQ ID NO: 1034572 - DNA, 33 bp, Homo sapien
tgcccttccctacaattacttaacctttcactg

SEQ ID NO: 1034573 - DNA, 33 bp, Homo sapien
tattatgttcctcctacgtgccatttactgtgg

SEQ ID NO: 1034574 - DNA, 33 bp, Homo sapien
tattatgttcctcctatgtgccatttactgtgg

SEQ ID NO: 1034575 - DNA, 33 bp, Homo sapien
tatgcttccccctcaacgaggcaagtgtgcttc

SEQ ID NO: 1034576 - DNA, 33 bp, Homo sapien
tatgcttccccctcaatgaggcaagtgtgcttc

SEQ ID NO: 1034577 - DNA, 33 bp, Homo sapien
acaaaaagtttactcacacatgatataaagttc

SEQ ID NO: 1034578 - DNA, 33 bp, Homo sapien
acaaaaagtttactcagacatgatataaagttc

SEQ ID NO: 1034579 - DNA, 33 bp, Homo sapien
ctgttggtgagagcaacttctttcattggttct

SEQ ID NO: 1034580 - DNA, 33 bp, Homo sapien
ctgttggtgagagcaagttctttcattggttct

SEQ ID NO: 1034581 - DNA, 33 bp, Homo sapien
ttatacttatctttataactgttggtgagagca

SEQ ID NO: 1034582 - DNA, 33 bp, Homo sapien
ttatacttatctttattactgttggtgagagca

SEQ ID NO: 1034583 - DNA, 33 bp, Homo sapien
tgatggaataatggccaataatggaagctgtag

SEQ ID NO: 1034584 - DNA, 33 bp, Homo sapien
tgatggaataatggccgataatggaagctgtag

SEQ ID NO: 1034585 - DNA, 33 bp, Homo sapien
tgtaatagtatgcgaacctgataaacccaggtg

SEQ ID NO: 1034586 - DNA, 33 bp, Homo sapien
tgtaatagtatgcgaagctgataaacccaggtg

SEQ ID NO: 1034587 - DNA, 33 bp, Homo sapien
atggtcatgttatatccgagaagactgtccttc

SEQ ID NO: 1034588 - DNA, 33 bp, Homo sapien
atggtcatgttatatctgagaagactgtccttc

SEQ ID NO: 1034589 - DNA, 33 bp, Homo sapien
aatgtttagacattaaacaaagcacagaagtga

SEQ ID NO: 1034590 - DNA, 33 bp, Homo sapien
aatgtttagacattaagcaaagcacagaagtga

SEQ ID NO: 1034591 - DNA, 33 bp, Homo sapien
atgtaactcttataacacttcattgcttaaaat

SEQ ID NO: 1034592 - DNA, 33 bp, Homo sapien
atgtaactcttataacgcttcattgcttaaaat

SEQ ID NO: 1034593 - DNA, 33 bp, Homo sapien
ttagtttcttttattcacagtataggcctattt

SEQ ID NO: 1034594 - DNA, 33 bp, Homo sapien
ttagtttcttttattctcagtataggcctattt

SEQ ID NO: 1034595 - DNA, 33 bp, Homo sapien
gttttctgagttgaaaatggaagtgcagaactt

SEQ ID NO: 1034596 - DNA, 33 bp, Homo sapien
gttttctgagttgaaagtggaagtgcagaactt

SEQ ID NO: 1034597 - DNA, 33 bp, Homo sapien
tgtgagttttaaatccaagaattgaactccagc

SEQ ID NO: 1034598 - DNA, 33 bp, Homo sapien
tgtgagttttaaatccgagaattgaactccagc

SEQ ID NO: 1034599 - DNA, 33 bp, Homo sapien
tgcttaagggcattaactctgttgagccttaca

SEQ ID NO: 1034600 - DNA, 33 bp, Homo sapien
tgcttaagggcattaattctgttgagccttaca

SEQ ID NO: 1034601 - DNA, 33 bp, Homo sapien
gaacagtaattttcagactctaatacaaagagc

SEQ ID NO: 1034602 - DNA, 33 bp, Homo sapien
gaacagtaattttcaggctctaatacaaagagc

SEQ ID NO: 1034603 - DNA, 33 bp, Homo sapien
ttggagaatcaatgaagtatacatggtgacatc

SEQ ID NO: 1034604 - DNA, 33 bp, Homo sapien
ttggagaatcaatgaattatacatggtgacatc

SEQ ID NO: 1034605 - DNA, 33 bp, Homo sapien
ggctgaaatatagtaacgtgatcatagttcatt

SEQ ID NO: 1034606 - DNA, 33 bp, Homo sapien
ggctgaaatatagtaatgtgatcatagttcatt

SEQ ID NO: 1034607 - DNA, 33 bp, Homo sapien
tgtgtaattcgttctcaaattctatttctgacc

SEQ ID NO: 1034608 - DNA, 33 bp, Homo sapien
tgtgtaattcgttctctaattctatttctgacc

SEQ ID NO: 1034609 - DNA, 33 bp, Homo sapien
gcttggtcttgaccacaaatgtgccattttcat

SEQ ID NO: 1034610 - DNA, 33 bp, Homo sapien
gcttggtcttgaccacgaatgtgccattttcat

SEQ ID NO: 1034611 - DNA, 33 bp, Homo sapien
gcttggctatggtaagaagggaatgcctagaca

SEQ ID NO: 1034612 - DNA, 33 bp, Homo sapien
gcttggctatggtaaggagggaatgcctagaca

SEQ ID NO: 1034613 - DNA, 33 bp, Homo sapien
cctgtgataaggggggaatactgtacatcagtt

SEQ ID NO: 1034614 - DNA, 33 bp, Homo sapien
cctgtgataaggggggtatactgtacatcagtt

SEQ ID NO: 1034615 - DNA, 33 bp, Homo sapien
ctatagcactgaaatagtagcaaggtatatttc

SEQ ID NO: 1034616 - DNA, 33 bp, Homo sapien
ctatagcactgaaatattagcaaggtatatttc

SEQ ID NO: 1034617 - DNA, 33 bp, Homo sapien; identical to SEQ ID NO: 1034615

SEQ ID NO: 1034618 - DNA, 33 bp, Homo sapien; identical to SEQ ID NO: 1034616

SEQ ID NO: 1034619 - DNA, 33 bp, Homo sapien
tgaagtgcctgaagcaacactactaatttccca

SEQ ID NO: 1034620 - DNA, 33 bp, Homo sapien
tgaagtgcctgaagcagcactactaatttccca

SEQ ID NO: 1034621 - DNA, 33 bp, Homo sapien
ataagtcagaatgaatcaaaccatcccccttcg

SEQ ID NO: 1034622 - DNA, 33 bp, Homo sapien
ataagtcagaatgaatgaaaccatcccccttcg

SEQ ID NO: 1034623 - DNA, 33 bp, Homo sapien
tcaatctctgaaaacaacaggaaaagattgaaa

SEQ ID NO: 1034624 - DNA, 33 bp, Homo sapien
tcaatctctgaaaacaccaggaaaagattgaaa

SEQ ID NO: 1034625 - DNA, 33 bp, Homo sapien
atagctaaagcatccaaatttcatgtattcttt

SEQ ID NO: 1034626 - DNA, 33 bp, Homo sapien
atagctaaagcatccagatttcatgtattcttt

SEQ ID NO: 1034627 - DNA, 33 bp, Homo sapien
tatacaaagagcaataaaaagcagctgattggg

SEQ ID NO: 1034628 - DNA, 33 bp, Homo sapien
tatacaaagagcaatataaagcagctgattggg

SEQ ID NO: 1034629 - DNA, 33 bp, Homo sapien
tttaacctttctcctacctgcatactcctttaa

SEQ ID NO: 1034630 - DNA, 33 bp, Homo sapien
tttaacctttctcctatctgcatactcctttaa

SEQ ID NO: 1034631 - DNA, 33 bp, Homo sapien
tgcaatgcaatttccacgttggctaagaaaatt

SEQ ID NO: 1034632 - DNA, 33 bp, Homo sapien
tgcaatgcaatttccatgttggctaagaaaatt

SEQ ID NO: 1034633 - DNA, 33 bp, Homo sapien
gatggctcctctcaaactactgtggcttatgaa

SEQ ID NO: 1034634 - DNA, 33 bp, Homo sapien
gatggctcctctcaaagtactgtggcttatgaa

SEQ ID NO: 1034635 - DNA, 33 bp, Homo sapien
gcaatgtgaaataagcaacggaaacatcagtga

SEQ ID NO: 1034636 - DNA, 33 bp, Homo sapien
gcaatgtgaaataagcgacggaaacatcagtga

SEQ ID NO: 1034637 - DNA, 33 bp, Homo sapien
gctgctatcagaagacaataccttagatcagct

SEQ ID NO: 1034638 - DNA, 33 bp, Homo sapien
gctgctatcagaagacgataccttagatcagct

SEQ ID NO: 1034639 - DNA, 33 bp, Homo sapien
tgatgcagcaacaaataattgttccaaaactgc

SEQ ID NO: 1034640 - DNA, 33 bp, Homo sapien
tgatgcagcaacaaatgattgttccaaaactgc

SEQ ID NO: 1034641 - DNA, 33 bp, Homo sapien
ctcatcattgtcttaacagtccttctatcaggg

SEQ ID NO: 1034642 - DNA, 33 bp, Homo sapien
ctcatcattgtcttaagagtccttctatcaggg

SEQ ID NO: 1034643 - DNA, 33 bp, Homo sapien
aatttgctctaatttacccatttctaaagtgga

SEQ ID NO: 1034644 - DNA, 33 bp, Homo sapien
aatttgctctaatttatccatttctaaagtgga

SEQ ID NO: 1034645 - DNA, 33 bp, Homo sapien
tcctgaattcctatacaaagagtgcaatagtaa

SEQ ID NO: 1034646 - DNA, 33 bp, Homo sapien
tcctgaattcctatacgaagagtgcaatagtaa

SEQ ID NO: 1034647 - DNA, 33 bp, Homo sapien
gaatgtgcagatctaactactcccattaagacc

SEQ ID NO: 1034648 - DNA, 33 bp, Homo sapien
gaatgtgcagatctaattactcccattaagacc

SEQ ID NO: 1034649 - DNA, 33 bp, Homo sapien
aatgtggactttgtcaagttgtgaaataaagtg

SEQ ID NO: 1034650 - DNA, 33 bp, Homo sapien
aatgtggactttgtcacgttgtgaaataaagtg

SEQ ID NO: 1034651 - DNA, 33 bp, Homo sapien
tgatatcttttataaactctcacgccataggtg

SEQ ID NO: 1034652 - DNA, 33 bp, Homo sapien
tgatatcttttataaattctcacgccataggtg

SEQ ID NO: 1034653 - DNA, 33 bp, Homo sapien
ctccattggcctgtgaataacagggtgcatgga

SEQ ID NO: 1034654 - DNA, 33 bp, Homo sapien
ctccattggcctgtgagtaacagggtgcatgga

SEQ ID NO: 1034655 - DNA, 33 bp, Homo sapien
atgtgtcaggccttcaagaatttatacacttga

SEQ ID NO: 1034656 - DNA, 33 bp, Homo sapien
atgtgtcaggccttcaggaatttatacacttga

SEQ ID NO: 1034657 - DNA, 33 bp, Homo sapien
aaagaagctaaactgacagagaaacttaaatgc

SEQ ID NO: 1034658 - DNA, 33 bp, Homo sapien
aaagaagctaaactgagagagaaacttaaatgc

SEQ ID NO: 1034659 - DNA, 33 bp, Homo sapien
tttctttacttgaaaaatcaccattaagtcaag

SEQ ID NO: 1034660 - DNA, 33 bp, Homo sapien
tttctttacttgaaaactcaccattaagtcaag

SEQ ID NO: 1034661 - DNA, 33 bp, Homo sapien
ggctactgtattggacagcatagtgtagaacac

SEQ ID NO: 1034662 - DNA, 33 bp, Homo sapien
ggctactgtattggacggcatagtgtagaacac

SEQ ID NO: 1034663 - DNA, 33 bp, Homo sapien
gaattgaaagcttcataagttaaaagagctaca

SEQ ID NO: 1034664 - DNA, 33 bp, Homo sapien
gaattgaaagcttcatgagttaaaagagctaca

SEQ ID NO: 1034665 - DNA, 33 bp, Homo sapien
aaatctcctagcaatcaccagtactagcatttt

SEQ ID NO: 1034666 - DNA, 33 bp, Homo sapien
aaatctcctagcaatcgccagtactagcatttt

SEQ ID NO: 1034667 - DNA, 33 bp, Homo sapien
gtcattatttaagacaataactatgatcttggt

SEQ ID NO: 1034668 - DNA, 33 bp, Homo sapien
gtcattatttaagacagtaactatgatcttggt

SEQ ID NO: 1034669 - DNA, 33 bp, Homo sapien
attgagtaaatctggccactgtagaaacaccat

SEQ ID NO: 1034670 - DNA, 33 bp, Homo sapien
attgagtaaatctggctactgtagaaacaccat

SEQ ID NO: 1034671 - DNA, 33 bp, Homo sapien
gcttttacatatagaagcgggtatctcaggatc

SEQ ID NO: 1034672 - DNA, 33 bp, Homo sapien
gcttttacatatagaatcgggtatctcaggatc

SEQ ID NO: 1034673 - DNA, 33 bp, Homo sapien
atgaaaaggctgacaaaaatcttggaaaatatt

SEQ ID NO: 1034674 - DNA, 33 bp, Homo sapien
atgaaaaggctgacaagaatcttggaaaatatt

SEQ ID NO: 1034675 - DNA, 33 bp, Homo sapien
gaaagatgacactagcaaacaccatgagaatac

SEQ ID NO: 1034676 - DNA, 33 bp, Homo sapien
gaaagatgacactagcgaacaccatgagaatac

SEQ ID NO: 1034677 - DNA, 33 bp, Homo sapien
actgttctagtgatgacgtaccaaaaactgtag

SEQ ID NO: 1034678 - DNA, 33 bp, Homo sapien
actgttctagtgatgatgtaccaaaaactgtag

SEQ ID NO: 1034679 - DNA, 33 bp, Homo sapien
tgtgccaaaacagttaccaattcacactgtcaa

SEQ ID NO: 1034680 - DNA, 33 bp, Homo sapien
tgtgccaaaacagttatcaattcacactgtcaa

SEQ ID NO: 1034681 - DNA, 33 bp, Homo sapien
caatttttacattgtgaatttgagtttgaatat

SEQ ID NO: 1034682 - DNA, 33 bp, Homo sapien
caatttttacattgtgtatttgagtttgaatat

SEQ ID NO: 1034683 - DNA, 33 bp, Homo sapien
agaaaagaggaaagcaacagagggatggatgaa

SEQ ID NO: 1034684 - DNA, 33 bp, Homo sapien
agaaaagaggaaagcaccagagggatggatgaa

SEQ ID NO: 1034685 - DNA, 33 bp, Homo sapien
agtcttgctgactacaaacctaattttcctatt

SEQ ID NO: 1034686 - DNA, 33 bp, Homo sapien
agtcttgctgactacagacctaattttcctatt

SEQ ID NO: 1034687 - DNA, 33 bp, Homo sapien
ggtgtttctgatgccaatcaattatttttacaa

SEQ ID NO: 1034688 - DNA, 33 bp, Homo sapien
ggtgtttctgatgccattcaattatttttacaa

SEQ ID NO: 1034689 - DNA, 33 bp, Homo sapien
agaaaatctgacaaaacgttgccttgaattatt

SEQ ID NO: 1034690 - DNA, 33 bp, Homo sapien
agaaaatctgacaaaatgttgccttgaattatt

SEQ ID NO: 1034691 - DNA, 33 bp, Homo sapien
ctttaagtgctctacagaaatacataaatacag

SEQ ID NO: 1034692 - DNA, 33 bp, Homo sapien
ctttaagtgctctacataaatacataaatacag

SEQ ID NO: 1034693 - DNA, 33 bp, Homo sapien
atggtttctgtaaatacagttgagtgagatatt

SEQ ID NO: 1034694 - DNA, 33 bp, Homo sapien
atggtttctgtaaatatagttgagtgagatatt

SEQ ID NO: 1034695 - DNA, 33 bp, Homo sapien
ctcaaggatcctataaaattcacagatgcgaac

SEQ ID NO: 1034696 - DNA, 33 bp, Homo sapien
ctcaaggatcctataacattcacagatgcgaac

SEQ ID NO: 1034697 - DNA, 33 bp, Homo sapien
atggaaaattttcaaaatctcgtaaatggctca

SEQ ID NO: 1034698 - DNA, 33 bp, Homo sapien
atggaaaattttcaaagtctcgtaaatggctca

SEQ ID NO: 1034699 - DNA, 33 bp, Homo sapien
tttagcatagccacaactcaattttttttaact

SEQ ID NO: 1034700 - DNA, 33 bp, Homo sapien
tttagcatagccacaattcaattttttttaact

SEQ ID NO: 1034701 - DNA, 33 bp, Homo sapien
ccttatgatgctcttaagtacctgttcctcaaa

SEQ ID NO: 1034702 - DNA, 33 bp, Homo sapien
ccttatgatgctcttaggtacctgttcctcaaa

SEQ ID NO: 1034703 - DNA, 33 bp, Homo sapien
tctatgggttcaagaaagagattctgaggcccc

SEQ ID NO: 1034704 - DNA, 33 bp, Homo sapien
tctatgggttcaagaacgagattctgaggcccc

SEQ ID NO: 1034705 - DNA, 33 bp, Homo sapien
ctattttccataaacacgtccattgtgaatcta

SEQ ID NO: 1034706 - DNA, 33 bp, Homo sapien
ctattttccataaacatgtccattgtgaatcta

SEQ ID NO: 1034707 - DNA, 33 bp, Homo sapien
acaccttgaatatatacggtttttatttgccaa

SEQ ID NO: 1034708 - DNA, 33 bp, Homo sapien
acaccttgaatatatatggtttttatttgccaa

SEQ ID NO: 1034709 - DNA, 33 bp, Homo sapien
acaatctgctctcttaacatattccaagtaaac

SEQ ID NO: 1034710 - DNA, 33 bp, Homo sapien
acaatctgctctcttatcatattccaagtaaac

SEQ ID NO: 1034711 - DNA, 33 bp, Homo sapien
ttttagctttcttgcaacggtctaaacttcctg

SEQ ID NO: 1034712 - DNA, 33 bp, Homo sapien
ttttagctttcttgcagcggtctaaacttcctg

SEQ ID NO: 1034713 - DNA, 33 bp, Homo sapien
gtaagatatgatcgaaacatcttactgtggtgt

SEQ ID NO: 1034714 - DNA, 33 bp, Homo sapien
gtaagatatgatcgaagcatcttactgtggtgt

SEQ ID NO: 1034715 - DNA, 33 bp, Homo sapien
ttatagacagatactaaggttgattctatcttt

SEQ ID NO: 1034716 - DNA, 33 bp, Homo sapien
ttatagacagatactagggttgattctatcttt

SEQ ID NO: 1034717 - DNA, 33 bp, Homo sapien
caaactattgcaagggcaaaaaatcaaacacct

SEQ ID NO: 1034718 - DNA, 33 bp, Homo sapien
caaactattgcaagggtaaaaaatcaaacacct

SEQ ID NO: 1034719 - DNA, 33 bp, Homo sapien
atgaatatggaaatagcagaggcattttaaaaa

SEQ ID NO: 1034720 - DNA, 33 bp, Homo sapien
atgaatatggaaatagtagaggcattttaaaaa

SEQ ID NO: 1034721 - DNA, 33 bp, Homo sapien
ctagttaattggtaaacaacttaacatccatct

SEQ ID NO: 1034722 - DNA, 33 bp, Homo sapien
ctagttaattggtaaataacttaacatccatct

SEQ ID NO: 1034723 - DNA, 33 bp, Homo sapien
cagcactgttttataaccgcatgccttcattcg

SEQ ID NO: 1034724 - DNA, 33 bp, Homo sapien
cagcactgttttataagcgcatgccttcattcg

SEQ ID NO: 1034725 - DNA, 33 bp, Homo sapien
ctggtcttctctggcacagcagtcctttctcat

SEQ ID NO: 1034726 - DNA, 33 bp, Homo sapien
ctggtcttctctggcatagcagtcctttctcat

SEQ ID NO: 1034727 - DNA, 33 bp, Homo sapien
cacagatccaaattccaacataaaagcaagaca

SEQ ID NO: 1034728 - DNA, 33 bp, Homo sapien
cacagatccaaattcccacataaaagcaagaca

SEQ ID NO: 1034729 - DNA, 33 bp, Homo sapien
aatgatacaaatgtacaatgacacagatccaaa

SEQ ID NO: 1034730 - DNA, 33 bp, Homo sapien
aatgatacaaatgtacgatgacacagatccaaa

SEQ ID NO: 1034731 - DNA, 33 bp, Homo sapien
tgacaaaaatataccacggaggaaggacacccg

SEQ ID NO: 1034732 - DNA, 33 bp, Homo sapien
tgacaaaaatataccatggaggaaggacacccg

SEQ ID NO: 1034733 - DNA, 33 bp, Homo sapien
ataaaagatagaaaacagagagttgtgactata

SEQ ID NO: 1034734 - DNA, 33 bp, Homo sapien
ataaaagatagaaaacggagagttgtgactata

SEQ ID NO: 1034735 - DNA, 33 bp, Homo sapien
caatatatcttgacaccatttatgatgatgcag

SEQ ID NO: 1034736 - DNA, 33 bp, Homo sapien
caatatatcttgacactatttatgatgatgcag

SEQ ID NO: 1034737 - DNA, 33 bp, Homo sapien
atgtcatcacaaacaccgaattaagtaactact

SEQ ID NO: 1034738 - DNA, 33 bp, Homo sapien
atgtcatcacaaacactgaattaagtaactact

SEQ ID NO: 1034739 - DNA, 33 bp, Homo sapien
ttgttgatgcctactacgtagcagacatggact

SEQ ID NO: 1034740 - DNA, 33 bp, Homo sapien
ttgttgatgcctactatgtagcagacatggact

SEQ ID NO: 1034741 - DNA, 33 bp, Homo sapien
tttttgtttgacctgaaatcttatttattatag

SEQ ID NO: 1034742 - DNA, 33 bp, Homo sapien
tttttgtttgacctgagatcttatttattatag

SEQ ID NO: 1034743 - DNA, 33 bp, Homo sapien
gacatcaccagggccacgatgtcattgtggttt

SEQ ID NO: 1034744 - DNA, 33 bp, Homo sapien
gacatcaccagggccatgatgtcattgtggttt

SEQ ID NO: 1034745 - DNA, 33 bp, Homo sapien
agcccattttttatcacgaggtactagtgcttg

SEQ ID NO: 1034746 - DNA, 33 bp, Homo sapien
agcccattttttatcatgaggtactagtgcttg

SEQ ID NO: 1034747 - DNA, 33 bp, Homo sapien
gaggtgaatgaattagcagggaagattagagag

SEQ ID NO: 1034748 - DNA, 33 bp, Homo sapien
gaggtgaatgaattagtagggaagattagagag

SEQ ID NO: 1034749 - DNA, 33 bp, Homo sapien
tgcagatgtgttttggcatctaagcaacagcac

SEQ ID NO: 1034750 - DNA, 33 bp, Homo sapien
tgcagatgtgttttgggatctaagcaacagcac

SEQ ID NO: 1034751 - DNA, 33 bp, Homo sapien
caatagttttaggagaagcagttgcaatcattg

SEQ ID NO: 1034752 - DNA, 33 bp, Homo sapien
caatagttttaggagaggcagttgcaatcattg

SEQ ID NO: 1034753 - DNA, 33 bp, Homo sapien
tcttgctagaaactacaaaggccactggagatc

SEQ ID NO: 1034754 - DNA, 33 bp, Homo sapien
tcttgctagaaactacgaaggccactggagatc

SEQ ID NO: 1034755 - DNA, 33 bp, Homo sapien
agattaatctaaactcagagtgtacttgaaagc

SEQ ID NO: 1034756 - DNA, 33 bp, Homo sapien
agattaatctaaactcggagtgtacttgaaagc

SEQ ID NO: 1034757 - DNA, 33 bp, Homo sapien
tcaagtgagcaacatacgtgaaggtagggagca

SEQ ID NO: 1034758 - DNA, 33 bp, Homo sapien
tcaagtgagcaacatatgtgaaggtagggagca

SEQ ID NO: 1034759 - DNA, 33 bp, Homo sapien
taagcaattagctataacctgtccaagctccta

SEQ ID NO: 1034760 - DNA, 33 bp, Homo sapien
taagcaattagctatatcctgtccaagctccta

SEQ ID NO: 1034761 - DNA, 33 bp, Homo sapien
gccatcaatatttttgcaagcaatgaaaccagc

SEQ ID NO: 1034762 - DNA, 33 bp, Homo sapien
gccatcaatatttttgtaagcaatgaaaccagc

SEQ ID NO: 1034763 - DNA, 33 bp, Homo sapien
gtagacctagcaaaccgatgtacatggatggaa

SEQ ID NO: 1034764 - DNA, 33 bp, Homo sapien
gtagacctagcaaacctatgtacatggatggaa

SEQ ID NO: 1034765 - DNA, 33 bp, Homo sapien
gaatgacaattactcactaggtatagaaaattg

SEQ ID NO: 1034766 - DNA, 33 bp, Homo sapien
gaatgacaattactcattaggtatagaaaattg

SEQ ID NO: 1034767 - DNA, 33 bp, Homo sapien
ttttagctcaactctacgaatgtgtactgatta

SEQ ID NO: 1034768 - DNA, 33 bp, Homo sapien
ttttagctcaactctatgaatgtgtactgatta

SEQ ID NO: 1034769 - DNA, 33 bp, Homo sapien
gtacaacagcttattaagtaagtggtagcctgt

SEQ ID NO: 1034770 - DNA, 33 bp, Homo sapien
gtacaacagcttattacgtaagtggtagcctgt

SEQ ID NO: 1034771 - DNA, 33 bp, Homo sapien
agcccagaacacaagtaaagtaatccatagttg

SEQ ID NO: 1034772 - DNA, 33 bp, Homo sapien
agcccagaacacaagtcaagtaatccatagttg

SEQ ID NO: 1034773 - DNA, 33 bp, Homo sapien
aatcatgtgtaaataccaggatgcactgttgcc

SEQ ID NO: 1034774 - DNA, 33 bp, Homo sapien
aatcatgtgtaaatactaggatgcactgttgcc

SEQ ID NO: 1034775 - DNA, 33 bp, Homo sapien
catgcttggttacccaatgaggatacccactgg

SEQ ID NO: 1034776 - DNA, 33 bp, Homo sapien
catgcttggttacccagtgaggatacccactgg

SEQ ID NO: 1034777 - DNA, 33 bp, Homo sapien
agacaaaaagttgtgacagcatagaaagctcac

SEQ ID NO: 1034778 - DNA, 33 bp, Homo sapien
agacaaaaagttgtgatagcatagaaagctcac

SEQ ID NO: 1034779 - DNA, 33 bp, Homo sapien
gaagagaaaggagggcaaatgaaggagatgtaa

SEQ ID NO: 1034780 - DNA, 33 bp, Homo sapien
gaagagaaaggagggcgaatgaaggagatgtaa

SEQ ID NO: 1034781 - DNA, 33 bp, Homo sapien
caaaaatggtcaactcaagaataatttaccaaa

SEQ ID NO: 1034782 - DNA, 33 bp, Homo sapien
caaaaatggtcaactcgagaataatttaccaaa

SEQ ID NO: 1034783 - DNA, 33 bp, Homo sapien
tcatccccgttgagataacattttgaaaagaga

SEQ ID NO: 1034784 - DNA, 33 bp, Homo sapien
tcatccccgttgagatgacattttgaaaagaga

SEQ ID NO: 1034785 - DNA, 33 bp, Homo sapien
tagaaacaggtttatacgataacatgaagggtt

SEQ ID NO: 1034786 - DNA, 33 bp, Homo sapien
tagaaacaggtttatatgataacatgaagggtt

SEQ ID NO: 1034787 - DNA, 33 bp, Homo sapien
tgaaggaataagaatgccaggtttccttaccct

SEQ ID NO: 1034788 - DNA, 33 bp, Homo sapien
tgaaggaataagaatgtcaggtttccttaccct

SEQ ID NO: 1034789 - DNA, 33 bp, Homo sapien
ctgcttcagcaggtcaaaactgttttttggtca

SEQ ID NO: 1034790 - DNA, 33 bp, Homo sapien
ctgcttcagcaggtcagaactgttttttggtca

SEQ ID NO: 1034791 - DNA, 33 bp, Homo sapien
aaataactgaataccaccaccaatcaacaatgt

SEQ ID NO: 1034792 - DNA, 33 bp, Homo sapien
aaataactgaataccatcaccaatcaacaatgt

SEQ ID NO: 1034793 - DNA, 33 bp, Homo sapien
caaaatagctatgcaaagagatacattttaaaa

SEQ ID NO: 1034794 - DNA, 33 bp, Homo sapien
caaaatagctatgcaaggagatacattttaaaa

SEQ ID NO: 1034795 - DNA, 33 bp, Homo sapien
cattcttctgtgggtacgctttcttcacagcta

SEQ ID NO: 1034796 - DNA, 33 bp, Homo sapien
cattcttctgtgggtatgctttcttcacagcta

SEQ ID NO: 1034797 - DNA, 33 bp, Homo sapien; identical to SEQ ID NO: 1034795

SEQ ID NO: 1034798 - DNA, 33 bp, Homo sapien; identical to SEQ ID NO: 1034796

SEQ ID NO: 1034799 - DNA, 33 bp, Homo sapien
tgctacacttgatagcacagtacgtagtcaaca

SEQ ID NO: 1034800 - DNA, 33 bp, Homo sapien
tgctacacttgatagcgcagtacgtagtcaaca

SEQ ID NO: 1034801 - DNA, 33 bp, Homo sapien
aaatggaatgatttgacggtattctagaaaact

SEQ ID NO: 1034802 - DNA, 33 bp, Homo sapien
aaatggaatgatttgatggtattctagaaaact

SEQ ID NO: 1034803 - DNA, 33 bp, Homo sapien
attattccgttcagaaaaaagacagaaaatatt

SEQ ID NO: 1034804 - DNA, 33 bp, Homo sapien
attattccgttcagaagaaagacagaaaatatt

SEQ ID NO: 1034805 - DNA, 33 bp, Homo sapien
tgaaacactaaccctaacatgacagaagatgct

SEQ ID NO: 1034806 - DNA, 33 bp, Homo sapien
tgaaacactaaccctaccatgacagaagatgct

SEQ ID NO: 1034807 - DNA, 33 bp, Homo sapien
gaaagataaaggagaaagaatcagggttggaga

SEQ ID NO: 1034808 - DNA, 33 bp, Homo sapien
gaaagataaaggagaaggaatcagggttggaga

SEQ ID NO: 1034809 - DNA, 33 bp, Homo sapien
tctttataaacagggcaataattgaggacacta

SEQ ID NO: 1034810 - DNA, 33 bp, Homo sapien
tctttataaacagggcgataattgaggacacta

SEQ ID NO: 1034811 - DNA, 33 bp, Homo sapien
gtgtattggttctgctaaagactttcatttgtt

SEQ ID NO: 1034812 - DNA, 33 bp, Homo sapien
gtgtattggttctgctgaagactttcatttgtt

SEQ ID NO: 1034813 - DNA, 33 bp, Homo sapien
tcgtatttttcagctgcagacacaatgtcatca

SEQ ID NO: 1034814 - DNA, 33 bp, Homo sapien
tcgtatttttcagctggagacacaatgtcatca

SEQ ID NO: 1034815 - DNA, 33 bp, Homo sapien
gaaaataaaactttacccagtcccatatgccaa

SEQ ID NO: 1034816 - DNA, 33 bp, Homo sapien
gaaaataaaactttactcagtcccatatgccaa

SEQ ID NO: 1034817 - DNA, 33 bp, Homo sapien
caggatgaacgttaacaagtttttactgacagt

SEQ ID NO: 1034818 - DNA, 33 bp, Homo sapien
caggatgaacgttaacgagtttttactgacagt

SEQ ID NO: 1034819 - DNA, 33 bp, Homo sapien
cttgatgtgtcaggacaattttgttgctgtagg

SEQ ID NO: 1034820 - DNA, 33 bp, Homo sapien
cttgatgtgtcaggaccattttgttgctgtagg

SEQ ID NO: 1034821 - DNA, 33 bp, Homo sapien
cagagtcttcccacaactattcgccaaacgtta

SEQ ID NO: 1034822 - DNA, 33 bp, Homo sapien
cagagtcttcccacaattattcgccaaacgtta

SEQ ID NO: 1034823 - DNA, 33 bp, Homo sapien
tgtgtctactcctagcccccaggaaagattctg

SEQ ID NO: 1034824 - DNA, 33 bp, Homo sapien
tgtgtctactcctagcgcccaggaaagattctg

SEQ ID NO: 1034825 - DNA, 33 bp, Homo sapien
ccaggtggctgcagaaataattatggaaaaaag

SEQ ID NO: 1034826 - DNA, 33 bp, Homo sapien
ccaggtggctgcagaattaattatggaaaaaag

SEQ ID NO: 1034827 - DNA, 33 bp, Homo sapien
cgaacaacactaattacccagttgatcttaggc

SEQ ID NO: 1034828 - DNA, 33 bp, Homo sapien
cgaacaacactaattatccagttgatcttaggc

SEQ ID NO: 1034829 - DNA, 33 bp, Homo sapien
ttctttaacttgtcaaatactgaataaactcat

SEQ ID NO: 1034830 - DNA, 33 bp, Homo sapien
ttctttaacttgtcaagtactgaataaactcat

SEQ ID NO: 1034831 - DNA, 33 bp, Homo sapien
catatgtattttaacacctccaccaccatctca

SEQ ID NO: 1034832 - DNA, 33 bp, Homo sapien
catatgtattttaacatctccaccaccatctca

SEQ ID NO: 1034833 - DNA, 33 bp, Homo sapien
ggaggaattcctgaacgggtctgggagaagcca

SEQ ID NO: 1034834 - DNA, 33 bp, Homo sapien
ggaggaattcctgaactggtctgggagaagcca

SEQ ID NO: 1034835 - DNA, 33 bp, Homo sapien
gtgtctctatgtggtaaaaaattcctccttttc

SEQ ID NO: 1034836 - DNA, 33 bp, Homo sapien
gtgtctctatgtggtacaaaattcctccttttc

SEQ ID NO: 1034837 - DNA, 33 bp, Homo sapien
gaaatgctgaatgaaaactttacatctgccata

SEQ ID NO: 1034838 - DNA, 33 bp, Homo sapien
gaaatgctgaatgaaacctttacatctgccata

SEQ ID NO: 1034839 - DNA, 33 bp, Homo sapien
gattcaaatcgtcagacgaaggcctatattggt

SEQ ID NO: 1034840 - DNA, 33 bp, Homo sapien
gattcaaatcgtcagaggaaggcctatattggt

SEQ ID NO: 1034841 - DNA, 33 bp, Homo sapien
cttgtttctaagtgtccaaagtctctgttactt

SEQ ID NO: 1034842 - DNA, 33 bp, Homo sapien
cttgtttctaagtgtctaaagtctctgttactt

SEQ ID NO: 1034843 - DNA, 33 bp, Homo sapien
aggaagaaaatcatgccaatggtacagaggtaa

SEQ ID NO: 1034844 - DNA, 33 bp, Homo sapien
aggaagaaaatcatgctaatggtacagaggtaa

SEQ ID NO: 1034845 - DNA, 33 bp, Homo sapien
tatatgtgggggatgagaaaatatctgtgtgtg

SEQ ID NO: 1034846 - DNA, 33 bp, Homo sapien
tatatgtgggggatgataaaatatctgtgtgtg

SEQ ID NO: 1034847 - DNA, 33 bp, Homo sapien
tctctggagctatagaatattgaggccaatgtg

SEQ ID NO: 1034848 - DNA, 33 bp, Homo sapien
tctctggagctatagagtattgaggccaatgtg

SEQ ID NO: 1034849 - DNA, 33 bp, Homo sapien
tgttgcaattgctttcaagtgcttagtcataaa

SEQ ID NO: 1034850 - DNA, 33 bp, Homo sapien
tgttgcaattgctttcgagtgcttagtcataaa

SEQ ID NO: 1034851 - DNA, 33 bp, Homo sapien
ttgaacaatcaaggcaaaactgtgactttgggg

SEQ ID NO: 1034852 - DNA, 33 bp, Homo sapien
ttgaacaatcaaggcagaactgtgactttgggg

SEQ ID NO: 1034853 - DNA, 33 bp, Homo sapien
acagagtaaaatactaaggagtaaagagacata

SEQ ID NO: 1034854 - DNA, 33 bp, Homo sapien
acagagtaaaatactacggagtaaagagacata

SEQ ID NO: 1034855 - DNA, 33 bp, Homo sapien
atactctaagggcttccccatattgttacagct

SEQ ID NO: 1034856 - DNA, 33 bp, Homo sapien
atactctaagggcttctccatattgttacagct

SEQ ID NO: 1034857 - DNA, 33 bp, Homo sapien
aaatacacccattccaaatggaagaaattgact

SEQ ID NO: 1034858 - DNA, 33 bp, Homo sapien
aaatacacccattccagatggaagaaattgact

SEQ ID NO: 1034859 - DNA, 33 bp, Homo sapien
ctctcacatttcataaagtttgtttggtgaaca

SEQ ID NO: 1034860 - DNA, 33 bp, Homo sapien
ctctcacatttcataatgtttgtttggtgaaca

SEQ ID NO: 1034861 - DNA, 33 bp, Homo sapien
gagatacaggacatggacatgatacaggaggaa

SEQ ID NO: 1034862 - DNA, 33 bp, Homo sapien
gagatacaggacatggtcatgatacaggaggaa

SEQ ID NO: 1034863 - DNA, 33 bp, Homo sapien
ttggccacctcccaaagatatcattctaatgtt

SEQ ID NO: 1034864 - DNA, 33 bp, Homo sapien
ttggccacctcccaaatatatcattctaatgtt

SEQ ID NO: 1034865 - DNA, 33 bp, Homo sapien
tagtggaaaacaatcacactataagctttggaa

SEQ ID NO: 1034866 - DNA, 33 bp, Homo sapien
tagtggaaaacaatcatactataagctttggaa

SEQ ID NO: 1034867 - DNA, 33 bp, Homo sapien
tgtggttctcactaaccatccactgcttttgac

SEQ ID NO: 1034868 - DNA, 33 bp, Homo sapien
tgtggttctcactaactatccactgcttttgac

SEQ ID NO: 1034869 - DNA, 33 bp, Homo sapien
gagaaccacagaaaaactgaggtcacaaaaaca

SEQ ID NO: 1034870 - DNA, 33 bp, Homo sapien
gagaaccacagaaaaattgaggtcacaaaaaca

SEQ ID NO: 1034871 - DNA, 33 bp, Homo sapien
tgaaatgaatagtttgaagtatgaattcagata

SEQ ID NO: 1034872 - DNA, 33 bp, Homo sapien
tgaaatgaatagtttggagtatgaattcagata

SEQ ID NO: 1034873 - DNA, 33 bp, Homo sapien
cctggaaattgaggaccggcacttggtcaagag

SEQ ID NO: 1034874 - DNA, 33 bp, Homo sapien
cctggaaattgaggactggcacttggtcaagag

SEQ ID NO: 1034875 - DNA, 33 bp, Homo sapien
tataatatttgcatcaagaattacaccatctat

SEQ ID NO: 1034876 - DNA, 33 bp, Homo sapien
tataatatttgcatcaggaattacaccatctat

SEQ ID NO: 1034877 - DNA, 33 bp, Homo sapien
ttagcaatcagaaaaaaatggagcgctacggtg

SEQ ID NO: 1034878 - DNA, 33 bp, Homo sapien
ttagcaatcagaaaaagatggagcgctacggtg

SEQ ID NO: 1034879 - DNA, 33 bp, Homo sapien
aaaatgtaattagacaagctaaagaagacttat

SEQ ID NO: 1034880 - DNA, 33 bp, Homo sapien
aaaatgtaattagacaggctaaagaagacttat

SEQ ID NO: 1034881 - DNA, 33 bp, Homo sapien
caggaatgttttttacaatgtcaaagcatcata

SEQ ID NO: 1034882 - DNA, 33 bp, Homo sapien
caggaatgttttttacgatgtcaaagcatcata

SEQ ID NO: 1034883 - DNA, 33 bp, Homo sapien
gagaaatgcataattgacaaatcttattatgtt

SEQ ID NO: 1034884 - DNA, 33 bp, Homo sapien
gagaaatgcataattgtcaaatcttattatgtt

SEQ ID NO: 1034885 - DNA, 33 bp, Homo sapien
atctaaaataacaagaaaagtcacagtaaaaat

SEQ ID NO: 1034886 - DNA, 33 bp, Homo sapien
atctaaaataacaagagaagtcacagtaaaaat

SEQ ID NO: 1034887 - DNA, 33 bp, Homo sapien
gctacaaggaactaaaatcatgtgccatttaac

SEQ ID NO: 1034888 - DNA, 33 bp, Homo sapien
gctacaaggaactaaagtcatgtgccatttaac

SEQ ID NO: 1034889 - DNA, 33 bp, Homo sapien
gctctagtttaccttacatcagcattcattctg

SEQ ID NO: 1034890 - DNA, 33 bp, Homo sapien
gctctagtttaccttagatcagcattcattctg

SEQ ID NO: 1034891 - DNA, 33 bp, Homo sapien
gctatacatttgcacagatacttctttttgttc

SEQ ID NO: 1034892 - DNA, 33 bp, Homo sapien
gctatacatttgcacatatacttctttttgttc

SEQ ID NO: 1034893 - DNA, 33 bp, Homo sapien
gtgtacaagctcaaaagagactcatcactatat

SEQ ID NO: 1034894 - DNA, 33 bp, Homo sapien
gtgtacaagctcaaaatagactcatcactatat

SEQ ID NO: 1034895 - DNA, 33 bp, Homo sapien
aaatacaagccaataaacataattttctaataa

SEQ ID NO: 1034896 - DNA, 33 bp, Homo sapien
aaatacaagccaataagcataattttctaataa

SEQ ID NO: 1034897 - DNA, 33 bp, Homo sapien
tgaccacatacattatcaagatgagcacaaaaa

SEQ ID NO: 1034898 - DNA, 33 bp, Homo sapien
tgaccacatacattatgaagatgagcacaaaaa

SEQ ID NO: 1034899 - DNA, 33 bp, Homo sapien
aagtcttgggtgaccaaaaagtcccttcagaaa

SEQ ID NO: 1034900 - DNA, 33 bp, Homo sapien
aagtcttgggtgaccagaaagtcccttcagaaa

SEQ ID NO: 1034901 - DNA, 33 bp, Homo sapien
ttttactccctctttaacttgtaagacagagca

SEQ ID NO: 1034902 - DNA, 33 bp, Homo sapien
ttttactccctctttagcttgtaagacagagca

SEQ ID NO: 1034903 - DNA, 33 bp, Homo sapien
aaatagtcaaatacaacgaaatgtgcaaactag

SEQ ID NO: 1034904 - DNA, 33 bp, Homo sapien
aaatagtcaaatacaatgaaatgtgcaaactag

SEQ ID NO: 1034905 - DNA, 33 bp, Homo sapien
gttaaagacaagcatacacacctggctattctt

SEQ ID NO: 1034906 - DNA, 33 bp, Homo sapien
gttaaagacaagcatatacacctggctattctt

SEQ ID NO: 1034907 - DNA, 33 bp, Homo sapien
actatagcccagatcacaggattttagagagat

SEQ ID NO: 1034908 - DNA, 33 bp, Homo sapien
actatagcccagatcataggattttagagagat

SEQ ID NO: 1034909 - DNA, 33 bp, Homo sapien
gaggtgcaactggagcaaagcacatacttttat

SEQ ID NO: 1034910 - DNA, 33 bp, Homo sapien
gaggtgcaactggagcgaagcacatacttttat

SEQ ID NO: 1034911 - DNA, 33 bp, Homo sapien
catattataaatgtcacgctctaaattgagtgc

SEQ ID NO: 1034912 - DNA, 33 bp, Homo sapien
catattataaatgtcatgctctaaattgagtgc

SEQ ID NO: 1034913 - DNA, 33 bp, Homo sapien
ccaaatcttagaagaaagtccaagctcttaatt

SEQ ID NO: 1034914 - DNA, 33 bp, Homo sapien
ccaaatcttagaagaatgtccaagctcttaatt

SEQ ID NO: 1034915 - DNA, 33 bp, Homo sapien
atgttaggtggaggaaatattctgaagataaaa

SEQ ID NO: 1034916 - DNA, 33 bp, Homo sapien
atgttaggtggaggaagtattctgaagataaaa

SEQ ID NO: 1034917 - DNA, 33 bp, Homo sapien
tcaggttgggtttgaaatgatcctgaggagact

SEQ ID NO: 1034918 - DNA, 33 bp, Homo sapien
tcaggttgggtttgaagtgatcctgaggagact

SEQ ID NO: 1034919 - DNA, 33 bp, Homo sapien
gacataaagtaattcacaagggctgggcaaatt

SEQ ID NO: 1034920 - DNA, 33 bp, Homo sapien
gacataaagtaattcataagggctgggcaaatt

SEQ ID NO: 1034921 - DNA, 33 bp, Homo sapien
ctaggataaagtgtcaggaaattcttctagttc

SEQ ID NO: 1034922 - DNA, 33 bp, Homo sapien
ctaggataaagtgtcatgaaattcttctagttc

SEQ ID NO: 1034923 - DNA, 33 bp, Homo sapien
agatactttactaaagaatggaaaaacatcatc

SEQ ID NO: 1034924 - DNA, 33 bp, Homo sapien
agatactttactaaaggatggaaaaacatcatc

SEQ ID NO: 1034925 - DNA, 33 bp, Homo sapien
ggtggattttgcttaaacttgcctcagaaagtc

SEQ ID NO: 1034926 - DNA, 33 bp, Homo sapien
ggtggattttgcttaaccttgcctcagaaagtc

SEQ ID NO: 1034927 - DNA, 33 bp, Homo sapien
tgtttttaggctgttcaacaaaattttctgtga

SEQ ID NO: 1034928 - DNA, 33 bp, Homo sapien
tgtttttaggctgttcgacaaaattttctgtga

SEQ ID NO: 1034929 - DNA, 33 bp, Homo sapien
cttgttcattccccaacctcgcagcctcagtga

SEQ ID NO: 1034930 - DNA, 33 bp, Homo sapien
cttgttcattccccaagctcgcagcctcagtga

SEQ ID NO: 1034931 - DNA, 33 bp, Homo sapien
gattccactaattcccaaaattctcatttttct

SEQ ID NO: 1034932 - DNA, 33 bp, Homo sapien
gattccactaattcccgaaattctcatttttct

SEQ ID NO: 1034933 - DNA, 33 bp, Homo sapien
ggtgattatattctacagaaccatccttttcat

SEQ ID NO: 1034934 - DNA, 33 bp, Homo sapien
ggtgattatattctacggaaccatccttttcat

SEQ ID NO: 1034935 - DNA, 33 bp, Homo sapien
aggggatgagtgaacaaaattaaaatgaccgtg

SEQ ID NO: 1034936 - DNA, 33 bp, Homo sapien
aggggatgagtgaacacaattaaaatgaccgtg

SEQ ID NO: 1034937 - DNA, 33 bp, Homo sapien
caagggagaaagcaaaacctattcaataaatgg

SEQ ID NO: 1034938 - DNA, 33 bp, Homo sapien
caagggagaaagcaaaccctattcaataaatgg

SEQ ID NO: 1034939 - DNA, 33 bp, Homo sapien
gaatttttgtttagcacctcaaaagtaaatgca

SEQ ID NO: 1034940 - DNA, 33 bp, Homo sapien
gaatttttgtttagcatctcaaaagtaaatgca

SEQ ID NO: 1034941 - DNA, 33 bp, Homo sapien
gttaatttagctttaaacattatttggtaagtt

SEQ ID NO: 1034942 - DNA, 33 bp, Homo sapien
gttaatttagctttaatcattatttggtaagtt

SEQ ID NO: 1034943 - DNA, 33 bp, Homo sapien
actagtcttgcctccactagagtctgtcttgca

SEQ ID NO: 1034944 - DNA, 33 bp, Homo sapien
actagtcttgcctccattagagtctgtcttgca

SEQ ID NO: 1034945 - DNA, 33 bp, Homo sapien
tatatcgtatagtatcactgttcttaaaaccac

SEQ ID NO: 1034946 - DNA, 33 bp, Homo sapien
tatatcgtatagtatcgctgttcttaaaaccac

SEQ ID NO: 1034947 - DNA, 33 bp, Homo sapien
aaatctggaagataaaaccacagaaaataggca

SEQ ID NO: 1034948 - DNA, 33 bp, Homo sapien
aaatctggaagataaagccacagaaaataggca

SEQ ID NO: 1034949 - DNA, 33 bp, Homo sapien
attgtgaatgttcttcaagttgaggcttacaca

SEQ ID NO: 1034950 - DNA, 33 bp, Homo sapien
attgtgaatgttcttcgagttgaggcttacaca

SEQ ID NO: 1034951 - DNA, 33 bp, Homo sapien
ttatgagaacttctgaaagtggaaatgggcctt

SEQ ID NO: 1034952 - DNA, 33 bp, Homo sapien
ttatgagaacttctgacagtggaaatgggcctt

SEQ ID NO: 1034953 - DNA, 33 bp, Homo sapien
cttccaaaacagtctcactctttttcatcagtg

SEQ ID NO: 1034954 - DNA, 33 bp, Homo sapien
cttccaaaacagtctccctctttttcatcagtg

SEQ ID NO: 1034955 - DNA, 33 bp, Homo sapien
tgacctccctattgcaaacagttctgacaatga

SEQ ID NO: 1034956 - DNA, 33 bp, Homo sapien
tgacctccctattgcacacagttctgacaatga

SEQ ID NO: 1034957 - DNA, 33 bp, Homo sapien
taagatgaccacaatcaagtgcgctgaacaggt

SEQ ID NO: 1034958 - DNA, 33 bp, Homo sapien
taagatgaccacaatcgagtgcgctgaacaggt

SEQ ID NO: 1034959 - DNA, 33 bp, Homo sapien
ttagactctcattacactctcatttcactacct

SEQ ID NO: 1034960 - DNA, 33 bp, Homo sapien
ttagactctcattacattctcatttcactacct

SEQ ID NO: 1034961 - DNA, 33 bp, Homo sapien
gtaaagcaatattatgaacttactttggagtat

SEQ ID NO: 1034962 - DNA, 33 bp, Homo sapien
gtaaagcaatattatgtacttactttggagtat

SEQ ID NO: 1034963 - DNA, 33 bp, Homo sapien
gagttaggagcttacacggccatactggaagtg

SEQ ID NO: 1034964 - DNA, 33 bp, Homo sapien
gagttaggagcttacatggccatactggaagtg

SEQ ID NO: 1034965 - DNA, 33 bp, Homo sapien
tataggtttgaaaaggaaagtgtcattagaagg

SEQ ID NO: 1034966 - DNA, 33 bp, Homo sapien
tataggtttgaaaaggcaagtgtcattagaagg

SEQ ID NO: 1034967 - DNA, 33 bp, Homo sapien
ttggctattatgaaaaaactgcaatggacattc

SEQ ID NO: 1034968 - DNA, 33 bp, Homo sapien
ttggctattatgaaaagactgcaatggacattc

SEQ ID NO: 1034969 - DNA, 33 bp, Homo sapien
ggaaccttttgaagcaggatatgttacacccag

SEQ ID NO: 1034970 - DNA, 33 bp, Homo sapien
ggaaccttttgaagcatgatatgttacacccag

SEQ ID NO: 1034971 - DNA, 33 bp, Homo sapien
ttattgagagttttcagtaaaaggctatcttag

SEQ ID NO: 1034972 - DNA, 33 bp, Homo sapien
ttattgagagttttcattaaaaggctatcttag

SEQ ID NO: 1034973 - DNA, 33 bp, Homo sapien
agtaggatgcccctacaatgtgcttttagcccc

SEQ ID NO: 1034974 - DNA, 33 bp, Homo sapien
agtaggatgcccctacgatgtgcttttagcccc

SEQ ID NO: 1034975 - DNA, 33 bp, Homo sapien
atcatccattcctccaatgcttattatatttgt

SEQ ID NO: 1034976 - DNA, 33 bp, Homo sapien
atcatccattcctccagtgcttattatatttgt

SEQ ID NO: 1034977 - DNA, 33 bp, Homo sapien
ttgctctatcctcccactaaatccatgtcattt

SEQ ID NO: 1034978 - DNA, 33 bp, Homo sapien
ttgctctatcctcccattaaatccatgtcattt

SEQ ID NO: 1034979 - DNA, 33 bp, Homo sapien
tttctgtgtgctttaacgacgatttatattttt

SEQ ID NO: 1034980 - DNA, 33 bp, Homo sapien
tttctgtgtgctttaatgacgatttatattttt

SEQ ID NO: 1034981 - DNA, 33 bp, Homo sapien
gattaagtgaaactgccaagctatattacttta

SEQ ID NO: 1034982 - DNA, 33 bp, Homo sapien
gattaagtgaaactgctaagctatattacttta

SEQ ID NO: 1034983 - DNA, 33 bp, Homo sapien
taaaaatttccaagcaatgatgtacacagagga

SEQ ID NO: 1034984 - DNA, 33 bp, Homo sapien
taaaaatttccaagcagtgatgtacacagagga

SEQ ID NO: 1034985 - DNA, 33 bp, Homo sapien
ccaaaattcaaagataccacttcaggtccactc

SEQ ID NO: 1034986 - DNA, 33 bp, Homo sapien
ccaaaattcaaagatatcacttcaggtccactc

SEQ ID NO: 1034987 - DNA, 33 bp, Homo sapien
taacatagagacttaaccatttatctcactgaa

SEQ ID NO: 1034988 - DNA, 33 bp, Homo sapien
taacatagagacttaagcatttatctcactgaa

SEQ ID NO: 1034989 - DNA, 33 bp, Homo sapien
attgggcatatgactactacaaagggtggttct

SEQ ID NO: 1034990 - DNA, 33 bp, Homo sapien
attgggcatatgactattacaaagggtggttct

SEQ ID NO: 1034991 - DNA, 33 bp, Homo sapien
tggagatgccaacataaatatatgtgacaactg

SEQ ID NO: 1034992 - DNA, 33 bp, Homo sapien
tggagatgccaacatagatatatgtgacaactg

SEQ ID NO: 1034993 - DNA, 33 bp, Homo sapien
acttcagctcgatgagcaaaattatctatggga

SEQ ID NO: 1034994 - DNA, 33 bp, Homo sapien
acttcagctcgatgaggaaaattatctatggga

SEQ ID NO: 1034995 - DNA, 33 bp, Homo sapien
cgattattgatcaaaaacaaaaggtaatgcaca

SEQ ID NO: 1034996 - DNA, 33 bp, Homo sapien
cgattattgatcaaaatcaaaaggtaatgcaca

SEQ ID NO: 1034997 - DNA, 33 bp, Homo sapien
agggaagaatacttgaaaaaagcaataacaact

SEQ ID NO: 1034998 - DNA, 33 bp, Homo sapien
agggaagaatacttgagaaaagcaataacaact

SEQ ID NO: 1034999 - DNA, 33 bp, Homo sapien
ctcattctttccactacactgttttgctcagtt

SEQ ID NO: 1035000 - DNA, 33 bp, Homo sapien
ctcattctttccactatactgttttgctcagtt

SEQ ID NO: 1035001 - DNA, 33 bp, Homo sapien
taaatggtgcctctaaaataaagggaaataaaa

SEQ ID NO: 1035002 - DNA, 33 bp, Homo sapien
taaatggtgcctctaacataaagggaaataaaa

SEQ ID NO: 1035003 - DNA, 33 bp, Homo sapien
ctcacagctataccaaccaaatcagttcttaca

SEQ ID NO: 1035004 - DNA, 33 bp, Homo sapien
ctcacagctataccaatcaaatcagttcttaca

SEQ ID NO: 1035005 - DNA, 33 bp, Homo sapien
tgctactgcaaaaatgaaagagacaggagagga

SEQ ID NO: 1035006 - DNA, 33 bp, Homo sapien
tgctactgcaaaaatgtaagagacaggagagga

SEQ ID NO: 1035007 - DNA, 33 bp, Homo sapien
ttagtcatcgagaagaaagggaccctgtatgtc

SEQ ID NO: 1035008 - DNA, 33 bp, Homo sapien
ttagtcatcgagaagagagggaccctgtatgtc

SEQ ID NO: 1035009 - DNA, 33 bp, Homo sapien
ggactatgaaactcaaactcaaaatcaaccatt

SEQ ID NO: 1035010 - DNA, 33 bp, Homo sapien
ggactatgaaactcaatctcaaaatcaaccatt

SEQ ID NO: 1035011 - DNA, 33 bp, Homo sapien
tggctatcacccatgacaaggaaaaaagagtaa

SEQ ID NO: 1035012 - DNA, 33 bp, Homo sapien
tggctatcacccatgagaaggaaaaaagagtaa

SEQ ID NO: 1035013 - DNA, 33 bp, Homo sapien
ctaattctcaaagttacggtttgacttttccag

SEQ ID NO: 1035014 - DNA, 33 bp, Homo sapien
ctaattctcaaagttatggtttgacttttccag

SEQ ID NO: 1035015 - DNA, 33 bp, Homo sapien
ctgaacgatggattccaagtcagagtaatttta

SEQ ID NO: 1035016 - DNA, 33 bp, Homo sapien
ctgaacgatggattcccagtcagagtaatttta

SEQ ID NO: 1035017 - DNA, 33 bp, Homo sapien
acaggactggacaccaaaaataatgtcaaggta

SEQ ID NO: 1035018 - DNA, 33 bp, Homo sapien
acaggactggacaccagaaataatgtcaaggta

SEQ ID NO: 1035019 - DNA, 33 bp, Homo sapien
acatactttgctgaaacaatcactgactaaata

SEQ ID NO: 1035020 - DNA, 33 bp, Homo sapien
acatactttgctgaaataatcactgactaaata

SEQ ID NO: 1035021 - DNA, 33 bp, Homo sapien
tacacacacagttagacagctgagacattgagg

SEQ ID NO: 1035022 - DNA, 33 bp, Homo sapien
tacacacacagttagatagctgagacattgagg

SEQ ID NO: 1035023 - DNA, 33 bp, Homo sapien
tcatgggagataatgactatggttgtccatgat

SEQ ID NO: 1035024 - DNA, 33 bp, Homo sapien
tcatgggagataatgattatggttgtccatgat

SEQ ID NO: 1035025 - DNA, 33 bp, Homo sapien
tgcacgatgctgcaaaaaacaagtggcttttac

SEQ ID NO: 1035026 - DNA, 33 bp, Homo sapien
tgcacgatgctgcaaagaacaagtggcttttac

SEQ ID NO: 1035027 - DNA, 33 bp, Homo sapien
gatgccgctgttcctcacactgtacttaagtaa

SEQ ID NO: 1035028 - DNA, 33 bp, Homo sapien
gatgccgctgttcctcccactgtacttaagtaa

SEQ ID NO: 1035029 - DNA, 33 bp, Homo sapien
taagtggctgactgtcagaatatatagcaaggc

SEQ ID NO: 1035030 - DNA, 33 bp, Homo sapien
taagtggctgactgtcggaatatatagcaaggc

SEQ ID NO: 1035031 - DNA, 33 bp, Homo sapien
tgcccaggtctgagagccggtcatcaatctcat

SEQ ID NO: 1035032 - DNA, 33 bp, Homo sapien
tgcccaggtctgagagtcggtcatcaatctcat

SEQ ID NO: 1035033 - DNA, 33 bp, Homo sapien
taatgtatttacatcccaacctgaaactcctat

SEQ ID NO: 1035034 - DNA, 33 bp, Homo sapien
taatgtatttacatccgaacctgaaactcctat

SEQ ID NO: 1035035 - DNA, 33 bp, Homo sapien
aagaaaagagacttgtcaagaggtaagagcctt

SEQ ID NO: 1035036 - DNA, 33 bp, Homo sapien
aagaaaagagacttgttaagaggtaagagcctt

SEQ ID NO: 1035037 - DNA, 33 bp, Homo sapien
tcccttagatctatccaagttgtgtgtgtcaac

SEQ ID NO: 1035038 - DNA, 33 bp, Homo sapien
tcccttagatctatcccagttgtgtgtgtcaac

SEQ ID NO: 1035039 - DNA, 33 bp, Homo sapien
agcacttactttctgacattctcttctggttgg

SEQ ID NO: 1035040 - DNA, 33 bp, Homo sapien
agcacttactttctgatattctcttctggttgg

SEQ ID NO: 1035041 - DNA, 33 bp, Homo sapien
aacagcatcatggagaccgaagtggtgagattg

SEQ ID NO: 1035042 - DNA, 33 bp, Homo sapien
aacagcatcatggagatcgaagtggtgagattg

SEQ ID NO: 1035043 - DNA, 33 bp, Homo sapien
gctgctgatgcctatgaagcccagactgaggca

SEQ ID NO: 1035044 - DNA, 33 bp, Homo sapien
gctgctgatgcctatggagcccagactgaggca

SEQ ID NO: 1035045 - DNA, 33 bp, Homo sapien
tgcttagttcagaaaacattactcaagcaaaac

SEQ ID NO: 1035046 - DNA, 33 bp, Homo sapien
tgcttagttcagaaaatattactcaagcaaaac

SEQ ID NO: 1035047 - DNA, 33 bp, Homo sapien
gaggagaagaagaaaaaaaatccaagcctctgg

SEQ ID NO: 1035048 - DNA, 33 bp, Homo sapien
gaggagaagaagaaaagaaatccaagcctctgg

SEQ ID NO: 1035049 - DNA, 33 bp, Homo sapien
accagctaaaccagaggatgctgttgtccaggc

SEQ ID NO: 1035050 - DNA, 33 bp, Homo sapien
accagctaaaccagagtatgctgttgtccaggc

SEQ ID NO: 1035051 - DNA, 33 bp, Homo sapien
aaacagagaaccaataaaagcagaacccagctc

SEQ ID NO: 1035052 - DNA, 33 bp, Homo sapien
aaacagagaaccaatacaagcagaacccagctc

SEQ ID NO: 1035053 - DNA, 33 bp, Homo sapien
ctgctccacatttgaacccaattgtctctagag

SEQ ID NO: 1035054 - DNA, 33 bp, Homo sapien
ctgctccacatttgaatccaattgtctctagag

SEQ ID NO: 1035055 - DNA, 33 bp, Homo sapien
gaagtgtgggagcaaaagcatgatgttacatgt

SEQ ID NO: 1035056 - DNA, 33 bp, Homo sapien
gaagtgtgggagcaaacgcatgatgttacatgt

SEQ ID NO: 1035057 - DNA, 33 bp, Homo sapien
ctagagaaatagctacagacttgcaaaacagtt

SEQ ID NO: 1035058 - DNA, 33 bp, Homo sapien
ctagagaaatagctacggacttgcaaaacagtt

SEQ ID NO: 1035059 - DNA, 33 bp, Homo sapien
acagagattactctgacacatttgtcaacatgt

SEQ ID NO: 1035060 - DNA, 33 bp, Homo sapien
acagagattactctgatacatttgtcaacatgt

SEQ ID NO: 1035061 - DNA, 33 bp, Homo sapien
cactgcttttgtctgaccagcaatttctccata

SEQ ID NO: 1035062 - DNA, 33 bp, Homo sapien
cactgcttttgtctgagcagcaatttctccata

SEQ ID NO: 1035063 - DNA, 33 bp, Homo sapien
agctagtatgcagacacgagataggggaggaag

SEQ ID NO: 1035064 - DNA, 33 bp, Homo sapien
agctagtatgcagacatgagataggggaggaag

SEQ ID NO: 1035065 - DNA, 33 bp, Homo sapien
tatagacgtgggattacagacctttgaagtgat

SEQ ID NO: 1035066 - DNA, 33 bp, Homo sapien
tatagacgtgggattatagacctttgaagtgat

SEQ ID NO: 1035067 - DNA, 33 bp, Homo sapien
gagagaggttgtgatacaggaacccagagaagg

SEQ ID NO: 1035068 - DNA, 33 bp, Homo sapien
gagagaggttgtgatataggaacccagagaagg

SEQ ID NO: 1035069 - DNA, 33 bp, Homo sapien
tgaccctcttagctccacggattaactcctgtc

SEQ ID NO: 1035070 - DNA, 33 bp, Homo sapien
tgaccctcttagctccgcggattaactcctgtc

SEQ ID NO: 1035071 - DNA, 33 bp, Homo sapien
ctcttttactgcccaaagaaagcacagttctgt

SEQ ID NO: 1035072 - DNA, 33 bp, Homo sapien
ctcttttactgcccaaggaaagcacagttctgt

SEQ ID NO: 1035073 - DNA, 33 bp, Homo sapien
agacattgtagtctgacggggcagtgacagagg

SEQ ID NO: 1035074 - DNA, 33 bp, Homo sapien
agacattgtagtctgatggggcagtgacagagg

SEQ ID NO: 1035075 - DNA, 33 bp, Homo sapien
gaggtgagagaggtgacctgatgcagagaagac

SEQ ID NO: 1035076 - DNA, 33 bp, Homo sapien
gaggtgagagaggtgatctgatgcagagaagac

SEQ ID NO: 1035077 - DNA, 33 bp, Homo sapien
ctcatcacttctccaacgctggtatcatgaacc

SEQ ID NO: 1035078 - DNA, 33 bp, Homo sapien
ctcatcacttctccaatgctggtatcatgaacc

SEQ ID NO: 1035079 - DNA, 33 bp, Homo sapien
aaagaggaactaaggacgccagggactttctgc

SEQ ID NO: 1035080 - DNA, 33 bp, Homo sapien
aaagaggaactaaggatgccagggactttctgc

SEQ ID NO: 1035081 - DNA, 33 bp, Homo sapien
tctaaggaggtaactacggtaagatgaagtggg

SEQ ID NO: 1035082 - DNA, 33 bp, Homo sapien
tctaaggaggtaactatggtaagatgaagtggg

SEQ ID NO: 1035083 - DNA, 33 bp, Homo sapien
acctgcggttagattgaaatttagctcatctca

SEQ ID NO: 1035084 - DNA, 33 bp, Homo sapien
acctgcggttagattggaatttagctcatctca

SEQ ID NO: 1035085 - DNA, 33 bp, Homo sapien
aaaacaatctgaagcacgagcacctagcagaaa

SEQ ID NO: 1035086 - DNA, 33 bp, Homo sapien
aaaacaatctgaagcatgagcacctagcagaaa

SEQ ID NO: 1035087 - DNA, 33 bp, Homo sapien
ccctctagaaaccaaacttgacttctgccagga

SEQ ID NO: 1035088 - DNA, 33 bp, Homo sapien
ccctctagaaaccaaagttgacttctgccagga

SEQ ID NO: 1035089 - DNA, 33 bp, Homo sapien
aatgtgtcaggtgaaactagaagtggggaaagg

SEQ ID NO: 1035090 - DNA, 33 bp, Homo sapien
aatgtgtcaggtgaaagtagaagtggggaaagg

SEQ ID NO: 1035091 - DNA, 33 bp, Homo sapien
tctaagagtggggccactaactcacttcaccca

SEQ ID NO: 1035092 - DNA, 33 bp, Homo sapien
tctaagagtggggccattaactcacttcaccca

SEQ ID NO: 1035093 - DNA, 33 bp, Homo sapien
gttttccttagtatgcaaaagggtcctggcttg

SEQ ID NO: 1035094 - DNA, 33 bp, Homo sapien
gttttccttagtatgcgaaagggtcctggcttg

SEQ ID NO: 1035095 - DNA, 33 bp, Homo sapien
ttatttttcttcgtcaatcctaccaccaccacc

SEQ ID NO: 1035096 - DNA, 33 bp, Homo sapien
ttatttttcttcgtcagtcctaccaccaccacc

SEQ ID NO: 1035097 - DNA, 33 bp, Homo sapien
gtgctgggctcctatcaaagggtgacagtcagc

SEQ ID NO: 1035098 - DNA, 33 bp, Homo sapien
gtgctgggctcctatcgaagggtgacagtcagc

SEQ ID NO: 1035099 - DNA, 33 bp, Homo sapien
gcagtgtgctatggagaataggtgcaacctctg

SEQ ID NO: 1035100 - DNA, 33 bp, Homo sapien
gcagtgtgctatggaggataggtgcaacctctg

SEQ ID NO: 1035101 - DNA, 33 bp, Homo sapien
atctcatttaattttcactggaactctgagata

SEQ ID NO: 1035102 - DNA, 33 bp, Homo sapien
atctcatttaattttctctggaactctgagata

SEQ ID NO: 1035103 - DNA, 33 bp, Homo sapien
tggtgagaaaaccagcgatagttccttcgagca

SEQ ID NO: 1035104 - DNA, 33 bp, Homo sapien
tggtgagaaaaccagctatagttccttcgagca

SEQ ID NO: 1035105 - DNA, 33 bp, Homo sapien
gaaataagactgtgacccactttgatagttttg

SEQ ID NO: 1035106 - DNA, 33 bp, Homo sapien
gaaataagactgtgacgcactttgatagttttg

SEQ ID NO: 1035107 - DNA, 33 bp, Homo sapien
ccttgaatgccaagcaaaaagagatcattaatg

SEQ ID NO: 1035108 - DNA, 33 bp, Homo sapien
ccttgaatgccaagcagaaagagatcattaatg

SEQ ID NO: 1035109 - DNA, 33 bp, Homo sapien
agctttgtgtcttacccacctacccccagtgag

SEQ ID NO: 1035110 - DNA, 33 bp, Homo sapien
agctttgtgtcttaccgacctacccccagtgag

SEQ ID NO: 1035111 - DNA, 33 bp, Homo sapien
acatgatttagtgagacactgttcttgcttctg

SEQ ID NO: 1035112 - DNA, 33 bp, Homo sapien
acatgatttagtgagatactgttcttgcttctg

SEQ ID NO: 1035113 - DNA, 33 bp, Homo sapien
gattttctcttcagaaaaaatacacatgggctc

SEQ ID NO: 1035114 - DNA, 33 bp, Homo sapien
gattttctcttcagaagaaatacacatgggctc

SEQ ID NO: 1035115 - DNA, 33 bp, Homo sapien
tgttaaatggggagacgatgtcctagtacgagc

SEQ ID NO: 1035116 - DNA, 33 bp, Homo sapien
tgttaaatggggagactatgtcctagtacgagc

SEQ ID NO: 1035117 - DNA, 33 bp, Homo sapien
aaaattgcggaaagcacgatttagaggaagcaa

SEQ ID NO: 1035118 - DNA, 33 bp, Homo sapien
aaaattgcggaaagcaggatttagaggaagcaa

SEQ ID NO: 1035119 - DNA, 33 bp, Homo sapien
gagcctctgcaatacacggtctactgcacaaat

SEQ ID NO: 1035120 - DNA, 33 bp, Homo sapien
gagcctctgcaatacatggtctactgcacaaat

SEQ ID NO: 1035121 - DNA, 33 bp, Homo sapien
aaagccagacgccctaaaggaaaagatttacag

SEQ ID NO: 1035122 - DNA, 33 bp, Homo sapien
aaagccagacgccctagaggaaaagatttacag

SEQ ID NO: 1035123 - DNA, 33 bp, Homo sapien
taggtaagtgtgaacactctgaaaccatgtgat

SEQ ID NO: 1035124 - DNA, 33 bp, Homo sapien
taggtaagtgtgaacattctgaaaccatgtgat

SEQ ID NO: 1035125 - DNA, 33 bp, Homo sapien
cagaaacacagagttcactgagattagagacat

SEQ ID NO: 1035126 - DNA, 33 bp, Homo sapien
cagaaacacagagttcgctgagattagagacat

SEQ ID NO: 1035127 - DNA, 33 bp, Homo sapien
agtcaacagcttgagcaaaaagcaaagaagcaa

SEQ ID NO: 1035128 - DNA, 33 bp, Homo sapien
agtcaacagcttgagcgaaaagcaaagaagcaa

SEQ ID NO: 1035129 - DNA, 33 bp, Homo sapien
aggcaggttgtaccaacatggctggaataagaa

SEQ ID NO: 1035130 - DNA, 33 bp, Homo sapien
aggcaggttgtaccaatatggctggaataagaa

SEQ ID NO: 1035131 - DNA, 33 bp, Homo sapien
agtggtgttattaagagattcaatatgtatagc

SEQ ID NO: 1035132 - DNA, 33 bp, Homo sapien
agtggtgttattaagatattcaatatgtatagc

SEQ ID NO: 1035133 - DNA, 33 bp, Homo sapien
ccagctgtctgtaaggcatgtgagagaagaacc

SEQ ID NO: 1035134 - DNA, 33 bp, Homo sapien
ccagctgtctgtaaggtatgtgagagaagaacc

SEQ ID NO: 1035135 - DNA, 33 bp, Homo sapien
aaaatctagcaaaatgccaggcaaatgacgaga

SEQ ID NO: 1035136 - DNA, 33 bp, Homo sapien
aaaatctagcaaaatgtcaggcaaatgacgaga

SEQ ID NO: 1035137 - DNA, 33 bp, Homo sapien
ggcagtaatcctatcagacacctttgagcatct

SEQ ID NO: 1035138 - DNA, 33 bp, Homo sapien
ggcagtaatcctatcatacacctttgagcatct

SEQ ID NO: 1035139 - DNA, 33 bp, Homo sapien
atgaagagtttgagaacatgcttgtccagtgat

SEQ ID NO: 1035140 - DNA, 33 bp, Homo sapien
atgaagagtttgagaatatgcttgtccagtgat

SEQ ID NO: 1035141 - DNA, 33 bp, Homo sapien
tatcattacctacatacagaccagcatagtcca

SEQ ID NO: 1035142 - DNA, 33 bp, Homo sapien
tatcattacctacatagagaccagcatagtcca

SEQ ID NO: 1035143 - DNA, 33 bp, Homo sapien
tggattggtgattagaccaattagaggaagaag

SEQ ID NO: 1035144 - DNA, 33 bp, Homo sapien
tggattggtgattagatcaattagaggaagaag

SEQ ID NO: 1035145 - DNA, 33 bp, Homo sapien
ctgtttactgtcctggaaaataaggatcataag

SEQ ID NO: 1035146 - DNA, 33 bp, Homo sapien
ctgtttactgtcctggtaaataaggatcataag

SEQ ID NO: 1035147 - DNA, 33 bp, Homo sapien
tcttttgccatttgtaacataacaaatatctta

SEQ ID NO: 1035148 - DNA, 33 bp, Homo sapien
tcttttgccatttgtagcataacaaatatctta

SEQ ID NO: 1035149 - DNA, 33 bp, Homo sapien
tcttctcccacttccaaacaaatttgatctctc

SEQ ID NO: 1035150 - DNA, 33 bp, Homo sapien
tcttctcccacttccagacaaatttgatctctc

SEQ ID NO: 1035151 - DNA, 33 bp, Homo sapien
tttctagaatttttcaagtccctggcatcttgg

SEQ ID NO: 1035152 - DNA, 33 bp, Homo sapien
tttctagaatttttcacgtccctggcatcttgg

SEQ ID NO: 1035153 - DNA, 33 bp, Homo sapien
ctgagagaaggaaaacaatttagcaaaggctgt

SEQ ID NO: 1035154 - DNA, 33 bp, Homo sapien
ctgagagaaggaaaacgatttagcaaaggctgt

SEQ ID NO: 1035155 - DNA, 33 bp, Homo sapien
gttttttaaaggaagcacaaacatttggttcag

SEQ ID NO: 1035156 - DNA, 33 bp, Homo sapien
gttttttaaaggaagcgcaaacatttggttcag

SEQ ID NO: 1035157 - DNA, 33 bp, Homo sapien
tcaatagctagggagaacaatgagtacatttat

SEQ ID NO: 1035158 - DNA, 33 bp, Homo sapien
tcaatagctagggagagcaatgagtacatttat

SEQ ID NO: 1035159 - DNA, 33 bp, Homo sapien
tccagggtttaaaaacaggtctcagagctgaat

SEQ ID NO: 1035160 - DNA, 33 bp, Homo sapien
tccagggtttaaaaacgggtctcagagctgaat

SEQ ID NO: 1035161 - DNA, 33 bp, Homo sapien
ctgccacagaaactgcacctcactggctgggaa

SEQ ID NO: 1035162 - DNA, 33 bp, Homo sapien
ctgccacagaaactgcgcctcactggctgggaa

SEQ ID NO: 1035163 - DNA, 33 bp, Homo sapien
agagcagattctggagacacagtcctgtcattt

SEQ ID NO: 1035164 - DNA, 33 bp, Homo sapien
agagcagattctggagtcacagtcctgtcattt

SEQ ID NO: 1035165 - DNA, 33 bp, Homo sapien
ttctactgaggaaggacggaagtcgaagatcta

SEQ ID NO: 1035166 - DNA, 33 bp, Homo sapien
ttctactgaggaaggatggaagtcgaagatcta

SEQ ID NO: 1035167 - DNA, 33 bp, Homo sapien
actccaaactaggcaacgagagaaaaactccgt

SEQ ID NO: 1035168 - DNA, 33 bp, Homo sapien
actccaaactaggcaatgagagaaaaactccgt

SEQ ID NO: 1035169 - DNA, 33 bp, Homo sapien
aagctgggtgtttccacaataggagcagaaagg

SEQ ID NO: 1035170 - DNA, 33 bp, Homo sapien
aagctgggtgtttccagaataggagcagaaagg

SEQ ID NO: 1035171 - DNA, 33 bp, Homo sapien
tgtaaaaacagcaggaacttacatttatcagag

SEQ ID NO: 1035172 - DNA, 33 bp, Homo sapien
tgtaaaaacagcaggaccttacatttatcagag

SEQ ID NO: 1035173 - DNA, 33 bp, Homo sapien
ttagaccactctttgacaactgtgtctaggttg

SEQ ID NO: 1035174 - DNA, 33 bp, Homo sapien
ttagaccactctttgataactgtgtctaggttg

SEQ ID NO: 1035175 - DNA, 33 bp, Homo sapien
tatcctgtgtgttgtaagaggtttagcaacatc

SEQ ID NO: 1035176 - DNA, 33 bp, Homo sapien
tatcctgtgtgttgtaggaggtttagcaacatc

SEQ ID NO: 1035177 - DNA, 33 bp, Homo sapien
attaaggcagcattaacacaaaaacaatcttaa

SEQ ID NO: 1035178 - DNA, 33 bp, Homo sapien
attaaggcagcattaagacaaaaacaatcttaa

SEQ ID NO: 1035179 - DNA, 33 bp, Homo sapien
tcaatgaatttagggacagtctcaatcttgaat

SEQ ID NO: 1035180 - DNA, 33 bp, Homo sapien
tcaatgaatttagggatagtctcaatcttgaat

SEQ ID NO: 1035181 - DNA, 33 bp, Homo sapien
tcattgacctcaaaataattttacatccactga

SEQ ID NO: 1035182 - DNA, 33 bp, Homo sapien
tcattgacctcaaaatcattttacatccactga

SEQ ID NO: 1035183 - DNA, 33 bp, Homo sapien
acttaatgtttcattaagttcaagttgttatct

SEQ ID NO: 1035184 - DNA, 33 bp, Homo sapien
acttaatgtttcattatgttcaagttgttatct

SEQ ID NO: 1035185 - DNA, 33 bp, Homo sapien
ttaccccaatttttaactcccttgctcaccaca

SEQ ID NO: 1035186 - DNA, 33 bp, Homo sapien
ttaccccaatttttaagtcccttgctcaccaca

SEQ ID NO: 1035187 - DNA, 33 bp, Homo sapien
ctttggcccccttgaaagagtcttatcaggtgc

SEQ ID NO: 1035188 - DNA, 33 bp, Homo sapien
ctttggcccccttgaaggagtcttatcaggtgc

SEQ ID NO: 1035189 - DNA, 33 bp, Homo sapien
cacaaagattaggtaacagcacctgataagact

SEQ ID NO: 1035190 - DNA, 33 bp, Homo sapien
cacaaagattaggtaatagcacctgataagact

SEQ ID NO: 1035191 - DNA, 33 bp, Homo sapien
ctggcccttcattccacagggtcctttacacta

SEQ ID NO: 1035192 - DNA, 33 bp, Homo sapien
ctggcccttcattccatagggtcctttacacta

SEQ ID NO: 1035193 - DNA, 33 bp, Homo sapien
ttcacaacatggagaggcaaagtcattttaatt

SEQ ID NO: 1035194 - DNA, 33 bp, Homo sapien
ttcacaacatggagagtcaaagtcattttaatt

SEQ ID NO: 1035195 - DNA, 33 bp, Homo sapien
gcaaacaaaatgaaagcaggtcccactgtgtta

SEQ ID NO: 1035196 - DNA, 33 bp, Homo sapien
gcaaacaaaatgaaagtaggtcccactgtgtta

SEQ ID NO: 1035197 - DNA, 33 bp, Homo sapien
cctcttaggcactcataatctagtaagttaggt

SEQ ID NO: 1035198 - DNA, 33 bp, Homo sapien
cctcttaggcactcatgatctagtaagttaggt

SEQ ID NO: 1035199 - DNA, 33 bp, Homo sapien
aaatgtaaagcctcacaaggttcatgcaaactc

SEQ ID NO: 1035200 - DNA, 33 bp, Homo sapien
aaatgtaaagcctcaccaggttcatgcaaactc

SEQ ID NO: 1035201 - DNA, 33 bp, Homo sapien
tgacacctgggtcagcaaacctgatattccaaa

SEQ ID NO: 1035202 - DNA, 33 bp, Homo sapien
tgacacctgggtcagccaacctgatattccaaa

SEQ ID NO: 1035203 - DNA, 33 bp, Homo sapien
ttcttattcactgttacatctcccaggtgcata

SEQ ID NO: 1035204 - DNA, 33 bp, Homo sapien
ttcttattcactgttatatctcccaggtgcata

SEQ ID NO: 1035205 - DNA, 33 bp, Homo sapien
ttgtattacattcctcaattaaacatgggtcgc

SEQ ID NO: 1035206 - DNA, 33 bp, Homo sapien
ttgtattacattcctcgattaaacatgggtcgc

SEQ ID NO: 1035207 - DNA, 33 bp, Homo sapien
tggaatctcttaacagaaggaacaagtgaaagc

SEQ ID NO: 1035208 - DNA, 33 bp, Homo sapien
tggaatctcttaacaggaggaacaagtgaaagc

SEQ ID NO: 1035209 - DNA, 33 bp, Homo sapien
actctgtgagaagtcccatccaagtgctgtgga

SEQ ID NO: 1035210 - DNA, 33 bp, Homo sapien
actctgtgagaagtcctatccaagtgctgtgga

SEQ ID NO: 1035211 - DNA, 33 bp, Homo sapien
cacagagggaaaaagaagaacatctagaagaaa

SEQ ID NO: 1035212 - DNA, 33 bp, Homo sapien
cacagagggaaaaagaggaacatctagaagaaa

SEQ ID NO: 1035213 - DNA, 33 bp, Homo sapien
aagtcatgtatatgcacgggttttgtaaacttt

SEQ ID NO: 1035214 - DNA, 33 bp, Homo sapien
aagtcatgtatatgcatgggttttgtaaacttt

SEQ ID NO: 1035215 - DNA, 33 bp, Homo sapien
aaactctgcttaaataactctacatctaggaaa

SEQ ID NO: 1035216 - DNA, 33 bp, Homo sapien
aaactctgcttaaatagctctacatctaggaaa

SEQ ID NO: 1035217 - DNA, 33 bp, Homo sapien
cacatttcctttaatcagaataggcacattcta

SEQ ID NO: 1035218 - DNA, 33 bp, Homo sapien
cacatttcctttaatcggaataggcacattcta

SEQ ID NO: 1035219 - DNA, 33 bp, Homo sapien
tttccattcagctgataagtggcagatcccggg

SEQ ID NO: 1035220 - DNA, 33 bp, Homo sapien
tttccattcagctgatcagtggcagatcccggg

SEQ ID NO: 1035221 - DNA, 33 bp, Homo sapien
ctaacatttaattgtacggctactgtgtatgag

SEQ ID NO: 1035222 - DNA, 33 bp, Homo sapien
ctaacatttaattgtatggctactgtgtatgag

SEQ ID NO: 1035223 - DNA, 33 bp, Homo sapien
agtcatcagaggagcaaagagtcttcagctgaa

SEQ ID NO: 1035224 - DNA, 33 bp, Homo sapien
agtcatcagaggagcagagagtcttcagctgaa

SEQ ID NO: 1035225 - DNA, 33 bp, Homo sapien
gaagaagcttcgggtcccgtggatgtggcccaa

SEQ ID NO: 1035226 - DNA, 33 bp, Homo sapien
gaagaagcttcgggtctcgtggatgtggcccaa

SEQ ID NO: 1035227 - DNA, 33 bp, Homo sapien
caaaatggaaggagatcaggatggtaaatattt

SEQ ID NO: 1035228 - DNA, 33 bp, Homo sapien
caaaatggaaggagattaggatggtaaatattt

SEQ ID NO: 1035229 - DNA, 33 bp, Homo sapien
cagcatgtcaaaggccacatgaaagcatgatat

SEQ ID NO: 1035230 - DNA, 33 bp, Homo sapien
cagcatgtcaaaggccgcatgaaagcatgatat

SEQ ID NO: 1035231 - DNA, 33 bp, Homo sapien
cttgttatttggaaaaaatttcaaacatatgca

SEQ ID NO: 1035232 - DNA, 33 bp, Homo sapien
cttgttatttggaaaacatttcaaacatatgca

SEQ ID NO: 1035233 - DNA, 33 bp, Homo sapien
gagtgatggtttctacaacaagcagcctggtgg

SEQ ID NO: 1035234 - DNA, 33 bp, Homo sapien
gagtgatggtttctacgacaagcagcctggtgg

SEQ ID NO: 1035235 - DNA, 33 bp, Homo sapien
aagcaaaatatcctaacgtggcttccaaatttt

SEQ ID NO: 1035236 - DNA, 33 bp, Homo sapien
aagcaaaatatcctaatgtggcttccaaatttt

SEQ ID NO: 1035237 - DNA, 33 bp, Homo sapien
ccttaattttcctcaagaaagcaaaatatccta

SEQ ID NO: 1035238 - DNA, 33 bp, Homo sapien
ccttaattttcctcaataaagcaaaatatccta

SEQ ID NO: 1035239 - DNA, 33 bp, Homo sapien
gtaccctgaaagaaaacgaatctctcagggctt

SEQ ID NO: 1035240 - DNA, 33 bp, Homo sapien
gtaccctgaaagaaaatgaatctctcagggctt

SEQ ID NO: 1035241 - DNA, 33 bp, Homo sapien
acatttactgtaatgaagacatattttcagcta

SEQ ID NO: 1035242 - DNA, 33 bp, Homo sapien
acatttactgtaatgaggacatattttcagcta

SEQ ID NO: 1035243 - DNA, 33 bp, Homo sapien
aagtgtgtgtaaataactaaatattgagcatta

SEQ ID NO: 1035244 - DNA, 33 bp, Homo sapien
aagtgtgtgtaaataagtaaatattgagcatta

SEQ ID NO: 1035245 - DNA, 33 bp, Homo sapien
ttgaaactctcctccactgatgatattggtcag

SEQ ID NO: 1035246 - DNA, 33 bp, Homo sapien
ttgaaactctcctccattgatgatattggtcag

SEQ ID NO: 1035247 - DNA, 33 bp, Homo sapien
atattagaagtcactcaagcacatatgtatcat

SEQ ID NO: 1035248 - DNA, 33 bp, Homo sapien
atattagaagtcactcgagcacatatgtatcat

SEQ ID NO: 1035249 - DNA, 33 bp, Homo sapien
tgggaaatgataactacggtgtgaaataaacta

SEQ ID NO: 1035250 - DNA, 33 bp, Homo sapien
tgggaaatgataactatggtgtgaaataaacta

SEQ ID NO: 1035251 - DNA, 33 bp, Homo sapien
aagatctaaacatttcaattctaacaggatgta

SEQ ID NO: 1035252 - DNA, 33 bp, Homo sapien
aagatctaaacatttcgattctaacaggatgta

SEQ ID NO: 1035253 - DNA, 33 bp, Homo sapien
atactttctaaactctcaaatggaattgatagg

SEQ ID NO: 1035254 - DNA, 33 bp, Homo sapien
atactttctaaactcttaaatggaattgatagg

SEQ ID NO: 1035255 - DNA, 33 bp, Homo sapien
tagaataagtagctcacagtctcccatctgtct

SEQ ID NO: 1035256 - DNA, 33 bp, Homo sapien
tagaataagtagctcatagtctcccatctgtct

SEQ ID NO: 1035257 - DNA, 33 bp, Homo sapien
gagctgcattgtgcaacacagtagctgctggcc

SEQ ID NO: 1035258 - DNA, 33 bp, Homo sapien
gagctgcattgtgcaatacagtagctgctggcc

SEQ ID NO: 1035259 - DNA, 33 bp, Homo sapien
gctctctgttcttaggaacttcctcttctccag

SEQ ID NO: 1035260 - DNA, 33 bp, Homo sapien
gctctctgttcttagggacttcctcttctccag

SEQ ID NO: 1035261 - DNA, 33 bp, Homo sapien
ccctaaaagtaagctgcaacaaggactactgtg

SEQ ID NO: 1035262 - DNA, 33 bp, Homo sapien
ccctaaaagtaagctggaacaaggactactgtg

SEQ ID NO: 1035263 - DNA, 33 bp, Homo sapien
acttctgtaacttctacaggactcagtaacctc

SEQ ID NO: 1035264 - DNA, 33 bp, Homo sapien
acttctgtaacttctataggactcagtaacctc

SEQ ID NO: 1035265 - DNA, 33 bp, Homo sapien
tggcattatcaagttacgaaaagaaatcacatg

SEQ ID NO: 1035266 - DNA, 33 bp, Homo sapien
tggcattatcaagttatgaaaagaaatcacatg

SEQ ID NO: 1035267 - DNA, 33 bp, Homo sapien
tttcatccccctttgacaatgtgaggacatgtg

SEQ ID NO: 1035268 - DNA, 33 bp, Homo sapien
tttcatccccctttgataatgtgaggacatgtg

SEQ ID NO: 1035269 - DNA, 33 bp, Homo sapien
gcaatgattaggaaagacttcataaattgtgtt

SEQ ID NO: 1035270 - DNA, 33 bp, Homo sapien
gcaatgattaggaaaggcttcataaattgtgtt

SEQ ID NO: 1035271 - DNA, 33 bp, Homo sapien
aatacaagaactaataaaacgtgaaatgttgct

SEQ ID NO: 1035272 - DNA, 33 bp, Homo sapien
aatacaagaactaatagaacgtgaaatgttgct

SEQ ID NO: 1035273 - DNA, 33 bp, Homo sapien
acagaatatctgttaaatcattcaaatatttca

SEQ ID NO: 1035274 - DNA, 33 bp, Homo sapien
acagaatatctgttaattcattcaaatatttca

SEQ ID NO: 1035275 - DNA, 33 bp, Homo sapien
atctatcgtccagtgccgattacctgtcatact

SEQ ID NO: 1035276 - DNA, 33 bp, Homo sapien
atctatcgtccagtgctgattacctgtcatact

SEQ ID NO: 1035277 - DNA, 33 bp, Homo sapien
atcatccaccatgaaacgatataagagcccagc

SEQ ID NO: 1035278 - DNA, 33 bp, Homo sapien
atcatccaccatgaaatgatataagagcccagc

SEQ ID NO: 1035279 - DNA, 33 bp, Homo sapien
tcatattgcttaagggaaacatctggtaaaatg

SEQ ID NO: 1035280 - DNA, 33 bp, Homo sapien
tcatattgcttaaggggaacatctggtaaaatg

SEQ ID NO: 1035281 - DNA, 33 bp, Homo sapien
ctctgatttatcagccacatgactatggcccag

SEQ ID NO: 1035282 - DNA, 33 bp, Homo sapien
ctctgatttatcagccgcatgactatggcccag

SEQ ID NO: 1035283 - DNA, 33 bp, Homo sapien
tgctgagaaaccctctcaagatcacccagccca

SEQ ID NO: 1035284 - DNA, 33 bp, Homo sapien
tgctgagaaaccctcttaagatcacccagccca

SEQ ID NO: 1035285 - DNA, 33 bp, Homo sapien
gactataagcaccttaccaaggaagagagtaaa

SEQ ID NO: 1035286 - DNA, 33 bp, Homo sapien
gactataagcaccttatcaaggaagagagtaaa

SEQ ID NO: 1035287 - DNA, 33 bp, Homo sapien
atctctacaaaaaataacaatatcagccaggta

SEQ ID NO: 1035288 - DNA, 33 bp, Homo sapien
atctctacaaaaaatagcaatatcagccaggta

SEQ ID NO: 1035289 - DNA, 33 bp, Homo sapien
atcaagcagcttcataaaattgactctaacctt

SEQ ID NO: 1035290 - DNA, 33 bp, Homo sapien
atcaagcagcttcatataattgactctaacctt

SEQ ID NO: 1035291 - DNA, 33 bp, Homo sapien
gtgtatttagcacagaagtgacccacagcaagt

SEQ ID NO: 1035292 - DNA, 33 bp, Homo sapien
gtgtatttagcacagacgtgacccacagcaagt

SEQ ID NO: 1035293 - DNA, 33 bp, Homo sapien
atggggagggaagaaaaggagaagcctcaggtt

SEQ ID NO: 1035294 - DNA, 33 bp, Homo sapien
atggggagggaagaaagggagaagcctcaggtt

SEQ ID NO: 1035295 - DNA, 33 bp, Homo sapien
agtccttcatctcttacgccacaatgctacatt

SEQ ID NO: 1035296 - DNA, 33 bp, Homo sapien
agtccttcatctcttatgccacaatgctacatt

SEQ ID NO: 1035297 - DNA, 33 bp, Homo sapien
gctgggctggaaaaaacatagaaaactgctatt

SEQ ID NO: 1035298 - DNA, 33 bp, Homo sapien
gctgggctggaaaaaagatagaaaactgctatt

SEQ ID NO: 1035299 - DNA, 33 bp, Homo sapien
gtagtaatccattaaaagaatcattcgaaaaca

SEQ ID NO: 1035300 - DNA, 33 bp, Homo sapien
gtagtaatccattaaaggaatcattcgaaaaca

SEQ ID NO: 1035301 - DNA, 33 bp, Homo sapien
gcctgatgcagagtgaatatttatgtaaacaaa

SEQ ID NO: 1035302 - DNA, 33 bp, Homo sapien
gcctgatgcagagtgagtatttatgtaaacaaa

SEQ ID NO: 1035303 - DNA, 33 bp, Homo sapien
acaggtatgcacagtcaataagattcagtaact

SEQ ID NO: 1035304 - DNA, 33 bp, Homo sapien
acaggtatgcacagtcgataagattcagtaact

SEQ ID NO: 1035305 - DNA, 33 bp, Homo sapien
ctataatcatgccaataaatagccatggcactc

SEQ ID NO: 1035306 - DNA, 33 bp, Homo sapien
ctataatcatgccaatgaatagccatggcactc

SEQ ID NO: 1035307 - DNA, 33 bp, Homo sapien
atgtgacagtgactaacacctacacacccaaca

SEQ ID NO: 1035308 - DNA, 33 bp, Homo sapien
atgtgacagtgactaatacctacacacccaaca

SEQ ID NO: 1035309 - DNA, 33 bp, Homo sapien
gtgcaattcattatacagggtcaaaggcataga

SEQ ID NO: 1035310 - DNA, 33 bp, Homo sapien
gtgcaattcattatacggggtcaaaggcataga

SEQ ID NO: 1035311 - DNA, 33 bp, Homo sapien
tctgatgtttctattccaattcagatgcccatg

SEQ ID NO: 1035312 - DNA, 33 bp, Homo sapien
tctgatgtttctattctaattcagatgcccatg

SEQ ID NO: 1035313 - DNA, 33 bp, Homo sapien
atatttgattaactgaggttcgtaccagattac

SEQ ID NO: 1035314 - DNA, 33 bp, Homo sapien
atatttgattaactgatgttcgtaccagattac

SEQ ID NO: 1035315 - DNA, 33 bp, Homo sapien
ctagctagagctccaactgatgatatagttcat

SEQ ID NO: 1035316 - DNA, 33 bp, Homo sapien
ctagctagagctccaagtgatgatatagttcat

SEQ ID NO: 1035317 - DNA, 33 bp, Homo sapien
caagggagaagggctgaattttgccttgtaaag

SEQ ID NO: 1035318 - DNA, 33 bp, Homo sapien
caagggagaagggctggattttgccttgtaaag

SEQ ID NO: 1035319 - DNA, 33 bp, Homo sapien
tatctctggcctattagatgagggcattaatac

SEQ ID NO: 1035320 - DNA, 33 bp, Homo sapien
tatctctggcctattatatgagggcattaatac

SEQ ID NO: 1035321 - DNA, 33 bp, Homo sapien
tctttagtgtatccatcacctttctgataaaga

SEQ ID NO: 1035322 - DNA, 33 bp, Homo sapien
tctttagtgtatccattacctttctgataaaga

SEQ ID NO: 1035323 - DNA, 33 bp, Homo sapien
ttcctttgttaagatagaaactgagcatagcta

SEQ ID NO: 1035324 - DNA, 33 bp, Homo sapien
ttcctttgttaagatataaactgagcatagcta

SEQ ID NO: 1035325 - DNA, 33 bp, Homo sapien
ttcatttctggcatcaggttttataatgtttat

SEQ ID NO: 1035326 - DNA, 33 bp, Homo sapien
ttcatttctggcatcatgttttataatgtttat

SEQ ID NO: 1035327 - DNA, 33 bp, Homo sapien
ctacaactacctaagcaacacacgcctttgtta

SEQ ID NO: 1035328 - DNA, 33 bp, Homo sapien
ctacaactacctaagcgacacacgcctttgtta

SEQ ID NO: 1035329 - DNA, 33 bp, Homo sapien
tggtattcttagctaacgtagaactcagtgaat

SEQ ID NO: 1035330 - DNA, 33 bp, Homo sapien
tggtattcttagctaatgtagaactcagtgaat

SEQ ID NO: 1035331 - DNA, 33 bp, Homo sapien
ggagattcacgcttcactcctgtctttctttca

SEQ ID NO: 1035332 - DNA, 33 bp, Homo sapien
ggagattcacgcttcattcctgtctttctttca

SEQ ID NO: 1035333 - DNA, 33 bp, Homo sapien
aatacagtctctacaagacatagttcagaaaag

SEQ ID NO: 1035334 - DNA, 33 bp, Homo sapien
aatacagtctctacaatacatagttcagaaaag

SEQ ID NO: 1035335 - DNA, 33 bp, Homo sapien
taagaggcttctcggaatatagatgttcaaacc

SEQ ID NO: 1035336 - DNA, 33 bp, Homo sapien
taagaggcttctcggagtatagatgttcaaacc

SEQ ID NO: 1035337 - DNA, 33 bp, Homo sapien
ttttaaggcaagatacaaattgtgtgccctgtg

SEQ ID NO: 1035338 - DNA, 33 bp, Homo sapien
ttttaaggcaagatacgaattgtgtgccctgtg

SEQ ID NO: 1035339 - DNA, 33 bp, Homo sapien
agaactgaaaggatataaaaccagattatctca

SEQ ID NO: 1035340 - DNA, 33 bp, Homo sapien
agaactgaaaggatatgaaaccagattatctca

SEQ ID NO: 1035341 - DNA, 33 bp, Homo sapien
tgttttcccctcagtaggcataattactgtcaa

SEQ ID NO: 1035342 - DNA, 33 bp, Homo sapien
tgttttcccctcagtatgcataattactgtcaa

SEQ ID NO: 1035343 - DNA, 33 bp, Homo sapien
ccacgcctggcctaatgatagttcttatgatgt

SEQ ID NO: 1035344 - DNA, 33 bp, Homo sapien
ccacgcctggcctaattatagttcttatgatgt

SEQ ID NO: 1035345 - DNA, 33 bp, Homo sapien
gctgtgcaactaagaccaccacgtgactctaga

SEQ ID NO: 1035346 - DNA, 33 bp, Homo sapien
gctgtgcaactaagactaccacgtgactctaga

SEQ ID NO: 1035347 - DNA, 33 bp, Homo sapien
cttttgctatcatgacccagaaatcattgttta

SEQ ID NO: 1035348 - DNA, 33 bp, Homo sapien
cttttgctatcatgactcagaaatcattgttta

SEQ ID NO: 1035349 - DNA, 33 bp, Homo sapien
gtgtatgagttatacccgcctaaaaattactag

SEQ ID NO: 1035350 - DNA, 33 bp, Homo sapien
gtgtatgagttatacctgcctaaaaattactag

SEQ ID NO: 1035351 - DNA, 33 bp, Homo sapien
tctcagcaccctcaaaatcacctgataaatatt

SEQ ID NO: 1035352 - DNA, 33 bp, Homo sapien
tctcagcaccctcaaattcacctgataaatatt

SEQ ID NO: 1035353 - DNA, 33 bp, Homo sapien
catttatcagactgtacactttagtcttaaggg

SEQ ID NO: 1035354 - DNA, 33 bp, Homo sapien
catttatcagactgtatactttagtcttaaggg

SEQ ID NO: 1035355 - DNA, 33 bp, Homo sapien
gtctcttcaattaggcacagacataacacatac

SEQ ID NO: 1035356 - DNA, 33 bp, Homo sapien
gtctcttcaattaggcgcagacataacacatac

SEQ ID NO: 1035357 - DNA, 33 bp, Homo sapien
ccttaactgattaaccaactttgcagcattcca

SEQ ID NO: 1035358 - DNA, 33 bp, Homo sapien
ccttaactgattaaccgactttgcagcattcca

SEQ ID NO: 1035359 - DNA, 33 bp, Homo sapien
tgccagggcagagaaacagagcagaaaagatct

SEQ ID NO: 1035360 - DNA, 33 bp, Homo sapien
tgccagggcagagaaagagagcagaaaagatct

SEQ ID NO: 1035361 - DNA, 33 bp, Homo sapien
ggacaactcagcatcacctgaagatccaactga

SEQ ID NO: 1035362 - DNA, 33 bp, Homo sapien
ggacaactcagcatcatctgaagatccaactga

SEQ ID NO: 1035363 - DNA, 33 bp, Homo sapien
cgattactgaatagtacggtaaaagtgtgttaa

SEQ ID NO: 1035364 - DNA, 33 bp, Homo sapien
cgattactgaatagtatggtaaaagtgtgttaa

SEQ ID NO: 1035365 - DNA, 33 bp, Homo sapien
tcttaaacagtttttcgacaacattttttacat

SEQ ID NO: 1035366 - DNA, 33 bp, Homo sapien
tcttaaacagtttttctacaacattttttacat

SEQ ID NO: 1035367 - DNA, 33 bp, Homo sapien
aatcaatgattgtcaactgaaaaggcacagcag

SEQ ID NO: 1035368 - DNA, 33 bp, Homo sapien
aatcaatgattgtcaattgaaaaggcacagcag

SEQ ID NO: 1035369 - DNA, 33 bp, Homo sapien
ctaactgttgctaggaaccacatctcatctctg

SEQ ID NO: 1035370 - DNA, 33 bp, Homo sapien
ctaactgttgctaggatccacatctcatctctg

SEQ ID NO: 1035371 - DNA, 33 bp, Homo sapien
agttcctcacttgccgcaaccaataagcgctaa

SEQ ID NO: 1035372 - DNA, 33 bp, Homo sapien
agttcctcacttgccgtaaccaataagcgctaa

SEQ ID NO: 1035373 - DNA, 33 bp, Homo sapien
attaactgacagctcacggaattatttgggcac

SEQ ID NO: 1035374 - DNA, 33 bp, Homo sapien
attaactgacagctcatggaattatttgggcac

SEQ ID NO: 1035375 - DNA, 33 bp, Homo sapien
ctcatatcactgataggaaggcaaaaaatggta

SEQ ID NO: 1035376 - DNA, 33 bp, Homo sapien
ctcatatcactgatagtaaggcaaaaaatggta

SEQ ID NO: 1035377 - DNA, 33 bp, Homo sapien
agataaccaggttaacaagattttgaaatgctt

SEQ ID NO: 1035378 - DNA, 33 bp, Homo sapien
agataaccaggttaacgagattttgaaatgctt

SEQ ID NO: 1035379 - DNA, 33 bp, Homo sapien
acagcttgatttttaccgactggaaacgtgcta

SEQ ID NO: 1035380 - DNA, 33 bp, Homo sapien
acagcttgatttttactgactggaaacgtgcta

SEQ ID NO: 1035381 - DNA, 33 bp, Homo sapien
caatctctccctgaaaccaaatccattctcaag

SEQ ID NO: 1035382 - DNA, 33 bp, Homo sapien
caatctctccctgaaagcaaatccattctcaag

SEQ ID NO: 1035383 - DNA, 33 bp, Homo sapien
aaagtactagaaaatgaaagctactgatagtta

SEQ ID NO: 1035384 - DNA, 33 bp, Homo sapien
aaagtactagaaaatgtaagctactgatagtta

SEQ ID NO: 1035385 - DNA, 33 bp, Homo sapien
tgtttaataagtaactcacaattttgaacttta

SEQ ID NO: 1035386 - DNA, 33 bp, Homo sapien
tgtttaataagtaactgacaattttgaacttta

SEQ ID NO: 1035387 - DNA, 33 bp, Homo sapien
agacctcatcaagcagccgcctttcttttttta

SEQ ID NO: 1035388 - DNA, 33 bp, Homo sapien
agacctcatcaagcagtcgcctttcttttttta

SEQ ID NO: 1035389 - DNA, 33 bp, Homo sapien
atgcaggacttccgctaaaacacaaatttggga

SEQ ID NO: 1035390 - DNA, 33 bp, Homo sapien
atgcaggacttccgctcaaacacaaatttggga

SEQ ID NO: 1035391 - DNA, 33 bp, Homo sapien
aaactgattgtaattaaactgatgaaattatcc

SEQ ID NO: 1035392 - DNA, 33 bp, Homo sapien
aaactgattgtaattagactgatgaaattatcc

SEQ ID NO: 1035393 - DNA, 33 bp, Homo sapien
catcagctacagtgtaagtctcagaaacagatc

SEQ ID NO: 1035394 - DNA, 33 bp, Homo sapien
catcagctacagtgtacgtctcagaaacagatc

SEQ ID NO: 1035395 - DNA, 33 bp, Homo sapien
ccactgtgcttaggaaaattagaggatgtcacc

SEQ ID NO: 1035396 - DNA, 33 bp, Homo sapien
ccactgtgcttaggaagattagaggatgtcacc

SEQ ID NO: 1035397 - DNA, 33 bp, Homo sapien
agcctgacaaatcccaaaccaaatacacacacc

SEQ ID NO: 1035398 - DNA, 33 bp, Homo sapien
agcctgacaaatcccataccaaatacacacacc

SEQ ID NO: 1035399 - DNA, 33 bp, Homo sapien
aacaaaaaacagagaaaactagcttctgaaatg

SEQ ID NO: 1035400 - DNA, 33 bp, Homo sapien
aacaaaaaacagagaacactagcttctgaaatg

SEQ ID NO: 1035401 - DNA, 33 bp, Homo sapien
agtataagttatgcacaactggctttgtcccta

SEQ ID NO: 1035402 - DNA, 33 bp, Homo sapien
agtataagttatgcacgactggctttgtcccta

SEQ ID NO: 1035403 - DNA, 33 bp, Homo sapien
ggatgggaaaggaagactaagcagagccccgtt

SEQ ID NO: 1035404 - DNA, 33 bp, Homo sapien
ggatgggaaaggaagattaagcagagccccgtt

SEQ ID NO: 1035405 - DNA, 33 bp, Homo sapien
ccaggcatttttcagtcaccactgtcttactat

SEQ ID NO: 1035406 - DNA, 33 bp, Homo sapien
ccaggcatttttcagtgaccactgtcttactat

SEQ ID NO: 1035407 - DNA, 33 bp, Homo sapien
aatattttagaagtcaagtttaagatacaatta

SEQ ID NO: 1035408 - DNA, 33 bp, Homo sapien
aatattttagaagtcatgtttaagatacaatta

SEQ ID NO: 1035409 - DNA, 33 bp, Homo sapien
tccacagccaccttccggcaaagtccaaagacc

SEQ ID NO: 1035410 - DNA, 33 bp, Homo sapien
tccacagccaccttcctgcaaagtccaaagacc

SEQ ID NO: 1035411 - DNA, 33 bp, Homo sapien
actgaaaagttgccccccacttctgcgatacct

SEQ ID NO: 1035412 - DNA, 33 bp, Homo sapien
actgaaaagttgcccctcacttctgcgatacct

SEQ ID NO: 1035413 - DNA, 33 bp, Homo sapien
tgaaattagaagtccagatcatgttttttgttg

SEQ ID NO: 1035414 - DNA, 33 bp, Homo sapien
tgaaattagaagtccatatcatgttttttgttg

SEQ ID NO: 1035415 - DNA, 33 bp, Homo sapien
agaaccccatgtaaaacctttccgatctctgct

SEQ ID NO: 1035416 - DNA, 33 bp, Homo sapien
agaaccccatgtaaaatctttccgatctctgct

SEQ ID NO: 1035417 - DNA, 33 bp, Homo sapien
ttatgaactacttgcaaggaaaaaattctttcc

SEQ ID NO: 1035418 - DNA, 33 bp, Homo sapien
ttatgaactacttgcagggaaaaaattctttcc

SEQ ID NO: 1035419 - DNA, 33 bp, Homo sapien
tttttgtatgcaaaaccataagaatatccagct

SEQ ID NO: 1035420 - DNA, 33 bp, Homo sapien
tttttgtatgcaaaactataagaatatccagct

SEQ ID NO: 1035421 - DNA, 33 bp, Homo sapien
atgagagaaaatagcagatcattgaagttatca

SEQ ID NO: 1035422 - DNA, 33 bp, Homo sapien
atgagagaaaatagcatatcattgaagttatca

SEQ ID NO: 1035423 - DNA, 33 bp, Homo sapien
tagagtccccgatttgcaagtttcatattaaag

SEQ ID NO: 1035424 - DNA, 33 bp, Homo sapien
tagagtccccgatttggaagtttcatattaaag

SEQ ID NO: 1035425 - DNA, 33 bp, Homo sapien
aatgcgatcaagggacagtagttgtattttatt

SEQ ID NO: 1035426 - DNA, 33 bp, Homo sapien
aatgcgatcaagggacggtagttgtattttatt

SEQ ID NO: 1035427 - DNA, 33 bp, Homo sapien
tagtccataagaaagacacagcatcatcctcca

SEQ ID NO: 1035428 - DNA, 33 bp, Homo sapien
tagtccataagaaagatacagcatcatcctcca

SEQ ID NO: 1035429 - DNA, 33 bp, Homo sapien
ctgcacttttgtgtaaactgtcccctatccttg

SEQ ID NO: 1035430 - DNA, 33 bp, Homo sapien
ctgcacttttgtgtaagctgtcccctatccttg

SEQ ID NO: 1035431 - DNA, 33 bp, Homo sapien
ttgcattagatataaacgagactgggtgctata

SEQ ID NO: 1035432 - DNA, 33 bp, Homo sapien
ttgcattagatataaatgagactgggtgctata

SEQ ID NO: 1035433 - DNA, 33 bp, Homo sapien
ctgtccaaattatataaagtgtcttcagcatca

SEQ ID NO: 1035434 - DNA, 33 bp, Homo sapien
ctgtccaaattatatatagtgtcttcagcatca

SEQ ID NO: 1035435 - DNA, 33 bp, Homo sapien
ttaccataaaagtcagaatactggtatgttatc

SEQ ID NO: 1035436 - DNA, 33 bp, Homo sapien
ttaccataaaagtcaggatactggtatgttatc

SEQ ID NO: 1035437 - DNA, 33 bp, Homo sapien
gaataaacgtctcaaacgggatacaaacaagac

SEQ ID NO: 1035438 - DNA, 33 bp, Homo sapien
gaataaacgtctcaaatgggatacaaacaagac

SEQ ID NO: 1035439 - DNA, 33 bp, Homo sapien
aagggaatctccattagatcattagttgacttc

SEQ ID NO: 1035440 - DNA, 33 bp, Homo sapien
aagggaatctccattatatcattagttgacttc

SEQ ID NO: 1035441 - DNA, 33 bp, Homo sapien
gtttttaaaccactgaacttgttataatttatt

SEQ ID NO: 1035442 - DNA, 33 bp, Homo sapien
gtttttaaaccactgagcttgttataatttatt

SEQ ID NO: 1035443 - DNA, 33 bp, Homo sapien
tctcatggacctttgcaacccgtagatcaggaa

SEQ ID NO: 1035444 - DNA, 33 bp, Homo sapien
tctcatggacctttgcgacccgtagatcaggaa

SEQ ID NO: 1035445 - DNA, 33 bp, Homo sapien
ttactaaggtcaccaaatatctcttaatttcga

SEQ ID NO: 1035446 - DNA, 33 bp, Homo sapien
ttactaaggtcaccaagtatctcttaatttcga

SEQ ID NO: 1035447 - DNA, 33 bp, Homo sapien
agctcttctaaagacaacactaaacaaagaaaa

SEQ ID NO: 1035448 - DNA, 33 bp, Homo sapien
agctcttctaaagacatcactaaacaaagaaaa

SEQ ID NO: 1035449 - DNA, 33 bp, Homo sapien
gggaaagaggctgatactactttcgatattgca

SEQ ID NO: 1035450 - DNA, 33 bp, Homo sapien
gggaaagaggctgatattactttcgatattgca

SEQ ID NO: 1035451 - DNA, 33 bp, Homo sapien
gcgatattgaaagtaacaccttctgccctctgg

SEQ ID NO: 1035452 - DNA, 33 bp, Homo sapien
gcgatattgaaagtaataccttctgccctctgg

SEQ ID NO: 1035453 - DNA, 33 bp, Homo sapien
acaataataaagagaccgtactggcaaaaagat

SEQ ID NO: 1035454 - DNA, 33 bp, Homo sapien
acaataataaagagactgtactggcaaaaagat

SEQ ID NO: 1035455 - DNA, 33 bp, Homo sapien
atatactttaagggtacgaattgcaaacacaac

SEQ ID NO: 1035456 - DNA, 33 bp, Homo sapien
atatactttaagggtatgaattgcaaacacaac

SEQ ID NO: 1035457 - DNA, 33 bp, Homo sapien
acaccatggacttctggacttcactcttgcttt

SEQ ID NO: 1035458 - DNA, 33 bp, Homo sapien
acaccatggacttctgtacttcactcttgcttt

SEQ ID NO: 1035459 - DNA, 33 bp, Homo sapien
acttgaacacaactcacatcctataagcatcta

SEQ ID NO: 1035460 - DNA, 33 bp, Homo sapien
acttgaacacaactcatatcctataagcatcta

SEQ ID NO: 1035461 - DNA, 33 bp, Homo sapien
agaactggtttgaagaacagtggcagtgggggt

SEQ ID NO: 1035462 - DNA, 33 bp, Homo sapien
agaactggtttgaagagcagtggcagtgggggt

SEQ ID NO: 1035463 - DNA, 33 bp, Homo sapien
ctcgcttttcctcctcacttatctagaagcagt

SEQ ID NO: 1035464 - DNA, 33 bp, Homo sapien
ctcgcttttcctcctcgcttatctagaagcagt

SEQ ID NO: 1035465 - DNA, 33 bp, Homo sapien
cacaaagcatcaggtcccattatgccagcagtt

SEQ ID NO: 1035466 - DNA, 33 bp, Homo sapien
cacaaagcatcaggtctcattatgccagcagtt

SEQ ID NO: 1035467 - DNA, 33 bp, Homo sapien
catctccagacttcccactgaaatctcttcagt

SEQ ID NO: 1035468 - DNA, 33 bp, Homo sapien
catctccagacttcccgctgaaatctcttcagt

SEQ ID NO: 1035469 - DNA, 33 bp, Homo sapien
ttgtgttgatgtcttaaaattttggctaaagct

SEQ ID NO: 1035470 - DNA, 33 bp, Homo sapien
ttgtgttgatgtcttagaattttggctaaagct

SEQ ID NO: 1035471 - DNA, 33 bp, Homo sapien
tttattgatttgcatacgttgacccacccttgt

SEQ ID NO: 1035472 - DNA, 33 bp, Homo sapien
tttattgatttgcatatgttgacccacccttgt

SEQ ID NO: 1035473 - DNA, 33 bp, Homo sapien
aacattccctgtaagaactggaacaaggcgagt

SEQ ID NO: 1035474 - DNA, 33 bp, Homo sapien
aacattccctgtaagagctggaacaaggcgagt

SEQ ID NO: 1035475 - DNA, 33 bp, Homo sapien
cttgtccaggaggaaacgataacgtttagatca

SEQ ID NO: 1035476 - DNA, 33 bp, Homo sapien
cttgtccaggaggaaatgataacgtttagatca

SEQ ID NO: 1035477 - DNA, 33 bp, Homo sapien
tgggctctttgtcagagaatttctaggggagaa

SEQ ID NO: 1035478 - DNA, 33 bp, Homo sapien
tgggctctttgtcagataatttctaggggagaa

SEQ ID NO: 1035479 - DNA, 33 bp, Homo sapien
ggtcaatttatgcaacaagagcagtgaagttct

SEQ ID NO: 1035480 - DNA, 33 bp, Homo sapien
ggtcaatttatgcaaccagagcagtgaagttct

SEQ ID NO: 1035481 - DNA, 33 bp, Homo sapien
caaccttatacaagcacctactgtactgctata

SEQ ID NO: 1035482 - DNA, 33 bp, Homo sapien
caaccttatacaagcatctactgtactgctata

SEQ ID NO: 1035483 - DNA, 33 bp, Homo sapien
tctgtgtggagctttcacgttctctccatgact

SEQ ID NO: 1035484 - DNA, 33 bp, Homo sapien
tctgtgtggagctttcgcgttctctccatgact

SEQ ID NO: 1035485 - DNA, 33 bp, Homo sapien
cttgtgactgaaccaacattacacagcaagtag

SEQ ID NO: 1035486 - DNA, 33 bp, Homo sapien
cttgtgactgaaccaagattacacagcaagtag

SEQ ID NO: 1035487 - DNA, 33 bp, Homo sapien
cattccaataagccaaactaacatagaaacata

SEQ ID NO: 1035488 - DNA, 33 bp, Homo sapien
cattccaataagccaatctaacatagaaacata

SEQ ID NO: 1035489 - DNA, 33 bp, Homo sapien
ggatgctgattaaaacagcagtctctccttgtt

SEQ ID NO: 1035490 - DNA, 33 bp, Homo sapien
ggatgctgattaaaactgcagtctctccttgtt

SEQ ID NO: 1035491 - DNA, 33 bp, Homo sapien
tcactgtaacaatgcccacaaaagataagaaga

SEQ ID NO: 1035492 - DNA, 33 bp, Homo sapien
tcactgtaacaatgcctacaaaagataagaaga

SEQ ID NO: 1035493 - DNA, 33 bp, Homo sapien
aactgtctatttaaaccaccctcaaaggttctt

SEQ ID NO: 1035494 - DNA, 33 bp, Homo sapien
aactgtctatttaaactaccctcaaaggttctt

SEQ ID NO: 1035495 - DNA, 33 bp, Homo sapien
ccttgtgtgctgtgctcaatttttggatttcta

SEQ ID NO: 1035496 - DNA, 33 bp, Homo sapien
ccttgtgtgctgtgcttaatttttggatttcta

SEQ ID NO: 1035497 - DNA, 33 bp, Homo sapien
tttcctctctgaattaaccattgcttgactaaa

SEQ ID NO: 1035498 - DNA, 33 bp, Homo sapien
tttcctctctgaattacccattgcttgactaaa

SEQ ID NO: 1035499 - DNA, 33 bp, Homo sapien
tgtatttacaagatggaaaaatgaaggggttct

SEQ ID NO: 1035500 - DNA, 33 bp, Homo sapien
tgtatttacaagatgggaaaatgaaggggttct

SEQ ID NO: 1035501 - DNA, 33 bp, Homo sapien
caactggaggtaaacccagatttggattccatt

SEQ ID NO: 1035502 - DNA, 33 bp, Homo sapien
caactggaggtaaacctagatttggattccatt

SEQ ID NO: 1035503 - DNA, 33 bp, Homo sapien
ggattataaatcattccatgatgaggacacatg

SEQ ID NO: 1035504 - DNA, 33 bp, Homo sapien
ggattataaatcattctatgatgaggacacatg

SEQ ID NO: 1035505 - DNA, 33 bp, Homo sapien
ctacaggtcaaggagacacagcagacaaggaca

SEQ ID NO: 1035506 - DNA, 33 bp, Homo sapien
ctacaggtcaaggagagacagcagacaaggaca

SEQ ID NO: 1035507 - DNA, 33 bp, Homo sapien
tgccccatgcaccataagccgcagatgaggaga

SEQ ID NO: 1035508 - DNA, 33 bp, Homo sapien
tgccccatgcaccataggccgcagatgaggaga

SEQ ID NO: 1035509 - DNA, 33 bp, Homo sapien
gtggcttagctatcaaaaagaccccctcatggg

SEQ ID NO: 1035510 - DNA, 33 bp, Homo sapien
gtggcttagctatcaagaagaccccctcatggg

SEQ ID NO: 1035511 - DNA, 33 bp, Homo sapien
agaattgccttccttaagcccaggattgccccc

SEQ ID NO: 1035512 - DNA, 33 bp, Homo sapien
agaattgccttccttaggcccaggattgccccc

SEQ ID NO: 1035513 - DNA, 33 bp, Homo sapien
taaaggtaagccctgacactttcaggaccttag

SEQ ID NO: 1035514 - DNA, 33 bp, Homo sapien
taaaggtaagccctgatactttcaggaccttag

SEQ ID NO: 1035515 - DNA, 33 bp, Homo sapien
aacttgttatgttaggccattcttccattgcta

SEQ ID NO: 1035516 - DNA, 33 bp, Homo sapien
aacttgttatgttaggtcattcttccattgcta

SEQ ID NO: 1035517 - DNA, 33 bp, Homo sapien
tgattactcccaaataagtgagattagttcaat

SEQ ID NO: 1035518 - DNA, 33 bp, Homo sapien
tgattactcccaaataggtgagattagttcaat

SEQ ID NO: 1035519 - DNA, 33 bp, Homo sapien
atggcattgaatttcaagatgacttgctataga

SEQ ID NO: 1035520 - DNA, 33 bp, Homo sapien
atggcattgaatttcatgatgacttgctataga

SEQ ID NO: 1035521 - DNA, 33 bp, Homo sapien
ataacagatgacatgacatggaggacttactat

SEQ ID NO: 1035522 - DNA, 33 bp, Homo sapien
ataacagatgacatgatatggaggacttactat

SEQ ID NO: 1035523 - DNA, 33 bp, Homo sapien
gtaccaacagtgaaaacaaagacatggagcttc

SEQ ID NO: 1035524 - DNA, 33 bp, Homo sapien
gtaccaacagtgaaaataaagacatggagcttc

SEQ ID NO: 1035525 - DNA, 33 bp, Homo sapien
caacctaaaaatgcacgcaaatttgggttcaaa

SEQ ID NO: 1035526 - DNA, 33 bp, Homo sapien
caacctaaaaatgcactcaaatttgggttcaaa

SEQ ID NO: 1035527 - DNA, 33 bp, Homo sapien
gcgcagagagcaaaaacttccatactggcagag

SEQ ID NO: 1035528 - DNA, 33 bp, Homo sapien
gcgcagagagcaaaaagttccatactggcagag

SEQ ID NO: 1035529 - DNA, 33 bp, Homo sapien
tcccactgacactagacggagctttgtgaccac

SEQ ID NO: 1035530 - DNA, 33 bp, Homo sapien
tcccactgacactagatggagctttgtgaccac

SEQ ID NO: 1035531 - DNA, 33 bp, Homo sapien
atgtgaggaaaatacaacctgccacagttatta

SEQ ID NO: 1035532 - DNA, 33 bp, Homo sapien
atgtgaggaaaatacatcctgccacagttatta

SEQ ID NO: 1035533 - DNA, 33 bp, Homo sapien
aagaatatatccctcaatcgaaactaacagcac

SEQ ID NO: 1035534 - DNA, 33 bp, Homo sapien
aagaatatatccctcagtcgaaactaacagcac

SEQ ID NO: 1035535 - DNA, 33 bp, Homo sapien
ggaacacagaattcgccaacactcaaaggattg

SEQ ID NO: 1035536 - DNA, 33 bp, Homo sapien
ggaacacagaattcgctaacactcaaaggattg

SEQ ID NO: 1035537 - DNA, 33 bp, Homo sapien
actacaaaacagcaaacatggtgatctgcccct

SEQ ID NO: 1035538 - DNA, 33 bp, Homo sapien
actacaaaacagcaaagatggtgatctgcccct

SEQ ID NO: 1035539 - DNA, 33 bp, Homo sapien
caagattcagaaagaccgagtttcctaaggtca

SEQ ID NO: 1035540 - DNA, 33 bp, Homo sapien
caagattcagaaagactgagtttcctaaggtca

SEQ ID NO: 1035541 - DNA, 33 bp, Homo sapien
ttagccagcaactgaaagtataaatgagtctcc

SEQ ID NO: 1035542 - DNA, 33 bp, Homo sapien
ttagccagcaactgaaggtataaatgagtctcc

SEQ ID NO: 1035543 - DNA, 33 bp, Homo sapien
ccagggggtttaattgcaatggacacagtgatc

SEQ ID NO: 1035544 - DNA, 33 bp, Homo sapien
ccagggggtttaattggaatggacacagtgatc

SEQ ID NO: 1035545 - DNA, 33 bp, Homo sapien
agagatacttacaatgcattcacctccaaatgt

SEQ ID NO: 1035546 - DNA, 33 bp, Homo sapien
agagatacttacaatggattcacctccaaatgt

SEQ ID NO: 1035547 - DNA, 33 bp, Homo sapien
tacagttgtccaaccgcactagagcggaatagg

SEQ ID NO: 1035548 - DNA, 33 bp, Homo sapien
tacagttgtccaaccgtactagagcggaatagg

SEQ ID NO: 1035549 - DNA, 33 bp, Homo sapien
aattgtgtcactgaagcctggtgagtgctggag

SEQ ID NO: 1035550 - DNA, 33 bp, Homo sapien
aattgtgtcactgaaggctggtgagtgctggag

SEQ ID NO: 1035551 - DNA, 33 bp, Homo sapien
atattttagcaccgaaaaaaggaagaagggaat

SEQ ID NO: 1035552 - DNA, 33 bp, Homo sapien
atattttagcaccgaagaaaggaagaagggaat

SEQ ID NO: 1035553 - DNA, 33 bp, Homo sapien
ggaaatctctaaaggcagaaaggaggtgaacat

SEQ ID NO: 1035554 - DNA, 33 bp, Homo sapien
ggaaatctctaaaggcggaaaggaggtgaacat

SEQ ID NO: 1035555 - DNA, 33 bp, Homo sapien
acagaaagattgagagcagatattgagaggaga

SEQ ID NO: 1035556 - DNA, 33 bp, Homo sapien
acagaaagattgagagtagatattgagaggaga

SEQ ID NO: 1035557 - DNA, 33 bp, Homo sapien
aaaactgcagtgatcaacgtttctcttcatgtt

SEQ ID NO: 1035558 - DNA, 33 bp, Homo sapien
aaaactgcagtgatcagcgtttctcttcatgtt

SEQ ID NO: 1035559 - DNA, 33 bp, Homo sapien
tcttggctggatttatcacattctcctatgagc

SEQ ID NO: 1035560 - DNA, 33 bp, Homo sapien
tcttggctggatttattacattctcctatgagc

SEQ ID NO: 1035561 - DNA, 33 bp, Homo sapien
aagaccagcttgtctacgaaaataccacgactg

SEQ ID NO: 1035562 - DNA, 33 bp, Homo sapien
aagaccagcttgtctatgaaaataccacgactg

SEQ ID NO: 1035563 - DNA, 33 bp, Homo sapien
gcaggacctgggaagacgacaggaggtaagagt

SEQ ID NO: 1035564 - DNA, 33 bp, Homo sapien
gcaggacctgggaagatgacaggaggtaagagt

SEQ ID NO: 1035565 - DNA, 33 bp, Homo sapien
gggagcaaggctttaaaaggcaatcaagatcct

SEQ ID NO: 1035566 - DNA, 33 bp, Homo sapien
gggagcaaggctttaacaggcaatcaagatcct

SEQ ID NO: 1035567 - DNA, 33 bp, Homo sapien
cattgagtgtttgttacattctttggtgttttg

SEQ ID NO: 1035568 - DNA, 33 bp, Homo sapien
cattgagtgtttgttatattctttggtgttttg

SEQ ID NO: 1035569 - DNA, 33 bp, Homo sapien
aacttctggatttctgaaaggtatatgacggca

SEQ ID NO: 1035570 - DNA, 33 bp, Homo sapien
aacttctggatttctggaaggtatatgacggca

SEQ ID NO: 1035571 - DNA, 33 bp, Homo sapien
ttgtgataatgggtgaacaaaagtaaaacgttt

SEQ ID NO: 1035572 - DNA, 33 bp, Homo sapien
ttgtgataatgggtgagcaaaagtaaaacgttt

SEQ ID NO: 1035573 - DNA, 33 bp, Homo sapien
tgaccatttatgcctgaaatagttacagtttac

SEQ ID NO: 1035574 - DNA, 33 bp, Homo sapien
tgaccatttatgcctggaatagttacagtttac

SEQ ID NO: 1035575 - DNA, 33 bp, Homo sapien
ttttgttgcctattaactctgcagttgcaccac

SEQ ID NO: 1035576 - DNA, 33 bp, Homo sapien
ttttgttgcctattaagtctgcagttgcaccac

SEQ ID NO: 1035577 - DNA, 33 bp, Homo sapien
agcttgcagaattgcccgagttgtagttcgcat

SEQ ID NO: 1035578 - DNA, 33 bp, Homo sapien
agcttgcagaattgcctgagttgtagttcgcat

SEQ ID NO: 1035579 - DNA, 33 bp, Homo sapien
caagggacccacatcacaccaaagaagagtcat

SEQ ID NO: 1035580 - DNA, 33 bp, Homo sapien
caagggacccacatcataccaaagaagagtcat

SEQ ID NO: 1035581 - DNA, 33 bp, Homo sapien
aatgtggcttatgttcccatcaccttgtacact

SEQ ID NO: 1035582 - DNA, 33 bp, Homo sapien
aatgtggcttatgttctcatcaccttgtacact

SEQ ID NO: 1035583 - DNA, 33 bp, Homo sapien
catgtttgttgactgactcaaaactgctcaagg

SEQ ID NO: 1035584 - DNA, 33 bp, Homo sapien
catgtttgttgactgattcaaaactgctcaagg

SEQ ID NO: 1035585 - DNA, 33 bp, Homo sapien
cttcagtttctcctgactagtgtctgcttattt

SEQ ID NO: 1035586 - DNA, 33 bp, Homo sapien
cttcagtttctcctgattagtgtctgcttattt

SEQ ID NO: 1035587 - DNA, 33 bp, Homo sapien
ttcttagaataatgtgacaagtagctagaagga

SEQ ID NO: 1035588 - DNA, 33 bp, Homo sapien
ttcttagaataatgtggcaagtagctagaagga

SEQ ID NO: 1035589 - DNA, 33 bp, Homo sapien
acagtttactcaacaactagttactaatctcct

SEQ ID NO: 1035590 - DNA, 33 bp, Homo sapien
acagtttactcaacaagtagttactaatctcct

SEQ ID NO: 1035591 - DNA, 33 bp, Homo sapien
tactgaatattactcaacttggatcaaaatggc

SEQ ID NO: 1035592 - DNA, 33 bp, Homo sapien
tactgaatattactcaccttggatcaaaatggc

SEQ ID NO: 1035593 - DNA, 33 bp, Homo sapien
aactgaagttgattcccaaggtggatagacact

SEQ ID NO: 1035594 - DNA, 33 bp, Homo sapien
aactgaagttgattccgaaggtggatagacact

SEQ ID NO: 1035595 - DNA, 33 bp, Homo sapien
tttgcccaaaggaaaacgatgaaagggcctatt

SEQ ID NO: 1035596 - DNA, 33 bp, Homo sapien
tttgcccaaaggaaaatgatgaaagggcctatt

SEQ ID NO: 1035597 - DNA, 33 bp, Homo sapien
gcttttcttttacctacgtaagcagttgtctat

SEQ ID NO: 1035598 - DNA, 33 bp, Homo sapien
gcttttcttttacctatgtaagcagttgtctat

SEQ ID NO: 1035599 - DNA, 33 bp, Homo sapien
tctcagtagaaaaccacgagttagacaggtctc

SEQ ID NO: 1035600 - DNA, 33 bp, Homo sapien
tctcagtagaaaaccatgagttagacaggtctc

SEQ ID NO: 1035601 - DNA, 33 bp, Homo sapien
cacatagacagacagacgtatgcactccgtata

SEQ ID NO: 1035602 - DNA, 33 bp, Homo sapien
cacatagacagacagatgtatgcactccgtata

SEQ ID NO: 1035603 - DNA, 33 bp, Homo sapien
gagaatgtggtcctaacgtctacatcctttcac

SEQ ID NO: 1035604 - DNA, 33 bp, Homo sapien
gagaatgtggtcctaatgtctacatcctttcac

SEQ ID NO: 1035605 - DNA, 33 bp, Homo sapien
gtggctcttccaaaataacggctttacttgaag

SEQ ID NO: 1035606 - DNA, 33 bp, Homo sapien
gtggctcttccaaaatgacggctttacttgaag

SEQ ID NO: 1035607 - DNA, 33 bp, Homo sapien
aagataaaatttgaagcctctcttatcaaagaa

SEQ ID NO: 1035608 - DNA, 33 bp, Homo sapien
aagataaaatttgaaggctctcttatcaaagaa

SEQ ID NO: 1035609 - DNA, 33 bp, Homo sapien
gttccaaatcacactccaagatttctctgctaa

SEQ ID NO: 1035610 - DNA, 33 bp, Homo sapien
gttccaaatcacactctaagatttctctgctaa

SEQ ID NO: 1035611 - DNA, 33 bp, Homo sapien
ccctcacttaaagcaccgattattcctttatta

SEQ ID NO: 1035612 - DNA, 33 bp, Homo sapien
ccctcacttaaagcacggattattcctttatta

SEQ ID NO: 1035613 - DNA, 33 bp, Homo sapien
acattaattgtataacaactgtatgtcacacaa

SEQ ID NO: 1035614 - DNA, 33 bp, Homo sapien
acattaattgtataactactgtatgtcacacaa

SEQ ID NO: 1035615 - DNA, 33 bp, Homo sapien
actgaacagcagaatacataacgtcagaagtga

SEQ ID NO: 1035616 - DNA, 33 bp, Homo sapien
actgaacagcagaatagataacgtcagaagtga

SEQ ID NO: 1035617 - DNA, 33 bp, Homo sapien
tgttaatctgtttctacgaaagttcatcaacca

SEQ ID NO: 1035618 - DNA, 33 bp, Homo sapien
tgttaatctgtttctatgaaagttcatcaacca

SEQ ID NO: 1035619 - DNA, 33 bp, Homo sapien
tctctttgaccttctacctttgactgtgaactt

SEQ ID NO: 1035620 - DNA, 33 bp, Homo sapien
tctctttgaccttctatctttgactgtgaactt

SEQ ID NO: 1035621 - DNA, 33 bp, Homo sapien
catatgatactggagaacttccccctttcttgc

SEQ ID NO: 1035622 - DNA, 33 bp, Homo sapien
catatgatactggagaccttccccctttcttgc

SEQ ID NO: 1035623 - DNA, 33 bp, Homo sapien
ttacttcagaactggaccatttagttgccactg

SEQ ID NO: 1035624 - DNA, 33 bp, Homo sapien
ttacttcagaactggatcatttagttgccactg

SEQ ID NO: 1035625 - DNA, 33 bp, Homo sapien
aacactcatggaattaggaccactgcccgggag

SEQ ID NO: 1035626 - DNA, 33 bp, Homo sapien
aacactcatggaattatgaccactgcccgggag

SEQ ID NO: 1035627 - DNA, 33 bp, Homo sapien
cttttttctcaaggtgaactcactaacatcgaa

SEQ ID NO: 1035628 - DNA, 33 bp, Homo sapien
cttttttctcaaggtggactcactaacatcgaa

SEQ ID NO: 1035629 - DNA, 33 bp, Homo sapien
gttccttcactgatacacacatttttttttctt

SEQ ID NO: 1035630 - DNA, 33 bp, Homo sapien
gttccttcactgatacgcacatttttttttctt

SEQ ID NO: 1035631 - DNA, 33 bp, Homo sapien
aatctggggagtgtagaagatcgtatggaatga

SEQ ID NO: 1035632 - DNA, 33 bp, Homo sapien
aatctggggagtgtaggagatcgtatggaatga

SEQ ID NO: 1035633 - DNA, 33 bp, Homo sapien
tataaggacaccagtgaaattggagtaaggctc

SEQ ID NO: 1035634 - DNA, 33 bp, Homo sapien
tataaggacaccagtggaattggagtaaggctc

SEQ ID NO: 1035635 - DNA, 33 bp, Homo sapien
aattctattgaatgtgcaaaattgtgagcctgt

SEQ ID NO: 1035636 - DNA, 33 bp, Homo sapien
aattctattgaatgtggaaaattgtgagcctgt

SEQ ID NO: 1035637 - DNA, 33 bp, Homo sapien
aagccaccgcatcgagcccaatatcacatttac

SEQ ID NO: 1035638 - DNA, 33 bp, Homo sapien
aagccaccgcatcgagtccaatatcacatttac

SEQ ID NO: 1035639 - DNA, 33 bp, Homo sapien
cgacaaaatgagtgaacgtaaatttagtccaaa

SEQ ID NO: 1035640 - DNA, 33 bp, Homo sapien
cgacaaaatgagtgaatgtaaatttagtccaaa

SEQ ID NO: 1035641 - DNA, 33 bp, Homo sapien
ataatctgctcactaaatatgtcatgcttggct

SEQ ID NO: 1035642 - DNA, 33 bp, Homo sapien
ataatctgctcactaagtatgtcatgcttggct

SEQ ID NO: 1035643 - DNA, 33 bp, Homo sapien
catgtggcaagttatacggtattaggctagtta

SEQ ID NO: 1035644 - DNA, 33 bp, Homo sapien
catgtggcaagttatatggtattaggctagtta

SEQ ID NO: 1035645 - DNA, 33 bp, Homo sapien
ccaggccccagagtaacgaaggcaaggcttaaa

SEQ ID NO: 1035646 - DNA, 33 bp, Homo sapien
ccaggccccagagtaatgaaggcaaggcttaaa

SEQ ID NO: 1035647 - DNA, 33 bp, Homo sapien
acaccacttgaaaatacagcccaggtgaccagc

SEQ ID NO: 1035648 - DNA, 33 bp, Homo sapien
acaccacttgaaaatagagcccaggtgaccagc

SEQ ID NO: 1035649 - DNA, 33 bp, Homo sapien
gactctcctgtaaaagaacacaccgcttgctgt

SEQ ID NO: 1035650 - DNA, 33 bp, Homo sapien
gactctcctgtaaaaggacacaccgcttgctgt

SEQ ID NO: 1035651 - DNA, 33 bp, Homo sapien
gtgcgttgttttgtgccagtaagtgtgtggtaa

SEQ ID NO: 1035652 - DNA, 33 bp, Homo sapien
gtgcgttgttttgtgctagtaagtgtgtggtaa

SEQ ID NO: 1035653 - DNA, 33 bp, Homo sapien
cttactgctgccatgaaaaattaccacacactt

SEQ ID NO: 1035654 - DNA, 33 bp, Homo sapien
cttactgctgccatgacaaattaccacacactt

SEQ ID NO: 1035655 - DNA, 33 bp, Homo sapien
cacaggatttgtgccaaaaactcaagtagagcc

SEQ ID NO: 1035656 - DNA, 33 bp, Homo sapien
cacaggatttgtgccagaaactcaagtagagcc

SEQ ID NO: 1035657 - DNA, 33 bp, Homo sapien
tgctttctggctccaactgtctgagtttttcct

SEQ ID NO: 1035658 - DNA, 33 bp, Homo sapien
tgctttctggctccaattgtctgagtttttcct

SEQ ID NO: 1035659 - DNA, 33 bp, Homo sapien
attcatcaacaaagccaacttttctatttattg

SEQ ID NO: 1035660 - DNA, 33 bp, Homo sapien
attcatcaacaaagccgacttttctatttattg

SEQ ID NO: 1035661 - DNA, 33 bp, Homo sapien
catgttcttcttacatgatgacattggcactct

SEQ ID NO: 1035662 - DNA, 33 bp, Homo sapien
catgttcttcttacattatgacattggcactct

SEQ ID NO: 1035663 - DNA, 33 bp, Homo sapien
ggcttcagagtgaccacatctggatggtgagat

SEQ ID NO: 1035664 - DNA, 33 bp, Homo sapien
ggcttcagagtgaccatatctggatggtgagat

SEQ ID NO: 1035665 - DNA, 33 bp, Homo sapien
cctggctgcaaaaatactaaccaaatcttaacc

SEQ ID NO: 1035666 - DNA, 33 bp, Homo sapien
cctggctgcaaaaatattaaccaaatcttaacc

SEQ ID NO: 1035667 - DNA, 33 bp, Homo sapien
gatctttctcctggatgaaacaaagctctagga

SEQ ID NO: 1035668 - DNA, 33 bp, Homo sapien
gatctttctcctggattaaacaaagctctagga

SEQ ID NO: 1035669 - DNA, 33 bp, Homo sapien
tcaggctctgggtgataagtgtacccaaatgcc

SEQ ID NO: 1035670 - DNA, 33 bp, Homo sapien
tcaggctctgggtgatgagtgtacccaaatgcc

SEQ ID NO: 1035671 - DNA, 33 bp, Homo sapien
ttaaacagggaagtgaccttacttataggaaat

SEQ ID NO: 1035672 - DNA, 33 bp, Homo sapien
ttaaacagggaagtgatcttacttataggaaat

SEQ ID NO: 1035673 - DNA, 33 bp, Homo sapien
agctgttggcttttcacagatactcttgatctg

SEQ ID NO: 1035674 - DNA, 33 bp, Homo sapien
agctgttggcttttcatagatactcttgatctg

SEQ ID NO: 1035675 - DNA, 33 bp, Homo sapien
atatgcttgggtaatcactgtgctaaagggcat

SEQ ID NO: 1035676 - DNA, 33 bp, Homo sapien
atatgcttgggtaatcgctgtgctaaagggcat

SEQ ID NO: 1035677 - DNA, 33 bp, Homo sapien
tgactccctcttcacccacaaaattaagcttag

SEQ ID NO: 1035678 - DNA, 33 bp, Homo sapien
tgactccctcttcacctacaaaattaagcttag

SEQ ID NO: 1035679 - DNA, 33 bp, Homo sapien
ttatcaaacctgagaccgctgaaagttctaatc

SEQ ID NO: 1035680 - DNA, 33 bp, Homo sapien
ttatcaaacctgagactgctgaaagttctaatc

SEQ ID NO: 1035681 - DNA, 33 bp, Homo sapien
agacagaaggcaggggaaccagtaaggaaactt

SEQ ID NO: 1035682 - DNA, 33 bp, Homo sapien
agacagaaggcagggggaccagtaaggaaactt

SEQ ID NO: 1035683 - DNA, 33 bp, Homo sapien
taattactcttcttctaaacaaagtgatagtga

SEQ ID NO: 1035684 - DNA, 33 bp, Homo sapien
taattactcttcttctgaacaaagtgatagtga

SEQ ID NO: 1035685 - DNA, 33 bp, Homo sapien
cattcgagagctgaaacactggatcaaagttat

SEQ ID NO: 1035686 - DNA, 33 bp, Homo sapien
cattcgagagctgaaatactggatcaaagttat

SEQ ID NO: 1035687 - DNA, 33 bp, Homo sapien
tatatacccacgaggagggctaaaaagaaaaga

SEQ ID NO: 1035688 - DNA, 33 bp, Homo sapien
tatatacccacgaggatggctaaaaagaaaaga

SEQ ID NO: 1035689 - DNA, 33 bp, Homo sapien
ctcagtgtctatctccagctttctctgtcttgg

SEQ ID NO: 1035690 - DNA, 33 bp, Homo sapien
ctcagtgtctatctccggctttctctgtcttgg

SEQ ID NO: 1035691 - DNA, 33 bp, Homo sapien
gagaaaaacgtaaccaaacttaagtgcaagtca

SEQ ID NO: 1035692 - DNA, 33 bp, Homo sapien
gagaaaaacgtaaccatacttaagtgcaagtca

SEQ ID NO: 1035693 - DNA, 33 bp, Homo sapien
cctccatgatacttagaatttgtgagcagcagg

SEQ ID NO: 1035694 - DNA, 33 bp, Homo sapien
cctccatgatacttagcatttgtgagcagcagg

SEQ ID NO: 1035695 - DNA, 33 bp, Homo sapien
gttttacaaaggaaaacggtggagacagctgtt

SEQ ID NO: 1035696 - DNA, 33 bp, Homo sapien
gttttacaaaggaaaatggtggagacagctgtt

SEQ ID NO: 1035697 - DNA, 33 bp, Homo sapien
aaatgctccttgtcccagatgcccatgagaagt

SEQ ID NO: 1035698 - DNA, 33 bp, Homo sapien
aaatgctccttgtcccggatgcccatgagaagt

SEQ ID NO: 1035699 - DNA, 33 bp, Homo sapien
tttacatactcacttaaatgtttcatgcatcac

SEQ ID NO: 1035700 - DNA, 33 bp, Homo sapien
tttacatactcacttatatgtttcatgcatcac

SEQ ID NO: 1035701 - DNA, 33 bp, Homo sapien
acaactgttcgaggacgatggtaacatcacagg

SEQ ID NO: 1035702 - DNA, 33 bp, Homo sapien
acaactgttcgaggactatggtaacatcacagg

SEQ ID NO: 1035703 - DNA, 33 bp, Homo sapien
ctaggatgacctttcaaataattcgtccccact

SEQ ID NO: 1035704 - DNA, 33 bp, Homo sapien
ctaggatgacctttcagataattcgtccccact

SEQ ID NO: 1035705 - DNA, 33 bp, Homo sapien
tgtgaggtacaatgggaacaattatatccacct

SEQ ID NO: 1035706 - DNA, 33 bp, Homo sapien
tgtgaggtacaatggggacaattatatccacct

SEQ ID NO: 1035707 - DNA, 33 bp, Homo sapien
ttcacaggttttgccacacaccagtgttttttg

SEQ ID NO: 1035708 - DNA, 33 bp, Homo sapien
ttcacaggttttgccatacaccagtgttttttg

SEQ ID NO: 1035709 - DNA, 33 bp, Homo sapien
aaattgagatggggacaagattaaaagttcagg

SEQ ID NO: 1035710 - DNA, 33 bp, Homo sapien
aaattgagatggggacgagattaaaagttcagg

SEQ ID NO: 1035711 - DNA, 33 bp, Homo sapien
atgttctttgataaacccccaaattctctgctg

SEQ ID NO: 1035712 - DNA, 33 bp, Homo sapien
atgttctttgataaactcccaaattctctgctg

SEQ ID NO: 1035713 - DNA, 33 bp, Homo sapien
tgatccactccacacaccccgactccagtcagc

SEQ ID NO: 1035714 - DNA, 33 bp, Homo sapien
tgatccactccacacatcccgactccagtcagc

SEQ ID NO: 1035715 - DNA, 33 bp, Homo sapien
tctatgtaatcgccagacattttctatgcttta

SEQ ID NO: 1035716 - DNA, 33 bp, Homo sapien
tctatgtaatcgccagccattttctatgcttta

SEQ ID NO: 1035717 - DNA, 33 bp, Homo sapien
atagagaagggtattcgaaagctggtgggacaa

SEQ ID NO: 1035718 - DNA, 33 bp, Homo sapien
atagagaagggtattctaaagctggtgggacaa

SEQ ID NO: 1035719 - DNA, 33 bp, Homo sapien
caggccatatttcttaagatgattgttccaccc

SEQ ID NO: 1035720 - DNA, 33 bp, Homo sapien
caggccatatttcttaggatgattgttccaccc

SEQ ID NO: 1035721 - DNA, 33 bp, Homo sapien
acgtgagtactatacaactggctctgtaatcaa

SEQ ID NO: 1035722 - DNA, 33 bp, Homo sapien
acgtgagtactatacatctggctctgtaatcaa

SEQ ID NO: 1035723 - DNA, 33 bp, Homo sapien
ttcaagtcaactgaaaaggatatttgtgtgtgt

SEQ ID NO: 1035724 - DNA, 33 bp, Homo sapien
ttcaagtcaactgaaagggatatttgtgtgtgt

SEQ ID NO: 1035725 - DNA, 33 bp, Homo sapien
cacctgggccaaatcacggaatacctgataagc

SEQ ID NO: 1035726 - DNA, 33 bp, Homo sapien
cacctgggccaaatcatggaatacctgataagc

SEQ ID NO: 1035727 - DNA, 33 bp, Homo sapien
aaaagaactatagcacagcagataaagtttaag

SEQ ID NO: 1035728 - DNA, 33 bp, Homo sapien
aaaagaactatagcacggcagataaagtttaag

SEQ ID NO: 1035729 - DNA, 33 bp, Homo sapien
ttaaaggagaaaacaaaggacatcatatgttct

SEQ ID NO: 1035730 - DNA, 33 bp, Homo sapien
ttaaaggagaaaacaagggacatcatatgttct

SEQ ID NO: 1035731 - DNA, 33 bp, Homo sapien
tagagaacagagttcactcctgacacttaagtt

SEQ ID NO: 1035732 - DNA, 33 bp, Homo sapien
tagagaacagagttcattcctgacacttaagtt

SEQ ID NO: 1035733 - DNA, 33 bp, Homo sapien
gaactatgttggttcccagaacttaagtgtcag

SEQ ID NO: 1035734 - DNA, 33 bp, Homo sapien
gaactatgttggttcctagaacttaagtgtcag

SEQ ID NO: 1035735 - DNA, 33 bp, Homo sapien
tagtttgctgaccctcaactaaaggaagctatt

SEQ ID NO: 1035736 - DNA, 33 bp, Homo sapien
tagtttgctgaccctcgactaaaggaagctatt

SEQ ID NO: 1035737 - DNA, 33 bp, Homo sapien
ccagagctgacctctaaccaagatacagctttt

SEQ ID NO: 1035738 - DNA, 33 bp, Homo sapien
ccagagctgacctctagccaagatacagctttt

SEQ ID NO: 1035739 - DNA, 33 bp, Homo sapien
aacgtgtggtcctagacgtctaagatccagaca

SEQ ID NO: 1035740 - DNA, 33 bp, Homo sapien
aacgtgtggtcctagatgtctaagatccagaca

SEQ ID NO: 1035741 - DNA, 33 bp, Homo sapien
aatctaaccattgaccatattggacatgaacaa

SEQ ID NO: 1035742 - DNA, 33 bp, Homo sapien
aatctaaccattgaccgtattggacatgaacaa

SEQ ID NO: 1035743 - DNA, 33 bp, Homo sapien
gatattgtcttagatccacagtttttagtattt

SEQ ID NO: 1035744 - DNA, 33 bp, Homo sapien
gatattgtcttagatcgacagtttttagtattt

SEQ ID NO: 1035745 - DNA, 33 bp, Homo sapien
atgagaatttgtaagaactgcaccaagaaatga

SEQ ID NO: 1035746 - DNA, 33 bp, Homo sapien
atgagaatttgtaagagctgcaccaagaaatga

SEQ ID NO: 1035747 - DNA, 33 bp, Homo sapien
aatcttagccgatttacgttcttttgctgctgt

SEQ ID NO: 1035748 - DNA, 33 bp, Homo sapien
aatcttagccgatttaggttcttttgctgctgt

SEQ ID NO: 1035749 - DNA, 33 bp, Homo sapien
ttaaactctgcaaaagaagtttcaatccccaaa

SEQ ID NO: 1035750 - DNA, 33 bp, Homo sapien
ttaaactctgcaaaaggagtttcaatccccaaa

SEQ ID NO: 1035751 - DNA, 33 bp, Homo sapien
tctcagtcaaacaaaaagtgatgccagaagtca

SEQ ID NO: 1035752 - DNA, 33 bp, Homo sapien
tctcagtcaaacaaaatgtgatgccagaagtca

SEQ ID NO: 1035753 - DNA, 33 bp, Homo sapien
aagaaccttgtcttacacatctttgactccata

SEQ ID NO: 1035754 - DNA, 33 bp, Homo sapien
aagaaccttgtcttacgcatctttgactccata

SEQ ID NO: 1035755 - DNA, 33 bp, Homo sapien
tccatagagactcatcaacacatttctttcagt

SEQ ID NO: 1035756 - DNA, 33 bp, Homo sapien
tccatagagactcatcgacacatttctttcagt

SEQ ID NO: 1035757 - DNA, 33 bp, Homo sapien
atctgcaacatccaaaccctgcttcttctaggt

SEQ ID NO: 1035758 - DNA, 33 bp, Homo sapien
atctgcaacatccaaatcctgcttcttctaggt

SEQ ID NO: 1035759 - DNA, 33 bp, Homo sapien
caggacttaggttcagcatgaggaaaatatctc

SEQ ID NO: 1035760 - DNA, 33 bp, Homo sapien
caggacttaggttcagtatgaggaaaatatctc

SEQ ID NO: 1035761 - DNA, 33 bp, Homo sapien
tggtaacatgaaggaaagaataaagatgatcaa

SEQ ID NO: 1035762 - DNA, 33 bp, Homo sapien
tggtaacatgaaggaaggaataaagatgatcaa

SEQ ID NO: 1035763 - DNA, 33 bp, Homo sapien
catttcatttttgtaactgtgcattctgagcta

SEQ ID NO: 1035764 - DNA, 33 bp, Homo sapien
catttcatttttgtaattgtgcattctgagcta

SEQ ID NO: 1035765 - DNA, 33 bp, Homo sapien
tggaatgtgtattggccgagcacgttgatttgc

SEQ ID NO: 1035766 - DNA, 33 bp, Homo sapien
tggaatgtgtattggctgagcacgttgatttgc

SEQ ID NO: 1035767 - DNA, 33 bp, Homo sapien
cagcttccagggaagacagtatgatgtttatac

SEQ ID NO: 1035768 - DNA, 33 bp, Homo sapien
cagcttccagggaagatagtatgatgtttatac

SEQ ID NO: 1035769 - DNA, 33 bp, Homo sapien
gatgtgggagaaggaaagttgtcctgggaatta

SEQ ID NO: 1035770 - DNA, 33 bp, Homo sapien
gatgtgggagaaggaaggttgtcctgggaatta

SEQ ID NO: 1035771 - DNA, 33 bp, Homo sapien
atctggcctgaaggaaatcactgtagtgaggaa

SEQ ID NO: 1035772 - DNA, 33 bp, Homo sapien
atctggcctgaaggaattcactgtagtgaggaa

SEQ ID NO: 1035773 - DNA, 33 bp, Homo sapien
ccagagtcagcgcccaatatattaaatagagag

SEQ ID NO: 1035774 - DNA, 33 bp, Homo sapien
ccagagtcagcgcccattatattaaatagagag

SEQ ID NO: 1035775 - DNA, 33 bp, Homo sapien
ggagagacaagaggaaagatcaaggaaaagagg

SEQ ID NO: 1035776 - DNA, 33 bp, Homo sapien
ggagagacaagaggaacgatcaaggaaaagagg

SEQ ID NO: 1035777 - DNA, 33 bp, Homo sapien
tcccgataaatcgtgtaaattatttgctcagcc

SEQ ID NO: 1035778 - DNA, 33 bp, Homo sapien
tcccgataaatcgtgtcaattatttgctcagcc

SEQ ID NO: 1035779 - DNA, 33 bp, Homo sapien
ctcatgtcattgcataagtttggtgcaaaagta

SEQ ID NO: 1035780 - DNA, 33 bp, Homo sapien
ctcatgtcattgcataggtttggtgcaaaagta

SEQ ID NO: 1035781 - DNA, 33 bp, Homo sapien
agcaattcccggtccagacttctcaacctccgt

SEQ ID NO: 1035782 - DNA, 33 bp, Homo sapien
agcaattcccggtccatacttctcaacctccgt

SEQ ID NO: 1035783 - DNA, 33 bp, Homo sapien
tttaactttgggaagaaaaatgatgaattaatc

SEQ ID NO: 1035784 - DNA, 33 bp, Homo sapien
tttaactttgggaagacaaatgatgaattaatc

SEQ ID NO: 1035785 - DNA, 33 bp, Homo sapien
ttatctaagcaatgaccggagcgacttcaaatt

SEQ ID NO: 1035786 - DNA, 33 bp, Homo sapien
ttatctaagcaatgactggagcgacttcaaatt

SEQ ID NO: 1035787 - DNA, 33 bp, Homo sapien
acaccataattaaaaaattggtcatttgttcca

SEQ ID NO: 1035788 - DNA, 33 bp, Homo sapien
acaccataattaaaaagttggtcatttgttcca

SEQ ID NO: 1035789 - DNA, 33 bp, Homo sapien
agcctccctgacttctaagaactttccggtaag

SEQ ID NO: 1035790 - DNA, 33 bp, Homo sapien
agcctccctgacttcttagaactttccggtaag

SEQ ID NO: 1035791 - DNA, 33 bp, Homo sapien
tggagtaggtgcaagaactatgcttaaaaaaaa

SEQ ID NO: 1035792 - DNA, 33 bp, Homo sapien
tggagtaggtgcaagagctatgcttaaaaaaaa

SEQ ID NO: 1035793 - DNA, 33 bp, Homo sapien
gtcatcctcaaggtacaaataccagggggaaaa

SEQ ID NO: 1035794 - DNA, 33 bp, Homo sapien
gtcatcctcaaggtaccaataccagggggaaaa

SEQ ID NO: 1035795 - DNA, 33 bp, Homo sapien
ttgaaacagtatcctgaaatgggagattgaccc

SEQ ID NO: 1035796 - DNA, 33 bp, Homo sapien
ttgaaacagtatcctggaatgggagattgaccc

SEQ ID NO: 1035797 - DNA, 33 bp, Homo sapien
tgtaggacttaacagacctattatacagatgag

SEQ ID NO: 1035798 - DNA, 33 bp, Homo sapien
tgtaggacttaacagatctattatacagatgag

SEQ ID NO: 1035799 - DNA, 33 bp, Homo sapien
ttgtctgatgtccacacagttactaagcagcgg

SEQ ID NO: 1035800 - DNA, 33 bp, Homo sapien
ttgtctgatgtccacagagttactaagcagcgg

SEQ ID NO: 1035801 - DNA, 33 bp, Homo sapien
tcattagaagtattgacacacagatgacatcta

SEQ ID NO: 1035802 - DNA, 33 bp, Homo sapien
tcattagaagtattgagacacagatgacatcta

SEQ ID NO: 1035803 - DNA, 33 bp, Homo sapien
taccagtaatcctttacattctttgtagctgta

SEQ ID NO: 1035804 - DNA, 33 bp, Homo sapien
taccagtaatcctttatattctttgtagctgta

SEQ ID NO: 1035805 - DNA, 33 bp, Homo sapien
gcctctgagtccaacccattggctgggacactt

SEQ ID NO: 1035806 - DNA, 33 bp, Homo sapien
gcctctgagtccaacctattggctgggacactt

SEQ ID NO: 1035807 - DNA, 33 bp, Homo sapien
gactttctcttcccacccaagagtcagagctgg

SEQ ID NO: 1035808 - DNA, 33 bp, Homo sapien
gactttctcttcccacgcaagagtcagagctgg

SEQ ID NO: 1035809 - DNA, 33 bp, Homo sapien
cagcccctgacatgccaactcttgtgtgacata

SEQ ID NO: 1035810 - DNA, 33 bp, Homo sapien
cagcccctgacatgccgactcttgtgtgacata

SEQ ID NO: 1035811 - DNA, 33 bp, Homo sapien
tttcaggtctctgctcaaatgttaccatatttc

SEQ ID NO: 1035812 - DNA, 33 bp, Homo sapien
tttcaggtctctgctcgaatgttaccatatttc

SEQ ID NO: 1035813 - DNA, 33 bp, Homo sapien
catcattatacagacaagaatacattctgagaa

SEQ ID NO: 1035814 - DNA, 33 bp, Homo sapien
catcattatacagacacgaatacattctgagaa

SEQ ID NO: 1035815 - DNA, 33 bp, Homo sapien
cagagaagataggttaagcagcttttgataaat

SEQ ID NO: 1035816 - DNA, 33 bp, Homo sapien
cagagaagataggttatgcagcttttgataaat

SEQ ID NO: 1035817 - DNA, 33 bp, Homo sapien
tatgaggcttgaaaatcatatttatgtaaaaat

SEQ ID NO: 1035818 - DNA, 33 bp, Homo sapien
tatgaggcttgaaaatgatatttatgtaaaaat

SEQ ID NO: 1035819 - DNA, 33 bp, Homo sapien
ctacggctaaataggaagtataagttcaagtgt

SEQ ID NO: 1035820 - DNA, 33 bp, Homo sapien
ctacggctaaataggaggtataagttcaagtgt

SEQ ID NO: 1035821 - DNA, 33 bp, Homo sapien
ttaaaaaaaaatcctgacacatcttaagctctt

SEQ ID NO: 1035822 - DNA, 33 bp, Homo sapien
ttaaaaaaaaatcctgccacatcttaagctctt

SEQ ID NO: 1035823 - DNA, 33 bp, Homo sapien
cattttttgcttctacacataaatgtttgtgta

SEQ ID NO: 1035824 - DNA, 33 bp, Homo sapien
cattttttgcttctacgcataaatgtttgtgta

SEQ ID NO: 1035825 - DNA, 33 bp, Homo sapien
atccttcacttagcccagattatctcttactgg

SEQ ID NO: 1035826 - DNA, 33 bp, Homo sapien
atccttcacttagcccggattatctcttactgg

SEQ ID NO: 1035827 - DNA, 33 bp, Homo sapien
tctaggttttcagaaacgatatgtgaccatctt

SEQ ID NO: 1035828 - DNA, 33 bp, Homo sapien
tctaggttttcagaaatgatatgtgaccatctt

SEQ ID NO: 1035829 - DNA, 33 bp, Homo sapien
aacttctgattataaacttgttgtggagcagaa

SEQ ID NO: 1035830 - DNA, 33 bp, Homo sapien
aacttctgattataaatttgttgtggagcagaa

SEQ ID NO: 1035831 - DNA, 33 bp, Homo sapien
aatagatcgcccaaaaataatgctgcactccta

SEQ ID NO: 1035832 - DNA, 33 bp, Homo sapien
aatagatcgcccaaaagtaatgctgcactccta

SEQ ID NO: 1035833 - DNA, 33 bp, Homo sapien
tgctttgtttggactgaattatcaattatcttt

SEQ ID NO: 1035834 - DNA, 33 bp, Homo sapien
tgctttgtttggactggattatcaattatcttt

SEQ ID NO: 1035835 - DNA, 33 bp, Homo sapien
ctttaaaaatcctgtacgtgcttcagctgatga

SEQ ID NO: 1035836 - DNA, 33 bp, Homo sapien
ctttaaaaatcctgtatgtgcttcagctgatga

SEQ ID NO: 1035837 - DNA, 33 bp, Homo sapien
gaccacctaggcataccgtagccgtgcttagta

SEQ ID NO: 1035838 - DNA, 33 bp, Homo sapien
gaccacctaggcatactgtagccgtgcttagta

SEQ ID NO: 1035839 - DNA, 33 bp, Homo sapien
aaatcttttcctctgaagtttggatgcggttca

SEQ ID NO: 1035840 - DNA, 33 bp, Homo sapien
aaatcttttcctctgatgtttggatgcggttca

SEQ ID NO: 1035841 - DNA, 33 bp, Homo sapien
tcaaaaggaaatattcaagcagaggataaaagc

SEQ ID NO: 1035842 - DNA, 33 bp, Homo sapien
tcaaaaggaaatattccagcagaggataaaagc

SEQ ID NO: 1035843 - DNA, 33 bp, Homo sapien
aaaggaaaggacctcaaagggaacattccaaat

SEQ ID NO: 1035844 - DNA, 33 bp, Homo sapien
aaaggaaaggacctcagagggaacattccaaat

SEQ ID NO: 1035845 - DNA, 33 bp, Homo sapien
ttatcaactgtgcaaaagtggatacaaaggccg

SEQ ID NO: 1035846 - DNA, 33 bp, Homo sapien
ttatcaactgtgcaaaggtggatacaaaggccg

SEQ ID NO: 1035847 - DNA, 33 bp, Homo sapien
caggtccaagattttagaattgtgtggttctaa

SEQ ID NO: 1035848 - DNA, 33 bp, Homo sapien
caggtccaagattttataattgtgtggttctaa

SEQ ID NO: 1035849 - DNA, 33 bp, Homo sapien
caggtactcagaaatacacgctgaatgaaggaa

SEQ ID NO: 1035850 - DNA, 33 bp, Homo sapien
caggtactcagaaatatacgctgaatgaaggaa

SEQ ID NO: 1035851 - DNA, 33 bp, Homo sapien
cttttcttactttaataactttgctgatattgg

SEQ ID NO: 1035852 - DNA, 33 bp, Homo sapien
cttttcttactttaatgactttgctgatattgg

SEQ ID NO: 1035853 - DNA, 33 bp, Homo sapien
cagagagatcccgttacggaatgactgacatga

SEQ ID NO: 1035854 - DNA, 33 bp, Homo sapien
cagagagatcccgttatggaatgactgacatga

SEQ ID NO: 1035855 - DNA, 33 bp, Homo sapien
tgcccttcttgctgaacgactggaaagagcaca

SEQ ID NO: 1035856 - DNA, 33 bp, Homo sapien
tgcccttcttgctgaatgactggaaagagcaca

SEQ ID NO: 1035857 - DNA, 33 bp, Homo sapien
ctagattttggctgaacgtttgaacgatgaatc

SEQ ID NO: 1035858 - DNA, 33 bp, Homo sapien
ctagattttggctgaatgtttgaacgatgaatc

SEQ ID NO: 1035859 - DNA, 33 bp, Homo sapien
gaactcattaatttcccactaaacttgtccctt

SEQ ID NO: 1035860 - DNA, 33 bp, Homo sapien
gaactcattaatttcctactaaacttgtccctt

SEQ ID NO: 1035861 - DNA, 33 bp, Homo sapien
gtgcattgttaactaacaaaataggagtgaatc

SEQ ID NO: 1035862 - DNA, 33 bp, Homo sapien
gtgcattgttaactaataaaataggagtgaatc

SEQ ID NO: 1035863 - DNA, 33 bp, Homo sapien
tgtcttccaagtctgcacaaaaatctagctcaa

SEQ ID NO: 1035864 - DNA, 33 bp, Homo sapien
tgtcttccaagtctgcgcaaaaatctagctcaa

SEQ ID NO: 1035865 - DNA, 33 bp, Homo sapien
taagccctgcaaatacccagaactggaaaccta

SEQ ID NO: 1035866 - DNA, 33 bp, Homo sapien
taagccctgcaaatactcagaactggaaaccta

SEQ ID NO: 1035867 - DNA, 33 bp, Homo sapien
gtcacataagttaaaaatcatcattaagactat

SEQ ID NO: 1035868 - DNA, 33 bp, Homo sapien
gtcacataagttaaaagtcatcattaagactat

SEQ ID NO: 1035869 - DNA, 33 bp, Homo sapien
gcattcatctggcttaccatctggctaggagcc

SEQ ID NO: 1035870 - DNA, 33 bp, Homo sapien
gcattcatctggcttatcatctggctaggagcc

SEQ ID NO: 1035871 - DNA, 33 bp, Homo sapien
ctcccagattagtatgaatgctggtagtcatct

SEQ ID NO: 1035872 - DNA, 33 bp, Homo sapien
ctcccagattagtatggatgctggtagtcatct

SEQ ID NO: 1035873 - DNA, 33 bp, Homo sapien
agtcactgaatagcaacgtttccagggcatcgg

SEQ ID NO: 1035874 - DNA, 33 bp, Homo sapien
agtcactgaatagcaatgtttccagggcatcgg

SEQ ID NO: 1035875 - DNA, 33 bp, Homo sapien
tcttacagcaagatggccaaaagtgcaggtaaa

SEQ ID NO: 1035876 - DNA, 33 bp, Homo sapien
tcttacagcaagatggtcaaaagtgcaggtaaa

SEQ ID NO: 1035877 - DNA, 33 bp, Homo sapien
agttgtgaagactctacagcaacatggaaaata

SEQ ID NO: 1035878 - DNA, 33 bp, Homo sapien
agttgtgaagactctatagcaacatggaaaata

SEQ ID NO: 1035879 - DNA, 33 bp, Homo sapien
gtgttggtgcaaattaataatacccttttgaat

SEQ ID NO: 1035880 - DNA, 33 bp, Homo sapien
gtgttggtgcaaattagtaatacccttttgaat

SEQ ID NO: 1035881 - DNA, 33 bp, Homo sapien
gactgtatgggtggaccaacataaattgaccca

SEQ ID NO: 1035882 - DNA, 33 bp, Homo sapien
gactgtatgggtggactaacataaattgaccca

SEQ ID NO: 1035883 - DNA, 33 bp, Homo sapien
ataagaggcaggttgaaaggtgtttgttggttg

SEQ ID NO: 1035884 - DNA, 33 bp, Homo sapien
ataagaggcaggttgagaggtgtttgttggttg

SEQ ID NO: 1035885 - DNA, 33 bp, Homo sapien
tactagaaagtttccaatacagatgcaactctc

SEQ ID NO: 1035886 - DNA, 33 bp, Homo sapien
tactagaaagtttccagtacagatgcaactctc

SEQ ID NO: 1035887 - DNA, 33 bp, Homo sapien
tgggatcataccttgaagcattttgctatctca

SEQ ID NO: 1035888 - DNA, 33 bp, Homo sapien
tgggatcataccttgaggcattttgctatctca

SEQ ID NO: 1035889 - DNA, 33 bp, Homo sapien
tgatctccctgttagacgctgatctgcactgag

SEQ ID NO: 1035890 - DNA, 33 bp, Homo sapien
tgatctccctgttagatgctgatctgcactgag

SEQ ID NO: 1035891 - DNA, 33 bp, Homo sapien
ctcattactgctttatcaatgttgttgttagct

SEQ ID NO: 1035892 - DNA, 33 bp, Homo sapien
ctcattactgctttattaatgttgttgttagct

SEQ ID NO: 1035893 - DNA, 33 bp, Homo sapien
atgagaaggctgggtacggaagaagctaatgac

SEQ ID NO: 1035894 - DNA, 33 bp, Homo sapien
atgagaaggctgggtatggaagaagctaatgac

SEQ ID NO: 1035895 - DNA, 33 bp, Homo sapien
gagccagttgtggtgacgctgtaagttaaggat

SEQ ID NO: 1035896 - DNA, 33 bp, Homo sapien
gagccagttgtggtgatgctgtaagttaaggat

SEQ ID NO: 1035897 - DNA, 33 bp, Homo sapien
attaaaagaagaggccagagtagtatgggagga

SEQ ID NO: 1035898 - DNA, 33 bp, Homo sapien
attaaaagaagaggcccgagtagtatgggagga

SEQ ID NO: 1035899 - DNA, 33 bp, Homo sapien
aacccctcctgcatcaagttattaccaaatgcc

SEQ ID NO: 1035900 - DNA, 33 bp, Homo sapien
aacccctcctgcatcaggttattaccaaatgcc

SEQ ID NO: 1035901 - DNA, 33 bp, Homo sapien
ccattgtctttgaaggcaaagcagatttcaata

SEQ ID NO: 1035902 - DNA, 33 bp, Homo sapien
ccattgtctttgaaggtaaagcagatttcaata

SEQ ID NO: 1035903 - DNA, 33 bp, Homo sapien
tattccaattactctacggggaagcctagtgga

SEQ ID NO: 1035904 - DNA, 33 bp, Homo sapien
tattccaattactctatggggaagcctagtgga

SEQ ID NO: 1035905 - DNA, 33 bp, Homo sapien
ttctatgaccccacaaaaactttctcttgatat

SEQ ID NO: 1035906 - DNA, 33 bp, Homo sapien
ttctatgaccccacaacaactttctcttgatat

SEQ ID NO: 1035907 - DNA, 33 bp, Homo sapien
agggctaaaatggcaggcagaaaatctaggact

SEQ ID NO: 1035908 - DNA, 33 bp, Homo sapien
agggctaaaatggcagtcagaaaatctaggact

SEQ ID NO: 1035909 - DNA, 33 bp, Homo sapien
gttcctaaggatcttagagtccagacctcatgt

SEQ ID NO: 1035910 - DNA, 33 bp, Homo sapien
gttcctaaggatcttatagtccagacctcatgt

SEQ ID NO: 1035911 - DNA, 33 bp, Homo sapien
aacacaaggaaatactgagaggactggctttct

SEQ ID NO: 1035912 - DNA, 33 bp, Homo sapien
aacacaaggaaatacttagaggactggctttct

SEQ ID NO: 1035913 - DNA, 33 bp, Homo sapien
gtgttggaaagtagaaatggccagaggacatct

SEQ ID NO: 1035914 - DNA, 33 bp, Homo sapien
gtgttggaaagtagaagtggccagaggacatct

SEQ ID NO: 1035915 - DNA, 33 bp, Homo sapien
ataaatgagacgtgaccgtactttaaggagtgc

SEQ ID NO: 1035916 - DNA, 33 bp, Homo sapien
ataaatgagacgtgactgtactttaaggagtgc

SEQ ID NO: 1035917 - DNA, 33 bp, Homo sapien
tcagctcatgtgggcaacctcagtctttctctg

SEQ ID NO: 1035918 - DNA, 33 bp, Homo sapien
tcagctcatgtgggcatcctcagtctttctctg

SEQ ID NO: 1035919 - DNA, 33 bp, Homo sapien
tgagtaaatgaatgtacgtatgaaaaagggaat

SEQ ID NO: 1035920 - DNA, 33 bp, Homo sapien
tgagtaaatgaatgtatgtatgaaaaagggaat

SEQ ID NO: 1035921 - DNA, 33 bp, Homo sapien
tgcttcttctgggatacagaatagtgtggtaaa

SEQ ID NO: 1035922 - DNA, 33 bp, Homo sapien
tgcttcttctgggatagagaatagtgtggtaaa

SEQ ID NO: 1035923 - DNA, 33 bp, Homo sapien
taatttagcagataggaatccaaagaatatgtg

SEQ ID NO: 1035924 - DNA, 33 bp, Homo sapien
taatttagcagatagggatccaaagaatatgtg

SEQ ID NO: 1035925 - DNA, 33 bp, Homo sapien
ctggctcctgaagatcccgcctggcagtgacat

SEQ ID NO: 1035926 - DNA, 33 bp, Homo sapien
ctggctcctgaagatctcgcctggcagtgacat

SEQ ID NO: 1035927 - DNA, 33 bp, Homo sapien
ataactggaatttccaatcgtctctttactagc

SEQ ID NO: 1035928 - DNA, 33 bp, Homo sapien
ataactggaatttccagtcgtctctttactagc

SEQ ID NO: 1035929 - DNA, 33 bp, Homo sapien
gttttaaaggtcagagcatggcgtccattcaca

SEQ ID NO: 1035930 - DNA, 33 bp, Homo sapien
gttttaaaggtcagagtatggcgtccattcaca

SEQ ID NO: 1035931 - DNA, 33 bp, Homo sapien
gccattttgcagatgaagaaaatgaaggtcaga

SEQ ID NO: 1035932 - DNA, 33 bp, Homo sapien
gccattttgcagatgaggaaaatgaaggtcaga

SEQ ID NO: 1035933 - DNA, 33 bp, Homo sapien
tcctctgtcaaataggaacaacaggttttttgt

SEQ ID NO: 1035934 - DNA, 33 bp, Homo sapien
tcctctgtcaaatagggacaacaggttttttgt

SEQ ID NO: 1035935 - DNA, 33 bp, Homo sapien
cggtgacctgccttccactgttcagaagcttct

SEQ ID NO: 1035936 - DNA, 33 bp, Homo sapien
cggtgacctgccttccgctgttcagaagcttct

SEQ ID NO: 1035937 - DNA, 33 bp, Homo sapien
catagcattcaaatcccagaagtggctgcctcc

SEQ ID NO: 1035938 - DNA, 33 bp, Homo sapien
catagcattcaaatcctagaagtggctgcctcc

SEQ ID NO: 1035939 - DNA, 33 bp, Homo sapien
atcgttcaaatcatgcacagatcaccttgaggt

SEQ ID NO: 1035940 - DNA, 33 bp, Homo sapien
atcgttcaaatcatgcgcagatcaccttgaggt

SEQ ID NO: 1035941 - DNA, 33 bp, Homo sapien
caggatactaagtggacggtggagccattccat

SEQ ID NO: 1035942 - DNA, 33 bp, Homo sapien
caggatactaagtggatggtggagccattccat

SEQ ID NO: 1035943 - DNA, 33 bp, Homo sapien
ttatataggattttgcaaacggtggaggtaaat

SEQ ID NO: 1035944 - DNA, 33 bp, Homo sapien
ttatataggattttgcgaacggtggaggtaaat

SEQ ID NO: 1035945 - DNA, 33 bp, Homo sapien
taatatatgagaagcccggaatatacaaagcac

SEQ ID NO: 1035946 - DNA, 33 bp, Homo sapien
taatatatgagaagcctggaatatacaaagcac

SEQ ID NO: 1035947 - DNA, 33 bp, Homo sapien
acttcaacagttcaaaatacttccactggggcc

SEQ ID NO: 1035948 - DNA, 33 bp, Homo sapien
acttcaacagttcaaagtacttccactggggcc

SEQ ID NO: 1035949 - DNA, 33 bp, Homo sapien
agtatagtctgaagcaaaaataagtgaatacta

SEQ ID NO: 1035950 - DNA, 33 bp, Homo sapien
agtatagtctgaagcacaaataagtgaatacta

SEQ ID NO: 1035951 - DNA, 33 bp, Homo sapien
cccaggtctctttgataaccatgcctttcaagg

SEQ ID NO: 1035952 - DNA, 33 bp, Homo sapien
cccaggtctctttgatgaccatgcctttcaagg

SEQ ID NO: 1035953 - DNA, 33 bp, Homo sapien
gcaggggagctgacacgatctatgtcttgaatt

SEQ ID NO: 1035954 - DNA, 33 bp, Homo sapien
gcaggggagctgacactatctatgtcttgaatt

SEQ ID NO: 1035955 - DNA, 33 bp, Homo sapien
ttcaagaatcctgtgaatagtgacttgataact

SEQ ID NO: 1035956 - DNA, 33 bp, Homo sapien
ttcaagaatcctgtgagtagtgacttgataact

SEQ ID NO: 1035957 - DNA, 33 bp, Homo sapien
tacaattctttgtttgaacatctcttttcagtt

SEQ ID NO: 1035958 - DNA, 33 bp, Homo sapien
tacaattctttgtttggacatctcttttcagtt

SEQ ID NO: 1035959 - DNA, 33 bp, Homo sapien
cctgcaatgtttcctgaagccgatacaacttgt

SEQ ID NO: 1035960 - DNA, 33 bp, Homo sapien
cctgcaatgtttcctggagccgatacaacttgt

SEQ ID NO: 1035961 - DNA, 33 bp, Homo sapien
ttcaactgactgaataacagcaagcatttacag

SEQ ID NO: 1035962 - DNA, 33 bp, Homo sapien
ttcaactgactgaatagcagcaagcatttacag

SEQ ID NO: 1035963 - DNA, 33 bp, Homo sapien
acctcttacatctacacagtgaatgacaaaatt

SEQ ID NO: 1035964 - DNA, 33 bp, Homo sapien
acctcttacatctacatagtgaatgacaaaatt

SEQ ID NO: 1035965 - DNA, 33 bp, Homo sapien
atgctgcaggaaagaactagttacagctcaaaa

SEQ ID NO: 1035966 - DNA, 33 bp, Homo sapien
atgctgcaggaaagaattagttacagctcaaaa

SEQ ID NO: 1035967 - DNA, 33 bp, Homo sapien
gaagaacttttaaaacaatcgatgcacctgcaa

SEQ ID NO: 1035968 - DNA, 33 bp, Homo sapien
gaagaacttttaaaaccatcgatgcacctgcaa

SEQ ID NO: 1035969 - DNA, 33 bp, Homo sapien
ggggggaggtgctatacaggtttaaatgaccag

SEQ ID NO: 1035970 - DNA, 33 bp, Homo sapien
ggggggaggtgctatataggtttaaatgaccag

SEQ ID NO: 1035971 - DNA, 33 bp, Homo sapien
gttaggactataatagaccatcctttcattgac

SEQ ID NO: 1035972 - DNA, 33 bp, Homo sapien
gttaggactataatagcccatcctttcattgac

SEQ ID NO: 1035973 - DNA, 33 bp, Homo sapien
caggaagctttccatactaaaacctttgtagag

SEQ ID NO: 1035974 - DNA, 33 bp, Homo sapien
caggaagctttccatattaaaacctttgtagag

SEQ ID NO: 1035975 - DNA, 33 bp, Homo sapien
cataggcttcattgctcacttaattgcctatcc

SEQ ID NO: 1035976 - DNA, 33 bp, Homo sapien
cataggcttcattgctgacttaattgcctatcc

SEQ ID NO: 1035977 - DNA, 33 bp, Homo sapien
agtttcatgaactgtaaatccctctgaatataa

SEQ ID NO: 1035978 - DNA, 33 bp, Homo sapien
agtttcatgaactgtatatccctctgaatataa

SEQ ID NO: 1035979 - DNA, 33 bp, Homo sapien
ttccccaaatctattacagctcctcaaacatag

SEQ ID NO: 1035980 - DNA, 33 bp, Homo sapien
ttccccaaatctattatagctcctcaaacatag

SEQ ID NO: 1035981 - DNA, 33 bp, Homo sapien
tgttctaggagccaagcattcacagactgcact

SEQ ID NO: 1035982 - DNA, 33 bp, Homo sapien
tgttctaggagccaaggattcacagactgcact

SEQ ID NO: 1035983 - DNA, 33 bp, Homo sapien
tctctgtgctattacacacacttacacacacac

SEQ ID NO: 1035984 - DNA, 33 bp, Homo sapien
tctctgtgctattacatacacttacacacacac

SEQ ID NO: 1035985 - DNA, 33 bp, Homo sapien
aaaatttaaatgtgaacgtccatcagtagcgag

SEQ ID NO: 1035986 - DNA, 33 bp, Homo sapien
aaaatttaaatgtgaatgtccatcagtagcgag

SEQ ID NO: 1035987 - DNA, 33 bp, Homo sapien
atactcatcttgtaaaggaatgattattgatta

SEQ ID NO: 1035988 - DNA, 33 bp, Homo sapien
atactcatcttgtaaatgaatgattattgatta

SEQ ID NO: 1035989 - DNA, 33 bp, Homo sapien
ttaagataattatgtcaccatcaggatactggt

SEQ ID NO: 1035990 - DNA, 33 bp, Homo sapien
ttaagataattatgtcgccatcaggatactggt

SEQ ID NO: 1035991 - DNA, 33 bp, Homo sapien
ttggcttcctagcttacgacaaatcagaaaaag

SEQ ID NO: 1035992 - DNA, 33 bp, Homo sapien
ttggcttcctagcttatgacaaatcagaaaaag

SEQ ID NO: 1035993 - DNA, 33 bp, Homo sapien
cactctctctttgtcaggttatattaatggagc

SEQ ID NO: 1035994 - DNA, 33 bp, Homo sapien
cactctctctttgtcatgttatattaatggagc

SEQ ID NO: 1035995 - DNA, 33 bp, Homo sapien
tcgtttattgcactaaataaaagtgaatggtgg

SEQ ID NO: 1035996 - DNA, 33 bp, Homo sapien
tcgtttattgcactaagtaaaagtgaatggtgg

SEQ ID NO: 1035997 - DNA, 33 bp, Homo sapien
agaaaaaaggcttaggccaggcgaggacgctca

SEQ ID NO: 1035998 - DNA, 33 bp, Homo sapien
agaaaaaaggcttaggtcaggcgaggacgctca

SEQ ID NO: 1035999 - DNA, 33 bp, Homo sapien
ttaatgactttaggaaatatttttcatgacaac

SEQ ID NO: 1036000 - DNA, 33 bp, Homo sapien
ttaatgactttaggaagtatttttcatgacaac

SEQ ID NO: 1036001 - DNA, 33 bp, Homo sapien
ctaatttcgtggtttacctctataatgtgattg

SEQ ID NO: 1036002 - DNA, 33 bp, Homo sapien
ctaatttcgtggtttatctctataatgtgattg

SEQ ID NO: 1036003 - DNA, 33 bp, Homo sapien
tataatgtgattgttacaaaatactgctttacc

SEQ ID NO: 1036004 - DNA, 33 bp, Homo sapien
tataatgtgattgttataaaatactgctttacc

SEQ ID NO: 1036005 - DNA, 33 bp, Homo sapien
ataacaatgggagctcaacacaagatacctata

SEQ ID NO: 1036006 - DNA, 33 bp, Homo sapien
ataacaatgggagctccacacaagatacctata

SEQ ID NO: 1036007 - DNA, 33 bp, Homo sapien
tatagatatggagacaagagttggaaacagggt

SEQ ID NO: 1036008 - DNA, 33 bp, Homo sapien
tatagatatggagacaggagttggaaacagggt

SEQ ID NO: 1036009 - DNA, 33 bp, Homo sapien
tgtaatttagagatagaacctaccaggtatgct

SEQ ID NO: 1036010 - DNA, 33 bp, Homo sapien
tgtaatttagagataggacctaccaggtatgct

SEQ ID NO: 1036011 - DNA, 33 bp, Homo sapien
aatgacaagtctatcaatcatgtgcatcaaaat

SEQ ID NO: 1036012 - DNA, 33 bp, Homo sapien
aatgacaagtctatcagtcatgtgcatcaaaat

SEQ ID NO: 1036013 - DNA, 33 bp, Homo sapien
ggtttaaaaccttgtacctagaggagaaagcaa

SEQ ID NO: 1036014 - DNA, 33 bp, Homo sapien
ggtttaaaaccttgtatctagaggagaaagcaa

SEQ ID NO: 1036015 - DNA, 33 bp, Homo sapien
cttccatatataataccagctttacaggtgaag

SEQ ID NO: 1036016 - DNA, 33 bp, Homo sapien
cttccatatataatactagctttacaggtgaag

SEQ ID NO: 1036017 - DNA, 33 bp, Homo sapien
atacagcttatttatccgagtttttgtagttca

SEQ ID NO: 1036018 - DNA, 33 bp, Homo sapien
atacagcttatttatctgagtttttgtagttca

SEQ ID NO: 1036019 - DNA, 33 bp, Homo sapien
aacaaggagcaattgccatgtggtttggaattt

SEQ ID NO: 1036020 - DNA, 33 bp, Homo sapien
aacaaggagcaattgctatgtggtttggaattt

SEQ ID NO: 1036021 - DNA, 33 bp, Homo sapien
cctgtctgtttctaggccacaggattggcagct

SEQ ID NO: 1036022 - DNA, 33 bp, Homo sapien
cctgtctgtttctaggtcacaggattggcagct

SEQ ID NO: 1036023 - DNA, 33 bp, Homo sapien
aaatcaaaagaaaacactgagaagagacagttc

SEQ ID NO: 1036024 - DNA, 33 bp, Homo sapien
aaatcaaaagaaaacattgagaagagacagttc

SEQ ID NO: 1036025 - DNA, 33 bp, Homo sapien
acagtcacttagtctaagggcacagtgtgatgt

SEQ ID NO: 1036026 - DNA, 33 bp, Homo sapien
acagtcacttagtctacgggcacagtgtgatgt

SEQ ID NO: 1036027 - DNA, 33 bp, Homo sapien
ttgccacctggctgtcacttggtagctgtgtag

SEQ ID NO: 1036028 - DNA, 33 bp, Homo sapien
ttgccacctggctgtcgcttggtagctgtgtag

SEQ ID NO: 1036029 - DNA, 33 bp, Homo sapien
tagctatggtcagatacgcaccgtttgtgtacc

SEQ ID NO: 1036030 - DNA, 33 bp, Homo sapien
tagctatggtcagatatgcaccgtttgtgtacc

SEQ ID NO: 1036031 - DNA, 33 bp, Homo sapien
cattgctcatttaccacgttttcccttatagtg

SEQ ID NO: 1036032 - DNA, 33 bp, Homo sapien
cattgctcatttaccatgttttcccttatagtg

SEQ ID NO: 1036033 - DNA, 33 bp, Homo sapien
gtggcgtcatgggttccaaaaggaaatatcagt

SEQ ID NO: 1036034 - DNA, 33 bp, Homo sapien
gtggcgtcatgggttctaaaaggaaatatcagt

SEQ ID NO: 1036035 - DNA, 33 bp, Homo sapien
aggacccagagcagacacaacgggcatatttga

SEQ ID NO: 1036036 - DNA, 33 bp, Homo sapien
aggacccagagcagacgcaacgggcatatttga

SEQ ID NO: 1036037 - DNA, 33 bp, Homo sapien
tgtttcgattaatgacagacaatgtatacaatg

SEQ ID NO: 1036038 - DNA, 33 bp, Homo sapien
tgtttcgattaatgacggacaatgtatacaatg

SEQ ID NO: 1036039 - DNA, 33 bp, Homo sapien
ctttttcagatttgtcaaagttcatatagttgt

SEQ ID NO: 1036040 - DNA, 33 bp, Homo sapien
ctttttcagatttgtcgaagttcatatagttgt

SEQ ID NO: 1036041 - DNA, 33 bp, Homo sapien
tatcagagagactcagaccaagactctgccact

SEQ ID NO: 1036042 - DNA, 33 bp, Homo sapien
tatcagagagactcaggccaagactctgccact

SEQ ID NO: 1036043 - DNA, 33 bp, Homo sapien
tcctagcaccgctatcactcaggaaatgagaag

SEQ ID NO: 1036044 - DNA, 33 bp, Homo sapien
tcctagcaccgctatcgctcaggaaatgagaag

SEQ ID NO: 1036045 - DNA, 33 bp, Homo sapien
acatttaccagtttatgacaaaggacttgatag

SEQ ID NO: 1036046 - DNA, 33 bp, Homo sapien
acatttaccagtttattacaaaggacttgatag

SEQ ID NO: 1036047 - DNA, 33 bp, Homo sapien
acagaactcagggaaagacttactcacatttac

SEQ ID NO: 1036048 - DNA, 33 bp, Homo sapien
acagaactcagggaaatacttactcacatttac

SEQ ID NO: 1036049 - DNA, 33 bp, Homo sapien
acaaggggcttcaccactctattttgcactgag

SEQ ID NO: 1036050 - DNA, 33 bp, Homo sapien
acaaggggcttcaccattctattttgcactgag

SEQ ID NO: 1036051 - DNA, 33 bp, Homo sapien
tctccaagtgaagtacaaagataatgcagttga

SEQ ID NO: 1036052 - DNA, 33 bp, Homo sapien
tctccaagtgaagtacgaagataatgcagttga

SEQ ID NO: 1036053 - DNA, 33 bp, Homo sapien
gcagttgcacaaataaacataacctaggatctg

SEQ ID NO: 1036054 - DNA, 33 bp, Homo sapien
gcagttgcacaaataagcataacctaggatctg

SEQ ID NO: 1036055 - DNA, 33 bp, Homo sapien
caacagtgtgtgaatacgccttcttctccaaat

SEQ ID NO: 1036056 - DNA, 33 bp, Homo sapien
caacagtgtgtgaatatgccttcttctccaaat

SEQ ID NO: 1036057 - DNA, 33 bp, Homo sapien
atgataaagtaacttcaacctgacacagtaaaa

SEQ ID NO: 1036058 - DNA, 33 bp, Homo sapien
atgataaagtaacttccacctgacacagtaaaa

SEQ ID NO: 1036059 - DNA, 33 bp, Homo sapien
ctggaatgagaatgccacgtccaggctgtgtta

SEQ ID NO: 1036060 - DNA, 33 bp, Homo sapien
ctggaatgagaatgccgcgtccaggctgtgtta

SEQ ID NO: 1036061 - DNA, 33 bp, Homo sapien
cactttcttacttaaagtcttccaatgactttc

SEQ ID NO: 1036062 - DNA, 33 bp, Homo sapien
cactttcttacttaaattcttccaatgactttc

SEQ ID NO: 1036063 - DNA, 33 bp, Homo sapien
tatggagattttcaaacttgctattcttgcttt

SEQ ID NO: 1036064 - DNA, 33 bp, Homo sapien
tatggagattttcaaatttgctattcttgcttt

SEQ ID NO: 1036065 - DNA, 33 bp, Homo sapien
cttctcctggcttttaggaaatctcacttgttg

SEQ ID NO: 1036066 - DNA, 33 bp, Homo sapien
cttctcctggcttttatgaaatctcacttgttg

SEQ ID NO: 1036067 - DNA, 33 bp, Homo sapien
gttttagtgacattccacaaagcctacctgtgt

SEQ ID NO: 1036068 - DNA, 33 bp, Homo sapien
gttttagtgacattccgcaaagcctacctgtgt

SEQ ID NO: 1036069 - DNA, 33 bp, Homo sapien
gggtctgggatgtctcacaagtcctggaaactc

SEQ ID NO: 1036070 - DNA, 33 bp, Homo sapien
gggtctgggatgtctcgcaagtcctggaaactc

SEQ ID NO: 1036071 - DNA, 33 bp, Homo sapien
atcctgcagccacctgcacaagcaatctgggat

SEQ ID NO: 1036072 - DNA, 33 bp, Homo sapien
atcctgcagccacctggacaagcaatctgggat

SEQ ID NO: 1036073 - DNA, 33 bp, Homo sapien
ttggtattcgcacagccctttaaagtttttaag

SEQ ID NO: 1036074 - DNA, 33 bp, Homo sapien
ttggtattcgcacagctctttaaagtttttaag

SEQ ID NO: 1036075 - DNA, 33 bp, Homo sapien
gacatttatctcttcaatacgacgtttataaat

SEQ ID NO: 1036076 - DNA, 33 bp, Homo sapien
gacatttatctcttcagtacgacgtttataaat

SEQ ID NO: 1036077 - DNA, 33 bp, Homo sapien
ctatgatattagctgggattctcaatgctcatt

SEQ ID NO: 1036078 - DNA, 33 bp, Homo sapien
ctatgatattagctggtattctcaatgctcatt

SEQ ID NO: 1036079 - DNA, 33 bp, Homo sapien
ggttcccagctgacacggctcttctgcttaaca

SEQ ID NO: 1036080 - DNA, 33 bp, Homo sapien
ggttcccagctgacactgctcttctgcttaaca

SEQ ID NO: 1036081 - DNA, 33 bp, Homo sapien
gcaagggacagcctgacgctacagaggccctag

SEQ ID NO: 1036082 - DNA, 33 bp, Homo sapien
gcaagggacagcctgatgctacagaggccctag

SEQ ID NO: 1036083 - DNA, 33 bp, Homo sapien
cagaggccctagtaaacgattgtgcatctacac

SEQ ID NO: 1036084 - DNA, 33 bp, Homo sapien
cagaggccctagtaaatgattgtgcatctacac

SEQ ID NO: 1036085 - DNA, 33 bp, Homo sapien
agtttataaactaggaggacatactaagagctt

SEQ ID NO: 1036086 - DNA, 33 bp, Homo sapien
agtttataaactaggatgacatactaagagctt

SEQ ID NO: 1036087 - DNA, 33 bp, Homo sapien
ggaagcagcaaccagggattgggcagtgactct

SEQ ID NO: 1036088 - DNA, 33 bp, Homo sapien
ggaagcagcaaccaggtattgggcagtgactct

SEQ ID NO: 1036089 - DNA, 33 bp, Homo sapien
atagtcacacttatacggccagggtatctaaga

SEQ ID NO: 1036090 - DNA, 33 bp, Homo sapien
atagtcacacttatactgccagggtatctaaga

SEQ ID NO: 1036091 - DNA, 33 bp, Homo sapien
gaaaataacctggtaacaggcagagctgcccag

SEQ ID NO: 1036092 - DNA, 33 bp, Homo sapien
gaaaataacctggtaataggcagagctgcccag

SEQ ID NO: 1036093 - DNA, 33 bp, Homo sapien
ttttatcagttttggaagatgtacataaatata

SEQ ID NO: 1036094 - DNA, 33 bp, Homo sapien
ttttatcagttttggaggatgtacataaatata

SEQ ID NO: 1036095 - DNA, 33 bp, Homo sapien
tttccaaagaaggtcaaattctcaggtactgag

SEQ ID NO: 1036096 - DNA, 33 bp, Homo sapien
tttccaaagaaggtcacattctcaggtactgag

SEQ ID NO: 1036097 - DNA, 33 bp, Homo sapien
catcctttatctccaacgttgccagagcctggc

SEQ ID NO: 1036098 - DNA, 33 bp, Homo sapien
catcctttatctccaatgttgccagagcctggc

SEQ ID NO: 1036099 - DNA, 33 bp, Homo sapien
ctatgggaataatcagaacaatgagcccacatg

SEQ ID NO: 1036100 - DNA, 33 bp, Homo sapien
ctatgggaataatcaggacaatgagcccacatg

SEQ ID NO: 1036101 - DNA, 33 bp, Homo sapien
tgtgcaatgtacacagcagatgctcaagtgatg

SEQ ID NO: 1036102 - DNA, 33 bp, Homo sapien
tgtgcaatgtacacagtagatgctcaagtgatg

SEQ ID NO: 1036103 - DNA, 33 bp, Homo sapien
agaaaggaccatacaactgaggtaagaggggag

SEQ ID NO: 1036104 - DNA, 33 bp, Homo sapien
agaaaggaccatacaattgaggtaagaggggag

SEQ ID NO: 1036105 - DNA, 33 bp, Homo sapien
tgggacttttgtcttacgtaccatccatattcc

SEQ ID NO: 1036106 - DNA, 33 bp, Homo sapien
tgggacttttgtcttatgtaccatccatattcc

SEQ ID NO: 1036107 - DNA, 33 bp, Homo sapien
aagagattgttggagtaaagttcctagggcctc

SEQ ID NO: 1036108 - DNA, 33 bp, Homo sapien
aagagattgttggagtgaagttcctagggcctc

SEQ ID NO: 1036109 - DNA, 33 bp, Homo sapien
tttatcattattattaactaggtcacatttcca

SEQ ID NO: 1036110 - DNA, 33 bp, Homo sapien
tttatcattattattagctaggtcacatttcca

SEQ ID NO: 1036111 - DNA, 33 bp, Homo sapien
gagttggttataactcccattcgcagaagacct

SEQ ID NO: 1036112 - DNA, 33 bp, Homo sapien
gagttggttataactctcattcgcagaagacct

SEQ ID NO: 1036113 - DNA, 33 bp, Homo sapien
atattggtagcattagaagaatgttggcaaagc

SEQ ID NO: 1036114 - DNA, 33 bp, Homo sapien
atattggtagcattaggagaatgttggcaaagc

SEQ ID NO: 1036115 - DNA, 33 bp, Homo sapien
acaagaacttcagaacaaaaagtatgaactgtg

SEQ ID NO: 1036116 - DNA, 33 bp, Homo sapien
acaagaacttcagaacgaaaagtatgaactgtg

SEQ ID NO: 1036117 - DNA, 33 bp, Homo sapien
actggaagaacctggacgttagcaaatcctttt

SEQ ID NO: 1036118 - DNA, 33 bp, Homo sapien
actggaagaacctggatgttagcaaatcctttt

SEQ ID NO: 1036119 - DNA, 33 bp, Homo sapien
aactttatcttaaacaacaaggtgaatcttgag

SEQ ID NO: 1036120 - DNA, 33 bp, Homo sapien
aactttatcttaaacagcaaggtgaatcttgag

SEQ ID NO: 1036121 - DNA, 33 bp, Homo sapien
cctcttctgtggcccaatgctgcttgcttgcct

SEQ ID NO: 1036122 - DNA, 33 bp, Homo sapien
cctcttctgtggcccagtgctgcttgcttgcct

SEQ ID NO: 1036123 - DNA, 33 bp, Homo sapien
gactttgtcagcctggaagtcacagaaaaagca

SEQ ID NO: 1036124 - DNA, 33 bp, Homo sapien
gactttgtcagcctgggagtcacagaaaaagca

SEQ ID NO: 1036125 - DNA, 33 bp, Homo sapien
tggggaagaccttggaccctagtactagaatct

SEQ ID NO: 1036126 - DNA, 33 bp, Homo sapien
tggggaagaccttggatcctagtactagaatct

SEQ ID NO: 1036127 - DNA, 33 bp, Homo sapien
gatgtaggatgagggagaggcgataaggcactc

SEQ ID NO: 1036128 - DNA, 33 bp, Homo sapien
gatgtaggatgagggataggcgataaggcactc

SEQ ID NO: 1036129 - DNA, 33 bp, Homo sapien
taccgtgaatcctgccaataagcccatcaagag

SEQ ID NO: 1036130 - DNA, 33 bp, Homo sapien
taccgtgaatcctgccgataagcccatcaagag

SEQ ID NO: 1036131 - DNA, 33 bp, Homo sapien
tgtgtgacagtgtataagtacgaagaaaataaa

SEQ ID NO: 1036132 - DNA, 33 bp, Homo sapien
tgtgtgacagtgtatacgtacgaagaaaataaa

SEQ ID NO: 1036133 - DNA, 33 bp, Homo sapien
aaggcaactggaaggcaaaaggtaacaacagct

SEQ ID NO: 1036134 - DNA, 33 bp, Homo sapien
aaggcaactggaaggcgaaaggtaacaacagct

SEQ ID NO: 1036135 - DNA, 33 bp, Homo sapien
actatcaactaggatgaaaccagagatatgcaa

SEQ ID NO: 1036136 - DNA, 33 bp, Homo sapien
actatcaactaggatggaaccagagatatgcaa

SEQ ID NO: 1036137 - DNA, 33 bp, Homo sapien
ttcttcacctgtaaaacgcttactcaaacttca

SEQ ID NO: 1036138 - DNA, 33 bp, Homo sapien
ttcttcacctgtaaaatgcttactcaaacttca

SEQ ID NO: 1036139 - DNA, 33 bp, Homo sapien
tgggaccagagattcaaagggaccttacccagt

SEQ ID NO: 1036140 - DNA, 33 bp, Homo sapien
tgggaccagagattcacagggaccttacccagt

SEQ ID NO: 1036141 - DNA, 33 bp, Homo sapien
ttgaacacctaatttgaaatgaatgatcaagag

SEQ ID NO: 1036142 - DNA, 33 bp, Homo sapien
ttgaacacctaatttggaatgaatgatcaagag

SEQ ID NO: 1036143 - DNA, 33 bp, Homo sapien
gctgggaacctagagagtatccaacaagtggta

SEQ ID NO: 1036144 - DNA, 33 bp, Homo sapien
gctgggaacctagagattatccaacaagtggta

SEQ ID NO: 1036145 - DNA, 33 bp, Homo sapien
tgaaggtgtagggacactaaagcaacaaggaaa

SEQ ID NO: 1036146 - DNA, 33 bp, Homo sapien
tgaaggtgtagggacagtaaagcaacaaggaaa

SEQ ID NO: 1036147 - DNA, 33 bp, Homo sapien
agggagaaagcagagacgtagcgagggctagag

SEQ ID NO: 1036148 - DNA, 33 bp, Homo sapien
agggagaaagcagagatgtagcgagggctagag

SEQ ID NO: 1036149 - DNA, 33 bp, Homo sapien
agacagggctttgccaagaatgagcccatccat

SEQ ID NO: 1036150 - DNA, 33 bp, Homo sapien
agacagggctttgccaggaatgagcccatccat

SEQ ID NO: 1036151 - DNA, 33 bp, Homo sapien
actacctataaagtgaagccaggaataaaaggg

SEQ ID NO: 1036152 - DNA, 33 bp, Homo sapien
actacctataaagtgaggccaggaataaaaggg

SEQ ID NO: 1036153 - DNA, 33 bp, Homo sapien
tgcagcctttgtatgcagacatactgtgttcca

SEQ ID NO: 1036154 - DNA, 33 bp, Homo sapien
tgcagcctttgtatgcggacatactgtgttcca

SEQ ID NO: 1036155 - DNA, 33 bp, Homo sapien
actattaaagagaaggaattcagcacttagctc

SEQ ID NO: 1036156 - DNA, 33 bp, Homo sapien
actattaaagagaagggattcagcacttagctc

SEQ ID NO: 1036157 - DNA, 33 bp, Homo sapien
tcccttgaggtagagacactattaaagagaagg

SEQ ID NO: 1036158 - DNA, 33 bp, Homo sapien
tcccttgaggtagagagactattaaagagaagg

SEQ ID NO: 1036159 - DNA, 33 bp, Homo sapien
agtggtgatacttctcaatacttctgtgcaggt

SEQ ID NO: 1036160 - DNA, 33 bp, Homo sapien
agtggtgatacttctctatacttctgtgcaggt

SEQ ID NO: 1036161 - DNA, 33 bp, Homo sapien
cacctgttatgttccaagtgtctgaggagctag

SEQ ID NO: 1036162 - DNA, 33 bp, Homo sapien
cacctgttatgttccaggtgtctgaggagctag

SEQ ID NO: 1036163 - DNA, 33 bp, Homo sapien
gagatgtgaagtgttcaagtgaacttagctgga

SEQ ID NO: 1036164 - DNA, 33 bp, Homo sapien
gagatgtgaagtgttcgagtgaacttagctgga

SEQ ID NO: 1036165 - DNA, 33 bp, Homo sapien
tggcctggaaagaacagctacagtatggccaca

SEQ ID NO: 1036166 - DNA, 33 bp, Homo sapien
tggcctggaaagaacatctacagtatggccaca

SEQ ID NO: 1036167 - DNA, 33 bp, Homo sapien
ttcagaaagcccttcacggccaaatcctttcct

SEQ ID NO: 1036168 - DNA, 33 bp, Homo sapien
ttcagaaagcccttcatggccaaatcctttcct

SEQ ID NO: 1036169 - DNA, 33 bp, Homo sapien
aagaacaaaaagaaagccagcatgctcctaact

SEQ ID NO: 1036170 - DNA, 33 bp, Homo sapien
aagaacaaaaagaaagtcagcatgctcctaact

SEQ ID NO: 1036171 - DNA, 33 bp, Homo sapien
ggtctccctggttccaaaaacagtgtcctcccc

SEQ ID NO: 1036172 - DNA, 33 bp, Homo sapien
ggtctccctggttccagaaacagtgtcctcccc

SEQ ID NO: 1036173 - DNA, 33 bp, Homo sapien
ggtggcaggcataagcaaggcagttcctgcatt

SEQ ID NO: 1036174 - DNA, 33 bp, Homo sapien
ggtggcaggcataagcgaggcagttcctgcatt

SEQ ID NO: 1036175 - DNA, 33 bp, Homo sapien
ttgaaaaataccgtcaagaactgtgactacata

SEQ ID NO: 1036176 - DNA, 33 bp, Homo sapien
ttgaaaaataccgtcaggaactgtgactacata

SEQ ID NO: 1036177 - DNA, 33 bp, Homo sapien
tctgggacactcatgggatcatgtttttccact

SEQ ID NO: 1036178 - DNA, 33 bp, Homo sapien
tctgggacactcatggtatcatgtttttccact

SEQ ID NO: 1036179 - DNA, 33 bp, Homo sapien
atggatagcggtggacactggttctgaacctga

SEQ ID NO: 1036180 - DNA, 33 bp, Homo sapien
atggatagcggtggactctggttctgaacctga

SEQ ID NO: 1036181 - DNA, 33 bp, Homo sapien
tacggttctgtatctgaaaaagatgcattgagg

SEQ ID NO: 1036182 - DNA, 33 bp, Homo sapien
tacggttctgtatctggaaaagatgcattgagg

SEQ ID NO: 1036183 - DNA, 33 bp, Homo sapien
cacctcaggtcctttcaccttccaggagctctg

SEQ ID NO: 1036184 - DNA, 33 bp, Homo sapien
cacctcaggtcctttcgccttccaggagctctg

SEQ ID NO: 1036185 - DNA, 33 bp, Homo sapien
tgatgcaaagtatacgcaacagatggcaagcag

SEQ ID NO: 1036186 - DNA, 33 bp, Homo sapien
tgatgcaaagtatacgtaacagatggcaagcag

SEQ ID NO: 1036187 - DNA, 33 bp, Homo sapien
agatggcaagcagcaaatagggaaagaaaaatg

SEQ ID NO: 1036188 - DNA, 33 bp, Homo sapien
agatggcaagcagcaagtagggaaagaaaaatg

SEQ ID NO: 1036189 - DNA, 33 bp, Homo sapien
aaatctattcttttcacctagcccaaatctttc

SEQ ID NO: 1036190 - DNA, 33 bp, Homo sapien
aaatctattcttttcatctagcccaaatctttc

SEQ ID NO: 1036191 - DNA, 33 bp, Homo sapien
cttctgataacccctccaatctatgtatgtgtt

SEQ ID NO: 1036192 - DNA, 33 bp, Homo sapien
cttctgataacccctctaatctatgtatgtgtt

SEQ ID NO: 1036193 - DNA, 33 bp, Homo sapien
tgaacaaaaatagcaaggtacaggacagcctta

SEQ ID NO: 1036194 - DNA, 33 bp, Homo sapien
tgaacaaaaatagcaatgtacaggacagcctta

SEQ ID NO: 1036195 - DNA, 33 bp, Homo sapien
tctcctttcataaaaaaccacatggcggaaacc

SEQ ID NO: 1036196 - DNA, 33 bp, Homo sapien
tctcctttcataaaaacccacatggcggaaacc

SEQ ID NO: 1036197 - DNA, 33 bp, Homo sapien
cagaatgctgcttaaacattgattttaggtaac

SEQ ID NO: 1036198 - DNA, 33 bp, Homo sapien
cagaatgctgcttaaagattgattttaggtaac

SEQ ID NO: 1036199 - DNA, 33 bp, Homo sapien
tggctgttctttaaaaatctgctgtattttaga

SEQ ID NO: 1036200 - DNA, 33 bp, Homo sapien
tggctgttctttaaaactctgctgtattttaga

SEQ ID NO: 1036201 - DNA, 33 bp, Homo sapien
tttgagcaggtgggaaaagtaggacaagtagat

SEQ ID NO: 1036202 - DNA, 33 bp, Homo sapien
tttgagcaggtgggaagagtaggacaagtagat

SEQ ID NO: 1036203 - DNA, 33 bp, Homo sapien
taaagctaagaactaccgggctgcattcttagt

SEQ ID NO: 1036204 - DNA, 33 bp, Homo sapien
taaagctaagaactactgggctgcattcttagt

SEQ ID NO: 1036205 - DNA, 33 bp, Homo sapien
gatcatagctaaagacacgggcttcccagactg

SEQ ID NO: 1036206 - DNA, 33 bp, Homo sapien
gatcatagctaaagacgcgggcttcccagactg

SEQ ID NO: 1036207 - DNA, 33 bp, Homo sapien
tgaaagccaaatacgaaaaatcagggtggagat

SEQ ID NO: 1036208 - DNA, 33 bp, Homo sapien
tgaaagccaaatacgataaatcagggtggagat

SEQ ID NO: 1036209 - DNA, 33 bp, Homo sapien
agtcaccgttgtctaaaccagtggttctcaaac

SEQ ID NO: 1036210 - DNA, 33 bp, Homo sapien
agtcaccgttgtctaagccagtggttctcaaac

SEQ ID NO: 1036211 - DNA, 33 bp, Homo sapien
cttattcagctgattacagagagcaacacatac

SEQ ID NO: 1036212 - DNA, 33 bp, Homo sapien
cttattcagctgattagagagagcaacacatac

SEQ ID NO: 1036213 - DNA, 33 bp, Homo sapien
cctcaccagcctttaacgcctgtaaaatgtgga

SEQ ID NO: 1036214 - DNA, 33 bp, Homo sapien
cctcaccagcctttaatgcctgtaaaatgtgga

SEQ ID NO: 1036215 - DNA, 33 bp, Homo sapien
gctgtaaattcagatgacaaggaggtgctgtgg

SEQ ID NO: 1036216 - DNA, 33 bp, Homo sapien
gctgtaaattcagatgtcaaggaggtgctgtgg

SEQ ID NO: 1036217 - DNA, 33 bp, Homo sapien
tcagacatcaagacaaagggacttgttgaaaat

SEQ ID NO: 1036218 - DNA, 33 bp, Homo sapien
tcagacatcaagacaaggggacttgttgaaaat

SEQ ID NO: 1036219 - DNA, 33 bp, Homo sapien
tttcccaaagatctataagtgtctccctcttcc

SEQ ID NO: 1036220 - DNA, 33 bp, Homo sapien
tttcccaaagatctatgagtgtctccctcttcc

SEQ ID NO: 1036221 - DNA, 33 bp, Homo sapien
agacactctatagcacaggggtaaacattgcat

SEQ ID NO: 1036222 - DNA, 33 bp, Homo sapien
agacactctatagcacgggggtaaacattgcat

SEQ ID NO: 1036223 - DNA, 33 bp, Homo sapien
ttgtgctcacaacacaatgaacaatgaagctca

SEQ ID NO: 1036224 - DNA, 33 bp, Homo sapien
ttgtgctcacaacacagtgaacaatgaagctca

SEQ ID NO: 1036225 - DNA, 33 bp, Homo sapien
gagcatccttcacaaaataagtcattctgcaga

SEQ ID NO: 1036226 - DNA, 33 bp, Homo sapien
gagcatccttcacaaagtaagtcattctgcaga

SEQ ID NO: 1036227 - DNA, 33 bp, Homo sapien
ttcaggactgaaaaaacgttatgaggctgttgg

SEQ ID NO: 1036228 - DNA, 33 bp, Homo sapien
ttcaggactgaaaaaatgttatgaggctgttgg

SEQ ID NO: 1036229 - DNA, 33 bp, Homo sapien
tgctactgacttaaacaactgatgcctctcaca

SEQ ID NO: 1036230 - DNA, 33 bp, Homo sapien
tgctactgacttaaaccactgatgcctctcaca

SEQ ID NO: 1036231 - DNA, 33 bp, Homo sapien
catggcctaaaaactacgatgtaattcaagaga

SEQ ID NO: 1036232 - DNA, 33 bp, Homo sapien
catggcctaaaaactaggatgtaattcaagaga

SEQ ID NO: 1036233 - DNA, 33 bp, Homo sapien
gaatgtaggattcagaactagagtggtgtgggt

SEQ ID NO: 1036234 - DNA, 33 bp, Homo sapien
gaatgtaggattcagagctagagtggtgtgggt

SEQ ID NO: 1036235 - DNA, 33 bp, Homo sapien
tcagatagtgaagttgaaactctgtactgtatc

SEQ ID NO: 1036236 - DNA, 33 bp, Homo sapien
tcagatagtgaagttggaactctgtactgtatc

SEQ ID NO: 1036237 - DNA, 33 bp, Homo sapien
ctcagatgggagtgaaagagcatagtaacttta

SEQ ID NO: 1036238 - DNA, 33 bp, Homo sapien
ctcagatgggagtgaacgagcatagtaacttta

SEQ ID NO: 1036239 - DNA, 33 bp, Homo sapien
acaagcaatgtgaacccaccttcttgttcaggc

SEQ ID NO: 1036240 - DNA, 33 bp, Homo sapien
acaagcaatgtgaaccgaccttcttgttcaggc

SEQ ID NO: 1036241 - DNA, 33 bp, Homo sapien
tggagtaaggggcagaaagaaaatgttgacaag

SEQ ID NO: 1036242 - DNA, 33 bp, Homo sapien
tggagtaaggggcagagagaaaatgttgacaag

SEQ ID NO: 1036243 - DNA, 33 bp, Homo sapien
aacttgcagccagtcaagaaagtcaagagaaga

SEQ ID NO: 1036244 - DNA, 33 bp, Homo sapien
aacttgcagccagtcaggaaagtcaagagaaga

SEQ ID NO: 1036245 - DNA, 33 bp, Homo sapien
tgtttactcacttaaacgagacctatttgaaat

SEQ ID NO: 1036246 - DNA, 33 bp, Homo sapien
tgtttactcacttaaatgagacctatttgaaat

SEQ ID NO: 1036247 - DNA, 33 bp, Homo sapien
aaaagccctgaggacccgagaagaaggtagtta

SEQ ID NO: 1036248 - DNA, 33 bp, Homo sapien
aaaagccctgaggacctgagaagaaggtagtta

SEQ ID NO: 1036249 - DNA, 33 bp, Homo sapien
ttctactgcatggagacacaaagatagagaagg

SEQ ID NO: 1036250 - DNA, 33 bp, Homo sapien
ttctactgcatggagatacaaagatagagaagg

SEQ ID NO: 1036251 - DNA, 33 bp, Homo sapien
gggtaaaataatgatgaaaaggaaagtttgatg

SEQ ID NO: 1036252 - DNA, 33 bp, Homo sapien
gggtaaaataatgatggaaaggaaagtttgatg

SEQ ID NO: 1036253 - DNA, 33 bp, Homo sapien
tgtcttatgtcatggactccaatgcttctagct

SEQ ID NO: 1036254 - DNA, 33 bp, Homo sapien
tgtcttatgtcatggattccaatgcttctagct

SEQ ID NO: 1036255 - DNA, 33 bp, Homo sapien
gaaatgggagcctttgcaggttctgcaggaggg

SEQ ID NO: 1036256 - DNA, 33 bp, Homo sapien
gaaatgggagcctttgtaggttctgcaggaggg

SEQ ID NO: 1036257 - DNA, 33 bp, Homo sapien
gggaacctctctgtggcaggcattgtgtgaaca

SEQ ID NO: 1036258 - DNA, 33 bp, Homo sapien
gggaacctctctgtggtaggcattgtgtgaaca

SEQ ID NO: 1036259 - DNA, 33 bp, Homo sapien
ttcctttgcatagatacccaatagtgggattgc

SEQ ID NO: 1036260 - DNA, 33 bp, Homo sapien
ttcctttgcatagatatccaatagtgggattgc

SEQ ID NO: 1036261 - DNA, 33 bp, Homo sapien
gtttggattcctagtgcaccctaacagatcttt

SEQ ID NO: 1036262 - DNA, 33 bp, Homo sapien
gtttggattcctagtgtaccctaacagatcttt

SEQ ID NO: 1036263 - DNA, 33 bp, Homo sapien
tgatatggaggaaagaacttaggatttgaaatg

SEQ ID NO: 1036264 - DNA, 33 bp, Homo sapien
tgatatggaggaaagagcttaggatttgaaatg

SEQ ID NO: 1036265 - DNA, 33 bp, Homo sapien
agatatgtgttataaagcatgagactatttaca

SEQ ID NO: 1036266 - DNA, 33 bp, Homo sapien
agatatgtgttataaatcatgagactatttaca

SEQ ID NO: 1036267 - DNA, 33 bp, Homo sapien
ttttgcattgatggcacattgtctgaaattcat

SEQ ID NO: 1036268 - DNA, 33 bp, Homo sapien
ttttgcattgatggcatattgtctgaaattcat

SEQ ID NO: 1036269 - DNA, 33 bp, Homo sapien
gcaattctagtgagcaccctaaagtgaaatgtc

SEQ ID NO: 1036270 - DNA, 33 bp, Homo sapien
gcaattctagtgagcatcctaaagtgaaatgtc

SEQ ID NO: 1036271 - DNA, 33 bp, Homo sapien
ggtagttctttgcccacctccactgtcttttcc

SEQ ID NO: 1036272 - DNA, 33 bp, Homo sapien
ggtagttctttgcccatctccactgtcttttcc

SEQ ID NO: 1036273 - DNA, 33 bp, Homo sapien
agctaccccagggtcacataatcactgtgatgc

SEQ ID NO: 1036274 - DNA, 33 bp, Homo sapien
agctaccccagggtcatataatcactgtgatgc

SEQ ID NO: 1036275 - DNA, 33 bp, Homo sapien
ccaaaaagcccaaactcaatgaatctactgctc

SEQ ID NO: 1036276 - DNA, 33 bp, Homo sapien
ccaaaaagcccaaactgaatgaatctactgctc

SEQ ID NO: 1036277 - DNA, 33 bp, Homo sapien
ggtgatagggatcttcaatgagtctggcatggt

SEQ ID NO: 1036278 - DNA, 33 bp, Homo sapien
ggtgatagggatcttcgatgagtctggcatggt

SEQ ID NO: 1036279 - DNA, 33 bp, Homo sapien
actggcagaggccgcacaaaatggaaagtttta

SEQ ID NO: 1036280 - DNA, 33 bp, Homo sapien
actggcagaggccgcagaaaatggaaagtttta

SEQ ID NO: 1036281 - DNA, 33 bp, Homo sapien
caacgcggtctggttaaaacaagattggcagct

SEQ ID NO: 1036282 - DNA, 33 bp, Homo sapien
caacgcggtctggttagaacaagattggcagct

SEQ ID NO: 1036283 - DNA, 33 bp, Homo sapien
gactgcttttgcctgaacatgtcaaaaaaatat

SEQ ID NO: 1036284 - DNA, 33 bp, Homo sapien
gactgcttttgcctgagcatgtcaaaaaaatat

SEQ ID NO: 1036285 - DNA, 33 bp, Homo sapien
tagggactgctcatacaattccaaagtgcaggc

SEQ ID NO: 1036286 - DNA, 33 bp, Homo sapien
tagggactgctcatacgattccaaagtgcaggc

SEQ ID NO: 1036287 - DNA, 33 bp, Homo sapien
tcacctgagagctaaccagagcttcaggctgat

SEQ ID NO: 1036288 - DNA, 33 bp, Homo sapien
tcacctgagagctaactagagcttcaggctgat

SEQ ID NO: 1036289 - DNA, 33 bp, Homo sapien
aaatccaaaaccacgtaaacaccagtatagttt

SEQ ID NO: 1036290 - DNA, 33 bp, Homo sapien
aaatccaaaaccacgtgaacaccagtatagttt

SEQ ID NO: 1036291 - DNA, 33 bp, Homo sapien
tgaatcgaggtccagaaattctgtcatgtggct

SEQ ID NO: 1036292 - DNA, 33 bp, Homo sapien
tgaatcgaggtccagatattctgtcatgtggct

SEQ ID NO: 1036293 - DNA, 33 bp, Homo sapien
tccaagaagagattccaaggaggctggtggatc

SEQ ID NO: 1036294 - DNA, 33 bp, Homo sapien
tccaagaagagattcccaggaggctggtggatc

SEQ ID NO: 1036295 - DNA, 33 bp, Homo sapien
tttctagagccacacaaaagagttctgcctgtt

SEQ ID NO: 1036296 - DNA, 33 bp, Homo sapien
tttctagagccacacagaagagttctgcctgtt

SEQ ID NO: 1036297 - DNA, 33 bp, Homo sapien
atcccagtagcagacactatttggcttcctcat

SEQ ID NO: 1036298 - DNA, 33 bp, Homo sapien
atcccagtagcagacagtatttggcttcctcat

SEQ ID NO: 1036299 - DNA, 33 bp, Homo sapien
tggttgatgggtaatcaatgtgtctttttaaat

SEQ ID NO: 1036300 - DNA, 33 bp, Homo sapien
tggttgatgggtaatccatgtgtctttttaaat

SEQ ID NO: 1036301 - DNA, 33 bp, Homo sapien
ggttctcaaactataaatggtcctctttactac

SEQ ID NO: 1036302 - DNA, 33 bp, Homo sapien
ggttctcaaactataagtggtcctctttactac

SEQ ID NO: 1036303 - DNA, 33 bp, Homo sapien
gaaattacatgacttaccaaaacaatatgatac

SEQ ID NO: 1036304 - DNA, 33 bp, Homo sapien
gaaattacatgacttagcaaaacaatatgatac

SEQ ID NO: 1036305 - DNA, 33 bp, Homo sapien
ttgcctatacacttaccatcagaggagcaaaat

SEQ ID NO: 1036306 - DNA, 33 bp, Homo sapien
ttgcctatacacttactatcagaggagcaaaat

SEQ ID NO: 1036307 - DNA, 33 bp, Homo sapien
agacttggaaaggagaatcatcaggacatgtct

SEQ ID NO: 1036308 - DNA, 33 bp, Homo sapien
agacttggaaaggagattcatcaggacatgtct

SEQ ID NO: 1036309 - DNA, 33 bp, Homo sapien
ctctcacacagagtaaacatcaccctaaatcct

SEQ ID NO: 1036310 - DNA, 33 bp, Homo sapien
ctctcacacagagtaaccatcaccctaaatcct

SEQ ID NO: 1036311 - DNA, 33 bp, Homo sapien
gtcgtgcaaaaactaaggatcaaaatatgtaat

SEQ ID NO: 1036312 - DNA, 33 bp, Homo sapien
gtcgtgcaaaaactaatgatcaaaatatgtaat

SEQ ID NO: 1036313 - DNA, 33 bp, Homo sapien
cattaacaaaaacatgaaggcagaacactcaaa

SEQ ID NO: 1036314 - DNA, 33 bp, Homo sapien
cattaacaaaaacatggaggcagaacactcaaa

SEQ ID NO: 1036315 - DNA, 33 bp, Homo sapien
accagaactctaacctcaagatggattctattt

SEQ ID NO: 1036316 - DNA, 33 bp, Homo sapien
accagaactctaaccttaagatggattctattt

SEQ ID NO: 1036317 - DNA, 33 bp, Homo sapien
tgcaaatattcacatcaattttcttatctggac

SEQ ID NO: 1036318 - DNA, 33 bp, Homo sapien
tgcaaatattcacatccattttcttatctggac

SEQ ID NO: 1036319 - DNA, 33 bp, Homo sapien
gacacactttgttttccagtaaaaatggagatt

SEQ ID NO: 1036320 - DNA, 33 bp, Homo sapien
gacacactttgttttctagtaaaaatggagatt

SEQ ID NO: 1036321 - DNA, 33 bp, Homo sapien
tggtgctggtctgtcaactgaaactctgcactt

SEQ ID NO: 1036322 - DNA, 33 bp, Homo sapien
tggtgctggtctgtcacctgaaactctgcactt

SEQ ID NO: 1036323 - DNA, 33 bp, Homo sapien
gctttaagaacatttacgccttctcatgtctga

SEQ ID NO: 1036324 - DNA, 33 bp, Homo sapien
gctttaagaacatttatgccttctcatgtctga

SEQ ID NO: 1036325 - DNA, 33 bp, Homo sapien
ctgaggcagaggggataaatgggtagaaagtga

SEQ ID NO: 1036326 - DNA, 33 bp, Homo sapien
ctgaggcagaggggatgaatgggtagaaagtga

SEQ ID NO: 1036327 - DNA, 33 bp, Homo sapien
tggagaggcacgtggccaaagtggtcctttctc

SEQ ID NO: 1036328 - DNA, 33 bp, Homo sapien
tggagaggcacgtggctaaagtggtcctttctc

SEQ ID NO: 1036329 - DNA, 33 bp, Homo sapien
ccaaaaaacactgtaacagtctttccaagtgag

SEQ ID NO: 1036330 - DNA, 33 bp, Homo sapien
ccaaaaaacactgtaatagtctttccaagtgag

SEQ ID NO: 1036331 - DNA, 33 bp, Homo sapien
aaaggtgttaaggagacaaacagtaagatttgt

SEQ ID NO: 1036332 - DNA, 33 bp, Homo sapien
aaaggtgttaaggagagaaacagtaagatttgt

SEQ ID NO: 1036333 - DNA, 33 bp, Homo sapien
cgaaccacgtgctgcagatctcgaatttcatca

SEQ ID NO: 1036334 - DNA, 33 bp, Homo sapien
cgaaccacgtgctgcatatctcgaatttcatca

SEQ ID NO: 1036335 - DNA, 33 bp, Homo sapien
actgtactgttttgaccgaccaacctggaaatt

SEQ ID NO: 1036336 - DNA, 33 bp, Homo sapien
actgtactgttttgactgaccaacctggaaatt

SEQ ID NO: 1036337 - DNA, 33 bp, Homo sapien
catcaagtgtacatggccaaggtgaaatggtgg

SEQ ID NO: 1036338 - DNA, 33 bp, Homo sapien
catcaagtgtacatggtcaaggtgaaatggtgg

SEQ ID NO: 1036339 - DNA, 33 bp, Homo sapien
ggctctcctgtttgtaacaaaagcacagaggct

SEQ ID NO: 1036340 - DNA, 33 bp, Homo sapien
ggctctcctgtttgtatcaaaagcacagaggct

SEQ ID NO: 1036341 - DNA, 33 bp, Homo sapien
gctgtggccataggtacagagataagagtatgt

SEQ ID NO: 1036342 - DNA, 33 bp, Homo sapien
gctgtggccataggtagagagataagagtatgt

SEQ ID NO: 1036343 - DNA, 33 bp, Homo sapien
tggggataaaatgaaccggacatgacatggcaa

SEQ ID NO: 1036344 - DNA, 33 bp, Homo sapien
tggggataaaatgaactggacatgacatggcaa

SEQ ID NO: 1036345 - DNA, 33 bp, Homo sapien
tctgagaatcctttcacccacatacgttggcta

SEQ ID NO: 1036346 - DNA, 33 bp, Homo sapien
tctgagaatcctttcatccacatacgttggcta

SEQ ID NO: 1036347 - DNA, 33 bp, Homo sapien
ggttacagccaaaaagaactgagagttttataa

SEQ ID NO: 1036348 - DNA, 33 bp, Homo sapien
ggttacagccaaaaaggactgagagttttataa

SEQ ID NO: 1036349 - DNA, 33 bp, Homo sapien
gaaatggagagaaataaaaatgaaatctcatag

SEQ ID NO: 1036350 - DNA, 33 bp, Homo sapien
gaaatggagagaaatagaaatgaaatctcatag

SEQ ID NO: 1036351 - DNA, 33 bp, Homo sapien
tgaaagaactctgagacaggcagggcagaaagg

SEQ ID NO: 1036352 - DNA, 33 bp, Homo sapien
tgaaagaactctgagagaggcagggcagaaagg

SEQ ID NO: 1036353 - DNA, 33 bp, Homo sapien
tgaggagaggtaagagaagttgaaggaaggaca

SEQ ID NO: 1036354 - DNA, 33 bp, Homo sapien
tgaggagaggtaagagtagttgaaggaaggaca

SEQ ID NO: 1036355 - DNA, 33 bp, Homo sapien
gctcttcccagtgacaaggcttgaaatccttct

SEQ ID NO: 1036356 - DNA, 33 bp, Homo sapien
gctcttcccagtgacagggcttgaaatccttct

SEQ ID NO: 1036357 - DNA, 33 bp, Homo sapien
taccacagaagcaacccatagaggaaaagacag

SEQ ID NO: 1036358 - DNA, 33 bp, Homo sapien
taccacagaagcaacctatagaggaaaagacag

SEQ ID NO: 1036359 - DNA, 33 bp, Homo sapien
gctacatgtgtgctcaatatcgctgaatacgca

SEQ ID NO: 1036360 - DNA, 33 bp, Homo sapien
gctacatgtgtgctcagtatcgctgaatacgca

SEQ ID NO: 1036361 - DNA, 33 bp, Homo sapien
tgctgagaaaaaaataacagtgtgcatctcttc

SEQ ID NO: 1036362 - DNA, 33 bp, Homo sapien
tgctgagaaaaaaatatcagtgtgcatctcttc

SEQ ID NO: 1036363 - DNA, 33 bp, Homo sapien
gaaatgggctttcttaagttcccatgagcaaca

SEQ ID NO: 1036364 - DNA, 33 bp, Homo sapien
gaaatgggctttcttaggttcccatgagcaaca

SEQ ID NO: 1036365 - DNA, 33 bp, Homo sapien
cacactcttcacctcaacaggaagccctggcat

SEQ ID NO: 1036366 - DNA, 33 bp, Homo sapien
cacactcttcacctcaccaggaagccctggcat

SEQ ID NO: 1036367 - DNA, 33 bp, Homo sapien
actcctaatctggagcgacatgataattggaag

SEQ ID NO: 1036368 - DNA, 33 bp, Homo sapien
actcctaatctggagctacatgataattggaag

SEQ ID NO: 1036369 - DNA, 33 bp, Homo sapien
gtagatcctaggaaaaaatgcaatgtaagccag

SEQ ID NO: 1036370 - DNA, 33 bp, Homo sapien
gtagatcctaggaaaatatgcaatgtaagccag

SEQ ID NO: 1036371 - DNA, 33 bp, Homo sapien
attatagatttatatcaaacagcttagcttggc

SEQ ID NO: 1036372 - DNA, 33 bp, Homo sapien
attatagatttatatccaacagcttagcttggc

SEQ ID NO: 1036373 - DNA, 33 bp, Homo sapien
gagggtcaagtttcaaaggtaggttgcttttta

SEQ ID NO: 1036374 - DNA, 33 bp, Homo sapien
gagggtcaagtttcaacggtaggttgcttttta

SEQ ID NO: 1036375 - DNA, 33 bp, Homo sapien
atgacctcaatggaagcaggatgtcttccctgt

SEQ ID NO: 1036376 - DNA, 33 bp, Homo sapien
atgacctcaatggaaggaggatgtcttccctgt

SEQ ID NO: 1036377 - DNA, 33 bp, Homo sapien
ccacataagaagagaccacaatcccactggtct

SEQ ID NO: 1036378 - DNA, 33 bp, Homo sapien
ccacataagaagagactacaatcccactggtct

SEQ ID NO: 1036379 - DNA, 33 bp, Homo sapien
ggcaaggagagagttacacatgggagaagaaaa

SEQ ID NO: 1036380 - DNA, 33 bp, Homo sapien
ggcaaggagagagttatacatgggagaagaaaa

SEQ ID NO: 1036381 - DNA, 33 bp, Homo sapien
aatgataataacagcaactacaagaatttacca

SEQ ID NO: 1036382 - DNA, 33 bp, Homo sapien
aatgataataacagcagctacaagaatttacca

SEQ ID NO: 1036383 - DNA, 33 bp, Homo sapien
tctcgaatttcatcaaatcacctggagtaccag

SEQ ID NO: 1036384 - DNA, 33 bp, Homo sapien
tctcgaatttcatcaagtcacctggagtaccag

SEQ ID NO: 1036385 - DNA, 33 bp, Homo sapien
taaagcacttaaacccacaaagttattgtctat

SEQ ID NO: 1036386 - DNA, 33 bp, Homo sapien
taaagcacttaaaccctcaaagttattgtctat

SEQ ID NO: 1036387 - DNA, 33 bp, Homo sapien
aactctgcaagttcatgaagggcaggtatcact

SEQ ID NO: 1036388 - DNA, 33 bp, Homo sapien
aactctgcaagttcattaagggcaggtatcact

SEQ ID NO: 1036389 - DNA, 33 bp, Homo sapien
gaagcatagtccaataccgtctcctctctgaga

SEQ ID NO: 1036390 - DNA, 33 bp, Homo sapien
gaagcatagtccaatatcgtctcctctctgaga

SEQ ID NO: 1036391 - DNA, 33 bp, Homo sapien
ggagttggtgagatgacgtgtgagaaattagca

SEQ ID NO: 1036392 - DNA, 33 bp, Homo sapien
ggagttggtgagatgatgtgtgagaaattagca

SEQ ID NO: 1036393 - DNA, 33 bp, Homo sapien
agccctgtgcattacacaaagtagtcccttagt

SEQ ID NO: 1036394 - DNA, 33 bp, Homo sapien
agccctgtgcattacataaagtagtcccttagt

SEQ ID NO: 1036395 - DNA, 33 bp, Homo sapien
tcacagagaatttttaagtcatccagggtttct

SEQ ID NO: 1036396 - DNA, 33 bp, Homo sapien
tcacagagaatttttaggtcatccagggtttct

SEQ ID NO: 1036397 - DNA, 33 bp, Homo sapien
gtagctgggattccaacatcaactgagtgagag

SEQ ID NO: 1036398 - DNA, 33 bp, Homo sapien
gtagctgggattccaagatcaactgagtgagag

SEQ ID NO: 1036399 - DNA, 33 bp, Homo sapien
aggcaggaaacacaacaaaatgggtggagatgt

SEQ ID NO: 1036400 - DNA, 33 bp, Homo sapien
aggcaggaaacacaacgaaatgggtggagatgt

SEQ ID NO: 1036401 - DNA, 33 bp, Homo sapien
tatatgtgttaattcagatgcgttttccttagc

SEQ ID NO: 1036402 - DNA, 33 bp, Homo sapien
tatatgtgttaattcatatgcgttttccttagc

SEQ ID NO: 1036403 - DNA, 33 bp, Homo sapien
tgtggggacttttctacgcattgatgtttagta

SEQ ID NO: 1036404 - DNA, 33 bp, Homo sapien
tgtggggacttttctatgcattgatgtttagta

SEQ ID NO: 1036405 - DNA, 33 bp, Homo sapien
ctgttcattttcatgcaaaggtatatcccactg

SEQ ID NO: 1036406 - DNA, 33 bp, Homo sapien
ctgttcattttcatgcgaaggtatatcccactg

SEQ ID NO: 1036407 - DNA, 33 bp, Homo sapien
gagggagccagtaatacaggaatgatgttttat

SEQ ID NO: 1036408 - DNA, 33 bp, Homo sapien
gagggagccagtaatagaggaatgatgttttat

SEQ ID NO: 1036409 - DNA, 33 bp, Homo sapien
aaatgaaagtaatgcaataacagtgctctggtg

SEQ ID NO: 1036410 - DNA, 33 bp, Homo sapien
aaatgaaagtaatgcagtaacagtgctctggtg

SEQ ID NO: 1036411 - DNA, 33 bp, Homo sapien
tatgaaatgtgcaaacaggaaggactctcccct

SEQ ID NO: 1036412 - DNA, 33 bp, Homo sapien
tatgaaatgtgcaaacgggaaggactctcccct

SEQ ID NO: 1036413 - DNA, 33 bp, Homo sapien
acggtctatttattcacaccactttgacctctg

SEQ ID NO: 1036414 - DNA, 33 bp, Homo sapien
acggtctatttattcataccactttgacctctg

SEQ ID NO: 1036415 - DNA, 33 bp, Homo sapien
tctcaactgggcatgacactataatacattacc

SEQ ID NO: 1036416 - DNA, 33 bp, Homo sapien
tctcaactgggcatgatactataatacattacc

SEQ ID NO: 1036417 - DNA, 33 bp, Homo sapien
ccttgaatgtgtggccaggataatgacagaaac

SEQ ID NO: 1036418 - DNA, 33 bp, Homo sapien
ccttgaatgtgtggccgggataatgacagaaac

SEQ ID NO: 1036419 - DNA, 33 bp, Homo sapien
actacttcttcagctgccaaaatatttttgata

SEQ ID NO: 1036420 - DNA, 33 bp, Homo sapien
actacttcttcagctggcaaaatatttttgata

SEQ ID NO: 1036421 - DNA, 33 bp, Homo sapien
aagccgtgtacaggtacatgaagatgcagttgg

SEQ ID NO: 1036422 - DNA, 33 bp, Homo sapien
aagccgtgtacaggtagatgaagatgcagttgg

SEQ ID NO: 1036423 - DNA, 33 bp, Homo sapien
atttgtcctattgccaacttgcattgggtatgt

SEQ ID NO: 1036424 - DNA, 33 bp, Homo sapien
atttgtcctattgccaccttgcattgggtatgt

SEQ ID NO: 1036425 - DNA, 33 bp, Homo sapien
gaccctcaaattgtgtcaaatgcgagtgtccat

SEQ ID NO: 1036426 - DNA, 33 bp, Homo sapien
gaccctcaaattgtgtgaaatgcgagtgtccat

SEQ ID NO: 1036427 - DNA, 33 bp, Homo sapien
tccaaagtagttctcaagactcattcaattcaa

SEQ ID NO: 1036428 - DNA, 33 bp, Homo sapien
tccaaagtagttctcatgactcattcaattcaa

SEQ ID NO: 1036429 - DNA, 33 bp, Homo sapien
aaaatatttgtgttgaaaacaatctattcttcc

SEQ ID NO: 1036430 - DNA, 33 bp, Homo sapien
aaaatatttgtgttgagaacaatctattcttcc

SEQ ID NO: 1036431 - DNA, 33 bp, Homo sapien
aggatcaaatgaagcacggagggttttcaaagt

SEQ ID NO: 1036432 - DNA, 33 bp, Homo sapien
aggatcaaatgaagcatggagggttttcaaagt

SEQ ID NO: 1036433 - DNA, 33 bp, Homo sapien
gaggcctgtgcagaccagagataaattacttaa

SEQ ID NO: 1036434 - DNA, 33 bp, Homo sapien
gaggcctgtgcagaccggagataaattacttaa

SEQ ID NO: 1036435 - DNA, 33 bp, Homo sapien
tcaatgagatgcaagaaagggatccttgagcat

SEQ ID NO: 1036436 - DNA, 33 bp, Homo sapien
tcaatgagatgcaagagagggatccttgagcat

SEQ ID NO: 1036437 - DNA, 33 bp, Homo sapien
ttgcactctgacctacaaggaagtgaacaatga

SEQ ID NO: 1036438 - DNA, 33 bp, Homo sapien
ttgcactctgacctacgaggaagtgaacaatga

SEQ ID NO: 1036439 - DNA, 33 bp, Homo sapien
aagataagtgtaattacaagctaagagagcata

SEQ ID NO: 1036440 - DNA, 33 bp, Homo sapien
aagataagtgtaattagaagctaagagagcata

SEQ ID NO: 1036441 - DNA, 33 bp, Homo sapien
cagctatacctcatcaataaattacccaaataa

SEQ ID NO: 1036442 - DNA, 33 bp, Homo sapien
cagctatacctcatcagtaaattacccaaataa

SEQ ID NO: 1036443 - DNA, 33 bp, Homo sapien
gaaactctatatataacgtaagagaggcagtgg

SEQ ID NO: 1036444 - DNA, 33 bp, Homo sapien
gaaactctatatataatgtaagagaggcagtgg

SEQ ID NO: 1036445 - DNA, 33 bp, Homo sapien
catcactgtaaacacactcactgagacacaaaa

SEQ ID NO: 1036446 - DNA, 33 bp, Homo sapien
catcactgtaaacacattcactgagacacaaaa

SEQ ID NO: 1036447 - DNA, 33 bp, Homo sapien
atgctttcccccacaacgactatgtccatttta

SEQ ID NO: 1036448 - DNA, 33 bp, Homo sapien
atgctttcccccacaatgactatgtccatttta

SEQ ID NO: 1036449 - DNA, 33 bp, Homo sapien
gatggattttaaaaggaagatgatggataattt

SEQ ID NO: 1036450 - DNA, 33 bp, Homo sapien
gatggattttaaaagggagatgatggataattt

SEQ ID NO: 1036451 - DNA, 33 bp, Homo sapien
aggttaagctgaaagacgcttgaaacttcagat

SEQ ID NO: 1036452 - DNA, 33 bp, Homo sapien
aggttaagctgaaagatgcttgaaacttcagat

SEQ ID NO: 1036453 - DNA, 33 bp, Homo sapien
acagacaagcactaacccaatgtcacagagctc

SEQ ID NO: 1036454 - DNA, 33 bp, Homo sapien
acagacaagcactaactcaatgtcacagagctc

SEQ ID NO: 1036455 - DNA, 33 bp, Homo sapien
taattgatatgaaagaaacttaacccagtgccc

SEQ ID NO: 1036456 - DNA, 33 bp, Homo sapien
taattgatatgaaagacacttaacccagtgccc

SEQ ID NO: 1036457 - DNA, 33 bp, Homo sapien
tcatcatcttcacgtcaagtaggctgaggagaa

SEQ ID NO: 1036458 - DNA, 33 bp, Homo sapien
tcatcatcttcacgtcgagtaggctgaggagaa

SEQ ID NO: 1036459 - DNA, 33 bp, Homo sapien
ttccttttttctctaactgcttagaacccagga

SEQ ID NO: 1036460 - DNA, 33 bp, Homo sapien
ttccttttttctctaattgcttagaacccagga

SEQ ID NO: 1036461 - DNA, 33 bp, Homo sapien
gtccaataataagagacgaaaaagttaaacgcc

SEQ ID NO: 1036462 - DNA, 33 bp, Homo sapien
gtccaataataagagatgaaaaagttaaacgcc

SEQ ID NO: 1036463 - DNA, 33 bp, Homo sapien
ttctgtttaggtttagccaggatttctctcttt

SEQ ID NO: 1036464 - DNA, 33 bp, Homo sapien
ttctgtttaggtttagtcaggatttctctcttt

SEQ ID NO: 1036465 - DNA, 33 bp, Homo sapien
tttgatgaatttttaaataaatagcaggctcag

SEQ ID NO: 1036466 - DNA, 33 bp, Homo sapien
tttgatgaatttttaagtaaatagcaggctcag

SEQ ID NO: 1036467 - DNA, 33 bp, Homo sapien
gcatccctgataattccaagaggttacactact

SEQ ID NO: 1036468 - DNA, 33 bp, Homo sapien
gcatccctgataattctaagaggttacactact

SEQ ID NO: 1036469 - DNA, 33 bp, Homo sapien
cagcacacttgctgcacagaggtagatttacag

SEQ ID NO: 1036470 - DNA, 33 bp, Homo sapien
cagcacacttgctgcatagaggtagatttacag

SEQ ID NO: 1036471 - DNA, 33 bp, Homo sapien
tacaaaacaagactggacattggacatattttg

SEQ ID NO: 1036472 - DNA, 33 bp, Homo sapien
tacaaaacaagactgggcattggacatattttg

SEQ ID NO: 1036473 - DNA, 33 bp, Homo sapien
ccaacttttcattcccactgagctaaaccaact

SEQ ID NO: 1036474 - DNA, 33 bp, Homo sapien
ccaacttttcattccctctgagctaaaccaact

SEQ ID NO: 1036475 - DNA, 33 bp, Homo sapien
cactcagtatttatggacatctcaaaaaattat

SEQ ID NO: 1036476 - DNA, 33 bp, Homo sapien
cactcagtatttatgggcatctcaaaaaattat

SEQ ID NO: 1036477 - DNA, 33 bp, Homo sapien
tattgtgaaaaatcaaatgagatgatgtaaaat

SEQ ID NO: 1036478 - DNA, 33 bp, Homo sapien
tattgtgaaaaatcaattgagatgatgtaaaat

SEQ ID NO: 1036479 - DNA, 33 bp, Homo sapien
aaccaggaaagagatcggacggactgtgaggca

SEQ ID NO: 1036480 - DNA, 33 bp, Homo sapien
aaccaggaaagagatctgacggactgtgaggca

SEQ ID NO: 1036481 - DNA, 33 bp, Homo sapien
ccctaaagaactacacaagtagaaagggtatca

SEQ ID NO: 1036482 - DNA, 33 bp, Homo sapien
ccctaaagaactacacgagtagaaagggtatca

SEQ ID NO: 1036483 - DNA, 33 bp, Homo sapien
gtattatttattgccaaggactttgataggaag

SEQ ID NO: 1036484 - DNA, 33 bp, Homo sapien
gtattatttattgccagggactttgataggaag

SEQ ID NO: 1036485 - DNA, 33 bp, Homo sapien
tattgccacagttacaaattaccacaaatgttg

SEQ ID NO: 1036486 - DNA, 33 bp, Homo sapien
tattgccacagttacagattaccacaaatgttg

SEQ ID NO: 1036487 - DNA, 33 bp, Homo sapien
gaaattcagaaattacaattccaagccccttat

SEQ ID NO: 1036488 - DNA, 33 bp, Homo sapien
gaaattcagaaattactattccaagccccttat

SEQ ID NO: 1036489 - DNA, 33 bp, Homo sapien
ggcaatgacaacaagacggaataaaagagatct

SEQ ID NO: 1036490 - DNA, 33 bp, Homo sapien
ggcaatgacaacaagatggaataaaagagatct

SEQ ID NO: 1036491 - DNA, 33 bp, Homo sapien
ggactttgtataatgcccttcactcctcccctt

SEQ ID NO: 1036492 - DNA, 33 bp, Homo sapien
ggactttgtataatgctcttcactcctcccctt

SEQ ID NO: 1036493 - DNA, 33 bp, Homo sapien
ctgtaagagttcacataatagctgagtggcgag

SEQ ID NO: 1036494 - DNA, 33 bp, Homo sapien
ctgtaagagttcacatgatagctgagtggcgag

SEQ ID NO: 1036495 - DNA, 33 bp, Homo sapien
gaaacatcacacaggcagaaggaatcatcaaaa

SEQ ID NO: 1036496 - DNA, 33 bp, Homo sapien
gaaacatcacacaggccgaaggaatcatcaaaa

SEQ ID NO: 1036497 - DNA, 33 bp, Homo sapien
tgcctatgctccaaaactacctctgcaagtttc

SEQ ID NO: 1036498 - DNA, 33 bp, Homo sapien
tgcctatgctccaaaattacctctgcaagtttc

SEQ ID NO: 1036499 - DNA, 33 bp, Homo sapien
gaaagcattatactaaatgtcctcaatggaagg

SEQ ID NO: 1036500 - DNA, 33 bp, Homo sapien
gaaagcattatactaagtgtcctcaatggaagg

SEQ ID NO: 1036501 - DNA, 33 bp, Homo sapien
cccaccaacattcctacggtaaaagattgcagc

SEQ ID NO: 1036502 - DNA, 33 bp, Homo sapien
cccaccaacattcctatggtaaaagattgcagc

SEQ ID NO: 1036503 - DNA, 33 bp, Homo sapien
ttttagaatttgtggcagaggcttttggtcttc

SEQ ID NO: 1036504 - DNA, 33 bp, Homo sapien
ttttagaatttgtggcggaggcttttggtcttc

SEQ ID NO: 1036505 - DNA, 33 bp, Homo sapien
agctctccaagcacaaagccgacttttctacag

SEQ ID NO: 1036506 - DNA, 33 bp, Homo sapien
agctctccaagcacaaggccgacttttctacag

SEQ ID NO: 1036507 - DNA, 33 bp, Homo sapien
gtgcaacattccttccactttaaccttggcctt

SEQ ID NO: 1036508 - DNA, 33 bp, Homo sapien
gtgcaacattccttccgctttaaccttggcctt

SEQ ID NO: 1036509 - DNA, 33 bp, Homo sapien
ccagggtaaagacacaatactgagctctaagga

SEQ ID NO: 1036510 - DNA, 33 bp, Homo sapien
ccagggtaaagacacattactgagctctaagga

SEQ ID NO: 1036511 - DNA, 33 bp, Homo sapien
caccatgtatgtagatcacttagcagagtgccc

SEQ ID NO: 1036512 - DNA, 33 bp, Homo sapien
caccatgtatgtagattacttagcagagtgccc

SEQ ID NO: 1036513 - DNA, 33 bp, Homo sapien
tccaggggttaaaggcagacctgcacatattac

SEQ ID NO: 1036514 - DNA, 33 bp, Homo sapien
tccaggggttaaaggccgacctgcacatattac

SEQ ID NO: 1036515 - DNA, 33 bp, Homo sapien
acactgcaggaaacaaaataatctttgcaccat

SEQ ID NO: 1036516 - DNA, 33 bp, Homo sapien
acactgcaggaaacaatataatctttgcaccat

SEQ ID NO: 1036517 - DNA, 33 bp, Homo sapien
agcttgctgaggcacacggtaagcttgtgttta

SEQ ID NO: 1036518 - DNA, 33 bp, Homo sapien
agcttgctgaggcacatggtaagcttgtgttta

SEQ ID NO: 1036519 - DNA, 33 bp, Homo sapien
ctgtggtatcagaccaaagagtagctattttca

SEQ ID NO: 1036520 - DNA, 33 bp, Homo sapien
ctgtggtatcagaccatagagtagctattttca

SEQ ID NO: 1036521 - DNA, 33 bp, Homo sapien
ctttggggtttctccaatcatctaaacttctga

SEQ ID NO: 1036522 - DNA, 33 bp, Homo sapien
ctttggggtttctccagtcatctaaacttctga

SEQ ID NO: 1036523 - DNA, 33 bp, Homo sapien
ctactgggcttagaagactgtttatcttcccac

SEQ ID NO: 1036524 - DNA, 33 bp, Homo sapien
ctactgggcttagaaggctgtttatcttcccac

SEQ ID NO: 1036525 - DNA, 33 bp, Homo sapien
tcacactgaagattgcactatgtccccagcagc

SEQ ID NO: 1036526 - DNA, 33 bp, Homo sapien
tcacactgaagattgcgctatgtccccagcagc

SEQ ID NO: 1036527 - DNA, 33 bp, Homo sapien
tagtttttgttttgaaaatctctgcttccctgt

SEQ ID NO: 1036528 - DNA, 33 bp, Homo sapien
tagtttttgttttgaagatctctgcttccctgt

SEQ ID NO: 1036529 - DNA, 33 bp, Homo sapien
tcacataaattaccataaagatgaaatgtcaga

SEQ ID NO: 1036530 - DNA, 33 bp, Homo sapien
tcacataaattaccatgaagatgaaatgtcaga

SEQ ID NO: 1036531 - DNA, 33 bp, Homo sapien
tgagtctggtttcagaacagccagccatggtga

SEQ ID NO: 1036532 - DNA, 33 bp, Homo sapien
tgagtctggtttcagagcagccagccatggtga

SEQ ID NO: 1036533 - DNA, 33 bp, Homo sapien
caggtatccaaaattcactcccagccaccaggt

SEQ ID NO: 1036534 - DNA, 33 bp, Homo sapien
caggtatccaaaattcgctcccagccaccaggt

SEQ ID NO: 1036535 - DNA, 33 bp, Homo sapien
gaaaaagaccagtaaaaggactctccctagagc

SEQ ID NO: 1036536 - DNA, 33 bp, Homo sapien
gaaaaagaccagtaaatggactctccctagagc

SEQ ID NO: 1036537 - DNA, 33 bp, Homo sapien
tctgattagaatgccaactgcagaagataggtt

SEQ ID NO: 1036538 - DNA, 33 bp, Homo sapien
tctgattagaatgccagctgcagaagataggtt

SEQ ID NO: 1036539 - DNA, 33 bp, Homo sapien
tcaaaaccatgccagacatgctccttctccaat

SEQ ID NO: 1036540 - DNA, 33 bp, Homo sapien
tcaaaaccatgccagatatgctccttctccaat

SEQ ID NO: 1036541 - DNA, 33 bp, Homo sapien
ttctgaaaggtttttcaacaaaattgcatttag

SEQ ID NO: 1036542 - DNA, 33 bp, Homo sapien
ttctgaaaggtttttcgacaaaattgcatttag

SEQ ID NO: 1036543 - DNA, 33 bp, Homo sapien
gctctcatttgtctgtgaaaaatcctttgctgg

SEQ ID NO: 1036544 - DNA, 33 bp, Homo sapien
gctctcatttgtctgttaaaaatcctttgctgg

SEQ ID NO: 1036545 - DNA, 33 bp, Homo sapien
ttatctggtgcaacaacagtaacaaatgaaata

SEQ ID NO: 1036546 - DNA, 33 bp, Homo sapien
ttatctggtgcaacaatagtaacaaatgaaata

SEQ ID NO: 1036547 - DNA, 33 bp, Homo sapien
ttatttgctttctccaacatgggactgaccagt

SEQ ID NO: 1036548 - DNA, 33 bp, Homo sapien
ttatttgctttctccagcatgggactgaccagt

SEQ ID NO: 1036549 - DNA, 33 bp, Homo sapien
gaacaagtgacgatgaaatggcttagggcttca

SEQ ID NO: 1036550 - DNA, 33 bp, Homo sapien
gaacaagtgacgatgagatggcttagggcttca

SEQ ID NO: 1036551 - DNA, 33 bp, Homo sapien
gaaaatatggtgcctacatacgacagaatacta

SEQ ID NO: 1036552 - DNA, 33 bp, Homo sapien
gaaaatatggtgcctatatacgacagaatacta

SEQ ID NO: 1036553 - DNA, 33 bp, Homo sapien
tttttgcttcccaggacaccgtctttcaaaact

SEQ ID NO: 1036554 - DNA, 33 bp, Homo sapien
tttttgcttcccaggataccgtctttcaaaact

SEQ ID NO: 1036555 - DNA, 33 bp, Homo sapien
taatagctatgactaccatgaatagaaaacttg

SEQ ID NO: 1036556 - DNA, 33 bp, Homo sapien
taatagctatgactactatgaatagaaaacttg

SEQ ID NO: 1036557 - DNA, 33 bp, Homo sapien
ttagacccttgggtgcaacagcatttatagggt

SEQ ID NO: 1036558 - DNA, 33 bp, Homo sapien
ttagacccttgggtgcgacagcatttatagggt

SEQ ID NO: 1036559 - DNA, 33 bp, Homo sapien
ttatttcagcatgagacgcatttgccaaatgaa

SEQ ID NO: 1036560 - DNA, 33 bp, Homo sapien
ttatttcagcatgagaggcatttgccaaatgaa

SEQ ID NO: 1036561 - DNA, 33 bp, Homo sapien
tatgcaatccagccacacaaaactccttgaaga

SEQ ID NO: 1036562 - DNA, 33 bp, Homo sapien
tatgcaatccagccacgcaaaactccttgaaga

SEQ ID NO: 1036563 - DNA, 33 bp, Homo sapien
gtgacaagggtcttgacgatgagttttctggat

SEQ ID NO: 1036564 - DNA, 33 bp, Homo sapien
gtgacaagggtcttgatgatgagttttctggat

SEQ ID NO: 1036565 - DNA, 33 bp, Homo sapien
cctgatgattagcggccatttgtatgtctttgg

SEQ ID NO: 1036566 - DNA, 33 bp, Homo sapien
cctgatgattagcggctatttgtatgtctttgg

SEQ ID NO: 1036567 - DNA, 33 bp, Homo sapien
aagcaaaaacattatcaagcccccatttattgt

SEQ ID NO: 1036568 - DNA, 33 bp, Homo sapien
aagcaaaaacattatctagcccccatttattgt

SEQ ID NO: 1036569 - DNA, 33 bp, Homo sapien
actcattggaaatcccacttgcatttgaccaca

SEQ ID NO: 1036570 - DNA, 33 bp, Homo sapien
actcattggaaatccctcttgcatttgaccaca

SEQ ID NO: 1036571 - DNA, 33 bp, Homo sapien
actgagaagtgtgagcaaaaacagaggaaaaca

SEQ ID NO: 1036572 - DNA, 33 bp, Homo sapien
actgagaagtgtgagcgaaaacagaggaaaaca

SEQ ID NO: 1036573 - DNA, 33 bp, Homo sapien
gggaaaatcactagaaaaagcacttttaggaaa

SEQ ID NO: 1036574 - DNA, 33 bp, Homo sapien
gggaaaatcactagaataagcacttttaggaaa

SEQ ID NO: 1036575 - DNA, 33 bp, Homo sapien
gagaacaaatcaagttcaactggcctgctatat

SEQ ID NO: 1036576 - DNA, 33 bp, Homo sapien
gagaacaaatcaagtttaactggcctgctatat

SEQ ID NO: 1036577 - DNA, 33 bp, Homo sapien
ggataagcaatggctacaacttgatagtgggaa

SEQ ID NO: 1036578 - DNA, 33 bp, Homo sapien
ggataagcaatggctagaacttgatagtgggaa

SEQ ID NO: 1036579 - DNA, 33 bp, Homo sapien
gtaaactatgaatttgaagtaatgaggatatat

SEQ ID NO: 1036580 - DNA, 33 bp, Homo sapien
gtaaactatgaatttggagtaatgaggatatat

SEQ ID NO: 1036581 - DNA, 33 bp, Homo sapien
taacaagttcatagaggagcaagtggttaagat

SEQ ID NO: 1036582 - DNA, 33 bp, Homo sapien
taacaagttcatagagtagcaagtggttaagat

SEQ ID NO: 1036583 - DNA, 33 bp, Homo sapien
cttatattacagaaacactgtgatgcctacaga

SEQ ID NO: 1036584 - DNA, 33 bp, Homo sapien
cttatattacagaaaccctgtgatgcctacaga

SEQ ID NO: 1036585 - DNA, 33 bp, Homo sapien
taaaacactgaaaccaaatgatatcccttaccc

SEQ ID NO: 1036586 - DNA, 33 bp, Homo sapien
taaaacactgaaaccagatgatatcccttaccc

SEQ ID NO: 1036587 - DNA, 33 bp, Homo sapien
cccttcggtggaaggacctagcattagcacttc

SEQ ID NO: 1036588 - DNA, 33 bp, Homo sapien
cccttcggtggaaggatctagcattagcacttc

SEQ ID NO: 1036589 - DNA, 33 bp, Homo sapien
caaaagctaggaagcacagcaatacttttaagt

SEQ ID NO: 1036590 - DNA, 33 bp, Homo sapien
caaaagctaggaagcagagcaatacttttaagt

SEQ ID NO: 1036591 - DNA, 33 bp, Homo sapien
tttgactcaggaaataagaaatttagacaggac

SEQ ID NO: 1036592 - DNA, 33 bp, Homo sapien
tttgactcaggaaatatgaaatttagacaggac

SEQ ID NO: 1036593 - DNA, 33 bp, Homo sapien
ctgttcttgtggtagacaatcagcctcatgaga

SEQ ID NO: 1036594 - DNA, 33 bp, Homo sapien
ctgttcttgtggtagagaatcagcctcatgaga

SEQ ID NO: 1036595 - DNA, 33 bp, Homo sapien
ccagaaggaagatcaaaccagtaaagaggctaa

SEQ ID NO: 1036596 - DNA, 33 bp, Homo sapien
ccagaaggaagatcaacccagtaaagaggctaa

SEQ ID NO: 1036597 - DNA, 33 bp, Homo sapien
tcaatatggcaatttcaaagttattcataaaca

SEQ ID NO: 1036598 - DNA, 33 bp, Homo sapien
tcaatatggcaatttcgaagttattcataaaca

SEQ ID NO: 1036599 - DNA, 33 bp, Homo sapien
ctttatagatcataacaactataacaacaaaga

SEQ ID NO: 1036600 - DNA, 33 bp, Homo sapien
ctttatagatcataactactataacaacaaaga

SEQ ID NO: 1036601 - DNA, 33 bp, Homo sapien
gttaatggagattaagaatatacaggagaaagg

SEQ ID NO: 1036602 - DNA, 33 bp, Homo sapien
gttaatggagattaaggatatacaggagaaagg

SEQ ID NO: 1036603 - DNA, 33 bp, Homo sapien
agttgtgccttaaacaatggttgatatttgtga

SEQ ID NO: 1036604 - DNA, 33 bp, Homo sapien
agttgtgccttaaacagtggttgatatttgtga

SEQ ID NO: 1036605 - DNA, 33 bp, Homo sapien
taaggcacaacttaaacattccttcttctctgt

SEQ ID NO: 1036606 - DNA, 33 bp, Homo sapien
taaggcacaacttaaatattccttcttctctgt

SEQ ID NO: 1036607 - DNA, 33 bp, Homo sapien
tatttttaaatgatcagggctggatgaaaattt

SEQ ID NO: 1036608 - DNA, 33 bp, Homo sapien
tatttttaaatgatcatggctggatgaaaattt

SEQ ID NO: 1036609 - DNA, 33 bp, Homo sapien
acagctacttcagaaccggtgtccccacagaga

SEQ ID NO: 1036610 - DNA, 33 bp, Homo sapien
acagctacttcagaactggtgtccccacagaga

SEQ ID NO: 1036611 - DNA, 33 bp, Homo sapien
cccctgtcaggagagaaccaaccattttgctgg

SEQ ID NO: 1036612 - DNA, 33 bp, Homo sapien
cccctgtcaggagagagccaaccattttgctgg

SEQ ID NO: 1036613 - DNA, 33 bp, Homo sapien
atgtgaggcttgaaaccatgtttgggccagtat

SEQ ID NO: 1036614 - DNA, 33 bp, Homo sapien
atgtgaggcttgaaactatgtttgggccagtat

SEQ ID NO: 1036615 - DNA, 33 bp, Homo sapien
aaagtttttggcaagaatatatcataggtaagc

SEQ ID NO: 1036616 - DNA, 33 bp, Homo sapien
aaagtttttggcaagactatatcataggtaagc

SEQ ID NO: 1036617 - DNA, 33 bp, Homo sapien
catttagagagcggaaccctgaagttagggagg

SEQ ID NO: 1036618 - DNA, 33 bp, Homo sapien
catttagagagcggaatcctgaagttagggagg

SEQ ID NO: 1036619 - DNA, 33 bp, Homo sapien
agattaggatgctgtcacagtattttttgggga

SEQ ID NO: 1036620 - DNA, 33 bp, Homo sapien
agattaggatgctgtcgcagtattttttgggga

SEQ ID NO: 1036621 - DNA, 33 bp, Homo sapien
acttcgtaggtctagtcaagtttgtgactgaaa

SEQ ID NO: 1036622 - DNA, 33 bp, Homo sapien
acttcgtaggtctagtgaagtttgtgactgaaa

SEQ ID NO: 1036623 - DNA, 33 bp, Homo sapien
agactgttgttttccacgtttctagctctggct

SEQ ID NO: 1036624 - DNA, 33 bp, Homo sapien
agactgttgttttccatgtttctagctctggct

SEQ ID NO: 1036625 - DNA, 33 bp, Homo sapien
aattattaaaaagttcaagatggtgacaactgg

SEQ ID NO: 1036626 - DNA, 33 bp, Homo sapien
aattattaaaaagttcgagatggtgacaactgg

SEQ ID NO: 1036627 - DNA, 33 bp, Homo sapien
agcagaagaaaccagagtcagagagagggccat

SEQ ID NO: 1036628 - DNA, 33 bp, Homo sapien
agcagaagaaaccagattcagagagagggccat

SEQ ID NO: 1036629 - DNA, 33 bp, Homo sapien
cgtcttcaaagcccatcatccagttaccacttc

SEQ ID NO: 1036630 - DNA, 33 bp, Homo sapien
cgtcttcaaagcccatgatccagttaccacttc

SEQ ID NO: 1036631 - DNA, 33 bp, Homo sapien
aaaacctagcctagagccaggtatcaaggagcc

SEQ ID NO: 1036632 - DNA, 33 bp, Homo sapien
aaaacctagcctagagtcaggtatcaaggagcc

SEQ ID NO: 1036633 - DNA, 33 bp, Homo sapien
gctgttgggaaagatgaaaagtccaacaggaga

SEQ ID NO: 1036634 - DNA, 33 bp, Homo sapien
gctgttgggaaagatggaaagtccaacaggaga

SEQ ID NO: 1036635 - DNA, 33 bp, Homo sapien
tgatgacaggtagatgacagaacggagcaaagt

SEQ ID NO: 1036636 - DNA, 33 bp, Homo sapien
tgatgacaggtagatgtcagaacggagcaaagt

SEQ ID NO: 1036637 - DNA, 33 bp, Homo sapien
actcctctggttttacaactgcagctttctata

SEQ ID NO: 1036638 - DNA, 33 bp, Homo sapien
actcctctggttttacgactgcagctttctata

SEQ ID NO: 1036639 - DNA, 33 bp, Homo sapien
ggcaaggatcccaggcaagagaaataggatgta

SEQ ID NO: 1036640 - DNA, 33 bp, Homo sapien
ggcaaggatcccaggcgagagaaataggatgta

SEQ ID NO: 1036641 - DNA, 33 bp, Homo sapien
atcagtttggccatcacccaagaagttatcttt

SEQ ID NO: 1036642 - DNA, 33 bp, Homo sapien
atcagtttggccatcatccaagaagttatcttt

SEQ ID NO: 1036643 - DNA, 33 bp, Homo sapien
gagttgaagctgcaaaattgttttggaatatcg

SEQ ID NO: 1036644 - DNA, 33 bp, Homo sapien
gagttgaagctgcaaagttgttttggaatatcg

SEQ ID NO: 1036645 - DNA, 33 bp, Homo sapien
ctgggcactgaagatacatcggtgaccaaacag

SEQ ID NO: 1036646 - DNA, 33 bp, Homo sapien
ctgggcactgaagatatatcggtgaccaaacag

SEQ ID NO: 1036647 - DNA, 33 bp, Homo sapien
cttttgattctcacaacaccccagcaaggacct

SEQ ID NO: 1036648 - DNA, 33 bp, Homo sapien
cttttgattctcacaataccccagcaaggacct

SEQ ID NO: 1036649 - DNA, 33 bp, Homo sapien
aggacatgaggcctacgaatgacctgagaaagg

SEQ ID NO: 1036650 - DNA, 33 bp, Homo sapien
aggacatgaggcctactaatgacctgagaaagg

SEQ ID NO: 1036651 - DNA, 33 bp, Homo sapien
cagttttctcagattacatgtaactcctcttct

SEQ ID NO: 1036652 - DNA, 33 bp, Homo sapien
cagttttctcagattagatgtaactcctcttct

SEQ ID NO: 1036653 - DNA, 33 bp, Homo sapien
aggaattttcactttcaatgcttgagccaaaga

SEQ ID NO: 1036654 - DNA, 33 bp, Homo sapien
aggaattttcactttcgatgcttgagccaaaga

SEQ ID NO: 1036655 - DNA, 33 bp, Homo sapien
ctcatctggtgtagaccgctatgtaccagaaag

SEQ ID NO: 1036656 - DNA, 33 bp, Homo sapien
ctcatctggtgtagactgctatgtaccagaaag

SEQ ID NO: 1036657 - DNA, 33 bp, Homo sapien
ggaagggtgattggtacaactttctattctgtc

SEQ ID NO: 1036658 - DNA, 33 bp, Homo sapien
ggaagggtgattggtagaactttctattctgtc

SEQ ID NO: 1036659 - DNA, 33 bp, Homo sapien
ttttatttagtgaccaataaacctgttttagag

SEQ ID NO: 1036660 - DNA, 33 bp, Homo sapien
ttttatttagtgaccattaaacctgttttagag

SEQ ID NO: 1036661 - DNA, 33 bp, Homo sapien
catgcttactacctgacgggtgggatctgtacc

SEQ ID NO: 1036662 - DNA, 33 bp, Homo sapien
catgcttactacctgaggggtgggatctgtacc

SEQ ID NO: 1036663 - DNA, 33 bp, Homo sapien
agggaacagtcccaccaagagatgatgtgagtg

SEQ ID NO: 1036664 - DNA, 33 bp, Homo sapien
agggaacagtcccaccgagagatgatgtgagtg

SEQ ID NO: 1036665 - DNA, 33 bp, Homo sapien
cacccacagatatgaaatggtgaccagaatttg

SEQ ID NO: 1036666 - DNA, 33 bp, Homo sapien
cacccacagatatgaagtggtgaccagaatttg

SEQ ID NO: 1036667 - DNA, 33 bp, Homo sapien
ttcaggaaaagtcaacaagcatttgacatcaac

SEQ ID NO: 1036668 - DNA, 33 bp, Homo sapien
ttcaggaaaagtcaaccagcatttgacatcaac

SEQ ID NO: 1036669 - DNA, 33 bp, Homo sapien
accaaaatatgcagtcaactaggcagaagtggg

SEQ ID NO: 1036670 - DNA, 33 bp, Homo sapien
accaaaatatgcagtccactaggcagaagtggg

SEQ ID NO: 1036671 - DNA, 33 bp, Homo sapien
tctgtgaaagccataaaaactccaagtcctgag

SEQ ID NO: 1036672 - DNA, 33 bp, Homo sapien
tctgtgaaagccataataactccaagtcctgag

SEQ ID NO: 1036673 - DNA, 33 bp, Homo sapien
gtcccttcctattaaaacacctaacacactagg

SEQ ID NO: 1036674 - DNA, 33 bp, Homo sapien
gtcccttcctattaaagcacctaacacactagg

SEQ ID NO: 1036675 - DNA, 33 bp, Homo sapien
agtgccagcctctaaacatggctttggagattc

SEQ ID NO: 1036676 - DNA, 33 bp, Homo sapien
agtgccagcctctaaatatggctttggagattc

SEQ ID NO: 1036677 - DNA, 33 bp, Homo sapien
ttggttgattacttccaactgcttaattttttt

SEQ ID NO: 1036678 - DNA, 33 bp, Homo sapien
ttggttgattacttccgactgcttaattttttt

SEQ ID NO: 1036679 - DNA, 33 bp, Homo sapien
gtctagagcttaggaaatatgtcacctgctctg

SEQ ID NO: 1036680 - DNA, 33 bp, Homo sapien
gtctagagcttaggaagtatgtcacctgctctg

SEQ ID NO: 1036681 - DNA, 33 bp, Homo sapien
ctcctgtctcagtagcacttgctagcatcatga

SEQ ID NO: 1036682 - DNA, 33 bp, Homo sapien
ctcctgtctcagtagctcttgctagcatcatga

SEQ ID NO: 1036683 - DNA, 33 bp, Homo sapien
aaggaatataccaggaataaaaattaatgagac

SEQ ID NO: 1036684 - DNA, 33 bp, Homo sapien
aaggaatataccaggagtaaaaattaatgagac

SEQ ID NO: 1036685 - DNA, 33 bp, Homo sapien
aacatgcgaacatttaaatctaacctggatgtt

SEQ ID NO: 1036686 - DNA, 33 bp, Homo sapien
aacatgcgaacatttatatctaacctggatgtt

SEQ ID NO: 1036687 - DNA, 33 bp, Homo sapien
caggaggttgcaggtacgttattttccagctgt

SEQ ID NO: 1036688 - DNA, 33 bp, Homo sapien
caggaggttgcaggtatgttattttccagctgt

SEQ ID NO: 1036689 - DNA, 33 bp, Homo sapien
tacagagatacctttgcagtaagggcagttttc

SEQ ID NO: 1036690 - DNA, 33 bp, Homo sapien
tacagagatacctttgtagtaagggcagttttc

SEQ ID NO: 1036691 - DNA, 33 bp, Homo sapien
tgcacaatctcctacacaatagagtagcataca

SEQ ID NO: 1036692 - DNA, 33 bp, Homo sapien
tgcacaatctcctacataatagagtagcataca

SEQ ID NO: 1036693 - DNA, 33 bp, Homo sapien
gtaacttcttaccccactgaagtagccaaagac

SEQ ID NO: 1036694 - DNA, 33 bp, Homo sapien
gtaacttcttaccccattgaagtagccaaagac

SEQ ID NO: 1036695 - DNA, 33 bp, Homo sapien
agggacttacaggttacgggtggagtcagagat

SEQ ID NO: 1036696 - DNA, 33 bp, Homo sapien
agggacttacaggttatgggtggagtcagagat

SEQ ID NO: 1036697 - DNA, 33 bp, Homo sapien
tgtcctgatcacgtagaaggtaaatgaggaaag

SEQ ID NO: 1036698 - DNA, 33 bp, Homo sapien
tgtcctgatcacgtagcaggtaaatgaggaaag

SEQ ID NO: 1036699 - DNA, 33 bp, Homo sapien
tggtcatacttgtgatcactttgtaagttaaaa

SEQ ID NO: 1036700 - DNA, 33 bp, Homo sapien
tggtcatacttgtgattactttgtaagttaaaa

SEQ ID NO: 1036701 - DNA, 33 bp, Homo sapien
gcaactggattcaatacctagccataatatcaa

SEQ ID NO: 1036702 - DNA, 33 bp, Homo sapien
gcaactggattcaatatctagccataatatcaa

SEQ ID NO: 1036703 - DNA, 33 bp, Homo sapien
aaactgaagaacggaacggttgagtaacttggc

SEQ ID NO: 1036704 - DNA, 33 bp, Homo sapien
aaactgaagaacggaatggttgagtaacttggc

SEQ ID NO: 1036705 - DNA, 33 bp, Homo sapien
aatacctatggctgagacctgttctaggagtat

SEQ ID NO: 1036706 - DNA, 33 bp, Homo sapien
aatacctatggctgagccctgttctaggagtat

SEQ ID NO: 1036707 - DNA, 33 bp, Homo sapien
ttctgaaaattaaatgaactagccaaattgttt

SEQ ID NO: 1036708 - DNA, 33 bp, Homo sapien
ttctgaaaattaaatggactagccaaattgttt

SEQ ID NO: 1036709 - DNA, 33 bp, Homo sapien
gatttttccagaacacacaactatatatatagt

SEQ ID NO: 1036710 - DNA, 33 bp, Homo sapien
gatttttccagaacacgcaactatatatatagt

SEQ ID NO: 1036711 - DNA, 33 bp, Homo sapien
gctctgtcagaaactaacattgctactcctact

SEQ ID NO: 1036712 - DNA, 33 bp, Homo sapien
gctctgtcagaaactagcattgctactcctact

SEQ ID NO: 1036713 - DNA, 33 bp, Homo sapien
tacagcacaggatatgcaccttagcacggtgga

SEQ ID NO: 1036714 - DNA, 33 bp, Homo sapien
tacagcacaggatatgtaccttagcacggtgga

SEQ ID NO: 1036715 - DNA, 33 bp, Homo sapien
aaagtgtgcctagtgacgggaaaatagagtcac

SEQ ID NO: 1036716 - DNA, 33 bp, Homo sapien
aaagtgtgcctagtgatgggaaaatagagtcac

SEQ ID NO: 1036717 - DNA, 33 bp, Homo sapien
ttcctcctattattgacgacttgcttttgtatg

SEQ ID NO: 1036718 - DNA, 33 bp, Homo sapien
ttcctcctattattgatgacttgcttttgtatg

SEQ ID NO: 1036719 - DNA, 33 bp, Homo sapien
acaactggccacaaaactatagttaaaaataaa

SEQ ID NO: 1036720 - DNA, 33 bp, Homo sapien
acaactggccacaaaattatagttaaaaataaa

SEQ ID NO: 1036721 - DNA, 33 bp, Homo sapien
cacaagtgacctacagcctatcaatccgttagt

SEQ ID NO: 1036722 - DNA, 33 bp, Homo sapien
cacaagtgacctacaggctatcaatccgttagt

SEQ ID NO: 1036723 - DNA, 33 bp, Homo sapien
gtttgccttggtaccaatgagctacaggtaaac

SEQ ID NO: 1036724 - DNA, 33 bp, Homo sapien
gtttgccttggtaccactgagctacaggtaaac

SEQ ID NO: 1036725 - DNA, 33 bp, Homo sapien
aagtcagtacagcaagacatcttccctatcacc

SEQ ID NO: 1036726 - DNA, 33 bp, Homo sapien
aagtcagtacagcaagtcatcttccctatcacc

SEQ ID NO: 1036727 - DNA, 33 bp, Homo sapien
gggcaactctaattcaaccaggtcaagtgatgg

SEQ ID NO: 1036728 - DNA, 33 bp, Homo sapien
gggcaactctaattcagccaggtcaagtgatgg

SEQ ID NO: 1036729 - DNA, 33 bp, Homo sapien
ttttaacaagagtgacacacagtaggaacacca

SEQ ID NO: 1036730 - DNA, 33 bp, Homo sapien
ttttaacaagagtgacgcacagtaggaacacca

SEQ ID NO: 1036731 - DNA, 33 bp, Homo sapien
tccctgcaagataacacagtatattttgggtta

SEQ ID NO: 1036732 - DNA, 33 bp, Homo sapien
tccctgcaagataacatagtatattttgggtta

SEQ ID NO: 1036733 - DNA, 33 bp, Homo sapien
taaaattaagacaaacaaattggtacactctca

SEQ ID NO: 1036734 - DNA, 33 bp, Homo sapien
taaaattaagacaaacgaattggtacactctca

SEQ ID NO: 1036735 - DNA, 33 bp, Homo sapien
acttgcctgatttgatcagaattcccaaagtaa

SEQ ID NO: 1036736 - DNA, 33 bp, Homo sapien
acttgcctgatttgattagaattcccaaagtaa

SEQ ID NO: 1036737 - DNA, 33 bp, Homo sapien
aagacacttagggataaaagtttccaagacgga

SEQ ID NO: 1036738 - DNA, 33 bp, Homo sapien
aagacacttagggatagaagtttccaagacgga

SEQ ID NO: 1036739 - DNA, 33 bp, Homo sapien
cccattgcctaagtcaaggaattcttgtatatg

SEQ ID NO: 1036740 - DNA, 33 bp, Homo sapien
cccattgcctaagtcacggaattcttgtatatg

SEQ ID NO: 1036741 - DNA, 33 bp, Homo sapien
aggaatttcataatgccctgttactccgtttat

SEQ ID NO: 1036742 - DNA, 33 bp, Homo sapien
aggaatttcataatgctctgttactccgtttat

SEQ ID NO: 1036743 - DNA, 33 bp, Homo sapien
ggcacccactttctataaaattctctcctttta

SEQ ID NO: 1036744 - DNA, 33 bp, Homo sapien
ggcacccactttctatgaaattctctcctttta

SEQ ID NO: 1036745 - DNA, 33 bp, Homo sapien
tggatgtgacaatgacagaagtgggaaaagatt

SEQ ID NO: 1036746 - DNA, 33 bp, Homo sapien
tggatgtgacaatgacggaagtgggaaaagatt

SEQ ID NO: 1036747 - DNA, 33 bp, Homo sapien
caaggaaaggattgacaagggaagtagtgatgt

SEQ ID NO: 1036748 - DNA, 33 bp, Homo sapien
caaggaaaggattgacgagggaagtagtgatgt

SEQ ID NO: 1036749 - DNA, 33 bp, Homo sapien
atcttagacaataggagacttttttacatacaa

SEQ ID NO: 1036750 - DNA, 33 bp, Homo sapien
atcttagacaataggatacttttttacatacaa

SEQ ID NO: 1036751 - DNA, 33 bp, Homo sapien
atttctgccgacttcccccattccaacatacta

SEQ ID NO: 1036752 - DNA, 33 bp, Homo sapien
atttctgccgacttcctccattccaacatacta

SEQ ID NO: 1036753 - DNA, 33 bp, Homo sapien
gaaccattacagacctcaaggtacttggacgaa

SEQ ID NO: 1036754 - DNA, 33 bp, Homo sapien
gaaccattacagacctgaaggtacttggacgaa

SEQ ID NO: 1036755 - DNA, 33 bp, Homo sapien
tactgctgactatttccctctatatcccctgaa

SEQ ID NO: 1036756 - DNA, 33 bp, Homo sapien
tactgctgactatttctctctatatcccctgaa

SEQ ID NO: 1036757 - DNA, 33 bp, Homo sapien
gaagaagtaatctcaaatggatagtgagatgtc

SEQ ID NO: 1036758 - DNA, 33 bp, Homo sapien
gaagaagtaatctcaagtggatagtgagatgtc

SEQ ID NO: 1036759 - DNA, 33 bp, Homo sapien
tagtatcagaatcgtcaaaaataccttacactg

SEQ ID NO: 1036760 - DNA, 33 bp, Homo sapien
tagtatcagaatcgtcgaaaataccttacactg

SEQ ID NO: 1036761 - DNA, 33 bp, Homo sapien
ggacacggacaagaacgggaaatagtatcagag

SEQ ID NO: 1036762 - DNA, 33 bp, Homo sapien
ggacacggacaagaactggaaatagtatcagag

SEQ ID NO: 1036763 - DNA, 33 bp, Homo sapien
tttgagatgaagttaccggaaatgctgtcagtg

SEQ ID NO: 1036764 - DNA, 33 bp, Homo sapien
tttgagatgaagttactggaaatgctgtcagtg

SEQ ID NO: 1036765 - DNA, 33 bp, Homo sapien
caaactgaggatacccagcactaacattgagtc

SEQ ID NO: 1036766 - DNA, 33 bp, Homo sapien
caaactgaggatacccggcactaacattgagtc

SEQ ID NO: 1036767 - DNA, 33 bp, Homo sapien
taaggcaaataggtcacaactaaattttgaatg

SEQ ID NO: 1036768 - DNA, 33 bp, Homo sapien
taaggcaaataggtcataactaaattttgaatg

SEQ ID NO: 1036769 - DNA, 33 bp, Homo sapien
agcatagcattcaaggccattcaaaatttagtt

SEQ ID NO: 1036770 - DNA, 33 bp, Homo sapien
agcatagcattcaagggcattcaaaatttagtt

SEQ ID NO: 1036771 - DNA, 33 bp, Homo sapien
agacccacttcccaggacataacgttagcaaca

SEQ ID NO: 1036772 - DNA, 33 bp, Homo sapien
agacccacttcccagggcataacgttagcaaca

SEQ ID NO: 1036773 - DNA, 33 bp, Homo sapien
atacatccttcttctacagtggcatcaaggaga

SEQ ID NO: 1036774 - DNA, 33 bp, Homo sapien
atacatccttcttctatagtggcatcaaggaga

SEQ ID NO: 1036775 - DNA, 33 bp, Homo sapien
atgcagcgtcatttaaaggtcccatttctcaag

SEQ ID NO: 1036776 - DNA, 33 bp, Homo sapien
atgcagcgtcatttaagggtcccatttctcaag

SEQ ID NO: 1036777 - DNA, 33 bp, Homo sapien
tctataaatgagatcaaactatacattactgct

SEQ ID NO: 1036778 - DNA, 33 bp, Homo sapien
tctataaatgagatcatactatacattactgct

SEQ ID NO: 1036779 - DNA, 33 bp, Homo sapien
tctaccagacccatgccaataattctttggccc

SEQ ID NO: 1036780 - DNA, 33 bp, Homo sapien
tctaccagacccatgctaataattctttggccc

SEQ ID NO: 1036781 - DNA, 33 bp, Homo sapien
tctatgttagatacaaaatgggtcaatgtccaa

SEQ ID NO: 1036782 - DNA, 33 bp, Homo sapien
tctatgttagatacaacatgggtcaatgtccaa

SEQ ID NO: 1036783 - DNA, 33 bp, Homo sapien
taaacaaaacgtgatacactgttcaggtataat

SEQ ID NO: 1036784 - DNA, 33 bp, Homo sapien
taaacaaaacgtgatatactgttcaggtataat

SEQ ID NO: 1036785 - DNA, 33 bp, Homo sapien
tttttcttcccttaaaggtatgttgacacacag

SEQ ID NO: 1036786 - DNA, 33 bp, Homo sapien
tttttcttcccttaaatgtatgttgacacacag

SEQ ID NO: 1036787 - DNA, 33 bp, Homo sapien
cgtaccaggattcggacagtgtatggaggactt

SEQ ID NO: 1036788 - DNA, 33 bp, Homo sapien
cgtaccaggattcggagagtgtatggaggactt

SEQ ID NO: 1036789 - DNA, 33 bp, Homo sapien
acccaggttgacgaagaagctaccatatcaaat

SEQ ID NO: 1036790 - DNA, 33 bp, Homo sapien
acccaggttgacgaagcagctaccatatcaaat

SEQ ID NO: 1036791 - DNA, 33 bp, Homo sapien
ggaaacccagaaaggtcaagtaactaagactta

SEQ ID NO: 1036792 - DNA, 33 bp, Homo sapien
ggaaacccagaaaggtgaagtaactaagactta

SEQ ID NO: 1036793 - DNA, 33 bp, Homo sapien
aagaggaaaatgatcacagcagaggacacagga

SEQ ID NO: 1036794 - DNA, 33 bp, Homo sapien
aagaggaaaatgatcagagcagaggacacagga

SEQ ID NO: 1036795 - DNA, 33 bp, Homo sapien
ttccatttgtaatcagcaatgtgatctgcattt

SEQ ID NO: 1036796 - DNA, 33 bp, Homo sapien
ttccatttgtaatcagtaatgtgatctgcattt

SEQ ID NO: 1036797 - DNA, 33 bp, Homo sapien
aatccaagaaatcacacggtttgggatcaaagc

SEQ ID NO: 1036798 - DNA, 33 bp, Homo sapien
aatccaagaaatcacatggtttgggatcaaagc

SEQ ID NO: 1036799 - DNA, 33 bp, Homo sapien
gctgagtgaattcttacctctcactctagctgg

SEQ ID NO: 1036800 - DNA, 33 bp, Homo sapien
gctgagtgaattcttagctctcactctagctgg

SEQ ID NO: 1036801 - DNA, 33 bp, Homo sapien
agtgggatgtgaagatgaaaaagagcaatggga

SEQ ID NO: 1036802 - DNA, 33 bp, Homo sapien
agtgggatgtgaagattaaaaagagcaatggga

SEQ ID NO: 1036803 - DNA, 33 bp, Homo sapien
atgagaatatgcataaatgaagtctctaccaca

SEQ ID NO: 1036804 - DNA, 33 bp, Homo sapien
atgagaatatgcataactgaagtctctaccaca

SEQ ID NO: 1036805 - DNA, 33 bp, Homo sapien
taataaggtcggtagtaaactcagatttccatg

SEQ ID NO: 1036806 - DNA, 33 bp, Homo sapien
taataaggtcggtagttaactcagatttccatg

SEQ ID NO: 1036807 - DNA, 33 bp, Homo sapien
tatttgccaactggccaacaagcaatccaggag

SEQ ID NO: 1036808 - DNA, 33 bp, Homo sapien
tatttgccaactggccgacaagcaatccaggag

SEQ ID NO: 1036809 - DNA, 33 bp, Homo sapien
gctcttgaggtaagaactgtttgtttgtttttc

SEQ ID NO: 1036810 - DNA, 33 bp, Homo sapien
gctcttgaggtaagaattgtttgtttgtttttc

SEQ ID NO: 1036811 - DNA, 33 bp, Homo sapien
tagttgtctctcacaacattgtgtgctcttgag

SEQ ID NO: 1036812 - DNA, 33 bp, Homo sapien
tagttgtctctcacaagattgtgtgctcttgag

SEQ ID NO: 1036813 - DNA, 33 bp, Homo sapien
aggaagtgctaattctaacagggaaatgggaaa

SEQ ID NO: 1036814 - DNA, 33 bp, Homo sapien
aggaagtgctaattctgacagggaaatgggaaa

SEQ ID NO: 1036815 - DNA, 33 bp, Homo sapien
gaaatctgcaagaacaaaagtggataatttcag

SEQ ID NO: 1036816 - DNA, 33 bp, Homo sapien
gaaatctgcaagaacagaagtggataatttcag

SEQ ID NO: 1036817 - DNA, 33 bp, Homo sapien
attaacaagtaaacatcagctgtaagtttggta

SEQ ID NO: 1036818 - DNA, 33 bp, Homo sapien
attaacaagtaaacattagctgtaagtttggta

SEQ ID NO: 1036819 - DNA, 33 bp, Homo sapien
ctgctgatctagctctcaaagtaccaaagcatg

SEQ ID NO: 1036820 - DNA, 33 bp, Homo sapien
ctgctgatctagctcttaaagtaccaaagcatg

SEQ ID NO: 1036821 - DNA, 33 bp, Homo sapien
agcatggggtgttagacgtcacaatttctctga

SEQ ID NO: 1036822 - DNA, 33 bp, Homo sapien
agcatggggtgttagatgtcacaatttctctga

SEQ ID NO: 1036823 - DNA, 33 bp, Homo sapien
gatggtatgatagatacagtgaggggtaaacaa

SEQ ID NO: 1036824 - DNA, 33 bp, Homo sapien
gatggtatgatagatatagtgaggggtaaacaa

SEQ ID NO: 1036825 - DNA, 33 bp, Homo sapien
aggtagttctttaccaccattagtatttacact

SEQ ID NO: 1036826 - DNA, 33 bp, Homo sapien
aggtagttctttaccatcattagtatttacact

SEQ ID NO: 1036827 - DNA, 33 bp, Homo sapien
aacacttctcatttcaaacaagtagaataaagt

SEQ ID NO: 1036828 - DNA, 33 bp, Homo sapien
aacacttctcatttcagacaagtagaataaagt

SEQ ID NO: 1036829 - DNA, 33 bp, Homo sapien
tcagaagattgatcataaccaattcttttgtgt

SEQ ID NO: 1036830 - DNA, 33 bp, Homo sapien
tcagaagattgatcattaccaattcttttgtgt

SEQ ID NO: 1036831 - DNA, 33 bp, Homo sapien
attccacaggacattcaagaccttgttgatggg

SEQ ID NO: 1036832 - DNA, 33 bp, Homo sapien
attccacaggacattcgagaccttgttgatggg

SEQ ID NO: 1036833 - DNA, 33 bp, Homo sapien
ctttccatatgtcatacccttaaaaaagagagt

SEQ ID NO: 1036834 - DNA, 33 bp, Homo sapien
ctttccatatgtcatatccttaaaaaagagagt

SEQ ID NO: 1036835 - DNA, 33 bp, Homo sapien
tggcatgaagaaactgaaaggcaaactcttttc

SEQ ID NO: 1036836 - DNA, 33 bp, Homo sapien
tggcatgaagaaactgtaaggcaaactcttttc

SEQ ID NO: 1036837 - DNA, 33 bp, Homo sapien
ttataggaggtgttacaggagtgttataggagg

SEQ ID NO: 1036838 - DNA, 33 bp, Homo sapien
ttataggaggtgttacgggagtgttataggagg

SEQ ID NO: 1036839 - DNA, 33 bp, Homo sapien
tggctgaggatacaaacggagacactttgtaaa

SEQ ID NO: 1036840 - DNA, 33 bp, Homo sapien
tggctgaggatacaaatggagacactttgtaaa

SEQ ID NO: 1036841 - DNA, 33 bp, Homo sapien
atagtaactacatgctcaataaatgctattttc

SEQ ID NO: 1036842 - DNA, 33 bp, Homo sapien
atagtaactacatgcttaataaatgctattttc

SEQ ID NO: 1036843 - DNA, 33 bp, Homo sapien
tctaagcagagggtcacaacaactctattagat

SEQ ID NO: 1036844 - DNA, 33 bp, Homo sapien
tctaagcagagggtcataacaactctattagat

SEQ ID NO: 1036845 - DNA, 33 bp, Homo sapien
gatccaaatccacgaacccacatggcaattagc

SEQ ID NO: 1036846 - DNA, 33 bp, Homo sapien
gatccaaatccacgaatccacatggcaattagc

SEQ ID NO: 1036847 - DNA, 33 bp, Homo sapien
aacctgctcagtttcccgcttgaaaaaacagcc

SEQ ID NO: 1036848 - DNA, 33 bp, Homo sapien
aacctgctcagtttcctgcttgaaaaaacagcc

SEQ ID NO: 1036849 - DNA, 33 bp, Homo sapien
aaggagttagcattcaataattgtgtggtatcg

SEQ ID NO: 1036850 - DNA, 33 bp, Homo sapien
aaggagttagcattcagtaattgtgtggtatcg

SEQ ID NO: 1036851 - DNA, 33 bp, Homo sapien
atacagatgaataatacccagcccctctagagg

SEQ ID NO: 1036852 - DNA, 33 bp, Homo sapien
atacagatgaataatatccagcccctctagagg

SEQ ID NO: 1036853 - DNA, 33 bp, Homo sapien
catagaaaaagtgagtcagtgagacatatttga

SEQ ID NO: 1036854 - DNA, 33 bp, Homo sapien
catagaaaaagtgagttagtgagacatatttga

SEQ ID NO: 1036855 - DNA, 33 bp, Homo sapien
aaacctattattacaccctggcttcaagtgttg

SEQ ID NO: 1036856 - DNA, 33 bp, Homo sapien
aaacctattattacactctggcttcaagtgttg

SEQ ID NO: 1036857 - DNA, 33 bp, Homo sapien
cgtgttcatttgataactgaataagctcctgct

SEQ ID NO: 1036858 - DNA, 33 bp, Homo sapien
cgtgttcatttgataattgaataagctcctgct

SEQ ID NO: 1036859 - DNA, 33 bp, Homo sapien
ttccacttccacctgcagattaagaaagactta

SEQ ID NO: 1036860 - DNA, 33 bp, Homo sapien
ttccacttccacctgcggattaagaaagactta

SEQ ID NO: 1036861 - DNA, 33 bp, Homo sapien
catttggtaacagaagaaggctgttgacgttca

SEQ ID NO: 1036862 - DNA, 33 bp, Homo sapien
catttggtaacagaagcaggctgttgacgttca

SEQ ID NO: 1036863 - DNA, 33 bp, Homo sapien
aaaggcagatacccaaacatttttccaagcaaa

SEQ ID NO: 1036864 - DNA, 33 bp, Homo sapien
aaaggcagatacccaaccatttttccaagcaaa

SEQ ID NO: 1036865 - DNA, 33 bp, Homo sapien
ttcactctttcggtaaaaggtgttacactactc

SEQ ID NO: 1036866 - DNA, 33 bp, Homo sapien
ttcactctttcggtaataggtgttacactactc

SEQ ID NO: 1036867 - DNA, 33 bp, Homo sapien
taacattaacaaatcaataaacagaagacaatt

SEQ ID NO: 1036868 - DNA, 33 bp, Homo sapien
taacattaacaaatcagtaaacagaagacaatt

SEQ ID NO: 1036869 - DNA, 33 bp, Homo sapien
cctccacccactaacacataaaaattgcaaagg

SEQ ID NO: 1036870 - DNA, 33 bp, Homo sapien
cctccacccactaacatataaaaattgcaaagg

SEQ ID NO: 1036871 - DNA, 33 bp, Homo sapien
tttttgctttgtttacagggttatctggataac

SEQ ID NO: 1036872 - DNA, 33 bp, Homo sapien
tttttgctttgtttacggggttatctggataac

SEQ ID NO: 1036873 - DNA, 33 bp, Homo sapien
agatgacctgaaaaagcctatattagctagtgt

SEQ ID NO: 1036874 - DNA, 33 bp, Homo sapien
agatgacctgaaaaaggctatattagctagtgt

SEQ ID NO: 1036875 - DNA, 33 bp, Homo sapien
cgcatagggatactcaataggtattatttctcc

SEQ ID NO: 1036876 - DNA, 33 bp, Homo sapien
cgcatagggatactcagtaggtattatttctcc

SEQ ID NO: 1036877 - DNA, 33 bp, Homo sapien
ctaggaagagttgaaagaaatgggtcagtcaac

SEQ ID NO: 1036878 - DNA, 33 bp, Homo sapien
ctaggaagagttgaaataaatgggtcagtcaac

SEQ ID NO: 1036879 - DNA, 33 bp, Homo sapien
gtaaccttacacaagaccactttggttgctaga

SEQ ID NO: 1036880 - DNA, 33 bp, Homo sapien
gtaaccttacacaagatcactttggttgctaga

SEQ ID NO: 1036881 - DNA, 33 bp, Homo sapien
gaagtccaacttctccaagatctggcaagttca

SEQ ID NO: 1036882 - DNA, 33 bp, Homo sapien
gaagtccaacttctccgagatctggcaagttca

SEQ ID NO: 1036883 - DNA, 33 bp, Homo sapien
gtcttaactgaaaatacagtcaatgttaatacc

SEQ ID NO: 1036884 - DNA, 33 bp, Homo sapien
gtcttaactgaaaatatagtcaatgttaatacc

SEQ ID NO: 1036885 - DNA, 33 bp, Homo sapien
gaaatttagcaaagagcccagtgctggtgatct

SEQ ID NO: 1036886 - DNA, 33 bp, Homo sapien
gaaatttagcaaagagtccagtgctggtgatct

SEQ ID NO: 1036887 - DNA, 33 bp, Homo sapien
ttttccttaaagaacccgatggcataagaaggg

SEQ ID NO: 1036888 - DNA, 33 bp, Homo sapien
ttttccttaaagaacctgatggcataagaaggg

SEQ ID NO: 1036889 - DNA, 33 bp, Homo sapien
gggtctccctgctttgcgtcttgtgctctggta

SEQ ID NO: 1036890 - DNA, 33 bp, Homo sapien
gggtctccctgctttgtgtcttgtgctctggta

SEQ ID NO: 1036891 - DNA, 33 bp, Homo sapien
tccacctcacaatgccacagaaagactaaaggt

SEQ ID NO: 1036892 - DNA, 33 bp, Homo sapien
tccacctcacaatgccgcagaaagactaaaggt

SEQ ID NO: 1036893 - DNA, 33 bp, Homo sapien
tgacttttaatgggaaagcctaatattagacca

SEQ ID NO: 1036894 - DNA, 33 bp, Homo sapien
tgacttttaatgggaaggcctaatattagacca

SEQ ID NO: 1036895 - DNA, 33 bp, Homo sapien
cacttctctggttcagacccttgtcatccttca

SEQ ID NO: 1036896 - DNA, 33 bp, Homo sapien
cacttctctggttcaggcccttgtcatccttca

SEQ ID NO: 1036897 - DNA, 33 bp, Homo sapien
actaatttgacctcagaaatgtcttggggatcc

SEQ ID NO: 1036898 - DNA, 33 bp, Homo sapien
actaatttgacctcaggaatgtcttggggatcc

SEQ ID NO: 1036899 - DNA, 33 bp, Homo sapien
gaagaatcagagtgaacgaaaagggagtcaacc

SEQ ID NO: 1036900 - DNA, 33 bp, Homo sapien
gaagaatcagagtgaatgaaaagggagtcaacc

SEQ ID NO: 1036901 - DNA, 33 bp, Homo sapien
ctaactttctcatcaacctaagagggtagacac

SEQ ID NO: 1036902 - DNA, 33 bp, Homo sapien
ctaactttctcatcaatctaagagggtagacac

SEQ ID NO: 1036903 - DNA, 33 bp, Homo sapien
tgcagttatttgtgtaagtgtccaactaacttt

SEQ ID NO: 1036904 - DNA, 33 bp, Homo sapien
tgcagttatttgtgtatgtgtccaactaacttt

SEQ ID NO: 1036905 - DNA, 33 bp, Homo sapien
ggtgcctacaaagcaacgaggccctttgagaga

SEQ ID NO: 1036906 - DNA, 33 bp, Homo sapien
ggtgcctacaaagcaatgaggccctttgagaga

SEQ ID NO: 1036907 - DNA, 33 bp, Homo sapien
tcctcacctgtcctggcagagaataatgttgag

SEQ ID NO: 1036908 - DNA, 33 bp, Homo sapien
tcctcacctgtcctggtagagaataatgttgag

SEQ ID NO: 1036909 - DNA, 33 bp, Homo sapien
aaagatgagtgaatcaatctagctgaagggata

SEQ ID NO: 1036910 - DNA, 33 bp, Homo sapien
aaagatgagtgaatcagtctagctgaagggata

SEQ ID NO: 1036911 - DNA, 33 bp, Homo sapien
ttgtcagatcccttcaacaactgtctgctggat

SEQ ID NO: 1036912 - DNA, 33 bp, Homo sapien
ttgtcagatcccttcagcaactgtctgctggat

SEQ ID NO: 1036913 - DNA, 33 bp, Homo sapien
ctttctgtgcatcaaacctaattcaggggtgaa

SEQ ID NO: 1036914 - DNA, 33 bp, Homo sapien
ctttctgtgcatcaaagctaattcaggggtgaa

SEQ ID NO: 1036915 - DNA, 33 bp, Homo sapien
aagtgacttgtctaaaattgtccaggtaatacc

SEQ ID NO: 1036916 - DNA, 33 bp, Homo sapien
aagtgacttgtctaaagttgtccaggtaatacc

SEQ ID NO: 1036917 - DNA, 33 bp, Homo sapien
gcattgtgatctgatacctgatgtgcttatggc

SEQ ID NO: 1036918 - DNA, 33 bp, Homo sapien
gcattgtgatctgatatctgatgtgcttatggc

SEQ ID NO: 1036919 - DNA, 33 bp, Homo sapien
ttctattggtgagaagaaagtcacagggcccct

SEQ ID NO: 1036920 - DNA, 33 bp, Homo sapien
ttctattggtgagaagcaagtcacagggcccct

SEQ ID NO: 1036921 - DNA, 33 bp, Homo sapien
tgttcttgtttaggcaactgacaaatccctcaa

SEQ ID NO: 1036922 - DNA, 33 bp, Homo sapien
tgttcttgtttaggcagctgacaaatccctcaa

SEQ ID NO: 1036923 - DNA, 33 bp, Homo sapien
tggagtgattaagccaaaaactccatagaggtc

SEQ ID NO: 1036924 - DNA, 33 bp, Homo sapien
tggagtgattaagccacaaactccatagaggtc

SEQ ID NO: 1036925 - DNA, 33 bp, Homo sapien
tatctggaatggtagaataatttaggggaagag

SEQ ID NO: 1036926 - DNA, 33 bp, Homo sapien
tatctggaatggtagagtaatttaggggaagag

SEQ ID NO: 1036927 - DNA, 33 bp, Homo sapien
tttaaataattttgtggatggaaccaagtttgt

SEQ ID NO: 1036928 - DNA, 33 bp, Homo sapien
tttaaataattttgtgtatggaaccaagtttgt

SEQ ID NO: 1036929 - DNA, 33 bp, Homo sapien
attttgcctgagaaaaaatatgtaattctagct

SEQ ID NO: 1036930 - DNA, 33 bp, Homo sapien
attttgcctgagaaaagatatgtaattctagct

SEQ ID NO: 1036931 - DNA, 33 bp, Homo sapien
ttctcacggttctgtacgccagaagtatgaatc

SEQ ID NO: 1036932 - DNA, 33 bp, Homo sapien
ttctcacggttctgtatgccagaagtatgaatc

SEQ ID NO: 1036933 - DNA, 33 bp, Homo sapien
tgcccctgattgagaaatactcctttgaagatt

SEQ ID NO: 1036934 - DNA, 33 bp, Homo sapien
tgcccctgattgagaactactcctttgaagatt

SEQ ID NO: 1036935 - DNA, 33 bp, Homo sapien
agggcaaaagatgatacaggcaataaaatggaa

SEQ ID NO: 1036936 - DNA, 33 bp, Homo sapien
agggcaaaagatgatagaggcaataaaatggaa

SEQ ID NO: 1036937 - DNA, 33 bp, Homo sapien
tgtacatagatgaaacacaccaattaaaacgca

SEQ ID NO: 1036938 - DNA, 33 bp, Homo sapien
tgtacatagatgaaacccaccaattaaaacgca

SEQ ID NO: 1036939 - DNA, 33 bp, Homo sapien
cacaatcacagctggaaattttaacattcttct

SEQ ID NO: 1036940 - DNA, 33 bp, Homo sapien
cacaatcacagctggagattttaacattcttct

SEQ ID NO: 1036941 - DNA, 33 bp, Homo sapien
cctcattcctcttaccaatcaaatctctcttat

SEQ ID NO: 1036942 - DNA, 33 bp, Homo sapien
cctcattcctcttaccgatcaaatctctcttat

SEQ ID NO: 1036943 - DNA, 33 bp, Homo sapien
gccagtattatggaaacgtaggtcatgcaagtt

SEQ ID NO: 1036944 - DNA, 33 bp, Homo sapien
gccagtattatggaaaggtaggtcatgcaagtt

SEQ ID NO: 1036945 - DNA, 33 bp, Homo sapien
cctctagtcttggcaccgaattagtaaccagca

SEQ ID NO: 1036946 - DNA, 33 bp, Homo sapien
cctctagtcttggcactgaattagtaaccagca

SEQ ID NO: 1036947 - DNA, 33 bp, Homo sapien
catttattacgtagacacgaggctcatcctcta

SEQ ID NO: 1036948 - DNA, 33 bp, Homo sapien
catttattacgtagacgcgaggctcatcctcta

SEQ ID NO: 1036949 - DNA, 33 bp, Homo sapien
aagtggactccagtccaaggaagaatctctctt

SEQ ID NO: 1036950 - DNA, 33 bp, Homo sapien
aagtggactccagtccgaggaagaatctctctt

SEQ ID NO: 1036951 - DNA, 33 bp, Homo sapien
tccatggctttccttacccagcatcaggaggcc

SEQ ID NO: 1036952 - DNA, 33 bp, Homo sapien
tccatggctttccttatccagcatcaggaggcc

SEQ ID NO: 1036953 - DNA, 33 bp, Homo sapien
tgttcagcagaggttcgcaaagtttagcaggca

SEQ ID NO: 1036954 - DNA, 33 bp, Homo sapien
tgttcagcagaggttctcaaagtttagcaggca

SEQ ID NO: 1036955 - DNA, 33 bp, Homo sapien
ctcagagttccctgtggaatgggaaactgaacc

SEQ ID NO: 1036956 - DNA, 33 bp, Homo sapien
ctcagagttccctgtgtaatgggaaactgaacc

SEQ ID NO: 1036957 - DNA, 33 bp, Homo sapien
ccatattcttgctgcaatcaacatcaaatacct

SEQ ID NO: 1036958 - DNA, 33 bp, Homo sapien
ccatattcttgctgcagtcaacatcaaatacct

SEQ ID NO: 1036959 - DNA, 33 bp, Homo sapien
acatgagtgtcactgcaatttatgagtgttgtg

SEQ ID NO: 1036960 - DNA, 33 bp, Homo sapien
acatgagtgtcactgcgatttatgagtgttgtg

SEQ ID NO: 1036961 - DNA, 33 bp, Homo sapien
tccatgcaacacatcacaatctgtaatctgctg

SEQ ID NO: 1036962 - DNA, 33 bp, Homo sapien
tccatgcaacacatcataatctgtaatctgctg

SEQ ID NO: 1036963 - DNA, 33 bp, Homo sapien
aggccttctgtatctacgggttccacatccatg

SEQ ID NO: 1036964 - DNA, 33 bp, Homo sapien
aggccttctgtatctatgggttccacatccatg

SEQ ID NO: 1036965 - DNA, 33 bp, Homo sapien
tcatcttccttttagaccatcagagacaaagtt

SEQ ID NO: 1036966 - DNA, 33 bp, Homo sapien
tcatcttccttttagatcatcagagacaaagtt

SEQ ID NO: 1036967 - DNA, 33 bp, Homo sapien
caagggtgaataggaactctacaggcaaatatg

SEQ ID NO: 1036968 - DNA, 33 bp, Homo sapien
caagggtgaataggaagtctacaggcaaatatg

SEQ ID NO: 1036969 - DNA, 33 bp, Homo sapien
gtgaggtggactgtcccgcaaagagaaggaaac

SEQ ID NO: 1036970 - DNA, 33 bp, Homo sapien
gtgaggtggactgtcctgcaaagagaaggaaac

SEQ ID NO: 1036971 - DNA, 33 bp, Homo sapien
taataactactatacaacaatgataatagacaa

SEQ ID NO: 1036972 - DNA, 33 bp, Homo sapien
taataactactatacagcaatgataatagacaa

SEQ ID NO: 1036973 - DNA, 33 bp, Homo sapien
cttgatgaattttcacaatgtgggccagatcaa

SEQ ID NO: 1036974 - DNA, 33 bp, Homo sapien
cttgatgaattttcacgatgtgggccagatcaa

SEQ ID NO: 1036975 - DNA, 33 bp, Homo sapien
aagactctctcctccacgttactttgattataa

SEQ ID NO: 1036976 - DNA, 33 bp, Homo sapien
aagactctctcctccatgttactttgattataa

SEQ ID NO: 1036977 - DNA, 33 bp, Homo sapien
agaatttaagcaccaagagacaacaagggcagt

SEQ ID NO: 1036978 - DNA, 33 bp, Homo sapien
agaatttaagcaccaatagacaacaagggcagt

SEQ ID NO: 1036979 - DNA, 33 bp, Homo sapien
agagagagggtgcacaaggatggaagttctcat

SEQ ID NO: 1036980 - DNA, 33 bp, Homo sapien
agagagagggtgcacagggatggaagttctcat

SEQ ID NO: 1036981 - DNA, 33 bp, Homo sapien
ttctctctgccagctgaatatgggatctttata

SEQ ID NO: 1036982 - DNA, 33 bp, Homo sapien
ttctctctgccagctgcatatgggatctttata

SEQ ID NO: 1036983 - DNA, 33 bp, Homo sapien
tcctcttgggcaccagacaagaattcaggatgt

SEQ ID NO: 1036984 - DNA, 33 bp, Homo sapien
tcctcttgggcaccagtcaagaattcaggatgt

SEQ ID NO: 1036985 - DNA, 33 bp, Homo sapien
cccttcaccctcactgacagaaggcagccaccc

SEQ ID NO: 1036986 - DNA, 33 bp, Homo sapien
cccttcaccctcactggcagaaggcagccaccc

SEQ ID NO: 1036987 - DNA, 33 bp, Homo sapien
cagccaccccatgcaacgaggcaaagggtccac

SEQ ID NO: 1036988 - DNA, 33 bp, Homo sapien
cagccaccccatgcaatgaggcaaagggtccac

SEQ ID NO: 1036989 - DNA, 33 bp, Homo sapien
tttcctctgaaggcaaatgacccaccaaacctc

SEQ ID NO: 1036990 - DNA, 33 bp, Homo sapien
tttcctctgaaggcaagtgacccaccaaacctc

SEQ ID NO: 1036991 - DNA, 33 bp, Homo sapien
gagctgcagaggacagaacgtgaccctaccacc

SEQ ID NO: 1036992 - DNA, 33 bp, Homo sapien
gagctgcagaggacaggacgtgaccctaccacc

SEQ ID NO: 1036993 - DNA, 33 bp, Homo sapien
ctaagaacagatggaaatcacattgttctgaat

SEQ ID NO: 1036994 - DNA, 33 bp, Homo sapien
ctaagaacagatggaagtcacattgttctgaat

SEQ ID NO: 1036995 - DNA, 33 bp, Homo sapien
gcttgaacatgactgcaaacagatagtagtaca

SEQ ID NO: 1036996 - DNA, 33 bp, Homo sapien
gcttgaacatgactgcgaacagatagtagtaca

SEQ ID NO: 1036997 - DNA, 33 bp, Homo sapien
atgatattatcaaaagaaacctcaggaaactgt

SEQ ID NO: 1036998 - DNA, 33 bp, Homo sapien
atgatattatcaaaaggaacctcaggaaactgt

SEQ ID NO: 1036999 - DNA, 33 bp, Homo sapien
tcagaatccttcaacacagctctctagaaagcc

SEQ ID NO: 1037000 - DNA, 33 bp, Homo sapien
tcagaatccttcaacatagctctctagaaagcc

SEQ ID NO: 1037001 - DNA, 33 bp, Homo sapien
acactttaggctcttagaactcattttctatcc

SEQ ID NO: 1037002 - DNA, 33 bp, Homo sapien
acactttaggctcttataactcattttctatcc

SEQ ID NO: 1037003 - DNA, 33 bp, Homo sapien
acaaaactagtaaacaccagtggctacttttgg

SEQ ID NO: 1037004 - DNA, 33 bp, Homo sapien
acaaaactagtaaacagcagtggctacttttgg

SEQ ID NO: 1037005 - DNA, 33 bp, Homo sapien
ttgtattgctgggtcaaattagttctgcgttct

SEQ ID NO: 1037006 - DNA, 33 bp, Homo sapien
ttgtattgctgggtcacattagttctgcgttct

SEQ ID NO: 1037007 - DNA, 33 bp, Homo sapien
aacctgatactgaacaaccaaagaaataagcag

SEQ ID NO: 1037008 - DNA, 33 bp, Homo sapien
aacctgatactgaacagccaaagaaataagcag

SEQ ID NO: 1037009 - DNA, 33 bp, Homo sapien
ggtgaggtgctttgagaaaacagaatacaatga

SEQ ID NO: 1037010 - DNA, 33 bp, Homo sapien
ggtgaggtgctttgaggaaacagaatacaatga

SEQ ID NO: 1037011 - DNA, 33 bp, Homo sapien
agtaaggattcagcgaaggaaagtggcctccat

SEQ ID NO: 1037012 - DNA, 33 bp, Homo sapien
agtaaggattcagcgagggaaagtggcctccat

SEQ ID NO: 1037013 - DNA, 33 bp, Homo sapien
ggaagagagctgctccaggacaaggagcttctt

SEQ ID NO: 1037014 - DNA, 33 bp, Homo sapien
ggaagagagctgctccgggacaaggagcttctt

SEQ ID NO: 1037015 - DNA, 33 bp, Homo sapien
acctcctggtgaggtgcaattagccattcaagc

SEQ ID NO: 1037016 - DNA, 33 bp, Homo sapien
acctcctggtgaggtgtaattagccattcaagc

SEQ ID NO: 1037017 - DNA, 33 bp, Homo sapien
aaatgctccagcaatgccactaggggtgaaatc

SEQ ID NO: 1037018 - DNA, 33 bp, Homo sapien
aaatgctccagcaatggcactaggggtgaaatc

SEQ ID NO: 1037019 - DNA, 33 bp, Homo sapien
agatcattccttttacaggcacgtggatggagc

SEQ ID NO: 1037020 - DNA, 33 bp, Homo sapien
agatcattccttttaccggcacgtggatggagc

SEQ ID NO: 1037021 - DNA, 33 bp, Homo sapien
acatagactgggcactcaggtacaaacagaatt

SEQ ID NO: 1037022 - DNA, 33 bp, Homo sapien
acatagactgggcactgaggtacaaacagaatt

SEQ ID NO: 1037023 - DNA, 33 bp, Homo sapien
agtaggtttcagagaaagtgatcaattctgttt

SEQ ID NO: 1037024 - DNA, 33 bp, Homo sapien
agtaggtttcagagaaggtgatcaattctgttt

SEQ ID NO: 1037025 - DNA, 33 bp, Homo sapien
tgcaagtttcaaactgcaatcatctgaaaaact

SEQ ID NO: 1037026 - DNA, 33 bp, Homo sapien
tgcaagtttcaaactggaatcatctgaaaaact

SEQ ID NO: 1037027 - DNA, 33 bp, Homo sapien
gcaccacttttagagaaagaattcaacttcttt

SEQ ID NO: 1037028 - DNA, 33 bp, Homo sapien
gcaccacttttagagagagaattcaacttcttt

SEQ ID NO: 1037029 - DNA, 33 bp, Homo sapien
ccatgagggaagccctcaaatgtcagagtaaga

SEQ ID NO: 1037030 - DNA, 33 bp, Homo sapien
ccatgagggaagccctgaaatgtcagagtaaga

SEQ ID NO: 1037031 - DNA, 33 bp, Homo sapien
ggtggtgaagagtcaacagaaaaaggggaagag

SEQ ID NO: 1037032 - DNA, 33 bp, Homo sapien
ggtggtgaagagtcaagagaaaaaggggaagag

SEQ ID NO: 1037033 - DNA, 33 bp, Homo sapien
gatggaatgttctagaaggaactgaagggtcca

SEQ ID NO: 1037034 - DNA, 33 bp, Homo sapien
gatggaatgttctagagggaactgaagggtcca

SEQ ID NO: 1037035 - DNA, 33 bp, Homo sapien
tctctgaagccattaaatggtcttgggtctact

SEQ ID NO: 1037036 - DNA, 33 bp, Homo sapien
tctctgaagccattaattggtcttgggtctact

SEQ ID NO: 1037037 - DNA, 33 bp, Homo sapien
tgtgtgtgtgtcaccaccatccacttagcagct

SEQ ID NO: 1037038 - DNA, 33 bp, Homo sapien
tgtgtgtgtgtcaccatcatccacttagcagct

SEQ ID NO: 1037039 - DNA, 33 bp, Homo sapien
accacagcctttccaactcttgaatatgctgga

SEQ ID NO: 1037040 - DNA, 33 bp, Homo sapien
accacagcctttccaattcttgaatatgctgga

SEQ ID NO: 1037041 - DNA, 33 bp, Homo sapien
ctccttttacttcaccactgagtttcacatgtt

SEQ ID NO: 1037042 - DNA, 33 bp, Homo sapien
ctccttttacttcaccgctgagtttcacatgtt

SEQ ID NO: 1037043 - DNA, 33 bp, Homo sapien
tatattttaaggcagacgctgcacgtgtgaagt

SEQ ID NO: 1037044 - DNA, 33 bp, Homo sapien
tatattttaaggcagatgctgcacgtgtgaagt

SEQ ID NO: 1037045 - DNA, 33 bp, Homo sapien
tgctccaggtaaaacaaaagactccgcaggaat

SEQ ID NO: 1037046 - DNA, 33 bp, Homo sapien
tgctccaggtaaaacacaagactccgcaggaat

SEQ ID NO: 1037047 - DNA, 33 bp, Homo sapien
cacgctggggggcctacgcagaaagcagtgtcc

SEQ ID NO: 1037048 - DNA, 33 bp, Homo sapien
cacgctggggggcctatgcagaaagcagtgtcc

SEQ ID NO: 1037049 - DNA, 33 bp, Homo sapien
ctgggagagatgcttaagccaggataaagaatt

SEQ ID NO: 1037050 - DNA, 33 bp, Homo sapien
ctgggagagatgcttaggccaggataaagaatt

SEQ ID NO: 1037051 - DNA, 33 bp, Homo sapien
taatatgtcatgtagactcaatcaaaattacca

SEQ ID NO: 1037052 - DNA, 33 bp, Homo sapien
taatatgtcatgtagattcaatcaaaattacca

SEQ ID NO: 1037053 - DNA, 33 bp, Homo sapien
tccagaggatttacaaaattcttaccagcctca

SEQ ID NO: 1037054 - DNA, 33 bp, Homo sapien
tccagaggatttacaagattcttaccagcctca

SEQ ID NO: 1037055 - DNA, 33 bp, Homo sapien
acagccaactacaaaactaaccacagacctgcc

SEQ ID NO: 1037056 - DNA, 33 bp, Homo sapien
acagccaactacaaaattaaccacagacctgcc

SEQ ID NO: 1037057 - DNA, 33 bp, Homo sapien
agatctaatctgccacaagagaaaaagggtaat

SEQ ID NO: 1037058 - DNA, 33 bp, Homo sapien
agatctaatctgccacgagagaaaaagggtaat

SEQ ID NO: 1037059 - DNA, 33 bp, Homo sapien
gagtttacctgggcacactcttccaaaaccatg

SEQ ID NO: 1037060 - DNA, 33 bp, Homo sapien
gagtttacctgggcactctcttccaaaaccatg

SEQ ID NO: 1037061 - DNA, 33 bp, Homo sapien
tctaaagacactgcatgactcaaacataagtca

SEQ ID NO: 1037062 - DNA, 33 bp, Homo sapien
tctaaagacactgcattactcaaacataagtca

SEQ ID NO: 1037063 - DNA, 33 bp, Homo sapien
ggccacctccccgtgccctgcaagacgcagttt

SEQ ID NO: 1037064 - DNA, 33 bp, Homo sapien
ggccacctccccgtgctctgcaagacgcagttt

SEQ ID NO: 1037065 - DNA, 33 bp, Homo sapien
agcatggaatgtcatgaaaacagcaccaagagc

SEQ ID NO: 1037066 - DNA, 33 bp, Homo sapien
agcatggaatgtcatgcaaacagcaccaagagc

SEQ ID NO: 1037067 - DNA, 33 bp, Homo sapien
tgctctcctgaaatgaacacattaaaacaaaca

SEQ ID NO: 1037068 - DNA, 33 bp, Homo sapien
tgctctcctgaaatgatcacattaaaacaaaca

SEQ ID NO: 1037069 - DNA, 33 bp, Homo sapien
tcctgacgggaataaaatagaccttgtctgcga

SEQ ID NO: 1037070 - DNA, 33 bp, Homo sapien
tcctgacgggaataaactagaccttgtctgcga

SEQ ID NO: 1037071 - DNA, 33 bp, Homo sapien
agtacaaagtaagctacagtaaatgacagctta

SEQ ID NO: 1037072 - DNA, 33 bp, Homo sapien
agtacaaagtaagctagagtaaatgacagctta

SEQ ID NO: 1037073 - DNA, 33 bp, Homo sapien
tttcaagaaaagtttcactttgagccttatggt

SEQ ID NO: 1037074 - DNA, 33 bp, Homo sapien
tttcaagaaaagtttcgctttgagccttatggt

SEQ ID NO: 1037075 - DNA, 33 bp, Homo sapien
gaataaagctaacagaaaactatcaaggaaagg

SEQ ID NO: 1037076 - DNA, 33 bp, Homo sapien
gaataaagctaacagagaactatcaaggaaagg

SEQ ID NO: 1037077 - DNA, 33 bp, Homo sapien
aactgcaattgaaaccacacacattatgtgaaa

SEQ ID NO: 1037078 - DNA, 33 bp, Homo sapien
aactgcaattgaaaccgcacacattatgtgaaa

SEQ ID NO: 1037079 - DNA, 33 bp, Homo sapien
ttttattgttgacaacccattcccatacctgcc

SEQ ID NO: 1037080 - DNA, 33 bp, Homo sapien
ttttattgttgacaactcattcccatacctgcc

SEQ ID NO: 1037081 - DNA, 33 bp, Homo sapien
catatactgcaaatgacgtgatatttgacgcaa

SEQ ID NO: 1037082 - DNA, 33 bp, Homo sapien
catatactgcaaatgatgtgatatttgacgcaa

SEQ ID NO: 1037083 - DNA, 33 bp, Homo sapien
aaatgtagtcaggtacaaaataggatatataga

SEQ ID NO: 1037084 - DNA, 33 bp, Homo sapien
aaatgtagtcaggtacgaaataggatatataga

SEQ ID NO: 1037085 - DNA, 33 bp, Homo sapien
ttaacaagaaggttaaatctagttatgagccat

SEQ ID NO: 1037086 - DNA, 33 bp, Homo sapien
ttaacaagaaggttaagtctagttatgagccat

SEQ ID NO: 1037087 - DNA, 33 bp, Homo sapien
gcaaaatgacctagaaaccaaattataatgcca

SEQ ID NO: 1037088 - DNA, 33 bp, Homo sapien
gcaaaatgacctagaatccaaattataatgcca

SEQ ID NO: 1037089 - DNA, 33 bp, Homo sapien
cattcagacaaactacatgactggcttctccaa

SEQ ID NO: 1037090 - DNA, 33 bp, Homo sapien
cattcagacaaactacctgactggcttctccaa

SEQ ID NO: 1037091 - DNA, 33 bp, Homo sapien
aggcatagaactgttaccagatggctgaattta

SEQ ID NO: 1037092 - DNA, 33 bp, Homo sapien
aggcatagaactgttatcagatggctgaattta

SEQ ID NO: 1037093 - DNA, 33 bp, Homo sapien
gttcttattttagagacgaggctgagcaggaag

SEQ ID NO: 1037094 - DNA, 33 bp, Homo sapien
gttcttattttagagatgaggctgagcaggaag

SEQ ID NO: 1037095 - DNA, 33 bp, Homo sapien
agtaaaactgcctagaaccttcaggaaatgaat

SEQ ID NO: 1037096 - DNA, 33 bp, Homo sapien
agtaaaactgcctagagccttcaggaaatgaat

SEQ ID NO: 1037097 - DNA, 33 bp, Homo sapien
caagcagcttttcagaagcaaatggtaagtttg

SEQ ID NO: 1037098 - DNA, 33 bp, Homo sapien
caagcagcttttcagatgcaaatggtaagtttg

SEQ ID NO: 1037099 - DNA, 33 bp, Homo sapien
agaatgaaataaatggaacagatttgattgagt

SEQ ID NO: 1037100 - DNA, 33 bp, Homo sapien
agaatgaaataaatgggacagatttgattgagt

SEQ ID NO: 1037101 - DNA, 33 bp, Homo sapien
gatttctcagagttgacggagcaagaaggcagg

SEQ ID NO: 1037102 - DNA, 33 bp, Homo sapien
gatttctcagagttgatggagcaagaaggcagg

SEQ ID NO: 1037103 - DNA, 33 bp, Homo sapien
tgctactggattctaaagttcattggatctgtc

SEQ ID NO: 1037104 - DNA, 33 bp, Homo sapien
tgctactggattctaaggttcattggatctgtc

SEQ ID NO: 1037105 - DNA, 33 bp, Homo sapien
gtcatcactactatccaataactatattctagg

SEQ ID NO: 1037106 - DNA, 33 bp, Homo sapien
gtcatcactactatccgataactatattctagg

SEQ ID NO: 1037107 - DNA, 33 bp, Homo sapien
atgtacataattcttccacttaccattggcttt

SEQ ID NO: 1037108 - DNA, 33 bp, Homo sapien
atgtacataattcttctacttaccattggcttt

SEQ ID NO: 1037109 - DNA, 33 bp, Homo sapien
tcacctcgtcttccttcaaacacgtcattgatt

SEQ ID NO: 1037110 - DNA, 33 bp, Homo sapien
tcacctcgtcttccttgaaacacgtcattgatt

SEQ ID NO: 1037111 - DNA, 33 bp, Homo sapien
ggagcaattctcttcactcaagtaaaactctgt

SEQ ID NO: 1037112 - DNA, 33 bp, Homo sapien
ggagcaattctcttcattcaagtaaaactctgt

SEQ ID NO: 1037113 - DNA, 33 bp, Homo sapien
aaatggtttttcataactagagtccaaatatac

SEQ ID NO: 1037114 - DNA, 33 bp, Homo sapien
aaatggtttttcataattagagtccaaatatac

SEQ ID NO: 1037115 - DNA, 33 bp, Homo sapien
ttataacactcagatacgacacaatacagaagg

SEQ ID NO: 1037116 - DNA, 33 bp, Homo sapien
ttataacactcagataggacacaatacagaagg

SEQ ID NO: 1037117 - DNA, 33 bp, Homo sapien
ttactgaaaatcttgacgcttaaaacagaaaat

SEQ ID NO: 1037118 - DNA, 33 bp, Homo sapien
ttactgaaaatcttgatgcttaaaacagaaaat

SEQ ID NO: 1037119 - DNA, 33 bp, Homo sapien
gagccaggcattccacacaaagtcaataaaacc

SEQ ID NO: 1037120 - DNA, 33 bp, Homo sapien
gagccaggcattccacccaaagtcaataaaacc

SEQ ID NO: 1037121 - DNA, 33 bp, Homo sapien
ttatattcttgaagacagtcaagggctcaagac

SEQ ID NO: 1037122 - DNA, 33 bp, Homo sapien
ttatattcttgaagacggtcaagggctcaagac

SEQ ID NO: 1037123 - DNA, 33 bp, Homo sapien
tggattgcaaagtggaaagacagagagccctgg

SEQ ID NO: 1037124 - DNA, 33 bp, Homo sapien
tggattgcaaagtggagagacagagagccctgg

SEQ ID NO: 1037125 - DNA, 33 bp, Homo sapien
ctatagatggcgaggaactattagagggaggtg

SEQ ID NO: 1037126 - DNA, 33 bp, Homo sapien
ctatagatggcgaggagctattagagggaggtg

SEQ ID NO: 1037127 - DNA, 33 bp, Homo sapien
atgataattatccacaactacaaaatttctgta

SEQ ID NO: 1037128 - DNA, 33 bp, Homo sapien
atgataattatccacagctacaaaatttctgta

SEQ ID NO: 1037129 - DNA, 33 bp, Homo sapien
tcactggattgttgtacgacattatagggtaat

SEQ ID NO: 1037130 - DNA, 33 bp, Homo sapien
tcactggattgttgtatgacattatagggtaat

SEQ ID NO: 1037131 - DNA, 33 bp, Homo sapien
cctattttacaaatgaagaagttggacatcaag

SEQ ID NO: 1037132 - DNA, 33 bp, Homo sapien
cctattttacaaatgaggaagttggacatcaag

SEQ ID NO: 1037133 - DNA, 33 bp, Homo sapien
aaagaaaaaaaaacacacatgtattcacataca

SEQ ID NO: 1037134 - DNA, 33 bp, Homo sapien
aaagaaaaaaaaacacgcatgtattcacataca

SEQ ID NO: 1037135 - DNA, 33 bp, Homo sapien
tctggttttggtctaccagtttcaaccccagca

SEQ ID NO: 1037136 - DNA, 33 bp, Homo sapien
tctggttttggtctactagtttcaaccccagca

SEQ ID NO: 1037137 - DNA, 33 bp, Homo sapien
gctatccagagctttcaacctcagggtttatag

SEQ ID NO: 1037138 - DNA, 33 bp, Homo sapien
gctatccagagctttcgacctcagggtttatag

SEQ ID NO: 1037139 - DNA, 33 bp, Homo sapien
tctaatctaacccctcacagcctgaatttctga

SEQ ID NO: 1037140 - DNA, 33 bp, Homo sapien
tctaatctaacccctctcagcctgaatttctga

SEQ ID NO: 1037141 - DNA, 33 bp, Homo sapien
acatttagcagcttaacgtacatttacgataca

SEQ ID NO: 1037142 - DNA, 33 bp, Homo sapien
acatttagcagcttaatgtacatttacgataca

SEQ ID NO: 1037143 - DNA, 33 bp, Homo sapien
gggtgatggagcggaaaaaaaagctttaagcat

SEQ ID NO: 1037144 - DNA, 33 bp, Homo sapien
gggtgatggagcggaataaaaagctttaagcat

SEQ ID NO: 1037145 - DNA, 33 bp, Homo sapien
agctcctcctcaacaacttccaacaaaacaagt

SEQ ID NO: 1037146 - DNA, 33 bp, Homo sapien
agctcctcctcaacaatttccaacaaaacaagt

SEQ ID NO: 1037147 - DNA, 33 bp, Homo sapien
ctctggaagggaatgaccttgaagcagggtcct

SEQ ID NO: 1037148 - DNA, 33 bp, Homo sapien
ctctggaagggaatgatcttgaagcagggtcct

SEQ ID NO: 1037149 - DNA, 33 bp, Homo sapien
agctattttgacaacaagttgctccctgccaat

SEQ ID NO: 1037150 - DNA, 33 bp, Homo sapien
agctattttgacaacacgttgctccctgccaat

SEQ ID NO: 1037151 - DNA, 33 bp, Homo sapien
gaagattttgttaaggaaaagaaagatggtgaa

SEQ ID NO: 1037152 - DNA, 33 bp, Homo sapien
gaagattttgttaaggcaaagaaagatggtgaa

SEQ ID NO: 1037153 - DNA, 33 bp, Homo sapien
agctgtagttgaaaaacaagacgttagcggcaa

SEQ ID NO: 1037154 - DNA, 33 bp, Homo sapien
agctgtagttgaaaaagaagacgttagcggcaa

SEQ ID NO: 1037155 - DNA, 33 bp, Homo sapien
tgaaggggaaagaataccagtgtctcaaagtca

SEQ ID NO: 1037156 - DNA, 33 bp, Homo sapien
tgaaggggaaagaatagcagtgtctcaaagtca

SEQ ID NO: 1037157 - DNA, 33 bp, Homo sapien
tatatatagactattacagagcaggattcctgt

SEQ ID NO: 1037158 - DNA, 33 bp, Homo sapien
tatatatagactattatagagcaggattcctgt

SEQ ID NO: 1037159 - DNA, 33 bp, Homo sapien
ggcactaaaggtgtgaatatccatgcctccttt

SEQ ID NO: 1037160 - DNA, 33 bp, Homo sapien
ggcactaaaggtgtgactatccatgcctccttt

SEQ ID NO: 1037161 - DNA, 33 bp, Homo sapien
gccagtatactatggaaccaagacataagctac

SEQ ID NO: 1037162 - DNA, 33 bp, Homo sapien
gccagtatactatggagccaagacataagctac

SEQ ID NO: 1037163 - DNA, 33 bp, Homo sapien
ttagtgacctgaggctcaaggttttgctgtttt

SEQ ID NO: 1037164 - DNA, 33 bp, Homo sapien
ttagtgacctgaggcttaaggttttgctgtttt

SEQ ID NO: 1037165 - DNA, 33 bp, Homo sapien
tgttggctataaacacaaatccttcctctattt

SEQ ID NO: 1037166 - DNA, 33 bp, Homo sapien
tgttggctataaacacgaatccttcctctattt

SEQ ID NO: 1037167 - DNA, 33 bp, Homo sapien
ctagattagaattcataagaccagatcctaatt

SEQ ID NO: 1037168 - DNA, 33 bp, Homo sapien
ctagattagaattcatgagaccagatcctaatt

SEQ ID NO: 1037169 - DNA, 33 bp, Homo sapien
gatgaaccaactcccacaaagactgaatagaaa

SEQ ID NO: 1037170 - DNA, 33 bp, Homo sapien
gatgaaccaactcccagaaagactgaatagaaa

SEQ ID NO: 1037171 - DNA, 33 bp, Homo sapien
tttaaaatgacattccaaatgtttcaaatgtga

SEQ ID NO: 1037172 - DNA, 33 bp, Homo sapien
tttaaaatgacattccgaatgtttcaaatgtga

SEQ ID NO: 1037173 - DNA, 33 bp, Homo sapien
gcttccaaaaatcagagtacgttttaatcaata

SEQ ID NO: 1037174 - DNA, 33 bp, Homo sapien
gcttccaaaaatcagattacgttttaatcaata

SEQ ID NO: 1037175 - DNA, 33 bp, Homo sapien
ccacaaatgagtatgcaaatatatggctattat

SEQ ID NO: 1037176 - DNA, 33 bp, Homo sapien
ccacaaatgagtatgcgaatatatggctattat

SEQ ID NO: 1037177 - DNA, 33 bp, Homo sapien
ccagaaatctaacttacgctttcctctcagacc

SEQ ID NO: 1037178 - DNA, 33 bp, Homo sapien
ccagaaatctaacttaggctttcctctcagacc

SEQ ID NO: 1037179 - DNA, 33 bp, Homo sapien
tccttgtggtttttgaagtgctgaagggtatca

SEQ ID NO: 1037180 - DNA, 33 bp, Homo sapien
tccttgtggtttttgaggtgctgaagggtatca

SEQ ID NO: 1037181 - DNA, 33 bp, Homo sapien
ccataagtaccacgctaaaaaatcaacatctga

SEQ ID NO: 1037182 - DNA, 33 bp, Homo sapien
ccataagtaccacgctgaaaaatcaacatctga

SEQ ID NO: 1037183 - DNA, 33 bp, Homo sapien
agttactggcagagccaagtttagaacttcagg

SEQ ID NO: 1037184 - DNA, 33 bp, Homo sapien
agttactggcagagcccagtttagaacttcagg

SEQ ID NO: 1037185 - DNA, 33 bp, Homo sapien
tgcaaaaaagcttatcaatgacttttgatccaa

SEQ ID NO: 1037186 - DNA, 33 bp, Homo sapien
tgcaaaaaagcttatcgatgacttttgatccaa

SEQ ID NO: 1037187 - DNA, 33 bp, Homo sapien
aaatgtttcagtgaaaagcttatcaaatcaatt

SEQ ID NO: 1037188 - DNA, 33 bp, Homo sapien
aaatgtttcagtgaaaggcttatcaaatcaatt

SEQ ID NO: 1037189 - DNA, 33 bp, Homo sapien
accttgatgaaactgacgtgcctgggagagggc

SEQ ID NO: 1037190 - DNA, 33 bp, Homo sapien
accttgatgaaactgatgtgcctgggagagggc

SEQ ID NO: 1037191 - DNA, 33 bp, Homo sapien
cttctgctgcaaacctaagcaagactgaaaaac

SEQ ID NO: 1037192 - DNA, 33 bp, Homo sapien
cttctgctgcaaacctgagcaagactgaaaaac

SEQ ID NO: 1037193 - DNA, 33 bp, Homo sapien
aaattcttcctgttgaagtaattaaagttagtt

SEQ ID NO: 1037194 - DNA, 33 bp, Homo sapien
aaattcttcctgttgatgtaattaaagttagtt

SEQ ID NO: 1037195 - DNA, 33 bp, Homo sapien
ctgatatgctggaacaatctggctccaggagta

SEQ ID NO: 1037196 - DNA, 33 bp, Homo sapien
ctgatatgctggaacagtctggctccaggagta

SEQ ID NO: 1037197 - DNA, 33 bp, Homo sapien
tgtgtatataaacacacggagaaccacctaact

SEQ ID NO: 1037198 - DNA, 33 bp, Homo sapien
tgtgtatataaacacatggagaaccacctaact

SEQ ID NO: 1037199 - DNA, 33 bp, Homo sapien
gtccttgttctctaaacggaattggttatgttt

SEQ ID NO: 1037200 - DNA, 33 bp, Homo sapien
gtccttgttctctaaatggaattggttatgttt

SEQ ID NO: 1037201 - DNA, 33 bp, Homo sapien
ttatgaagtttcgtaacggccatcccgcttttc

SEQ ID NO: 1037202 - DNA, 33 bp, Homo sapien
ttatgaagtttcgtaatggccatcccgcttttc

SEQ ID NO: 1037203 - DNA, 33 bp, Homo sapien
ctaactttttaccaccaaagtagttggatcaaa

SEQ ID NO: 1037204 - DNA, 33 bp, Homo sapien
ctaactttttaccaccgaagtagttggatcaaa

SEQ ID NO: 1037205 - DNA, 33 bp, Homo sapien
aggctagattattaccgggaatcctgagttctg

SEQ ID NO: 1037206 - DNA, 33 bp, Homo sapien
aggctagattattacctggaatcctgagttctg

SEQ ID NO: 1037207 - DNA, 33 bp, Homo sapien
tattaggtatcagctaacagtgggctgtccaac

SEQ ID NO: 1037208 - DNA, 33 bp, Homo sapien
tattaggtatcagctagcagtgggctgtccaac

SEQ ID NO: 1037209 - DNA, 33 bp, Homo sapien
atgccttttcagggcccagcaacctattcggct

SEQ ID NO: 1037210 - DNA, 33 bp, Homo sapien
atgccttttcagggcctagcaacctattcggct

SEQ ID NO: 1037211 - DNA, 33 bp, Homo sapien
ctttcatttaaagaataagttgagccctgaaaa

SEQ ID NO: 1037212 - DNA, 33 bp, Homo sapien
ctttcatttaaagaatgagttgagccctgaaaa

SEQ ID NO: 1037213 - DNA, 33 bp, Homo sapien
gatgaggaaactacagcatttaaacatttggca

SEQ ID NO: 1037214 - DNA, 33 bp, Homo sapien
gatgaggaaactacaggatttaaacatttggca

SEQ ID NO: 1037215 - DNA, 33 bp, Homo sapien
actgggatagctactcaatgctcttcagtggct

SEQ ID NO: 1037216 - DNA, 33 bp, Homo sapien
actgggatagctactcgatgctcttcagtggct

SEQ ID NO: 1037217 - DNA, 33 bp, Homo sapien
aatctttctgtttccccgagagtcagattttga

SEQ ID NO: 1037218 - DNA, 33 bp, Homo sapien
aatctttctgtttccctgagagtcagattttga

SEQ ID NO: 1037219 - DNA, 33 bp, Homo sapien
cagggtatctccaactaagctatgaaatgggta

SEQ ID NO: 1037220 - DNA, 33 bp, Homo sapien
cagggtatctccaacttagctatgaaatgggta

SEQ ID NO: 1037221 - DNA, 33 bp, Homo sapien
attcctggtgacagctaaagaataatggtccag

SEQ ID NO: 1037222 - DNA, 33 bp, Homo sapien
attcctggtgacagctgaagaataatggtccag

SEQ ID NO: 1037223 - DNA, 33 bp, Homo sapien
tcactttactattccccaacgatgcctagaaca

SEQ ID NO: 1037224 - DNA, 33 bp, Homo sapien
tcactttactattccctaacgatgcctagaaca

SEQ ID NO: 1037225 - DNA, 33 bp, Homo sapien
ttgttagtgctggagccacatatgttcctttta

SEQ ID NO: 1037226 - DNA, 33 bp, Homo sapien
ttgttagtgctggagctacatatgttcctttta

SEQ ID NO: 1037227 - DNA, 33 bp, Homo sapien
aaaatagaatattttcaagatactgcacttctc

SEQ ID NO: 1037228 - DNA, 33 bp, Homo sapien
aaaatagaatattttcgagatactgcacttctc

SEQ ID NO: 1037229 - DNA, 33 bp, Homo sapien
ccatatttctgctccactggagaagtgcagtat

SEQ ID NO: 1037230 - DNA, 33 bp, Homo sapien
ccatatttctgctccattggagaagtgcagtat

SEQ ID NO: 1037231 - DNA, 33 bp, Homo sapien
catggtatgttctggaaggacctaaattattca

SEQ ID NO: 1037232 - DNA, 33 bp, Homo sapien
catggtatgttctggacggacctaaattattca

SEQ ID NO: 1037233 - DNA, 33 bp, Homo sapien
atgcccaccatgtagaaagtgattctgaggctg

SEQ ID NO: 1037234 - DNA, 33 bp, Homo sapien
atgcccaccatgtagatagtgattctgaggctg

SEQ ID NO: 1037235 - DNA, 33 bp, Homo sapien
actctttccctgtgaccctaaatgcagcctcag

SEQ ID NO: 1037236 - DNA, 33 bp, Homo sapien
actctttccctgtgactctaaatgcagcctcag

SEQ ID NO: 1037237 - DNA, 33 bp, Homo sapien
ggtatccctggtggaccatgactctttccctgt

SEQ ID NO: 1037238 - DNA, 33 bp, Homo sapien
ggtatccctggtggacgatgactctttccctgt

SEQ ID NO: 1037239 - DNA, 33 bp, Homo sapien
tctgtccacatggggcactccttgtctgcttcc

SEQ ID NO: 1037240 - DNA, 33 bp, Homo sapien
tctgtccacatggggcgctccttgtctgcttcc

SEQ ID NO: 1037241 - DNA, 33 bp, Homo sapien
cctgatatgtgaaccaagattttaatttaaaag

SEQ ID NO: 1037242 - DNA, 33 bp, Homo sapien
cctgatatgtgaaccatgattttaatttaaaag

SEQ ID NO: 1037243 - DNA, 33 bp, Homo sapien
gcaaatagtaaagcacagataaaaatataagga

SEQ ID NO: 1037244 - DNA, 33 bp, Homo sapien
gcaaatagtaaagcactgataaaaatataagga

SEQ ID NO: 1037245 - DNA, 33 bp, Homo sapien
gtacaagacactctacaataagctaacaaatat

SEQ ID NO: 1037246 - DNA, 33 bp, Homo sapien
gtacaagacactctacgataagctaacaaatat

SEQ ID NO: 1037247 - DNA, 33 bp, Homo sapien
tccacctcctttcttaacagttctctgcctctg

SEQ ID NO: 1037248 - DNA, 33 bp, Homo sapien
tccacctcctttcttagcagttctctgcctctg

SEQ ID NO: 1037249 - DNA, 33 bp, Homo sapien
catctccaggagttccacagggcacaatccatg

SEQ ID NO: 1037250 - DNA, 33 bp, Homo sapien
catctccaggagttccgcagggcacaatccatg

SEQ ID NO: 1037251 - DNA, 33 bp, Homo sapien
cactcaccgactacaacgtaaatgacattcact

SEQ ID NO: 1037252 - DNA, 33 bp, Homo sapien
cactcaccgactacaatgtaaatgacattcact

SEQ ID NO: 1037253 - DNA, 33 bp, Homo sapien
tatgcgactttggataagggaagttcattgcat

SEQ ID NO: 1037254 - DNA, 33 bp, Homo sapien
tatgcgactttggataggggaagttcattgcat

SEQ ID NO: 1037255 - DNA, 33 bp, Homo sapien
gtatatgtagcccacacagtagactcacaggta

SEQ ID NO: 1037256 - DNA, 33 bp, Homo sapien
gtatatgtagcccacagagtagactcacaggta

SEQ ID NO: 1037257 - DNA, 33 bp, Homo sapien
agagcatgattactgcactggtgttcaatcagg

SEQ ID NO: 1037258 - DNA, 33 bp, Homo sapien
agagcatgattactgctctggtgttcaatcagg

SEQ ID NO: 1037259 - DNA, 33 bp, Homo sapien
acatgacttgaggaaaactccttggtctttctg

SEQ ID NO: 1037260 - DNA, 33 bp, Homo sapien
acatgacttgaggaaagctccttggtctttctg

SEQ ID NO: 1037261 - DNA, 33 bp, Homo sapien
gcgattgttgaaatcagatctactgaaactcat

SEQ ID NO: 1037262 - DNA, 33 bp, Homo sapien
gcgattgttgaaatcatatctactgaaactcat

SEQ ID NO: 1037263 - DNA, 33 bp, Homo sapien
gtgtccactgaggtataaaagtactgagaaatc

SEQ ID NO: 1037264 - DNA, 33 bp, Homo sapien
gtgtccactgaggtatgaaagtactgagaaatc

SEQ ID NO: 1037265 - DNA, 33 bp, Homo sapien
gggtgaggtggaaagcagactgtagcatttact

SEQ ID NO: 1037266 - DNA, 33 bp, Homo sapien
gggtgaggtggaaagcggactgtagcatttact

SEQ ID NO: 1037267 - DNA, 33 bp, Homo sapien
ttctctgttagaaagacggctggggtgatacaa

SEQ ID NO: 1037268 - DNA, 33 bp, Homo sapien
ttctctgttagaaagatggctggggtgatacaa

SEQ ID NO: 1037269 - DNA, 33 bp, Homo sapien
tgttacttggtaggaaagtaaatattgggctta

SEQ ID NO: 1037270 - DNA, 33 bp, Homo sapien
tgttacttggtaggaaggtaaatattgggctta

SEQ ID NO: 1037271 - DNA, 33 bp, Homo sapien
tctgaagccaaaaataccacacgctttaagaca

SEQ ID NO: 1037272 - DNA, 33 bp, Homo sapien
tctgaagccaaaaatatcacacgctttaagaca

SEQ ID NO: 1037273 - DNA, 33 bp, Homo sapien
attgatacctgttttacggcacgtgggaaatct

SEQ ID NO: 1037274 - DNA, 33 bp, Homo sapien
attgatacctgttttatggcacgtgggaaatct

SEQ ID NO: 1037275 - DNA, 33 bp, Homo sapien
tggacatcataaatacaaatatctgaaattacc

SEQ ID NO: 1037276 - DNA, 33 bp, Homo sapien
tggacatcataaatacgaatatctgaaattacc

SEQ ID NO: 1037277 - DNA, 33 bp, Homo sapien
tggcaagtcaggaaatcaataacatgtgctctg

SEQ ID NO: 1037278 - DNA, 33 bp, Homo sapien
tggcaagtcaggaaattaataacatgtgctctg

SEQ ID NO: 1037279 - DNA, 33 bp, Homo sapien
tgattgggttgatgcactgacaggctcttccag

SEQ ID NO: 1037280 - DNA, 33 bp, Homo sapien
tgattgggttgatgcagtgacaggctcttccag

SEQ ID NO: 1037281 - DNA, 33 bp, Homo sapien
agcagcttgtttcaaaatcaacctctggcacag

SEQ ID NO: 1037282 - DNA, 33 bp, Homo sapien
agcagcttgtttcaaattcaacctctggcacag

SEQ ID NO: 1037283 - DNA, 33 bp, Homo sapien
tggccagcaagctctaagatcctgtggagaacg

SEQ ID NO: 1037284 - DNA, 33 bp, Homo sapien
tggccagcaagctctaggatcctgtggagaacg

SEQ ID NO: 1037285 - DNA, 33 bp, Homo sapien
atcacttgcaaaaactaaaaaggtcaataatgc

SEQ ID NO: 1037286 - DNA, 33 bp, Homo sapien
atcacttgcaaaaactgaaaaggtcaataatgc

SEQ ID NO: 1037287 - DNA, 33 bp, Homo sapien
gatgtcgctcataagcgctggggggctacgtgc

SEQ ID NO: 1037288 - DNA, 33 bp, Homo sapien
gatgtcgctcataagctctggggggctacgtgc

SEQ ID NO: 1037289 - DNA, 33 bp, Homo sapien
atagagacaaatggcacatttctgagaggagtt

SEQ ID NO: 1037290 - DNA, 33 bp, Homo sapien
atagagacaaatggcatatttctgagaggagtt

SEQ ID NO: 1037291 - DNA, 33 bp, Homo sapien
cttaatgacattgaaaccctggaactattcccc

SEQ ID NO: 1037292 - DNA, 33 bp, Homo sapien
cttaatgacattgaaatcctggaactattcccc

SEQ ID NO: 1037293 - DNA, 33 bp, Homo sapien
agcgtttctgaggagaccactctgtcccaagag

SEQ ID NO: 1037294 - DNA, 33 bp, Homo sapien
agcgtttctgaggagatcactctgtcccaagag

SEQ ID NO: 1037295 - DNA, 33 bp, Homo sapien
tctgtcccaagagtggccatgcccatcaacaaa

SEQ ID NO: 1037296 - DNA, 33 bp, Homo sapien
tctgtcccaagagtggtcatgcccatcaacaaa

SEQ ID NO: 1037297 - DNA, 33 bp, Homo sapien
ctgaaccaggaactgcacctggaaaactagcca

SEQ ID NO: 1037298 - DNA, 33 bp, Homo sapien
ctgaaccaggaactgcgcctggaaaactagcca

SEQ ID NO: 1037299 - DNA, 33 bp, Homo sapien
cctcaggccttcccgcgaagaggctgattcaag

SEQ ID NO: 1037300 - DNA, 33 bp, Homo sapien
cctcaggccttcccgctaagaggctgattcaag

SEQ ID NO: 1037301 - DNA, 33 bp, Homo sapien
tcttctcaaccctgacgctgtcttgaaccacca

SEQ ID NO: 1037302 - DNA, 33 bp, Homo sapien
tcttctcaaccctgactctgtcttgaaccacca

SEQ ID NO: 1037303 - DNA, 33 bp, Homo sapien
gcaggaaatgaagtcaataaaacctttaagcta

SEQ ID NO: 1037304 - DNA, 33 bp, Homo sapien
gcaggaaatgaagtcagtaaaacctttaagcta

SEQ ID NO: 1037305 - DNA, 33 bp, Homo sapien
caggaagaacttagaccgtatggagagtatgcc

SEQ ID NO: 1037306 - DNA, 33 bp, Homo sapien
caggaagaacttagactgtatggagagtatgcc

SEQ ID NO: 1037307 - DNA, 33 bp, Homo sapien
ggcagacatttaattgcacagctttggtcagat

SEQ ID NO: 1037308 - DNA, 33 bp, Homo sapien
ggcagacatttaattggacagctttggtcagat

SEQ ID NO: 1037309 - DNA, 33 bp, Homo sapien
attatgactccgtaaacgcctgttttcatttat

SEQ ID NO: 1037310 - DNA, 33 bp, Homo sapien
attatgactccgtaaatgcctgttttcatttat

SEQ ID NO: 1037311 - DNA, 33 bp, Homo sapien
actgccctggagctccacaggtatcgcatcaca

SEQ ID NO: 1037312 - DNA, 33 bp, Homo sapien
actgccctggagctccgcaggtatcgcatcaca

SEQ ID NO: 1037313 - DNA, 33 bp, Homo sapien
aaaccatgtgcctaacaaattcagggcttctat

SEQ ID NO: 1037314 - DNA, 33 bp, Homo sapien
aaaccatgtgcctaaccaattcagggcttctat

SEQ ID NO: 1037315 - DNA, 33 bp, Homo sapien
tttgtgttcacccataccatgcatttagtagag

SEQ ID NO: 1037316 - DNA, 33 bp, Homo sapien
tttgtgttcacccatatcatgcatttagtagag

SEQ ID NO: 1037317 - DNA, 33 bp, Homo sapien
ttatccatcgttagaaacctgttcttctgaaat

SEQ ID NO: 1037318 - DNA, 33 bp, Homo sapien
ttatccatcgttagaatcctgttcttctgaaat

SEQ ID NO: 1037319 - DNA, 33 bp, Homo sapien
aatgaggaacaccacaagagaatgcctgcatcc

SEQ ID NO: 1037320 - DNA, 33 bp, Homo sapien
aatgaggaacaccacaggagaatgcctgcatcc

SEQ ID NO: 1037321 - DNA, 33 bp, Homo sapien
gcatttcagagacagaatattttggaattgaag

SEQ ID NO: 1037322 - DNA, 33 bp, Homo sapien
gcatttcagagacagagtattttggaattgaag

SEQ ID NO: 1037323 - DNA, 33 bp, Homo sapien
gaaagaggcaaacagcaaagaagttatgcaggc

SEQ ID NO: 1037324 - DNA, 33 bp, Homo sapien
gaaagaggcaaacagcgaagaagttatgcaggc

SEQ ID NO: 1037325 - DNA, 33 bp, Homo sapien
tcttttgttgctcccaaggttctatcagccatt

SEQ ID NO: 1037326 - DNA, 33 bp, Homo sapien
tcttttgttgctcccagggttctatcagccatt

SEQ ID NO: 1037327 - DNA, 33 bp, Homo sapien
cgaaacaaagcaagcaaagacataactactcac

SEQ ID NO: 1037328 - DNA, 33 bp, Homo sapien
cgaaacaaagcaagcagagacataactactcac

SEQ ID NO: 1037329 - DNA, 33 bp, Homo sapien
gtagatgtaactgtgaagtaaattttttggggt

SEQ ID NO: 1037330 - DNA, 33 bp, Homo sapien
gtagatgtaactgtgacgtaaattttttggggt

SEQ ID NO: 1037331 - DNA, 33 bp, Homo sapien
aatgcctagagtctcacaagagcactaagaact

SEQ ID NO: 1037332 - DNA, 33 bp, Homo sapien
aatgcctagagtctcataagagcactaagaact

SEQ ID NO: 1037333 - DNA, 33 bp, Homo sapien
agactagcccctgggcaaaatggtactgctccc

SEQ ID NO: 1037334 - DNA, 33 bp, Homo sapien
agactagcccctgggcgaaatggtactgctccc

SEQ ID NO: 1037335 - DNA, 33 bp, Homo sapien
caagaaaatggaatacaagatcggttgccccat

SEQ ID NO: 1037336 - DNA, 33 bp, Homo sapien
caagaaaatggaatacgagatcggttgccccat

SEQ ID NO: 1037337 - DNA, 33 bp, Homo sapien
tcaattcaacaccaaaaatttccaaatcaaata

SEQ ID NO: 1037338 - DNA, 33 bp, Homo sapien
tcaattcaacaccaaagatttccaaatcaaata

SEQ ID NO: 1037339 - DNA, 33 bp, Homo sapien
tcatcttgctgccttaactatctatcacacagt

SEQ ID NO: 1037340 - DNA, 33 bp, Homo sapien
tcatcttgctgccttatctatctatcacacagt

SEQ ID NO: 1037341 - DNA, 33 bp, Homo sapien
ggtgttccctagtatgcatttggaacagttttt

SEQ ID NO: 1037342 - DNA, 33 bp, Homo sapien
ggtgttccctagtatgtatttggaacagttttt

SEQ ID NO: 1037343 - DNA, 33 bp, Homo sapien
tgtcctatgaagagctaagcagggatgaatggg

SEQ ID NO: 1037344 - DNA, 33 bp, Homo sapien
tgtcctatgaagagctgagcagggatgaatggg

SEQ ID NO: 1037345 - DNA, 33 bp, Homo sapien
tgaattaatggtagaaacctggtccaagataag

SEQ ID NO: 1037346 - DNA, 33 bp, Homo sapien
tgaattaatggtagaagcctggtccaagataag

SEQ ID NO: 1037347 - DNA, 33 bp, Homo sapien
ggtaaacaactcctatcacagccctctttccct

SEQ ID NO: 1037348 - DNA, 33 bp, Homo sapien
ggtaaacaactcctattacagccctctttccct

SEQ ID NO: 1037349 - DNA, 33 bp, Homo sapien
acatcagaagagaagacgggatgagagaacaat

SEQ ID NO: 1037350 - DNA, 33 bp, Homo sapien
acatcagaagagaagatgggatgagagaacaat

SEQ ID NO: 1037351 - DNA, 33 bp, Homo sapien
ctcacaagtaactgacaattcgcatattaaagc

SEQ ID NO: 1037352 - DNA, 33 bp, Homo sapien
ctcacaagtaactgacgattcgcatattaaagc

SEQ ID NO: 1037353 - DNA, 33 bp, Homo sapien
tgaggacatgactataccacgtaggtgggagga

SEQ ID NO: 1037354 - DNA, 33 bp, Homo sapien
tgaggacatgactatatcacgtaggtgggagga

SEQ ID NO: 1037355 - DNA, 33 bp, Homo sapien
aaatggcccatcaaaccgtgaaataggagatga

SEQ ID NO: 1037356 - DNA, 33 bp, Homo sapien
aaatggcccatcaaactgtgaaataggagatga

SEQ ID NO: 1037357 - DNA, 33 bp, Homo sapien
cacacatttcttaagcacctatgggcagaggct

SEQ ID NO: 1037358 - DNA, 33 bp, Homo sapien
cacacatttcttaagcgcctatgggcagaggct

SEQ ID NO: 1037359 - DNA, 33 bp, Homo sapien
cagcataccattccaacggggctggaaggcagt

SEQ ID NO: 1037360 - DNA, 33 bp, Homo sapien
cagcataccattccaatggggctggaaggcagt

SEQ ID NO: 1037361 - DNA, 33 bp, Homo sapien
gaaaagatgatatataacttccattgaatttcc

SEQ ID NO: 1037362 - DNA, 33 bp, Homo sapien
gaaaagatgatatataccttccattgaatttcc

SEQ ID NO: 1037363 - DNA, 33 bp, Homo sapien
gagccgggctgggttacgttttcagtgacttta

SEQ ID NO: 1037364 - DNA, 33 bp, Homo sapien
gagccgggctgggttaggttttcagtgacttta

SEQ ID NO: 1037365 - DNA, 33 bp, Homo sapien
gctctcttttgtacccacaaggaaatggggata

SEQ ID NO: 1037366 - DNA, 33 bp, Homo sapien
gctctcttttgtacccgcaaggaaatggggata

SEQ ID NO: 1037367 - DNA, 33 bp, Homo sapien
tcattgcactaataaaagggaacaatgaagacc

SEQ ID NO: 1037368 - DNA, 33 bp, Homo sapien
tcattgcactaataaaggggaacaatgaagacc

SEQ ID NO: 1037369 - DNA, 33 bp, Homo sapien
aggggtcctcttaggcacatgtggataggaggg

SEQ ID NO: 1037370 - DNA, 33 bp, Homo sapien
aggggtcctcttaggcccatgtggataggaggg

SEQ ID NO: 1037371 - DNA, 33 bp, Homo sapien
tcaagtttagcaaaagaaatcttatgtccaaac

SEQ ID NO: 1037372 - DNA, 33 bp, Homo sapien
tcaagtttagcaaaagtaatcttatgtccaaac

SEQ ID NO: 1037373 - DNA, 33 bp, Homo sapien
aatggttcaacttaagaaacggatatgctttca

SEQ ID NO: 1037374 - DNA, 33 bp, Homo sapien
aatggttcaacttaaggaacggatatgctttca

SEQ ID NO: 1037375 - DNA, 33 bp, Homo sapien
gatcaaaaccaacgcagtagggcttggctgatt

SEQ ID NO: 1037376 - DNA, 33 bp, Homo sapien
gatcaaaaccaacgcattagggcttggctgatt

SEQ ID NO: 1037377 - DNA, 33 bp, Homo sapien
gatctgagctcagattaaactggaaagccaaaa

SEQ ID NO: 1037378 - DNA, 33 bp, Homo sapien
gatctgagctcagattcaactggaaagccaaaa

SEQ ID NO: 1037379 - DNA, 33 bp, Homo sapien
ttagaggaaactgaaacaggaatgtgcattttt

SEQ ID NO: 1037380 - DNA, 33 bp, Homo sapien
ttagaggaaactgaaagaggaatgtgcattttt

SEQ ID NO: 1037381 - DNA, 33 bp, Homo sapien
agaagtcgcttaatgaaaaaaacacataaagcc

SEQ ID NO: 1037382 - DNA, 33 bp, Homo sapien
agaagtcgcttaatgagaaaaacacataaagcc

SEQ ID NO: 1037383 - DNA, 33 bp, Homo sapien
tactgatgaggaaaaacatctctatacctgaca

SEQ ID NO: 1037384 - DNA, 33 bp, Homo sapien
tactgatgaggaaaaatatctctatacctgaca

SEQ ID NO: 1037385 - DNA, 33 bp, Homo sapien
gaaatacaaaagtgtacagcagaaagtaaacag

SEQ ID NO: 1037386 - DNA, 33 bp, Homo sapien
gaaatacaaaagtgtatagcagaaagtaaacag

SEQ ID NO: 1037387 - DNA, 33 bp, Homo sapien
tctactattctaccaccatattagtacagatgt

SEQ ID NO: 1037388 - DNA, 33 bp, Homo sapien
tctactattctaccactatattagtacagatgt

SEQ ID NO: 1037389 - DNA, 33 bp, Homo sapien
aagacccagagcaacacagaaaaggttttggga

SEQ ID NO: 1037390 - DNA, 33 bp, Homo sapien
aagacccagagcaacatagaaaaggttttggga

SEQ ID NO: 1037391 - DNA, 33 bp, Homo sapien
caaagggtgacttggtaaacttttcattgggat

SEQ ID NO: 1037392 - DNA, 33 bp, Homo sapien
caaagggtgacttggttaacttttcattgggat

SEQ ID NO: 1037393 - DNA, 33 bp, Homo sapien
gaccaagagtctgtagaaagagcagcaggatga

SEQ ID NO: 1037394 - DNA, 33 bp, Homo sapien
gaccaagagtctgtaggaagagcagcaggatga

SEQ ID NO: 1037395 - DNA, 33 bp, Homo sapien
cctactgagtgacatacggtcaaaacacagtgt

SEQ ID NO: 1037396 - DNA, 33 bp, Homo sapien
cctactgagtgacatatggtcaaaacacagtgt

SEQ ID NO: 1037397 - DNA, 33 bp, Homo sapien
gatgtcattagcacaaagaagcaactcaaaaat

SEQ ID NO: 1037398 - DNA, 33 bp, Homo sapien
gatgtcattagcacaaggaagcaactcaaaaat

SEQ ID NO: 1037399 - DNA, 33 bp, Homo sapien
ctaatgacatcatgcaaagcaaagccatgcaca

SEQ ID NO: 1037400 - DNA, 33 bp, Homo sapien
ctaatgacatcatgcagagcaaagccatgcaca

SEQ ID NO: 1037401 - DNA, 33 bp, Homo sapien
aagaccatctgggtcccgaaggaaggacaagtc

SEQ ID NO: 1037402 - DNA, 33 bp, Homo sapien
aagaccatctgggtcctgaaggaaggacaagtc

SEQ ID NO: 1037403 - DNA, 33 bp, Homo sapien
ccatttttagctgctacgaatgttcatatgcaa

SEQ ID NO: 1037404 - DNA, 33 bp, Homo sapien
ccatttttagctgctatgaatgttcatatgcaa

SEQ ID NO: 1037405 - DNA, 33 bp, Homo sapien
cgatgacaccattaacaatgtactgcctcttaa

SEQ ID NO: 1037406 - DNA, 33 bp, Homo sapien
cgatgacaccattaacgatgtactgcctcttaa

SEQ ID NO: 1037407 - DNA, 33 bp, Homo sapien
gtctgcactactagtccctgccaaatatgaggc

SEQ ID NO: 1037408 - DNA, 33 bp, Homo sapien
gtctgcactactagtctctgccaaatatgaggc

SEQ ID NO: 1037409 - DNA, 33 bp, Homo sapien
tagaattggagggtgacaaataattgctgtttt

SEQ ID NO: 1037410 - DNA, 33 bp, Homo sapien
tagaattggagggtgataaataattgctgtttt

SEQ ID NO: 1037411 - DNA, 33 bp, Homo sapien
gcacaagatggaggagaagaaaagaacgtagag

SEQ ID NO: 1037412 - DNA, 33 bp, Homo sapien
gcacaagatggaggaggagaaaagaacgtagag

SEQ ID NO: 1037413 - DNA, 33 bp, Homo sapien
gacttcaggaaacttacagtgcccataaacact

SEQ ID NO: 1037414 - DNA, 33 bp, Homo sapien
gacttcaggaaacttatagtgcccataaacact

SEQ ID NO: 1037415 - DNA, 33 bp, Homo sapien
ctgggaaaggctggcaacttatagagttacatt

SEQ ID NO: 1037416 - DNA, 33 bp, Homo sapien
ctgggaaaggctggcatcttatagagttacatt

SEQ ID NO: 1037417 - DNA, 33 bp, Homo sapien
cctgagcacggtaagaaaacctgagattgtttt

SEQ ID NO: 1037418 - DNA, 33 bp, Homo sapien
cctgagcacggtaagacaacctgagattgtttt

SEQ ID NO: 1037419 - DNA, 33 bp, Homo sapien
ccaccttgccatgtggaatctctattggagcat

SEQ ID NO: 1037420 - DNA, 33 bp, Homo sapien
ccaccttgccatgtggtatctctattggagcat

SEQ ID NO: 1037421 - DNA, 33 bp, Homo sapien
gggctggactttctacactacctggaccagtca

SEQ ID NO: 1037422 - DNA, 33 bp, Homo sapien
gggctggactttctaccctacctggaccagtca

SEQ ID NO: 1037423 - DNA, 33 bp, Homo sapien
caggagagaaactcacagcagaggattagaggt

SEQ ID NO: 1037424 - DNA, 33 bp, Homo sapien
caggagagaaactcacggcagaggattagaggt

SEQ ID NO: 1037425 - DNA, 33 bp, Homo sapien
ggtttaatctacaaagaaaatatgtgctgggct

SEQ ID NO: 1037426 - DNA, 33 bp, Homo sapien
ggtttaatctacaaaggaaatatgtgctgggct

SEQ ID NO: 1037427 - DNA, 33 bp, Homo sapien
gtttctgctatgagaacacaggctactagacat

SEQ ID NO: 1037428 - DNA, 33 bp, Homo sapien
gtttctgctatgagaagacaggctactagacat

SEQ ID NO: 1037429 - DNA, 33 bp, Homo sapien
tgctctctggtgtatccccacatcctaatacaa

SEQ ID NO: 1037430 - DNA, 33 bp, Homo sapien
tgctctctggtgtatctccacatcctaatacaa

SEQ ID NO: 1037431 - DNA, 33 bp, Homo sapien
tgccaatgtaggaagtcactctcatattaagcc

SEQ ID NO: 1037432 - DNA, 33 bp, Homo sapien
tgccaatgtaggaagtgactctcatattaagcc

SEQ ID NO: 1037433 - DNA, 33 bp, Homo sapien
gcagcacctgtctcacaatgcttagcccatcct

SEQ ID NO: 1037434 - DNA, 33 bp, Homo sapien
gcagcacctgtctcacgatgcttagcccatcct

SEQ ID NO: 1037435 - DNA, 33 bp, Homo sapien
acaatgagtgcaatgacgttagctgggtagatc

SEQ ID NO: 1037436 - DNA, 33 bp, Homo sapien
acaatgagtgcaatgatgttagctgggtagatc

SEQ ID NO: 1037437 - DNA, 33 bp, Homo sapien
tgttctcttcttgccacagttattgttgtaagg

SEQ ID NO: 1037438 - DNA, 33 bp, Homo sapien
tgttctcttcttgccatagttattgttgtaagg

SEQ ID NO: 1037439 - DNA, 33 bp, Homo sapien
aggaagtcactgtagacgtggtggaaatgatga

SEQ ID NO: 1037440 - DNA, 33 bp, Homo sapien
aggaagtcactgtagatgtggtggaaatgatga

SEQ ID NO: 1037441 - DNA, 33 bp, Homo sapien
tttttaatgtagcagtcaatgaattcaattaga

SEQ ID NO: 1037442 - DNA, 33 bp, Homo sapien
tttttaatgtagcagtgaatgaattcaattaga

SEQ ID NO: 1037443 - DNA, 33 bp, Homo sapien
acagagtagactagaacttagctggtgggtggt

SEQ ID NO: 1037444 - DNA, 33 bp, Homo sapien
acagagtagactagaatttagctggtgggtggt

SEQ ID NO: 1037445 - DNA, 33 bp, Homo sapien
aacaagtctaagatgacgaatataatacaatgt

SEQ ID NO: 1037446 - DNA, 33 bp, Homo sapien
aacaagtctaagatgatgaatataatacaatgt

SEQ ID NO: 1037447 - DNA, 33 bp, Homo sapien
gtgctatcgactttcaaactgagtcattcaagc

SEQ ID NO: 1037448 - DNA, 33 bp, Homo sapien
gtgctatcgactttcagactgagtcattcaagc

SEQ ID NO: 1037449 - DNA, 33 bp, Homo sapien
gctctcattctgggaaagggtcagtttcaggat

SEQ ID NO: 1037450 - DNA, 33 bp, Homo sapien
gctctcattctgggaaggggtcagtttcaggat

SEQ ID NO: 1037451 - DNA, 33 bp, Homo sapien
tggtctagattgttaacgttccacccatagtat

SEQ ID NO: 1037452 - DNA, 33 bp, Homo sapien
tggtctagattgttaatgttccacccatagtat

SEQ ID NO: 1037453 - DNA, 33 bp, Homo sapien
aataaaataatgaaaaaattcctcctgagcaag

SEQ ID NO: 1037454 - DNA, 33 bp, Homo sapien
aataaaataatgaaaacattcctcctgagcaag

SEQ ID NO: 1037455 - DNA, 33 bp, Homo sapien
atgggagactgctccacatgtcaaggggctggg

SEQ ID NO: 1037456 - DNA, 33 bp, Homo sapien
atgggagactgctccatatgtcaaggggctggg

SEQ ID NO: 1037457 - DNA, 33 bp, Homo sapien
tccacactgcaaataaatctgcatacaattttc

SEQ ID NO: 1037458 - DNA, 33 bp, Homo sapien
tccacactgcaaataagtctgcatacaattttc

SEQ ID NO: 1037459 - DNA, 33 bp, Homo sapien
tgcccaggtgcctccgaaagtattgtatccctt

SEQ ID NO: 1037460 - DNA, 33 bp, Homo sapien
tgcccaggtgcctccggaagtattgtatccctt

SEQ ID NO: 1037461 - DNA, 33 bp, Homo sapien
aagccacaaggtgcaaatgttcagaagacagtg

SEQ ID NO: 1037462 - DNA, 33 bp, Homo sapien
aagccacaaggtgcaattgttcagaagacagtg

SEQ ID NO: 1037463 - DNA, 33 bp, Homo sapien
gtgcttccctcaaagccgctgaaatgaactaaa

SEQ ID NO: 1037464 - DNA, 33 bp, Homo sapien
gtgcttccctcaaagctgctgaaatgaactaaa

SEQ ID NO: 1037465 - DNA, 33 bp, Homo sapien
ctgatatgtagtttaaaaagatggttatggttg

SEQ ID NO: 1037466 - DNA, 33 bp, Homo sapien
ctgatatgtagtttaacaagatggttatggttg

SEQ ID NO: 1037467 - DNA, 33 bp, Homo sapien
atatagttgggagggacctcttagctcctaaac

SEQ ID NO: 1037468 - DNA, 33 bp, Homo sapien
atatagttgggagggatctcttagctcctaaac

SEQ ID NO: 1037469 - DNA, 33 bp, Homo sapien
attctttcaataagtcacatttttcaggaaatt

SEQ ID NO: 1037470 - DNA, 33 bp, Homo sapien
attctttcaataagtcgcatttttcaggaaatt

SEQ ID NO: 1037471 - DNA, 33 bp, Homo sapien
atgcagagctactcaaagcatggaattctaaag

SEQ ID NO: 1037472 - DNA, 33 bp, Homo sapien
atgcagagctactcaaggcatggaattctaaag

SEQ ID NO: 1037473 - DNA, 33 bp, Homo sapien
tctccttttgcatgaaactagagaggtaggatt

SEQ ID NO: 1037474 - DNA, 33 bp, Homo sapien
tctccttttgcatgaatctagagaggtaggatt

SEQ ID NO: 1037475 - DNA, 33 bp, Homo sapien
aagagaactcaaattagaagtgaagtctgaaga

SEQ ID NO: 1037476 - DNA, 33 bp, Homo sapien
aagagaactcaaattataagtgaagtctgaaga

SEQ ID NO: 1037477 - DNA, 33 bp, Homo sapien
ggccacttctcagcataaggaatggatgtatat

SEQ ID NO: 1037478 - DNA, 33 bp, Homo sapien
ggccacttctcagcatgaggaatggatgtatat

SEQ ID NO: 1037479 - DNA, 33 bp, Homo sapien
aggctaaaacataatcacagtataagatttgca

SEQ ID NO: 1037480 - DNA, 33 bp, Homo sapien
aggctaaaacataatcgcagtataagatttgca

SEQ ID NO: 1037481 - DNA, 33 bp, Homo sapien
tattgaatgaaagaacacgtgaacaaataaatg

SEQ ID NO: 1037482 - DNA, 33 bp, Homo sapien
tattgaatgaaagaacgcgtgaacaaataaatg

SEQ ID NO: 1037483 - DNA, 33 bp, Homo sapien
gagaaaaagttttagaaggaggatactgcagaa

SEQ ID NO: 1037484 - DNA, 33 bp, Homo sapien
gagaaaaagttttagagggaggatactgcagaa

SEQ ID NO: 1037485 - DNA, 33 bp, Homo sapien
tcacagatgacattcacggagccctgtcctggt

SEQ ID NO: 1037486 - DNA, 33 bp, Homo sapien
tcacagatgacattcatggagccctgtcctggt

SEQ ID NO: 1037487 - DNA, 33 bp, Homo sapien
gtgaatatcaaaaaaaaaatcctgaattcagct

SEQ ID NO: 1037488 - DNA, 33 bp, Homo sapien
gtgaatatcaaaaaaataatcctgaattcagct

SEQ ID NO: 1037489 - DNA, 33 bp, Homo sapien
gcaagagacggtaaaagatagtgttgatggaaa

SEQ ID NO: 1037490 - DNA, 33 bp, Homo sapien
gcaagagacggtaaaatatagtgttgatggaaa

SEQ ID NO: 1037491 - DNA, 33 bp, Homo sapien
tccacagttaaaaaaaactgctcttccttcagg

SEQ ID NO: 1037492 - DNA, 33 bp, Homo sapien
tccacagttaaaaaaagctgctcttccttcagg

SEQ ID NO: 1037493 - DNA, 33 bp, Homo sapien
tgtccaaatatgggcagcctggaataaagaacc

SEQ ID NO: 1037494 - DNA, 33 bp, Homo sapien
tgtccaaatatgggcatcctggaataaagaacc

SEQ ID NO: 1037495 - DNA, 33 bp, Homo sapien
tcattggttaggctcaccttcctgtaattgctt

SEQ ID NO: 1037496 - DNA, 33 bp, Homo sapien
tcattggttaggctcagcttcctgtaattgctt

SEQ ID NO: 1037497 - DNA, 33 bp, Homo sapien
agacagaggtcccacacgtgtacatctagaaaa

SEQ ID NO: 1037498 - DNA, 33 bp, Homo sapien
agacagaggtcccacatgtgtacatctagaaaa

SEQ ID NO: 1037499 - DNA, 33 bp, Homo sapien
gcccacagtgcacctgcatttgtttctatgact

SEQ ID NO: 1037500 - DNA, 33 bp, Homo sapien
gcccacagtgcacctggatttgtttctatgact

SEQ ID NO: 1037501 - DNA, 33 bp, Homo sapien
aataaaatagctgccacgatgagagactgtgtg

SEQ ID NO: 1037502 - DNA, 33 bp, Homo sapien
aataaaatagctgccatgatgagagactgtgtg

SEQ ID NO: 1037503 - DNA, 33 bp, Homo sapien
gtcccctccaacttgacgtgtcctaaagtgggt

SEQ ID NO: 1037504 - DNA, 33 bp, Homo sapien
gtcccctccaacttgatgtgtcctaaagtgggt

SEQ ID NO: 1037505 - DNA, 33 bp, Homo sapien
actggccagtatagccaaaggcatcatgaggat

SEQ ID NO: 1037506 - DNA, 33 bp, Homo sapien
actggccagtatagcccaaggcatcatgaggat

SEQ ID NO: 1037507 - DNA, 33 bp, Homo sapien
agcaagttgtgcaaaactcagtgttgaagagtg

SEQ ID NO: 1037508 - DNA, 33 bp, Homo sapien
agcaagttgtgcaaaattcagtgttgaagagtg

SEQ ID NO: 1037509 - DNA, 33 bp, Homo sapien
tattaaaagtgcaataaacatctaatatgcaaa

SEQ ID NO: 1037510 - DNA, 33 bp, Homo sapien
tattaaaagtgcaatagacatctaatatgcaaa

SEQ ID NO: 1037511 - DNA, 33 bp, Homo sapien
ggttgtttgtgtgcaacgtcttaatacacatag

SEQ ID NO: 1037512 - DNA, 33 bp, Homo sapien
ggttgtttgtgtgcaatgtcttaatacacatag

SEQ ID NO: 1037513 - DNA, 33 bp, Homo sapien
ctgtagtgcgtcattccctgcaaaccctagtgt

SEQ ID NO: 1037514 - DNA, 33 bp, Homo sapien
ctgtagtgcgtcattctctgcaaaccctagtgt

SEQ ID NO: 1037515 - DNA, 33 bp, Homo sapien
tgctctggaaactgggaattacactttgatttt

SEQ ID NO: 1037516 - DNA, 33 bp, Homo sapien
tgctctggaaactggggattacactttgatttt

SEQ ID NO: 1037517 - DNA, 33 bp, Homo sapien
aaacatgaggcgatagaagcggctcttgtattt

SEQ ID NO: 1037518 - DNA, 33 bp, Homo sapien
aaacatgaggcgataggagcggctcttgtattt

SEQ ID NO: 1037519 - DNA, 33 bp, Homo sapien
cttgtctttctgtcctgaactataaccatccag

SEQ ID NO: 1037520 - DNA, 33 bp, Homo sapien
cttgtctttctgtccttaactataaccatccag

SEQ ID NO: 1037521 - DNA, 33 bp, Homo sapien
ctgacttgagacaaagactgttgactagaatct

SEQ ID NO: 1037522 - DNA, 33 bp, Homo sapien
ctgacttgagacaaaggctgttgactagaatct

SEQ ID NO: 1037523 - DNA, 33 bp, Homo sapien
aggaaaaagaggaaaaaaagttctgctaccatg

SEQ ID NO: 1037524 - DNA, 33 bp, Homo sapien
aggaaaaagaggaaaagaagttctgctaccatg

SEQ ID NO: 1037525 - DNA, 33 bp, Homo sapien
tgctaccatgttaaaaaaatcatgcaatgctaa

SEQ ID NO: 1037526 - DNA, 33 bp, Homo sapien
tgctaccatgttaaaagaatcatgcaatgctaa

SEQ ID NO: 1037527 - DNA, 33 bp, Homo sapien
aaccacttcattttgaaaggattactctgattg

SEQ ID NO: 1037528 - DNA, 33 bp, Homo sapien
aaccacttcattttgagaggattactctgattg

SEQ ID NO: 1037529 - DNA, 33 bp, Homo sapien
gaggttaaatgatgagaagtactagctggtcaa

SEQ ID NO: 1037530 - DNA, 33 bp, Homo sapien
gaggttaaatgatgaggagtactagctggtcaa

SEQ ID NO: 1037531 - DNA, 33 bp, Homo sapien
tttccagcttccaaaaacatactcgaggaaagc

SEQ ID NO: 1037532 - DNA, 33 bp, Homo sapien
tttccagcttccaaaagcatactcgaggaaagc

SEQ ID NO: 1037533 - DNA, 33 bp, Homo sapien
caaacatcttgagaaactcacagaaagcccaag

SEQ ID NO: 1037534 - DNA, 33 bp, Homo sapien
caaacatcttgagaaagtcacagaaagcccaag

SEQ ID NO: 1037535 - DNA, 33 bp, Homo sapien
aattccccatgatatacggaaaagcatccaaaa

SEQ ID NO: 1037536 - DNA, 33 bp, Homo sapien
aattccccatgatatatggaaaagcatccaaaa

SEQ ID NO: 1037537 - DNA, 33 bp, Homo sapien
tgcacattgcttcctcacttactgtacattaaa

SEQ ID NO: 1037538 - DNA, 33 bp, Homo sapien
tgcacattgcttcctcgcttactgtacattaaa

SEQ ID NO: 1037539 - DNA, 33 bp, Homo sapien
tcacattagttaggaaatgagcaggactacaaa

SEQ ID NO: 1037540 - DNA, 33 bp, Homo sapien
tcacattagttaggaactgagcaggactacaaa

SEQ ID NO: 1037541 - DNA, 33 bp, Homo sapien
attcaggccatagcaccatcctaataaatggca

SEQ ID NO: 1037542 - DNA, 33 bp, Homo sapien
attcaggccatagcacgatcctaataaatggca

SEQ ID NO: 1037543 - DNA, 33 bp, Homo sapien
aaacacaaaatgtgacactgttattttgactat

SEQ ID NO: 1037544 - DNA, 33 bp, Homo sapien
aaacacaaaatgtgacgctgttattttgactat

SEQ ID NO: 1037545 - DNA, 33 bp, Homo sapien
ttactttttatgcttaactctctaatccatgtg

SEQ ID NO: 1037546 - DNA, 33 bp, Homo sapien
ttactttttatgcttagctctctaatccatgtg

SEQ ID NO: 1037547 - DNA, 33 bp, Homo sapien
ttttagtggtggaaaccgatggttacttcataa

SEQ ID NO: 1037548 - DNA, 33 bp, Homo sapien
ttttagtggtggaaactgatggttacttcataa

SEQ ID NO: 1037549 - DNA, 33 bp, Homo sapien
cagagtttgatagtccacaatatgtacagttgt

SEQ ID NO: 1037550 - DNA, 33 bp, Homo sapien
cagagtttgatagtccgcaatatgtacagttgt

SEQ ID NO: 1037551 - DNA, 33 bp, Homo sapien
aacacgaggtcttcgacagcttactagatctta

SEQ ID NO: 1037552 - DNA, 33 bp, Homo sapien
aacacgaggtcttcgagagcttactagatctta

SEQ ID NO: 1037553 - DNA, 33 bp, Homo sapien
caaggttcaccaaaaaggtataggcttgtctat

SEQ ID NO: 1037554 - DNA, 33 bp, Homo sapien
caaggttcaccaaaaatgtataggcttgtctat

SEQ ID NO: 1037555 - DNA, 33 bp, Homo sapien
attaaaaacaaatgaacaaaagagccaacatga

SEQ ID NO: 1037556 - DNA, 33 bp, Homo sapien
attaaaaacaaatgaagaaaagagccaacatga

SEQ ID NO: 1037557 - DNA, 33 bp, Homo sapien
cagatttttggaaccccattcccagcctcttac

SEQ ID NO: 1037558 - DNA, 33 bp, Homo sapien
cagatttttggaaccctattcccagcctcttac

SEQ ID NO: 1037559 - DNA, 33 bp, Homo sapien
aagaaatgaggatacagcacatctaagtgtaag

SEQ ID NO: 1037560 - DNA, 33 bp, Homo sapien
aagaaatgaggatacatcacatctaagtgtaag

SEQ ID NO: 1037561 - DNA, 33 bp, Homo sapien
tataattacctccaaaatgaagatacagaacat

SEQ ID NO: 1037562 - DNA, 33 bp, Homo sapien
tataattacctccaaagtgaagatacagaacat

SEQ ID NO: 1037563 - DNA, 33 bp, Homo sapien
gaccctgagctccacaatataaagagctaagtg

SEQ ID NO: 1037564 - DNA, 33 bp, Homo sapien
gaccctgagctccacagtataaagagctaagtg

SEQ ID NO: 1037565 - DNA, 33 bp, Homo sapien
catggatttcatgttaacctcatcatccttttg

SEQ ID NO: 1037566 - DNA, 33 bp, Homo sapien
catggatttcatgttagcctcatcatccttttg

SEQ ID NO: 1037567 - DNA, 33 bp, Homo sapien
ttactcctacgaaagtaaaatggcaaaagtgta

SEQ ID NO: 1037568 - DNA, 33 bp, Homo sapien
ttactcctacgaaagtgaaatggcaaaagtgta

SEQ ID NO: 1037569 - DNA, 33 bp, Homo sapien
cccccagcccacagagaaaacgtttatttgcta

SEQ ID NO: 1037570 - DNA, 33 bp, Homo sapien
cccccagcccacagaggaaacgtttatttgcta

SEQ ID NO: 1037571 - DNA, 33 bp, Homo sapien
acatcaccctcaaacactgttaggtccatctca

SEQ ID NO: 1037572 - DNA, 33 bp, Homo sapien
acatcaccctcaaacagtgttaggtccatctca

SEQ ID NO: 1037573 - DNA, 33 bp, Homo sapien
aagaatctggtaagaaatatagactccttctca

SEQ ID NO: 1037574 - DNA, 33 bp, Homo sapien
aagaatctggtaagaactatagactccttctca

SEQ ID NO: 1037575 - DNA, 33 bp, Homo sapien
gtgggagacaaaagtacaaagtgttctactgtg

SEQ ID NO: 1037576 - DNA, 33 bp, Homo sapien
gtgggagacaaaagtataaagtgttctactgtg

SEQ ID NO: 1037577 - DNA, 33 bp, Homo sapien
accaggttagcaaccaatcaagaacattcatga

SEQ ID NO: 1037578 - DNA, 33 bp, Homo sapien
accaggttagcaaccagtcaagaacattcatga

SEQ ID NO: 1037579 - DNA, 33 bp, Homo sapien
tagacaacagggaaatgaggccaaagatacagt

SEQ ID NO: 1037580 - DNA, 33 bp, Homo sapien
tagacaacagggaaattaggccaaagatacagt

SEQ ID NO: 1037581 - DNA, 33 bp, Homo sapien
gtgcacattcatgagaataatcaacagctcccc

SEQ ID NO: 1037582 - DNA, 33 bp, Homo sapien
gtgcacattcatgagagtaatcaacagctcccc

SEQ ID NO: 1037583 - DNA, 33 bp, Homo sapien
atgtgagggaagaagacaataggtcctcacatc

SEQ ID NO: 1037584 - DNA, 33 bp, Homo sapien
atgtgagggaagaagagaataggtcctcacatc

SEQ ID NO: 1037585 - DNA, 33 bp, Homo sapien
aaacctggggacaccaacttttcagtgttgcca

SEQ ID NO: 1037586 - DNA, 33 bp, Homo sapien
aaacctggggacaccatcttttcagtgttgcca

SEQ ID NO: 1037587 - DNA, 33 bp, Homo sapien
atttctgccaaaagaaaagcaagtccatctttg

SEQ ID NO: 1037588 - DNA, 33 bp, Homo sapien
atttctgccaaaagaagagcaagtccatctttg

SEQ ID NO: 1037589 - DNA, 33 bp, Homo sapien
cctttccctttctcacactaaatgtcctgaata

SEQ ID NO: 1037590 - DNA, 33 bp, Homo sapien
cctttccctttctcacgctaaatgtcctgaata

SEQ ID NO: 1037591 - DNA, 33 bp, Homo sapien
tgtgttttaagatatacaagagatccggtgagg

SEQ ID NO: 1037592 - DNA, 33 bp, Homo sapien
tgtgttttaagatatataagagatccggtgagg

SEQ ID NO: 1037593 - DNA, 33 bp, Homo sapien
atgtatgtcaagtcacaccacaaaaactcagtg

SEQ ID NO: 1037594 - DNA, 33 bp, Homo sapien
atgtatgtcaagtcacgccacaaaaactcagtg

SEQ ID NO: 1037595 - DNA, 33 bp, Homo sapien
ctcagatgtgcacaggaaccaggttgacttggc

SEQ ID NO: 1037596 - DNA, 33 bp, Homo sapien
ctcagatgtgcacaggtaccaggttgacttggc

SEQ ID NO: 1037597 - DNA, 33 bp, Homo sapien
tcagttggagttgagcactctctgtcccctcag

SEQ ID NO: 1037598 - DNA, 33 bp, Homo sapien
tcagttggagttgagcgctctctgtcccctcag

SEQ ID NO: 1037599 - DNA, 33 bp, Homo sapien
gcaatcattctttaacccgatttcacaattatg

SEQ ID NO: 1037600 - DNA, 33 bp, Homo sapien
gcaatcattctttaactcgatttcacaattatg

SEQ ID NO: 1037601 - DNA, 33 bp, Homo sapien
gggttgtggacactcaaaattgctcactgcaga

SEQ ID NO: 1037602 - DNA, 33 bp, Homo sapien
gggttgtggacactcacaattgctcactgcaga

SEQ ID NO: 1037603 - DNA, 33 bp, Homo sapien
gttggagaaaggacatcaagacagattagagct

SEQ ID NO: 1037604 - DNA, 33 bp, Homo sapien
gttggagaaaggacattaagacagattagagct

SEQ ID NO: 1037605 - DNA, 33 bp, Homo sapien
aaccccaagaaggtaaaagaggtagcatcaggc

SEQ ID NO: 1037606 - DNA, 33 bp, Homo sapien
aaccccaagaaggtaacagaggtagcatcaggc

SEQ ID NO: 1037607 - DNA, 33 bp, Homo sapien
tggatgctttccatgccgaggggagatatcaag

SEQ ID NO: 1037608 - DNA, 33 bp, Homo sapien
tggatgctttccatgcggaggggagatatcaag

SEQ ID NO: 1037609 - DNA, 33 bp, Homo sapien
catatcttagaattgaagaaatctagtaattgt

SEQ ID NO: 1037610 - DNA, 33 bp, Homo sapien
catatcttagaattgacgaaatctagtaattgt

SEQ ID NO: 1037611 - DNA, 33 bp, Homo sapien
catcaatccaggattcaccatctcctctgctgc

SEQ ID NO: 1037612 - DNA, 33 bp, Homo sapien
catcaatccaggattccccatctcctctgctgc

SEQ ID NO: 1037613 - DNA, 33 bp, Homo sapien
ccacctaggtatcagaccaacatctccaaaaat

SEQ ID NO: 1037614 - DNA, 33 bp, Homo sapien
ccacctaggtatcagatcaacatctccaaaaat

SEQ ID NO: 1037615 - DNA, 33 bp, Homo sapien
acagacagaaccatgaaggagggacaacatgga

SEQ ID NO: 1037616 - DNA, 33 bp, Homo sapien
acagacagaaccatgagggagggacaacatgga

SEQ ID NO: 1037617 - DNA, 33 bp, Homo sapien
acaaattcaaagggccaaaggtagggtcaaagt

SEQ ID NO: 1037618 - DNA, 33 bp, Homo sapien
acaaattcaaagggccgaaggtagggtcaaagt

SEQ ID NO: 1037619 - DNA, 33 bp, Homo sapien
tcaaccacataactatcaaatccatgccttctt

SEQ ID NO: 1037620 - DNA, 33 bp, Homo sapien
tcaaccacataactattaaatccatgccttctt

SEQ ID NO: 1037621 - DNA, 33 bp, Homo sapien
ctggaaacatggctatcaactttatttctccat

SEQ ID NO: 1037622 - DNA, 33 bp, Homo sapien
ctggaaacatggctattaactttatttctccat

SEQ ID NO: 1037623 - DNA, 33 bp, Homo sapien
gttaggagaaaatagtcaaagaggtgaaatgca

SEQ ID NO: 1037624 - DNA, 33 bp, Homo sapien
gttaggagaaaatagtgaaagaggtgaaatgca

SEQ ID NO: 1037625 - DNA, 33 bp, Homo sapien
agaactcagacgccaaagaagcagctaacatca

SEQ ID NO: 1037626 - DNA, 33 bp, Homo sapien
agaactcagacgccaaggaagcagctaacatca

SEQ ID NO: 1037627 - DNA, 33 bp, Homo sapien
cccagtagctcagttacaaaggctctatagtgg

SEQ ID NO: 1037628 - DNA, 33 bp, Homo sapien
cccagtagctcagttataaaggctctatagtgg

SEQ ID NO: 1037629 - DNA, 33 bp, Homo sapien
tcttctgtatctccagccacaaattgccactct

SEQ ID NO: 1037630 - DNA, 33 bp, Homo sapien
tcttctgtatctccaggcacaaattgccactct

SEQ ID NO: 1037631 - DNA, 33 bp, Homo sapien
attgccttggaaaatacagggtccagcccaagg

SEQ ID NO: 1037632 - DNA, 33 bp, Homo sapien
attgccttggaaaatagagggtccagcccaagg

SEQ ID NO: 1037633 - DNA, 33 bp, Homo sapien
gtggcaaattgcaatcaaacatcacaaaggctg

SEQ ID NO: 1037634 - DNA, 33 bp, Homo sapien
gtggcaaattgcaatccaacatcacaaaggctg

SEQ ID NO: 1037635 - DNA, 33 bp, Homo sapien
gtcagtcaaggtggaaaatcactgcagggcaca

SEQ ID NO: 1037636 - DNA, 33 bp, Homo sapien
gtcagtcaaggtggaagatcactgcagggcaca

SEQ ID NO: 1037637 - DNA, 33 bp, Homo sapien
cattgtcggtttgctaacttgagcatcctgaaa

SEQ ID NO: 1037638 - DNA, 33 bp, Homo sapien
cattgtcggtttgctaccttgagcatcctgaaa

SEQ ID NO: 1037639 - DNA, 33 bp, Homo sapien
gattgaaatgagatacagcaaagatggaactaa

SEQ ID NO: 1037640 - DNA, 33 bp, Homo sapien
gattgaaatgagatacggcaaagatggaactaa

SEQ ID NO: 1037641 - DNA, 33 bp, Homo sapien
atggaaatgctggtccaaactaagggatgagga

SEQ ID NO: 1037642 - DNA, 33 bp, Homo sapien
atggaaatgctggtccgaactaagggatgagga

SEQ ID NO: 1037643 - DNA, 33 bp, Homo sapien
atgtacccatttaacccgcaacatcaccaggtg

SEQ ID NO: 1037644 - DNA, 33 bp, Homo sapien
atgtacccatttaacctgcaacatcaccaggtg

SEQ ID NO: 1037645 - DNA, 33 bp, Homo sapien
gtctaatgtagaaaaaaccacagcctgtgggga

SEQ ID NO: 1037646 - DNA, 33 bp, Homo sapien
gtctaatgtagaaaaatccacagcctgtgggga

SEQ ID NO: 1037647 - DNA, 33 bp, Homo sapien
cacttgcagtttctgacacttgtttgatggctg

SEQ ID NO: 1037648 - DNA, 33 bp, Homo sapien
cacttgcagtttctgatacttgtttgatggctg

SEQ ID NO: 1037649 - DNA, 33 bp, Homo sapien
catcatattggtgaaccattctctgagcagaag

SEQ ID NO: 1037650 - DNA, 33 bp, Homo sapien
catcatattggtgaacgattctctgagcagaag

SEQ ID NO: 1037651 - DNA, 33 bp, Homo sapien
gcagctgaggttacgacaaatatgaaatctgga

SEQ ID NO: 1037652 - DNA, 33 bp, Homo sapien
gcagctgaggttacgataaatatgaaatctgga

SEQ ID NO: 1037653 - DNA, 33 bp, Homo sapien
acacaaagaataaaaacgtctcaatccaaaaga

SEQ ID NO: 1037654 - DNA, 33 bp, Homo sapien
acacaaagaataaaaatgtctcaatccaaaaga

SEQ ID NO: 1037655 - DNA, 33 bp, Homo sapien
cttatgcttgcagaaactggaatgctgtaataa

SEQ ID NO: 1037656 - DNA, 33 bp, Homo sapien
cttatgcttgcagaaattggaatgctgtaataa

SEQ ID NO: 1037657 - DNA, 33 bp, Homo sapien
agttgatgagattggccatctgaaggaacaccc

SEQ ID NO: 1037658 - DNA, 33 bp, Homo sapien
agttgatgagattggctatctgaaggaacaccc

SEQ ID NO: 1037659 - DNA, 33 bp, Homo sapien
tggttgtctagtactacctgcagagagaccccc

SEQ ID NO: 1037660 - DNA, 33 bp, Homo sapien
tggttgtctagtactatctgcagagagaccccc

SEQ ID NO: 1037661 - DNA, 33 bp, Homo sapien
atattcctactgcatacctcgtctgtaaataaa

SEQ ID NO: 1037662 - DNA, 33 bp, Homo sapien
atattcctactgcatatctcgtctgtaaataaa

SEQ ID NO: 1037663 - DNA, 33 bp, Homo sapien
tttttataaagtcataactggcaatctttttta

SEQ ID NO: 1037664 - DNA, 33 bp, Homo sapien
tttttataaagtcatatctggcaatctttttta

SEQ ID NO: 1037665 - DNA, 33 bp, Homo sapien
tcactcttcaccggggccacctcaaaaagtggt

SEQ ID NO: 1037666 - DNA, 33 bp, Homo sapien
tcactcttcaccggggtcacctcaaaaagtggt

SEQ ID NO: 1037667 - DNA, 33 bp, Homo sapien
cacagaggcaagatagcagagtgtacctcttgg

SEQ ID NO: 1037668 - DNA, 33 bp, Homo sapien
cacagaggcaagatagtagagtgtacctcttgg

SEQ ID NO: 1037669 - DNA, 33 bp, Homo sapien
atcaccaattcaaaagccttccttaactgactc

SEQ ID NO: 1037670 - DNA, 33 bp, Homo sapien
atcaccaattcaaaaggcttccttaactgactc

SEQ ID NO: 1037671 - DNA, 33 bp, Homo sapien
tctttcctttcacctcactcaccctgcctgatg

SEQ ID NO: 1037672 - DNA, 33 bp, Homo sapien
tctttcctttcacctcgctcaccctgcctgatg

SEQ ID NO: 1037673 - DNA, 33 bp, Homo sapien
agtaattgctgcctccaaaccattgacctgaaa

SEQ ID NO: 1037674 - DNA, 33 bp, Homo sapien
agtaattgctgcctccgaaccattgacctgaaa

SEQ ID NO: 1037675 - DNA, 33 bp, Homo sapien
tttctttgagtataataatgaccacctgaataa

SEQ ID NO: 1037676 - DNA, 33 bp, Homo sapien
tttctttgagtataatcatgaccacctgaataa

SEQ ID NO: 1037677 - DNA, 33 bp, Homo sapien
tcaaacactttagtaaaacccagtgaaatgaaa

SEQ ID NO: 1037678 - DNA, 33 bp, Homo sapien
tcaaacactttagtaagacccagtgaaatgaaa

SEQ ID NO: 1037679 - DNA, 33 bp, Homo sapien
aaatgttgaaatgctgcactgcaatttcagagt

SEQ ID NO: 1037680 - DNA, 33 bp, Homo sapien
aaatgttgaaatgctggactgcaatttcagagt

SEQ ID NO: 1037681 - DNA, 33 bp, Homo sapien
ggacctggatgcttaccgggcccgagttctgga

SEQ ID NO: 1037682 - DNA, 33 bp, Homo sapien
ggacctggatgcttactgggcccgagttctgga

SEQ ID NO: 1037683 - DNA, 33 bp, Homo sapien
tgttcaattcataggcactgagtattctttatt

SEQ ID NO: 1037684 - DNA, 33 bp, Homo sapien
tgttcaattcataggcgctgagtattctttatt

SEQ ID NO: 1037685 - DNA, 33 bp, Homo sapien
ctttgccattgcgatgcatgacactcaatggat

SEQ ID NO: 1037686 - DNA, 33 bp, Homo sapien
ctttgccattgcgatgtatgacactcaatggat

SEQ ID NO: 1037687 - DNA, 33 bp, Homo sapien
atgttctgtctgaagtaaaagttaactgtcttt

SEQ ID NO: 1037688 - DNA, 33 bp, Homo sapien
atgttctgtctgaagtcaaagttaactgtcttt

SEQ ID NO: 1037689 - DNA, 33 bp, Homo sapien
tagagtatctgtaacaacctgctgacattgccc

SEQ ID NO: 1037690 - DNA, 33 bp, Homo sapien
tagagtatctgtaacagcctgctgacattgccc

SEQ ID NO: 1037691 - DNA, 33 bp, Homo sapien
acagcctgtgctcaatcaatatagttctaaaag

SEQ ID NO: 1037692 - DNA, 33 bp, Homo sapien
acagcctgtgctcaatgaatatagttctaaaag

SEQ ID NO: 1037693 - DNA, 33 bp, Homo sapien
ggggcaaagcagcttcccaaggaacagagtgtc

SEQ ID NO: 1037694 - DNA, 33 bp, Homo sapien
ggggcaaagcagcttcgcaaggaacagagtgtc

SEQ ID NO: 1037695 - DNA, 33 bp, Homo sapien
aaagcaggaagattccagaaagctgggcaccat

SEQ ID NO: 1037696 - DNA, 33 bp, Homo sapien
aaagcaggaagattccggaaagctgggcaccat

SEQ ID NO: 1037697 - DNA, 33 bp, Homo sapien
gtagtgtttcagaagacaaaatatatctggaga

SEQ ID NO: 1037698 - DNA, 33 bp, Homo sapien
gtagtgtttcagaagagaaaatatatctggaga

SEQ ID NO: 1037699 - DNA, 33 bp, Homo sapien
tcagggctttaaatgccactgggactctgccct

SEQ ID NO: 1037700 - DNA, 33 bp, Homo sapien
tcagggctttaaatgctactgggactctgccct

SEQ ID NO: 1037701 - DNA, 33 bp, Homo sapien
aatcccagctggtgtacgatgaggcctccagaa

SEQ ID NO: 1037702 - DNA, 33 bp, Homo sapien
aatcccagctggtgtatgatgaggcctccagaa

SEQ ID NO: 1037703 - DNA, 33 bp, Homo sapien
aagctgctttcattccactacttctctgttctc

SEQ ID NO: 1037704 - DNA, 33 bp, Homo sapien
aagctgctttcattccgctacttctctgttctc

SEQ ID NO: 1037705 - DNA, 33 bp, Homo sapien
tgctttatagtaccaacctgcagtctaataagt

SEQ ID NO: 1037706 - DNA, 33 bp, Homo sapien
tgctttatagtaccaatctgcagtctaataagt

SEQ ID NO: 1037707 - DNA, 33 bp, Homo sapien
ctttcgaagattctcaaagggagtaactcctcc

SEQ ID NO: 1037708 - DNA, 33 bp, Homo sapien
ctttcgaagattctcagagggagtaactcctcc

SEQ ID NO: 1037709 - DNA, 33 bp, Homo sapien
atttgcacatgacggcagaggaagactttggga

SEQ ID NO: 1037710 - DNA, 33 bp, Homo sapien
atttgcacatgacggcggaggaagactttggga

SEQ ID NO: 1037711 - DNA, 33 bp, Homo sapien
aaactcacttgaatcacgtagaagcctataaaa

SEQ ID NO: 1037712 - DNA, 33 bp, Homo sapien
aaactcacttgaatcatgtagaagcctataaaa

SEQ ID NO: 1037713 - DNA, 33 bp, Homo sapien
ggtggttttctgtctggataatctgatttctag

SEQ ID NO: 1037714 - DNA, 33 bp, Homo sapien
ggtggttttctgtctgtataatctgatttctag

SEQ ID NO: 1037715 - DNA, 33 bp, Homo sapien
cgctgatgaacacttacgttaatttcatgattt

SEQ ID NO: 1037716 - DNA, 33 bp, Homo sapien
cgctgatgaacacttaggttaatttcatgattt

SEQ ID NO: 1037717 - DNA, 33 bp, Homo sapien
attcaccaccggaagaatctaaatgcttttcct

SEQ ID NO: 1037718 - DNA, 33 bp, Homo sapien
attcaccaccggaagagtctaaatgcttttcct

SEQ ID NO: 1037719 - DNA, 33 bp, Homo sapien
agagaaccaaacacagaaacagggatggtgtca

SEQ ID NO: 1037720 - DNA, 33 bp, Homo sapien
agagaaccaaacacagcaacagggatggtgtca

SEQ ID NO: 1037721 - DNA, 33 bp, Homo sapien
ttggaaatggtttcaccatcctttttgcctgtt

SEQ ID NO: 1037722 - DNA, 33 bp, Homo sapien
ttggaaatggtttcacgatcctttttgcctgtt

SEQ ID NO: 1037723 - DNA, 33 bp, Homo sapien
tccctgatcaacaatccaagcagtgagtactat

SEQ ID NO: 1037724 - DNA, 33 bp, Homo sapien
tccctgatcaacaatctaagcagtgagtactat

SEQ ID NO: 1037725 - DNA, 33 bp, Homo sapien
aactttctctctgagcaaaatggtagattttcc

SEQ ID NO: 1037726 - DNA, 33 bp, Homo sapien
aactttctctctgagccaaatggtagattttcc

SEQ ID NO: 1037727 - DNA, 33 bp, Homo sapien
actctgaaactgtcaccaagatgggaacaaatt

SEQ ID NO: 1037728 - DNA, 33 bp, Homo sapien
actctgaaactgtcactaagatgggaacaaatt

SEQ ID NO: 1037729 - DNA, 33 bp, Homo sapien
agcattttaagtgttaactttaggccagcacat

SEQ ID NO: 1037730 - DNA, 33 bp, Homo sapien
agcattttaagtgttatctttaggccagcacat

SEQ ID NO: 1037731 - DNA, 33 bp, Homo sapien
ggtttttcaacattggaaccattgatattttgt

SEQ ID NO: 1037732 - DNA, 33 bp, Homo sapien
ggtttttcaacattggcaccattgatattttgt

SEQ ID NO: 1037733 - DNA, 33 bp, Homo sapien
tgtttgagagtctgacactctcaaaactctaat

SEQ ID NO: 1037734 - DNA, 33 bp, Homo sapien
tgtttgagagtctgacgctctcaaaactctaat

SEQ ID NO: 1037735 - DNA, 33 bp, Homo sapien
agactctcaaacaataatatcagggatgcagtg

SEQ ID NO: 1037736 - DNA, 33 bp, Homo sapien
agactctcaaacaatagtatcagggatgcagtg

SEQ ID NO: 1037737 - DNA, 33 bp, Homo sapien
ttggcacctggtcatcaatttttagtacagtaa

SEQ ID NO: 1037738 - DNA, 33 bp, Homo sapien
ttggcacctggtcatcgatttttagtacagtaa

SEQ ID NO: 1037739 - DNA, 33 bp, Homo sapien
ttttgttacagatgaagaaacagacacaagggt

SEQ ID NO: 1037740 - DNA, 33 bp, Homo sapien
ttttgttacagatgaataaacagacacaagggt

SEQ ID NO: 1037741 - DNA, 33 bp, Homo sapien
ccatagtaaaaggagacaacaagcttagtttgt

SEQ ID NO: 1037742 - DNA, 33 bp, Homo sapien
ccatagtaaaaggagagaacaagcttagtttgt

SEQ ID NO: 1037743 - DNA, 33 bp, Homo sapien
tgtgcttctcaatatcccaccttttctccttta

SEQ ID NO: 1037744 - DNA, 33 bp, Homo sapien
tgtgcttctcaatatctcaccttttctccttta

SEQ ID NO: 1037745 - DNA, 33 bp, Homo sapien
cattcaacgctgtcaccgctatgtttccacagc

SEQ ID NO: 1037746 - DNA, 33 bp, Homo sapien
cattcaacgctgtcactgctatgtttccacagc

SEQ ID NO: 1037747 - DNA, 33 bp, Homo sapien
tctgtttaaattttgacgctttcattttgacaa

SEQ ID NO: 1037748 - DNA, 33 bp, Homo sapien
tctgtttaaattttgatgctttcattttgacaa

SEQ ID NO: 1037749 - DNA, 33 bp, Homo sapien
agtatagaaatgaaaccctagtgtaggaaggga

SEQ ID NO: 1037750 - DNA, 33 bp, Homo sapien
agtatagaaatgaaacgctagtgtaggaaggga

SEQ ID NO: 1037751 - DNA, 33 bp, Homo sapien
tcagagctgacagaggcccacaagatcgtctag

SEQ ID NO: 1037752 - DNA, 33 bp, Homo sapien
tcagagctgacagaggtccacaagatcgtctag

SEQ ID NO: 1037753 - DNA, 33 bp, Homo sapien
gtgacattagaaaaacagaaatagccgcctgat

SEQ ID NO: 1037754 - DNA, 33 bp, Homo sapien
gtgacattagaaaaacggaaatagccgcctgat

SEQ ID NO: 1037755 - DNA, 33 bp, Homo sapien
agcggtactgacaacccagtacaaaacccatag

SEQ ID NO: 1037756 - DNA, 33 bp, Homo sapien
agcggtactgacaacctagtacaaaacccatag

SEQ ID NO: 1037757 - DNA, 33 bp, Homo sapien
taactctaccccacttcaagactcagctttatc

SEQ ID NO: 1037758 - DNA, 33 bp, Homo sapien
taactctaccccactttaagactcagctttatc

SEQ ID NO: 1037759 - DNA, 33 bp, Homo sapien
gtaatctgatcattagaagctgtgtaaacgtaa

SEQ ID NO: 1037760 - DNA, 33 bp, Homo sapien
gtaatctgatcattagtagctgtgtaaacgtaa

SEQ ID NO: 1037761 - DNA, 33 bp, Homo sapien
aaagtgtacctttgaaccggagaagtcgggccg

SEQ ID NO: 1037762 - DNA, 33 bp, Homo sapien
aaagtgtacctttgaatcggagaagtcgggccg

SEQ ID NO: 1037763 - DNA, 33 bp, Homo sapien
cttcagtaggacatccaatgtaaggacacagga

SEQ ID NO: 1037764 - DNA, 33 bp, Homo sapien
cttcagtaggacatccgatgtaaggacacagga

SEQ ID NO: 1037765 - DNA, 33 bp, Homo sapien
ccaagtgcccgactagaagcaggtctgaaacag

SEQ ID NO: 1037766 - DNA, 33 bp, Homo sapien
ccaagtgcccgactagcagcaggtctgaaacag

SEQ ID NO: 1037767 - DNA, 33 bp, Homo sapien
gacttgaaaaacctcacacgtgcagctccattc

SEQ ID NO: 1037768 - DNA, 33 bp, Homo sapien
gacttgaaaaacctcatacgtgcagctccattc

SEQ ID NO: 1037769 - DNA, 33 bp, Homo sapien
caacgaggatcacacacattataagtcagcaca

SEQ ID NO: 1037770 - DNA, 33 bp, Homo sapien
caacgaggatcacacatattataagtcagcaca

SEQ ID NO: 1037771 - DNA, 33 bp, Homo sapien
ggatcaatgagtaaggaaaaatgggcttcaagg

SEQ ID NO: 1037772 - DNA, 33 bp, Homo sapien
ggatcaatgagtaagggaaaatgggcttcaagg

SEQ ID NO: 1037773 - DNA, 33 bp, Homo sapien
taaccctggaatttcacgtggaccctcagctat

SEQ ID NO: 1037774 - DNA, 33 bp, Homo sapien
taaccctggaatttcatgtggaccctcagctat

SEQ ID NO: 1037775 - DNA, 33 bp, Homo sapien
attttcctgcttagaaaggtcttcttccccgtc

SEQ ID NO: 1037776 - DNA, 33 bp, Homo sapien
attttcctgcttagaacggtcttcttccccgtc

SEQ ID NO: 1037777 - DNA, 33 bp, Homo sapien
gccagcttaattgtgcaacattgttcaatcaag

SEQ ID NO: 1037778 - DNA, 33 bp, Homo sapien
gccagcttaattgtgccacattgttcaatcaag

SEQ ID NO: 1037779 - DNA, 33 bp, Homo sapien
tcttatgtatccttccaaaagatagttgctcag

SEQ ID NO: 1037780 - DNA, 33 bp, Homo sapien
tcttatgtatccttccgaaagatagttgctcag

SEQ ID NO: 1037781 - DNA, 33 bp, Homo sapien
tataattgagctctgaaagccgagagctggagg

SEQ ID NO: 1037782 - DNA, 33 bp, Homo sapien
tataattgagctctgagagccgagagctggagg

SEQ ID NO: 1037783 - DNA, 33 bp, Homo sapien
gcagaggagacacaaaaccgtcctacagaggta

SEQ ID NO: 1037784 - DNA, 33 bp, Homo sapien
gcagaggagacacaaagccgtcctacagaggta

SEQ ID NO: 1037785 - DNA, 33 bp, Homo sapien
atctgtatttatattacgcaaagtcagagtagt

SEQ ID NO: 1037786 - DNA, 33 bp, Homo sapien
atctgtatttatattatgcaaagtcagagtagt

SEQ ID NO: 1037787 - DNA, 33 bp, Homo sapien
ctttcccatcccctaacggcaaaatgaattgct

SEQ ID NO: 1037788 - DNA, 33 bp, Homo sapien
ctttcccatcccctaatggcaaaatgaattgct

SEQ ID NO: 1037789 - DNA, 33 bp, Homo sapien
tccagcgtgctcagaaaaactaaaggaaaaaaa

SEQ ID NO: 1037790 - DNA, 33 bp, Homo sapien
tccagcgtgctcagaagaactaaaggaaaaaaa

SEQ ID NO: 1037791 - DNA, 33 bp, Homo sapien
agctatcaagagtactaacctcctacgcttgtt

SEQ ID NO: 1037792 - DNA, 33 bp, Homo sapien
agctatcaagagtactgacctcctacgcttgtt

SEQ ID NO: 1037793 - DNA, 33 bp, Homo sapien
ttcagcttttcatcacacctttagcactgagtt

SEQ ID NO: 1037794 - DNA, 33 bp, Homo sapien
ttcagcttttcatcacccctttagcactgagtt

SEQ ID NO: 1037795 - DNA, 33 bp, Homo sapien
ggcaaaagagcatacaacctgtgagagacaaga

SEQ ID NO: 1037796 - DNA, 33 bp, Homo sapien
ggcaaaagagcatacagcctgtgagagacaaga

SEQ ID NO: 1037797 - DNA, 33 bp, Homo sapien
ctggttctggaatgaaatacaacacacattagg

SEQ ID NO: 1037798 - DNA, 33 bp, Homo sapien
ctggttctggaatgaagtacaacacacattagg

SEQ ID NO: 1037799 - DNA, 33 bp, Homo sapien
aacctggctacttttcaaattttgtagagacaa

SEQ ID NO: 1037800 - DNA, 33 bp, Homo sapien
aacctggctacttttcgaattttgtagagacaa

SEQ ID NO: 1037801 - DNA, 33 bp, Homo sapien
ccactggggtttaaagacaattgataccattat

SEQ ID NO: 1037802 - DNA, 33 bp, Homo sapien
ccactggggtttaaaggcaattgataccattat

SEQ ID NO: 1037803 - DNA, 33 bp, Homo sapien
gggaacagaagttgaacaggtcaacactacctt

SEQ ID NO: 1037804 - DNA, 33 bp, Homo sapien
gggaacagaagttgaagaggtcaacactacctt

SEQ ID NO: 1037805 - DNA, 33 bp, Homo sapien
aaaaatttaggaagaacctctctaaagatagcc

SEQ ID NO: 1037806 - DNA, 33 bp, Homo sapien
aaaaatttaggaagaagctctctaaagatagcc

SEQ ID NO: 1037807 - DNA, 33 bp, Homo sapien
cattgcgtcctgcgcaatgaaaacgtgacttac

SEQ ID NO: 1037808 - DNA, 33 bp, Homo sapien
cattgcgtcctgcgcactgaaaacgtgacttac

SEQ ID NO: 1037809 - DNA, 33 bp, Homo sapien
tgggaaatggtaagaaaagtggatggatcaaaa

SEQ ID NO: 1037810 - DNA, 33 bp, Homo sapien
tgggaaatggtaagaagagtggatggatcaaaa

SEQ ID NO: 1037811 - DNA, 33 bp, Homo sapien
agctgatgcttgaaaaatggccctctgttaagt

SEQ ID NO: 1037812 - DNA, 33 bp, Homo sapien
agctgatgcttgaaaactggccctctgttaagt

SEQ ID NO: 1037813 - DNA, 33 bp, Homo sapien
gaccatcattaaatagcagtttttgccaccacc

SEQ ID NO: 1037814 - DNA, 33 bp, Homo sapien
gaccatcattaaatagtagtttttgccaccacc

SEQ ID NO: 1037815 - DNA, 33 bp, Homo sapien
ttgaccatgtgccttacgaacaccatcaccaaa

SEQ ID NO: 1037816 - DNA, 33 bp, Homo sapien
ttgaccatgtgccttatgaacaccatcaccaaa

SEQ ID NO: 1037817 - DNA, 33 bp, Homo sapien
caaggggtcatcaaccaacggagagtcccccag

SEQ ID NO: 1037818 - DNA, 33 bp, Homo sapien
caaggggtcatcaaccgacggagagtcccccag

SEQ ID NO: 1037819 - DNA, 33 bp, Homo sapien
tgtcctctagaagaaccctgagcttgcatggag

SEQ ID NO: 1037820 - DNA, 33 bp, Homo sapien
tgtcctctagaagaacgctgagcttgcatggag

SEQ ID NO: 1037821 - DNA, 33 bp, Homo sapien
tggctgctcagagtcacgtgtcagccttctccc

SEQ ID NO: 1037822 - DNA, 33 bp, Homo sapien
tggctgctcagagtcatgtgtcagccttctccc

SEQ ID NO: 1037823 - DNA, 33 bp, Homo sapien
gcctgaaataaataaccgaacacacatgataaa

SEQ ID NO: 1037824 - DNA, 33 bp, Homo sapien
gcctgaaataaataactgaacacacatgataaa

SEQ ID NO: 1037825 - DNA, 33 bp, Homo sapien
catgtgcatagcttgaaagcaaagagccagtga

SEQ ID NO: 1037826 - DNA, 33 bp, Homo sapien
catgtgcatagcttgacagcaaagagccagtga

SEQ ID NO: 1037827 - DNA, 33 bp, Homo sapien
tgcaacatgatttaccacttatagaatgtcttc

SEQ ID NO: 1037828 - DNA, 33 bp, Homo sapien
tgcaacatgatttaccgcttatagaatgtcttc

SEQ ID NO: 1037829 - DNA, 33 bp, Homo sapien
ggacatgagtatgacagtattagagccccagag

SEQ ID NO: 1037830 - DNA, 33 bp, Homo sapien
ggacatgagtatgacattattagagccccagag

SEQ ID NO: 1037831 - DNA, 33 bp, Homo sapien
tcttaattcattcccccagtatgtatgcccatt

SEQ ID NO: 1037832 - DNA, 33 bp, Homo sapien
tcttaattcattcccctagtatgtatgcccatt

SEQ ID NO: 1037833 - DNA, 33 bp, Homo sapien
attatgaagtggcataaaaatagggcgttttat

SEQ ID NO: 1037834 - DNA, 33 bp, Homo sapien
attatgaagtggcatacaaatagggcgttttat

SEQ ID NO: 1037835 - DNA, 33 bp, Homo sapien
acagcataaagttggacggataaatcaatgagg

SEQ ID NO: 1037836 - DNA, 33 bp, Homo sapien
acagcataaagttggatggataaatcaatgagg

SEQ ID NO: 1037837 - DNA, 33 bp, Homo sapien
atgaaaggtgacaacactaaggacaagtaggct

SEQ ID NO: 1037838 - DNA, 33 bp, Homo sapien
atgaaaggtgacaacattaaggacaagtaggct

SEQ ID NO: 1037839 - DNA, 33 bp, Homo sapien
agagaaaacatgaagcacatcacattttttggg

SEQ ID NO: 1037840 - DNA, 33 bp, Homo sapien
agagaaaacatgaagcgcatcacattttttggg

SEQ ID NO: 1037841 - DNA, 33 bp, Homo sapien
ggaggacgcttcctgagaaacttgtggtcttcg

SEQ ID NO: 1037842 - DNA, 33 bp, Homo sapien
ggaggacgcttcctgataaacttgtggtcttcg

SEQ ID NO: 1037843 - DNA, 33 bp, Homo sapien
tcacaaggttccaggcactctaaaggagaaatt

SEQ ID NO: 1037844 - DNA, 33 bp, Homo sapien
tcacaaggttccaggcgctctaaaggagaaatt

SEQ ID NO: 1037845 - DNA, 33 bp, Homo sapien
tacccttcacactaaccaggaatccatgagatg

SEQ ID NO: 1037846 - DNA, 33 bp, Homo sapien
tacccttcacactaacgaggaatccatgagatg

SEQ ID NO: 1037847 - DNA, 33 bp, Homo sapien
tcactaccatgcagcaagtagctctggagataa

SEQ ID NO: 1037848 - DNA, 33 bp, Homo sapien
tcactaccatgcagcaggtagctctggagataa

SEQ ID NO: 1037849 - DNA, 33 bp, Homo sapien
tatactaggagaaagaagctcattcacaaaagg

SEQ ID NO: 1037850 - DNA, 33 bp, Homo sapien
tatactaggagaaagacgctcattcacaaaagg

SEQ ID NO: 1037851 - DNA, 33 bp, Homo sapien
gagacatgaagattcccacaagttctgtactca

SEQ ID NO: 1037852 - DNA, 33 bp, Homo sapien
gagacatgaagattcctacaagttctgtactca

SEQ ID NO: 1037853 - DNA, 33 bp, Homo sapien
cttcagtctcttcccaataattaactacaattt

SEQ ID NO: 1037854 - DNA, 33 bp, Homo sapien
cttcagtctcttcccagtaattaactacaattt

SEQ ID NO: 1037855 - DNA, 33 bp, Homo sapien
ctgagttactgattgcaaaacaaatccataatt

SEQ ID NO: 1037856 - DNA, 33 bp, Homo sapien
ctgagttactgattgcgaaacaaatccataatt

SEQ ID NO: 1037857 - DNA, 33 bp, Homo sapien
ggcagtgcccagactacagcctgatccgtcctc

SEQ ID NO: 1037858 - DNA, 33 bp, Homo sapien
ggcagtgcccagactagagcctgatccgtcctc

SEQ ID NO: 1037859 - DNA, 33 bp, Homo sapien
gataacattagcagaaagttttcctcttctctt

SEQ ID NO: 1037860 - DNA, 33 bp, Homo sapien
gataacattagcagaaggttttcctcttctctt

SEQ ID NO: 1037861 - DNA, 33 bp, Homo sapien
caagactccatctccaaaaacaggaaacaaaag

SEQ ID NO: 1037862 - DNA, 33 bp, Homo sapien
caagactccatctccagaaacaggaaacaaaag

SEQ ID NO: 1037863 - DNA, 33 bp, Homo sapien
gtaacgtatctttctacaggtttgcttttgttt

SEQ ID NO: 1037864 - DNA, 33 bp, Homo sapien
gtaacgtatctttctataggtttgcttttgttt

SEQ ID NO: 1037865 - DNA, 33 bp, Homo sapien
tcaccatctctgcaggacataaactgaaaggtt

SEQ ID NO: 1037866 - DNA, 33 bp, Homo sapien
tcaccatctctgcagggcataaactgaaaggtt

SEQ ID NO: 1037867 - DNA, 33 bp, Homo sapien
caaagtaggtataaaacctgtgctgccagtttt

SEQ ID NO: 1037868 - DNA, 33 bp, Homo sapien
caaagtaggtataaaagctgtgctgccagtttt

SEQ ID NO: 1037869 - DNA, 33 bp, Homo sapien
caatttccttctgtacactgaagtaatgctcat

SEQ ID NO: 1037870 - DNA, 33 bp, Homo sapien
caatttccttctgtactctgaagtaatgctcat

SEQ ID NO: 1037871 - DNA, 33 bp, Homo sapien
aatatatttgcaaccaaaaagtccatgaagaac

SEQ ID NO: 1037872 - DNA, 33 bp, Homo sapien
aatatatttgcaaccataaagtccatgaagaac

SEQ ID NO: 1037873 - DNA, 33 bp, Homo sapien
gaagcagatcacaggacgataccacttacatag

SEQ ID NO: 1037874 - DNA, 33 bp, Homo sapien
gaagcagatcacaggatgataccacttacatag

SEQ ID NO: 1037875 - DNA, 33 bp, Homo sapien
tcatgttttcaccataccttttctatgtttaga

SEQ ID NO: 1037876 - DNA, 33 bp, Homo sapien
tcatgttttcaccatatcttttctatgtttaga

SEQ ID NO: 1037877 - DNA, 33 bp, Homo sapien
tttctgagaaatgttacgcaattttgttgtgca

SEQ ID NO: 1037878 - DNA, 33 bp, Homo sapien
tttctgagaaatgttaggcaattttgttgtgca

SEQ ID NO: 1037879 - DNA, 33 bp, Homo sapien
ttattttgaggattaactgattatcagggcctt

SEQ ID NO: 1037880 - DNA, 33 bp, Homo sapien
ttattttgaggattaattgattatcagggcctt

SEQ ID NO: 1037881 - DNA, 33 bp, Homo sapien
catgaatatggatataagcaagggacacattct

SEQ ID NO: 1037882 - DNA, 33 bp, Homo sapien
catgaatatggatataggcaagggacacattct

SEQ ID NO: 1037883 - DNA, 33 bp, Homo sapien
ctgtgactggaagaaaatatgctcaatacatac

SEQ ID NO: 1037884 - DNA, 33 bp, Homo sapien
ctgtgactggaagaaagtatgctcaatacatac

SEQ ID NO: 1037885 - DNA, 33 bp, Homo sapien
ctacattcagaatatacagggatctgttacagc

SEQ ID NO: 1037886 - DNA, 33 bp, Homo sapien
ctacattcagaatatatagggatctgttacagc

SEQ ID NO: 1037887 - DNA, 33 bp, Homo sapien
aaaattatgacattgacagaaatctaacataac

SEQ ID NO: 1037888 - DNA, 33 bp, Homo sapien
aaaattatgacattgagagaaatctaacataac

SEQ ID NO: 1037889 - DNA, 33 bp, Homo sapien
aagctgaatctcactgaagaaaggcatagcact

SEQ ID NO: 1037890 - DNA, 33 bp, Homo sapien
aagctgaatctcactggagaaaggcatagcact

SEQ ID NO: 1037891 - DNA, 33 bp, Homo sapien
aaaagttaagggctaaagaattctggcagaggt

SEQ ID NO: 1037892 - DNA, 33 bp, Homo sapien
aaaagttaagggctaaggaattctggcagaggt

SEQ ID NO: 1037893 - DNA, 33 bp, Homo sapien
ggaattgcatctgctgaaaaggtaacttgtggt

SEQ ID NO: 1037894 - DNA, 33 bp, Homo sapien
ggaattgcatctgctgcaaaggtaacttgtggt

SEQ ID NO: 1037895 - DNA, 33 bp, Homo sapien
aggctcaagaatcccaaataaatagccagaaga

SEQ ID NO: 1037896 - DNA, 33 bp, Homo sapien
aggctcaagaatcccagataaatagccagaaga

SEQ ID NO: 1037897 - DNA, 33 bp, Homo sapien
catacctcaaacaacaaagctgctgatagacta

SEQ ID NO: 1037898 - DNA, 33 bp, Homo sapien
catacctcaaacaacacagctgctgatagacta

SEQ ID NO: 1037899 - DNA, 33 bp, Homo sapien
agacaggacaaaattacggagaccttggaagaa

SEQ ID NO: 1037900 - DNA, 33 bp, Homo sapien
agacaggacaaaattagggagaccttggaagaa

SEQ ID NO: 1037901 - DNA, 33 bp, Homo sapien
tttaacaaatacttaagaagtgcctactatgag

SEQ ID NO: 1037902 - DNA, 33 bp, Homo sapien
tttaacaaatacttaataagtgcctactatgag

SEQ ID NO: 1037903 - DNA, 33 bp, Homo sapien
acaacaatagtaaaaagttatcactagcagatg

SEQ ID NO: 1037904 - DNA, 33 bp, Homo sapien
acaacaatagtaaaaatttatcactagcagatg

SEQ ID NO: 1037905 - DNA, 33 bp, Homo sapien
ggttcaaggaaggctccatgagttactcaaacc

SEQ ID NO: 1037906 - DNA, 33 bp, Homo sapien
ggttcaaggaaggctctatgagttactcaaacc

SEQ ID NO: 1037907 - DNA, 33 bp, Homo sapien
tgggagcaacctcagactctataaaggaattac

SEQ ID NO: 1037908 - DNA, 33 bp, Homo sapien
tgggagcaacctcagattctataaaggaattac

SEQ ID NO: 1037909 - DNA, 33 bp, Homo sapien
gatgacttagcttaaacggatgttgtagttatt

SEQ ID NO: 1037910 - DNA, 33 bp, Homo sapien
gatgacttagcttaaatggatgttgtagttatt

SEQ ID NO: 1037911 - DNA, 33 bp, Homo sapien
ttgtgtaaaacggaataagcattttgtgtctcc

SEQ ID NO: 1037912 - DNA, 33 bp, Homo sapien
ttgtgtaaaacggaatgagcattttgtgtctcc

SEQ ID NO: 1037913 - DNA, 33 bp, Homo sapien
tgagctctaatcaaaaagccagacaataacaca

SEQ ID NO: 1037914 - DNA, 33 bp, Homo sapien
tgagctctaatcaaaaggccagacaataacaca

SEQ ID NO: 1037915 - DNA, 33 bp, Homo sapien
ctcttgcaatatcttacgctttttgtgtgtttt

SEQ ID NO: 1037916 - DNA, 33 bp, Homo sapien
ctcttgcaatatcttatgctttttgtgtgtttt

SEQ ID NO: 1037917 - DNA, 33 bp, Homo sapien
ctgcctcctgttatatgagcggcagcattaggt

SEQ ID NO: 1037918 - DNA, 33 bp, Homo sapien
ctgcctcctgttatattagcggcagcattaggt

SEQ ID NO: 1037919 - DNA, 33 bp, Homo sapien
ctaaattcatgtatagaacagagataattcttg

SEQ ID NO: 1037920 - DNA, 33 bp, Homo sapien
ctaaattcatgtataggacagagataattcttg

SEQ ID NO: 1037921 - DNA, 33 bp, Homo sapien
aatgtcacttttatgcactagatcaagggttgg

SEQ ID NO: 1037922 - DNA, 33 bp, Homo sapien
aatgtcacttttatgctctagatcaagggttgg

SEQ ID NO: 1037923 - DNA, 33 bp, Homo sapien
cagctctgggccttcaatcatgtgttgcatgaa

SEQ ID NO: 1037924 - DNA, 33 bp, Homo sapien
cagctctgggccttcagtcatgtgttgcatgaa

SEQ ID NO: 1037925 - DNA, 33 bp, Homo sapien
ctaggtccctgggccaatagctgatctcaagga

SEQ ID NO: 1037926 - DNA, 33 bp, Homo sapien
ctaggtccctgggccagtagctgatctcaagga

SEQ ID NO: 1037927 - DNA, 33 bp, Homo sapien
tatccatggtatccaacccctcaactcctgctc

SEQ ID NO: 1037928 - DNA, 33 bp, Homo sapien
tatccatggtatccaatccctcaactcctgctc

SEQ ID NO: 1037929 - DNA, 33 bp, Homo sapien
aagagcttctagaaaaatggactcacatacact

SEQ ID NO: 1037930 - DNA, 33 bp, Homo sapien
aagagcttctagaaaattggactcacatacact

SEQ ID NO: 1037931 - DNA, 33 bp, Homo sapien
ttgctagcatgggaaaggagagttcatccccaa

SEQ ID NO: 1037932 - DNA, 33 bp, Homo sapien
ttgctagcatgggaaatgagagttcatccccaa

SEQ ID NO: 1037933 - DNA, 33 bp, Homo sapien
caaagcaattcagacacgtaaactagccatgat

SEQ ID NO: 1037934 - DNA, 33 bp, Homo sapien
caaagcaattcagacatgtaaactagccatgat

SEQ ID NO: 1037935 - DNA, 33 bp, Homo sapien
agcctaaattgctcataagaaaggttttgtgtt

SEQ ID NO: 1037936 - DNA, 33 bp, Homo sapien
agcctaaattgctcatcagaaaggttttgtgtt

SEQ ID NO: 1037937 - DNA, 33 bp, Homo sapien
aaacaatttcaaaaagcatttaggaggctaggt

SEQ ID NO: 1037938 - DNA, 33 bp, Homo sapien
aaacaatttcaaaaaggatttaggaggctaggt

SEQ ID NO: 1037939 - DNA, 33 bp, Homo sapien
ccattgtggaagggcaactattggtcaggggga

SEQ ID NO: 1037940 - DNA, 33 bp, Homo sapien
ccattgtggaagggcacctattggtcaggggga

SEQ ID NO: 1037941 - DNA, 33 bp, Homo sapien
tgtgccatatatcagaaggtgaaatgaggcgag

SEQ ID NO: 1037942 - DNA, 33 bp, Homo sapien
tgtgccatatatcagagggtgaaatgaggcgag

SEQ ID NO: 1037943 - DNA, 33 bp, Homo sapien
ccatctgcctgtcaagcattgttttaaaacatt

SEQ ID NO: 1037944 - DNA, 33 bp, Homo sapien
ccatctgcctgtcaagtattgttttaaaacatt

SEQ ID NO: 1037945 - DNA, 33 bp, Homo sapien
aactggaagattaacaaagagctgatacccgga

SEQ ID NO: 1037946 - DNA, 33 bp, Homo sapien
aactggaagattaacagagagctgatacccgga

SEQ ID NO: 1037947 - DNA, 33 bp, Homo sapien
ttaaaattttaggacactagaaggtagtttatc

SEQ ID NO: 1037948 - DNA, 33 bp, Homo sapien
ttaaaattttaggacattagaaggtagtttatc

SEQ ID NO: 1037949 - DNA, 33 bp, Homo sapien
tatatcaggtaccaacccagatctgctgatctc

SEQ ID NO: 1037950 - DNA, 33 bp, Homo sapien
tatatcaggtaccaactcagatctgctgatctc

SEQ ID NO: 1037951 - DNA, 33 bp, Homo sapien
tacaggataacaaaacaacaattaagcttgtgc

SEQ ID NO: 1037952 - DNA, 33 bp, Homo sapien
tacaggataacaaaacgacaattaagcttgtgc

SEQ ID NO: 1037953 - DNA, 33 bp, Homo sapien
ttgatctttgtgtgtccaatttttctcaacagc

SEQ ID NO: 1037954 - DNA, 33 bp, Homo sapien
ttgatctttgtgtgtctaatttttctcaacagc

SEQ ID NO: 1037955 - DNA, 33 bp, Homo sapien
tcaccttcaacatttgaatcagaagacaaaaaa

SEQ ID NO: 1037956 - DNA, 33 bp, Homo sapien
tcaccttcaacatttgcatcagaagacaaaaaa

SEQ ID NO: 1037957 - DNA, 33 bp, Homo sapien
cacatatttcaagcaacttcagatttttaaatg

SEQ ID NO: 1037958 - DNA, 33 bp, Homo sapien
cacatatttcaagcaatttcagatttttaaatg

SEQ ID NO: 1037959 - DNA, 33 bp, Homo sapien
gattgttttattttacccacctgctcatccata

SEQ ID NO: 1037960 - DNA, 33 bp, Homo sapien
gattgttttattttacgcacctgctcatccata

SEQ ID NO: 1037961 - DNA, 33 bp, Homo sapien
tacagatacagatacaatcacctgtcagaaaga

SEQ ID NO: 1037962 - DNA, 33 bp, Homo sapien
tacagatacagatacattcacctgtcagaaaga

SEQ ID NO: 1037963 - DNA, 33 bp, Homo sapien
gaaagcaagtgagtgcaatttgtataacagatg

SEQ ID NO: 1037964 - DNA, 33 bp, Homo sapien
gaaagcaagtgagtgcgatttgtataacagatg

SEQ ID NO: 1037965 - DNA, 33 bp, Homo sapien
ctcaaaactgtagtaaagatttctgcagtgggg

SEQ ID NO: 1037966 - DNA, 33 bp, Homo sapien
ctcaaaactgtagtaaggatttctgcagtgggg

SEQ ID NO: 1037967 - DNA, 33 bp, Homo sapien
aacaaatgaccacttacgtatttgagcaaacaa

SEQ ID NO: 1037968 - DNA, 33 bp, Homo sapien
aacaaatgaccacttatgtatttgagcaaacaa

SEQ ID NO: 1037969 - DNA, 33 bp, Homo sapien
agatgggagtgctgacagaagttaatgctttct

SEQ ID NO: 1037970 - DNA, 33 bp, Homo sapien
agatgggagtgctgacggaagttaatgctttct

SEQ ID NO: 1037971 - DNA, 33 bp, Homo sapien
aggaagaaggcagaaacattaagtatgatctta

SEQ ID NO: 1037972 - DNA, 33 bp, Homo sapien
aggaagaaggcagaaatattaagtatgatctta

SEQ ID NO: 1037973 - DNA, 33 bp, Homo sapien
tcttttcaatgacagaaaaagtttccacagact

SEQ ID NO: 1037974 - DNA, 33 bp, Homo sapien
tcttttcaatgacagagaaagtttccacagact

SEQ ID NO: 1037975 - DNA, 33 bp, Homo sapien
gggtgattaggatccaaagggaccatttgtgca

SEQ ID NO: 1037976 - DNA, 33 bp, Homo sapien
gggtgattaggatccagagggaccatttgtgca

SEQ ID NO: 1037977 - DNA, 33 bp, Homo sapien
atgagaacgcgttcaaaatggtctcacaacacc

SEQ ID NO: 1037978 - DNA, 33 bp, Homo sapien
atgagaacgcgttcaagatggtctcacaacacc

SEQ ID NO: 1037979 - DNA, 33 bp, Homo sapien
tcagggagtaggaaataagagagatagctgtta

SEQ ID NO: 1037980 - DNA, 33 bp, Homo sapien
tcagggagtaggaaatgagagagatagctgtta

SEQ ID NO: 1037981 - DNA, 33 bp, Homo sapien
ttaaagggaccacaaacgctgggtcagtggaca

SEQ ID NO: 1037982 - DNA, 33 bp, Homo sapien
ttaaagggaccacaaatgctgggtcagtggaca

SEQ ID NO: 1037983 - DNA, 33 bp, Homo sapien
atataagataggaaaaacattcaatagtgaaag

SEQ ID NO: 1037984 - DNA, 33 bp, Homo sapien
atataagataggaaaagcattcaatagtgaaag

SEQ ID NO: 1037985 - DNA, 33 bp, Homo sapien
ggaaggagaggtgaaactgaaatgctactaaag

SEQ ID NO: 1037986 - DNA, 33 bp, Homo sapien
ggaaggagaggtgaaattgaaatgctactaaag

SEQ ID NO: 1037987 - DNA, 33 bp, Homo sapien
gatccctcaattccaaatgagattttgtttaca

SEQ ID NO: 1037988 - DNA, 33 bp, Homo sapien
gatccctcaattccaactgagattttgtttaca

SEQ ID NO: 1037989 - DNA, 33 bp, Homo sapien
agaggaaagagcatgaaaaagaaaatggaaacc

SEQ ID NO: 1037990 - DNA, 33 bp, Homo sapien
agaggaaagagcatgagaaagaaaatggaaacc

SEQ ID NO: 1037991 - DNA, 33 bp, Homo sapien
tacaatatcatctgtacgtgctaccaaggtcac

SEQ ID NO: 1037992 - DNA, 33 bp, Homo sapien
tacaatatcatctgtatgtgctaccaaggtcac

SEQ ID NO: 1037993 - DNA, 33 bp, Homo sapien
cttgaacattctgtgacggatctggaaccagcg

SEQ ID NO: 1037994 - DNA, 33 bp, Homo sapien
cttgaacattctgtgatggatctggaaccagcg

SEQ ID NO: 1037995 - DNA, 33 bp, Homo sapien
aaccaaaattagtggcgctcagattttcctaat

SEQ ID NO: 1037996 - DNA, 33 bp, Homo sapien
aaccaaaattagtggctctcagattttcctaat

SEQ ID NO: 1037997 - DNA, 33 bp, Homo sapien
aacttgtctgagtagaagctgggaattggtttt

SEQ ID NO: 1037998 - DNA, 33 bp, Homo sapien
aacttgtctgagtagaggctgggaattggtttt

SEQ ID NO: 1037999 - DNA, 33 bp, Homo sapien
agtaaaaattaggaatcacgttgagcggtgttt

SEQ ID NO: 1038000 - DNA, 33 bp, Homo sapien
agtaaaaattaggaatgacgttgagcggtgttt

SEQ ID NO: 1038001 - DNA, 33 bp, Homo sapien
ggttaattttatgttacgtgaacttcacctcaa

SEQ ID NO: 1038002 - DNA, 33 bp, Homo sapien
ggttaattttatgttatgtgaacttcacctcaa

SEQ ID NO: 1038003 - DNA, 33 bp, Homo sapien
caaagagccatatagccaaagtttagagacagg

SEQ ID NO: 1038004 - DNA, 33 bp, Homo sapien
caaagagccatatagcgaaagtttagagacagg

SEQ ID NO: 1038005 - DNA, 33 bp, Homo sapien
gagaggcactagggtcaatggattatacattct

SEQ ID NO: 1038006 - DNA, 33 bp, Homo sapien
gagaggcactagggtcgatggattatacattct

SEQ ID NO: 1038007 - DNA, 33 bp, Homo sapien
accacctctctcttctgaagcctccaacaactc

SEQ ID NO: 1038008 - DNA, 33 bp, Homo sapien
accacctctctcttcttaagcctccaacaactc

SEQ ID NO: 1038009 - DNA, 33 bp, Homo sapien
atgatcattttttttacgccgatcaaaattgaa

SEQ ID NO: 1038010 - DNA, 33 bp, Homo sapien
atgatcattttttttatgccgatcaaaattgaa

SEQ ID NO: 1038011 - DNA, 33 bp, Homo sapien
aggttcctgtttgagaagagacctgaaagaatg

SEQ ID NO: 1038012 - DNA, 33 bp, Homo sapien
aggttcctgtttgagaggagacctgaaagaatg

SEQ ID NO: 1038013 - DNA, 33 bp, Homo sapien
cctgcaaaggatctgaccttgttcctttttatg

SEQ ID NO: 1038014 - DNA, 33 bp, Homo sapien
cctgcaaaggatctgatcttgttcctttttatg

SEQ ID NO: 1038015 - DNA, 33 bp, Homo sapien; identical to SEQ ID NO: 1038013

SEQ ID NO: 1038016 - DNA, 33 bp, Homo sapien; identical to SEQ ID NO: 1038014

SEQ ID NO: 1038017 - DNA, 33 bp, Homo sapien
accctagagaagatcaacatttgagaattagcc

SEQ ID NO: 1038018 - DNA, 33 bp, Homo sapien
accctagagaagatcagcatttgagaattagcc

SEQ ID NO: 1038019 - DNA, 33 bp, Homo sapien
gtatctattgcatttcacccaagtaaaaggagt

SEQ ID NO: 1038020 - DNA, 33 bp, Homo sapien
gtatctattgcatttcgcccaagtaaaaggagt

SEQ ID NO: 1038021 - DNA, 33 bp, Homo sapien
aaggtggcagaaccgcagaaatgcaggtttctc

SEQ ID NO: 1038022 - DNA, 33 bp, Homo sapien
aaggtggcagaaccgcggaaatgcaggtttctc

SEQ ID NO: 1038023 - DNA, 33 bp, Homo sapien
tattcacacatcaataaaaccagctgtgtagag

SEQ ID NO: 1038024 - DNA, 33 bp, Homo sapien
tattcacacatcaatacaaccagctgtgtagag

SEQ ID NO: 1038025 - DNA, 33 bp, Homo sapien
aaaaagccaggctcaaaatgtcacattctgcat

SEQ ID NO: 1038026 - DNA, 33 bp, Homo sapien
aaaaagccaggctcaatatgtcacattctgcat

SEQ ID NO: 1038027 - DNA, 33 bp, Homo sapien
ttgaaaatgatagcccaagctagaggaaatcgg

SEQ ID NO: 1038028 - DNA, 33 bp, Homo sapien
ttgaaaatgatagcccgagctagaggaaatcgg

SEQ ID NO: 1038029 - DNA, 33 bp, Homo sapien
ttgctaacattggccaccatctaaacttggcta

SEQ ID NO: 1038030 - DNA, 33 bp, Homo sapien
ttgctaacattggccatcatctaaacttggcta

SEQ ID NO: 1038031 - DNA, 33 bp, Homo sapien
cttttgaaaaatgaaacgcaattgtgaaaaggt

SEQ ID NO: 1038032 - DNA, 33 bp, Homo sapien
cttttgaaaaatgaaatgcaattgtgaaaaggt

SEQ ID NO: 1038033 - DNA, 33 bp, Homo sapien
acaataaagttcaggcaccttcacatggtataa

SEQ ID NO: 1038034 - DNA, 33 bp, Homo sapien
acaataaagttcaggctccttcacatggtataa

SEQ ID NO: 1038035 - DNA, 33 bp, Homo sapien
gcttactatgtaccagaccattttctaagcatt

SEQ ID NO: 1038036 - DNA, 33 bp, Homo sapien
gcttactatgtaccaggccattttctaagcatt

SEQ ID NO: 1038037 - DNA, 33 bp, Homo sapien
caaatacctctaacaaagactggtattcaagtt

SEQ ID NO: 1038038 - DNA, 33 bp, Homo sapien
caaatacctctaacaatgactggtattcaagtt

SEQ ID NO: 1038039 - DNA, 33 bp, Homo sapien
tcaccctacagtgttacggaacattaaaactta

SEQ ID NO: 1038040 - DNA, 33 bp, Homo sapien
tcaccctacagtgttatggaacattaaaactta

SEQ ID NO: 1038041 - DNA, 33 bp, Homo sapien
acagatcttttacccacaccacagtctattgga

SEQ ID NO: 1038042 - DNA, 33 bp, Homo sapien
acagatcttttacccataccacagtctattgga

SEQ ID NO: 1038043 - DNA, 33 bp, Homo sapien
cattgatgctttgtaaaaccagactataaaggc

SEQ ID NO: 1038044 - DNA, 33 bp, Homo sapien
cattgatgctttgtaacaccagactataaaggc

SEQ ID NO: 1038045 - DNA, 33 bp, Homo sapien
agagctatcataaaccaatgaccaaaatcatgc

SEQ ID NO: 1038046 - DNA, 33 bp, Homo sapien
agagctatcataaaccgatgaccaaaatcatgc

SEQ ID NO: 1038047 - DNA, 33 bp, Homo sapien
atgggtaaagtgcttaaagtggtgcctgacaag

SEQ ID NO: 1038048 - DNA, 33 bp, Homo sapien
atgggtaaagtgcttacagtggtgcctgacaag

SEQ ID NO: 1038049 - DNA, 33 bp, Homo sapien
gagttgttgtttagcacgaatgttgttacaatg

SEQ ID NO: 1038050 - DNA, 33 bp, Homo sapien
gagttgttgtttagcatgaatgttgttacaatg

SEQ ID NO: 1038051 - DNA, 33 bp, Homo sapien
tgtgaatgcttagacacatggagagagccaact

SEQ ID NO: 1038052 - DNA, 33 bp, Homo sapien
tgtgaatgcttagacatatggagagagccaact

SEQ ID NO: 1038053 - DNA, 33 bp, Homo sapien
agcattcagtttcaaacagaaaaggtttgaaaa

SEQ ID NO: 1038054 - DNA, 33 bp, Homo sapien
agcattcagtttcaaatagaaaaggtttgaaaa

SEQ ID NO: 1038055 - DNA, 33 bp, Homo sapien
ctctgcacacacgtggcaatctgacaaacgatc

SEQ ID NO: 1038056 - DNA, 33 bp, Homo sapien
ctctgcacacacgtgggaatctgacaaacgatc

SEQ ID NO: 1038057 - DNA, 33 bp, Homo sapien
caaagttagtttgaaaatggtaagctatcttga

SEQ ID NO: 1038058 - DNA, 33 bp, Homo sapien
caaagttagtttgaaattggtaagctatcttga

SEQ ID NO: 1038059 - DNA, 33 bp, Homo sapien
atgtaggctacaaaacagcaagatattaaaagt

SEQ ID NO: 1038060 - DNA, 33 bp, Homo sapien
atgtaggctacaaaactgcaagatattaaaagt

SEQ ID NO: 1038061 - DNA, 33 bp, Homo sapien
gggaccccctacttacacttcagacttcagcac

SEQ ID NO: 1038062 - DNA, 33 bp, Homo sapien
gggaccccctacttacgcttcagacttcagcac

SEQ ID NO: 1038063 - DNA, 33 bp, Homo sapien
cagaagcataggaaaggcaaggtgaaactattt

SEQ ID NO: 1038064 - DNA, 33 bp, Homo sapien
cagaagcataggaaagtcaaggtgaaactattt

SEQ ID NO: 1038065 - DNA, 33 bp, Homo sapien
tgtatcctccttcatacctgtggtgttagtttc

SEQ ID NO: 1038066 - DNA, 33 bp, Homo sapien
tgtatcctccttcatatctgtggtgttagtttc

SEQ ID NO: 1038067 - DNA, 33 bp, Homo sapien
ctcgttttctgatacactaaattatgcttttat

SEQ ID NO: 1038068 - DNA, 33 bp, Homo sapien
ctcgttttctgatacattaaattatgcttttat

SEQ ID NO: 1038069 - DNA, 33 bp, Homo sapien
tccacaacctcgacaacatctgttggtttttta

SEQ ID NO: 1038070 - DNA, 33 bp, Homo sapien
tccacaacctcgacaatatctgttggtttttta

SEQ ID NO: 1038071 - DNA, 33 bp, Homo sapien
ttcctcctatgtgaaaactcccaacagaggtct

SEQ ID NO: 1038072 - DNA, 33 bp, Homo sapien
ttcctcctatgtgaaacctcccaacagaggtct

SEQ ID NO: 1038073 - DNA, 33 bp, Homo sapien
tgaggtgaaagggctcagaatgaaaagctagca

SEQ ID NO: 1038074 - DNA, 33 bp, Homo sapien
tgaggtgaaagggctcggaatgaaaagctagca

SEQ ID NO: 1038075 - DNA, 33 bp, Homo sapien
tgtggaaaagatcagaagggatgagattatgag

SEQ ID NO: 1038076 - DNA, 33 bp, Homo sapien
tgtggaaaagatcagacgggatgagattatgag

SEQ ID NO: 1038077 - DNA, 33 bp, Homo sapien
ggacacgggcttggaaaatgctgatgaaagaaa

SEQ ID NO: 1038078 - DNA, 33 bp, Homo sapien
ggacacgggcttggaagatgctgatgaaagaaa

SEQ ID NO: 1038079 - DNA, 33 bp, Homo sapien
caccagagatgaatcacgaaaaacacgccaaag

SEQ ID NO: 1038080 - DNA, 33 bp, Homo sapien
caccagagatgaatcatgaaaaacacgccaaag

SEQ ID NO: 1038081 - DNA, 33 bp, Homo sapien
atgtgcacgttaaaaaaattgcacaactgtgta

SEQ ID NO: 1038082 - DNA, 33 bp, Homo sapien
atgtgcacgttaaaaagattgcacaactgtgta

SEQ ID NO: 1038083 - DNA, 33 bp, Homo sapien
ttgttctaccttaagagaaatgtcatcacatac

SEQ ID NO: 1038084 - DNA, 33 bp, Homo sapien
ttgttctaccttaagataaatgtcatcacatac

SEQ ID NO: 1038085 - DNA, 33 bp, Homo sapien
gtcattaagtttaggacggtctgtcacataaag

SEQ ID NO: 1038086 - DNA, 33 bp, Homo sapien
gtcattaagtttaggatggtctgtcacataaag

SEQ ID NO: 1038087 - DNA, 33 bp, Homo sapien
gcatctcataaggctgcagtcaatcagggtacc

SEQ ID NO: 1038088 - DNA, 33 bp, Homo sapien
gcatctcataaggctgtagtcaatcagggtacc

SEQ ID NO: 1038089 - DNA, 33 bp, Homo sapien
tcattttaataagtcaatcatagtccacttgta

SEQ ID NO: 1038090 - DNA, 33 bp, Homo sapien
tcattttaataagtcagtcatagtccacttgta

SEQ ID NO: 1038091 - DNA, 33 bp, Homo sapien
aactatagccagtaaaatgaatttgcatagtct

SEQ ID NO: 1038092 - DNA, 33 bp, Homo sapien
aactatagccagtaaagtgaatttgcatagtct

SEQ ID NO: 1038093 - DNA, 33 bp, Homo sapien
aaaaattagcaccaaagcaccaatttaaaggat

SEQ ID NO: 1038094 - DNA, 33 bp, Homo sapien
aaaaattagcaccaaatcaccaatttaaaggat

SEQ ID NO: 1038095 - DNA, 33 bp, Homo sapien
acaatatgggaataagaccatcttccaaaacct

SEQ ID NO: 1038096 - DNA, 33 bp, Homo sapien
acaatatgggaataagtccatcttccaaaacct

SEQ ID NO: 1038097 - DNA, 33 bp, Homo sapien
gcattggttatctgccacctctatactttcaga

SEQ ID NO: 1038098 - DNA, 33 bp, Homo sapien
gcattggttatctgccgcctctatactttcaga

SEQ ID NO: 1038099 - DNA, 33 bp, Homo sapien
atgtaaacaggaacaacaacatccacctatccc

SEQ ID NO: 1038100 - DNA, 33 bp, Homo sapien
atgtaaacaggaacaataacatccacctatccc

SEQ ID NO: 1038101 - DNA, 33 bp, Homo sapien
aaacgggttagagtagaaattgctggatgaagg

SEQ ID NO: 1038102 - DNA, 33 bp, Homo sapien
aaacgggttagagtaggaattgctggatgaagg

SEQ ID NO: 1038103 - DNA, 33 bp, Homo sapien
ttacaattgtattgtaggataaaggtctaactc

SEQ ID NO: 1038104 - DNA, 33 bp, Homo sapien
ttacaattgtattgtatgataaaggtctaactc

SEQ ID NO: 1038105 - DNA, 33 bp, Homo sapien
cgttatgtgaaatagcactttggcataccttgg

SEQ ID NO: 1038106 - DNA, 33 bp, Homo sapien
cgttatgtgaaatagcgctttggcataccttgg

SEQ ID NO: 1038107 - DNA, 33 bp, Homo sapien
tggtgccaataaataccagcatttgttcgtgga

SEQ ID NO: 1038108 - DNA, 33 bp, Homo sapien
tggtgccaataaatactagcatttgttcgtgga

SEQ ID NO: 1038109 - DNA, 33 bp, Homo sapien
ttaacttcagtgaggaaaaaaggttttctaagt

SEQ ID NO: 1038110 - DNA, 33 bp, Homo sapien
ttaacttcagtgaggagaaaaggttttctaagt

SEQ ID NO: 1038111 - DNA, 33 bp, Homo sapien
agctatctagaaacgaggtctactttgctatat

SEQ ID NO: 1038112 - DNA, 33 bp, Homo sapien
agctatctagaaacgatgtctactttgctatat

SEQ ID NO: 1038113 - DNA, 33 bp, Homo sapien
tattgttctctgtaataatgtcaccaggcctgc

SEQ ID NO: 1038114 - DNA, 33 bp, Homo sapien
tattgttctctgtaattatgtcaccaggcctgc

SEQ ID NO: 1038115 - DNA, 33 bp, Homo sapien
aactgactcaaaataaagataactggatttcag

SEQ ID NO: 1038116 - DNA, 33 bp, Homo sapien
aactgactcaaaataaggataactggatttcag

SEQ ID NO: 1038117 - DNA, 33 bp, Homo sapien
tagaaagatccactcacgggttacacatcatcg

SEQ ID NO: 1038118 - DNA, 33 bp, Homo sapien
tagaaagatccactcatgggttacacatcatcg

SEQ ID NO: 1038119 - DNA, 33 bp, Homo sapien
gggctgtgactctgcaagtaaaattatagatat

SEQ ID NO: 1038120 - DNA, 33 bp, Homo sapien
gggctgtgactctgcaggtaaaattatagatat

SEQ ID NO: 1038121 - DNA, 33 bp, Homo sapien
acagagaatggtctccacaagtcacaaattaca

SEQ ID NO: 1038122 - DNA, 33 bp, Homo sapien
acagagaatggtctccccaagtcacaaattaca

SEQ ID NO: 1038123 - DNA, 33 bp, Homo sapien
acagaagaagtattgaagtgttgctactgagat

SEQ ID NO: 1038124 - DNA, 33 bp, Homo sapien
acagaagaagtattgatgtgttgctactgagat

SEQ ID NO: 1038125 - DNA, 33 bp, Homo sapien
atgcatatacctgttaactaatgctgtaagtgt

SEQ ID NO: 1038126 - DNA, 33 bp, Homo sapien
atgcatatacctgttacctaatgctgtaagtgt

SEQ ID NO: 1038127 - DNA, 33 bp, Homo sapien
agagatttatttcatacgtgtgaactccagaac

SEQ ID NO: 1038128 - DNA, 33 bp, Homo sapien
agagatttatttcataggtgtgaactccagaac

SEQ ID NO: 1038129 - DNA, 33 bp, Homo sapien
ttttgcagatgttaagaatcttaaaatggagtg

SEQ ID NO: 1038130 - DNA, 33 bp, Homo sapien
ttttgcagatgttaagtatcttaaaatggagtg

SEQ ID NO: 1038131 - DNA, 33 bp, Homo sapien
aaagttttgtcaaaggcaattgattcctatgtt

SEQ ID NO: 1038132 - DNA, 33 bp, Homo sapien
aaagttttgtcaaaggtaattgattcctatgtt

SEQ ID NO: 1038133 - DNA, 33 bp, Homo sapien
aatgtcaacattaacaactgctcatctggtctc

SEQ ID NO: 1038134 - DNA, 33 bp, Homo sapien
aatgtcaacattaacacctgctcatctggtctc

SEQ ID NO: 1038135 - DNA, 33 bp, Homo sapien
cacagaattggaatcacacaacacaggtgtgct

SEQ ID NO: 1038136 - DNA, 33 bp, Homo sapien
cacagaattggaatcagacaacacaggtgtgct

SEQ ID NO: 1038137 - DNA, 33 bp, Homo sapien
tgggattctcttttcacctggttgcaacacttc

SEQ ID NO: 1038138 - DNA, 33 bp, Homo sapien
tgggattctcttttcatctggttgcaacacttc

SEQ ID NO: 1038139 - DNA, 33 bp, Homo sapien
ctactcttgttattcccaaacttcgacagagaa

SEQ ID NO: 1038140 - DNA, 33 bp, Homo sapien
ctactcttgttattcctaaacttcgacagagaa

SEQ ID NO: 1038141 - DNA, 33 bp, Homo sapien
atagttacagctaactcagaaagacagaacatc

SEQ ID NO: 1038142 - DNA, 33 bp, Homo sapien
atagttacagctaacttagaaagacagaacatc

SEQ ID NO: 1038143 - DNA, 33 bp, Homo sapien
cccctctaatgtaagccgctccccattctacca

SEQ ID NO: 1038144 - DNA, 33 bp, Homo sapien
cccctctaatgtaagctgctccccattctacca

SEQ ID NO: 1038145 - DNA, 33 bp, Homo sapien
ttatagggcctacaaactgcaacaaaggttggg

SEQ ID NO: 1038146 - DNA, 33 bp, Homo sapien
ttatagggcctacaaattgcaacaaaggttggg

SEQ ID NO: 1038147 - DNA, 33 bp, Homo sapien
gattatttcatcacccgcgtactaaccatagtg

SEQ ID NO: 1038148 - DNA, 33 bp, Homo sapien
gattatttcatcaccctcgtactaaccatagtg

SEQ ID NO: 1038149 - DNA, 33 bp, Homo sapien
ttgtgctacgaatttcacaggttttcatctttt

SEQ ID NO: 1038150 - DNA, 33 bp, Homo sapien
ttgtgctacgaatttcgcaggttttcatctttt

SEQ ID NO: 1038151 - DNA, 33 bp, Homo sapien
cacatatgtacaatgacagaatttttttttaca

SEQ ID NO: 1038152 - DNA, 33 bp, Homo sapien
cacatatgtacaatgagagaatttttttttaca

SEQ ID NO: 1038153 - DNA, 33 bp, Homo sapien
tgaaataagatgacaacagtggaagaaagggga

SEQ ID NO: 1038154 - DNA, 33 bp, Homo sapien
tgaaataagatgacaatagtggaagaaagggga

SEQ ID NO: 1038155 - DNA, 33 bp, Homo sapien
agattgtacagctccaaggggcagttctcaggg

SEQ ID NO: 1038156 - DNA, 33 bp, Homo sapien
agattgtacagctccacggggcagttctcaggg

SEQ ID NO: 1038157 - DNA, 33 bp, Homo sapien
gggtctcaatggactacggatttggataaattt

SEQ ID NO: 1038158 - DNA, 33 bp, Homo sapien
gggtctcaatggactatggatttggataaattt

SEQ ID NO: 1038159 - DNA, 33 bp, Homo sapien
gagtcttgtctgttagcatgatgccatgtgttt

SEQ ID NO: 1038160 - DNA, 33 bp, Homo sapien
gagtcttgtctgttagtatgatgccatgtgttt

SEQ ID NO: 1038161 - DNA, 33 bp, Homo sapien
ttcacaagacctttcacgtgttgggcaaactca

SEQ ID NO: 1038162 - DNA, 33 bp, Homo sapien
ttcacaagacctttcatgtgttgggcaaactca

SEQ ID NO: 1038163 - DNA, 33 bp, Homo sapien
tgtgatccagggcctaactcttcccacaccacc

SEQ ID NO: 1038164 - DNA, 33 bp, Homo sapien
tgtgatccagggcctagctcttcccacaccacc

SEQ ID NO: 1038165 - DNA, 33 bp, Homo sapien
ttttaacctaaaagccacctctgaaaatttatc

SEQ ID NO: 1038166 - DNA, 33 bp, Homo sapien
ttttaacctaaaagccgcctctgaaaatttatc

SEQ ID NO: 1038167 - DNA, 33 bp, Homo sapien
ctccatctaaaaatctaagagccacagaatttt

SEQ ID NO: 1038168 - DNA, 33 bp, Homo sapien
ctccatctaaaaatctgagagccacagaatttt

SEQ ID NO: 1038169 - DNA, 33 bp, Homo sapien
aaacgtcttgactagaggtacacagtgtcattg

SEQ ID NO: 1038170 - DNA, 33 bp, Homo sapien
aaacgtcttgactagatgtacacagtgtcattg

SEQ ID NO: 1038171 - DNA, 33 bp, Homo sapien
cgacaccagtgagaggaatcaaatgagcacatt

SEQ ID NO: 1038172 - DNA, 33 bp, Homo sapien
cgacaccagtgagagggatcaaatgagcacatt

SEQ ID NO: 1038173 - DNA, 33 bp, Homo sapien
agccagggagttctgtaaaattatcttgtgttg

SEQ ID NO: 1038174 - DNA, 33 bp, Homo sapien
agccagggagttctgtgaaattatcttgtgttg

SEQ ID NO: 1038175 - DNA, 33 bp, Homo sapien
cacaccaaaacgagtaaaaaagctcctttctaa

SEQ ID NO: 1038176 - DNA, 33 bp, Homo sapien
cacaccaaaacgagtacaaaagctcctttctaa

SEQ ID NO: 1038177 - DNA, 33 bp, Homo sapien
attcttccaaattctacgtccttgactacctat

SEQ ID NO: 1038178 - DNA, 33 bp, Homo sapien
attcttccaaattctatgtccttgactacctat

SEQ ID NO: 1038179 - DNA, 33 bp, Homo sapien
ggatgagatgaagaataaagagaagaatcagct

SEQ ID NO: 1038180 - DNA, 33 bp, Homo sapien
ggatgagatgaagaatgaagagaagaatcagct

SEQ ID NO: 1038181 - DNA, 33 bp, Homo sapien
aatagcatcaacttcaactgaggagttaatttt

SEQ ID NO: 1038182 - DNA, 33 bp, Homo sapien
aatagcatcaacttcacctgaggagttaatttt

SEQ ID NO: 1038183 - DNA, 33 bp, Homo sapien
gcttctttgttttgtacgccggcccttcatggt

SEQ ID NO: 1038184 - DNA, 33 bp, Homo sapien
gcttctttgttttgtatgccggcccttcatggt

SEQ ID NO: 1038185 - DNA, 33 bp, Homo sapien
ttgttactactgattgaatgtccttcaagattt

SEQ ID NO: 1038186 - DNA, 33 bp, Homo sapien
ttgttactactgattggatgtccttcaagattt

SEQ ID NO: 1038187 - DNA, 33 bp, Homo sapien
taattttcgaagttaccctgcatgagtgagatt

SEQ ID NO: 1038188 - DNA, 33 bp, Homo sapien
taattttcgaagttacgctgcatgagtgagatt

SEQ ID NO: 1038189 - DNA, 33 bp, Homo sapien
ctcatgtttccagagcaatctatatgccagtta

SEQ ID NO: 1038190 - DNA, 33 bp, Homo sapien
ctcatgtttccagagccatctatatgccagtta

SEQ ID NO: 1038191 - DNA, 33 bp, Homo sapien
aaggagagcaattggacgctactaatgtatctg

SEQ ID NO: 1038192 - DNA, 33 bp, Homo sapien
aaggagagcaattggatgctactaatgtatctg

SEQ ID NO: 1038193 - DNA, 33 bp, Homo sapien
tttcctacattgaacaactgttatacttgtaat

SEQ ID NO: 1038194 - DNA, 33 bp, Homo sapien
tttcctacattgaacatctgttatacttgtaat

SEQ ID NO: 1038195 - DNA, 33 bp, Homo sapien
gaagccataaagaaagcattgatgtgtatctaa

SEQ ID NO: 1038196 - DNA, 33 bp, Homo sapien
gaagccataaagaaaggattgatgtgtatctaa

SEQ ID NO: 1038197 - DNA, 33 bp, Homo sapien
tctatcatttttactacgtacttccatctagtt

SEQ ID NO: 1038198 - DNA, 33 bp, Homo sapien
tctatcatttttactatgtacttccatctagtt

SEQ ID NO: 1038199 - DNA, 33 bp, Homo sapien
ccttagggtgattccccgcacactgaattagag

SEQ ID NO: 1038200 - DNA, 33 bp, Homo sapien
ccttagggtgattccctgcacactgaattagag

SEQ ID NO: 1038201 - DNA, 33 bp, Homo sapien
ctatgggctaaagtagaaaaatcacatgactat

SEQ ID NO: 1038202 - DNA, 33 bp, Homo sapien
ctatgggctaaagtaggaaaatcacatgactat

SEQ ID NO: 1038203 - DNA, 33 bp, Homo sapien
cattggtagaacacataatcgaaggatttaagc

SEQ ID NO: 1038204 - DNA, 33 bp, Homo sapien
cattggtagaacacatcatcgaaggatttaagc

SEQ ID NO: 1038205 - DNA, 33 bp, Homo sapien
tttacttgtagttcacacatttcatttacataa

SEQ ID NO: 1038206 - DNA, 33 bp, Homo sapien
tttacttgtagttcacgcatttcatttacataa

SEQ ID NO: 1038207 - DNA, 33 bp, Homo sapien
cgctcatttctttgtcacggtaggagtaaatga

SEQ ID NO: 1038208 - DNA, 33 bp, Homo sapien
cgctcatttctttgtcgcggtaggagtaaatga

SEQ ID NO: 1038209 - DNA, 33 bp, Homo sapien
aggcaaaagataagcacgaatgataagtgtcct

SEQ ID NO: 1038210 - DNA, 33 bp, Homo sapien
aggcaaaagataagcatgaatgataagtgtcct

SEQ ID NO: 1038211 - DNA, 33 bp, Homo sapien
ctgtgtttggatcttcaagactcaatccaataa

SEQ ID NO: 1038212 - DNA, 33 bp, Homo sapien
ctgtgtttggatcttcgagactcaatccaataa

SEQ ID NO: 1038213 - DNA, 33 bp, Homo sapien
gcctcaaggatcaaaccgaccaaaagatgagga

SEQ ID NO: 1038214 - DNA, 33 bp, Homo sapien
gcctcaaggatcaaactgaccaaaagatgagga

SEQ ID NO: 1038215 - DNA, 33 bp, Homo sapien
agattctgggataccacgctgcctgacctgagg

SEQ ID NO: 1038216 - DNA, 33 bp, Homo sapien
agattctgggataccatgctgcctgacctgagg

SEQ ID NO: 1038217 - DNA, 33 bp, Homo sapien
gttagagtctgttgtacggtatggaacttgtac

SEQ ID NO: 1038218 - DNA, 33 bp, Homo sapien
gttagagtctgttgtagggtatggaacttgtac

SEQ ID NO: 1038219 - DNA, 33 bp, Homo sapien
acattgaaatgacttgaatgctagtgccattct

SEQ ID NO: 1038220 - DNA, 33 bp, Homo sapien
acattgaaatgacttgtatgctagtgccattct

SEQ ID NO: 1038221 - DNA, 33 bp, Homo sapien
tctagagtgtatccataagcattctttctagaa

SEQ ID NO: 1038222 - DNA, 33 bp, Homo sapien
tctagagtgtatccatgagcattctttctagaa

SEQ ID NO: 1038223 - DNA, 33 bp, Homo sapien
taaaatcattttctctcagaacactgtcttcta

SEQ ID NO: 1038224 - DNA, 33 bp, Homo sapien
taaaatcattttctctgagaacactgtcttcta

SEQ ID NO: 1038225 - DNA, 33 bp, Homo sapien
tccatttggatataacacaatcacttaattagg

SEQ ID NO: 1038226 - DNA, 33 bp, Homo sapien
tccatttggatataacgcaatcacttaattagg

SEQ ID NO: 1038227 - DNA, 33 bp, Homo sapien
actagtgaagctgatcaccttttcatgtgctta

SEQ ID NO: 1038228 - DNA, 33 bp, Homo sapien
actagtgaagctgatcgccttttcatgtgctta

SEQ ID NO: 1038229 - DNA, 33 bp, Homo sapien
acacaaagatgtgtagaaaatgcccagagcaaa

SEQ ID NO: 1038230 - DNA, 33 bp, Homo sapien
acacaaagatgtgtaggaaatgcccagagcaaa

SEQ ID NO: 1038231 - DNA, 33 bp, Homo sapien
gtttgtttctattacaaactagtattccattga

SEQ ID NO: 1038232 - DNA, 33 bp, Homo sapien
gtttgtttctattacagactagtattccattga

SEQ ID NO: 1038233 - DNA, 33 bp, Homo sapien
gccagcacactgaggccacgtgtaagcaggtgg

SEQ ID NO: 1038234 - DNA, 33 bp, Homo sapien
gccagcacactgaggctacgtgtaagcaggtgg

SEQ ID NO: 1038235 - DNA, 33 bp, Homo sapien
gctccctggtctaagaaggaggaaaaaagagga

SEQ ID NO: 1038236 - DNA, 33 bp, Homo sapien
gctccctggtctaagacggaggaaaaaagagga

SEQ ID NO: 1038237 - DNA, 33 bp, Homo sapien
ctctatctttaggccacgacttctccttctgcc

SEQ ID NO: 1038238 - DNA, 33 bp, Homo sapien
ctctatctttaggccatgacttctccttctgcc

SEQ ID NO: 1038239 - DNA, 33 bp, Homo sapien
ggaactaaaggaactacatgaaaattggctgat

SEQ ID NO: 1038240 - DNA, 33 bp, Homo sapien
ggaactaaaggaactatatgaaaattggctgat

SEQ ID NO: 1038241 - DNA, 33 bp, Homo sapien
tttataaataagtataaacaccttaattgcacc

SEQ ID NO: 1038242 - DNA, 33 bp, Homo sapien
tttataaataagtatacacaccttaattgcacc

SEQ ID NO: 1038243 - DNA, 33 bp, Homo sapien
atatagaagggaaaaaaatagtcacaatgtgta

SEQ ID NO: 1038244 - DNA, 33 bp, Homo sapien
atatagaagggaaaaagatagtcacaatgtgta

SEQ ID NO: 1038245 - DNA, 33 bp, Homo sapien
aatgaacttcttataaactcctattaatgttga

SEQ ID NO: 1038246 - DNA, 33 bp, Homo sapien
aatgaacttcttataagctcctattaatgttga

SEQ ID NO: 1038247 - DNA, 33 bp, Homo sapien
aatagtagtatgtcttaaaaaagtatgtgcata

SEQ ID NO: 1038248 - DNA, 33 bp, Homo sapien
aatagtagtatgtctttaaaaagtatgtgcata

SEQ ID NO: 1038249 - DNA, 33 bp, Homo sapien
ttgatcttcctactcaacaatttaaatggatcc

SEQ ID NO: 1038250 - DNA, 33 bp, Homo sapien
ttgatcttcctactcagcaatttaaatggatcc

SEQ ID NO: 1038251 - DNA, 33 bp, Homo sapien
acgttatcatcaaaaacgaaacactgactaccc

SEQ ID NO: 1038252 - DNA, 33 bp, Homo sapien
acgttatcatcaaaaatgaaacactgactaccc

SEQ ID NO: 1038253 - DNA, 33 bp, Homo sapien
ttaaaggataagggaaacttgagtatgatatca

SEQ ID NO: 1038254 - DNA, 33 bp, Homo sapien
ttaaaggataagggaaccttgagtatgatatca

SEQ ID NO: 1038255 - DNA, 33 bp, Homo sapien
cagaagaggaaaaaaagtatggccaacccaagg

SEQ ID NO: 1038256 - DNA, 33 bp, Homo sapien
cagaagaggaaaaaaattatggccaacccaagg

SEQ ID NO: 1038257 - DNA, 33 bp, Homo sapien
tgtcaccatatccaaaatgcttcgctggagaac

SEQ ID NO: 1038258 - DNA, 33 bp, Homo sapien
tgtcaccatatccaaagtgcttcgctggagaac

SEQ ID NO: 1038259 - DNA, 33 bp, Homo sapien
gcgttaggagaaatacccaatgtggatgatggg

SEQ ID NO: 1038260 - DNA, 33 bp, Homo sapien
gcgttaggagaaatactcaatgtggatgatggg

SEQ ID NO: 1038261 - DNA, 33 bp, Homo sapien
ttgtaacatagtgccactaaaaaaaatccaata

SEQ ID NO: 1038262 - DNA, 33 bp, Homo sapien
ttgtaacatagtgccattaaaaaaaatccaata

SEQ ID NO: 1038263 - DNA, 33 bp, Homo sapien
tcataatcctgatagaggacagtttatagaatc

SEQ ID NO: 1038264 - DNA, 33 bp, Homo sapien
tcataatcctgatagatgacagtttatagaatc

SEQ ID NO: 1038265 - DNA, 33 bp, Homo sapien
aaatctaattttctcaacaatctcctcatttgg

SEQ ID NO: 1038266 - DNA, 33 bp, Homo sapien
aaatctaattttctcagcaatctcctcatttgg

SEQ ID NO: 1038267 - DNA, 33 bp, Homo sapien
tgccacttactcgttgaattgactttgggcaat

SEQ ID NO: 1038268 - DNA, 33 bp, Homo sapien
tgccacttactcgttggattgactttgggcaat

SEQ ID NO: 1038269 - DNA, 33 bp, Homo sapien
gctgcttaattataacaaccttatggcaaatat

SEQ ID NO: 1038270 - DNA, 33 bp, Homo sapien
gctgcttaattataacgaccttatggcaaatat

SEQ ID NO: 1038271 - DNA, 33 bp, Homo sapien
gttatttgggactatgcaactcgtaagcaagga

SEQ ID NO: 1038272 - DNA, 33 bp, Homo sapien
gttatttgggactatggaactcgtaagcaagga

SEQ ID NO: 1038273 - DNA, 33 bp, Homo sapien
ccttttgaagtgtggacagaggaaccagaacat

SEQ ID NO: 1038274 - DNA, 33 bp, Homo sapien
ccttttgaagtgtggatagaggaaccagaacat

SEQ ID NO: 1038275 - DNA, 33 bp, Homo sapien
ttagtgcctgttttcactcccaaaagcatctca

SEQ ID NO: 1038276 - DNA, 33 bp, Homo sapien
ttagtgcctgttttcattcccaaaagcatctca

SEQ ID NO: 1038277 - DNA, 33 bp, Homo sapien
attactccttatgtctgacattctctgtactag

SEQ ID NO: 1038278 - DNA, 33 bp, Homo sapien
attactccttatgtcttacattctctgtactag

SEQ ID NO: 1038279 - DNA, 33 bp, Homo sapien
aactgcctagctgtgccgactgggctttgtttc

SEQ ID NO: 1038280 - DNA, 33 bp, Homo sapien
aactgcctagctgtgctgactgggctttgtttc

SEQ ID NO: 1038281 - DNA, 33 bp, Homo sapien
cgacacctttatgttccatgccttctaaaatac

SEQ ID NO: 1038282 - DNA, 33 bp, Homo sapien
cgacacctttatgttctatgccttctaaaatac

SEQ ID NO: 1038283 - DNA, 33 bp, Homo sapien
cacactttaaaaaataagctgcatctaatctaa

SEQ ID NO: 1038284 - DNA, 33 bp, Homo sapien
cacactttaaaaaatatgctgcatctaatctaa

SEQ ID NO: 1038285 - DNA, 33 bp, Homo sapien
tactgaatttatccaacgtaggagatttttggt

SEQ ID NO: 1038286 - DNA, 33 bp, Homo sapien
tactgaatttatccaatgtaggagatttttggt

SEQ ID NO: 1038287 - DNA, 33 bp, Homo sapien
ttgaaagataaaggagcagctccattaaccatt

SEQ ID NO: 1038288 - DNA, 33 bp, Homo sapien
ttgaaagataaaggagtagctccattaaccatt

SEQ ID NO: 1038289 - DNA, 33 bp, Homo sapien
tgatttcaatatgcccacattaaacacagcatc

SEQ ID NO: 1038290 - DNA, 33 bp, Homo sapien
tgatttcaatatgcccgcattaaacacagcatc

SEQ ID NO: 1038291 - DNA, 33 bp, Homo sapien
gaagctcataagcaaaagattaggaatcagaaa

SEQ ID NO: 1038292 - DNA, 33 bp, Homo sapien
gaagctcataagcaaaggattaggaatcagaaa

SEQ ID NO: 1038293 - DNA, 33 bp, Homo sapien
aaatttgcagaagaggaaaaggattcatagaat

SEQ ID NO: 1038294 - DNA, 33 bp, Homo sapien
aaatttgcagaagagggaaaggattcatagaat

SEQ ID NO: 1038295 - DNA, 33 bp, Homo sapien
tgtagccacaggtggcaatggtattttaaaaca

SEQ ID NO: 1038296 - DNA, 33 bp, Homo sapien
tgtagccacaggtggcgatggtattttaaaaca

SEQ ID NO: 1038297 - DNA, 33 bp, Homo sapien
atccttttccacaaataagatcagtcttttcat

SEQ ID NO: 1038298 - DNA, 33 bp, Homo sapien
atccttttccacaaatcagatcagtcttttcat

SEQ ID NO: 1038299 - DNA, 33 bp, Homo sapien
attaaattcagatttcaaacttttggcaggaac

SEQ ID NO: 1038300 - DNA, 33 bp, Homo sapien
attaaattcagatttcgaacttttggcaggaac

SEQ ID NO: 1038301 - DNA, 33 bp, Homo sapien
gcatatgttaaaagctaaatcttgttctgcatt

SEQ ID NO: 1038302 - DNA, 33 bp, Homo sapien
gcatatgttaaaagcttaatcttgttctgcatt

SEQ ID NO: 1038303 - DNA, 33 bp, Homo sapien
caagcataggataaggcattggttttcactgtt

SEQ ID NO: 1038304 - DNA, 33 bp, Homo sapien
caagcataggataaggtattggttttcactgtt

SEQ ID NO: 1038305 - DNA, 33 bp, Homo sapien
ttatcctatgcttgccaaattgttattgtttta

SEQ ID NO: 1038306 - DNA, 33 bp, Homo sapien
ttatcctatgcttgccgaattgttattgtttta

SEQ ID NO: 1038307 - DNA, 33 bp, Homo sapien
atgtattagaaaagggccacgcattttgctgtt

SEQ ID NO: 1038308 - DNA, 33 bp, Homo sapien
atgtattagaaaagggtcacgcattttgctgtt

SEQ ID NO: 1038309 - DNA, 33 bp, Homo sapien
cctacccaggagtagcaaaactggagatagaaa

SEQ ID NO: 1038310 - DNA, 33 bp, Homo sapien
cctacccaggagtagcgaaactggagatagaaa

SEQ ID NO: 1038311 - DNA, 33 bp, Homo sapien
ggggtgcgatgatggacggaggactgggctttt

SEQ ID NO: 1038312 - DNA, 33 bp, Homo sapien
ggggtgcgatgatggatggaggactgggctttt

SEQ ID NO: 1038313 - DNA, 33 bp, Homo sapien
ttatctcacaaataatcataggggttgatacca

SEQ ID NO: 1038314 - DNA, 33 bp, Homo sapien
ttatctcacaaataatgataggggttgatacca

SEQ ID NO: 1038315 - DNA, 33 bp, Homo sapien
gagaattttagcttaactaatgcatatattcac

SEQ ID NO: 1038316 - DNA, 33 bp, Homo sapien
gagaattttagcttaattaatgcatatattcac

SEQ ID NO: 1038317 - DNA, 33 bp, Homo sapien
gtctcatcaaggaatccaggggctgaactggtc

SEQ ID NO: 1038318 - DNA, 33 bp, Homo sapien
gtctcatcaaggaatctaggggctgaactggtc

SEQ ID NO: 1038319 - DNA, 33 bp, Homo sapien
aaaccaattaagtagcagaagtctggaaatcaa

SEQ ID NO: 1038320 - DNA, 33 bp, Homo sapien
aaaccaattaagtagccgaagtctggaaatcaa

SEQ ID NO: 1038321 - DNA, 33 bp, Homo sapien
actaataagcaatatgacaggtagcaataagtg

SEQ ID NO: 1038322 - DNA, 33 bp, Homo sapien
actaataagcaatatgtcaggtagcaataagtg

SEQ ID NO: 1038323 - DNA, 33 bp, Homo sapien
gatttcctaaattatcggagttctcacttacat

SEQ ID NO: 1038324 - DNA, 33 bp, Homo sapien
gatttcctaaattatctgagttctcacttacat

SEQ ID NO: 1038325 - DNA, 33 bp, Homo sapien
tcaaacagtaaatggaaggattgatgtcacttg

SEQ ID NO: 1038326 - DNA, 33 bp, Homo sapien
tcaaacagtaaatggagggattgatgtcacttg

SEQ ID NO: 1038327 - DNA, 33 bp, Homo sapien
taaaactgaaatagtaccctggtttggacatac

SEQ ID NO: 1038328 - DNA, 33 bp, Homo sapien
taaaactgaaatagtatcctggtttggacatac

SEQ ID NO: 1038329 - DNA, 33 bp, Homo sapien
taaaatctaagaatctcaactcatggcccatat

SEQ ID NO: 1038330 - DNA, 33 bp, Homo sapien
taaaatctaagaatcttaactcatggcccatat

SEQ ID NO: 1038331 - DNA, 33 bp, Homo sapien
accaagactcagatataaagcagtttccaaata

SEQ ID NO: 1038332 - DNA, 33 bp, Homo sapien
accaagactcagatatgaagcagtttccaaata

SEQ ID NO: 1038333 - DNA, 33 bp, Homo sapien
taaaatccagcattgactaaaggagggcagcaa

SEQ ID NO: 1038334 - DNA, 33 bp, Homo sapien
taaaatccagcattgattaaaggagggcagcaa

SEQ ID NO: 1038335 - DNA, 33 bp, Homo sapien
ttgagagaagatggacagggggtagtacataaa

SEQ ID NO: 1038336 - DNA, 33 bp, Homo sapien
ttgagagaagatggacggggggtagtacataaa

SEQ ID NO: 1038337 - DNA, 33 bp, Homo sapien
taaggtctcagagtaacggttagggagcagaaa

SEQ ID NO: 1038338 - DNA, 33 bp, Homo sapien
taaggtctcagagtaagggttagggagcagaaa

SEQ ID NO: 1038339 - DNA, 33 bp, Homo sapien
tggagttgatcaaacaagaagtagcctggtttg

SEQ ID NO: 1038340 - DNA, 33 bp, Homo sapien
tggagttgatcaaacaggaagtagcctggtttg

SEQ ID NO: 1038341 - DNA, 33 bp, Homo sapien
agcaaggaatttgtacccaaagtaggaacgcaa

SEQ ID NO: 1038342 - DNA, 33 bp, Homo sapien
agcaaggaatttgtacgcaaagtaggaacgcaa

SEQ ID NO: 1038343 - DNA, 33 bp, Homo sapien
aagaaagcaggtacaactccaaatttttcattt

SEQ ID NO: 1038344 - DNA, 33 bp, Homo sapien
aagaaagcaggtacaattccaaatttttcattt

SEQ ID NO: 1038345 - DNA, 33 bp, Homo sapien
ttaaactctgcttatcccaatcaatttgtcacc

SEQ ID NO: 1038346 - DNA, 33 bp, Homo sapien
ttaaactctgcttatctcaatcaatttgtcacc

SEQ ID NO: 1038347 - DNA, 33 bp, Homo sapien
aaccactgtccccagcactattaaacttcctgc

SEQ ID NO: 1038348 - DNA, 33 bp, Homo sapien
aaccactgtccccagcgctattaaacttcctgc

SEQ ID NO: 1038349 - DNA, 33 bp, Homo sapien
atgtttgatttcaaaacttgggttattggacag

SEQ ID NO: 1038350 - DNA, 33 bp, Homo sapien
atgtttgatttcaaaagttgggttattggacag

SEQ ID NO: 1038351 - DNA, 33 bp, Homo sapien
acaagtcattgaggggaatggagagcataatgt

SEQ ID NO: 1038352 - DNA, 33 bp, Homo sapien
acaagtcattgaggggcatggagagcataatgt

SEQ ID NO: 1038353 - DNA, 33 bp, Homo sapien
ctcggccttctggaccacttaatctctgtgtgc

SEQ ID NO: 1038354 - DNA, 33 bp, Homo sapien
ctcggccttctggaccgcttaatctctgtgtgc

SEQ ID NO: 1038355 - DNA, 33 bp, Homo sapien
ggtcagtaacctccaactgcaaggagtaatagc

SEQ ID NO: 1038356 - DNA, 33 bp, Homo sapien
ggtcagtaacctccaattgcaaggagtaatagc

SEQ ID NO: 1038357 - DNA, 33 bp, Homo sapien
gatttccccttaccaacgctaattttgcttact

SEQ ID NO: 1038358 - DNA, 33 bp, Homo sapien
gatttccccttaccaaggctaattttgcttact

SEQ ID NO: 1038359 - DNA, 33 bp, Homo sapien
tccccaagctctgccaaactgtaagataataga

SEQ ID NO: 1038360 - DNA, 33 bp, Homo sapien
tccccaagctctgccagactgtaagataataga

SEQ ID NO: 1038361 - DNA, 33 bp, Homo sapien
cttggagatacatcagaaagaggtcacttttcc

SEQ ID NO: 1038362 - DNA, 33 bp, Homo sapien
cttggagatacatcaggaagaggtcacttttcc

SEQ ID NO: 1038363 - DNA, 33 bp, Homo sapien
gtaacagtgcagagaaaggtaaataatgaatat

SEQ ID NO: 1038364 - DNA, 33 bp, Homo sapien
gtaacagtgcagagaagggtaaataatgaatat

SEQ ID NO: 1038365 - DNA, 33 bp, Homo sapien
ttataaagaggttgctaaaaactctgatgggag

SEQ ID NO: 1038366 - DNA, 33 bp, Homo sapien
ttataaagaggttgctgaaaactctgatgggag

SEQ ID NO: 1038367 - DNA, 33 bp, Homo sapien
caggctcctttccttacggtagcttgttcaaca

SEQ ID NO: 1038368 - DNA, 33 bp, Homo sapien
caggctcctttccttatggtagcttgttcaaca

SEQ ID NO: 1038369 - DNA, 33 bp, Homo sapien
actagcacttctaatcaatccacttataaaatt

SEQ ID NO: 1038370 - DNA, 33 bp, Homo sapien
actagcacttctaatcgatccacttataaaatt

SEQ ID NO: 1038371 - DNA, 33 bp, Homo sapien
cagacttattaaaatccatccaatcctacactt

SEQ ID NO: 1038372 - DNA, 33 bp, Homo sapien
cagacttattaaaatcgatccaatcctacactt

SEQ ID NO: 1038373 - DNA, 33 bp, Homo sapien
acaattctgaggaaacacttttagtaatgacaa

SEQ ID NO: 1038374 - DNA, 33 bp, Homo sapien
acaattctgaggaaacgcttttagtaatgacaa

SEQ ID NO: 1038375 - DNA, 33 bp, Homo sapien
atattaaaaagcatgaagacaatagtatgttct

SEQ ID NO: 1038376 - DNA, 33 bp, Homo sapien
atattaaaaagcatgaggacaatagtatgttct

SEQ ID NO: 1038377 - DNA, 33 bp, Homo sapien
ataacctaaaatgcccaggaataggaaacagtt

SEQ ID NO: 1038378 - DNA, 33 bp, Homo sapien
ataacctaaaatgcccgggaataggaaacagtt

SEQ ID NO: 1038379 - DNA, 33 bp, Homo sapien
gctgagctgatagtaaaagtaactgatagtaaa

SEQ ID NO: 1038380 - DNA, 33 bp, Homo sapien
gctgagctgatagtaagagtaactgatagtaaa

SEQ ID NO: 1038381 - DNA, 33 bp, Homo sapien
ttagttgctgagagtacctgattgtaaataggt

SEQ ID NO: 1038382 - DNA, 33 bp, Homo sapien
ttagttgctgagagtatctgattgtaaataggt

SEQ ID NO: 1038383 - DNA, 33 bp, Homo sapien
tcttgtgggtttaaaacgatgacaccagctgag

SEQ ID NO: 1038384 - DNA, 33 bp, Homo sapien
tcttgtgggtttaaaatgatgacaccagctgag

SEQ ID NO: 1038385 - DNA, 33 bp, Homo sapien
gtgatacccggaatgaaactgtgtacactaatg

SEQ ID NO: 1038386 - DNA, 33 bp, Homo sapien
gtgatacccggaatgatactgtgtacactaatg

SEQ ID NO: 1038387 - DNA, 33 bp, Homo sapien
ctatagtttagtgtcacggagcactttgtacaa

SEQ ID NO: 1038388 - DNA, 33 bp, Homo sapien
ctatagtttagtgtcatggagcactttgtacaa

SEQ ID NO: 1038389 - DNA, 33 bp, Homo sapien
ccccactatccctgggcccaagttgctggagag

SEQ ID NO: 1038390 - DNA, 33 bp, Homo sapien
ccccactatccctgggtccaagttgctggagag

SEQ ID NO: 1038391 - DNA, 33 bp, Homo sapien
agacccaggtgccacaactgttctgagcacctg

SEQ ID NO: 1038392 - DNA, 33 bp, Homo sapien
agacccaggtgccacacctgttctgagcacctg

SEQ ID NO: 1038393 - DNA, 33 bp, Homo sapien
tccactaggttctagaagtgctccagcaagatc

SEQ ID NO: 1038394 - DNA, 33 bp, Homo sapien
tccactaggttctagaggtgctccagcaagatc

SEQ ID NO: 1038395 - DNA, 33 bp, Homo sapien
tctgggtatcattatcgcagtaaatctctatag

SEQ ID NO: 1038396 - DNA, 33 bp, Homo sapien
tctgggtatcattatctcagtaaatctctatag

SEQ ID NO: 1038397 - DNA, 33 bp, Homo sapien
atcacctgagcaatacactgtaccatatttgtt

SEQ ID NO: 1038398 - DNA, 33 bp, Homo sapien
atcacctgagcaatacgctgtaccatatttgtt

SEQ ID NO: 1038399 - DNA, 33 bp, Homo sapien
ttcaactcagcattgccctttgtttcatatgat

SEQ ID NO: 1038400 - DNA, 33 bp, Homo sapien
ttcaactcagcattgctctttgtttcatatgat

SEQ ID NO: 1038401 - DNA, 33 bp, Homo sapien
aataacaggctacaaaccatggcgtaacagact

SEQ ID NO: 1038402 - DNA, 33 bp, Homo sapien
aataacaggctacaaatcatggcgtaacagact

SEQ ID NO: 1038403 - DNA, 33 bp, Homo sapien
gaaatagctattgtgaagaatattaagcatttt

SEQ ID NO: 1038404 - DNA, 33 bp, Homo sapien
gaaatagctattgtgatgaatattaagcatttt

SEQ ID NO: 1038405 - DNA, 33 bp, Homo sapien
ggggaggctacgtgaacagaaacaagggctttc

SEQ ID NO: 1038406 - DNA, 33 bp, Homo sapien
ggggaggctacgtgaatagaaacaagggctttc

SEQ ID NO: 1038407 - DNA, 33 bp, Homo sapien
agaataatggattagaccaaggagccaaagaga

SEQ ID NO: 1038408 - DNA, 33 bp, Homo sapien
agaataatggattagagcaaggagccaaagaga

SEQ ID NO: 1038409 - DNA, 33 bp, Homo sapien
atcgatggaattaaacagaaacagctcaaattg

SEQ ID NO: 1038410 - DNA, 33 bp, Homo sapien
atcgatggaattaaaccgaaacagctcaaattg

SEQ ID NO: 1038411 - DNA, 33 bp, Homo sapien
gatcattaggcaaaggaccaacttgaagaggcc

SEQ ID NO: 1038412 - DNA, 33 bp, Homo sapien
gatcattaggcaaagggccaacttgaagaggcc

SEQ ID NO: 1038413 - DNA, 33 bp, Homo sapien
ccaaatttgtcaatgggaaattatcgaaatggt

SEQ ID NO: 1038414 - DNA, 33 bp, Homo sapien
ccaaatttgtcaatggtaaattatcgaaatggt

SEQ ID NO: 1038415 - DNA, 33 bp, Homo sapien
tgtcattttaatgagacggaataaagtttgtga

SEQ ID NO: 1038416 - DNA, 33 bp, Homo sapien
tgtcattttaatgagatggaataaagtttgtga

SEQ ID NO: 1038417 - DNA, 33 bp, Homo sapien
ctcatgatgtcaacaacggtgagtactcatagc

SEQ ID NO: 1038418 - DNA, 33 bp, Homo sapien
ctcatgatgtcaacaatggtgagtactcatagc

SEQ ID NO: 1038419 - DNA, 33 bp, Homo sapien
ctcattggcacacattaaactctgacactagca

SEQ ID NO: 1038420 - DNA, 33 bp, Homo sapien
ctcattggcacacattgaactctgacactagca

SEQ ID NO: 1038421 - DNA, 33 bp, Homo sapien
atacccacacatcataagtgagtcacaagcatc

SEQ ID NO: 1038422 - DNA, 33 bp, Homo sapien
atacccacacatcataggtgagtcacaagcatc

SEQ ID NO: 1038423 - DNA, 33 bp, Homo sapien
gaagatataaagccaaatcatttgctggttttt

SEQ ID NO: 1038424 - DNA, 33 bp, Homo sapien
gaagatataaagccaagtcatttgctggttttt

SEQ ID NO: 1038425 - DNA, 33 bp, Homo sapien
ctttagaaagcaatagccacacaatgtatggaa

SEQ ID NO: 1038426 - DNA, 33 bp, Homo sapien
ctttagaaagcaatagtcacacaatgtatggaa

SEQ ID NO: 1038427 - DNA, 33 bp, Homo sapien
atactagactaacttcccatgtttttacagtat

SEQ ID NO: 1038428 - DNA, 33 bp, Homo sapien
atactagactaacttctcatgtttttacagtat

SEQ ID NO: 1038429 - DNA, 33 bp, Homo sapien
ggtgatgtcatgaccaagatgaccaatgatgtt

SEQ ID NO: 1038430 - DNA, 33 bp, Homo sapien
ggtgatgtcatgaccaggatgaccaatgatgtt

SEQ ID NO: 1038431 - DNA, 33 bp, Homo sapien
aaatgtcaacagtaacactttttcttaaacctt

SEQ ID NO: 1038432 - DNA, 33 bp, Homo sapien
aaatgtcaacagtaacgctttttcttaaacctt

SEQ ID NO: 1038433 - DNA, 33 bp, Homo sapien
gagtatacttaacacccaaattttggtttctaa

SEQ ID NO: 1038434 - DNA, 33 bp, Homo sapien
gagtatacttaacacctaaattttggtttctaa

SEQ ID NO: 1038435 - DNA, 33 bp, Homo sapien
ttattctatactaaaaagagctagggttccttg

SEQ ID NO: 1038436 - DNA, 33 bp, Homo sapien
ttattctatactaaaacgagctagggttccttg

SEQ ID NO: 1038437 - DNA, 33 bp, Homo sapien
atctgtgggtggaagacctaaacatgtttctat

SEQ ID NO: 1038438 - DNA, 33 bp, Homo sapien
atctgtgggtggaagatctaaacatgtttctat

SEQ ID NO: 1038439 - DNA, 33 bp, Homo sapien
ttatctgattcccaaacattcacagtctaatgc

SEQ ID NO: 1038440 - DNA, 33 bp, Homo sapien
ttatctgattcccaaatattcacagtctaatgc

SEQ ID NO: 1038441 - DNA, 33 bp, Homo sapien
gtttagcatggagtgccaaagagcacagaggaa

SEQ ID NO: 1038442 - DNA, 33 bp, Homo sapien
gtttagcatggagtgcgaaagagcacagaggaa

SEQ ID NO: 1038443 - DNA, 33 bp, Homo sapien
cgtgaaacccctggcacaggaaactctcagtgt

SEQ ID NO: 1038444 - DNA, 33 bp, Homo sapien
cgtgaaacccctggcataggaaactctcagtgt

SEQ ID NO: 1038445 - DNA, 33 bp, Homo sapien
gtgggtcaaaggaaccagagagagggcaaaagg

SEQ ID NO: 1038446 - DNA, 33 bp, Homo sapien
gtgggtcaaaggaaccggagagagggcaaaagg

SEQ ID NO: 1038447 - DNA, 33 bp, Homo sapien
atcatacctaagttaccgaaccacctgggcttc

SEQ ID NO: 1038448 - DNA, 33 bp, Homo sapien
atcatacctaagttactgaaccacctgggcttc

SEQ ID NO: 1038449 - DNA, 33 bp, Homo sapien
atcttaaactcttggacctattctcaggatgga

SEQ ID NO: 1038450 - DNA, 33 bp, Homo sapien
atcttaaactcttggatctattctcaggatgga

SEQ ID NO: 1038451 - DNA, 33 bp, Homo sapien
tgtatattgccgtggtcaaagtatataacttta

SEQ ID NO: 1038452 - DNA, 33 bp, Homo sapien
tgtatattgccgtggttaaagtatataacttta

SEQ ID NO: 1038453 - DNA, 33 bp, Homo sapien
taaactgatcccagcaaaagccaatgataagag

SEQ ID NO: 1038454 - DNA, 33 bp, Homo sapien
taaactgatcccagcagaagccaatgataagag

SEQ ID NO: 1038455 - DNA, 33 bp, Homo sapien
tatcctgcttggattcactattgatttcttcta

SEQ ID NO: 1038456 - DNA, 33 bp, Homo sapien
tatcctgcttggattcgctattgatttcttcta

SEQ ID NO: 1038457 - DNA, 33 bp, Homo sapien
ttcctgtagtgtagacgaagtgaatatctgatc

SEQ ID NO: 1038458 - DNA, 33 bp, Homo sapien
ttcctgtagtgtagactaagtgaatatctgatc

SEQ ID NO: 1038459 - DNA, 33 bp, Homo sapien
aaaaaatcaagtcagaaaaattagaaattatac

SEQ ID NO: 1038460 - DNA, 33 bp, Homo sapien
aaaaaatcaagtcagagaaattagaaattatac

SEQ ID NO: 1038461 - DNA, 33 bp, Homo sapien
ttgggcagtatagctacgcctggaagagctttg

SEQ ID NO: 1038462 - DNA, 33 bp, Homo sapien
ttgggcagtatagctatgcctggaagagctttg

SEQ ID NO: 1038463 - DNA, 33 bp, Homo sapien
ggaggccatatgttaactgatataatccaagca

SEQ ID NO: 1038464 - DNA, 33 bp, Homo sapien
ggaggccatatgttaagtgatataatccaagca

SEQ ID NO: 1038465 - DNA, 33 bp, Homo sapien
tcatcatgtatgcttaagtgaaactggattttt

SEQ ID NO: 1038466 - DNA, 33 bp, Homo sapien
tcatcatgtatgcttacgtgaaactggattttt

SEQ ID NO: 1038467 - DNA, 33 bp, Homo sapien
taaaatgaatgaaaagaaagagaacctcagcaa

SEQ ID NO: 1038468 - DNA, 33 bp, Homo sapien
taaaatgaatgaaaagtaagagaacctcagcaa

SEQ ID NO: 1038469 - DNA, 33 bp, Homo sapien
tttcagtgttatgttgcagtgtaattttatagt

SEQ ID NO: 1038470 - DNA, 33 bp, Homo sapien
tttcagtgttatgttgtagtgtaattttatagt

SEQ ID NO: 1038471 - DNA, 33 bp, Homo sapien
acactgccgtagatagcacctagacttggctga

SEQ ID NO: 1038472 - DNA, 33 bp, Homo sapien
acactgccgtagatagtacctagacttggctga

SEQ ID NO: 1038473 - DNA, 33 bp, Homo sapien
tacttgaaatgtgtgccaatgtccacagtcttt

SEQ ID NO: 1038474 - DNA, 33 bp, Homo sapien
tacttgaaatgtgtgctaatgtccacagtcttt

SEQ ID NO: 1038475 - DNA, 33 bp, Homo sapien
ctgtgagacctgggtcaaatcagttctttaggc

SEQ ID NO: 1038476 - DNA, 33 bp, Homo sapien
ctgtgagacctgggtcgaatcagttctttaggc

SEQ ID NO: 1038477 - DNA, 33 bp, Homo sapien
ttcattttgcataataataacgatctggttttg

SEQ ID NO: 1038478 - DNA, 33 bp, Homo sapien
ttcattttgcataatagtaacgatctggttttg

SEQ ID NO: 1038479 - DNA, 33 bp, Homo sapien
caaaactaaatgggatcagcaatttggatgggt

SEQ ID NO: 1038480 - DNA, 33 bp, Homo sapien
caaaactaaatgggatgagcaatttggatgggt

SEQ ID NO: 1038481 - DNA, 33 bp, Homo sapien
gtcagcagtgtttgaacagaaaaatgtcctagt

SEQ ID NO: 1038482 - DNA, 33 bp, Homo sapien
gtcagcagtgtttgaatagaaaaatgtcctagt

SEQ ID NO: 1038483 - DNA, 33 bp, Homo sapien
tttgtttgtttttaaactacagtgctgtctagg

SEQ ID NO: 1038484 - DNA, 33 bp, Homo sapien
tttgtttgtttttaaagtacagtgctgtctagg

SEQ ID NO: 1038485 - DNA, 33 bp, Homo sapien
aataataggctgaagtaactcagatgcaccatt

SEQ ID NO: 1038486 - DNA, 33 bp, Homo sapien
aataataggctgaagtgactcagatgcaccatt

SEQ ID NO: 1038487 - DNA, 33 bp, Homo sapien
caaaatgcactacataccatttgccactgtctg

SEQ ID NO: 1038488 - DNA, 33 bp, Homo sapien
caaaatgcactacatatcatttgccactgtctg

SEQ ID NO: 1038489 - DNA, 33 bp, Homo sapien
aatttattttaaatgcaaaagtagtggcctcta

SEQ ID NO: 1038490 - DNA, 33 bp, Homo sapien
aatttattttaaatgctaaagtagtggcctcta

SEQ ID NO: 1038491 - DNA, 33 bp, Homo sapien
ctaaacattaacataacgcttatccttactact

SEQ ID NO: 1038492 - DNA, 33 bp, Homo sapien
ctaaacattaacataatgcttatccttactact

SEQ ID NO: 1038493 - DNA, 33 bp, Homo sapien
tttaaatgttcaaaaacctggattaatgaacat

SEQ ID NO: 1038494 - DNA, 33 bp, Homo sapien
tttaaatgttcaaaaatctggattaatgaacat

SEQ ID NO: 1038495 - DNA, 33 bp, Homo sapien
tcattacagtgcaagcaaaagtgtgtttttcta

SEQ ID NO: 1038496 - DNA, 33 bp, Homo sapien
tcattacagtgcaagcgaaagtgtgtttttcta

SEQ ID NO: 1038497 - DNA, 33 bp, Homo sapien
ggcatataataaactcacaaaggtcatggatga

SEQ ID NO: 1038498 - DNA, 33 bp, Homo sapien
ggcatataataaactcgcaaaggtcatggatga

SEQ ID NO: 1038499 - DNA, 33 bp, Homo sapien
gcacttgttttacaacagtaagcaaaacagagt

SEQ ID NO: 1038500 - DNA, 33 bp, Homo sapien
gcacttgttttacaacggtaagcaaaacagagt

SEQ ID NO: 1038501 - DNA, 33 bp, Homo sapien
aaagaaaatgcagtgggcatagatatgaaaggt

SEQ ID NO: 1038502 - DNA, 33 bp, Homo sapien
aaagaaaatgcagtggtcatagatatgaaaggt

SEQ ID NO: 1038503 - DNA, 33 bp, Homo sapien
ggagtaacaaacacaacggttgatcgcacaagt

SEQ ID NO: 1038504 - DNA, 33 bp, Homo sapien
ggagtaacaaacacaatggttgatcgcacaagt

SEQ ID NO: 1038505 - DNA, 33 bp, Homo sapien
ccatttattctgataaggtctatgagttaagca

SEQ ID NO: 1038506 - DNA, 33 bp, Homo sapien
ccatttattctgataatgtctatgagttaagca

SEQ ID NO: 1038507 - DNA, 33 bp, Homo sapien
ttttaccggcacacaaccatgctcattcggtta

SEQ ID NO: 1038508 - DNA, 33 bp, Homo sapien
ttttaccggcacacaatcatgctcattcggtta

SEQ ID NO: 1038509 - DNA, 33 bp, Homo sapien
gcaaattaaccagagaacacgtcatttaacttg

SEQ ID NO: 1038510 - DNA, 33 bp, Homo sapien
gcaaattaaccagagagcacgtcatttaacttg

SEQ ID NO: 1038511 - DNA, 33 bp, Homo sapien
atattaacactgagcccatttgatgtatttttt

SEQ ID NO: 1038512 - DNA, 33 bp, Homo sapien
atattaacactgagcctatttgatgtatttttt

SEQ ID NO: 1038513 - DNA, 33 bp, Homo sapien
taaggtgtagtatgtacagtatgtgtacctgat

SEQ ID NO: 1038514 - DNA, 33 bp, Homo sapien
taaggtgtagtatgtatagtatgtgtacctgat

SEQ ID NO: 1038515 - DNA, 33 bp, Homo sapien
gaggagaaaggttgaactgcagctggtcacata

SEQ ID NO: 1038516 - DNA, 33 bp, Homo sapien
gaggagaaaggttgaattgcagctggtcacata

SEQ ID NO: 1038517 - DNA, 33 bp, Homo sapien
attccccaaaagccacgctaatacttggcaaaa

SEQ ID NO: 1038518 - DNA, 33 bp, Homo sapien
attccccaaaagccactctaatacttggcaaaa

SEQ ID NO: 1038519 - DNA, 33 bp, Homo sapien
ataaagcccagaatacaaaaccactaaacagct

SEQ ID NO: 1038520 - DNA, 33 bp, Homo sapien
ataaagcccagaatacgaaaccactaaacagct

SEQ ID NO: 1038521 - DNA, 33 bp, Homo sapien
agtttttctgctaatactatcttctgccacttt

SEQ ID NO: 1038522 - DNA, 33 bp, Homo sapien
agtttttctgctaatattatcttctgccacttt

SEQ ID NO: 1038523 - DNA, 33 bp, Homo sapien
attagtttaggtcagaacctgtagctttctttc

SEQ ID NO: 1038524 - DNA, 33 bp, Homo sapien
attagtttaggtcagagcctgtagctttctttc

SEQ ID NO: 1038525 - DNA, 33 bp, Homo sapien
aatattttgctttaacgctggaaacaagatttt

SEQ ID NO: 1038526 - DNA, 33 bp, Homo sapien
aatattttgctttaactctggaaacaagatttt

SEQ ID NO: 1038527 - DNA, 33 bp, Homo sapien
gtgtacaagtatgtcaaaattcatcggccaggt

SEQ ID NO: 1038528 - DNA, 33 bp, Homo sapien
gtgtacaagtatgtcagaattcatcggccaggt

SEQ ID NO: 1038529 - DNA, 33 bp, Homo sapien
tctttgtgtggaaatacgctttcatttctattg

SEQ ID NO: 1038530 - DNA, 33 bp, Homo sapien
tctttgtgtggaaatatgctttcatttctattg

SEQ ID NO: 1038531 - DNA, 33 bp, Homo sapien
cacgcccggccaaacccaatctactcttatcaa

SEQ ID NO: 1038532 - DNA, 33 bp, Homo sapien
cacgcccggccaaacctaatctactcttatcaa

SEQ ID NO: 1038533 - DNA, 33 bp, Homo sapien
cctgaacaacatgacaaaactctctctctacaa

SEQ ID NO: 1038534 - DNA, 33 bp, Homo sapien
cctgaacaacatgacagaactctctctctacaa

SEQ ID NO: 1038535 - DNA, 33 bp, Homo sapien
ttatttacgacacaccagagaaaaaagttttga

SEQ ID NO: 1038536 - DNA, 33 bp, Homo sapien
ttatttacgacacaccggagaaaaaagttttga

SEQ ID NO: 1038537 - DNA, 33 bp, Homo sapien
ttagggtttgtatccaatgctgcgggagggacc

SEQ ID NO: 1038538 - DNA, 33 bp, Homo sapien
ttagggtttgtatccagtgctgcgggagggacc

SEQ ID NO: 1038539 - DNA, 33 bp, Homo sapien
ggatttatagacaagagtatttgcttgaagtca

SEQ ID NO: 1038540 - DNA, 33 bp, Homo sapien
ggatttatagacaagattatttgcttgaagtca

SEQ ID NO: 1038541 - DNA, 33 bp, Homo sapien
accgcgccacccccaaacttcttaatcatatct

SEQ ID NO: 1038542 - DNA, 33 bp, Homo sapien
accgcgccacccccaagcttcttaatcatatct

SEQ ID NO: 1038543 - DNA, 33 bp, Homo sapien
attaaggatctttcaacgtatgtatttgccatt

SEQ ID NO: 1038544 - DNA, 33 bp, Homo sapien
attaaggatctttcaatgtatgtatttgccatt

SEQ ID NO: 1038545 - DNA, 33 bp, Homo sapien
agaacttggtcaacagaaagatatttgatgcat

SEQ ID NO: 1038546 - DNA, 33 bp, Homo sapien
agaacttggtcaacaggaagatatttgatgcat

SEQ ID NO: 1038547 - DNA, 33 bp, Homo sapien
aggggtggtggactatcagttgtggaatatcaa

SEQ ID NO: 1038548 - DNA, 33 bp, Homo sapien
aggggtggtggactattagttgtggaatatcaa

SEQ ID NO: 1038549 - DNA, 33 bp, Homo sapien
atcggcataggggtcaccagagaactctcaact

SEQ ID NO: 1038550 - DNA, 33 bp, Homo sapien
atcggcataggggtcatcagagaactctcaact

SEQ ID NO: 1038551 - DNA, 33 bp, Homo sapien
cttgcagctattaaaacgtaggtggtatattca

SEQ ID NO: 1038552 - DNA, 33 bp, Homo sapien
cttgcagctattaaaaggtaggtggtatattca

SEQ ID NO: 1038553 - DNA, 33 bp, Homo sapien
tcactgacttttccacaccttcccatgagcccc

SEQ ID NO: 1038554 - DNA, 33 bp, Homo sapien
tcactgacttttccacgccttcccatgagcccc

SEQ ID NO: 1038555 - DNA, 33 bp, Homo sapien
agaaggactctgggaaacaacatcatgggatcc

SEQ ID NO: 1038556 - DNA, 33 bp, Homo sapien
agaaggactctgggaagcaacatcatgggatcc

SEQ ID NO: 1038557 - DNA, 33 bp, Homo sapien
ctactcagtatgtcacagagagtttaatgaagc

SEQ ID NO: 1038558 - DNA, 33 bp, Homo sapien
ctactcagtatgtcacggagagtttaatgaagc

SEQ ID NO: 1038559 - DNA, 33 bp, Homo sapien
gacaaatggtcaaagaaccaattacctcctcat

SEQ ID NO: 1038560 - DNA, 33 bp, Homo sapien
gacaaatggtcaaagagccaattacctcctcat

SEQ ID NO: 1038561 - DNA, 33 bp, Homo sapien
tagatgatcacagatgaatttcgagatatagcc

SEQ ID NO: 1038562 - DNA, 33 bp, Homo sapien
tagatgatcacagatggatttcgagatatagcc

SEQ ID NO: 1038563 - DNA, 33 bp, Homo sapien
gcacctactatataccagatgctgaatacatag

SEQ ID NO: 1038564 - DNA, 33 bp, Homo sapien
gcacctactatataccggatgctgaatacatag

SEQ ID NO: 1038565 - DNA, 33 bp, Homo sapien
gaaccttaaaggagtacggagcaaaagatgcag

SEQ ID NO: 1038566 - DNA, 33 bp, Homo sapien
gaaccttaaaggagtatggagcaaaagatgcag

SEQ ID NO: 1038567 - DNA, 33 bp, Homo sapien
ttatgcaaaactttggccatcttacgatttcgt

SEQ ID NO: 1038568 - DNA, 33 bp, Homo sapien
ttatgcaaaactttgggcatcttacgatttcgt

SEQ ID NO: 1038569 - DNA, 33 bp, Homo sapien
tccctgggacaaatacaataaaactgatccttg

SEQ ID NO: 1038570 - DNA, 33 bp, Homo sapien
tccctgggacaaataccataaaactgatccttg

SEQ ID NO: 1038571 - DNA, 33 bp, Homo sapien
ctgttcacctcaacaagaacagttccaacacat

SEQ ID NO: 1038572 - DNA, 33 bp, Homo sapien
ctgttcacctcaacaataacagttccaacacat

SEQ ID NO: 1038573 - DNA, 33 bp, Homo sapien
gtggcgatgtcataaaaacttcagtttggcaga

SEQ ID NO: 1038574 - DNA, 33 bp, Homo sapien
gtggcgatgtcataaacacttcagtttggcaga

SEQ ID NO: 1038575 - DNA, 33 bp, Homo sapien
tttaccaagtcctgaactcctttaacacaatgg

SEQ ID NO: 1038576 - DNA, 33 bp, Homo sapien
tttaccaagtcctgaattcctttaacacaatgg

SEQ ID NO: 1038577 - DNA, 33 bp, Homo sapien
gacttaaagaaggagtcacggattgacagttga

SEQ ID NO: 1038578 - DNA, 33 bp, Homo sapien
gacttaaagaaggagttacggattgacagttga

SEQ ID NO: 1038579 - DNA, 33 bp, Homo sapien
tagataaaaatatccactgatacatacctgaaa

SEQ ID NO: 1038580 - DNA, 33 bp, Homo sapien
tagataaaaatatccattgatacatacctgaaa

SEQ ID NO: 1038581 - DNA, 33 bp, Homo sapien
aattagctgacgttcactctggctattatgtag

SEQ ID NO: 1038582 - DNA, 33 bp, Homo sapien
aattagctgacgttcattctggctattatgtag

SEQ ID NO: 1038583 - DNA, 33 bp, Homo sapien
gcggatcacctcgaagcaatttttgtaggtgac

SEQ ID NO: 1038584 - DNA, 33 bp, Homo sapien
gcggatcacctcgaagtaatttttgtaggtgac

SEQ ID NO: 1038585 - DNA, 33 bp, Homo sapien
ctcaggtctttgtctacgttagcaagagccttc

SEQ ID NO: 1038586 - DNA, 33 bp, Homo sapien
ctcaggtctttgtctatgttagcaagagccttc

SEQ ID NO: 1038587 - DNA, 33 bp, Homo sapien
ggattgctgactctaccggcaaccacagcatct

SEQ ID NO: 1038588 - DNA, 33 bp, Homo sapien
ggattgctgactctactggcaaccacagcatct

SEQ ID NO: 1038589 - DNA, 33 bp, Homo sapien
ttaacctagcgacgaactgtaagaggactggac

SEQ ID NO: 1038590 - DNA, 33 bp, Homo sapien
ttaacctagcgacgaagtgtaagaggactggac

SEQ ID NO: 1038591 - DNA, 33 bp, Homo sapien
atgaggaaacagatccactaaggaaagtgaagt

SEQ ID NO: 1038592 - DNA, 33 bp, Homo sapien
atgaggaaacagatccgctaaggaaagtgaagt

SEQ ID NO: 1038593 - DNA, 33 bp, Homo sapien
gaagctctagtgactaatagcagatacaaagtt

SEQ ID NO: 1038594 - DNA, 33 bp, Homo sapien
gaagctctagtgactagtagcagatacaaagtt

SEQ ID NO: 1038595 - DNA, 33 bp, Homo sapien
actcacttaaactgaacattgcaaaaggtaata

SEQ ID NO: 1038596 - DNA, 33 bp, Homo sapien
actcacttaaactgaatattgcaaaaggtaata

SEQ ID NO: 1038597 - DNA, 33 bp, Homo sapien
caggtttctaaatgaccctgttactgtttcacg

SEQ ID NO: 1038598 - DNA, 33 bp, Homo sapien
caggtttctaaatgactctgttactgtttcacg

SEQ ID NO: 1038599 - DNA, 33 bp, Homo sapien
ctaagcacatccaacaatgaatgaggatgtgag

SEQ ID NO: 1038600 - DNA, 33 bp, Homo sapien
ctaagcacatccaacactgaatgaggatgtgag

SEQ ID NO: 1038601 - DNA, 33 bp, Homo sapien
atattatggcagattacattatgcagctgctaa

SEQ ID NO: 1038602 - DNA, 33 bp, Homo sapien
atattatggcagattatattatgcagctgctaa

SEQ ID NO: 1038603 - DNA, 33 bp, Homo sapien
acaattcaaaaaacgacgtctagcatatgaaaa

SEQ ID NO: 1038604 - DNA, 33 bp, Homo sapien
acaattcaaaaaacgatgtctagcatatgaaaa

SEQ ID NO: 1038605 - DNA, 33 bp, Homo sapien
tggatacaaggtacacagaaaccaggcaatatg

SEQ ID NO: 1038606 - DNA, 33 bp, Homo sapien
tggatacaaggtacacggaaaccaggcaatatg

SEQ ID NO: 1038607 - DNA, 33 bp, Homo sapien
aagacatgaatttacaaatagattcctaaacac

SEQ ID NO: 1038608 - DNA, 33 bp, Homo sapien
aagacatgaatttacagatagattcctaaacac

SEQ ID NO: 1038609 - DNA, 33 bp, Homo sapien
ttaataagtggaaggaataaataataaactgat

SEQ ID NO: 1038610 - DNA, 33 bp, Homo sapien
ttaataagtggaaggagtaaataataaactgat

SEQ ID NO: 1038611 - DNA, 33 bp, Homo sapien
acagctagtggtaagacaatcggggaatagtat

SEQ ID NO: 1038612 - DNA, 33 bp, Homo sapien
acagctagtggtaagagaatcggggaatagtat

SEQ ID NO: 1038613 - DNA, 33 bp, Homo sapien
actcaccatttactgaatatgcctccatactgt

SEQ ID NO: 1038614 - DNA, 33 bp, Homo sapien
actcaccatttactgagtatgcctccatactgt

SEQ ID NO: 1038615 - DNA, 33 bp, Homo sapien
caaatttttatcaagacactactatgtacctgg

SEQ ID NO: 1038616 - DNA, 33 bp, Homo sapien
caaatttttatcaagagactactatgtacctgg

SEQ ID NO: 1038617 - DNA, 33 bp, Homo sapien
tgtcttttctgtaagcagatacctacaaagaat

SEQ ID NO: 1038618 - DNA, 33 bp, Homo sapien
tgtcttttctgtaagcggatacctacaaagaat

SEQ ID NO: 1038619 - DNA, 33 bp, Homo sapien
aaaacattattcctccacctttgaggctgtgcc

SEQ ID NO: 1038620 - DNA, 33 bp, Homo sapien
aaaacattattcctcctcctttgaggctgtgcc

SEQ ID NO: 1038621 - DNA, 33 bp, Homo sapien
gaaaatgataatggaaagtaagaaatggctttc

SEQ ID NO: 1038622 - DNA, 33 bp, Homo sapien
gaaaatgataatggaaggtaagaaatggctttc

SEQ ID NO: 1038623 - DNA, 33 bp, Homo sapien
gttgggcttcagttaacacaaaggagatgaaga

SEQ ID NO: 1038624 - DNA, 33 bp, Homo sapien
gttgggcttcagttaagacaaaggagatgaaga

SEQ ID NO: 1038625 - DNA, 33 bp, Homo sapien
ggagatgaagaaagagaagagtttgcataacaa

SEQ ID NO: 1038626 - DNA, 33 bp, Homo sapien
ggagatgaagaaagagcagagtttgcataacaa

SEQ ID NO: 1038627 - DNA, 33 bp, Homo sapien
tgagttatacgctttcaaagggtgaatttcatg

SEQ ID NO: 1038628 - DNA, 33 bp, Homo sapien
tgagttatacgctttctaagggtgaatttcatg

SEQ ID NO: 1038629 - DNA, 33 bp, Homo sapien
ccttcttcttactataggagctagtttaccaag

SEQ ID NO: 1038630 - DNA, 33 bp, Homo sapien
ccttcttcttactatatgagctagtttaccaag

SEQ ID NO: 1038631 - DNA, 33 bp, Homo sapien
catatccattccctccaaagttttgtatccctc

SEQ ID NO: 1038632 - DNA, 33 bp, Homo sapien
catatccattccctccgaagttttgtatccctc

SEQ ID NO: 1038633 - DNA, 33 bp, Homo sapien
ttccatttccgtgatgaaatagttcagacacag

SEQ ID NO: 1038634 - DNA, 33 bp, Homo sapien
ttccatttccgtgatggaatagttcagacacag

SEQ ID NO: 1038635 - DNA, 33 bp, Homo sapien
ccaccatagtagagacaaagtttatagtttgag

SEQ ID NO: 1038636 - DNA, 33 bp, Homo sapien
ccaccatagtagagacgaagtttatagtttgag

SEQ ID NO: 1038637 - DNA, 33 bp, Homo sapien
atagcaaccatgtgaacaacttaagaataatag

SEQ ID NO: 1038638 - DNA, 33 bp, Homo sapien
atagcaaccatgtgaataacttaagaataatag

SEQ ID NO: 1038639 - DNA, 33 bp, Homo sapien
aaaggagagacaaagacgggagaagggactacc

SEQ ID NO: 1038640 - DNA, 33 bp, Homo sapien
aaaggagagacaaagaggggagaagggactacc

SEQ ID NO: 1038641 - DNA, 33 bp, Homo sapien
aaagtgacttatccaccgacatttcacaattag

SEQ ID NO: 1038642 - DNA, 33 bp, Homo sapien
aaagtgacttatccactgacatttcacaattag

SEQ ID NO: 1038643 - DNA, 33 bp, Homo sapien
gcagacatgaacaaaaaaattataatgcaaaac

SEQ ID NO: 1038644 - DNA, 33 bp, Homo sapien
gcagacatgaacaaaacaattataatgcaaaac

SEQ ID NO: 1038645 - DNA, 33 bp, Homo sapien
ttacgtagccaaattaccattctctttcttata

SEQ ID NO: 1038646 - DNA, 33 bp, Homo sapien
ttacgtagccaaattatcattctctttcttata

SEQ ID NO: 1038647 - DNA, 33 bp, Homo sapien
ggccctctgctcatcacagagttgtctgtatag

SEQ ID NO: 1038648 - DNA, 33 bp, Homo sapien
ggccctctgctcatcatagagttgtctgtatag

SEQ ID NO: 1038649 - DNA, 33 bp, Homo sapien
caaagacttacaataacgtggatatcaaggaag

SEQ ID NO: 1038650 - DNA, 33 bp, Homo sapien
caaagacttacaataatgtggatatcaaggaag

SEQ ID NO: 1038651 - DNA, 33 bp, Homo sapien
attccctagactttcaaatgtctctgccttgtt

SEQ ID NO: 1038652 - DNA, 33 bp, Homo sapien
attccctagactttcagatgtctctgccttgtt

SEQ ID NO: 1038653 - DNA, 33 bp, Homo sapien
agggacactgcattaacagtataatcaccccat

SEQ ID NO: 1038654 - DNA, 33 bp, Homo sapien
agggacactgcattaatagtataatcaccccat

SEQ ID NO: 1038655 - DNA, 33 bp, Homo sapien
agtaagcaggctggttcaacaattcttacagga

SEQ ID NO: 1038656 - DNA, 33 bp, Homo sapien
agtaagcaggctggttgaacaattcttacagga

SEQ ID NO: 1038657 - DNA, 33 bp, Homo sapien
ctactctctttattcacaatgggtggagctgca

SEQ ID NO: 1038658 - DNA, 33 bp, Homo sapien
ctactctctttattcataatgggtggagctgca

SEQ ID NO: 1038659 - DNA, 33 bp, Homo sapien
gtactctctatgcagccaagaacaaaaagtcat

SEQ ID NO: 1038660 - DNA, 33 bp, Homo sapien
gtactctctatgcagcgaagaacaaaaagtcat

SEQ ID NO: 1038661 - DNA, 33 bp, Homo sapien
atccttaggctcagcaaaacctttgtgggtctg

SEQ ID NO: 1038662 - DNA, 33 bp, Homo sapien
atccttaggctcagcagaacctttgtgggtctg

SEQ ID NO: 1038663 - DNA, 33 bp, Homo sapien
aaattggaagtttaagcccgagcactgtggctc

SEQ ID NO: 1038664 - DNA, 33 bp, Homo sapien
aaattggaagtttaaggccgagcactgtggctc

SEQ ID NO: 1038665 - DNA, 33 bp, Homo sapien
gccagacgctcttccaataagaaggtgtcaaga

SEQ ID NO: 1038666 - DNA, 33 bp, Homo sapien
gccagacgctcttccagtaagaaggtgtcaaga

SEQ ID NO: 1038667 - DNA, 33 bp, Homo sapien
gacgtgggctcccttacatcatgaagcaacaga

SEQ ID NO: 1038668 - DNA, 33 bp, Homo sapien
gacgtgggctcccttatatcatgaagcaacaga

SEQ ID NO: 1038669 - DNA, 33 bp, Homo sapien
gagccaagttatcacgaatacaagtttcatata

SEQ ID NO: 1038670 - DNA, 33 bp, Homo sapien
gagccaagttatcacggatacaagtttcatata

SEQ ID NO: 1038671 - DNA, 33 bp, Homo sapien
tgctaataataagtaaagaagccagggttctcc

SEQ ID NO: 1038672 - DNA, 33 bp, Homo sapien
tgctaataataagtaaggaagccagggttctcc

SEQ ID NO: 1038673 - DNA, 33 bp, Homo sapien
tatgttccatatattgcatggcatgtacttata

SEQ ID NO: 1038674 - DNA, 33 bp, Homo sapien
tatgttccatatattgtatggcatgtacttata

SEQ ID NO: 1038675 - DNA, 33 bp, Homo sapien
tgcctagtaaaggtcacgattgctcatctttca

SEQ ID NO: 1038676 - DNA, 33 bp, Homo sapien
tgcctagtaaaggtcatgattgctcatctttca

SEQ ID NO: 1038677 - DNA, 33 bp, Homo sapien
aaacaatccaattatacagacaatccaaatata

SEQ ID NO: 1038678 - DNA, 33 bp, Homo sapien
aaacaatccaattatatagacaatccaaatata

SEQ ID NO: 1038679 - DNA, 33 bp, Homo sapien
ttacctctacctgttacgctgacaagtaccatt

SEQ ID NO: 1038680 - DNA, 33 bp, Homo sapien
ttacctctacctgttatgctgacaagtaccatt

SEQ ID NO: 1038681 - DNA, 33 bp, Homo sapien
gcctgctcagcatggacaatggaatggaggaag

SEQ ID NO: 1038682 - DNA, 33 bp, Homo sapien
gcctgctcagcatggataatggaatggaggaag

SEQ ID NO: 1038683 - DNA, 33 bp, Homo sapien
ggcccaactatttaagactccaaagcatacaca

SEQ ID NO: 1038684 - DNA, 33 bp, Homo sapien
ggcccaactatttaagcctccaaagcatacaca

SEQ ID NO: 1038685 - DNA, 33 bp, Homo sapien
gttccagggacccttaagacaaacatcattcct

SEQ ID NO: 1038686 - DNA, 33 bp, Homo sapien
gttccagggacccttacgacaaacatcattcct

SEQ ID NO: 1038687 - DNA, 33 bp, Homo sapien
caagggaatacaactcccactataacaacacaa

SEQ ID NO: 1038688 - DNA, 33 bp, Homo sapien
caagggaatacaactctcactataacaacacaa

SEQ ID NO: 1038689 - DNA, 33 bp, Homo sapien
gtgttggtgaatcctacgaattaagtggaggtt

SEQ ID NO: 1038690 - DNA, 33 bp, Homo sapien
gtgttggtgaatcctatgaattaagtggaggtt

SEQ ID NO: 1038691 - DNA, 33 bp, Homo sapien
atctgggacaattgaccgaaatacctatggatc

SEQ ID NO: 1038692 - DNA, 33 bp, Homo sapien
atctgggacaattgactgaaatacctatggatc

SEQ ID NO: 1038693 - DNA, 33 bp, Homo sapien
gtaggtctctggcctacagcagtggtaatgagg

SEQ ID NO: 1038694 - DNA, 33 bp, Homo sapien
gtaggtctctggcctagagcagtggtaatgagg

SEQ ID NO: 1038695 - DNA, 33 bp, Homo sapien
ctcagtctcagtactaaggcaaattattgagat

SEQ ID NO: 1038696 - DNA, 33 bp, Homo sapien
ctcagtctcagtactacggcaaattattgagat

SEQ ID NO: 1038697 - DNA, 33 bp, Homo sapien
ctttttcagaaattaacaagctgaccatgaaat

SEQ ID NO: 1038698 - DNA, 33 bp, Homo sapien
ctttttcagaaattaataagctgaccatgaaat

SEQ ID NO: 1038699 - DNA, 33 bp, Homo sapien
ttggaatcatgtcaaacataccactggctaact

SEQ ID NO: 1038700 - DNA, 33 bp, Homo sapien
ttggaatcatgtcaaagataccactggctaact

SEQ ID NO: 1038701 - DNA, 33 bp, Homo sapien
ctacttagtgtttgtaaggcaaaatggggccat

SEQ ID NO: 1038702 - DNA, 33 bp, Homo sapien
ctacttagtgtttgtacggcaaaatggggccat

SEQ ID NO: 1038703 - DNA, 33 bp, Homo sapien
attggggcagttcatgaaggataagggtagaca

SEQ ID NO: 1038704 - DNA, 33 bp, Homo sapien
attggggcagttcatggaggataagggtagaca

SEQ ID NO: 1038705 - DNA, 33 bp, Homo sapien
gattaagcagtagcaggaatagtcaataatctg

SEQ ID NO: 1038706 - DNA, 33 bp, Homo sapien
gattaagcagtagcagtaatagtcaataatctg

SEQ ID NO: 1038707 - DNA, 33 bp, Homo sapien
tattaagtatagagacaaagcttctagagagag

SEQ ID NO: 1038708 - DNA, 33 bp, Homo sapien
tattaagtatagagacgaagcttctagagagag

SEQ ID NO: 1038709 - DNA, 33 bp, Homo sapien
gcaaagttttaaaagacagcattcacaatggat

SEQ ID NO: 1038710 - DNA, 33 bp, Homo sapien
gcaaagttttaaaagagagcattcacaatggat

SEQ ID NO: 1038711 - DNA, 33 bp, Homo sapien
ttaaggaaatactccactagcacactgaacaaa

SEQ ID NO: 1038712 - DNA, 33 bp, Homo sapien
ttaaggaaatactccattagcacactgaacaaa

SEQ ID NO: 1038713 - DNA, 33 bp, Homo sapien
catgttgtggcatgcaccaatacttcatttctt

SEQ ID NO: 1038714 - DNA, 33 bp, Homo sapien
catgttgtggcatgcatcaatacttcatttctt

SEQ ID NO: 1038715 - DNA, 33 bp, Homo sapien
aacctgttcatataaaccctcctcaaagtaaac

SEQ ID NO: 1038716 - DNA, 33 bp, Homo sapien
aacctgttcatataaatcctcctcaaagtaaac

SEQ ID NO: 1038717 - DNA, 33 bp, Homo sapien
gcctggcctttcccgcgctggaccttggtgcat

SEQ ID NO: 1038718 - DNA, 33 bp, Homo sapien
gcctggcctttcccgctctggaccttggtgcat

SEQ ID NO: 1038719 - DNA, 33 bp, Homo sapien
atctctaagcaaagcgcaatagacctgtaatca

SEQ ID NO: 1038720 - DNA, 33 bp, Homo sapien
atctctaagcaaagcgtaatagacctgtaatca

SEQ ID NO: 1038721 - DNA, 33 bp, Homo sapien
ccaattctctttataccgggcattcttaccatc

SEQ ID NO: 1038722 - DNA, 33 bp, Homo sapien
ccaattctctttatactgggcattcttaccatc

SEQ ID NO: 1038723 - DNA, 33 bp, Homo sapien
agtcactgtcaagaccggagtttcagtgtagta

SEQ ID NO: 1038724 - DNA, 33 bp, Homo sapien
agtcactgtcaagacctgagtttcagtgtagta

SEQ ID NO: 1038725 - DNA, 33 bp, Homo sapien
caaatgaaatatgaaaagaatggttcccaagca

SEQ ID NO: 1038726 - DNA, 33 bp, Homo sapien
caaatgaaatatgaaaggaatggttcccaagca

SEQ ID NO: 1038727 - DNA, 33 bp, Homo sapien
tctttcagtatcttgcggcaaattctgttccaa

SEQ ID NO: 1038728 - DNA, 33 bp, Homo sapien
tctttcagtatcttgctgcaaattctgttccaa

SEQ ID NO: 1038729 - DNA, 33 bp, Homo sapien
tcacgtggagagttaacgtacttccctcttcac

SEQ ID NO: 1038730 - DNA, 33 bp, Homo sapien
tcacgtggagagttaatgtacttccctcttcac

SEQ ID NO: 1038731 - DNA, 33 bp, Homo sapien
ccagcccttcttacacaagatgtaggttaagag

SEQ ID NO: 1038732 - DNA, 33 bp, Homo sapien
ccagcccttcttacacgagatgtaggttaagag

SEQ ID NO: 1038733 - DNA, 33 bp, Homo sapien
cttaagccagactacacgggtccaaatcctggc

SEQ ID NO: 1038734 - DNA, 33 bp, Homo sapien
cttaagccagactacatgggtccaaatcctggc

SEQ ID NO: 1038735 - DNA, 33 bp, Homo sapien
ctgtgtttagctgcacaaatacctgcaaagact

SEQ ID NO: 1038736 - DNA, 33 bp, Homo sapien
ctgtgtttagctgcaccaatacctgcaaagact

SEQ ID NO: 1038737 - DNA, 33 bp, Homo sapien
aagctttgcagtttacacgcattgtcttattgt

SEQ ID NO: 1038738 - DNA, 33 bp, Homo sapien
aagctttgcagtttacgcgcattgtcttattgt

SEQ ID NO: 1038739 - DNA, 33 bp, Homo sapien
tatacaaagccaaagacagcattatgccaagca

SEQ ID NO: 1038740 - DNA, 33 bp, Homo sapien
tatacaaagccaaagagagcattatgccaagca

SEQ ID NO: 1038741 - DNA, 33 bp, Homo sapien
agctggccgcatagccccttttatacaaagcca

SEQ ID NO: 1038742 - DNA, 33 bp, Homo sapien
agctggccgcatagcctcttttatacaaagcca

SEQ ID NO: 1038743 - DNA, 33 bp, Homo sapien
gtagataaattcctgaaagtcacattgctgggc

SEQ ID NO: 1038744 - DNA, 33 bp, Homo sapien
gtagataaattcctgacagtcacattgctgggc

SEQ ID NO: 1038745 - DNA, 33 bp, Homo sapien
tgatagcctgaactgaagctgaggaagaaagct

SEQ ID NO: 1038746 - DNA, 33 bp, Homo sapien
tgatagcctgaactgaggctgaggaagaaagct

SEQ ID NO: 1038747 - DNA, 33 bp, Homo sapien
cagctctgtggaatgacagaacttataaaatgt

SEQ ID NO: 1038748 - DNA, 33 bp, Homo sapien
cagctctgtggaatgatagaacttataaaatgt

SEQ ID NO: 1038749 - DNA, 33 bp, Homo sapien
ttaatccagcacttaaggttgaattgagactat

SEQ ID NO: 1038750 - DNA, 33 bp, Homo sapien
ttaatccagcacttaatgttgaattgagactat

SEQ ID NO: 1038751 - DNA, 33 bp, Homo sapien
tttcccaaaaaaggccaactggcagagcaaaag

SEQ ID NO: 1038752 - DNA, 33 bp, Homo sapien
tttcccaaaaaaggccgactggcagagcaaaag

SEQ ID NO: 1038753 - DNA, 33 bp, Homo sapien
cattctttacaatatgcagtgagatgggcttaa

SEQ ID NO: 1038754 - DNA, 33 bp, Homo sapien
cattctttacaatatggagtgagatgggcttaa

SEQ ID NO: 1038755 - DNA, 33 bp, Homo sapien
ctgttgtgatcattctcacattcctctccttct

SEQ ID NO: 1038756 - DNA, 33 bp, Homo sapien
ctgttgtgatcattcttacattcctctccttct

SEQ ID NO: 1038757 - DNA, 33 bp, Homo sapien
aagatctgacctgactcactccatcttgcttct

SEQ ID NO: 1038758 - DNA, 33 bp, Homo sapien
aagatctgacctgactgactccatcttgcttct

SEQ ID NO: 1038759 - DNA, 33 bp, Homo sapien
tttgagcagttcagaagcttgcagcttccagct

SEQ ID NO: 1038760 - DNA, 33 bp, Homo sapien
tttgagcagttcagaatcttgcagcttccagct

SEQ ID NO: 1038761 - DNA, 33 bp, Homo sapien
actggagaatgttccccgattacagcttattat

SEQ ID NO: 1038762 - DNA, 33 bp, Homo sapien
actggagaatgttccctgattacagcttattat

SEQ ID NO: 1038763 - DNA, 33 bp, Homo sapien
atgctgcagaaaagaaataaggacagcattcat

SEQ ID NO: 1038764 - DNA, 33 bp, Homo sapien
atgctgcagaaaagaagtaaggacagcattcat

SEQ ID NO: 1038765 - DNA, 33 bp, Homo sapien
ttaaaggtctagttcaaattaagagattgaaaa

SEQ ID NO: 1038766 - DNA, 33 bp, Homo sapien
ttaaaggtctagttcagattaagagattgaaaa

SEQ ID NO: 1038767 - DNA, 33 bp, Homo sapien
atatacaagcatttggacagtttagctcaagaa

SEQ ID NO: 1038768 - DNA, 33 bp, Homo sapien
atatacaagcatttgggcagtttagctcaagaa

SEQ ID NO: 1038769 - DNA, 33 bp, Homo sapien
tttcataaaggccacaaagttctcttactcttc

SEQ ID NO: 1038770 - DNA, 33 bp, Homo sapien
tttcataaaggccacagagttctcttactcttc

SEQ ID NO: 1038771 - DNA, 33 bp, Homo sapien
ctcagctgtatcctacagaatctctctctggac

SEQ ID NO: 1038772 - DNA, 33 bp, Homo sapien
ctcagctgtatcctaccgaatctctctctggac

SEQ ID NO: 1038773 - DNA, 33 bp, Homo sapien
ctactgaggatgtacacgtgaaaagaaattggt

SEQ ID NO: 1038774 - DNA, 33 bp, Homo sapien
ctactgaggatgtacatgtgaaaagaaattggt

SEQ ID NO: 1038775 - DNA, 33 bp, Homo sapien
ctagaaatgtccaaaacttacacgaagatttta

SEQ ID NO: 1038776 - DNA, 33 bp, Homo sapien
ctagaaatgtccaaaagttacacgaagatttta

SEQ ID NO: 1038777 - DNA, 33 bp, Homo sapien
gggctcaagggagcaacgaaaatggaaaggttt

SEQ ID NO: 1038778 - DNA, 33 bp, Homo sapien
gggctcaagggagcaatgaaaatggaaaggttt

SEQ ID NO: 1038779 - DNA, 33 bp, Homo sapien
gcccaagaaaatgtcaataaatcctccaaacat

SEQ ID NO: 1038780 - DNA, 33 bp, Homo sapien
gcccaagaaaatgtcagtaaatcctccaaacat

SEQ ID NO: 1038781 - DNA, 33 bp, Homo sapien
tcaccacacaggaccacgcctcagaaacaggtt

SEQ ID NO: 1038782 - DNA, 33 bp, Homo sapien
tcaccacacaggaccatgcctcagaaacaggtt

SEQ ID NO: 1038783 - DNA, 33 bp, Homo sapien
tacttgttttggtgtgaattccttagagtttta

SEQ ID NO: 1038784 - DNA, 33 bp, Homo sapien
tacttgttttggtgtggattccttagagtttta

SEQ ID NO: 1038785 - DNA, 33 bp, Homo sapien
tatccctttttggtgacatgaggacaactttct

SEQ ID NO: 1038786 - DNA, 33 bp, Homo sapien
tatccctttttggtgatatgaggacaactttct

SEQ ID NO: 1038787 - DNA, 33 bp, Homo sapien
cttactttatcactcactgagactttctctccc

SEQ ID NO: 1038788 - DNA, 33 bp, Homo sapien
cttactttatcactcattgagactttctctccc

SEQ ID NO: 1038789 - DNA, 33 bp, Homo sapien
gtattcccgacacagaacaactgctggagtcac

SEQ ID NO: 1038790 - DNA, 33 bp, Homo sapien
gtattcccgacacagagcaactgctggagtcac

SEQ ID NO: 1038791 - DNA, 33 bp, Homo sapien
caggagacagtcgtaaaccaagatcacatccct

SEQ ID NO: 1038792 - DNA, 33 bp, Homo sapien
caggagacagtcgtaagccaagatcacatccct

SEQ ID NO: 1038793 - DNA, 33 bp, Homo sapien
ccctctatttgtcctccatgtctgtcgttctca

SEQ ID NO: 1038794 - DNA, 33 bp, Homo sapien
ccctctatttgtcctctatgtctgtcgttctca

SEQ ID NO: 1038795 - DNA, 33 bp, Homo sapien
aacgaacctggctgcccagactagacgtataat

SEQ ID NO: 1038796 - DNA, 33 bp, Homo sapien
aacgaacctggctgcctagactagacgtataat

SEQ ID NO: 1038797 - DNA, 33 bp, Homo sapien
tttagagctgatctacacagttagctttttttg

SEQ ID NO: 1038798 - DNA, 33 bp, Homo sapien
tttagagctgatctacccagttagctttttttg

SEQ ID NO: 1038799 - DNA, 33 bp, Homo sapien
actcaattcttattcaaccaaaagtaccctcca

SEQ ID NO: 1038800 - DNA, 33 bp, Homo sapien
actcaattcttattcacccaaaagtaccctcca

SEQ ID NO: 1038801 - DNA, 33 bp, Homo sapien
ctcttaatgggcagaaagggctttattaattta

SEQ ID NO: 1038802 - DNA, 33 bp, Homo sapien
ctcttaatgggcagaaggggctttattaattta

SEQ ID NO: 1038803 - DNA, 33 bp, Homo sapien
agtaaaaattttaaagaccgcattgaagtataa

SEQ ID NO: 1038804 - DNA, 33 bp, Homo sapien
agtaaaaattttaaaggccgcattgaagtataa

SEQ ID NO: 1038805 - DNA, 33 bp, Homo sapien
gtaatagtaacaaagaacacttgtcaggttttc

SEQ ID NO: 1038806 - DNA, 33 bp, Homo sapien
gtaatagtaacaaagagcacttgtcaggttttc

SEQ ID NO: 1038807 - DNA, 33 bp, Homo sapien
tattcttctcattttacagatttacaggaaact

SEQ ID NO: 1038808 - DNA, 33 bp, Homo sapien
tattcttctcattttatagatttacaggaaact

SEQ ID NO: 1038809 - DNA, 33 bp, Homo sapien
ttttgcattctctaaaaatcttggactgacttg

SEQ ID NO: 1038810 - DNA, 33 bp, Homo sapien
ttttgcattctctaaacatcttggactgacttg

SEQ ID NO: 1038811 - DNA, 33 bp, Homo sapien
gtaatgacagcagaaacggactgaatgtagaca

SEQ ID NO: 1038812 - DNA, 33 bp, Homo sapien
gtaatgacagcagaaatggactgaatgtagaca

SEQ ID NO: 1038813 - DNA, 33 bp, Homo sapien
aacctagtggattccactcttacacactgccct

SEQ ID NO: 1038814 - DNA, 33 bp, Homo sapien
aacctagtggattccattcttacacactgccct

SEQ ID NO: 1038815 - DNA, 33 bp, Homo sapien
acactttttggttcacaatctggttatgaaaga

SEQ ID NO: 1038816 - DNA, 33 bp, Homo sapien
acactttttggttcacgatctggttatgaaaga

SEQ ID NO: 1038817 - DNA, 33 bp, Homo sapien
aggtatttaagagctcaagtatctaagaaccag

SEQ ID NO: 1038818 - DNA, 33 bp, Homo sapien
aggtatttaagagctcgagtatctaagaaccag

SEQ ID NO: 1038819 - DNA, 33 bp, Homo sapien
tttatctctgaatttccgaaagtgcttttctaa

SEQ ID NO: 1038820 - DNA, 33 bp, Homo sapien
tttatctctgaatttctgaaagtgcttttctaa

SEQ ID NO: 1038821 - DNA, 33 bp, Homo sapien
ttaaattcttgtctgacgttggagggcatatat

SEQ ID NO: 1038822 - DNA, 33 bp, Homo sapien
ttaaattcttgtctgatgttggagggcatatat

SEQ ID NO: 1038823 - DNA, 33 bp, Homo sapien
ttgagaatgttaacaacggctatctctgaatgg

SEQ ID NO: 1038824 - DNA, 33 bp, Homo sapien
ttgagaatgttaacaatggctatctctgaatgg

SEQ ID NO: 1038825 - DNA, 33 bp, Homo sapien
tttatttacaattggaagcatcctaaatgattt

SEQ ID NO: 1038826 - DNA, 33 bp, Homo sapien
tttatttacaattggaggcatcctaaatgattt

SEQ ID NO: 1038827 - DNA, 33 bp, Homo sapien
aatacaatgtacacggaactattttggcctcct

SEQ ID NO: 1038828 - DNA, 33 bp, Homo sapien
aatacaatgtacacgggactattttggcctcct

SEQ ID NO: 1038829 - DNA, 33 bp, Homo sapien
atgtacaggtcagagaaaataaactttggtgag

SEQ ID NO: 1038830 - DNA, 33 bp, Homo sapien
atgtacaggtcagagacaataaactttggtgag

SEQ ID NO: 1038831 - DNA, 33 bp, Homo sapien
atgggggtgagggagccatcaggacaatcctaa

SEQ ID NO: 1038832 - DNA, 33 bp, Homo sapien
atgggggtgagggagcgatcaggacaatcctaa

SEQ ID NO: 1038833 - DNA, 33 bp, Homo sapien
gaaagacctacctagacctctagcatcctaaga

SEQ ID NO: 1038834 - DNA, 33 bp, Homo sapien
gaaagacctacctagatctctagcatcctaaga

SEQ ID NO: 1038835 - DNA, 33 bp, Homo sapien
tgatggcacggagacactgaaaagaacagagag

SEQ ID NO: 1038836 - DNA, 33 bp, Homo sapien
tgatggcacggagacattgaaaagaacagagag

SEQ ID NO: 1038837 - DNA, 33 bp, Homo sapien
atttaaaatgtagttaaagtcatgaatcagttt

SEQ ID NO: 1038838 - DNA, 33 bp, Homo sapien
atttaaaatgtagttacagtcatgaatcagttt

SEQ ID NO: 1038839 - DNA, 33 bp, Homo sapien
aacaatacacagaatacgcaataagttaattgt

SEQ ID NO: 1038840 - DNA, 33 bp, Homo sapien
aacaatacacagaatatgcaataagttaattgt

SEQ ID NO: 1038841 - DNA, 33 bp, Homo sapien
tattttgtacctttacaatggcatacttgtcaa

SEQ ID NO: 1038842 - DNA, 33 bp, Homo sapien
tattttgtacctttacgatggcatacttgtcaa

SEQ ID NO: 1038843 - DNA, 33 bp, Homo sapien
agacaacacgaattgacagcagcatatttccta

SEQ ID NO: 1038844 - DNA, 33 bp, Homo sapien
agacaacacgaattgatagcagcatatttccta

SEQ ID NO: 1038845 - DNA, 33 bp, Homo sapien
agttacgggccacctacacaggcttctgtggat

SEQ ID NO: 1038846 - DNA, 33 bp, Homo sapien
agttacgggccacctatacaggcttctgtggat

SEQ ID NO: 1038847 - DNA, 33 bp, Homo sapien
aggggattggattagactacttaagagacacta

SEQ ID NO: 1038848 - DNA, 33 bp, Homo sapien
aggggattggattagagtacttaagagacacta

SEQ ID NO: 1038849 - DNA, 33 bp, Homo sapien
aattgccagtatcaagaatgattctacagtcat

SEQ ID NO: 1038850 - DNA, 33 bp, Homo sapien
aattgccagtatcaagtatgattctacagtcat

SEQ ID NO: 1038851 - DNA, 33 bp, Homo sapien
agggaagaatggaagacaatcaagcagaatgaa

SEQ ID NO: 1038852 - DNA, 33 bp, Homo sapien
agggaagaatggaagataatcaagcagaatgaa

SEQ ID NO: 1038853 - DNA, 33 bp, Homo sapien
atacaaaagaggctatcaaaaaactacttcata

SEQ ID NO: 1038854 - DNA, 33 bp, Homo sapien
atacaaaagaggctatgaaaaaactacttcata

SEQ ID NO: 1038855 - DNA, 33 bp, Homo sapien
aatactgaaatatccaagtcctacctttttcta

SEQ ID NO: 1038856 - DNA, 33 bp, Homo sapien
aatactgaaatatccaggtcctacctttttcta

SEQ ID NO: 1038857 - DNA, 33 bp, Homo sapien
gtattaggcattctaagtaatctagaggtgatt

SEQ ID NO: 1038858 - DNA, 33 bp, Homo sapien
gtattaggcattctaattaatctagaggtgatt

SEQ ID NO: 1038859 - DNA, 33 bp, Homo sapien
agcagtaaggcaaagacacatagaagtcagaaa

SEQ ID NO: 1038860 - DNA, 33 bp, Homo sapien
agcagtaaggcaaagatacatagaagtcagaaa

SEQ ID NO: 1038861 - DNA, 33 bp, Homo sapien
ccaagaagggtacatcaaaaattacaaaacact

SEQ ID NO: 1038862 - DNA, 33 bp, Homo sapien
ccaagaagggtacatcgaaaattacaaaacact

SEQ ID NO: 1038863 - DNA, 33 bp, Homo sapien
ctccattccttggtcccgactcttgggttccac

SEQ ID NO: 1038864 - DNA, 33 bp, Homo sapien
ctccattccttggtcctgactcttgggttccac

SEQ ID NO: 1038865 - DNA, 33 bp, Homo sapien
gtagtgtgaaaggagccacggacaatatgaatg

SEQ ID NO: 1038866 - DNA, 33 bp, Homo sapien
gtagtgtgaaaggagctacggacaatatgaatg

SEQ ID NO: 1038867 - DNA, 33 bp, Homo sapien
ttctttctacaataatctgaactgtaagtggct

SEQ ID NO: 1038868 - DNA, 33 bp, Homo sapien
ttctttctacaataatttgaactgtaagtggct

SEQ ID NO: 1038869 - DNA, 33 bp, Homo sapien
tataatacgactaacaataggttacgatccatt

SEQ ID NO: 1038870 - DNA, 33 bp, Homo sapien
tataatacgactaacagtaggttacgatccatt

SEQ ID NO: 1038871 - DNA, 33 bp, Homo sapien
atgtggacttgtgagacatccccaatagctaag

SEQ ID NO: 1038872 - DNA, 33 bp, Homo sapien
atgtggacttgtgagagatccccaatagctaag

SEQ ID NO: 1038873 - DNA, 33 bp, Homo sapien
aaccagttggaccacaaatttaccagggtggag

SEQ ID NO: 1038874 - DNA, 33 bp, Homo sapien
aaccagttggaccacagatttaccagggtggag

SEQ ID NO: 1038875 - DNA, 33 bp, Homo sapien
ttttaataagtctaaaattaacactgaccactg

SEQ ID NO: 1038876 - DNA, 33 bp, Homo sapien
ttttaataagtctaaagttaacactgaccactg

SEQ ID NO: 1038877 - DNA, 33 bp, Homo sapien
cccagaagccaagtgacgttggagccatgcttg

SEQ ID NO: 1038878 - DNA, 33 bp, Homo sapien
cccagaagccaagtgatgttggagccatgcttg

SEQ ID NO: 1038879 - DNA, 33 bp, Homo sapien
tgtagccattaccaaaccagtagctgccattcc

SEQ ID NO: 1038880 - DNA, 33 bp, Homo sapien
tgtagccattaccaaatcagtagctgccattcc

SEQ ID NO: 1038881 - DNA, 33 bp, Homo sapien
tagtgattaagaacacaaaatttgggagaagac

SEQ ID NO: 1038882 - DNA, 33 bp, Homo sapien
tagtgattaagaacacgaaatttgggagaagac

SEQ ID NO: 1038883 - DNA, 33 bp, Homo sapien
taagttgttggtgcaacagaaaggtgaacctct

SEQ ID NO: 1038884 - DNA, 33 bp, Homo sapien
taagttgttggtgcaatagaaaggtgaacctct

SEQ ID NO: 1038885 - DNA, 33 bp, Homo sapien
ttgaactggtgaagacaaactgttggccacatt

SEQ ID NO: 1038886 - DNA, 33 bp, Homo sapien
ttgaactggtgaagacgaactgttggccacatt

SEQ ID NO: 1038887 - DNA, 33 bp, Homo sapien
cccctggctgatcatacgttaagttgttatagc

SEQ ID NO: 1038888 - DNA, 33 bp, Homo sapien
cccctggctgatcatatgttaagttgttatagc

SEQ ID NO: 1038889 - DNA, 33 bp, Homo sapien
aattcaaagaagagaaactgcagctgcaaccaa

SEQ ID NO: 1038890 - DNA, 33 bp, Homo sapien
aattcaaagaagagaagctgcagctgcaaccaa

SEQ ID NO: 1038891 - DNA, 33 bp, Homo sapien
cccccaaaactttgcaacctggatacaactgtg

SEQ ID NO: 1038892 - DNA, 33 bp, Homo sapien
cccccaaaactttgcagcctggatacaactgtg

SEQ ID NO: 1038893 - DNA, 33 bp, Homo sapien
acaaggttcaattaacagcacaaaattcctgag

SEQ ID NO: 1038894 - DNA, 33 bp, Homo sapien
acaaggttcaattaacggcacaaaattcctgag

SEQ ID NO: 1038895 - DNA, 33 bp, Homo sapien
agagaaagtgtcaggaatagagtgtcgagagtg

SEQ ID NO: 1038896 - DNA, 33 bp, Homo sapien
agagaaagtgtcaggagtagagtgtcgagagtg

SEQ ID NO: 1038897 - DNA, 33 bp, Homo sapien
ggcttcaatgaccataggaaccgactgattatg

SEQ ID NO: 1038898 - DNA, 33 bp, Homo sapien
ggcttcaatgaccatatgaaccgactgattatg

SEQ ID NO: 1038899 - DNA, 33 bp, Homo sapien
tgtcaaggcagaaccacaagactaggtaactgc

SEQ ID NO: 1038900 - DNA, 33 bp, Homo sapien
tgtcaaggcagaaccataagactaggtaactgc

SEQ ID NO: 1038901 - DNA, 33 bp, Homo sapien
atcaaaaggatgcagagggctagtaaggatggt

SEQ ID NO: 1038902 - DNA, 33 bp, Homo sapien
atcaaaaggatgcagatggctagtaaggatggt

SEQ ID NO: 1038903 - DNA, 33 bp, Homo sapien
tcacaagtggaaggtacatgtcagaattatttt

SEQ ID NO: 1038904 - DNA, 33 bp, Homo sapien
tcacaagtggaaggtagatgtcagaattatttt

SEQ ID NO: 1038905 - DNA, 33 bp, Homo sapien
ttactactgtttggcaatctttttcacttaata

SEQ ID NO: 1038906 - DNA, 33 bp, Homo sapien
ttactactgtttggcagtctttttcacttaata

SEQ ID NO: 1038907 - DNA, 33 bp, Homo sapien
taagaattctctttgacgagaccatagccattt

SEQ ID NO: 1038908 - DNA, 33 bp, Homo sapien
taagaattctctttgatgagaccatagccattt

SEQ ID NO: 1038909 - DNA, 33 bp, Homo sapien
tttttttatgtgcttacggatcaaaggtatttc

SEQ ID NO: 1038910 - DNA, 33 bp, Homo sapien
tttttttatgtgcttatggatcaaaggtatttc

SEQ ID NO: 1038911 - DNA, 33 bp, Homo sapien
tcctgacttgttgaaactgtcctatttttaagt

SEQ ID NO: 1038912 - DNA, 33 bp, Homo sapien
tcctgacttgttgaaagtgtcctatttttaagt

SEQ ID NO: 1038913 - DNA, 33 bp, Homo sapien
gttcttctttaatcaacgaggactatagaaaca

SEQ ID NO: 1038914 - DNA, 33 bp, Homo sapien
gttcttctttaatcaatgaggactatagaaaca

SEQ ID NO: 1038915 - DNA, 33 bp, Homo sapien
ccttgacctccacattcaagcgatcttcccaca

SEQ ID NO: 1038916 - DNA, 33 bp, Homo sapien
ccttgacctccacatttaagcgatcttcccaca

SEQ ID NO: 1038917 - DNA, 33 bp, Homo sapien
ccacttgttcatcttacagactcccaaacgcaa

SEQ ID NO: 1038918 - DNA, 33 bp, Homo sapien
ccacttgttcatcttatagactcccaaacgcaa

SEQ ID NO: 1038919 - DNA, 33 bp, Homo sapien
gcaggatgatgataaaagctggaatgagaggtc

SEQ ID NO: 1038920 - DNA, 33 bp, Homo sapien
gcaggatgatgataaaggctggaatgagaggtc

SEQ ID NO: 1038921 - DNA, 33 bp, Homo sapien
tctggagaaaggcaaactatgcagccgtattca

SEQ ID NO: 1038922 - DNA, 33 bp, Homo sapien
tctggagaaaggcaaattatgcagccgtattca

SEQ ID NO: 1038923 - DNA, 33 bp, Homo sapien
agagtattgatgagaacagagaaagtagaggct

SEQ ID NO: 1038924 - DNA, 33 bp, Homo sapien
agagtattgatgagaatagagaaagtagaggct

SEQ ID NO: 1038925 - DNA, 33 bp, Homo sapien
ttcaaagtgataatcacggaaagcagggcaact

SEQ ID NO: 1038926 - DNA, 33 bp, Homo sapien
ttcaaagtgataatcatggaaagcagggcaact

SEQ ID NO: 1038927 - DNA, 33 bp, Homo sapien
ttatcacctgacagtacattttgttgtttatgt

SEQ ID NO: 1038928 - DNA, 33 bp, Homo sapien
ttatcacctgacagtatattttgttgtttatgt

SEQ ID NO: 1038929 - DNA, 33 bp, Homo sapien
tcataacagtgagaaacgctgatgtaccttttg

SEQ ID NO: 1038930 - DNA, 33 bp, Homo sapien
tcataacagtgagaaatgctgatgtaccttttg

SEQ ID NO: 1038931 - DNA, 33 bp, Homo sapien
aataactcaaaatctccacaatgcagtctgcaa

SEQ ID NO: 1038932 - DNA, 33 bp, Homo sapien
aataactcaaaatctctacaatgcagtctgcaa

SEQ ID NO: 1038933 - DNA, 33 bp, Homo sapien
atttaccatgcagtcaaaaggtgaatataggta

SEQ ID NO: 1038934 - DNA, 33 bp, Homo sapien
atttaccatgcagtcagaaggtgaatataggta

SEQ ID NO: 1038935 - DNA, 33 bp, Homo sapien
gaaggataaccatgatgaaattacacagggcag

SEQ ID NO: 1038936 - DNA, 33 bp, Homo sapien
gaaggataaccatgattaaattacacagggcag

SEQ ID NO: 1038937 - DNA, 33 bp, Homo sapien
aactataaatagaaaaatagactgccagcctgt

SEQ ID NO: 1038938 - DNA, 33 bp, Homo sapien
aactataaatagaaaagtagactgccagcctgt

SEQ ID NO: 1038939 - DNA, 33 bp, Homo sapien
gataaatgctgagacacagaatcaaaagaagaa

SEQ ID NO: 1038940 - DNA, 33 bp, Homo sapien
gataaatgctgagacatagaatcaaaagaagaa

SEQ ID NO: 1038941 - DNA, 33 bp, Homo sapien
ggaaattcagatgagcggattggctacaatgat

SEQ ID NO: 1038942 - DNA, 33 bp, Homo sapien
ggaaattcagatgagctgattggctacaatgat

SEQ ID NO: 1038943 - DNA, 33 bp, Homo sapien
aggcagagtaaggaataaactcaaatacatctg

SEQ ID NO: 1038944 - DNA, 33 bp, Homo sapien
aggcagagtaaggaatcaactcaaatacatctg

SEQ ID NO: 1038945 - DNA, 33 bp, Homo sapien
agtcatctgttggaaccatggaaaggctccggg

SEQ ID NO: 1038946 - DNA, 33 bp, Homo sapien
agtcatctgttggaactatggaaaggctccggg

SEQ ID NO: 1038947 - DNA, 33 bp, Homo sapien
cagctgtaagaagaaaggaagtactgatagata

SEQ ID NO: 1038948 - DNA, 33 bp, Homo sapien
cagctgtaagaagaaatgaagtactgatagata

SEQ ID NO: 1038949 - DNA, 33 bp, Homo sapien
atcttaaggcatcttcgctctcaaagcatttgc

SEQ ID NO: 1038950 - DNA, 33 bp, Homo sapien
atcttaaggcatcttctctctcaaagcatttgc

SEQ ID NO: 1038951 - DNA, 33 bp, Homo sapien
ccctgatgcaacaatgaaaacagagagcttgac

SEQ ID NO: 1038952 - DNA, 33 bp, Homo sapien
ccctgatgcaacaatggaaacagagagcttgac

SEQ ID NO: 1038953 - DNA, 33 bp, Homo sapien
aaataaagataactcaccttttcaaagttgctg

SEQ ID NO: 1038954 - DNA, 33 bp, Homo sapien
aaataaagataactcagcttttcaaagttgctg

SEQ ID NO: 1038955 - DNA, 33 bp, Homo sapien
gtagtctgtcatttcactccagagtttttttct

SEQ ID NO: 1038956 - DNA, 33 bp, Homo sapien
gtagtctgtcatttcattccagagtttttttct

SEQ ID NO: 1038957 - DNA, 33 bp, Homo sapien
ttgttgcgtatttctaaatgttttcatatatag

SEQ ID NO: 1038958 - DNA, 33 bp, Homo sapien
ttgttgcgtatttctatatgttttcatatatag

SEQ ID NO: 1038959 - DNA, 33 bp, Homo sapien
ttctattgtggacagaaaacatattctatatga

SEQ ID NO: 1038960 - DNA, 33 bp, Homo sapien
ttctattgtggacagagaacatattctatatga

SEQ ID NO: 1038961 - DNA, 33 bp, Homo sapien
aggttagtagaaaaaaacattcttggcagagga

SEQ ID NO: 1038962 - DNA, 33 bp, Homo sapien
aggttagtagaaaaaagcattcttggcagagga

SEQ ID NO: 1038963 - DNA, 33 bp, Homo sapien
aaggcttggaattcacacactgtcacttctggt

SEQ ID NO: 1038964 - DNA, 33 bp, Homo sapien
aaggcttggaattcacgcactgtcacttctggt

SEQ ID NO: 1038965 - DNA, 33 bp, Homo sapien
attcacgttactgaccacttcctacatcgttca

SEQ ID NO: 1038966 - DNA, 33 bp, Homo sapien
attcacgttactgaccgcttcctacatcgttca

SEQ ID NO: 1038967 - DNA, 33 bp, Homo sapien
catgaaagacattaagcaagatgtatttcagca

SEQ ID NO: 1038968 - DNA, 33 bp, Homo sapien
catgaaagacattaaggaagatgtatttcagca

SEQ ID NO: 1038969 - DNA, 33 bp, Homo sapien
gggtggatagtttacactgagaagtaatgagag

SEQ ID NO: 1038970 - DNA, 33 bp, Homo sapien
gggtggatagtttacattgagaagtaatgagag

SEQ ID NO: 1038971 - DNA, 33 bp, Homo sapien
caggaacagaaaaccaaatacggtatgttctca

SEQ ID NO: 1038972 - DNA, 33 bp, Homo sapien
caggaacagaaaaccagatacggtatgttctca

SEQ ID NO: 1038973 - DNA, 33 bp, Homo sapien
cgctgatgggattccaatagaggggttcaactg

SEQ ID NO: 1038974 - DNA, 33 bp, Homo sapien
cgctgatgggattccagtagaggggttcaactg

SEQ ID NO: 1038975 - DNA, 33 bp, Homo sapien
ggaatacagtagtgaacgaagtaaaagaggaag

SEQ ID NO: 1038976 - DNA, 33 bp, Homo sapien
ggaatacagtagtgaatgaagtaaaagaggaag

SEQ ID NO: 1038977 - DNA, 33 bp, Homo sapien
ggaaaaaatgctggtcaatcctgttaaaccatt

SEQ ID NO: 1038978 - DNA, 33 bp, Homo sapien
ggaaaaaatgctggtctatcctgttaaaccatt

SEQ ID NO: 1038979 - DNA, 33 bp, Homo sapien
tctaaatctgtctctaaggagataacacattag

SEQ ID NO: 1038980 - DNA, 33 bp, Homo sapien
tctaaatctgtctctagggagataacacattag

SEQ ID NO: 1038981 - DNA, 33 bp, Homo sapien
cagttcaaattctaaaaaaaacctacatggcac

SEQ ID NO: 1038982 - DNA, 33 bp, Homo sapien
cagttcaaattctaaacaaaacctacatggcac

SEQ ID NO: 1038983 - DNA, 33 bp, Homo sapien
attgatgcctcaacccactgcagtctgacttcc

SEQ ID NO: 1038984 - DNA, 33 bp, Homo sapien
attgatgcctcaacccgctgcagtctgacttcc

SEQ ID NO: 1038985 - DNA, 33 bp, Homo sapien
gtaaagatgagtacagacaattgctttaagaga

SEQ ID NO: 1038986 - DNA, 33 bp, Homo sapien
gtaaagatgagtacagccaattgctttaagaga

SEQ ID NO: 1038987 - DNA, 33 bp, Homo sapien
cttatgtctacaaaaaattgaaattacccaggc

SEQ ID NO: 1038988 - DNA, 33 bp, Homo sapien
cttatgtctacaaaaagttgaaattacccaggc

SEQ ID NO: 1038989 - DNA, 33 bp, Homo sapien
ttgttatttgcttaggacagtttgcttaaagta

SEQ ID NO: 1038990 - DNA, 33 bp, Homo sapien
ttgttatttgcttagggcagtttgcttaaagta

SEQ ID NO: 1038991 - DNA, 33 bp, Homo sapien
taaaaacgctatccatgagaaatttcagttgaa

SEQ ID NO: 1038992 - DNA, 33 bp, Homo sapien
taaaaacgctatccattagaaatttcagttgaa

SEQ ID NO: 1038993 - DNA, 33 bp, Homo sapien
attcacatagctgaccaagtcattgataccaag

SEQ ID NO: 1038994 - DNA, 33 bp, Homo sapien
attcacatagctgacctagtcattgataccaag

SEQ ID NO: 1038995 - DNA, 33 bp, Homo sapien
ctcttccttcttgaccaagccaatcaagacata

SEQ ID NO: 1038996 - DNA, 33 bp, Homo sapien
ctcttccttcttgacctagccaatcaagacata

SEQ ID NO: 1038997 - DNA, 33 bp, Homo sapien
gaagaaaatgaattcaacaaaaatactgcaaga

SEQ ID NO: 1038998 - DNA, 33 bp, Homo sapien
gaagaaaatgaattcagcaaaaatactgcaaga

SEQ ID NO: 1038999 - DNA, 33 bp, Homo sapien
aaatgcaacaaaaagaaatttagccttcagaaa

SEQ ID NO: 1039000 - DNA, 33 bp, Homo sapien
aaatgcaacaaaaagagatttagccttcagaaa

SEQ ID NO: 1039001 - DNA, 33 bp, Homo sapien
gaaacaggtactctcaaatggtgttggcaaaaa

SEQ ID NO: 1039002 - DNA, 33 bp, Homo sapien
gaaacaggtactctcacatggtgttggcaaaaa

SEQ ID NO: 1039003 - DNA, 33 bp, Homo sapien
ctgttagttcacaagacaggtggttgttgttgt

SEQ ID NO: 1039004 - DNA, 33 bp, Homo sapien
ctgttagttcacaagagaggtggttgttgttgt

SEQ ID NO: 1039005 - DNA, 33 bp, Homo sapien
ctttgggtgcctaacaatcaattgtgagcttgt

SEQ ID NO: 1039006 - DNA, 33 bp, Homo sapien
ctttgggtgcctaacagtcaattgtgagcttgt

SEQ ID NO: 1039007 - DNA, 33 bp, Homo sapien
gggtggggtgtttggacgtgaatcaccaggtgc

SEQ ID NO: 1039008 - DNA, 33 bp, Homo sapien
gggtggggtgtttggatgtgaatcaccaggtgc

SEQ ID NO: 1039009 - DNA, 33 bp, Homo sapien
agacagagaatggcagcagtcatttaatgggta

SEQ ID NO: 1039010 - DNA, 33 bp, Homo sapien
agacagagaatggcagtagtcatttaatgggta

SEQ ID NO: 1039011 - DNA, 33 bp, Homo sapien
tggtttgcttattgctaaatttccatgcatgaa

SEQ ID NO: 1039012 - DNA, 33 bp, Homo sapien
tggtttgcttattgcttaatttccatgcatgaa

SEQ ID NO: 1039013 - DNA, 33 bp, Homo sapien
cctgctgtcctgttatcagccacacatcctgaa

SEQ ID NO: 1039014 - DNA, 33 bp, Homo sapien
cctgctgtcctgttattagccacacatcctgaa

SEQ ID NO: 1039015 - DNA, 33 bp, Homo sapien
tcacgtgtaaaatagggataaagtgcctctctc

SEQ ID NO: 1039016 - DNA, 33 bp, Homo sapien
tcacgtgtaaaataggtataaagtgcctctctc

SEQ ID NO: 1039017 - DNA, 33 bp, Homo sapien
catgtatgtatatgagcaggcagaattggggtg

SEQ ID NO: 1039018 - DNA, 33 bp, Homo sapien
catgtatgtatatgaggaggcagaattggggtg

SEQ ID NO: 1039019 - DNA, 33 bp, Homo sapien
tttgaggactctagaaggatttccttaggctgt

SEQ ID NO: 1039020 - DNA, 33 bp, Homo sapien
tttgaggactctagaatgatttccttaggctgt

SEQ ID NO: 1039021 - DNA, 33 bp, Homo sapien
aagatggacttagggacaaaatccatcctttca

SEQ ID NO: 1039022 - DNA, 33 bp, Homo sapien
aagatggacttagggagaaaatccatcctttca

SEQ ID NO: 1039023 - DNA, 33 bp, Homo sapien
ctatactcccccaaaccacgtattagaagatat

SEQ ID NO: 1039024 - DNA, 33 bp, Homo sapien
ctatactcccccaaacgacgtattagaagatat

SEQ ID NO: 1039025 - DNA, 33 bp, Homo sapien
gccacaaaactagtaccgtacagggagaacctg

SEQ ID NO: 1039026 - DNA, 33 bp, Homo sapien
gccacaaaactagtactgtacagggagaacctg

SEQ ID NO: 1039027 - DNA, 33 bp, Homo sapien
atgattaatcaacaagcacatactcagctctgt

SEQ ID NO: 1039028 - DNA, 33 bp, Homo sapien
atgattaatcaacaaggacatactcagctctgt

SEQ ID NO: 1039029 - DNA, 33 bp, Homo sapien
aatgcaatctaccatacagtctttgtcctccac

SEQ ID NO: 1039030 - DNA, 33 bp, Homo sapien
aatgcaatctaccatatagtctttgtcctccac

SEQ ID NO: 1039031 - DNA, 33 bp, Homo sapien
taaatatagcagttcaagtttaccatttaaaaa

SEQ ID NO: 1039032 - DNA, 33 bp, Homo sapien
taaatatagcagttcatgtttaccatttaaaaa

SEQ ID NO: 1039033 - DNA, 33 bp, Homo sapien
cacagaggatccaatacaatccacttgttctga

SEQ ID NO: 1039034 - DNA, 33 bp, Homo sapien
cacagaggatccaatataatccacttgttctga

SEQ ID NO: 1039035 - DNA, 33 bp, Homo sapien
ctgcccttgaactgctgacttatattggtttct

SEQ ID NO: 1039036 - DNA, 33 bp, Homo sapien
ctgcccttgaactgcttacttatattggtttct

SEQ ID NO: 1039037 - DNA, 33 bp, Homo sapien
gcatgaaattgattcaaagcactaccatagttt

SEQ ID NO: 1039038 - DNA, 33 bp, Homo sapien
gcatgaaattgattcagagcactaccatagttt

SEQ ID NO: 1039039 - DNA, 33 bp, Homo sapien
acctggctctccctgagaatcgggcctccctgc

SEQ ID NO: 1039040 - DNA, 33 bp, Homo sapien
acctggctctccctgataatcgggcctccctgc

SEQ ID NO: 1039041 - DNA, 33 bp, Homo sapien
ttttatattagtgtggaacttttgtcaaaatga

SEQ ID NO: 1039042 - DNA, 33 bp, Homo sapien
ttttatattagtgtggcacttttgtcaaaatga

SEQ ID NO: 1039043 - DNA, 33 bp, Homo sapien
gaggccagtctgaccaacaatgggcatggaaca

SEQ ID NO: 1039044 - DNA, 33 bp, Homo sapien
gaggccagtctgaccaccaatgggcatggaaca

SEQ ID NO: 1039045 - DNA, 33 bp, Homo sapien
tgcagacagcgagagcacagcacctcaggtttt

SEQ ID NO: 1039046 - DNA, 33 bp, Homo sapien
tgcagacagcgagagcgcagcacctcaggtttt

SEQ ID NO: 1039047 - DNA, 33 bp, Homo sapien
cacaactgcttaaaaaactctgacagctcatgt

SEQ ID NO: 1039048 - DNA, 33 bp, Homo sapien
cacaactgcttaaaaacctctgacagctcatgt

SEQ ID NO: 1039049 - DNA, 33 bp, Homo sapien
gcagttgtgctagaaacagtgttgtgtttaaag

SEQ ID NO: 1039050 - DNA, 33 bp, Homo sapien
gcagttgtgctagaaatagtgttgtgtttaaag

SEQ ID NO: 1039051 - DNA, 33 bp, Homo sapien
cagccagtgcaaagtccgaaagctgaaatgagc

SEQ ID NO: 1039052 - DNA, 33 bp, Homo sapien
cagccagtgcaaagtctgaaagctgaaatgagc

SEQ ID NO: 1039053 - DNA, 33 bp, Homo sapien
tggtttgtaagtggaacgtgtatttgttttcaa

SEQ ID NO: 1039054 - DNA, 33 bp, Homo sapien
tggtttgtaagtggaaggtgtatttgttttcaa

SEQ ID NO: 1039055 - DNA, 33 bp, Homo sapien
ttggcatggcggcagcggcaggaaccatggcaa

SEQ ID NO: 1039056 - DNA, 33 bp, Homo sapien
ttggcatggcggcagctgcaggaaccatggcaa

SEQ ID NO: 1039057 - DNA, 33 bp, Homo sapien
gacacacaggatggaaaaaggctgacagcctgt

SEQ ID NO: 1039058 - DNA, 33 bp, Homo sapien
gacacacaggatggaagaaggctgacagcctgt

SEQ ID NO: 1039059 - DNA, 33 bp, Homo sapien
ctactctctgtttctacgacttcaactttgtta

SEQ ID NO: 1039060 - DNA, 33 bp, Homo sapien
ctactctctgtttctatgacttcaactttgtta

SEQ ID NO: 1039061 - DNA, 33 bp, Homo sapien
catggaattgggcaaacagaaagtcagtggctc

SEQ ID NO: 1039062 - DNA, 33 bp, Homo sapien
catggaattgggcaaatagaaagtcagtggctc

SEQ ID NO: 1039063 - DNA, 33 bp, Homo sapien
gatagtaggttaggaaaatccccaaagactaca

SEQ ID NO: 1039064 - DNA, 33 bp, Homo sapien
gatagtaggttaggaagatccccaaagactaca

SEQ ID NO: 1039065 - DNA, 33 bp, Homo sapien
atgcatgcgttactgaactccttccatgtgcca

SEQ ID NO: 1039066 - DNA, 33 bp, Homo sapien
atgcatgcgttactgagctccttccatgtgcca

SEQ ID NO: 1039067 - DNA, 33 bp, Homo sapien
atgacaccaaggaaaaatatcaccagataagac

SEQ ID NO: 1039068 - DNA, 33 bp, Homo sapien
atgacaccaaggaaaagtatcaccagataagac

SEQ ID NO: 1039069 - DNA, 33 bp, Homo sapien
acacagagtaaagtaaccccaaagcctccattc

SEQ ID NO: 1039070 - DNA, 33 bp, Homo sapien
acacagagtaaagtaatcccaaagcctccattc

SEQ ID NO: 1039071 - DNA, 33 bp, Homo sapien
aatgactcattgatgcagacaggtaagaacaac

SEQ ID NO: 1039072 - DNA, 33 bp, Homo sapien
aatgactcattgatgcggacaggtaagaacaac

SEQ ID NO: 1039073 - DNA, 33 bp, Homo sapien
tgatttcaaagctaacaatggcaggaccaagtc

SEQ ID NO: 1039074 - DNA, 33 bp, Homo sapien
tgatttcaaagctaacgatggcaggaccaagtc

SEQ ID NO: 1039075 - DNA, 33 bp, Homo sapien
cctctaattataaggaagtatacggaactcatg

SEQ ID NO: 1039076 - DNA, 33 bp, Homo sapien
cctctaattataaggacgtatacggaactcatg

SEQ ID NO: 1039077 - DNA, 33 bp, Homo sapien
gcttctggaactgtctcaagtgccttctgcagg

SEQ ID NO: 1039078 - DNA, 33 bp, Homo sapien
gcttctggaactgtcttaagtgccttctgcagg

SEQ ID NO: 1039079 - DNA, 33 bp, Homo sapien
agtgtagtctgcacatcagctgaagggtctctc

SEQ ID NO: 1039080 - DNA, 33 bp, Homo sapien
agtgtagtctgcacattagctgaagggtctctc

SEQ ID NO: 1039081 - DNA, 33 bp, Homo sapien
aagatgtataaactcactcaagaagacagagac

SEQ ID NO: 1039082 - DNA, 33 bp, Homo sapien
aagatgtataaactcattcaagaagacagagac

SEQ ID NO: 1039083 - DNA, 33 bp, Homo sapien
catgtagtgatgagacagtcattgggaaacact

SEQ ID NO: 1039084 - DNA, 33 bp, Homo sapien
catgtagtgatgagacggtcattgggaaacact

SEQ ID NO: 1039085 - DNA, 33 bp, Homo sapien
gaagcacaaactgtgaaaaaggctaaaactagg

SEQ ID NO: 1039086 - DNA, 33 bp, Homo sapien
gaagcacaaactgtgagaaaggctaaaactagg

SEQ ID NO: 1039087 - DNA, 33 bp, Homo sapien
tgatatgggaaaatgcccatgttatattaaggg

SEQ ID NO: 1039088 - DNA, 33 bp, Homo sapien
tgatatgggaaaatgctcatgttatattaaggg

SEQ ID NO: 1039089 - DNA, 33 bp, Homo sapien
aattcttgactgaatacggaaaaggtataaagt

SEQ ID NO: 1039090 - DNA, 33 bp, Homo sapien
aattcttgactgaatatggaaaaggtataaagt

SEQ ID NO: 1039091 - DNA, 33 bp, Homo sapien
aaggtaagtcctaatacgattcccgttttacag

SEQ ID NO: 1039092 - DNA, 33 bp, Homo sapien
aaggtaagtcctaatatgattcccgttttacag

SEQ ID NO: 1039093 - DNA, 33 bp, Homo sapien
tgttttcttgctgtaactatgactttaaaatat

SEQ ID NO: 1039094 - DNA, 33 bp, Homo sapien
tgttttcttgctgtaattatgactttaaaatat

SEQ ID NO: 1039095 - DNA, 33 bp, Homo sapien
acatccaaagcatatcaatacctaagtaagggt

SEQ ID NO: 1039096 - DNA, 33 bp, Homo sapien
acatccaaagcatatcgatacctaagtaagggt

SEQ ID NO: 1039097 - DNA, 33 bp, Homo sapien
atccaacaaatacagaacaagtgactcagccag

SEQ ID NO: 1039098 - DNA, 33 bp, Homo sapien
atccaacaaatacagaccaagtgactcagccag

SEQ ID NO: 1039099 - DNA, 33 bp, Homo sapien
tgatgctatcataaaaccgctttgtgctctctg

SEQ ID NO: 1039100 - DNA, 33 bp, Homo sapien
tgatgctatcataaaatcgctttgtgctctctg

SEQ ID NO: 1039101 - DNA, 33 bp, Homo sapien
aacccacagtttaaggccaagcccagctaagcc

SEQ ID NO: 1039102 - DNA, 33 bp, Homo sapien
aacccacagtttaaggtcaagcccagctaagcc

SEQ ID NO: 1039103 - DNA, 33 bp, Homo sapien
caagaggacaaattcaactacacaagtgtattt

SEQ ID NO: 1039104 - DNA, 33 bp, Homo sapien
caagaggacaaattcagctacacaagtgtattt

SEQ ID NO: 1039105 - DNA, 33 bp, Homo sapien
ggtgcttgttctttaaagtcttgtgcttgtttt

SEQ ID NO: 1039106 - DNA, 33 bp, Homo sapien
ggtgcttgttctttaacgtcttgtgcttgtttt

SEQ ID NO: 1039107 - DNA, 33 bp, Homo sapien
ccctgagctcatcttcccttcggatccttaatt

SEQ ID NO: 1039108 - DNA, 33 bp, Homo sapien
ccctgagctcatcttctcttcggatccttaatt

SEQ ID NO: 1039109 - DNA, 33 bp, Homo sapien
attaggtgaggtttccaaattgaacaaagcata

SEQ ID NO: 1039110 - DNA, 33 bp, Homo sapien
attaggtgaggtttccgaattgaacaaagcata

SEQ ID NO: 1039111 - DNA, 33 bp, Homo sapien
ggacttttcacatataactatggtgtccttttc

SEQ ID NO: 1039112 - DNA, 33 bp, Homo sapien
ggacttttcacatatatctatggtgtccttttc

SEQ ID NO: 1039113 - DNA, 33 bp, Homo sapien
tttgaatgccaacaaacaatggagaatgtgcct

SEQ ID NO: 1039114 - DNA, 33 bp, Homo sapien
tttgaatgccaacaaataatggagaatgtgcct

SEQ ID NO: 1039115 - DNA, 33 bp, Homo sapien
ttactttagtagggccaagtcaaagctggactt

SEQ ID NO: 1039116 - DNA, 33 bp, Homo sapien
ttactttagtagggccgagtcaaagctggactt

SEQ ID NO: 1039117 - DNA, 33 bp, Homo sapien
cagatttcaaatcatcaacatctaccttagaaa

SEQ ID NO: 1039118 - DNA, 33 bp, Homo sapien
cagatttcaaatcatccacatctaccttagaaa

SEQ ID NO: 1039119 - DNA, 33 bp, Homo sapien
aggacataagtcatcacaagatatgtagaaacg

SEQ ID NO: 1039120 - DNA, 33 bp, Homo sapien
aggacataagtcatcataagatatgtagaaacg

SEQ ID NO: 1039121 - DNA, 33 bp, Homo sapien
gtgctggaattctctgcacttcttagctttccc

SEQ ID NO: 1039122 - DNA, 33 bp, Homo sapien
gtgctggaattctctgtacttcttagctttccc

SEQ ID NO: 1039123 - DNA, 33 bp, Homo sapien
tggaacgttgggcatacggttatctgtgctccc

SEQ ID NO: 1039124 - DNA, 33 bp, Homo sapien
tggaacgttgggcatatggttatctgtgctccc

SEQ ID NO: 1039125 - DNA, 33 bp, Homo sapien
ccaggagtgtcctgtacgtaagtcctaataaac

SEQ ID NO: 1039126 - DNA, 33 bp, Homo sapien
ccaggagtgtcctgtatgtaagtcctaataaac

SEQ ID NO: 1039127 - DNA, 33 bp, Homo sapien
ctagagctgtcctgccacggtccaggagtgtcc

SEQ ID NO: 1039128 - DNA, 33 bp, Homo sapien
ctagagctgtcctgccgcggtccaggagtgtcc

SEQ ID NO: 1039129 - DNA, 33 bp, Homo sapien
tgtagaagccctgagcagcaaatagaagctttc

SEQ ID NO: 1039130 - DNA, 33 bp, Homo sapien
tgtagaagccctgagcggcaaatagaagctttc

SEQ ID NO: 1039131 - DNA, 33 bp, Homo sapien
aagcagttgccaacacaataccaatatgccaat

SEQ ID NO: 1039132 - DNA, 33 bp, Homo sapien
aagcagttgccaacaccataccaatatgccaat

SEQ ID NO: 1039133 - DNA, 33 bp, Homo sapien
aattaggaggatggaactgccatttactgcaat

SEQ ID NO: 1039134 - DNA, 33 bp, Homo sapien
aattaggaggatggaattgccatttactgcaat

SEQ ID NO: 1039135 - DNA, 33 bp, Homo sapien
tacttgtctagatcatcagctgagtgttcacca

SEQ ID NO: 1039136 - DNA, 33 bp, Homo sapien
tacttgtctagatcattagctgagtgttcacca

SEQ ID NO: 1039137 - DNA, 33 bp, Homo sapien
atcgaagttgcttgtcacagcatcattgttttc

SEQ ID NO: 1039138 - DNA, 33 bp, Homo sapien
atcgaagttgcttgtcccagcatcattgttttc

SEQ ID NO: 1039139 - DNA, 33 bp, Homo sapien
cgtctgtgcccaggagaaagaaaacaatgatgc

SEQ ID NO: 1039140 - DNA, 33 bp, Homo sapien
cgtctgtgcccaggaggaagaaaacaatgatgc

SEQ ID NO: 1039141 - DNA, 33 bp, Homo sapien
gtatgtttaacctgtcaatctattaaaatgagg

SEQ ID NO: 1039142 - DNA, 33 bp, Homo sapien
gtatgtttaacctgtcgatctattaaaatgagg

SEQ ID NO: 1039143 - DNA, 33 bp, Homo sapien
agcttcaatatatgtaacacaacttggacaaga

SEQ ID NO: 1039144 - DNA, 33 bp, Homo sapien
agcttcaatatatgtaccacaacttggacaaga

SEQ ID NO: 1039145 - DNA, 33 bp, Homo sapien
aatgcccatttttcataagattctctctacaac

SEQ ID NO: 1039146 - DNA, 33 bp, Homo sapien
aatgcccatttttcatgagattctctctacaac

SEQ ID NO: 1039147 - DNA, 33 bp, Homo sapien
caataactcttttccaatatcccataagaaaat

SEQ ID NO: 1039148 - DNA, 33 bp, Homo sapien
caataactcttttccagtatcccataagaaaat

SEQ ID NO: 1039149 - DNA, 33 bp, Homo sapien
ggaatctctggaggtacatggaaacacaagtag

SEQ ID NO: 1039150 - DNA, 33 bp, Homo sapien
ggaatctctggaggtatatggaaacacaagtag

SEQ ID NO: 1039151 - DNA, 33 bp, Homo sapien
aggttagaacatggaacgtaaagttaggctagg

SEQ ID NO: 1039152 - DNA, 33 bp, Homo sapien
aggttagaacatggaatgtaaagttaggctagg

SEQ ID NO: 1039153 - DNA, 33 bp, Homo sapien
aaataattatagccagcctagtggatgtgaagt

SEQ ID NO: 1039154 - DNA, 33 bp, Homo sapien
aaataattatagccaggctagtggatgtgaagt

SEQ ID NO: 1039155 - DNA, 33 bp, Homo sapien
gttgtagcatatttcactacttcatttttaata

SEQ ID NO: 1039156 - DNA, 33 bp, Homo sapien
gttgtagcatatttcagtacttcatttttaata

SEQ ID NO: 1039157 - DNA, 33 bp, Homo sapien
caagatgacaacaaaaacgaccttccctgctca

SEQ ID NO: 1039158 - DNA, 33 bp, Homo sapien
caagatgacaacaaaagcgaccttccctgctca

SEQ ID NO: 1039159 - DNA, 33 bp, Homo sapien
catttcatcttcaaaaatgactaatacaaccat

SEQ ID NO: 1039160 - DNA, 33 bp, Homo sapien
catttcatcttcaaaagtgactaatacaaccat

SEQ ID NO: 1039161 - DNA, 33 bp, Homo sapien
ccctattgaacttgaacccagtttttcttacat

SEQ ID NO: 1039162 - DNA, 33 bp, Homo sapien
ccctattgaacttgaatccagtttttcttacat

SEQ ID NO: 1039163 - DNA, 33 bp, Homo sapien
gccttagataatgacacaatttgtaggaaaagt

SEQ ID NO: 1039164 - DNA, 33 bp, Homo sapien
gccttagataatgacagaatttgtaggaaaagt

SEQ ID NO: 1039165 - DNA, 33 bp, Homo sapien
cattccttgctcggctaagatataattatccgt

SEQ ID NO: 1039166 - DNA, 33 bp, Homo sapien
cattccttgctcggctcagatataattatccgt

SEQ ID NO: 1039167 - DNA, 33 bp, Homo sapien
gttctgcaataaatatcatagtacgccttgatt

SEQ ID NO: 1039168 - DNA, 33 bp, Homo sapien
gttctgcaataaatattatagtacgccttgatt

SEQ ID NO: 1039169 - DNA, 33 bp, Homo sapien
taacacacaaacacctcaatcagggaattcgaa

SEQ ID NO: 1039170 - DNA, 33 bp, Homo sapien
taacacacaaacacctgaatcagggaattcgaa

SEQ ID NO: 1039171 - DNA, 33 bp, Homo sapien
aaactggactcaaaccaaaaagagttacggtat

SEQ ID NO: 1039172 - DNA, 33 bp, Homo sapien
aaactggactcaaaccgaaaagagttacggtat

SEQ ID NO: 1039173 - DNA, 33 bp, Homo sapien
atttttgcaggtggtacagtgatggcaaggtgt

SEQ ID NO: 1039174 - DNA, 33 bp, Homo sapien
atttttgcaggtggtatagtgatggcaaggtgt

SEQ ID NO: 1039175 - DNA, 33 bp, Homo sapien
atttgatagcactacaagtgtatatatccaata

SEQ ID NO: 1039176 - DNA, 33 bp, Homo sapien
atttgatagcactacaggtgtatatatccaata

SEQ ID NO: 1039177 - DNA, 33 bp, Homo sapien
actctcccaagatctcaaattctcaccaagttg

SEQ ID NO: 1039178 - DNA, 33 bp, Homo sapien
actctcccaagatctcgaattctcaccaagttg

SEQ ID NO: 1039179 - DNA, 33 bp, Homo sapien
tgacctcaatggactcaagtggtagcaagctga

SEQ ID NO: 1039180 - DNA, 33 bp, Homo sapien
tgacctcaatggactcgagtggtagcaagctga

SEQ ID NO: 1039181 - DNA, 33 bp, Homo sapien
ttctaggctttagtgaatatacccatgcttaca

SEQ ID NO: 1039182 - DNA, 33 bp, Homo sapien
ttctaggctttagtgagtatacccatgcttaca

SEQ ID NO: 1039183 - DNA, 33 bp, Homo sapien
ttttacaaactctggcgactcatatattttaaa

SEQ ID NO: 1039184 - DNA, 33 bp, Homo sapien
ttttacaaactctggctactcatatattttaaa

SEQ ID NO: 1039185 - DNA, 33 bp, Homo sapien
aagaaataggcaagagaaccatgaaaacaaagt

SEQ ID NO: 1039186 - DNA, 33 bp, Homo sapien
aagaaataggcaagaggaccatgaaaacaaagt

SEQ ID NO: 1039187 - DNA, 33 bp, Homo sapien
taataacaccagcaagaataaacttctaggaca

SEQ ID NO: 1039188 - DNA, 33 bp, Homo sapien
taataacaccagcaaggataaacttctaggaca

SEQ ID NO: 1039189 - DNA, 33 bp, Homo sapien
gcagcacccaaccgtgaactggagcttcatttg

SEQ ID NO: 1039190 - DNA, 33 bp, Homo sapien
gcagcacccaaccgtggactggagcttcatttg

SEQ ID NO: 1039191 - DNA, 33 bp, Homo sapien
aaggcctgcctggaccaactgcacagaggagca

SEQ ID NO: 1039192 - DNA, 33 bp, Homo sapien
aaggcctgcctggaccgactgcacagaggagca

SEQ ID NO: 1039193 - DNA, 33 bp, Homo sapien
acggacaggcttccacaatcaaatcctttatag

SEQ ID NO: 1039194 - DNA, 33 bp, Homo sapien
acggacaggcttccacgatcaaatcctttatag

SEQ ID NO: 1039195 - DNA, 33 bp, Homo sapien
cattgtcatgtgaatacctgcctctcatgtgta

SEQ ID NO: 1039196 - DNA, 33 bp, Homo sapien
cattgtcatgtgaatatctgcctctcatgtgta

SEQ ID NO: 1039197 - DNA, 33 bp, Homo sapien
gcaaaagagactttgcacacgtgattaaattaa

SEQ ID NO: 1039198 - DNA, 33 bp, Homo sapien
gcaaaagagactttgcgcacgtgattaaattaa

SEQ ID NO: 1039199 - DNA, 33 bp, Homo sapien
atggccaggacctttgaatattttccctgttaa

SEQ ID NO: 1039200 - DNA, 33 bp, Homo sapien
atggccaggacctttgcatattttccctgttaa

SEQ ID NO: 1039201 - DNA, 33 bp, Homo sapien
gaacctcagaaggagaaatgactggttggattt

SEQ ID NO: 1039202 - DNA, 33 bp, Homo sapien
gaacctcagaaggagagatgactggttggattt

SEQ ID NO: 1039203 - DNA, 33 bp, Homo sapien
gactggttggatttccactctatcaactgacta

SEQ ID NO: 1039204 - DNA, 33 bp, Homo sapien
gactggttggatttccgctctatcaactgacta

SEQ ID NO: 1039205 - DNA, 33 bp, Homo sapien
taattagccactagggacattccattcatacca

SEQ ID NO: 1039206 - DNA, 33 bp, Homo sapien
taattagccactaggggcattccattcatacca

SEQ ID NO: 1039207 - DNA, 33 bp, Homo sapien
tagatttccattttgaagctctcatataattta

SEQ ID NO: 1039208 - DNA, 33 bp, Homo sapien
tagatttccattttgaggctctcatataattta

SEQ ID NO: 1039209 - DNA, 33 bp, Homo sapien
caaaggagatagtaaagaatagtagtctgagtc

SEQ ID NO: 1039210 - DNA, 33 bp, Homo sapien
caaaggagatagtaaataatagtagtctgagtc

SEQ ID NO: 1039211 - DNA, 33 bp, Homo sapien
aacccgcttataaggaagtccggcaaatccttt

SEQ ID NO: 1039212 - DNA, 33 bp, Homo sapien
aacccgcttataaggaggtccggcaaatccttt

SEQ ID NO: 1039213 - DNA, 33 bp, Homo sapien
tttgccttaaatctgacacaagaggtcaatgac

SEQ ID NO: 1039214 - DNA, 33 bp, Homo sapien
tttgccttaaatctgatacaagaggtcaatgac

SEQ ID NO: 1039215 - DNA, 33 bp, Homo sapien
tgtactgacagggccaactctgaggccagcaaa

SEQ ID NO: 1039216 - DNA, 33 bp, Homo sapien
tgtactgacagggccacctctgaggccagcaaa

SEQ ID NO: 1039217 - DNA, 33 bp, Homo sapien
accctctcttttcacaacttgagctcctggcct

SEQ ID NO: 1039218 - DNA, 33 bp, Homo sapien
accctctcttttcacagcttgagctcctggcct

SEQ ID NO: 1039219 - DNA, 33 bp, Homo sapien
gaactggacaatataacgggagacaagccaagc

SEQ ID NO: 1039220 - DNA, 33 bp, Homo sapien
gaactggacaatataatgggagacaagccaagc

SEQ ID NO: 1039221 - DNA, 33 bp, Homo sapien
tgatgtgttgttctaactcatgactcagtggaa

SEQ ID NO: 1039222 - DNA, 33 bp, Homo sapien
tgatgtgttgttctaattcatgactcagtggaa

SEQ ID NO: 1039223 - DNA, 33 bp, Homo sapien
gtcttttaccctttcagtctctgatccttggtc

SEQ ID NO: 1039224 - DNA, 33 bp, Homo sapien
gtcttttaccctttcattctctgatccttggtc

SEQ ID NO: 1039225 - DNA, 33 bp, Homo sapien
taagtgtcttgggagaaaagtgccagatagaag

SEQ ID NO: 1039226 - DNA, 33 bp, Homo sapien
taagtgtcttgggagagaagtgccagatagaag

SEQ ID NO: 1039227 - DNA, 33 bp, Homo sapien
ggggtggaggtgttaaagagtagtacctctgag

SEQ ID NO: 1039228 - DNA, 33 bp, Homo sapien
ggggtggaggtgttaaggagtagtacctctgag

SEQ ID NO: 1039229 - DNA, 33 bp, Homo sapien
ctaccaatgcaggaaaacaaagaagagtttacc

SEQ ID NO: 1039230 - DNA, 33 bp, Homo sapien
ctaccaatgcaggaaatcaaagaagagtttacc

SEQ ID NO: 1039231 - DNA, 33 bp, Homo sapien
ggcatactgtcactgggaacagctgctcactcc

SEQ ID NO: 1039232 - DNA, 33 bp, Homo sapien
ggcatactgtcactggtaacagctgctcactcc

SEQ ID NO: 1039233 - DNA, 33 bp, Homo sapien
ttcatatttattgagcaaatgtttagattcttt

SEQ ID NO: 1039234 - DNA, 33 bp, Homo sapien
ttcatatttattgagcgaatgtttagattcttt

SEQ ID NO: 1039235 - DNA, 33 bp, Homo sapien
cagtttgtctttaataagtggtcaccgtgatta

SEQ ID NO: 1039236 - DNA, 33 bp, Homo sapien
cagtttgtctttaataggtggtcaccgtgatta

SEQ ID NO: 1039237 - DNA, 33 bp, Homo sapien
tgtaaagcattttccacacttcctagaaaacat

SEQ ID NO: 1039238 - DNA, 33 bp, Homo sapien
tgtaaagcattttccatacttcctagaaaacat

SEQ ID NO: 1039239 - DNA, 33 bp, Homo sapien
atccaattttagccagcatgataaggaaggaag

SEQ ID NO: 1039240 - DNA, 33 bp, Homo sapien
atccaattttagccaggatgataaggaaggaag

SEQ ID NO: 1039241 - DNA, 33 bp, Homo sapien
tcagtgtaaatcaaaaattcctacttaaggaca

SEQ ID NO: 1039242 - DNA, 33 bp, Homo sapien
tcagtgtaaatcaaaagttcctacttaaggaca

SEQ ID NO: 1039243 - DNA, 33 bp, Homo sapien
ctgattttatcctggacgtttaagtagcttttg

SEQ ID NO: 1039244 - DNA, 33 bp, Homo sapien
ctgattttatcctggatgtttaagtagcttttg

SEQ ID NO: 1039245 - DNA, 33 bp, Homo sapien
tcttgccaggctttgaactgcaggactgggtgc

SEQ ID NO: 1039246 - DNA, 33 bp, Homo sapien
tcttgccaggctttgagctgcaggactgggtgc

SEQ ID NO: 1039247 - DNA, 33 bp, Homo sapien
gcacacctggtaggaacagcattggaatgtata

SEQ ID NO: 1039248 - DNA, 33 bp, Homo sapien
gcacacctggtaggaatagcattggaatgtata

SEQ ID NO: 1039249 - DNA, 33 bp, Homo sapien
gtgccccttaggataaaaaataaagcatgataa

SEQ ID NO: 1039250 - DNA, 33 bp, Homo sapien
gtgccccttaggataacaaataaagcatgataa

SEQ ID NO: 1039251 - DNA, 33 bp, Homo sapien
acatttacattttctcgccaaatttaccttcat

SEQ ID NO: 1039252 - DNA, 33 bp, Homo sapien
acatttacattttctctccaaatttaccttcat

SEQ ID NO: 1039253 - DNA, 33 bp, Homo sapien
atgtagaaagatgaaacttatgatagaagggga

SEQ ID NO: 1039254 - DNA, 33 bp, Homo sapien
atgtagaaagatgaaatttatgatagaagggga

SEQ ID NO: 1039255 - DNA, 33 bp, Homo sapien
ttaggccaatttttaccgcactattaatgtttc

SEQ ID NO: 1039256 - DNA, 33 bp, Homo sapien
ttaggccaatttttactgcactattaatgtttc

SEQ ID NO: 1039257 - DNA, 33 bp, Homo sapien
tccttcactctcctaagaacaaatcctcttgat

SEQ ID NO: 1039258 - DNA, 33 bp, Homo sapien
tccttcactctcctaataacaaatcctcttgat

SEQ ID NO: 1039259 - DNA, 33 bp, Homo sapien
ttctacttgcgagatacaactccagctatcttc

SEQ ID NO: 1039260 - DNA, 33 bp, Homo sapien
ttctacttgcgagatataactccagctatcttc

SEQ ID NO: 1039261 - DNA, 33 bp, Homo sapien
atgatgagaagtctaaaaagtccaaagaagagg

SEQ ID NO: 1039262 - DNA, 33 bp, Homo sapien
atgatgagaagtctaagaagtccaaagaagagg

SEQ ID NO: 1039263 - DNA, 33 bp, Homo sapien
catagaaaaaaattcaatagaaagtcctctgcc

SEQ ID NO: 1039264 - DNA, 33 bp, Homo sapien
catagaaaaaaattcagtagaaagtcctctgcc

SEQ ID NO: 1039265 - DNA, 33 bp, Homo sapien
tgccagagtgtgactgcacatgagagaaaagtg

SEQ ID NO: 1039266 - DNA, 33 bp, Homo sapien
tgccagagtgtgactggacatgagagaaaagtg

SEQ ID NO: 1039267 - DNA, 33 bp, Homo sapien
gtgactattcaactatcaaaacatgaactattt

SEQ ID NO: 1039268 - DNA, 33 bp, Homo sapien
gtgactattcaactattaaaacatgaactattt

SEQ ID NO: 1039269 - DNA, 33 bp, Homo sapien
cttgcatctcttacacccctttagggcataaca

SEQ ID NO: 1039270 - DNA, 33 bp, Homo sapien
cttgcatctcttacactcctttagggcataaca

SEQ ID NO: 1039271 - DNA, 33 bp, Homo sapien
ggtcactaggctatagacaaaaatcaagatcca

SEQ ID NO: 1039272 - DNA, 33 bp, Homo sapien
ggtcactaggctataggcaaaaatcaagatcca

SEQ ID NO: 1039273 - DNA, 33 bp, Homo sapien
ctatcatgttttctgccaattaccatgcataga

SEQ ID NO: 1039274 - DNA, 33 bp, Homo sapien
ctatcatgttttctgctaattaccatgcataga

SEQ ID NO: 1039275 - DNA, 33 bp, Homo sapien
tgatggtggccacctaagattataataccatat

SEQ ID NO: 1039276 - DNA, 33 bp, Homo sapien
tgatggtggccacctacgattataataccatat

SEQ ID NO: 1039277 - DNA, 33 bp, Homo sapien
tggttgagcatgtgaacggtttgatttcacagt

SEQ ID NO: 1039278 - DNA, 33 bp, Homo sapien
tggttgagcatgtgaatggtttgatttcacagt

SEQ ID NO: 1039279 - DNA, 33 bp, Homo sapien
attgtttgtatcttcaagaccagttattaactt

SEQ ID NO: 1039280 - DNA, 33 bp, Homo sapien
attgtttgtatcttcaggaccagttattaactt

SEQ ID NO: 1039281 - DNA, 33 bp, Homo sapien
atgagaaatgcaaggaaataaagcatttgctgt

SEQ ID NO: 1039282 - DNA, 33 bp, Homo sapien
atgagaaatgcaaggacataaagcatttgctgt

SEQ ID NO: 1039283 - DNA, 33 bp, Homo sapien
tagccggtgagaccccaacacttcttggtgatg

SEQ ID NO: 1039284 - DNA, 33 bp, Homo sapien
tagccggtgagaccccgacacttcttggtgatg

SEQ ID NO: 1039285 - DNA, 33 bp, Homo sapien
tagcgtctacaagaggaaagtgccagtcagtgc

SEQ ID NO: 1039286 - DNA, 33 bp, Homo sapien
tagcgtctacaagagggaagtgccagtcagtgc

SEQ ID NO: 1039287 - DNA, 33 bp, Homo sapien
aactggctggatttggaaatacaggctacctgc

SEQ ID NO: 1039288 - DNA, 33 bp, Homo sapien
aactggctggatttgggaatacaggctacctgc

SEQ ID NO: 1039289 - DNA, 33 bp, Homo sapien
ctgactcaacaagtacagtactgaaggcttggg

SEQ ID NO: 1039290 - DNA, 33 bp, Homo sapien
ctgactcaacaagtactgtactgaaggcttggg

SEQ ID NO: 1039291 - DNA, 33 bp, Homo sapien
attaagagtgattgaacctttggtcttaaggaa

SEQ ID NO: 1039292 - DNA, 33 bp, Homo sapien
attaagagtgattgaatctttggtcttaaggaa

SEQ ID NO: 1039293 - DNA, 33 bp, Homo sapien
aaagcttttggttcaacctggcaagttgttaac

SEQ ID NO: 1039294 - DNA, 33 bp, Homo sapien
aaagcttttggttcaatctggcaagttgttaac

SEQ ID NO: 1039295 - DNA, 33 bp, Homo sapien
tgagtttaagcttcaaaaggccttgcagtttct

SEQ ID NO: 1039296 - DNA, 33 bp, Homo sapien
tgagtttaagcttcaagaggccttgcagtttct

SEQ ID NO: 1039297 - DNA, 33 bp, Homo sapien
agcccccacactttacaccacatagtataactt

SEQ ID NO: 1039298 - DNA, 33 bp, Homo sapien
agcccccacactttacgccacatagtataactt

SEQ ID NO: 1039299 - DNA, 33 bp, Homo sapien
gtctcatttacacttgcattgttggtgtctaac

SEQ ID NO: 1039300 - DNA, 33 bp, Homo sapien
gtctcatttacacttgtattgttggtgtctaac

SEQ ID NO: 1039301 - DNA, 33 bp, Homo sapien
tagggctagtggctgacgtattagacaatgcag

SEQ ID NO: 1039302 - DNA, 33 bp, Homo sapien
tagggctagtggctgatgtattagacaatgcag

SEQ ID NO: 1039303 - DNA, 33 bp, Homo sapien
gagaatgtcatggaaaccttaaaagtagctatc

SEQ ID NO: 1039304 - DNA, 33 bp, Homo sapien
gagaatgtcatggaaatcttaaaagtagctatc

SEQ ID NO: 1039305 - DNA, 33 bp, Homo sapien
gtggcatcttggtccacgtacctgagccattca

SEQ ID NO: 1039306 - DNA, 33 bp, Homo sapien
gtggcatcttggtccatgtacctgagccattca

SEQ ID NO: 1039307 - DNA, 33 bp, Homo sapien
tagagaggaaagaagacgaattaccactgctct

SEQ ID NO: 1039308 - DNA, 33 bp, Homo sapien
tagagaggaaagaagaggaattaccactgctct

SEQ ID NO: 1039309 - DNA, 33 bp, Homo sapien
cttcaaaatatatgcaaaatctagccacttctc

SEQ ID NO: 1039310 - DNA, 33 bp, Homo sapien
cttcaaaatatatgcagaatctagccacttctc

SEQ ID NO: 1039311 - DNA, 33 bp, Homo sapien
gataaggaatatgttccaagttccacagctaat

SEQ ID NO: 1039312 - DNA, 33 bp, Homo sapien
gataaggaatatgttctaagttccacagctaat

SEQ ID NO: 1039313 - DNA, 33 bp, Homo sapien
ttaaatctacacactacctctaaagcttaattt

SEQ ID NO: 1039314 - DNA, 33 bp, Homo sapien
ttaaatctacacactatctctaaagcttaattt

SEQ ID NO: 1039315 - DNA, 33 bp, Homo sapien
ctgatgacttcctaaaactgtccatttcaactg

SEQ ID NO: 1039316 - DNA, 33 bp, Homo sapien
ctgatgacttcctaaagctgtccatttcaactg

SEQ ID NO: 1039317 - DNA, 33 bp, Homo sapien
tattcccaactgtgataaagcagagtattctag

SEQ ID NO: 1039318 - DNA, 33 bp, Homo sapien
tattcccaactgtgattaagcagagtattctag

SEQ ID NO: 1039319 - DNA, 33 bp, Homo sapien
taataggcactcagtacacaatgactcactatc

SEQ ID NO: 1039320 - DNA, 33 bp, Homo sapien
taataggcactcagtatacaatgactcactatc

SEQ ID NO: 1039321 - DNA, 33 bp, Homo sapien
gcctgaaagataagaaaactagctgtgtcaaag

SEQ ID NO: 1039322 - DNA, 33 bp, Homo sapien
gcctgaaagataagaagactagctgtgtcaaag

SEQ ID NO: 1039323 - DNA, 33 bp, Homo sapien
ctgtgtttctaggacaagtccaatctggaggcc

SEQ ID NO: 1039324 - DNA, 33 bp, Homo sapien
ctgtgtttctaggacacgtccaatctggaggcc

SEQ ID NO: 1039325 - DNA, 33 bp, Homo sapien
agtataatcagtgctacgtataggaacaaaatg

SEQ ID NO: 1039326 - DNA, 33 bp, Homo sapien
agtataatcagtgctaggtataggaacaaaatg

SEQ ID NO: 1039327 - DNA, 33 bp, Homo sapien
ggcccagagagaaaaaaggagttgcccaagttt

SEQ ID NO: 1039328 - DNA, 33 bp, Homo sapien
ggcccagagagaaaaagggagttgcccaagttt

SEQ ID NO: 1039329 - DNA, 33 bp, Homo sapien
ttcttcagtgcctgtaaatgccctaagggctgg

SEQ ID NO: 1039330 - DNA, 33 bp, Homo sapien
ttcttcagtgcctgtatatgccctaagggctgg

SEQ ID NO: 1039331 - DNA, 33 bp, Homo sapien
agtctcatcaccttgcactatgaccttaggcaa

SEQ ID NO: 1039332 - DNA, 33 bp, Homo sapien
agtctcatcaccttgcgctatgaccttaggcaa

SEQ ID NO: 1039333 - DNA, 33 bp, Homo sapien
actacacatagcaacacagatgtatcaaacaca

SEQ ID NO: 1039334 - DNA, 33 bp, Homo sapien
actacacatagcaacatagatgtatcaaacaca

SEQ ID NO: 1039335 - DNA, 33 bp, Homo sapien
gattacaaatcttaacaactatttaagcctaga

SEQ ID NO: 1039336 - DNA, 33 bp, Homo sapien
gattacaaatcttaacgactatttaagcctaga

SEQ ID NO: 1039337 - DNA, 33 bp, Homo sapien
cttccagtggaattgcagcaaatttcaactcta

SEQ ID NO: 1039338 - DNA, 33 bp, Homo sapien
cttccagtggaattgcggcaaatttcaactcta

SEQ ID NO: 1039339 - DNA, 33 bp, Homo sapien
cttccaaagctacatgcaatagacacactgctt

SEQ ID NO: 1039340 - DNA, 33 bp, Homo sapien
cttccaaagctacatgtaatagacacactgctt

SEQ ID NO: 1039341 - DNA, 33 bp, Homo sapien
ttaagggcaaagaccacgtccattcacctgtgg

SEQ ID NO: 1039342 - DNA, 33 bp, Homo sapien
ttaagggcaaagaccatgtccattcacctgtgg

SEQ ID NO: 1039343 - DNA, 33 bp, Homo sapien
tccacagccgaattccagagctctgctactcag

SEQ ID NO: 1039344 - DNA, 33 bp, Homo sapien
tccacagccgaattccggagctctgctactcag

SEQ ID NO: 1039345 - DNA, 33 bp, Homo sapien
gattagacctggcttcaacatctgacttgactc

SEQ ID NO: 1039346 - DNA, 33 bp, Homo sapien
gattagacctggcttcgacatctgacttgactc

SEQ ID NO: 1039347 - DNA, 33 bp, Homo sapien
tcctccttgcctgggacgtggatatgatagctg

SEQ ID NO: 1039348 - DNA, 33 bp, Homo sapien
tcctccttgcctgggatgtggatatgatagctg

SEQ ID NO: 1039349 - DNA, 33 bp, Homo sapien
cactggaaatgctaaccacatgggtatatatga

SEQ ID NO: 1039350 - DNA, 33 bp, Homo sapien
cactggaaatgctaactacatgggtatatatga

SEQ ID NO: 1039351 - DNA, 33 bp, Homo sapien
atattatgtatacctacaatgacttcaaattac

SEQ ID NO: 1039352 - DNA, 33 bp, Homo sapien
atattatgtatacctataatgacttcaaattac

SEQ ID NO: 1039353 - DNA, 33 bp, Homo sapien
gacgtgtcctcataaacggaggggaaatctgtg

SEQ ID NO: 1039354 - DNA, 33 bp, Homo sapien
gacgtgtcctcataaatggaggggaaatctgtg

SEQ ID NO: 1039355 - DNA, 33 bp, Homo sapien
aacaccagggaatgaaaatttcgcttagtgaag

SEQ ID NO: 1039356 - DNA, 33 bp, Homo sapien
aacaccagggaatgaagatttcgcttagtgaag

SEQ ID NO: 1039357 - DNA, 33 bp, Homo sapien
gattttttaaaatcagaacaatttcagaactcc

SEQ ID NO: 1039358 - DNA, 33 bp, Homo sapien
gattttttaaaatcaggacaatttcagaactcc

SEQ ID NO: 1039359 - DNA, 33 bp, Homo sapien
cactctgccatccagacgctagtgtcgcagggg

SEQ ID NO: 1039360 - DNA, 33 bp, Homo sapien
cactctgccatccagatgctagtgtcgcagggg

SEQ ID NO: 1039361 - DNA, 33 bp, Homo sapien
tgagctcagacctgacaaaaagcttgctgctct

SEQ ID NO: 1039362 - DNA, 33 bp, Homo sapien
tgagctcagacctgacgaaaagcttgctgctct

SEQ ID NO: 1039363 - DNA, 33 bp, Homo sapien
catttgttatttaaggacatgaagatgttgcaa

SEQ ID NO: 1039364 - DNA, 33 bp, Homo sapien
catttgttatttaagggcatgaagatgttgcaa

SEQ ID NO: 1039365 - DNA, 33 bp, Homo sapien
agcgatctagtgaatcacaggccaccagtgaat

SEQ ID NO: 1039366 - DNA, 33 bp, Homo sapien
agcgatctagtgaatcgcaggccaccagtgaat

SEQ ID NO: 1039367 - DNA, 33 bp, Homo sapien
ttatttattccatcacacagatatgatagtgtg

SEQ ID NO: 1039368 - DNA, 33 bp, Homo sapien
ttatttattccatcacccagatatgatagtgtg

SEQ ID NO: 1039369 - DNA, 33 bp, Homo sapien
caccgtaaaacacagaacatttagtggtgtggg

SEQ ID NO: 1039370 - DNA, 33 bp, Homo sapien
caccgtaaaacacagagcatttagtggtgtggg

SEQ ID NO: 1039371 - DNA, 33 bp, Homo sapien
aaaatccttgcgcatgaattgcctctctgatta

SEQ ID NO: 1039372 - DNA, 33 bp, Homo sapien
aaaatccttgcgcatggattgcctctctgatta

SEQ ID NO: 1039373 - DNA, 33 bp, Homo sapien
gagctgatccagtcccacaccgtgaactaccct

SEQ ID NO: 1039374 - DNA, 33 bp, Homo sapien
gagctgatccagtcccgcaccgtgaactaccct

SEQ ID NO: 1039375 - DNA, 33 bp, Homo sapien
agcctaataatcagcaaaacatttccaggccac

SEQ ID NO: 1039376 - DNA, 33 bp, Homo sapien
agcctaataatcagcagaacatttccaggccac

SEQ ID NO: 1039377 - DNA, 33 bp, Homo sapien
ctcaatcatttcatcaatagtccctgggcctga

SEQ ID NO: 1039378 - DNA, 33 bp, Homo sapien
ctcaatcatttcatcagtagtccctgggcctga

SEQ ID NO: 1039379 - DNA, 33 bp, Homo sapien
gctgaggtgactgcaaagcgtgccccaggatgg

SEQ ID NO: 1039380 - DNA, 33 bp, Homo sapien
gctgaggtgactgcaaggcgtgccccaggatgg

SEQ ID NO: 1039381 - DNA, 33 bp, Homo sapien
ttgagaccgcaatggacgattcccaacctgcta

SEQ ID NO: 1039382 - DNA, 33 bp, Homo sapien
ttgagaccgcaatggatgattcccaacctgcta

SEQ ID NO: 1039383 - DNA, 33 bp, Homo sapien
cacagggtggcttggacgcccgcccaccacaca

SEQ ID NO: 1039384 - DNA, 33 bp, Homo sapien
cacagggtggcttggatgcccgcccaccacaca

SEQ ID NO: 1039385 - DNA, 33 bp, Homo sapien
gcctctcaggtcaggaaggtcagatttgaagct

SEQ ID NO: 1039386 - DNA, 33 bp, Homo sapien
gcctctcaggtcaggagggtcagatttgaagct

SEQ ID NO: 1039387 - DNA, 33 bp, Homo sapien
cccaggctatgctgtgaattccacctagcccag

SEQ ID NO: 1039388 - DNA, 33 bp, Homo sapien
cccaggctatgctgtggattccacctagcccag

SEQ ID NO: 1039389 - DNA, 33 bp, Homo sapien
agcattgcatttcaacaagccagggctatcccc

SEQ ID NO: 1039390 - DNA, 33 bp, Homo sapien
agcattgcatttcaaccagccagggctatcccc

SEQ ID NO: 1039391 - DNA, 33 bp, Homo sapien
atgacatcttggaaaccgcctggctccacaaac

SEQ ID NO: 1039392 - DNA, 33 bp, Homo sapien
atgacatcttggaaactgcctggctccacaaac

SEQ ID NO: 1039393 - DNA, 33 bp, Homo sapien
ccactccagtgtcctcaagtgaaaaagcctctt

SEQ ID NO: 1039394 - DNA, 33 bp, Homo sapien
ccactccagtgtcctcgagtgaaaaagcctctt

SEQ ID NO: 1039395 - DNA, 33 bp, Homo sapien
acttccttgaatgttccctgctggctctggctc

SEQ ID NO: 1039396 - DNA, 33 bp, Homo sapien
acttccttgaatgttctctgctggctctggctc

SEQ ID NO: 1039397 - DNA, 33 bp, Homo sapien
gcaggagctagatagacagtggttatctctccc

SEQ ID NO: 1039398 - DNA, 33 bp, Homo sapien
gcaggagctagatagatagtggttatctctccc

SEQ ID NO: 1039399 - DNA, 33 bp, Homo sapien
ggctgtgccgccattcaaagtaccaccagaccc

SEQ ID NO: 1039400 - DNA, 33 bp, Homo sapien
ggctgtgccgccattcgaagtaccaccagaccc

SEQ ID NO: 1039401 - DNA, 33 bp, Homo sapien
gccgtgactgttccgacgttcgaaggcccattg

SEQ ID NO: 1039402 - DNA, 33 bp, Homo sapien
gccgtgactgttccgatgttcgaaggcccattg

SEQ ID NO: 1039403 - DNA, 33 bp, Homo sapien
cacaacatcgaacattcaagataactaatacaa

SEQ ID NO: 1039404 - DNA, 33 bp, Homo sapien
cacaacatcgaacatttaagataactaatacaa

SEQ ID NO: 1039405 - DNA, 33 bp, Homo sapien
gcagcagactccaggaagaaatgagggaaacag

SEQ ID NO: 1039406 - DNA, 33 bp, Homo sapien
gcagcagactccaggaggaaatgagggaaacag

SEQ ID NO: 1039407 - DNA, 33 bp, Homo sapien
ttatttcggtctgcaacttaagcatttacagca

SEQ ID NO: 1039408 - DNA, 33 bp, Homo sapien
ttatttcggtctgcaatttaagcatttacagca

SEQ ID NO: 1039409 - DNA, 33 bp, Homo sapien
cccaggcatagatggaaacatgatttatgacaa

SEQ ID NO: 1039410 - DNA, 33 bp, Homo sapien
cccaggcatagatggacacatgatttatgacaa

SEQ ID NO: 1039411 - DNA, 33 bp, Homo sapien
caagatgattttatgaccccacttctcttgatt

SEQ ID NO: 1039412 - DNA, 33 bp, Homo sapien
caagatgattttatgatcccacttctcttgatt

SEQ ID NO: 1039413 - DNA, 33 bp, Homo sapien
tctaaaggctttttacacaagtagtcatccctg

SEQ ID NO: 1039414 - DNA, 33 bp, Homo sapien
tctaaaggctttttacccaagtagtcatccctg

SEQ ID NO: 1039415 - DNA, 33 bp, Homo sapien
ttccaaattcatgtcaaattctcctgtttcatc

SEQ ID NO: 1039416 - DNA, 33 bp, Homo sapien
ttccaaattcatgtcagattctcctgtttcatc

SEQ ID NO: 1039417 - DNA, 33 bp, Homo sapien
tctaatacccgcctacacaagaaggtgatgaag

SEQ ID NO: 1039418 - DNA, 33 bp, Homo sapien
tctaatacccgcctacgcaagaaggtgatgaag

SEQ ID NO: 1039419 - DNA, 33 bp, Homo sapien
ggagagcaagggaaaacttggagcatctgcaat

SEQ ID NO: 1039420 - DNA, 33 bp, Homo sapien
ggagagcaagggaaaatttggagcatctgcaat

SEQ ID NO: 1039421 - DNA, 33 bp, Homo sapien
cctatgcctaagagaaacagaattagcaaaccg

SEQ ID NO: 1039422 - DNA, 33 bp, Homo sapien
cctatgcctaagagaagcagaattagcaaaccg

SEQ ID NO: 1039423 - DNA, 33 bp, Homo sapien
gggattaaaggaaagacggtgtttatctgctta

SEQ ID NO: 1039424 - DNA, 33 bp, Homo sapien
gggattaaaggaaagatggtgtttatctgctta

SEQ ID NO: 1039425 - DNA, 33 bp, Homo sapien
gcaaatgcaggcatgacatctaaagaggctgcc

SEQ ID NO: 1039426 - DNA, 33 bp, Homo sapien
gcaaatgcaggcatgatatctaaagaggctgcc

SEQ ID NO: 1039427 - DNA, 33 bp, Homo sapien
atttggccataggcagcctaggactttcatctg

SEQ ID NO: 1039428 - DNA, 33 bp, Homo sapien
atttggccataggcagtctaggactttcatctg

SEQ ID NO: 1039429 - DNA, 33 bp, Homo sapien
tcctctgttgagtccacggttcagctgcaaaag

SEQ ID NO: 1039430 - DNA, 33 bp, Homo sapien
tcctctgttgagtccatggttcagctgcaaaag

SEQ ID NO: 1039431 - DNA, 33 bp, Homo sapien
ggtcatttattgatgcccctgttcagcaactac

SEQ ID NO: 1039432 - DNA, 33 bp, Homo sapien
ggtcatttattgatgctcctgttcagcaactac

SEQ ID NO: 1039433 - DNA, 33 bp, Homo sapien
cccaatcctgagggaacgagtggtttgattcct

SEQ ID NO: 1039434 - DNA, 33 bp, Homo sapien
cccaatcctgagggaatgagtggtttgattcct

SEQ ID NO: 1039435 - DNA, 33 bp, Homo sapien
tcaccagaaaaatctcactttgcgaatagccca

SEQ ID NO: 1039436 - DNA, 33 bp, Homo sapien
tcaccagaaaaatctcgctttgcgaatagccca

SEQ ID NO: 1039437 - DNA, 33 bp, Homo sapien
cattcaatcgccgccacaatgtgatgaggccgg

SEQ ID NO: 1039438 - DNA, 33 bp, Homo sapien
cattcaatcgccgccataatgtgatgaggccgg

SEQ ID NO: 1039439 - DNA, 33 bp, Homo sapien
tgatggattgaatgtggaggtgggaaataggaa

SEQ ID NO: 1039440 - DNA, 33 bp, Homo sapien
tgatggattgaatgtgtaggtgggaaataggaa

SEQ ID NO: 1039441 - DNA, 33 bp, Homo sapien
gaaaccatttattgagaaaaggaagactcagga

SEQ ID NO: 1039442 - DNA, 33 bp, Homo sapien
gaaaccatttattgaggaaaggaagactcagga

SEQ ID NO: 1039443 - DNA, 33 bp, Homo sapien
agtggccaccagctgacgaaaggataaataaaa

SEQ ID NO: 1039444 - DNA, 33 bp, Homo sapien
agtggccaccagctgatgaaaggataaataaaa

SEQ ID NO: 1039445 - DNA, 33 bp, Homo sapien
ataagtaggagattgaagttatgctgataccag

SEQ ID NO: 1039446 - DNA, 33 bp, Homo sapien
ataagtaggagattgatgttatgctgataccag

SEQ ID NO: 1039447 - DNA, 33 bp, Homo sapien
ggcctctggccatgcaactggattccagagact

SEQ ID NO: 1039448 - DNA, 33 bp, Homo sapien
ggcctctggccatgcagctggattccagagact

SEQ ID NO: 1039449 - DNA, 33 bp, Homo sapien
tttctccctgtaagcaaacctaattattaccat

SEQ ID NO: 1039450 - DNA, 33 bp, Homo sapien
tttctccctgtaagcagacctaattattaccat

SEQ ID NO: 1039451 - DNA, 33 bp, Homo sapien
ctaattaaatctccccaactaattaatctctgg

SEQ ID NO: 1039452 - DNA, 33 bp, Homo sapien
ctaattaaatctccccgactaattaatctctgg

SEQ ID NO: 1039453 - DNA, 33 bp, Homo sapien
ttaattcctcctttaaaacaagagccccaaagt

SEQ ID NO: 1039454 - DNA, 33 bp, Homo sapien
ttaattcctcctttaagacaagagccccaaagt

SEQ ID NO: 1039455 - DNA, 33 bp, Homo sapien
tgcataaggaaatggacggctgaatgatttaga

SEQ ID NO: 1039456 - DNA, 33 bp, Homo sapien
tgcataaggaaatggatggctgaatgatttaga

SEQ ID NO: 1039457 - DNA, 33 bp, Homo sapien
cacaggcactttgcaggccttaggttgattgtt

SEQ ID NO: 1039458 - DNA, 33 bp, Homo sapien
cacaggcactttgcagtccttaggttgattgtt

SEQ ID NO: 1039459 - DNA, 33 bp, Homo sapien
taaattgacattaaaaatagtaattgccatata

SEQ ID NO: 1039460 - DNA, 33 bp, Homo sapien
taaattgacattaaaattagtaattgccatata

SEQ ID NO: 1039461 - DNA, 33 bp, Homo sapien
tgtttcgttttaatgaacattatgccagtctta

SEQ ID NO: 1039462 - DNA, 33 bp, Homo sapien
tgtttcgttttaatgagcattatgccagtctta

SEQ ID NO: 1039463 - DNA, 33 bp, Homo sapien
gaggatcattggagcccgagaggaggccaaact

SEQ ID NO: 1039464 - DNA, 33 bp, Homo sapien
gaggatcattggagcctgagaggaggccaaact

SEQ ID NO: 1039465 - DNA, 33 bp, Homo sapien
ctccagcctgctaatgcaaaacatggctctgaa

SEQ ID NO: 1039466 - DNA, 33 bp, Homo sapien
ctccagcctgctaatgtaaaacatggctctgaa

SEQ ID NO: 1039467 - DNA, 33 bp, Homo sapien
gcaagcttagggagaccgggaggacagatcctt

SEQ ID NO: 1039468 - DNA, 33 bp, Homo sapien
gcaagcttagggagacggggaggacagatcctt

SEQ ID NO: 1039469 - DNA, 33 bp, Homo sapien
ggtttatagtttgaggcactttgttgcattttt

SEQ ID NO: 1039470 - DNA, 33 bp, Homo sapien
ggtttatagtttgaggtactttgttgcattttt

SEQ ID NO: 1039471 - DNA, 33 bp, Homo sapien
gatgtggcagacacaagcaccaacacaatgctt

SEQ ID NO: 1039472 - DNA, 33 bp, Homo sapien
gatgtggcagacacaatcaccaacacaatgctt

SEQ ID NO: 1039473 - DNA, 33 bp, Homo sapien
tacagaaacatgttaaatcaaaatcactccagg

SEQ ID NO: 1039474 - DNA, 33 bp, Homo sapien
tacagaaacatgttaagtcaaaatcactccagg

SEQ ID NO: 1039475 - DNA, 33 bp, Homo sapien
ttggcacaacttttatcaatagcaactgtctta

SEQ ID NO: 1039476 - DNA, 33 bp, Homo sapien
ttggcacaacttttattaatagcaactgtctta

SEQ ID NO: 1039477 - DNA, 33 bp, Homo sapien
ctgagacagaaaagaaggaccagagctcaatga

SEQ ID NO: 1039478 - DNA, 33 bp, Homo sapien
ctgagacagaaaagaatgaccagagctcaatga

SEQ ID NO: 1039479 - DNA, 33 bp, Homo sapien
ggaagaggcaatttacaaaggaggctattaaat

SEQ ID NO: 1039480 - DNA, 33 bp, Homo sapien
ggaagaggcaatttaccaaggaggctattaaat

SEQ ID NO: 1039481 - DNA, 33 bp, Homo sapien
agctctgatccctctcaatgactccagatccac

SEQ ID NO: 1039482 - DNA, 33 bp, Homo sapien
agctctgatccctctcgatgactccagatccac

SEQ ID NO: 1039483 - DNA, 33 bp, Homo sapien
tctactcattgataaactctgaagccataggga

SEQ ID NO: 1039484 - DNA, 33 bp, Homo sapien
tctactcattgataaattctgaagccataggga

SEQ ID NO: 1039485 - DNA, 33 bp, Homo sapien
tttatttttctccctgacaagactgcggtatcc

SEQ ID NO: 1039486 - DNA, 33 bp, Homo sapien
tttatttttctccctggcaagactgcggtatcc

SEQ ID NO: 1039487 - DNA, 33 bp, Homo sapien
gcagagatgtctataactctgttgctccctcaa

SEQ ID NO: 1039488 - DNA, 33 bp, Homo sapien
gcagagatgtctataattctgttgctccctcaa

SEQ ID NO: 1039489 - DNA, 33 bp, Homo sapien
ctgtttactattattacgattacatggtgataa

SEQ ID NO: 1039490 - DNA, 33 bp, Homo sapien
ctgtttactattattatgattacatggtgataa

SEQ ID NO: 1039491 - DNA, 33 bp, Homo sapien
tttgggcctgtaaatcaataggctttccatggc

SEQ ID NO: 1039492 - DNA, 33 bp, Homo sapien
tttgggcctgtaaatccataggctttccatggc

SEQ ID NO: 1039493 - DNA, 33 bp, Homo sapien
agtctttgggagtggacgtgagagctctttcag

SEQ ID NO: 1039494 - DNA, 33 bp, Homo sapien
agtctttgggagtggatgtgagagctctttcag

SEQ ID NO: 1039495 - DNA, 33 bp, Homo sapien
taaagtcctttgatgaactaagcttgtatatta

SEQ ID NO: 1039496 - DNA, 33 bp, Homo sapien
taaagtcctttgatgagctaagcttgtatatta

SEQ ID NO: 1039497 - DNA, 33 bp, Homo sapien
tgaagggcccagccgcaaggagagaggtgacga

SEQ ID NO: 1039498 - DNA, 33 bp, Homo sapien
tgaagggcccagccgcgaggagagaggtgacga

SEQ ID NO: 1039499 - DNA, 33 bp, Homo sapien
taaaattggcttcaccaggtaacgctgcatgcg

SEQ ID NO: 1039500 - DNA, 33 bp, Homo sapien
taaaattggcttcaccgggtaacgctgcatgcg

SEQ ID NO: 1039501 - DNA, 33 bp, Homo sapien
caggctggatttagccacaggctttacctccag

SEQ ID NO: 1039502 - DNA, 33 bp, Homo sapien
caggctggatttagccgcaggctttacctccag

SEQ ID NO: 1039503 - DNA, 33 bp, Homo sapien
ctctgagatgttaggacgactgtctcaaggcca

SEQ ID NO: 1039504 - DNA, 33 bp, Homo sapien
ctctgagatgttaggatgactgtctcaaggcca

SEQ ID NO: 1039505 - DNA, 33 bp, Homo sapien
aggtctatacaaataccagggtttcgtatgaaa

SEQ ID NO: 1039506 - DNA, 33 bp, Homo sapien
aggtctatacaaatactagggtttcgtatgaaa

SEQ ID NO: 1039507 - DNA, 33 bp, Homo sapien
ctggattctgtatttcccccccgaaggtttgtt

SEQ ID NO: 1039508 - DNA, 33 bp, Homo sapien
ctggattctgtatttctcccccgaaggtttgtt

SEQ ID NO: 1039509 - DNA, 33 bp, Homo sapien
ctttctctccgttttcactcctggactcacctc

SEQ ID NO: 1039510 - DNA, 33 bp, Homo sapien
ctttctctccgttttcgctcctggactcacctc

SEQ ID NO: 1039511 - DNA, 33 bp, Homo sapien
tgggtggcgaagaaacagaaagggcttgcagtg

SEQ ID NO: 1039512 - DNA, 33 bp, Homo sapien
tgggtggcgaagaaacggaaagggcttgcagtg

SEQ ID NO: 1039513 - DNA, 33 bp, Homo sapien
actggactagctgaaccgccatgatgtgctgca

SEQ ID NO: 1039514 - DNA, 33 bp, Homo sapien
actggactagctgaactgccatgatgtgctgca

SEQ ID NO: 1039515 - DNA, 33 bp, Homo sapien
gcaacacatcatcccgcagttactagccatcat

SEQ ID NO: 1039516 - DNA, 33 bp, Homo sapien
gcaacacatcatcccggagttactagccatcat

SEQ ID NO: 1039517 - DNA, 33 bp, Homo sapien
ttggaggatttttgcacgtggaaccctggcaat

SEQ ID NO: 1039518 - DNA, 33 bp, Homo sapien
ttggaggatttttgcatgtggaaccctggcaat

SEQ ID NO: 1039519 - DNA, 33 bp, Homo sapien
tgatgtacagatgtacaggtatcacactgttta

SEQ ID NO: 1039520 - DNA, 33 bp, Homo sapien
tgatgtacagatgtacgggtatcacactgttta

SEQ ID NO: 1039521 - DNA, 33 bp, Homo sapien
ctcttgtcagctgggacgggaagacgggccctg

SEQ ID NO: 1039522 - DNA, 33 bp, Homo sapien
ctcttgtcagctgggatgggaagacgggccctg

SEQ ID NO: 1039523 - DNA, 33 bp, Homo sapien
ttatactatgggcatacaagttaacatttgagg

SEQ ID NO: 1039524 - DNA, 33 bp, Homo sapien
ttatactatgggcatagaagttaacatttgagg

SEQ ID NO: 1039525 - DNA, 33 bp, Homo sapien
ttagtggatagaaaagcatgatgaaaaatgaga

SEQ ID NO: 1039526 - DNA, 33 bp, Homo sapien
ttagtggatagaaaagtatgatgaaaaatgaga

SEQ ID NO: 1039527 - DNA, 33 bp, Homo sapien
tgtaggcaagaagcaacaatagatgctaaaatt

SEQ ID NO: 1039528 - DNA, 33 bp, Homo sapien
tgtaggcaagaagcaagaatagatgctaaaatt

SEQ ID NO: 1039529 - DNA, 33 bp, Homo sapien
gaaaccagacatcataaaggcagtccccaacaa

SEQ ID NO: 1039530 - DNA, 33 bp, Homo sapien
gaaaccagacatcatacaggcagtccccaacaa

SEQ ID NO: 1039531 - DNA, 33 bp, Homo sapien
acagttaggaagttccaatgagcaaaaaggaat

SEQ ID NO: 1039532 - DNA, 33 bp, Homo sapien
acagttaggaagttccgatgagcaaaaaggaat

SEQ ID NO: 1039533 - DNA, 33 bp, Homo sapien
tattgttgttctttggaattgtattggctattc

SEQ ID NO: 1039534 - DNA, 33 bp, Homo sapien
tattgttgttctttgggattgtattggctattc

SEQ ID NO: 1039535 - DNA, 33 bp, Homo sapien
tgaacagctacagtaacaggcatcagaaccaga

SEQ ID NO: 1039536 - DNA, 33 bp, Homo sapien
tgaacagctacagtaagaggcatcagaaccaga

SEQ ID NO: 1039537 - DNA, 33 bp, Homo sapien
acaagggaaaggaaaacatccaactccagactc

SEQ ID NO: 1039538 - DNA, 33 bp, Homo sapien
acaagggaaaggaaaatatccaactccagactc

SEQ ID NO: 1039539 - DNA, 33 bp, Homo sapien
aggattaaataaaataagtaaagtgcccactat

SEQ ID NO: 1039540 - DNA, 33 bp, Homo sapien
aggattaaataaaatacgtaaagtgcccactat

SEQ ID NO: 1039541 - DNA, 33 bp, Homo sapien
tagtgctgttgggagacgaaataggacacaacg

SEQ ID NO: 1039542 - DNA, 33 bp, Homo sapien
tagtgctgttgggagatgaaataggacacaacg

SEQ ID NO: 1039543 - DNA, 33 bp, Homo sapien
tcctccgtctctgatacccacgaggaattacag

SEQ ID NO: 1039544 - DNA, 33 bp, Homo sapien
tcctccgtctctgatagccacgaggaattacag

SEQ ID NO: 1039545 - DNA, 33 bp, Homo sapien
tcagtttggattagccacatttcaaaagctcag

SEQ ID NO: 1039546 - DNA, 33 bp, Homo sapien
tcagtttggattagccgcatttcaaaagctcag

SEQ ID NO: 1039547 - DNA, 33 bp, Homo sapien
ccatgtgttatttaaccggatgtgcctggtagc

SEQ ID NO: 1039548 - DNA, 33 bp, Homo sapien
ccatgtgttatttaactggatgtgcctggtagc

SEQ ID NO: 1039549 - DNA, 33 bp, Homo sapien
gatcatctgttctcccacttcttcccaaaaggg

SEQ ID NO: 1039550 - DNA, 33 bp, Homo sapien
gatcatctgttctcccgcttcttcccaaaaggg

SEQ ID NO: 1039551 - DNA, 33 bp, Homo sapien
actgatgaccgggaagacatgcattcaagcttc

SEQ ID NO: 1039552 - DNA, 33 bp, Homo sapien
actgatgaccgggaaggcatgcattcaagcttc

SEQ ID NO: 1039553 - DNA, 33 bp, Homo sapien
ggtaataatggaaagcaaagcaggaaagaggaa

SEQ ID NO: 1039554 - DNA, 33 bp, Homo sapien
ggtaataatggaaagcgaagcaggaaagaggaa

SEQ ID NO: 1039555 - DNA, 33 bp, Homo sapien
ccaacccagatactccaagtccaaatccacatt

SEQ ID NO: 1039556 - DNA, 33 bp, Homo sapien
ccaacccagatactccgagtccaaatccacatt

SEQ ID NO: 1039557 - DNA, 33 bp, Homo sapien
acgtttgtgcccaggccgattcccgtaaacact

SEQ ID NO: 1039558 - DNA, 33 bp, Homo sapien
acgtttgtgcccaggctgattcccgtaaacact

SEQ ID NO: 1039559 - DNA, 33 bp, Homo sapien
tgcccccaggctccagaagtacaccaggaagaa

SEQ ID NO: 1039560 - DNA, 33 bp, Homo sapien
tgcccccaggctccagcagtacaccaggaagaa

SEQ ID NO: 1039561 - DNA, 33 bp, Homo sapien
tgccctaaccagcagcccatcggaggacagaat

SEQ ID NO: 1039562 - DNA, 33 bp, Homo sapien
tgccctaaccagcagcgcatcggaggacagaat

SEQ ID NO: 1039563 - DNA, 33 bp, Homo sapien; identical to SEQ ID NO: 1039561

SEQ ID NO: 1039564 - DNA, 33 bp, Homo sapien; identical to SEQ ID NO: 1039562

SEQ ID NO: 1039565 - DNA, 33 bp, Homo sapien
taaattctctaattagaccttgcctcttagatc

SEQ ID NO: 1039566 - DNA, 33 bp, Homo sapien
taaattctctaattagtccttgcctcttagatc

SEQ ID NO: 1039567 - DNA, 33 bp, Homo sapien
ggtaaaacatgtaataccatgtaaaagtactta

SEQ ID NO: 1039568 - DNA, 33 bp, Homo sapien
ggtaaaacatgtaatagcatgtaaaagtactta

SEQ ID NO: 1039569 - DNA, 33 bp, Homo sapien
tgatttcctgatccaaaaaacacttccaggcac

SEQ ID NO: 1039570 - DNA, 33 bp, Homo sapien
tgatttcctgatccaagaaacacttccaggcac

SEQ ID NO: 1039571 - DNA, 33 bp, Homo sapien
agagcctgacaaagaaatgttgaccaaatggta

SEQ ID NO: 1039572 - DNA, 33 bp, Homo sapien
agagcctgacaaagaagtgttgaccaaatggta

SEQ ID NO: 1039573 - DNA, 33 bp, Homo sapien
ctttgctcaagaagcacatgtggggggcatgtg

SEQ ID NO: 1039574 - DNA, 33 bp, Homo sapien
ctttgctcaagaagcatatgtggggggcatgtg

SEQ ID NO: 1039575 - DNA, 33 bp, Homo sapien
aataaatagtcaagtagaaaagattagattaat

SEQ ID NO: 1039576 - DNA, 33 bp, Homo sapien
aataaatagtcaagtataaaagattagattaat

SEQ ID NO: 1039577 - DNA, 33 bp, Homo sapien
gatttgaaacttaggcagaatagtaagtaccag

SEQ ID NO: 1039578 - DNA, 33 bp, Homo sapien
gatttgaaacttaggcggaatagtaagtaccag

SEQ ID NO: 1039579 - DNA, 33 bp, Homo sapien
agaacatggagcagaaacacagtgtccgcaaat

SEQ ID NO: 1039580 - DNA, 33 bp, Homo sapien
agaacatggagcagaaccacagtgtccgcaaat

SEQ ID NO: 1039581 - DNA, 33 bp, Homo sapien
cctgccctgttagaacgccaaatctgccctcta

SEQ ID NO: 1039582 - DNA, 33 bp, Homo sapien
cctgccctgttagaactccaaatctgccctcta

SEQ ID NO: 1039583 - DNA, 33 bp, Homo sapien
aaatccagccagatccaccttcaaagtatgtcc

SEQ ID NO: 1039584 - DNA, 33 bp, Homo sapien
aaatccagccagatccgccttcaaagtatgtcc

SEQ ID NO: 1039585 - DNA, 33 bp, Homo sapien
acttcccactcactgactatatgagtgcaagtg

SEQ ID NO: 1039586 - DNA, 33 bp, Homo sapien
acttcccactcactgattatatgagtgcaagtg

SEQ ID NO: 1039587 - DNA, 33 bp, Homo sapien
ctaaatctgtatacatcaggcaaaaagcaaagc

SEQ ID NO: 1039588 - DNA, 33 bp, Homo sapien
ctaaatctgtatacatgaggcaaaaagcaaagc

SEQ ID NO: 1039589 - DNA, 33 bp, Homo sapien
gcactgggatctccagcagagaggcatttagga

SEQ ID NO: 1039590 - DNA, 33 bp, Homo sapien
gcactgggatctccagtagagaggcatttagga

SEQ ID NO: 1039591 - DNA, 33 bp, Homo sapien
tgaacctcgttgatacagacctcagtcatgaat

SEQ ID NO: 1039592 - DNA, 33 bp, Homo sapien
tgaacctcgttgatacggacctcagtcatgaat

SEQ ID NO: 1039593 - DNA, 33 bp, Homo sapien
gttttccagggtcttacgaatgcggaatctgtg

SEQ ID NO: 1039594 - DNA, 33 bp, Homo sapien
gttttccagggtcttatgaatgcggaatctgtg

SEQ ID NO: 1039595 - DNA, 33 bp, Homo sapien
aacactaagttggatacgttcctcagggcagag

SEQ ID NO: 1039596 - DNA, 33 bp, Homo sapien
aacactaagttggatatgttcctcagggcagag

SEQ ID NO: 1039597 - DNA, 33 bp, Homo sapien
atagacagaaaaatgccatttcccacttgacta

SEQ ID NO: 1039598 - DNA, 33 bp, Homo sapien
atagacagaaaaatgctatttcccacttgacta

SEQ ID NO: 1039599 - DNA, 33 bp, Homo sapien
gatgggaaaagagcccagagaaggaaagcaaca

SEQ ID NO: 1039600 - DNA, 33 bp, Homo sapien
gatgggaaaagagcccggagaaggaaagcaaca

SEQ ID NO: 1039601 - DNA, 33 bp, Homo sapien
aggtcattcagtacccaccatagagccagatct

SEQ ID NO: 1039602 - DNA, 33 bp, Homo sapien
aggtcattcagtacccgccatagagccagatct

SEQ ID NO: 1039603 - DNA, 33 bp, Homo sapien
gaacacagaaagaaaaatagacagcccttcagg

SEQ ID NO: 1039604 - DNA, 33 bp, Homo sapien
gaacacagaaagaaaagtagacagcccttcagg

SEQ ID NO: 1039605 - DNA, 33 bp, Homo sapien
tgtcccatgagagcaacagttcccagtcagtgc

SEQ ID NO: 1039606 - DNA, 33 bp, Homo sapien
tgtcccatgagagcaatagttcccagtcagtgc

SEQ ID NO: 1039607 - DNA, 33 bp, Homo sapien
gggagatgatgtgaaaaatttgtacaataacaa

SEQ ID NO: 1039608 - DNA, 33 bp, Homo sapien
gggagatgatgtgaaagatttgtacaataacaa

SEQ ID NO: 1039609 - DNA, 33 bp, Homo sapien
ggtggggccacctcaaagctcagacctgatttg

SEQ ID NO: 1039610 - DNA, 33 bp, Homo sapien
ggtggggccacctcaaggctcagacctgatttg

SEQ ID NO: 1039611 - DNA, 33 bp, Homo sapien
cagtgtcacaccatcgcagaactgggttcatat

SEQ ID NO: 1039612 - DNA, 33 bp, Homo sapien
cagtgtcacaccatcggagaactgggttcatat

SEQ ID NO: 1039613 - DNA, 33 bp, Homo sapien
ggatttactccaggaacatagttgattaaacat

SEQ ID NO: 1039614 - DNA, 33 bp, Homo sapien
ggatttactccaggaatatagttgattaaacat

SEQ ID NO: 1039615 - DNA, 33 bp, Homo sapien
ccgacatcacgaactccgacagcacgttctgca

SEQ ID NO: 1039616 - DNA, 33 bp, Homo sapien
ccgacatcacgaactctgacagcacgttctgca

SEQ ID NO: 1039617 - DNA, 33 bp, Homo sapien
tctgtgagctcatcaacgaggtgaaggagtcct

SEQ ID NO: 1039618 - DNA, 33 bp, Homo sapien
tctgtgagctcatcaatgaggtgaaggagtcct

SEQ ID NO: 1039619 - DNA, 33 bp, Homo sapien
aggtattacctccacaacatttccaactggggg

SEQ ID NO: 1039620 - DNA, 33 bp, Homo sapien
aggtattacctccacagcatttccaactggggg

SEQ ID NO: 1039621 - DNA, 33 bp, Homo sapien
gtatgtcaaaacaaagaccatttctgtcctggg

SEQ ID NO: 1039622 - DNA, 33 bp, Homo sapien
gtatgtcaaaacaaaggccatttctgtcctggg

SEQ ID NO: 1039623 - DNA, 33 bp, Homo sapien
tacctgatgtgaacgaatcactggcgtgaagtt

SEQ ID NO: 1039624 - DNA, 33 bp, Homo sapien
tacctgatgtgaacgactcactggcgtgaagtt

SEQ ID NO: 1039625 - DNA, 33 bp, Homo sapien
caagacattttggaaccgaatagaatggctcag

SEQ ID NO: 1039626 - DNA, 33 bp, Homo sapien
caagacattttggaactgaatagaatggctcag

SEQ ID NO: 1039627 - DNA, 33 bp, Homo sapien
gaatgtcagccaagagacccacggaatggcagg

SEQ ID NO: 1039628 - DNA, 33 bp, Homo sapien
gaatgtcagccaagaggcccacggaatggcagg

SEQ ID NO: 1039629 - DNA, 33 bp, Homo sapien
ccccacaacaagcttacgaagtaggtgctattt

SEQ ID NO: 1039630 - DNA, 33 bp, Homo sapien
ccccacaacaagcttatgaagtaggtgctattt

SEQ ID NO: 1039631 - DNA, 33 bp, Homo sapien
tttaaccactggagaaaggaaattcatagagag

SEQ ID NO: 1039632 - DNA, 33 bp, Homo sapien
tttaaccactggagaagggaaattcatagagag

SEQ ID NO: 1039633 - DNA, 33 bp, Homo sapien
tcaaaggattcccccacgtagtcagtgcagaaa

SEQ ID NO: 1039634 - DNA, 33 bp, Homo sapien
tcaaaggattcccccatgtagtcagtgcagaaa

SEQ ID NO: 1039635 - DNA, 33 bp, Homo sapien
ggctaccacctcctcactaccatcattaactaa

SEQ ID NO: 1039636 - DNA, 33 bp, Homo sapien
ggctaccacctcctcattaccatcattaactaa

SEQ ID NO: 1039637 - DNA, 33 bp, Homo sapien
ttgataactgtagtcacgcaggcccaacatgaa

SEQ ID NO: 1039638 - DNA, 33 bp, Homo sapien
ttgataactgtagtcatgcaggcccaacatgaa

SEQ ID NO: 1039639 - DNA, 33 bp, Homo sapien
ccctgtcatcatgggcgcttggtaccgcatgtg

SEQ ID NO: 1039640 - DNA, 33 bp, Homo sapien
ccctgtcatcatgggctcttggtaccgcatgtg

SEQ ID NO: 1039641 - DNA, 33 bp, Homo sapien
ctgttattattactaacggatgctttcagcaca

SEQ ID NO: 1039642 - DNA, 33 bp, Homo sapien
ctgttattattactaatggatgctttcagcaca

SEQ ID NO: 1039643 - DNA, 33 bp, Homo sapien
agaactttgggcaaaccctctccctttctcacc

SEQ ID NO: 1039644 - DNA, 33 bp, Homo sapien
agaactttgggcaaacgctctccctttctcacc

SEQ ID NO: 1039645 - DNA, 33 bp, Homo sapien
agacaccttgctcttacctttgggtcctcatgc

SEQ ID NO: 1039646 - DNA, 33 bp, Homo sapien
agacaccttgctcttatctttgggtcctcatgc

SEQ ID NO: 1039647 - DNA, 33 bp, Homo sapien
tcctatacaaccatgacaccgattccaggattc

SEQ ID NO: 1039648 - DNA, 33 bp, Homo sapien
tcctatacaaccatgataccgattccaggattc

SEQ ID NO: 1039649 - DNA, 33 bp, Homo sapien
acaggacccaggaaatcactctatcagaagcta

SEQ ID NO: 1039650 - DNA, 33 bp, Homo sapien
acaggacccaggaaattactctatcagaagcta

SEQ ID NO: 1039651 - DNA, 33 bp, Homo sapien
cacagccttgtgctaacgacagcaattcttcct

SEQ ID NO: 1039652 - DNA, 33 bp, Homo sapien
cacagccttgtgctaatgacagcaattcttcct

SEQ ID NO: 1039653 - DNA, 33 bp, Homo sapien
ggctgtggacttggacaatacacttttctgttt

SEQ ID NO: 1039654 - DNA, 33 bp, Homo sapien
ggctgtggacttggacgatacacttttctgttt

SEQ ID NO: 1039655 - DNA, 33 bp, Homo sapien
tctgagcctctagggaagtggaaggaagattcg

SEQ ID NO: 1039656 - DNA, 33 bp, Homo sapien
tctgagcctctagggacgtggaaggaagattcg

SEQ ID NO: 1039657 - DNA, 33 bp, Homo sapien
caagcttattctcagacagttctgaaagttgga

SEQ ID NO: 1039658 - DNA, 33 bp, Homo sapien
caagcttattctcagagagttctgaaagttgga

SEQ ID NO: 1039659 - DNA, 33 bp, Homo sapien
ttgttcaatgaataaaatcgtgtctcctccatc

SEQ ID NO: 1039660 - DNA, 33 bp, Homo sapien
ttgttcaatgaataaactcgtgtctcctccatc

SEQ ID NO: 1039661 - DNA, 33 bp, Homo sapien
cctgggtttgccataactcactatgtgaccttc

SEQ ID NO: 1039662 - DNA, 33 bp, Homo sapien
cctgggtttgccataattcactatgtgaccttc

SEQ ID NO: 1039663 - DNA, 33 bp, Homo sapien
caaggaggtaataagagctgagcactggggccc

SEQ ID NO: 1039664 - DNA, 33 bp, Homo sapien
caaggaggtaataagatctgagcactggggccc

SEQ ID NO: 1039665 - DNA, 33 bp, Homo sapien
cagcctcaggcgtttacacaagcaaatgggaga

SEQ ID NO: 1039666 - DNA, 33 bp, Homo sapien
cagcctcaggcgtttatacaagcaaatgggaga

SEQ ID NO: 1039667 - DNA, 33 bp, Homo sapien
gaactgttctgatggacgttgaatctggaagac

SEQ ID NO: 1039668 - DNA, 33 bp, Homo sapien
gaactgttctgatggatgttgaatctggaagac

SEQ ID NO: 1039669 - DNA, 33 bp, Homo sapien
tctctgaaaatcaggaagaagaagtccacagga

SEQ ID NO: 1039670 - DNA, 33 bp, Homo sapien
tctctgaaaatcaggaggaagaagtccacagga

SEQ ID NO: 1039671 - DNA, 33 bp, Homo sapien
ttcattggattatgtcacataccaaacttccta

SEQ ID NO: 1039672 - DNA, 33 bp, Homo sapien
ttcattggattatgtcgcataccaaacttccta

SEQ ID NO: 1039673 - DNA, 33 bp, Homo sapien
agcacaactgtatatcaaaggctcggagaaatc

SEQ ID NO: 1039674 - DNA, 33 bp, Homo sapien
agcacaactgtatatcgaaggctcggagaaatc

SEQ ID NO: 1039675 - DNA, 33 bp, Homo sapien
aagaggaggcactgaaatgaaactggtcagtca

SEQ ID NO: 1039676 - DNA, 33 bp, Homo sapien
aagaggaggcactgaagtgaaactggtcagtca

SEQ ID NO: 1039677 - DNA, 33 bp, Homo sapien
aagaatttgatccttaagaaatgcaggtcgtcc

SEQ ID NO: 1039678 - DNA, 33 bp, Homo sapien
aagaatttgatccttacgaaatgcaggtcgtcc

SEQ ID NO: 1039679 - DNA, 33 bp, Homo sapien
ttgtcccaaatccaaaccctatgttcttttgca

SEQ ID NO: 1039680 - DNA, 33 bp, Homo sapien
ttgtcccaaatccaaagcctatgttcttttgca

SEQ ID NO: 1039681 - DNA, 33 bp, Homo sapien
tctacagattataccccggccttccttgacctc

SEQ ID NO: 1039682 - DNA, 33 bp, Homo sapien
tctacagattataccctggccttccttgacctc

SEQ ID NO: 1039683 - DNA, 33 bp, Homo sapien
ctccatttactccccagatctgtgccgtgccct

SEQ ID NO: 1039684 - DNA, 33 bp, Homo sapien
ctccatttactccccatatctgtgccgtgccct

SEQ ID NO: 1039685 - DNA, 33 bp, Homo sapien
cctgcctgttctctccacagtggaaaaacgctg

SEQ ID NO: 1039686 - DNA, 33 bp, Homo sapien
cctgcctgttctctccgcagtggaaaaacgctg

SEQ ID NO: 1039687 - DNA, 33 bp, Homo sapien
cctcatttactccttcaaggtaaatgcagtggt

SEQ ID NO: 1039688 - DNA, 33 bp, Homo sapien
cctcatttactccttcgaggtaaatgcagtggt

SEQ ID NO: 1039689 - DNA, 33 bp, Homo sapien
tcccacaagtgaaaaacctaaccctgaagctca

SEQ ID NO: 1039690 - DNA, 33 bp, Homo sapien
tcccacaagtgaaaaatctaaccctgaagctca

SEQ ID NO: 1039691 - DNA, 33 bp, Homo sapien
tgaagacgaggatgccaatgttcacagaggttc

SEQ ID NO: 1039692 - DNA, 33 bp, Homo sapien
tgaagacgaggatgccgatgttcacagaggttc

SEQ ID NO: 1039693 - DNA, 33 bp, Homo sapien
atacctgccctgcaaactacataaagctcttgg

SEQ ID NO: 1039694 - DNA, 33 bp, Homo sapien
atacctgccctgcaaagtacataaagctcttgg

SEQ ID NO: 1039695 - DNA, 33 bp, Homo sapien
tctcatttggaaacaaccagccattggaagtta

SEQ ID NO: 1039696 - DNA, 33 bp, Homo sapien
tctcatttggaaacaatcagccattggaagtta

SEQ ID NO: 1039697 - DNA, 33 bp, Homo sapien
gccgatggattcaccaaacaatccatcagcggt

SEQ ID NO: 1039698 - DNA, 33 bp, Homo sapien
gccgatggattcaccagacaatccatcagcggt

SEQ ID NO: 1039699 - DNA, 33 bp, Homo sapien
tagaactcttgagtccccttcagctatgatgtt

SEQ ID NO: 1039700 - DNA, 33 bp, Homo sapien
tagaactcttgagtcctcttcagctatgatgtt

SEQ ID NO: 1039701 - DNA, 33 bp, Homo sapien
ggcactgcccataaaccccattgtcctctggct

SEQ ID NO: 1039702 - DNA, 33 bp, Homo sapien
ggcactgcccataaactccattgtcctctggct

SEQ ID NO: 1039703 - DNA, 33 bp, Homo sapien
gatctcatctgtaaagcagcaacgcctggccct

SEQ ID NO: 1039704 - DNA, 33 bp, Homo sapien
gatctcatctgtaaaggagcaacgcctggccct

SEQ ID NO: 1039705 - DNA, 33 bp, Homo sapien
ctcaagggtattgcacaggtctagggctgaaaa

SEQ ID NO: 1039706 - DNA, 33 bp, Homo sapien
ctcaagggtattgcacgggtctagggctgaaaa

SEQ ID NO: 1039707 - DNA, 33 bp, Homo sapien
ggccagaggtgggaacccaatgccttcagaagg

SEQ ID NO: 1039708 - DNA, 33 bp, Homo sapien
ggccagaggtgggaactcaatgccttcagaagg

SEQ ID NO: 1039709 - DNA, 33 bp, Homo sapien
ggtctcccctggtaaactccagtctcacctaaa

SEQ ID NO: 1039710 - DNA, 33 bp, Homo sapien
ggtctcccctggtaaattccagtctcacctaaa

SEQ ID NO: 1039711 - DNA, 33 bp, Homo sapien
catgggaattcgagaactctctagaagtcttct

SEQ ID NO: 1039712 - DNA, 33 bp, Homo sapien
catgggaattcgagaagtctctagaagtcttct

SEQ ID NO: 1039713 - DNA, 33 bp, Homo sapien
ccttcttcaggctaaacaattcccatcccaaag

SEQ ID NO: 1039714 - DNA, 33 bp, Homo sapien
ccttcttcaggctaaataattcccatcccaaag

SEQ ID NO: 1039715 - DNA, 33 bp, Homo sapien
gctggggaggccttgcaaagccgaggtcaccag

SEQ ID NO: 1039716 - DNA, 33 bp, Homo sapien
gctggggaggccttgcgaagccgaggtcaccag

SEQ ID NO: 1039717 - DNA, 33 bp, Homo sapien
ttcaggtcccatcaaacagtctcactgagaaag

SEQ ID NO: 1039718 - DNA, 33 bp, Homo sapien
ttcaggtcccatcaaatagtctcactgagaaag

SEQ ID NO: 1039719 - DNA, 33 bp, Homo sapien
gatggttctgggagcccgaaaacctcagcagat

SEQ ID NO: 1039720 - DNA, 33 bp, Homo sapien
gatggttctgggagcctgaaaacctcagcagat

SEQ ID NO: 1039721 - DNA, 33 bp, Homo sapien
atctgtgagacgtaggaactgtgaaatgtgacc

SEQ ID NO: 1039722 - DNA, 33 bp, Homo sapien
atctgtgagacgtaggcactgtgaaatgtgacc

SEQ ID NO: 1039723 - DNA, 33 bp, Homo sapien
cttcctttctctctcgaccatgacttcaacatt

SEQ ID NO: 1039724 - DNA, 33 bp, Homo sapien
cttcctttctctctcgtccatgacttcaacatt

SEQ ID NO: 1039725 - DNA, 33 bp, Homo sapien
tcatttattgagtgtcactgtgcatccgaccct

SEQ ID NO: 1039726 - DNA, 33 bp, Homo sapien
tcatttattgagtgtcgctgtgcatccgaccct

SEQ ID NO: 1039727 - DNA, 33 bp, Homo sapien
cctatccacagagccacacttttgtcttggatg

SEQ ID NO: 1039728 - DNA, 33 bp, Homo sapien
cctatccacagagccatacttttgtcttggatg

SEQ ID NO: 1039729 - DNA, 33 bp, Homo sapien
cagcatcagtccttccagattgaggaagcccct

SEQ ID NO: 1039730 - DNA, 33 bp, Homo sapien
cagcatcagtccttccggattgaggaagcccct

SEQ ID NO: 1039731 - DNA, 33 bp, Homo sapien
gaaatgttagctgtgaccttatacctagtgcct

SEQ ID NO: 1039732 - DNA, 33 bp, Homo sapien
gaaatgttagctgtgatcttatacctagtgcct

SEQ ID NO: 1039733 - DNA, 33 bp, Homo sapien
cctgctaaggaaaatacaaactgagccgggagg

SEQ ID NO: 1039734 - DNA, 33 bp, Homo sapien
cctgctaaggaaaatagaaactgagccgggagg

SEQ ID NO: 1039735 - DNA, 33 bp, Homo sapien
gtatgagattgtcatcagaaatggtgcagtgca

SEQ ID NO: 1039736 - DNA, 33 bp, Homo sapien
gtatgagattgtcatcggaaatggtgcagtgca

SEQ ID NO: 1039737 - DNA, 33 bp, Homo sapien
tactacgattaaaagtcacatttctggtgatat

SEQ ID NO: 1039738 - DNA, 33 bp, Homo sapien
tactacgattaaaagtgacatttctggtgatat

SEQ ID NO: 1039739 - DNA, 33 bp, Homo sapien
aggcatgcaatgcaccactgggaaatttcggga

SEQ ID NO: 1039740 - DNA, 33 bp, Homo sapien
aggcatgcaatgcaccgctgggaaatttcggga

SEQ ID NO: 1039741 - DNA, 33 bp, Homo sapien
acactaccctgtcatgaaggtgctattctcatt

SEQ ID NO: 1039742 - DNA, 33 bp, Homo sapien
acactaccctgtcatgtaggtgctattctcatt

SEQ ID NO: 1039743 - DNA, 33 bp, Homo sapien
cccagcagtggcttgaagaacgtattcctgctt

SEQ ID NO: 1039744 - DNA, 33 bp, Homo sapien
cccagcagtggcttgacgaacgtattcctgctt

SEQ ID NO: 1039745 - DNA, 33 bp, Homo sapien
ttccacgggttttttcaaggagagcccagccca

SEQ ID NO: 1039746 - DNA, 33 bp, Homo sapien
ttccacgggttttttccaggagagcccagccca

SEQ ID NO: 1039747 - DNA, 33 bp, Homo sapien
ctgccgagactcgactcaacctcaacatccttc

SEQ ID NO: 1039748 - DNA, 33 bp, Homo sapien
ctgccgagactcgactgaacctcaacatccttc

SEQ ID NO: 1039749 - DNA, 33 bp, Homo sapien
gctcagactctgaacaacgatgaattctaaaag

SEQ ID NO: 1039750 - DNA, 33 bp, Homo sapien
gctcagactctgaacagcgatgaattctaaaag

SEQ ID NO: 1039751 - DNA, 33 bp, Homo sapien
ttccagctctagagacacccctggacaacagtt

SEQ ID NO: 1039752 - DNA, 33 bp, Homo sapien
ttccagctctagagacgcccctggacaacagtt

SEQ ID NO: 1039753 - DNA, 33 bp, Homo sapien
ctttcgacttttcttcccagcaagctcgggaat

SEQ ID NO: 1039754 - DNA, 33 bp, Homo sapien
ctttcgacttttcttctcagcaagctcgggaat

SEQ ID NO: 1039755 - DNA, 33 bp, Homo sapien
cgccccatacctggcaaccatgtgagatactat

SEQ ID NO: 1039756 - DNA, 33 bp, Homo sapien
cgccccatacctggcagccatgtgagatactat

SEQ ID NO: 1039757 - DNA, 33 bp, Homo sapien
taaaaaaacagatgccaatgagacctaagtagt

SEQ ID NO: 1039758 - DNA, 33 bp, Homo sapien
taaaaaaacagatgcccatgagacctaagtagt

SEQ ID NO: 1039759 - DNA, 33 bp, Homo sapien
agtttcctcatctaaacacagaacttccgttgt

SEQ ID NO: 1039760 - DNA, 33 bp, Homo sapien
agtttcctcatctaaagacagaacttccgttgt

SEQ ID NO: 1039761 - DNA, 33 bp, Homo sapien
actggtccctagattcccgatagttccctctgc

SEQ ID NO: 1039762 - DNA, 33 bp, Homo sapien
actggtccctagattctcgatagttccctctgc

SEQ ID NO: 1039763 - DNA, 33 bp, Homo sapien
ggtgacaggggagtgaagaagggagagtgtcct

SEQ ID NO: 1039764 - DNA, 33 bp, Homo sapien
ggtgacaggggagtgaggaagggagagtgtcct

SEQ ID NO: 1039765 - DNA, 33 bp, Homo sapien
ctgctcccttccctaccggcttctatgtccctc

SEQ ID NO: 1039766 - DNA, 33 bp, Homo sapien
ctgctcccttccctactggcttctatgtccctc

SEQ ID NO: 1039767 - DNA, 33 bp, Homo sapien
atgtagactcaggcaccgggttgcaggcagtct

SEQ ID NO: 1039768 - DNA, 33 bp, Homo sapien
atgtagactcaggcactgggttgcaggcagtct

SEQ ID NO: 1039769 - DNA, 33 bp, Homo sapien
ccccgcctgtcttgtaaaacaatggtacctctg

SEQ ID NO: 1039770 - DNA, 33 bp, Homo sapien
ccccgcctgtcttgtagaacaatggtacctctg

SEQ ID NO: 1039771 - DNA, 33 bp, Homo sapien
tgctgctattgttaccagctacggcaattttaa

SEQ ID NO: 1039772 - DNA, 33 bp, Homo sapien
tgctgctattgttaccggctacggcaattttaa

SEQ ID NO: 1039773 - DNA, 33 bp, Homo sapien
tcttccctggtgactcaaaggttttgggatcac

SEQ ID NO: 1039774 - DNA, 33 bp, Homo sapien
tcttccctggtgactcgaaggttttgggatcac

SEQ ID NO: 1039775 - DNA, 33 bp, Homo sapien
atccaattcaagcgccaacttgttcgctgatgt

SEQ ID NO: 1039776 - DNA, 33 bp, Homo sapien
atccaattcaagcgccgacttgttcgctgatgt

SEQ ID NO: 1039777 - DNA, 33 bp, Homo sapien
gttttgccagaaacaccgaaagtctattttctt

SEQ ID NO: 1039778 - DNA, 33 bp, Homo sapien
gttttgccagaaacactgaaagtctattttctt

SEQ ID NO: 1039779 - DNA, 33 bp, Homo sapien
acagaaggcggaaggaaaacaggaagattattg

SEQ ID NO: 1039780 - DNA, 33 bp, Homo sapien
acagaaggcggaaggacaacaggaagattattg

SEQ ID NO: 1039781 - DNA, 33 bp, Homo sapien
aaacagtaatgttatcaaggagaagtggccaat

SEQ ID NO: 1039782 - DNA, 33 bp, Homo sapien
aaacagtaatgttatcgaggagaagtggccaat

SEQ ID NO: 1039783 - DNA, 33 bp, Homo sapien
cccattctcccgctggacattcaggtaactgga

SEQ ID NO: 1039784 - DNA, 33 bp, Homo sapien
cccattctcccgctgggcattcaggtaactgga

SEQ ID NO: 1039785 - DNA, 33 bp, Homo sapien
ttacatcatctgcataatagtggtggttgtgag

SEQ ID NO: 1039786 - DNA, 33 bp, Homo sapien
ttacatcatctgcatagtagtggtggttgtgag

SEQ ID NO: 1039787 - DNA, 33 bp, Homo sapien
ccttccagtactttcaatagcaaacagcacctg

SEQ ID NO: 1039788 - DNA, 33 bp, Homo sapien
ccttccagtactttcagtagcaaacagcacctg

SEQ ID NO: 1039789 - DNA, 33 bp, Homo sapien
gctggccactgataaacgccactgggatcctag

SEQ ID NO: 1039790 - DNA, 33 bp, Homo sapien
gctggccactgataaatgccactgggatcctag

SEQ ID NO: 1039791 - DNA, 33 bp, Homo sapien
tctgaactgtatgaacaggcttcttgcatcccc

SEQ ID NO: 1039792 - DNA, 33 bp, Homo sapien
tctgaactgtatgaacgggcttcttgcatcccc

SEQ ID NO: 1039793 - DNA, 33 bp, Homo sapien
ttaatgcatggaaagcccatagtacatagaagt

SEQ ID NO: 1039794 - DNA, 33 bp, Homo sapien
ttaatgcatggaaagcgcatagtacatagaagt

SEQ ID NO: 1039795 - DNA, 33 bp, Homo sapien
agtggaagattccttaacgacttgcttagactc

SEQ ID NO: 1039796 - DNA, 33 bp, Homo sapien
agtggaagattccttagcgacttgcttagactc

SEQ ID NO: 1039797 - DNA, 33 bp, Homo sapien
atacattattggtaaccgaagttcgtagttcct

SEQ ID NO: 1039798 - DNA, 33 bp, Homo sapien
atacattattggtaactgaagttcgtagttcct

SEQ ID NO: 1039799 - DNA, 33 bp, Homo sapien
atgtgcagagacagggaagtaagtttgcagaga

SEQ ID NO: 1039800 - DNA, 33 bp, Homo sapien
atgtgcagagacaggggagtaagtttgcagaga

SEQ ID NO: 1039801 - DNA, 33 bp, Homo sapien
ttggaagttgggcccacgagacttggtaactaa

SEQ ID NO: 1039802 - DNA, 33 bp, Homo sapien
ttggaagttgggcccatgagacttggtaactaa

SEQ ID NO: 1039803 - DNA, 33 bp, Homo sapien
tggttttagggtggaaacaaacattctgcagga

SEQ ID NO: 1039804 - DNA, 33 bp, Homo sapien
tggttttagggtggaaccaaacattctgcagga

SEQ ID NO: 1039805 - DNA, 33 bp, Homo sapien
gtcttcgtatcttcatcaaacagtccaagtaac

SEQ ID NO: 1039806 - DNA, 33 bp, Homo sapien
gtcttcgtatcttcatgaaacagtccaagtaac

SEQ ID NO: 1039807 - DNA, 33 bp, Homo sapien
acccccctttttggcaatgcatctcatccaaat

SEQ ID NO: 1039808 - DNA, 33 bp, Homo sapien
acccccctttttggcattgcatctcatccaaat

SEQ ID NO: 1039809 - DNA, 33 bp, Homo sapien
ttcccaatctgccaaacggggaagcccaagtgt

SEQ ID NO: 1039810 - DNA, 33 bp, Homo sapien
ttcccaatctgccaaatggggaagcccaagtgt

SEQ ID NO: 1039811 - DNA, 33 bp, Homo sapien
aacaccatcccctctacgcatacaggccagaag

SEQ ID NO: 1039812 - DNA, 33 bp, Homo sapien
aacaccatcccctctatgcatacaggccagaag

SEQ ID NO: 1039813 - DNA, 33 bp, Homo sapien
ggggcttgaggaaagacagctcgactgaccatc

SEQ ID NO: 1039814 - DNA, 33 bp, Homo sapien
ggggcttgaggaaagatagctcgactgaccatc

SEQ ID NO: 1039815 - DNA, 33 bp, Homo sapien
gtcagagctgtaaaggacctcaaagaacccaac

SEQ ID NO: 1039816 - DNA, 33 bp, Homo sapien
gtcagagctgtaaagggcctcaaagaacccaac

SEQ ID NO: 1039817 - DNA, 33 bp, Homo sapien
ggagctggagttcgcccgacatttggcaaggaa

SEQ ID NO: 1039818 - DNA, 33 bp, Homo sapien
ggagctggagttcgcctgacatttggcaaggaa

SEQ ID NO: 1039819 - DNA, 33 bp, Homo sapien
aggatttgtacccaatcaatcgtcaagaagtgc

SEQ ID NO: 1039820 - DNA, 33 bp, Homo sapien
aggatttgtacccaattaatcgtcaagaagtgc

SEQ ID NO: 1039821 - DNA, 33 bp, Homo sapien
cccaccactcagctcacgcaggggccatgcaga

SEQ ID NO: 1039822 - DNA, 33 bp, Homo sapien
cccaccactcagctcaggcaggggccatgcaga

SEQ ID NO: 1039823 - DNA, 33 bp, Homo sapien
caatatcaacgccctcccagatgtgtccgtggt

SEQ ID NO: 1039824 - DNA, 33 bp, Homo sapien
caatatcaacgccctcgcagatgtgtccgtggt

SEQ ID NO: 1039825 - DNA, 33 bp, Homo sapien
gtgttctagaaatggacgagaaagcaaagtgag

SEQ ID NO: 1039826 - DNA, 33 bp, Homo sapien
gtgttctagaaatggatgagaaagcaaagtgag

SEQ ID NO: 1039827 - DNA, 33 bp, Homo sapien
gctactccaacatcacaagctcattactgcccc

SEQ ID NO: 1039828 - DNA, 33 bp, Homo sapien
gctactccaacatcacgagctcattactgcccc

SEQ ID NO: 1039829 - DNA, 33 bp, Homo sapien
caggtgttccataaaccgctacagagacagcaa

SEQ ID NO: 1039830 - DNA, 33 bp, Homo sapien
caggtgttccataaactgctacagagacagcaa

SEQ ID NO: 1039831 - DNA, 33 bp, Homo sapien
cagcagtcgctcctgaagaagggtgagcaaaag

SEQ ID NO: 1039832 - DNA, 33 bp, Homo sapien
cagcagtcgctcctgaggaagggtgagcaaaag

SEQ ID NO: 1039833 - DNA, 33 bp, Homo sapien
tgttcaccactgtatccccagaacctcaaaatg

SEQ ID NO: 1039834 - DNA, 33 bp, Homo sapien
tgttcaccactgtatctccagaacctcaaaatg

SEQ ID NO: 1039835 - DNA, 33 bp, Homo sapien
agctcagagtcaagcaagcctgggtttgaatcc

SEQ ID NO: 1039836 - DNA, 33 bp, Homo sapien
agctcagagtcaagcaggcctgggtttgaatcc

SEQ ID NO: 1039837 - DNA, 33 bp, Homo sapien
aaaggggtttggagaacgtgtggattttgcatg

SEQ ID NO: 1039838 - DNA, 33 bp, Homo sapien
aaaggggtttggagaatgtgtggattttgcatg

SEQ ID NO: 1039839 - DNA, 33 bp, Homo sapien
ttcacctgttgtccccaagagcccatgcctagc

SEQ ID NO: 1039840 - DNA, 33 bp, Homo sapien
ttcacctgttgtccccgagagcccatgcctagc

SEQ ID NO: 1039841 - DNA, 33 bp, Homo sapien
atatgtactgctttaacggaaaactaattttct

SEQ ID NO: 1039842 - DNA, 33 bp, Homo sapien
atatgtactgctttaatggaaaactaattttct

SEQ ID NO: 1039843 - DNA, 33 bp, Homo sapien
tgggagccactcaaaaccaactcacatgctgcg

SEQ ID NO: 1039844 - DNA, 33 bp, Homo sapien
tgggagccactcaaaatcaactcacatgctgcg

SEQ ID NO: 1039845 - DNA, 33 bp, Homo sapien
actttgagaagagcacagcggggcttcaataag

SEQ ID NO: 1039846 - DNA, 33 bp, Homo sapien
actttgagaagagcacggcggggcttcaataag

SEQ ID NO: 1039847 - DNA, 33 bp, Homo sapien
ctgttacctcctctggaaaatagagatcatatc

SEQ ID NO: 1039848 - DNA, 33 bp, Homo sapien
ctgttacctcctctgggaaatagagatcatatc

SEQ ID NO: 1039849 - DNA, 33 bp, Homo sapien
gcttaggctgactaaaataccaaagacaaggtg

SEQ ID NO: 1039850 - DNA, 33 bp, Homo sapien
gcttaggctgactaaagtaccaaagacaaggtg

SEQ ID NO: 1039851 - DNA, 33 bp, Homo sapien
caatatataccacagacaaagggccagttagct

SEQ ID NO: 1039852 - DNA, 33 bp, Homo sapien
caatatataccacagataaagggccagttagct

SEQ ID NO: 1039853 - DNA, 33 bp, Homo sapien
caaaaaggtacactccaagtacgactccccatg

SEQ ID NO: 1039854 - DNA, 33 bp, Homo sapien
caaaaaggtacactccgagtacgactccccatg

SEQ ID NO: 1039855 - DNA, 33 bp, Homo sapien
caaagtaaataatgccaatcataaataacaaag

SEQ ID NO: 1039856 - DNA, 33 bp, Homo sapien
caaagtaaataatgccgatcataaataacaaag

SEQ ID NO: 1039857 - DNA, 33 bp, Homo sapien
caaaagctctagtgcaaagcaccactcagttcc

SEQ ID NO: 1039858 - DNA, 33 bp, Homo sapien
caaaagctctagtgcagagcaccactcagttcc

SEQ ID NO: 1039859 - DNA, 33 bp, Homo sapien
ctgtcctctaacacccagccagggcagtttcac

SEQ ID NO: 1039860 - DNA, 33 bp, Homo sapien
ctgtcctctaacacccggccagggcagtttcac

SEQ ID NO: 1039861 - DNA, 33 bp, Homo sapien
ttcctgcatgttagaaataactagaagactgct

SEQ ID NO: 1039862 - DNA, 33 bp, Homo sapien
ttcctgcatgttagaagtaactagaagactgct

SEQ ID NO: 1039863 - DNA, 33 bp, Homo sapien
gcaggtgtcaccaacaggctgacggcagagaac

SEQ ID NO: 1039864 - DNA, 33 bp, Homo sapien
gcaggtgtcaccaacatgctgacggcagagaac

SEQ ID NO: 1039865 - DNA, 33 bp, Homo sapien
gcaggttaagtgtgtccccggtatgaaagaggg

SEQ ID NO: 1039866 - DNA, 33 bp, Homo sapien
gcaggttaagtgtgtctccggtatgaaagaggg

SEQ ID NO: 1039867 - DNA, 33 bp, Homo sapien
aggtctgacttggccacgagttggctgcgactg

SEQ ID NO: 1039868 - DNA, 33 bp, Homo sapien
aggtctgacttggccatgagttggctgcgactg

SEQ ID NO: 1039869 - DNA, 33 bp, Homo sapien
tccagatgctgaccaacatgactggtgctgtgt

SEQ ID NO: 1039870 - DNA, 33 bp, Homo sapien
tccagatgctgaccaagatgactggtgctgtgt

SEQ ID NO: 1039871 - DNA, 33 bp, Homo sapien
gtgggttctcagggcaatagtagcataaaaatc

SEQ ID NO: 1039872 - DNA, 33 bp, Homo sapien
gtgggttctcagggcagtagtagcataaaaatc

SEQ ID NO: 1039873 - DNA, 33 bp, Homo sapien
tccctaacacaggctacgtttattgttaatcct

SEQ ID NO: 1039874 - DNA, 33 bp, Homo sapien
tccctaacacaggctatgtttattgttaatcct

SEQ ID NO: 1039875 - DNA, 33 bp, Homo sapien
tgggccctcaccagaacccgagaacaatggcac

SEQ ID NO: 1039876 - DNA, 33 bp, Homo sapien
tgggccctcaccagaatccgagaacaatggcac

SEQ ID NO: 1039877 - DNA, 33 bp, Homo sapien
ctggtgagagacaaggcatcgtgtggcacacag

SEQ ID NO: 1039878 - DNA, 33 bp, Homo sapien
ctggtgagagacaaggtatcgtgtggcacacag

SEQ ID NO: 1039879 - DNA, 33 bp, Homo sapien
cagcagcaaccttgcgaacggagaggttaatgc

SEQ ID NO: 1039880 - DNA, 33 bp, Homo sapien
cagcagcaaccttgcgcacggagaggttaatgc

SEQ ID NO: 1039881 - DNA, 33 bp, Homo sapien
ctaaatcttgggccctaaagcactgcaaagcac

SEQ ID NO: 1039882 - DNA, 33 bp, Homo sapien
ctaaatcttgggccctgaagcactgcaaagcac

SEQ ID NO: 1039883 - DNA, 33 bp, Homo sapien
aaagccattctcaaacagtgttcaaccccttcc

SEQ ID NO: 1039884 - DNA, 33 bp, Homo sapien
aaagccattctcaaacggtgttcaaccccttcc

SEQ ID NO: 1039885 - DNA, 33 bp, Homo sapien
ttactattattcccatcacaatttcactgaaga

SEQ ID NO: 1039886 - DNA, 33 bp, Homo sapien
ttactattattcccattacaatttcactgaaga

SEQ ID NO: 1039887 - DNA, 33 bp, Homo sapien
agcctgttccatcgtcaagtagagacatgcatc

SEQ ID NO: 1039888 - DNA, 33 bp, Homo sapien
agcctgttccatcgtcgagtagagacatgcatc

SEQ ID NO: 1039889 - DNA, 33 bp, Homo sapien
ggtgctgaggccataaagaagccgtttaatttt

SEQ ID NO: 1039890 - DNA, 33 bp, Homo sapien
ggtgctgaggccataaggaagccgtttaatttt

SEQ ID NO: 1039891 - DNA, 33 bp, Homo sapien
ttaccataaaatccccaacatggtgactcgcag

SEQ ID NO: 1039892 - DNA, 33 bp, Homo sapien
ttaccataaaatccccgacatggtgactcgcag

SEQ ID NO: 1039893 - DNA, 33 bp, Homo sapien
ctcaggggccagagaacgttgctgtcttgccca

SEQ ID NO: 1039894 - DNA, 33 bp, Homo sapien
ctcaggggccagagaaggttgctgtcttgccca

SEQ ID NO: 1039895 - DNA, 33 bp, Homo sapien
agggacctaagtaccaactgaatgaatgaaagg

SEQ ID NO: 1039896 - DNA, 33 bp, Homo sapien
agggacctaagtaccatctgaatgaatgaaagg

SEQ ID NO: 1039897 - DNA, 33 bp, Homo sapien
attacaatatgttgtacaaggcattatcttagc

SEQ ID NO: 1039898 - DNA, 33 bp, Homo sapien
attacaatatgttgtataaggcattatcttagc

SEQ ID NO: 1039899 - DNA, 33 bp, Homo sapien
aatgctggttggtagaaagctgacaaagaaatg

SEQ ID NO: 1039900 - DNA, 33 bp, Homo sapien
aatgctggttggtagagagctgacaaagaaatg

SEQ ID NO: 1039901 - DNA, 33 bp, Homo sapien
gagagggcggagctaaagaaggctctacagtag

SEQ ID NO: 1039902 - DNA, 33 bp, Homo sapien
gagagggcggagctaaggaaggctctacagtag

SEQ ID NO: 1039903 - DNA, 33 bp, Homo sapien
ggttttgtcactcaaaatatggtccaatagcag

SEQ ID NO: 1039904 - DNA, 33 bp, Homo sapien
ggttttgtcactcaaagtatggtccaatagcag

SEQ ID NO: 1039905 - DNA, 33 bp, Homo sapien
aaagcagcccagtatacggtgtcactgcttaaa

SEQ ID NO: 1039906 - DNA, 33 bp, Homo sapien
aaagcagcccagtatatggtgtcactgcttaaa

SEQ ID NO: 1039907 - DNA, 33 bp, Homo sapien
ctccaaaacagctccaaaatatatctgagaaat

SEQ ID NO: 1039908 - DNA, 33 bp, Homo sapien
ctccaaaacagctccagaatatatctgagaaat

SEQ ID NO: 1039909 - DNA, 33 bp, Homo sapien
accacacacgtaaatacagtccagtggttgaga

SEQ ID NO: 1039910 - DNA, 33 bp, Homo sapien
accacacacgtaaatagagtccagtggttgaga

SEQ ID NO: 1039911 - DNA, 33 bp, Homo sapien
tctatgttgtccactgaatagaacgttgagatg

SEQ ID NO: 1039912 - DNA, 33 bp, Homo sapien
tctatgttgtccactggatagaacgttgagatg

SEQ ID NO: 1039913 - DNA, 33 bp, Homo sapien
tctcattatgctgacaactggggaccttgatga

SEQ ID NO: 1039914 - DNA, 33 bp, Homo sapien
tctcattatgctgacagctggggaccttgatga

SEQ ID NO: 1039915 - DNA, 33 bp, Homo sapien
aggtaatttacttaggcaagagccaggtgagct

SEQ ID NO: 1039916 - DNA, 33 bp, Homo sapien
aggtaatttacttaggtaagagccaggtgagct

SEQ ID NO: 1039917 - DNA, 33 bp, Homo sapien
gatggatttctaagcaacaggaccattgtggtg

SEQ ID NO: 1039918 - DNA, 33 bp, Homo sapien
gatggatttctaagcaccaggaccattgtggtg

SEQ ID NO: 1039919 - DNA, 33 bp, Homo sapien
atggccgagtatcaccacctctaatgttgaagg

SEQ ID NO: 1039920 - DNA, 33 bp, Homo sapien
atggccgagtatcaccgcctctaatgttgaagg

SEQ ID NO: 1039921 - DNA, 33 bp, Homo sapien
ggtagcacagtctcacacatattagatggttaa

SEQ ID NO: 1039922 - DNA, 33 bp, Homo sapien
ggtagcacagtctcacgcatattagatggttaa

SEQ ID NO: 1039923 - DNA, 33 bp, Homo sapien
tctggaaacagcttaccacaaagagtgacactt

SEQ ID NO: 1039924 - DNA, 33 bp, Homo sapien
tctggaaacagcttactacaaagagtgacactt

SEQ ID NO: 1039925 - DNA, 33 bp, Homo sapien
cacagcacgaaaagagaaaacatcccagcttca

SEQ ID NO: 1039926 - DNA, 33 bp, Homo sapien
cacagcacgaaaagaggaaacatcccagcttca

SEQ ID NO: 1039927 - DNA, 33 bp, Homo sapien
aaagatcttgatcaaaaaagaaaagtacaaaag

SEQ ID NO: 1039928 - DNA, 33 bp, Homo sapien
aaagatcttgatcaaagaagaaaagtacaaaag

SEQ ID NO: 1039929 - DNA, 33 bp, Homo sapien
gcattcaaagccctggaacagcattattgttag

SEQ ID NO: 1039930 - DNA, 33 bp, Homo sapien
gcattcaaagccctgggacagcattattgttag

SEQ ID NO: 1039931 - DNA, 33 bp, Homo sapien
tgcagaaatttaacagacaacagatacaaagtt

SEQ ID NO: 1039932 - DNA, 33 bp, Homo sapien
tgcagaaatttaacaggcaacagatacaaagtt

SEQ ID NO: 1039933 - DNA, 33 bp, Homo sapien
agctttccaagtaccacacaacccctaactgca

SEQ ID NO: 1039934 - DNA, 33 bp, Homo sapien
agctttccaagtaccatacaacccctaactgca

SEQ ID NO: 1039935 - DNA, 33 bp, Homo sapien
tcagaagctggcaatacgacctcatggctggag

SEQ ID NO: 1039936 - DNA, 33 bp, Homo sapien
tcagaagctggcaatatgacctcatggctggag

SEQ ID NO: 1039937 - DNA, 33 bp, Homo sapien
cttctatcaagggaagcccattatgttctatgc

SEQ ID NO: 1039938 - DNA, 33 bp, Homo sapien
cttctatcaagggaaggccattatgttctatgc

SEQ ID NO: 1039939 - DNA, 33 bp, Homo sapien
taattgaagtgatgaaatgcttagaagaaaatg

SEQ ID NO: 1039940 - DNA, 33 bp, Homo sapien
taattgaagtgatgaagtgcttagaagaaaatg

SEQ ID NO: 1039941 - DNA, 33 bp, Homo sapien
actgtaatccctcctacgtatggctgcaacaca

SEQ ID NO: 1039942 - DNA, 33 bp, Homo sapien
actgtaatccctcctatgtatggctgcaacaca

SEQ ID NO: 1039943 - DNA, 33 bp, Homo sapien
aaaattcttccttatacggtctcacattgtggt

SEQ ID NO: 1039944 - DNA, 33 bp, Homo sapien
aaaattcttccttatatggtctcacattgtggt

SEQ ID NO: 1039945 - DNA, 33 bp, Homo sapien
ttaattatgaatagggaagatatactgctaatt

SEQ ID NO: 1039946 - DNA, 33 bp, Homo sapien
ttaattatgaatagggtagatatactgctaatt

SEQ ID NO: 1039947 - DNA, 33 bp, Homo sapien
agttccggagaggaggaaagtcttggccaaggc

SEQ ID NO: 1039948 - DNA, 33 bp, Homo sapien
agttccggagaggagggaagtcttggccaaggc

SEQ ID NO: 1039949 - DNA, 33 bp, Homo sapien
aaagggacacctttcagacactactgataccct

SEQ ID NO: 1039950 - DNA, 33 bp, Homo sapien
aaagggacacctttcatacactactgataccct

SEQ ID NO: 1039951 - DNA, 33 bp, Homo sapien
ttgtctcgtgaacacacgcactaagtggaattc

SEQ ID NO: 1039952 - DNA, 33 bp, Homo sapien
ttgtctcgtgaacacatgcactaagtggaattc

SEQ ID NO: 1039953 - DNA, 33 bp, Homo sapien
ctcgatttgttttataagccaaacacaagggcc

SEQ ID NO: 1039954 - DNA, 33 bp, Homo sapien
ctcgatttgttttataggccaaacacaagggcc

SEQ ID NO: 1039955 - DNA, 33 bp, Homo sapien
cacagatcccagaaaacgcgcaaggcttgtgtg

SEQ ID NO: 1039956 - DNA, 33 bp, Homo sapien
cacagatcccagaaaatgcgcaaggcttgtgtg

SEQ ID NO: 1039957 - DNA, 33 bp, Homo sapien
ttcaattcctaacgtacctctcactgcccatat

SEQ ID NO: 1039958 - DNA, 33 bp, Homo sapien
ttcaattcctaacgtatctctcactgcccatat

SEQ ID NO: 1039959 - DNA, 33 bp, Homo sapien
aggcattcctggaaaactcagtgtacattaaac

SEQ ID NO: 1039960 - DNA, 33 bp, Homo sapien
aggcattcctggaaaattcagtgtacattaaac

SEQ ID NO: 1039961 - DNA, 33 bp, Homo sapien
ttatcccagggctgtccgacactattgaattta

SEQ ID NO: 1039962 - DNA, 33 bp, Homo sapien
ttatcccagggctgtctgacactattgaattta

SEQ ID NO: 1039963 - DNA, 33 bp, Homo sapien
tactatgaaaatttccaagcatattcagaagta

SEQ ID NO: 1039964 - DNA, 33 bp, Homo sapien
tactatgaaaatttcctagcatattcagaagta

SEQ ID NO: 1039965 - DNA, 33 bp, Homo sapien
aatggctttgtgtgcaagtttagaaaaggtcaa

SEQ ID NO: 1039966 - DNA, 33 bp, Homo sapien
aatggctttgtgtgcacgtttagaaaaggtcaa

SEQ ID NO: 1039967 - DNA, 33 bp, Homo sapien
acccaaatgttcatcaatatgttcatggttaag

SEQ ID NO: 1039968 - DNA, 33 bp, Homo sapien
acccaaatgttcatcagtatgttcatggttaag

SEQ ID NO: 1039969 - DNA, 33 bp, Homo sapien
cttggcaacgaggacactgaggctgcaggagcc

SEQ ID NO: 1039970 - DNA, 33 bp, Homo sapien
cttggcaacgaggacattgaggctgcaggagcc

SEQ ID NO: 1039971 - DNA, 33 bp, Homo sapien
gttaaagaatatctcacctaggcatggtggctc

SEQ ID NO: 1039972 - DNA, 33 bp, Homo sapien
gttaaagaatatctcatctaggcatggtggctc

SEQ ID NO: 1039973 - DNA, 33 bp, Homo sapien
gctggaaggaagcagaaaggcctacaacatgtg

SEQ ID NO: 1039974 - DNA, 33 bp, Homo sapien
gctggaaggaagcagagaggcctacaacatgtg

SEQ ID NO: 1039975 - DNA, 33 bp, Homo sapien
atgaccatattaagaaggttggcaatatttagc

SEQ ID NO: 1039976 - DNA, 33 bp, Homo sapien
atgaccatattaagaatgttggcaatatttagc

SEQ ID NO: 1039977 - DNA, 33 bp, Homo sapien
tgacccagcgcttaaacaacaatgggtttctgg

SEQ ID NO: 1039978 - DNA, 33 bp, Homo sapien
tgacccagcgcttaaataacaatgggtttctgg

SEQ ID NO: 1039979 - DNA, 33 bp, Homo sapien
acacccctgatccagacaaaaaagagcacttcc

SEQ ID NO: 1039980 - DNA, 33 bp, Homo sapien
acacccctgatccagataaaaaagagcacttcc

SEQ ID NO: 1039981 - DNA, 33 bp, Homo sapien
agacttcctaggctacaatgtcaagggaagaga

SEQ ID NO: 1039982 - DNA, 33 bp, Homo sapien
agacttcctaggctaccatgtcaagggaagaga

SEQ ID NO: 1039983 - DNA, 33 bp, Homo sapien
ctcatattccagaggccctggctaaagatttaa

SEQ ID NO: 1039984 - DNA, 33 bp, Homo sapien
ctcatattccagaggctctggctaaagatttaa

SEQ ID NO: 1039985 - DNA, 33 bp, Homo sapien
gctgctgaaacaaataagccttgaaatctcaat

SEQ ID NO: 1039986 - DNA, 33 bp, Homo sapien
gctgctgaaacaaataggccttgaaatctcaat

SEQ ID NO: 1039987 - DNA, 33 bp, Homo sapien
agctttagctcttacacgtaggtggatcatcca

SEQ ID NO: 1039988 - DNA, 33 bp, Homo sapien
agctttagctcttacatgtaggtggatcatcca

SEQ ID NO: 1039989 - DNA, 33 bp, Homo sapien
cgggcaccacctcttcagaacctaagccctttc

SEQ ID NO: 1039990 - DNA, 33 bp, Homo sapien
cgggcaccacctcttcggaacctaagccctttc

SEQ ID NO: 1039991 - DNA, 33 bp, Homo sapien
taatctcctctggccaagcgcagcagctcaagc

SEQ ID NO: 1039992 - DNA, 33 bp, Homo sapien
taatctcctctggccaggcgcagcagctcaagc

SEQ ID NO: 1039993 - DNA, 33 bp, Homo sapien
tagcatctgatggaaggccaaccccttcaaaat

SEQ ID NO: 1039994 - DNA, 33 bp, Homo sapien
tagcatctgatggaagtccaaccccttcaaaat

SEQ ID NO: 1039995 - DNA, 33 bp, Homo sapien
cactttgatttctagcaaggaaagagccaggag

SEQ ID NO: 1039996 - DNA, 33 bp, Homo sapien
cactttgatttctagcgaggaaagagccaggag

SEQ ID NO: 1039997 - DNA, 33 bp, Homo sapien
gcttaagagcccatgcagactaactctcccttg

SEQ ID NO: 1039998 - DNA, 33 bp, Homo sapien
gcttaagagcccatgcggactaactctcccttg

SEQ ID NO: 1039999 - DNA, 33 bp, Homo sapien
attttgccataaccacacttacagattagttca

SEQ ID NO: 1040000 - DNA, 33 bp, Homo sapien
attttgccataaccacgcttacagattagttca

SEQ ID NO: 1040001 - DNA, 33 bp, Homo sapien
aagtgggcatgaaatacagaatccttgagcaca

SEQ ID NO: 1040002 - DNA, 33 bp, Homo sapien
aagtgggcatgaaatatagaatccttgagcaca

SEQ ID NO: 1040003 - DNA, 33 bp, Homo sapien
tcttctcacatttatgaacattgcactatgaac

SEQ ID NO: 1040004 - DNA, 33 bp, Homo sapien
tcttctcacatttatgcacattgcactatgaac

SEQ ID NO: 1040005 - DNA, 33 bp, Homo sapien
agacaggcatttttcagatctgactcctgggcc

SEQ ID NO: 1040006 - DNA, 33 bp, Homo sapien
agacaggcatttttcatatctgactcctgggcc

SEQ ID NO: 1040007 - DNA, 33 bp, Homo sapien
tcctgtcactggaaccaccagggaaaatttagg

SEQ ID NO: 1040008 - DNA, 33 bp, Homo sapien
tcctgtcactggaaccgccagggaaaatttagg

SEQ ID NO: 1040009 - DNA, 33 bp, Homo sapien
aaacaaagcatttccaatatggtagaacctcct

SEQ ID NO: 1040010 - DNA, 33 bp, Homo sapien
aaacaaagcatttccagtatggtagaacctcct

SEQ ID NO: 1040011 - DNA, 33 bp, Homo sapien
ttatattagggaccaacttagtgaccttattta

SEQ ID NO: 1040012 - DNA, 33 bp, Homo sapien
ttatattagggaccaatttagtgaccttattta

SEQ ID NO: 1040013 - DNA, 33 bp, Homo sapien
agatatcgtgtccatacgaaggatccagcaatc

SEQ ID NO: 1040014 - DNA, 33 bp, Homo sapien
agatatcgtgtccatatgaaggatccagcaatc

SEQ ID NO: 1040015 - DNA, 33 bp, Homo sapien
agtgtcagagctgagacgcaggctggctccacc

SEQ ID NO: 1040016 - DNA, 33 bp, Homo sapien
agtgtcagagctgagatgcaggctggctccacc

SEQ ID NO: 1040017 - DNA, 33 bp, Homo sapien
cagcaaaacagatacacagtcatcataagtggg

SEQ ID NO: 1040018 - DNA, 33 bp, Homo sapien
cagcaaaacagatacatagtcatcataagtggg

SEQ ID NO: 1040019 - DNA, 33 bp, Homo sapien
aatggataaacctaccacgcacagggaactttt

SEQ ID NO: 1040020 - DNA, 33 bp, Homo sapien
aatggataaacctaccgcgcacagggaactttt

SEQ ID NO: 1040021 - DNA, 33 bp, Homo sapien
caatatatcttcattacataccttcacattgtt

SEQ ID NO: 1040022 - DNA, 33 bp, Homo sapien
caatatatcttcattatataccttcacattgtt

SEQ ID NO: 1040023 - DNA, 33 bp, Homo sapien
gcaatttgtgcggtgaagataaaggaagtccag

SEQ ID NO: 1040024 - DNA, 33 bp, Homo sapien
gcaatttgtgcggtgaggataaaggaagtccag

SEQ ID NO: 1040025 - DNA, 33 bp, Homo sapien
tgaactagaaatcctaccaattcttcccgtttc

SEQ ID NO: 1040026 - DNA, 33 bp, Homo sapien
tgaactagaaatcctatcaattcttcccgtttc

SEQ ID NO: 1040027 - DNA, 33 bp, Homo sapien
aggtcttgggtatagggagaatccagagctatg

SEQ ID NO: 1040028 - DNA, 33 bp, Homo sapien
aggtcttgggtataggtagaatccagagctatg

SEQ ID NO: 1040029 - DNA, 33 bp, Homo sapien
gtgtgtgtttgaacatcaaaaatgggaagcaat

SEQ ID NO: 1040030 - DNA, 33 bp, Homo sapien
gtgtgtgtttgaacattaaaaatgggaagcaat

SEQ ID NO: 1040031 - DNA, 33 bp, Homo sapien
tttcatttcctccatactagttgcagtcctacc

SEQ ID NO: 1040032 - DNA, 33 bp, Homo sapien
tttcatttcctccatagtagttgcagtcctacc

SEQ ID NO: 1040033 - DNA, 33 bp, Homo sapien
gatctgaccaaatccaataccatgcttctagtc

SEQ ID NO: 1040034 - DNA, 33 bp, Homo sapien
gatctgaccaaatccagtaccatgcttctagtc

SEQ ID NO: 1040035 - DNA, 33 bp, Homo sapien
tctactgactgtggaacatagccagctgactgg

SEQ ID NO: 1040036 - DNA, 33 bp, Homo sapien
tctactgactgtggaagatagccagctgactgg

SEQ ID NO: 1040037 - DNA, 33 bp, Homo sapien
tgtctcatgaatgttcacacagaaggagttggt

SEQ ID NO: 1040038 - DNA, 33 bp, Homo sapien
tgtctcatgaatgttcgcacagaaggagttggt

SEQ ID NO: 1040039 - DNA, 33 bp, Homo sapien
gtaaataatggatagcaagactgggataagtta

SEQ ID NO: 1040040 - DNA, 33 bp, Homo sapien
gtaaataatggatagcgagactgggataagtta

SEQ ID NO: 1040041 - DNA, 33 bp, Homo sapien
atgagtctattgaataacagttaggagcaatag

SEQ ID NO: 1040042 - DNA, 33 bp, Homo sapien
atgagtctattgaataccagttaggagcaatag

SEQ ID NO: 1040043 - DNA, 33 bp, Homo sapien
attgatggaggcaacacgtataagggagagata

SEQ ID NO: 1040044 - DNA, 33 bp, Homo sapien
attgatggaggcaacatgtataagggagagata

SEQ ID NO: 1040045 - DNA, 33 bp, Homo sapien
tgggattaagcctcaagatatcaattttttttt

SEQ ID NO: 1040046 - DNA, 33 bp, Homo sapien
tgggattaagcctcaatatatcaattttttttt

SEQ ID NO: 1040047 - DNA, 33 bp, Homo sapien
aggtggacctgacttgaaatctcaactccatgc

SEQ ID NO: 1040048 - DNA, 33 bp, Homo sapien
aggtggacctgacttggaatctcaactccatgc

SEQ ID NO: 1040049 - DNA, 33 bp, Homo sapien
tctcagcagtggaacaagctatccaggaggcaa

SEQ ID NO: 1040050 - DNA, 33 bp, Homo sapien
tctcagcagtggaacacgctatccaggaggcaa

SEQ ID NO: 1040051 - DNA, 33 bp, Homo sapien
aagttgcatatcaacacatttgtcctgttttta

SEQ ID NO: 1040052 - DNA, 33 bp, Homo sapien
aagttgcatatcaacatatttgtcctgttttta

SEQ ID NO: 1040053 - DNA, 33 bp, Homo sapien
gtccttctctgaatgtaacacaaccatgcttat

SEQ ID NO: 1040054 - DNA, 33 bp, Homo sapien
gtccttctctgaatgtgacacaaccatgcttat

SEQ ID NO: 1040055 - DNA, 33 bp, Homo sapien
tatcttgaacaaaggcacagaggaagtggatgc

SEQ ID NO: 1040056 - DNA, 33 bp, Homo sapien
tatcttgaacaaaggcgcagaggaagtggatgc

SEQ ID NO: 1040057 - DNA, 33 bp, Homo sapien
tgtgtacaatgtttaacaagagagaaagtttta

SEQ ID NO: 1040058 - DNA, 33 bp, Homo sapien
tgtgtacaatgtttaataagagagaaagtttta

SEQ ID NO: 1040059 - DNA, 33 bp, Homo sapien
atggagaaagatgaagaaagtttgaagaacagt

SEQ ID NO: 1040060 - DNA, 33 bp, Homo sapien
atggagaaagatgaaggaagtttgaagaacagt

SEQ ID NO: 1040061 - DNA, 33 bp, Homo sapien
ttcgtaatgacacaaagatgttatctggctttt

SEQ ID NO: 1040062 - DNA, 33 bp, Homo sapien
ttcgtaatgacacaaatatgttatctggctttt

SEQ ID NO: 1040063 - DNA, 33 bp, Homo sapien
tcattaacctcctaacagtgaagaaagagctca

SEQ ID NO: 1040064 - DNA, 33 bp, Homo sapien
tcattaacctcctaaccgtgaagaaagagctca

SEQ ID NO: 1040065 - DNA, 33 bp, Homo sapien
aactctcctcttgggcactgaattccatcccat

SEQ ID NO: 1040066 - DNA, 33 bp, Homo sapien
aactctcctcttgggcgctgaattccatcccat

SEQ ID NO: 1040067 - DNA, 33 bp, Homo sapien
catggtaagaaattagaacaaactggagatggg

SEQ ID NO: 1040068 - DNA, 33 bp, Homo sapien
catggtaagaaattaggacaaactggagatggg

SEQ ID NO: 1040069 - DNA, 33 bp, Homo sapien
ataacagtaagacttgcaatttgctcattttct

SEQ ID NO: 1040070 - DNA, 33 bp, Homo sapien
ataacagtaagacttgtaatttgctcattttct

SEQ ID NO: 1040071 - DNA, 33 bp, Homo sapien
gagtggttgattgaagaaaaacatctaagaaca

SEQ ID NO: 1040072 - DNA, 33 bp, Homo sapien
gagtggttgattgaaggaaaacatctaagaaca

SEQ ID NO: 1040073 - DNA, 33 bp, Homo sapien
ttgggctgggctgtgactacccagtgctaaata

SEQ ID NO: 1040074 - DNA, 33 bp, Homo sapien
ttgggctgggctgtgattacccagtgctaaata

SEQ ID NO: 1040075 - DNA, 33 bp, Homo sapien
actgacctcaccattacgtacaaaccaacccca

SEQ ID NO: 1040076 - DNA, 33 bp, Homo sapien
actgacctcaccattatgtacaaaccaacccca

SEQ ID NO: 1040077 - DNA, 33 bp, Homo sapien
gacccagaagaagaaaggtcatgttgccaacga

SEQ ID NO: 1040078 - DNA, 33 bp, Homo sapien
gacccagaagaagaaatgtcatgttgccaacga

SEQ ID NO: 1040079 - DNA, 33 bp, Homo sapien
cactaactgcataggaaaaatgaatcttgctta

SEQ ID NO: 1040080 - DNA, 33 bp, Homo sapien
cactaactgcataggacaaatgaatcttgctta

SEQ ID NO: 1040081 - DNA, 33 bp, Homo sapien
tttaatttctcataccagaagccgggcttagtc

SEQ ID NO: 1040082 - DNA, 33 bp, Homo sapien
tttaatttctcataccggaagccgggcttagtc

SEQ ID NO: 1040083 - DNA, 33 bp, Homo sapien
gcaagacagttaacaacgtaggtaaagaaatag

SEQ ID NO: 1040084 - DNA, 33 bp, Homo sapien
gcaagacagttaacaatgtaggtaaagaaatag

SEQ ID NO: 1040085 - DNA, 33 bp, Homo sapien
ggcagtcctccttctccaggttacatgaggcag

SEQ ID NO: 1040086 - DNA, 33 bp, Homo sapien
ggcagtcctccttctctaggttacatgaggcag

SEQ ID NO: 1040087 - DNA, 33 bp, Homo sapien
attgcaacgaggtttaaagggaaagcatggaag

SEQ ID NO: 1040088 - DNA, 33 bp, Homo sapien
attgcaacgaggtttagagggaaagcatggaag

SEQ ID NO: 1040089 - DNA, 33 bp, Homo sapien
acttcttgaatggagcccttttcaggatacata

SEQ ID NO: 1040090 - DNA, 33 bp, Homo sapien
acttcttgaatggagctcttttcaggatacata

SEQ ID NO: 1040091 - DNA, 33 bp, Homo sapien
taggcagccaacggcccattcaatggagcagcc

SEQ ID NO: 1040092 - DNA, 33 bp, Homo sapien
taggcagccaacggcctattcaatggagcagcc

SEQ ID NO: 1040093 - DNA, 33 bp, Homo sapien
caatgcagtgagcaaacatcccagggtgtggct

SEQ ID NO: 1040094 - DNA, 33 bp, Homo sapien
caatgcagtgagcaaatatcccagggtgtggct

SEQ ID NO: 1040095 - DNA, 33 bp, Homo sapien
ctgtttgcatggaagccctttctgactcctttc

SEQ ID NO: 1040096 - DNA, 33 bp, Homo sapien
ctgtttgcatggaagcgctttctgactcctttc

SEQ ID NO: 1040097 - DNA, 33 bp, Homo sapien
aagagccctggattagaagtcagaagccctgtg

SEQ ID NO: 1040098 - DNA, 33 bp, Homo sapien
aagagccctggattaggagtcagaagccctgtg

SEQ ID NO: 1040099 - DNA, 33 bp, Homo sapien
actcttgtgccactaccctggtgcctacattaa

SEQ ID NO: 1040100 - DNA, 33 bp, Homo sapien
actcttgtgccactactctggtgcctacattaa

SEQ ID NO: 1040101 - DNA, 33 bp, Homo sapien
aaacggaactagatgacaaaaagatttgataga

SEQ ID NO: 1040102 - DNA, 33 bp, Homo sapien
aaacggaactagatgataaaaagatttgataga

SEQ ID NO: 1040103 - DNA, 33 bp, Homo sapien
atgccacagagcaaaggagaagtcatttctgct

SEQ ID NO: 1040104 - DNA, 33 bp, Homo sapien
atgccacagagcaaagtagaagtcatttctgct

SEQ ID NO: 1040105 - DNA, 33 bp, Homo sapien
accacgaaaagtaggcactatgaagtaagaaac

SEQ ID NO: 1040106 - DNA, 33 bp, Homo sapien
accacgaaaagtaggcgctatgaagtaagaaac

SEQ ID NO: 1040107 - DNA, 33 bp, Homo sapien
gcatatattgctcatgaattttttgatgaagtt

SEQ ID NO: 1040108 - DNA, 33 bp, Homo sapien
gcatatattgctcatgtattttttgatgaagtt

SEQ ID NO: 1040109 - DNA, 33 bp, Homo sapien
tacagtgtgtacccaacgattgcttagtattgt

SEQ ID NO: 1040110 - DNA, 33 bp, Homo sapien
tacagtgtgtacccaatgattgcttagtattgt

SEQ ID NO: 1040111 - DNA, 33 bp, Homo sapien
gggggaaaaagggcacacaaatggagatatttc

SEQ ID NO: 1040112 - DNA, 33 bp, Homo sapien
gggggaaaaagggcacgcaaatggagatatttc

SEQ ID NO: 1040113 - DNA, 33 bp, Homo sapien
aatattttagacttcgccagctgtgaggtctct

SEQ ID NO: 1040114 - DNA, 33 bp, Homo sapien
aatattttagacttcggcagctgtgaggtctct

SEQ ID NO: 1040115 - DNA, 33 bp, Homo sapien
atcactgtaaaatgaactggtgctctatgctgt

SEQ ID NO: 1040116 - DNA, 33 bp, Homo sapien
atcactgtaaaatgaattggtgctctatgctgt

SEQ ID NO: 1040117 - DNA, 33 bp, Homo sapien
ttcagctgatcgtaaccacttcagatcctttaa

SEQ ID NO: 1040118 - DNA, 33 bp, Homo sapien
ttcagctgatcgtaacgacttcagatcctttaa

SEQ ID NO: 1040119 - DNA, 33 bp, Homo sapien
ggtagggtattttgatcaaagcaatttcataaa

SEQ ID NO: 1040120 - DNA, 33 bp, Homo sapien
ggtagggtattttgatgaaagcaatttcataaa

SEQ ID NO: 1040121 - DNA, 33 bp, Homo sapien
agatgctatgaaccgacgagagcttttgagaaa

SEQ ID NO: 1040122 - DNA, 33 bp, Homo sapien
agatgctatgaaccgatgagagcttttgagaaa

SEQ ID NO: 1040123 - DNA, 33 bp, Homo sapien
attgtatttgtaaccaatggaaaatatacctgg

SEQ ID NO: 1040124 - DNA, 33 bp, Homo sapien
attgtatttgtaaccagtggaaaatatacctgg

SEQ ID NO: 1040125 - DNA, 33 bp, Homo sapien
aaggcagaacttctgacaagggtctaggttcag

SEQ ID NO: 1040126 - DNA, 33 bp, Homo sapien
aaggcagaacttctgataagggtctaggttcag

SEQ ID NO: 1040127 - DNA, 33 bp, Homo sapien
ttatggtattttatgaagtggctttactgattt

SEQ ID NO: 1040128 - DNA, 33 bp, Homo sapien
ttatggtattttatgatgtggctttactgattt

SEQ ID NO: 1040129 - DNA, 33 bp, Homo sapien
tcaatatttagcctcaatccatatgcacacagc

SEQ ID NO: 1040130 - DNA, 33 bp, Homo sapien
tcaatatttagcctcattccatatgcacacagc

SEQ ID NO: 1040131 - DNA, 33 bp, Homo sapien
aagttgaagaagacaacgttaacaaatagatga

SEQ ID NO: 1040132 - DNA, 33 bp, Homo sapien
aagttgaagaagacaatgttaacaaatagatga

SEQ ID NO: 1040133 - DNA, 33 bp, Homo sapien
catccataggtgtaaactaagggagagatgcta

SEQ ID NO: 1040134 - DNA, 33 bp, Homo sapien
catccataggtgtaaagtaagggagagatgcta

SEQ ID NO: 1040135 - DNA, 33 bp, Homo sapien
gtgtaactctgtaaccaattatcccaagtagtc

SEQ ID NO: 1040136 - DNA, 33 bp, Homo sapien
gtgtaactctgtaaccgattatcccaagtagtc

SEQ ID NO: 1040137 - DNA, 33 bp, Homo sapien
atggattggcttcaggaaaattgaaggaccttc

SEQ ID NO: 1040138 - DNA, 33 bp, Homo sapien
atggattggcttcaggtaaattgaaggaccttc

SEQ ID NO: 1040139 - DNA, 33 bp, Homo sapien
caaatgctttactacaatattgaccataaaaca

SEQ ID NO: 1040140 - DNA, 33 bp, Homo sapien
caaatgctttactacagtattgaccataaaaca

SEQ ID NO: 1040141 - DNA, 33 bp, Homo sapien
gttgttaggagctttacgtttgtatttatattt

SEQ ID NO: 1040142 - DNA, 33 bp, Homo sapien
gttgttaggagctttatgtttgtatttatattt

SEQ ID NO: 1040143 - DNA, 33 bp, Homo sapien
ggctcgaagagggtagcaaaggtgatcaagggt

SEQ ID NO: 1040144 - DNA, 33 bp, Homo sapien
ggctcgaagagggtaggaaaggtgatcaagggt

SEQ ID NO: 1040145 - DNA, 33 bp, Homo sapien
gacatgatacatccacaataaacactgcacatt

SEQ ID NO: 1040146 - DNA, 33 bp, Homo sapien
gacatgatacatccaccataaacactgcacatt

SEQ ID NO: 1040147 - DNA, 33 bp, Homo sapien
gttacaaactagaatacgggacggttccatcct

SEQ ID NO: 1040148 - DNA, 33 bp, Homo sapien
gttacaaactagaatatgggacggttccatcct

SEQ ID NO: 1040149 - DNA, 33 bp, Homo sapien
aagccacttcacaggacgctgcagtaatatcag

SEQ ID NO: 1040150 - DNA, 33 bp, Homo sapien
aagccacttcacaggatgctgcagtaatatcag

SEQ ID NO: 1040151 - DNA, 33 bp, Homo sapien
agtcaagcctgctttcccctctgactttagtcc

SEQ ID NO: 1040152 - DNA, 33 bp, Homo sapien
agtcaagcctgctttctcctctgactttagtcc

SEQ ID NO: 1040153 - DNA, 33 bp, Homo sapien
caatgactgacccccaagatataagcttgatgg

SEQ ID NO: 1040154 - DNA, 33 bp, Homo sapien
caatgactgacccccaggatataagcttgatgg

SEQ ID NO: 1040155 - DNA, 33 bp, Homo sapien
cttgggcaatgttgagaataaagtcaagggcct

SEQ ID NO: 1040156 - DNA, 33 bp, Homo sapien
cttgggcaatgttgaggataaagtcaagggcct

SEQ ID NO: 1040157 - DNA, 33 bp, Homo sapien
ttgtttccagcagtgaaaaaggcagactggctg

SEQ ID NO: 1040158 - DNA, 33 bp, Homo sapien
ttgtttccagcagtgacaaaggcagactggctg

SEQ ID NO: 1040159 - DNA, 33 bp, Homo sapien
ctgtggcccagcaccacgcagggtatagccata

SEQ ID NO: 1040160 - DNA, 33 bp, Homo sapien
ctgtggcccagcaccatgcagggtatagccata

SEQ ID NO: 1040161 - DNA, 33 bp, Homo sapien
ctgtgtacttcaaggccaccctattttcattgc

SEQ ID NO: 1040162 - DNA, 33 bp, Homo sapien
ctgtgtacttcaaggctaccctattttcattgc

SEQ ID NO: 1040163 - DNA, 33 bp, Homo sapien
ccctgtgcaggaattaagatgtggtttttcatg

SEQ ID NO: 1040164 - DNA, 33 bp, Homo sapien
ccctgtgcaggaattaggatgtggtttttcatg

SEQ ID NO: 1040165 - DNA, 33 bp, Homo sapien
ctcactggaatcccaaagactttataaaaatgc

SEQ ID NO: 1040166 - DNA, 33 bp, Homo sapien
ctcactggaatcccaaggactttataaaaatgc

SEQ ID NO: 1040167 - DNA, 33 bp, Homo sapien
agtcccacacccagaacctttcaattgtcacct

SEQ ID NO: 1040168 - DNA, 33 bp, Homo sapien
agtcccacacccagaatctttcaattgtcacct

SEQ ID NO: 1040169 - DNA, 33 bp, Homo sapien
tcagttttctcatctacacaatggaaccagcac

SEQ ID NO: 1040170 - DNA, 33 bp, Homo sapien
tcagttttctcatctatacaatggaaccagcac

SEQ ID NO: 1040171 - DNA, 33 bp, Homo sapien
gccagcttagtttgggaagtcatgcatcagtgc

SEQ ID NO: 1040172 - DNA, 33 bp, Homo sapien
gccagcttagtttgggcagtcatgcatcagtgc

SEQ ID NO: 1040173 - DNA, 33 bp, Homo sapien
aaagtctgaaattttaagccaggtacagtggct

SEQ ID NO: 1040174 - DNA, 33 bp, Homo sapien
aaagtctgaaattttaggccaggtacagtggct

SEQ ID NO: 1040175 - DNA, 33 bp, Homo sapien
agtccaggaaatggaggcccaacaaggttaagg

SEQ ID NO: 1040176 - DNA, 33 bp, Homo sapien
agtccaggaaatggagtcccaacaaggttaagg

SEQ ID NO: 1040177 - DNA, 33 bp, Homo sapien
gtggtatttggacaatgaagctctttcaggctc

SEQ ID NO: 1040178 - DNA, 33 bp, Homo sapien
gtggtatttggacaattaagctctttcaggctc

SEQ ID NO: 1040179 - DNA, 33 bp, Homo sapien
tgttatgagtatcaaaattagagagcttcataa

SEQ ID NO: 1040180 - DNA, 33 bp, Homo sapien
tgttatgagtatcaaagttagagagcttcataa

SEQ ID NO: 1040181 - DNA, 33 bp, Homo sapien
tggtagattggagtaacgtgaagggtattaagg

SEQ ID NO: 1040182 - DNA, 33 bp, Homo sapien
tggtagattggagtaatgtgaagggtattaagg

SEQ ID NO: 1040183 - DNA, 33 bp, Homo sapien
gaagatggcttccattaaaaattcccagtgaat

SEQ ID NO: 1040184 - DNA, 33 bp, Homo sapien
gaagatggcttccattcaaaattcccagtgaat

SEQ ID NO: 1040185 - DNA, 33 bp, Homo sapien
tctgttaaagtctagacattcagttttgagagc

SEQ ID NO: 1040186 - DNA, 33 bp, Homo sapien
tctgttaaagtctagatattcagttttgagagc

SEQ ID NO: 1040187 - DNA, 33 bp, Homo sapien
ttgtttctcatggctcaaaccgattttcaacaa

SEQ ID NO: 1040188 - DNA, 33 bp, Homo sapien
ttgtttctcatggctccaaccgattttcaacaa

SEQ ID NO: 1040189 - DNA, 33 bp, Homo sapien
tttcttgctaaagagacagtactagcttttcaa

SEQ ID NO: 1040190 - DNA, 33 bp, Homo sapien
tttcttgctaaagagagagtactagcttttcaa

SEQ ID NO: 1040191 - DNA, 33 bp, Homo sapien
agcaaaagactctcagaagtaaataatctgtgt

SEQ ID NO: 1040192 - DNA, 33 bp, Homo sapien
agcaaaagactctcagcagtaaataatctgtgt

SEQ ID NO: 1040193 - DNA, 33 bp, Homo sapien
attcatcattcaaaaaagatgtagaatcagcca

SEQ ID NO: 1040194 - DNA, 33 bp, Homo sapien
attcatcattcaaaaacgatgtagaatcagcca

SEQ ID NO: 1040195 - DNA, 33 bp, Homo sapien
gggtaagagatacagcaatggttacaagtgcag

SEQ ID NO: 1040196 - DNA, 33 bp, Homo sapien
gggtaagagatacagcgatggttacaagtgcag

SEQ ID NO: 1040197 - DNA, 33 bp, Homo sapien
catcatacttgttcacacctgagacagcataca

SEQ ID NO: 1040198 - DNA, 33 bp, Homo sapien
catcatacttgttcacgcctgagacagcataca

SEQ ID NO: 1040199 - DNA, 33 bp, Homo sapien
tttagacataaagtacaagcagaaaaaggtgga

SEQ ID NO: 1040200 - DNA, 33 bp, Homo sapien
tttagacataaagtacgagcagaaaaaggtgga

SEQ ID NO: 1040201 - DNA, 33 bp, Homo sapien
tgagttagagattcacactgtctgtcaacaaca

SEQ ID NO: 1040202 - DNA, 33 bp, Homo sapien
tgagttagagattcacgctgtctgtcaacaaca

SEQ ID NO: 1040203 - DNA, 33 bp, Homo sapien
gtgggagcaggctcagaaagcttaaggaacagt

SEQ ID NO: 1040204 - DNA, 33 bp, Homo sapien
gtgggagcaggctcagcaagcttaaggaacagt

SEQ ID NO: 1040205 - DNA, 33 bp, Homo sapien
caactggaataacatcccttgccataacacctt

SEQ ID NO: 1040206 - DNA, 33 bp, Homo sapien
caactggaataacatctcttgccataacacctt

SEQ ID NO: 1040207 - DNA, 33 bp, Homo sapien
actatgagcaggcacaaatgagtccacataaca

SEQ ID NO: 1040208 - DNA, 33 bp, Homo sapien
actatgagcaggcacagatgagtccacataaca

SEQ ID NO: 1040209 - DNA, 33 bp, Homo sapien
atgtcctcctgacagccgagaaaggcagacaca

SEQ ID NO: 1040210 - DNA, 33 bp, Homo sapien
atgtcctcctgacagctgagaaaggcagacaca

SEQ ID NO: 1040211 - DNA, 33 bp, Homo sapien
ctgctttaaatctgagcagcattttatggaatg

SEQ ID NO: 1040212 - DNA, 33 bp, Homo sapien
ctgctttaaatctgagtagcattttatggaatg

SEQ ID NO: 1040213 - DNA, 33 bp, Homo sapien
tataattaccttcatacctaaaaagcaagctct

SEQ ID NO: 1040214 - DNA, 33 bp, Homo sapien
tataattaccttcatatctaaaaagcaagctct

SEQ ID NO: 1040215 - DNA, 33 bp, Homo sapien
taccaacttgagccaaacttccacaaaaaactt

SEQ ID NO: 1040216 - DNA, 33 bp, Homo sapien
taccaacttgagccaaccttccacaaaaaactt

SEQ ID NO: 1040217 - DNA, 33 bp, Homo sapien
ttccaaagcagcaaaactccttgaaataggatg

SEQ ID NO: 1040218 - DNA, 33 bp, Homo sapien
ttccaaagcagcaaaattccttgaaataggatg

SEQ ID NO: 1040219 - DNA, 33 bp, Homo sapien
ggtaggtatgtggatacgaccttcttagttaaa

SEQ ID NO: 1040220 - DNA, 33 bp, Homo sapien
ggtaggtatgtggataggaccttcttagttaaa

SEQ ID NO: 1040221 - DNA, 33 bp, Homo sapien
catactctttcccccaacgatgcaacatttggt

SEQ ID NO: 1040222 - DNA, 33 bp, Homo sapien
catactctttcccccagcgatgcaacatttggt

SEQ ID NO: 1040223 - DNA, 33 bp, Homo sapien
ctttaatatttagtcccccattctccaaatacc

SEQ ID NO: 1040224 - DNA, 33 bp, Homo sapien
ctttaatatttagtcctccattctccaaatacc

SEQ ID NO: 1040225 - DNA, 33 bp, Homo sapien
gtacaccttggcttaaatattctccaaaaagga

SEQ ID NO: 1040226 - DNA, 33 bp, Homo sapien
gtacaccttggcttaagtattctccaaaaagga

SEQ ID NO: 1040227 - DNA, 33 bp, Homo sapien
aaaagcagatcgcgaacggaaaatcccttccat

SEQ ID NO: 1040228 - DNA, 33 bp, Homo sapien
aaaagcagatcgcgaatggaaaatcccttccat

SEQ ID NO: 1040229 - DNA, 33 bp, Homo sapien
tgcaaccatgagggatcagatgccaagaggtat

SEQ ID NO: 1040230 - DNA, 33 bp, Homo sapien
tgcaaccatgagggattagatgccaagaggtat

SEQ ID NO: 1040231 - DNA, 33 bp, Homo sapien
cacctgaggcaaaccacgacattcctctggtct

SEQ ID NO: 1040232 - DNA, 33 bp, Homo sapien
cacctgaggcaaaccatgacattcctctggtct

SEQ ID NO: 1040233 - DNA, 33 bp, Homo sapien
tcaaccaatgctctccactctgctgtgctgacc

SEQ ID NO: 1040234 - DNA, 33 bp, Homo sapien
tcaaccaatgctctccgctctgctgtgctgacc

SEQ ID NO: 1040235 - DNA, 33 bp, Homo sapien
gcaagcaacggcataaacatttgactaagtatt

SEQ ID NO: 1040236 - DNA, 33 bp, Homo sapien
gcaagcaacggcataagcatttgactaagtatt

SEQ ID NO: 1040237 - DNA, 33 bp, Homo sapien
caaacctccaaactccaacagccaaaatgcctg

SEQ ID NO: 1040238 - DNA, 33 bp, Homo sapien
caaacctccaaactccgacagccaaaatgcctg

SEQ ID NO: 1040239 - DNA, 33 bp, Homo sapien
ggaaccagttgcatgccccattcctctctggcc

SEQ ID NO: 1040240 - DNA, 33 bp, Homo sapien
ggaaccagttgcatgctccattcctctctggcc

SEQ ID NO: 1040241 - DNA, 33 bp, Homo sapien
tattcaataatctagaagtcttacatggcctag

SEQ ID NO: 1040242 - DNA, 33 bp, Homo sapien
tattcaataatctagaggtcttacatggcctag

SEQ ID NO: 1040243 - DNA, 33 bp, Homo sapien
atattctaccagattacccttcccaaactactt

SEQ ID NO: 1040244 - DNA, 33 bp, Homo sapien
atattctaccagattatccttcccaaactactt

SEQ ID NO: 1040245 - DNA, 33 bp, Homo sapien
gggctaaatatggaggaatgatttatggatcag

SEQ ID NO: 1040246 - DNA, 33 bp, Homo sapien
gggctaaatatggagggatgatttatggatcag

SEQ ID NO: 1040247 - DNA, 33 bp, Homo sapien
ggagcatacagagctaaataaaggcataaattt

SEQ ID NO: 1040248 - DNA, 33 bp, Homo sapien
ggagcatacagagctagataaaggcataaattt

SEQ ID NO: 1040249 - DNA, 33 bp, Homo sapien
tcaacagtgttgtatcaaaggagtcagagcatt

SEQ ID NO: 1040250 - DNA, 33 bp, Homo sapien
tcaacagtgttgtatccaaggagtcagagcatt

SEQ ID NO: 1040251 - DNA, 33 bp, Homo sapien
gaatcagtggataagcagattcaagttaaaact

SEQ ID NO: 1040252 - DNA, 33 bp, Homo sapien
gaatcagtggataagccgattcaagttaaaact

SEQ ID NO: 1040253 - DNA, 33 bp, Homo sapien
tcaagttaaaactgaaacaacagtaggtagatg

SEQ ID NO: 1040254 - DNA, 33 bp, Homo sapien
tcaagttaaaactgaagcaacagtaggtagatg

SEQ ID NO: 1040255 - DNA, 33 bp, Homo sapien
gaatatcctaagaaatgatgcagctacatattg

SEQ ID NO: 1040256 - DNA, 33 bp, Homo sapien
gaatatcctaagaaattatgcagctacatattg

SEQ ID NO: 1040257 - DNA, 33 bp, Homo sapien
tctaggaaacacaagcaaagcaatatgtagctg

SEQ ID NO: 1040258 - DNA, 33 bp, Homo sapien
tctaggaaacacaagccaagcaatatgtagctg

SEQ ID NO: 1040259 - DNA, 33 bp, Homo sapien
tggaatgaacttcagacatcatctagtatggag

SEQ ID NO: 1040260 - DNA, 33 bp, Homo sapien
tggaatgaacttcagatatcatctagtatggag

SEQ ID NO: 1040261 - DNA, 33 bp, Homo sapien
aattttccagttgcaaatgttaccaaatttaca

SEQ ID NO: 1040262 - DNA, 33 bp, Homo sapien
aattttccagttgcaagtgttaccaaatttaca

SEQ ID NO: 1040263 - DNA, 33 bp, Homo sapien
atttgataagaggaggaaatgggccgtcaatta

SEQ ID NO: 1040264 - DNA, 33 bp, Homo sapien
atttgataagaggagggaatgggccgtcaatta

SEQ ID NO: 1040265 - DNA, 33 bp, Homo sapien
caagaagactcctgtacggccctgtggatgtgc

SEQ ID NO: 1040266 - DNA, 33 bp, Homo sapien
caagaagactcctgtatggccctgtggatgtgc

SEQ ID NO: 1040267 - DNA, 33 bp, Homo sapien
aatgggtcacttccaacagctgtgggagcaaaa

SEQ ID NO: 1040268 - DNA, 33 bp, Homo sapien
aatgggtcacttccaatagctgtgggagcaaaa

SEQ ID NO: 1040269 - DNA, 33 bp, Homo sapien
tctaaacccagagtctgaaacttaacaaacttt

SEQ ID NO: 1040270 - DNA, 33 bp, Homo sapien
tctaaacccagagtcttaaacttaacaaacttt

SEQ ID NO: 1040271 - DNA, 33 bp, Homo sapien
ggcttttgtgagagcaaggttacacactgtaca

SEQ ID NO: 1040272 - DNA, 33 bp, Homo sapien
ggcttttgtgagagcagggttacacactgtaca

SEQ ID NO: 1040273 - DNA, 33 bp, Homo sapien
ctttagtgaagattgcaaattgtttaaatcaga

SEQ ID NO: 1040274 - DNA, 33 bp, Homo sapien
ctttagtgaagattgcgaattgtttaaatcaga

SEQ ID NO: 1040275 - DNA, 33 bp, Homo sapien
tctgtatgccagaacacaaactctggatccatt

SEQ ID NO: 1040276 - DNA, 33 bp, Homo sapien
tctgtatgccagaacagaaactctggatccatt

SEQ ID NO: 1040277 - DNA, 33 bp, Homo sapien
gtcagtggcaaccaaacacatcctaactgatac

SEQ ID NO: 1040278 - DNA, 33 bp, Homo sapien
gtcagtggcaaccaaatacatcctaactgatac

SEQ ID NO: 1040279 - DNA, 33 bp, Homo sapien
attcagttaatctcaaaaggcatttattatgca

SEQ ID NO: 1040280 - DNA, 33 bp, Homo sapien
attcagttaatctcaacaggcatttattatgca

SEQ ID NO: 1040281 - DNA, 33 bp, Homo sapien
acataggggcttttcaagggaacccagagtggg

SEQ ID NO: 1040282 - DNA, 33 bp, Homo sapien
acataggggcttttcaggggaacccagagtggg

SEQ ID NO: 1040283 - DNA, 33 bp, Homo sapien
gttcaattctggtagagtcacaagacttgtttt

SEQ ID NO: 1040284 - DNA, 33 bp, Homo sapien
gttcaattctggtagattcacaagacttgtttt

SEQ ID NO: 1040285 - DNA, 33 bp, Homo sapien
tagacattggctttaaaacaagtgggaacacat

SEQ ID NO: 1040286 - DNA, 33 bp, Homo sapien
tagacattggctttaagacaagtgggaacacat

SEQ ID NO: 1040287 - DNA, 33 bp, Homo sapien
aaattaaagttgggtacacaatcacggactgta

SEQ ID NO: 1040288 - DNA, 33 bp, Homo sapien
aaattaaagttgggtatacaatcacggactgta

SEQ ID NO: 1040289 - DNA, 33 bp, Homo sapien
aggacaaggacactcaacgaagtgcacaaagga

SEQ ID NO: 1040290 - DNA, 33 bp, Homo sapien
aggacaaggacactcagcgaagtgcacaaagga

SEQ ID NO: 1040291 - DNA, 33 bp, Homo sapien
aatgtctctctccagaccacatctcaccaacat

SEQ ID NO: 1040292 - DNA, 33 bp, Homo sapien
aatgtctctctccagatcacatctcaccaacat

SEQ ID NO: 1040293 - DNA, 33 bp, Homo sapien
acgagtgtgggtatgcagacagacaaagagcat

SEQ ID NO: 1040294 - DNA, 33 bp, Homo sapien
acgagtgtgggtatgccgacagacaaagagcat

SEQ ID NO: 1040295 - DNA, 33 bp, Homo sapien
agtgttgctgctgccacgattgtttcacttaaa

SEQ ID NO: 1040296 - DNA, 33 bp, Homo sapien
agtgttgctgctgccaggattgtttcacttaaa

SEQ ID NO: 1040297 - DNA, 33 bp, Homo sapien
aaagtgaaagcaaatgcattgagaaagtaaaga

SEQ ID NO: 1040298 - DNA, 33 bp, Homo sapien
aaagtgaaagcaaatgtattgagaaagtaaaga

SEQ ID NO: 1040299 - DNA, 33 bp, Homo sapien
gtttggtccagaaaggcccagacaaccggaagt

SEQ ID NO: 1040300 - DNA, 33 bp, Homo sapien
gtttggtccagaaaggtccagacaaccggaagt

SEQ ID NO: 1040301 - DNA, 33 bp, Homo sapien
agttggacttttaagacagtctaggccaggtgt

SEQ ID NO: 1040302 - DNA, 33 bp, Homo sapien
agttggacttttaagatagtctaggccaggtgt

SEQ ID NO: 1040303 - DNA, 33 bp, Homo sapien
gggcaagacagaacaaaagatcgaacttgtagc

SEQ ID NO: 1040304 - DNA, 33 bp, Homo sapien
gggcaagacagaacaagagatcgaacttgtagc

SEQ ID NO: 1040305 - DNA, 33 bp, Homo sapien
tcacatataattagcaactcattaagaaaaaaa

SEQ ID NO: 1040306 - DNA, 33 bp, Homo sapien
tcacatataattagcacctcattaagaaaaaaa

SEQ ID NO: 1040307 - DNA, 33 bp, Homo sapien
gtctcctttgccctaaacaggacatttttagtt

SEQ ID NO: 1040308 - DNA, 33 bp, Homo sapien
gtctcctttgccctaagcaggacatttttagtt

SEQ ID NO: 1040309 - DNA, 33 bp, Homo sapien
aaaggaggggatgtaaccaagtccaggctaggt

SEQ ID NO: 1040310 - DNA, 33 bp, Homo sapien
aaaggaggggatgtaatcaagtccaggctaggt

SEQ ID NO: 1040311 - DNA, 33 bp, Homo sapien
atttctcaaacttcaaagattggtgtattacag

SEQ ID NO: 1040312 - DNA, 33 bp, Homo sapien
atttctcaaacttcaatgattggtgtattacag

SEQ ID NO: 1040313 - DNA, 33 bp, Homo sapien
aaaaacaaggaataagaatcatctcagagactg

SEQ ID NO: 1040314 - DNA, 33 bp, Homo sapien
aaaaacaaggaataaggatcatctcagagactg

SEQ ID NO: 1040315 - DNA, 33 bp, Homo sapien
ttgcagtaaattggcacgactggagtccagact

SEQ ID NO: 1040316 - DNA, 33 bp, Homo sapien
ttgcagtaaattggcatgactggagtccagact

SEQ ID NO: 1040317 - DNA, 33 bp, Homo sapien
gaacaaatgtgcttcccctttcacaggaagtac

SEQ ID NO: 1040318 - DNA, 33 bp, Homo sapien
gaacaaatgtgcttcctctttcacaggaagtac

SEQ ID NO: 1040319 - DNA, 33 bp, Homo sapien
atgagatgctgatgtagaaaatggacagccatc

SEQ ID NO: 1040320 - DNA, 33 bp, Homo sapien
atgagatgctgatgtataaaatggacagccatc

SEQ ID NO: 1040321 - DNA, 33 bp, Homo sapien
ggttttaaacaaaaaacgcatgatggacgtatt

SEQ ID NO: 1040322 - DNA, 33 bp, Homo sapien
ggttttaaacaaaaaatgcatgatggacgtatt

SEQ ID NO: 1040323 - DNA, 33 bp, Homo sapien
taacgccagacttttacatgaaaaacaaactcc

SEQ ID NO: 1040324 - DNA, 33 bp, Homo sapien
taacgccagacttttagatgaaaaacaaactcc

SEQ ID NO: 1040325 - DNA, 33 bp, Homo sapien
catattaatcctcgaccatgtaacgccagactt

SEQ ID NO: 1040326 - DNA, 33 bp, Homo sapien
catattaatcctcgactatgtaacgccagactt

SEQ ID NO: 1040327 - DNA, 33 bp, Homo sapien
gtctgaaggtcacatacggggatggttgaaaaa

SEQ ID NO: 1040328 - DNA, 33 bp, Homo sapien
gtctgaaggtcacatatggggatggttgaaaaa

SEQ ID NO: 1040329 - DNA, 33 bp, Homo sapien
aaatgattattcaaggccacacaagataatcag

SEQ ID NO: 1040330 - DNA, 33 bp, Homo sapien
aaatgattattcaaggtcacacaagataatcag

SEQ ID NO: 1040331 - DNA, 33 bp, Homo sapien
tttaattgcaggcataaaaatagagaaatcaac

SEQ ID NO: 1040332 - DNA, 33 bp, Homo sapien
tttaattgcaggcatagaaatagagaaatcaac

SEQ ID NO: 1040333 - DNA, 33 bp, Homo sapien
acttgattgtaggagacgaacaattaataaggc

SEQ ID NO: 1040334 - DNA, 33 bp, Homo sapien
acttgattgtaggagatgaacaattaataaggc

SEQ ID NO: 1040335 - DNA, 33 bp, Homo sapien
ggactatggtcaatgcaaatggaagaaaaagag

SEQ ID NO: 1040336 - DNA, 33 bp, Homo sapien
ggactatggtcaatgcgaatggaagaaaaagag

SEQ ID NO: 1040337 - DNA, 33 bp, Homo sapien
gtttaggggcttacaaaatgtgaccatggcttg

SEQ ID NO: 1040338 - DNA, 33 bp, Homo sapien
gtttaggggcttacaagatgtgaccatggcttg

SEQ ID NO: 1040339 - DNA, 33 bp, Homo sapien
tgttcttccccctgaaatccattagtaacttat

SEQ ID NO: 1040340 - DNA, 33 bp, Homo sapien
tgttcttccccctgaactccattagtaacttat

SEQ ID NO: 1040341 - DNA, 33 bp, Homo sapien
ctacattctcaaggcaactcaaacccatccttt

SEQ ID NO: 1040342 - DNA, 33 bp, Homo sapien
ctacattctcaaggcacctcaaacccatccttt

SEQ ID NO: 1040343 - DNA, 33 bp, Homo sapien
tctgcattttattagcaaaggacaagaaagttt

SEQ ID NO: 1040344 - DNA, 33 bp, Homo sapien
tctgcattttattagcgaaggacaagaaagttt

SEQ ID NO: 1040345 - DNA, 33 bp, Homo sapien
gcttcatattactttaagattccaagccagcaa

SEQ ID NO: 1040346 - DNA, 33 bp, Homo sapien
gcttcatattactttaggattccaagccagcaa

SEQ ID NO: 1040347 - DNA, 33 bp, Homo sapien
atacttctctattctccactcttattccaaaat

SEQ ID NO: 1040348 - DNA, 33 bp, Homo sapien
atacttctctattctctactcttattccaaaat

SEQ ID NO: 1040349 - DNA, 33 bp, Homo sapien
cccaaagaggggggtaaggtagaatgcataatg

SEQ ID NO: 1040350 - DNA, 33 bp, Homo sapien
cccaaagaggggggtatggtagaatgcataatg

SEQ ID NO: 1040351 - DNA, 33 bp, Homo sapien
ttggattttgtatcaccagttgagtcgtagtgg

SEQ ID NO: 1040352 - DNA, 33 bp, Homo sapien
ttggattttgtatcactagttgagtcgtagtgg

SEQ ID NO: 1040353 - DNA, 33 bp, Homo sapien
gcattaaagattgaaacctaagacctggagcca

SEQ ID NO: 1040354 - DNA, 33 bp, Homo sapien
gcattaaagattgaaatctaagacctggagcca

SEQ ID NO: 1040355 - DNA, 33 bp, Homo sapien
tataatgtaaagcatcaaactacaggagaaaag

SEQ ID NO: 1040356 - DNA, 33 bp, Homo sapien
tataatgtaaagcatcgaactacaggagaaaag

SEQ ID NO: 1040357 - DNA, 33 bp, Homo sapien
gtctcacagctgcagagcctggacaaaaatctt

SEQ ID NO: 1040358 - DNA, 33 bp, Homo sapien
gtctcacagctgcagatcctggacaaaaatctt

SEQ ID NO: 1040359 - DNA, 33 bp, Homo sapien
atcctcaaagaaactccatttggttgtgaacaa

SEQ ID NO: 1040360 - DNA, 33 bp, Homo sapien
atcctcaaagaaactctatttggttgtgaacaa

SEQ ID NO: 1040361 - DNA, 33 bp, Homo sapien
gtgacggatacttcgcagaaaaaagagtttaca

SEQ ID NO: 1040362 - DNA, 33 bp, Homo sapien
gtgacggatacttcgccgaaaaaagagtttaca

SEQ ID NO: 1040363 - DNA, 33 bp, Homo sapien
aaagggaattctccagacgaaaagaaaaagctt

SEQ ID NO: 1040364 - DNA, 33 bp, Homo sapien
aaagggaattctccaggcgaaaagaaaaagctt

SEQ ID NO: 1040365 - DNA, 33 bp, Homo sapien
agcatgaaaaggcttcgcgtgaaaagtctgtgt

SEQ ID NO: 1040366 - DNA, 33 bp, Homo sapien
agcatgaaaaggcttctcgtgaaaagtctgtgt

SEQ ID NO: 1040367 - DNA, 33 bp, Homo sapien
caagtctgcatgtgacaaaagtctaaagcagaa

SEQ ID NO: 1040368 - DNA, 33 bp, Homo sapien
caagtctgcatgtgacgaaagtctaaagcagaa

SEQ ID NO: 1040369 - DNA, 33 bp, Homo sapien
tagaatgtttggagaacgctgagatttagaaaa

SEQ ID NO: 1040370 - DNA, 33 bp, Homo sapien
tagaatgtttggagaatgctgagatttagaaaa

SEQ ID NO: 1040371 - DNA, 33 bp, Homo sapien
agtaaataactgccacaggcttcacatccattc

SEQ ID NO: 1040372 - DNA, 33 bp, Homo sapien
agtaaataactgccacgggcttcacatccattc

SEQ ID NO: 1040373 - DNA, 33 bp, Homo sapien
aaaaaatatcgtacatcatcttcgggccttatt

SEQ ID NO: 1040374 - DNA, 33 bp, Homo sapien
aaaaaatatcgtacattatcttcgggccttatt

SEQ ID NO: 1040375 - DNA, 33 bp, Homo sapien
cttgttgtaggtctaacgagatttagaacactt

SEQ ID NO: 1040376 - DNA, 33 bp, Homo sapien
cttgttgtaggtctaatgagatttagaacactt

SEQ ID NO: 1040377 - DNA, 33 bp, Homo sapien
cttcatacacatatcagtcacaaatacttgtta

SEQ ID NO: 1040378 - DNA, 33 bp, Homo sapien
cttcatacacatatcattcacaaatacttgtta

SEQ ID NO: 1040379 - DNA, 33 bp, Homo sapien
agctgtgagatgacaagtattgggtaatccctt

SEQ ID NO: 1040380 - DNA, 33 bp, Homo sapien
agctgtgagatgacaattattgggtaatccctt

SEQ ID NO: 1040381 - DNA, 33 bp, Homo sapien
atctctaacctggaccaagatccaaatggcttc

SEQ ID NO: 1040382 - DNA, 33 bp, Homo sapien
atctctaacctggaccgagatccaaatggcttc

SEQ ID NO: 1040383 - DNA, 33 bp, Homo sapien
aaggtgaaatctgccacgatcgctactttcaaa

SEQ ID NO: 1040384 - DNA, 33 bp, Homo sapien
aaggtgaaatctgccatgatcgctactttcaaa

SEQ ID NO: 1040385 - DNA, 33 bp, Homo sapien
ttttgtgcacaggtaaataatggaattgtttta

SEQ ID NO: 1040386 - DNA, 33 bp, Homo sapien
ttttgtgcacaggtaagtaatggaattgtttta

SEQ ID NO: 1040387 - DNA, 33 bp, Homo sapien
ggtgctagttttatgacataagggaggactctg

SEQ ID NO: 1040388 - DNA, 33 bp, Homo sapien
ggtgctagttttatgatataagggaggactctg

SEQ ID NO: 1040389 - DNA, 33 bp, Homo sapien
tccatgaaaaggcgcactccaatcctgccattt

SEQ ID NO: 1040390 - DNA, 33 bp, Homo sapien
tccatgaaaaggcgcagtccaatcctgccattt

SEQ ID NO: 1040391 - DNA, 33 bp, Homo sapien
agatcttagaggaatactaaagtgtgaatgttt

SEQ ID NO: 1040392 - DNA, 33 bp, Homo sapien
agatcttagaggaatattaaagtgtgaatgttt

SEQ ID NO: 1040393 - DNA, 33 bp, Homo sapien
agcagattatggaaaacttaaaccagagtcaaa

SEQ ID NO: 1040394 - DNA, 33 bp, Homo sapien
agcagattatggaaaagttaaaccagagtcaaa

SEQ ID NO: 1040395 - DNA, 33 bp, Homo sapien
aacttccctctcttaactcattctaccatacag

SEQ ID NO: 1040396 - DNA, 33 bp, Homo sapien
aacttccctctcttaattcattctaccatacag

SEQ ID NO: 1040397 - DNA, 33 bp, Homo sapien
gcagggttccagtattgaaagttccaattctac

SEQ ID NO: 1040398 - DNA, 33 bp, Homo sapien
gcagggttccagtatttaaagttccaattctac

SEQ ID NO: 1040399 - DNA, 33 bp, Homo sapien
tttcatatcacctaaactatcggttcaggatct

SEQ ID NO: 1040400 - DNA, 33 bp, Homo sapien
tttcatatcacctaaagtatcggttcaggatct

SEQ ID NO: 1040401 - DNA, 33 bp, Homo sapien
ttcttatcatcaaatacgttctcagggcccatt

SEQ ID NO: 1040402 - DNA, 33 bp, Homo sapien
ttcttatcatcaaatatgttctcagggcccatt

SEQ ID NO: 1040403 - DNA, 33 bp, Homo sapien
cacttcgtaaaccttcaattctccatcaccact

SEQ ID NO: 1040404 - DNA, 33 bp, Homo sapien
cacttcgtaaaccttccattctccatcaccact

SEQ ID NO: 1040405 - DNA, 33 bp, Homo sapien
ctcatgtgggtgacagaaaataccatgataaat

SEQ ID NO: 1040406 - DNA, 33 bp, Homo sapien
ctcatgtgggtgacaggaaataccatgataaat

SEQ ID NO: 1040407 - DNA, 33 bp, Homo sapien
gcaaggaagacagtgaagttgtgggagcagagg

SEQ ID NO: 1040408 - DNA, 33 bp, Homo sapien
gcaaggaagacagtgacgttgtgggagcagagg

SEQ ID NO: 1040409 - DNA, 33 bp, Homo sapien
attaactgtggcttataaattgctgcttcagcc

SEQ ID NO: 1040410 - DNA, 33 bp, Homo sapien
attaactgtggcttatgaattgctgcttcagcc

SEQ ID NO: 1040411 - DNA, 33 bp, Homo sapien
attaatcttctcagtccattaacctacctagca

SEQ ID NO: 1040412 - DNA, 33 bp, Homo sapien
attaatcttctcagtctattaacctacctagca

SEQ ID NO: 1040413 - DNA, 33 bp, Homo sapien
aaaatggactaatacagtcagatagatgataga

SEQ ID NO: 1040414 - DNA, 33 bp, Homo sapien
aaaatggactaatacattcagatagatgataga

SEQ ID NO: 1040415 - DNA, 33 bp, Homo sapien
ttggttactatttaggcaagtcagagtttctac

SEQ ID NO: 1040416 - DNA, 33 bp, Homo sapien
ttggttactatttaggtaagtcagagtttctac

SEQ ID NO: 1040417 - DNA, 33 bp, Homo sapien
tctatgtattagatacggaataaatccatattt

SEQ ID NO: 1040418 - DNA, 33 bp, Homo sapien
tctatgtattagatactgaataaatccatattt

SEQ ID NO: 1040419 - DNA, 33 bp, Homo sapien
tgccatctgctccttcaaggaagaaggatttgt

SEQ ID NO: 1040420 - DNA, 33 bp, Homo sapien
tgccatctgctccttcgaggaagaaggatttgt

SEQ ID NO: 1040421 - DNA, 33 bp, Homo sapien
gtagagaacaacgtgggagggaagacagacctg

SEQ ID NO: 1040422 - DNA, 33 bp, Homo sapien
gtagagaacaacgtggtagggaagacagacctg

SEQ ID NO: 1040423 - DNA, 33 bp, Homo sapien
cctgttaactactgccaccagttttctagacaa

SEQ ID NO: 1040424 - DNA, 33 bp, Homo sapien
cctgttaactactgccgccagttttctagacaa

SEQ ID NO: 1040425 - DNA, 33 bp, Homo sapien
ttttttttatcagttacacagctcttagcacga

SEQ ID NO: 1040426 - DNA, 33 bp, Homo sapien
ttttttttatcagttatacagctcttagcacga

SEQ ID NO: 1040427 - DNA, 33 bp, Homo sapien
tgagccttaatttactcactgttaagagaagga

SEQ ID NO: 1040428 - DNA, 33 bp, Homo sapien
tgagccttaatttactgactgttaagagaagga

SEQ ID NO: 1040429 - DNA, 33 bp, Homo sapien
attacagatgaacagcactctatagtttacagt

SEQ ID NO: 1040430 - DNA, 33 bp, Homo sapien
attacagatgaacagcgctctatagtttacagt

SEQ ID NO: 1040431 - DNA, 33 bp, Homo sapien
atggagaactagccagcaacaccacctaccagg

SEQ ID NO: 1040432 - DNA, 33 bp, Homo sapien
atggagaactagccagtaacaccacctaccagg

SEQ ID NO: 1040433 - DNA, 33 bp, Homo sapien
acatgcagaaaaacataactatgtaactagaaa

SEQ ID NO: 1040434 - DNA, 33 bp, Homo sapien
acatgcagaaaaacatgactatgtaactagaaa

SEQ ID NO: 1040435 - DNA, 33 bp, Homo sapien
aagtaaaaaatccaaacgcaaaagattacatat

SEQ ID NO: 1040436 - DNA, 33 bp, Homo sapien
aagtaaaaaatccaaatgcaaaagattacatat

SEQ ID NO: 1040437 - DNA, 33 bp, Homo sapien
tttgaatacgtggaaactgaacaacatccatct

SEQ ID NO: 1040438 - DNA, 33 bp, Homo sapien
tttgaatacgtggaaattgaacaacatccatct

SEQ ID NO: 1040439 - DNA, 33 bp, Homo sapien
aatggcaaaatacaggaaggttaaaagtagaaa

SEQ ID NO: 1040440 - DNA, 33 bp, Homo sapien
aatggcaaaatacaggcaggttaaaagtagaaa

SEQ ID NO: 1040441 - DNA, 33 bp, Homo sapien
tggaattgaagccacaatatctcagaggtatga

SEQ ID NO: 1040442 - DNA, 33 bp, Homo sapien
tggaattgaagccacactatctcagaggtatga

SEQ ID NO: 1040443 - DNA, 33 bp, Homo sapien
ttcttcagtattaaaacatccactaggctggac

SEQ ID NO: 1040444 - DNA, 33 bp, Homo sapien
ttcttcagtattaaaatatccactaggctggac

SEQ ID NO: 1040445 - DNA, 33 bp, Homo sapien
tattctactccagtcaagactttcgtggggtct

SEQ ID NO: 1040446 - DNA, 33 bp, Homo sapien
tattctactccagtcaggactttcgtggggtct

SEQ ID NO: 1040447 - DNA, 33 bp, Homo sapien
ctactctcttggtctacgcaggttggctttggg

SEQ ID NO: 1040448 - DNA, 33 bp, Homo sapien
ctactctcttggtctatgcaggttggctttggg

SEQ ID NO: 1040449 - DNA, 33 bp, Homo sapien
taacatcttttcatgaccttcaaggccatgctt

SEQ ID NO: 1040450 - DNA, 33 bp, Homo sapien
taacatcttttcatgagcttcaaggccatgctt

SEQ ID NO: 1040451 - DNA, 33 bp, Homo sapien
aataatctaaaaaagtcaagcacccatatatga

SEQ ID NO: 1040452 - DNA, 33 bp, Homo sapien
aataatctaaaaaagtgaagcacccatatatga

SEQ ID NO: 1040453 - DNA, 33 bp, Homo sapien
ctcactgtcttactacagaaaagaacaaggtca

SEQ ID NO: 1040454 - DNA, 33 bp, Homo sapien
ctcactgtcttactacggaaaagaacaaggtca

SEQ ID NO: 1040455 - DNA, 33 bp, Homo sapien
ctataattcatagtggaagaactgtgattgatg

SEQ ID NO: 1040456 - DNA, 33 bp, Homo sapien
ctataattcatagtggtagaactgtgattgatg

SEQ ID NO: 1040457 - DNA, 33 bp, Homo sapien
tgagcttttctatacacaaggtgttgaaaaagc

SEQ ID NO: 1040458 - DNA, 33 bp, Homo sapien
tgagcttttctatacataaggtgttgaaaaagc

SEQ ID NO: 1040459 - DNA, 33 bp, Homo sapien
ggtaaaggaatagagaagtggtttccattcttt

SEQ ID NO: 1040460 - DNA, 33 bp, Homo sapien
ggtaaaggaatagagaggtggtttccattcttt

SEQ ID NO: 1040461 - DNA, 33 bp, Homo sapien
tagcaaaagaatacaaaatggagataatataat

SEQ ID NO: 1040462 - DNA, 33 bp, Homo sapien
tagcaaaagaatacaacatggagataatataat

SEQ ID NO: 1040463 - DNA, 33 bp, Homo sapien
gtagtttatagagaaactgagccctgcaatagt

SEQ ID NO: 1040464 - DNA, 33 bp, Homo sapien
gtagtttatagagaaattgagccctgcaatagt

SEQ ID NO: 1040465 - DNA, 33 bp, Homo sapien
ttctaactacttttaaccatctagtaaacctag

SEQ ID NO: 1040466 - DNA, 33 bp, Homo sapien
ttctaactacttttaagcatctagtaaacctag

SEQ ID NO: 1040467 - DNA, 33 bp, Homo sapien
aactttgaggatgaagaagcagaggagtaaaca

SEQ ID NO: 1040468 - DNA, 33 bp, Homo sapien
aactttgaggatgaaggagcagaggagtaaaca

SEQ ID NO: 1040469 - DNA, 33 bp, Homo sapien
taatttttcagaataacggtaactaggactcat

SEQ ID NO: 1040470 - DNA, 33 bp, Homo sapien
taatttttcagaataatggtaactaggactcat

SEQ ID NO: 1040471 - DNA, 33 bp, Homo sapien
atgtctagaactgtaaataagcatgtatcagac

SEQ ID NO: 1040472 - DNA, 33 bp, Homo sapien
atgtctagaactgtaattaagcatgtatcagac

SEQ ID NO: 1040473 - DNA, 33 bp, Homo sapien
ccttataaattccgcacattagacctttgtcag

SEQ ID NO: 1040474 - DNA, 33 bp, Homo sapien
ccttataaattccgcatattagacctttgtcag

SEQ ID NO: 1040475 - DNA, 33 bp, Homo sapien
ttgtcacgatggactacgtaacctaacctgtac

SEQ ID NO: 1040476 - DNA, 33 bp, Homo sapien
ttgtcacgatggactatgtaacctaacctgtac

SEQ ID NO: 1040477 - DNA, 33 bp, Homo sapien
aaaatttttcttgatacatggctgtgatagaaa

SEQ ID NO: 1040478 - DNA, 33 bp, Homo sapien
aaaatttttcttgatatatggctgtgatagaaa

SEQ ID NO: 1040479 - DNA, 33 bp, Homo sapien
gcaggtggcatgacaactggacaagtgaggtct

SEQ ID NO: 1040480 - DNA, 33 bp, Homo sapien
gcaggtggcatgacaattggacaagtgaggtct

SEQ ID NO: 1040481 - DNA, 33 bp, Homo sapien
ggcagatttttcatgcacaaaggatcagactgc

SEQ ID NO: 1040482 - DNA, 33 bp, Homo sapien
ggcagatttttcatgcccaaaggatcagactgc

SEQ ID NO: 1040483 - DNA, 33 bp, Homo sapien
tctaataacaataccaatggaagtactatgtgc

SEQ ID NO: 1040484 - DNA, 33 bp, Homo sapien
tctaataacaataccagtggaagtactatgtgc

SEQ ID NO: 1040485 - DNA, 33 bp, Homo sapien
tacgtaatccataggaacttccaggagattaat

SEQ ID NO: 1040486 - DNA, 33 bp, Homo sapien
tacgtaatccataggagcttccaggagattaat

SEQ ID NO: 1040487 - DNA, 33 bp, Homo sapien
tactgcaatctgtgagaataaattgtgaagatt

SEQ ID NO: 1040488 - DNA, 33 bp, Homo sapien
tactgcaatctgtgagcataaattgtgaagatt

SEQ ID NO: 1040489 - DNA, 33 bp, Homo sapien
actgtgaaatgacttgaacaaattgtatgtggc

SEQ ID NO: 1040490 - DNA, 33 bp, Homo sapien
actgtgaaatgacttggacaaattgtatgtggc

SEQ ID NO: 1040491 - DNA, 33 bp, Homo sapien
ccaatagttttcccacaaaagactcaatgaggt

SEQ ID NO: 1040492 - DNA, 33 bp, Homo sapien
ccaatagttttcccacgaaagactcaatgaggt

SEQ ID NO: 1040493 - DNA, 33 bp, Homo sapien
ctattggtaggaaaaacgaaagtgaggattgtt

SEQ ID NO: 1040494 - DNA, 33 bp, Homo sapien
ctattggtaggaaaaatgaaagtgaggattgtt

SEQ ID NO: 1040495 - DNA, 33 bp, Homo sapien
agaggatgaccagagacgatgctgaggagcttg

SEQ ID NO: 1040496 - DNA, 33 bp, Homo sapien
agaggatgaccagagatgatgctgaggagcttg

SEQ ID NO: 1040497 - DNA, 33 bp, Homo sapien
cctaatccctttgctgaattaaagggctctttc

SEQ ID NO: 1040498 - DNA, 33 bp, Homo sapien
cctaatccctttgctggattaaagggctctttc

SEQ ID NO: 1040499 - DNA, 33 bp, Homo sapien
gtatatgtcgcaggacaatggtgaggaatgaaa

SEQ ID NO: 1040500 - DNA, 33 bp, Homo sapien
gtatatgtcgcaggaccatggtgaggaatgaaa

SEQ ID NO: 1040501 - DNA, 33 bp, Homo sapien
cagttaccagactgacagattgggaacagcttt

SEQ ID NO: 1040502 - DNA, 33 bp, Homo sapien
cagttaccagactgacggattgggaacagcttt

SEQ ID NO: 1040503 - DNA, 33 bp, Homo sapien
attgacttccctgctgaagaggataagttctca

SEQ ID NO: 1040504 - DNA, 33 bp, Homo sapien
attgacttccctgctgcagaggataagttctca

SEQ ID NO: 1040505 - DNA, 33 bp, Homo sapien
tcattgtctactgatacgtaatgagcagtcagt

SEQ ID NO: 1040506 - DNA, 33 bp, Homo sapien
tcattgtctactgatatgtaatgagcagtcagt

SEQ ID NO: 1040507 - DNA, 33 bp, Homo sapien
aaatgcttgttctgtcactcatcagggtatgct

SEQ ID NO: 1040508 - DNA, 33 bp, Homo sapien
aaatgcttgttctgtcgctcatcagggtatgct

SEQ ID NO: 1040509 - DNA, 33 bp, Homo sapien
attccttcatctgtgaactcgagctagtaatgc

SEQ ID NO: 1040510 - DNA, 33 bp, Homo sapien
attccttcatctgtgacctcgagctagtaatgc

SEQ ID NO: 1040511 - DNA, 33 bp, Homo sapien
gcctttgttactatgaaagctcactaattgacc

SEQ ID NO: 1040512 - DNA, 33 bp, Homo sapien
gcctttgttactatgagagctcactaattgacc

SEQ ID NO: 1040513 - DNA, 33 bp, Homo sapien
atgtcctaagaacttaataagcctttgttcaag

SEQ ID NO: 1040514 - DNA, 33 bp, Homo sapien
atgtcctaagaacttagtaagcctttgttcaag

SEQ ID NO: 1040515 - DNA, 33 bp, Homo sapien
cagttgcttgactgaaatgtcattatgcagtgt

SEQ ID NO: 1040516 - DNA, 33 bp, Homo sapien
cagttgcttgactgaagtgtcattatgcagtgt

SEQ ID NO: 1040517 - DNA, 33 bp, Homo sapien
ataggttaatgttcaaatgattaaaaattacat

SEQ ID NO: 1040518 - DNA, 33 bp, Homo sapien
ataggttaatgttcaagtgattaaaaattacat

SEQ ID NO: 1040519 - DNA, 33 bp, Homo sapien
attcctaaccttgagacaaaagcattcagtctt

SEQ ID NO: 1040520 - DNA, 33 bp, Homo sapien
attcctaaccttgagagaaaagcattcagtctt

SEQ ID NO: 1040521 - DNA, 33 bp, Homo sapien
aaatgccttattcacacaaaaaaatcattaatc

SEQ ID NO: 1040522 - DNA, 33 bp, Homo sapien
aaatgccttattcacagaaaaaaatcattaatc

SEQ ID NO: 1040523 - DNA, 33 bp, Homo sapien
cagttccaatcactaaaaaaacacacaagaaca

SEQ ID NO: 1040524 - DNA, 33 bp, Homo sapien
cagttccaatcactaagaaaacacacaagaaca

SEQ ID NO: 1040525 - DNA, 33 bp, Homo sapien
cttcctttgtagacacagggcttttctttattg

SEQ ID NO: 1040526 - DNA, 33 bp, Homo sapien
cttcctttgtagacactgggcttttctttattg

SEQ ID NO: 1040527 - DNA, 33 bp, Homo sapien
tataattgaaaaagggaatatgccgtaattgtt

SEQ ID NO: 1040528 - DNA, 33 bp, Homo sapien
tataattgaaaaagggtatatgccgtaattgtt

SEQ ID NO: 1040529 - DNA, 33 bp, Homo sapien
tgcaagtctgagatatgaaaggccacaattagg

SEQ ID NO: 1040530 - DNA, 33 bp, Homo sapien
tgcaagtctgagatattaaaggccacaattagg

SEQ ID NO: 1040531 - DNA, 33 bp, Homo sapien
tgtgtatgaacatatacattgaaagaccagaga

SEQ ID NO: 1040532 - DNA, 33 bp, Homo sapien
tgtgtatgaacatatatattgaaagaccagaga

SEQ ID NO: 1040533 - DNA, 33 bp, Homo sapien
tgtgatcaactaaccactgcctacattatgtga

SEQ ID NO: 1040534 - DNA, 33 bp, Homo sapien
tgtgatcaactaaccattgcctacattatgtga

SEQ ID NO: 1040535 - DNA, 33 bp, Homo sapien
tgttacttttccatgcaagggtgtatttctcta

SEQ ID NO: 1040536 - DNA, 33 bp, Homo sapien
tgttacttttccatgccagggtgtatttctcta

SEQ ID NO: 1040537 - DNA, 33 bp, Homo sapien
caatcttattcgttcacagatccctagcaatgt

SEQ ID NO: 1040538 - DNA, 33 bp, Homo sapien
caatcttattcgttcatagatccctagcaatgt

SEQ ID NO: 1040539 - DNA, 33 bp, Homo sapien
aggaggtttcatggaaaattctaaagtattcta

SEQ ID NO: 1040540 - DNA, 33 bp, Homo sapien
aggaggtttcatggaacattctaaagtattcta

SEQ ID NO: 1040541 - DNA, 33 bp, Homo sapien
accctccatcatagtcaacacttctgctggctc

SEQ ID NO: 1040542 - DNA, 33 bp, Homo sapien
accctccatcatagtcgacacttctgctggctc

SEQ ID NO: 1040543 - DNA, 33 bp, Homo sapien
tgcacctgaaccaaataactgcctttgttttct

SEQ ID NO: 1040544 - DNA, 33 bp, Homo sapien
tgcacctgaaccaaatgactgcctttgttttct

SEQ ID NO: 1040545 - DNA, 33 bp, Homo sapien
cttaaagaagaaggaaaccaatgagtgttcact

SEQ ID NO: 1040546 - DNA, 33 bp, Homo sapien
cttaaagaagaaggaagccaatgagtgttcact

SEQ ID NO: 1040547 - DNA, 33 bp, Homo sapien
tttgtttgccttggtaccccatctcattcttca

SEQ ID NO: 1040548 - DNA, 33 bp, Homo sapien
tttgtttgccttggtatcccatctcattcttca

SEQ ID NO: 1040549 - DNA, 33 bp, Homo sapien
cccttcactggttttgaaacttctattaactct

SEQ ID NO: 1040550 - DNA, 33 bp, Homo sapien
cccttcactggttttgcaacttctattaactct

SEQ ID NO: 1040551 - DNA, 33 bp, Homo sapien
gaactctaattccaaaaagcctgctatttacca

SEQ ID NO: 1040552 - DNA, 33 bp, Homo sapien
gaactctaattccaaagagcctgctatttacca

SEQ ID NO: 1040553 - DNA, 33 bp, Homo sapien
caattaatttaacagcccaacaatgtcataaaa

SEQ ID NO: 1040554 - DNA, 33 bp, Homo sapien
caattaatttaacagctcaacaatgtcataaaa

SEQ ID NO: 1040555 - DNA, 33 bp, Homo sapien
ataaaatatccaaaaactaataggacaacagag

SEQ ID NO: 1040556 - DNA, 33 bp, Homo sapien
ataaaatatccaaaaagtaataggacaacagag

SEQ ID NO: 1040557 - DNA, 33 bp, Homo sapien
aaaatttcctgtgtaactgatgacagagaatat

SEQ ID NO: 1040558 - DNA, 33 bp, Homo sapien
aaaatttcctgtgtaattgatgacagagaatat

SEQ ID NO: 1040559 - DNA, 33 bp, Homo sapien
catgctctaggaatagcaaggatgctaagatag

SEQ ID NO: 1040560 - DNA, 33 bp, Homo sapien
catgctctaggaataggaaggatgctaagatag

SEQ ID NO: 1040561 - DNA, 33 bp, Homo sapien
cttccttacctccagaatagactagtagtccaa

SEQ ID NO: 1040562 - DNA, 33 bp, Homo sapien
cttccttacctccagagtagactagtagtccaa

SEQ ID NO: 1040563 - DNA, 33 bp, Homo sapien
aggccaagagagtttaagcaacttttaaagtag

SEQ ID NO: 1040564 - DNA, 33 bp, Homo sapien
aggccaagagagtttaggcaacttttaaagtag

SEQ ID NO: 1040565 - DNA, 33 bp, Homo sapien
tccctttccaaacttacattcaacataatcaaa

SEQ ID NO: 1040566 - DNA, 33 bp, Homo sapien
tccctttccaaacttatattcaacataatcaaa

SEQ ID NO: 1040567 - DNA, 33 bp, Homo sapien
atcttccttgaccacaaaaggaaaggcaagaag

SEQ ID NO: 1040568 - DNA, 33 bp, Homo sapien
atcttccttgaccacagaaggaaaggcaagaag

SEQ ID NO: 1040569 - DNA, 33 bp, Homo sapien
tcattaaggcaattccaacatctttctctaatt

SEQ ID NO: 1040570 - DNA, 33 bp, Homo sapien
tcattaaggcaattcctacatctttctctaatt

SEQ ID NO: 1040571 - DNA, 33 bp, Homo sapien
gttcctacaaagtttcaatggaattatgtcaga

SEQ ID NO: 1040572 - DNA, 33 bp, Homo sapien
gttcctacaaagtttcgatggaattatgtcaga

SEQ ID NO: 1040573 - DNA, 33 bp, Homo sapien
aaaccttgaggttacaactttgttcaatagcaa

SEQ ID NO: 1040574 - DNA, 33 bp, Homo sapien
aaaccttgaggttacatctttgttcaatagcaa

SEQ ID NO: 1040575 - DNA, 33 bp, Homo sapien
tacagggtgccattaaatcttggctgaattaag

SEQ ID NO: 1040576 - DNA, 33 bp, Homo sapien
tacagggtgccattaagtcttggctgaattaag

SEQ ID NO: 1040577 - DNA, 33 bp, Homo sapien
aaataagtattcactacataatctagcaatcca

SEQ ID NO: 1040578 - DNA, 33 bp, Homo sapien
aaataagtattcactatataatctagcaatcca

SEQ ID NO: 1040579 - DNA, 33 bp, Homo sapien
ccaaggctggatgatcaataaaaggagttttac

SEQ ID NO: 1040580 - DNA, 33 bp, Homo sapien
ccaaggctggatgatcgataaaaggagttttac

SEQ ID NO: 1040581 - DNA, 33 bp, Homo sapien
atggccttttttgaaacgcaaacctcctcgtca

SEQ ID NO: 1040582 - DNA, 33 bp, Homo sapien
atggccttttttgaaatgcaaacctcctcgtca

SEQ ID NO: 1040583 - DNA, 33 bp, Homo sapien
atattttaagagccaaaggcaagtgaaattagc

SEQ ID NO: 1040584 - DNA, 33 bp, Homo sapien
atattttaagagccaagggcaagtgaaattagc

SEQ ID NO: 1040585 - DNA, 33 bp, Homo sapien
gaggtcctatgaaacaaacaactgaattcacaa

SEQ ID NO: 1040586 - DNA, 33 bp, Homo sapien
gaggtcctatgaaacatacaactgaattcacaa

SEQ ID NO: 1040587 - DNA, 33 bp, Homo sapien
atgcaaccctttggataaactggaataaatgat

SEQ ID NO: 1040588 - DNA, 33 bp, Homo sapien
atgcaaccctttggatcaactggaataaatgat

SEQ ID NO: 1040589 - DNA, 33 bp, Homo sapien
tcaagcagtcccatgacataagtattagggtga

SEQ ID NO: 1040590 - DNA, 33 bp, Homo sapien
tcaagcagtcccatgagataagtattagggtga

SEQ ID NO: 1040591 - DNA, 33 bp, Homo sapien
actggctgccacctcaatcaacttacacagccc

SEQ ID NO: 1040592 - DNA, 33 bp, Homo sapien
actggctgccacctcagtcaacttacacagccc

SEQ ID NO: 1040593 - DNA, 33 bp, Homo sapien
aggctgtgttgagaagaattctgaagctacatt

SEQ ID NO: 1040594 - DNA, 33 bp, Homo sapien
aggctgtgttgagaaggattctgaagctacatt

SEQ ID NO: 1040595 - DNA, 33 bp, Homo sapien
ttaatcacgttggaggaaatgcaggtcactgga

SEQ ID NO: 1040596 - DNA, 33 bp, Homo sapien
ttaatcacgttggaggcaatgcaggtcactgga

SEQ ID NO: 1040597 - DNA, 33 bp, Homo sapien
aaaagccagtggggaacgtggagagtatagtgt

SEQ ID NO: 1040598 - DNA, 33 bp, Homo sapien
aaaagccagtggggaatgtggagagtatagtgt

SEQ ID NO: 1040599 - DNA, 33 bp, Homo sapien
gcatgttaattctcaggcaggccaatctgatat

SEQ ID NO: 1040600 - DNA, 33 bp, Homo sapien
gcatgttaattctcagtcaggccaatctgatat

SEQ ID NO: 1040601 - DNA, 33 bp, Homo sapien
ggaacttaaaacgtagcactaatcttggaaaca

SEQ ID NO: 1040602 - DNA, 33 bp, Homo sapien
ggaacttaaaacgtagtactaatcttggaaaca

SEQ ID NO: 1040603 - DNA, 33 bp, Homo sapien
cagttggaatggtcaaccttaacactttacaaa

SEQ ID NO: 1040604 - DNA, 33 bp, Homo sapien
cagttggaatggtcaatcttaacactttacaaa

SEQ ID NO: 1040605 - DNA, 33 bp, Homo sapien
gacatttacgtgatgaacctgttgattgtgaaa

SEQ ID NO: 1040606 - DNA, 33 bp, Homo sapien
gacatttacgtgatgaccctgttgattgtgaaa

SEQ ID NO: 1040607 - DNA, 33 bp, Homo sapien
caatgatgtgctcagaaaacgtacagtttgata

SEQ ID NO: 1040608 - DNA, 33 bp, Homo sapien
caatgatgtgctcagagaacgtacagtttgata

SEQ ID NO: 1040609 - DNA, 33 bp, Homo sapien
tatgtaatcattgctcccataggtatccccatt

SEQ ID NO: 1040610 - DNA, 33 bp, Homo sapien
tatgtaatcattgctctcataggtatccccatt

SEQ ID NO: 1040611 - DNA, 33 bp, Homo sapien
aattcaggccttaaacaaaacagtaacatttga

SEQ ID NO: 1040612 - DNA, 33 bp, Homo sapien
aattcaggccttaaaccaaacagtaacatttga

SEQ ID NO: 1040613 - DNA, 33 bp, Homo sapien
tagtaaagtgcacaagcctctggtaaaccttaa

SEQ ID NO: 1040614 - DNA, 33 bp, Homo sapien
tagtaaagtgcacaagtctctggtaaaccttaa

SEQ ID NO: 1040615 - DNA, 33 bp, Homo sapien
gttcaaaagcatcacacatttaactgtccatta

SEQ ID NO: 1040616 - DNA, 33 bp, Homo sapien
gttcaaaagcatcacatatttaactgtccatta

SEQ ID NO: 1040617 - DNA, 33 bp, Homo sapien
gggcttctaacaatcccatttcccaagcactgc

SEQ ID NO: 1040618 - DNA, 33 bp, Homo sapien
gggcttctaacaatcctatttcccaagcactgc

SEQ ID NO: 1040619 - DNA, 33 bp, Homo sapien
gacagaggtagaaaaaatatgtgtatgtgtgtg

SEQ ID NO: 1040620 - DNA, 33 bp, Homo sapien
gacagaggtagaaaaattatgtgtatgtgtgtg

SEQ ID NO: 1040621 - DNA, 33 bp, Homo sapien
tcaccttcacaggcaaacctttctaaaatttaa

SEQ ID NO: 1040622 - DNA, 33 bp, Homo sapien
tcaccttcacaggcaaccctttctaaaatttaa

SEQ ID NO: 1040623 - DNA, 33 bp, Homo sapien
aaattaaagacatgaagaacaggttagtggttg

SEQ ID NO: 1040624 - DNA, 33 bp, Homo sapien
aaattaaagacatgaataacaggttagtggttg

SEQ ID NO: 1040625 - DNA, 33 bp, Homo sapien
tccagaggtggaacaaaatggtttggctctgta

SEQ ID NO: 1040626 - DNA, 33 bp, Homo sapien
tccagaggtggaacaatatggtttggctctgta

SEQ ID NO: 1040627 - DNA, 33 bp, Homo sapien
gtctattgctcaaggacctccagaacgtgaact

SEQ ID NO: 1040628 - DNA, 33 bp, Homo sapien
gtctattgctcaaggatctccagaacgtgaact

SEQ ID NO: 1040629 - DNA, 33 bp, Homo sapien
atataggctaatcagacgaccttaagaaaagga

SEQ ID NO: 1040630 - DNA, 33 bp, Homo sapien
atataggctaatcagatgaccttaagaaaagga

SEQ ID NO: 1040631 - DNA, 33 bp, Homo sapien
ccctgtatatgttcaaagttctctctttgtgca

SEQ ID NO: 1040632 - DNA, 33 bp, Homo sapien
ccctgtatatgttcaaggttctctctttgtgca

SEQ ID NO: 1040633 - DNA, 33 bp, Homo sapien
atcagacagcctttccacaaatggttgccctgt

SEQ ID NO: 1040634 - DNA, 33 bp, Homo sapien
atcagacagcctttccgcaaatggttgccctgt

SEQ ID NO: 1040635 - DNA, 33 bp, Homo sapien
agaacatgtcagaggaacctctggatttcttga

SEQ ID NO: 1040636 - DNA, 33 bp, Homo sapien
agaacatgtcagaggagcctctggatttcttga

SEQ ID NO: 1040637 - DNA, 33 bp, Homo sapien
cccaaaccacaggaaacaacattattgaatagc

SEQ ID NO: 1040638 - DNA, 33 bp, Homo sapien
cccaaaccacaggaaagaacattattgaatagc

SEQ ID NO: 1040639 - DNA, 33 bp, Homo sapien
ctgttggtcaaaattaagcccccagactacctg

SEQ ID NO: 1040640 - DNA, 33 bp, Homo sapien
ctgttggtcaaaattaggcccccagactacctg

SEQ ID NO: 1040641 - DNA, 33 bp, Homo sapien
ctcttagatctcaatgaaagcaagaatcctgca

SEQ ID NO: 1040642 - DNA, 33 bp, Homo sapien
ctcttagatctcaatggaagcaagaatcctgca

SEQ ID NO: 1040643 - DNA, 33 bp, Homo sapien
gaatatagcaagtcctaaaaagatgacagttat

SEQ ID NO: 1040644 - DNA, 33 bp, Homo sapien
gaatatagcaagtcctcaaaagatgacagttat

SEQ ID NO: 1040645 - DNA, 33 bp, Homo sapien
ggtaagaattaagagacggatctaagccaaatg

SEQ ID NO: 1040646 - DNA, 33 bp, Homo sapien
ggtaagaattaagagatggatctaagccaaatg

SEQ ID NO: 1040647 - DNA, 33 bp, Homo sapien
ccatgttctagggaagcagaattgcatagtgga

SEQ ID NO: 1040648 - DNA, 33 bp, Homo sapien
ccatgttctagggaaggagaattgcatagtgga

SEQ ID NO: 1040649 - DNA, 33 bp, Homo sapien
gggtgcagaaggttagaaagtgtatctggagag

SEQ ID NO: 1040650 - DNA, 33 bp, Homo sapien
gggtgcagaaggttaggaagtgtatctggagag

SEQ ID NO: 1040651 - DNA, 33 bp, Homo sapien
agggccatatatacgacaaaatgtcaatcaaaa

SEQ ID NO: 1040652 - DNA, 33 bp, Homo sapien
agggccatatatacgataaaatgtcaatcaaaa

SEQ ID NO: 1040653 - DNA, 33 bp, Homo sapien
atagcacagagaaataagaaccaggatgaaatg

SEQ ID NO: 1040654 - DNA, 33 bp, Homo sapien
atagcacagagaaataggaaccaggatgaaatg

SEQ ID NO: 1040655 - DNA, 33 bp, Homo sapien
gtttctctagcacataacaaattcaacatttta

SEQ ID NO: 1040656 - DNA, 33 bp, Homo sapien
gtttctctagcacatatcaaattcaacatttta

SEQ ID NO: 1040657 - DNA, 33 bp, Homo sapien
gagaagagaacagaaaactctcagaggaagtac

SEQ ID NO: 1040658 - DNA, 33 bp, Homo sapien
gagaagagaacagaaagctctcagaggaagtac

SEQ ID NO: 1040659 - DNA, 33 bp, Homo sapien
cagaacttggagggaaagtttcagcttgggaca

SEQ ID NO: 1040660 - DNA, 33 bp, Homo sapien
cagaacttggagggaaggtttcagcttgggaca

SEQ ID NO: 1040661 - DNA, 33 bp, Homo sapien
aaatttttcactcaataaccagcttaatgcaca

SEQ ID NO: 1040662 - DNA, 33 bp, Homo sapien
aaatttttcactcaatgaccagcttaatgcaca

SEQ ID NO: 1040663 - DNA, 33 bp, Homo sapien
tagtaaaaactacagccgataggaacccaggat

SEQ ID NO: 1040664 - DNA, 33 bp, Homo sapien
tagtaaaaactacagctgataggaacccaggat

SEQ ID NO: 1040665 - DNA, 33 bp, Homo sapien
aaatctcaatgcctaacttaaaaaacagagtta

SEQ ID NO: 1040666 - DNA, 33 bp, Homo sapien
aaatctcaatgcctaatttaaaaaacagagtta

SEQ ID NO: 1040667 - DNA, 33 bp, Homo sapien
cctggtgctatttggacgcatactttcagattc

SEQ ID NO: 1040668 - DNA, 33 bp, Homo sapien
cctggtgctatttggaggcatactttcagattc

SEQ ID NO: 1040669 - DNA, 33 bp, Homo sapien
atctactcctagcaaagtttgattattcaatac

SEQ ID NO: 1040670 - DNA, 33 bp, Homo sapien
atctactcctagcaaattttgattattcaatac

SEQ ID NO: 1040671 - DNA, 33 bp, Homo sapien
aactgggagaattaaaaaaaatgtccaaccctg

SEQ ID NO: 1040672 - DNA, 33 bp, Homo sapien
aactgggagaattaaacaaaatgtccaaccctg

SEQ ID NO: 1040673 - DNA, 33 bp, Homo sapien
ggatttaactactcagaacattttatgtaagtg

SEQ ID NO: 1040674 - DNA, 33 bp, Homo sapien
ggatttaactactcaggacattttatgtaagtg

SEQ ID NO: 1040675 - DNA, 33 bp, Homo sapien
accatgctgatgacaaaaaactaagctgtcatc

SEQ ID NO: 1040676 - DNA, 33 bp, Homo sapien
accatgctgatgacaataaactaagctgtcatc

SEQ ID NO: 1040677 - DNA, 33 bp, Homo sapien
gaacgctggagctcataaaactggagttcgtgt

SEQ ID NO: 1040678 - DNA, 33 bp, Homo sapien
gaacgctggagctcatcaaactggagttcgtgt

SEQ ID NO: 1040679 - DNA, 33 bp, Homo sapien
aatgtggagaattttaaggtttgaatagtcagc

SEQ ID NO: 1040680 - DNA, 33 bp, Homo sapien
aatgtggagaattttacggtttgaatagtcagc

SEQ ID NO: 1040681 - DNA, 33 bp, Homo sapien
aggttaagccagatcaacagagagtggtatcca

SEQ ID NO: 1040682 - DNA, 33 bp, Homo sapien
aggttaagccagatcagcagagagtggtatcca

SEQ ID NO: 1040683 - DNA, 33 bp, Homo sapien
tcaaagaatatggccaatggataccactctctg

SEQ ID NO: 1040684 - DNA, 33 bp, Homo sapien
tcaaagaatatggccagtggataccactctctg

SEQ ID NO: 1040685 - DNA, 33 bp, Homo sapien
agatagatacccattaggtttctctccttgcct

SEQ ID NO: 1040686 - DNA, 33 bp, Homo sapien
agatagatacccattatgtttctctccttgcct

SEQ ID NO: 1040687 - DNA, 33 bp, Homo sapien
gtttcttcattttggaataataagcagaatctg

SEQ ID NO: 1040688 - DNA, 33 bp, Homo sapien
gtttcttcattttggagtaataagcagaatctg

SEQ ID NO: 1040689 - DNA, 33 bp, Homo sapien
ccaaagcaggcaaaccccactgcaagtttatca

SEQ ID NO: 1040690 - DNA, 33 bp, Homo sapien
ccaaagcaggcaaacctcactgcaagtttatca

SEQ ID NO: 1040691 - DNA, 33 bp, Homo sapien
ctctgaagttctaagacgagtttgtttgggtga

SEQ ID NO: 1040692 - DNA, 33 bp, Homo sapien
ctctgaagttctaagatgagtttgtttgggtga

SEQ ID NO: 1040693 - DNA, 33 bp, Homo sapien
atctgggccttagaagcagatttggattggatt

SEQ ID NO: 1040694 - DNA, 33 bp, Homo sapien
atctgggccttagaaggagatttggattggatt

SEQ ID NO: 1040695 - DNA, 33 bp, Homo sapien
cttcttcaagtgtacacagtgatatggtttgat

SEQ ID NO: 1040696 - DNA, 33 bp, Homo sapien
cttcttcaagtgtacatagtgatatggtttgat

SEQ ID NO: 1040697 - DNA, 33 bp, Homo sapien
tttatctattacaacactgaacattacttatcc

SEQ ID NO: 1040698 - DNA, 33 bp, Homo sapien
tttatctattacaacattgaacattacttatcc

SEQ ID NO: 1040699 - DNA, 33 bp, Homo sapien
tttagcacctccctcacataataaaagtatagc

SEQ ID NO: 1040700 - DNA, 33 bp, Homo sapien
tttagcacctccctcatataataaaagtatagc

SEQ ID NO: 1040701 - DNA, 33 bp, Homo sapien
cacatcactctgatacacatacactgttcataa

SEQ ID NO: 1040702 - DNA, 33 bp, Homo sapien
cacatcactctgatacgcatacactgttcataa

SEQ ID NO: 1040703 - DNA, 33 bp, Homo sapien
gctggactataaggaaagatcatcatgagtcac

SEQ ID NO: 1040704 - DNA, 33 bp, Homo sapien
gctggactataaggaaggatcatcatgagtcac

SEQ ID NO: 1040705 - DNA, 33 bp, Homo sapien
taatttttccaagagactatttgaaccatttta

SEQ ID NO: 1040706 - DNA, 33 bp, Homo sapien
taatttttccaagagattatttgaaccatttta

SEQ ID NO: 1040707 - DNA, 33 bp, Homo sapien
tcattcctatataccaccttctcctaccatcat

SEQ ID NO: 1040708 - DNA, 33 bp, Homo sapien
tcattcctatataccatcttctcctaccatcat

SEQ ID NO: 1040709 - DNA, 33 bp, Homo sapien
ttcttcctctttcaagcctcctgaatggtcttg

SEQ ID NO: 1040710 - DNA, 33 bp, Homo sapien
ttcttcctctttcaagtctcctgaatggtcttg

SEQ ID NO: 1040711 - DNA, 33 bp, Homo sapien
ttgattatatgctaagcacaattccaacatgga

SEQ ID NO: 1040712 - DNA, 33 bp, Homo sapien
ttgattatatgctaagtacaattccaacatgga

SEQ ID NO: 1040713 - DNA, 33 bp, Homo sapien
gattaaatgagatgaaacaaataaagctatgac

SEQ ID NO: 1040714 - DNA, 33 bp, Homo sapien
gattaaatgagatgaagcaaataaagctatgac

SEQ ID NO: 1040715 - DNA, 33 bp, Homo sapien
agaggggtattttgaaacataagtgataagtga

SEQ ID NO: 1040716 - DNA, 33 bp, Homo sapien
agaggggtattttgaaccataagtgataagtga

SEQ ID NO: 1040717 - DNA, 33 bp, Homo sapien
gtttttttgggaggtaatgcaagaaaacagcag

SEQ ID NO: 1040718 - DNA, 33 bp, Homo sapien
gtttttttgggaggtagtgcaagaaaacagcag

SEQ ID NO: 1040719 - DNA, 33 bp, Homo sapien
acctacagatcgaagacggtgagaaatggatat

SEQ ID NO: 1040720 - DNA, 33 bp, Homo sapien
acctacagatcgaagagggtgagaaatggatat

SEQ ID NO: 1040721 - DNA, 33 bp, Homo sapien
ccacacaaggcagagcacacactctacatacat

SEQ ID NO: 1040722 - DNA, 33 bp, Homo sapien
ccacacaaggcagagcgcacactctacatacat

SEQ ID NO: 1040723 - DNA, 33 bp, Homo sapien
gttgtgaatgacatgccaaaagatctaaagttt

SEQ ID NO: 1040724 - DNA, 33 bp, Homo sapien
gttgtgaatgacatgctaaaagatctaaagttt

SEQ ID NO: 1040725 - DNA, 33 bp, Homo sapien
ccatgggccagttagaagagtgttccaataatg

SEQ ID NO: 1040726 - DNA, 33 bp, Homo sapien
ccatgggccagttagaggagtgttccaataatg

SEQ ID NO: 1040727 - DNA, 33 bp, Homo sapien
atgtttctgagcttataagaaacagttctctcc

SEQ ID NO: 1040728 - DNA, 33 bp, Homo sapien
atgtttctgagcttattagaaacagttctctcc

SEQ ID NO: 1040729 - DNA, 33 bp, Homo sapien
accacatggtcacagaggtcccttccatccaca

SEQ ID NO: 1040730 - DNA, 33 bp, Homo sapien
accacatggtcacagatgtcccttccatccaca

SEQ ID NO: 1040731 - DNA, 33 bp, Homo sapien
gtaaggttctgtgtcacatattaggtccaagtc

SEQ ID NO: 1040732 - DNA, 33 bp, Homo sapien
gtaaggttctgtgtcatatattaggtccaagtc

SEQ ID NO: 1040733 - DNA, 33 bp, Homo sapien
gaatgaacaaagtgaccgaaaaataacaatgcc

SEQ ID NO: 1040734 - DNA, 33 bp, Homo sapien
gaatgaacaaagtgactgaaaaataacaatgcc

SEQ ID NO: 1040735 - DNA, 33 bp, Homo sapien
gcatatttgaggctccaaaaattcttgcaatta

SEQ ID NO: 1040736 - DNA, 33 bp, Homo sapien
gcatatttgaggctccgaaaattcttgcaatta

SEQ ID NO: 1040737 - DNA, 33 bp, Homo sapien
catttgttcttgagagcaagattcagttagcaa

SEQ ID NO: 1040738 - DNA, 33 bp, Homo sapien
catttgttcttgagaggaagattcagttagcaa

SEQ ID NO: 1040739 - DNA, 33 bp, Homo sapien
tctatatcagtactaacattatagccattagcc

SEQ ID NO: 1040740 - DNA, 33 bp, Homo sapien
tctatatcagtactaagattatagccattagcc

SEQ ID NO: 1040741 - DNA, 33 bp, Homo sapien
tatgcttaatggaatgccaagcagttattgcag

SEQ ID NO: 1040742 - DNA, 33 bp, Homo sapien
tatgcttaatggaatggcaagcagttattgcag

SEQ ID NO: 1040743 - DNA, 33 bp, Homo sapien
gtttccttggagctccaaattggctcagggaac

SEQ ID NO: 1040744 - DNA, 33 bp, Homo sapien
gtttccttggagctccgaattggctcagggaac

SEQ ID NO: 1040745 - DNA, 33 bp, Homo sapien
agccagcattggaaccaagttttgtttcatttt

SEQ ID NO: 1040746 - DNA, 33 bp, Homo sapien
agccagcattggaaccgagttttgtttcatttt

SEQ ID NO: 1040747 - DNA, 33 bp, Homo sapien
gacagagaatattagcacttccttgctgtatct

SEQ ID NO: 1040748 - DNA, 33 bp, Homo sapien
gacagagaatattagcccttccttgctgtatct

SEQ ID NO: 1040749 - DNA, 33 bp, Homo sapien
acaagagcaaaaatagaccgatgaaacaagata

SEQ ID NO: 1040750 - DNA, 33 bp, Homo sapien
acaagagcaaaaataggccgatgaaacaagata

SEQ ID NO: 1040751 - DNA, 33 bp, Homo sapien
aagatataatttaccaatcatctgatcatgttt

SEQ ID NO: 1040752 - DNA, 33 bp, Homo sapien
aagatataatttaccactcatctgatcatgttt

SEQ ID NO: 1040753 - DNA, 33 bp, Homo sapien
gtaattgcaaccaataaacatttgaactcaagc

SEQ ID NO: 1040754 - DNA, 33 bp, Homo sapien
gtaattgcaaccaatagacatttgaactcaagc

SEQ ID NO: 1040755 - DNA, 33 bp, Homo sapien
aatagcagcttcaccacagtcctcaagggcctg

SEQ ID NO: 1040756 - DNA, 33 bp, Homo sapien
aatagcagcttcaccatagtcctcaagggcctg

SEQ ID NO: 1040757 - DNA, 33 bp, Homo sapien
caatttctgtcattccaagaggttttttgctaa

SEQ ID NO: 1040758 - DNA, 33 bp, Homo sapien
caatttctgtcattccgagaggttttttgctaa

SEQ ID NO: 1040759 - DNA, 33 bp, Homo sapien
cattatttgacacaaaagaatttcacagaggca

SEQ ID NO: 1040760 - DNA, 33 bp, Homo sapien
cattatttgacacaaaggaatttcacagaggca

SEQ ID NO: 1040761 - DNA, 33 bp, Homo sapien
ctgtggaagaaaccaaagaactgaaatacccag

SEQ ID NO: 1040762 - DNA, 33 bp, Homo sapien
ctgtggaagaaaccaaggaactgaaatacccag

SEQ ID NO: 1040763 - DNA, 33 bp, Homo sapien
gctctatacccaatgccgaagtcacttctaagg

SEQ ID NO: 1040764 - DNA, 33 bp, Homo sapien
gctctatacccaatgctgaagtcacttctaagg

SEQ ID NO: 1040765 - DNA, 33 bp, Homo sapien
aactgaggaacaaatccaattaggaacaacatg

SEQ ID NO: 1040766 - DNA, 33 bp, Homo sapien
aactgaggaacaaatcgaattaggaacaacatg

SEQ ID NO: 1040767 - DNA, 33 bp, Homo sapien
aactttctcaagccagacccaaaggatggggtt

SEQ ID NO: 1040768 - DNA, 33 bp, Homo sapien
aactttctcaagccaggcccaaaggatggggtt

SEQ ID NO: 1040769 - DNA, 33 bp, Homo sapien
tttcttaaaccctgataaattcttcagccagat

SEQ ID NO: 1040770 - DNA, 33 bp, Homo sapien
tttcttaaaccctgattaattcttcagccagat

SEQ ID NO: 1040771 - DNA, 33 bp, Homo sapien
tatctgtccagtagaaacttccatgatgatgaa

SEQ ID NO: 1040772 - DNA, 33 bp, Homo sapien
tatctgtccagtagaaccttccatgatgatgaa

SEQ ID NO: 1040773 - DNA, 33 bp, Homo sapien
actcagctcagagctactaagactaaaggggga

SEQ ID NO: 1040774 - DNA, 33 bp, Homo sapien
actcagctcagagctattaagactaaaggggga

SEQ ID NO: 1040775 - DNA, 33 bp, Homo sapien
tgggaaaagaagtaagaaggttttctgccaatg

SEQ ID NO: 1040776 - DNA, 33 bp, Homo sapien
tgggaaaagaagtaagcaggttttctgccaatg

SEQ ID NO: 1040777 - DNA, 33 bp, Homo sapien
ctatcccattgctgacaaattaggtgatggctt

SEQ ID NO: 1040778 - DNA, 33 bp, Homo sapien
ctatcccattgctgacgaattaggtgatggctt

SEQ ID NO: 1040779 - DNA, 33 bp, Homo sapien
atcttttcctccttgaaccttttactgatcacc

SEQ ID NO: 1040780 - DNA, 33 bp, Homo sapien
atcttttcctccttgagccttttactgatcacc

SEQ ID NO: 1040781 - DNA, 33 bp, Homo sapien
gggacctttgctacacactttactctcattatc

SEQ ID NO: 1040782 - DNA, 33 bp, Homo sapien
gggacctttgctacacgctttactctcattatc

SEQ ID NO: 1040783 - DNA, 33 bp, Homo sapien
gacccctgatgagtagcagcccagttcttaaaa

SEQ ID NO: 1040784 - DNA, 33 bp, Homo sapien
gacccctgatgagtagtagcccagttcttaaaa

SEQ ID NO: 1040785 - DNA, 33 bp, Homo sapien
ctgcaagccaggtgaaggaggttcttttttcac

SEQ ID NO: 1040786 - DNA, 33 bp, Homo sapien
ctgcaagccaggtgaatgaggttcttttttcac

SEQ ID NO: 1040787 - DNA, 33 bp, Homo sapien
tcgagaattcaaacaaatcagtctgggcctcag

SEQ ID NO: 1040788 - DNA, 33 bp, Homo sapien
tcgagaattcaaacaagtcagtctgggcctcag

SEQ ID NO: 1040789 - DNA, 33 bp, Homo sapien
gagcttcatagttccaaaagcatttctctcgct

SEQ ID NO: 1040790 - DNA, 33 bp, Homo sapien
gagcttcatagttccagaagcatttctctcgct

SEQ ID NO: 1040791 - DNA, 33 bp, Homo sapien
cccttgacagcatttaccacacagtggggtcat

SEQ ID NO: 1040792 - DNA, 33 bp, Homo sapien
cccttgacagcatttatcacacagtggggtcat

SEQ ID NO: 1040793 - DNA, 33 bp, Homo sapien
taaataataatgataacaatgaccagcttgaaa

SEQ ID NO: 1040794 - DNA, 33 bp, Homo sapien
taaataataatgataataatgaccagcttgaaa

SEQ ID NO: 1040795 - DNA, 33 bp, Homo sapien
ccttcctgctagacaaatgaatcactttgtttc

SEQ ID NO: 1040796 - DNA, 33 bp, Homo sapien
ccttcctgctagacaagtgaatcactttgtttc

SEQ ID NO: 1040797 - DNA, 33 bp, Homo sapien
atttatgtgctcatcactcactcggccagtgct

SEQ ID NO: 1040798 - DNA, 33 bp, Homo sapien
atttatgtgctcatcattcactcggccagtgct

SEQ ID NO: 1040799 - DNA, 33 bp, Homo sapien
gaaagaatgaactcagaaccgggacatagcaag

SEQ ID NO: 1040800 - DNA, 33 bp, Homo sapien
gaaagaatgaactcaggaccgggacatagcaag

SEQ ID NO: 1040801 - DNA, 33 bp, Homo sapien
aggagacttattcacaatcatttctctagtcct

SEQ ID NO: 1040802 - DNA, 33 bp, Homo sapien
aggagacttattcacagtcatttctctagtcct

SEQ ID NO: 1040803 - DNA, 33 bp, Homo sapien
aaatgatacaaactcaataataggtggaaatgc

SEQ ID NO: 1040804 - DNA, 33 bp, Homo sapien
aaatgatacaaactcagtaataggtggaaatgc

SEQ ID NO: 1040805 - DNA, 33 bp, Homo sapien
tccctgggcaagggacaatgtgtgagcaaattg

SEQ ID NO: 1040806 - DNA, 33 bp, Homo sapien
tccctgggcaagggacgatgtgtgagcaaattg

SEQ ID NO: 1040807 - DNA, 33 bp, Homo sapien
agcgtgtccataaatgaatgaaaaaaatcagta

SEQ ID NO: 1040808 - DNA, 33 bp, Homo sapien
agcgtgtccataaatggatgaaaaaaatcagta

SEQ ID NO: 1040809 - DNA, 33 bp, Homo sapien
tggtgaggctgtgacaaagggaatcaggtgacc

SEQ ID NO: 1040810 - DNA, 33 bp, Homo sapien
tggtgaggctgtgacagagggaatcaggtgacc

SEQ ID NO: 1040811 - DNA, 33 bp, Homo sapien
tgatcagaggttgttcaactgactgagaggcca

SEQ ID NO: 1040812 - DNA, 33 bp, Homo sapien
tgatcagaggttgttcgactgactgagaggcca

SEQ ID NO: 1040813 - DNA, 33 bp, Homo sapien
caggtaactgtgaacaaccaactatggaagtcc

SEQ ID NO: 1040814 - DNA, 33 bp, Homo sapien
caggtaactgtgaacagccaactatggaagtcc

SEQ ID NO: 1040815 - DNA, 33 bp, Homo sapien
ctttcagaaaattctcaactaatattcgaccca

SEQ ID NO: 1040816 - DNA, 33 bp, Homo sapien
ctttcagaaaattctcgactaatattcgaccca

SEQ ID NO: 1040817 - DNA, 33 bp, Homo sapien
ctattaataaaatgaaacgtttgggccaagata

SEQ ID NO: 1040818 - DNA, 33 bp, Homo sapien
ctattaataaaatgaagcgtttgggccaagata

SEQ ID NO: 1040819 - DNA, 33 bp, Homo sapien
cagtcccatatcaagacacaatcccttccctta

SEQ ID NO: 1040820 - DNA, 33 bp, Homo sapien
cagtcccatatcaagagacaatcccttccctta

SEQ ID NO: 1040821 - DNA, 33 bp, Homo sapien
acttaatatgtgcttcactgtggcctggatctc

SEQ ID NO: 1040822 - DNA, 33 bp, Homo sapien
acttaatatgtgcttcgctgtggcctggatctc

SEQ ID NO: 1040823 - DNA, 33 bp, Homo sapien
tcattctaagtaagcacgtgttagggtgtgagg

SEQ ID NO: 1040824 - DNA, 33 bp, Homo sapien
tcattctaagtaagcatgtgttagggtgtgagg

SEQ ID NO: 1040825 - DNA, 33 bp, Homo sapien
ctgcctttaattttacccaggaaggactcacat

SEQ ID NO: 1040826 - DNA, 33 bp, Homo sapien
ctgcctttaattttacgcaggaaggactcacat

SEQ ID NO: 1040827 - DNA, 33 bp, Homo sapien
tccttgaggggctgccgcagatgtaattgaatc

SEQ ID NO: 1040828 - DNA, 33 bp, Homo sapien
tccttgaggggctgcctcagatgtaattgaatc

SEQ ID NO: 1040829 - DNA, 33 bp, Homo sapien
tgtggagttttgaacacgagtaggagccactca

SEQ ID NO: 1040830 - DNA, 33 bp, Homo sapien
tgtggagttttgaacatgagtaggagccactca

SEQ ID NO: 1040831 - DNA, 33 bp, Homo sapien
taccctgctaccagaaagatacctaaaaatccc

SEQ ID NO: 1040832 - DNA, 33 bp, Homo sapien
taccctgctaccagaaggatacctaaaaatccc

SEQ ID NO: 1040833 - DNA, 33 bp, Homo sapien
tctgccatgggaatccaattagagacatcagtg

SEQ ID NO: 1040834 - DNA, 33 bp, Homo sapien
tctgccatgggaatccgattagagacatcagtg

SEQ ID NO: 1040835 - DNA, 33 bp, Homo sapien
tcccagatgtgtgggtcaaatcgtcactgacac

SEQ ID NO: 1040836 - DNA, 33 bp, Homo sapien
tcccagatgtgtgggtgaaatcgtcactgacac

SEQ ID NO: 1040837 - DNA, 33 bp, Homo sapien
actttttttctgggcactatgcttggcagtaga

SEQ ID NO: 1040838 - DNA, 33 bp, Homo sapien
actttttttctgggcattatgcttggcagtaga

SEQ ID NO: 1040839 - DNA, 33 bp, Homo sapien
aggctgcattgacagcacaaattggaaggacca

SEQ ID NO: 1040840 - DNA, 33 bp, Homo sapien
aggctgcattgacagcgcaaattggaaggacca

SEQ ID NO: 1040841 - DNA, 33 bp, Homo sapien
ctttccattgtcttgacccaacccgaggaacaa

SEQ ID NO: 1040842 - DNA, 33 bp, Homo sapien
ctttccattgtcttgatccaacccgaggaacaa

SEQ ID NO: 1040843 - DNA, 33 bp, Homo sapien
agagcttagattgtgacaggttgagaagcttcc

SEQ ID NO: 1040844 - DNA, 33 bp, Homo sapien
agagcttagattgtgagaggttgagaagcttcc

SEQ ID NO: 1040845 - DNA, 33 bp, Homo sapien
caaggttggaagaatccctttctgctttgtttt

SEQ ID NO: 1040846 - DNA, 33 bp, Homo sapien
caaggttggaagaatctctttctgctttgtttt

SEQ ID NO: 1040847 - DNA, 33 bp, Homo sapien
tttttactcaccactacacaaatgaggataggc

SEQ ID NO: 1040848 - DNA, 33 bp, Homo sapien
tttttactcaccactatacaaatgaggataggc

SEQ ID NO: 1040849 - DNA, 33 bp, Homo sapien
agtgatacctaaacccaaaggatgagtagaaat

SEQ ID NO: 1040850 - DNA, 33 bp, Homo sapien
agtgatacctaaacccgaaggatgagtagaaat

SEQ ID NO: 1040851 - DNA, 33 bp, Homo sapien
taagtgaataaacagaagtctctcaagcacatt

SEQ ID NO: 1040852 - DNA, 33 bp, Homo sapien
taagtgaataaacagaggtctctcaagcacatt

SEQ ID NO: 1040853 - DNA, 33 bp, Homo sapien
acaaagcctccttttgaatggattaggaaaaca

SEQ ID NO: 1040854 - DNA, 33 bp, Homo sapien
acaaagcctccttttgcatggattaggaaaaca

SEQ ID NO: 1040855 - DNA, 33 bp, Homo sapien
aagaggtgagggagggccaccacatactaattt

SEQ ID NO: 1040856 - DNA, 33 bp, Homo sapien
aagaggtgagggagggtcaccacatactaattt

SEQ ID NO: 1040857 - DNA, 33 bp, Homo sapien
tgagtggatgaaaagaaaaagcaaatgcgaaca

SEQ ID NO: 1040858 - DNA, 33 bp, Homo sapien
tgagtggatgaaaagagaaagcaaatgcgaaca

SEQ ID NO: 1040859 - DNA, 33 bp, Homo sapien
gataggaacttcaagaaaataactaaccttgct

SEQ ID NO: 1040860 - DNA, 33 bp, Homo sapien
gataggaacttcaagacaataactaaccttgct

SEQ ID NO: 1040861 - DNA, 33 bp, Homo sapien
ctgaccagtcttttccgcactagatgctgaacc

SEQ ID NO: 1040862 - DNA, 33 bp, Homo sapien
ctgaccagtcttttcctcactagatgctgaacc

SEQ ID NO: 1040863 - DNA, 33 bp, Homo sapien
tgtgaatacgacataacggatcactaactatac

SEQ ID NO: 1040864 - DNA, 33 bp, Homo sapien
tgtgaatacgacataagggatcactaactatac

SEQ ID NO: 1040865 - DNA, 33 bp, Homo sapien
aatatggttctgctcaactctaaacacctacac

SEQ ID NO: 1040866 - DNA, 33 bp, Homo sapien
aatatggttctgctcatctctaaacacctacac

SEQ ID NO: 1040867 - DNA, 33 bp, Homo sapien
agtgagtgacgattaacgctttgttatgttatg

SEQ ID NO: 1040868 - DNA, 33 bp, Homo sapien
agtgagtgacgattaatgctttgttatgttatg

SEQ ID NO: 1040869 - DNA, 33 bp, Homo sapien
ttcctgcatccaaaaaatgagagtaataaattc

SEQ ID NO: 1040870 - DNA, 33 bp, Homo sapien
ttcctgcatccaaaaagtgagagtaataaattc

SEQ ID NO: 1040871 - DNA, 33 bp, Homo sapien
gtaaatccataacatacggcctggcacttagta

SEQ ID NO: 1040872 - DNA, 33 bp, Homo sapien
gtaaatccataacatatggcctggcacttagta

SEQ ID NO: 1040873 - DNA, 33 bp, Homo sapien
aaataagcatcttgtacagccagaaactgtctg

SEQ ID NO: 1040874 - DNA, 33 bp, Homo sapien
aaataagcatcttgtatagccagaaactgtctg

SEQ ID NO: 1040875 - DNA, 33 bp, Homo sapien
atgcgcttttcttgaacactgtgcactgcagta

SEQ ID NO: 1040876 - DNA, 33 bp, Homo sapien
atgcgcttttcttgaatactgtgcactgcagta

SEQ ID NO: 1040877 - DNA, 33 bp, Homo sapien
taggtaacttgactacagccacaaagctagtaa

SEQ ID NO: 1040878 - DNA, 33 bp, Homo sapien
taggtaacttgactaccgccacaaagctagtaa

SEQ ID NO: 1040879 - DNA, 33 bp, Homo sapien
tgactttgagagcacaactctacacactcttaa

SEQ ID NO: 1040880 - DNA, 33 bp, Homo sapien
tgactttgagagcacacctctacacactcttaa

SEQ ID NO: 1040881 - DNA, 33 bp, Homo sapien
tctgcaactgactatcccttagatgttgggacc

SEQ ID NO: 1040882 - DNA, 33 bp, Homo sapien
tctgcaactgactatctcttagatgttgggacc

SEQ ID NO: 1040883 - DNA, 33 bp, Homo sapien
catctagtgaataatcccatgtcttttctctcc

SEQ ID NO: 1040884 - DNA, 33 bp, Homo sapien
catctagtgaataatctcatgtcttttctctcc

SEQ ID NO: 1040885 - DNA, 33 bp, Homo sapien
ttcacaagcagttatcaaacaccctctaggcgc

SEQ ID NO: 1040886 - DNA, 33 bp, Homo sapien
ttcacaagcagttatcgaacaccctctaggcgc

SEQ ID NO: 1040887 - DNA, 33 bp, Homo sapien
tacccgctgcagccaaatgcattagcatcattt

SEQ ID NO: 1040888 - DNA, 33 bp, Homo sapien
tacccgctgcagccaactgcattagcatcattt

SEQ ID NO: 1040889 - DNA, 33 bp, Homo sapien
aagcagaatttgaatgccaatacactaactcac

SEQ ID NO: 1040890 - DNA, 33 bp, Homo sapien
aagcagaatttgaatgtcaatacactaactcac

SEQ ID NO: 1040891 - DNA, 33 bp, Homo sapien
tccctcccttgttccaatattctgatttgttag

SEQ ID NO: 1040892 - DNA, 33 bp, Homo sapien
tccctcccttgttccagtattctgatttgttag

SEQ ID NO: 1040893 - DNA, 33 bp, Homo sapien
ggaaggagccaatagacggttggaggcagaaac

SEQ ID NO: 1040894 - DNA, 33 bp, Homo sapien
ggaaggagccaatagatggttggaggcagaaac

SEQ ID NO: 1040895 - DNA, 33 bp, Homo sapien
tatcacatcaagatgccattcattttaagagac

SEQ ID NO: 1040896 - DNA, 33 bp, Homo sapien
tatcacatcaagatgcgattcattttaagagac

SEQ ID NO: 1040897 - DNA, 33 bp, Homo sapien
ttcctcttgctcctgcgccacatactattttgt

SEQ ID NO: 1040898 - DNA, 33 bp, Homo sapien
ttcctcttgctcctgctccacatactattttgt

SEQ ID NO: 1040899 - DNA, 33 bp, Homo sapien
tgtgttgttctcaaaactggaaaatgaactgtg

SEQ ID NO: 1040900 - DNA, 33 bp, Homo sapien
tgtgttgttctcaaaattggaaaatgaactgtg

SEQ ID NO: 1040901 - DNA, 33 bp, Homo sapien
gtgacttgatatatgaactctgataagtctctc

SEQ ID NO: 1040902 - DNA, 33 bp, Homo sapien
gtgacttgatatatgagctctgataagtctctc

SEQ ID NO: 1040903 - DNA, 33 bp, Homo sapien
ttcccattctcttcatcacactaataatttaat

SEQ ID NO: 1040904 - DNA, 33 bp, Homo sapien
ttcccattctcttcatgacactaataatttaat

SEQ ID NO: 1040905 - DNA, 33 bp, Homo sapien
ctgcatatttttccatcatacataagaaggaca

SEQ ID NO: 1040906 - DNA, 33 bp, Homo sapien
ctgcatatttttccatgatacataagaaggaca

SEQ ID NO: 1040907 - DNA, 33 bp, Homo sapien
ttgatactgcaagtaacgatggccttgcagtag

SEQ ID NO: 1040908 - DNA, 33 bp, Homo sapien
ttgatactgcaagtaatgatggccttgcagtag

SEQ ID NO: 1040909 - DNA, 33 bp, Homo sapien
tcatgtgacttgtgaacaattgataagactgag

SEQ ID NO: 1040910 - DNA, 33 bp, Homo sapien
tcatgtgacttgtgaagaattgataagactgag

SEQ ID NO: 1040911 - DNA, 33 bp, Homo sapien
caagtccacgttcagggaaatcacagtggtagt

SEQ ID NO: 1040912 - DNA, 33 bp, Homo sapien
caagtccacgttcaggtaaatcacagtggtagt

SEQ ID NO: 1040913 - DNA, 33 bp, Homo sapien
ctaggcacctgagttaccttctttctaaatcag

SEQ ID NO: 1040914 - DNA, 33 bp, Homo sapien
ctaggcacctgagttatcttctttctaaatcag

SEQ ID NO: 1040915 - DNA, 33 bp, Homo sapien
ccattggcatgcaaaccaggcccgtctgattct

SEQ ID NO: 1040916 - DNA, 33 bp, Homo sapien
ccattggcatgcaaacgaggcccgtctgattct

SEQ ID NO: 1040917 - DNA, 33 bp, Homo sapien
accaagctgagcactcaatctggactccagccc

SEQ ID NO: 1040918 - DNA, 33 bp, Homo sapien
accaagctgagcactcgatctggactccagccc

SEQ ID NO: 1040919 - DNA, 33 bp, Homo sapien
aatagggaaagagaaacggttgtgaaagatgga

SEQ ID NO: 1040920 - DNA, 33 bp, Homo sapien
aatagggaaagagaaagggttgtgaaagatgga

SEQ ID NO: 1040921 - DNA, 33 bp, Homo sapien
aacatctcgctttcaacggcaaattataggcga

SEQ ID NO: 1040922 - DNA, 33 bp, Homo sapien
aacatctcgctttcaatggcaaattataggcga

SEQ ID NO: 1040923 - DNA, 33 bp, Homo sapien
caagtgcagaactacaatgactttcaaagaact

SEQ ID NO: 1040924 - DNA, 33 bp, Homo sapien
caagtgcagaactacagtgactttcaaagaact

SEQ ID NO: 1040925 - DNA, 33 bp, Homo sapien
attctgattatgtttacgatcctcaaaaggctt

SEQ ID NO: 1040926 - DNA, 33 bp, Homo sapien
attctgattatgtttatgatcctcaaaaggctt

SEQ ID NO: 1040927 - DNA, 33 bp, Homo sapien
cagatctcagagggataagaaaacaggctaagc

SEQ ID NO: 1040928 - DNA, 33 bp, Homo sapien
cagatctcagagggattagaaaacaggctaagc

SEQ ID NO: 1040929 - DNA, 33 bp, Homo sapien
tgtgtgcagtatgtaaatggtagtgattactct

SEQ ID NO: 1040930 - DNA, 33 bp, Homo sapien
tgtgtgcagtatgtaattggtagtgattactct

SEQ ID NO: 1040931 - DNA, 33 bp, Homo sapien
tcaaccagttactctacaaggatttggagtaat

SEQ ID NO: 1040932 - DNA, 33 bp, Homo sapien
tcaaccagttactctagaaggatttggagtaat

SEQ ID NO: 1040933 - DNA, 33 bp, Homo sapien
tgaaatggggctttcaaactcttctctacatgg

SEQ ID NO: 1040934 - DNA, 33 bp, Homo sapien
tgaaatggggctttcagactcttctctacatgg

SEQ ID NO: 1040935 - DNA, 33 bp, Homo sapien
tgctgccaagatcctacgcaagccaagtctggc

SEQ ID NO: 1040936 - DNA, 33 bp, Homo sapien
tgctgccaagatcctatgcaagccaagtctggc

SEQ ID NO: 1040937 - DNA, 33 bp, Homo sapien
ctaagttggtgttagacagttagataccaaacc

SEQ ID NO: 1040938 - DNA, 33 bp, Homo sapien
ctaagttggtgttagagagttagataccaaacc

SEQ ID NO: 1040939 - DNA, 33 bp, Homo sapien
gcatcttccagcatcaaaatgatctctttcctt

SEQ ID NO: 1040940 - DNA, 33 bp, Homo sapien
gcatcttccagcatcacaatgatctctttcctt

SEQ ID NO: 1040941 - DNA, 33 bp, Homo sapien
aatgttaaattgtttgcagaaaaattatactac

SEQ ID NO: 1040942 - DNA, 33 bp, Homo sapien
aatgttaaattgtttggagaaaaattatactac

SEQ ID NO: 1040943 - DNA, 33 bp, Homo sapien
gaaacctagtaaaattgaatggaagcatgaaga

SEQ ID NO: 1040944 - DNA, 33 bp, Homo sapien
gaaacctagtaaaatttaatggaagcatgaaga

SEQ ID NO: 1040945 - DNA, 33 bp, Homo sapien
aaagtatcatcagtcagcagtgttaactggact

SEQ ID NO: 1040946 - DNA, 33 bp, Homo sapien
aaagtatcatcagtcatcagtgttaactggact

SEQ ID NO: 1040947 - DNA, 33 bp, Homo sapien
gggaactgagagtggacacagatggcctctgga

SEQ ID NO: 1040948 - DNA, 33 bp, Homo sapien
gggaactgagagtggatacagatggcctctgga

SEQ ID NO: 1040949 - DNA, 33 bp, Homo sapien
agaagccaggttttcccaagtccatattttttc

SEQ ID NO: 1040950 - DNA, 33 bp, Homo sapien
agaagccaggttttcctaagtccatattttttc

SEQ ID NO: 1040951 - DNA, 33 bp, Homo sapien
atttactctcaatctcccccctgttgtcatcat

SEQ ID NO: 1040952 - DNA, 33 bp, Homo sapien
atttactctcaatctctcccctgttgtcatcat

SEQ ID NO: 1040953 - DNA, 33 bp, Homo sapien
ctcaccactctcctgaacttctttgcacagtat

SEQ ID NO: 1040954 - DNA, 33 bp, Homo sapien
ctcaccactctcctgaccttctttgcacagtat

SEQ ID NO: 1040955 - DNA, 33 bp, Homo sapien
tggatggtgaaacttacgaagtccagagagatt

SEQ ID NO: 1040956 - DNA, 33 bp, Homo sapien
tggatggtgaaacttatgaagtccagagagatt

SEQ ID NO: 1040957 - DNA, 33 bp, Homo sapien
attcatttaatttgtacagcaacaccatgaatt

SEQ ID NO: 1040958 - DNA, 33 bp, Homo sapien
attcatttaatttgtagagcaacaccatgaatt

SEQ ID NO: 1040959 - DNA, 33 bp, Homo sapien
cttgaaactttccaacccgcctctcatctccag

SEQ ID NO: 1040960 - DNA, 33 bp, Homo sapien
cttgaaactttccaactcgcctctcatctccag

SEQ ID NO: 1040961 - DNA, 33 bp, Homo sapien
aagacaatccagtaaacatgaacaataatggga

SEQ ID NO: 1040962 - DNA, 33 bp, Homo sapien
aagacaatccagtaaatatgaacaataatggga

SEQ ID NO: 1040963 - DNA, 33 bp, Homo sapien
tactaaaactagaagacgataggtacatggcag

SEQ ID NO: 1040964 - DNA, 33 bp, Homo sapien
tactaaaactagaagatgataggtacatggcag

SEQ ID NO: 1040965 - DNA, 33 bp, Homo sapien
caggggctgcttgggcagaaaccttctaatttc

SEQ ID NO: 1040966 - DNA, 33 bp, Homo sapien
caggggctgcttgggcggaaaccttctaatttc

SEQ ID NO: 1040967 - DNA, 33 bp, Homo sapien
catggcaaccatagtacagtggtctgcaagggt

SEQ ID NO: 1040968 - DNA, 33 bp, Homo sapien
catggcaaccatagtagagtggtctgcaagggt

SEQ ID NO: 1040969 - DNA, 33 bp, Homo sapien
attggctcctaccataaaataaaagtacagtaa

SEQ ID NO: 1040970 - DNA, 33 bp, Homo sapien
attggctcctaccatacaataaaagtacagtaa

SEQ ID NO: 1040971 - DNA, 33 bp, Homo sapien
cacagtctagtaacaaagacacatatgctacta

SEQ ID NO: 1040972 - DNA, 33 bp, Homo sapien
cacagtctagtaacaaggacacatatgctacta

SEQ ID NO: 1040973 - DNA, 33 bp, Homo sapien
cccgagggctggaaagaaccattcagatctaca

SEQ ID NO: 1040974 - DNA, 33 bp, Homo sapien
cccgagggctggaaaggaccattcagatctaca

SEQ ID NO: 1040975 - DNA, 33 bp, Homo sapien
aattcagccttggctacgtgacctgaaaaaact

SEQ ID NO: 1040976 - DNA, 33 bp, Homo sapien
aattcagccttggctatgtgacctgaaaaaact

SEQ ID NO: 1040977 - DNA, 33 bp, Homo sapien
agctaagttaacaaccacacaaagtcttgtaca

SEQ ID NO: 1040978 - DNA, 33 bp, Homo sapien
agctaagttaacaaccgcacaaagtcttgtaca

SEQ ID NO: 1040979 - DNA, 33 bp, Homo sapien
gagctggaagtgctagccattcattcattaagt

SEQ ID NO: 1040980 - DNA, 33 bp, Homo sapien
gagctggaagtgctagtcattcattcattaagt

SEQ ID NO: 1040981 - DNA, 33 bp, Homo sapien
aggccgtcactggagcaagttcacagagcagta

SEQ ID NO: 1040982 - DNA, 33 bp, Homo sapien
aggccgtcactggagcgagttcacagagcagta

SEQ ID NO: 1040983 - DNA, 33 bp, Homo sapien
ctctcactaatctaccaccaaaaacaccagcta

SEQ ID NO: 1040984 - DNA, 33 bp, Homo sapien
ctctcactaatctacccccaaaaacaccagcta

SEQ ID NO: 1040985 - DNA, 33 bp, Homo sapien
cttgcaaattcacttacgttaggaaatcagttg

SEQ ID NO: 1040986 - DNA, 33 bp, Homo sapien
cttgcaaattcacttaggttaggaaatcagttg

SEQ ID NO: 1040987 - DNA, 33 bp, Homo sapien
aacatgttaccaggcagtacttttggaaaacat

SEQ ID NO: 1040988 - DNA, 33 bp, Homo sapien
aacatgttaccaggcattacttttggaaaacat

SEQ ID NO: 1040989 - DNA, 33 bp, Homo sapien
ctcagatggaaaaacacattcagtaaggtgcca

SEQ ID NO: 1040990 - DNA, 33 bp, Homo sapien
ctcagatggaaaaacagattcagtaaggtgcca

SEQ ID NO: 1040991 - DNA, 33 bp, Homo sapien
ggatgagaattttgggaagactagcagagacta

SEQ ID NO: 1040992 - DNA, 33 bp, Homo sapien
ggatgagaattttggggagactagcagagacta

SEQ ID NO: 1040993 - DNA, 33 bp, Homo sapien
tatcactgtgccaccaaaggccactcgttagca

SEQ ID NO: 1040994 - DNA, 33 bp, Homo sapien
tatcactgtgccaccataggccactcgttagca

SEQ ID NO: 1040995 - DNA, 33 bp, Homo sapien
gaaattgaggctcagaagtatggtgatcacctg

SEQ ID NO: 1040996 - DNA, 33 bp, Homo sapien
gaaattgaggctcagaggtatggtgatcacctg

SEQ ID NO: 1040997 - DNA, 33 bp, Homo sapien
tctaacccctgcaaccacaaaggaaaattattt

SEQ ID NO: 1040998 - DNA, 33 bp, Homo sapien
tctaacccctgcaaccgcaaaggaaaattattt

SEQ ID NO: 1040999 - DNA, 33 bp, Homo sapien
ttttgttgttgttgcaaaaattctttaattttg

SEQ ID NO: 1041000 - DNA, 33 bp, Homo sapien
ttttgttgttgttgcataaattctttaattttg

SEQ ID NO: 1041001 - DNA, 33 bp, Homo sapien
atttaactttcttcagcagcacagtaaacactg

SEQ ID NO: 1041002 - DNA, 33 bp, Homo sapien
atttaactttcttcaggagcacagtaaacactg

SEQ ID NO: 1041003 - DNA, 33 bp, Homo sapien
tgcagcagtaaattaaatattgccttgccttca

SEQ ID NO: 1041004 - DNA, 33 bp, Homo sapien
tgcagcagtaaattaagtattgccttgccttca

SEQ ID NO: 1041005 - DNA, 33 bp, Homo sapien
cacacaatgaaaggtaaatttttgagccttctc

SEQ ID NO: 1041006 - DNA, 33 bp, Homo sapien
cacacaatgaaaggtatatttttgagccttctc

SEQ ID NO: 1041007 - DNA, 33 bp, Homo sapien
cccaaagttctctttgcgtggcatttctcttct

SEQ ID NO: 1041008 - DNA, 33 bp, Homo sapien
cccaaagttctctttgtgtggcatttctcttct

SEQ ID NO: 1041009 - DNA, 33 bp, Homo sapien
aaaggttgaccctcccacctgaatgtcttgagc

SEQ ID NO: 1041010 - DNA, 33 bp, Homo sapien
aaaggttgaccctcccgcctgaatgtcttgagc

SEQ ID NO: 1041011 - DNA, 33 bp, Homo sapien
agtatcaccgaaacaaacacagaaagtgcctca

SEQ ID NO: 1041012 - DNA, 33 bp, Homo sapien
agtatcaccgaaacaagcacagaaagtgcctca

SEQ ID NO: 1041013 - DNA, 33 bp, Homo sapien
ctctattttcttattcaatctatacaatgactt

SEQ ID NO: 1041014 - DNA, 33 bp, Homo sapien
ctctattttcttattccatctatacaatgactt

SEQ ID NO: 1041015 - DNA, 33 bp, Homo sapien
ctttgcattttgcatacggaaaaactgatctta

SEQ ID NO: 1041016 - DNA, 33 bp, Homo sapien
ctttgcattttgcatatggaaaaactgatctta

SEQ ID NO: 1041017 - DNA, 33 bp, Homo sapien
ttgacttgatattcacacattctccctagctgt

SEQ ID NO: 1041018 - DNA, 33 bp, Homo sapien
ttgacttgatattcacgcattctccctagctgt

SEQ ID NO: 1041019 - DNA, 33 bp, Homo sapien
gtaatagcattttgagaaagttagaatatcgca

SEQ ID NO: 1041020 - DNA, 33 bp, Homo sapien
gtaatagcattttgaggaagttagaatatcgca

SEQ ID NO: 1041021 - DNA, 33 bp, Homo sapien
aaagcctcaccacaggacagaatggaaaccgtc

SEQ ID NO: 1041022 - DNA, 33 bp, Homo sapien
aaagcctcaccacaggtcagaatggaaaccgtc

SEQ ID NO: 1041023 - DNA, 33 bp, Homo sapien
ttctggagtctagaacactaacttgaggcctca

SEQ ID NO: 1041024 - DNA, 33 bp, Homo sapien
ttctggagtctagaacgctaacttgaggcctca

SEQ ID NO: 1041025 - DNA, 33 bp, Homo sapien
cacctgaaatggcctccctatgtcctccctaag

SEQ ID NO: 1041026 - DNA, 33 bp, Homo sapien
cacctgaaatggcctctctatgtcctccctaag

SEQ ID NO: 1041027 - DNA, 33 bp, Homo sapien
ttccaggggccttgaaacataggtgtgacttag

SEQ ID NO: 1041028 - DNA, 33 bp, Homo sapien
ttccaggggccttgaagcataggtgtgacttag

SEQ ID NO: 1041029 - DNA, 33 bp, Homo sapien
tattccagtatctccaaaactaacaaagattag

SEQ ID NO: 1041030 - DNA, 33 bp, Homo sapien
tattccagtatctccagaactaacaaagattag

SEQ ID NO: 1041031 - DNA, 33 bp, Homo sapien
gatcagccatgctgacagcaaagacaaacaagg

SEQ ID NO: 1041032 - DNA, 33 bp, Homo sapien
gatcagccatgctgacggcaaagacaaacaagg

SEQ ID NO: 1041033 - DNA, 33 bp, Homo sapien
tgatgaggacatattcactggtgtacactgtgc

SEQ ID NO: 1041034 - DNA, 33 bp, Homo sapien
tgatgaggacatattccctggtgtacactgtgc

SEQ ID NO: 1041035 - DNA, 33 bp, Homo sapien
cttcatctcaagatgaactgattggcaacccta

SEQ ID NO: 1041036 - DNA, 33 bp, Homo sapien
cttcatctcaagatgagctgattggcaacccta

SEQ ID NO: 1041037 - DNA, 33 bp, Homo sapien
cattcagctgtggtaccgcgatctccctcccat

SEQ ID NO: 1041038 - DNA, 33 bp, Homo sapien
cattcagctgtggtactgcgatctccctcccat

SEQ ID NO: 1041039 - DNA, 33 bp, Homo sapien
ttaacaataatttccaactgtcctgtaacagca

SEQ ID NO: 1041040 - DNA, 33 bp, Homo sapien
ttaacaataatttccagctgtcctgtaacagca

SEQ ID NO: 1041041 - DNA, 33 bp, Homo sapien
cctagtaagaagttcaaagttaaagttctgctt

SEQ ID NO: 1041042 - DNA, 33 bp, Homo sapien
cctagtaagaagttcagagttaaagttctgctt

SEQ ID NO: 1041043 - DNA, 33 bp, Homo sapien
tcctggaaactgtgaaagacaccttatgttatg

SEQ ID NO: 1041044 - DNA, 33 bp, Homo sapien
tcctggaaactgtgaatgacaccttatgttatg

SEQ ID NO: 1041045 - DNA, 33 bp, Homo sapien
caaacttagtcttaacagatgccagagctcatg

SEQ ID NO: 1041046 - DNA, 33 bp, Homo sapien
caaacttagtcttaaccgatgccagagctcatg

SEQ ID NO: 1041047 - DNA, 33 bp, Homo sapien
tatctataagatgctcagaataaaacacacaca

SEQ ID NO: 1041048 - DNA, 33 bp, Homo sapien
tatctataagatgctccgaataaaacacacaca

SEQ ID NO: 1041049 - DNA, 33 bp, Homo sapien
attagctaaaatttgcaactgcatctgtgaagc

SEQ ID NO: 1041050 - DNA, 33 bp, Homo sapien
attagctaaaatttgcgactgcatctgtgaagc

SEQ ID NO: 1041051 - DNA, 33 bp, Homo sapien
aaagaaaccagggtcccgcaagagaaagatcat

SEQ ID NO: 1041052 - DNA, 33 bp, Homo sapien
aaagaaaccagggtcctgcaagagaaagatcat

SEQ ID NO: 1041053 - DNA, 33 bp, Homo sapien
ttatccaaattagttccccttggaggccctgca

SEQ ID NO: 1041054 - DNA, 33 bp, Homo sapien
ttatccaaattagttctccttggaggccctgca

SEQ ID NO: 1041055 - DNA, 33 bp, Homo sapien
cattgcatagacagtgacaaacaagattgtctc

SEQ ID NO: 1041056 - DNA, 33 bp, Homo sapien
cattgcatagacagtggcaaacaagattgtctc

SEQ ID NO: 1041057 - DNA, 33 bp, Homo sapien
tcagcattggctcaaactgggctaagacattta

SEQ ID NO: 1041058 - DNA, 33 bp, Homo sapien
tcagcattggctcaaattgggctaagacattta

SEQ ID NO: 1041059 - DNA, 33 bp, Homo sapien
ctatggggttggctgaagttgtcattgagcctg

SEQ ID NO: 1041060 - DNA, 33 bp, Homo sapien
ctatggggttggctgaggttgtcattgagcctg

SEQ ID NO: 1041061 - DNA, 33 bp, Homo sapien
tgtatgtgagtgcgaacgtgggtgcatttacgg

SEQ ID NO: 1041062 - DNA, 33 bp, Homo sapien
tgtatgtgagtgcgaatgtgggtgcatttacgg

SEQ ID NO: 1041063 - DNA, 33 bp, Homo sapien
aaagtaggtgtttagtaacatttgtcttgaaaa

SEQ ID NO: 1041064 - DNA, 33 bp, Homo sapien
aaagtaggtgtttagtgacatttgtcttgaaaa

SEQ ID NO: 1041065 - DNA, 33 bp, Homo sapien
atttaacaagaaagtgaagagagagcattggat

SEQ ID NO: 1041066 - DNA, 33 bp, Homo sapien
atttaacaagaaagtggagagagagcattggat

SEQ ID NO: 1041067 - DNA, 33 bp, Homo sapien
tgagaaacccaggtcccagaaaggtgacatagt

SEQ ID NO: 1041068 - DNA, 33 bp, Homo sapien
tgagaaacccaggtccgagaaaggtgacatagt

SEQ ID NO: 1041069 - DNA, 33 bp, Homo sapien
tctttctggagcacaggatcaatttttgcaagg

SEQ ID NO: 1041070 - DNA, 33 bp, Homo sapien
tctttctggagcacagtatcaatttttgcaagg

SEQ ID NO: 1041071 - DNA, 33 bp, Homo sapien
ctctaaggctgtttccactccttgttttctgtg

SEQ ID NO: 1041072 - DNA, 33 bp, Homo sapien
ctctaaggctgtttccgctccttgttttctgtg

SEQ ID NO: 1041073 - DNA, 33 bp, Homo sapien
gaagatctgagttcaaaatttggtcatgtcttt

SEQ ID NO: 1041074 - DNA, 33 bp, Homo sapien
gaagatctgagttcaatatttggtcatgtcttt

SEQ ID NO: 1041075 - DNA, 33 bp, Homo sapien
gatgttcagatacctcaagcagctttcacaaat

SEQ ID NO: 1041076 - DNA, 33 bp, Homo sapien
gatgttcagatacctcgagcagctttcacaaat

SEQ ID NO: 1041077 - DNA, 33 bp, Homo sapien
gggagagaggaaaaaaccataccatgccagttt

SEQ ID NO: 1041078 - DNA, 33 bp, Homo sapien
gggagagaggaaaaaatcataccatgccagttt

SEQ ID NO: 1041079 - DNA, 33 bp, Homo sapien
catgccagtttcagacgcaaagatcactctcta

SEQ ID NO: 1041080 - DNA, 33 bp, Homo sapien
catgccagtttcagactcaaagatcactctcta

SEQ ID NO: 1041081 - DNA, 33 bp, Homo sapien
acggatgtgccattgacggagacaggaaagccc

SEQ ID NO: 1041082 - DNA, 33 bp, Homo sapien
acggatgtgccattgatggagacaggaaagccc

SEQ ID NO: 1041083 - DNA, 33 bp, Homo sapien
gagcatctgacacaaaacatagcatttttgcta

SEQ ID NO: 1041084 - DNA, 33 bp, Homo sapien
gagcatctgacacaaagcatagcatttttgcta

SEQ ID NO: 1041085 - DNA, 33 bp, Homo sapien
caaaacatttaacataccttagtgaaatttgag

SEQ ID NO: 1041086 - DNA, 33 bp, Homo sapien
caaaacatttaacatatcttagtgaaatttgag

SEQ ID NO: 1041087 - DNA, 33 bp, Homo sapien
gtcagtccagatttccaaacaccagaatggcca

SEQ ID NO: 1041088 - DNA, 33 bp, Homo sapien
gtcagtccagatttccgaacaccagaatggcca

SEQ ID NO: 1041089 - DNA, 33 bp, Homo sapien
ttccatctccagaccacgtatcctcttggaacc

SEQ ID NO: 1041090 - DNA, 33 bp, Homo sapien
ttccatctccagaccatgtatcctcttggaacc

SEQ ID NO: 1041091 - DNA, 33 bp, Homo sapien
aaagaaagaacatggcaccttaaaggctggcct

SEQ ID NO: 1041092 - DNA, 33 bp, Homo sapien
aaagaaagaacatggccccttaaaggctggcct

SEQ ID NO: 1041093 - DNA, 33 bp, Homo sapien
caattcatccagactagccttaaatttttccca

SEQ ID NO: 1041094 - DNA, 33 bp, Homo sapien
caattcatccagactatccttaaatttttccca

SEQ ID NO: 1041095 - DNA, 33 bp, Homo sapien
atggcaaagtgggacaaatatatgctaggacca

SEQ ID NO: 1041096 - DNA, 33 bp, Homo sapien
atggcaaagtgggacagatatatgctaggacca

SEQ ID NO: 1041097 - DNA, 33 bp, Homo sapien
gttttgaaaagactaactctggcagtgacttga

SEQ ID NO: 1041098 - DNA, 33 bp, Homo sapien
gttttgaaaagactaattctggcagtgacttga

SEQ ID NO: 1041099 - DNA, 33 bp, Homo sapien
ggaagactgccacaatcacaatagaccgtgcac

SEQ ID NO: 1041100 - DNA, 33 bp, Homo sapien
ggaagactgccacaattacaatagaccgtgcac

SEQ ID NO: 1041101 - DNA, 33 bp, Homo sapien
gttagtcagaggaggaaatgcaacttagaagca

SEQ ID NO: 1041102 - DNA, 33 bp, Homo sapien
gttagtcagaggaggagatgcaacttagaagca

SEQ ID NO: 1041103 - DNA, 33 bp, Homo sapien
agaaaattgaggtttacagaagttgagtgactt

SEQ ID NO: 1041104 - DNA, 33 bp, Homo sapien
agaaaattgaggtttagagaagttgagtgactt

SEQ ID NO: 1041105 - DNA, 33 bp, Homo sapien
ctctggccacatctagacatgtgatctttggca

SEQ ID NO: 1041106 - DNA, 33 bp, Homo sapien
ctctggccacatctagtcatgtgatctttggca

SEQ ID NO: 1041107 - DNA, 33 bp, Homo sapien
aaactggactctacacactagaatcatacaagt

SEQ ID NO: 1041108 - DNA, 33 bp, Homo sapien
aaactggactctacaccctagaatcatacaagt

SEQ ID NO: 1041109 - DNA, 33 bp, Homo sapien
ggataatggtggagaaaaagagactaattcaag

SEQ ID NO: 1041110 - DNA, 33 bp, Homo sapien
ggataatggtggagaagaagagactaattcaag

SEQ ID NO: 1041111 - DNA, 33 bp, Homo sapien
ctagcctagttgggagcaatcacgatgtctgac

SEQ ID NO: 1041112 - DNA, 33 bp, Homo sapien
ctagcctagttgggaggaatcacgatgtctgac

SEQ ID NO: 1041113 - DNA, 33 bp, Homo sapien
ctagacaatctgtttgaaatgtgtgtatctact

SEQ ID NO: 1041114 - DNA, 33 bp, Homo sapien
ctagacaatctgtttggaatgtgtgtatctact

SEQ ID NO: 1041115 - DNA, 33 bp, Homo sapien
ctcatatttctcgccacatattttttaaaaacc

SEQ ID NO: 1041116 - DNA, 33 bp, Homo sapien
ctcatatttctcgccatatattttttaaaaacc

SEQ ID NO: 1041117 - DNA, 33 bp, Homo sapien
ccaggaagagatccgtaaagtcctagtggggag

SEQ ID NO: 1041118 - DNA, 33 bp, Homo sapien
ccaggaagagatccgtgaagtcctagtggggag

SEQ ID NO: 1041119 - DNA, 33 bp, Homo sapien
ggaaggtgcttcaatgccatggattaggggtgg

SEQ ID NO: 1041120 - DNA, 33 bp, Homo sapien
ggaaggtgcttcaatgtcatggattaggggtgg

SEQ ID NO: 1041121 - DNA, 33 bp, Homo sapien
aactccaggtgccttaacatggctgaagtcacg

SEQ ID NO: 1041122 - DNA, 33 bp, Homo sapien
aactccaggtgccttatcatggctgaagtcacg

SEQ ID NO: 1041123 - DNA, 33 bp, Homo sapien
gcaactgtgaattgtaaaaaggggaaaattagc

SEQ ID NO: 1041124 - DNA, 33 bp, Homo sapien
gcaactgtgaattgtagaaaggggaaaattagc

SEQ ID NO: 1041125 - DNA, 33 bp, Homo sapien
atagtatgcctcaaaaattatggtaaatatttt

SEQ ID NO: 1041126 - DNA, 33 bp, Homo sapien
atagtatgcctcaaaacttatggtaaatatttt

SEQ ID NO: 1041127 - DNA, 33 bp, Homo sapien
ttattttaaatttgcaaaattgtgcaaccagca

SEQ ID NO: 1041128 - DNA, 33 bp, Homo sapien
ttattttaaatttgcagaattgtgcaaccagca

SEQ ID NO: 1041129 - DNA, 33 bp, Homo sapien
gaggtgaaaataacgacactaaacacataatga

SEQ ID NO: 1041130 - DNA, 33 bp, Homo sapien
gaggtgaaaataacgagactaaacacataatga

SEQ ID NO: 1041131 - DNA, 33 bp, Homo sapien
cctcaaagcaaacctacgtggcaaacaccaaac

SEQ ID NO: 1041132 - DNA, 33 bp, Homo sapien
cctcaaagcaaacctatgtggcaaacaccaaac

SEQ ID NO: 1041133 - DNA, 33 bp, Homo sapien
tgtgtgctgggaagccagaccccagaaccagtg

SEQ ID NO: 1041134 - DNA, 33 bp, Homo sapien
tgtgtgctgggaagcctgaccccagaaccagtg

SEQ ID NO: 1041135 - DNA, 33 bp, Homo sapien
actggtgcttggcacaaccactaaaagttctgt

SEQ ID NO: 1041136 - DNA, 33 bp, Homo sapien
actggtgcttggcacagccactaaaagttctgt

SEQ ID NO: 1041137 - DNA, 33 bp, Homo sapien
agttttcaaattgtatcagtgtttcatgatttg

SEQ ID NO: 1041138 - DNA, 33 bp, Homo sapien
agttttcaaattgtattagtgtttcatgatttg

SEQ ID NO: 1041139 - DNA, 33 bp, Homo sapien
taatcacagcatcgtacggaggacacttccacc

SEQ ID NO: 1041140 - DNA, 33 bp, Homo sapien
taatcacagcatcgtatggaggacacttccacc

SEQ ID NO: 1041141 - DNA, 33 bp, Homo sapien
aagcctagttcccttacggtaaagtgcacatct

SEQ ID NO: 1041142 - DNA, 33 bp, Homo sapien
aagcctagttcccttatggtaaagtgcacatct

SEQ ID NO: 1041143 - DNA, 33 bp, Homo sapien
agggaaatgcctgcagacacacatgaagcagga

SEQ ID NO: 1041144 - DNA, 33 bp, Homo sapien
agggaaatgcctgcagccacacatgaagcagga

SEQ ID NO: 1041145 - DNA, 33 bp, Homo sapien
caggaggtttattgccaagccctcttgggagat

SEQ ID NO: 1041146 - DNA, 33 bp, Homo sapien
caggaggtttattgccgagccctcttgggagat

SEQ ID NO: 1041147 - DNA, 33 bp, Homo sapien
atctgtctaattctcaactctgtagatgactat

SEQ ID NO: 1041148 - DNA, 33 bp, Homo sapien
atctgtctaattctcagctctgtagatgactat

SEQ ID NO: 1041149 - DNA, 33 bp, Homo sapien
caatgcagaaacaaacgaatgcctctgtttttt

SEQ ID NO: 1041150 - DNA, 33 bp, Homo sapien
caatgcagaaacaaactaatgcctctgtttttt

SEQ ID NO: 1041151 - DNA, 33 bp, Homo sapien
atggttttattgaaacagtgtagatgctcaata

SEQ ID NO: 1041152 - DNA, 33 bp, Homo sapien
atggttttattgaaacggtgtagatgctcaata

SEQ ID NO: 1041153 - DNA, 33 bp, Homo sapien
aactatgaaggaatagaaaattaatgattgtcc

SEQ ID NO: 1041154 - DNA, 33 bp, Homo sapien
aactatgaaggaataggaaattaatgattgtcc

SEQ ID NO: 1041155 - DNA, 33 bp, Homo sapien
agtcatcaaagcaaaaattcttagagcccaaat

SEQ ID NO: 1041156 - DNA, 33 bp, Homo sapien
agtcatcaaagcaaaagttcttagagcccaaat

SEQ ID NO: 1041157 - DNA, 33 bp, Homo sapien
agtggtaataccaggcaaaggactgcaagatca

SEQ ID NO: 1041158 - DNA, 33 bp, Homo sapien
agtggtaataccaggcgaaggactgcaagatca

SEQ ID NO: 1041159 - DNA, 33 bp, Homo sapien
tctgaaaaccagatggacaaactcacaatcaag

SEQ ID NO: 1041160 - DNA, 33 bp, Homo sapien
tctgaaaaccagatggtcaaactcacaatcaag

SEQ ID NO: 1041161 - DNA, 33 bp, Homo sapien
tgagactgtctgccacgaggacataggagcctt

SEQ ID NO: 1041162 - DNA, 33 bp, Homo sapien
tgagactgtctgccactaggacataggagcctt

SEQ ID NO: 1041163 - DNA, 33 bp, Homo sapien
gtaacgttaccaccaaatgaatttctagagtgc

SEQ ID NO: 1041164 - DNA, 33 bp, Homo sapien
gtaacgttaccaccaagtgaatttctagagtgc

SEQ ID NO: 1041165 - DNA, 33 bp, Homo sapien
ataacataagtgataaagatcaaaaagagtgga

SEQ ID NO: 1041166 - DNA, 33 bp, Homo sapien
ataacataagtgataaggatcaaaaagagtgga

SEQ ID NO: 1041167 - DNA, 33 bp, Homo sapien
gagctattggcatttaaaacttcagcattgaat

SEQ ID NO: 1041168 - DNA, 33 bp, Homo sapien
gagctattggcatttagaacttcagcattgaat

SEQ ID NO: 1041169 - DNA, 33 bp, Homo sapien
ctgcaaaagcctcttcccaagaagtttgtccat

SEQ ID NO: 1041170 - DNA, 33 bp, Homo sapien
ctgcaaaagcctcttctcaagaagtttgtccat

SEQ ID NO: 1041171 - DNA, 33 bp, Homo sapien
gaagcaaggatgaaaaattcataggtccatgaa

SEQ ID NO: 1041172 - DNA, 33 bp, Homo sapien
gaagcaaggatgaaaacttcataggtccatgaa

SEQ ID NO: 1041173 - DNA, 33 bp, Homo sapien
tatggtctaagctgaacatcaggaagcttgatc

SEQ ID NO: 1041174 - DNA, 33 bp, Homo sapien
tatggtctaagctgaatatcaggaagcttgatc

SEQ ID NO: 1041175 - DNA, 33 bp, Homo sapien
tggcagggggtggcaacgattaagggaactgca

SEQ ID NO: 1041176 - DNA, 33 bp, Homo sapien
tggcagggggtggcaatgattaagggaactgca

SEQ ID NO: 1041177 - DNA, 33 bp, Homo sapien
tttttcactggagttaaaagagatgtttgacca

SEQ ID NO: 1041178 - DNA, 33 bp, Homo sapien
tttttcactggagttacaagagatgtttgacca

SEQ ID NO: 1041179 - DNA, 33 bp, Homo sapien
aaagcagaggtatggacggaaggcaacagagat

SEQ ID NO: 1041180 - DNA, 33 bp, Homo sapien
aaagcagaggtatggatggaaggcaacagagat

SEQ ID NO: 1041181 - DNA, 33 bp, Homo sapien
ggccatgtgactgtctcacctgttaaggactcc

SEQ ID NO: 1041182 - DNA, 33 bp, Homo sapien
ggccatgtgactgtcttacctgttaaggactcc

SEQ ID NO: 1041183 - DNA, 33 bp, Homo sapien
attccctgagtttgcacatctagaacgggaaaa

SEQ ID NO: 1041184 - DNA, 33 bp, Homo sapien
attccctgagtttgcatatctagaacgggaaaa

SEQ ID NO: 1041185 - DNA, 33 bp, Homo sapien
tctatatttttagtacccatcatagagctatgc

SEQ ID NO: 1041186 - DNA, 33 bp, Homo sapien
tctatatttttagtactcatcatagagctatgc

SEQ ID NO: 1041187 - DNA, 33 bp, Homo sapien
tgtgaagacggatataaaaaccgacaattacaa

SEQ ID NO: 1041188 - DNA, 33 bp, Homo sapien
tgtgaagacggatatagaaaccgacaattacaa

SEQ ID NO: 1041189 - DNA, 33 bp, Homo sapien
tagtgctattttctaccaacaaaacagtctcat

SEQ ID NO: 1041190 - DNA, 33 bp, Homo sapien
tagtgctattttctactaacaaaacagtctcat

SEQ ID NO: 1041191 - DNA, 33 bp, Homo sapien
ttacctattaaaacaacgcatggttctgacctg

SEQ ID NO: 1041192 - DNA, 33 bp, Homo sapien
ttacctattaaaacaatgcatggttctgacctg

SEQ ID NO: 1041193 - DNA, 33 bp, Homo sapien
atcagtgctcctgggaaaaatggctgactccaa

SEQ ID NO: 1041194 - DNA, 33 bp, Homo sapien
atcagtgctcctgggagaaatggctgactccaa

SEQ ID NO: 1041195 - DNA, 33 bp, Homo sapien
tcttacagaggtctataaaagaatatgcaagga

SEQ ID NO: 1041196 - DNA, 33 bp, Homo sapien
tcttacagaggtctatcaaagaatatgcaagga

SEQ ID NO: 1041197 - DNA, 33 bp, Homo sapien
aaaataccaatgctggcaagattgagaaagctt

SEQ ID NO: 1041198 - DNA, 33 bp, Homo sapien
aaaataccaatgctggtaagattgagaaagctt

SEQ ID NO: 1041199 - DNA, 33 bp, Homo sapien
tattttacttctaaggacatatccattgcattt

SEQ ID NO: 1041200 - DNA, 33 bp, Homo sapien
tattttacttctaaggtcatatccattgcattt

SEQ ID NO: 1041201 - DNA, 33 bp, Homo sapien
atctagttaaagcttgacaaactttttctgcaa

SEQ ID NO: 1041202 - DNA, 33 bp, Homo sapien
atctagttaaagcttggcaaactttttctgcaa

SEQ ID NO: 1041203 - DNA, 33 bp, Homo sapien
tcagggccacgcaaagccctgtcagtcgcgagc

SEQ ID NO: 1041204 - DNA, 33 bp, Homo sapien
tcagggccacgcaaaggcctgtcagtcgcgagc

SEQ ID NO: 1041205 - DNA, 33 bp, Homo sapien
acattctttccattgcaccttctagaaatccag

SEQ ID NO: 1041206 - DNA, 33 bp, Homo sapien
acattctttccattgcgccttctagaaatccag

SEQ ID NO: 1041207 - DNA, 33 bp, Homo sapien
gagaagccaactacaaaagcccatcgagtccat

SEQ ID NO: 1041208 - DNA, 33 bp, Homo sapien
gagaagccaactacaagagcccatcgagtccat

SEQ ID NO: 1041209 - DNA, 33 bp, Homo sapien
ttctctaggatttttcaaaaggagactcaggga

SEQ ID NO: 1041210 - DNA, 33 bp, Homo sapien
ttctctaggatttttcgaaaggagactcaggga

SEQ ID NO: 1041211 - DNA, 33 bp, Homo sapien
agtaatgtttctcagacgggcctcattttcttt

SEQ ID NO: 1041212 - DNA, 33 bp, Homo sapien
agtaatgtttctcagatgggcctcattttcttt

SEQ ID NO: 1041213 - DNA, 33 bp, Homo sapien
cacaacaactcagtgacgtagttattgttattt

SEQ ID NO: 1041214 - DNA, 33 bp, Homo sapien
cacaacaactcagtgatgtagttattgttattt

SEQ ID NO: 1041215 - DNA, 33 bp, Homo sapien
gactatggggctaaaaatttaagtgttatctca

SEQ ID NO: 1041216 - DNA, 33 bp, Homo sapien
gactatggggctaaaagtttaagtgttatctca

SEQ ID NO: 1041217 - DNA, 33 bp, Homo sapien
gtcctgttggaggtgaacaaaactgacttcttg

SEQ ID NO: 1041218 - DNA, 33 bp, Homo sapien
gtcctgttggaggtgagcaaaactgacttcttg

SEQ ID NO: 1041219 - DNA, 33 bp, Homo sapien
attgtagtacagttaaggaagcaaccatgtgat

SEQ ID NO: 1041220 - DNA, 33 bp, Homo sapien
attgtagtacagttaatgaagcaaccatgtgat

SEQ ID NO: 1041221 - DNA, 33 bp, Homo sapien
agggtgatacatacacaattttcaccaacttat

SEQ ID NO: 1041222 - DNA, 33 bp, Homo sapien
agggtgatacatacacgattttcaccaacttat

SEQ ID NO: 1041223 - DNA, 33 bp, Homo sapien
gaaactaaaacaaacactatccagaaagcagag

SEQ ID NO: 1041224 - DNA, 33 bp, Homo sapien
gaaactaaaacaaacagtatccagaaagcagag

SEQ ID NO: 1041225 - DNA, 33 bp, Homo sapien
ataattgagttgcctaccctttatcaggcatta

SEQ ID NO: 1041226 - DNA, 33 bp, Homo sapien
ataattgagttgcctatcctttatcaggcatta

SEQ ID NO: 1041227 - DNA, 33 bp, Homo sapien
tttcctttctgctaaaacaacatactggatggg

SEQ ID NO: 1041228 - DNA, 33 bp, Homo sapien
tttcctttctgctaaaccaacatactggatggg

SEQ ID NO: 1041229 - DNA, 33 bp, Homo sapien
ttagcacaaagcaggccctcataatgttatgcc

SEQ ID NO: 1041230 - DNA, 33 bp, Homo sapien
ttagcacaaagcaggctctcataatgttatgcc

SEQ ID NO: 1041231 - DNA, 33 bp, Homo sapien
cttttgccaaaataacactgcatatcaatcaca

SEQ ID NO: 1041232 - DNA, 33 bp, Homo sapien
cttttgccaaaataacgctgcatatcaatcaca

SEQ ID NO: 1041233 - DNA, 33 bp, Homo sapien
ctattttgtactctcaacatctgagtgatatct

SEQ ID NO: 1041234 - DNA, 33 bp, Homo sapien
ctattttgtactctcagcatctgagtgatatct

SEQ ID NO: 1041235 - DNA, 33 bp, Homo sapien
ctctccaatggccagaagtgaacctaacaatga

SEQ ID NO: 1041236 - DNA, 33 bp, Homo sapien
ctctccaatggccagaggtgaacctaacaatga

SEQ ID NO: 1041237 - DNA, 33 bp, Homo sapien
ctgggcttgtcttgaaaggatgtgctcaggtac

SEQ ID NO: 1041238 - DNA, 33 bp, Homo sapien
ctgggcttgtcttgaagggatgtgctcaggtac

SEQ ID NO: 1041239 - DNA, 33 bp, Homo sapien
gcatatatatttagaaacttcctggatttattt

SEQ ID NO: 1041240 - DNA, 33 bp, Homo sapien
gcatatatatttagaaccttcctggatttattt

SEQ ID NO: 1041241 - DNA, 33 bp, Homo sapien
atcatcagaaatacctcaggctaccttcttcct

SEQ ID NO: 1041242 - DNA, 33 bp, Homo sapien
atcatcagaaatacctgaggctaccttcttcct

SEQ ID NO: 1041243 - DNA, 33 bp, Homo sapien
gttgtcatggtattcacgtaaccagtttttcgt

SEQ ID NO: 1041244 - DNA, 33 bp, Homo sapien
gttgtcatggtattcatgtaaccagtttttcgt

SEQ ID NO: 1041245 - DNA, 33 bp, Homo sapien
cttgaacttacacccaaaacaacactctttatc

SEQ ID NO: 1041246 - DNA, 33 bp, Homo sapien
cttgaacttacacccagaacaacactctttatc

SEQ ID NO: 1041247 - DNA, 33 bp, Homo sapien
tggaaacaagatgaaaaacaaactgtgtgatga

SEQ ID NO: 1041248 - DNA, 33 bp, Homo sapien
tggaaacaagatgaaagacaaactgtgtgatga

SEQ ID NO: 1041249 - DNA, 33 bp, Homo sapien
aagtcaggctttaatacattccaccacctacca

SEQ ID NO: 1041250 - DNA, 33 bp, Homo sapien
aagtcaggctttaatatattccaccacctacca

SEQ ID NO: 1041251 - DNA, 33 bp, Homo sapien
ccactgagttgctgtacgattctagaacaaatc

SEQ ID NO: 1041252 - DNA, 33 bp, Homo sapien
ccactgagttgctgtatgattctagaacaaatc

SEQ ID NO: 1041253 - DNA, 33 bp, Homo sapien
tcactcaaatgatgaaatgtcaaggcaccattt

SEQ ID NO: 1041254 - DNA, 33 bp, Homo sapien
tcactcaaatgatgaactgtcaaggcaccattt

SEQ ID NO: 1041255 - DNA, 33 bp, Homo sapien
tgtgcctcactcattgaatgcacatggaaaatg

SEQ ID NO: 1041256 - DNA, 33 bp, Homo sapien
tgtgcctcactcattggatgcacatggaaaatg

SEQ ID NO: 1041257 - DNA, 33 bp, Homo sapien
ctcatggtggtagctgaaacataaatcatacca

SEQ ID NO: 1041258 - DNA, 33 bp, Homo sapien
ctcatggtggtagctggaacataaatcatacca

SEQ ID NO: 1041259 - DNA, 33 bp, Homo sapien
caaaagggtaatcaaccgggcagactaggattg

SEQ ID NO: 1041260 - DNA, 33 bp, Homo sapien
caaaagggtaatcaactgggcagactaggattg

SEQ ID NO: 1041261 - DNA, 33 bp, Homo sapien
tattttctatgtcagaaacttcacatttaaaaa

SEQ ID NO: 1041262 - DNA, 33 bp, Homo sapien
tattttctatgtcagacacttcacatttaaaaa

SEQ ID NO: 1041263 - DNA, 33 bp, Homo sapien
aaattcatttagatgaggaagtctttctgtttt

SEQ ID NO: 1041264 - DNA, 33 bp, Homo sapien
aaattcatttagatgatgaagtctttctgtttt

SEQ ID NO: 1041265 - DNA, 33 bp, Homo sapien
ccagggtaatgtttaagagcagaaatacagagc

SEQ ID NO: 1041266 - DNA, 33 bp, Homo sapien
ccagggtaatgtttaatagcagaaatacagagc

SEQ ID NO: 1041267 - DNA, 33 bp, Homo sapien
tctctccttccggaaacaacctcaccactagaa

SEQ ID NO: 1041268 - DNA, 33 bp, Homo sapien
tctctccttccggaaataacctcaccactagaa

SEQ ID NO: 1041269 - DNA, 33 bp, Homo sapien
ctgattgtgtactggggattacaaaggaacaag

SEQ ID NO: 1041270 - DNA, 33 bp, Homo sapien
ctgattgtgtactgggtattacaaaggaacaag

SEQ ID NO: 1041271 - DNA, 33 bp, Homo sapien
ttaagtaacactggtaacatctattatctatta

SEQ ID NO: 1041272 - DNA, 33 bp, Homo sapien
ttaagtaacactggtagcatctattatctatta

SEQ ID NO: 1041273 - DNA, 33 bp, Homo sapien
aagagtattagtgggccgattcatttaaaagta

SEQ ID NO: 1041274 - DNA, 33 bp, Homo sapien
aagagtattagtgggctgattcatttaaaagta

SEQ ID NO: 1041275 - DNA, 33 bp, Homo sapien
cagacatgctcaataacagtaggttcccttcct

SEQ ID NO: 1041276 - DNA, 33 bp, Homo sapien
cagacatgctcaataatagtaggttcccttcct

SEQ ID NO: 1041277 - DNA, 33 bp, Homo sapien
tttatcatggtcatcaaattttcagacagcatg

SEQ ID NO: 1041278 - DNA, 33 bp, Homo sapien
tttatcatggtcatcagattttcagacagcatg

SEQ ID NO: 1041279 - DNA, 33 bp, Homo sapien
tctgaagactacaacacctacttttttatcatg

SEQ ID NO: 1041280 - DNA, 33 bp, Homo sapien
tctgaagactacaacagctacttttttatcatg

SEQ ID NO: 1041281 - DNA, 33 bp, Homo sapien
ttagaggtgatggctacgtttatggcattcctt

SEQ ID NO: 1041282 - DNA, 33 bp, Homo sapien
ttagaggtgatggctatgtttatggcattcctt

SEQ ID NO: 1041283 - DNA, 33 bp, Homo sapien
tcacctccctgagccaagaactcttaggaagtt

SEQ ID NO: 1041284 - DNA, 33 bp, Homo sapien
tcacctccctgagccaggaactcttaggaagtt

SEQ ID NO: 1041285 - DNA, 33 bp, Homo sapien
aaataatattagcagagcccaataatcaactgg

SEQ ID NO: 1041286 - DNA, 33 bp, Homo sapien
aaataatattagcagatcccaataatcaactgg

SEQ ID NO: 1041287 - DNA, 33 bp, Homo sapien
atgactatttaaacacaatgcatacatggtttt

SEQ ID NO: 1041288 - DNA, 33 bp, Homo sapien
atgactatttaaacacgatgcatacatggtttt

SEQ ID NO: 1041289 - DNA, 33 bp, Homo sapien
ctcactgtgccacctgaagcaaatcccttcccc

SEQ ID NO: 1041290 - DNA, 33 bp, Homo sapien
ctcactgtgccacctggagcaaatcccttcccc

SEQ ID NO: 1041291 - DNA, 33 bp, Homo sapien
tctgtcccctgttcataataggaagaaatccat

SEQ ID NO: 1041292 - DNA, 33 bp, Homo sapien
tctgtcccctgttcatcataggaagaaatccat

SEQ ID NO: 1041293 - DNA, 33 bp, Homo sapien
caataaacagaggtagcagagatcagtgcagag

SEQ ID NO: 1041294 - DNA, 33 bp, Homo sapien
caataaacagaggtaggagagatcagtgcagag

SEQ ID NO: 1041295 - DNA, 33 bp, Homo sapien
tccttgcaatgaactacgacattttatgagctg

SEQ ID NO: 1041296 - DNA, 33 bp, Homo sapien
tccttgcaatgaactatgacattttatgagctg

SEQ ID NO: 1041297 - DNA, 33 bp, Homo sapien
tgaaagagcagagaaaccagtgaaggtggcata

SEQ ID NO: 1041298 - DNA, 33 bp, Homo sapien
tgaaagagcagagaaatcagtgaaggtggcata

SEQ ID NO: 1041299 - DNA, 33 bp, Homo sapien
accgggcattataacacgttgcctcattatgcc

SEQ ID NO: 1041300 - DNA, 33 bp, Homo sapien
accgggcattataacatgttgcctcattatgcc

SEQ ID NO: 1041301 - DNA, 33 bp, Homo sapien
ggtggaggtatggcaacagtaaaagtggtagtc

SEQ ID NO: 1041302 - DNA, 33 bp, Homo sapien
ggtggaggtatggcaatagtaaaagtggtagtc

SEQ ID NO: 1041303 - DNA, 33 bp, Homo sapien
agtgctagatgaaagcagagctagccgagagct

SEQ ID NO: 1041304 - DNA, 33 bp, Homo sapien
agtgctagatgaaagcggagctagccgagagct

SEQ ID NO: 1041305 - DNA, 33 bp, Homo sapien
gaggcaaagactgtgacacccagtagataccaa

SEQ ID NO: 1041306 - DNA, 33 bp, Homo sapien
gaggcaaagactgtgatacccagtagataccaa

SEQ ID NO: 1041307 - DNA, 33 bp, Homo sapien
taactcattttttagtaacctgtctctctcccc

SEQ ID NO: 1041308 - DNA, 33 bp, Homo sapien
taactcattttttagttacctgtctctctcccc

SEQ ID NO: 1041309 - DNA, 33 bp, Homo sapien
cagagaaagtcaaagacgatatagtgcagcaca

SEQ ID NO: 1041310 - DNA, 33 bp, Homo sapien
cagagaaagtcaaagatgatatagtgcagcaca

SEQ ID NO: 1041311 - DNA, 33 bp, Homo sapien
tatttatcacaatggacggctaatctctgtttt

SEQ ID NO: 1041312 - DNA, 33 bp, Homo sapien
tatttatcacaatggatggctaatctctgtttt

SEQ ID NO: 1041313 - DNA, 33 bp, Homo sapien
tggacatatgactcacactgcattatcttactt

SEQ ID NO: 1041314 - DNA, 33 bp, Homo sapien
tggacatatgactcacgctgcattatcttactt

SEQ ID NO: 1041315 - DNA, 33 bp, Homo sapien
ttttcttgaagtgctaaacctaaacatagtcat

SEQ ID NO: 1041316 - DNA, 33 bp, Homo sapien
ttttcttgaagtgctatacctaaacatagtcat

SEQ ID NO: 1041317 - DNA, 33 bp, Homo sapien
ctctctgctctaaggacatctgtggacctgagc

SEQ ID NO: 1041318 - DNA, 33 bp, Homo sapien
ctctctgctctaaggatatctgtggacctgagc

SEQ ID NO: 1041319 - DNA, 33 bp, Homo sapien
ggcttctgtctgtggaagaagtcaagaccactg

SEQ ID NO: 1041320 - DNA, 33 bp, Homo sapien
ggcttctgtctgtggaggaagtcaagaccactg

SEQ ID NO: 1041321 - DNA, 33 bp, Homo sapien
gtgaacaaatctggctaacaggaatcagacttt

SEQ ID NO: 1041322 - DNA, 33 bp, Homo sapien
gtgaacaaatctggcttacaggaatcagacttt

SEQ ID NO: 1041323 - DNA, 33 bp, Homo sapien
gcagtacttatcacaccgtggcatgtgtttagc

SEQ ID NO: 1041324 - DNA, 33 bp, Homo sapien
gcagtacttatcacactgtggcatgtgtttagc

SEQ ID NO: 1041325 - DNA, 33 bp, Homo sapien
tgtcaagacaccctcccgaaaggatataccaat

SEQ ID NO: 1041326 - DNA, 33 bp, Homo sapien
tgtcaagacaccctcctgaaaggatataccaat

SEQ ID NO: 1041327 - DNA, 33 bp, Homo sapien
tactttggtttagaagaatcaattctacaaata

SEQ ID NO: 1041328 - DNA, 33 bp, Homo sapien
tactttggtttagaagcatcaattctacaaata

SEQ ID NO: 1041329 - DNA, 33 bp, Homo sapien
tgaataaacctgaaaaagagcaggaggtaagaa

SEQ ID NO: 1041330 - DNA, 33 bp, Homo sapien
tgaataaacctgaaaaggagcaggaggtaagaa

SEQ ID NO: 1041331 - DNA, 33 bp, Homo sapien
tccccaatctgagaaacgaagtaagaaaaatta

SEQ ID NO: 1041332 - DNA, 33 bp, Homo sapien
tccccaatctgagaaatgaagtaagaaaaatta

SEQ ID NO: 1041333 - DNA, 33 bp, Homo sapien
cagccaagccctttacaaattcctgacccacaa

SEQ ID NO: 1041334 - DNA, 33 bp, Homo sapien
cagccaagccctttacgaattcctgacccacaa

SEQ ID NO: 1041335 - DNA, 33 bp, Homo sapien
tcttgaccatttcctccatctgaatgtgagctc

SEQ ID NO: 1041336 - DNA, 33 bp, Homo sapien
tcttgaccatttcctctatctgaatgtgagctc

SEQ ID NO: 1041337 - DNA, 33 bp, Homo sapien
tgcacatgataaagaccctgtagtgcctccatc

SEQ ID NO: 1041338 - DNA, 33 bp, Homo sapien
tgcacatgataaagactctgtagtgcctccatc

SEQ ID NO: 1041339 - DNA, 33 bp, Homo sapien
aacacacaatcaggaaaaacagattcaactgct

SEQ ID NO: 1041340 - DNA, 33 bp, Homo sapien
aacacacaatcaggaacaacagattcaactgct

SEQ ID NO: 1041341 - DNA, 33 bp, Homo sapien
ggatagagttgttaaaactaatttcagactaag

SEQ ID NO: 1041342 - DNA, 33 bp, Homo sapien
ggatagagttgttaaacctaatttcagactaag

SEQ ID NO: 1041343 - DNA, 33 bp, Homo sapien
aaataactccacaagaactagagaattcaagag

SEQ ID NO: 1041344 - DNA, 33 bp, Homo sapien
aaataactccacaagatctagagaattcaagag

SEQ ID NO: 1041345 - DNA, 33 bp, Homo sapien
tatgtgtgtgtgtataacaaaagctcccattcc

SEQ ID NO: 1041346 - DNA, 33 bp, Homo sapien
tatgtgtgtgtgtatagcaaaagctcccattcc

SEQ ID NO: 1041347 - DNA, 33 bp, Homo sapien
aaggaatagctagtacaatcactgtcatccaag

SEQ ID NO: 1041348 - DNA, 33 bp, Homo sapien
aaggaatagctagtacgatcactgtcatccaag

SEQ ID NO: 1041349 - DNA, 33 bp, Homo sapien
aactgaagttcagggaaaaccaatgatacttcc

SEQ ID NO: 1041350 - DNA, 33 bp, Homo sapien
aactgaagttcagggagaaccaatgatacttcc

SEQ ID NO: 1041351 - DNA, 33 bp, Homo sapien
agactgagattctcaacaattacagctttctgc

SEQ ID NO: 1041352 - DNA, 33 bp, Homo sapien
agactgagattctcaataattacagctttctgc

SEQ ID NO: 1041353 - DNA, 33 bp, Homo sapien
ataaaattggagtaaagcagaacattctccata

SEQ ID NO: 1041354 - DNA, 33 bp, Homo sapien
ataaaattggagtaaatcagaacattctccata

SEQ ID NO: 1041355 - DNA, 33 bp, Homo sapien
ggatgaggctcatgcacagtatggagaatgttc

SEQ ID NO: 1041356 - DNA, 33 bp, Homo sapien
ggatgaggctcatgcatagtatggagaatgttc

SEQ ID NO: 1041357 - DNA, 33 bp, Homo sapien
accttgatggaagaaacactaacctctctgagt

SEQ ID NO: 1041358 - DNA, 33 bp, Homo sapien
accttgatggaagaaagactaacctctctgagt

SEQ ID NO: 1041359 - DNA, 33 bp, Homo sapien
acaattttttctggcacgtaacagtttaatata

SEQ ID NO: 1041360 - DNA, 33 bp, Homo sapien
acaattttttctggcatgtaacagtttaatata

SEQ ID NO: 1041361 - DNA, 33 bp, Homo sapien
ctgaaatacaggaagaagagcaaaagaagagtg

SEQ ID NO: 1041362 - DNA, 33 bp, Homo sapien
ctgaaatacaggaagaggagcaaaagaagagtg

SEQ ID NO: 1041363 - DNA, 33 bp, Homo sapien
aaataatagagatccaacctagggagccatttg

SEQ ID NO: 1041364 - DNA, 33 bp, Homo sapien
aaataatagagatccatcctagggagccatttg

SEQ ID NO: 1041365 - DNA, 33 bp, Homo sapien
aaggagaagacatttcaaattaagattttcatc

SEQ ID NO: 1041366 - DNA, 33 bp, Homo sapien
aaggagaagacatttcgaattaagattttcatc

SEQ ID NO: 1041367 - DNA, 33 bp, Homo sapien
aagctgtatttgaacacagaggagggaagcaga

SEQ ID NO: 1041368 - DNA, 33 bp, Homo sapien
aagctgtatttgaacatagaggagggaagcaga

SEQ ID NO: 1041369 - DNA, 33 bp, Homo sapien
taatgagatctgttcaaccctccaggcatcctt

SEQ ID NO: 1041370 - DNA, 33 bp, Homo sapien
taatgagatctgttcacccctccaggcatcctt

SEQ ID NO: 1041371 - DNA, 33 bp, Homo sapien
tgtatgagtcttttgacgaacacttacaacatg

SEQ ID NO: 1041372 - DNA, 33 bp, Homo sapien
tgtatgagtcttttgatgaacacttacaacatg

SEQ ID NO: 1041373 - DNA, 33 bp, Homo sapien
ttctggtttttgaggacaatgttcctatttcat

SEQ ID NO: 1041374 - DNA, 33 bp, Homo sapien
ttctggtttttgaggataatgttcctatttcat

SEQ ID NO: 1041375 - DNA, 33 bp, Homo sapien
caaggcaacagggagaaaacattgtaggaactg

SEQ ID NO: 1041376 - DNA, 33 bp, Homo sapien
caaggcaacagggagagaacattgtaggaactg

SEQ ID NO: 1041377 - DNA, 33 bp, Homo sapien
ttgttcactcggtggccatttacaaagtgcaca

SEQ ID NO: 1041378 - DNA, 33 bp, Homo sapien
ttgttcactcggtggcgatttacaaagtgcaca

SEQ ID NO: 1041379 - DNA, 33 bp, Homo sapien
tgatgtttcaatatgaagaagagtctcttgaaa

SEQ ID NO: 1041380 - DNA, 33 bp, Homo sapien
tgatgtttcaatatgaggaagagtctcttgaaa

SEQ ID NO: 1041381 - DNA, 33 bp, Homo sapien
taatttaattaacacaaagctgccaggaaggaa

SEQ ID NO: 1041382 - DNA, 33 bp, Homo sapien
taatttaattaacacagagctgccaggaaggaa

SEQ ID NO: 1041383 - DNA, 33 bp, Homo sapien
cctactcactaatttcaacatattgatgtcttg

SEQ ID NO: 1041384 - DNA, 33 bp, Homo sapien
cctactcactaatttcgacatattgatgtcttg

SEQ ID NO: 1041385 - DNA, 33 bp, Homo sapien
ataccagcaatggccgacagtgatagataggaa

SEQ ID NO: 1041386 - DNA, 33 bp, Homo sapien
ataccagcaatggccggcagtgatagataggaa

SEQ ID NO: 1041387 - DNA, 33 bp, Homo sapien
gagggagacaggaataaggagaaatttattaaa

SEQ ID NO: 1041388 - DNA, 33 bp, Homo sapien
gagggagacaggaatagggagaaatttattaaa

SEQ ID NO: 1041389 - DNA, 33 bp, Homo sapien
tccaaagaacagtggcacatttgtgtgtccttc

SEQ ID NO: 1041390 - DNA, 33 bp, Homo sapien
tccaaagaacagtggcccatttgtgtgtccttc

SEQ ID NO: 1041391 - DNA, 33 bp, Homo sapien
gttaactgaaagatcaagagacagtagtaggct

SEQ ID NO: 1041392 - DNA, 33 bp, Homo sapien
gttaactgaaagatcatgagacagtagtaggct

SEQ ID NO: 1041393 - DNA, 33 bp, Homo sapien
aggcccaggaaccatgcaagaccttatcctctc

SEQ ID NO: 1041394 - DNA, 33 bp, Homo sapien
aggcccaggaaccatgtaagaccttatcctctc

SEQ ID NO: 1041395 - DNA, 33 bp, Homo sapien
tactcccttctttaacagcttcccacaccagag

SEQ ID NO: 1041396 - DNA, 33 bp, Homo sapien
tactcccttctttaacggcttcccacaccagag

SEQ ID NO: 1041397 - DNA, 33 bp, Homo sapien
agaatatgcagccgacaccctccaaagctgcta

SEQ ID NO: 1041398 - DNA, 33 bp, Homo sapien
agaatatgcagccgactccctccaaagctgcta

SEQ ID NO: 1041399 - DNA, 33 bp, Homo sapien
actgcttaaaaccatacaaccaagtagaaaaca

SEQ ID NO: 1041400 - DNA, 33 bp, Homo sapien
actgcttaaaaccatataaccaagtagaaaaca

SEQ ID NO: 1041401 - DNA, 33 bp, Homo sapien
ctcccataggctccaaacggtgattgtgatccc

SEQ ID NO: 1041402 - DNA, 33 bp, Homo sapien
ctcccataggctccaagcggtgattgtgatccc

SEQ ID NO: 1041403 - DNA, 33 bp, Homo sapien
tttattgtatttctacactgagaggcaatgaaa

SEQ ID NO: 1041404 - DNA, 33 bp, Homo sapien
tttattgtatttctactctgagaggcaatgaaa

SEQ ID NO: 1041405 - DNA, 33 bp, Homo sapien
aatggtacacagcacagagtagtagatcttcaa

SEQ ID NO: 1041406 - DNA, 33 bp, Homo sapien
aatggtacacagcacatagtagtagatcttcaa

SEQ ID NO: 1041407 - DNA, 33 bp, Homo sapien
acttgactgtaattggaattgcaagaaaaatct

SEQ ID NO: 1041408 - DNA, 33 bp, Homo sapien
acttgactgtaattggcattgcaagaaaaatct

SEQ ID NO: 1041409 - DNA, 33 bp, Homo sapien
gaagactggataatcacctaaactgtgtagtgg

SEQ ID NO: 1041410 - DNA, 33 bp, Homo sapien
gaagactggataatcagctaaactgtgtagtgg

SEQ ID NO: 1041411 - DNA, 33 bp, Homo sapien
cttcagtgactcttgcaactaaataatggacct

SEQ ID NO: 1041412 - DNA, 33 bp, Homo sapien
cttcagtgactcttgctactaaataatggacct

SEQ ID NO: 1041413 - DNA, 33 bp, Homo sapien
ccagaatagccactgaagaatgagaaaagaggt

SEQ ID NO: 1041414 - DNA, 33 bp, Homo sapien
ccagaatagccactgaggaatgagaaaagaggt

SEQ ID NO: 1041415 - DNA, 33 bp, Homo sapien
taaagctcagactctcaatccatgaaatttgag

SEQ ID NO: 1041416 - DNA, 33 bp, Homo sapien
taaagctcagactctcgatccatgaaatttgag

SEQ ID NO: 1041417 - DNA, 33 bp, Homo sapien
aagtccaagaagccaacggtttaaggagagttt

SEQ ID NO: 1041418 - DNA, 33 bp, Homo sapien
aagtccaagaagccaatggtttaaggagagttt

SEQ ID NO: 1041419 - DNA, 33 bp, Homo sapien
agagagagtgggaagcaagtgaggaataaaggg

SEQ ID NO: 1041420 - DNA, 33 bp, Homo sapien
agagagagtgggaagcgagtgaggaataaaggg

SEQ ID NO: 1041421 - DNA, 33 bp, Homo sapien
tctattttgctcagaagcttcttccttgttctc

SEQ ID NO: 1041422 - DNA, 33 bp, Homo sapien
tctattttgctcagaatcttcttccttgttctc

SEQ ID NO: 1041423 - DNA, 33 bp, Homo sapien
ttcctacggcaaaagaagcaatgaagggaaaga

SEQ ID NO: 1041424 - DNA, 33 bp, Homo sapien
ttcctacggcaaaagaggcaatgaagggaaaga

SEQ ID NO: 1041425 - DNA, 33 bp, Homo sapien
ccactctctgaagtcaagcaactagtcagtgaa

SEQ ID NO: 1041426 - DNA, 33 bp, Homo sapien
ccactctctgaagtcacgcaactagtcagtgaa

SEQ ID NO: 1041427 - DNA, 33 bp, Homo sapien
agagctaacatttgcacggtgtttactcctgtt

SEQ ID NO: 1041428 - DNA, 33 bp, Homo sapien
agagctaacatttgcatggtgtttactcctgtt

SEQ ID NO: 1041429 - DNA, 33 bp, Homo sapien
acaatattgtgtcaaaaaagacgtgtggcagca

SEQ ID NO: 1041430 - DNA, 33 bp, Homo sapien
acaatattgtgtcaaagaagacgtgtggcagca

SEQ ID NO: 1041431 - DNA, 33 bp, Homo sapien
aatacatgaaacacagaattctatgtagcccag

SEQ ID NO: 1041432 - DNA, 33 bp, Homo sapien
aatacatgaaacacaggattctatgtagcccag

SEQ ID NO: 1041433 - DNA, 33 bp, Homo sapien
ccacttcccccattcaactccaagcttcatgat

SEQ ID NO: 1041434 - DNA, 33 bp, Homo sapien
ccacttcccccattcatctccaagcttcatgat

SEQ ID NO: 1041435 - DNA, 33 bp, Homo sapien
aaactagttgtgtggacgaggagaagccatgca

SEQ ID NO: 1041436 - DNA, 33 bp, Homo sapien
aaactagttgtgtggatgaggagaagccatgca

SEQ ID NO: 1041437 - DNA, 33 bp, Homo sapien
aaggcccggcacagaaagtcctcactaaatgga

SEQ ID NO: 1041438 - DNA, 33 bp, Homo sapien
aaggcccggcacagaaggtcctcactaaatgga

SEQ ID NO: 1041439 - DNA, 33 bp, Homo sapien
aaggtgaaggttccaacgccagctttgctttta

SEQ ID NO: 1041440 - DNA, 33 bp, Homo sapien
aaggtgaaggttccaatgccagctttgctttta

SEQ ID NO: 1041441 - DNA, 33 bp, Homo sapien
ctaacaacaggtgtccaaagtggtcagggtaca

SEQ ID NO: 1041442 - DNA, 33 bp, Homo sapien
ctaacaacaggtgtccgaagtggtcagggtaca

SEQ ID NO: 1041443 - DNA, 33 bp, Homo sapien
ttcaggaatagttagacaaaaatgttcacacaa

SEQ ID NO: 1041444 - DNA, 33 bp, Homo sapien
ttcaggaatagttagataaaaatgttcacacaa

SEQ ID NO: 1041445 - DNA, 33 bp, Homo sapien
aattttagatttgcagaaactttgcaaagatgg

SEQ ID NO: 1041446 - DNA, 33 bp, Homo sapien
aattttagatttgcaggaactttgcaaagatgg

SEQ ID NO: 1041447 - DNA, 33 bp, Homo sapien
ttactccttcaaactcacacagctagtaatgtg

SEQ ID NO: 1041448 - DNA, 33 bp, Homo sapien
ttactccttcaaactcgcacagctagtaatgtg

SEQ ID NO: 1041449 - DNA, 33 bp, Homo sapien
gtaatgggtagaggccacaaagagttttgaagt

SEQ ID NO: 1041450 - DNA, 33 bp, Homo sapien
gtaatgggtagaggccgcaaagagttttgaagt

SEQ ID NO: 1041451 - DNA, 33 bp, Homo sapien
ccaacatatttcactccctattaaggaaagctg

SEQ ID NO: 1041452 - DNA, 33 bp, Homo sapien
ccaacatatttcactctctattaaggaaagctg

SEQ ID NO: 1041453 - DNA, 33 bp, Homo sapien
gtttgcatatttaccaacttttaactgtagaaa

SEQ ID NO: 1041454 - DNA, 33 bp, Homo sapien
gtttgcatatttaccatcttttaactgtagaaa

SEQ ID NO: 1041455 - DNA, 33 bp, Homo sapien
gaataaacaagcaagaactgactagcctggaag

SEQ ID NO: 1041456 - DNA, 33 bp, Homo sapien
gaataaacaagcaagagctgactagcctggaag

SEQ ID NO: 1041457 - DNA, 33 bp, Homo sapien
gttaaattgaaggaagaaatgagggttgagagg

SEQ ID NO: 1041458 - DNA, 33 bp, Homo sapien
gttaaattgaaggaagcaatgagggttgagagg

SEQ ID NO: 1041459 - DNA, 33 bp, Homo sapien
tcaatagctcagaacacggagttaaatgagaca

SEQ ID NO: 1041460 - DNA, 33 bp, Homo sapien
tcaatagctcagaacatggagttaaatgagaca

SEQ ID NO: 1041461 - DNA, 33 bp, Homo sapien
aatcagcagagaatctaaagaactggttttggt

SEQ ID NO: 1041462 - DNA, 33 bp, Homo sapien
aatcagcagagaatctcaagaactggttttggt

SEQ ID NO: 1041463 - DNA, 33 bp, Homo sapien
agtctccaagtcatatcacaatcaaagtttaag

SEQ ID NO: 1041464 - DNA, 33 bp, Homo sapien
agtctccaagtcatattacaatcaaagtttaag

SEQ ID NO: 1041465 - DNA, 33 bp, Homo sapien
gggtcaggaaccaagacgattcccataaaggca

SEQ ID NO: 1041466 - DNA, 33 bp, Homo sapien
gggtcaggaaccaagatgattcccataaaggca

SEQ ID NO: 1041467 - DNA, 33 bp, Homo sapien
caaacatagaaaccaacggcatatcatgaagcg

SEQ ID NO: 1041468 - DNA, 33 bp, Homo sapien
caaacatagaaaccaagggcatatcatgaagcg

SEQ ID NO: 1041469 - DNA, 33 bp, Homo sapien
ctcagcaaatgtttccagagagcgtttcctgca

SEQ ID NO: 1041470 - DNA, 33 bp, Homo sapien
ctcagcaaatgtttccggagagcgtttcctgca

SEQ ID NO: 1041471 - DNA, 33 bp, Homo sapien
gaattgtgtttctgccgccattgaatgaccgga

SEQ ID NO: 1041472 - DNA, 33 bp, Homo sapien
gaattgtgtttctgcctccattgaatgaccgga

SEQ ID NO: 1041473 - DNA, 33 bp, Homo sapien
aggagaagtgggttgacaacagagagtggaatc

SEQ ID NO: 1041474 - DNA, 33 bp, Homo sapien
aggagaagtgggttgataacagagagtggaatc

SEQ ID NO: 1041475 - DNA, 33 bp, Homo sapien
tttccagcagactcctaaatgatgaagagtgtc

SEQ ID NO: 1041476 - DNA, 33 bp, Homo sapien
tttccagcagactccttaatgatgaagagtgtc

SEQ ID NO: 1041477 - DNA, 33 bp, Homo sapien
tgtattagaggattgaaattggggatacgaaca

SEQ ID NO: 1041478 - DNA, 33 bp, Homo sapien
tgtattagaggattgagattggggatacgaaca

SEQ ID NO: 1041479 - DNA, 33 bp, Homo sapien
agaagaagcatgtttcccttatgcaattcatct

SEQ ID NO: 1041480 - DNA, 33 bp, Homo sapien
agaagaagcatgtttctcttatgcaattcatct

SEQ ID NO: 1041481 - DNA, 33 bp, Homo sapien
aacaggatgcaatgacaagaaataactgaggca

SEQ ID NO: 1041482 - DNA, 33 bp, Homo sapien
aacaggatgcaatgacgagaaataactgaggca

SEQ ID NO: 1041483 - DNA, 33 bp, Homo sapien
catgtaaactagagaacgctacagattgttacc

SEQ ID NO: 1041484 - DNA, 33 bp, Homo sapien
catgtaaactagagaatgctacagattgttacc

SEQ ID NO: 1041485 - DNA, 33 bp, Homo sapien
cactctctacaatgaccaatggactttgtggag

SEQ ID NO: 1041486 - DNA, 33 bp, Homo sapien
cactctctacaatgactaatggactttgtggag

SEQ ID NO: 1041487 - DNA, 33 bp, Homo sapien
tattaccagataagaaaattacacttaacttac

SEQ ID NO: 1041488 - DNA, 33 bp, Homo sapien
tattaccagataagaagattacacttaacttac

SEQ ID NO: 1041489 - DNA, 33 bp, Homo sapien
agtgtttggcacttataaaatacaagttgagat

SEQ ID NO: 1041490 - DNA, 33 bp, Homo sapien
agtgtttggcacttatgaaatacaagttgagat

SEQ ID NO: 1041491 - DNA, 33 bp, Homo sapien
gcaccagttgccactcaataaatccataaaaag

SEQ ID NO: 1041492 - DNA, 33 bp, Homo sapien
gcaccagttgccactcgataaatccataaaaag

SEQ ID NO: 1041493 - DNA, 33 bp, Homo sapien
tgtcctcaaatccaaaaggtatgctcatgcaca

SEQ ID NO: 1041494 - DNA, 33 bp, Homo sapien
tgtcctcaaatccaaacggtatgctcatgcaca

SEQ ID NO: 1041495 - DNA, 33 bp, Homo sapien
caggcagagacgatcaagttccttaccctgcta

SEQ ID NO: 1041496 - DNA, 33 bp, Homo sapien
caggcagagacgatcatgttccttaccctgcta

SEQ ID NO: 1041497 - DNA, 33 bp, Homo sapien
aaaacaaaactgcataggttgaatacctactac

SEQ ID NO: 1041498 - DNA, 33 bp, Homo sapien
aaaacaaaactgcatatgttgaatacctactac

SEQ ID NO: 1041499 - DNA, 33 bp, Homo sapien
gagtgaaatattgtacagaactcatatgataat

SEQ ID NO: 1041500 - DNA, 33 bp, Homo sapien
gagtgaaatattgtacggaactcatatgataat

SEQ ID NO: 1041501 - DNA, 33 bp, Homo sapien
taggtttagtcttggcactctgttgggattgtt

SEQ ID NO: 1041502 - DNA, 33 bp, Homo sapien
taggtttagtcttggccctctgttgggattgtt

SEQ ID NO: 1041503 - DNA, 33 bp, Homo sapien
actctcctcaccagccaaaatgaacaccgggtc

SEQ ID NO: 1041504 - DNA, 33 bp, Homo sapien
actctcctcaccagccgaaatgaacaccgggtc

SEQ ID NO: 1041505 - DNA, 33 bp, Homo sapien
taccttgagttctgggaaaaacctgagtgtaca

SEQ ID NO: 1041506 - DNA, 33 bp, Homo sapien
taccttgagttctgggtaaaacctgagtgtaca

SEQ ID NO: 1041507 - DNA, 33 bp, Homo sapien
acaagtctcagggacccaggaacatggtgctct

SEQ ID NO: 1041508 - DNA, 33 bp, Homo sapien
acaagtctcagggacctaggaacatggtgctct

SEQ ID NO: 1041509 - DNA, 33 bp, Homo sapien
atgtaaataatagggacgactgtttgtggaggg

SEQ ID NO: 1041510 - DNA, 33 bp, Homo sapien
atgtaaataatagggatgactgtttgtggaggg

SEQ ID NO: 1041511 - DNA, 33 bp, Homo sapien
cctttgagatccaacccaactccttcatctatg

SEQ ID NO: 1041512 - DNA, 33 bp, Homo sapien
cctttgagatccaacctaactccttcatctatg

SEQ ID NO: 1041513 - DNA, 33 bp, Homo sapien
cccgggattcctggaactgacaatctttgccat

SEQ ID NO: 1041514 - DNA, 33 bp, Homo sapien
cccgggattcctggaattgacaatctttgccat

SEQ ID NO: 1041515 - DNA, 33 bp, Homo sapien
gggtgggatgccggaaagagacaggcacataaa

SEQ ID NO: 1041516 - DNA, 33 bp, Homo sapien
gggtgggatgccggaacgagacaggcacataaa

SEQ ID NO: 1041517 - DNA, 33 bp, Homo sapien
ctcattaaaaatcagcaaactagtaagtggtag

SEQ ID NO: 1041518 - DNA, 33 bp, Homo sapien
ctcattaaaaatcagcgaactagtaagtggtag

SEQ ID NO: 1041519 - DNA, 33 bp, Homo sapien
atgagtatagtagagaagtagtatcatttccat

SEQ ID NO: 1041520 - DNA, 33 bp, Homo sapien
atgagtatagtagagaggtagtatcatttccat

SEQ ID NO: 1041521 - DNA, 33 bp, Homo sapien
ttagtggtacaggaaagcttgagacctggagat

SEQ ID NO: 1041522 - DNA, 33 bp, Homo sapien
ttagtggtacaggaaatcttgagacctggagat

SEQ ID NO: 1041523 - DNA, 33 bp, Homo sapien
gataatagtagaaagtgacagaggtgtcattca

SEQ ID NO: 1041524 - DNA, 33 bp, Homo sapien
gataatagtagaaagttacagaggtgtcattca

SEQ ID NO: 1041525 - DNA, 33 bp, Homo sapien
ggttatttctatgtcaaagtcacttcccctttt

SEQ ID NO: 1041526 - DNA, 33 bp, Homo sapien
ggttatttctatgtcagagtcacttcccctttt

SEQ ID NO: 1041527 - DNA, 33 bp, Homo sapien
aggttgggatgaggtcaaacactacaggaacag

SEQ ID NO: 1041528 - DNA, 33 bp, Homo sapien
aggttgggatgaggtcgaacactacaggaacag

SEQ ID NO: 1041529 - DNA, 33 bp, Homo sapien
agtggccaaaagacaacccagctcctgtgtcat

SEQ ID NO: 1041530 - DNA, 33 bp, Homo sapien
agtggccaaaagacaatccagctcctgtgtcat

SEQ ID NO: 1041531 - DNA, 33 bp, Homo sapien
aaataatatgtgccctcaaattggatcattgtg

SEQ ID NO: 1041532 - DNA, 33 bp, Homo sapien
aaataatatgtgcccttaaattggatcattgtg

SEQ ID NO: 1041533 - DNA, 33 bp, Homo sapien
ttgctctcttgaagataagaacctaatgaggct

SEQ ID NO: 1041534 - DNA, 33 bp, Homo sapien
ttgctctcttgaagattagaacctaatgaggct

SEQ ID NO: 1041535 - DNA, 33 bp, Homo sapien
cactcctagcaaatagaaagtgcttggtaacta

SEQ ID NO: 1041536 - DNA, 33 bp, Homo sapien
cactcctagcaaatagcaagtgcttggtaacta

SEQ ID NO: 1041537 - DNA, 33 bp, Homo sapien
atttcaaggtaagccaagtatgtaactaacttt

SEQ ID NO: 1041538 - DNA, 33 bp, Homo sapien
atttcaaggtaagccaggtatgtaactaacttt

SEQ ID NO: 1041539 - DNA, 33 bp, Homo sapien
tgtgtttgcatttgcaccaagtttgagttgaaa

SEQ ID NO: 1041540 - DNA, 33 bp, Homo sapien
tgtgtttgcatttgcatcaagtttgagttgaaa

SEQ ID NO: 1041541 - DNA, 33 bp, Homo sapien
gatattacagaaatgacggcgtttgacctctga

SEQ ID NO: 1041542 - DNA, 33 bp, Homo sapien
gatattacagaaatgatggcgtttgacctctga

SEQ ID NO: 1041543 - DNA, 33 bp, Homo sapien
gttccttcgtttgagacgacaattttcagtctt

SEQ ID NO: 1041544 - DNA, 33 bp, Homo sapien
gttccttcgtttgagatgacaattttcagtctt

SEQ ID NO: 1041545 - DNA, 33 bp, Homo sapien
acttcaagccccgttacgagttcactatttaat

SEQ ID NO: 1041546 - DNA, 33 bp, Homo sapien
acttcaagccccgttatgagttcactatttaat

SEQ ID NO: 1041547 - DNA, 33 bp, Homo sapien
tggatgatatcttggccgagtggcatgactttt

SEQ ID NO: 1041548 - DNA, 33 bp, Homo sapien
tggatgatatcttggctgagtggcatgactttt

SEQ ID NO: 1041549 - DNA, 33 bp, Homo sapien
ggtcatttgcgaaatgaaggcctctactgggaa

SEQ ID NO: 1041550 - DNA, 33 bp, Homo sapien
ggtcatttgcgaaatggaggcctctactgggaa

SEQ ID NO: 1041551 - DNA, 33 bp, Homo sapien
ttccaaaacgagtcaaaggtctccagccagggg

SEQ ID NO: 1041552 - DNA, 33 bp, Homo sapien
ttccaaaacgagtcaagggtctccagccagggg

SEQ ID NO: 1041553 - DNA, 33 bp, Homo sapien
aattatctaaactggcacggatccagagctcag

SEQ ID NO: 1041554 - DNA, 33 bp, Homo sapien
aattatctaaactggcgcggatccagagctcag

SEQ ID NO: 1041555 - DNA, 33 bp, Homo sapien
ggcatcatgagaatcacagcaaatccagaccaa

SEQ ID NO: 1041556 - DNA, 33 bp, Homo sapien
ggcatcatgagaatcagagcaaatccagaccaa

SEQ ID NO: 1041557 - DNA, 33 bp, Homo sapien
atccagtgcgagaacacagtgagactctatctc

SEQ ID NO: 1041558 - DNA, 33 bp, Homo sapien
atccagtgcgagaacagagtgagactctatctc

SEQ ID NO: 1041559 - DNA, 33 bp, Homo sapien
ttgcagacggctattgcagaatgctctttggac

SEQ ID NO: 1041560 - DNA, 33 bp, Homo sapien
ttgcagacggctattgtagaatgctctttggac

SEQ ID NO: 1041561 - DNA, 33 bp, Homo sapien
caagcgtgtagtagaaaggacattgatttgaag

SEQ ID NO: 1041562 - DNA, 33 bp, Homo sapien
caagcgtgtagtagaagggacattgatttgaag

SEQ ID NO: 1041563 - DNA, 33 bp, Homo sapien
ttggggtgggcctcagacacttgcactcctaaa

SEQ ID NO: 1041564 - DNA, 33 bp, Homo sapien
ttggggtgggcctcaggcacttgcactcctaaa

SEQ ID NO: 1041565 - DNA, 33 bp, Homo sapien
tgactttctagcataaccgttctgactggtgtg

SEQ ID NO: 1041566 - DNA, 33 bp, Homo sapien
tgactttctagcataatcgttctgactggtgtg

SEQ ID NO: 1041567 - DNA, 33 bp, Homo sapien
aataagaacactgtagcccttggcagtcacttc

SEQ ID NO: 1041568 - DNA, 33 bp, Homo sapien
aataagaacactgtagtccttggcagtcacttc

SEQ ID NO: 1041569 - DNA, 33 bp, Homo sapien
gcaagcgaatgtctcactataactccactagtg

SEQ ID NO: 1041570 - DNA, 33 bp, Homo sapien
gcaagcgaatgtctcattataactccactagtg

SEQ ID NO: 1041571 - DNA, 33 bp, Homo sapien
aatagtgttaggaaataaataggcaaaccagag

SEQ ID NO: 1041572 - DNA, 33 bp, Homo sapien
aatagtgttaggaaatcaataggcaaaccagag

SEQ ID NO: 1041573 - DNA, 33 bp, Homo sapien
gagatacaatgatagacggaagttgaaccaatt

SEQ ID NO: 1041574 - DNA, 33 bp, Homo sapien
gagatacaatgatagagggaagttgaaccaatt

SEQ ID NO: 1041575 - DNA, 33 bp, Homo sapien
gcaggatgaagattgaaggaaaagaaagaaact

SEQ ID NO: 1041576 - DNA, 33 bp, Homo sapien
gcaggatgaagattgacggaaaagaaagaaact

SEQ ID NO: 1041577 - DNA, 33 bp, Homo sapien
gaaaggtctgggaaaacgagctgttcagaaagt

SEQ ID NO: 1041578 - DNA, 33 bp, Homo sapien
gaaaggtctgggaaaatgagctgttcagaaagt

SEQ ID NO: 1041579 - DNA, 33 bp, Homo sapien
ggagccctaggttccaatccttttatgagttac

SEQ ID NO: 1041580 - DNA, 33 bp, Homo sapien
ggagccctaggttccagtccttttatgagttac

SEQ ID NO: 1041581 - DNA, 33 bp, Homo sapien
aacccaagtagttcaacgagagggctgataatg

SEQ ID NO: 1041582 - DNA, 33 bp, Homo sapien
aacccaagtagttcaatgagagggctgataatg

SEQ ID NO: 1041583 - DNA, 33 bp, Homo sapien
tgtaaaagacagtggccaaaaatttagaataat

SEQ ID NO: 1041584 - DNA, 33 bp, Homo sapien
tgtaaaagacagtggctaaaaatttagaataat

SEQ ID NO: 1041585 - DNA, 33 bp, Homo sapien
gggcatagcaaaaaagccataaacagaggaagc

SEQ ID NO: 1041586 - DNA, 33 bp, Homo sapien
gggcatagcaaaaaaggcataaacagaggaagc

SEQ ID NO: 1041587 - DNA, 33 bp, Homo sapien
ccccaaatcatgcaatcagtaaaaggcaatata

SEQ ID NO: 1041588 - DNA, 33 bp, Homo sapien
ccccaaatcatgcaattagtaaaaggcaatata

SEQ ID NO: 1041589 - DNA, 33 bp, Homo sapien
ttgtcttttgtggttagctggtctctatttcac

SEQ ID NO: 1041590 - DNA, 33 bp, Homo sapien
ttgtcttttgtggttatctggtctctatttcac

SEQ ID NO: 1041591 - DNA, 33 bp, Homo sapien
taggtagttgggatacaggttcaaatttgtgtg

SEQ ID NO: 1041592 - DNA, 33 bp, Homo sapien
taggtagttgggatacgggttcaaatttgtgtg

SEQ ID NO: 1041593 - DNA, 33 bp, Homo sapien
ctactggtctacttcacctgtctcaaatttgcc

SEQ ID NO: 1041594 - DNA, 33 bp, Homo sapien
ctactggtctacttcatctgtctcaaatttgcc

SEQ ID NO: 1041595 - DNA, 33 bp, Homo sapien
ataagagtcagtcttcaaatgtgtttaagatgc

SEQ ID NO: 1041596 - DNA, 33 bp, Homo sapien
ataagagtcagtcttcgaatgtgtttaagatgc

SEQ ID NO: 1041597 - DNA, 33 bp, Homo sapien
ctctgcaaatgatccaatctttctactttcgtt

SEQ ID NO: 1041598 - DNA, 33 bp, Homo sapien
ctctgcaaatgatccagtctttctactttcgtt

SEQ ID NO: 1041599 - DNA, 33 bp, Homo sapien
atatgtctatatttccaaatcctgttgaaatgt

SEQ ID NO: 1041600 - DNA, 33 bp, Homo sapien
atatgtctatatttccgaatcctgttgaaatgt

SEQ ID NO: 1041601 - DNA, 33 bp, Homo sapien
ggaacagcacaaagaaaagagcaggaataagaa

SEQ ID NO: 1041602 - DNA, 33 bp, Homo sapien
ggaacagcacaaagaagagagcaggaataagaa

SEQ ID NO: 1041603 - DNA, 33 bp, Homo sapien
atatctccaagtagaacaggtggctatgtggct

SEQ ID NO: 1041604 - DNA, 33 bp, Homo sapien
atatctccaagtagaataggtggctatgtggct

SEQ ID NO: 1041605 - DNA, 33 bp, Homo sapien
atggataaggtaatcaatgagttgtcaatgtac

SEQ ID NO: 1041606 - DNA, 33 bp, Homo sapien
atggataaggtaatcagtgagttgtcaatgtac

SEQ ID NO: 1041607 - DNA, 33 bp, Homo sapien
aaatacatgaacccaacgctttatatgctatat

SEQ ID NO: 1041608 - DNA, 33 bp, Homo sapien
aaatacatgaacccaatgctttatatgctatat

SEQ ID NO: 1041609 - DNA, 33 bp, Homo sapien
tctgtttttgtccacgaataaaggaatggttgt

SEQ ID NO: 1041610 - DNA, 33 bp, Homo sapien
tctgtttttgtccacggataaaggaatggttgt

SEQ ID NO: 1041611 - DNA, 33 bp, Homo sapien
tgacatgatatatttcacgcttactactttatc

SEQ ID NO: 1041612 - DNA, 33 bp, Homo sapien
tgacatgatatatttctcgcttactactttatc

SEQ ID NO: 1041613 - DNA, 33 bp, Homo sapien
aggaagacgtgagaagaaaagttgcaagaaccc

SEQ ID NO: 1041614 - DNA, 33 bp, Homo sapien
aggaagacgtgagaagcaaagttgcaagaaccc

SEQ ID NO: 1041615 - DNA, 33 bp, Homo sapien
gccaaggggctttgatgacctgaaatgttaaat

SEQ ID NO: 1041616 - DNA, 33 bp, Homo sapien
gccaaggggctttgattacctgaaatgttaaat

SEQ ID NO: 1041617 - DNA, 33 bp, Homo sapien
tcctaatcaaagcaacagtggaattaaagggta

SEQ ID NO: 1041618 - DNA, 33 bp, Homo sapien
tcctaatcaaagcaacggtggaattaaagggta

SEQ ID NO: 1041619 - DNA, 33 bp, Homo sapien
tatttgattattcttaacaattcacacttctca

SEQ ID NO: 1041620 - DNA, 33 bp, Homo sapien
tatttgattattcttagcaattcacacttctca

SEQ ID NO: 1041621 - DNA, 33 bp, Homo sapien
aagcctctcttccttacgtgtgttagttcttgc

SEQ ID NO: 1041622 - DNA, 33 bp, Homo sapien
aagcctctcttccttatgtgtgttagttcttgc

SEQ ID NO: 1041623 - DNA, 33 bp, Homo sapien
catgaatgctgtcagaacctttgtttttcctca

SEQ ID NO: 1041624 - DNA, 33 bp, Homo sapien
catgaatgctgtcagagcctttgtttttcctca

SEQ ID NO: 1041625 - DNA, 33 bp, Homo sapien
tattccatgaaggtaaacagcaggctgggagtg

SEQ ID NO: 1041626 - DNA, 33 bp, Homo sapien
tattccatgaaggtaagcagcaggctgggagtg

SEQ ID NO: 1041627 - DNA, 33 bp, Homo sapien
aggtagcaaacatcagcagatactgtggctcac

SEQ ID NO: 1041628 - DNA, 33 bp, Homo sapien
aggtagcaaacatcaggagatactgtggctcac

SEQ ID NO: 1041629 - DNA, 33 bp, Homo sapien
tctaacacctatacacggctttctcatcagcag

SEQ ID NO: 1041630 - DNA, 33 bp, Homo sapien
tctaacacctatacactgctttctcatcagcag

SEQ ID NO: 1041631 - DNA, 33 bp, Homo sapien
ttagaagttcttccaacgtggaatcaagtcagt

SEQ ID NO: 1041632 - DNA, 33 bp, Homo sapien
ttagaagttcttccaatgtggaatcaagtcagt

SEQ ID NO: 1041633 - DNA, 33 bp, Homo sapien
gtattaggttcaaacacacaaatctggaaagac

SEQ ID NO: 1041634 - DNA, 33 bp, Homo sapien
gtattaggttcaaacatacaaatctggaaagac

SEQ ID NO: 1041635 - DNA, 33 bp, Homo sapien
aagaagatgaagaagaggtagatgaagaagaag

SEQ ID NO: 1041636 - DNA, 33 bp, Homo sapien
aagaagatgaagaagatgtagatgaagaagaag

SEQ ID NO: 1041637 - DNA, 33 bp, Homo sapien
aaataaatgttcagcacatttaccggacaaaag

SEQ ID NO: 1041638 - DNA, 33 bp, Homo sapien
aaataaatgttcagcatatttaccggacaaaag

SEQ ID NO: 1041639 - DNA, 33 bp, Homo sapien
ggggcagaagcaagtaagtgtcacagtctcagt

SEQ ID NO: 1041640 - DNA, 33 bp, Homo sapien
ggggcagaagcaagtacgtgtcacagtctcagt

SEQ ID NO: 1041641 - DNA, 33 bp, Homo sapien
tatctttcttcttgacaattacagtaataggct

SEQ ID NO: 1041642 - DNA, 33 bp, Homo sapien
tatctttcttcttgaccattacagtaataggct

SEQ ID NO: 1041643 - DNA, 33 bp, Homo sapien
ataaggtctgttctcagccttgacaggagacac

SEQ ID NO: 1041644 - DNA, 33 bp, Homo sapien
ataaggtctgttctcatccttgacaggagacac

SEQ ID NO: 1041645 - DNA, 33 bp, Homo sapien
gagatgttagggctcgacagtatctcagactct

SEQ ID NO: 1041646 - DNA, 33 bp, Homo sapien
gagatgttagggctcggcagtatctcagactct

SEQ ID NO: 1041647 - DNA, 33 bp, Homo sapien
gtaagaagtaagtggcaatatatttagagatag

SEQ ID NO: 1041648 - DNA, 33 bp, Homo sapien
gtaagaagtaagtggctatatatttagagatag

SEQ ID NO: 1041649 - DNA, 33 bp, Homo sapien
gccagacattctgtgcacactgcttcaacccga

SEQ ID NO: 1041650 - DNA, 33 bp, Homo sapien
gccagacattctgtgctcactgcttcaacccga

SEQ ID NO: 1041651 - DNA, 33 bp, Homo sapien
tactttcccagccttacctttgaatggaaaatg

SEQ ID NO: 1041652 - DNA, 33 bp, Homo sapien
tactttcccagccttatctttgaatggaaaatg

SEQ ID NO: 1041653 - DNA, 33 bp, Homo sapien
gcttgccttggctttacgtgtcccctcaacctt

SEQ ID NO: 1041654 - DNA, 33 bp, Homo sapien
gcttgccttggctttatgtgtcccctcaacctt

SEQ ID NO: 1041655 - DNA, 33 bp, Homo sapien
aagattgcgttagtgaacacattcaactatttt

SEQ ID NO: 1041656 - DNA, 33 bp, Homo sapien
aagattgcgttagtgatcacattcaactatttt

SEQ ID NO: 1041657 - DNA, 33 bp, Homo sapien
cacacactaaggcttaagacactgggaaaggca

SEQ ID NO: 1041658 - DNA, 33 bp, Homo sapien
cacacactaaggcttaggacactgggaaaggca

SEQ ID NO: 1041659 - DNA, 33 bp, Homo sapien
ttcagaaagaaacaccagaacagatggtctcag

SEQ ID NO: 1041660 - DNA, 33 bp, Homo sapien
ttcagaaagaaacaccggaacagatggtctcag

SEQ ID NO: 1041661 - DNA, 33 bp, Homo sapien
gtctgtaagaccaacaccacttcaccaaatgat

SEQ ID NO: 1041662 - DNA, 33 bp, Homo sapien
gtctgtaagaccaacatcacttcaccaaatgat

SEQ ID NO: 1041663 - DNA, 33 bp, Homo sapien
gcaacttatggttaaagttccttctagttgata

SEQ ID NO: 1041664 - DNA, 33 bp, Homo sapien
gcaacttatggttaaatttccttctagttgata

SEQ ID NO: 1041665 - DNA, 33 bp, Homo sapien
ttcatatgcatgggaactagcatcagtgtctct

SEQ ID NO: 1041666 - DNA, 33 bp, Homo sapien
ttcatatgcatgggaagtagcatcagtgtctct

SEQ ID NO: 1041667 - DNA, 33 bp, Homo sapien
acctcccatgacttatcagtgtcctttagtatt

SEQ ID NO: 1041668 - DNA, 33 bp, Homo sapien
acctcccatgacttatgagtgtcctttagtatt

SEQ ID NO: 1041669 - DNA, 33 bp, Homo sapien
acaggcctcagatcaaaggcctgtttaaattga

SEQ ID NO: 1041670 - DNA, 33 bp, Homo sapien
acaggcctcagatcaagggcctgtttaaattga

SEQ ID NO: 1041671 - DNA, 33 bp, Homo sapien
tagaactttaaaattaagtcagaaagagccttg

SEQ ID NO: 1041672 - DNA, 33 bp, Homo sapien
tagaactttaaaattatgtcagaaagagccttg

SEQ ID NO: 1041673 - DNA, 33 bp, Homo sapien
gttaataaaagtcaaactcacccagaccctgaa

SEQ ID NO: 1041674 - DNA, 33 bp, Homo sapien
gttaataaaagtcaaattcacccagaccctgaa

SEQ ID NO: 1041675 - DNA, 33 bp, Homo sapien
caaacaagacaaatgcactatcaactttaaatt

SEQ ID NO: 1041676 - DNA, 33 bp, Homo sapien
caaacaagacaaatgcgctatcaactttaaatt

SEQ ID NO: 1041677 - DNA, 33 bp, Homo sapien
tgatttgggaaaacgacggacttgatactttat

SEQ ID NO: 1041678 - DNA, 33 bp, Homo sapien
tgatttgggaaaacgatggacttgatactttat

SEQ ID NO: 1041679 - DNA, 33 bp, Homo sapien
gaggcaaaagtgaaagccagattatggtgagct

SEQ ID NO: 1041680 - DNA, 33 bp, Homo sapien
gaggcaaaagtgaaaggcagattatggtgagct

SEQ ID NO: 1041681 - DNA, 33 bp, Homo sapien
cagcagaatttcccacagatggccaaaaagaca

SEQ ID NO: 1041682 - DNA, 33 bp, Homo sapien
cagcagaatttcccacggatggccaaaaagaca

SEQ ID NO: 1041683 - DNA, 33 bp, Homo sapien
aggatagttggtggctcacttcaaaaaggcccc

SEQ ID NO: 1041684 - DNA, 33 bp, Homo sapien
aggatagttggtggcttacttcaaaaaggcccc

SEQ ID NO: 1041685 - DNA, 33 bp, Homo sapien
ctcaagacctatttcacaggtgtagtacatcgg

SEQ ID NO: 1041686 - DNA, 33 bp, Homo sapien
ctcaagacctatttcagaggtgtagtacatcgg

SEQ ID NO: 1041687 - DNA, 33 bp, Homo sapien
taaatgtaatgtgttcaatacaaaaacacaacc

SEQ ID NO: 1041688 - DNA, 33 bp, Homo sapien
taaatgtaatgtgttcgatacaaaaacacaacc

SEQ ID NO: 1041689 - DNA, 33 bp, Homo sapien
taggggtctccagggaaacagaactgataaaat

SEQ ID NO: 1041690 - DNA, 33 bp, Homo sapien
taggggtctccagggacacagaactgataaaat

SEQ ID NO: 1041691 - DNA, 33 bp, Homo sapien
aagtagactttccaaacagagctacaatatcaa

SEQ ID NO: 1041692 - DNA, 33 bp, Homo sapien
aagtagactttccaaatagagctacaatatcaa

SEQ ID NO: 1041693 - DNA, 33 bp, Homo sapien
ttcatatgacctttcactctcatttattccaaa

SEQ ID NO: 1041694 - DNA, 33 bp, Homo sapien
ttcatatgacctttcattctcatttattccaaa

SEQ ID NO: 1041695 - DNA, 33 bp, Homo sapien
aatagacattcaggacaaaataacttttgattt

SEQ ID NO: 1041696 - DNA, 33 bp, Homo sapien
aatagacattcaggactaaataacttttgattt

SEQ ID NO: 1041697 - DNA, 33 bp, Homo sapien
gctgtagttgaaacacaaaaacagggaagacat

SEQ ID NO: 1041698 - DNA, 33 bp, Homo sapien
gctgtagttgaaacacgaaaacagggaagacat

SEQ ID NO: 1041699 - DNA, 33 bp, Homo sapien
aaatggccaataaaaacttgcaaagattcctgg

SEQ ID NO: 1041700 - DNA, 33 bp, Homo sapien
aaatggccaataaaaatttgcaaagattcctgg

SEQ ID NO: 1041701 - DNA, 33 bp, Homo sapien
gcccttcaatacagaaaagtatgcataagaccc

SEQ ID NO: 1041702 - DNA, 33 bp, Homo sapien
gcccttcaatacagaagagtatgcataagaccc

SEQ ID NO: 1041703 - DNA, 33 bp, Homo sapien
atacacctctgggttacgcaagcatgtgctgtc

SEQ ID NO: 1041704 - DNA, 33 bp, Homo sapien
atacacctctgggttatgcaagcatgtgctgtc

SEQ ID NO: 1041705 - DNA, 33 bp, Homo sapien
aaaatggtgcttttaaacaaaggcataaagggt

SEQ ID NO: 1041706 - DNA, 33 bp, Homo sapien
aaaatggtgcttttaagcaaaggcataaagggt

SEQ ID NO: 1041707 - DNA, 33 bp, Homo sapien
cttctaggtccctggcaaatatgggattcctcc

SEQ ID NO: 1041708 - DNA, 33 bp, Homo sapien
cttctaggtccctggcgaatatgggattcctcc

SEQ ID NO: 1041709 - DNA, 33 bp, Homo sapien
gccttctggaagagcaacatagaacctagatgt

SEQ ID NO: 1041710 - DNA, 33 bp, Homo sapien
gccttctggaagagcagcatagaacctagatgt

SEQ ID NO: 1041711 - DNA, 33 bp, Homo sapien
attagggctgaataacagtgtctacttgggtgt

SEQ ID NO: 1041712 - DNA, 33 bp, Homo sapien
attagggctgaataacggtgtctacttgggtgt

SEQ ID NO: 1041713 - DNA, 33 bp, Homo sapien
agcacttccaatccaacgtgtcaaaaaccaagc

SEQ ID NO: 1041714 - DNA, 33 bp, Homo sapien
agcacttccaatccaatgtgtcaaaaaccaagc

SEQ ID NO: 1041715 - DNA, 33 bp, Homo sapien
ttttattccctttcacaggaagcacaaccatct

SEQ ID NO: 1041716 - DNA, 33 bp, Homo sapien
ttttattccctttcacgggaagcacaaccatct

SEQ ID NO: 1041717 - DNA, 33 bp, Homo sapien
cgcaaagtcagagttcaaacatgcagatcttca

SEQ ID NO: 1041718 - DNA, 33 bp, Homo sapien
cgcaaagtcagagttccaacatgcagatcttca

SEQ ID NO: 1041719 - DNA, 33 bp, Homo sapien
attagctggcttctgcaaggaattttgttggag

SEQ ID NO: 1041720 - DNA, 33 bp, Homo sapien
attagctggcttctgcgaggaattttgttggag

SEQ ID NO: 1041721 - DNA, 33 bp, Homo sapien
gggtcaatgagccaagaaaaagaatgcagttgt

SEQ ID NO: 1041722 - DNA, 33 bp, Homo sapien
gggtcaatgagccaaggaaaagaatgcagttgt

SEQ ID NO: 1041723 - DNA, 33 bp, Homo sapien
gagaacagagatgaaactggagtgtacaatatg

SEQ ID NO: 1041724 - DNA, 33 bp, Homo sapien
gagaacagagatgaaattggagtgtacaatatg

SEQ ID NO: 1041725 - DNA, 33 bp, Homo sapien
aggaggaatcatgacaaatagcttccatggttg

SEQ ID NO: 1041726 - DNA, 33 bp, Homo sapien
aggaggaatcatgacacatagcttccatggttg

SEQ ID NO: 1041727 - DNA, 33 bp, Homo sapien
tttcagagatacgaaaaattacacataagtgtc

SEQ ID NO: 1041728 - DNA, 33 bp, Homo sapien
tttcagagatacgaaacattacacataagtgtc

SEQ ID NO: 1041729 - DNA, 33 bp, Homo sapien
ggctaccaactaacaactatccatattatctgt

SEQ ID NO: 1041730 - DNA, 33 bp, Homo sapien
ggctaccaactaacaattatccatattatctgt

SEQ ID NO: 1041731 - DNA, 33 bp, Homo sapien
tcctttctgactgccaatctttcttgtgacacc

SEQ ID NO: 1041732 - DNA, 33 bp, Homo sapien
tcctttctgactgccagtctttcttgtgacacc

SEQ ID NO: 1041733 - DNA, 33 bp, Homo sapien
cgctgtcttctgtgaaagttttgagaatgaaat

SEQ ID NO: 1041734 - DNA, 33 bp, Homo sapien
cgctgtcttctgtgaaggttttgagaatgaaat

SEQ ID NO: 1041735 - DNA, 33 bp, Homo sapien
aaactagaaaggcaaccaagaggctgggctcag

SEQ ID NO: 1041736 - DNA, 33 bp, Homo sapien
aaactagaaaggcaacgaagaggctgggctcag

SEQ ID NO: 1041737 - DNA, 33 bp, Homo sapien
atgaagtagaacataaactagaaaacatattct

SEQ ID NO: 1041738 - DNA, 33 bp, Homo sapien
atgaagtagaacataatctagaaaacatattct

SEQ ID NO: 1041739 - DNA, 33 bp, Homo sapien
taggataactcacttaactttttcaatcttgct

SEQ ID NO: 1041740 - DNA, 33 bp, Homo sapien
taggataactcacttacctttttcaatcttgct

SEQ ID NO: 1041741 - DNA, 33 bp, Homo sapien
accttgtcgttcatgcactgcacagaaacaggt

SEQ ID NO: 1041742 - DNA, 33 bp, Homo sapien
accttgtcgttcatgcgctgcacagaaacaggt

SEQ ID NO: 1041743 - DNA, 33 bp, Homo sapien
tagcttttggtgttgactaaataaggtgatata

SEQ ID NO: 1041744 - DNA, 33 bp, Homo sapien
tagcttttggtgttgattaaataaggtgatata

SEQ ID NO: 1041745 - DNA, 33 bp, Homo sapien
tatcccacaggtggacaattagatttcatggcc

SEQ ID NO: 1041746 - DNA, 33 bp, Homo sapien
tatcccacaggtggaccattagatttcatggcc

SEQ ID NO: 1041747 - DNA, 33 bp, Homo sapien
aattttaatagttgagcccactgtcccattact

SEQ ID NO: 1041748 - DNA, 33 bp, Homo sapien
aattttaatagttgaggccactgtcccattact

SEQ ID NO: 1041749 - DNA, 33 bp, Homo sapien
actttctctgtcaagccctgtatggcctttgca

SEQ ID NO: 1041750 - DNA, 33 bp, Homo sapien
actttctctgtcaagcgctgtatggcctttgca

SEQ ID NO: 1041751 - DNA, 33 bp, Homo sapien
aaattgtgtttgaaagacttacaaggggaaact

SEQ ID NO: 1041752 - DNA, 33 bp, Homo sapien
aaattgtgtttgaaagccttacaaggggaaact

SEQ ID NO: 1041753 - DNA, 33 bp, Homo sapien
ggtttgaggccgcttcaaatgtatcccactgat

SEQ ID NO: 1041754 - DNA, 33 bp, Homo sapien
ggtttgaggccgcttcgaatgtatcccactgat

SEQ ID NO: 1041755 - DNA, 33 bp, Homo sapien
agcaggggttggtaaacttatcaactacacaaa

SEQ ID NO: 1041756 - DNA, 33 bp, Homo sapien
agcaggggttggtaaatttatcaactacacaaa

SEQ ID NO: 1041757 - DNA, 33 bp, Homo sapien
ctatgacaacgttccacgcagagcagctcttcc

SEQ ID NO: 1041758 - DNA, 33 bp, Homo sapien
ctatgacaacgttccatgcagagcagctcttcc

SEQ ID NO: 1041759 - DNA, 33 bp, Homo sapien
aatagaaggcattttaagccaaagttacaagca

SEQ ID NO: 1041760 - DNA, 33 bp, Homo sapien
aatagaaggcattttaggccaaagttacaagca

SEQ ID NO: 1041761 - DNA, 33 bp, Homo sapien
atgtttatcactgaaaccagagaccaggtctat

SEQ ID NO: 1041762 - DNA, 33 bp, Homo sapien
atgtttatcactgaaatcagagaccaggtctat

SEQ ID NO: 1041763 - DNA, 33 bp, Homo sapien
atatcatcacttgctaaggcattcacttgactt

SEQ ID NO: 1041764 - DNA, 33 bp, Homo sapien
atatcatcacttgctatggcattcacttgactt

SEQ ID NO: 1041765 - DNA, 33 bp, Homo sapien
cttcgagaactgccaacagctgtccctaattcc

SEQ ID NO: 1041766 - DNA, 33 bp, Homo sapien
cttcgagaactgccaagagctgtccctaattcc

SEQ ID NO: 1041767 - DNA, 33 bp, Homo sapien
ctcttgagccaggcaacgccattaaaagtttct

SEQ ID NO: 1041768 - DNA, 33 bp, Homo sapien
ctcttgagccaggcaatgccattaaaagtttct

SEQ ID NO: 1041769 - DNA, 33 bp, Homo sapien
atgtttgcagatgaacacaagtgactgctaaca

SEQ ID NO: 1041770 - DNA, 33 bp, Homo sapien
atgtttgcagatgaacgcaagtgactgctaaca

SEQ ID NO: 1041771 - DNA, 33 bp, Homo sapien
atcttgctccctagtacagaatgttaggatctg

SEQ ID NO: 1041772 - DNA, 33 bp, Homo sapien
atcttgctccctagtatagaatgttaggatctg

SEQ ID NO: 1041773 - DNA, 33 bp, Homo sapien
tttccaccccagaatcaaaatggacagttgctg

SEQ ID NO: 1041774 - DNA, 33 bp, Homo sapien
tttccaccccagaatccaaatggacagttgctg

SEQ ID NO: 1041775 - DNA, 33 bp, Homo sapien
gtcattaggccctaatcaaaagcagctaatcag

SEQ ID NO: 1041776 - DNA, 33 bp, Homo sapien
gtcattaggccctaattaaaagcagctaatcag

SEQ ID NO: 1041777 - DNA, 33 bp, Homo sapien
gactcacctgaaacaacctcttgtctttgcaat

SEQ ID NO: 1041778 - DNA, 33 bp, Homo sapien
gactcacctgaaacaatctcttgtctttgcaat

SEQ ID NO: 1041779 - DNA, 33 bp, Homo sapien
ttaagacgaaatgagaaacagtgttggtggaag

SEQ ID NO: 1041780 - DNA, 33 bp, Homo sapien
ttaagacgaaatgagagacagtgttggtggaag

SEQ ID NO: 1041781 - DNA, 33 bp, Homo sapien
ggagttcatttgaacaagggcatttttgtgtgt

SEQ ID NO: 1041782 - DNA, 33 bp, Homo sapien
ggagttcatttgaacacgggcatttttgtgtgt

SEQ ID NO: 1041783 - DNA, 33 bp, Homo sapien
gaggaattaaagctctcaacagtctttgagaac

SEQ ID NO: 1041784 - DNA, 33 bp, Homo sapien
gaggaattaaagctctgaacagtctttgagaac

SEQ ID NO: 1041785 - DNA, 33 bp, Homo sapien
tctcagtaaatttgcacgtactaatggcatttc

SEQ ID NO: 1041786 - DNA, 33 bp, Homo sapien
tctcagtaaatttgcatgtactaatggcatttc

SEQ ID NO: 1041787 - DNA, 33 bp, Homo sapien
ctcatacacaagtcaagaaatgcagtgatcaag

SEQ ID NO: 1041788 - DNA, 33 bp, Homo sapien
ctcatacacaagtcaataaatgcagtgatcaag

SEQ ID NO: 1041789 - DNA, 33 bp, Homo sapien
gcactaagggtgtcataaagattacattagaaa

SEQ ID NO: 1041790 - DNA, 33 bp, Homo sapien
gcactaagggtgtcatgaagattacattagaaa

SEQ ID NO: 1041791 - DNA, 33 bp, Homo sapien
gcaatgatcagaattagctggaaagccacacac

SEQ ID NO: 1041792 - DNA, 33 bp, Homo sapien
gcaatgatcagaattatctggaaagccacacac

SEQ ID NO: 1041793 - DNA, 33 bp, Homo sapien
ggtttgactcctttaacgttttgatctatatcc

SEQ ID NO: 1041794 - DNA, 33 bp, Homo sapien
ggtttgactcctttaatgttttgatctatatcc

SEQ ID NO: 1041795 - DNA, 33 bp, Homo sapien
tttaccagtcacacaaccttatttgcagactca

SEQ ID NO: 1041796 - DNA, 33 bp, Homo sapien
tttaccagtcacacaatcttatttgcagactca

SEQ ID NO: 1041797 - DNA, 33 bp, Homo sapien
tgatgaaaaaagcaataagaatcctcagcaaca

SEQ ID NO: 1041798 - DNA, 33 bp, Homo sapien
tgatgaaaaaagcaatgagaatcctcagcaaca

SEQ ID NO: 1041799 - DNA, 33 bp, Homo sapien
ttaccagagatcaagaactcactttcaatttca

SEQ ID NO: 1041800 - DNA, 33 bp, Homo sapien
ttaccagagatcaagagctcactttcaatttca

SEQ ID NO: 1041801 - DNA, 33 bp, Homo sapien
catcattcctccgctacgggtagtcaagtatgg

SEQ ID NO: 1041802 - DNA, 33 bp, Homo sapien
catcattcctccgctatgggtagtcaagtatgg

SEQ ID NO: 1041803 - DNA, 33 bp, Homo sapien
gataagagatgatatacgtcccaactatttcca

SEQ ID NO: 1041804 - DNA, 33 bp, Homo sapien
gataagagatgatatatgtcccaactatttcca

SEQ ID NO: 1041805 - DNA, 33 bp, Homo sapien
gagtgatctggacttacatctactcttacagtt

SEQ ID NO: 1041806 - DNA, 33 bp, Homo sapien
gagtgatctggacttatatctactcttacagtt

SEQ ID NO: 1041807 - DNA, 33 bp, Homo sapien
tcatagtccaaacacgaaagtgaagcagcaagc

SEQ ID NO: 1041808 - DNA, 33 bp, Homo sapien
tcatagtccaaacacggaagtgaagcagcaagc

SEQ ID NO: 1041809 - DNA, 33 bp, Homo sapien
gtgatgtaaaagaggaagcatggaaagaggcca

SEQ ID NO: 1041810 - DNA, 33 bp, Homo sapien
gtgatgtaaaagaggatgcatggaaagaggcca

SEQ ID NO: 1041811 - DNA, 33 bp, Homo sapien
atttacaaagagaaaactagttcacctgaatga

SEQ ID NO: 1041812 - DNA, 33 bp, Homo sapien
atttacaaagagaaaattagttcacctgaatga

SEQ ID NO: 1041813 - DNA, 33 bp, Homo sapien
gctgtttcctacatacaatgacttaccccaccc

SEQ ID NO: 1041814 - DNA, 33 bp, Homo sapien
gctgtttcctacatacgatgacttaccccaccc

SEQ ID NO: 1041815 - DNA, 33 bp, Homo sapien
agaagcacctttagccaaacttctattactttg

SEQ ID NO: 1041816 - DNA, 33 bp, Homo sapien
agaagcacctttagcccaacttctattactttg

SEQ ID NO: 1041817 - DNA, 33 bp, Homo sapien
agttctattacttgtccaaaattacaaggatgg

SEQ ID NO: 1041818 - DNA, 33 bp, Homo sapien
agttctattacttgtctaaaattacaaggatgg

SEQ ID NO: 1041819 - DNA, 33 bp, Homo sapien
gtggggctctttcctcaacaccttactctctgt

SEQ ID NO: 1041820 - DNA, 33 bp, Homo sapien
gtggggctctttcctcgacaccttactctctgt

SEQ ID NO: 1041821 - DNA, 33 bp, Homo sapien
tcccactgtctctttcccagtgatgaactctta

SEQ ID NO: 1041822 - DNA, 33 bp, Homo sapien
tcccactgtctctttctcagtgatgaactctta

SEQ ID NO: 1041823 - DNA, 33 bp, Homo sapien
tggtattaggtacaaaaccataatgactgattc

SEQ ID NO: 1041824 - DNA, 33 bp, Homo sapien
tggtattaggtacaaatccataatgactgattc

SEQ ID NO: 1041825 - DNA, 33 bp, Homo sapien
ctccatctcgtttccaatctcatctgaaaaaca

SEQ ID NO: 1041826 - DNA, 33 bp, Homo sapien
ctccatctcgtttccattctcatctgaaaaaca

SEQ ID NO: 1041827 - DNA, 33 bp, Homo sapien
agctttctcatcttcaacatgggaatgatatgc

SEQ ID NO: 1041828 - DNA, 33 bp, Homo sapien
agctttctcatcttcagcatgggaatgatatgc

SEQ ID NO: 1041829 - DNA, 33 bp, Homo sapien
gatcataggtttgcaaatgctctgcaaattgta

SEQ ID NO: 1041830 - DNA, 33 bp, Homo sapien
gatcataggtttgcaagtgctctgcaaattgta

SEQ ID NO: 1041831 - DNA, 33 bp, Homo sapien
ctgacatatttgtgtgaaacaatgttgagggaa

SEQ ID NO: 1041832 - DNA, 33 bp, Homo sapien
ctgacatatttgtgtgcaacaatgttgagggaa

SEQ ID NO: 1041833 - DNA, 33 bp, Homo sapien
attgatcgcagaaagcgcaatagattgtgaaga

SEQ ID NO: 1041834 - DNA, 33 bp, Homo sapien
attgatcgcagaaagctcaatagattgtgaaga

SEQ ID NO: 1041835 - DNA, 33 bp, Homo sapien
attctttgatcctcaaattcacaccctttgcgt

SEQ ID NO: 1041836 - DNA, 33 bp, Homo sapien
attctttgatcctcaagttcacaccctttgcgt

SEQ ID NO: 1041837 - DNA, 33 bp, Homo sapien
cacaccctttgcgtgacagctttgtggtgtctc

SEQ ID NO: 1041838 - DNA, 33 bp, Homo sapien
cacaccctttgcgtgatagctttgtggtgtctc

SEQ ID NO: 1041839 - DNA, 33 bp, Homo sapien
tcaggatggttggtcactccacttgccagtggg

SEQ ID NO: 1041840 - DNA, 33 bp, Homo sapien
tcaggatggttggtcattccacttgccagtggg

SEQ ID NO: 1041841 - DNA, 33 bp, Homo sapien
acctaattctatgtcactcctagtgattctgtt

SEQ ID NO: 1041842 - DNA, 33 bp, Homo sapien
acctaattctatgtcattcctagtgattctgtt

SEQ ID NO: 1041843 - DNA, 33 bp, Homo sapien
attacacaactggtaaagtagcaataaagaaat

SEQ ID NO: 1041844 - DNA, 33 bp, Homo sapien
attacacaactggtaaggtagcaataaagaaat

SEQ ID NO: 1041845 - DNA, 33 bp, Homo sapien
ttaattttccaagcagacagatgacagatttta

SEQ ID NO: 1041846 - DNA, 33 bp, Homo sapien
ttaattttccaagcaggcagatgacagatttta

SEQ ID NO: 1041847 - DNA, 33 bp, Homo sapien
ttcttataactttccagtaattctccatcacca

SEQ ID NO: 1041848 - DNA, 33 bp, Homo sapien
ttcttataactttccattaattctccatcacca

SEQ ID NO: 1041849 - DNA, 33 bp, Homo sapien
gaggcaataggcagaaccacagaaggcagtcag

SEQ ID NO: 1041850 - DNA, 33 bp, Homo sapien
gaggcaataggcagaatcacagaaggcagtcag

SEQ ID NO: 1041851 - DNA, 33 bp, Homo sapien
ggaacatcactaagaaaactattcatgctctga

SEQ ID NO: 1041852 - DNA, 33 bp, Homo sapien
ggaacatcactaagaacactattcatgctctga

SEQ ID NO: 1041853 - DNA, 33 bp, Homo sapien
aactgttggttaaagacagaaccaggattcaaa

SEQ ID NO: 1041854 - DNA, 33 bp, Homo sapien
aactgttggttaaagagagaaccaggattcaaa

SEQ ID NO: 1041855 - DNA, 33 bp, Homo sapien
gaagctaggactcctcaatccatttcattttct

SEQ ID NO: 1041856 - DNA, 33 bp, Homo sapien
gaagctaggactcctcgatccatttcattttct

SEQ ID NO: 1041857 - DNA, 33 bp, Homo sapien
tgctgaatatcagcaaatgtttaagttatgggt

SEQ ID NO: 1041858 - DNA, 33 bp, Homo sapien
tgctgaatatcagcaagtgtttaagttatgggt

SEQ ID NO: 1041859 - DNA, 33 bp, Homo sapien
gttcagttctgttatacgtggtctcttcttctc

SEQ ID NO: 1041860 - DNA, 33 bp, Homo sapien
gttcagttctgttatatgtggtctcttcttctc

SEQ ID NO: 1041861 - DNA, 33 bp, Homo sapien
taaacaataagcatgtcaagacagaaaatattt

SEQ ID NO: 1041862 - DNA, 33 bp, Homo sapien
taaacaataagcatgttaagacagaaaatattt

SEQ ID NO: 1041863 - DNA, 33 bp, Homo sapien
gatcagaaagactgagcaatatatatgtggtga

SEQ ID NO: 1041864 - DNA, 33 bp, Homo sapien
gatcagaaagactgaggaatatatatgtggtga

SEQ ID NO: 1041865 - DNA, 33 bp, Homo sapien
ttcacattcataactcaccttttgcttatagca

SEQ ID NO: 1041866 - DNA, 33 bp, Homo sapien
ttcacattcataactcgccttttgcttatagca

SEQ ID NO: 1041867 - DNA, 33 bp, Homo sapien
aatccccagtcttcaactctctagctggtgctc

SEQ ID NO: 1041868 - DNA, 33 bp, Homo sapien
aatccccagtcttcaattctctagctggtgctc

SEQ ID NO: 1041869 - DNA, 33 bp, Homo sapien
agacaacaactcagaaaggttccacaggaagtt

SEQ ID NO: 1041870 - DNA, 33 bp, Homo sapien
agacaacaactcagaagggttccacaggaagtt

SEQ ID NO: 1041871 - DNA, 33 bp, Homo sapien
accgttgcatttgacacaacagagatcatcggt

SEQ ID NO: 1041872 - DNA, 33 bp, Homo sapien
accgttgcatttgacataacagagatcatcggt

SEQ ID NO: 1041873 - DNA, 33 bp, Homo sapien
aacttctatttgatcggatatatttgaccagag

SEQ ID NO: 1041874 - DNA, 33 bp, Homo sapien
aacttctatttgatcgtatatatttgaccagag

SEQ ID NO: 1041875 - DNA, 33 bp, Homo sapien
cagagaaacagactctaacttggcatttgatag

SEQ ID NO: 1041876 - DNA, 33 bp, Homo sapien
cagagaaacagactcttacttggcatttgatag

SEQ ID NO: 1041877 - DNA, 33 bp, Homo sapien
ctggtggcatcataaaaagaaaattgcacccag

SEQ ID NO: 1041878 - DNA, 33 bp, Homo sapien
ctggtggcatcataaagagaaaattgcacccag

SEQ ID NO: 1041879 - DNA, 33 bp, Homo sapien
cagtgctgtttctgtaacctcaatggggaaatc

SEQ ID NO: 1041880 - DNA, 33 bp, Homo sapien
cagtgctgtttctgtaccctcaatggggaaatc

SEQ ID NO: 1041881 - DNA, 33 bp, Homo sapien
tgcctaaaatataaacggatgctcatctaaaag

SEQ ID NO: 1041882 - DNA, 33 bp, Homo sapien
tgcctaaaatataaactgatgctcatctaaaag

SEQ ID NO: 1041883 - DNA, 33 bp, Homo sapien
tacttctttatctgcacatataaagctgatgta

SEQ ID NO: 1041884 - DNA, 33 bp, Homo sapien
tacttctttatctgcatatataaagctgatgta

SEQ ID NO: 1041885 - DNA, 33 bp, Homo sapien
actctttgttaatggtcaatagcataatccaaa

SEQ ID NO: 1041886 - DNA, 33 bp, Homo sapien
actctttgttaatggtgaatagcataatccaaa

SEQ ID NO: 1041887 - DNA, 33 bp, Homo sapien
gaaaaaacacaaagaaagatgcaatgttaaggt

SEQ ID NO: 1041888 - DNA, 33 bp, Homo sapien
gaaaaaacacaaagaaggatgcaatgttaaggt

SEQ ID NO: 1041889 - DNA, 33 bp, Homo sapien
ataagacattgttccacgtaagatagacattat

SEQ ID NO: 1041890 - DNA, 33 bp, Homo sapien
ataagacattgttccatgtaagatagacattat

SEQ ID NO: 1041891 - DNA, 33 bp, Homo sapien
agtcatggaaccaaaacataaccagatatagaa

SEQ ID NO: 1041892 - DNA, 33 bp, Homo sapien
agtcatggaaccaaaatataaccagatatagaa

SEQ ID NO: 1041893 - DNA, 33 bp, Homo sapien
tctcccttcacagcaaagtgagagtttgaaagc

SEQ ID NO: 1041894 - DNA, 33 bp, Homo sapien
tctcccttcacagcaaggtgagagtttgaaagc

SEQ ID NO: 1041895 - DNA, 33 bp, Homo sapien
gcatcaacgtgaaatgaagtgcttagagacatg

SEQ ID NO: 1041896 - DNA, 33 bp, Homo sapien
gcatcaacgtgaaatgcagtgcttagagacatg

SEQ ID NO: 1041897 - DNA, 33 bp, Homo sapien
tatcctgctagaatgcggagtctggctctgaat

SEQ ID NO: 1041898 - DNA, 33 bp, Homo sapien
tatcctgctagaatgctgagtctggctctgaat

SEQ ID NO: 1041899 - DNA, 33 bp, Homo sapien
agatcagagcttggaagagtttgctttacaaaa

SEQ ID NO: 1041900 - DNA, 33 bp, Homo sapien
agatcagagcttggaatagtttgctttacaaaa

SEQ ID NO: 1041901 - DNA, 33 bp, Homo sapien
ctgccactaagcttaacggaggttcagacgagg

SEQ ID NO: 1041902 - DNA, 33 bp, Homo sapien
ctgccactaagcttaatggaggttcagacgagg

SEQ ID NO: 1041903 - DNA, 33 bp, Homo sapien
gtggggaagctgtgagaagatgccttacctctc

SEQ ID NO: 1041904 - DNA, 33 bp, Homo sapien
gtggggaagctgtgaggagatgccttacctctc

SEQ ID NO: 1041905 - DNA, 33 bp, Homo sapien
tagtcagctatctagcactgagcaagagcttgg

SEQ ID NO: 1041906 - DNA, 33 bp, Homo sapien
tagtcagctatctagcgctgagcaagagcttgg

SEQ ID NO: 1041907 - DNA, 33 bp, Homo sapien
aatgggaagaaaatgcacccatagtatttaacc

SEQ ID NO: 1041908 - DNA, 33 bp, Homo sapien
aatgggaagaaaatgcgcccatagtatttaacc

SEQ ID NO: 1041909 - DNA, 33 bp, Homo sapien
caatcatactgggaaccctttgaattcattaat

SEQ ID NO: 1041910 - DNA, 33 bp, Homo sapien
caatcatactgggaactctttgaattcattaat

SEQ ID NO: 1041911 - DNA, 33 bp, Homo sapien
ttagtttctgatctcactattctagtacaacat

SEQ ID NO: 1041912 - DNA, 33 bp, Homo sapien
ttagtttctgatctcagtattctagtacaacat

SEQ ID NO: 1041913 - DNA, 33 bp, Homo sapien
tctttctcagcaagaaaagggtaataatcaaaa

SEQ ID NO: 1041914 - DNA, 33 bp, Homo sapien
tctttctcagcaagaagagggtaataatcaaaa

SEQ ID NO: 1041915 - DNA, 33 bp, Homo sapien
agtgtgggatggaataaagcatgtgatttaccc

SEQ ID NO: 1041916 - DNA, 33 bp, Homo sapien
agtgtgggatggaatacagcatgtgatttaccc

SEQ ID NO: 1041917 - DNA, 33 bp, Homo sapien
ttctctttggcactagaactcaaatcaacactg

SEQ ID NO: 1041918 - DNA, 33 bp, Homo sapien
ttctctttggcactagtactcaaatcaacactg

SEQ ID NO: 1041919 - DNA, 33 bp, Homo sapien
caggagacctagaggaaaagagaacaattttct

SEQ ID NO: 1041920 - DNA, 33 bp, Homo sapien
caggagacctagaggagaagagaacaattttct

SEQ ID NO: 1041921 - DNA, 33 bp, Homo sapien
agatataaagataggcagataagttttgaccct

SEQ ID NO: 1041922 - DNA, 33 bp, Homo sapien
agatataaagataggctgataagttttgaccct

SEQ ID NO: 1041923 - DNA, 33 bp, Homo sapien
gcgtgtctccttaaatgatgtgccttaagtttc

SEQ ID NO: 1041924 - DNA, 33 bp, Homo sapien
gcgtgtctccttaaattatgtgccttaagtttc

SEQ ID NO: 1041925 - DNA, 33 bp, Homo sapien
aaacctatgtgtggaaactgttagcctgtatga

SEQ ID NO: 1041926 - DNA, 33 bp, Homo sapien
aaacctatgtgtggaacctgttagcctgtatga

SEQ ID NO: 1041927 - DNA, 33 bp, Homo sapien
tagatttgttcgttcactaatttattcaggaga

SEQ ID NO: 1041928 - DNA, 33 bp, Homo sapien
tagatttgttcgttcattaatttattcaggaga

SEQ ID NO: 1041929 - DNA, 33 bp, Homo sapien
ttttcttaggttcaaacgaggagaaagtttggt

SEQ ID NO: 1041930 - DNA, 33 bp, Homo sapien
ttttcttaggttcaaatgaggagaaagtttggt

SEQ ID NO: 1041931 - DNA, 33 bp, Homo sapien
gggactgtgccgactccagcaagtatgccccca

SEQ ID NO: 1041932 - DNA, 33 bp, Homo sapien
gggactgtgccgactctagcaagtatgccccca

SEQ ID NO: 1041933 - DNA, 33 bp, Homo sapien
taagtgactttcccaaatgactcagccattcgt

SEQ ID NO: 1041934 - DNA, 33 bp, Homo sapien
taagtgactttcccaagtgactcagccattcgt

SEQ ID NO: 1041935 - DNA, 33 bp, Homo sapien
tatctgtaacattttaccttagcaatgagtaat

SEQ ID NO: 1041936 - DNA, 33 bp, Homo sapien
tatctgtaacattttatcttagcaatgagtaat

SEQ ID NO: 1041937 - DNA, 33 bp, Homo sapien
attaattaatgatgtcacccatgaatttttcat

SEQ ID NO: 1041938 - DNA, 33 bp, Homo sapien
attaattaatgatgtcccccatgaatttttcat

SEQ ID NO: 1041939 - DNA, 33 bp, Homo sapien
tgctccagcttggggaaccagattttcttgtgg

SEQ ID NO: 1041940 - DNA, 33 bp, Homo sapien
tgctccagcttggggacccagattttcttgtgg

SEQ ID NO: 1041941 - DNA, 33 bp, Homo sapien
ttctaatacctgcgacagaaactgcagagggaa

SEQ ID NO: 1041942 - DNA, 33 bp, Homo sapien
ttctaatacctgcgactgaaactgcagagggaa

SEQ ID NO: 1041943 - DNA, 33 bp, Homo sapien
atgatactgacatatgccacatctcaataaaac

SEQ ID NO: 1041944 - DNA, 33 bp, Homo sapien
atgatactgacatatggcacatctcaataaaac

SEQ ID NO: 1041945 - DNA, 33 bp, Homo sapien
gtgtaattgaaatggaacataatcactaatatt

SEQ ID NO: 1041946 - DNA, 33 bp, Homo sapien
gtgtaattgaaatggaccataatcactaatatt

SEQ ID NO: 1041947 - DNA, 33 bp, Homo sapien
gcatgtttctaagaaggccagaagcttgcacaa

SEQ ID NO: 1041948 - DNA, 33 bp, Homo sapien
gcatgtttctaagaagtccagaagcttgcacaa

SEQ ID NO: 1041949 - DNA, 33 bp, Homo sapien
atttcactctcccaaaaatcctgttagcaattg

SEQ ID NO: 1041950 - DNA, 33 bp, Homo sapien
atttcactctcccaaatatcctgttagcaattg

SEQ ID NO: 1041951 - DNA, 33 bp, Homo sapien
caaaatctttgtagcaactttggcttttaaatt

SEQ ID NO: 1041952 - DNA, 33 bp, Homo sapien
caaaatctttgtagcatctttggcttttaaatt

SEQ ID NO: 1041953 - DNA, 33 bp, Homo sapien
cctttgtcttattcaacatcaacttcattgtct

SEQ ID NO: 1041954 - DNA, 33 bp, Homo sapien
cctttgtcttattcaatatcaacttcattgtct

SEQ ID NO: 1041955 - DNA, 33 bp, Homo sapien
aatatacacttggatacatgtcactgaaaatat

SEQ ID NO: 1041956 - DNA, 33 bp, Homo sapien
aatatacacttggatagatgtcactgaaaatat

SEQ ID NO: 1041957 - DNA, 33 bp, Homo sapien
agccctaatacactaaaccactaatattttagc

SEQ ID NO: 1041958 - DNA, 33 bp, Homo sapien
agccctaatacactaagccactaatattttagc

SEQ ID NO: 1041959 - DNA, 33 bp, Homo sapien
atgtccatactgagtgaatatttggaaaggtgt

SEQ ID NO: 1041960 - DNA, 33 bp, Homo sapien
atgtccatactgagtgtatatttggaaaggtgt

SEQ ID NO: 1041961 - DNA, 33 bp, Homo sapien
ctcctgttaccttgtacgaagagtctgtgttta

SEQ ID NO: 1041962 - DNA, 33 bp, Homo sapien
ctcctgttaccttgtatgaagagtctgtgttta

SEQ ID NO: 1041963 - DNA, 33 bp, Homo sapien
tttacgttctgtgcaacaagaagaatgtattta

SEQ ID NO: 1041964 - DNA, 33 bp, Homo sapien
tttacgttctgtgcaagaagaagaatgtattta

SEQ ID NO: 1041965 - DNA, 33 bp, Homo sapien
ccatctattcccaatgcagcagggctgagtgag

SEQ ID NO: 1041966 - DNA, 33 bp, Homo sapien
ccatctattcccaatgtagcagggctgagtgag

SEQ ID NO: 1041967 - DNA, 33 bp, Homo sapien
aaatagcaatgctcgaactacattcttccttga

SEQ ID NO: 1041968 - DNA, 33 bp, Homo sapien
aaatagcaatgctcgacctacattcttccttga

SEQ ID NO: 1041969 - DNA, 33 bp, Homo sapien
agaacctagatatgtgaatattatgtgactaat

SEQ ID NO: 1041970 - DNA, 33 bp, Homo sapien
agaacctagatatgtggatattatgtgactaat

SEQ ID NO: 1041971 - DNA, 33 bp, Homo sapien
gctccaaaggaaagtgcaccatatcaagggaat

SEQ ID NO: 1041972 - DNA, 33 bp, Homo sapien
gctccaaaggaaagtgtaccatatcaagggaat

SEQ ID NO: 1041973 - DNA, 33 bp, Homo sapien
ctagttaagagaaaccaaagtttacacaaagat

SEQ ID NO: 1041974 - DNA, 33 bp, Homo sapien
ctagttaagagaaaccgaagtttacacaaagat

SEQ ID NO: 1041975 - DNA, 33 bp, Homo sapien
gccatcttggatgccaactgagtcaagccttca

SEQ ID NO: 1041976 - DNA, 33 bp, Homo sapien
gccatcttggatgccagctgagtcaagccttca

SEQ ID NO: 1041977 - DNA, 33 bp, Homo sapien
ttctatccaacaaaccagacgattatccatatt

SEQ ID NO: 1041978 - DNA, 33 bp, Homo sapien
ttctatccaacaaaccggacgattatccatatt

SEQ ID NO: 1041979 - DNA, 33 bp, Homo sapien
taaatggtgtaagaaaataaagactgcctacta

SEQ ID NO: 1041980 - DNA, 33 bp, Homo sapien
taaatggtgtaagaaattaaagactgcctacta

SEQ ID NO: 1041981 - DNA, 33 bp, Homo sapien
aaccagagctgaaatgaattaaatcgagatgtg

SEQ ID NO: 1041982 - DNA, 33 bp, Homo sapien
aaccagagctgaaatgcattaaatcgagatgtg

SEQ ID NO: 1041983 - DNA, 33 bp, Homo sapien
tccatgtaagtaaaaagtgagtattgctattaa

SEQ ID NO: 1041984 - DNA, 33 bp, Homo sapien
tccatgtaagtaaaaattgagtattgctattaa

SEQ ID NO: 1041985 - DNA, 33 bp, Homo sapien
actatttggttgttgacggctatctgaagtatt

SEQ ID NO: 1041986 - DNA, 33 bp, Homo sapien
actatttggttgttgatggctatctgaagtatt

SEQ ID NO: 1041987 - DNA, 33 bp, Homo sapien
cccagttgtcaatcaacccttctcattggcaaa

SEQ ID NO: 1041988 - DNA, 33 bp, Homo sapien
cccagttgtcaatcaatccttctcattggcaaa

SEQ ID NO: 1041989 - DNA, 33 bp, Homo sapien
tttctgctggtaaaaaatctagatgggctttgc

SEQ ID NO: 1041990 - DNA, 33 bp, Homo sapien
tttctgctggtaaaaagtctagatgggctttgc

SEQ ID NO: 1041991 - DNA, 33 bp, Homo sapien
tggagacttcgaagtaaagcaaaatcttcctcc

SEQ ID NO: 1041992 - DNA, 33 bp, Homo sapien
tggagacttcgaagtagagcaaaatcttcctcc

SEQ ID NO: 1041993 - DNA, 33 bp, Homo sapien
ggagtgtgaagagccagatagaggaggtatgtg

SEQ ID NO: 1041994 - DNA, 33 bp, Homo sapien
ggagtgtgaagagccatatagaggaggtatgtg

SEQ ID NO: 1041995 - DNA, 33 bp, Homo sapien
tccaagagcctccttaccagtaaactaaccaca

SEQ ID NO: 1041996 - DNA, 33 bp, Homo sapien
tccaagagcctccttatcagtaaactaaccaca

SEQ ID NO: 1041997 - DNA, 33 bp, Homo sapien
aatttgccatgtgcacaggactctcaatgctct

SEQ ID NO: 1041998 - DNA, 33 bp, Homo sapien
aatttgccatgtgcacgggactctcaatgctct

SEQ ID NO: 1041999 - DNA, 33 bp, Homo sapien
tgctttgttaacgccaacatttcattactggta

SEQ ID NO: 1042000 - DNA, 33 bp, Homo sapien
tgctttgttaacgccagcatttcattactggta

SEQ ID NO: 1042001 - DNA, 33 bp, Homo sapien
gttaacaaagcagcccagatcatgttactcctc

SEQ ID NO: 1042002 - DNA, 33 bp, Homo sapien
gttaacaaagcagcccggatcatgttactcctc

SEQ ID NO: 1042003 - DNA, 33 bp, Homo sapien
aggaagaggagaaccacaattcacattcccatc

SEQ ID NO: 1042004 - DNA, 33 bp, Homo sapien
aggaagaggagaaccataattcacattcccatc

SEQ ID NO: 1042005 - DNA, 33 bp, Homo sapien
gatcctgctcttgaagccacatcagataagaaa

SEQ ID NO: 1042006 - DNA, 33 bp, Homo sapien
gatcctgctcttgaagtcacatcagataagaaa

SEQ ID NO: 1042007 - DNA, 33 bp, Homo sapien
caggctcaaaaacatacgtaagctaccaagatt

SEQ ID NO: 1042008 - DNA, 33 bp, Homo sapien
caggctcaaaaacatatgtaagctaccaagatt

SEQ ID NO: 1042009 - DNA, 33 bp, Homo sapien
taatcagttgcaaaaaaagacatatggggagga

SEQ ID NO: 1042010 - DNA, 33 bp, Homo sapien
taatcagttgcaaaaagagacatatggggagga

SEQ ID NO: 1042011 - DNA, 33 bp, Homo sapien
attacttttcatagccaaggctaaccttaatgt

SEQ ID NO: 1042012 - DNA, 33 bp, Homo sapien
attacttttcatagccgaggctaaccttaatgt

SEQ ID NO: 1042013 - DNA, 33 bp, Homo sapien
ttgagaaaaatctgccaccatttaaatatcttc

SEQ ID NO: 1042014 - DNA, 33 bp, Homo sapien
ttgagaaaaatctgccgccatttaaatatcttc

SEQ ID NO: 1042015 - DNA, 33 bp, Homo sapien
catctccagacactaaatgaaattcagcgaaac

SEQ ID NO: 1042016 - DNA, 33 bp, Homo sapien
catctccagacactaagtgaaattcagcgaaac

SEQ ID NO: 1042017 - DNA, 33 bp, Homo sapien
aacttgaacacatttaaagagggtttcattatc

SEQ ID NO: 1042018 - DNA, 33 bp, Homo sapien
aacttgaacacatttagagagggtttcattatc

SEQ ID NO: 1042019 - DNA, 33 bp, Homo sapien
ggcactagtagttttggaatggttaatgcacac

SEQ ID NO: 1042020 - DNA, 33 bp, Homo sapien
ggcactagtagttttgtaatggttaatgcacac

SEQ ID NO: 1042021 - DNA, 33 bp, Homo sapien
aattttggttatcttcaaaatggagaagggtaa

SEQ ID NO: 1042022 - DNA, 33 bp, Homo sapien
aattttggttatcttcgaaatggagaagggtaa

SEQ ID NO: 1042023 - DNA, 33 bp, Homo sapien
agaataaaagaccaaactgatgacggcatggag

SEQ ID NO: 1042024 - DNA, 33 bp, Homo sapien
agaataaaagaccaaattgatgacggcatggag

SEQ ID NO: 1042025 - DNA, 33 bp, Homo sapien
cacaccaaatgtctcagtagttcatgaatatgt

SEQ ID NO: 1042026 - DNA, 33 bp, Homo sapien
cacaccaaatgtctcattagttcatgaatatgt

SEQ ID NO: 1042027 - DNA, 33 bp, Homo sapien
aactttcaagattcaacgtaagagtctcagacc

SEQ ID NO: 1042028 - DNA, 33 bp, Homo sapien
aactttcaagattcaatgtaagagtctcagacc

SEQ ID NO: 1042029 - DNA, 33 bp, Homo sapien
ttattttctcaatcttcaaatgagtctgatgaa

SEQ ID NO: 1042030 - DNA, 33 bp, Homo sapien
ttattttctcaatctttaaatgagtctgatgaa

SEQ ID NO: 1042031 - DNA, 33 bp, Homo sapien
ataccatgaagagagaaggaatgattgatagca

SEQ ID NO: 1042032 - DNA, 33 bp, Homo sapien
ataccatgaagagagatggaatgattgatagca

SEQ ID NO: 1042033 - DNA, 33 bp, Homo sapien
atatttggattgataaatactgaagtcacagat

SEQ ID NO: 1042034 - DNA, 33 bp, Homo sapien
atatttggattgataattactgaagtcacagat

SEQ ID NO: 1042035 - DNA, 33 bp, Homo sapien
gttaaaaaagaagccaaatagatgaacctgata

SEQ ID NO: 1042036 - DNA, 33 bp, Homo sapien
gttaaaaaagaagccagatagatgaacctgata

SEQ ID NO: 1042037 - DNA, 33 bp, Homo sapien
aaataagctagggtaaaagcacatatatacatg

SEQ ID NO: 1042038 - DNA, 33 bp, Homo sapien
aaataagctagggtaatagcacatatatacatg

SEQ ID NO: 1042039 - DNA, 33 bp, Homo sapien
gctctagtgtctaaaacaatgacttactcatga

SEQ ID NO: 1042040 - DNA, 33 bp, Homo sapien
gctctagtgtctaaaataatgacttactcatga

SEQ ID NO: 1042041 - DNA, 33 bp, Homo sapien
tgtcctttatctataaattacaggcactcagct

SEQ ID NO: 1042042 - DNA, 33 bp, Homo sapien
tgtcctttatctataagttacaggcactcagct

SEQ ID NO: 1042043 - DNA, 33 bp, Homo sapien
atttaatagctatctgcatcataaaaggctgat

SEQ ID NO: 1042044 - DNA, 33 bp, Homo sapien
atttaatagctatctgtatcataaaaggctgat

SEQ ID NO: 1042045 - DNA, 33 bp, Homo sapien
aatagtgtaagtcctgaagttcaaaagtccaaa

SEQ ID NO: 1042046 - DNA, 33 bp, Homo sapien
aatagtgtaagtcctggagttcaaaagtccaaa

SEQ ID NO: 1042047 - DNA, 33 bp, Homo sapien
tggataagggacattaaatgcttgagaattatt

SEQ ID NO: 1042048 - DNA, 33 bp, Homo sapien
tggataagggacattagatgcttgagaattatt

SEQ ID NO: 1042049 - DNA, 33 bp, Homo sapien
aggaggtgacagtcaccatgcatataattcact

SEQ ID NO: 1042050 - DNA, 33 bp, Homo sapien
aggaggtgacagtcactatgcatataattcact

SEQ ID NO: 1042051 - DNA, 33 bp, Homo sapien
acacacatttcaatcactacattgcattcttta

SEQ ID NO: 1042052 - DNA, 33 bp, Homo sapien
acacacatttcaatcattacattgcattcttta

SEQ ID NO: 1042053 - DNA, 33 bp, Homo sapien
tcactaagtgcatttccatcagcaaaaaatgag

SEQ ID NO: 1042054 - DNA, 33 bp, Homo sapien
tcactaagtgcatttctatcagcaaaaaatgag

SEQ ID NO: 1042055 - DNA, 33 bp, Homo sapien
acctgtgtctactacccgctgactctgataaag

SEQ ID NO: 1042056 - DNA, 33 bp, Homo sapien
acctgtgtctactacctgctgactctgataaag

SEQ ID NO: 1042057 - DNA, 33 bp, Homo sapien
ggtgactcactggaccacaaattgatgtgcata

SEQ ID NO: 1042058 - DNA, 33 bp, Homo sapien
ggtgactcactggaccccaaattgatgtgcata

SEQ ID NO: 1042059 - DNA, 33 bp, Homo sapien
ggcttcacctgcttaccgaatttcagattcagt

SEQ ID NO: 1042060 - DNA, 33 bp, Homo sapien
ggcttcacctgcttactgaatttcagattcagt

SEQ ID NO: 1042061 - DNA, 33 bp, Homo sapien
taggaggggagaatgcaagactaggtgacatat

SEQ ID NO: 1042062 - DNA, 33 bp, Homo sapien
taggaggggagaatgcgagactaggtgacatat

SEQ ID NO: 1042063 - DNA, 33 bp, Homo sapien
tgccagcaaaattgaaaccctctgagacctctc

SEQ ID NO: 1042064 - DNA, 33 bp, Homo sapien
tgccagcaaaattgaacccctctgagacctctc

SEQ ID NO: 1042065 - DNA, 33 bp, Homo sapien
tttagaacacctgttacgtgccagccattgtaa

SEQ ID NO: 1042066 - DNA, 33 bp, Homo sapien
tttagaacacctgttatgtgccagccattgtaa

SEQ ID NO: 1042067 - DNA, 33 bp, Homo sapien
gacagttctactaactaaaatccatatcaaggt

SEQ ID NO: 1042068 - DNA, 33 bp, Homo sapien
gacagttctactaactgaaatccatatcaaggt

SEQ ID NO: 1042069 - DNA, 33 bp, Homo sapien
tcattctgtagcaacaatcaggtagagatacat

SEQ ID NO: 1042070 - DNA, 33 bp, Homo sapien
tcattctgtagcaacagtcaggtagagatacat

SEQ ID NO: 1042071 - DNA, 33 bp, Homo sapien
taaactgcctgtctaaaaagtcatactcctatg

SEQ ID NO: 1042072 - DNA, 33 bp, Homo sapien
taaactgcctgtctaagaagtcatactcctatg

SEQ ID NO: 1042073 - DNA, 33 bp, Homo sapien
tatagctctattgcaacggttaattagataata

SEQ ID NO: 1042074 - DNA, 33 bp, Homo sapien
tatagctctattgcaagggttaattagataata

SEQ ID NO: 1042075 - DNA, 33 bp, Homo sapien
tggataaaaaatcaaagttcccaggttataggc

SEQ ID NO: 1042076 - DNA, 33 bp, Homo sapien
tggataaaaaatcaaatttcccaggttataggc

SEQ ID NO: 1042077 - DNA, 33 bp, Homo sapien
gaagacgagattaggaaagagacacctacagaa

SEQ ID NO: 1042078 - DNA, 33 bp, Homo sapien
gaagacgagattaggacagagacacctacagaa

SEQ ID NO: 1042079 - DNA, 33 bp, Homo sapien
atagatgaggagttcacgtttagaaaataaggg

SEQ ID NO: 1042080 - DNA, 33 bp, Homo sapien
atagatgaggagttcatgtttagaaaataaggg

SEQ ID NO: 1042081 - DNA, 33 bp, Homo sapien
tgtagaaaatctttagcagtacagttcaatatg

SEQ ID NO: 1042082 - DNA, 33 bp, Homo sapien
tgtagaaaatctttagtagtacagttcaatatg

SEQ ID NO: 1042083 - DNA, 33 bp, Homo sapien
gcaggctatattcagaccatgagtgttcaaatg

SEQ ID NO: 1042084 - DNA, 33 bp, Homo sapien
gcaggctatattcagatcatgagtgttcaaatg

SEQ ID NO: 1042085 - DNA, 33 bp, Homo sapien
ttcatggagccagaaaccagtaagaggttccta

SEQ ID NO: 1042086 - DNA, 33 bp, Homo sapien
ttcatggagccagaaatcagtaagaggttccta

SEQ ID NO: 1042087 - DNA, 33 bp, Homo sapien
gttgttttcaactaaactctataactggaataa

SEQ ID NO: 1042088 - DNA, 33 bp, Homo sapien
gttgttttcaactaaattctataactggaataa

SEQ ID NO: 1042089 - DNA, 33 bp, Homo sapien
ttagttcaaataagaaagagctacggggagatg

SEQ ID NO: 1042090 - DNA, 33 bp, Homo sapien
ttagttcaaataagaaggagctacggggagatg

SEQ ID NO: 1042091 - DNA, 33 bp, Homo sapien
gacttgtatatctccaactatgttatttgttaa

SEQ ID NO: 1042092 - DNA, 33 bp, Homo sapien
gacttgtatatctccacctatgttatttgttaa

SEQ ID NO: 1042093 - DNA, 33 bp, Homo sapien
tcacacgtgtaaaacgaacaaatgcatttcacc

SEQ ID NO: 1042094 - DNA, 33 bp, Homo sapien
tcacacgtgtaaaacgcacaaatgcatttcacc

SEQ ID NO: 1042095 - DNA, 33 bp, Homo sapien
tcagacagtaaaaacaacccagaggttagcata

SEQ ID NO: 1042096 - DNA, 33 bp, Homo sapien
tcagacagtaaaaacaccccagaggttagcata

SEQ ID NO: 1042097 - DNA, 33 bp, Homo sapien
aaactcacaagagaaagaatacaattagaaaat

SEQ ID NO: 1042098 - DNA, 33 bp, Homo sapien
aaactcacaagagaaataatacaattagaaaat

SEQ ID NO: 1042099 - DNA, 33 bp, Homo sapien
tcagtaacaatgcccactataggcacaggtggg

SEQ ID NO: 1042100 - DNA, 33 bp, Homo sapien
tcagtaacaatgcccattataggcacaggtggg

SEQ ID NO: 1042101 - DNA, 33 bp, Homo sapien
aatacacacgacatgacgggacattaaatgcag

SEQ ID NO: 1042102 - DNA, 33 bp, Homo sapien
aatacacacgacatgatgggacattaaatgcag

SEQ ID NO: 1042103 - DNA, 33 bp, Homo sapien
aagggtctggcaaagccacaagatgtgagggaa

SEQ ID NO: 1042104 - DNA, 33 bp, Homo sapien
aagggtctggcaaagctacaagatgtgagggaa

SEQ ID NO: 1042105 - DNA, 33 bp, Homo sapien
tttcctaagagctataagcctgaccttcaattc

SEQ ID NO: 1042106 - DNA, 33 bp, Homo sapien
tttcctaagagctataggcctgaccttcaattc

SEQ ID NO: 1042107 - DNA, 33 bp, Homo sapien
gggtattaggaaccaacgagttaagctgtgttt

SEQ ID NO: 1042108 - DNA, 33 bp, Homo sapien
gggtattaggaaccaatgagttaagctgtgttt

SEQ ID NO: 1042109 - DNA, 33 bp, Homo sapien
attctgggaaatagcaatagtgtagagaaagtg

SEQ ID NO: 1042110 - DNA, 33 bp, Homo sapien
attctgggaaatagcagtagtgtagagaaagtg

SEQ ID NO: 1042111 - DNA, 33 bp, Homo sapien
gatatttcttcagagcaatctactctattctac

SEQ ID NO: 1042112 - DNA, 33 bp, Homo sapien
gatatttcttcagagcgatctactctattctac

SEQ ID NO: 1042113 - DNA, 33 bp, Homo sapien
tgccatgatgggaagaaggattatagaagacac

SEQ ID NO: 1042114 - DNA, 33 bp, Homo sapien
tgccatgatgggaagagggattatagaagacac

SEQ ID NO: 1042115 - DNA, 33 bp, Homo sapien
tttaataacactctccagatttttgttgttata

SEQ ID NO: 1042116 - DNA, 33 bp, Homo sapien
tttaataacactctccggatttttgttgttata

SEQ ID NO: 1042117 - DNA, 33 bp, Homo sapien
ctgtctccagtacaaagcaaacaccaggtttcc

SEQ ID NO: 1042118 - DNA, 33 bp, Homo sapien
ctgtctccagtacaaatcaaacaccaggtttcc

SEQ ID NO: 1042119 - DNA, 33 bp, Homo sapien
gcttatcagagactaccacttttattgatcaca

SEQ ID NO: 1042120 - DNA, 33 bp, Homo sapien
gcttatcagagactactacttttattgatcaca

SEQ ID NO: 1042121 - DNA, 33 bp, Homo sapien
cctggtgaacatagacacaaatattctcaagaa

SEQ ID NO: 1042122 - DNA, 33 bp, Homo sapien
cctggtgaacatagacgcaaatattctcaagaa

SEQ ID NO: 1042123 - DNA, 33 bp, Homo sapien
ataagaagcaatctaaatatgaaagaacctcat

SEQ ID NO: 1042124 - DNA, 33 bp, Homo sapien
ataagaagcaatctaagtatgaaagaacctcat

SEQ ID NO: 1042125 - DNA, 33 bp, Homo sapien
atccatctaatattcaacaaaatgagatcctgt

SEQ ID NO: 1042126 - DNA, 33 bp, Homo sapien
atccatctaatattcagcaaaatgagatcctgt

SEQ ID NO: 1042127 - DNA, 33 bp, Homo sapien
taaggcttgttaggaaagaaaattaactcatca

SEQ ID NO: 1042128 - DNA, 33 bp, Homo sapien
taaggcttgttaggaaggaaaattaactcatca

SEQ ID NO: 1042129 - DNA, 33 bp, Homo sapien
cgctaaaataaatgtacgctgtattgcaaataa

SEQ ID NO: 1042130 - DNA, 33 bp, Homo sapien
cgctaaaataaatgtaggctgtattgcaaataa

SEQ ID NO: 1042131 - DNA, 33 bp, Homo sapien
ctccagaactatgggacaataagtttctgtttt

SEQ ID NO: 1042132 - DNA, 33 bp, Homo sapien
ctccagaactatgggagaataagtttctgtttt

SEQ ID NO: 1042133 - DNA, 33 bp, Homo sapien
attaccacacactttacggtttacaaaaacaga

SEQ ID NO: 1042134 - DNA, 33 bp, Homo sapien
attaccacacactttatggtttacaaaaacaga

SEQ ID NO: 1042135 - DNA, 33 bp, Homo sapien
tctttagacactccaaacttgtcatgggaaatt

SEQ ID NO: 1042136 - DNA, 33 bp, Homo sapien
tctttagacactccaatcttgtcatgggaaatt

SEQ ID NO: 1042137 - DNA, 33 bp, Homo sapien
tacacacagatgggaacgaaggtatagaggact

SEQ ID NO: 1042138 - DNA, 33 bp, Homo sapien
tacacacagatgggaatgaaggtatagaggact

SEQ ID NO: 1042139 - DNA, 33 bp, Homo sapien
aaatactgcaaagttaagaatctgagcaatacg

SEQ ID NO: 1042140 - DNA, 33 bp, Homo sapien
aaatactgcaaagttaggaatctgagcaatacg

SEQ ID NO: 1042141 - DNA, 33 bp, Homo sapien
tctcacttttagtaacagtgttctgctctattc

SEQ ID NO: 1042142 - DNA, 33 bp, Homo sapien
tctcacttttagtaacggtgttctgctctattc

SEQ ID NO: 1042143 - DNA, 33 bp, Homo sapien
cttagtagatactgaacagctttggttgaggag

SEQ ID NO: 1042144 - DNA, 33 bp, Homo sapien
cttagtagatactgaatagctttggttgaggag

SEQ ID NO: 1042145 - DNA, 33 bp, Homo sapien
tacaaagatgaatgaacagaatcctagtcccta

SEQ ID NO: 1042146 - DNA, 33 bp, Homo sapien
tacaaagatgaatgaatagaatcctagtcccta

SEQ ID NO: 1042147 - DNA, 33 bp, Homo sapien
atttggtagcaagagaacattaaaagaaatgct

SEQ ID NO: 1042148 - DNA, 33 bp, Homo sapien
atttggtagcaagagaccattaaaagaaatgct

SEQ ID NO: 1042149 - DNA, 33 bp, Homo sapien
gtttggcacagtcagaaagcaaaaacattgcag

SEQ ID NO: 1042150 - DNA, 33 bp, Homo sapien
gtttggcacagtcagacagcaaaaacattgcag

SEQ ID NO: 1042151 - DNA, 33 bp, Homo sapien
aaaaaatgttatttgaagagcaggcttcatctc

SEQ ID NO: 1042152 - DNA, 33 bp, Homo sapien
aaaaaatgttatttgaggagcaggcttcatctc

SEQ ID NO: 1042153 - DNA, 33 bp, Homo sapien
gatgaaatttgggtacagatagtttttatgtga

SEQ ID NO: 1042154 - DNA, 33 bp, Homo sapien
gatgaaatttgggtaccgatagtttttatgtga

SEQ ID NO: 1042155 - DNA, 33 bp, Homo sapien
atcttgaaagtaaccaacatgctttcgatttta

SEQ ID NO: 1042156 - DNA, 33 bp, Homo sapien
atcttgaaagtaaccagcatgctttcgatttta

SEQ ID NO: 1042157 - DNA, 33 bp, Homo sapien
gatactgttgtgtaaaactcaaaacaaatgtct

SEQ ID NO: 1042158 - DNA, 33 bp, Homo sapien
gatactgttgtgtaaagctcaaaacaaatgtct

SEQ ID NO: 1042159 - DNA, 33 bp, Homo sapien
aatttttagctcttacaacactttgaattactt

SEQ ID NO: 1042160 - DNA, 33 bp, Homo sapien
aatttttagctcttacgacactttgaattactt

SEQ ID NO: 1042161 - DNA, 33 bp, Homo sapien
gggcattcatgatggagatgctgaaggagtttt

SEQ ID NO: 1042162 - DNA, 33 bp, Homo sapien
gggcattcatgatggatatgctgaaggagtttt

SEQ ID NO: 1042163 - DNA, 33 bp, Homo sapien
cccatatgttcagtgccctggtaaagctgattt

SEQ ID NO: 1042164 - DNA, 33 bp, Homo sapien
cccatatgttcagtgctctggtaaagctgattt

SEQ ID NO: 1042165 - DNA, 33 bp, Homo sapien
taatcaccacacataaatcaagtgtaaagactg

SEQ ID NO: 1042166 - DNA, 33 bp, Homo sapien
taatcaccacacataagtcaagtgtaaagactg

SEQ ID NO: 1042167 - DNA, 33 bp, Homo sapien
gaacatactcctctagccaagttaaagattttt

SEQ ID NO: 1042168 - DNA, 33 bp, Homo sapien
gaacatactcctctagtcaagttaaagattttt

SEQ ID NO: 1042169 - DNA, 33 bp, Homo sapien
tcttgatcagttaataaaaaattgcttgaaggc

SEQ ID NO: 1042170 - DNA, 33 bp, Homo sapien
tcttgatcagttaatacaaaattgcttgaaggc

SEQ ID NO: 1042171 - DNA, 33 bp, Homo sapien
ttgtattgtctcaatagcctcaagaatgcaatg

SEQ ID NO: 1042172 - DNA, 33 bp, Homo sapien
ttgtattgtctcaatatcctcaagaatgcaatg

SEQ ID NO: 1042173 - DNA, 33 bp, Homo sapien
atgagatcctttactaggtttcaaagcctgttc

SEQ ID NO: 1042174 - DNA, 33 bp, Homo sapien
atgagatcctttactatgtttcaaagcctgttc

SEQ ID NO: 1042175 - DNA, 33 bp, Homo sapien
ggctgataattgactacgtattctgacacatta

SEQ ID NO: 1042176 - DNA, 33 bp, Homo sapien
ggctgataattgactatgtattctgacacatta

SEQ ID NO: 1042177 - DNA, 33 bp, Homo sapien
aagattccactagcaactccaggagacattata

SEQ ID NO: 1042178 - DNA, 33 bp, Homo sapien
aagattccactagcaattccaggagacattata

SEQ ID NO: 1042179 - DNA, 33 bp, Homo sapien
agggcctgcataagccaaacaatatatgaagca

SEQ ID NO: 1042180 - DNA, 33 bp, Homo sapien
agggcctgcataagccgaacaatatatgaagca

SEQ ID NO: 1042181 - DNA, 33 bp, Homo sapien
cacaaacccacttccgcatggcctgtctaggaa

SEQ ID NO: 1042182 - DNA, 33 bp, Homo sapien
cacaaacccacttccggatggcctgtctaggaa

SEQ ID NO: 1042183 - DNA, 33 bp, Homo sapien
gagttagagtaagcaacagaaaaagcaaataca

SEQ ID NO: 1042184 - DNA, 33 bp, Homo sapien
gagttagagtaagcaatagaaaaagcaaataca

SEQ ID NO: 1042185 - DNA, 33 bp, Homo sapien
gagcaaatctgggtatgaaaaagacagattaat

SEQ ID NO: 1042186 - DNA, 33 bp, Homo sapien
gagcaaatctgggtattaaaaagacagattaat

SEQ ID NO: 1042187 - DNA, 33 bp, Homo sapien
taggactggtacctaacgccaactcttgtcaga

SEQ ID NO: 1042188 - DNA, 33 bp, Homo sapien
taggactggtacctaatgccaactcttgtcaga

SEQ ID NO: 1042189 - DNA, 33 bp, Homo sapien
gatgtcttctcaaagcagatggggtgttggaaa

SEQ ID NO: 1042190 - DNA, 33 bp, Homo sapien
gatgtcttctcaaagcggatggggtgttggaaa

SEQ ID NO: 1042191 - DNA, 33 bp, Homo sapien
tacgtggttccttgacccaaatttgtatgtcag

SEQ ID NO: 1042192 - DNA, 33 bp, Homo sapien
tacgtggttccttgactcaaatttgtatgtcag

SEQ ID NO: 1042193 - DNA, 33 bp, Homo sapien
ttgtgattggaactcccgaaggcagctgtaggg

SEQ ID NO: 1042194 - DNA, 33 bp, Homo sapien
ttgtgattggaactcctgaaggcagctgtaggg

SEQ ID NO: 1042195 - DNA, 33 bp, Homo sapien
tgagtctgggagccaccggtaattgtggcagaa

SEQ ID NO: 1042196 - DNA, 33 bp, Homo sapien
tgagtctgggagccacgggtaattgtggcagaa

SEQ ID NO: 1042197 - DNA, 33 bp, Homo sapien
tgaaaacattacagggacacttaacccagccct

SEQ ID NO: 1042198 - DNA, 33 bp, Homo sapien
tgaaaacattacagggccacttaacccagccct

SEQ ID NO: 1042199 - DNA, 33 bp, Homo sapien
gtagagacaaaactaacagagaagaagtgatag

SEQ ID NO: 1042200 - DNA, 33 bp, Homo sapien
gtagagacaaaactaatagagaagaagtgatag

SEQ ID NO: 1042201 - DNA, 33 bp, Homo sapien
gttacttcagaactcaccaaaggatatgagcat

SEQ ID NO: 1042202 - DNA, 33 bp, Homo sapien
gttacttcagaactcatcaaaggatatgagcat

SEQ ID NO: 1042203 - DNA, 33 bp, Homo sapien
agaaaagaaatgttcacgtaattgagtatctaa

SEQ ID NO: 1042204 - DNA, 33 bp, Homo sapien
agaaaagaaatgttcatgtaattgagtatctaa

SEQ ID NO: 1042205 - DNA, 33 bp, Homo sapien
tcagttgatcttaacacggaaagagagacaggt

SEQ ID NO: 1042206 - DNA, 33 bp, Homo sapien
tcagttgatcttaacatggaaagagagacaggt

SEQ ID NO: 1042207 - DNA, 33 bp, Homo sapien
aattttgcttgtttcacaaacgttatgattgaa

SEQ ID NO: 1042208 - DNA, 33 bp, Homo sapien
aattttgcttgtttcataaacgttatgattgaa

SEQ ID NO: 1042209 - DNA, 33 bp, Homo sapien
aaatgtaaattacataccttaagtgttggctta

SEQ ID NO: 1042210 - DNA, 33 bp, Homo sapien
aaatgtaaattacatatcttaagtgttggctta

SEQ ID NO: 1042211 - DNA, 33 bp, Homo sapien
acctaaccaaggttatcagtacattctgaccat

SEQ ID NO: 1042212 - DNA, 33 bp, Homo sapien
acctaaccaaggttatgagtacattctgaccat

SEQ ID NO: 1042213 - DNA, 33 bp, Homo sapien
ggttaacatgatctgacctatgagagttaacag

SEQ ID NO: 1042214 - DNA, 33 bp, Homo sapien
ggttaacatgatctgagctatgagagttaacag

SEQ ID NO: 1042215 - DNA, 33 bp, Homo sapien
ctctttggttgactataaaataccagagatatg

SEQ ID NO: 1042216 - DNA, 33 bp, Homo sapien
ctctttggttgactatcaaataccagagatatg

SEQ ID NO: 1042217 - DNA, 33 bp, Homo sapien
gtaatgagctaagaaacaaatatcataggttaa

SEQ ID NO: 1042218 - DNA, 33 bp, Homo sapien
gtaatgagctaagaaagaaatatcataggttaa

SEQ ID NO: 1042219 - DNA, 33 bp, Homo sapien
aaagatgtttcttcataagttttgggtgttcaa

SEQ ID NO: 1042220 - DNA, 33 bp, Homo sapien
aaagatgtttcttcatgagttttgggtgttcaa

SEQ ID NO: 1042221 - DNA, 33 bp, Homo sapien
gaaagaggaatgaaaaagtgagcaattgattga

SEQ ID NO: 1042222 - DNA, 33 bp, Homo sapien
gaaagaggaatgaaaatgtgagcaattgattga

SEQ ID NO: 1042223 - DNA, 33 bp, Homo sapien
tctggcttatcctatcaactaaagcctagattt

SEQ ID NO: 1042224 - DNA, 33 bp, Homo sapien
tctggcttatcctatcgactaaagcctagattt

SEQ ID NO: 1042225 - DNA, 33 bp, Homo sapien
ccaccatgttttaagactctgggattatagata

SEQ ID NO: 1042226 - DNA, 33 bp, Homo sapien
ccaccatgttttaagattctgggattatagata

SEQ ID NO: 1042227 - DNA, 33 bp, Homo sapien
cccatcaccttttaataagctctaactggccct

SEQ ID NO: 1042228 - DNA, 33 bp, Homo sapien
cccatcaccttttaatgagctctaactggccct

SEQ ID NO: 1042229 - DNA, 33 bp, Homo sapien
ttctagaggcttggaaatctaaaatcaatatgc

SEQ ID NO: 1042230 - DNA, 33 bp, Homo sapien
ttctagaggcttggaagtctaaaatcaatatgc

SEQ ID NO: 1042231 - DNA, 33 bp, Homo sapien
cccaactactctgaacaactccttatgaatttg

SEQ ID NO: 1042232 - DNA, 33 bp, Homo sapien
cccaactactctgaacgactccttatgaatttg

SEQ ID NO: 1042233 - DNA, 33 bp, Homo sapien
aattgtttgttgaggaaaggttagtatttggcc

SEQ ID NO: 1042234 - DNA, 33 bp, Homo sapien
aattgtttgttgaggataggttagtatttggcc

SEQ ID NO: 1042235 - DNA, 33 bp, Homo sapien
actcatcaatgatgaacaaaggccaagaaggtc

SEQ ID NO: 1042236 - DNA, 33 bp, Homo sapien
actcatcaatgatgaagaaaggccaagaaggtc

SEQ ID NO: 1042237 - DNA, 33 bp, Homo sapien
atcctaaatgaactaacgaactaacgcaggatc

SEQ ID NO: 1042238 - DNA, 33 bp, Homo sapien
atcctaaatgaactaaggaactaacgcaggatc

SEQ ID NO: 1042239 - DNA, 33 bp, Homo sapien
gcatgagttcttgaaagatctgcttgttgtaaa

SEQ ID NO: 1042240 - DNA, 33 bp, Homo sapien
gcatgagttcttgaaatatctgcttgttgtaaa

SEQ ID NO: 1042241 - DNA, 33 bp, Homo sapien
gacagtgcccagcatacggtcaagctcttttaa

SEQ ID NO: 1042242 - DNA, 33 bp, Homo sapien
gacagtgcccagcatatggtcaagctcttttaa

SEQ ID NO: 1042243 - DNA, 33 bp, Homo sapien
gaaatagttgctatcaatatctttgttggtcaa

SEQ ID NO: 1042244 - DNA, 33 bp, Homo sapien
gaaatagttgctatcagtatctttgttggtcaa

SEQ ID NO: 1042245 - DNA, 33 bp, Homo sapien
ctgcagcctacaaagcccaaagtatttattacc

SEQ ID NO: 1042246 - DNA, 33 bp, Homo sapien
ctgcagcctacaaagcgcaaagtatttattacc

SEQ ID NO: 1042247 - DNA, 33 bp, Homo sapien
aaggccccaactaaagaagagtcaacagatgtg

SEQ ID NO: 1042248 - DNA, 33 bp, Homo sapien
aaggccccaactaaaggagagtcaacagatgtg

SEQ ID NO: 1042249 - DNA, 33 bp, Homo sapien
ttttgtctctcttgtcaactttagacttctcta

SEQ ID NO: 1042250 - DNA, 33 bp, Homo sapien
ttttgtctctcttgtcgactttagacttctcta

SEQ ID NO: 1042251 - DNA, 33 bp, Homo sapien
acattcgtactcctcaaatatatccctcttctc

SEQ ID NO: 1042252 - DNA, 33 bp, Homo sapien
acattcgtactcctcagatatatccctcttctc

SEQ ID NO: 1042253 - DNA, 33 bp, Homo sapien
tttatctcacctctggaacgaagaatcattctt

SEQ ID NO: 1042254 - DNA, 33 bp, Homo sapien
tttatctcacctctgggacgaagaatcattctt

SEQ ID NO: 1042255 - DNA, 33 bp, Homo sapien
caacctgtcttaatcacccacataaatactgta

SEQ ID NO: 1042256 - DNA, 33 bp, Homo sapien
caacctgtcttaatcatccacataaatactgta

SEQ ID NO: 1042257 - DNA, 33 bp, Homo sapien
tgttttggatgttatacgtttgctcatccacct

SEQ ID NO: 1042258 - DNA, 33 bp, Homo sapien
tgttttggatgttatatgtttgctcatccacct

SEQ ID NO: 1042259 - DNA, 33 bp, Homo sapien
gcaagatgactcaaaaagctttggctaaattag

SEQ ID NO: 1042260 - DNA, 33 bp, Homo sapien
gcaagatgactcaaaaggctttggctaaattag

SEQ ID NO: 1042261 - DNA, 33 bp, Homo sapien
cagtgtccttatctccaaaaagattattatacc

SEQ ID NO: 1042262 - DNA, 33 bp, Homo sapien
cagtgtccttatctccgaaaagattattatacc

SEQ ID NO: 1042263 - DNA, 33 bp, Homo sapien
gccctgcccgtaggtaggtttaaaagtgctttt

SEQ ID NO: 1042264 - DNA, 33 bp, Homo sapien
gccctgcccgtaggtatgtttaaaagtgctttt

SEQ ID NO: 1042265 - DNA, 33 bp, Homo sapien
ctcattggtgagaaacaggaagaccctttttcc

SEQ ID NO: 1042266 - DNA, 33 bp, Homo sapien
ctcattggtgagaaacgggaagaccctttttcc

SEQ ID NO: 1042267 - DNA, 33 bp, Homo sapien
agatccttgtgagtaagtcctgcatttatcacc

SEQ ID NO: 1042268 - DNA, 33 bp, Homo sapien
agatccttgtgagtaattcctgcatttatcacc

SEQ ID NO: 1042269 - DNA, 33 bp, Homo sapien
gcttaattttgttgaaagtggtgtttctaaaac

SEQ ID NO: 1042270 - DNA, 33 bp, Homo sapien
gcttaattttgttgaacgtggtgtttctaaaac

SEQ ID NO: 1042271 - DNA, 33 bp, Homo sapien
tctgcttgaagaaacaacacaaatagagaattc

SEQ ID NO: 1042272 - DNA, 33 bp, Homo sapien
tctgcttgaagaaacagcacaaatagagaattc

SEQ ID NO: 1042273 - DNA, 33 bp, Homo sapien
tcttgcttggaaacacagaagccttcacaaata

SEQ ID NO: 1042274 - DNA, 33 bp, Homo sapien
tcttgcttggaaacacggaagccttcacaaata

SEQ ID NO: 1042275 - DNA, 33 bp, Homo sapien
atttgtcacgttacacaaaaggtagtaatatat

SEQ ID NO: 1042276 - DNA, 33 bp, Homo sapien
atttgtcacgttacacgaaaggtagtaatatat

SEQ ID NO: 1042277 - DNA, 33 bp, Homo sapien
aatacaagtctaccaactaccccctcctcagtc

SEQ ID NO: 1042278 - DNA, 33 bp, Homo sapien
aatacaagtctaccaagtaccccctcctcagtc

SEQ ID NO: 1042279 - DNA, 33 bp, Homo sapien
tatgagcatttcacaaaaacacctactaggact

SEQ ID NO: 1042280 - DNA, 33 bp, Homo sapien
tatgagcatttcacaacaacacctactaggact

SEQ ID NO: 1042281 - DNA, 33 bp, Homo sapien
gagactgtagttcatacgtacatggaattgtga

SEQ ID NO: 1042282 - DNA, 33 bp, Homo sapien
gagactgtagttcataggtacatggaattgtga

SEQ ID NO: 1042283 - DNA, 33 bp, Homo sapien
tccatttcatcctacacagcagaagtactagta

SEQ ID NO: 1042284 - DNA, 33 bp, Homo sapien
tccatttcatcctacatagcagaagtactagta

SEQ ID NO: 1042285 - DNA, 33 bp, Homo sapien
agaacactggcatatacagtatcttaaacaaag

SEQ ID NO: 1042286 - DNA, 33 bp, Homo sapien
agaacactggcatatatagtatcttaaacaaag

SEQ ID NO: 1042287 - DNA, 33 bp, Homo sapien
caatggtgagcctgggcactgagtgacagacag

SEQ ID NO: 1042288 - DNA, 33 bp, Homo sapien
caatggtgagcctgggtactgagtgacagacag

SEQ ID NO: 1042289 - DNA, 33 bp, Homo sapien
actggagtatcaatgaagttcatggcatagtta

SEQ ID NO: 1042290 - DNA, 33 bp, Homo sapien
actggagtatcaatgatgttcatggcatagtta

SEQ ID NO: 1042291 - DNA, 33 bp, Homo sapien
tcacaatattaatcgaatacaaaacatctgatt

SEQ ID NO: 1042292 - DNA, 33 bp, Homo sapien
tcacaatattaatcgagtacaaaacatctgatt

SEQ ID NO: 1042293 - DNA, 33 bp, Homo sapien
ttgaatggaaatttaggaaatctcaatctgaca

SEQ ID NO: 1042294 - DNA, 33 bp, Homo sapien
ttgaatggaaatttagtaaatctcaatctgaca

SEQ ID NO: 1042295 - DNA, 33 bp, Homo sapien
ttacttctttttcaaccaattacaagcatcacc

SEQ ID NO: 1042296 - DNA, 33 bp, Homo sapien
ttacttctttttcaacgaattacaagcatcacc

SEQ ID NO: 1042297 - DNA, 33 bp, Homo sapien
tcagagcagccaataacacttgataaattcagc

SEQ ID NO: 1042298 - DNA, 33 bp, Homo sapien
tcagagcagccaataagacttgataaattcagc

SEQ ID NO: 1042299 - DNA, 33 bp, Homo sapien
gttgcgtttcttctcacaaccagttggaaaact

SEQ ID NO: 1042300 - DNA, 33 bp, Homo sapien
gttgcgtttcttctcataaccagttggaaaact

SEQ ID NO: 1042301 - DNA, 33 bp, Homo sapien
tatttcccatttaaagaatcttccaatgaccct

SEQ ID NO: 1042302 - DNA, 33 bp, Homo sapien
tatttcccatttaaagcatcttccaatgaccct

SEQ ID NO: 1042303 - DNA, 33 bp, Homo sapien
atttctactatgtatacggcattgttcttagca

SEQ ID NO: 1042304 - DNA, 33 bp, Homo sapien
atttctactatgtatatggcattgttcttagca

SEQ ID NO: 1042305 - DNA, 33 bp, Homo sapien
aataactggtaaattagactttgagcttcgtga

SEQ ID NO: 1042306 - DNA, 33 bp, Homo sapien
aataactggtaaattatactttgagcttcgtga

SEQ ID NO: 1042307 - DNA, 33 bp, Homo sapien
cctgctgtggaaaaatcatcctttcctatgaac

SEQ ID NO: 1042308 - DNA, 33 bp, Homo sapien
cctgctgtggaaaaatgatcctttcctatgaac

SEQ ID NO: 1042309 - DNA, 33 bp, Homo sapien
agattaaggtaaagagaactggaatcttactct

SEQ ID NO: 1042310 - DNA, 33 bp, Homo sapien
agattaaggtaaagaggactggaatcttactct

SEQ ID NO: 1042311 - DNA, 33 bp, Homo sapien
cattactaaaacaagaacacggagactacacaa

SEQ ID NO: 1042312 - DNA, 33 bp, Homo sapien
cattactaaaacaagagcacggagactacacaa

SEQ ID NO: 1042313 - DNA, 33 bp, Homo sapien
catgggagagacagtacgaaagcctgaatcaat

SEQ ID NO: 1042314 - DNA, 33 bp, Homo sapien
catgggagagacagtatgaaagcctgaatcaat

SEQ ID NO: 1042315 - DNA, 33 bp, Homo sapien
ttctgctacttactaactatgtgtgatcttggc

SEQ ID NO: 1042316 - DNA, 33 bp, Homo sapien
ttctgctacttactaattatgtgtgatcttggc

SEQ ID NO: 1042317 - DNA, 33 bp, Homo sapien
acattctaggccaacactccattctttacagtc

SEQ ID NO: 1042318 - DNA, 33 bp, Homo sapien
acattctaggccaacattccattctttacagtc

SEQ ID NO: 1042319 - DNA, 33 bp, Homo sapien
agactttggaaaaaaacgtgacactcaacatag

SEQ ID NO: 1042320 - DNA, 33 bp, Homo sapien
agactttggaaaaaaatgtgacactcaacatag

SEQ ID NO: 1042321 - DNA, 33 bp, Homo sapien
agagctagaataactgaagccagagagtttata

SEQ ID NO: 1042322 - DNA, 33 bp, Homo sapien
agagctagaataactggagccagagagtttata

SEQ ID NO: 1042323 - DNA, 33 bp, Homo sapien
tcttaggctcagaggaaataacgtaggtgaaag

SEQ ID NO: 1042324 - DNA, 33 bp, Homo sapien
tcttaggctcagaggatataacgtaggtgaaag

SEQ ID NO: 1042325 - DNA, 33 bp, Homo sapien
tcgaggtgaaaaataaggttggcatggtctgga

SEQ ID NO: 1042326 - DNA, 33 bp, Homo sapien
tcgaggtgaaaaataatgttggcatggtctgga

SEQ ID NO: 1042327 - DNA, 33 bp, Homo sapien
taggcgagatgcgcaccgaaaattaaatccacg

SEQ ID NO: 1042328 - DNA, 33 bp, Homo sapien
taggcgagatgcgcacggaaaattaaatccacg

SEQ ID NO: 1042329 - DNA, 33 bp, Homo sapien
ttagttataagcaaaaatggctaactctaaaat

SEQ ID NO: 1042330 - DNA, 33 bp, Homo sapien
ttagttataagcaaaagtggctaactctaaaat

SEQ ID NO: 1042331 - DNA, 33 bp, Homo sapien
gtactaagatgactccagatttcagaaatgcac

SEQ ID NO: 1042332 - DNA, 33 bp, Homo sapien
gtactaagatgactcccgatttcagaaatgcac

SEQ ID NO: 1042333 - DNA, 33 bp, Homo sapien
tggatagtctttgggaacaatgaacagatctgc

SEQ ID NO: 1042334 - DNA, 33 bp, Homo sapien
tggatagtctttgggaccaatgaacagatctgc

SEQ ID NO: 1042335 - DNA, 33 bp, Homo sapien
tggaagatatgctttcaaagacccccttagttc

SEQ ID NO: 1042336 - DNA, 33 bp, Homo sapien
tggaagatatgctttcgaagacccccttagttc

SEQ ID NO: 1042337 - DNA, 33 bp, Homo sapien
caggcagaaatagatcaaggagccagtcagttt

SEQ ID NO: 1042338 - DNA, 33 bp, Homo sapien
caggcagaaatagatccaggagccagtcagttt

SEQ ID NO: 1042339 - DNA, 33 bp, Homo sapien
tgaacagatgcatttacaggttctgggccctgt

SEQ ID NO: 1042340 - DNA, 33 bp, Homo sapien
tgaacagatgcatttataggttctgggccctgt

SEQ ID NO: 1042341 - DNA, 33 bp, Homo sapien
ccatcccacactgtagaatgttacctaatgtcc

SEQ ID NO: 1042342 - DNA, 33 bp, Homo sapien
ccatcccacactgtaggatgttacctaatgtcc

SEQ ID NO: 1042343 - DNA, 33 bp, Homo sapien
cagctattcattgagactatagccatttccatc

SEQ ID NO: 1042344 - DNA, 33 bp, Homo sapien
cagctattcattgagattatagccatttccatc

SEQ ID NO: 1042345 - DNA, 33 bp, Homo sapien
cttgactaactcatgacctttctctttattctt

SEQ ID NO: 1042346 - DNA, 33 bp, Homo sapien
cttgactaactcatgatctttctctttattctt

SEQ ID NO: 1042347 - DNA, 33 bp, Homo sapien
aactgactagatttatcagtccagattggctag

SEQ ID NO: 1042348 - DNA, 33 bp, Homo sapien
aactgactagatttattagtccagattggctag

SEQ ID NO: 1042349 - DNA, 33 bp, Homo sapien
ttatcgttatagaagacaggcagaatcagcact

SEQ ID NO: 1042350 - DNA, 33 bp, Homo sapien
ttatcgttatagaagataggcagaatcagcact

SEQ ID NO: 1042351 - DNA, 33 bp, Homo sapien
tcttgtacagacggcagaattgtgagccaaata

SEQ ID NO: 1042352 - DNA, 33 bp, Homo sapien
tcttgtacagacggcataattgtgagccaaata

SEQ ID NO: 1042353 - DNA, 33 bp, Homo sapien
gtgtgtctgtgagagaaagtttgtatatgtgtc

SEQ ID NO: 1042354 - DNA, 33 bp, Homo sapien
gtgtgtctgtgagagacagtttgtatatgtgtc

SEQ ID NO: 1042355 - DNA, 33 bp, Homo sapien
atcttaacaaatagtacggattttggatttcag

SEQ ID NO: 1042356 - DNA, 33 bp, Homo sapien
atcttaacaaatagtatggattttggatttcag

SEQ ID NO: 1042357 - DNA, 33 bp, Homo sapien
gctaactgctatatacagcattaagaaattact

SEQ ID NO: 1042358 - DNA, 33 bp, Homo sapien
gctaactgctatatacggcattaagaaattact

SEQ ID NO: 1042359 - DNA, 33 bp, Homo sapien
gagtcctgctgttacactgcttcagctctacag

SEQ ID NO: 1042360 - DNA, 33 bp, Homo sapien
gagtcctgctgttacattgcttcagctctacag

SEQ ID NO: 1042361 - DNA, 33 bp, Homo sapien
ctaatactttgcatcaatacagcacctttcatc

SEQ ID NO: 1042362 - DNA, 33 bp, Homo sapien
ctaatactttgcatcagtacagcacctttcatc

SEQ ID NO: 1042363 - DNA, 33 bp, Homo sapien
caattatttccaattaagagatagcagcgacag

SEQ ID NO: 1042364 - DNA, 33 bp, Homo sapien
caattatttccaattaggagatagcagcgacag

SEQ ID NO: 1042365 - DNA, 33 bp, Homo sapien
agtcctggcttttcacagagtacattgcgtgaa

SEQ ID NO: 1042366 - DNA, 33 bp, Homo sapien
agtcctggcttttcacggagtacattgcgtgaa

SEQ ID NO: 1042367 - DNA, 33 bp, Homo sapien
gggacaaagtagaagccgacatttttgaatatc

SEQ ID NO: 1042368 - DNA, 33 bp, Homo sapien
gggacaaagtagaagctgacatttttgaatatc

SEQ ID NO: 1042369 - DNA, 33 bp, Homo sapien
gcaacagacacttttacggatgaggtaaatgag

SEQ ID NO: 1042370 - DNA, 33 bp, Homo sapien
gcaacagacacttttatggatgaggtaaatgag

SEQ ID NO: 1042371 - DNA, 33 bp, Homo sapien
accaacagtaattaatgaggccttacaacccct

SEQ ID NO: 1042372 - DNA, 33 bp, Homo sapien
accaacagtaattaattaggccttacaacccct

SEQ ID NO: 1042373 - DNA, 33 bp, Homo sapien
caaactgaattctgtaggtcaagaatatttccc

SEQ ID NO: 1042374 - DNA, 33 bp, Homo sapien
caaactgaattctgtatgtcaagaatatttccc

SEQ ID NO: 1042375 - DNA, 33 bp, Homo sapien
actacgtgtaagtagaatcatacagcatctcct

SEQ ID NO: 1042376 - DNA, 33 bp, Homo sapien
actacgtgtaagtagagtcatacagcatctcct

SEQ ID NO: 1042377 - DNA, 33 bp, Homo sapien
cctgaaagcattcaaaacatatttctgaaggaa

SEQ ID NO: 1042378 - DNA, 33 bp, Homo sapien
cctgaaagcattcaaagcatatttctgaaggaa

SEQ ID NO: 1042379 - DNA, 33 bp, Homo sapien
ttcaatgttcccataacttaaacacagatgaac

SEQ ID NO: 1042380 - DNA, 33 bp, Homo sapien
ttcaatgttcccataagttaaacacagatgaac

SEQ ID NO: 1042381 - DNA, 33 bp, Homo sapien
tcataactgtgttacccgagtgacatttaattt

SEQ ID NO: 1042382 - DNA, 33 bp, Homo sapien
tcataactgtgttacctgagtgacatttaattt

SEQ ID NO: 1042383 - DNA, 33 bp, Homo sapien
cagtatctagataagacgtaggcaagaggctgc

SEQ ID NO: 1042384 - DNA, 33 bp, Homo sapien
cagtatctagataagatgtaggcaagaggctgc

SEQ ID NO: 1042385 - DNA, 33 bp, Homo sapien
ctctgcttccttgggacgtactcagctcctagt

SEQ ID NO: 1042386 - DNA, 33 bp, Homo sapien
ctctgcttccttgggatgtactcagctcctagt

SEQ ID NO: 1042387 - DNA, 33 bp, Homo sapien
agaatttcgtggtgaaagtcttcttaaatctga

SEQ ID NO: 1042388 - DNA, 33 bp, Homo sapien
agaatttcgtggtgaaggtcttcttaaatctga

SEQ ID NO: 1042389 - DNA, 33 bp, Homo sapien
ggtgcttaggtaattactaatcctgttgtgtta

SEQ ID NO: 1042390 - DNA, 33 bp, Homo sapien
ggtgcttaggtaattattaatcctgttgtgtta

SEQ ID NO: 1042391 - DNA, 33 bp, Homo sapien
ggccagaaagggatgaaagctgaaaagtcactt

SEQ ID NO: 1042392 - DNA, 33 bp, Homo sapien
ggccagaaagggatgagagctgaaaagtcactt

SEQ ID NO: 1042393 - DNA, 33 bp, Homo sapien
cataagaactatactcaacagacaacagtgtaa

SEQ ID NO: 1042394 - DNA, 33 bp, Homo sapien
cataagaactatactcgacagacaacagtgtaa

SEQ ID NO: 1042395 - DNA, 33 bp, Homo sapien
aataagacctgaagaacaggtggagtgggccac

SEQ ID NO: 1042396 - DNA, 33 bp, Homo sapien
aataagacctgaagaataggtggagtgggccac

SEQ ID NO: 1042397 - DNA, 33 bp, Homo sapien
gatgcataaagttggacagtgaaggagggcact

SEQ ID NO: 1042398 - DNA, 33 bp, Homo sapien
gatgcataaagttggatagtgaaggagggcact

SEQ ID NO: 1042399 - DNA, 33 bp, Homo sapien
cctgtcttgtgtaaaacaaaccatacacagtca

SEQ ID NO: 1042400 - DNA, 33 bp, Homo sapien
cctgtcttgtgtaaaataaaccatacacagtca

SEQ ID NO: 1042401 - DNA, 33 bp, Homo sapien
gaggccagggtaaaatcaggaatgaagaagggg

SEQ ID NO: 1042402 - DNA, 33 bp, Homo sapien
gaggccagggtaaaatgaggaatgaagaagggg

SEQ ID NO: 1042403 - DNA, 33 bp, Homo sapien
cagaggatgggcaatcacttgctgaggttgaga

SEQ ID NO: 1042404 - DNA, 33 bp, Homo sapien
cagaggatgggcaatcgcttgctgaggttgaga

SEQ ID NO: 1042405 - DNA, 33 bp, Homo sapien
ccagtttaatctgaaccggaaagcccatgtgag

SEQ ID NO: 1042406 - DNA, 33 bp, Homo sapien
ccagtttaatctgaacgggaaagcccatgtgag

SEQ ID NO: 1042407 - DNA, 33 bp, Homo sapien
agcctccagctttactcaggtacaatgacaatt

SEQ ID NO: 1042408 - DNA, 33 bp, Homo sapien
agcctccagctttactgaggtacaatgacaatt

SEQ ID NO: 1042409 - DNA, 33 bp, Homo sapien
cttaatgaatgactcaacaacctatctattcct

SEQ ID NO: 1042410 - DNA, 33 bp, Homo sapien
cttaatgaatgactcaccaacctatctattcct

SEQ ID NO: 1042411 - DNA, 33 bp, Homo sapien
ttttcatattagataacgcaacttgatttcttc

SEQ ID NO: 1042412 - DNA, 33 bp, Homo sapien
ttttcatattagataatgcaacttgatttcttc

SEQ ID NO: 1042413 - DNA, 33 bp, Homo sapien
ttctggtcttcatgtaaaaccactttttttctg

SEQ ID NO: 1042414 - DNA, 33 bp, Homo sapien
ttctggtcttcatgtagaaccactttttttctg

SEQ ID NO: 1042415 - DNA, 33 bp, Homo sapien
tctaagcattcagtagaccaccggcttgtactt

SEQ ID NO: 1042416 - DNA, 33 bp, Homo sapien
tctaagcattcagtaggccaccggcttgtactt

SEQ ID NO: 1042417 - DNA, 33 bp, Homo sapien
catgttcactcagcaaagacaaatagctcgaat

SEQ ID NO: 1042418 - DNA, 33 bp, Homo sapien
catgttcactcagcaaggacaaatagctcgaat

SEQ ID NO: 1042419 - DNA, 33 bp, Homo sapien
gagtataacaaggtcaacatatctatcagagtg

SEQ ID NO: 1042420 - DNA, 33 bp, Homo sapien
gagtataacaaggtcagcatatctatcagagtg

SEQ ID NO: 1042421 - DNA, 33 bp, Homo sapien
tctgtcaagcataaaaaatagaccaatttgtca

SEQ ID NO: 1042422 - DNA, 33 bp, Homo sapien
tctgtcaagcataaaatatagaccaatttgtca

SEQ ID NO: 1042423 - DNA, 33 bp, Homo sapien
ttgttcacctctcttcacatttctacattgtgt

SEQ ID NO: 1042424 - DNA, 33 bp, Homo sapien
ttgttcacctctcttcgcatttctacattgtgt

SEQ ID NO: 1042425 - DNA, 33 bp, Homo sapien
agttcagctggtaataccaatgcagcccattta

SEQ ID NO: 1042426 - DNA, 33 bp, Homo sapien
agttcagctggtaatatcaatgcagcccattta

SEQ ID NO: 1042427 - DNA, 33 bp, Homo sapien
atatgaagcaagcacaaggcaggttttccaaat

SEQ ID NO: 1042428 - DNA, 33 bp, Homo sapien
atatgaagcaagcacagggcaggttttccaaat

SEQ ID NO: 1042429 - DNA, 33 bp, Homo sapien
tcaccaacatcataaaagtgtggaagggagaag

SEQ ID NO: 1042430 - DNA, 33 bp, Homo sapien
tcaccaacatcataaacgtgtggaagggagaag

SEQ ID NO: 1042431 - DNA, 33 bp, Homo sapien
aaatttgcatgaagtaaaaagcaaaaagctgac

SEQ ID NO: 1042432 - DNA, 33 bp, Homo sapien
aaatttgcatgaagtagaaagcaaaaagctgac

SEQ ID NO: 1042433 - DNA, 33 bp, Homo sapien
caatgcaaagaaaatacggtgtaggctattagg

SEQ ID NO: 1042434 - DNA, 33 bp, Homo sapien
caatgcaaagaaaatatggtgtaggctattagg

SEQ ID NO: 1042435 - DNA, 33 bp, Homo sapien
attaactgttaaagagcattacagcaaaagaca

SEQ ID NO: 1042436 - DNA, 33 bp, Homo sapien
attaactgttaaagagtattacagcaaaagaca

SEQ ID NO: 1042437 - DNA, 33 bp, Homo sapien
tagaggtaggtagaggccaggtggagagagata

SEQ ID NO: 1042438 - DNA, 33 bp, Homo sapien
tagaggtaggtagaggtcaggtggagagagata

SEQ ID NO: 1042439 - DNA, 33 bp, Homo sapien
gcattctttgcatccacgtcaatttgtgagttt

SEQ ID NO: 1042440 - DNA, 33 bp, Homo sapien
gcattctttgcatccatgtcaatttgtgagttt

SEQ ID NO: 1042441 - DNA, 33 bp, Homo sapien
atgataataatgatacagatccatccactagac

SEQ ID NO: 1042442 - DNA, 33 bp, Homo sapien
atgataataatgatacggatccatccactagac

SEQ ID NO: 1042443 - DNA, 33 bp, Homo sapien
atccaactgataatgcaaactggagctgccaaa

SEQ ID NO: 1042444 - DNA, 33 bp, Homo sapien
atccaactgataatgcgaactggagctgccaaa

SEQ ID NO: 1042445 - DNA, 33 bp, Homo sapien
ccagaaagacatgttccctgtaggtaaccagaa

SEQ ID NO: 1042446 - DNA, 33 bp, Homo sapien
ccagaaagacatgttctctgtaggtaaccagaa

SEQ ID NO: 1042447 - DNA, 33 bp, Homo sapien
ctaccctcaaccttgacgagcaaaccctgcctt

SEQ ID NO: 1042448 - DNA, 33 bp, Homo sapien
ctaccctcaaccttgatgagcaaaccctgcctt

SEQ ID NO: 1042449 - DNA, 33 bp, Homo sapien
gaatggtaacagtatcacttcataagactgtag

SEQ ID NO: 1042450 - DNA, 33 bp, Homo sapien
gaatggtaacagtatcgcttcataagactgtag

SEQ ID NO: 1042451 - DNA, 33 bp, Homo sapien
gtctggcgttccaccagtagcaggtcactcaat

SEQ ID NO: 1042452 - DNA, 33 bp, Homo sapien
gtctggcgttccaccattagcaggtcactcaat

SEQ ID NO: 1042453 - DNA, 33 bp, Homo sapien
ttgaataagtctctgcactccttctgcaagtcg

SEQ ID NO: 1042454 - DNA, 33 bp, Homo sapien
ttgaataagtctctgctctccttctgcaagtcg

SEQ ID NO: 1042455 - DNA, 33 bp, Homo sapien
agggtagctggataggcattacaagggaagaag

SEQ ID NO: 1042456 - DNA, 33 bp, Homo sapien
agggtagctggataggtattacaagggaagaag

SEQ ID NO: 1042457 - DNA, 33 bp, Homo sapien
cttctaaaatcctctcaagtcttcccttgaact

SEQ ID NO: 1042458 - DNA, 33 bp, Homo sapien
cttctaaaatcctctcgagtcttcccttgaact

SEQ ID NO: 1042459 - DNA, 33 bp, Homo sapien
gcctagtttctatacacaaatggcagtctacat

SEQ ID NO: 1042460 - DNA, 33 bp, Homo sapien
gcctagtttctatacataaatggcagtctacat

SEQ ID NO: 1042461 - DNA, 33 bp, Homo sapien
gtctacaagagttgaaaagaaaagggatattga

SEQ ID NO: 1042462 - DNA, 33 bp, Homo sapien
gtctacaagagttgaagagaaaagggatattga

SEQ ID NO: 1042463 - DNA, 33 bp, Homo sapien
tgattaggaaatgtcaaggatacgtctgtaaaa

SEQ ID NO: 1042464 - DNA, 33 bp, Homo sapien
tgattaggaaatgtcatggatacgtctgtaaaa

SEQ ID NO: 1042465 - DNA, 33 bp, Homo sapien
tgtctttccacccctgaaactcatttttctgaa

SEQ ID NO: 1042466 - DNA, 33 bp, Homo sapien
tgtctttccacccctggaactcatttttctgaa

SEQ ID NO: 1042467 - DNA, 33 bp, Homo sapien
caagtataatagctgtcacagagcaggcactca

SEQ ID NO: 1042468 - DNA, 33 bp, Homo sapien
caagtataatagctgttacagagcaggcactca

SEQ ID NO: 1042469 - DNA, 33 bp, Homo sapien
gtgcgtccatgtctacacctgctgattatattg

SEQ ID NO: 1042470 - DNA, 33 bp, Homo sapien
gtgcgtccatgtctacgcctgctgattatattg

SEQ ID NO: 1042471 - DNA, 33 bp, Homo sapien
tattttttgtagcttggatacagtctttgtgtg

SEQ ID NO: 1042472 - DNA, 33 bp, Homo sapien
tattttttgtagcttgtatacagtctttgtgtg

SEQ ID NO: 1042473 - DNA, 33 bp, Homo sapien
tatttcaagtattgaacaagtcagtgatctatt

SEQ ID NO: 1042474 - DNA, 33 bp, Homo sapien
tatttcaagtattgaataagtcagtgatctatt

SEQ ID NO: 1042475 - DNA, 33 bp, Homo sapien
actctccaaacttaaacaagttcacatgacatg

SEQ ID NO: 1042476 - DNA, 33 bp, Homo sapien
actctccaaacttaaagaagttcacatgacatg

SEQ ID NO: 1042477 - DNA, 33 bp, Homo sapien
aattgtttgttagcacagcataacctagcttat

SEQ ID NO: 1042478 - DNA, 33 bp, Homo sapien
aattgtttgttagcacggcataacctagcttat

SEQ ID NO: 1042479 - DNA, 33 bp, Homo sapien
accaacagtgtaaaaacgtttgttcaattgatt

SEQ ID NO: 1042480 - DNA, 33 bp, Homo sapien
accaacagtgtaaaaatgtttgttcaattgatt

SEQ ID NO: 1042481 - DNA, 33 bp, Homo sapien
gtcacacaggcacccaatctccaaggtggttcc

SEQ ID NO: 1042482 - DNA, 33 bp, Homo sapien
gtcacacaggcacccagtctccaaggtggttcc

SEQ ID NO: 1042483 - DNA, 33 bp, Homo sapien
acttacctgacatgtcaaagagtttatcaaagc

SEQ ID NO: 1042484 - DNA, 33 bp, Homo sapien
acttacctgacatgtcgaagagtttatcaaagc

SEQ ID NO: 1042485 - DNA, 33 bp, Homo sapien
ccatgtttgccttcaccaataacagaggatctc

SEQ ID NO: 1042486 - DNA, 33 bp, Homo sapien
ccatgtttgccttcactaataacagaggatctc

SEQ ID NO: 1042487 - DNA, 33 bp, Homo sapien
gtccagaagggggtaaagctgtcatttcatata

SEQ ID NO: 1042488 - DNA, 33 bp, Homo sapien
gtccagaagggggtaaggctgtcatttcatata

SEQ ID NO: 1042489 - DNA, 33 bp, Homo sapien
acttgcaatttctagactccttgtaaatgctcg

SEQ ID NO: 1042490 - DNA, 33 bp, Homo sapien
acttgcaatttctagattccttgtaaatgctcg

SEQ ID NO: 1042491 - DNA, 33 bp, Homo sapien
tgagtgtaaatggtgacagagaatgatggaaag

SEQ ID NO: 1042492 - DNA, 33 bp, Homo sapien
tgagtgtaaatggtgagagagaatgatggaaag

SEQ ID NO: 1042493 - DNA, 33 bp, Homo sapien
ctcattagcagacacaaattgttgagtacctac

SEQ ID NO: 1042494 - DNA, 33 bp, Homo sapien
ctcattagcagacacagattgttgagtacctac

SEQ ID NO: 1042495 - DNA, 33 bp, Homo sapien
ttccttgtccacgttcacccagctagatcaaat

SEQ ID NO: 1042496 - DNA, 33 bp, Homo sapien
ttccttgtccacgttcgcccagctagatcaaat

SEQ ID NO: 1042497 - DNA, 33 bp, Homo sapien
caggttacatatccaccgatgggttaatgcata

SEQ ID NO: 1042498 - DNA, 33 bp, Homo sapien
caggttacatatccactgatgggttaatgcata

SEQ ID NO: 1042499 - DNA, 33 bp, Homo sapien
ccacagccggtgagaacgcagattcacgctcca

SEQ ID NO: 1042500 - DNA, 33 bp, Homo sapien
ccacagccggtgagaatgcagattcacgctcca

SEQ ID NO: 1042501 - DNA, 33 bp, Homo sapien
ctatccagagacttgaatatccaatttcacact

SEQ ID NO: 1042502 - DNA, 33 bp, Homo sapien
ctatccagagacttgattatccaatttcacact

SEQ ID NO: 1042503 - DNA, 33 bp, Homo sapien
cactgagaaatgcatcacacggttcccaaggcc

SEQ ID NO: 1042504 - DNA, 33 bp, Homo sapien
cactgagaaatgcatcgcacggttcccaaggcc

SEQ ID NO: 1042505 - DNA, 33 bp, Homo sapien
tgattagtatgcgaagaagtggccagtccactc

SEQ ID NO: 1042506 - DNA, 33 bp, Homo sapien
tgattagtatgcgaaggagtggccagtccactc

SEQ ID NO: 1042507 - DNA, 33 bp, Homo sapien
gagtaatttgattcaaccatttatatccattta

SEQ ID NO: 1042508 - DNA, 33 bp, Homo sapien
gagtaatttgattcaagcatttatatccattta

SEQ ID NO: 1042509 - DNA, 33 bp, Homo sapien
aatacctattctaacacgtgcaaggtaatagct

SEQ ID NO: 1042510 - DNA, 33 bp, Homo sapien
aatacctattctaacaggtgcaaggtaatagct

SEQ ID NO: 1042511 - DNA, 33 bp, Homo sapien
tgtatgcactctgttagcctctgatgacaccaa

SEQ ID NO: 1042512 - DNA, 33 bp, Homo sapien
tgtatgcactctgttatcctctgatgacaccaa

SEQ ID NO: 1042513 - DNA, 33 bp, Homo sapien
ttctctgaacaataaacctgcaatttgaggaaa

SEQ ID NO: 1042514 - DNA, 33 bp, Homo sapien
ttctctgaacaataaatctgcaatttgaggaaa

SEQ ID NO: 1042515 - DNA, 33 bp, Homo sapien
ctactgcaccgtgctcaccaggttgtctttgat

SEQ ID NO: 1042516 - DNA, 33 bp, Homo sapien
ctactgcaccgtgctcgccaggttgtctttgat

SEQ ID NO: 1042517 - DNA, 33 bp, Homo sapien
acacagtgcacttgcacgtcccacgattcgcga

SEQ ID NO: 1042518 - DNA, 33 bp, Homo sapien
acacagtgcacttgcatgtcccacgattcgcga

SEQ ID NO: 1042519 - DNA, 33 bp, Homo sapien
tagtttgacactcactcaataaacctagctgga

SEQ ID NO: 1042520 - DNA, 33 bp, Homo sapien
tagtttgacactcactgaataaacctagctgga

SEQ ID NO: 1042521 - DNA, 33 bp, Homo sapien
tttgagatagcacatgaatttcaaccaatcttt

SEQ ID NO: 1042522 - DNA, 33 bp, Homo sapien
tttgagatagcacatggatttcaaccaatcttt

SEQ ID NO: 1042523 - DNA, 33 bp, Homo sapien
ggagaaagcctggaaccatacgtcttcatgtgt

SEQ ID NO: 1042524 - DNA, 33 bp, Homo sapien
ggagaaagcctggaactatacgtcttcatgtgt

SEQ ID NO: 1042525 - DNA, 33 bp, Homo sapien
atgctcaataaataccaataatgtgactctcat

SEQ ID NO: 1042526 - DNA, 33 bp, Homo sapien
atgctcaataaataccgataatgtgactctcat

SEQ ID NO: 1042527 - DNA, 33 bp, Homo sapien
tgcttccggctctctcaatttcacttgttccca

SEQ ID NO: 1042528 - DNA, 33 bp, Homo sapien
tgcttccggctctctcgatttcacttgttccca

SEQ ID NO: 1042529 - DNA, 33 bp, Homo sapien
ggagcagaaaccgagaagcgttacaaggaagat

SEQ ID NO: 1042530 - DNA, 33 bp, Homo sapien
ggagcagaaaccgagatgcgttacaaggaagat

SEQ ID NO: 1042531 - DNA, 33 bp, Homo sapien
gtatacaagaggaagcactgagggaaagttagg

SEQ ID NO: 1042532 - DNA, 33 bp, Homo sapien
gtatacaagaggaagcgctgagggaaagttagg

SEQ ID NO: 1042533 - DNA, 33 bp, Homo sapien
aaaggaaaacaaaacaaagcatagaatggaatc

SEQ ID NO: 1042534 - DNA, 33 bp, Homo sapien
aaaggaaaacaaaacagagcatagaatggaatc

SEQ ID NO: 1042535 - DNA, 33 bp, Homo sapien
tgcaatgactaacctagcccaagacaatagaga

SEQ ID NO: 1042536 - DNA, 33 bp, Homo sapien
tgcaatgactaacctatcccaagacaatagaga

SEQ ID NO: 1042537 - DNA, 33 bp, Homo sapien
atgccttcagctggtggataaaggaatggcaat

SEQ ID NO: 1042538 - DNA, 33 bp, Homo sapien
atgccttcagctggtgtataaaggaatggcaat

SEQ ID NO: 1042539 - DNA, 33 bp, Homo sapien
gagagtgagaaagtagaataaggcgtgggagaa

SEQ ID NO: 1042540 - DNA, 33 bp, Homo sapien
gagagtgagaaagtaggataaggcgtgggagaa

SEQ ID NO: 1042541 - DNA, 33 bp, Homo sapien
tttttttggtggcatcaaagccctaaaagtgag

SEQ ID NO: 1042542 - DNA, 33 bp, Homo sapien
tttttttggtggcatcgaagccctaaaagtgag

SEQ ID NO: 1042543 - DNA, 33 bp, Homo sapien
aaccaggtttaaggtaacaatgaacaggcataa

SEQ ID NO: 1042544 - DNA, 33 bp, Homo sapien
aaccaggtttaaggtagcaatgaacaggcataa

SEQ ID NO: 1042545 - DNA, 33 bp, Homo sapien
tgaatccatttctaacagtctattatgtttcat

SEQ ID NO: 1042546 - DNA, 33 bp, Homo sapien
tgaatccatttctaacggtctattatgtttcat

SEQ ID NO: 1042547 - DNA, 33 bp, Homo sapien
gtacaggtgagtatgccagacatctatgcgggt

SEQ ID NO: 1042548 - DNA, 33 bp, Homo sapien
gtacaggtgagtatgctagacatctatgcgggt

SEQ ID NO: 1042549 - DNA, 33 bp, Homo sapien
gacaatcactggtctacggggaaagatagatat

SEQ ID NO: 1042550 - DNA, 33 bp, Homo sapien
gacaatcactggtctatggggaaagatagatat

SEQ ID NO: 1042551 - DNA, 33 bp, Homo sapien
gaaagaatgttgcgaccgtaggaacagaaatgc

SEQ ID NO: 1042552 - DNA, 33 bp, Homo sapien
gaaagaatgttgcgactgtaggaacagaaatgc

SEQ ID NO: 1042553 - DNA, 33 bp, Homo sapien
ctctactgtaaaactgaaaccacctgctctctc

SEQ ID NO: 1042554 - DNA, 33 bp, Homo sapien
ctctactgtaaaactgcaaccacctgctctctc

SEQ ID NO: 1042555 - DNA, 33 bp, Homo sapien
tggagccccaggtgtagctcaaaggtaagtgga

SEQ ID NO: 1042556 - DNA, 33 bp, Homo sapien
tggagccccaggtgtatctcaaaggtaagtgga

SEQ ID NO: 1042557 - DNA, 33 bp, Homo sapien
attttcctgaacactacggaaggagggccgatt

SEQ ID NO: 1042558 - DNA, 33 bp, Homo sapien
attttcctgaacactatggaaggagggccgatt

SEQ ID NO: 1042559 - DNA, 33 bp, Homo sapien
ggctatggatacagagaaaaaaggctgccctgg

SEQ ID NO: 1042560 - DNA, 33 bp, Homo sapien
ggctatggatacagaggaaaaaggctgccctgg

SEQ ID NO: 1042561 - DNA, 33 bp, Homo sapien
atgctgaattttaacccgagttccaggtcctct

SEQ ID NO: 1042562 - DNA, 33 bp, Homo sapien
atgctgaattttaacctgagttccaggtcctct

SEQ ID NO: 1042563 - DNA, 33 bp, Homo sapien
gcctgtcaatctaacccattgaaatggaaggtt

SEQ ID NO: 1042564 - DNA, 33 bp, Homo sapien
gcctgtcaatctaacctattgaaatggaaggtt

SEQ ID NO: 1042565 - DNA, 33 bp, Homo sapien
ttgaagactgggaaacaaaggctttgagagata

SEQ ID NO: 1042566 - DNA, 33 bp, Homo sapien
ttgaagactgggaaacgaaggctttgagagata

SEQ ID NO: 1042567 - DNA, 33 bp, Homo sapien
gtgcacgagtgacctaatacagacggagagacc

SEQ ID NO: 1042568 - DNA, 33 bp, Homo sapien
gtgcacgagtgacctactacagacggagagacc

SEQ ID NO: 1042569 - DNA, 33 bp, Homo sapien
gttagaaagtcagtgaaaccagagtagtaagca

SEQ ID NO: 1042570 - DNA, 33 bp, Homo sapien
gttagaaagtcagtgagaccagagtagtaagca

SEQ ID NO: 1042571 - DNA, 33 bp, Homo sapien
aggacttgttcaaaaacgtattcctggcctgct

SEQ ID NO: 1042572 - DNA, 33 bp, Homo sapien
aggacttgttcaaaaatgtattcctggcctgct

SEQ ID NO: 1042573 - DNA, 33 bp, Homo sapien
ttattgaatatttagaagttcccagcaccatga

SEQ ID NO: 1042574 - DNA, 33 bp, Homo sapien
ttattgaatatttagaggttcccagcaccatga

SEQ ID NO: 1042575 - DNA, 33 bp, Homo sapien
gcccttttattaaaaccgtggagtcatcaactc

SEQ ID NO: 1042576 - DNA, 33 bp, Homo sapien
gcccttttattaaaactgtggagtcatcaactc

SEQ ID NO: 1042577 - DNA, 33 bp, Homo sapien
tttgcatagaagtaagacatctgagacatctgc

SEQ ID NO: 1042578 - DNA, 33 bp, Homo sapien
tttgcatagaagtaaggcatctgagacatctgc

SEQ ID NO: 1042579 - DNA, 33 bp, Homo sapien
caggttttctccctaccgggcttctctgtccct

SEQ ID NO: 1042580 - DNA, 33 bp, Homo sapien
caggttttctccctactgggcttctctgtccct

SEQ ID NO: 1042581 - DNA, 33 bp, Homo sapien
caggatgtgttctgccaagtggcaccttaaacg

SEQ ID NO: 1042582 - DNA, 33 bp, Homo sapien
caggatgtgttctgcccagtggcaccttaaacg

SEQ ID NO: 1042583 - DNA, 33 bp, Homo sapien
ctctatttagcattaaacctttcctttttccaa

SEQ ID NO: 1042584 - DNA, 33 bp, Homo sapien
ctctatttagcattaagcctttcctttttccaa

SEQ ID NO: 1042585 - DNA, 33 bp, Homo sapien
ggatagtggaaaactacgagaggtgaaaggtag

SEQ ID NO: 1042586 - DNA, 33 bp, Homo sapien
ggatagtggaaaactatgagaggtgaaaggtag

SEQ ID NO: 1042587 - DNA, 33 bp, Homo sapien
gtagtaggccacactacctaagtttgtgtaagt

SEQ ID NO: 1042588 - DNA, 33 bp, Homo sapien
gtagtaggccacactatctaagtttgtgtaagt

SEQ ID NO: 1042589 - DNA, 33 bp, Homo sapien
aaaacattttgttctgaataaaaagaagactac

SEQ ID NO: 1042590 - DNA, 33 bp, Homo sapien
aaaacattttgttctggataaaaagaagactac

SEQ ID NO: 1042591 - DNA, 33 bp, Homo sapien
aacagaatataataaaccacttaataccaacaa

SEQ ID NO: 1042592 - DNA, 33 bp, Homo sapien
aacagaatataataaagcacttaataccaacaa

SEQ ID NO: 1042593 - DNA, 33 bp, Homo sapien
tcagagaatataaaacaaaactgaattcatggg

SEQ ID NO: 1042594 - DNA, 33 bp, Homo sapien
tcagagaatataaaaccaaactgaattcatggg

SEQ ID NO: 1042595 - DNA, 33 bp, Homo sapien
atgaaaatataaaatcaattgtggtgatggttt

SEQ ID NO: 1042596 - DNA, 33 bp, Homo sapien
atgaaaatataaaatcgattgtggtgatggttt

SEQ ID NO: 1042597 - DNA, 33 bp, Homo sapien
ccatgaaatcctatcacatccttttttacccat

SEQ ID NO: 1042598 - DNA, 33 bp, Homo sapien
ccatgaaatcctatcatatccttttttacccat

SEQ ID NO: 1042599 - DNA, 33 bp, Homo sapien
ttcaaataaacaagtactaactgaacaccaatg

SEQ ID NO: 1042600 - DNA, 33 bp, Homo sapien
ttcaaataaacaagtattaactgaacaccaatg

SEQ ID NO: 1042601 - DNA, 33 bp, Homo sapien
gacaaatacataaataactaaaccacaaggcac

SEQ ID NO: 1042602 - DNA, 33 bp, Homo sapien
gacaaatacataaatagctaaaccacaaggcac

SEQ ID NO: 1042603 - DNA, 33 bp, Homo sapien
ttcattttggactttacgtgttctacacccttg

SEQ ID NO: 1042604 - DNA, 33 bp, Homo sapien
ttcattttggactttatgtgttctacacccttg

SEQ ID NO: 1042605 - DNA, 33 bp, Homo sapien
cttttgttcaaaaggacgctgttagaaatgtgc

SEQ ID NO: 1042606 - DNA, 33 bp, Homo sapien
cttttgttcaaaaggatgctgttagaaatgtgc

SEQ ID NO: 1042607 - DNA, 33 bp, Homo sapien
ctatgtgctgtagcccacgtttctgtgcccact

SEQ ID NO: 1042608 - DNA, 33 bp, Homo sapien
ctatgtgctgtagcccgcgtttctgtgcccact

SEQ ID NO: 1042609 - DNA, 33 bp, Homo sapien
tatttaatctccataacctttctatgatgtagg

SEQ ID NO: 1042610 - DNA, 33 bp, Homo sapien
tatttaatctccataatctttctatgatgtagg

SEQ ID NO: 1042611 - DNA, 33 bp, Homo sapien
gtcctttgactacaaacgttgatccaaggcaca

SEQ ID NO: 1042612 - DNA, 33 bp, Homo sapien
gtcctttgactacaaatgttgatccaaggcaca

SEQ ID NO: 1042613 - DNA, 33 bp, Homo sapien
gtaaacttcaagtacaatatacatacacatgtg

SEQ ID NO: 1042614 - DNA, 33 bp, Homo sapien
gtaaacttcaagtacagtatacatacacatgtg

SEQ ID NO: 1042615 - DNA, 33 bp, Homo sapien
gaaccaatgcaaagcaagatggagagattccag

SEQ ID NO: 1042616 - DNA, 33 bp, Homo sapien
gaaccaatgcaaagcaggatggagagattccag

SEQ ID NO: 1042617 - DNA, 33 bp, Homo sapien
tccagtgacagcatcaagttttggggaacacgg

SEQ ID NO: 1042618 - DNA, 33 bp, Homo sapien
tccagtgacagcatcaggttttggggaacacgg

SEQ ID NO: 1042619 - DNA, 33 bp, Homo sapien
gttttattcattgaggcaaattaaacacagcat

SEQ ID NO: 1042620 - DNA, 33 bp, Homo sapien
gttttattcattgaggtaaattaaacacagcat

SEQ ID NO: 1042621 - DNA, 33 bp, Homo sapien
gcataagaaggatagaaaggtataacagagagt

SEQ ID NO: 1042622 - DNA, 33 bp, Homo sapien
gcataagaaggatagataggtataacagagagt

SEQ ID NO: 1042623 - DNA, 33 bp, Homo sapien
gtcagatgcacaaggacgattggaaagaaaaga

SEQ ID NO: 1042624 - DNA, 33 bp, Homo sapien
gtcagatgcacaaggatgattggaaagaaaaga

SEQ ID NO: 1042625 - DNA, 33 bp, Homo sapien
gaaatgatgtccaagacgggatatgaagggtta

SEQ ID NO: 1042626 - DNA, 33 bp, Homo sapien
gaaatgatgtccaagatgggatatgaagggtta

SEQ ID NO: 1042627 - DNA, 33 bp, Homo sapien
tctatgacaaggtgaccagaggtggttgaaata

SEQ ID NO: 1042628 - DNA, 33 bp, Homo sapien
tctatgacaaggtgacgagaggtggttgaaata

SEQ ID NO: 1042629 - DNA, 33 bp, Homo sapien
acaatatcagattgaaccccactacctacaatg

SEQ ID NO: 1042630 - DNA, 33 bp, Homo sapien
acaatatcagattgaatcccactacctacaatg

SEQ ID NO: 1042631 - DNA, 33 bp, Homo sapien
atttatatgtcacattcaagaaattgagtagat

SEQ ID NO: 1042632 - DNA, 33 bp, Homo sapien
atttatatgtcacatttaagaaattgagtagat

SEQ ID NO: 1042633 - DNA, 33 bp, Homo sapien
aaaatttttggccagaacttgaaggatgggtga

SEQ ID NO: 1042634 - DNA, 33 bp, Homo sapien
aaaatttttggccagatcttgaaggatgggtga

SEQ ID NO: 1042635 - DNA, 33 bp, Homo sapien
tagtttgtcatattgacggaactcttaaagtgt

SEQ ID NO: 1042636 - DNA, 33 bp, Homo sapien
tagtttgtcatattgatggaactcttaaagtgt

SEQ ID NO: 1042637 - DNA, 33 bp, Homo sapien
ataacattatctgttgaaagctttttatagtgc

SEQ ID NO: 1042638 - DNA, 33 bp, Homo sapien
ataacattatctgttgtaagctttttatagtgc

SEQ ID NO: 1042639 - DNA, 33 bp, Homo sapien
ttacctgacacctctgaaacacattgtttacct

SEQ ID NO: 1042640 - DNA, 33 bp, Homo sapien
ttacctgacacctctggaacacattgtttacct

SEQ ID NO: 1042641 - DNA, 33 bp, Homo sapien
ggtgattatttatagagagcctcatgcacggtc

SEQ ID NO: 1042642 - DNA, 33 bp, Homo sapien
ggtgattatttatagatagcctcatgcacggtc

SEQ ID NO: 1042643 - DNA, 33 bp, Homo sapien
ctaatactagctaatcaccccacttctccactt

SEQ ID NO: 1042644 - DNA, 33 bp, Homo sapien
ctaatactagctaatcgccccacttctccactt

SEQ ID NO: 1042645 - DNA, 33 bp, Homo sapien
tctctgacatatttccaactaaggaactacaca

SEQ ID NO: 1042646 - DNA, 33 bp, Homo sapien
tctctgacatatttccgactaaggaactacaca

SEQ ID NO: 1042647 - DNA, 33 bp, Homo sapien
aatcttactgagtttacgtcccaaatgtggaca

SEQ ID NO: 1042648 - DNA, 33 bp, Homo sapien
aatcttactgagtttatgtcccaaatgtggaca

SEQ ID NO: 1042649 - DNA, 33 bp, Homo sapien
atgagctagggaagaactgaagacaaatgtgac

SEQ ID NO: 1042650 - DNA, 33 bp, Homo sapien
atgagctagggaagaattgaagacaaatgtgac

SEQ ID NO: 1042651 - DNA, 33 bp, Homo sapien
cacagaaatatgtgaaccagacaatgtgttgtg

SEQ ID NO: 1042652 - DNA, 33 bp, Homo sapien
cacagaaatatgtgaagcagacaatgtgttgtg

SEQ ID NO: 1042653 - DNA, 33 bp, Homo sapien
caatctttgcccctgaaatcagttaatctgact

SEQ ID NO: 1042654 - DNA, 33 bp, Homo sapien
caatctttgcccctgagatcagttaatctgact

SEQ ID NO: 1042655 - DNA, 33 bp, Homo sapien
tgtgacaattccagagactcctgatgtttattt

SEQ ID NO: 1042656 - DNA, 33 bp, Homo sapien
tgtgacaattccagaggctcctgatgtttattt

SEQ ID NO: 1042657 - DNA, 33 bp, Homo sapien
tcatgacttaagataaacaacattgaatctcaa

SEQ ID NO: 1042658 - DNA, 33 bp, Homo sapien
tcatgacttaagataagcaacattgaatctcaa

SEQ ID NO: 1042659 - DNA, 33 bp, Homo sapien
gtggtgagaaattaaacccattagggagttggg

SEQ ID NO: 1042660 - DNA, 33 bp, Homo sapien
gtggtgagaaattaaatccattagggagttggg

SEQ ID NO: 1042661 - DNA, 33 bp, Homo sapien
acatttctgaacaagaagccaggagacaataga

SEQ ID NO: 1042662 - DNA, 33 bp, Homo sapien
acatttctgaacaagaggccaggagacaataga

SEQ ID NO: 1042663 - DNA, 33 bp, Homo sapien
acaacagggtaataggcatgccatgaacatcag

SEQ ID NO: 1042664 - DNA, 33 bp, Homo sapien
acaacagggtaataggtatgccatgaacatcag

SEQ ID NO: 1042665 - DNA, 33 bp, Homo sapien
tctaagagactcctagcatcagatcataccaac

SEQ ID NO: 1042666 - DNA, 33 bp, Homo sapien
tctaagagactcctagtatcagatcataccaac

SEQ ID NO: 1042667 - DNA, 33 bp, Homo sapien
gaaaaatacccacagcaaatatgacaaaggatt

SEQ ID NO: 1042668 - DNA, 33 bp, Homo sapien
gaaaaatacccacagccaatatgacaaaggatt

SEQ ID NO: 1042669 - DNA, 33 bp, Homo sapien
gaggtaaatctaacctgagagccattcatgtgg

SEQ ID NO: 1042670 - DNA, 33 bp, Homo sapien
gaggtaaatctaaccttagagccattcatgtgg

SEQ ID NO: 1042671 - DNA, 33 bp, Homo sapien
taaacccctgtcactccgacgccctgtgtctca

SEQ ID NO: 1042672 - DNA, 33 bp, Homo sapien
taaacccctgtcactctgacgccctgtgtctca

SEQ ID NO: 1042673 - DNA, 33 bp, Homo sapien
catcaactcagaataccatgactttcctggggt

SEQ ID NO: 1042674 - DNA, 33 bp, Homo sapien
catcaactcagaatactatgactttcctggggt

SEQ ID NO: 1042675 - DNA, 33 bp, Homo sapien
actttccaaatggccaatcatctttgctaagag

SEQ ID NO: 1042676 - DNA, 33 bp, Homo sapien
actttccaaatggccagtcatctttgctaagag

SEQ ID NO: 1042677 - DNA, 33 bp, Homo sapien
ccatatacatgcattgcagataggttggtagac

SEQ ID NO: 1042678 - DNA, 33 bp, Homo sapien
ccatatacatgcattggagataggttggtagac

SEQ ID NO: 1042679 - DNA, 33 bp, Homo sapien
cctctccataatcagcaaagtctatattttttc

SEQ ID NO: 1042680 - DNA, 33 bp, Homo sapien
cctctccataatcagcgaagtctatattttttc

SEQ ID NO: 1042681 - DNA, 33 bp, Homo sapien
gaaactatgaactcaccaagttaggactatttt

SEQ ID NO: 1042682 - DNA, 33 bp, Homo sapien
gaaactatgaactcactaagttaggactatttt

SEQ ID NO: 1042683 - DNA, 33 bp, Homo sapien
tcagagctattaatgaacagagccagaattcaa

SEQ ID NO: 1042684 - DNA, 33 bp, Homo sapien
tcagagctattaatgagcagagccagaattcaa

SEQ ID NO: 1042685 - DNA, 33 bp, Homo sapien
ctgggtgtcctgccaacggagtgaatttaggaa

SEQ ID NO: 1042686 - DNA, 33 bp, Homo sapien
ctgggtgtcctgccaatggagtgaatttaggaa

SEQ ID NO: 1042687 - DNA, 33 bp, Homo sapien
tgagctggggcctgcacgatgtgtgggttcttt

SEQ ID NO: 1042688 - DNA, 33 bp, Homo sapien
tgagctggggcctgcatgatgtgtgggttcttt

SEQ ID NO: 1042689 - DNA, 33 bp, Homo sapien
tgtgttattgaaaaaaatgctgaactgggaagc

SEQ ID NO: 1042690 - DNA, 33 bp, Homo sapien
tgtgttattgaaaaaactgctgaactgggaagc

SEQ ID NO: 1042691 - DNA, 33 bp, Homo sapien
aagcatattcaggctcgcaatttctgcatattt

SEQ ID NO: 1042692 - DNA, 33 bp, Homo sapien
aagcatattcaggctctcaatttctgcatattt

SEQ ID NO: 1042693 - DNA, 33 bp, Homo sapien
atgtagtacctctccaagtacatttgcatttaa

SEQ ID NO: 1042694 - DNA, 33 bp, Homo sapien
atgtagtacctctccacgtacatttgcatttaa

SEQ ID NO: 1042695 - DNA, 33 bp, Homo sapien
cattttgtgaatctcccccatatcaactgacct

SEQ ID NO: 1042696 - DNA, 33 bp, Homo sapien
cattttgtgaatctcctccatatcaactgacct

SEQ ID NO: 1042697 - DNA, 33 bp, Homo sapien
tgcatttcttttctcaaagcacagaaaagaaaa

SEQ ID NO: 1042698 - DNA, 33 bp, Homo sapien
tgcatttcttttctcatagcacagaaaagaaaa

SEQ ID NO: 1042699 - DNA, 33 bp, Homo sapien
ctatcagaaactgggaacaaaagatgccattgg

SEQ ID NO: 1042700 - DNA, 33 bp, Homo sapien
ctatcagaaactgggagcaaaagatgccattgg

SEQ ID NO: 1042701 - DNA, 33 bp, Homo sapien
tctaacctaattcttaacattcttccaaagctc

SEQ ID NO: 1042702 - DNA, 33 bp, Homo sapien
tctaacctaattcttagcattcttccaaagctc

SEQ ID NO: 1042703 - DNA, 33 bp, Homo sapien
acaggtatgaacaacaagggactcagagcccaa

SEQ ID NO: 1042704 - DNA, 33 bp, Homo sapien
acaggtatgaacaacaggggactcagagcccaa

SEQ ID NO: 1042705 - DNA, 33 bp, Homo sapien
gtaaatcactggtgccagaagattttttagagt

SEQ ID NO: 1042706 - DNA, 33 bp, Homo sapien
gtaaatcactggtgccggaagattttttagagt

SEQ ID NO: 1042707 - DNA, 33 bp, Homo sapien
cccttcaaacccacacgcagaaactaaatcaga

SEQ ID NO: 1042708 - DNA, 33 bp, Homo sapien
cccttcaaacccacactcagaaactaaatcaga

SEQ ID NO: 1042709 - DNA, 33 bp, Homo sapien
aggccatacgtggtaaataaactagaaactggg

SEQ ID NO: 1042710 - DNA, 33 bp, Homo sapien
aggccatacgtggtaagtaaactagaaactggg

SEQ ID NO: 1042711 - DNA, 33 bp, Homo sapien
ggggcattagaggacaacttatccagctcttca

SEQ ID NO: 1042712 - DNA, 33 bp, Homo sapien
ggggcattagaggacatcttatccagctcttca

SEQ ID NO: 1042713 - DNA, 33 bp, Homo sapien
cttacttggagtactcaaagcattctcctctcc

SEQ ID NO: 1042714 - DNA, 33 bp, Homo sapien
cttacttggagtactcgaagcattctcctctcc

SEQ ID NO: 1042715 - DNA, 33 bp, Homo sapien
catatattttcatatgccaacttagaacatttg

SEQ ID NO: 1042716 - DNA, 33 bp, Homo sapien
catatattttcatatggcaacttagaacatttg

SEQ ID NO: 1042717 - DNA, 33 bp, Homo sapien
aacttctctacactcgcatttctttgaaacact

SEQ ID NO: 1042718 - DNA, 33 bp, Homo sapien
aacttctctacactcggatttctttgaaacact

SEQ ID NO: 1042719 - DNA, 33 bp, Homo sapien
tcttgcccatgcctctgaaacttctaaatctgc

SEQ ID NO: 1042720 - DNA, 33 bp, Homo sapien
tcttgcccatgcctcttaaacttctaaatctgc

SEQ ID NO: 1042721 - DNA, 33 bp, Homo sapien
agagatgtataaagcacatgaggtcccttttct

SEQ ID NO: 1042722 - DNA, 33 bp, Homo sapien
agagatgtataaagcagatgaggtcccttttct

SEQ ID NO: 1042723 - DNA, 33 bp, Homo sapien
ttagccaagtactcaacagtcagatgtagccag

SEQ ID NO: 1042724 - DNA, 33 bp, Homo sapien
ttagccaagtactcaatagtcagatgtagccag

SEQ ID NO: 1042725 - DNA, 33 bp, Homo sapien
ccagagtagggcagaacgggactagttacttta

SEQ ID NO: 1042726 - DNA, 33 bp, Homo sapien
ccagagtagggcagaatgggactagttacttta

SEQ ID NO: 1042727 - DNA, 33 bp, Homo sapien
ttaaggacatgtcaccaaaagggcaaattcact

SEQ ID NO: 1042728 - DNA, 33 bp, Homo sapien
ttaaggacatgtcaccgaaagggcaaattcact

SEQ ID NO: 1042729 - DNA, 33 bp, Homo sapien
gctgcccagtgtctataagattgccaagataac

SEQ ID NO: 1042730 - DNA, 33 bp, Homo sapien
gctgcccagtgtctatgagattgccaagataac

SEQ ID NO: 1042731 - DNA, 33 bp, Homo sapien
cctggaaaagtgatggaattacagtttcacctg

SEQ ID NO: 1042732 - DNA, 33 bp, Homo sapien
cctggaaaagtgatgggattacagtttcacctg

SEQ ID NO: 1042733 - DNA, 33 bp, Homo sapien
taccctgaatatgcaccaaaatttcctggcagg

SEQ ID NO: 1042734 - DNA, 33 bp, Homo sapien
taccctgaatatgcacgaaaatttcctggcagg

SEQ ID NO: 1042735 - DNA, 33 bp, Homo sapien
atacttgttggacttaactctactcaagttcca

SEQ ID NO: 1042736 - DNA, 33 bp, Homo sapien
atacttgttggacttatctctactcaagttcca

SEQ ID NO: 1042737 - DNA, 33 bp, Homo sapien
aagtagatggtacagcacttgggagagttcttt

SEQ ID NO: 1042738 - DNA, 33 bp, Homo sapien
aagtagatggtacagcgcttgggagagttcttt

SEQ ID NO: 1042739 - DNA, 33 bp, Homo sapien
tccttatttgctagcactaacataatcttggcc

SEQ ID NO: 1042740 - DNA, 33 bp, Homo sapien
tccttatttgctagcattaacataatcttggcc

SEQ ID NO: 1042741 - DNA, 33 bp, Homo sapien
aaaaaaatgagataataataggccttcagagga

SEQ ID NO: 1042742 - DNA, 33 bp, Homo sapien
aaaaaaatgagataatgataggccttcagagga

SEQ ID NO: 1042743 - DNA, 33 bp, Homo sapien
ccaagatttagttgtcaccagagttgtttcctt

SEQ ID NO: 1042744 - DNA, 33 bp, Homo sapien
ccaagatttagttgtcgccagagttgtttcctt

SEQ ID NO: 1042745 - DNA, 33 bp, Homo sapien
taatgtcttatcaccacgctttgtgatttctgt

SEQ ID NO: 1042746 - DNA, 33 bp, Homo sapien
taatgtcttatcaccatgctttgtgatttctgt

SEQ ID NO: 1042747 - DNA, 33 bp, Homo sapien
gagtccccagtttccactatactattgtgtatg

SEQ ID NO: 1042748 - DNA, 33 bp, Homo sapien
gagtccccagtttccattatactattgtgtatg

SEQ ID NO: 1042749 - DNA, 33 bp, Homo sapien
gaattaatgtatgtggaaaatagaaacagaaac

SEQ ID NO: 1042750 - DNA, 33 bp, Homo sapien
gaattaatgtatgtgggaaatagaaacagaaac

SEQ ID NO: 1042751 - DNA, 33 bp, Homo sapien
gaaaacaacatgaaaacacagttaggattaaga

SEQ ID NO: 1042752 - DNA, 33 bp, Homo sapien
gaaaacaacatgaaaatacagttaggattaaga

SEQ ID NO: 1042753 - DNA, 33 bp, Homo sapien
ggtaaagattcactcacggcagaggagaaataa

SEQ ID NO: 1042754 - DNA, 33 bp, Homo sapien
ggtaaagattcactcatggcagaggagaaataa

SEQ ID NO: 1042755 - DNA, 33 bp, Homo sapien
gaagtgtagattggggacagttaaatgataact

SEQ ID NO: 1042756 - DNA, 33 bp, Homo sapien
gaagtgtagattgggggcagttaaatgataact

SEQ ID NO: 1042757 - DNA, 33 bp, Homo sapien
ctgtttcttgatttcaaaggtttctcgctaatg

SEQ ID NO: 1042758 - DNA, 33 bp, Homo sapien
ctgtttcttgatttcacaggtttctcgctaatg

SEQ ID NO: 1042759 - DNA, 33 bp, Homo sapien
gtttacatctggctcccaggttaggaaacacat

SEQ ID NO: 1042760 - DNA, 33 bp, Homo sapien
gtttacatctggctcctaggttaggaaacacat

SEQ ID NO: 1042761 - DNA, 33 bp, Homo sapien
ttgatacttccatctacagagctttttgattcc

SEQ ID NO: 1042762 - DNA, 33 bp, Homo sapien
ttgatacttccatctatagagctttttgattcc

SEQ ID NO: 1042763 - DNA, 33 bp, Homo sapien
tacagagataagaaacagagtaactgggctgga

SEQ ID NO: 1042764 - DNA, 33 bp, Homo sapien
tacagagataagaaaccgagtaactgggctgga

SEQ ID NO: 1042765 - DNA, 33 bp, Homo sapien
gatgtgaagccttggacaagtcaccagacaggg

SEQ ID NO: 1042766 - DNA, 33 bp, Homo sapien
gatgtgaagccttggagaagtcaccagacaggg

SEQ ID NO: 1042767 - DNA, 33 bp, Homo sapien
caagtcaaagtcctacaaaatgaccagcacatt

SEQ ID NO: 1042768 - DNA, 33 bp, Homo sapien
caagtcaaagtcctacgaaatgaccagcacatt

SEQ ID NO: 1042769 - DNA, 33 bp, Homo sapien
gattgctggtacagagaaattgtaaagccccac

SEQ ID NO: 1042770 - DNA, 33 bp, Homo sapien
gattgctggtacagaggaattgtaaagccccac

SEQ ID NO: 1042771 - DNA, 33 bp, Homo sapien
ctttccattttaattcaaagctaaaagtcaatt

SEQ ID NO: 1042772 - DNA, 33 bp, Homo sapien
ctttccattttaattcgaagctaaaagtcaatt

SEQ ID NO: 1042773 - DNA, 33 bp, Homo sapien
gcattcaaattaaaaaagtcccgtagatactct

SEQ ID NO: 1042774 - DNA, 33 bp, Homo sapien
gcattcaaattaaaaaggtcccgtagatactct

SEQ ID NO: 1042775 - DNA, 33 bp, Homo sapien
agcacaagtaactactaaaaagattgcaaaatg

SEQ ID NO: 1042776 - DNA, 33 bp, Homo sapien
agcacaagtaactactgaaaagattgcaaaatg

SEQ ID NO: 1042777 - DNA, 33 bp, Homo sapien
gcagattgaggtttaaagttgggggctcatcag

SEQ ID NO: 1042778 - DNA, 33 bp, Homo sapien
gcagattgaggtttaaggttgggggctcatcag

SEQ ID NO: 1042779 - DNA, 33 bp, Homo sapien
gtgggcagtgtcaaggaatatatttgtgttctg

SEQ ID NO: 1042780 - DNA, 33 bp, Homo sapien
gtgggcagtgtcaagggatatatttgtgttctg

SEQ ID NO: 1042781 - DNA, 33 bp, Homo sapien
taacctctctgaatcccaagttgctggactgaa

SEQ ID NO: 1042782 - DNA, 33 bp, Homo sapien
taacctctctgaatccgaagttgctggactgaa

SEQ ID NO: 1042783 - DNA, 33 bp, Homo sapien
agcttaatacagatgaacaaatttgggagcctg

SEQ ID NO: 1042784 - DNA, 33 bp, Homo sapien
agcttaatacagatgagcaaatttgggagcctg

SEQ ID NO: 1042785 - DNA, 33 bp, Homo sapien
acctctactctatcataaagttatttgccctat

SEQ ID NO: 1042786 - DNA, 33 bp, Homo sapien
acctctactctatcatcaagttatttgccctat

SEQ ID NO: 1042787 - DNA, 33 bp, Homo sapien
agtcctgcctgagcgacagataatgcaaagagc

SEQ ID NO: 1042788 - DNA, 33 bp, Homo sapien
agtcctgcctgagcgagagataatgcaaagagc

SEQ ID NO: 1042789 - DNA, 33 bp, Homo sapien
ttatgccagtaccatcaatctattttctcaaga

SEQ ID NO: 1042790 - DNA, 33 bp, Homo sapien
ttatgccagtaccatcgatctattttctcaaga

SEQ ID NO: 1042791 - DNA, 33 bp, Homo sapien
aaaaatgcttagagaaatgattactcctagtca

SEQ ID NO: 1042792 - DNA, 33 bp, Homo sapien
aaaaatgcttagagaagtgattactcctagtca

SEQ ID NO: 1042793 - DNA, 33 bp, Homo sapien
ttggatattgggcttaaggtttgaagagactga

SEQ ID NO: 1042794 - DNA, 33 bp, Homo sapien
ttggatattgggcttatggtttgaagagactga

SEQ ID NO: 1042795 - DNA, 33 bp, Homo sapien
gctgaaaatgaaaggacagaaaaagatgttcca

SEQ ID NO: 1042796 - DNA, 33 bp, Homo sapien
gctgaaaatgaaaggatagaaaaagatgttcca

SEQ ID NO: 1042797 - DNA, 33 bp, Homo sapien
aacaagaaagctgtgaaagtttttgactcaaag

SEQ ID NO: 1042798 - DNA, 33 bp, Homo sapien
aacaagaaagctgtgacagtttttgactcaaag

SEQ ID NO: 1042799 - DNA, 33 bp, Homo sapien
tgaatcttgaaaacagaaataatctctgccatc

SEQ ID NO: 1042800 - DNA, 33 bp, Homo sapien
tgaatcttgaaaacagtaataatctctgccatc

SEQ ID NO: 1042801 - DNA, 33 bp, Homo sapien
cagttaattccagatggatgttgttaccagtgt

SEQ ID NO: 1042802 - DNA, 33 bp, Homo sapien
cagttaattccagatgtatgttgttaccagtgt

SEQ ID NO: 1042803 - DNA, 33 bp, Homo sapien
tgcccaaggttactgaagacgcaacacccctag

SEQ ID NO: 1042804 - DNA, 33 bp, Homo sapien
tgcccaaggttactgaggacgcaacacccctag

SEQ ID NO: 1042805 - DNA, 33 bp, Homo sapien
attctttataaatcaactggagttggtccatga

SEQ ID NO: 1042806 - DNA, 33 bp, Homo sapien
attctttataaatcaattggagttggtccatga

SEQ ID NO: 1042807 - DNA, 33 bp, Homo sapien
gtttagatcataaacaatcatgcagaattttgc

SEQ ID NO: 1042808 - DNA, 33 bp, Homo sapien
gtttagatcataaacagtcatgcagaattttgc

SEQ ID NO: 1042809 - DNA, 33 bp, Homo sapien
aaaaaaggaatccatacaggggatgtaaccacc

SEQ ID NO: 1042810 - DNA, 33 bp, Homo sapien
aaaaaaggaatccatataggggatgtaaccacc

SEQ ID NO: 1042811 - DNA, 33 bp, Homo sapien
tgtatcatttatcagcccaatatgttttagaca

SEQ ID NO: 1042812 - DNA, 33 bp, Homo sapien
tgtatcatttatcagctcaatatgttttagaca

SEQ ID NO: 1042813 - DNA, 33 bp, Homo sapien
accaagacttgagataataccactccagagaga

SEQ ID NO: 1042814 - DNA, 33 bp, Homo sapien
accaagacttgagatattaccactccagagaga

SEQ ID NO: 1042815 - DNA, 33 bp, Homo sapien
gtagaaaaaagagtacaacaaaatgaggcactg

SEQ ID NO: 1042816 - DNA, 33 bp, Homo sapien
gtagaaaaaagagtacgacaaaatgaggcactg

SEQ ID NO: 1042817 - DNA, 33 bp, Homo sapien
tggaaggatcaaaggagagtagagagatgtgaa

SEQ ID NO: 1042818 - DNA, 33 bp, Homo sapien
tggaaggatcaaaggatagtagagagatgtgaa

SEQ ID NO: 1042819 - DNA, 33 bp, Homo sapien
aagatgttgagctatacgggctctgatgccctt

SEQ ID NO: 1042820 - DNA, 33 bp, Homo sapien
aagatgttgagctatatgggctctgatgccctt

SEQ ID NO: 1042821 - DNA, 33 bp, Homo sapien
ataggtagacgaggaagaggacagaagtatact

SEQ ID NO: 1042822 - DNA, 33 bp, Homo sapien
ataggtagacgaggaataggacagaagtatact

SEQ ID NO: 1042823 - DNA, 33 bp, Homo sapien
atgggaaggattatcacgtgtcaggcaaggcgc

SEQ ID NO: 1042824 - DNA, 33 bp, Homo sapien
atgggaaggattatcatgtgtcaggcaaggcgc

SEQ ID NO: 1042825 - DNA, 33 bp, Homo sapien
attactgtaagccactaagcatagcccttccct

SEQ ID NO: 1042826 - DNA, 33 bp, Homo sapien
attactgtaagccactgagcatagcccttccct

SEQ ID NO: 1042827 - DNA, 33 bp, Homo sapien
tacagaactgtttccaccttttagatctaatgg

SEQ ID NO: 1042828 - DNA, 33 bp, Homo sapien
tacagaactgtttccagcttttagatctaatgg

SEQ ID NO: 1042829 - DNA, 33 bp, Homo sapien
ctactttattttcaaaagggatcactaagagct

SEQ ID NO: 1042830 - DNA, 33 bp, Homo sapien
ctactttattttcaaaggggatcactaagagct

SEQ ID NO: 1042831 - DNA, 33 bp, Homo sapien
ctaaatatcataaaccgggtagcttataaacaa

SEQ ID NO: 1042832 - DNA, 33 bp, Homo sapien
ctaaatatcataaacctggtagcttataaacaa

SEQ ID NO: 1042833 - DNA, 33 bp, Homo sapien
gttgataggaacattcaacaagatcccatttgg

SEQ ID NO: 1042834 - DNA, 33 bp, Homo sapien
gttgataggaacattcgacaagatcccatttgg

SEQ ID NO: 1042835 - DNA, 33 bp, Homo sapien
aggatccctgcctgcaataagttcatgatgggg

SEQ ID NO: 1042836 - DNA, 33 bp, Homo sapien
aggatccctgcctgcagtaagttcatgatgggg

SEQ ID NO: 1042837 - DNA, 33 bp, Homo sapien
aagaaagtctcctaagaacatgaagcaagtaaa

SEQ ID NO: 1042838 - DNA, 33 bp, Homo sapien
aagaaagtctcctaaggacatgaagcaagtaaa

SEQ ID NO: 1042839 - DNA, 33 bp, Homo sapien
gcccctgatagaaacccaggcttctgaaccaag

SEQ ID NO: 1042840 - DNA, 33 bp, Homo sapien
gcccctgatagaaaccgaggcttctgaaccaag

SEQ ID NO: 1042841 - DNA, 33 bp, Homo sapien
tccactggcttctttacactcccactgtcactc

SEQ ID NO: 1042842 - DNA, 33 bp, Homo sapien
tccactggcttctttatactcccactgtcactc

SEQ ID NO: 1042843 - DNA, 33 bp, Homo sapien
ccttgtaatagaaacacggcctcttatgccctg

SEQ ID NO: 1042844 - DNA, 33 bp, Homo sapien
ccttgtaatagaaacatggcctcttatgccctg

SEQ ID NO: 1042845 - DNA, 33 bp, Homo sapien
aggcacactgggtagcaaatgctatgattgatt

SEQ ID NO: 1042846 - DNA, 33 bp, Homo sapien
aggcacactgggtagcgaatgctatgattgatt

SEQ ID NO: 1042847 - DNA, 33 bp, Homo sapien
gtgtctaagcaaagaaagaatgatgcacattac

SEQ ID NO: 1042848 - DNA, 33 bp, Homo sapien
gtgtctaagcaaagaaggaatgatgcacattac

SEQ ID NO: 1042849 - DNA, 33 bp, Homo sapien
caaggacaggaagaacagtaggaagcatccaga

SEQ ID NO: 1042850 - DNA, 33 bp, Homo sapien
caaggacaggaagaacggtaggaagcatccaga

SEQ ID NO: 1042851 - DNA, 33 bp, Homo sapien
ggaagtaggagtgagacacaaacacatttagag

SEQ ID NO: 1042852 - DNA, 33 bp, Homo sapien
ggaagtaggagtgagagacaaacacatttagag

SEQ ID NO: 1042853 - DNA, 33 bp, Homo sapien
catcctttattttcatcacccgtgtgctagtct

SEQ ID NO: 1042854 - DNA, 33 bp, Homo sapien
catcctttattttcattacccgtgtgctagtct

SEQ ID NO: 1042855 - DNA, 33 bp, Homo sapien
aaccttatttatttaacgtatgacctgtgtaat

SEQ ID NO: 1042856 - DNA, 33 bp, Homo sapien
aaccttatttatttaatgtatgacctgtgtaat

SEQ ID NO: 1042857 - DNA, 33 bp, Homo sapien
gcagggcatttctaagcccccaccccagtagac

SEQ ID NO: 1042858 - DNA, 33 bp, Homo sapien
gcagggcatttctaagtccccaccccagtagac

SEQ ID NO: 1042859 - DNA, 33 bp, Homo sapien
tgttctctcagtcacaccatttctgtccattaa

SEQ ID NO: 1042860 - DNA, 33 bp, Homo sapien
tgttctctcagtcacagcatttctgtccattaa

SEQ ID NO: 1042861 - DNA, 33 bp, Homo sapien
cattctcagttctgcagataaaaggtgggacct

SEQ ID NO: 1042862 - DNA, 33 bp, Homo sapien
cattctcagttctgcatataaaaggtgggacct

SEQ ID NO: 1042863 - DNA, 33 bp, Homo sapien
tgcctatcttcatttaaccatctgaccatcctc

SEQ ID NO: 1042864 - DNA, 33 bp, Homo sapien
tgcctatcttcatttatccatctgaccatcctc

SEQ ID NO: 1042865 - DNA, 33 bp, Homo sapien
tagccttactgaggtccaactttctctaagact

SEQ ID NO: 1042866 - DNA, 33 bp, Homo sapien
tagccttactgaggtctaactttctctaagact

SEQ ID NO: 1042867 - DNA, 33 bp, Homo sapien
gatattactctatcagaaccagctgagagctga

SEQ ID NO: 1042868 - DNA, 33 bp, Homo sapien
gatattactctatcaggaccagctgagagctga

SEQ ID NO: 1042869 - DNA, 33 bp, Homo sapien
gatagaaatccaggcacagccattgatactgac

SEQ ID NO: 1042870 - DNA, 33 bp, Homo sapien
gatagaaatccaggcagagccattgatactgac

SEQ ID NO: 1042871 - DNA, 33 bp, Homo sapien
gattccatcaaattgcagagcagaagcatagca

SEQ ID NO: 1042872 - DNA, 33 bp, Homo sapien
gattccatcaaattgcggagcagaagcatagca

SEQ ID NO: 1042873 - DNA, 33 bp, Homo sapien
gtgtttgtgctgggtacctgagtgtctgtgttg

SEQ ID NO: 1042874 - DNA, 33 bp, Homo sapien
gtgtttgtgctgggtatctgagtgtctgtgttg

SEQ ID NO: 1042875 - DNA, 33 bp, Homo sapien
agagagctgtagaaagcctgagtgttgtgagca

SEQ ID NO: 1042876 - DNA, 33 bp, Homo sapien
agagagctgtagaaaggctgagtgttgtgagca

SEQ ID NO: 1042877 - DNA, 33 bp, Homo sapien
aggtggactttgccgcacattttgagttaaagg

SEQ ID NO: 1042878 - DNA, 33 bp, Homo sapien
aggtggactttgccgcgcattttgagttaaagg

SEQ ID NO: 1042879 - DNA, 33 bp, Homo sapien
aagcagagtagtatcccagtgcgattgattaaa

SEQ ID NO: 1042880 - DNA, 33 bp, Homo sapien
aagcagagtagtatcctagtgcgattgattaaa

SEQ ID NO: 1042881 - DNA, 33 bp, Homo sapien
ttcaccattacactaccatacccctgtctctgc

SEQ ID NO: 1042882 - DNA, 33 bp, Homo sapien
ttcaccattacactactatacccctgtctctgc

SEQ ID NO: 1042883 - DNA, 33 bp, Homo sapien
aaaccttgtggagtaaacaacatatagtcacag

SEQ ID NO: 1042884 - DNA, 33 bp, Homo sapien
aaaccttgtggagtaagcaacatatagtcacag

SEQ ID NO: 1042885 - DNA, 33 bp, Homo sapien
aggccattgcaatccaagatccaggcaagagat

SEQ ID NO: 1042886 - DNA, 33 bp, Homo sapien
aggccattgcaatccacgatccaggcaagagat

SEQ ID NO: 1042887 - DNA, 33 bp, Homo sapien
atgacaccaaaagacccggaaggcagtacttca

SEQ ID NO: 1042888 - DNA, 33 bp, Homo sapien
atgacaccaaaagacctggaaggcagtacttca

SEQ ID NO: 1042889 - DNA, 33 bp, Homo sapien
caatgaacacaccttagagaagtttcattctca

SEQ ID NO: 1042890 - DNA, 33 bp, Homo sapien
caatgaacacaccttatagaagtttcattctca

SEQ ID NO: 1042891 - DNA, 33 bp, Homo sapien
accatctcctctataaagttctccaaataagtg

SEQ ID NO: 1042892 - DNA, 33 bp, Homo sapien
accatctcctctataatgttctccaaataagtg

SEQ ID NO: 1042893 - DNA, 33 bp, Homo sapien
ggtttgtttgcttgaacgttaaggcttatttat

SEQ ID NO: 1042894 - DNA, 33 bp, Homo sapien
ggtttgtttgcttgaatgttaaggcttatttat

SEQ ID NO: 1042895 - DNA, 33 bp, Homo sapien
ttccctgaatcagttacgacaaattggaccttt

SEQ ID NO: 1042896 - DNA, 33 bp, Homo sapien
ttccctgaatcagttatgacaaattggaccttt

SEQ ID NO: 1042897 - DNA, 33 bp, Homo sapien
acttccagaatagctacatccaaggactatgtc

SEQ ID NO: 1042898 - DNA, 33 bp, Homo sapien
acttccagaatagctagatccaaggactatgtc

SEQ ID NO: 1042899 - DNA, 33 bp, Homo sapien
gcctaacgtatcctgcagacccaagttagaagc

SEQ ID NO: 1042900 - DNA, 33 bp, Homo sapien
gcctaacgtatcctgcggacccaagttagaagc

SEQ ID NO: 1042901 - DNA, 33 bp, Homo sapien
accttctcaaggtcacaaagtgcatccggtata

SEQ ID NO: 1042902 - DNA, 33 bp, Homo sapien
accttctcaaggtcaccaagtgcatccggtata

SEQ ID NO: 1042903 - DNA, 33 bp, Homo sapien
aggcatttgtgtatatcagcactgcagcaatct

SEQ ID NO: 1042904 - DNA, 33 bp, Homo sapien
aggcatttgtgtatattagcactgcagcaatct

SEQ ID NO: 1042905 - DNA, 33 bp, Homo sapien
ttttgacttacacaagaattgaccaaagtgtat

SEQ ID NO: 1042906 - DNA, 33 bp, Homo sapien
ttttgacttacacaagtattgaccaaagtgtat

SEQ ID NO: 1042907 - DNA, 33 bp, Homo sapien
ccagggatgtgtatagacagtgcgttgtgctct

SEQ ID NO: 1042908 - DNA, 33 bp, Homo sapien
ccagggatgtgtataggcagtgcgttgtgctct

SEQ ID NO: 1042909 - DNA, 33 bp, Homo sapien
cattccaggaactgtcaaaagggcaatgtgatt

SEQ ID NO: 1042910 - DNA, 33 bp, Homo sapien
cattccaggaactgtcgaaagggcaatgtgatt

SEQ ID NO: 1042911 - DNA, 33 bp, Homo sapien
attaaatttgaagaccacaatgaagagagaaat

SEQ ID NO: 1042912 - DNA, 33 bp, Homo sapien
attaaatttgaagaccgcaatgaagagagaaat

SEQ ID NO: 1042913 - DNA, 33 bp, Homo sapien
tgctcaaaagaaggcaatcaaatcttctggtaa

SEQ ID NO: 1042914 - DNA, 33 bp, Homo sapien
tgctcaaaagaaggcagtcaaatcttctggtaa

SEQ ID NO: 1042915 - DNA, 33 bp, Homo sapien
atttgaacaaatcatacgtctgatctctttttc

SEQ ID NO: 1042916 - DNA, 33 bp, Homo sapien
atttgaacaaatcatatgtctgatctctttttc

SEQ ID NO: 1042917 - DNA, 33 bp, Homo sapien
acctccatcaatacacagagcttttccaagatt

SEQ ID NO: 1042918 - DNA, 33 bp, Homo sapien
acctccatcaatacactgagcttttccaagatt

SEQ ID NO: 1042919 - DNA, 33 bp, Homo sapien
tatgtttgtctctagcaaagcagaaaatgtttc

SEQ ID NO: 1042920 - DNA, 33 bp, Homo sapien
tatgtttgtctctagcgaagcagaaaatgtttc

SEQ ID NO: 1042921 - DNA, 33 bp, Homo sapien
tactcctcaaaacctaaaacatgaaggacccag

SEQ ID NO: 1042922 - DNA, 33 bp, Homo sapien
tactcctcaaaacctacaacatgaaggacccag

SEQ ID NO: 1042923 - DNA, 33 bp, Homo sapien
atcagaacaatgttgcaaggatccactttcatg

SEQ ID NO: 1042924 - DNA, 33 bp, Homo sapien
atcagaacaatgttgcgaggatccactttcatg

SEQ ID NO: 1042925 - DNA, 33 bp, Homo sapien
tgagaaagagaaaagaacatggtagagagaacg

SEQ ID NO: 1042926 - DNA, 33 bp, Homo sapien
tgagaaagagaaaagaccatggtagagagaacg

SEQ ID NO: 1042927 - DNA, 33 bp, Homo sapien
gttttctctgatatgacgatatccaaaggcaag

SEQ ID NO: 1042928 - DNA, 33 bp, Homo sapien
gttttctctgatatgatgatatccaaaggcaag

SEQ ID NO: 1042929 - DNA, 33 bp, Homo sapien
aaaaaactgagtttaccgatctcggagctagtt

SEQ ID NO: 1042930 - DNA, 33 bp, Homo sapien
aaaaaactgagtttactgatctcggagctagtt

SEQ ID NO: 1042931 - DNA, 33 bp, Homo sapien
gtgactttgattggacagctatttgcatatcta

SEQ ID NO: 1042932 - DNA, 33 bp, Homo sapien
gtgactttgattggacggctatttgcatatcta

SEQ ID NO: 1042933 - DNA, 33 bp, Homo sapien
gagaaggagccttagaactttatggcaactgaa

SEQ ID NO: 1042934 - DNA, 33 bp, Homo sapien
gagaaggagccttagatctttatggcaactgaa

SEQ ID NO: 1042935 - DNA, 33 bp, Homo sapien
acagaaagagggaaggacatgataggatccata

SEQ ID NO: 1042936 - DNA, 33 bp, Homo sapien
acagaaagagggaaggccatgataggatccata

SEQ ID NO: 1042937 - DNA, 33 bp, Homo sapien
tccgcctctctcattcccttgacttctcttttt

SEQ ID NO: 1042938 - DNA, 33 bp, Homo sapien
tccgcctctctcattctcttgacttctcttttt

SEQ ID NO: 1042939 - DNA, 33 bp, Homo sapien
cccaggatactagcgcaatagtttttggttctg

SEQ ID NO: 1042940 - DNA, 33 bp, Homo sapien
cccaggatactagcgcgatagtttttggttctg

SEQ ID NO: 1042941 - DNA, 33 bp, Homo sapien
agctggagatgctgaaggtctgtgcttgtgaat

SEQ ID NO: 1042942 - DNA, 33 bp, Homo sapien
agctggagatgctgaatgtctgtgcttgtgaat

SEQ ID NO: 1042943 - DNA, 33 bp, Homo sapien
gtttcttaagggcaagaccatctctttcacctc

SEQ ID NO: 1042944 - DNA, 33 bp, Homo sapien
gtttcttaagggcaaggccatctctttcacctc

SEQ ID NO: 1042945 - DNA, 33 bp, Homo sapien
acaggaaattatatggccaaactcattgagtct

SEQ ID NO: 1042946 - DNA, 33 bp, Homo sapien
acaggaaattatatggtcaaactcattgagtct

SEQ ID NO: 1042947 - DNA, 33 bp, Homo sapien
gctttgcggggttgctaagagtctaaaatagaa

SEQ ID NO: 1042948 - DNA, 33 bp, Homo sapien
gctttgcggggttgctgagagtctaaaatagaa

SEQ ID NO: 1042949 - DNA, 33 bp, Homo sapien
ttgagtctctcgagtacatgttgtgaaatgtta

SEQ ID NO: 1042950 - DNA, 33 bp, Homo sapien
ttgagtctctcgagtagatgttgtgaaatgtta

SEQ ID NO: 1042951 - DNA, 33 bp, Homo sapien
cccactgggcaccagacaaggacatgattcaga

SEQ ID NO: 1042952 - DNA, 33 bp, Homo sapien
cccactgggcaccagagaaggacatgattcaga

SEQ ID NO: 1042953 - DNA, 33 bp, Homo sapien
gccttagttcaaggggaaatgagtccacttgag

SEQ ID NO: 1042954 - DNA, 33 bp, Homo sapien
gccttagttcaagggggaatgagtccacttgag

SEQ ID NO: 1042955 - DNA, 33 bp, Homo sapien
ggcagaggctatgcataacaaaaagagggacaa

SEQ ID NO: 1042956 - DNA, 33 bp, Homo sapien
ggcagaggctatgcatgacaaaaagagggacaa

SEQ ID NO: 1042957 - DNA, 33 bp, Homo sapien
agaatcacctggaagaccatgcctttcccactc

SEQ ID NO: 1042958 - DNA, 33 bp, Homo sapien
agaatcacctggaagatcatgcctttcccactc

SEQ ID NO: 1042959 - DNA, 33 bp, Homo sapien
actgcccatttccacaaactcaacaggactgct

SEQ ID NO: 1042960 - DNA, 33 bp, Homo sapien
actgcccatttccacatactcaacaggactgct

SEQ ID NO: 1042961 - DNA, 33 bp, Homo sapien
ttattaactgtggtcactccttgattttgactc

SEQ ID NO: 1042962 - DNA, 33 bp, Homo sapien
ttattaactgtggtcattccttgattttgactc

SEQ ID NO: 1042963 - DNA, 33 bp, Homo sapien
cttattttggttattaagagtcgagtctgttta

SEQ ID NO: 1042964 - DNA, 33 bp, Homo sapien
cttattttggttattaggagtcgagtctgttta

SEQ ID NO: 1042965 - DNA, 33 bp, Homo sapien
gtcccagctatgaaacccacgtgcctctgtcct

SEQ ID NO: 1042966 - DNA, 33 bp, Homo sapien
gtcccagctatgaaactcacgtgcctctgtcct

SEQ ID NO: 1042967 - DNA, 33 bp, Homo sapien
accacttttctctaaaaatagctacatttccct

SEQ ID NO: 1042968 - DNA, 33 bp, Homo sapien
accacttttctctaaacatagctacatttccct

SEQ ID NO: 1042969 - DNA, 33 bp, Homo sapien
gaaggtctttttatgaagcaattggctgggtat

SEQ ID NO: 1042970 - DNA, 33 bp, Homo sapien
gaaggtctttttatgatgcaattggctgggtat

SEQ ID NO: 1042971 - DNA, 33 bp, Homo sapien
gtgcttagatcaacaaacatttatcagatggct

SEQ ID NO: 1042972 - DNA, 33 bp, Homo sapien
gtgcttagatcaacaatcatttatcagatggct

SEQ ID NO: 1042973 - DNA, 33 bp, Homo sapien
tggtgatgggattaaacatagaaggtaagggag

SEQ ID NO: 1042974 - DNA, 33 bp, Homo sapien
tggtgatgggattaaatatagaaggtaagggag

SEQ ID NO: 1042975 - DNA, 33 bp, Homo sapien
ggctttctatgcctccccaagtctaagaccagc

SEQ ID NO: 1042976 - DNA, 33 bp, Homo sapien
ggctttctatgcctcctcaagtctaagaccagc

SEQ ID NO: 1042977 - DNA, 33 bp, Homo sapien
aatgatttttttttaactgttcactctacttca

SEQ ID NO: 1042978 - DNA, 33 bp, Homo sapien
aatgatttttttttaattgttcactctacttca

SEQ ID NO: 1042979 - DNA, 33 bp, Homo sapien
cattctcatccaacaaaaatagcatcatcaaaa

SEQ ID NO: 1042980 - DNA, 33 bp, Homo sapien
cattctcatccaacaacaatagcatcatcaaaa

SEQ ID NO: 1042981 - DNA, 33 bp, Homo sapien
cagtgataatccctacaatttcaggcctggcat

SEQ ID NO: 1042982 - DNA, 33 bp, Homo sapien
cagtgataatccctaccatttcaggcctggcat

SEQ ID NO: 1042983 - DNA, 33 bp, Homo sapien
ttgagtttgatttcagccatcttgagtctagtt

SEQ ID NO: 1042984 - DNA, 33 bp, Homo sapien
ttgagtttgatttcaggcatcttgagtctagtt

SEQ ID NO: 1042985 - DNA, 33 bp, Homo sapien
gctccatgttcttccacgccacactatccagcc

SEQ ID NO: 1042986 - DNA, 33 bp, Homo sapien
gctccatgttcttccatgccacactatccagcc

SEQ ID NO: 1042987 - DNA, 33 bp, Homo sapien
atccaatctttctaaaatgacttaaacagagag

SEQ ID NO: 1042988 - DNA, 33 bp, Homo sapien
atccaatctttctaaagtgacttaaacagagag

SEQ ID NO: 1042989 - DNA, 33 bp, Homo sapien
tggccagttaaatatacacaaagtaacaatgtg

SEQ ID NO: 1042990 - DNA, 33 bp, Homo sapien
tggccagttaaatatagacaaagtaacaatgtg

SEQ ID NO: 1042991 - DNA, 33 bp, Homo sapien
gcttttcacatattgcaccctggaaaatggtcc

SEQ ID NO: 1042992 - DNA, 33 bp, Homo sapien
gcttttcacatattgccccctggaaaatggtcc

SEQ ID NO: 1042993 - DNA, 33 bp, Homo sapien
tgcacaatgggaattccataaatcctgagtgga

SEQ ID NO: 1042994 - DNA, 33 bp, Homo sapien
tgcacaatgggaattctataaatcctgagtgga

SEQ ID NO: 1042995 - DNA, 33 bp, Homo sapien
tgattgcagaaaccaaataaagggcataagaat

SEQ ID NO: 1042996 - DNA, 33 bp, Homo sapien
tgattgcagaaaccaagtaaagggcataagaat

SEQ ID NO: 1042997 - DNA, 33 bp, Homo sapien
ccttgttcaccttatcaaaaattgcaaactccc

SEQ ID NO: 1042998 - DNA, 33 bp, Homo sapien
ccttgttcaccttatcgaaaattgcaaactccc

SEQ ID NO: 1042999 - DNA, 33 bp, Homo sapien
gttggcacaccatagacatttagtaaatgcttg

SEQ ID NO: 1043000 - DNA, 33 bp, Homo sapien
gttggcacaccatagatatttagtaaatgcttg

SEQ ID NO: 1043001 - DNA, 33 bp, Homo sapien
gtagatatttctgccacattctttggacataga

SEQ ID NO: 1043002 - DNA, 33 bp, Homo sapien
gtagatatttctgccatattctttggacataga

SEQ ID NO: 1043003 - DNA, 33 bp, Homo sapien
gaatgtttgttgatgacccgaattaatgggatt

SEQ ID NO: 1043004 - DNA, 33 bp, Homo sapien
gaatgtttgttgatgatccgaattaatgggatt

SEQ ID NO: 1043005 - DNA, 33 bp, Homo sapien
gagaggatctagaggaacaaaaagagctcaccc

SEQ ID NO: 1043006 - DNA, 33 bp, Homo sapien
gagaggatctagaggagcaaaaagagctcaccc

SEQ ID NO: 1043007 - DNA, 33 bp, Homo sapien
gatttctggagctcccaaaacacatccttgagc

SEQ ID NO: 1043008 - DNA, 33 bp, Homo sapien
gatttctggagctcccgaaacacatccttgagc

SEQ ID NO: 1043009 - DNA, 33 bp, Homo sapien
tgttgtaaatgagaacaccgggacccaatcaga

SEQ ID NO: 1043010 - DNA, 33 bp, Homo sapien
tgttgtaaatgagaacgccgggacccaatcaga

SEQ ID NO: 1043011 - DNA, 33 bp, Homo sapien
gtaatcattacctataagtcatctcccttaggt

SEQ ID NO: 1043012 - DNA, 33 bp, Homo sapien
gtaatcattacctataggtcatctcccttaggt

SEQ ID NO: 1043013 - DNA, 33 bp, Homo sapien
tgcaaggcttagagaaatgtagtgacttcccca

SEQ ID NO: 1043014 - DNA, 33 bp, Homo sapien
tgcaaggcttagagaagtgtagtgacttcccca

SEQ ID NO: 1043015 - DNA, 33 bp, Homo sapien
ggctgggctcagttgcaccgttctttgctggtc

SEQ ID NO: 1043016 - DNA, 33 bp, Homo sapien
ggctgggctcagttgcgccgttctttgctggtc

SEQ ID NO: 1043017 - DNA, 33 bp, Homo sapien
ttcaaatcttggctgccgcacttcaagctggtt

SEQ ID NO: 1043018 - DNA, 33 bp, Homo sapien
ttcaaatcttggctgctgcacttcaagctggtt

SEQ ID NO: 1043019 - DNA, 33 bp, Homo sapien
catatggggacagagaaaagcaatggttcagga

SEQ ID NO: 1043020 - DNA, 33 bp, Homo sapien
catatggggacagagacaagcaatggttcagga

SEQ ID NO: 1043021 - DNA, 33 bp, Homo sapien
tccctcaatggataaaaacatcaaaataaccaa

SEQ ID NO: 1043022 - DNA, 33 bp, Homo sapien
tccctcaatggataaagacatcaaaataaccaa

SEQ ID NO: 1043023 - DNA, 33 bp, Homo sapien
atcatccatctagtaaatggtaagagttgtctc

SEQ ID NO: 1043024 - DNA, 33 bp, Homo sapien
atcatccatctagtaagtggtaagagttgtctc

SEQ ID NO: 1043025 - DNA, 33 bp, Homo sapien
aggtggcagtatggcacagtagttatgtgtaca

SEQ ID NO: 1043026 - DNA, 33 bp, Homo sapien
aggtggcagtatggcatagtagttatgtgtaca

SEQ ID NO: 1043027 - DNA, 33 bp, Homo sapien
tggagcatggacaacacgttggggaagcaggtg

SEQ ID NO: 1043028 - DNA, 33 bp, Homo sapien
tggagcatggacaacaggttggggaagcaggtg

SEQ ID NO: 1043029 - DNA, 33 bp, Homo sapien
cagacaactatacaataagagtttagagtgttc

SEQ ID NO: 1043030 - DNA, 33 bp, Homo sapien
cagacaactatacaatgagagtttagagtgttc

SEQ ID NO: 1043031 - DNA, 33 bp, Homo sapien
agtcttcctgaaacacaaggtccaaccacatca

SEQ ID NO: 1043032 - DNA, 33 bp, Homo sapien
agtcttcctgaaacacgaggtccaaccacatca

SEQ ID NO: 1043033 - DNA, 33 bp, Homo sapien
gaatgccaggctgaagcattcacatttttgctg

SEQ ID NO: 1043034 - DNA, 33 bp, Homo sapien
gaatgccaggctgaagtattcacatttttgctg

SEQ ID NO: 1043035 - DNA, 33 bp, Homo sapien
ccagacctcccaatccaccaggtcattctcttc

SEQ ID NO: 1043036 - DNA, 33 bp, Homo sapien
ccagacctcccaatccgccaggtcattctcttc

SEQ ID NO: 1043037 - DNA, 33 bp, Homo sapien
ctgggaatgaagttagaaataaatcagccactc

SEQ ID NO: 1043038 - DNA, 33 bp, Homo sapien
ctgggaatgaagttaggaataaatcagccactc

SEQ ID NO: 1043039 - DNA, 33 bp, Homo sapien
agaggaactcagagtcagaaagcctaagttcaa

SEQ ID NO: 1043040 - DNA, 33 bp, Homo sapien
agaggaactcagagtccgaaagcctaagttcaa

SEQ ID NO: 1043041 - DNA, 33 bp, Homo sapien
aaactaataatcttaacaggtgatatggtttaa

SEQ ID NO: 1043042 - DNA, 33 bp, Homo sapien
aaactaataatcttaagaggtgatatggtttaa

SEQ ID NO: 1043043 - DNA, 33 bp, Homo sapien
gacttgctcctcaaaaaagattttacaggcgta

SEQ ID NO: 1043044 - DNA, 33 bp, Homo sapien
gacttgctcctcaaaatagattttacaggcgta

SEQ ID NO: 1043045 - DNA, 33 bp, Homo sapien
cgaatttgtttccttaagctcttaactactaag

SEQ ID NO: 1043046 - DNA, 33 bp, Homo sapien
cgaatttgtttccttaggctcttaactactaag

SEQ ID NO: 1043047 - DNA, 33 bp, Homo sapien
tttatgacaactgccacgtagtacagacggcca

SEQ ID NO: 1043048 - DNA, 33 bp, Homo sapien
tttatgacaactgccaggtagtacagacggcca

SEQ ID NO: 1043049 - DNA, 33 bp, Homo sapien
ggaatgtagggattacacggtttggtacagaag

SEQ ID NO: 1043050 - DNA, 33 bp, Homo sapien
ggaatgtagggattacccggtttggtacagaag

SEQ ID NO: 1043051 - DNA, 33 bp, Homo sapien
tatgctaacgatcaaccggagtatcacacctgt

SEQ ID NO: 1043052 - DNA, 33 bp, Homo sapien
tatgctaacgatcaactggagtatcacacctgt

SEQ ID NO: 1043053 - DNA, 33 bp, Homo sapien
aatttcacgaggttccaaaatgcaccaagaagc

SEQ ID NO: 1043054 - DNA, 33 bp, Homo sapien
aatttcacgaggttccgaaatgcaccaagaagc

SEQ ID NO: 1043055 - DNA, 33 bp, Homo sapien
cactggaatgtaagcacgggcttttcctaattc

SEQ ID NO: 1043056 - DNA, 33 bp, Homo sapien
cactggaatgtaagcaggggcttttcctaattc

SEQ ID NO: 1043057 - DNA, 33 bp, Homo sapien
attggccatgtcctgacgatttggggcctttgc

SEQ ID NO: 1043058 - DNA, 33 bp, Homo sapien
attggccatgtcctgatgatttggggcctttgc

SEQ ID NO: 1043059 - DNA, 33 bp, Homo sapien
aggtctcaccaaatggccaaactaatttgggtt

SEQ ID NO: 1043060 - DNA, 33 bp, Homo sapien
aggtctcaccaaatgggcaaactaatttgggtt

SEQ ID NO: 1043061 - DNA, 33 bp, Homo sapien
gtaagtagccacactaccagtgtacagttttat

SEQ ID NO: 1043062 - DNA, 33 bp, Homo sapien
gtaagtagccacactatcagtgtacagttttat

SEQ ID NO: 1043063 - DNA, 33 bp, Homo sapien
aaatacaaggctattagcaagtaagtaaatatg

SEQ ID NO: 1043064 - DNA, 33 bp, Homo sapien
aaatacaaggctattatcaagtaagtaaatatg

SEQ ID NO: 1043065 - DNA, 33 bp, Homo sapien
gctctgtccattcagacggtctaaaaataatga

SEQ ID NO: 1043066 - DNA, 33 bp, Homo sapien
gctctgtccattcagatggtctaaaaataatga

SEQ ID NO: 1043067 - DNA, 33 bp, Homo sapien
gtcagagatgcaagagacagcgagaactctttt

SEQ ID NO: 1043068 - DNA, 33 bp, Homo sapien
gtcagagatgcaagaggcagcgagaactctttt

SEQ ID NO: 1043069 - DNA, 33 bp, Homo sapien
ccagcactgtttgcatcactgaagcactgagat

SEQ ID NO: 1043070 - DNA, 33 bp, Homo sapien
ccagcactgtttgcattactgaagcactgagat

SEQ ID NO: 1043071 - DNA, 33 bp, Homo sapien
aatttctctaaaacaacgaaccacgatgctgtt

SEQ ID NO: 1043072 - DNA, 33 bp, Homo sapien
aatttctctaaaacaatgaaccacgatgctgtt

SEQ ID NO: 1043073 - DNA, 33 bp, Homo sapien
aaaagttcttttcagcgccttgacacaacttcc

SEQ ID NO: 1043074 - DNA, 33 bp, Homo sapien
aaaagttcttttcagctccttgacacaacttcc

SEQ ID NO: 1043075 - DNA, 33 bp, Homo sapien
caatccaggacaagaaagattgttttatacttt

SEQ ID NO: 1043076 - DNA, 33 bp, Homo sapien
caatccaggacaagaaggattgttttatacttt

SEQ ID NO: 1043077 - DNA, 33 bp, Homo sapien
gaaactaaggagactaagtaagcagcccttagc

SEQ ID NO: 1043078 - DNA, 33 bp, Homo sapien
gaaactaaggagactaggtaagcagcccttagc

SEQ ID NO: 1043079 - DNA, 33 bp, Homo sapien
aattaacagagactaacggacttaagcagcccc

SEQ ID NO: 1043080 - DNA, 33 bp, Homo sapien
aattaacagagactaatggacttaagcagcccc

SEQ ID NO: 1043081 - DNA, 33 bp, Homo sapien
caggggctggtatttaacagtatagtttagttc

SEQ ID NO: 1043082 - DNA, 33 bp, Homo sapien
caggggctggtatttagcagtatagtttagttc

SEQ ID NO: 1043083 - DNA, 33 bp, Homo sapien
gttaaacaatcactccacattcctccctctccc

SEQ ID NO: 1043084 - DNA, 33 bp, Homo sapien
gttaaacaatcactccgcattcctccctctccc

SEQ ID NO: 1043085 - DNA, 33 bp, Homo sapien
ccactgcacctagctgcatgtgtttttacggta

SEQ ID NO: 1043086 - DNA, 33 bp, Homo sapien
ccactgcacctagctgtatgtgtttttacggta

SEQ ID NO: 1043087 - DNA, 33 bp, Homo sapien
atggtgcctacaaccactctctctacacagtag

SEQ ID NO: 1043088 - DNA, 33 bp, Homo sapien
atggtgcctacaaccattctctctacacagtag

SEQ ID NO: 1043089 - DNA, 33 bp, Homo sapien
ccacctctcagaaacactgggagagttcattga

SEQ ID NO: 1043090 - DNA, 33 bp, Homo sapien
ccacctctcagaaacattgggagagttcattga

SEQ ID NO: 1043091 - DNA, 33 bp, Homo sapien
caaatcgtgtatattgaagccatggtgaagcca

SEQ ID NO: 1043092 - DNA, 33 bp, Homo sapien
caaatcgtgtatattggagccatggtgaagcca

SEQ ID NO: 1043093 - DNA, 33 bp, Homo sapien
ttcttttctcaaggagcatctttgtgttctctg

SEQ ID NO: 1043094 - DNA, 33 bp, Homo sapien
ttcttttctcaaggagtatctttgtgttctctg

SEQ ID NO: 1043095 - DNA, 33 bp, Homo sapien
ctcctttgactgcccacaatctagctgggctga

SEQ ID NO: 1043096 - DNA, 33 bp, Homo sapien
ctcctttgactgcccataatctagctgggctga

SEQ ID NO: 1043097 - DNA, 33 bp, Homo sapien
gaggagtaactggctacggttttatgatgccac

SEQ ID NO: 1043098 - DNA, 33 bp, Homo sapien
gaggagtaactggctatggttttatgatgccac

SEQ ID NO: 1043099 - DNA, 33 bp, Homo sapien
gaaatgtggaccttgacagggtattggacatat

SEQ ID NO: 1043100 - DNA, 33 bp, Homo sapien
gaaatgtggaccttgagagggtattggacatat

SEQ ID NO: 1043101 - DNA, 33 bp, Homo sapien
tggagtcatttgaaacacgttatcttcagtagg

SEQ ID NO: 1043102 - DNA, 33 bp, Homo sapien
tggagtcatttgaaacccgttatcttcagtagg

SEQ ID NO: 1043103 - DNA, 33 bp, Homo sapien
gtgatcctggcagccactcgtgtgaccttgatg

SEQ ID NO: 1043104 - DNA, 33 bp, Homo sapien
gtgatcctggcagccattcgtgtgaccttgatg

SEQ ID NO: 1043105 - DNA, 33 bp, Homo sapien
gcaatgactctgctcaagagctacacacatggt

SEQ ID NO: 1043106 - DNA, 33 bp, Homo sapien
gcaatgactctgctcacgagctacacacatggt

SEQ ID NO: 1043107 - DNA, 33 bp, Homo sapien
ggtcgtaatatagggacagatgaagaattgggg

SEQ ID NO: 1043108 - DNA, 33 bp, Homo sapien
ggtcgtaatatagggagagatgaagaattgggg

SEQ ID NO: 1043109 - DNA, 33 bp, Homo sapien
cagtggcttaaaacaaaaatgattcattctcat

SEQ ID NO: 1043110 - DNA, 33 bp, Homo sapien
cagtggcttaaaacaataatgattcattctcat

SEQ ID NO: 1043111 - DNA, 33 bp, Homo sapien
gagtatgaaaagtgagaataattgtgggaggca

SEQ ID NO: 1043112 - DNA, 33 bp, Homo sapien
gagtatgaaaagtgagcataattgtgggaggca

SEQ ID NO: 1043113 - DNA, 33 bp, Homo sapien
gttgtgtagattaaacagaaatggatgcaaagg

SEQ ID NO: 1043114 - DNA, 33 bp, Homo sapien
gttgtgtagattaaacggaaatggatgcaaagg

SEQ ID NO: 1043115 - DNA, 33 bp, Homo sapien
aaaggaattaagtaacaatagatactacagcat

SEQ ID NO: 1043116 - DNA, 33 bp, Homo sapien
aaaggaattaagtaacgatagatactacagcat

SEQ ID NO: 1043117 - DNA, 33 bp, Homo sapien
tgtctagtctccagaaccacgaagaaatgaatt

SEQ ID NO: 1043118 - DNA, 33 bp, Homo sapien
tgtctagtctccagaatcacgaagaaatgaatt

SEQ ID NO: 1043119 - DNA, 33 bp, Homo sapien
tggacaggcctgccccaacaattttgcattgta

SEQ ID NO: 1043120 - DNA, 33 bp, Homo sapien
tggacaggcctgcccccacaattttgcattgta

SEQ ID NO: 1043121 - DNA, 33 bp, Homo sapien
aaatctgggaatgggcaaaaaatatctataaat

SEQ ID NO: 1043122 - DNA, 33 bp, Homo sapien
aaatctgggaatgggcgaaaaatatctataaat

SEQ ID NO: 1043123 - DNA, 33 bp, Homo sapien
agaccaaaatacaatgaaattacagcacatttc

SEQ ID NO: 1043124 - DNA, 33 bp, Homo sapien
agaccaaaatacaatggaattacagcacatttc

SEQ ID NO: 1043125 - DNA, 33 bp, Homo sapien
tccttaaaagtgaagaaggaggcggaagagaag

SEQ ID NO: 1043126 - DNA, 33 bp, Homo sapien
tccttaaaagtgaagacggaggcggaagagaag

SEQ ID NO: 1043127 - DNA, 33 bp, Homo sapien
gaagccccgggcgaggccacagtcatctccaag

SEQ ID NO: 1043128 - DNA, 33 bp, Homo sapien
gaagccccgggcgaggtcacagtcatctccaag

SEQ ID NO: 1043129 - DNA, 33 bp, Homo sapien
tccagctcagcctcacaaggtagagccgcctac

SEQ ID NO: 1043130 - DNA, 33 bp, Homo sapien
tccagctcagcctcacgaggtagagccgcctac

SEQ ID NO: 1043131 - DNA, 33 bp, Homo sapien
attttacagatcggaaaacttaggaagcctgat

SEQ ID NO: 1043132 - DNA, 33 bp, Homo sapien
attttacagatcggaagacttaggaagcctgat

SEQ ID NO: 1043133 - DNA, 33 bp, Homo sapien
attaggcctgtagagacgagaatgtaatcaatt

SEQ ID NO: 1043134 - DNA, 33 bp, Homo sapien
attaggcctgtagagatgagaatgtaatcaatt

SEQ ID NO: 1043135 - DNA, 33 bp, Homo sapien
caaaccaggtcttccactctaacccgagtaata

SEQ ID NO: 1043136 - DNA, 33 bp, Homo sapien
caaaccaggtcttccattctaacccgagtaata

SEQ ID NO: 1043137 - DNA, 33 bp, Homo sapien
cagcactcagggtacaaaggagtagacgtagtg

SEQ ID NO: 1043138 - DNA, 33 bp, Homo sapien
cagcactcagggtacagaggagtagacgtagtg

SEQ ID NO: 1043139 - DNA, 33 bp, Homo sapien
actaacgcggttccacaagcttatccctccctc

SEQ ID NO: 1043140 - DNA, 33 bp, Homo sapien
actaacgcggttccacgagcttatccctccctc

SEQ ID NO: 1043141 - DNA, 33 bp, Homo sapien
atccctattcataatcccaacctgcccctgtgt

SEQ ID NO: 1043142 - DNA, 33 bp, Homo sapien
atccctattcataatctcaacctgcccctgtgt

SEQ ID NO: 1043143 - DNA, 33 bp, Homo sapien
acgacagagtggaaagaagaaggaagcagaatc

SEQ ID NO: 1043144 - DNA, 33 bp, Homo sapien
acgacagagtggaaaggagaaggaagcagaatc

SEQ ID NO: 1043145 - DNA, 33 bp, Homo sapien
tccttgtttgtgaggaatatctgagcccccaag

SEQ ID NO: 1043146 - DNA, 33 bp, Homo sapien
tccttgtttgtgaggagtatctgagcccccaag

SEQ ID NO: 1043147 - DNA, 33 bp, Homo sapien
aggcttgtgttgaccacggaattgccagcacct

SEQ ID NO: 1043148 - DNA, 33 bp, Homo sapien
aggcttgtgttgaccatggaattgccagcacct

SEQ ID NO: 1043149 - DNA, 33 bp, Homo sapien
tcaaagtgctttcaaaaacatagtttggtcagt

SEQ ID NO: 1043150 - DNA, 33 bp, Homo sapien
tcaaagtgctttcaaagacatagtttggtcagt

SEQ ID NO: 1043151 - DNA, 33 bp, Homo sapien
ttcttctaatccaccaagtcctgttccatctta

SEQ ID NO: 1043152 - DNA, 33 bp, Homo sapien
ttcttctaatccaccaggtcctgttccatctta

SEQ ID NO: 1043153 - DNA, 33 bp, Homo sapien
tataggctctaagtcccaatttgtcctcatgga

SEQ ID NO: 1043154 - DNA, 33 bp, Homo sapien
tataggctctaagtcctaatttgtcctcatgga

SEQ ID NO: 1043155 - DNA, 33 bp, Homo sapien
tgtgtagaatgcggacaggattctactcaacaa

SEQ ID NO: 1043156 - DNA, 33 bp, Homo sapien
tgtgtagaatgcggacgggattctactcaacaa

SEQ ID NO: 1043157 - DNA, 33 bp, Homo sapien
ggagagtctcactccccgaggatggccagtgcc

SEQ ID NO: 1043158 - DNA, 33 bp, Homo sapien
ggagagtctcactccctgaggatggccagtgcc

SEQ ID NO: 1043159 - DNA, 33 bp, Homo sapien
cgagtctctgtgggtcaccaaacagtaagaatg

SEQ ID NO: 1043160 - DNA, 33 bp, Homo sapien
cgagtctctgtgggtcgccaaacagtaagaatg

SEQ ID NO: 1043161 - DNA, 33 bp, Homo sapien
aggacaaagtagaatgcaaggccagaaccaaga

SEQ ID NO: 1043162 - DNA, 33 bp, Homo sapien
aggacaaagtagaatgtaaggccagaaccaaga

SEQ ID NO: 1043163 - DNA, 33 bp, Homo sapien
taccccaagcacagaactgttctccctgcttca

SEQ ID NO: 1043164 - DNA, 33 bp, Homo sapien
taccccaagcacagaattgttctccctgcttca

SEQ ID NO: 1043165 - DNA, 33 bp, Homo sapien
gcttgcaactagaaagcagcatcgaaaccagca

SEQ ID NO: 1043166 - DNA, 33 bp, Homo sapien
gcttgcaactagaaaggagcatcgaaaccagca

SEQ ID NO: 1043167 - DNA, 33 bp, Homo sapien
ttgctgctattccacacgctaaataagagctgg

SEQ ID NO: 1043168 - DNA, 33 bp, Homo sapien
ttgctgctattccacaggctaaataagagctgg

SEQ ID NO: 1043169 - DNA, 33 bp, Homo sapien
tgttactttttgcccactcattcagcaaacatt

SEQ ID NO: 1043170 - DNA, 33 bp, Homo sapien
tgttactttttgcccattcattcagcaaacatt

SEQ ID NO: 1043171 - DNA, 33 bp, Homo sapien
attccactcctctgctcagaatctcccagtggc

SEQ ID NO: 1043172 - DNA, 33 bp, Homo sapien
attccactcctctgctgagaatctcccagtggc

SEQ ID NO: 1043173 - DNA, 33 bp, Homo sapien
ggtgaatgcttgcttagaaattatcttgttgtg

SEQ ID NO: 1043174 - DNA, 33 bp, Homo sapien
ggtgaatgcttgcttataaattatcttgttgtg

SEQ ID NO: 1043175 - DNA, 33 bp, Homo sapien
gtgtgaacctcagccacgataaagttaggctct

SEQ ID NO: 1043176 - DNA, 33 bp, Homo sapien
gtgtgaacctcagccatgataaagttaggctct

SEQ ID NO: 1043177 - DNA, 33 bp, Homo sapien
ctcttcagtttggctgcataattaataagtggt

SEQ ID NO: 1043178 - DNA, 33 bp, Homo sapien
ctcttcagtttggctgtataattaataagtggt

SEQ ID NO: 1043179 - DNA, 33 bp, Homo sapien
tccttctggttcctcaatcaagtctgcacaaag

SEQ ID NO: 1043180 - DNA, 33 bp, Homo sapien
tccttctggttcctcagtcaagtctgcacaaag

SEQ ID NO: 1043181 - DNA, 33 bp, Homo sapien
tggactgggccaggcacacacgtgcttcagaaa

SEQ ID NO: 1043182 - DNA, 33 bp, Homo sapien
tggactgggccaggcatacacgtgcttcagaaa

SEQ ID NO: 1043183 - DNA, 33 bp, Homo sapien
atcacttctatttagcacaaggcataaacctct

SEQ ID NO: 1043184 - DNA, 33 bp, Homo sapien
atcacttctatttagcgcaaggcataaacctct

SEQ ID NO: 1043185 - DNA, 33 bp, Homo sapien
ccattttgtagaactcagaagctttgggattta

SEQ ID NO: 1043186 - DNA, 33 bp, Homo sapien
ccattttgtagaactcggaagctttgggattta

SEQ ID NO: 1043187 - DNA, 33 bp, Homo sapien
ttataaatcatgtaaaactcataataacgtatg

SEQ ID NO: 1043188 - DNA, 33 bp, Homo sapien
ttataaatcatgtaaatctcataataacgtatg

SEQ ID NO: 1043189 - DNA, 33 bp, Homo sapien
tttttcttgatgacaagttccttagaatttgtt

SEQ ID NO: 1043190 - DNA, 33 bp, Homo sapien
tttttcttgatgacaatttccttagaatttgtt

SEQ ID NO: 1043191 - DNA, 33 bp, Homo sapien
tgagccctgacctaaagcctatgtacaggatcc

SEQ ID NO: 1043192 - DNA, 33 bp, Homo sapien
tgagccctgacctaaatcctatgtacaggatcc

SEQ ID NO: 1043193 - DNA, 33 bp, Homo sapien
cacaaaaaatacttccacaaggacatctgccca

SEQ ID NO: 1043194 - DNA, 33 bp, Homo sapien
cacaaaaaatacttccgcaaggacatctgccca

SEQ ID NO: 1043195 - DNA, 33 bp, Homo sapien
gtccttactatggcaacctattgtgtcctagta

SEQ ID NO: 1043196 - DNA, 33 bp, Homo sapien
gtccttactatggcaatctattgtgtcctagta

SEQ ID NO: 1043197 - DNA, 33 bp, Homo sapien
acctggatcctctcttcaaagctgtttctctcc

SEQ ID NO: 1043198 - DNA, 33 bp, Homo sapien
acctggatcctctcttgaaagctgtttctctcc

SEQ ID NO: 1043199 - DNA, 33 bp, Homo sapien
ttcattttccagatcaaagctaagaaaagattg

SEQ ID NO: 1043200 - DNA, 33 bp, Homo sapien
ttcattttccagatcacagctaagaaaagattg

SEQ ID NO: 1043201 - DNA, 33 bp, Homo sapien
gaaggtaatcttttcaataaacctctgtgaggt

SEQ ID NO: 1043202 - DNA, 33 bp, Homo sapien
gaaggtaatcttttcagtaaacctctgtgaggt

SEQ ID NO: 1043203 - DNA, 33 bp, Homo sapien
aggtggaagatctcctaactaaaagaatactcc

SEQ ID NO: 1043204 - DNA, 33 bp, Homo sapien
aggtggaagatctcctcactaaaagaatactcc

SEQ ID NO: 1043205 - DNA, 33 bp, Homo sapien
aggccccagtgtcataccattttaatggaattc

SEQ ID NO: 1043206 - DNA, 33 bp, Homo sapien
aggccccagtgtcatatcattttaatggaattc

SEQ ID NO: 1043207 - DNA, 33 bp, Homo sapien
tttagacagcaaaacacaaaggttagatctggg

SEQ ID NO: 1043208 - DNA, 33 bp, Homo sapien
tttagacagcaaaacagaaaggttagatctggg

SEQ ID NO: 1043209 - DNA, 33 bp, Homo sapien
tggtcagaccacacaaccctgagcagtttggga

SEQ ID NO: 1043210 - DNA, 33 bp, Homo sapien
tggtcagaccacacaagcctgagcagtttggga

SEQ ID NO: 1043211 - DNA, 33 bp, Homo sapien
tgggcctggcatcctccagtctgctgaaagcca

SEQ ID NO: 1043212 - DNA, 33 bp, Homo sapien
tgggcctggcatcctctagtctgctgaaagcca

SEQ ID NO: 1043213 - DNA, 33 bp, Homo sapien
ccagaagcttatgtggaaatgcttcatttgtcc

SEQ ID NO: 1043214 - DNA, 33 bp, Homo sapien
ccagaagcttatgtgggaatgcttcatttgtcc

SEQ ID NO: 1043215 - DNA, 33 bp, Homo sapien
ttgttccaagtctcacaaaatctaggtctttct

SEQ ID NO: 1043216 - DNA, 33 bp, Homo sapien
ttgttccaagtctcacgaaatctaggtctttct

SEQ ID NO: 1043217 - DNA, 33 bp, Homo sapien
acaaagggagttgcacacagccttgggcttata

SEQ ID NO: 1043218 - DNA, 33 bp, Homo sapien
acaaagggagttgcacgcagccttgggcttata

SEQ ID NO: 1043219 - DNA, 33 bp, Homo sapien
cttgtgagccattgaaacggatagccagagtta

SEQ ID NO: 1043220 - DNA, 33 bp, Homo sapien
cttgtgagccattgaagcggatagccagagtta

SEQ ID NO: 1043221 - DNA, 33 bp, Homo sapien
catactgctgtctcaaagcctgtgttctccact

SEQ ID NO: 1043222 - DNA, 33 bp, Homo sapien
catactgctgtctcaaggcctgtgttctccact

SEQ ID NO: 1043223 - DNA, 33 bp, Homo sapien
ctagagcagtgtacgacggggagaggaatatgc

SEQ ID NO: 1043224 - DNA, 33 bp, Homo sapien
ctagagcagtgtacgatggggagaggaatatgc

SEQ ID NO: 1043225 - DNA, 33 bp, Homo sapien
ctttccctggagcaaaatcagtaaatcacaaaa

SEQ ID NO: 1043226 - DNA, 33 bp, Homo sapien
ctttccctggagcaaagtcagtaaatcacaaaa

SEQ ID NO: 1043227 - DNA, 33 bp, Homo sapien
gctgtttttgtgtgacaacagaggatttgagta

SEQ ID NO: 1043228 - DNA, 33 bp, Homo sapien
gctgtttttgtgtgaccacagaggatttgagta

SEQ ID NO: 1043229 - DNA, 33 bp, Homo sapien
tggctcctcctcgctcccatctagaacccgcct

SEQ ID NO: 1043230 - DNA, 33 bp, Homo sapien
tggctcctcctcgctcgcatctagaacccgcct

SEQ ID NO: 1043231 - DNA, 33 bp, Homo sapien
tgcaaaggacaatacaagagagaagccatactc

SEQ ID NO: 1043232 - DNA, 33 bp, Homo sapien
tgcaaaggacaatacaggagagaagccatactc

SEQ ID NO: 1043233 - DNA, 33 bp, Homo sapien
acaataaataacatgggcaccctttcaattagg

SEQ ID NO: 1043234 - DNA, 33 bp, Homo sapien
acaataaataacatggtcaccctttcaattagg

SEQ ID NO: 1043235 - DNA, 33 bp, Homo sapien
aatagctctaagcagaaaagggtaattgaatta

SEQ ID NO: 1043236 - DNA, 33 bp, Homo sapien
aatagctctaagcagagaagggtaattgaatta

SEQ ID NO: 1043237 - DNA, 33 bp, Homo sapien
acagagaacatttaacgaaacttcttggattta

SEQ ID NO: 1043238 - DNA, 33 bp, Homo sapien
acagagaacatttaactaaacttcttggattta

SEQ ID NO: 1043239 - DNA, 33 bp, Homo sapien
ttctattcagtggatacgataatatttcttatt

SEQ ID NO: 1043240 - DNA, 33 bp, Homo sapien
ttctattcagtggataggataatatttcttatt

SEQ ID NO: 1043241 - DNA, 33 bp, Homo sapien
gagtacactaaccagacggatataaacatgagg

SEQ ID NO: 1043242 - DNA, 33 bp, Homo sapien
gagtacactaaccagatggatataaacatgagg

SEQ ID NO: 1043243 - DNA, 33 bp, Homo sapien
tgaaactagaacagaaatggaaagttgcaggac

SEQ ID NO: 1043244 - DNA, 33 bp, Homo sapien
tgaaactagaacagaagtggaaagttgcaggac

SEQ ID NO: 1043245 - DNA, 33 bp, Homo sapien
cgtataaatgtaaaacacttagaattcctggca

SEQ ID NO: 1043246 - DNA, 33 bp, Homo sapien
cgtataaatgtaaaacgcttagaattcctggca

SEQ ID NO: 1043247 - DNA, 33 bp, Homo sapien
tagggcagtagaatctcactttgaagaaatgaa

SEQ ID NO: 1043248 - DNA, 33 bp, Homo sapien
tagggcagtagaatctgactttgaagaaatgaa

SEQ ID NO: 1043249 - DNA, 33 bp, Homo sapien
gtaatgttaggaagtacaataggaggctgtaag

SEQ ID NO: 1043250 - DNA, 33 bp, Homo sapien
gtaatgttaggaagtataataggaggctgtaag

SEQ ID NO: 1043251 - DNA, 33 bp, Homo sapien
aagcatattgttactaacctgcaccttagaacc

SEQ ID NO: 1043252 - DNA, 33 bp, Homo sapien
aagcatattgttactaccctgcaccttagaacc

SEQ ID NO: 1043253 - DNA, 33 bp, Homo sapien
aggacaaagtggtaaactgttaaacagagaggg

SEQ ID NO: 1043254 - DNA, 33 bp, Homo sapien
aggacaaagtggtaaattgttaaacagagaggg

SEQ ID NO: 1043255 - DNA, 33 bp, Homo sapien
tctttcagctaaacaaagtcttacatttttatt

SEQ ID NO: 1043256 - DNA, 33 bp, Homo sapien
tctttcagctaaacaaggtcttacatttttatt

SEQ ID NO: 1043257 - DNA, 33 bp, Homo sapien
tagctttttggcagccacattatgttgttgact

SEQ ID NO: 1043258 - DNA, 33 bp, Homo sapien
tagctttttggcagccgcattatgttgttgact

SEQ ID NO: 1043259 - DNA, 33 bp, Homo sapien
acaacaggataaattgaattgcccacatggctt

SEQ ID NO: 1043260 - DNA, 33 bp, Homo sapien
acaacaggataaattgtattgcccacatggctt

SEQ ID NO: 1043261 - DNA, 33 bp, Homo sapien
tcctatttgccccagaactgtagctaaggccca

SEQ ID NO: 1043262 - DNA, 33 bp, Homo sapien
tcctatttgccccagagctgtagctaaggccca

SEQ ID NO: 1043263 - DNA, 33 bp, Homo sapien
cactgtgggacgtcaccgcacatttaggggcgg

SEQ ID NO: 1043264 - DNA, 33 bp, Homo sapien
cactgtgggacgtcactgcacatttaggggcgg

SEQ ID NO: 1043265 - DNA, 33 bp, Homo sapien
gacatgaagaaacagaactttctgactccaaag

SEQ ID NO: 1043266 - DNA, 33 bp, Homo sapien
gacatgaagaaacagatctttctgactccaaag

SEQ ID NO: 1043267 - DNA, 33 bp, Homo sapien
ggcctgacaatccacaaggaacaaacaaagctg

SEQ ID NO: 1043268 - DNA, 33 bp, Homo sapien
ggcctgacaatccacagggaacaaacaaagctg

SEQ ID NO: 1043269 - DNA, 33 bp, Homo sapien
taaaagacagtgaaaaagaaagatatgtttaaa

SEQ ID NO: 1043270 - DNA, 33 bp, Homo sapien
taaaagacagtgaaaacgaaagatatgtttaaa

SEQ ID NO: 1043271 - DNA, 33 bp, Homo sapien
gctttaggtttttacaactaccataatattttg

SEQ ID NO: 1043272 - DNA, 33 bp, Homo sapien
gctttaggtttttacagctaccataatattttg

SEQ ID NO: 1043273 - DNA, 33 bp, Homo sapien
catcaagaactttccacgaggatgggagattaa

SEQ ID NO: 1043274 - DNA, 33 bp, Homo sapien
catcaagaactttccatgaggatgggagattaa

SEQ ID NO: 1043275 - DNA, 33 bp, Homo sapien
tgatgctattcaactaacaattttctgataaaa

SEQ ID NO: 1043276 - DNA, 33 bp, Homo sapien
tgatgctattcaactagcaattttctgataaaa

SEQ ID NO: 1043277 - DNA, 33 bp, Homo sapien
agccaatggtctagaaaggtgctatccaacaga

SEQ ID NO: 1043278 - DNA, 33 bp, Homo sapien
agccaatggtctagaacggtgctatccaacaga

SEQ ID NO: 1043279 - DNA, 33 bp, Homo sapien
tttcattttccagataaggtagatgaaacttag

SEQ ID NO: 1043280 - DNA, 33 bp, Homo sapien
tttcattttccagatagggtagatgaaacttag

SEQ ID NO: 1043281 - DNA, 33 bp, Homo sapien
gaataactaaaaacacagaagactgcagggaag

SEQ ID NO: 1043282 - DNA, 33 bp, Homo sapien
gaataactaaaaacacggaagactgcagggaag

SEQ ID NO: 1043283 - DNA, 33 bp, Homo sapien
gacggacataacacataaagtcacaacacagac

SEQ ID NO: 1043284 - DNA, 33 bp, Homo sapien
gacggacataacacatgaagtcacaacacagac

SEQ ID NO: 1043285 - DNA, 33 bp, Homo sapien
cactttttcaggaaaacttgtgtctcttgcccg

SEQ ID NO: 1043286 - DNA, 33 bp, Homo sapien
cactttttcaggaaaatttgtgtctcttgcccg

SEQ ID NO: 1043287 - DNA, 33 bp, Homo sapien
agaaggtgtgtccaacacgggtagggctgatga

SEQ ID NO: 1043288 - DNA, 33 bp, Homo sapien
agaaggtgtgtccaacgcgggtagggctgatga

SEQ ID NO: 1043289 - DNA, 33 bp, Homo sapien
gtatatttcagacagaacatctcaatttggatc

SEQ ID NO: 1043290 - DNA, 33 bp, Homo sapien
gtatatttcagacagagcatctcaatttggatc

SEQ ID NO: 1043291 - DNA, 33 bp, Homo sapien
ccagctgacaaacactaagctagatgaccccca

SEQ ID NO: 1043292 - DNA, 33 bp, Homo sapien
ccagctgacaaacactgagctagatgaccccca

SEQ ID NO: 1043293 - DNA, 33 bp, Homo sapien
catgctctgaggaagacgtgaaggcgctggggc

SEQ ID NO: 1043294 - DNA, 33 bp, Homo sapien
catgctctgaggaagatgtgaaggcgctggggc

SEQ ID NO: 1043295 - DNA, 33 bp, Homo sapien
aagtcattagtacaaacgacatccagatgagtg

SEQ ID NO: 1043296 - DNA, 33 bp, Homo sapien
aagtcattagtacaaaggacatccagatgagtg

SEQ ID NO: 1043297 - DNA, 33 bp, Homo sapien
ctggaaccatagtggacagatctcctttctcac

SEQ ID NO: 1043298 - DNA, 33 bp, Homo sapien
ctggaaccatagtggatagatctcctttctcac

SEQ ID NO: 1043299 - DNA, 33 bp, Homo sapien
gaatgttatagcgatccctgtggctaccctggg

SEQ ID NO: 1043300 - DNA, 33 bp, Homo sapien
gaatgttatagcgatctctgtggctaccctggg

SEQ ID NO: 1043301 - DNA, 33 bp, Homo sapien
tatatttagatacacacgtacttacagtgttaa

SEQ ID NO: 1043302 - DNA, 33 bp, Homo sapien
tatatttagatacacaggtacttacagtgttaa

SEQ ID NO: 1043303 - DNA, 33 bp, Homo sapien
gtgaccttggattatccaggaggcccaagtgtc

SEQ ID NO: 1043304 - DNA, 33 bp, Homo sapien
gtgaccttggattatctaggaggcccaagtgtc

SEQ ID NO: 1043305 - DNA, 33 bp, Homo sapien
gccagcactgctatcacggtctggacatcacag

SEQ ID NO: 1043306 - DNA, 33 bp, Homo sapien
gccagcactgctatcatggtctggacatcacag

SEQ ID NO: 1043307 - DNA, 33 bp, Homo sapien
agcctcgagaattacacgtcattatgcatggcc

SEQ ID NO: 1043308 - DNA, 33 bp, Homo sapien
agcctcgagaattacaggtcattatgcatggcc

SEQ ID NO: 1043309 - DNA, 33 bp, Homo sapien
ttcctaaatcgcaaaactgccgagtatcccaca

SEQ ID NO: 1043310 - DNA, 33 bp, Homo sapien
ttcctaaatcgcaaaagtgccgagtatcccaca

SEQ ID NO: 1043311 - DNA, 33 bp, Homo sapien
ggatttttatgtgaaacgacttgatttttagaa

SEQ ID NO: 1043312 - DNA, 33 bp, Homo sapien
ggatttttatgtgaaatgacttgatttttagaa

SEQ ID NO: 1043313 - DNA, 33 bp, Homo sapien
gctttatgaatttagacactgtgtttcatttgc

SEQ ID NO: 1043314 - DNA, 33 bp, Homo sapien
gctttatgaatttagagactgtgtttcatttgc

SEQ ID NO: 1043315 - DNA, 33 bp, Homo sapien
aaagcaggtcctgaaacgtttttgttttgtttt

SEQ ID NO: 1043316 - DNA, 33 bp, Homo sapien
aaagcaggtcctgaaaggtttttgttttgtttt

SEQ ID NO: 1043317 - DNA, 33 bp, Homo sapien
ccacgttcattgcaccacactgtatcccatcgt

SEQ ID NO: 1043318 - DNA, 33 bp, Homo sapien
ccacgttcattgcaccgcactgtatcccatcgt

SEQ ID NO: 1043319 - DNA, 33 bp, Homo sapien
gactactctataatcaagtttgagcaggatata

SEQ ID NO: 1043320 - DNA, 33 bp, Homo sapien
gactactctataatcatgtttgagcaggatata

SEQ ID NO: 1043321 - DNA, 33 bp, Homo sapien
atgcatggctctttacagaagtttgctgacccc

SEQ ID NO: 1043322 - DNA, 33 bp, Homo sapien
atgcatggctctttacggaagtttgctgacccc

SEQ ID NO: 1043323 - DNA, 33 bp, Homo sapien
ttcaggtctttagaaacgtatgtggttcccttg

SEQ ID NO: 1043324 - DNA, 33 bp, Homo sapien
ttcaggtctttagaaatgtatgtggttcccttg

SEQ ID NO: 1043325 - DNA, 33 bp, Homo sapien
gtagttttacaatgctcaaggaatcattagctt

SEQ ID NO: 1043326 - DNA, 33 bp, Homo sapien
gtagttttacaatgctgaaggaatcattagctt

SEQ ID NO: 1043327 - DNA, 33 bp, Homo sapien
gcttttctacaatgtacgggttaaaatctctga

SEQ ID NO: 1043328 - DNA, 33 bp, Homo sapien
gcttttctacaatgtatgggttaaaatctctga

SEQ ID NO: 1043329 - DNA, 33 bp, Homo sapien
ctgccgtacagaaaaaagctgttatcaaaaatt

SEQ ID NO: 1043330 - DNA, 33 bp, Homo sapien
ctgccgtacagaaaaaggctgttatcaaaaatt

SEQ ID NO: 1043331 - DNA, 33 bp, Homo sapien
ggatgctggcacataaaacaagaaaacaaacag

SEQ ID NO: 1043332 - DNA, 33 bp, Homo sapien
ggatgctggcacataagacaagaaaacaaacag

SEQ ID NO: 1043333 - DNA, 33 bp, Homo sapien
caggggacatttcacaaccttgatttttatctc

SEQ ID NO: 1043334 - DNA, 33 bp, Homo sapien
caggggacatttcacatccttgatttttatctc

SEQ ID NO: 1043335 - DNA, 33 bp, Homo sapien
atacaggatacccttagatttggtccccaaaac

SEQ ID NO: 1043336 - DNA, 33 bp, Homo sapien
atacaggatacccttatatttggtccccaaaac

SEQ ID NO: 1043337 - DNA, 33 bp, Homo sapien
aggaaagctgcctaaacccaagttgcctaaaat

SEQ ID NO: 1043338 - DNA, 33 bp, Homo sapien
aggaaagctgcctaaatccaagttgcctaaaat

SEQ ID NO: 1043339 - DNA, 33 bp, Homo sapien
gtgcaggtctgttgtacaggtaaatggcgtgtc

SEQ ID NO: 1043340 - DNA, 33 bp, Homo sapien
gtgcaggtctgttgtataggtaaatggcgtgtc

SEQ ID NO: 1043341 - DNA, 33 bp, Homo sapien
aaatgtgttgaacgaaagcacactgcctctgaa

SEQ ID NO: 1043342 - DNA, 33 bp, Homo sapien
aaatgtgttgaacgaatgcacactgcctctgaa

SEQ ID NO: 1043343 - DNA, 33 bp, Homo sapien
attttatttgacttcagtatgcatttactacac

SEQ ID NO: 1043344 - DNA, 33 bp, Homo sapien
attttatttgacttcattatgcatttactacac

SEQ ID NO: 1043345 - DNA, 33 bp, Homo sapien
gaatcatcgcctctacaagacctcttccccaca

SEQ ID NO: 1043346 - DNA, 33 bp, Homo sapien
gaatcatcgcctctacgagacctcttccccaca

SEQ ID NO: 1043347 - DNA, 33 bp, Homo sapien
gacttctggtctattacatcgtcacaggagaac

SEQ ID NO: 1043348 - DNA, 33 bp, Homo sapien
gacttctggtctattatatcgtcacaggagaac

SEQ ID NO: 1043349 - DNA, 33 bp, Homo sapien
gatgttgctcagctacagaattggaacaggcaa

SEQ ID NO: 1043350 - DNA, 33 bp, Homo sapien
gatgttgctcagctacggaattggaacaggcaa

SEQ ID NO: 1043351 - DNA, 33 bp, Homo sapien
caaagcactttcaagaacatcatctaacttgaa

SEQ ID NO: 1043352 - DNA, 33 bp, Homo sapien
caaagcactttcaagagcatcatctaacttgaa

SEQ ID NO: 1043353 - DNA, 33 bp, Homo sapien
tcagtgttactgggacccctcctaccaactggt

SEQ ID NO: 1043354 - DNA, 33 bp, Homo sapien
tcagtgttactgggactcctcctaccaactggt

SEQ ID NO: 1043355 - DNA, 33 bp, Homo sapien
ttgtcaaaacaatccaaatctatttcaacagct

SEQ ID NO: 1043356 - DNA, 33 bp, Homo sapien
ttgtcaaaacaatccagatctatttcaacagct

SEQ ID NO: 1043357 - DNA, 33 bp, Homo sapien
ggacttattcccagaaacgattgcctcattttc

SEQ ID NO: 1043358 - DNA, 33 bp, Homo sapien
ggacttattcccagaagcgattgcctcattttc

SEQ ID NO: 1043359 - DNA, 33 bp, Homo sapien
agagcaatacagagacaagagattgaacagagt

SEQ ID NO: 1043360 - DNA, 33 bp, Homo sapien
agagcaatacagagacgagagattgaacagagt

SEQ ID NO: 1043361 - DNA, 33 bp, Homo sapien
taacaatttgaaattacgtaaagcacttgaggc

SEQ ID NO: 1043362 - DNA, 33 bp, Homo sapien
taacaatttgaaattatgtaaagcacttgaggc

SEQ ID NO: 1043363 - DNA, 33 bp, Homo sapien
tcttaaacttgagtaacatgcatagtcctttta

SEQ ID NO: 1043364 - DNA, 33 bp, Homo sapien
tcttaaacttgagtaatatgcatagtcctttta

SEQ ID NO: 1043365 - DNA, 33 bp, Homo sapien
ggggaggcctttatatcagttctcagttgttat

SEQ ID NO: 1043366 - DNA, 33 bp, Homo sapien
ggggaggcctttatatgagttctcagttgttat

SEQ ID NO: 1043367 - DNA, 33 bp, Homo sapien
taagtgtatatcacaaaagtatctaatttgaat

SEQ ID NO: 1043368 - DNA, 33 bp, Homo sapien
taagtgtatatcacaagagtatctaatttgaat

SEQ ID NO: 1043369 - DNA, 33 bp, Homo sapien
cagtgctgccccgtcacggtggaacataacaca

SEQ ID NO: 1043370 - DNA, 33 bp, Homo sapien
cagtgctgccccgtcatggtggaacataacaca

SEQ ID NO: 1043371 - DNA, 33 bp, Homo sapien
tcatcttcatattgtgcaccagtttaagctgca

SEQ ID NO: 1043372 - DNA, 33 bp, Homo sapien
tcatcttcatattgtgtaccagtttaagctgca

SEQ ID NO: 1043373 - DNA, 33 bp, Homo sapien
ctccccaactatttacacgacacagaacgaagc

SEQ ID NO: 1043374 - DNA, 33 bp, Homo sapien
ctccccaactatttacgcgacacagaacgaagc

SEQ ID NO: 1043375 - DNA, 33 bp, Homo sapien
tttaactcccttgtagcaatcagaggaacatcc

SEQ ID NO: 1043376 - DNA, 33 bp, Homo sapien
tttaactcccttgtagtaatcagaggaacatcc

SEQ ID NO: 1043377 - DNA, 33 bp, Homo sapien
gagcaatactagtcctcaacatcaagagtccta

SEQ ID NO: 1043378 - DNA, 33 bp, Homo sapien
gagcaatactagtccttaacatcaagagtccta

SEQ ID NO: 1043379 - DNA, 33 bp, Homo sapien
atccaagtgttaaccacggctgactctgcttag

SEQ ID NO: 1043380 - DNA, 33 bp, Homo sapien
atccaagtgttaaccagggctgactctgcttag

SEQ ID NO: 1043381 - DNA, 33 bp, Homo sapien
ttcttggctcatataaataaaatctcagtctaa

SEQ ID NO: 1043382 - DNA, 33 bp, Homo sapien
ttcttggctcatataagtaaaatctcagtctaa

SEQ ID NO: 1043383 - DNA, 33 bp, Homo sapien
cactttcaatctcttacacaaacaaacatttgg

SEQ ID NO: 1043384 - DNA, 33 bp, Homo sapien
cactttcaatctcttatacaaacaaacatttgg

SEQ ID NO: 1043385 - DNA, 33 bp, Homo sapien
aatcagcattgcaaaactagatcctaaaactct

SEQ ID NO: 1043386 - DNA, 33 bp, Homo sapien
aatcagcattgcaaaagtagatcctaaaactct

SEQ ID NO: 1043387 - DNA, 33 bp, Homo sapien
aaagaacaagaccacccagtatataagatgaat

SEQ ID NO: 1043388 - DNA, 33 bp, Homo sapien
aaagaacaagaccacctagtatataagatgaat

SEQ ID NO: 1043389 - DNA, 33 bp, Homo sapien
aaataaaaaatatgtaccaaaactgtgagttct

SEQ ID NO: 1043390 - DNA, 33 bp, Homo sapien
aaataaaaaatatgtagcaaaactgtgagttct

SEQ ID NO: 1043391 - DNA, 33 bp, Homo sapien
aaccatcaggaagcacagtatacatcatgtatc

SEQ ID NO: 1043392 - DNA, 33 bp, Homo sapien
aaccatcaggaagcaccgtatacatcatgtatc

SEQ ID NO: 1043393 - DNA, 33 bp, Homo sapien
tgcacctgagaaactacataaacagccaggtaa

SEQ ID NO: 1043394 - DNA, 33 bp, Homo sapien
tgcacctgagaaactatataaacagccaggtaa

SEQ ID NO: 1043395 - DNA, 33 bp, Homo sapien
accaaaagcaagtccaaactgtatgactccctt

SEQ ID NO: 1043396 - DNA, 33 bp, Homo sapien
accaaaagcaagtccacactgtatgactccctt

SEQ ID NO: 1043397 - DNA, 33 bp, Homo sapien
gagctgtgacaatcgaaagagtagaaaacaatt

SEQ ID NO: 1043398 - DNA, 33 bp, Homo sapien
gagctgtgacaatcgagagagtagaaaacaatt

SEQ ID NO: 1043399 - DNA, 33 bp, Homo sapien
tacataaatggccctacggtatctgctgttgtg

SEQ ID NO: 1043400 - DNA, 33 bp, Homo sapien
tacataaatggccctatggtatctgctgttgtg

SEQ ID NO: 1043401 - DNA, 33 bp, Homo sapien
caccactggcctatgaaaaccttacagttcatc

SEQ ID NO: 1043402 - DNA, 33 bp, Homo sapien
caccactggcctatgataaccttacagttcatc

SEQ ID NO: 1043403 - DNA, 33 bp, Homo sapien
cttgagtttctcaggaacaaggcttgtgtctca

SEQ ID NO: 1043404 - DNA, 33 bp, Homo sapien
cttgagtttctcaggagcaaggcttgtgtctca

SEQ ID NO: 1043405 - DNA, 33 bp, Homo sapien
gccaggaacaatgtgaagaaagacacactgagc

SEQ ID NO: 1043406 - DNA, 33 bp, Homo sapien
gccaggaacaatgtgaggaaagacacactgagc

SEQ ID NO: 1043407 - DNA, 33 bp, Homo sapien
catgtttatctttgtaaactgcagagtctagca

SEQ ID NO: 1043408 - DNA, 33 bp, Homo sapien
catgtttatctttgtatactgcagagtctagca

SEQ ID NO: 1043409 - DNA, 33 bp, Homo sapien
gaataacagaaaaaaactgctgtcatgactgca

SEQ ID NO: 1043410 - DNA, 33 bp, Homo sapien
gaataacagaaaaaaattgctgtcatgactgca

SEQ ID NO: 1043411 - DNA, 33 bp, Homo sapien
aaatcagacagttctgcgtaggcggccaggttt

SEQ ID NO: 1043412 - DNA, 33 bp, Homo sapien
aaatcagacagttctgtgtaggcggccaggttt

SEQ ID NO: 1043413 - DNA, 33 bp, Homo sapien
tgtaacattttatgaagtgcccagaagtctgtg

SEQ ID NO: 1043414 - DNA, 33 bp, Homo sapien
tgtaacattttatgaattgcccagaagtctgtg

SEQ ID NO: 1043415 - DNA, 33 bp, Homo sapien
tcttggatcagctatgcaaaaattatacagtaa

SEQ ID NO: 1043416 - DNA, 33 bp, Homo sapien
tcttggatcagctatgtaaaaattatacagtaa

SEQ ID NO: 1043417 - DNA, 33 bp, Homo sapien
ttcacaatttgtctaccacctgccatcttccaa

SEQ ID NO: 1043418 - DNA, 33 bp, Homo sapien
ttcacaatttgtctactacctgccatcttccaa

SEQ ID NO: 1043419 - DNA, 33 bp, Homo sapien
cttttcgggtgcagggacacgttttgactttct

SEQ ID NO: 1043420 - DNA, 33 bp, Homo sapien
cttttcgggtgcaggggcacgttttgactttct

SEQ ID NO: 1043421 - DNA, 33 bp, Homo sapien
aaccaagaatgtgctcagaaaaaaatccttcct

SEQ ID NO: 1043422 - DNA, 33 bp, Homo sapien
aaccaagaatgtgctcggaaaaaaatccttcct

SEQ ID NO: 1043423 - DNA, 33 bp, Homo sapien
accatcttcactttaggactcaggctgacggag

SEQ ID NO: 1043424 - DNA, 33 bp, Homo sapien
accatcttcactttagtactcaggctgacggag

SEQ ID NO: 1043425 - DNA, 33 bp, Homo sapien
tgtctagttagagtgtaaattgatgcaagatga

SEQ ID NO: 1043426 - DNA, 33 bp, Homo sapien
tgtctagttagagtgtgaattgatgcaagatga

SEQ ID NO: 1043427 - DNA, 33 bp, Homo sapien
actcttgggaagagtcaatttcagggatacttt

SEQ ID NO: 1043428 - DNA, 33 bp, Homo sapien
actcttgggaagagtcgatttcagggatacttt

SEQ ID NO: 1043429 - DNA, 33 bp, Homo sapien
aatatcatcagagccaagcttatttgccaagca

SEQ ID NO: 1043430 - DNA, 33 bp, Homo sapien
aatatcatcagagccaggcttatttgccaagca

SEQ ID NO: 1043431 - DNA, 33 bp, Homo sapien
aatgtcttgtctttgacatctgacttatctgtc

SEQ ID NO: 1043432 - DNA, 33 bp, Homo sapien
aatgtcttgtctttgatatctgacttatctgtc

SEQ ID NO: 1043433 - DNA, 33 bp, Homo sapien
tcagtgtctggtgataagactttctctccctct

SEQ ID NO: 1043434 - DNA, 33 bp, Homo sapien
tcagtgtctggtgataggactttctctccctct

SEQ ID NO: 1043435 - DNA, 33 bp, Homo sapien
tgttcggttatccccgaattggccggccagcct

SEQ ID NO: 1043436 - DNA, 33 bp, Homo sapien
tgttcggttatccccgcattggccggccagcct

SEQ ID NO: 1043437 - DNA, 33 bp, Homo sapien
ttctccaaactgtttacgcttccttgtgcaggc

SEQ ID NO: 1043438 - DNA, 33 bp, Homo sapien
ttctccaaactgtttatgcttccttgtgcaggc

SEQ ID NO: 1043439 - DNA, 33 bp, Homo sapien
tgcagcctgatgcagtcacaggaaagaggactg

SEQ ID NO: 1043440 - DNA, 33 bp, Homo sapien
tgcagcctgatgcagtgacaggaaagaggactg

SEQ ID NO: 1043441 - DNA, 33 bp, Homo sapien
ttccttcctcaaaaccagcgtttcccaaaggca

SEQ ID NO: 1043442 - DNA, 33 bp, Homo sapien
ttccttcctcaaaaccggcgtttcccaaaggca

SEQ ID NO: 1043443 - DNA, 33 bp, Homo sapien
acgtaacactggatcacgaagcagaacctcacc

SEQ ID NO: 1043444 - DNA, 33 bp, Homo sapien
acgtaacactggatcatgaagcagaacctcacc

SEQ ID NO: 1043445 - DNA, 33 bp, Homo sapien
ctgtcctcagacatgcactcccatctcctggtg

SEQ ID NO: 1043446 - DNA, 33 bp, Homo sapien
ctgtcctcagacatgcgctcccatctcctggtg

SEQ ID NO: 1043447 - DNA, 33 bp, Homo sapien
cttgcctctattgatacgtcctcaacgcacaat

SEQ ID NO: 1043448 - DNA, 33 bp, Homo sapien
cttgcctctattgatatgtcctcaacgcacaat

SEQ ID NO: 1043449 - DNA, 33 bp, Homo sapien
agctcaatcacacttacgttgtgccccaagtat

SEQ ID NO: 1043450 - DNA, 33 bp, Homo sapien
agctcaatcacacttatgttgtgccccaagtat

SEQ ID NO: 1043451 - DNA, 33 bp, Homo sapien
gtagaaaacatctaaccgtatggtcagataaat

SEQ ID NO: 1043452 - DNA, 33 bp, Homo sapien
gtagaaaacatctaactgtatggtcagataaat

SEQ ID NO: 1043453 - DNA, 33 bp, Homo sapien
atgacaagtactaggcacactagggtttatcct

SEQ ID NO: 1043454 - DNA, 33 bp, Homo sapien
atgacaagtactaggcgcactagggtttatcct

SEQ ID NO: 1043455 - DNA, 33 bp, Homo sapien
tggccccggctaactacgtccagaagaaaacct

SEQ ID NO: 1043456 - DNA, 33 bp, Homo sapien
tggccccggctaactatgtccagaagaaaacct

SEQ ID NO: 1043457 - DNA, 33 bp, Homo sapien
ggcttcagtccttctacgtcgcactgggcccat

SEQ ID NO: 1043458 - DNA, 33 bp, Homo sapien
ggcttcagtccttctatgtcgcactgggcccat

SEQ ID NO: 1043459 - DNA, 33 bp, Homo sapien
agggagacaggagagcaagtcagggaccttggg

SEQ ID NO: 1043460 - DNA, 33 bp, Homo sapien
agggagacaggagagcgagtcagggaccttggg

SEQ ID NO: 1043461 - DNA, 33 bp, Homo sapien
tcttgtctgattctaacacctatactctttcca

SEQ ID NO: 1043462 - DNA, 33 bp, Homo sapien
tcttgtctgattctaatacctatactctttcca

SEQ ID NO: 1043463 - DNA, 33 bp, Homo sapien
aaaaaagtgagaaaaacgaagtctgacatttta

SEQ ID NO: 1043464 - DNA, 33 bp, Homo sapien
aaaaaagtgagaaaaatgaagtctgacatttta

SEQ ID NO: 1043465 - DNA, 33 bp, Homo sapien
tgagaagtcacttcaacttcccagaatactcag

SEQ ID NO: 1043466 - DNA, 33 bp, Homo sapien
tgagaagtcacttcaagttcccagaatactcag

SEQ ID NO: 1043467 - DNA, 33 bp, Homo sapien
ttcccagaatactcagaagctgaacttgtcaag

SEQ ID NO: 1043468 - DNA, 33 bp, Homo sapien
ttcccagaatactcaggagctgaacttgtcaag

SEQ ID NO: 1043469 - DNA, 33 bp, Homo sapien
agcttgtcggcagtcccaaagccaaattcagtg

SEQ ID NO: 1043470 - DNA, 33 bp, Homo sapien
agcttgtcggcagtcctaaagccaaattcagtg

SEQ ID NO: 1043471 - DNA, 33 bp, Homo sapien
actgtggatcagaaagaatgtttttggctgtaa

SEQ ID NO: 1043472 - DNA, 33 bp, Homo sapien
actgtggatcagaaaggatgtttttggctgtaa

SEQ ID NO: 1043473 - DNA, 33 bp, Homo sapien
aaaagtcgttgacagaggtaaaattgcttcctt

SEQ ID NO: 1043474 - DNA, 33 bp, Homo sapien
aaaagtcgttgacagatgtaaaattgcttcctt

SEQ ID NO: 1043475 - DNA, 33 bp, Homo sapien
ttattgtaaagttcaaaagataactggatttcc

SEQ ID NO: 1043476 - DNA, 33 bp, Homo sapien
ttattgtaaagttcaacagataactggatttcc

SEQ ID NO: 1043477 - DNA, 33 bp, Homo sapien
ttgacaaacacataaggacattcattcaccatt

SEQ ID NO: 1043478 - DNA, 33 bp, Homo sapien
ttgacaaacacataagtacattcattcaccatt

SEQ ID NO: 1043479 - DNA, 33 bp, Homo sapien; identical to SEQ ID NO: 1043477

SEQ ID NO: 1043480 - DNA, 33 bp, Homo sapien; identical to SEQ ID NO: 1043478

SEQ ID NO: 1043481 - DNA, 33 bp, Homo sapien
gcaaaagtcataaaagaaaattctctgcacttt

SEQ ID NO: 1043482 - DNA, 33 bp, Homo sapien
gcaaaagtcataaaaggaaattctctgcacttt

SEQ ID NO: 1043483 - DNA, 33 bp, Homo sapien
aatgtaaatcacaaccacaatgatataacatct

SEQ ID NO: 1043484 - DNA, 33 bp, Homo sapien
aatgtaaatcacaaccgcaatgatataacatct

SEQ ID NO: 1043485 - DNA, 33 bp, Homo sapien
actttcaaatagcagaaatttattctttctcac

SEQ ID NO: 1043486 - DNA, 33 bp, Homo sapien
actttcaaatagcagatatttattctttctcac

SEQ ID NO: 1043487 - DNA, 33 bp, Homo sapien
aagaatctattccacaactctctccttagcttc

SEQ ID NO: 1043488 - DNA, 33 bp, Homo sapien
aagaatctattccacacctctctccttagcttc

SEQ ID NO: 1043489 - DNA, 33 bp, Homo sapien
tctttgcaattttgaaccatctaattctaccta

SEQ ID NO: 1043490 - DNA, 33 bp, Homo sapien
tctttgcaattttgaatcatctaattctaccta

SEQ ID NO: 1043491 - DNA, 33 bp, Homo sapien
atgtttattcaaaaacccaaaactctgaaaact

SEQ ID NO: 1043492 - DNA, 33 bp, Homo sapien
atgtttattcaaaaactcaaaactctgaaaact

SEQ ID NO: 1043493 - DNA, 33 bp, Homo sapien
aaggacataaataaaccaacagccaacagacag

SEQ ID NO: 1043494 - DNA, 33 bp, Homo sapien
aaggacataaataaactaacagccaacagacag

SEQ ID NO: 1043495 - DNA, 33 bp, Homo sapien
aactggaactgaacttaaaaggagcctaaggta

SEQ ID NO: 1043496 - DNA, 33 bp, Homo sapien
aactggaactgaacttgaaaggagcctaaggta

SEQ ID NO: 1043497 - DNA, 33 bp, Homo sapien
aatagaaaaacagtccaaaaatttatttattta

SEQ ID NO: 1043498 - DNA, 33 bp, Homo sapien
aatagaaaaacagtccgaaaatttatttattta

SEQ ID NO: 1043499 - DNA, 33 bp, Homo sapien
tctccaagtaattctaaggtacagccaagtttg

SEQ ID NO: 1043500 - DNA, 33 bp, Homo sapien
tctccaagtaattctagggtacagccaagtttg

SEQ ID NO: 1043501 - DNA, 33 bp, Homo sapien
atatcttgctgccaaacgcttcccttagcaccc

SEQ ID NO: 1043502 - DNA, 33 bp, Homo sapien
atatcttgctgccaaatgcttcccttagcaccc

SEQ ID NO: 1043503 - DNA, 33 bp, Homo sapien
ttctctggcttgacctaaaacattttgaaggaa

SEQ ID NO: 1043504 - DNA, 33 bp, Homo sapien
ttctctggcttgacctcaaacattttgaaggaa

SEQ ID NO: 1043505 - DNA, 33 bp, Homo sapien
acatgtcaaaactccacagtcacctttctctgt

SEQ ID NO: 1043506 - DNA, 33 bp, Homo sapien
acatgtcaaaactccatagtcacctttctctgt

SEQ ID NO: 1043507 - DNA, 33 bp, Homo sapien
tgttttgacagtggaaaaagagacagtcaagga

SEQ ID NO: 1043508 - DNA, 33 bp, Homo sapien
tgttttgacagtggaacaagagacagtcaagga

SEQ ID NO: 1043509 - DNA, 33 bp, Homo sapien
cagaaccacatccttccagttgatcctgcctcc

SEQ ID NO: 1043510 - DNA, 33 bp, Homo sapien
cagaaccacatccttctagttgatcctgcctcc

SEQ ID NO: 1043511 - DNA, 33 bp, Homo sapien
cacaatcaaatagatgaacatatacatatgtct

SEQ ID NO: 1043512 - DNA, 33 bp, Homo sapien
cacaatcaaatagatgcacatatacatatgtct

SEQ ID NO: 1043513 - DNA, 33 bp, Homo sapien
ttaggagaaagagcctcagcatattagaccttt

SEQ ID NO: 1043514 - DNA, 33 bp, Homo sapien
ttaggagaaagagccttagcatattagaccttt

SEQ ID NO: 1043515 - DNA, 33 bp, Homo sapien
ccctggaactctcttacgcaactgagggctgag

SEQ ID NO: 1043516 - DNA, 33 bp, Homo sapien
ccctggaactctcttaggcaactgagggctgag

SEQ ID NO: 1043517 - DNA, 33 bp, Homo sapien
catcagggccaggtaccggacaactaggggcca

SEQ ID NO: 1043518 - DNA, 33 bp, Homo sapien
catcagggccaggtacgggacaactaggggcca

SEQ ID NO: 1043519 - DNA, 33 bp, Homo sapien
tccctgatgtaagcgccaatgtttccaaccgtg

SEQ ID NO: 1043520 - DNA, 33 bp, Homo sapien
tccctgatgtaagcgctaatgtttccaaccgtg

SEQ ID NO: 1043521 - DNA, 33 bp, Homo sapien
cagagtgttaaagtaactggcctaaggtgtaca

SEQ ID NO: 1043522 - DNA, 33 bp, Homo sapien
cagagtgttaaagtaagtggcctaaggtgtaca

SEQ ID NO: 1043523 - DNA, 33 bp, Homo sapien
gtaacttcaagagtataaaatgaggctggccac

SEQ ID NO: 1043524 - DNA, 33 bp, Homo sapien
gtaacttcaagagtatcaaatgaggctggccac

SEQ ID NO: 1043525 - DNA, 33 bp, Homo sapien
agaggtagaaagtgcccgatgtagtcaaagaag

SEQ ID NO: 1043526 - DNA, 33 bp, Homo sapien
agaggtagaaagtgcctgatgtagtcaaagaag

SEQ ID NO: 1043527 - DNA, 33 bp, Homo sapien
gcgtttggaaatggcaagaaaacggctaaacac

SEQ ID NO: 1043528 - DNA, 33 bp, Homo sapien
gcgtttggaaatggcaggaaaacggctaaacac

SEQ ID NO: 1043529 - DNA, 33 bp, Homo sapien
gagctatgggaacaaaacctagctctgcaaatg

SEQ ID NO: 1043530 - DNA, 33 bp, Homo sapien
gagctatgggaacaaatcctagctctgcaaatg

SEQ ID NO: 1043531 - DNA, 33 bp, Homo sapien
cccctttctctgacccaaggcttcagggcttat

SEQ ID NO: 1043532 - DNA, 33 bp, Homo sapien
cccctttctctgacccgaggcttcagggcttat

SEQ ID NO: 1043533 - DNA, 33 bp, Homo sapien
tgctgttcctcatctccaatgtgggaaaaaatg

SEQ ID NO: 1043534 - DNA, 33 bp, Homo sapien
tgctgttcctcatctctaatgtgggaaaaaatg

SEQ ID NO: 1043535 - DNA, 33 bp, Homo sapien
tggatttgtgaagggaactggaagaaaaatgac

SEQ ID NO: 1043536 - DNA, 33 bp, Homo sapien
tggatttgtgaagggacctggaagaaaaatgac

SEQ ID NO: 1043537 - DNA, 33 bp, Homo sapien
ctgcttgtaagacttgaaaaaccactggagaat

SEQ ID NO: 1043538 - DNA, 33 bp, Homo sapien
ctgcttgtaagacttgcaaaaccactggagaat

SEQ ID NO: 1043539 - DNA, 33 bp, Homo sapien
ctgaggctagctctaacggcagataatgctccc

SEQ ID NO: 1043540 - DNA, 33 bp, Homo sapien
ctgaggctagctctaatggcagataatgctccc

SEQ ID NO: 1043541 - DNA, 33 bp, Homo sapien
cagtctctcattgttcaaggtatcatctggagt

SEQ ID NO: 1043542 - DNA, 33 bp, Homo sapien
cagtctctcattgttcgaggtatcatctggagt

SEQ ID NO: 1043543 - DNA, 33 bp, Homo sapien
ctataccttacctaatgattaaaggctgtacat

SEQ ID NO: 1043544 - DNA, 33 bp, Homo sapien
ctataccttacctaattattaaaggctgtacat

SEQ ID NO: 1043545 - DNA, 33 bp, Homo sapien
gcacccttcacccacactgatgctcctttacct

SEQ ID NO: 1043546 - DNA, 33 bp, Homo sapien
gcacccttcacccacattgatgctcctttacct

SEQ ID NO: 1043547 - DNA, 33 bp, Homo sapien
gaaattaaggtcgatacagttctgttgtcttcc

SEQ ID NO: 1043548 - DNA, 33 bp, Homo sapien
gaaattaaggtcgatatagttctgttgtcttcc

SEQ ID NO: 1043549 - DNA, 33 bp, Homo sapien
aggagtccctcctctaagattcctctctgctcc

SEQ ID NO: 1043550 - DNA, 33 bp, Homo sapien
aggagtccctcctctacgattcctctctgctcc

SEQ ID NO: 1043551 - DNA, 33 bp, Homo sapien
ctggtggaggaaacagcaggaataaagggcata

SEQ ID NO: 1043552 - DNA, 33 bp, Homo sapien
ctggtggaggaaacaggaggaataaagggcata

SEQ ID NO: 1043553 - DNA, 33 bp, Homo sapien
tgtcctgaaacatccccgagaggtccaagtctt

SEQ ID NO: 1043554 - DNA, 33 bp, Homo sapien
tgtcctgaaacatccctgagaggtccaagtctt

SEQ ID NO: 1043555 - DNA, 33 bp, Homo sapien
gcagagattctctcaacacccccaaatctccaa

SEQ ID NO: 1043556 - DNA, 33 bp, Homo sapien
gcagagattctctcaatacccccaaatctccaa

SEQ ID NO: 1043557 - DNA, 33 bp, Homo sapien
aatctgcgcctaaaataaaagtttgcaaaaata

SEQ ID NO: 1043558 - DNA, 33 bp, Homo sapien
aatctgcgcctaaaatgaaagtttgcaaaaata

SEQ ID NO: 1043559 - DNA, 33 bp, Homo sapien
aactctgctgtggtgaagataagtttgagaaat

SEQ ID NO: 1043560 - DNA, 33 bp, Homo sapien
aactctgctgtggtgacgataagtttgagaaat

SEQ ID NO: 1043561 - DNA, 33 bp, Homo sapien
cccccacatgtatcctcaatctgtttacttttc

SEQ ID NO: 1043562 - DNA, 33 bp, Homo sapien
cccccacatgtatcctgaatctgtttacttttc

SEQ ID NO: 1043563 - DNA, 33 bp, Homo sapien
aagcccttacttcagacagttattgtgcagatg

SEQ ID NO: 1043564 - DNA, 33 bp, Homo sapien
aagcccttacttcagatagttattgtgcagatg

SEQ ID NO: 1043565 - DNA, 33 bp, Homo sapien
cctggggctccagcgacgcagtaactcagctcc

SEQ ID NO: 1043566 - DNA, 33 bp, Homo sapien
cctggggctccagcgatgcagtaactcagctcc

SEQ ID NO: 1043567 - DNA, 33 bp, Homo sapien
ttccttgcaccttgcaccttcaggaggggagct

SEQ ID NO: 1043568 - DNA, 33 bp, Homo sapien
ttccttgcaccttgcatcttcaggaggggagct

SEQ ID NO: 1043569 - DNA, 33 bp, Homo sapien
ggaagtgtctcctacacgccaacttctgagctt

SEQ ID NO: 1043570 - DNA, 33 bp, Homo sapien
ggaagtgtctcctacatgccaacttctgagctt

SEQ ID NO: 1043571 - DNA, 33 bp, Homo sapien
aaacccagtcctactccgaacttcagtttccgt

SEQ ID NO: 1043572 - DNA, 33 bp, Homo sapien
aaacccagtcctactctgaacttcagtttccgt

SEQ ID NO: 1043573 - DNA, 33 bp, Homo sapien
aataatgtatgctacaacacaaagcatttatat

SEQ ID NO: 1043574 - DNA, 33 bp, Homo sapien
aataatgtatgctacagcacaaagcatttatat

SEQ ID NO: 1043575 - DNA, 33 bp, Homo sapien
ggtttgggaactttcactctgagctacttgatt

SEQ ID NO: 1043576 - DNA, 33 bp, Homo sapien
ggtttgggaactttcattctgagctacttgatt

SEQ ID NO: 1043577 - DNA, 33 bp, Homo sapien
gtgaaattatttgccgcaattcaatttggtaat

SEQ ID NO: 1043578 - DNA, 33 bp, Homo sapien
gtgaaattatttgccgtaattcaatttggtaat

SEQ ID NO: 1043579 - DNA, 33 bp, Homo sapien
tccattgaatttggccagacacaatgactcatg

SEQ ID NO: 1043580 - DNA, 33 bp, Homo sapien
tccattgaatttggccggacacaatgactcatg

SEQ ID NO: 1043581 - DNA, 33 bp, Homo sapien
aatctctggggtctacaagagggggatcttgcc

SEQ ID NO: 1043582 - DNA, 33 bp, Homo sapien
aatctctggggtctacgagagggggatcttgcc

SEQ ID NO: 1043583 - DNA, 33 bp, Homo sapien
cgtgtcacagcgaggaacccggcttggcaatct

SEQ ID NO: 1043584 - DNA, 33 bp, Homo sapien
cgtgtcacagcgaggaccccggcttggcaatct

SEQ ID NO: 1043585 - DNA, 33 bp, Homo sapien
ctcaaaaccttaacccacctggtcaatatggca

SEQ ID NO: 1043586 - DNA, 33 bp, Homo sapien
ctcaaaaccttaacccgcctggtcaatatggca

SEQ ID NO: 1043587 - DNA, 33 bp, Homo sapien
acctggctgactcgcactcactcttcctttcca

SEQ ID NO: 1043588 - DNA, 33 bp, Homo sapien
acctggctgactcgcattcactcttcctttcca

SEQ ID NO: 1043589 - DNA, 33 bp, Homo sapien
gaggagctctcttggcaattaatgattaacaga

SEQ ID NO: 1043590 - DNA, 33 bp, Homo sapien
gaggagctctcttggcgattaatgattaacaga

SEQ ID NO: 1043591 - DNA, 33 bp, Homo sapien
atggcatttgttggcacagggcccggcttccca

SEQ ID NO: 1043592 - DNA, 33 bp, Homo sapien
atggcatttgttggcatagggcccggcttccca

SEQ ID NO: 1043593 - DNA, 33 bp, Homo sapien
aggggctgccacagcaaatatagccagcccccg

SEQ ID NO: 1043594 - DNA, 33 bp, Homo sapien
aggggctgccacagcagatatagccagcccccg

SEQ ID NO: 1043595 - DNA, 33 bp, Homo sapien
tccttcctttgattcccagtggtctgccagggg

SEQ ID NO: 1043596 - DNA, 33 bp, Homo sapien
tccttcctttgattcctagtggtctgccagggg

SEQ ID NO: 1043597 - DNA, 33 bp, Homo sapien
tataaatgaaaactatcaagtagcataatatga

SEQ ID NO: 1043598 - DNA, 33 bp, Homo sapien
tataaatgaaaactatgaagtagcataatatga

SEQ ID NO: 1043599 - DNA, 33 bp, Homo sapien
ccacctcctgagcttacagaccattggaactcg

SEQ ID NO: 1043600 - DNA, 33 bp, Homo sapien
ccacctcctgagcttagagaccattggaactcg

SEQ ID NO: 1043601 - DNA, 33 bp, Homo sapien
gtgtggagtgagacgggaatgcccagacaaaca

SEQ ID NO: 1043602 - DNA, 33 bp, Homo sapien
gtgtggagtgagacggtaatgcccagacaaaca

SEQ ID NO: 1043603 - DNA, 33 bp, Homo sapien
cacattcctttctccacggagctcaggtctgta

SEQ ID NO: 1043604 - DNA, 33 bp, Homo sapien
cacattcctttctccagggagctcaggtctgta

SEQ ID NO: 1043605 - DNA, 33 bp, Homo sapien
agatgggagccattgcaccaaggtaggcgtggt

SEQ ID NO: 1043606 - DNA, 33 bp, Homo sapien
agatgggagccattgcgccaaggtaggcgtggt

SEQ ID NO: 1043607 - DNA, 33 bp, Homo sapien
gtttgcgttgtcgtcacgtcttcttaatcagcc

SEQ ID NO: 1043608 - DNA, 33 bp, Homo sapien
gtttgcgttgtcgtcatgtcttcttaatcagcc

SEQ ID NO: 1043609 - DNA, 33 bp, Homo sapien
ctggtcaggaaggaaacgcataggaacgtgagt

SEQ ID NO: 1043610 - DNA, 33 bp, Homo sapien
ctggtcaggaaggaaatgcataggaacgtgagt

SEQ ID NO: 1043611 - DNA, 33 bp, Homo sapien
tttgttacaccagaaaataaggaatgatcaaaa

SEQ ID NO: 1043612 - DNA, 33 bp, Homo sapien
tttgttacaccagaaagtaaggaatgatcaaaa

SEQ ID NO: 1043613 - DNA, 33 bp, Homo sapien
accacctggggccaccaacttgcaagcaaatga

SEQ ID NO: 1043614 - DNA, 33 bp, Homo sapien
accacctggggccaccgacttgcaagcaaatga

SEQ ID NO: 1043615 - DNA, 33 bp, Homo sapien
cggttctttacatacactacgacgtgatcccca

SEQ ID NO: 1043616 - DNA, 33 bp, Homo sapien
cggttctttacatacattacgacgtgatcccca

SEQ ID NO: 1043617 - DNA, 33 bp, Homo sapien
ctttggtagaaaatggaaaaattacgatgtttt

SEQ ID NO: 1043618 - DNA, 33 bp, Homo sapien
ctttggtagaaaatggcaaaattacgatgtttt

SEQ ID NO: 1043619 - DNA, 33 bp, Homo sapien
ttttgtaaacgaaggcactgctcaaacgtagtg

SEQ ID NO: 1043620 - DNA, 33 bp, Homo sapien
ttttgtaaacgaaggcgctgctcaaacgtagtg

SEQ ID NO: 1043621 - DNA, 33 bp, Homo sapien
actgaacgcaaaatcaaaccaatcacttctctg

SEQ ID NO: 1043622 - DNA, 33 bp, Homo sapien
actgaacgcaaaatcagaccaatcacttctctg

SEQ ID NO: 1043623 - DNA, 33 bp, Homo sapien
atctgcctcctgtcaccgctccaaatggcaggc

SEQ ID NO: 1043624 - DNA, 33 bp, Homo sapien
atctgcctcctgtcactgctccaaatggcaggc

SEQ ID NO: 1043625 - DNA, 33 bp, Homo sapien
cactgggtatgggtgacgatccagtccaaatgg

SEQ ID NO: 1043626 - DNA, 33 bp, Homo sapien
cactgggtatgggtgatgatccagtccaaatgg

SEQ ID NO: 1043627 - DNA, 33 bp, Homo sapien
cacacaagggataatgacaaatgggaaatcaaa

SEQ ID NO: 1043628 - DNA, 33 bp, Homo sapien
cacacaagggataatggcaaatgggaaatcaaa

SEQ ID NO: 1043629 - DNA, 33 bp, Homo sapien
gcttcaggtctcagcaacttgaaaaaccattcg

SEQ ID NO: 1043630 - DNA, 33 bp, Homo sapien
gcttcaggtctcagcagcttgaaaaaccattcg

SEQ ID NO: 1043631 - DNA, 33 bp, Homo sapien
ctcccatctccttgaacgtcacaaccatctgcc

SEQ ID NO: 1043632 - DNA, 33 bp, Homo sapien
ctcccatctccttgaatgtcacaaccatctgcc

SEQ ID NO: 1043633 - DNA, 33 bp, Homo sapien
aaaaccacgctggagacgaataaatctgccagc

SEQ ID NO: 1043634 - DNA, 33 bp, Homo sapien
aaaaccacgctggagaggaataaatctgccagc

SEQ ID NO: 1043635 - DNA, 33 bp, Homo sapien
ctaagacctagacccacgttgagcctattccca

SEQ ID NO: 1043636 - DNA, 33 bp, Homo sapien
ctaagacctagacccatgttgagcctattccca

SEQ ID NO: 1043637 - DNA, 33 bp, Homo sapien
acgcctagcacaaaacagccacattgtttagga

SEQ ID NO: 1043638 - DNA, 33 bp, Homo sapien
acgcctagcacaaaacggccacattgtttagga

SEQ ID NO: 1043639 - DNA, 33 bp, Homo sapien
ctagggctgcctaaaaagttacctcaaactgcg

SEQ ID NO: 1043640 - DNA, 33 bp, Homo sapien
ctagggctgcctaaaatgttacctcaaactgcg

SEQ ID NO: 1043641 - DNA, 33 bp, Homo sapien
gagttattgtttgataaggacagagtttcagtg

SEQ ID NO: 1043642 - DNA, 33 bp, Homo sapien
gagttattgtttgatagggacagagtttcagtg

SEQ ID NO: 1043643 - DNA, 33 bp, Homo sapien
aggcagacttttattcaaaaccacctccatcat

SEQ ID NO: 1043644 - DNA, 33 bp, Homo sapien
aggcagacttttattctaaaccacctccatcat

SEQ ID NO: 1043645 - DNA, 33 bp, Homo sapien
ctctttacaggtttcaatatcactaagaagggt

SEQ ID NO: 1043646 - DNA, 33 bp, Homo sapien
ctctttacaggtttcagtatcactaagaagggt

SEQ ID NO: 1043647 - DNA, 33 bp, Homo sapien
ccagaatgatatccccccagaagtcttctctgc

SEQ ID NO: 1043648 - DNA, 33 bp, Homo sapien
ccagaatgatatcccctcagaagtcttctctgc

SEQ ID NO: 1043649 - DNA, 33 bp, Homo sapien
cacaagacccctgcacagagtgagcacaaaaaa

SEQ ID NO: 1043650 - DNA, 33 bp, Homo sapien
cacaagacccctgcacggagtgagcacaaaaaa

SEQ ID NO: 1043651 - DNA, 33 bp, Homo sapien
gattacctgctgcagacagaagaaatggctcac

SEQ ID NO: 1043652 - DNA, 33 bp, Homo sapien
gattacctgctgcagagagaagaaatggctcac

SEQ ID NO: 1043653 - DNA, 33 bp, Homo sapien
gtgccaaactcagcgcaaggaaatttgcattaa

SEQ ID NO: 1043654 - DNA, 33 bp, Homo sapien
gtgccaaactcagcgcgaggaaatttgcattaa

SEQ ID NO: 1043655 - DNA, 33 bp, Homo sapien
cccatttgtcaaacaccgaagcgctgggtaatg

SEQ ID NO: 1043656 - DNA, 33 bp, Homo sapien
cccatttgtcaaacactgaagcgctgggtaatg

SEQ ID NO: 1043657 - DNA, 33 bp, Homo sapien
tctttacaggctcggaagtaatttagtctgtgg

SEQ ID NO: 1043658 - DNA, 33 bp, Homo sapien
tctttacaggctcggatgtaatttagtctgtgg

SEQ ID NO: 1043659 - DNA, 33 bp, Homo sapien
gcaagaaagttggcaacggaaatgctcatataa

SEQ ID NO: 1043660 - DNA, 33 bp, Homo sapien
gcaagaaagttggcaatggaaatgctcatataa

SEQ ID NO: 1043661 - DNA, 33 bp, Homo sapien
gtggtcatgtttagctcaatttatacatagaaa

SEQ ID NO: 1043662 - DNA, 33 bp, Homo sapien
gtggtcatgtttagctgaatttatacatagaaa

SEQ ID NO: 1043663 - DNA, 33 bp, Homo sapien
gcttttggaggatggaaggagattgtaaattga

SEQ ID NO: 1043664 - DNA, 33 bp, Homo sapien
gcttttggaggatggacggagattgtaaattga

SEQ ID NO: 1043665 - DNA, 33 bp, Homo sapien
ttacaagggacacttaggtatttgtctttatct

SEQ ID NO: 1043666 - DNA, 33 bp, Homo sapien
ttacaagggacacttatgtatttgtctttatct

SEQ ID NO: 1043667 - DNA, 33 bp, Homo sapien
gctggaaggaggctaacgcttcagtttgttttc

SEQ ID NO: 1043668 - DNA, 33 bp, Homo sapien
gctggaaggaggctaaggcttcagtttgttttc

SEQ ID NO: 1043669 - DNA, 33 bp, Homo sapien
cagatctctggggacactcgttccacaagtagc

SEQ ID NO: 1043670 - DNA, 33 bp, Homo sapien
cagatctctggggacagtcgttccacaagtagc

SEQ ID NO: 1043671 - DNA, 33 bp, Homo sapien
tcaccacatttgccaccgaaatcacttggtgta

SEQ ID NO: 1043672 - DNA, 33 bp, Homo sapien
tcaccacatttgccactgaaatcacttggtgta

SEQ ID NO: 1043673 - DNA, 33 bp, Homo sapien
ggtccccatgtgcggactagacactgtctacac

SEQ ID NO: 1043674 - DNA, 33 bp, Homo sapien
ggtccccatgtgcggattagacactgtctacac

SEQ ID NO: 1043675 - DNA, 33 bp, Homo sapien
ggctgtgggacagttacgagttttgggggatgt

SEQ ID NO: 1043676 - DNA, 33 bp, Homo sapien
ggctgtgggacagttatgagttttgggggatgt

SEQ ID NO: 1043677 - DNA, 33 bp, Homo sapien
ctccagtgagtgaataaccataatgagtgcatt

SEQ ID NO: 1043678 - DNA, 33 bp, Homo sapien
ctccagtgagtgaatatccataatgagtgcatt

SEQ ID NO: 1043679 - DNA, 33 bp, Homo sapien
tcagaaattcatcaacagaagcctatttgtcag

SEQ ID NO: 1043680 - DNA, 33 bp, Homo sapien
tcagaaattcatcaacggaagcctatttgtcag

SEQ ID NO: 1043681 - DNA, 33 bp, Homo sapien
cagtgtcatataaggaacccgttcaaaaccacc

SEQ ID NO: 1043682 - DNA, 33 bp, Homo sapien
cagtgtcatataaggaccccgttcaaaaccacc

SEQ ID NO: 1043683 - DNA, 33 bp, Homo sapien
taatcagtgcattgtacagtaatgggtgcctag

SEQ ID NO: 1043684 - DNA, 33 bp, Homo sapien
taatcagtgcattgtatagtaatgggtgcctag

SEQ ID NO: 1043685 - DNA, 33 bp, Homo sapien
atgagagtcctctggaaaatcgaaagtccttgt

SEQ ID NO: 1043686 - DNA, 33 bp, Homo sapien
atgagagtcctctggagaatcgaaagtccttgt

SEQ ID NO: 1043687 - DNA, 33 bp, Homo sapien
gttccaaactacatcccaacagcagtggttcgt

SEQ ID NO: 1043688 - DNA, 33 bp, Homo sapien
gttccaaactacatcctaacagcagtggttcgt

SEQ ID NO: 1043689 - DNA, 33 bp, Homo sapien
ccactatctcgcagtacacatggatcaggaatt

SEQ ID NO: 1043690 - DNA, 33 bp, Homo sapien
ccactatctcgcagtatacatggatcaggaatt

SEQ ID NO: 1043691 - DNA, 33 bp, Homo sapien
taaagggccaagtgtacgaatgctttggttgaa

SEQ ID NO: 1043692 - DNA, 33 bp, Homo sapien
taaagggccaagtgtatgaatgctttggttgaa

SEQ ID NO: 1043693 - DNA, 33 bp, Homo sapien
tgtagtggaaagatgacgggatgtagaccctat

SEQ ID NO: 1043694 - DNA, 33 bp, Homo sapien
tgtagtggaaagatgatgggatgtagaccctat

SEQ ID NO: 1043695 - DNA, 33 bp, Homo sapien
cctccttcccaatctacgctatcctctccaaca

SEQ ID NO: 1043696 - DNA, 33 bp, Homo sapien
cctccttcccaatctatgctatcctctccaaca

SEQ ID NO: 1043697 - DNA, 33 bp, Homo sapien
tgtggcctatggtagtaaacttgtaagactgca

SEQ ID NO: 1043698 - DNA, 33 bp, Homo sapien
tgtggcctatggtagtgaacttgtaagactgca

SEQ ID NO: 1043699 - DNA, 33 bp, Homo sapien
taagtacctcctacgcaccaaagggtctcagga

SEQ ID NO: 1043700 - DNA, 33 bp, Homo sapien
taagtacctcctacgcgccaaagggtctcagga

SEQ ID NO: 1043701 - DNA, 33 bp, Homo sapien
aaagtgctattaacccaatgataaagattatga

SEQ ID NO: 1043702 - DNA, 33 bp, Homo sapien
aaagtgctattaacccgatgataaagattatga

SEQ ID NO: 1043703 - DNA, 33 bp, Homo sapien
cacatggtaagcaatcagagtcacctgccatca

SEQ ID NO: 1043704 - DNA, 33 bp, Homo sapien
cacatggtaagcaatcggagtcacctgccatca

SEQ ID NO: 1043705 - DNA, 33 bp, Homo sapien
cctgcaaattatcaacagtaatctcccagttct

SEQ ID NO: 1043706 - DNA, 33 bp, Homo sapien
cctgcaaattatcaaccgtaatctcccagttct

SEQ ID NO: 1043707 - DNA, 33 bp, Homo sapien
cagaaatgcctgcaaggacttataaagcattta

SEQ ID NO: 1043708 - DNA, 33 bp, Homo sapien
cagaaatgcctgcaagtacttataaagcattta

SEQ ID NO: 1043709 - DNA, 33 bp, Homo sapien
gcctccaaaataaaaactgttcctctgcccaag

SEQ ID NO: 1043710 - DNA, 33 bp, Homo sapien
gcctccaaaataaaaagtgttcctctgcccaag

SEQ ID NO: 1043711 - DNA, 33 bp, Homo sapien
cccagtgcttccagagaccctttcatgaagttg

SEQ ID NO: 1043712 - DNA, 33 bp, Homo sapien
cccagtgcttccagagcccctttcatgaagttg

SEQ ID NO: 1043713 - DNA, 33 bp, Homo sapien
gaaattgaaagtaaccgcactctcctaacaaca

SEQ ID NO: 1043714 - DNA, 33 bp, Homo sapien
gaaattgaaagtaacctcactctcctaacaaca

SEQ ID NO: 1043715 - DNA, 33 bp, Homo sapien
ggtggtgggttgttgccgacctggcctatcttt

SEQ ID NO: 1043716 - DNA, 33 bp, Homo sapien
ggtggtgggttgttgctgacctggcctatcttt

SEQ ID NO: 1043717 - DNA, 33 bp, Homo sapien
catgctgaggacaggacgttcaggctcctggga

SEQ ID NO: 1043718 - DNA, 33 bp, Homo sapien
catgctgaggacaggatgttcaggctcctggga

SEQ ID NO: 1043719 - DNA, 33 bp, Homo sapien
gtggaatcagactgaccgaatttgaactcaggc

SEQ ID NO: 1043720 - DNA, 33 bp, Homo sapien
gtggaatcagactgactgaatttgaactcaggc

SEQ ID NO: 1043721 - DNA, 33 bp, Homo sapien
acaacccagaactccacactgagccccgaatta

SEQ ID NO: 1043722 - DNA, 33 bp, Homo sapien
acaacccagaactccagactgagccccgaatta

SEQ ID NO: 1043723 - DNA, 33 bp, Homo sapien
catctctgagcttttgcataccctactccttca

SEQ ID NO: 1043724 - DNA, 33 bp, Homo sapien
catctctgagcttttggataccctactccttca

SEQ ID NO: 1043725 - DNA, 33 bp, Homo sapien
ctgcacagaggaggcactcagcgcttggacaga

SEQ ID NO: 1043726 - DNA, 33 bp, Homo sapien
ctgcacagaggaggcattcagcgcttggacaga

SEQ ID NO: 1043727 - DNA, 33 bp, Homo sapien
ggggacacatgtcctacccctcagcaggcaggg

SEQ ID NO: 1043728 - DNA, 33 bp, Homo sapien
ggggacacatgtcctatccctcagcaggcaggg

SEQ ID NO: 1043729 - DNA, 33 bp, Homo sapien
acaggcccagacagggaagcgacttggtcagat

SEQ ID NO: 1043730 - DNA, 33 bp, Homo sapien
acaggcccagacaggggagcgacttggtcagat

SEQ ID NO: 1043731 - DNA, 33 bp, Homo sapien
tcactgaagcatatcaaggaccaacaagagtgc

SEQ ID NO: 1043732 - DNA, 33 bp, Homo sapien
tcactgaagcatatcagggaccaacaagagtgc

SEQ ID NO: 1043733 - DNA, 33 bp, Homo sapien
gtctcacaattccgacactccatgagttagttc

SEQ ID NO: 1043734 - DNA, 33 bp, Homo sapien
gtctcacaattccgacgctccatgagttagttc

SEQ ID NO: 1043735 - DNA, 33 bp, Homo sapien
cacctagttggtgcaaagcaatgtatagtcatc

SEQ ID NO: 1043736 - DNA, 33 bp, Homo sapien
cacctagttggtgcaaggcaatgtatagtcatc

SEQ ID NO: 1043737 - DNA, 33 bp, Homo sapien
atcttgtcacggaatccacaaaaccaccccaga

SEQ ID NO: 1043738 - DNA, 33 bp, Homo sapien
atcttgtcacggaatctacaaaaccaccccaga

SEQ ID NO: 1043739 - DNA, 33 bp, Homo sapien
attggatgattggtaacggaagcatgaggagag

SEQ ID NO: 1043740 - DNA, 33 bp, Homo sapien
attggatgattggtaatggaagcatgaggagag

SEQ ID NO: 1043741 - DNA, 33 bp, Homo sapien
ggaacttggagtaaaccgaagagtcaaagatgc

SEQ ID NO: 1043742 - DNA, 33 bp, Homo sapien
ggaacttggagtaaacggaagagtcaaagatgc

SEQ ID NO: 1043743 - DNA, 33 bp, Homo sapien
aaaaagcactgtgtgaactgccatggccgcttc

SEQ ID NO: 1043744 - DNA, 33 bp, Homo sapien
aaaaagcactgtgtgatctgccatggccgcttc

SEQ ID NO: 1043745 - DNA, 33 bp, Homo sapien
aatctgtaaccatcaacgcgcctcctggtgtct

SEQ ID NO: 1043746 - DNA, 33 bp, Homo sapien
aatctgtaaccatcaatgcgcctcctggtgtct

SEQ ID NO: 1043747 - DNA, 33 bp, Homo sapien
ggaagtgtgaaagctaaagtggagagaggcaag

SEQ ID NO: 1043748 - DNA, 33 bp, Homo sapien
ggaagtgtgaaagctacagtggagagaggcaag

SEQ ID NO: 1043749 - DNA, 33 bp, Homo sapien
cctatcttagttttgacaccaccatctgttgaa

SEQ ID NO: 1043750 - DNA, 33 bp, Homo sapien
cctatcttagttttgataccaccatctgttgaa

SEQ ID NO: 1043751 - DNA, 33 bp, Homo sapien
agcggcagagcataaactccttgttgggcttat

SEQ ID NO: 1043752 - DNA, 33 bp, Homo sapien
agcggcagagcataaattccttgttgggcttat

SEQ ID NO: 1043753 - DNA, 33 bp, Homo sapien
aatgtggaaatcttataaaaatgaaggtataca

SEQ ID NO: 1043754 - DNA, 33 bp, Homo sapien
aatgtggaaatcttatcaaaatgaaggtataca

SEQ ID NO: 1043755 - DNA, 33 bp, Homo sapien
tggtagatactcaatcaattttttttaatttag

SEQ ID NO: 1043756 - DNA, 33 bp, Homo sapien
tggtagatactcaatcgattttttttaatttag

SEQ ID NO: 1043757 - DNA, 33 bp, Homo sapien
ttgggcacatctctacactctctgggcctacta

SEQ ID NO: 1043758 - DNA, 33 bp, Homo sapien
ttgggcacatctctacgctctctgggcctacta

SEQ ID NO: 1043759 - DNA, 33 bp, Homo sapien
gggaggtagcatgataaagaggacctcagagag

SEQ ID NO: 1043760 - DNA, 33 bp, Homo sapien
gggaggtagcatgatacagaggacctcagagag

SEQ ID NO: 1043761 - DNA, 33 bp, Homo sapien
tgcaaatcactcctcccgaattagttatgatgg

SEQ ID NO: 1043762 - DNA, 33 bp, Homo sapien
tgcaaatcactcctcctgaattagttatgatgg

SEQ ID NO: 1043763 - DNA, 33 bp, Homo sapien
cattagccagtacatacggggttaggtttagga

SEQ ID NO: 1043764 - DNA, 33 bp, Homo sapien
cattagccagtacatatggggttaggtttagga

SEQ ID NO: 1043765 - DNA, 33 bp, Homo sapien
atgagctaacagtatgaaaggagacaaagggca

SEQ ID NO: 1043766 - DNA, 33 bp, Homo sapien
atgagctaacagtatgcaaggagacaaagggca

SEQ ID NO: 1043767 - DNA, 33 bp, Homo sapien
ctttgtacatgcaacaatctatgacattttctt

SEQ ID NO: 1043768 - DNA, 33 bp, Homo sapien
ctttgtacatgcaacattctatgacattttctt

SEQ ID NO: 1043769 - DNA, 33 bp, Homo sapien
agggaccacgtgactacgtctgattcatcactg

SEQ ID NO: 1043770 - DNA, 33 bp, Homo sapien
agggaccacgtgactatgtctgattcatcactg

SEQ ID NO: 1043771 - DNA, 33 bp, Homo sapien
cgcacacatctcttcacgcttatgctggtgtga

SEQ ID NO: 1043772 - DNA, 33 bp, Homo sapien
cgcacacatctcttcatgcttatgctggtgtga

SEQ ID NO: 1043773 - DNA, 33 bp, Homo sapien
agcttgggcactggaactctgtcactagcccac

SEQ ID NO: 1043774 - DNA, 33 bp, Homo sapien
agcttgggcactggaattctgtcactagcccac

SEQ ID NO: 1043775 - DNA, 33 bp, Homo sapien
tatactgtaattgttagcaccttgcttaggcct

SEQ ID NO: 1043776 - DNA, 33 bp, Homo sapien
tatactgtaattgttatcaccttgcttaggcct

SEQ ID NO: 1043777 - DNA, 33 bp, Homo sapien
aatgtctctggggttacgttccttccaggagga

SEQ ID NO: 1043778 - DNA, 33 bp, Homo sapien
aatgtctctggggttatgttccttccaggagga

SEQ ID NO: 1043779 - DNA, 33 bp, Homo sapien
tggccacactccttcacagatacgtggagaatg

SEQ ID NO: 1043780 - DNA, 33 bp, Homo sapien
tggccacactccttcatagatacgtggagaatg

SEQ ID NO: 1043781 - DNA, 33 bp, Homo sapien
gttttagcccaagtccaccttcctgctgtggtt

SEQ ID NO: 1043782 - DNA, 33 bp, Homo sapien
gttttagcccaagtccgccttcctgctgtggtt

SEQ ID NO: 1043783 - DNA, 33 bp, Homo sapien
ctgctgctgacacagccagttccctgaagttca

SEQ ID NO: 1043784 - DNA, 33 bp, Homo sapien
ctgctgctgacacagctagttccctgaagttca

SEQ ID NO: 1043785 - DNA, 33 bp, Homo sapien
ataaccagttctgggcaagtaacattcctgatc

SEQ ID NO: 1043786 - DNA, 33 bp, Homo sapien
ataaccagttctgggcgagtaacattcctgatc

SEQ ID NO: 1043787 - DNA, 33 bp, Homo sapien
ggcagctcttcctatgaatgtgacagtctcagc

SEQ ID NO: 1043788 - DNA, 33 bp, Homo sapien
ggcagctcttcctatggatgtgacagtctcagc

SEQ ID NO: 1043789 - DNA, 33 bp, Homo sapien
tgttctgagcatcaaacgaggtaactgaaaatc

SEQ ID NO: 1043790 - DNA, 33 bp, Homo sapien
tgttctgagcatcaaatgaggtaactgaaaatc

SEQ ID NO: 1043791 - DNA, 33 bp, Homo sapien
gtcacaccgcttgcaacgataggaaccctagcg

SEQ ID NO: 1043792 - DNA, 33 bp, Homo sapien
gtcacaccgcttgcaatgataggaaccctagcg

SEQ ID NO: 1043793 - DNA, 33 bp, Homo sapien
gcctagtgtcacaaagccagtaagtgcttatct

SEQ ID NO: 1043794 - DNA, 33 bp, Homo sapien
gcctagtgtcacaaagtcagtaagtgcttatct

SEQ ID NO: 1043795 - DNA, 33 bp, Homo sapien
cctttactggcatcaaagtacacaaaaatagcc

SEQ ID NO: 1043796 - DNA, 33 bp, Homo sapien
cctttactggcatcaaggtacacaaaaatagcc

SEQ ID NO: 1043797 - DNA, 33 bp, Homo sapien
aagttgcaatgtgaaaacgggtgaggtgtatgc

SEQ ID NO: 1043798 - DNA, 33 bp, Homo sapien
aagttgcaatgtgaaagcgggtgaggtgtatgc

SEQ ID NO: 1043799 - DNA, 33 bp, Homo sapien
gccagtacgatcttcacggtcttctttcctggg

SEQ ID NO: 1043800 - DNA, 33 bp, Homo sapien
gccagtacgatcttcatggtcttctttcctggg

SEQ ID NO: 1043801 - DNA, 33 bp, Homo sapien
ttctctgcattaataccagaattttagaaaaca

SEQ ID NO: 1043802 - DNA, 33 bp, Homo sapien
ttctctgcattaatacgagaattttagaaaaca

SEQ ID NO: 1043803 - DNA, 33 bp, Homo sapien
atcttaataaacaagacacagagctgcagaata

SEQ ID NO: 1043804 - DNA, 33 bp, Homo sapien
atcttaataaacaagagacagagctgcagaata

SEQ ID NO: 1043805 - DNA, 33 bp, Homo sapien
tttgaaatctctaccacgagagactaaacacag

SEQ ID NO: 1043806 - DNA, 33 bp, Homo sapien
tttgaaatctctaccatgagagactaaacacag

SEQ ID NO: 1043807 - DNA, 33 bp, Homo sapien
aagataagtcaaccaacagatttagggatgtgt

SEQ ID NO: 1043808 - DNA, 33 bp, Homo sapien
aagataagtcaaccaatagatttagggatgtgt

SEQ ID NO: 1043809 - DNA, 33 bp, Homo sapien
gttccagaatttactacggcaatccctccaact

SEQ ID NO: 1043810 - DNA, 33 bp, Homo sapien
gttccagaatttactatggcaatccctccaact

SEQ ID NO: 1043811 - DNA, 33 bp, Homo sapien
acaaaaacaaaaacaaattcagatggatgtggt

SEQ ID NO: 1043812 - DNA, 33 bp, Homo sapien
acaaaaacaaaaacaagttcagatggatgtggt

SEQ ID NO: 1043813 - DNA, 33 bp, Homo sapien
ctatgcatctgtccaacacaaaaataccaaaca

SEQ ID NO: 1043814 - DNA, 33 bp, Homo sapien
ctatgcatctgtccaatacaaaaataccaaaca

SEQ ID NO: 1043815 - DNA, 33 bp, Homo sapien
tctcagactcactcatcagtctccaagttcact

SEQ ID NO: 1043816 - DNA, 33 bp, Homo sapien
tctcagactcactcattagtctccaagttcact

SEQ ID NO: 1043817 - DNA, 33 bp, Homo sapien
tgcacctagtaactgcacctttagcaagtcaca

SEQ ID NO: 1043818 - DNA, 33 bp, Homo sapien
tgcacctagtaactgcgcctttagcaagtcaca

SEQ ID NO: 1043819 - DNA, 33 bp, Homo sapien
aaccgcgttttgtgaactctggtagtctaaagg

SEQ ID NO: 1043820 - DNA, 33 bp, Homo sapien
aaccgcgttttgtgaattctggtagtctaaagg

SEQ ID NO: 1043821 - DNA, 33 bp, Homo sapien
ctagtacataacaggccctcaataagtatttct

SEQ ID NO: 1043822 - DNA, 33 bp, Homo sapien
ctagtacataacaggcgctcaataagtatttct

SEQ ID NO: 1043823 - DNA, 33 bp, Homo sapien
agagcctggcacatacacattctcagaacattc

SEQ ID NO: 1043824 - DNA, 33 bp, Homo sapien
agagcctggcacatacgcattctcagaacattc

SEQ ID NO: 1043825 - DNA, 33 bp, Homo sapien
ggatatagagtttttacgctgaaatgtaaaact

SEQ ID NO: 1043826 - DNA, 33 bp, Homo sapien
ggatatagagtttttatgctgaaatgtaaaact

SEQ ID NO: 1043827 - DNA, 33 bp, Homo sapien
tgaagatttgttgggaaaagctcctgtgaagga

SEQ ID NO: 1043828 - DNA, 33 bp, Homo sapien
tgaagatttgttgggagaagctcctgtgaagga

SEQ ID NO: 1043829 - DNA, 33 bp, Homo sapien
atttttcctctctgaacgcaaggttgtcaggtg

SEQ ID NO: 1043830 - DNA, 33 bp, Homo sapien
atttttcctctctgaatgcaaggttgtcaggtg

SEQ ID NO: 1043831 - DNA, 33 bp, Homo sapien
ttcattcacattatcaacattgtctgagtctct

SEQ ID NO: 1043832 - DNA, 33 bp, Homo sapien
ttcattcacattatcaccattgtctgagtctct

SEQ ID NO: 1043833 - DNA, 33 bp, Homo sapien
gatgcagagagagacacgtggatgcacaaaaat

SEQ ID NO: 1043834 - DNA, 33 bp, Homo sapien
gatgcagagagagacatgtggatgcacaaaaat

SEQ ID NO: 1043835 - DNA, 33 bp, Homo sapien
aaaaattcagggacccaagctactgccatcatg

SEQ ID NO: 1043836 - DNA, 33 bp, Homo sapien
aaaaattcagggacccgagctactgccatcatg

SEQ ID NO: 1043837 - DNA, 33 bp, Homo sapien
gtattgccaactgaggaagtgcatctgagctca

SEQ ID NO: 1043838 - DNA, 33 bp, Homo sapien
gtattgccaactgagggagtgcatctgagctca

SEQ ID NO: 1043839 - DNA, 33 bp, Homo sapien
catggtcagaagagggacatttcctctacttca

SEQ ID NO: 1043840 - DNA, 33 bp, Homo sapien
catggtcagaagaggggcatttcctctacttca

SEQ ID NO: 1043841 - DNA, 33 bp, Homo sapien
cttgaggcacatgggcagcaaatgtgcaaggca

SEQ ID NO: 1043842 - DNA, 33 bp, Homo sapien
cttgaggcacatgggcggcaaatgtgcaaggca

SEQ ID NO: 1043843 - DNA, 33 bp, Homo sapien
ggttgaggttgttatccagggacagaggtagct

SEQ ID NO: 1043844 - DNA, 33 bp, Homo sapien
ggttgaggttgttatctagggacagaggtagct

SEQ ID NO: 1043845 - DNA, 33 bp, Homo sapien
gcttgtttaaggtcacactatggaagaagtgac

SEQ ID NO: 1043846 - DNA, 33 bp, Homo sapien
gcttgtttaaggtcacgctatggaagaagtgac

SEQ ID NO: 1043847 - DNA, 33 bp, Homo sapien
ggatctaggaaagaacaaatgactggtggagtg

SEQ ID NO: 1043848 - DNA, 33 bp, Homo sapien
ggatctaggaaagaacgaatgactggtggagtg

SEQ ID NO: 1043849 - DNA, 33 bp, Homo sapien
caaaaggagtccctcaacttccaggccctcaac

SEQ ID NO: 1043850 - DNA, 33 bp, Homo sapien
caaaaggagtccctcatcttccaggccctcaac

SEQ ID NO: 1043851 - DNA, 33 bp, Homo sapien
tgatttaaacaaaagccctcatagaatgaacat

SEQ ID NO: 1043852 - DNA, 33 bp, Homo sapien
tgatttaaacaaaagcgctcatagaatgaacat

SEQ ID NO: 1043853 - DNA, 33 bp, Homo sapien
tggctagtggctaccacattggatcgtacaaat

SEQ ID NO: 1043854 - DNA, 33 bp, Homo sapien
tggctagtggctaccatattggatcgtacaaat

SEQ ID NO: 1043855 - DNA, 33 bp, Homo sapien
agtcattcttacgctccatcactaggctcagca

SEQ ID NO: 1043856 - DNA, 33 bp, Homo sapien
agtcattcttacgctcgatcactaggctcagca

SEQ ID NO: 1043857 - DNA, 33 bp, Homo sapien
ctctccatctctaccaccactacctcaagcaac

SEQ ID NO: 1043858 - DNA, 33 bp, Homo sapien
ctctccatctctaccatcactacctcaagcaac

SEQ ID NO: 1043859 - DNA, 33 bp, Homo sapien
atagagcctaattcaccggagccatgaagagcc

SEQ ID NO: 1043860 - DNA, 33 bp, Homo sapien
atagagcctaattcactggagccatgaagagcc

SEQ ID NO: 1043861 - DNA, 33 bp, Homo sapien
cagggtaatcatacccagctcatgaggttgtag

SEQ ID NO: 1043862 - DNA, 33 bp, Homo sapien
cagggtaatcatacccggctcatgaggttgtag

SEQ ID NO: 1043863 - DNA, 33 bp, Homo sapien
agagaggtgaagtgaactctccagggacactca

SEQ ID NO: 1043864 - DNA, 33 bp, Homo sapien
agagaggtgaagtgaattctccagggacactca

SEQ ID NO: 1043865 - DNA, 33 bp, Homo sapien
gattttggtggcaaccagacctcaagtctccat

SEQ ID NO: 1043866 - DNA, 33 bp, Homo sapien
gattttggtggcaacccgacctcaagtctccat

SEQ ID NO: 1043867 - DNA, 33 bp, Homo sapien
gaatactaagtgtagacgcgagggggaatccct

SEQ ID NO: 1043868 - DNA, 33 bp, Homo sapien
gaatactaagtgtagatgcgagggggaatccct

SEQ ID NO: 1043869 - DNA, 33 bp, Homo sapien
tctgtagctccaggtcaatttccaaaagccaat

SEQ ID NO: 1043870 - DNA, 33 bp, Homo sapien
tctgtagctccaggtcgatttccaaaagccaat

SEQ ID NO: 1043871 - DNA, 33 bp, Homo sapien
cttgtgccaggtacgacgccggggcttttcacg

SEQ ID NO: 1043872 - DNA, 33 bp, Homo sapien
cttgtgccaggtacgatgccggggcttttcacg

SEQ ID NO: 1043873 - DNA, 33 bp, Homo sapien
tccccagtgccaaccaggccaaattctagggca

SEQ ID NO: 1043874 - DNA, 33 bp, Homo sapien
tccccagtgccaaccatgccaaattctagggca

SEQ ID NO: 1043875 - DNA, 33 bp, Homo sapien
tgccaaaccagaaaatgagcatttaagaccatc

SEQ ID NO: 1043876 - DNA, 33 bp, Homo sapien
tgccaaaccagaaaattagcatttaagaccatc

SEQ ID NO: 1043877 - DNA, 33 bp, Homo sapien
caagattctggaatgcaaaataagaacccccta

SEQ ID NO: 1043878 - DNA, 33 bp, Homo sapien
caagattctggaatgccaaataagaacccccta

SEQ ID NO: 1043879 - DNA, 33 bp, Homo sapien
tcactgaacaggaaaaggaatcaaatccacatt

SEQ ID NO: 1043880 - DNA, 33 bp, Homo sapien
tcactgaacaggaaaatgaatcaaatccacatt

SEQ ID NO: 1043881 - DNA, 33 bp, Homo sapien
taatgtaaagttgatcattttaaacaccttaca

SEQ ID NO: 1043882 - DNA, 33 bp, Homo sapien
taatgtaaagttgatcgttttaaacaccttaca

SEQ ID NO: 1043883 - DNA, 33 bp, Homo sapien
acattcaaatgacttacgttccaggaattttct

SEQ ID NO: 1043884 - DNA, 33 bp, Homo sapien
acattcaaatgacttatgttccaggaattttct

SEQ ID NO: 1043885 - DNA, 33 bp, Homo sapien
caagattgcatgattgcactctagcatgggcga

SEQ ID NO: 1043886 - DNA, 33 bp, Homo sapien
caagattgcatgattgtactctagcatgggcga

SEQ ID NO: 1043887 - DNA, 33 bp, Homo sapien
ggtttgcatggaaaagacattagcattgtcatc

SEQ ID NO: 1043888 - DNA, 33 bp, Homo sapien
ggtttgcatggaaaaggcattagcattgtcatc

SEQ ID NO: 1043889 - DNA, 33 bp, Homo sapien; identical to SEQ ID NO: 1043887

SEQ ID NO: 1043890 - DNA, 33 bp, Homo sapien; identical to SEQ ID NO: 1043888

SEQ ID NO: 1043891 - DNA, 33 bp, Homo sapien
aatcaattaatcagagcccttttatataaatat

SEQ ID NO: 1043892 - DNA, 33 bp, Homo sapien
aatcaattaatcagaggccttttatataaatat

SEQ ID NO: 1043893 - DNA, 33 bp, Homo sapien
cttcttcacacctctacgtttttgtaggttatt

SEQ ID NO: 1043894 - DNA, 33 bp, Homo sapien
cttcttcacacctctatgtttttgtaggttatt

SEQ ID NO: 1043895 - DNA, 33 bp, Homo sapien
cattctcaacttagcactccaggcagctactct

SEQ ID NO: 1043896 - DNA, 33 bp, Homo sapien
cattctcaacttagcagtccaggcagctactct

SEQ ID NO: 1043897 - DNA, 33 bp, Homo sapien
cccagagatccaaagaactcattgaaacccaag

SEQ ID NO: 1043898 - DNA, 33 bp, Homo sapien
cccagagatccaaagagctcattgaaacccaag

SEQ ID NO: 1043899 - DNA, 33 bp, Homo sapien
catttggtaaatggaggacaatagaaaatggta

SEQ ID NO: 1043900 - DNA, 33 bp, Homo sapien
catttggtaaatggagtacaatagaaaatggta

SEQ ID NO: 1043901 - DNA, 33 bp, Homo sapien
tggctgaaggctaaggaaagatcaggagaatta

SEQ ID NO: 1043902 - DNA, 33 bp, Homo sapien
tggctgaaggctaagggaagatcaggagaatta

SEQ ID NO: 1043903 - DNA, 33 bp, Homo sapien
acctgaagagggatcacatcacaggattctgca

SEQ ID NO: 1043904 - DNA, 33 bp, Homo sapien
acctgaagagggatcatatcacaggattctgca

SEQ ID NO: 1043905 - DNA, 33 bp, Homo sapien; identical to SEQ ID NO: 1043903

SEQ ID NO: 1043906 - DNA, 33 bp, Homo sapien; identical to SEQ ID NO: 1043904

SEQ ID NO: 1043907 - DNA, 33 bp, Homo sapien
gttagtaaaagctgagaaaaaagaagaaggagg

SEQ ID NO: 1043908 - DNA, 33 bp, Homo sapien
gttagtaaaagctgaggaaaaagaagaaggagg

SEQ ID NO: 1043909 - DNA, 33 bp, Homo sapien
ttgacaattaagatagcagcagagaaataaagc

SEQ ID NO: 1043910 - DNA, 33 bp, Homo sapien
ttgacaattaagatagtagcagagaaataaagc

SEQ ID NO: 1043911 - DNA, 33 bp, Homo sapien
gctcatcctgaagaggcaagagtgaaggcaaaa

SEQ ID NO: 1043912 - DNA, 33 bp, Homo sapien
gctcatcctgaagaggtaagagtgaaggcaaaa

SEQ ID NO: 1043913 - DNA, 33 bp, Homo sapien
gaatgtcctcttaaaaaatcaactaaggcaacc

SEQ ID NO: 1043914 - DNA, 33 bp, Homo sapien
gaatgtcctcttaaaacatcaactaaggcaacc

SEQ ID NO: 1043915 - DNA, 33 bp, Homo sapien
tctgaaaggtgttgaacgtaattaacttgtccc

SEQ ID NO: 1043916 - DNA, 33 bp, Homo sapien
tctgaaaggtgttgaatgtaattaacttgtccc

SEQ ID NO: 1043917 - DNA, 33 bp, Homo sapien
gtcttcaaaatatgaagaggcctaccaaatgct

SEQ ID NO: 1043918 - DNA, 33 bp, Homo sapien
gtcttcaaaatatgaataggcctaccaaatgct

SEQ ID NO: 1043919 - DNA, 33 bp, Homo sapien
gtttcttcctcgtctacatgcacttataaactc

SEQ ID NO: 1043920 - DNA, 33 bp, Homo sapien
gtttcttcctcgtctatatgcacttataaactc

SEQ ID NO: 1043921 - DNA, 33 bp, Homo sapien
ctaaaaattctcaaaggattcccattgaccttt

SEQ ID NO: 1043922 - DNA, 33 bp, Homo sapien
ctaaaaattctcaaagtattcccattgaccttt

SEQ ID NO: 1043923 - DNA, 33 bp, Homo sapien
aaagtagccttgatccaacagctcacaaaagag

SEQ ID NO: 1043924 - DNA, 33 bp, Homo sapien
aaagtagccttgatccgacagctcacaaaagag

SEQ ID NO: 1043925 - DNA, 33 bp, Homo sapien
tgtagtacaccatggaatactacgaaggcatca

SEQ ID NO: 1043926 - DNA, 33 bp, Homo sapien
tgtagtacaccatggactactacgaaggcatca

SEQ ID NO: 1043927 - DNA, 33 bp, Homo sapien
catgattcattttttacccgtctaagagggcat

SEQ ID NO: 1043928 - DNA, 33 bp, Homo sapien
catgattcattttttatccgtctaagagggcat

SEQ ID NO: 1043929 - DNA, 33 bp, Homo sapien
aagctttgttctaaacccaatgaggtgcttcac

SEQ ID NO: 1043930 - DNA, 33 bp, Homo sapien
aagctttgttctaaactcaatgaggtgcttcac

SEQ ID NO: 1043931 - DNA, 33 bp, Homo sapien
tgctgttgctctggagacgctgatattcctcgg

SEQ ID NO: 1043932 - DNA, 33 bp, Homo sapien
tgctgttgctctggaggcgctgatattcctcgg

SEQ ID NO: 1043933 - DNA, 33 bp, Homo sapien
ctatgtcttggaggaaaatacggtatgaaaacc

SEQ ID NO: 1043934 - DNA, 33 bp, Homo sapien
ctatgtcttggaggaagatacggtatgaaaacc

SEQ ID NO: 1043935 - DNA, 33 bp, Homo sapien
acttcagaatacaaacagtgctttagtaaagct

SEQ ID NO: 1043936 - DNA, 33 bp, Homo sapien
acttcagaatacaaactgtgctttagtaaagct

SEQ ID NO: 1043937 - DNA, 33 bp, Homo sapien
acttggactgtagcctcagatccctcagaaaag

SEQ ID NO: 1043938 - DNA, 33 bp, Homo sapien
acttggactgtagccttagatccctcagaaaag

SEQ ID NO: 1043939 - DNA, 33 bp, Homo sapien
ttaaaaaatttggcccaggatgaacttgatctc

SEQ ID NO: 1043940 - DNA, 33 bp, Homo sapien
ttaaaaaatttggccccggatgaacttgatctc

SEQ ID NO: 1043941 - DNA, 33 bp, Homo sapien
aataatgagacaactaaggaaaccagacaagac

SEQ ID NO: 1043942 - DNA, 33 bp, Homo sapien
aataatgagacaactagggaaaccagacaagac

SEQ ID NO: 1043943 - DNA, 33 bp, Homo sapien
atctgggcagcccagacgagtaagtttccctcc

SEQ ID NO: 1043944 - DNA, 33 bp, Homo sapien
atctgggcagcccagatgagtaagtttccctcc

SEQ ID NO: 1043945 - DNA, 33 bp, Homo sapien
tcctcagaactagcaggaggaaaaactaagtct

SEQ ID NO: 1043946 - DNA, 33 bp, Homo sapien
tcctcagaactagcagtaggaaaaactaagtct

SEQ ID NO: 1043947 - DNA, 33 bp, Homo sapien
gatcgagtggacacaccgtaagttggatctgag

SEQ ID NO: 1043948 - DNA, 33 bp, Homo sapien
gatcgagtggacacactgtaagttggatctgag

SEQ ID NO: 1043949 - DNA, 33 bp, Homo sapien
gttacatgttgacacccatgagaatacacacag

SEQ ID NO: 1043950 - DNA, 33 bp, Homo sapien
gttacatgttgacacctatgagaatacacacag

SEQ ID NO: 1043951 - DNA, 33 bp, Homo sapien
agcctgagtttaggagcccagtcattgttcttg

SEQ ID NO: 1043952 - DNA, 33 bp, Homo sapien
agcctgagtttaggagtccagtcattgttcttg

SEQ ID NO: 1043953 - DNA, 33 bp, Homo sapien
atcactgaaaacacccaaggcattggaataata

SEQ ID NO: 1043954 - DNA, 33 bp, Homo sapien
atcactgaaaacacccgaggcattggaataata

SEQ ID NO: 1043955 - DNA, 33 bp, Homo sapien
gcatatctaaaaacacaattttggcacgtttac

SEQ ID NO: 1043956 - DNA, 33 bp, Homo sapien
gcatatctaaaaacacgattttggcacgtttac

SEQ ID NO: 1043957 - DNA, 33 bp, Homo sapien
agcaatgcagagaaaacgagtcaccaaaacaat

SEQ ID NO: 1043958 - DNA, 33 bp, Homo sapien
agcaatgcagagaaaaggagtcaccaaaacaat

SEQ ID NO: 1043959 - DNA, 33 bp, Homo sapien
cattgacaaatatggaagagcaggacaatttca

SEQ ID NO: 1043960 - DNA, 33 bp, Homo sapien
cattgacaaatatggacgagcaggacaatttca

SEQ ID NO: 1043961 - DNA, 33 bp, Homo sapien
cagtagctaattgtgaccaaacagaagaaacaa

SEQ ID NO: 1043962 - DNA, 33 bp, Homo sapien
cagtagctaattgtgatcaaacagaagaaacaa

SEQ ID NO: 1043963 - DNA, 33 bp, Homo sapien
atagtgcttttcacagaataggaaatactgagt

SEQ ID NO: 1043964 - DNA, 33 bp, Homo sapien
atagtgcttttcacaggataggaaatactgagt

SEQ ID NO: 1043965 - DNA, 33 bp, Homo sapien
ttgactgcgttcaacagtcgtcttagatttgcc

SEQ ID NO: 1043966 - DNA, 33 bp, Homo sapien
ttgactgcgttcaacattcgtcttagatttgcc

SEQ ID NO: 1043967 - DNA, 33 bp, Homo sapien
atatcagataagggacaatgacgctgaggtggc

SEQ ID NO: 1043968 - DNA, 33 bp, Homo sapien
atatcagataagggacgatgacgctgaggtggc

SEQ ID NO: 1043969 - DNA, 33 bp, Homo sapien
gatggtgggatttgaaagcttgaacactaatga

SEQ ID NO: 1043970 - DNA, 33 bp, Homo sapien
gatggtgggatttgaaggcttgaacactaatga

SEQ ID NO: 1043971 - DNA, 33 bp, Homo sapien
aaccacagattaggaaagaaacagggagttaag

SEQ ID NO: 1043972 - DNA, 33 bp, Homo sapien
aaccacagattaggaaggaaacagggagttaag

SEQ ID NO: 1043973 - DNA, 33 bp, Homo sapien
cttcactgcaatatcccaagggaatgcttctct

SEQ ID NO: 1043974 - DNA, 33 bp, Homo sapien
cttcactgcaatatccgaagggaatgcttctct

SEQ ID NO: 1043975 - DNA, 33 bp, Homo sapien
gttgctgttatcacaaaaaagtaactgtgagat

SEQ ID NO: 1043976 - DNA, 33 bp, Homo sapien
gttgctgttatcacaagaaagtaactgtgagat

SEQ ID NO: 1043977 - DNA, 33 bp, Homo sapien
ttaatctattcatacactggtgccttaaattta

SEQ ID NO: 1043978 - DNA, 33 bp, Homo sapien
ttaatctattcatacattggtgccttaaattta

SEQ ID NO: 1043979 - DNA, 33 bp, Homo sapien
cacagactatcccaacaatttttgtatgtggag

SEQ ID NO: 1043980 - DNA, 33 bp, Homo sapien
cacagactatcccaacgatttttgtatgtggag

SEQ ID NO: 1043981 - DNA, 33 bp, Homo sapien; identical to SEQ ID NO: 1043979

SEQ ID NO: 1043982 - DNA, 33 bp, Homo sapien; identical to SEQ ID NO: 1043980

SEQ ID NO: 1043983 - DNA, 33 bp, Homo sapien
taataaaaaagtgcaacgaacatgaacaggcaa

SEQ ID NO: 1043984 - DNA, 33 bp, Homo sapien
taataaaaaagtgcaatgaacatgaacaggcaa

SEQ ID NO: 1043985 - DNA, 33 bp, Homo sapien
aatttaaatggtggtccagaagccaatatggag

SEQ ID NO: 1043986 - DNA, 33 bp, Homo sapien
aatttaaatggtggtctagaagccaatatggag

SEQ ID NO: 1043987 - DNA, 33 bp, Homo sapien
gaggctggaagtagacacaaatgatggtgccgt

SEQ ID NO: 1043988 - DNA, 33 bp, Homo sapien
gaggctggaagtagacccaaatgatggtgccgt

SEQ ID NO: 1043989 - DNA, 33 bp, Homo sapien
tggtgattcattaccaaagcatagtgcaggggg

SEQ ID NO: 1043990 - DNA, 33 bp, Homo sapien
tggtgattcattaccagagcatagtgcaggggg

SEQ ID NO: 1043991 - DNA, 33 bp, Homo sapien
ataacaacagatataaagttgtaaaacatgcaa

SEQ ID NO: 1043992 - DNA, 33 bp, Homo sapien
ataacaacagatataaggttgtaaaacatgcaa

SEQ ID NO: 1043993 - DNA, 33 bp, Homo sapien
tttaaaatctccaatacgattgattcatggtga

SEQ ID NO: 1043994 - DNA, 33 bp, Homo sapien
tttaaaatctccaatatgattgattcatggtga

SEQ ID NO: 1043995 - DNA, 33 bp, Homo sapien
atatcttcagaggtcactgaaatgaaaaacaaa

SEQ ID NO: 1043996 - DNA, 33 bp, Homo sapien
atatcttcagaggtcattgaaatgaaaaacaaa

SEQ ID NO: 1043997 - DNA, 33 bp, Homo sapien
ctcccagtgttagaagcagtcccttgctagaca

SEQ ID NO: 1043998 - DNA, 33 bp, Homo sapien
ctcccagtgttagaagtagtcccttgctagaca

SEQ ID NO: 1043999 - DNA, 33 bp, Homo sapien
tccctcattttttagtaaaaccttatttgagtg

SEQ ID NO: 1044000 - DNA, 33 bp, Homo sapien
tccctcattttttagtgaaaccttatttgagtg

SEQ ID NO: 1044001 - DNA, 33 bp, Homo sapien
ggcggctatggccatcaaccgctgtgtagccat

SEQ ID NO: 1044002 - DNA, 33 bp, Homo sapien
ggcggctatggccatcgaccgctgtgtagccat

SEQ ID NO: 1044003 - DNA, 33 bp, Homo sapien
attctgagcaaaaaaactagacagatagaggag

SEQ ID NO: 1044004 - DNA, 33 bp, Homo sapien
attctgagcaaaaaaattagacagatagaggag

SEQ ID NO: 1044005 - DNA, 33 bp, Homo sapien
gtacttcttcccatgaaattgctaagagaaatg

SEQ ID NO: 1044006 - DNA, 33 bp, Homo sapien
gtacttcttcccatgagattgctaagagaaatg

SEQ ID NO: 1044007 - DNA, 33 bp, Homo sapien
gcttggtgctagcagaaatcaccaattggtcac

SEQ ID NO: 1044008 - DNA, 33 bp, Homo sapien
gcttggtgctagcagagatcaccaattggtcac

SEQ ID NO: 1044009 - DNA, 33 bp, Homo sapien
tctcttggggactcacaggtggatgagatgacc

SEQ ID NO: 1044010 - DNA, 33 bp, Homo sapien
tctcttggggactcacgggtggatgagatgacc

SEQ ID NO: 1044011 - DNA, 33 bp, Homo sapien
tgaaaggattccaatacgtaggagcgaaggata

SEQ ID NO: 1044012 - DNA, 33 bp, Homo sapien
tgaaaggattccaatatgtaggagcgaaggata

SEQ ID NO: 1044013 - DNA, 33 bp, Homo sapien
ggctcagaaaagctaacggattcaaaagaattt

SEQ ID NO: 1044014 - DNA, 33 bp, Homo sapien
ggctcagaaaagctaatggattcaaaagaattt

SEQ ID NO: 1044015 - DNA, 33 bp, Homo sapien
ctccgcactgctttcactacatcccatatggta

SEQ ID NO: 1044016 - DNA, 33 bp, Homo sapien
ctccgcactgctttcagtacatcccatatggta

SEQ ID NO: 1044017 - DNA, 33 bp, Homo sapien
ttttgccctttacaacaaaggagactgaagttc

SEQ ID NO: 1044018 - DNA, 33 bp, Homo sapien
ttttgccctttacaacgaaggagactgaagttc

SEQ ID NO: 1044019 - DNA, 33 bp, Homo sapien
gtgagtgattgtgtaaacccacccaagaaacca

SEQ ID NO: 1044020 - DNA, 33 bp, Homo sapien
gtgagtgattgtgtaaccccacccaagaaacca

SEQ ID NO: 1044021 - DNA, 33 bp, Homo sapien
tttatttgtagtctcaatgaaaaatctctacgg

SEQ ID NO: 1044022 - DNA, 33 bp, Homo sapien
tttatttgtagtctcagtgaaaaatctctacgg

SEQ ID NO: 1044023 - DNA, 33 bp, Homo sapien
tgcagaagggtttcaaagattctagtgcatagt

SEQ ID NO: 1044024 - DNA, 33 bp, Homo sapien
tgcagaagggtttcaaggattctagtgcatagt

SEQ ID NO: 1044025 - DNA, 33 bp, Homo sapien
gacagagttcagcagaaagctagcaggaagagg

SEQ ID NO: 1044026 - DNA, 33 bp, Homo sapien
gacagagttcagcagagagctagcaggaagagg

SEQ ID NO: 1044027 - DNA, 33 bp, Homo sapien
tgattaggtctcttaacagattaccaagctagt

SEQ ID NO: 1044028 - DNA, 33 bp, Homo sapien
tgattaggtctcttaatagattaccaagctagt

SEQ ID NO: 1044029 - DNA, 33 bp, Homo sapien
gacaggggagaagagtcaataataaggagatag

SEQ ID NO: 1044030 - DNA, 33 bp, Homo sapien
gacaggggagaagagtgaataataaggagatag

SEQ ID NO: 1044031 - DNA, 33 bp, Homo sapien
ggcaagtatatagaaaagcatggaagtaaaata

SEQ ID NO: 1044032 - DNA, 33 bp, Homo sapien
ggcaagtatatagaaaggcatggaagtaaaata

SEQ ID NO: 1044033 - DNA, 33 bp, Homo sapien
caaagtaggcagacaaccattacctcaggattc

SEQ ID NO: 1044034 - DNA, 33 bp, Homo sapien
caaagtaggcagacaagcattacctcaggattc

SEQ ID NO: 1044035 - DNA, 33 bp, Homo sapien
tgtagtgaaaagagaacgataccgaggacagga

SEQ ID NO: 1044036 - DNA, 33 bp, Homo sapien
tgtagtgaaaagagaatgataccgaggacagga

SEQ ID NO: 1044037 - DNA, 33 bp, Homo sapien
cataggcttttagaagaaaccatgctacatctt

SEQ ID NO: 1044038 - DNA, 33 bp, Homo sapien
cataggcttttagaagcaaccatgctacatctt

SEQ ID NO: 1044039 - DNA, 33 bp, Homo sapien
gcagtgccagccaacacctagattacagcctgt

SEQ ID NO: 1044040 - DNA, 33 bp, Homo sapien
gcagtgccagccaacagctagattacagcctgt

SEQ ID NO: 1044041 - DNA, 33 bp, Homo sapien
acacttacggtcaatacaagttccgatcaccat

SEQ ID NO: 1044042 - DNA, 33 bp, Homo sapien
acacttacggtcaatataagttccgatcaccat

SEQ ID NO: 1044043 - DNA, 33 bp, Homo sapien
gatgatagtgaatagcaaagagtgaattctgtg

SEQ ID NO: 1044044 - DNA, 33 bp, Homo sapien
gatgatagtgaatagcgaagagtgaattctgtg

SEQ ID NO: 1044045 - DNA, 33 bp, Homo sapien
ccctccatttaacaaccatgggaaactcagaat

SEQ ID NO: 1044046 - DNA, 33 bp, Homo sapien
ccctccatttaacaactatgggaaactcagaat

SEQ ID NO: 1044047 - DNA, 33 bp, Homo sapien
tgtgaagctggttggaaataagaagtaagaact

SEQ ID NO: 1044048 - DNA, 33 bp, Homo sapien
tgtgaagctggttggagataagaagtaagaact

SEQ ID NO: 1044049 - DNA, 33 bp, Homo sapien
agtggagagtaggtgacgttattaacttgttgg

SEQ ID NO: 1044050 - DNA, 33 bp, Homo sapien
agtggagagtaggtgatgttattaacttgttgg

SEQ ID NO: 1044051 - DNA, 33 bp, Homo sapien
tattcccatcgcctaagactgcactaaatacac

SEQ ID NO: 1044052 - DNA, 33 bp, Homo sapien
tattcccatcgcctaatactgcactaaatacac

SEQ ID NO: 1044053 - DNA, 33 bp, Homo sapien
gcattgagagaggagcaatgtagacaagcaaat

SEQ ID NO: 1044054 - DNA, 33 bp, Homo sapien
gcattgagagaggagcgatgtagacaagcaaat

SEQ ID NO: 1044055 - DNA, 33 bp, Homo sapien
tttaaagcatttcacaaagaaaattgacaggct

SEQ ID NO: 1044056 - DNA, 33 bp, Homo sapien
tttaaagcatttcacagagaaaattgacaggct

SEQ ID NO: 1044057 - DNA, 33 bp, Homo sapien
gttatttacaactataaatttcactttgatcac

SEQ ID NO: 1044058 - DNA, 33 bp, Homo sapien
gttatttacaactatacatttcactttgatcac

SEQ ID NO: 1044059 - DNA, 33 bp, Homo sapien
caacaccacacttgacccctttattttatttta

SEQ ID NO: 1044060 - DNA, 33 bp, Homo sapien
caacaccacacttgacgcctttattttatttta

SEQ ID NO: 1044061 - DNA, 33 bp, Homo sapien
actagtagcgggaacactagcagcatgatcact

SEQ ID NO: 1044062 - DNA, 33 bp, Homo sapien
actagtagcgggaacattagcagcatgatcact

SEQ ID NO: 1044063 - DNA, 33 bp, Homo sapien
tacatctacctcatggaactgtaatggaaaaca

SEQ ID NO: 1044064 - DNA, 33 bp, Homo sapien
tacatctacctcatgggactgtaatggaaaaca

SEQ ID NO: 1044065 - DNA, 33 bp, Homo sapien
ttccatctctaagaaactgactactctaggtgt

SEQ ID NO: 1044066 - DNA, 33 bp, Homo sapien
ttccatctctaagaaattgactactctaggtgt

SEQ ID NO: 1044067 - DNA, 33 bp, Homo sapien
aatgctgggagtataacgggcacaaagagtccc

SEQ ID NO: 1044068 - DNA, 33 bp, Homo sapien
aatgctgggagtataatgggcacaaagagtccc

SEQ ID NO: 1044069 - DNA, 33 bp, Homo sapien
gcttcttttctactccactatattgatcaatcc

SEQ ID NO: 1044070 - DNA, 33 bp, Homo sapien
gcttcttttctactccgctatattgatcaatcc

SEQ ID NO: 1044071 - DNA, 33 bp, Homo sapien
agcatggcatctgtcacatagtcaacattaata

SEQ ID NO: 1044072 - DNA, 33 bp, Homo sapien
agcatggcatctgtcatatagtcaacattaata

SEQ ID NO: 1044073 - DNA, 33 bp, Homo sapien
ttgcaaagaaaacagtcaaaactcggcttaagt

SEQ ID NO: 1044074 - DNA, 33 bp, Homo sapien
ttgcaaagaaaacagtgaaaactcggcttaagt

SEQ ID NO: 1044075 - DNA, 33 bp, Homo sapien
ctagctctacatcaaactgacaagtggtcagca

SEQ ID NO: 1044076 - DNA, 33 bp, Homo sapien
ctagctctacatcaaattgacaagtggtcagca

SEQ ID NO: 1044077 - DNA, 33 bp, Homo sapien
cattcttatagactagaaggagcataggacaag

SEQ ID NO: 1044078 - DNA, 33 bp, Homo sapien
cattcttatagactagcaggagcataggacaag

SEQ ID NO: 1044079 - DNA, 33 bp, Homo sapien
tgactttaaaagaacacggaatgaatggcaaaa

SEQ ID NO: 1044080 - DNA, 33 bp, Homo sapien
tgactttaaaagaacatggaatgaatggcaaaa

SEQ ID NO: 1044081 - DNA, 33 bp, Homo sapien
gaggctgtagttagtaaaatggcttaacagaca

SEQ ID NO: 1044082 - DNA, 33 bp, Homo sapien
gaggctgtagttagtataatggcttaacagaca

SEQ ID NO: 1044083 - DNA, 33 bp, Homo sapien
aaggatgatcagaaagaaagattaccacagaaa

SEQ ID NO: 1044084 - DNA, 33 bp, Homo sapien
aaggatgatcagaaaggaagattaccacagaaa

SEQ ID NO: 1044085 - DNA, 33 bp, Homo sapien
ctttgtaaattccacacgaaaaagttcaaaagc

SEQ ID NO: 1044086 - DNA, 33 bp, Homo sapien
ctttgtaaattccacatgaaaaagttcaaaagc

SEQ ID NO: 1044087 - DNA, 33 bp, Homo sapien
gatcccctgctcctaaactaaaatttaacagtg

SEQ ID NO: 1044088 - DNA, 33 bp, Homo sapien
gatcccctgctcctaatctaaaatttaacagtg

SEQ ID NO: 1044089 - DNA, 33 bp, Homo sapien
attgtgaaattcctaacgcgtttcacacaataa

SEQ ID NO: 1044090 - DNA, 33 bp, Homo sapien
attgtgaaattcctaatgcgtttcacacaataa

SEQ ID NO: 1044091 - DNA, 33 bp, Homo sapien
tggaactgcaatcccaaaggtgaataggagtga

SEQ ID NO: 1044092 - DNA, 33 bp, Homo sapien
tggaactgcaatcccagaggtgaataggagtga

SEQ ID NO: 1044093 - DNA, 33 bp, Homo sapien
ctggggtctctagtgcacatcaggaaacccagc

SEQ ID NO: 1044094 - DNA, 33 bp, Homo sapien
ctggggtctctagtgcccatcaggaaacccagc

SEQ ID NO: 1044095 - DNA, 33 bp, Homo sapien
ggtgggaactggaagaacaaaagcttgcattta

SEQ ID NO: 1044096 - DNA, 33 bp, Homo sapien
ggtgggaactggaagaccaaaagcttgcattta

SEQ ID NO: 1044097 - DNA, 33 bp, Homo sapien
aacccaaaacctgcaccatacagtttaacagaa

SEQ ID NO: 1044098 - DNA, 33 bp, Homo sapien
aacccaaaacctgcacgatacagtttaacagaa

SEQ ID NO: 1044099 - DNA, 33 bp, Homo sapien
cactgaacgcagaaaacaggacaaaaccatctg

SEQ ID NO: 1044100 - DNA, 33 bp, Homo sapien
cactgaacgcagaaaagaggacaaaaccatctg

SEQ ID NO: 1044101 - DNA, 33 bp, Homo sapien
gcacacaggcctcaaacgactcggatgagggtt

SEQ ID NO: 1044102 - DNA, 33 bp, Homo sapien
gcacacaggcctcaaatgactcggatgagggtt

SEQ ID NO: 1044103 - DNA, 33 bp, Homo sapien
ctgcctagctagcaagacccttagttgtcagtc

SEQ ID NO: 1044104 - DNA, 33 bp, Homo sapien
ctgcctagctagcaagtcccttagttgtcagtc

SEQ ID NO: 1044105 - DNA, 33 bp, Homo sapien
tgttgcttgcagtacaatgctgtgacggtttac

SEQ ID NO: 1044106 - DNA, 33 bp, Homo sapien
tgttgcttgcagtacagtgctgtgacggtttac

SEQ ID NO: 1044107 - DNA, 33 bp, Homo sapien
ctgaaggttagattccagaggcagttgtaacca

SEQ ID NO: 1044108 - DNA, 33 bp, Homo sapien
ctgaaggttagattccggaggcagttgtaacca

SEQ ID NO: 1044109 - DNA, 33 bp, Homo sapien
aacccaaaataaacaacgcaaaagcacgaaact

SEQ ID NO: 1044110 - DNA, 33 bp, Homo sapien
aacccaaaataaacaatgcaaaagcacgaaact

SEQ ID NO: 1044111 - DNA, 33 bp, Homo sapien
tgagttgctcaggccaataaccttaaagtcaat

SEQ ID NO: 1044112 - DNA, 33 bp, Homo sapien
tgagttgctcaggccagtaaccttaaagtcaat

SEQ ID NO: 1044113 - DNA, 33 bp, Homo sapien
tacactaagagaaactcacacatgtacaaacaa

SEQ ID NO: 1044114 - DNA, 33 bp, Homo sapien
tacactaagagaaacttacacatgtacaaacaa

SEQ ID NO: 1044115 - DNA, 33 bp, Homo sapien
aacctggaaaacatgcaaaacgtccattcacag

SEQ ID NO: 1044116 - DNA, 33 bp, Homo sapien
aacctggaaaacatgcgaaacgtccattcacag

SEQ ID NO: 1044117 - DNA, 33 bp, Homo sapien
aataaaaacagaaagaaggtgaatacaaaattc

SEQ ID NO: 1044118 - DNA, 33 bp, Homo sapien
aataaaaacagaaagagggtgaatacaaaattc

SEQ ID NO: 1044119 - DNA, 33 bp, Homo sapien
caaatttggcctgtggcagcctttacaagtgag

SEQ ID NO: 1044120 - DNA, 33 bp, Homo sapien
caaatttggcctgtggtagcctttacaagtgag

SEQ ID NO: 1044121 - DNA, 33 bp, Homo sapien
agagtcgtgcatccatcaccactgtctaaattc

SEQ ID NO: 1044122 - DNA, 33 bp, Homo sapien
agagtcgtgcatccattaccactgtctaaattc

SEQ ID NO: 1044123 - DNA, 33 bp, Homo sapien
tgtctttgtgaaactgcaagagaccaggcccag

SEQ ID NO: 1044124 - DNA, 33 bp, Homo sapien
tgtctttgtgaaactggaagagaccaggcccag

SEQ ID NO: 1044125 - DNA, 33 bp, Homo sapien
cccaacagacacgaacaaaatgtggctatttaa

SEQ ID NO: 1044126 - DNA, 33 bp, Homo sapien
cccaacagacacgaaccaaatgtggctatttaa

SEQ ID NO: 1044127 - DNA, 33 bp, Homo sapien
agtctgtgactacttcaaccaactgaacttagg

SEQ ID NO: 1044128 - DNA, 33 bp, Homo sapien
agtctgtgactacttcgaccaactgaacttagg

SEQ ID NO: 1044129 - DNA, 33 bp, Homo sapien
gccttcactcctttacaacggaagaactgtcct

SEQ ID NO: 1044130 - DNA, 33 bp, Homo sapien
gccttcactcctttacgacggaagaactgtcct

SEQ ID NO: 1044131 - DNA, 33 bp, Homo sapien
tcaaggaaagactaaactatgctgtgtgccctt

SEQ ID NO: 1044132 - DNA, 33 bp, Homo sapien
tcaaggaaagactaaattatgctgtgtgccctt

SEQ ID NO: 1044133 - DNA, 33 bp, Homo sapien
tgtttctttaaatagacctggctgcttacaaag

SEQ ID NO: 1044134 - DNA, 33 bp, Homo sapien
tgtttctttaaatagatctggctgcttacaaag

SEQ ID NO: 1044135 - DNA, 33 bp, Homo sapien
gtttttgtaagtaatacgagactaagcttgcag

SEQ ID NO: 1044136 - DNA, 33 bp, Homo sapien
gtttttgtaagtaatatgagactaagcttgcag

SEQ ID NO: 1044137 - DNA, 33 bp, Homo sapien
ctctattcattccaaaccttcctaatgtaataa

SEQ ID NO: 1044138 - DNA, 33 bp, Homo sapien
ctctattcattccaaatcttcctaatgtaataa

SEQ ID NO: 1044139 - DNA, 33 bp, Homo sapien
gccagtattgatactgcagtgcttgtgtttaag

SEQ ID NO: 1044140 - DNA, 33 bp, Homo sapien
gccagtattgatactgtagtgcttgtgtttaag

SEQ ID NO: 1044141 - DNA, 33 bp, Homo sapien
gaacatcacgtgaagacgaaagcagagattgag

SEQ ID NO: 1044142 - DNA, 33 bp, Homo sapien
gaacatcacgtgaagatgaaagcagagattgag

SEQ ID NO: 1044143 - DNA, 33 bp, Homo sapien
tgatccggctcactcaaagaaacagtgaaatca

SEQ ID NO: 1044144 - DNA, 33 bp, Homo sapien
tgatccggctcactcacagaaacagtgaaatca

SEQ ID NO: 1044145 - DNA, 33 bp, Homo sapien
tgagtcctaatcaaacagtgtggagttggagtt

SEQ ID NO: 1044146 - DNA, 33 bp, Homo sapien
tgagtcctaatcaaacggtgtggagttggagtt

SEQ ID NO: 1044147 - DNA, 33 bp, Homo sapien
catgtctcgcaaatagcaagagagccgtggcct

SEQ ID NO: 1044148 - DNA, 33 bp, Homo sapien
catgtctcgcaaataggaagagagccgtggcct

SEQ ID NO: 1044149 - DNA, 33 bp, Homo sapien
acagatgagggatcaacggcccagaaagggcga

SEQ ID NO: 1044150 - DNA, 33 bp, Homo sapien
acagatgagggatcaatggcccagaaagggcga

SEQ ID NO: 1044151 - DNA, 33 bp, Homo sapien
acatctcagtttggaacagctgcatttcaactg

SEQ ID NO: 1044152 - DNA, 33 bp, Homo sapien
acatctcagtttggaatagctgcatttcaactg

SEQ ID NO: 1044153 - DNA, 33 bp, Homo sapien
cttggctgcagcaggagataagtgaggagttta

SEQ ID NO: 1044154 - DNA, 33 bp, Homo sapien
cttggctgcagcaggatataagtgaggagttta

SEQ ID NO: 1044155 - DNA, 33 bp, Homo sapien
aatctgtttccaggaacgcaggctgaaatactt

SEQ ID NO: 1044156 - DNA, 33 bp, Homo sapien
aatctgtttccaggaatgcaggctgaaatactt

SEQ ID NO: 1044157 - DNA, 33 bp, Homo sapien
gacattgaacgattcaagtccttctctgagcct

SEQ ID NO: 1044158 - DNA, 33 bp, Homo sapien
gacattgaacgattcacgtccttctctgagcct

SEQ ID NO: 1044159 - DNA, 33 bp, Homo sapien
aggatgcaaaatggcaatgattagaagtgaggc

SEQ ID NO: 1044160 - DNA, 33 bp, Homo sapien
aggatgcaaaatggcagtgattagaagtgaggc

SEQ ID NO: 1044161 - DNA, 33 bp, Homo sapien
gcatgtaagttctgggccagtactgtgattctg

SEQ ID NO: 1044162 - DNA, 33 bp, Homo sapien
gcatgtaagttctgggtcagtactgtgattctg

SEQ ID NO: 1044163 - DNA, 33 bp, Homo sapien
tcacccctccctggtaacacagtcaccattgtc

SEQ ID NO: 1044164 - DNA, 33 bp, Homo sapien
tcacccctccctggtatcacagtcaccattgtc

SEQ ID NO: 1044165 - DNA, 33 bp, Homo sapien
ggctttgctaaatccaactgccgcagttcaggc

SEQ ID NO: 1044166 - DNA, 33 bp, Homo sapien
ggctttgctaaatccagctgccgcagttcaggc

SEQ ID NO: 1044167 - DNA, 33 bp, Homo sapien
ggattgcctaagtttaagagttcaagaccagcc

SEQ ID NO: 1044168 - DNA, 33 bp, Homo sapien
ggattgcctaagtttaggagttcaagaccagcc

SEQ ID NO: 1044169 - DNA, 33 bp, Homo sapien
ccattggctctttctaagcacccagttggatgg

SEQ ID NO: 1044170 - DNA, 33 bp, Homo sapien
ccattggctctttctatgcacccagttggatgg

SEQ ID NO: 1044171 - DNA, 33 bp, Homo sapien
caaggaggccaatggaactatcctcatcttgca

SEQ ID NO: 1044172 - DNA, 33 bp, Homo sapien
caaggaggccaatggagctatcctcatcttgca

SEQ ID NO: 1044173 - DNA, 33 bp, Homo sapien
tacttggcacttaacacgggaaagtggatctcc

SEQ ID NO: 1044174 - DNA, 33 bp, Homo sapien
tacttggcacttaacatgggaaagtggatctcc

SEQ ID NO: 1044175 - DNA, 33 bp, Homo sapien
aggttctgttgaaggacactggattttaataat

SEQ ID NO: 1044176 - DNA, 33 bp, Homo sapien
aggttctgttgaaggagactggattttaataat

SEQ ID NO: 1044177 - DNA, 33 bp, Homo sapien
gcttgttttagttttcactactagctgtgtgac

SEQ ID NO: 1044178 - DNA, 33 bp, Homo sapien
gcttgttttagttttcgctactagctgtgtgac

SEQ ID NO: 1044179 - DNA, 33 bp, Homo sapien
ttttattcatcctatcaaattgctttccaattt

SEQ ID NO: 1044180 - DNA, 33 bp, Homo sapien
ttttattcatcctatccaattgctttccaattt

SEQ ID NO: 1044181 - DNA, 33 bp, Homo sapien
accttggataagttacaagacctcactgaacct

SEQ ID NO: 1044182 - DNA, 33 bp, Homo sapien
accttggataagttacgagacctcactgaacct

SEQ ID NO: 1044183 - DNA, 33 bp, Homo sapien
cctactgaataagtgaactcagtttaacaacac

SEQ ID NO: 1044184 - DNA, 33 bp, Homo sapien
cctactgaataagtgagctcagtttaacaacac

SEQ ID NO: 1044185 - DNA, 33 bp, Homo sapien
ttctatagtttattgacggtcgattagatcttc

SEQ ID NO: 1044186 - DNA, 33 bp, Homo sapien
ttctatagtttattgatggtcgattagatcttc

SEQ ID NO: 1044187 - DNA, 33 bp, Homo sapien
acttgcttatcaaacaacataagcataaaatcg

SEQ ID NO: 1044188 - DNA, 33 bp, Homo sapien
acttgcttatcaaacagcataagcataaaatcg

SEQ ID NO: 1044189 - DNA, 33 bp, Homo sapien
agtagctgggtatgtaggtcctatgtggcatct

SEQ ID NO: 1044190 - DNA, 33 bp, Homo sapien
agtagctgggtatgtatgtcctatgtggcatct

SEQ ID NO: 1044191 - DNA, 33 bp, Homo sapien
ttgtttgttttgtttcaagacggagtttctctc

SEQ ID NO: 1044192 - DNA, 33 bp, Homo sapien
ttgtttgttttgtttcgagacggagtttctctc

SEQ ID NO: 1044193 - DNA, 33 bp, Homo sapien
gaggacctcatttcccactaaatgtctccacca

SEQ ID NO: 1044194 - DNA, 33 bp, Homo sapien
gaggacctcatttccccctaaatgtctccacca

SEQ ID NO: 1044195 - DNA, 33 bp, Homo sapien
ttttcttcttgctgtacgttgcggtctcgcctc

SEQ ID NO: 1044196 - DNA, 33 bp, Homo sapien
ttttcttcttgctgtaggttgcggtctcgcctc

SEQ ID NO: 1044197 - DNA, 33 bp, Homo sapien
gcatctcaaaagagccacaaaggacgttgatct

SEQ ID NO: 1044198 - DNA, 33 bp, Homo sapien
gcatctcaaaagagccgcaaaggacgttgatct

SEQ ID NO: 1044199 - DNA, 33 bp, Homo sapien
gatctcctccagctgaaaaaggggtcacgatgg

SEQ ID NO: 1044200 - DNA, 33 bp, Homo sapien
gatctcctccagctgataaaggggtcacgatgg

SEQ ID NO: 1044201 - DNA, 33 bp, Homo sapien
tatttcgagggctacaagcgacctgatgtaggg

SEQ ID NO: 1044202 - DNA, 33 bp, Homo sapien
tatttcgagggctacaggcgacctgatgtaggg

SEQ ID NO: 1044203 - DNA, 33 bp, Homo sapien
ctaaggacaaggaagacgatgccagcacactca

SEQ ID NO: 1044204 - DNA, 33 bp, Homo sapien
ctaaggacaaggaagatgatgccagcacactca

SEQ ID NO: 1044205 - DNA, 33 bp, Homo sapien
ggaaagccatttggggaccatgcgcattggtct

SEQ ID NO: 1044206 - DNA, 33 bp, Homo sapien
ggaaagccatttgggggccatgcgcattggtct

SEQ ID NO: 1044207 - DNA, 33 bp, Homo sapien
agctgcgggtgatgaactgtcactcagggacta

SEQ ID NO: 1044208 - DNA, 33 bp, Homo sapien
agctgcgggtgatgaattgtcactcagggacta

SEQ ID NO: 1044209 - DNA, 33 bp, Homo sapien
cactgccgaatgaatcaatgagcaaggaagcat

SEQ ID NO: 1044210 - DNA, 33 bp, Homo sapien
cactgccgaatgaatcgatgagcaaggaagcat

SEQ ID NO: 1044211 - DNA, 33 bp, Homo sapien
agcagaacacattgacagcttgaaatcggtacc

SEQ ID NO: 1044212 - DNA, 33 bp, Homo sapien
agcagaacacattgacggcttgaaatcggtacc

SEQ ID NO: 1044213 - DNA, 33 bp, Homo sapien
gagttctggagatagacggtgataatggttaca

SEQ ID NO: 1044214 - DNA, 33 bp, Homo sapien
gagttctggagatagatggtgataatggttaca

SEQ ID NO: 1044215 - DNA, 33 bp, Homo sapien
aagtttccagaaatgacaagcattcaccaaaca

SEQ ID NO: 1044216 - DNA, 33 bp, Homo sapien
aagtttccagaaatgataagcattcaccaaaca

SEQ ID NO: 1044217 - DNA, 33 bp, Homo sapien
tcaccaacagaaagcacgagatgggacacctgg

SEQ ID NO: 1044218 - DNA, 33 bp, Homo sapien
tcaccaacagaaagcatgagatgggacacctgg

SEQ ID NO: 1044219 - DNA, 33 bp, Homo sapien
taaggagaaggagatacaggcattggagatgac

SEQ ID NO: 1044220 - DNA, 33 bp, Homo sapien
taaggagaaggagatagaggcattggagatgac

SEQ ID NO: 1044221 - DNA, 33 bp, Homo sapien
gcacaaggatcaataaaaggtcatctctgcctt

SEQ ID NO: 1044222 - DNA, 33 bp, Homo sapien
gcacaaggatcaataagaggtcatctctgcctt

SEQ ID NO: 1044223 - DNA, 33 bp, Homo sapien
tgagatcctacagaaccgaggcactggaatttt

SEQ ID NO: 1044224 - DNA, 33 bp, Homo sapien
tgagatcctacagaactgaggcactggaatttt

SEQ ID NO: 1044225 - DNA, 33 bp, Homo sapien
tcttcttatacacatgaaataagagttaccgcc

SEQ ID NO: 1044226 - DNA, 33 bp, Homo sapien
tcttcttatacacatggaataagagttaccgcc

SEQ ID NO: 1044227 - DNA, 33 bp, Homo sapien
tccatcttttctctccaggaactctgaagatgt

SEQ ID NO: 1044228 - DNA, 33 bp, Homo sapien
tccatcttttctctccgggaactctgaagatgt

SEQ ID NO: 1044229 - DNA, 33 bp, Homo sapien
agcaagtacagaaacccgaggtagacacaagtt

SEQ ID NO: 1044230 - DNA, 33 bp, Homo sapien
agcaagtacagaaacctgaggtagacacaagtt

SEQ ID NO: 1044231 - DNA, 33 bp, Homo sapien
atagtagaatgtgcaacctgggagacatttcag

SEQ ID NO: 1044232 - DNA, 33 bp, Homo sapien
atagtagaatgtgcaagctgggagacatttcag

SEQ ID NO: 1044233 - DNA, 33 bp, Homo sapien
tttatcatgattgtcaataatttgcttttgtaa

SEQ ID NO: 1044234 - DNA, 33 bp, Homo sapien
tttatcatgattgtcagtaatttgcttttgtaa

SEQ ID NO: 1044235 - DNA, 33 bp, Homo sapien
tccttctggatctggtaaagaaaacaaagctca

SEQ ID NO: 1044236 - DNA, 33 bp, Homo sapien
tccttctggatctggtcaagaaaacaaagctca

SEQ ID NO: 1044237 - DNA, 33 bp, Homo sapien
atgttagaaatagtccaggaagcttgatgttga

SEQ ID NO: 1044238 - DNA, 33 bp, Homo sapien
atgttagaaatagtccgggaagcttgatgttga

SEQ ID NO: 1044239 - DNA, 33 bp, Homo sapien
gaaagttctgttggacaatgcagaattctaggc

SEQ ID NO: 1044240 - DNA, 33 bp, Homo sapien
gaaagttctgttggacgatgcagaattctaggc

SEQ ID NO: 1044241 - DNA, 33 bp, Homo sapien
atgtggaactgggtctcactttcctcatctgtg

SEQ ID NO: 1044242 - DNA, 33 bp, Homo sapien
atgtggaactgggtcttactttcctcatctgtg

SEQ ID NO: 1044243 - DNA, 33 bp, Homo sapien
ctcaagaaagaagcagaaaagcaaggaatgaga

SEQ ID NO: 1044244 - DNA, 33 bp, Homo sapien
ctcaagaaagaagcaggaaagcaaggaatgaga

SEQ ID NO: 1044245 - DNA, 33 bp, Homo sapien
gaatgaggacctgtgaagtgtgagaatcatgtc

SEQ ID NO: 1044246 - DNA, 33 bp, Homo sapien
gaatgaggacctgtgaggtgtgagaatcatgtc

SEQ ID NO: 1044247 - DNA, 33 bp, Homo sapien
gttagtaatgatccacacaaagttcttaattaa

SEQ ID NO: 1044248 - DNA, 33 bp, Homo sapien
gttagtaatgatccacgcaaagttcttaattaa

SEQ ID NO: 1044249 - DNA, 33 bp, Homo sapien
tcttctgggtgacgcccaaagccagtaagcatc

SEQ ID NO: 1044250 - DNA, 33 bp, Homo sapien
tcttctgggtgacgcctaaagccagtaagcatc

SEQ ID NO: 1044251 - DNA, 33 bp, Homo sapien
ttaaagggagagaatacggctaaaattaaacca

SEQ ID NO: 1044252 - DNA, 33 bp, Homo sapien
ttaaagggagagaatatggctaaaattaaacca

SEQ ID NO: 1044253 - DNA, 33 bp, Homo sapien
aagcttctggatggtaagagactcataagtgat

SEQ ID NO: 1044254 - DNA, 33 bp, Homo sapien
aagcttctggatggtacgagactcataagtgat

SEQ ID NO: 1044255 - DNA, 33 bp, Homo sapien
gtagaccagatgcagaaaaatataaagtaattg

SEQ ID NO: 1044256 - DNA, 33 bp, Homo sapien
gtagaccagatgcagagaaatataaagtaattg

SEQ ID NO: 1044257 - DNA, 33 bp, Homo sapien
aagcaagatacagaaacatgtagtatcatggct

SEQ ID NO: 1044258 - DNA, 33 bp, Homo sapien
aagcaagatacagaaagatgtagtatcatggct

SEQ ID NO: 1044259 - DNA, 33 bp, Homo sapien
tcatttacaagccaccggatcctctgtctggaa

SEQ ID NO: 1044260 - DNA, 33 bp, Homo sapien
tcatttacaagccacctgatcctctgtctggaa

SEQ ID NO: 1044261 - DNA, 33 bp, Homo sapien
gagctaaattgagatcacttgaatgaaaggaca

SEQ ID NO: 1044262 - DNA, 33 bp, Homo sapien
gagctaaattgagatcgcttgaatgaaaggaca

SEQ ID NO: 1044263 - DNA, 33 bp, Homo sapien
aactagataagccccaacagaaagcacaactag

SEQ ID NO: 1044264 - DNA, 33 bp, Homo sapien
aactagataagccccatcagaaagcacaactag

SEQ ID NO: 1044265 - DNA, 33 bp, Homo sapien
agaggaacaaggaagcaaacagctattattcag

SEQ ID NO: 1044266 - DNA, 33 bp, Homo sapien
agaggaacaaggaagccaacagctattattcag

SEQ ID NO: 1044267 - DNA, 33 bp, Homo sapien
cttgggaatcaaatcccaggtctaccactgact

SEQ ID NO: 1044268 - DNA, 33 bp, Homo sapien
cttgggaatcaaatccgaggtctaccactgact

SEQ ID NO: 1044269 - DNA, 33 bp, Homo sapien
gccttctcccctaatccagaattattcctggtc

SEQ ID NO: 1044270 - DNA, 33 bp, Homo sapien
gccttctcccctaatctagaattattcctggtc

SEQ ID NO: 1044271 - DNA, 33 bp, Homo sapien
catgccatgaactggaactgattcagcaggcac

SEQ ID NO: 1044272 - DNA, 33 bp, Homo sapien
catgccatgaactggatctgattcagcaggcac

SEQ ID NO: 1044273 - DNA, 33 bp, Homo sapien
ttttgtgaagactgcaaaattacacatccacag

SEQ ID NO: 1044274 - DNA, 33 bp, Homo sapien
ttttgtgaagactgcacaattacacatccacag

SEQ ID NO: 1044275 - DNA, 33 bp, Homo sapien
gaggtcagcaactggcaaagtcagatctgactc

SEQ ID NO: 1044276 - DNA, 33 bp, Homo sapien
gaggtcagcaactggcgaagtcagatctgactc

SEQ ID NO: 1044277 - DNA, 33 bp, Homo sapien
aggaccccgtctcgtggcaaaaacatacttaaa

SEQ ID NO: 1044278 - DNA, 33 bp, Homo sapien
aggaccccgtctcgtgtcaaaaacatacttaaa

SEQ ID NO: 1044279 - DNA, 33 bp, Homo sapien
taacctgttctatagacgacacttggaaaaatt

SEQ ID NO: 1044280 - DNA, 33 bp, Homo sapien
taacctgttctatagatgacacttggaaaaatt

SEQ ID NO: 1044281 - DNA, 33 bp, Homo sapien
actgaggatgagtagacggttataactactaac

SEQ ID NO: 1044282 - DNA, 33 bp, Homo sapien
actgaggatgagtagagggttataactactaac

SEQ ID NO: 1044283 - DNA, 33 bp, Homo sapien
aaggcaagaaggggaaatagaatcttgcaagaa

SEQ ID NO: 1044284 - DNA, 33 bp, Homo sapien
aaggcaagaaggggaagtagaatcttgcaagaa

SEQ ID NO: 1044285 - DNA, 33 bp, Homo sapien
cagctaagtgaggaagacgaactggatgaaaca

SEQ ID NO: 1044286 - DNA, 33 bp, Homo sapien
cagctaagtgaggaaggcgaactggatgaaaca

SEQ ID NO: 1044287 - DNA, 33 bp, Homo sapien
agtggtttcatttaacagacaatggcagttcct

SEQ ID NO: 1044288 - DNA, 33 bp, Homo sapien
agtggtttcatttaacggacaatggcagttcct

SEQ ID NO: 1044289 - DNA, 33 bp, Homo sapien
agagatttatgttaaggaactggttgaggcaag

SEQ ID NO: 1044290 - DNA, 33 bp, Homo sapien
agagatttatgttaagtaactggttgaggcaag

SEQ ID NO: 1044291 - DNA, 33 bp, Homo sapien
ttgaagtcggtcacagcccgaaagcacaagaag

SEQ ID NO: 1044292 - DNA, 33 bp, Homo sapien
ttgaagtcggtcacaggccgaaagcacaagaag

SEQ ID NO: 1044293 - DNA, 33 bp, Homo sapien
aacgatgagaccagatcaatgtttggagaagta

SEQ ID NO: 1044294 - DNA, 33 bp, Homo sapien
aacgatgagaccagattaatgtttggagaagta

SEQ ID NO: 1044295 - DNA, 33 bp, Homo sapien
tctaccagtgatcttacgcaaaaccaagggcaa

SEQ ID NO: 1044296 - DNA, 33 bp, Homo sapien
tctaccagtgatcttatgcaaaaccaagggcaa

SEQ ID NO: 1044297 - DNA, 33 bp, Homo sapien
ctggattttaaccctcacgctgattccacaggc

SEQ ID NO: 1044298 - DNA, 33 bp, Homo sapien
ctggattttaaccctcgcgctgattccacaggc

SEQ ID NO: 1044299 - DNA, 33 bp, Homo sapien
gtaagtgacacacttcaagacagaacgcaatgc

SEQ ID NO: 1044300 - DNA, 33 bp, Homo sapien
gtaagtgacacacttcgagacagaacgcaatgc

SEQ ID NO: 1044301 - DNA, 33 bp, Homo sapien
tagcagtttacctataacttagtttcaattaac

SEQ ID NO: 1044302 - DNA, 33 bp, Homo sapien
tagcagtttacctataccttagtttcaattaac

SEQ ID NO: 1044303 - DNA, 33 bp, Homo sapien
caaaaaagaataggaaaccggagctggagaggt

SEQ ID NO: 1044304 - DNA, 33 bp, Homo sapien
caaaaaagaataggaacccggagctggagaggt

SEQ ID NO: 1044305 - DNA, 33 bp, Homo sapien
tcccttcttaatccgaactatcatccaatcatt

SEQ ID NO: 1044306 - DNA, 33 bp, Homo sapien
tcccttcttaatccgatctatcatccaatcatt

SEQ ID NO: 1044307 - DNA, 33 bp, Homo sapien
ctaaaaaggaacaaaaatatgttgcataactca

SEQ ID NO: 1044308 - DNA, 33 bp, Homo sapien
ctaaaaaggaacaaaactatgttgcataactca

SEQ ID NO: 1044309 - DNA, 33 bp, Homo sapien
tggattgcgtagtttgaatctaaagagcccaat

SEQ ID NO: 1044310 - DNA, 33 bp, Homo sapien
tggattgcgtagtttggatctaaagagcccaat

SEQ ID NO: 1044311 - DNA, 33 bp, Homo sapien
aatatgtacgccctaacagagtccatgcatctc

SEQ ID NO: 1044312 - DNA, 33 bp, Homo sapien
aatatgtacgccctaatagagtccatgcatctc

SEQ ID NO: 1044313 - DNA, 33 bp, Homo sapien
gtaccatgttgtgacactgagtacattcacatt

SEQ ID NO: 1044314 - DNA, 33 bp, Homo sapien
gtaccatgttgtgacattgagtacattcacatt

SEQ ID NO: 1044315 - DNA, 33 bp, Homo sapien
atgatgactgcttttacgattctgttgtgaccc

SEQ ID NO: 1044316 - DNA, 33 bp, Homo sapien
atgatgactgcttttatgattctgttgtgaccc

SEQ ID NO: 1044317 - DNA, 33 bp, Homo sapien
tttggtacaagaagacgaactttgagcctatct

SEQ ID NO: 1044318 - DNA, 33 bp, Homo sapien
tttggtacaagaagactaactttgagcctatct

SEQ ID NO: 1044319 - DNA, 33 bp, Homo sapien
atttcaaccaataccaccgattcattcaagttt

SEQ ID NO: 1044320 - DNA, 33 bp, Homo sapien
atttcaaccaataccatcgattcattcaagttt

SEQ ID NO: 1044321 - DNA, 33 bp, Homo sapien
actgctgttttgttccacatgcttaggcattat

SEQ ID NO: 1044322 - DNA, 33 bp, Homo sapien
actgctgttttgttccgcatgcttaggcattat

SEQ ID NO: 1044323 - DNA, 33 bp, Homo sapien
accttaagatcccttccaagtttgataaagaga

SEQ ID NO: 1044324 - DNA, 33 bp, Homo sapien
accttaagatcccttcgaagtttgataaagaga

SEQ ID NO: 1044325 - DNA, 33 bp, Homo sapien
aattaggatggcactacgaggaccagaacacaa

SEQ ID NO: 1044326 - DNA, 33 bp, Homo sapien
aattaggatggcactatgaggaccagaacacaa

SEQ ID NO: 1044327 - DNA, 33 bp, Homo sapien
atacttgagggcctaacgtatgccaggcactct

SEQ ID NO: 1044328 - DNA, 33 bp, Homo sapien
atacttgagggcctaatgtatgccaggcactct

SEQ ID NO: 1044329 - DNA, 33 bp, Homo sapien
tctcagtttcctcaaacataagagccatcttta

SEQ ID NO: 1044330 - DNA, 33 bp, Homo sapien
tctcagtttcctcaaatataagagccatcttta

SEQ ID NO: 1044331 - DNA, 33 bp, Homo sapien
cctccattactcttcaagatgtttaatattttt

SEQ ID NO: 1044332 - DNA, 33 bp, Homo sapien
cctccattactcttcaggatgtttaatattttt

SEQ ID NO: 1044333 - DNA, 33 bp, Homo sapien
cattgttcgagagaagaatggatggatcgatgg

SEQ ID NO: 1044334 - DNA, 33 bp, Homo sapien
cattgttcgagagaaggatggatggatcgatgg

SEQ ID NO: 1044335 - DNA, 33 bp, Homo sapien
caaaaaaatctcaacaagccaggcatggtggct

SEQ ID NO: 1044336 - DNA, 33 bp, Homo sapien
caaaaaaatctcaacaggccaggcatggtggct

SEQ ID NO: 1044337 - DNA, 33 bp, Homo sapien
ccgaggctcaaatcttcaaactcacttcactat

SEQ ID NO: 1044338 - DNA, 33 bp, Homo sapien
ccgaggctcaaatcttgaaactcacttcactat

SEQ ID NO: 1044339 - DNA, 33 bp, Homo sapien
gtattatgaggcccaaattggaaaccttgatat

SEQ ID NO: 1044340 - DNA, 33 bp, Homo sapien
gtattatgaggcccaagttggaaaccttgatat

SEQ ID NO: 1044341 - DNA, 33 bp, Homo sapien
agaaataacaaaaaaccctgcacattacatata

SEQ ID NO: 1044342 - DNA, 33 bp, Homo sapien
agaaataacaaaaaactctgcacattacatata

SEQ ID NO: 1044343 - DNA, 33 bp, Homo sapien
ggcttttacaagatgacgcattggaacgtgaga

SEQ ID NO: 1044344 - DNA, 33 bp, Homo sapien
ggcttttacaagatgatgcattggaacgtgaga

SEQ ID NO: 1044345 - DNA, 33 bp, Homo sapien
tgactctgagcactaacgatggagagcttggtc

SEQ ID NO: 1044346 - DNA, 33 bp, Homo sapien
tgactctgagcactaatgatggagagcttggtc

SEQ ID NO: 1044347 - DNA, 33 bp, Homo sapien
aaaagatcagtgtagacggagataggtttctag

SEQ ID NO: 1044348 - DNA, 33 bp, Homo sapien
aaaagatcagtgtagatggagataggtttctag

SEQ ID NO: 1044349 - DNA, 33 bp, Homo sapien
gggaactcaaagataaataagacagtccttcct

SEQ ID NO: 1044350 - DNA, 33 bp, Homo sapien
gggaactcaaagataagtaagacagtccttcct

SEQ ID NO: 1044351 - DNA, 33 bp, Homo sapien
ttctccaacaactagaagagcacttaagtgggt

SEQ ID NO: 1044352 - DNA, 33 bp, Homo sapien
ttctccaacaactagaggagcacttaagtgggt

SEQ ID NO: 1044353 - DNA, 33 bp, Homo sapien
tttcctctgtgactaacagaattgtttaagggc

SEQ ID NO: 1044354 - DNA, 33 bp, Homo sapien
tttcctctgtgactaatagaattgtttaagggc

SEQ ID NO: 1044355 - DNA, 33 bp, Homo sapien
gctctccgattctccaagaagaatttccacctc

SEQ ID NO: 1044356 - DNA, 33 bp, Homo sapien
gctctccgattctccaggaagaatttccacctc

SEQ ID NO: 1044357 - DNA, 33 bp, Homo sapien
gcctgcaggaaggaagaaggatctgtccacgtc

SEQ ID NO: 1044358 - DNA, 33 bp, Homo sapien
gcctgcaggaaggaaggaggatctgtccacgtc

SEQ ID NO: 1044359 - DNA, 33 bp, Homo sapien
ctttattccagacaacaagacaataaggtccgc

SEQ ID NO: 1044360 - DNA, 33 bp, Homo sapien
ctttattccagacaaccagacaataaggtccgc

SEQ ID NO: 1044361 - DNA, 33 bp, Homo sapien
ccttttctagaagacactgatggggtttcagga

SEQ ID NO: 1044362 - DNA, 33 bp, Homo sapien
ccttttctagaagacattgatggggtttcagga

SEQ ID NO: 1044363 - DNA, 33 bp, Homo sapien
cataggtgtacacagcactttacaatgtcagga

SEQ ID NO: 1044364 - DNA, 33 bp, Homo sapien
cataggtgtacacagccctttacaatgtcagga

SEQ ID NO: 1044365 - DNA, 33 bp, Homo sapien
taaaaatattgattgcacaactcggtgagattg

SEQ ID NO: 1044366 - DNA, 33 bp, Homo sapien
taaaaatattgattgcgcaactcggtgagattg

SEQ ID NO: 1044367 - DNA, 33 bp, Homo sapien
tttggggaaaaagaaaagatctagatggatcag

SEQ ID NO: 1044368 - DNA, 33 bp, Homo sapien
tttggggaaaaagaaaggatctagatggatcag

SEQ ID NO: 1044369 - DNA, 33 bp, Homo sapien
gaacccacttcacagacaaagtttgcagaggtg

SEQ ID NO: 1044370 - DNA, 33 bp, Homo sapien
gaacccacttcacagataaagtttgcagaggtg

SEQ ID NO: 1044371 - DNA, 33 bp, Homo sapien
tgcaaaatggtgacaacgttaatatttacttaa

SEQ ID NO: 1044372 - DNA, 33 bp, Homo sapien
tgcaaaatggtgacaatgttaatatttacttaa

SEQ ID NO: 1044373 - DNA, 33 bp, Homo sapien
ctacagaaaaatgtgcaaatgtatttttagtag

SEQ ID NO: 1044374 - DNA, 33 bp, Homo sapien
ctacagaaaaatgtgccaatgtatttttagtag

SEQ ID NO: 1044375 - DNA, 33 bp, Homo sapien
tgactcctgtcttacaccgtcaacctctccggc

SEQ ID NO: 1044376 - DNA, 33 bp, Homo sapien
tgactcctgtcttacagcgtcaacctctccggc

SEQ ID NO: 1044377 - DNA, 33 bp, Homo sapien
acaaccagaaagccaaaggttgcagaggggatg

SEQ ID NO: 1044378 - DNA, 33 bp, Homo sapien
acaaccagaaagccaagggttgcagaggggatg

SEQ ID NO: 1044379 - DNA, 33 bp, Homo sapien
agctgaggacacttggaagaagattctgggtca

SEQ ID NO: 1044380 - DNA, 33 bp, Homo sapien
agctgaggacacttgggagaagattctgggtca

SEQ ID NO: 1044381 - DNA, 33 bp, Homo sapien
gagactggctcagaaacgtacatctagagatgg

SEQ ID NO: 1044382 - DNA, 33 bp, Homo sapien
gagactggctcagaaatgtacatctagagatgg

SEQ ID NO: 1044383 - DNA, 33 bp, Homo sapien
gcatgtgagcagaacacatcccacctcctgctc

SEQ ID NO: 1044384 - DNA, 33 bp, Homo sapien
gcatgtgagcagaacagatcccacctcctgctc

SEQ ID NO: 1044385 - DNA, 33 bp, Homo sapien
cctttgataactgaacaatggtcagaactggga

SEQ ID NO: 1044386 - DNA, 33 bp, Homo sapien
cctttgataactgaacgatggtcagaactggga

SEQ ID NO: 1044387 - DNA, 33 bp, Homo sapien
aagtggagtttaaacacagaaggatgaaggctc

SEQ ID NO: 1044388 - DNA, 33 bp, Homo sapien
aagtggagtttaaacatagaaggatgaaggctc

SEQ ID NO: 1044389 - DNA, 33 bp, Homo sapien
cttatcaccgctatcgacaataaaaattagtgg

SEQ ID NO: 1044390 - DNA, 33 bp, Homo sapien
cttatcaccgctatcggcaataaaaattagtgg

SEQ ID NO: 1044391 - DNA, 33 bp, Homo sapien
cattatgttacaataaaaacaatagtagcagca

SEQ ID NO: 1044392 - DNA, 33 bp, Homo sapien
cattatgttacaataagaacaatagtagcagca

SEQ ID NO: 1044393 - DNA, 33 bp, Homo sapien
ctcagcttccagttatcaacattcactcagtct

SEQ ID NO: 1044394 - DNA, 33 bp, Homo sapien
ctcagcttccagttattaacattcactcagtct

SEQ ID NO: 1044395 - DNA, 33 bp, Homo sapien
actgatgattttctccaagaagctctccttttc

SEQ ID NO: 1044396 - DNA, 33 bp, Homo sapien
actgatgattttctccgagaagctctccttttc

SEQ ID NO: 1044397 - DNA, 33 bp, Homo sapien
attctaaactccatataaacaacgaatatgata

SEQ ID NO: 1044398 - DNA, 33 bp, Homo sapien
attctaaactccatatgaacaacgaatatgata

SEQ ID NO: 1044399 - DNA, 33 bp, Homo sapien
caaagaagggccagggccaagataaggactcag

SEQ ID NO: 1044400 - DNA, 33 bp, Homo sapien
caaagaagggccagggtcaagataaggactcag

SEQ ID NO: 1044401 - DNA, 33 bp, Homo sapien
cagagagaacactgtaaaaggattctgagctgg

SEQ ID NO: 1044402 - DNA, 33 bp, Homo sapien
cagagagaacactgtagaaggattctgagctgg

SEQ ID NO: 1044403 - DNA, 33 bp, Homo sapien
gtctggttccacatcacgagcaaatagctggag

SEQ ID NO: 1044404 - DNA, 33 bp, Homo sapien
gtctggttccacatcatgagcaaatagctggag

SEQ ID NO: 1044405 - DNA, 33 bp, Homo sapien
aagaaagtttaattgacgcttgttcctgtaatt

SEQ ID NO: 1044406 - DNA, 33 bp, Homo sapien
aagaaagtttaattgatgcttgttcctgtaatt

SEQ ID NO: 1044407 - DNA, 33 bp, Homo sapien
agctcctagaactgggacaggataaatttctgt

SEQ ID NO: 1044408 - DNA, 33 bp, Homo sapien
agctcctagaactggggcaggataaatttctgt

SEQ ID NO: 1044409 - DNA, 33 bp, Homo sapien
cgtgtcatgctcactcaaaccctgcaaggtaaa

SEQ ID NO: 1044410 - DNA, 33 bp, Homo sapien
cgtgtcatgctcactcgaaccctgcaaggtaaa

SEQ ID NO: 1044411 - DNA, 33 bp, Homo sapien
ggtgaaaagattcaagacttcggatttagaaag

SEQ ID NO: 1044412 - DNA, 33 bp, Homo sapien
ggtgaaaagattcaaggcttcggatttagaaag

SEQ ID NO: 1044413 - DNA, 33 bp, Homo sapien
tttgagaaaatgtctgccaaacacccaagtctg

SEQ ID NO: 1044414 - DNA, 33 bp, Homo sapien
tttgagaaaatgtctgtcaaacacccaagtctg

SEQ ID NO: 1044415 - DNA, 33 bp, Homo sapien
tcttgttccattaaccactgatcctgtaatgtc

SEQ ID NO: 1044416 - DNA, 33 bp, Homo sapien
tcttgttccattaaccgctgatcctgtaatgtc

SEQ ID NO: 1044417 - DNA, 33 bp, Homo sapien
tttgtgggtgtttaaaatgttctataataaaaa

SEQ ID NO: 1044418 - DNA, 33 bp, Homo sapien
tttgtgggtgtttaaagtgttctataataaaaa

SEQ ID NO: 1044419 - DNA, 33 bp, Homo sapien
agctgggataagttgacgtggaacaggggttgg

SEQ ID NO: 1044420 - DNA, 33 bp, Homo sapien
agctgggataagttgatgtggaacaggggttgg

SEQ ID NO: 1044421 - DNA, 33 bp, Homo sapien
tgtggaaaatgtttagaaccaagccaaagatgc

SEQ ID NO: 1044422 - DNA, 33 bp, Homo sapien
tgtggaaaatgtttaggaccaagccaaagatgc

SEQ ID NO: 1044423 - DNA, 33 bp, Homo sapien
acccagactcctgaccagcaaaaaccgcgagat

SEQ ID NO: 1044424 - DNA, 33 bp, Homo sapien
acccagactcctgaccggcaaaaaccgcgagat

SEQ ID NO: 1044425 - DNA, 33 bp, Homo sapien
gtaagcgctccatgagcatttgccattgtcgtt

SEQ ID NO: 1044426 - DNA, 33 bp, Homo sapien
gtaagcgctccatgagtatttgccattgtcgtt

SEQ ID NO: 1044427 - DNA, 33 bp, Homo sapien
ctacacacacgcaaaacgacacctgcaaatgag

SEQ ID NO: 1044428 - DNA, 33 bp, Homo sapien
ctacacacacgcaaaatgacacctgcaaatgag

SEQ ID NO: 1044429 - DNA, 33 bp, Homo sapien
ggcccatgaacagcaggacctagcctcccttct

SEQ ID NO: 1044430 - DNA, 33 bp, Homo sapien
ggcccatgaacagcagtacctagcctcccttct

SEQ ID NO: 1044431 - DNA, 33 bp, Homo sapien
gatttcttgagcggagcaggaagaaaggcttta

SEQ ID NO: 1044432 - DNA, 33 bp, Homo sapien
gatttcttgagcggaggaggaagaaaggcttta

SEQ ID NO: 1044433 - DNA, 33 bp, Homo sapien
gctaatcagtgatggacatttgccattgcatct

SEQ ID NO: 1044434 - DNA, 33 bp, Homo sapien
gctaatcagtgatggatatttgccattgcatct

SEQ ID NO: 1044435 - DNA, 33 bp, Homo sapien
taacctgtactgctccaaaagggctccaggatg

SEQ ID NO: 1044436 - DNA, 33 bp, Homo sapien
taacctgtactgctccgaaagggctccaggatg

SEQ ID NO: 1044437 - DNA, 33 bp, Homo sapien
ctagcataacgtgtccaagagccatccatgttg

SEQ ID NO: 1044438 - DNA, 33 bp, Homo sapien
ctagcataacgtgtccgagagccatccatgttg

SEQ ID NO: 1044439 - DNA, 33 bp, Homo sapien
agtgattactcctagacagagattttttactct

SEQ ID NO: 1044440 - DNA, 33 bp, Homo sapien
agtgattactcctagagagagattttttactct

SEQ ID NO: 1044441 - DNA, 33 bp, Homo sapien
caaaattctgttactacggaagatagaatgtat

SEQ ID NO: 1044442 - DNA, 33 bp, Homo sapien
caaaattctgttactatggaagatagaatgtat

SEQ ID NO: 1044443 - DNA, 33 bp, Homo sapien
cctgacaatcactcccagcacattccattgatg

SEQ ID NO: 1044444 - DNA, 33 bp, Homo sapien
cctgacaatcactcccggcacattccattgatg

SEQ ID NO: 1044445 - DNA, 33 bp, Homo sapien
ccagaatatatacaacacaaaagattgcagtgg

SEQ ID NO: 1044446 - DNA, 33 bp, Homo sapien
ccagaatatatacaacccaaaagattgcagtgg

SEQ ID NO: 1044447 - DNA, 33 bp, Homo sapien
agacaaagactgagaacatttattactggcaga

SEQ ID NO: 1044448 - DNA, 33 bp, Homo sapien
agacaaagactgagaatatttattactggcaga

SEQ ID NO: 1044449 - DNA, 33 bp, Homo sapien
agcaaagtcgaccccgcaagagagcatcagact

SEQ ID NO: 1044450 - DNA, 33 bp, Homo sapien
agcaaagtcgaccccggaagagagcatcagact

SEQ ID NO: 1044451 - DNA, 33 bp, Homo sapien
tctgcctgcctctgaaagacggtgttgaccaca

SEQ ID NO: 1044452 - DNA, 33 bp, Homo sapien
tctgcctgcctctgaaggacggtgttgaccaca

SEQ ID NO: 1044453 - DNA, 33 bp, Homo sapien
atgatgttgcttgtcccgacctctgctctaaca

SEQ ID NO: 1044454 - DNA, 33 bp, Homo sapien
atgatgttgcttgtcctgacctctgctctaaca

SEQ ID NO: 1044455 - DNA, 33 bp, Homo sapien
ttattaatatctgtacgcccaaaacaatgtaca

SEQ ID NO: 1044456 - DNA, 33 bp, Homo sapien
ttattaatatctgtactcccaaaacaatgtaca

SEQ ID NO: 1044457 - DNA, 33 bp, Homo sapien
aagactccatttgggaacaacccgaactctctt

SEQ ID NO: 1044458 - DNA, 33 bp, Homo sapien
aagactccatttgggagcaacccgaactctctt

SEQ ID NO: 1044459 - DNA, 33 bp, Homo sapien
ggcctgtgaatatttacggaccagtaccccaac

SEQ ID NO: 1044460 - DNA, 33 bp, Homo sapien
ggcctgtgaatatttatggaccagtaccccaac

SEQ ID NO: 1044461 - DNA, 33 bp, Homo sapien
gctctggtcttcccccaatgtatttattctggg

SEQ ID NO: 1044462 - DNA, 33 bp, Homo sapien
gctctggtcttcccccgatgtatttattctggg

SEQ ID NO: 1044463 - DNA, 33 bp, Homo sapien
tccctttgatcaaaaacgaaaagttaggactga

SEQ ID NO: 1044464 - DNA, 33 bp, Homo sapien
tccctttgatcaaaaatgaaaagttaggactga

SEQ ID NO: 1044465 - DNA, 33 bp, Homo sapien
gatgatttgcttctcaagataatgtggattctt

SEQ ID NO: 1044466 - DNA, 33 bp, Homo sapien
gatgatttgcttctcaggataatgtggattctt

SEQ ID NO: 1044467 - DNA, 33 bp, Homo sapien
tgaaatcagagagccaatagggaaagactggga

SEQ ID NO: 1044468 - DNA, 33 bp, Homo sapien
tgaaatcagagagccagtagggaaagactggga

SEQ ID NO: 1044469 - DNA, 33 bp, Homo sapien
caatccaatcaggtgacagccttagcaagactg

SEQ ID NO: 1044470 - DNA, 33 bp, Homo sapien
caatccaatcaggtgagagccttagcaagactg

SEQ ID NO: 1044471 - DNA, 33 bp, Homo sapien
gtaaattgaatggtgccctcaaagatatatgtc

SEQ ID NO: 1044472 - DNA, 33 bp, Homo sapien
gtaaattgaatggtgctctcaaagatatatgtc

SEQ ID NO: 1044473 - DNA, 33 bp, Homo sapien
tataatctcaagcaaaacatctggtgcctcagt

SEQ ID NO: 1044474 - DNA, 33 bp, Homo sapien
tataatctcaagcaaagcatctggtgcctcagt

SEQ ID NO: 1044475 - DNA, 33 bp, Homo sapien
aggctcgttctgtgtcaagacagctgccccagg

SEQ ID NO: 1044476 - DNA, 33 bp, Homo sapien
aggctcgttctgtgtcgagacagctgccccagg

SEQ ID NO: 1044477 - DNA, 33 bp, Homo sapien
tgtgagtcatcctggcgattgataggcgtgtgt

SEQ ID NO: 1044478 - DNA, 33 bp, Homo sapien
tgtgagtcatcctggctattgataggcgtgtgt

SEQ ID NO: 1044479 - DNA, 33 bp, Homo sapien
cttccagaatctcacaatctaatgacacaccca

SEQ ID NO: 1044480 - DNA, 33 bp, Homo sapien
cttccagaatctcacactctaatgacacaccca

SEQ ID NO: 1044481 - DNA, 33 bp, Homo sapien
gctcaggataaggatacgggaacgatggccact

SEQ ID NO: 1044482 - DNA, 33 bp, Homo sapien
gctcaggataaggataggggaacgatggccact

SEQ ID NO: 1044483 - DNA, 33 bp, Homo sapien
tgatgtaagcccgtccccacttcactacactct

SEQ ID NO: 1044484 - DNA, 33 bp, Homo sapien
tgatgtaagcccgtccgcacttcactacactct

SEQ ID NO: 1044485 - DNA, 33 bp, Homo sapien
ccacacacacagaaaaagttcagagaggtaaag

SEQ ID NO: 1044486 - DNA, 33 bp, Homo sapien
ccacacacacagaaaaggttcagagaggtaaag

SEQ ID NO: 1044487 - DNA, 33 bp, Homo sapien
ataccaattgttcatcaagctcagagcctagca

SEQ ID NO: 1044488 - DNA, 33 bp, Homo sapien
ataccaattgttcatcgagctcagagcctagca

SEQ ID NO: 1044489 - DNA, 33 bp, Homo sapien
agtcagcacccccagaactggactgaggccagg

SEQ ID NO: 1044490 - DNA, 33 bp, Homo sapien
agtcagcacccccagagctggactgaggccagg

SEQ ID NO: 1044491 - DNA, 33 bp, Homo sapien
caaggggttacctggacacctggagaagaaatg

SEQ ID NO: 1044492 - DNA, 33 bp, Homo sapien
caaggggttacctggatacctggagaagaaatg

SEQ ID NO: 1044493 - DNA, 33 bp, Homo sapien
acacagcgtcggccccgcagaggactgcgctga

SEQ ID NO: 1044494 - DNA, 33 bp, Homo sapien
acacagcgtcggcccctcagaggactgcgctga

SEQ ID NO: 1044495 - DNA, 33 bp, Homo sapien
tgttcgtctcctccggaaatgtagtggcctttt

SEQ ID NO: 1044496 - DNA, 33 bp, Homo sapien
tgttcgtctcctccgggaatgtagtggcctttt

SEQ ID NO: 1044497 - DNA, 33 bp, Homo sapien
atttagccaaccacgcaatctcacattctgtct

SEQ ID NO: 1044498 - DNA, 33 bp, Homo sapien
atttagccaaccacgcgatctcacattctgtct

SEQ ID NO: 1044499 - DNA, 33 bp, Homo sapien
acttcccaaattttggccagcacagtgccaggc

SEQ ID NO: 1044500 - DNA, 33 bp, Homo sapien
acttcccaaattttggtcagcacagtgccaggc

SEQ ID NO: 1044501 - DNA, 33 bp, Homo sapien
actatcatagggagccacatgacaaccttgaaa

SEQ ID NO: 1044502 - DNA, 33 bp, Homo sapien
actatcatagggagccgcatgacaaccttgaaa

SEQ ID NO: 1044503 - DNA, 33 bp, Homo sapien
cttgcaccctgagacacagtggccggacctcta

SEQ ID NO: 1044504 - DNA, 33 bp, Homo sapien
cttgcaccctgagacatagtggccggacctcta

SEQ ID NO: 1044505 - DNA, 33 bp, Homo sapien
ctggcctcccccatcaaacaagtgcttctgggg

SEQ ID NO: 1044506 - DNA, 33 bp, Homo sapien
ctggcctcccccatcagacaagtgcttctgggg

SEQ ID NO: 1044507 - DNA, 33 bp, Homo sapien
tgtccactaagctcaacgtgtcgcctctgtgtc

SEQ ID NO: 1044508 - DNA, 33 bp, Homo sapien
tgtccactaagctcaatgtgtcgcctctgtgtc

SEQ ID NO: 1044509 - DNA, 33 bp, Homo sapien
gaaacctctataaaagcaagtatgttcagcttt

SEQ ID NO: 1044510 - DNA, 33 bp, Homo sapien
gaaacctctataaaagtaagtatgttcagcttt

SEQ ID NO: 1044511 - DNA, 33 bp, Homo sapien
cttggcacatcccaaccggctttgcaaagactt

SEQ ID NO: 1044512 - DNA, 33 bp, Homo sapien
cttggcacatcccaactggctttgcaaagactt

SEQ ID NO: 1044513 - DNA, 33 bp, Homo sapien
cataggtatttcaacaacttctctaacctgatt

SEQ ID NO: 1044514 - DNA, 33 bp, Homo sapien
cataggtatttcaacaccttctctaacctgatt

SEQ ID NO: 1044515 - DNA, 33 bp, Homo sapien
gaaggtgctgcaaagacgcaatgtggttgggct

SEQ ID NO: 1044516 - DNA, 33 bp, Homo sapien
gaaggtgctgcaaagatgcaatgtggttgggct

SEQ ID NO: 1044517 - DNA, 33 bp, Homo sapien
acctcagaacagcctcaaggggatttacggcga

SEQ ID NO: 1044518 - DNA, 33 bp, Homo sapien
acctcagaacagcctcgaggggatttacggcga

SEQ ID NO: 1044519 - DNA, 33 bp, Homo sapien
tttgcgtctccctgcacggtcaccaggaccgct

SEQ ID NO: 1044520 - DNA, 33 bp, Homo sapien
tttgcgtctccctgcatggtcaccaggaccgct

SEQ ID NO: 1044521 - DNA, 33 bp, Homo sapien
cagccatcagttaaataagcagtgtgttcagct

SEQ ID NO: 1044522 - DNA, 33 bp, Homo sapien
cagccatcagttaaatgagcagtgtgttcagct

SEQ ID NO: 1044523 - DNA, 33 bp, Homo sapien
cctttgcacccgagagactcattttaattcctg

SEQ ID NO: 1044524 - DNA, 33 bp, Homo sapien
cctttgcacccgagagtctcattttaattcctg

SEQ ID NO: 1044525 - DNA, 33 bp, Homo sapien
acaatcaccacaaaacaatgggctgacagttac

SEQ ID NO: 1044526 - DNA, 33 bp, Homo sapien
acaatcaccacaaaacgatgggctgacagttac

SEQ ID NO: 1044527 - DNA, 33 bp, Homo sapien
ggttttgtcctatccaaatgttggaggtgggaa

SEQ ID NO: 1044528 - DNA, 33 bp, Homo sapien
ggttttgtcctatccagatgttggaggtgggaa

SEQ ID NO: 1044529 - DNA, 33 bp, Homo sapien
atactatacacacagacattaaacatgacaaag

SEQ ID NO: 1044530 - DNA, 33 bp, Homo sapien
atactatacacacagatattaaacatgacaaag

SEQ ID NO: 1044531 - DNA, 33 bp, Homo sapien
aaaaagacagaaaagcgcaagggttgcgagagt

SEQ ID NO: 1044532 - DNA, 33 bp, Homo sapien
aaaaagacagaaaagctcaagggttgcgagagt

SEQ ID NO: 1044533 - DNA, 33 bp, Homo sapien
tccttttacctctcctcaacatccaaacttcaa

SEQ ID NO: 1044534 - DNA, 33 bp, Homo sapien
tccttttacctctccttaacatccaaacttcaa

SEQ ID NO: 1044535 - DNA, 33 bp, Homo sapien
taattaatctctttccacgtgcaagaagtaaat

SEQ ID NO: 1044536 - DNA, 33 bp, Homo sapien
taattaatctctttcctcgtgcaagaagtaaat

SEQ ID NO: 1044537 - DNA, 33 bp, Homo sapien
aaaaattctaggccggacatgaatcccagcaca

SEQ ID NO: 1044538 - DNA, 33 bp, Homo sapien
aaaaattctaggccgggcatgaatcccagcaca

SEQ ID NO: 1044539 - DNA, 33 bp, Homo sapien
acactttcctcttggacgagtttcttacggctg

SEQ ID NO: 1044540 - DNA, 33 bp, Homo sapien
acactttcctcttggatgagtttcttacggctg

SEQ ID NO: 1044541 - DNA, 33 bp, Homo sapien
tgcatggcatcaagcacaggggatcttcctcca

SEQ ID NO: 1044542 - DNA, 33 bp, Homo sapien
tgcatggcatcaagcataggggatcttcctcca

SEQ ID NO: 1044543 - DNA, 33 bp, Homo sapien
caggtgccacagatacacagccttcgtttaatc

SEQ ID NO: 1044544 - DNA, 33 bp, Homo sapien
caggtgccacagatacgcagccttcgtttaatc

SEQ ID NO: 1044545 - DNA, 33 bp, Homo sapien
cttggagatctttccacgtcagtttatagagaa

SEQ ID NO: 1044546 - DNA, 33 bp, Homo sapien
cttggagatctttccatgtcagtttatagagaa

SEQ ID NO: 1044547 - DNA, 33 bp, Homo sapien
tgaacagaggtcaaaaccatgtgtaagtcttgc

SEQ ID NO: 1044548 - DNA, 33 bp, Homo sapien
tgaacagaggtcaaaatcatgtgtaagtcttgc

SEQ ID NO: 1044549 - DNA, 33 bp, Homo sapien
gggtgaggagagttcaccactgtagcctggtgg

SEQ ID NO: 1044550 - DNA, 33 bp, Homo sapien
gggtgaggagagttcatcactgtagcctggtgg

SEQ ID NO: 1044551 - DNA, 33 bp, Homo sapien
tatttgtatctcccaacaagccttgtaagtggg

SEQ ID NO: 1044552 - DNA, 33 bp, Homo sapien
tatttgtatctcccaataagccttgtaagtggg

SEQ ID NO: 1044553 - DNA, 33 bp, Homo sapien
ggttgagttgaggagacagcaaacagcctttga

SEQ ID NO: 1044554 - DNA, 33 bp, Homo sapien
ggttgagttgaggagagagcaaacagcctttga

SEQ ID NO: 1044555 - DNA, 33 bp, Homo sapien
gatcttcagatctgcgcactacaggcctgtgcc

SEQ ID NO: 1044556 - DNA, 33 bp, Homo sapien
gatcttcagatctgcgtactacaggcctgtgcc

SEQ ID NO: 1044557 - DNA, 33 bp, Homo sapien
actggatgcgatataaatgatgtaaatgccatg

SEQ ID NO: 1044558 - DNA, 33 bp, Homo sapien
actggatgcgatataagtgatgtaaatgccatg

SEQ ID NO: 1044559 - DNA, 33 bp, Homo sapien
gctgttccatagcccaagtaaaagggaacaagg

SEQ ID NO: 1044560 - DNA, 33 bp, Homo sapien
gctgttccatagcccacgtaaaagggaacaagg

SEQ ID NO: 1044561 - DNA, 33 bp, Homo sapien
ctgttatttttgcatcaatggattccacagtag

SEQ ID NO: 1044562 - DNA, 33 bp, Homo sapien
ctgttatttttgcatcgatggattccacagtag

SEQ ID NO: 1044563 - DNA, 33 bp, Homo sapien
aatttaacctgacacaatactatcttattagca

SEQ ID NO: 1044564 - DNA, 33 bp, Homo sapien
aatttaacctgacacagtactatcttattagca

SEQ ID NO: 1044565 - DNA, 33 bp, Homo sapien
aataaagagaggacaacgggcgagtcaagtggg

SEQ ID NO: 1044566 - DNA, 33 bp, Homo sapien
aataaagagaggacaatgggcgagtcaagtggg

SEQ ID NO: 1044567 - DNA, 33 bp, Homo sapien
gctttaagtgaaaccggatgttctaaaagggta

SEQ ID NO: 1044568 - DNA, 33 bp, Homo sapien
gctttaagtgaaaccgtatgttctaaaagggta

SEQ ID NO: 1044569 - DNA, 33 bp, Homo sapien
gctacggacaggcacaatcccacttctgatcag

SEQ ID NO: 1044570 - DNA, 33 bp, Homo sapien
gctacggacaggcacagtcccacttctgatcag

SEQ ID NO: 1044571 - DNA, 33 bp, Homo sapien
ctagcaaaggttattaaaatcagtagcaacaca

SEQ ID NO: 1044572 - DNA, 33 bp, Homo sapien
ctagcaaaggttattataatcagtagcaacaca

SEQ ID NO: 1044573 - DNA, 33 bp, Homo sapien
gactcatgagacatacactatcctctcagtcct

SEQ ID NO: 1044574 - DNA, 33 bp, Homo sapien
gactcatgagacatacgctatcctctcagtcct

SEQ ID NO: 1044575 - DNA, 33 bp, Homo sapien
aatagtattacaaagaatagctttactgtccta

SEQ ID NO: 1044576 - DNA, 33 bp, Homo sapien
aatagtattacaaagagtagctttactgtccta

SEQ ID NO: 1044577 - DNA, 33 bp, Homo sapien
gcctctctgaggaaccaaagtatgcaagctgag

SEQ ID NO: 1044578 - DNA, 33 bp, Homo sapien
gcctctctgaggaaccgaagtatgcaagctgag

SEQ ID NO: 1044579 - DNA, 33 bp, Homo sapien
aatggggtaaagtacacgcatttgccacaatga

SEQ ID NO: 1044580 - DNA, 33 bp, Homo sapien
aatggggtaaagtacatgcatttgccacaatga

SEQ ID NO: 1044581 - DNA, 33 bp, Homo sapien
tgagtgaagtaaaggtaaccacttagctctgtt

SEQ ID NO: 1044582 - DNA, 33 bp, Homo sapien
tgagtgaagtaaaggtgaccacttagctctgtt

SEQ ID NO: 1044583 - DNA, 33 bp, Homo sapien
atcattcctaccttctcactggcaattaaaata

SEQ ID NO: 1044584 - DNA, 33 bp, Homo sapien
atcattcctaccttcttactggcaattaaaata

SEQ ID NO: 1044585 - DNA, 33 bp, Homo sapien
tcaattatggaatccaagaactcatttatcacc

SEQ ID NO: 1044586 - DNA, 33 bp, Homo sapien
tcaattatggaatccaggaactcatttatcacc

SEQ ID NO: 1044587 - DNA, 33 bp, Homo sapien
atttaacaagccaatcaaactatttaactcttg

SEQ ID NO: 1044588 - DNA, 33 bp, Homo sapien
atttaacaagccaatccaactatttaactcttg

SEQ ID NO: 1044589 - DNA, 33 bp, Homo sapien
tgtgataagaactgtcacaattggataattttg

SEQ ID NO: 1044590 - DNA, 33 bp, Homo sapien
tgtgataagaactgtcgcaattggataattttg

SEQ ID NO: 1044591 - DNA, 33 bp, Homo sapien
agagctttgttgaggcagccaaaacacacatgg

SEQ ID NO: 1044592 - DNA, 33 bp, Homo sapien
agagctttgttgaggcggccaaaacacacatgg

SEQ ID NO: 1044593 - DNA, 33 bp, Homo sapien
tagtataccctgccccactaaaatcacactctt

SEQ ID NO: 1044594 - DNA, 33 bp, Homo sapien
tagtataccctgccccgctaaaatcacactctt

SEQ ID NO: 1044595 - DNA, 33 bp, Homo sapien
agaggctcagaagtcactcacctaaggttagct

SEQ ID NO: 1044596 - DNA, 33 bp, Homo sapien
agaggctcagaagtcattcacctaaggttagct

SEQ ID NO: 1044597 - DNA, 33 bp, Homo sapien
actagatgaagggataaagagtaacaggaggtg

SEQ ID NO: 1044598 - DNA, 33 bp, Homo sapien
actagatgaagggatagagagtaacaggaggtg

SEQ ID NO: 1044599 - DNA, 33 bp, Homo sapien
aattccacaaatgtcacctcccttcttcagcca

SEQ ID NO: 1044600 - DNA, 33 bp, Homo sapien
aattccacaaatgtcagctcccttcttcagcca

SEQ ID NO: 1044601 - DNA, 33 bp, Homo sapien
tgccaattccgcaggcaagaatgaagcgtgttt

SEQ ID NO: 1044602 - DNA, 33 bp, Homo sapien
tgccaattccgcaggcgagaatgaagcgtgttt

SEQ ID NO: 1044603 - DNA, 33 bp, Homo sapien
actgcgcacctataaaacaggtgataaccccac

SEQ ID NO: 1044604 - DNA, 33 bp, Homo sapien
actgcgcacctataaagcaggtgataaccccac

SEQ ID NO: 1044605 - DNA, 33 bp, Homo sapien
catcacatgccaaaaaaagcagtcaccgggcga

SEQ ID NO: 1044606 - DNA, 33 bp, Homo sapien
catcacatgccaaaaagagcagtcaccgggcga

SEQ ID NO: 1044607 - DNA, 33 bp, Homo sapien
gggcggtccacctctccgaaactgtttccctag

SEQ ID NO: 1044608 - DNA, 33 bp, Homo sapien
gggcggtccacctctctgaaactgtttccctag

SEQ ID NO: 1044609 - DNA, 33 bp, Homo sapien
catttaattttgtgatcataagttacacgtgaa

SEQ ID NO: 1044610 - DNA, 33 bp, Homo sapien
catttaattttgtgattataagttacacgtgaa

SEQ ID NO: 1044611 - DNA, 33 bp, Homo sapien
cccagacaaaatatgacatgagtcttcgcctga

SEQ ID NO: 1044612 - DNA, 33 bp, Homo sapien
cccagacaaaatatgagatgagtcttcgcctga

SEQ ID NO: 1044613 - DNA, 33 bp, Homo sapien
ctaacaccaaccacctcagatggtgccgacctc

SEQ ID NO: 1044614 - DNA, 33 bp, Homo sapien
ctaacaccaaccaccttagatggtgccgacctc

SEQ ID NO: 1044615 - DNA, 33 bp, Homo sapien
agccactagccacacacgtagctgctgacatta

SEQ ID NO: 1044616 - DNA, 33 bp, Homo sapien
agccactagccacacatgtagctgctgacatta

SEQ ID NO: 1044617 - DNA, 33 bp, Homo sapien
ctgcaaaatggttccacatcactacccaaattg

SEQ ID NO: 1044618 - DNA, 33 bp, Homo sapien
ctgcaaaatggttccatatcactacccaaattg

SEQ ID NO: 1044619 - DNA, 33 bp, Homo sapien
gggtaagggtggagaccggctcattgttggcaa

SEQ ID NO: 1044620 - DNA, 33 bp, Homo sapien
gggtaagggtggagactggctcattgttggcaa

SEQ ID NO: 1044621 - DNA, 33 bp, Homo sapien
atccaattttacatcaagttacccctccaggac

SEQ ID NO: 1044622 - DNA, 33 bp, Homo sapien
atccaattttacatcaggttacccctccaggac

SEQ ID NO: 1044623 - DNA, 33 bp, Homo sapien
ggcttattagtctatacattgcggtgtgtttcg

SEQ ID NO: 1044624 - DNA, 33 bp, Homo sapien
ggcttattagtctatatattgcggtgtgtttcg

SEQ ID NO: 1044625 - DNA, 33 bp, Homo sapien
gagctcaagatccatcactcgtataaagggcta

SEQ ID NO: 1044626 - DNA, 33 bp, Homo sapien
gagctcaagatccatcgctcgtataaagggcta

SEQ ID NO: 1044627 - DNA, 33 bp, Homo sapien
tcaaggaaactctggaatataaggtagggttct

SEQ ID NO: 1044628 - DNA, 33 bp, Homo sapien
tcaaggaaactctggagtataaggtagggttct

SEQ ID NO: 1044629 - DNA, 33 bp, Homo sapien
tggaatgtgtatggaacgtgtaataaatgtaag

SEQ ID NO: 1044630 - DNA, 33 bp, Homo sapien
tggaatgtgtatggaatgtgtaataaatgtaag

SEQ ID NO: 1044631 - DNA, 33 bp, Homo sapien
atcaataatcaaatccacagtgtatcagagggt

SEQ ID NO: 1044632 - DNA, 33 bp, Homo sapien
atcaataatcaaatccgcagtgtatcagagggt

SEQ ID NO: 1044633 - DNA, 33 bp, Homo sapien
taaggtgcctgcacaacggcgcacctctcagta

SEQ ID NO: 1044634 - DNA, 33 bp, Homo sapien
taaggtgcctgcacaatggcgcacctctcagta

SEQ ID NO: 1044635 - DNA, 33 bp, Homo sapien
aactcttaccccataggatgcccttttctgatt

SEQ ID NO: 1044636 - DNA, 33 bp, Homo sapien
aactcttaccccatagtatgcccttttctgatt

SEQ ID NO: 1044637 - DNA, 33 bp, Homo sapien
ctggtgaccatatcacgctcttaaacatcttct

SEQ ID NO: 1044638 - DNA, 33 bp, Homo sapien
ctggtgaccatatcactctcttaaacatcttct

SEQ ID NO: 1044639 - DNA, 33 bp, Homo sapien
tttaaagggaatggccaacagatattggattca

SEQ ID NO: 1044640 - DNA, 33 bp, Homo sapien
tttaaagggaatggccgacagatattggattca

SEQ ID NO: 1044641 - DNA, 33 bp, Homo sapien
agtacattctgttaaacgtgcagttagattagg

SEQ ID NO: 1044642 - DNA, 33 bp, Homo sapien
agtacattctgttaaatgtgcagttagattagg

SEQ ID NO: 1044643 - DNA, 33 bp, Homo sapien
tctttaattagtgacaaataaaatctaattcta

SEQ ID NO: 1044644 - DNA, 33 bp, Homo sapien
tctttaattagtgacacataaaatctaattcta

SEQ ID NO: 1044645 - DNA, 33 bp, Homo sapien
gccaacgcgcctggctaagaggctctttcaata

SEQ ID NO: 1044646 - DNA, 33 bp, Homo sapien
gccaacgcgcctggctgagaggctctttcaata

SEQ ID NO: 1044647 - DNA, 33 bp, Homo sapien
gcatgaagattaggtaaaggaaaatcaggccag

SEQ ID NO: 1044648 - DNA, 33 bp, Homo sapien
gcatgaagattaggtataggaaaatcaggccag

SEQ ID NO: 1044649 - DNA, 33 bp, Homo sapien
gccacctttctactcaaaatcaccaatggcctg

SEQ ID NO: 1044650 - DNA, 33 bp, Homo sapien
gccacctttctactcagaatcaccaatggcctg

SEQ ID NO: 1044651 - DNA, 33 bp, Homo sapien
gctcagcatcaagaaaaaatgttttgcagtccc

SEQ ID NO: 1044652 - DNA, 33 bp, Homo sapien
gctcagcatcaagaaacaatgttttgcagtccc

SEQ ID NO: 1044653 - DNA, 33 bp, Homo sapien
ttattttgtacttgagaaaactttgcctctgag

SEQ ID NO: 1044654 - DNA, 33 bp, Homo sapien
ttattttgtacttgaggaaactttgcctctgag

SEQ ID NO: 1044655 - DNA, 33 bp, Homo sapien
attccacctggaatataaaggtctagtgaccag

SEQ ID NO: 1044656 - DNA, 33 bp, Homo sapien
attccacctggaatatcaaggtctagtgaccag

SEQ ID NO: 1044657 - DNA, 33 bp, Homo sapien
gcaataagaacttaacaaatggccaagactaaa

SEQ ID NO: 1044658 - DNA, 33 bp, Homo sapien
gcaataagaacttaacgaatggccaagactaaa

SEQ ID NO: 1044659 - DNA, 33 bp, Homo sapien
cccacccacttctgtaggcttattgaatataag

SEQ ID NO: 1044660 - DNA, 33 bp, Homo sapien
cccacccacttctgtatgcttattgaatataag

SEQ ID NO: 1044661 - DNA, 33 bp, Homo sapien
cacctcaatcaagcccaataacctgaaccacaa

SEQ ID NO: 1044662 - DNA, 33 bp, Homo sapien
cacctcaatcaagcccgataacctgaaccacaa

SEQ ID NO: 1044663 - DNA, 33 bp, Homo sapien
tgaattaagattacacaggctaaagaataaatg

SEQ ID NO: 1044664 - DNA, 33 bp, Homo sapien
tgaattaagattacacgggctaaagaataaatg

SEQ ID NO: 1044665 - DNA, 33 bp, Homo sapien
atattacacattatccccattctttgaagggac

SEQ ID NO: 1044666 - DNA, 33 bp, Homo sapien
atattacacattatcctcattctttgaagggac

SEQ ID NO: 1044667 - DNA, 33 bp, Homo sapien
caaagaacactaagaacgacctgtcagagaagt

SEQ ID NO: 1044668 - DNA, 33 bp, Homo sapien
caaagaacactaagaatgacctgtcagagaagt

SEQ ID NO: 1044669 - DNA, 33 bp, Homo sapien
taaatgccaggaaaaccaaaatcagaaagagtc

SEQ ID NO: 1044670 - DNA, 33 bp, Homo sapien
taaatgccaggaaaactaaaatcagaaagagtc

SEQ ID NO: 1044671 - DNA, 33 bp, Homo sapien
tcataatgagttaaaaagtccaagtaacaggga

SEQ ID NO: 1044672 - DNA, 33 bp, Homo sapien
tcataatgagttaaaacgtccaagtaacaggga

SEQ ID NO: 1044673 - DNA, 33 bp, Homo sapien
tattagactttggaaaaccagactgtatcaggc

SEQ ID NO: 1044674 - DNA, 33 bp, Homo sapien
tattagactttggaaacccagactgtatcaggc

SEQ ID NO: 1044675 - DNA, 33 bp, Homo sapien
acaataaggaactaataagtgctgggaaataaa

SEQ ID NO: 1044676 - DNA, 33 bp, Homo sapien
acaataaggaactaatgagtgctgggaaataaa

SEQ ID NO: 1044677 - DNA, 33 bp, Homo sapien
cctgaaggtagaaatacatcttgttcttgttct

SEQ ID NO: 1044678 - DNA, 33 bp, Homo sapien
cctgaaggtagaaatatatcttgttcttgttct

SEQ ID NO: 1044679 - DNA, 33 bp, Homo sapien
tgatgacatagtgagacaatattttaggtatat

SEQ ID NO: 1044680 - DNA, 33 bp, Homo sapien
tgatgacatagtgagataatattttaggtatat

SEQ ID NO: 1044681 - DNA, 33 bp, Homo sapien
cattatggaatagcacaggctttgggatcagat

SEQ ID NO: 1044682 - DNA, 33 bp, Homo sapien
cattatggaatagcaccggctttgggatcagat

SEQ ID NO: 1044683 - DNA, 33 bp, Homo sapien
tctggattcttgatgtcaaatctcttcgactcc

SEQ ID NO: 1044684 - DNA, 33 bp, Homo sapien
tctggattcttgatgttaaatctcttcgactcc

SEQ ID NO: 1044685 - DNA, 33 bp, Homo sapien
cacctgtattttggaacggtgcttcatcttgtc

SEQ ID NO: 1044686 - DNA, 33 bp, Homo sapien
cacctgtattttggaatggtgcttcatcttgtc

SEQ ID NO: 1044687 - DNA, 33 bp, Homo sapien
tgaataggtaagaaacagattcttcattgtgaa

SEQ ID NO: 1044688 - DNA, 33 bp, Homo sapien
tgaataggtaagaaacggattcttcattgtgaa

SEQ ID NO: 1044689 - DNA, 33 bp, Homo sapien
aagaccaagataggcaatacttttttttttttt

SEQ ID NO: 1044690 - DNA, 33 bp, Homo sapien
aagaccaagataggcagtacttttttttttttt

SEQ ID NO: 1044691 - DNA, 33 bp, Homo sapien
tggatcaaattcgaaccatcgaacggaatcagg

SEQ ID NO: 1044692 - DNA, 33 bp, Homo sapien
tggatcaaattcgaactatcgaacggaatcagg

SEQ ID NO: 1044693 - DNA, 33 bp, Homo sapien
cttcacatcttaaaaactctacaactgggggaa

SEQ ID NO: 1044694 - DNA, 33 bp, Homo sapien
cttcacatcttaaaaagtctacaactgggggaa

SEQ ID NO: 1044695 - DNA, 33 bp, Homo sapien
tcattcagtttactctaaacacaccagccttga

SEQ ID NO: 1044696 - DNA, 33 bp, Homo sapien
tcattcagtttactctgaacacaccagccttga

SEQ ID NO: 1044697 - DNA, 33 bp, Homo sapien
gtgtagttgattgagtcacgtagcgtttatagt

SEQ ID NO: 1044698 - DNA, 33 bp, Homo sapien
gtgtagttgattgagttacgtagcgtttatagt

SEQ ID NO: 1044699 - DNA, 33 bp, Homo sapien
acattatactattgcacatggtgtttattctgt

SEQ ID NO: 1044700 - DNA, 33 bp, Homo sapien
acattatactattgcatatggtgtttattctgt

SEQ ID NO: 1044701 - DNA, 33 bp, Homo sapien
ccatttccaacttagcaaaacagaaattgtgat

SEQ ID NO: 1044702 - DNA, 33 bp, Homo sapien
ccatttccaacttagcgaaacagaaattgtgat

SEQ ID NO: 1044703 - DNA, 33 bp, Homo sapien
atgagcaagatggaaaagatttgttctgtagaa

SEQ ID NO: 1044704 - DNA, 33 bp, Homo sapien
atgagcaagatggaaaggatttgttctgtagaa

SEQ ID NO: 1044705 - DNA, 33 bp, Homo sapien
ataaacgaacgctgaacgtatgctagtaccagg

SEQ ID NO: 1044706 - DNA, 33 bp, Homo sapien
ataaacgaacgctgaaggtatgctagtaccagg

SEQ ID NO: 1044707 - DNA, 33 bp, Homo sapien
atgaggaatggaaagaacacactactgcattta

SEQ ID NO: 1044708 - DNA, 33 bp, Homo sapien
atgaggaatggaaagagcacactactgcattta

SEQ ID NO: 1044709 - DNA, 33 bp, Homo sapien
gaagagggttcagagaagatatttgaaggcctc

SEQ ID NO: 1044710 - DNA, 33 bp, Homo sapien
gaagagggttcagagaggatatttgaaggcctc

SEQ ID NO: 1044711 - DNA, 33 bp, Homo sapien
attagtatagccatgaggaaatattacacactt

SEQ ID NO: 1044712 - DNA, 33 bp, Homo sapien
attagtatagccatgatgaaatattacacactt

SEQ ID NO: 1044713 - DNA, 33 bp, Homo sapien
gaaactgagctaattcaaggcagttaatagtga

SEQ ID NO: 1044714 - DNA, 33 bp, Homo sapien
gaaactgagctaattcgaggcagttaatagtga

SEQ ID NO: 1044715 - DNA, 33 bp, Homo sapien
atatgcctaagatcccagaggcagtctaggagt

SEQ ID NO: 1044716 - DNA, 33 bp, Homo sapien
atatgcctaagatcccggaggcagtctaggagt

SEQ ID NO: 1044717 - DNA, 33 bp, Homo sapien
agcaggagttgaataaatatttgccaaaggaat

SEQ ID NO: 1044718 - DNA, 33 bp, Homo sapien
agcaggagttgaataagtatttgccaaaggaat

SEQ ID NO: 1044719 - DNA, 33 bp, Homo sapien
accaacctcagtgccacagatgtattaatgtga

SEQ ID NO: 1044720 - DNA, 33 bp, Homo sapien
accaacctcagtgccagagatgtattaatgtga

SEQ ID NO: 1044721 - DNA, 33 bp, Homo sapien
gaggtgggaagccatactactttttcaggtatc

SEQ ID NO: 1044722 - DNA, 33 bp, Homo sapien
gaggtgggaagccatagtactttttcaggtatc

SEQ ID NO: 1044723 - DNA, 33 bp, Homo sapien
ggtagaaatttctggaccagtaaggaagctaat

SEQ ID NO: 1044724 - DNA, 33 bp, Homo sapien
ggtagaaatttctggagcagtaaggaagctaat

SEQ ID NO: 1044725 - DNA, 33 bp, Homo sapien
agttagggtcacagaactatgaacagactgcta

SEQ ID NO: 1044726 - DNA, 33 bp, Homo sapien
agttagggtcacagaattatgaacagactgcta

SEQ ID NO: 1044727 - DNA, 33 bp, Homo sapien
tcttctggcttccacacgtgataaatctagttc

SEQ ID NO: 1044728 - DNA, 33 bp, Homo sapien
tcttctggcttccacatgtgataaatctagttc

SEQ ID NO: 1044729 - DNA, 33 bp, Homo sapien
ggggctgagtttgttaaaaaagcagctaaatgt

SEQ ID NO: 1044730 - DNA, 33 bp, Homo sapien
ggggctgagtttgttataaaagcagctaaatgt

SEQ ID NO: 1044731 - DNA, 33 bp, Homo sapien
agcccaaatcaggaaacgccttcaaaggagttg

SEQ ID NO: 1044732 - DNA, 33 bp, Homo sapien
agcccaaatcaggaaatgccttcaaaggagttg

SEQ ID NO: 1044733 - DNA, 33 bp, Homo sapien
cttgagctcacaacccagcctgttagttgataa

SEQ ID NO: 1044734 - DNA, 33 bp, Homo sapien
cttgagctcacaacccggcctgttagttgataa

SEQ ID NO: 1044735 - DNA, 33 bp, Homo sapien
atagatgcaaagcccaaagcaaacgctgcaatg

SEQ ID NO: 1044736 - DNA, 33 bp, Homo sapien
atagatgcaaagcccatagcaaacgctgcaatg

SEQ ID NO: 1044737 - DNA, 33 bp, Homo sapien
gaccttgaactcagacaggctcttcctctgccc

SEQ ID NO: 1044738 - DNA, 33 bp, Homo sapien
gaccttgaactcagacgggctcttcctctgccc

SEQ ID NO: 1044739 - DNA, 33 bp, Homo sapien
agattaccatgataataaggcagaaattctaat

SEQ ID NO: 1044740 - DNA, 33 bp, Homo sapien
agattaccatgataatgaggcagaaattctaat

SEQ ID NO: 1044741 - DNA, 33 bp, Homo sapien
gaagctcatggacataaatgtaaaacctaaaac

SEQ ID NO: 1044742 - DNA, 33 bp, Homo sapien
gaagctcatggacatatatgtaaaacctaaaac

SEQ ID NO: 1044743 - DNA, 33 bp, Homo sapien
ttgttttgtatagatacagggtctcacgatgtt

SEQ ID NO: 1044744 - DNA, 33 bp, Homo sapien
ttgttttgtatagatagagggtctcacgatgtt

SEQ ID NO: 1044745 - DNA, 33 bp, Homo sapien
accaacctcaccactacatgaacatccttgtgc

SEQ ID NO: 1044746 - DNA, 33 bp, Homo sapien
accaacctcaccactatatgaacatccttgtgc

SEQ ID NO: 1044747 - DNA, 33 bp, Homo sapien
atcagatccagctgagcatgagttctggccctg

SEQ ID NO: 1044748 - DNA, 33 bp, Homo sapien
atcagatccagctgaggatgagttctggccctg

SEQ ID NO: 1044749 - DNA, 33 bp, Homo sapien
ttcataaaggcaataaacaaaggaatgactcgc

SEQ ID NO: 1044750 - DNA, 33 bp, Homo sapien
ttcataaaggcaataagcaaaggaatgactcgc

SEQ ID NO: 1044751 - DNA, 33 bp, Homo sapien
agtggcccactgtgacaagagcatacagagaaa

SEQ ID NO: 1044752 - DNA, 33 bp, Homo sapien
agtggcccactgtgacgagagcatacagagaaa

SEQ ID NO: 1044753 - DNA, 33 bp, Homo sapien
ggtcactaccacccacagccatgctccctggca

SEQ ID NO: 1044754 - DNA, 33 bp, Homo sapien
ggtcactaccacccacggccatgctccctggca

SEQ ID NO: 1044755 - DNA, 33 bp, Homo sapien
aaaaagaaaagaaaaacttcatctatcatagcc

SEQ ID NO: 1044756 - DNA, 33 bp, Homo sapien
aaaaagaaaagaaaaagttcatctatcatagcc

SEQ ID NO: 1044757 - DNA, 33 bp, Homo sapien
tggtcccataagatcacaacgccgtatttctcc

SEQ ID NO: 1044758 - DNA, 33 bp, Homo sapien
tggtcccataagatcataacgccgtatttctcc

SEQ ID NO: 1044759 - DNA, 33 bp, Homo sapien
accctttacacttccacgggatcctcagggcca

SEQ ID NO: 1044760 - DNA, 33 bp, Homo sapien
accctttacacttccatgggatcctcagggcca

SEQ ID NO: 1044761 - DNA, 33 bp, Homo sapien
tgctgacgagattaccaggcttcgagacttcac

SEQ ID NO: 1044762 - DNA, 33 bp, Homo sapien
tgctgacgagattaccgggcttcgagacttcac

SEQ ID NO: 1044763 - DNA, 33 bp, Homo sapien
aatagaaagtcctaacaagcggccgcgcacggt

SEQ ID NO: 1044764 - DNA, 33 bp, Homo sapien
aatagaaagtcctaacgagcggccgcgcacggt

SEQ ID NO: 1044765 - DNA, 33 bp, Homo sapien
tttgttcagccaacagaagcgtccttttctaat

SEQ ID NO: 1044766 - DNA, 33 bp, Homo sapien
tttgttcagccaacaggagcgtccttttctaat

SEQ ID NO: 1044767 - DNA, 33 bp, Homo sapien
agtaaaattataatcccatgtttgacatcaaaa

SEQ ID NO: 1044768 - DNA, 33 bp, Homo sapien
agtaaaattataatccgatgtttgacatcaaaa

SEQ ID NO: 1044769 - DNA, 33 bp, Homo sapien
caggtctcctgcaaaacgcccagaaatgacctt

SEQ ID NO: 1044770 - DNA, 33 bp, Homo sapien
caggtctcctgcaaaatgcccagaaatgacctt

SEQ ID NO: 1044771 - DNA, 33 bp, Homo sapien
tttatccagctgagaaatctttcacacagaatt

SEQ ID NO: 1044772 - DNA, 33 bp, Homo sapien
tttatccagctgagaagtctttcacacagaatt

SEQ ID NO: 1044773 - DNA, 33 bp, Homo sapien
agtgacaagggaaacccaacatcttactcttaa

SEQ ID NO: 1044774 - DNA, 33 bp, Homo sapien
agtgacaagggaaacctaacatcttactcttaa

SEQ ID NO: 1044775 - DNA, 33 bp, Homo sapien
gaacttatgaaataagcccttgttagagaataa

SEQ ID NO: 1044776 - DNA, 33 bp, Homo sapien
gaacttatgaaataagtccttgttagagaataa

SEQ ID NO: 1044777 - DNA, 33 bp, Homo sapien
gagaatctgtgtatcacaagccttgagaaatta

SEQ ID NO: 1044778 - DNA, 33 bp, Homo sapien
gagaatctgtgtatcataagccttgagaaatta

SEQ ID NO: 1044779 - DNA, 33 bp, Homo sapien
aatcggcttgatgttacgtgttttatgatttcc

SEQ ID NO: 1044780 - DNA, 33 bp, Homo sapien
aatcggcttgatgttatgtgttttatgatttcc

SEQ ID NO: 1044781 - DNA, 33 bp, Homo sapien
acagcttcaagagttgcaggggcatagaacaaa

SEQ ID NO: 1044782 - DNA, 33 bp, Homo sapien
acagcttcaagagttgtaggggcatagaacaaa

SEQ ID NO: 1044783 - DNA, 33 bp, Homo sapien
cccattcatcagataacctgctttggagtgagc

SEQ ID NO: 1044784 - DNA, 33 bp, Homo sapien
cccattcatcagataatctgctttggagtgagc

SEQ ID NO: 1044785 - DNA, 33 bp, Homo sapien
cttctatccacccttacggcaaacagacttctc

SEQ ID NO: 1044786 - DNA, 33 bp, Homo sapien
cttctatccacccttatggcaaacagacttctc

SEQ ID NO: 1044787 - DNA, 33 bp, Homo sapien
aaacagaaaccactgcaataaggtttaggtaga

SEQ ID NO: 1044788 - DNA, 33 bp, Homo sapien
aaacagaaaccactgcgataaggtttaggtaga

SEQ ID NO: 1044789 - DNA, 33 bp, Homo sapien
catatatgcaagttgaaaatggagagcacattt

SEQ ID NO: 1044790 - DNA, 33 bp, Homo sapien
catatatgcaagttgagaatggagagcacattt

SEQ ID NO: 1044791 - DNA, 33 bp, Homo sapien
ccaagactctactgaaagataagttaggtttca

SEQ ID NO: 1044792 - DNA, 33 bp, Homo sapien
ccaagactctactgaaggataagttaggtttca

SEQ ID NO: 1044793 - DNA, 33 bp, Homo sapien
cctcatcttcaaaccaagcataataaaatctac

SEQ ID NO: 1044794 - DNA, 33 bp, Homo sapien
cctcatcttcaaaccaggcataataaaatctac

SEQ ID NO: 1044795 - DNA, 33 bp, Homo sapien
cctgcttagcttgctcaactgattgtgccagaa

SEQ ID NO: 1044796 - DNA, 33 bp, Homo sapien
cctgcttagcttgctcgactgattgtgccagaa

SEQ ID NO: 1044797 - DNA, 33 bp, Homo sapien
caatctggtttacctaagatggaggaaggggtt

SEQ ID NO: 1044798 - DNA, 33 bp, Homo sapien
caatctggtttacctaggatggaggaaggggtt

SEQ ID NO: 1044799 - DNA, 33 bp, Homo sapien
catttgttgaataaatcaagatatgaatgtgta

SEQ ID NO: 1044800 - DNA, 33 bp, Homo sapien
catttgttgaataaatgaagatatgaatgtgta

SEQ ID NO: 1044801 - DNA, 33 bp, Homo sapien
tatgaatgtgtagactcaatcactctatgaaga

SEQ ID NO: 1044802 - DNA, 33 bp, Homo sapien
tatgaatgtgtagactgaatcactctatgaaga

SEQ ID NO: 1044803 - DNA, 33 bp, Homo sapien
gactgaaattctctacccttgccatgccaagga

SEQ ID NO: 1044804 - DNA, 33 bp, Homo sapien
gactgaaattctctactcttgccatgccaagga

SEQ ID NO: 1044805 - DNA, 33 bp, Homo sapien
atagtgagaaaaccctaactcaatggctacctt

SEQ ID NO: 1044806 - DNA, 33 bp, Homo sapien
atagtgagaaaaccctgactcaatggctacctt

SEQ ID NO: 1044807 - DNA, 33 bp, Homo sapien
aaaaaggactaaattacactactactgctgaac

SEQ ID NO: 1044808 - DNA, 33 bp, Homo sapien
aaaaaggactaaattatactactactgctgaac

SEQ ID NO: 1044809 - DNA, 33 bp, Homo sapien
ctacttcagtataaaccggtcttatttgttctg

SEQ ID NO: 1044810 - DNA, 33 bp, Homo sapien
ctacttcagtataaactggtcttatttgttctg

SEQ ID NO: 1044811 - DNA, 33 bp, Homo sapien
agagaacaaatcagataaaacaagagtactgta

SEQ ID NO: 1044812 - DNA, 33 bp, Homo sapien
agagaacaaatcagatgaaacaagagtactgta

SEQ ID NO: 1044813 - DNA, 33 bp, Homo sapien
gaagtagatggtcttacctctattttatgggag

SEQ ID NO: 1044814 - DNA, 33 bp, Homo sapien
gaagtagatggtcttatctctattttatgggag

SEQ ID NO: 1044815 - DNA, 33 bp, Homo sapien
aatgcgctttggattgaagagacctaggtctga

SEQ ID NO: 1044816 - DNA, 33 bp, Homo sapien
aatgcgctttggattggagagacctaggtctga

SEQ ID NO: 1044817 - DNA, 33 bp, Homo sapien
ggcaataggttaagaacatacaagacactcaca

SEQ ID NO: 1044818 - DNA, 33 bp, Homo sapien
ggcaataggttaagaatatacaagacactcaca

SEQ ID NO: 1044819 - DNA, 33 bp, Homo sapien
attaaattagggactacctcattcactattgta

SEQ ID NO: 1044820 - DNA, 33 bp, Homo sapien
attaaattagggactatctcattcactattgta

SEQ ID NO: 1044821 - DNA, 33 bp, Homo sapien
tgtggcttttgccagacaactgcatattctcta

SEQ ID NO: 1044822 - DNA, 33 bp, Homo sapien
tgtggcttttgccagataactgcatattctcta

SEQ ID NO: 1044823 - DNA, 33 bp, Homo sapien
gtggaaaggaatctcaaaaccactacaaggaga

SEQ ID NO: 1044824 - DNA, 33 bp, Homo sapien
gtggaaaggaatctcagaaccactacaaggaga

SEQ ID NO: 1044825 - DNA, 33 bp, Homo sapien
tgatttgttatatgtgcatttagctacaattca

SEQ ID NO: 1044826 - DNA, 33 bp, Homo sapien
tgatttgttatatgtgtatttagctacaattca

SEQ ID NO: 1044827 - DNA, 33 bp, Homo sapien
ccttggtgtggttgtccgaatttcagttgtatt

SEQ ID NO: 1044828 - DNA, 33 bp, Homo sapien
ccttggtgtggttgtctgaatttcagttgtatt

SEQ ID NO: 1044829 - DNA, 33 bp, Homo sapien
cttcacttttcaccacaatctacttcaccctag

SEQ ID NO: 1044830 - DNA, 33 bp, Homo sapien
cttcacttttcaccacgatctacttcaccctag

SEQ ID NO: 1044831 - DNA, 33 bp, Homo sapien
tttttgctcttatcccccagaaacatcaataac

SEQ ID NO: 1044832 - DNA, 33 bp, Homo sapien
tttttgctcttatccctcagaaacatcaataac

SEQ ID NO: 1044833 - DNA, 33 bp, Homo sapien
tgctaaatctgttggtcaatttttaatcctcat

SEQ ID NO: 1044834 - DNA, 33 bp, Homo sapien
tgctaaatctgttggtgaatttttaatcctcat

SEQ ID NO: 1044835 - DNA, 33 bp, Homo sapien
ttcaaaagctattcagaaccgtggcaaccgcta

SEQ ID NO: 1044836 - DNA, 33 bp, Homo sapien
ttcaaaagctattcaggaccgtggcaaccgcta

SEQ ID NO: 1044837 - DNA, 33 bp, Homo sapien
aaagtattttgactgacatcttatagctaacga

SEQ ID NO: 1044838 - DNA, 33 bp, Homo sapien
aaagtattttgactgagatcttatagctaacga

SEQ ID NO: 1044839 - DNA, 33 bp, Homo sapien
tgcccatcaaaacctactaaaaattattcccat

SEQ ID NO: 1044840 - DNA, 33 bp, Homo sapien
tgcccatcaaaacctagtaaaaattattcccat

SEQ ID NO: 1044841 - DNA, 33 bp, Homo sapien
tcaaataactcactacaagcaaacaagcccacc

SEQ ID NO: 1044842 - DNA, 33 bp, Homo sapien
tcaaataactcactacgagcaaacaagcccacc

SEQ ID NO: 1044843 - DNA, 33 bp, Homo sapien
gagataggcaacaatacgacttacaatgctcac

SEQ ID NO: 1044844 - DNA, 33 bp, Homo sapien
gagataggcaacaatatgacttacaatgctcac

SEQ ID NO: 1044845 - DNA, 33 bp, Homo sapien
ttagggtagactaaaacttcagaaaacagactt

SEQ ID NO: 1044846 - DNA, 33 bp, Homo sapien
ttagggtagactaaaatttcagaaaacagactt

SEQ ID NO: 1044847 - DNA, 33 bp, Homo sapien
gaatgccatccacatacactagaaactggcagc

SEQ ID NO: 1044848 - DNA, 33 bp, Homo sapien
gaatgccatccacatatactagaaactggcagc

SEQ ID NO: 1044849 - DNA, 33 bp, Homo sapien
tgactagcattacagaaagacttcctcaaaaca

SEQ ID NO: 1044850 - DNA, 33 bp, Homo sapien
tgactagcattacagagagacttcctcaaaaca

SEQ ID NO: 1044851 - DNA, 33 bp, Homo sapien
tttaaataggtgggaaatgatccatttttctct

SEQ ID NO: 1044852 - DNA, 33 bp, Homo sapien
tttaaataggtgggaagtgatccatttttctct

SEQ ID NO: 1044853 - DNA, 33 bp, Homo sapien
ttaagaaaattacggccataaaacaaatgcagt

SEQ ID NO: 1044854 - DNA, 33 bp, Homo sapien
ttaagaaaattacggctataaaacaaatgcagt

SEQ ID NO: 1044855 - DNA, 33 bp, Homo sapien
agactgagttctggcaagatgcgccagtgcctg

SEQ ID NO: 1044856 - DNA, 33 bp, Homo sapien
agactgagttctggcaggatgcgccagtgcctg

SEQ ID NO: 1044857 - DNA, 33 bp, Homo sapien
catttcgctgtgaagacgacttttagtgtacct

SEQ ID NO: 1044858 - DNA, 33 bp, Homo sapien
catttcgctgtgaagatgacttttagtgtacct

SEQ ID NO: 1044859 - DNA, 33 bp, Homo sapien
tctgctgagtacattaaatctgatactatattc

SEQ ID NO: 1044860 - DNA, 33 bp, Homo sapien
tctgctgagtacattacatctgatactatattc

SEQ ID NO: 1044861 - DNA, 33 bp, Homo sapien
actcctttacctttcccatctatgcaaaatgga

SEQ ID NO: 1044862 - DNA, 33 bp, Homo sapien
actcctttacctttcctatctatgcaaaatgga

SEQ ID NO: 1044863 - DNA, 33 bp, Homo sapien
gatcacaatttgacacaagattcaagtggggat

SEQ ID NO: 1044864 - DNA, 33 bp, Homo sapien
gatcacaatttgacacgagattcaagtggggat

SEQ ID NO: 1044865 - DNA, 33 bp, Homo sapien
atgctttcatcacaaagaatataatatcagtaa

SEQ ID NO: 1044866 - DNA, 33 bp, Homo sapien
atgctttcatcacaaataatataatatcagtaa

SEQ ID NO: 1044867 - DNA, 33 bp, Homo sapien
ttcagatttttaacaggcgttagatattatgga

SEQ ID NO: 1044868 - DNA, 33 bp, Homo sapien
ttcagatttttaacagtcgttagatattatgga

SEQ ID NO: 1044869 - DNA, 33 bp, Homo sapien
aatcaaagctagagaacacattgcttatgttat

SEQ ID NO: 1044870 - DNA, 33 bp, Homo sapien
aatcaaagctagagaatacattgcttatgttat

SEQ ID NO: 1044871 - DNA, 33 bp, Homo sapien
tactttcactttcaggacacttccttatgtttc

SEQ ID NO: 1044872 - DNA, 33 bp, Homo sapien
tactttcactttcaggtcacttccttatgtttc

SEQ ID NO: 1044873 - DNA, 33 bp, Homo sapien
aaatggctgatctcagcattgctatctgtagcc

SEQ ID NO: 1044874 - DNA, 33 bp, Homo sapien
aaatggctgatctcagtattgctatctgtagcc

SEQ ID NO: 1044875 - DNA, 33 bp, Homo sapien
aatgcccttttctgagcaattcagttagaatga

SEQ ID NO: 1044876 - DNA, 33 bp, Homo sapien
aatgcccttttctgaggaattcagttagaatga

SEQ ID NO: 1044877 - DNA, 33 bp, Homo sapien
taaccggaaggctgaaaaagactgaatggaaag

SEQ ID NO: 1044878 - DNA, 33 bp, Homo sapien
taaccggaaggctgaagaagactgaatggaaag

SEQ ID NO: 1044879 - DNA, 33 bp, Homo sapien
tgaccacaccaacaaactccacagagcatggat

SEQ ID NO: 1044880 - DNA, 33 bp, Homo sapien
tgaccacaccaacaaattccacagagcatggat

SEQ ID NO: 1044881 - DNA, 33 bp, Homo sapien
agagaaattagcaaaaccttgaagaccagatct

SEQ ID NO: 1044882 - DNA, 33 bp, Homo sapien
agagaaattagcaaaatcttgaagaccagatct

SEQ ID NO: 1044883 - DNA, 33 bp, Homo sapien
actgtccttgagggaactgaaaaaacactcact

SEQ ID NO: 1044884 - DNA, 33 bp, Homo sapien
actgtccttgagggaattgaaaaaacactcact

SEQ ID NO: 1044885 - DNA, 33 bp, Homo sapien
tgtgactacaatgagcagagccacatacagatc

SEQ ID NO: 1044886 - DNA, 33 bp, Homo sapien
tgtgactacaatgagcggagccacatacagatc

SEQ ID NO: 1044887 - DNA, 33 bp, Homo sapien
tattaacctgttactacagcatttcatagaatc

SEQ ID NO: 1044888 - DNA, 33 bp, Homo sapien
tattaacctgttactatagcatttcatagaatc

SEQ ID NO: 1044889 - DNA, 33 bp, Homo sapien
atatcaccagcaactacagaatatgcatttttt

SEQ ID NO: 1044890 - DNA, 33 bp, Homo sapien
atatcaccagcaactatagaatatgcatttttt

SEQ ID NO: 1044891 - DNA, 33 bp, Homo sapien
ttgatagtattgttcaagtcttctatctttact

SEQ ID NO: 1044892 - DNA, 33 bp, Homo sapien
ttgatagtattgttcacgtcttctatctttact

SEQ ID NO: 1044893 - DNA, 33 bp, Homo sapien
atctaattgtgtgggactagaattgtatgtttg

SEQ ID NO: 1044894 - DNA, 33 bp, Homo sapien
atctaattgtgtgggagtagaattgtatgtttg

SEQ ID NO: 1044895 - DNA, 33 bp, Homo sapien
tatttttgtaccagtacagcttgaatcagatac

SEQ ID NO: 1044896 - DNA, 33 bp, Homo sapien
tatttttgtaccagtatagcttgaatcagatac

SEQ ID NO: 1044897 - DNA, 33 bp, Homo sapien
gtgatggatatactacaatgagaagcactaata

SEQ ID NO: 1044898 - DNA, 33 bp, Homo sapien
gtgatggatatactaccatgagaagcactaata

SEQ ID NO: 1044899 - DNA, 33 bp, Homo sapien
tttgtacattttccacaagaagttattcttaca

SEQ ID NO: 1044900 - DNA, 33 bp, Homo sapien
tttgtacattttccacgagaagttattcttaca

SEQ ID NO: 1044901 - DNA, 33 bp, Homo sapien
aatttcatttgcaaaaaccaatgtgtccatttc

SEQ ID NO: 1044902 - DNA, 33 bp, Homo sapien
aatttcatttgcaaaagccaatgtgtccatttc

SEQ ID NO: 1044903 - DNA, 33 bp, Homo sapien
caggctgcacaatctccaatgtgaaaacatcag

SEQ ID NO: 1044904 - DNA, 33 bp, Homo sapien
caggctgcacaatctctaatgtgaaaacatcag

SEQ ID NO: 1044905 - DNA, 33 bp, Homo sapien
cttttgcaatgacatacctgtgtgaggtcaaat

SEQ ID NO: 1044906 - DNA, 33 bp, Homo sapien
cttttgcaatgacatatctgtgtgaggtcaaat

SEQ ID NO: 1044907 - DNA, 33 bp, Homo sapien
aaaaagttaactgacacggtttcaggcttctca

SEQ ID NO: 1044908 - DNA, 33 bp, Homo sapien
aaaaagttaactgacatggtttcaggcttctca

SEQ ID NO: 1044909 - DNA, 33 bp, Homo sapien
agaaagcatcctgtagaaaatgcccattaagca

SEQ ID NO: 1044910 - DNA, 33 bp, Homo sapien
agaaagcatcctgtaggaaatgcccattaagca

SEQ ID NO: 1044911 - DNA, 33 bp, Homo sapien
ggaaacactggtaagaacattcatagtaacatt

SEQ ID NO: 1044912 - DNA, 33 bp, Homo sapien
ggaaacactggtaagagcattcatagtaacatt

SEQ ID NO: 1044913 - DNA, 33 bp, Homo sapien
caaggtcacactgttaataaatagtgctggagc

SEQ ID NO: 1044914 - DNA, 33 bp, Homo sapien
caaggtcacactgttactaaatagtgctggagc

SEQ ID NO: 1044915 - DNA, 33 bp, Homo sapien
tagagatgagaccttcaatggtacagagattcc

SEQ ID NO: 1044916 - DNA, 33 bp, Homo sapien
tagagatgagaccttcgatggtacagagattcc

SEQ ID NO: 1044917 - DNA, 33 bp, Homo sapien
gaattctatttccaaaccaattaaagacttggc

SEQ ID NO: 1044918 - DNA, 33 bp, Homo sapien
gaattctatttccaaagcaattaaagacttggc

SEQ ID NO: 1044919 - DNA, 33 bp, Homo sapien
cctagaggcagggagaggagaaaaagtacagaa

SEQ ID NO: 1044920 - DNA, 33 bp, Homo sapien
cctagaggcagggagatgagaaaaagtacagaa

SEQ ID NO: 1044921 - DNA, 33 bp, Homo sapien
gacttgtgatgattcaaacctgataaactttgt

SEQ ID NO: 1044922 - DNA, 33 bp, Homo sapien
gacttgtgatgattcacacctgataaactttgt

SEQ ID NO: 1044923 - DNA, 33 bp, Homo sapien
ttgctgtttcatttctcaagtcagagtacaaaa

SEQ ID NO: 1044924 - DNA, 33 bp, Homo sapien
ttgctgtttcatttcttaagtcagagtacaaaa

SEQ ID NO: 1044925 - DNA, 33 bp, Homo sapien
ttctaagggtatctagacggcatcaagcattta

SEQ ID NO: 1044926 - DNA, 33 bp, Homo sapien
ttctaagggtatctaggcggcatcaagcattta

SEQ ID NO: 1044927 - DNA, 33 bp, Homo sapien
atctaggagctgtatccaggctgggcagggaat

SEQ ID NO: 1044928 - DNA, 33 bp, Homo sapien
atctaggagctgtatctaggctgggcagggaat

SEQ ID NO: 1044929 - DNA, 33 bp, Homo sapien
tcctacaccaatgtcaaggtgggtcataaggtg

SEQ ID NO: 1044930 - DNA, 33 bp, Homo sapien
tcctacaccaatgtcagggtgggtcataaggtg

SEQ ID NO: 1044931 - DNA, 33 bp, Homo sapien
ttaatcatcatttccacagagaagcagttgccc

SEQ ID NO: 1044932 - DNA, 33 bp, Homo sapien
ttaatcatcatttccatagagaagcagttgccc

SEQ ID NO: 1044933 - DNA, 33 bp, Homo sapien
gttaaaggtgaagaagcaaatgtatgccagacg

SEQ ID NO: 1044934 - DNA, 33 bp, Homo sapien
gttaaaggtgaagaagtaaatgtatgccagacg

SEQ ID NO: 1044935 - DNA, 33 bp, Homo sapien
ccaagtgagggaggacagctttggagggcaatc

SEQ ID NO: 1044936 - DNA, 33 bp, Homo sapien
ccaagtgagggaggacggctttggagggcaatc

SEQ ID NO: 1044937 - DNA, 33 bp, Homo sapien
acgtgtgaatctcctacaagcactggcgtgtgc

SEQ ID NO: 1044938 - DNA, 33 bp, Homo sapien
acgtgtgaatctcctataagcactggcgtgtgc

SEQ ID NO: 1044939 - DNA, 33 bp, Homo sapien
tgttcacataccgctcaatgcacaagaacccat

SEQ ID NO: 1044940 - DNA, 33 bp, Homo sapien
tgttcacataccgctcgatgcacaagaacccat

SEQ ID NO: 1044941 - DNA, 33 bp, Homo sapien; identical to SEQ ID NO: 1044939

SEQ ID NO: 1044942 - DNA, 33 bp, Homo sapien; identical to SEQ ID NO: 1044940

SEQ ID NO: 1044943 - DNA, 33 bp, Homo sapien
acaccacccgtgcaccccaaacagaagcctgac

SEQ ID NO: 1044944 - DNA, 33 bp, Homo sapien
acaccacccgtgcaccgcaaacagaagcctgac

SEQ ID NO: 1044945 - DNA, 33 bp, Homo sapien
ctggacaggtggtgtcacttctttgagccccag

SEQ ID NO: 1044946 - DNA, 33 bp, Homo sapien
ctggacaggtggtgtcgcttctttgagccccag

SEQ ID NO: 1044947 - DNA, 33 bp, Homo sapien
tcttcttaacaaggaccgcttgatatggtttgg

SEQ ID NO: 1044948 - DNA, 33 bp, Homo sapien
tcttcttaacaaggacggcttgatatggtttgg

SEQ ID NO: 1044949 - DNA, 33 bp, Homo sapien
aatttgtgcattataaaaaaatgagagtttcaa

SEQ ID NO: 1044950 - DNA, 33 bp, Homo sapien
aatttgtgcattataagaaaatgagagtttcaa

SEQ ID NO: 1044951 - DNA, 33 bp, Homo sapien
ggcagcaatagaaaaccaacacaggcctgggta

SEQ ID NO: 1044952 - DNA, 33 bp, Homo sapien
ggcagcaatagaaaacgaacacaggcctgggta

SEQ ID NO: 1044953 - DNA, 33 bp, Homo sapien
agcctgtcatactaggcacttttatctcacaca

SEQ ID NO: 1044954 - DNA, 33 bp, Homo sapien
agcctgtcatactagggacttttatctcacaca

SEQ ID NO: 1044955 - DNA, 33 bp, Homo sapien
taacaatatttatatcaatgtcacttcggggag

SEQ ID NO: 1044956 - DNA, 33 bp, Homo sapien
taacaatatttatatcgatgtcacttcggggag

SEQ ID NO: 1044957 - DNA, 33 bp, Homo sapien
aatattgttaatggcccgaacataatgttaagt

SEQ ID NO: 1044958 - DNA, 33 bp, Homo sapien
aatattgttaatggcctgaacataatgttaagt

SEQ ID NO: 1044959 - DNA, 33 bp, Homo sapien
tcacttgggccaataaacatttacctcaaatcc

SEQ ID NO: 1044960 - DNA, 33 bp, Homo sapien
tcacttgggccaataagcatttacctcaaatcc

SEQ ID NO: 1044961 - DNA, 33 bp, Homo sapien
catttcctgcctccgaccttcgtccctacagga

SEQ ID NO: 1044962 - DNA, 33 bp, Homo sapien
catttcctgcctccgatcttcgtccctacagga

SEQ ID NO: 1044963 - DNA, 33 bp, Homo sapien
ccaacttgggacccagaaatggacaaagcaggc

SEQ ID NO: 1044964 - DNA, 33 bp, Homo sapien
ccaacttgggacccagcaatggacaaagcaggc

SEQ ID NO: 1044965 - DNA, 33 bp, Homo sapien
gaaggcctgaagggaaaagtttgagggattctg

SEQ ID NO: 1044966 - DNA, 33 bp, Homo sapien
gaaggcctgaagggaagagtttgagggattctg

SEQ ID NO: 1044967 - DNA, 33 bp, Homo sapien
aggtggaagaacattcacctgggcgccttgatc

SEQ ID NO: 1044968 - DNA, 33 bp, Homo sapien
aggtggaagaacattcgcctgggcgccttgatc

SEQ ID NO: 1044969 - DNA, 33 bp, Homo sapien
gaagagaaagtggccgccccaaccattgtgccc

SEQ ID NO: 1044970 - DNA, 33 bp, Homo sapien
gaagagaaagtggccgtcccaaccattgtgccc

SEQ ID NO: 1044971 - DNA, 33 bp, Homo sapien
agagagtttggctagcggaaaacgaacaaatat

SEQ ID NO: 1044972 - DNA, 33 bp, Homo sapien
agagagtttggctagctgaaaacgaacaaatat

SEQ ID NO: 1044973 - DNA, 33 bp, Homo sapien
tgaacacttagaaagaaccttgatgatggccag

SEQ ID NO: 1044974 - DNA, 33 bp, Homo sapien
tgaacacttagaaagatccttgatgatggccag

SEQ ID NO: 1044975 - DNA, 33 bp, Homo sapien
gagacccacaggcccaatcatgagaggctagtg

SEQ ID NO: 1044976 - DNA, 33 bp, Homo sapien
gagacccacaggcccagtcatgagaggctagtg

SEQ ID NO: 1044977 - DNA, 33 bp, Homo sapien
atggacttggggcttcaaagagaaagaaagcaa

SEQ ID NO: 1044978 - DNA, 33 bp, Homo sapien
atggacttggggcttccaagagaaagaaagcaa

SEQ ID NO: 1044979 - DNA, 33 bp, Homo sapien
ctcgctagaatacacaactccaaggcagaaggc

SEQ ID NO: 1044980 - DNA, 33 bp, Homo sapien
ctcgctagaatacacacctccaaggcagaaggc

SEQ ID NO: 1044981 - DNA, 33 bp, Homo sapien
ggggatcctcacgacaatgcatgaggtagacac

SEQ ID NO: 1044982 - DNA, 33 bp, Homo sapien
ggggatcctcacgacagtgcatgaggtagacac

SEQ ID NO: 1044983 - DNA, 33 bp, Homo sapien
cccacggttgggatctcagaccatccacattgg

SEQ ID NO: 1044984 - DNA, 33 bp, Homo sapien
cccacggttgggatctgagaccatccacattgg

SEQ ID NO: 1044985 - DNA, 33 bp, Homo sapien
gaagatgatccaacagcagaccaagaggctgat

SEQ ID NO: 1044986 - DNA, 33 bp, Homo sapien
gaagatgatccaacagtagaccaagaggctgat

SEQ ID NO: 1044987 - DNA, 33 bp, Homo sapien
ctcctttaggcacataccaacacacgcctggta

SEQ ID NO: 1044988 - DNA, 33 bp, Homo sapien
ctcctttaggcacatatcaacacacgcctggta

SEQ ID NO: 1044989 - DNA, 33 bp, Homo sapien
tattttgttgtaacaccctgaatggactaagac

SEQ ID NO: 1044990 - DNA, 33 bp, Homo sapien
tattttgttgtaacactctgaatggactaagac

SEQ ID NO: 1044991 - DNA, 33 bp, Homo sapien
actactgggtggaagacagctgatgagagagct

SEQ ID NO: 1044992 - DNA, 33 bp, Homo sapien
actactgggtggaagagagctgatgagagagct

SEQ ID NO: 1044993 - DNA, 33 bp, Homo sapien
ggatgtttgctcatgcacaaatgtgtcagcacc

SEQ ID NO: 1044994 - DNA, 33 bp, Homo sapien
ggatgtttgctcatgcgcaaatgtgtcagcacc

SEQ ID NO: 1044995 - DNA, 33 bp, Homo sapien
ggcaaatgctgcacatcagggcctctctcccct

SEQ ID NO: 1044996 - DNA, 33 bp, Homo sapien
ggcaaatgctgcacattagggcctctctcccct

SEQ ID NO: 1044997 - DNA, 33 bp, Homo sapien
ttggttgagtgggaaactctgcatctgaagaaa

SEQ ID NO: 1044998 - DNA, 33 bp, Homo sapien
ttggttgagtgggaaattctgcatctgaagaaa

SEQ ID NO: 1044999 - DNA, 33 bp, Homo sapien
agatttagccccatacagagacacatctcacac

SEQ ID NO: 1045000 - DNA, 33 bp, Homo sapien
agatttagccccatacggagacacatctcacac

SEQ ID NO: 1045001 - DNA, 33 bp, Homo sapien
ctgtgtgtcatgtcaaagaatgagtcttgctct

SEQ ID NO: 1045002 - DNA, 33 bp, Homo sapien
ctgtgtgtcatgtcaaggaatgagtcttgctct

SEQ ID NO: 1045003 - DNA, 33 bp, Homo sapien
ttttcagagaaatgcgaagtaggtttgtgcaca

SEQ ID NO: 1045004 - DNA, 33 bp, Homo sapien
ttttcagagaaatgcgtagtaggtttgtgcaca

SEQ ID NO: 1045005 - DNA, 33 bp, Homo sapien
acacccaatacgtcacactccaagttttcagag

SEQ ID NO: 1045006 - DNA, 33 bp, Homo sapien
acacccaatacgtcaccctccaagttttcagag

SEQ ID NO: 1045007 - DNA, 33 bp, Homo sapien
ttatgatgatggtaataataacagccaacattt

SEQ ID NO: 1045008 - DNA, 33 bp, Homo sapien
ttatgatgatggtaatgataacagccaacattt

SEQ ID NO: 1045009 - DNA, 33 bp, Homo sapien
ttttggtttagggtaactggttacatagccata

SEQ ID NO: 1045010 - DNA, 33 bp, Homo sapien
ttttggtttagggtaattggttacatagccata

SEQ ID NO: 1045011 - DNA, 33 bp, Homo sapien
gtcagaatcattcagggaatctaactctatacc

SEQ ID NO: 1045012 - DNA, 33 bp, Homo sapien
gtcagaatcattcaggtaatctaactctatacc

SEQ ID NO: 1045013 - DNA, 33 bp, Homo sapien
acagacgcagctggcacggttcaaatatctgta

SEQ ID NO: 1045014 - DNA, 33 bp, Homo sapien
acagacgcagctggcatggttcaaatatctgta

SEQ ID NO: 1045015 - DNA, 33 bp, Homo sapien
ttagtggcttaaaacaatcctatttcttatgat

SEQ ID NO: 1045016 - DNA, 33 bp, Homo sapien
ttagtggcttaaaacactcctatttcttatgat

SEQ ID NO: 1045017 - DNA, 33 bp, Homo sapien
attaaataatgagtgtaaagtgcctagcacagc

SEQ ID NO: 1045018 - DNA, 33 bp, Homo sapien
attaaataatgagtgttaagtgcctagcacagc

SEQ ID NO: 1045019 - DNA, 33 bp, Homo sapien
ctgcagaagttcaaagacagggctgttagtgta

SEQ ID NO: 1045020 - DNA, 33 bp, Homo sapien
ctgcagaagttcaaaggcagggctgttagtgta

SEQ ID NO: 1045021 - DNA, 33 bp, Homo sapien
cgatgccacattcccaatggaagaagatgctaa

SEQ ID NO: 1045022 - DNA, 33 bp, Homo sapien
cgatgccacattcccagtggaagaagatgctaa

SEQ ID NO: 1045023 - DNA, 33 bp, Homo sapien
tccaatggagaacttgaactcagaaccctgggc

SEQ ID NO: 1045024 - DNA, 33 bp, Homo sapien
tccaatggagaacttgcactcagaaccctgggc

SEQ ID NO: 1045025 - DNA, 33 bp, Homo sapien
cattggactgtggcaccggtctctagcaaaaga

SEQ ID NO: 1045026 - DNA, 33 bp, Homo sapien
cattggactgtggcactggtctctagcaaaaga

SEQ ID NO: 1045027 - DNA, 33 bp, Homo sapien
tattaactgagacagcaaatgagatgtgatagc

SEQ ID NO: 1045028 - DNA, 33 bp, Homo sapien
tattaactgagacagcgaatgagatgtgatagc

SEQ ID NO: 1045029 - DNA, 33 bp, Homo sapien
agttcttttgcatatgaactcagaagtgggttt

SEQ ID NO: 1045030 - DNA, 33 bp, Homo sapien
agttcttttgcatatgcactcagaagtgggttt

SEQ ID NO: 1045031 - DNA, 33 bp, Homo sapien
gaaagagtggatagaaaatgagttgtcagacaa

SEQ ID NO: 1045032 - DNA, 33 bp, Homo sapien
gaaagagtggatagaagatgagttgtcagacaa

SEQ ID NO: 1045033 - DNA, 33 bp, Homo sapien
agcacatggtaagtacagaaatagcaaggctag

SEQ ID NO: 1045034 - DNA, 33 bp, Homo sapien
agcacatggtaagtacggaaatagcaaggctag

SEQ ID NO: 1045035 - DNA, 33 bp, Homo sapien
ccattttcgagccagacggccccatttttctcc

SEQ ID NO: 1045036 - DNA, 33 bp, Homo sapien
ccattttcgagccagatggccccatttttctcc

SEQ ID NO: 1045037 - DNA, 33 bp, Homo sapien
atcccttccaccagaactaagcaaatcaaaatg

SEQ ID NO: 1045038 - DNA, 33 bp, Homo sapien
atcccttccaccagaattaagcaaatcaaaatg

SEQ ID NO: 1045039 - DNA, 33 bp, Homo sapien
tagatgggtggatggacggataattgtcggatg

SEQ ID NO: 1045040 - DNA, 33 bp, Homo sapien
tagatgggtggatggatggataattgtcggatg

SEQ ID NO: 1045041 - DNA, 33 bp, Homo sapien
ccctgccatctgttaccagtaagacagtgtcac

SEQ ID NO: 1045042 - DNA, 33 bp, Homo sapien
ccctgccatctgttactagtaagacagtgtcac

SEQ ID NO: 1045043 - DNA, 33 bp, Homo sapien
taggacagtgacaccactcattgccaacaccca

SEQ ID NO: 1045044 - DNA, 33 bp, Homo sapien
taggacagtgacaccattcattgccaacaccca

SEQ ID NO: 1045045 - DNA, 33 bp, Homo sapien
cctttggtgaccttaagtgagttgctcaccttc

SEQ ID NO: 1045046 - DNA, 33 bp, Homo sapien
cctttggtgaccttaattgagttgctcaccttc

SEQ ID NO: 1045047 - DNA, 33 bp, Homo sapien
tgttgatcttgttggacgttgtttcagtaaaga

SEQ ID NO: 1045048 - DNA, 33 bp, Homo sapien
tgttgatcttgttggatgttgtttcagtaaaga

SEQ ID NO: 1045049 - DNA, 33 bp, Homo sapien
tccttgacctgcttaaatctggcttctttttcc

SEQ ID NO: 1045050 - DNA, 33 bp, Homo sapien
tccttgacctgcttaagtctggcttctttttcc

SEQ ID NO: 1045051 - DNA, 33 bp, Homo sapien
aaaccagtgaggtaaaataagacttggtaaatc

SEQ ID NO: 1045052 - DNA, 33 bp, Homo sapien
aaaccagtgaggtaaagtaagacttggtaaatc

SEQ ID NO: 1045053 - DNA, 33 bp, Homo sapien
aagactgtgaaaggtacgattccagaaaagaag

SEQ ID NO: 1045054 - DNA, 33 bp, Homo sapien
aagactgtgaaaggtatgattccagaaaagaag

SEQ ID NO: 1045055 - DNA, 33 bp, Homo sapien
atgtcggtaggcatcacctaattactgggcaaa

SEQ ID NO: 1045056 - DNA, 33 bp, Homo sapien
atgtcggtaggcatcatctaattactgggcaaa

SEQ ID NO: 1045057 - DNA, 33 bp, Homo sapien
cagacccaggacttgccgatgtctccatccatg

SEQ ID NO: 1045058 - DNA, 33 bp, Homo sapien
cagacccaggacttgctgatgtctccatccatg

SEQ ID NO: 1045059 - DNA, 33 bp, Homo sapien
aaggccttttctctggacacaggcagggagagc

SEQ ID NO: 1045060 - DNA, 33 bp, Homo sapien
aaggccttttctctgggcacaggcagggagagc

SEQ ID NO: 1045061 - DNA, 33 bp, Homo sapien
tattcatatttacaaaactgtagtattgcatat

SEQ ID NO: 1045062 - DNA, 33 bp, Homo sapien
tattcatatttacaaacctgtagtattgcatat

SEQ ID NO: 1045063 - DNA, 33 bp, Homo sapien
gacatgggcatcagtgaattgattacaggaagg

SEQ ID NO: 1045064 - DNA, 33 bp, Homo sapien
gacatgggcatcagtggattgattacaggaagg

SEQ ID NO: 1045065 - DNA, 33 bp, Homo sapien
gagcccagaaccccacacttattgtgacagtgc

SEQ ID NO: 1045066 - DNA, 33 bp, Homo sapien
gagcccagaaccccacgcttattgtgacagtgc

SEQ ID NO: 1045067 - DNA, 33 bp, Homo sapien
catgtcctggggatctcaccatgcacttcacag

SEQ ID NO: 1045068 - DNA, 33 bp, Homo sapien
catgtcctggggatcttaccatgcacttcacag

SEQ ID NO: 1045069 - DNA, 33 bp, Homo sapien
aagaatgccttcggtgcaaaagtgttttcatgc

SEQ ID NO: 1045070 - DNA, 33 bp, Homo sapien
aagaatgccttcggtgtaaaagtgttttcatgc

SEQ ID NO: 1045071 - DNA, 33 bp, Homo sapien
ccagagccttattttgcacccggctcagtgaca

SEQ ID NO: 1045072 - DNA, 33 bp, Homo sapien
ccagagccttattttgtacccggctcagtgaca

SEQ ID NO: 1045073 - DNA, 33 bp, Homo sapien
cacatcaataaaggaacgctcttgccaccagtt

SEQ ID NO: 1045074 - DNA, 33 bp, Homo sapien
cacatcaataaaggaatgctcttgccaccagtt

SEQ ID NO: 1045075 - DNA, 33 bp, Homo sapien
aatgtcgtctgcccagcaatgcagagtgtagat

SEQ ID NO: 1045076 - DNA, 33 bp, Homo sapien
aatgtcgtctgcccaggaatgcagagtgtagat

SEQ ID NO: 1045077 - DNA, 33 bp, Homo sapien
tctaggtgcttttgtacgtgtctactgatggat

SEQ ID NO: 1045078 - DNA, 33 bp, Homo sapien
tctaggtgcttttgtatgtgtctactgatggat

SEQ ID NO: 1045079 - DNA, 33 bp, Homo sapien
tgtaagtcaagaccaacgggaccaaaaaacatg

SEQ ID NO: 1045080 - DNA, 33 bp, Homo sapien
tgtaagtcaagaccaatgggaccaaaaaacatg

SEQ ID NO: 1045081 - DNA, 33 bp, Homo sapien
atatttgtagattgccaattttgaaatgtatct

SEQ ID NO: 1045082 - DNA, 33 bp, Homo sapien
atatttgtagattgccgattttgaaatgtatct

SEQ ID NO: 1045083 - DNA, 33 bp, Homo sapien
gctgtacttcggaatcccttgaggagttttata

SEQ ID NO: 1045084 - DNA, 33 bp, Homo sapien
gctgtacttcggaatctcttgaggagttttata

SEQ ID NO: 1045085 - DNA, 33 bp, Homo sapien
tttgaaacgaagtctccctctactgccgaggct

SEQ ID NO: 1045086 - DNA, 33 bp, Homo sapien
tttgaaacgaagtctctctctactgccgaggct

SEQ ID NO: 1045087 - DNA, 33 bp, Homo sapien
gtgagagtctgtttcaaataaagaagtgccagg

SEQ ID NO: 1045088 - DNA, 33 bp, Homo sapien
gtgagagtctgtttcagataaagaagtgccagg

SEQ ID NO: 1045089 - DNA, 33 bp, Homo sapien
agataagaaataaaccagatcctgccatccagg

SEQ ID NO: 1045090 - DNA, 33 bp, Homo sapien
agataagaaataaacccgatcctgccatccagg

SEQ ID NO: 1045091 - DNA, 33 bp, Homo sapien
ccacgctaaaatgtaaaacttctaaatgaccta

SEQ ID NO: 1045092 - DNA, 33 bp, Homo sapien
ccacgctaaaatgtaacacttctaaatgaccta

SEQ ID NO: 1045093 - DNA, 33 bp, Homo sapien
ggaaattcgtatcaccactttgaagaacaagaa

SEQ ID NO: 1045094 - DNA, 33 bp, Homo sapien
ggaaattcgtatcaccgctttgaagaacaagaa

SEQ ID NO: 1045095 - DNA, 33 bp, Homo sapien
ggaggccaagagacccccaatgtcccccagtgt

SEQ ID NO: 1045096 - DNA, 33 bp, Homo sapien
ggaggccaagagaccctcaatgtcccccagtgt

SEQ ID NO: 1045097 - DNA, 33 bp, Homo sapien
cttttgttgtaaattacgctgtctaagggatct

SEQ ID NO: 1045098 - DNA, 33 bp, Homo sapien
cttttgttgtaaattatgctgtctaagggatct

SEQ ID NO: 1045099 - DNA, 33 bp, Homo sapien
acccactgtggaaatacatggagttgcctgtgt

SEQ ID NO: 1045100 - DNA, 33 bp, Homo sapien
acccactgtggaaatatatggagttgcctgtgt

SEQ ID NO: 1045101 - DNA, 33 bp, Homo sapien
ccaggaagaagctacaaagaaaaagaaggtatg

SEQ ID NO: 1045102 - DNA, 33 bp, Homo sapien
ccaggaagaagctacagagaaaaagaaggtatg

SEQ ID NO: 1045103 - DNA, 33 bp, Homo sapien
gacagaaaagacatcaagctgaagatgtcaaag

SEQ ID NO: 1045104 - DNA, 33 bp, Homo sapien
gacagaaaagacatcaggctgaagatgtcaaag

SEQ ID NO: 1045105 - DNA, 33 bp, Homo sapien
agtaaggaaattactacagtggtctaggccaga

SEQ ID NO: 1045106 - DNA, 33 bp, Homo sapien
agtaaggaaattactagagtggtctaggccaga

SEQ ID NO: 1045107 - DNA, 33 bp, Homo sapien
gcccatctgctccttgcagttccccgagcagtc

SEQ ID NO: 1045108 - DNA, 33 bp, Homo sapien
gcccatctgctccttgtagttccccgagcagtc

SEQ ID NO: 1045109 - DNA, 33 bp, Homo sapien
ccctcaaactttctccaatttcccagtcagaca

SEQ ID NO: 1045110 - DNA, 33 bp, Homo sapien
ccctcaaactttctcctatttcccagtcagaca

SEQ ID NO: 1045111 - DNA, 33 bp, Homo sapien
tgatgggatccattgacgtttctggcaaggctt

SEQ ID NO: 1045112 - DNA, 33 bp, Homo sapien
tgatgggatccattgatgtttctggcaaggctt

SEQ ID NO: 1045113 - DNA, 33 bp, Homo sapien
ccggaagtgcttcttacagcattacaattcttc

SEQ ID NO: 1045114 - DNA, 33 bp, Homo sapien
ccggaagtgcttcttatagcattacaattcttc

SEQ ID NO: 1045115 - DNA, 33 bp, Homo sapien
gtagttttcagcaaacaagctctataatgtttt

SEQ ID NO: 1045116 - DNA, 33 bp, Homo sapien
gtagttttcagcaaacgagctctataatgtttt

SEQ ID NO: 1045117 - DNA, 33 bp, Homo sapien
gaactttagattcaacccgtcaaattgcacaaa

SEQ ID NO: 1045118 - DNA, 33 bp, Homo sapien
gaactttagattcaactcgtcaaattgcacaaa

SEQ ID NO: 1045119 - DNA, 33 bp, Homo sapien
caatccatattccttacgaacatacacataaaa

SEQ ID NO: 1045120 - DNA, 33 bp, Homo sapien
caatccatattccttatgaacatacacataaaa

SEQ ID NO: 1045121 - DNA, 33 bp, Homo sapien
agataaacttctggcaaatctaatagtaaaata

SEQ ID NO: 1045122 - DNA, 33 bp, Homo sapien
agataaacttctggcagatctaatagtaaaata

SEQ ID NO: 1045123 - DNA, 33 bp, Homo sapien
atttttacatcgtacaaactatcctaaagcttt

SEQ ID NO: 1045124 - DNA, 33 bp, Homo sapien
atttttacatcgtacagactatcctaaagcttt

SEQ ID NO: 1045125 - DNA, 33 bp, Homo sapien
ttcccaagattaatcccagtaggtgagttctca

SEQ ID NO: 1045126 - DNA, 33 bp, Homo sapien
ttcccaagattaatcctagtaggtgagttctca

SEQ ID NO: 1045127 - DNA, 33 bp, Homo sapien
caaaccttgttgaaagaataaatgaacgagtca

SEQ ID NO: 1045128 - DNA, 33 bp, Homo sapien
caaaccttgttgaaaggataaatgaacgagtca

SEQ ID NO: 1045129 - DNA, 33 bp, Homo sapien
cccagtccttgtctgcaaagcattaaaaaagga

SEQ ID NO: 1045130 - DNA, 33 bp, Homo sapien
cccagtccttgtctgcgaagcattaaaaaagga

SEQ ID NO: 1045131 - DNA, 33 bp, Homo sapien
gaggaaatacagtaaaattgcattgggagacaa

SEQ ID NO: 1045132 - DNA, 33 bp, Homo sapien
gaggaaatacagtaaagttgcattgggagacaa

SEQ ID NO: 1045133 - DNA, 33 bp, Homo sapien
ttaatttctcaatgcagaaagcagtgatgacat

SEQ ID NO: 1045134 - DNA, 33 bp, Homo sapien
ttaatttctcaatgcataaagcagtgatgacat

SEQ ID NO: 1045135 - DNA, 33 bp, Homo sapien
gaactcaagctacccacgcactttggcctccca

SEQ ID NO: 1045136 - DNA, 33 bp, Homo sapien
gaactcaagctacccatgcactttggcctccca

SEQ ID NO: 1045137 - DNA, 33 bp, Homo sapien
tgcccattttgcagaactgcctcatccccgaag

SEQ ID NO: 1045138 - DNA, 33 bp, Homo sapien
tgcccattttgcagaagtgcctcatccccgaag

SEQ ID NO: 1045139 - DNA, 33 bp, Homo sapien
acctgagtctaatcgacgctttagctctgccag

SEQ ID NO: 1045140 - DNA, 33 bp, Homo sapien
acctgagtctaatcgaggctttagctctgccag

SEQ ID NO: 1045141 - DNA, 33 bp, Homo sapien
gggttattttcccacccgaagtcacagagcatt

SEQ ID NO: 1045142 - DNA, 33 bp, Homo sapien
gggttattttcccacctgaagtcacagagcatt

SEQ ID NO: 1045143 - DNA, 33 bp, Homo sapien
tgacagccctgggatcagagtgatggaacgatt

SEQ ID NO: 1045144 - DNA, 33 bp, Homo sapien
tgacagccctgggatcggagtgatggaacgatt

SEQ ID NO: 1045145 - DNA, 33 bp, Homo sapien
ggccattaacctttccaatgacagccctgggat

SEQ ID NO: 1045146 - DNA, 33 bp, Homo sapien
ggccattaacctttccgatgacagccctgggat

SEQ ID NO: 1045147 - DNA, 33 bp, Homo sapien
tcctttttcctcaatccagaacttcactggctt

SEQ ID NO: 1045148 - DNA, 33 bp, Homo sapien
tcctttttcctcaatcgagaacttcactggctt

SEQ ID NO: 1045149 - DNA, 33 bp, Homo sapien
aatcctaagcattctgaagtccagcctaactct

SEQ ID NO: 1045150 - DNA, 33 bp, Homo sapien
aatcctaagcattctggagtccagcctaactct

SEQ ID NO: 1045151 - DNA, 33 bp, Homo sapien
ttattggatgcagaaaatgagttagtttaatac

SEQ ID NO: 1045152 - DNA, 33 bp, Homo sapien
ttattggatgcagaaagtgagttagtttaatac

SEQ ID NO: 1045153 - DNA, 33 bp, Homo sapien
tcatattttatgcatcacccttccatccgtcca

SEQ ID NO: 1045154 - DNA, 33 bp, Homo sapien
tcatattttatgcatcgcccttccatccgtcca

SEQ ID NO: 1045155 - DNA, 33 bp, Homo sapien
cgtttaagcagggttacgagcagtgtggttgat

SEQ ID NO: 1045156 - DNA, 33 bp, Homo sapien
cgtttaagcagggttatgagcagtgtggttgat

SEQ ID NO: 1045157 - DNA, 33 bp, Homo sapien
tccaccgagaagccgaaaaggagggacatcctg

SEQ ID NO: 1045158 - DNA, 33 bp, Homo sapien
tccaccgagaagccgagaaggagggacatcctg

SEQ ID NO: 1045159 - DNA, 33 bp, Homo sapien
atgagtctatgctttcaaagtttactgcagagc

SEQ ID NO: 1045160 - DNA, 33 bp, Homo sapien
atgagtctatgctttcgaagtttactgcagagc

SEQ ID NO: 1045161 - DNA, 33 bp, Homo sapien
cagtggctgtgccaaactgatgttcctgtctca

SEQ ID NO: 1045162 - DNA, 33 bp, Homo sapien
cagtggctgtgccaaattgatgttcctgtctca

SEQ ID NO: 1045163 - DNA, 33 bp, Homo sapien
ttggaggagagttctgcatcattcattgtctta

SEQ ID NO: 1045164 - DNA, 33 bp, Homo sapien
ttggaggagagttctgtatcattcattgtctta

SEQ ID NO: 1045165 - DNA, 33 bp, Homo sapien
gccttctggtataataagcagcaattccctgga

SEQ ID NO: 1045166 - DNA, 33 bp, Homo sapien
gccttctggtataataggcagcaattccctgga

SEQ ID NO: 1045167 - DNA, 33 bp, Homo sapien
ccaatgtcaaactacaggatagccgcctccaga

SEQ ID NO: 1045168 - DNA, 33 bp, Homo sapien
ccaatgtcaaactacatgatagccgcctccaga

SEQ ID NO: 1045169 - DNA, 33 bp, Homo sapien
tggtgcagcggaggctaaaagggcacttgctgc

SEQ ID NO: 1045170 - DNA, 33 bp, Homo sapien
tggtgcagcggaggctgaaagggcacttgctgc

SEQ ID NO: 1045171 - DNA, 33 bp, Homo sapien
tatcctgatgcttgaacagggcactcctttggc

SEQ ID NO: 1045172 - DNA, 33 bp, Homo sapien
tatcctgatgcttgaatagggcactcctttggc

SEQ ID NO: 1045173 - DNA, 33 bp, Homo sapien
gagtgcgcagttgttacagcgctcacaggggcc

SEQ ID NO: 1045174 - DNA, 33 bp, Homo sapien
gagtgcgcagttgttatagcgctcacaggggcc

SEQ ID NO: 1045175 - DNA, 33 bp, Homo sapien
tggcagcggccattccaagacaccatttgatca

SEQ ID NO: 1045176 - DNA, 33 bp, Homo sapien
tggcagcggccattccgagacaccatttgatca

SEQ ID NO: 1045177 - DNA, 33 bp, Homo sapien
tagatggaagaatcaacagacctggccactggc

SEQ ID NO: 1045178 - DNA, 33 bp, Homo sapien
tagatggaagaatcaagagacctggccactggc

SEQ ID NO: 1045179 - DNA, 33 bp, Homo sapien
tattttcctctgtacgacagtaataacactaat

SEQ ID NO: 1045180 - DNA, 33 bp, Homo sapien
tattttcctctgtacggcagtaataacactaat

SEQ ID NO: 1045181 - DNA, 33 bp, Homo sapien
tgtgaaagcaggtagaaaaaggtcaaccgtgaa

SEQ ID NO: 1045182 - DNA, 33 bp, Homo sapien
tgtgaaagcaggtagagaaaggtcaaccgtgaa

SEQ ID NO: 1045183 - DNA, 33 bp, Homo sapien
taggaaccagtgatcacgtatggaaagcctcag

SEQ ID NO: 1045184 - DNA, 33 bp, Homo sapien
taggaaccagtgatcatgtatggaaagcctcag

SEQ ID NO: 1045185 - DNA, 33 bp, Homo sapien
tgagcaaattttgaagaaaaggatctgtggaaa

SEQ ID NO: 1045186 - DNA, 33 bp, Homo sapien
tgagcaaattttgaaggaaaggatctgtggaaa

SEQ ID NO: 1045187 - DNA, 33 bp, Homo sapien
ggtcatcacacagacacgttaggagccgctggt

SEQ ID NO: 1045188 - DNA, 33 bp, Homo sapien
ggtcatcacacagacaggttaggagccgctggt

SEQ ID NO: 1045189 - DNA, 33 bp, Homo sapien
ccttgcttagttgagacgacctggttacaagtc

SEQ ID NO: 1045190 - DNA, 33 bp, Homo sapien
ccttgcttagttgagatgacctggttacaagtc

SEQ ID NO: 1045191 - DNA, 33 bp, Homo sapien
catgctaagaggaggcaaagagctttgatggtg

SEQ ID NO: 1045192 - DNA, 33 bp, Homo sapien
catgctaagaggaggcgaagagctttgatggtg

SEQ ID NO: 1045193 - DNA, 33 bp, Homo sapien
gactcggatgatctcacggttcggaactccacc

SEQ ID NO: 1045194 - DNA, 33 bp, Homo sapien
gactcggatgatctcagggttcggaactccacc

SEQ ID NO: 1045195 - DNA, 33 bp, Homo sapien
ctgtctggctttgctcaaccctagagtcctgga

SEQ ID NO: 1045196 - DNA, 33 bp, Homo sapien
ctgtctggctttgctcgaccctagagtcctgga

SEQ ID NO: 1045197 - DNA, 33 bp, Homo sapien
ggctttctctgaccaacaggatgtttgcagatg

SEQ ID NO: 1045198 - DNA, 33 bp, Homo sapien
ggctttctctgaccaataggatgtttgcagatg

SEQ ID NO: 1045199 - DNA, 33 bp, Homo sapien
atctgaaaagaaatcaagagtcaatcccattta

SEQ ID NO: 1045200 - DNA, 33 bp, Homo sapien
atctgaaaagaaatcaggagtcaatcccattta

SEQ ID NO: 1045201 - DNA, 33 bp, Homo sapien
ttccttgtgggcttcacgtcctactttacagag

SEQ ID NO: 1045202 - DNA, 33 bp, Homo sapien
ttccttgtgggcttcatgtcctactttacagag

SEQ ID NO: 1045203 - DNA, 33 bp, Homo sapien
cctcagggaggccacaaactaaagtgaggcaga

SEQ ID NO: 1045204 - DNA, 33 bp, Homo sapien
cctcagggaggccacagactaaagtgaggcaga

SEQ ID NO: 1045205 - DNA, 33 bp, Homo sapien
ttgggaacctactggacctactgtaagatagac

SEQ ID NO: 1045206 - DNA, 33 bp, Homo sapien
ttgggaacctactggatctactgtaagatagac

SEQ ID NO: 1045207 - DNA, 33 bp, Homo sapien
gagttaaaaggagtagacaaggaaacatataaa

SEQ ID NO: 1045208 - DNA, 33 bp, Homo sapien
gagttaaaaggagtagtcaaggaaacatataaa

SEQ ID NO: 1045209 - DNA, 33 bp, Homo sapien
atcatgagaccttaaacaggtgaggaaattggc

SEQ ID NO: 1045210 - DNA, 33 bp, Homo sapien
atcatgagaccttaaagaggtgaggaaattggc

SEQ ID NO: 1045211 - DNA, 33 bp, Homo sapien
caggtctgactccgagcctaaagctcttttcat

SEQ ID NO: 1045212 - DNA, 33 bp, Homo sapien
caggtctgactccgagtctaaagctcttttcat

SEQ ID NO: 1045213 - DNA, 33 bp, Homo sapien
ccaaagaacttccaaaaccatgtcctgaaccca

SEQ ID NO: 1045214 - DNA, 33 bp, Homo sapien
ccaaagaacttccaaagccatgtcctgaaccca

SEQ ID NO: 1045215 - DNA, 33 bp, Homo sapien
gggagatgccagtgaacgggtctgccagggatc

SEQ ID NO: 1045216 - DNA, 33 bp, Homo sapien
gggagatgccagtgaatgggtctgccagggatc

SEQ ID NO: 1045217 - DNA, 33 bp, Homo sapien
ccggggcacacttagaaaacagtatgtgtcatg

SEQ ID NO: 1045218 - DNA, 33 bp, Homo sapien
ccggggcacacttagagaacagtatgtgtcatg

SEQ ID NO: 1045219 - DNA, 33 bp, Homo sapien
gaagacaaacagatgggaaggggagctttaagg

SEQ ID NO: 1045220 - DNA, 33 bp, Homo sapien
gaagacaaacagatggtaaggggagctttaagg

SEQ ID NO: 1045221 - DNA, 33 bp, Homo sapien
cctccttgctgcttaccacgtggagggcctctc

SEQ ID NO: 1045222 - DNA, 33 bp, Homo sapien
cctccttgctgcttacgacgtggagggcctctc

SEQ ID NO: 1045223 - DNA, 33 bp, Homo sapien
cccatttttccttccacctgggctgctaggatg

SEQ ID NO: 1045224 - DNA, 33 bp, Homo sapien
cccatttttccttccatctgggctgctaggatg

SEQ ID NO: 1045225 - DNA, 33 bp, Homo sapien
aaagcatgagctgacccaccacatcaacctgct

SEQ ID NO: 1045226 - DNA, 33 bp, Homo sapien
aaagcatgagctgacctaccacatcaacctgct

SEQ ID NO: 1045227 - DNA, 33 bp, Homo sapien
ccttctttcatcaggcaataggaaaaagccaga

SEQ ID NO: 1045228 - DNA, 33 bp, Homo sapien
ccttctttcatcaggcgataggaaaaagccaga

SEQ ID NO: 1045229 - DNA, 33 bp, Homo sapien
attcattcattcaggcaagcattcggccactag

SEQ ID NO: 1045230 - DNA, 33 bp, Homo sapien
attcattcattcaggcgagcattcggccactag

SEQ ID NO: 1045231 - DNA, 33 bp, Homo sapien
aggacttgcttatgcgccagccagcgtatgaga

SEQ ID NO: 1045232 - DNA, 33 bp, Homo sapien
aggacttgcttatgcgtcagccagcgtatgaga

SEQ ID NO: 1045233 - DNA, 33 bp, Homo sapien
cttgtccaaagtctcacagtagtcgagctgggg

SEQ ID NO: 1045234 - DNA, 33 bp, Homo sapien
cttgtccaaagtctcatagtagtcgagctgggg

SEQ ID NO: 1045235 - DNA, 33 bp, Homo sapien
tttgtctgaagccccgcaattgcactgttgggt

SEQ ID NO: 1045236 - DNA, 33 bp, Homo sapien
tttgtctgaagccccgtaattgcactgttgggt

SEQ ID NO: 1045237 - DNA, 33 bp, Homo sapien
tgcaccctcacttacccggcggtctgtctcctc

SEQ ID NO: 1045238 - DNA, 33 bp, Homo sapien
tgcaccctcacttacctggcggtctgtctcctc

SEQ ID NO: 1045239 - DNA, 33 bp, Homo sapien
tggctcgcagatgaacaagatgcagggcctgcc

SEQ ID NO: 1045240 - DNA, 33 bp, Homo sapien
tggctcgcagatgaacgagatgcagggcctgcc

SEQ ID NO: 1045241 - DNA, 33 bp, Homo sapien
atacctattcatggcccaaagaggaatgacaaa

SEQ ID NO: 1045242 - DNA, 33 bp, Homo sapien
atacctattcatggcctaaagaggaatgacaaa

SEQ ID NO: 1045243 - DNA, 33 bp, Homo sapien
accactgagccggaaaatatgaagacaaactat

SEQ ID NO: 1045244 - DNA, 33 bp, Homo sapien
accactgagccggaaactatgaagacaaactat

SEQ ID NO: 1045245 - DNA, 33 bp, Homo sapien
gcaaagcttcaaattaacaacatatcagcaaag

SEQ ID NO: 1045246 - DNA, 33 bp, Homo sapien
gcaaagcttcaaattagcaacatatcagcaaag

SEQ ID NO: 1045247 - DNA, 33 bp, Homo sapien
gaatgtctcggtataaaacccgatcgtacattt

SEQ ID NO: 1045248 - DNA, 33 bp, Homo sapien
gaatgtctcggtataacacccgatcgtacattt

SEQ ID NO: 1045249 - DNA, 33 bp, Homo sapien
atttaaagaaatgcaacatgaattcacacacac

SEQ ID NO: 1045250 - DNA, 33 bp, Homo sapien
atttaaagaaatgcaagatgaattcacacacac

SEQ ID NO: 1045251 - DNA, 33 bp, Homo sapien
ttccctgttagtcaacgctccatgctttagctt

SEQ ID NO: 1045252 - DNA, 33 bp, Homo sapien
ttccctgttagtcaactctccatgctttagctt

SEQ ID NO: 1045253 - DNA, 33 bp, Homo sapien
tctcaaaggtggggacagactgacttatctctc

SEQ ID NO: 1045254 - DNA, 33 bp, Homo sapien
tctcaaaggtggggaccgactgacttatctctc

SEQ ID NO: 1045255 - DNA, 33 bp, Homo sapien
acagctaagccacacccctgaggagccaacgta

SEQ ID NO: 1045256 - DNA, 33 bp, Homo sapien
acagctaagccacacctctgaggagccaacgta

SEQ ID NO: 1045257 - DNA, 33 bp, Homo sapien
aagtcctcgattttacacaataccagttgaggg

SEQ ID NO: 1045258 - DNA, 33 bp, Homo sapien
aagtcctcgattttacccaataccagttgaggg

SEQ ID NO: 1045259 - DNA, 33 bp, Homo sapien
ttgcttgtacacgtaagcttctcaggtgacagt

SEQ ID NO: 1045260 - DNA, 33 bp, Homo sapien
ttgcttgtacacgtaatcttctcaggtgacagt

SEQ ID NO: 1045261 - DNA, 33 bp, Homo sapien
caagggattctaggacaaatctaagtttgagga

SEQ ID NO: 1045262 - DNA, 33 bp, Homo sapien
caagggattctaggactaatctaagtttgagga

SEQ ID NO: 1045263 - DNA, 33 bp, Homo sapien
gattctttacatgaaggcctcagacctacaatt

SEQ ID NO: 1045264 - DNA, 33 bp, Homo sapien
gattctttacatgaagtcctcagacctacaatt

SEQ ID NO: 1045265 - DNA, 33 bp, Homo sapien
gggtgaattacacgcaacattactaaacagcag

SEQ ID NO: 1045266 - DNA, 33 bp, Homo sapien
gggtgaattacacgcagcattactaaacagcag

SEQ ID NO: 1045267 - DNA, 33 bp, Homo sapien
aactatgtcacacaccaattcaatttgtaaatt

SEQ ID NO: 1045268 - DNA, 33 bp, Homo sapien
aactatgtcacacaccgattcaatttgtaaatt

SEQ ID NO: 1045269 - DNA, 33 bp, Homo sapien
catagtggcgctatcacacactcactgcagagg

SEQ ID NO: 1045270 - DNA, 33 bp, Homo sapien
catagtggcgctatcatacactcactgcagagg

SEQ ID NO: 1045271 - DNA, 33 bp, Homo sapien
cacatagaggagccaacatctaaggacaaatga

SEQ ID NO: 1045272 - DNA, 33 bp, Homo sapien
cacatagaggagccaatatctaaggacaaatga

SEQ ID NO: 1045273 - DNA, 33 bp, Homo sapien
gcatattcttaacatccacacaaagctatgcac

SEQ ID NO: 1045274 - DNA, 33 bp, Homo sapien
gcatattcttaacatctacacaaagctatgcac

SEQ ID NO: 1045275 - DNA, 33 bp, Homo sapien
ataggggagcagataccgagttctaaaccttct

SEQ ID NO: 1045276 - DNA, 33 bp, Homo sapien
ataggggagcagatactgagttctaaaccttct

SEQ ID NO: 1045277 - DNA, 33 bp, Homo sapien
taaacagaagatcagcgaagtccaggcgcagtc

SEQ ID NO: 1045278 - DNA, 33 bp, Homo sapien
taaacagaagatcagctaagtccaggcgcagtc

SEQ ID NO: 1045279 - DNA, 33 bp, Homo sapien
ctaatgtaaagagtaggcatagggtattggtgt

SEQ ID NO: 1045280 - DNA, 33 bp, Homo sapien
ctaatgtaaagagtagtcatagggtattggtgt

SEQ ID NO: 1045281 - DNA, 33 bp, Homo sapien
actgactgcttccaaaactaccacccaagcgtg

SEQ ID NO: 1045282 - DNA, 33 bp, Homo sapien
actgactgcttccaaatctaccacccaagcgtg

SEQ ID NO: 1045283 - DNA, 33 bp, Homo sapien
tcttctttctcctcacaagaactgcagcgctgc

SEQ ID NO: 1045284 - DNA, 33 bp, Homo sapien
tcttctttctcctcacgagaactgcagcgctgc

SEQ ID NO: 1045285 - DNA, 33 bp, Homo sapien
atgacctgctaactgggccactgactgggcaaa

SEQ ID NO: 1045286 - DNA, 33 bp, Homo sapien
atgacctgctaactggtccactgactgggcaaa

SEQ ID NO: 1045287 - DNA, 33 bp, Homo sapien
tattttacatcatttacggaataacagactgtt

SEQ ID NO: 1045288 - DNA, 33 bp, Homo sapien
tattttacatcatttatggaataacagactgtt

SEQ ID NO: 1045289 - DNA, 33 bp, Homo sapien
aagtttagtgagtgaagatgggtgcgaataaca

SEQ ID NO: 1045290 - DNA, 33 bp, Homo sapien
aagtttagtgagtgaatatgggtgcgaataaca

SEQ ID NO: 1045291 - DNA, 33 bp, Homo sapien
tccaagatcttaggaaatacaggcacacaacaa

SEQ ID NO: 1045292 - DNA, 33 bp, Homo sapien
tccaagatcttaggaagtacaggcacacaacaa

SEQ ID NO: 1045293 - DNA, 33 bp, Homo sapien
tgttaccatagtaatggatatcaacttccgagc

SEQ ID NO: 1045294 - DNA, 33 bp, Homo sapien
tgttaccatagtaatgtatatcaacttccgagc

SEQ ID NO: 1045295 - DNA, 33 bp, Homo sapien
aatccggagggtgctacgaatctgtgttccctg

SEQ ID NO: 1045296 - DNA, 33 bp, Homo sapien
aatccggagggtgctatgaatctgtgttccctg

SEQ ID NO: 1045297 - DNA, 33 bp, Homo sapien
cactaaagatttcaaacgtggggatctggagag

SEQ ID NO: 1045298 - DNA, 33 bp, Homo sapien
cactaaagatttcaaatgtggggatctggagag

SEQ ID NO: 1045299 - DNA, 33 bp, Homo sapien
tgggtcctgattagagaaggaagaatgaggaaa

SEQ ID NO: 1045300 - DNA, 33 bp, Homo sapien
tgggtcctgattagaggaggaagaatgaggaaa

SEQ ID NO: 1045301 - DNA, 33 bp, Homo sapien
ttagctattgaacctaataacattcccatttta

SEQ ID NO: 1045302 - DNA, 33 bp, Homo sapien
ttagctattgaacctagtaacattcccatttta

SEQ ID NO: 1045303 - DNA, 33 bp, Homo sapien
gtagtaaatactttgtaaatgctggcaattagg

SEQ ID NO: 1045304 - DNA, 33 bp, Homo sapien
gtagtaaatactttgtcaatgctggcaattagg

SEQ ID NO: 1045305 - DNA, 33 bp, Homo sapien
ttttttcttagactgccagtacatgtttaaccc

SEQ ID NO: 1045306 - DNA, 33 bp, Homo sapien
ttttttcttagactgctagtacatgtttaaccc

SEQ ID NO: 1045307 - DNA, 33 bp, Homo sapien
tcagaacctgggagcaataagaaactgtctcat

SEQ ID NO: 1045308 - DNA, 33 bp, Homo sapien
tcagaacctgggagcagtaagaaactgtctcat

SEQ ID NO: 1045309 - DNA, 33 bp, Homo sapien
catctctggggctctagagtgtagcttagctct

SEQ ID NO: 1045310 - DNA, 33 bp, Homo sapien
catctctggggctctatagtgtagcttagctct

SEQ ID NO: 1045311 - DNA, 33 bp, Homo sapien
atgtttaattctgttacggcacctgctccttag

SEQ ID NO: 1045312 - DNA, 33 bp, Homo sapien
atgtttaattctgttatggcacctgctccttag

SEQ ID NO: 1045313 - DNA, 33 bp, Homo sapien
gagttgatctctcagacgacttgaccttcacat

SEQ ID NO: 1045314 - DNA, 33 bp, Homo sapien
gagttgatctctcagatgacttgaccttcacat

SEQ ID NO: 1045315 - DNA, 33 bp, Homo sapien
caaggccaaagattcaaattttcttctgcttac

SEQ ID NO: 1045316 - DNA, 33 bp, Homo sapien
caaggccaaagattcagattttcttctgcttac

SEQ ID NO: 1045317 - DNA, 33 bp, Homo sapien
gtttgcatccttttccgatacagtcacactgca

SEQ ID NO: 1045318 - DNA, 33 bp, Homo sapien
gtttgcatccttttcctatacagtcacactgca

SEQ ID NO: 1045319 - DNA, 33 bp, Homo sapien
ataaggaataagactaccttcagttattggtac

SEQ ID NO: 1045320 - DNA, 33 bp, Homo sapien
ataaggaataagactatcttcagttattggtac

SEQ ID NO: 1045321 - DNA, 33 bp, Homo sapien
tggatggatggccagacgggctagtaggcaagt

SEQ ID NO: 1045322 - DNA, 33 bp, Homo sapien
tggatggatggccagatgggctagtaggcaagt

SEQ ID NO: 1045323 - DNA, 33 bp, Homo sapien
cacattgggtctgtgaacttgagagaggcactt

SEQ ID NO: 1045324 - DNA, 33 bp, Homo sapien
cacattgggtctgtgagcttgagagaggcactt

SEQ ID NO: 1045325 - DNA, 33 bp, Homo sapien
tttaccacagcgtgtaaccaaagcatgatggga

SEQ ID NO: 1045326 - DNA, 33 bp, Homo sapien
tttaccacagcgtgtatccaaagcatgatggga

SEQ ID NO: 1045327 - DNA, 33 bp, Homo sapien
ttccttaaaccctcataacactgtggccctggc

SEQ ID NO: 1045328 - DNA, 33 bp, Homo sapien
ttccttaaaccctcatgacactgtggccctggc

SEQ ID NO: 1045329 - DNA, 33 bp, Homo sapien
tggcaacaaaggggacagatgctgggagccata

SEQ ID NO: 1045330 - DNA, 33 bp, Homo sapien
tggcaacaaaggggacggatgctgggagccata

SEQ ID NO: 1045331 - DNA, 33 bp, Homo sapien
atggcattgtatgtaccacgttttgcatcagtg

SEQ ID NO: 1045332 - DNA, 33 bp, Homo sapien
atggcattgtatgtacgacgttttgcatcagtg

SEQ ID NO: 1045333 - DNA, 33 bp, Homo sapien
gatagacatgaccctccctttacagagctctta

SEQ ID NO: 1045334 - DNA, 33 bp, Homo sapien
gatagacatgaccctcgctttacagagctctta

SEQ ID NO: 1045335 - DNA, 33 bp, Homo sapien
caggctctgtatgctgaagctgaggaggcagaa

SEQ ID NO: 1045336 - DNA, 33 bp, Homo sapien
caggctctgtatgctgtagctgaggaggcagaa

SEQ ID NO: 1045337 - DNA, 33 bp, Homo sapien
aagcgcctatgtttacagagctgaattgggggc

SEQ ID NO: 1045338 - DNA, 33 bp, Homo sapien
aagcgcctatgtttacggagctgaattgggggc

SEQ ID NO: 1045339 - DNA, 33 bp, Homo sapien
gagggaatgctagagaggttcttccttttgaga

SEQ ID NO: 1045340 - DNA, 33 bp, Homo sapien
gagggaatgctagagatgttcttccttttgaga

SEQ ID NO: 1045341 - DNA, 33 bp, Homo sapien
gtttggggcagatacaatggtgtgtcactggaa

SEQ ID NO: 1045342 - DNA, 33 bp, Homo sapien
gtttggggcagatacagtggtgtgtcactggaa

SEQ ID NO: 1045343 - DNA, 33 bp, Homo sapien
ggaatagtacaataaaaaatggcttctattgat

SEQ ID NO: 1045344 - DNA, 33 bp, Homo sapien
ggaatagtacaataaataatggcttctattgat

SEQ ID NO: 1045345 - DNA, 33 bp, Homo sapien
tggcacaaagtaaacacggaagaagccaatgat

SEQ ID NO: 1045346 - DNA, 33 bp, Homo sapien
tggcacaaagtaaacatggaagaagccaatgat

SEQ ID NO: 1045347 - DNA, 33 bp, Homo sapien
agataatgaacataatgagagaaccatcactat

SEQ ID NO: 1045348 - DNA, 33 bp, Homo sapien
agataatgaacataattagagaaccatcactat

SEQ ID NO: 1045349 - DNA, 33 bp, Homo sapien
ttgaaccctcaaggccactcagttttaccaaaa

SEQ ID NO: 1045350 - DNA, 33 bp, Homo sapien
ttgaaccctcaaggccgctcagttttaccaaaa

SEQ ID NO: 1045351 - DNA, 33 bp, Homo sapien
tgagggtgttaagacccgactctcaggcgtgga

SEQ ID NO: 1045352 - DNA, 33 bp, Homo sapien
tgagggtgttaagacctgactctcaggcgtgga

SEQ ID NO: 1045353 - DNA, 33 bp, Homo sapien
tcaagttgtgacaagacgttagagtggagatgt

SEQ ID NO: 1045354 - DNA, 33 bp, Homo sapien
tcaagttgtgacaagatgttagagtggagatgt

SEQ ID NO: 1045355 - DNA, 33 bp, Homo sapien
agggttgaaacacagcaagggttgaaaggcact

SEQ ID NO: 1045356 - DNA, 33 bp, Homo sapien
agggttgaaacacagccagggttgaaaggcact

SEQ ID NO: 1045357 - DNA, 33 bp, Homo sapien
acctgaacccatcaataaatcttcacatgacac

SEQ ID NO: 1045358 - DNA, 33 bp, Homo sapien
acctgaacccatcaatgaatcttcacatgacac

SEQ ID NO: 1045359 - DNA, 33 bp, Homo sapien
catgtaagaacttagcacggtgcctgtacaaag

SEQ ID NO: 1045360 - DNA, 33 bp, Homo sapien
catgtaagaacttagcgcggtgcctgtacaaag

SEQ ID NO: 1045361 - DNA, 33 bp, Homo sapien
tgcctgactcaggttgaattgtgccgaggtccc

SEQ ID NO: 1045362 - DNA, 33 bp, Homo sapien
tgcctgactcaggttggattgtgccgaggtccc

SEQ ID NO: 1045363 - DNA, 33 bp, Homo sapien
cagagataaaaatccaggtccttctctctccag

SEQ ID NO: 1045364 - DNA, 33 bp, Homo sapien
cagagataaaaatccatgtccttctctctccag

SEQ ID NO: 1045365 - DNA, 33 bp, Homo sapien
taacaaactttaaggacgtacactacctaattt

SEQ ID NO: 1045366 - DNA, 33 bp, Homo sapien
taacaaactttaaggatgtacactacctaattt

SEQ ID NO: 1045367 - DNA, 33 bp, Homo sapien
cttctatgtacttctacggcacgtgtaattccc

SEQ ID NO: 1045368 - DNA, 33 bp, Homo sapien
cttctatgtacttctatggcacgtgtaattccc

SEQ ID NO: 1045369 - DNA, 33 bp, Homo sapien
accacatcgtctttcacctagaccacaggaaag

SEQ ID NO: 1045370 - DNA, 33 bp, Homo sapien
accacatcgtctttcatctagaccacaggaaag

SEQ ID NO: 1045371 - DNA, 33 bp, Homo sapien
gacattcctgcatctacgtgggtcacccttgtc

SEQ ID NO: 1045372 - DNA, 33 bp, Homo sapien
gacattcctgcatctatgtgggtcacccttgtc

SEQ ID NO: 1045373 - DNA, 33 bp, Homo sapien
aggtatcctgtaccagcagcatgactgtgtggc

SEQ ID NO: 1045374 - DNA, 33 bp, Homo sapien
aggtatcctgtaccagtagcatgactgtgtggc

SEQ ID NO: 1045375 - DNA, 33 bp, Homo sapien
tcatattgaacacatacgaggatttgagcaaat

SEQ ID NO: 1045376 - DNA, 33 bp, Homo sapien
tcatattgaacacatatgaggatttgagcaaat

SEQ ID NO: 1045377 - DNA, 33 bp, Homo sapien
tttgaacttaatatggaaccagttgtaggtggt

SEQ ID NO: 1045378 - DNA, 33 bp, Homo sapien
tttgaacttaatatggcaccagttgtaggtggt

SEQ ID NO: 1045379 - DNA, 33 bp, Homo sapien
acccctaagcacaaaaccggcagctagtggagt

SEQ ID NO: 1045380 - DNA, 33 bp, Homo sapien
acccctaagcacaaaatcggcagctagtggagt

SEQ ID NO: 1045381 - DNA, 33 bp, Homo sapien
tttgttaaggaaactacgaattccctgacaaaa

SEQ ID NO: 1045382 - DNA, 33 bp, Homo sapien
tttgttaaggaaactatgaattccctgacaaaa

SEQ ID NO: 1045383 - DNA, 33 bp, Homo sapien
gaaattgaggtgaccaaaggaggaggcagaatc

SEQ ID NO: 1045384 - DNA, 33 bp, Homo sapien
gaaattgaggtgaccagaggaggaggcagaatc

SEQ ID NO: 1045385 - DNA, 33 bp, Homo sapien
gacatgcaggaatctactaaattgtacatgtaa

SEQ ID NO: 1045386 - DNA, 33 bp, Homo sapien
gacatgcaggaatctattaaattgtacatgtaa

SEQ ID NO: 1045387 - DNA, 33 bp, Homo sapien
caggcaaagcacggggaatagggagaattaaaa

SEQ ID NO: 1045388 - DNA, 33 bp, Homo sapien
caggcaaagcacggggcatagggagaattaaaa

SEQ ID NO: 1045389 - DNA, 33 bp, Homo sapien
ctcctccatggagacaacttccagatttgaact

SEQ ID NO: 1045390 - DNA, 33 bp, Homo sapien
ctcctccatggagacagcttccagatttgaact

SEQ ID NO: 1045391 - DNA, 33 bp, Homo sapien
tggactacatttcttacgttgcatctgacatat

SEQ ID NO: 1045392 - DNA, 33 bp, Homo sapien
tggactacatttcttatgttgcatctgacatat

SEQ ID NO: 1045393 - DNA, 33 bp, Homo sapien
gtattactgagtgatacggggtgacataggagc

SEQ ID NO: 1045394 - DNA, 33 bp, Homo sapien
gtattactgagtgatatggggtgacataggagc

SEQ ID NO: 1045395 - DNA, 33 bp, Homo sapien
atctggtgccatgtgccaggacaactgcagaga

SEQ ID NO: 1045396 - DNA, 33 bp, Homo sapien
atctggtgccatgtgcgaggacaactgcagaga

SEQ ID NO: 1045397 - DNA, 33 bp, Homo sapien
ggtttgggaacattgacggcgaatactggctgg

SEQ ID NO: 1045398 - DNA, 33 bp, Homo sapien
ggtttgggaacattgatggcgaatactggctgg

SEQ ID NO: 1045399 - DNA, 33 bp, Homo sapien
cctgactcccagcaaacggacccaactgaagtc

SEQ ID NO: 1045400 - DNA, 33 bp, Homo sapien
cctgactcccagcaaatggacccaactgaagtc

SEQ ID NO: 1045401 - DNA, 33 bp, Homo sapien
cttgcattcaagggaacggggaggagacagcgt

SEQ ID NO: 1045402 - DNA, 33 bp, Homo sapien
cttgcattcaagggaatggggaggagacagcgt

SEQ ID NO: 1045403 - DNA, 33 bp, Homo sapien
tgcaaggcagggtttggacctagcagttgacag

SEQ ID NO: 1045404 - DNA, 33 bp, Homo sapien
tgcaaggcagggtttgtacctagcagttgacag

SEQ ID NO: 1045405 - DNA, 33 bp, Homo sapien
tccaactgctcttgcccgagtctatcccagtta

SEQ ID NO: 1045406 - DNA, 33 bp, Homo sapien
tccaactgctcttgcctgagtctatcccagtta

SEQ ID NO: 1045407 - DNA, 33 bp, Homo sapien
ctcaacactgtcttgcccaaaacctttcagtgg

SEQ ID NO: 1045408 - DNA, 33 bp, Homo sapien
ctcaacactgtcttgctcaaaacctttcagtgg

SEQ ID NO: 1045409 - DNA, 33 bp, Homo sapien
caaatggtagaactagaatctgactcctgagct

SEQ ID NO: 1045410 - DNA, 33 bp, Homo sapien
caaatggtagaactagcatctgactcctgagct

SEQ ID NO: 1045411 - DNA, 33 bp, Homo sapien
gaaaacttgactcaaacgcaattcaaagttcat

SEQ ID NO: 1045412 - DNA, 33 bp, Homo sapien
gaaaacttgactcaaatgcaattcaaagttcat

SEQ ID NO: 1045413 - DNA, 33 bp, Homo sapien
cctgaatctagtccctaacccttaatcactaag

SEQ ID NO: 1045414 - DNA, 33 bp, Homo sapien
cctgaatctagtccctgacccttaatcactaag

SEQ ID NO: 1045415 - DNA, 33 bp, Homo sapien
ctcttccttactgacaatgcagccacggacaaa

SEQ ID NO: 1045416 - DNA, 33 bp, Homo sapien
ctcttccttactgacagtgcagccacggacaaa

SEQ ID NO: 1045417 - DNA, 33 bp, Homo sapien
gtaaggttatctaccaggccatctaaaatcatg

SEQ ID NO: 1045418 - DNA, 33 bp, Homo sapien
gtaaggttatctaccatgccatctaaaatcatg

SEQ ID NO: 1045419 - DNA, 33 bp, Homo sapien
ctgacgtcaagaagaggatttcctagattgtct

SEQ ID NO: 1045420 - DNA, 33 bp, Homo sapien
ctgacgtcaagaagagtatttcctagattgtct

SEQ ID NO: 1045421 - DNA, 33 bp, Homo sapien
tgctcatcttgaaaaaatggaaattaagattca

SEQ ID NO: 1045422 - DNA, 33 bp, Homo sapien
tgctcatcttgaaaaagtggaaattaagattca

SEQ ID NO: 1045423 - DNA, 33 bp, Homo sapien
tggtgaatacacaaacaaattaatgactgaatg

SEQ ID NO: 1045424 - DNA, 33 bp, Homo sapien
tggtgaatacacaaacgaattaatgactgaatg

SEQ ID NO: 1045425 - DNA, 33 bp, Homo sapien
gaggatgattcccccaagtaaatgtatgctaga

SEQ ID NO: 1045426 - DNA, 33 bp, Homo sapien
gaggatgattcccccacgtaaatgtatgctaga

SEQ ID NO: 1045427 - DNA, 33 bp, Homo sapien
gtgaaagccttagaaacctgcctctatattggg

SEQ ID NO: 1045428 - DNA, 33 bp, Homo sapien
gtgaaagccttagaaatctgcctctatattggg

SEQ ID NO: 1045429 - DNA, 33 bp, Homo sapien
gagatctcatcatgcaatagatggaaatgcttt

SEQ ID NO: 1045430 - DNA, 33 bp, Homo sapien
gagatctcatcatgcagtagatggaaatgcttt

SEQ ID NO: 1045431 - DNA, 33 bp, Homo sapien
ataatctttggacaaaatgcaaatcatgagtaa

SEQ ID NO: 1045432 - DNA, 33 bp, Homo sapien
ataatctttggacaaactgcaaatcatgagtaa

SEQ ID NO: 1045433 - DNA, 33 bp, Homo sapien
tgtcagcaatgcaatgccactaaggtaataact

SEQ ID NO: 1045434 - DNA, 33 bp, Homo sapien
tgtcagcaatgcaatgtcactaaggtaataact

SEQ ID NO: 1045435 - DNA, 33 bp, Homo sapien
aggcttggcagtatgccgagtagtctgttcaca

SEQ ID NO: 1045436 - DNA, 33 bp, Homo sapien
aggcttggcagtatgctgagtagtctgttcaca

SEQ ID NO: 1045437 - DNA, 33 bp, Homo sapien
gccaccagcaggatgacgacagatccagggctc

SEQ ID NO: 1045438 - DNA, 33 bp, Homo sapien
gccaccagcaggatgaggacagatccagggctc

SEQ ID NO: 1045439 - DNA, 33 bp, Homo sapien
cccagagggcattcctcagaacccaggtcccat

SEQ ID NO: 1045440 - DNA, 33 bp, Homo sapien
cccagagggcattccttagaacccaggtcccat

SEQ ID NO: 1045441 - DNA, 33 bp, Homo sapien
aaatgcatctattcacaaggaaacatcgcagtg

SEQ ID NO: 1045442 - DNA, 33 bp, Homo sapien
aaatgcatctattcacgaggaaacatcgcagtg

SEQ ID NO: 1045443 - DNA, 33 bp, Homo sapien
atgcagttccacagaacagaaaatcactctagt

SEQ ID NO: 1045444 - DNA, 33 bp, Homo sapien
atgcagttccacagaatagaaaatcactctagt

SEQ ID NO: 1045445 - DNA, 33 bp, Homo sapien
actctggtccctaccactgctgcgggtgatggg

SEQ ID NO: 1045446 - DNA, 33 bp, Homo sapien
actctggtccctaccattgctgcgggtgatggg

SEQ ID NO: 1045447 - DNA, 33 bp, Homo sapien
tctaagagtaacgatgccaaaaagataaaatta

SEQ ID NO: 1045448 - DNA, 33 bp, Homo sapien
tctaagagtaacgatggcaaaaagataaaatta

SEQ ID NO: 1045449 - DNA, 33 bp, Homo sapien
ctcacaatggtaactcacaggtgaactgccttt

SEQ ID NO: 1045450 - DNA, 33 bp, Homo sapien
ctcacaatggtaactcgcaggtgaactgccttt

SEQ ID NO: 1045451 - DNA, 33 bp, Homo sapien
acatacgaagtaggaaataagcagaaagatttc

SEQ ID NO: 1045452 - DNA, 33 bp, Homo sapien
acatacgaagtaggaagtaagcagaaagatttc

SEQ ID NO: 1045453 - DNA, 33 bp, Homo sapien
actcaggaatcctgggaaacctgttaaccattc

SEQ ID NO: 1045454 - DNA, 33 bp, Homo sapien
actcaggaatcctggggaacctgttaaccattc

SEQ ID NO: 1045455 - DNA, 33 bp, Homo sapien
cttggaaatttcaatcaattccaaatgactaaa

SEQ ID NO: 1045456 - DNA, 33 bp, Homo sapien
cttggaaatttcaatcgattccaaatgactaaa

SEQ ID NO: 1045457 - DNA, 33 bp, Homo sapien
tcttggacttcctttaacatcagttttctcatc

SEQ ID NO: 1045458 - DNA, 33 bp, Homo sapien
tcttggacttcctttagcatcagttttctcatc

SEQ ID NO: 1045459 - DNA, 33 bp, Homo sapien
atacctccaggtacaaagtatatcagaacattc

SEQ ID NO: 1045460 - DNA, 33 bp, Homo sapien
atacctccaggtacaacgtatatcagaacattc

SEQ ID NO: 1045461 - DNA, 33 bp, Homo sapien
atttacaggattcccactgcttataaggttaac

SEQ ID NO: 1045462 - DNA, 33 bp, Homo sapien
atttacaggattcccagtgcttataaggttaac

SEQ ID NO: 1045463 - DNA, 33 bp, Homo sapien
ggctcctaggaagctccgaactccatttgtggc

SEQ ID NO: 1045464 - DNA, 33 bp, Homo sapien
ggctcctaggaagctctgaactccatttgtggc

SEQ ID NO: 1045465 - DNA, 33 bp, Homo sapien
aactctggttttgaaactagagagcatgctgat

SEQ ID NO: 1045466 - DNA, 33 bp, Homo sapien
aactctggttttgaaagtagagagcatgctgat

SEQ ID NO: 1045467 - DNA, 33 bp, Homo sapien
tgccacagctgtgccaatgagaaggagaggatg

SEQ ID NO: 1045468 - DNA, 33 bp, Homo sapien
tgccacagctgtgccagtgagaaggagaggatg

SEQ ID NO: 1045469 - DNA, 33 bp, Homo sapien
tctggtgtctcttctcaaaggaaactgccccac

SEQ ID NO: 1045470 - DNA, 33 bp, Homo sapien
tctggtgtctcttctcgaaggaaactgccccac

SEQ ID NO: 1045471 - DNA, 33 bp, Homo sapien
tatccaagatactccaaggcaagtctgatttta

SEQ ID NO: 1045472 - DNA, 33 bp, Homo sapien
tatccaagatactccacggcaagtctgatttta

SEQ ID NO: 1045473 - DNA, 33 bp, Homo sapien
acccaatgcttgtgaccggcttctgaaatgagg

SEQ ID NO: 1045474 - DNA, 33 bp, Homo sapien
acccaatgcttgtgactggcttctgaaatgagg

SEQ ID NO: 1045475 - DNA, 33 bp, Homo sapien
acccaccattgtatccagcaaatttttatattt

SEQ ID NO: 1045476 - DNA, 33 bp, Homo sapien
acccaccattgtatcccgcaaatttttatattt

SEQ ID NO: 1045477 - DNA, 33 bp, Homo sapien
ttcccattataccacaaccctaaagcagttaat

SEQ ID NO: 1045478 - DNA, 33 bp, Homo sapien
ttcccattataccacacccctaaagcagttaat

SEQ ID NO: 1045479 - DNA, 33 bp, Homo sapien
ctcaaaacagcgatgaaaataaatgtctaaaat

SEQ ID NO: 1045480 - DNA, 33 bp, Homo sapien
ctcaaaacagcgatgataataaatgtctaaaat

SEQ ID NO: 1045481 - DNA, 33 bp, Homo sapien
agatgtcagttttcccacatgactgatgtcact

SEQ ID NO: 1045482 - DNA, 33 bp, Homo sapien
agatgtcagttttcccgcatgactgatgtcact

SEQ ID NO: 1045483 - DNA, 33 bp, Homo sapien
ctcctggatgcttccacgatgtgaatttagact

SEQ ID NO: 1045484 - DNA, 33 bp, Homo sapien
ctcctggatgcttccatgatgtgaatttagact

SEQ ID NO: 1045485 - DNA, 33 bp, Homo sapien
attcagaaagtaaacaagaacctggcaatgaac

SEQ ID NO: 1045486 - DNA, 33 bp, Homo sapien
attcagaaagtaaacatgaacctggcaatgaac

SEQ ID NO: 1045487 - DNA, 33 bp, Homo sapien
ttttgtcattaaccacactcctgttttccacct

SEQ ID NO: 1045488 - DNA, 33 bp, Homo sapien
ttttgtcattaaccaccctcctgttttccacct

SEQ ID NO: 1045489 - DNA, 33 bp, Homo sapien
ccagaggaagaagaagacggtatttaggagtga

SEQ ID NO: 1045490 - DNA, 33 bp, Homo sapien
ccagaggaagaagaaggcggtatttaggagtga

SEQ ID NO: 1045491 - DNA, 33 bp, Homo sapien
tgatcagggtgagtaacgaggttttaattttca

SEQ ID NO: 1045492 - DNA, 33 bp, Homo sapien
tgatcagggtgagtaatgaggttttaattttca

SEQ ID NO: 1045493 - DNA, 33 bp, Homo sapien
ggcatggaaagattgccatcacatagtatttac

SEQ ID NO: 1045494 - DNA, 33 bp, Homo sapien
ggcatggaaagattgctatcacatagtatttac

SEQ ID NO: 1045495 - DNA, 33 bp, Homo sapien
actgtctcctctttcaacctccacttgccaatt

SEQ ID NO: 1045496 - DNA, 33 bp, Homo sapien
actgtctcctctttcatcctccacttgccaatt

SEQ ID NO: 1045497 - DNA, 33 bp, Homo sapien
ggtgaccaggacggacagagtgaagagaggggc

SEQ ID NO: 1045498 - DNA, 33 bp, Homo sapien
ggtgaccaggacggaccgagtgaagagaggggc

SEQ ID NO: 1045499 - DNA, 33 bp, Homo sapien
aggtgttgggtctcatcagtgtggctatgtctc

SEQ ID NO: 1045500 - DNA, 33 bp, Homo sapien
aggtgttgggtctcattagtgtggctatgtctc

SEQ ID NO: 1045501 - DNA, 33 bp, Homo sapien
attccgtaaggtcaggaaagacacagagagggt

SEQ ID NO: 1045502 - DNA, 33 bp, Homo sapien
attccgtaaggtcagggaagacacagagagggt

SEQ ID NO: 1045503 - DNA, 33 bp, Homo sapien
tgagatttttgagaaccgagtaggtgcagttct

SEQ ID NO: 1045504 - DNA, 33 bp, Homo sapien
tgagatttttgagaactgagtaggtgcagttct

SEQ ID NO: 1045505 - DNA, 33 bp, Homo sapien
gtaggaactgtacctcccctagctggctctgcc

SEQ ID NO: 1045506 - DNA, 33 bp, Homo sapien
gtaggaactgtacctctcctagctggctctgcc

SEQ ID NO: 1045507 - DNA, 33 bp, Homo sapien
atgcctatgtcctacaacagacctgccatatca

SEQ ID NO: 1045508 - DNA, 33 bp, Homo sapien
atgcctatgtcctacaccagacctgccatatca

SEQ ID NO: 1045509 - DNA, 33 bp, Homo sapien
ccaccactttgacttaaaatcccttcctcctca

SEQ ID NO: 1045510 - DNA, 33 bp, Homo sapien
ccaccactttgacttagaatcccttcctcctca

SEQ ID NO: 1045511 - DNA, 33 bp, Homo sapien
ctaccatcttacaaacaaagaaactgaaggtcc

SEQ ID NO: 1045512 - DNA, 33 bp, Homo sapien
ctaccatcttacaaacgaagaaactgaaggtcc

SEQ ID NO: 1045513 - DNA, 33 bp, Homo sapien
acaactgtaagacactaagataactgttttaca

SEQ ID NO: 1045514 - DNA, 33 bp, Homo sapien
acaactgtaagacactgagataactgttttaca

SEQ ID NO: 1045515 - DNA, 33 bp, Homo sapien
agagcctttataaggacgacattaaagcagaag

SEQ ID NO: 1045516 - DNA, 33 bp, Homo sapien
agagcctttataaggatgacattaaagcagaag

SEQ ID NO: 1045517 - DNA, 33 bp, Homo sapien
gggttgtctaacatcaccatgatctaattttag

SEQ ID NO: 1045518 - DNA, 33 bp, Homo sapien
gggttgtctaacatcatcatgatctaattttag

SEQ ID NO: 1045519 - DNA, 33 bp, Homo sapien
tacacagaaaggattacgtaggcagggtgctcc

SEQ ID NO: 1045520 - DNA, 33 bp, Homo sapien
tacacagaaaggattatgtaggcagggtgctcc

SEQ ID NO: 1045521 - DNA, 33 bp, Homo sapien
aggggattaagggtaacggagagggctgcatat

SEQ ID NO: 1045522 - DNA, 33 bp, Homo sapien
aggggattaagggtaatggagagggctgcatat

SEQ ID NO: 1045523 - DNA, 33 bp, Homo sapien
tggcaatgtcagtagcaaacatgagggcagatg

SEQ ID NO: 1045524 - DNA, 33 bp, Homo sapien
tggcaatgtcagtagcgaacatgagggcagatg

SEQ ID NO: 1045525 - DNA, 33 bp, Homo sapien
gagctagaaatgcagaacttggaacttacgaga

SEQ ID NO: 1045526 - DNA, 33 bp, Homo sapien
gagctagaaatgcagagcttggaacttacgaga

SEQ ID NO: 1045527 - DNA, 33 bp, Homo sapien
tgttgctgccttctcacggatggactggcacag

SEQ ID NO: 1045528 - DNA, 33 bp, Homo sapien
tgttgctgccttctcatggatggactggcacag

SEQ ID NO: 1045529 - DNA, 33 bp, Homo sapien
gcgtgagaggagcgaccgaatgcccagcaccca

SEQ ID NO: 1045530 - DNA, 33 bp, Homo sapien
gcgtgagaggagcgactgaatgcccagcaccca

SEQ ID NO: 1045531 - DNA, 33 bp, Homo sapien
ctgagacgtacgctcacacatcatgcatgagaa

SEQ ID NO: 1045532 - DNA, 33 bp, Homo sapien
ctgagacgtacgctcagacatcatgcatgagaa

SEQ ID NO: 1045533 - DNA, 33 bp, Homo sapien
ccaagtaccgcccaacaccaggtcctggctcca

SEQ ID NO: 1045534 - DNA, 33 bp, Homo sapien
ccaagtaccgcccaacgccaggtcctggctcca

SEQ ID NO: 1045535 - DNA, 33 bp, Homo sapien
atgaaatgaacagtccaactggcctacttgctc

SEQ ID NO: 1045536 - DNA, 33 bp, Homo sapien
atgaaatgaacagtccgactggcctacttgctc

SEQ ID NO: 1045537 - DNA, 33 bp, Homo sapien
caatcacgcctatccaatgaatcaaaggcccag

SEQ ID NO: 1045538 - DNA, 33 bp, Homo sapien
caatcacgcctatccagtgaatcaaaggcccag

SEQ ID NO: 1045539 - DNA, 33 bp, Homo sapien
catatatctgaaaaaaattgtcaactgtagagt

SEQ ID NO: 1045540 - DNA, 33 bp, Homo sapien
catatatctgaaaaaagttgtcaactgtagagt

SEQ ID NO: 1045541 - DNA, 33 bp, Homo sapien
atgtaagcagaaactacgtcttcatccccactc

SEQ ID NO: 1045542 - DNA, 33 bp, Homo sapien
atgtaagcagaaactatgtcttcatccccactc

SEQ ID NO: 1045543 - DNA, 33 bp, Homo sapien
tttttcatttttttcaccagtgtcacttgccaa

SEQ ID NO: 1045544 - DNA, 33 bp, Homo sapien
tttttcatttttttcatcagtgtcacttgccaa

SEQ ID NO: 1045545 - DNA, 33 bp, Homo sapien
aaaacagtttctgccacgtcagatttgtgaagg

SEQ ID NO: 1045546 - DNA, 33 bp, Homo sapien
aaaacagtttctgccatgtcagatttgtgaagg

SEQ ID NO: 1045547 - DNA, 33 bp, Homo sapien
cctatgggatttgcccaactgcttggtgctcac

SEQ ID NO: 1045548 - DNA, 33 bp, Homo sapien
cctatgggatttgcccgactgcttggtgctcac

SEQ ID NO: 1045549 - DNA, 33 bp, Homo sapien
aggtcaggacttgagaaaccacggttccaggct

SEQ ID NO: 1045550 - DNA, 33 bp, Homo sapien
aggtcaggacttgagagaccacggttccaggct

SEQ ID NO: 1045551 - DNA, 33 bp, Homo sapien
atgcccttccttaaaaactggatcttcaagggt

SEQ ID NO: 1045552 - DNA, 33 bp, Homo sapien
atgcccttccttaaaacctggatcttcaagggt

SEQ ID NO: 1045553 - DNA, 33 bp, Homo sapien
tgagtctggcaaccatcaaggtactgggccctc

SEQ ID NO: 1045554 - DNA, 33 bp, Homo sapien
tgagtctggcaaccattaaggtactgggccctc

SEQ ID NO: 1045555 - DNA, 33 bp, Homo sapien
ggaataatgacaagagaaaagcctgtatgtgtt

SEQ ID NO: 1045556 - DNA, 33 bp, Homo sapien
ggaataatgacaagaggaaagcctgtatgtgtt

SEQ ID NO: 1045557 - DNA, 33 bp, Homo sapien
ctgcctggtctcactaaggccatccgaggtggg

SEQ ID NO: 1045558 - DNA, 33 bp, Homo sapien
ctgcctggtctcactagggccatccgaggtggg

SEQ ID NO: 1045559 - DNA, 33 bp, Homo sapien
aaggggacattcaaaccgtactatgagacagga

SEQ ID NO: 1045560 - DNA, 33 bp, Homo sapien
aaggggacattcaaactgtactatgagacagga

SEQ ID NO: 1045561 - DNA, 33 bp, Homo sapien
tggactctgctcaaagaagacccgtctcatccc

SEQ ID NO: 1045562 - DNA, 33 bp, Homo sapien
tggactctgctcaaaggagacccgtctcatccc

SEQ ID NO: 1045563 - DNA, 33 bp, Homo sapien
gctacggcaggttttacgtatgtgaacccagag

SEQ ID NO: 1045564 - DNA, 33 bp, Homo sapien
gctacggcaggttttatgtatgtgaacccagag

SEQ ID NO: 1045565 - DNA, 33 bp, Homo sapien
tgaagaatcgggggcacgtgtccaagcaaaatg

SEQ ID NO: 1045566 - DNA, 33 bp, Homo sapien
tgaagaatcgggggcatgtgtccaagcaaaatg

SEQ ID NO: 1045567 - DNA, 33 bp, Homo sapien
cagggactccattctcccaggtctcagagttgt

SEQ ID NO: 1045568 - DNA, 33 bp, Homo sapien
cagggactccattctcgcaggtctcagagttgt

SEQ ID NO: 1045569 - DNA, 33 bp, Homo sapien
aaatgacatgaactctcaacagggaaccaacgt

SEQ ID NO: 1045570 - DNA, 33 bp, Homo sapien
aaatgacatgaactctgaacagggaaccaacgt

SEQ ID NO: 1045571 - DNA, 33 bp, Homo sapien
tatccctggtacctaacatggcgctggccttgg

SEQ ID NO: 1045572 - DNA, 33 bp, Homo sapien
tatccctggtacctaatatggcgctggccttgg

SEQ ID NO: 1045573 - DNA, 33 bp, Homo sapien
gggtcagtctgaaggaaggtgacacatggttag

SEQ ID NO: 1045574 - DNA, 33 bp, Homo sapien
gggtcagtctgaaggagggtgacacatggttag

SEQ ID NO: 1045575 - DNA, 33 bp, Homo sapien
acagcttccctaagaactcagctaaaacgcaat

SEQ ID NO: 1045576 - DNA, 33 bp, Homo sapien
acagcttccctaagaattcagctaaaacgcaat

SEQ ID NO: 1045577 - DNA, 33 bp, Homo sapien
taatgatcgacacagacgggaagtactcccaga

SEQ ID NO: 1045578 - DNA, 33 bp, Homo sapien
taatgatcgacacagatgggaagtactcccaga

SEQ ID NO: 1045579 - DNA, 33 bp, Homo sapien
aatgtgatgcttgccacgaaggaggagtttagg

SEQ ID NO: 1045580 - DNA, 33 bp, Homo sapien
aatgtgatgcttgccatgaaggaggagtttagg

SEQ ID NO: 1045581 - DNA, 33 bp, Homo sapien
attatctgtttaaataaatctttctctctgagg

SEQ ID NO: 1045582 - DNA, 33 bp, Homo sapien
attatctgtttaaatagatctttctctctgagg

SEQ ID NO: 1045583 - DNA, 33 bp, Homo sapien
cccttcagccccacacaagacattcagagaaac

SEQ ID NO: 1045584 - DNA, 33 bp, Homo sapien
cccttcagccccacacgagacattcagagaaac

SEQ ID NO: 1045585 - DNA, 33 bp, Homo sapien
catttcctctcttccccgcaaacagaatcatta

SEQ ID NO: 1045586 - DNA, 33 bp, Homo sapien
catttcctctcttccctgcaaacagaatcatta

SEQ ID NO: 1045587 - DNA, 33 bp, Homo sapien
tgcgtgcttaacctagaaatgtcagacagtctg

SEQ ID NO: 1045588 - DNA, 33 bp, Homo sapien
tgcgtgcttaacctagcaatgtcagacagtctg

SEQ ID NO: 1045589 - DNA, 33 bp, Homo sapien
cgccttccatcctggaaagaagttcattataca

SEQ ID NO: 1045590 - DNA, 33 bp, Homo sapien
cgccttccatcctggagagaagttcattataca

SEQ ID NO: 1045591 - DNA, 33 bp, Homo sapien
acgtcacgtcaacgtcactgtcctcttcatcgc

SEQ ID NO: 1045592 - DNA, 33 bp, Homo sapien
acgtcacgtcaacgtcgctgtcctcttcatcgc

SEQ ID NO: 1045593 - DNA, 33 bp, Homo sapien
ggcatcaggggcacagaccaactgagccacggg

SEQ ID NO: 1045594 - DNA, 33 bp, Homo sapien
ggcatcaggggcacaggccaactgagccacggg

SEQ ID NO: 1045595 - DNA, 33 bp, Homo sapien
cccccatccattctcccaatacaagtgaagacg

SEQ ID NO: 1045596 - DNA, 33 bp, Homo sapien
cccccatccattctcctaatacaagtgaagacg

SEQ ID NO: 1045597 - DNA, 33 bp, Homo sapien
agcgccttttagtgggaacgaggatggaaaagc

SEQ ID NO: 1045598 - DNA, 33 bp, Homo sapien
agcgccttttagtggggacgaggatggaaaagc

SEQ ID NO: 1045599 - DNA, 33 bp, Homo sapien
tagcaacacgggtggcaagcagatcaaccaggt

SEQ ID NO: 1045600 - DNA, 33 bp, Homo sapien
tagcaacacgggtggcgagcagatcaaccaggt

SEQ ID NO: 1045601 - DNA, 33 bp, Homo sapien
acattccgttgtgtatgaaacaggactgtccct

SEQ ID NO: 1045602 - DNA, 33 bp, Homo sapien
acattccgttgtgtattaaacaggactgtccct

SEQ ID NO: 1045603 - DNA, 33 bp, Homo sapien
ggagaggcaaaagcaacaggagcctctgagtag

SEQ ID NO: 1045604 - DNA, 33 bp, Homo sapien
ggagaggcaaaagcaataggagcctctgagtag

SEQ ID NO: 1045605 - DNA, 33 bp, Homo sapien
tggttttcaccattaaaagtatgtggtgtaggg

SEQ ID NO: 1045606 - DNA, 33 bp, Homo sapien
tggttttcaccattaagagtatgtggtgtaggg

SEQ ID NO: 1045607 - DNA, 33 bp, Homo sapien
tgacttcccatgactccctggaaaggagcccat

SEQ ID NO: 1045608 - DNA, 33 bp, Homo sapien
tgacttcccatgactctctggaaaggagcccat

SEQ ID NO: 1045609 - DNA, 33 bp, Homo sapien
cggaaaataaatggtccaagccctacacttggc

SEQ ID NO: 1045610 - DNA, 33 bp, Homo sapien
cggaaaataaatggtctaagccctacacttggc

SEQ ID NO: 1045611 - DNA, 33 bp, Homo sapien
aacagcctcctgcttccaatagtgtaagccatg

SEQ ID NO: 1045612 - DNA, 33 bp, Homo sapien
aacagcctcctgcttctaatagtgtaagccatg

SEQ ID NO: 1045613 - DNA, 33 bp, Homo sapien
ctatgcaggatctgcaagaagggcaagagtggg

SEQ ID NO: 1045614 - DNA, 33 bp, Homo sapien
ctatgcaggatctgcaggaagggcaagagtggg

SEQ ID NO: 1045615 - DNA, 33 bp, Homo sapien
gaacagctgatggaaccgagactggcgcacagc

SEQ ID NO: 1045616 - DNA, 33 bp, Homo sapien
gaacagctgatggaactgagactggcgcacagc

SEQ ID NO: 1045617 - DNA, 33 bp, Homo sapien
gtggtgccaagtactcaaacatggacgtcaggt

SEQ ID NO: 1045618 - DNA, 33 bp, Homo sapien
gtggtgccaagtactcgaacatggacgtcaggt

SEQ ID NO: 1045619 - DNA, 33 bp, Homo sapien
gaagacacacctaataaatatgctcaatgaacg

SEQ ID NO: 1045620 - DNA, 33 bp, Homo sapien
gaagacacacctaatatatatgctcaatgaacg

SEQ ID NO: 1045621 - DNA, 33 bp, Homo sapien
gtaaatgcataacatacctctggaaaggtgata

SEQ ID NO: 1045622 - DNA, 33 bp, Homo sapien
gtaaatgcataacatatctctggaaaggtgata

SEQ ID NO: 1045623 - DNA, 33 bp, Homo sapien
gataagaaactgataacattgactgctttgaga

SEQ ID NO: 1045624 - DNA, 33 bp, Homo sapien
gataagaaactgataagattgactgctttgaga

SEQ ID NO: 1045625 - DNA, 33 bp, Homo sapien
gactgctttgagagagaaggattaggatgctgg

SEQ ID NO: 1045626 - DNA, 33 bp, Homo sapien
gactgctttgagagaggaggattaggatgctgg

SEQ ID NO: 1045627 - DNA, 33 bp, Homo sapien
atggatatgcgtttacatcgaagggcttgattt

SEQ ID NO: 1045628 - DNA, 33 bp, Homo sapien
atggatatgcgtttacgtcgaagggcttgattt

SEQ ID NO: 1045629 - DNA, 33 bp, Homo sapien
gtcccaagaaacattccgaagttccagcctcct

SEQ ID NO: 1045630 - DNA, 33 bp, Homo sapien
gtcccaagaaacattctgaagttccagcctcct

SEQ ID NO: 1045631 - DNA, 33 bp, Homo sapien
aggaactggtgactaccatcacaattatttatg

SEQ ID NO: 1045632 - DNA, 33 bp, Homo sapien
aggaactggtgactactatcacaattatttatg

SEQ ID NO: 1045633 - DNA, 33 bp, Homo sapien
cctttcccagaccaacactcatcctttgtttga

SEQ ID NO: 1045634 - DNA, 33 bp, Homo sapien
cctttcccagaccaacgctcatcctttgtttga

SEQ ID NO: 1045635 - DNA, 33 bp, Homo sapien
ctcactcagtgtgttcgcatcctgaccttgagg

SEQ ID NO: 1045636 - DNA, 33 bp, Homo sapien
ctcactcagtgtgttctcatcctgaccttgagg

SEQ ID NO: 1045637 - DNA, 33 bp, Homo sapien
gcaggaaggcctcaaacgccagacaagtctgta

SEQ ID NO: 1045638 - DNA, 33 bp, Homo sapien
gcaggaaggcctcaaatgccagacaagtctgta

SEQ ID NO: 1045639 - DNA, 33 bp, Homo sapien
tttacttatcttccaagacctctttttcactcc

SEQ ID NO: 1045640 - DNA, 33 bp, Homo sapien
tttacttatcttccaatacctctttttcactcc

SEQ ID NO: 1045641 - DNA, 33 bp, Homo sapien
tagtggtcttggcagagtagtacccctctctgg

SEQ ID NO: 1045642 - DNA, 33 bp, Homo sapien
tagtggtcttggcagattagtacccctctctgg

SEQ ID NO: 1045643 - DNA, 33 bp, Homo sapien
tttctttccctgtcacagtcccagaagcttttt

SEQ ID NO: 1045644 - DNA, 33 bp, Homo sapien
tttctttccctgtcacggtcccagaagcttttt

SEQ ID NO: 1045645 - DNA, 33 bp, Homo sapien
ctttgtgtctccttcaatctccctgttctaccc

SEQ ID NO: 1045646 - DNA, 33 bp, Homo sapien
ctttgtgtctccttcagtctccctgttctaccc

SEQ ID NO: 1045647 - DNA, 33 bp, Homo sapien
cccacgaatctccacaccagcaatggcaagact

SEQ ID NO: 1045648 - DNA, 33 bp, Homo sapien
cccacgaatctccacatcagcaatggcaagact

SEQ ID NO: 1045649 - DNA, 33 bp, Homo sapien
acaggctcagaagagacagataatgaaatgttt

SEQ ID NO: 1045650 - DNA, 33 bp, Homo sapien
acaggctcagaagagatagataatgaaatgttt

SEQ ID NO: 1045651 - DNA, 33 bp, Homo sapien
gcagcaagttgactgcagaatcccagggacctc

SEQ ID NO: 1045652 - DNA, 33 bp, Homo sapien
gcagcaagttgactgcggaatcccagggacctc

SEQ ID NO: 1045653 - DNA, 33 bp, Homo sapien
actaataacaacaatgacaatagtaacaacagc

SEQ ID NO: 1045654 - DNA, 33 bp, Homo sapien
actaataacaacaatggcaatagtaacaacagc

SEQ ID NO: 1045655 - DNA, 33 bp, Homo sapien
cttcgtttctgtccaaaagttgtttccataatt

SEQ ID NO: 1045656 - DNA, 33 bp, Homo sapien
cttcgtttctgtccaagagttgtttccataatt

SEQ ID NO: 1045657 - DNA, 33 bp, Homo sapien
gtttcaacctctgtcaccagggaattactcaaa

SEQ ID NO: 1045658 - DNA, 33 bp, Homo sapien
gtttcaacctctgtcatcagggaattactcaaa

SEQ ID NO: 1045659 - DNA, 33 bp, Homo sapien
cctgagttaagtgctcaatccacatctgtcaaa

SEQ ID NO: 1045660 - DNA, 33 bp, Homo sapien
cctgagttaagtgctcgatccacatctgtcaaa

SEQ ID NO: 1045661 - DNA, 33 bp, Homo sapien
gggtgaggacactgaaaggtgaagggtgaaaga

SEQ ID NO: 1045662 - DNA, 33 bp, Homo sapien
gggtgaggacactgaagggtgaagggtgaaaga

SEQ ID NO: 1045663 - DNA, 33 bp, Homo sapien
ttctgtgcacggtcaaccaaagccatgaagggg

SEQ ID NO: 1045664 - DNA, 33 bp, Homo sapien
ttctgtgcacggtcaatcaaagccatgaagggg

SEQ ID NO: 1045665 - DNA, 33 bp, Homo sapien
gttttcttgaaatacagtactcactcttgggat

SEQ ID NO: 1045666 - DNA, 33 bp, Homo sapien
gttttcttgaaatacattactcactcttgggat

SEQ ID NO: 1045667 - DNA, 33 bp, Homo sapien
tgctggaggcaagatacaccagggccattatta

SEQ ID NO: 1045668 - DNA, 33 bp, Homo sapien
tgctggaggcaagatataccagggccattatta

SEQ ID NO: 1045669 - DNA, 33 bp, Homo sapien
ctctgggcacctgacacgtataaactcaccaga

SEQ ID NO: 1045670 - DNA, 33 bp, Homo sapien
ctctgggcacctgacatgtataaactcaccaga

SEQ ID NO: 1045671 - DNA, 33 bp, Homo sapien
aggagactaagcctcgaagaagtgagttgtttg

SEQ ID NO: 1045672 - DNA, 33 bp, Homo sapien
aggagactaagcctcggagaagtgagttgtttg

SEQ ID NO: 1045673 - DNA, 33 bp, Homo sapien
cacccggctggttctacgttcttgaccactcca

SEQ ID NO: 1045674 - DNA, 33 bp, Homo sapien
cacccggctggttctatgttcttgaccactcca

SEQ ID NO: 1045675 - DNA, 33 bp, Homo sapien
tgattctatagctaagccagggaaaatataaga

SEQ ID NO: 1045676 - DNA, 33 bp, Homo sapien
tgattctatagctaagtcagggaaaatataaga

SEQ ID NO: 1045677 - DNA, 33 bp, Homo sapien
tgagagtaggttacgaaaggaccctggcttccc

SEQ ID NO: 1045678 - DNA, 33 bp, Homo sapien
tgagagtaggttacgataggaccctggcttccc

SEQ ID NO: 1045679 - DNA, 33 bp, Homo sapien
ggaagcaactaaaatacccatcaatatgcaatt

SEQ ID NO: 1045680 - DNA, 33 bp, Homo sapien
ggaagcaactaaaatatccatcaatatgcaatt

SEQ ID NO: 1045681 - DNA, 33 bp, Homo sapien
gagactaaagagccaaaactcacctgatgccac

SEQ ID NO: 1045682 - DNA, 33 bp, Homo sapien
gagactaaagagccaacactcacctgatgccac

SEQ ID NO: 1045683 - DNA, 33 bp, Homo sapien
aaacacgtgagaggaaacacaggccgggtgtga

SEQ ID NO: 1045684 - DNA, 33 bp, Homo sapien
aaacacgtgagaggaagcacaggccgggtgtga

SEQ ID NO: 1045685 - DNA, 33 bp, Homo sapien
gattgggtatatttaacaaatgcctcaggtaat

SEQ ID NO: 1045686 - DNA, 33 bp, Homo sapien
gattgggtatatttaagaaatgcctcaggtaat

SEQ ID NO: 1045687 - DNA, 33 bp, Homo sapien
ttcctcttctcaaaaacagtgcaacccctaagc

SEQ ID NO: 1045688 - DNA, 33 bp, Homo sapien
ttcctcttctcaaaaatagtgcaacccctaagc

SEQ ID NO: 1045689 - DNA, 33 bp, Homo sapien
aaaaaatacacccaagacgtgaatgaaaaaagg

SEQ ID NO: 1045690 - DNA, 33 bp, Homo sapien
aaaaaatacacccaagtcgtgaatgaaaaaagg

SEQ ID NO: 1045691 - DNA, 33 bp, Homo sapien
atggtgtcaatgaaaagaatcgaattctgtaaa

SEQ ID NO: 1045692 - DNA, 33 bp, Homo sapien
atggtgtcaatgaaaataatcgaattctgtaaa

SEQ ID NO: 1045693 - DNA, 33 bp, Homo sapien
attgtctagattcttaaaacagtggttatttct

SEQ ID NO: 1045694 - DNA, 33 bp, Homo sapien
attgtctagattcttagaacagtggttatttct

SEQ ID NO: 1045695 - DNA, 33 bp, Homo sapien
atacaatgtatacaaacgaagccaggagcgcct

SEQ ID NO: 1045696 - DNA, 33 bp, Homo sapien
atacaatgtatacaaatgaagccaggagcgcct

SEQ ID NO: 1045697 - DNA, 33 bp, Homo sapien
aagaaacaaatgaccaaagattaattccttttt

SEQ ID NO: 1045698 - DNA, 33 bp, Homo sapien
aagaaacaaatgaccatagattaattccttttt

SEQ ID NO: 1045699 - DNA, 33 bp, Homo sapien
taaccaaagctcaggaagtgaacgaggtcactc

SEQ ID NO: 1045700 - DNA, 33 bp, Homo sapien
taaccaaagctcaggaggtgaacgaggtcactc

SEQ ID NO: 1045701 - DNA, 33 bp, Homo sapien
tctataatgtgccaaacgggcagaatctccttt

SEQ ID NO: 1045702 - DNA, 33 bp, Homo sapien
tctataatgtgccaaatgggcagaatctccttt

SEQ ID NO: 1045703 - DNA, 33 bp, Homo sapien
ctttgaatattaagcaaagacatctcaggcata

SEQ ID NO: 1045704 - DNA, 33 bp, Homo sapien
ctttgaatattaagcacagacatctcaggcata

SEQ ID NO: 1045705 - DNA, 33 bp, Homo sapien
gggctaccctagtgacagatcctatgaggtcgc

SEQ ID NO: 1045706 - DNA, 33 bp, Homo sapien
gggctaccctagtgacggatcctatgaggtcgc

SEQ ID NO: 1045707 - DNA, 33 bp, Homo sapien
tgtaacaccctctttacgagttaacaacaagcg

SEQ ID NO: 1045708 - DNA, 33 bp, Homo sapien
tgtaacaccctctttatgagttaacaacaagcg

SEQ ID NO: 1045709 - DNA, 33 bp, Homo sapien
tccactcgttccagtcaatggtcatcgtgccgt

SEQ ID NO: 1045710 - DNA, 33 bp, Homo sapien
tccactcgttccagtcgatggtcatcgtgccgt

SEQ ID NO: 1045711 - DNA, 33 bp, Homo sapien
tccaggctccaagctcactattggcaggcactg

SEQ ID NO: 1045712 - DNA, 33 bp, Homo sapien
tccaggctccaagctcgctattggcaggcactg

SEQ ID NO: 1045713 - DNA, 33 bp, Homo sapien
tggcgtcaatgctgtacgttgggaagtcaggcc

SEQ ID NO: 1045714 - DNA, 33 bp, Homo sapien
tggcgtcaatgctgtaggttgggaagtcaggcc

SEQ ID NO: 1045715 - DNA, 33 bp, Homo sapien
agccccacccgcaaaacagatctgctctctggc

SEQ ID NO: 1045716 - DNA, 33 bp, Homo sapien
agccccacccgcaaaatagatctgctctctggc

SEQ ID NO: 1045717 - DNA, 33 bp, Homo sapien
gtgaagcagaacagccacttccgcagtgagctg

SEQ ID NO: 1045718 - DNA, 33 bp, Homo sapien
gtgaagcagaacagccgcttccgcagtgagctg

SEQ ID NO: 1045719 - DNA, 33 bp, Homo sapien
accagcttcataaatacacccctcgaatattga

SEQ ID NO: 1045720 - DNA, 33 bp, Homo sapien
accagcttcataaatagacccctcgaatattga

SEQ ID NO: 1045721 - DNA, 33 bp, Homo sapien
gttcaatccacagctacgcccctcactgtgcac

SEQ ID NO: 1045722 - DNA, 33 bp, Homo sapien
gttcaatccacagctatgcccctcactgtgcac

SEQ ID NO: 1045723 - DNA, 33 bp, Homo sapien
acattataaacaatgacatgccaatgaattgaa

SEQ ID NO: 1045724 - DNA, 33 bp, Homo sapien
acattataaacaatgatatgccaatgaattgaa

SEQ ID NO: 1045725 - DNA, 33 bp, Homo sapien
ttaagaatcaccagcgacacttgctagagacgt

SEQ ID NO: 1045726 - DNA, 33 bp, Homo sapien
ttaagaatcaccagcggcacttgctagagacgt

SEQ ID NO: 1045727 - DNA, 33 bp, Homo sapien
attaactgagctaatacgcatctagtgtgcaga

SEQ ID NO: 1045728 - DNA, 33 bp, Homo sapien
attaactgagctaatatgcatctagtgtgcaga

SEQ ID NO: 1045729 - DNA, 33 bp, Homo sapien
ttgcattctttcgttacctttttaatagctcta

SEQ ID NO: 1045730 - DNA, 33 bp, Homo sapien
ttgcattctttcgttatctttttaatagctcta

SEQ ID NO: 1045731 - DNA, 33 bp, Homo sapien
atggttaaccctctgacgtgtttgaaggctggg

SEQ ID NO: 1045732 - DNA, 33 bp, Homo sapien
atggttaaccctctgatgtgtttgaaggctggg

SEQ ID NO: 1045733 - DNA, 33 bp, Homo sapien
cggaaaccagaatgggcagtcagactggattcc

SEQ ID NO: 1045734 - DNA, 33 bp, Homo sapien
cggaaaccagaatggggagtcagactggattcc

SEQ ID NO: 1045735 - DNA, 33 bp, Homo sapien
gacctaaatctaaaaaataccctctagtctacg

SEQ ID NO: 1045736 - DNA, 33 bp, Homo sapien
gacctaaatctaaaaagtaccctctagtctacg

SEQ ID NO: 1045737 - DNA, 33 bp, Homo sapien
tgtgaggattcaaacacatcaagagttcagaca

SEQ ID NO: 1045738 - DNA, 33 bp, Homo sapien
tgtgaggattcaaacatatcaagagttcagaca

SEQ ID NO: 1045739 - DNA, 33 bp, Homo sapien
atagctgtctggaaaacaatcaactttagggga

SEQ ID NO: 1045740 - DNA, 33 bp, Homo sapien
atagctgtctggaaaataatcaactttagggga

SEQ ID NO: 1045741 - DNA, 33 bp, Homo sapien
tacacgacaaacgtgccctttgtggatttcatg

SEQ ID NO: 1045742 - DNA, 33 bp, Homo sapien
tacacgacaaacgtgctctttgtggatttcatg

SEQ ID NO: 1045743 - DNA, 33 bp, Homo sapien
ctgtgaggcttatacaaactgatggctgaacca

SEQ ID NO: 1045744 - DNA, 33 bp, Homo sapien
ctgtgaggcttatacagactgatggctgaacca

SEQ ID NO: 1045745 - DNA, 33 bp, Homo sapien
actggcaattctgacaacctgattcctggagag

SEQ ID NO: 1045746 - DNA, 33 bp, Homo sapien
actggcaattctgacatcctgattcctggagag

SEQ ID NO: 1045747 - DNA, 33 bp, Homo sapien
tctcaaagtctacggcaaactgctggaccatcc

SEQ ID NO: 1045748 - DNA, 33 bp, Homo sapien
tctcaaagtctacggcgaactgctggaccatcc

SEQ ID NO: 1045749 - DNA, 33 bp, Homo sapien
acactcatcttcaaagcagtgtgattcacaatg

SEQ ID NO: 1045750 - DNA, 33 bp, Homo sapien
acactcatcttcaaagtagtgtgattcacaatg

SEQ ID NO: 1045751 - DNA, 33 bp, Homo sapien
ttctaagaggcagaaacgctacatttgtggact

SEQ ID NO: 1045752 - DNA, 33 bp, Homo sapien
ttctaagaggcagaaaggctacatttgtggact

SEQ ID NO: 1045753 - DNA, 33 bp, Homo sapien
cattctcatcactactcaattccaaatatgttc

SEQ ID NO: 1045754 - DNA, 33 bp, Homo sapien
cattctcatcactactgaattccaaatatgttc

SEQ ID NO: 1045755 - DNA, 33 bp, Homo sapien
tcattccaggagagtccgaagatctggccagcc

SEQ ID NO: 1045756 - DNA, 33 bp, Homo sapien
tcattccaggagagtctgaagatctggccagcc

SEQ ID NO: 1045757 - DNA, 33 bp, Homo sapien
tccttgacaatgcctaaaactgaatctaatagg

SEQ ID NO: 1045758 - DNA, 33 bp, Homo sapien
tccttgacaatgcctacaactgaatctaatagg

SEQ ID NO: 1045759 - DNA, 33 bp, Homo sapien
aagctattttttcagacgaactaactgtaaaag

SEQ ID NO: 1045760 - DNA, 33 bp, Homo sapien
aagctattttttcagaggaactaactgtaaaag

SEQ ID NO: 1045761 - DNA, 33 bp, Homo sapien
tccaaccgatgtcccacgccaaccttgagatgg

SEQ ID NO: 1045762 - DNA, 33 bp, Homo sapien
tccaaccgatgtcccaggccaaccttgagatgg

SEQ ID NO: 1045763 - DNA, 33 bp, Homo sapien
acacaatgtgattctacagaggtcagaatacct

SEQ ID NO: 1045764 - DNA, 33 bp, Homo sapien
acacaatgtgattctagagaggtcagaatacct

SEQ ID NO: 1045765 - DNA, 33 bp, Homo sapien
tactctggtcacattcaaggactgtcttcctgc

SEQ ID NO: 1045766 - DNA, 33 bp, Homo sapien
tactctggtcacattcgaggactgtcttcctgc

SEQ ID NO: 1045767 - DNA, 33 bp, Homo sapien
agagagcatttccctcccaatgtgcgcctctat

SEQ ID NO: 1045768 - DNA, 33 bp, Homo sapien
agagagcatttccctctcaatgtgcgcctctat

SEQ ID NO: 1045769 - DNA, 33 bp, Homo sapien
gattaccatacagtgcagcacgggtctagaatt

SEQ ID NO: 1045770 - DNA, 33 bp, Homo sapien
gattaccatacagtgcggcacgggtctagaatt

SEQ ID NO: 1045771 - DNA, 33 bp, Homo sapien
acctgcagtagtcctgaagaaaagcccaccagc

SEQ ID NO: 1045772 - DNA, 33 bp, Homo sapien
acctgcagtagtcctggagaaaagcccaccagc

SEQ ID NO: 1045773 - DNA, 33 bp, Homo sapien
gaatgtcttcattcacgcactcgttcacagagc

SEQ ID NO: 1045774 - DNA, 33 bp, Homo sapien
gaatgtcttcattcactcactcgttcacagagc

SEQ ID NO: 1045775 - DNA, 33 bp, Homo sapien
tcttactttgtatctccccgcttctcatttttc

SEQ ID NO: 1045776 - DNA, 33 bp, Homo sapien
tcttactttgtatctctccgcttctcatttttc

SEQ ID NO: 1045777 - DNA, 33 bp, Homo sapien
atttcttaatatcatacaatatctggtcctttt

SEQ ID NO: 1045778 - DNA, 33 bp, Homo sapien
atttcttaatatcatagaatatctggtcctttt

SEQ ID NO: 1045779 - DNA, 33 bp, Homo sapien
ctggcttggattcaacagcatctaagatggtac

SEQ ID NO: 1045780 - DNA, 33 bp, Homo sapien
ctggcttggattcaacggcatctaagatggtac

SEQ ID NO: 1045781 - DNA, 33 bp, Homo sapien
ggctacaagcaggacacgggaggactcacttcc

SEQ ID NO: 1045782 - DNA, 33 bp, Homo sapien
ggctacaagcaggacatgggaggactcacttcc

SEQ ID NO: 1045783 - DNA, 33 bp, Homo sapien
agaaccatcaagtccaaaaaattactgccatat

SEQ ID NO: 1045784 - DNA, 33 bp, Homo sapien
agaaccatcaagtccacaaaattactgccatat

SEQ ID NO: 1045785 - DNA, 33 bp, Homo sapien
gagaaattaatagttacggagacctaaagagaa

SEQ ID NO: 1045786 - DNA, 33 bp, Homo sapien
gagaaattaatagttatggagacctaaagagaa

SEQ ID NO: 1045787 - DNA, 33 bp, Homo sapien
gaaggcgtccattcatcagaggaaaagaagagt

SEQ ID NO: 1045788 - DNA, 33 bp, Homo sapien
gaaggcgtccattcattagaggaaaagaagagt

SEQ ID NO: 1045789 - DNA, 33 bp, Homo sapien
ctgacatgacttctcccaaatacagctgtcttc

SEQ ID NO: 1045790 - DNA, 33 bp, Homo sapien
ctgacatgacttctcctaaatacagctgtcttc

SEQ ID NO: 1045791 - DNA, 33 bp, Homo sapien
tatgaaatacctcttacgatttttgaattattt

SEQ ID NO: 1045792 - DNA, 33 bp, Homo sapien
tatgaaatacctcttatgatttttgaattattt

SEQ ID NO: 1045793 - DNA, 33 bp, Homo sapien
tggcagttactttctacatatgctgccctggtc

SEQ ID NO: 1045794 - DNA, 33 bp, Homo sapien
tggcagttactttctagatatgctgccctggtc

SEQ ID NO: 1045795 - DNA, 33 bp, Homo sapien
aacgccttttgagagcaccagaaaggaaaaatc

SEQ ID NO: 1045796 - DNA, 33 bp, Homo sapien
aacgccttttgagagcgccagaaaggaaaaatc

SEQ ID NO: 1045797 - DNA, 33 bp, Homo sapien
cctgctcaaattaaaaatgaggccacagaagac

SEQ ID NO: 1045798 - DNA, 33 bp, Homo sapien
cctgctcaaattaaaactgaggccacagaagac

SEQ ID NO: 1045799 - DNA, 33 bp, Homo sapien
ttttactttcatgctcacagttactatggtgat

SEQ ID NO: 1045800 - DNA, 33 bp, Homo sapien
ttttactttcatgctcgcagttactatggtgat

SEQ ID NO: 1045801 - DNA, 33 bp, Homo sapien
aaagctctgaattctacgttctcaaatgtctaa

SEQ ID NO: 1045802 - DNA, 33 bp, Homo sapien
aaagctctgaattctatgttctcaaatgtctaa

SEQ ID NO: 1045803 - DNA, 33 bp, Homo sapien
aggcaattttatactccaagatacttcaaaact

SEQ ID NO: 1045804 - DNA, 33 bp, Homo sapien
aggcaattttatactcgaagatacttcaaaact

SEQ ID NO: 1045805 - DNA, 33 bp, Homo sapien
ggtcacaggcagaagaacaatgccgcctgccac

SEQ ID NO: 1045806 - DNA, 33 bp, Homo sapien
ggtcacaggcagaagagcaatgccgcctgccac

SEQ ID NO: 1045807 - DNA, 33 bp, Homo sapien
ggaaaaagatcaaatacgtggctaaattgcctg

SEQ ID NO: 1045808 - DNA, 33 bp, Homo sapien
ggaaaaagatcaaatatgtggctaaattgcctg

SEQ ID NO: 1045809 - DNA, 33 bp, Homo sapien
ctttctttgaataggacgaaactgattccaaga

SEQ ID NO: 1045810 - DNA, 33 bp, Homo sapien
ctttctttgaataggatgaaactgattccaaga

SEQ ID NO: 1045811 - DNA, 33 bp, Homo sapien
cctcactgtccttccacgtttaggtcctgtatg

SEQ ID NO: 1045812 - DNA, 33 bp, Homo sapien
cctcactgtccttccatgtttaggtcctgtatg

SEQ ID NO: 1045813 - DNA, 33 bp, Homo sapien
tggggacatttttgagaataagcacccccgcag

SEQ ID NO: 1045814 - DNA, 33 bp, Homo sapien
tggggacatttttgaggataagcacccccgcag

SEQ ID NO: 1045815 - DNA, 33 bp, Homo sapien
ctgaagcaaatgaaaaaagatgttgacaatgat

SEQ ID NO: 1045816 - DNA, 33 bp, Homo sapien
ctgaagcaaatgaaaagagatgttgacaatgat

SEQ ID NO: 1045817 - DNA, 33 bp, Homo sapien
aggctttaggttggacactttgcaggccatagt

SEQ ID NO: 1045818 - DNA, 33 bp, Homo sapien
aggctttaggttggacgctttgcaggccatagt

SEQ ID NO: 1045819 - DNA, 33 bp, Homo sapien
acgcccactggctcaactgaacgcaactgcagc

SEQ ID NO: 1045820 - DNA, 33 bp, Homo sapien
acgcccactggctcaattgaacgcaactgcagc

SEQ ID NO: 1045821 - DNA, 33 bp, Homo sapien
gctgtcttgtttggtaacacctccctggacctg

SEQ ID NO: 1045822 - DNA, 33 bp, Homo sapien
gctgtcttgtttggtatcacctccctggacctg

SEQ ID NO: 1045823 - DNA, 33 bp, Homo sapien
ttaccccattttctgaggaagatactgacgcat

SEQ ID NO: 1045824 - DNA, 33 bp, Homo sapien
ttaccccattttctgatgaagatactgacgcat

SEQ ID NO: 1045825 - DNA, 33 bp, Homo sapien
tttcacggtttccctacagcagccctgtggcta

SEQ ID NO: 1045826 - DNA, 33 bp, Homo sapien
tttcacggtttccctagagcagccctgtggcta

SEQ ID NO: 1045827 - DNA, 33 bp, Homo sapien
tcagtgctgttgatgacgagttgtcttgaataa

SEQ ID NO: 1045828 - DNA, 33 bp, Homo sapien
tcagtgctgttgatgatgagttgtcttgaataa

SEQ ID NO: 1045829 - DNA, 33 bp, Homo sapien
gagtgagtactggctaaggaggttctgcataca

SEQ ID NO: 1045830 - DNA, 33 bp, Homo sapien
gagtgagtactggctagggaggttctgcataca

SEQ ID NO: 1045831 - DNA, 33 bp, Homo sapien
ggtcaagcactgtcgaaagcttttactgtcact

SEQ ID NO: 1045832 - DNA, 33 bp, Homo sapien
ggtcaagcactgtcgagagcttttactgtcact

SEQ ID NO: 1045833 - DNA, 33 bp, Homo sapien
gccacgcccctcataccggcgtcttaaatgcgc

SEQ ID NO: 1045834 - DNA, 33 bp, Homo sapien
gccacgcccctcatactggcgtcttaaatgcgc

SEQ ID NO: 1045835 - DNA, 33 bp, Homo sapien
gtggagggggaattcacaggagttgggaagaag

SEQ ID NO: 1045836 - DNA, 33 bp, Homo sapien
gtggagggggaattcagaggagttgggaagaag

SEQ ID NO: 1045837 - DNA, 33 bp, Homo sapien
gtgctattcctggcacacaatgaccatattgtt

SEQ ID NO: 1045838 - DNA, 33 bp, Homo sapien
gtgctattcctggcacgcaatgaccatattgtt

SEQ ID NO: 1045839 - DNA, 33 bp, Homo sapien
tggcacctctagagaaagggtacagaactgggg

SEQ ID NO: 1045840 - DNA, 33 bp, Homo sapien
tggcacctctagagaaggggtacagaactgggg

SEQ ID NO: 1045841 - DNA, 33 bp, Homo sapien
tggaagacctgagtgacacaaacagtaggtatc

SEQ ID NO: 1045842 - DNA, 33 bp, Homo sapien
tggaagacctgagtgagacaaacagtaggtatc

SEQ ID NO: 1045843 - DNA, 33 bp, Homo sapien
tgcagtagcaccttcacagtccgtggtcattct

SEQ ID NO: 1045844 - DNA, 33 bp, Homo sapien
tgcagtagcaccttcatagtccgtggtcattct

SEQ ID NO: 1045845 - DNA, 33 bp, Homo sapien
ggttctcatagcacacagcgtccacgtagttgt

SEQ ID NO: 1045846 - DNA, 33 bp, Homo sapien
ggttctcatagcacacggcgtccacgtagttgt

SEQ ID NO: 1045847 - DNA, 33 bp, Homo sapien
accttccattccttcccctgatagtggattggt

SEQ ID NO: 1045848 - DNA, 33 bp, Homo sapien
accttccattccttcctctgatagtggattggt

SEQ ID NO: 1045849 - DNA, 33 bp, Homo sapien
tatttgctttattgagcatagtgtattgttctc

SEQ ID NO: 1045850 - DNA, 33 bp, Homo sapien
tatttgctttattgagtatagtgtattgttctc

SEQ ID NO: 1045851 - DNA, 33 bp, Homo sapien
ttctaaccacaaaaaaagtaggtgaggtgatgg

SEQ ID NO: 1045852 - DNA, 33 bp, Homo sapien
ttctaaccacaaaaaatgtaggtgaggtgatgg

SEQ ID NO: 1045853 - DNA, 33 bp, Homo sapien
ggccaatctctgcaaaatggccagaactggtcc

SEQ ID NO: 1045854 - DNA, 33 bp, Homo sapien
ggccaatctctgcaaactggccagaactggtcc

SEQ ID NO: 1045855 - DNA, 33 bp, Homo sapien
tctaaaatctctaagagtcaagcatttatcctt

SEQ ID NO: 1045856 - DNA, 33 bp, Homo sapien
tctaaaatctctaagattcaagcatttatcctt

SEQ ID NO: 1045857 - DNA, 33 bp, Homo sapien
tgaagaggggtgtgacggagaagtgcagggaac

SEQ ID NO: 1045858 - DNA, 33 bp, Homo sapien
tgaagaggggtgtgactgagaagtgcagggaac

SEQ ID NO: 1045859 - DNA, 33 bp, Homo sapien
ttcctcatctgacaaaaggagaaaaccaaaggc

SEQ ID NO: 1045860 - DNA, 33 bp, Homo sapien
ttcctcatctgacaaacggagaaaaccaaaggc

SEQ ID NO: 1045861 - DNA, 33 bp, Homo sapien
tgatatttctctataaactggtctatcacctgt

SEQ ID NO: 1045862 - DNA, 33 bp, Homo sapien
tgatatttctctataagctggtctatcacctgt

SEQ ID NO: 1045863 - DNA, 33 bp, Homo sapien
ggttgaacatgtagacaagtttcaaatggccaa

SEQ ID NO: 1045864 - DNA, 33 bp, Homo sapien
ggttgaacatgtagacgagtttcaaatggccaa

SEQ ID NO: 1045865 - DNA, 33 bp, Homo sapien
gcaggcatctgcactccaactagacagcctggc

SEQ ID NO: 1045866 - DNA, 33 bp, Homo sapien
gcaggcatctgcactctaactagacagcctggc

SEQ ID NO: 1045867 - DNA, 33 bp, Homo sapien
aacaatgggattcaatcacagtccagtgagttg

SEQ ID NO: 1045868 - DNA, 33 bp, Homo sapien
aacaatgggattcaatgacagtccagtgagttg

SEQ ID NO: 1045869 - DNA, 33 bp, Homo sapien
aggaggccagtatgtcaaaggcagtgagagcaa

SEQ ID NO: 1045870 - DNA, 33 bp, Homo sapien
aggaggccagtatgtcgaaggcagtgagagcaa

SEQ ID NO: 1045871 - DNA, 33 bp, Homo sapien
ccagctctgaaggagaaagacagggtactaact

SEQ ID NO: 1045872 - DNA, 33 bp, Homo sapien
ccagctctgaaggagacagacagggtactaact

SEQ ID NO: 1045873 - DNA, 33 bp, Homo sapien
aacctacgtaatgaaaagtaaatgtccagcccg

SEQ ID NO: 1045874 - DNA, 33 bp, Homo sapien
aacctacgtaatgaaatgtaaatgtccagcccg

SEQ ID NO: 1045875 - DNA, 33 bp, Homo sapien
gacctctcttgagggacgtgttaggacttctca

SEQ ID NO: 1045876 - DNA, 33 bp, Homo sapien
gacctctcttgagggaggtgttaggacttctca

SEQ ID NO: 1045877 - DNA, 33 bp, Homo sapien
cccagaggcctggccaaccgccgggggagccca

SEQ ID NO: 1045878 - DNA, 33 bp, Homo sapien
cccagaggcctggccagccgccgggggagccca

SEQ ID NO: 1045879 - DNA, 33 bp, Homo sapien
cctctgtggtttctgacgtcatgggaacttcat

SEQ ID NO: 1045880 - DNA, 33 bp, Homo sapien
cctctgtggtttctgatgtcatgggaacttcat

SEQ ID NO: 1045881 - DNA, 33 bp, Homo sapien
gtctgaccctccaggaaggaagagaaagattct

SEQ ID NO: 1045882 - DNA, 33 bp, Homo sapien
gtctgaccctccaggacggaagagaaagattct

SEQ ID NO: 1045883 - DNA, 33 bp, Homo sapien
ggcttgggaggctgtcacttacctcaccctata

SEQ ID NO: 1045884 - DNA, 33 bp, Homo sapien
ggcttgggaggctgtctcttacctcaccctata

SEQ ID NO: 1045885 - DNA, 33 bp, Homo sapien
aaaacttgagatgaaaatgggctcatgaaggca

SEQ ID NO: 1045886 - DNA, 33 bp, Homo sapien
aaaacttgagatgaaactgggctcatgaaggca

SEQ ID NO: 1045887 - DNA, 33 bp, Homo sapien
gaagagcttcacaatccaccttagtaccattgc

SEQ ID NO: 1045888 - DNA, 33 bp, Homo sapien
gaagagcttcacaatctaccttagtaccattgc

SEQ ID NO: 1045889 - DNA, 33 bp, Homo sapien
aagccttgtgttgagacagacgcaggctgaatt

SEQ ID NO: 1045890 - DNA, 33 bp, Homo sapien
aagccttgtgttgagatagacgcaggctgaatt

SEQ ID NO: 1045891 - DNA, 33 bp, Homo sapien
ctttgatgactagagggatggatcgattcactc

SEQ ID NO: 1045892 - DNA, 33 bp, Homo sapien
ctttgatgactagaggtatggatcgattcactc

SEQ ID NO: 1045893 - DNA, 33 bp, Homo sapien
cccacaccatctcatcaacagaagaggcattga

SEQ ID NO: 1045894 - DNA, 33 bp, Homo sapien
cccacaccatctcatccacagaagaggcattga

SEQ ID NO: 1045895 - DNA, 33 bp, Homo sapien
gagttattccatgccccactctaacacgggtat

SEQ ID NO: 1045896 - DNA, 33 bp, Homo sapien
gagttattccatgccctactctaacacgggtat

SEQ ID NO: 1045897 - DNA, 33 bp, Homo sapien
tgagaaataaatgtaaaaatgcttggagaggcc

SEQ ID NO: 1045898 - DNA, 33 bp, Homo sapien
tgagaaataaatgtaacaatgcttggagaggcc

SEQ ID NO: 1045899 - DNA, 33 bp, Homo sapien
gtgacgaaggacaaagacctctctgctttcaga

SEQ ID NO: 1045900 - DNA, 33 bp, Homo sapien
gtgacgaaggacaaaggcctctctgctttcaga

SEQ ID NO: 1045901 - DNA, 33 bp, Homo sapien
atgttttgatagttcccactcataaccattgca

SEQ ID NO: 1045902 - DNA, 33 bp, Homo sapien
atgttttgatagttcctactcataaccattgca

SEQ ID NO: 1045903 - DNA, 33 bp, Homo sapien
acttctgttatgttgagccactgagattttgag

SEQ ID NO: 1045904 - DNA, 33 bp, Homo sapien
acttctgttatgttgatccactgagattttgag

SEQ ID NO: 1045905 - DNA, 33 bp, Homo sapien
agggtgtgggtagtaaactgcaggaaactgaca

SEQ ID NO: 1045906 - DNA, 33 bp, Homo sapien
agggtgtgggtagtaagctgcaggaaactgaca

SEQ ID NO: 1045907 - DNA, 33 bp, Homo sapien
catagtaggtgctcaacgaactcagattgaact

SEQ ID NO: 1045908 - DNA, 33 bp, Homo sapien
catagtaggtgctcaatgaactcagattgaact

SEQ ID NO: 1045909 - DNA, 33 bp, Homo sapien
cagattgaactaaactcaaggacttggtcgggg

SEQ ID NO: 1045910 - DNA, 33 bp, Homo sapien
cagattgaactaaacttaaggacttggtcgggg

SEQ ID NO: 1045911 - DNA, 33 bp, Homo sapien
atggtctgtcatttaccgggcatttcctttctc

SEQ ID NO: 1045912 - DNA, 33 bp, Homo sapien
atggtctgtcatttactgggcatttcctttctc

SEQ ID NO: 1045913 - DNA, 33 bp, Homo sapien
caatacctgggatgtacagatgaaatttgtata

SEQ ID NO: 1045914 - DNA, 33 bp, Homo sapien
caatacctgggatgtatagatgaaatttgtata

SEQ ID NO: 1045915 - DNA, 33 bp, Homo sapien
ttctggatggagtcacagtaacctcacgtctat

SEQ ID NO: 1045916 - DNA, 33 bp, Homo sapien
ttctggatggagtcacggtaacctcacgtctat

SEQ ID NO: 1045917 - DNA, 33 bp, Homo sapien
gtttgcattgagagagccattcttactgccaca

SEQ ID NO: 1045918 - DNA, 33 bp, Homo sapien
gtttgcattgagagagtcattcttactgccaca

SEQ ID NO: 1045919 - DNA, 33 bp, Homo sapien
ttttattgctgagtaacattctgcagtttgttt

SEQ ID NO: 1045920 - DNA, 33 bp, Homo sapien
ttttattgctgagtaatattctgcagtttgttt

SEQ ID NO: 1045921 - DNA, 33 bp, Homo sapien
ggttttttaggtaaaacttacatattcacaaat

SEQ ID NO: 1045922 - DNA, 33 bp, Homo sapien
ggttttttaggtaaaatttacatattcacaaat

SEQ ID NO: 1045923 - DNA, 33 bp, Homo sapien
cagccggcaggaagggaagaccaggaaggaccg

SEQ ID NO: 1045924 - DNA, 33 bp, Homo sapien
cagccggcaggaaggggagaccaggaaggaccg

SEQ ID NO: 1045925 - DNA, 33 bp, Homo sapien
gccctgaaaagtgccaatgctgagcccagacag

SEQ ID NO: 1045926 - DNA, 33 bp, Homo sapien
gccctgaaaagtgccagtgctgagcccagacag

SEQ ID NO: 1045927 - DNA, 33 bp, Homo sapien
ggtgggagctttaagacgtgattggagcatgag

SEQ ID NO: 1045928 - DNA, 33 bp, Homo sapien
ggtgggagctttaagatgtgattggagcatgag

SEQ ID NO: 1045929 - DNA, 33 bp, Homo sapien
taccacacacaaaagacgttttcaagcctctct

SEQ ID NO: 1045930 - DNA, 33 bp, Homo sapien
taccacacacaaaagatgttttcaagcctctct

SEQ ID NO: 1045931 - DNA, 33 bp, Homo sapien
gcttatctgggaatcacgcaaaagttggccaga

SEQ ID NO: 1045932 - DNA, 33 bp, Homo sapien
gcttatctgggaatcaggcaaaagttggccaga

SEQ ID NO: 1045933 - DNA, 33 bp, Homo sapien
gcattcacacatttccacaatcaatcaggctgg

SEQ ID NO: 1045934 - DNA, 33 bp, Homo sapien
gcattcacacatttccgcaatcaatcaggctgg

SEQ ID NO: 1045935 - DNA, 33 bp, Homo sapien
ttctccacacgggttcactcaggttaccaattt

SEQ ID NO: 1045936 - DNA, 33 bp, Homo sapien
ttctccacacgggttcgctcaggttaccaattt

SEQ ID NO: 1045937 - DNA, 33 bp, Homo sapien
ctatttcaatccaacaacataccgaagagggag

SEQ ID NO: 1045938 - DNA, 33 bp, Homo sapien
ctatttcaatccaacagcataccgaagagggag

SEQ ID NO: 1045939 - DNA, 33 bp, Homo sapien
gactttttctaagcgcagagagggccccagctt

SEQ ID NO: 1045940 - DNA, 33 bp, Homo sapien
gactttttctaagcgcggagagggccccagctt

SEQ ID NO: 1045941 - DNA, 33 bp, Homo sapien
ggcacctggaacccacacaaccttgctctgggg

SEQ ID NO: 1045942 - DNA, 33 bp, Homo sapien
ggcacctggaacccacgcaaccttgctctgggg

SEQ ID NO: 1045943 - DNA, 33 bp, Homo sapien
tcacacagccagtcagcataagactcaactagg

SEQ ID NO: 1045944 - DNA, 33 bp, Homo sapien
tcacacagccagtcaggataagactcaactagg

SEQ ID NO: 1045945 - DNA, 33 bp, Homo sapien
acacatgccacttctaagtagaaacattgaatt

SEQ ID NO: 1045946 - DNA, 33 bp, Homo sapien
acacatgccacttctaggtagaaacattgaatt

SEQ ID NO: 1045947 - DNA, 33 bp, Homo sapien
ctcaccagcaatatacaagagttcaagttgctc

SEQ ID NO: 1045948 - DNA, 33 bp, Homo sapien
ctcaccagcaatatacgagagttcaagttgctc

SEQ ID NO: 1045949 - DNA, 33 bp, Homo sapien
cctagatatgacaatgaagcctaatccataaag

SEQ ID NO: 1045950 - DNA, 33 bp, Homo sapien
cctagatatgacaatggagcctaatccataaag

SEQ ID NO: 1045951 - DNA, 33 bp, Homo sapien
tcagattagaggagggacaaaaattaataataa

SEQ ID NO: 1045952 - DNA, 33 bp, Homo sapien
tcagattagaggagggtcaaaaattaataataa

SEQ ID NO: 1045953 - DNA, 33 bp, Homo sapien
atcatggtaaagctgacaagctgcctgcagaga

SEQ ID NO: 1045954 - DNA, 33 bp, Homo sapien
atcatggtaaagctgataagctgcctgcagaga

SEQ ID NO: 1045955 - DNA, 33 bp, Homo sapien
ggccctgcggaggagacgcggtaccgtgagacg

SEQ ID NO: 1045956 - DNA, 33 bp, Homo sapien
ggccctgcggaggagatgcggtaccgtgagacg

SEQ ID NO: 1045957 - DNA, 33 bp, Homo sapien
gtccgtgtgctccctcacgtctcacggtaccgc

SEQ ID NO: 1045958 - DNA, 33 bp, Homo sapien
gtccgtgtgctccctcgcgtctcacggtaccgc

SEQ ID NO: 1045959 - DNA, 33 bp, Homo sapien
ggcactcttctatacaacaggagacattgaaca

SEQ ID NO: 1045960 - DNA, 33 bp, Homo sapien
ggcactcttctatacaccaggagacattgaaca

SEQ ID NO: 1045961 - DNA, 33 bp, Homo sapien
aacccattgtgtaatccgaggcaagtccctgag

SEQ ID NO: 1045962 - DNA, 33 bp, Homo sapien
aacccattgtgtaatctgaggcaagtccctgag

SEQ ID NO: 1045963 - DNA, 33 bp, Homo sapien
aacaaccaagtgaggtaaagaccacgatgatcc

SEQ ID NO: 1045964 - DNA, 33 bp, Homo sapien
aacaaccaagtgaggtgaagaccacgatgatcc

SEQ ID NO: 1045965 - DNA, 33 bp, Homo sapien
ggttcccagggcactcaaaaactgacaaccgac

SEQ ID NO: 1045966 - DNA, 33 bp, Homo sapien
ggttcccagggcactcgaaaactgacaaccgac

SEQ ID NO: 1045967 - DNA, 33 bp, Homo sapien
tgtgtggtggtcaccaaatgtgctttttggggg

SEQ ID NO: 1045968 - DNA, 33 bp, Homo sapien
tgtgtggtggtcaccagatgtgctttttggggg

SEQ ID NO: 1045969 - DNA, 33 bp, Homo sapien
tacaagagttcccaaagatccaggtatccttgg

SEQ ID NO: 1045970 - DNA, 33 bp, Homo sapien
tacaagagttcccaaatatccaggtatccttgg

SEQ ID NO: 1045971 - DNA, 33 bp, Homo sapien
ggacctcatgctaagacgcgcaacaaaattagg

SEQ ID NO: 1045972 - DNA, 33 bp, Homo sapien
ggacctcatgctaagatgcgcaacaaaattagg

SEQ ID NO: 1045973 - DNA, 33 bp, Homo sapien
atgcaaggattgaaaactcgagggaggcctaga

SEQ ID NO: 1045974 - DNA, 33 bp, Homo sapien
atgcaaggattgaaaattcgagggaggcctaga

SEQ ID NO: 1045975 - DNA, 33 bp, Homo sapien
ctctagcggaacttccagatcaccttcaccgta

SEQ ID NO: 1045976 - DNA, 33 bp, Homo sapien
ctctagcggaacttccggatcaccttcaccgta

SEQ ID NO: 1045977 - DNA, 33 bp, Homo sapien
tgacttactaacctgaacttgtgttaactctct

SEQ ID NO: 1045978 - DNA, 33 bp, Homo sapien
tgacttactaacctgagcttgtgttaactctct

SEQ ID NO: 1045979 - DNA, 33 bp, Homo sapien
tctaacatatatttaactggcatttcagaggag

SEQ ID NO: 1045980 - DNA, 33 bp, Homo sapien
tctaacatatatttaattggcatttcagaggag

SEQ ID NO: 1045981 - DNA, 33 bp, Homo sapien
cagtaaagctcctttcaccttgctgcccctcca

SEQ ID NO: 1045982 - DNA, 33 bp, Homo sapien
cagtaaagctcctttcgccttgctgcccctcca

SEQ ID NO: 1045983 - DNA, 33 bp, Homo sapien
gtgtgggggggagatacggcaactattttttaa

SEQ ID NO: 1045984 - DNA, 33 bp, Homo sapien
gtgtgggggggagatatggcaactattttttaa

SEQ ID NO: 1045985 - DNA, 33 bp, Homo sapien
ttcatatgtcccttgccccaaccatgcatagcc

SEQ ID NO: 1045986 - DNA, 33 bp, Homo sapien
ttcatatgtcccttgctccaaccatgcatagcc

SEQ ID NO: 1045987 - DNA, 33 bp, Homo sapien
acttgttctgtcccaaccagttccgcatgggca

SEQ ID NO: 1045988 - DNA, 33 bp, Homo sapien
acttgttctgtcccaatcagttccgcatgggca

SEQ ID NO: 1045989 - DNA, 33 bp, Homo sapien
atgcttgcttgtgttcaaaatgctatgggatcc

SEQ ID NO: 1045990 - DNA, 33 bp, Homo sapien
atgcttgcttgtgttccaaatgctatgggatcc

SEQ ID NO: 1045991 - DNA, 33 bp, Homo sapien
cctaacacattactagcccttcacttttacttc

SEQ ID NO: 1045992 - DNA, 33 bp, Homo sapien
cctaacacattactagtccttcacttttacttc

SEQ ID NO: 1045993 - DNA, 33 bp, Homo sapien
tgtttgtgaagttcataaatgttgttctgtgta

SEQ ID NO: 1045994 - DNA, 33 bp, Homo sapien
tgtttgtgaagttcatcaatgttgttctgtgta

SEQ ID NO: 1045995 - DNA, 33 bp, Homo sapien
ggctgcagctaggaacgctagacaaggacctca

SEQ ID NO: 1045996 - DNA, 33 bp, Homo sapien
ggctgcagctaggaactctagacaaggacctca

SEQ ID NO: 1045997 - DNA, 33 bp, Homo sapien
gccactctgggctctacctactccaggctggag

SEQ ID NO: 1045998 - DNA, 33 bp, Homo sapien
gccactctgggctctatctactccaggctggag

SEQ ID NO: 1045999 - DNA, 33 bp, Homo sapien
ttgccttttcacccaactgaaatcagagcacgc

SEQ ID NO: 1046000 - DNA, 33 bp, Homo sapien
ttgccttttcacccaattgaaatcagagcacgc

SEQ ID NO: 1046001 - DNA, 33 bp, Homo sapien
agctggttacggctctaaagttctgttttatgc

SEQ ID NO: 1046002 - DNA, 33 bp, Homo sapien
agctggttacggctctgaagttctgttttatgc

SEQ ID NO: 1046003 - DNA, 33 bp, Homo sapien
ttctatccaggatccaaaagtttctcctgatgg

SEQ ID NO: 1046004 - DNA, 33 bp, Homo sapien
ttctatccaggatccagaagtttctcctgatgg

SEQ ID NO: 1046005 - DNA, 33 bp, Homo sapien
tgattccaaaatgtcgcagctaacgcaggttct

SEQ ID NO: 1046006 - DNA, 33 bp, Homo sapien
tgattccaaaatgtcggagctaacgcaggttct

SEQ ID NO: 1046007 - DNA, 33 bp, Homo sapien
ggagattcctggtttacggacttgttttaagat

SEQ ID NO: 1046008 - DNA, 33 bp, Homo sapien
ggagattcctggtttatggacttgttttaagat

SEQ ID NO: 1046009 - DNA, 33 bp, Homo sapien
tgcctatttagaagagacagggacgccagggac

SEQ ID NO: 1046010 - DNA, 33 bp, Homo sapien
tgcctatttagaagaggcagggacgccagggac

SEQ ID NO: 1046011 - DNA, 33 bp, Homo sapien
ccaaaaccagcaatctcacggccccctttcagc

SEQ ID NO: 1046012 - DNA, 33 bp, Homo sapien
ccaaaaccagcaatcttacggccccctttcagc

SEQ ID NO: 1046013 - DNA, 33 bp, Homo sapien
caagtgtcaccagaagacagtgggttgctcctc

SEQ ID NO: 1046014 - DNA, 33 bp, Homo sapien
caagtgtcaccagaagccagtgggttgctcctc

SEQ ID NO: 1046015 - DNA, 33 bp, Homo sapien
ctaatccttcctatgcccataattgttggatgt

SEQ ID NO: 1046016 - DNA, 33 bp, Homo sapien
ctaatccttcctatgctcataattgttggatgt

SEQ ID NO: 1046017 - DNA, 33 bp, Homo sapien
agcagggactgagtgagattcaaagaaagttcc

SEQ ID NO: 1046018 - DNA, 33 bp, Homo sapien
agcagggactgagtgatattcaaagaaagttcc

SEQ ID NO: 1046019 - DNA, 33 bp, Homo sapien
cgcatgaacgcatggaaacgcatggcacctggc

SEQ ID NO: 1046020 - DNA, 33 bp, Homo sapien
cgcatgaacgcatggacacgcatggcacctggc

SEQ ID NO: 1046021 - DNA, 33 bp, Homo sapien
tctgagcctcatgtggaactggggatcatcaca

SEQ ID NO: 1046022 - DNA, 33 bp, Homo sapien
tctgagcctcatgtgggactggggatcatcaca

SEQ ID NO: 1046023 - DNA, 33 bp, Homo sapien
cctcttgcggtatccgcacaaggaggaaggggc

SEQ ID NO: 1046024 - DNA, 33 bp, Homo sapien
cctcttgcggtatccgtacaaggaggaaggggc

SEQ ID NO: 1046025 - DNA, 33 bp, Homo sapien
caaggaggccagttcaagcacatcctctgcagg

SEQ ID NO: 1046026 - DNA, 33 bp, Homo sapien
caaggaggccagttcaggcacatcctctgcagg

SEQ ID NO: 1046027 - DNA, 33 bp, Homo sapien
gagcctcgagactcccaaaagttctagccagga

SEQ ID NO: 1046028 - DNA, 33 bp, Homo sapien
gagcctcgagactcccgaaagttctagccagga

SEQ ID NO: 1046029 - DNA, 33 bp, Homo sapien
tactctaggtagatacccctgatggatcagggt

SEQ ID NO: 1046030 - DNA, 33 bp, Homo sapien
tactctaggtagatactcctgatggatcagggt

SEQ ID NO: 1046031 - DNA, 33 bp, Homo sapien
tctgtcaatgcttctcaccagggatggagggac

SEQ ID NO: 1046032 - DNA, 33 bp, Homo sapien
tctgtcaatgcttctcgccagggatggagggac

SEQ ID NO: 1046033 - DNA, 33 bp, Homo sapien
tctaccgtagctttcaacacatttagagcaaac

SEQ ID NO: 1046034 - DNA, 33 bp, Homo sapien
tctaccgtagctttcagcacatttagagcaaac

SEQ ID NO: 1046035 - DNA, 33 bp, Homo sapien
cagtcctcagtttacacagagaaaaaccagcac

SEQ ID NO: 1046036 - DNA, 33 bp, Homo sapien
cagtcctcagtttacatagagaaaaaccagcac

SEQ ID NO: 1046037 - DNA, 33 bp, Homo sapien
catcctcctcacgtaactctctacggaaaagcc

SEQ ID NO: 1046038 - DNA, 33 bp, Homo sapien
catcctcctcacgtaagtctctacggaaaagcc

SEQ ID NO: 1046039 - DNA, 33 bp, Homo sapien
aaggtgttcagacccaaggtactgcatctcttc

SEQ ID NO: 1046040 - DNA, 33 bp, Homo sapien
aaggtgttcagacccagggtactgcatctcttc

SEQ ID NO: 1046041 - DNA, 33 bp, Homo sapien
ccaagagatagccaacaatcctgcagtgttaca

SEQ ID NO: 1046042 - DNA, 33 bp, Homo sapien
ccaagagatagccaacgatcctgcagtgttaca

SEQ ID NO: 1046043 - DNA, 33 bp, Homo sapien
ctaagtccacaatctaaaagttaccccactgtg

SEQ ID NO: 1046044 - DNA, 33 bp, Homo sapien
ctaagtccacaatctagaagttaccccactgtg

SEQ ID NO: 1046045 - DNA, 33 bp, Homo sapien
tgtggacttagcctcaaggttaccagacaggag

SEQ ID NO: 1046046 - DNA, 33 bp, Homo sapien
tgtggacttagcctcagggttaccagacaggag

SEQ ID NO: 1046047 - DNA, 33 bp, Homo sapien
gggaaaactgaggccaaaaaaaggtgaaagctc

SEQ ID NO: 1046048 - DNA, 33 bp, Homo sapien
gggaaaactgaggccagaaaaaggtgaaagctc

SEQ ID NO: 1046049 - DNA, 33 bp, Homo sapien
acctctgtttccaggacctggtgcgattctgtg

SEQ ID NO: 1046050 - DNA, 33 bp, Homo sapien
acctctgtttccaggatctggtgcgattctgtg

SEQ ID NO: 1046051 - DNA, 33 bp, Homo sapien
gcataatctcagcacaaagcgcccccagcgatc

SEQ ID NO: 1046052 - DNA, 33 bp, Homo sapien
gcataatctcagcacagagcgcccccagcgatc

SEQ ID NO: 1046053 - DNA, 33 bp, Homo sapien
atctcattaaatcctcccaaacattctagaagg

SEQ ID NO: 1046054 - DNA, 33 bp, Homo sapien
atctcattaaatcctcgcaaacattctagaagg

SEQ ID NO: 1046055 - DNA, 33 bp, Homo sapien
taagtctttgggtgcacaatacctaaggccctg

SEQ ID NO: 1046056 - DNA, 33 bp, Homo sapien
taagtctttgggtgcataatacctaaggccctg

SEQ ID NO: 1046057 - DNA, 33 bp, Homo sapien
catgttgaatgcagcccactttttttctttttt

SEQ ID NO: 1046058 - DNA, 33 bp, Homo sapien
catgttgaatgcagccgactttttttctttttt

SEQ ID NO: 1046059 - DNA, 33 bp, Homo sapien
attcagagagcattaacgggaaagttctaaaca

SEQ ID NO: 1046060 - DNA, 33 bp, Homo sapien
attcagagagcattaatgggaaagttctaaaca

SEQ ID NO: 1046061 - DNA, 33 bp, Homo sapien
gggtggccaattaagccgcaggagtctgaacgg

SEQ ID NO: 1046062 - DNA, 33 bp, Homo sapien
gggtggccaattaagctgcaggagtctgaacgg

SEQ ID NO: 1046063 - DNA, 33 bp, Homo sapien
ccctgagtcctcgagacgacaagaatgacaggt

SEQ ID NO: 1046064 - DNA, 33 bp, Homo sapien
ccctgagtcctcgagatgacaagaatgacaggt

SEQ ID NO: 1046065 - DNA, 33 bp, Homo sapien
agccaactaaatggtacgtgtgaaataatttaa

SEQ ID NO: 1046066 - DNA, 33 bp, Homo sapien
agccaactaaatggtatgtgtgaaataatttaa

SEQ ID NO: 1046067 - DNA, 33 bp, Homo sapien
gcgtcttcgtacatcaatctctgtgcacagcgg

SEQ ID NO: 1046068 - DNA, 33 bp, Homo sapien
gcgtcttcgtacatcagtctctgtgcacagcgg

SEQ ID NO: 1046069 - DNA, 33 bp, Homo sapien
ggttgatcgcatcttccgaactgaccagaggca

SEQ ID NO: 1046070 - DNA, 33 bp, Homo sapien
ggttgatcgcatcttctgaactgaccagaggca

SEQ ID NO: 1046071 - DNA, 33 bp, Homo sapien
aaatataaatataaaaacgcacgctgctgtggc

SEQ ID NO: 1046072 - DNA, 33 bp, Homo sapien
aaatataaatataaaagcgcacgctgctgtggc

SEQ ID NO: 1046073 - DNA, 33 bp, Homo sapien
gggcagtaccccaggacctatccagagccagcc

SEQ ID NO: 1046074 - DNA, 33 bp, Homo sapien
gggcagtaccccaggatctatccagagccagcc

SEQ ID NO: 1046075 - DNA, 33 bp, Homo sapien
tgggtacccacagctcaattgccagaggacgga

SEQ ID NO: 1046076 - DNA, 33 bp, Homo sapien
tgggtacccacagctcgattgccagaggacgga

SEQ ID NO: 1046077 - DNA, 33 bp, Homo sapien
taaccaattcccctgcaatgggcatttgggctc

SEQ ID NO: 1046078 - DNA, 33 bp, Homo sapien
taaccaattcccctgcgatgggcatttgggctc

SEQ ID NO: 1046079 - DNA, 33 bp, Homo sapien
gctcaccatgaaaaggcccccctgtctctgctt

SEQ ID NO: 1046080 - DNA, 33 bp, Homo sapien
gctcaccatgaaaaggtccccctgtctctgctt

SEQ ID NO: 1046081 - DNA, 33 bp, Homo sapien
tctcagcaaagccaaacatgttggcgaaaataa

SEQ ID NO: 1046082 - DNA, 33 bp, Homo sapien
tctcagcaaagccaaatatgttggcgaaaataa

SEQ ID NO: 1046083 - DNA, 33 bp, Homo sapien
aggtgcataattggaacagacatatgagcagct

SEQ ID NO: 1046084 - DNA, 33 bp, Homo sapien
aggtgcataattggaagagacatatgagcagct

SEQ ID NO: 1046085 - DNA, 33 bp, Homo sapien
ctcaaaatcagcccgcaacttgggcacctccct

SEQ ID NO: 1046086 - DNA, 33 bp, Homo sapien
ctcaaaatcagcccgcgacttgggcacctccct

SEQ ID NO: 1046087 - DNA, 33 bp, Homo sapien
tcatccattctactcacgttggaaatgcatccc

SEQ ID NO: 1046088 - DNA, 33 bp, Homo sapien
tcatccattctactcatgttggaaatgcatccc

SEQ ID NO: 1046089 - DNA, 33 bp, Homo sapien
aggacacctctctttaaaatcctcaagtctgac

SEQ ID NO: 1046090 - DNA, 33 bp, Homo sapien
aggacacctctctttacaatcctcaagtctgac

SEQ ID NO: 1046091 - DNA, 33 bp, Homo sapien
tttatgatggcctcgacgagtaagctggtagtt

SEQ ID NO: 1046092 - DNA, 33 bp, Homo sapien
tttatgatggcctcgaggagtaagctggtagtt

SEQ ID NO: 1046093 - DNA, 33 bp, Homo sapien
ttgcccaacaaactgacgtgagacagggaagac

SEQ ID NO: 1046094 - DNA, 33 bp, Homo sapien
ttgcccaacaaactgatgtgagacagggaagac

SEQ ID NO: 1046095 - DNA, 33 bp, Homo sapien
tggataaattgcaccccgggatcattgacgcaa

SEQ ID NO: 1046096 - DNA, 33 bp, Homo sapien
tggataaattgcaccctgggatcattgacgcaa

SEQ ID NO: 1046097 - DNA, 33 bp, Homo sapien
agcagaaaggatcacacatgtggctttggattt

SEQ ID NO: 1046098 - DNA, 33 bp, Homo sapien
agcagaaaggatcacagatgtggctttggattt

SEQ ID NO: 1046099 - DNA, 33 bp, Homo sapien
ttatgaaaccaaacacagcatttaagatgattt

SEQ ID NO: 1046100 - DNA, 33 bp, Homo sapien
ttatgaaaccaaacacggcatttaagatgattt

SEQ ID NO: 1046101 - DNA, 33 bp, Homo sapien
gaaacaaatagagcaaaacaagggaatcacctc

SEQ ID NO: 1046102 - DNA, 33 bp, Homo sapien
gaaacaaatagagcaagacaagggaatcacctc

SEQ ID NO: 1046103 - DNA, 33 bp, Homo sapien
gagcgggcccttaggaactgacccacttgaggt

SEQ ID NO: 1046104 - DNA, 33 bp, Homo sapien
gagcgggcccttaggatctgacccacttgaggt

SEQ ID NO: 1046105 - DNA, 33 bp, Homo sapien
caagtgctggcagaccacttatcccacgtcttg

SEQ ID NO: 1046106 - DNA, 33 bp, Homo sapien
caagtgctggcagaccgcttatcccacgtcttg

SEQ ID NO: 1046107 - DNA, 33 bp, Homo sapien
ggctttcttggtgagaagtttgtgaccttgctg

SEQ ID NO: 1046108 - DNA, 33 bp, Homo sapien
ggctttcttggtgagaggtttgtgaccttgctg

SEQ ID NO: 1046109 - DNA, 33 bp, Homo sapien
ctgtgctgtgtgctacccttgctctttctcctc

SEQ ID NO: 1046110 - DNA, 33 bp, Homo sapien
ctgtgctgtgtgctactcttgctctttctcctc

SEQ ID NO: 1046111 - DNA, 33 bp, Homo sapien
acggagcaggctttgacgcccagaccgccagaa

SEQ ID NO: 1046112 - DNA, 33 bp, Homo sapien
acggagcaggctttgatgcccagaccgccagaa

SEQ ID NO: 1046113 - DNA, 33 bp, Homo sapien
atccctctttcatggcacccttgtctaatgggg

SEQ ID NO: 1046114 - DNA, 33 bp, Homo sapien
atccctctttcatggcgcccttgtctaatgggg

SEQ ID NO: 1046115 - DNA, 33 bp, Homo sapien
attttattttccaagaataggttatagacacta

SEQ ID NO: 1046116 - DNA, 33 bp, Homo sapien
attttattttccaagattaggttatagacacta

SEQ ID NO: 1046117 - DNA, 33 bp, Homo sapien
tttctctcctctcaacccacacagggaacctgt

SEQ ID NO: 1046118 - DNA, 33 bp, Homo sapien
tttctctcctctcaactcacacagggaacctgt

SEQ ID NO: 1046119 - DNA, 33 bp, Homo sapien
aaaatgcaagtcaacagctggacacagtggctc

SEQ ID NO: 1046120 - DNA, 33 bp, Homo sapien
aaaatgcaagtcaacatctggacacagtggctc

SEQ ID NO: 1046121 - DNA, 33 bp, Homo sapien
caggcctgactttgacaccaaaaccagagtgga

SEQ ID NO: 1046122 - DNA, 33 bp, Homo sapien
caggcctgactttgacgccaaaaccagagtgga

SEQ ID NO: 1046123 - DNA, 33 bp, Homo sapien
cttagtcctcatagaactctcacaaagtgggca

SEQ ID NO: 1046124 - DNA, 33 bp, Homo sapien
cttagtcctcatagaagtctcacaaagtgggca

SEQ ID NO: 1046125 - DNA, 33 bp, Homo sapien
actgttgtcacccacacgttacaggtaaagagc

SEQ ID NO: 1046126 - DNA, 33 bp, Homo sapien
actgttgtcacccacatgttacaggtaaagagc

SEQ ID NO: 1046127 - DNA, 33 bp, Homo sapien
gggctgatttgggctcagaacccaagtccttct

SEQ ID NO: 1046128 - DNA, 33 bp, Homo sapien
gggctgatttgggctcggaacccaagtccttct

SEQ ID NO: 1046129 - DNA, 33 bp, Homo sapien
cgctggaccagggccacgtgctatcccaacccc

SEQ ID NO: 1046130 - DNA, 33 bp, Homo sapien
cgctggaccagggccatgtgctatcccaacccc

SEQ ID NO: 1046131 - DNA, 33 bp, Homo sapien
aaaaataaaaataagtaaacactcaagagctgc

SEQ ID NO: 1046132 - DNA, 33 bp, Homo sapien
aaaaataaaaataagtgaacactcaagagctgc

SEQ ID NO: 1046133 - DNA, 33 bp, Homo sapien
tgttgtgtttcagagaccatcgccagatccaat

SEQ ID NO: 1046134 - DNA, 33 bp, Homo sapien
tgttgtgtttcagagatcatcgccagatccaat

SEQ ID NO: 1046135 - DNA, 33 bp, Homo sapien
gccagcatcagtgtcccgcatcagggccagggg

SEQ ID NO: 1046136 - DNA, 33 bp, Homo sapien
gccagcatcagtgtccggcatcagggccagggg

SEQ ID NO: 1046137 - DNA, 33 bp, Homo sapien
gggggcacatttttccaactgtgacttggtgcc

SEQ ID NO: 1046138 - DNA, 33 bp, Homo sapien
gggggcacatttttccgactgtgacttggtgcc

SEQ ID NO: 1046139 - DNA, 33 bp, Homo sapien
gaggctttgtggcttcccaaaggtagtgccgac

SEQ ID NO: 1046140 - DNA, 33 bp, Homo sapien
gaggctttgtggcttctcaaaggtagtgccgac

SEQ ID NO: 1046141 - DNA, 33 bp, Homo sapien
gtgttatccttgcatacgctgaaatgtttctgt

SEQ ID NO: 1046142 - DNA, 33 bp, Homo sapien
gtgttatccttgcatatgctgaaatgtttctgt

SEQ ID NO: 1046143 - DNA, 33 bp, Homo sapien
aacccaaacatgccccaaacttctctagggatg

SEQ ID NO: 1046144 - DNA, 33 bp, Homo sapien
aacccaaacatgccccgaacttctctagggatg

SEQ ID NO: 1046145 - DNA, 33 bp, Homo sapien
gtctcctcctgttacaatggaagctcttggagg

SEQ ID NO: 1046146 - DNA, 33 bp, Homo sapien
gtctcctcctgttacagtggaagctcttggagg

SEQ ID NO: 1046147 - DNA, 33 bp, Homo sapien
aagtgtaatgttgtccacccttatgatgtcctt

SEQ ID NO: 1046148 - DNA, 33 bp, Homo sapien
aagtgtaatgttgtccgcccttatgatgtcctt

SEQ ID NO: 1046149 - DNA, 33 bp, Homo sapien
ggctttaaggacatcccacaaactatatataga

SEQ ID NO: 1046150 - DNA, 33 bp, Homo sapien
ggctttaaggacatccgacaaactatatataga

SEQ ID NO: 1046151 - DNA, 33 bp, Homo sapien
ctatctacaaaagacacatctaacttataagct

SEQ ID NO: 1046152 - DNA, 33 bp, Homo sapien
ctatctacaaaagacagatctaacttataagct

SEQ ID NO: 1046153 - DNA, 33 bp, Homo sapien
cccggctaattttccacagtctctaactcttga

SEQ ID NO: 1046154 - DNA, 33 bp, Homo sapien
cccggctaattttccagagtctctaactcttga

SEQ ID NO: 1046155 - DNA, 33 bp, Homo sapien
ttgaggccacctgtggaaatggaagactgtgga

SEQ ID NO: 1046156 - DNA, 33 bp, Homo sapien
ttgaggccacctgtgggaatggaagactgtgga

SEQ ID NO: 1046157 - DNA, 33 bp, Homo sapien
gatccaacagacaccccccaagatttaatattt

SEQ ID NO: 1046158 - DNA, 33 bp, Homo sapien
gatccaacagacaccctccaagatttaatattt

SEQ ID NO: 1046159 - DNA, 33 bp, Homo sapien
ttgacttctatagttaagttggcatttttataa

SEQ ID NO: 1046160 - DNA, 33 bp, Homo sapien
ttgacttctatagttaggttggcatttttataa

SEQ ID NO: 1046161 - DNA, 33 bp, Homo sapien
ttaatgctgtctttgccaaagggatgattgtgg

SEQ ID NO: 1046162 - DNA, 33 bp, Homo sapien
ttaatgctgtctttgctaaagggatgattgtgg

SEQ ID NO: 1046163 - DNA, 33 bp, Homo sapien
tgaaaggtatctattacagtcctactggtgttt

SEQ ID NO: 1046164 - DNA, 33 bp, Homo sapien
tgaaaggtatctattatagtcctactggtgttt

SEQ ID NO: 1046165 - DNA, 33 bp, Homo sapien
aggccatttactatcactgaaaattaaaatacc

SEQ ID NO: 1046166 - DNA, 33 bp, Homo sapien
aggccatttactatcattgaaaattaaaatacc

SEQ ID NO: 1046167 - DNA, 33 bp, Homo sapien
gccaatgtgtctggcccaagaatactcttctct

SEQ ID NO: 1046168 - DNA, 33 bp, Homo sapien
gccaatgtgtctggccgaagaatactcttctct

SEQ ID NO: 1046169 - DNA, 33 bp, Homo sapien
tggggacaattatgagaagacaaatatgaacct

SEQ ID NO: 1046170 - DNA, 33 bp, Homo sapien
tggggacaattatgaggagacaaatatgaacct

SEQ ID NO: 1046171 - DNA, 33 bp, Homo sapien
agataaatcccttaagacaaaatcatgactaag

SEQ ID NO: 1046172 - DNA, 33 bp, Homo sapien
agataaatcccttaaggcaaaatcatgactaag

SEQ ID NO: 1046173 - DNA, 33 bp, Homo sapien
ggtgagtggaggaaaacctaggtcgtggaaatg

SEQ ID NO: 1046174 - DNA, 33 bp, Homo sapien
ggtgagtggaggaaaatctaggtcgtggaaatg

SEQ ID NO: 1046175 - DNA, 33 bp, Homo sapien
cccctcaacacattacagaagggagtgtgaatt

SEQ ID NO: 1046176 - DNA, 33 bp, Homo sapien
cccctcaacacattacggaagggagtgtgaatt

SEQ ID NO: 1046177 - DNA, 33 bp, Homo sapien
aagcagaacctgaaagccactctggaatcctcc

SEQ ID NO: 1046178 - DNA, 33 bp, Homo sapien
aagcagaacctgaaagtcactctggaatcctcc

SEQ ID NO: 1046179 - DNA, 33 bp, Homo sapien
tggcctgtccagaagaaagctggaaacacagaa

SEQ ID NO: 1046180 - DNA, 33 bp, Homo sapien
tggcctgtccagaagagagctggaaacacagaa

SEQ ID NO: 1046181 - DNA, 33 bp, Homo sapien
gacccttgactttataaataacataatctagtg

SEQ ID NO: 1046182 - DNA, 33 bp, Homo sapien
gacccttgactttatagataacataatctagtg

SEQ ID NO: 1046183 - DNA, 33 bp, Homo sapien
gtgtaaacgagactgaagatcaccttaaactac

SEQ ID NO: 1046184 - DNA, 33 bp, Homo sapien
gtgtaaacgagactgacgatcaccttaaactac

SEQ ID NO: 1046185 - DNA, 33 bp, Homo sapien
cttaagttgtgaggcactcggtacatagattga

SEQ ID NO: 1046186 - DNA, 33 bp, Homo sapien
cttaagttgtgaggcattcggtacatagattga

SEQ ID NO: 1046187 - DNA, 33 bp, Homo sapien
ttttttatgtgtaagaatctgtaatttttgttt

SEQ ID NO: 1046188 - DNA, 33 bp, Homo sapien
ttttttatgtgtaagagtctgtaatttttgttt

SEQ ID NO: 1046189 - DNA, 33 bp, Homo sapien
aggaagtagagttggaagtttatctgcaagagg

SEQ ID NO: 1046190 - DNA, 33 bp, Homo sapien
aggaagtagagttggaggtttatctgcaagagg

SEQ ID NO: 1046191 - DNA, 33 bp, Homo sapien
ataacctaaaacttaacattgacacctacttgg

SEQ ID NO: 1046192 - DNA, 33 bp, Homo sapien
ataacctaaaacttaagattgacacctacttgg

SEQ ID NO: 1046193 - DNA, 33 bp, Homo sapien
gtatctccattgcttgcatctggtattgttatc

SEQ ID NO: 1046194 - DNA, 33 bp, Homo sapien
gtatctccattgcttgtatctggtattgttatc

SEQ ID NO: 1046195 - DNA, 33 bp, Homo sapien
cattgatgatgatttacggtgatgttgtaattt

SEQ ID NO: 1046196 - DNA, 33 bp, Homo sapien
cattgatgatgatttatggtgatgttgtaattt

SEQ ID NO: 1046197 - DNA, 33 bp, Homo sapien
atttgatgtcaacacacgttcctcattattgaa

SEQ ID NO: 1046198 - DNA, 33 bp, Homo sapien
atttgatgtcaacacatgttcctcattattgaa

SEQ ID NO: 1046199 - DNA, 33 bp, Homo sapien
ggtggctcgacagccgaaagaccggcacagtcc

SEQ ID NO: 1046200 - DNA, 33 bp, Homo sapien
ggtggctcgacagccggaagaccggcacagtcc

SEQ ID NO: 1046201 - DNA, 33 bp, Homo sapien
agtggagaagccaatacgcaaacccaagtccac

SEQ ID NO: 1046202 - DNA, 33 bp, Homo sapien
agtggagaagccaataggcaaacccaagtccac

SEQ ID NO: 1046203 - DNA, 33 bp, Homo sapien
catttgctgtttctcccgcaagcagatgttgtg

SEQ ID NO: 1046204 - DNA, 33 bp, Homo sapien
catttgctgtttctcctgcaagcagatgttgtg

SEQ ID NO: 1046205 - DNA, 33 bp, Homo sapien
actgggttcgttgtcacgcggtgtttgaatggt

SEQ ID NO: 1046206 - DNA, 33 bp, Homo sapien
actgggttcgttgtcatgcggtgtttgaatggt

SEQ ID NO: 1046207 - DNA, 33 bp, Homo sapien
ggccttgtaagactcacgtaagctaagtccagg

SEQ ID NO: 1046208 - DNA, 33 bp, Homo sapien
ggccttgtaagactcatgtaagctaagtccagg

SEQ ID NO: 1046209 - DNA, 33 bp, Homo sapien
ccttccctcagacacacgaaaaccgtgagtgag

SEQ ID NO: 1046210 - DNA, 33 bp, Homo sapien
ccttccctcagacacatgaaaaccgtgagtgag

SEQ ID NO: 1046211 - DNA, 33 bp, Homo sapien
ctctctccaagccatcaaagcaatttctgcagc

SEQ ID NO: 1046212 - DNA, 33 bp, Homo sapien
ctctctccaagccatcgaagcaatttctgcagc

SEQ ID NO: 1046213 - DNA, 33 bp, Homo sapien
gtttaagtgaaaaaaacgtgcaacccaggctga

SEQ ID NO: 1046214 - DNA, 33 bp, Homo sapien
gtttaagtgaaaaaaatgtgcaacccaggctga

SEQ ID NO: 1046215 - DNA, 33 bp, Homo sapien
agaagcagaggttccacgtctttccactacagg

SEQ ID NO: 1046216 - DNA, 33 bp, Homo sapien
agaagcagaggttccaggtctttccactacagg

SEQ ID NO: 1046217 - DNA, 33 bp, Homo sapien
ttggcacgagctctgaagtctctcactagcctt

SEQ ID NO: 1046218 - DNA, 33 bp, Homo sapien
ttggcacgagctctgaggtctctcactagcctt

SEQ ID NO: 1046219 - DNA, 33 bp, Homo sapien
ggggttcaggcttagacctttatgttgccagag

SEQ ID NO: 1046220 - DNA, 33 bp, Homo sapien
ggggttcaggcttagatctttatgttgccagag

SEQ ID NO: 1046221 - DNA, 33 bp, Homo sapien
tcttgacgcttatcccagcctgacatctgcctc

SEQ ID NO: 1046222 - DNA, 33 bp, Homo sapien
tcttgacgcttatcccggcctgacatctgcctc

SEQ ID NO: 1046223 - DNA, 33 bp, Homo sapien
aaaggaggaatcagcaagtgtttttctctgtcc

SEQ ID NO: 1046224 - DNA, 33 bp, Homo sapien
aaaggaggaatcagcaggtgtttttctctgtcc

SEQ ID NO: 1046225 - DNA, 33 bp, Homo sapien
agctacgacagattgaatagagctggcatccaa

SEQ ID NO: 1046226 - DNA, 33 bp, Homo sapien
agctacgacagattgattagagctggcatccaa

SEQ ID NO: 1046227 - DNA, 33 bp, Homo sapien
aaataaaaattaaaagaattcagcctgcccagt

SEQ ID NO: 1046228 - DNA, 33 bp, Homo sapien
aaataaaaattaaaaggattcagcctgcccagt

SEQ ID NO: 1046229 - DNA, 33 bp, Homo sapien
ggtcaggtcccaagtccccaggagagcacaggc

SEQ ID NO: 1046230 - DNA, 33 bp, Homo sapien
ggtcaggtcccaagtctccaggagagcacaggc

SEQ ID NO: 1046231 - DNA, 33 bp, Homo sapien
ccgtccccctccccaacgaagaggaatctaagg

SEQ ID NO: 1046232 - DNA, 33 bp, Homo sapien
ccgtccccctccccaatgaagaggaatctaagg

SEQ ID NO: 1046233 - DNA, 33 bp, Homo sapien
gaacccagagaaggaaacttaactgccagtcat

SEQ ID NO: 1046234 - DNA, 33 bp, Homo sapien
gaacccagagaaggaaccttaactgccagtcat

SEQ ID NO: 1046235 - DNA, 33 bp, Homo sapien
cattgtgacagtattacgagctggtgctttagg

SEQ ID NO: 1046236 - DNA, 33 bp, Homo sapien
cattgtgacagtattatgagctggtgctttagg

SEQ ID NO: 1046237 - DNA, 33 bp, Homo sapien
tcacttttccatggagacctgtaaatcatctgc

SEQ ID NO: 1046238 - DNA, 33 bp, Homo sapien
tcacttttccatggaggcctgtaaatcatctgc

SEQ ID NO: 1046239 - DNA, 33 bp, Homo sapien
tctgaccacaccgtacagcccatgtcatgtctg

SEQ ID NO: 1046240 - DNA, 33 bp, Homo sapien
tctgaccacaccgtacggcccatgtcatgtctg

SEQ ID NO: 1046241 - DNA, 33 bp, Homo sapien
gtggcccagcaggataccagcctttcagagcca

SEQ ID NO: 1046242 - DNA, 33 bp, Homo sapien
gtggcccagcaggatagcagcctttcagagcca

SEQ ID NO: 1046243 - DNA, 33 bp, Homo sapien
ggggcagcgaggacagcctcaggaaccctggtc

SEQ ID NO: 1046244 - DNA, 33 bp, Homo sapien
ggggcagcgaggacagtctcaggaaccctggtc

SEQ ID NO: 1046245 - DNA, 33 bp, Homo sapien
aacagcgttccatcaccgtgatagcgtgtgctc

SEQ ID NO: 1046246 - DNA, 33 bp, Homo sapien
aacagcgttccatcactgtgatagcgtgtgctc

SEQ ID NO: 1046247 - DNA, 33 bp, Homo sapien
cggctgccagtcagtgaagaaggaattctggga

SEQ ID NO: 1046248 - DNA, 33 bp, Homo sapien
cggctgccagtcagtggagaaggaattctggga

SEQ ID NO: 1046249 - DNA, 33 bp, Homo sapien
ttagattagcgtgcctcaactccctgttgacag

SEQ ID NO: 1046250 - DNA, 33 bp, Homo sapien
ttagattagcgtgccttaactccctgttgacag

SEQ ID NO: 1046251 - DNA, 33 bp, Homo sapien
ttgcaggagaaaggtcaactagctttactgggc

SEQ ID NO: 1046252 - DNA, 33 bp, Homo sapien
ttgcaggagaaaggtcgactagctttactgggc

SEQ ID NO: 1046253 - DNA, 33 bp, Homo sapien
tgagctggtccctgcaaaagtctccaaatggcc

SEQ ID NO: 1046254 - DNA, 33 bp, Homo sapien
tgagctggtccctgcagaagtctccaaatggcc

SEQ ID NO: 1046255 - DNA, 33 bp, Homo sapien
gaacatcagttttatcaaaatttgttagaaaga

SEQ ID NO: 1046256 - DNA, 33 bp, Homo sapien
gaacatcagttttatcgaaatttgttagaaaga

SEQ ID NO: 1046257 - DNA, 33 bp, Homo sapien
ctggggacttttgaagcagaactcagaggaaag

SEQ ID NO: 1046258 - DNA, 33 bp, Homo sapien
ctggggacttttgaaggagaactcagaggaaag

SEQ ID NO: 1046259 - DNA, 33 bp, Homo sapien
ggaaatgaaatagaaaatgtgtatgtgtatgtt

SEQ ID NO: 1046260 - DNA, 33 bp, Homo sapien
ggaaatgaaatagaaattgtgtatgtgtatgtt

SEQ ID NO: 1046261 - DNA, 33 bp, Homo sapien
taccaagtgctcagaaatgatgcccaagaggaa

SEQ ID NO: 1046262 - DNA, 33 bp, Homo sapien
taccaagtgctcagaagtgatgcccaagaggaa

SEQ ID NO: 1046263 - DNA, 33 bp, Homo sapien
gtggagggcagatacacaggacacaggacacca

SEQ ID NO: 1046264 - DNA, 33 bp, Homo sapien
gtggagggcagatacataggacacaggacacca

SEQ ID NO: 1046265 - DNA, 33 bp, Homo sapien
aatctgaggaccctgcgctagcaagaagtatct

SEQ ID NO: 1046266 - DNA, 33 bp, Homo sapien
aatctgaggaccctgctctagcaagaagtatct

SEQ ID NO: 1046267 - DNA, 33 bp, Homo sapien
accatatgcacaagaacaacaccctaagaaatg

SEQ ID NO: 1046268 - DNA, 33 bp, Homo sapien
accatatgcacaagaataacaccctaagaaatg

SEQ ID NO: 1046269 - DNA, 33 bp, Homo sapien
gtacacaaggtgacatcagtgacaaagggccaa

SEQ ID NO: 1046270 - DNA, 33 bp, Homo sapien
gtacacaaggtgacattagtgacaaagggccaa

SEQ ID NO: 1046271 - DNA, 33 bp, Homo sapien
gaggacggttaatgccaacgcatggttgacaac

SEQ ID NO: 1046272 - DNA, 33 bp, Homo sapien
gaggacggttaatgcctacgcatggttgacaac

SEQ ID NO: 1046273 - DNA, 33 bp, Homo sapien
taaattctgaagtccaagttctacttccaactc

SEQ ID NO: 1046274 - DNA, 33 bp, Homo sapien
taaattctgaagtccaggttctacttccaactc

SEQ ID NO: 1046275 - DNA, 33 bp, Homo sapien
tggctatccgtatgcaaaaaaggaagttagacc

SEQ ID NO: 1046276 - DNA, 33 bp, Homo sapien
tggctatccgtatgcagaaaaggaagttagacc

SEQ ID NO: 1046277 - DNA, 33 bp, Homo sapien
agagagaagagaaggtaaagtggagacagaggc

SEQ ID NO: 1046278 - DNA, 33 bp, Homo sapien
agagagaagagaaggtgaagtggagacagaggc

SEQ ID NO: 1046279 - DNA, 33 bp, Homo sapien
tccatccattcgtccaacaaaggcccttcctgt

SEQ ID NO: 1046280 - DNA, 33 bp, Homo sapien
tccatccattcgtccagcaaaggcccttcctgt

SEQ ID NO: 1046281 - DNA, 33 bp, Homo sapien
cctaaggaaggttaccaagcagaggaggcccct

SEQ ID NO: 1046282 - DNA, 33 bp, Homo sapien
cctaaggaaggttaccgagcagaggaggcccct

SEQ ID NO: 1046283 - DNA, 33 bp, Homo sapien
agccattgagatttgaacctaagagtcatgggg

SEQ ID NO: 1046284 - DNA, 33 bp, Homo sapien
agccattgagatttgatcctaagagtcatgggg

SEQ ID NO: 1046285 - DNA, 33 bp, Homo sapien
ggggtaggcttccacacatttcctgaatgcctt

SEQ ID NO: 1046286 - DNA, 33 bp, Homo sapien
ggggtaggcttccacatatttcctgaatgcctt

SEQ ID NO: 1046287 - DNA, 33 bp, Homo sapien
cattttaacatgctaactaccctggcaaccctg

SEQ ID NO: 1046288 - DNA, 33 bp, Homo sapien
cattttaacatgctaattaccctggcaaccctg

SEQ ID NO: 1046289 - DNA, 33 bp, Homo sapien
tgtgaacgttacccccaacatagccgggaccac

SEQ ID NO: 1046290 - DNA, 33 bp, Homo sapien
tgtgaacgttacccccgacatagccgggaccac

SEQ ID NO: 1046291 - DNA, 33 bp, Homo sapien
atttcaaattaggctacaaatacatcagacagc

SEQ ID NO: 1046292 - DNA, 33 bp, Homo sapien
atttcaaattaggctataaatacatcagacagc

SEQ ID NO: 1046293 - DNA, 33 bp, Homo sapien
actgcagatgggaagcaatacgtgaatgtgtgc

SEQ ID NO: 1046294 - DNA, 33 bp, Homo sapien
actgcagatgggaagcgatacgtgaatgtgtgc

SEQ ID NO: 1046295 - DNA, 33 bp, Homo sapien
cggccttaatgaccacgaaatcgggcctgcacg

SEQ ID NO: 1046296 - DNA, 33 bp, Homo sapien
cggccttaatgaccactaaatcgggcctgcacg

SEQ ID NO: 1046297 - DNA, 33 bp, Homo sapien
gaacatttaccgaaacaggaagccctgacccca

SEQ ID NO: 1046298 - DNA, 33 bp, Homo sapien
gaacatttaccgaaacgggaagccctgacccca

SEQ ID NO: 1046299 - DNA, 33 bp, Homo sapien
gttgtggtatcttttcaaatcaaccctaagcaa

SEQ ID NO: 1046300 - DNA, 33 bp, Homo sapien
gttgtggtatcttttccaatcaaccctaagcaa

SEQ ID NO: 1046301 - DNA, 33 bp, Homo sapien
gagacaaaggtaagccaggataaaaaggagcag

SEQ ID NO: 1046302 - DNA, 33 bp, Homo sapien
gagacaaaggtaagcccggataaaaaggagcag

SEQ ID NO: 1046303 - DNA, 33 bp, Homo sapien
tgttccccttgtacacagagatacggacaatag

SEQ ID NO: 1046304 - DNA, 33 bp, Homo sapien
tgttccccttgtacaccgagatacggacaatag

SEQ ID NO: 1046305 - DNA, 33 bp, Homo sapien
tggtggcttttttggcactgtcatgtttgtgtg

SEQ ID NO: 1046306 - DNA, 33 bp, Homo sapien
tggtggcttttttggcgctgtcatgtttgtgtg

SEQ ID NO: 1046307 - DNA, 33 bp, Homo sapien
tgcagaaaatgatgacagacccatttgaactgt

SEQ ID NO: 1046308 - DNA, 33 bp, Homo sapien
tgcagaaaatgatgacggacccatttgaactgt

SEQ ID NO: 1046309 - DNA, 33 bp, Homo sapien
acctctgattaggaaacggcctctctccaagtt

SEQ ID NO: 1046310 - DNA, 33 bp, Homo sapien
acctctgattaggaaatggcctctctccaagtt

SEQ ID NO: 1046311 - DNA, 33 bp, Homo sapien
taacagtcgggagaacacggtaccggattgatc

SEQ ID NO: 1046312 - DNA, 33 bp, Homo sapien
taacagtcgggagaacgcggtaccggattgatc

SEQ ID NO: 1046313 - DNA, 33 bp, Homo sapien
ggggagaaactcaacacggcaaggagaagggaa

SEQ ID NO: 1046314 - DNA, 33 bp, Homo sapien
ggggagaaactcaacatggcaaggagaagggaa

SEQ ID NO: 1046315 - DNA, 33 bp, Homo sapien
ttccttagcgtctgaccggcctccatgtcctcg

SEQ ID NO: 1046316 - DNA, 33 bp, Homo sapien
ttccttagcgtctgactggcctccatgtcctcg

SEQ ID NO: 1046317 - DNA, 33 bp, Homo sapien
cccgatagccagagtccaggtgaattcagatgc

SEQ ID NO: 1046318 - DNA, 33 bp, Homo sapien
cccgatagccagagtcgaggtgaattcagatgc

SEQ ID NO: 1046319 - DNA, 33 bp, Homo sapien
ggcaggtttgcaggcacgttgtttgctagctct

SEQ ID NO: 1046320 - DNA, 33 bp, Homo sapien
ggcaggtttgcaggcatgttgtttgctagctct

SEQ ID NO: 1046321 - DNA, 33 bp, Homo sapien
gggtacataggctctggatttgtttgtacatga

SEQ ID NO: 1046322 - DNA, 33 bp, Homo sapien
gggtacataggctctgtatttgtttgtacatga

SEQ ID NO: 1046323 - DNA, 33 bp, Homo sapien
cacagtgaaggctttgaactaggctctgccctc

SEQ ID NO: 1046324 - DNA, 33 bp, Homo sapien
cacagtgaaggctttggactaggctctgccctc

SEQ ID NO: 1046325 - DNA, 33 bp, Homo sapien
gaaaagaagtgagctgcaggtgttctcaagtgt

SEQ ID NO: 1046326 - DNA, 33 bp, Homo sapien
gaaaagaagtgagctgtaggtgttctcaagtgt

SEQ ID NO: 1046327 - DNA, 33 bp, Homo sapien
ggaggcctaaagcacaagaggacaaagggggtg

SEQ ID NO: 1046328 - DNA, 33 bp, Homo sapien
ggaggcctaaagcacaggaggacaaagggggtg

SEQ ID NO: 1046329 - DNA, 33 bp, Homo sapien
ttcctttccatcttcacacttttgctgccactt

SEQ ID NO: 1046330 - DNA, 33 bp, Homo sapien
ttcctttccatcttcatacttttgctgccactt

SEQ ID NO: 1046331 - DNA, 33 bp, Homo sapien
atttccagatcggagacggggaggaggtgtttc

SEQ ID NO: 1046332 - DNA, 33 bp, Homo sapien
atttccagatcggagatggggaggaggtgtttc

SEQ ID NO: 1046333 - DNA, 33 bp, Homo sapien
ctatatgtaacttacacccaggctaaagtgatc

SEQ ID NO: 1046334 - DNA, 33 bp, Homo sapien
ctatatgtaacttacatccaggctaaagtgatc

SEQ ID NO: 1046335 - DNA, 33 bp, Homo sapien
caaacaaaaaaagctgaagagagacttgcagaa

SEQ ID NO: 1046336 - DNA, 33 bp, Homo sapien
caaacaaaaaaagctggagagagacttgcagaa

SEQ ID NO: 1046337 - DNA, 33 bp, Homo sapien
caccaatgccatgcaccgcactggttttcttgc

SEQ ID NO: 1046338 - DNA, 33 bp, Homo sapien
caccaatgccatgcactgcactggttttcttgc

SEQ ID NO: 1046339 - DNA, 33 bp, Homo sapien
gacccctgcgtaagaaatctgaacgtagggtct

SEQ ID NO: 1046340 - DNA, 33 bp, Homo sapien
gacccctgcgtaagaactctgaacgtagggtct

SEQ ID NO: 1046341 - DNA, 33 bp, Homo sapien
gtcttgttcacctctgcagttgtgacaccctac

SEQ ID NO: 1046342 - DNA, 33 bp, Homo sapien
gtcttgttcacctctgtagttgtgacaccctac

SEQ ID NO: 1046343 - DNA, 33 bp, Homo sapien
accattttactatgccggcggatttacagatcc

SEQ ID NO: 1046344 - DNA, 33 bp, Homo sapien
accattttactatgcctgcggatttacagatcc

SEQ ID NO: 1046345 - DNA, 33 bp, Homo sapien
ttgggagctgtgagaaccaaaagagaaacggca

SEQ ID NO: 1046346 - DNA, 33 bp, Homo sapien
ttgggagctgtgagaatcaaaagagaaacggca

SEQ ID NO: 1046347 - DNA, 33 bp, Homo sapien
ttcacctacttcgcctcacaaagatgatggaaa

SEQ ID NO: 1046348 - DNA, 33 bp, Homo sapien
ttcacctacttcgccttacaaagatgatggaaa

SEQ ID NO: 1046349 - DNA, 33 bp, Homo sapien
actctgtcatagacacagaccgttttgtctgct

SEQ ID NO: 1046350 - DNA, 33 bp, Homo sapien
actctgtcatagacacggaccgttttgtctgct

SEQ ID NO: 1046351 - DNA, 33 bp, Homo sapien
gccacatcagctttaacagttatacccccactc

SEQ ID NO: 1046352 - DNA, 33 bp, Homo sapien
gccacatcagctttaatagttatacccccactc

SEQ ID NO: 1046353 - DNA, 33 bp, Homo sapien
ggaattaattcagtcaatcctgcgtggtgaaat

SEQ ID NO: 1046354 - DNA, 33 bp, Homo sapien
ggaattaattcagtcattcctgcgtggtgaaat

SEQ ID NO: 1046355 - DNA, 33 bp, Homo sapien
atacttacccaagcaacaagcaaagtaccgaat

SEQ ID NO: 1046356 - DNA, 33 bp, Homo sapien
atacttacccaagcaataagcaaagtaccgaat

SEQ ID NO: 1046357 - DNA, 33 bp, Homo sapien
aaaacaccttacaaaacaagggcttggctattg

SEQ ID NO: 1046358 - DNA, 33 bp, Homo sapien
aaaacaccttacaaaagaagggcttggctattg

SEQ ID NO: 1046359 - DNA, 33 bp, Homo sapien
ctgtttccatcctgaacggggcttgctgggctg

SEQ ID NO: 1046360 - DNA, 33 bp, Homo sapien
ctgtttccatcctgaatggggcttgctgggctg

SEQ ID NO: 1046361 - DNA, 33 bp, Homo sapien
gcctcctcaaaccttaacctggctgcgataccg

SEQ ID NO: 1046362 - DNA, 33 bp, Homo sapien
gcctcctcaaaccttagcctggctgcgataccg

SEQ ID NO: 1046363 - DNA, 33 bp, Homo sapien
acaaaatccacatcagcaaaactctggaatacc

SEQ ID NO: 1046364 - DNA, 33 bp, Homo sapien
acaaaatccacatcagtaaaactctggaatacc

SEQ ID NO: 1046365 - DNA, 33 bp, Homo sapien
cttctcgtcatttactaaccctaaggctcgcca

SEQ ID NO: 1046366 - DNA, 33 bp, Homo sapien
cttctcgtcatttactgaccctaaggctcgcca

SEQ ID NO: 1046367 - DNA, 33 bp, Homo sapien
gataagagatgtttccagaacattatcgcctca

SEQ ID NO: 1046368 - DNA, 33 bp, Homo sapien
gataagagatgtttccggaacattatcgcctca

SEQ ID NO: 1046369 - DNA, 33 bp, Homo sapien
aaactggtatccacaacgccaaccttgtgaacg

SEQ ID NO: 1046370 - DNA, 33 bp, Homo sapien
aaactggtatccacaatgccaaccttgtgaacg

SEQ ID NO: 1046371 - DNA, 33 bp, Homo sapien
tttaatgaggaccagacatgtaaaatatggttt

SEQ ID NO: 1046372 - DNA, 33 bp, Homo sapien
tttaatgaggaccagagatgtaaaatatggttt

SEQ ID NO: 1046373 - DNA, 33 bp, Homo sapien
gtggctctaaggcctgacaccttccgaagtcta

SEQ ID NO: 1046374 - DNA, 33 bp, Homo sapien
gtggctctaaggcctgtcaccttccgaagtcta

SEQ ID NO: 1046375 - DNA, 33 bp, Homo sapien
gtcctaaacaactgtacggctgaataaaatatt

SEQ ID NO: 1046376 - DNA, 33 bp, Homo sapien
gtcctaaacaactgtatggctgaataaaatatt

SEQ ID NO: 1046377 - DNA, 33 bp, Homo sapien
ctagaatgatgtctacagaagaaaatgtggaaa

SEQ ID NO: 1046378 - DNA, 33 bp, Homo sapien
ctagaatgatgtctacggaagaaaatgtggaaa

SEQ ID NO: 1046379 - DNA, 33 bp, Homo sapien
ttggggatgaaggcaacctctgtattaccagcg

SEQ ID NO: 1046380 - DNA, 33 bp, Homo sapien
ttggggatgaaggcaatctctgtattaccagcg

SEQ ID NO: 1046381 - DNA, 33 bp, Homo sapien
accaaaagataagacccgagaccaaggaaattg

SEQ ID NO: 1046382 - DNA, 33 bp, Homo sapien
accaaaagataagacctgagaccaaggaaattg

SEQ ID NO: 1046383 - DNA, 33 bp, Homo sapien
agcaagataagaacaacgtactgaaaaggaaat

SEQ ID NO: 1046384 - DNA, 33 bp, Homo sapien
agcaagataagaacaatgtactgaaaaggaaat

SEQ ID NO: 1046385 - DNA, 33 bp, Homo sapien
tagagtgagaaacctaaatgtgaaggtcatttt

SEQ ID NO: 1046386 - DNA, 33 bp, Homo sapien
tagagtgagaaacctatatgtgaaggtcatttt

SEQ ID NO: 1046387 - DNA, 33 bp, Homo sapien
atgaccgcagacaccaacaaaacgtcccactgc

SEQ ID NO: 1046388 - DNA, 33 bp, Homo sapien
atgaccgcagacaccagcaaaacgtcccactgc

SEQ ID NO: 1046389 - DNA, 33 bp, Homo sapien
tatgtcctgtggtggcaatggtagttatacaaa

SEQ ID NO: 1046390 - DNA, 33 bp, Homo sapien
tatgtcctgtggtggcgatggtagttatacaaa

SEQ ID NO: 1046391 - DNA, 33 bp, Homo sapien
attaaaaataccgacaatagccagttcagccga

SEQ ID NO: 1046392 - DNA, 33 bp, Homo sapien
attaaaaataccgacactagccagttcagccga

SEQ ID NO: 1046393 - DNA, 33 bp, Homo sapien
tggagatatttggtggacattgggcattataca

SEQ ID NO: 1046394 - DNA, 33 bp, Homo sapien
tggagatatttggtgggcattgggcattataca

SEQ ID NO: 1046395 - DNA, 33 bp, Homo sapien
cttcaggctcttctcacgtcctacttaagggta

SEQ ID NO: 1046396 - DNA, 33 bp, Homo sapien
cttcaggctcttctcatgtcctacttaagggta

SEQ ID NO: 1046397 - DNA, 33 bp, Homo sapien
gtggctagtccccttacgcttgggtcacagacc

SEQ ID NO: 1046398 - DNA, 33 bp, Homo sapien
gtggctagtccccttatgcttgggtcacagacc

SEQ ID NO: 1046399 - DNA, 33 bp, Homo sapien
gactttgacaaatacacacacttgtgaaattgc

SEQ ID NO: 1046400 - DNA, 33 bp, Homo sapien
gactttgacaaatacatacacttgtgaaattgc

SEQ ID NO: 1046401 - DNA, 33 bp, Homo sapien
gcactatatgtgccaaataattaaaagtttgaa

SEQ ID NO: 1046402 - DNA, 33 bp, Homo sapien
gcactatatgtgccaagtaattaaaagtttgaa

SEQ ID NO: 1046403 - DNA, 33 bp, Homo sapien
tacatgtacgtatatacatcacattcacacata

SEQ ID NO: 1046404 - DNA, 33 bp, Homo sapien
tacatgtacgtatatatatcacattcacacata

SEQ ID NO: 1046405 - DNA, 33 bp, Homo sapien
atatcataactggacacaacgtaattcataagt

SEQ ID NO: 1046406 - DNA, 33 bp, Homo sapien
atatcataactggacataacgtaattcataagt

SEQ ID NO: 1046407 - DNA, 33 bp, Homo sapien
ccaatagtaactcctcagagacttccagggaac

SEQ ID NO: 1046408 - DNA, 33 bp, Homo sapien
ccaatagtaactcctcggagacttccagggaac

SEQ ID NO: 1046409 - DNA, 33 bp, Homo sapien
tagatctgttgatgtacggttttataactaaaa

SEQ ID NO: 1046410 - DNA, 33 bp, Homo sapien
tagatctgttgatgtatggttttataactaaaa

SEQ ID NO: 1046411 - DNA, 33 bp, Homo sapien
tttcatgatagcactacgattatttccatttta

SEQ ID NO: 1046412 - DNA, 33 bp, Homo sapien
tttcatgatagcactatgattatttccatttta

SEQ ID NO: 1046413 - DNA, 33 bp, Homo sapien
ttagagccattcactacgcattcccactgtcaa

SEQ ID NO: 1046414 - DNA, 33 bp, Homo sapien
ttagagccattcactatgcattcccactgtcaa

SEQ ID NO: 1046415 - DNA, 33 bp, Homo sapien
taggttgacatcgggcaagatctctttatgcct

SEQ ID NO: 1046416 - DNA, 33 bp, Homo sapien
taggttgacatcgggcgagatctctttatgcct

SEQ ID NO: 1046417 - DNA, 33 bp, Homo sapien
cagtcagagtgacaaaagtgtttttacatgtct

SEQ ID NO: 1046418 - DNA, 33 bp, Homo sapien
cagtcagagtgacaaaggtgtttttacatgtct

SEQ ID NO: 1046419 - DNA, 33 bp, Homo sapien
caaaaaggattgcatcaaagttctgctatgtga

SEQ ID NO: 1046420 - DNA, 33 bp, Homo sapien
caaaaaggattgcatcgaagttctgctatgtga

SEQ ID NO: 1046421 - DNA, 33 bp, Homo sapien
tcaacattggaatgaaaacagcttagggttctg

SEQ ID NO: 1046422 - DNA, 33 bp, Homo sapien
tcaacattggaatgaagacagcttagggttctg

SEQ ID NO: 1046423 - DNA, 33 bp, Homo sapien
gcctccccaaattggcgattctccttcctcagc

SEQ ID NO: 1046424 - DNA, 33 bp, Homo sapien
gcctccccaaattggctattctccttcctcagc

SEQ ID NO: 1046425 - DNA, 33 bp, Homo sapien
aacattctgggcggtacggcggagcggttaaga

SEQ ID NO: 1046426 - DNA, 33 bp, Homo sapien
aacattctgggcggtatggcggagcggttaaga

SEQ ID NO: 1046427 - DNA, 33 bp, Homo sapien
gcatggtgactaccaacgaggtttaattgacat

SEQ ID NO: 1046428 - DNA, 33 bp, Homo sapien
gcatggtgactaccaatgaggtttaattgacat

SEQ ID NO: 1046429 - DNA, 33 bp, Homo sapien
tctgccgacgttcagccgcgggtaaaatgaggc

SEQ ID NO: 1046430 - DNA, 33 bp, Homo sapien
tctgccgacgttcagctgcgggtaaaatgaggc

SEQ ID NO: 1046431 - DNA, 33 bp, Homo sapien
tttgttttattttgtcccatcaagtctgaatag

SEQ ID NO: 1046432 - DNA, 33 bp, Homo sapien
tttgttttattttgtctcatcaagtctgaatag

SEQ ID NO: 1046433 - DNA, 33 bp, Homo sapien
caggagtgtgtacacaaagttgaaagtttttcc

SEQ ID NO: 1046434 - DNA, 33 bp, Homo sapien
caggagtgtgtacacagagttgaaagtttttcc

SEQ ID NO: 1046435 - DNA, 33 bp, Homo sapien
taaaggtcaataggtagcaaatggctacattag

SEQ ID NO: 1046436 - DNA, 33 bp, Homo sapien
taaaggtcaataggtatcaaatggctacattag

SEQ ID NO: 1046437 - DNA, 33 bp, Homo sapien
gcagaatgtctgtgaaagcagggcccaggaatc

SEQ ID NO: 1046438 - DNA, 33 bp, Homo sapien
gcagaatgtctgtgaaggcagggcccaggaatc

SEQ ID NO: 1046439 - DNA, 33 bp, Homo sapien
ggaggcctttctaaacagagtgccctggggaag

SEQ ID NO: 1046440 - DNA, 33 bp, Homo sapien
ggaggcctttctaaacggagtgccctggggaag

SEQ ID NO: 1046441 - DNA, 33 bp, Homo sapien
gctcctccaatccgcaactccttggcccctcgg

SEQ ID NO: 1046442 - DNA, 33 bp, Homo sapien
gctcctccaatccgcagctccttggcccctcgg

SEQ ID NO: 1046443 - DNA, 33 bp, Homo sapien
ggagtgagcagcatccaaccgccgcctctgaca

SEQ ID NO: 1046444 - DNA, 33 bp, Homo sapien
ggagtgagcagcatccgaccgccgcctctgaca

SEQ ID NO: 1046445 - DNA, 33 bp, Homo sapien
ataggagggttgggaggacctagcagatatgta

SEQ ID NO: 1046446 - DNA, 33 bp, Homo sapien
ataggagggttgggagtacctagcagatatgta

SEQ ID NO: 1046447 - DNA, 33 bp, Homo sapien
gtaaccttaatatataaagagcttccatgactc

SEQ ID NO: 1046448 - DNA, 33 bp, Homo sapien
gtaaccttaatatatagagagcttccatgactc

SEQ ID NO: 1046449 - DNA, 33 bp, Homo sapien
catctggttcctacaaacggggcctggccgagg

SEQ ID NO: 1046450 - DNA, 33 bp, Homo sapien
catctggttcctacaagcggggcctggccgagg

SEQ ID NO: 1046451 - DNA, 33 bp, Homo sapien
ggcagaatacattcaaaccccaaaatcttcatg

SEQ ID NO: 1046452 - DNA, 33 bp, Homo sapien
ggcagaatacattcaacccccaaaatcttcatg

SEQ ID NO: 1046453 - DNA, 33 bp, Homo sapien
agtatagacaaatagagtcccaagaagttgctg

SEQ ID NO: 1046454 - DNA, 33 bp, Homo sapien
agtatagacaaatagattcccaagaagttgctg

SEQ ID NO: 1046455 - DNA, 33 bp, Homo sapien
agctatgcctgtatacaaatgataatagctgca

SEQ ID NO: 1046456 - DNA, 33 bp, Homo sapien
agctatgcctgtatacgaatgataatagctgca

SEQ ID NO: 1046457 - DNA, 33 bp, Homo sapien
agagttctgccctacacagaaacagagacacac

SEQ ID NO: 1046458 - DNA, 33 bp, Homo sapien
agagttctgccctacagagaaacagagacacac

SEQ ID NO: 1046459 - DNA, 33 bp, Homo sapien
gatattcaaggcaccaatgaaggtaacaggagc

SEQ ID NO: 1046460 - DNA, 33 bp, Homo sapien
gatattcaaggcaccagtgaaggtaacaggagc

SEQ ID NO: 1046461 - DNA, 33 bp, Homo sapien
ttcatcactggtcctaacaaatgatgaaccccg

SEQ ID NO: 1046462 - DNA, 33 bp, Homo sapien
ttcatcactggtcctagcaaatgatgaaccccg

SEQ ID NO: 1046463 - DNA, 33 bp, Homo sapien
agccttcatgaaatggaaacggtaggtccaggg

SEQ ID NO: 1046464 - DNA, 33 bp, Homo sapien
agccttcatgaaatgggaacggtaggtccaggg

SEQ ID NO: 1046465 - DNA, 33 bp, Homo sapien
cctgagaagtgggtccaagaagtgttcctacat

SEQ ID NO: 1046466 - DNA, 33 bp, Homo sapien
cctgagaagtgggtccgagaagtgttcctacat

SEQ ID NO: 1046467 - DNA, 33 bp, Homo sapien
atctcctggaaccacaaaaagacctgagtcccc

SEQ ID NO: 1046468 - DNA, 33 bp, Homo sapien
atctcctggaaccacagaaagacctgagtcccc

SEQ ID NO: 1046469 - DNA, 33 bp, Homo sapien
ccaataaatgcttgcccgatgaatgagtagact

SEQ ID NO: 1046470 - DNA, 33 bp, Homo sapien
ccaataaatgcttgccggatgaatgagtagact

SEQ ID NO: 1046471 - DNA, 33 bp, Homo sapien
ccagaggggacactgacacccaaaaagaagttg

SEQ ID NO: 1046472 - DNA, 33 bp, Homo sapien
ccagaggggacactgagacccaaaaagaagttg

SEQ ID NO: 1046473 - DNA, 33 bp, Homo sapien
gtttagcctcacccagaagtcaagaggaagctg

SEQ ID NO: 1046474 - DNA, 33 bp, Homo sapien
gtttagcctcacccagcagtcaagaggaagctg

SEQ ID NO: 1046475 - DNA, 33 bp, Homo sapien
tctgaacgcgactgagaatggaaacgcagctct

SEQ ID NO: 1046476 - DNA, 33 bp, Homo sapien
tctgaacgcgactgaggatggaaacgcagctct

SEQ ID NO: 1046477 - DNA, 33 bp, Homo sapien
tcatgtcatttcactgcatcagcccatcatttc

SEQ ID NO: 1046478 - DNA, 33 bp, Homo sapien
tcatgtcatttcactgtatcagcccatcatttc

SEQ ID NO: 1046479 - DNA, 33 bp, Homo sapien
cgggagctagaaaatggaagggagataacgaga

SEQ ID NO: 1046480 - DNA, 33 bp, Homo sapien
cgggagctagaaaatgtaagggagataacgaga

SEQ ID NO: 1046481 - DNA, 33 bp, Homo sapien
tctccagtctggagtacgaaagagacagaggct

SEQ ID NO: 1046482 - DNA, 33 bp, Homo sapien
tctccagtctggagtaggaaagagacagaggct

SEQ ID NO: 1046483 - DNA, 33 bp, Homo sapien
acagcgaacaggacagacagaaatcctcgtggg

SEQ ID NO: 1046484 - DNA, 33 bp, Homo sapien
acagcgaacaggacaggcagaaatcctcgtggg

SEQ ID NO: 1046485 - DNA, 33 bp, Homo sapien
tccacatacagcctgacataggggaggggaccc

SEQ ID NO: 1046486 - DNA, 33 bp, Homo sapien
tccacatacagcctgagataggggaggggaccc

SEQ ID NO: 1046487 - DNA, 33 bp, Homo sapien
ctagagaatgaactaacgaatggaggcatgaga

SEQ ID NO: 1046488 - DNA, 33 bp, Homo sapien
ctagagaatgaactaatgaatggaggcatgaga

SEQ ID NO: 1046489 - DNA, 33 bp, Homo sapien
atgtggctatcccatacaccccaggtcatcaga

SEQ ID NO: 1046490 - DNA, 33 bp, Homo sapien
atgtggctatcccatataccccaggtcatcaga

SEQ ID NO: 1046491 - DNA, 33 bp, Homo sapien
gagctaattgcctgggcccactgagcagtgagt

SEQ ID NO: 1046492 - DNA, 33 bp, Homo sapien
gagctaattgcctgggtccactgagcagtgagt

SEQ ID NO: 1046493 - DNA, 33 bp, Homo sapien
ggcagaggctgggtacaactccaggcttctgac

SEQ ID NO: 1046494 - DNA, 33 bp, Homo sapien
ggcagaggctgggtacgactccaggcttctgac

SEQ ID NO: 1046495 - DNA, 33 bp, Homo sapien
ctgcttagggttctcacgttgacatcacagtat

SEQ ID NO: 1046496 - DNA, 33 bp, Homo sapien
ctgcttagggttctcatgttgacatcacagtat

SEQ ID NO: 1046497 - DNA, 33 bp, Homo sapien
agttaaccaagactcacagtttatagcttaagc

SEQ ID NO: 1046498 - DNA, 33 bp, Homo sapien
agttaaccaagactcatagtttatagcttaagc

SEQ ID NO: 1046499 - DNA, 33 bp, Homo sapien
cttttgctgtgggatccgagaaaaattgcacat

SEQ ID NO: 1046500 - DNA, 33 bp, Homo sapien
cttttgctgtgggatctgagaaaaattgcacat

SEQ ID NO: 1046501 - DNA, 33 bp, Homo sapien
caaggcagaaaaagccgcctacacatcaggcat

SEQ ID NO: 1046502 - DNA, 33 bp, Homo sapien
caaggcagaaaaagcctcctacacatcaggcat

SEQ ID NO: 1046503 - DNA, 33 bp, Homo sapien
tcctgttgcttgaaacaacttctatacaattta

SEQ ID NO: 1046504 - DNA, 33 bp, Homo sapien
tcctgttgcttgaaactacttctatacaattta

SEQ ID NO: 1046505 - DNA, 33 bp, Homo sapien
aagccagaagtaccccagcaaatgggaagttaa

SEQ ID NO: 1046506 - DNA, 33 bp, Homo sapien
aagccagaagtacccccgcaaatgggaagttaa

SEQ ID NO: 1046507 - DNA, 33 bp, Homo sapien
tcacttggtttagactcaggtgttgactaggag

SEQ ID NO: 1046508 - DNA, 33 bp, Homo sapien
tcacttggtttagacttaggtgttgactaggag

SEQ ID NO: 1046509 - DNA, 33 bp, Homo sapien
ccctgaagagtgataacaggctgcgttgtgaca

SEQ ID NO: 1046510 - DNA, 33 bp, Homo sapien
ccctgaagagtgataataggctgcgttgtgaca

SEQ ID NO: 1046511 - DNA, 33 bp, Homo sapien
gggtgatgggaacatgcagatttttgtttatat

SEQ ID NO: 1046512 - DNA, 33 bp, Homo sapien
gggtgatgggaacatggagatttttgtttatat

SEQ ID NO: 1046513 - DNA, 33 bp, Homo sapien
taatagatgtttattgaaggaaaatgagagcat

SEQ ID NO: 1046514 - DNA, 33 bp, Homo sapien
taatagatgtttattggaggaaaatgagagcat

SEQ ID NO: 1046515 - DNA, 33 bp, Homo sapien
agggcactcaagtaatcacgtgggaaactgaca

SEQ ID NO: 1046516 - DNA, 33 bp, Homo sapien
agggcactcaagtaatgacgtgggaaactgaca

SEQ ID NO: 1046517 - DNA, 33 bp, Homo sapien
ggctatcacagccaaacaggtactgctggacca

SEQ ID NO: 1046518 - DNA, 33 bp, Homo sapien
ggctatcacagccaaataggtactgctggacca

SEQ ID NO: 1046519 - DNA, 33 bp, Homo sapien
tggtggacaaaaagcactaaaaaactcaataga

SEQ ID NO: 1046520 - DNA, 33 bp, Homo sapien
tggtggacaaaaagcattaaaaaactcaataga

SEQ ID NO: 1046521 - DNA, 33 bp, Homo sapien
accattttgagcatcaatctgtacctatttatt

SEQ ID NO: 1046522 - DNA, 33 bp, Homo sapien
accattttgagcatcagtctgtacctatttatt

SEQ ID NO: 1046523 - DNA, 33 bp, Homo sapien
gccaaatgctttgccagctcccttcacatccct

SEQ ID NO: 1046524 - DNA, 33 bp, Homo sapien
gccaaatgctttgccatctcccttcacatccct

SEQ ID NO: 1046525 - DNA, 33 bp, Homo sapien
agcaattgaattgcataaggaaaaagccacacg

SEQ ID NO: 1046526 - DNA, 33 bp, Homo sapien
agcaattgaattgcatgaggaaaaagccacacg

SEQ ID NO: 1046527 - DNA, 33 bp, Homo sapien
ggatgcggccgagaacaaggcaaactggctccc

SEQ ID NO: 1046528 - DNA, 33 bp, Homo sapien
ggatgcggccgagaaccaggcaaactggctccc

SEQ ID NO: 1046529 - DNA, 33 bp, Homo sapien
acaggaaggctaccccaaaattcataagttcat

SEQ ID NO: 1046530 - DNA, 33 bp, Homo sapien
acaggaaggctacccccaaattcataagttcat

SEQ ID NO: 1046531 - DNA, 33 bp, Homo sapien
cactctcaaggcagagacacatagagggagcgt

SEQ ID NO: 1046532 - DNA, 33 bp, Homo sapien
cactctcaaggcagaggcacatagagggagcgt

SEQ ID NO: 1046533 - DNA, 33 bp, Homo sapien
cctccctcctttctggccaagtcccgctcaggt

SEQ ID NO: 1046534 - DNA, 33 bp, Homo sapien
cctccctcctttctggtcaagtcccgctcaggt

SEQ ID NO: 1046535 - DNA, 33 bp, Homo sapien
ctgggggagatgttccaattctacccggcgctc

SEQ ID NO: 1046536 - DNA, 33 bp, Homo sapien
ctgggggagatgttccgattctacccggcgctc

SEQ ID NO: 1046537 - DNA, 33 bp, Homo sapien
gagacagttaacaaccacttaaccattacatga

SEQ ID NO: 1046538 - DNA, 33 bp, Homo sapien
gagacagttaacaaccgcttaaccattacatga

SEQ ID NO: 1046539 - DNA, 33 bp, Homo sapien
gtatggtttgtccagaacagagttactacttga

SEQ ID NO: 1046540 - DNA, 33 bp, Homo sapien
gtatggtttgtccagagcagagttactacttga

SEQ ID NO: 1046541 - DNA, 33 bp, Homo sapien
ttaatctctcagcaacacagactttcaaatcat

SEQ ID NO: 1046542 - DNA, 33 bp, Homo sapien
ttaatctctcagcaacgcagactttcaaatcat

SEQ ID NO: 1046543 - DNA, 33 bp, Homo sapien
ccttcgtctcccaagcccaagcgaatctcctgc

SEQ ID NO: 1046544 - DNA, 33 bp, Homo sapien
ccttcgtctcccaagctcaagcgaatctcctgc

SEQ ID NO: 1046545 - DNA, 33 bp, Homo sapien
caaaacaaattccccaataaaatgcagaaccac

SEQ ID NO: 1046546 - DNA, 33 bp, Homo sapien
caaaacaaattccccactaaaatgcagaaccac

SEQ ID NO: 1046547 - DNA, 33 bp, Homo sapien
ctcagttccacagctaagaggtctggagggggt

SEQ ID NO: 1046548 - DNA, 33 bp, Homo sapien
ctcagttccacagctaggaggtctggagggggt

SEQ ID NO: 1046549 - DNA, 33 bp, Homo sapien
cagaagagaagaacaaacctgcaatcctctgac

SEQ ID NO: 1046550 - DNA, 33 bp, Homo sapien
cagaagagaagaacaagcctgcaatcctctgac

SEQ ID NO: 1046551 - DNA, 33 bp, Homo sapien
aacagtcctggtaaaaacaggatagaggcttct

SEQ ID NO: 1046552 - DNA, 33 bp, Homo sapien
aacagtcctggtaaaagcaggatagaggcttct

SEQ ID NO: 1046553 - DNA, 33 bp, Homo sapien
ccaggatcatcatctgcacagttggccagaaag

SEQ ID NO: 1046554 - DNA, 33 bp, Homo sapien
ccaggatcatcatctgtacagttggccagaaag

SEQ ID NO: 1046555 - DNA, 33 bp, Homo sapien
tttgtaatcgattttcactccctatgtttcatt

SEQ ID NO: 1046556 - DNA, 33 bp, Homo sapien
tttgtaatcgattttcgctccctatgtttcatt

SEQ ID NO: 1046557 - DNA, 33 bp, Homo sapien
gcctcatcaccccagaagagcttatgcaatgac

SEQ ID NO: 1046558 - DNA, 33 bp, Homo sapien
gcctcatcaccccagaggagcttatgcaatgac

SEQ ID NO: 1046559 - DNA, 33 bp, Homo sapien
ctctaaccactaagctcacccgtcttttccact

SEQ ID NO: 1046560 - DNA, 33 bp, Homo sapien
ctctaaccactaagcttacccgtcttttccact

SEQ ID NO: 1046561 - DNA, 33 bp, Homo sapien
agctcacagacggaaacctgctgacctgtcttt

SEQ ID NO: 1046562 - DNA, 33 bp, Homo sapien
agctcacagacggaaagctgctgacctgtcttt

SEQ ID NO: 1046563 - DNA, 33 bp, Homo sapien
actctaccaggcacttcaaatcatgactcaatc

SEQ ID NO: 1046564 - DNA, 33 bp, Homo sapien
actctaccaggcacttgaaatcatgactcaatc

SEQ ID NO: 1046565 - DNA, 33 bp, Homo sapien
atccctggtaagtacagatggactttggtcctg

SEQ ID NO: 1046566 - DNA, 33 bp, Homo sapien
atccctggtaagtacatatggactttggtcctg

SEQ ID NO: 1046567 - DNA, 33 bp, Homo sapien
tcaacataatcctaaccaaaatgcccgcaggcc

SEQ ID NO: 1046568 - DNA, 33 bp, Homo sapien
tcaacataatcctaacgaaaatgcccgcaggcc

SEQ ID NO: 1046569 - DNA, 33 bp, Homo sapien
tgagagatagattctcactgtcacagaaaggag

SEQ ID NO: 1046570 - DNA, 33 bp, Homo sapien
tgagagatagattctccctgtcacagaaaggag

SEQ ID NO: 1046571 - DNA, 33 bp, Homo sapien
tcccttgcacatatgccctccttgcccactcag

SEQ ID NO: 1046572 - DNA, 33 bp, Homo sapien
tcccttgcacatatgctctccttgcccactcag

SEQ ID NO: 1046573 - DNA, 33 bp, Homo sapien
ttgtctgcagctaccacctgaggttaaataata

SEQ ID NO: 1046574 - DNA, 33 bp, Homo sapien
ttgtctgcagctaccatctgaggttaaataata

SEQ ID NO: 1046575 - DNA, 33 bp, Homo sapien
catgttagaattttcacgtaaccactaacatat

SEQ ID NO: 1046576 - DNA, 33 bp, Homo sapien
catgttagaattttcatgtaaccactaacatat

SEQ ID NO: 1046577 - DNA, 33 bp, Homo sapien
tgtgtgtgtgccttcaaaggtcctcaggtcagg

SEQ ID NO: 1046578 - DNA, 33 bp, Homo sapien
tgtgtgtgtgccttcagaggtcctcaggtcagg

SEQ ID NO: 1046579 - DNA, 33 bp, Homo sapien
ggcccaaagaagttaacagttaccctgactttc

SEQ ID NO: 1046580 - DNA, 33 bp, Homo sapien
ggcccaaagaagttaatagttaccctgactttc

SEQ ID NO: 1046581 - DNA, 33 bp, Homo sapien
tcttccacagccagagacattcgggtgatgacc

SEQ ID NO: 1046582 - DNA, 33 bp, Homo sapien
tcttccacagccagaggcattcgggtgatgacc

SEQ ID NO: 1046583 - DNA, 33 bp, Homo sapien
acgtgatgcagtttccccgactcaaaaactcca

SEQ ID NO: 1046584 - DNA, 33 bp, Homo sapien
acgtgatgcagtttccgcgactcaaaaactcca

SEQ ID NO: 1046585 - DNA, 33 bp, Homo sapien
cacctctgttgacgtacgtgctaggatccattt

SEQ ID NO: 1046586 - DNA, 33 bp, Homo sapien
cacctctgttgacgtatgtgctaggatccattt

SEQ ID NO: 1046587 - DNA, 33 bp, Homo sapien
agtcagaagtaatggccaagccaagtcccaaaa

SEQ ID NO: 1046588 - DNA, 33 bp, Homo sapien
agtcagaagtaatggcgaagccaagtcccaaaa

SEQ ID NO: 1046589 - DNA, 33 bp, Homo sapien
atgtacaaccgatcatcacaatcagacgctctg

SEQ ID NO: 1046590 - DNA, 33 bp, Homo sapien
atgtacaaccgatcattacaatcagacgctctg

SEQ ID NO: 1046591 - DNA, 33 bp, Homo sapien
gggctcttttctgaaaccaaaggtcattttccg

SEQ ID NO: 1046592 - DNA, 33 bp, Homo sapien
gggctcttttctgaaatcaaaggtcattttccg

SEQ ID NO: 1046593 - DNA, 33 bp, Homo sapien
ggcacatttcagagaacagaagtcccacacaaa

SEQ ID NO: 1046594 - DNA, 33 bp, Homo sapien
ggcacatttcagagaatagaagtcccacacaaa

SEQ ID NO: 1046595 - DNA, 33 bp, Homo sapien
tcttgacttttaaaaaccatttgtgtgggactt

SEQ ID NO: 1046596 - DNA, 33 bp, Homo sapien
tcttgacttttaaaaatcatttgtgtgggactt

SEQ ID NO: 1046597 - DNA, 33 bp, Homo sapien
tggccgtgcatcctcaagttgttctaatgcgca

SEQ ID NO: 1046598 - DNA, 33 bp, Homo sapien
tggccgtgcatcctcaggttgttctaatgcgca

SEQ ID NO: 1046599 - DNA, 33 bp, Homo sapien
gtgtttctccacaaaacggcctgaagtcccctg

SEQ ID NO: 1046600 - DNA, 33 bp, Homo sapien
gtgtttctccacaaaatggcctgaagtcccctg

SEQ ID NO: 1046601 - DNA, 33 bp, Homo sapien
agcaaggcactctctacgtgtctgtaatctcat

SEQ ID NO: 1046602 - DNA, 33 bp, Homo sapien
agcaaggcactctctatgtgtctgtaatctcat

SEQ ID NO: 1046603 - DNA, 33 bp, Homo sapien
gcttttccagccctctcaatcagcacactgaat

SEQ ID NO: 1046604 - DNA, 33 bp, Homo sapien
gcttttccagccctcttaatcagcacactgaat

SEQ ID NO: 1046605 - DNA, 33 bp, Homo sapien
cactcacatactccacaaggaaattcttgaagg

SEQ ID NO: 1046606 - DNA, 33 bp, Homo sapien
cactcacatactccacgaggaaattcttgaagg

SEQ ID NO: 1046607 - DNA, 33 bp, Homo sapien
gggcccaaacctgtgacagtggagaggaagcag

SEQ ID NO: 1046608 - DNA, 33 bp, Homo sapien
gggcccaaacctgtgagagtggagaggaagcag

SEQ ID NO: 1046609 - DNA, 33 bp, Homo sapien
catgtggccggccctcactaatgggaaactttt

SEQ ID NO: 1046610 - DNA, 33 bp, Homo sapien
catgtggccggccctcgctaatgggaaactttt

SEQ ID NO: 1046611 - DNA, 33 bp, Homo sapien
ttatgacaagatcacactcttctctgccccacc

SEQ ID NO: 1046612 - DNA, 33 bp, Homo sapien
ttatgacaagatcacattcttctctgccccacc

SEQ ID NO: 1046613 - DNA, 33 bp, Homo sapien
agatgaaggtctgaaacgccctatgggaagaag

SEQ ID NO: 1046614 - DNA, 33 bp, Homo sapien
agatgaaggtctgaaaggccctatgggaagaag

SEQ ID NO: 1046615 - DNA, 33 bp, Homo sapien
gccaacaccagaagataagggaggaaggaaccc

SEQ ID NO: 1046616 - DNA, 33 bp, Homo sapien
gccaacaccagaagatgagggaggaaggaaccc

SEQ ID NO: 1046617 - DNA, 33 bp, Homo sapien
tcacctccacacttgcaaagggctttgtacctt

SEQ ID NO: 1046618 - DNA, 33 bp, Homo sapien
tcacctccacacttgcgaagggctttgtacctt

SEQ ID NO: 1046619 - DNA, 33 bp, Homo sapien
aattggccacacgctcacatatgaggtcatcag

SEQ ID NO: 1046620 - DNA, 33 bp, Homo sapien
aattggccacacgctcgcatatgaggtcatcag

SEQ ID NO: 1046621 - DNA, 33 bp, Homo sapien
agtgttgatctgaataacatcaaccctttatag

SEQ ID NO: 1046622 - DNA, 33 bp, Homo sapien
agtgttgatctgaatagcatcaaccctttatag

SEQ ID NO: 1046623 - DNA, 33 bp, Homo sapien
agagatggagaagccaagagagagaagctgagc

SEQ ID NO: 1046624 - DNA, 33 bp, Homo sapien
agagatggagaagccaggagagagaagctgagc

SEQ ID NO: 1046625 - DNA, 33 bp, Homo sapien
cacaaggttgttacaaagatgaaaagcacacat

SEQ ID NO: 1046626 - DNA, 33 bp, Homo sapien
cacaaggttgttacaaggatgaaaagcacacat

SEQ ID NO: 1046627 - DNA, 33 bp, Homo sapien
ctagcacccaaatagacctcttagtgagagtaa

SEQ ID NO: 1046628 - DNA, 33 bp, Homo sapien
ctagcacccaaatagatctcttagtgagagtaa

SEQ ID NO: 1046629 - DNA, 33 bp, Homo sapien
catgctggacaaaccacacaggcccaggagcaa

SEQ ID NO: 1046630 - DNA, 33 bp, Homo sapien
catgctggacaaaccatacaggcccaggagcaa

SEQ ID NO: 1046631 - DNA, 33 bp, Homo sapien
acttgttagccgtgtcacacgtgccattttcag

SEQ ID NO: 1046632 - DNA, 33 bp, Homo sapien
acttgttagccgtgtcgcacgtgccattttcag

SEQ ID NO: 1046633 - DNA, 33 bp, Homo sapien
tagtcaacaaatcaagaaaggccagacactgag

SEQ ID NO: 1046634 - DNA, 33 bp, Homo sapien
tagtcaacaaatcaaggaaggccagacactgag

SEQ ID NO: 1046635 - DNA, 33 bp, Homo sapien
actccaagctcctggtaaaaatataaaacataa

SEQ ID NO: 1046636 - DNA, 33 bp, Homo sapien
actccaagctcctggtgaaaatataaaacataa

SEQ ID NO: 1046637 - DNA, 33 bp, Homo sapien
atgataaatgctaccacgcattcagggacaaaa

SEQ ID NO: 1046638 - DNA, 33 bp, Homo sapien
atgataaatgctaccatgcattcagggacaaaa

SEQ ID NO: 1046639 - DNA, 33 bp, Homo sapien
tgtaatgactccagcacgaaaagctcccagcca

SEQ ID NO: 1046640 - DNA, 33 bp, Homo sapien
tgtaatgactccagcatgaaaagctcccagcca

SEQ ID NO: 1046641 - DNA, 33 bp, Homo sapien
gctctggtccaaccccaggagagactgcagggt

SEQ ID NO: 1046642 - DNA, 33 bp, Homo sapien
gctctggtccaacccccggagagactgcagggt

SEQ ID NO: 1046643 - DNA, 33 bp, Homo sapien
agtgtattgctgctagaagtgttgcttcccaga

SEQ ID NO: 1046644 - DNA, 33 bp, Homo sapien
agtgtattgctgctaggagtgttgcttcccaga

SEQ ID NO: 1046645 - DNA, 33 bp, Homo sapien
tacctttggacacccaatatatggctaaatttc

SEQ ID NO: 1046646 - DNA, 33 bp, Homo sapien
tacctttggacacccagtatatggctaaatttc

SEQ ID NO: 1046647 - DNA, 33 bp, Homo sapien
cgctggaaatcgaggacagcactaactaggaca

SEQ ID NO: 1046648 - DNA, 33 bp, Homo sapien
cgctggaaatcgaggatagcactaactaggaca

SEQ ID NO: 1046649 - DNA, 33 bp, Homo sapien
aggtcagagactcccaatgactaatctgctagt

SEQ ID NO: 1046650 - DNA, 33 bp, Homo sapien
aggtcagagactcccagtgactaatctgctagt

SEQ ID NO: 1046651 - DNA, 33 bp, Homo sapien
ctaggattttgtggaccgcaaggtaaagatgga

SEQ ID NO: 1046652 - DNA, 33 bp, Homo sapien
ctaggattttgtggactgcaaggtaaagatgga

SEQ ID NO: 1046653 - DNA, 33 bp, Homo sapien
tactgatgtgctgaaaaaatattatgaagcgaa

SEQ ID NO: 1046654 - DNA, 33 bp, Homo sapien
tactgatgtgctgaaagaatattatgaagcgaa

SEQ ID NO: 1046655 - DNA, 33 bp, Homo sapien
cctaaggtgacagggaaggacttttgaggtgac

SEQ ID NO: 1046656 - DNA, 33 bp, Homo sapien
cctaaggtgacagggagggacttttgaggtgac

SEQ ID NO: 1046657 - DNA, 33 bp, Homo sapien
cccctcaagtggccagaaccagttcccacaact

SEQ ID NO: 1046658 - DNA, 33 bp, Homo sapien
cccctcaagtggccaggaccagttcccacaact

SEQ ID NO: 1046659 - DNA, 33 bp, Homo sapien
tggctggtgcagctaacacatacctggaacgac

SEQ ID NO: 1046660 - DNA, 33 bp, Homo sapien
tggctggtgcagctaatacatacctggaacgac

SEQ ID NO: 1046661 - DNA, 33 bp, Homo sapien
gtttccctgctggtataaagaagggtaggctta

SEQ ID NO: 1046662 - DNA, 33 bp, Homo sapien
gtttccctgctggtatgaagaagggtaggctta

SEQ ID NO: 1046663 - DNA, 33 bp, Homo sapien
agagaacggcaagtgcaaaggctctgagggaaa

SEQ ID NO: 1046664 - DNA, 33 bp, Homo sapien
agagaacggcaagtgccaaggctctgagggaaa

SEQ ID NO: 1046665 - DNA, 33 bp, Homo sapien
cttagtgccacgggacaaggctgcctgttccca

SEQ ID NO: 1046666 - DNA, 33 bp, Homo sapien
cttagtgccacgggactaggctgcctgttccca

SEQ ID NO: 1046667 - DNA, 33 bp, Homo sapien
gagctaggttgaagccactgcccagtattgaaa

SEQ ID NO: 1046668 - DNA, 33 bp, Homo sapien
gagctaggttgaagccgctgcccagtattgaaa

SEQ ID NO: 1046669 - DNA, 33 bp, Homo sapien
ataaacatgtacatataacaaccagatcacatt

SEQ ID NO: 1046670 - DNA, 33 bp, Homo sapien
ataaacatgtacatatgacaaccagatcacatt

SEQ ID NO: 1046671 - DNA, 33 bp, Homo sapien
actctgttaataatgacgccaggacagcaggca

SEQ ID NO: 1046672 - DNA, 33 bp, Homo sapien
actctgttaataatgatgccaggacagcaggca

SEQ ID NO: 1046673 - DNA, 33 bp, Homo sapien
ggcatctattgccaccaactgtatggaatagtc

SEQ ID NO: 1046674 - DNA, 33 bp, Homo sapien
ggcatctattgccaccgactgtatggaatagtc

SEQ ID NO: 1046675 - DNA, 33 bp, Homo sapien
gaattcagctcgaagacgggtcagtggcttata

SEQ ID NO: 1046676 - DNA, 33 bp, Homo sapien
gaattcagctcgaagatgggtcagtggcttata

SEQ ID NO: 1046677 - DNA, 33 bp, Homo sapien
gaccgtgaggtgcctacgctagacaaaattata

SEQ ID NO: 1046678 - DNA, 33 bp, Homo sapien
gaccgtgaggtgcctatgctagacaaaattata

SEQ ID NO: 1046679 - DNA, 33 bp, Homo sapien
gtcatgatcaccagaaatgcctggacctgtggc

SEQ ID NO: 1046680 - DNA, 33 bp, Homo sapien
gtcatgatcaccagaagtgcctggacctgtggc

SEQ ID NO: 1046681 - DNA, 33 bp, Homo sapien
gcaaagcgctcttaggcaatgctcgttctgccc

SEQ ID NO: 1046682 - DNA, 33 bp, Homo sapien
gcaaagcgctcttaggtaatgctcgttctgccc

SEQ ID NO: 1046683 - DNA, 33 bp, Homo sapien
cagtcttccagaacaaatccctctgagctccta

SEQ ID NO: 1046684 - DNA, 33 bp, Homo sapien
cagtcttccagaacaagtccctctgagctccta

SEQ ID NO: 1046685 - DNA, 33 bp, Homo sapien
aacaaaaaaatgacataactgaccctatttaaa

SEQ ID NO: 1046686 - DNA, 33 bp, Homo sapien
aacaaaaaaatgacatcactgaccctatttaaa

SEQ ID NO: 1046687 - DNA, 33 bp, Homo sapien
atataaccaaaaaaggacacacctggatggttc

SEQ ID NO: 1046688 - DNA, 33 bp, Homo sapien
atataaccaaaaaaggtcacacctggatggttc

SEQ ID NO: 1046689 - DNA, 33 bp, Homo sapien
ataaatgagagtgtgcactaaggtttgatgagc

SEQ ID NO: 1046690 - DNA, 33 bp, Homo sapien
ataaatgagagtgtgcgctaaggtttgatgagc

SEQ ID NO: 1046691 - DNA, 33 bp, Homo sapien
ttggagattcattttccattcatagtttctttt

SEQ ID NO: 1046692 - DNA, 33 bp, Homo sapien
ttggagattcattttctattcatagtttctttt

SEQ ID NO: 1046693 - DNA, 33 bp, Homo sapien
gaatgagccagagttcaaatgcaagatgaaacg

SEQ ID NO: 1046694 - DNA, 33 bp, Homo sapien
gaatgagccagagttcgaatgcaagatgaaacg

SEQ ID NO: 1046695 - DNA, 33 bp, Homo sapien
cattttatagtgaggcaatacactgtaggttcc

SEQ ID NO: 1046696 - DNA, 33 bp, Homo sapien
cattttatagtgaggcgatacactgtaggttcc

SEQ ID NO: 1046697 - DNA, 33 bp, Homo sapien
tatcaatgacaaattgaatcaagaaaatgtggt

SEQ ID NO: 1046698 - DNA, 33 bp, Homo sapien
tatcaatgacaaattggatcaagaaaatgtggt

SEQ ID NO: 1046699 - DNA, 33 bp, Homo sapien
acggccaaaccatccacctcgactgattctgtg

SEQ ID NO: 1046700 - DNA, 33 bp, Homo sapien
acggccaaaccatccatctcgactgattctgtg

SEQ ID NO: 1046701 - DNA, 33 bp, Homo sapien
ggtggtattttgtgcccctcaccagctttccct

SEQ ID NO: 1046702 - DNA, 33 bp, Homo sapien
ggtggtattttgtgcctctcaccagctttccct

SEQ ID NO: 1046703 - DNA, 33 bp, Homo sapien
tccctccagctaccgaaaatgacagggcaggca

SEQ ID NO: 1046704 - DNA, 33 bp, Homo sapien
tccctccagctaccgacaatgacagggcaggca

SEQ ID NO: 1046705 - DNA, 33 bp, Homo sapien
acctaagaatgacaccagaaatgctggcatcag

SEQ ID NO: 1046706 - DNA, 33 bp, Homo sapien
acctaagaatgacaccggaaatgctggcatcag

SEQ ID NO: 1046707 - DNA, 33 bp, Homo sapien
agcacttttgttttcaaattattgcagtcacca

SEQ ID NO: 1046708 - DNA, 33 bp, Homo sapien
agcacttttgttttcacattattgcagtcacca

SEQ ID NO: 1046709 - DNA, 33 bp, Homo sapien
tcttgctcctctgaccacctactgaacttggag

SEQ ID NO: 1046710 - DNA, 33 bp, Homo sapien
tcttgctcctctgaccgcctactgaacttggag

SEQ ID NO: 1046711 - DNA, 33 bp, Homo sapien
aaagcaaagcagccaacaggtaagaggtgtcta

SEQ ID NO: 1046712 - DNA, 33 bp, Homo sapien
aaagcaaagcagccaagaggtaagaggtgtcta

SEQ ID NO: 1046713 - DNA, 33 bp, Homo sapien
aatgagctgaccacacagtgagttgttcttgag

SEQ ID NO: 1046714 - DNA, 33 bp, Homo sapien
aatgagctgaccacacggtgagttgttcttgag

SEQ ID NO: 1046715 - DNA, 33 bp, Homo sapien
atgagcgcttgagctcgcgtgactctgctccag

SEQ ID NO: 1046716 - DNA, 33 bp, Homo sapien
atgagcgcttgagctctcgtgactctgctccag

SEQ ID NO: 1046717 - DNA, 33 bp, Homo sapien
ttttagaggatgacaacgatggatgaagtcaag

SEQ ID NO: 1046718 - DNA, 33 bp, Homo sapien
ttttagaggatgacaatgatggatgaagtcaag

SEQ ID NO: 1046719 - DNA, 33 bp, Homo sapien
cacatacgggctttcaatccctcgctcacacca

SEQ ID NO: 1046720 - DNA, 33 bp, Homo sapien
cacatacgggctttcagtccctcgctcacacca

SEQ ID NO: 1046721 - DNA, 33 bp, Homo sapien
ctgtgccgccagtagacccaggtgccattgttg

SEQ ID NO: 1046722 - DNA, 33 bp, Homo sapien
ctgtgccgccagtagatccaggtgccattgttg

SEQ ID NO: 1046723 - DNA, 33 bp, Homo sapien
acaggtcacaatgtcaactgagtggcgtatggt

SEQ ID NO: 1046724 - DNA, 33 bp, Homo sapien
acaggtcacaatgtcatctgagtggcgtatggt

SEQ ID NO: 1046725 - DNA, 33 bp, Homo sapien
agccccgcaaaacagcagaacgacctagagttt

SEQ ID NO: 1046726 - DNA, 33 bp, Homo sapien
agccccgcaaaacagcggaacgacctagagttt

SEQ ID NO: 1046727 - DNA, 33 bp, Homo sapien
ggcttcataataataacgtagtcacaggatgta

SEQ ID NO: 1046728 - DNA, 33 bp, Homo sapien
ggcttcataataataatgtagtcacaggatgta

SEQ ID NO: 1046729 - DNA, 33 bp, Homo sapien
cgatttaatctcttggccagtgttggacaaaca

SEQ ID NO: 1046730 - DNA, 33 bp, Homo sapien
cgatttaatctcttggtcagtgttggacaaaca

SEQ ID NO: 1046731 - DNA, 33 bp, Homo sapien
cctcccaaaagttgtgcataacctgagtcgcac

SEQ ID NO: 1046732 - DNA, 33 bp, Homo sapien
cctcccaaaagttgtgtataacctgagtcgcac

SEQ ID NO: 1046733 - DNA, 33 bp, Homo sapien
acgaagttgccactcaatgaattggcgtctctt

SEQ ID NO: 1046734 - DNA, 33 bp, Homo sapien
acgaagttgccactcagtgaattggcgtctctt

SEQ ID NO: 1046735 - DNA, 33 bp, Homo sapien
tgtgtgagtgtatggcgctatgctatatatata

SEQ ID NO: 1046736 - DNA, 33 bp, Homo sapien
tgtgtgagtgtatggctctatgctatatatata

SEQ ID NO: 1046737 - DNA, 33 bp, Homo sapien
aggctgaacgggagtacatttgagatccagaaa

SEQ ID NO: 1046738 - DNA, 33 bp, Homo sapien
aggctgaacgggagtatatttgagatccagaaa

SEQ ID NO: 1046739 - DNA, 33 bp, Homo sapien
tagcagtgaattaacaaatcgtgcagtttccca

SEQ ID NO: 1046740 - DNA, 33 bp, Homo sapien
tagcagtgaattaacagatcgtgcagtttccca

SEQ ID NO: 1046741 - DNA, 33 bp, Homo sapien
actacaagcaacatcaatcatgacaccccatat

SEQ ID NO: 1046742 - DNA, 33 bp, Homo sapien
actacaagcaacatcagtcatgacaccccatat

SEQ ID NO: 1046743 - DNA, 33 bp, Homo sapien
gagctggatgagggaacgaatgagatgatggcc

SEQ ID NO: 1046744 - DNA, 33 bp, Homo sapien
gagctggatgagggaatgaatgagatgatggcc

SEQ ID NO: 1046745 - DNA, 33 bp, Homo sapien
cattgatttgttgaaacagaagggattgatttg

SEQ ID NO: 1046746 - DNA, 33 bp, Homo sapien
cattgatttgttgaaatagaagggattgatttg

SEQ ID NO: 1046747 - DNA, 33 bp, Homo sapien
aagggggagatggcaaaaagaaagagaatcatc

SEQ ID NO: 1046748 - DNA, 33 bp, Homo sapien
aagggggagatggcaacaagaaagagaatcatc

SEQ ID NO: 1046749 - DNA, 33 bp, Homo sapien
attttaatgagagtcacgaggaaggaaaggctc

SEQ ID NO: 1046750 - DNA, 33 bp, Homo sapien
attttaatgagagtcatgaggaaggaaaggctc

SEQ ID NO: 1046751 - DNA, 33 bp, Homo sapien
atactgctgttgaaagaagacgtgttatttcca

SEQ ID NO: 1046752 - DNA, 33 bp, Homo sapien
atactgctgttgaaaggagacgtgttatttcca

SEQ ID NO: 1046753 - DNA, 33 bp, Homo sapien
ttttgatataatctgccaaactgctaaccacaa

SEQ ID NO: 1046754 - DNA, 33 bp, Homo sapien
ttttgatataatctgcgaaactgctaaccacaa

SEQ ID NO: 1046755 - DNA, 33 bp, Homo sapien
tatcacttcatctgtaaatatttcagtacgtat

SEQ ID NO: 1046756 - DNA, 33 bp, Homo sapien
tatcacttcatctgtagatatttcagtacgtat

SEQ ID NO: 1046757 - DNA, 33 bp, Homo sapien
tgctgataaagacataaccgacattgggcaatg

SEQ ID NO: 1046758 - DNA, 33 bp, Homo sapien
tgctgataaagacatacccgacattgggcaatg

SEQ ID NO: 1046759 - DNA, 33 bp, Homo sapien
tctatcaactctaagacgtttaatcgctcccag

SEQ ID NO: 1046760 - DNA, 33 bp, Homo sapien
tctatcaactctaagatgtttaatcgctcccag

SEQ ID NO: 1046761 - DNA, 33 bp, Homo sapien
atggaaaaaaaagtgacgtggctccattgtgcg

SEQ ID NO: 1046762 - DNA, 33 bp, Homo sapien
atggaaaaaaaagtgatgtggctccattgtgcg

SEQ ID NO: 1046763 - DNA, 33 bp, Homo sapien
acatagtggctcatgactacatttatttactta

SEQ ID NO: 1046764 - DNA, 33 bp, Homo sapien
acatagtggctcatgattacatttatttactta

SEQ ID NO: 1046765 - DNA, 33 bp, Homo sapien
ttgttgtttcttccccaacccgtgacctcagac

SEQ ID NO: 1046766 - DNA, 33 bp, Homo sapien
ttgttgtttcttccccgacccgtgacctcagac

SEQ ID NO: 1046767 - DNA, 33 bp, Homo sapien
ttgcactctttgcctcactcaatctctcgtcaa

SEQ ID NO: 1046768 - DNA, 33 bp, Homo sapien
ttgcactctttgcctcgctcaatctctcgtcaa

SEQ ID NO: 1046769 - DNA, 33 bp, Homo sapien
ttgtctgatgaatgacgatcaaacttactgtca

SEQ ID NO: 1046770 - DNA, 33 bp, Homo sapien
ttgtctgatgaatgactatcaaacttactgtca

SEQ ID NO: 1046771 - DNA, 33 bp, Homo sapien
gggttttatttcctaaactgctccattgaactg

SEQ ID NO: 1046772 - DNA, 33 bp, Homo sapien
gggttttatttcctaatctgctccattgaactg

SEQ ID NO: 1046773 - DNA, 33 bp, Homo sapien
aaattggggaccaacaaacatcttcttgaaggc

SEQ ID NO: 1046774 - DNA, 33 bp, Homo sapien
aaattggggaccaacagacatcttcttgaaggc

SEQ ID NO: 1046775 - DNA, 33 bp, Homo sapien
tgttgtatttacggaaatgatttttgtagctca

SEQ ID NO: 1046776 - DNA, 33 bp, Homo sapien
tgttgtatttacggaagtgatttttgtagctca

SEQ ID NO: 1046777 - DNA, 33 bp, Homo sapien
atagtttttgtgaacaagtaaatagtgtgtgca

SEQ ID NO: 1046778 - DNA, 33 bp, Homo sapien
atagtttttgtgaacatgtaaatagtgtgtgca

SEQ ID NO: 1046779 - DNA, 33 bp, Homo sapien
agctttaataagtgcaagtccatgctgttgggt

SEQ ID NO: 1046780 - DNA, 33 bp, Homo sapien
agctttaataagtgcacgtccatgctgttgggt

SEQ ID NO: 1046781 - DNA, 33 bp, Homo sapien
ttatggatggttgagccgaaacttctcctcacc

SEQ ID NO: 1046782 - DNA, 33 bp, Homo sapien
ttatggatggttgagctgaaacttctcctcacc

SEQ ID NO: 1046783 - DNA, 33 bp, Homo sapien
ctcttggtgtggttaccgaagggttaaagacaa

SEQ ID NO: 1046784 - DNA, 33 bp, Homo sapien
ctcttggtgtggttactgaagggttaaagacaa

SEQ ID NO: 1046785 - DNA, 33 bp, Homo sapien
aaaattagagatttaacgtctccgcaagctaga

SEQ ID NO: 1046786 - DNA, 33 bp, Homo sapien
aaaattagagatttaatgtctccgcaagctaga

SEQ ID NO: 1046787 - DNA, 33 bp, Homo sapien
ggctagaaatgcaacacggctgcctgtctaaaa

SEQ ID NO: 1046788 - DNA, 33 bp, Homo sapien
ggctagaaatgcaacatggctgcctgtctaaaa

SEQ ID NO: 1046789 - DNA, 33 bp, Homo sapien
tttgcacacattataccgccaaattccaacaac

SEQ ID NO: 1046790 - DNA, 33 bp, Homo sapien
tttgcacacattatactgccaaattccaacaac

SEQ ID NO: 1046791 - DNA, 33 bp, Homo sapien
taagcatgtcagataacaaattgataaatgtaa

SEQ ID NO: 1046792 - DNA, 33 bp, Homo sapien
taagcatgtcagataataaattgataaatgtaa

SEQ ID NO: 1046793 - DNA, 33 bp, Homo sapien
tctaatatactgtagaaattgttctttttaatc

SEQ ID NO: 1046794 - DNA, 33 bp, Homo sapien
tctaatatactgtagagattgttctttttaatc

SEQ ID NO: 1046795 - DNA, 33 bp, Homo sapien
atgccacaaaggaaagacataggtgctgaaagc

SEQ ID NO: 1046796 - DNA, 33 bp, Homo sapien
atgccacaaaggaaagtcataggtgctgaaagc

SEQ ID NO: 1046797 - DNA, 33 bp, Homo sapien
taagctgaagtcacaacgcgaataaacacgctt

SEQ ID NO: 1046798 - DNA, 33 bp, Homo sapien
taagctgaagtcacaatgcgaataaacacgctt

SEQ ID NO: 1046799 - DNA, 33 bp, Homo sapien
atttacggttactatacactggtatctttctca

SEQ ID NO: 1046800 - DNA, 33 bp, Homo sapien
atttacggttactatatactggtatctttctca

SEQ ID NO: 1046801 - DNA, 33 bp, Homo sapien
tgtgatgcattgacgcaaccaatatgcaaggaa

SEQ ID NO: 1046802 - DNA, 33 bp, Homo sapien
tgtgatgcattgacgcgaccaatatgcaaggaa

SEQ ID NO: 1046803 - DNA, 33 bp, Homo sapien
agggctacgacaagaacatggaggtcaacctgg

SEQ ID NO: 1046804 - DNA, 33 bp, Homo sapien
agggctacgacaagaatatggaggtcaacctgg

SEQ ID NO: 1046805 - DNA, 33 bp, Homo sapien
ttagtgttcatatttacacgtggtcatttttaa

SEQ ID NO: 1046806 - DNA, 33 bp, Homo sapien
ttagtgttcatatttatacgtggtcatttttaa

SEQ ID NO: 1046807 - DNA, 33 bp, Homo sapien
tccagtcaaccactacagagaggaaaaacattc

SEQ ID NO: 1046808 - DNA, 33 bp, Homo sapien
tccagtcaaccactacggagaggaaaaacattc

SEQ ID NO: 1046809 - DNA, 33 bp, Homo sapien
ttaggtcaagcactcaactacatggcccaaggt

SEQ ID NO: 1046810 - DNA, 33 bp, Homo sapien
ttaggtcaagcactcatctacatggcccaaggt

SEQ ID NO: 1046811 - DNA, 33 bp, Homo sapien
tctgaaaacttggagaaaagtaggagaagcaga

SEQ ID NO: 1046812 - DNA, 33 bp, Homo sapien
tctgaaaacttggagagaagtaggagaagcaga

SEQ ID NO: 1046813 - DNA, 33 bp, Homo sapien
cacaccctctgacagaactattgatttcccctc

SEQ ID NO: 1046814 - DNA, 33 bp, Homo sapien
cacaccctctgacagatctattgatttcccctc

SEQ ID NO: 1046815 - DNA, 33 bp, Homo sapien
ttgcataaggacaaatgacagagacaatttcct

SEQ ID NO: 1046816 - DNA, 33 bp, Homo sapien
ttgcataaggacaaattacagagacaatttcct

SEQ ID NO: 1046817 - DNA, 33 bp, Homo sapien
ccaaaccatatcatcaactctctctccacctct

SEQ ID NO: 1046818 - DNA, 33 bp, Homo sapien
ccaaaccatatcatcatctctctctccacctct

SEQ ID NO: 1046819 - DNA, 33 bp, Homo sapien
acggggtctacagttcaaaatgagatttgggtg

SEQ ID NO: 1046820 - DNA, 33 bp, Homo sapien
acggggtctacagttcgaaatgagatttgggtg

SEQ ID NO: 1046821 - DNA, 33 bp, Homo sapien
aaggatatttgcttagccacaataaccactata

SEQ ID NO: 1046822 - DNA, 33 bp, Homo sapien
aaggatatttgcttagtcacaataaccactata

SEQ ID NO: 1046823 - DNA, 33 bp, Homo sapien
ttataagcctcaggacacaaatgactcccgacc

SEQ ID NO: 1046824 - DNA, 33 bp, Homo sapien
ttataagcctcaggacgcaaatgactcccgacc

SEQ ID NO: 1046825 - DNA, 33 bp, Homo sapien
aaatgccaagaatttccaagaaggccaatctct

SEQ ID NO: 1046826 - DNA, 33 bp, Homo sapien
aaatgccaagaatttctaagaaggccaatctct

SEQ ID NO: 1046827 - DNA, 33 bp, Homo sapien
acaaacaccggtttccacacaccttcagggagg

SEQ ID NO: 1046828 - DNA, 33 bp, Homo sapien
acaaacaccggtttccgcacaccttcagggagg

SEQ ID NO: 1046829 - DNA, 33 bp, Homo sapien
gacataagtgaaaaaacgggagtaggtgaatcc

SEQ ID NO: 1046830 - DNA, 33 bp, Homo sapien
gacataagtgaaaaaatgggagtaggtgaatcc

SEQ ID NO: 1046831 - DNA, 33 bp, Homo sapien
ctcctctacttttaagaacaccagttatatcgg

SEQ ID NO: 1046832 - DNA, 33 bp, Homo sapien
ctcctctacttttaaggacaccagttatatcgg

SEQ ID NO: 1046833 - DNA, 33 bp, Homo sapien
aaagggagtgaacagaaagatggtcaaatgcca

SEQ ID NO: 1046834 - DNA, 33 bp, Homo sapien
aaagggagtgaacagagagatggtcaaatgcca

SEQ ID NO: 1046835 - DNA, 33 bp, Homo sapien
gcatttttgctgcgagacacttccaagttgctg

SEQ ID NO: 1046836 - DNA, 33 bp, Homo sapien
gcatttttgctgcgaggcacttccaagttgctg

SEQ ID NO: 1046837 - DNA, 33 bp, Homo sapien
ctggagcttaagcatcccacaaaggtcttgcag

SEQ ID NO: 1046838 - DNA, 33 bp, Homo sapien
ctggagcttaagcatctcacaaaggtcttgcag

SEQ ID NO: 1046839 - DNA, 33 bp, Homo sapien
gtagaagagctcactaaaaagtagccatgtatc

SEQ ID NO: 1046840 - DNA, 33 bp, Homo sapien
gtagaagagctcactagaaagtagccatgtatc

SEQ ID NO: 1046841 - DNA, 33 bp, Homo sapien
tgctagctgaatgaccagacaagcaatgagtaa

SEQ ID NO: 1046842 - DNA, 33 bp, Homo sapien
tgctagctgaatgacccgacaagcaatgagtaa

SEQ ID NO: 1046843 - DNA, 33 bp, Homo sapien
aatccatcgccaggcaaccatgactagtcaatc

SEQ ID NO: 1046844 - DNA, 33 bp, Homo sapien
aatccatcgccaggcagccatgactagtcaatc

SEQ ID NO: 1046845 - DNA, 33 bp, Homo sapien
ctttgaattcataagacggtgaactagggcgac

SEQ ID NO: 1046846 - DNA, 33 bp, Homo sapien
ctttgaattcataagatggtgaactagggcgac

SEQ ID NO: 1046847 - DNA, 33 bp, Homo sapien
gaggaatctccagggccgacaactcaccgggac

SEQ ID NO: 1046848 - DNA, 33 bp, Homo sapien
gaggaatctccagggcggacaactcaccgggac

SEQ ID NO: 1046849 - DNA, 33 bp, Homo sapien
gcaagctgggcgcagcaatctttgtaacgaaag

SEQ ID NO: 1046850 - DNA, 33 bp, Homo sapien
gcaagctgggcgcagcgatctttgtaacgaaag

SEQ ID NO: 1046851 - DNA, 33 bp, Homo sapien
catctcccaagatgtgcactgcctacaacaaga

SEQ ID NO: 1046852 - DNA, 33 bp, Homo sapien
catctcccaagatgtgtactgcctacaacaaga

SEQ ID NO: 1046853 - DNA, 33 bp, Homo sapien
gcatgctctagcttcacggtaccgtctgctgga

SEQ ID NO: 1046854 - DNA, 33 bp, Homo sapien
gcatgctctagcttcatggtaccgtctgctgga

SEQ ID NO: 1046855 - DNA, 33 bp, Homo sapien
cagaggattcttgggcaaggacaaaattgcaat

SEQ ID NO: 1046856 - DNA, 33 bp, Homo sapien
cagaggattcttgggcgaggacaaaattgcaat

SEQ ID NO: 1046857 - DNA, 33 bp, Homo sapien
gccatgttggagtctccagcatacagaggcacc

SEQ ID NO: 1046858 - DNA, 33 bp, Homo sapien
gccatgttggagtctctagcatacagaggcacc

SEQ ID NO: 1046859 - DNA, 33 bp, Homo sapien
aagtttgagaagcaccaattgaaacctctccca

SEQ ID NO: 1046860 - DNA, 33 bp, Homo sapien
aagtttgagaagcaccgattgaaacctctccca

SEQ ID NO: 1046861 - DNA, 33 bp, Homo sapien
aggaaatgtctccaaacgggagcgattattttg

SEQ ID NO: 1046862 - DNA, 33 bp, Homo sapien
aggaaatgtctccaaatgggagcgattattttg

SEQ ID NO: 1046863 - DNA, 33 bp, Homo sapien
ccactgcagtattatacggcatagcctcactgt

SEQ ID NO: 1046864 - DNA, 33 bp, Homo sapien
ccactgcagtattatatggcatagcctcactgt

SEQ ID NO: 1046865 - DNA, 33 bp, Homo sapien
ggtcggtgagggtgaaaaactccttgaggccct

SEQ ID NO: 1046866 - DNA, 33 bp, Homo sapien
ggtcggtgagggtgaagaactccttgaggccct

SEQ ID NO: 1046867 - DNA, 33 bp, Homo sapien
tctacaagtacttctacgccatctccaacatcg

SEQ ID NO: 1046868 - DNA, 33 bp, Homo sapien
tctacaagtacttctatgccatctccaacatcg

SEQ ID NO: 1046869 - DNA, 33 bp, Homo sapien
acatcccaggtatccaataacgtcccaggtaac

SEQ ID NO: 1046870 - DNA, 33 bp, Homo sapien
acatcccaggtatccagtaacgtcccaggtaac

SEQ ID NO: 1046871 - DNA, 33 bp, Homo sapien
cactgcaggctttcaacgtccacccaaatctgt

SEQ ID NO: 1046872 - DNA, 33 bp, Homo sapien
cactgcaggctttcaatgtccacccaaatctgt

SEQ ID NO: 1046873 - DNA, 33 bp, Homo sapien
ctggaatccacacacaccgtcaaagtgaaacaa

SEQ ID NO: 1046874 - DNA, 33 bp, Homo sapien
ctggaatccacacacagcgtcaaagtgaaacaa

SEQ ID NO: 1046875 - DNA, 33 bp, Homo sapien
acaggataggacttaacgaggaaatgcacataa

SEQ ID NO: 1046876 - DNA, 33 bp, Homo sapien
acaggataggacttaatgaggaaatgcacataa

SEQ ID NO: 1046877 - DNA, 33 bp, Homo sapien
catgtcagactgtccacgtgcaaattctggatt

SEQ ID NO: 1046878 - DNA, 33 bp, Homo sapien
catgtcagactgtccaggtgcaaattctggatt

SEQ ID NO: 1046879 - DNA, 33 bp, Homo sapien
tgaccttacatggaaacggggttttgtggatgt

SEQ ID NO: 1046880 - DNA, 33 bp, Homo sapien
tgaccttacatggaaatggggttttgtggatgt

SEQ ID NO: 1046881 - DNA, 33 bp, Homo sapien
agctctgtgtgcagcaaccggcatggagcacct

SEQ ID NO: 1046882 - DNA, 33 bp, Homo sapien
agctctgtgtgcagcatccggcatggagcacct

SEQ ID NO: 1046883 - DNA, 33 bp, Homo sapien
gctttagctcttcagacggcagcaagaacgctc

SEQ ID NO: 1046884 - DNA, 33 bp, Homo sapien
gctttagctcttcagatggcagcaagaacgctc

SEQ ID NO: 1046885 - DNA, 33 bp, Homo sapien
ttctacagctcccaaacgccaggtctcataaca

SEQ ID NO: 1046886 - DNA, 33 bp, Homo sapien
ttctacagctcccaaatgccaggtctcataaca

SEQ ID NO: 1046887 - DNA, 33 bp, Homo sapien
cacaactgctagcaatcatgatgacctgcaggg

SEQ ID NO: 1046888 - DNA, 33 bp, Homo sapien
cacaactgctagcaatgatgatgacctgcaggg

SEQ ID NO: 1046889 - DNA, 33 bp, Homo sapien
tgatttatactgtgtcgcggtggccacctccga

SEQ ID NO: 1046890 - DNA, 33 bp, Homo sapien
tgatttatactgtgtctcggtggccacctccga

SEQ ID NO: 1046891 - DNA, 33 bp, Homo sapien
tgcaccatgtcagcaaaactttacctaacataa

SEQ ID NO: 1046892 - DNA, 33 bp, Homo sapien
tgcaccatgtcagcaagactttacctaacataa

SEQ ID NO: 1046893 - DNA, 33 bp, Homo sapien
tgaccataccggacccaaaatgcaccaagacca

SEQ ID NO: 1046894 - DNA, 33 bp, Homo sapien
tgaccataccggacccgaaatgcaccaagacca

SEQ ID NO: 1046895 - DNA, 33 bp, Homo sapien
caagctctgactttggaaagagaagaaccagac

SEQ ID NO: 1046896 - DNA, 33 bp, Homo sapien
caagctctgactttgggaagagaagaaccagac

SEQ ID NO: 1046897 - DNA, 33 bp, Homo sapien
gatatggggaaacacactcatggacgctcctaa

SEQ ID NO: 1046898 - DNA, 33 bp, Homo sapien
gatatggggaaacacagtcatggacgctcctaa

SEQ ID NO: 1046899 - DNA, 33 bp, Homo sapien
gagatttcaatgaagaccaaaagaaagcaatag

SEQ ID NO: 1046900 - DNA, 33 bp, Homo sapien
gagatttcaatgaagatcaaaagaaagcaatag

SEQ ID NO: 1046901 - DNA, 33 bp, Homo sapien
taattagtgtctgtaacgcttcaagtacttaca

SEQ ID NO: 1046902 - DNA, 33 bp, Homo sapien
taattagtgtctgtaaggcttcaagtacttaca

SEQ ID NO: 1046903 - DNA, 33 bp, Homo sapien
agtgcgtaatgggaaaactgagtgttacctttc

SEQ ID NO: 1046904 - DNA, 33 bp, Homo sapien
agtgcgtaatgggaaagctgagtgttacctttc

SEQ ID NO: 1046905 - DNA, 33 bp, Homo sapien
ttctgcatgacctttaaaactaggcagcattat

SEQ ID NO: 1046906 - DNA, 33 bp, Homo sapien
ttctgcatgacctttacaactaggcagcattat

SEQ ID NO: 1046907 - DNA, 33 bp, Homo sapien
cctacacagagtgcccaatggttttctaccctg

SEQ ID NO: 1046908 - DNA, 33 bp, Homo sapien
cctacacagagtgcccgatggttttctaccctg

SEQ ID NO: 1046909 - DNA, 33 bp, Homo sapien
attagcctaaatttaacgaataccagatgtatg

SEQ ID NO: 1046910 - DNA, 33 bp, Homo sapien
attagcctaaatttaatgaataccagatgtatg

SEQ ID NO: 1046911 - DNA, 33 bp, Homo sapien
ccctcctaccttgctccactttttgagtgcttt

SEQ ID NO: 1046912 - DNA, 33 bp, Homo sapien
ccctcctaccttgctctactttttgagtgcttt

SEQ ID NO: 1046913 - DNA, 33 bp, Homo sapien
tgcctcagtcagaaacaaaacaagaaagcttct

SEQ ID NO: 1046914 - DNA, 33 bp, Homo sapien
tgcctcagtcagaaacgaaacaagaaagcttct

SEQ ID NO: 1046915 - DNA, 33 bp, Homo sapien
aggcctatccttgtagcatgtattaataggcca

SEQ ID NO: 1046916 - DNA, 33 bp, Homo sapien
aggcctatccttgtagtatgtattaataggcca

SEQ ID NO: 1046917 - DNA, 33 bp, Homo sapien
agagattgtaatactgaaatgcttactcccaga

SEQ ID NO: 1046918 - DNA, 33 bp, Homo sapien
agagattgtaatactggaatgcttactcccaga

SEQ ID NO: 1046919 - DNA, 33 bp, Homo sapien
cctaaatttccctacacgtcagacttcccagtt

SEQ ID NO: 1046920 - DNA, 33 bp, Homo sapien
cctaaatttccctacatgtcagacttcccagtt

SEQ ID NO: 1046921 - DNA, 33 bp, Homo sapien
ttctgtgttacctctgcacttggtatattagca

SEQ ID NO: 1046922 - DNA, 33 bp, Homo sapien
ttctgtgttacctctggacttggtatattagca

SEQ ID NO: 1046923 - DNA, 33 bp, Homo sapien
agtgtattgatcaaagcagataacactatagaa

SEQ ID NO: 1046924 - DNA, 33 bp, Homo sapien
agtgtattgatcaaaggagataacactatagaa

SEQ ID NO: 1046925 - DNA, 33 bp, Homo sapien
actatatggaaagagaagttagatccctacctt

SEQ ID NO: 1046926 - DNA, 33 bp, Homo sapien
actatatggaaagagaggttagatccctacctt

SEQ ID NO: 1046927 - DNA, 33 bp, Homo sapien
cgggagtaaagggtgacgacctgacttagaaaa

SEQ ID NO: 1046928 - DNA, 33 bp, Homo sapien
cgggagtaaagggtgatgacctgacttagaaaa

SEQ ID NO: 1046929 - DNA, 33 bp, Homo sapien
ttgcaaaaaaacatcaagcttatatacttttac

SEQ ID NO: 1046930 - DNA, 33 bp, Homo sapien
ttgcaaaaaaacatcaggcttatatacttttac

SEQ ID NO: 1046931 - DNA, 33 bp, Homo sapien
aagggaggtaagtgtgaaggaaagagatgatgt

SEQ ID NO: 1046932 - DNA, 33 bp, Homo sapien
aagggaggtaagtgtggaggaaagagatgatgt

SEQ ID NO: 1046933 - DNA, 33 bp, Homo sapien
tctattgtggtcagcgaatatacttttcatgat

SEQ ID NO: 1046934 - DNA, 33 bp, Homo sapien
tctattgtggtcagcgcatatacttttcatgat

SEQ ID NO: 1046935 - DNA, 33 bp, Homo sapien
atggtttgttgagagaaacaaagggctcagaaa

SEQ ID NO: 1046936 - DNA, 33 bp, Homo sapien
atggtttgttgagagacacaaagggctcagaaa

SEQ ID NO: 1046937 - DNA, 33 bp, Homo sapien
cattcatgccatagtagatacgccgaccattag

SEQ ID NO: 1046938 - DNA, 33 bp, Homo sapien
cattcatgccatagtatatacgccgaccattag

SEQ ID NO: 1046939 - DNA, 33 bp, Homo sapien
acaccgacttgattcaatcactcctattaaata

SEQ ID NO: 1046940 - DNA, 33 bp, Homo sapien
acaccgacttgattcagtcactcctattaaata

SEQ ID NO: 1046941 - DNA, 33 bp, Homo sapien
tctagagtctttgcatcaggttacaagagacca

SEQ ID NO: 1046942 - DNA, 33 bp, Homo sapien
tctagagtctttgcattaggttacaagagacca

SEQ ID NO: 1046943 - DNA, 33 bp, Homo sapien
tttctagcaatccatacagtgtggctcaataat

SEQ ID NO: 1046944 - DNA, 33 bp, Homo sapien
tttctagcaatccatagagtgtggctcaataat

SEQ ID NO: 1046945 - DNA, 33 bp, Homo sapien
tccatcttcacctggacgaaaggagatgaggaa

SEQ ID NO: 1046946 - DNA, 33 bp, Homo sapien
tccatcttcacctggatgaaaggagatgaggaa

SEQ ID NO: 1046947 - DNA, 33 bp, Homo sapien
gtggatgttttttctcggactgctagagattgc

SEQ ID NO: 1046948 - DNA, 33 bp, Homo sapien
gtggatgttttttctctgactgctagagattgc

SEQ ID NO: 1046949 - DNA, 33 bp, Homo sapien
ctcctggtggcaggagcagggatcacgtccaag

SEQ ID NO: 1046950 - DNA, 33 bp, Homo sapien
ctcctggtggcaggagtagggatcacgtccaag

SEQ ID NO: 1046951 - DNA, 33 bp, Homo sapien
gccagctaggatctgcaagtagaacaaacttca

SEQ ID NO: 1046952 - DNA, 33 bp, Homo sapien
gccagctaggatctgcgagtagaacaaacttca

SEQ ID NO: 1046953 - DNA, 33 bp, Homo sapien
catgtaccatcatacagagctatttttttgtat

SEQ ID NO: 1046954 - DNA, 33 bp, Homo sapien
catgtaccatcatacatagctatttttttgtat

SEQ ID NO: 1046955 - DNA, 33 bp, Homo sapien
cacctgtctcgttcaacggagcctaggatagta

SEQ ID NO: 1046956 - DNA, 33 bp, Homo sapien
cacctgtctcgttcaatggagcctaggatagta

SEQ ID NO: 1046957 - DNA, 33 bp, Homo sapien
ttgtagttggcagcaccgggctgtaccaggggt

SEQ ID NO: 1046958 - DNA, 33 bp, Homo sapien
ttgtagttggcagcactgggctgtaccaggggt

SEQ ID NO: 1046959 - DNA, 33 bp, Homo sapien
acatggtccccgagccagaaggaaggccgctga

SEQ ID NO: 1046960 - DNA, 33 bp, Homo sapien
acatggtccccgagccggaaggaaggccgctga

SEQ ID NO: 1046961 - DNA, 33 bp, Homo sapien
tttctccagtaggtataaattcactcatcttgg

SEQ ID NO: 1046962 - DNA, 33 bp, Homo sapien
tttctccagtaggtatgaattcactcatcttgg

SEQ ID NO: 1046963 - DNA, 33 bp, Homo sapien
ctccttggctccattacaaagatggaagtggcc

SEQ ID NO: 1046964 - DNA, 33 bp, Homo sapien
ctccttggctccattataaagatggaagtggcc

SEQ ID NO: 1046965 - DNA, 33 bp, Homo sapien
tgttcattcattcagcaaagatgcattgagcac

SEQ ID NO: 1046966 - DNA, 33 bp, Homo sapien
tgttcattcattcagcgaagatgcattgagcac

SEQ ID NO: 1046967 - DNA, 33 bp, Homo sapien
caccaatcaacaactcactatgtattctactga

SEQ ID NO: 1046968 - DNA, 33 bp, Homo sapien
caccaatcaacaactcgctatgtattctactga

SEQ ID NO: 1046969 - DNA, 33 bp, Homo sapien
cagggacaaaaaacgcaaggcttctccaaggca

SEQ ID NO: 1046970 - DNA, 33 bp, Homo sapien
cagggacaaaaaacgcgaggcttctccaaggca

SEQ ID NO: 1046971 - DNA, 33 bp, Homo sapien
tcccttagaaccaccacgcagcaaagaaagaaa

SEQ ID NO: 1046972 - DNA, 33 bp, Homo sapien
tcccttagaaccaccatgcagcaaagaaagaaa

SEQ ID NO: 1046973 - DNA, 33 bp, Homo sapien
gtatcctagacaggtcacaaactggaatgtgca

SEQ ID NO: 1046974 - DNA, 33 bp, Homo sapien
gtatcctagacaggtcgcaaactggaatgtgca

SEQ ID NO: 1046975 - DNA, 33 bp, Homo sapien
gctgcctcctacttcacgagctggcatttagca

SEQ ID NO: 1046976 - DNA, 33 bp, Homo sapien
gctgcctcctacttcatgagctggcatttagca

SEQ ID NO: 1046977 - DNA, 33 bp, Homo sapien
ctctcccaaaccatgacgaccaaaaatatgtcc

SEQ ID NO: 1046978 - DNA, 33 bp, Homo sapien
ctctcccaaaccatgatgaccaaaaatatgtcc

SEQ ID NO: 1046979 - DNA, 33 bp, Homo sapien
ggatatcttctctcacgctttaaactcacagac

SEQ ID NO: 1046980 - DNA, 33 bp, Homo sapien
ggatatcttctctcactctttaaactcacagac

SEQ ID NO: 1046981 - DNA, 33 bp, Homo sapien
agagccaatggtctcaaagtaggctgtatgaac

SEQ ID NO: 1046982 - DNA, 33 bp, Homo sapien
agagccaatggtctcagagtaggctgtatgaac

SEQ ID NO: 1046983 - DNA, 33 bp, Homo sapien
cactctgtgattctcaagctatgttttgcctcc

SEQ ID NO: 1046984 - DNA, 33 bp, Homo sapien
cactctgtgattctcaggctatgttttgcctcc

SEQ ID NO: 1046985 - DNA, 33 bp, Homo sapien
tgaaatgcacccttcccatttagtgacaacctg

SEQ ID NO: 1046986 - DNA, 33 bp, Homo sapien
tgaaatgcacccttccgatttagtgacaacctg

SEQ ID NO: 1046987 - DNA, 33 bp, Homo sapien
tcttcttctgtaaaacagggatagaagcattcc

SEQ ID NO: 1046988 - DNA, 33 bp, Homo sapien
tcttcttctgtaaaacggggatagaagcattcc

SEQ ID NO: 1046989 - DNA, 33 bp, Homo sapien
aaacaaaccaatatgcaatcagcaggtataaca

SEQ ID NO: 1046990 - DNA, 33 bp, Homo sapien
aaacaaaccaatatgcgatcagcaggtataaca

SEQ ID NO: 1046991 - DNA, 33 bp, Homo sapien
gtcaaacacaatctgaagcccctgtgcacacct

SEQ ID NO: 1046992 - DNA, 33 bp, Homo sapien
gtcaaacacaatctgaggcccctgtgcacacct

SEQ ID NO: 1046993 - DNA, 33 bp, Homo sapien
gccggggttctctgtccgaagagtgaataagaa

SEQ ID NO: 1046994 - DNA, 33 bp, Homo sapien
gccggggttctctgtctgaagagtgaataagaa

SEQ ID NO: 1046995 - DNA, 33 bp, Homo sapien
ttgcttgagtctgggacattaaagctgcagtga

SEQ ID NO: 1046996 - DNA, 33 bp, Homo sapien
ttgcttgagtctgggagattaaagctgcagtga

SEQ ID NO: 1046997 - DNA, 33 bp, Homo sapien
caggactgtgttcagaagtaattcaggcttggg

SEQ ID NO: 1046998 - DNA, 33 bp, Homo sapien
caggactgtgttcagaggtaattcaggcttggg

SEQ ID NO: 1046999 - DNA, 33 bp, Homo sapien
ggactcccacccttccagctgcagtgtcttcag

SEQ ID NO: 1047000 - DNA, 33 bp, Homo sapien
ggactcccacccttccggctgcagtgtcttcag

SEQ ID NO: 1047001 - DNA, 33 bp, Homo sapien
cctcactaaatgagcacggaaaaggtaggaatg

SEQ ID NO: 1047002 - DNA, 33 bp, Homo sapien
cctcactaaatgagcatggaaaaggtaggaatg

SEQ ID NO: 1047003 - DNA, 33 bp, Homo sapien
cccaccatgcactgggaacatctagcatttccc

SEQ ID NO: 1047004 - DNA, 33 bp, Homo sapien
cccaccatgcactggggacatctagcatttccc

SEQ ID NO: 1047005 - DNA, 33 bp, Homo sapien
ggtttattataactcacatatagcccaatttac

SEQ ID NO: 1047006 - DNA, 33 bp, Homo sapien
ggtttattataactcatatatagcccaatttac

SEQ ID NO: 1047007 - DNA, 33 bp, Homo sapien
tgtgtgctgagcgagacaaagaggattccaggg

SEQ ID NO: 1047008 - DNA, 33 bp, Homo sapien
tgtgtgctgagcgagagaaagaggattccaggg

SEQ ID NO: 1047009 - DNA, 33 bp, Homo sapien
aaagaaaatcaacatgcaagccacagcatatac

SEQ ID NO: 1047010 - DNA, 33 bp, Homo sapien
aaagaaaatcaacatgtaagccacagcatatac

SEQ ID NO: 1047011 - DNA, 33 bp, Homo sapien
gggaaaagcgcttccaaaaaagttgagcctgtc

SEQ ID NO: 1047012 - DNA, 33 bp, Homo sapien
gggaaaagcgcttccagaaaagttgagcctgtc

SEQ ID NO: 1047013 - DNA, 33 bp, Homo sapien
agttatttttcacaagcctcctctgacaagaac

SEQ ID NO: 1047014 - DNA, 33 bp, Homo sapien
agttatttttcacaaggctcctctgacaagaac

SEQ ID NO: 1047015 - DNA, 33 bp, Homo sapien
cagatgggaagatgaaatgctctaaacccaagc

SEQ ID NO: 1047016 - DNA, 33 bp, Homo sapien
cagatgggaagatgaactgctctaaacccaagc

SEQ ID NO: 1047017 - DNA, 33 bp, Homo sapien
cagacagctgtttatcaaacacccactctgaga

SEQ ID NO: 1047018 - DNA, 33 bp, Homo sapien
cagacagctgtttatcgaacacccactctgaga

SEQ ID NO: 1047019 - DNA, 33 bp, Homo sapien
tggcttcaaaacccacactcctagcactgtacc

SEQ ID NO: 1047020 - DNA, 33 bp, Homo sapien
tggcttcaaaacccacgctcctagcactgtacc

SEQ ID NO: 1047021 - DNA, 33 bp, Homo sapien
tccacagtagtgctccaatctcttgctccaggc

SEQ ID NO: 1047022 - DNA, 33 bp, Homo sapien
tccacagtagtgctccgatctcttgctccaggc

SEQ ID NO: 1047023 - DNA, 33 bp, Homo sapien
aggcgctaagccagggaaagatgcggtgagggc

SEQ ID NO: 1047024 - DNA, 33 bp, Homo sapien
aggcgctaagccagggcaagatgcggtgagggc

SEQ ID NO: 1047025 - DNA, 33 bp, Homo sapien
ctgtttcagaggttcgaatggagcgccggggct

SEQ ID NO: 1047026 - DNA, 33 bp, Homo sapien
ctgtttcagaggttcggatggagcgccggggct

SEQ ID NO: 1047027 - DNA, 33 bp, Homo sapien
ttccgcgggtactcgcaacaatgatggaggctg

SEQ ID NO: 1047028 - DNA, 33 bp, Homo sapien
ttccgcgggtactcgcgacaatgatggaggctg

SEQ ID NO: 1047029 - DNA, 33 bp, Homo sapien
gtgaagaaactaagaaatgatcaacacaggaca

SEQ ID NO: 1047030 - DNA, 33 bp, Homo sapien
gtgaagaaactaagaagtgatcaacacaggaca

SEQ ID NO: 1047031 - DNA, 33 bp, Homo sapien
attttcataagaaaacaatgtcctgtgttgatc

SEQ ID NO: 1047032 - DNA, 33 bp, Homo sapien
attttcataagaaaacgatgtcctgtgttgatc

SEQ ID NO: 1047033 - DNA, 33 bp, Homo sapien
atagaagacatgtgacacgttagtagaaatagt

SEQ ID NO: 1047034 - DNA, 33 bp, Homo sapien
atagaagacatgtgacgcgttagtagaaatagt

SEQ ID NO: 1047035 - DNA, 33 bp, Homo sapien
gactagagttttgacccaacaacttggatctta

SEQ ID NO: 1047036 - DNA, 33 bp, Homo sapien
gactagagttttgaccgaacaacttggatctta

SEQ ID NO: 1047037 - DNA, 33 bp, Homo sapien
cttattttaagatctcacaatgccagcaacggc

SEQ ID NO: 1047038 - DNA, 33 bp, Homo sapien
cttattttaagatctcgcaatgccagcaacggc

SEQ ID NO: 1047039 - DNA, 33 bp, Homo sapien
tgtgaaagttcctttacctctctaagtctcagt

SEQ ID NO: 1047040 - DNA, 33 bp, Homo sapien
tgtgaaagttcctttatctctctaagtctcagt

SEQ ID NO: 1047041 - DNA, 33 bp, Homo sapien
tcacctcaccttagtacgaaacgagatggataa

SEQ ID NO: 1047042 - DNA, 33 bp, Homo sapien
tcacctcaccttagtatgaaacgagatggataa

SEQ ID NO: 1047043 - DNA, 33 bp, Homo sapien
tttatgtatcttttcaactagtcaccacccaaa

SEQ ID NO: 1047044 - DNA, 33 bp, Homo sapien
tttatgtatcttttcacctagtcaccacccaaa

SEQ ID NO: 1047045 - DNA, 33 bp, Homo sapien
tgctagaatggtgagacactagagagagtagag

SEQ ID NO: 1047046 - DNA, 33 bp, Homo sapien
tgctagaatggtgagagactagagagagtagag

SEQ ID NO: 1047047 - DNA, 33 bp, Homo sapien
gtgtggacttttagaaatgatactgctctgggt

SEQ ID NO: 1047048 - DNA, 33 bp, Homo sapien
gtgtggacttttagaagtgatactgctctgggt

SEQ ID NO: 1047049 - DNA, 33 bp, Homo sapien
gcttgagcttcacagacgtgccttgtaaaaatt

SEQ ID NO: 1047050 - DNA, 33 bp, Homo sapien
gcttgagcttcacagatgtgccttgtaaaaatt

SEQ ID NO: 1047051 - DNA, 33 bp, Homo sapien
gacaaaatctacgcacaggaaagaccagaaaga

SEQ ID NO: 1047052 - DNA, 33 bp, Homo sapien
gacaaaatctacgcacgggaaagaccagaaaga

SEQ ID NO: 1047053 - DNA, 33 bp, Homo sapien
gactgtgggctagagcagacttgattcagggaa

SEQ ID NO: 1047054 - DNA, 33 bp, Homo sapien
gactgtgggctagagccgacttgattcagggaa

SEQ ID NO: 1047055 - DNA, 33 bp, Homo sapien
gtccctcacagttccccatgttctaatttttga

SEQ ID NO: 1047056 - DNA, 33 bp, Homo sapien
gtccctcacagttccctatgttctaatttttga

SEQ ID NO: 1047057 - DNA, 33 bp, Homo sapien
tcaaggaaaccagacacaaaaacgtgaaagctg

SEQ ID NO: 1047058 - DNA, 33 bp, Homo sapien
tcaaggaaaccagacagaaaaacgtgaaagctg

SEQ ID NO: 1047059 - DNA, 33 bp, Homo sapien
tgagcatctctgtacccgctggcaagaaattag

SEQ ID NO: 1047060 - DNA, 33 bp, Homo sapien
tgagcatctctgtacctgctggcaagaaattag

SEQ ID NO: 1047061 - DNA, 33 bp, Homo sapien
gtgcttagctttggcactaacgttgttttgttc

SEQ ID NO: 1047062 - DNA, 33 bp, Homo sapien
gtgcttagctttggcagtaacgttgttttgttc

SEQ ID NO: 1047063 - DNA, 33 bp, Homo sapien
aagcactttacacaaactctctcaccgtaaagc

SEQ ID NO: 1047064 - DNA, 33 bp, Homo sapien
aagcactttacacaaattctctcaccgtaaagc

SEQ ID NO: 1047065 - DNA, 33 bp, Homo sapien
atttatctttagttgtaaaacatgttaagttag

SEQ ID NO: 1047066 - DNA, 33 bp, Homo sapien
atttatctttagttgtgaaacatgttaagttag

SEQ ID NO: 1047067 - DNA, 33 bp, Homo sapien
tcatattaacatttcaactaaatggctgcttat

SEQ ID NO: 1047068 - DNA, 33 bp, Homo sapien
tcatattaacatttcagctaaatggctgcttat

SEQ ID NO: 1047069 - DNA, 33 bp, Homo sapien
cgtgggtataaccggacgaaacctgtgtgtgca

SEQ ID NO: 1047070 - DNA, 33 bp, Homo sapien
cgtgggtataaccggatgaaacctgtgtgtgca

SEQ ID NO: 1047071 - DNA, 33 bp, Homo sapien
ctggagaaaattcctacgccctgttcccattcc

SEQ ID NO: 1047072 - DNA, 33 bp, Homo sapien
ctggagaaaattcctatgccctgttcccattcc

SEQ ID NO: 1047073 - DNA, 33 bp, Homo sapien
gtctctgcctgattgccgattacaggctacaca

SEQ ID NO: 1047074 - DNA, 33 bp, Homo sapien
gtctctgcctgattgcggattacaggctacaca

SEQ ID NO: 1047075 - DNA, 33 bp, Homo sapien
gccagtctgtcctacacagcactgtatcccctg

SEQ ID NO: 1047076 - DNA, 33 bp, Homo sapien
gccagtctgtcctacatagcactgtatcccctg

SEQ ID NO: 1047077 - DNA, 33 bp, Homo sapien
tcattcctgaaacaaacgaaccttcctcatggc

SEQ ID NO: 1047078 - DNA, 33 bp, Homo sapien
tcattcctgaaacaaatgaaccttcctcatggc

SEQ ID NO: 1047079 - DNA, 33 bp, Homo sapien
aatgctaataaaagtacgcaaaaatgcaaggta

SEQ ID NO: 1047080 - DNA, 33 bp, Homo sapien
aatgctaataaaagtatgcaaaaatgcaaggta

SEQ ID NO: 1047081 - DNA, 33 bp, Homo sapien
atttgtacagttctgcaaagagagcagtattcc

SEQ ID NO: 1047082 - DNA, 33 bp, Homo sapien
atttgtacagttctgccaagagagcagtattcc

SEQ ID NO: 1047083 - DNA, 33 bp, Homo sapien
gccaacttgcttgagtaacactgatgaaaaaag

SEQ ID NO: 1047084 - DNA, 33 bp, Homo sapien
gccaacttgcttgagtgacactgatgaaaaaag

SEQ ID NO: 1047085 - DNA, 33 bp, Homo sapien
tgataatgggaaactgaaggaagccacgtggac

SEQ ID NO: 1047086 - DNA, 33 bp, Homo sapien
tgataatgggaaactggaggaagccacgtggac

SEQ ID NO: 1047087 - DNA, 33 bp, Homo sapien
cttgagtaaagaactgaatatctaggaagaaag

SEQ ID NO: 1047088 - DNA, 33 bp, Homo sapien
cttgagtaaagaactggatatctaggaagaaag

SEQ ID NO: 1047089 - DNA, 33 bp, Homo sapien
tggtgcttaagagaatgacaatactggttttat

SEQ ID NO: 1047090 - DNA, 33 bp, Homo sapien
tggtgcttaagagaattacaatactggttttat

SEQ ID NO: 1047091 - DNA, 33 bp, Homo sapien
aaataaatttgacagaagagtagttatttgtaa

SEQ ID NO: 1047092 - DNA, 33 bp, Homo sapien
aaataaatttgacagacgagtagttatttgtaa

SEQ ID NO: 1047093 - DNA, 33 bp, Homo sapien
taataagcgtaatgcaagtctgaggttggacag

SEQ ID NO: 1047094 - DNA, 33 bp, Homo sapien
taataagcgtaatgcacgtctgaggttggacag

SEQ ID NO: 1047095 - DNA, 33 bp, Homo sapien
gtggatacaagtgtaaaattggtccagtgcaca

SEQ ID NO: 1047096 - DNA, 33 bp, Homo sapien
gtggatacaagtgtaacattggtccagtgcaca

SEQ ID NO: 1047097 - DNA, 33 bp, Homo sapien
gaactttctctgacaacgtgcccctgaccagga

SEQ ID NO: 1047098 - DNA, 33 bp, Homo sapien
gaactttctctgacaatgtgcccctgaccagga

SEQ ID NO: 1047099 - DNA, 33 bp, Homo sapien
aagtgacgagtgcaaccgaggggatggtttcaa

SEQ ID NO: 1047100 - DNA, 33 bp, Homo sapien
aagtgacgagtgcaactgaggggatggtttcaa

SEQ ID NO: 1047101 - DNA, 33 bp, Homo sapien
cactggtgaccactgaaggacgattatcaaaat

SEQ ID NO: 1047102 - DNA, 33 bp, Homo sapien
cactggtgaccactgagggacgattatcaaaat

SEQ ID NO: 1047103 - DNA, 33 bp, Homo sapien
acaaggtcatagtcccacctaacatgacgcagc

SEQ ID NO: 1047104 - DNA, 33 bp, Homo sapien
acaaggtcatagtcccgcctaacatgacgcagc

SEQ ID NO: 1047105 - DNA, 33 bp, Homo sapien
ctcagcatctgcttcccgagattgcatcctgac

SEQ ID NO: 1047106 - DNA, 33 bp, Homo sapien
ctcagcatctgcttcctgagattgcatcctgac

SEQ ID NO: 1047107 - DNA, 33 bp, Homo sapien
ggatgaagtggcctcacggaggctaatagaaga

SEQ ID NO: 1047108 - DNA, 33 bp, Homo sapien
ggatgaagtggcctcatggaggctaatagaaga

SEQ ID NO: 1047109 - DNA, 33 bp, Homo sapien
aacttggattggttgccgaactcctctgtccct

SEQ ID NO: 1047110 - DNA, 33 bp, Homo sapien
aacttggattggttgctgaactcctctgtccct

SEQ ID NO: 1047111 - DNA, 33 bp, Homo sapien
gaagcgatggagccacaactcaacccaggtgaa

SEQ ID NO: 1047112 - DNA, 33 bp, Homo sapien
gaagcgatggagccacgactcaacccaggtgaa

SEQ ID NO: 1047113 - DNA, 33 bp, Homo sapien
agaggagagaatagaaccatctcagaggactga

SEQ ID NO: 1047114 - DNA, 33 bp, Homo sapien
agaggagagaatagaatcatctcagaggactga

SEQ ID NO: 1047115 - DNA, 33 bp, Homo sapien
gttacacctacgtcccaggcttgccatgaagac

SEQ ID NO: 1047116 - DNA, 33 bp, Homo sapien
gttacacctacgtcccgggcttgccatgaagac

SEQ ID NO: 1047117 - DNA, 33 bp, Homo sapien
atcaagtttccattgtaaagagtaaaactttca

SEQ ID NO: 1047118 - DNA, 33 bp, Homo sapien
atcaagtttccattgtgaagagtaaaactttca

SEQ ID NO: 1047119 - DNA, 33 bp, Homo sapien
aaaacttagtttatgacagcctgttgctaggtg

SEQ ID NO: 1047120 - DNA, 33 bp, Homo sapien
aaaacttagtttatgagagcctgttgctaggtg

SEQ ID NO: 1047121 - DNA, 33 bp, Homo sapien
cccacatcatcctcaccggactgcctcttacac

SEQ ID NO: 1047122 - DNA, 33 bp, Homo sapien
cccacatcatcctcactggactgcctcttacac

SEQ ID NO: 1047123 - DNA, 33 bp, Homo sapien
ggaaagcaagcaggtcaccattagagaaaaaat

SEQ ID NO: 1047124 - DNA, 33 bp, Homo sapien
ggaaagcaagcaggtcgccattagagaaaaaat

SEQ ID NO: 1047125 - DNA, 33 bp, Homo sapien
aaaaacagccaaaggcagatcttgtccttgctg

SEQ ID NO: 1047126 - DNA, 33 bp, Homo sapien
aaaaacagccaaaggcggatcttgtccttgctg

SEQ ID NO: 1047127 - DNA, 33 bp, Homo sapien
aacaaacacaaagtaactcacacttcgatacat

SEQ ID NO: 1047128 - DNA, 33 bp, Homo sapien
aacaaacacaaagtaagtcacacttcgatacat

SEQ ID NO: 1047129 - DNA, 33 bp, Homo sapien
tgcctgtaaccctaaacgctatgaagtgtaggt

SEQ ID NO: 1047130 - DNA, 33 bp, Homo sapien
tgcctgtaaccctaaatgctatgaagtgtaggt

SEQ ID NO: 1047131 - DNA, 33 bp, Homo sapien
atccacagagcatatcagaacacgcgttcctgt

SEQ ID NO: 1047132 - DNA, 33 bp, Homo sapien
atccacagagcatatcggaacacgcgttcctgt

SEQ ID NO: 1047133 - DNA, 33 bp, Homo sapien
gttgctcagtggtatccagacacccaccctggg

SEQ ID NO: 1047134 - DNA, 33 bp, Homo sapien
gttgctcagtggtatctagacacccaccctggg

SEQ ID NO: 1047135 - DNA, 33 bp, Homo sapien
gcagggcctgcagggggcactcaactggagatg

SEQ ID NO: 1047136 - DNA, 33 bp, Homo sapien
gcagggcctgcaggggtcactcaactggagatg

SEQ ID NO: 1047137 - DNA, 33 bp, Homo sapien
caactggtaaaaacacagaaagatacagtctca

SEQ ID NO: 1047138 - DNA, 33 bp, Homo sapien
caactggtaaaaacacggaaagatacagtctca

SEQ ID NO: 1047139 - DNA, 33 bp, Homo sapien
gactcgaacgcaggtaaaggacagggagagttc

SEQ ID NO: 1047140 - DNA, 33 bp, Homo sapien
gactcgaacgcaggtagaggacagggagagttc

SEQ ID NO: 1047141 - DNA, 33 bp, Homo sapien
ctcctgtaaacataagactctgccccacaatct

SEQ ID NO: 1047142 - DNA, 33 bp, Homo sapien
ctcctgtaaacataaggctctgccccacaatct

SEQ ID NO: 1047143 - DNA, 33 bp, Homo sapien
agcctttcgggctgggaatatggttttagaaag

SEQ ID NO: 1047144 - DNA, 33 bp, Homo sapien
agcctttcgggctggggatatggttttagaaag

SEQ ID NO: 1047145 - DNA, 33 bp, Homo sapien
gaaaggatcacgggtcaagtgaaggaggctgtt

SEQ ID NO: 1047146 - DNA, 33 bp, Homo sapien
gaaaggatcacgggtcgagtgaaggaggctgtt

SEQ ID NO: 1047147 - DNA, 33 bp, Homo sapien
aatttgctaaataaaacggcataaacataaaga

SEQ ID NO: 1047148 - DNA, 33 bp, Homo sapien
aatttgctaaataaaatggcataaacataaaga

SEQ ID NO: 1047149 - DNA, 33 bp, Homo sapien
catcatgggcacgggcagcactgtctggtgtct

SEQ ID NO: 1047150 - DNA, 33 bp, Homo sapien
catcatgggcacgggctgcactgtctggtgtct

SEQ ID NO: 1047151 - DNA, 33 bp, Homo sapien
tcttgggcttttccgacggtctcattatcggag

SEQ ID NO: 1047152 - DNA, 33 bp, Homo sapien
tcttgggcttttccgatggtctcattatcggag

SEQ ID NO: 1047153 - DNA, 33 bp, Homo sapien
tgagcctcttagaagccgacttgagacaggcat

SEQ ID NO: 1047154 - DNA, 33 bp, Homo sapien
tgagcctcttagaagctgacttgagacaggcat

SEQ ID NO: 1047155 - DNA, 33 bp, Homo sapien
actttggcttatgaaaaaggcagccacgcattt

SEQ ID NO: 1047156 - DNA, 33 bp, Homo sapien
actttggcttatgaaagaggcagccacgcattt

SEQ ID NO: 1047157 - DNA, 33 bp, Homo sapien
actctctccagttctaagactcctctctacatc

SEQ ID NO: 1047158 - DNA, 33 bp, Homo sapien
actctctccagttctacgactcctctctacatc

SEQ ID NO: 1047159 - DNA, 33 bp, Homo sapien
agacagtatgtctcccacatggcatagagaatg

SEQ ID NO: 1047160 - DNA, 33 bp, Homo sapien
agacagtatgtctcccgcatggcatagagaatg

SEQ ID NO: 1047161 - DNA, 33 bp, Homo sapien
atccagctgtctttcacgaagccatatattaaa

SEQ ID NO: 1047162 - DNA, 33 bp, Homo sapien
atccagctgtctttcatgaagccatatattaaa

SEQ ID NO: 1047163 - DNA, 33 bp, Homo sapien
aggtagctgccctggcatatttaacaacatcag

SEQ ID NO: 1047164 - DNA, 33 bp, Homo sapien
aggtagctgccctggcgtatttaacaacatcag

SEQ ID NO: 1047165 - DNA, 33 bp, Homo sapien
gggtaagactgagcgaaggagataaaggaaatt

SEQ ID NO: 1047166 - DNA, 33 bp, Homo sapien
gggtaagactgagcgagggagataaaggaaatt

SEQ ID NO: 1047167 - DNA, 33 bp, Homo sapien
gaagcactcatacagcgaaaatttgtgtgagtt

SEQ ID NO: 1047168 - DNA, 33 bp, Homo sapien
gaagcactcatacagctaaaatttgtgtgagtt

SEQ ID NO: 1047169 - DNA, 33 bp, Homo sapien
tcaagctgtctcctatgagggctggtttcccct

SEQ ID NO: 1047170 - DNA, 33 bp, Homo sapien
tcaagctgtctcctattagggctggtttcccct

SEQ ID NO: 1047171 - DNA, 33 bp, Homo sapien
tctggaagaagaatggacattgttacctcaata

SEQ ID NO: 1047172 - DNA, 33 bp, Homo sapien
tctggaagaagaatgggcattgttacctcaata

SEQ ID NO: 1047173 - DNA, 33 bp, Homo sapien
gatggtgaccttgatacaacataatatgtgtgt

SEQ ID NO: 1047174 - DNA, 33 bp, Homo sapien
gatggtgaccttgatagaacataatatgtgtgt

SEQ ID NO: 1047175 - DNA, 33 bp, Homo sapien
attggattagaacccaaccggctaatccaagat

SEQ ID NO: 1047176 - DNA, 33 bp, Homo sapien
attggattagaacccagccggctaatccaagat

SEQ ID NO: 1047177 - DNA, 33 bp, Homo sapien
tccattctcttttcccccttaaacttcagcatc

SEQ ID NO: 1047178 - DNA, 33 bp, Homo sapien
tccattctcttttccctcttaaacttcagcatc

SEQ ID NO: 1047179 - DNA, 33 bp, Homo sapien
gagagtcagggtgatgaaaagaggttcctttca

SEQ ID NO: 1047180 - DNA, 33 bp, Homo sapien
gagagtcagggtgatggaaagaggttcctttca

SEQ ID NO: 1047181 - DNA, 33 bp, Homo sapien
tttcccgccaaaaccacgaggttgcttaagtgt

SEQ ID NO: 1047182 - DNA, 33 bp, Homo sapien
tttcccgccaaaaccatgaggttgcttaagtgt

SEQ ID NO: 1047183 - DNA, 33 bp, Homo sapien
attgatctctgaagctaagatttttgtcctaaa

SEQ ID NO: 1047184 - DNA, 33 bp, Homo sapien
attgatctctgaagctgagatttttgtcctaaa

SEQ ID NO: 1047185 - DNA, 33 bp, Homo sapien
cccacagattgtaatccaatttactccctaaga

SEQ ID NO: 1047186 - DNA, 33 bp, Homo sapien
cccacagattgtaatcgaatttactccctaaga

SEQ ID NO: 1047187 - DNA, 33 bp, Homo sapien
tcgctccccaccatcccatgtggttggattggg

SEQ ID NO: 1047188 - DNA, 33 bp, Homo sapien
tcgctccccaccatcctatgtggttggattggg

SEQ ID NO: 1047189 - DNA, 33 bp, Homo sapien
tgggcttcccagaaaccgtggctattgatgctg

SEQ ID NO: 1047190 - DNA, 33 bp, Homo sapien
tgggcttcccagaaactgtggctattgatgctg

SEQ ID NO: 1047191 - DNA, 33 bp, Homo sapien
atgtgaacccctaaagaacctctgagatcagtc

SEQ ID NO: 1047192 - DNA, 33 bp, Homo sapien
atgtgaacccctaaaggacctctgagatcagtc

SEQ ID NO: 1047193 - DNA, 33 bp, Homo sapien
atctcaagatcctgaacgtaatcaccgtgattg

SEQ ID NO: 1047194 - DNA, 33 bp, Homo sapien
atctcaagatcctgaatgtaatcaccgtgattg

SEQ ID NO: 1047195 - DNA, 33 bp, Homo sapien
aagtcacacagctagacaggtgtggcaccaggc

SEQ ID NO: 1047196 - DNA, 33 bp, Homo sapien
aagtcacacagctagagaggtgtggcaccaggc

SEQ ID NO: 1047197 - DNA, 33 bp, Homo sapien
ggacagaaagagcagaggttgggagtcaagagg

SEQ ID NO: 1047198 - DNA, 33 bp, Homo sapien
ggacagaaagagcagatgttgggagtcaagagg

SEQ ID NO: 1047199 - DNA, 33 bp, Homo sapien
ccctgcccagagtggacgcccagcaaatacttg

SEQ ID NO: 1047200 - DNA, 33 bp, Homo sapien
ccctgcccagagtggatgcccagcaaatacttg

SEQ ID NO: 1047201 - DNA, 33 bp, Homo sapien
ggcgaagaggaagcgccgcagccagtggacttg

SEQ ID NO: 1047202 - DNA, 33 bp, Homo sapien
ggcgaagaggaagcgcggcagccagtggacttg

SEQ ID NO: 1047203 - DNA, 33 bp, Homo sapien
gacgtcgtcttgaccaactctcttccttttgca

SEQ ID NO: 1047204 - DNA, 33 bp, Homo sapien
gacgtcgtcttgaccagctctcttccttttgca

SEQ ID NO: 1047205 - DNA, 33 bp, Homo sapien
aatgaagacttgaaaaccagagcccagccctaa

SEQ ID NO: 1047206 - DNA, 33 bp, Homo sapien
aatgaagacttgaaaagcagagcccagccctaa

SEQ ID NO: 1047207 - DNA, 33 bp, Homo sapien
tgatagttggctgtaacagatgaaggagtcata

SEQ ID NO: 1047208 - DNA, 33 bp, Homo sapien
tgatagttggctgtaatagatgaaggagtcata

SEQ ID NO: 1047209 - DNA, 33 bp, Homo sapien
gaggtgatcaatgtcaacggtttcttgtttatc

SEQ ID NO: 1047210 - DNA, 33 bp, Homo sapien
gaggtgatcaatgtcaccggtttcttgtttatc

SEQ ID NO: 1047211 - DNA, 33 bp, Homo sapien
ggtacaactgctaaagaaaagaggtcatcagtt

SEQ ID NO: 1047212 - DNA, 33 bp, Homo sapien
ggtacaactgctaaaggaaagaggtcatcagtt

SEQ ID NO: 1047213 - DNA, 33 bp, Homo sapien
ctgtgtaaccagattacgcggtttctagttttc

SEQ ID NO: 1047214 - DNA, 33 bp, Homo sapien
ctgtgtaaccagattatgcggtttctagttttc

SEQ ID NO: 1047215 - DNA, 33 bp, Homo sapien
agaataagatgtcaacaatcactacctctaatc

SEQ ID NO: 1047216 - DNA, 33 bp, Homo sapien
agaataagatgtcaaccatcactacctctaatc

SEQ ID NO: 1047217 - DNA, 33 bp, Homo sapien
gaagagaccttgaacccgaatctggctgagcct

SEQ ID NO: 1047218 - DNA, 33 bp, Homo sapien
gaagagaccttgaacctgaatctggctgagcct

SEQ ID NO: 1047219 - DNA, 33 bp, Homo sapien
cagacgatgaggaagactcctttataggattcc

SEQ ID NO: 1047220 - DNA, 33 bp, Homo sapien
cagacgatgaggaagattcctttataggattcc

SEQ ID NO: 1047221 - DNA, 33 bp, Homo sapien
tcacgtctgtcaattgcaggcttgctttttcat

SEQ ID NO: 1047222 - DNA, 33 bp, Homo sapien
tcacgtctgtcaattggaggcttgctttttcat

SEQ ID NO: 1047223 - DNA, 33 bp, Homo sapien
acactggctgagcttaaaggccccatctgaaga

SEQ ID NO: 1047224 - DNA, 33 bp, Homo sapien
acactggctgagcttacaggccccatctgaaga

SEQ ID NO: 1047225 - DNA, 33 bp, Homo sapien
ctgtctatgatgagaacagagaaagatatagaa

SEQ ID NO: 1047226 - DNA, 33 bp, Homo sapien
ctgtctatgatgagaagagagaaagatatagaa

SEQ ID NO: 1047227 - DNA, 33 bp, Homo sapien
gatcctgagaagacaacaagctgctgctgagga

SEQ ID NO: 1047228 - DNA, 33 bp, Homo sapien
gatcctgagaagacaataagctgctgctgagga

SEQ ID NO: 1047229 - DNA, 33 bp, Homo sapien
cctgcagctgtcgagaaggaggagacagctcag

SEQ ID NO: 1047230 - DNA, 33 bp, Homo sapien
cctgcagctgtcgagagggaggagacagctcag

SEQ ID NO: 1047231 - DNA, 33 bp, Homo sapien
atgggccagccgaggacgagtggagaggctgcc

SEQ ID NO: 1047232 - DNA, 33 bp, Homo sapien
atgggccagccgaggatgagtggagaggctgcc

SEQ ID NO: 1047233 - DNA, 33 bp, Homo sapien
ctgataatttctactacgcactgccatgccaat

SEQ ID NO: 1047234 - DNA, 33 bp, Homo sapien
ctgataatttctactatgcactgccatgccaat

SEQ ID NO: 1047235 - DNA, 33 bp, Homo sapien
aatggggaaactgaggccagcgagaagggacac

SEQ ID NO: 1047236 - DNA, 33 bp, Homo sapien
aatggggaaactgaggtcagcgagaagggacac

SEQ ID NO: 1047237 - DNA, 33 bp, Homo sapien
gagaggtttctgctacaaaaactttctacccca

SEQ ID NO: 1047238 - DNA, 33 bp, Homo sapien
gagaggtttctgctacgaaaactttctacccca

SEQ ID NO: 1047239 - DNA, 33 bp, Homo sapien
ccagccctgtcatctacctttctgagagcagct

SEQ ID NO: 1047240 - DNA, 33 bp, Homo sapien
ccagccctgtcatctatctttctgagagcagct

SEQ ID NO: 1047241 - DNA, 33 bp, Homo sapien
aggtagagaaggataaagagaaggaacagtcag

SEQ ID NO: 1047242 - DNA, 33 bp, Homo sapien
aggtagagaaggataaggagaaggaacagtcag

SEQ ID NO: 1047243 - DNA, 33 bp, Homo sapien
aaatccaacactgtcacgataagagcactcaat

SEQ ID NO: 1047244 - DNA, 33 bp, Homo sapien
aaatccaacactgtcatgataagagcactcaat

SEQ ID NO: 1047245 - DNA, 33 bp, Homo sapien
tgctcctgggccctaaagaacgctgagcacctg

SEQ ID NO: 1047246 - DNA, 33 bp, Homo sapien
tgctcctgggccctaaggaacgctgagcacctg

SEQ ID NO: 1047247 - DNA, 33 bp, Homo sapien
actcacaatgcacccccctggtatacatgcctg

SEQ ID NO: 1047248 - DNA, 33 bp, Homo sapien
actcacaatgcaccccgctggtatacatgcctg

SEQ ID NO: 1047249 - DNA, 33 bp, Homo sapien
ggcagaggcaccgagcagaatctctccaggagc

SEQ ID NO: 1047250 - DNA, 33 bp, Homo sapien
ggcagaggcaccgagcggaatctctccaggagc

SEQ ID NO: 1047251 - DNA, 33 bp, Homo sapien
cactgcttagatgtgtcaaaaatccttttccac

SEQ ID NO: 1047252 - DNA, 33 bp, Homo sapien
cactgcttagatgtgttaaaaatccttttccac

SEQ ID NO: 1047253 - DNA, 33 bp, Homo sapien
ctgaccctgagccacaaaatagtgccctcctct

SEQ ID NO: 1047254 - DNA, 33 bp, Homo sapien
ctgaccctgagccacacaatagtgccctcctct

SEQ ID NO: 1047255 - DNA, 33 bp, Homo sapien
ttgcagccttaactgacattcatcgtaagctcc

SEQ ID NO: 1047256 - DNA, 33 bp, Homo sapien
ttgcagccttaactgagattcatcgtaagctcc

SEQ ID NO: 1047257 - DNA, 33 bp, Homo sapien
gtggcaggtgggccgacagcgtgggtcaccagt

SEQ ID NO: 1047258 - DNA, 33 bp, Homo sapien
gtggcaggtgggccgagagcgtgggtcaccagt

SEQ ID NO: 1047259 - DNA, 33 bp, Homo sapien
ccatctgctagctatacaatgagtcttgaaagg

SEQ ID NO: 1047260 - DNA, 33 bp, Homo sapien
ccatctgctagctatataatgagtcttgaaagg

SEQ ID NO: 1047261 - DNA, 33 bp, Homo sapien
tatcatgcaaaggaagactccaggtagcacgct

SEQ ID NO: 1047262 - DNA, 33 bp, Homo sapien
tatcatgcaaaggaagcctccaggtagcacgct

SEQ ID NO: 1047263 - DNA, 33 bp, Homo sapien
ggatgtcgatgttgaacgtgccctcccagacaa

SEQ ID NO: 1047264 - DNA, 33 bp, Homo sapien
ggatgtcgatgttgaatgtgccctcccagacaa

SEQ ID NO: 1047265 - DNA, 33 bp, Homo sapien
tctgattcagcacttacaaactggcaagaggga

SEQ ID NO: 1047266 - DNA, 33 bp, Homo sapien
tctgattcagcacttataaactggcaagaggga

SEQ ID NO: 1047267 - DNA, 33 bp, Homo sapien
atgtgaatggacttaaagctactgaacactcca

SEQ ID NO: 1047268 - DNA, 33 bp, Homo sapien
atgtgaatggacttaacgctactgaacactcca

SEQ ID NO: 1047269 - DNA, 33 bp, Homo sapien
gaccctgtaacggccaacgttgcagtctgaggt

SEQ ID NO: 1047270 - DNA, 33 bp, Homo sapien
gaccctgtaacggccagcgttgcagtctgaggt

SEQ ID NO: 1047271 - DNA, 33 bp, Homo sapien
aaggtgtggataagggaactactgtacgtgact

SEQ ID NO: 1047272 - DNA, 33 bp, Homo sapien
aaggtgtggataagggcactactgtacgtgact

SEQ ID NO: 1047273 - DNA, 33 bp, Homo sapien
agagagaccacattcacgtaacctttattacag

SEQ ID NO: 1047274 - DNA, 33 bp, Homo sapien
agagagaccacattcatgtaacctttattacag

SEQ ID NO: 1047275 - DNA, 33 bp, Homo sapien
ctcttttatgtctggccgcatcacaccgcatgc

SEQ ID NO: 1047276 - DNA, 33 bp, Homo sapien
ctcttttatgtctggctgcatcacaccgcatgc

SEQ ID NO: 1047277 - DNA, 33 bp, Homo sapien
tcctattgacagacaccgtggttttttcactgt

SEQ ID NO: 1047278 - DNA, 33 bp, Homo sapien
tcctattgacagacactgtggttttttcactgt

SEQ ID NO: 1047279 - DNA, 33 bp, Homo sapien
tgtgaatgaaacttccaccttagtttcctccca

SEQ ID NO: 1047280 - DNA, 33 bp, Homo sapien
tgtgaatgaaacttccgccttagtttcctccca

SEQ ID NO: 1047281 - DNA, 33 bp, Homo sapien
ccaagtttgggaaaccagcaaggtgagtattgg

SEQ ID NO: 1047282 - DNA, 33 bp, Homo sapien
ccaagtttgggaaaccggcaaggtgagtattgg

SEQ ID NO: 1047283 - DNA, 33 bp, Homo sapien
tcagggaagaagttcaaggcagtggcagggagc

SEQ ID NO: 1047284 - DNA, 33 bp, Homo sapien
tcagggaagaagttcagggcagtggcagggagc

SEQ ID NO: 1047285 - DNA, 33 bp, Homo sapien
atcccatcaggtttcccaggaacgtcagatttt

SEQ ID NO: 1047286 - DNA, 33 bp, Homo sapien
atcccatcaggtttccgaggaacgtcagatttt

SEQ ID NO: 1047287 - DNA, 33 bp, Homo sapien
attttgtccaaactgccgaaaaactcaagaaca

SEQ ID NO: 1047288 - DNA, 33 bp, Homo sapien
attttgtccaaactgctgaaaaactcaagaaca

SEQ ID NO: 1047289 - DNA, 33 bp, Homo sapien
gcaggtttgttaagtaagtatgtatgtgccatg

SEQ ID NO: 1047290 - DNA, 33 bp, Homo sapien
gcaggtttgttaagtaggtatgtatgtgccatg

SEQ ID NO: 1047291 - DNA, 33 bp, Homo sapien
atatgtaaatcaacaaaatatgtctcaataaat

SEQ ID NO: 1047292 - DNA, 33 bp, Homo sapien
atatgtaaatcaacaagatatgtctcaataaat

SEQ ID NO: 1047293 - DNA, 33 bp, Homo sapien
tatactgtcttaaacaacaagtgggtcaaagag

SEQ ID NO: 1047294 - DNA, 33 bp, Homo sapien
tatactgtcttaaacagcaagtgggtcaaagag

SEQ ID NO: 1047295 - DNA, 33 bp, Homo sapien
ctccttccagactcgccgacttcccttcatgtc

SEQ ID NO: 1047296 - DNA, 33 bp, Homo sapien
ctccttccagactcgctgacttcccttcatgtc

SEQ ID NO: 1047297 - DNA, 33 bp, Homo sapien
gcctcttcttataataaggacaccagtcacatt

SEQ ID NO: 1047298 - DNA, 33 bp, Homo sapien
gcctcttcttataatagggacaccagtcacatt

SEQ ID NO: 1047299 - DNA, 33 bp, Homo sapien
agcaccactgtgtccccctcacatggagaggcc

SEQ ID NO: 1047300 - DNA, 33 bp, Homo sapien
agcaccactgtgtcccgctcacatggagaggcc

SEQ ID NO: 1047301 - DNA, 33 bp, Homo sapien
gaaagagttaagtcccaatctcatggcccattc

SEQ ID NO: 1047302 - DNA, 33 bp, Homo sapien
gaaagagttaagtccccatctcatggcccattc

SEQ ID NO: 1047303 - DNA, 33 bp, Homo sapien
tttctacataacacaacaaccactagtgcctga

SEQ ID NO: 1047304 - DNA, 33 bp, Homo sapien
tttctacataacacaataaccactagtgcctga

SEQ ID NO: 1047305 - DNA, 33 bp, Homo sapien
ctctgaaagtaaagcgcatctaaccaccgcggc

SEQ ID NO: 1047306 - DNA, 33 bp, Homo sapien
ctctgaaagtaaagcgtatctaaccaccgcggc

SEQ ID NO: 1047307 - DNA, 33 bp, Homo sapien
tgcccagtgacgcccacagtaccctgacagaac

SEQ ID NO: 1047308 - DNA, 33 bp, Homo sapien
tgcccagtgacgcccagagtaccctgacagaac

SEQ ID NO: 1047309 - DNA, 33 bp, Homo sapien
tcccgttaagatcatcacacaaagaaaagtgag

SEQ ID NO: 1047310 - DNA, 33 bp, Homo sapien
tcccgttaagatcatcgcacaaagaaaagtgag

SEQ ID NO: 1047311 - DNA, 33 bp, Homo sapien
gccactgagaccaagcaacttttccttaataga

SEQ ID NO: 1047312 - DNA, 33 bp, Homo sapien
gccactgagaccaagcgacttttccttaataga

SEQ ID NO: 1047313 - DNA, 33 bp, Homo sapien
gttgtatctgtgaaaagttaaagtattcacact

SEQ ID NO: 1047314 - DNA, 33 bp, Homo sapien
gttgtatctgtgaaaatttaaagtattcacact

SEQ ID NO: 1047315 - DNA, 33 bp, Homo sapien
tctggaatagactggccaggttcaaactgctga

SEQ ID NO: 1047316 - DNA, 33 bp, Homo sapien
tctggaatagactggctaggttcaaactgctga

SEQ ID NO: 1047317 - DNA, 33 bp, Homo sapien
agtcgtgtgcactcaacggagccctgaacagga

SEQ ID NO: 1047318 - DNA, 33 bp, Homo sapien
agtcgtgtgcactcaatggagccctgaacagga

SEQ ID NO: 1047319 - DNA, 33 bp, Homo sapien
tgaacagagccgctgccaatgtgcttgtacatg

SEQ ID NO: 1047320 - DNA, 33 bp, Homo sapien
tgaacagagccgctgcgaatgtgcttgtacatg

SEQ ID NO: 1047321 - DNA, 33 bp, Homo sapien
catcttgcctcgttctaaaaagcatttgaggtg

SEQ ID NO: 1047322 - DNA, 33 bp, Homo sapien
catcttgcctcgttctgaaaagcatttgaggtg

SEQ ID NO: 1047323 - DNA, 33 bp, Homo sapien
actgacagctaacccaagactgaagcataattt

SEQ ID NO: 1047324 - DNA, 33 bp, Homo sapien
actgacagctaacccaggactgaagcataattt

SEQ ID NO: 1047325 - DNA, 33 bp, Homo sapien
gcttttgactttgtaggagagactggtgggttt

SEQ ID NO: 1047326 - DNA, 33 bp, Homo sapien
gcttttgactttgtagtagagactggtgggttt

SEQ ID NO: 1047327 - DNA, 33 bp, Homo sapien
aactcagggcaatgccacaagtttctcctgaag

SEQ ID NO: 1047328 - DNA, 33 bp, Homo sapien
aactcagggcaatgccgcaagtttctcctgaag

SEQ ID NO: 1047329 - DNA, 33 bp, Homo sapien
tccacacgccggccgcaatgttcagagggtgga

SEQ ID NO: 1047330 - DNA, 33 bp, Homo sapien
tccacacgccggccgcgatgttcagagggtgga

SEQ ID NO: 1047331 - DNA, 33 bp, Homo sapien
cagtctgtcgtgaacaacctccaggcaggatca

SEQ ID NO: 1047332 - DNA, 33 bp, Homo sapien
cagtctgtcgtgaacaccctccaggcaggatca

SEQ ID NO: 1047333 - DNA, 33 bp, Homo sapien
tatcttcatttaaacaacacatgacatttttac

SEQ ID NO: 1047334 - DNA, 33 bp, Homo sapien
tatcttcatttaaacaccacatgacatttttac

SEQ ID NO: 1047335 - DNA, 33 bp, Homo sapien
caaccaagcaaagtgacgcctggagttggctgt

SEQ ID NO: 1047336 - DNA, 33 bp, Homo sapien
caaccaagcaaagtgatgcctggagttggctgt

SEQ ID NO: 1047337 - DNA, 33 bp, Homo sapien
aggtgatagcaacaggcataagcacactggagc

SEQ ID NO: 1047338 - DNA, 33 bp, Homo sapien
aggtgatagcaacaggtataagcacactggagc

SEQ ID NO: 1047339 - DNA, 33 bp, Homo sapien
ttatgttttaacgagacaagatcagcttgtgta

SEQ ID NO: 1047340 - DNA, 33 bp, Homo sapien
ttatgttttaacgagagaagatcagcttgtgta

SEQ ID NO: 1047341 - DNA, 33 bp, Homo sapien
caggacctggagaagcccatcttgcttggagta

SEQ ID NO: 1047342 - DNA, 33 bp, Homo sapien
caggacctggagaagctcatcttgcttggagta

SEQ ID NO: 1047343 - DNA, 33 bp, Homo sapien
gggggtttcagtaatcagaagggaactccagag

SEQ ID NO: 1047344 - DNA, 33 bp, Homo sapien
gggggtttcagtaatcggaagggaactccagag

SEQ ID NO: 1047345 - DNA, 33 bp, Homo sapien
tacaagcctggcggaaccggaccccacctgact

SEQ ID NO: 1047346 - DNA, 33 bp, Homo sapien
tacaagcctggcggaatcggaccccacctgact

SEQ ID NO: 1047347 - DNA, 33 bp, Homo sapien
aatcccctctggagcaaatccagaaagactgag

SEQ ID NO: 1047348 - DNA, 33 bp, Homo sapien
aatcccctctggagcagatccagaaagactgag

SEQ ID NO: 1047349 - DNA, 33 bp, Homo sapien
cactcccctcctgtaacgtgctgagctctgacc

SEQ ID NO: 1047350 - DNA, 33 bp, Homo sapien
cactcccctcctgtaatgtgctgagctctgacc

SEQ ID NO: 1047351 - DNA, 33 bp, Homo sapien
aatggtgctcggacaccgtcctcgttaggaaag

SEQ ID NO: 1047352 - DNA, 33 bp, Homo sapien
aatggtgctcggacactgtcctcgttaggaaag

SEQ ID NO: 1047353 - DNA, 33 bp, Homo sapien
tttgagagcgaaagaaaacattcaaacatgcaa

SEQ ID NO: 1047354 - DNA, 33 bp, Homo sapien
tttgagagcgaaagaagacattcaaacatgcaa

SEQ ID NO: 1047355 - DNA, 33 bp, Homo sapien
gattgtttttcctacacgcttggtcctgcaggc

SEQ ID NO: 1047356 - DNA, 33 bp, Homo sapien
gattgtttttcctacaggcttggtcctgcaggc

SEQ ID NO: 1047357 - DNA, 33 bp, Homo sapien
aagcctgaaaaacacgacgcagaatcactccct

SEQ ID NO: 1047358 - DNA, 33 bp, Homo sapien
aagcctgaaaaacacggcgcagaatcactccct

SEQ ID NO: 1047359 - DNA, 33 bp, Homo sapien
cggtctcagccacataagtctgtgtccagtggg

SEQ ID NO: 1047360 - DNA, 33 bp, Homo sapien
cggtctcagccacataggtctgtgtccagtggg

SEQ ID NO: 1047361 - DNA, 33 bp, Homo sapien
tcaactcaaacactgacaggtgacagaagaact

SEQ ID NO: 1047362 - DNA, 33 bp, Homo sapien
tcaactcaaacactgagaggtgacagaagaact

SEQ ID NO: 1047363 - DNA, 33 bp, Homo sapien
gagccataaaacattgcaaaagccataggcttc

SEQ ID NO: 1047364 - DNA, 33 bp, Homo sapien
gagccataaaacattgtaaaagccataggcttc

SEQ ID NO: 1047365 - DNA, 33 bp, Homo sapien
ctgattctgtttcccaactggagtcagggtttt

SEQ ID NO: 1047366 - DNA, 33 bp, Homo sapien
ctgattctgtttcccacctggagtcagggtttt

SEQ ID NO: 1047367 - DNA, 33 bp, Homo sapien
gatggggttttcaccacgcacctgagcagggca

SEQ ID NO: 1047368 - DNA, 33 bp, Homo sapien
gatggggttttcaccatgcacctgagcagggca

SEQ ID NO: 1047369 - DNA, 33 bp, Homo sapien
caggctgagtgttcccaagcaagttataaacca

SEQ ID NO: 1047370 - DNA, 33 bp, Homo sapien
caggctgagtgttcccgagcaagttataaacca

SEQ ID NO: 1047371 - DNA, 33 bp, Homo sapien
aaaataaaataaaccactggcagtctgggctca

SEQ ID NO: 1047372 - DNA, 33 bp, Homo sapien
aaaataaaataaaccagtggcagtctgggctca

SEQ ID NO: 1047373 - DNA, 33 bp, Homo sapien
ccctgggtcaaatcccagctcagccatctatca

SEQ ID NO: 1047374 - DNA, 33 bp, Homo sapien
ccctgggtcaaatcccggctcagccatctatca

SEQ ID NO: 1047375 - DNA, 33 bp, Homo sapien
ctggaactccttcaaccgcgacgtactgaaggc

SEQ ID NO: 1047376 - DNA, 33 bp, Homo sapien
ctggaactccttcaactgcgacgtactgaaggc

SEQ ID NO: 1047377 - DNA, 33 bp, Homo sapien
ggctctggttgctacactagggtgaatgattaa

SEQ ID NO: 1047378 - DNA, 33 bp, Homo sapien
ggctctggttgctacattagggtgaatgattaa

SEQ ID NO: 1047379 - DNA, 33 bp, Homo sapien
agcaaccacggggttacgcttatctgggtgtag

SEQ ID NO: 1047380 - DNA, 33 bp, Homo sapien
agcaaccacggggttatgcttatctgggtgtag

SEQ ID NO: 1047381 - DNA, 33 bp, Homo sapien
cagatagatttaatcaaagctttatgtgacatg

SEQ ID NO: 1047382 - DNA, 33 bp, Homo sapien
cagatagatttaatcagagctttatgtgacatg

SEQ ID NO: 1047383 - DNA, 33 bp, Homo sapien
gttctgggccagcacgaccctcttctgggcttt

SEQ ID NO: 1047384 - DNA, 33 bp, Homo sapien
gttctgggccagcacgtccctcttctgggcttt

SEQ ID NO: 1047385 - DNA, 33 bp, Homo sapien
agagttttatatcttcacttttacacttaggtc

SEQ ID NO: 1047386 - DNA, 33 bp, Homo sapien
agagttttatatcttcgcttttacacttaggtc

SEQ ID NO: 1047387 - DNA, 33 bp, Homo sapien
ccagttctgaagggaagaaaccgttcatttcca

SEQ ID NO: 1047388 - DNA, 33 bp, Homo sapien
ccagttctgaagggaataaaccgttcatttcca

SEQ ID NO: 1047389 - DNA, 33 bp, Homo sapien
gagatgatgtggctgcaatagttttgggtttgt

SEQ ID NO: 1047390 - DNA, 33 bp, Homo sapien
gagatgatgtggctgcgatagttttgggtttgt

SEQ ID NO: 1047391 - DNA, 33 bp, Homo sapien
tgggaaacatcacaacaccggatggccaggagg

SEQ ID NO: 1047392 - DNA, 33 bp, Homo sapien
tgggaaacatcacaacgccggatggccaggagg

SEQ ID NO: 1047393 - DNA, 33 bp, Homo sapien
ccaacccactactgaaggaagcttaaatctgca

SEQ ID NO: 1047394 - DNA, 33 bp, Homo sapien
ccaacccactactgaatgaagcttaaatctgca

SEQ ID NO: 1047395 - DNA, 33 bp, Homo sapien
attttctcatgtttgcactataagaaggtagtc

SEQ ID NO: 1047396 - DNA, 33 bp, Homo sapien
attttctcatgtttgcgctataagaaggtagtc

SEQ ID NO: 1047397 - DNA, 33 bp, Homo sapien
tactgcaccagtaatacgatgtgcaactctgat

SEQ ID NO: 1047398 - DNA, 33 bp, Homo sapien
tactgcaccagtaatatgatgtgcaactctgat

SEQ ID NO: 1047399 - DNA, 33 bp, Homo sapien
catcttgaaactcttaactctcaatacctgtaa

SEQ ID NO: 1047400 - DNA, 33 bp, Homo sapien
catcttgaaactcttagctctcaatacctgtaa

SEQ ID NO: 1047401 - DNA, 33 bp, Homo sapien
acctcgaaagtactccaaaacatcatagcagta

SEQ ID NO: 1047402 - DNA, 33 bp, Homo sapien
acctcgaaagtactccgaaacatcatagcagta

SEQ ID NO: 1047403 - DNA, 33 bp, Homo sapien
actctgagaaggactcggaagaggtgacacgag

SEQ ID NO: 1047404 - DNA, 33 bp, Homo sapien
actctgagaaggactctgaagaggtgacacgag

SEQ ID NO: 1047405 - DNA, 33 bp, Homo sapien
ttgcctgggagtaagaacaacccagaaaaacac

SEQ ID NO: 1047406 - DNA, 33 bp, Homo sapien
ttgcctgggagtaagagcaacccagaaaaacac

SEQ ID NO: 1047407 - DNA, 33 bp, Homo sapien
agccctggtctccgccaatgcggctgtagatcc

SEQ ID NO: 1047408 - DNA, 33 bp, Homo sapien
agccctggtctccgccgatgcggctgtagatcc

SEQ ID NO: 1047409 - DNA, 33 bp, Homo sapien
agcatactccttctacgcagcaaaaaaatactt

SEQ ID NO: 1047410 - DNA, 33 bp, Homo sapien
agcatactccttctactcagcaaaaaaatactt

SEQ ID NO: 1047411 - DNA, 33 bp, Homo sapien
ctgggacagcaaggaccgaaggtgcgggaagtt

SEQ ID NO: 1047412 - DNA, 33 bp, Homo sapien
ctgggacagcaaggactgaaggtgcgggaagtt

SEQ ID NO: 1047413 - DNA, 33 bp, Homo sapien
gagaggaaagacgttgcatgtcgtcagcaaccg

SEQ ID NO: 1047414 - DNA, 33 bp, Homo sapien
gagaggaaagacgttgtatgtcgtcagcaaccg

SEQ ID NO: 1047415 - DNA, 33 bp, Homo sapien
aatgaggtcccgagagcattcacgattcccata

SEQ ID NO: 1047416 - DNA, 33 bp, Homo sapien
aatgaggtcccgagagtattcacgattcccata

SEQ ID NO: 1047417 - DNA, 33 bp, Homo sapien
cttctacattttatgcaccctaaaaaattatcc

SEQ ID NO: 1047418 - DNA, 33 bp, Homo sapien
cttctacattttatgcgccctaaaaaattatcc

SEQ ID NO: 1047419 - DNA, 33 bp, Homo sapien
atgtgatcgtgacacggcagggaatgtaatgta

SEQ ID NO: 1047420 - DNA, 33 bp, Homo sapien
atgtgatcgtgacacgtcagggaatgtaatgta

SEQ ID NO: 1047421 - DNA, 33 bp, Homo sapien
ctgtgacactgatcacaaggtgacccagataat

SEQ ID NO: 1047422 - DNA, 33 bp, Homo sapien
ctgtgacactgatcaccaggtgacccagataat

SEQ ID NO: 1047423 - DNA, 33 bp, Homo sapien
cagaaggtacagaaatcagtgcttggctcatcc

SEQ ID NO: 1047424 - DNA, 33 bp, Homo sapien
cagaaggtacagaaatgagtgcttggctcatcc

SEQ ID NO: 1047425 - DNA, 33 bp, Homo sapien
catttatggtgctgacactatcggggggtggtg

SEQ ID NO: 1047426 - DNA, 33 bp, Homo sapien
catttatggtgctgacgctatcggggggtggtg

SEQ ID NO: 1047427 - DNA, 33 bp, Homo sapien
gtatcccagtatctccaacagttgagtctgaat

SEQ ID NO: 1047428 - DNA, 33 bp, Homo sapien
gtatcccagtatctcccacagttgagtctgaat

SEQ ID NO: 1047429 - DNA, 33 bp, Homo sapien
ctggttttgccttcccaaatcacctacaaggta

SEQ ID NO: 1047430 - DNA, 33 bp, Homo sapien
ctggttttgccttcccgaatcacctacaaggta

SEQ ID NO: 1047431 - DNA, 33 bp, Homo sapien
ggagagcactggaaccccgtgccttgctggctg

SEQ ID NO: 1047432 - DNA, 33 bp, Homo sapien
ggagagcactggaaccgcgtgccttgctggctg

SEQ ID NO: 1047433 - DNA, 33 bp, Homo sapien
tccttatggcttcaagaacccaccttttggtct

SEQ ID NO: 1047434 - DNA, 33 bp, Homo sapien
tccttatggcttcaaggacccaccttttggtct

SEQ ID NO: 1047435 - DNA, 33 bp, Homo sapien
agccataaggaaatgcaaggtcactgcttccag

SEQ ID NO: 1047436 - DNA, 33 bp, Homo sapien
agccataaggaaatgcgaggtcactgcttccag

SEQ ID NO: 1047437 - DNA, 33 bp, Homo sapien
atggcctagccacacaatggaatgttccacggc

SEQ ID NO: 1047438 - DNA, 33 bp, Homo sapien
atggcctagccacacactggaatgttccacggc

SEQ ID NO: 1047439 - DNA, 33 bp, Homo sapien
tctgcacacaggataggcagacatgagagacga

SEQ ID NO: 1047440 - DNA, 33 bp, Homo sapien
tctgcacacaggatagtcagacatgagagacga

SEQ ID NO: 1047441 - DNA, 33 bp, Homo sapien
tctagaggataactaacgcctctgaggccccac

SEQ ID NO: 1047442 - DNA, 33 bp, Homo sapien
tctagaggataactaatgcctctgaggccccac

SEQ ID NO: 1047443 - DNA, 33 bp, Homo sapien
cgagtagtgataattacaaaacatgtgcaatca

SEQ ID NO: 1047444 - DNA, 33 bp, Homo sapien
cgagtagtgataattataaaacatgtgcaatca

SEQ ID NO: 1047445 - DNA, 33 bp, Homo sapien
cccactgggaatgaaacgttgggattctagtct

SEQ ID NO: 1047446 - DNA, 33 bp, Homo sapien
cccactgggaatgaaatgttgggattctagtct

SEQ ID NO: 1047447 - DNA, 33 bp, Homo sapien
tgaggacacggataagaacaaggccatctggaa

SEQ ID NO: 1047448 - DNA, 33 bp, Homo sapien
tgaggacacggataaggacaaggccatctggaa

SEQ ID NO: 1047449 - DNA, 33 bp, Homo sapien
gggacagaggacataaaggggaaactgaggaag

SEQ ID NO: 1047450 - DNA, 33 bp, Homo sapien
gggacagaggacataagggggaaactgaggaag

SEQ ID NO: 1047451 - DNA, 33 bp, Homo sapien
tccactgtgtcccgtacagcctggggcctgcca

SEQ ID NO: 1047452 - DNA, 33 bp, Homo sapien
tccactgtgtcccgtagagcctggggcctgcca

SEQ ID NO: 1047453 - DNA, 33 bp, Homo sapien
gctcagagggcgtaaaagcggtttccaccttta

SEQ ID NO: 1047454 - DNA, 33 bp, Homo sapien
gctcagagggcgtaaaggcggtttccaccttta

SEQ ID NO: 1047455 - DNA, 33 bp, Homo sapien
gtcctcacacgtccgaagcagatgcccgttcct

SEQ ID NO: 1047456 - DNA, 33 bp, Homo sapien
gtcctcacacgtccgacgcagatgcccgttcct

SEQ ID NO: 1047457 - DNA, 33 bp, Homo sapien
agacattaaaaagacacagaagaatcccaagtc

SEQ ID NO: 1047458 - DNA, 33 bp, Homo sapien
agacattaaaaagacagagaagaatcccaagtc

SEQ ID NO: 1047459 - DNA, 33 bp, Homo sapien
gttgcttgttggtttacgtttcaggataatgtt

SEQ ID NO: 1047460 - DNA, 33 bp, Homo sapien
gttgcttgttggtttatgtttcaggataatgtt

SEQ ID NO: 1047461 - DNA, 33 bp, Homo sapien
aacaagcaaccaaagacgatgctcaccgcaaac

SEQ ID NO: 1047462 - DNA, 33 bp, Homo sapien
aacaagcaaccaaagatgatgctcaccgcaaac

SEQ ID NO: 1047463 - DNA, 33 bp, Homo sapien
tggaaagtttctctccacgggataaagccctct

SEQ ID NO: 1047464 - DNA, 33 bp, Homo sapien
tggaaagtttctctccgcgggataaagccctct

SEQ ID NO: 1047465 - DNA, 33 bp, Homo sapien
ggggagacagtgacagacagcatcccccgcctt

SEQ ID NO: 1047466 - DNA, 33 bp, Homo sapien
ggggagacagtgacaggcagcatcccccgcctt

SEQ ID NO: 1047467 - DNA, 33 bp, Homo sapien
aaagaatcatcgttccaacacatggtgctggga

SEQ ID NO: 1047468 - DNA, 33 bp, Homo sapien
aaagaatcatcgttcccacacatggtgctggga

SEQ ID NO: 1047469 - DNA, 33 bp, Homo sapien
agtaattaattataacaaagtgtcatttcttgg

SEQ ID NO: 1047470 - DNA, 33 bp, Homo sapien
agtaattaattataacgaagtgtcatttcttgg

SEQ ID NO: 1047471 - DNA, 33 bp, Homo sapien
tttttggtccatgtccacagttaattaagtttt

SEQ ID NO: 1047472 - DNA, 33 bp, Homo sapien
tttttggtccatgtccgcagttaattaagtttt

SEQ ID NO: 1047473 - DNA, 33 bp, Homo sapien
ttattattactaattccaacaacctggcttgca

SEQ ID NO: 1047474 - DNA, 33 bp, Homo sapien
ttattattactaattcgaacaacctggcttgca

SEQ ID NO: 1047475 - DNA, 33 bp, Homo sapien
agtcccagctcgcaataagatcagagtccctac

SEQ ID NO: 1047476 - DNA, 33 bp, Homo sapien
agtcccagctcgcaatgagatcagagtccctac

SEQ ID NO: 1047477 - DNA, 33 bp, Homo sapien
acacatacttagacacacaactggtatttatga

SEQ ID NO: 1047478 - DNA, 33 bp, Homo sapien
acacatacttagacactcaactggtatttatga

SEQ ID NO: 1047479 - DNA, 33 bp, Homo sapien
tgctctagaggaaaaccggagaagacactgagt

SEQ ID NO: 1047480 - DNA, 33 bp, Homo sapien
tgctctagaggaaaactggagaagacactgagt

SEQ ID NO: 1047481 - DNA, 33 bp, Homo sapien
gctgcagcttccagcccggcgtgactatttttt

SEQ ID NO: 1047482 - DNA, 33 bp, Homo sapien
gctgcagcttccagcctggcgtgactatttttt

SEQ ID NO: 1047483 - DNA, 33 bp, Homo sapien
gttattatgtgccgatcaatcaggtcagccccc

SEQ ID NO: 1047484 - DNA, 33 bp, Homo sapien
gttattatgtgccgattaatcaggtcagccccc

SEQ ID NO: 1047485 - DNA, 33 bp, Homo sapien
cctgcctgttggtgacaatctacatggatgggg

SEQ ID NO: 1047486 - DNA, 33 bp, Homo sapien
cctgcctgttggtgacgatctacatggatgggg

SEQ ID NO: 1047487 - DNA, 33 bp, Homo sapien
gaacgggaagaatcgccccctctgcttgggtcc

SEQ ID NO: 1047488 - DNA, 33 bp, Homo sapien
gaacgggaagaatcgcgccctctgcttgggtcc

SEQ ID NO: 1047489 - DNA, 33 bp, Homo sapien
tagcacccatcatttcaagaagaaagagtcaat

SEQ ID NO: 1047490 - DNA, 33 bp, Homo sapien
tagcacccatcatttcgagaagaaagagtcaat

SEQ ID NO: 1047491 - DNA, 33 bp, Homo sapien
gtgtgtgtctgcattacgataaataaagctaag

SEQ ID NO: 1047492 - DNA, 33 bp, Homo sapien
gtgtgtgtctgcattaggataaataaagctaag

SEQ ID NO: 1047493 - DNA, 33 bp, Homo sapien
ggaccaagctgggccacaaagttcttatctgtg

SEQ ID NO: 1047494 - DNA, 33 bp, Homo sapien
ggaccaagctgggccagaaagttcttatctgtg

SEQ ID NO: 1047495 - DNA, 33 bp, Homo sapien
caaaggccctttgcacagaaactgggatggtgc

SEQ ID NO: 1047496 - DNA, 33 bp, Homo sapien
caaaggccctttgcacggaaactgggatggtgc

SEQ ID NO: 1047497 - DNA, 33 bp, Homo sapien
tatcaattaatgatcaatcaatcagggatcgga

SEQ ID NO: 1047498 - DNA, 33 bp, Homo sapien
tatcaattaatgatcagtcaatcagggatcgga

SEQ ID NO: 1047499 - DNA, 33 bp, Homo sapien
ttacatttaattgtgggcactcctgtttgattt

SEQ ID NO: 1047500 - DNA, 33 bp, Homo sapien
ttacatttaattgtggtcactcctgtttgattt

SEQ ID NO: 1047501 - DNA, 33 bp, Homo sapien
atcctaccaccaggcacgtaaacaaaagaaagg

SEQ ID NO: 1047502 - DNA, 33 bp, Homo sapien
atcctaccaccaggcatgtaaacaaaagaaagg

SEQ ID NO: 1047503 - DNA, 33 bp, Homo sapien
tatatctgcactcccacctttaccgtagcacta

SEQ ID NO: 1047504 - DNA, 33 bp, Homo sapien
tatatctgcactcccatctttaccgtagcacta

SEQ ID NO: 1047505 - DNA, 33 bp, Homo sapien
aaaagaaataggtagcactgattataataatat

SEQ ID NO: 1047506 - DNA, 33 bp, Homo sapien
aaaagaaataggtagcgctgattataataatat

SEQ ID NO: 1047507 - DNA, 33 bp, Homo sapien
acatgtgtcccttagcacgttacatgccacagt

SEQ ID NO: 1047508 - DNA, 33 bp, Homo sapien
acatgtgtcccttagcgcgttacatgccacagt

SEQ ID NO: 1047509 - DNA, 33 bp, Homo sapien
atgagctcaaagactcaaggcagtgctcacaga

SEQ ID NO: 1047510 - DNA, 33 bp, Homo sapien
atgagctcaaagactccaggcagtgctcacaga

SEQ ID NO: 1047511 - DNA, 33 bp, Homo sapien
gtcttccctccgtgaacgtgaacggacttcatg

SEQ ID NO: 1047512 - DNA, 33 bp, Homo sapien
gtcttccctccgtgaatgtgaacggacttcatg

SEQ ID NO: 1047513 - DNA, 33 bp, Homo sapien
gagcagctgagggccactgatcaccctttccag

SEQ ID NO: 1047514 - DNA, 33 bp, Homo sapien
gagcagctgagggccattgatcaccctttccag

SEQ ID NO: 1047515 - DNA, 33 bp, Homo sapien
agtgaggacagtgacgacacctctggaaaaacg

SEQ ID NO: 1047516 - DNA, 33 bp, Homo sapien
agtgaggacagtgacggcacctctggaaaaacg

SEQ ID NO: 1047517 - DNA, 33 bp, Homo sapien
actgaaagacagctaactaaatgttttaggaca

SEQ ID NO: 1047518 - DNA, 33 bp, Homo sapien
actgaaagacagctaattaaatgttttaggaca

SEQ ID NO: 1047519 - DNA, 33 bp, Homo sapien
ctttagcaatcaattacatattactgctataaa

SEQ ID NO: 1047520 - DNA, 33 bp, Homo sapien
ctttagcaatcaattagatattactgctataaa

SEQ ID NO: 1047521 - DNA, 33 bp, Homo sapien
ggtctcagtataaaaccagggttctgacggctt

SEQ ID NO: 1047522 - DNA, 33 bp, Homo sapien
ggtctcagtataaaactagggttctgacggctt

SEQ ID NO: 1047523 - DNA, 33 bp, Homo sapien
gcacggacagttgagaacgcccataggaacgct

SEQ ID NO: 1047524 - DNA, 33 bp, Homo sapien
gcacggacagttgagagcgcccataggaacgct

SEQ ID NO: 1047525 - DNA, 33 bp, Homo sapien
cagcaccctgcgtgtaacctcacttcctcccac

SEQ ID NO: 1047526 - DNA, 33 bp, Homo sapien
cagcaccctgcgtgtatcctcacttcctcccac

SEQ ID NO: 1047527 - DNA, 33 bp, Homo sapien
cttagtcgtccgtacacgtgcgcaattattctg

SEQ ID NO: 1047528 - DNA, 33 bp, Homo sapien
cttagtcgtccgtacatgtgcgcaattattctg

SEQ ID NO: 1047529 - DNA, 33 bp, Homo sapien
cactcatgcaaggacactctgggggccgggacg

SEQ ID NO: 1047530 - DNA, 33 bp, Homo sapien
cactcatgcaaggacattctgggggccgggacg

SEQ ID NO: 1047531 - DNA, 33 bp, Homo sapien
gagcagagaacatagacgaaataaccaagggga

SEQ ID NO: 1047532 - DNA, 33 bp, Homo sapien
gagcagagaacatagatgaaataaccaagggga

SEQ ID NO: 1047533 - DNA, 33 bp, Homo sapien
tcctctcagccgcttacagtagattcttccttc

SEQ ID NO: 1047534 - DNA, 33 bp, Homo sapien
tcctctcagccgcttatagtagattcttccttc

SEQ ID NO: 1047535 - DNA, 33 bp, Homo sapien
gttcgtcagaagttaacccggtattgtgggaga

SEQ ID NO: 1047536 - DNA, 33 bp, Homo sapien
gttcgtcagaagttaatccggtattgtgggaga

SEQ ID NO: 1047537 - DNA, 33 bp, Homo sapien
cgcagagcagttacatcatggcactgaagttta

SEQ ID NO: 1047538 - DNA, 33 bp, Homo sapien
cgcagagcagttacattatggcactgaagttta

SEQ ID NO: 1047539 - DNA, 33 bp, Homo sapien
attacatatgcaaattcaaaagtcaccattaat

SEQ ID NO: 1047540 - DNA, 33 bp, Homo sapien
attacatatgcaaatttaaaagtcaccattaat

SEQ ID NO: 1047541 - DNA, 33 bp, Homo sapien
tagtgccacttgcaatcagcagaagcagaagcg

SEQ ID NO: 1047542 - DNA, 33 bp, Homo sapien
tagtgccacttgcaatgagcagaagcagaagcg

SEQ ID NO: 1047543 - DNA, 33 bp, Homo sapien
tgttctgttatgaagaaactgaagacctagttt

SEQ ID NO: 1047544 - DNA, 33 bp, Homo sapien
tgttctgttatgaagagactgaagacctagttt

SEQ ID NO: 1047545 - DNA, 33 bp, Homo sapien
gagggcagagtccttacgatctgatcaccccca

SEQ ID NO: 1047546 - DNA, 33 bp, Homo sapien
gagggcagagtccttatgatctgatcaccccca

SEQ ID NO: 1047547 - DNA, 33 bp, Homo sapien
cttgtaagagaggcatgagagagcttgttcacc

SEQ ID NO: 1047548 - DNA, 33 bp, Homo sapien
cttgtaagagaggcattagagagcttgttcacc

SEQ ID NO: 1047549 - DNA, 33 bp, Homo sapien
ttgttcacccctttcaacatgtgagagcacaaa

SEQ ID NO: 1047550 - DNA, 33 bp, Homo sapien
ttgttcacccctttcaccatgtgagagcacaaa

SEQ ID NO: 1047551 - DNA, 33 bp, Homo sapien
aaggcaccagctaactcaggatctgctaagtgt

SEQ ID NO: 1047552 - DNA, 33 bp, Homo sapien
aaggcaccagctaactgaggatctgctaagtgt

SEQ ID NO: 1047553 - DNA, 33 bp, Homo sapien
gaagagaggcactaagcacattgcactctcaca

SEQ ID NO: 1047554 - DNA, 33 bp, Homo sapien
gaagagaggcactaaggacattgcactctcaca

SEQ ID NO: 1047555 - DNA, 33 bp, Homo sapien
ctgggcgcggagaagaccagatgcccagcgatg

SEQ ID NO: 1047556 - DNA, 33 bp, Homo sapien
ctgggcgcggagaagatcagatgcccagcgatg

SEQ ID NO: 1047557 - DNA, 33 bp, Homo sapien
gggcgccaggagatggccaccattttgtccatg

SEQ ID NO: 1047558 - DNA, 33 bp, Homo sapien
gggcgccaggagatggtcaccattttgtccatg

SEQ ID NO: 1047559 - DNA, 33 bp, Homo sapien
agatttccagttcccccctgagttctggcccat

SEQ ID NO: 1047560 - DNA, 33 bp, Homo sapien
agatttccagttcccctctgagttctggcccat

SEQ ID NO: 1047561 - DNA, 33 bp, Homo sapien
cccactttataaatcacgcctgtgtgcacatgg

SEQ ID NO: 1047562 - DNA, 33 bp, Homo sapien
cccactttataaatcatgcctgtgtgcacatgg

SEQ ID NO: 1047563 - DNA, 33 bp, Homo sapien
agagcagctgaggttaagagtccccgggccgga

SEQ ID NO: 1047564 - DNA, 33 bp, Homo sapien
agagcagctgaggttaggagtccccgggccgga

SEQ ID NO: 1047565 - DNA, 33 bp, Homo sapien
tgtaccatctgaaaagaaaatcatagctgagag

SEQ ID NO: 1047566 - DNA, 33 bp, Homo sapien
tgtaccatctgaaaaggaaatcatagctgagag

SEQ ID NO: 1047567 - DNA, 33 bp, Homo sapien
taaacctcctttaccacacaaactcgagtgtct

SEQ ID NO: 1047568 - DNA, 33 bp, Homo sapien
taaacctcctttaccatacaaactcgagtgtct

SEQ ID NO: 1047569 - DNA, 33 bp, Homo sapien
atcagcaggggcatcacgttcaccctgccaacc

SEQ ID NO: 1047570 - DNA, 33 bp, Homo sapien
atcagcaggggcatcaggttcaccctgccaacc

SEQ ID NO: 1047571 - DNA, 33 bp, Homo sapien
atctacacagctgcaccgagcctggcgagcagc

SEQ ID NO: 1047572 - DNA, 33 bp, Homo sapien
atctacacagctgcacggagcctggcgagcagc

SEQ ID NO: 1047573 - DNA, 33 bp, Homo sapien
cgatttccttgtcttcaatgctgggcagttttg

SEQ ID NO: 1047574 - DNA, 33 bp, Homo sapien
cgatttccttgtcttcgatgctgggcagttttg

SEQ ID NO: 1047575 - DNA, 33 bp, Homo sapien
ctactcactctgtttcatcctagtttttttcct

SEQ ID NO: 1047576 - DNA, 33 bp, Homo sapien
ctactcactctgtttcttcctagtttttttcct

SEQ ID NO: 1047577 - DNA, 33 bp, Homo sapien
agagctggggttcgaaactagcatttcaggcac

SEQ ID NO: 1047578 - DNA, 33 bp, Homo sapien
agagctggggttcgaagctagcatttcaggcac

SEQ ID NO: 1047579 - DNA, 33 bp, Homo sapien
caacctgaatgggttacggtgtgcccaggcatt

SEQ ID NO: 1047580 - DNA, 33 bp, Homo sapien
caacctgaatgggttatggtgtgcccaggcatt

SEQ ID NO: 1047581 - DNA, 33 bp, Homo sapien
aagggcaagggaagaccgaagtcccagctccac

SEQ ID NO: 1047582 - DNA, 33 bp, Homo sapien
aagggcaagggaagacggaagtcccagctccac

SEQ ID NO: 1047583 - DNA, 33 bp, Homo sapien
ttagtgagtattctccacagacacagggcaaat

SEQ ID NO: 1047584 - DNA, 33 bp, Homo sapien
ttagtgagtattctccgcagacacagggcaaat

SEQ ID NO: 1047585 - DNA, 33 bp, Homo sapien
atgcaggaaacagtgacgagccacggaacaggt

SEQ ID NO: 1047586 - DNA, 33 bp, Homo sapien
atgcaggaaacagtgatgagccacggaacaggt

SEQ ID NO: 1047587 - DNA, 33 bp, Homo sapien
cgttattatttgaaaagtcggtacttatttacc

SEQ ID NO: 1047588 - DNA, 33 bp, Homo sapien
cgttattatttgaaaattcggtacttatttacc

SEQ ID NO: 1047589 - DNA, 33 bp, Homo sapien
catgtgtccattatcaaaattgatacattgtgc

SEQ ID NO: 1047590 - DNA, 33 bp, Homo sapien
catgtgtccattatcagaattgatacattgtgc

SEQ ID NO: 1047591 - DNA, 33 bp, Homo sapien
ccagcacctaccacgcagaacagcacgccccca

SEQ ID NO: 1047592 - DNA, 33 bp, Homo sapien
ccagcacctaccacgcggaacagcacgccccca

SEQ ID NO: 1047593 - DNA, 33 bp, Homo sapien
cattgtcactttttaaataggcttagcaattaa

SEQ ID NO: 1047594 - DNA, 33 bp, Homo sapien
cattgtcactttttaattaggcttagcaattaa

SEQ ID NO: 1047595 - DNA, 33 bp, Homo sapien
tgagcagaatctgagcagcattttgccagggat

SEQ ID NO: 1047596 - DNA, 33 bp, Homo sapien
tgagcagaatctgagcggcattttgccagggat

SEQ ID NO: 1047597 - DNA, 33 bp, Homo sapien
tcccccttcgggcatcgcaattttctttgttaa

SEQ ID NO: 1047598 - DNA, 33 bp, Homo sapien
tcccccttcgggcatctcaattttctttgttaa

SEQ ID NO: 1047599 - DNA, 33 bp, Homo sapien
ccacgtggcaagtgaacgtgactgctgtggccc

SEQ ID NO: 1047600 - DNA, 33 bp, Homo sapien
ccacgtggcaagtgaatgtgactgctgtggccc

SEQ ID NO: 1047601 - DNA, 33 bp, Homo sapien
agcagcttggaacatgcatttctgacctcacca

SEQ ID NO: 1047602 - DNA, 33 bp, Homo sapien
agcagcttggaacatgtatttctgacctcacca

SEQ ID NO: 1047603 - DNA, 33 bp, Homo sapien
gagcaagaatgcttacactttgtatctgttttc

SEQ ID NO: 1047604 - DNA, 33 bp, Homo sapien
gagcaagaatgcttacgctttgtatctgttttc

SEQ ID NO: 1047605 - DNA, 33 bp, Homo sapien
atagaacaaaatgtaactcagcatcagggcggg

SEQ ID NO: 1047606 - DNA, 33 bp, Homo sapien
atagaacaaaatgtaattcagcatcagggcggg

SEQ ID NO: 1047607 - DNA, 33 bp, Homo sapien
cctttggacaaaccttcaaaatctgtctctgga

SEQ ID NO: 1047608 - DNA, 33 bp, Homo sapien
cctttggacaaacctttaaaatctgtctctgga

SEQ ID NO: 1047609 - DNA, 33 bp, Homo sapien
tcttgactgtttaaaaattggttggtcttccta

SEQ ID NO: 1047610 - DNA, 33 bp, Homo sapien
tcttgactgtttaaaatttggttggtcttccta

SEQ ID NO: 1047611 - DNA, 33 bp, Homo sapien
ccctagtgcctggaaacggtatcatatctgtgg

SEQ ID NO: 1047612 - DNA, 33 bp, Homo sapien
ccctagtgcctggaaatggtatcatatctgtgg

SEQ ID NO: 1047613 - DNA, 33 bp, Homo sapien
aaagccagctaaaaaacacaaactcaagcctgg

SEQ ID NO: 1047614 - DNA, 33 bp, Homo sapien
aaagccagctaaaaaatacaaactcaagcctgg

SEQ ID NO: 1047615 - DNA, 33 bp, Homo sapien
cacacagaggcttacaaacagactcatacacac

SEQ ID NO: 1047616 - DNA, 33 bp, Homo sapien
cacacagaggcttacacacagactcatacacac

SEQ ID NO: 1047617 - DNA, 33 bp, Homo sapien; identical to SEQ ID NO: 1047615

SEQ ID NO: 1047618 - DNA, 33 bp, Homo sapien; identical to SEQ ID NO: 1047616

SEQ ID NO: 1047619 - DNA, 33 bp, Homo sapien
tagtcatgaatgagccaggccagagagtcaaga

SEQ ID NO: 1047620 - DNA, 33 bp, Homo sapien
tagtcatgaatgagccgggccagagagtcaaga

SEQ ID NO: 1047621 - DNA, 33 bp, Homo sapien
ttccccgctttttaccaatgaggagagcaaggc

SEQ ID NO: 1047622 - DNA, 33 bp, Homo sapien
ttccccgctttttaccgatgaggagagcaaggc

SEQ ID NO: 1047623 - DNA, 33 bp, Homo sapien
tccaggcatcagggataaggtgcaaaagccgtg

SEQ ID NO: 1047624 - DNA, 33 bp, Homo sapien
tccaggcatcagggatgaggtgcaaaagccgtg

SEQ ID NO: 1047625 - DNA, 33 bp, Homo sapien
cagctgcaggagtcctgaagaactagccaggca

SEQ ID NO: 1047626 - DNA, 33 bp, Homo sapien
cagctgcaggagtccttaagaactagccaggca

SEQ ID NO: 1047627 - DNA, 33 bp, Homo sapien
gccagcactcttcttacctcacacagctctgct

SEQ ID NO: 1047628 - DNA, 33 bp, Homo sapien
gccagcactcttcttatctcacacagctctgct

SEQ ID NO: 1047629 - DNA, 33 bp, Homo sapien
tcgcccgggcaccggacgctcaggcccctagct

SEQ ID NO: 1047630 - DNA, 33 bp, Homo sapien
tcgcccgggcaccggatgctcaggcccctagct

SEQ ID NO: 1047631 - DNA, 33 bp, Homo sapien
tatgacaaaatagagcaatgcttgcaggcagca

SEQ ID NO: 1047632 - DNA, 33 bp, Homo sapien
tatgacaaaatagagcgatgcttgcaggcagca

SEQ ID NO: 1047633 - DNA, 33 bp, Homo sapien
ccacatccatgcctgacggaacgtgagaggcca

SEQ ID NO: 1047634 - DNA, 33 bp, Homo sapien
ccacatccatgcctgatggaacgtgagaggcca

SEQ ID NO: 1047635 - DNA, 33 bp, Homo sapien
ctttagtatacacagaacgaggggaaaacatcc

SEQ ID NO: 1047636 - DNA, 33 bp, Homo sapien
ctttagtatacacagagcgaggggaaaacatcc

SEQ ID NO: 1047637 - DNA, 33 bp, Homo sapien
aggaggtgtggaataaagctccttgctctgagc

SEQ ID NO: 1047638 - DNA, 33 bp, Homo sapien
aggaggtgtggaataaggctccttgctctgagc

SEQ ID NO: 1047639 - DNA, 33 bp, Homo sapien
aagattttcaccaggacgcaaacctcgggcatg

SEQ ID NO: 1047640 - DNA, 33 bp, Homo sapien
aagattttcaccaggatgcaaacctcgggcatg

SEQ ID NO: 1047641 - DNA, 33 bp, Homo sapien
aaggcagaagctgccacgccattaaggagccag

SEQ ID NO: 1047642 - DNA, 33 bp, Homo sapien
aaggcagaagctgccatgccattaaggagccag

SEQ ID NO: 1047643 - DNA, 33 bp, Homo sapien
ctcccagcttgccttcaactcagggttacggag

SEQ ID NO: 1047644 - DNA, 33 bp, Homo sapien
ctcccagcttgccttcgactcagggttacggag

SEQ ID NO: 1047645 - DNA, 33 bp, Homo sapien
agacagaaaacgcatcagaaaccaaccagccca

SEQ ID NO: 1047646 - DNA, 33 bp, Homo sapien
agacagaaaacgcatcggaaaccaaccagccca

SEQ ID NO: 1047647 - DNA, 33 bp, Homo sapien
ggagcaatgaggtcctcaatgtttatggccccg

SEQ ID NO: 1047648 - DNA, 33 bp, Homo sapien
ggagcaatgaggtccttaatgtttatggccccg

SEQ ID NO: 1047649 - DNA, 33 bp, Homo sapien
gcagcctggcctcataacctgctggggcactcg

SEQ ID NO: 1047650 - DNA, 33 bp, Homo sapien
gcagcctggcctcatatcctgctggggcactcg

SEQ ID NO: 1047651 - DNA, 33 bp, Homo sapien
ctgctggttagcaaccacagaaacaaacgcatc

SEQ ID NO: 1047652 - DNA, 33 bp, Homo sapien
ctgctggttagcaaccgcagaaacaaacgcatc

SEQ ID NO: 1047653 - DNA, 33 bp, Homo sapien
gcagccatgtggtggaaggggatggaactcagt

SEQ ID NO: 1047654 - DNA, 33 bp, Homo sapien
gcagccatgtggtggacggggatggaactcagt

SEQ ID NO: 1047655 - DNA, 33 bp, Homo sapien
ttgcttagccagggtcacgaatcaggaagcttt

SEQ ID NO: 1047656 - DNA, 33 bp, Homo sapien
ttgcttagccagggtcgcgaatcaggaagcttt

SEQ ID NO: 1047657 - DNA, 33 bp, Homo sapien
cggccccattgactcgcagccattggagaactg

SEQ ID NO: 1047658 - DNA, 33 bp, Homo sapien
cggccccattgactcgtagccattggagaactg

SEQ ID NO: 1047659 - DNA, 33 bp, Homo sapien
tccaagtttccagaccaccaaaagattcttaag

SEQ ID NO: 1047660 - DNA, 33 bp, Homo sapien
tccaagtttccagaccgccaaaagattcttaag

SEQ ID NO: 1047661 - DNA, 33 bp, Homo sapien
ccagcctcagaagtaacaagccaagttcagaag

SEQ ID NO: 1047662 - DNA, 33 bp, Homo sapien
ccagcctcagaagtaataagccaagttcagaag

SEQ ID NO: 1047663 - DNA, 33 bp, Homo sapien
cttatattttgatgccaactgacaaatgacctc

SEQ ID NO: 1047664 - DNA, 33 bp, Homo sapien
cttatattttgatgccgactgacaaatgacctc

SEQ ID NO: 1047665 - DNA, 33 bp, Homo sapien
ctgatggtttgaccaccaaatcagcacaacact

SEQ ID NO: 1047666 - DNA, 33 bp, Homo sapien
ctgatggtttgaccacgaaatcagcacaacact

SEQ ID NO: 1047667 - DNA, 33 bp, Homo sapien
gcccctcatctcacaccggaatgaaaaatgcaa

SEQ ID NO: 1047668 - DNA, 33 bp, Homo sapien
gcccctcatctcacactggaatgaaaaatgcaa

SEQ ID NO: 1047669 - DNA, 33 bp, Homo sapien
accccgctgacctaacactgcaactgctggctg

SEQ ID NO: 1047670 - DNA, 33 bp, Homo sapien
accccgctgacctaacgctgcaactgctggctg

SEQ ID NO: 1047671 - DNA, 33 bp, Homo sapien
aagttcatgcttccacacggaaaggtttttcct

SEQ ID NO: 1047672 - DNA, 33 bp, Homo sapien
aagttcatgcttccacgcggaaaggtttttcct

SEQ ID NO: 1047673 - DNA, 33 bp, Homo sapien
gaagaaaatccacaggcaaatggatccatgcag

SEQ ID NO: 1047674 - DNA, 33 bp, Homo sapien
gaagaaaatccacaggtaaatggatccatgcag

SEQ ID NO: 1047675 - DNA, 33 bp, Homo sapien
ggaggcacatgtatccactcatcagttgctcct

SEQ ID NO: 1047676 - DNA, 33 bp, Homo sapien
ggaggcacatgtatccgctcatcagttgctcct

SEQ ID NO: 1047677 - DNA, 33 bp, Homo sapien
agatgttctaagattacgttgaggtgctggttg

SEQ ID NO: 1047678 - DNA, 33 bp, Homo sapien
agatgttctaagattatgttgaggtgctggttg

SEQ ID NO: 1047679 - DNA, 33 bp, Homo sapien
cttgggatattgcagcccattttttcccatagg

SEQ ID NO: 1047680 - DNA, 33 bp, Homo sapien
cttgggatattgcagcgcattttttcccatagg

SEQ ID NO: 1047681 - DNA, 33 bp, Homo sapien
ccctgttgtaaggacccgattaattacactgga

SEQ ID NO: 1047682 - DNA, 33 bp, Homo sapien
ccctgttgtaaggacctgattaattacactgga

SEQ ID NO: 1047683 - DNA, 33 bp, Homo sapien
gtgatggggaaccctacggtgatgctctggaaa

SEQ ID NO: 1047684 - DNA, 33 bp, Homo sapien
gtgatggggaaccctatggtgatgctctggaaa

SEQ ID NO: 1047685 - DNA, 33 bp, Homo sapien
tttaagaaagttcacacccgagaacagctgcct

SEQ ID NO: 1047686 - DNA, 33 bp, Homo sapien
tttaagaaagttcacatccgagaacagctgcct

SEQ ID NO: 1047687 - DNA, 33 bp, Homo sapien
atttggaaatgaacccacaaaaggcctctgggt

SEQ ID NO: 1047688 - DNA, 33 bp, Homo sapien
atttggaaatgaacccgcaaaaggcctctgggt

SEQ ID NO: 1047689 - DNA, 33 bp, Homo sapien
aggcttcaattccataacatacaagagcttgta

SEQ ID NO: 1047690 - DNA, 33 bp, Homo sapien
aggcttcaattccatatcatacaagagcttgta

SEQ ID NO: 1047691 - DNA, 33 bp, Homo sapien
agaaaagtaaaatccgcagaagtgcaaggggta

SEQ ID NO: 1047692 - DNA, 33 bp, Homo sapien
agaaaagtaaaatccggagaagtgcaaggggta

SEQ ID NO: 1047693 - DNA, 33 bp, Homo sapien
ttgttgatatgtgaaacgtggtctgtgatgtcc

SEQ ID NO: 1047694 - DNA, 33 bp, Homo sapien
ttgttgatatgtgaaatgtggtctgtgatgtcc

SEQ ID NO: 1047695 - DNA, 33 bp, Homo sapien
tgccagccacagaaggcactgaagccagaaggg

SEQ ID NO: 1047696 - DNA, 33 bp, Homo sapien
tgccagccacagaaggtactgaagccagaaggg

SEQ ID NO: 1047697 - DNA, 33 bp, Homo sapien
gcaatgccttcccacacgtttccatatcactgg

SEQ ID NO: 1047698 - DNA, 33 bp, Homo sapien
gcaatgccttcccacatgtttccatatcactgg

SEQ ID NO: 1047699 - DNA, 33 bp, Homo sapien
ccaaccagaagtcaagccccatccacactagca

SEQ ID NO: 1047700 - DNA, 33 bp, Homo sapien
ccaaccagaagtcaagtcccatccacactagca

SEQ ID NO: 1047701 - DNA, 33 bp, Homo sapien
gccatagtagcagaagccttacctttagtgcta

SEQ ID NO: 1047702 - DNA, 33 bp, Homo sapien
gccatagtagcagaagtcttacctttagtgcta

SEQ ID NO: 1047703 - DNA, 33 bp, Homo sapien
gcaatgaaaaaggtgaatatgtggttagaactc

SEQ ID NO: 1047704 - DNA, 33 bp, Homo sapien
gcaatgaaaaaggtgagtatgtggttagaactc

SEQ ID NO: 1047705 - DNA, 33 bp, Homo sapien
agagctctggacctaacgatgaaggctttggac

SEQ ID NO: 1047706 - DNA, 33 bp, Homo sapien
agagctctggacctaatgatgaaggctttggac

SEQ ID NO: 1047707 - DNA, 33 bp, Homo sapien
atctgcctcttcctaacgtggttctcacggaag

SEQ ID NO: 1047708 - DNA, 33 bp, Homo sapien
atctgcctcttcctaatgtggttctcacggaag

SEQ ID NO: 1047709 - DNA, 33 bp, Homo sapien
cacctcctgaatcgaaccccacctcctgaatgg

SEQ ID NO: 1047710 - DNA, 33 bp, Homo sapien
cacctcctgaatcgaatcccacctcctgaatgg

SEQ ID NO: 1047711 - DNA, 33 bp, Homo sapien
aggcattttgggaaaaaatagtgagtcataaca

SEQ ID NO: 1047712 - DNA, 33 bp, Homo sapien
aggcattttgggaaaatatagtgagtcataaca

SEQ ID NO: 1047713 - DNA, 33 bp, Homo sapien
ccggccgcctttatgaacttcgtgcagcttgca

SEQ ID NO: 1047714 - DNA, 33 bp, Homo sapien
ccggccgcctttatgagcttcgtgcagcttgca

SEQ ID NO: 1047715 - DNA, 33 bp, Homo sapien
gcacagcgcagttgcagaacggccgagctggca

SEQ ID NO: 1047716 - DNA, 33 bp, Homo sapien
gcacagcgcagttgcataacggccgagctggca

SEQ ID NO: 1047717 - DNA, 33 bp, Homo sapien
cttctggcactccgctcaaacactgcccgactg

SEQ ID NO: 1047718 - DNA, 33 bp, Homo sapien
cttctggcactccgcttaaacactgcccgactg

SEQ ID NO: 1047719 - DNA, 33 bp, Homo sapien
ggcctttgtgaccccacgacatatgcggagtga

SEQ ID NO: 1047720 - DNA, 33 bp, Homo sapien
ggcctttgtgaccccatgacatatgcggagtga

SEQ ID NO: 1047721 - DNA, 33 bp, Homo sapien
ttctctgaagagtgaggcaatcattaagcactc

SEQ ID NO: 1047722 - DNA, 33 bp, Homo sapien
ttctctgaagagtgagtcaatcattaagcactc

SEQ ID NO: 1047723 - DNA, 33 bp, Homo sapien
cacggcgcagggtacccgagacagctgcatcct

SEQ ID NO: 1047724 - DNA, 33 bp, Homo sapien
cacggcgcagggtacctgagacagctgcatcct

SEQ ID NO: 1047725 - DNA, 33 bp, Homo sapien
gtttgtgttgtttgaagtcccctcgtttgtggc

SEQ ID NO: 1047726 - DNA, 33 bp, Homo sapien
gtttgtgttgtttgaattcccctcgtttgtggc

SEQ ID NO: 1047727 - DNA, 33 bp, Homo sapien
acccctcgtttccttccaggagctcacagtctg

SEQ ID NO: 1047728 - DNA, 33 bp, Homo sapien
acccctcgtttccttctaggagctcacagtctg

SEQ ID NO: 1047729 - DNA, 33 bp, Homo sapien
aggtgtggcctcaatcaatcttcacaaccatgc

SEQ ID NO: 1047730 - DNA, 33 bp, Homo sapien
aggtgtggcctcaatcgatcttcacaaccatgc

SEQ ID NO: 1047731 - DNA, 33 bp, Homo sapien
gtgactcccagaggtactaaggaaaggagaaag

SEQ ID NO: 1047732 - DNA, 33 bp, Homo sapien
gtgactcccagaggtattaaggaaaggagaaag

SEQ ID NO: 1047733 - DNA, 33 bp, Homo sapien
atgacatcaaagcctcaaacttcagtgtctagc

SEQ ID NO: 1047734 - DNA, 33 bp, Homo sapien
atgacatcaaagcctcgaacttcagtgtctagc

SEQ ID NO: 1047735 - DNA, 33 bp, Homo sapien
ttgtcactcataactgcaccatctccatgcact

SEQ ID NO: 1047736 - DNA, 33 bp, Homo sapien
ttgtcactcataactgtaccatctccatgcact

SEQ ID NO: 1047737 - DNA, 33 bp, Homo sapien
aagccagcccagacacaagatttgaaggtcctt

SEQ ID NO: 1047738 - DNA, 33 bp, Homo sapien
aagccagcccagacacgagatttgaaggtcctt

SEQ ID NO: 1047739 - DNA, 33 bp, Homo sapien
ggctttgtggccacctaactgatagatcgtgat

SEQ ID NO: 1047740 - DNA, 33 bp, Homo sapien
ggctttgtggccacctgactgatagatcgtgat

SEQ ID NO: 1047741 - DNA, 33 bp, Homo sapien
agaacaataccgatcaaagagttgaggggttac

SEQ ID NO: 1047742 - DNA, 33 bp, Homo sapien
agaacaataccgatcagagagttgaggggttac

SEQ ID NO: 1047743 - DNA, 33 bp, Homo sapien
gggaacaggattcttcacctgtacagaagggag

SEQ ID NO: 1047744 - DNA, 33 bp, Homo sapien
gggaacaggattcttcccctgtacagaagggag

SEQ ID NO: 1047745 - DNA, 33 bp, Homo sapien
acccatgatcggtcagaaaccgtggctcagggt

SEQ ID NO: 1047746 - DNA, 33 bp, Homo sapien
acccatgatcggtcagcaaccgtggctcagggt

SEQ ID NO: 1047747 - DNA, 33 bp, Homo sapien
tctattttgtcctctgcaggtgccttttcctcc

SEQ ID NO: 1047748 - DNA, 33 bp, Homo sapien
tctattttgtcctctgtaggtgccttttcctcc

SEQ ID NO: 1047749 - DNA, 33 bp, Homo sapien
gaccctggggctttgaacgtgtgagaagagggc

SEQ ID NO: 1047750 - DNA, 33 bp, Homo sapien
gaccctggggctttgagcgtgtgagaagagggc

SEQ ID NO: 1047751 - DNA, 33 bp, Homo sapien
cgtgtggttttcaaaaagaaatggctcttgaat

SEQ ID NO: 1047752 - DNA, 33 bp, Homo sapien
cgtgtggttttcaaaaggaaatggctcttgaat

SEQ ID NO: 1047753 - DNA, 33 bp, Homo sapien
ttctggtcgaacggtaagtcacagataggttcc

SEQ ID NO: 1047754 - DNA, 33 bp, Homo sapien
ttctggtcgaacggtaggtcacagataggttcc

SEQ ID NO: 1047755 - DNA, 33 bp, Homo sapien
cccgtgtgccataaaacagtgtctgcaggcccg

SEQ ID NO: 1047756 - DNA, 33 bp, Homo sapien
cccgtgtgccataaaagagtgtctgcaggcccg

SEQ ID NO: 1047757 - DNA, 33 bp, Homo sapien
ggcacctgcccaattcacctggcagattcaggc

SEQ ID NO: 1047758 - DNA, 33 bp, Homo sapien
ggcacctgcccaattcgcctggcagattcaggc

SEQ ID NO: 1047759 - DNA, 33 bp, Homo sapien
atatgttttgcattcacatgtgcggtgtgtgtg

SEQ ID NO: 1047760 - DNA, 33 bp, Homo sapien
atatgttttgcattcatatgtgcggtgtgtgtg

SEQ ID NO: 1047761 - DNA, 33 bp, Homo sapien
gaggttcttggggtcaaagtccacccgtctgag

SEQ ID NO: 1047762 - DNA, 33 bp, Homo sapien
gaggttcttggggtcagagtccacccgtctgag

SEQ ID NO: 1047763 - DNA, 33 bp, Homo sapien
agtgcatcctgtgataggaaaccaagctccaaa

SEQ ID NO: 1047764 - DNA, 33 bp, Homo sapien
agtgcatcctgtgatatgaaaccaagctccaaa

SEQ ID NO: 1047765 - DNA, 33 bp, Homo sapien
aataagtaatgcaaaacattttgaggtcaatgg

SEQ ID NO: 1047766 - DNA, 33 bp, Homo sapien
aataagtaatgcaaaagattttgaggtcaatgg

SEQ ID NO: 1047767 - DNA, 33 bp, Homo sapien
cggccatgtgctacacactacgcaaggctcctc

SEQ ID NO: 1047768 - DNA, 33 bp, Homo sapien
cggccatgtgctacacgctacgcaaggctcctc

SEQ ID NO: 1047769 - DNA, 33 bp, Homo sapien
cactgcgctctgacatcacgaaccaccttctca

SEQ ID NO: 1047770 - DNA, 33 bp, Homo sapien
cactgcgctctgacattacgaaccaccttctca

SEQ ID NO: 1047771 - DNA, 33 bp, Homo sapien
tttctgctgaagccaaataagaatcgacggacg

SEQ ID NO: 1047772 - DNA, 33 bp, Homo sapien
tttctgctgaagccaagtaagaatcgacggacg

SEQ ID NO: 1047773 - DNA, 33 bp, Homo sapien
ttggaggtcagaggaaagagagaaaggacacat

SEQ ID NO: 1047774 - DNA, 33 bp, Homo sapien
ttggaggtcagaggaaggagagaaaggacacat

SEQ ID NO: 1047775 - DNA, 33 bp, Homo sapien
gagattgtaggctttccatcacgttgttattga

SEQ ID NO: 1047776 - DNA, 33 bp, Homo sapien
gagattgtaggctttctatcacgttgttattga

SEQ ID NO: 1047777 - DNA, 33 bp, Homo sapien
ggggaattttccttagaagatcacgtgtgcctc

SEQ ID NO: 1047778 - DNA, 33 bp, Homo sapien
ggggaattttccttaggagatcacgtgtgcctc

SEQ ID NO: 1047779 - DNA, 33 bp, Homo sapien
aagtgggaccttggacaagccctgcatgacctg

SEQ ID NO: 1047780 - DNA, 33 bp, Homo sapien
aagtgggaccttggaccagccctgcatgacctg

SEQ ID NO: 1047781 - DNA, 33 bp, Homo sapien
aacgtcagcctctcctgagcaggtcatgcaggg

SEQ ID NO: 1047782 - DNA, 33 bp, Homo sapien
aacgtcagcctctccttagcaggtcatgcaggg

SEQ ID NO: 1047783 - DNA, 33 bp, Homo sapien
tgggggaacagtgagacggtgaaaggtcagcgt

SEQ ID NO: 1047784 - DNA, 33 bp, Homo sapien
tgggggaacagtgagatggtgaaaggtcagcgt

SEQ ID NO: 1047785 - DNA, 33 bp, Homo sapien
gacacgtaacatggccagaagttatcggcagaa

SEQ ID NO: 1047786 - DNA, 33 bp, Homo sapien
gacacgtaacatggccggaagttatcggcagaa

SEQ ID NO: 1047787 - DNA, 33 bp, Homo sapien
cccccacgcctgcaccaggacacgtaacatggc

SEQ ID NO: 1047788 - DNA, 33 bp, Homo sapien
cccccacgcctgcaccgggacacgtaacatggc

SEQ ID NO: 1047789 - DNA, 33 bp, Homo sapien
tgtcctgctacttaaccgtcgtccaaatttaaa

SEQ ID NO: 1047790 - DNA, 33 bp, Homo sapien
tgtcctgctacttaactgtcgtccaaatttaaa

SEQ ID NO: 1047791 - DNA, 33 bp, Homo sapien
tgcaggagcggtcctgaatgcttgttagtgaaa

SEQ ID NO: 1047792 - DNA, 33 bp, Homo sapien
tgcaggagcggtcctggatgcttgttagtgaaa

SEQ ID NO: 1047793 - DNA, 33 bp, Homo sapien
aaaaagaaagagattacaagacagagagacaca

SEQ ID NO: 1047794 - DNA, 33 bp, Homo sapien
aaaaagaaagagattagaagacagagagacaca

SEQ ID NO: 1047795 - DNA, 33 bp, Homo sapien
cacaggctacttcatccagaccagaaaggactc

SEQ ID NO: 1047796 - DNA, 33 bp, Homo sapien
cacaggctacttcatctagaccagaaaggactc

SEQ ID NO: 1047797 - DNA, 33 bp, Homo sapien
agttttgctaatgtcaaagttaacacgaaacaa

SEQ ID NO: 1047798 - DNA, 33 bp, Homo sapien
agttttgctaatgtcatagttaacacgaaacaa

SEQ ID NO: 1047799 - DNA, 33 bp, Homo sapien
ttttgtgggttattcacgaaagcaggctagcag

SEQ ID NO: 1047800 - DNA, 33 bp, Homo sapien
ttttgtgggttattcatgaaagcaggctagcag

SEQ ID NO: 1047801 - DNA, 33 bp, Homo sapien
aagatctcaggtcaaacgtggctccaacctggg

SEQ ID NO: 1047802 - DNA, 33 bp, Homo sapien
aagatctcaggtcaaatgtggctccaacctggg

SEQ ID NO: 1047803 - DNA, 33 bp, Homo sapien
ttttgaaatgtaggcaaatgcttgtgaaatgga

SEQ ID NO: 1047804 - DNA, 33 bp, Homo sapien
ttttgaaatgtaggcagatgcttgtgaaatgga

SEQ ID NO: 1047805 - DNA, 33 bp, Homo sapien
atatcataaaggaatcaatatcaactaggttgg

SEQ ID NO: 1047806 - DNA, 33 bp, Homo sapien
atatcataaaggaatcgatatcaactaggttgg

SEQ ID NO: 1047807 - DNA, 33 bp, Homo sapien
attgaggcaaaacacacggcgatttcagtctat

SEQ ID NO: 1047808 - DNA, 33 bp, Homo sapien
attgaggcaaaacacatggcgatttcagtctat

SEQ ID NO: 1047809 - DNA, 33 bp, Homo sapien
acatccttgctgtcaaatccctgcatgaaacac

SEQ ID NO: 1047810 - DNA, 33 bp, Homo sapien
acatccttgctgtcaactccctgcatgaaacac

SEQ ID NO: 1047811 - DNA, 33 bp, Homo sapien
acggccttcaaactccacgatactgtaaaaaca

SEQ ID NO: 1047812 - DNA, 33 bp, Homo sapien
acggccttcaaactccgcgatactgtaaaaaca

SEQ ID NO: 1047813 - DNA, 33 bp, Homo sapien
gaattgggagcaggtacaataacgtgagcctga

SEQ ID NO: 1047814 - DNA, 33 bp, Homo sapien
gaattgggagcaggtataataacgtgagcctga

SEQ ID NO: 1047815 - DNA, 33 bp, Homo sapien
gcatggcatgactgaacggcttggaacaaacac

SEQ ID NO: 1047816 - DNA, 33 bp, Homo sapien
gcatggcatgactgaatggcttggaacaaacac

SEQ ID NO: 1047817 - DNA, 33 bp, Homo sapien
agcggattttttgaaaacgtacaatgtgtcatt

SEQ ID NO: 1047818 - DNA, 33 bp, Homo sapien
agcggattttttgaaaccgtacaatgtgtcatt

SEQ ID NO: 1047819 - DNA, 33 bp, Homo sapien
gccatcgaatccagaacaggagagagagcaagg

SEQ ID NO: 1047820 - DNA, 33 bp, Homo sapien
gccatcgaatccagaagaggagagagagcaagg

SEQ ID NO: 1047821 - DNA, 33 bp, Homo sapien
acacacaccacacaaacagtgaccttgcgacgt

SEQ ID NO: 1047822 - DNA, 33 bp, Homo sapien
acacacaccacacaaagagtgaccttgcgacgt

SEQ ID NO: 1047823 - DNA, 33 bp, Homo sapien
caggatttctggaatgcatgtgagacacagagc

SEQ ID NO: 1047824 - DNA, 33 bp, Homo sapien
caggatttctggaatgtatgtgagacacagagc

SEQ ID NO: 1047825 - DNA, 33 bp, Homo sapien
ttcaaggacactgaacaagttggtgcgaaacta

SEQ ID NO: 1047826 - DNA, 33 bp, Homo sapien
ttcaaggacactgaactagttggtgcgaaacta

SEQ ID NO: 1047827 - DNA, 33 bp, Homo sapien
ggcccaacagggttctaacatggagggagcgtc

SEQ ID NO: 1047828 - DNA, 33 bp, Homo sapien
ggcccaacagggttctgacatggagggagcgtc

SEQ ID NO: 1047829 - DNA, 33 bp, Homo sapien
atgcactgtggcctcacgcttcagccattcact

SEQ ID NO: 1047830 - DNA, 33 bp, Homo sapien
atgcactgtggcctcatgcttcagccattcact

SEQ ID NO: 1047831 - DNA, 33 bp, Homo sapien
acctcctatgactaagaatgcctaacctcctgg

SEQ ID NO: 1047832 - DNA, 33 bp, Homo sapien
acctcctatgactaagcatgcctaacctcctgg

SEQ ID NO: 1047833 - DNA, 33 bp, Homo sapien
aatagccagttagcaggcctcagagcttctctg

SEQ ID NO: 1047834 - DNA, 33 bp, Homo sapien
aatagccagttagcagtcctcagagcttctctg

SEQ ID NO: 1047835 - DNA, 33 bp, Homo sapien
ggcccactttgaagatcagcttttatggagaag

SEQ ID NO: 1047836 - DNA, 33 bp, Homo sapien
ggcccactttgaagattagcttttatggagaag

SEQ ID NO: 1047837 - DNA, 33 bp, Homo sapien
aagtcgtgccagtagccgagcaaagctggtatt

SEQ ID NO: 1047838 - DNA, 33 bp, Homo sapien
aagtcgtgccagtagctgagcaaagctggtatt

SEQ ID NO: 1047839 - DNA, 33 bp, Homo sapien
tttaagaaggcttttgcagcccttaagccctaa

SEQ ID NO: 1047840 - DNA, 33 bp, Homo sapien
tttaagaaggcttttgtagcccttaagccctaa

SEQ ID NO: 1047841 - DNA, 33 bp, Homo sapien
gccaacctgaaggcggccagtcagaagttccag

SEQ ID NO: 1047842 - DNA, 33 bp, Homo sapien
gccaacctgaaggcggtcagtcagaagttccag

SEQ ID NO: 1047843 - DNA, 33 bp, Homo sapien
ttgagaacgatgcactcagagcgtcctccgctc

SEQ ID NO: 1047844 - DNA, 33 bp, Homo sapien
ttgagaacgatgcacttagagcgtcctccgctc

SEQ ID NO: 1047845 - DNA, 33 bp, Homo sapien
gacctttgtcctccctcaaagctgatggaaact

SEQ ID NO: 1047846 - DNA, 33 bp, Homo sapien
gacctttgtcctccctgaaagctgatggaaact

SEQ ID NO: 1047847 - DNA, 33 bp, Homo sapien
cacacacgtgaatacacatggacatacatacct

SEQ ID NO: 1047848 - DNA, 33 bp, Homo sapien
cacacacgtgaatacatatggacatacatacct

SEQ ID NO: 1047849 - DNA, 33 bp, Homo sapien
agtctggtcaatgggacgtgagaggaagtgctg

SEQ ID NO: 1047850 - DNA, 33 bp, Homo sapien
agtctggtcaatgggaggtgagaggaagtgctg

SEQ ID NO: 1047851 - DNA, 33 bp, Homo sapien
acgttcaaggggaaataagttgaactccacctc

SEQ ID NO: 1047852 - DNA, 33 bp, Homo sapien
acgttcaaggggaaatgagttgaactccacctc

SEQ ID NO: 1047853 - DNA, 33 bp, Homo sapien
aggcaggagttccagcaaaggggaggacacgcc

SEQ ID NO: 1047854 - DNA, 33 bp, Homo sapien
aggcaggagttccagcgaaggggaggacacgcc

SEQ ID NO: 1047855 - DNA, 33 bp, Homo sapien
gcccacaggcgcatcaagaccaactccctagcg

SEQ ID NO: 1047856 - DNA, 33 bp, Homo sapien
gcccacaggcgcatcaggaccaactccctagcg

SEQ ID NO: 1047857 - DNA, 33 bp, Homo sapien
tcagctttaggagatacgtccgggtgcccctca

SEQ ID NO: 1047858 - DNA, 33 bp, Homo sapien
tcagctttaggagatatgtccgggtgcccctca

SEQ ID NO: 1047859 - DNA, 33 bp, Homo sapien
ttattctctccaccagaacgagctgagggtgca

SEQ ID NO: 1047860 - DNA, 33 bp, Homo sapien
ttattctctccaccaggacgagctgagggtgca

SEQ ID NO: 1047861 - DNA, 33 bp, Homo sapien
actgagcttttcagagaccccgaagaccaatgt

SEQ ID NO: 1047862 - DNA, 33 bp, Homo sapien
actgagcttttcagaggccccgaagaccaatgt

SEQ ID NO: 1047863 - DNA, 33 bp, Homo sapien
gccttcttaggtgagtcaacgggtcagcacgat

SEQ ID NO: 1047864 - DNA, 33 bp, Homo sapien
gccttcttaggtgagtgaacgggtcagcacgat

SEQ ID NO: 1047865 - DNA, 33 bp, Homo sapien
ctgtcttcactgcgtccgaactgagcttggttc

SEQ ID NO: 1047866 - DNA, 33 bp, Homo sapien
ctgtcttcactgcgtctgaactgagcttggttc

SEQ ID NO: 1047867 - DNA, 33 bp, Homo sapien
cttggaattccagtaacgcaaattgtccaaccc

SEQ ID NO: 1047868 - DNA, 33 bp, Homo sapien
cttggaattccagtaatgcaaattgtccaaccc

SEQ ID NO: 1047869 - DNA, 33 bp, Homo sapien
gtgtgtttatgcccgaatccttagtgtcggcct

SEQ ID NO: 1047870 - DNA, 33 bp, Homo sapien
gtgtgtttatgcccgagtccttagtgtcggcct

SEQ ID NO: 1047871 - DNA, 33 bp, Homo sapien
cttttattttgttcaaacctaactttctgctaa

SEQ ID NO: 1047872 - DNA, 33 bp, Homo sapien
cttttattttgttcaagcctaactttctgctaa

SEQ ID NO: 1047873 - DNA, 33 bp, Homo sapien
agtacgaagatctccactgcagtcacctgttca

SEQ ID NO: 1047874 - DNA, 33 bp, Homo sapien
agtacgaagatctccattgcagtcacctgttca

SEQ ID NO: 1047875 - DNA, 33 bp, Homo sapien
ctaacagaagaaaaacaactttgtctcattcaa

SEQ ID NO: 1047876 - DNA, 33 bp, Homo sapien
ctaacagaagaaaaacgactttgtctcattcaa

SEQ ID NO: 1047877 - DNA, 33 bp, Homo sapien
cccagtcccctgctacagaaccaggagcatgga

SEQ ID NO: 1047878 - DNA, 33 bp, Homo sapien
cccagtcccctgctacggaaccaggagcatgga

SEQ ID NO: 1047879 - DNA, 33 bp, Homo sapien
cggatcggctgaagagaaattaggaactcaacc

SEQ ID NO: 1047880 - DNA, 33 bp, Homo sapien
cggatcggctgaagagcaattaggaactcaacc

SEQ ID NO: 1047881 - DNA, 33 bp, Homo sapien
acttaatttactgacaggtagaccatttactcc

SEQ ID NO: 1047882 - DNA, 33 bp, Homo sapien
acttaatttactgacatgtagaccatttactcc

SEQ ID NO: 1047883 - DNA, 33 bp, Homo sapien
tatttgagctcccgcaataggaggaaaagattt

SEQ ID NO: 1047884 - DNA, 33 bp, Homo sapien
tatttgagctcccgcagtaggaggaaaagattt

SEQ ID NO: 1047885 - DNA, 33 bp, Homo sapien
gaatggagctgctgtgaatctccaagtgcgcgt

SEQ ID NO: 1047886 - DNA, 33 bp, Homo sapien
gaatggagctgctgtggatctccaagtgcgcgt

SEQ ID NO: 1047887 - DNA, 33 bp, Homo sapien
tggggctcagcaaggagggtttaatatttgaaa

SEQ ID NO: 1047888 - DNA, 33 bp, Homo sapien
tggggctcagcaaggatggtttaatatttgaaa

SEQ ID NO: 1047889 - DNA, 33 bp, Homo sapien
gggagaagtactccacaaggaaaaggagcaaag

SEQ ID NO: 1047890 - DNA, 33 bp, Homo sapien
gggagaagtactccacgaggaaaaggagcaaag

SEQ ID NO: 1047891 - DNA, 33 bp, Homo sapien
gtcctccagctcagaaactcagagtggaaccat

SEQ ID NO: 1047892 - DNA, 33 bp, Homo sapien
gtcctccagctcagaagctcagagtggaaccat

SEQ ID NO: 1047893 - DNA, 33 bp, Homo sapien
tgctgtgtgggctagacaaaaggtgtccacatg

SEQ ID NO: 1047894 - DNA, 33 bp, Homo sapien
tgctgtgtgggctagataaaaggtgtccacatg

SEQ ID NO: 1047895 - DNA, 33 bp, Homo sapien
acaaattcagtaacaacgaacattctcagcaca

SEQ ID NO: 1047896 - DNA, 33 bp, Homo sapien
acaaattcagtaacaatgaacattctcagcaca

SEQ ID NO: 1047897 - DNA, 33 bp, Homo sapien
ccctgtgtgtctcttacaagaaagtcgcactgg

SEQ ID NO: 1047898 - DNA, 33 bp, Homo sapien
ccctgtgtgtctcttataagaaagtcgcactgg

SEQ ID NO: 1047899 - DNA, 33 bp, Homo sapien
aaagaaagctatccccaaccttccagcgtgtga

SEQ ID NO: 1047900 - DNA, 33 bp, Homo sapien
aaagaaagctatccccgaccttccagcgtgtga

SEQ ID NO: 1047901 - DNA, 33 bp, Homo sapien
ctacaacagaaagtccacaggtcccaatgccct

SEQ ID NO: 1047902 - DNA, 33 bp, Homo sapien
ctacaacagaaagtccgcaggtcccaatgccct

SEQ ID NO: 1047903 - DNA, 33 bp, Homo sapien
agatgtttgcggttgcagaagtggcctaaagat

SEQ ID NO: 1047904 - DNA, 33 bp, Homo sapien
agatgtttgcggttgcggaagtggcctaaagat

SEQ ID NO: 1047905 - DNA, 33 bp, Homo sapien
acacattgttggccacagctaaccagtgaaatc

SEQ ID NO: 1047906 - DNA, 33 bp, Homo sapien
acacattgttggccacggctaaccagtgaaatc

SEQ ID NO: 1047907 - DNA, 33 bp, Homo sapien
aggccctcaagtaacccggaaatctgctctatg

SEQ ID NO: 1047908 - DNA, 33 bp, Homo sapien
aggccctcaagtaacctggaaatctgctctatg

SEQ ID NO: 1047909 - DNA, 33 bp, Homo sapien
tgtctttactctcatgaatgtattttggtgtag

SEQ ID NO: 1047910 - DNA, 33 bp, Homo sapien
tgtctttactctcatggatgtattttggtgtag

SEQ ID NO: 1047911 - DNA, 33 bp, Homo sapien
caaaataaccatgtaaacttactagaatatgag

SEQ ID NO: 1047912 - DNA, 33 bp, Homo sapien
caaaataaccatgtaaccttactagaatatgag

SEQ ID NO: 1047913 - DNA, 33 bp, Homo sapien
ctgattggtgtgcaaacgtgagagaattctgtt

SEQ ID NO: 1047914 - DNA, 33 bp, Homo sapien
ctgattggtgtgcaaaggtgagagaattctgtt

SEQ ID NO: 1047915 - DNA, 33 bp, Homo sapien
tggcataagaccttcacgtagcttctccatgtg

SEQ ID NO: 1047916 - DNA, 33 bp, Homo sapien
tggcataagaccttcatgtagcttctccatgtg

SEQ ID NO: 1047917 - DNA, 33 bp, Homo sapien
ctaattttccttgaagccacgttggtaccaggc

SEQ ID NO: 1047918 - DNA, 33 bp, Homo sapien
ctaattttccttgaaggcacgttggtaccaggc

SEQ ID NO: 1047919 - DNA, 33 bp, Homo sapien
ctttaacatgtcttgccactctggcattttatc

SEQ ID NO: 1047920 - DNA, 33 bp, Homo sapien
ctttaacatgtcttgctactctggcattttatc

SEQ ID NO: 1047921 - DNA, 33 bp, Homo sapien
ctcaccatgtggtatcaagtggggagggtgcta

SEQ ID NO: 1047922 - DNA, 33 bp, Homo sapien
ctcaccatgtggtatcgagtggggagggtgcta

SEQ ID NO: 1047923 - DNA, 33 bp, Homo sapien
gggccatctgttctcccgacagcttacttacga

SEQ ID NO: 1047924 - DNA, 33 bp, Homo sapien
gggccatctgttctcctgacagcttacttacga

SEQ ID NO: 1047925 - DNA, 33 bp, Homo sapien
aaaacgtgcattcagcccagagggtgacgtgtc

SEQ ID NO: 1047926 - DNA, 33 bp, Homo sapien
aaaacgtgcattcagctcagagggtgacgtgtc

SEQ ID NO: 1047927 - DNA, 33 bp, Homo sapien
ttccattcggcaactaagggaatacagagctgt

SEQ ID NO: 1047928 - DNA, 33 bp, Homo sapien
ttccattcggcaactacgggaatacagagctgt

SEQ ID NO: 1047929 - DNA, 33 bp, Homo sapien
tcaatgagatttaggaagaaggagaatttatac

SEQ ID NO: 1047930 - DNA, 33 bp, Homo sapien
tcaatgagatttaggaggaaggagaatttatac

SEQ ID NO: 1047931 - DNA, 33 bp, Homo sapien
tgagctccacctctccaccagcgagttgcactg

SEQ ID NO: 1047932 - DNA, 33 bp, Homo sapien
tgagctccacctctccgccagcgagttgcactg

SEQ ID NO: 1047933 - DNA, 33 bp, Homo sapien
gatctcagcagccctcccgtctcacagaggacc

SEQ ID NO: 1047934 - DNA, 33 bp, Homo sapien
gatctcagcagccctcgcgtctcacagaggacc

SEQ ID NO: 1047935 - DNA, 33 bp, Homo sapien
cctgcacacaggacacactcgctgttttttttg

SEQ ID NO: 1047936 - DNA, 33 bp, Homo sapien
cctgcacacaggacacgctcgctgttttttttg

SEQ ID NO: 1047937 - DNA, 33 bp, Homo sapien
tgtgtgtgtgatcaaaactgaatgggagattgg

SEQ ID NO: 1047938 - DNA, 33 bp, Homo sapien
tgtgtgtgtgatcaaagctgaatgggagattgg

SEQ ID NO: 1047939 - DNA, 33 bp, Homo sapien
ggtcagagcaggccagaagcctccgagctgggg

SEQ ID NO: 1047940 - DNA, 33 bp, Homo sapien
ggtcagagcaggccaggagcctccgagctgggg

SEQ ID NO: 1047941 - DNA, 33 bp, Homo sapien
tcgggacagttaggaaaatcccacgttctcagt

SEQ ID NO: 1047942 - DNA, 33 bp, Homo sapien
tcgggacagttaggaagatcccacgttctcagt

SEQ ID NO: 1047943 - DNA, 33 bp, Homo sapien
gtcctcaccacaaaggaactcctgtgaaactgc

SEQ ID NO: 1047944 - DNA, 33 bp, Homo sapien
gtcctcaccacaaagggactcctgtgaaactgc

SEQ ID NO: 1047945 - DNA, 33 bp, Homo sapien
acgttcctggcaccaacttggcagaagagggct

SEQ ID NO: 1047946 - DNA, 33 bp, Homo sapien
acgttcctggcaccaagttggcagaagagggct

SEQ ID NO: 1047947 - DNA, 33 bp, Homo sapien
actgtctgctgtcccaaatcgcaggctcagctg

SEQ ID NO: 1047948 - DNA, 33 bp, Homo sapien
actgtctgctgtcccagatcgcaggctcagctg

SEQ ID NO: 1047949 - DNA, 33 bp, Homo sapien
accacagaatcacaaacgctgactttccacaca

SEQ ID NO: 1047950 - DNA, 33 bp, Homo sapien
accacagaatcacaaaggctgactttccacaca

SEQ ID NO: 1047951 - DNA, 33 bp, Homo sapien
aaggatgatagataaccctgactacactcaaac

SEQ ID NO: 1047952 - DNA, 33 bp, Homo sapien
aaggatgatagataactctgactacactcaaac

SEQ ID NO: 1047953 - DNA, 33 bp, Homo sapien
ctcaccctatttcgtaaccgcattttagcaaca

SEQ ID NO: 1047954 - DNA, 33 bp, Homo sapien
ctcaccctatttcgtagccgcattttagcaaca

SEQ ID NO: 1047955 - DNA, 33 bp, Homo sapien
aatgaaggttcattccaccctcatctaaattac

SEQ ID NO: 1047956 - DNA, 33 bp, Homo sapien
aatgaaggttcattccgccctcatctaaattac

SEQ ID NO: 1047957 - DNA, 33 bp, Homo sapien
tctagcgtctctgctcgctatagattgaaggtg

SEQ ID NO: 1047958 - DNA, 33 bp, Homo sapien
tctagcgtctctgctctctatagattgaaggtg

SEQ ID NO: 1047959 - DNA, 33 bp, Homo sapien
gagacgctagaaaatgcacccaaagacgtaaca

SEQ ID NO: 1047960 - DNA, 33 bp, Homo sapien
gagacgctagaaaatgtacccaaagacgtaaca

SEQ ID NO: 1047961 - DNA, 33 bp, Homo sapien
ctggaagaagaggcacacaagtcaagaccagag

SEQ ID NO: 1047962 - DNA, 33 bp, Homo sapien
ctggaagaagaggcacgcaagtcaagaccagag

SEQ ID NO: 1047963 - DNA, 33 bp, Homo sapien
gtgcatgaccgaggtacctattcctgctccctt

SEQ ID NO: 1047964 - DNA, 33 bp, Homo sapien
gtgcatgaccgaggtatctattcctgctccctt

SEQ ID NO: 1047965 - DNA, 33 bp, Homo sapien
ttgtcctctgagtaaacgtgtcccatctcacct

SEQ ID NO: 1047966 - DNA, 33 bp, Homo sapien
ttgtcctctgagtaaatgtgtcccatctcacct

SEQ ID NO: 1047967 - DNA, 33 bp, Homo sapien
ggagatgggcacaggcactgcggcccgatcctc

SEQ ID NO: 1047968 - DNA, 33 bp, Homo sapien
ggagatgggcacaggcgctgcggcccgatcctc

SEQ ID NO: 1047969 - DNA, 33 bp, Homo sapien
atccgcacgtatgcacaagcacatatgcacacc

SEQ ID NO: 1047970 - DNA, 33 bp, Homo sapien
atccgcacgtatgcacgagcacatatgcacacc

SEQ ID NO: 1047971 - DNA, 33 bp, Homo sapien
cctagttttcaaattaagccaggtgtgacccag

SEQ ID NO: 1047972 - DNA, 33 bp, Homo sapien
cctagttttcaaattaggccaggtgtgacccag

SEQ ID NO: 1047973 - DNA, 33 bp, Homo sapien
ggtcataacctggaggaatcgtctctcgtcttg

SEQ ID NO: 1047974 - DNA, 33 bp, Homo sapien
ggtcataacctggaggcatcgtctctcgtcttg

SEQ ID NO: 1047975 - DNA, 33 bp, Homo sapien
ccaaaaccggcagcccacttttatactgaagat

SEQ ID NO: 1047976 - DNA, 33 bp, Homo sapien
ccaaaaccggcagcccgcttttatactgaagat

SEQ ID NO: 1047977 - DNA, 33 bp, Homo sapien
ctcacctaaaacctgcagcaatttccctgagac

SEQ ID NO: 1047978 - DNA, 33 bp, Homo sapien
ctcacctaaaacctgcggcaatttccctgagac

SEQ ID NO: 1047979 - DNA, 33 bp, Homo sapien
tatgggaaattacatacgcactggcttaacaca

SEQ ID NO: 1047980 - DNA, 33 bp, Homo sapien
tatgggaaattacataggcactggcttaacaca

SEQ ID NO: 1047981 - DNA, 33 bp, Homo sapien
tatttcatttttattcaagaatgtgtaatcctg

SEQ ID NO: 1047982 - DNA, 33 bp, Homo sapien
tatttcatttttattcgagaatgtgtaatcctg

SEQ ID NO: 1047983 - DNA, 33 bp, Homo sapien
tccatcttgattctgacgattttcacataatgt

SEQ ID NO: 1047984 - DNA, 33 bp, Homo sapien
tccatcttgattctgatgattttcacataatgt

SEQ ID NO: 1047985 - DNA, 33 bp, Homo sapien
tgcccgagctgatgcacgaataatgaggggaag

SEQ ID NO: 1047986 - DNA, 33 bp, Homo sapien
tgcccgagctgatgcaggaataatgaggggaag

SEQ ID NO: 1047987 - DNA, 33 bp, Homo sapien
tgtgtatgtgtggagagaattttaattacaaat

SEQ ID NO: 1047988 - DNA, 33 bp, Homo sapien
tgtgtatgtgtggagataattttaattacaaat

SEQ ID NO: 1047989 - DNA, 33 bp, Homo sapien
tcttcttgtgttttcaaatggtcttctctctgt

SEQ ID NO: 1047990 - DNA, 33 bp, Homo sapien
tcttcttgtgttttcacatggtcttctctctgt

SEQ ID NO: 1047991 - DNA, 33 bp, Homo sapien
ccatcaataagggaacaagtccataaaaataca

SEQ ID NO: 1047992 - DNA, 33 bp, Homo sapien
ccatcaataagggaaccagtccataaaaataca

SEQ ID NO: 1047993 - DNA, 33 bp, Homo sapien
caaggcatcagcctccacattcttcttgctgaa

SEQ ID NO: 1047994 - DNA, 33 bp, Homo sapien
caaggcatcagcctccgcattcttcttgctgaa

SEQ ID NO: 1047995 - DNA, 33 bp, Homo sapien
ctgcacaggtttgagacacgccgggatggttcc

SEQ ID NO: 1047996 - DNA, 33 bp, Homo sapien
ctgcacaggtttgagatacgccgggatggttcc

SEQ ID NO: 1047997 - DNA, 33 bp, Homo sapien
agcccagggttagaacaagcactgctccggcag

SEQ ID NO: 1047998 - DNA, 33 bp, Homo sapien
agcccagggttagaacgagcactgctccggcag

SEQ ID NO: 1047999 - DNA, 33 bp, Homo sapien
gagtatttgcggatacaattaggtaaggacctc

SEQ ID NO: 1048000 - DNA, 33 bp, Homo sapien
gagtatttgcggataccattaggtaaggacctc

SEQ ID NO: 1048001 - DNA, 33 bp, Homo sapien
acacaccctgcaccggaaggcaccttagcatgt

SEQ ID NO: 1048002 - DNA, 33 bp, Homo sapien
acacaccctgcaccgggaggcaccttagcatgt

SEQ ID NO: 1048003 - DNA, 33 bp, Homo sapien
tggatgaaccacagcaaagaaaccttaacagct

SEQ ID NO: 1048004 - DNA, 33 bp, Homo sapien
tggatgaaccacagcatagaaaccttaacagct

SEQ ID NO: 1048005 - DNA, 33 bp, Homo sapien
tttgatgaatctccaacgtgccaaccccagatg

SEQ ID NO: 1048006 - DNA, 33 bp, Homo sapien
tttgatgaatctccaatgtgccaaccccagatg

SEQ ID NO: 1048007 - DNA, 33 bp, Homo sapien
caaaacctcatgagtcaaagagagacgacatcc

SEQ ID NO: 1048008 - DNA, 33 bp, Homo sapien
caaaacctcatgagtcgaagagagacgacatcc

SEQ ID NO: 1048009 - DNA, 33 bp, Homo sapien
ttattccaagaaccaacgagctagaaatttgga

SEQ ID NO: 1048010 - DNA, 33 bp, Homo sapien
ttattccaagaaccaatgagctagaaatttgga

SEQ ID NO: 1048011 - DNA, 33 bp, Homo sapien
ctggtgaggagctgacaggaggtaaggtggagc

SEQ ID NO: 1048012 - DNA, 33 bp, Homo sapien
ctggtgaggagctgacgggaggtaaggtggagc

SEQ ID NO: 1048013 - DNA, 33 bp, Homo sapien
gacctgaaatcctgacccccggttctagctggt

SEQ ID NO: 1048014 - DNA, 33 bp, Homo sapien
gacctgaaatcctgacgcccggttctagctggt

SEQ ID NO: 1048015 - DNA, 33 bp, Homo sapien
accctgcccagcagaaatggcgctttcataaaa

SEQ ID NO: 1048016 - DNA, 33 bp, Homo sapien
accctgcccagcagaagtggcgctttcataaaa

SEQ ID NO: 1048017 - DNA, 33 bp, Homo sapien
aaggggacaaagccggaacagtcagccctcgct

SEQ ID NO: 1048018 - DNA, 33 bp, Homo sapien
aaggggacaaagccgggacagtcagccctcgct

SEQ ID NO: 1048019 - DNA, 33 bp, Homo sapien
ggttatccggaggcgaaagatgccaatgatacc

SEQ ID NO: 1048020 - DNA, 33 bp, Homo sapien
ggttatccggaggcgagagatgccaatgatacc

SEQ ID NO: 1048021 - DNA, 33 bp, Homo sapien
ggcatctccttgcaggcccgatccgcgctttcc

SEQ ID NO: 1048022 - DNA, 33 bp, Homo sapien
ggcatctccttgcaggtccgatccgcgctttcc

SEQ ID NO: 1048023 - DNA, 33 bp, Homo sapien
aactaccctagtcataacttcctaaacccccag

SEQ ID NO: 1048024 - DNA, 33 bp, Homo sapien
aactaccctagtcatagcttcctaaacccccag

SEQ ID NO: 1048025 - DNA, 33 bp, Homo sapien
caggaggagctggtaacaggcaccactttcgtt

SEQ ID NO: 1048026 - DNA, 33 bp, Homo sapien
caggaggagctggtaagaggcaccactttcgtt

SEQ ID NO: 1048027 - DNA, 33 bp, Homo sapien
gcttccaaaagtaggacggtgcctggagcgacc

SEQ ID NO: 1048028 - DNA, 33 bp, Homo sapien
gcttccaaaagtaggatggtgcctggagcgacc

SEQ ID NO: 1048029 - DNA, 33 bp, Homo sapien
ggagcgaccagggtaccgacaccatcttctcga

SEQ ID NO: 1048030 - DNA, 33 bp, Homo sapien
ggagcgaccagggtactgacaccatcttctcga

SEQ ID NO: 1048031 - DNA, 33 bp, Homo sapien
aggccgtgatgactaactgttccgtgttgtgtt

SEQ ID NO: 1048032 - DNA, 33 bp, Homo sapien
aggccgtgatgactaattgttccgtgttgtgtt

SEQ ID NO: 1048033 - DNA, 33 bp, Homo sapien
cccgcctctctgctccaaatgcgctcttcgggt

SEQ ID NO: 1048034 - DNA, 33 bp, Homo sapien
cccgcctctctgctccgaatgcgctcttcgggt

SEQ ID NO: 1048035 - DNA, 33 bp, Homo sapien
caggaacccctattcacctccgagggcacccga

SEQ ID NO: 1048036 - DNA, 33 bp, Homo sapien
caggaacccctattcatctccgagggcacccga

SEQ ID NO: 1048037 - DNA, 33 bp, Homo sapien
gggtcatcccgagtgacagatggtaaaagacac

SEQ ID NO: 1048038 - DNA, 33 bp, Homo sapien
gggtcatcccgagtgatagatggtaaaagacac

SEQ ID NO: 1048039 - DNA, 33 bp, Homo sapien
ccatttacatgaactacggctacctctgctgga

SEQ ID NO: 1048040 - DNA, 33 bp, Homo sapien
ccatttacatgaactatggctacctctgctgga

SEQ ID NO: 1048041 - DNA, 33 bp, Homo sapien
acatatttgcttatggaaccacactttctccta

SEQ ID NO: 1048042 - DNA, 33 bp, Homo sapien
acatatttgcttatgggaccacactttctccta

SEQ ID NO: 1048043 - DNA, 33 bp, Homo sapien
ggaatttcttttaaacaacttagatcctggccc

SEQ ID NO: 1048044 - DNA, 33 bp, Homo sapien
ggaatttcttttaaaccacttagatcctggccc

SEQ ID NO: 1048045 - DNA, 33 bp, Homo sapien
gcattttagaaacagacggtcaaactctacaca

SEQ ID NO: 1048046 - DNA, 33 bp, Homo sapien
gcattttagaaacagatggtcaaactctacaca

SEQ ID NO: 1048047 - DNA, 33 bp, Homo sapien
gatcatgaagatgttcaatgttttcttctagaa

SEQ ID NO: 1048048 - DNA, 33 bp, Homo sapien
gatcatgaagatgttcgatgttttcttctagaa

SEQ ID NO: 1048049 - DNA, 33 bp, Homo sapien
ttatattttttcactacggtgcaggattccact

SEQ ID NO: 1048050 - DNA, 33 bp, Homo sapien
ttatattttttcactatggtgcaggattccact

SEQ ID NO: 1048051 - DNA, 33 bp, Homo sapien
ttaagccccataaacactcgtgggatgagaaac

SEQ ID NO: 1048052 - DNA, 33 bp, Homo sapien
ttaagccccataaacattcgtgggatgagaaac

SEQ ID NO: 1048053 - DNA, 33 bp, Homo sapien
gctgacggtattgtaaagtacacttaaagatct

SEQ ID NO: 1048054 - DNA, 33 bp, Homo sapien
gctgacggtattgtaatgtacacttaaagatct

SEQ ID NO: 1048055 - DNA, 33 bp, Homo sapien
tgggatccatattccacgaggcagcaaggaagg

SEQ ID NO: 1048056 - DNA, 33 bp, Homo sapien
tgggatccatattccaggaggcagcaaggaagg

SEQ ID NO: 1048057 - DNA, 33 bp, Homo sapien
tagatgaatgaagaagcaaaaggcactcttcat

SEQ ID NO: 1048058 - DNA, 33 bp, Homo sapien
tagatgaatgaagaagtaaaaggcactcttcat

SEQ ID NO: 1048059 - DNA, 33 bp, Homo sapien
aagtaatttgattgaccgcttagaaagtggatg

SEQ ID NO: 1048060 - DNA, 33 bp, Homo sapien
aagtaatttgattgactgcttagaaagtggatg

SEQ ID NO: 1048061 - DNA, 33 bp, Homo sapien
ggacacaggcacaaaaaagataagagtccaggc

SEQ ID NO: 1048062 - DNA, 33 bp, Homo sapien
ggacacaggcacaaaacagataagagtccaggc

SEQ ID NO: 1048063 - DNA, 33 bp, Homo sapien
ccaacagcagccgagcaacgggagtgtggtcag

SEQ ID NO: 1048064 - DNA, 33 bp, Homo sapien
ccaacagcagccgagcgacgggagtgtggtcag

SEQ ID NO: 1048065 - DNA, 33 bp, Homo sapien
gggaagggtgttttccacttttatgaacaaccc

SEQ ID NO: 1048066 - DNA, 33 bp, Homo sapien
gggaagggtgttttcctcttttatgaacaaccc

SEQ ID NO: 1048067 - DNA, 33 bp, Homo sapien
agtggagatgagattcaaaaagaaaaaagcagc

SEQ ID NO: 1048068 - DNA, 33 bp, Homo sapien
agtggagatgagattccaaaagaaaaaagcagc

SEQ ID NO: 1048069 - DNA, 33 bp, Homo sapien
ctgctccatgtaggcaagtagtttgggtcctgc

SEQ ID NO: 1048070 - DNA, 33 bp, Homo sapien
ctgctccatgtaggcaggtagtttgggtcctgc

SEQ ID NO: 1048071 - DNA, 33 bp, Homo sapien
tttatgtccaaagatacggcggagaaagggcca

SEQ ID NO: 1048072 - DNA, 33 bp, Homo sapien
tttatgtccaaagatatggcggagaaagggcca

SEQ ID NO: 1048073 - DNA, 33 bp, Homo sapien
gtctgcagctctcccaacacaactggagctggc

SEQ ID NO: 1048074 - DNA, 33 bp, Homo sapien
gtctgcagctctcccaccacaactggagctggc

SEQ ID NO: 1048075 - DNA, 33 bp, Homo sapien
gacgggtgttaccggaagagcagcccctgctgg

SEQ ID NO: 1048076 - DNA, 33 bp, Homo sapien
gacgggtgttaccggaggagcagcccctgctgg

SEQ ID NO: 1048077 - DNA, 33 bp, Homo sapien
ttttgaaattacaaccactaactctgatctctg

SEQ ID NO: 1048078 - DNA, 33 bp, Homo sapien
ttttgaaattacaaccgctaactctgatctctg

SEQ ID NO: 1048079 - DNA, 33 bp, Homo sapien
gcattttaggtgtctacagagacttctttttaa

SEQ ID NO: 1048080 - DNA, 33 bp, Homo sapien
gcattttaggtgtctagagagacttctttttaa

SEQ ID NO: 1048081 - DNA, 33 bp, Homo sapien
agaggcaccatcgagcaacatgggtaggtggcc

SEQ ID NO: 1048082 - DNA, 33 bp, Homo sapien
agaggcaccatcgagcgacatgggtaggtggcc

SEQ ID NO: 1048083 - DNA, 33 bp, Homo sapien
tgggtctcagaggaaacgctcaaatggtgattc

SEQ ID NO: 1048084 - DNA, 33 bp, Homo sapien
tgggtctcagaggaaatgctcaaatggtgattc

SEQ ID NO: 1048085 - DNA, 33 bp, Homo sapien
ccacaccttgaaagagaacttgaagagtctgct

SEQ ID NO: 1048086 - DNA, 33 bp, Homo sapien
ccacaccttgaaagaggacttgaagagtctgct

SEQ ID NO: 1048087 - DNA, 33 bp, Homo sapien
ccgagccagcaactcaaaagggttcactaataa

SEQ ID NO: 1048088 - DNA, 33 bp, Homo sapien
ccgagccagcaactcagaagggttcactaataa

SEQ ID NO: 1048089 - DNA, 33 bp, Homo sapien
ggtgtttagacattcacggtgttgcgtaaccac

SEQ ID NO: 1048090 - DNA, 33 bp, Homo sapien
ggtgtttagacattcatggtgttgcgtaaccac

SEQ ID NO: 1048091 - DNA, 33 bp, Homo sapien
ttcatacacagggaaacgcaatgagagacgagc

SEQ ID NO: 1048092 - DNA, 33 bp, Homo sapien
ttcatacacagggaaatgcaatgagagacgagc

SEQ ID NO: 1048093 - DNA, 33 bp, Homo sapien
actcatgcttttcaggaaaatattaaaggcttt

SEQ ID NO: 1048094 - DNA, 33 bp, Homo sapien
actcatgcttttcaggtaaatattaaaggcttt

SEQ ID NO: 1048095 - DNA, 33 bp, Homo sapien
ccccttgtttagcataagatagagcatagccat

SEQ ID NO: 1048096 - DNA, 33 bp, Homo sapien
ccccttgtttagcataggatagagcatagccat

SEQ ID NO: 1048097 - DNA, 33 bp, Homo sapien
agtttcacactttaaaatatcaggtcatggccg

SEQ ID NO: 1048098 - DNA, 33 bp, Homo sapien
agtttcacactttaaactatcaggtcatggccg

SEQ ID NO: 1048099 - DNA, 33 bp, Homo sapien
aatgcacaaatagccaataacggcaataaaagt

SEQ ID NO: 1048100 - DNA, 33 bp, Homo sapien
aatgcacaaatagccagtaacggcaataaaagt

SEQ ID NO: 1048101 - DNA, 33 bp, Homo sapien
acaaactagcaagagcagaaaattacctcacat

SEQ ID NO: 1048102 - DNA, 33 bp, Homo sapien
acaaactagcaagagccgaaaattacctcacat

SEQ ID NO: 1048103 - DNA, 33 bp, Homo sapien
ttaaagaaaaaacgtacgtcagccccagccctg

SEQ ID NO: 1048104 - DNA, 33 bp, Homo sapien
ttaaagaaaaaacgtatgtcagccccagccctg

SEQ ID NO: 1048105 - DNA, 33 bp, Homo sapien
ttatttgccatctagcagagcttaagagcagaa

SEQ ID NO: 1048106 - DNA, 33 bp, Homo sapien
ttatttgccatctagcggagcttaagagcagaa

SEQ ID NO: 1048107 - DNA, 33 bp, Homo sapien
ttctaatgtcttctgcactttaactaaagccat

SEQ ID NO: 1048108 - DNA, 33 bp, Homo sapien
ttctaatgtcttctgcgctttaactaaagccat

SEQ ID NO: 1048109 - DNA, 33 bp, Homo sapien
cagattacagggaatcactgtgacgggggagtg

SEQ ID NO: 1048110 - DNA, 33 bp, Homo sapien
cagattacagggaatcgctgtgacgggggagtg

SEQ ID NO: 1048111 - DNA, 33 bp, Homo sapien
gtaacttcaaacgtcactacttttggaagatga

SEQ ID NO: 1048112 - DNA, 33 bp, Homo sapien
gtaacttcaaacgtcagtacttttggaagatga

SEQ ID NO: 1048113 - DNA, 33 bp, Homo sapien
ttgtgctaataaagtacgtttggtgttctcctt

SEQ ID NO: 1048114 - DNA, 33 bp, Homo sapien
ttgtgctaataaagtatgtttggtgttctcctt

SEQ ID NO: 1048115 - DNA, 33 bp, Homo sapien
gccgggttaagaacgcaagctgggagcatctcc

SEQ ID NO: 1048116 - DNA, 33 bp, Homo sapien
gccgggttaagaacgcgagctgggagcatctcc

SEQ ID NO: 1048117 - DNA, 33 bp, Homo sapien
tccatcccgtcctgtcactgattcttcaagtga

SEQ ID NO: 1048118 - DNA, 33 bp, Homo sapien
tccatcccgtcctgtcgctgattcttcaagtga

SEQ ID NO: 1048119 - DNA, 33 bp, Homo sapien
gcctttccaagactcacagaacgtgcggtagag

SEQ ID NO: 1048120 - DNA, 33 bp, Homo sapien
gcctttccaagactcatagaacgtgcggtagag

SEQ ID NO: 1048121 - DNA, 33 bp, Homo sapien
tgcatggacttgagagacctatgtgtgagggtt

SEQ ID NO: 1048122 - DNA, 33 bp, Homo sapien
tgcatggacttgagaggcctatgtgtgagggtt

SEQ ID NO: 1048123 - DNA, 33 bp, Homo sapien
agtcagaagctgtaaacgtggctagtggagaac

SEQ ID NO: 1048124 - DNA, 33 bp, Homo sapien
agtcagaagctgtaaatgtggctagtggagaac

SEQ ID NO: 1048125 - DNA, 33 bp, Homo sapien
agctccagtgactcatcaaagtttgctggacaa

SEQ ID NO: 1048126 - DNA, 33 bp, Homo sapien
agctccagtgactcatgaaagtttgctggacaa

SEQ ID NO: 1048127 - DNA, 33 bp, Homo sapien
ggggctggacaggaacagcaaccacagggaccc

SEQ ID NO: 1048128 - DNA, 33 bp, Homo sapien
ggggctggacaggaacggcaaccacagggaccc

SEQ ID NO: 1048129 - DNA, 33 bp, Homo sapien
cgctcctgacaagctaagttacccagaaattgc

SEQ ID NO: 1048130 - DNA, 33 bp, Homo sapien
cgctcctgacaagctaggttacccagaaattgc

SEQ ID NO: 1048131 - DNA, 33 bp, Homo sapien
actcacccgacacaaaacagtggagctgagacc

SEQ ID NO: 1048132 - DNA, 33 bp, Homo sapien
actcacccgacacaaatcagtggagctgagacc

SEQ ID NO: 1048133 - DNA, 33 bp, Homo sapien
tggatcacctctgatcacttccttttcccagct

SEQ ID NO: 1048134 - DNA, 33 bp, Homo sapien
tggatcacctctgatcgcttccttttcccagct

SEQ ID NO: 1048135 - DNA, 33 bp, Homo sapien
gttgtttctatagtaaactgtgacatggccccc

SEQ ID NO: 1048136 - DNA, 33 bp, Homo sapien
gttgtttctatagtaacctgtgacatggccccc

SEQ ID NO: 1048137 - DNA, 33 bp, Homo sapien
tgccccgttagatcaaccagatgcactccagag

SEQ ID NO: 1048138 - DNA, 33 bp, Homo sapien
tgccccgttagatcaatcagatgcactccagag

SEQ ID NO: 1048139 - DNA, 33 bp, Homo sapien
agtggaggaaaccaaccagagtgcagcagctct

SEQ ID NO: 1048140 - DNA, 33 bp, Homo sapien
agtggaggaaaccaactagagtgcagcagctct

SEQ ID NO: 1048141 - DNA, 33 bp, Homo sapien
agtcatgtgagaccccaatggtgtgctcccaga

SEQ ID NO: 1048142 - DNA, 33 bp, Homo sapien
agtcatgtgagaccccgatggtgtgctcccaga

SEQ ID NO: 1048143 - DNA, 33 bp, Homo sapien
cgactccaaagttccactgagtgagggggagaa

SEQ ID NO: 1048144 - DNA, 33 bp, Homo sapien
cgactccaaagttccattgagtgagggggagaa

SEQ ID NO: 1048145 - DNA, 33 bp, Homo sapien
acgctccccttcagccaacggtgcatggggtct

SEQ ID NO: 1048146 - DNA, 33 bp, Homo sapien
acgctccccttcagccgacggtgcatggggtct

SEQ ID NO: 1048147 - DNA, 33 bp, Homo sapien
tagcttttgtagcaaacgggctggagcaactgg

SEQ ID NO: 1048148 - DNA, 33 bp, Homo sapien
tagcttttgtagcaaatgggctggagcaactgg

SEQ ID NO: 1048149 - DNA, 33 bp, Homo sapien
tatatactgaccttgaaccacacaatagtgccc

SEQ ID NO: 1048150 - DNA, 33 bp, Homo sapien
tatatactgaccttgagccacacaatagtgccc

SEQ ID NO: 1048151 - DNA, 33 bp, Homo sapien
gctgccagctgagtcccgcacgccctagagccc

SEQ ID NO: 1048152 - DNA, 33 bp, Homo sapien
gctgccagctgagtcctgcacgccctagagccc

SEQ ID NO: 1048153 - DNA, 33 bp, Homo sapien
ccatttctgctcagcaaggagatggccagttcc

SEQ ID NO: 1048154 - DNA, 33 bp, Homo sapien
ccatttctgctcagcagggagatggccagttcc

SEQ ID NO: 1048155 - DNA, 33 bp, Homo sapien
ctgtccagggtttgcacccaaatgcgcccactt

SEQ ID NO: 1048156 - DNA, 33 bp, Homo sapien
ctgtccagggtttgcatccaaatgcgcccactt

SEQ ID NO: 1048157 - DNA, 33 bp, Homo sapien
catttttatcctcagaaatgaccatactcatta

SEQ ID NO: 1048158 - DNA, 33 bp, Homo sapien
catttttatcctcagagatgaccatactcatta

SEQ ID NO: 1048159 - DNA, 33 bp, Homo sapien
ttaaaattttgggataaaggcaacaagcaagtg

SEQ ID NO: 1048160 - DNA, 33 bp, Homo sapien
ttaaaattttgggatagaggcaacaagcaagtg

SEQ ID NO: 1048161 - DNA, 33 bp, Homo sapien
tggttaaatgggtaaacggattgataattggat

SEQ ID NO: 1048162 - DNA, 33 bp, Homo sapien
tggttaaatgggtaaatggattgataattggat

SEQ ID NO: 1048163 - DNA, 33 bp, Homo sapien
agattcctcttctcaccacatgaagctcccctc

SEQ ID NO: 1048164 - DNA, 33 bp, Homo sapien
agattcctcttctcacgacatgaagctcccctc

SEQ ID NO: 1048165 - DNA, 33 bp, Homo sapien
ggcaacctccttgctcagaaacctgcagcctgt

SEQ ID NO: 1048166 - DNA, 33 bp, Homo sapien
ggcaacctccttgctcggaaacctgcagcctgt

SEQ ID NO: 1048167 - DNA, 33 bp, Homo sapien
tgcttacttgagaggacctgaaatagtttctaa

SEQ ID NO: 1048168 - DNA, 33 bp, Homo sapien
tgcttacttgagaggatctgaaatagtttctaa

SEQ ID NO: 1048169 - DNA, 33 bp, Homo sapien
cccagacactgaagcaagggggctttcggagta

SEQ ID NO: 1048170 - DNA, 33 bp, Homo sapien
cccagacactgaagcatgggggctttcggagta

SEQ ID NO: 1048171 - DNA, 33 bp, Homo sapien
gatcagcacattaaaaattaatctcattactat

SEQ ID NO: 1048172 - DNA, 33 bp, Homo sapien
gatcagcacattaaaagttaatctcattactat

SEQ ID NO: 1048173 - DNA, 33 bp, Homo sapien
gaaatgtgtctcacacaggaagtcatatatctg

SEQ ID NO: 1048174 - DNA, 33 bp, Homo sapien
gaaatgtgtctcacaccggaagtcatatatctg

SEQ ID NO: 1048175 - DNA, 33 bp, Homo sapien
tggtgattcctggataaaaagagaaaatcaagt

SEQ ID NO: 1048176 - DNA, 33 bp, Homo sapien
tggtgattcctggatacaaagagaaaatcaagt

SEQ ID NO: 1048177 - DNA, 33 bp, Homo sapien
gttgatgcatgttgacaaaacaccaaacggggc

SEQ ID NO: 1048178 - DNA, 33 bp, Homo sapien
gttgatgcatgttgacgaaacaccaaacggggc

SEQ ID NO: 1048179 - DNA, 33 bp, Homo sapien
tcatgcaagtgagaacacatctcttaaaataaa

SEQ ID NO: 1048180 - DNA, 33 bp, Homo sapien
tcatgcaagtgagaacgcatctcttaaaataaa

SEQ ID NO: 1048181 - DNA, 33 bp, Homo sapien
acaattacactctagaagaacgcagtgttgaaa

SEQ ID NO: 1048182 - DNA, 33 bp, Homo sapien
acaattacactctagatgaacgcagtgttgaaa

SEQ ID NO: 1048183 - DNA, 33 bp, Homo sapien
attctaccatctaccccggaaccacagccaggg

SEQ ID NO: 1048184 - DNA, 33 bp, Homo sapien
attctaccatctaccctggaaccacagccaggg

SEQ ID NO: 1048185 - DNA, 33 bp, Homo sapien
agtgcccagctgggtacgagtggagtttgaaag

SEQ ID NO: 1048186 - DNA, 33 bp, Homo sapien
agtgcccagctgggtatgagtggagtttgaaag

SEQ ID NO: 1048187 - DNA, 33 bp, Homo sapien
tgagaattatacagcacgcagccttttcagatg

SEQ ID NO: 1048188 - DNA, 33 bp, Homo sapien
tgagaattatacagcatgcagccttttcagatg

SEQ ID NO: 1048189 - DNA, 33 bp, Homo sapien
catcaggaaattgcaacgaaaacaaggagatac

SEQ ID NO: 1048190 - DNA, 33 bp, Homo sapien
catcaggaaattgcaatgaaaacaaggagatac

SEQ ID NO: 1048191 - DNA, 33 bp, Homo sapien
agcagtagtatcatgacagataatagtttttaa

SEQ ID NO: 1048192 - DNA, 33 bp, Homo sapien
agcagtagtatcatgagagataatagtttttaa

SEQ ID NO: 1048193 - DNA, 33 bp, Homo sapien
aggtaaaaaatgtacaactcaaaggcacagact

SEQ ID NO: 1048194 - DNA, 33 bp, Homo sapien
aggtaaaaaatgtacatctcaaaggcacagact

SEQ ID NO: 1048195 - DNA, 33 bp, Homo sapien
ttttttggccaataacacaggatttactgtttt

SEQ ID NO: 1048196 - DNA, 33 bp, Homo sapien
ttttttggccaataacgcaggatttactgtttt

SEQ ID NO: 1048197 - DNA, 33 bp, Homo sapien
gtctgtggaattcaccgcatccgtgttggaagc

SEQ ID NO: 1048198 - DNA, 33 bp, Homo sapien
gtctgtggaattcacctcatccgtgttggaagc

SEQ ID NO: 1048199 - DNA, 33 bp, Homo sapien
gagaggtaagagcaggcattgcaagacggagcg

SEQ ID NO: 1048200 - DNA, 33 bp, Homo sapien
gagaggtaagagcaggtattgcaagacggagcg

SEQ ID NO: 1048201 - DNA, 33 bp, Homo sapien
tctcatcttctcttacactgggcacaggactag

SEQ ID NO: 1048202 - DNA, 33 bp, Homo sapien
tctcatcttctcttacgctgggcacaggactag

SEQ ID NO: 1048203 - DNA, 33 bp, Homo sapien
tggacattttgtggtacaatagcctggacatcc

SEQ ID NO: 1048204 - DNA, 33 bp, Homo sapien
tggacattttgtggtataatagcctggacatcc

SEQ ID NO: 1048205 - DNA, 33 bp, Homo sapien
ccacacattgatcaccagcctaacgtaactcgg

SEQ ID NO: 1048206 - DNA, 33 bp, Homo sapien
ccacacattgatcaccggcctaacgtaactcgg

SEQ ID NO: 1048207 - DNA, 33 bp, Homo sapien
atagggtcatggtagacgtcatgggagtcaacc

SEQ ID NO: 1048208 - DNA, 33 bp, Homo sapien
atagggtcatggtagatgtcatgggagtcaacc

SEQ ID NO: 1048209 - DNA, 33 bp, Homo sapien
gggcttgcaaggttacgcgaagggtgcgcaggt

SEQ ID NO: 1048210 - DNA, 33 bp, Homo sapien
gggcttgcaaggttactcgaagggtgcgcaggt

SEQ ID NO: 1048211 - DNA, 33 bp, Homo sapien
ccccatcttaccatcaaagagctagacgctgct

SEQ ID NO: 1048212 - DNA, 33 bp, Homo sapien
ccccatcttaccatcagagagctagacgctgct

SEQ ID NO: 1048213 - DNA, 33 bp, Homo sapien
cctgcttttacaagtacgtccgggctccactca

SEQ ID NO: 1048214 - DNA, 33 bp, Homo sapien
cctgcttttacaagtatgtccgggctccactca

SEQ ID NO: 1048215 - DNA, 33 bp, Homo sapien
tcaaaaggccagaaaaatccaggagtcaggaag

SEQ ID NO: 1048216 - DNA, 33 bp, Homo sapien
tcaaaaggccagaaaagtccaggagtcaggaag

SEQ ID NO: 1048217 - DNA, 33 bp, Homo sapien
cttgctcctttccaggaacagaataacaacagg

SEQ ID NO: 1048218 - DNA, 33 bp, Homo sapien
cttgctcctttccagggacagaataacaacagg

SEQ ID NO: 1048219 - DNA, 33 bp, Homo sapien
aacgcttcctttgcacaatgattaaaaagtcag

SEQ ID NO: 1048220 - DNA, 33 bp, Homo sapien
aacgcttcctttgcacgatgattaaaaagtcag

SEQ ID NO: 1048221 - DNA, 33 bp, Homo sapien
gctgaaaccgcagctgaaaaagaaatcatgttt

SEQ ID NO: 1048222 - DNA, 33 bp, Homo sapien
gctgaaaccgcagctgtaaaagaaatcatgttt

SEQ ID NO: 1048223 - DNA, 33 bp, Homo sapien
tcggggctgtgtggtcaccatacctgtcctgtg

SEQ ID NO: 1048224 - DNA, 33 bp, Homo sapien
tcggggctgtgtggtcgccatacctgtcctgtg

SEQ ID NO: 1048225 - DNA, 33 bp, Homo sapien
tgaattagggcccaaccgaatgacctcatttca

SEQ ID NO: 1048226 - DNA, 33 bp, Homo sapien
tgaattagggcccaactgaatgacctcatttca

SEQ ID NO: 1048227 - DNA, 33 bp, Homo sapien
tctctaaagcaagtacagatgtgttcagttccc

SEQ ID NO: 1048228 - DNA, 33 bp, Homo sapien
tctctaaagcaagtacggatgtgttcagttccc

SEQ ID NO: 1048229 - DNA, 33 bp, Homo sapien
tacctctgttgcgtaacgaaccaccaccagcct

SEQ ID NO: 1048230 - DNA, 33 bp, Homo sapien
tacctctgttgcgtaatgaaccaccaccagcct

SEQ ID NO: 1048231 - DNA, 33 bp, Homo sapien
agcggtcattaaggtaaagtgaggccatgaggg

SEQ ID NO: 1048232 - DNA, 33 bp, Homo sapien
agcggtcattaaggtacagtgaggccatgaggg

SEQ ID NO: 1048233 - DNA, 33 bp, Homo sapien
ttccctctcctaagaacgaacctcctgtctttg

SEQ ID NO: 1048234 - DNA, 33 bp, Homo sapien
ttccctctcctaagaatgaacctcctgtctttg

SEQ ID NO: 1048235 - DNA, 33 bp, Homo sapien
cgacccagcggcttcaacatccctcagtgggtt

SEQ ID NO: 1048236 - DNA, 33 bp, Homo sapien
cgacccagcggcttcagcatccctcagtgggtt

SEQ ID NO: 1048237 - DNA, 33 bp, Homo sapien
ctcttagtacagataacgcacacggctgcacca

SEQ ID NO: 1048238 - DNA, 33 bp, Homo sapien
ctcttagtacagataatgcacacggctgcacca

SEQ ID NO: 1048239 - DNA, 33 bp, Homo sapien
gagatggcatacacgaccgtcagtgagatgctc

SEQ ID NO: 1048240 - DNA, 33 bp, Homo sapien
gagatggcatacacgatcgtcagtgagatgctc

SEQ ID NO: 1048241 - DNA, 33 bp, Homo sapien
ttcatcaacggaggtaccatctctagagtgagg

SEQ ID NO: 1048242 - DNA, 33 bp, Homo sapien
ttcatcaacggaggtagcatctctagagtgagg

SEQ ID NO: 1048243 - DNA, 33 bp, Homo sapien
agtgcttactcgcaacaaacagtgaaaactaca

SEQ ID NO: 1048244 - DNA, 33 bp, Homo sapien
agtgcttactcgcaacgaacagtgaaaactaca

SEQ ID NO: 1048245 - DNA, 33 bp, Homo sapien
tgagaaataaagcccacgtgtgaaagtatggta

SEQ ID NO: 1048246 - DNA, 33 bp, Homo sapien
tgagaaataaagcccatgtgtgaaagtatggta

SEQ ID NO: 1048247 - DNA, 33 bp, Homo sapien
ctctaaggagggcgaacgccgtcacctgtgtac

SEQ ID NO: 1048248 - DNA, 33 bp, Homo sapien
ctctaaggagggcgaaggccgtcacctgtgtac

SEQ ID NO: 1048249 - DNA, 33 bp, Homo sapien
acacagatgagaagaacaactgagaggaaatgt

SEQ ID NO: 1048250 - DNA, 33 bp, Homo sapien
acacagatgagaagaagaactgagaggaaatgt

SEQ ID NO: 1048251 - DNA, 33 bp, Homo sapien
tgtggtcagttgaataagaggaaggctgagagt

SEQ ID NO: 1048252 - DNA, 33 bp, Homo sapien
tgtggtcagttgaataggaggaaggctgagagt

SEQ ID NO: 1048253 - DNA, 33 bp, Homo sapien
cctctctcccgctgacaacagctaaaaactctg

SEQ ID NO: 1048254 - DNA, 33 bp, Homo sapien
cctctctcccgctgacgacagctaaaaactctg

SEQ ID NO: 1048255 - DNA, 33 bp, Homo sapien
gctaagtcaagcgaccaaaacagcaccacaaag

SEQ ID NO: 1048256 - DNA, 33 bp, Homo sapien
gctaagtcaagcgaccgaaacagcaccacaaag

SEQ ID NO: 1048257 - DNA, 33 bp, Homo sapien
ttgttcattaggttgccaactaaagcccatcct

SEQ ID NO: 1048258 - DNA, 33 bp, Homo sapien
ttgttcattaggttgctaactaaagcccatcct

SEQ ID NO: 1048259 - DNA, 33 bp, Homo sapien
gtgacctagtccgaaacggccccacctcttctt

SEQ ID NO: 1048260 - DNA, 33 bp, Homo sapien
gtgacctagtccgaaatggccccacctcttctt

SEQ ID NO: 1048261 - DNA, 33 bp, Homo sapien
ccctacctggcaaaaccgcattccttattattt

SEQ ID NO: 1048262 - DNA, 33 bp, Homo sapien
ccctacctggcaaaactgcattccttattattt

SEQ ID NO: 1048263 - DNA, 33 bp, Homo sapien
agaggtggcgacaacacgaagcccattggtgga

SEQ ID NO: 1048264 - DNA, 33 bp, Homo sapien
agaggtggcgacaacatgaagcccattggtgga

SEQ ID NO: 1048265 - DNA, 33 bp, Homo sapien
atgctttcccaggtgcccacttgtttcaggagc

SEQ ID NO: 1048266 - DNA, 33 bp, Homo sapien
atgctttcccaggtgctcacttgtttcaggagc

SEQ ID NO: 1048267 - DNA, 33 bp, Homo sapien
cccttatctcaacagaacaatgtgcaccggaac

SEQ ID NO: 1048268 - DNA, 33 bp, Homo sapien
cccttatctcaacagagcaatgtgcaccggaac

SEQ ID NO: 1048269 - DNA, 33 bp, Homo sapien
tctcaactctcagaatcaagagttctaggacag

SEQ ID NO: 1048270 - DNA, 33 bp, Homo sapien
tctcaactctcagaattaagagttctaggacag

SEQ ID NO: 1048271 - DNA, 33 bp, Homo sapien
tcagagaaatccagcgcaaatgcagacagagct

SEQ ID NO: 1048272 - DNA, 33 bp, Homo sapien
tcagagaaatccagcgtaaatgcagacagagct

SEQ ID NO: 1048273 - DNA, 33 bp, Homo sapien
gtgagacaggaattcacagcggcctgtggctga

SEQ ID NO: 1048274 - DNA, 33 bp, Homo sapien
gtgagacaggaattcatagcggcctgtggctga

SEQ ID NO: 1048275 - DNA, 33 bp, Homo sapien
tgataatggcctctgaagatgcacaaaatagct

SEQ ID NO: 1048276 - DNA, 33 bp, Homo sapien
tgataatggcctctgaggatgcacaaaatagct

SEQ ID NO: 1048277 - DNA, 33 bp, Homo sapien
cgggcagctctgtcccaaaggctcgcaggcccc

SEQ ID NO: 1048278 - DNA, 33 bp, Homo sapien
cgggcagctctgtcccgaaggctcgcaggcccc

SEQ ID NO: 1048279 - DNA, 33 bp, Homo sapien
ccatctcttgctctccccagtgttttacaaggg

SEQ ID NO: 1048280 - DNA, 33 bp, Homo sapien
ccatctcttgctctcctcagtgttttacaaggg

SEQ ID NO: 1048281 - DNA, 33 bp, Homo sapien
ttctggcagaacaaacacgtccgagtccagaag

SEQ ID NO: 1048282 - DNA, 33 bp, Homo sapien
ttctggcagaacaaacgcgtccgagtccagaag

SEQ ID NO: 1048283 - DNA, 33 bp, Homo sapien
aaaaggaggggaaggaatatcagcgagctgcat

SEQ ID NO: 1048284 - DNA, 33 bp, Homo sapien
aaaaggaggggaaggattatcagcgagctgcat

SEQ ID NO: 1048285 - DNA, 33 bp, Homo sapien
taaatagtaacaataaatgaaggaataaaacca

SEQ ID NO: 1048286 - DNA, 33 bp, Homo sapien
taaatagtaacaataagtgaaggaataaaacca

SEQ ID NO: 1048287 - DNA, 33 bp, Homo sapien
cccgccagtgccttccaaaatgctggggttaca

SEQ ID NO: 1048288 - DNA, 33 bp, Homo sapien
cccgccagtgccttccgaaatgctggggttaca

SEQ ID NO: 1048289 - DNA, 33 bp, Homo sapien
ggcctcagtctccctacctgttgagtgagaggc

SEQ ID NO: 1048290 - DNA, 33 bp, Homo sapien
ggcctcagtctccctatctgttgagtgagaggc

SEQ ID NO: 1048291 - DNA, 33 bp, Homo sapien
ctgcccagcaaagcctaaacagtctccagaggc

SEQ ID NO: 1048292 - DNA, 33 bp, Homo sapien
ctgcccagcaaagcctgaacagtctccagaggc

SEQ ID NO: 1048293 - DNA, 33 bp, Homo sapien
caaggacacaggttacaaggttggtgccaggcc

SEQ ID NO: 1048294 - DNA, 33 bp, Homo sapien
caaggacacaggttacgaggttggtgccaggcc

SEQ ID NO: 1048295 - DNA, 33 bp, Homo sapien
agtgaggacatctcctaaaaggtcaatcgaagg

SEQ ID NO: 1048296 - DNA, 33 bp, Homo sapien
agtgaggacatctcctgaaaggtcaatcgaagg

SEQ ID NO: 1048297 - DNA, 33 bp, Homo sapien
agtcagcaggagcacaaggggtgttaggaatac

SEQ ID NO: 1048298 - DNA, 33 bp, Homo sapien
agtcagcaggagcacagggggtgttaggaatac

SEQ ID NO: 1048299 - DNA, 33 bp, Homo sapien
ttcaacttttattttcaattcagagatacgtgt

SEQ ID NO: 1048300 - DNA, 33 bp, Homo sapien
ttcaacttttattttcgattcagagatacgtgt

SEQ ID NO: 1048301 - DNA, 33 bp, Homo sapien
tggcagttttgcccccagatgtcccagctaaag

SEQ ID NO: 1048302 - DNA, 33 bp, Homo sapien
tggcagttttgcccccggatgtcccagctaaag

SEQ ID NO: 1048303 - DNA, 33 bp, Homo sapien
cacttcttggctattgcaaatgatactgctagg

SEQ ID NO: 1048304 - DNA, 33 bp, Homo sapien
cacttcttggctattgtaaatgatactgctagg

SEQ ID NO: 1048305 - DNA, 33 bp, Homo sapien
tctattgcctagtgacaatgtagccatcataat

SEQ ID NO: 1048306 - DNA, 33 bp, Homo sapien
tctattgcctagtgacgatgtagccatcataat

SEQ ID NO: 1048307 - DNA, 33 bp, Homo sapien
gctcagcacaagacacaggtaatgggatgaaaa

SEQ ID NO: 1048308 - DNA, 33 bp, Homo sapien
gctcagcacaagacacgggtaatgggatgaaaa

SEQ ID NO: 1048309 - DNA, 33 bp, Homo sapien
ttttgtcgtggtatggacaggaaacctggctca

SEQ ID NO: 1048310 - DNA, 33 bp, Homo sapien
ttttgtcgtggtatgggcaggaaacctggctca

SEQ ID NO: 1048311 - DNA, 33 bp, Homo sapien
tgattaacagaggtgacggaggaggaagttttc

SEQ ID NO: 1048312 - DNA, 33 bp, Homo sapien
tgattaacagaggtgatggaggaggaagttttc

SEQ ID NO: 1048313 - DNA, 33 bp, Homo sapien
ggaagcccagaccaaacggaccctcagtggcca

SEQ ID NO: 1048314 - DNA, 33 bp, Homo sapien
ggaagcccagaccaaatggaccctcagtggcca

SEQ ID NO: 1048315 - DNA, 33 bp, Homo sapien
ggtcgtcaggagatcaatctggtcgctttcatg

SEQ ID NO: 1048316 - DNA, 33 bp, Homo sapien
ggtcgtcaggagatcagtctggtcgctttcatg

SEQ ID NO: 1048317 - DNA, 33 bp, Homo sapien
agggtggaccctaacacgcatccttacagaagg

SEQ ID NO: 1048318 - DNA, 33 bp, Homo sapien
agggtggaccctaacatgcatccttacagaagg

SEQ ID NO: 1048319 - DNA, 33 bp, Homo sapien
ttttccaattaaagcacgaggctgcattattca

SEQ ID NO: 1048320 - DNA, 33 bp, Homo sapien
ttttccaattaaagcatgaggctgcattattca

SEQ ID NO: 1048321 - DNA, 33 bp, Homo sapien
ttggaatgggcacagaaagtggaacaagatatc

SEQ ID NO: 1048322 - DNA, 33 bp, Homo sapien
ttggaatgggcacagagagtggaacaagatatc

SEQ ID NO: 1048323 - DNA, 33 bp, Homo sapien
atgtgctaaatgccacagagttgttcagttgat

SEQ ID NO: 1048324 - DNA, 33 bp, Homo sapien
atgtgctaaatgccacggagttgttcagttgat

SEQ ID NO: 1048325 - DNA, 33 bp, Homo sapien
attcatgtcagcataacgtcatggtgttgtcaa

SEQ ID NO: 1048326 - DNA, 33 bp, Homo sapien
attcatgtcagcataatgtcatggtgttgtcaa

SEQ ID NO: 1048327 - DNA, 33 bp, Homo sapien
attgcaggagggtcccacgactgttgatatcag

SEQ ID NO: 1048328 - DNA, 33 bp, Homo sapien
attgcaggagggtcccgcgactgttgatatcag

SEQ ID NO: 1048329 - DNA, 33 bp, Homo sapien
cccaagctcctcacccggatggcattcatccaa

SEQ ID NO: 1048330 - DNA, 33 bp, Homo sapien
cccaagctcctcaccctgatggcattcatccaa

SEQ ID NO: 1048331 - DNA, 33 bp, Homo sapien
ccccagcgagatattaaccatttttcatagcag

SEQ ID NO: 1048332 - DNA, 33 bp, Homo sapien
ccccagcgagatattacccatttttcatagcag

SEQ ID NO: 1048333 - DNA, 33 bp, Homo sapien
cacaagcagaaagaaacgggttgagtccctggc

SEQ ID NO: 1048334 - DNA, 33 bp, Homo sapien
cacaagcagaaagaaatgggttgagtccctggc

SEQ ID NO: 1048335 - DNA, 33 bp, Homo sapien
cttactgaggtcatcaatcagctattttcaaat

SEQ ID NO: 1048336 - DNA, 33 bp, Homo sapien
cttactgaggtcatcagtcagctattttcaaat

SEQ ID NO: 1048337 - DNA, 33 bp, Homo sapien
cacccccggcaggtgcccacgtctctgtgaagt

SEQ ID NO: 1048338 - DNA, 33 bp, Homo sapien
cacccccggcaggtgctcacgtctctgtgaagt

SEQ ID NO: 1048339 - DNA, 33 bp, Homo sapien
agcggattcttataacgatctgttccctgggac

SEQ ID NO: 1048340 - DNA, 33 bp, Homo sapien
agcggattcttataactatctgttccctgggac

SEQ ID NO: 1048341 - DNA, 33 bp, Homo sapien
gcagccactctttctccgacccaggggtgcctc

SEQ ID NO: 1048342 - DNA, 33 bp, Homo sapien
gcagccactctttctctgacccaggggtgcctc

SEQ ID NO: 1048343 - DNA, 33 bp, Homo sapien
gactgcgtgcttatccggccaaccggcagcagg

SEQ ID NO: 1048344 - DNA, 33 bp, Homo sapien
gactgcgtgcttatcctgccaaccggcagcagg

SEQ ID NO: 1048345 - DNA, 33 bp, Homo sapien
ggtcgtgatcactaagcagagaggcgtcgcttg

SEQ ID NO: 1048346 - DNA, 33 bp, Homo sapien
ggtcgtgatcactaaggagagaggcgtcgcttg

SEQ ID NO: 1048347 - DNA, 33 bp, Homo sapien
actcgggtacagcaccacatgacaaatagcaca

SEQ ID NO: 1048348 - DNA, 33 bp, Homo sapien
actcgggtacagcaccgcatgacaaatagcaca

SEQ ID NO: 1048349 - DNA, 33 bp, Homo sapien
aaaaagttccacgctacagagggacaaggctgc

SEQ ID NO: 1048350 - DNA, 33 bp, Homo sapien
aaaaagttccacgctagagagggacaaggctgc

SEQ ID NO: 1048351 - DNA, 33 bp, Homo sapien
ggatacttctaatgaccctgacgacctggacgt

SEQ ID NO: 1048352 - DNA, 33 bp, Homo sapien
ggatacttctaatgactctgacgacctggacgt

SEQ ID NO: 1048353 - DNA, 33 bp, Homo sapien
ttttaagaaaaaggtacgttctctgtaagtagg

SEQ ID NO: 1048354 - DNA, 33 bp, Homo sapien
ttttaagaaaaaggtatgttctctgtaagtagg

SEQ ID NO: 1048355 - DNA, 33 bp, Homo sapien
gtctcaaaaacaaacacaacagcctttcctggc

SEQ ID NO: 1048356 - DNA, 33 bp, Homo sapien
gtctcaaaaacaaacataacagcctttcctggc

SEQ ID NO: 1048357 - DNA, 33 bp, Homo sapien
aagtatcggtgctgcaaagacatcctgggccca

SEQ ID NO: 1048358 - DNA, 33 bp, Homo sapien
aagtatcggtgctgcagagacatcctgggccca

SEQ ID NO: 1048359 - DNA, 33 bp, Homo sapien
gtgaggacgcttgagcagaagttagaagcaaaa

SEQ ID NO: 1048360 - DNA, 33 bp, Homo sapien
gtgaggacgcttgagcggaagttagaagcaaaa

SEQ ID NO: 1048361 - DNA, 33 bp, Homo sapien
gtagcagtcctctactaagcccttctcgcctac

SEQ ID NO: 1048362 - DNA, 33 bp, Homo sapien
gtagcagtcctctactgagcccttctcgcctac

SEQ ID NO: 1048363 - DNA, 33 bp, Homo sapien
ttttaagcctgtcccccagaagagtccgatgca

SEQ ID NO: 1048364 - DNA, 33 bp, Homo sapien
ttttaagcctgtccccgagaagagtccgatgca

SEQ ID NO: 1048365 - DNA, 33 bp, Homo sapien
tgtctggttgtataaacggtgcaaacaatgtcg

SEQ ID NO: 1048366 - DNA, 33 bp, Homo sapien
tgtctggttgtataaatggtgcaaacaatgtcg

SEQ ID NO: 1048367 - DNA, 33 bp, Homo sapien
cggcacattgagttccaaaagaatgcaaaccgc

SEQ ID NO: 1048368 - DNA, 33 bp, Homo sapien
cggcacattgagttccgaaagaatgcaaaccgc

SEQ ID NO: 1048369 - DNA, 33 bp, Homo sapien
tgcagcctctttgcaggaccgatgggagaggga

SEQ ID NO: 1048370 - DNA, 33 bp, Homo sapien
tgcagcctctttgcagtaccgatgggagaggga

SEQ ID NO: 1048371 - DNA, 33 bp, Homo sapien
aaaggcagccgactataaacaaattcaagtgca

SEQ ID NO: 1048372 - DNA, 33 bp, Homo sapien
aaaggcagccgactatcaacaaattcaagtgca

SEQ ID NO: 1048373 - DNA, 33 bp, Homo sapien
ttgggaagcgagggccaaaacgtccagtgcccc

SEQ ID NO: 1048374 - DNA, 33 bp, Homo sapien
ttgggaagcgagggccgaaacgtccagtgcccc

SEQ ID NO: 1048375 - DNA, 33 bp, Homo sapien
atttaggagagactcacagaaagaggatcaaag

SEQ ID NO: 1048376 - DNA, 33 bp, Homo sapien
atttaggagagactcatagaaagaggatcaaag

SEQ ID NO: 1048377 - DNA, 33 bp, Homo sapien
atggtagtgaggactacgaaattgtttctaaaa

SEQ ID NO: 1048378 - DNA, 33 bp, Homo sapien
atggtagtgaggactatgaaattgtttctaaaa

SEQ ID NO: 1048379 - DNA, 33 bp, Homo sapien
ctttcagctggggatcaaagagtcgtaactggg

SEQ ID NO: 1048380 - DNA, 33 bp, Homo sapien
ctttcagctggggatcgaagagtcgtaactggg

SEQ ID NO: 1048381 - DNA, 33 bp, Homo sapien
ggctgaacaaacatgcaagacgtgtgctcccca

SEQ ID NO: 1048382 - DNA, 33 bp, Homo sapien
ggctgaacaaacatgcgagacgtgtgctcccca

SEQ ID NO: 1048383 - DNA, 33 bp, Homo sapien
cccgcgccacaacaacagggacagtgcggaacc

SEQ ID NO: 1048384 - DNA, 33 bp, Homo sapien
cccgcgccacaacaacggggacagtgcggaacc

SEQ ID NO: 1048385 - DNA, 33 bp, Homo sapien
gtctttttttgccaaacccagcaagaggtcatg

SEQ ID NO: 1048386 - DNA, 33 bp, Homo sapien
gtctttttttgccaaatccagcaagaggtcatg

SEQ ID NO: 1048387 - DNA, 33 bp, Homo sapien
gataccagcacctgaaacttaagaaaggggatg

SEQ ID NO: 1048388 - DNA, 33 bp, Homo sapien
gataccagcacctgaaccttaagaaaggggatg

SEQ ID NO: 1048389 - DNA, 33 bp, Homo sapien
gtggagggagcttcaggcccactcacttccatg

SEQ ID NO: 1048390 - DNA, 33 bp, Homo sapien
gtggagggagcttcagtcccactcacttccatg

SEQ ID NO: 1048391 - DNA, 33 bp, Homo sapien
ctacatttatttctgcaagatgacaatgtgtca

SEQ ID NO: 1048392 - DNA, 33 bp, Homo sapien
ctacatttatttctgcgagatgacaatgtgtca

SEQ ID NO: 1048393 - DNA, 33 bp, Homo sapien
aaccaccctatgcccacgcgtttggtaaaacca

SEQ ID NO: 1048394 - DNA, 33 bp, Homo sapien
aaccaccctatgcccatgcgtttggtaaaacca

SEQ ID NO: 1048395 - DNA, 33 bp, Homo sapien
tcctattggtttccacagtgacccgggcaggca

SEQ ID NO: 1048396 - DNA, 33 bp, Homo sapien
tcctattggtttccacggtgacccgggcaggca

SEQ ID NO: 1048397 - DNA, 33 bp, Homo sapien
gtgacatcaacaacaacgagtgtgaatccaacc

SEQ ID NO: 1048398 - DNA, 33 bp, Homo sapien
gtgacatcaacaacaatgagtgtgaatccaacc

SEQ ID NO: 1048399 - DNA, 33 bp, Homo sapien
acccctgcacaactcagctgatggaaccaagtg

SEQ ID NO: 1048400 - DNA, 33 bp, Homo sapien
acccctgcacaactcatctgatggaaccaagtg

SEQ ID NO: 1048401 - DNA, 33 bp, Homo sapien
gttcagttgccttgtaagcagtgaacgcttgca

SEQ ID NO: 1048402 - DNA, 33 bp, Homo sapien
gttcagttgccttgtacgcagtgaacgcttgca

SEQ ID NO: 1048403 - DNA, 33 bp, Homo sapien
acagagcattcacacgaaaggaaaaacaaatgc

SEQ ID NO: 1048404 - DNA, 33 bp, Homo sapien
acagagcattcacacgcaaggaaaaacaaatgc

SEQ ID NO: 1048405 - DNA, 33 bp, Homo sapien
caaacatttatggagcccctaatgtatgccaaa

SEQ ID NO: 1048406 - DNA, 33 bp, Homo sapien
caaacatttatggagcgcctaatgtatgccaaa

SEQ ID NO: 1048407 - DNA, 33 bp, Homo sapien
ctccagtgcttcctggccataagctcatctgtt

SEQ ID NO: 1048408 - DNA, 33 bp, Homo sapien
ctccagtgcttcctggtcataagctcatctgtt

SEQ ID NO: 1048409 - DNA, 33 bp, Homo sapien
tgtcctgatggagacaactatttagcgccagct

SEQ ID NO: 1048410 - DNA, 33 bp, Homo sapien
tgtcctgatggagacagctatttagcgccagct

SEQ ID NO: 1048411 - DNA, 33 bp, Homo sapien
caaaacggcatctcaaaaaccaataaaacacca

SEQ ID NO: 1048412 - DNA, 33 bp, Homo sapien
caaaacggcatctcaataaccaataaaacacca

SEQ ID NO: 1048413 - DNA, 33 bp, Homo sapien
taatctcctcctaaaccggacagggccctgccc

SEQ ID NO: 1048414 - DNA, 33 bp, Homo sapien
taatctcctcctaaactggacagggccctgccc

SEQ ID NO: 1048415 - DNA, 33 bp, Homo sapien
tgaggacatcaacttcaactttcttccaccccc

SEQ ID NO: 1048416 - DNA, 33 bp, Homo sapien
tgaggacatcaacttcgactttcttccaccccc

SEQ ID NO: 1048417 - DNA, 33 bp, Homo sapien
tgtgttttaatcacagcctacctgtctagacct

SEQ ID NO: 1048418 - DNA, 33 bp, Homo sapien
tgtgttttaatcacagtctacctgtctagacct

SEQ ID NO: 1048419 - DNA, 33 bp, Homo sapien
ctctgacagtcacagacgtgtaggtctcctgac

SEQ ID NO: 1048420 - DNA, 33 bp, Homo sapien
ctctgacagtcacagatgtgtaggtctcctgac

SEQ ID NO: 1048421 - DNA, 33 bp, Homo sapien
ttgccaggttccatacactcttcccagaagggg

SEQ ID NO: 1048422 - DNA, 33 bp, Homo sapien
ttgccaggttccatacgctcttcccagaagggg

SEQ ID NO: 1048423 - DNA, 33 bp, Homo sapien
gatgcccattctggaaacttctggtggaagaaa

SEQ ID NO: 1048424 - DNA, 33 bp, Homo sapien
gatgcccattctggaaccttctggtggaagaaa

SEQ ID NO: 1048425 - DNA, 33 bp, Homo sapien
cagctcacacccaagacatggccactccgagac

SEQ ID NO: 1048426 - DNA, 33 bp, Homo sapien
cagctcacacccaagagatggccactccgagac

SEQ ID NO: 1048427 - DNA, 33 bp, Homo sapien
gaggatattgaaacaccagaaaattctgtaacc

SEQ ID NO: 1048428 - DNA, 33 bp, Homo sapien
gaggatattgaaacactagaaaattctgtaacc

SEQ ID NO: 1048429 - DNA, 33 bp, Homo sapien
tggcactggcagcaccaaagtggagaaggagac

SEQ ID NO: 1048430 - DNA, 33 bp, Homo sapien
tggcactggcagcaccgaagtggagaaggagac

SEQ ID NO: 1048431 - DNA, 33 bp, Homo sapien
tatttgaagaaaattcaatcagcacaagtaaat

SEQ ID NO: 1048432 - DNA, 33 bp, Homo sapien
tatttgaagaaaattcgatcagcacaagtaaat

SEQ ID NO: 1048433 - DNA, 33 bp, Homo sapien
cagcccattatgatgacagccaggattctcagt

SEQ ID NO: 1048434 - DNA, 33 bp, Homo sapien
cagcccattatgatgagagccaggattctcagt

SEQ ID NO: 1048435 - DNA, 33 bp, Homo sapien
ggggtgaaagagaatacggaccagaacaaggcc

SEQ ID NO: 1048436 - DNA, 33 bp, Homo sapien
ggggtgaaagagaatatggaccagaacaaggcc

SEQ ID NO: 1048437 - DNA, 33 bp, Homo sapien
tggccatccaagttcgaaggcgacgtggtaggg

SEQ ID NO: 1048438 - DNA, 33 bp, Homo sapien
tggccatccaagttcggaggcgacgtggtaggg

SEQ ID NO: 1048439 - DNA, 33 bp, Homo sapien
ggtggcactcatccagaagtccatgaagaaatg

SEQ ID NO: 1048440 - DNA, 33 bp, Homo sapien
ggtggcactcatccagtagtccatgaagaaatg

SEQ ID NO: 1048441 - DNA, 33 bp, Homo sapien
cggctgatgggcattaacttgcctgcgacccag

SEQ ID NO: 1048442 - DNA, 33 bp, Homo sapien
cggctgatgggcattaccttgcctgcgacccag

SEQ ID NO: 1048443 - DNA, 33 bp, Homo sapien
atcactaagtcacctccatcaattaaagtcctg

SEQ ID NO: 1048444 - DNA, 33 bp, Homo sapien
atcactaagtcacctctatcaattaaagtcctg

SEQ ID NO: 1048445 - DNA, 33 bp, Homo sapien
agactgaggactttccagagttcatgaaataca

SEQ ID NO: 1048446 - DNA, 33 bp, Homo sapien
agactgaggactttccggagttcatgaaataca

SEQ ID NO: 1048447 - DNA, 33 bp, Homo sapien
agccagcctgagaagacgcggcaaaggcgctta

SEQ ID NO: 1048448 - DNA, 33 bp, Homo sapien
agccagcctgagaagatgcggcaaaggcgctta

SEQ ID NO: 1048449 - DNA, 33 bp, Homo sapien
cctctgagccacaaccactactgggcagacacc

SEQ ID NO: 1048450 - DNA, 33 bp, Homo sapien
cctctgagccacaaccgctactgggcagacacc

SEQ ID NO: 1048451 - DNA, 33 bp, Homo sapien
cagccggtaatggaaaatttaatccaccgcttt

SEQ ID NO: 1048452 - DNA, 33 bp, Homo sapien
cagccggtaatggaaattttaatccaccgcttt

SEQ ID NO: 1048453 - DNA, 33 bp, Homo sapien
cttgtcctgtggtcacagcaacataggcagtgg

SEQ ID NO: 1048454 - DNA, 33 bp, Homo sapien
cttgtcctgtggtcacggcaacataggcagtgg

SEQ ID NO: 1048455 - DNA, 33 bp, Homo sapien
tgggaaatggaggaggaacttggggttcatgtt

SEQ ID NO: 1048456 - DNA, 33 bp, Homo sapien
tgggaaatggaggagggacttggggttcatgtt

SEQ ID NO: 1048457 - DNA, 33 bp, Homo sapien
tggttgtcgctgagaccgactaccagagtttcg

SEQ ID NO: 1048458 - DNA, 33 bp, Homo sapien
tggttgtcgctgagactgactaccagagtttcg

SEQ ID NO: 1048459 - DNA, 33 bp, Homo sapien
ccctccactttaaaaaatctatcagtacagact

SEQ ID NO: 1048460 - DNA, 33 bp, Homo sapien
ccctccactttaaaaagtctatcagtacagact

SEQ ID NO: 1048461 - DNA, 33 bp, Homo sapien
cgaggcactgctcagacgtttattgtccaccgc

SEQ ID NO: 1048462 - DNA, 33 bp, Homo sapien
cgaggcactgctcagatgtttattgtccaccgc

SEQ ID NO: 1048463 - DNA, 33 bp, Homo sapien
ggtggacctgctggcacaggtttaatgtttaac

SEQ ID NO: 1048464 - DNA, 33 bp, Homo sapien
ggtggacctgctggcagaggtttaatgtttaac

SEQ ID NO: 1048465 - DNA, 33 bp, Homo sapien
actaactgtgcttgtgcagaaagaggttgcatc

SEQ ID NO: 1048466 - DNA, 33 bp, Homo sapien
actaactgtgcttgtgtagaaagaggttgcatc

SEQ ID NO: 1048467 - DNA, 33 bp, Homo sapien
tgcaggggaacgataacgccccagacatgggtt

SEQ ID NO: 1048468 - DNA, 33 bp, Homo sapien
tgcaggggaacgataatgccccagacatgggtt

SEQ ID NO: 1048469 - DNA, 33 bp, Homo sapien
gatacacgggccctcaagtcaggcagctcccag

SEQ ID NO: 1048470 - DNA, 33 bp, Homo sapien
gatacacgggccctcaggtcaggcagctcccag

SEQ ID NO: 1048471 - DNA, 33 bp, Homo sapien
tccgaccacaggatccagcaatcatgctccttg

SEQ ID NO: 1048472 - DNA, 33 bp, Homo sapien
tccgaccacaggatccggcaatcatgctccttg

SEQ ID NO: 1048473 - DNA, 33 bp, Homo sapien
tccacatcagagagccacgttcgggccgaagct

SEQ ID NO: 1048474 - DNA, 33 bp, Homo sapien
tccacatcagagagccgcgttcgggccgaagct

SEQ ID NO: 1048475 - DNA, 33 bp, Homo sapien
ttcatttatgcttcccacccgtgttccctgagt

SEQ ID NO: 1048476 - DNA, 33 bp, Homo sapien
ttcatttatgcttcccgcccgtgttccctgagt

SEQ ID NO: 1048477 - DNA, 33 bp, Homo sapien
cggtggctttttaagccgctcttcttcgccata

SEQ ID NO: 1048478 - DNA, 33 bp, Homo sapien
cggtggctttttaagctgctcttcttcgccata

SEQ ID NO: 1048479 - DNA, 33 bp, Homo sapien
gctgtaccctccaaacacgtcacagttcagggt

SEQ ID NO: 1048480 - DNA, 33 bp, Homo sapien
gctgtaccctccaaacgcgtcacagttcagggt

SEQ ID NO: 1048481 - DNA, 33 bp, Homo sapien
agcccgaacttgttcacagcagcaggaggagag

SEQ ID NO: 1048482 - DNA, 33 bp, Homo sapien
agcccgaacttgttcagagcagcaggaggagag

SEQ ID NO: 1048483 - DNA, 33 bp, Homo sapien
ccacggcttcgctgaaaagctgcgcggccgtca

SEQ ID NO: 1048484 - DNA, 33 bp, Homo sapien
ccacggcttcgctgaagagctgcgcggccgtca

SEQ ID NO: 1048485 - DNA, 33 bp, Homo sapien
caggccttgggtaatcacatcactattttggat

SEQ ID NO: 1048486 - DNA, 33 bp, Homo sapien
caggccttgggtaatcgcatcactattttggat

SEQ ID NO: 1048487 - DNA, 33 bp, Homo sapien
ctgtttgcaaattcagcagctcctcttctgtct

SEQ ID NO: 1048488 - DNA, 33 bp, Homo sapien
ctgtttgcaaattcagtagctcctcttctgtct

SEQ ID NO: 1048489 - DNA, 33 bp, Homo sapien
aagccattacagaccacaaggcctactgacacc

SEQ ID NO: 1048490 - DNA, 33 bp, Homo sapien
aagccattacagaccagaaggcctactgacacc

SEQ ID NO: 1048491 - DNA, 33 bp, Homo sapien
tataattctgaccatacaggaattacattagaa

SEQ ID NO: 1048492 - DNA, 33 bp, Homo sapien
tataattctgaccatataggaattacattagaa

SEQ ID NO: 1048493 - DNA, 33 bp, Homo sapien
aacgcttatcacttaacaaaacatatagtaaaa

SEQ ID NO: 1048494 - DNA, 33 bp, Homo sapien
aacgcttatcacttaagaaaacatatagtaaaa

SEQ ID NO: 1048495 - DNA, 33 bp, Homo sapien
tctccaactatgcagcaagcttttggggctcag

SEQ ID NO: 1048496 - DNA, 33 bp, Homo sapien
tctccaactatgcagcgagcttttggggctcag

SEQ ID NO: 1048497 - DNA, 33 bp, Homo sapien
ctgtggcaagcaaaaccacggatcaggggactg

SEQ ID NO: 1048498 - DNA, 33 bp, Homo sapien
ctgtggcaagcaaaactacggatcaggggactg

SEQ ID NO: 1048499 - DNA, 33 bp, Homo sapien
atatagctacacaccaatatttacctataaaat

SEQ ID NO: 1048500 - DNA, 33 bp, Homo sapien
atatagctacacaccagtatttacctataaaat

SEQ ID NO: 1048501 - DNA, 33 bp, Homo sapien
gtctccttatggctgacggactctaggatttta

SEQ ID NO: 1048502 - DNA, 33 bp, Homo sapien
gtctccttatggctgatggactctaggatttta

SEQ ID NO: 1048503 - DNA, 33 bp, Homo sapien
aagcccatcttggatgcatctttgtcccatgcg

SEQ ID NO: 1048504 - DNA, 33 bp, Homo sapien
aagcccatcttggatgtatctttgtcccatgcg

SEQ ID NO: 1048505 - DNA, 33 bp, Homo sapien
tttttgcagcatggccaggcagcgaagaggcca

SEQ ID NO: 1048506 - DNA, 33 bp, Homo sapien
tttttgcagcatggccgggcagcgaagaggcca

SEQ ID NO: 1048507 - DNA, 33 bp, Homo sapien
aaatgatggagttagaaaaccaccatttggcac

SEQ ID NO: 1048508 - DNA, 33 bp, Homo sapien
aaatgatggagttagacaaccaccatttggcac

SEQ ID NO: 1048509 - DNA, 33 bp, Homo sapien
acaagctaccacacacaggctctgctatgactt

SEQ ID NO: 1048510 - DNA, 33 bp, Homo sapien
acaagctaccacacacgggctctgctatgactt

SEQ ID NO: 1048511 - DNA, 33 bp, Homo sapien
cactctgtaaaaagaaggaatgctcacctaaaa

SEQ ID NO: 1048512 - DNA, 33 bp, Homo sapien
cactctgtaaaaagaatgaatgctcacctaaaa

SEQ ID NO: 1048513 - DNA, 33 bp, Homo sapien
tgcaagaaatgagggacgaaaaaagctataata

SEQ ID NO: 1048514 - DNA, 33 bp, Homo sapien
tgcaagaaatgagggatgaaaaaagctataata

SEQ ID NO: 1048515 - DNA, 33 bp, Homo sapien
tgctatgtttgctacacgtattatagctttttt

SEQ ID NO: 1048516 - DNA, 33 bp, Homo sapien
tgctatgtttgctacatgtattatagctttttt

SEQ ID NO: 1048517 - DNA, 33 bp, Homo sapien
ttaatcagataactgtcaagtctctcagcttta

SEQ ID NO: 1048518 - DNA, 33 bp, Homo sapien
ttaatcagataactgttaagtctctcagcttta

SEQ ID NO: 1048519 - DNA, 33 bp, Homo sapien
gttggccgtggttctgaaaattaacagtctggt

SEQ ID NO: 1048520 - DNA, 33 bp, Homo sapien
gttggccgtggttctgtaaattaacagtctggt

SEQ ID NO: 1048521 - DNA, 33 bp, Homo sapien
tgtttgaagtgctaaccctgtaggatggtcgtg

SEQ ID NO: 1048522 - DNA, 33 bp, Homo sapien
tgtttgaagtgctaactctgtaggatggtcgtg

SEQ ID NO: 1048523 - DNA, 33 bp, Homo sapien
tggtctgctctgtttccatgtattggttagtgt

SEQ ID NO: 1048524 - DNA, 33 bp, Homo sapien
tggtctgctctgtttctatgtattggttagtgt

SEQ ID NO: 1048525 - DNA, 33 bp, Homo sapien
ttgtctggacctaaaacaggacgagtgcttgga

SEQ ID NO: 1048526 - DNA, 33 bp, Homo sapien
ttgtctggacctaaaagaggacgagtgcttgga

SEQ ID NO: 1048527 - DNA, 33 bp, Homo sapien
tttgctcttctaaatacagcattaggaaaatga

SEQ ID NO: 1048528 - DNA, 33 bp, Homo sapien
tttgctcttctaaatatagcattaggaaaatga

SEQ ID NO: 1048529 - DNA, 33 bp, Homo sapien
gcttctagggactagtcaccaatcttatttcaa

SEQ ID NO: 1048530 - DNA, 33 bp, Homo sapien
gcttctagggactagtgaccaatcttatttcaa

SEQ ID NO: 1048531 - DNA, 33 bp, Homo sapien
cccggtctaagttacaacaccacattcaccttc

SEQ ID NO: 1048532 - DNA, 33 bp, Homo sapien
cccggtctaagttacaccaccacattcaccttc

SEQ ID NO: 1048533 - DNA, 33 bp, Homo sapien
gtgatgcagttaaccccatcttctactagtgtc

SEQ ID NO: 1048534 - DNA, 33 bp, Homo sapien
gtgatgcagttaacccgatcttctactagtgtc

SEQ ID NO: 1048535 - DNA, 33 bp, Homo sapien
ctgaaagttagattcaaagacttggtttacatt

SEQ ID NO: 1048536 - DNA, 33 bp, Homo sapien
ctgaaagttagattcacagacttggtttacatt

SEQ ID NO: 1048537 - DNA, 33 bp, Homo sapien
tcagagatgactgaaacgttgtactacagacga

SEQ ID NO: 1048538 - DNA, 33 bp, Homo sapien
tcagagatgactgaaatgttgtactacagacga

SEQ ID NO: 1048539 - DNA, 33 bp, Homo sapien
agcactttctcagcgcaatttaatacccagtgc

SEQ ID NO: 1048540 - DNA, 33 bp, Homo sapien
agcactttctcagcgccatttaatacccagtgc

SEQ ID NO: 1048541 - DNA, 33 bp, Homo sapien
acctcctttcacctacaagatccctaaacctgc

SEQ ID NO: 1048542 - DNA, 33 bp, Homo sapien
acctcctttcacctacgagatccctaaacctgc

SEQ ID NO: 1048543 - DNA, 33 bp, Homo sapien
ccttccggtcaaagtcccctgagcctctcactt

SEQ ID NO: 1048544 - DNA, 33 bp, Homo sapien
ccttccggtcaaagtctcctgagcctctcactt

SEQ ID NO: 1048545 - DNA, 33 bp, Homo sapien
gttttcaactaacaaacacaagtcttttgtctt

SEQ ID NO: 1048546 - DNA, 33 bp, Homo sapien
gttttcaactaacaaatacaagtcttttgtctt

SEQ ID NO: 1048547 - DNA, 33 bp, Homo sapien
cctcattcattcccaacgcgctaagttttcctc

SEQ ID NO: 1048548 - DNA, 33 bp, Homo sapien
cctcattcattcccaatgcgctaagttttcctc

SEQ ID NO: 1048549 - DNA, 33 bp, Homo sapien
ttcagtgactgtaagacggtccctcagtcctgt

SEQ ID NO: 1048550 - DNA, 33 bp, Homo sapien
ttcagtgactgtaagatggtccctcagtcctgt

SEQ ID NO: 1048551 - DNA, 33 bp, Homo sapien
tggcacagtgaagacaccgtcaatgattcagca

SEQ ID NO: 1048552 - DNA, 33 bp, Homo sapien
tggcacagtgaagacagcgtcaatgattcagca

SEQ ID NO: 1048553 - DNA, 33 bp, Homo sapien
agcctccacgattaaaactacatctcccctgcg

SEQ ID NO: 1048554 - DNA, 33 bp, Homo sapien
agcctccacgattaaagctacatctcccctgcg

SEQ ID NO: 1048555 - DNA, 33 bp, Homo sapien
tatgaccctcattttcagaaaagttgccttttt

SEQ ID NO: 1048556 - DNA, 33 bp, Homo sapien
tatgaccctcattttccgaaaagttgccttttt

SEQ ID NO: 1048557 - DNA, 33 bp, Homo sapien
ggcatggctcgctgtccacggcgttgacacagg

SEQ ID NO: 1048558 - DNA, 33 bp, Homo sapien
ggcatggctcgctgtctacggcgttgacacagg

SEQ ID NO: 1048559 - DNA, 33 bp, Homo sapien
acagacaagaacttaacgtgtttggatgcacgc

SEQ ID NO: 1048560 - DNA, 33 bp, Homo sapien
acagacaagaacttaatgtgtttggatgcacgc

SEQ ID NO: 1048561 - DNA, 33 bp, Homo sapien
tcttctcgcgttctgagccgtgcagctttgttt

SEQ ID NO: 1048562 - DNA, 33 bp, Homo sapien
tcttctcgcgttctgatccgtgcagctttgttt

SEQ ID NO: 1048563 - DNA, 33 bp, Homo sapien
ctcttgttgcttgatggatagaaatagagtagg

SEQ ID NO: 1048564 - DNA, 33 bp, Homo sapien
ctcttgttgcttgatgtatagaaatagagtagg

SEQ ID NO: 1048565 - DNA, 33 bp, Homo sapien
aattttcagacataccagaaagcagagagaatc

SEQ ID NO: 1048566 - DNA, 33 bp, Homo sapien
aattttcagacataccggaaagcagagagaatc

SEQ ID NO: 1048567 - DNA, 33 bp, Homo sapien
gtggtataaccatcacccagctcctgagcccac

SEQ ID NO: 1048568 - DNA, 33 bp, Homo sapien
gtggtataaccatcacgcagctcctgagcccac

SEQ ID NO: 1048569 - DNA, 33 bp, Homo sapien
tgagaccttctctaacaaaacttttagagaaga

SEQ ID NO: 1048570 - DNA, 33 bp, Homo sapien
tgagaccttctctaacgaaacttttagagaaga

SEQ ID NO: 1048571 - DNA, 33 bp, Homo sapien
aggacgagtcagggtgcagaaaaattgctgaaa

SEQ ID NO: 1048572 - DNA, 33 bp, Homo sapien
aggacgagtcagggtggagaaaaattgctgaaa

SEQ ID NO: 1048573 - DNA, 33 bp, Homo sapien
attacaataattataaatcctgctggtggccca

SEQ ID NO: 1048574 - DNA, 33 bp, Homo sapien
attacaataattataagtcctgctggtggccca

SEQ ID NO: 1048575 - DNA, 33 bp, Homo sapien
cacagccaaactgccacgctgactgtacctctc

SEQ ID NO: 1048576 - DNA, 33 bp, Homo sapien
cacagccaaactgccaggctgactgtacctctc

SEQ ID NO: 1048577 - DNA, 33 bp, Homo sapien
gtgtttttacatccacaatgaagcaagtattgg

SEQ ID NO: 1048578 - DNA, 33 bp, Homo sapien
gtgtttttacatccacgatgaagcaagtattgg

SEQ ID NO: 1048579 - DNA, 33 bp, Homo sapien
gttaaaggtatagtgaagaattggttgttggga

SEQ ID NO: 1048580 - DNA, 33 bp, Homo sapien
gttaaaggtatagtgaggaattggttgttggga

SEQ ID NO: 1048581 - DNA, 33 bp, Homo sapien
tgatggccgcccagaccacttcaaagacgctcc

SEQ ID NO: 1048582 - DNA, 33 bp, Homo sapien
tgatggccgcccagactacttcaaagacgctcc

SEQ ID NO: 1048583 - DNA, 33 bp, Homo sapien
actttcactggggagacattagcgtacctgccg

SEQ ID NO: 1048584 - DNA, 33 bp, Homo sapien
actttcactggggagatattagcgtacctgccg

SEQ ID NO: 1048585 - DNA, 33 bp, Homo sapien
aaggaagttggaacataaagtgctgcctgcctc

SEQ ID NO: 1048586 - DNA, 33 bp, Homo sapien
aaggaagttggaacatgaagtgctgcctgcctc

SEQ ID NO: 1048587 - DNA, 33 bp, Homo sapien
ctaagtgcttgtcaacagatgaaaggatacaga

SEQ ID NO: 1048588 - DNA, 33 bp, Homo sapien
ctaagtgcttgtcaacggatgaaaggatacaga

SEQ ID NO: 1048589 - DNA, 33 bp, Homo sapien
ggggctaaagtaagcccggactggcagcacctc

SEQ ID NO: 1048590 - DNA, 33 bp, Homo sapien
ggggctaaagtaagcctggactggcagcacctc

SEQ ID NO: 1048591 - DNA, 33 bp, Homo sapien
aagtcaggtgcgtatgcaggaattttagaggca

SEQ ID NO: 1048592 - DNA, 33 bp, Homo sapien
aagtcaggtgcgtatggaggaattttagaggca

SEQ ID NO: 1048593 - DNA, 33 bp, Homo sapien
cacagggagccctgacaacagaagacaaattga

SEQ ID NO: 1048594 - DNA, 33 bp, Homo sapien
cacagggagccctgacgacagaagacaaattga

SEQ ID NO: 1048595 - DNA, 33 bp, Homo sapien
catgctcctatgaacacgctcctgtgcgcagtc

SEQ ID NO: 1048596 - DNA, 33 bp, Homo sapien
catgctcctatgaacatgctcctgtgcgcagtc

SEQ ID NO: 1048597 - DNA, 33 bp, Homo sapien
cattcccggtagataaccgtcagtggtcatgac

SEQ ID NO: 1048598 - DNA, 33 bp, Homo sapien
cattcccggtagataatcgtcagtggtcatgac

SEQ ID NO: 1048599 - DNA, 33 bp, Homo sapien
accccccagccaaaacagtacattataacactg

SEQ ID NO: 1048600 - DNA, 33 bp, Homo sapien
accccccagccaaaacggtacattataacactg

SEQ ID NO: 1048601 - DNA, 33 bp, Homo sapien
cctctgcagatgcagcaactaccttcccttctt

SEQ ID NO: 1048602 - DNA, 33 bp, Homo sapien
cctctgcagatgcagccactaccttcccttctt

SEQ ID NO: 1048603 - DNA, 33 bp, Homo sapien
aagggagacccgagacagcttcggaagtgatgg

SEQ ID NO: 1048604 - DNA, 33 bp, Homo sapien
aagggagacccgagacggcttcggaagtgatgg

SEQ ID NO: 1048605 - DNA, 33 bp, Homo sapien
gcttgtggacccaggaagctttctgccctctgt

SEQ ID NO: 1048606 - DNA, 33 bp, Homo sapien
gcttgtggacccaggaggctttctgccctctgt

SEQ ID NO: 1048607 - DNA, 33 bp, Homo sapien
cgcatcggatccttgcgctgggcaaacttggct

SEQ ID NO: 1048608 - DNA, 33 bp, Homo sapien
cgcatcggatccttgctctgggcaaacttggct

SEQ ID NO: 1048609 - DNA, 33 bp, Homo sapien
gtgccggtgtttcaaacgttcacggaaaactga

SEQ ID NO: 1048610 - DNA, 33 bp, Homo sapien
gtgccggtgtttcaaaggttcacggaaaactga

SEQ ID NO: 1048611 - DNA, 33 bp, Homo sapien
tctgggggcctcacagcatctgcttgacgtttt

SEQ ID NO: 1048612 - DNA, 33 bp, Homo sapien
tctgggggcctcacagtatctgcttgacgtttt

SEQ ID NO: 1048613 - DNA, 33 bp, Homo sapien
ggttctcgtgaggacacgttttgggatgcaggt

SEQ ID NO: 1048614 - DNA, 33 bp, Homo sapien
ggttctcgtgaggacatgttttgggatgcaggt

SEQ ID NO: 1048615 - DNA, 33 bp, Homo sapien
gaggttccatgtcccactaggcactcattgtct

SEQ ID NO: 1048616 - DNA, 33 bp, Homo sapien
gaggttccatgtcccattaggcactcattgtct

SEQ ID NO: 1048617 - DNA, 33 bp, Homo sapien
tcatggaaggttttcaaggggcttgtgagactc

SEQ ID NO: 1048618 - DNA, 33 bp, Homo sapien
tcatggaaggttttcagggggcttgtgagactc

SEQ ID NO: 1048619 - DNA, 33 bp, Homo sapien
tctctaaaaaatatacaaaaactagtatggagg

SEQ ID NO: 1048620 - DNA, 33 bp, Homo sapien
tctctaaaaaatatacgaaaactagtatggagg

SEQ ID NO: 1048621 - DNA, 33 bp, Homo sapien
cctgcacacacagaggaaagtctgtttgaggac

SEQ ID NO: 1048622 - DNA, 33 bp, Homo sapien
cctgcacacacagaggcaagtctgtttgaggac

SEQ ID NO: 1048623 - DNA, 33 bp, Homo sapien
acacaatctatgtgcaaatgtttacagctttat

SEQ ID NO: 1048624 - DNA, 33 bp, Homo sapien
acacaatctatgtgcagatgtttacagctttat

SEQ ID NO: 1048625 - DNA, 33 bp, Homo sapien
tgcattcatacaattaaagaatactcaggagta

SEQ ID NO: 1048626 - DNA, 33 bp, Homo sapien
tgcattcatacaattagagaatactcaggagta

SEQ ID NO: 1048627 - DNA, 33 bp, Homo sapien
aatactcaggagtaaaaggaaacacgctacagt

SEQ ID NO: 1048628 - DNA, 33 bp, Homo sapien
aatactcaggagtaaagggaaacacgctacagt

SEQ ID NO: 1048629 - DNA, 33 bp, Homo sapien
gagcagtagaaggccactgacagaaaggggtgg

SEQ ID NO: 1048630 - DNA, 33 bp, Homo sapien
gagcagtagaaggccattgacagaaaggggtgg

SEQ ID NO: 1048631 - DNA, 33 bp, Homo sapien
ccattccatgcagaaccacagccatttccccag

SEQ ID NO: 1048632 - DNA, 33 bp, Homo sapien
ccattccatgcagaactacagccatttccccag

SEQ ID NO: 1048633 - DNA, 33 bp, Homo sapien
tctcggtgtaaaacccaactgcacattctattt

SEQ ID NO: 1048634 - DNA, 33 bp, Homo sapien
tctcggtgtaaaacccgactgcacattctattt

SEQ ID NO: 1048635 - DNA, 33 bp, Homo sapien
aatcagtaatacacaagaaaaaacagggtatcc

SEQ ID NO: 1048636 - DNA, 33 bp, Homo sapien
aatcagtaatacacaataaaaaacagggtatcc

SEQ ID NO: 1048637 - DNA, 33 bp, Homo sapien
ggggctattcgttttaacaatgaccattaaccc

SEQ ID NO: 1048638 - DNA, 33 bp, Homo sapien
ggggctattcgttttagcaatgaccattaaccc

SEQ ID NO: 1048639 - DNA, 33 bp, Homo sapien
agcgactcgactcggcagataggagggtgttca

SEQ ID NO: 1048640 - DNA, 33 bp, Homo sapien
agcgactcgactcggcggataggagggtgttca

SEQ ID NO: 1048641 - DNA, 33 bp, Homo sapien
acagccggagatggaccgagttcccgggggagg

SEQ ID NO: 1048642 - DNA, 33 bp, Homo sapien
acagccggagatggactgagttcccgggggagg

SEQ ID NO: 1048643 - DNA, 33 bp, Homo sapien
ctgagttgctatcgaaagaaatgaggttatgca

SEQ ID NO: 1048644 - DNA, 33 bp, Homo sapien
ctgagttgctatcgaatgaaatgaggttatgca

SEQ ID NO: 1048645 - DNA, 33 bp, Homo sapien; identical to SEQ ID NO: 909915

SEQ ID NO: 1048646 - DNA, 33 bp, Homo sapien; identical to SEQ ID NO: 909916

SEQ ID NO: 1048647 - DNA, 33 bp, Homo sapien; identical to SEQ ID NO: 909915

SEQ ID NO: 1048648 - DNA, 33 bp, Homo sapien; identical to SEQ ID NO: 909916

SEQ ID NO: 1048649 - DNA, 33 bp, Homo sapien; identical to SEQ ID NO: 909915

SEQ ID NO: 1048650 - DNA, 33 bp, Homo sapien; identical to SEQ ID NO: 909916

SEQ ID NO: 1048651 - DNA, 33 bp, Homo sapien
cctggcaatgtacaccaacagctcatcttcaca

SEQ ID NO: 1048652 - DNA, 33 bp, Homo sapien
cctggcaatgtacaccgacagctcatcttcaca

SEQ ID NO: 1048653 - DNA, 33 bp, Homo sapien
atactccatgttctgacgttcaattgtgaaagg

SEQ ID NO: 1048654 - DNA, 33 bp, Homo sapien
atactccatgttctgatgttcaattgtgaaagg

SEQ ID NO: 1048655 - DNA, 33 bp, Homo sapien
cccctaacctgatcccacagttgcatacatctg

SEQ ID NO: 1048656 - DNA, 33 bp, Homo sapien
cccctaacctgatcccgcagttgcatacatctg

SEQ ID NO: 1048657 - DNA, 33 bp, Homo sapien
ctacttcaggctcaaacgagatccaaggagacc

SEQ ID NO: 1048658 - DNA, 33 bp, Homo sapien
ctacttcaggctcaaatgagatccaaggagacc

SEQ ID NO: 1048659 - DNA, 33 bp, Homo sapien
acagagaaaggtatccacgtactgtatatatac

SEQ ID NO: 1048660 - DNA, 33 bp, Homo sapien
acagagaaaggtatccgcgtactgtatatatac

SEQ ID NO: 1048661 - DNA, 33 bp, Homo sapien
agggaaaatgttaaaacggagatgatggtttaa

SEQ ID NO: 1048662 - DNA, 33 bp, Homo sapien
agggaaaatgttaaaatggagatgatggtttaa

SEQ ID NO: 1048663 - DNA, 33 bp, Homo sapien
cctgcaaagaacaacaaatagcaaactcaaata

SEQ ID NO: 1048664 - DNA, 33 bp, Homo sapien
cctgcaaagaacaacagatagcaaactcaaata

SEQ ID NO: 1048665 - DNA, 33 bp, Homo sapien
ccggcgccacccagaccggtaatgcggctcagc

SEQ ID NO: 1048666 - DNA, 33 bp, Homo sapien
ccggcgccacccagactggtaatgcggctcagc

SEQ ID NO: 1048667 - DNA, 33 bp, Homo sapien
aaagccccagtagtcacgagttaaattcttgcc

SEQ ID NO: 1048668 - DNA, 33 bp, Homo sapien
aaagccccagtagtcatgagttaaattcttgcc

SEQ ID NO: 1048669 - DNA, 33 bp, Homo sapien
tgatcaatgattgataaccatgcgcatgggctt

SEQ ID NO: 1048670 - DNA, 33 bp, Homo sapien
tgatcaatgattgatagccatgcgcatgggctt

SEQ ID NO: 1048671 - DNA, 33 bp, Homo sapien
cccaaagcaaggtgcacaggacaacacacagga

SEQ ID NO: 1048672 - DNA, 33 bp, Homo sapien
cccaaagcaaggtgcagaggacaacacacagga

SEQ ID NO: 1048673 - DNA, 33 bp, Homo sapien; identical to SEQ ID NO: 1048671

SEQ ID NO: 1048674 - DNA, 33 bp, Homo sapien; identical to SEQ ID NO: 1048672

SEQ ID NO: 1048675 - DNA, 33 bp, Homo sapien
tggggtcagagggcccagattacaaaggtgata

SEQ ID NO: 1048676 - DNA, 33 bp, Homo sapien
tggggtcagagggcccggattacaaaggtgata

SEQ ID NO: 1048677 - DNA, 33 bp, Homo sapien; identical to SEQ ID NO: 1048675

SEQ ID NO: 1048678 - DNA, 33 bp, Homo sapien; identical to SEQ ID NO: 1048676

SEQ ID NO: 1048679 - DNA, 33 bp, Homo sapien
ccacattctactcttgcataactaacctgagat

SEQ ID NO: 1048680 - DNA, 33 bp, Homo sapien
ccacattctactcttgtataactaacctgagat

SEQ ID NO: 1048681 - DNA, 33 bp, Homo sapien
ctgaggcattaggaaactgaatccattctacct

SEQ ID NO: 1048682 - DNA, 33 bp, Homo sapien
ctgaggcattaggaaattgaatccattctacct

SEQ ID NO: 1048683 - DNA, 33 bp, Homo sapien; identical to SEQ ID NO: 1048681

SEQ ID NO: 1048684 - DNA, 33 bp, Homo sapien; identical to SEQ ID NO: 1048682

SEQ ID NO: 1048685 - DNA, 33 bp, Homo sapien
aagggattgataaatacgctttctaatttctca

SEQ ID NO: 1048686 - DNA, 33 bp, Homo sapien
aagggattgataaatatgctttctaatttctca

SEQ ID NO: 1048687 - DNA, 33 bp, Homo sapien
gatggctaatttcaataacctatttctgcacca

SEQ ID NO: 1048688 - DNA, 33 bp, Homo sapien
gatggctaatttcaatgacctatttctgcacca

SEQ ID NO: 1048689 - DNA, 33 bp, Homo sapien
aaaaagacaaaaaatacccactgctggtgaaga

SEQ ID NO: 1048690 - DNA, 33 bp, Homo sapien
aaaaagacaaaaaatatccactgctggtgaaga

SEQ ID NO: 1048691 - DNA, 33 bp, Homo sapien
aattgctggtcacagtaaaatgcatagaactgt

SEQ ID NO: 1048692 - DNA, 33 bp, Homo sapien
aattgctggtcacagtgaaatgcatagaactgt

SEQ ID NO: 1048693 - DNA, 33 bp, Homo sapien
tatacacttttttccacgagaaatcctcattgt

SEQ ID NO: 1048694 - DNA, 33 bp, Homo sapien
tatacacttttttccatgagaaatcctcattgt

SEQ ID NO: 1048695 - DNA, 33 bp, Homo sapien
ctcattgtcagaagtaacttcattcaatgggca

SEQ ID NO: 1048696 - DNA, 33 bp, Homo sapien
ctcattgtcagaagtatcttcattcaatgggca

SEQ ID NO: 1048697 - DNA, 33 bp, Homo sapien
ggtggattgatgcctacagatccacaggaataa

SEQ ID NO: 1048698 - DNA, 33 bp, Homo sapien
ggtggattgatgcctatagatccacaggaataa

SEQ ID NO: 1048699 - DNA, 33 bp, Homo sapien
aaagagcagaggcctacgaaaccagaaagaatt

SEQ ID NO: 1048700 - DNA, 33 bp, Homo sapien
aaagagcagaggcctatgaaaccagaaagaatt

SEQ ID NO: 1048701 - DNA, 33 bp, Homo sapien; identical to SEQ ID NO: 1048699

SEQ ID NO: 1048702 - DNA, 33 bp, Homo sapien; identical to SEQ ID NO: 1048700

SEQ ID NO: 1048703 - DNA, 33 bp, Homo sapien
tgtggtacatgtcttacagctgccaagtcctcc

SEQ ID NO: 1048704 - DNA, 33 bp, Homo sapien
tgtggtacatgtcttatagctgccaagtcctcc

SEQ ID NO: 1048705 - DNA, 33 bp, Homo sapien
gcaaaaacgggtctcaacatgccttcccagagc

SEQ ID NO: 1048706 - DNA, 33 bp, Homo sapien
gcaaaaacgggtctcagcatgccttcccagagc

SEQ ID NO: 1048707 - DNA, 33 bp, Homo sapien
aaaggagtacattcaacgtctgatagcagagta

SEQ ID NO: 1048708 - DNA, 33 bp, Homo sapien
aaaggagtacattcaatgtctgatagcagagta

SEQ ID NO: 1048709 - DNA, 33 bp, Homo sapien
aggagccgcaacaccccaacttgtccgaagctg

SEQ ID NO: 1048710 - DNA, 33 bp, Homo sapien
aggagccgcaacaccctaacttgtccgaagctg

SEQ ID NO: 1048711 - DNA, 33 bp, Homo sapien
attcaggctgtgcatacagaccaaaaagtcaaa

SEQ ID NO: 1048712 - DNA, 33 bp, Homo sapien
attcaggctgtgcatagagaccaaaaagtcaaa

SEQ ID NO: 1048713 - DNA, 33 bp, Homo sapien
agctggtatttcttgactatctactttgcagaa

SEQ ID NO: 1048714 - DNA, 33 bp, Homo sapien
agctggtatttcttgagtatctactttgcagaa

SEQ ID NO: 1048715 - DNA, 33 bp, Homo sapien
ctagcagcactggacgacctccaaaaaatattt

SEQ ID NO: 1048716 - DNA, 33 bp, Homo sapien
ctagcagcactggacggcctccaaaaaatattt

SEQ ID NO: 1048717 - DNA, 33 bp, Homo sapien
aaccaacaaattaacaatctcccaggccaggca

SEQ ID NO: 1048718 - DNA, 33 bp, Homo sapien
aaccaacaaattaacagtctcccaggccaggca

SEQ ID NO: 1048719 - DNA, 33 bp, Homo sapien
ccataaagttcacaccaagaaaatccagagttt

SEQ ID NO: 1048720 - DNA, 33 bp, Homo sapien
ccataaagttcacaccgagaaaatccagagttt

SEQ ID NO: 1048721 - DNA, 33 bp, Homo sapien
aactaaaagggtatcaaaatcgtcatcattata

SEQ ID NO: 1048722 - DNA, 33 bp, Homo sapien
aactaaaagggtatcagaatcgtcatcattata

SEQ ID NO: 1048723 - DNA, 33 bp, Homo sapien
gcagaagagtattatcaatcactagaaaaagct

SEQ ID NO: 1048724 - DNA, 33 bp, Homo sapien
gcagaagagtattatcgatcactagaaaaagct

SEQ ID NO: 1048725 - DNA, 33 bp, Homo sapien
ttttctcttcctgtccaatacgcatctggttat

SEQ ID NO: 1048726 - DNA, 33 bp, Homo sapien
ttttctcttcctgtccgatacgcatctggttat

SEQ ID NO: 1048727 - DNA, 33 bp, Homo sapien
ctcagaatccttgacgcagttgcccgaacccgg

SEQ ID NO: 1048728 - DNA, 33 bp, Homo sapien
ctcagaatccttgacgtagttgcccgaacccgg

SEQ ID NO: 1048729 - DNA, 33 bp, Homo sapien
tactctttgacttgaaaccaatttgacacttca

SEQ ID NO: 1048730 - DNA, 33 bp, Homo sapien
tactctttgacttgaagccaatttgacacttca

SEQ ID NO: 1048731 - DNA, 33 bp, Homo sapien
gaaagctacaactgcaaatttgataaggtttct

SEQ ID NO: 1048732 - DNA, 33 bp, Homo sapien
gaaagctacaactgcatatttgataaggtttct

SEQ ID NO: 1048733 - DNA, 33 bp, Homo sapien
cttctcgttgacaccccagtcttttggtagcat

SEQ ID NO: 1048734 - DNA, 33 bp, Homo sapien
cttctcgttgacaccctagtcttttggtagcat

SEQ ID NO: 1048735 - DNA, 33 bp, Homo sapien
gaaaacactagaacacaaaatgaaaaggaacaa

SEQ ID NO: 1048736 - DNA, 33 bp, Homo sapien
gaaaacactagaacacgaaatgaaaaggaacaa

SEQ ID NO: 1048737 - DNA, 33 bp, Homo sapien
aaaagatacgtatagacagtaaaatgattacta

SEQ ID NO: 1048738 - DNA, 33 bp, Homo sapien
aaaagatacgtatagatagtaaaatgattacta

SEQ ID NO: 1048739 - DNA, 33 bp, Homo sapien
taatatagtaagcaaaagtatctatcatctcac

SEQ ID NO: 1048740 - DNA, 33 bp, Homo sapien
taatatagtaagcaaatgtatctatcatctcac

SEQ ID NO: 1048741 - DNA, 33 bp, Homo sapien
gtacctttctaacatcaactgaaataaataaat

SEQ ID NO: 1048742 - DNA, 33 bp, Homo sapien
gtacctttctaacatccactgaaataaataaat

SEQ ID NO: 1048743 - DNA, 33 bp, Homo sapien
gaatcatataatgggccctggtgactttgggga

SEQ ID NO: 1048744 - DNA, 33 bp, Homo sapien
gaatcatataatgggctctggtgactttgggga

SEQ ID NO: 1048745 - DNA, 33 bp, Homo sapien
cctggaatgaaaggaccggtctagagaggaaag

SEQ ID NO: 1048746 - DNA, 33 bp, Homo sapien
cctggaatgaaaggactggtctagagaggaaag

SEQ ID NO: 1048747 - DNA, 33 bp, Homo sapien
gaaaatgagtttatgaaccagaaattggaagtt

SEQ ID NO: 1048748 - DNA, 33 bp, Homo sapien
gaaaatgagtttatgacccagaaattggaagtt

SEQ ID NO: 1048749 - DNA, 33 bp, Homo sapien
gcaccatcataactcactgaagactccacagca

SEQ ID NO: 1048750 - DNA, 33 bp, Homo sapien
gcaccatcataactcattgaagactccacagca

SEQ ID NO: 1048751 - DNA, 33 bp, Homo sapien
ctgcttagcctttccaaaagaggcgatcagata

SEQ ID NO: 1048752 - DNA, 33 bp, Homo sapien
ctgcttagcctttccagaagaggcgatcagata

SEQ ID NO: 1048753 - DNA, 33 bp, Homo sapien
tttaagaaaacagacaatcattcttccacaatt

SEQ ID NO: 1048754 - DNA, 33 bp, Homo sapien
tttaagaaaacagacattcattcttccacaatt

SEQ ID NO: 1048755 - DNA, 33 bp, Homo sapien
gagacagaagtatcaaagtgcatcatttatcat

SEQ ID NO: 1048756 - DNA, 33 bp, Homo sapien
gagacagaagtatcaaggtgcatcatttatcat

SEQ ID NO: 1048757 - DNA, 33 bp, Homo sapien; identical to SEQ ID NO: 1048755

SEQ ID NO: 1048758 - DNA, 33 bp, Homo sapien; identical to SEQ ID NO: 1048756

SEQ ID NO: 1048759 - DNA, 33 bp, Homo sapien
gatgaataactcaaaaacatggttagaacttgg

SEQ ID NO: 1048760 - DNA, 33 bp, Homo sapien
gatgaataactcaaaagcatggttagaacttgg

SEQ ID NO: 1048761 - DNA, 33 bp, Homo sapien
gaaggaaggatttcccaagaaagtgatgtttga

SEQ ID NO: 1048762 - DNA, 33 bp, Homo sapien
gaaggaaggatttcccgagaaagtgatgtttga

SEQ ID NO: 1048763 - DNA, 33 bp, Homo sapien
ggaagtgaagaaggagaattttcccagtggagc

SEQ ID NO: 1048764 - DNA, 33 bp, Homo sapien
ggaagtgaagaaggaggattttcccagtggagc

SEQ ID NO: 1048765 - DNA, 33 bp, Homo sapien
ggatgttgacagtggaagaggctgtgcgtgtct

SEQ ID NO: 1048766 - DNA, 33 bp, Homo sapien
ggatgttgacagtggaggaggctgtgcgtgtct

SEQ ID NO: 1048767 - DNA, 33 bp, Homo sapien
aactatgtacttgagtcaacttctactcagttc

SEQ ID NO: 1048768 - DNA, 33 bp, Homo sapien
aactatgtacttgagtgaacttctactcagttc

SEQ ID NO: 1048769 - DNA, 33 bp, Homo sapien
gttggaattagggacccaactgtgctgtggcac

SEQ ID NO: 1048770 - DNA, 33 bp, Homo sapien
gttggaattagggacctaactgtgctgtggcac

SEQ ID NO: 1048771 - DNA, 33 bp, Homo sapien
caaaaacttggtatgcacatattgaatgcagtt

SEQ ID NO: 1048772 - DNA, 33 bp, Homo sapien
caaaaacttggtatgcgcatattgaatgcagtt

SEQ ID NO: 1048773 - DNA, 33 bp, Homo sapien
tataactgaagttacaagaatgtaaagacatgg

SEQ ID NO: 1048774 - DNA, 33 bp, Homo sapien
tataactgaagttacaggaatgtaaagacatgg

SEQ ID NO: 1048775 - DNA, 33 bp, Homo sapien
cagcccaaaatgtccacaacttgatcaataact

SEQ ID NO: 1048776 - DNA, 33 bp, Homo sapien
cagcccaaaatgtccagaacttgatcaataact

SEQ ID NO: 1048777 - DNA, 33 bp, Homo sapien
agtgtgcaaaaaaatgaaaagatgcaggagaaa

SEQ ID NO: 1048778 - DNA, 33 bp, Homo sapien
agtgtgcaaaaaaatggaaagatgcaggagaaa

SEQ ID NO: 1048779 - DNA, 33 bp, Homo sapien
cgctgcagagaatctacatgtaccagagatgaa

SEQ ID NO: 1048780 - DNA, 33 bp, Homo sapien
cgctgcagagaatctatatgtaccagagatgaa

SEQ ID NO: 1048781 - DNA, 33 bp, Homo sapien
ctcaggatctcctgaacgttgtgttatcagggg

SEQ ID NO: 1048782 - DNA, 33 bp, Homo sapien
ctcaggatctcctgaaggttgtgttatcagggg

SEQ ID NO: 1048783 - DNA, 33 bp, Homo sapien
ccggcttctttgctacaatctgttttatcagcc

SEQ ID NO: 1048784 - DNA, 33 bp, Homo sapien
ccggcttctttgctaccatctgttttatcagcc

SEQ ID NO: 1048785 - DNA, 33 bp, Homo sapien
cagccattgaaaatgacgacgaaggtggtcatt

SEQ ID NO: 1048786 - DNA, 33 bp, Homo sapien
cagccattgaaaatgatgacgaaggtggtcatt

SEQ ID NO: 1048787 - DNA, 33 bp, Homo sapien
cagtaccatgaaggaaaggacagaacattgatt

SEQ ID NO: 1048788 - DNA, 33 bp, Homo sapien
cagtaccatgaaggaagggacagaacattgatt

SEQ ID NO: 1048789 - DNA, 33 bp, Homo sapien
ggcaggaaatgttctccacatcatagtcataaa

SEQ ID NO: 1048790 - DNA, 33 bp, Homo sapien
ggcaggaaatgttctctacatcatagtcataaa

SEQ ID NO: 1048791 - DNA, 33 bp, Homo sapien
tatagcacacgttgaccctaatgcttccaacag

SEQ ID NO: 1048792 - DNA, 33 bp, Homo sapien
tatagcacacgttgactctaatgcttccaacag

SEQ ID NO: 1048793 - DNA, 33 bp, Homo sapien; identical to SEQ ID NO: 1048791

SEQ ID NO: 1048794 - DNA, 33 bp, Homo sapien; identical to SEQ ID NO: 1048792

SEQ ID NO: 1048795 - DNA, 33 bp, Homo sapien
aacaaagtcccacagaactggtggctcaaacaa

SEQ ID NO: 1048796 - DNA, 33 bp, Homo sapien
aacaaagtcccacagagctggtggctcaaacaa

SEQ ID NO: 1048797 - DNA, 33 bp, Homo sapien
caatgttactcaaatacgttcaaagccacatgg

SEQ ID NO: 1048798 - DNA, 33 bp, Homo sapien
caatgttactcaaatatgttcaaagccacatgg

SEQ ID NO: 1048799 - DNA, 33 bp, Homo sapien
acgatggtaaggatgacgttatgagattcctga

SEQ ID NO: 1048800 - DNA, 33 bp, Homo sapien
acgatggtaaggatgatgttatgagattcctga

SEQ ID NO: 1048801 - DNA, 33 bp, Homo sapien
aaccacatctgcatcacataatgtgtcaccaaa

SEQ ID NO: 1048802 - DNA, 33 bp, Homo sapien
aaccacatctgcatcatataatgtgtcaccaaa

SEQ ID NO: 1048803 - DNA, 33 bp, Homo sapien
catggattcaaatacacgggacattctctaaca

SEQ ID NO: 1048804 - DNA, 33 bp, Homo sapien
catggattcaaatacaggggacattctctaaca

SEQ ID NO: 1048805 - DNA, 33 bp, Homo sapien
gaccctgactctaaaagtataatgatgataaca

SEQ ID NO: 1048806 - DNA, 33 bp, Homo sapien
gaccctgactctaaaattataatgatgataaca

SEQ ID NO: 1048807 - DNA, 33 bp, Homo sapien
ttagaggtgattatcaatatagtctatcagttt

SEQ ID NO: 1048808 - DNA, 33 bp, Homo sapien
ttagaggtgattatcagtatagtctatcagttt

SEQ ID NO: 1048809 - DNA, 33 bp, Homo sapien; identical to SEQ ID NO: 1048807

SEQ ID NO: 1048810 - DNA, 33 bp, Homo sapien; identical to SEQ ID NO: 1048808

SEQ ID NO: 1048811 - DNA, 33 bp, Homo sapien
aacctaaagtggaagacaattcggccattaaag

SEQ ID NO: 1048812 - DNA, 33 bp, Homo sapien
aacctaaagtggaagagaattcggccattaaag

SEQ ID NO: 1048813 - DNA, 33 bp, Homo sapien
tgtccgacttgctatgccaaatggggtaagcat

SEQ ID NO: 1048814 - DNA, 33 bp, Homo sapien
tgtccgacttgctatgtcaaatggggtaagcat

SEQ ID NO: 1048815 - DNA, 33 bp, Homo sapien
tggtcataacaacagaaaccttatggattttac

SEQ ID NO: 1048816 - DNA, 33 bp, Homo sapien
tggtcataacaacagagaccttatggattttac

SEQ ID NO: 1048817 - DNA, 33 bp, Homo sapien
aacgcgtatcctgaaactctgataaaacaatgt

SEQ ID NO: 1048818 - DNA, 33 bp, Homo sapien
aacgcgtatcctgaaagtctgataaaacaatgt

SEQ ID NO: 1048819 - DNA, 33 bp, Homo sapien
gctgtggcgttttaccaactgaggagggtctcc

SEQ ID NO: 1048820 - DNA, 33 bp, Homo sapien
gctgtggcgttttaccgactgaggagggtctcc

SEQ ID NO: 1048821 - DNA, 33 bp, Homo sapien
cttcacatatttgtcacgtctttatggtgagaa

SEQ ID NO: 1048822 - DNA, 33 bp, Homo sapien
cttcacatatttgtcatgtctttatggtgagaa

SEQ ID NO: 1048823 - DNA, 33 bp, Homo sapien
ttcatcaatgactaaaacaaggctctattaacc

SEQ ID NO: 1048824 - DNA, 33 bp, Homo sapien
ttcatcaatgactaaagcaaggctctattaacc

SEQ ID NO: 1048825 - DNA, 33 bp, Homo sapien
aatccatcatttctgcacatctctctgaaagat

SEQ ID NO: 1048826 - DNA, 33 bp, Homo sapien
aatccatcatttctgcgcatctctctgaaagat

SEQ ID NO: 1048827 - DNA, 33 bp, Homo sapien
gtggttgtgataatcaaataagtaatatatgga

SEQ ID NO: 1048828 - DNA, 33 bp, Homo sapien
gtggttgtgataatcagataagtaatatatgga

SEQ ID NO: 1048829 - DNA, 33 bp, Homo sapien
tttagccagtcattgaaacagaaggcttccaag

SEQ ID NO: 1048830 - DNA, 33 bp, Homo sapien
tttagccagtcattgagacagaaggcttccaag

SEQ ID NO: 1048831 - DNA, 33 bp, Homo sapien
tgggtgacatatataacgaacaaaggcagtttt

SEQ ID NO: 1048832 - DNA, 33 bp, Homo sapien
tgggtgacatatataatgaacaaaggcagtttt

SEQ ID NO: 1048833 - DNA, 33 bp, Homo sapien
aatattccctgttataccactttctcctacatt

SEQ ID NO: 1048834 - DNA, 33 bp, Homo sapien
aatattccctgttatatcactttctcctacatt

SEQ ID NO: 1048835 - DNA, 33 bp, Homo sapien
atcaccatcatagaaaagtcaaaggccataaat

SEQ ID NO: 1048836 - DNA, 33 bp, Homo sapien
atcaccatcatagaaaggtcaaaggccataaat

SEQ ID NO: 1048837 - DNA, 33 bp, Homo sapien
gatagaaaatgatacacctgagagttatacaca

SEQ ID NO: 1048838 - DNA, 33 bp, Homo sapien
gatagaaaatgatacatctgagagttatacaca

SEQ ID NO: 1048839 - DNA, 33 bp, Homo sapien
gcagtaataaggatcacgtggactgttataatt

SEQ ID NO: 1048840 - DNA, 33 bp, Homo sapien
gcagtaataaggatcatgtggactgttataatt

SEQ ID NO: 1048841 - DNA, 33 bp, Homo sapien
gacaaatgtcttcaaccaggcattgtgagtagt

SEQ ID NO: 1048842 - DNA, 33 bp, Homo sapien
gacaaatgtcttcaactaggcattgtgagtagt

SEQ ID NO: 1048843 - DNA, 33 bp, Homo sapien
accattgctcttcaaaatactggagaaatgaca

SEQ ID NO: 1048844 - DNA, 33 bp, Homo sapien
accattgctcttcaaagtactggagaaatgaca

SEQ ID NO: 1048845 - DNA, 33 bp, Homo sapien
gaaatgacagcaataaatatgaaaataaccaac

SEQ ID NO: 1048846 - DNA, 33 bp, Homo sapien
gaaatgacagcaataagtatgaaaataaccaac

SEQ ID NO: 1048847 - DNA, 33 bp, Homo sapien
gtgcctccccccatgaagacattagaaccttgg

SEQ ID NO: 1048848 - DNA, 33 bp, Homo sapien
gtgcctccccccatgaggacattagaaccttgg

SEQ ID NO: 1048849 - DNA, 33 bp, Homo sapien
aagtggcatctttagcactggaactcatttgtt

SEQ ID NO: 1048850 - DNA, 33 bp, Homo sapien
aagtggcatctttagcgctggaactcatttgtt

SEQ ID NO: 1048851 - DNA, 33 bp, Homo sapien
acaccagactctgaccgacaaatcagaatctct

SEQ ID NO: 1048852 - DNA, 33 bp, Homo sapien
acaccagactctgacctacaaatcagaatctct

SEQ ID NO: 1048853 - DNA, 33 bp, Homo sapien
caggagacacggagagaagtaggccacacggag

SEQ ID NO: 1048854 - DNA, 33 bp, Homo sapien
caggagacacggagaggagtaggccacacggag

SEQ ID NO: 1048855 - DNA, 33 bp, Homo sapien
gcaggatggagacggaatacggcccttcggtca

SEQ ID NO: 1048856 - DNA, 33 bp, Homo sapien
gcaggatggagacggagtacggcccttcggtca

SEQ ID NO: 1048857 - DNA, 33 bp, Homo sapien
ccttaaatgttactacggctgaggtcaagtaac

SEQ ID NO: 1048858 - DNA, 33 bp, Homo sapien
ccttaaatgttactactgctgaggtcaagtaac

SEQ ID NO: 1048859 - DNA, 33 bp, Homo sapien; identical to SEQ ID NO: 1048857

SEQ ID NO: 1048860 - DNA, 33 bp, Homo sapien; identical to SEQ ID NO: 1048858

SEQ ID NO: 1048861 - DNA, 33 bp, Homo sapien
tgttgttgttggttcacgccactgttttgacaa

SEQ ID NO: 1048862 - DNA, 33 bp, Homo sapien
tgttgttgttggttcatgccactgttttgacaa

SEQ ID NO: 1048863 - DNA, 33 bp, Homo sapien
ggttatataattcccacgtagttgtatcaccca

SEQ ID NO: 1048864 - DNA, 33 bp, Homo sapien
ggttatataattcccatgtagttgtatcaccca

SEQ ID NO: 1048865 - DNA, 33 bp, Homo sapien
ctattgaatgaacaagcatggccaggtctatgt

SEQ ID NO: 1048866 - DNA, 33 bp, Homo sapien
ctattgaatgaacaaggatggccaggtctatgt

SEQ ID NO: 1048867 - DNA, 33 bp, Homo sapien
tcttgctgacttcctcactgcttaagaagatat

SEQ ID NO: 1048868 - DNA, 33 bp, Homo sapien
tcttgctgacttcctcgctgcttaagaagatat

SEQ ID NO: 1048869 - DNA, 33 bp, Homo sapien
agatggatagtacaacaactcttacatccttaa

SEQ ID NO: 1048870 - DNA, 33 bp, Homo sapien
agatggatagtacaacgactcttacatccttaa

SEQ ID NO: 1048871 - DNA, 33 bp, Homo sapien
caattggcagtagacaacaactcttctactgag

SEQ ID NO: 1048872 - DNA, 33 bp, Homo sapien
caattggcagtagacatcaactcttctactgag

SEQ ID NO: 1048873 - DNA, 33 bp, Homo sapien
acaactctttgaaaaacgtgtatagaaaacttc

SEQ ID NO: 1048874 - DNA, 33 bp, Homo sapien
acaactctttgaaaaatgtgtatagaaaacttc

SEQ ID NO: 1048875 - DNA, 33 bp, Homo sapien
atttctcgctgttttaagtcaaaccaatgtata

SEQ ID NO: 1048876 - DNA, 33 bp, Homo sapien
atttctcgctgttttaggtcaaaccaatgtata

SEQ ID NO: 1048877 - DNA, 33 bp, Homo sapien
caatcagaattcaaaaacatgaatgtacactca

SEQ ID NO: 1048878 - DNA, 33 bp, Homo sapien
caatcagaattcaaaagcatgaatgtacactca

SEQ ID NO: 1048879 - DNA, 33 bp, Homo sapien
atatgtagggattgaacctgattgattgagttt

SEQ ID NO: 1048880 - DNA, 33 bp, Homo sapien
atatgtagggattgaatctgattgattgagttt

SEQ ID NO: 1048881 - DNA, 33 bp, Homo sapien
gtctgtatggaagagaaaactggtaattcatac

SEQ ID NO: 1048882 - DNA, 33 bp, Homo sapien
gtctgtatggaagagagaactggtaattcatac

SEQ ID NO: 1048883 - DNA, 33 bp, Homo sapien
aatggaagcgggaagacctcctaaaagttgtgt

SEQ ID NO: 1048884 - DNA, 33 bp, Homo sapien
aatggaagcgggaagagctcctaaaagttgtgt

SEQ ID NO: 1048885 - DNA, 33 bp, Homo sapien
ccttgaaagcctggaacagagataattaatacg

SEQ ID NO: 1048886 - DNA, 33 bp, Homo sapien
ccttgaaagcctggaagagagataattaatacg

SEQ ID NO: 1048887 - DNA, 33 bp, Homo sapien
atggcaagcagttaaaaggatgaaggcacacct

SEQ ID NO: 1048888 - DNA, 33 bp, Homo sapien
atggcaagcagttaaagggatgaaggcacacct

SEQ ID NO: 1048889 - DNA, 33 bp, Homo sapien; identical to SEQ ID NO: 1048887

SEQ ID NO: 1048890 - DNA, 33 bp, Homo sapien; identical to SEQ ID NO: 1048888

SEQ ID NO: 1048891 - DNA, 33 bp, Homo sapien
cttccagatattactaacgtgcggagtaaaata

SEQ ID NO: 1048892 - DNA, 33 bp, Homo sapien
cttccagatattactagcgtgcggagtaaaata

SEQ ID NO: 1048893 - DNA, 33 bp, Homo sapien
agaaaaacaagaaaaaagcgttccaagattaag

SEQ ID NO: 1048894 - DNA, 33 bp, Homo sapien
agaaaaacaagaaaaatgcgttccaagattaag

SEQ ID NO: 1048895 - DNA, 33 bp, Homo sapien; identical to SEQ ID NO: 1048893

SEQ ID NO: 1048896 - DNA, 33 bp, Homo sapien; identical to SEQ ID NO: 1048894

SEQ ID NO: 1048897 - DNA, 33 bp, Homo sapien
tcaattgtattcttacaactggataattgagct

SEQ ID NO: 1048898 - DNA, 33 bp, Homo sapien
tcaattgtattcttaccactggataattgagct

SEQ ID NO: 1048899 - DNA, 33 bp, Homo sapien
ctcactgttttacagtaacggctgttgttttac

SEQ ID NO: 1048900 - DNA, 33 bp, Homo sapien
ctcactgttttacagtgacggctgttgttttac

SEQ ID NO: 1048901 - DNA, 33 bp, Homo sapien
tccgggttggggtagaagtacatttgccagccc

SEQ ID NO: 1048902 - DNA, 33 bp, Homo sapien
tccgggttggggtagaggtacatttgccagccc

SEQ ID NO: 1048903 - DNA, 33 bp, Homo sapien
ttgtggtttccaaccaagacattgaaataaaag

SEQ ID NO: 1048904 - DNA, 33 bp, Homo sapien
ttgtggtttccaaccatgacattgaaataaaag

SEQ ID NO: 1048905 - DNA, 33 bp, Homo sapien
ggctttcagaattcaccaagactctgggtcctt

SEQ ID NO: 1048906 - DNA, 33 bp, Homo sapien
ggctttcagaattcactaagactctgggtcctt

SEQ ID NO: 1048907 - DNA, 33 bp, Homo sapien
ttcctcttctcaaaacacttacacactgttggt

SEQ ID NO: 1048908 - DNA, 33 bp, Homo sapien
ttcctcttctcaaaacgcttacacactgttggt

SEQ ID NO: 1048909 - DNA, 33 bp, Homo sapien
atgagaaggcaggaccaacaagccaagtgattt

SEQ ID NO: 1048910 - DNA, 33 bp, Homo sapien
atgagaaggcaggaccgacaagccaagtgattt

SEQ ID NO: 1048911 - DNA, 33 bp, Homo sapien
tgtctacataaagcagccagggtcaatcaggtg

SEQ ID NO: 1048912 - DNA, 33 bp, Homo sapien
tgtctacataaagcaggcagggtcaatcaggtg

SEQ ID NO: 1048913 - DNA, 33 bp, Homo sapien
tggattgggtgtcaaaagttactgaactcactt

SEQ ID NO: 1048914 - DNA, 33 bp, Homo sapien
tggattgggtgtcaaaggttactgaactcactt

SEQ ID NO: 1048915 - DNA, 33 bp, Homo sapien
attggcttctctccaaatattccgtgaggagaa

SEQ ID NO: 1048916 - DNA, 33 bp, Homo sapien
attggcttctctccaagtattccgtgaggagaa

SEQ ID NO: 1048917 - DNA, 33 bp, Homo sapien
ctcttagatggctccaataatgctcatgtcctg

SEQ ID NO: 1048918 - DNA, 33 bp, Homo sapien
ctcttagatggctccagtaatgctcatgtcctg

SEQ ID NO: 1048919 - DNA, 33 bp, Homo sapien
atccttaggcacaggaagttgggaatttcatat

SEQ ID NO: 1048920 - DNA, 33 bp, Homo sapien
atccttaggcacaggaggttgggaatttcatat

SEQ ID NO: 1048921 - DNA, 33 bp, Homo sapien; identical to SEQ ID NO: 1048919

SEQ ID NO: 1048922 - DNA, 33 bp, Homo sapien; identical to SEQ ID NO: 1048920

SEQ ID NO: 1048923 - DNA, 33 bp, Homo sapien
gactgcttaacaggtacagctttggggtgatca

SEQ ID NO: 1048924 - DNA, 33 bp, Homo sapien
gactgcttaacaggtatagctttggggtgatca

SEQ ID NO: 1048925 - DNA, 33 bp, Homo sapien; identical to SEQ ID NO: 1048923

SEQ ID NO: 1048926 - DNA, 33 bp, Homo sapien; identical to SEQ ID NO: 1048924

SEQ ID NO: 1048927 - DNA, 33 bp, Homo sapien
agggcttgatctggtcaaaagtggacggatttg

SEQ ID NO: 1048928 - DNA, 33 bp, Homo sapien
agggcttgatctggtcgaaagtggacggatttg

SEQ ID NO: 1048929 - DNA, 33 bp, Homo sapien
tgggattgttgaccagaataacattttattaga

SEQ ID NO: 1048930 - DNA, 33 bp, Homo sapien
tgggattgttgaccaggataacattttattaga

SEQ ID NO: 1048931 - DNA, 33 bp, Homo sapien; identical to SEQ ID NO: 1048929

SEQ ID NO: 1048932 - DNA, 33 bp, Homo sapien; identical to SEQ ID NO: 1048930

SEQ ID NO: 1048933 - DNA, 33 bp, Homo sapien
tctcactcaccacttggagaaaatctacccaag

SEQ ID NO: 1048934 - DNA, 33 bp, Homo sapien
tctcactcaccacttgtagaaaatctacccaag

SEQ ID NO: 1048935 - DNA, 33 bp, Homo sapien
gaaaaaaggcagcacaagattttattggcttaa

SEQ ID NO: 1048936 - DNA, 33 bp, Homo sapien
gaaaaaaggcagcacaggattttattggcttaa

SEQ ID NO: 1048937 - DNA, 33 bp, Homo sapien
agaaaaaggcaagatgaaaatggtggttcatgt

SEQ ID NO: 1048938 - DNA, 33 bp, Homo sapien
agaaaaaggcaagatgcaaatggtggttcatgt

SEQ ID NO: 1048939 - DNA, 33 bp, Homo sapien
acaaaacacttgaaaccgcacctcgagatcacc

SEQ ID NO: 1048940 - DNA, 33 bp, Homo sapien
acaaaacacttgaaacggcacctcgagatcacc

SEQ ID NO: 1048941 - DNA, 33 bp, Homo sapien
ccttgcaatgaagtgacgccatgaggcatgatc

SEQ ID NO: 1048942 - DNA, 33 bp, Homo sapien
ccttgcaatgaagtgatgccatgaggcatgatc

SEQ ID NO: 1048943 - DNA, 33 bp, Homo sapien
cttagagattggtcaaggaagatttgtgagcca

SEQ ID NO: 1048944 - DNA, 33 bp, Homo sapien
cttagagattggtcaatgaagatttgtgagcca

SEQ ID NO: 1048945 - DNA, 33 bp, Homo sapien
acacagaggaacaataacatgaggaaaagggaa

SEQ ID NO: 1048946 - DNA, 33 bp, Homo sapien
acacagaggaacaatagcatgaggaaaagggaa

SEQ ID NO: 1048947 - DNA, 33 bp, Homo sapien
accaagacatagacaggcatcttcactcgattt

SEQ ID NO: 1048948 - DNA, 33 bp, Homo sapien
accaagacatagacagtcatcttcactcgattt

SEQ ID NO: 1048949 - DNA, 33 bp, Homo sapien
agtggatgtgtctcagcaaatcttttagaagaa

SEQ ID NO: 1048950 - DNA, 33 bp, Homo sapien
agtggatgtgtctcagtaaatcttttagaagaa

SEQ ID NO: 1048951 - DNA, 33 bp, Homo sapien; identical to SEQ ID NO: 1048949

SEQ ID NO: 1048952 - DNA, 33 bp, Homo sapien; identical to SEQ ID NO: 1048950

SEQ ID NO: 1048953 - DNA, 33 bp, Homo sapien
catggcctctgtaaacagttagagcgctcacga

SEQ ID NO: 1048954 - DNA, 33 bp, Homo sapien
catggcctctgtaaactgttagagcgctcacga

SEQ ID NO: 1048955 - DNA, 33 bp, Homo sapien
gcaattctgggtcctaacatttacacctgcatc

SEQ ID NO: 1048956 - DNA, 33 bp, Homo sapien
gcaattctgggtcctagcatttacacctgcatc

SEQ ID NO: 1048957 - DNA, 33 bp, Homo sapien; identical to SEQ ID NO: 1048955

SEQ ID NO: 1048958 - DNA, 33 bp, Homo sapien; identical to SEQ ID NO: 1048956

SEQ ID NO: 1048959 - DNA, 33 bp, Homo sapien
gacatttataactagacatgaaagcatgaatct

SEQ ID NO: 1048960 - DNA, 33 bp, Homo sapien
gacatttataactagatatgaaagcatgaatct

SEQ ID NO: 1048961 - DNA, 33 bp, Homo sapien
accaccccctactccaaaaatcagagaagacac

SEQ ID NO: 1048962 - DNA, 33 bp, Homo sapien
accaccccctactccacaaatcagagaagacac

SEQ ID NO: 1048963 - DNA, 33 bp, Homo sapien
aatgtgggtgttagacagcagacacgcacatcg

SEQ ID NO: 1048964 - DNA, 33 bp, Homo sapien
aatgtgggtgttagacggcagacacgcacatcg

SEQ ID NO: 1048965 - DNA, 33 bp, Homo sapien
taatttaagcaggagaaaaaggataaaactctg

SEQ ID NO: 1048966 - DNA, 33 bp, Homo sapien
taatttaagcaggagagaaaggataaaactctg

SEQ ID NO: 1048967 - DNA, 33 bp, Homo sapien
tcaccccctccaagtccacattgtttttcggat

SEQ ID NO: 1048968 - DNA, 33 bp, Homo sapien
tcaccccctccaagtctacattgtttttcggat

SEQ ID NO: 1048969 - DNA, 33 bp, Homo sapien
tgtgggcacctatataacacttcatcccaaccc

SEQ ID NO: 1048970 - DNA, 33 bp, Homo sapien
tgtgggcacctatatagcacttcatcccaaccc

SEQ ID NO: 1048971 - DNA, 33 bp, Homo sapien
atctcattgactattacatttcttcatttacat

SEQ ID NO: 1048972 - DNA, 33 bp, Homo sapien
atctcattgactattagatttcttcatttacat

SEQ ID NO: 1048973 - DNA, 33 bp, Homo sapien
tttctgtctctgttcaagtctctctgcatttct

SEQ ID NO: 1048974 - DNA, 33 bp, Homo sapien
tttctgtctctgttcatgtctctctgcatttct

SEQ ID NO: 1048975 - DNA, 33 bp, Homo sapien
gcaagattactttggagagaattgttatattag

SEQ ID NO: 1048976 - DNA, 33 bp, Homo sapien
gcaagattactttggatagaattgttatattag

SEQ ID NO: 1048977 - DNA, 33 bp, Homo sapien
ttaacattaggcaaagcaagataagattgtttc

SEQ ID NO: 1048978 - DNA, 33 bp, Homo sapien
ttaacattaggcaaaggaagataagattgtttc

SEQ ID NO: 1048979 - DNA, 33 bp, Homo sapien
tttgtgctaagccttacgtcacgggggatataa

SEQ ID NO: 1048980 - DNA, 33 bp, Homo sapien
tttgtgctaagccttatgtcacgggggatataa

SEQ ID NO: 1048981 - DNA, 33 bp, Homo sapien
gcaaacacatccttcacgtggcgacggccagga

SEQ ID NO: 1048982 - DNA, 33 bp, Homo sapien
gcaaacacatccttcatgtggcgacggccagga

SEQ ID NO: 1048983 - DNA, 33 bp, Homo sapien
gtctcctctgtgcaaaactgactcttgactttt

SEQ ID NO: 1048984 - DNA, 33 bp, Homo sapien
gtctcctctgtgcaaagctgactcttgactttt

SEQ ID NO: 1048985 - DNA, 33 bp, Homo sapien
ctgtgtggggcacaatcacataagcaagaggga

SEQ ID NO: 1048986 - DNA, 33 bp, Homo sapien
ctgtgtggggcacaattacataagcaagaggga

SEQ ID NO: 1048987 - DNA, 33 bp, Homo sapien
aactctttcttgcacaaaatccaagaatcctct

SEQ ID NO: 1048988 - DNA, 33 bp, Homo sapien
aactctttcttgcacagaatccaagaatcctct

SEQ ID NO: 1048989 - DNA, 33 bp, Homo sapien
ctgtagatgctgcataaatttgcgtgaataaat

SEQ ID NO: 1048990 - DNA, 33 bp, Homo sapien
ctgtagatgctgcatacatttgcgtgaataaat

SEQ ID NO: 1048991 - DNA, 33 bp, Homo sapien
aaaacaatctgtcaaacggagacttcaagaagc

SEQ ID NO: 1048992 - DNA, 33 bp, Homo sapien
aaaacaatctgtcaaatggagacttcaagaagc

SEQ ID NO: 1048993 - DNA, 33 bp, Homo sapien
catctcatgaaggagactctcaaacaaaacaca

SEQ ID NO: 1048994 - DNA, 33 bp, Homo sapien
catctcatgaaggagattctcaaacaaaacaca

SEQ ID NO: 1048995 - DNA, 33 bp, Homo sapien
cagggaaccaaaggagactaaacgctcataaac

SEQ ID NO: 1048996 - DNA, 33 bp, Homo sapien
cagggaaccaaaggagtctaaacgctcataaac

SEQ ID NO: 1048997 - DNA, 33 bp, Homo sapien
catatgagtggataaactcaatcatgcatgaat

SEQ ID NO: 1048998 - DNA, 33 bp, Homo sapien
catatgagtggataaagtcaatcatgcatgaat

SEQ ID NO: 1048999 - DNA, 33 bp, Homo sapien
tgagggatttaaagaactctaaagcaggataag

SEQ ID NO: 1049000 - DNA, 33 bp, Homo sapien
tgagggatttaaagaattctaaagcaggataag

SEQ ID NO: 1049001 - DNA, 33 bp, Homo sapien
ttcttttggaatccccagagtctagtgttccca

SEQ ID NO: 1049002 - DNA, 33 bp, Homo sapien
ttcttttggaatccccggagtctagtgttccca

SEQ ID NO: 1049003 - DNA, 33 bp, Homo sapien
ggtggacagcatgacaaaatttattattttatt

SEQ ID NO: 1049004 - DNA, 33 bp, Homo sapien
ggtggacagcatgacacaatttattattttatt

SEQ ID NO: 1049005 - DNA, 33 bp, Homo sapien
aactatccttggcttccaggtcaacttgaaatc

SEQ ID NO: 1049006 - DNA, 33 bp, Homo sapien
aactatccttggcttcgaggtcaacttgaaatc

SEQ ID NO: 1049007 - DNA, 33 bp, Homo sapien
acaccctctgcttaggacattccaaaattccag

SEQ ID NO: 1049008 - DNA, 33 bp, Homo sapien
acaccctctgcttagggcattccaaaattccag

SEQ ID NO: 1049009 - DNA, 33 bp, Homo sapien
aaggaggttaagtgacaccatagggtaggatcc

SEQ ID NO: 1049010 - DNA, 33 bp, Homo sapien
aaggaggttaagtgacgccatagggtaggatcc

SEQ ID NO: 1049011 - DNA, 33 bp, Homo sapien
acacagaaagccacaacgagtattgccagggac

SEQ ID NO: 1049012 - DNA, 33 bp, Homo sapien
acacagaaagccacaaggagtattgccagggac

SEQ ID NO: 1049013 - DNA, 33 bp, Homo sapien
cctacttaatgccaacagctagatttgttacgg

SEQ ID NO: 1049014 - DNA, 33 bp, Homo sapien
cctacttaatgccaactgctagatttgttacgg

SEQ ID NO: 1049015 - DNA, 33 bp, Homo sapien
tgctggcttgtaacacgcttttcctcatttaat

SEQ ID NO: 1049016 - DNA, 33 bp, Homo sapien
tgctggcttgtaacactcttttcctcatttaat

SEQ ID NO: 1049017 - DNA, 33 bp, Homo sapien
caccactgacaaaaaacggcaataaatatgaaa

SEQ ID NO: 1049018 - DNA, 33 bp, Homo sapien
caccactgacaaaaaatggcaataaatatgaaa

SEQ ID NO: 1049019 - DNA, 33 bp, Homo sapien
atttttctttccatgtaaaatattcttgtgcta

SEQ ID NO: 1049020 - DNA, 33 bp, Homo sapien
atttttctttccatgtgaaatattcttgtgcta

SEQ ID NO: 1049021 - DNA, 33 bp, Homo sapien
tttaaaattttatccaaatcaacagttacaaca

SEQ ID NO: 1049022 - DNA, 33 bp, Homo sapien
tttaaaattttatccagatcaacagttacaaca

SEQ ID NO: 1049023 - DNA, 33 bp, Homo sapien
aactcaatattttgtgaagcactagctgacaat

SEQ ID NO: 1049024 - DNA, 33 bp, Homo sapien
aactcaatattttgtggagcactagctgacaat

SEQ ID NO: 1049025 - DNA, 33 bp, Homo sapien
tcatgggatgttagacccaatgttagcacttct

SEQ ID NO: 1049026 - DNA, 33 bp, Homo sapien
tcatgggatgttagactcaatgttagcacttct

SEQ ID NO: 1049027 - DNA, 33 bp, Homo sapien
aggctataaatatgcaatacttgttcatggcct

SEQ ID NO: 1049028 - DNA, 33 bp, Homo sapien
aggctataaatatgcagtacttgttcatggcct

SEQ ID NO: 1049029 - DNA, 33 bp, Homo sapien
agaccgctggttcacaggtttacttatcaaagt

SEQ ID NO: 1049030 - DNA, 33 bp, Homo sapien
agaccgctggttcacatgtttacttatcaaagt

SEQ ID NO: 1049031 - DNA, 33 bp, Homo sapien
attctctactggtttaaagttactatgataagc

SEQ ID NO: 1049032 - DNA, 33 bp, Homo sapien
attctctactggtttagagttactatgataagc

SEQ ID NO: 1049033 - DNA, 33 bp, Homo sapien
ctcctacagggttaccaaagcaaaatgaaaatc

SEQ ID NO: 1049034 - DNA, 33 bp, Homo sapien
ctcctacagggttacccaagcaaaatgaaaatc

SEQ ID NO: 1049035 - DNA, 33 bp, Homo sapien
cccacaatgctagaagaaggccaagattctcct

SEQ ID NO: 1049036 - DNA, 33 bp, Homo sapien
cccacaatgctagaagtaggccaagattctcct

SEQ ID NO: 1049037 - DNA, 33 bp, Homo sapien
agggagttgcttgcaaatggaaatctaatatgc

SEQ ID NO: 1049038 - DNA, 33 bp, Homo sapien
agggagttgcttgcaagtggaaatctaatatgc

SEQ ID NO: 1049039 - DNA, 33 bp, Homo sapien
tttacgtggtcatgaaaagttgcaacttttgcg

SEQ ID NO: 1049040 - DNA, 33 bp, Homo sapien
tttacgtggtcatgaagagttgcaacttttgcg

SEQ ID NO: 1049041 - DNA, 33 bp, Homo sapien
tacaattgcgtacaaaatttacaatactaccta

SEQ ID NO: 1049042 - DNA, 33 bp, Homo sapien
tacaattgcgtacaaactttacaatactaccta

SEQ ID NO: 1049043 - DNA, 33 bp, Homo sapien
tattttcggagtctaacttaatcataattgatt

SEQ ID NO: 1049044 - DNA, 33 bp, Homo sapien
tattttcggagtctaatttaatcataattgatt

SEQ ID NO: 1049045 - DNA, 33 bp, Homo sapien
accaacattcttaataagccatgttcaggataa

SEQ ID NO: 1049046 - DNA, 33 bp, Homo sapien
accaacattcttaatatgccatgttcaggataa

SEQ ID NO: 1049047 - DNA, 33 bp, Homo sapien
tgtgttgattttatcacgcaagccttgaatatc

SEQ ID NO: 1049048 - DNA, 33 bp, Homo sapien
tgtgttgattttatcatgcaagccttgaatatc

SEQ ID NO: 1049049 - DNA, 33 bp, Homo sapien
acaggctacaaagaaacgtaccaggcaacaaag

SEQ ID NO: 1049050 - DNA, 33 bp, Homo sapien
acaggctacaaagaaatgtaccaggcaacaaag

SEQ ID NO: 1049051 - DNA, 33 bp, Homo sapien
tagacagaaagtaacaacaggcaagatgcagag

SEQ ID NO: 1049052 - DNA, 33 bp, Homo sapien
tagacagaaagtaacaccaggcaagatgcagag

SEQ ID NO: 1049053 - DNA, 33 bp, Homo sapien
agtgtgattgttcctaaatagacagaaagtaac

SEQ ID NO: 1049054 - DNA, 33 bp, Homo sapien
agtgtgattgttcctagatagacagaaagtaac

SEQ ID NO: 1049055 - DNA, 33 bp, Homo sapien
aagcaaaaatggatacacaaaccagatgtagat

SEQ ID NO: 1049056 - DNA, 33 bp, Homo sapien
aagcaaaaatggatacgcaaaccagatgtagat

SEQ ID NO: 1049057 - DNA, 33 bp, Homo sapien
tgaattatgctgtgataaaaatacgactgcagg

SEQ ID NO: 1049058 - DNA, 33 bp, Homo sapien
tgaattatgctgtgatgaaaatacgactgcagg

SEQ ID NO: 1049059 - DNA, 33 bp, Homo sapien
tggcagagacacaataaaagaagaaaatttcag

SEQ ID NO: 1049060 - DNA, 33 bp, Homo sapien
tggcagagacacaatagaagaagaaaatttcag

SEQ ID NO: 1049061 - DNA, 33 bp, Homo sapien
agatgaaccaatgtcccgctaagtgttgttcaa

SEQ ID NO: 1049062 - DNA, 33 bp, Homo sapien
agatgaaccaatgtcctgctaagtgttgttcaa

SEQ ID NO: 1049063 - DNA, 33 bp, Homo sapien
tcgactttaataataaactggtctgcatatgtg

SEQ ID NO: 1049064 - DNA, 33 bp, Homo sapien
tcgactttaataataacctggtctgcatatgtg

SEQ ID NO: 1049065 - DNA, 33 bp, Homo sapien
tgtgttatttcacttacgagaatggctttcagt

SEQ ID NO: 1049066 - DNA, 33 bp, Homo sapien
tgtgttatttcacttatgagaatggctttcagt

SEQ ID NO: 1049067 - DNA, 33 bp, Homo sapien
ccaatggaaaatggaaagtttaatgataaattc

SEQ ID NO: 1049068 - DNA, 33 bp, Homo sapien
ccaatggaaaatggaatgtttaatgataaattc

SEQ ID NO: 1049069 - DNA, 33 bp, Homo sapien
gctattatcaaaagggcatagattacagcttgc

SEQ ID NO: 1049070 - DNA, 33 bp, Homo sapien
gctattatcaaaagggtatagattacagcttgc

SEQ ID NO: 1049071 - DNA, 33 bp, Homo sapien
gccttgccaaggaaaaacgtctcaagattaaag

SEQ ID NO: 1049072 - DNA, 33 bp, Homo sapien
gccttgccaaggaaaatcgtctcaagattaaag

SEQ ID NO: 1049073 - DNA, 33 bp, Homo sapien
aagatcagcaacagtaacatttgtgtcacccaa

SEQ ID NO: 1049074 - DNA, 33 bp, Homo sapien
aagatcagcaacagtagcatttgtgtcacccaa

SEQ ID NO: 1049075 - DNA, 33 bp, Homo sapien
atccctagttgtctaaagagtaaaggagttacc

SEQ ID NO: 1049076 - DNA, 33 bp, Homo sapien
atccctagttgtctaatgagtaaaggagttacc

SEQ ID NO: 1049077 - DNA, 33 bp, Homo sapien
gggtttcttggaggcaacactactgattattga

SEQ ID NO: 1049078 - DNA, 33 bp, Homo sapien
gggtttcttggaggcagcactactgattattga

SEQ ID NO: 1049079 - DNA, 33 bp, Homo sapien; identical to SEQ ID NO: 1049077

SEQ ID NO: 1049080 - DNA, 33 bp, Homo sapien; identical to SEQ ID NO: 1049078

SEQ ID NO: 1049081 - DNA, 33 bp, Homo sapien
cctttccaccccattagacagtatctttcatca

SEQ ID NO: 1049082 - DNA, 33 bp, Homo sapien
cctttccaccccattatacagtatctttcatca

SEQ ID NO: 1049083 - DNA, 33 bp, Homo sapien
gtaccaatcactcacaatggaaaatctgattat

SEQ ID NO: 1049084 - DNA, 33 bp, Homo sapien
gtaccaatcactcacactggaaaatctgattat

SEQ ID NO: 1049085 - DNA, 33 bp, Homo sapien
attgtgaaatggattccacattgtaacgagatg

SEQ ID NO: 1049086 - DNA, 33 bp, Homo sapien
attgtgaaatggattctacattgtaacgagatg

SEQ ID NO: 1049087 - DNA, 33 bp, Homo sapien
ctcagatattcaatcaagggcatattagtctgt

SEQ ID NO: 1049088 - DNA, 33 bp, Homo sapien
ctcagatattcaatcaggggcatattagtctgt

SEQ ID NO: 1049089 - DNA, 33 bp, Homo sapien
agcatcttctatcataaagttgactccacctca

SEQ ID NO: 1049090 - DNA, 33 bp, Homo sapien
agcatcttctatcatacagttgactccacctca

SEQ ID NO: 1049091 - DNA, 33 bp, Homo sapien
agaagttcaccggtgacgtccaaacagaatacg

SEQ ID NO: 1049092 - DNA, 33 bp, Homo sapien
agaagttcaccggtgatgtccaaacagaatacg

SEQ ID NO: 1049093 - DNA, 33 bp, Homo sapien
aggccattgtctttgccgaactaatgcagtaac

SEQ ID NO: 1049094 - DNA, 33 bp, Homo sapien
aggccattgtctttgctgaactaatgcagtaac

SEQ ID NO: 1049095 - DNA, 33 bp, Homo sapien
gtttggtaaatattcacggagggcctaccataa

SEQ ID NO: 1049096 - DNA, 33 bp, Homo sapien
gtttggtaaatattcatggagggcctaccataa

SEQ ID NO: 1049097 - DNA, 33 bp, Homo sapien
atagagagtggaataacagaaactggtgaatcc

SEQ ID NO: 1049098 - DNA, 33 bp, Homo sapien
atagagagtggaataatagaaactggtgaatcc

SEQ ID NO: 1049099 - DNA, 33 bp, Homo sapien
tcccaagggcaggtcacgatattggatctgaac

SEQ ID NO: 1049100 - DNA, 33 bp, Homo sapien
tcccaagggcaggtcatgatattggatctgaac

SEQ ID NO: 1049101 - DNA, 33 bp, Homo sapien
agaatttgtagatacacgatggaatgtttccca

SEQ ID NO: 1049102 - DNA, 33 bp, Homo sapien
agaatttgtagatacaggatggaatgtttccca

SEQ ID NO: 1049103 - DNA, 33 bp, Homo sapien
cagttactaaaacagaagtagtgtttgtgaatc

SEQ ID NO: 1049104 - DNA, 33 bp, Homo sapien
cagttactaaaacagacgtagtgtttgtgaatc

SEQ ID NO: 1049105 - DNA, 33 bp, Homo sapien
tttcctgagacaagaccgcaaggaggagaattg

SEQ ID NO: 1049106 - DNA, 33 bp, Homo sapien
tttcctgagacaagactgcaaggaggagaattg

SEQ ID NO: 1049107 - DNA, 33 bp, Homo sapien
ctgggacattatgtagccctggattgaatgagc

SEQ ID NO: 1049108 - DNA, 33 bp, Homo sapien
ctgggacattatgtagtcctggattgaatgagc

SEQ ID NO: 1049109 - DNA, 33 bp, Homo sapien
aaggatcttctccacaaaactatatcgtttaga

SEQ ID NO: 1049110 - DNA, 33 bp, Homo sapien
aaggatcttctccacagaactatatcgtttaga

SEQ ID NO: 1049111 - DNA, 33 bp, Homo sapien
aagttgcctttaggaaaatgggtctgactcggc

SEQ ID NO: 1049112 - DNA, 33 bp, Homo sapien
aagttgcctttaggaagatgggtctgactcggc

SEQ ID NO: 1049113 - DNA, 33 bp, Homo sapien
tttatagatgtttggtaaataaaggttatcact

SEQ ID NO: 1049114 - DNA, 33 bp, Homo sapien
tttatagatgtttggtgaataaaggttatcact

SEQ ID NO: 1049115 - DNA, 33 bp, Homo sapien
agtgaaaactccatctaaaagttgtctgaagct

SEQ ID NO: 1049116 - DNA, 33 bp, Homo sapien
agtgaaaactccatctgaaagttgtctgaagct

SEQ ID NO: 1049117 - DNA, 33 bp, Homo sapien
atttactagtgaatgaacacattagcgttgtta

SEQ ID NO: 1049118 - DNA, 33 bp, Homo sapien
atttactagtgaatgaccacattagcgttgtta

SEQ ID NO: 1049119 - DNA, 33 bp, Homo sapien
ggtggagtctgtagaccggagttccaggtggag

SEQ ID NO: 1049120 - DNA, 33 bp, Homo sapien
ggtggagtctgtagactggagttccaggtggag

SEQ ID NO: 1049121 - DNA, 33 bp, Homo sapien
aaccatattttaacaaccactcatataagccac

SEQ ID NO: 1049122 - DNA, 33 bp, Homo sapien
aaccatattttaacaagcactcatataagccac

SEQ ID NO: 1049123 - DNA, 33 bp, Homo sapien
attatactccacggaaaaccaatttatacatcc

SEQ ID NO: 1049124 - DNA, 33 bp, Homo sapien
attatactccacggaagaccaatttatacatcc

SEQ ID NO: 1049125 - DNA, 33 bp, Homo sapien
tagttccaaatagttacaaggatgttttcaaca

SEQ ID NO: 1049126 - DNA, 33 bp, Homo sapien
tagttccaaatagttagaaggatgttttcaaca

SEQ ID NO: 1049127 - DNA, 33 bp, Homo sapien
atatttttgtggtgcaaagtggtgtttttcttt

SEQ ID NO: 1049128 - DNA, 33 bp, Homo sapien
atatttttgtggtgcatagtggtgtttttcttt

SEQ ID NO: 1049129 - DNA, 33 bp, Homo sapien
gagttgtccaaatcacaagtcatctcaacacaa

SEQ ID NO: 1049130 - DNA, 33 bp, Homo sapien
gagttgtccaaatcaccagtcatctcaacacaa

SEQ ID NO: 1049131 - DNA, 33 bp, Homo sapien
cctataagaatgtaaacacttgcatgcacgcgg

SEQ ID NO: 1049132 - DNA, 33 bp, Homo sapien
cctataagaatgtaaagacttgcatgcacgcgg

SEQ ID NO: 1049133 - DNA, 33 bp, Homo sapien
aacacacatacaaataagatgatgtttttgcat

SEQ ID NO: 1049134 - DNA, 33 bp, Homo sapien
aacacacatacaaataggatgatgtttttgcat

SEQ ID NO: 1049135 - DNA, 33 bp, Homo sapien
ttcctacctcagaaaacgttcgcacacaagaca

SEQ ID NO: 1049136 - DNA, 33 bp, Homo sapien
ttcctacctcagaaaatgttcgcacacaagaca

SEQ ID NO: 1049137 - DNA, 33 bp, Homo sapien
ttttgagctaaaatgaacataggtagtaagaaa

SEQ ID NO: 1049138 - DNA, 33 bp, Homo sapien
ttttgagctaaaatgagcataggtagtaagaaa

SEQ ID NO: 1049139 - DNA, 33 bp, Homo sapien
tgtcattacatccctgaaatcttatattaaata

SEQ ID NO: 1049140 - DNA, 33 bp, Homo sapien
tgtcattacatccctggaatcttatattaaata

SEQ ID NO: 1049141 - DNA, 33 bp, Homo sapien
tacttgcaaaaaaccaatgatgaaagaacaata

SEQ ID NO: 1049142 - DNA, 33 bp, Homo sapien
tacttgcaaaaaaccagtgatgaaagaacaata

SEQ ID NO: 1049143 - DNA, 33 bp, Homo sapien
ctcttgatgaccagccacttgcatcttcttctg

SEQ ID NO: 1049144 - DNA, 33 bp, Homo sapien
ctcttgatgaccagccgcttgcatcttcttctg

SEQ ID NO: 1049145 - DNA, 33 bp, Homo sapien
gaacctagcaaaagaacttatattcacaacttt

SEQ ID NO: 1049146 - DNA, 33 bp, Homo sapien
gaacctagcaaaagaagttatattcacaacttt

SEQ ID NO: 1049147 - DNA, 33 bp, Homo sapien
cttcatgaaacctctacgaagagactgtgctct

SEQ ID NO: 1049148 - DNA, 33 bp, Homo sapien
cttcatgaaacctctatgaagagactgtgctct

SEQ ID NO: 1049149 - DNA, 33 bp, Homo sapien
gggttctcactggataagttgtctctgtgcagt

SEQ ID NO: 1049150 - DNA, 33 bp, Homo sapien
gggttctcactggatacgttgtctctgtgcagt

SEQ ID NO: 1049151 - DNA, 33 bp, Homo sapien; identical to SEQ ID NO: 1049149

SEQ ID NO: 1049152 - DNA, 33 bp, Homo sapien; identical to SEQ ID NO: 1049150

SEQ ID NO: 1049153 - DNA, 33 bp, Homo sapien
caatttttagttcctacctataaacaagaacat

SEQ ID NO: 1049154 - DNA, 33 bp, Homo sapien
caatttttagttcctagctataaacaagaacat

SEQ ID NO: 1049155 - DNA, 33 bp, Homo sapien
ttgaaataaattactacggagcctacaccaggg

SEQ ID NO: 1049156 - DNA, 33 bp, Homo sapien
ttgaaataaattactatggagcctacaccaggg

SEQ ID NO: 1049157 - DNA, 33 bp, Homo sapien
tacatggaaattgtggccatcattcctttagct

SEQ ID NO: 1049158 - DNA, 33 bp, Homo sapien
tacatggaaattgtggtcatcattcctttagct

SEQ ID NO: 1049159 - DNA, 33 bp, Homo sapien
ccagtctctgaggaataaaagatgacttcacag

SEQ ID NO: 1049160 - DNA, 33 bp, Homo sapien
ccagtctctgaggaatgaaagatgacttcacag

SEQ ID NO: 1049161 - DNA, 33 bp, Homo sapien
cacattcagcagtaccagaggttgggacatcaa

SEQ ID NO: 1049162 - DNA, 33 bp, Homo sapien
cacattcagcagtaccggaggttgggacatcaa

SEQ ID NO: 1049163 - DNA, 33 bp, Homo sapien
tatcatcacattccccaccatgaccagggtcca

SEQ ID NO: 1049164 - DNA, 33 bp, Homo sapien
tatcatcacattccccgccatgaccagggtcca

SEQ ID NO: 1049165 - DNA, 33 bp, Homo sapien
catccacaccgtttcacctgcaaagggttctac

SEQ ID NO: 1049166 - DNA, 33 bp, Homo sapien
catccacaccgtttcatctgcaaagggttctac

SEQ ID NO: 1049167 - DNA, 33 bp, Homo sapien
ctaacaggtgaaagtacacacattggaaattct

SEQ ID NO: 1049168 - DNA, 33 bp, Homo sapien
ctaacaggtgaaagtagacacattggaaattct

SEQ ID NO: 1049169 - DNA, 33 bp, Homo sapien
tcattgctatcaccaacgggggtttgttgtttt

SEQ ID NO: 1049170 - DNA, 33 bp, Homo sapien
tcattgctatcaccaatgggggtttgttgtttt

SEQ ID NO: 1049171 - DNA, 33 bp, Homo sapien
ggaattaaagtccaggaagattacagcactttg

SEQ ID NO: 1049172 - DNA, 33 bp, Homo sapien
ggaattaaagtccagggagattacagcactttg

SEQ ID NO: 1049173 - DNA, 33 bp, Homo sapien
tacaaaggattgtaccagagacaagagttggtc

SEQ ID NO: 1049174 - DNA, 33 bp, Homo sapien
tacaaaggattgtaccggagacaagagttggtc

SEQ ID NO: 1049175 - DNA, 33 bp, Homo sapien
aatcgtccatcaaacaacgggtgttctgaacaa

SEQ ID NO: 1049176 - DNA, 33 bp, Homo sapien
aatcgtccatcaaacagcgggtgttctgaacaa

SEQ ID NO: 1049177 - DNA, 33 bp, Homo sapien
tcagtgtgcatgacccagatattatgatgcatc

SEQ ID NO: 1049178 - DNA, 33 bp, Homo sapien
tcagtgtgcatgacccggatattatgatgcatc

SEQ ID NO: 1049179 - DNA, 33 bp, Homo sapien
ttggtgctgtacagaacgtgggtttggaccaat

SEQ ID NO: 1049180 - DNA, 33 bp, Homo sapien
ttggtgctgtacagaatgtgggtttggaccaat

SEQ ID NO: 1049181 - DNA, 33 bp, Homo sapien
tgtctccatatcaaaagctccccaaactgtgct

SEQ ID NO: 1049182 - DNA, 33 bp, Homo sapien
tgtctccatatcaaaatctccccaaactgtgct

SEQ ID NO: 1049183 - DNA, 33 bp, Homo sapien; identical to SEQ ID NO: 1049181

SEQ ID NO: 1049184 - DNA, 33 bp, Homo sapien; identical to SEQ ID NO: 1049182

SEQ ID NO: 1049185 - DNA, 33 bp, Homo sapien
ttaaactgtggaattacgaaagtgtaatttgtt

SEQ ID NO: 1049186 - DNA, 33 bp, Homo sapien
ttaaactgtggaattatgaaagtgtaatttgtt

SEQ ID NO: 1049187 - DNA, 33 bp, Homo sapien
cgccaacctaatataaacgtacacacacttatg

SEQ ID NO: 1049188 - DNA, 33 bp, Homo sapien
cgccaacctaatataagcgtacacacacttatg

SEQ ID NO: 1049189 - DNA, 33 bp, Homo sapien
atttattgataagccaaagactgacccttatcc

SEQ ID NO: 1049190 - DNA, 33 bp, Homo sapien
atttattgataagccagagactgacccttatcc

SEQ ID NO: 1049191 - DNA, 33 bp, Homo sapien
cttaaaaaaatcaacaatcctggctttttagct

SEQ ID NO: 1049192 - DNA, 33 bp, Homo sapien
cttaaaaaaatcaacattcctggctttttagct

SEQ ID NO: 1049193 - DNA, 33 bp, Homo sapien; identical to SEQ ID NO: 1049191

SEQ ID NO: 1049194 - DNA, 33 bp, Homo sapien; identical to SEQ ID NO: 1049192

SEQ ID NO: 1049195 - DNA, 33 bp, Homo sapien
ctaattttttttatagccatagtagtaaataca

SEQ ID NO: 1049196 - DNA, 33 bp, Homo sapien
ctaattttttttataggcatagtagtaaataca

SEQ ID NO: 1049197 - DNA, 33 bp, Homo sapien
caaacattggtgggaaattagagatgcaataac

SEQ ID NO: 1049198 - DNA, 33 bp, Homo sapien
caaacattggtgggaagttagagatgcaataac

SEQ ID NO: 1049199 - DNA, 33 bp, Homo sapien
gcaagcttgctgtatcaactaccaataggattg

SEQ ID NO: 1049200 - DNA, 33 bp, Homo sapien
gcaagcttgctgtatcgactaccaataggattg

SEQ ID NO: 1049201 - DNA, 33 bp, Homo sapien
tggctgcagaggactcaagtataggcagccgat

SEQ ID NO: 1049202 - DNA, 33 bp, Homo sapien
tggctgcagaggactcgagtataggcagccgat

SEQ ID NO: 1049203 - DNA, 33 bp, Homo sapien; identical to SEQ ID NO: 1049201

SEQ ID NO: 1049204 - DNA, 33 bp, Homo sapien; identical to SEQ ID NO: 1049202

SEQ ID NO: 1049205 - DNA, 33 bp, Homo sapien
agaagtctcaggtcaaagcgctacatctggtga

SEQ ID NO: 1049206 - DNA, 33 bp, Homo sapien
agaagtctcaggtcaaggcgctacatctggtga

SEQ ID NO: 1049207 - DNA, 33 bp, Homo sapien
tgacgtcatgcggtaaatctgcaggataaagaa

SEQ ID NO: 1049208 - DNA, 33 bp, Homo sapien
tgacgtcatgcggtaattctgcaggataaagaa

SEQ ID NO: 1049209 - DNA, 33 bp, Homo sapien
tgacttacttttctccaaattcaatttcatcac

SEQ ID NO: 1049210 - DNA, 33 bp, Homo sapien
tgacttacttttctccgaattcaatttcatcac

SEQ ID NO: 1049211 - DNA, 33 bp, Homo sapien
ttcttagaatgcaggacgagggtctaaaacttt

SEQ ID NO: 1049212 - DNA, 33 bp, Homo sapien
ttcttagaatgcaggaggagggtctaaaacttt

SEQ ID NO: 1049213 - DNA, 33 bp, Homo sapien
catgggatttcatcgccgagttataaatcaata

SEQ ID NO: 1049214 - DNA, 33 bp, Homo sapien
catgggatttcatcgctgagttataaatcaata

SEQ ID NO: 1049215 - DNA, 33 bp, Homo sapien
agaaatgagtacataacgtgcatgaatttaagg

SEQ ID NO: 1049216 - DNA, 33 bp, Homo sapien
agaaatgagtacataatgtgcatgaatttaagg

SEQ ID NO: 1049217 - DNA, 33 bp, Homo sapien
gtttctttctgatatacggctattttgaagaac

SEQ ID NO: 1049218 - DNA, 33 bp, Homo sapien
gtttctttctgatatatggctattttgaagaac

SEQ ID NO: 1049219 - DNA, 33 bp, Homo sapien
cacatccttccttcccaagagcataggagatgc

SEQ ID NO: 1049220 - DNA, 33 bp, Homo sapien
cacatccttccttccctagagcataggagatgc

SEQ ID NO: 1049221 - DNA, 33 bp, Homo sapien
tttaatgcacgttataagatgcctggggccagc

SEQ ID NO: 1049222 - DNA, 33 bp, Homo sapien
tttaatgcacgttataggatgcctggggccagc

SEQ ID NO: 1049223 - DNA, 33 bp, Homo sapien
ttttaaaattgtggtacgcaattaacaaaacat

SEQ ID NO: 1049224 - DNA, 33 bp, Homo sapien
ttttaaaattgtggtatgcaattaacaaaacat

SEQ ID NO: 1049225 - DNA, 33 bp, Homo sapien
aataatggcctttccaacaatttggatggagct

SEQ ID NO: 1049226 - DNA, 33 bp, Homo sapien
aataatggcctttccagcaatttggatggagct

SEQ ID NO: 1049227 - DNA, 33 bp, Homo sapien
cctaactctaccttgccacctaaagaggagatt

SEQ ID NO: 1049228 - DNA, 33 bp, Homo sapien
cctaactctaccttgctacctaaagaggagatt

SEQ ID NO: 1049229 - DNA, 33 bp, Homo sapien
caaaccatacttggagaaaaaataagcataaat

SEQ ID NO: 1049230 - DNA, 33 bp, Homo sapien
caaaccatacttggagcaaaaataagcataaat

SEQ ID NO: 1049231 - DNA, 33 bp, Homo sapien
gaagaatgttctacaaccatacaaaactgaatt

SEQ ID NO: 1049232 - DNA, 33 bp, Homo sapien
gaagaatgttctacaagcatacaaaactgaatt

SEQ ID NO: 1049233 - DNA, 33 bp, Homo sapien
ttcaactgtgctgaaaatttcaaccatttctgg

SEQ ID NO: 1049234 - DNA, 33 bp, Homo sapien
ttcaactgtgctgaaattttcaaccatttctgg

SEQ ID NO: 1049235 - DNA, 33 bp, Homo sapien
acccaagagttatatcaattgaaatgatgtggt

SEQ ID NO: 1049236 - DNA, 33 bp, Homo sapien
acccaagagttatatccattgaaatgatgtggt

SEQ ID NO: 1049237 - DNA, 33 bp, Homo sapien
atggaacaaaacaatacggactaactcaagcta

SEQ ID NO: 1049238 - DNA, 33 bp, Homo sapien
atggaacaaaacaatatggactaactcaagcta

SEQ ID NO: 1049239 - DNA, 33 bp, Homo sapien
ctctttacagggcttaaatgtcagattgttagt

SEQ ID NO: 1049240 - DNA, 33 bp, Homo sapien
ctctttacagggcttatatgtcagattgttagt

SEQ ID NO: 1049241 - DNA, 33 bp, Homo sapien
atttgtccattgttggcaatttattaaaggttt

SEQ ID NO: 1049242 - DNA, 33 bp, Homo sapien
atttgtccattgttggtaatttattaaaggttt

SEQ ID NO: 1049243 - DNA, 33 bp, Homo sapien
ctgatggtaaggtctgaagttgcttagcagaaa

SEQ ID NO: 1049244 - DNA, 33 bp, Homo sapien
ctgatggtaaggtctgcagttgcttagcagaaa

SEQ ID NO: 1049245 - DNA, 33 bp, Homo sapien
tagttattaagaatgcaaattaaatccacaata

SEQ ID NO: 1049246 - DNA, 33 bp, Homo sapien
tagttattaagaatgcgaattaaatccacaata

SEQ ID NO: 1049247 - DNA, 33 bp, Homo sapien
tcagtcttcctaccagccatataaccaacttct

SEQ ID NO: 1049248 - DNA, 33 bp, Homo sapien
tcagtcttcctaccaggcatataaccaacttct

SEQ ID NO: 1049249 - DNA, 33 bp, Homo sapien
agtctcatgtttagaactctccatttacaatga

SEQ ID NO: 1049250 - DNA, 33 bp, Homo sapien
agtctcatgtttagaattctccatttacaatga

SEQ ID NO: 1049251 - DNA, 33 bp, Homo sapien
tgcattcataagctcacgtttctgaatcttcat

SEQ ID NO: 1049252 - DNA, 33 bp, Homo sapien
tgcattcataagctcatgtttctgaatcttcat

SEQ ID NO: 1049253 - DNA, 33 bp, Homo sapien
tgtgcttcttatgatgcagccaaggttgcctta

SEQ ID NO: 1049254 - DNA, 33 bp, Homo sapien
tgtgcttcttatgatgtagccaaggttgcctta

SEQ ID NO: 1049255 - DNA, 33 bp, Homo sapien
aacagcacccttaatgaaatgttgccatttgtt

SEQ ID NO: 1049256 - DNA, 33 bp, Homo sapien
aacagcacccttaatgtaatgttgccatttgtt

SEQ ID NO: 1049257 - DNA, 33 bp, Homo sapien
gcatttatagcaaaacagttgtactcaacgtag

SEQ ID NO: 1049258 - DNA, 33 bp, Homo sapien
gcatttatagcaaaacggttgtactcaacgtag

SEQ ID NO: 1049259 - DNA, 33 bp, Homo sapien
aaaaccagaatagaaacaaccagtgattcaagt

SEQ ID NO: 1049260 - DNA, 33 bp, Homo sapien
aaaaccagaatagaaataaccagtgattcaagt

SEQ ID NO: 1049261 - DNA, 33 bp, Homo sapien
cacacacattcgagcacctataataacagacag

SEQ ID NO: 1049262 - DNA, 33 bp, Homo sapien
cacacacattcgagcagctataataacagacag

SEQ ID NO: 1049263 - DNA, 33 bp, Homo sapien
cctgtgcaatgtaggacgttgagcagcatccct

SEQ ID NO: 1049264 - DNA, 33 bp, Homo sapien
cctgtgcaatgtaggatgttgagcagcatccct

SEQ ID NO: 1049265 - DNA, 33 bp, Homo sapien
ttcacttatggaaaaacctttaggctgaactta

SEQ ID NO: 1049266 - DNA, 33 bp, Homo sapien
ttcacttatggaaaaatctttaggctgaactta

SEQ ID NO: 1049267 - DNA, 33 bp, Homo sapien
ttggacaaaccttcaacgaaatagcttggggtt

SEQ ID NO: 1049268 - DNA, 33 bp, Homo sapien
ttggacaaaccttcaatgaaatagcttggggtt

SEQ ID NO: 1049269 - DNA, 33 bp, Homo sapien
attccttaacctgaaacagctgcatgattctcc

SEQ ID NO: 1049270 - DNA, 33 bp, Homo sapien
attccttaacctgaaatagctgcatgattctcc

SEQ ID NO: 1049271 - DNA, 33 bp, Homo sapien
ccaggtgttgtaaataacttgtagtggatttac

SEQ ID NO: 1049272 - DNA, 33 bp, Homo sapien
ccaggtgttgtaaataccttgtagtggatttac

SEQ ID NO: 1049273 - DNA, 33 bp, Homo sapien
agtggccaatggctcaaacaactgctctccgct

SEQ ID NO: 1049274 - DNA, 33 bp, Homo sapien
agtggccaatggctcagacaactgctctccgct

SEQ ID NO: 1049275 - DNA, 33 bp, Homo sapien
agcttattaaaacaaaccatgggtcctaatggc

SEQ ID NO: 1049276 - DNA, 33 bp, Homo sapien
agcttattaaaacaaatcatgggtcctaatggc

SEQ ID NO: 1049277 - DNA, 33 bp, Homo sapien
cacttcagctacacaactggttgtaatcagaga

SEQ ID NO: 1049278 - DNA, 33 bp, Homo sapien
cacttcagctacacaattggttgtaatcagaga

SEQ ID NO: 1049279 - DNA, 33 bp, Homo sapien
tatttttgctctacaagggattagtaagtagtg

SEQ ID NO: 1049280 - DNA, 33 bp, Homo sapien
tatttttgctctacaatggattagtaagtagtg

SEQ ID NO: 1049281 - DNA, 33 bp, Homo sapien
aatttgctgtttctaaataattacgttattcca

SEQ ID NO: 1049282 - DNA, 33 bp, Homo sapien
aatttgctgtttctaagtaattacgttattcca

SEQ ID NO: 1049283 - DNA, 33 bp, Homo sapien; identical to SEQ ID NO: 1049281

SEQ ID NO: 1049284 - DNA, 33 bp, Homo sapien; identical to SEQ ID NO: 1049282

SEQ ID NO: 1049285 - DNA, 33 bp, Homo sapien
aagaaagatcaggaaacacccaattaatgagac

SEQ ID NO: 1049286 - DNA, 33 bp, Homo sapien
aagaaagatcaggaaagacccaattaatgagac

SEQ ID NO: 1049287 - DNA, 33 bp, Homo sapien
gggtagacaccagatacgttacaacttatatgg

SEQ ID NO: 1049288 - DNA, 33 bp, Homo sapien
gggtagacaccagatatgttacaacttatatgg

SEQ ID NO: 1049289 - DNA, 33 bp, Homo sapien
gtcgaatgtgaaagaaactctgtgcctaaacac

SEQ ID NO: 1049290 - DNA, 33 bp, Homo sapien
gtcgaatgtgaaagaagctctgtgcctaaacac

SEQ ID NO: 1049291 - DNA, 33 bp, Homo sapien
taaccatgtgacctcactaacaaaaaataaata

SEQ ID NO: 1049292 - DNA, 33 bp, Homo sapien
taaccatgtgacctcattaacaaaaaataaata

SEQ ID NO: 1049293 - DNA, 33 bp, Homo sapien
agtaacaaaatattccaaactctttctggtcta

SEQ ID NO: 1049294 - DNA, 33 bp, Homo sapien
agtaacaaaatattcctaactctttctggtcta

SEQ ID NO: 1049295 - DNA, 33 bp, Homo sapien
acataagggattctcactcccgtcaaccatatg

SEQ ID NO: 1049296 - DNA, 33 bp, Homo sapien
acataagggattctcattcccgtcaaccatatg

SEQ ID NO: 1049297 - DNA, 33 bp, Homo sapien; identical to SEQ ID NO: 1049295

SEQ ID NO: 1049298 - DNA, 33 bp, Homo sapien; identical to SEQ ID NO: 1049296

SEQ ID NO: 1049299 - DNA, 33 bp, Homo sapien
atgttattgcagatacggacatttccaagtggt

SEQ ID NO: 1049300 - DNA, 33 bp, Homo sapien
atgttattgcagatactgacatttccaagtggt

SEQ ID NO: 1049301 - DNA, 33 bp, Homo sapien
gagactgaaggtagcaacctcttcaatgctgcc

SEQ ID NO: 1049302 - DNA, 33 bp, Homo sapien
gagactgaaggtagcatcctcttcaatgctgcc

SEQ ID NO: 1049303 - DNA, 33 bp, Homo sapien
aaggacaggtcatttcaaaggtttggtgatgag

SEQ ID NO: 1049304 - DNA, 33 bp, Homo sapien
aaggacaggtcatttcgaaggtttggtgatgag

SEQ ID NO: 1049305 - DNA, 33 bp, Homo sapien
ctccttgaaacactaccatacagaccctccaaa

SEQ ID NO: 1049306 - DNA, 33 bp, Homo sapien
ctccttgaaacactactatacagaccctccaaa

SEQ ID NO: 1049307 - DNA, 33 bp, Homo sapien
acttggcaggaaataaatctcctcattctcatt

SEQ ID NO: 1049308 - DNA, 33 bp, Homo sapien
acttggcaggaaataagtctcctcattctcatt

SEQ ID NO: 1049309 - DNA, 33 bp, Homo sapien
tggctgggcttaatcaggaattctgaagaaaat

SEQ ID NO: 1049310 - DNA, 33 bp, Homo sapien
tggctgggcttaatcatgaattctgaagaaaat

SEQ ID NO: 1049311 - DNA, 33 bp, Homo sapien
aaatgatagagtgaacaaaatatcaggatacaa

SEQ ID NO: 1049312 - DNA, 33 bp, Homo sapien
aaatgatagagtgaaccaaatatcaggatacaa

SEQ ID NO: 1049313 - DNA, 33 bp, Homo sapien
agcattcatcttgtcaatcatttacattatacc

SEQ ID NO: 1049314 - DNA, 33 bp, Homo sapien
agcattcatcttgtcagtcatttacattatacc

SEQ ID NO: 1049315 - DNA, 33 bp, Homo sapien
gtctggcgtgttttgaacgtcttagtacttgtc

SEQ ID NO: 1049316 - DNA, 33 bp, Homo sapien
gtctggcgtgttttgagcgtcttagtacttgtc

SEQ ID NO: 1049317 - DNA, 33 bp, Homo sapien
cttatctaacttgggacgagtaggagatgctcc

SEQ ID NO: 1049318 - DNA, 33 bp, Homo sapien
cttatctaacttgggatgagtaggagatgctcc

SEQ ID NO: 1049319 - DNA, 33 bp, Homo sapien
ttaatgaaatttgtgacagagtttgagatagac

SEQ ID NO: 1049320 - DNA, 33 bp, Homo sapien
ttaatgaaatttgtgatagagtttgagatagac

SEQ ID NO: 1049321 - DNA, 33 bp, Homo sapien
tgtgtaagaggatctaacagtaggcattattga

SEQ ID NO: 1049322 - DNA, 33 bp, Homo sapien
tgtgtaagaggatctagcagtaggcattattga

SEQ ID NO: 1049323 - DNA, 33 bp, Homo sapien
ttttagctctgtcttcgagcagtgtgatgtgtt

SEQ ID NO: 1049324 - DNA, 33 bp, Homo sapien
ttttagctctgtcttctagcagtgtgatgtgtt

SEQ ID NO: 1049325 - DNA, 33 bp, Homo sapien
ggaagggtgctacttacctttctgcaatatatg

SEQ ID NO: 1049326 - DNA, 33 bp, Homo sapien
ggaagggtgctacttatctttctgcaatatatg

SEQ ID NO: 1049327 - DNA, 33 bp, Homo sapien
tatagatacacagtaaatgcattagtaacaaat

SEQ ID NO: 1049328 - DNA, 33 bp, Homo sapien
tatagatacacagtaagtgcattagtaacaaat

SEQ ID NO: 1049329 - DNA, 33 bp, Homo sapien
gtagacagtacatcccaagaaagagaggattca

SEQ ID NO: 1049330 - DNA, 33 bp, Homo sapien
gtagacagtacatcccgagaaagagaggattca

SEQ ID NO: 1049331 - DNA, 33 bp, Homo sapien
aactcatgaaaatgtcaaatcagtgagagctct

SEQ ID NO: 1049332 - DNA, 33 bp, Homo sapien
aactcatgaaaatgtcgaatcagtgagagctct

SEQ ID NO: 1049333 - DNA, 33 bp, Homo sapien; identical to SEQ ID NO: 1049331

SEQ ID NO: 1049334 - DNA, 33 bp, Homo sapien; identical to SEQ ID NO: 1049332

SEQ ID NO: 1049335 - DNA, 33 bp, Homo sapien
gtcatgtgacctactccgaaaaaacacataatt

SEQ ID NO: 1049336 - DNA, 33 bp, Homo sapien
gtcatgtgacctactctgaaaaaacacataatt

SEQ ID NO: 1049337 - DNA, 33 bp, Homo sapien
tgggaaaatgaatatccgagtacagcaggaaat

SEQ ID NO: 1049338 - DNA, 33 bp, Homo sapien
tgggaaaatgaatatctgagtacagcaggaaat

SEQ ID NO: 1049339 - DNA, 33 bp, Homo sapien
gctatggcagtcctagaacagtttcaattcttc

SEQ ID NO: 1049340 - DNA, 33 bp, Homo sapien
gctatggcagtcctagcacagtttcaattcttc

SEQ ID NO: 1049341 - DNA, 33 bp, Homo sapien
aggaggaagagagagagatacctcttgttttct

SEQ ID NO: 1049342 - DNA, 33 bp, Homo sapien
aggaggaagagagagatatacctcttgttttct

SEQ ID NO: 1049343 - DNA, 33 bp, Homo sapien
tcatgtaaccaaaagccgcttggagttctaaat

SEQ ID NO: 1049344 - DNA, 33 bp, Homo sapien
tcatgtaaccaaaagctgcttggagttctaaat

SEQ ID NO: 1049345 - DNA, 33 bp, Homo sapien
aacattaatattaataatagcaacagcatataa

SEQ ID NO: 1049346 - DNA, 33 bp, Homo sapien
aacattaatattaatagtagcaacagcatataa

SEQ ID NO: 1049347 - DNA, 33 bp, Homo sapien
ctttaatgcactaaaccgactcagtgaaaattt

SEQ ID NO: 1049348 - DNA, 33 bp, Homo sapien
ctttaatgcactaaactgactcagtgaaaattt

SEQ ID NO: 1049349 - DNA, 33 bp, Homo sapien
atgaacatatgagtacaggtatgtttttgatgt

SEQ ID NO: 1049350 - DNA, 33 bp, Homo sapien
atgaacatatgagtaccggtatgtttttgatgt

SEQ ID NO: 1049351 - DNA, 33 bp, Homo sapien
ctgagaagtcgtgtggaccaacctttgctcatt

SEQ ID NO: 1049352 - DNA, 33 bp, Homo sapien
ctgagaagtcgtgtggtccaacctttgctcatt

SEQ ID NO: 1049353 - DNA, 33 bp, Homo sapien
ggctgtcagccaaaaaaagttggagttcacaac

SEQ ID NO: 1049354 - DNA, 33 bp, Homo sapien
ggctgtcagccaaaaagagttggagttcacaac

SEQ ID NO: 1049355 - DNA, 33 bp, Homo sapien
cccactcctgtgacaactcaaaaatccatgaac

SEQ ID NO: 1049356 - DNA, 33 bp, Homo sapien
cccactcctgtgacaagtcaaaaatccatgaac

SEQ ID NO: 1049357 - DNA, 33 bp, Homo sapien
ctaccatgtagatgaacattttattatgctaaa

SEQ ID NO: 1049358 - DNA, 33 bp, Homo sapien
ctaccatgtagatgaatattttattatgctaaa

SEQ ID NO: 1049359 - DNA, 33 bp, Homo sapien
acgggctcggagagtgaagataagggatttgag

SEQ ID NO: 1049360 - DNA, 33 bp, Homo sapien
acgggctcggagagtggagataagggatttgag

SEQ ID NO: 1049361 - DNA, 33 bp, Homo sapien
aggagaagtacgattaagcattaaggaaaagca

SEQ ID NO: 1049362 - DNA, 33 bp, Homo sapien
aggagaagtacgattaggcattaaggaaaagca

SEQ ID NO: 1049363 - DNA, 33 bp, Homo sapien
tcatgctgtagaaacacaacacacagagtcata

SEQ ID NO: 1049364 - DNA, 33 bp, Homo sapien
tcatgctgtagaaacataacacacagagtcata

SEQ ID NO: 1049365 - DNA, 33 bp, Homo sapien
gtccgttatatctgtaaacctttgtgtacctat

SEQ ID NO: 1049366 - DNA, 33 bp, Homo sapien
gtccgttatatctgtatacctttgtgtacctat

SEQ ID NO: 1049367 - DNA, 33 bp, Homo sapien
agaaatactagattgccgagaggtaagtgaaga

SEQ ID NO: 1049368 - DNA, 33 bp, Homo sapien
agaaatactagattgcggagaggtaagtgaaga

SEQ ID NO: 1049369 - DNA, 33 bp, Homo sapien
gtcatgtacacaagtaaacaagatttccctgag

SEQ ID NO: 1049370 - DNA, 33 bp, Homo sapien
gtcatgtacacaagtagacaagatttccctgag

SEQ ID NO: 1049371 - DNA, 33 bp, Homo sapien
aaatattggtggataggcatttcccggtctgga

SEQ ID NO: 1049372 - DNA, 33 bp, Homo sapien
aaatattggtggatagtcatttcccggtctgga

SEQ ID NO: 1049373 - DNA, 33 bp, Homo sapien
atggaatctgagtgtacgtgtggttttctttcc

SEQ ID NO: 1049374 - DNA, 33 bp, Homo sapien
atggaatctgagtgtatgtgtggttttctttcc

SEQ ID NO: 1049375 - DNA, 33 bp, Homo sapien
ggctggtgtatactgacagcaaattgtcggact

SEQ ID NO: 1049376 - DNA, 33 bp, Homo sapien
ggctggtgtatactgatagcaaattgtcggact

SEQ ID NO: 1049377 - DNA, 33 bp, Homo sapien
atgaaacagttatcaaaaagtgtctcagaaaag

SEQ ID NO: 1049378 - DNA, 33 bp, Homo sapien
atgaaacagttatcaagaagtgtctcagaaaag

SEQ ID NO: 1049379 - DNA, 33 bp, Homo sapien
aaaatgacaattttgaaattccatagcattgga

SEQ ID NO: 1049380 - DNA, 33 bp, Homo sapien
aaaatgacaattttgagattccatagcattgga

SEQ ID NO: 1049381 - DNA, 33 bp, Homo sapien
tgatcatgttgtgtatcaatagatggagtttta

SEQ ID NO: 1049382 - DNA, 33 bp, Homo sapien
tgatcatgttgtgtatgaatagatggagtttta

SEQ ID NO: 1049383 - DNA, 33 bp, Homo sapien
agatccagctttgcaaaaaggtcttataaacca

SEQ ID NO: 1049384 - DNA, 33 bp, Homo sapien
agatccagctttgcaagaaggtcttataaacca

SEQ ID NO: 1049385 - DNA, 33 bp, Homo sapien
tttttaattttctgtcaaggtgagactttgctg

SEQ ID NO: 1049386 - DNA, 33 bp, Homo sapien
tttttaattttctgtcgaggtgagactttgctg

SEQ ID NO: 1049387 - DNA, 33 bp, Homo sapien
acctcagaatccttcagatctttaagactgtca

SEQ ID NO: 1049388 - DNA, 33 bp, Homo sapien
acctcagaatccttcatatctttaagactgtca

SEQ ID NO: 1049389 - DNA, 33 bp, Homo sapien
cctggtgaatgggtcaagagatactcagagtgg

SEQ ID NO: 1049390 - DNA, 33 bp, Homo sapien
cctggtgaatgggtcaggagatactcagagtgg

SEQ ID NO: 1049391 - DNA, 33 bp, Homo sapien
acagctcagtccataacaggtggtcttccacaa

SEQ ID NO: 1049392 - DNA, 33 bp, Homo sapien
acagctcagtccataataggtggtcttccacaa

SEQ ID NO: 1049393 - DNA, 33 bp, Homo sapien
tagtgcttaggatatgaatgaacgcagggactg

SEQ ID NO: 1049394 - DNA, 33 bp, Homo sapien
tagtgcttaggatatgcatgaacgcagggactg

SEQ ID NO: 1049395 - DNA, 33 bp, Homo sapien
aagaacatcctatccaaactacatttttcagaa

SEQ ID NO: 1049396 - DNA, 33 bp, Homo sapien
aagaacatcctatccacactacatttttcagaa

SEQ ID NO: 1049397 - DNA, 33 bp, Homo sapien
aaaggacttatctccacgaatcgggccaggcac

SEQ ID NO: 1049398 - DNA, 33 bp, Homo sapien
aaaggacttatctccatgaatcgggccaggcac

SEQ ID NO: 1049399 - DNA, 33 bp, Homo sapien
aatttgtactaatcaaggccagaattgatgaac

SEQ ID NO: 1049400 - DNA, 33 bp, Homo sapien
aatttgtactaatcaatgccagaattgatgaac

SEQ ID NO: 1049401 - DNA, 33 bp, Homo sapien
atctcccagctgtgacacctttgtaatatcatc

SEQ ID NO: 1049402 - DNA, 33 bp, Homo sapien
atctcccagctgtgactcctttgtaatatcatc

SEQ ID NO: 1049403 - DNA, 33 bp, Homo sapien
gtttttcatcaatgacaaattaccgtgctaact

SEQ ID NO: 1049404 - DNA, 33 bp, Homo sapien
gtttttcatcaatgacgaattaccgtgctaact

SEQ ID NO: 1049405 - DNA, 33 bp, Homo sapien
catttatgttgcaaaacacttcggtggagtgac

SEQ ID NO: 1049406 - DNA, 33 bp, Homo sapien
catttatgttgcaaaatacttcggtggagtgac

SEQ ID NO: 1049407 - DNA, 33 bp, Homo sapien
ggtcatctctttaaacagtcacctcatgcttgc

SEQ ID NO: 1049408 - DNA, 33 bp, Homo sapien
ggtcatctctttaaacggtcacctcatgcttgc

SEQ ID NO: 1049409 - DNA, 33 bp, Homo sapien
aagcttgattccattccagagtttgtatctggg

SEQ ID NO: 1049410 - DNA, 33 bp, Homo sapien
aagcttgattccattctagagtttgtatctggg

SEQ ID NO: 1049411 - DNA, 33 bp, Homo sapien
aatgcttgcatgggacgcctgttggcttgcttt

SEQ ID NO: 1049412 - DNA, 33 bp, Homo sapien
aatgcttgcatgggactcctgttggcttgcttt

SEQ ID NO: 1049413 - DNA, 33 bp, Homo sapien
gttgaataaaatgacaatcttagctagagaagc

SEQ ID NO: 1049414 - DNA, 33 bp, Homo sapien
gttgaataaaatgacagtcttagctagagaagc

SEQ ID NO: 1049415 - DNA, 33 bp, Homo sapien
gaaagaaaacatgagacattgagtacagaaatg

SEQ ID NO: 1049416 - DNA, 33 bp, Homo sapien
gaaagaaaacatgagatattgagtacagaaatg

SEQ ID NO: 1049417 - DNA, 33 bp, Homo sapien
aagtctaaattggcacacatttacatgttttca

SEQ ID NO: 1049418 - DNA, 33 bp, Homo sapien
aagtctaaattggcactcatttacatgttttca

SEQ ID NO: 1049419 - DNA, 33 bp, Homo sapien
gtagtgagtgcccttaaatggtagaggtaatgt

SEQ ID NO: 1049420 - DNA, 33 bp, Homo sapien
gtagtgagtgcccttagatggtagaggtaatgt

SEQ ID NO: 1049421 - DNA, 33 bp, Homo sapien
ataggcacgccaaaaacagaaggttatgtttta

SEQ ID NO: 1049422 - DNA, 33 bp, Homo sapien
ataggcacgccaaaaagagaaggttatgtttta

SEQ ID NO: 1049423 - DNA, 33 bp, Homo sapien
atccaaaagtagaagaagcgagaaaggatcctt

SEQ ID NO: 1049424 - DNA, 33 bp, Homo sapien
atccaaaagtagaagaggcgagaaaggatcctt

SEQ ID NO: 1049425 - DNA, 33 bp, Homo sapien
aaatgttccttgtggaagaaataccacttcata

SEQ ID NO: 1049426 - DNA, 33 bp, Homo sapien
aaatgttccttgtggaggaaataccacttcata

SEQ ID NO: 1049427 - DNA, 33 bp, Homo sapien
ctcgcaccgctataaagaagtgtaaagaactag

SEQ ID NO: 1049428 - DNA, 33 bp, Homo sapien
ctcgcaccgctataaataagtgtaaagaactag

SEQ ID NO: 1049429 - DNA, 33 bp, Homo sapien
ttattaccacatttaaacatcaaaataaccctt

SEQ ID NO: 1049430 - DNA, 33 bp, Homo sapien
ttattaccacatttaatcatcaaaataaccctt

SEQ ID NO: 1049431 - DNA, 33 bp, Homo sapien
atattaaacaaaggaacgtagaatagtgaagaa

SEQ ID NO: 1049432 - DNA, 33 bp, Homo sapien
atattaaacaaaggaatgtagaatagtgaagaa

SEQ ID NO: 1049433 - DNA, 33 bp, Homo sapien
cctaaagaccagtacacgaaagtgacgagctgt

SEQ ID NO: 1049434 - DNA, 33 bp, Homo sapien
cctaaagaccagtacatgaaagtgacgagctgt

SEQ ID NO: 1049435 - DNA, 33 bp, Homo sapien
atgtagctgaaacgagccggtcctcagttgata

SEQ ID NO: 1049436 - DNA, 33 bp, Homo sapien
atgtagctgaaacgagtcggtcctcagttgata

SEQ ID NO: 1049437 - DNA, 33 bp, Homo sapien
catggtgtaagtgagacaaagtggatgggataa

SEQ ID NO: 1049438 - DNA, 33 bp, Homo sapien
catggtgtaagtgagagaaagtggatgggataa

SEQ ID NO: 1049439 - DNA, 33 bp, Homo sapien
cttctgactgctaagaaaatatgtttattgtgg

SEQ ID NO: 1049440 - DNA, 33 bp, Homo sapien
cttctgactgctaagacaatatgtttattgtgg

SEQ ID NO: 1049441 - DNA, 33 bp, Homo sapien
cattttcaacaaagtccgaatatgctagtttaa

SEQ ID NO: 1049442 - DNA, 33 bp, Homo sapien
cattttcaacaaagtctgaatatgctagtttaa

SEQ ID NO: 1049443 - DNA, 33 bp, Homo sapien
tactcagaaattagtgaaagtcttattatattt

SEQ ID NO: 1049444 - DNA, 33 bp, Homo sapien
tactcagaaattagtggaagtcttattatattt

SEQ ID NO: 1049445 - DNA, 33 bp, Homo sapien
atcatcttcatactgtaaattcatgggcctgta

SEQ ID NO: 1049446 - DNA, 33 bp, Homo sapien
atcatcttcatactgttaattcatgggcctgta

SEQ ID NO: 1049447 - DNA, 33 bp, Homo sapien
tttcaacctggttggccatttcactgaaatttt

SEQ ID NO: 1049448 - DNA, 33 bp, Homo sapien
tttcaacctggttggctatttcactgaaatttt

SEQ ID NO: 1049449 - DNA, 33 bp, Homo sapien
tctatacctgctcttcactacattttgtccaaa

SEQ ID NO: 1049450 - DNA, 33 bp, Homo sapien
tctatacctgctcttcgctacattttgtccaaa

SEQ ID NO: 1049451 - DNA, 33 bp, Homo sapien
tctcctaatgctattcacactgtcttctacaat

SEQ ID NO: 1049452 - DNA, 33 bp, Homo sapien
tctcctaatgctattcgcactgtcttctacaat

SEQ ID NO: 1049453 - DNA, 33 bp, Homo sapien
cagacagatagatgacaggtagatgatatatat

SEQ ID NO: 1049454 - DNA, 33 bp, Homo sapien
cagacagatagatgaccggtagatgatatatat

SEQ ID NO: 1049455 - DNA, 33 bp, Homo sapien
atcacctaattgctgacatatgattgctctgaa

SEQ ID NO: 1049456 - DNA, 33 bp, Homo sapien
atcacctaattgctgatatatgattgctctgaa

SEQ ID NO: 1049457 - DNA, 33 bp, Homo sapien
ttgtttgtacttcaaaaacagattggaagacta

SEQ ID NO: 1049458 - DNA, 33 bp, Homo sapien
ttgtttgtacttcaaagacagattggaagacta

SEQ ID NO: 1049459 - DNA, 33 bp, Homo sapien
cacactttactatcaaactgaagggatctcctt

SEQ ID NO: 1049460 - DNA, 33 bp, Homo sapien
cacactttactatcaagctgaagggatctcctt

SEQ ID NO: 1049461 - DNA, 33 bp, Homo sapien
agaaaatgcacactgaagatttatagtttctgt

SEQ ID NO: 1049462 - DNA, 33 bp, Homo sapien
agaaaatgcacactgatgatttatagtttctgt

SEQ ID NO: 1049463 - DNA, 33 bp, Homo sapien
ttattttctattgatgccactaaaagttaccaa

SEQ ID NO: 1049464 - DNA, 33 bp, Homo sapien
ttattttctattgatgtcactaaaagttaccaa

SEQ ID NO: 1049465 - DNA, 33 bp, Homo sapien
ttttgcagcaggtccaggttttgtcaatagcaa

SEQ ID NO: 1049466 - DNA, 33 bp, Homo sapien
ttttgcagcaggtccatgttttgtcaatagcaa

SEQ ID NO: 1049467 - DNA, 33 bp, Homo sapien
cagaaagtactttagacgacattgtaggcttca

SEQ ID NO: 1049468 - DNA, 33 bp, Homo sapien
cagaaagtactttagaggacattgtaggcttca

SEQ ID NO: 1049469 - DNA, 33 bp, Homo sapien
tatcttttattgcatactaattggcaaatagta

SEQ ID NO: 1049470 - DNA, 33 bp, Homo sapien
tatcttttattgcatagtaattggcaaatagta

SEQ ID NO: 1049471 - DNA, 33 bp, Homo sapien
gacttcccaactattaaagactaggaatggata

SEQ ID NO: 1049472 - DNA, 33 bp, Homo sapien
gacttcccaactattacagactaggaatggata

SEQ ID NO: 1049473 - DNA, 33 bp, Homo sapien
tttcactgtactaatccatgaaagctgaccttt

SEQ ID NO: 1049474 - DNA, 33 bp, Homo sapien
tttcactgtactaatcgatgaaagctgaccttt

SEQ ID NO: 1049475 - DNA, 33 bp, Homo sapien
ttctcgtctgtggttaacttactcaatctgtca

SEQ ID NO: 1049476 - DNA, 33 bp, Homo sapien
ttctcgtctgtggttatcttactcaatctgtca

SEQ ID NO: 1049477 - DNA, 33 bp, Homo sapien
gcatctcattgtccaaatgtggtgatctggcga

SEQ ID NO: 1049478 - DNA, 33 bp, Homo sapien
gcatctcattgtccaattgtggtgatctggcga

SEQ ID NO: 1049479 - DNA, 33 bp, Homo sapien
catgtctttctatcaacattacgcatacttatg

SEQ ID NO: 1049480 - DNA, 33 bp, Homo sapien
catgtctttctatcaatattacgcatacttatg

SEQ ID NO: 1049481 - DNA, 33 bp, Homo sapien
cttgatttccaaaaagccttgtcaagtttgtga

SEQ ID NO: 1049482 - DNA, 33 bp, Homo sapien
cttgatttccaaaaagtcttgtcaagtttgtga

SEQ ID NO: 1049483 - DNA, 33 bp, Homo sapien
ctttctaggaatttgcagaatggccaggaaaag

SEQ ID NO: 1049484 - DNA, 33 bp, Homo sapien
ctttctaggaatttgcggaatggccaggaaaag

SEQ ID NO: 1049485 - DNA, 33 bp, Homo sapien
ctgaactagagtggacaaaatcaattctctttc

SEQ ID NO: 1049486 - DNA, 33 bp, Homo sapien
ctgaactagagtggaccaaatcaattctctttc

SEQ ID NO: 1049487 - DNA, 33 bp, Homo sapien
gatattgcccttgaaaaatagcgctttaatccc

SEQ ID NO: 1049488 - DNA, 33 bp, Homo sapien
gatattgcccttgaaacatagcgctttaatccc

SEQ ID NO: 1049489 - DNA, 33 bp, Homo sapien
atgtacatttgaattacgttgtgatgattttat

SEQ ID NO: 1049490 - DNA, 33 bp, Homo sapien
atgtacatttgaattatgttgtgatgattttat

SEQ ID NO: 1049491 - DNA, 33 bp, Homo sapien
ttagtttgtatactaactctttattagctgcat

SEQ ID NO: 1049492 - DNA, 33 bp, Homo sapien
ttagtttgtatactaattctttattagctgcat

SEQ ID NO: 1049493 - DNA, 33 bp, Homo sapien
tgccctaatgttgccaataaaataagtatcact

SEQ ID NO: 1049494 - DNA, 33 bp, Homo sapien
tgccctaatgttgccagtaaaataagtatcact

SEQ ID NO: 1049495 - DNA, 33 bp, Homo sapien
aaaagtcaacctgggagctaaacctgtctccta

SEQ ID NO: 1049496 - DNA, 33 bp, Homo sapien
aaaagtcaacctgggatctaaacctgtctccta

SEQ ID NO: 1049497 - DNA, 33 bp, Homo sapien
tcagttggaagcaagacgtgtcccatgaataca

SEQ ID NO: 1049498 - DNA, 33 bp, Homo sapien
tcagttggaagcaagatgtgtcccatgaataca

SEQ ID NO: 1049499 - DNA, 33 bp, Homo sapien
ttgccaatctaagggaaaattaacaactgatca

SEQ ID NO: 1049500 - DNA, 33 bp, Homo sapien
ttgccaatctaagggacaattaacaactgatca

SEQ ID NO: 1049501 - DNA, 33 bp, Homo sapien
cactttaggcacagaacgtggaaaacaaaatta

SEQ ID NO: 1049502 - DNA, 33 bp, Homo sapien
cactttaggcacagaatgtggaaaacaaaatta

SEQ ID NO: 1049503 - DNA, 33 bp, Homo sapien
gtgaaaacggctttcaaggctactgttaatgat

SEQ ID NO: 1049504 - DNA, 33 bp, Homo sapien
gtgaaaacggctttcacggctactgttaatgat

SEQ ID NO: 1049505 - DNA, 33 bp, Homo sapien
gacaaagcaaactaaacgcagacaatagtaaaa

SEQ ID NO: 1049506 - DNA, 33 bp, Homo sapien
gacaaagcaaactaaaggcagacaatagtaaaa

SEQ ID NO: 1049507 - DNA, 33 bp, Homo sapien
ccacattcttgtcaaccggaataagaagctatt

SEQ ID NO: 1049508 - DNA, 33 bp, Homo sapien
ccacattcttgtcaactggaataagaagctatt

SEQ ID NO: 1049509 - DNA, 33 bp, Homo sapien
acaatagcaatagggaaccaatgcaaggtagat

SEQ ID NO: 1049510 - DNA, 33 bp, Homo sapien
acaatagcaatagggacccaatgcaaggtagat

SEQ ID NO: 1049511 - DNA, 33 bp, Homo sapien; identical to SEQ ID NO: 1049509

SEQ ID NO: 1049512 - DNA, 33 bp, Homo sapien; identical to SEQ ID NO: 1049510

SEQ ID NO: 1049513 - DNA, 33 bp, Homo sapien
tacctgtgcagaagacagtatctcttgtgaatt

SEQ ID NO: 1049514 - DNA, 33 bp, Homo sapien
tacctgtgcagaagactgtatctcttgtgaatt

SEQ ID NO: 1049515 - DNA, 33 bp, Homo sapien
aatgagaatggtggtaagtgtaattccaatcac

SEQ ID NO: 1049516 - DNA, 33 bp, Homo sapien
aatgagaatggtggtaggtgtaattccaatcac

SEQ ID NO: 1049517 - DNA, 33 bp, Homo sapien
gggcatcctttctgaacctccaggagcctggat

SEQ ID NO: 1049518 - DNA, 33 bp, Homo sapien
gggcatcctttctgaatctccaggagcctggat

SEQ ID NO: 1049519 - DNA, 33 bp, Homo sapien
gaacaagttgtccttcactaataccaaaccata

SEQ ID NO: 1049520 - DNA, 33 bp, Homo sapien
gaacaagttgtccttctctaataccaaaccata

SEQ ID NO: 1049521 - DNA, 33 bp, Homo sapien
tttttttgtttgaacacaatgcccatttgtgtt

SEQ ID NO: 1049522 - DNA, 33 bp, Homo sapien
tttttttgtttgaacataatgcccatttgtgtt

SEQ ID NO: 1049523 - DNA, 33 bp, Homo sapien
ttgtgcatatagtggacagaggtcacctccagg

SEQ ID NO: 1049524 - DNA, 33 bp, Homo sapien
ttgtgcatatagtggagagaggtcacctccagg

SEQ ID NO: 1049525 - DNA, 33 bp, Homo sapien
catgtccaaatagataagtgcccaattttgtaa

SEQ ID NO: 1049526 - DNA, 33 bp, Homo sapien
catgtccaaatagatacgtgcccaattttgtaa

SEQ ID NO: 1049527 - DNA, 33 bp, Homo sapien
tttggcatagacactaccaatgaatgaattcta

SEQ ID NO: 1049528 - DNA, 33 bp, Homo sapien
tttggcatagacactatcaatgaatgaattcta

SEQ ID NO: 1049529 - DNA, 33 bp, Homo sapien
gtctctgcatgatctacggaaagcacagctctg

SEQ ID NO: 1049530 - DNA, 33 bp, Homo sapien
gtctctgcatgatctatggaaagcacagctctg

SEQ ID NO: 1049531 - DNA, 33 bp, Homo sapien
gattgaggcatatgtaataaactatggacacaa

SEQ ID NO: 1049532 - DNA, 33 bp, Homo sapien
gattgaggcatatgtactaaactatggacacaa

SEQ ID NO: 1049533 - DNA, 33 bp, Homo sapien
ctaacaagcctcctaacgatattaacactgctg

SEQ ID NO: 1049534 - DNA, 33 bp, Homo sapien
ctaacaagcctcctaatgatattaacactgctg

SEQ ID NO: 1049535 - DNA, 33 bp, Homo sapien
tgagtaagtattctgacgttacagagtttaaac

SEQ ID NO: 1049536 - DNA, 33 bp, Homo sapien
tgagtaagtattctgatgttacagagtttaaac

SEQ ID NO: 1049537 - DNA, 33 bp, Homo sapien
aaaccaggtgacctgaagttaatctcagtagtt

SEQ ID NO: 1049538 - DNA, 33 bp, Homo sapien
aaaccaggtgacctgacgttaatctcagtagtt

SEQ ID NO: 1049539 - DNA, 33 bp, Homo sapien
ttgaacgaacatttgaatatatcacctgaacaa

SEQ ID NO: 1049540 - DNA, 33 bp, Homo sapien
ttgaacgaacatttgattatatcacctgaacaa

SEQ ID NO: 1049541 - DNA, 33 bp, Homo sapien
agcatagtatgttaaaataattccagcctgggc

SEQ ID NO: 1049542 - DNA, 33 bp, Homo sapien
agcatagtatgttaaagtaattccagcctgggc

SEQ ID NO: 1049543 - DNA, 33 bp, Homo sapien
gatgttgtgtggataacagattgtggtgggcta

SEQ ID NO: 1049544 - DNA, 33 bp, Homo sapien
gatgttgtgtggataatagattgtggtgggcta

SEQ ID NO: 1049545 - DNA, 33 bp, Homo sapien
gtggatgcttgagcccactcatcaaacccctga

SEQ ID NO: 1049546 - DNA, 33 bp, Homo sapien
gtggatgcttgagcccgctcatcaaacccctga

SEQ ID NO: 1049547 - DNA, 33 bp, Homo sapien
aatactcaatttcctacgcccaaagcctatgtc

SEQ ID NO: 1049548 - DNA, 33 bp, Homo sapien
aatactcaatttcctatgcccaaagcctatgtc

SEQ ID NO: 1049549 - DNA, 33 bp, Homo sapien
ggggattacttgttacacagcaactgatgactg

SEQ ID NO: 1049550 - DNA, 33 bp, Homo sapien
ggggattacttgttacgcagcaactgatgactg

SEQ ID NO: 1049551 - DNA, 33 bp, Homo sapien
atatagttatggaatgcaaacaactagactggg

SEQ ID NO: 1049552 - DNA, 33 bp, Homo sapien
atatagttatggaatgtaaacaactagactggg

SEQ ID NO: 1049553 - DNA, 33 bp, Homo sapien
tttcatttacacatcaagtaacattcagcaacc

SEQ ID NO: 1049554 - DNA, 33 bp, Homo sapien
tttcatttacacatcaggtaacattcagcaacc

SEQ ID NO: 1049555 - DNA, 33 bp, Homo sapien
gcaggggtagagttaaacagaatatggaaagta

SEQ ID NO: 1049556 - DNA, 33 bp, Homo sapien
gcaggggtagagttaagcagaatatggaaagta

SEQ ID NO: 1049557 - DNA, 33 bp, Homo sapien
cttatggcaaataggcacaaacagattatctct

SEQ ID NO: 1049558 - DNA, 33 bp, Homo sapien
cttatggcaaataggcgcaaacagattatctct

SEQ ID NO: 1049559 - DNA, 33 bp, Homo sapien
tgttctcagttgtagacgtggggttgaaattat

SEQ ID NO: 1049560 - DNA, 33 bp, Homo sapien
tgttctcagttgtagatgtggggttgaaattat

SEQ ID NO: 1049561 - DNA, 33 bp, Homo sapien
atttcttggttttcaacgcatcgatataggtat

SEQ ID NO: 1049562 - DNA, 33 bp, Homo sapien
atttcttggttttcaatgcatcgatataggtat

SEQ ID NO: 1049563 - DNA, 33 bp, Homo sapien
tctttggccattaaaaatgatgatgtcggccag

SEQ ID NO: 1049564 - DNA, 33 bp, Homo sapien
tctttggccattaaaattgatgatgtcggccag

SEQ ID NO: 1049565 - DNA, 33 bp, Homo sapien
taaagtcaatgaattgcaggttgggagaaaaat

SEQ ID NO: 1049566 - DNA, 33 bp, Homo sapien
taaagtcaatgaattggaggttgggagaaaaat

SEQ ID NO: 1049567 - DNA, 33 bp, Homo sapien
cattccaggaatgacaatccttactccaatgct

SEQ ID NO: 1049568 - DNA, 33 bp, Homo sapien
cattccaggaatgacagtccttactccaatgct

SEQ ID NO: 1049569 - DNA, 33 bp, Homo sapien
tccactctaacattcaaatacaaaagcatcaaa

SEQ ID NO: 1049570 - DNA, 33 bp, Homo sapien
tccactctaacattcagatacaaaagcatcaaa

SEQ ID NO: 1049571 - DNA, 33 bp, Homo sapien
tgtgaatgctgttttacgtattccaggaattaa

SEQ ID NO: 1049572 - DNA, 33 bp, Homo sapien
tgtgaatgctgttttatgtattccaggaattaa

SEQ ID NO: 1049573 - DNA, 33 bp, Homo sapien
caatgtgtactcttcagagaaaagggcacacag

SEQ ID NO: 1049574 - DNA, 33 bp, Homo sapien
caatgtgtactcttcatagaaaagggcacacag

SEQ ID NO: 1049575 - DNA, 33 bp, Homo sapien
tggaaaaagaagtgaactgacatcagacccagg

SEQ ID NO: 1049576 - DNA, 33 bp, Homo sapien
tggaaaaagaagtgaattgacatcagacccagg

SEQ ID NO: 1049577 - DNA, 33 bp, Homo sapien
actctctccagcgctaatactgggaagcatacc

SEQ ID NO: 1049578 - DNA, 33 bp, Homo sapien
actctctccagcgctagtactgggaagcatacc

SEQ ID NO: 1049579 - DNA, 33 bp, Homo sapien
gagaggaaaatgccacaaaccaggacaacttac

SEQ ID NO: 1049580 - DNA, 33 bp, Homo sapien
gagaggaaaatgccacgaaccaggacaacttac

SEQ ID NO: 1049581 - DNA, 33 bp, Homo sapien
aggacttttcaaagtacaggaataatgggtgca

SEQ ID NO: 1049582 - DNA, 33 bp, Homo sapien
aggacttttcaaagtagaggaataatgggtgca

SEQ ID NO: 1049583 - DNA, 33 bp, Homo sapien
aagaactttaattccaatgagaaaatcatgtat

SEQ ID NO: 1049584 - DNA, 33 bp, Homo sapien
aagaactttaattccagtgagaaaatcatgtat

SEQ ID NO: 1049585 - DNA, 33 bp, Homo sapien
ggtcacaaatgtaagacaggcatattagatatg

SEQ ID NO: 1049586 - DNA, 33 bp, Homo sapien
ggtcacaaatgtaagataggcatattagatatg

SEQ ID NO: 1049587 - DNA, 33 bp, Homo sapien
tattagagacatacctcaaagtgtttgaacagg

SEQ ID NO: 1049588 - DNA, 33 bp, Homo sapien
tattagagacatacctgaaagtgtttgaacagg

SEQ ID NO: 1049589 - DNA, 33 bp, Homo sapien
gttattgggaaaagtcactagggacacaagtgg

SEQ ID NO: 1049590 - DNA, 33 bp, Homo sapien
gttattgggaaaagtcgctagggacacaagtgg

SEQ ID NO: 1049591 - DNA, 33 bp, Homo sapien
ggggaacttgataacacgcagattctgactctg

SEQ ID NO: 1049592 - DNA, 33 bp, Homo sapien
ggggaacttgataacatgcagattctgactctg

SEQ ID NO: 1049593 - DNA, 33 bp, Homo sapien
gctatcttagaaatgacgcaactactttctcat

SEQ ID NO: 1049594 - DNA, 33 bp, Homo sapien
gctatcttagaaatgatgcaactactttctcat

SEQ ID NO: 1049595 - DNA, 33 bp, Homo sapien
tacactgtcagcctataagaatatgtttttcct

SEQ ID NO: 1049596 - DNA, 33 bp, Homo sapien
tacactgtcagcctatgagaatatgtttttcct

SEQ ID NO: 1049597 - DNA, 33 bp, Homo sapien
gcaagctagaaactcaagaaaagtctctgatat

SEQ ID NO: 1049598 - DNA, 33 bp, Homo sapien
gcaagctagaaactcaggaaaagtctctgatat

SEQ ID NO: 1049599 - DNA, 33 bp, Homo sapien
ggatgtgatgttagcaaaaatacgaagttcagg

SEQ ID NO: 1049600 - DNA, 33 bp, Homo sapien
ggatgtgatgttagcacaaatacgaagttcagg

SEQ ID NO: 1049601 - DNA, 33 bp, Homo sapien
atattcaacttaagccagcttacaggagagcat

SEQ ID NO: 1049602 - DNA, 33 bp, Homo sapien
atattcaacttaagcccgcttacaggagagcat

SEQ ID NO: 1049603 - DNA, 33 bp, Homo sapien
ggaatattaacatttcaattttaacaagtaaat

SEQ ID NO: 1049604 - DNA, 33 bp, Homo sapien
ggaatattaacatttcgattttaacaagtaaat

SEQ ID NO: 1049605 - DNA, 33 bp, Homo sapien
aggatcagcaaaataaatatgtgttggttggct

SEQ ID NO: 1049606 - DNA, 33 bp, Homo sapien
aggatcagcaaaataagtatgtgttggttggct

SEQ ID NO: 1049607 - DNA, 33 bp, Homo sapien
cgtatggtcaaagtcaagaggagagaaatgctt

SEQ ID NO: 1049608 - DNA, 33 bp, Homo sapien
cgtatggtcaaagtcaggaggagagaaatgctt

SEQ ID NO: 1049609 - DNA, 33 bp, Homo sapien
gacttctattggccctaaaaatgtttttctctt

SEQ ID NO: 1049610 - DNA, 33 bp, Homo sapien
gacttctattggccctgaaaatgtttttctctt

SEQ ID NO: 1049611 - DNA, 33 bp, Homo sapien
aagaggtagcttcaaactggtaaggacttttaa

SEQ ID NO: 1049612 - DNA, 33 bp, Homo sapien
aagaggtagcttcaaattggtaaggacttttaa

SEQ ID NO: 1049613 - DNA, 33 bp, Homo sapien
ttgtctattgtagatacgtcagggactactcat

SEQ ID NO: 1049614 - DNA, 33 bp, Homo sapien
ttgtctattgtagatatgtcagggactactcat

SEQ ID NO: 1049615 - DNA, 33 bp, Homo sapien
ttttcttttgaaacacaacgattgcatatttgt

SEQ ID NO: 1049616 - DNA, 33 bp, Homo sapien
ttttcttttgaaacaccacgattgcatatttgt

SEQ ID NO: 1049617 - DNA, 33 bp, Homo sapien
cagctggtctttcctaagatgagtctgctgagg

SEQ ID NO: 1049618 - DNA, 33 bp, Homo sapien
cagctggtctttcctaggatgagtctgctgagg

SEQ ID NO: 1049619 - DNA, 33 bp, Homo sapien
actgcttatttttactcaagacaatgctagtca

SEQ ID NO: 1049620 - DNA, 33 bp, Homo sapien
actgcttatttttactgaagacaatgctagtca

SEQ ID NO: 1049621 - DNA, 33 bp, Homo sapien
gtcatgcacagcataacaacattttggacaaat

SEQ ID NO: 1049622 - DNA, 33 bp, Homo sapien
gtcatgcacagcataataacattttggacaaat

SEQ ID NO: 1049623 - DNA, 33 bp, Homo sapien
tcacaacacgattgagacaaacaacatctgaag

SEQ ID NO: 1049624 - DNA, 33 bp, Homo sapien
tcacaacacgattgaggcaaacaacatctgaag

SEQ ID NO: 1049625 - DNA, 33 bp, Homo sapien
tgcagcgaaatctgtacggttctgtgcaaagag

SEQ ID NO: 1049626 - DNA, 33 bp, Homo sapien
tgcagcgaaatctgtatggttctgtgcaaagag

SEQ ID NO: 1049627 - DNA, 33 bp, Homo sapien
ctgttatcagagtatcaaaaactgtatggctat

SEQ ID NO: 1049628 - DNA, 33 bp, Homo sapien
ctgttatcagagtatccaaaactgtatggctat

SEQ ID NO: 1049629 - DNA, 33 bp, Homo sapien
ggtttgcagagaatccactcagcagaatattgg

SEQ ID NO: 1049630 - DNA, 33 bp, Homo sapien
ggtttgcagagaatccgctcagcagaatattgg

SEQ ID NO: 1049631 - DNA, 33 bp, Homo sapien
cacacgcttacacacaaagcagtaacaggcagc

SEQ ID NO: 1049632 - DNA, 33 bp, Homo sapien
cacacgcttacacacacagcagtaacaggcagc

SEQ ID NO: 1049633 - DNA, 33 bp, Homo sapien
gggcatcccttgagaaagtcacatgggcccaca

SEQ ID NO: 1049634 - DNA, 33 bp, Homo sapien
gggcatcccttgagaaggtcacatgggcccaca

SEQ ID NO: 1049635 - DNA, 33 bp, Homo sapien
cagatgctcttgcaaaatgagttgaaccctttg

SEQ ID NO: 1049636 - DNA, 33 bp, Homo sapien
cagatgctcttgcaaattgagttgaaccctttg

SEQ ID NO: 1049637 - DNA, 33 bp, Homo sapien
tgttttatgtcctcaacgaggtttgatggattg

SEQ ID NO: 1049638 - DNA, 33 bp, Homo sapien
tgttttatgtcctcaatgaggtttgatggattg

SEQ ID NO: 1049639 - DNA, 33 bp, Homo sapien; identical to SEQ ID NO: 1049637

SEQ ID NO: 1049640 - DNA, 33 bp, Homo sapien; identical to SEQ ID NO: 1049638

SEQ ID NO: 1049641 - DNA, 33 bp, Homo sapien
ggctggagagtcagcacatacatagtacttatt

SEQ ID NO: 1049642 - DNA, 33 bp, Homo sapien
ggctggagagtcagcatatacatagtacttatt

SEQ ID NO: 1049643 - DNA, 33 bp, Homo sapien
ttgcagtctagtgataaagttaccaagatctgc

SEQ ID NO: 1049644 - DNA, 33 bp, Homo sapien
ttgcagtctagtgatagagttaccaagatctgc

SEQ ID NO: 1049645 - DNA, 33 bp, Homo sapien
gagttaaatggctgaaccacatggtacttgtag

SEQ ID NO: 1049646 - DNA, 33 bp, Homo sapien
gagttaaatggctgaatcacatggtacttgtag

SEQ ID NO: 1049647 - DNA, 33 bp, Homo sapien
agtatgtctgcaatcaatctacaacatagcaat

SEQ ID NO: 1049648 - DNA, 33 bp, Homo sapien
agtatgtctgcaatcagtctacaacatagcaat

SEQ ID NO: 1049649 - DNA, 33 bp, Homo sapien
acaccagaaagtaatagaaagttgcattcattt

SEQ ID NO: 1049650 - DNA, 33 bp, Homo sapien
acaccagaaagtaatataaagttgcattcattt

SEQ ID NO: 1049651 - DNA, 33 bp, Homo sapien
taattacctaatgagacattttacaccaggcac

SEQ ID NO: 1049652 - DNA, 33 bp, Homo sapien
taattacctaatgagatattttacaccaggcac

SEQ ID NO: 1049653 - DNA, 33 bp, Homo sapien
cctgcacatactcatacaactcatataacttga

SEQ ID NO: 1049654 - DNA, 33 bp, Homo sapien
cctgcacatactcatataactcatataacttga

SEQ ID NO: 1049655 - DNA, 33 bp, Homo sapien
tcatataacttgactaccttaatcctaaataag

SEQ ID NO: 1049656 - DNA, 33 bp, Homo sapien
tcatataacttgactagcttaatcctaaataag

SEQ ID NO: 1049657 - DNA, 33 bp, Homo sapien
gtctagcccattaatcgccaggcttttttctaa

SEQ ID NO: 1049658 - DNA, 33 bp, Homo sapien
gtctagcccattaatctccaggcttttttctaa

SEQ ID NO: 1049659 - DNA, 33 bp, Homo sapien
caagtcaaatggagtaaaactaaaagagagtct

SEQ ID NO: 1049660 - DNA, 33 bp, Homo sapien
caagtcaaatggagtacaactaaaagagagtct

SEQ ID NO: 1049661 - DNA, 33 bp, Homo sapien
gtgtttagtgtagaataagtggaaatatgtgag

SEQ ID NO: 1049662 - DNA, 33 bp, Homo sapien
gtgtttagtgtagaatcagtggaaatatgtgag

SEQ ID NO: 1049663 - DNA, 33 bp, Homo sapien
taaagagagatcctacgagttctttcaagtgtc

SEQ ID NO: 1049664 - DNA, 33 bp, Homo sapien
taaagagagatcctactagttctttcaagtgtc

SEQ ID NO: 1049665 - DNA, 33 bp, Homo sapien
ctctctgatgtccaaccataatttccgatgtcc

SEQ ID NO: 1049666 - DNA, 33 bp, Homo sapien
ctctctgatgtccaactataatttccgatgtcc

SEQ ID NO: 1049667 - DNA, 33 bp, Homo sapien
tttgagaagcatctagcatatgaggaaaagttt

SEQ ID NO: 1049668 - DNA, 33 bp, Homo sapien
tttgagaagcatctagtatatgaggaaaagttt

SEQ ID NO: 1049669 - DNA, 33 bp, Homo sapien; identical to SEQ ID NO: 1049667

SEQ ID NO: 1049670 - DNA, 33 bp, Homo sapien; identical to SEQ ID NO: 1049668

SEQ ID NO: 1049671 - DNA, 33 bp, Homo sapien
tagttacaagaccacaaataagtcccatgctga

SEQ ID NO: 1049672 - DNA, 33 bp, Homo sapien
tagttacaagaccacagataagtcccatgctga

SEQ ID NO: 1049673 - DNA, 33 bp, Homo sapien
ttctgaccatatgacaaatggaatggatagaag

SEQ ID NO: 1049674 - DNA, 33 bp, Homo sapien
ttctgaccatatgacagatggaatggatagaag

SEQ ID NO: 1049675 - DNA, 33 bp, Homo sapien
acactggggttgtcaacagtcaaattaaatcct

SEQ ID NO: 1049676 - DNA, 33 bp, Homo sapien
acactggggttgtcaatagtcaaattaaatcct

SEQ ID NO: 1049677 - DNA, 33 bp, Homo sapien
tttttgagtggtagaaaataaagtaacttttaa

SEQ ID NO: 1049678 - DNA, 33 bp, Homo sapien
tttttgagtggtagaagataaagtaacttttaa

SEQ ID NO: 1049679 - DNA, 33 bp, Homo sapien
acctgacttgtttgaacgttatgtaatcgttac

SEQ ID NO: 1049680 - DNA, 33 bp, Homo sapien
acctgacttgtttgaatgttatgtaatcgttac

SEQ ID NO: 1049681 - DNA, 33 bp, Homo sapien
atgagtcgttttaaaacttgagatatatttgaa

SEQ ID NO: 1049682 - DNA, 33 bp, Homo sapien
atgagtcgttttaaaatttgagatatatttgaa

SEQ ID NO: 1049683 - DNA, 33 bp, Homo sapien
ctggtttcccaaactacgagaaagagtaaattt

SEQ ID NO: 1049684 - DNA, 33 bp, Homo sapien
ctggtttcccaaactatgagaaagagtaaattt

SEQ ID NO: 1049685 - DNA, 33 bp, Homo sapien
tagcatgacagatgccagatgataattttgtgt

SEQ ID NO: 1049686 - DNA, 33 bp, Homo sapien
tagcatgacagatgccggatgataattttgtgt

SEQ ID NO: 1049687 - DNA, 33 bp, Homo sapien
gcctctcaggtcctaacgacaaagcactcatcc

SEQ ID NO: 1049688 - DNA, 33 bp, Homo sapien
gcctctcaggtcctaatgacaaagcactcatcc

SEQ ID NO: 1049689 - DNA, 33 bp, Homo sapien
aatattccactcaacaaaagaagcctggaaatc

SEQ ID NO: 1049690 - DNA, 33 bp, Homo sapien
aatattccactcaacagaagaagcctggaaatc

SEQ ID NO: 1049691 - DNA, 33 bp, Homo sapien
tgccgattttacaggacgatagagactttaaaa

SEQ ID NO: 1049692 - DNA, 33 bp, Homo sapien
tgccgattttacaggatgatagagactttaaaa

SEQ ID NO: 1049693 - DNA, 33 bp, Homo sapien
tgccacttagtcaagaaggtgtttaatacgtgc

SEQ ID NO: 1049694 - DNA, 33 bp, Homo sapien
tgccacttagtcaagagggtgtttaatacgtgc

SEQ ID NO: 1049695 - DNA, 33 bp, Homo sapien
ctctctagagtgattccatgccagaaaaaaacc

SEQ ID NO: 1049696 - DNA, 33 bp, Homo sapien
ctctctagagtgattctatgccagaaaaaaacc

SEQ ID NO: 1049697 - DNA, 33 bp, Homo sapien
aacaaaagggcacttacacgatgttgatctatg

SEQ ID NO: 1049698 - DNA, 33 bp, Homo sapien
aacaaaagggcacttatacgatgttgatctatg

SEQ ID NO: 1049699 - DNA, 33 bp, Homo sapien
gacttctaaccctctaggaaggtggagttaagg

SEQ ID NO: 1049700 - DNA, 33 bp, Homo sapien
gacttctaaccctctatgaaggtggagttaagg

SEQ ID NO: 1049701 - DNA, 33 bp, Homo sapien
tagacactgttgaatcactaagctgtaaacaat

SEQ ID NO: 1049702 - DNA, 33 bp, Homo sapien
tagacactgttgaatcgctaagctgtaaacaat

SEQ ID NO: 1049703 - DNA, 33 bp, Homo sapien
aggttgcagcatttaaaaagggatcatgaaaga

SEQ ID NO: 1049704 - DNA, 33 bp, Homo sapien
aggttgcagcatttaagaagggatcatgaaaga

SEQ ID NO: 1049705 - DNA, 33 bp, Homo sapien
ctcctgggaatccctacggtacaagcctgaaat

SEQ ID NO: 1049706 - DNA, 33 bp, Homo sapien
ctcctgggaatccctatggtacaagcctgaaat

SEQ ID NO: 1049707 - DNA, 33 bp, Homo sapien
tctctcttttttgatacaaatgcatgctgaagg

SEQ ID NO: 1049708 - DNA, 33 bp, Homo sapien
tctctcttttttgatataaatgcatgctgaagg

SEQ ID NO: 1049709 - DNA, 33 bp, Homo sapien
aagttgaagaaatgtacggttcccatggtgttt

SEQ ID NO: 1049710 - DNA, 33 bp, Homo sapien
aagttgaagaaatgtagggttcccatggtgttt

SEQ ID NO: 1049711 - DNA, 33 bp, Homo sapien
cagcaactatgtgaaacgaaaaagatattacca

SEQ ID NO: 1049712 - DNA, 33 bp, Homo sapien
cagcaactatgtgaaatgaaaaagatattacca

SEQ ID NO: 1049713 - DNA, 33 bp, Homo sapien
aggaatcatgtgctcccaagtgtgtggaccaag

SEQ ID NO: 1049714 - DNA, 33 bp, Homo sapien
aggaatcatgtgctcctaagtgtgtggaccaag

SEQ ID NO: 1049715 - DNA, 33 bp, Homo sapien
aattgtgacaaccaaaactacctgcaggcattg

SEQ ID NO: 1049716 - DNA, 33 bp, Homo sapien
aattgtgacaaccaaagctacctgcaggcattg

SEQ ID NO: 1049717 - DNA, 33 bp, Homo sapien
ccactccaagtctttaacacctaacgcccatcc

SEQ ID NO: 1049718 - DNA, 33 bp, Homo sapien
ccactccaagtctttagcacctaacgcccatcc

SEQ ID NO: 1049719 - DNA, 33 bp, Homo sapien
gagaaatattctcacaagagtgccttcagtacc

SEQ ID NO: 1049720 - DNA, 33 bp, Homo sapien
gagaaatattctcacaggagtgccttcagtacc

SEQ ID NO: 1049721 - DNA, 33 bp, Homo sapien
ttgaaccaaacagatccagtggcctgaatttaa

SEQ ID NO: 1049722 - DNA, 33 bp, Homo sapien
ttgaaccaaacagatctagtggcctgaatttaa

SEQ ID NO: 1049723 - DNA, 33 bp, Homo sapien
aatgaggtcaaaactacgagcagattgtatgga

SEQ ID NO: 1049724 - DNA, 33 bp, Homo sapien
aatgaggtcaaaactatgagcagattgtatgga

SEQ ID NO: 1049725 - DNA, 33 bp, Homo sapien
ctccttatccacaagaagctcccactcacagac

SEQ ID NO: 1049726 - DNA, 33 bp, Homo sapien
ctccttatccacaagaggctcccactcacagac

SEQ ID NO: 1049727 - DNA, 33 bp, Homo sapien
gagtagcttgtagagaagtataggccatttgtt

SEQ ID NO: 1049728 - DNA, 33 bp, Homo sapien
gagtagcttgtagagaggtataggccatttgtt

SEQ ID NO: 1049729 - DNA, 33 bp, Homo sapien
aaaatgccattggaaaaatctccacaaccgcta

SEQ ID NO: 1049730 - DNA, 33 bp, Homo sapien
aaaatgccattggaaatatctccacaaccgcta

SEQ ID NO: 1049731 - DNA, 33 bp, Homo sapien
cagagctgcacaagaactgaagaccaggttata

SEQ ID NO: 1049732 - DNA, 33 bp, Homo sapien
cagagctgcacaagaattgaagaccaggttata

SEQ ID NO: 1049733 - DNA, 33 bp, Homo sapien
cacaaggaattcttcaaaaagcaaaggaggtcc

SEQ ID NO: 1049734 - DNA, 33 bp, Homo sapien
cacaaggaattcttcacaaagcaaaggaggtcc

SEQ ID NO: 1049735 - DNA, 33 bp, Homo sapien
taaaccaacgtttcataaaaagcagtgtcttca

SEQ ID NO: 1049736 - DNA, 33 bp, Homo sapien
taaaccaacgtttcatcaaaagcagtgtcttca

SEQ ID NO: 1049737 - DNA, 33 bp, Homo sapien
atttttaaaaagagccaactattatcattctgc

SEQ ID NO: 1049738 - DNA, 33 bp, Homo sapien
atttttaaaaagagcccactattatcattctgc

SEQ ID NO: 1049739 - DNA, 33 bp, Homo sapien; identical to SEQ ID NO: 1049737

SEQ ID NO: 1049740 - DNA, 33 bp, Homo sapien; identical to SEQ ID NO: 1049738

SEQ ID NO: 1049741 - DNA, 33 bp, Homo sapien
aggggtccagaaggcccgaaaccaaacaacttc

SEQ ID NO: 1049742 - DNA, 33 bp, Homo sapien
aggggtccagaaggcctgaaaccaaacaacttc

SEQ ID NO: 1049743 - DNA, 33 bp, Homo sapien
aagcttttgaaggactaagctaagagagctcct

SEQ ID NO: 1049744 - DNA, 33 bp, Homo sapien
aagcttttgaaggactgagctaagagagctcct

SEQ ID NO: 1049745 - DNA, 33 bp, Homo sapien
aggttggtgttctctcacatggaaattcactta

SEQ ID NO: 1049746 - DNA, 33 bp, Homo sapien
aggttggtgttctctcgcatggaaattcactta

SEQ ID NO: 1049747 - DNA, 33 bp, Homo sapien
cgcatcaccgacgtaacgtcccgcgtggagccc

SEQ ID NO: 1049748 - DNA, 33 bp, Homo sapien
cgcatcaccgacgtaatgtcccgcgtggagccc

SEQ ID NO: 1049749 - DNA, 33 bp, Homo sapien
catactggcctctgggaataggaagattaatgc

SEQ ID NO: 1049750 - DNA, 33 bp, Homo sapien
catactggcctctggggataggaagattaatgc

SEQ ID NO: 1049751 - DNA, 33 bp, Homo sapien
caaaaatgtcctaacacggtatccactcagatc

SEQ ID NO: 1049752 - DNA, 33 bp, Homo sapien
caaaaatgtcctaacatggtatccactcagatc

SEQ ID NO: 1049753 - DNA, 33 bp, Homo sapien
tctggttattcacttacgggaggcttatcaatt

SEQ ID NO: 1049754 - DNA, 33 bp, Homo sapien
tctggttattcacttatgggaggcttatcaatt

SEQ ID NO: 1049755 - DNA, 33 bp, Homo sapien
tgttctgtcctcataacatggtaccgtttaatc

SEQ ID NO: 1049756 - DNA, 33 bp, Homo sapien
tgttctgtcctcataatatggtaccgtttaatc

SEQ ID NO: 1049757 - DNA, 33 bp, Homo sapien
actagctaaaatgtaacccagtaggaaggtcaa

SEQ ID NO: 1049758 - DNA, 33 bp, Homo sapien
actagctaaaatgtaatccagtaggaaggtcaa

SEQ ID NO: 1049759 - DNA, 33 bp, Homo sapien
acctgaataaaaagtacgcagcaactgacaact

SEQ ID NO: 1049760 - DNA, 33 bp, Homo sapien
acctgaataaaaagtaggcagcaactgacaact

SEQ ID NO: 1049761 - DNA, 33 bp, Homo sapien
aatgtagttttaaaaaatgcagatttggttata

SEQ ID NO: 1049762 - DNA, 33 bp, Homo sapien
aatgtagttttaaaaagtgcagatttggttata

SEQ ID NO: 1049763 - DNA, 33 bp, Homo sapien
tttactaatatgtttaagagacaggtattaaag

SEQ ID NO: 1049764 - DNA, 33 bp, Homo sapien
tttactaatatgtttaggagacaggtattaaag

SEQ ID NO: 1049765 - DNA, 33 bp, Homo sapien
ctccagcaaccttctgcaaatagtctcattcac

SEQ ID NO: 1049766 - DNA, 33 bp, Homo sapien
ctccagcaaccttctggaaatagtctcattcac

SEQ ID NO: 1049767 - DNA, 33 bp, Homo sapien
tccggaggttgtggtcaacaatccacaaacagt

SEQ ID NO: 1049768 - DNA, 33 bp, Homo sapien
tccggaggttgtggtcgacaatccacaaacagt

SEQ ID NO: 1049769 - DNA, 33 bp, Homo sapien
agtaagatattcaaagaaccttcttagcatcac

SEQ ID NO: 1049770 - DNA, 33 bp, Homo sapien
agtaagatattcaaaggaccttcttagcatcac

SEQ ID NO: 1049771 - DNA, 33 bp, Homo sapien
cgtttcccaaaccacaatatgggaatttctgtt

SEQ ID NO: 1049772 - DNA, 33 bp, Homo sapien
cgtttcccaaaccacagtatgggaatttctgtt

SEQ ID NO: 1049773 - DNA, 33 bp, Homo sapien
ccttcactcattggaaacaaagacttaaatcac

SEQ ID NO: 1049774 - DNA, 33 bp, Homo sapien
ccttcactcattggaagcaaagacttaaatcac

SEQ ID NO: 1049775 - DNA, 33 bp, Homo sapien
taaaaaggtaaattccagactctcgtgaagata

SEQ ID NO: 1049776 - DNA, 33 bp, Homo sapien
taaaaaggtaaattccggactctcgtgaagata

SEQ ID NO: 1049777 - DNA, 33 bp, Homo sapien
ggttgtttgtggcataatagtcatgtactggaa

SEQ ID NO: 1049778 - DNA, 33 bp, Homo sapien
ggttgtttgtggcatagtagtcatgtactggaa

SEQ ID NO: 1049779 - DNA, 33 bp, Homo sapien
aaccagaacagtaaccaataacacctcattcac

SEQ ID NO: 1049780 - DNA, 33 bp, Homo sapien
aaccagaacagtaaccgataacacctcattcac

SEQ ID NO: 1049781 - DNA, 33 bp, Homo sapien
gtatatatgggagacacaagagtgaagctcaac

SEQ ID NO: 1049782 - DNA, 33 bp, Homo sapien
gtatatatgggagacataagagtgaagctcaac

SEQ ID NO: 1049783 - DNA, 33 bp, Homo sapien
tcgtcactttaacgtaccatttttgtattaaaa

SEQ ID NO: 1049784 - DNA, 33 bp, Homo sapien
tcgtcactttaacgtatcatttttgtattaaaa

SEQ ID NO: 1049785 - DNA, 33 bp, Homo sapien
gaaaagattatcaaaccggcataagaataaaga

SEQ ID NO: 1049786 - DNA, 33 bp, Homo sapien
gaaaagattatcaaactggcataagaataaaga

SEQ ID NO: 1049787 - DNA, 33 bp, Homo sapien
tcctcttaatctaagacctgccatttttgttaa

SEQ ID NO: 1049788 - DNA, 33 bp, Homo sapien
tcctcttaatctaagatctgccatttttgttaa

SEQ ID NO: 1049789 - DNA, 33 bp, Homo sapien
ttagcaccatgcagtcccagaaacaaagaaggg

SEQ ID NO: 1049790 - DNA, 33 bp, Homo sapien
ttagcaccatgcagtctcagaaacaaagaaggg

SEQ ID NO: 1049791 - DNA, 33 bp, Homo sapien
cacatctgtctcattaacatacgaaataaagtt

SEQ ID NO: 1049792 - DNA, 33 bp, Homo sapien
cacatctgtctcattagcatacgaaataaagtt

SEQ ID NO: 1049793 - DNA, 33 bp, Homo sapien
tgttagtattttcaccaacacaatgacctcccc

SEQ ID NO: 1049794 - DNA, 33 bp, Homo sapien
tgttagtattttcaccgacacaatgacctcccc

SEQ ID NO: 1049795 - DNA, 33 bp, Homo sapien; identical to SEQ ID NO: 1049793

SEQ ID NO: 1049796 - DNA, 33 bp, Homo sapien; identical to SEQ ID NO: 1049794

SEQ ID NO: 1049797 - DNA, 33 bp, Homo sapien
ttttacttatgtgaccccctcggtaacaaggaa

SEQ ID NO: 1049798 - DNA, 33 bp, Homo sapien
ttttacttatgtgacctcctcggtaacaaggaa

SEQ ID NO: 1049799 - DNA, 33 bp, Homo sapien
gaccaacttctatacagccattacttttttggg

SEQ ID NO: 1049800 - DNA, 33 bp, Homo sapien
gaccaacttctatacatccattacttttttggg

SEQ ID NO: 1049801 - DNA, 33 bp, Homo sapien
ccatggagatcaaccccaccaacagaacaaata

SEQ ID NO: 1049802 - DNA, 33 bp, Homo sapien
ccatggagatcaaccctaccaacagaacaaata

SEQ ID NO: 1049803 - DNA, 33 bp, Homo sapien
taatccctgagcatgacacggcacctagttcaa

SEQ ID NO: 1049804 - DNA, 33 bp, Homo sapien
taatccctgagcatgatacggcacctagttcaa

SEQ ID NO: 1049805 - DNA, 33 bp, Homo sapien
gagaaaattaagtgcacctaggctagtcaccaa

SEQ ID NO: 1049806 - DNA, 33 bp, Homo sapien
gagaaaattaagtgcatctaggctagtcaccaa

SEQ ID NO: 1049807 - DNA, 33 bp, Homo sapien
taagagatggagacgcaatgctcaggggataga

SEQ ID NO: 1049808 - DNA, 33 bp, Homo sapien
taagagatggagacgcgatgctcaggggataga

SEQ ID NO: 1049809 - DNA, 33 bp, Homo sapien
aggttgaccttttgtacagagtatagaccctgt

SEQ ID NO: 1049810 - DNA, 33 bp, Homo sapien
aggttgaccttttgtatagagtatagaccctgt

SEQ ID NO: 1049811 - DNA, 33 bp, Homo sapien
agactggatatggtcccacctggagctgtattt

SEQ ID NO: 1049812 - DNA, 33 bp, Homo sapien
agactggatatggtccgacctggagctgtattt

SEQ ID NO: 1049813 - DNA, 33 bp, Homo sapien
gggaacaggcaatgcaatcaatgtgttcaacaa

SEQ ID NO: 1049814 - DNA, 33 bp, Homo sapien
gggaacaggcaatgcagtcaatgtgttcaacaa

SEQ ID NO: 1049815 - DNA, 33 bp, Homo sapien
gaacaacacatgacgacgacctaaagctaaaga

SEQ ID NO: 1049816 - DNA, 33 bp, Homo sapien
gaacaacacatgacgatgacctaaagctaaaga

SEQ ID NO: 1049817 - DNA, 33 bp, Homo sapien; identical to SEQ ID NO: 1049815

SEQ ID NO: 1049818 - DNA, 33 bp, Homo sapien; identical to SEQ ID NO: 1049816

SEQ ID NO: 1049819 - DNA, 33 bp, Homo sapien
taagaacctgagtctcacaattgataaaggaga

SEQ ID NO: 1049820 - DNA, 33 bp, Homo sapien
taagaacctgagtctcgcaattgataaaggaga

SEQ ID NO: 1049821 - DNA, 33 bp, Homo sapien
taccagaaaacggggaagtactgtcattgttaa

SEQ ID NO: 1049822 - DNA, 33 bp, Homo sapien
taccagaaaacggggacgtactgtcattgttaa

SEQ ID NO: 1049823 - DNA, 33 bp, Homo sapien
gctctgaaaacactgccctcagacgttgcaagt

SEQ ID NO: 1049824 - DNA, 33 bp, Homo sapien
gctctgaaaacactgctctcagacgttgcaagt

SEQ ID NO: 1049825 - DNA, 33 bp, Homo sapien
ctaggtaagtggctctcaactatagctgcacat

SEQ ID NO: 1049826 - DNA, 33 bp, Homo sapien
ctaggtaagtggctctgaactatagctgcacat

SEQ ID NO: 1049827 - DNA, 33 bp, Homo sapien
aagcaataaaaccagacgctgaccttgatttac

SEQ ID NO: 1049828 - DNA, 33 bp, Homo sapien
aagcaataaaaccagatgctgaccttgatttac

SEQ ID NO: 1049829 - DNA, 33 bp, Homo sapien
ccttgggtcattctaaagtacagccaaggataa

SEQ ID NO: 1049830 - DNA, 33 bp, Homo sapien
ccttgggtcattctaatgtacagccaaggataa

SEQ ID NO: 1049831 - DNA, 33 bp, Homo sapien
atgatcctttaagaaacgaagaatactcatctt

SEQ ID NO: 1049832 - DNA, 33 bp, Homo sapien
atgatcctttaagaaatgaagaatactcatctt

SEQ ID NO: 1049833 - DNA, 33 bp, Homo sapien
tgataaagccagtaacaatcacatttatttggt

SEQ ID NO: 1049834 - DNA, 33 bp, Homo sapien
tgataaagccagtaacgatcacatttatttggt

SEQ ID NO: 1049835 - DNA, 33 bp, Homo sapien
tgcaaaagtttaatacacatcagcaaaataaac

SEQ ID NO: 1049836 - DNA, 33 bp, Homo sapien
tgcaaaagtttaatacgcatcagcaaaataaac

SEQ ID NO: 1049837 - DNA, 33 bp, Homo sapien
agtggctgcaatagggaatacacacattcttag

SEQ ID NO: 1049838 - DNA, 33 bp, Homo sapien
agtggctgcaatagggcatacacacattcttag

SEQ ID NO: 1049839 - DNA, 33 bp, Homo sapien
tttgaaaattggttaacggtattctcatttttc

SEQ ID NO: 1049840 - DNA, 33 bp, Homo sapien
tttgaaaattggttaatggtattctcatttttc

SEQ ID NO: 1049841 - DNA, 33 bp, Homo sapien
gatacagagataggtacagatagacagtgtatt

SEQ ID NO: 1049842 - DNA, 33 bp, Homo sapien
gatacagagataggtatagatagacagtgtatt

SEQ ID NO: 1049843 - DNA, 33 bp, Homo sapien
gcccactgcctctttaaaggaccaacaaagagg

SEQ ID NO: 1049844 - DNA, 33 bp, Homo sapien
gcccactgcctctttataggaccaacaaagagg

SEQ ID NO: 1049845 - DNA, 33 bp, Homo sapien
accatatttggtatgagacaagttacttgattt

SEQ ID NO: 1049846 - DNA, 33 bp, Homo sapien
accatatttggtatgatacaagttacttgattt

SEQ ID NO: 1049847 - DNA, 33 bp, Homo sapien
gagtcaatggggcttaaatgtccaaacttacat

SEQ ID NO: 1049848 - DNA, 33 bp, Homo sapien
gagtcaatggggcttagatgtccaaacttacat

SEQ ID NO: 1049849 - DNA, 33 bp, Homo sapien
tagtattttatgttggcatatcaatgtaagttt

SEQ ID NO: 1049850 - DNA, 33 bp, Homo sapien
tagtattttatgttgggatatcaatgtaagttt

SEQ ID NO: 1049851 - DNA, 33 bp, Homo sapien
tttagcataagcctaaacaatatccaggagcaa

SEQ ID NO: 1049852 - DNA, 33 bp, Homo sapien
tttagcataagcctaagcaatatccaggagcaa

SEQ ID NO: 1049853 - DNA, 33 bp, Homo sapien
atgacctgaatgaaataagctctttaattgtac

SEQ ID NO: 1049854 - DNA, 33 bp, Homo sapien
atgacctgaatgaaatcagctctttaattgtac

SEQ ID NO: 1049855 - DNA, 33 bp, Homo sapien
gactgactttatagaacagaatcatcattccaa

SEQ ID NO: 1049856 - DNA, 33 bp, Homo sapien
gactgactttatagaagagaatcatcattccaa

SEQ ID NO: 1049857 - DNA, 33 bp, Homo sapien
ctaacttggccttttaaaatctctgtgcaaaga

SEQ ID NO: 1049858 - DNA, 33 bp, Homo sapien
ctaacttggccttttataatctctgtgcaaaga

SEQ ID NO: 1049859 - DNA, 33 bp, Homo sapien
ttccttgaattaactaacacacagttctttaaa

SEQ ID NO: 1049860 - DNA, 33 bp, Homo sapien
ttccttgaattaactatcacacagttctttaaa

SEQ ID NO: 1049861 - DNA, 33 bp, Homo sapien
agtttgtgccttaaggaaaaatttgatgtggac

SEQ ID NO: 1049862 - DNA, 33 bp, Homo sapien
agtttgtgccttaagggaaaatttgatgtggac

SEQ ID NO: 1049863 - DNA, 33 bp, Homo sapien
atgtacagacagatgaatagcagttaccaatgg

SEQ ID NO: 1049864 - DNA, 33 bp, Homo sapien
atgtacagacagatgactagcagttaccaatgg

SEQ ID NO: 1049865 - DNA, 33 bp, Homo sapien
tgctatgaatccttcaaaatgggtgaaaccctc

SEQ ID NO: 1049866 - DNA, 33 bp, Homo sapien
tgctatgaatccttcagaatgggtgaaaccctc

SEQ ID NO: 1049867 - DNA, 33 bp, Homo sapien
tatcacctttgagataagaagataaacacaaga

SEQ ID NO: 1049868 - DNA, 33 bp, Homo sapien
tatcacctttgagatacgaagataaacacaaga

SEQ ID NO: 1049869 - DNA, 33 bp, Homo sapien
cttgattgattgaagacgaaaatgtctgacatc

SEQ ID NO: 1049870 - DNA, 33 bp, Homo sapien
cttgattgattgaagatgaaaatgtctgacatc

SEQ ID NO: 1049871 - DNA, 33 bp, Homo sapien
tacttgtgagcctaaacgaatatgttagctaaa

SEQ ID NO: 1049872 - DNA, 33 bp, Homo sapien
tacttgtgagcctaaatgaatatgttagctaaa

SEQ ID NO: 1049873 - DNA, 33 bp, Homo sapien
tgctgataaaaagtgaaatgaactgcttgaaga

SEQ ID NO: 1049874 - DNA, 33 bp, Homo sapien
tgctgataaaaagtgatatgaactgcttgaaga

SEQ ID NO: 1049875 - DNA, 33 bp, Homo sapien
ttcttagccattacacaatcacaaaactgggaa

SEQ ID NO: 1049876 - DNA, 33 bp, Homo sapien
ttcttagccattacacgatcacaaaactgggaa

SEQ ID NO: 1049877 - DNA, 33 bp, Homo sapien
gctgtttccgccttgacagggatccagactgct

SEQ ID NO: 1049878 - DNA, 33 bp, Homo sapien
gctgtttccgccttgatagggatccagactgct

SEQ ID NO: 1049879 - DNA, 33 bp, Homo sapien
gtcatgtcagtaataccaagagggctgataatg

SEQ ID NO: 1049880 - DNA, 33 bp, Homo sapien
gtcatgtcagtaatacgaagagggctgataatg

SEQ ID NO: 1049881 - DNA, 33 bp, Homo sapien
ttaatgcttgtgaacccgaagaactctctgtca

SEQ ID NO: 1049882 - DNA, 33 bp, Homo sapien
ttaatgcttgtgaacctgaagaactctctgtca

SEQ ID NO: 1049883 - DNA, 33 bp, Homo sapien
agcttttcaggaactactagactgttttctgaa

SEQ ID NO: 1049884 - DNA, 33 bp, Homo sapien
agcttttcaggaactagtagactgttttctgaa

SEQ ID NO: 1049885 - DNA, 33 bp, Homo sapien
ttaaaattagcatcaaattagtaagcatcacta

SEQ ID NO: 1049886 - DNA, 33 bp, Homo sapien
ttaaaattagcatcaatttagtaagcatcacta

SEQ ID NO: 1049887 - DNA, 33 bp, Homo sapien
tgaggaagataaaataaaaagcagctccccttc

SEQ ID NO: 1049888 - DNA, 33 bp, Homo sapien
tgaggaagataaaatagaaagcagctccccttc

SEQ ID NO: 1049889 - DNA, 33 bp, Homo sapien
gcccttaaagtttcacaaaattcaagataattt

SEQ ID NO: 1049890 - DNA, 33 bp, Homo sapien
gcccttaaagtttcaccaaattcaagataattt

SEQ ID NO: 1049891 - DNA, 33 bp, Homo sapien
ttcacttcaccctataacatacgcactttccca

SEQ ID NO: 1049892 - DNA, 33 bp, Homo sapien
ttcacttcaccctatatcatacgcactttccca

SEQ ID NO: 1049893 - DNA, 33 bp, Homo sapien
tcctgttccagatagaaggtgtttccaagactt

SEQ ID NO: 1049894 - DNA, 33 bp, Homo sapien
tcctgttccagatagagggtgtttccaagactt

SEQ ID NO: 1049895 - DNA, 33 bp, Homo sapien; identical to SEQ ID NO: 1049893

SEQ ID NO: 1049896 - DNA, 33 bp, Homo sapien; identical to SEQ ID NO: 1049894

SEQ ID NO: 1049897 - DNA, 33 bp, Homo sapien
gaattatccatatgaacgtttaagagcctataa

SEQ ID NO: 1049898 - DNA, 33 bp, Homo sapien
gaattatccatatgaatgtttaagagcctataa

SEQ ID NO: 1049899 - DNA, 33 bp, Homo sapien
attgctatgaggaatacaaaacaagttgatagg

SEQ ID NO: 1049900 - DNA, 33 bp, Homo sapien
attgctatgaggaatagaaaacaagttgatagg

SEQ ID NO: 1049901 - DNA, 33 bp, Homo sapien; identical to SEQ ID NO: 1049899

SEQ ID NO: 1049902 - DNA, 33 bp, Homo sapien; identical to SEQ ID NO: 1049900

SEQ ID NO: 1049903 - DNA, 33 bp, Homo sapien
ttattcaaagagtccaatagagtagatataagg

SEQ ID NO: 1049904 - DNA, 33 bp, Homo sapien
ttattcaaagagtccagtagagtagatataagg

SEQ ID NO: 1049905 - DNA, 33 bp, Homo sapien; identical to SEQ ID NO: 1049903

SEQ ID NO: 1049906 - DNA, 33 bp, Homo sapien; identical to SEQ ID NO: 1049904

SEQ ID NO: 1049907 - DNA, 33 bp, Homo sapien
tctgagttttaagaacaaaatacagcacttata

SEQ ID NO: 1049908 - DNA, 33 bp, Homo sapien
tctgagttttaagaaccaaatacagcacttata

SEQ ID NO: 1049909 - DNA, 33 bp, Homo sapien
tgatcacagttacacaagtaccctaacagcagc

SEQ ID NO: 1049910 - DNA, 33 bp, Homo sapien
tgatcacagttacacaggtaccctaacagcagc

SEQ ID NO: 1049911 - DNA, 33 bp, Homo sapien
ggtgttggctatgaaaaggtgttgcaaaaagga

SEQ ID NO: 1049912 - DNA, 33 bp, Homo sapien
ggtgttggctatgaaacggtgttgcaaaaagga

SEQ ID NO: 1049913 - DNA, 33 bp, Homo sapien
tgaatcagtagacaaacaagtatgcaatgtgca

SEQ ID NO: 1049914 - DNA, 33 bp, Homo sapien
tgaatcagtagacaaataagtatgcaatgtgca

SEQ ID NO: 1049915 - DNA, 33 bp, Homo sapien
tggattaagacacttacagaaagacatcttggt

SEQ ID NO: 1049916 - DNA, 33 bp, Homo sapien
tggattaagacacttatagaaagacatcttggt

SEQ ID NO: 1049917 - DNA, 33 bp, Homo sapien
ctttaccccaaatggaagactctgagattgccg

SEQ ID NO: 1049918 - DNA, 33 bp, Homo sapien
ctttaccccaaatggaggactctgagattgccg

SEQ ID NO: 1049919 - DNA, 33 bp, Homo sapien
aaatgttaaatgtatgcatattgacaattacac

SEQ ID NO: 1049920 - DNA, 33 bp, Homo sapien
aaatgttaaatgtatgtatattgacaattacac

SEQ ID NO: 1049921 - DNA, 33 bp, Homo sapien
cctcccatagctcccaagtccaaagtcactggt

SEQ ID NO: 1049922 - DNA, 33 bp, Homo sapien
cctcccatagctcccatgtccaaagtcactggt

SEQ ID NO: 1049923 - DNA, 33 bp, Homo sapien
caggtaatgcaatatgaaagtgcctatacattg

SEQ ID NO: 1049924 - DNA, 33 bp, Homo sapien
caggtaatgcaatatggaagtgcctatacattg

SEQ ID NO: 1049925 - DNA, 33 bp, Homo sapien
gagaattcttattatcaactgcattattcaaca

SEQ ID NO: 1049926 - DNA, 33 bp, Homo sapien
gagaattcttattatcgactgcattattcaaca

SEQ ID NO: 1049927 - DNA, 33 bp, Homo sapien
gagaatcactgctctaaatctatcttaacttga

SEQ ID NO: 1049928 - DNA, 33 bp, Homo sapien
gagaatcactgctctagatctatcttaacttga

SEQ ID NO: 1049929 - DNA, 33 bp, Homo sapien
ctgggttgtagctgaaaacaaaacagggctttc

SEQ ID NO: 1049930 - DNA, 33 bp, Homo sapien
ctgggttgtagctgaagacaaaacagggctttc

SEQ ID NO: 1049931 - DNA, 33 bp, Homo sapien
cctgtctttgtaaatacagcttttttggcacat

SEQ ID NO: 1049932 - DNA, 33 bp, Homo sapien
cctgtctttgtaaatatagcttttttggcacat

SEQ ID NO: 1049933 - DNA, 33 bp, Homo sapien
cttttcctgtagagagacatacttcgggctctg

SEQ ID NO: 1049934 - DNA, 33 bp, Homo sapien
cttttcctgtagagaggcatacttcgggctctg

SEQ ID NO: 1049935 - DNA, 33 bp, Homo sapien
accagtctcagagaaacgaaattcaatgtcccc

SEQ ID NO: 1049936 - DNA, 33 bp, Homo sapien
accagtctcagagaaatgaaattcaatgtcccc

SEQ ID NO: 1049937 - DNA, 33 bp, Homo sapien
ttgggtgaaaccgacaccttgtcttctacgtta

SEQ ID NO: 1049938 - DNA, 33 bp, Homo sapien
ttgggtgaaaccgacatcttgtcttctacgtta

SEQ ID NO: 1049939 - DNA, 33 bp, Homo sapien
actgataaaatgggaaacgagcaaaagagacca

SEQ ID NO: 1049940 - DNA, 33 bp, Homo sapien
actgataaaatgggaagcgagcaaaagagacca

SEQ ID NO: 1049941 - DNA, 33 bp, Homo sapien
gctctgttctcaaataagaaacatgaaatatca

SEQ ID NO: 1049942 - DNA, 33 bp, Homo sapien
gctctgttctcaaatatgaaacatgaaatatca

SEQ ID NO: 1049943 - DNA, 33 bp, Homo sapien
acagaaaagttatgaacatagtacagagattcc

SEQ ID NO: 1049944 - DNA, 33 bp, Homo sapien
acagaaaagttatgaagatagtacagagattcc

SEQ ID NO: 1049945 - DNA, 33 bp, Homo sapien
caaaactggttaagcaatatgttttagggaaaa

SEQ ID NO: 1049946 - DNA, 33 bp, Homo sapien
caaaactggttaagcagtatgttttagggaaaa

SEQ ID NO: 1049947 - DNA, 33 bp, Homo sapien
ggatgctttgctgttacggtgtacaaaatgcct

SEQ ID NO: 1049948 - DNA, 33 bp, Homo sapien
ggatgctttgctgttatggtgtacaaaatgcct

SEQ ID NO: 1049949 - DNA, 33 bp, Homo sapien
tcataccttgccactacggtgggagagcaacca

SEQ ID NO: 1049950 - DNA, 33 bp, Homo sapien
tcataccttgccactatggtgggagagcaacca

SEQ ID NO: 1049951 - DNA, 33 bp, Homo sapien
tcataaagtgttggtgaaatgattaagagaaat

SEQ ID NO: 1049952 - DNA, 33 bp, Homo sapien
tcataaagtgttggtggaatgattaagagaaat

SEQ ID NO: 1049953 - DNA, 33 bp, Homo sapien
gctctgagaacagtacagcagaagctttgattt

SEQ ID NO: 1049954 - DNA, 33 bp, Homo sapien
gctctgagaacagtaccgcagaagctttgattt

SEQ ID NO: 1049955 - DNA, 33 bp, Homo sapien
ttaatagcatacattggatatcgtgacccacag

SEQ ID NO: 1049956 - DNA, 33 bp, Homo sapien
ttaatagcatacattgtatatcgtgacccacag

SEQ ID NO: 1049957 - DNA, 33 bp, Homo sapien
atcagtgagcggactacgggtaagtgccaatgt

SEQ ID NO: 1049958 - DNA, 33 bp, Homo sapien
atcagtgagcggactatgggtaagtgccaatgt

SEQ ID NO: 1049959 - DNA, 33 bp, Homo sapien
caaagaaaggcacagacgagatagttgctgaaa

SEQ ID NO: 1049960 - DNA, 33 bp, Homo sapien
caaagaaaggcacagatgagatagttgctgaaa

SEQ ID NO: 1049961 - DNA, 33 bp, Homo sapien
tgctatttgtctcccacgaaggcaaaaccaaga

SEQ ID NO: 1049962 - DNA, 33 bp, Homo sapien
tgctatttgtctcccatgaaggcaaaaccaaga

SEQ ID NO: 1049963 - DNA, 33 bp, Homo sapien
gaagacacctgtcttacacttgaaagaatcggc

SEQ ID NO: 1049964 - DNA, 33 bp, Homo sapien
gaagacacctgtcttatacttgaaagaatcggc

SEQ ID NO: 1049965 - DNA, 33 bp, Homo sapien
gaagttgtggacaaaccgtaggaatgtatgtgt

SEQ ID NO: 1049966 - DNA, 33 bp, Homo sapien
gaagttgtggacaaactgtaggaatgtatgtgt

SEQ ID NO: 1049967 - DNA, 33 bp, Homo sapien
gtggcctagaactccacgagttgttgaggtggg

SEQ ID NO: 1049968 - DNA, 33 bp, Homo sapien
gtggcctagaactccaggagttgttgaggtggg

SEQ ID NO: 1049969 - DNA, 33 bp, Homo sapien
cggctgtaactaggcaaggcccagttttcacgc

SEQ ID NO: 1049970 - DNA, 33 bp, Homo sapien
cggctgtaactaggcagggcccagttttcacgc

SEQ ID NO: 1049971 - DNA, 33 bp, Homo sapien
tctttgtttgggaaacactgactttgcaaccac

SEQ ID NO: 1049972 - DNA, 33 bp, Homo sapien
tctttgtttgggaaacgctgactttgcaaccac

SEQ ID NO: 1049973 - DNA, 33 bp, Homo sapien
ctagaaaccccttaccccatgaacattctacta

SEQ ID NO: 1049974 - DNA, 33 bp, Homo sapien
ctagaaaccccttacctcatgaacattctacta

SEQ ID NO: 1049975 - DNA, 33 bp, Homo sapien
atcttcagagcaaatcaatgaaggtcccgcaaa

SEQ ID NO: 1049976 - DNA, 33 bp, Homo sapien
atcttcagagcaaatcgatgaaggtcccgcaaa

SEQ ID NO: 1049977 - DNA, 33 bp, Homo sapien
tatttgattggagtaggattcaccttagtgttg

SEQ ID NO: 1049978 - DNA, 33 bp, Homo sapien
tatttgattggagtagtattcaccttagtgttg

SEQ ID NO: 1049979 - DNA, 33 bp, Homo sapien
acacaattgtaaaagacaactggtaatgcagga

SEQ ID NO: 1049980 - DNA, 33 bp, Homo sapien
acacaattgtaaaagataactggtaatgcagga

SEQ ID NO: 1049981 - DNA, 33 bp, Homo sapien
gacaaggatcacgagaataagtgtcagtcaggg

SEQ ID NO: 1049982 - DNA, 33 bp, Homo sapien
gacaaggatcacgagactaagtgtcagtcaggg

SEQ ID NO: 1049983 - DNA, 33 bp, Homo sapien; identical to SEQ ID NO: 1049981

SEQ ID NO: 1049984 - DNA, 33 bp, Homo sapien; identical to SEQ ID NO: 1049982

SEQ ID NO: 1049985 - DNA, 33 bp, Homo sapien
aacagattcacaccaaaggactcaattcccctc

SEQ ID NO: 1049986 - DNA, 33 bp, Homo sapien
aacagattcacaccaagggactcaattcccctc

SEQ ID NO: 1049987 - DNA, 33 bp, Homo sapien
tagcctgaagctatggaataattcttccacaag

SEQ ID NO: 1049988 - DNA, 33 bp, Homo sapien
tagcctgaagctatggcataattcttccacaag

SEQ ID NO: 1049989 - DNA, 33 bp, Homo sapien
caaaacaatcaacagactcattttttccgaaca

SEQ ID NO: 1049990 - DNA, 33 bp, Homo sapien
caaaacaatcaacagagtcattttttccgaaca

SEQ ID NO: 1049991 - DNA, 33 bp, Homo sapien
gattgaatgttagacactatgaattctacaccc

SEQ ID NO: 1049992 - DNA, 33 bp, Homo sapien
gattgaatgttagacagtatgaattctacaccc

SEQ ID NO: 1049993 - DNA, 33 bp, Homo sapien
ctgcaggtcttaggtactacagagaatgttcag

SEQ ID NO: 1049994 - DNA, 33 bp, Homo sapien
ctgcaggtcttaggtagtacagagaatgttcag

SEQ ID NO: 1049995 - DNA, 33 bp, Homo sapien
caattacccagtctccaccttagacagaaactt

SEQ ID NO: 1049996 - DNA, 33 bp, Homo sapien
caattacccagtctccgccttagacagaaactt

SEQ ID NO: 1049997 - DNA, 33 bp, Homo sapien
cttaaatgctcactaaatccgcccctgaggcac

SEQ ID NO: 1049998 - DNA, 33 bp, Homo sapien
cttaaatgctcactaagtccgcccctgaggcac

SEQ ID NO: 1049999 - DNA, 33 bp, Homo sapien
ctgtcattaagaagcacatatggtgatacggtt

SEQ ID NO: 1050000 - DNA, 33 bp, Homo sapien
ctgtcattaagaagcatatatggtgatacggtt

SEQ ID NO: 1050001 - DNA, 33 bp, Homo sapien
gcctcattcaccattccatattccacaggcact

SEQ ID NO: 1050002 - DNA, 33 bp, Homo sapien
gcctcattcaccattctatattccacaggcact

SEQ ID NO: 1050003 - DNA, 33 bp, Homo sapien
gcacgatttagaaagaacaccagagacgttttt

SEQ ID NO: 1050004 - DNA, 33 bp, Homo sapien
gcacgatttagaaagatcaccagagacgttttt

SEQ ID NO: 1050005 - DNA, 33 bp, Homo sapien; identical to SEQ ID NO: 1050003

SEQ ID NO: 1050006 - DNA, 33 bp, Homo sapien; identical to SEQ ID NO: 1050004

SEQ ID NO: 1050007 - DNA, 33 bp, Homo sapien
aacctgatggctagaactgataccaccctgagc

SEQ ID NO: 1050008 - DNA, 33 bp, Homo sapien
aacctgatggctagaagtgataccaccctgagc

SEQ ID NO: 1050009 - DNA, 33 bp, Homo sapien
cttgtctgtttcctccagcatgagctacaaata

SEQ ID NO: 1050010 - DNA, 33 bp, Homo sapien
cttgtctgtttcctccggcatgagctacaaata

SEQ ID NO: 1050011 - DNA, 33 bp, Homo sapien
aatgacagcttcgacaaatgagttttgatttga

SEQ ID NO: 1050012 - DNA, 33 bp, Homo sapien
aatgacagcttcgacagatgagttttgatttga

SEQ ID NO: 1050013 - DNA, 33 bp, Homo sapien; identical to SEQ ID NO: 1050011

SEQ ID NO: 1050014 - DNA, 33 bp, Homo sapien; identical to SEQ ID NO: 1050012

SEQ ID NO: 1050015 - DNA, 33 bp, Homo sapien
tacaggtgtgtgccaccgatttgtatatttttt

SEQ ID NO: 1050016 - DNA, 33 bp, Homo sapien
tacaggtgtgtgccactgatttgtatatttttt

SEQ ID NO: 1050017 - DNA, 33 bp, Homo sapien
tcattctcaaggccaaaaatgaacagatcacac

SEQ ID NO: 1050018 - DNA, 33 bp, Homo sapien
tcattctcaaggccaacaatgaacagatcacac

SEQ ID NO: 1050019 - DNA, 33 bp, Homo sapien
aaataaataaaagagcacatgtcatttaagtat

SEQ ID NO: 1050020 - DNA, 33 bp, Homo sapien
aaataaataaaagagctcatgtcatttaagtat

SEQ ID NO: 1050021 - DNA, 33 bp, Homo sapien
agagaggtgtatacacacatatgcatatatcac

SEQ ID NO: 1050022 - DNA, 33 bp, Homo sapien
agagaggtgtatacacgcatatgcatatatcac

SEQ ID NO: 1050023 - DNA, 33 bp, Homo sapien
tcatcacatccatttcactcttcaaaggcattc

SEQ ID NO: 1050024 - DNA, 33 bp, Homo sapien
tcatcacatccatttcgctcttcaaaggcattc

SEQ ID NO: 1050025 - DNA, 33 bp, Homo sapien
atagagaggtagtcaacagagtggtttatatat

SEQ ID NO: 1050026 - DNA, 33 bp, Homo sapien
atagagaggtagtcaatagagtggtttatatat

SEQ ID NO: 1050027 - DNA, 33 bp, Homo sapien
caattattattcatcacgttttgttgttccccc

SEQ ID NO: 1050028 - DNA, 33 bp, Homo sapien
caattattattcatcatgttttgttgttccccc

SEQ ID NO: 1050029 - DNA, 33 bp, Homo sapien
tgacatcttagggtaacgtgcagaagagtgatt

SEQ ID NO: 1050030 - DNA, 33 bp, Homo sapien
tgacatcttagggtaatgtgcagaagagtgatt

SEQ ID NO: 1050031 - DNA, 33 bp, Homo sapien
tctttaaaaaatatcacgcttctcaaaatactt

SEQ ID NO: 1050032 - DNA, 33 bp, Homo sapien
tctttaaaaaatatcatgcttctcaaaatactt

SEQ ID NO: 1050033 - DNA, 33 bp, Homo sapien; identical to SEQ ID NO: 1050031

SEQ ID NO: 1050034 - DNA, 33 bp, Homo sapien; identical to SEQ ID NO: 1050032

SEQ ID NO: 1050035 - DNA, 33 bp, Homo sapien
tgtctgtctttgcaaaatgtcaattcagataat

SEQ ID NO: 1050036 - DNA, 33 bp, Homo sapien
tgtctgtctttgcaaactgtcaattcagataat

SEQ ID NO: 1050037 - DNA, 33 bp, Homo sapien
aagaagaaaatgaaacggccttgctgaacatat

SEQ ID NO: 1050038 - DNA, 33 bp, Homo sapien
aagaagaaaatgaaactgccttgctgaacatat

SEQ ID NO: 1050039 - DNA, 33 bp, Homo sapien
tagaacatgaaatctacaccactttgtttcttt

SEQ ID NO: 1050040 - DNA, 33 bp, Homo sapien
tagaacatgaaatctataccactttgtttcttt

SEQ ID NO: 1050041 - DNA, 33 bp, Homo sapien
gcaccatgattgcccaaagaattccactgtggg

SEQ ID NO: 1050042 - DNA, 33 bp, Homo sapien
gcaccatgattgcccagagaattccactgtggg

SEQ ID NO: 1050043 - DNA, 33 bp, Homo sapien
attttaatttgagatacaaattccaggtaagat

SEQ ID NO: 1050044 - DNA, 33 bp, Homo sapien
attttaatttgagatataaattccaggtaagat

SEQ ID NO: 1050045 - DNA, 33 bp, Homo sapien
aaaatagtggagtagagccgtgaaggcatccca

SEQ ID NO: 1050046 - DNA, 33 bp, Homo sapien
aaaatagtggagtagatccgtgaaggcatccca

SEQ ID NO: 1050047 - DNA, 33 bp, Homo sapien
caagttcagatacttaagaagtggaagaatcag

SEQ ID NO: 1050048 - DNA, 33 bp, Homo sapien
caagttcagatacttaggaagtggaagaatcag

SEQ ID NO: 1050049 - DNA, 33 bp, Homo sapien
ccttgctcaatgcaggacacataatcaatatgt

SEQ ID NO: 1050050 - DNA, 33 bp, Homo sapien
ccttgctcaatgcagggcacataatcaatatgt

SEQ ID NO: 1050051 - DNA, 33 bp, Homo sapien
agtagtagaggagatacattttcatttgggaat

SEQ ID NO: 1050052 - DNA, 33 bp, Homo sapien
agtagtagaggagatatattttcatttgggaat

SEQ ID NO: 1050053 - DNA, 33 bp, Homo sapien
attatgcttatgtgtacagatcatggattgctt

SEQ ID NO: 1050054 - DNA, 33 bp, Homo sapien
attatgcttatgtgtatagatcatggattgctt

SEQ ID NO: 1050055 - DNA, 33 bp, Homo sapien
tattaaaaaacctagcaatagcactggagaaaa

SEQ ID NO: 1050056 - DNA, 33 bp, Homo sapien
tattaaaaaacctagcgatagcactggagaaaa

SEQ ID NO: 1050057 - DNA, 33 bp, Homo sapien
aaatgcaaaagatagtcaaggtggtagatttac

SEQ ID NO: 1050058 - DNA, 33 bp, Homo sapien
aaatgcaaaagatagtgaaggtggtagatttac

SEQ ID NO: 1050059 - DNA, 33 bp, Homo sapien
tcagttttcatattcactatttctcgatggatt

SEQ ID NO: 1050060 - DNA, 33 bp, Homo sapien
tcagttttcatattcattatttctcgatggatt

SEQ ID NO: 1050061 - DNA, 33 bp, Homo sapien
accttacagatggataaatgtaaatgtttattc

SEQ ID NO: 1050062 - DNA, 33 bp, Homo sapien
accttacagatggatagatgtaaatgtttattc

SEQ ID NO: 1050063 - DNA, 33 bp, Homo sapien
attcatatcacgtttacacagaaaaatttcggt

SEQ ID NO: 1050064 - DNA, 33 bp, Homo sapien
attcatatcacgtttagacagaaaaatttcggt

SEQ ID NO: 1050065 - DNA, 33 bp, Homo sapien
taatatgctgtgcccacattggctaagtaaaag

SEQ ID NO: 1050066 - DNA, 33 bp, Homo sapien
taatatgctgtgcccatattggctaagtaaaag

SEQ ID NO: 1050067 - DNA, 33 bp, Homo sapien
cagggaatttgtgggccagttaatagctaatcc

SEQ ID NO: 1050068 - DNA, 33 bp, Homo sapien
cagggaatttgtgggctagttaatagctaatcc

SEQ ID NO: 1050069 - DNA, 33 bp, Homo sapien
atgttgggtgaaaatacaaattggtcattttgg

SEQ ID NO: 1050070 - DNA, 33 bp, Homo sapien
atgttgggtgaaaatataaattggtcattttgg

SEQ ID NO: 1050071 - DNA, 33 bp, Homo sapien
tcaagaggctgagttacacatcttcccctgagt

SEQ ID NO: 1050072 - DNA, 33 bp, Homo sapien
tcaagaggctgagttatacatcttcccctgagt

SEQ ID NO: 1050073 - DNA, 33 bp, Homo sapien
ttgcttttactaattcggaatgcacaaagatac

SEQ ID NO: 1050074 - DNA, 33 bp, Homo sapien
ttgcttttactaattctgaatgcacaaagatac

SEQ ID NO: 1050075 - DNA, 33 bp, Homo sapien
caacaaatggaattcacgggtagatgcagcacc

SEQ ID NO: 1050076 - DNA, 33 bp, Homo sapien
caacaaatggaattcatgggtagatgcagcacc

SEQ ID NO: 1050077 - DNA, 33 bp, Homo sapien
gaacccggagaatccaataggcctcactgaaac

SEQ ID NO: 1050078 - DNA, 33 bp, Homo sapien
gaacccggagaatccagtaggcctcactgaaac

SEQ ID NO: 1050079 - DNA, 33 bp, Homo sapien
agctactttttgtccacgtgtaagatctacacc

SEQ ID NO: 1050080 - DNA, 33 bp, Homo sapien
agctactttttgtccatgtgtaagatctacacc

SEQ ID NO: 1050081 - DNA, 33 bp, Homo sapien
ttcttcatttaaaaaacattgtttcagtaagtt

SEQ ID NO: 1050082 - DNA, 33 bp, Homo sapien
ttcttcatttaaaaaatattgtttcagtaagtt

SEQ ID NO: 1050083 - DNA, 33 bp, Homo sapien
ggccatgaaatcgtaccggctcgtggcctgtta

SEQ ID NO: 1050084 - DNA, 33 bp, Homo sapien
ggccatgaaatcgtactggctcgtggcctgtta

SEQ ID NO: 1050085 - DNA, 33 bp, Homo sapien
agcaaaatcttctgctcaaagaaacttggtttg

SEQ ID NO: 1050086 - DNA, 33 bp, Homo sapien
agcaaaatcttctgcttaaagaaacttggtttg

SEQ ID NO: 1050087 - DNA, 33 bp, Homo sapien
gcacatctgaatagaaagtcatgatggtgaagc

SEQ ID NO: 1050088 - DNA, 33 bp, Homo sapien
gcacatctgaatagaatgtcatgatggtgaagc

SEQ ID NO: 1050089 - DNA, 33 bp, Homo sapien
tggtcagggagatagaatcaagactgatatccc

SEQ ID NO: 1050090 - DNA, 33 bp, Homo sapien
tggtcagggagatagattcaagactgatatccc

SEQ ID NO: 1050091 - DNA, 33 bp, Homo sapien
aagctacaaatagtacaagacaaattctcacta

SEQ ID NO: 1050092 - DNA, 33 bp, Homo sapien
aagctacaaatagtacgagacaaattctcacta

SEQ ID NO: 1050093 - DNA, 33 bp, Homo sapien
tggccctgaagtacaacagtgttaagaccccgt

SEQ ID NO: 1050094 - DNA, 33 bp, Homo sapien
tggccctgaagtacaagagtgttaagaccccgt

SEQ ID NO: 1050095 - DNA, 33 bp, Homo sapien
tggagggaaggaatgccgcacaaagaggccatg

SEQ ID NO: 1050096 - DNA, 33 bp, Homo sapien
tggagggaaggaatgctgcacaaagaggccatg

SEQ ID NO: 1050097 - DNA, 33 bp, Homo sapien
cctagcacctcagaaactgagaaaatagcagaa

SEQ ID NO: 1050098 - DNA, 33 bp, Homo sapien
cctagcacctcagaaattgagaaaatagcagaa

SEQ ID NO: 1050099 - DNA, 33 bp, Homo sapien
agaccagatgtatccaaactagattcactcagt

SEQ ID NO: 1050100 - DNA, 33 bp, Homo sapien
agaccagatgtatccagactagattcactcagt

SEQ ID NO: 1050101 - DNA, 33 bp, Homo sapien
taaacctgaatcatgaacacacttcactcgaat

SEQ ID NO: 1050102 - DNA, 33 bp, Homo sapien
taaacctgaatcatgagcacacttcactcgaat

SEQ ID NO: 1050103 - DNA, 33 bp, Homo sapien
aataaaaccagaagtcaatatcaagaaggtctc

SEQ ID NO: 1050104 - DNA, 33 bp, Homo sapien
aataaaaccagaagtcgatatcaagaaggtctc

SEQ ID NO: 1050105 - DNA, 33 bp, Homo sapien
tagttgagaggcagtcacagtagagaattaagt

SEQ ID NO: 1050106 - DNA, 33 bp, Homo sapien
tagttgagaggcagtcgcagtagagaattaagt

SEQ ID NO: 1050107 - DNA, 33 bp, Homo sapien
ttctattatttacaaagtacccaggataagata

SEQ ID NO: 1050108 - DNA, 33 bp, Homo sapien
ttctattatttacaaattacccaggataagata

SEQ ID NO: 1050109 - DNA, 33 bp, Homo sapien
atttagtcaatgaataataaaatgtctgcatca

SEQ ID NO: 1050110 - DNA, 33 bp, Homo sapien
atttagtcaatgaatactaaaatgtctgcatca

SEQ ID NO: 1050111 - DNA, 33 bp, Homo sapien
gtcagttttgcttccaaacccctggataattga

SEQ ID NO: 1050112 - DNA, 33 bp, Homo sapien
gtcagttttgcttccagacccctggataattga

SEQ ID NO: 1050113 - DNA, 33 bp, Homo sapien; identical to SEQ ID NO: 1050111

SEQ ID NO: 1050114 - DNA, 33 bp, Homo sapien; identical to SEQ ID NO: 1050112

SEQ ID NO: 1050115 - DNA, 33 bp, Homo sapien
aggggtgttaaaacataagtatcaatcccagga

SEQ ID NO: 1050116 - DNA, 33 bp, Homo sapien
aggggtgttaaaacatgagtatcaatcccagga

SEQ ID NO: 1050117 - DNA, 33 bp, Homo sapien
ttgtctgacttccaaagctttatacttttcacc

SEQ ID NO: 1050118 - DNA, 33 bp, Homo sapien
ttgtctgacttccaaatctttatacttttcacc

SEQ ID NO: 1050119 - DNA, 33 bp, Homo sapien
taggctttactacaaaatcttttaatcaatcac

SEQ ID NO: 1050120 - DNA, 33 bp, Homo sapien
taggctttactacaaactcttttaatcaatcac

SEQ ID NO: 1050121 - DNA, 33 bp, Homo sapien
tctgatctatcttgtacgtgaatatgaacaaat

SEQ ID NO: 1050122 - DNA, 33 bp, Homo sapien
tctgatctatcttgtatgtgaatatgaacaaat

SEQ ID NO: 1050123 - DNA, 33 bp, Homo sapien
tgaatcaatgtttgtacatatgaaaagacatcc

SEQ ID NO: 1050124 - DNA, 33 bp, Homo sapien
tgaatcaatgtttgtatatatgaaaagacatcc

SEQ ID NO: 1050125 - DNA, 33 bp, Homo sapien
agacaggaaatcatacagagattacggagattg

SEQ ID NO: 1050126 - DNA, 33 bp, Homo sapien
agacaggaaatcatacggagattacggagattg

SEQ ID NO: 1050127 - DNA, 33 bp, Homo sapien
gaagggattcttctgcaaggctaattatagggc

SEQ ID NO: 1050128 - DNA, 33 bp, Homo sapien
gaagggattcttctgcgaggctaattatagggc

SEQ ID NO: 1050129 - DNA, 33 bp, Homo sapien
gctgcattattgtagcgctagataaccaatctt

SEQ ID NO: 1050130 - DNA, 33 bp, Homo sapien
gctgcattattgtagctctagataaccaatctt

SEQ ID NO: 1050131 - DNA, 33 bp, Homo sapien
aaaatgagtgtagtcaaataaagaagataactg

SEQ ID NO: 1050132 - DNA, 33 bp, Homo sapien
aaaatgagtgtagtcagataaagaagataactg

SEQ ID NO: 1050133 - DNA, 33 bp, Homo sapien
gttgaaaaatccaggacaccatagatacacttt

SEQ ID NO: 1050134 - DNA, 33 bp, Homo sapien
gttgaaaaatccaggagaccatagatacacttt

SEQ ID NO: 1050135 - DNA, 33 bp, Homo sapien
ggtatacctgaaaacacctctgttacagtggaa

SEQ ID NO: 1050136 - DNA, 33 bp, Homo sapien
ggtatacctgaaaacatctctgttacagtggaa

SEQ ID NO: 1050137 - DNA, 33 bp, Homo sapien
ggagtgattacatgaccacacaaacacctcaca

SEQ ID NO: 1050138 - DNA, 33 bp, Homo sapien
ggagtgattacatgacgacacaaacacctcaca

SEQ ID NO: 1050139 - DNA, 33 bp, Homo sapien
acacaaacacctcacactacgtgaccctgttat

SEQ ID NO: 1050140 - DNA, 33 bp, Homo sapien
acacaaacacctcacattacgtgaccctgttat

SEQ ID NO: 1050141 - DNA, 33 bp, Homo sapien
aatagtttttagcatgcattcatataaatttgg

SEQ ID NO: 1050142 - DNA, 33 bp, Homo sapien
aatagtttttagcatggattcatataaatttgg

SEQ ID NO: 1050143 - DNA, 33 bp, Homo sapien; identical to SEQ ID NO: 1050141

SEQ ID NO: 1050144 - DNA, 33 bp, Homo sapien; identical to SEQ ID NO: 1050142

SEQ ID NO: 1050145 - DNA, 33 bp, Homo sapien
tgcagcctcaagaccccaagcaatttcacattt

SEQ ID NO: 1050146 - DNA, 33 bp, Homo sapien
tgcagcctcaagaccctaagcaatttcacattt

SEQ ID NO: 1050147 - DNA, 33 bp, Homo sapien; identical to SEQ ID NO: 1050145

SEQ ID NO: 1050148 - DNA, 33 bp, Homo sapien; identical to SEQ ID NO: 1050146

SEQ ID NO: 1050149 - DNA, 33 bp, Homo sapien
ttcacttggaatcctaacagatataagggccta

SEQ ID NO: 1050150 - DNA, 33 bp, Homo sapien
ttcacttggaatcctatcagatataagggccta

SEQ ID NO: 1050151 - DNA, 33 bp, Homo sapien
acatacatacataaaaggagaaggaactaatgt

SEQ ID NO: 1050152 - DNA, 33 bp, Homo sapien
acatacatacataaaatgagaaggaactaatgt

SEQ ID NO: 1050153 - DNA, 33 bp, Homo sapien
tacttccatccaagcaacatggatacatggccc

SEQ ID NO: 1050154 - DNA, 33 bp, Homo sapien
tacttccatccaagcagcatggatacatggccc

SEQ ID NO: 1050155 - DNA, 33 bp, Homo sapien
gggcccatgcatacaactcgaggtaatcttatc

SEQ ID NO: 1050156 - DNA, 33 bp, Homo sapien
gggcccatgcatacaattcgaggtaatcttatc

SEQ ID NO: 1050157 - DNA, 33 bp, Homo sapien
aaactacctagcttcacattagcaaacagattg

SEQ ID NO: 1050158 - DNA, 33 bp, Homo sapien
aaactacctagcttcatattagcaaacagattg

SEQ ID NO: 1050159 - DNA, 33 bp, Homo sapien
tgggtccagtacctaactcaaagaaacctcagc

SEQ ID NO: 1050160 - DNA, 33 bp, Homo sapien
tgggtccagtacctaagtcaaagaaacctcagc

SEQ ID NO: 1050161 - DNA, 33 bp, Homo sapien
tgaattctttttaaagccatgtccatgttcatt

SEQ ID NO: 1050162 - DNA, 33 bp, Homo sapien
tgaattctttttaaagtcatgtccatgttcatt

SEQ ID NO: 1050163 - DNA, 33 bp, Homo sapien
ttgtcactgtgaccaacgtggaagaaataagac

SEQ ID NO: 1050164 - DNA, 33 bp, Homo sapien
ttgtcactgtgaccaaggtggaagaaataagac

SEQ ID NO: 1050165 - DNA, 33 bp, Homo sapien
catgcagacttgtttcccatccgtaacatacaa

SEQ ID NO: 1050166 - DNA, 33 bp, Homo sapien
catgcagacttgtttctcatccgtaacatacaa

SEQ ID NO: 1050167 - DNA, 33 bp, Homo sapien
aggaaatgggagaagagggttgaatgaaatctg

SEQ ID NO: 1050168 - DNA, 33 bp, Homo sapien
aggaaatgggagaagatggttgaatgaaatctg

SEQ ID NO: 1050169 - DNA, 33 bp, Homo sapien
ttaattcttcaagaccaattaaaactaaggctc

SEQ ID NO: 1050170 - DNA, 33 bp, Homo sapien
ttaattcttcaagaccgattaaaactaaggctc

SEQ ID NO: 1050171 - DNA, 33 bp, Homo sapien
cttctggacattaacaatcagaagtttaaaaat

SEQ ID NO: 1050172 - DNA, 33 bp, Homo sapien
cttctggacattaacagtcagaagtttaaaaat

SEQ ID NO: 1050173 - DNA, 33 bp, Homo sapien
aaaacatggccattgacactggtgtaaatttct

SEQ ID NO: 1050174 - DNA, 33 bp, Homo sapien
aaaacatggccattgatactggtgtaaatttct

SEQ ID NO: 1050175 - DNA, 33 bp, Homo sapien
agcaaattgtttttcaatccctcagtatgcatt

SEQ ID NO: 1050176 - DNA, 33 bp, Homo sapien
agcaaattgtttttcagtccctcagtatgcatt

SEQ ID NO: 1050177 - DNA, 33 bp, Homo sapien
ttgtttctttgtttaacgtagaaaacttttgtg

SEQ ID NO: 1050178 - DNA, 33 bp, Homo sapien
ttgtttctttgtttaatgtagaaaacttttgtg

SEQ ID NO: 1050179 - DNA, 33 bp, Homo sapien
tacacacatacgcaaaatttgataacatttggt

SEQ ID NO: 1050180 - DNA, 33 bp, Homo sapien
tacacacatacgcaaattttgataacatttggt

SEQ ID NO: 1050181 - DNA, 33 bp, Homo sapien
agaagctgagaagatcactctgtgctgaagaaa

SEQ ID NO: 1050182 - DNA, 33 bp, Homo sapien
agaagctgagaagatcgctctgtgctgaagaaa

SEQ ID NO: 1050183 - DNA, 33 bp, Homo sapien
taagacatgagtttccaaatatggatgaaatcg

SEQ ID NO: 1050184 - DNA, 33 bp, Homo sapien
taagacatgagtttccgaatatggatgaaatcg

SEQ ID NO: 1050185 - DNA, 33 bp, Homo sapien
aactgctcacaaaatacctcaagttgggtgtct

SEQ ID NO: 1050186 - DNA, 33 bp, Homo sapien
aactgctcacaaaatatctcaagttgggtgtct

SEQ ID NO: 1050187 - DNA, 33 bp, Homo sapien
gagaacattgctttaccattgccattaatagaa

SEQ ID NO: 1050188 - DNA, 33 bp, Homo sapien
gagaacattgctttactattgccattaatagaa

SEQ ID NO: 1050189 - DNA, 33 bp, Homo sapien
tgtaccacaaacctcaatatcacacaatatacc

SEQ ID NO: 1050190 - DNA, 33 bp, Homo sapien
tgtaccacaaacctcagtatcacacaatatacc

SEQ ID NO: 1050191 - DNA, 33 bp, Homo sapien
ctgaatgggaaaattacgttgtatattggtgtt

SEQ ID NO: 1050192 - DNA, 33 bp, Homo sapien
ctgaatgggaaaattatgttgtatattggtgtt

SEQ ID NO: 1050193 - DNA, 33 bp, Homo sapien
aattattgtctataaccgggaagattgagaggg

SEQ ID NO: 1050194 - DNA, 33 bp, Homo sapien
aattattgtctataactgggaagattgagaggg

SEQ ID NO: 1050195 - DNA, 33 bp, Homo sapien
gtccattttccagtgacatgactcaaaccttag

SEQ ID NO: 1050196 - DNA, 33 bp, Homo sapien
gtccattttccagtgatatgactcaaaccttag

SEQ ID NO: 1050197 - DNA, 33 bp, Homo sapien
gcttctccttttgtccaacagcgagatgtgctg

SEQ ID NO: 1050198 - DNA, 33 bp, Homo sapien
gcttctccttttgtccgacagcgagatgtgctg

SEQ ID NO: 1050199 - DNA, 33 bp, Homo sapien
ctggtctaccccgttacagttttcctgtgtgtt

SEQ ID NO: 1050200 - DNA, 33 bp, Homo sapien
ctggtctaccccgttagagttttcctgtgtgtt

SEQ ID NO: 1050201 - DNA, 33 bp, Homo sapien
atatccattcgtttcacgcatattacggagtgc

SEQ ID NO: 1050202 - DNA, 33 bp, Homo sapien
atatccattcgtttcatgcatattacggagtgc

SEQ ID NO: 1050203 - DNA, 33 bp, Homo sapien
gtccgcagtctaaggacgggggcagatgatagc

SEQ ID NO: 1050204 - DNA, 33 bp, Homo sapien
gtccgcagtctaaggatgggggcagatgatagc

SEQ ID NO: 1050205 - DNA, 33 bp, Homo sapien
attccagggcatggctaaacagttgagaaggta

SEQ ID NO: 1050206 - DNA, 33 bp, Homo sapien
attccagggcatggctgaacagttgagaaggta

SEQ ID NO: 1050207 - DNA, 33 bp, Homo sapien
caactagcaagctataaaagcaaatctgtctca

SEQ ID NO: 1050208 - DNA, 33 bp, Homo sapien
caactagcaagctatacaagcaaatctgtctca

SEQ ID NO: 1050209 - DNA, 33 bp, Homo sapien
cctgtatgtctagaaacgtgcaaggttccaaaa

SEQ ID NO: 1050210 - DNA, 33 bp, Homo sapien
cctgtatgtctagaaatgtgcaaggttccaaaa

SEQ ID NO: 1050211 - DNA, 33 bp, Homo sapien
gaaaatctagtaacaacggatgtctgcttaatt

SEQ ID NO: 1050212 - DNA, 33 bp, Homo sapien
gaaaatctagtaacaatggatgtctgcttaatt

SEQ ID NO: 1050213 - DNA, 33 bp, Homo sapien
gaacatttatcagttcaacaagaattgattttc

SEQ ID NO: 1050214 - DNA, 33 bp, Homo sapien
gaacatttatcagttcgacaagaattgattttc

SEQ ID NO: 1050215 - DNA, 33 bp, Homo sapien
tataagggcactaatcacctgctaatggcccca

SEQ ID NO: 1050216 - DNA, 33 bp, Homo sapien
tataagggcactaatcgcctgctaatggcccca

SEQ ID NO: 1050217 - DNA, 33 bp, Homo sapien
ctctcaaatattttacaatgagcttccttctgg

SEQ ID NO: 1050218 - DNA, 33 bp, Homo sapien
ctctcaaatattttacgatgagcttccttctgg

SEQ ID NO: 1050219 - DNA, 33 bp, Homo sapien
tggttccttgaattagcacaactaagcaatgaa

SEQ ID NO: 1050220 - DNA, 33 bp, Homo sapien
tggttccttgaattaggacaactaagcaatgaa

SEQ ID NO: 1050221 - DNA, 33 bp, Homo sapien
agtggctgtgaaaataccgctcatgtgaaacaa

SEQ ID NO: 1050222 - DNA, 33 bp, Homo sapien
agtggctgtgaaaatatcgctcatgtgaaacaa

SEQ ID NO: 1050223 - DNA, 33 bp, Homo sapien
ccatcttttatgtaacacttatacttgccttaa

SEQ ID NO: 1050224 - DNA, 33 bp, Homo sapien
ccatcttttatgtaacgcttatacttgccttaa

SEQ ID NO: 1050225 - DNA, 33 bp, Homo sapien
catcaatgccaaagtccaatcagagctgctcag

SEQ ID NO: 1050226 - DNA, 33 bp, Homo sapien
catcaatgccaaagtctaatcagagctgctcag

SEQ ID NO: 1050227 - DNA, 33 bp, Homo sapien
cagcagatgcgtgtgactaagtatgaagtttcc

SEQ ID NO: 1050228 - DNA, 33 bp, Homo sapien
cagcagatgcgtgtgattaagtatgaagtttcc

SEQ ID NO: 1050229 - DNA, 33 bp, Homo sapien
attgagctattttatcaccttaatttctatcac

SEQ ID NO: 1050230 - DNA, 33 bp, Homo sapien
attgagctattttatcgccttaatttctatcac

SEQ ID NO: 1050231 - DNA, 33 bp, Homo sapien
ctacgctcgtcaagacggtcgtttaggttttgc

SEQ ID NO: 1050232 - DNA, 33 bp, Homo sapien
ctacgctcgtcaagactgtcgtttaggttttgc

SEQ ID NO: 1050233 - DNA, 33 bp, Homo sapien
cactggagcttatttacatttctgctgagggtg

SEQ ID NO: 1050234 - DNA, 33 bp, Homo sapien
cactggagcttatttagatttctgctgagggtg

SEQ ID NO: 1050235 - DNA, 33 bp, Homo sapien
tttcttttgtatttcaaacctacttgctggaaa

SEQ ID NO: 1050236 - DNA, 33 bp, Homo sapien
tttcttttgtatttcacacctacttgctggaaa

SEQ ID NO: 1050237 - DNA, 33 bp, Homo sapien
ttgtttccaaatgaagaacgtgtttgaaaattg

SEQ ID NO: 1050238 - DNA, 33 bp, Homo sapien
ttgtttccaaatgaaggacgtgtttgaaaattg

SEQ ID NO: 1050239 - DNA, 33 bp, Homo sapien
gtatgctagccacaccaacagtgtccttagtaa

SEQ ID NO: 1050240 - DNA, 33 bp, Homo sapien
gtatgctagccacaccgacagtgtccttagtaa

SEQ ID NO: 1050241 - DNA, 33 bp, Homo sapien
caggagtctgggaagaaaagaggagtttggatt

SEQ ID NO: 1050242 - DNA, 33 bp, Homo sapien
caggagtctgggaagagaagaggagtttggatt

SEQ ID NO: 1050243 - DNA, 33 bp, Homo sapien
aagacacacagaatagaaacagaattggggacc

SEQ ID NO: 1050244 - DNA, 33 bp, Homo sapien
aagacacacagaatagcaacagaattggggacc

SEQ ID NO: 1050245 - DNA, 33 bp, Homo sapien
atatacctagtcttcaagcataaggttagggtg

SEQ ID NO: 1050246 - DNA, 33 bp, Homo sapien
atatacctagtcttcaggcataaggttagggtg

SEQ ID NO: 1050247 - DNA, 33 bp, Homo sapien
cttactaaaatgcatccagctaaaacaacatca

SEQ ID NO: 1050248 - DNA, 33 bp, Homo sapien
cttactaaaatgcatcgagctaaaacaacatca

SEQ ID NO: 1050249 - DNA, 33 bp, Homo sapien
aacatcataggttatacatcaaactgggaatgt

SEQ ID NO: 1050250 - DNA, 33 bp, Homo sapien
aacatcataggttatatatcaaactgggaatgt

SEQ ID NO: 1050251 - DNA, 33 bp, Homo sapien
ctggccatttgtcaatcatatcacagcatcctc

SEQ ID NO: 1050252 - DNA, 33 bp, Homo sapien
ctggccatttgtcaattatatcacagcatcctc

SEQ ID NO: 1050253 - DNA, 33 bp, Homo sapien
ggcgggtggccggcctgacactccatcagccag

SEQ ID NO: 1050254 - DNA, 33 bp, Homo sapien
ggcgggtggccggccttacactccatcagccag

SEQ ID NO: 1050255 - DNA, 33 bp, Homo sapien
caagtgagcaggacttcaagcaatacattcagt

SEQ ID NO: 1050256 - DNA, 33 bp, Homo sapien
caagtgagcaggacttgaagcaatacattcagt

SEQ ID NO: 1050257 - DNA, 33 bp, Homo sapien
gatcatcagatggtaggcacgtcggagaaattg

SEQ ID NO: 1050258 - DNA, 33 bp, Homo sapien
gatcatcagatggtagtcacgtcggagaaattg

SEQ ID NO: 1050259 - DNA, 33 bp, Homo sapien
ttctatggccttggatcaaagccaagttaacca

SEQ ID NO: 1050260 - DNA, 33 bp, Homo sapien
ttctatggccttggattaaagccaagttaacca

SEQ ID NO: 1050261 - DNA, 33 bp, Homo sapien
aattacttgagcacccaaaatcatgtcgtttaa

SEQ ID NO: 1050262 - DNA, 33 bp, Homo sapien
aattacttgagcacccgaaatcatgtcgtttaa

SEQ ID NO: 1050263 - DNA, 33 bp, Homo sapien
tgcaccagaaggaataatatgtttggacagaca

SEQ ID NO: 1050264 - DNA, 33 bp, Homo sapien
tgcaccagaaggaatagtatgtttggacagaca

SEQ ID NO: 1050265 - DNA, 33 bp, Homo sapien
atcttcctgtccatgacatatcttcaccatgga

SEQ ID NO: 1050266 - DNA, 33 bp, Homo sapien
atcttcctgtccatgatatatcttcaccatgga

SEQ ID NO: 1050267 - DNA, 33 bp, Homo sapien
actaatggagataccacagagaagaaatgtacc

SEQ ID NO: 1050268 - DNA, 33 bp, Homo sapien
actaatggagataccagagagaagaaatgtacc

SEQ ID NO: 1050269 - DNA, 33 bp, Homo sapien
aggagactttcccgcaccgttggaaatgtctgg

SEQ ID NO: 1050270 - DNA, 33 bp, Homo sapien
aggagactttcccgcatcgttggaaatgtctgg

SEQ ID NO: 1050271 - DNA, 33 bp, Homo sapien
gccatatgttttggaacgttcttggagggcctt

SEQ ID NO: 1050272 - DNA, 33 bp, Homo sapien
gccatatgttttggaatgttcttggagggcctt

SEQ ID NO: 1050273 - DNA, 33 bp, Homo sapien
ctgcttacaagttttgcattgcgaggtagtttt

SEQ ID NO: 1050274 - DNA, 33 bp, Homo sapien
ctgcttacaagttttggattgcgaggtagtttt

SEQ ID NO: 1050275 - DNA, 33 bp, Homo sapien
catgactgtacagacaaaaatttcaagttcaac

SEQ ID NO: 1050276 - DNA, 33 bp, Homo sapien
catgactgtacagacagaaatttcaagttcaac

SEQ ID NO: 1050277 - DNA, 33 bp, Homo sapien
taggtagccaatatcacccccagtaatggcttt

SEQ ID NO: 1050278 - DNA, 33 bp, Homo sapien
taggtagccaatatcatccccagtaatggcttt

SEQ ID NO: 1050279 - DNA, 33 bp, Homo sapien
tattgatgtagctaaactgtgaggatttttgga

SEQ ID NO: 1050280 - DNA, 33 bp, Homo sapien
tattgatgtagctaaattgtgaggatttttgga

SEQ ID NO: 1050281 - DNA, 33 bp, Homo sapien
gtcaagtccatttgggaaacatgatatagttta

SEQ ID NO: 1050282 - DNA, 33 bp, Homo sapien
gtcaagtccatttggggaacatgatatagttta

SEQ ID NO: 1050283 - DNA, 33 bp, Homo sapien
attttatgtagaaaagaagtaggttcaagtgaa

SEQ ID NO: 1050284 - DNA, 33 bp, Homo sapien
attttatgtagaaaaggagtaggttcaagtgaa

SEQ ID NO: 1050285 - DNA, 33 bp, Homo sapien
aacacagtgactcatagtagatcatttgtaaca

SEQ ID NO: 1050286 - DNA, 33 bp, Homo sapien
aacacagtgactcatattagatcatttgtaaca

SEQ ID NO: 1050287 - DNA, 33 bp, Homo sapien
accccacatgtcttcgctgtgcagataaggaac

SEQ ID NO: 1050288 - DNA, 33 bp, Homo sapien
accccacatgtcttcgttgtgcagataaggaac

SEQ ID NO: 1050289 - DNA, 33 bp, Homo sapien
atcttttaatgccacaagacttcaactgcatag

SEQ ID NO: 1050290 - DNA, 33 bp, Homo sapien
atcttttaatgccacatgacttcaactgcatag

SEQ ID NO: 1050291 - DNA, 33 bp, Homo sapien
tcacatcttttcccacacagaaaggtctttgca

SEQ ID NO: 1050292 - DNA, 33 bp, Homo sapien
tcacatcttttcccactcagaaaggtctttgca

SEQ ID NO: 1050293 - DNA, 33 bp, Homo sapien
aattcttcagaataaacgcacttacatagttcc

SEQ ID NO: 1050294 - DNA, 33 bp, Homo sapien
aattcttcagaataaatgcacttacatagttcc

SEQ ID NO: 1050295 - DNA, 33 bp, Homo sapien
cttttccagatggacaatcttaggcacagaaca

SEQ ID NO: 1050296 - DNA, 33 bp, Homo sapien
cttttccagatggacagtcttaggcacagaaca

SEQ ID NO: 1050297 - DNA, 33 bp, Homo sapien
gttatttatggtttcccgaaatgaagaagacga

SEQ ID NO: 1050298 - DNA, 33 bp, Homo sapien
gttatttatggtttcctgaaatgaagaagacga

SEQ ID NO: 1050299 - DNA, 33 bp, Homo sapien
ttgttttgttttttcacgagatagttgaacaac

SEQ ID NO: 1050300 - DNA, 33 bp, Homo sapien
ttgttttgttttttcatgagatagttgaacaac

SEQ ID NO: 1050301 - DNA, 33 bp, Homo sapien
tgtgtaatgggaatgtaaacacaatcgagaaaa

SEQ ID NO: 1050302 - DNA, 33 bp, Homo sapien
tgtgtaatgggaatgtgaacacaatcgagaaaa

SEQ ID NO: 1050303 - DNA, 33 bp, Homo sapien
gagacattggttgttacacagccatgtggcaat

SEQ ID NO: 1050304 - DNA, 33 bp, Homo sapien
gagacattggttgttatacagccatgtggcaat

SEQ ID NO: 1050305 - DNA, 33 bp, Homo sapien
cggtttgaaagctggacgtagtattttctggct

SEQ ID NO: 1050306 - DNA, 33 bp, Homo sapien
cggtttgaaagctggatgtagtattttctggct

SEQ ID NO: 1050307 - DNA, 33 bp, Homo sapien
tatgttgctggaattccaaaacacaagggtgtc

SEQ ID NO: 1050308 - DNA, 33 bp, Homo sapien
tatgttgctggaattctaaaacacaagggtgtc

SEQ ID NO: 1050309 - DNA, 33 bp, Homo sapien
ggactggcttaagtaccaacgcatggggtgtta

SEQ ID NO: 1050310 - DNA, 33 bp, Homo sapien
ggactggcttaagtacgaacgcatggggtgtta

SEQ ID NO: 1050311 - DNA, 33 bp, Homo sapien; identical to SEQ ID NO: 1050309

SEQ ID NO: 1050312 - DNA, 33 bp, Homo sapien; identical to SEQ ID NO: 1050310

SEQ ID NO: 1050313 - DNA, 33 bp, Homo sapien
acatttctggataaaacaaggcatggttttaag

SEQ ID NO: 1050314 - DNA, 33 bp, Homo sapien
acatttctggataaaataaggcatggttttaag

SEQ ID NO: 1050315 - DNA, 33 bp, Homo sapien
actttgtgaagtttcaatattttaaaaattcac

SEQ ID NO: 1050316 - DNA, 33 bp, Homo sapien
actttgtgaagtttcagtattttaaaaattcac

SEQ ID NO: 1050317 - DNA, 33 bp, Homo sapien
gattgaatatgtctgtcaatttttagtctgtta

SEQ ID NO: 1050318 - DNA, 33 bp, Homo sapien
gattgaatatgtctgtgaatttttagtctgtta

SEQ ID NO: 1050319 - DNA, 33 bp, Homo sapien
gtagccaatttgataacaaactaagtgaatagg

SEQ ID NO: 1050320 - DNA, 33 bp, Homo sapien
gtagccaatttgataataaactaagtgaatagg

SEQ ID NO: 1050321 - DNA, 33 bp, Homo sapien
ctgggtcgtaacttcaaactcagcttaagcata

SEQ ID NO: 1050322 - DNA, 33 bp, Homo sapien
ctgggtcgtaacttcatactcagcttaagcata

SEQ ID NO: 1050323 - DNA, 33 bp, Homo sapien
ggatacatgcaggtagcaaggaaagaagagagc

SEQ ID NO: 1050324 - DNA, 33 bp, Homo sapien
ggatacatgcaggtagtaaggaaagaagagagc

SEQ ID NO: 1050325 - DNA, 33 bp, Homo sapien
gtgtctgagttaaagacgattaaaatgcgctga

SEQ ID NO: 1050326 - DNA, 33 bp, Homo sapien
gtgtctgagttaaagaggattaaaatgcgctga

SEQ ID NO: 1050327 - DNA, 33 bp, Homo sapien
ttctctatttgaattacagcccattctacagta

SEQ ID NO: 1050328 - DNA, 33 bp, Homo sapien
ttctctatttgaattatagcccattctacagta

SEQ ID NO: 1050329 - DNA, 33 bp, Homo sapien
tcttggcattccattgcatcgctctctacaggc

SEQ ID NO: 1050330 - DNA, 33 bp, Homo sapien
tcttggcattccattgtatcgctctctacaggc

SEQ ID NO: 1050331 - DNA, 33 bp, Homo sapien
ctctaaccaagccttagcctcagagctgtgggg

SEQ ID NO: 1050332 - DNA, 33 bp, Homo sapien
ctctaaccaagccttatcctcagagctgtgggg

SEQ ID NO: 1050333 - DNA, 33 bp, Homo sapien
tctgattcctctccaaatattaagctttttgct

SEQ ID NO: 1050334 - DNA, 33 bp, Homo sapien
tctgattcctctccaagtattaagctttttgct

SEQ ID NO: 1050335 - DNA, 33 bp, Homo sapien
acaaaaaaatctaaaaagtagcgaggcatggtg

SEQ ID NO: 1050336 - DNA, 33 bp, Homo sapien
acaaaaaaatctaaaatgtagcgaggcatggtg

SEQ ID NO: 1050337 - DNA, 33 bp, Homo sapien
tttctgtagttgaatacgtatcaaagtgaggga

SEQ ID NO: 1050338 - DNA, 33 bp, Homo sapien
tttctgtagttgaatatgtatcaaagtgaggga

SEQ ID NO: 1050339 - DNA, 33 bp, Homo sapien
aacctcaactctgagaccggtgatatttcttcc

SEQ ID NO: 1050340 - DNA, 33 bp, Homo sapien
aacctcaactctgagatcggtgatatttcttcc

SEQ ID NO: 1050341 - DNA, 33 bp, Homo sapien
aggaatgtcagaggaccatcaggtgatgttcag

SEQ ID NO: 1050342 - DNA, 33 bp, Homo sapien
aggaatgtcagaggactatcaggtgatgttcag

SEQ ID NO: 1050343 - DNA, 33 bp, Homo sapien
ctgctcatctctgcccaactatctactgtaaca

SEQ ID NO: 1050344 - DNA, 33 bp, Homo sapien
ctgctcatctctgccctactatctactgtaaca

SEQ ID NO: 1050345 - DNA, 33 bp, Homo sapien
gtatgttagcttgaacggtggatagcattagtt

SEQ ID NO: 1050346 - DNA, 33 bp, Homo sapien
gtatgttagcttgaactgtggatagcattagtt

SEQ ID NO: 1050347 - DNA, 33 bp, Homo sapien
cacaaaagcatctggtaaacccagtccaatcaa

SEQ ID NO: 1050348 - DNA, 33 bp, Homo sapien
cacaaaagcatctggttaacccagtccaatcaa

SEQ ID NO: 1050349 - DNA, 33 bp, Homo sapien
ccaatagacttaggaaacatcagtcttcaccat

SEQ ID NO: 1050350 - DNA, 33 bp, Homo sapien
ccaatagacttaggaaccatcagtcttcaccat

SEQ ID NO: 1050351 - DNA, 33 bp, Homo sapien
ggtttgatgaatattacggagcaacgttgcagt

SEQ ID NO: 1050352 - DNA, 33 bp, Homo sapien
ggtttgatgaatattatggagcaacgttgcagt

SEQ ID NO: 1050353 - DNA, 33 bp, Homo sapien; identical to SEQ ID NO: 1050351

SEQ ID NO: 1050354 - DNA, 33 bp, Homo sapien; identical to SEQ ID NO: 1050352

SEQ ID NO: 1050355 - DNA, 33 bp, Homo sapien
aattctagttcaatacaaccactgatatgctct

SEQ ID NO: 1050356 - DNA, 33 bp, Homo sapien
aattctagttcaatacgaccactgatatgctct

SEQ ID NO: 1050357 - DNA, 33 bp, Homo sapien
agggagacacactaaaaagcatcacttatttct

SEQ ID NO: 1050358 - DNA, 33 bp, Homo sapien
agggagacacactaaagagcatcacttatttct

SEQ ID NO: 1050359 - DNA, 33 bp, Homo sapien
tgctccattcctcagaagccacttgctctttcc

SEQ ID NO: 1050360 - DNA, 33 bp, Homo sapien
tgctccattcctcagacgccacttgctctttcc

SEQ ID NO: 1050361 - DNA, 33 bp, Homo sapien
actgtgccacaattgcaacaataatgctgagca

SEQ ID NO: 1050362 - DNA, 33 bp, Homo sapien
actgtgccacaattgctacaataatgctgagca

SEQ ID NO: 1050363 - DNA, 33 bp, Homo sapien; identical to SEQ ID NO: 1050361

SEQ ID NO: 1050364 - DNA, 33 bp, Homo sapien; identical to SEQ ID NO: 1050362

SEQ ID NO: 1050365 - DNA, 33 bp, Homo sapien
tcaatgccaaataataagtagatgcaataaata

SEQ ID NO: 1050366 - DNA, 33 bp, Homo sapien
tcaatgccaaataataggtagatgcaataaata

SEQ ID NO: 1050367 - DNA, 33 bp, Homo sapien
gaagccaagaaattcccgcagatgaaccaaaat

SEQ ID NO: 1050368 - DNA, 33 bp, Homo sapien
gaagccaagaaattcctgcagatgaaccaaaat

SEQ ID NO: 1050369 - DNA, 33 bp, Homo sapien
gcattggaatgagtgtaaaggtcaaatttaggt

SEQ ID NO: 1050370 - DNA, 33 bp, Homo sapien
gcattggaatgagtgtgaaggtcaaatttaggt

SEQ ID NO: 1050371 - DNA, 33 bp, Homo sapien
gattttaattacatcacgagtgctaatatctgt

SEQ ID NO: 1050372 - DNA, 33 bp, Homo sapien
gattttaattacatcatgagtgctaatatctgt

SEQ ID NO: 1050373 - DNA, 33 bp, Homo sapien
aaaatgaagtgaaggaaagttttcaatgaccaa

SEQ ID NO: 1050374 - DNA, 33 bp, Homo sapien
aaaatgaagtgaaggagagttttcaatgaccaa

SEQ ID NO: 1050375 - DNA, 33 bp, Homo sapien
ttaatgtggctgaaacaggttcagagaatctgc

SEQ ID NO: 1050376 - DNA, 33 bp, Homo sapien
ttaatgtggctgaaacgggttcagagaatctgc

SEQ ID NO: 1050377 - DNA, 33 bp, Homo sapien
cacatcagacccatcaatagtttggatattcgc

SEQ ID NO: 1050378 - DNA, 33 bp, Homo sapien
cacatcagacccatcagtagtttggatattcgc

SEQ ID NO: 1050379 - DNA, 33 bp, Homo sapien
aatctcaactgtttggcaaattgcctatccctg

SEQ ID NO: 1050380 - DNA, 33 bp, Homo sapien
aatctcaactgtttggtaaattgcctatccctg

SEQ ID NO: 1050381 - DNA, 33 bp, Homo sapien
aaaccataacgtctcaccagaggggttttgttt

SEQ ID NO: 1050382 - DNA, 33 bp, Homo sapien
aaaccataacgtctcatcagaggggttttgttt

SEQ ID NO: 1050383 - DNA, 33 bp, Homo sapien
gcttggaaccagagtcacaaaaccagatgtttt

SEQ ID NO: 1050384 - DNA, 33 bp, Homo sapien
gcttggaaccagagtcgcaaaaccagatgtttt

SEQ ID NO: 1050385 - DNA, 33 bp, Homo sapien
agtttcccacaatggcaacatctttcaaaacta

SEQ ID NO: 1050386 - DNA, 33 bp, Homo sapien
agtttcccacaatggcgacatctttcaaaacta

SEQ ID NO: 1050387 - DNA, 33 bp, Homo sapien
agttcttttgcatcataactaagggccagaggt

SEQ ID NO: 1050388 - DNA, 33 bp, Homo sapien
agttcttttgcatcatgactaagggccagaggt

SEQ ID NO: 1050389 - DNA, 33 bp, Homo sapien; identical to SEQ ID NO: 1050387

SEQ ID NO: 1050390 - DNA, 33 bp, Homo sapien; identical to SEQ ID NO: 1050388

SEQ ID NO: 1050391 - DNA, 33 bp, Homo sapien
actattcacaatcacaaaaaacatagaatcaac

SEQ ID NO: 1050392 - DNA, 33 bp, Homo sapien
actattcacaatcacagaaaacatagaatcaac

SEQ ID NO: 1050393 - DNA, 33 bp, Homo sapien
ggcttatagtatagtacgtagtattgaaaaaca

SEQ ID NO: 1050394 - DNA, 33 bp, Homo sapien
ggcttatagtatagtatgtagtattgaaaaaca

SEQ ID NO: 1050395 - DNA, 33 bp, Homo sapien
taaacttgaaaacccacggcataagaaagggca

SEQ ID NO: 1050396 - DNA, 33 bp, Homo sapien
taaacttgaaaacccatggcataagaaagggca

SEQ ID NO: 1050397 - DNA, 33 bp, Homo sapien; identical to SEQ ID NO: 1050395

SEQ ID NO: 1050398 - DNA, 33 bp, Homo sapien; identical to SEQ ID NO: 1050396

SEQ ID NO: 1050399 - DNA, 33 bp, Homo sapien
ttttgaattttaaaaacgtgattgctctaataa

SEQ ID NO: 1050400 - DNA, 33 bp, Homo sapien
ttttgaattttaaaaatgtgattgctctaataa

SEQ ID NO: 1050401 - DNA, 33 bp, Homo sapien; identical to SEQ ID NO: 1050399

SEQ ID NO: 1050402 - DNA, 33 bp, Homo sapien; identical to SEQ ID NO: 1050400

SEQ ID NO: 1050403 - DNA, 33 bp, Homo sapien
caatatacactgcaacactctatattgataaca

SEQ ID NO: 1050404 - DNA, 33 bp, Homo sapien
caatatacactgcaactctctatattgataaca

SEQ ID NO: 1050405 - DNA, 33 bp, Homo sapien; identical to SEQ ID NO: 1050403

SEQ ID NO: 1050406 - DNA, 33 bp, Homo sapien; identical to SEQ ID NO: 1050404

SEQ ID NO: 1050407 - DNA, 33 bp, Homo sapien
gttaatgcttgcaaaaaatacactcagaagaag

SEQ ID NO: 1050408 - DNA, 33 bp, Homo sapien
gttaatgcttgcaaaagatacactcagaagaag

SEQ ID NO: 1050409 - DNA, 33 bp, Homo sapien
tgaactcagacatggcaagatttagggctaaca

SEQ ID NO: 1050410 - DNA, 33 bp, Homo sapien
tgaactcagacatggcgagatttagggctaaca

SEQ ID NO: 1050411 - DNA, 33 bp, Homo sapien
ccgcatggcttactgacaggaagggatttaggg

SEQ ID NO: 1050412 - DNA, 33 bp, Homo sapien
ccgcatggcttactgagaggaagggatttaggg

SEQ ID NO: 1050413 - DNA, 33 bp, Homo sapien
ctgtgcactccatgtgcaatgtggctcaaagga

SEQ ID NO: 1050414 - DNA, 33 bp, Homo sapien
ctgtgcactccatgtgtaatgtggctcaaagga

SEQ ID NO: 1050415 - DNA, 33 bp, Homo sapien
aaaagataatatgctacgttaaggataatttaa

SEQ ID NO: 1050416 - DNA, 33 bp, Homo sapien
aaaagataatatgctaggttaaggataatttaa

SEQ ID NO: 1050417 - DNA, 33 bp, Homo sapien
gcaaatcccttggacactcttattctaagatcc

SEQ ID NO: 1050418 - DNA, 33 bp, Homo sapien
gcaaatcccttggacattcttattctaagatcc

SEQ ID NO: 1050419 - DNA, 33 bp, Homo sapien
tttctgtatctgggtaaatggagctattcaact

SEQ ID NO: 1050420 - DNA, 33 bp, Homo sapien
tttctgtatctgggtagatggagctattcaact

SEQ ID NO: 1050421 - DNA, 33 bp, Homo sapien
aagcaaattataataaaacttccaagcataaat

SEQ ID NO: 1050422 - DNA, 33 bp, Homo sapien
aagcaaattataataatacttccaagcataaat

SEQ ID NO: 1050423 - DNA, 33 bp, Homo sapien; identical to SEQ ID NO: 1050421

SEQ ID NO: 1050424 - DNA, 33 bp, Homo sapien; identical to SEQ ID NO: 1050422

SEQ ID NO: 1050425 - DNA, 33 bp, Homo sapien
tggtgaacaggtgaaactgtgaaaatgatgacc

SEQ ID NO: 1050426 - DNA, 33 bp, Homo sapien
tggtgaacaggtgaaattgtgaaaatgatgacc

SEQ ID NO: 1050427 - DNA, 33 bp, Homo sapien
ggcatatgaagcaatacggttaagtatactttg

SEQ ID NO: 1050428 - DNA, 33 bp, Homo sapien
ggcatatgaagcaatatggttaagtatactttg

SEQ ID NO: 1050429 - DNA, 33 bp, Homo sapien
aaaacaatgaattttacagaggcaacgtatcac

SEQ ID NO: 1050430 - DNA, 33 bp, Homo sapien
aaaacaatgaattttagagaggcaacgtatcac

SEQ ID NO: 1050431 - DNA, 33 bp, Homo sapien
attttcacagaggcaacggccaagtggtagggt

SEQ ID NO: 1050432 - DNA, 33 bp, Homo sapien
attttcacagaggcaatggccaagtggtagggt

SEQ ID NO: 1050433 - DNA, 33 bp, Homo sapien
caccccagctttgtcaacatgaaagctcctcta

SEQ ID NO: 1050434 - DNA, 33 bp, Homo sapien
caccccagctttgtcagcatgaaagctcctcta

SEQ ID NO: 1050435 - DNA, 33 bp, Homo sapien
tactggtctacataaaccctgctatacttctaa

SEQ ID NO: 1050436 - DNA, 33 bp, Homo sapien
tactggtctacataaagcctgctatacttctaa

SEQ ID NO: 1050437 - DNA, 33 bp, Homo sapien
tacagattccacttgacgtcctcattccctctt

SEQ ID NO: 1050438 - DNA, 33 bp, Homo sapien
tacagattccacttgatgtcctcattccctctt

SEQ ID NO: 1050439 - DNA, 33 bp, Homo sapien
attctacagggtccaacaaattgcatgagcata

SEQ ID NO: 1050440 - DNA, 33 bp, Homo sapien
attctacagggtccaagaaattgcatgagcata

SEQ ID NO: 1050441 - DNA, 33 bp, Homo sapien
ttaagctcctagaagtaacagtgctaattggga

SEQ ID NO: 1050442 - DNA, 33 bp, Homo sapien
ttaagctcctagaagtgacagtgctaattggga

SEQ ID NO: 1050443 - DNA, 33 bp, Homo sapien
gaagggctagttgaaacgcgatgctgttgtttt

SEQ ID NO: 1050444 - DNA, 33 bp, Homo sapien
gaagggctagttgaaatgcgatgctgttgtttt

SEQ ID NO: 1050445 - DNA, 33 bp, Homo sapien
gaagcaatattcagtacgatgaaaaaattaaat

SEQ ID NO: 1050446 - DNA, 33 bp, Homo sapien
gaagcaatattcagtatgatgaaaaaattaaat

SEQ ID NO: 1050447 - DNA, 33 bp, Homo sapien
cactcaaacggcagaaaatgtccatttaaatca

SEQ ID NO: 1050448 - DNA, 33 bp, Homo sapien
cactcaaacggcagaagatgtccatttaaatca

SEQ ID NO: 1050449 - DNA, 33 bp, Homo sapien
cttgggtactggggcacggtgcattttcatgta

SEQ ID NO: 1050450 - DNA, 33 bp, Homo sapien
cttgggtactggggcatggtgcattttcatgta

SEQ ID NO: 1050451 - DNA, 33 bp, Homo sapien
tgaacttgaattgctactaacttgccattctca

SEQ ID NO: 1050452 - DNA, 33 bp, Homo sapien
tgaacttgaattgctattaacttgccattctca

SEQ ID NO: 1050453 - DNA, 33 bp, Homo sapien
tcatagtctattatgccctgacttatattctaa

SEQ ID NO: 1050454 - DNA, 33 bp, Homo sapien
tcatagtctattatgctctgacttatattctaa

SEQ ID NO: 1050455 - DNA, 33 bp, Homo sapien
ttcagggtttgtcaaccatgacactgtggacgt

SEQ ID NO: 1050456 - DNA, 33 bp, Homo sapien
ttcagggtttgtcaactatgacactgtggacgt

SEQ ID NO: 1050457 - DNA, 33 bp, Homo sapien
gcagctagcactacccagaagattactaaggag

SEQ ID NO: 1050458 - DNA, 33 bp, Homo sapien
gcagctagcactacccggaagattactaaggag

SEQ ID NO: 1050459 - DNA, 33 bp, Homo sapien
ccgactcttttccagaatcattgcattaatcga

SEQ ID NO: 1050460 - DNA, 33 bp, Homo sapien
ccgactcttttccagagtcattgcattaatcga

SEQ ID NO: 1050461 - DNA, 33 bp, Homo sapien
tgaagaatggaacaaacagctctgtagagtaaa

SEQ ID NO: 1050462 - DNA, 33 bp, Homo sapien
tgaagaatggaacaaatagctctgtagagtaaa

SEQ ID NO: 1050463 - DNA, 33 bp, Homo sapien
aggcgaatggaacatgaaaccactttaagtagc

SEQ ID NO: 1050464 - DNA, 33 bp, Homo sapien
aggcgaatggaacatggaaccactttaagtagc

SEQ ID NO: 1050465 - DNA, 33 bp, Homo sapien
atgatggaaaaccaaacaccaaatatatgttaa

SEQ ID NO: 1050466 - DNA, 33 bp, Homo sapien
atgatggaaaaccaaagaccaaatatatgttaa

SEQ ID NO: 1050467 - DNA, 33 bp, Homo sapien
acgaagtcaaattcagaaaaagagacacaaaca

SEQ ID NO: 1050468 - DNA, 33 bp, Homo sapien
acgaagtcaaattcagtaaaagagacacaaaca

SEQ ID NO: 1050469 - DNA, 33 bp, Homo sapien
gtttgttgggaagatacgtcttatgtgaaatgt

SEQ ID NO: 1050470 - DNA, 33 bp, Homo sapien
gtttgttgggaagatatgtcttatgtgaaatgt

SEQ ID NO: 1050471 - DNA, 33 bp, Homo sapien
gacaaatgtcgatgaactcttatgaagcattgt

SEQ ID NO: 1050472 - DNA, 33 bp, Homo sapien
gacaaatgtcgatgaattcttatgaagcattgt

SEQ ID NO: 1050473 - DNA, 33 bp, Homo sapien
actgcttggaaagggacgcttagtggcaatgct

SEQ ID NO: 1050474 - DNA, 33 bp, Homo sapien
actgcttggaaagggatgcttagtggcaatgct

SEQ ID NO: 1050475 - DNA, 33 bp, Homo sapien
agaggtcagggtttcacactcatttagataaat

SEQ ID NO: 1050476 - DNA, 33 bp, Homo sapien
agaggtcagggtttcatactcatttagataaat

SEQ ID NO: 1050477 - DNA, 33 bp, Homo sapien
tgagagtggtttctggacaacagctgacaagaa

SEQ ID NO: 1050478 - DNA, 33 bp, Homo sapien
tgagagtggtttctggccaacagctgacaagaa

SEQ ID NO: 1050479 - DNA, 33 bp, Homo sapien
catccgttacataacaaataccatgaaacttag

SEQ ID NO: 1050480 - DNA, 33 bp, Homo sapien
catccgttacataacatataccatgaaacttag

SEQ ID NO: 1050481 - DNA, 33 bp, Homo sapien
cccactgtcatcaccaaactttctttttccact

SEQ ID NO: 1050482 - DNA, 33 bp, Homo sapien
cccactgtcatcaccagactttctttttccact

SEQ ID NO: 1050483 - DNA, 33 bp, Homo sapien
ctgacccctgtttccaactttctatctccttct

SEQ ID NO: 1050484 - DNA, 33 bp, Homo sapien
ctgacccctgtttccatctttctatctccttct

SEQ ID NO: 1050485 - DNA, 33 bp, Homo sapien
actgccatgttgattaaattttgttcttgatct

SEQ ID NO: 1050486 - DNA, 33 bp, Homo sapien
actgccatgttgattacattttgttcttgatct

SEQ ID NO: 1050487 - DNA, 33 bp, Homo sapien
tgtgatgctaataaccaacaaaaaggtgttgta

SEQ ID NO: 1050488 - DNA, 33 bp, Homo sapien
tgtgatgctaataaccgacaaaaaggtgttgta

SEQ ID NO: 1050489 - DNA, 33 bp, Homo sapien
tagtacacgtgatgtcgaggattgaggttcagc

SEQ ID NO: 1050490 - DNA, 33 bp, Homo sapien
tagtacacgtgatgtctaggattgaggttcagc

SEQ ID NO: 1050491 - DNA, 33 bp, Homo sapien
cccagatttgaaggtcacatcttcatgttatat

SEQ ID NO: 1050492 - DNA, 33 bp, Homo sapien
cccagatttgaaggtcgcatcttcatgttatat

SEQ ID NO: 1050493 - DNA, 33 bp, Homo sapien
ttacttagcaattttaagaacctggctttccat

SEQ ID NO: 1050494 - DNA, 33 bp, Homo sapien
ttacttagcaattttaggaacctggctttccat

SEQ ID NO: 1050495 - DNA, 33 bp, Homo sapien
gcctcccagctcttcaaaatcaacctcttgccc

SEQ ID NO: 1050496 - DNA, 33 bp, Homo sapien
gcctcccagctcttcagaatcaacctcttgccc

SEQ ID NO: 1050497 - DNA, 33 bp, Homo sapien
gacatgaaacagaatacgtaacacgtgtgggaa

SEQ ID NO: 1050498 - DNA, 33 bp, Homo sapien
gacatgaaacagaatatgtaacacgtgtgggaa

SEQ ID NO: 1050499 - DNA, 33 bp, Homo sapien
gttttttctggttctcaaagggaatgcttctac

SEQ ID NO: 1050500 - DNA, 33 bp, Homo sapien
gttttttctggttctccaagggaatgcttctac

SEQ ID NO: 1050501 - DNA, 33 bp, Homo sapien
tgagcctttcactggagagggcaggacccctca

SEQ ID NO: 1050502 - DNA, 33 bp, Homo sapien
tgagcctttcactggatagggcaggacccctca

SEQ ID NO: 1050503 - DNA, 33 bp, Homo sapien
gcatccaaacatcttgcaaaggcacatataata

SEQ ID NO: 1050504 - DNA, 33 bp, Homo sapien
gcatccaaacatcttgtaaaggcacatataata

SEQ ID NO: 1050505 - DNA, 33 bp, Homo sapien
tgagaccaggatggaacccacgctatctccctc

SEQ ID NO: 1050506 - DNA, 33 bp, Homo sapien
tgagaccaggatggaatccacgctatctccctc

SEQ ID NO: 1050507 - DNA, 33 bp, Homo sapien
ggcatttgacatccaaataagtgaaaaactgtt

SEQ ID NO: 1050508 - DNA, 33 bp, Homo sapien
ggcatttgacatccaagtaagtgaaaaactgtt

SEQ ID NO: 1050509 - DNA, 33 bp, Homo sapien
tgctaaggagtcagaccgtatctgaaaagaagg

SEQ ID NO: 1050510 - DNA, 33 bp, Homo sapien
tgctaaggagtcagactgtatctgaaaagaagg

SEQ ID NO: 1050511 - DNA, 33 bp, Homo sapien
tcagttataatgttaacagtcactatgaaatgt

SEQ ID NO: 1050512 - DNA, 33 bp, Homo sapien
tcagttataatgttaatagtcactatgaaatgt

SEQ ID NO: 1050513 - DNA, 33 bp, Homo sapien
ttgtcattacatagaacctcctgcacaatctcc

SEQ ID NO: 1050514 - DNA, 33 bp, Homo sapien
ttgtcattacatagaatctcctgcacaatctcc

SEQ ID NO: 1050515 - DNA, 33 bp, Homo sapien
ttttctgttaaaagcccgatggtacatattttc

SEQ ID NO: 1050516 - DNA, 33 bp, Homo sapien
ttttctgttaaaagcctgatggtacatattttc

SEQ ID NO: 1050517 - DNA, 33 bp, Homo sapien
ccccattcatactacaatgtaaactagtgaaaa

SEQ ID NO: 1050518 - DNA, 33 bp, Homo sapien
ccccattcatactacagtgtaaactagtgaaaa

SEQ ID NO: 1050519 - DNA, 33 bp, Homo sapien
ggttttggcagagtccacttttgtacttagatc

SEQ ID NO: 1050520 - DNA, 33 bp, Homo sapien
ggttttggcagagtccgcttttgtacttagatc

SEQ ID NO: 1050521 - DNA, 33 bp, Homo sapien
gcaagttagaggcaacagttctatattatttgg

SEQ ID NO: 1050522 - DNA, 33 bp, Homo sapien
gcaagttagaggcaacggttctatattatttgg

SEQ ID NO: 1050523 - DNA, 33 bp, Homo sapien
aatatgagctagtatacatgagataaccacatt

SEQ ID NO: 1050524 - DNA, 33 bp, Homo sapien
aatatgagctagtatatatgagataaccacatt

SEQ ID NO: 1050525 - DNA, 33 bp, Homo sapien
tatcacgttaaacatacgagcaagtttgtttta

SEQ ID NO: 1050526 - DNA, 33 bp, Homo sapien
tatcacgttaaacatatgagcaagtttgtttta

SEQ ID NO: 1050527 - DNA, 33 bp, Homo sapien
tagaaaaggttgaagaaattgactaaaacattt

SEQ ID NO: 1050528 - DNA, 33 bp, Homo sapien
tagaaaaggttgaagacattgactaaaacattt

SEQ ID NO: 1050529 - DNA, 33 bp, Homo sapien
agttggtcctctgaacaggctttgtaatccgac

SEQ ID NO: 1050530 - DNA, 33 bp, Homo sapien
agttggtcctctgaacgggctttgtaatccgac

SEQ ID NO: 1050531 - DNA, 33 bp, Homo sapien
aagacctgttgactgacgcttcaaaagtgaatt

SEQ ID NO: 1050532 - DNA, 33 bp, Homo sapien
aagacctgttgactgatgcttcaaaagtgaatt

SEQ ID NO: 1050533 - DNA, 33 bp, Homo sapien
ttcaggccagtagagccaatttgttctcctgct

SEQ ID NO: 1050534 - DNA, 33 bp, Homo sapien
ttcaggccagtagagctaatttgttctcctgct

SEQ ID NO: 1050535 - DNA, 33 bp, Homo sapien
ataatttcatggcccaaatcacattcaatttaa

SEQ ID NO: 1050536 - DNA, 33 bp, Homo sapien
ataatttcatggcccagatcacattcaatttaa

SEQ ID NO: 1050537 - DNA, 33 bp, Homo sapien
cgtcaaactcgatatacccaaaaatgcgatcaa

SEQ ID NO: 1050538 - DNA, 33 bp, Homo sapien
cgtcaaactcgatatatccaaaaatgcgatcaa

SEQ ID NO: 1050539 - DNA, 33 bp, Homo sapien
ctatttaacagagatcaaagtaaactcctctat

SEQ ID NO: 1050540 - DNA, 33 bp, Homo sapien
ctatttaacagagatcgaagtaaactcctctat

SEQ ID NO: 1050541 - DNA, 33 bp, Homo sapien
gaaattctcagacaggaaaaatcactctcggaa

SEQ ID NO: 1050542 - DNA, 33 bp, Homo sapien
gaaattctcagacaggtaaaatcactctcggaa

SEQ ID NO: 1050543 - DNA, 33 bp, Homo sapien
aggaagctattaaggaaacagtcgtattttttc

SEQ ID NO: 1050544 - DNA, 33 bp, Homo sapien
aggaagctattaaggagacagtcgtattttttc

SEQ ID NO: 1050545 - DNA, 33 bp, Homo sapien
ttactcctactacaagcatggatgacagcacaa

SEQ ID NO: 1050546 - DNA, 33 bp, Homo sapien
ttactcctactacaagtatggatgacagcacaa

SEQ ID NO: 1050547 - DNA, 33 bp, Homo sapien
cctatttgcagagtacacccacattctgttaaa

SEQ ID NO: 1050548 - DNA, 33 bp, Homo sapien
cctatttgcagagtacgcccacattctgttaaa

SEQ ID NO: 1050549 - DNA, 33 bp, Homo sapien
caatgagactcctctcaatttccactgctattc

SEQ ID NO: 1050550 - DNA, 33 bp, Homo sapien
caatgagactcctctcgatttccactgctattc

SEQ ID NO: 1050551 - DNA, 33 bp, Homo sapien
ttatcttgcaccacacacataactgtctcaaaa

SEQ ID NO: 1050552 - DNA, 33 bp, Homo sapien
ttatcttgcaccacactcataactgtctcaaaa

SEQ ID NO: 1050553 - DNA, 33 bp, Homo sapien
tattgagatgactaagaaatagtccacgtgttt

SEQ ID NO: 1050554 - DNA, 33 bp, Homo sapien
tattgagatgactaaggaatagtccacgtgttt

SEQ ID NO: 1050555 - DNA, 33 bp, Homo sapien
cataaataaacctcacaaacattactctacatg

SEQ ID NO: 1050556 - DNA, 33 bp, Homo sapien
cataaataaacctcacgaacattactctacatg

SEQ ID NO: 1050557 - DNA, 33 bp, Homo sapien
aacttgggctaatgaactactaacgaaggtggc

SEQ ID NO: 1050558 - DNA, 33 bp, Homo sapien
aacttgggctaatgaattactaacgaaggtggc

SEQ ID NO: 1050559 - DNA, 33 bp, Homo sapien
gtccttttggcagatgcataaaaccaacttgtg

SEQ ID NO: 1050560 - DNA, 33 bp, Homo sapien
gtccttttggcagatgtataaaaccaacttgtg

SEQ ID NO: 1050561 - DNA, 33 bp, Homo sapien
tggaacagagtaggtaagatcagatccaaaatg

SEQ ID NO: 1050562 - DNA, 33 bp, Homo sapien
tggaacagagtaggtaggatcagatccaaaatg

SEQ ID NO: 1050563 - DNA, 33 bp, Homo sapien
ttggcttgggtatcaccgcctctagcaaatgca

SEQ ID NO: 1050564 - DNA, 33 bp, Homo sapien
ttggcttgggtatcacggcctctagcaaatgca

SEQ ID NO: 1050565 - DNA, 33 bp, Homo sapien
caccccaaagaccaaaactgtcagagaccacct

SEQ ID NO: 1050566 - DNA, 33 bp, Homo sapien
caccccaaagaccaaagctgtcagagaccacct

SEQ ID NO: 1050567 - DNA, 33 bp, Homo sapien
tgccccgtattgctgacgggactaatgagaagt

SEQ ID NO: 1050568 - DNA, 33 bp, Homo sapien
tgccccgtattgctgatgggactaatgagaagt

SEQ ID NO: 1050569 - DNA, 33 bp, Homo sapien
cgatcatctggcctccaggaatctcaactccat

SEQ ID NO: 1050570 - DNA, 33 bp, Homo sapien
cgatcatctggcctccgggaatctcaactccat

SEQ ID NO: 1050571 - DNA, 33 bp, Homo sapien
gaaatgccaaaagtcaagaatctcaacatgcgt

SEQ ID NO: 1050572 - DNA, 33 bp, Homo sapien
gaaatgccaaaagtcaggaatctcaacatgcgt

SEQ ID NO: 1050573 - DNA, 33 bp, Homo sapien
aatgtctctgctttctaaaaatctgcctcatgg

SEQ ID NO: 1050574 - DNA, 33 bp, Homo sapien
aatgtctctgctttctcaaaatctgcctcatgg

SEQ ID NO: 1050575 - DNA, 33 bp, Homo sapien
gcgtttctacaaaccactatttcctttctagca

SEQ ID NO: 1050576 - DNA, 33 bp, Homo sapien
gcgtttctacaaaccagtatttcctttctagca

SEQ ID NO: 1050577 - DNA, 33 bp, Homo sapien
tacatataggtatagacggttatatgtgtatgt

SEQ ID NO: 1050578 - DNA, 33 bp, Homo sapien
tacatataggtatagatggttatatgtgtatgt

SEQ ID NO: 1050579 - DNA, 33 bp, Homo sapien
gtgtgaagacttgctgcaaagatgggctactct

SEQ ID NO: 1050580 - DNA, 33 bp, Homo sapien
gtgtgaagacttgctgtaaagatgggctactct

SEQ ID NO: 1050581 - DNA, 33 bp, Homo sapien
ttgggctgctgtaaccagagaataactacccta

SEQ ID NO: 1050582 - DNA, 33 bp, Homo sapien
ttgggctgctgtaaccggagaataactacccta

SEQ ID NO: 1050583 - DNA, 33 bp, Homo sapien
aacccctgatgtaggaagtcataaaacactgtt

SEQ ID NO: 1050584 - DNA, 33 bp, Homo sapien
aacccctgatgtaggatgtcataaaacactgtt

SEQ ID NO: 1050585 - DNA, 33 bp, Homo sapien
ttgtctattcctcccgaagctggcagacagaac

SEQ ID NO: 1050586 - DNA, 33 bp, Homo sapien
ttgtctattcctcccgtagctggcagacagaac

SEQ ID NO: 1050587 - DNA, 33 bp, Homo sapien
tatggagactgtaggacgcttcacgctgagtat

SEQ ID NO: 1050588 - DNA, 33 bp, Homo sapien
tatggagactgtaggatgcttcacgctgagtat

SEQ ID NO: 1050589 - DNA, 33 bp, Homo sapien
tcagtacgctcctcccaacccattaatacagcg

SEQ ID NO: 1050590 - DNA, 33 bp, Homo sapien
tcagtacgctcctcccgacccattaatacagcg

SEQ ID NO: 1050591 - DNA, 33 bp, Homo sapien
acaaaagtagctagcacaaaagacatgcaggtg

SEQ ID NO: 1050592 - DNA, 33 bp, Homo sapien
acaaaagtagctagcataaaagacatgcaggtg

SEQ ID NO: 1050593 - DNA, 33 bp, Homo sapien
agaagccaaattagagaagacgttgaggatcca

SEQ ID NO: 1050594 - DNA, 33 bp, Homo sapien
agaagccaaattagaggagacgttgaggatcca

SEQ ID NO: 1050595 - DNA, 33 bp, Homo sapien
tttaataacagttaagacatcaacatatacaaa

SEQ ID NO: 1050596 - DNA, 33 bp, Homo sapien
tttaataacagttaaggcatcaacatatacaaa

SEQ ID NO: 1050597 - DNA, 33 bp, Homo sapien
attaaaccatatgcaacgtattcactgtcgtaa

SEQ ID NO: 1050598 - DNA, 33 bp, Homo sapien
attaaaccatatgcaatgtattcactgtcgtaa

SEQ ID NO: 1050599 - DNA, 33 bp, Homo sapien
ctcctctttttgataaagtccttattccaatga

SEQ ID NO: 1050600 - DNA, 33 bp, Homo sapien
ctcctctttttgataaggtccttattccaatga

SEQ ID NO: 1050601 - DNA, 33 bp, Homo sapien
tctgtcaagttactgcacacatcaatggtttgt

SEQ ID NO: 1050602 - DNA, 33 bp, Homo sapien
tctgtcaagttactgcgcacatcaatggtttgt

SEQ ID NO: 1050603 - DNA, 33 bp, Homo sapien
caaatactgtaccactcagcaattgcccccttg

SEQ ID NO: 1050604 - DNA, 33 bp, Homo sapien
caaatactgtaccactgagcaattgcccccttg

SEQ ID NO: 1050605 - DNA, 33 bp, Homo sapien
actgtaaaagaatccacgaaatcctggaaccag

SEQ ID NO: 1050606 - DNA, 33 bp, Homo sapien
actgtaaaagaatccatgaaatcctggaaccag

SEQ ID NO: 1050607 - DNA, 33 bp, Homo sapien
taacagaaaccagtacactaaccaacttctaca

SEQ ID NO: 1050608 - DNA, 33 bp, Homo sapien
taacagaaaccagtacgctaaccaacttctaca

SEQ ID NO: 1050609 - DNA, 33 bp, Homo sapien
tgccaacatagaagcacgtttctgtcacttaca

SEQ ID NO: 1050610 - DNA, 33 bp, Homo sapien
tgccaacatagaagcaggtttctgtcacttaca

SEQ ID NO: 1050611 - DNA, 33 bp, Homo sapien
aacacaagggaatccaagaagagacaccattgg

SEQ ID NO: 1050612 - DNA, 33 bp, Homo sapien
aacacaagggaatccaggaagagacaccattgg

SEQ ID NO: 1050613 - DNA, 33 bp, Homo sapien
catgtgcattgcctcacggaagatggcatgcag

SEQ ID NO: 1050614 - DNA, 33 bp, Homo sapien
catgtgcattgcctcatggaagatggcatgcag

SEQ ID NO: 1050615 - DNA, 33 bp, Homo sapien
gacggtatttgttaaacgaattaaaggaagtgt

SEQ ID NO: 1050616 - DNA, 33 bp, Homo sapien
gacggtatttgttaaatgaattaaaggaagtgt

SEQ ID NO: 1050617 - DNA, 33 bp, Homo sapien
ccatcactttttaccaaattcaccaaagtccat

SEQ ID NO: 1050618 - DNA, 33 bp, Homo sapien
ccatcactttttaccagattcaccaaagtccat

SEQ ID NO: 1050619 - DNA, 33 bp, Homo sapien
catgtcaaagattctaagctagtataatgcttc

SEQ ID NO: 1050620 - DNA, 33 bp, Homo sapien
catgtcaaagattctaggctagtataatgcttc

SEQ ID NO: 1050621 - DNA, 33 bp, Homo sapien
catgttagagaaaaagcagagaacattctgtca

SEQ ID NO: 1050622 - DNA, 33 bp, Homo sapien
catgttagagaaaaaggagagaacattctgtca

SEQ ID NO: 1050623 - DNA, 33 bp, Homo sapien
cagcactattcgattacatgagacaagcttctt

SEQ ID NO: 1050624 - DNA, 33 bp, Homo sapien
cagcactattcgattagatgagacaagcttctt

SEQ ID NO: 1050625 - DNA, 33 bp, Homo sapien
gccacagaagaccctaactaaggccctgagcag

SEQ ID NO: 1050626 - DNA, 33 bp, Homo sapien
gccacagaagaccctacctaaggccctgagcag

SEQ ID NO: 1050627 - DNA, 33 bp, Homo sapien; identical to SEQ ID NO: 1050623

SEQ ID NO: 1050628 - DNA, 33 bp, Homo sapien; identical to SEQ ID NO: 1050624

SEQ ID NO: 1050629 - DNA, 33 bp, Homo sapien
acaaattagaggatcacaactggccatgtcatt

SEQ ID NO: 1050630 - DNA, 33 bp, Homo sapien
acaaattagaggatcagaactggccatgtcatt

SEQ ID NO: 1050631 - DNA, 33 bp, Homo sapien
tctccaatcctgatagaccagtcaggattcaac

SEQ ID NO: 1050632 - DNA, 33 bp, Homo sapien
tctccaatcctgatagtccagtcaggattcaac

SEQ ID NO: 1050633 - DNA, 33 bp, Homo sapien
attgagttattagttacgtaccaagatcagttt

SEQ ID NO: 1050634 - DNA, 33 bp, Homo sapien
attgagttattagttatgtaccaagatcagttt

SEQ ID NO: 1050635 - DNA, 33 bp, Homo sapien
gcaaaaaaacctaatacgctacatccgagaagt

SEQ ID NO: 1050636 - DNA, 33 bp, Homo sapien
gcaaaaaaacctaatatgctacatccgagaagt

SEQ ID NO: 1050637 - DNA, 33 bp, Homo sapien
aactaaacattgggataaagtgacagttgttta

SEQ ID NO: 1050638 - DNA, 33 bp, Homo sapien
aactaaacattgggatcaagtgacagttgttta

SEQ ID NO: 1050639 - DNA, 33 bp, Homo sapien
ggatgcagtttcaacacacccgaaggaaggttt

SEQ ID NO: 1050640 - DNA, 33 bp, Homo sapien
ggatgcagtttcaacagacccgaaggaaggttt

SEQ ID NO: 1050641 - DNA, 33 bp, Homo sapien
aacaaaaactcaagaccgaaatttctcttgtaa

SEQ ID NO: 1050642 - DNA, 33 bp, Homo sapien
aacaaaaactcaagactgaaatttctcttgtaa

SEQ ID NO: 1050643 - DNA, 33 bp, Homo sapien
aagactcagcccagggcattccaaagctcaaag

SEQ ID NO: 1050644 - DNA, 33 bp, Homo sapien
aagactcagcccagggtattccaaagctcaaag

SEQ ID NO: 1050645 - DNA, 33 bp, Homo sapien
cttgtttttagcacaacaaaatgggataatagt

SEQ ID NO: 1050646 - DNA, 33 bp, Homo sapien
cttgtttttagcacaagaaaatgggataatagt

SEQ ID NO: 1050647 - DNA, 33 bp, Homo sapien
aaataaaaatggtccccgctctctaggaactta

SEQ ID NO: 1050648 - DNA, 33 bp, Homo sapien
aaataaaaatggtccctgctctctaggaactta

SEQ ID NO: 1050649 - DNA, 33 bp, Homo sapien
ggtcagtgcctaaatacggcctagagagattat

SEQ ID NO: 1050650 - DNA, 33 bp, Homo sapien
ggtcagtgcctaaatatggcctagagagattat

SEQ ID NO: 1050651 - DNA, 33 bp, Homo sapien
aaagccttttgtaaacactttgcacctgtctca

SEQ ID NO: 1050652 - DNA, 33 bp, Homo sapien
aaagccttttgtaaacgctttgcacctgtctca

SEQ ID NO: 1050653 - DNA, 33 bp, Homo sapien
agactgtattctccacaactgtatattttttgt

SEQ ID NO: 1050654 - DNA, 33 bp, Homo sapien
agactgtattctccacgactgtatattttttgt

SEQ ID NO: 1050655 - DNA, 33 bp, Homo sapien
tagaccttgtgagtacagagtcctaaaagaagg

SEQ ID NO: 1050656 - DNA, 33 bp, Homo sapien
tagaccttgtgagtacggagtcctaaaagaagg

SEQ ID NO: 1050657 - DNA, 33 bp, Homo sapien
aaataccacagatataacaaactgtcgtccaag

SEQ ID NO: 1050658 - DNA, 33 bp, Homo sapien
aaataccacagatatagcaaactgtcgtccaag

SEQ ID NO: 1050659 - DNA, 33 bp, Homo sapien
cccgtgtctttccgcaagctgtggtaagaaacg

SEQ ID NO: 1050660 - DNA, 33 bp, Homo sapien
cccgtgtctttccgcacgctgtggtaagaaacg

SEQ ID NO: 1050661 - DNA, 33 bp, Homo sapien
atcctctggcactggaacacccgcaatgctcat

SEQ ID NO: 1050662 - DNA, 33 bp, Homo sapien
atcctctggcactggagcacccgcaatgctcat

SEQ ID NO: 1050663 - DNA, 33 bp, Homo sapien
tgagaagagggtacgcactccccacgtcccatt

SEQ ID NO: 1050664 - DNA, 33 bp, Homo sapien
tgagaagagggtacgcgctccccacgtcccatt

SEQ ID NO: 1050665 - DNA, 33 bp, Homo sapien
tggtggctgctcaaaaccgctggtactgaattc

SEQ ID NO: 1050666 - DNA, 33 bp, Homo sapien
tggtggctgctcaaaatcgctggtactgaattc

SEQ ID NO: 1050667 - DNA, 33 bp, Homo sapien
ctcctccaaagcattaagagtgacaagggaaga

SEQ ID NO: 1050668 - DNA, 33 bp, Homo sapien
ctcctccaaagcattacgagtgacaagggaaga

SEQ ID NO: 1050669 - DNA, 33 bp, Homo sapien
atagcctctgtattgaagaacaccagcaggtga

SEQ ID NO: 1050670 - DNA, 33 bp, Homo sapien
atagcctctgtattgacgaacaccagcaggtga

SEQ ID NO: 1050671 - DNA, 33 bp, Homo sapien
tggatggattccataaatagctcgtgctgtttc

SEQ ID NO: 1050672 - DNA, 33 bp, Homo sapien
tggatggattccataattagctcgtgctgtttc

SEQ ID NO: 1050673 - DNA, 33 bp, Homo sapien
atcttttaaaacagtacaatcgttattgtgtgt

SEQ ID NO: 1050674 - DNA, 33 bp, Homo sapien
atcttttaaaacagtataatcgttattgtgtgt

SEQ ID NO: 1050675 - DNA, 33 bp, Homo sapien
agggagagacaatttacgacaacccagatcaag

SEQ ID NO: 1050676 - DNA, 33 bp, Homo sapien
agggagagacaatttatgacaacccagatcaag

SEQ ID NO: 1050677 - DNA, 33 bp, Homo sapien
gataaaggtagggtccaaccgtgactcctatga

SEQ ID NO: 1050678 - DNA, 33 bp, Homo sapien
gataaaggtagggtccgaccgtgactcctatga

SEQ ID NO: 1050679 - DNA, 33 bp, Homo sapien
tttctaatagtagacacggaagtctttttgaca

SEQ ID NO: 1050680 - DNA, 33 bp, Homo sapien
tttctaatagtagacagggaagtctttttgaca

SEQ ID NO: 1050681 - DNA, 33 bp, Homo sapien
ggcgggcaggtactacggacctctgtaaactaa

SEQ ID NO: 1050682 - DNA, 33 bp, Homo sapien
ggcgggcaggtactactgacctctgtaaactaa

SEQ ID NO: 1050683 - DNA, 33 bp, Homo sapien
gaagtgtttgctttcccgatgatttcatgctgt

SEQ ID NO: 1050684 - DNA, 33 bp, Homo sapien
gaagtgtttgctttcctgatgatttcatgctgt

SEQ ID NO: 1050685 - DNA, 33 bp, Homo sapien
gtccaatatcctacacacaactgccatgttcta

SEQ ID NO: 1050686 - DNA, 33 bp, Homo sapien
gtccaatatcctacacgcaactgccatgttcta

SEQ ID NO: 1050687 - DNA, 33 bp, Homo sapien
ataaaaggagtgaagccctggaacgtgctacaa

SEQ ID NO: 1050688 - DNA, 33 bp, Homo sapien
ataaaaggagtgaagctctggaacgtgctacaa

SEQ ID NO: 1050689 - DNA, 33 bp, Homo sapien
tatctgcagtgccttcactacgtaatcacaatt

SEQ ID NO: 1050690 - DNA, 33 bp, Homo sapien
tatctgcagtgccttcgctacgtaatcacaatt

SEQ ID NO: 1050691 - DNA, 33 bp, Homo sapien
gccctcaaattccttacgtaaaagtcctgaccc

SEQ ID NO: 1050692 - DNA, 33 bp, Homo sapien
gccctcaaattccttatgtaaaagtcctgaccc

SEQ ID NO: 1050693 - DNA, 33 bp, Homo sapien
gtgtttgctgacataaatgtaaggatggttgga

SEQ ID NO: 1050694 - DNA, 33 bp, Homo sapien
gtgtttgctgacataagtgtaaggatggttgga

SEQ ID NO: 1050695 - DNA, 33 bp, Homo sapien
taatcagtatgaaaacaactatataggaaatga

SEQ ID NO: 1050696 - DNA, 33 bp, Homo sapien
taatcagtatgaaaaccactatataggaaatga

SEQ ID NO: 1050697 - DNA, 33 bp, Homo sapien
ggctccaatgcgtacagtctaccctaccaggcc

SEQ ID NO: 1050698 - DNA, 33 bp, Homo sapien
ggctccaatgcgtacattctaccctaccaggcc

SEQ ID NO: 1050699 - DNA, 33 bp, Homo sapien
ccgtaagacagaggccaatggactcacacactg

SEQ ID NO: 1050700 - DNA, 33 bp, Homo sapien
ccgtaagacagaggccgatggactcacacactg

SEQ ID NO: 1050701 - DNA, 33 bp, Homo sapien
ctgaaacgtttttgtcacctatattacgaggaa

SEQ ID NO: 1050702 - DNA, 33 bp, Homo sapien
ctgaaacgtttttgtcgcctatattacgaggaa

SEQ ID NO: 1050703 - DNA, 33 bp, Homo sapien
ctgtagtaatatgtcactctcttcctcctgaag

SEQ ID NO: 1050704 - DNA, 33 bp, Homo sapien
ctgtagtaatatgtcagtctcttcctcctgaag

SEQ ID NO: 1050705 - DNA, 33 bp, Homo sapien
ggatctcgttaaaatacggttttgccataacat

SEQ ID NO: 1050706 - DNA, 33 bp, Homo sapien
ggatctcgttaaaatagggttttgccataacat

SEQ ID NO: 1050707 - DNA, 33 bp, Homo sapien
caaacaggtctgcagcacataaaaatgttctca

SEQ ID NO: 1050708 - DNA, 33 bp, Homo sapien
caaacaggtctgcagcgcataaaaatgttctca

SEQ ID NO: 1050709 - DNA, 33 bp, Homo sapien
tgggagccgggatgaaaaatcaaatggtgaaga

SEQ ID NO: 1050710 - DNA, 33 bp, Homo sapien
tgggagccgggatgaagaatcaaatggtgaaga

SEQ ID NO: 1050711 - DNA, 33 bp, Homo sapien
aaacggttctaccattaaagtcccttgtttcat

SEQ ID NO: 1050712 - DNA, 33 bp, Homo sapien
aaacggttctaccatttaagtcccttgtttcat

SEQ ID NO: 1050713 - DNA, 33 bp, Homo sapien
tgtgtatcgctgcaaccgagacccagaagtgtt

SEQ ID NO: 1050714 - DNA, 33 bp, Homo sapien
tgtgtatcgctgcaactgagacccagaagtgtt

SEQ ID NO: 1050715 - DNA, 33 bp, Homo sapien
ctttatgcattttttcaatcttttatctgttct

SEQ ID NO: 1050716 - DNA, 33 bp, Homo sapien
ctttatgcattttttcgatcttttatctgttct

SEQ ID NO: 1050717 - DNA, 33 bp, Homo sapien
aagaccagtttgtaccaatgaaacgcgcaactt

SEQ ID NO: 1050718 - DNA, 33 bp, Homo sapien
aagaccagtttgtaccgatgaaacgcgcaactt

SEQ ID NO: 1050719 - DNA, 33 bp, Homo sapien
tctgcagtgtcctgagaagatagtgtgtcttgc

SEQ ID NO: 1050720 - DNA, 33 bp, Homo sapien
tctgcagtgtcctgagcagatagtgtgtcttgc

SEQ ID NO: 1050721 - DNA, 33 bp, Homo sapien
aatattagaattgagaacttaatgaactgtagg

SEQ ID NO: 1050722 - DNA, 33 bp, Homo sapien
aatattagaattgagaccttaatgaactgtagg

SEQ ID NO: 1050723 - DNA, 33 bp, Homo sapien
gctgtcaaggcacctacgtgactgtactgaccc

SEQ ID NO: 1050724 - DNA, 33 bp, Homo sapien
gctgtcaaggcacctatgtgactgtactgaccc

SEQ ID NO: 1050725 - DNA, 33 bp, Homo sapien
aaaggaattatggtgcagaattagttgtaggag

SEQ ID NO: 1050726 - DNA, 33 bp, Homo sapien
aaaggaattatggtgcggaattagttgtaggag

SEQ ID NO: 1050727 - DNA, 33 bp, Homo sapien
gtgttgggatctgggacaatcctgaagagagtc

SEQ ID NO: 1050728 - DNA, 33 bp, Homo sapien
gtgttgggatctgggagaatcctgaagagagtc

SEQ ID NO: 1050729 - DNA, 33 bp, Homo sapien
ataacagtctgatggaataaatatgccaaaagt

SEQ ID NO: 1050730 - DNA, 33 bp, Homo sapien
ataacagtctgatggagtaaatatgccaaaagt

SEQ ID NO: 1050731 - DNA, 33 bp, Homo sapien
tttctgagaactcacaactcaggtggaattttc

SEQ ID NO: 1050732 - DNA, 33 bp, Homo sapien
tttctgagaactcacagctcaggtggaattttc

SEQ ID NO: 1050733 - DNA, 33 bp, Homo sapien
gctcctatctcttggaataaccattctgagatg

SEQ ID NO: 1050734 - DNA, 33 bp, Homo sapien
gctcctatctcttggagtaaccattctgagatg

SEQ ID NO: 1050735 - DNA, 33 bp, Homo sapien
gatttggaaagaggacacaagactggacacttc

SEQ ID NO: 1050736 - DNA, 33 bp, Homo sapien
gatttggaaagaggacgcaagactggacacttc

SEQ ID NO: 1050737 - DNA, 33 bp, Homo sapien
agactgtttatgacacagcattctcatccgtca

SEQ ID NO: 1050738 - DNA, 33 bp, Homo sapien
agactgtttatgacacggcattctcatccgtca

SEQ ID NO: 1050739 - DNA, 33 bp, Homo sapien
agattatcagctccgacgaatgtaagagacata

SEQ ID NO: 1050740 - DNA, 33 bp, Homo sapien
agattatcagctccgatgaatgtaagagacata

SEQ ID NO: 1050741 - DNA, 33 bp, Homo sapien
cccagcttagcaagtgccacaaggccaccagca

SEQ ID NO: 1050742 - DNA, 33 bp, Homo sapien
cccagcttagcaagtgtcacaaggccaccagca

SEQ ID NO: 1050743 - DNA, 33 bp, Homo sapien
ggggtgctcagccctacattgatggcaaaaggt

SEQ ID NO: 1050744 - DNA, 33 bp, Homo sapien
ggggtgctcagccctatattgatggcaaaaggt

SEQ ID NO: 1050745 - DNA, 33 bp, Homo sapien
acagtttttaacaacacgttgaagcagagcagg

SEQ ID NO: 1050746 - DNA, 33 bp, Homo sapien
acagtttttaacaacaggttgaagcagagcagg

SEQ ID NO: 1050747 - DNA, 33 bp, Homo sapien
ttccgtctcctaactagatcctggctgatacaa

SEQ ID NO: 1050748 - DNA, 33 bp, Homo sapien
ttccgtctcctaactatatcctggctgatacaa

SEQ ID NO: 1050749 - DNA, 33 bp, Homo sapien
ggtagtggagaaagtcgctgagggccaccgctg

SEQ ID NO: 1050750 - DNA, 33 bp, Homo sapien
ggtagtggagaaagtctctgagggccaccgctg

SEQ ID NO: 1050751 - DNA, 33 bp, Homo sapien
tagacctttgtggactaaatacctccttgagca

SEQ ID NO: 1050752 - DNA, 33 bp, Homo sapien
tagacctttgtggactgaatacctccttgagca

SEQ ID NO: 1050753 - DNA, 33 bp, Homo sapien
tgaagacgccgagctcaataaattaagcagact

SEQ ID NO: 1050754 - DNA, 33 bp, Homo sapien
tgaagacgccgagctcgataaattaagcagact

SEQ ID NO: 1050755 - DNA, 33 bp, Homo sapien
cgtctcctaacgtgcaaaatgcctcattgttct

SEQ ID NO: 1050756 - DNA, 33 bp, Homo sapien
cgtctcctaacgtgcagaatgcctcattgttct

SEQ ID NO: 1050757 - DNA, 33 bp, Homo sapien
cagaactgtgtcaccccgaagaagtgctgcttc

SEQ ID NO: 1050758 - DNA, 33 bp, Homo sapien
cagaactgtgtcaccctgaagaagtgctgcttc

SEQ ID NO: 1050759 - DNA, 33 bp, Homo sapien
gggtgggaaagacagtaaaaatgaggtgtgtat

SEQ ID NO: 1050760 - DNA, 33 bp, Homo sapien
gggtgggaaagacagtgaaaatgaggtgtgtat

SEQ ID NO: 1050761 - DNA, 33 bp, Homo sapien
aacacttagcttttcaactgccagaagaatgga

SEQ ID NO: 1050762 - DNA, 33 bp, Homo sapien
aacacttagcttttcagctgccagaagaatgga

SEQ ID NO: 1050763 - DNA, 33 bp, Homo sapien
atgctaattttgtcaaaagggatgtgtaagcac

SEQ ID NO: 1050764 - DNA, 33 bp, Homo sapien
atgctaattttgtcaagagggatgtgtaagcac

SEQ ID NO: 1050765 - DNA, 33 bp, Homo sapien
taagtagtatgtgtaacgagatataaagcagcg

SEQ ID NO: 1050766 - DNA, 33 bp, Homo sapien
taagtagtatgtgtaatgagatataaagcagcg

SEQ ID NO: 1050767 - DNA, 33 bp, Homo sapien
ctgcatttgaagagaaaaggctgcatgtcgagg

SEQ ID NO: 1050768 - DNA, 33 bp, Homo sapien
ctgcatttgaagagaagaggctgcatgtcgagg

SEQ ID NO: 1050769 - DNA, 33 bp, Homo sapien; identical to SEQ ID NO: 1050767

SEQ ID NO: 1050770 - DNA, 33 bp, Homo sapien; identical to SEQ ID NO: 1050768

SEQ ID NO: 1050771 - DNA, 33 bp, Homo sapien
tagcattagccttaacaatgaagtttaaatgac

SEQ ID NO: 1050772 - DNA, 33 bp, Homo sapien
tagcattagccttaacgatgaagtttaaatgac

SEQ ID NO: 1050773 - DNA, 33 bp, Homo sapien
agtacggaaagcaaggccattggtctgcagtta

SEQ ID NO: 1050774 - DNA, 33 bp, Homo sapien
agtacggaaagcaaggtcattggtctgcagtta

SEQ ID NO: 1050775 - DNA, 33 bp, Homo sapien; identical to SEQ ID NO: 1050773

SEQ ID NO: 1050776 - DNA, 33 bp, Homo sapien; identical to SEQ ID NO: 1050774

SEQ ID NO: 1050777 - DNA, 33 bp, Homo sapien
agatttttatcagccactcggcatatgtcgatc

SEQ ID NO: 1050778 - DNA, 33 bp, Homo sapien
agatttttatcagccattcggcatatgtcgatc

SEQ ID NO: 1050779 - DNA, 33 bp, Homo sapien; identical to SEQ ID NO: 1050777

SEQ ID NO: 1050780 - DNA, 33 bp, Homo sapien; identical to SEQ ID NO: 1050778

SEQ ID NO: 1050781 - DNA, 33 bp, Homo sapien
ttgttgttgttgataagtatggtaaaatacaca

SEQ ID NO: 1050782 - DNA, 33 bp, Homo sapien
ttgttgttgttgataattatggtaaaatacaca

SEQ ID NO: 1050783 - DNA, 33 bp, Homo sapien
taactgtctaatgtcaagtagcataccatcccc

SEQ ID NO: 1050784 - DNA, 33 bp, Homo sapien
taactgtctaatgtcacgtagcataccatcccc

SEQ ID NO: 1050785 - DNA, 33 bp, Homo sapien
catgcatactttgtgaaaacaaaatctgttgct

SEQ ID NO: 1050786 - DNA, 33 bp, Homo sapien
catgcatactttgtgagaacaaaatctgttgct

SEQ ID NO: 1050787 - DNA, 33 bp, Homo sapien
aaatgtggaacatgctcactttatgacagtttc

SEQ ID NO: 1050788 - DNA, 33 bp, Homo sapien
aaatgtggaacatgctgactttatgacagtttc

SEQ ID NO: 1050789 - DNA, 33 bp, Homo sapien; identical to SEQ ID NO: 1050787

SEQ ID NO: 1050790 - DNA, 33 bp, Homo sapien; identical to SEQ ID NO: 1050788

SEQ ID NO: 1050791 - DNA, 33 bp, Homo sapien
gacgttgcctgccaacaatccgggcatcaggct

SEQ ID NO: 1050792 - DNA, 33 bp, Homo sapien
gacgttgcctgccaacgatccgggcatcaggct

SEQ ID NO: 1050793 - DNA, 33 bp, Homo sapien
atctgtttggtaaaagccatgtaacagggagga

SEQ ID NO: 1050794 - DNA, 33 bp, Homo sapien
atctgtttggtaaaaggcatgtaacagggagga

SEQ ID NO: 1050795 - DNA, 33 bp, Homo sapien
tcagcttcataaattaagagaaaatctcaatct

SEQ ID NO: 1050796 - DNA, 33 bp, Homo sapien
tcagcttcataaattaggagaaaatctcaatct

SEQ ID NO: 1050797 - DNA, 33 bp, Homo sapien
atgagttagggttgtcagaaagctgggcacttc

SEQ ID NO: 1050798 - DNA, 33 bp, Homo sapien
atgagttagggttgtcggaaagctgggcacttc

SEQ ID NO: 1050799 - DNA, 33 bp, Homo sapien
ctcacttagtatggaaccctctcctaggccctt

SEQ ID NO: 1050800 - DNA, 33 bp, Homo sapien
ctcacttagtatggaatcctctcctaggccctt

SEQ ID NO: 1050801 - DNA, 33 bp, Homo sapien
tagttcatgtcgtagtaaacatgtgagttctgc

SEQ ID NO: 1050802 - DNA, 33 bp, Homo sapien
tagttcatgtcgtagtgaacatgtgagttctgc

SEQ ID NO: 1050803 - DNA, 33 bp, Homo sapien
cttactgttttgattacgaggtgtataaagtta

SEQ ID NO: 1050804 - DNA, 33 bp, Homo sapien
cttactgttttgattatgaggtgtataaagtta

SEQ ID NO: 1050805 - DNA, 33 bp, Homo sapien
catgaactcaattccacaaagtctcaagccctt

SEQ ID NO: 1050806 - DNA, 33 bp, Homo sapien
catgaactcaattccagaaagtctcaagccctt

SEQ ID NO: 1050807 - DNA, 33 bp, Homo sapien
tcctccagccagaaagacttcttgaaccctggg

SEQ ID NO: 1050808 - DNA, 33 bp, Homo sapien
tcctccagccagaaaggcttcttgaaccctggg

SEQ ID NO: 1050809 - DNA, 33 bp, Homo sapien
gcttcactttctgtccacacagttattccccag

SEQ ID NO: 1050810 - DNA, 33 bp, Homo sapien
gcttcactttctgtccgcacagttattccccag

SEQ ID NO: 1050811 - DNA, 33 bp, Homo sapien
gaagaaggtaggagagaccattccaaatgacag

SEQ ID NO: 1050812 - DNA, 33 bp, Homo sapien
gaagaaggtaggagagtccattccaaatgacag

SEQ ID NO: 1050813 - DNA, 33 bp, Homo sapien
aatggctcaagattagaacatagaactaacaac

SEQ ID NO: 1050814 - DNA, 33 bp, Homo sapien
aatggctcaagattaggacatagaactaacaac

SEQ ID NO: 1050815 - DNA, 33 bp, Homo sapien
aaataagataaaatgaaagagaatggtgactaa

SEQ ID NO: 1050816 - DNA, 33 bp, Homo sapien
aaataagataaaatgagagagaatggtgactaa

SEQ ID NO: 1050817 - DNA, 33 bp, Homo sapien
tgactcctaatggcacaattggcatttaaaaat

SEQ ID NO: 1050818 - DNA, 33 bp, Homo sapien
tgactcctaatggcactattggcatttaaaaat

SEQ ID NO: 1050819 - DNA, 33 bp, Homo sapien
gctcacttttgcatcaacaaataataggggatt

SEQ ID NO: 1050820 - DNA, 33 bp, Homo sapien
gctcacttttgcatcaccaaataataggggatt

SEQ ID NO: 1050821 - DNA, 33 bp, Homo sapien
tggagcggaccttgacgccaagagggccccgca

SEQ ID NO: 1050822 - DNA, 33 bp, Homo sapien
tggagcggaccttgactccaagagggccccgca

SEQ ID NO: 1050823 - DNA, 33 bp, Homo sapien
aagtagccaattatcacggacaatcatatgcat

SEQ ID NO: 1050824 - DNA, 33 bp, Homo sapien
aagtagccaattatcatggacaatcatatgcat

SEQ ID NO: 1050825 - DNA, 33 bp, Homo sapien
tgtgcagctcaatgaacgatggtggggtgaaca

SEQ ID NO: 1050826 - DNA, 33 bp, Homo sapien
tgtgcagctcaatgaatgatggtggggtgaaca

SEQ ID NO: 1050827 - DNA, 33 bp, Homo sapien
ctgtgctccagaactacgatgccgtcataaact

SEQ ID NO: 1050828 - DNA, 33 bp, Homo sapien
ctgtgctccagaactatgatgccgtcataaact

SEQ ID NO: 1050829 - DNA, 33 bp, Homo sapien
atactgtgttctgagacaatttttgctattttg

SEQ ID NO: 1050830 - DNA, 33 bp, Homo sapien
atactgtgttctgagataatttttgctattttg

SEQ ID NO: 1050831 - DNA, 33 bp, Homo sapien
atagtttgagagtacaatatttggcctgaaatt

SEQ ID NO: 1050832 - DNA, 33 bp, Homo sapien
atagtttgagagtacactatttggcctgaaatt

SEQ ID NO: 1050833 - DNA, 33 bp, Homo sapien
tccagcgttacagcccaagagagcttttccctc

SEQ ID NO: 1050834 - DNA, 33 bp, Homo sapien
tccagcgttacagcccgagagagcttttccctc

SEQ ID NO: 1050835 - DNA, 33 bp, Homo sapien
tggcagcctctaaccacgcaaaaagctttttcg

SEQ ID NO: 1050836 - DNA, 33 bp, Homo sapien
tggcagcctctaaccatgcaaaaagctttttcg

SEQ ID NO: 1050837 - DNA, 33 bp, Homo sapien
ctgggttgttttgaagactctaagattaggtaa

SEQ ID NO: 1050838 - DNA, 33 bp, Homo sapien
ctgggttgttttgaaggctctaagattaggtaa

SEQ ID NO: 1050839 - DNA, 33 bp, Homo sapien
aagtgtgatattgtggcaaatgaagaaatatat

SEQ ID NO: 1050840 - DNA, 33 bp, Homo sapien
aagtgtgatattgtggtaaatgaagaaatatat

SEQ ID NO: 1050841 - DNA, 33 bp, Homo sapien
agaccagttaagtccccatcgaaatggcccctg

SEQ ID NO: 1050842 - DNA, 33 bp, Homo sapien
agaccagttaagtccctatcgaaatggcccctg

SEQ ID NO: 1050843 - DNA, 33 bp, Homo sapien
tcacacagctgtataactgactaaaattcatag

SEQ ID NO: 1050844 - DNA, 33 bp, Homo sapien
tcacacagctgtataattgactaaaattcatag

SEQ ID NO: 1050845 - DNA, 33 bp, Homo sapien
ggctctatcactaacaatcgggacactcacact

SEQ ID NO: 1050846 - DNA, 33 bp, Homo sapien
ggctctatcactaacagtcgggacactcacact

SEQ ID NO: 1050847 - DNA, 33 bp, Homo sapien
taatacatggttgcaaagtttagattgagttct

SEQ ID NO: 1050848 - DNA, 33 bp, Homo sapien
taatacatggttgcaacgtttagattgagttct

SEQ ID NO: 1050849 - DNA, 33 bp, Homo sapien
aagtcatcacagctacaaagtcccttttgccac

SEQ ID NO: 1050850 - DNA, 33 bp, Homo sapien
aagtcatcacagctaccaagtcccttttgccac

SEQ ID NO: 1050851 - DNA, 33 bp, Homo sapien
gggtgcctggtaaataagtgacgccgacagagc

SEQ ID NO: 1050852 - DNA, 33 bp, Homo sapien
gggtgcctggtaaataggtgacgccgacagagc

SEQ ID NO: 1050853 - DNA, 33 bp, Homo sapien
tatcatttcaccttcaaaaagattttatgagaa

SEQ ID NO: 1050854 - DNA, 33 bp, Homo sapien
tatcatttcaccttcacaaagattttatgagaa

SEQ ID NO: 1050855 - DNA, 33 bp, Homo sapien
actccagacctcataacagcgtgtactacacaa

SEQ ID NO: 1050856 - DNA, 33 bp, Homo sapien
actccagacctcataatagcgtgtactacacaa

SEQ ID NO: 1050857 - DNA, 33 bp, Homo sapien
cccccagcacccgggcaatctgcattcactccc

SEQ ID NO: 1050858 - DNA, 33 bp, Homo sapien
cccccagcacccgggcgatctgcattcactccc

SEQ ID NO: 1050859 - DNA, 33 bp, Homo sapien
ctgcccagggtgctcccgagcaaagggtgttgt

SEQ ID NO: 1050860 - DNA, 33 bp, Homo sapien
ctgcccagggtgctcctgagcaaagggtgttgt

SEQ ID NO: 1050861 - DNA, 33 bp, Homo sapien
gttcagtaataaataaagcagcagacctaaaac

SEQ ID NO: 1050862 - DNA, 33 bp, Homo sapien
gttcagtaataaataatgcagcagacctaaaac

SEQ ID NO: 1050863 - DNA, 33 bp, Homo sapien
gccaggctctggaacacaatgagacaagctctt

SEQ ID NO: 1050864 - DNA, 33 bp, Homo sapien
gccaggctctggaacagaatgagacaagctctt

SEQ ID NO: 1050865 - DNA, 33 bp, Homo sapien
acggggtgagatattgatgtattagtagacctt

SEQ ID NO: 1050866 - DNA, 33 bp, Homo sapien
acggggtgagatattggtgtattagtagacctt

SEQ ID NO: 1050867 - DNA, 33 bp, Homo sapien
ctcccaggccctcctacgcagaacacacataca

SEQ ID NO: 1050868 - DNA, 33 bp, Homo sapien
ctcccaggccctcctatgcagaacacacataca

SEQ ID NO: 1050869 - DNA, 33 bp, Homo sapien
agtacgttataaaccacgagtgcttgttgttta

SEQ ID NO: 1050870 - DNA, 33 bp, Homo sapien
agtacgttataaaccatgagtgcttgttgttta

SEQ ID NO: 1050871 - DNA, 33 bp, Homo sapien
gtacagtggatcattaagatttttccatgtcca

SEQ ID NO: 1050872 - DNA, 33 bp, Homo sapien
gtacagtggatcattaggatttttccatgtcca

SEQ ID NO: 1050873 - DNA, 33 bp, Homo sapien
ttgttttgtttttatcccgaggcctggtagatg

SEQ ID NO: 1050874 - DNA, 33 bp, Homo sapien
ttgttttgtttttatcgcgaggcctggtagatg

SEQ ID NO: 1050875 - DNA, 33 bp, Homo sapien
tttcacttcatctaataactgaattgtcaggct

SEQ ID NO: 1050876 - DNA, 33 bp, Homo sapien
tttcacttcatctaatcactgaattgtcaggct

SEQ ID NO: 1050877 - DNA, 33 bp, Homo sapien
tgaacattttcaattacacagaacatcatccag

SEQ ID NO: 1050878 - DNA, 33 bp, Homo sapien
tgaacattttcaattatacagaacatcatccag

SEQ ID NO: 1050879 - DNA, 33 bp, Homo sapien
aagcagtgagatttaactccagctgatggcttg

SEQ ID NO: 1050880 - DNA, 33 bp, Homo sapien
aagcagtgagatttaattccagctgatggcttg

SEQ ID NO: 1050881 - DNA, 33 bp, Homo sapien
agagatgagtaacataagcctttgccctcaagg

SEQ ID NO: 1050882 - DNA, 33 bp, Homo sapien
agagatgagtaacataggcctttgccctcaagg

SEQ ID NO: 1050883 - DNA, 33 bp, Homo sapien
aagtttaaaatacagcaagtgtaccaggatttt

SEQ ID NO: 1050884 - DNA, 33 bp, Homo sapien
aagtttaaaatacagctagtgtaccaggatttt

SEQ ID NO: 1050885 - DNA, 33 bp, Homo sapien
gcccggggtgcgcagccgaaccacgtgggagca

SEQ ID NO: 1050886 - DNA, 33 bp, Homo sapien
gcccggggtgcgcagcggaaccacgtgggagca

SEQ ID NO: 1050887 - DNA, 33 bp, Homo sapien
gctgaatcagcacctgaagtttaaccagaagcc

SEQ ID NO: 1050888 - DNA, 33 bp, Homo sapien
gctgaatcagcacctgcagtttaaccagaagcc

SEQ ID NO: 1050889 - DNA, 33 bp, Homo sapien
gatcccgtttacatcacgttcaaaaacgggcag

SEQ ID NO: 1050890 - DNA, 33 bp, Homo sapien
gatcccgtttacatcatgttcaaaaacgggcag

SEQ ID NO: 1050891 - DNA, 33 bp, Homo sapien
gcacctctcgtaatccacaaggttggaagaaaa

SEQ ID NO: 1050892 - DNA, 33 bp, Homo sapien
gcacctctcgtaatccgcaaggttggaagaaaa

SEQ ID NO: 1050893 - DNA, 33 bp, Homo sapien
cactgcatcattattacaggatcggttctgcat

SEQ ID NO: 1050894 - DNA, 33 bp, Homo sapien
cactgcatcattattataggatcggttctgcat

SEQ ID NO: 1050895 - DNA, 33 bp, Homo sapien
gattacatataccttgaaagattagttctagct

SEQ ID NO: 1050896 - DNA, 33 bp, Homo sapien
gattacatataccttgcaagattagttctagct

SEQ ID NO: 1050897 - DNA, 33 bp, Homo sapien
atcttgaaatctcacacgttctcagtgctctcc

SEQ ID NO: 1050898 - DNA, 33 bp, Homo sapien
atcttgaaatctcacatgttctcagtgctctcc

SEQ ID NO: 1050899 - DNA, 33 bp, Homo sapien
cagggagttcgaatatcagttctatctttgaag

SEQ ID NO: 1050900 - DNA, 33 bp, Homo sapien
cagggagttcgaatatgagttctatctttgaag

SEQ ID NO: 1050901 - DNA, 33 bp, Homo sapien
ctacccgttaagcaacaggacctataataagga

SEQ ID NO: 1050902 - DNA, 33 bp, Homo sapien
ctacccgttaagcaacgggacctataataagga

SEQ ID NO: 1050903 - DNA, 33 bp, Homo sapien
aagccctgattctaacagccactagctcaatga

SEQ ID NO: 1050904 - DNA, 33 bp, Homo sapien
aagccctgattctaaccgccactagctcaatga

SEQ ID NO: 1050905 - DNA, 33 bp, Homo sapien
aacaaacatgattggacaatggagagatttgat

SEQ ID NO: 1050906 - DNA, 33 bp, Homo sapien
aacaaacatgattggagaatggagagatttgat

SEQ ID NO: 1050907 - DNA, 33 bp, Homo sapien
gaactattggagcatacagtactgcggtgtgtc

SEQ ID NO: 1050908 - DNA, 33 bp, Homo sapien
gaactattggagcatatagtactgcggtgtgtc

SEQ ID NO: 1050909 - DNA, 33 bp, Homo sapien
aacgaccacatagcaaagtgttggttttttttt

SEQ ID NO: 1050910 - DNA, 33 bp, Homo sapien
aacgaccacatagcaacgtgttggttttttttt

SEQ ID NO: 1050911 - DNA, 33 bp, Homo sapien
agtgctgagccagttcaacaggtgtcttatgag

SEQ ID NO: 1050912 - DNA, 33 bp, Homo sapien
agtgctgagccagttccacaggtgtcttatgag

SEQ ID NO: 1050913 - DNA, 33 bp, Homo sapien
agagacctgctggttacggataagacacctatg

SEQ ID NO: 1050914 - DNA, 33 bp, Homo sapien
agagacctgctggttatggataagacacctatg

SEQ ID NO: 1050915 - DNA, 33 bp, Homo sapien
agccctgcagctggtaggatatcaaaacctgaa

SEQ ID NO: 1050916 - DNA, 33 bp, Homo sapien
agccctgcagctggtatgatatcaaaacctgaa

SEQ ID NO: 1050917 - DNA, 33 bp, Homo sapien
aagtcatatggtatgaagaaactgagctgaaat

SEQ ID NO: 1050918 - DNA, 33 bp, Homo sapien
aagtcatatggtatgaggaaactgagctgaaat

SEQ ID NO: 1050919 - DNA, 33 bp, Homo sapien
tccacattcctataaaaatacagtcttctctat

SEQ ID NO: 1050920 - DNA, 33 bp, Homo sapien
tccacattcctataaacatacagtcttctctat

SEQ ID NO: 1050921 - DNA, 33 bp, Homo sapien
aaccctgagttaagtccctcttaagctttgaat

SEQ ID NO: 1050922 - DNA, 33 bp, Homo sapien
aaccctgagttaagtctctcttaagctttgaat

SEQ ID NO: 1050923 - DNA, 33 bp, Homo sapien
gtcaaatagtgagaagaacttatgaaatgaaaa

SEQ ID NO: 1050924 - DNA, 33 bp, Homo sapien
gtcaaatagtgagaaggacttatgaaatgaaaa

SEQ ID NO: 1050925 - DNA, 33 bp, Homo sapien
tttacacaagtaattaagcacatcataaatggg

SEQ ID NO: 1050926 - DNA, 33 bp, Homo sapien
tttacacaagtaattaggcacatcataaatggg

SEQ ID NO: 1050927 - DNA, 33 bp, Homo sapien
tcttgaaaattgatgacggtctcagtactccgg

SEQ ID NO: 1050928 - DNA, 33 bp, Homo sapien
tcttgaaaattgatgatggtctcagtactccgg

SEQ ID NO: 1050929 - DNA, 33 bp, Homo sapien
tttttagcatttttgtcaaggcaaactttgcta

SEQ ID NO: 1050930 - DNA, 33 bp, Homo sapien
tttttagcatttttgttaaggcaaactttgcta

SEQ ID NO: 1050931 - DNA, 33 bp, Homo sapien
ctacttgagttccccaatactgtgtgatattcc

SEQ ID NO: 1050932 - DNA, 33 bp, Homo sapien
ctacttgagttccccagtactgtgtgatattcc

SEQ ID NO: 1050933 - DNA, 33 bp, Homo sapien
ggccacaggtgaccaaaaggaggagctgcgagc

SEQ ID NO: 1050934 - DNA, 33 bp, Homo sapien
ggccacaggtgaccaagaggaggagctgcgagc

SEQ ID NO: 1050935 - DNA, 33 bp, Homo sapien
tatcttcttggatacactcaaaaaaggcagagc

SEQ ID NO: 1050936 - DNA, 33 bp, Homo sapien
tatcttcttggatacattcaaaaaaggcagagc

SEQ ID NO: 1050937 - DNA, 33 bp, Homo sapien
ccctggagctgggttacaacgacgcaaaaaaca

SEQ ID NO: 1050938 - DNA, 33 bp, Homo sapien
ccctggagctgggttataacgacgcaaaaaaca

SEQ ID NO: 1050939 - DNA, 33 bp, Homo sapien
caggaaggaagccaacactagttttgttgttgc

SEQ ID NO: 1050940 - DNA, 33 bp, Homo sapien
caggaaggaagccaacgctagttttgttgttgc

SEQ ID NO: 1050941 - DNA, 33 bp, Homo sapien
taaattccagaggtagcagaagctccagggtgg

SEQ ID NO: 1050942 - DNA, 33 bp, Homo sapien
taaattccagaggtagtagaagctccagggtgg

SEQ ID NO: 1050943 - DNA, 33 bp, Homo sapien
aatgagaaatagtacacagaagtggacagcacc

SEQ ID NO: 1050944 - DNA, 33 bp, Homo sapien
aatgagaaatagtacatagaagtggacagcacc

SEQ ID NO: 1050945 - DNA, 33 bp, Homo sapien
tcagtcagattcatcaagccaagatatctatgt

SEQ ID NO: 1050946 - DNA, 33 bp, Homo sapien
tcagtcagattcatcaggccaagatatctatgt

SEQ ID NO: 1050947 - DNA, 33 bp, Homo sapien
acacacaacatttaaaaatttgctgtcctgtgt

SEQ ID NO: 1050948 - DNA, 33 bp, Homo sapien
acacacaacatttaaatatttgctgtcctgtgt

SEQ ID NO: 1050949 - DNA, 33 bp, Homo sapien
ggaacaaactatggcacgcgagttaggaaagga

SEQ ID NO: 1050950 - DNA, 33 bp, Homo sapien
ggaacaaactatggcatgcgagttaggaaagga

SEQ ID NO: 1050951 - DNA, 33 bp, Homo sapien
ccaagaagacctctgaacagtgtgcatgttatt

SEQ ID NO: 1050952 - DNA, 33 bp, Homo sapien
ccaagaagacctctgagcagtgtgcatgttatt

SEQ ID NO: 1050953 - DNA, 33 bp, Homo sapien
acacaagtctctgaaaatgtggtcataccagct

SEQ ID NO: 1050954 - DNA, 33 bp, Homo sapien
acacaagtctctgaaagtgtggtcataccagct

SEQ ID NO: 1050955 - DNA, 33 bp, Homo sapien
ttcttggagtgccttccctgaggtccaggtctt

SEQ ID NO: 1050956 - DNA, 33 bp, Homo sapien
ttcttggagtgccttctctgaggtccaggtctt

SEQ ID NO: 1050957 - DNA, 33 bp, Homo sapien
tcatatatgtgtcagtaactagcagggctctac

SEQ ID NO: 1050958 - DNA, 33 bp, Homo sapien
tcatatatgtgtcagtgactagcagggctctac

SEQ ID NO: 1050959 - DNA, 33 bp, Homo sapien
aagataccactcaaaaccgcttctgatcctgcc

SEQ ID NO: 1050960 - DNA, 33 bp, Homo sapien
aagataccactcaaaatcgcttctgatcctgcc

SEQ ID NO: 1050961 - DNA, 33 bp, Homo sapien
ttaagagaaggttacaaataaaactcattcatg

SEQ ID NO: 1050962 - DNA, 33 bp, Homo sapien
ttaagagaaggttacacataaaactcattcatg

SEQ ID NO: 1050963 - DNA, 33 bp, Homo sapien
aatgggtgtggctataagctaataaaactttat

SEQ ID NO: 1050964 - DNA, 33 bp, Homo sapien
aatgggtgtggctatatgctaataaaactttat

SEQ ID NO: 1050965 - DNA, 33 bp, Homo sapien
gtttacactaaggagagaatattacacagttat

SEQ ID NO: 1050966 - DNA, 33 bp, Homo sapien
gtttacactaaggagataatattacacagttat

SEQ ID NO: 1050967 - DNA, 33 bp, Homo sapien
tgacaaaggcgaaggcaaagggagtttacagat

SEQ ID NO: 1050968 - DNA, 33 bp, Homo sapien
tgacaaaggcgaaggcgaagggagtttacagat

SEQ ID NO: 1050969 - DNA, 33 bp, Homo sapien
gccagacgcagagaagccttcctggaattatct

SEQ ID NO: 1050970 - DNA, 33 bp, Homo sapien
gccagacgcagagaagtcttcctggaattatct

SEQ ID NO: 1050971 - DNA, 33 bp, Homo sapien
aagaaaagaccctctcaaatttagagctgatca

SEQ ID NO: 1050972 - DNA, 33 bp, Homo sapien
aagaaaagaccctctcgaatttagagctgatca

SEQ ID NO: 1050973 - DNA, 33 bp, Homo sapien
taaaacaatccttaggacataattttgtgtcta

SEQ ID NO: 1050974 - DNA, 33 bp, Homo sapien
taaaacaatccttaggtcataattttgtgtcta

SEQ ID NO: 1050975 - DNA, 33 bp, Homo sapien
taccactaaccccttcaaatttggatgcagact

SEQ ID NO: 1050976 - DNA, 33 bp, Homo sapien
taccactaaccccttcgaatttggatgcagact

SEQ ID NO: 1050977 - DNA, 33 bp, Homo sapien
gaactaaatgagtgaaaacatgaaaagcccttg

SEQ ID NO: 1050978 - DNA, 33 bp, Homo sapien
gaactaaatgagtgaatacatgaaaagcccttg

SEQ ID NO: 1050979 - DNA, 33 bp, Homo sapien
actctgggaaacagtacagaacattccagctaa

SEQ ID NO: 1050980 - DNA, 33 bp, Homo sapien
actctgggaaacagtatagaacattccagctaa

SEQ ID NO: 1050981 - DNA, 33 bp, Homo sapien
agatgatccctgtacactgatagcatcttcctc

SEQ ID NO: 1050982 - DNA, 33 bp, Homo sapien
agatgatccctgtacattgatagcatcttcctc

SEQ ID NO: 1050983 - DNA, 33 bp, Homo sapien
acattgattcaaggacccccgagagtgattatt

SEQ ID NO: 1050984 - DNA, 33 bp, Homo sapien
acattgattcaaggactcccgagagtgattatt

SEQ ID NO: 1050985 - DNA, 33 bp, Homo sapien
taagttatctagagagaatttaaggtatgcagg

SEQ ID NO: 1050986 - DNA, 33 bp, Homo sapien
taagttatctagagaggatttaaggtatgcagg

SEQ ID NO: 1050987 - DNA, 33 bp, Homo sapien
catgaagtacctgcagaatgcgtggtgctggct

SEQ ID NO: 1050988 - DNA, 33 bp, Homo sapien
catgaagtacctgcaggatgcgtggtgctggct

SEQ ID NO: 1050989 - DNA, 33 bp, Homo sapien
tgaaatgtaggatgagaaattgtgaagcattac

SEQ ID NO: 1050990 - DNA, 33 bp, Homo sapien
tgaaatgtaggatgaggaattgtgaagcattac

SEQ ID NO: 1050991 - DNA, 33 bp, Homo sapien
atgctagaacatttcaagcatgcccaaaatgcc

SEQ ID NO: 1050992 - DNA, 33 bp, Homo sapien
atgctagaacatttcaggcatgcccaaaatgcc

SEQ ID NO: 1050993 - DNA, 33 bp, Homo sapien
tggtcattaaatgccagcgacttattgaacgat

SEQ ID NO: 1050994 - DNA, 33 bp, Homo sapien
tggtcattaaatgccatcgacttattgaacgat

SEQ ID NO: 1050995 - DNA, 33 bp, Homo sapien
acctacccatatcctgaaatactttaaatcatc

SEQ ID NO: 1050996 - DNA, 33 bp, Homo sapien
acctacccatatcctgcaatactttaaatcatc

SEQ ID NO: 1050997 - DNA, 33 bp, Homo sapien
caactccaagcttaggaaatctgaatcttttat

SEQ ID NO: 1050998 - DNA, 33 bp, Homo sapien
caactccaagcttagggaatctgaatcttttat

SEQ ID NO: 1050999 - DNA, 33 bp, Homo sapien
cagaccaataaaagaagaagatgagtgatgcca

SEQ ID NO: 1051000 - DNA, 33 bp, Homo sapien
cagaccaataaaagaataagatgagtgatgcca

SEQ ID NO: 1051001 - DNA, 33 bp, Homo sapien
cattgatttgtgctccaaagactgtaagtttgg

SEQ ID NO: 1051002 - DNA, 33 bp, Homo sapien
cattgatttgtgctccgaagactgtaagtttgg

SEQ ID NO: 1051003 - DNA, 33 bp, Homo sapien
tcacggaggctttaccagctcaagttaagaaaa

SEQ ID NO: 1051004 - DNA, 33 bp, Homo sapien
tcacggaggctttaccggctcaagttaagaaaa

SEQ ID NO: 1051005 - DNA, 33 bp, Homo sapien
atatagaagtgtgctaaaaagtgcttttgtgga

SEQ ID NO: 1051006 - DNA, 33 bp, Homo sapien
atatagaagtgtgctagaaagtgcttttgtgga

SEQ ID NO: 1051007 - DNA, 33 bp, Homo sapien
tgctttaaaatgtagacgcaagttttaaggtaa

SEQ ID NO: 1051008 - DNA, 33 bp, Homo sapien
tgctttaaaatgtagatgcaagttttaaggtaa

SEQ ID NO: 1051009 - DNA, 33 bp, Homo sapien
tcatttacctactctacatcttagcagacttca

SEQ ID NO: 1051010 - DNA, 33 bp, Homo sapien
tcatttacctactctatatcttagcagacttca

SEQ ID NO: 1051011 - DNA, 33 bp, Homo sapien
gctgttgatgcaagcaaaggttagagcaacatg

SEQ ID NO: 1051012 - DNA, 33 bp, Homo sapien
gctgttgatgcaagcagaggttagagcaacatg

SEQ ID NO: 1051013 - DNA, 33 bp, Homo sapien
atgagcttttcttacactggagttttctttatg

SEQ ID NO: 1051014 - DNA, 33 bp, Homo sapien
atgagcttttcttacattggagttttctttatg

SEQ ID NO: 1051015 - DNA, 33 bp, Homo sapien
ttgtgacaggttataaaagccagttaaaacttt

SEQ ID NO: 1051016 - DNA, 33 bp, Homo sapien
ttgtgacaggttataagagccagttaaaacttt

SEQ ID NO: 1051017 - DNA, 33 bp, Homo sapien
acggtgacctgccagcacttaggaggggccata

SEQ ID NO: 1051018 - DNA, 33 bp, Homo sapien
acggtgacctgccagcgcttaggaggggccata

SEQ ID NO: 1051019 - DNA, 33 bp, Homo sapien
tattttcagaagctaaacatctaattctctgtg

SEQ ID NO: 1051020 - DNA, 33 bp, Homo sapien
tattttcagaagctaatcatctaattctctgtg

SEQ ID NO: 1051021 - DNA, 33 bp, Homo sapien
gccatattgcagcctacgttttttcctgggggg

SEQ ID NO: 1051022 - DNA, 33 bp, Homo sapien
gccatattgcagcctatgttttttcctgggggg

SEQ ID NO: 1051023 - DNA, 33 bp, Homo sapien
acaagcagattggaaaatggttttgtagtttct

SEQ ID NO: 1051024 - DNA, 33 bp, Homo sapien
acaagcagattggaaattggttttgtagtttct

SEQ ID NO: 1051025 - DNA, 33 bp, Homo sapien
caattctggaaatggggaggtaaaatatgatca

SEQ ID NO: 1051026 - DNA, 33 bp, Homo sapien
caattctggaaatgggtaggtaaaatatgatca

SEQ ID NO: 1051027 - DNA, 33 bp, Homo sapien
cggggtcaaacccaacaatctgttttggcaagc

SEQ ID NO: 1051028 - DNA, 33 bp, Homo sapien
cggggtcaaacccaacgatctgttttggcaagc

SEQ ID NO: 1051029 - DNA, 33 bp, Homo sapien
gggaaaaagagaatcaagcttttgcctgagtta

SEQ ID NO: 1051030 - DNA, 33 bp, Homo sapien
gggaaaaagagaatcatgcttttgcctgagtta

SEQ ID NO: 1051031 - DNA, 33 bp, Homo sapien
acactttacaaagtcactaattgtctggattaa

SEQ ID NO: 1051032 - DNA, 33 bp, Homo sapien
acactttacaaagtcattaattgtctggattaa

SEQ ID NO: 1051033 - DNA, 33 bp, Homo sapien
gagacaagtttcagcccgaagtgagtttttatt

SEQ ID NO: 1051034 - DNA, 33 bp, Homo sapien
gagacaagtttcagcctgaagtgagtttttatt

SEQ ID NO: 1051035 - DNA, 33 bp, Homo sapien
tgatagacttctctagaatgatcctatgctgtc

SEQ ID NO: 1051036 - DNA, 33 bp, Homo sapien
tgatagacttctctaggatgatcctatgctgtc

SEQ ID NO: 1051037 - DNA, 33 bp, Homo sapien
gaaaattaaaagtcaaatcaagacctcattatt

SEQ ID NO: 1051038 - DNA, 33 bp, Homo sapien
gaaaattaaaagtcaagtcaagacctcattatt

SEQ ID NO: 1051039 - DNA, 33 bp, Homo sapien
aaaatccacgaatgaacgttaaagtgagtgggt

SEQ ID NO: 1051040 - DNA, 33 bp, Homo sapien
aaaatccacgaatgaatgttaaagtgagtgggt

SEQ ID NO: 1051041 - DNA, 33 bp, Homo sapien
tctgattagtaaaatacgtgcattttcgagtaa

SEQ ID NO: 1051042 - DNA, 33 bp, Homo sapien
tctgattagtaaaatatgtgcattttcgagtaa

SEQ ID NO: 1051043 - DNA, 33 bp, Homo sapien
tttgcattttggtttacaagcaccttttgagaa

SEQ ID NO: 1051044 - DNA, 33 bp, Homo sapien
tttgcattttggtttagaagcaccttttgagaa

SEQ ID NO: 1051045 - DNA, 33 bp, Homo sapien
cagtagttaattaaataagcaaagttcacagaa

SEQ ID NO: 1051046 - DNA, 33 bp, Homo sapien
cagtagttaattaaatgagcaaagttcacagaa

SEQ ID NO: 1051047 - DNA, 33 bp, Homo sapien
tttccctttgctccaacgttagcgtattggttt

SEQ ID NO: 1051048 - DNA, 33 bp, Homo sapien
tttccctttgctccaatgttagcgtattggttt

SEQ ID NO: 1051049 - DNA, 33 bp, Homo sapien
ttcatatttaagtcaccaagcctaggaggatgg

SEQ ID NO: 1051050 - DNA, 33 bp, Homo sapien
ttcatatttaagtcacgaagcctaggaggatgg

SEQ ID NO: 1051051 - DNA, 33 bp, Homo sapien
aagtcactaaattcacaaatatcagtataaatc

SEQ ID NO: 1051052 - DNA, 33 bp, Homo sapien
aagtcactaaattcacgaatatcagtataaatc

SEQ ID NO: 1051053 - DNA, 33 bp, Homo sapien
atctcacagctggatgacaatatacccagaagt

SEQ ID NO: 1051054 - DNA, 33 bp, Homo sapien
atctcacagctggatggcaatatacccagaagt

SEQ ID NO: 1051055 - DNA, 33 bp, Homo sapien
gaccacttgaatgcacacatatttgccaatctt

SEQ ID NO: 1051056 - DNA, 33 bp, Homo sapien
gaccacttgaatgcacgcatatttgccaatctt

SEQ ID NO: 1051057 - DNA, 33 bp, Homo sapien
tataggctgacactgaaagattatagcagtgac

SEQ ID NO: 1051058 - DNA, 33 bp, Homo sapien
tataggctgacactgagagattatagcagtgac

SEQ ID NO: 1051059 - DNA, 33 bp, Homo sapien
taaactcctagaaaaacgactagcaatgatatg

SEQ ID NO: 1051060 - DNA, 33 bp, Homo sapien
taaactcctagaaaaatgactagcaatgatatg

SEQ ID NO: 1051061 - DNA, 33 bp, Homo sapien
acgcaattcctgttaaactacacctgctctgtg

SEQ ID NO: 1051062 - DNA, 33 bp, Homo sapien
acgcaattcctgttaagctacacctgctctgtg

SEQ ID NO: 1051063 - DNA, 33 bp, Homo sapien
tattggcaatattttacattcatgctgaaaggc

SEQ ID NO: 1051064 - DNA, 33 bp, Homo sapien
tattggcaatattttagattcatgctgaaaggc

SEQ ID NO: 1051065 - DNA, 33 bp, Homo sapien
ggttgaagatacaggcacaagaagatgtaattt

SEQ ID NO: 1051066 - DNA, 33 bp, Homo sapien
ggttgaagatacaggcgcaagaagatgtaattt

SEQ ID NO: 1051067 - DNA, 33 bp, Homo sapien
aatccaaatgctaatacgcaactggaaggaaat

SEQ ID NO: 1051068 - DNA, 33 bp, Homo sapien
aatccaaatgctaatatgcaactggaaggaaat

SEQ ID NO: 1051069 - DNA, 33 bp, Homo sapien
gactgtggaaaaatgaaagcaagtaaaagatcc

SEQ ID NO: 1051070 - DNA, 33 bp, Homo sapien
gactgtggaaaaatgacagcaagtaaaagatcc

SEQ ID NO: 1051071 - DNA, 33 bp, Homo sapien
tgtggttgttttccaagaaaatttgattacaaa

SEQ ID NO: 1051072 - DNA, 33 bp, Homo sapien
tgtggttgttttccaataaaatttgattacaaa

SEQ ID NO: 1051073 - DNA, 33 bp, Homo sapien
atgctgtaggataccactaatgtaatctataaa

SEQ ID NO: 1051074 - DNA, 33 bp, Homo sapien
atgctgtaggataccagtaatgtaatctataaa

SEQ ID NO: 1051075 - DNA, 33 bp, Homo sapien
aaaagaccagctaggcagcagcagaggttttag

SEQ ID NO: 1051076 - DNA, 33 bp, Homo sapien
aaaagaccagctaggcggcagcagaggttttag

SEQ ID NO: 1051077 - DNA, 33 bp, Homo sapien
aagagttgaactcttacagatgataggaaaggc

SEQ ID NO: 1051078 - DNA, 33 bp, Homo sapien
aagagttgaactcttatagatgataggaaaggc

SEQ ID NO: 1051079 - DNA, 33 bp, Homo sapien
aatattttgcaaaagaaacagctcatagactgc

SEQ ID NO: 1051080 - DNA, 33 bp, Homo sapien
aatattttgcaaaagagacagctcatagactgc

SEQ ID NO: 1051081 - DNA, 33 bp, Homo sapien
tctcctagagaaaacacaatcctctgcagtcct

SEQ ID NO: 1051082 - DNA, 33 bp, Homo sapien
tctcctagagaaaacataatcctctgcagtcct

SEQ ID NO: 1051083 - DNA, 33 bp, Homo sapien
gaattgtaggaggtaaacctatagcacattgtc

SEQ ID NO: 1051084 - DNA, 33 bp, Homo sapien
gaattgtaggaggtaagcctatagcacattgtc

SEQ ID NO: 1051085 - DNA, 33 bp, Homo sapien
tattttaagagcctggaaattcaactatttcat

SEQ ID NO: 1051086 - DNA, 33 bp, Homo sapien
tattttaagagcctgggaattcaactatttcat

SEQ ID NO: 1051087 - DNA, 33 bp, Homo sapien
ccagcagaagctagagaaatagataggatgggc

SEQ ID NO: 1051088 - DNA, 33 bp, Homo sapien
ccagcagaagctagagcaatagataggatgggc

SEQ ID NO: 1051089 - DNA, 33 bp, Homo sapien
tgtgtaccactccagaatagcttcctcaggctg

SEQ ID NO: 1051090 - DNA, 33 bp, Homo sapien
tgtgtaccactccagagtagcttcctcaggctg

SEQ ID NO: 1051091 - DNA, 33 bp, Homo sapien
ttcagctgcttaggaactatctgcaaatgtgac

SEQ ID NO: 1051092 - DNA, 33 bp, Homo sapien
ttcagctgcttaggaagtatctgcaaatgtgac

SEQ ID NO: 1051093 - DNA, 33 bp, Homo sapien
atttatatagttaagacacggattcttaacggg

SEQ ID NO: 1051094 - DNA, 33 bp, Homo sapien
atttatatagttaagagacggattcttaacggg

SEQ ID NO: 1051095 - DNA, 33 bp, Homo sapien
tttgaatgtgcatagcaatcacttgggaacatt

SEQ ID NO: 1051096 - DNA, 33 bp, Homo sapien
tttgaatgtgcatagcgatcacttgggaacatt

SEQ ID NO: 1051097 - DNA, 33 bp, Homo sapien
ttaattcatctgaacacagtaaaatttcttaac

SEQ ID NO: 1051098 - DNA, 33 bp, Homo sapien
ttaattcatctgaacagagtaaaatttcttaac

SEQ ID NO: 1051099 - DNA, 33 bp, Homo sapien
gagggacctattcagaactggctatcaaacgca

SEQ ID NO: 1051100 - DNA, 33 bp, Homo sapien
gagggacctattcagagctggctatcaaacgca

SEQ ID NO: 1051101 - DNA, 33 bp, Homo sapien
gtggtgaattaacaaacctgaaagaagaccaga

SEQ ID NO: 1051102 - DNA, 33 bp, Homo sapien
gtggtgaattaacaaatctgaaagaagaccaga

SEQ ID NO: 1051103 - DNA, 33 bp, Homo sapien
gtaaacagatctggataaagtctaagagccacc

SEQ ID NO: 1051104 - DNA, 33 bp, Homo sapien
gtaaacagatctggatcaagtctaagagccacc

SEQ ID NO: 1051105 - DNA, 33 bp, Homo sapien
aacaacaccgtttttgaagatataatccacata

SEQ ID NO: 1051106 - DNA, 33 bp, Homo sapien
aacaacaccgtttttggagatataatccacata

SEQ ID NO: 1051107 - DNA, 33 bp, Homo sapien
aaggaaaacagtatcagtatgcagaaggacagt

SEQ ID NO: 1051108 - DNA, 33 bp, Homo sapien
aaggaaaacagtatcattatgcagaaggacagt

SEQ ID NO: 1051109 - DNA, 33 bp, Homo sapien
ttatgaaatagaatgcaagagtgtttcttcccc

SEQ ID NO: 1051110 - DNA, 33 bp, Homo sapien
ttatgaaatagaatgcgagagtgtttcttcccc

SEQ ID NO: 1051111 - DNA, 33 bp, Homo sapien
tagctgggccttttcccaataactccagatgag

SEQ ID NO: 1051112 - DNA, 33 bp, Homo sapien
tagctgggccttttcctaataactccagatgag

SEQ ID NO: 1051113 - DNA, 33 bp, Homo sapien
caaagccaataacacaactcatgagtgacaaac

SEQ ID NO: 1051114 - DNA, 33 bp, Homo sapien
caaagccaataacacagctcatgagtgacaaac

SEQ ID NO: 1051115 - DNA, 33 bp, Homo sapien
ctcataacttcatctcgcaggggtttgaaaaac

SEQ ID NO: 1051116 - DNA, 33 bp, Homo sapien
ctcataacttcatctctcaggggtttgaaaaac

SEQ ID NO: 1051117 - DNA, 33 bp, Homo sapien
cgaacgctgcagtgtgcacttcccatttgctcc

SEQ ID NO: 1051118 - DNA, 33 bp, Homo sapien
cgaacgctgcagtgtgtacttcccatttgctcc

SEQ ID NO: 1051119 - DNA, 33 bp, Homo sapien
gataattatgggtatgaacaaaaatgagagact

SEQ ID NO: 1051120 - DNA, 33 bp, Homo sapien
gataattatgggtatggacaaaaatgagagact

SEQ ID NO: 1051121 - DNA, 33 bp, Homo sapien
gaggcagagggcaagacgttacctccaaaccag

SEQ ID NO: 1051122 - DNA, 33 bp, Homo sapien
gaggcagagggcaagatgttacctccaaaccag

SEQ ID NO: 1051123 - DNA, 33 bp, Homo sapien
tatagagtttgtggaccgaaggggataggggct

SEQ ID NO: 1051124 - DNA, 33 bp, Homo sapien
tatagagtttgtggactgaaggggataggggct

SEQ ID NO: 1051125 - DNA, 33 bp, Homo sapien
tttgagttggaaaaaacatcaacattgggtgaa

SEQ ID NO: 1051126 - DNA, 33 bp, Homo sapien
tttgagttggaaaaaatatcaacattgggtgaa

SEQ ID NO: 1051127 - DNA, 33 bp, Homo sapien
ttcatgggtatacacaactgccaaaattcattt

SEQ ID NO: 1051128 - DNA, 33 bp, Homo sapien
ttcatgggtatacacagctgccaaaattcattt

SEQ ID NO: 1051129 - DNA, 33 bp, Homo sapien
acccactacaagaactaaaaaagctctgttctc

SEQ ID NO: 1051130 - DNA, 33 bp, Homo sapien
acccactacaagaactgaaaaagctctgttctc

SEQ ID NO: 1051131 - DNA, 33 bp, Homo sapien
gtaagaataaaggctcaatcgataaccataatt

SEQ ID NO: 1051132 - DNA, 33 bp, Homo sapien
gtaagaataaaggctcgatcgataaccataatt

SEQ ID NO: 1051133 - DNA, 33 bp, Homo sapien
agtgaaattattatgacgaggagcttgcttttt

SEQ ID NO: 1051134 - DNA, 33 bp, Homo sapien
agtgaaattattatgatgaggagcttgcttttt

SEQ ID NO: 1051135 - DNA, 33 bp, Homo sapien
agcacctatgaagtatgaagtcaatgggtttat

SEQ ID NO: 1051136 - DNA, 33 bp, Homo sapien
agcacctatgaagtattaagtcaatgggtttat

SEQ ID NO: 1051137 - DNA, 33 bp, Homo sapien
tctcaactggcattggaaactctttggattaaa

SEQ ID NO: 1051138 - DNA, 33 bp, Homo sapien
tctcaactggcattggtaactctttggattaaa

SEQ ID NO: 1051139 - DNA, 33 bp, Homo sapien
ttcagcactatacctaggctatacactctccct

SEQ ID NO: 1051140 - DNA, 33 bp, Homo sapien
ttcagcactatacctatgctatacactctccct

SEQ ID NO: 1051141 - DNA, 33 bp, Homo sapien
ggtgtatgcagatcccaatttccttccccaaac

SEQ ID NO: 1051142 - DNA, 33 bp, Homo sapien
ggtgtatgcagatcccgatttccttccccaaac

SEQ ID NO: 1051143 - DNA, 33 bp, Homo sapien
tccacatttcgtcataactctttccattcagca

SEQ ID NO: 1051144 - DNA, 33 bp, Homo sapien
tccacatttcgtcatagctctttccattcagca

SEQ ID NO: 1051145 - DNA, 33 bp, Homo sapien
aataaatcaagtcaaacgattgaaagttatgtt

SEQ ID NO: 1051146 - DNA, 33 bp, Homo sapien
aataaatcaagtcaaatgattgaaagttatgtt

SEQ ID NO: 1051147 - DNA, 33 bp, Homo sapien
taaaggaggatttagcagaatatcaacttctgt

SEQ ID NO: 1051148 - DNA, 33 bp, Homo sapien
taaaggaggatttagcggaatatcaacttctgt

SEQ ID NO: 1051149 - DNA, 33 bp, Homo sapien
cctcatgctaagaacaagctgtcacagattctc

SEQ ID NO: 1051150 - DNA, 33 bp, Homo sapien
cctcatgctaagaacaggctgtcacagattctc

SEQ ID NO: 1051151 - DNA, 33 bp, Homo sapien
gtttttaaccaagtgacgttttgtacacttctc

SEQ ID NO: 1051152 - DNA, 33 bp, Homo sapien
gtttttaaccaagtgaggttttgtacacttctc

SEQ ID NO: 1051153 - DNA, 33 bp, Homo sapien
acaaaaatcacctaaaaatgcctcagaccaggc

SEQ ID NO: 1051154 - DNA, 33 bp, Homo sapien
acaaaaatcacctaaagatgcctcagaccaggc

SEQ ID NO: 1051155 - DNA, 33 bp, Homo sapien
ttaccaagcctattataagtttgacatgattta

SEQ ID NO: 1051156 - DNA, 33 bp, Homo sapien
ttaccaagcctattattagtttgacatgattta

SEQ ID NO: 1051157 - DNA, 33 bp, Homo sapien
gtctagaaactttgaaccctgtagagccttggc

SEQ ID NO: 1051158 - DNA, 33 bp, Homo sapien
gtctagaaactttgaagcctgtagagccttggc

SEQ ID NO: 1051159 - DNA, 33 bp, Homo sapien
aggaaatcaaataccaagagcaataacaaggaa

SEQ ID NO: 1051160 - DNA, 33 bp, Homo sapien
aggaaatcaaataccatgagcaataacaaggaa

SEQ ID NO: 1051161 - DNA, 33 bp, Homo sapien
tctatcgatgtcctgggatataagtaaaacatt

SEQ ID NO: 1051162 - DNA, 33 bp, Homo sapien
tctatcgatgtcctggtatataagtaaaacatt

SEQ ID NO: 1051163 - DNA, 33 bp, Homo sapien
tcaagcctatttatccacaaagatacacagatg

SEQ ID NO: 1051164 - DNA, 33 bp, Homo sapien
tcaagcctatttatccgcaaagatacacagatg

SEQ ID NO: 1051165 - DNA, 33 bp, Homo sapien
aataggcttgacggtacagttctattcccattg

SEQ ID NO: 1051166 - DNA, 33 bp, Homo sapien
aataggcttgacggtagagttctattcccattg

SEQ ID NO: 1051167 - DNA, 33 bp, Homo sapien
aggtgcagttagttcacatggccttaaagattc

SEQ ID NO: 1051168 - DNA, 33 bp, Homo sapien
aggtgcagttagttcagatggccttaaagattc

SEQ ID NO: 1051169 - DNA, 33 bp, Homo sapien
ttcttcattaagtttgcaaattcatctgtcaat

SEQ ID NO: 1051170 - DNA, 33 bp, Homo sapien
ttcttcattaagtttgtaaattcatctgtcaat

SEQ ID NO: 1051171 - DNA, 33 bp, Homo sapien
ggtttgtaggaagataagcgtctttttcactta

SEQ ID NO: 1051172 - DNA, 33 bp, Homo sapien
ggtttgtaggaagataggcgtctttttcactta

SEQ ID NO: 1051173 - DNA, 33 bp, Homo sapien
atcagaaagccaaaaagtttgaagatctgtcaa

SEQ ID NO: 1051174 - DNA, 33 bp, Homo sapien
atcagaaagccaaaaattttgaagatctgtcaa

SEQ ID NO: 1051175 - DNA, 33 bp, Homo sapien
ccagccgctgcagccaaagtgaagcgcccctgc

SEQ ID NO: 1051176 - DNA, 33 bp, Homo sapien
ccagccgctgcagccagagtgaagcgcccctgc

SEQ ID NO: 1051177 - DNA, 33 bp, Homo sapien
aatggtttactgcccccgaaaataattgtctaa

SEQ ID NO: 1051178 - DNA, 33 bp, Homo sapien
aatggtttactgcccctgaaaataattgtctaa

SEQ ID NO: 1051179 - DNA, 33 bp, Homo sapien
tcataaacttagccctcaaatgtcccctttggc

SEQ ID NO: 1051180 - DNA, 33 bp, Homo sapien
tcataaacttagcccttaaatgtcccctttggc

SEQ ID NO: 1051181 - DNA, 33 bp, Homo sapien
atccttctggctaaaacgaactgacataagata

SEQ ID NO: 1051182 - DNA, 33 bp, Homo sapien
atccttctggctaaaaggaactgacataagata

SEQ ID NO: 1051183 - DNA, 33 bp, Homo sapien
ttgaatatagtcagttaaaatggtgacctcaat

SEQ ID NO: 1051184 - DNA, 33 bp, Homo sapien
ttgaatatagtcagttgaaatggtgacctcaat

SEQ ID NO: 1051185 - DNA, 33 bp, Homo sapien
gttgtattcctgtataacaatgatcaacctgaa

SEQ ID NO: 1051186 - DNA, 33 bp, Homo sapien
gttgtattcctgtatagcaatgatcaacctgaa

SEQ ID NO: 1051187 - DNA, 33 bp, Homo sapien
actaacatctgggccacacaatcttctatttag

SEQ ID NO: 1051188 - DNA, 33 bp, Homo sapien
actaacatctgggccatacaatcttctatttag

SEQ ID NO: 1051189 - DNA, 33 bp, Homo sapien
ttaccatgatatccaaaccaaccaatggcaagg

SEQ ID NO: 1051190 - DNA, 33 bp, Homo sapien
ttaccatgatatccaagccaaccaatggcaagg

SEQ ID NO: 1051191 - DNA, 33 bp, Homo sapien
gggactgtacatcctcaaaagtccattttattg

SEQ ID NO: 1051192 - DNA, 33 bp, Homo sapien
gggactgtacatcctccaaagtccattttattg

SEQ ID NO: 1051193 - DNA, 33 bp, Homo sapien
aaagacaggtggttaaataatttacccatgtca

SEQ ID NO: 1051194 - DNA, 33 bp, Homo sapien
aaagacaggtggttaagtaatttacccatgtca

SEQ ID NO: 1051195 - DNA, 33 bp, Homo sapien
aagtagattttgattcagaatagcactgctgtt

SEQ ID NO: 1051196 - DNA, 33 bp, Homo sapien
aagtagattttgattccgaatagcactgctgtt

SEQ ID NO: 1051197 - DNA, 33 bp, Homo sapien
tacaacagattacagcagagcagtttcttaata

SEQ ID NO: 1051198 - DNA, 33 bp, Homo sapien
tacaacagattacagcggagcagtttcttaata

SEQ ID NO: 1051199 - DNA, 33 bp, Homo sapien
agagaagacactgggaaagaccaagtgagtgcc

SEQ ID NO: 1051200 - DNA, 33 bp, Homo sapien
agagaagacactgggacagaccaagtgagtgcc

SEQ ID NO: 1051201 - DNA, 33 bp, Homo sapien
acagaaagtttttgaacggacaatactctttta

SEQ ID NO: 1051202 - DNA, 33 bp, Homo sapien
acagaaagtttttgaatggacaatactctttta

SEQ ID NO: 1051203 - DNA, 33 bp, Homo sapien
aaaatacctttccagtaaatgttcccctttgtg

SEQ ID NO: 1051204 - DNA, 33 bp, Homo sapien
aaaatacctttccagtgaatgttcccctttgtg

SEQ ID NO: 1051205 - DNA, 33 bp, Homo sapien
agatgttttaccttcactatcccccaaagtacc

SEQ ID NO: 1051206 - DNA, 33 bp, Homo sapien
agatgttttaccttcagtatcccccaaagtacc

SEQ ID NO: 1051207 - DNA, 33 bp, Homo sapien
taatctttaagattgaactgatatggtctgctt

SEQ ID NO: 1051208 - DNA, 33 bp, Homo sapien
taatctttaagattgatctgatatggtctgctt

SEQ ID NO: 1051209 - DNA, 33 bp, Homo sapien
aataaacaaggctagaaagaaccagacatgggg

SEQ ID NO: 1051210 - DNA, 33 bp, Homo sapien
aataaacaaggctagacagaaccagacatgggg

SEQ ID NO: 1051211 - DNA, 33 bp, Homo sapien
aggagtcaagctcttaccgttgcctataaagat

SEQ ID NO: 1051212 - DNA, 33 bp, Homo sapien
aggagtcaagctcttatcgttgcctataaagat

SEQ ID NO: 1051213 - DNA, 33 bp, Homo sapien
cctactctgtttagagaagaagtacctttgacg

SEQ ID NO: 1051214 - DNA, 33 bp, Homo sapien
cctactctgtttagaggagaagtacctttgacg

SEQ ID NO: 1051215 - DNA, 33 bp, Homo sapien
gcaagtattagtcactcactgctgtggtaatgc

SEQ ID NO: 1051216 - DNA, 33 bp, Homo sapien
gcaagtattagtcacttactgctgtggtaatgc

SEQ ID NO: 1051217 - DNA, 33 bp, Homo sapien
ctcctatgatgaccataagaagagaatatccta

SEQ ID NO: 1051218 - DNA, 33 bp, Homo sapien
ctcctatgatgaccatgagaagagaatatccta

SEQ ID NO: 1051219 - DNA, 33 bp, Homo sapien
ataaagataagtaacactgattgcggccttgca

SEQ ID NO: 1051220 - DNA, 33 bp, Homo sapien
ataaagataagtaacattgattgcggccttgca

SEQ ID NO: 1051221 - DNA, 33 bp, Homo sapien
tttcacataagaacagaaggatttgatagatat

SEQ ID NO: 1051222 - DNA, 33 bp, Homo sapien
tttcacataagaacaggaggatttgatagatat

SEQ ID NO: 1051223 - DNA, 33 bp, Homo sapien
cacagtctgtcactggaaacacccattcttgga

SEQ ID NO: 1051224 - DNA, 33 bp, Homo sapien
cacagtctgtcactgggaacacccattcttgga

SEQ ID NO: 1051225 - DNA, 33 bp, Homo sapien
aggaccacattgagaggaactaagactagctag

SEQ ID NO: 1051226 - DNA, 33 bp, Homo sapien
aggaccacattgagagtaactaagactagctag

SEQ ID NO: 1051227 - DNA, 33 bp, Homo sapien
acatggctgacaaatcaaattgataattatatt

SEQ ID NO: 1051228 - DNA, 33 bp, Homo sapien
acatggctgacaaatcgaattgataattatatt

SEQ ID NO: 1051229 - DNA, 33 bp, Homo sapien
ggaactagctgtgcataaatttccagggtcaaa

SEQ ID NO: 1051230 - DNA, 33 bp, Homo sapien
ggaactagctgtgcatgaatttccagggtcaaa

SEQ ID NO: 1051231 - DNA, 33 bp, Homo sapien
aggctgagtccactaccaagctcatgaggtttt

SEQ ID NO: 1051232 - DNA, 33 bp, Homo sapien
aggctgagtccactacgaagctcatgaggtttt

SEQ ID NO: 1051233 - DNA, 33 bp, Homo sapien
caaattcatggtgagaagaattaatacactatt

SEQ ID NO: 1051234 - DNA, 33 bp, Homo sapien
caaattcatggtgagaggaattaatacactatt

SEQ ID NO: 1051235 - DNA, 33 bp, Homo sapien
ttgaccaagaaataagcctcagcaaattttcaa

SEQ ID NO: 1051236 - DNA, 33 bp, Homo sapien
ttgaccaagaaataagtctcagcaaattttcaa

SEQ ID NO: 1051237 - DNA, 33 bp, Homo sapien
tccctacgtttagataaatggtctaaagtttac

SEQ ID NO: 1051238 - DNA, 33 bp, Homo sapien
tccctacgtttagatagatggtctaaagtttac

SEQ ID NO: 1051239 - DNA, 33 bp, Homo sapien
cataggacaaatcaagaccattgacgggttttg

SEQ ID NO: 1051240 - DNA, 33 bp, Homo sapien
cataggacaaatcaagcccattgacgggttttg

SEQ ID NO: 1051241 - DNA, 33 bp, Homo sapien
tctagtgttttaaggcaaagtcttatattatgt

SEQ ID NO: 1051242 - DNA, 33 bp, Homo sapien
tctagtgttttaaggcgaagtcttatattatgt

SEQ ID NO: 1051243 - DNA, 33 bp, Homo sapien
ttaatttccatccttacctgactccagtccagc

SEQ ID NO: 1051244 - DNA, 33 bp, Homo sapien
ttaatttccatccttatctgactccagtccagc

SEQ ID NO: 1051245 - DNA, 33 bp, Homo sapien
tttagcacaagagagtaacatgatgctgcaggt

SEQ ID NO: 1051246 - DNA, 33 bp, Homo sapien
tttagcacaagagagtgacatgatgctgcaggt

SEQ ID NO: 1051247 - DNA, 33 bp, Homo sapien
gctgaagtgaccttcacggtgtagctctcagag

SEQ ID NO: 1051248 - DNA, 33 bp, Homo sapien
gctgaagtgaccttcagggtgtagctctcagag

SEQ ID NO: 1051249 - DNA, 33 bp, Homo sapien
gctaaagccagtcttgaatacatttttaagtaa

SEQ ID NO: 1051250 - DNA, 33 bp, Homo sapien
gctaaagccagtcttggatacatttttaagtaa

SEQ ID NO: 1051251 - DNA, 33 bp, Homo sapien
ccctgttaggaatctacctatcccaaagaatta

SEQ ID NO: 1051252 - DNA, 33 bp, Homo sapien
ccctgttaggaatctatctatcccaaagaatta

SEQ ID NO: 1051253 - DNA, 33 bp, Homo sapien
tgaaaattaggctaaaggaagggacatgagtta

SEQ ID NO: 1051254 - DNA, 33 bp, Homo sapien
tgaaaattaggctaaatgaagggacatgagtta

SEQ ID NO: 1051255 - DNA, 33 bp, Homo sapien
ccattttagatgcacaagagaagagttaagtca

SEQ ID NO: 1051256 - DNA, 33 bp, Homo sapien
ccattttagatgcacaggagaagagttaagtca

SEQ ID NO: 1051257 - DNA, 33 bp, Homo sapien
acttcagatttgagaagatacctcaggaaagct

SEQ ID NO: 1051258 - DNA, 33 bp, Homo sapien
acttcagatttgagaatatacctcaggaaagct

SEQ ID NO: 1051259 - DNA, 33 bp, Homo sapien
agattcaattttgtgacgcaataactagaaatg

SEQ ID NO: 1051260 - DNA, 33 bp, Homo sapien
agattcaattttgtgatgcaataactagaaatg

SEQ ID NO: 1051261 - DNA, 33 bp, Homo sapien
tggtggccttgttccacgtcagagatatacaat

SEQ ID NO: 1051262 - DNA, 33 bp, Homo sapien
tggtggccttgttccatgtcagagatatacaat

SEQ ID NO: 1051263 - DNA, 33 bp, Homo sapien
tcaagcaatggagagagatgctagagtgcaagg

SEQ ID NO: 1051264 - DNA, 33 bp, Homo sapien
tcaagcaatggagagatatgctagagtgcaagg

SEQ ID NO: 1051265 - DNA, 33 bp, Homo sapien
caaatatttagtttgcgcttgtgatttgattca

SEQ ID NO: 1051266 - DNA, 33 bp, Homo sapien
caaatatttagtttgctcttgtgatttgattca

SEQ ID NO: 1051267 - DNA, 33 bp, Homo sapien
tctgcatgttgggaaacgtactatgcaaagaag

SEQ ID NO: 1051268 - DNA, 33 bp, Homo sapien
tctgcatgttgggaaatgtactatgcaaagaag

SEQ ID NO: 1051269 - DNA, 33 bp, Homo sapien
acaagaaacccataaaatgatgcccaacattac

SEQ ID NO: 1051270 - DNA, 33 bp, Homo sapien
acaagaaacccataaagtgatgcccaacattac

SEQ ID NO: 1051271 - DNA, 33 bp, Homo sapien
ctttccatcttgacagccatcctctgatgggca

SEQ ID NO: 1051272 - DNA, 33 bp, Homo sapien
ctttccatcttgacagtcatcctctgatgggca

SEQ ID NO: 1051273 - DNA, 33 bp, Homo sapien
gttatctcaattgttacgggacagatatatgga

SEQ ID NO: 1051274 - DNA, 33 bp, Homo sapien
gttatctcaattgttatgggacagatatatgga

SEQ ID NO: 1051275 - DNA, 33 bp, Homo sapien
gcctggctttgtaagacactaaaatctacctct

SEQ ID NO: 1051276 - DNA, 33 bp, Homo sapien
gcctggctttgtaagatactaaaatctacctct

SEQ ID NO: 1051277 - DNA, 33 bp, Homo sapien
tgagagagaggtcccacatcacaggcagactgg

SEQ ID NO: 1051278 - DNA, 33 bp, Homo sapien
tgagagagaggtcccatatcacaggcagactgg

SEQ ID NO: 1051279 - DNA, 33 bp, Homo sapien
gggtgctaaggaacaaatagaccagtcatcctt

SEQ ID NO: 1051280 - DNA, 33 bp, Homo sapien
gggtgctaaggaacaagtagaccagtcatcctt

SEQ ID NO: 1051281 - DNA, 33 bp, Homo sapien
tagtttgcatcatcgacacacattctctcacgt

SEQ ID NO: 1051282 - DNA, 33 bp, Homo sapien
tagtttgcatcatcgatacacattctctcacgt

SEQ ID NO: 1051283 - DNA, 33 bp, Homo sapien
catgcctaattgatgcagagggttaacaattag

SEQ ID NO: 1051284 - DNA, 33 bp, Homo sapien
catgcctaattgatgcggagggttaacaattag

SEQ ID NO: 1051285 - DNA, 33 bp, Homo sapien
tctcctggataattgcaatggcctactagctgc

SEQ ID NO: 1051286 - DNA, 33 bp, Homo sapien
tctcctggataattgcgatggcctactagctgc

SEQ ID NO: 1051287 - DNA, 33 bp, Homo sapien
gcaactaaaaggatgaaattggcattaccagag

SEQ ID NO: 1051288 - DNA, 33 bp, Homo sapien
gcaactaaaaggatgacattggcattaccagag

SEQ ID NO: 1051289 - DNA, 33 bp, Homo sapien
tataattcagggctaagagaagatggttgtaat

SEQ ID NO: 1051290 - DNA, 33 bp, Homo sapien
tataattcagggctaatagaagatggttgtaat

SEQ ID NO: 1051291 - DNA, 33 bp, Homo sapien
gtagctaaaactaaataatcgattcagacattt

SEQ ID NO: 1051292 - DNA, 33 bp, Homo sapien
gtagctaaaactaaatcatcgattcagacattt

SEQ ID NO: 1051293 - DNA, 33 bp, Homo sapien
tgtgttaagcagtggaggattgtggtgtggcca

SEQ ID NO: 1051294 - DNA, 33 bp, Homo sapien
tgtgttaagcagtggatgattgtggtgtggcca

SEQ ID NO: 1051295 - DNA, 33 bp, Homo sapien
tagttggcaccctttacatcatcagttagagtt

SEQ ID NO: 1051296 - DNA, 33 bp, Homo sapien
tagttggcaccctttatatcatcagttagagtt

SEQ ID NO: 1051297 - DNA, 33 bp, Homo sapien
gggagctctggacttacattcctaaaggcttgt

SEQ ID NO: 1051298 - DNA, 33 bp, Homo sapien
gggagctctggacttatattcctaaaggcttgt

SEQ ID NO: 1051299 - DNA, 33 bp, Homo sapien
tgcaacagcttctctgacaaatgtaggggttag

SEQ ID NO: 1051300 - DNA, 33 bp, Homo sapien
tgcaacagcttctctgccaaatgtaggggttag

SEQ ID NO: 1051301 - DNA, 33 bp, Homo sapien
catagtaaaacggcaacagtccttaagatccag

SEQ ID NO: 1051302 - DNA, 33 bp, Homo sapien
catagtaaaacggcaatagtccttaagatccag

SEQ ID NO: 1051303 - DNA, 33 bp, Homo sapien
aatattagtgttattaagagtactggtaatagc

SEQ ID NO: 1051304 - DNA, 33 bp, Homo sapien
aatattagtgttattatgagtactggtaatagc

SEQ ID NO: 1051305 - DNA, 33 bp, Homo sapien
gtgaaaatgaaatagacggttgccagaagatgg

SEQ ID NO: 1051306 - DNA, 33 bp, Homo sapien
gtgaaaatgaaatagatggttgccagaagatgg

SEQ ID NO: 1051307 - DNA, 33 bp, Homo sapien
tcatgggatttggtctcacttgcagaagcagtt

SEQ ID NO: 1051308 - DNA, 33 bp, Homo sapien
tcatgggatttggtcttacttgcagaagcagtt

SEQ ID NO: 1051309 - DNA, 33 bp, Homo sapien
gaaccacaccagtgaacggaaagccacccaaag

SEQ ID NO: 1051310 - DNA, 33 bp, Homo sapien
gaaccacaccagtgaatggaaagccacccaaag

SEQ ID NO: 1051311 - DNA, 33 bp, Homo sapien
tcactggtgtggttcaaaagaggtatgcctaat

SEQ ID NO: 1051312 - DNA, 33 bp, Homo sapien
tcactggtgtggttcagaagaggtatgcctaat

SEQ ID NO: 1051313 - DNA, 33 bp, Homo sapien
tttgtttctcctcccactaagagggtaagtcca

SEQ ID NO: 1051314 - DNA, 33 bp, Homo sapien
tttgtttctcctcccattaagagggtaagtcca

SEQ ID NO: 1051315 - DNA, 33 bp, Homo sapien
accactaaggaatagtaaagtctccattctctc

SEQ ID NO: 1051316 - DNA, 33 bp, Homo sapien
accactaaggaatagtgaagtctccattctctc

SEQ ID NO: 1051317 - DNA, 33 bp, Homo sapien
catgtagaatttgtaacggacttatcacctaca

SEQ ID NO: 1051318 - DNA, 33 bp, Homo sapien
catgtagaatttgtaatggacttatcacctaca

SEQ ID NO: 1051319 - DNA, 33 bp, Homo sapien
aaaatgagacctagaaacttctcttccactatt

SEQ ID NO: 1051320 - DNA, 33 bp, Homo sapien
aaaatgagacctagaaccttctcttccactatt

SEQ ID NO: 1051321 - DNA, 33 bp, Homo sapien
ttattgcatattcaccagaaatcattacatttt

SEQ ID NO: 1051322 - DNA, 33 bp, Homo sapien
ttattgcatattcaccggaaatcattacatttt

SEQ ID NO: 1051323 - DNA, 33 bp, Homo sapien
attttttatgacgacaacatcaatatatttcga

SEQ ID NO: 1051324 - DNA, 33 bp, Homo sapien
attttttatgacgacagcatcaatatatttcga

SEQ ID NO: 1051325 - DNA, 33 bp, Homo sapien
cgactgaatacaggaaggtaacctgagccattt

SEQ ID NO: 1051326 - DNA, 33 bp, Homo sapien
cgactgaatacaggaatgtaacctgagccattt

SEQ ID NO: 1051327 - DNA, 33 bp, Homo sapien
gctgtgtgccaagtacacctccaaatacttctg

SEQ ID NO: 1051328 - DNA, 33 bp, Homo sapien
gctgtgtgccaagtacgcctccaaatacttctg

SEQ ID NO: 1051329 - DNA, 33 bp, Homo sapien
ttctgcattcccacaaatagtgaacgaaagttc

SEQ ID NO: 1051330 - DNA, 33 bp, Homo sapien
ttctgcattcccacaagtagtgaacgaaagttc

SEQ ID NO: 1051331 - DNA, 33 bp, Homo sapien
agggcttgctatcagccaggaatagagaagtgt

SEQ ID NO: 1051332 - DNA, 33 bp, Homo sapien
agggcttgctatcagctaggaatagagaagtgt

SEQ ID NO: 1051333 - DNA, 33 bp, Homo sapien
aattcactaactggaacgtcactaatgtttaag

SEQ ID NO: 1051334 - DNA, 33 bp, Homo sapien
aattcactaactggaatgtcactaatgtttaag

SEQ ID NO: 1051335 - DNA, 33 bp, Homo sapien
actggctcttttaagacgtacactgaggttaac

SEQ ID NO: 1051336 - DNA, 33 bp, Homo sapien
actggctcttttaagatgtacactgaggttaac

SEQ ID NO: 1051337 - DNA, 33 bp, Homo sapien
ccccatttcacagttaaggaagcaagatttaaa

SEQ ID NO: 1051338 - DNA, 33 bp, Homo sapien
ccccatttcacagttatggaagcaagatttaaa

SEQ ID NO: 1051339 - DNA, 33 bp, Homo sapien
catcaataatttaacaacagtctcttgctcttc

SEQ ID NO: 1051340 - DNA, 33 bp, Homo sapien
catcaataatttaacagcagtctcttgctcttc

SEQ ID NO: 1051341 - DNA, 33 bp, Homo sapien
ggaatccaaactgccccattgaaaaccactagc

SEQ ID NO: 1051342 - DNA, 33 bp, Homo sapien
ggaatccaaactgccctattgaaaaccactagc

SEQ ID NO: 1051343 - DNA, 33 bp, Homo sapien
ttcccttctggtataaggtacacgcatatatac

SEQ ID NO: 1051344 - DNA, 33 bp, Homo sapien
ttcccttctggtataatgtacacgcatatatac

SEQ ID NO: 1051345 - DNA, 33 bp, Homo sapien
aatatatctcaaaaaccatgtcaaaatattttg

SEQ ID NO: 1051346 - DNA, 33 bp, Homo sapien
aatatatctcaaaaacgatgtcaaaatattttg

SEQ ID NO: 1051347 - DNA, 33 bp, Homo sapien
aatgctgagtttctaactgaccttgaatataag

SEQ ID NO: 1051348 - DNA, 33 bp, Homo sapien
aatgctgagtttctaattgaccttgaatataag

SEQ ID NO: 1051349 - DNA, 33 bp, Homo sapien
aatcatctttatgtggcattagtgcacctctct

SEQ ID NO: 1051350 - DNA, 33 bp, Homo sapien
aatcatctttatgtggtattagtgcacctctct

SEQ ID NO: 1051351 - DNA, 33 bp, Homo sapien
gtggggattatgaaaacgtcaaattctgtgctg

SEQ ID NO: 1051352 - DNA, 33 bp, Homo sapien
gtggggattatgaaaatgtcaaattctgtgctg

SEQ ID NO: 1051353 - DNA, 33 bp, Homo sapien
tctgagttctgaccaacggaggatgagcaggag

SEQ ID NO: 1051354 - DNA, 33 bp, Homo sapien
tctgagttctgaccaatggaggatgagcaggag

SEQ ID NO: 1051355 - DNA, 33 bp, Homo sapien
ccataataagcactcacgttacctttatcatca

SEQ ID NO: 1051356 - DNA, 33 bp, Homo sapien
ccataataagcactcatgttacctttatcatca

SEQ ID NO: 1051357 - DNA, 33 bp, Homo sapien
attgaaaccatgatagccatgaggatgggatct

SEQ ID NO: 1051358 - DNA, 33 bp, Homo sapien
attgaaaccatgataggcatgaggatgggatct

SEQ ID NO: 1051359 - DNA, 33 bp, Homo sapien
ctcttcatagtgcagagataaattttagcttag

SEQ ID NO: 1051360 - DNA, 33 bp, Homo sapien
ctcttcatagtgcagatataaattttagcttag

SEQ ID NO: 1051361 - DNA, 33 bp, Homo sapien
cttgtgacaaaagggactcattctgtcacttga

SEQ ID NO: 1051362 - DNA, 33 bp, Homo sapien
cttgtgacaaaagggattcattctgtcacttga

SEQ ID NO: 1051363 - DNA, 33 bp, Homo sapien
tgggtatcctacagcaatatcaactttatcatt

SEQ ID NO: 1051364 - DNA, 33 bp, Homo sapien
tgggtatcctacagcagtatcaactttatcatt

SEQ ID NO: 1051365 - DNA, 33 bp, Homo sapien
gagaagtgaggacaaacttgagacaccttgaga

SEQ ID NO: 1051366 - DNA, 33 bp, Homo sapien
gagaagtgaggacaaatttgagacaccttgaga

SEQ ID NO: 1051367 - DNA, 33 bp, Homo sapien
ccttggctacatcttcactttatactttcacag

SEQ ID NO: 1051368 - DNA, 33 bp, Homo sapien
ccttggctacatcttccctttatactttcacag

SEQ ID NO: 1051369 - DNA, 33 bp, Homo sapien
taacagaatccaagtaacctttgaaaattagct

SEQ ID NO: 1051370 - DNA, 33 bp, Homo sapien
taacagaatccaagtagcctttgaaaattagct

SEQ ID NO: 1051371 - DNA, 33 bp, Homo sapien
agcacagcagggaagacaagtccaaagtccact

SEQ ID NO: 1051372 - DNA, 33 bp, Homo sapien
agcacagcagggaagagaagtccaaagtccact

SEQ ID NO: 1051373 - DNA, 33 bp, Homo sapien
tgttcggcctggattgcagcccttaattgttta

SEQ ID NO: 1051374 - DNA, 33 bp, Homo sapien
tgttcggcctggattgtagcccttaattgttta

SEQ ID NO: 1051375 - DNA, 33 bp, Homo sapien
gcaactaacaaaggtaaggaaagtttggagcgc

SEQ ID NO: 1051376 - DNA, 33 bp, Homo sapien
gcaactaacaaaggtacggaaagtttggagcgc

SEQ ID NO: 1051377 - DNA, 33 bp, Homo sapien
aactgtagattttacactgatgaagcttttgtt

SEQ ID NO: 1051378 - DNA, 33 bp, Homo sapien
aactgtagattttacattgatgaagcttttgtt

SEQ ID NO: 1051379 - DNA, 33 bp, Homo sapien
accatcttcagtgcaaatagaaggtctgcatat

SEQ ID NO: 1051380 - DNA, 33 bp, Homo sapien
accatcttcagtgcaagtagaaggtctgcatat

SEQ ID NO: 1051381 - DNA, 33 bp, Homo sapien
aagccatcccttttccacttagagaactagaat

SEQ ID NO: 1051382 - DNA, 33 bp, Homo sapien
aagccatcccttttccgcttagagaactagaat

SEQ ID NO: 1051383 - DNA, 33 bp, Homo sapien
actgttgttgcggttacagaagtaatgtctatt

SEQ ID NO: 1051384 - DNA, 33 bp, Homo sapien
actgttgttgcggttatagaagtaatgtctatt

SEQ ID NO: 1051385 - DNA, 33 bp, Homo sapien
cgtgcctggccacaaaattccatcattcttttg

SEQ ID NO: 1051386 - DNA, 33 bp, Homo sapien
cgtgcctggccacaaagttccatcattcttttg

SEQ ID NO: 1051387 - DNA, 33 bp, Homo sapien
tcctttctcacacttacgcagttggttatagtt

SEQ ID NO: 1051388 - DNA, 33 bp, Homo sapien
tcctttctcacacttatgcagttggttatagtt

SEQ ID NO: 1051389 - DNA, 33 bp, Homo sapien
ttcccattgactcctacgatgagatttacataa

SEQ ID NO: 1051390 - DNA, 33 bp, Homo sapien
ttcccattgactcctaggatgagatttacataa

SEQ ID NO: 1051391 - DNA, 33 bp, Homo sapien
ccccaaaccaggctagaaagttggggcaatttt

SEQ ID NO: 1051392 - DNA, 33 bp, Homo sapien
ccccaaaccaggctaggaagttggggcaatttt

SEQ ID NO: 1051393 - DNA, 33 bp, Homo sapien
tccatcattctgagacaaagtgtttttcacatc

SEQ ID NO: 1051394 - DNA, 33 bp, Homo sapien
tccatcattctgagactaagtgtttttcacatc

SEQ ID NO: 1051395 - DNA, 33 bp, Homo sapien
ccctgaggtgggaataagctccatgagtttcag

SEQ ID NO: 1051396 - DNA, 33 bp, Homo sapien
ccctgaggtgggaatacgctccatgagtttcag

SEQ ID NO: 1051397 - DNA, 33 bp, Homo sapien
caagaggacttccctacctcagtaagttgcacc

SEQ ID NO: 1051398 - DNA, 33 bp, Homo sapien
caagaggacttccctatctcagtaagttgcacc

SEQ ID NO: 1051399 - DNA, 33 bp, Homo sapien
gataaaaatctgagaactaaggaacaactcagg

SEQ ID NO: 1051400 - DNA, 33 bp, Homo sapien
gataaaaatctgagaattaaggaacaactcagg

SEQ ID NO: 1051401 - DNA, 33 bp, Homo sapien
ggaatctgtagactcactagggaaaagtgaatt

SEQ ID NO: 1051402 - DNA, 33 bp, Homo sapien
ggaatctgtagactcattagggaaaagtgaatt

SEQ ID NO: 1051403 - DNA, 33 bp, Homo sapien
ttcagaaaaatccctccgagatgcagagactgg

SEQ ID NO: 1051404 - DNA, 33 bp, Homo sapien
ttcagaaaaatccctctgagatgcagagactgg

SEQ ID NO: 1051405 - DNA, 33 bp, Homo sapien
acagtcataagacacaagttgaaatatccttcg

SEQ ID NO: 1051406 - DNA, 33 bp, Homo sapien
acagtcataagacacaggttgaaatatccttcg

SEQ ID NO: 1051407 - DNA, 33 bp, Homo sapien
cattaaatgataataccggaaaggaaatgtttt

SEQ ID NO: 1051408 - DNA, 33 bp, Homo sapien
cattaaatgataatactggaaaggaaatgtttt

SEQ ID NO: 1051409 - DNA, 33 bp, Homo sapien
cctcatgagagtccaactgcattgccgaagagt

SEQ ID NO: 1051410 - DNA, 33 bp, Homo sapien
cctcatgagagtccaattgcattgccgaagagt

SEQ ID NO: 1051411 - DNA, 33 bp, Homo sapien
ctataattaaatctgccgagaaagaagcgaaga

SEQ ID NO: 1051412 - DNA, 33 bp, Homo sapien
ctataattaaatctgctgagaaagaagcgaaga

SEQ ID NO: 1051413 - DNA, 33 bp, Homo sapien
agtgaacaagtttagacgacagaggtagtgact

SEQ ID NO: 1051414 - DNA, 33 bp, Homo sapien
agtgaacaagtttagatgacagaggtagtgact

SEQ ID NO: 1051415 - DNA, 33 bp, Homo sapien
atactctggctacggcgattgctctgagtaata

SEQ ID NO: 1051416 - DNA, 33 bp, Homo sapien
atactctggctacggctattgctctgagtaata

SEQ ID NO: 1051417 - DNA, 33 bp, Homo sapien
gtggctaaagtcactaaagagctatgtgttgct

SEQ ID NO: 1051418 - DNA, 33 bp, Homo sapien
gtggctaaagtcactacagagctatgtgttgct

SEQ ID NO: 1051419 - DNA, 33 bp, Homo sapien
gaagtaataaaattcacaaggaccaaaactgta

SEQ ID NO: 1051420 - DNA, 33 bp, Homo sapien
gaagtaataaaattcagaaggaccaaaactgta

SEQ ID NO: 1051421 - DNA, 33 bp, Homo sapien
tgttcctgaatttacaatggtctcccacaatta

SEQ ID NO: 1051422 - DNA, 33 bp, Homo sapien
tgttcctgaatttacagtggtctcccacaatta

SEQ ID NO: 1051423 - DNA, 33 bp, Homo sapien
tgacctctactccttaaactttagtgaagttct

SEQ ID NO: 1051424 - DNA, 33 bp, Homo sapien
tgacctctactccttacactttagtgaagttct

SEQ ID NO: 1051425 - DNA, 33 bp, Homo sapien
cagggggattctatcaagctacgtgactggata

SEQ ID NO: 1051426 - DNA, 33 bp, Homo sapien
cagggggattctatcaggctacgtgactggata

SEQ ID NO: 1051427 - DNA, 33 bp, Homo sapien
cctggccagaataccaacaaggcaaatttgggg

SEQ ID NO: 1051428 - DNA, 33 bp, Homo sapien
cctggccagaataccagcaaggcaaatttgggg

SEQ ID NO: 1051429 - DNA, 33 bp, Homo sapien
agcagagcaaattgacagaaagtttcttggagg

SEQ ID NO: 1051430 - DNA, 33 bp, Homo sapien
agcagagcaaattgacggaaagtttcttggagg

SEQ ID NO: 1051431 - DNA, 33 bp, Homo sapien
tgcattttgtgaatgaactttcctaataacagc

SEQ ID NO: 1051432 - DNA, 33 bp, Homo sapien
tgcattttgtgaatgatctttcctaataacagc

SEQ ID NO: 1051433 - DNA, 33 bp, Homo sapien
catttagttacaggtacaatcagatgtttgctt

SEQ ID NO: 1051434 - DNA, 33 bp, Homo sapien
catttagttacaggtataatcagatgtttgctt

SEQ ID NO: 1051435 - DNA, 33 bp, Homo sapien
gagttcagtttcattcaaccctgtttattgagc

SEQ ID NO: 1051436 - DNA, 33 bp, Homo sapien
gagttcagtttcattccaccctgtttattgagc

SEQ ID NO: 1051437 - DNA, 33 bp, Homo sapien
gaagaacatgtacaaaagttgatgacagaaaac

SEQ ID NO: 1051438 - DNA, 33 bp, Homo sapien
gaagaacatgtacaaaggttgatgacagaaaac

SEQ ID NO: 1051439 - DNA, 33 bp, Homo sapien
gtcctgttgaagattacggcctttgagaaagaa

SEQ ID NO: 1051440 - DNA, 33 bp, Homo sapien
gtcctgttgaagattatggcctttgagaaagaa

SEQ ID NO: 1051441 - DNA, 33 bp, Homo sapien
aagaagaccagttaacccagatttaattatcct

SEQ ID NO: 1051442 - DNA, 33 bp, Homo sapien
aagaagaccagttaactcagatttaattatcct

SEQ ID NO: 1051443 - DNA, 33 bp, Homo sapien
tttctaactgtactatcacttttggaaacattt

SEQ ID NO: 1051444 - DNA, 33 bp, Homo sapien
tttctaactgtactattacttttggaaacattt

SEQ ID NO: 1051445 - DNA, 33 bp, Homo sapien
aagggagaactgaaagaaaaagaacagtgggct

SEQ ID NO: 1051446 - DNA, 33 bp, Homo sapien
aagggagaactgaaaggaaaagaacagtgggct

SEQ ID NO: 1051447 - DNA, 33 bp, Homo sapien
actgattagcggttccaacaagcgtatagccat

SEQ ID NO: 1051448 - DNA, 33 bp, Homo sapien
actgattagcggttcccacaagcgtatagccat

SEQ ID NO: 1051449 - DNA, 33 bp, Homo sapien
gattagattgcaaaaactatgattttcatcttg

SEQ ID NO: 1051450 - DNA, 33 bp, Homo sapien
gattagattgcaaaaattatgattttcatcttg

SEQ ID NO: 1051451 - DNA, 33 bp, Homo sapien
tttctcaatcttagcactcttgacattttggac

SEQ ID NO: 1051452 - DNA, 33 bp, Homo sapien
tttctcaatcttagcattcttgacattttggac

SEQ ID NO: 1051453 - DNA, 33 bp, Homo sapien
tgtgctacacaatttccaaaagagttatgccca

SEQ ID NO: 1051454 - DNA, 33 bp, Homo sapien
tgtgctacacaatttcgaaaagagttatgccca

SEQ ID NO: 1051455 - DNA, 33 bp, Homo sapien
acattttagaaggctcacgtataagtatggact

SEQ ID NO: 1051456 - DNA, 33 bp, Homo sapien
acattttagaaggctcccgtataagtatggact

SEQ ID NO: 1051457 - DNA, 33 bp, Homo sapien
gccatgctaagtaacacaatcatagaagtgaca

SEQ ID NO: 1051458 - DNA, 33 bp, Homo sapien
gccatgctaagtaacataatcatagaagtgaca

SEQ ID NO: 1051459 - DNA, 33 bp, Homo sapien
gcatggcaaaggtggaaaaattgtgagatgtaa

SEQ ID NO: 1051460 - DNA, 33 bp, Homo sapien
gcatggcaaaggtggagaaattgtgagatgtaa

SEQ ID NO: 1051461 - DNA, 33 bp, Homo sapien
ctatttttacttttcaccgacattgtggaaatc

SEQ ID NO: 1051462 - DNA, 33 bp, Homo sapien
ctatttttacttttcatcgacattgtggaaatc

SEQ ID NO: 1051463 - DNA, 33 bp, Homo sapien
gaatcataaacacaaactctctctgggaagtag

SEQ ID NO: 1051464 - DNA, 33 bp, Homo sapien
gaatcataaacacaaattctctctgggaagtag

SEQ ID NO: 1051465 - DNA, 33 bp, Homo sapien
atcatgaatattttcacgtttctgcaaggttga

SEQ ID NO: 1051466 - DNA, 33 bp, Homo sapien
atcatgaatattttcatgtttctgcaaggttga

SEQ ID NO: 1051467 - DNA, 33 bp, Homo sapien
atagttctccagagcacggtagagcagaaacat

SEQ ID NO: 1051468 - DNA, 33 bp, Homo sapien
atagttctccagagcagggtagagcagaaacat

SEQ ID NO: 1051469 - DNA, 33 bp, Homo sapien
ttctttgactatactacgaactaaactgacata

SEQ ID NO: 1051470 - DNA, 33 bp, Homo sapien
ttctttgactatactatgaactaaactgacata

SEQ ID NO: 1051471 - DNA, 33 bp, Homo sapien
agctattaaccagtgaactaagaataaaagtca

SEQ ID NO: 1051472 - DNA, 33 bp, Homo sapien
agctattaaccagtgacctaagaataaaagtca

SEQ ID NO: 1051473 - DNA, 33 bp, Homo sapien
attacagagctacatagattttttcactaaagt

SEQ ID NO: 1051474 - DNA, 33 bp, Homo sapien
attacagagctacatatattttttcactaaagt

SEQ ID NO: 1051475 - DNA, 33 bp, Homo sapien
aggggctaattttctccctgaatctccctcatt

SEQ ID NO: 1051476 - DNA, 33 bp, Homo sapien
aggggctaattttctctctgaatctccctcatt

SEQ ID NO: 1051477 - DNA, 33 bp, Homo sapien
tgttgttcaagagccaactgcattctacagcac

SEQ ID NO: 1051478 - DNA, 33 bp, Homo sapien
tgttgttcaagagccagctgcattctacagcac

SEQ ID NO: 1051479 - DNA, 33 bp, Homo sapien
ttataacaaggctgaaatagaaaaagggatttg

SEQ ID NO: 1051480 - DNA, 33 bp, Homo sapien
ttataacaaggctgaagtagaaaaagggatttg

SEQ ID NO: 1051481 - DNA, 33 bp, Homo sapien
taaaatgtaagttctgcagttgaatggaccctc

SEQ ID NO: 1051482 - DNA, 33 bp, Homo sapien
taaaatgtaagttctggagttgaatggaccctc

SEQ ID NO: 1051483 - DNA, 33 bp, Homo sapien
agtcaaagttctaccacgtaatagctgtagggc

SEQ ID NO: 1051484 - DNA, 33 bp, Homo sapien
agtcaaagttctaccatgtaatagctgtagggc

SEQ ID NO: 1051485 - DNA, 33 bp, Homo sapien
actaagtttgtggtaagtcgttatagcagccat

SEQ ID NO: 1051486 - DNA, 33 bp, Homo sapien
actaagtttgtggtaattcgttatagcagccat

SEQ ID NO: 1051487 - DNA, 33 bp, Homo sapien
ctacaaggctagagtaataaaaacagcatggta

SEQ ID NO: 1051488 - DNA, 33 bp, Homo sapien
ctacaaggctagagtagtaaaaacagcatggta

SEQ ID NO: 1051489 - DNA, 33 bp, Homo sapien
agggtgcaatcataagacaactatattctttcc

SEQ ID NO: 1051490 - DNA, 33 bp, Homo sapien
agggtgcaatcataaggcaactatattctttcc

SEQ ID NO: 1051491 - DNA, 33 bp, Homo sapien
gtaatgctggattacactggtgccaatcaagtg

SEQ ID NO: 1051492 - DNA, 33 bp, Homo sapien
gtaatgctggattacattggtgccaatcaagtg

SEQ ID NO: 1051493 - DNA, 33 bp, Homo sapien
taaatcaagaaatgtggatagatgtgaagtaag

SEQ ID NO: 1051494 - DNA, 33 bp, Homo sapien
taaatcaagaaatgtgtatagatgtgaagtaag

SEQ ID NO: 1051495 - DNA, 33 bp, Homo sapien
gtggttgtaaggaataagggctaagaaaacagt

SEQ ID NO: 1051496 - DNA, 33 bp, Homo sapien
gtggttgtaaggaataggggctaagaaaacagt

SEQ ID NO: 1051497 - DNA, 33 bp, Homo sapien
atgggacgtggtcatacccatttgtttatctaa

SEQ ID NO: 1051498 - DNA, 33 bp, Homo sapien
atgggacgtggtcatatccatttgtttatctaa

SEQ ID NO: 1051499 - DNA, 33 bp, Homo sapien
gagaatagaaatcaacaaagggatggagagaaa

SEQ ID NO: 1051500 - DNA, 33 bp, Homo sapien
gagaatagaaatcaacgaagggatggagagaaa

SEQ ID NO: 1051501 - DNA, 33 bp, Homo sapien
gagaagcgaggataacagagagagagcacactc

SEQ ID NO: 1051502 - DNA, 33 bp, Homo sapien
gagaagcgaggataacggagagagagcacactc

SEQ ID NO: 1051503 - DNA, 33 bp, Homo sapien
ggcatggcttgagtcacctgtggtctatagagg

SEQ ID NO: 1051504 - DNA, 33 bp, Homo sapien
ggcatggcttgagtcatctgtggtctatagagg

SEQ ID NO: 1051505 - DNA, 33 bp, Homo sapien
cagcagccacatatgactatttgttatcatatt

SEQ ID NO: 1051506 - DNA, 33 bp, Homo sapien
cagcagccacatatgagtatttgttatcatatt

SEQ ID NO: 1051507 - DNA, 33 bp, Homo sapien
ctcatggtctaatgaacgaaagtctttatctgc

SEQ ID NO: 1051508 - DNA, 33 bp, Homo sapien
ctcatggtctaatgaaggaaagtctttatctgc

SEQ ID NO: 1051509 - DNA, 33 bp, Homo sapien
acaggttcatgatgaaaaaggaagtcagaaggc

SEQ ID NO: 1051510 - DNA, 33 bp, Homo sapien
acaggttcatgatgaagaaggaagtcagaaggc

SEQ ID NO: 1051511 - DNA, 33 bp, Homo sapien
aagccgcttccttataataaacctctctctccc

SEQ ID NO: 1051512 - DNA, 33 bp, Homo sapien
aagccgcttccttatagtaaacctctctctccc

SEQ ID NO: 1051513 - DNA, 33 bp, Homo sapien
gtggaagacctcattcccagtgtctcaaaaggt

SEQ ID NO: 1051514 - DNA, 33 bp, Homo sapien
gtggaagacctcattctcagtgtctcaaaaggt

SEQ ID NO: 1051515 - DNA, 33 bp, Homo sapien
tattggcaatttcatacggtttcacattaatga

SEQ ID NO: 1051516 - DNA, 33 bp, Homo sapien
tattggcaatttcatatggtttcacattaatga

SEQ ID NO: 1051517 - DNA, 33 bp, Homo sapien
actggctattttatcactcatctttctaaataa

SEQ ID NO: 1051518 - DNA, 33 bp, Homo sapien
actggctattttatcattcatctttctaaataa

SEQ ID NO: 1051519 - DNA, 33 bp, Homo sapien
aaatgttcaactgttaataaattagtgtttgag

SEQ ID NO: 1051520 - DNA, 33 bp, Homo sapien
aaatgttcaactgttactaaattagtgtttgag

SEQ ID NO: 1051521 - DNA, 33 bp, Homo sapien
ctccttttcattttcagctaggcctttatttgt

SEQ ID NO: 1051522 - DNA, 33 bp, Homo sapien
ctccttttcattttcatctaggcctttatttgt

SEQ ID NO: 1051523 - DNA, 33 bp, Homo sapien
aagtttactcccattccagttgtaaatatattt

SEQ ID NO: 1051524 - DNA, 33 bp, Homo sapien
aagtttactcccattctagttgtaaatatattt

SEQ ID NO: 1051525 - DNA, 33 bp, Homo sapien
aaccagtgggtttctacacatctgatgatagac

SEQ ID NO: 1051526 - DNA, 33 bp, Homo sapien
aaccagtgggtttctagacatctgatgatagac

SEQ ID NO: 1051527 - DNA, 33 bp, Homo sapien
tttacttgtgctaccactgaagacttgtgtagt

SEQ ID NO: 1051528 - DNA, 33 bp, Homo sapien
tttacttgtgctaccattgaagacttgtgtagt

SEQ ID NO: 1051529 - DNA, 33 bp, Homo sapien
atcttcaccttgcctccgaagaaagctttaatg

SEQ ID NO: 1051530 - DNA, 33 bp, Homo sapien
atcttcaccttgcctctgaagaaagctttaatg

SEQ ID NO: 1051531 - DNA, 33 bp, Homo sapien
aatattcaaaaaccaaacttctgattctggaaa

SEQ ID NO: 1051532 - DNA, 33 bp, Homo sapien
aatattcaaaaaccaatcttctgattctggaaa

SEQ ID NO: 1051533 - DNA, 33 bp, Homo sapien
aactgaggttcctgaggaaaaacaggccaaaga

SEQ ID NO: 1051534 - DNA, 33 bp, Homo sapien
aactgaggttcctgagtaaaaacaggccaaaga

SEQ ID NO: 1051535 - DNA, 33 bp, Homo sapien
ggcctctgggagcttacattttgcaagggtacc

SEQ ID NO: 1051536 - DNA, 33 bp, Homo sapien
ggcctctgggagcttagattttgcaagggtacc

SEQ ID NO: 1051537 - DNA, 33 bp, Homo sapien
tcctttaaggcctcctaaagtgagctgaatggt

SEQ ID NO: 1051538 - DNA, 33 bp, Homo sapien
tcctttaaggcctcctgaagtgagctgaatggt

SEQ ID NO: 1051539 - DNA, 33 bp, Homo sapien
tgacagttggacgctaacactattacaaatgga

SEQ ID NO: 1051540 - DNA, 33 bp, Homo sapien
tgacagttggacgctatcactattacaaatgga

SEQ ID NO: 1051541 - DNA, 33 bp, Homo sapien
atagcgttctaacaacccaggaagctgtttgca

SEQ ID NO: 1051542 - DNA, 33 bp, Homo sapien
atagcgttctaacaacgcaggaagctgtttgca

SEQ ID NO: 1051543 - DNA, 33 bp, Homo sapien
aaaacaggttctgcttcaacttctccggtatag

SEQ ID NO: 1051544 - DNA, 33 bp, Homo sapien
aaaacaggttctgctttaacttctccggtatag

SEQ ID NO: 1051545 - DNA, 33 bp, Homo sapien
gattggtatcctgtcaagcccaaatctgcctag

SEQ ID NO: 1051546 - DNA, 33 bp, Homo sapien
gattggtatcctgtcatgcccaaatctgcctag

SEQ ID NO: 1051547 - DNA, 33 bp, Homo sapien
attgggtggatacagcacattgcgttcatccat

SEQ ID NO: 1051548 - DNA, 33 bp, Homo sapien
attgggtggatacagcgcattgcgttcatccat

SEQ ID NO: 1051549 - DNA, 33 bp, Homo sapien
ttggctgcctttggtgcatagacagtacctgaa

SEQ ID NO: 1051550 - DNA, 33 bp, Homo sapien
ttggctgcctttggtgtatagacagtacctgaa

SEQ ID NO: 1051551 - DNA, 33 bp, Homo sapien
tttctgactgtttttccattgtgattttcttca

SEQ ID NO: 1051552 - DNA, 33 bp, Homo sapien
tttctgactgtttttctattgtgattttcttca

SEQ ID NO: 1051553 - DNA, 33 bp, Homo sapien
ttgactttgcgctcacaagagtagtttgaagta

SEQ ID NO: 1051554 - DNA, 33 bp, Homo sapien
ttgactttgcgctcacgagagtagtttgaagta

SEQ ID NO: 1051555 - DNA, 33 bp, Homo sapien
acatcatgtaccaaacaccctctgctgtcctgc

SEQ ID NO: 1051556 - DNA, 33 bp, Homo sapien
acatcatgtaccaaacgccctctgctgtcctgc

SEQ ID NO: 1051557 - DNA, 33 bp, Homo sapien
ttttatccgcaataaaattcccaaagtcctcga

SEQ ID NO: 1051558 - DNA, 33 bp, Homo sapien
ttttatccgcaataaacttcccaaagtcctcga

SEQ ID NO: 1051559 - DNA, 33 bp, Homo sapien
ttccaaatacccagacaacacccaagagtagtt

SEQ ID NO: 1051560 - DNA, 33 bp, Homo sapien
ttccaaatacccagactacacccaagagtagtt

SEQ ID NO: 1051561 - DNA, 33 bp, Homo sapien
cctaactcgcccacaagaaagctgatgctcaac

SEQ ID NO: 1051562 - DNA, 33 bp, Homo sapien
cctaactcgcccacaataaagctgatgctcaac

SEQ ID NO: 1051563 - DNA, 33 bp, Homo sapien
tgaatgatggtgcctccagttccataacaagat

SEQ ID NO: 1051564 - DNA, 33 bp, Homo sapien
tgaatgatggtgcctcgagttccataacaagat

SEQ ID NO: 1051565 - DNA, 33 bp, Homo sapien
ggtgggtattactgacaatctagctcaccatct

SEQ ID NO: 1051566 - DNA, 33 bp, Homo sapien
ggtgggtattactgaccatctagctcaccatct

SEQ ID NO: 1051567 - DNA, 33 bp, Homo sapien
tttccagctttgggagaatatgtatgatgccaa

SEQ ID NO: 1051568 - DNA, 33 bp, Homo sapien
tttccagctttgggagcatatgtatgatgccaa

SEQ ID NO: 1051569 - DNA, 33 bp, Homo sapien
taactggtacaatttacatcggttttatactta

SEQ ID NO: 1051570 - DNA, 33 bp, Homo sapien
taactggtacaatttatatcggttttatactta

SEQ ID NO: 1051571 - DNA, 33 bp, Homo sapien
gctcaagagagatcaccggatggagaggataca

SEQ ID NO: 1051572 - DNA, 33 bp, Homo sapien
gctcaagagagatcactggatggagaggataca

SEQ ID NO: 1051573 - DNA, 33 bp, Homo sapien
agaaagagaagacatcaaagtttacatttcaaa

SEQ ID NO: 1051574 - DNA, 33 bp, Homo sapien
agaaagagaagacatccaagtttacatttcaaa

SEQ ID NO: 1051575 - DNA, 33 bp, Homo sapien
gaatacacggtacttacccatttctagcttgct

SEQ ID NO: 1051576 - DNA, 33 bp, Homo sapien
gaatacacggtacttatccatttctagcttgct

SEQ ID NO: 1051577 - DNA, 33 bp, Homo sapien
atttaaaaatttggaacgctgtactaaaattaa

SEQ ID NO: 1051578 - DNA, 33 bp, Homo sapien
atttaaaaatttggaatgctgtactaaaattaa

SEQ ID NO: 1051579 - DNA, 33 bp, Homo sapien
attattttcagcagcaatcttggcaaaaggaaa

SEQ ID NO: 1051580 - DNA, 33 bp, Homo sapien
attattttcagcagcattcttggcaaaaggaaa

SEQ ID NO: 1051581 - DNA, 33 bp, Homo sapien
aaataacagatttagaagcactttgttcatttg

SEQ ID NO: 1051582 - DNA, 33 bp, Homo sapien
aaataacagatttagatgcactttgttcatttg

SEQ ID NO: 1051583 - DNA, 33 bp, Homo sapien
gcgggcatcctaatgacggagtatatgtaaaga

SEQ ID NO: 1051584 - DNA, 33 bp, Homo sapien
gcgggcatcctaatgatggagtatatgtaaaga

SEQ ID NO: 1051585 - DNA, 33 bp, Homo sapien
aatggatacagacaaaacagcaacttagattaa

SEQ ID NO: 1051586 - DNA, 33 bp, Homo sapien
aatggatacagacaaagcagcaacttagattaa

SEQ ID NO: 1051587 - DNA, 33 bp, Homo sapien
cggaaacgcagtatgaagactgctgtgtcaatc

SEQ ID NO: 1051588 - DNA, 33 bp, Homo sapien
cggaaacgcagtatgaggactgctgtgtcaatc

SEQ ID NO: 1051589 - DNA, 33 bp, Homo sapien
tcttcttcttgtcaccaccctatcttttcctcc

SEQ ID NO: 1051590 - DNA, 33 bp, Homo sapien
tcttcttcttgtcacccccctatcttttcctcc

SEQ ID NO: 1051591 - DNA, 33 bp, Homo sapien
acatgctcagtaagcaagaacactgttgatggg

SEQ ID NO: 1051592 - DNA, 33 bp, Homo sapien
acatgctcagtaagcaggaacactgttgatggg

SEQ ID NO: 1051593 - DNA, 33 bp, Homo sapien
acaaggtttacaaccaaagattttcagggtgag

SEQ ID NO: 1051594 - DNA, 33 bp, Homo sapien
acaaggtttacaaccagagattttcagggtgag

SEQ ID NO: 1051595 - DNA, 33 bp, Homo sapien
ctatctgcattcgttcgcattccaaggagaggt

SEQ ID NO: 1051596 - DNA, 33 bp, Homo sapien
ctatctgcattcgttctcattccaaggagaggt

SEQ ID NO: 1051597 - DNA, 33 bp, Homo sapien
gaattgtctggtcatccactcgagaggaaaggg

SEQ ID NO: 1051598 - DNA, 33 bp, Homo sapien
gaattgtctggtcatcgactcgagaggaaaggg

SEQ ID NO: 1051599 - DNA, 33 bp, Homo sapien
atgagttacttacttacaccaaatgagccttca

SEQ ID NO: 1051600 - DNA, 33 bp, Homo sapien
atgagttacttacttataccaaatgagccttca

SEQ ID NO: 1051601 - DNA, 33 bp, Homo sapien
gagaagaactggatgcactatttctggcttgag

SEQ ID NO: 1051602 - DNA, 33 bp, Homo sapien
gagaagaactggatgccctatttctggcttgag

SEQ ID NO: 1051603 - DNA, 33 bp, Homo sapien
ggcctgctatcttgatcatagattgtgaatatc

SEQ ID NO: 1051604 - DNA, 33 bp, Homo sapien
ggcctgctatcttgatgatagattgtgaatatc

SEQ ID NO: 1051605 - DNA, 33 bp, Homo sapien
ttctctatcatttatccaacaaaacttgtggta

SEQ ID NO: 1051606 - DNA, 33 bp, Homo sapien
ttctctatcatttatctaacaaaacttgtggta

SEQ ID NO: 1051607 - DNA, 33 bp, Homo sapien
tcattcttcattcggaaagaaagaatacataac

SEQ ID NO: 1051608 - DNA, 33 bp, Homo sapien
tcattcttcattcggagagaaagaatacataac

SEQ ID NO: 1051609 - DNA, 33 bp, Homo sapien
gcccggccctgggtcaacaagaatgtccctcaa

SEQ ID NO: 1051610 - DNA, 33 bp, Homo sapien
gcccggccctgggtcatcaagaatgtccctcaa

SEQ ID NO: 1051611 - DNA, 33 bp, Homo sapien
gggtgctttacgtcccacccaaggcaagaggaa

SEQ ID NO: 1051612 - DNA, 33 bp, Homo sapien
gggtgctttacgtcccgcccaaggcaagaggaa

SEQ ID NO: 1051613 - DNA, 33 bp, Homo sapien
aatattgtctccaaaacgctctgttctttctcg

SEQ ID NO: 1051614 - DNA, 33 bp, Homo sapien
aatattgtctccaaaatgctctgttctttctcg

SEQ ID NO: 1051615 - DNA, 33 bp, Homo sapien
ctttttattggatatcaagtattcaacataaat

SEQ ID NO: 1051616 - DNA, 33 bp, Homo sapien
ctttttattggatatcgagtattcaacataaat

SEQ ID NO: 1051617 - DNA, 33 bp, Homo sapien
ctaattcaattattagaaagaaccgaattcatt

SEQ ID NO: 1051618 - DNA, 33 bp, Homo sapien
ctaattcaattattaggaagaaccgaattcatt

SEQ ID NO: 1051619 - DNA, 33 bp, Homo sapien
tgattctcttttgaaacaaaacgcatcactgct

SEQ ID NO: 1051620 - DNA, 33 bp, Homo sapien
tgattctcttttgaaataaaacgcatcactgct

SEQ ID NO: 1051621 - DNA, 33 bp, Homo sapien
gggcttttaaacaaagcatcattctttacatca

SEQ ID NO: 1051622 - DNA, 33 bp, Homo sapien
gggcttttaaacaaaggatcattctttacatca

SEQ ID NO: 1051623 - DNA, 33 bp, Homo sapien
tgggtctggtaaccagaataaaaagtggtcttc

SEQ ID NO: 1051624 - DNA, 33 bp, Homo sapien
tgggtctggtaaccaggataaaaagtggtcttc

SEQ ID NO: 1051625 - DNA, 33 bp, Homo sapien
atggagtaggataggaaaaaactacctgcccct

SEQ ID NO: 1051626 - DNA, 33 bp, Homo sapien
atggagtaggataggagaaaactacctgcccct

SEQ ID NO: 1051627 - DNA, 33 bp, Homo sapien
atttgctgcttcattcaagtataaacttttgct

SEQ ID NO: 1051628 - DNA, 33 bp, Homo sapien
atttgctgcttcattcgagtataaacttttgct

SEQ ID NO: 1051629 - DNA, 33 bp, Homo sapien
tcacttttctaatgataatatgaactgcctatg

SEQ ID NO: 1051630 - DNA, 33 bp, Homo sapien
tcacttttctaatgattatatgaactgcctatg

SEQ ID NO: 1051631 - DNA, 33 bp, Homo sapien
taagacctcaaaggagaattcaacaattaactc

SEQ ID NO: 1051632 - DNA, 33 bp, Homo sapien
taagacctcaaaggagcattcaacaattaactc

SEQ ID NO: 1051633 - DNA, 33 bp, Homo sapien
aggttttcagagggaaagtgaaagttgccagac

SEQ ID NO: 1051634 - DNA, 33 bp, Homo sapien
aggttttcagagggaatgtgaaagttgccagac

SEQ ID NO: 1051635 - DNA, 33 bp, Homo sapien
tgacagtgctactctacggagctgaattcaacc

SEQ ID NO: 1051636 - DNA, 33 bp, Homo sapien
tgacagtgctactctatggagctgaattcaacc

SEQ ID NO: 1051637 - DNA, 33 bp, Homo sapien
tcttatgtttgtgtagaaagggtttaagaagca

SEQ ID NO: 1051638 - DNA, 33 bp, Homo sapien
tcttatgtttgtgtaggaagggtttaagaagca

SEQ ID NO: 1051639 - DNA, 33 bp, Homo sapien
ataaaaattcaagcccaagaaagcaatgcgtgt

SEQ ID NO: 1051640 - DNA, 33 bp, Homo sapien
ataaaaattcaagccccagaaagcaatgcgtgt

SEQ ID NO: 1051641 - DNA, 33 bp, Homo sapien
gttcacttgcccctgacgagcttctaattgagt

SEQ ID NO: 1051642 - DNA, 33 bp, Homo sapien
gttcacttgcccctgatgagcttctaattgagt

SEQ ID NO: 1051643 - DNA, 33 bp, Homo sapien
gcacaatcagttcttaccaaacaaatgaatctt

SEQ ID NO: 1051644 - DNA, 33 bp, Homo sapien
gcacaatcagttcttatcaaacaaatgaatctt

SEQ ID NO: 1051645 - DNA, 33 bp, Homo sapien
aagaactttaaaagaccggcacgttgtatacat

SEQ ID NO: 1051646 - DNA, 33 bp, Homo sapien
aagaactttaaaagactggcacgttgtatacat

SEQ ID NO: 1051647 - DNA, 33 bp, Homo sapien
acacacacacacacacactcagtgggaaaaaag

SEQ ID NO: 1051648 - DNA, 33 bp, Homo sapien
acacacacacacacactctcagtgggaaaaaag

SEQ ID NO: 1051649 - DNA, 33 bp, Homo sapien
tttccaagtgttgtataacttttcttcacagag

SEQ ID NO: 1051650 - DNA, 33 bp, Homo sapien
tttccaagtgttgtatcacttttcttcacagag

SEQ ID NO: 1051651 - DNA, 33 bp, Homo sapien
ttacatttgctagcccacgcttgcagccagaaa

SEQ ID NO: 1051652 - DNA, 33 bp, Homo sapien
ttacatttgctagccctcgcttgcagccagaaa

SEQ ID NO: 1051653 - DNA, 33 bp, Homo sapien
tttccacttagctgaaaccaccatatagagaaa

SEQ ID NO: 1051654 - DNA, 33 bp, Homo sapien
tttccacttagctgaatccaccatatagagaaa

SEQ ID NO: 1051655 - DNA, 33 bp, Homo sapien
agcttcttccttctgagagtgtctagcaggtat

SEQ ID NO: 1051656 - DNA, 33 bp, Homo sapien
agcttcttccttctgatagtgtctagcaggtat

SEQ ID NO: 1051657 - DNA, 33 bp, Homo sapien
gggaagtcaaggtttacagaaaaaaagaggccg

SEQ ID NO: 1051658 - DNA, 33 bp, Homo sapien
gggaagtcaaggtttagagaaaaaaagaggccg

SEQ ID NO: 1051659 - DNA, 33 bp, Homo sapien
taattctgcgagatcaaagggaagaggagaaag

SEQ ID NO: 1051660 - DNA, 33 bp, Homo sapien
taattctgcgagatcacagggaagaggagaaag

SEQ ID NO: 1051661 - DNA, 33 bp, Homo sapien
aagccaacatagccagaatccataagatacttt

SEQ ID NO: 1051662 - DNA, 33 bp, Homo sapien
aagccaacatagccaggatccataagatacttt

SEQ ID NO: 1051663 - DNA, 33 bp, Homo sapien
tgtgaagatgcaaggaaaggagagagcatagca

SEQ ID NO: 1051664 - DNA, 33 bp, Homo sapien
tgtgaagatgcaaggacaggagagagcatagca

SEQ ID NO: 1051665 - DNA, 33 bp, Homo sapien
ttaaataagttcaggacgagcaagtaaatttcc

SEQ ID NO: 1051666 - DNA, 33 bp, Homo sapien
ttaaataagttcaggatgagcaagtaaatttcc

SEQ ID NO: 1051667 - DNA, 33 bp, Homo sapien
tgctgatggattggcacgtaaccagggaactcc

SEQ ID NO: 1051668 - DNA, 33 bp, Homo sapien
tgctgatggattggcatgtaaccagggaactcc

SEQ ID NO: 1051669 - DNA, 33 bp, Homo sapien
atcttaaccgctcttacgaatataggatttcgc

SEQ ID NO: 1051670 - DNA, 33 bp, Homo sapien
atcttaaccgctcttatgaatataggatttcgc

SEQ ID NO: 1051671 - DNA, 33 bp, Homo sapien
acaaaagtagtaaccactagattttactgtttt

SEQ ID NO: 1051672 - DNA, 33 bp, Homo sapien
acaaaagtagtaaccattagattttactgtttt

SEQ ID NO: 1051673 - DNA, 33 bp, Homo sapien
gtatcatcatcacttacgtaaacttctgaaggt

SEQ ID NO: 1051674 - DNA, 33 bp, Homo sapien
gtatcatcatcacttatgtaaacttctgaaggt

SEQ ID NO: 1051675 - DNA, 33 bp, Homo sapien
atcaaggttattttcaagcatcctgatagaaaa

SEQ ID NO: 1051676 - DNA, 33 bp, Homo sapien
atcaaggttattttcaggcatcctgatagaaaa

SEQ ID NO: 1051677 - DNA, 33 bp, Homo sapien
ttgttatctgtgtacacgcaaatcatttgatac

SEQ ID NO: 1051678 - DNA, 33 bp, Homo sapien
ttgttatctgtgtacatgcaaatcatttgatac

SEQ ID NO: 1051679 - DNA, 33 bp, Homo sapien
ttcgtcttttcagtcacgtaagtaatgaatggt

SEQ ID NO: 1051680 - DNA, 33 bp, Homo sapien
ttcgtcttttcagtcatgtaagtaatgaatggt

SEQ ID NO: 1051681 - DNA, 33 bp, Homo sapien
cttaccatttcacaaacttcatcaatagcacat

SEQ ID NO: 1051682 - DNA, 33 bp, Homo sapien
cttaccatttcacaaatttcatcaatagcacat

SEQ ID NO: 1051683 - DNA, 33 bp, Homo sapien
cactgaagaggaagaaaaagacaccaggcccca

SEQ ID NO: 1051684 - DNA, 33 bp, Homo sapien
cactgaagaggaagaagaagacaccaggcccca

SEQ ID NO: 1051685 - DNA, 33 bp, Homo sapien
ggaattccaaggtggacgccatctgtgaagcga

SEQ ID NO: 1051686 - DNA, 33 bp, Homo sapien
ggaattccaaggtggatgccatctgtgaagcga

SEQ ID NO: 1051687 - DNA, 33 bp, Homo sapien
tctctatccaatacaacgtctgcaatttaaaac

SEQ ID NO: 1051688 - DNA, 33 bp, Homo sapien
tctctatccaatacaatgtctgcaatttaaaac

SEQ ID NO: 1051689 - DNA, 33 bp, Homo sapien
acaattcatagccacaaaatccttgccaggata

SEQ ID NO: 1051690 - DNA, 33 bp, Homo sapien
acaattcatagccacacaatccttgccaggata

SEQ ID NO: 1051691 - DNA, 33 bp, Homo sapien
tcttgcaaaaacctaactcctgcctcaactttg

SEQ ID NO: 1051692 - DNA, 33 bp, Homo sapien
tcttgcaaaaacctaattcctgcctcaactttg

SEQ ID NO: 1051693 - DNA, 33 bp, Homo sapien
gaaactgaaatctcagaaaagttaaatgactta

SEQ ID NO: 1051694 - DNA, 33 bp, Homo sapien
gaaactgaaatctcaggaaagttaaatgactta

SEQ ID NO: 1051695 - DNA, 33 bp, Homo sapien
attgattctggcttaaatggctctacagctgaa

SEQ ID NO: 1051696 - DNA, 33 bp, Homo sapien
attgattctggcttaagtggctctacagctgaa

SEQ ID NO: 1051697 - DNA, 33 bp, Homo sapien
cttgtaggattaattaacttgtcataaaaggcg

SEQ ID NO: 1051698 - DNA, 33 bp, Homo sapien
cttgtaggattaattatcttgtcataaaaggcg

SEQ ID NO: 1051699 - DNA, 33 bp, Homo sapien
aacttgaaagtgataaatagtgtctgattcaat

SEQ ID NO: 1051700 - DNA, 33 bp, Homo sapien
aacttgaaagtgataagtagtgtctgattcaat

SEQ ID NO: 1051701 - DNA, 33 bp, Homo sapien
atgataatgacattaaatcattcacaagggcag

SEQ ID NO: 1051702 - DNA, 33 bp, Homo sapien
atgataatgacattaattcattcacaagggcag

SEQ ID NO: 1051703 - DNA, 33 bp, Homo sapien
gtttggttatgcacctcagaatatgcacgtttt

SEQ ID NO: 1051704 - DNA, 33 bp, Homo sapien
gtttggttatgcaccttagaatatgcacgtttt

SEQ ID NO: 1051705 - DNA, 33 bp, Homo sapien
ttttaaccacaaagcagccctaacaacctgggg

SEQ ID NO: 1051706 - DNA, 33 bp, Homo sapien
ttttaaccacaaagcatccctaacaacctgggg

SEQ ID NO: 1051707 - DNA, 33 bp, Homo sapien
ggaaaatcctgtggacggtattgactctgagaa

SEQ ID NO: 1051708 - DNA, 33 bp, Homo sapien
ggaaaatcctgtggactgtattgactctgagaa

SEQ ID NO: 1051709 - DNA, 33 bp, Homo sapien
aagctggagatgagaaaaacacgggagaacatg

SEQ ID NO: 1051710 - DNA, 33 bp, Homo sapien
aagctggagatgagaagaacacgggagaacatg

SEQ ID NO: 1051711 - DNA, 33 bp, Homo sapien
tcctccaacattgaaaattccaatttgacatga

SEQ ID NO: 1051712 - DNA, 33 bp, Homo sapien
tcctccaacattgaaagttccaatttgacatga

SEQ ID NO: 1051713 - DNA, 33 bp, Homo sapien
aagaaaagtttagcacagatgtcctgattcaga

SEQ ID NO: 1051714 - DNA, 33 bp, Homo sapien
aagaaaagtttagcacggatgtcctgattcaga

SEQ ID NO: 1051715 - DNA, 33 bp, Homo sapien
gaacatgctcttcaacaccagggaaaggaaagg

SEQ ID NO: 1051716 - DNA, 33 bp, Homo sapien
gaacatgctcttcaacgccagggaaaggaaagg

SEQ ID NO: 1051717 - DNA, 33 bp, Homo sapien
gaatgcatgaatctaaatctaatctatcattcc

SEQ ID NO: 1051718 - DNA, 33 bp, Homo sapien
gaatgcatgaatctaagtctaatctatcattcc

SEQ ID NO: 1051719 - DNA, 33 bp, Homo sapien
tgcatgtaacaatacaagtccaccaagaagtag

SEQ ID NO: 1051720 - DNA, 33 bp, Homo sapien
tgcatgtaacaatacatgtccaccaagaagtag

SEQ ID NO: 1051721 - DNA, 33 bp, Homo sapien
ccttgagtctgaaaaacaggaaccctgatttta

SEQ ID NO: 1051722 - DNA, 33 bp, Homo sapien
ccttgagtctgaaaaataggaaccctgatttta

SEQ ID NO: 1051723 - DNA, 33 bp, Homo sapien
gcaggtgacaactcaacgactttggagcctaca

SEQ ID NO: 1051724 - DNA, 33 bp, Homo sapien
gcaggtgacaactcaatgactttggagcctaca

SEQ ID NO: 1051725 - DNA, 33 bp, Homo sapien
cagcatttagagagctaaactcatcacattgct

SEQ ID NO: 1051726 - DNA, 33 bp, Homo sapien
cagcatttagagagctgaactcatcacattgct

SEQ ID NO: 1051727 - DNA, 33 bp, Homo sapien
cttgccttgtacatacaaacattgcagacccct

SEQ ID NO: 1051728 - DNA, 33 bp, Homo sapien
cttgccttgtacatacgaacattgcagacccct

SEQ ID NO: 1051729 - DNA, 33 bp, Homo sapien
agcaaaacggccttccagacttctgcttttgtt

SEQ ID NO: 1051730 - DNA, 33 bp, Homo sapien
agcaaaacggccttccggacttctgcttttgtt

SEQ ID NO: 1051731 - DNA, 33 bp, Homo sapien
ttccaaatttgtttgaacacagagcctttaaaa

SEQ ID NO: 1051732 - DNA, 33 bp, Homo sapien
ttccaaatttgtttgatcacagagcctttaaaa

SEQ ID NO: 1051733 - DNA, 33 bp, Homo sapien
tgtgtgtgtctcggcacaaaggtaaaatgatca

SEQ ID NO: 1051734 - DNA, 33 bp, Homo sapien
tgtgtgtgtctcggcataaaggtaaaatgatca

SEQ ID NO: 1051735 - DNA, 33 bp, Homo sapien
gttcacaaatccctgaagagcaatagagggatg

SEQ ID NO: 1051736 - DNA, 33 bp, Homo sapien
gttcacaaatccctgatgagcaatagagggatg

SEQ ID NO: 1051737 - DNA, 33 bp, Homo sapien
gctgattattacaaagcagtctggctttctccc

SEQ ID NO: 1051738 - DNA, 33 bp, Homo sapien
gctgattattacaaagtagtctggctttctccc

SEQ ID NO: 1051739 - DNA, 33 bp, Homo sapien
tttctccatttccccaaagaatcaggaaataga

SEQ ID NO: 1051740 - DNA, 33 bp, Homo sapien
tttctccatttccccagagaatcaggaaataga

SEQ ID NO: 1051741 - DNA, 33 bp, Homo sapien
gagtaccatgtgtatccgaacttgctacctttt

SEQ ID NO: 1051742 - DNA, 33 bp, Homo sapien
gagtaccatgtgtatctgaacttgctacctttt

SEQ ID NO: 1051743 - DNA, 33 bp, Homo sapien
agtgatcaaccccccaagtaccactatcctctg

SEQ ID NO: 1051744 - DNA, 33 bp, Homo sapien
agtgatcaaccccccaggtaccactatcctctg

SEQ ID NO: 1051745 - DNA, 33 bp, Homo sapien
tctgcaccaactgcaaacaatatccttagaagg

SEQ ID NO: 1051746 - DNA, 33 bp, Homo sapien
tctgcaccaactgcaaccaatatccttagaagg

SEQ ID NO: 1051747 - DNA, 33 bp, Homo sapien
agtgtgttattctacaatgaaaatagtttctaa

SEQ ID NO: 1051748 - DNA, 33 bp, Homo sapien
agtgtgttattctacagtgaaaatagtttctaa

SEQ ID NO: 1051749 - DNA, 33 bp, Homo sapien
tgcccaaaactcgttacagcaaatttaggcttt

SEQ ID NO: 1051750 - DNA, 33 bp, Homo sapien
tgcccaaaactcgttagagcaaatttaggcttt

SEQ ID NO: 1051751 - DNA, 33 bp, Homo sapien
aaagagcattttgtcccgattgatcagcaggga

SEQ ID NO: 1051752 - DNA, 33 bp, Homo sapien
aaagagcattttgtcctgattgatcagcaggga

SEQ ID NO: 1051753 - DNA, 33 bp, Homo sapien
attttgaggttgctaacatctatggtaaaaatg

SEQ ID NO: 1051754 - DNA, 33 bp, Homo sapien
attttgaggttgctaagatctatggtaaaaatg

SEQ ID NO: 1051755 - DNA, 33 bp, Homo sapien
ggcttgatgtgtaatccgaaaactctattttgt

SEQ ID NO: 1051756 - DNA, 33 bp, Homo sapien
ggcttgatgtgtaatctgaaaactctattttgt

SEQ ID NO: 1051757 - DNA, 33 bp, Homo sapien
actttgcccaacattacatatttgcctatgcac

SEQ ID NO: 1051758 - DNA, 33 bp, Homo sapien
actttgcccaacattagatatttgcctatgcac

SEQ ID NO: 1051759 - DNA, 33 bp, Homo sapien
aactgtaaaatagaagacccaactaaacatggc

SEQ ID NO: 1051760 - DNA, 33 bp, Homo sapien
aactgtaaaatagaagtcccaactaaacatggc

SEQ ID NO: 1051761 - DNA, 33 bp, Homo sapien
agcccctggataaaccaaagcatattaaactgg

SEQ ID NO: 1051762 - DNA, 33 bp, Homo sapien
agcccctggataaacctaagcatattaaactgg

SEQ ID NO: 1051763 - DNA, 33 bp, Homo sapien
agcaactccttccttaaaacatatttctgtttt

SEQ ID NO: 1051764 - DNA, 33 bp, Homo sapien
agcaactccttccttacaacatatttctgtttt

SEQ ID NO: 1051765 - DNA, 33 bp, Homo sapien
tcaccggagtcaatcaactgtaggctccaactc

SEQ ID NO: 1051766 - DNA, 33 bp, Homo sapien
tcaccggagtcaatcagctgtaggctccaactc

SEQ ID NO: 1051767 - DNA, 33 bp, Homo sapien
accttgctcttcagtacgttctgcttggtttct

SEQ ID NO: 1051768 - DNA, 33 bp, Homo sapien
accttgctcttcagtatgttctgcttggtttct

SEQ ID NO: 1051769 - DNA, 33 bp, Homo sapien
gcagatctgaaaagtgacactctacaaggttca

SEQ ID NO: 1051770 - DNA, 33 bp, Homo sapien
gcagatctgaaaagtggcactctacaaggttca

SEQ ID NO: 1051771 - DNA, 33 bp, Homo sapien
aaggtcagtaaggtagcccagggtcatagttca

SEQ ID NO: 1051772 - DNA, 33 bp, Homo sapien
aaggtcagtaaggtagtccagggtcatagttca

SEQ ID NO: 1051773 - DNA, 33 bp, Homo sapien
tgattttgtcatccacaggatacttgacaatga

SEQ ID NO: 1051774 - DNA, 33 bp, Homo sapien
tgattttgtcatccacgggatacttgacaatga

SEQ ID NO: 1051775 - DNA, 33 bp, Homo sapien
cacttaaaatttcaaaaaagatgtacgctaatg

SEQ ID NO: 1051776 - DNA, 33 bp, Homo sapien
cacttaaaatttcaaagaagatgtacgctaatg

SEQ ID NO: 1051777 - DNA, 33 bp, Homo sapien
gaaaatgagcagattaagtccataatattaatt

SEQ ID NO: 1051778 - DNA, 33 bp, Homo sapien
gaaaatgagcagattaggtccataatattaatt

SEQ ID NO: 1051779 - DNA, 33 bp, Homo sapien
agaatgcttcattgggaatagctaagacaccat

SEQ ID NO: 1051780 - DNA, 33 bp, Homo sapien
agaatgcttcattgggcatagctaagacaccat

SEQ ID NO: 1051781 - DNA, 33 bp, Homo sapien
tggaatcaccttccaaataagtcatctgcaccc

SEQ ID NO: 1051782 - DNA, 33 bp, Homo sapien
tggaatcaccttccaagtaagtcatctgcaccc

SEQ ID NO: 1051783 - DNA, 33 bp, Homo sapien
gaaaatgttgtgcatacaaaaaaagacacctca

SEQ ID NO: 1051784 - DNA, 33 bp, Homo sapien
gaaaatgttgtgcatataaaaaaagacacctca

SEQ ID NO: 1051785 - DNA, 33 bp, Homo sapien
ctgattcaaagatgacaaaagttaccctggaac

SEQ ID NO: 1051786 - DNA, 33 bp, Homo sapien
ctgattcaaagatgactaaagttaccctggaac

SEQ ID NO: 1051787 - DNA, 33 bp, Homo sapien
tacgaagataacaagactaagagatcaaagtaa

SEQ ID NO: 1051788 - DNA, 33 bp, Homo sapien
tacgaagataacaagattaagagatcaaagtaa

SEQ ID NO: 1051789 - DNA, 33 bp, Homo sapien
tggagaggaagttcaacgggcccaggggctgaa

SEQ ID NO: 1051790 - DNA, 33 bp, Homo sapien
tggagaggaagttcaatgggcccaggggctgaa

SEQ ID NO: 1051791 - DNA, 33 bp, Homo sapien
acttcattctcttcagcaaccagaaacctaggt

SEQ ID NO: 1051792 - DNA, 33 bp, Homo sapien
acttcattctcttcaggaaccagaaacctaggt

SEQ ID NO: 1051793 - DNA, 33 bp, Homo sapien
ctgtttttttcttcagcatagagttcatgagaa

SEQ ID NO: 1051794 - DNA, 33 bp, Homo sapien
ctgtttttttcttcagtatagagttcatgagaa

SEQ ID NO: 1051795 - DNA, 33 bp, Homo sapien
ctcgccatcatctggacagctacaatttgcttc

SEQ ID NO: 1051796 - DNA, 33 bp, Homo sapien
ctcgccatcatctggatagctacaatttgcttc

SEQ ID NO: 1051797 - DNA, 33 bp, Homo sapien
aaaggttcagactcaacgatccagatgatttat

SEQ ID NO: 1051798 - DNA, 33 bp, Homo sapien
aaaggttcagactcaatgatccagatgatttat

SEQ ID NO: 1051799 - DNA, 33 bp, Homo sapien
cacaacatgcacagtaccaagagtcatggtgag

SEQ ID NO: 1051800 - DNA, 33 bp, Homo sapien
cacaacatgcacagtatcaagagtcatggtgag

SEQ ID NO: 1051801 - DNA, 33 bp, Homo sapien
tgaaaatgtttcctaactgtccataaaaccact

SEQ ID NO: 1051802 - DNA, 33 bp, Homo sapien
tgaaaatgtttcctaattgtccataaaaccact

SEQ ID NO: 1051803 - DNA, 33 bp, Homo sapien
ccatgcaatgttgtaacgtagataaacctcaaa

SEQ ID NO: 1051804 - DNA, 33 bp, Homo sapien
ccatgcaatgttgtaatgtagataaacctcaaa

SEQ ID NO: 1051805 - DNA, 33 bp, Homo sapien
gcatttttttggtgcaatctaaaacattgacaa

SEQ ID NO: 1051806 - DNA, 33 bp, Homo sapien
gcatttttttggtgcagtctaaaacattgacaa

SEQ ID NO: 1051807 - DNA, 33 bp, Homo sapien
agcaactatagtgtaactgaacacttactgtaa

SEQ ID NO: 1051808 - DNA, 33 bp, Homo sapien
agcaactatagtgtaattgaacacttactgtaa

SEQ ID NO: 1051809 - DNA, 33 bp, Homo sapien
actgaaaaattaaagcacatgggtaatagcatg

SEQ ID NO: 1051810 - DNA, 33 bp, Homo sapien
actgaaaaattaaagcgcatgggtaatagcatg

SEQ ID NO: 1051811 - DNA, 33 bp, Homo sapien; identical to SEQ ID NO: 1051809

SEQ ID NO: 1051812 - DNA, 33 bp, Homo sapien; identical to SEQ ID NO: 1051810

SEQ ID NO: 1051813 - DNA, 33 bp, Homo sapien
tcacagtcaggtgaaaatgtaagtttccattta

SEQ ID NO: 1051814 - DNA, 33 bp, Homo sapien
tcacagtcaggtgaaagtgtaagtttccattta

SEQ ID NO: 1051815 - DNA, 33 bp, Homo sapien
tgcttaagcacataaaaacatagttcacctgta

SEQ ID NO: 1051816 - DNA, 33 bp, Homo sapien
tgcttaagcacataaagacatagttcacctgta

SEQ ID NO: 1051817 - DNA, 33 bp, Homo sapien
gcgagagtggacactacggggaagcattcctac

SEQ ID NO: 1051818 - DNA, 33 bp, Homo sapien
gcgagagtggacactagggggaagcattcctac

SEQ ID NO: 1051819 - DNA, 33 bp, Homo sapien
ttccttccaggcaaggcccatactttaattact

SEQ ID NO: 1051820 - DNA, 33 bp, Homo sapien
ttccttccaggcaaggtccatactttaattact

SEQ ID NO: 1051821 - DNA, 33 bp, Homo sapien
tcagatacatcaagacaaagtcactttattaag

SEQ ID NO: 1051822 - DNA, 33 bp, Homo sapien
tcagatacatcaagactaagtcactttattaag

SEQ ID NO: 1051823 - DNA, 33 bp, Homo sapien
aaagatctcaacgagccatttggtacatcttct

SEQ ID NO: 1051824 - DNA, 33 bp, Homo sapien
aaagatctcaacgagcgatttggtacatcttct

SEQ ID NO: 1051825 - DNA, 33 bp, Homo sapien
tttatgggtgacaaaacggaaggcacgatgatc

SEQ ID NO: 1051826 - DNA, 33 bp, Homo sapien
tttatgggtgacaaaatggaaggcacgatgatc

SEQ ID NO: 1051827 - DNA, 33 bp, Homo sapien
ctgatctgctccttcacgatgatatccttgatc

SEQ ID NO: 1051828 - DNA, 33 bp, Homo sapien
ctgatctgctccttcatgatgatatccttgatc

SEQ ID NO: 1051829 - DNA, 33 bp, Homo sapien
tcaggtcaaaatcctgacaagccttattgtaga

SEQ ID NO: 1051830 - DNA, 33 bp, Homo sapien
tcaggtcaaaatcctggcaagccttattgtaga

SEQ ID NO: 1051831 - DNA, 33 bp, Homo sapien
tttgattcacctcaagcagactgcctcctctca

SEQ ID NO: 1051832 - DNA, 33 bp, Homo sapien
tttgattcacctcaagtagactgcctcctctca

SEQ ID NO: 1051833 - DNA, 33 bp, Homo sapien
acttaacaaggatacaaggatcataaaggaaaa

SEQ ID NO: 1051834 - DNA, 33 bp, Homo sapien
acttaacaaggatacacggatcataaaggaaaa

SEQ ID NO: 1051835 - DNA, 33 bp, Homo sapien
tcaaattatttccagaaaacttatccaacactt

SEQ ID NO: 1051836 - DNA, 33 bp, Homo sapien
tcaaattatttccagacaacttatccaacactt

SEQ ID NO: 1051837 - DNA, 33 bp, Homo sapien
gatccagaaatggtaacaatcaacagtccagtt

SEQ ID NO: 1051838 - DNA, 33 bp, Homo sapien
gatccagaaatggtaagaatcaacagtccagtt

SEQ ID NO: 1051839 - DNA, 33 bp, Homo sapien
atcattacacaatgcagtaatgtacagaaatat

SEQ ID NO: 1051840 - DNA, 33 bp, Homo sapien
atcattacacaatgcattaatgtacagaaatat

SEQ ID NO: 1051841 - DNA, 33 bp, Homo sapien
cataaatggtcagagacaggacaaggagtcaga

SEQ ID NO: 1051842 - DNA, 33 bp, Homo sapien
cataaatggtcagagataggacaaggagtcaga

SEQ ID NO: 1051843 - DNA, 33 bp, Homo sapien
aaaaatgtcctagaacaagatagtgatgtttgt

SEQ ID NO: 1051844 - DNA, 33 bp, Homo sapien
aaaaatgtcctagaactagatagtgatgtttgt

SEQ ID NO: 1051845 - DNA, 33 bp, Homo sapien
taatctgtaatcttaaactgtgcagagccttga

SEQ ID NO: 1051846 - DNA, 33 bp, Homo sapien
taatctgtaatcttaagctgtgcagagccttga

SEQ ID NO: 1051847 - DNA, 33 bp, Homo sapien
tcaagtcggacatacaccactttataatggagg

SEQ ID NO: 1051848 - DNA, 33 bp, Homo sapien
tcaagtcggacatacagcactttataatggagg

SEQ ID NO: 1051849 - DNA, 33 bp, Homo sapien
tagcaaggtagagaacaacaaatggaaaattat

SEQ ID NO: 1051850 - DNA, 33 bp, Homo sapien
tagcaaggtagagaacgacaaatggaaaattat

SEQ ID NO: 1051851 - DNA, 33 bp, Homo sapien
gccatttcagactatgacataaccatgcacatg

SEQ ID NO: 1051852 - DNA, 33 bp, Homo sapien
gccatttcagactatggcataaccatgcacatg

SEQ ID NO: 1051853 - DNA, 33 bp, Homo sapien
acagctcacaagctaacaatggtttttaaatgt

SEQ ID NO: 1051854 - DNA, 33 bp, Homo sapien
acagctcacaagctaagaatggtttttaaatgt

SEQ ID NO: 1051855 - DNA, 33 bp, Homo sapien
ataatttaaaacagtaacaagagataaaagtag

SEQ ID NO: 1051856 - DNA, 33 bp, Homo sapien
ataatttaaaacagtagcaagagataaaagtag

SEQ ID NO: 1051857 - DNA, 33 bp, Homo sapien
aatgctccaaaattaaaaccgaacaagacagaa

SEQ ID NO: 1051858 - DNA, 33 bp, Homo sapien
aatgctccaaaattaagaccgaacaagacagaa

SEQ ID NO: 1051859 - DNA, 33 bp, Homo sapien
tcaagttgattcataaaaagcatccttttgtcc

SEQ ID NO: 1051860 - DNA, 33 bp, Homo sapien
tcaagttgattcataagaagcatccttttgtcc

SEQ ID NO: 1051861 - DNA, 33 bp, Homo sapien
taatgactgtattaacaattttcagattttagt

SEQ ID NO: 1051862 - DNA, 33 bp, Homo sapien
taatgactgtattaacgattttcagattttagt

SEQ ID NO: 1051863 - DNA, 33 bp, Homo sapien
tatgaaacagcaagaaatcagaaccctgtttat

SEQ ID NO: 1051864 - DNA, 33 bp, Homo sapien
tatgaaacagcaagaagtcagaaccctgtttat

SEQ ID NO: 1051865 - DNA, 33 bp, Homo sapien
taagactttcaaacaacctgtagtatgtgagat

SEQ ID NO: 1051866 - DNA, 33 bp, Homo sapien
taagactttcaaacaatctgtagtatgtgagat

SEQ ID NO: 1051867 - DNA, 33 bp, Homo sapien
gcctgatattttctccaagagcagggagcccat

SEQ ID NO: 1051868 - DNA, 33 bp, Homo sapien
gcctgatattttctccgagagcagggagcccat

SEQ ID NO: 1051869 - DNA, 33 bp, Homo sapien
agaaaatatcaggcaaacaaaattaattgtggt

SEQ ID NO: 1051870 - DNA, 33 bp, Homo sapien
agaaaatatcaggcaagcaaaattaattgtggt

SEQ ID NO: 1051871 - DNA, 33 bp, Homo sapien
tttcacaatgtcttcccgaaaagaatgtttaaa

SEQ ID NO: 1051872 - DNA, 33 bp, Homo sapien
tttcacaatgtcttcctgaaaagaatgtttaaa

SEQ ID NO: 1051873 - DNA, 33 bp, Homo sapien
ctgaccatacttgcaaaatagttccagcgcaaa

SEQ ID NO: 1051874 - DNA, 33 bp, Homo sapien
ctgaccatacttgcaagatagttccagcgcaaa

SEQ ID NO: 1051875 - DNA, 33 bp, Homo sapien
cagataaaagtttagaagttctgataaaggtaa

SEQ ID NO: 1051876 - DNA, 33 bp, Homo sapien
cagataaaagtttagaggttctgataaaggtaa

SEQ ID NO: 1051877 - DNA, 33 bp, Homo sapien
ttctctaaattgcagccaaactggacctagatt

SEQ ID NO: 1051878 - DNA, 33 bp, Homo sapien
ttctctaaattgcagcgaaactggacctagatt

SEQ ID NO: 1051879 - DNA, 33 bp, Homo sapien
aaaccatatcagtctccaactgtgcttgtgatt

SEQ ID NO: 1051880 - DNA, 33 bp, Homo sapien
aaaccatatcagtctctaactgtgcttgtgatt

SEQ ID NO: 1051881 - DNA, 33 bp, Homo sapien
taatagatttagaggaatacttgagtgagagtc

SEQ ID NO: 1051882 - DNA, 33 bp, Homo sapien
taatagatttagaggagtacttgagtgagagtc

SEQ ID NO: 1051883 - DNA, 33 bp, Homo sapien
catttagtactgtaaacctctttccttcaaatt

SEQ ID NO: 1051884 - DNA, 33 bp, Homo sapien
catttagtactgtaaagctctttccttcaaatt

SEQ ID NO: 1051885 - DNA, 33 bp, Homo sapien
tttccccattaactgacgtttactcctctaaac

SEQ ID NO: 1051886 - DNA, 33 bp, Homo sapien
tttccccattaactgatgtttactcctctaaac

SEQ ID NO: 1051887 - DNA, 33 bp, Homo sapien
aagtagactaagcaagacattcttataattttg

SEQ ID NO: 1051888 - DNA, 33 bp, Homo sapien
aagtagactaagcaaggcattcttataattttg

SEQ ID NO: 1051889 - DNA, 33 bp, Homo sapien
gacaaactgctctgctaacttacgttcataata

SEQ ID NO: 1051890 - DNA, 33 bp, Homo sapien
gacaaactgctctgcttacttacgttcataata

SEQ ID NO: 1051891 - DNA, 33 bp, Homo sapien
cagcacgaataatgtgcatttgctatctgggcc

SEQ ID NO: 1051892 - DNA, 33 bp, Homo sapien
cagcacgaataatgtggatttgctatctgggcc

SEQ ID NO: 1051893 - DNA, 33 bp, Homo sapien
actgccttagctataaaattttgcatcagctat

SEQ ID NO: 1051894 - DNA, 33 bp, Homo sapien
actgccttagctataacattttgcatcagctat

SEQ ID NO: 1051895 - DNA, 33 bp, Homo sapien
agtgttggacataaaacaactaagtaaacatga

SEQ ID NO: 1051896 - DNA, 33 bp, Homo sapien
agtgttggacataaaataactaagtaaacatga

SEQ ID NO: 1051897 - DNA, 33 bp, Homo sapien
cgacaggaatcctgcaacctgaagtctttatat

SEQ ID NO: 1051898 - DNA, 33 bp, Homo sapien
cgacaggaatcctgcatcctgaagtctttatat

SEQ ID NO: 1051899 - DNA, 33 bp, Homo sapien
agagcattccagtgcaaacatataccaggaatt

SEQ ID NO: 1051900 - DNA, 33 bp, Homo sapien
agagcattccagtgcatacatataccaggaatt

SEQ ID NO: 1051901 - DNA, 33 bp, Homo sapien
ctgcatccagctggaacgtgaaggaaaaaagag

SEQ ID NO: 1051902 - DNA, 33 bp, Homo sapien
ctgcatccagctggaatgtgaaggaaaaaagag

SEQ ID NO: 1051903 - DNA, 33 bp, Homo sapien
aatacaagtgaatcacacaaagtgccttgctca

SEQ ID NO: 1051904 - DNA, 33 bp, Homo sapien
aatacaagtgaatcacgcaaagtgccttgctca

SEQ ID NO: 1051905 - DNA, 33 bp, Homo sapien
catgcatgatggccaactatttttgacaaaagt

SEQ ID NO: 1051906 - DNA, 33 bp, Homo sapien
catgcatgatggccaattatttttgacaaaagt

SEQ ID NO: 1051907 - DNA, 33 bp, Homo sapien
aatttcagatcgatcacagatagacccaaacat

SEQ ID NO: 1051908 - DNA, 33 bp, Homo sapien
aatttcagatcgatcatagatagacccaaacat

SEQ ID NO: 1051909 - DNA, 33 bp, Homo sapien
ccaggtcaagaagtcaatccttgaagttacccc

SEQ ID NO: 1051910 - DNA, 33 bp, Homo sapien
ccaggtcaagaagtcactccttgaagttacccc

SEQ ID NO: 1051911 - DNA, 33 bp, Homo sapien
ataatggtatttcaaacaggcatatagttcatc

SEQ ID NO: 1051912 - DNA, 33 bp, Homo sapien
ataatggtatttcaaataggcatatagttcatc

SEQ ID NO: 1051913 - DNA, 33 bp, Homo sapien
tggatcaagtggatccaatatacatctaaagaa

SEQ ID NO: 1051914 - DNA, 33 bp, Homo sapien
tggatcaagtggatccgatatacatctaaagaa

SEQ ID NO: 1051915 - DNA, 33 bp, Homo sapien
acaaattcttgattcacctccttttcagaataa

SEQ ID NO: 1051916 - DNA, 33 bp, Homo sapien
acaaattcttgattcatctccttttcagaataa

SEQ ID NO: 1051917 - DNA, 33 bp, Homo sapien
tcttcatagtgaaaaaataggaatgatgattaa

SEQ ID NO: 1051918 - DNA, 33 bp, Homo sapien
tcttcatagtgaaaaagtaggaatgatgattaa

SEQ ID NO: 1051919 - DNA, 33 bp, Homo sapien
aaatccacaagtgacagtaaacgtggtgcatgt

SEQ ID NO: 1051920 - DNA, 33 bp, Homo sapien
aaatccacaagtgacattaaacgtggtgcatgt

SEQ ID NO: 1051921 - DNA, 33 bp, Homo sapien
agcttagctctgaacacagcaagtttcttagaa

SEQ ID NO: 1051922 - DNA, 33 bp, Homo sapien
agcttagctctgaacatagcaagtttcttagaa

SEQ ID NO: 1051923 - DNA, 33 bp, Homo sapien
agttatagagttgggactaattggtgcctgatt

SEQ ID NO: 1051924 - DNA, 33 bp, Homo sapien
agttatagagttgggattaattggtgcctgatt

SEQ ID NO: 1051925 - DNA, 33 bp, Homo sapien
ttgtatttttaaagtacccatccggcctgagac

SEQ ID NO: 1051926 - DNA, 33 bp, Homo sapien
ttgtatttttaaagtatccatccggcctgagac

SEQ ID NO: 1051927 - DNA, 33 bp, Homo sapien
aaatccattggcaaaaagcttagggtggcattt

SEQ ID NO: 1051928 - DNA, 33 bp, Homo sapien
aaatccattggcaaaaggcttagggtggcattt

SEQ ID NO: 1051929 - DNA, 33 bp, Homo sapien
gatggaaattatcacaatattaatcacaccttt

SEQ ID NO: 1051930 - DNA, 33 bp, Homo sapien
gatggaaattatcacagtattaatcacaccttt

SEQ ID NO: 1051931 - DNA, 33 bp, Homo sapien
tcttaacaaattactcacataaaaatctctgtc

SEQ ID NO: 1051932 - DNA, 33 bp, Homo sapien
tcttaacaaattactcgcataaaaatctctgtc

SEQ ID NO: 1051933 - DNA, 33 bp, Homo sapien
tcttaaacttctcagactcatcaaggggttaag

SEQ ID NO: 1051934 - DNA, 33 bp, Homo sapien
tcttaaacttctcagagtcatcaaggggttaag

SEQ ID NO: 1051935 - DNA, 33 bp, Homo sapien
ttccaggttcatcatactacaagtgtggatgag

SEQ ID NO: 1051936 - DNA, 33 bp, Homo sapien
ttccaggttcatcatagtacaagtgtggatgag

SEQ ID NO: 1051937 - DNA, 33 bp, Homo sapien
gcaacttgagtttagaaagatagagagatagat

SEQ ID NO: 1051938 - DNA, 33 bp, Homo sapien
gcaacttgagtttagatagatagagagatagat

SEQ ID NO: 1051939 - DNA, 33 bp, Homo sapien
cctatagatgtaaagaaggtccgttctatatat

SEQ ID NO: 1051940 - DNA, 33 bp, Homo sapien
cctatagatgtaaagatggtccgttctatatat

SEQ ID NO: 1051941 - DNA, 33 bp, Homo sapien
actccgaagtcgcacaaatatgcttcaagtctt

SEQ ID NO: 1051942 - DNA, 33 bp, Homo sapien
actccgaagtcgcacatatatgcttcaagtctt

SEQ ID NO: 1051943 - DNA, 33 bp, Homo sapien
tccaataagagcaaagacattgtcagaggaggg

SEQ ID NO: 1051944 - DNA, 33 bp, Homo sapien
tccaataagagcaaagtcattgtcagaggaggg

SEQ ID NO: 1051945 - DNA, 33 bp, Homo sapien
gcagccatagaaagtacgtaaatgaatgaacat

SEQ ID NO: 1051946 - DNA, 33 bp, Homo sapien
gcagccatagaaagtatgtaaatgaatgaacat

SEQ ID NO: 1051947 - DNA, 33 bp, Homo sapien
taattggcctaaaccaatgcttgtcccagtaac

SEQ ID NO: 1051948 - DNA, 33 bp, Homo sapien
taattggcctaaaccattgcttgtcccagtaac

SEQ ID NO: 1051949 - DNA, 33 bp, Homo sapien
ataaacatattttttaagccatagtcagccaac

SEQ ID NO: 1051950 - DNA, 33 bp, Homo sapien
ataaacatattttttaggccatagtcagccaac

SEQ ID NO: 1051951 - DNA, 33 bp, Homo sapien
acccacatagacagagacccaatatttattgat

SEQ ID NO: 1051952 - DNA, 33 bp, Homo sapien
acccacatagacagaggcccaatatttattgat

SEQ ID NO: 1051953 - DNA, 33 bp, Homo sapien
taaaaactcaggagcagggagtcatttaatgta

SEQ ID NO: 1051954 - DNA, 33 bp, Homo sapien
taaaaactcaggagcatggagtcatttaatgta

SEQ ID NO: 1051955 - DNA, 33 bp, Homo sapien
tgtatttcagtgcatacagaatggtgatctagg

SEQ ID NO: 1051956 - DNA, 33 bp, Homo sapien
tgtatttcagtgcatatagaatggtgatctagg

SEQ ID NO: 1051957 - DNA, 33 bp, Homo sapien
atatgtataaatgttaggtgtcaattagaaaat

SEQ ID NO: 1051958 - DNA, 33 bp, Homo sapien
atatgtataaatgttatgtgtcaattagaaaat

SEQ ID NO: 1051959 - DNA, 33 bp, Homo sapien
catgtctaattcaacactataaactccacaacc

SEQ ID NO: 1051960 - DNA, 33 bp, Homo sapien
catgtctaattcaacattataaactccacaacc

SEQ ID NO: 1051961 - DNA, 33 bp, Homo sapien
ggcatcctcctggcaacgattttctgtgatgtg

SEQ ID NO: 1051962 - DNA, 33 bp, Homo sapien
ggcatcctcctggcaatgattttctgtgatgtg

SEQ ID NO: 1051963 - DNA, 33 bp, Homo sapien
tggaacaatgcagaaactgagatgcagatttta

SEQ ID NO: 1051964 - DNA, 33 bp, Homo sapien
tggaacaatgcagaaattgagatgcagatttta

SEQ ID NO: 1051965 - DNA, 33 bp, Homo sapien
tatatatatatgttcagccttagcagacactgt

SEQ ID NO: 1051966 - DNA, 33 bp, Homo sapien
tatatatatatgttcatccttagcagacactgt

SEQ ID NO: 1051967 - DNA, 33 bp, Homo sapien
aatacaactataattacgattcctggctgataa

SEQ ID NO: 1051968 - DNA, 33 bp, Homo sapien
aatacaactataattatgattcctggctgataa

SEQ ID NO: 1051969 - DNA, 33 bp, Homo sapien
atagaaactaatcgtcagaaagtggagtgacag

SEQ ID NO: 1051970 - DNA, 33 bp, Homo sapien
atagaaactaatcgtcggaaagtggagtgacag

SEQ ID NO: 1051971 - DNA, 33 bp, Homo sapien
tgggctgtacagtggaatactagcaatgctaat

SEQ ID NO: 1051972 - DNA, 33 bp, Homo sapien
tgggctgtacagtggagtactagcaatgctaat

SEQ ID NO: 1051973 - DNA, 33 bp, Homo sapien
ttttatattttgggaacacactgtatatacttc

SEQ ID NO: 1051974 - DNA, 33 bp, Homo sapien
ttttatattttgggaagacactgtatatacttc

SEQ ID NO: 1051975 - DNA, 33 bp, Homo sapien
gttaactatacattggaacctcttaaatgaact

SEQ ID NO: 1051976 - DNA, 33 bp, Homo sapien
gttaactatacattggcacctcttaaatgaact

SEQ ID NO: 1051977 - DNA, 33 bp, Homo sapien
accttcttctactttaccactatttcagtacca

SEQ ID NO: 1051978 - DNA, 33 bp, Homo sapien
accttcttctactttatcactatttcagtacca

SEQ ID NO: 1051979 - DNA, 33 bp, Homo sapien
gcatctccatttctccactaatgtagagctgcc

SEQ ID NO: 1051980 - DNA, 33 bp, Homo sapien
gcatctccatttctccgctaatgtagagctgcc

SEQ ID NO: 1051981 - DNA, 33 bp, Homo sapien
agaaccaaatcatatacagagttgtcaaatgag

SEQ ID NO: 1051982 - DNA, 33 bp, Homo sapien
agaaccaaatcatatatagagttgtcaaatgag

SEQ ID NO: 1051983 - DNA, 33 bp, Homo sapien
tttgtatatagtaaaaggtggtagtccagtttc

SEQ ID NO: 1051984 - DNA, 33 bp, Homo sapien
tttgtatatagtaaaatgtggtagtccagtttc

SEQ ID NO: 1051985 - DNA, 33 bp, Homo sapien
taaacttgagcagtcacatgaaggatagaaagc

SEQ ID NO: 1051986 - DNA, 33 bp, Homo sapien
taaacttgagcagtcagatgaaggatagaaagc

SEQ ID NO: 1051987 - DNA, 33 bp, Homo sapien
cttatttactgcaagacagtgactcgccagagc

SEQ ID NO: 1051988 - DNA, 33 bp, Homo sapien
cttatttactgcaagatagtgactcgccagagc

SEQ ID NO: 1051989 - DNA, 33 bp, Homo sapien
aagtattggttggcagaaagataggaaattaac

SEQ ID NO: 1051990 - DNA, 33 bp, Homo sapien
aagtattggttggcaggaagataggaaattaac

SEQ ID NO: 1051991 - DNA, 33 bp, Homo sapien
tgcagtaagagaactacgaaaacagtaagactg

SEQ ID NO: 1051992 - DNA, 33 bp, Homo sapien
tgcagtaagagaactatgaaaacagtaagactg

SEQ ID NO: 1051993 - DNA, 33 bp, Homo sapien
ttttaatgtacatgggcattttatgcattttaa

SEQ ID NO: 1051994 - DNA, 33 bp, Homo sapien
ttttaatgtacatgggtattttatgcattttaa

SEQ ID NO: 1051995 - DNA, 33 bp, Homo sapien
ttagaaatctgcctaccatacctgatcaataag

SEQ ID NO: 1051996 - DNA, 33 bp, Homo sapien
ttagaaatctgcctacgatacctgatcaataag

SEQ ID NO: 1051997 - DNA, 33 bp, Homo sapien
ttctcacataaaccctcagcaactcaccccaag

SEQ ID NO: 1051998 - DNA, 33 bp, Homo sapien
ttctcacataaacccttagcaactcaccccaag

SEQ ID NO: 1051999 - DNA, 33 bp, Homo sapien
cccatactgctattgacgtggtttcctctctca

SEQ ID NO: 1052000 - DNA, 33 bp, Homo sapien
cccatactgctattgatgtggtttcctctctca

SEQ ID NO: 1052001 - DNA, 33 bp, Homo sapien
aacatttgaaattaggcacaatgccagaagtaa

SEQ ID NO: 1052002 - DNA, 33 bp, Homo sapien
aacatttgaaattaggtacaatgccagaagtaa

SEQ ID NO: 1052003 - DNA, 33 bp, Homo sapien
tagcttaaataaatggaactgtctttaaggaat

SEQ ID NO: 1052004 - DNA, 33 bp, Homo sapien
tagcttaaataaatgggactgtctttaaggaat

SEQ ID NO: 1052005 - DNA, 33 bp, Homo sapien
gtaaaatacatacagagtaagccagagatagct

SEQ ID NO: 1052006 - DNA, 33 bp, Homo sapien
gtaaaatacatacagattaagccagagatagct

SEQ ID NO: 1052007 - DNA, 33 bp, Homo sapien
aagaattggaacattacatggtttgtgatgagg

SEQ ID NO: 1052008 - DNA, 33 bp, Homo sapien
aagaattggaacattatatggtttgtgatgagg

SEQ ID NO: 1052009 - DNA, 33 bp, Homo sapien
cctttacaaagagcaaagagtttcaaaggataa

SEQ ID NO: 1052010 - DNA, 33 bp, Homo sapien
cctttacaaagagcaacgagtttcaaaggataa

SEQ ID NO: 1052011 - DNA, 33 bp, Homo sapien
caatcaatcactacccaatatcacgatctttca

SEQ ID NO: 1052012 - DNA, 33 bp, Homo sapien
caatcaatcactacccgatatcacgatctttca

SEQ ID NO: 1052013 - DNA, 33 bp, Homo sapien
aatgaaactcatcaagcccttaggtatcctctt

SEQ ID NO: 1052014 - DNA, 33 bp, Homo sapien
aatgaaactcatcaagtccttaggtatcctctt

SEQ ID NO: 1052015 - DNA, 33 bp, Homo sapien
atcttccttgatctccaatttcctcatttcccc

SEQ ID NO: 1052016 - DNA, 33 bp, Homo sapien
atcttccttgatctccgatttcctcatttcccc

SEQ ID NO: 1052017 - DNA, 33 bp, Homo sapien
gtgttaataagaataaatagaagggtggctaca

SEQ ID NO: 1052018 - DNA, 33 bp, Homo sapien
gtgttaataagaataagtagaagggtggctaca

SEQ ID NO: 1052019 - DNA, 33 bp, Homo sapien
tgtggtcagtctacaccgtggcctgcttccctg

SEQ ID NO: 1052020 - DNA, 33 bp, Homo sapien
tgtggtcagtctacactgtggcctgcttccctg

SEQ ID NO: 1052021 - DNA, 33 bp, Homo sapien
acagacttgtaaaatacgtgatttgcaatgcac

SEQ ID NO: 1052022 - DNA, 33 bp, Homo sapien
acagacttgtaaaatatgtgatttgcaatgcac

SEQ ID NO: 1052023 - DNA, 33 bp, Homo sapien
aatagcagaataaataagttgtggaatttatat

SEQ ID NO: 1052024 - DNA, 33 bp, Homo sapien
aatagcagaataaataggttgtggaatttatat

SEQ ID NO: 1052025 - DNA, 33 bp, Homo sapien
agaattaggcatataaagagtactcaaggaact

SEQ ID NO: 1052026 - DNA, 33 bp, Homo sapien
agaattaggcatataatgagtactcaaggaact

SEQ ID NO: 1052027 - DNA, 33 bp, Homo sapien
actgctgaaacaacatgacttttggttaatatt

SEQ ID NO: 1052028 - DNA, 33 bp, Homo sapien
actgctgaaacaacattacttttggttaatatt

SEQ ID NO: 1052029 - DNA, 33 bp, Homo sapien
attgtatcagaataatcaggatagttttaagaa

SEQ ID NO: 1052030 - DNA, 33 bp, Homo sapien
attgtatcagaataattaggatagttttaagaa

SEQ ID NO: 1052031 - DNA, 33 bp, Homo sapien
agtcaccacaaagaaccggagttgggcaaattg

SEQ ID NO: 1052032 - DNA, 33 bp, Homo sapien
agtcaccacaaagaactggagttgggcaaattg

SEQ ID NO: 1052033 - DNA, 33 bp, Homo sapien
tctgaactttttagctaaacctaatagacagtc

SEQ ID NO: 1052034 - DNA, 33 bp, Homo sapien
tctgaactttttagctgaacctaatagacagtc

SEQ ID NO: 1052035 - DNA, 33 bp, Homo sapien
tcttttttctatctacacctatgccaacgaggg

SEQ ID NO: 1052036 - DNA, 33 bp, Homo sapien
tcttttttctatctacgcctatgccaacgaggg

SEQ ID NO: 1052037 - DNA, 33 bp, Homo sapien
tatttaccctaaagaccgctacaggtaaattac

SEQ ID NO: 1052038 - DNA, 33 bp, Homo sapien
tatttaccctaaagacggctacaggtaaattac

SEQ ID NO: 1052039 - DNA, 33 bp, Homo sapien
tgtttgacatatgccaccactttgacgaagttt

SEQ ID NO: 1052040 - DNA, 33 bp, Homo sapien
tgtttgacatatgccatcactttgacgaagttt

SEQ ID NO: 1052041 - DNA, 33 bp, Homo sapien
ttgtagtggcctctaacgatcacttgaatgtct

SEQ ID NO: 1052042 - DNA, 33 bp, Homo sapien
ttgtagtggcctctaatgatcacttgaatgtct

SEQ ID NO: 1052043 - DNA, 33 bp, Homo sapien
catgttgctaagtccaatgaacttctcagactc

SEQ ID NO: 1052044 - DNA, 33 bp, Homo sapien
catgttgctaagtccagtgaacttctcagactc

SEQ ID NO: 1052045 - DNA, 33 bp, Homo sapien
aatatagacagttagactagatcatgttaaggt

SEQ ID NO: 1052046 - DNA, 33 bp, Homo sapien
aatatagacagttagattagatcatgttaaggt

SEQ ID NO: 1052047 - DNA, 33 bp, Homo sapien
gattaaataaacatacaaggactcttcaacaag

SEQ ID NO: 1052048 - DNA, 33 bp, Homo sapien
gattaaataaacatacgaggactcttcaacaag

SEQ ID NO: 1052049 - DNA, 33 bp, Homo sapien
atgagagtgagaggataagcatataagttttaa

SEQ ID NO: 1052050 - DNA, 33 bp, Homo sapien
atgagagtgagaggatgagcatataagttttaa

SEQ ID NO: 1052051 - DNA, 33 bp, Homo sapien
tttgagtttggccttacagattgagcaagtgaa

SEQ ID NO: 1052052 - DNA, 33 bp, Homo sapien
tttgagtttggccttatagattgagcaagtgaa

SEQ ID NO: 1052053 - DNA, 33 bp, Homo sapien
cctcaaaacatcatcaaatattctaattttctt

SEQ ID NO: 1052054 - DNA, 33 bp, Homo sapien
cctcaaaacatcatcagatattctaattttctt

SEQ ID NO: 1052055 - DNA, 33 bp, Homo sapien
agctcttctcagacaacgtttgctggcccccga

SEQ ID NO: 1052056 - DNA, 33 bp, Homo sapien
agctcttctcagacaatgtttgctggcccccga

SEQ ID NO: 1052057 - DNA, 33 bp, Homo sapien
tctccaaatccttgacaaaacatgatgctagaa

SEQ ID NO: 1052058 - DNA, 33 bp, Homo sapien
tctccaaatccttgaccaaacatgatgctagaa

SEQ ID NO: 1052059 - DNA, 33 bp, Homo sapien
atactgacccaaagagaccccatatattagtta

SEQ ID NO: 1052060 - DNA, 33 bp, Homo sapien
atactgacccaaagaggccccatatattagtta

SEQ ID NO: 1052061 - DNA, 33 bp, Homo sapien
ctttctgaaactttgcacctttgattacacagc

SEQ ID NO: 1052062 - DNA, 33 bp, Homo sapien
ctttctgaaactttgcgcctttgattacacagc

SEQ ID NO: 1052063 - DNA, 33 bp, Homo sapien
cttttatcagtttttacctcttgtctggtggtt

SEQ ID NO: 1052064 - DNA, 33 bp, Homo sapien
cttttatcagtttttatctcttgtctggtggtt

SEQ ID NO: 1052065 - DNA, 33 bp, Homo sapien
acgtggctatggaaacaggcagtagtgttggtg

SEQ ID NO: 1052066 - DNA, 33 bp, Homo sapien
acgtggctatggaaacgggcagtagtgttggtg

SEQ ID NO: 1052067 - DNA, 33 bp, Homo sapien
aagccaaattaattcccgactactagcccactg

SEQ ID NO: 1052068 - DNA, 33 bp, Homo sapien
aagccaaattaattcctgactactagcccactg

SEQ ID NO: 1052069 - DNA, 33 bp, Homo sapien
tacatggttctgttgaagagtagacattcctga

SEQ ID NO: 1052070 - DNA, 33 bp, Homo sapien
tacatggttctgttgaggagtagacattcctga

SEQ ID NO: 1052071 - DNA, 33 bp, Homo sapien
actaccacatgacaaaagttcttcttagaagtt

SEQ ID NO: 1052072 - DNA, 33 bp, Homo sapien
actaccacatgacaaaggttcttcttagaagtt

SEQ ID NO: 1052073 - DNA, 33 bp, Homo sapien
aatggtgtcattctacacaggtatagtaaacat

SEQ ID NO: 1052074 - DNA, 33 bp, Homo sapien
aatggtgtcattctacgcaggtatagtaaacat

SEQ ID NO: 1052075 - DNA, 33 bp, Homo sapien
ttgtgaagaattgccaataaaaatactaaaatc

SEQ ID NO: 1052076 - DNA, 33 bp, Homo sapien
ttgtgaagaattgccagtaaaaatactaaaatc

SEQ ID NO: 1052077 - DNA, 33 bp, Homo sapien
tattgaactggcagaaactataactctcacaag

SEQ ID NO: 1052078 - DNA, 33 bp, Homo sapien
tattgaactggcagaagctataactctcacaag

SEQ ID NO: 1052079 - DNA, 33 bp, Homo sapien
aagtaatttctaaatccaccctctcaatttcct

SEQ ID NO: 1052080 - DNA, 33 bp, Homo sapien
aagtaatttctaaatctaccctctcaatttcct

SEQ ID NO: 1052081 - DNA, 33 bp, Homo sapien
tcatattgatgatagccaaatcacatggtcact

SEQ ID NO: 1052082 - DNA, 33 bp, Homo sapien
tcatattgatgatagcgaaatcacatggtcact

SEQ ID NO: 1052083 - DNA, 33 bp, Homo sapien
acagttggaagtctcacatcaaaccaaagtttt

SEQ ID NO: 1052084 - DNA, 33 bp, Homo sapien
acagttggaagtctcatatcaaaccaaagtttt

SEQ ID NO: 1052085 - DNA, 33 bp, Homo sapien
acttttctagtcttaacggaaaggactgacacc

SEQ ID NO: 1052086 - DNA, 33 bp, Homo sapien
acttttctagtcttaatggaaaggactgacacc

SEQ ID NO: 1052087 - DNA, 33 bp, Homo sapien
aagtagagtttgagaaggaattcgttgtcttca

SEQ ID NO: 1052088 - DNA, 33 bp, Homo sapien
aagtagagtttgagaatgaattcgttgtcttca

SEQ ID NO: 1052089 - DNA, 33 bp, Homo sapien
tgaaagtagcttgttacgagttaaattgtgtac

SEQ ID NO: 1052090 - DNA, 33 bp, Homo sapien
tgaaagtagcttgttatgagttaaattgtgtac

SEQ ID NO: 1052091 - DNA, 33 bp, Homo sapien
ttcctttgaaatcatcaccctttctctgtcatt

SEQ ID NO: 1052092 - DNA, 33 bp, Homo sapien
ttcctttgaaatcatcgccctttctctgtcatt

SEQ ID NO: 1052093 - DNA, 33 bp, Homo sapien
tcatttaaagatactaagagtctaagctgttga

SEQ ID NO: 1052094 - DNA, 33 bp, Homo sapien
tcatttaaagatactaggagtctaagctgttga

SEQ ID NO: 1052095 - DNA, 33 bp, Homo sapien
aaaagagccctacttacaacttcggaatgcttt

SEQ ID NO: 1052096 - DNA, 33 bp, Homo sapien
aaaagagccctacttataacttcggaatgcttt

SEQ ID NO: 1052097 - DNA, 33 bp, Homo sapien
gtcccattagactcaactcatatacacaacatg

SEQ ID NO: 1052098 - DNA, 33 bp, Homo sapien
gtcccattagactcaagtcatatacacaacatg

SEQ ID NO: 1052099 - DNA, 33 bp, Homo sapien
taaaaggctactgatacataaggacagttgatt

SEQ ID NO: 1052100 - DNA, 33 bp, Homo sapien
taaaaggctactgatatataaggacagttgatt

SEQ ID NO: 1052101 - DNA, 33 bp, Homo sapien
atgttggcccatttgacgtgttctgaacaagta

SEQ ID NO: 1052102 - DNA, 33 bp, Homo sapien
atgttggcccatttgatgtgttctgaacaagta

SEQ ID NO: 1052103 - DNA, 33 bp, Homo sapien
gaagaggaggctcaggaaaaagacatccaaaaa

SEQ ID NO: 1052104 - DNA, 33 bp, Homo sapien
gaagaggaggctcaggtaaaagacatccaaaaa

SEQ ID NO: 1052105 - DNA, 33 bp, Homo sapien
accatcctgaaaaatcgctcttcttggatatat

SEQ ID NO: 1052106 - DNA, 33 bp, Homo sapien
accatcctgaaaaatctctcttcttggatatat

SEQ ID NO: 1052107 - DNA, 33 bp, Homo sapien
tataatgtgcatactaccattccagatcttgtt

SEQ ID NO: 1052108 - DNA, 33 bp, Homo sapien
tataatgtgcatactatcattccagatcttgtt

SEQ ID NO: 1052109 - DNA, 33 bp, Homo sapien
aaaaaaatctctccaacgtatgccgcaggttct

SEQ ID NO: 1052110 - DNA, 33 bp, Homo sapien
aaaaaaatctctccaatgtatgccgcaggttct

SEQ ID NO: 1052111 - DNA, 33 bp, Homo sapien
catttttagcaaaatccgagttcagacccagca

SEQ ID NO: 1052112 - DNA, 33 bp, Homo sapien
catttttagcaaaatctgagttcagacccagca

SEQ ID NO: 1052113 - DNA, 33 bp, Homo sapien
ctgcacatacaaactcagagtaatcagacaaaa

SEQ ID NO: 1052114 - DNA, 33 bp, Homo sapien
ctgcacatacaaactcggagtaatcagacaaaa

SEQ ID NO: 1052115 - DNA, 33 bp, Homo sapien
atggaaatcggatgcgcacaaaatggttgtcaa

SEQ ID NO: 1052116 - DNA, 33 bp, Homo sapien
atggaaatcggatgcgtacaaaatggttgtcaa

SEQ ID NO: 1052117 - DNA, 33 bp, Homo sapien
taacagtggaattgagaagttgtgacaaataaa

SEQ ID NO: 1052118 - DNA, 33 bp, Homo sapien
taacagtggaattgagtagttgtgacaaataaa

SEQ ID NO: 1052119 - DNA, 33 bp, Homo sapien
acctatagacaatatgaaaacgaatgggtgtgg

SEQ ID NO: 1052120 - DNA, 33 bp, Homo sapien
acctatagacaatatggaaacgaatgggtgtgg

SEQ ID NO: 1052121 - DNA, 33 bp, Homo sapien
tggatttggcctattgaacataatttactgacc

SEQ ID NO: 1052122 - DNA, 33 bp, Homo sapien
tggatttggcctattggacataatttactgacc

SEQ ID NO: 1052123 - DNA, 33 bp, Homo sapien
accaagagattcaaggaaattactaagtccatt

SEQ ID NO: 1052124 - DNA, 33 bp, Homo sapien
accaagagattcaagggaattactaagtccatt

SEQ ID NO: 1052125 - DNA, 33 bp, Homo sapien
tcttattcagagttcaatagctattattcaata

SEQ ID NO: 1052126 - DNA, 33 bp, Homo sapien
tcttattcagagttcagtagctattattcaata

SEQ ID NO: 1052127 - DNA, 33 bp, Homo sapien
agaaaagccttcaagcaaagtgacacagatact

SEQ ID NO: 1052128 - DNA, 33 bp, Homo sapien
agaaaagccttcaagcgaagtgacacagatact

SEQ ID NO: 1052129 - DNA, 33 bp, Homo sapien
aaaaaatagaaaaacacggcctggtgacacacc

SEQ ID NO: 1052130 - DNA, 33 bp, Homo sapien
aaaaaatagaaaaacatggcctggtgacacacc

SEQ ID NO: 1052131 - DNA, 33 bp, Homo sapien
gtgcttacttaaaatacgggatcctgagggatg

SEQ ID NO: 1052132 - DNA, 33 bp, Homo sapien
gtgcttacttaaaatatgggatcctgagggatg

SEQ ID NO: 1052133 - DNA, 33 bp, Homo sapien
ctgagtttacattctaaagagcttatattgctt

SEQ ID NO: 1052134 - DNA, 33 bp, Homo sapien
ctgagtttacattctagagagcttatattgctt

SEQ ID NO: 1052135 - DNA, 33 bp, Homo sapien
cactgctaccatcctccccctgatactgggaaa

SEQ ID NO: 1052136 - DNA, 33 bp, Homo sapien
cactgctaccatcctctccctgatactgggaaa

SEQ ID NO: 1052137 - DNA, 33 bp, Homo sapien
tctttccattacatacactgctgattttcaacc

SEQ ID NO: 1052138 - DNA, 33 bp, Homo sapien
tctttccattacataccctgctgattttcaacc

SEQ ID NO: 1052139 - DNA, 33 bp, Homo sapien
tagtacccgatgtcaaagcttctcccagatccc

SEQ ID NO: 1052140 - DNA, 33 bp, Homo sapien
tagtacccgatgtcaaggcttctcccagatccc

SEQ ID NO: 1052141 - DNA, 33 bp, Homo sapien
gagttgttaatgagaaagttatatctgtggaca

SEQ ID NO: 1052142 - DNA, 33 bp, Homo sapien
gagttgttaatgagaaggttatatctgtggaca

SEQ ID NO: 1052143 - DNA, 33 bp, Homo sapien
tgaagttatagtggtaaaagaagtgttgaccac

SEQ ID NO: 1052144 - DNA, 33 bp, Homo sapien
tgaagttatagtggtagaagaagtgttgaccac

SEQ ID NO: 1052145 - DNA, 33 bp, Homo sapien
ctcagtaagtacaaaacgaatgaaagataagga

SEQ ID NO: 1052146 - DNA, 33 bp, Homo sapien
ctcagtaagtacaaaatgaatgaaagataagga

SEQ ID NO: 1052147 - DNA, 33 bp, Homo sapien
accgggttcctcttgacggcatatagtaaaatg

SEQ ID NO: 1052148 - DNA, 33 bp, Homo sapien
accgggttcctcttgatggcatatagtaaaatg

SEQ ID NO: 1052149 - DNA, 33 bp, Homo sapien
tgtcttacacatatcaccaattttctggcaaga

SEQ ID NO: 1052150 - DNA, 33 bp, Homo sapien
tgtcttacacatatcatcaattttctggcaaga

SEQ ID NO: 1052151 - DNA, 33 bp, Homo sapien
ttggctactaccatagacattattgccctttta

SEQ ID NO: 1052152 - DNA, 33 bp, Homo sapien
ttggctactaccataggcattattgccctttta

SEQ ID NO: 1052153 - DNA, 33 bp, Homo sapien
ctagaggccgagtaaacccagaaggtagcctga

SEQ ID NO: 1052154 - DNA, 33 bp, Homo sapien
ctagaggccgagtaaatccagaaggtagcctga

SEQ ID NO: 1052155 - DNA, 33 bp, Homo sapien
actgatagaactcagaagggttgtaaacttgga

SEQ ID NO: 1052156 - DNA, 33 bp, Homo sapien
actgatagaactcagaggggttgtaaacttgga

SEQ ID NO: 1052157 - DNA, 33 bp, Homo sapien
gcactttctgcccaagacctctgtattcacatt

SEQ ID NO: 1052158 - DNA, 33 bp, Homo sapien
gcactttctgcccaaggcctctgtattcacatt

SEQ ID NO: 1052159 - DNA, 33 bp, Homo sapien
cttctgaataacagcaactaacattctcatagc

SEQ ID NO: 1052160 - DNA, 33 bp, Homo sapien
cttctgaataacagcagctaacattctcatagc

SEQ ID NO: 1052161 - DNA, 33 bp, Homo sapien
tttgcagaaagaaaagccgtctaccattttcac

SEQ ID NO: 1052162 - DNA, 33 bp, Homo sapien
tttgcagaaagaaaagtcgtctaccattttcac

SEQ ID NO: 1052163 - DNA, 33 bp, Homo sapien
ctcagactcactgaacccaggaaatcaattggc

SEQ ID NO: 1052164 - DNA, 33 bp, Homo sapien
ctcagactcactgaactcaggaaatcaattggc

SEQ ID NO: 1052165 - DNA, 33 bp, Homo sapien
ttgtaagtatctatgacgtgaagaagtcttggg

SEQ ID NO: 1052166 - DNA, 33 bp, Homo sapien
ttgtaagtatctatgatgtgaagaagtcttggg

SEQ ID NO: 1052167 - DNA, 33 bp, Homo sapien
acatagtaggtttgtcacagactttccatcctg

SEQ ID NO: 1052168 - DNA, 33 bp, Homo sapien
acatagtaggtttgtcgcagactttccatcctg

SEQ ID NO: 1052169 - DNA, 33 bp, Homo sapien
aaaaagtttgactgagaatcaagtaaagtggtt

SEQ ID NO: 1052170 - DNA, 33 bp, Homo sapien
aaaaagtttgactgaggatcaagtaaagtggtt

SEQ ID NO: 1052171 - DNA, 33 bp, Homo sapien
gttaatgtcacaaatcaattcagcatctaaaaa

SEQ ID NO: 1052172 - DNA, 33 bp, Homo sapien
gttaatgtcacaaatcgattcagcatctaaaaa

SEQ ID NO: 1052173 - DNA, 33 bp, Homo sapien
ttcttatagcataaaaacttacatttctgatcc

SEQ ID NO: 1052174 - DNA, 33 bp, Homo sapien
ttcttatagcataaaatcttacatttctgatcc

SEQ ID NO: 1052175 - DNA, 33 bp, Homo sapien
tttttctcagtcttgaaatctggtgtaactata

SEQ ID NO: 1052176 - DNA, 33 bp, Homo sapien
tttttctcagtcttgacatctggtgtaactata

SEQ ID NO: 1052177 - DNA, 33 bp, Homo sapien
cttaaggagtctgtccacttaagggtaaagcac

SEQ ID NO: 1052178 - DNA, 33 bp, Homo sapien
cttaaggagtctgtccgcttaagggtaaagcac

SEQ ID NO: 1052179 - DNA, 33 bp, Homo sapien
aaattatgtattcatcgcttgaaactgttcact

SEQ ID NO: 1052180 - DNA, 33 bp, Homo sapien
aaattatgtattcatctcttgaaactgttcact

SEQ ID NO: 1052181 - DNA, 33 bp, Homo sapien
tgtagatgtactctgacagaagggaaattcttg

SEQ ID NO: 1052182 - DNA, 33 bp, Homo sapien
tgtagatgtactctgatagaagggaaattcttg

SEQ ID NO: 1052183 - DNA, 33 bp, Homo sapien
ttttatttggaaaatactactatagagacttgg

SEQ ID NO: 1052184 - DNA, 33 bp, Homo sapien
ttttatttggaaaatattactatagagacttgg

SEQ ID NO: 1052185 - DNA, 33 bp, Homo sapien
tgggccatggaacaggaatagaatgcaagaaaa

SEQ ID NO: 1052186 - DNA, 33 bp, Homo sapien
tgggccatggaacaggtatagaatgcaagaaaa

SEQ ID NO: 1052187 - DNA, 33 bp, Homo sapien
ggtctcaatcaattcacaagtttattttgccaa

SEQ ID NO: 1052188 - DNA, 33 bp, Homo sapien
ggtctcaatcaattcataagtttattttgccaa

SEQ ID NO: 1052189 - DNA, 33 bp, Homo sapien
agaaaataagttgtcaatactttaaatctcaaa

SEQ ID NO: 1052190 - DNA, 33 bp, Homo sapien
agaaaataagttgtcagtactttaaatctcaaa

SEQ ID NO: 1052191 - DNA, 33 bp, Homo sapien
tgtaaaatatgggtgacgaataggagaagtaaa

SEQ ID NO: 1052192 - DNA, 33 bp, Homo sapien
tgtaaaatatgggtgatgaataggagaagtaaa

SEQ ID NO: 1052193 - DNA, 33 bp, Homo sapien
tcaatagcaccattaacattttagcctggataa

SEQ ID NO: 1052194 - DNA, 33 bp, Homo sapien
tcaatagcaccattaagattttagcctggataa

SEQ ID NO: 1052195 - DNA, 33 bp, Homo sapien
aggtggatggaagataccagtagccgccttcca

SEQ ID NO: 1052196 - DNA, 33 bp, Homo sapien
aggtggatggaagatagcagtagccgccttcca

SEQ ID NO: 1052197 - DNA, 33 bp, Homo sapien
tctttcatttcctgtaacacttcaactcatgct

SEQ ID NO: 1052198 - DNA, 33 bp, Homo sapien
tctttcatttcctgtatcacttcaactcatgct

SEQ ID NO: 1052199 - DNA, 33 bp, Homo sapien
aattgagtcctgtctagaggtttccttgacatg

SEQ ID NO: 1052200 - DNA, 33 bp, Homo sapien
aattgagtcctgtctataggtttccttgacatg

SEQ ID NO: 1052201 - DNA, 33 bp, Homo sapien
acactcaagtatgcacactttcagatccagaac

SEQ ID NO: 1052202 - DNA, 33 bp, Homo sapien
acactcaagtatgcacgctttcagatccagaac

SEQ ID NO: 1052203 - DNA, 33 bp, Homo sapien
tgtactaactgctatgaaagtggcttcctatgt

SEQ ID NO: 1052204 - DNA, 33 bp, Homo sapien
tgtactaactgctatgtaagtggcttcctatgt

SEQ ID NO: 1052205 - DNA, 33 bp, Homo sapien
aagcaggagaactgtcacccctgtaagagtaaa

SEQ ID NO: 1052206 - DNA, 33 bp, Homo sapien
aagcaggagaactgtcgcccctgtaagagtaaa

SEQ ID NO: 1052207 - DNA, 33 bp, Homo sapien
tctagggatctggaaacaggatcaacttcttcc

SEQ ID NO: 1052208 - DNA, 33 bp, Homo sapien
tctagggatctggaaataggatcaacttcttcc

SEQ ID NO: 1052209 - DNA, 33 bp, Homo sapien
cagatacccttaggaccaccagcagttgtgaca

SEQ ID NO: 1052210 - DNA, 33 bp, Homo sapien
cagatacccttaggactaccagcagttgtgaca

SEQ ID NO: 1052211 - DNA, 33 bp, Homo sapien
gccataaactaaagcaaattcccttctcatgga

SEQ ID NO: 1052212 - DNA, 33 bp, Homo sapien
gccataaactaaagcagattcccttctcatgga

SEQ ID NO: 1052213 - DNA, 33 bp, Homo sapien
tagctttatcctgatagaaaaatcttactacct

SEQ ID NO: 1052214 - DNA, 33 bp, Homo sapien
tagctttatcctgatataaaaatcttactacct

SEQ ID NO: 1052215 - DNA, 33 bp, Homo sapien
tacagtgagatcagcaacattctggggcacaga

SEQ ID NO: 1052216 - DNA, 33 bp, Homo sapien
tacagtgagatcagcaccattctggggcacaga

SEQ ID NO: 1052217 - DNA, 33 bp, Homo sapien
ctaggataatattataaatgacaggtagcactg

SEQ ID NO: 1052218 - DNA, 33 bp, Homo sapien
ctaggataatattatagatgacaggtagcactg

SEQ ID NO: 1052219 - DNA, 33 bp, Homo sapien
taacatgtggtaaggcacagacactgaccagaa

SEQ ID NO: 1052220 - DNA, 33 bp, Homo sapien
taacatgtggtaaggcgcagacactgaccagaa

SEQ ID NO: 1052221 - DNA, 33 bp, Homo sapien
aagcctctatttaaaaagctttcaacggttcac

SEQ ID NO: 1052222 - DNA, 33 bp, Homo sapien
aagcctctatttaaaaggctttcaacggttcac

SEQ ID NO: 1052223 - DNA, 33 bp, Homo sapien
acttaggctatgaagacaattgtagctaacaca

SEQ ID NO: 1052224 - DNA, 33 bp, Homo sapien
acttaggctatgaagataattgtagctaacaca

SEQ ID NO: 1052225 - DNA, 33 bp, Homo sapien
ttttgggagaggcgcaggtttccatttcaaatg

SEQ ID NO: 1052226 - DNA, 33 bp, Homo sapien
ttttgggagaggcgcatgtttccatttcaaatg

SEQ ID NO: 1052227 - DNA, 33 bp, Homo sapien
cttcgctgctctctccactttgttgttgtcgtt

SEQ ID NO: 1052228 - DNA, 33 bp, Homo sapien
cttcgctgctctctccgctttgttgttgtcgtt

SEQ ID NO: 1052229 - DNA, 33 bp, Homo sapien
taaagattatagaaaaatcatatcatttgagag

SEQ ID NO: 1052230 - DNA, 33 bp, Homo sapien
taaagattatagaaaagtcatatcatttgagag

SEQ ID NO: 1052231 - DNA, 33 bp, Homo sapien
attgctctaactataacctggactttgaaggca

SEQ ID NO: 1052232 - DNA, 33 bp, Homo sapien
attgctctaactataatctggactttgaaggca

SEQ ID NO: 1052233 - DNA, 33 bp, Homo sapien
tcagaacacagcctccaatacttccagatgtct

SEQ ID NO: 1052234 - DNA, 33 bp, Homo sapien
tcagaacacagcctccgatacttccagatgtct

SEQ ID NO: 1052235 - DNA, 33 bp, Homo sapien
aacaactaggagatcacctacttcaattccaga

SEQ ID NO: 1052236 - DNA, 33 bp, Homo sapien
aacaactaggagatcatctacttcaattccaga

SEQ ID NO: 1052237 - DNA, 33 bp, Homo sapien
gctcttgttaagagcactagtagcaattttcat

SEQ ID NO: 1052238 - DNA, 33 bp, Homo sapien
gctcttgttaagagcattagtagcaattttcat

SEQ ID NO: 1052239 - DNA, 33 bp, Homo sapien
ggaaatgtgatgaataagactttgcaagagcag

SEQ ID NO: 1052240 - DNA, 33 bp, Homo sapien
ggaaatgtgatgaatacgactttgcaagagcag

SEQ ID NO: 1052241 - DNA, 33 bp, Homo sapien
ttgacttcagatataaataagcattaagctaac

SEQ ID NO: 1052242 - DNA, 33 bp, Homo sapien
ttgacttcagatataagtaagcattaagctaac

SEQ ID NO: 1052243 - DNA, 33 bp, Homo sapien
ttaggaaggaaacttaataaatctgtggcaaca

SEQ ID NO: 1052244 - DNA, 33 bp, Homo sapien
ttaggaaggaaacttagtaaatctgtggcaaca

SEQ ID NO: 1052245 - DNA, 33 bp, Homo sapien
acaaatatgtaattgacaaatgcaagttgtata

SEQ ID NO: 1052246 - DNA, 33 bp, Homo sapien
acaaatatgtaattgataaatgcaagttgtata

SEQ ID NO: 1052247 - DNA, 33 bp, Homo sapien
ttactagagctccacacctaccctctggctgct

SEQ ID NO: 1052248 - DNA, 33 bp, Homo sapien
ttactagagctccacagctaccctctggctgct

SEQ ID NO: 1052249 - DNA, 33 bp, Homo sapien
tacgttgtacaaggaaatataggagcattcacc

SEQ ID NO: 1052250 - DNA, 33 bp, Homo sapien
tacgttgtacaaggaattataggagcattcacc

SEQ ID NO: 1052251 - DNA, 33 bp, Homo sapien
ttaatgtttttaatgccatattttgctcattaa

SEQ ID NO: 1052252 - DNA, 33 bp, Homo sapien
ttaatgtttttaatgctatattttgctcattaa

SEQ ID NO: 1052253 - DNA, 33 bp, Homo sapien
aatctttctctcatctaaaaagtcaatcataaa

SEQ ID NO: 1052254 - DNA, 33 bp, Homo sapien
aatctttctctcatcttaaaagtcaatcataaa

SEQ ID NO: 1052255 - DNA, 33 bp, Homo sapien
ctgtcctggtcatctcaaagatctgaattgttt

SEQ ID NO: 1052256 - DNA, 33 bp, Homo sapien
ctgtcctggtcatctcgaagatctgaattgttt

SEQ ID NO: 1052257 - DNA, 33 bp, Homo sapien
aatcgataatcatttacggactaaatctaataa

SEQ ID NO: 1052258 - DNA, 33 bp, Homo sapien
aatcgataatcatttatggactaaatctaataa

SEQ ID NO: 1052259 - DNA, 33 bp, Homo sapien
gccacactcagattcccgaaccatggaaaccgt

SEQ ID NO: 1052260 - DNA, 33 bp, Homo sapien
gccacactcagattcctgaaccatggaaaccgt

SEQ ID NO: 1052261 - DNA, 33 bp, Homo sapien
tccgatgaaatgctacaaagtataccaaatcca

SEQ ID NO: 1052262 - DNA, 33 bp, Homo sapien
tccgatgaaatgctacgaagtataccaaatcca

SEQ ID NO: 1052263 - DNA, 33 bp, Homo sapien
tacttttcactcagcaacaaaacgatgagtatt

SEQ ID NO: 1052264 - DNA, 33 bp, Homo sapien
tacttttcactcagcaccaaaacgatgagtatt

SEQ ID NO: 1052265 - DNA, 33 bp, Homo sapien
aaatagttcgattctgaaacttaatagaaagat

SEQ ID NO: 1052266 - DNA, 33 bp, Homo sapien
aaatagttcgattctggaacttaatagaaagat

SEQ ID NO: 1052267 - DNA, 33 bp, Homo sapien
agatcttggttgcctacattaactcgtgtagga

SEQ ID NO: 1052268 - DNA, 33 bp, Homo sapien
agatcttggttgcctatattaactcgtgtagga

SEQ ID NO: 1052269 - DNA, 33 bp, Homo sapien
aactgctggtaacagaactcagcttacctccta

SEQ ID NO: 1052270 - DNA, 33 bp, Homo sapien
aactgctggtaacagatctcagcttacctccta

SEQ ID NO: 1052271 - DNA, 33 bp, Homo sapien
agtgtcttctgggacaatgaaccccaaagtgaa

SEQ ID NO: 1052272 - DNA, 33 bp, Homo sapien
agtgtcttctgggacagtgaaccccaaagtgaa

SEQ ID NO: 1052273 - DNA, 33 bp, Homo sapien
agatgatcgacagtggaatgacgtagaagacca

SEQ ID NO: 1052274 - DNA, 33 bp, Homo sapien
agatgatcgacagtgggatgacgtagaagacca

SEQ ID NO: 1052275 - DNA, 33 bp, Homo sapien
gattcccatcattacccggaaaacactcctgtc

SEQ ID NO: 1052276 - DNA, 33 bp, Homo sapien
gattcccatcattacctggaaaacactcctgtc

SEQ ID NO: 1052277 - DNA, 33 bp, Homo sapien
aacccagagaactacaccgattaggtcatttca

SEQ ID NO: 1052278 - DNA, 33 bp, Homo sapien
aacccagagaactacatcgattaggtcatttca

SEQ ID NO: 1052279 - DNA, 33 bp, Homo sapien
ctgcacctgctttgtaagattttgtgtaaagtg

SEQ ID NO: 1052280 - DNA, 33 bp, Homo sapien
ctgcacctgctttgtaggattttgtgtaaagtg

SEQ ID NO: 1052281 - DNA, 33 bp, Homo sapien
tgtgacacagattatacacgcactttgttgctt

SEQ ID NO: 1052282 - DNA, 33 bp, Homo sapien
tgtgacacagattatatacgcactttgttgctt

SEQ ID NO: 1052283 - DNA, 33 bp, Homo sapien
gcagcatccattcagaatattttccatcccaat

SEQ ID NO: 1052284 - DNA, 33 bp, Homo sapien
gcagcatccattcagattattttccatcccaat

SEQ ID NO: 1052285 - DNA, 33 bp, Homo sapien
ttatagaaatctaaagactcaatggttactttg

SEQ ID NO: 1052286 - DNA, 33 bp, Homo sapien
ttatagaaatctaaagtctcaatggttactttg

SEQ ID NO: 1052287 - DNA, 33 bp, Homo sapien
agaaactgagggtccacaataaaatagcagtgt

SEQ ID NO: 1052288 - DNA, 33 bp, Homo sapien
agaaactgagggtccataataaaatagcagtgt

SEQ ID NO: 1052289 - DNA, 33 bp, Homo sapien
ggaccaaatcctctccgatttctgaggccagac

SEQ ID NO: 1052290 - DNA, 33 bp, Homo sapien
ggaccaaatcctctcctatttctgaggccagac

SEQ ID NO: 1052291 - DNA, 33 bp, Homo sapien
agacatccatctcaatgaagaactcagaaggat

SEQ ID NO: 1052292 - DNA, 33 bp, Homo sapien
agacatccatctcaattaagaactcagaaggat

SEQ ID NO: 1052293 - DNA, 33 bp, Homo sapien
gataaattaacttatacgtgaatctctttggaa

SEQ ID NO: 1052294 - DNA, 33 bp, Homo sapien
gataaattaacttatatgtgaatctctttggaa

SEQ ID NO: 1052295 - DNA, 33 bp, Homo sapien
ctttcggccatgtcaaagaatgtgttcattttt

SEQ ID NO: 1052296 - DNA, 33 bp, Homo sapien
ctttcggccatgtcaatgaatgtgttcattttt

SEQ ID NO: 1052297 - DNA, 33 bp, Homo sapien
ccattgttaccactgaaggcctcaataatgcca

SEQ ID NO: 1052298 - DNA, 33 bp, Homo sapien
ccattgttaccactgatggcctcaataatgcca

SEQ ID NO: 1052299 - DNA, 33 bp, Homo sapien
ctgatctgtttctttacgcagtctgcactctca

SEQ ID NO: 1052300 - DNA, 33 bp, Homo sapien
ctgatctgtttctttaggcagtctgcactctca

SEQ ID NO: 1052301 - DNA, 33 bp, Homo sapien
gagcattttgatcccacgtgaggagtgctagtc

SEQ ID NO: 1052302 - DNA, 33 bp, Homo sapien
gagcattttgatcccatgtgaggagtgctagtc

SEQ ID NO: 1052303 - DNA, 33 bp, Homo sapien
tgataaagtctggtaacgacaagaccacccatt

SEQ ID NO: 1052304 - DNA, 33 bp, Homo sapien
tgataaagtctggtaatgacaagaccacccatt

SEQ ID NO: 1052305 - DNA, 33 bp, Homo sapien
ctagcataagatgagaaagagtccctttgtgaa

SEQ ID NO: 1052306 - DNA, 33 bp, Homo sapien
ctagcataagatgagagagagtccctttgtgaa

SEQ ID NO: 1052307 - DNA, 33 bp, Homo sapien
tcttttgcttgggcagaaatatttttgttttgc

SEQ ID NO: 1052308 - DNA, 33 bp, Homo sapien
tcttttgcttgggcagtaatatttttgttttgc

SEQ ID NO: 1052309 - DNA, 33 bp, Homo sapien
agaaaggaagacttaaagaatgactaatgtgtc

SEQ ID NO: 1052310 - DNA, 33 bp, Homo sapien
agaaaggaagacttaaggaatgactaatgtgtc

SEQ ID NO: 1052311 - DNA, 33 bp, Homo sapien
ttaagaagtttatggagattttgtgtctaggga

SEQ ID NO: 1052312 - DNA, 33 bp, Homo sapien
ttaagaagtttatggatattttgtgtctaggga

SEQ ID NO: 1052313 - DNA, 33 bp, Homo sapien
aataattcctctctaaaacagatcccctccttg

SEQ ID NO: 1052314 - DNA, 33 bp, Homo sapien
aataattcctctctaagacagatcccctccttg

SEQ ID NO: 1052315 - DNA, 33 bp, Homo sapien
atgcctatatcttaacacatttcaggcccctct

SEQ ID NO: 1052316 - DNA, 33 bp, Homo sapien
atgcctatatcttaacgcatttcaggcccctct

SEQ ID NO: 1052317 - DNA, 33 bp, Homo sapien
gaacccgagaagtagacagatttttccgctcac

SEQ ID NO: 1052318 - DNA, 33 bp, Homo sapien
gaacccgagaagtagatagatttttccgctcac

SEQ ID NO: 1052319 - DNA, 33 bp, Homo sapien
tgaaaagaattttcgcagagtgcaaacactcat

SEQ ID NO: 1052320 - DNA, 33 bp, Homo sapien
tgaaaagaattttcgcggagtgcaaacactcat

SEQ ID NO: 1052321 - DNA, 33 bp, Homo sapien
caggagaacaaaatagaataacgaattttactt

SEQ ID NO: 1052322 - DNA, 33 bp, Homo sapien
caggagaacaaaataggataacgaattttactt

SEQ ID NO: 1052323 - DNA, 33 bp, Homo sapien
acagactttagacctacaacaatcaagaaggac

SEQ ID NO: 1052324 - DNA, 33 bp, Homo sapien
acagactttagacctataacaatcaagaaggac

SEQ ID NO: 1052325 - DNA, 33 bp, Homo sapien
gcagtctccaaaacaagtagtgtgagctgatat

SEQ ID NO: 1052326 - DNA, 33 bp, Homo sapien
gcagtctccaaaacaattagtgtgagctgatat

SEQ ID NO: 1052327 - DNA, 33 bp, Homo sapien
ggtgtgtataggagcaataagaattccaagcct

SEQ ID NO: 1052328 - DNA, 33 bp, Homo sapien
ggtgtgtataggagcagtaagaattccaagcct

SEQ ID NO: 1052329 - DNA, 33 bp, Homo sapien
gagtgttagtctgtccactttaaattagactgg

SEQ ID NO: 1052330 - DNA, 33 bp, Homo sapien
gagtgttagtctgtccgctttaaattagactgg

SEQ ID NO: 1052331 - DNA, 33 bp, Homo sapien
aaataagtagagaaaaacaagctctgaacactt

SEQ ID NO: 1052332 - DNA, 33 bp, Homo sapien
aaataagtagagaaaagcaagctctgaacactt

SEQ ID NO: 1052333 - DNA, 33 bp, Homo sapien
acacttttggtgtcaaacctagatatttcttca

SEQ ID NO: 1052334 - DNA, 33 bp, Homo sapien
acacttttggtgtcaaccctagatatttcttca

SEQ ID NO: 1052335 - DNA, 33 bp, Homo sapien
gaatctaaagccaccactgatgtgacaggaagc

SEQ ID NO: 1052336 - DNA, 33 bp, Homo sapien
gaatctaaagccaccattgatgtgacaggaagc

SEQ ID NO: 1052337 - DNA, 33 bp, Homo sapien
agtaatgtgggacaccaaagtcaattggataca

SEQ ID NO: 1052338 - DNA, 33 bp, Homo sapien
agtaatgtgggacaccgaagtcaattggataca

SEQ ID NO: 1052339 - DNA, 33 bp, Homo sapien
tgcatagtatttctccaaatttccaaagttttg

SEQ ID NO: 1052340 - DNA, 33 bp, Homo sapien
tgcatagtatttctcccaatttccaaagttttg

SEQ ID NO: 1052341 - DNA, 33 bp, Homo sapien
aaatgccatgggtgacactttaaccaacttctt

SEQ ID NO: 1052342 - DNA, 33 bp, Homo sapien
aaatgccatgggtgacgctttaaccaacttctt

SEQ ID NO: 1052343 - DNA, 33 bp, Homo sapien
ttgccttgcctaatgcaaactctcctaacttat

SEQ ID NO: 1052344 - DNA, 33 bp, Homo sapien
ttgccttgcctaatgccaactctcctaacttat

SEQ ID NO: 1052345 - DNA, 33 bp, Homo sapien
atgccaccaacagtgaaccagctgccatcttgg

SEQ ID NO: 1052346 - DNA, 33 bp, Homo sapien
atgccaccaacagtgacccagctgccatcttgg

SEQ ID NO: 1052347 - DNA, 33 bp, Homo sapien
tcactgtttgctgacacggtagatgacatttaa

SEQ ID NO: 1052348 - DNA, 33 bp, Homo sapien
tcactgtttgctgacatggtagatgacatttaa

SEQ ID NO: 1052349 - DNA, 33 bp, Homo sapien
ccccaagttctttggcacttatgtaggtagaaa

SEQ ID NO: 1052350 - DNA, 33 bp, Homo sapien
ccccaagttctttggcgcttatgtaggtagaaa

SEQ ID NO: 1052351 - DNA, 33 bp, Homo sapien
ccactttctaagagagcatgactgacaggccct

SEQ ID NO: 1052352 - DNA, 33 bp, Homo sapien
ccactttctaagagagtatgactgacaggccct

SEQ ID NO: 1052353 - DNA, 33 bp, Homo sapien
cattgattcataccaacatttctgataggatga

SEQ ID NO: 1052354 - DNA, 33 bp, Homo sapien
cattgattcataccaagatttctgataggatga

SEQ ID NO: 1052355 - DNA, 33 bp, Homo sapien
ttgatgacaataatgacaaccagaagaattaaa

SEQ ID NO: 1052356 - DNA, 33 bp, Homo sapien
ttgatgacaataatgataaccagaagaattaaa

SEQ ID NO: 1052357 - DNA, 33 bp, Homo sapien
tggtcacattcttatccctggcacagccttttt

SEQ ID NO: 1052358 - DNA, 33 bp, Homo sapien
tggtcacattcttatctctggcacagccttttt

SEQ ID NO: 1052359 - DNA, 33 bp, Homo sapien
aaaaagacccaagatcacataagaaaacaactg

SEQ ID NO: 1052360 - DNA, 33 bp, Homo sapien
aaaaagacccaagatcgcataagaaaacaactg

SEQ ID NO: 1052361 - DNA, 33 bp, Homo sapien
tgttaggcaattacgacgtacttaaacgagcat

SEQ ID NO: 1052362 - DNA, 33 bp, Homo sapien
tgttaggcaattacgatgtacttaaacgagcat

SEQ ID NO: 1052363 - DNA, 33 bp, Homo sapien
tgaatttttatctgtacctgcttgtgtaaaaca

SEQ ID NO: 1052364 - DNA, 33 bp, Homo sapien
tgaatttttatctgtatctgcttgtgtaaaaca

SEQ ID NO: 1052365 - DNA, 33 bp, Homo sapien
tctacagaagacactcaatcacattttaccatt

SEQ ID NO: 1052366 - DNA, 33 bp, Homo sapien
tctacagaagacactcgatcacattttaccatt

SEQ ID NO: 1052367 - DNA, 33 bp, Homo sapien
agtttgttgcatgataaagttgaggtctttgga

SEQ ID NO: 1052368 - DNA, 33 bp, Homo sapien
agtttgttgcatgatagagttgaggtctttgga

SEQ ID NO: 1052369 - DNA, 33 bp, Homo sapien
agaaaagcacatttcacctctaccctgtatttc

SEQ ID NO: 1052370 - DNA, 33 bp, Homo sapien
agaaaagcacatttcatctctaccctgtatttc

SEQ ID NO: 1052371 - DNA, 33 bp, Homo sapien
agtctaatgctgtgacagagatagggtcctgct

SEQ ID NO: 1052372 - DNA, 33 bp, Homo sapien
agtctaatgctgtgaccgagatagggtcctgct

SEQ ID NO: 1052373 - DNA, 33 bp, Homo sapien
tgctgtatgtatttgaactgggcttaatttcac

SEQ ID NO: 1052374 - DNA, 33 bp, Homo sapien
tgctgtatgtatttgagctgggcttaatttcac

SEQ ID NO: 1052375 - DNA, 33 bp, Homo sapien
tgtgcagggctcttcaaacagaaaggaatgagc

SEQ ID NO: 1052376 - DNA, 33 bp, Homo sapien
tgtgcagggctcttcagacagaaaggaatgagc

SEQ ID NO: 1052377 - DNA, 33 bp, Homo sapien
tagaatatggtagatacggggtgcgctacaaag

SEQ ID NO: 1052378 - DNA, 33 bp, Homo sapien
tagaatatggtagatatggggtgcgctacaaag

SEQ ID NO: 1052379 - DNA, 33 bp, Homo sapien
cctcccattatttggcagatagtcactcatcac

SEQ ID NO: 1052380 - DNA, 33 bp, Homo sapien
cctcccattatttggccgatagtcactcatcac

SEQ ID NO: 1052381 - DNA, 33 bp, Homo sapien
gaataaaatgcttgtacgtaaaacttaaaatag

SEQ ID NO: 1052382 - DNA, 33 bp, Homo sapien
gaataaaatgcttgtatgtaaaacttaaaatag

SEQ ID NO: 1052383 - DNA, 33 bp, Homo sapien
tgtgtttctttctcctcacattagaatttggtg

SEQ ID NO: 1052384 - DNA, 33 bp, Homo sapien
tgtgtttctttctccttacattagaatttggtg

SEQ ID NO: 1052385 - DNA, 33 bp, Homo sapien
ctgatccctcacttagacgacactggacagctc

SEQ ID NO: 1052386 - DNA, 33 bp, Homo sapien
ctgatccctcacttaggcgacactggacagctc

SEQ ID NO: 1052387 - DNA, 33 bp, Homo sapien
ctgtatgcctgtataccgagttacttcacttat

SEQ ID NO: 1052388 - DNA, 33 bp, Homo sapien
ctgtatgcctgtatacggagttacttcacttat

SEQ ID NO: 1052389 - DNA, 33 bp, Homo sapien
ttaacatattaaattacacctgcttcaccagga

SEQ ID NO: 1052390 - DNA, 33 bp, Homo sapien
ttaacatattaaattagacctgcttcaccagga

SEQ ID NO: 1052391 - DNA, 33 bp, Homo sapien
cctcagagaatgtaaacagacgatcagggcaga

SEQ ID NO: 1052392 - DNA, 33 bp, Homo sapien
cctcagagaatgtaaatagacgatcagggcaga

SEQ ID NO: 1052393 - DNA, 33 bp, Homo sapien
aaggaataatttctaacgctggataacagagta

SEQ ID NO: 1052394 - DNA, 33 bp, Homo sapien
aaggaataatttctaatgctggataacagagta

SEQ ID NO: 1052395 - DNA, 33 bp, Homo sapien
aataacattatagataactcaagtggaaaatta

SEQ ID NO: 1052396 - DNA, 33 bp, Homo sapien
aataacattatagatacctcaagtggaaaatta

SEQ ID NO: 1052397 - DNA, 33 bp, Homo sapien
attaatagctggcaaaaggccaagttctgttct

SEQ ID NO: 1052398 - DNA, 33 bp, Homo sapien
attaatagctggcaaagggccaagttctgttct

SEQ ID NO: 1052399 - DNA, 33 bp, Homo sapien
ggataaaaatgcttcactcccatgcagcctgct

SEQ ID NO: 1052400 - DNA, 33 bp, Homo sapien
ggataaaaatgcttcattcccatgcagcctgct

SEQ ID NO: 1052401 - DNA, 33 bp, Homo sapien
ggaaatgacagacagccatctatcttgttcaca

SEQ ID NO: 1052402 - DNA, 33 bp, Homo sapien
ggaaatgacagacagcgatctatcttgttcaca

SEQ ID NO: 1052403 - DNA, 33 bp, Homo sapien
aactcttacaatgagacattcagaatgaacaac

SEQ ID NO: 1052404 - DNA, 33 bp, Homo sapien
aactcttacaatgagagattcagaatgaacaac

SEQ ID NO: 1052405 - DNA, 33 bp, Homo sapien
gaaaaccaaaactgtcagacaaagccatattat

SEQ ID NO: 1052406 - DNA, 33 bp, Homo sapien
gaaaaccaaaactgtcggacaaagccatattat

SEQ ID NO: 1052407 - DNA, 33 bp, Homo sapien
atgactggtgtcagtacgatgtagaagtcacat

SEQ ID NO: 1052408 - DNA, 33 bp, Homo sapien
atgactggtgtcagtatgatgtagaagtcacat

SEQ ID NO: 1052409 - DNA, 33 bp, Homo sapien
cagatgtctttagcaaaaccccatccacctgct

SEQ ID NO: 1052410 - DNA, 33 bp, Homo sapien
cagatgtctttagcaacaccccatccacctgct

SEQ ID NO: 1052411 - DNA, 33 bp, Homo sapien
tacaggcatcttccagcaggccggctaattttt

SEQ ID NO: 1052412 - DNA, 33 bp, Homo sapien
tacaggcatcttccagtaggccggctaattttt

SEQ ID NO: 1052413 - DNA, 33 bp, Homo sapien
atccttaaatatgcacagaatagattcaacaat

SEQ ID NO: 1052414 - DNA, 33 bp, Homo sapien
atccttaaatatgcacggaatagattcaacaat

SEQ ID NO: 1052415 - DNA, 33 bp, Homo sapien
atgtaatcacagtaacccttaaatgcagaagag

SEQ ID NO: 1052416 - DNA, 33 bp, Homo sapien
atgtaatcacagtaactcttaaatgcagaagag

SEQ ID NO: 1052417 - DNA, 33 bp, Homo sapien
cccatagcttctcaggaatctctgtggaattta

SEQ ID NO: 1052418 - DNA, 33 bp, Homo sapien
cccatagcttctcagggatctctgtggaattta

SEQ ID NO: 1052419 - DNA, 33 bp, Homo sapien
gtttcagttagaggcacgttgtagagaaggcat

SEQ ID NO: 1052420 - DNA, 33 bp, Homo sapien
gtttcagttagaggcatgttgtagagaaggcat

SEQ ID NO: 1052421 - DNA, 33 bp, Homo sapien
ttgtgacttgaagaaccgtgtagttttaaacta

SEQ ID NO: 1052422 - DNA, 33 bp, Homo sapien
ttgtgacttgaagaactgtgtagttttaaacta

SEQ ID NO: 1052423 - DNA, 33 bp, Homo sapien
gactcagattcttaaagggccagttccaaccac

SEQ ID NO: 1052424 - DNA, 33 bp, Homo sapien
gactcagattcttaaatggccagttccaaccac

SEQ ID NO: 1052425 - DNA, 33 bp, Homo sapien
gtaattgatggcttcccaagctaactaagcaga

SEQ ID NO: 1052426 - DNA, 33 bp, Homo sapien
gtaattgatggcttccgaagctaactaagcaga

SEQ ID NO: 1052427 - DNA, 33 bp, Homo sapien
cgtggttgtaaacagaactactctacgttcact

SEQ ID NO: 1052428 - DNA, 33 bp, Homo sapien
cgtggttgtaaacagagctactctacgttcact

SEQ ID NO: 1052429 - DNA, 33 bp, Homo sapien
tctgattggtttgaggaatgtggaatgggagtg

SEQ ID NO: 1052430 - DNA, 33 bp, Homo sapien
tctgattggtttgagggatgtggaatgggagtg

SEQ ID NO: 1052431 - DNA, 33 bp, Homo sapien
gtatgcctgttaataacgagccagccctctgag

SEQ ID NO: 1052432 - DNA, 33 bp, Homo sapien
gtatgcctgttaataatgagccagccctctgag

SEQ ID NO: 1052433 - DNA, 33 bp, Homo sapien
tactgatctaatagccaaaaacagctcagatgt

SEQ ID NO: 1052434 - DNA, 33 bp, Homo sapien
tactgatctaatagcccaaaacagctcagatgt

SEQ ID NO: 1052435 - DNA, 33 bp, Homo sapien
aggcagatcatgagaaaaggcttcagatgcaac

SEQ ID NO: 1052436 - DNA, 33 bp, Homo sapien
aggcagatcatgagaacaggcttcagatgcaac

SEQ ID NO: 1052437 - DNA, 33 bp, Homo sapien
ggaggaacacccaagcacataccactcaacacc

SEQ ID NO: 1052438 - DNA, 33 bp, Homo sapien
ggaggaacacccaagcgcataccactcaacacc

SEQ ID NO: 1052439 - DNA, 33 bp, Homo sapien
aaacattattttccaacaatgacccagtgttca

SEQ ID NO: 1052440 - DNA, 33 bp, Homo sapien
aaacattattttccaagaatgacccagtgttca

SEQ ID NO: 1052441 - DNA, 33 bp, Homo sapien
tttgcacagttcctgaaccaacatcacaggatg

SEQ ID NO: 1052442 - DNA, 33 bp, Homo sapien
tttgcacagttcctgacccaacatcacaggatg

SEQ ID NO: 1052443 - DNA, 33 bp, Homo sapien
tctgcataaatctgggccaccctaatgttcacc

SEQ ID NO: 1052444 - DNA, 33 bp, Homo sapien
tctgcataaatctgggtcaccctaatgttcacc

SEQ ID NO: 1052445 - DNA, 33 bp, Homo sapien
aagtctcctgactgtaaaaaccctgaattgagt

SEQ ID NO: 1052446 - DNA, 33 bp, Homo sapien
aagtctcctgactgtagaaaccctgaattgagt

SEQ ID NO: 1052447 - DNA, 33 bp, Homo sapien
cattagtttgattaatcactgatgtaagtgcag

SEQ ID NO: 1052448 - DNA, 33 bp, Homo sapien
cattagtttgattaattactgatgtaagtgcag

SEQ ID NO: 1052449 - DNA, 33 bp, Homo sapien
accttctgctctttgaaggggattgaggcaaag

SEQ ID NO: 1052450 - DNA, 33 bp, Homo sapien
accttctgctctttgatggggattgaggcaaag

SEQ ID NO: 1052451 - DNA, 33 bp, Homo sapien
gagagttggccagaaacggaatggagtgatttt

SEQ ID NO: 1052452 - DNA, 33 bp, Homo sapien
gagagttggccagaaatggaatggagtgatttt

SEQ ID NO: 1052453 - DNA, 33 bp, Homo sapien
agcatgcataaataaactgtactgtattccttt

SEQ ID NO: 1052454 - DNA, 33 bp, Homo sapien
agcatgcataaataaattgtactgtattccttt

SEQ ID NO: 1052455 - DNA, 33 bp, Homo sapien
ctctccacttagcaataagaaatggttagaaaa

SEQ ID NO: 1052456 - DNA, 33 bp, Homo sapien
ctctccacttagcaatcagaaatggttagaaaa

SEQ ID NO: 1052457 - DNA, 33 bp, Homo sapien
ctctagctctctataaaccacttactgccattg

SEQ ID NO: 1052458 - DNA, 33 bp, Homo sapien
ctctagctctctataagccacttactgccattg

SEQ ID NO: 1052459 - DNA, 33 bp, Homo sapien
cccagactggaacaacaactgagctcaaccaca

SEQ ID NO: 1052460 - DNA, 33 bp, Homo sapien
cccagactggaacaaccactgagctcaaccaca

SEQ ID NO: 1052461 - DNA, 33 bp, Homo sapien
aagtgccctgtgcttacgaaaaaggatagtggc

SEQ ID NO: 1052462 - DNA, 33 bp, Homo sapien
aagtgccctgtgcttatgaaaaaggatagtggc

SEQ ID NO: 1052463 - DNA, 33 bp, Homo sapien
caaggcgaaggtctccagcaaagttccactgag

SEQ ID NO: 1052464 - DNA, 33 bp, Homo sapien
caaggcgaaggtctccggcaaagttccactgag

SEQ ID NO: 1052465 - DNA, 33 bp, Homo sapien
tacgactctagccaacaggcactcttggaaaac

SEQ ID NO: 1052466 - DNA, 33 bp, Homo sapien
tacgactctagccaacgggcactcttggaaaac

SEQ ID NO: 1052467 - DNA, 33 bp, Homo sapien
gaatctacaatttcagaacagtagcatagggtt

SEQ ID NO: 1052468 - DNA, 33 bp, Homo sapien
gaatctacaatttcaggacagtagcatagggtt

SEQ ID NO: 1052469 - DNA, 33 bp, Homo sapien
agacatgccagatacacgagccatttgtgtgtc

SEQ ID NO: 1052470 - DNA, 33 bp, Homo sapien
agacatgccagatacatgagccatttgtgtgtc

SEQ ID NO: 1052471 - DNA, 33 bp, Homo sapien
aatagaggctataacaccttctctgaacaatcc

SEQ ID NO: 1052472 - DNA, 33 bp, Homo sapien
aatagaggctataacagcttctctgaacaatcc

SEQ ID NO: 1052473 - DNA, 33 bp, Homo sapien
gagatgagagcagtgcagcaagatactagcgaa

SEQ ID NO: 1052474 - DNA, 33 bp, Homo sapien
gagatgagagcagtgccgcaagatactagcgaa

SEQ ID NO: 1052475 - DNA, 33 bp, Homo sapien
atttcccctgatcataacattctggccgggaag

SEQ ID NO: 1052476 - DNA, 33 bp, Homo sapien
atttcccctgatcatatcattctggccgggaag

SEQ ID NO: 1052477 - DNA, 33 bp, Homo sapien
ctgtctctatcctcacaaaaataaataaaaatt

SEQ ID NO: 1052478 - DNA, 33 bp, Homo sapien
ctgtctctatcctcacgaaaataaataaaaatt

SEQ ID NO: 1052479 - DNA, 33 bp, Homo sapien
aatatgctcagtaaaacgaaacactgaaaacat

SEQ ID NO: 1052480 - DNA, 33 bp, Homo sapien
aatatgctcagtaaaatgaaacactgaaaacat

SEQ ID NO: 1052481 - DNA, 33 bp, Homo sapien
cagctactgccatagaacaatggtccccttaac

SEQ ID NO: 1052482 - DNA, 33 bp, Homo sapien
cagctactgccatagatcaatggtccccttaac

SEQ ID NO: 1052483 - DNA, 33 bp, Homo sapien
atatgctccataaccaataactcagggaatctg

SEQ ID NO: 1052484 - DNA, 33 bp, Homo sapien
atatgctccataaccagtaactcagggaatctg

SEQ ID NO: 1052485 - DNA, 33 bp, Homo sapien
gtgtgtgaacttcaccaactcattcagtctctt

SEQ ID NO: 1052486 - DNA, 33 bp, Homo sapien
gtgtgtgaacttcaccgactcattcagtctctt

SEQ ID NO: 1052487 - DNA, 33 bp, Homo sapien
tatgatttaaaatccaagtatgatcttcttctg

SEQ ID NO: 1052488 - DNA, 33 bp, Homo sapien
tatgatttaaaatccatgtatgatcttcttctg

SEQ ID NO: 1052489 - DNA, 33 bp, Homo sapien
tagtctatcagagagaagaacccaagtaacaca

SEQ ID NO: 1052490 - DNA, 33 bp, Homo sapien
tagtctatcagagagatgaacccaagtaacaca

SEQ ID NO: 1052491 - DNA, 33 bp, Homo sapien
aggcagaatttctggggaatttttctaccttgt

SEQ ID NO: 1052492 - DNA, 33 bp, Homo sapien
aggcagaatttctgggtaatttttctaccttgt

SEQ ID NO: 1052493 - DNA, 33 bp, Homo sapien
ataatttcctagaagaataaaaattgccagaat

SEQ ID NO: 1052494 - DNA, 33 bp, Homo sapien
ataatttcctagaagagtaaaaattgccagaat

SEQ ID NO: 1052495 - DNA, 33 bp, Homo sapien
tgattaaaagctgtcacggtattgagcactttg

SEQ ID NO: 1052496 - DNA, 33 bp, Homo sapien
tgattaaaagctgtcatggtattgagcactttg

SEQ ID NO: 1052497 - DNA, 33 bp, Homo sapien
tggggattcattaccacagctcaaaaatgtggt

SEQ ID NO: 1052498 - DNA, 33 bp, Homo sapien
tggggattcattaccatagctcaaaaatgtggt

SEQ ID NO: 1052499 - DNA, 33 bp, Homo sapien
aggagaaggatgggtccaatattcagtaagggt

SEQ ID NO: 1052500 - DNA, 33 bp, Homo sapien
aggagaaggatgggtcgaatattcagtaagggt

SEQ ID NO: 1052501 - DNA, 33 bp, Homo sapien
tgtgtattacctgctaaatggatatacttatga

SEQ ID NO: 1052502 - DNA, 33 bp, Homo sapien
tgtgtattacctgctacatggatatacttatga

SEQ ID NO: 1052503 - DNA, 33 bp, Homo sapien
agtcatagcatattcaaatgtgacaaggcatta

SEQ ID NO: 1052504 - DNA, 33 bp, Homo sapien
agtcatagcatattcacatgtgacaaggcatta

SEQ ID NO: 1052505 - DNA, 33 bp, Homo sapien
tctgctagcatgcaaacgcatcaacgttatgcc

SEQ ID NO: 1052506 - DNA, 33 bp, Homo sapien
tctgctagcatgcaaaggcatcaacgttatgcc

SEQ ID NO: 1052507 - DNA, 33 bp, Homo sapien
gggctcatcaaggtccacttacttctccagaga

SEQ ID NO: 1052508 - DNA, 33 bp, Homo sapien
gggctcatcaaggtccgcttacttctccagaga

SEQ ID NO: 1052509 - DNA, 33 bp, Homo sapien
ctgggcatgtgacttcaccttgttgaaccttcc

SEQ ID NO: 1052510 - DNA, 33 bp, Homo sapien
ctgggcatgtgacttcgccttgttgaaccttcc

SEQ ID NO: 1052511 - DNA, 33 bp, Homo sapien
agatagaaatagatgccatgaaaacaatgaaac

SEQ ID NO: 1052512 - DNA, 33 bp, Homo sapien
agatagaaatagatgctatgaaaacaatgaaac

SEQ ID NO: 1052513 - DNA, 33 bp, Homo sapien
tagtttcttaacgtgaacagattaccttactct

SEQ ID NO: 1052514 - DNA, 33 bp, Homo sapien
tagtttcttaacgtgagcagattaccttactct

SEQ ID NO: 1052515 - DNA, 33 bp, Homo sapien
ttcccacttacgctacacaggcataccacccaa

SEQ ID NO: 1052516 - DNA, 33 bp, Homo sapien
ttcccacttacgctacgcaggcataccacccaa

SEQ ID NO: 1052517 - DNA, 33 bp, Homo sapien
actaaagtcaaaatgaactcattcaataaagag

SEQ ID NO: 1052518 - DNA, 33 bp, Homo sapien
actaaagtcaaaatgagctcattcaataaagag

SEQ ID NO: 1052519 - DNA, 33 bp, Homo sapien
cattgatgtttgcctcaagtcacctagtgagta

SEQ ID NO: 1052520 - DNA, 33 bp, Homo sapien
cattgatgtttgcctccagtcacctagtgagta

SEQ ID NO: 1052521 - DNA, 33 bp, Homo sapien
gttgttacagttggccagacacttcgatatcat

SEQ ID NO: 1052522 - DNA, 33 bp, Homo sapien
gttgttacagttggcccgacacttcgatatcat

SEQ ID NO: 1052523 - DNA, 33 bp, Homo sapien
gtgaaatgaacacacaagaaccatagctcaggt

SEQ ID NO: 1052524 - DNA, 33 bp, Homo sapien
gtgaaatgaacacacatgaaccatagctcaggt

SEQ ID NO: 1052525 - DNA, 33 bp, Homo sapien
gatacaaactccaaagccttaacacaggaaaat

SEQ ID NO: 1052526 - DNA, 33 bp, Homo sapien
gatacaaactccaaagtcttaacacaggaaaat

SEQ ID NO: 1052527 - DNA, 33 bp, Homo sapien
ggtgaagtggacggcccatcccctgctctgtca

SEQ ID NO: 1052528 - DNA, 33 bp, Homo sapien
ggtgaagtggacggcctatcccctgctctgtca

SEQ ID NO: 1052529 - DNA, 33 bp, Homo sapien
ttgaagggtgtcagaccggcattttggcctaaa

SEQ ID NO: 1052530 - DNA, 33 bp, Homo sapien
ttgaagggtgtcagactggcattttggcctaaa

SEQ ID NO: 1052531 - DNA, 33 bp, Homo sapien
ccaagctttggttcacccttcaggttgattgaa

SEQ ID NO: 1052532 - DNA, 33 bp, Homo sapien
ccaagctttggttcactcttcaggttgattgaa

SEQ ID NO: 1052533 - DNA, 33 bp, Homo sapien
gcctctcagctagccccacttgtaactatcagt

SEQ ID NO: 1052534 - DNA, 33 bp, Homo sapien
gcctctcagctagcccgacttgtaactatcagt

SEQ ID NO: 1052535 - DNA, 33 bp, Homo sapien
tttcttctttcatccaacaaaatgctattgaga

SEQ ID NO: 1052536 - DNA, 33 bp, Homo sapien
tttcttctttcatccagcaaaatgctattgaga

SEQ ID NO: 1052537 - DNA, 33 bp, Homo sapien
tacataacaatcactacacagagcttctccatc

SEQ ID NO: 1052538 - DNA, 33 bp, Homo sapien
tacataacaatcactatacagagcttctccatc

SEQ ID NO: 1052539 - DNA, 33 bp, Homo sapien
tgcctttaaacagagacgtgtagtgtttccgag

SEQ ID NO: 1052540 - DNA, 33 bp, Homo sapien
tgcctttaaacagagatgtgtagtgtttccgag

SEQ ID NO: 1052541 - DNA, 33 bp, Homo sapien
tttgagctacatttaactcttcaatttgaattc

SEQ ID NO: 1052542 - DNA, 33 bp, Homo sapien
tttgagctacatttaattcttcaatttgaattc

SEQ ID NO: 1052543 - DNA, 33 bp, Homo sapien
attggagccactgcccaagttcaaggacatata

SEQ ID NO: 1052544 - DNA, 33 bp, Homo sapien
attggagccactgcccgagttcaaggacatata

SEQ ID NO: 1052545 - DNA, 33 bp, Homo sapien
gatagggaagcttcgacggaacagagaaagact

SEQ ID NO: 1052546 - DNA, 33 bp, Homo sapien
gatagggaagcttcgatggaacagagaaagact

SEQ ID NO: 1052547 - DNA, 33 bp, Homo sapien
agcatttctttctgataaagggctaattcacaa

SEQ ID NO: 1052548 - DNA, 33 bp, Homo sapien
agcatttctttctgatcaagggctaattcacaa

SEQ ID NO: 1052549 - DNA, 33 bp, Homo sapien
cagtttctactgtaataattaactggaaagaaa

SEQ ID NO: 1052550 - DNA, 33 bp, Homo sapien
cagtttctactgtaatcattaactggaaagaaa

SEQ ID NO: 1052551 - DNA, 33 bp, Homo sapien
gagaaagcagaaggagaagatcatcagagagtt

SEQ ID NO: 1052552 - DNA, 33 bp, Homo sapien
gagaaagcagaaggaggagatcatcagagagtt

SEQ ID NO: 1052553 - DNA, 33 bp, Homo sapien
agattacaaattattcaacgttgaagtagatga

SEQ ID NO: 1052554 - DNA, 33 bp, Homo sapien
agattacaaattattctacgttgaagtagatga

SEQ ID NO: 1052555 - DNA, 33 bp, Homo sapien
ttttgcagtatctcaccgagcaacacaaaaagg

SEQ ID NO: 1052556 - DNA, 33 bp, Homo sapien
ttttgcagtatctcactgagcaacacaaaaagg

SEQ ID NO: 1052557 - DNA, 33 bp, Homo sapien
cactgctccatttcacactctaagagtacactc

SEQ ID NO: 1052558 - DNA, 33 bp, Homo sapien
cactgctccatttcacgctctaagagtacactc

SEQ ID NO: 1052559 - DNA, 33 bp, Homo sapien
gtagaaagtttattcaaaaagattggctgggtg

SEQ ID NO: 1052560 - DNA, 33 bp, Homo sapien
gtagaaagtttattcagaaagattggctgggtg

SEQ ID NO: 1052561 - DNA, 33 bp, Homo sapien
agtgtcacttgtaatacagcatctgaaattcac

SEQ ID NO: 1052562 - DNA, 33 bp, Homo sapien
agtgtcacttgtaatatagcatctgaaattcac

SEQ ID NO: 1052563 - DNA, 33 bp, Homo sapien
atcttcctctttttggaaaatccacttcctctg

SEQ ID NO: 1052564 - DNA, 33 bp, Homo sapien
atcttcctctttttggcaaatccacttcctctg

SEQ ID NO: 1052565 - DNA, 33 bp, Homo sapien
ggtactacatctgttcaaataatacctccatca

SEQ ID NO: 1052566 - DNA, 33 bp, Homo sapien
ggtactacatctgttcgaataatacctccatca

SEQ ID NO: 1052567 - DNA, 33 bp, Homo sapien
caggatcatgctttacagagtggtcctttaggt

SEQ ID NO: 1052568 - DNA, 33 bp, Homo sapien
caggatcatgctttacggagtggtcctttaggt

SEQ ID NO: 1052569 - DNA, 33 bp, Homo sapien
gttgaaagagttatcaataggaagaaatgtctg

SEQ ID NO: 1052570 - DNA, 33 bp, Homo sapien
gttgaaagagttatcagtaggaagaaatgtctg

SEQ ID NO: 1052571 - DNA, 33 bp, Homo sapien
aaagaagaagaaaaaaagtctaagagctgttga

SEQ ID NO: 1052572 - DNA, 33 bp, Homo sapien
aaagaagaagaaaaaacgtctaagagctgttga

SEQ ID NO: 1052573 - DNA, 33 bp, Homo sapien
acgcacaaacgaagcaatgaaagaatgaagcaa

SEQ ID NO: 1052574 - DNA, 33 bp, Homo sapien
acgcacaaacgaagcagtgaaagaatgaagcaa

SEQ ID NO: 1052575 - DNA, 33 bp, Homo sapien
aatgatgagattaaaaaatgtttgctattacaa

SEQ ID NO: 1052576 - DNA, 33 bp, Homo sapien
aatgatgagattaaaacatgtttgctattacaa

SEQ ID NO: 1052577 - DNA, 33 bp, Homo sapien
tactgcctttatacaaacagatgcctgagtcca

SEQ ID NO: 1052578 - DNA, 33 bp, Homo sapien
tactgcctttatacaagcagatgcctgagtcca

SEQ ID NO: 1052579 - DNA, 33 bp, Homo sapien
tgtaaatggataagtaaaactacccctattcac

SEQ ID NO: 1052580 - DNA, 33 bp, Homo sapien
tgtaaatggataagtagaactacccctattcac

SEQ ID NO: 1052581 - DNA, 33 bp, Homo sapien
gtgttcaatgaaaggcaaactgctcattatccc

SEQ ID NO: 1052582 - DNA, 33 bp, Homo sapien
gtgttcaatgaaaggcgaactgctcattatccc

SEQ ID NO: 1052583 - DNA, 33 bp, Homo sapien
cactaagcactagaccacttcctcatttgccta

SEQ ID NO: 1052584 - DNA, 33 bp, Homo sapien
cactaagcactagaccccttcctcatttgccta

SEQ ID NO: 1052585 - DNA, 33 bp, Homo sapien
gataatcactgccataatatcaaatgaatattt

SEQ ID NO: 1052586 - DNA, 33 bp, Homo sapien
gataatcactgccatagtatcaaatgaatattt

SEQ ID NO: 1052587 - DNA, 33 bp, Homo sapien
agggagttctgctccacgtgatcagcctgagac

SEQ ID NO: 1052588 - DNA, 33 bp, Homo sapien
agggagttctgctccatgtgatcagcctgagac

SEQ ID NO: 1052589 - DNA, 33 bp, Homo sapien
ctgcggtttttgccatcacaatatgttgtcgcc

SEQ ID NO: 1052590 - DNA, 33 bp, Homo sapien
ctgcggtttttgccattacaatatgttgtcgcc

SEQ ID NO: 1052591 - DNA, 33 bp, Homo sapien
ggtgacccagtttcaccctatacatatatatta

SEQ ID NO: 1052592 - DNA, 33 bp, Homo sapien
ggtgacccagtttcactctatacatatatatta

SEQ ID NO: 1052593 - DNA, 33 bp, Homo sapien
tgtgatttttcagtacccagaattcacccttga

SEQ ID NO: 1052594 - DNA, 33 bp, Homo sapien
tgtgatttttcagtactcagaattcacccttga

SEQ ID NO: 1052595 - DNA, 33 bp, Homo sapien
ctcaattgcagaaaggaatcgagctaaagagca

SEQ ID NO: 1052596 - DNA, 33 bp, Homo sapien
ctcaattgcagaaaggtatcgagctaaagagca

SEQ ID NO: 1052597 - DNA, 33 bp, Homo sapien
attttagaatcgtgaaactttagaaggcagaaa

SEQ ID NO: 1052598 - DNA, 33 bp, Homo sapien
attttagaatcgtgaacctttagaaggcagaaa

SEQ ID NO: 1052599 - DNA, 33 bp, Homo sapien
aagaagaccaagcaatcagagaataggatgata

SEQ ID NO: 1052600 - DNA, 33 bp, Homo sapien
aagaagaccaagcaatgagagaataggatgata

SEQ ID NO: 1052601 - DNA, 33 bp, Homo sapien
taggcagttaaaaaaactaatgtgtgaaatgtt

SEQ ID NO: 1052602 - DNA, 33 bp, Homo sapien
taggcagttaaaaaaattaatgtgtgaaatgtt

SEQ ID NO: 1052603 - DNA, 33 bp, Homo sapien
ggatgattcttacaaacgtaatgatgatcaaaa

SEQ ID NO: 1052604 - DNA, 33 bp, Homo sapien
ggatgattcttacaaatgtaatgatgatcaaaa

SEQ ID NO: 1052605 - DNA, 33 bp, Homo sapien
ctcagttgttcttccaatgctgtgcctcctctt

SEQ ID NO: 1052606 - DNA, 33 bp, Homo sapien
ctcagttgttcttccagtgctgtgcctcctctt

SEQ ID NO: 1052607 - DNA, 33 bp, Homo sapien
tggagctacgtcccaaattaaataaatcccatc

SEQ ID NO: 1052608 - DNA, 33 bp, Homo sapien
tggagctacgtcccaagttaaataaatcccatc

SEQ ID NO: 1052609 - DNA, 33 bp, Homo sapien
tttctttatttcgtataaaagtgcgataaggga

SEQ ID NO: 1052610 - DNA, 33 bp, Homo sapien
tttctttatttcgtatgaaagtgcgataaggga

SEQ ID NO: 1052611 - DNA, 33 bp, Homo sapien
ggagagttaatagctccgaaaggtatatctaaa

SEQ ID NO: 1052612 - DNA, 33 bp, Homo sapien
ggagagttaatagctctgaaaggtatatctaaa

SEQ ID NO: 1052613 - DNA, 33 bp, Homo sapien
atggtccctgacttaacgattttcaacttcaca

SEQ ID NO: 1052614 - DNA, 33 bp, Homo sapien
atggtccctgacttaatgattttcaacttcaca

SEQ ID NO: 1052615 - DNA, 33 bp, Homo sapien
taactggctattcatacgcagaagaatgaaact

SEQ ID NO: 1052616 - DNA, 33 bp, Homo sapien
taactggctattcatatgcagaagaatgaaact

SEQ ID NO: 1052617 - DNA, 33 bp, Homo sapien
tcttattgactcccaccgtatcttctccctctg

SEQ ID NO: 1052618 - DNA, 33 bp, Homo sapien
tcttattgactcccacggtatcttctccctctg

SEQ ID NO: 1052619 - DNA, 33 bp, Homo sapien
gtttgtttagttggaactggtcctaaaccatca

SEQ ID NO: 1052620 - DNA, 33 bp, Homo sapien
gtttgtttagttggaagtggtcctaaaccatca

SEQ ID NO: 1052621 - DNA, 33 bp, Homo sapien
attatatggaatgagaacagtatttagtctaaa

SEQ ID NO: 1052622 - DNA, 33 bp, Homo sapien
attatatggaatgagagcagtatttagtctaaa

SEQ ID NO: 1052623 - DNA, 33 bp, Homo sapien
atcaataggatccctcacgcacacttctggtta

SEQ ID NO: 1052624 - DNA, 33 bp, Homo sapien
atcaataggatccctcgcgcacacttctggtta

SEQ ID NO: 1052625 - DNA, 33 bp, Homo sapien
ggtattgattgttggtaaagaaaaacaggatgt

SEQ ID NO: 1052626 - DNA, 33 bp, Homo sapien
ggtattgattgttggttaagaaaaacaggatgt

SEQ ID NO: 1052627 - DNA, 33 bp, Homo sapien
acctttagtggacaaaggagactaatggtattt

SEQ ID NO: 1052628 - DNA, 33 bp, Homo sapien
acctttagtggacaaatgagactaatggtattt

SEQ ID NO: 1052629 - DNA, 33 bp, Homo sapien
tgttgagaccttaaacccaatgctgcctgtgtc

SEQ ID NO: 1052630 - DNA, 33 bp, Homo sapien
tgttgagaccttaaactcaatgctgcctgtgtc

SEQ ID NO: 1052631 - DNA, 33 bp, Homo sapien
tgtattcaattcacaaatataacctggaggtct

SEQ ID NO: 1052632 - DNA, 33 bp, Homo sapien
tgtattcaattcacaagtataacctggaggtct

SEQ ID NO: 1052633 - DNA, 33 bp, Homo sapien
atactgaatgtactcacggaacttactggagag

SEQ ID NO: 1052634 - DNA, 33 bp, Homo sapien
atactgaatgtactcatggaacttactggagag

SEQ ID NO: 1052635 - DNA, 33 bp, Homo sapien
atcaaaatttagtataagacaaaggtgacatct

SEQ ID NO: 1052636 - DNA, 33 bp, Homo sapien
atcaaaatttagtatatgacaaaggtgacatct

SEQ ID NO: 1052637 - DNA, 33 bp, Homo sapien
atcaagcttgttcaaccgcggcccatgggccac

SEQ ID NO: 1052638 - DNA, 33 bp, Homo sapien
atcaagcttgttcaactgcggcccatgggccac

SEQ ID NO: 1052639 - DNA, 33 bp, Homo sapien
taaaaacaaaagcaaactttatatctggctgaa

SEQ ID NO: 1052640 - DNA, 33 bp, Homo sapien
taaaaacaaaagcaaattttatatctggctgaa

SEQ ID NO: 1052641 - DNA, 33 bp, Homo sapien
cacgcatcactggaaacggagctgcagctaaaa

SEQ ID NO: 1052642 - DNA, 33 bp, Homo sapien
cacgcatcactggaaatggagctgcagctaaaa

SEQ ID NO: 1052643 - DNA, 33 bp, Homo sapien
caccaggagggatgtgcactttaggaagaatga

SEQ ID NO: 1052644 - DNA, 33 bp, Homo sapien
caccaggagggatgtgtactttaggaagaatga

SEQ ID NO: 1052645 - DNA, 33 bp, Homo sapien
cttcccagtgcctctgaaactagacacatggct

SEQ ID NO: 1052646 - DNA, 33 bp, Homo sapien
cttcccagtgcctctgcaactagacacatggct

SEQ ID NO: 1052647 - DNA, 33 bp, Homo sapien
cacttcggaagtgaacagaaatcatggctagca

SEQ ID NO: 1052648 - DNA, 33 bp, Homo sapien
cacttcggaagtgaacggaaatcatggctagca

SEQ ID NO: 1052649 - DNA, 33 bp, Homo sapien
aaacatattaactcgccagatggcaacgagcct

SEQ ID NO: 1052650 - DNA, 33 bp, Homo sapien
aaacatattaactcgctagatggcaacgagcct

SEQ ID NO: 1052651 - DNA, 33 bp, Homo sapien
atagaaattctgaagccgctactttcacgcttc

SEQ ID NO: 1052652 - DNA, 33 bp, Homo sapien
atagaaattctgaagctgctactttcacgcttc

SEQ ID NO: 1052653 - DNA, 33 bp, Homo sapien
cttttgtcatgttttgaaatggaccaaggaagt

SEQ ID NO: 1052654 - DNA, 33 bp, Homo sapien
cttttgtcatgttttgtaatggaccaaggaagt

SEQ ID NO: 1052655 - DNA, 33 bp, Homo sapien
aaaagcaattgggttaccaagaagaaacaggtc

SEQ ID NO: 1052656 - DNA, 33 bp, Homo sapien
aaaagcaattgggttagcaagaagaaacaggtc

SEQ ID NO: 1052657 - DNA, 33 bp, Homo sapien
aagtaaggcatgttggaatattctaaaagatac

SEQ ID NO: 1052658 - DNA, 33 bp, Homo sapien
aagtaaggcatgttgggatattctaaaagatac

SEQ ID NO: 1052659 - DNA, 33 bp, Homo sapien
gtcaattcttcctcccaaatactgctcagtatg

SEQ ID NO: 1052660 - DNA, 33 bp, Homo sapien
gtcaattcttcctcccgaatactgctcagtatg

SEQ ID NO: 1052661 - DNA, 33 bp, Homo sapien
gcccggaagcagttaacgatggcactaacactc

SEQ ID NO: 1052662 - DNA, 33 bp, Homo sapien
gcccggaagcagttaatgatggcactaacactc

SEQ ID NO: 1052663 - DNA, 33 bp, Homo sapien
ctcaaaagttatcataggtaaaaatctgcattt

SEQ ID NO: 1052664 - DNA, 33 bp, Homo sapien
ctcaaaagttatcatatgtaaaaatctgcattt

SEQ ID NO: 1052665 - DNA, 33 bp, Homo sapien
agcctgtctggtaccacatataggaaatttaag

SEQ ID NO: 1052666 - DNA, 33 bp, Homo sapien
agcctgtctggtaccatatataggaaatttaag

SEQ ID NO: 1052667 - DNA, 33 bp, Homo sapien
aagcaacaatgcaaaacttaatacaggagtgct

SEQ ID NO: 1052668 - DNA, 33 bp, Homo sapien
aagcaacaatgcaaaagttaatacaggagtgct

SEQ ID NO: 1052669 - DNA, 33 bp, Homo sapien
aagatgactgccacaaacacaaatttccaagtg

SEQ ID NO: 1052670 - DNA, 33 bp, Homo sapien
aagatgactgccacaagcacaaatttccaagtg

SEQ ID NO: 1052671 - DNA, 33 bp, Homo sapien
ctggcttgtccctgagaagatgatgatgatgat

SEQ ID NO: 1052672 - DNA, 33 bp, Homo sapien
ctggcttgtccctgagcagatgatgatgatgat

SEQ ID NO: 1052673 - DNA, 33 bp, Homo sapien
caagataccaggtcaaacataaaaaaagaccaa

SEQ ID NO: 1052674 - DNA, 33 bp, Homo sapien
caagataccaggtcaagcataaaaaaagaccaa

SEQ ID NO: 1052675 - DNA, 33 bp, Homo sapien
gctccaaaatgatacacattatttctgtctaca

SEQ ID NO: 1052676 - DNA, 33 bp, Homo sapien
gctccaaaatgatacatattatttctgtctaca

SEQ ID NO: 1052677 - DNA, 33 bp, Homo sapien
ttatcctcttagtctaccttttaacctggctct

SEQ ID NO: 1052678 - DNA, 33 bp, Homo sapien
ttatcctcttagtctatcttttaacctggctct

SEQ ID NO: 1052679 - DNA, 33 bp, Homo sapien
aatagtgtaatctatgcaacagatggttagaac

SEQ ID NO: 1052680 - DNA, 33 bp, Homo sapien
aatagtgtaatctatgtaacagatggttagaac

SEQ ID NO: 1052681 - DNA, 33 bp, Homo sapien
tatccagggtgatacaactatttagtgtggtta

SEQ ID NO: 1052682 - DNA, 33 bp, Homo sapien
tatccagggtgatacagctatttagtgtggtta

SEQ ID NO: 1052683 - DNA, 33 bp, Homo sapien
cactttccagatccaaataatggcagatttgtg

SEQ ID NO: 1052684 - DNA, 33 bp, Homo sapien
cactttccagatccaattaatggcagatttgtg

SEQ ID NO: 1052685 - DNA, 33 bp, Homo sapien
atgaattagcaggaaaaatttctccttattctc

SEQ ID NO: 1052686 - DNA, 33 bp, Homo sapien
atgaattagcaggaaagatttctccttattctc

SEQ ID NO: 1052687 - DNA, 33 bp, Homo sapien
actgccactgttattaccctggaccaagctacc

SEQ ID NO: 1052688 - DNA, 33 bp, Homo sapien
actgccactgttattatcctggaccaagctacc

SEQ ID NO: 1052689 - DNA, 33 bp, Homo sapien
ctcgcctagactgttcacgtgtaatttcttcaa

SEQ ID NO: 1052690 - DNA, 33 bp, Homo sapien
ctcgcctagactgttcgcgtgtaatttcttcaa

SEQ ID NO: 1052691 - DNA, 33 bp, Homo sapien
aacagacttgctttcaacgtttgaaaaatgtgc

SEQ ID NO: 1052692 - DNA, 33 bp, Homo sapien
aacagacttgctttcagcgtttgaaaaatgtgc

SEQ ID NO: 1052693 - DNA, 33 bp, Homo sapien
atctgaatgttgaaatcagcgtgcatttgagaa

SEQ ID NO: 1052694 - DNA, 33 bp, Homo sapien
atctgaatgttgaaattagcgtgcatttgagaa

SEQ ID NO: 1052695 - DNA, 33 bp, Homo sapien
cacttggatcctgcagcagtgtctggtcttgga

SEQ ID NO: 1052696 - DNA, 33 bp, Homo sapien
cacttggatcctgcagtagtgtctggtcttgga

SEQ ID NO: 1052697 - DNA, 33 bp, Homo sapien
gattctcaggtacaaaaatcattcttttttcat

SEQ ID NO: 1052698 - DNA, 33 bp, Homo sapien
gattctcaggtacaaagatcattcttttttcat

SEQ ID NO: 1052699 - DNA, 33 bp, Homo sapien
gcggggaagagttagtaaagtataggcactgac

SEQ ID NO: 1052700 - DNA, 33 bp, Homo sapien
gcggggaagagttagtgaagtataggcactgac

SEQ ID NO: 1052701 - DNA, 33 bp, Homo sapien
agtcagactatacttcacaatcatctgtagaac

SEQ ID NO: 1052702 - DNA, 33 bp, Homo sapien
agtcagactatacttcgcaatcatctgtagaac

SEQ ID NO: 1052703 - DNA, 33 bp, Homo sapien
acacaatgatccctaacaacgcactggttatct

SEQ ID NO: 1052704 - DNA, 33 bp, Homo sapien
acacaatgatccctaagaacgcactggttatct

SEQ ID NO: 1052705 - DNA, 33 bp, Homo sapien
cacagtcatcaacaccaaggaccaggatcaaaa

SEQ ID NO: 1052706 - DNA, 33 bp, Homo sapien
cacagtcatcaacaccgaggaccaggatcaaaa

SEQ ID NO: 1052707 - DNA, 33 bp, Homo sapien
actccacatgcaaaagaactccctgcctgtctc

SEQ ID NO: 1052708 - DNA, 33 bp, Homo sapien
actccacatgcaaaaggactccctgcctgtctc

SEQ ID NO: 1052709 - DNA, 33 bp, Homo sapien
gaattatctcattggaccattgtcattgttaga

SEQ ID NO: 1052710 - DNA, 33 bp, Homo sapien
gaattatctcattggatcattgtcattgttaga

SEQ ID NO: 1052711 - DNA, 33 bp, Homo sapien
ttgtgtttctcaaattgaagtaccataccagtt

SEQ ID NO: 1052712 - DNA, 33 bp, Homo sapien
ttgtgtttctcaaatttaagtaccataccagtt

SEQ ID NO: 1052713 - DNA, 33 bp, Homo sapien
ctgatgaattaataaaatgtggcctatctgtac

SEQ ID NO: 1052714 - DNA, 33 bp, Homo sapien
ctgatgaattaataaagtgtggcctatctgtac

SEQ ID NO: 1052715 - DNA, 33 bp, Homo sapien
atgagttttcctgcatgaaggttgacctttagc

SEQ ID NO: 1052716 - DNA, 33 bp, Homo sapien
atgagttttcctgcattaaggttgacctttagc

SEQ ID NO: 1052717 - DNA, 33 bp, Homo sapien
ttgatgtgttcaatctcacagctagaatgtgta

SEQ ID NO: 1052718 - DNA, 33 bp, Homo sapien
ttgatgtgttcaatctgacagctagaatgtgta

SEQ ID NO: 1052719 - DNA, 33 bp, Homo sapien
acattaaattccactacgcgtttgcactgaata

SEQ ID NO: 1052720 - DNA, 33 bp, Homo sapien
acattaaattccactatgcgtttgcactgaata

SEQ ID NO: 1052721 - DNA, 33 bp, Homo sapien
tgtcctgtggctctgcaccttgatgctgctgcc

SEQ ID NO: 1052722 - DNA, 33 bp, Homo sapien
tgtcctgtggctctgcgccttgatgctgctgcc

SEQ ID NO: 1052723 - DNA, 33 bp, Homo sapien
aaggcttcaagaaaagccattcccatgttcttg

SEQ ID NO: 1052724 - DNA, 33 bp, Homo sapien
aaggcttcaagaaaagtcattcccatgttcttg

SEQ ID NO: 1052725 - DNA, 33 bp, Homo sapien
aaacaacatgagatacaataagaacaaatggtg

SEQ ID NO: 1052726 - DNA, 33 bp, Homo sapien
aaacaacatgagatacgataagaacaaatggtg

SEQ ID NO: 1052727 - DNA, 33 bp, Homo sapien
ttgtgacacaacttacaggaataaatcctttaa

SEQ ID NO: 1052728 - DNA, 33 bp, Homo sapien
ttgtgacacaacttacgggaataaatcctttaa

SEQ ID NO: 1052729 - DNA, 33 bp, Homo sapien
ctcctgggctgtcctgaagaatctaggaagctg

SEQ ID NO: 1052730 - DNA, 33 bp, Homo sapien
ctcctgggctgtcctgtagaatctaggaagctg

SEQ ID NO: 1052731 - DNA, 33 bp, Homo sapien
cccatctggagtggaaaaagtaaacgtctcttt

SEQ ID NO: 1052732 - DNA, 33 bp, Homo sapien
cccatctggagtggaagaagtaaacgtctcttt

SEQ ID NO: 1052733 - DNA, 33 bp, Homo sapien
gtacataaatgggacacaaggaagtagaattcc

SEQ ID NO: 1052734 - DNA, 33 bp, Homo sapien
gtacataaatgggacagaaggaagtagaattcc

SEQ ID NO: 1052735 - DNA, 33 bp, Homo sapien
attgactccagcaaaaagattactggtggtcca

SEQ ID NO: 1052736 - DNA, 33 bp, Homo sapien
attgactccagcaaaacgattactggtggtcca

SEQ ID NO: 1052737 - DNA, 33 bp, Homo sapien
cctcaggtcatggacaatatcccttcctccagg

SEQ ID NO: 1052738 - DNA, 33 bp, Homo sapien
cctcaggtcatggacagtatcccttcctccagg

SEQ ID NO: 1052739 - DNA, 33 bp, Homo sapien
cccttgacccccatcaataaacataccagaacc

SEQ ID NO: 1052740 - DNA, 33 bp, Homo sapien
cccttgacccccatcagtaaacataccagaacc

SEQ ID NO: 1052741 - DNA, 33 bp, Homo sapien
ttaagtttgcttaacccagttatcccccaaaag

SEQ ID NO: 1052742 - DNA, 33 bp, Homo sapien
ttaagtttgcttaaccgagttatcccccaaaag

SEQ ID NO: 1052743 - DNA, 33 bp, Homo sapien
cttgggctgatgcaataacagaaactctggcct

SEQ ID NO: 1052744 - DNA, 33 bp, Homo sapien
cttgggctgatgcaatcacagaaactctggcct

SEQ ID NO: 1052745 - DNA, 33 bp, Homo sapien
acaggaccagaagcaaacctattttgaaaacac

SEQ ID NO: 1052746 - DNA, 33 bp, Homo sapien
acaggaccagaagcaagcctattttgaaaacac

SEQ ID NO: 1052747 - DNA, 33 bp, Homo sapien
taccatatatccaaagacatcagaagaaagttg

SEQ ID NO: 1052748 - DNA, 33 bp, Homo sapien
taccatatatccaaaggcatcagaagaaagttg

SEQ ID NO: 1052749 - DNA, 33 bp, Homo sapien
gttcctgctttagtaaaacaaggagacttttag

SEQ ID NO: 1052750 - DNA, 33 bp, Homo sapien
gttcctgctttagtaagacaaggagacttttag

SEQ ID NO: 1052751 - DNA, 33 bp, Homo sapien
gttgatgtttggcatacaaatgtttacttaatc

SEQ ID NO: 1052752 - DNA, 33 bp, Homo sapien
gttgatgtttggcatataaatgtttacttaatc

SEQ ID NO: 1052753 - DNA, 33 bp, Homo sapien
atagtaggacgcaggaataaggatggcaaacat

SEQ ID NO: 1052754 - DNA, 33 bp, Homo sapien
atagtaggacgcaggagtaaggatggcaaacat

SEQ ID NO: 1052755 - DNA, 33 bp, Homo sapien
tgaagttacttccaccagactttgaaaaggaag

SEQ ID NO: 1052756 - DNA, 33 bp, Homo sapien
tgaagttacttccaccggactttgaaaaggaag

SEQ ID NO: 1052757 - DNA, 33 bp, Homo sapien
ttctacagtaattcaactattggactggaggag

SEQ ID NO: 1052758 - DNA, 33 bp, Homo sapien
ttctacagtaattcaagtattggactggaggag

SEQ ID NO: 1052759 - DNA, 33 bp, Homo sapien
gaaagctgctgtttagacataagctctattggc

SEQ ID NO: 1052760 - DNA, 33 bp, Homo sapien
gaaagctgctgtttaggcataagctctattggc

SEQ ID NO: 1052761 - DNA, 33 bp, Homo sapien
aatcagtgatttaagaggaacgcttctcaagct

SEQ ID NO: 1052762 - DNA, 33 bp, Homo sapien
aatcagtgatttaagatgaacgcttctcaagct

SEQ ID NO: 1052763 - DNA, 33 bp, Homo sapien
agcttcctttgtgtaggaattctatacctgctt

SEQ ID NO: 1052764 - DNA, 33 bp, Homo sapien
agcttcctttgtgtagtaattctatacctgctt

SEQ ID NO: 1052765 - DNA, 33 bp, Homo sapien
caggacagaaggtggaaagaaaaattcaagaga

SEQ ID NO: 1052766 - DNA, 33 bp, Homo sapien
caggacagaaggtggacagaaaaattcaagaga

SEQ ID NO: 1052767 - DNA, 33 bp, Homo sapien
ctctgtcttatatttacggctgcttctctatgt

SEQ ID NO: 1052768 - DNA, 33 bp, Homo sapien
ctctgtcttatatttatggctgcttctctatgt

SEQ ID NO: 1052769 - DNA, 33 bp, Homo sapien
ttgtgggaaaagacaccgaatgtaggacctaaa

SEQ ID NO: 1052770 - DNA, 33 bp, Homo sapien
ttgtgggaaaagacactgaatgtaggacctaaa

SEQ ID NO: 1052771 - DNA, 33 bp, Homo sapien
gtctgctttctgataaactgcgttgcctggatc

SEQ ID NO: 1052772 - DNA, 33 bp, Homo sapien
gtctgctttctgataagctgcgttgcctggatc

SEQ ID NO: 1052773 - DNA, 33 bp, Homo sapien
aatggggcaggtggtcagaatgtgccagatgca

SEQ ID NO: 1052774 - DNA, 33 bp, Homo sapien
aatggggcaggtggtcggaatgtgccagatgca

SEQ ID NO: 1052775 - DNA, 33 bp, Homo sapien
ctgtcagagcggtgacagagcagctgtgctatg

SEQ ID NO: 1052776 - DNA, 33 bp, Homo sapien
ctgtcagagcggtgaccgagcagctgtgctatg

SEQ ID NO: 1052777 - DNA, 33 bp, Homo sapien
ttgcatctggttctaccgagtgttttgtctctt

SEQ ID NO: 1052778 - DNA, 33 bp, Homo sapien
ttgcatctggttctactgagtgttttgtctctt

SEQ ID NO: 1052779 - DNA, 33 bp, Homo sapien
caggccaatatcaagacgtgaataggctagact

SEQ ID NO: 1052780 - DNA, 33 bp, Homo sapien
caggccaatatcaagatgtgaataggctagact

SEQ ID NO: 1052781 - DNA, 33 bp, Homo sapien
aggtccaaaagacgcaacggtggtactggtaac

SEQ ID NO: 1052782 - DNA, 33 bp, Homo sapien
aggtccaaaagacgcagcggtggtactggtaac

SEQ ID NO: 1052783 - DNA, 33 bp, Homo sapien
ctattttaatttcaaacgctagaaaaaagtcct

SEQ ID NO: 1052784 - DNA, 33 bp, Homo sapien
ctattttaatttcaaatgctagaaaaaagtcct

SEQ ID NO: 1052785 - DNA, 33 bp, Homo sapien
ctagagtctcagtaccaagagtttctactgggg

SEQ ID NO: 1052786 - DNA, 33 bp, Homo sapien
ctagagtctcagtaccgagagtttctactgggg

SEQ ID NO: 1052787 - DNA, 33 bp, Homo sapien
ttttggatatttttcaaagtaagttgcagatgt

SEQ ID NO: 1052788 - DNA, 33 bp, Homo sapien
ttttggatatttttcagagtaagttgcagatgt

SEQ ID NO: 1052789 - DNA, 33 bp, Homo sapien
aactttccaccagacaaatatgcccaaaatata

SEQ ID NO: 1052790 - DNA, 33 bp, Homo sapien
aactttccaccagacagatatgcccaaaatata

SEQ ID NO: 1052791 - DNA, 33 bp, Homo sapien
ctaagaaaaaatttgcaatgttcacaaacaaga

SEQ ID NO: 1052792 - DNA, 33 bp, Homo sapien
ctaagaaaaaatttgcgatgttcacaaacaaga

SEQ ID NO: 1052793 - DNA, 33 bp, Homo sapien
gtttgtgcatgtatacacttactctggatatag

SEQ ID NO: 1052794 - DNA, 33 bp, Homo sapien
gtttgtgcatgtatacccttactctggatatag

SEQ ID NO: 1052795 - DNA, 33 bp, Homo sapien
aactgagaaaatcagcacttgagtcattttata

SEQ ID NO: 1052796 - DNA, 33 bp, Homo sapien
aactgagaaaatcagcgcttgagtcattttata

SEQ ID NO: 1052797 - DNA, 33 bp, Homo sapien
ttacgatattgaagaaagagaaacagtcgctgc

SEQ ID NO: 1052798 - DNA, 33 bp, Homo sapien
ttacgatattgaagaaggagaaacagtcgctgc

SEQ ID NO: 1052799 - DNA, 33 bp, Homo sapien
attcacaaatttctaaaaatcttcagaaaagac

SEQ ID NO: 1052800 - DNA, 33 bp, Homo sapien
attcacaaatttctaagaatcttcagaaaagac

SEQ ID NO: 1052801 - DNA, 33 bp, Homo sapien
taaaaatagcaagctacacaatccttacattct

SEQ ID NO: 1052802 - DNA, 33 bp, Homo sapien
taaaaatagcaagctatacaatccttacattct

SEQ ID NO: 1052803 - DNA, 33 bp, Homo sapien
atatatggactctgcagtctcttctattgatat

SEQ ID NO: 1052804 - DNA, 33 bp, Homo sapien
atatatggactctgcattctcttctattgatat

SEQ ID NO: 1052805 - DNA, 33 bp, Homo sapien
tcgaggttagtcaacagctagttaattgtacag

SEQ ID NO: 1052806 - DNA, 33 bp, Homo sapien
tcgaggttagtcaacatctagttaattgtacag

SEQ ID NO: 1052807 - DNA, 33 bp, Homo sapien
aattgaggataataccaaagtctctctatattt

SEQ ID NO: 1052808 - DNA, 33 bp, Homo sapien
aattgaggataataccgaagtctctctatattt

SEQ ID NO: 1052809 - DNA, 33 bp, Homo sapien
taaaagctattttgcagccagtaaatcagtacg

SEQ ID NO: 1052810 - DNA, 33 bp, Homo sapien
taaaagctattttgcatccagtaaatcagtacg

SEQ ID NO: 1052811 - DNA, 33 bp, Homo sapien
acatgatagccagcatgaactaatcttttactc

SEQ ID NO: 1052812 - DNA, 33 bp, Homo sapien
acatgatagccagcattaactaatcttttactc

SEQ ID NO: 1052813 - DNA, 33 bp, Homo sapien
ctgtggtatatccataaaatagattattcagcc

SEQ ID NO: 1052814 - DNA, 33 bp, Homo sapien
ctgtggtatatccatacaatagattattcagcc

SEQ ID NO: 1052815 - DNA, 33 bp, Homo sapien
gatggaaggaagctcacgtctattgagtgcccc

SEQ ID NO: 1052816 - DNA, 33 bp, Homo sapien
gatggaaggaagctcatgtctattgagtgcccc

SEQ ID NO: 1052817 - DNA, 33 bp, Homo sapien
ctcaaaataacaaacccgctctcatgatagcaa

SEQ ID NO: 1052818 - DNA, 33 bp, Homo sapien
ctcaaaataacaaacctgctctcatgatagcaa

SEQ ID NO: 1052819 - DNA, 33 bp, Homo sapien
agctggaggccattatgagaagtgaagtaactc

SEQ ID NO: 1052820 - DNA, 33 bp, Homo sapien
agctggaggccattattagaagtgaagtaactc

SEQ ID NO: 1052821 - DNA, 33 bp, Homo sapien
aggctgcactttggtcacattaattccctgaca

SEQ ID NO: 1052822 - DNA, 33 bp, Homo sapien
aggctgcactttggtcgcattaattccctgaca

SEQ ID NO: 1052823 - DNA, 33 bp, Homo sapien
gcttgcttctgagaaaatccagtctaagagagc

SEQ ID NO: 1052824 - DNA, 33 bp, Homo sapien
gcttgcttctgagaaattccagtctaagagagc

SEQ ID NO: 1052825 - DNA, 33 bp, Homo sapien
aagggacttggattacacaagagaaacagggct

SEQ ID NO: 1052826 - DNA, 33 bp, Homo sapien
aagggacttggattacgcaagagaaacagggct

SEQ ID NO: 1052827 - DNA, 33 bp, Homo sapien
aggaatttactgctaccacaggcatgaatcacc

SEQ ID NO: 1052828 - DNA, 33 bp, Homo sapien
aggaatttactgctactacaggcatgaatcacc

SEQ ID NO: 1052829 - DNA, 33 bp, Homo sapien
gataactgagatttgccctacaggtaatataaa

SEQ ID NO: 1052830 - DNA, 33 bp, Homo sapien
gataactgagatttgctctacaggtaatataaa

SEQ ID NO: 1052831 - DNA, 33 bp, Homo sapien
tatgaaaggccaagaccgtcagctctgtttctc

SEQ ID NO: 1052832 - DNA, 33 bp, Homo sapien
tatgaaaggccaagactgtcagctctgtttctc

SEQ ID NO: 1052833 - DNA, 33 bp, Homo sapien
acgggtcaggaaatctcaccagaaaagaggatg

SEQ ID NO: 1052834 - DNA, 33 bp, Homo sapien
acgggtcaggaaatcttaccagaaaagaggatg

SEQ ID NO: 1052835 - DNA, 33 bp, Homo sapien
tttctaactcttgaagcctacccctatgcatcc

SEQ ID NO: 1052836 - DNA, 33 bp, Homo sapien
tttctaactcttgaaggctacccctatgcatcc

SEQ ID NO: 1052837 - DNA, 33 bp, Homo sapien
actaacagctcctatacccctaaacacttcaaa

SEQ ID NO: 1052838 - DNA, 33 bp, Homo sapien
actaacagctcctatatccctaaacacttcaaa

SEQ ID NO: 1052839 - DNA, 33 bp, Homo sapien
gctctatggcaaattgcaaagtatcttgcaagc

SEQ ID NO: 1052840 - DNA, 33 bp, Homo sapien
gctctatggcaaattgtaaagtatcttgcaagc

SEQ ID NO: 1052841 - DNA, 33 bp, Homo sapien
acattactctctcaagaaattttgtagcaaagg

SEQ ID NO: 1052842 - DNA, 33 bp, Homo sapien
acattactctctcaaggaattttgtagcaaagg

SEQ ID NO: 1052843 - DNA, 33 bp, Homo sapien
aaactgatagatggtgaaactgaatgaaaacag

SEQ ID NO: 1052844 - DNA, 33 bp, Homo sapien
aaactgatagatggtggaactgaatgaaaacag

SEQ ID NO: 1052845 - DNA, 33 bp, Homo sapien
taccctctataataacaaactgctctaagactc

SEQ ID NO: 1052846 - DNA, 33 bp, Homo sapien
taccctctataataacgaactgctctaagactc

SEQ ID NO: 1052847 - DNA, 33 bp, Homo sapien
gcatgatggtatataaatctcccatatatttga

SEQ ID NO: 1052848 - DNA, 33 bp, Homo sapien
gcatgatggtatataagtctcccatatatttga

SEQ ID NO: 1052849 - DNA, 33 bp, Homo sapien
tagagagcatggaattaaagaacatgataaagt

SEQ ID NO: 1052850 - DNA, 33 bp, Homo sapien
tagagagcatggaattgaagaacatgataaagt

SEQ ID NO: 1052851 - DNA, 33 bp, Homo sapien
cttgatgaatgtacccaaaattttaactaccaa

SEQ ID NO: 1052852 - DNA, 33 bp, Homo sapien
cttgatgaatgtaccccaaattttaactaccaa

SEQ ID NO: 1052853 - DNA, 33 bp, Homo sapien
aactgtaggaagtggaggtatttacaggacggg

SEQ ID NO: 1052854 - DNA, 33 bp, Homo sapien
aactgtaggaagtggatgtatttacaggacggg

SEQ ID NO: 1052855 - DNA, 33 bp, Homo sapien
gatgcccaagccccaactctggccattaacttt

SEQ ID NO: 1052856 - DNA, 33 bp, Homo sapien
gatgcccaagccccaattctggccattaacttt

SEQ ID NO: 1052857 - DNA, 33 bp, Homo sapien
tatccaacagctatcaccagccttttagcaatg

SEQ ID NO: 1052858 - DNA, 33 bp, Homo sapien
tatccaacagctatcatcagccttttagcaatg

SEQ ID NO: 1052859 - DNA, 33 bp, Homo sapien
ttagtttctggtgttaaacctttcagtcctcac

SEQ ID NO: 1052860 - DNA, 33 bp, Homo sapien
ttagtttctggtgttatacctttcagtcctcac

SEQ ID NO: 1052861 - DNA, 33 bp, Homo sapien
agcatgaactgaatgccctgcttgggtaactgt

SEQ ID NO: 1052862 - DNA, 33 bp, Homo sapien
agcatgaactgaatgctctgcttgggtaactgt

SEQ ID NO: 1052863 - DNA, 33 bp, Homo sapien
catgtttggcattctaagttaatgttactgaga

SEQ ID NO: 1052864 - DNA, 33 bp, Homo sapien
catgtttggcattctatgttaatgttactgaga

SEQ ID NO: 1052865 - DNA, 33 bp, Homo sapien
ttcctcactgttttaaaaaatttcagttaaata

SEQ ID NO: 1052866 - DNA, 33 bp, Homo sapien
ttcctcactgttttaagaaatttcagttaaata

SEQ ID NO: 1052867 - DNA, 33 bp, Homo sapien
agagtcacacaccaataactggaagttgggctg

SEQ ID NO: 1052868 - DNA, 33 bp, Homo sapien
agagtcacacaccaatgactggaagttgggctg

SEQ ID NO: 1052869 - DNA, 33 bp, Homo sapien
aatgaaccctcctataaccatcactctgcttta

SEQ ID NO: 1052870 - DNA, 33 bp, Homo sapien
aatgaaccctcctatacccatcactctgcttta

SEQ ID NO: 1052871 - DNA, 33 bp, Homo sapien
aaaacaaattcagaaacggagtatgaggaaaag

SEQ ID NO: 1052872 - DNA, 33 bp, Homo sapien
aaaacaaattcagaaatggagtatgaggaaaag

SEQ ID NO: 1052873 - DNA, 33 bp, Homo sapien
cttctgccttctgtaacgccttctagaatattc

SEQ ID NO: 1052874 - DNA, 33 bp, Homo sapien
cttctgccttctgtaatgccttctagaatattc

SEQ ID NO: 1052875 - DNA, 33 bp, Homo sapien
ggtttttgtaaggagacgtaaatgtctgtgttc

SEQ ID NO: 1052876 - DNA, 33 bp, Homo sapien
ggtttttgtaaggagaggtaaatgtctgtgttc

SEQ ID NO: 1052877 - DNA, 33 bp, Homo sapien
ctgggaggtaacctcaaagccaaaccatgctta

SEQ ID NO: 1052878 - DNA, 33 bp, Homo sapien
ctgggaggtaacctcagagccaaaccatgctta

SEQ ID NO: 1052879 - DNA, 33 bp, Homo sapien
agttctgccactcttaaaattatgtcttatgcc

SEQ ID NO: 1052880 - DNA, 33 bp, Homo sapien
agttctgccactcttacaattatgtcttatgcc

SEQ ID NO: 1052881 - DNA, 33 bp, Homo sapien
gtgttataaaaatgtgcatgagaggcccagtct

SEQ ID NO: 1052882 - DNA, 33 bp, Homo sapien
gtgttataaaaatgtgtatgagaggcccagtct

SEQ ID NO: 1052883 - DNA, 33 bp, Homo sapien
catctaattcagagaaaaatgaaaagagttagc

SEQ ID NO: 1052884 - DNA, 33 bp, Homo sapien
catctaattcagagaacaatgaaaagagttagc

SEQ ID NO: 1052885 - DNA, 33 bp, Homo sapien
ctttcctgattaaccccatcttcctctgatgcg

SEQ ID NO: 1052886 - DNA, 33 bp, Homo sapien
ctttcctgattaaccctatcttcctctgatgcg

SEQ ID NO: 1052887 - DNA, 33 bp, Homo sapien
tctcttctgtattctccagctttcttggttgct

SEQ ID NO: 1052888 - DNA, 33 bp, Homo sapien
tctcttctgtattctcgagctttcttggttgct

SEQ ID NO: 1052889 - DNA, 33 bp, Homo sapien
ttgttaattatttggaaattgtgtgatttggtc

SEQ ID NO: 1052890 - DNA, 33 bp, Homo sapien
ttgttaattatttggagattgtgtgatttggtc

SEQ ID NO: 1052891 - DNA, 33 bp, Homo sapien
gcctaaatctgaagaacgtttggcagaatacca

SEQ ID NO: 1052892 - DNA, 33 bp, Homo sapien
gcctaaatctgaagaatgtttggcagaatacca

SEQ ID NO: 1052893 - DNA, 33 bp, Homo sapien
ctgcctatcagtgtcacgggctaacaatcatta

SEQ ID NO: 1052894 - DNA, 33 bp, Homo sapien
ctgcctatcagtgtcaggggctaacaatcatta

SEQ ID NO: 1052895 - DNA, 33 bp, Homo sapien
cccctgaatctatcaaatctttattgacagcac

SEQ ID NO: 1052896 - DNA, 33 bp, Homo sapien
cccctgaatctatcaagtctttattgacagcac

SEQ ID NO: 1052897 - DNA, 33 bp, Homo sapien
catccttttgtaaagcactctgaaagaaaaaaa

SEQ ID NO: 1052898 - DNA, 33 bp, Homo sapien
catccttttgtaaagcgctctgaaagaaaaaaa

SEQ ID NO: 1052899 - DNA, 33 bp, Homo sapien
tctatcattagaaaaaacctgatagtgcaactt

SEQ ID NO: 1052900 - DNA, 33 bp, Homo sapien
tctatcattagaaaaagcctgatagtgcaactt

SEQ ID NO: 1052901 - DNA, 33 bp, Homo sapien
ctgcagtttaaaatcactaacctagacagtggg

SEQ ID NO: 1052902 - DNA, 33 bp, Homo sapien
ctgcagtttaaaatcattaacctagacagtggg

SEQ ID NO: 1052903 - DNA, 33 bp, Homo sapien
gctgcattccaacccagattcattgaagtaaaa

SEQ ID NO: 1052904 - DNA, 33 bp, Homo sapien
gctgcattccaacccatattcattgaagtaaaa

SEQ ID NO: 1052905 - DNA, 33 bp, Homo sapien
tacaacctctgaaatacctgtgtccccattttg

SEQ ID NO: 1052906 - DNA, 33 bp, Homo sapien
tacaacctctgaaatatctgtgtccccattttg

SEQ ID NO: 1052907 - DNA, 33 bp, Homo sapien
gcagaacaaagtcatccaaaagaaataggccaa

SEQ ID NO: 1052908 - DNA, 33 bp, Homo sapien
gcagaacaaagtcatctaaaagaaataggccaa

SEQ ID NO: 1052909 - DNA, 33 bp, Homo sapien
gtgaaaagtaaccaccaatgctgggatagcagc

SEQ ID NO: 1052910 - DNA, 33 bp, Homo sapien
gtgaaaagtaaccaccgatgctgggatagcagc

SEQ ID NO: 1052911 - DNA, 33 bp, Homo sapien
tatttatcatattatacgtaggagcaatcacag

SEQ ID NO: 1052912 - DNA, 33 bp, Homo sapien
tatttatcatattatatgtaggagcaatcacag

SEQ ID NO: 1052913 - DNA, 33 bp, Homo sapien
ttgtgtcatttagaacacttgaaggactacacc

SEQ ID NO: 1052914 - DNA, 33 bp, Homo sapien
ttgtgtcatttagaacgcttgaaggactacacc

SEQ ID NO: 1052915 - DNA, 33 bp, Homo sapien
gactcaacttccaacaacttccaaacacaatgt

SEQ ID NO: 1052916 - DNA, 33 bp, Homo sapien
gactcaacttccaacatcttccaaacacaatgt

SEQ ID NO: 1052917 - DNA, 33 bp, Homo sapien
ctcttggaagaaaaccaatgtctttttcatgat

SEQ ID NO: 1052918 - DNA, 33 bp, Homo sapien
ctcttggaagaaaaccgatgtctttttcatgat

SEQ ID NO: 1052919 - DNA, 33 bp, Homo sapien
atactcaaatttctcactaaccagtaaactcta

SEQ ID NO: 1052920 - DNA, 33 bp, Homo sapien
atactcaaatttctcattaaccagtaaactcta

SEQ ID NO: 1052921 - DNA, 33 bp, Homo sapien
acaggtgagctccagaactagagggtggctaag

SEQ ID NO: 1052922 - DNA, 33 bp, Homo sapien
acaggtgagctccagagctagagggtggctaag

SEQ ID NO: 1052923 - DNA, 33 bp, Homo sapien
ggtggaatctttggaaggttgttaggccatgaa

SEQ ID NO: 1052924 - DNA, 33 bp, Homo sapien
ggtggaatctttggaatgttgttaggccatgaa

SEQ ID NO: 1052925 - DNA, 33 bp, Homo sapien
tgacctatcaagacaacacgattgatttcactg

SEQ ID NO: 1052926 - DNA, 33 bp, Homo sapien
tgacctatcaagacaatacgattgatttcactg

SEQ ID NO: 1052927 - DNA, 33 bp, Homo sapien
tcagcagtgttttgtcgctaatttctttcagca

SEQ ID NO: 1052928 - DNA, 33 bp, Homo sapien
tcagcagtgttttgtctctaatttctttcagca

SEQ ID NO: 1052929 - DNA, 33 bp, Homo sapien
gcattccaatgactaacggagatgagggtaaaa

SEQ ID NO: 1052930 - DNA, 33 bp, Homo sapien
gcattccaatgactaatggagatgagggtaaaa

SEQ ID NO: 1052931 - DNA, 33 bp, Homo sapien
gctgggatgctatgaagactaagactgccaact

SEQ ID NO: 1052932 - DNA, 33 bp, Homo sapien
gctgggatgctatgaatactaagactgccaact

SEQ ID NO: 1052933 - DNA, 33 bp, Homo sapien
actgaagagcccttgaactttgagtgaacactg

SEQ ID NO: 1052934 - DNA, 33 bp, Homo sapien
actgaagagcccttgagctttgagtgaacactg

SEQ ID NO: 1052935 - DNA, 33 bp, Homo sapien
tatcacccaagcagtacacattgaacccaattt

SEQ ID NO: 1052936 - DNA, 33 bp, Homo sapien
tatcacccaagcagtatacattgaacccaattt

SEQ ID NO: 1052937 - DNA, 33 bp, Homo sapien
aaaaagaacttcatacaaaaactgtaagccaca

SEQ ID NO: 1052938 - DNA, 33 bp, Homo sapien
aaaaagaacttcatacgaaaactgtaagccaca

SEQ ID NO: 1052939 - DNA, 33 bp, Homo sapien
aatgagaacaagcaccgctaaaataaaaagctt

SEQ ID NO: 1052940 - DNA, 33 bp, Homo sapien
aatgagaacaagcacctctaaaataaaaagctt

SEQ ID NO: 1052941 - DNA, 33 bp, Homo sapien
ataattttgctgttagacatattgtgattccct

SEQ ID NO: 1052942 - DNA, 33 bp, Homo sapien
ataattttgctgttaggcatattgtgattccct

SEQ ID NO: 1052943 - DNA, 33 bp, Homo sapien
tggaatttctgggttacgagttatacatacttt

SEQ ID NO: 1052944 - DNA, 33 bp, Homo sapien
tggaatttctgggttatgagttatacatacttt

SEQ ID NO: 1052945 - DNA, 33 bp, Homo sapien
atgaacaagagacttaagtgttcactgcggtgt

SEQ ID NO: 1052946 - DNA, 33 bp, Homo sapien
atgaacaagagacttatgtgttcactgcggtgt

SEQ ID NO: 1052947 - DNA, 33 bp, Homo sapien
cttcctgtcaaacatagaatttgaaccgcagcc

SEQ ID NO: 1052948 - DNA, 33 bp, Homo sapien
cttcctgtcaaacatataatttgaaccgcagcc

SEQ ID NO: 1052949 - DNA, 33 bp, Homo sapien
ttttgtacatattaaagccactcagttaggcag

SEQ ID NO: 1052950 - DNA, 33 bp, Homo sapien
ttttgtacatattaaatccactcagttaggcag

SEQ ID NO: 1052951 - DNA, 33 bp, Homo sapien
tttattctgtaacttacgaaatggacactgtaa

SEQ ID NO: 1052952 - DNA, 33 bp, Homo sapien
tttattctgtaacttatgaaatggacactgtaa

SEQ ID NO: 1052953 - DNA, 33 bp, Homo sapien
aatataacagtaggtgcattaagatgaaatact

SEQ ID NO: 1052954 - DNA, 33 bp, Homo sapien
aatataacagtaggtggattaagatgaaatact

SEQ ID NO: 1052955 - DNA, 33 bp, Homo sapien
aattgcccacatttacacattcagaacaaagca

SEQ ID NO: 1052956 - DNA, 33 bp, Homo sapien
aattgcccacatttacgcattcagaacaaagca

SEQ ID NO: 1052957 - DNA, 33 bp, Homo sapien
gcaggaatagtttcccaagaagtctagaccccc

SEQ ID NO: 1052958 - DNA, 33 bp, Homo sapien
gcaggaatagtttcccgagaagtctagaccccc

SEQ ID NO: 1052959 - DNA, 33 bp, Homo sapien
agctgtcagtgaaaaccaagagctttccagaag

SEQ ID NO: 1052960 - DNA, 33 bp, Homo sapien
agctgtcagtgaaaacgaagagctttccagaag

SEQ ID NO: 1052961 - DNA, 33 bp, Homo sapien
aaatactgtctgaagagtagctctgcacatttc

SEQ ID NO: 1052962 - DNA, 33 bp, Homo sapien
aaatactgtctgaagattagctctgcacatttc

SEQ ID NO: 1052963 - DNA, 33 bp, Homo sapien
taccagtctaaaatcccagtgtcctattttcca

SEQ ID NO: 1052964 - DNA, 33 bp, Homo sapien
taccagtctaaaatcctagtgtcctattttcca

SEQ ID NO: 1052965 - DNA, 33 bp, Homo sapien
gtccacaacttgctaacggcatcaagttatttc

SEQ ID NO: 1052966 - DNA, 33 bp, Homo sapien
gtccacaacttgctaatggcatcaagttatttc

SEQ ID NO: 1052967 - DNA, 33 bp, Homo sapien
tatagagaactgcaacaaattcctcagtcagaa

SEQ ID NO: 1052968 - DNA, 33 bp, Homo sapien
tatagagaactgcaacgaattcctcagtcagaa

SEQ ID NO: 1052969 - DNA, 33 bp, Homo sapien
acacataaaaataaatcatctggttgtagaact

SEQ ID NO: 1052970 - DNA, 33 bp, Homo sapien
acacataaaaataaatgatctggttgtagaact

SEQ ID NO: 1052971 - DNA, 33 bp, Homo sapien
tggaatggcttacaagcagtgcttcttaaacaa

SEQ ID NO: 1052972 - DNA, 33 bp, Homo sapien
tggaatggcttacaagtagtgcttcttaaacaa

SEQ ID NO: 1052973 - DNA, 33 bp, Homo sapien
tcatgttggagtctcacgtggtttgggtgatcc

SEQ ID NO: 1052974 - DNA, 33 bp, Homo sapien
tcatgttggagtctcatgtggtttgggtgatcc

SEQ ID NO: 1052975 - DNA, 33 bp, Homo sapien
ttatatccacctccaccgtgattataatttggg

SEQ ID NO: 1052976 - DNA, 33 bp, Homo sapien
ttatatccacctccactgtgattataatttggg

SEQ ID NO: 1052977 - DNA, 33 bp, Homo sapien
ccttcccctgtgcttgaatggcttaaaggagac

SEQ ID NO: 1052978 - DNA, 33 bp, Homo sapien
ccttcccctgtgcttgcatggcttaaaggagac

SEQ ID NO: 1052979 - DNA, 33 bp, Homo sapien
ttagttcactttttcactcctctgttaaagaag

SEQ ID NO: 1052980 - DNA, 33 bp, Homo sapien
ttagttcactttttcattcctctgttaaagaag

SEQ ID NO: 1052981 - DNA, 33 bp, Homo sapien
tgcatatcctgattataaaagcattcaatgagt

SEQ ID NO: 1052982 - DNA, 33 bp, Homo sapien
tgcatatcctgattatgaaagcattcaatgagt

SEQ ID NO: 1052983 - DNA, 33 bp, Homo sapien
tttgtgctgcattccaccgggtcgaatgccatg

SEQ ID NO: 1052984 - DNA, 33 bp, Homo sapien
tttgtgctgcattccatcgggtcgaatgccatg

SEQ ID NO: 1052985 - DNA, 33 bp, Homo sapien
acagtggaatatacataacttgcaagtgcccac

SEQ ID NO: 1052986 - DNA, 33 bp, Homo sapien
acagtggaatatacattacttgcaagtgcccac

SEQ ID NO: 1052987 - DNA, 33 bp, Homo sapien
tggccttataacagaaaactttgcccagtacac

SEQ ID NO: 1052988 - DNA, 33 bp, Homo sapien
tggccttataacagaagactttgcccagtacac

SEQ ID NO: 1052989 - DNA, 33 bp, Homo sapien
tatagctattaatttgaaccattgctacaaatt

SEQ ID NO: 1052990 - DNA, 33 bp, Homo sapien
tatagctattaatttggaccattgctacaaatt

SEQ ID NO: 1052991 - DNA, 33 bp, Homo sapien
atgccataaatgtagactataatgatcccagaa

SEQ ID NO: 1052992 - DNA, 33 bp, Homo sapien
atgccataaatgtagagtataatgatcccagaa

SEQ ID NO: 1052993 - DNA, 33 bp, Homo sapien
cagtagttcgaactcggcatctagtcttgtagc

SEQ ID NO: 1052994 - DNA, 33 bp, Homo sapien
cagtagttcgaactcgtcatctagtcttgtagc

SEQ ID NO: 1052995 - DNA, 33 bp, Homo sapien
atgaggataaccacaccggaaaaggcaaaggat

SEQ ID NO: 1052996 - DNA, 33 bp, Homo sapien
atgaggataaccacactggaaaaggcaaaggat

SEQ ID NO: 1052997 - DNA, 33 bp, Homo sapien
attctgactcgatgaacagaaagattggctttt

SEQ ID NO: 1052998 - DNA, 33 bp, Homo sapien
attctgactcgatgaatagaaagattggctttt

SEQ ID NO: 1052999 - DNA, 33 bp, Homo sapien
caattgaaaaaaagccaacttgctgactgttaa

SEQ ID NO: 1053000 - DNA, 33 bp, Homo sapien
caattgaaaaaaagccgacttgctgactgttaa

SEQ ID NO: 1053001 - DNA, 33 bp, Homo sapien
agccctggaaaatccacgtttgtactcacgtat

SEQ ID NO: 1053002 - DNA, 33 bp, Homo sapien
agccctggaaaatccatgtttgtactcacgtat

SEQ ID NO: 1053003 - DNA, 33 bp, Homo sapien
tgaatattctgtccatcagttgggaagtggcaa

SEQ ID NO: 1053004 - DNA, 33 bp, Homo sapien
tgaatattctgtccattagttgggaagtggcaa

SEQ ID NO: 1053005 - DNA, 33 bp, Homo sapien
aacataactcaatgaaatatcttctcaggccag

SEQ ID NO: 1053006 - DNA, 33 bp, Homo sapien
aacataactcaatgaagtatcttctcaggccag

SEQ ID NO: 1053007 - DNA, 33 bp, Homo sapien
taaagccagtgagtgaaagtttgagtagtaaga

SEQ ID NO: 1053008 - DNA, 33 bp, Homo sapien
taaagccagtgagtgacagtttgagtagtaaga

SEQ ID NO: 1053009 - DNA, 33 bp, Homo sapien
aaaaaaaaaaagcacaacatttcagtaagcagt

SEQ ID NO: 1053010 - DNA, 33 bp, Homo sapien
aaaaaaaaaaagcacagcatttcagtaagcagt

SEQ ID NO: 1053011 - DNA, 33 bp, Homo sapien
ataactcctaatgttaccccaacaatgtaggtt

SEQ ID NO: 1053012 - DNA, 33 bp, Homo sapien
ataactcctaatgttatcccaacaatgtaggtt

SEQ ID NO: 1053013 - DNA, 33 bp, Homo sapien
gtttaattccactaaaatcacatcatggaactg

SEQ ID NO: 1053014 - DNA, 33 bp, Homo sapien
gtttaattccactaaactcacatcatggaactg

SEQ ID NO: 1053015 - DNA, 33 bp, Homo sapien
aactgtgatactgtcaaaagtagataaccactt

SEQ ID NO: 1053016 - DNA, 33 bp, Homo sapien
aactgtgatactgtcacaagtagataaccactt

SEQ ID NO: 1053017 - DNA, 33 bp, Homo sapien
cctgatttagccagaacgctttaccacgtggcc

SEQ ID NO: 1053018 - DNA, 33 bp, Homo sapien
cctgatttagccagaatgctttaccacgtggcc

SEQ ID NO: 1053019 - DNA, 33 bp, Homo sapien
cgacatgtgtatcaaggacggtctaatataaat

SEQ ID NO: 1053020 - DNA, 33 bp, Homo sapien
cgacatgtgtatcaagtacggtctaatataaat

SEQ ID NO: 1053021 - DNA, 33 bp, Homo sapien
atcgtaggataccttacgttgtttgcatgattc

SEQ ID NO: 1053022 - DNA, 33 bp, Homo sapien
atcgtaggataccttatgttgtttgcatgattc

SEQ ID NO: 1053023 - DNA, 33 bp, Homo sapien
attttgcagaggacaacgtcaaggctctggcct

SEQ ID NO: 1053024 - DNA, 33 bp, Homo sapien
attttgcagaggacaatgtcaaggctctggcct

SEQ ID NO: 1053025 - DNA, 33 bp, Homo sapien
ttactaactgaagccacgggtaacctgtcacat

SEQ ID NO: 1053026 - DNA, 33 bp, Homo sapien
ttactaactgaagccatgggtaacctgtcacat

SEQ ID NO: 1053027 - DNA, 33 bp, Homo sapien
actttttaaaagtgtaaatcagttgccatttaa

SEQ ID NO: 1053028 - DNA, 33 bp, Homo sapien
actttttaaaagtgtacatcagttgccatttaa

SEQ ID NO: 1053029 - DNA, 33 bp, Homo sapien
agtgccgaaactagaaatgggaagttaaggatt

SEQ ID NO: 1053030 - DNA, 33 bp, Homo sapien
agtgccgaaactagaactgggaagttaaggatt

SEQ ID NO: 1053031 - DNA, 33 bp, Homo sapien
agtgctgttcttcatacctggtcacttatgagc

SEQ ID NO: 1053032 - DNA, 33 bp, Homo sapien
agtgctgttcttcatatctggtcacttatgagc

SEQ ID NO: 1053033 - DNA, 33 bp, Homo sapien
gatgaaactacctgaacgttaatagaaacttag

SEQ ID NO: 1053034 - DNA, 33 bp, Homo sapien
gatgaaactacctgaatgttaatagaaacttag

SEQ ID NO: 1053035 - DNA, 33 bp, Homo sapien
cttgaaaaaagaatcagagtgtgaagcgaaata

SEQ ID NO: 1053036 - DNA, 33 bp, Homo sapien
cttgaaaaaagaatcatagtgtgaagcgaaata

SEQ ID NO: 1053037 - DNA, 33 bp, Homo sapien
tggattcacttttgcaccttactcaaactatta

SEQ ID NO: 1053038 - DNA, 33 bp, Homo sapien
tggattcacttttgcatcttactcaaactatta

SEQ ID NO: 1053039 - DNA, 33 bp, Homo sapien
ggactttgcgcttggcaaaattgttcagaggct

SEQ ID NO: 1053040 - DNA, 33 bp, Homo sapien
ggactttgcgcttggcgaaattgttcagaggct

SEQ ID NO: 1053041 - DNA, 33 bp, Homo sapien
tgtttatatgctcttacggtgaacttgatgttg

SEQ ID NO: 1053042 - DNA, 33 bp, Homo sapien
tgtttatatgctcttatggtgaacttgatgttg

SEQ ID NO: 1053043 - DNA, 33 bp, Homo sapien
aagtggtttattagccaaaagaacagcaaggtt

SEQ ID NO: 1053044 - DNA, 33 bp, Homo sapien
aagtggtttattagcccaaagaacagcaaggtt

SEQ ID NO: 1053045 - DNA, 33 bp, Homo sapien
aagaatgctggaacccagattcacgggaccctc

SEQ ID NO: 1053046 - DNA, 33 bp, Homo sapien
aagaatgctggaacccggattcacgggaccctc

SEQ ID NO: 1053047 - DNA, 33 bp, Homo sapien
ggaaagcagaaaccacgctaggtatttcaaaca

SEQ ID NO: 1053048 - DNA, 33 bp, Homo sapien
ggaaagcagaaaccactctaggtatttcaaaca

SEQ ID NO: 1053049 - DNA, 33 bp, Homo sapien
caaatcaaccaatccacgttcatatacccccca

SEQ ID NO: 1053050 - DNA, 33 bp, Homo sapien
caaatcaaccaatccatgttcatatacccccca

SEQ ID NO: 1053051 - DNA, 33 bp, Homo sapien
ccagactcctgcagtcaaggacactatacccct

SEQ ID NO: 1053052 - DNA, 33 bp, Homo sapien
ccagactcctgcagtcgaggacactatacccct

SEQ ID NO: 1053053 - DNA, 33 bp, Homo sapien
aatttgattgcagatacacaatgactacttttt

SEQ ID NO: 1053054 - DNA, 33 bp, Homo sapien
aatttgattgcagatatacaatgactacttttt

SEQ ID NO: 1053055 - DNA, 33 bp, Homo sapien
ggaaaagaacagtatacaacattcagtgcttgt

SEQ ID NO: 1053056 - DNA, 33 bp, Homo sapien
ggaaaagaacagtatataacattcagtgcttgt

SEQ ID NO: 1053057 - DNA, 33 bp, Homo sapien
gtttcaacagactgctcaagagatgtaggcaga

SEQ ID NO: 1053058 - DNA, 33 bp, Homo sapien
gtttcaacagactgcttaagagatgtaggcaga

SEQ ID NO: 1053059 - DNA, 33 bp, Homo sapien
gatttgaatggaaatacatgtggatatggcttt

SEQ ID NO: 1053060 - DNA, 33 bp, Homo sapien
gatttgaatggaaatatatgtggatatggcttt

SEQ ID NO: 1053061 - DNA, 33 bp, Homo sapien
agatcatctgcgccagcactgttttcttttgtt

SEQ ID NO: 1053062 - DNA, 33 bp, Homo sapien
agatcatctgcgccaggactgttttcttttgtt

SEQ ID NO: 1053063 - DNA, 33 bp, Homo sapien
tgcattcacatctccactccttaataggacaag

SEQ ID NO: 1053064 - DNA, 33 bp, Homo sapien
tgcattcacatctccattccttaataggacaag

SEQ ID NO: 1053065 - DNA, 33 bp, Homo sapien
acaaagacatgtcataaatttttgaaatagtca

SEQ ID NO: 1053066 - DNA, 33 bp, Homo sapien
acaaagacatgtcatacatttttgaaatagtca

SEQ ID NO: 1053067 - DNA, 33 bp, Homo sapien
caagacacagtgtccacataggatttggttaat

SEQ ID NO: 1053068 - DNA, 33 bp, Homo sapien
caagacacagtgtccatataggatttggttaat

SEQ ID NO: 1053069 - DNA, 33 bp, Homo sapien
gcagaacatcttgagaaaaacagttggcaaagc

SEQ ID NO: 1053070 - DNA, 33 bp, Homo sapien
gcagaacatcttgagagaaacagttggcaaagc

SEQ ID NO: 1053071 - DNA, 33 bp, Homo sapien
tataatattgaattgccgaagaaggttgtagga

SEQ ID NO: 1053072 - DNA, 33 bp, Homo sapien
tataatattgaattgctgaagaaggttgtagga

SEQ ID NO: 1053073 - DNA, 33 bp, Homo sapien
gtgaactgctctctcccactcactctttagaag

SEQ ID NO: 1053074 - DNA, 33 bp, Homo sapien
gtgaactgctctctcctactcactctttagaag

SEQ ID NO: 1053075 - DNA, 33 bp, Homo sapien
tggatgttacttgaccaaagattgcataaatga

SEQ ID NO: 1053076 - DNA, 33 bp, Homo sapien
tggatgttacttgaccgaagattgcataaatga

SEQ ID NO: 1053077 - DNA, 33 bp, Homo sapien
cagaataatatttacaagtcaatcagtctcaaa

SEQ ID NO: 1053078 - DNA, 33 bp, Homo sapien
cagaataatatttacaggtcaatcagtctcaaa

SEQ ID NO: 1053079 - DNA, 33 bp, Homo sapien
caagcatatgcatgaaacccaaactccaaaccc

SEQ ID NO: 1053080 - DNA, 33 bp, Homo sapien
caagcatatgcatgaagcccaaactccaaaccc

SEQ ID NO: 1053081 - DNA, 33 bp, Homo sapien
ttccattggtttggtcactaaatctctcctttg

SEQ ID NO: 1053082 - DNA, 33 bp, Homo sapien
ttccattggtttggtctctaaatctctcctttg

SEQ ID NO: 1053083 - DNA, 33 bp, Homo sapien
caaagaactgctgaaactgcttcaacaacatcc

SEQ ID NO: 1053084 - DNA, 33 bp, Homo sapien
caaagaactgctgaaattgcttcaacaacatcc

SEQ ID NO: 1053085 - DNA, 33 bp, Homo sapien
ttggatgtgacctgacaaacttaggtcccaggg

SEQ ID NO: 1053086 - DNA, 33 bp, Homo sapien
ttggatgtgacctgacgaacttaggtcccaggg

SEQ ID NO: 1053087 - DNA, 33 bp, Homo sapien
ggagaaagaggaaatacgtagagaaagaaaggc

SEQ ID NO: 1053088 - DNA, 33 bp, Homo sapien
ggagaaagaggaaatatgtagagaaagaaaggc

SEQ ID NO: 1053089 - DNA, 33 bp, Homo sapien
gagaagtgttaggtaacgtgatggagacgaaag

SEQ ID NO: 1053090 - DNA, 33 bp, Homo sapien
gagaagtgttaggtaatgtgatggagacgaaag

SEQ ID NO: 1053091 - DNA, 33 bp, Homo sapien
tttcctcaggtttccacattttaaacagaacaa

SEQ ID NO: 1053092 - DNA, 33 bp, Homo sapien
tttcctcaggtttccatattttaaacagaacaa

SEQ ID NO: 1053093 - DNA, 33 bp, Homo sapien
aattttgagataattacaggaaactgcacacag

SEQ ID NO: 1053094 - DNA, 33 bp, Homo sapien
aattttgagataattataggaaactgcacacag

SEQ ID NO: 1053095 - DNA, 33 bp, Homo sapien
atatagtaaatgcgaacggcaggacttgcaatt

SEQ ID NO: 1053096 - DNA, 33 bp, Homo sapien
atatagtaaatgcgaatggcaggacttgcaatt

SEQ ID NO: 1053097 - DNA, 33 bp, Homo sapien
agccatctagtaatcacaaggcaacacatatga

SEQ ID NO: 1053098 - DNA, 33 bp, Homo sapien
agccatctagtaatcagaaggcaacacatatga

SEQ ID NO: 1053099 - DNA, 33 bp, Homo sapien
ttaaacaccttgagtccatagggcttctaccct

SEQ ID NO: 1053100 - DNA, 33 bp, Homo sapien
ttaaacaccttgagtctatagggcttctaccct

SEQ ID NO: 1053101 - DNA, 33 bp, Homo sapien
aggtttcggttttgaaaagagaagaggtgctct

SEQ ID NO: 1053102 - DNA, 33 bp, Homo sapien
aggtttcggttttgaagagagaagaggtgctct

SEQ ID NO: 1053103 - DNA, 33 bp, Homo sapien
cctttcataatggcctcactgattttgtccatg

SEQ ID NO: 1053104 - DNA, 33 bp, Homo sapien
cctttcataatggccttactgattttgtccatg

SEQ ID NO: 1053105 - DNA, 33 bp, Homo sapien
ttaaatcttcttctgcacgcaatagagacttga

SEQ ID NO: 1053106 - DNA, 33 bp, Homo sapien
ttaaatcttcttctgcccgcaatagagacttga

SEQ ID NO: 1053107 - DNA, 33 bp, Homo sapien
gctgtatgaggagttaaactcagtagctgtcat

SEQ ID NO: 1053108 - DNA, 33 bp, Homo sapien
gctgtatgaggagttatactcagtagctgtcat

SEQ ID NO: 1053109 - DNA, 33 bp, Homo sapien
taaagccctagtggaaaagttagaaaagtacag

SEQ ID NO: 1053110 - DNA, 33 bp, Homo sapien
taaagccctagtggaagagttagaaaagtacag

SEQ ID NO: 1053111 - DNA, 33 bp, Homo sapien
ataaatttgccttttcaatacaggtgtcacagc

SEQ ID NO: 1053112 - DNA, 33 bp, Homo sapien
ataaatttgccttttcgatacaggtgtcacagc

SEQ ID NO: 1053113 - DNA, 33 bp, Homo sapien
aggctggatattgccaatagtgtaccagtgcaa

SEQ ID NO: 1053114 - DNA, 33 bp, Homo sapien
aggctggatattgccagtagtgtaccagtgcaa

SEQ ID NO: 1053115 - DNA, 33 bp, Homo sapien
aaccaggtactcatcactgaatcaatctctcta

SEQ ID NO: 1053116 - DNA, 33 bp, Homo sapien
aaccaggtactcatcattgaatcaatctctcta

SEQ ID NO: 1053117 - DNA, 33 bp, Homo sapien
acaaattacttcatcaataacttcagaaatcca

SEQ ID NO: 1053118 - DNA, 33 bp, Homo sapien
acaaattacttcatcagtaacttcagaaatcca

SEQ ID NO: 1053119 - DNA, 33 bp, Homo sapien
aaaacaatttaacttccaagactatagtgactt

SEQ ID NO: 1053120 - DNA, 33 bp, Homo sapien
aaaacaatttaacttctaagactatagtgactt

SEQ ID NO: 1053121 - DNA, 33 bp, Homo sapien
tagctatatatttatgaacacctagaacagggc

SEQ ID NO: 1053122 - DNA, 33 bp, Homo sapien
tagctatatatttatgcacacctagaacagggc

SEQ ID NO: 1053123 - DNA, 33 bp, Homo sapien
tttctacctagcaaaaagaaaagttcgaagaca

SEQ ID NO: 1053124 - DNA, 33 bp, Homo sapien
tttctacctagcaaaaggaaaagttcgaagaca

SEQ ID NO: 1053125 - DNA, 33 bp, Homo sapien
ccctaggtttggactcccaagactcaacagcta

SEQ ID NO: 1053126 - DNA, 33 bp, Homo sapien
ccctaggtttggactctcaagactcaacagcta

SEQ ID NO: 1053127 - DNA, 33 bp, Homo sapien
ttgggacttgagaaagaagcatattaggaagca

SEQ ID NO: 1053128 - DNA, 33 bp, Homo sapien
ttgggacttgagaaagtagcatattaggaagca

SEQ ID NO: 1053129 - DNA, 33 bp, Homo sapien
agagccttaagaacaacttaagatgctacacta

SEQ ID NO: 1053130 - DNA, 33 bp, Homo sapien
agagccttaagaacaatttaagatgctacacta

SEQ ID NO: 1053131 - DNA, 33 bp, Homo sapien
aagtgttaaagatagaatacagttgataattag

SEQ ID NO: 1053132 - DNA, 33 bp, Homo sapien
aagtgttaaagatagactacagttgataattag

SEQ ID NO: 1053133 - DNA, 33 bp, Homo sapien
tggattcctactcagcactttgattgtagctgc

SEQ ID NO: 1053134 - DNA, 33 bp, Homo sapien
tggattcctactcagctctttgattgtagctgc

SEQ ID NO: 1053135 - DNA, 33 bp, Homo sapien
gaacttgaggcacatgcaaatatcttaaaccta

SEQ ID NO: 1053136 - DNA, 33 bp, Homo sapien
gaacttgaggcacatggaaatatcttaaaccta

SEQ ID NO: 1053137 - DNA, 33 bp, Homo sapien
aatgacaaggctgttacaatactgttcgtgaag

SEQ ID NO: 1053138 - DNA, 33 bp, Homo sapien
aatgacaaggctgttataatactgttcgtgaag

SEQ ID NO: 1053139 - DNA, 33 bp, Homo sapien
catagacacttacttaactagaaaacaattctg

SEQ ID NO: 1053140 - DNA, 33 bp, Homo sapien
catagacacttacttagctagaaaacaattctg

SEQ ID NO: 1053141 - DNA, 33 bp, Homo sapien
tacaatgttaagtgtacatcagttaaccgaaca

SEQ ID NO: 1053142 - DNA, 33 bp, Homo sapien
tacaatgttaagtgtatatcagttaaccgaaca

SEQ ID NO: 1053143 - DNA, 33 bp, Homo sapien
aatttcagcagtgtaacatataattgaatagag

SEQ ID NO: 1053144 - DNA, 33 bp, Homo sapien
aatttcagcagtgtaatatataattgaatagag

SEQ ID NO: 1053145 - DNA, 33 bp, Homo sapien
acttgttgtaggaacacaggtaagagactaaac

SEQ ID NO: 1053146 - DNA, 33 bp, Homo sapien
acttgttgtaggaacataggtaagagactaaac

SEQ ID NO: 1053147 - DNA, 33 bp, Homo sapien
atgagcatgagaaacactgaagagtcacagttt

SEQ ID NO: 1053148 - DNA, 33 bp, Homo sapien
atgagcatgagaaacattgaagagtcacagttt

SEQ ID NO: 1053149 - DNA, 33 bp, Homo sapien
atcttggataaactaaaatcagatcttcatctt

SEQ ID NO: 1053150 - DNA, 33 bp, Homo sapien
atcttggataaactaagatcagatcttcatctt

SEQ ID NO: 1053151 - DNA, 33 bp, Homo sapien
cgcactgtagcattgtaaactacgctgaagcca

SEQ ID NO: 1053152 - DNA, 33 bp, Homo sapien
cgcactgtagcattgtgaactacgctgaagcca

SEQ ID NO: 1053153 - DNA, 33 bp, Homo sapien
tccattgtcaataaacaagtgtgttgtggttca

SEQ ID NO: 1053154 - DNA, 33 bp, Homo sapien
tccattgtcaataaacgagtgtgttgtggttca

SEQ ID NO: 1053155 - DNA, 33 bp, Homo sapien
aatctgtcagatataacgtccataacttatttt

SEQ ID NO: 1053156 - DNA, 33 bp, Homo sapien
aatctgtcagatataatgtccataacttatttt

SEQ ID NO: 1053157 - DNA, 33 bp, Homo sapien
cttcctgtgaatgaacaaaccctaagacagagt

SEQ ID NO: 1053158 - DNA, 33 bp, Homo sapien
cttcctgtgaatgaacgaaccctaagacagagt

SEQ ID NO: 1053159 - DNA, 33 bp, Homo sapien
ctgaaatcattccttcacttgctcttagttatt

SEQ ID NO: 1053160 - DNA, 33 bp, Homo sapien
ctgaaatcattccttcgcttgctcttagttatt

SEQ ID NO: 1053161 - DNA, 33 bp, Homo sapien
cactaatggtgaaaacacaacaatgccccaata

SEQ ID NO: 1053162 - DNA, 33 bp, Homo sapien
cactaatggtgaaaacgcaacaatgccccaata

SEQ ID NO: 1053163 - DNA, 33 bp, Homo sapien
agagctttgccttctaagactgacttattttta

SEQ ID NO: 1053164 - DNA, 33 bp, Homo sapien
agagctttgccttctaggactgacttattttta

SEQ ID NO: 1053165 - DNA, 33 bp, Homo sapien
aaactgaaatctctgaaatccctaaaagactgc

SEQ ID NO: 1053166 - DNA, 33 bp, Homo sapien
aaactgaaatctctgacatccctaaaagactgc

SEQ ID NO: 1053167 - DNA, 33 bp, Homo sapien
tcctttctcaccagaaaattgatgaaaccgttg

SEQ ID NO: 1053168 - DNA, 33 bp, Homo sapien
tcctttctcaccagaagattgatgaaaccgttg

SEQ ID NO: 1053169 - DNA, 33 bp, Homo sapien
acagtacctttagccactgaagcagaggccaga

SEQ ID NO: 1053170 - DNA, 33 bp, Homo sapien
acagtacctttagccattgaagcagaggccaga

SEQ ID NO: 1053171 - DNA, 33 bp, Homo sapien
tggcaatctaagcacacaatgtcaaattattta

SEQ ID NO: 1053172 - DNA, 33 bp, Homo sapien
tggcaatctaagcacagaatgtcaaattattta

SEQ ID NO: 1053173 - DNA, 33 bp, Homo sapien
ctggtatgttgaaaagaaatccacactaaggag

SEQ ID NO: 1053174 - DNA, 33 bp, Homo sapien
ctggtatgttgaaaaggaatccacactaaggag

SEQ ID NO: 1053175 - DNA, 33 bp, Homo sapien
agttacttgagaaatcgaatgcacctccttcta

SEQ ID NO: 1053176 - DNA, 33 bp, Homo sapien
agttacttgagaaatctaatgcacctccttcta

SEQ ID NO: 1053177 - DNA, 33 bp, Homo sapien
atgggacatggaggaacgacctacatgggcagg

SEQ ID NO: 1053178 - DNA, 33 bp, Homo sapien
atgggacatggaggaatgacctacatgggcagg

SEQ ID NO: 1053179 - DNA, 33 bp, Homo sapien
gcttgaaatgcaacgaagatttgtccagccagg

SEQ ID NO: 1053180 - DNA, 33 bp, Homo sapien
gcttgaaatgcaacgaggatttgtccagccagg

SEQ ID NO: 1053181 - DNA, 33 bp, Homo sapien
ggatttataatttccaaagtactcttgcatata

SEQ ID NO: 1053182 - DNA, 33 bp, Homo sapien
ggatttataatttccagagtactcttgcatata

SEQ ID NO: 1053183 - DNA, 33 bp, Homo sapien
acatggcgctcaggggaatctccagaaggattg

SEQ ID NO: 1053184 - DNA, 33 bp, Homo sapien
acatggcgctcagggggatctccagaaggattg

SEQ ID NO: 1053185 - DNA, 33 bp, Homo sapien
ttcccaaggataagaactcacaggaacactttt

SEQ ID NO: 1053186 - DNA, 33 bp, Homo sapien
ttcccaaggataagaattcacaggaacactttt

SEQ ID NO: 1053187 - DNA, 33 bp, Homo sapien
attttccctgagagaactaaaaacgtgttttaa

SEQ ID NO: 1053188 - DNA, 33 bp, Homo sapien
attttccctgagagaattaaaaacgtgttttaa

SEQ ID NO: 1053189 - DNA, 33 bp, Homo sapien
gtgccagatgaatgtaccttaaatgtgtcattt

SEQ ID NO: 1053190 - DNA, 33 bp, Homo sapien
gtgccagatgaatgtatcttaaatgtgtcattt

SEQ ID NO: 1053191 - DNA, 33 bp, Homo sapien
tagatataacaaaaggccactagtagaacaaaa

SEQ ID NO: 1053192 - DNA, 33 bp, Homo sapien
tagatataacaaaaggtcactagtagaacaaaa

SEQ ID NO: 1053193 - DNA, 33 bp, Homo sapien
cagtcaatgacggactaaatatatgaaagtggt

SEQ ID NO: 1053194 - DNA, 33 bp, Homo sapien
cagtcaatgacggactgaatatatgaaagtggt

SEQ ID NO: 1053195 - DNA, 33 bp, Homo sapien
ggaggagagcaataagaaaaaatgagacttggt

SEQ ID NO: 1053196 - DNA, 33 bp, Homo sapien
ggaggagagcaataagcaaaaatgagacttggt

SEQ ID NO: 1053197 - DNA, 33 bp, Homo sapien
ttcgtttcatgtgtgacacaacactgcttccga

SEQ ID NO: 1053198 - DNA, 33 bp, Homo sapien
ttcgtttcatgtgtgagacaacactgcttccga

SEQ ID NO: 1053199 - DNA, 33 bp, Homo sapien
acggcaactcagaagacgtggctctaacatttg

SEQ ID NO: 1053200 - DNA, 33 bp, Homo sapien
acggcaactcagaagatgtggctctaacatttg

SEQ ID NO: 1053201 - DNA, 33 bp, Homo sapien
gcatccttgtgtataacgcatctctttttttct

SEQ ID NO: 1053202 - DNA, 33 bp, Homo sapien
gcatccttgtgtataatgcatctctttttttct

SEQ ID NO: 1053203 - DNA, 33 bp, Homo sapien
aatgtctctcagtcacagatgacatagaggagt

SEQ ID NO: 1053204 - DNA, 33 bp, Homo sapien
aatgtctctcagtcacggatgacatagaggagt

SEQ ID NO: 1053205 - DNA, 33 bp, Homo sapien
attggtgtcttgcatagcccagtgttcagagga

SEQ ID NO: 1053206 - DNA, 33 bp, Homo sapien
attggtgtcttgcatatcccagtgttcagagga

SEQ ID NO: 1053207 - DNA, 33 bp, Homo sapien
aaatgtccccatatcacagtgtataataaacca

SEQ ID NO: 1053208 - DNA, 33 bp, Homo sapien
aaatgtccccatatcagagtgtataataaacca

SEQ ID NO: 1053209 - DNA, 33 bp, Homo sapien
gcaacaagtagaagtacagtctcaggggaagct

SEQ ID NO: 1053210 - DNA, 33 bp, Homo sapien
gcaacaagtagaagtagagtctcaggggaagct

SEQ ID NO: 1053211 - DNA, 33 bp, Homo sapien
acaaaacggcaaaaaacgtatcagcaaacaaca

SEQ ID NO: 1053212 - DNA, 33 bp, Homo sapien
acaaaacggcaaaaaatgtatcagcaaacaaca

SEQ ID NO: 1053213 - DNA, 33 bp, Homo sapien
agcagttctggccttaagtttcagattcatgca

SEQ ID NO: 1053214 - DNA, 33 bp, Homo sapien
agcagttctggccttatgtttcagattcatgca

SEQ ID NO: 1053215 - DNA, 33 bp, Homo sapien
actttatggcttcaaaaaacaatcactttatga

SEQ ID NO: 1053216 - DNA, 33 bp, Homo sapien
actttatggcttcaaacaacaatcactttatga

SEQ ID NO: 1053217 - DNA, 33 bp, Homo sapien
ctgagtatttcccaaaagtctcaaaagaagtag

SEQ ID NO: 1053218 - DNA, 33 bp, Homo sapien
ctgagtatttcccaaatgtctcaaaagaagtag

SEQ ID NO: 1053219 - DNA, 33 bp, Homo sapien
gggagcagatttgagaaaagaccagggcttgag

SEQ ID NO: 1053220 - DNA, 33 bp, Homo sapien
gggagcagatttgagataagaccagggcttgag

SEQ ID NO: 1053221 - DNA, 33 bp, Homo sapien
gtggtcctacttaccaggttgctcagaaaaata

SEQ ID NO: 1053222 - DNA, 33 bp, Homo sapien
gtggtcctacttaccatgttgctcagaaaaata

SEQ ID NO: 1053223 - DNA, 33 bp, Homo sapien
tgatctgaaaatataacggctgagacacttaat

SEQ ID NO: 1053224 - DNA, 33 bp, Homo sapien
tgatctgaaaatataatggctgagacacttaat

SEQ ID NO: 1053225 - DNA, 33 bp, Homo sapien
ttttgacttttaagtgacaatcctattcttctt

SEQ ID NO: 1053226 - DNA, 33 bp, Homo sapien
ttttgacttttaagtggcaatcctattcttctt

SEQ ID NO: 1053227 - DNA, 33 bp, Homo sapien
atacaggctatcgatacgactttccactgtcaa

SEQ ID NO: 1053228 - DNA, 33 bp, Homo sapien
atacaggctatcgatatgactttccactgtcaa

SEQ ID NO: 1053229 - DNA, 33 bp, Homo sapien
gtgaagcattctacaaccttccaattaagtctc

SEQ ID NO: 1053230 - DNA, 33 bp, Homo sapien
gtgaagcattctacaatcttccaattaagtctc

SEQ ID NO: 1053231 - DNA, 33 bp, Homo sapien
catgaactctctaatacaccaggttgcctatta

SEQ ID NO: 1053232 - DNA, 33 bp, Homo sapien
catgaactctctaatataccaggttgcctatta

SEQ ID NO: 1053233 - DNA, 33 bp, Homo sapien
actgctgaatggtctccacgacccggacacatc

SEQ ID NO: 1053234 - DNA, 33 bp, Homo sapien
actgctgaatggtctctacgacccggacacatc

SEQ ID NO: 1053235 - DNA, 33 bp, Homo sapien
atcttgaaagccataacgagaagtcagctctta

SEQ ID NO: 1053236 - DNA, 33 bp, Homo sapien
atcttgaaagccataatgagaagtcagctctta

SEQ ID NO: 1053237 - DNA, 33 bp, Homo sapien
agggccaacacacagaagaaagagggcctgatc

SEQ ID NO: 1053238 - DNA, 33 bp, Homo sapien
agggccaacacacagaggaaagagggcctgatc

SEQ ID NO: 1053239 - DNA, 33 bp, Homo sapien
gtctccagataatggcaaataatgatttaaaac

SEQ ID NO: 1053240 - DNA, 33 bp, Homo sapien
gtctccagataatggcgaataatgatttaaaac

SEQ ID NO: 1053241 - DNA, 33 bp, Homo sapien
actactctatcacatcaagctgtcattcacatg

SEQ ID NO: 1053242 - DNA, 33 bp, Homo sapien
actactctatcacatcgagctgtcattcacatg

SEQ ID NO: 1053243 - DNA, 33 bp, Homo sapien
ttcagttccttcatcaaaaaaatggagaaaaat

SEQ ID NO: 1053244 - DNA, 33 bp, Homo sapien
ttcagttccttcatcagaaaaatggagaaaaat

SEQ ID NO: 1053245 - DNA, 33 bp, Homo sapien
agtgtgggacagtctgaaaagtgatagcattta

SEQ ID NO: 1053246 - DNA, 33 bp, Homo sapien
agtgtgggacagtctgcaaagtgatagcattta

SEQ ID NO: 1053247 - DNA, 33 bp, Homo sapien
ataaagttctagaaccaaaataattcctgtaat

SEQ ID NO: 1053248 - DNA, 33 bp, Homo sapien
ataaagttctagaaccgaaataattcctgtaat

SEQ ID NO: 1053249 - DNA, 33 bp, Homo sapien
gttttattaaacaagcaatctttggtcacttcc

SEQ ID NO: 1053250 - DNA, 33 bp, Homo sapien
gttttattaaacaagcgatctttggtcacttcc

SEQ ID NO: 1053251 - DNA, 33 bp, Homo sapien
ctgctaagtgacagaagtccgtctcgaaaggct

SEQ ID NO: 1053252 - DNA, 33 bp, Homo sapien
ctgctaagtgacagaattccgtctcgaaaggct

SEQ ID NO: 1053253 - DNA, 33 bp, Homo sapien
tcatgcttttattgtcaatgtaagaagtctttg

SEQ ID NO: 1053254 - DNA, 33 bp, Homo sapien
tcatgcttttattgtcgatgtaagaagtctttg

SEQ ID NO: 1053255 - DNA, 33 bp, Homo sapien
agaacaaactgatacactggacttcatatgcat

SEQ ID NO: 1053256 - DNA, 33 bp, Homo sapien
agaacaaactgatacattggacttcatatgcat

SEQ ID NO: 1053257 - DNA, 33 bp, Homo sapien
ctggtagccacagtcaatctttctgaggtaaac

SEQ ID NO: 1053258 - DNA, 33 bp, Homo sapien
ctggtagccacagtcattctttctgaggtaaac

SEQ ID NO: 1053259 - DNA, 33 bp, Homo sapien
aagttaatgattttccaactatgtaaacaacct

SEQ ID NO: 1053260 - DNA, 33 bp, Homo sapien
aagttaatgattttccgactatgtaaacaacct

SEQ ID NO: 1053261 - DNA, 33 bp, Homo sapien
ggtgatgcgaggcctaaggaaaattttaaatta

SEQ ID NO: 1053262 - DNA, 33 bp, Homo sapien
ggtgatgcgaggcctatggaaaattttaaatta

SEQ ID NO: 1053263 - DNA, 33 bp, Homo sapien
agcacaacaaccaagaagcatactctaaagaaa

SEQ ID NO: 1053264 - DNA, 33 bp, Homo sapien
agcacaacaaccaagaggcatactctaaagaaa

SEQ ID NO: 1053265 - DNA, 33 bp, Homo sapien
gcatttttctgtgcataacacgtgtaatacaaa

SEQ ID NO: 1053266 - DNA, 33 bp, Homo sapien
gcatttttctgtgcatgacacgtgtaatacaaa

SEQ ID NO: 1053267 - DNA, 33 bp, Homo sapien
gagctactagacataacaatcacaaaatctcag

SEQ ID NO: 1053268 - DNA, 33 bp, Homo sapien
gagctactagacataagaatcacaaaatctcag

SEQ ID NO: 1053269 - DNA, 33 bp, Homo sapien
gctcaggattacttgaaattgtgtgaccaggag

SEQ ID NO: 1053270 - DNA, 33 bp, Homo sapien
gctcaggattacttgacattgtgtgaccaggag

SEQ ID NO: 1053271 - DNA, 33 bp, Homo sapien
aactcactgattacaaattgccctttctggaat

SEQ ID NO: 1053272 - DNA, 33 bp, Homo sapien
aactcactgattacaagttgccctttctggaat

SEQ ID NO: 1053273 - DNA, 33 bp, Homo sapien
ggtaagaaactatagaagtaggagctgtttcag

SEQ ID NO: 1053274 - DNA, 33 bp, Homo sapien
ggtaagaaactatagatgtaggagctgtttcag

SEQ ID NO: 1053275 - DNA, 33 bp, Homo sapien
tctcataatccagacactaaatttctggtttgg

SEQ ID NO: 1053276 - DNA, 33 bp, Homo sapien
tctcataatccagacattaaatttctggtttgg

SEQ ID NO: 1053277 - DNA, 33 bp, Homo sapien
ggtggtgcatatcccaatcaccctgatgtgatc

SEQ ID NO: 1053278 - DNA, 33 bp, Homo sapien
ggtggtgcatatcccagtcaccctgatgtgatc

SEQ ID NO: 1053279 - DNA, 33 bp, Homo sapien
tcaaatattcttgctaaccatcttttgtttctc

SEQ ID NO: 1053280 - DNA, 33 bp, Homo sapien
tcaaatattcttgctatccatcttttgtttctc

SEQ ID NO: 1053281 - DNA, 33 bp, Homo sapien
taggcagtctcttttaaaatatgctaaataaat

SEQ ID NO: 1053282 - DNA, 33 bp, Homo sapien
taggcagtctcttttagaatatgctaaataaat

SEQ ID NO: 1053283 - DNA, 33 bp, Homo sapien
ttaaaaacatttcaacaaatttctctgctattt

SEQ ID NO: 1053284 - DNA, 33 bp, Homo sapien
ttaaaaacatttcaacgaatttctctgctattt

SEQ ID NO: 1053285 - DNA, 33 bp, Homo sapien
ataggaagtccatttgcattatgtagtttagtt

SEQ ID NO: 1053286 - DNA, 33 bp, Homo sapien
ataggaagtccatttgtattatgtagtttagtt

SEQ ID NO: 1053287 - DNA, 33 bp, Homo sapien
tatagattccttcacaatccaatgagtttataa

SEQ ID NO: 1053288 - DNA, 33 bp, Homo sapien
tatagattccttcacactccaatgagtttataa

SEQ ID NO: 1053289 - DNA, 33 bp, Homo sapien
tcaacgagttgacctccgaatatgtgtacacgg

SEQ ID NO: 1053290 - DNA, 33 bp, Homo sapien
tcaacgagttgacctctgaatatgtgtacacgg

SEQ ID NO: 1053291 - DNA, 33 bp, Homo sapien
aaaactaacgcaatctcaatcactggaatagcc

SEQ ID NO: 1053292 - DNA, 33 bp, Homo sapien
aaaactaacgcaatctgaatcactggaatagcc

SEQ ID NO: 1053293 - DNA, 33 bp, Homo sapien
atgtctctatttttgacggaagaaacttgaaga

SEQ ID NO: 1053294 - DNA, 33 bp, Homo sapien
atgtctctatttttgatggaagaaacttgaaga

SEQ ID NO: 1053295 - DNA, 33 bp, Homo sapien
agtgaaaatgttggagcacggaactctaaaaaa

SEQ ID NO: 1053296 - DNA, 33 bp, Homo sapien
agtgaaaatgttggagtacggaactctaaaaaa

SEQ ID NO: 1053297 - DNA, 33 bp, Homo sapien
agcacttggggcccacggaatcactagaatacc

SEQ ID NO: 1053298 - DNA, 33 bp, Homo sapien
agcacttggggcccactgaatcactagaatacc

SEQ ID NO: 1053299 - DNA, 33 bp, Homo sapien
tttgaagtaatctctcagaatgagtacctcttt

SEQ ID NO: 1053300 - DNA, 33 bp, Homo sapien
tttgaagtaatctctcggaatgagtacctcttt

SEQ ID NO: 1053301 - DNA, 33 bp, Homo sapien
tcattttacattcctaacagcggtgaaggagag

SEQ ID NO: 1053302 - DNA, 33 bp, Homo sapien
tcattttacattcctaccagcggtgaaggagag

SEQ ID NO: 1053303 - DNA, 33 bp, Homo sapien
gaagagtaaccttaatgaaatatgcccagagtg

SEQ ID NO: 1053304 - DNA, 33 bp, Homo sapien
gaagagtaaccttaattaaatatgcccagagtg

SEQ ID NO: 1053305 - DNA, 33 bp, Homo sapien
ttgggcaaataatagaagctgtcacacaaccta

SEQ ID NO: 1053306 - DNA, 33 bp, Homo sapien
ttgggcaaataatagacgctgtcacacaaccta

SEQ ID NO: 1053307 - DNA, 33 bp, Homo sapien
gggaagaagacattaaagattgcacgataaata

SEQ ID NO: 1053308 - DNA, 33 bp, Homo sapien
gggaagaagacattaatgattgcacgataaata

SEQ ID NO: 1053309 - DNA, 33 bp, Homo sapien
acagagagatcctgatgaattgcatattggttc

SEQ ID NO: 1053310 - DNA, 33 bp, Homo sapien
acagagagatcctgattaattgcatattggttc

SEQ ID NO: 1053311 - DNA, 33 bp, Homo sapien
tactgctactttggaagacaatttgacagtttc

SEQ ID NO: 1053312 - DNA, 33 bp, Homo sapien
tactgctactttggaatacaatttgacagtttc

SEQ ID NO: 1053313 - DNA, 33 bp, Homo sapien
tcatttgaatcttataagacaatttgcttcagt

SEQ ID NO: 1053314 - DNA, 33 bp, Homo sapien
tcatttgaatcttataggacaatttgcttcagt

SEQ ID NO: 1053315 - DNA, 33 bp, Homo sapien
ttttagagtattggcaagagaatgagatgtttg

SEQ ID NO: 1053316 - DNA, 33 bp, Homo sapien
ttttagagtattggcaggagaatgagatgtttg

SEQ ID NO: 1053317 - DNA, 33 bp, Homo sapien
tgtcaataggaggaacaagtaaaaccacggaag

SEQ ID NO: 1053318 - DNA, 33 bp, Homo sapien
tgtcaataggaggaacgagtaaaaccacggaag

SEQ ID NO: 1053319 - DNA, 33 bp, Homo sapien
attagagacctaaaacaaatttagcacatcatt

SEQ ID NO: 1053320 - DNA, 33 bp, Homo sapien
attagagacctaaaacgaatttagcacatcatt

SEQ ID NO: 1053321 - DNA, 33 bp, Homo sapien
tgtctttccttcatcagtctgcccttgtctcta

SEQ ID NO: 1053322 - DNA, 33 bp, Homo sapien
tgtctttccttcatcattctgcccttgtctcta

SEQ ID NO: 1053323 - DNA, 33 bp, Homo sapien
tttgtgatctgcctcaccggaattcagaatctt

SEQ ID NO: 1053324 - DNA, 33 bp, Homo sapien
tttgtgatctgcctcatcggaattcagaatctt

SEQ ID NO: 1053325 - DNA, 33 bp, Homo sapien
tgtgtgttaaaaactccactcccttggtgctca

SEQ ID NO: 1053326 - DNA, 33 bp, Homo sapien
tgtgtgttaaaaactctactcccttggtgctca

SEQ ID NO: 1053327 - DNA, 33 bp, Homo sapien
taataaggaactctataaaacacttaatacaaa

SEQ ID NO: 1053328 - DNA, 33 bp, Homo sapien
taataaggaactctatgaaacacttaatacaaa

SEQ ID NO: 1053329 - DNA, 33 bp, Homo sapien
ccctggcactgtattcaaaaaattattggacta

SEQ ID NO: 1053330 - DNA, 33 bp, Homo sapien
ccctggcactgtattccaaaaattattggacta

SEQ ID NO: 1053331 - DNA, 33 bp, Homo sapien
tagttgccaacaaataatagtcttttcagcatc

SEQ ID NO: 1053332 - DNA, 33 bp, Homo sapien
tagttgccaacaaatagtagtcttttcagcatc

SEQ ID NO: 1053333 - DNA, 33 bp, Homo sapien
ttaaaatgttcaaaccacttaatcgttgtggat

SEQ ID NO: 1053334 - DNA, 33 bp, Homo sapien
ttaaaatgttcaaacctcttaatcgttgtggat

SEQ ID NO: 1053335 - DNA, 33 bp, Homo sapien
ataaaaataatcgagaagtggattttagtttca

SEQ ID NO: 1053336 - DNA, 33 bp, Homo sapien
ataaaaataatcgagatgtggattttagtttca

SEQ ID NO: 1053337 - DNA, 33 bp, Homo sapien
tatttcaaggtaccccgattttctgtctcttcc

SEQ ID NO: 1053338 - DNA, 33 bp, Homo sapien
tatttcaaggtacccctattttctgtctcttcc

SEQ ID NO: 1053339 - DNA, 33 bp, Homo sapien
attgtactaagtgaaaacacaaaatgatatatg

SEQ ID NO: 1053340 - DNA, 33 bp, Homo sapien
attgtactaagtgaaagcacaaaatgatatatg

SEQ ID NO: 1053341 - DNA, 33 bp, Homo sapien
tttcctcagagcagtaccatcctttaagcttag

SEQ ID NO: 1053342 - DNA, 33 bp, Homo sapien
tttcctcagagcagtatcatcctttaagcttag

SEQ ID NO: 1053343 - DNA, 33 bp, Homo sapien
taaatgtataaaatccagaggaaattcatgtag

SEQ ID NO: 1053344 - DNA, 33 bp, Homo sapien
taaatgtataaaatccggaggaaattcatgtag

SEQ ID NO: 1053345 - DNA, 33 bp, Homo sapien
tgcatagattaggtacccaaaaaagagactcat

SEQ ID NO: 1053346 - DNA, 33 bp, Homo sapien
tgcatagattaggtactcaaaaaagagactcat

SEQ ID NO: 1053347 - DNA, 33 bp, Homo sapien
cagggtaatatcattgccaaagttctttaatcc

SEQ ID NO: 1053348 - DNA, 33 bp, Homo sapien
cagggtaatatcattgtcaaagttctttaatcc

SEQ ID NO: 1053349 - DNA, 33 bp, Homo sapien
cagtgttgaatacagactagggctaggcgatgg

SEQ ID NO: 1053350 - DNA, 33 bp, Homo sapien
cagtgttgaatacagattagggctaggcgatgg

SEQ ID NO: 1053351 - DNA, 33 bp, Homo sapien
cttatgtagttacttacatggatactgcctctg

SEQ ID NO: 1053352 - DNA, 33 bp, Homo sapien
cttatgtagttacttatatggatactgcctctg

SEQ ID NO: 1053353 - DNA, 33 bp, Homo sapien
aacaaatttggtaccacgcaaggtcctatgaaa

SEQ ID NO: 1053354 - DNA, 33 bp, Homo sapien
aacaaatttggtaccatgcaaggtcctatgaaa

SEQ ID NO: 1053355 - DNA, 33 bp, Homo sapien
taaaatcttatcacagaaatgtttatttcatcg

SEQ ID NO: 1053356 - DNA, 33 bp, Homo sapien
taaaatcttatcacagtaatgtttatttcatcg

SEQ ID NO: 1053357 - DNA, 33 bp, Homo sapien
tgccagcagggggagcgcttaaaaatatgcctg

SEQ ID NO: 1053358 - DNA, 33 bp, Homo sapien
tgccagcagggggagctcttaaaaatatgcctg

SEQ ID NO: 1053359 - DNA, 33 bp, Homo sapien
gaacaccatttagatacatggttcaccagaaaa

SEQ ID NO: 1053360 - DNA, 33 bp, Homo sapien
gaacaccatttagatatatggttcaccagaaaa

SEQ ID NO: 1053361 - DNA, 33 bp, Homo sapien
ttggaaatggaactcaaatttactttcccatat

SEQ ID NO: 1053362 - DNA, 33 bp, Homo sapien
ttggaaatggaactcagatttactttcccatat

SEQ ID NO: 1053363 - DNA, 33 bp, Homo sapien
tcactggtaaaagtaacaacatagtcaaataca

SEQ ID NO: 1053364 - DNA, 33 bp, Homo sapien
tcactggtaaaagtaagaacatagtcaaataca

SEQ ID NO: 1053365 - DNA, 33 bp, Homo sapien
tggaacacgaaagattcaaactcatagaaaaag

SEQ ID NO: 1053366 - DNA, 33 bp, Homo sapien
tggaacacgaaagattgaaactcatagaaaaag

SEQ ID NO: 1053367 - DNA, 33 bp, Homo sapien
ggaaatgacttttaacacaaagatgaagctatg

SEQ ID NO: 1053368 - DNA, 33 bp, Homo sapien
ggaaatgacttttaacgcaaagatgaagctatg

SEQ ID NO: 1053369 - DNA, 33 bp, Homo sapien
gagggaatcagtaagacggtacaaccagttcaa

SEQ ID NO: 1053370 - DNA, 33 bp, Homo sapien
gagggaatcagtaagatggtacaaccagttcaa

SEQ ID NO: 1053371 - DNA, 33 bp, Homo sapien
accaagaatgatgaaacgaatttgcttaattga

SEQ ID NO: 1053372 - DNA, 33 bp, Homo sapien
accaagaatgatgaaatgaatttgcttaattga

SEQ ID NO: 1053373 - DNA, 33 bp, Homo sapien
attagatctcaattcacaaaatacagcatgata

SEQ ID NO: 1053374 - DNA, 33 bp, Homo sapien
attagatctcaattcagaaaatacagcatgata

SEQ ID NO: 1053375 - DNA, 33 bp, Homo sapien
ccgcctcaatcagcacagtcaaatctaaatata

SEQ ID NO: 1053376 - DNA, 33 bp, Homo sapien
ccgcctcaatcagcaccgtcaaatctaaatata

SEQ ID NO: 1053377 - DNA, 33 bp, Homo sapien
gagagaggaggtcccacgttcaatttctaatct

SEQ ID NO: 1053378 - DNA, 33 bp, Homo sapien
gagagaggaggtcccatgttcaatttctaatct

SEQ ID NO: 1053379 - DNA, 33 bp, Homo sapien
tttatacattgtttaacaactgccattttttat

SEQ ID NO: 1053380 - DNA, 33 bp, Homo sapien
tttatacattgtttaataactgccattttttat

SEQ ID NO: 1053381 - DNA, 33 bp, Homo sapien
ctgggatcccttatacagtaaccatattagtgg

SEQ ID NO: 1053382 - DNA, 33 bp, Homo sapien
ctgggatcccttataccgtaaccatattagtgg

SEQ ID NO: 1053383 - DNA, 33 bp, Homo sapien
catgtaaagaactgaaaaagagaacaagcagca

SEQ ID NO: 1053384 - DNA, 33 bp, Homo sapien
catgtaaagaactgaagaagagaacaagcagca

SEQ ID NO: 1053385 - DNA, 33 bp, Homo sapien
gtctaatctgaacttacgccattatgctctttg

SEQ ID NO: 1053386 - DNA, 33 bp, Homo sapien
gtctaatctgaacttaggccattatgctctttg

SEQ ID NO: 1053387 - DNA, 33 bp, Homo sapien
tattctcttaacatacaattcagcaactgccct

SEQ ID NO: 1053388 - DNA, 33 bp, Homo sapien
tattctcttaacatacgattcagcaactgccct

SEQ ID NO: 1053389 - DNA, 33 bp, Homo sapien
tacagcatttctcctacgttttttcctagtact

SEQ ID NO: 1053390 - DNA, 33 bp, Homo sapien
tacagcatttctcctatgttttttcctagtact

SEQ ID NO: 1053391 - DNA, 33 bp, Homo sapien
cagtgagtgaggcaaacgtgatagctgctacac

SEQ ID NO: 1053392 - DNA, 33 bp, Homo sapien
cagtgagtgaggcaaatgtgatagctgctacac

SEQ ID NO: 1053393 - DNA, 33 bp, Homo sapien
tattccaaataaagcaataataaagacaagcac

SEQ ID NO: 1053394 - DNA, 33 bp, Homo sapien
tattccaaataaagcagtaataaagacaagcac

SEQ ID NO: 1053395 - DNA, 33 bp, Homo sapien
tacaaatcaaattatacggtggcaatacagtga

SEQ ID NO: 1053396 - DNA, 33 bp, Homo sapien
tacaaatcaaattatatggtggcaatacagtga

SEQ ID NO: 1053397 - DNA, 33 bp, Homo sapien
aagggatacagtaaagcagcttgtggaaagctt

SEQ ID NO: 1053398 - DNA, 33 bp, Homo sapien
aagggatacagtaaaggagcttgtggaaagctt

SEQ ID NO: 1053399 - DNA, 33 bp, Homo sapien
tgtaaatgaggacaaaacagtgttattgcctca

SEQ ID NO: 1053400 - DNA, 33 bp, Homo sapien
tgtaaatgaggacaaatcagtgttattgcctca

SEQ ID NO: 1053401 - DNA, 33 bp, Homo sapien
ctcaaagggatcgatcaatagcattttacactt

SEQ ID NO: 1053402 - DNA, 33 bp, Homo sapien
ctcaaagggatcgatcgatagcattttacactt

SEQ ID NO: 1053403 - DNA, 33 bp, Homo sapien
ttgtggcttaaattcaaaacatttccagggtca

SEQ ID NO: 1053404 - DNA, 33 bp, Homo sapien
ttgtggcttaaattcagaacatttccagggtca

SEQ ID NO: 1053405 - DNA, 33 bp, Homo sapien
gtacttcccttttcacgactaattgcccttaac

SEQ ID NO: 1053406 - DNA, 33 bp, Homo sapien
gtacttcccttttcactactaattgcccttaac

SEQ ID NO: 1053407 - DNA, 33 bp, Homo sapien
cccaaattctgtaacaactgaaggtaataaaca

SEQ ID NO: 1053408 - DNA, 33 bp, Homo sapien
cccaaattctgtaacagctgaaggtaataaaca

SEQ ID NO: 1053409 - DNA, 33 bp, Homo sapien
ctgcatgacaactagaagtgataactggattca

SEQ ID NO: 1053410 - DNA, 33 bp, Homo sapien
ctgcatgacaactagacgtgataactggattca

SEQ ID NO: 1053411 - DNA, 33 bp, Homo sapien
tttcatgctatctggacaatcaattcattggta

SEQ ID NO: 1053412 - DNA, 33 bp, Homo sapien
tttcatgctatctggataatcaattcattggta

SEQ ID NO: 1053413 - DNA, 33 bp, Homo sapien
aaagttcttcatcatagaagttgccttacatag

SEQ ID NO: 1053414 - DNA, 33 bp, Homo sapien
aaagttcttcatcatataagttgccttacatag

SEQ ID NO: 1053415 - DNA, 33 bp, Homo sapien
taagaaattattcctaaagcaggtcttcccaaa

SEQ ID NO: 1053416 - DNA, 33 bp, Homo sapien
taagaaattattcctacagcaggtcttcccaaa

SEQ ID NO: 1053417 - DNA, 33 bp, Homo sapien
caactacagctttaaaaattagtaaaatatata

SEQ ID NO: 1053418 - DNA, 33 bp, Homo sapien
caactacagctttaaacattagtaaaatatata

SEQ ID NO: 1053419 - DNA, 33 bp, Homo sapien
gtaacttgctcctcaaaacagaattcagcaatg

SEQ ID NO: 1053420 - DNA, 33 bp, Homo sapien
gtaacttgctcctcaagacagaattcagcaatg

SEQ ID NO: 1053421 - DNA, 33 bp, Homo sapien
cacctgttttaaatcaatatcaaccaatttcag

SEQ ID NO: 1053422 - DNA, 33 bp, Homo sapien
cacctgttttaaatcagtatcaaccaatttcag

SEQ ID NO: 1053423 - DNA, 33 bp, Homo sapien
gtcttcaaagatggcaataactatgtttcccat

SEQ ID NO: 1053424 - DNA, 33 bp, Homo sapien
gtcttcaaagatggcagtaactatgtttcccat

SEQ ID NO: 1053425 - DNA, 33 bp, Homo sapien
gatatgctgtataaaacttgtggatgaagtaaa

SEQ ID NO: 1053426 - DNA, 33 bp, Homo sapien
gatatgctgtataaaagttgtggatgaagtaaa

SEQ ID NO: 1053427 - DNA, 33 bp, Homo sapien
ccctaaggatattaccagctcggagctaatttt

SEQ ID NO: 1053428 - DNA, 33 bp, Homo sapien
ccctaaggatattaccggctcggagctaatttt

SEQ ID NO: 1053429 - DNA, 33 bp, Homo sapien
ggagaccattgccagaaaaagagcagtaggtgc

SEQ ID NO: 1053430 - DNA, 33 bp, Homo sapien
ggagaccattgccagagaaagagcagtaggtgc

SEQ ID NO: 1053431 - DNA, 33 bp, Homo sapien
ggtttctagaaagaaaagaatgtctgcaattag

SEQ ID NO: 1053432 - DNA, 33 bp, Homo sapien
ggtttctagaaagaaaggaatgtctgcaattag

SEQ ID NO: 1053433 - DNA, 33 bp, Homo sapien
tactgtaagaactgcaaccctgttttctggctg

SEQ ID NO: 1053434 - DNA, 33 bp, Homo sapien
tactgtaagaactgcagccctgttttctggctg

SEQ ID NO: 1053435 - DNA, 33 bp, Homo sapien
gatctcttctcacttacgccagaacttataaga

SEQ ID NO: 1053436 - DNA, 33 bp, Homo sapien
gatctcttctcacttatgccagaacttataaga

SEQ ID NO: 1053437 - DNA, 33 bp, Homo sapien
ctgtggtccaagagtacgtgtagtgtgatttca

SEQ ID NO: 1053438 - DNA, 33 bp, Homo sapien
ctgtggtccaagagtatgtgtagtgtgatttca

SEQ ID NO: 1053439 - DNA, 33 bp, Homo sapien
cgtgtatgggaagttacatcaagatttaactaa

SEQ ID NO: 1053440 - DNA, 33 bp, Homo sapien
cgtgtatgggaagttagatcaagatttaactaa

SEQ ID NO: 1053441 - DNA, 33 bp, Homo sapien
tatagcagcatcaaaactgattatctgtacccc

SEQ ID NO: 1053442 - DNA, 33 bp, Homo sapien
tatagcagcatcaaaattgattatctgtacccc

SEQ ID NO: 1053443 - DNA, 33 bp, Homo sapien
aacttatatagaaagccgaaaagggaatatgga

SEQ ID NO: 1053444 - DNA, 33 bp, Homo sapien
aacttatatagaaagctgaaaagggaatatgga

SEQ ID NO: 1053445 - DNA, 33 bp, Homo sapien
tcaggagggaggaaaacgcagtaaagagtaagg

SEQ ID NO: 1053446 - DNA, 33 bp, Homo sapien
tcaggagggaggaaaatgcagtaaagagtaagg

SEQ ID NO: 1053447 - DNA, 33 bp, Homo sapien
ctttatgttttataagcaacgaatcacacagca

SEQ ID NO: 1053448 - DNA, 33 bp, Homo sapien
ctttatgttttataagtaacgaatcacacagca

SEQ ID NO: 1053449 - DNA, 33 bp, Homo sapien
agtaatctcaaatgacgggaagaaaactcatat

SEQ ID NO: 1053450 - DNA, 33 bp, Homo sapien
agtaatctcaaatgactggaagaaaactcatat

SEQ ID NO: 1053451 - DNA, 33 bp, Homo sapien
tgactcaccttgtttcaattcccatattaatat

SEQ ID NO: 1053452 - DNA, 33 bp, Homo sapien
tgactcaccttgtttcgattcccatattaatat

SEQ ID NO: 1053453 - DNA, 33 bp, Homo sapien
gaatgagatcactgaaatattgctgataaaaaa

SEQ ID NO: 1053454 - DNA, 33 bp, Homo sapien
gaatgagatcactgaactattgctgataaaaaa

SEQ ID NO: 1053455 - DNA, 33 bp, Homo sapien
cttcatatagcagggaatattttaggttatgaa

SEQ ID NO: 1053456 - DNA, 33 bp, Homo sapien
cttcatatagcagggagtattttaggttatgaa

SEQ ID NO: 1053457 - DNA, 33 bp, Homo sapien
atgggtacatagcttacacgacattttccggga

SEQ ID NO: 1053458 - DNA, 33 bp, Homo sapien
atgggtacatagcttagacgacattttccggga

SEQ ID NO: 1053459 - DNA, 33 bp, Homo sapien
acatcttttatgggcgaattcttagtcctagaa

SEQ ID NO: 1053460 - DNA, 33 bp, Homo sapien
acatcttttatgggcgcattcttagtcctagaa

SEQ ID NO: 1053461 - DNA, 33 bp, Homo sapien
gaaaatattaatagcacctgggaattaaaagca

SEQ ID NO: 1053462 - DNA, 33 bp, Homo sapien
gaaaatattaatagcatctgggaattaaaagca

SEQ ID NO: 1053463 - DNA, 33 bp, Homo sapien
ctgttgtaaattctacactagatccatattttg

SEQ ID NO: 1053464 - DNA, 33 bp, Homo sapien
ctgttgtaaattctacgctagatccatattttg

SEQ ID NO: 1053465 - DNA, 33 bp, Homo sapien
ataacatatttatacaaactgaacaaaagactg

SEQ ID NO: 1053466 - DNA, 33 bp, Homo sapien
ataacatatttatacagactgaacaaaagactg

SEQ ID NO: 1053467 - DNA, 33 bp, Homo sapien
tgtagctgctgtgttcacattataaaggcacag

SEQ ID NO: 1053468 - DNA, 33 bp, Homo sapien
tgtagctgctgtgttcccattataaaggcacag

SEQ ID NO: 1053469 - DNA, 33 bp, Homo sapien
tgaactcacttgtcaaagttacatcagataaat

SEQ ID NO: 1053470 - DNA, 33 bp, Homo sapien
tgaactcacttgtcaacgttacatcagataaat

SEQ ID NO: 1053471 - DNA, 33 bp, Homo sapien
attaagaagtgaactacggccctaggttttcac

SEQ ID NO: 1053472 - DNA, 33 bp, Homo sapien
attaagaagtgaactatggccctaggttttcac

SEQ ID NO: 1053473 - DNA, 33 bp, Homo sapien
aggcctcggttgaacacaagcagacggcaagcc

SEQ ID NO: 1053474 - DNA, 33 bp, Homo sapien
aggcctcggttgaacagaagcagacggcaagcc

SEQ ID NO: 1053475 - DNA, 33 bp, Homo sapien
agtttctcctcattggaaactggtaaaattctt

SEQ ID NO: 1053476 - DNA, 33 bp, Homo sapien
agtttctcctcattgggaactggtaaaattctt

SEQ ID NO: 1053477 - DNA, 33 bp, Homo sapien
tgtgtgcactctgttacgttaagtatatcttat

SEQ ID NO: 1053478 - DNA, 33 bp, Homo sapien
tgtgtgcactctgttaggttaagtatatcttat
